United States Patent Application Publication US 2011/0183924 A1 - sequence listing, part 55

SEQ ID NO: 169352 - DNA, 606 bp, Homo sapiens
tggtgtgacagagcatgagatggtcagtagcacctagaagatcggtaggtgcagggatgtccatggggcaggatggacagaggacacatgggccacggcctctgcctggctgagtggacagaggccgctctgggtgggggaaacggtgccctcactgccctccagcctcagtcctggttggagtgagatgcccaagaggcaggggaggtcctagggctctgaagggctgctctctagggcttcctggcgccagcctccactgggtccttccccattgacacctgtgcccaggaaggtagctaagaatggaggagctcgggctcgcctggctgcttctgatgctggcgtgcgtgtgcatgcctgtgtgcgtgtgtgtgtgtgtgtgtgtgtgtgtgtgtgtgtcagaatgggaggaggcactgtcttcatcctccctcttctccgtgtcctcactcctcagctctcatttcttcctgatggcccaagtcactgccccacccccaggctgtcatgcagtgattttccactaccacttgtatctctttcagattgtcaaaagaggtcagaagttcttcagctttttaggagctgtcaccaaacacattt

SEQ ID NO: 169353 - DNA, 532 bp, Homo sapiens
tggtgtgacagagcatgagatggtcagtagcacctagaagatcggtaggtgcagggatgtccatggggcaggatggacagaggacacatgggccacggcctctgcctggctgagtggacagaggccgctctgggtgggggaaacggtgccctcactgccctccagcctcagtcctggttggagtgagatgcccaagaggcaggggaggtcctagggctctgaagggctgctctctagggcttcctggcgccagcctccactgggtccttccccattgacacctgtgcccaggaaggtagctaagaatggaggagctcgggctcgcctggctgcttctgatgctggcgtgcgtgtgcatgtacatgtgaatgtgtgcagatgtagtatgtgcatgtaatgtgtgcacatgcactgtttgaatatatgtgtgtacctgtgtgtgtactgtgtggttgggtgtgtacttgtgtgtgcgtgtatgtgtgtgtgaacgtgtgtgtgatgtgtgtcttaagtggggtgcttatctgct

SEQ ID NO: 169354 - DNA, 317 bp, Homo sapiens
tgttgtctgacacttagcctgactcctgtcctgaaatcagctcatccattctggttcatccagttcttcagactggaaggctgacagcttcagtggccaagtggggtgaggctgaagatggaattaaggttgttaatcagctgagcttgagatgggagatcatctgggtgaacccagtgtcatcacaagggtcttaaaatgaagaagacggaggcaggagagacactgtcagaatgacaaggtgggagaaagacccaactagccactgctggctctgaagatggaggaagggaccaggagctggagggtgcaggcag

SEQ ID NO: 169355 - DNA, 644 bp, Homo sapiens
gaaatacacagtggcaaataagagatattgacactaacctgcccgttgaagttgcatgtaagtatctcaagggaaatggctttgaaggtcccctggttgagcccccagccaagggcaggaagagagtagagaagtgtccaggcaaggacgtgccccagagccccttcatggggcacccagttctgagtttggtccaggactgccaagcacctcctccattcccagaacatccccacttcccagctgcagaggccagaagctcagctgggcattgacagccatgtgggctggcaccttcccatgcatcccctgaggctccttcaactcagaccaaaggccatgtagcctgagtggcttgtgaaacccctggtgtttatgcttctcattggaagcgggtagaacaactttctaaaaccacattgacaggttgtaagttcgcatcagcttcctgcctggcaaagccatggaactctggaacagtggtcagccggcagcatggatggggataaagggtgatcatgatgacaaagcctccccgggtttcattagcgagggaggttttataatctctccaaagtcacattactcaattcttacaggagccttctaaggcttgtaagattatttagtctttattttataat

SEQ ID NO: 169356 - DNA, 318 bp, Homo sapiens
ccatgttgcccagactggtctcaaactcttgggctcaagccatccacttgtttcggcctctcaaagtgctgggattacaggcatgagccaccatgcccagcccctgtacatttttaaatacataatgcttttgcacacttacagtacaatgtaaacataacttttatatacactgggaaacaaattgtgtgacctgctttattgacatggtctggaactgaacccatatatatctgaggtatgtctatatgtgaaatgtgcacataatgttttcttgtgctaagttccccagcttttgaatttttattttttttttag

SEQ ID NO: 169357 - DNA, 490 bp, Homo sapiens
acttgtcttgtttagtgtgacaagctggcaggtaaatgcaaatgatgtgacattttctgcaggaaattgttattgtcatttaccaacatgccagtaaaagttgatcaagtctgtaattgaatcctcctggatcattttttaaaggttggattattaggggaaaacattaggatttatagctcaacaatcaagttatcaaataactctactatttaactgaggccatatatgtagaagcaagaatgtattttcaagcaaacagcttctaggtgcaggagaacccacacagaaaaacttatactttgcaggagaaagaaaggacttcaggtacattttctacacaggtattcccccattataaacttgtaacaatagctgtaaatatttaattattttaccaggcttaagggaaatatttgttgaagaaacaacattcataagacttggttcaaaagcttttctagtacttagcagttaggccatgtcagat

SEQ ID NO: 169358 - DNA, 673 bp, Homo sapiens
tttgtatttttagtagagatggggtttcaccgtgttggccaggctggtctcaaactcctgacctcaggtgatccacccatctcagcctcccaaagtgctgggattacaggcgtgagccaccacgcccagcctcaactttttcaaagagcagtttatacatacgattttaaagtcttgaaactgtagttagcctttaacctagcaattacatttcaagcaattagcattaacgaattcatcacaaaaaattgtctccaacgaattaggggcttatccaacaatggagaggaaattaagttgtacatacacatgtatatagcaatttataatatagaataataatttttaaaaccatgtccttccaacaggggagacctcaaaaaggaaaggtagatcaagtatttgagagatccagtctcacttcatccttgttttaattacggtaccttcacatttttgtttgtacattggaagaaaagtataaggttttatttgaaaaataggttttactacttgaaaaaaatgttagctcttgcaataaaagaatatttgatgtcatgaatggttctttaagaccattggtgtaaaaattaagactatgtaacctgggtataatcctgtttttgcatataactaacaggattaaaacagcaggatatcactacagatactg

SEQ ID NO: 169359 - DNA, 587 bp, Homo sapiens
aaactttctttcctgagtatggaaaagtcttgatttcctatcttctattttttctgttctctcattttagaactccccattatttggatattggaccctgtagattaaaagttggcaaactttatctgtaaagaaataagtatttctgccagatagtaattattttaggctttgccggccacaaaatctcattcggaactcttcaactctgctgttgtgattggagagccgtagtgaatgagtgtggctgtgttccagtaaaactttatctactaaaatgggcagtggactggatttagcctgggggctatagtttaccaagatccctactccagatagatcctcttttcttttttttcctaattcccatctttcctgggaagcacagtattaactggcctgcctaccaggagccaagtcgggagggcccaggagcccatcgtttaggaggtaaactgactctccctgtcttcagtacagtactcccacccttggcttcctgtgtccagaatctccctcttgagcctctccagtcttctgcccgtggagggaaagatcatttcctagatgtgggcagtataattact

SEQ ID NO: 169360 - DNA, 416 bp, Homo sapiens
aaaacatttaaaaagtaaagagaaaaagaaaataagataaaatcaatatgcccactttcctcatctttaaaatgagagttgagctctagaaggtctccggttccttcagtctctaaaattttatgttctaagttaagtttttatttgttagttcccttttagccggcacattcccaaataagtatagccagatcagctttttttccccccgaatgacattatgaaagattttaaacatataggaaaggtgaaaagacaatacaacaaatacgtgtgtactcagcacatagattcagcaattgataacatctaccatatttgctttgtccctatgtgtatgcctgtccttgtcaaatcattttaaattaagttccagacatcctggccctttactccccgagatctcagcatgcgat

SEQ ID NO: 169361 - DNA, 371 bp, Homo sapiens
gacgcacacgtccgaccacacactgcacaagttcccgcagtgtaagaggcagggtctgtggcgctgggaccaggcagaagtgtggccccaaacagcacccctgggagcccctcggcatcatgctctggccagcaaagcccctgcggcagcggcagcagctgtggctgccatcatcctggacaccatgttgccttgagaggcaattgttccttcccccattccatgggcactttcccagttatgacacaggatgatctggtcccagtgctgtaatggggagtggggatcacaggtggggcaatggaggagctctgaaagtggctttggatatctcactacccaaaaggaaaggcattagccaccatggcccc

SEQ ID NO: 169362 - DNA, 176 bp, Homo sapiens
caatgaacctcaatagaaaccccggtcaccaagctctgaggggctttcttgttggcgaacacatggctatggcaggagagttagcaccctggccccattgggaggggtatggaagcgctgtgttcccgggccccacgggaaggggtatggaagcgctgtgtccctgggccccatgg

SEQ ID NO: 169363 - DNA, 296 bp, Homo sapiens
cttacagtattgcccaggctggtctcaaactcctaaactcaagtaatcctccctccctgagattacagacgtgagccaccatgcccgactgacagtgtttttatttcatcttcattttgaaagggtattttcttgccatagagaattttagtttcacagttttccagcactgtgaatatgtcttctcattgtgttttagctagtacagcttctaatgagaagtctgtgatgtcttatctttgttcctctgtgtgcaatgtgtctttttccctctggcaacttaagatgttttcttt

SEQ ID NO: 169364 - DNA, 452 bp, Homo sapiens
aaaaaccccaaataatccaaaaactcttgttcagatttccaaactggttcaaggtcaagatggaccaaaatttactttggctttatcttaaccaaagtcttcccaatcagtttcccaatatgtaaatgacatttttggtaaaagatgagcaaacatttcagaaatgagccaacaatttttttcttatccccatcataacttttaactgcaaaacctcaggacctggttcttttccaggctctgctgtctccatatagctgtgagtgtttttggtacaccaacacatctctgtatctgggccagtaaacttttttttttttttttggtgtagggccaagcctacaatgcatatgtccttattgttcatctgttgtaactttttccacaaaaagtgtgtgaaatttagattgtggacgttccagtctccacttctgagccttgagaggttgctg

SEQ ID NO: 169365 - DNA, 424 bp, Homo sapiens
agccttgtggtatctgatggactcttggttgtttctagctggtgctaaataaaccccttgacaagaagtatttgtgtaagaaagcgctggtaggcaaagtgagaacatccggaagtgattcatattactgtggttgtttgcttaactcaggacttggttgcctagagaccatatcgttgagttagccgagtgaagtgccagtggaacctggagggcctgtggcctaccggatcaaatcagggctctgctccttaatttttctcctgaagtctcctagcaatctgattgatctctgtggtttgacagtgcgtgaattaaaaaaatcttaaacatattaatgtttaagaaagatctggttaatggtttattttgaagagtaagagtttacttgctgaagtttgaatgttgggttaaaattttttaa

SEQ ID NO: 169366 - DNA, 325 bp, Homo sapiens
ctgccatttcctggcccatctcttcctgagtcgaaagttagtgcactggttctcatccctcactagatagaagatttgggctctgcttctgtttttatcagtttgttattaatacaaatgtcccatgccatctgtgggatgccctaagtctgttgcaaagttcaaaaacctattttaaaaaaaaattgtaccaggtgatttggatacacagccaatggtggagaagccctgttggaagctcctatttggaaatgcacaaataaattcacgtcaggtcctagaagggcatactgttgagtctgctatcaaaaagttttcccctcca

SEQ ID NO: 169367 - DNA, 373 bp, Homo sapiens
gcaagaattccatcagaagtagttaccttaaactaagtgtgactttctgactcacatttatgaatatacccagttagattatagaactgcaacatcatacttattaccttgaaattacatttttgttctgaatgaccaagccttgtaaacaatgtaagtactacctaacacacatattctgaaacaagctccacgttaagcgttggtttgtaatgggtgatatttggatagctctgattaaatatgtaaattatgaaaattagaagtggaaaaaaagttacctttgtacttgaaccagctacatattgatctttgactcaataatggatcattctctctcttatagatcttggtcttacacaagttttttctt

SEQ ID NO: 169368 - DNA, 479 bp, Homo sapiens
ttatgcctcctttcctatccaataccacttcttgtgttcaaattctccaatgacccctactttctatgttctatctcgtgctcagaggccttcaatagggactttgagaatagaaatcgagaaacggctcagaaccacaagagaccaggaaaaaaatgacccagaatgcatctctcttactttcagaagagaagcacactgagctacatcacttatcaaagggagcactctccatcatgctcagttgacatgtttcttttactgaggctttgatttgtgactaaataattatctaaaagttattcctgggtgaggccagccatggtggctcacacctgtaatcccagcagtttgagaggccaaggaaggcagatcacttgaggccaggagttcaagaccagcctggccaacatggcaaaaccccatctctacaaaaaatacaaaaattagccaggtgtagtggcgtgtgcctgtggtcc

SEQ ID NO: 169369 - DNA, 101 bp, Homo sapiens
tgccaagcctttatcttctgccatctgctcccactgtacaatgcagaaaagtttgtggtctgcacacatgctgggttagttcctgcctctgtgcctgtgct

SEQ ID NO: 169370 - DNA, 870 bp, Homo sapiens
tcaaagaggagttgctctgggtttacatgatacagaaccccatggtttatattaagtagtaatgatagccgtttttctggactcgcttaaaagccatacacagtgtcatggaaaagagttaagaacaaggtgaaattcagggtatggtattagagctcaggaggaatcaccttcagccttaaaactcttcctttactctcctggatcacttaagtgataggtcacttttaatataaatgttgcaggatgagttaagtggagccttgagaaatatgtgtagattgtttcagtgattaaagcaagtgttcttttcctggcctttaactcgctttatgctaagaagtgtaataactaaatagactcctaattgaattgacattcagatgtgtttgcagtttagggggagtttacctcttctaaattttcatttggatcccattactaaaagcagtattgcattagcatggtgcacaattatgtacaattcaatttgcaaatgaagttaatacttggagtatcttgacttcctattcccctgctgccccaatattcaagaaaggagaagttataatttgtcacatacaagatggtttcttctttaggtttattcttaataactatgtccattttcacatggatgacaccactgagatgatgaatacctgtattgattgattgatgaagaacatttatctttttctacctacttttgggaagctagcttgcaaaatctactgcaacattcactcttcatgtatccttctattaccttgggtaccctgaataaccttttaaaaatttttgtacttttctaatatgaagagaagtagcttcatattctatgctagttttctgaggtgcttgtgctga

SEQ ID NO: 169371 - DNA, 253 bp, Homo sapiens
  misc_feature (15)..(15): n is a, c, g, or t
gaggactccaacatngaggcacggattctggactcttctctttatcacatatcccacactgaaccctcagaaaagtccgtgtggttctgtcttcagaatatccagaacctgaacacttttcatcaccgtcatcatcatcattgtcatcatttgtctggattcttgctaatgtgcttccaactctgcccaccttgcaatctcacccacacggcaccctaaccatttctgcatggcctccgtgggcctctatgat

SEQ ID NO: 169372 - DNA, 416 bp, Homo sapiens
acgttatagagtcttagctatggaagagctctagggggaggggaagaaccctgaggtgtagtcctgggttgagtctaaactctgttacttcctatctgtgtgaccctagagaaaactttctgctcctcagttgcatcatctgtgaaatgtgactgataatacccaccttaaggctgtgagccttaaacaaggtaatgtgggaaatgcctagcacagcgtctggacatactaaatgctcgatacaatagcatggacctcagaggcagctgtggtgtcatttgttagtattttatgccgaacctgcgacctccaccattctctttgattgggtgagagtgaataagggtgtctgaggcagtgttgctgacttcttcccttggaagaggagaagtcatggggtctgggagctctttgac

SEQ ID NO: 169373 - DNA, 343 bp, Homo sapiens
aatgaatatttgactaataactttcaagtgatgccccttgcatcctgaggtcatcaaagaacacaattaacgagcgcattaatgagcgaaacagctaattttggagagggccattcattccctttcctttgattttattacactctggagccttcagtccaaggaaagttgcctgaagagaaaggaagtcaatgatgatttcatgttgaggcacgttttttgatcctgtatcaggaatagccccaaacccaatgagtacgcaggtatctttagtcactgcaaagagtaatttccacatgttttcatcagggctgccacttctcttatttaggaaccagaaact

SEQ ID NO: 169374 - DNA, 238 bp, Homo sapiens
gaaatcttttagaaggtacaggggagccccaaccctgaattcagtgtttctttgccccaacgctgtggtcactgcatctgggacggggctggactccgccaccacctcgctgacaaaggctgacaaatggggttcctggggttaggcctaggtcgctcattcagccttcagtcagatatgttgaaaggacgagaataagactggacaggaggcagggccgcttcatgatctcagtgtg

SEQ ID NO: 169375 - DNA, 424 bp, Homo sapiens
ctccttgtggttttcctcttcctctggctgctttttctatctcctccttttctagttcctcctactgtatccaacctctaaacactgaagttgttcagggatctttctggccccttcttctctcacctcacattgtctccaaataattgcatatttcccacagctttaatcattgtttgctaagtctacatctgcagctcaaaactctcctctgagctgtagacccctatatccagtgacccatatgtccagtgaataatgtctacgttcacgtgtctcaggctcacaagttcaacaggaatggaacccgtcttcctatccttctcccttcctacttttggggtgggggagatgctctttcagcaaatggtagtgccaaatatccagttgcttaagccagaaatttgggagctattctttgtca

SEQ ID NO: 169376 - DNA, 352 bp, Homo sapiens
tctgaggcaaggatgttttaaatagtcttataaaggaggagggacaccgccatttgatcatctcaatagatttaaaaataaaacagttttatagaatttgatataataaaagctgtcaaccaattaggcatagaaggaatgtatctttataccatataggcagtaaatgaaatacccacaactaacatcataatcaatgaagaaaacatgaaatattttcttcggaggtaaagaagccaattatgcccactctcagcacctcattcaacctagttcgggatgttctagccagtacagttaggcaagagaaggaaattaaaggcattcagatcggaaaagagggaggcaaact

SEQ ID NO: 169377 - DNA, 590 bp, Homo sapiens
aaatgctgaaagaccttataatgaaacatcacattccccaatctggacttccccactccgctggccaactttgtcgtttctgattttaattctactggtgattattttccacctctctaaataatttttgaactctctttctgggtatatcaacttcggatactattgattggcgtcccattatgagaggtgagctttgcagaccacaacctcccaggctctgatgcaagtgaacagaggatggcaccagctgctgcagttatgcagaggggctttccattcttagcaagagcactgggataaaagagatccttccaagagctcccacctaactgtgggaacacagaagcatcctttaaaagccctgtggtcacacagccttcagcatgcatacaggctcttttcttaactttataaagccccagataggctggtactaacatggtgcaaccctgtctctactaaaaatatacacaaattagctgggcgtggtgatgggtgtctgaaatcccagctactcaggagactgaggcatgagaatcacttgaacctgggaggcagagtttgtagtgagcagagatcacccctgt

SEQ ID NO: 169378 - DNA, 261 bp, Homo sapiens
ggaggttgcagtgagccaaggtcacgccactgaactccagcgtaatgacagagtgagactctgtctcaaaaaaaaaaattagtgttctaattttcacttaaacattaagttaaaaaaatgacattctcctttgtaattcaaaggagacatagtaagagtcatatgaccagaaaccatgttttaaaatttcataatttaccttgtgacatgtgtttatctgtgtaacaaaccttcacatgtacccccaaacttaaaaaataa

SEQ ID NO: 169379 - DNA, 351 bp, Homo sapiens
gcaaagaatcatcagcaaatatcacgaaaaaagcagcactaaaatggactaacagaagaagtagaagagaaccttaaaaatactaattattgtcttcagaaattgttaacaggacatcagattcataagtcaaaaagccaacttccctgaaaaaggaaagggaggacaagaaagtttctggaagttagagcatgattaatcaaaactgaaactcagaggaagggttgaagagcaaaatggacagtccctgaaatcaggtgatctgaaagatagccaaggatttctcagaacacaagaaaaaagagggatgaaaagtgaaaaagaaattagaagatatggataataaatcca

SEQ ID NO: 169380 - DNA, 1595 bp, Homo sapiens
cgccgacccgggaccgccgctggctggctgctggctcactcgaccgtcatggagaccctgggggcccttctggtgctggagtttctgctcctctccccggtggaggcccagcaggccacggagcatcgcctgaagccgtggctggtgggcctggctgcggtagtcggcttcctgttcatcgtctatttggtcttgctggccaaccgcctctggtgttccaaggccagggctgaggacgaggaggagaccacgttcagaatggagtccaacctataccaggaccagagtgaagacaagagagagaagaaagaggccaaggagaaagaagagaagaggaagaaggagaaaaagacagcaaaggaaggagagagcaacttgggactggatctggaggaaaaagagcccggagaccatgagagagcaaagagcacagtcatgtgaagattcctggctgcctcttccaggcagtcccccagagatgcctcttctgccccctaaaagcagtgccctggacttgaagcccgtgaaatgactccatctgggattcagaatacagtgttctcaagtgaagaaggcttggaacccaccccacctccctcattgggggctctctgggcaaacatggttttcatgcacccctcttcctgagcttggtccctgcctggtgattcttcttatactcggagagcatccctggttgaggagacacccgcaatcctccacgatctcatggctccacctgcttctccccactgcctgatttcttttctctctgcctgatgtctactgaacagaacttcccctctcccatgcacccactgccagctgagagctgcttcccaatggcctgcattaaagcattcgtaacagccaaaaaaaaaaaaaaaaaaaaaaaaaaaaaaaaaaaaaaaaagaaaaaaaaaaaataaaaaaaaaaaaaaaaataaaaacaacaaaaaggggcgcggcgcgcccgaaaaaataccccccgctggggggcggcgccgacacatcagacgcgccaccccccagcgttgtctattgtacaaaacaagaggcggccgccccactaagaaggagcgggctattatatataaagaacgagagcgagcgagcgaggccgcgcgataaacacaaccgggagaccggacgtgtgtggagacacaacacgctgcccgctaccgcgagcgcttaggactctattcctttttgtgaagaaagaacgaccacccctctatcctactctatcggtggggggagggagccacaaccactatattatgggtcgagcgaacagacacacaccctctcacctatccaagagaatacattattttatatcaaagctcgcacgctcagttgggggggctaaatatattatactataaccaactatcttgacgagcggcgagactatctcatatagcgtgtgtgtgtacataccaccaaccagccagtcggccgactactagtatagaatcgagcatgcgaccagtcggttgaatacagaagaaaaattattttggctgcttgtccaacgctggaagtgacaatctatgattcaatgtcaagcacaacaactatctattaatacc

SEQ ID NO: 169381 - DNA, 872 bp, Homo sapiens
cgccgacccgggaccgccgctggctggctgctggctcactcgaccgtcatggagaccctgggggcccttctggtgctggagtttctgctcctctccccggtggaggcccagcaggccacggagcatcgcctgaagccgtggctggtgggcctggctgcggtagtcggcttcctgttcatcgtctatttggtcttgctggccaaccgcctctggtgttccaaggccagggctgaggacgaggaggagaccacgttcagaatggagtccaacctataccaggaccagagtgaagacaagagagagaagaaagaggccaaggagaaagaagagaagaggaagaaggagaaaaagacagcaaaggaaggagagagcaacttgggactggatctggaggaaaaagagcccggagaccatgagagagcaaagagcacagtcatgtgaagattcctggctgcctcttccaggcagtcccccagagatgcctcttctgccccctaaaagcagtgccctggacttgaagcccgtgaaatgactccatctgggattcagaatacagtgttctcaagtgaagaaggcttggaacccaccccacctccctcattgggggctctctgggcaaacatggttttcatgcacccctcttcctgagcttggtccctgcctggtgattcttcttatactcggagagcatccctggttgaggagacacccgcaatcctccacgatctcatggctccacctgcttctccccactgcctgatttcttttctctctgcctgatgtctactgaacagaacttcccctctcccatgcacccactgccagctgagagctgcttcccaatggcctgcattaaagcattcgtaacagcc

SEQ ID NO: 169382 - DNA, 892 bp, Homo sapiens
cgccgacccgggaccgccgctggctggctgctggctcactcgaccgtcatggagaccctgggggcccttctggtgctggagtttctgctcctctccccggtggaggcccagcaggccacggagcatcgcctgaagccgtggctggtgggcctggctgcggtagtcggcttcctgttcatcgtctatttggtcttgctggccaaccgcctctggtgttccaaggccagggctgaggacgaggaggagaccacgttcagaatggagtccaacctataccaggaccagagtgaagacaagagagagaagaaagaggccaaggagaaagaagagaagaggaagaaggagaaaaagacagcaaaggaaggagagagcaacttgggactggatctggaggaaaaagagcccggagaccatgagagagcaaagagcacagtcatgtgaagattcctggctgcctcttccaggcagtcccccagagatgcctcttctgccccctaaaagcagtgccctggacttgaagcccgtgaaatgactccatctgggattcagaatacagtgttctcaagtgaagaaggcttggaacccaccccacctccctcattgggggctctctgggcaaacatggttttcatgcacccctcttcctgagcttggtccctgcctggtgattcttcttatactcggagagcatccctggttgaggagacacccgcaatcctccacgatctcatggctccacctgcttctccccactgcctgatttcttttctctctgcctgatgtctactgaacagaacttcccctctcccatgcacccactgccagctgagagctgcttcccaatggcctgcattaaagcattcgtaacagccctttggaagggctcctgtca

SEQ ID NO: 169383 - DNA, 434 bp, Homo sapiens
tcgaagataagatggcattgaaaggaatgtgtagcacatttaaagttgaatctgtgagcgatctccagtgactgtagttgttcacgtggtatatgacaaatgcagatgctcctcaacttacgatggggttacatcctgataaacccatcataagttaaatatgtgtttttgacttgaaggatattttcagcttacagtgggttcattggaacgtaaccccatcataagttgaggaaggtactgaatgtgtattgcttttgtaccatcttaaagttcaaaaattgtaagtctaaccattgtatgttggagaccaactctaatgaatatttctgtgtacttctgcatatataatatccttagaaaattaaaattatcccacagtaaccctcggaatttactgtggtgccctaggtactttcatacctagttctgca

SEQ ID NO: 169384 - DNA, 273 bp, Homo sapiens
taatggccccaccatccacacagttacgaaagctagaaatccatatgtcattccttctttctcacaatctgatcaatcaccaattcttgttgacttgaccttggaaatgtttctcaaataaatctggccttctccatccctgccaccacctccctcaccaggtccttattatccccaacacaaaccacagcacctgcctcccaatggtttatcttatttcaaattttatcccttcaaatctaccctccacagtggccacatcactacctccgc

SEQ ID NO: 169385 - DNA, 371 bp, Homo sapiens
aattacttaacagcttaagttttccgtgacaacttggtgccatcattaaattataagcatcaatcttactgtgttgctggaatagtctcctccttaatggcttctatcactccagcctttcttgttcctgtctggcttctttctaaatatttgttttccttagtgtgttgcattgagggcctttcatgcatcattgtcctggtgtaaatgttaatagcactcacaaactgtcccactttggatgacaaattaagtggctcctccaagagatgaaagaggatagataccatagggtttctaaaccaccttgcatgaaggaaaagacactccttcacataatcacctcaccattgccaccatcaccatcatca

SEQ ID NO: 169386 - DNA, 367 bp, Homo sapiens
gagagaaggactctgagggtcagagtggagagaggttgattcctgagctagtcttaggggtatggacaggtaggaagtgattaagttcgggaaagaggaatggccatgctggggacagaatccttagcagaacagctcagccataaggaaagagcagctgtattttggggagtcagtagacagcctggcctggttgccagagtcttgtgcctggacggcagatggggatgagatggttgtatgtgctgaatggttcagaggacctggaaaggtcctacagaggacctggaaagtcaggcagaacattgtaacttcatacaacaagaaagaaggtgctagtacagttttgtttttttaagcttgggga

SEQ ID NO: 169387 - DNA, 119 bp, Homo sapiens
ctctcctcacaggcaaacactgttataagtttcttgtttttcccttctagaaatattccatgcatttacaaacacaaaaatttgttcatttttagttttagtttttactcacataattg

SEQ ID NO: 169388 - DNA, 190 bp, Homo sapiens
agctggtaaggaatttggaaaagcgtcttccaatttccattagcattgcaatccctaatccctaactcgtatgctcacacctctgcaagggtattttcaaagccacttgcaggagcccacccggcatcgccaggggtgtgtgccggggacgggctaaggtgggggactggaatgtgagatgcgccgcagg

SEQ ID NO: 169389 - DNA, 427 bp, Homo sapiens
gtgtgtgtgtgtgtgtgtgtgtgtttcaatgtattttatccatatcccttgatatacactttggttgtttccacactggctattatgactaatgctgcaatgaacaagagagtgcagatatcgttacaaagggtggtttcattacctttgagtagatacccagaaaagggccttttgggtcatacagtaattctatttttaattcctataggcacctccgtactgtttttcacagtggctgcacctatctacattcccaccaacaatgcacaaagactgccttttgtccacatccttgtcaacacttattatcccttgtctttttgaaatagtcatcctaacaggtgtggtgtgatatcttattgtggttttcatttgtattttcttgatagtgatgctgatcatcctttcatatacttgttcacca

SEQ ID NO: 169390 - DNA, 402 bp, Homo sapiens
ggcagcagcattttaatacacatttgggataaatattctctctatcacctccaccgaagattcacattcttctcagttatcggttctattcaaatttctatgcttttctcaagccatgtcctttgttttctttccctctgtcaactcacgaaggtgtccgtccttaccaagactgtgatttcctgcagaatctccgaatcttgcttttcaggcacctctccctctagtctcacacatcttccattgctcccttctcacatgttctgcttatgtggttcttttattcctccaaataggctcatgtctcccctaaaaagggatcataaacatcttcccttcttatttccatctcatttcttttctattcccaacaaaatgccttgaaaaaaatagtctctactc

SEQ ID NO: 169391 - DNA, 350 bp, Homo sapiens
ggcatcattggaaaaactggtaaaactggaatttgtattgttgattaaataaaagtatcatatcaatgttaaatttaatgaacttgataactgtacaagggtttttatcattgttcttaggaatatacattaaagtattaaatactggcagagtgcagtggtactcccaaaatcccagaactttgggaggttgagctgggtggattacttgaggtcagaagtttgagaccagtctggccaacatggcgaaaccccatctctactacaaacacaaaaaaattagccaagagtggtagcacgtgcctgtaatcccagctactcaggacgctgaggtacaagaatcacttgaa

SEQ ID NO: 169392 - DNA, 604 bp, Homo sapiens
aaggtaccgagaacagccttcttttcacagtgatgagagagccaggggacatgtgtgtatgtgtgggggggtgacctgatagagttacatttgaggacatcaggagctgcccagagaagagagtgagaactcaaagcttggagaacaattacaaggggccggattaattgatggactaaagatagtttaaacttctggaagtcagctcttaacaaagctccatgtgggctatctgtgaaggaaaggagtatgtcagacctgcttagattaagttttaaaatctttgtgtatgcctatatgtatgcctatctgtctatcttgacaggaaacacaggatttctacatcagagacagattgtgattgctcagagcatcttgcctcagttttcccatgcctccgtcctctttggggcaacacaatgagggcaggtgttatctacatgaataatgcagttagtaccacaaaaaaggaacactggatttatgaatctcagaacttaagtagggcattaggcacatttccccctcctccgctgcagggagagagagggaaaagaaagagaaagagatagagggaaagacagaaggggagggaaagcaagtg

SEQ ID NO: 169393 - DNA, 207 bp, Homo sapiens
tttcacttcacctccctgtctgtgtacagctccactgcaagcactgctcacagatgccgattcgctcacattgaaaaggtcctattccagctccaggatcctccttttctgaagagcctgtccctgcatctctttggcagtcatgttctgactgcggcctggtgctcccctaacctgcatggaataaatttaaagctaagagataac

SEQ ID NO: 169394 - DNA, 320 bp, Homo sapiens
tgaaattatacaaagagaaagtaaatttaacagtgcctacaatcatgtttttctagtaaatttcttcatttccattaataaaactccacaaaggtaacataaaagtgaaagagatgattggttacattctgaacccaatggtgagtttggtgattttattgagtttatttttgaaaataacatctccatgaaattcttaatttttcccactctttccagcctaaagatgttggtcattcattactgtgatcttcaatctgtgtgatgttcattgacactgtggtttcagagttctaatttcccccttttgtcctattttc

SEQ ID NO: 169395 - DNA, 340 bp, Homo sapiens
aactgaaatttcaccaaaagtcccatatctgaagcaaataaaaaaatttagttcccatattctttccaatagaaataattccttcgtggagaatttatgcctatctcgttcctatgacaaaaaggaatttggccagcctggccaacatggtgaaaccctgtctgtactaaaaatacaaaaaaatgaactgggcacggtggcacacacctgtaatcccagctacttgggtaaaagaattacctgaggtaaaagaatcatttgaacccaggaggtggatgttgcagtgagccaagatcgcaccactgcactctatcctgggtgacagagagaccttgtctca

SEQ ID NO: 169396 - DNA, 999 bp, Homo sapiens
tgggctcaagcaatcctcctgccttagcctctcaaagtcctaggattacagtcatgagccactgtgcctgttttttttgttttgttttttgagacagagtccctgtctgtcacccagggtgactgagtgcagtcacaatcttggctcactgcagccgcaacctgttgggctcaaatgatcctcacacctcagcctcttgagtagctgggacttaaaagtgcatgccaccttgcctggctaaattttcttctattttttgtaaagacagggtctcagtgtgttgcccaggctggtctcaagctctctgggctcaagtgatcctcctgcttcagcctcccaaagtgttggcattacgggtatgagcttccacacctggcctccaagttttggtatagtttttttgtgtgtccatttttgaccagattagctaacctagggaagacatgtctgatgaaatacacacacacacacacacacacacacacacacacacacacacacagagagtctgtgtgtagtcgaagacgagagggtatacattcgtgagagagtgtataagtgagggcacttgcgacgatgagagtgttgtttatacacatcatagaagatatagctctcatacacatgtggggtgtgtagtggcaagaagtcgtgtggcgcgtggggtgagaaaaatgtgtgacgagtgtgctgagtgtgtgaatacgtggagggcaaagttgtaactatatgggaaggtataatgggatgagtgtgtgagagagagagagtctcgacatgtgtctcacagggtggagagcagagagtggcgtgatcagtggcatcagcggcacctctacaaatctccggggctccacgagatccgtccattcgcggcctcccccgggtgtctgaacgtggagtagtgtgaacacacagacgccacagacagtgtgcgggacaacgaggcacaagacacgcggtccggccgagacgccgggtaggcccccacacccggga

SEQ ID NO: 169397 - DNA, 539 bp, Homo sapiens
tgggctcaagcaatcctcctgccttagcctctcaaagtcctaggattacagtcatgagccactgtgcctgttttttttgttttgttttttgagacagagtccctgtctgtcacccagggtgactgagtgcagtcacaatcttggctcactgcagccgcaacctgttgggctcaaatgatcctcacacctcagcctcttgagtagctgggacttaaaagtgcatgccaccttgcctggctaaattttcttctattttttgtaaagacagggtctcagtgtgttgcccaggctggtctcaagctctctgggctcaagtgatcctcctgcttcagcctgggcgacagagcacgactccgtcttaaaaaaaaaaaaaaaaggatctacttgagggtggaggtaggcaggagagggcgaggatcaaaaaacattacctattgggtattgttgtgcttactaccggagtggcgaaatgatctgtacaccagtccccttcgacacaccatttacctatataacaaacccgcccatgtactgctgaa

SEQ ID NO: 169398 - DNA, 808 bp, Homo sapiens
gcgggaagatcagttgagcccaggagcttgagaacagcctaggcaacatgacgaaactctgtctctacaaaacacacacacacacacacacacacacacaaacaaacaaaaattagccggttgtggtggtacgtgcctgtacctcccaaagtgttggcattacgggtatgagcttccacacctggcctccaagttttggtatagtttttttgtgtgtccatttttgaccagattagctaacctagggaagacatgtctgatgaaatacacacacacacacacacacacacacacacacacacacacacacagagagtctgtgtgtagtcgaagacgagagggtatacattcgtgagagagtgtataagtgagggcacttgcgacgatgagagtgttgtttatacacatcatagaagatatagctctcatacacatgtggggtgtgtagtggcaagaagtcgtgtggcgcgtggggtgagaaaaatgtgtgacgagtgtgctgagtgtgtgaatacgtggagggcaaagttgtaactatatgggaaggtataatgggatgagtgtgtgagagagagagagtctcgacatgtgtctcacagggtggagagcagagagtggcgtgatcagtggcatcagcggcacctctacaaatctccggggctccacgagatccgtccattcgcggcctcccccgggtgtctgaacgtggagtagtgtgaacacacagacgccacagacagtgtgcgggacaacgaggcacaagacacgcggtccggccgagacgccgggtaggcccccacacccggga

SEQ ID NO: 169399 - DNA, 469 bp, Homo sapiens
gaggttcagaaccagggaaaagataaattagatttggaggcctagatatggttaaataattaattagacatgaaaccctatggctgaacagttcagttgaatgttgattttagtagtgatatgatacagaagctaagctttgttatagtcacgcaatgttgaggcatggttaatatatttagcaggattatgaagagttcaggcattttttggaaactcctatgaatatgtcatctagaattggttttgtaaaatggtagtgcttgtactgtttagttacatgtgttgaatatcagatggatttcagtatttttttaaaactttgcttaagcctcttaagcctcattgagtggggagactgcagtgtaagtatccaggctgaagactgaacttccaccttatttttatgtggtaatgagtttttgtttagatgatatatatgttttaatgttgagatggaaaaagtaga

SEQ ID NO: 169400 - DNA, 300 bp, Homo sapiens
aattaaggatgatgcaggagacagacctataagaatgacaaagctgagagtaaccttagagtctcccttgtccatcctgtgcattgaatttaagtggagagactgaggcctagaggtaggaagagactgcagtaggttcacacagttcatcagtgacagagcaagatgagacttgaactcatgtcattgacttccagtacagtttacacccctggttttacagatgaagaaactggccctaggagggataaatgacttgcccacttcattcaacaactgtgtaccaaacccatttccata

SEQ ID NO: 169401 - DNA, 427 bp, Homo sapiens
tcagagtgggtgttcaatagaactgctgaattgatgaacattcagagactgtacttttgcattctattttgcacagctattacctacataaccaaaacttttatcaacatcaattagtgtttcttagcattaaccagaatggacatagctaaccttaaatctacactcagttcaacaaatacttactgaatatctctatgtgccatgctctgtggtaggtactgggaacatcacttttgctttccaggtgttctctcaaaattctaatacaatgacagagagtacaaaattgggtgggtgcactaaagaatgagaaaagaagtctttctgacaggatgtctaggccaagtcttaagttagaatgagacaaacgcaggtaaatgaagtacattctgcattgaagaaagagcttgagcaaaggtgctga

SEQ ID NO: 169402 - DNA, 438 bp, Homo sapiens
gatgccgtatatagtgttctccttccagtataaggtaatctggcagtttaccttagagtttaggaaactaccttggaatagagtcctcttttaaaataatggtgcagttcttccaaggtgacaattactgttagctttttcctgggtctgtaataaatgtagcattaaatttttttttttttgcgtttttaagagcagcataagaatgtcatcctttgagcttgattttaaatgaagatatcagcagataatatactcgaagaatatttatagtggctccaaatgagacagtctaagtcattcaatagtaatagctaccaattggttttgtgtttcctattcacctgtagcagtttgttagacattgtgatatatatctggagttcaaaccgtcccaacggttacatagaagggcatgaagaagaagagatagcaaaa

SEQ ID NO: 169403 - DNA, 348 bp, Homo sapiens
tattagttactctcttcaatcttgttgaattggtctaaacatctttttgtttttttcattaattaatgaattaaataaaacttttgacatatgttcattacaaaaacaattaaaaattatttgttgaactcaatatctgaattagcttaaaatcagaatggagatgacagggaggaattagcaatcttaaagatggatcagtagaaattatccaagctgaacaacagacagaggaaagataaacaaaacaaaataatgctcaaggacctgtgggaggctactaaaaggtaaaacatttgtgtcattggaattatacaaggaaaaaagaaaaagaagtatagtgcagaa

SEQ ID NO: 169404 - DNA, 336 bp, Homo sapiens
acttatccctgtatctgcacagaggggagagagagggatagctctcttcctcttcttataaagactctagagccattatgggggcacaactccaacgacctacttacctctcctcataatactaccttgttggggtttagaatttcaacctatgaatttggggggatgtaaatatgcagttcttaataataatgaactactattagtgtataccaatgtttggaccccatcattttcctaatgcccaatttcacctgtcacccaacagcttggtattgttattagacagtttgatattctgtgtgatgcttaattaaaacaggacacatagatagt

SEQ ID NO: 169405 - DNA, 488 bp, Homo sapiens
ctccgcctcccgggttcacgccattctcctgcctcagcctcccgagtagctgggactacaggtacccgccaccatgcccggctaaatttttgtatttttttttagtagagatggggtttcaccgtgttagccaggatggtctccatctcctgacctagtggtctgcccgcctcgacctcccaaagtgctggaattacatgcatgagccactgcgcctgaccctatttagtcttaagtaactaactgaattactagtaatttttaaaaggttggaatggtgggccaaacagtaagatgaagtttcgacgagtaggtcagttcttttccttgggtccaggaaactattgagcagcaacagaagatcagagcagagatgtggctaaacagtagcaggtatgaaaagacttagaggttctggtttctgtaagcttcaaatatctgtgatgcttgtgccaaaacagcttaagtagactgtattgtttgagagt

SEQ ID NO: 169406 - DNA, 203 bp, Homo sapiens
tgtgtgtgtgtgtgtgtgtgtgtgtgtgtgtgtgtattctgcatgttttgcttattgtatcgtttttcttggatgttgtgtatttgttttaatgtttagaacttgttcttttatttcagaacaatatgaacagaacacaatgttgaagaaaatacatttactttgtacccaattctatgcatattttcttctgctttccagtc

SEQ ID NO: 169407 - DNA, 360 bp, Homo sapiens
cttggactatgctcttgaacattgtgcttaatagttttatgtatagtactgcaattgatgaattaaaattatagaagtacctacttcattcccctcccagagatgcttatatcagtaagtaacatgctggcagaattaaggtgtctgcttccagttcagccctcttttatttcttgttgctttctgtgattcggcagctatggaatttgcctccctgcatgggcctctcaaaagccagctctcctgctctccccaacatgctcacagtcagcagaacagggaaatcacactgatcagcacaccactcagttgatcaaagtaagccggccacttttcttcaacaagacccagtggtattag

SEQ ID NO: 169408 - DNA, 356 bp, Homo sapiens
catccatatggatacaaatggatttagcaataatgtttttgttagctcagtctttggatcagatgcggctgtacacaaatagaatgtgctggatcatcctgccagcatggataaaaatgcatatatgcaacctttggcgtaaacagatgtgtttcaacctgtgtttatccagaaggaaggagtaaacactaccttcagctcagcttgattgtgctctaaagtgatcggtcagtaaaaggacgtggattagaactacagtgcaggcagttgggtaatgcttgtgaaaataacaaattctatctggttccctagctaagttccttttattttatttatttgatttggctaattggctg

SEQ ID NO: 169409 - DNA, 613 bp, Homo sapiens
gtgggctaagaggtaaaactgagattgttatgtagatacttaaataactagagagaaataaaatttgcacgaaaattttattgacaaaattcaaaacaataatttagaacaattttttttgtaatacgggtttactaatgaaaagaattaaatatttacagggaggatcaaagttaatgtttcgtgtcattaaagttgattgtaagtactcatttgttaatgctgatctgtaataagattttatgtattttacttctgaaaattccttgcagataggtattgtcaaatacttacattaatccatgagaatatgatttttgttgagcatattcatcacttgaaaggttacttcttctctggatattttccttttagcatgttattacattgcagcttaatcacttccaattgaagactaggcagaagctcctcaattgcactgttaaattgattttgaaaaatggaaatttcctttacatttgcaaactccaaaaaatactgcaggcactatggtgtgagctacaaatttgtgtgagagtggagatctcgcttctttgtcttaccttttgatagcacaggaaatgtgtaaagcagcttgttgttacttgtaatt

SEQ ID NO: 169410 - DNA, 280 bp, Homo sapiens
caacagtgaacacaagaagcaactaattgtaggcaaagtgacagagactgataacctgatacataaagatggctttgtttctttacttggccaatgattgaggcctgtttagaggggaagtgatgtctcattcaagcaacaggatgatagagcttcagagacagagattatgaacaatttaaaaataaaacatacaatggccaaaagaagggagtttggatttaggcaagtctgacctcaagtgtagctttttcactcaaatgccttggaacactaggag

SEQ ID NO: 169411 - DNA, 192 bp, Homo sapiens
gcatttaactgcctgtgcaaaatcctccagagctcttttttccctctggcttagcaactaatattttatatggtggtcaagcatagtggctcatgccagcaccttgagaggccaaggtgggaagatgacttgaggccaggaattcaagaccagccttgggtaacatagcaagtcctcatctctaccaaaaaa

SEQ ID NO: 169412 - DNA, 258 bp, Homo sapiens
gccagtattcagtggaccactccacatcatattaaataaaatttaaacacagcattttgaagccgacagtatgggtcactgtgtgtcctgtgtgccctgagcgtattgtagagtagttgttgagtctgctgccttatctgtgtgttatgaggtcaatgcactgatcacttgcttttttcacttctatactaactctaggcacactttactcccagtcaaaagtggactgtatacttcctctttgatgtgatggtccct

SEQ ID NO: 169413 - DNA, 562 bp, Homo sapiens
attcaaaacatttttgttcccaaacattttcgtaaacaaaacaaaacaaaacaaaaaaactggctgggtgcagtggatcatgcctgtaatcccagcactttgggagactgaggcgggtggatcacaaggtcaggagtttgagaccagcctggccaacatagtgaaatcctgtctctactaaaaacacaaaaaattagtcaggtgtggtggcgagcatctgtaatcccagctactcaggaggctgaagcaggagaatcacttgaatccgggaggcggaagttgcagtgagctgagatcacaccactgcactccagcctgggcaacagagtgagaccgcatctcaaaaaacaaacaaaaaaaactcaacctgtacccaaacaaaaatctcaaatttcttccgtcttaaataaaaattttttttggctgggcgcggtggctcatgcctgtaatctcagcactctgggaagctgaagtgggtggatcacaaggtcaggagttcaagaccagcctggccaagatggtaaaaccccatctctactaaaactacgaaaattagctgggc

SEQ ID NO: 169414 - DNA, 374 bp, Homo sapiens
taagtgtgtactatgccagacactgttctaatcattaacataaaaagctctcattcaatcaatcctcccatggttctctatgaggaaggtcctattcagagccccattttacagatgaggaaactgaggcatgaaggtgttaggcaggtgatggagtgggctctcagcctccaagatccggtccctcaacctcgggctgcacttggcactggcctcagagccggggctccctgaggtccggcgggagggtcggaggacttggggacagccccactcagtgcatctgcaggcacagcatggctgaatgcagacctctccaagatcactccaggttggacagaaggtggatttatctgctgtttttctgttgtgac

SEQ ID NO: 169415 - DNA, 259 bp, Homo sapiens
cttggttttcttttgctgtagcctcaggcctcagaaccttactctgagattggtaatgtgttttgaatgtgtttatcacagccagatggggcaaggctcagtttgttactgcccattattgcaagggaagggagtccatccagaaaacaaagctttgggagtttcagttagttgggtgacactaccctggtatcaaaggaaagatggtttgattggatgacattgtattttctttaaatcaatcaaaatgatacaatta

SEQ ID NO: 169416 - DNA, 230 bp, Homo sapiens
cttggttttcttttgctgtagcctcaggcctcagaaccttactctgagattggtaatgtgttttgaatgtgtttatcacagccagatggggcaaggctcagtttgttactgcccattattgcaagggaagggagtccatccagaaaacaaagctttgggactctcccgctatgcttggcgactcccccttgtatccgacgcccgatgttgccgtctccccatttgcggtc

SEQ ID NO: 169417 - DNA, 190 bp, Homo sapiens
aggcgtggacagtaggccttgggaatatgtaatgcatacagaggttgactcctcccattctttctttatcttccaggatgtaatacttatgcatgcatattcatattcccaggcccttcatgatctagctgcttcctctctgcccacctttattgctggccagtctttcacagtcaccttaacttgcagc

SEQ ID NO: 169418 - DNA, 141 bp, Homo sapiens
tgtgtagtaagtagtaagtaggaactgctacagaacattttaagcaatgattgatggtactgtatctcctcatgaatagaaacaattttttttattattctctactatctatcttcagtcttctttcattctaatctattt

SEQ ID NO: 169419 - DNA, 665 bp, Homo sapiens
acattcacagcacgtgggtctctccattaggcacattcagtccatcttgcattctttcttcccaccctgactgctcagagaaatgtaccccacctccctagccctctgtgcttcaagtcttcctttgacccccttcgctctcccacagcagggctctcagctgccagccaaccaagcagatggtgcaacaaccagacctaaaggaaggacctggggaagaagagaaagggagcctggcaagtctgagcttagggagtgggtctggacctcgtgaccattactccatctgctaccccacgcttccttaggcccccaccctctggctagcttgagaggaaggacgatggtcaaggtacatgtctcttctcctctgactctgggaatgagatttttctactcccacaggcttgaactctccttataggagtgtctccacatgccaaaatcagaggaagtcagaataaaacctcccaaggctgaaaactaggctggtggaagggagctcccttccaccagcccttgaaatcactgtttgtctccacactttttccctttttagaaatttcatataaatgaaattagacattatatagtcttttgtatgtcttacacttggcataatgtttctactattcatccatgttgcttcatggatcagtacgcca

SEQ ID NO: 169420 - DNA, 204 bp, Homo sapiens
aatatttgtctcctcagcaataaaggactgcaaaaatttaactatttttttggtcctttttgaactacctcttcaatttctgctttgagtagcttcagattttgactaatgtcttcaggggtagactgcatgttctttagaggtccctcaagtttcagattttgtcacaccaacccttgttccattgccaaaagctctgttttt

SEQ ID NO: 169421 - DNA, 360 bp, Homo sapiens
cacatgaaaccatcaatgacagcaaacaagaaatatccataaaaatttggaagccataaagcagttagacaatggtgactgacttagcaggctagagaaagctaagtgcctaatgaggatgaaggcaagaaccaagtttatctgtaaagaacattggttgagactcaggaattagaagcatcaggtgcttgtgaatgcatgggtgtaggtgtattgggccattcttgcattgctataaatacctgagactgggtaatttataacgaaaagaggtttcattagcttacagttctgcaggctttacaggaagcatggtgctggcatatgcttggcttctcgggacacctcaggaaacgtacc

SEQ ID NO: 169422 - DNA, 450 bp, Homo sapiens
accatcccccctagcgggctagcgggtgagtgagattgttgcatgtttactagacagatgaaaatatcagtgacctaaagatcttctggaaacatttaaaaaatcagcttatcttttaactaaccaaaggttattttcttatcaccttttaaagccattaatggaaagatttttgggaatctccatggcctcataatgaacgaagatacaatgacaaactggtatttgttagggataggaagtgaagtggacatacataccatccattatcatgctgagagctttcttttcaaagtaagtataaggaaagtgctttgggaaagacgtttttgaactaacaaattcaatgtatttccagtggaaaataagagttacttggcaataatgcttgtgaggataggtgagaatggaacagaataatgtgattgtaccgtttccctggtggatatt

SEQ ID NO: 169423 - DNA, 2784 bp, Homo sapiens
gctactcccacctgccacgccgcaagagaatgtctgtggcccacatgagcttgcaagctgccgctgccctcctcaaggggcgctcggtgctggatgccaccggacagcggtgccgggtggtcaagcgcagctttgccttcccgagcttcctggaggaggatgtggtcgatggggcagacacgtttgactcctccttttttagtaaggaagaaatgagctccatgcctgatgatgtctttgagtcccccccactctctgccagctacttccgagggatcccacactcagcctcccctgtctcccccgatggggtgcaaatccctctgaaggagtatggccgagccccagtccccgggccccggcgcggcaagcgcatcgcctccaaggtgaagcactttgcctttgatcggaagaagcggcactacggcctcggcgtggtgggcaactggctgaaccgcagctaccgccgcagcatcagcagcactgtgcagcggcagctggagagcttcgacagccaccggccctacttcacctactggctgaccttcgtccatgtcatcatcacgctgctggtgatttgcacgtatggcatcgcacccgtgggctttgcccagcacgtcaccacccagctggtgctgcggaacaaaggtgtgtacgagagcgtgaagtacatccagcaggagaacttctgggttggccccagctcgattgacctgatccacctgggggccaagttctcaccctgcatccggaaggacgggcagatcgagcagctggtgctgcgcgagcgagacctggagcgggactcaggctgctgtgtccagaatgaccactccggatgcatccagacccagcggaaggactgctcggagactttggccacttttgtcaagtggcaggatgacactgggccccccatggacaagtctgatctgggccagaagcggacttcgggggctgtctgccaccaggaccccaggacctgcgaggagccagcctccagcggtgcccacatctggcccgatgacatcactaagtggccgatctgcacagagcaggccaggagcaaccacacaggcttcctgcacatggactgcgagatcaagggccgcccctgctgcatcggcaccaagggcagctgtgagatcaccacccgggaatactgtgagttcatgcacggctatttccatgaggaagcaacactctgctcccaggtgcactgcttggacaaggtgtgtgggctgctgcccttcctcaaccctgaggtcccagatcagttctacaggctctggctgtctctcttcctacatgctggcgtggtgcactgcctcgtgtctgtggtctttcaaatgaccatcctgagggacctggagaagctggccggctggcaccgtatcgccatcatcttcatcctcagtggcatcacaggcaacctcgccagtgccatctttctcccataccgggcagaggtgggcccggccggctcacagttcggcctcctcgcctgcctcttcgtggagctcttccagagctggccgctgctggagaggccctggaaggccttcctcaacctctcggccatcgtgctcttcctgttcatctgtggcctcctgccctggatcgacaacatcgcccacatcttcggcttcctcagtggcctgctgctggccttcgccttcctgccctacatcaccttcggcaccagcgacaagtaccgcaagcgggcactcatcctggtgtcactgctggcctttgccggcctcttcgccgccctcgtgctgtggctgtacatctaccccattaactggccctggatcgagcacctcacctgcttccccttcaccagccgcttctgcgagaagtatgagctggaccaggtgctgcactgaccgctgggccacacggctgcccctcagccctgctggaacagggtctgcctgcgagggctgccctctgcagagcgctctctgtgtgccagagagccagagacccaagacagggcccgggctctggacctgggtgcccccctgccaggcgaggctgactccgcgtgagatggttggttaaggcggggtttttctggggcgtgaggcctgtgagatcctgacccaagctcaggcacacccaaggcacctgcctctctgagtcttgggtctcagttcctaatatcccgctccttgctgagaccatctcctggggcagggtccttttcttcccaggtcctcagcgctgcctctgctggtgccttctcccccactactactggagcgtgcccttgctggggacgtggctgtgccctcagttgcccccagggctgggtgcccaccatgccccttcctctttctcctcctacctctgccctgtgagcccatccataaggctctcagatgggacattgtgggaaaggctttggccatggtctgggggcagagaacaaggggggagacacaagtagacctcaggtagaacgacactgggcggagccaccccagggcctgctcccagggagtgctcgaggcgcatcaggcccgttttttaccagtttatatcacggtcttcatttttaaaagtaacgctaactttgtacggacgatgtctcatggattaaataatattctttatggcaaaaaaacaacaaccacacaaaaaacagggggggggcagagattcccgggggccaatttccgtcccgtttgtgaagggcccaagggcgcaaaaacaggggggcggtaaagcggaggaaaggggctggggagcccctggggcgtgccccgaaaccggatg

SEQ ID NO: 169424 - DNA, 392 bp, Homo sapiens
ggacaaactgtgatgtcatgtgcaaaggccctggggctggaagggcaaagtacatcccaggaaatgcaggcaaagaggccagagaggtggtcggtcaggcaaagctttgcagccagcaagagggggtgattctggaatttgtcccaaggccagtggaaagctatcaaaaggttttaagctaggagagagatgcttggaggctcgtcttaaaagttcctctggtttgagatgagttgacggggcagaacagggagcccaggcgagccatgtgaccaggccagggtggccctgtggccgggactgggggttgggataggagctcggctcagctgacccgaggtgtctctgcacaggccctacttcacctactggctgaccttcgtccatgtcat

SEQ ID NO: 169425 - DNA, 2626 bp, Homo sapiens
gctactcccacctgccacgccgcaagagaatgtctgtggcccacatgagcttgcaagctgccgctgccctcctcaaggggcgctcggtgctggatgccaccggacagcggtgccgggtggtcaagcgcagctttgccttcccgagcttcctggaggaggatgtggtcgatggggcagacacgtttgactcctccttttttagtaaggaagaaatgagctccatgcctgatgatgtctttgagtcccccccactctctgccagctacttccgagggatcccacactcagcctcccctgtctcccccgatggggtgcaaatccctctgaaggagtatggccgagccccagtccccgggccccggcgcggcaagcgcatcgcctccaaggtgaagcactttgcctttgatcggaagaagcggcactacggcctcggcgtggtgggcaactggctgaaccgcagctaccgccgcagcatcagcagcactgtgcagcggcagctggagagcttcgacagccaccggccctacttcacctactggctgaccttcgtccatgtcatcatcacgctgctggtgatttgcacgtatggcatcgcacccgtgggctttgcccagcacgtcaccacccagctggtgctgcggaacaaaggtgtgtacgagagcgtgaagtacatccagcaggagaacttctgggttggccccagctcgattgacctgatccacctgggggccaagttctcaccctgcatccggaaggacgggcagatcgagcagctggtgctgcgcgagcgagacctggagcgggactcaggctgctgtgtccagaatgaccactccggatgcatccagacccagcggaaggactgctcggagactttggccacttttgtcaagtggcaggatgacactgggccccccatggacaagtctgatctgggccagaagcggacttcgggggctgtctgccaccaggaccccaggacctgcgaggagccagcctccagcggtgcccacatctggcccgatgacatcactaagtggccgatctgcacagagcaggccaggagcaaccacacaggcttcctgcacatggactgcgagatcaagggccgcccctgctgcatcggcaccaagggcagctgtgagatcaccacccgggaatactgtgagttcatgcacggctatttccatgaggaagcaacactctgctcccaggtgcactgcttggacaaggtgtgtgggctgctgcccttcctcaaccctgaggtcccagatcagttctacaggctctggctgtctctcttcctacatgctggcgtggtgcactgcctcgtgtctgtggtctttcaaatgaccatcctgagggacctggagaagctggccggctggcaccgtatcgccatcatcttcatcctcagtggcatcacaggcaacctcgccagtgccatctttctcccataccgggcagaggtgggcccggccggctcacagttcggcctcctcgcctgcctcttcgtggagctcttccagagctggccgctgctggagaggccctggaaggccttcctcaacctctcggccatcgtgctcttcctgttcatctgtggcctcctgccctggatcgacaacatcgcccacatcttcggcttcctcagtggcctgctgctggccttcgccttcctgccctacatcaccttcggcaccagcgacaagtaccgcaagcgggcactcatcctggtgtcactgctggcctttgccggcctcttcgccgccctcgtgctgtggctgtacatctaccccattaactggccctggatcgagcacctcacctgcttccccttcaccagccgcttctgcgagaagtatgagctggaccaggtgctgcactgaccgctgggccacacggctgcccctcagccctgctggaacagggtctgcctgcgagggctgccctctgcagagcgctctctgtgtgccagagagccagagacccaagacagggcccgggctctggacctgggtgcccccctgccaggcgaggctgactccgcgtgagatggttggttaaggcggggtttttctggggcgtgaggcctgtgagatcctgacccaagctcaggcacacccaaggcacctgcctctctgagtcttgggtctcagttcctaatatcccgctccttgctgagaccatctcctggggcagggtccttttcttcccaggtcctcagcgctgcctctgctggtgccttctcccccactactactggagcgtgcccttgctggggacgtggctgtgccctcagttgcccccagggctgggtgcccaccatgccccttcctctttctcctcctacctctgccctgtgagcccatccataaggctctcagatgggacattgtgggaaaggctttggccatggtctgggggcagagaacaaggggggagacacaagtagacctcaggtagaacgacactgggcggagccaccccagggcctgctcccagggagtgctcgaggcgcatcaggcccgttttttaccagtttatatcacggtcttcatttttaaaagtaacgctaactttgtacggacgatgtctcatggattaaataatattctttatggca

SEQ ID NO: 169426 - DNA, 473 bp, Homo sapiens
gctactcccacctgccacgccgcaagagaatgtctgtggcccacatgagcttgcaagctgccgctgccctcctcaaggggcgctcggtgctggatgccaccggacagcggtgccgggtggtcaagcgcagctttgccttcccgagcttcctggaggaggatgtggtcgatggggcagacacgtttgacttctcctcctacctctgccctgtgagcccatccataaggctctcagatgggacattgtgggaaaggctttggccatggtctgggggcagagaacaaggggggagacacaagtagacctcaggtagaacgacactgggcggagccaccccagggcctgctcccagggagtgctcgaggcgcatcaggcccgttttttaccagtttatatcacggtcttcatttttaaaagtaacgctaactttgtacggacgatgtctcatggattaaataatattctttatggca

SEQ ID NO: 169427 - DNA, 452 bp, Homo sapiens
ttttggtttgtttaatcatatctgtctgattcagcggagataaaacgtagataaaataaatgcccagattttaagcattcattaagttcagtgagttctgacaatcatatacacttatgtaactactatccaaaggaaaatataggccgtttccatcatccaaaaagttcccttgtacccttttccactgggctcccatcctctaccagctgaggcaaccgttttctgatgcctgtcaccacttttgcatgttcttgagcttcaagtagatgtaacttacagtatgcctatgtctggcttcttttactcatggtttgagattcatccatgtttttctgtgtattggcaatttgttcttttaaaaattgctgattagtattccactgcaccaaaatatatagcagtttgcttatctatttccatgttattaaatatttgggtgatttccagtt

SEQ ID NO: 169428 - DNA, 256 bp, Homo sapiens
tctctacaaaaaatgcaaaacttagtggggcatggtagcatgagcctatggtcccagctactcgagaggctgaggtgggaggatggcttaagcccaggaggcggaggctgcagtgagccgagatcatgccactgcactccatcttgggcgacagagcaagaccctatctaatacctttctgcagttgtcagggagagctgcttgggagtttctctgtggtctacgcccttccctagatgagtgcatcagaggaagg

SEQ ID NO: 169429 - DNA, 112 bp, Homo sapiens
tccaagggctgcacccccagtgaaaaggaaaaccatactactatgcccatgcccactcccctgtccctccaagggcagtaagcaaaactgccacctctagcattggtgttgg

SEQ ID NO: 169430 - DNA, 468 bp, Homo sapiens
taaaactagaatgtgcaaagctgcaggagactggagagtgttcggcccagcctctcattttacgaaggaggaaactgaggcccaggagacagggaattgtctagggtctaacagccagtgagaggcagagtaggtcccaagccctcatctgcttttcctgcccttgtcccaccgcaccaagttgcctgtcttccatgtcatatggagagtgataaagggacaggactacacctggaattacccttgggcttcttgctgaactaagtaaatttggcttcactctttgtgactcaaggtataggaaggatgagccagaaggaatgctgtgttttttcacctttttttccctcgagagagccggtggctgcccagagtaactgcagcattgcatcccctactttttcagaatctgacttggccttctccccagctgctcttaagcctggtgacagagcgagattcccctca

SEQ ID NO: 169431 - DNA, 875 bp, Homo sapiens
tgggctcaagtgatcctctgggctcaaatgtgatctcactggattctctcaagggaggaataggacaaattgtcagcttctgttgagaagataatactctcactatgataaatgccaagtttctattgaaaaccaccatcttaatggtggtgtccccaagcactcagtgcttgcctggcagccgagaccagaggagaagcagaggaaagcagatatttgtagggggttgtttgtttgcaatgagaaatcagttcaaagcaaaggagatggtgcattaaaaatgttcttttaaggcagctttaaaaagctaactggagtgctccagtgtggcctgatcttaaaacacacctatggggagacttccaccctcaataaatatttcttgcatatgacttgaattaaaggaggcacatggggctggaagccgcccgaaataattttccctcccataggaagcagccgctgtaattcacttgcaagttatttcaaaaggcctgttctgatagaaattgctgccttctcgtggactgggatttttctcgtactgtctgtgacatcccttcttgacaagggtgtgtccgcccatattttacaatgcaccactccctcaaagagcgtctcggtttgttgttgcccttttttgggggtgcttatgctggtttctcttagacacctgagtgtggctgatctgcctcacagcctacactcagggagaccttcaggttagttaagggagttcctggggtaggggggctggacgacagtacattcaggagctctaagaatgctggtgatcatgggaacaactggagggggaggaagaaggtctcttatcagctgctgttgaaaggtcctaaggtggttgtgcttgtcca

SEQ ID NO: 169432 - DNA, 269 bp, Homo sapiens
agggaaatgatcaaaaataggggtgggttttctgggcctggggctgcctccggtcctcagtgctaccttccctcattctgcccctctgttctcttgctgtcctccttctgccccctgtggccatgggactgcccccacaggttctggggacattttctgagccccctgcacctggtacagccagcccagggctcagtgggggaagtgctccatcagtatttttttgatggtggtaaataagattcatacagctttgcagtgtttgattg

SEQ ID NO: 169433 - DNA, 549 bp, Homo sapiens
cacagcttagtctgtttagacactgcattaaaaattccaaattaggagagtaaaaacaaatgaagttttcgccatcgtggggcaaacattacccactctcatgcctccctcttcatagctagctactagagcagccttcaactgatgacggatgaaatgggtagatcaatgcatcagcttccttgttccttaggcatgttctactgtttcccagaagtcttcaataggattgagctctagtcgcccatgctgaagcttgctcattatcacaccttatattggcttttttctcttcctgctcatgtacctaccctgcagtggtgcttcctggggtcacttcccaatgaagctacttcacctcaaatccttctcttagtgcatgccttggagggaactcaacataagacaatttgaaataaaggccttgaccaggctctgtggctcacacctgtgatcccagcactttgggaggccagggtgggcagatcgcttgaacctaagagtttgagactagcctgggcaacatggaaaaaccccatgtctaccaaa

SEQ ID NO: 169434 - DNA, 194 bp, Homo sapiens
atagtcttcacaaatagctcccccaatgagctgtgcctcctatgattcaccccttgaatctgggctggccttgtgacttgcttttgactaatagaatgtgacagaagacacactgcatgactgctgagtccagaccatccaaagccttgcagcttcctcctaggactgttgtaatgtttacttttgtgaagtga

SEQ ID NO: 169435 - DNA, 159 bp, Homo sapiens
ttggccaaatggtgcaaactccacagatccagctgaaaacaacatggcaatggctactaagccatggggctcccaaaactgaagtagatgggtcagctgtgagaagctcactgcctggtacggagcattggatggattgaaaatcatggaacagtccct

SEQ ID NO: 169436 - DNA, 178 bp, Homo sapiens
cattgtcagtgttattagggaaggtaaatgaggttaatggagattaattaatgcaaactgggtagaatcatagaaagcgttcaacaactgttagttatcaatcccatttataccagacactctggccctttttaacttcctgacaggtattatagaaaaagtgcatttgatacaaaaa

SEQ ID NO: 169437 - DNA, 374 bp, Homo sapiens
cactgaattcccacatgttttctgatctacttatggacattctctccttctccagcaccaaactattttagttcttaaatcttcatggtacatttaattatcttttaaggttaatttttcacccttcctctttcttgtcagtatttccctggcccttcctttcccgtggagttttctagcagcctgcctgatgctagatcatgatgcttttgttaatggaacatttcgtctttaatctgcttctttacttccaagcctgttgatactactcattggccaggtcgttgagcctcgcttttgagtattataatcagcatttaattagtctctttgcctttatgcttattttatcttgtgaatgttatttggctaat

SEQ ID NO: 169438 - DNA, 151 bp, Homo sapiens
gatggttttggaaaagttgacacggattcaaatcgaggggagcatttgatgtagatctgtcttaattctgtcccagggaccacaaggatggcatgtgacgtacactaagtctagcagagtgaatttctgtcccattactgggactgctgag

SEQ ID NO: 169439 - DNA, 99 bp, Homo sapiens
ggccagccaggcctgtggagttggctgttacagacagaggggcgtagagtcgtggctgggagcccatctactgagagcaagttggggtgagcagtgagg

SEQ ID NO: 169440 - DNA, 398 bp, Homo sapiens
tctaccaccagtcaagacatagaacatttccatcaccactagatcccttgtgttactcttgttaagccacacccacctttctccagcccacccccttccctaacctctggcaagcactatcagggattgatttgacatggaagatagctttccagcatcatctgcttgggccactcactttagaaacagatgtgcgatggttggcaggccttgtaagagcactagagctctcaacatgagcattctgctctcctgctgctgtccctctgtttgggtgctgttttcctctgaatctgctgatagagttgcatctttgcaactgctgacctgcagtctctggtctgatctcatgcaggcttggggctaggatgtgtgactgtgactgttaatgccaaaag

SEQ ID NO: 169441 - DNA, 406 bp, Homo sapiens
cattgttctaatcagaacatttcaaccatctgatctgaatctctctcattgctcaagttttaaaaattgcattctatgtacagcaattcatccctgaaagcacaaattattgaaacaaacacttatccttttctaatagagtatcaaaataatgatgttaatgaaagattataattgttcattattattcaagcattattatttctatcacaaacttaagctggacagagaggatttcttatcatagctgtagccagggtacaatcccacagagaggggagttattaccaaactactctacagattaatgatgacaggcaatgtgttatttggagaaaaacacagatgttgaaattctgcattaaacccctaattcaacattaactgtatgacttgggcagattac

SEQ ID NO: 169442 - DNA, 494 bp, Homo sapiens
atgtatgacaacagtggtacaagggatagaaaaaggaaatggaagtgtactgtgttgagactctcatgcctttacaggaagaggaatgagctcactgggaggtagacagtgataaaggtgtatatcgtaaatcctagagcaaaggcacacaaataagaatgatatttaataagctaatggtggaaataaaatggggtcaaaaatgactcaggtcatggtgcagcggtttatgcctgtaatcctagccctttgggaggctgaggcaggtggatcacttgaggccaggagttagagaccagcctgggcaacgtggtgaaaccctgtctctactaaaaatacaaaaattagctgggcgtggtggcgcatgcctgtggttccagctactcaggaggccgaggcaggagaatcacttgaacctgggaagtggaattggcagtgagctgagatcccatcactgcactccagcctgagtgacagatcaagacgctcaaaaa

SEQ ID NO: 169443 - DNA, 500 bp, Homo sapiens
gttggcctaaatgatctctaaagtcttttctgtctcctccttcattgtagttcccatcttcaatacttccattgctccgaaggtggaagttcagcattttagcccccaagtcctagccctgctgagtgtgacatgcaaagcttcgacccacagcaggaagtctcacagttctgggctaggactgcagctctgttttcaggaaagttatctggaggctcttcttcctttagcctctcccatggctttcaatgtggggcaggtgagttaattattcaagggggtgtctctgccaagagaaagtcacctgtggagaagagttctgtgtctggacttggagcacagccacgatgctgtcatctgcttcctcttggcacacacccttgatccaaggcttgccattttcacttctaaattactaggttaatagaaatggcatcaaaacattaaataaagtgaggcatataccatggatctgcaattctaattgacttgaaatttag

SEQ ID NO: 169444 - DNA, 384 bp, Homo sapiens
tatgcaatagaacaccagcacttattcctctcgtctatagctttgcacccattgaccagtctctcaccactgccccctgccaatcctctggtaaccactgttctactctttctttctatgagagtgacatcttagattccaccagtgagtgagatcatatggtatttgtctttctgtgcctggaatctttcacttgatataatgtcttccaggttcatctacgttgctgcaaacaacagaatctcacttttttatggatgaatagtacttcattgtatgtaagtaccacattttctttattcacgcatccactgatggacacttgggttcattccatatctggtctattgtgaatagtgctgcaataaacaaaggagcacagct

SEQ ID NO: 169445 - DNA, 387 bp, Homo sapiens
ttgggcagtgcggtccggtgtgtcatgaaacaaatctgtcatatttaaaaatgggcctgcatagaatatagtgtgtatgaaaagtggtggctacagaatccttgtagttaaagctcagaaagttttgatagccagtggcacaaagggggccagatgtccacgggggtgattgtttaaagggatggtagggaaaatgtaaagtgaatgtgtagaatgaaggggtgcttatgaccagggtgaacttctaatttattgtgtaaatcaggatgctttgaagataaaagttgtaacagacataaactgggactgcccacgcaaaccctacctatatataacattgccgacacacctcagaattatgggtaggcctggttggccttcatgatc

SEQ ID NO: 169446 - DNA, 260 bp, Homo sapiens
cccactacttgacattctggaaaagacaagacactaaaaagatcagtacttgcaaggggttcaggtggggttaaaggaagaggggtgagtagatggagcacaggtcattttcaagtagagaaactatttttttgggttggttccaagtctttgctgttatgaatagtgccgcaacaaacatacgtctgcatgtgtctttatagcagcatgatttataatcctttgggtatatacccagtaatgggatagctgggtcaaat

SEQ ID NO: 169447 - DNA, 343 bp, Homo sapiens
tgggaggtgaggccaaagaagcaatgaaaaataagcaagccattgataccattttggcttctaagtaaagcacaggaccttacaaggtttagagcaaaggaatgacacactctaacttaggttttttgttgttgtagtttccgtccagctttacagaagtataattgccaaaaaagattatatacattcaaggtgcaaaacttcattacttgatatccatatacactatgaaatgattaccacaaccaagttaattaacacgtccatcaccacacttagttatctgagtgagtgagagtgtgtgtgtgtgtgtgtgtgtgtgtgtgtcgtaaggatacttaag

SEQ ID NO: 169448 - DNA, 432 bp, Homo sapiens
ttgttttattgccatcctgtttggaagcagcacaatatcactttcagacgaagcctctaggagatgttctgtacttttctccactctcagttctcagtcttgtaagcagttacgagtgtacctttctcctctaagtaaagaagccatagatgactccccgagacttttagcaaaactcttggccttaaaactatgctaccatatattcttagaagtcaaaggatgcaacacagagaatacatttttctatgaagattaatacaagtgatattagtggatataaccattaattgtttggactcagccttatcttacaaatgcaaggtcatttatctagatcagtacttaaaaacataaaatttaataaaatgcaatataaaagttggtttaattttgatatgtgctttataggagtgaagctgaaaatattta

SEQ ID NO: 169449 - DNA, 628 bp, Homo sapiens
cgcttccggttgcgcacggcattaagtgtaggggccgagccccaagagctttggaatgaggatgatgtgaagctgagagaagagctggggccacctcttcgacacgcgtacagaaaagtcccgttttctcgcatcccaggtggaccaggatccagatcaatctgtcgatattgggaacgacgccggaccaggaaacccagcgccaagggccgggttggaggcggggactggcgcagcgggcggggcacgcgtggaggcgtcacctaaggcttcgattgcagacagcgggatgctcatcgagtgcttttcttttcttttttaatttctctttttagttttttgagataaggctccggtctgtcgcctaggctggagtgcagtggctcggtcatagatcattgcagcctggaattcctgcgctgaagctatcctcccgcctcggcctccggagtagcttggaccacagttgggcccatcacgcccagctaagttatctttttctagacacttgggtctcactgtgttccctaggctggtctcgaactcctgagcctaaaggatcctcccccctcggcctcccaagcagcttggaccacaggtgtgtgccaccacgcctggctaatttatt

SEQ ID NO: 169450 - DNA, 305 bp, Homo sapiens
gactaggagagtccaaacatctgtattttgtacacagtaatgtaaaggtaatgtggctgaaggttaggagatccaggttcaagttgtaactccatttctaagttaggaggcagcatggattctggagccaaattcacttaggttaacattcaagatctgccagggcatagttttactaactttgggtgtgttatatgaattccctgctcctctttttcccctttgtaaatgggagagagtaatgcctactatctgtgactgcaggaaggatgatgtgtgtaaagaacttggcacattgccaccat

SEQ ID NO: 169451 - DNA, 309 bp, Homo sapiens
gaaggtccttccagccccccatcccacttatctagtaagatgtcatttattatcttaacaggtggcatcatggcttaggctttggttggatcagcctgagaaaatagctggaatccaggtaataatataaacattgaaagagacttcaaacctcatgtaaaatcttgccctccagccactcaaactgtctcctattccaaaatacttgagcagagttgctgtagttcacatccctcatcatagatggtcctgagcagtctagatggtggtcgggatactctgggccccactctgccttagccttgtgtc

SEQ ID NO: 169452 - DNA, 222 bp, Homo sapiens
cctcactttgccccatggttgagggagatttctctttcaggggatgataccctctttttaatctttccttccccgaccttcaactgttcctgctgagagaagggcagggtctctctgctcccttctgccctggttctcttggccgggaccgcagggctgtctgagatgcagcaggtgtgtgttttcagcatcgcccacccgctcctgatgtgcagcctgagg

SEQ ID NO: 169453 - DNA, 131 bp, Homo sapiens
aaagtagctaggacagcaaagccatgggatgtaggacaggaaggtcttactctaactcttgccacttctaattttagctgggcaaacttggacaagtcacttatactcattcaatttcctcatctatgtaa

SEQ ID NO: 169454 - DNA, 262 bp, Homo sapiens
gtacagactacaaatttgagttctagctccaggagattagtgctttaagttgcagctttatagctaggtagtggaactatatatgacaggtaattgagaacttgagtttactcttttgtaaaatgaacatattgtattatatgatatctaattctaaagtccaatgaggcaggaccctgtgggtgattgtatatacatatacatatgtaaaatgatacctttgtcaatatgaaatatatagggcatgtaaataatatttata

SEQ ID NO: 169455 - DNA, 483 bp, Homo sapiens
atttggacacattcaagaagctaaaaagcatattagtagtacataacagttgcagatagaaaataaaatgttaaaataacaagaattttaagcaaaagtgagttaatcgtataattttaggttagacagagtatctatcaggagtataacttccactctgagtaatgtcctgtgatgcttaatgaccataggtcaccagaaacctgtacagagtaatcgagaaatgtgtttctaaggagattctggtaggcattcaatttttcactgaaatccttctgcttgtaattagccataggggcagaaattagcctgcaagtaattgcacttgtaatgggttcactgagtaatacctttgttaccttttaactaaaatgaaggaacttctttccaattgtatgtgcaattgcctcattatgaagttcattactttcagcctcaatttgacaagtgaaaataatttttgggtcatattgtgaatgcgtg

SEQ ID NO: 169456 - DNA, 508 bp, Homo sapiens
ggaaagggtctctaacggccgtttcttggttaatcttaaatcctctttattattgcgagcttcagaccgcttgggggtctggatctattaataagattattcggggcctagtgtcctgtagtatctgtcagccgttctgatagttaaatgtttcaattaaaacgaactcaaacaaaaaaaaaaaaaaaaaaaaaaaaaaaatttggggggggctggggccctggaaaagtttttaaaaccttgggtggggggcgccgggggcgccccaaaggtagggatatgggagaacccttggggcccatcagcgagggtcccctaagagaggacccggggccaggagacaaggcggcggggggttctcacaatattaaaaaacgcgccgggggggaaaaccggaggcggttcttagaacaatcccaagaggggaggtcaggagggccatcacgggggttcttatcaccagggagctcaggagagactgagaaattcaaattaaccgcgggctgtg

SEQ ID NO: 169457 - DNA, 130 bp, Homo sapiens
tgggaaggtaaagatgtttgctttgctcataggtttcctcactgacactggaagtgagatttctgtctgtcaaaatatgtcctgtaccagttgtgactatactggctctcaagtacaaatccacactcct

SEQ ID NO: 169458 - DNA, 410 bp, Homo sapiens
caaaattagaagaaaagaaatagtaaagattagagcagaagtagataaagttaaaatgacaaaaataatgtaaagaattaatgaaagaaaaagttgattttttgaaaagtgaaacaattgacaaatatttaaacaggctaactaaaaaacagaaaagatacaaattagtaaaatcagaggtgaaaaaggagacattaaaagtaacacttcagaaaagcaaaggatcattagtgaatactatcagcaattgtatgccaacaaattagaaaacctagaggaaattaattcttagacacacacaacttaccaagattgaactaggaaaaaatctaaaacctgaacagaccaataacgattaacaaaattaaaaccttaataaaaaagtctgtaggaccagactgaaaactaga

SEQ ID NO: 169459 - DNA, 300 bp, Homo sapiens
atactaatagaagcaagcaaatagaatcatatagaatgctcagttaaaatgaaagcagaaaaagtggagaagttgaaaaaacagtcaagtataagaatagaaaacaattgacatatgtacatattaatccaattatgtcaataccactttgaatgtgtatatctacatataccagttaaaaagacatggactggctgaatagaattaaaaaaacaaggctggaagggcacagtggctcacgcctgtaatcccagcattttggaatgctgaggcgggcacattgcttgaggccaggagttt

SEQ ID NO: 169460 - DNA, 390 bp, Homo sapiens
ctccccttcctaatgtagaagctctgatttttaactgggcagatgactacatggattcaaggtattttcctagtgtctcttgaaattaggtgtggtattgtgaccaaattctagccaaaaagatgttgaacagaagtggtatatgcagcttctaggaagtgttcttaagggggaaggcgtcatcccccacctttcctccttcctgcactctggaatgtggaccagatggctggagtaggagctgccacctggggccagaaaatgatcttaggcgtgaaggtcaagtaaggcaggacaagagagaaggagcctgcctccccgaggctgtgaagagccatgccagtactgtcacctgggagaattaaactggtcaagtgcctgttcgtttag

SEQ ID NO: 169461 - DNA, 229 bp, Homo sapiens
  misc_feature (20)..(21): n is a, c, g, or t
tgggtgatctagcaggatcnngagattggggatacaagcaaacaaaaatccctgcttttgtggaactgatattctactggaggcagttggcagtagggcactagtactctagtggtagagggtacccaaacagcagctggaggatgactgggaggcagggaggctgaactgggaggtgcagctaagagcctgtctctggtcagtcagctgacgaaagaatgagacaatc

SEQ ID NO: 169462 - DNA, 491 bp, Homo sapiens
tagaaaagttatgacattattatacaggataaattagaacagggaaacttgatagctgctaaaatattaagcatgtaagtcgtcaatgataaaggggtatcagtagggttgggtattagttataggaatggaagcaagtagtaaacccaaagaacattgcaaggtagaaaattaatatgtctccttgaaagtatgtgagagtgttgagggtgtcgctggcatgtcttctgctttgatttgttttggatggaggtaaatgggtaggtggaggaaagattgatgaatccagaaggaagaataagtgtaactgaaaaaagagtgctttttgaagctgtaaattccccatctatagttgttttcctgcaaaggtagacgacatcctttcattatggatgttgggtggaattttcagcatcgagtagaagatttaatttggtgacattttccatctctttcaactcagagatagtatgaatctaccactcacgaaa

SEQ ID NO: 169463 - DNA, 609 bp, Homo sapiens
ttctaaacatacatagaaatcagaccgctacctctgcagaacattttactggtaaaaagaacagcccacatgagggaaaactgatttggtggaaagacaacaaaaacaaaacatgggaaatagggaaggtgataacatggggaagaggttttgcttgtgtttcaccaggagaaaatcagcttcctgtttggatacccactagacatttgaagttctacaatgaacccatcagagatgcaaatgaaaatgcctccgcagagacagaaaacccgcaatcgagcatcatcgactcgcagggtgaacaaaatggtgatatcagaagaaccaatgaagttaccatccaccaagaaaacggcacatgtggagagccagggagaagaatagaaagaaaaagagacagagatcagagacagacacagaaagtgagactggggagagagatagtataaaagagagagactgtaagagaaaggagacaaagagataaaaggtgcgagtgaacaggtgaggagaaagaccgaaaactatgagaaacagcaactaagacacaaaggaggtgggagactgcctgggtactgcagcacccacaccgtcctcttgccccctgtc

SEQ ID NO: 169464 - DNA, 218 bp, Homo sapiens
ttagggagggcatgatcttagtttccaaatatctgagttgtagaaaaagaactatatcaatatactttcaagatgatttcctttataatccctagaaatagtaaaacaagagcaaatggtgatgtctacagcctcaccaaaaagtgagctcctcatctctggaagtagctaagtgaaggctggatcaagctctaccagggaagtcatggaggagagca

SEQ ID NO: 169465 - DNA, 507 bp, Homo sapiens
gcaggatgttgagagtttcattcattatcgtatgccccctaccccggccccacaatacctagtgcgtgggatctgacacgtggtggctggtcaatgaatgaatgaatgaatggtcacaccatctgaggttctgcactgagtagccctgaaggcttgaagcagcataagtgacaggtcctcccttgaggggcctctgttttaccaataagccaagacctaagctcaacaacactgaaagggtggccaatacccaggacagcctgtgggaattccagagaaagggagattcccagggactgggggcccaggctaaacactgaaaaatgcatctgtaggctcaaggaggaaaagcccatgtctgtctgtcttgcccaccactctctcccagcacccagcactgccccaggacagagagcacttgacacaagttggttagattaatgaatgatttagagttcagtggtccccaacctttttggcacaagagactggttgcatggaagacaa

SEQ ID NO: 169466 - DNA, 378 bp, Homo sapiens
acacctatgaaccagcatcaaaataaaaatcaaaccttacaagagatgctgaaatttctattgcatctcttagtccttaaccaaagataatcactcctggaacttctcttactatagtctcccaaattctaaaccttataaaacaaatgtgtactcttctatatctgatttcatttactgaagaacactgttgcgtgcaaaaaaaaatctgtaatattcattgctgaagggttcaattgcattactctgaaacaatttatttatctttgctactttcatgagtgctacagaaagtttctatgaacattcttgtacatgactttcattgtattcatgaacatgtattgctcttgggttcatctccagggataaaattga

SEQ ID NO: 169467 - DNA, 178 bp, Homo sapiens
gaagtcggaatccgctaaggagtgtgtaacaactcacctgccgaatcaactagccctgaaaatggatggcgctggagcgtcgggcccatacccggccgtcgccggcagtcgagagtggacgggagcggcgggggcggcgcgcagcgcgcgcgtgtggtgtgcgtcggagggcggcggc

SEQ ID NO: 169468 - DNA, 246 bp, Homo sapiens
ggtttcttctgttactaatgtattttgttgtgatttcttggtcttaattgcaattttgtagttcattcatctaacatggcattcttataataaataaaaatgtgtaacttccttcctaattatagaagtcatgcatagttattgtaggtcatttgaaaaattcagaaaagtccaactaagaagcaaaatcaaccatcatcccacctcccagtgttatgtattgtaaagatttggtgtttgtcttgt

SEQ ID NO: 169469 - DNA, 4958 bp, Homo sapiens
gcatccccttgattaaatgtttttcctcctatgcaatcaccattagctgtttggctcccattctgtattcttctgaagcagccctgcattgcaaatcaatatctttctgaaaagacagtgtgttgtgaattgccttgacagcatatgcacggttactttggctgcaatgctgctgcagagcccggttactctgccttcgtgggaactccacagatatgtgtcacaaagatgtctacacggaactgccagggaatggactcagtgatcaaacccctggacacaattcctgaggataaaaaagtcagagttcagaggacacagagcacttttgacccatttgagaaaccagctaatcaagtaaagagggtgcattctgagaacaatgcttgcattaactttaagacctcctccactggcaaagagtcacctaaagttaggcggcactccagccccagctcgccaacaagtcccaaatttggaaaagctgactcatatgaaaagctggaaaaactaggggaaggatcttatgctacagtatacaaagggaaaagcaaggtaaatgggaagttggtagctctgaaggtgatcaggctgcaggaagaagaagggacacctttcacagctatcagggaagcttctcttttaaaaggactaaaacatgctaacatagtgctacttcatgacatcatccataccaaggagacgctgacacttgtgtttgaatatgtgcacactgatttatgtcagtacatggacaagcaccctggggggctgcatccagataatgtgaagttgtttttatttcagttgctgcgaggtctgtcttacatccaccagcgttatattttgcacagagacctgaaaccacagaaccttctgatcagtgacacgggggagttaaagctggcagatttcggtcttgcaagagcaaaatccgtccctagccacacatactccaacgaagtggttaccttgtggtacagacctccagatgtccttctaggctcaacagaatattccacctgccttgacatgtggggagtaggttgcatctttgttgaaatgatccaaggagttgctgcttttccaggaatgaaagacattcaggatcaacttgaacgaatatttctggttcttggaacaccaaatgaggacacatggcctggagttcattctttaccacattttaagccagaacgctttaccctgtacagctctaaaaaccttagacaagcatggaataagctcagctatgtgaaccatgcagaggacctggcctccaagctcctacaatgttccccaaagaacagactgtcggcacaggctgccttgagccacgagtattttagtgacctgccgccacggctatgggaactcaccgacatgtcttctatttttactgtcccaaatgtgagattgcaaccagaagctggagaaagcatgcgggcctttgggaaaaacaatagttatggcaaaagtctatcaaacagcaagcactgacaagcagcacattctcaagagcacacaggattaagttgtcatcattctgggaagaaaaaaaaaacattaatgaagaggccaataatatgaagggaatcatggatcagttttctttcgctccctgtggtggatttcacttacaagaaaattgaagctggcaagaccctgttttctctgcaatttatttaaaaccttgcacgcatttggataccttgtgatttccaagaactacgtgaagattaagctttgcttactgatacatggcatgtattcttttcagtcttttgtgtttgattttgtttgatttccctctgcagcacagcgtctctgtaaaggtttttatgctttcaccagccatgtcttaaatacattaagacaacacatttggtgttcacacttcttcagtaatgtctgaacttgaaagccacagagtggcataaaacaatgtgtgttttctttgagagcagtgcacattttgcaaccactaggaaggaaattttctgctaaagcaaacccctgttctctgacttgacaacttggccccggactgtggggccccacctgttgcttaccttttgaggtaattttgcaaatgtggtttttttacttggaaataactgcacatttatatataggatattggactctgcttagcattttcaagccacatagcatgactgttttttgaataggttggaattgaaaaaacaattatcaaacgttaagaacaaagacagggataaattgcttacatttcaacctctagagattgaggtaactttttgtgtctgggtcttgtcaacatctaatttttttccatccattctgttacactttgtattttctaactggagaaaagagtgaggaacagaatgttttaaatctggtgcaaaagaactatatctgctggatgagccttgaaagcagtcttggcctgttagggcttacaaagtaaattacaaagtgatccagttcaaagtttgcttagttacaacaaagcacctttaaaaaaaatacattttaaaaaaacattccaagccaattggaagacatcattgggttcttactttaagacatctcctggaataactgttcaaatgcaggttttagaaacaatgcaggaatcttgctttaaagatgaaaaagggaatgggccagcttcccttactcaaggagttgagggaccttggaggatgaaggcgagtatgtgacactggagaaaagtggaccaggcatgtcttttgctttgatctggagggagggctgcctgatgcaggccggctcccagtggggcaggcctcgctgcagaatgcccagtagtactgcggccaaggggacagttaggagacttcatctaaagcatgaaacctagctcctctacacacaaattcctatggaaatacctttgtgtacagtgtcttacattttcctattagtcagaaagaaggagagaatgagtgagtgcttgaaatgtgtcatactgttttaggatcaagactaggaattaggagccaggttgacaaggactttttctgagagttgggtgagggtaaagcttttctataatcaagctcaatacaccaaggaaactggatccagaattcctaaactttaaaatggtactgtctgcggagtggagtatggatggttatgtcaaagtcatagttcatcctatccagatgtagcattcatggtaaacttttaagtgctaagcaaggaattatttactgattggttttaaagagagcagaaaacacccaagtgtagaatgtctactgtttgctacctagaaatcttttccattcctctttcatacattccaacccactggaagtctttagaggtattttgatttaaagtatacttaaattaggatttcttaaagaaaacatagggagaaaactttacatgcaattaaaaatggactttcctgtgatttgtttttaatcattcatttggagaagaggcatgacctttgtatttcactaagtttaaagcaagagcaactgatgattaaatgttgctttttaataaggtttttaacttgaaaatttgaaaatatttaatgttgaaagacttcaattagggctattagagttatatctccctgtcgtaggcagcttcttcggagaagtgaaatataacattactcagtggacggagaagtctgttttgttacagagacatgcctctcagaaggtcaggaggttttgagtacctatccttgccacccatacaggaaatccaaagtttggtgtctctctctctctctgtctctttctttctctttctccccccaaacccctctcactccctccctccctctctccttcccctatttgcaatcatattctccctctgcttcttttctcttctgccctccttgtgggcagtcatgaaaatcaattcagactgtgttcattagcagatttattattctattgagaaagcactggaatgttttgtgagattatttttatatgaaggaatagcctgaactcaaacagatggtaagaatagtacaaacaccttagcacatcactgcacacacagtattctgaaaggagatttgacacttaattcccattttcttaaaataacagttttgttgacttaaaaatatgagatacataggatgtgaaaaaaaatgtttgcagtactcagcaaaaaatagggtacataaagcagggtggctgtccatccactgattctggggtgagaagcgatttctacctcgcaagagtgactagaaagtttctaggagcacctccaggcttgcaaagaaagtgaggcctcttggtatcctttcctcagtgtgtatatgacagccagtataatcaataccctaggttatgcgtctatatgatactcatctgtgaatattattggttttgtaatctttgttatataagaggatgtttaggctgtatatactggggtagattattgcctgccccttatacataggaatatgctgcataattgcgcataacttccatctcccttactggcttgtaggcagaggaaactgtatatgttactgccttgtacttttctcatacaccaaaaacacaccaaaaaaatcaataaaataagcaatcttctattctcattccttttcccacagcagcatattttagaggcacatacaaaacctacattctctagttgggagtggatttttaaagttttccttttatcttttatttttttttttgtatgatgcactgagatgtgtactttctaacaggggattggtacctaagaaatgtggtagcattattcagaaaactattatactttcaaatgacacatagtaaggagaatggaataatacatgttgcatatttgttaccagttgtaatttgtctgtattatgaaagatgtaatggtttgtcagctgtcactgttgttttcttgtaacatgatatggaataaagtatagcagaatctccgta

SEQ ID NO: 169470 - DNA, 5005 bp, Homo sapiens
  misc_feature (2)..(2): n is a, c, g, or t
  misc_feature (5)..(6): n is a, c, g, or t
cntgnncgtcgcttcccggcccgccgaggaggtggtggaggaggaggcgccgctttccccgcggcgcgcgccctcgccgttgtctgagctgtgcctggaccagtttggggaagttgtcggggctccgcgtcgcccagatgtgtgacctcattgagccgcagccggccgagaagatcggcaagatgaagaagttgcggagaactttgtcggagagtttcagtcgcattgctttgaagaaagatgacaccacctttgatgagatatgtgtcacaaagatgtctacacggaactgccagggaatggactcagtgatcaaacccctggacacaattcctgaggataaaaaagtcagagttcagaggacacagagcacttttgacccatttgagaaaccagctaatcaagtaaagagggtgcattctgagaacaatgcttgcattaactttaagacctcctccactggcaaagagtcacctaaagttaggcggcactccagccccagctcgccaacaagtcccaaatttggaaaagctgactcatatgaaaagctggaaaaactaggggaaggatcttatgctacagtatacaaagggaaaagcaaggtaaatgggaagttggtagctctgaaggtgatcaggctgcaggaagaagaagggacacctttcacagctatcagggaagcttctcttttaaaaggactaaaacatgctaacatagtgctacttcatgacatcatccataccaaggagacgctgacacttgtgtttgaatatgtgcacactgatttatgtcagtacatggacaagcaccctggggggctgcatccagataatgtgaagttgtttttatttcagttgctgcgaggtctgtcttacatccaccagcgttatattttgcacagagacctgaaaccacagaaccttctgatcagtgacacgggggagttaaagctggcagatttcggtcttgcaagagcaaaatccgtccctagccacacatactccaacgaagtggttaccttgtggtacagacctccagatgtccttctaggctcaacagaatattccacctgccttgacatgtggggagtaggttgcatctttgttgaaatgatccaaggagttgctgcttttccaggaatgaaagacattcaggatcaacttgaacgaatatttctggttcttggaacaccaaatgaggacacatggcctggagttcattctttaccacattttaagccagaacgctttaccctgtacagctctaaaaaccttagacaagcatggaataagctcagctatgtgaaccatgcagaggacctggcctccaagctcctacaatgttccccaaagaacagactgtcggcacaggctgccttgagccacgagtattttagtgacctgccgccacggctatgggaactcaccgacatgtcttctatttttactgtcccaaatgtgagattgcaaccagaagctggagaaagcatgcgggcctttgggaaaaacaatagttatggcaaaagtctatcaaacagcaagcactgacaagcagcacattctcaagagcacacaggattaagttgtcatcattctgggaagaaaaaaaaaacattaatgaagaggccaataatatgaagggaatcatggatcagttttctttcgctccctgtggtggatttcacttacaagaaaattgaagctggcaagaccctgttttctctgcaatttatttaaaaccttgcacgcatttggataccttgtgatttccaagaactacgtgaagattaagctttgcttactgatacatggcatgtattcttttcagtcttttgtgtttgattttgtttgatttccctctgcagcacagcgtctctgtaaaggtttttatgctttcaccagccatgtcttaaatacattaagacaacacatttggtgttcacacttcttcagtaatgtctgaacttgaaagccacagagtggcataaaacaatgtgtgttttctttgagagcagtgcacattttgcaaccactaggaaggaaattttctgctaaagcaaacccctgttctctgacttgacaacttggccccggactgtggggccccacctgttgcttaccttttgaggtaattttgcaaatgtggtttttttacttggaaataactgcacatttatatataggatattggactctgcttagcattttcaagccacatagcatgactgttttttgaataggttggaattgaaaaaacaattatcaaacgttaagaacaaagacagggataaattgcttacatttcaacctctagagattgaggtaactttttgtgtctgggtcttgtcaacatctaatttttttccatccattctgttacactttgtattttctaactggagaaaagagtgaggaacagaatgttttaaatctggtgcaaaagaactatatctgctggatgagccttgaaagcagtcttggcctgttagggcttacaaagtaaattacaaagtgatccagttcaaagtttgcttagttacaacaaagcacctttaaaaaaaatacattttaaaaaaacattccaagccaattggaagacatcattgggttcttactttaagacatctcctggaataactgttcaaatgcaggttttagaaacaatgcaggaatcttgctttaaagatgaaaaagggaatgggccagcttcccttactcaaggagttgagggaccttggaggatgaaggcgagtatgtgacactggagaaaagtggaccaggcatgtcttttgctttgatctggagggagggctgcctgatgcaggccggctcccagtggggcaggcctcgctgcagaatgcccagtagtactgcggccaaggggacagttaggagacttcatctaaagcatgaaacctagctcctctacacacaaattcctatggaaatacctttgtgtacagtgtcttacattttcctattagtcagaaagaaggagagaatgagtgagtgcttgaaatgtgtcatactgttttaggatcaagactaggaattaggagccaggttgacaaggactttttctgagagttgggtgagggtaaagcttttctataatcaagctcaatacaccaaggaaactggatccagaattcctaaactttaaaatggtactgtctgcggagtggagtatggatggttatgtcaaagtcatagttcatcctatccagatgtagcattcatggtaaacttttaagtgctaagcaaggaattatttactgattggttttaaagagagcagaaaacacccaagtgtagaatgtctactgtttgctacctagaaatcttttccattcctctttcatacattccaacccactggaagtctttagaggtattttgatttaaagtatacttaaattaggatttcttaaagaaaacatagggagaaaactttacatgcaattaaaaatggactttcctgtgatttgtttttaatcattcatttggagaagaggcatgacctttgtatttcactaagtttaaagcaagagcaactgatgattaaatgttgctttttaataaggtttttaacttgaaaatttgaaaatatttaatgttgaaagacttcaattagggctattagagttatatctccctgtcgtaggcagcttcttcggagaagtgaaatataacattactcagtggacggagaagtctgttttgttacagagacatgcctctcagaaggtcaggaggttttgagtacctatccttgccacccatacaggaaatccaaagtttggtgtctctctctctctctgtctctttctttctctttctccccccaaacccctctcactccctccctccctctctccttcccctatttgcaatcatattctccctctgcttcttttctcttctgccctccttgtgggcagtcatgaaaatcaattcagactgtgttcattagcagatttattattctattgagaaagcactggaatgttttgtgagattatttttatatgaaggaatagcctgaactcaaacagatggtaagaatagtacaaacaccttagcacatcactgcacacacagtattctgaaaggagatttgacacttaattcccattttcttaaaataacagttttgttgacttaaaaatatgagatacataggatgtgaaaaaaaatgtttgcagtactcagcaaaaaatagggtacataaagcagggtggctgtccatccactgattctggggtgagaagcgatttctacctcgcaagagtgactagaaagtttctaggagcacctccaggcttgcaaagaaagtgaggcctcttggtatcctttcctcagtgtgtatatgacagccagtataatcaataccctaggttatgcgtctatatgatactcatctgtgaatattattggttttgtaatctttgttatataagaggatgtttaggctgtatatactggggtagattattgcctgccccttatacataggaatatgctgcataattgcgcataacttccatctcccttactggcttgtaggcagaggaaactgtatatgttactgccttgtacttttctcatacaccaaaaacacaccaaaaaaatcaataaaataagcaatcttctattctcattccttttcccacagcagcatattttagaggcacatacaaaacctacattctctagttgggagtggatttttaaagttttccttttatcttttatttttttttttgtatgatgcactgagatgtgtactttctaacaggggattggtacctaagaaatgtggtagcattattcagaaaactattatactttcaaatgacacatagtaaggagaatggaataatacatgttgcatatttgttaccagttgtaatttgtctgtattatgaaagatgtaatggtttgtcagctgtcactgttgttttcttgtaacatgatatggaataaagtatagcagaatctccgta

SEQ ID NO: 169471 - DNA, 5208 bp, Homo sapiens
  misc_feature (2)..(2): n is a, c, g, or t
  misc_feature (5)..(6): n is a, c, g, or t
cntgnncgtcgcttcccggcccgccgaggaggtggtggaggaggaggcgccgctttccccgcggcgcgcgccctcgccgttgtctgagctgtgcctggaccagtttggggaagttgtcggggctccgcgtcgcccagatgtgtgacctcattgagccgcagccggccgagaagatcggcaagatgaagaagttgcggagaactttgtcggagagtttcagtcgcattgctttgaagaaagatgacaccacctttgatgagatatgtgtcacaaagatgtctacacggaactgccagggaatggactcagtgatcaaacccctggacacaattcctgaggataaaaaagtcagagttcagaggacacagagcacttttgacccatttgagaaaccagctaatcaagtaaagagggtgcattctgagaacaatgcttgcattaactttaagacctcctccactggcaaagagtcacctaaagttaggcggcactccagccccagctcgccaacaagtcccaaatttggaaaagctgactcatatgaaaagctggaaaaactaggggaaggatcttatgctacagtatacaaagggaaaagcaaggtaaatgggaagttggtagctctgaaggtgatcaggctgcaggaagaagaagggacacctttcacagctatcagggaagcttctcttttaaaaggactaaaacatgctaacatagtgctacttcatgacatcatccataccaaggagacgctgacacttgtgtttgaatatgtgcacactgatttatgtcagtacatggacaagcaccctggggggctgcatccagataatgtgaagttgtttttatttcagttgctgcgaggtctgtcttacatccaccagcgttatattttgcacagagacctgaaaccacagaaccttctgatcagtgacacgggggagttaaagctggcagatttcggtcttgcaagagcaaaatccgtccctagccacacatactccaacgaagtggttaccttgtggtacagacctccagatgtccttctaggctcaacagaatattccacctgccttgacatgtggggagtaggttgcatctttgttgaaatgatccaaggagttgctgcttttccaggaatgaaagacattcaggatcaacttgaacgaatatttctggttcttggaacaccaaatgaggacacatggcctggagttcattctttaccacattttaagccagaacgctttaccctgtacagctctaaaaaccttagacaagcatggaataagctcagctatgtgaaccatgcagaggacctggcctccaagctcctacaatgttccccaaagaacagactgtcggcacaggctgccttgagccacgagtattttagtgacctgccgccacggctatgggaactcaccgacatgtcttctatttttactgtcccaaatgtgagattgcaaccagaagctggagaaagcatgcgggcctttgggaaaaacaatagttatggcaaaagtctatcaaacagcaagcactgacaagcagcacattctcaagagcacacaggattaagttgtcatcattctgggaagaaaaaaaaaacattaatgaagaggccaataatatgaagggaatcatggatcagttttctttcgctccctgtggtggatttcacttacaagaaaattgaagctggcaagaccctgttttctctgcaatttatttaaaaccttgcacgcatttggataccttgtgatttccaagaactacgtgaagattaagctttgcttactgatacatggcatgtattcttttcagtcttttgtgtttgattttgtttgatttccctctgcagcacagcgtctctgtaaaggtttttatgctttcaccagccatgtcttaaatacattaagacaacacatttggtgttcacacttcttcagtaatgtctgaacttgaaagccacagagtggcataaaacaatgtgtgttttctttgagagcagtgcacattttgcaaccactaggaaggaaattttctgctaaagcaaacccctgttctctgacttgacaacttggccccggactgtggggccccacctgttgcttaccttttgaggtaattttgcaaatgtggtttttttacttggaaataactgcacatttatatataggatattggactctgcttagcattttcaagccacatagcatgactgttttttgaataggttggaattgaaaaaacaattatcaaacgttaagaacaaagacagggataaattgcttacatttcaacctctagagattgaggtaactttttgtgtctgggtcttgtcaacatctaatttttttccatccattctgttacactttgtattttctaactggagaaaagagtgaggaacagaatgttttaaatctggtgcaaaagaactatatctgctggatgagccttgaaagcagtcttggcctgttagggcttacaaagtaaattacaaagtgatccagttcaaagtttgcttagttacaacaaagcacctttaaaaaaaatacattttaaaaaaacattccaagccaattggaagacatcattgggttcttactttaagacatctcctggaataactgttcaaatgcaggttttagaaacaatgcaggaatcttgctttaaagatgaaaaagggaatgggccagcttcccttactcaaggagttgagggaccttggaggatgaaggcgagtatgtgacactggagaaaagtggaccaggcatgtcttttgctttgatctggagggagggctgcctgatgcaggccggctcccagtggggcaggcctcgctgcagaatgcccagtagtactgcggccaaggggacagttaggagacttcatctaaagcatgaaacctagctcctctacacacaaattcctatggaaatacctttgtgtacagtgtcttacattttcctattagtcagaaagaaggagagaatgagtgagtgcttgaaatgtgtcatactgttttaggatcaagactaggaattaggagccaggttgacaaggactttttctgagagttgggtgagggtaaagcttttctataatcaagctcaatacaccaaggaaactggatccagaattcctaaactttaaaatggtactgtctgcggagtggagtatggatggttatgtcaaagtcatagttcatcctatccagatgtagcattcatggtaaacttttaagtgctaagcaaggaattatttactgattggttttaaagagagcagaaaacacccaagtgtagaatgtctactgtttgctacctagaaatcttttccattcctctttcatacattccaacccactggaagtctttagaggtattttgatttaaagtatacttaaattaggatttcttaaagaaaacatagggagaaaactttacatgcaattaaaaatggactttcctgtgatttgtttttaatcattcatttggagaagaggcatgacctttgtatttcactaagtttaaagcaagagcaactgatgattaaatgttgctttttaataaggtttttaacttgaaaatttgaaaatatttaatgttgaaagacttcaattagggctattagagttatatctccctgtcgtaggcagcttcttcggagaagtgaaatataacattactcagtggacggagaagtctgttttgttacagagacatgcctctcagaaggtcaggaggttttgagtacctatccttgccacccatacaggaaatccaaagtttggtgtctctctctctctctgtctctttctttctctttctccccccaaacccctctcactccctccctccctctctccttcccctatttgcaatcatattctccctctgcttcttttctcttctgccctccttgtgggcagtcatgaaaatcaattcagactgtgttcattagcagatttattattctattgagaaagcactggaatgttttgtgagattatttttatatgaaggaatagcctgaactcaaacagatggtaagaatagtacaaacaccttagcacatcactgcacacacagtattctgaaaggagatttgacacttaattcccattttcttaaaataacagttttgttgacttaaaaatatgagatacataggatgtgaaaaaaaatgtttgcagtactcagcaaaaaatagggtacataaagcagggtggctgtccatccactgattctggggtgagaagcgatttctacctcgcaagagtgactagaaagtttctaggagcacctccaggcttgcaaagaaagtgaggcctcttggtatcctttcctcagtgtgtatatgacagccagtataatcaataccctaggttatgcgtctatatgatactcatctgtgaatattattggttttgtaatctttgttatataagaggatgtttaggctgtatatactggggtagattattgcctgccccttatacataggaatatgctgcataattgcgcataacttccatctcccttactggcttgtaggcagaggaaactgtatatgttactgccttgtacttttctcatacaccaaaaacacaccaaaaaaatcaataaaataagcaatcttctattctcattccttttcccacagcagcatattttagaggcacatacaaaacctacattctctagttgggagtggatttttaaagttttccttttatcttttatttttttttttgtatgatgcactgagatgtgtactttctaacaggggattggtacctaagaaatgtggtagcattattcagaaaactattatactttcaaatgacacatagtaaggagaatggaataatacatgttgcatatttgttaccagttgtaatttgtctgtattatgaaagatgtaatggtttgtcagctgtcactgttgttttcttgtaacatgatatggaataaagtatagcagaatctccgtaaaaaaacaacaggatccaaaagggcgtcagtctggtgagtgtccggccccagtaccagtgacggaccaagaaacttcgggaggtcaaaactgggggagctgccaaggtgggatccttgatgcgggacttcagcctagtggccattacggagcgtcaacagaggttactacggtatacaacaagtaccatcatgtgaacacagg

SEQ ID NO: 169472 - DNA, 4543 bp, Homo sapiens
  misc_feature (13)..(13): n is a, c, g, or t
  misc_feature (16)..(16): n is a, c, g, or t
  misc_feature (43)..(43): n is a, c, g, or t
caactctccaggnttncttattcgtgtgcctccacccccactngccaacaagtcccaaatttggaaaagctgactcatatgaaaagctggaaaaactaggggaaggatcttatgctacagtatacaaagggaaaagcaaggtaaatgggaagttggtagctctgaaggtgatcaggctgcaggaagaagaagggacacctttcacagctatcagggaagcttctcttttaaaaggactaaaacatgctaacatagtgctacttcatgacatcatccataccaaggagacgctgacacttgtgtttgaatatgtgcacactgatttatgtcagtacatggacaagcaccctggggggctgcatccagataatgtgaagttgtttttatttcagttgctgcgaggtctgtcttacatccaccagcgttatattttgcacagagacctgaaaccacagaaccttctgatcagtgacacgggggagttaaagctggcagatttcggtcttgcaagagcaaaatccgtccctagccacacatactccaacgaagtggttaccttgtggtacagacctccagatgtccttctaggctcaacagaatattccacctgccttgacatgtggggagtaggttgcatctttgttgaaatgatccaaggagttgctgcttttccaggaatgaaagacattcaggatcaacttgaacgaatatttctggttcttggaacaccaaatgaggacacatggcctggagttcattctttaccacattttaagccagaacgctttaccctgtacagctctaaaaaccttagacaagcatggaataagctcagctatgtgaaccatgcagaggacctggcctccaagctcctacaatgttccccaaagaacagactgtcggcacaggctgccttgagccacgagtattttagtgacctgccgccacggctatgggaactcaccgacatgtcttctatttttactgtcccaaatgtgagattgcaaccagaagctggagaaagcatgcgggcctttgggaaaaacaatagttatggcaaaagtctatcaaacagcaagcactgacaagcagcacattctcaagagcacacaggattaagttgtcatcattctgggaagaaaaaaaaaacattaatgaagaggccaataatatgaagggaatcatggatcagttttctttcgctccctgtggtggatttcacttacaagaaaattgaagctggcaagaccctgttttctctgcaatttatttaaaaccttgcacgcatttggataccttgtgatttccaagaactacgtgaagattaagctttgcttactgatacatggcatgtattcttttcagtcttttgtgtttgattttgtttgatttccctctgcagcacagcgtctctgtaaaggtttttatgctttcaccagccatgtcttaaatacattaagacaacacatttggtgttcacacttcttcagtaatgtctgaacttgaaagccacagagtggcataaaacaatgtgtgttttctttgagagcagtgcacattttgcaaccactaggaaggaaattttctgctaaagcaaacccctgttctctgacttgacaacttggccccggactgtggggccccacctgttgcttaccttttgaggtaattttgcaaatgtggtttttttacttggaaataactgcacatttatatataggatattggactctgcttagcattttcaagccacatagcatgactgttttttgaataggttggaattgaaaaaacaattatcaaacgttaagaacaaagacagggataaattgcttacatttcaacctctagagattgaggtaactttttgtgtctgggtcttgtcaacatctaatttttttccatccattctgttacactttgtattttctaactggagaaaagagtgaggaacagaatgttttaaatctggtgcaaaagaactatatctgctggatgagccttgaaagcagtcttggcctgttagggcttacaaagtaaattacaaagtgatccagttcaaagtttgcttagttacaacaaagcacctttaaaaaaaatacattttaaaaaaacattccaagccaattggaagacatcattgggttcttactttaagacatctcctggaataactgttcaaatgcaggttttagaaacaatgcaggaatcttgctttaaagatgaaaaagggaatgggccagcttcccttactcaaggagttgagggaccttggaggatgaaggcgagtatgtgacactggagaaaagtggaccaggcatgtcttttgctttgatctggagggagggctgcctgatgcaggccggctcccagtggggcaggcctcgctgcagaatgcccagtagtactgcggccaaggggacagttaggagacttcatctaaagcatgaaacctagctcctctacacacaaattcctatggaaatacctttgtgtacagtgtcttacattttcctattagtcagaaagaaggagagaatgagtgagtgcttgaaatgtgtcatactgttttaggatcaagactaggaattaggagccaggttgacaaggactttttctgagagttgggtgagggtaaagcttttctataatcaagctcaatacaccaaggaaactggatccagaattcctaaactttaaaatggtactgtctgcggagtggagtatggatggttatgtcaaagtcatagttcatcctatccagatgtagcattcatggtaaacttttaagtgctaagcaaggaattatttactgattggttttaaagagagcagaaaacacccaagtgtagaatgtctactgtttgctacctagaaatcttttccattcctctttcatacattccaacccactggaagtctttagaggtattttgatttaaagtatacttaaattaggatttcttaaagaaaacatagggagaaaactttacatgcaattaaaaatggactttcctgtgatttgtttttaatcattcatttggagaagaggcatgacctttgtatttcactaagtttaaagcaagagcaactgatgattaaatgttgctttttaataaggtttttaacttgaaaatttgaaaatatttaatgttgaaagacttcaattagggctattagagttatatctccctgtcgtaggcagcttcttcggagaagtgaaatataacattactcagtggacggagaagtctgttttgttacagagacatgcctctcagaaggtcaggaggttttgagtacctatccttgccacccatacaggaaatccaaagtttggtgtctctctctctctctgtctctttctttctctttctccccccaaacccctctcactccctccctccctctctccttcccctatttgcaatcatattctccctctgcttcttttctcttctgccctccttgtgggcagtcatgaaaatcaattcagactgtgttcattagcagatttattattctattgagaaagcactggaatgttttgtgagattatttttatatgaaggaatagcctgaactcaaacagatggtaagaatagtacaaacaccttagcacatcactgcacacacagtattctgaaaggagatttgacacttaattcccattttcttaaaataacagttttgttgacttaaaaatatgagatacataggatgtgaaaaaaaatgtttgcagtactcagcaaaaaatagggtacataaagcagggtggctgtccatccactgattctggggtgagaagcgatttctacctcgcaagagtgactagaaagtttctaggagcacctccaggcttgcaaagaaagtgaggcctcttggtatcctttcctcagtgtgtatatgacagccagtataatcaataccctaggttatgcgtctatatgatactcatctgtgaatattattggttttgtaatctttgttatataagaggatgtttaggctgtatatactggggtagattattgcctgccccttatacataggaatatgctgcataattgcgcataacttccatctcccttactggcttgtaggcagaggaaactgtatatgttactgccttgtacttttctcatacaccaaaaacacaccaaaaaaatcaataaaataagcaatcttctattctcattccttttcccacagcagcatattttagaggcacatacaaaacctacattctctagttgggagtggatttttaaagttttccttttatcttttatttttttttttgtatgatgcactgagatgtgtactttctaacaggggattggtacctaagaaatgtggtagcattattcagaaaactattatactttcaaatgacacatagtaaggagaatggaataatacatgttgcatatttgttaccagttgtaatttgtctgtattatgaaagatgtaatggtttgtcagctgtcactgttgttttcttgtaacatgatatggaataaagtatagcagaatctccgta

SEQ ID NO: 169473 - DNA, 4750 bp, Homo sapiens
agcgggttgctgtatgagcctggcctggtgcaaacacattgctagagacatgttaaagagttccaggtgaatcaagcctgagggagacaacagcaaaacgatatgtgtcacaaagatgtctacacggaactgccagggaatggactcagtgatcaaacccctggacacaattcctgaggataaaaaagtcagagttcagaggacacagagcacttttgacccatttgagaaaccagctaatcaagtaaagagggtgcattctgagaacaatgcttgcattaactttaagacctcctccactggcaaagagtcacctaaagttaggcggcactccagccccagctcgggtaaatgggaagttggtagctctgaaggtgatcaggctgcaggaagaagaagggacacctttcacagctatcagggaagcttctcttttaaaaggactaaaacatgctaacatagtgctacttcatgacatcatccataccaaggagacgctgacacttgtgtttgaatatgtgcacactgatttatgtcagtacatggacaagcaccctggggggctgcatccagataatgtgaagttgtttttatttcagttgctgcgaggtctgtcttacatccaccagcgttatattttgcacagagacctgaaaccacagaaccttctgatcagtgacacgggggagttaaagctggcagatttcggtcttgcaagagcaaaatccgtccctagccacacatactccaacgaagtggttaccttgtggtacagacctccagatgtccttctaggctcaacagaatattccacctgccttgacatgtggggagtaggttgcatctttgttgaaatgatccaaggagttgctgcttttccaggaatgaaagacattcaggatcaacttgaacgaatatttctggttcttggaacaccaaatgaggacacatggcctggagttcattctttaccacattttaagccagaacgctttaccctgtacagctctaaaaaccttagacaagcatggaataagctcagctatgtgaaccatgcagaggacctggcctccaagctcctacaatgttccccaaagaacagactgtcggcacaggctgccttgagccacgagtattttagtgacctgccgccacggctatgggaactcaccgacatgtcttctatttttactgtcccaaatgtgagattgcaaccagaagctggagaaagcatgcgggcctttgggaaaaacaatagttatggcaaaagtctatcaaacagcaagcactgacaagcagcacattctcaagagcacacaggattaagttgtcatcattctgggaagaaaaaaaaaacattaatgaagaggccaataatatgaagggaatcatggatcagttttctttcgctccctgtggtggatttcacttacaagaaaattgaagctggcaagaccctgttttctctgcaatttatttaaaaccttgcacgcatttggataccttgtgatttccaagaactacgtgaagattaagctttgcttactgatacatggcatgtattcttttcagtcttttgtgtttgattttgtttgatttccctctgcagcacagcgtctctgtaaaggtttttatgctttcaccagccatgtcttaaatacattaagacaacacatttggtgttcacacttcttcagtaatgtctgaacttgaaagccacagagtggcataaaacaatgtgtgttttctttgagagcagtgcacattttgcaaccactaggaaggaaattttctgctaaagcaaacccctgttctctgacttgacaacttggccccggactgtggggccccacctgttgcttaccttttgaggtaattttgcaaatgtggtttttttacttggaaataactgcacatttatatataggatattggactctgcttagcattttcaagccacatagcatgactgttttttgaataggttggaattgaaaaaacaattatcaaacgttaagaacaaagacagggataaattgcttacatttcaacctctagagattgaggtaactttttgtgtctgggtcttgtcaacatctaatttttttccatccattctgttacactttgtattttctaactggagaaaagagtgaggaacagaatgttttaaatctggtgcaaaagaactatatctgctggatgagccttgaaagcagtcttggcctgttagggcttacaaagtaaattacaaagtgatccagttcaaagtttgcttagttacaacaaagcacctttaaaaaaaatacattttaaaaaaacattccaagccaattggaagacatcattgggttcttactttaagacatctcctggaataactgttcaaatgcaggttttagaaacaatgcaggaatcttgctttaaagatgaaaaagggaatgggccagcttcccttactcaaggagttgagggaccttggaggatgaaggcgagtatgtgacactggagaaaagtggaccaggcatgtcttttgctttgatctggagggagggctgcctgatgcaggccggctcccagtggggcaggcctcgctgcagaatgcccagtagtactgcggccaaggggacagttaggagacttcatctaaagcatgaaacctagctcctctacacacaaattcctatggaaatacctttgtgtacagtgtcttacattttcctattagtcagaaagaaggagagaatgagtgagtgcttgaaatgtgtcatactgttttaggatcaagactaggaattaggagccaggttgacaaggactttttctgagagttgggtgagggtaaagcttttctataatcaagctcaatacaccaaggaaactggatccagaattcctaaactttaaaatggtactgtctgcggagtggagtatggatggttatgtcaaagtcatagttcatcctatccagatgtagcattcatggtaaacttttaagtgctaagcaaggaattatttactgattggttttaaagagagcagaaaacacccaagtgtagaatgtctactgtttgctacctagaaatcttttccattcctctttcatacattccaacccactggaagtctttagaggtattttgatttaaagtatacttaaattaggatttcttaaagaaaacatagggagaaaactttacatgcaattaaaaatggactttcctgtgatttgtttttaatcattcatttggagaagaggcatgacctttgtatttcactaagtttaaagcaagagcaactgatgattaaatgttgctttttaataaggtttttaacttgaaaatttgaaaatatttaatgttgaaagacttcaattagggctattagagttatatctccctgtcgtaggcagcttcttcggagaagtgaaatataacattactcagtggacggagaagtctgttttgttacagagacatgcctctcagaaggtcaggaggttttgagtacctatccttgccacccatacaggaaatccaaagtttggtgtctctctctctctctgtctctttctttctctttctccccccaaacccctctcactccctccctccctctctccttcccctatttgcaatcatattctccctctgcttcttttctcttctgccctccttgtgggcagtcatgaaaatcaattcagactgtgttcattagcagatttattattctattgagaaagcactggaatgttttgtgagattatttttatatgaaggaatagcctgaactcaaacagatggtaagaatagtacaaacaccttagcacatcactgcacacacagtattctgaaaggagatttgacacttaattcccattttcttaaaataacagttttgttgacttaaaaatatgagatacataggatgtgaaaaaaaatgtttgcagtactcagcaaaaaatagggtacataaagcagggtggctgtccatccactgattctggggtgagaagcgatttctacctcgcaagagtgactagaaagtttctaggagcacctccaggcttgcaaagaaagtgaggcctcttggtatcctttcctcagtgtgtatatgacagccagtataatcaataccctaggttatgcgtctatatgatactcatctgtgaatattattggttttgtaatctttgttatataagaggatgtttaggctgtatatactggggtagattattgcctgccccttatacataggaatatgctgcataattgcgcataacttccatctcccttactggcttgtaggcagaggaaactgtatatgttactgccttgtacttttctcatacaccaaaaacacaccaaaaaaatcaataaaataagcaatcttctattctcattccttttcccacagcagcatattttagaggcacatacaaaacctacattctctagttgggagtggatttttaaagttttccttttatcttttatttttttttttgtatgatgcactgagatgtgtactttctaacaggggattggtacctaagaaatgtggtagcattattcagaaaactattatactttcaaatgacacatagtaaggagaatggaataatacatgttgcatatttgttaccagttgtaatttgtctgtattatgaaagatgtaatggtttgtcagctgtcactgttgttttcttgtaacatgatatggaataaagtatagcagaatctccgta

SEQ ID NO: 169474 - DNA, 1458 bp, Homo sapiens
agcgggttgctgtatgagcctggcctggtgcaaacacattgctagagacatgttaaagagttccaggtgaatcaagcctgagggagacaacagcaaaacgatatgtgtcacaaagatgtctacacggaactgccagggaatggactcagtgatcaaacccctggacacaattcctgaggataaaaaagtcagagttcagaggacacagagcacttttgacccatttgagaaaccagctaatcaagtaaagagggtgcattctgagaacaatgcttgcattaactttaagacctcctccactggcaaagagtcacctaaagttaggcggcactccagccccagctcgccaacaagtcccaaatttggaaaagctgactcatatgaaaagctggaaaaactaggggaaggatcttatgctacagtatacaaagggaaaagcaaggtaaatgggaagttggtagctctgaaggtgatcaggctgcaggaagaagaagggacacctttcacagctatcagggaagcttctcttttaaaaggactaaaacatgctaacatagtgctacttcatgacatcatccataccaaggagacgctgacacttgtgtttgaatatgtgcacactgatttatgtcagtacatggacaagcaccctggggggctgcatccagataatgtgaagttgtttttatttcagttgctgcgaggtctgtcttacatccaccagcgttatattttgcacagagacctgaaaccacagaaccttctgatcagtgacacgggggagttaaagctggcagatttcggtcttgcaagagcaaaatccgtccctagccacacatactccaacgaagtggttaccttgtggtacagacctccagatgtccttctaggctcaacagaatattccacctgccttgacatgtggggagtaggttgcatctttgttgaaatgatccaaggagttgctgcttttccaggaatgaaagacattcaggatcaacttgaacgaatatttctggttcttggaacaccaaatgaggacacatggcctggagttcattctttaccacattttaagccagaacgctttaccctgtacagctctaaaaaccttagacaagcatggaataagctcagctatgtgaaccatgcagaggacctggcctccaagctcctacaatgttccccaaagaacagactgtcggcacaggctgccttgagccacgagtattttagtgacctgccgccacggctatgggaactcaccgacaaccgcttttccggagtctgggggccagggcggggggagggtccgaagaggtcttaccggcactgcccccctccgcgtggggcacgggggtgcgggcgtccgggcgaacggagacgctgggacagagacgctccgtccgtgactgcagcgactgtcaagctgggaagggagcgaccgaccgcggccgc

SEQ ID NO: 169475 - DNA, 4845 bp, Homo sapiens
agcgggttgctgtatgagcctggcctggtgcaaacacattgctagagacatgttaaagagttccaggtgaatcaagcctgagggagacaacagcaaaacgatatgtgtcacaaagatgtctacacggaactgccagggaatggactcagtgatcaaacccctggacacaattcctgaggataaaaaagtcagagttcagaggacacagagcacttttgacccatttgagaaaccagctaatcaagtaaagagggtgcattctgagaacaatgcttgcattaactttaagacctcctccactggcaaagagtcacctaaagttaggcggcactccagccccagctcgccaacaagtcccaaatttggaaaagctgactcatatgaaaagctggaaaaactaggggaaggatcttatgctacagtatacaaagggaaaagcaaggtaaatgggaagttggtagctctgaaggtgatcaggctgcaggaagaagaagggacacctttcacagctatcagggaagcttctcttttaaaaggactaaaacatgctaacatagtgctacttcatgacatcatccataccaaggagacgctgacacttgtgtttgaatatgtgcacactgatttatgtcagtacatggacaagcaccctggggggctgcatccagataatgtgaagttgtttttatttcagttgctgcgaggtctgtcttacatccaccagcgttatattttgcacagagacctgaaaccacagaaccttctgatcagtgacacgggggagttaaagctggcagatttcggtcttgcaagagcaaaatccgtccctagccacacatactccaacgaagtggttaccttgtggtacagacctccagatgtccttctaggctcaacagaatattccacctgccttgacatgtggggagtaggttgcatctttgttgaaatgatccaaggagttgctgcttttccaggaatgaaagacattcaggatcaacttgaacgaatatttctggttcttggaacaccaaatgaggacacatggcctggagttcattctttaccacattttaagccagaacgctttaccctgtacagctctaaaaaccttagacaagcatggaataagctcagctatgtgaaccatgcagaggacctggcctccaagctcctacaatgttccccaaagaacagactgtcggcacaggctgccttgagccacgagtattttagtgacctgccgccacggctatgggaactcaccgacatgtcttctatttttactgtcccaaatgtgagattgcaaccagaagctggagaaagcatgcgggcctttgggaaaaacaatagttatggcaaaagtctatcaaacagcaagcactgacaagcagcacattctcaagagcacacaggattaagttgtcatcattctgggaagaaaaaaaaaacattaatgaagaggccaataatatgaagggaatcatggatcagttttctttcgctccctgtggtggatttcacttacaagaaaattgaagctggcaagaccctgttttctctgcaatttatttaaaaccttgcacgcatttggataccttgtgatttccaagaactacgtgaagattaagctttgcttactgatacatggcatgtattcttttcagtcttttgtgtttgattttgtttgatttccctctgcagcacagcgtctctgtaaaggtttttatgctttcaccagccatgtcttaaatacattaagacaacacatttggtgttcacacttcttcagtaatgtctgaacttgaaagccacagagtggcataaaacaatgtgtgttttctttgagagcagtgcacattttgcaaccactaggaaggaaattttctgctaaagcaaacccctgttctctgacttgacaacttggccccggactgtggggccccacctgttgcttaccttttgaggtaattttgcaaatgtggtttttttacttggaaataactgcacatttatatataggatattggactctgcttagcattttcaagccacatagcatgactgttttttgaataggttggaattgaaaaaacaattatcaaacgttaagaacaaagacagggataaattgcttacatttcaacctctagagattgaggtaactttttgtgtctgggtcttgtcaacatctaatttttttccatccattctgttacactttgtattttctaactggagaaaagagtgaggaacagaatgttttaaatctggtgcaaaagaactatatctgctggatgagccttgaaagcagtcttggcctgttagggcttacaaagtaaattacaaagtgatccagttcaaagtttgcttagttacaacaaagcacctttaaaaaaaatacattttaaaaaaacattccaagccaattggaagacatcattgggttcttactttaagacatctcctggaataactgttcaaatgcaggttttagaaacaatgcaggaatcttgctttaaagatgaaaaagggaatgggccagcttcccttactcaaggagttgagggaccttggaggatgaaggcgagtatgtgacactggagaaaagtggaccaggcatgtcttttgctttgatctggagggagggctgcctgatgcaggccggctcccagtggggcaggcctcgctgcagaatgcccagtagtactgcggccaaggggacagttaggagacttcatctaaagcatgaaacctagctcctctacacacaaattcctatggaaatacctttgtgtacagtgtcttacattttcctattagtcagaaagaaggagagaatgagtgagtgcttgaaatgtgtcatactgttttaggatcaagactaggaattaggagccaggttgacaaggactttttctgagagttgggtgagggtaaagcttttctataatcaagctcaatacaccaaggaaactggatccagaattcctaaactttaaaatggtactgtctgcggagtggagtatggatggttatgtcaaagtcatagttcatcctatccagatgtagcattcatggtaaacttttaagtgctaagcaaggaattatttactgattggttttaaagagagcagaaaacacccaagtgtagaatgtctactgtttgctacctagaaatcttttccattcctctttcatacattccaacccactggaagtctttagaggtattttgatttaaagtatacttaaattaggatttcttaaagaaaacatagggagaaaactttacatgcaattaaaaatggactttcctgtgatttgtttttaatcattcatttggagaagaggcatgacctttgtatttcactaagtttaaagcaagagcaactgatgattaaatgttgctttttaataaggtttttaacttgaaaatttgaaaatatttaatgttgaaagacttcaattagggctattagagttatatctccctgtcgtaggcagcttcttcggagaagtgaaatataacattactcagtggacggagaagtctgttttgttacagagacatgcctctcagaaggtcaggaggttttgagtacctatccttgccacccatacaggaaatccaaagtttggtgtctctctctctctctgtctctttctttctctttctccccccaaacccctctcactccctccctccctctctccttcccctatttgcaatcatattctccctctgcttcttttctcttctgccctccttgtgggcagtcatgaaaatcaattcagactgtgttcattagcagatttattattctattgagaaagcactggaatgttttgtgagattatttttatatgaaggaatagcctgaactcaaacagatggtaagaatagtacaaacaccttagcacatcactgcacacacagtattctgaaaggagatttgacacttaattcccattttcttaaaataacagttttgttgacttaaaaatatgagatacataggatgtgaaaaaaaatgtttgcagtactcagcaaaaaatagggtacataaagcagggtggctgtccatccactgattctggggtgagaagcgatttctacctcgcaagagtgactagaaagtttctaggagcacctccaggcttgcaaagaaagtgaggcctcttggtatcctttcctcagtgtgtatatgacagccagtataatcaataccctaggttatgcgtctatatgatactcatctgtgaatattattggttttgtaatctttgttatataagaggatgtttaggctgtatatactggggtagattattgcctgccccttatacataggaatatgctgcataattgcgcataacttccatctcccttactggcttgtaggcagaggaaactgtatatgttactgccttgtacttttctcatacaccaaaaacacaccaaaaaaatcaataaaataagcaatcttctattctcattccttttcccacagcagcatattttagaggcacatacaaaacctacattctctagttgggagtggatttttaaagttttccttttatcttttatttttttttttgtatgatgcactgagatgtgtactttctaacaggggattggtacctaagaaatgtggtagcattattcagaaaactattatactttcaaatgacacatagtaaggagaatggaataatacatgttgcatatttgttaccagttgtaatttgtctgtattatgaaagatgtaatggtttgtcagctgtcactgttgttttcttgtaacatgatatggaataaagtatagcagaatctccgta

SEQ ID NO: 169476 - DNA, 219 bp, Homo sapiens
tgggctatttccacgtttccaatttgcgctggataaagcaggatggccaaattatgacagagttttctcttccaaatcaatcaacttttaatacaaagatttcctcaagagtcaaagactctaaaagagaaaggtttaaattttggatgttgcaagctcaaatcaccaagtgaaatttgatccttgaacatctaaatcaatgattaaaatgtttcatag

SEQ ID NO: 169477 - DNA, 178 bp, Homo sapiens
tgtgtttaatgaggaaggggagtagaagagaggagacaagtgaagtaaacagattcctggcagaaactcttaaagatgaagtgctatgaaacaaaccactgtcttttaattaagagggttcctatcgctcagcacttggagaggaatagtagcttctgaagaatacatgctattgaga

SEQ ID NO: 169478 - DNA, 386 bp, Homo sapiens
tgtgtgcacgaatgtaaatatatgacaacaacagcacaagatctgtaggtggaaaatggtattatcataaggtgtttattactatacattcagtgatacaatgtggcttgaagatagacatattatacattaaatatgtatactataaaccctagattgagaactaaaatagttaatctaataagccaacaaaaaaggtaaaatagaatgattaaaaaaattcagctaatccaaaagaagacagataaaggagaaaaagaaaacaaggaacagacaggacaaaaccgaaaacaaatggcaagatgatagagttaaatctaaatacacaaatatccacattacgtgtaatggcctaagcacccacattcgtgctaaaaattaaaatt

SEQ ID NO: 169479 - DNA, 500 bp, Homo sapiens
cgcgtatgagcatgggcagaggcggggcatggttatacagtatgggggacagttgtacagtacagggcatggctgtacagtacacagggcatggctgtacagtacagaggacagttagttgtgtaatacagggcatgtttatacagtacagtggatggttgtacagtacagggcatggttgtacagtacaggagacagttgtacagtacagggcatgattgtacagcacagggaacagttacagtacaggacacagttgtacagtacaggacacagttgtacagtacaggggatggctatacagcacagggcacggttgtacagtacagggcatggttatacagtacaggggacagttatacagtacagagcacggttgtacagtaccatcctgctggttgccagatgacttggatgtaccacttcccctccctgggaggaggttacaattggtataggacttggacatttgccttgtttaccaaatggagtgaaaatag

SEQ ID NO: 169480 - DNA, 572 bp, Homo sapiens
catcacttgcttagatatcataatgtgcattttactattaaaacgttatgtaaatatgtgcaaattataaacaaaaaaaagctgggatggctatactaataacagacaaattagatgttaagtaaaaacatgttacaagagcaaagatggacattttatgttgttaagtttcaatttatcaaaaagatataacaattataaacatatatgcaccatatgacagccagaaaatatataaaacaaacctttagaaaactgaagggagaaatatacagttctacaataatagttggagaccttaatgcctcactttccacaattgatagacaagtagaaagaaaaccaataaggaagtaggaggcttgaacaatactacaaaaccaactagaccccagagacacgtacagaacattccactcaacaatagcagaatacagtcttctcaagtacacatgggacattcttcaggatagactatatgttcttccataaaacaattatctataagcttaaaaagactaaggtgatacatactatctttttgaaccacaataaaatgagtaatcaataca

SEQ ID NO: 169481 - DNA, 388 bp, Homo sapiens
cagggacctgtaggaaaatttccgaagatcaaaaataatgtggttggagtaccagaaggacaggagagattgagaaggaaaattgtttgaagatacaatgctggaaagctttccacatttaatcaaatccataaatgtacagattcaagaagctcagcaatacacaagcccaaagaaaatcacacctaaacacatcacagttaaactggtgaaaaccaaatataaagaaaaaataattgaaaacagctagaaatatatgcctcattacacagacaggaatgggtggaaatactgaagatttctcatcagaaatcatggaggcctgatggcagacaacttctttacaggctgaaagaaaagaattgtcaaccccaaactctatacctag

SEQ ID NO: 169482 - DNA, 286 bp, Homo sapiens
agttatagccaaaacaaaaaagaaagtccaagggaacacctatctaaacagtagtggtgagtccactctccaagccaccccaaacatggtgccactctcattatatggaacttctgctttttgccaataatcagaaataggaaagtgcacacagtatgcacaatgacctaattgctcatatggaattcaacagcagtcatgctgtccccactgtaaaagatctagttctccaattaatcacaatctgttacgatgagtgaggaggtttgaggtgttggttctcaaa

SEQ ID NO: 169483 - DNA, 376 bp, Homo sapiens
tgttaagcagacttttataatgtacttagatatttgatattagaatgacaccttaggtaacatctatgctattgttttatgtatggtgtgatgaatttgggtaccaataaattttgttttattaggagagaaaatatagttatatacatacatatcccccaaatcagttttagttcagttatgttattttagaaataaagtataaatctgaagagttcttatattactttacatgaatttgctatatagagataaaatttttaaaaaattgttgaaatagatttatttcttcaatagtttcctttagagaacaattttctgtcatatcatggagtattacaagatgacaaggccaacaattgtgctggcctgacat

SEQ ID NO: 169484 - DNA, 365 bp, Homo sapiens
atatgctagaaagttaagatctgcctacataaaggtaaagaaaaccccctttttttctgtttttgttttttaagagtcttgctctgttgcccaggctggagtgtagtggcacaatcttggactcactgcaactactccacctcccgggttcaagcaactctcctgctcagcctcctgagtagctgggactacaggaatgtgccaccacactcagctaatttttgtatttttaatagagatgggatttcaccatgttggtcacgctgatcttgaattcctgaccttgtgatgcacctgcctcggcctcccaaagtgttaggattacaggcgtgagccactgcgcccaaccggaaaacctattttaa

SEQ ID NO: 169485 - DNA, 443 bp, Homo sapiens
  misc_feature (169)..(169): n is a, c, g, or t
ctgtcgagatatgctcttccagtgcttccaaagcagaacagaccatctgtgccatggggacagtggccaccactgccacctcgccgaggcttgcatcaagtagagggcacctcaaaacatccattgaatttctgtgaataataggttcactatgtaatcaacacctcantaagtccctaacataaaattccccatttaattctcacaaccacccaagatgttgatagtgttatctccagttattttttggtagagatggggtctcactatgttgcccaggctggtctcgaactcccgggcccaagtaatcctcctgcctcagccttccaaagtgctgggattacaggtgtgagctacagcgcctggcctaaatggaaaactggtgtctaggtgccatattctcaggcttgccctcaccataacacattgaaccggatagcttg

SEQ ID NO: 169486 - DNA, 314 bp, Homo sapiens
tggaagtggcccaccaccatcttgggagctctgtgagcaaggaccccccggtaacattttggcgaccacgaagggacctccaaagcgcctccatcagagagctccatccagacctagacttggacaataggcagttgtttgcttgcctctggctctgctcactctccatgggggtctatagctggtgatcatcttgtatacctaattctggcttcatcttcagactcggacaggtaggcaaactgagctcctgaatcattaggatggacgcgccatcaacagaatctgcttttagtggaatgggtcttcggata

SEQ ID NO: 169487 - DNA, 272 bp, Homo sapiens
tattaaaaatacaaaaaattagccgggcatggtggcacttgcctgtagtcccagctactcaggaggctgaagcaggagaaacgcttgaaccagggtggcagtgccactgcactccagcctgggccacagagcgagacttcatctcaaaaataaataaataaataaaataaaaccaaaaatgctttttggagaatgtatgtgcatctttaaaatggtaaatgaagacattcacattttattcaaatatatgtatgtaccaacttaccctactt

SEQ ID NO: 169488 - DNA, 338 bp, Homo sapiens
agtggagttggcacgatgtacataaacttcatgatgacaagaaggcaggatagttagtggcagtttgacaagtctctctgcatgaaaacaaattaagatgccgtgacagctctgaaaaaaactgttctttttggcatttccttttttccaatgttctctgagcatgctatctcaatttattataaagctacacatacagcccaggaatttctttagcagccaagtcacacctcagagttctgtcagttgtgaataaccctcaagaatttttactccctcgtcaaatgtgcttgtgtagtattccagccatcagtcctttcatttcaataaaactttta

SEQ ID NO: 169489 - DNA, 231 bp, Homo sapiens
caaagggtacaagatggtgagacctggggctccagacagagaggaaggaaaacatcctggtcgctgatggcttcatttctccttcacgaagccagactacacttcttgcttcgatttccatgaaatgccaatttcttataaaaaaaaatctcccattgctgggaagctaaaaaaggagaagtgcttgagcctaggaattcaagggtgtagtgtgcagtgactgcgcctgtg

SEQ ID NO: 169490 - DNA, 482 bp, Homo sapiens
ctcggctcaccgcaacctctgcctcccaggttcaagcaattctcctgcctcagcctccccagtagctggggttacaggcactcaccaccatgcccggctaacttttctatctttagtagagacagggtttcaccatgttggtcaggctggtctcgaactcctgacctcagaagatctgcccaccttggcttcccaaagtgctaggattacaggtgtgagccactctgcctggcccctgtcttgtttttaacagatgaggaaacccaggtctagaaaggttaagtgatttcccaaagctcacacagtgagtgagtgctcaaactgggacagggaccctgacaatctgaccgcacagtcccatgttattgcagttggtcaggatgcagcctgcctaatgcggggcctcatgttgtgaatgatgagcacaggaagggcagcaacgggattggctgttgcccacatcgaaggatgcagagatgcca

SEQ ID NO: 169491 - DNA, 395 bp, Homo sapiens
gtataatatctaatagtatctagcatgttatgtgaaaccctataaccagccctttctaaacacctcttaccaagacaccccacaattatcttgaaatgtgggcttctttgctgcagaaagctacaagcaactgtctctggctacaggtatgttcctggtggtatctgggtgatcagcaagaacaaagcaaacaggaaaaatgtaaacatttggcaaatttgggtaaagagtatatgagaatttctaacactatttttgcaatttttctataggtttcaaatgatatgaaaataaaacgttaaatattttttttttttgagaccgggaggcagaggatgcagtttcgctcttgttgcccaggctggagtataatggtgcaatcttggctcactgca

SEQ ID NO: 169492 - DNA, 450 bp, Homo sapiens
gcgtgtggcattgggacactgaagttagcaaatcggccagtgactcatcagtttcctctccataactggggtgtggttgggggatggggcaaaactggcacttggcaggaggccttggcacagttcccaggcagcattccttctgacccgtcagtgaccatgtcctacccattaaggaatattgtaatgatcagccctggaggaaggagcattaagatttctgctctgacttcagatgttttgatacaatttgggtagctcgagttctccatccctgacaatgaaaatgcccaggaatgtcagggaagcgcgttttctggaaacctacctccctgagacctgtctggcctgcacaggggggtggaccgtgtgggagagaggggattgtccctctctccccaaggtcagctctggcttgcggagtaatggctcgtgtgagtgatgtgtgtg

SEQ ID NO: 169493 - DNA, 218 bp, Homo sapiens
ataacacaaagctgtagccagactgagttttggacatggataatcagaacagtctgtagcccgtctgtggctaatgggatgtttctcccagctttgtcaccatggcaaatactttataatacacaaacatttgtagcgctaaaaatccacccactctttttgaaagatggccaggttttgtaaaattacattccagctagtgctaccctgctgatttt

SEQ ID NO: 169494 - DNA, 304 bp, Homo sapiens
agcacagaacttagaataccaagatctattacactggtcaagaaaactgaatctcttctattaataaagtatctcctcccaaccctccccctcccatatgaaagcatttaccaatttttgaaatatgcatgcagagtccaagaatatacatatatttcaaccatggtcattcctaactacctgtgcagtttaaaaccacaaagcctccttgaattaactccaaaaatctaaaatatatttcacatactattaatgctccaaaggaatttactttgacaatgaatgtaactttttaaaaggctat

SEQ ID NO: 169495 - DNA, 82 bp, Homo sapiens
ggcttgagtatttctgccgtgaacatggccgtcgaggaggactcatgaagactctaaatctctctcgggtaaacctggcgtt

SEQ ID NO: 169496 - DNA, 237 bp, Homo sapiens
cccgctcagagccagtttctcccgctcagagccagtttctccgctcagagccagtttctctcctactttctcacagtccctgggagagtgtgacaggctgtgtgtgtgtgtgtgtacacctgaaactagttgcaaatcgatttaccattactaccacagtctatcccacaggttcagggactgtgagaaagtaggagagaaaatgacggtgagccggacggagccactgacatggtg

SEQ ID NO: 169497 - DNA, 143 bp, Homo sapiens
ctgatgaattcctggctcaaaagaatcactctaataatttctgagtcctaaaagcctcaattattggacaatattgcatagctagagaaggaaaagaattcacttaccccgtagaatgacttagttgtctggaacagaaactg

SEQ ID NO: 169498 - DNA, 349 bp, Homo sapiens
taattaacttgaactcaattatgcccttgaactggtgaaagaagtaatgagaatctgtgacccccccatccctccccaccttcctttccatttaccactaccccgtctctttcccactcccaactcgtggcactatatagataccagttacatctttatttttgtagttttggactagcttatcagcctttttaatctctgcaccataggcaatagaaagcatactggatgttctattgtacaagatgtaagatctcctcaaaatttaaaacattttactttaaagaaataccactaccaagaaaataaaagacagcccacaggatgggagaaaatgtttataaatcat

SEQ ID NO: 169499 - DNA, 449 bp, Homo sapiens
gttgcgctggcgacagctgctactctggatttcgtagtgatcacaggcacgggtccaaggggtgccgaaccagggaccccagagaggcaaacataggtggggacggctcggggacacgttccttcgctggcctccaggcagccccgcaggtgcaggccgccactggcgggcccgggagcgccagaggacccggccaggcccctgcccggaggagggagggggaggggaaagggactccgggcaggagccatttaaactctgcgaggcgcggggaaccgccaggatcacacgcccacgccggtcccggcgcccaggcccggcaggtgaccccagcagacgcgcgcgccagacccgggggcgcgagcctaccgcccctcccgcgcccctacctcgacgcgccccgcagggcggccagctcccggctgtcagcgcccgcgccccgcggccgc

SEQ ID NO: 169500 - DNA, 111 bp, Homo sapiens
atctcttttttttattacaacttcctttttggacactgtatattattctcttgattattgttttgaacctgtggcctttctcagacttaaccaagattaatatctctttct

SEQ ID NO: 169501 - DNA, 280 bp, Homo sapiens
aaccctgctccccagcctcgcactcaccttccaacccacctggctcctggacccatctcagcagtgctcaaaccaatgcccaaactctcctgcttaggacacttctccactggccaccctgaggccaccacacctcactggccactcctcctctatcttctctgctggctcttcctcctctatggccacctaaaggatgggtgttacacactcaatcctgagccctctccttctctgcctgccgtcgacgcggccgcgaatttagtagtagtagtcgacc

SEQ ID NO: 169502 - DNA, 180 bp, Homo sapiens
gaccgcctcacacaccatgggtcattcagccctcataatgcaggctgagcatcctgaatctgaaaatccaagatccaaaatgctccaaaatctgaaattttctgagcactgacaagaggccaagtggaaaattccacagcagacctcgtggtgacagtcacacctaaaattgtttcatgc

SEQ ID NO: 169503 - DNA, 167 bp, Homo sapiens
ttctctgctcatgccttcaccttccaccatcttcctatactgtggttctgggtcacacagtctcccagcagagatgagactttcgacgagagggtagaaattgctgtaccccaccatcttgaaattcacactccaaggagtctttcaattggtgttggggaaaactg

SEQ ID NO: 169504 - DNA, 537 bp, Homo sapiens
ggaggaggaagaggaggaggaggaggagccgggcagcctggagagggtggagaaaagcagaaaaaaaaaaaaaaaaagaaaccaaaacaaagaacaaacaaacagaaagaaccaaaatgagaaacccgatggcagaagcaggtatggcatgaaaatgtgtgcacggatgagcagagagagggacacaagaagaaggggcaggaggagagagaggcggggcagtgccaggggtcacgtgggcaggtgtgccgggcaggaccggcgctgggcccaggccgggtgggaggcagcggaggaaggaggctggggctgcgctgctcccgctgtggctcagagaggacgggcccagggtcctctcccggaaactgacgcaaagggcagtgccagggaggcgggaggatggcgggaggggcctcgatgacccagtcccacagaccagctggctctgctgcacgccagcctgtcctcctcggaggccgcgtgccccggaccttctgtcccaagctgcacccagcggtgctgggctttgggagtggg

SEQ ID NO: 169505 - DNA, 338 bp, Homo sapiens
tgagtgacagatgaggctctgccccaacagccccgggctctcgtctaaccgcctgggctagctggctctgtttctgaactgccagttatccaacacaagggatgctgaagagcataacagcaaaatagtttggtgtcccatttatctagatgtcagatgcatcatggctttaactctctagaaaatggctacaaaccctaactaggtgaaaaagcctgctcagcaacccaaacagctatgagacagctgctgcattaaagctgatgacttcacgcagctcattctgtcaagtaagcgttatcattatttaaatgacagagtggtatgaggtacgacca

SEQ ID NO: 169506 - DNA, 199 bp, Homo sapiens
agacagcatgacatcaggtatagctttaaaaggagttagctgaatgcattacaaccagactccattaatgaatctccacaggttccagaagcactctgagggccctaaagaactaccctgctgacaaaattaatatgtatggaagataagaaagctgaggatatcaggaattaccagcagcagtttggggctatttcca

SEQ ID NO: 169507 - DNA, 439 bp, Homo sapiens
ttccttttgcaggagctcgtcctaggtgctcctgggtggaacaggcggtgcccagctgaaggacgttgctggggtctctccttcctacaggggcatcttatttccttcttggatccaatattttaatgagaagactttagtttgagccagtctttggagacttgggtcctaaaaacttctgtgattccttttctattaagaaatgtatttggaaaatatttaggaaggatgccaggctcagccacttcagtccctcattctgatcctgcctaattctgccaccctgcccctttgcttgttcaccaccagagcaagctctgaggatgtccctgtgagaaagaggacatgagacaaggacctggggccccactccattgcttctgtttcacccttttttcctactcctacctatctccccttttatactaataatctttta

SEQ ID NO: 169508 - DNA, 289 bp, Homo sapiens
tcaccaaccctcctcactttccctccccgaccaacagacgcacctactaaattctgggtccagctcaaagatcccttcatatttgctactttccctgataaacactaggcatgatcccttctcgctctggactccaacagcacttggtctgttctgcttaggatcacatatcctacagagatggatgataatcttttttagggtaggtctttgtcctaatctagctgtgcatactggagcctgaattcatggtagatgaacctacagaagttcataaagtcagagaagc

SEQ ID NO: 169509 - DNA, 414 bp, Homo sapiens
ggcaggtgtcctggggctgccctgagccctgctccctgtagtcggggaggagctgcggtcccatctcaaggaaccacgacctgaggaaatgcacagaggctctggtgggcctgatcctgagggctgcccagccagtggcccccaggcctcagctccttccttgaacaaactcgtatccaccaactgtgagaagccatggctgagagtgtcatgcccccagaggcagaatattgctcacgacagcagctatgatgataaggatcctgagtgcccagccccagccaggcatgggcaactcgcctcccagcaacagcccagggaagtggtgactaacccattttcctggtgaggaaactgaggcacagaaggcttatatacttgtctgtacagctaataaggataaaggcagtgttc

SEQ ID NO: 169510 - DNA, 180 bp, Homo sapiens
gatttgtcctctctgcccgggcccctagttctgatatttggattgtctgcaatctggatactacttaggaggtagaatcaaagccttgttgatgggattgggagtttctaacttcctattaaaggcactgattaagcatctattgtataaagtaagtaagattatgatccagtaagaaag

SEQ ID NO: 169511 - DNA, 542 bp, Homo sapiens
atgtggtacagtcatacaatggaatattattcagcaacaaaaagaaatgaagtgctactgctacagcttggataaactaagctaaaagaagccagtcacaaacgaccatacattgcataactccatttatatgaaatgttcagaatagacaaacccatagacaaaccagcagtctgatggttgcccagggctgggggagattaagggaaaatgagtgactactaatgggtactgagtttctcttggggtgatgaaatgttcaaaaattgactgtggtgatgactgcacaattctatcaacgtactaaagtccactgacgctgaattacctgatacgtgaattacgtttcaattaagttgtcacaaaaaaccttcatgacattatctattaaagcttcatatatgtgttccctatggccataactcctctccaaaatgtatacctaacagaaatgcacatatatgtttttaaccaaaattaaaaattcatagaagcactatttacaggccatgggcagtggctcatgcctgtaattcccaaca

SEQ ID NO: 169512 - DNA, 661 bp, Homo sapiens
atcagacaaataggaaaaagacaatcattctggttctatgacagacattaaagtgatggaatggctggtgccttactaaaaaaaagctttcaaccacatgtatgtaaaagctaatcatttggtgaggtagtcataagcatatataattgacctcataacaatacaacttttttggggctgtcttatcaatagcaaattgacctaaaaacttgataaaagtttagtattcatgtttttaatcagtattcagtctcaatagaggagagtttaacatttctatggaatttattgcaccatacagagtgataaaccgttcaaatataatgttggcattttcttaaacattatttaattgactaaaatagttgaagagttatgaagatatatcctaagacttttatttctaataacatgagaccacaatctttttgtggcacatatttaaagtgcattgtgtcttttatatacagattatgcttagagagattatagagagagggattttttccctactcagaccaattcacatcagataataattccagaaactagcattttgtaacttacttaacctatcccagaaaagcataaactatgtgctaatgcagatgttcagaggggaaaatgttgtattttttctgagtgaggaggaggaagcgac

SEQ ID NO: 169513 - DNA, 187 bp, Homo sapiens
aattacatgaatatgaaaggacagaaaataaggaaagtcaacatgtggaaatatgtggaaaacccaggggctaggaaggacctaaggattcttttacaacagagaaggtcgttttaagaatggcattgaccaatccgtcttcactttcacaaaagcagaacccgactgaatgaatttaaattacact

SEQ ID NO: 169514 - DNA, 242 bp, Homo sapiens
agaaggaggacaatgcaaggccacatttggcgccatctagtgcttaatgagtgccatcttggatggcccccaaaagcaaagagtcaagggctccagcgtgatattttaaaagtttctctgacctggccgggcgcggtggctcacgcctgtaatcccggcactttgggaggccgaggcgggtggatcacgaggtcaggagatccagcccatcctggctaacacggtgaaaccccgtctctact

SEQ ID NO: 169515 - DNA, 210 bp, Homo sapiens
ccctactgaaaatgcatgataagcactaaggccacaagagcttactctgttgagggtgaagttaaaacgcacgtttctcttagaccggtgatataatagaaggtcggttcttttttatctctacgtgattattttgagtgaaaaatttaaagctctttcacataccattggcttgtcttctggagaaaggaacagcatatatagaggatg

SEQ ID NO: 169516 - DNA, 511 bp, Homo sapiens
gcgtaagacacaggtctaaaatagcttttgggtttaaactggcccctatattacaactgacctttattcctagggtttataaactgaaggaatcagagaattatagagatttcatagccaaaagaacttagagatcatctgccgctgtgtagatgagaaactgaggtccccagggtaaaggtcttctagccagttagtggtagaagcagaactacagtgacaagccctgttcttctccattccagaatcagaatagagtgccacaatctccaagcaccctgtaagtgcatccctctccccttcttcctttccactgcttctggtacctgtctgcccacctgtgtctaaagccaggcaattctttgtccaagaagagtaatggtattgtctctttctatgtgtctcggtaattcaggcaaaaggactggatttttaaaagcagtttgaatttctttcatatcactagtgaagcttagtatgttccagaattcaaggagcctaaattgtatgt

SEQ ID NO: 169517 - DNA, 276 bp, Homo sapiens
tgatgggcactggtaagtataggagccagatgtggttggggggccgccaggggctagctgcaccatcgcctaccctctcgggcttcccagacaatcagggagggcaggaagggagcatagaccattaacccaaagtgggaccactctgtacaaggccaccctgggcaggagtgggtggctggcgtgagccaccgcgcccggtctggttgttcttttatctctgacaaggcattgttctctggatgcttaagtttaggaagatccagcgtggtaaat

SEQ ID NO: 169518 - DNA, 138 bp, Homo sapiens
cctactatgttgcagatactctgcctaggtttttaacccttacaacacatccctaaaacattgtacagatgaaaaagcagaggcacaaagaggtttaaaacatctccaaagtcacatagttactataaagccagtaag

SEQ ID NO: 169519 - DNA, 463 bp, Homo sapiens
gacctcaagtgattccccctacctctgccttctgagtagctgagattacaggtgcttaccttgcccagccattattttcttcttaaactatcaaaattctttccattttatttcatagactccatttagttattctttcatattttagatttctttttcagtttattcaagtaatgaatatttgcaagtacagcaagcagattacttcccattctttgctgttgtattattattatgaagtttacattgccttggctttcttcattttcaaataatgaccttgagtgatctttttttcatttaggtttatagatacctgtgcacatgtttttatgatattctttttttttttttttttgagacggagtcttgctctcgcccaggctggagtgcagtggtgtgatctcggctcactgcaagctccgcctcccgggttcacgccattctcctgcctcagcctcct

SEQ ID NO: 169520 - DNA, 438 bp, Homo sapiens
ttcttgaatattgaatgtgatttttacctagtaagtttacattccttttggcacccactttgatttagttttgttttagccatgatttaaggttatccatgacatctttcccaactgttacctaaataatgacaattgactctgttagaaataatattaagacaagctttctagaagtttatgttttctaattgtgagtggtagtttaagaaggcagaatcagttaaggtccttattatggattgagttttctaattctaataattctatgtaatatttgattttatttaaatattaccatgtaataatttaaagtctcttaagcacaggcagtatggaggaccaagacaaaaaatctttataaacatttaatcttgtagattaatttgaggattttaatctatcttacttgttaaatattgttatgtgatttactga

SEQ ID NO: 169521 - DNA, 169 bp, Homo sapiens
tctatttgtagacatgctaatcattacaccaaatgcctccagaacactgctgtttcagttggcatgctttttagactctgtcatagtggtagtgaaatgtgctgggcttagtctgcccctccctcctcctcagtgctctcagacttttctactctattctcattcattc

SEQ ID NO: 169522 - DNA, 568 bp, Homo sapiens
taaaatgacagtgttgcccaacactctggtactaaataaccctatgattcactgatttcacttatgcagtgggtatagcacagtcaagacttatttggttgacagcttcaggactaaggaaaatatctcccaaatagaagcagctgatggcagaaaggagacagaagccaggaatctctttaaggggcttgagagaagaggatgcctgagccagtaggcctcgtcttcacaaaatcacctggcagctgggaccctcaggaggtaacacaagcttgggggtggtgctggagcttgtcgtgttgaaaaacacagagactctcttgggatataagtttttcaagcctagcccatctctgcctcacttctagattggtttcttctgcggtgctttcccactcccccaaaatgactcaatctgaagatgggagaaagttggcagagaaacccatgactgttccctacaaaatctgcacatcctcatcagttcttaagagcttgctttcctgcccagatgactgaattaattgaattcttcattccatcctatttagatcagggaggaatccta

SEQ ID NO: 169523 - DNA, 420 bp, Homo sapiens
taaaaattaagatatgtaagacctgacagcatatctttatttgaattccaccattttgttaatccaaaggtataaaataaatttatagtttcagttatttgattgaataaggattctcataaattccagcttttatcatatgatcagatttttcctggacaaataaagatgtttgctgttgccaatagagtttggcccactagcatgctagctagatactagtgattggtttggagctaaggacttggcttgtcctttcttatccctcccaccaacttaacctcagtggaggattgagaaagatttggtagttgagaatacttctgtgtgcctctgtgtttcctgggcttagccagaactttgcatgcacagctattcttgtggtttttcaagccaggccaaaaccaaaaggtattggaa

SEQ ID NO: 169524 - DNA, 698 bp, Homo sapiens
gtctttaaaattgtatttatatttggcatttatgcctctcagcactatgtaatttcttattagaagtacactttaacttgagaattccattagaatcattaaattttctgaatagaaagcttaacagtgtttaaaaataaatttttagtggcttcatgatgtcaaaacaatcacttgaaagctgaaaaatatgttaaacctacttttgtatttatgtcccagtttgcttttttcaattcacaaaaaaagatttgacttgattacaaagaagaaaacacagaaagagcaaaaaagaaaagaaagatgaaaggaaggaagaaagggagacaaaaaaagaaacaaaaagaaaaaaagagaaagactgattatctagttgttttgtgattaggtagacataactcgagaatcttggagccatccttatctcttccctctccattacctgccacaaacaaccccccactaaatagtaaattcttactccaaaatgtctttgatattccttctttcttattcatttccatgtcactgcctgacttcaagcttttatgaagcttgaagttatatatcaaattgtaactgatctcctaattctcattttgtgtgtgcattccccaaatcattcttgacatatctgtgcaaatctcagcatgtcactttcccagtagtaggtatccatcagctccctgttaatctcc

SEQ ID NO: 169525 - DNA, 221 bp, Homo sapiens
atataaagctagaaaaagactatataaaacctgaactaagtggaaaagaaagaaaataaaaagcagaaattattgaacattttagaataaaataaattttgaatgaaatcaaaaataatgttgcttcagtaaagctaaacatcggttctttgaaatgcaatcctatggtttgggaggccaaggtgggtggatcttctgaggtcaggagtttgagaccagcc

SEQ ID NO: 169526 - DNA, 396 bp, Homo sapiens
tattccctatattagcatatatacatgctactaaaaatgaaagtttttcacttcactgaaaagcaatatgaacatagagactattactttgccttactaagcagaggaattaccagaaccatccttgtaaaaacatgaacattctgcttgagctgccaacttgtttcaaaaagctattaaaagtgggcaaacattgctgctacatgatgaatgaatgggagtgtgttgtagtattgctactaggccacgtatgattggaattttccacataaaagcattttaaaaagcagtgttatttacgatgcttatcattagggaatgatattgagaagaggagtaaggaaacctcaacttctaaattttacacttagatttctgtattttgttgtcatttta

SEQ ID NO: 169527 - DNA, 398 bp, Homo sapiens
tggcactctgaaacccattctgtagcagacagaaccagcagtaaagcaaaaggagacatagagcaaaggaaggtacctgcctacagtggggttttcctacgtggctggcttgggtctgactatttcatgggacagaagaagaaaagcaatagggccatgtggaggagtcccagttgacttatcactgatgtgcacttattaccttcacatctaaaaaagggcccagaatccttgagtttcatcttcactgatccttttcagggaaaatgatagaatgaagaggtcattgtggagagaatgtatttattcttagaggccaaaaaattccactagataccattctaaaacacagatatacttatgccatccttttgcttctaatagcttcagtttttcaa

SEQ ID NO: 169528 - DNA, 234 bp, Homo sapiens
ggacaaataaaccaaaagaagaaaacacaattatctttacactgatatttagattccttacagggacttagtgtttataagtgatgtaagtattattctaatgcaaaacattcttttcattctgatcttggagtcagagcaagtggtattttggtttaaagtgatgagattacccctagaccatctcactaagggttatctttctattgagaaatatcttttgaagagatttca

SEQ ID NO: 169529 - DNA, 445 bp, Homo sapiens
catttccaaaactggcaagagtggttcattgtgcctcaactgtttgtgcaaacaatatagtttatgctaaacacttgttttccctctgagagtttggaattttgctacatgatagccagagggtagctatgtgatcaacccccagtaaaaatcatgaatactgagtctgtaatgagctttcctggtagataatatttaacatgttatagctcacttccgagttgagggtattaagcgcatactgtgtgactccaccgggaaaggactctgggacaccgcaccgggtttccgcgggacttcacaccatgtgccttttgcctttgctgatgctctgtatgctttcactgtaatgaatcttactcatgggtaagattcattcatatgctgagtcatgtgagtcttactagtcaataattgaaccggatagcttgacttggggaccctc

SEQ ID NO: 169530 - DNA, 367 bp, Homo sapiens
tacacacacgcatgcacacactttatctcacacactcacacgcatgtgtgcacacacacatacccagacatatgtatattcatgaatatattcaattattttaaaacaatttgttgtcattgccactatgattttctaaatgttgagacctgaaaaaaaagttgaatgaagtatttgatttgtattttttaaaaaaaaccatatagatttggccaaggagtaggggtgtaaagtgtttttccaggtgaaaagaaatcagaccagggagggggctttctatagatgcgatagagcattgctgtagaggaacagcatctctattatagaggactcccttgtggattgctaagtcttgttagctcagtac

SEQ ID NO: 169531 - DNA, 358 bp, Homo sapiens
tgtaatgactcagtgagttaatgataatagctgataaaatgggtactgcgggcgggtcccgtgctgtgctctgtgcgcgtgctgtcccacttcaccttcacaacttcatggtggctgcaccaggtcacaaagctggaaagtggcaatgtgcatggctctcaatgcctgaagctgccagccaggtaattgaggaggtcagcaacagggacggtactatgtgatgttggagaaataaagaggcgaagctgtgtttacagaatgcgtttcagcagtgtgtaaaacactggaaataagatggaataggaaataacacggaggaagtttcttatgatattgtgggtcgggttaggtggtgaga

SEQ ID NO: 169532 - DNA, 147 bp, Homo sapiens
gtgtgagcctggcccaactctgctcttgttatgattatgagtgtcctcttgactgacaaatcaatgagattttattatttaaaatttccatgattctgctcattctcttttctgtgaaactgagttttcactaggctactgtgacat

SEQ ID NO: 169533 - DNA, 269 bp, Homo sapiens
actgaccagaaaatcaaacaagcagaggacactgtccccaaactgcagaatgccatgaacttagttaggactttattccaaaggtcatagacaggcttttggtcagaggtacatggtccatgctgtgcttacaaaagtttcctctagcagtgtcttagtacattttctgttactgatagcagaatacctgaaactgggtaatttataaagaaaaggaatgtatttcatacatctgtggaggccgagaagtccaaggccaaggggctgca

SEQ ID NO: 169534 - DNA, 493 bp, Homo sapiens
aaaccaccagctaagacagataataacttaaagctctagagcattgcttctcaaatcttcatttgcaatgaatcagctgtgaatgctgttaaaatacagattcggatttagcaggtataggttaagtcctgagatgcaagtctagtaagcacccaggcaataacatttctgctggtctggggaccacactttgagtaacgaatcataagaaaaccttcaaattggacttgccccaagagttagaaaataggttcaagtaattttaatccctttctttctatagccctgaatttagctttgaaatggttatttaaaagaaacagagaggggaaaaaagggaaaacgtaattgtggggaaatactttgactcacatgggtatggaatggctcacagtatttactgactgaatgaaaacttgctaatcattggtcactacaaatttgagtaaattaatcactattttcctcatttccatttaaagaacaaacaaag

SEQ ID NO: 169535 - DNA, 288 bp, Homo sapiens
ggaaagggaagttagagctagaaatgtttcctatcctgctagatgggagaccattgcaaggcttcatggactcagagtttggactcatgtgcccattgcaggatggtgatccttctacttgtaatgtcaaatcatgtggaatagaaaagtacctcctgacacaaagaaaatacaggggaggccgggcgctgtggctcacgcctgtaatcccagcactttgggaggccgaggcgggcagatcacgaggtcaggagattgagaccatcatggctaacacagtgaaacacc

SEQ ID NO: 169536 - DNA, 109 bp, Homo sapiens
cccagggtcagggagggcaagtgagttgtattaaaccactgaggctaagtagctaggaattggcacattggggcctagaattagaaaagtttagaactgtgagtagttg

SEQ ID NO: 169537 - DNA, 285 bp, Homo sapiens
ccagaaattccccagctccaaaatgttccatttccagaaatgctccatcttatctccagaaatattccccgtcatcttcaaatgtaatccatctccagaaatgccagtggtctactgaggctccaccctaactccaagaatgttccacttccagaaatgccatatcccatctccagagatgttgcatttcagctccaaaaatacctcatcttcagaagtgccctattttatttccagaaatactccagcatcatcttcaaaaacacaccacttccagaagtattc

SEQ ID NO: 169538 - DNA, 394 bp, Homo sapiens
acaaatttattttatttcacttttaagggaacagaaaatcaataggccgcaattttttactgtcagttgtaaaatttatctgtacatttgtgtttattcaatctatttccagaaatatttgaagactctttaaagatgtaaattaaatgttctagctttgttagagcactgataactcaagaaaatagtaaaaatttactaatgagtttgaacttgaacacaagtttaatctccaaatgatgaaatctcatttaatatacagacaaaaattatgcagcacacagctataagatagtaaaattagcaagtggaaaacccaggttcaaatcttaatgtagaaacttccaagctatgtgaatttaggcaaacaattaaccccctacggtatttacaa

SEQ ID NO: 169539 - DNA, 272 bp, Homo sapiens
cagaggacccgaattccgacaagtgtgcaggttgttgagataatgcagagatccagaggagggactcctgacccactgaagtactcaaaaagtaagagatgtgactagcagtagcaaccataaaaaatgatgtgatgatgtgatctctgaaaacagatgtcaaaacagatgtcttctgacatctaaaatttgggtaatactactgacaaagcaagttaatttttcaaacaagaacagaacttatctaatagggtgcacagctgaccttactg

SEQ ID NO: 169540 - DNA, 524 bp, Homo sapiens
ctccttgatgcttttctatcttggtgaaatacttattgggaggactcccagtactgctaccttccttattgtgagtagaaaaaaactgaaaaagtcaaagtgttttttcaattctctcactcaacaataatcaccactgaagactcctgtgaccaactctgtggggatttctcctcaccaacaagcagtcagttctgtagcagacaccagctgggtaccctccaatccaattcaattctgatgttacctacctggaggtagcgtcagatgccacaggttgagggctcagtcccacgtgactgcccctaacttatgataccagtcaaaagccccaggttgttttatttgtgcttctgactgaccgtctataagtcagggatcccctgaacccctttttgtgtgtgattaatttactggagcagagcttacagaactcaaggaaacacttaacatttactggtttattattgtattagttcgttttcatgctgctaataaagacatacctgagacttggtaatcta

SEQ ID NO: 169541 - DNA, 210 bp, Homo sapiens
ggtaggcctactatgcccctaggctgtatgctgtggcctgtggctcctggctacagacctgcgctgcgtgtgactaactggatactgtggccagctgcagcacagtgacaagtacttgtgtgtgtgaatgaaacatgggaaagctgcagcaaaaacacggcctgctcctctcacaggaccaccctcgcacccgcggcccctcgctgacca

SEQ ID NO: 169542 - DNA, 281 bp, Homo sapiens
atttctattgtactttaacaggctcaagccttacaaagaaagaaagtttgctcatctcttaccacaataaaaatctaacttgatccactctcaagcttagaaagctttatttcagaagacagaattgcaatagttctatctctaatttaagtgagagcagggtctgggcacagcggctcacacctgtaatcccagtactttggaggtcgaggcagggttttgccatgttgcccaggctggtcttgaactctgtcgacgcggccgcgaatttagtagtagta

SEQ ID NO: 169543 - DNA, 189 bp, Homo sapiens
ccatctgtgaggctgagtctggagtttttgtgggcttagaatgggggagtgcatgcagaatagtccatgggtcttcttggaaaaagaaccgttcagttggttaaaaggcatcatccaaaaggaaccaatcaagagacagagggtaagacaaagatagaagttctcactctggtcgtggactctgtccag

SEQ ID NO: 169544 - DNA, 452 bp, Homo sapiens
tgcatacaatagttaattacaaggttctgggagaaaataattgtctcattactcttcccaatatagtgatgctaatttgtcatgtgataaagtgaattctataaaaaagagttcatcataatgagttatcagtgaccaaacttcttaagagaaatggaactagaactcagcattaaagagtaagcaggagttgaatacacagaattatgggaggggattccaagtgggaaaatgtagtcacataaatgcttggaagcagatattcatttgatacattgagggttggctacataatttacagagcctggtgcaaaagaaatgtgcagagccacttgccctaaaagaaggaaaaagtcattgtcctttcctctgtaatctctctcccaacccaacaaagtgggtttctttgtttttttgtttttttctgtttaatgttgtgctcccattacaaa

SEQ ID NO: 169545 - DNA, 393 bp, Homo sapiens
ttgattgtgttactatatttgtttttcccttggagtagccaaagctgccgcagaagctgaaacagttgagctcttgttaagctatctgcacaatgcctaaacagttattgaaaagctaaaaaaaaaaaattgtgtattcaaccagtttctgcctcaggacaaacgaatatttagctcatctttagtatcacattactcccaaactagagtagaatctaatcaattgcagaaagctgagtataatatataaattatctccaaagttatttaaaacaaaacttattactgattcggaattgcatatgcattcatttaattgtatatattggacaaagtttccttagaaaataaaagaaatgatttatttaaaaataagtttgtattaggttgaaa

SEQ ID NO: 169546 - DNA, 307 bp, Homo sapiens
tcctccccatgtttaaattgttcctcctggatcagtagatagcatgaaaaatgaggtcaaaagaataactcacctcattataaatcactaggggtaatggaaagtgattctgaaggatgaccaggattccttccatctgttaagaatcatttcacctgttgaagagttcctacagcacaaggactctagtggtgagccgcatccattccaacttcacaattgccgtacagggctagtattaggagaatttgactgctagaactctaagtgcttaacaggtattttttaaagcaggcaacatctttat

SEQ ID NO: 169547 - DNA, 484 bp, Homo sapiens
ccggtgcagtaggtcagcaatgtctgtaatggtgaggagggcacatttaggcattcaccaatatgtttgattggtagatcatgttcctacaaaattttccaaggaatgaaggaatgtttggaaaatgattttttttttttgagtcagggtctttctctgtcacccaggctggagtgcagtgcactatcatagctcactgcagcctccaattccagggctcaagcaatactccagcctcattcaacctcctgagtagctgggactattggcatgcaccacaatgcctggctaatttttctttatttttagtagagacgaggtcttgctatgttaacccaagctgatctcaaacccctgagctcaagtgatctgcccacctaggccttccaaagtgctgggattacaggcataagccaccatgcctgaccttgacatgctttttttttattttttaaatatctctagtcacctaatttgctgaaag

SEQ ID NO: 169548 - DNA, 124 bp, Homo sapiens
cccctagccagacttgacacactgtggggataaccactttgggatgctcccaaatcaggataggcagtactacaatcatttagcagagccaaggtgaacctgggctttaggtaccacctatatc

SEQ ID NO: 169549 - DNA, 201 bp, Homo sapiens
gactctgcacctttagaaaaaaagcagttggacctccatttgcaatttatttcaatatttgttcactctctataaatttgtcctattttaaatgatttttcctttgaagtgattataacatttgcctggttccctcattgtgtgagtagactaaaatctttaatatatatctactttatcgctgtgagtcaagactttatc

SEQ ID NO: 169550 - DNA, 252 bp, Homo sapiens
tgtttctggaaactgttaagctgagtccagtacttttaagcctgacagtatctgaggatcctaatatggtgctaagccttcaggggtggagtggggaaagagtattaaaaaaggagtgttaaaaaatccctccaaaactcaggaatcagcatcataaatttaaccattcaaaatgtggtattatagaaaccaaaacattcattttgaccaaagaaaatctgtgagtcatttcctaagcctgggaaacaagcc

SEQ ID NO: 169551 - DNA, 654 bp, Homo sapiens
ctagaggaccctgcgcttcaactgcggttaggaatagacaaatagctcattacaactgtacagaaaactcagagaacagaacatttaggatcaagtcttcatttcaaattaattgagaaatgattatttctatagcttataattagctatagaatttcacaccaaacaggaaaaattaaatctgagatgaattaaagagctaaagtcaaaaaataaaaacaaaatattagaaaaagggtatcttagtgtatttataatcttagggtggtaaaatccattttcagcaagacaaaaacagaaaccacaaataaaaagataatcttaaaaattttttttgtggtcaagtatgtgcttggaaataaaaatctggccaggtgtggtggctcaatcctgtaatcccagtgaatttaggaggctaaagcaggaggattgcttgaagtcaggagtttgagcccagtctgggcaacatagtgagaccctgtctctacaaaaaaattaaaaacgttaactggggggtagtaacacatgcctgtagtcccagctgctcaagaggctgaggtgggaggattgcttgagcccagaagttggagtttacagtgagttatgattgcaccactgcactccagcctggaccacattgtgagacccaaaacc

SEQ ID NO: 169552 - DNA, 345 bp, Homo sapiens
gtacataggcctggactcaggtaccatgctcgacagcttttgctgctggacgtgtagttgggataggcattgctagagcaagcttctctgagcttcttacttggctctgccttttgggtaactctttagtattttagcttctagttcctcctctctgccctgttctgctggtactttcttccaagaaaaaggaactcttaagaggatgagagttggctaaaacaaaaaataatctttctttcaactgtggcactaccctgggttgcccgtctgtgttttattttccaaaggcaaaaaaaccattatgctatgttaagctaatttcaatacaaggcacacttactt

SEQ ID NO: 169553 - DNA, 476 bp, Homo sapiens
ttccacttcacagagaatgcaacactcagagcatttaagttacttgcctgaagacatagatcaagttagtggcagagccaaactcaaatccaaagcctatgcatgtacttcgcacaacaccaacaatgccaagttgtttcgcctcagttttaccatttgacaaatgacatcatccatccctgcctcttttacagagttgtactgaggtcaagtgaaatcactaatacaaacatgacttgaagtttaggagtttactacttaaactcaaaaactgcatgagtatccctgaccgtttgcagagaagatgaaggcagagccccagtcatctccctgtgcttgggtcaagctaatgaaagaagggagccaggttgcagagctggctccaagcctccctcagaccttgggtattcactaaggtgcaactttctcaccaaacaaaccctgctcttcccaactcacaggcctattatacaaaa

SEQ ID NO: 169554 - DNA, 234 bp, Homo sapiens
gaatgatcttttcccattcttttttattccttcatttcttattatgtaggtttttggaacaaaattcatttttcttcccatgacatgacttttatgagtaatttagaaaatgcagttgtcaaaaattgtagtgctgcccagagaaaaagtaagatggatctcattcaaagaaataaatctcatgaacttttgtcataaaataaagaaatatagacaaacctgcactgagaaagc

SEQ ID NO: 169555 - DNA, 193 bp, Homo sapiens
acaaaaccaccataggaaaaatactaaagcagttgccaaagatctacattctcaaaaaaaaaaaaaaacaaaaaaggtaccagtcctgaggcagtttcatagaagttcaaataaataattctcactctaagtgacttattccacagcacagagaggttatagaaaattattttagctgaggttcactttaacc

SEQ ID NO: 169556 - DNA, 896 bp, Homo sapiens
cgttaagaaatttggatattttaaactttgtttaaagtaaaaactttggatttatttaggggactggatgaaggtgtttcttgtacgtcaatttatgaaaagcatagtgcaggactgacaaaggggatgcatgcctacaggtaatttttatccaactaaagttagatcttctcaaaattcctaaaagcagtagtatacataatcaaccctttaccatatagttgtacatattaacagatacttaaatattacagacatagtagttgagaatttattgatgttttatttgggtaagactgtcttagtttaagaattataaaaatgtgcaagctgatattttgaagttggtatccctgaaattataccatatttcatcagttcccaggtgcacgtttttccacctttaacatctctgagattgcggtgttcatagagttggtgaagtgtcgttcttgatagcatttttatctttcttgatcatataataatggtatgccttacaattgatagcaccttagattttctgaaatacaagcatgagttcaaattcaccgtaatgaaagattgtaaattgggagacataatctccttcattgtgttattccttgttaaatcataaaaatacaccagtgtattgcgtatgttaaagataaatgccactttgaaattcaataagaaattttcttatagttctgtaacatgttctttcaaaggggtagaacataaaattcactcatttagacttacatttcataaaagtctagaattactctatcatatagaaaatactattgtaacataaggaattaagtggaaacatttaaactttaaaagcattttcttttaaagtcgaatgtacaatgttttgaactaaacactgttagtgcaatattaaa

SEQ ID NO: 169557 - DNA, 300 bp, Homo sapiens
gtcaccagcacttcctcagcatccacaggtgacaccacccctcttcctggcaccgacacttcctcagtatccacaggtcacaccacccctcttcttgtcaccgacgcttcgtcagtatccacaggtgacaccacccgtcttcctgtcaccagcccttcctcagcatctacaggtcacaccacccctctacctgtcaccgacactccctcagcatccacaggtgacaccacccctcttcctgtcaccaatgcttcctcattatccacacgtcacgccacctctcttcatgtcaccagccct

SEQ ID NO: 169558 - DNA, 211 bp, Homo sapiens
tcgtagaacggagctgcgggcgtgtcacgcaggggacaggaccgcggtttcacgatcgccagtgactgggtcagcatctacaggtcacaccacccctctacctgtcaccgacactccctcagcatccacaggtgacaccacccctcttcctgtcaccaatgcttcctcattatccacacgtcacgccacctctcttcatgtcaccagccct

SEQ ID NO: 169559 - DNA, 395 bp, Homo sapiens
ttgaaataatccataattggcccatatagtcaacttaactttgacaaagatataatggtaattcaatggagaaagcatagccttttcaacaaatagtgctgggataattggatgtccatatgccagaaaataaaaataaaagaacatatttttgtatgttcttcacaccttatacgtcacatacttcacaccttaaataataattaaaatacttcacaaacttaaatgtaaaatatgaacctatcaaacttctagcagaaaataagggaaaatgtacccagtcttgggtttggcaatgaagttttagatatgacaccaaaagcatgatccatgaaaagagaaattaatgttagattttgtcaaaattaaaaacttttactttgtgaaaaactgtt

SEQ ID NO: 169560 - DNA, 397 bp, Homo sapiens
tgataccctggtatggccagcccctcgaattgaaggctagagagggaatggctggggaacagcagcgctgatccagagatgagcctttgccattaaattgcctcctgctgccatggcaactctgtgacaagactttttggagcaaaaggtggcaagcagatactagatctgctggccgcctcctgccgaatttggctgcctcctgccgaatttggctgctctcctctccaatcaggatggaagcactgcagcactaaagctggaaagcaggctgaaaaatccctctgtcaccttctgctttagtgattcctgatatgtgtcttccccagaggggaataaaaatggagtctgatcattttcccaattattacctcatatcaatttacaatttatagcc

SEQ ID NO: 169561 - DNA, 397 bp, Homo sapiens
caagcccggctcccgcgcgcacaacttctgaagctgacttggcggggcccggggatgggccgggggtggccctcgcgcggctgccccgtgtcccgagcgccactcccgccgccccgccagtgcccccgcggtgccccccggccgcgcgcgccccccgcgcactcacccagtgccgcgccgaccactaaggccagcagcctccccatggctgcgcggcgcgtgctgcgcccccctcccgggccgccggtattaatagcggggcgagaggcggcgggacctggcggcggttagaatgtccccgggagcgcgcgggcgcagcagctgcggctctggttccggcgaggggggaggagggggggcgcggcccccccgctccggttaccgccgggggcccagc

SEQ ID NO: 169562 - DNA, 502 bp, Homo sapiens
cttgtctgtttcttatctactgagtacagttttcacgttaagaataagagcaacccctgaagatcagagagtgagatgctgaaaggtgttcacactcgccactcctcctcccttaaagatgaaccttaaaagggtcacacagtagtcctctatgttggaagtgaagggagacaagtttattttgggatccatgtgttaaacaacgagtgcaaagccgtgtgagcacacatagggtttgagttaggtgtcttttttgctgggaggaaggaattttctattgagtcattttctccccacagaggttgaagtatagctcttacagtggagacatggttgatgtgttaataccaccaagatagcaggactgaaggcatggaagaaagagtgttggaatgctatttaaggctgttttggcttttttggtgttgcaccatgcctgttaaactaaaaaaacttttccagtgacccatctaatggtcttaggtcctttaaggagagtcag

SEQ ID NO: 169563 - DNA, 822 bp, Homo sapiens
  misc_feature (1)..(1): n is a, c, g, or t
ntaaattgttcacgcagcaagcctccagcccgttttcatcccatcctctcctctctctgcatttctgccctttttcttaccttctccttctttgagctcccaaacagctgtaccctataagccagaaaagtctagttagagagaagctgagcctcaaccagccaagttagaggcaggtagaagggaccaaagatatgtgtttactggagtttccgggcttctctggtggtgaactgaaatctaaggtattcagccaggatgcctagacctaagcggaatacccaggcagcctcactcaccccagctttccagccccacaacactctcaggtgctatccaattgacccgtaattccctgacctgtggagccacacctacttctgcaagacccatctaagtttcctaatttcacagctccccacccccacctctgcttctaacctccaggtctgaaatgctgagctctgttcctatgatgtctggagctactagccctccttcccagaaaaatggtgggtccaggattgatttttcctcctatctgtgatccagactagtgcatccttcaccccttcatccagtccaggcccagggttttctttcctgcagctcttcctctaaagactaagctgcctctttaggaagaggtgagaacgcaaacattgtaacaggggcaaaattgctttcagtccctttgggcttcagtggtgttgactggccaggtgatggagctgtgggcatgtgggcttgtgatctgggttttctgacctggacgtcgccacaactttacaatgggtgatgctgggcaagtctatgccctct

SEQ ID NO: 169564 - DNA, 918 bp, Homo sapiens
tgccttgggctgctatgggggatggcacctctcagccctcccaggaaacacacagagctctgggcccatcccagccctggcctgtggcctttcttgtgaccatcagggcctggagacccagcaaggagttgcctgggtgctggctggtcactgccagaggcctgggctgcatgaggacctccagggcatgttgctcccttctgtcctcagcaaggctcggtcctggacattctaggtccctgactcgccagatgcatcatgtccattttgggaaaatggactgaagtttctggagcccttgtctgagactgaacctcctgagaaggggcccctagcagcggtcagaggtcctgtctggatggaggctggaggctcccccctcaacccctctgctcagtgcctgtggggagcagcctctaccctcagcatcctggccacaagttcttccttccattgtcccttttctttatccctgacctctctgagaagtggggtgtggtctctcagctgttctgccctcatacccttaaagggccagcctgggcccagtggacacaggtaaggcaccatgaccacctggtgtgacctctctgtgccttactgaggcacctttctagagattaaaaggggcttgatggctgttccaaagtgttgatggctgggagaaggggccagaggaggagtgaggggtggggtttgtccagccctgggctttccgggctctagagatagcatggtgtaggctcaatgacagttctggggacagcaagttggaggttcaggggcagcttcaggacagcaggatggaggctcagggacaattcctgggaggccagtgccctcgttcctccttgtcctcatcctcccacttgctccaggaaactgagagctgagcctggagcttccagacagtcagtg

SEQ ID NO: 169565 - DNA, 586 bp, Homo sapiens
gatgtgtctgtggttgagaatgccccaacagggacagaactgttgatgctcagggcaactgacggggacctgggtgacaacggaacagtgcgcttctccttacaagaggcagagactgaccggaggtccttccgtctggatcctgtgtctgggaggttgagtactatttcctccttggacagagaagagcaagccttctactccctgttggttctggccacagatctgggctcccctccccagtcatcaatggctcgcataaatgtgagtcttctggatataaatgataacagccctgtcttctacccggtccaatactttgctcacattaaggagaatgagcctggaggtagctacatcaccactgtgtctgccactgacccagacttgggtaccaatggtactgtcaaatatagcatatctgctggggacaggtctcggtttcaggtcaatgctcagagtggggttatttctacaagaatggccctagacagagaagaaaaaacagcttatcagttgcaaatagtagctactgatggtggcaatttacaatctcccaaccaggcaatagtaaccatcactgtat

SEQ ID NO: 169566 - DNA, 360 bp, Homo sapiens
attaaatgagacaagcgtgcaatgttcttagtgctgtggcgggggtacagtcagcactcagtgattccagccgactggaactgactgtaatccagccttgctgcttggccacttgctctgctttcagacagggtgatctgtgggttctgaggcttgtgggctacactagatgggctgcttccatgccagactaatacagttcccgaaacatccaggttacctcccggggtgtagactccccatctgccccagtgagctgtgcccaggcccctcttcttgcccctcttacctgaattggctgttggagcttccaggcttgggaagctcaagccaggctgggttggtggtgtagccatagga

SEQ ID NO: 169567 - DNA, 375 bp, Homo sapiens
agagaatgatcttgtagagataataaaattgagaataggtgaaaagagcttaaagatacctgggacaatatcaaaagatctaatattcatgtcactgcagtcaaacaatgagtgaagaaagagaaagagattggtacagaaaaaaaatattgaaagaaagaatggctgaaaacttcccatgtatggcgaaagacattaggtactgattacagaagttcatcaaatcccaagcaaaataaactcaaagaaaagaatacccacacaacaatcaaactgccaaaaatcaaaaataaagaaaaacaatcttgagactagccggagaaaatcaacacatgacccatctacaggaaaatgtgacgagaatgagtccaattt

SEQ ID NO: 169568 - DNA, 247 bp, Homo sapiens
acaggttgcggtgagccaagatcgcgccattgcactccagtctgggcaacaaaaacgaaactccaactaaaagaaacaaaacaaaactcctgccacaattttttaaatcttacattaataaaaacacaaagatgctgggattatttacctggggagcgggagaaaaaacaaaaaggtcctctcaacacaggaatggggcaaggcttttaacatatgcctgttacctgtttacttcctgtcttatggt

SEQ ID NO: 169569 - DNA, 261 bp, Homo sapiens
ttgtaaggaatgggaatagaaaaaagcagacctgagccaggtgccatggctcacactgaagtcctggctttttgggaggctgaggcaggaggactgcctgagaccagttcaagacagtctgggcaacatagcaagactccttctccaaaatatttcttaaaagaaaaagcagacctcttgcactcaacactgttaaagatcagaataataatttcctttgaagaggggagatgaagaagcttctatggtgctggccaaatt

SEQ ID NO: 169570 - DNA, 306 bp, Homo sapiens
aaggttcaacgataatttaatgaatagaacaaaagtttagcaaatattattgtaactaagcagctaataagaacatagataatacataatgcataattaataatacacaatctctttgctcacttattaatgcctgtagaatagggttagtgaaaagctaaaataattcacataaagtatttttaacatgcctggtagatagtaagtgagcaaagagtgaagaaacagaggcttggggaagctgagacattttcccaggatcacagcgggtggagctgtatctcagaaatgaagctcacagtctta

SEQ ID NO: 169571 - DNA, 772 bp, Homo sapiens
cagtaaacacaaatattatgtaacagaactatattcatattcttcatcctaaaaatggagaaaattttgagttatttattgattgtagtataggactcattctctatttgttcaaattattccatgtcaagtgcctagaataattgttcatgacatactgtgaaatagaaaatactgatagagatggattacaaaagtaaactcaaaaaacatcctatgaattgtttcattatatatataatagaatatacttatatccacataacaaaaaaattaaatctttttagatagaatagctgttataaactgcttaagttgtacatttcatcaacacttaatgaaaaacatcaatttctcacaaaaacttcaagcagtagaagaggtaatatttcttaattcatctgttagccagtaataccataatacccaaaggagacaaaagaatcacaagatgactatgaaacaacatcctatttaaatttagacacagaaattctcagaaatatttaaaaaaagaatacaaaaaggtataagaatgattacaggtgtgagccaccgctcctggcctacaggaacttattttttctcttgtgtctctagtaccttacacactacctgggcatagtgtatactcagaaagtattgagtgaattaattactcaaaacattgggtcaaagcttcttctaaccttttttctttgcttttcatgtgtttttcatattccccatttaataaacatatttgtcaacaaccaaagatgacttaatctcc

SEQ ID NO: 169572 - DNA, 322 bp, Homo sapiens
gcactgtccgttgctgtttcgctgtcgtgactgtcctagtccgtctgagccaccagctttgtggtgctttgtagcacagccccagtttaaccatggcaccccacagcctcctggaagttgcggggttggggtacaagggacaccccgccatgaaggctggtgctcagccaaggcaacgtggccacggcacctgtctttatgcaagaggattgaacgtggaaacatacttcttagaagagaaaactctgaagactttaaaatgaaactatccctgagtggagcttcctttttgaggacggtgagcaggatccacactcggcgc

SEQ ID NO: 169573 - DNA, 277 bp, Homo sapiens
caaaaaattagtcaggcatggtggtgtgtgcttatagtcccagctatctgggaggctgaggttggggaatcacctgagcccagaaggccaaggctgcagtgagctgtgattgagtcactcactgtactccaacctgggtgacagagtgagaccctgtctcaaaaaaaaagaaaaagaaaatactgggggcgagatgtcatgaaaactaattttattatagttcagcaaaaacaaaactctccttgaccaagattccctctaattgtatcttcattcc

SEQ ID NO: 169574 - DNA, 165 bp, Homo sapiens
ggaggaactgtgtttactcctgtgtttgcagttagaagtgctaactggggtagtatggagcacccttccctgtatttccccagacactcaatggagtaagcaggaaacatctttccctaatacctttaatgttctattatctcctctatgtatctccttctatgc

SEQ ID NO: 169575 - DNA, 369 bp, Homo sapiens
aggcccttcccccaatcccaggagccaataaactcattcttctttgcaattgtacaatgacatgcacagggaagtcttcctttccagggtataaagcaccattaggagaaagtttttggtttgccttggcccttattttttgttttggggattttgcgtgtgacaacatcactcctgagctgtggcagccatcttaccatcatgaggaaaccgccacggggataaaaagccagtcctctgaggacctggaagaaaggacagaacctggctcccaaggcatcactgagacccaaatcaacagtaagtaagcacagcacctactcctgggcttctttttatgagagaaaaaaaaagttcccatttgtgtaa

SEQ ID NO: 169576 - DNA, 260 bp, Homo sapiens
gatctatatctataatagctgtcctacaaaattctgtcacttcctcctaatacaagcttttgtttatgaatagtaccactaatcctttaagaccactgtcagctctcatgaacacacaagtgtgttaacatcagacttggtattgtttttcaacagaaatatctggaacactttgtaaaactgggatcgtcaaaatcaagctctatcaaatcatactcccataaggtctgtgtcctggcaaataatacatatatcaatat

SEQ ID NO: 169577 - DNA, 418 bp, Homo sapiens
ctactatttcctagtgtcaaggatcaaggtggctgtcaacttctaggctagtatttatttgtaccacattgtaggtcatctacaggatactattcatctttaagaaactagtgtgacagtgtgtggccttagaagtagagcttaaggaaaaaaaaaaacttttttagtccaacttgatgtttgtctagtagtactctatgtacttgttttcaagtttcatatatttccaacttggagattccaccttaaaattcagttaattttctgttaatgaaatgaccactctcttacttggcatctggtcacccttgagtccctctctgttccattcagatctcttcatcaagaattactgtaatgtcccctgtctcatccttcattgggaaagaattgcataattgtataaatgagctatcct

SEQ ID NO: 169578 - DNA, 255 bp, Homo sapiens
tgcagctagcaggcagatgtgcgcccagggtctacctgctctcatcctactcttgcttttgccacattaaactgcctctctaaatgttcatccaccaacaagagaattgggctgatccatcaaccccctccaattgagaaggaataataagaataatgccatggagaaaagataccatttgttgagttttatgtgtgaggcatgcatcatcttattctcacaactgttttctaagatgagtagtaatattctctc

SEQ ID NO: 169579 - DNA, 372 bp, Homo sapiens
tgcctttagcagactgagaggaacactgagcccgtcaaaggagagctccccacaggaaggaaaagtcagcttaagtggtagcgaaacatatgaagttgagttgccagtatccctccacaggccacacaaacagtaatgaaattcatggagagaaagaaagaaaagacccacagccatgagcagagccagctgggagggatgttattactttatttttgttttcttaactatgtgtgtgtgtgtgtgcatgtgtgtgtgtgtgcgtgcgcatgtgcgtgcatgtgttttgagggggagggaggattgattgcagaaaatggcttgatccacagcgtcgacgcggccgcgaatttagtagtagtaggcggccgc

SEQ ID NO: 169580 - DNA, 220 bp, Homo sapiens
tctgtgcctcatagcatttttctgtgcatttccaagctaaaatacataaaacccagctggaatctgtcatgctttgtccgcatcacttcaataatttcagagttgctgctacacttgaatgaatggatgactgacattgaaatagagcagaaatttgagtagagacgttaaattgagatatgacataaaaatggtcttcatacatatgaatgagtattag

SEQ ID NO: 169581 - DNA, 387 bp, Homo sapiens
aaaaaaaagcgtggagtgtgcgtaattgtgtttgaggaagagatggtcactgtctctatggtagtgtctttagggaactatctgtgcctggatcctggggaattatgacaaagcagtctgcaggtttggcatgaactctgaactttctccctctgcaggatcttcaatagaaaggtcctgtcctgaggaaacactcagaggcacttctcttgcttgtgaagcctgccagcatgtatgttttggtcagcactgagatgcacatgacaaattgtgcgcaatgcctcagcacagcccaacggggttttttctgtttacacttgactagccttggacagtaggaggaaaccttaaatatttccttctactctcacaaaccctttatctttt

SEQ ID NO: 169582 - DNA, 152 bp, Homo sapiens
aatcaatgtgaaaacagtatgcagagagactggaggcttccacccaggagcacacgtaaaacttctggggtgacagaagccttgatgggtttgagttacaaaggtatgtgtgtttcagaagtcattgattgaaacttaggattttggccagg

SEQ ID NO: 169583 - DNA, 144 bp, Homo sapiens
cctacaagccccctggtattaacgtgtcagggctgagtgttctgggatttctctagaggctgctggccacacagactcaccaagccacagacttgtcttccacaagcacgttcttacaacagccacaaagtgaccaagccactt

SEQ ID NO: 169584 - DNA, 292 bp, Homo sapiens
ccgataaaaatgtgcagctctcccatctaattaacagtaaaggaagggaaacgcaccgacgtggtctcagtttcaccctctccgtgtaggcgctgaggagagtgacaacacccagtgctggggtaggcagagggtgcgtctcctcacaggcaggcaggcactggcttcacatggccagtcatgtggtgccactgaagaaaatgcaagacacacagccccgtgttaatcatcgtactgctgtcaatttgcctggcagaaatagaaacatcagtttgaggatatttactgcaat

SEQ ID NO: 169585 - DNA, 231 bp, Homo sapiens
cgacggctcactactcatacatgccggctctcgtttacactggccagtttacacggtttctccaagccatcacagctgatatctccgggtgctatccccatactgctactcttaactcttgaagtaaataaataatctttgctggcaggactatgctgaatctccttaggcactctctaatctgatgtcctgggtcctcccaattcttagaccttttataccgtgtttttc

SEQ ID NO: 169586 - DNA, 393 bp, Homo sapiens
tttaatattggtgatggggtggaagagaaggtagggaatgcccttatggccaaacctaaaacacagtttccttgagccttctgagcaatcttagaattattcagaagctttcaggaaactcaaattctattaatttgatttggttcctttccaaaatgttaatagacatgtatttgcttaaaacgtctacctattccatttaatttcctgctgataaatgtattttatctacaagcaagtagaatattttgttttggttaaagtcaagtttttataaaaggaggggaagtataagagagagtttcctagagatacaatatcatctctggagcaaaatgttgaggccaagtgtaaaaacagactatttctctttacttcctgcagaatttcatt

SEQ ID NO: 169587 - DNA, 418 bp, Homo sapiens
aaaacttttctgtagagatggggtcttgctcttgcccaggctgatcttgaactcctggcccccagccttggccttctgggattacaggcgtaagccacctgccggaccaattttggtgtttcttttgcatgctgctggtcctcctcagatgcttggcaatcattggtaatgatgggcttcagaacgtgctaccggcacagtgagtgttttaagctgaaggaatttgagaaaaccgcagaagccgaaggatctttcttaccttctcctgcccttcttccctgaaccaggtcatacaacctggaactccctgcccttttcctgaagaagcaaataacagcctcctgcgagaggcgccctccctgcacctgggggaaaggagggtccttatctctgaagacacagggacacagaagaatct

SEQ ID NO: 169588 - DNA, 365 bp, Homo sapiens
taactgtagaaatcagtggttcataaaacatgatagtaatctcacatatataattcaaatgcaatttcatagtaagatacatatttagtatatattgttcatttgctgatttgaatatattaaaatattgatatttaacatgacaacatagccttctagactggttattttaaagttaattaaactcaggaatgtgaaagagaggagatcagtttacatattataccagtaaatgtgggtatgtatgggcctgtaaataagctgttggttaggaaatatggaattttattttgttaactacaaccaagacaacaataacagtaagtctaatactaggctataatatcagaaaatctcaataccgg

SEQ ID NO: 169589 - DNA, 271 bp, Homo sapiens
tggtcatatgagtccttggacccatagcaataactcttaagacatcaagagttgcggcccacagctttgcaaccgctggtataggaaaaagcaaaaatcagtggctgggatttaatctaaactccgctgctattaaataatccctttcccctgtgatgtggtttggctctgtgtctccgcccaaatctcatctagaattgtcaagggagggacctggtgggaggtgattggatcatggggacggtttcccttgtgcaattcttctgatagt

SEQ ID NO: 169590 - DNA, 330 bp, Homo sapiens
cctcctcccacctcctttatcctccaggtggatgggcacccggtggccttgcccttcctgcaggagccgctgctgtatgtggagctgcgaggacacactgtgatcctgcacgcccagcccgggctccaggtgcggctccagggcgagtctgggtgggctgcctgctgggagcttcagtcctgtttaggcctctgtatctgtagagggggtggggatgccagctacctcctagccaaaaaaggcaaggagtggggtacaggggtgtgaggggaggtggatcagggtcagagatctccccaggcagtcagaggagttctgagttctgagccc

SEQ ID NO: 169591 - DNA, 488 bp, Homo sapiens
ggctgagtgcaggacaaggcccctgccctgagtcctggcagctgctgcccccgctgcctgcctcggcccgcttcctgcatggccttcggagacccccattaccgcaccttcgacggccgcctgctgcacttccagggcagttgcagctatgtgctggccaaggactgccacagcggggacttcagtgtgcacgtgaccaatgatgaccggggccggagcggtgtggcctggacccaggaggtggcggtgctgctgggagacatggccgtgcggctgctgcaggacggggcagtcacggtggatgggcacccggtggccttgcccttcctgcaggagccgctgctgtatgtggagctgcgaggacacactgtgatcctgcacgcccagcccgggctccaggtgtgctgtgggatgggcagtcccaggtggaggtgagcgtacctggctcctaccagggccggacttgtgggctctgtgggaacttcaat

SEQ ID NO: 169592 - DNA, 600 bp, Homo sapiens
ggctgagtgcaggacaaggcccctgccctgagtcctggcagctgctgcccccgctgcctgcctcggcccgcttcctgcatggccttcggagacccccattaccgcaccttcgacggccgcctgctgcacttccagggcagttgcagctatgtgctggccaaggactgccacagcggggacttcagtgtgcacgtgaccaatgatgaccggggccggagcggtgtggcctggacccaggaggtggcggtgctgctgggagacatggccgtgcggctgctgcaggacggggcagtcacggtggatgggcacccggtggccttgcccttcctgcaggagccgctgctgtatgtggagctgcgaggacacactgtgatcctgcacgcccagcccgggctccaggtgcggctccagggcgagtctgggtgggctgcctgctgggagcttcagtcctgtttaggcctctgtatctgtagagggggtggggatgccagctacctcctagccaaaaaaggcaaggagtggggtacaggggtgtgaggggaggtggatcagggtcagagatctccccaggcagtcagaggagttctgagttctgagccc

SEQ ID NO: 169593 - DNA, 744 bp, Homo sapiens
tattttggaaaaccagtgaaatagtggattggctactggttctgtgctaatagtgtttataagtggaatgggactttttttaatatgaagtcacccaaggaatttgctttttctggaggctgaggcaggagaactgctcgagcccgggaggcggaggttgcagtcagccaaagatcgcgccattgcacttcagcctgggtgacagagcaagactcacacacacacacacacacacacacacacaaaaggagtgaaaaggattgaaagcaacaaaatagtatgtagtcatcttctcaaaggaaccaaagtaatgggctgattatcttcagcttcctgaagaagctgaatgtttgtatgtaggaagtcccatgtgttatcttggcaggaagtagaaaatatgagtaatttggggacgcagaatctttcgtcacttccctccatcgcgtctcatgtccaggatcttcccaggagtcgtaggaaatgtagcatccatgcagttagtcgtttacctcctaggaaacctttgtgctcttaggagacagtggcttcccattgtggttaagtgtaaccctgtttggctgacccctggatagagcttcataccctcagcactgcatagtcacctttgacttgtggttagaaagatcagccatatagtccatcatgatgatatgttatgatggtttatacaagaaactgggactttttatctcagccaaaacgctactcttgctttaggattag

SEQ ID NO: 169594 - DNA, 820 bp, Homo sapiens
tattttggaaaaccagtgaaatagtggattggctactggttctgtgctaatagtgtttataagtggaatgggactttttttaatatgaagtcacccaaggaatttgctttttctggaggctgaggcaggagaactgctcgagcccgggaggcggaggttgcagtcagccaaagatcgcgccattgcacttcagcctgggtgacagagcaagactcacacacacacacacacacacacacacacaaaaggagtgaaaaggattgaaagcaacaaaatagtatgtagtcatcttctcaaaggaaccaaagtaatgggctgattatcttcagcttcctgaagaagctgaatgtttgtatgtaggaagtcccatgtgttatcttggcaggaagtagaaaatatgagtaatttggggacgcagaatctttcgtcactctttcacccaggctggagtgcagtggcacgttcttggttcactgcaacttccgcctcctgggttcaagcaatgctcctgcctcagcctccagagcagctgggatggcaggcacacaccaccacgcccagctaatttttgtatttttaatagagatggggtttcacagtgttggccagactggtctcgaactcctgacctcaagtggtctgcccgcctcggcctccctaagtgctgggattacaggcgtgagccaccacacctggccttcatttgtatatttagagtttaggttgaattaaatggatatattatagatttctttttactcagatgttttaaataatacagtaattggcatggaaagaagtccaatcggtagccagctca

SEQ ID NO: 169595 - DNA, 137 bp, Homo sapiens
gatatggtcattatgctgtcagcttctgcttttcctgtaaaacaagagtaatgacacctatccggaaggattgttgtgggccttacacaggataacgcacacacaagatgtatggcagaacactgtatcaggtctat

SEQ ID NO: 169596 - DNA, 282 bp, Homo sapiens
agttagattatttttacaacagcaatgaaaaaagcactaaacctctcatagaggaaaatcctgagtgtcagagtgggtaaatggcctgttcaagaaaactggcaagttgcagagccaggttttggaccagggtatctgtccagtggcccatctgctctattactgctgcagatggactgctgcaatagttgcaatactctataaagttcctgaccgttgacagagagcttttacagaagtcttaggcagtacacacaaatacgaacattttcaattttccta

SEQ ID NO: 169597 - DNA, 129 bp, Homo sapiens
ggacagaatcagggtgtggattttaacaagatctccatgtgactggtgtgcacattcaagtttgagaagcaaaggatttaaaataacttatcaaatcagagtagtgatgtctagagaggcggcatccat

SEQ ID NO: 169598 - DNA, 513 bp, Homo sapiens
ttcacctctaaccataggatcttttaaaagactagttctgaggtcctttactctgagtaggtatttatggaataagccattatgtattgacattagaatcagttaaacataaatttttttctctttttatgcactacttgacatcaaaagcaaaaagaggtaagttggctataaacctgtaggtgaacctaatttttcttagtagatttgttcctgagtagctttgcttcaattaaatttctgtgaatcaaatacttttacattaggaagattgtcattggaaattcttattcttttctttgaaaatgaataagcatcttctgtaaacttagattttcaagatatctagtatttaaacattttgcttttcctttaatcaagttatacttacggtttaatttgcttgtgaagacaaggcattttcaaacacttggtttagttttgagataactgaattgtttctcccaccagaaatgtggattacatgttataagtctttcctattttcttaaa

SEQ ID NO: 169599 - DNA, 281 bp, Homo sapiens
ggtgtacccagaaccccccagggatctccatagcctgtggaggaggaagtttagaacttattttcatttgcatggcaccctgtctttttgaagatagattaagatatttgcacacagcctggtcagagctggatgtcatggtgaagttttttgtggcagtggtggtccggagggagtagggagaggccaggaggccaggaggccagcactggcggtgatggggtgtgcctttgcttttgtgtaggggaggtaaagaggtagataatgcagggatgtgaact

SEQ ID NO: 169600 - DNA, 483 bp, Homo sapiens
ataatcacaatactttttccacaaaatcatttgaaatagtttttctctatttgttcatgccaacattgatatagctgctttaattgttcagtttcatttttatattttggaaatttgtgtattattttgttttgtttcatatttgttttgtatacgtaaaacatttagttggaactgaagtcaaaattataaaagatgacacatttgaagattttagcttccattgtagacttctcattcctcttttctccctgacactataggtaacaatatttttatccgttttcttgaactttttcactctgtcatagcgcagtatgtatcaattctatttcaatgccatatttatatttttgttcctatatttggtttttatacattttaatcaatcttatattttcccgtgtctggattgtgtgtcttacttctaaaggtgcacatacttcataagtatgcataaagacgtccatatcatttatttga

SEQ ID NO: 169601 - DNA, 251 bp, Homo sapiens
ccgaatccccgcaggacccatggagctatgaccacaccaggccattcaaatggctctgcattatcttcccttggaaggtggccactcctcggtggcagggcctttccctgaggctgcaggccgtgggctggcagcccgtctcttggcatttcaattgaaggtcaccaggtgctgggtttgaaaggaagtcactggagtgctgccaggggccgccctccaaggttaatgagaggcccacatccaggcaagaa

SEQ ID NO: 169602 - DNA, 242 bp, Homo sapiens
gtttccccggtagggtttccccgatctgagccccggccgccgccgcggagcccgggcgccgaggggagccgaggcgggccagcagggggcgcgcgaaggacggactccagctctgagtccgaacgagagattcgccatccgcagtcccggggccaaagggtttcaggagcctgtgcgcaccaggtccctgaagaggcgtctcggcgccgttgctgtgcggcggggaaagggtggtacatctc

SEQ ID NO: 169603 - DNA, 672 bp, Homo sapiens
tggaaaggcagaagggcactcctccaatgggagccggggagccgtcggtagcggcgtaggcccgtgcccctgctcgcgctgcagcccgtggaagggttccgtccagcgtatccttcagatcttgctgtaggcctctggtgtctgtgcgcgcgcggcaggggcggcggcggcgacggccggaggtgtacgttgcttcctctactgaagtcttgaaacccctgaaagtcatccctgaggtttgaagttaacttcttctacaccctgttaatgttgatattttgacctccttccatgaatcacaaatgttcttaatggcatctagaatggtgagtcctttccagaagattttcaatttacttttcccggatccatcagaggaatcactgtctatggcggctatagccttatgaaatgtatttcctaaataataagacctgaaagtcaatattactccttgatccatgggctgcagaatggatgttgtgttagcaggcatgaaaacagcatgaatctccttgtacatctccatcagagctcttaggtgatcaggtgcattttcaatgagcagtaatattttgaatggaatctttttatctgagtagcaggtctcaacagtgggcttaaaatatttaataaactatgctataaacagatttgctatcatccaggctt

SEQ ID NO: 169604 - DNA, 556 bp, Homo sapiens
tggaaaggcagaagggcactcctccaatgggagccggggagccgtcggtagcggcgtaggcccgtgcccctgctcgcgctgcagcccgtggaagggttccgtccagcgtatccttcagatcttgctgtaggcctctggtgtctgtgcgcgcgcggcaggggcggcggcggcgacggccggaggtgtacgttgcttcctctactgaagtcttgaaacccctgaaagtcatccctgaggtttgaagttaacttcttctacaccctgttaatgttgatattttgacctccttccatgaatcacaaatgttcttaatggcatctagaatggtctggaagctccgagtttatcttgggaactcaagaggagaggatcacccagttcacaggtatttgaggatacaaacccattgctgggctcggctttaaaagtcttatctgaaattccttgtgaaacagagtttcatcaaagccaatccaaaaggcctatgtaaaaataaccattcttgctgcactttatgcaaataatcaggccaaatataagactacagtttatttac

SEQ ID NO: 169605 - DNA, 721 bp, Homo sapiens
cacgctgtggtttccgttttccaacttaccgaaaaattgcttggccgttgtagaatttgttaggagaatagtggccaccctggctagtatctgcgtctggttaacgcagacggagacgaaattgttaacttactgcctcccccagagtatgatctattacttgtattcttaatctacttcggcaaaaatagtgccagcatgagctacaggttttagggaaaactgttgaggaatcaggcctggagaaaatactcaacggggaaaactgggaaccagatgttaggtagggcttggaaggcatggatataaaattaaaaggactggggtgacattttagggcactaaaccttgggtgttagagaactcttggcttaaaaaagaaactctactttgcaacaggtgtaatatagctaccgtttactccccagggttatactagtaactgacacctgaaacattttgaaagttacctaagtatgtttcacgtatgagaaaactggtagctaccgtattctcaaatgatgatttgggtttaaaaagccatttcaaattaattattagaatcgttttctttctgaggacgtctttagtaaagtactgatttcttttacagtaaaaggctttaaaaactactccttttctacagtaaaacgttcagttcttaaggatatattgaagtggcgggtagacgttattgtatacataccatatatgtgaaagt

SEQ ID NO: 169606 - DNA, 306 bp, Homo sapiens
gcctgctaggttaactttttttctgcacaaatatacagttggaccacctggggattttgtcataatgaagagtctggttcagtaggcctggaagggctcaagattttgcacttatgacatgctcacaggtggtacccatgttgattgtccacagctacactttggtagccaggtagttgttcttagggccagaagcccttcttttcattaatgtttttatcctaaatgaccagtcttttattctgaattagtgggaaaattcttcgttgtggttaaattctttgtgttgacaaactatttctgggg

SEQ ID NO: 169607 - DNA, 342 bp, Homo sapiens
tagcccctatttaaagacaaggaaactgagactcagagaagttaaattatccaaagtcatggagctgttaaatagtggaactgcaatacaaactaggtgttctcattattgtctcattttcttaacagtgtcattaaacattacattgacaatattttatgtatagttgggaaacttcccatatttaagaagtgtagaaacagaccctgacacagggatataatctagactcaaactgggggcaacacctctgaagtagtgaagaaagcagcagtggcagaaggagaagatgcatggggagctctggagctaggatgatccttcaaatgtggcccgaactga

SEQ ID NO: 169608 - DNA, 397 bp, Homo sapiens
tgaatgtagccaaagtcataacattttttaggcatcattatattgttttgagttttccatatgactgactttcagcaaagataaatgagggcctagtatacgtgtgaacctcccagaaaaggccatgtgttatgaaaaatgccttacgctatgatgatttgttcctgtgtgacacatcagttgtttctgtttttgtttttgacagtccttcaaggtaggcctgcaaaattgagtatttctttctatagctccttcttctctttactttcttggcttgtaccatataaaaaggtcagtatcacccagttacacctttgtgacttgttgtgtagtgttggataatgaagtaaaaactttacattaaagttcgttatcaagtattttcagctattatatc

SEQ ID NO: 169609 - DNA, 327 bp, Homo sapiens
ctaggaaaaactgataagcattgtaaccactcctgcaattacagccttttgtaaagttgctacttttatgaaacaattgggaacaccaaagattatccccacagctttaagaacactttgaaattttcactatgaaaaaatttgagttcttagtatcacaatactgcaataccacaaattaaaatttaaactaataaatttaattctaaatgtacaattaaggatttaagacataaatatcaatagactttcctaatgttccacagattctgcagttatttagaaatgagaaatgtatttaccaaagactaaataaaacacacaaaa

SEQ ID NO: 169610 - DNA, 425 bp, Homo sapiens
ccttccctaccgcattggatgctttgaggatagagtgagaaacaaatgttaaaaatctataaagttcaaagggttggcaaatacgagaaattatttagcccaaaaaactcactgccttcaagatttaaattcaagggagaaataacactaagaacaaagactgcagagtcccgctatcagctccatcacttaccaactatgtgtggcccgaacagtgatgatgataccccgcttttgcttagctgagaccaccaagcagcctcctggcccttggtatggttgctgcagctagctggcggaaaaggggccagcaggggagtttgctagaagagggtcaggagaggcagtgggtatccctaaaagttaatatattgagaacttagcttgagtctggtccttcccaattccaaaagtaggaggagtaa

SEQ ID NO: 169611 - DNA, 191 bp, Homo sapiens
acagtttacggtttgtctgaatatggatttctaaattaaagatagttttccctaaaacatttagaggcttccattgcctttaggcagaatggggttgagaaagaagctcttctgattcttgattctgtgtatgaaagagtaccagagtggttttttggtttgttttttgttttgttttgtcatgtctggac

SEQ ID NO: 169612 - DNA, 380 bp, Homo sapiens
ctagttgtcaattaccttgcctatctcagtataactaaggacaatcctacagaaagcagcccaattccttacctttatgaacaaaggtcttcatactctttccaaccttatccccctcttttatctcttatagtctagatacactgaacctcttagagctctcagaatgtatcaggctcttccccaaactttaccttctttctaattaaagaaaaaaagagagtgattctatcatttcctactgactattccctccaccttcagtgcctttccctgccccttctccaggctaaagccagcataattgtcacctcccaactagcgaatgttaagcattctccaattccccagtcagcattacttgccttgtcctctatgtt

SEQ ID NO: 169613 - DNA, 433 bp, Homo sapiens
gccaggaagcgcctctcccactgagaaagactaaaatattgagtaaatcaacatactttgaacaggtcttttgagagaaaacactgagagttggcagagaggtgacgcagacaacaggtctgaagagggaggaagctggaacccttgcctggccttactgagcaccttgacgagttcctggccctaaacagctcctaaggaaggtgtgagtgaaggaactgtggcacagcccgctctcaacacgaacctctcggatcttggctacaagacaccccacaacccccatagacgttggaattggcaggcaatctacctggagagtaggcagagacagagattgagcctgcgcagaggttgaggggttttgcgtgcagggcatctgtggcaaaacatagcaatggggacccattccccaaggctctccatcttcttc

SEQ ID NO: 169614 - DNA, 453 bp, Homo sapiens
tggcaaatgcatccagttctgtagcaccagcacaacatgatatagaacagttccttcacaccccaaatttcaccctgtgaggtcagttcctctctcgatttcagaccctgacaaccaccgggactgttttctgtccctagagccttgccgtttccagagtgtcaaaaacagactcatacagtgtgtagcctactcagtctggcttccttccctaagcttcctgcatgtgagcttcctccatgttgcaggtgtcagcagttctttccttttcatcgctgagtagtatcctattgcgtggacgtaccacagtttatcattcaccagctgagggacatttgggtgattcccaggttttggtgatcattggagaattttaaacaggagaaaattttaaacagttttaaccacattttaaacatggttttagaaaaaatcactcactgtactgaatgg

SEQ ID NO: 169615 - DNA, 452 bp, Homo sapiens
gaaacatgtttgtctagaattcacgagaaagtcacatgaactcatgggagggggaagcacagaggcaccaacaaggtcaaggtcaaggtcatacctgctcagccagctttcccagcctgttgggctgacagaggccaaggaggcagcagagtgagacagggaggagacagccacaggaaacacacacagaagcagcagccacatgagaaacacagggaaagagagagcaaaacccacctctgtatcttaaagagcaaacgtgaacatcccattaacatcatttctgcaatcatgtgtggcatccatacccttccgacgtctagcaaggaggccccaggcttgcagacgcagagccgctaacacaaaggccggcacccacgctcagccacagcctacacaggaagcgagctcacaaaaggctcccgcccgatctcctctgctgcgtgacaagg

SEQ ID NO: 169616 - DNA, 369 bp, Homo sapiens
tcctaccccctcatgttgaaatccactgaaatcaaaggttcaactgttgatgtttaattcacactctctttacaccattaaaataaacccaggtgtgctcttcagtgaaatcattgccagcaagtgtaaaactcaattatccccattgctggcttttttttaaagttctaccgcaagactaaacttgaggggagagatgtgccttctttcatcctagtgtctcagcctgtaacatattacaaggtgcccatgttcttcaaagataacctttcgtacttgtttcataatccaaaaggtaattattatggcaaaatatgggcacgttcagcaatgtcgacgcggccgcgaatttagtagtagtagtcgacc

SEQ ID NO: 169617 - DNA, 271 bp, Homo sapiens
ggggagcggcagatgcgcccagcagcggctgcgccgggaccccacgttttccgctcaagatgaagacgctaaaattcagagctcaacacatggcatagtcaagacttgaactcaagtcatcaaactccaaagtctatgctcaaccacagtgccctcctgccttctctgctataatacagtccactggaccttcacatgtcaaaatgcagattccccaaatccatctgctcttgcagatggccaaaaatgtccatatattgtcttggtttca

SEQ ID NO: 169618 - DNA, 352 bp, Homo sapiens
ccctggttatagatctagtggccaggaagggaaatgggagcaaatcaggaggcaaatcatgtgcctacaggaaaagccctctccattgtcttcaagcaagaaggatgtgctaactcttggagagggatggtcacttctgcagaccaggagaattcaaagaagcctaggggttcaaaatcttaaatgacattcacccaaatctccccagctcaagggacagtgtcctgtttttcctaatcttggccctaaccttagcataacagaattgctttaattctgcatttcctttcttgccattattattactaattaagaaaaaagccctctctgtctgtatgtgtacaagtgtaca

SEQ ID NO: 169619 - DNA, 458 bp, Homo sapiens
tatttctccacaaatgtgacatgtcagctcacatttgtaaacatgggtctcgtttttaaaattccgagggcataagcagatggtatagttgcagcctagactatatgatcccgtaatcttttggagatgataaaagagtggcttccttagaggttttagctctgcagagcaggagccgagagcagctcagaagagcacaggaaagcaggtttgacccctgcggcgatttacttccctttcctctttccttttctagtccggcaaagtctaaggccttagaattctagccaaacctactggctgaggcagaagaatgaacaagaagcgtcagccaggccgctggcccaggcaccaactcacagttgcccaataggattgagctctggggccgtttacaagtccacgtcattcctgtataaaccttagaagtttactgaataaaccttagaataaggata

SEQ ID NO: 169620 - DNA, 251 bp, Homo sapiens
gtgatgtgccgatcttgacattgatggctgctgactgcttagggtggtggttgctgaaggttgggtgacagtggtaatttcagtgatttttgttttgttttgtttctttaagagacagggtctcattctgtcactcagggtggagtgcagtggtacgatcatagttcactgcagccttgacttcccgggctcaagcaatccttctgcctcagtctttccagtagctaggaatatcaagaatcggcacacca

SEQ ID NO: 169621 - DNA, 426 bp, Homo sapiens
gaccctcacagtgagtgttacagttcttaaaggcagcgtgtccggagtttgttccttctaatgttcagatgtgttcggagtttcttccttctggtgggatagtggtctcgctggctcaggagtgaagatgcagccttcatggaaaatggctttgtaaagaagtttgaacctaaatctggctggatgacttttctagaagttacaggaaagatctgtgaaatgctatctctcctgaagcaatactgttgaccagaaaggacactccatattgtgaaaccggcctaatttttctgactgatatggaaacgattgccaacacatacttctacttttaaataaacaactttgatgatgtaacttgaccttccagagttatggaaattttgtccccatgtaatgaataaattgtatgtatttttctctata

SEQ ID NO: 169622 - DNA, 332 bp, Homo sapiens
ttcaggtttgtttatattatttctcttcaaaaataacaacacactcagaaaatggctttgtaaagaagtttgaacctaaatctggctggatgacttttctagaagttacaggaaagatctgtgaaatgctatctctcctgaagcaatactgttgaccagaaaggacactccatattgtgaaaccggcctaatttttctgactgatatggaaacgattgccaacacatacttctacttttaaataaacaactttgatgatgtaacttgaccttccagagttatggaaattttgtccccatgtaatgaataaattgtatgtatttttctctata

SEQ ID NO: 169623 - DNA, 1093 bp, Homo sapiens
  misc_feature (773)..(773): n is a, c, g, or t
ccagcaatctacaaggattctaatttctccacatcctgcatttaagacttgcaaagctgaattaatcacaggatgaggaagtggcttctctgaaacattttcctctttcacattttaaactttctctttcatacatgacatgaaacacagcctacgcacgaaagtgactagggaggaaggatattataaagtgatgcaaacagaaattccaccagcctccatgtatcatcatgtgtcataactcagtcaagctcagtgagcattctcagcacattgcctcaacagcttcaaggtgagccagctcaagactttgctctccaccaggcagaagatgacagactgtgaatttggatatatttacaggctggctcaggactatctgcagtgcgtcctacagataccacaacctggatcaggtccaagcaaaacgtccagagtgctacaaaatgttgcgttctcagtccaaaaagaagtggaaaagaatctgaagtcatgcttggacaatgttaatgttgtgtccgtagacactgccagaacactattcaaccaagtgatggaaaaggagtttgaagacggcatcattaactggggaagaattgtaaccatatttgcatttgaaggtattctcatcaagaaacttctacgacagcaaattgccccggatgtggatacctataaggagatttcattattttgttgcggagttcataatgaataacacaggagaatggataaggcaaaacggaggctgggggaaatggcacaatcacacncctatgctggtagagtcagtggcccacaagaagaggaaaatggctttgtaaagaagtttgaacctaaatctggctggatgacttttctagaagttacaggaaagatctgtgaaatgctatctctcctgaagcaatactgttgaccagaaaggacactccatattgtgaaaccggcctaatttttctgactgatatggaaacgattgccaacacatacttctacttttaaataaacaactttgatgatgtaacttgaccttccagagttatggaaattttgtccccatgtaatgaataaattgtatgtatttttctctata

SEQ ID NO: 169624 - DNA, 334 bp, Homo sapiens
taatctactcccacccatgtcatcaataaacaaacaacccccctttgaggaaaatggctttgtaaagaagtttgaacctaaatctggctggatgacttttctagaagttacaggaaagatctgtgaaatgctatctctcctgaagcaatactgttgaccagaaaggacactccatattgtgaaaccggcctaatttttctgactgatatggaaacgattgccaacacatacttctacttttaaataaacaactttgatgatgtaacttgaccttccagagttatggaaattttgtccccatgtaatgaataaattgtatgtatttttctctata

SEQ ID NO: 169625 - DNA, 1037 bp, Homo sapiens
ccagcaatctacaaggattctaatttctccacatcctgcatttaagacttgcaaagctgaattaatcacaggatgaggaagtggcttctctgaaacattttcctctttcacattttaaactttctctttcatacatgacatgaaacacagcctacgcacgaaagtgactagggaggaaggatattataaagtgatgcaaacagaaattccaccagcctccatgtatcatcatgtgtcataactcagtcaagctcagtgagcattctcagcacattgcctcaacagcttcaaggtgagccagctcaagactttgctctccaccaggcagaagatgacagactgtgaatttggatatatttacaggctggctcaggactatctgcagtgcgtcctacagataccacaacctggatcaggtccaagcaaaacgtccagagtgctacaaaatgttgcgttctcagtccaaaaagaagtggaaaagaatctgaagtcatgcttggacaatgttaatgttgtgtccgtagacactgccagaacactattcaaccaagtgatggaaaaggagtttgaagacggcatcattaactggggaagaattgtaaccatatttgcatttgaaggtattctcatcaagaaacttctacgacagcaaattgccccggatgtggatacctataaggagatttcattattttgttgcggagttcataatgaataacacaggagaatggataaggcaaaacggaggctgggaaaatggctttgtaaagaagtttgaacctaaatctggctggatgacttttctagaagttacaggaaagatctgtgaaatgctatctctcctgaagcaatactgttgaccagaaaggacactccatattgtgaaaccggcctaatttttctgactgatatggaaacgattgccaacacatacttctacttttaaataaacaactttgatgatgtaacttgaccttccagagttatggaaattttgtccccatgtaatgaataaattgtatgtatttttctctata

SEQ ID NO: 169626 - DNA, 377 bp, Homo sapiens
gatcaggtccaagcaaaacgtccagagtgctacaaaatgttgcgttctcagtccaaaaagaagtggaaaagaatctgaagtcatgcttggacaatgttaatgttgtgtccgtagacactgccagaacactattcaaccaagtgatggaaaaggagtttgaagacggcatcattaactggggaagaattgtaaccatatttgcatttgaaggtattctcatcaagaaacttctacgacagcaaattgccccggatgtggatacctataaggagatttcattattttgttgcggagttcataatgaataacacaggagaatggataaggcaaaacggaggctgggtatgtgtgatggaaaaattcttcattgttctttc

SEQ ID NO: 169627 - DNA, 482 bp, Homo sapiens
tgctgagattacaggtgtgagccaccatgcccagcaatttttgtatttttagtagagacggggtttcaccatgttggctagcctggtctcgaactgacctcaagtgatccacctgccgcggtcccccagagtactgggattacaggcgtgaggcaccaggcccagcctcccgaatatttccaatctacagttggttgaatccacagatgcagaagctagccacatggagggccaactgtgtatgtttatcttattctttttttcccatctggcttatcgaaagctttgagctggccggcaatagatttaatttcttttactcccagttggaggaaagagcacctataaactgtttactgtctttgacccaccaaaaactcattttgggaaagtcttggccctttctcttgcagcctacagaagagagggaaaaaagccaaaggtgtcacttgggccatgcttttcttcctcattgtagccag

SEQ ID NO: 169628 - DNA, 176 bp, Homo sapiens
gtatctttagacataaactagaagtatatagtttcatgctcccatagattagtgagccgataatgaaatagaactaacatttataactatgtagtttacagagtactttcttatatacttatctcatttgggtagggcagatatttttatcctcattttcaaataaggaaactggc

SEQ ID NO: 169629 - DNA, 461 bp, Homo sapiens
cacccactcctcttcccacacccctaccgagtcccacatgcctcttctgtggctggaaggcttcctggaggaggaggcagggtttggataaggtctgtgctgttgtgttcagaagggaagggaggagagggactggggctggggagggaatttcagggcagtttcctgggtcaagggaagccagccaggatgaggggggtgattcgtatatagatgtcacctggaccccccgcccaggggctgcaggagaaatcaggtcaggctggggtgagttccgtcctcgacaggcctatgccacctcaggtactcttagcttctgaccgccccccttgtctccctctggactgctctgtgcacctgtgccctcgctccttggaccggctagtggggagagaaggaggcccaggggaaagagaaggagagcaacggcttcagccagatgctctcagttacgaggccgg

SEQ ID NO: 169630 - DNA, 299 bp, Homo sapiens
ctaggaagactaagcaaatatagagaaaactcaagcttgcaaacatgagccccgtccctgacacttgaaggtcctcaacaggccaggagaggtctctgggcttcacagggcagttttcaccctgagaatataaggaaggcaggaaacgagaagggccaggtaccacagggagctcagcctcgtaggaccgggaaaggagggtccgggtcggacagggagctcggcctcgtcagccccgggaaaggagggtctagggtcggccctgccagttgctatgctctgtgatacaccagaaggaa

SEQ ID NO: 169631 - DNA, 551 bp, Homo sapiens
ttatttacaggtatagtcatcttggtgtctctgagatttaacttgtcttagcatgattaaacatgtgaggaacctccattactaacatttaaagttgtgagtatagcaaatggtattttcctttctgttctttgtagcctgaaatatgctaagcaccatagttaactgacaccctgataaaattgacacgctcctacctacttagagtgaggaaaatgcatttaaatactctctttaaaattgtgaaaataaacatgcttcaaaaaaatagctgtcaagtataataatcaggcagagcactgggctgcttgtccatttaaaacttcactacagcagcagcatatctaccttctagcacaataagtatacagcttaggtcaatctgaagcattcctagaagtctgtaatacttcagagtgttttccacagttcatgccagaacatgagtttttctaagtaactctacaataatactgtgtatgggtgtatatggaaagaaatggaggaagaaatatttgaaaatgagtataaatgttttctatctgccaaga

SEQ ID NO: 169632 - DNA, 190 bp, Homo sapiens
tgggatggggactgggaaacggaactagagaggagatgcaagatataagaggagatgtgagaagtaagagtccaaccctgctggcccatccccaaggctccgtctgggtgctgtttgcgtgccgtgaaatgttagggtttgtgcagtgaaaacagttcgtgcattcattccatctagggaagtccagttt

SEQ ID NO: 169633 - DNA, 465 bp, Homo sapiens
cttgcactgagccaagatcacccccactgcacactagcctcagtgacacagagagactccatctggaaaaggaaaaaaaaaaaaattaactgtatggtagagaggcctgacaaacactccctccaccaagtaagatcaaggtcatcatggacagtgctgtcacactgatactgtgtgcccttgatctgacaggatgaaagtgacactttacctctgtcttcctccccctaacctcagtctgatcatgagaaaagcagcagaaaagtcccaattgaggaacaaactatcaattcctggccagactcttcaaaaccatcaacgtcatcaaaaactaggaaagtctggccgggcgcggtggctcccgcctgtaatcccagcactttgggaggccgaggcgggcggatcacgaggtcaggagatccagaccatcctggctaacacagtgaaaccccgtctccactaaaa

SEQ ID NO: 169634 - DNA, 382 bp, Homo sapiens
gccttggtgtcttgagcacttcactttgtaactgatggctcattgcaatgtcctgcggtactgactcgggagaagtaccctgtagctgtcttgcaattcccaccccccgccatcatttctttgggaggcatctggagtgactcattgtccttgtcctaaaatatgaccctgcctctgggatcctgaaagcaggcactctgagtgcctgtgtcccctcaccgctgtcacactgtagcacgcgttccgcgccacttgtctcctcagtcccctcctccctcgcagaatttctctcggaaaccttactctctaatcactgatactgttgactggagccccagctccaccgtctccccttctgtgaagtgtcctgagtcaccccttc

SEQ ID NO: 169635 - DNA, 557 bp, Homo sapiens
gggacatttgactagagagctgaatgattgatttttgataaaaggatcggccaaggaaagatctagaataaacatttcctagcacaaggaatagccagtgcaaaggccctagggcaggagtgactggtcatcgccaaagaacagcaagcagaccagtgtggcgggaacagagccggcagggggaaaatgctgccactaacaagaaaaatactggttgattggctgaggcgggtggatcacttgaggtcaggagttcaagaccatcctggcaacatgaaaccccgtctctactaaaaatacaaaaattagacgggcgtgatggcacacagctgtaatctcagctacttgggaggctgaggcaagagaatcactggaacccaggaggaggaagctgcagtgagccgaggtcgcgccactgcactcccgcctggacaacagagtgagacttgtctcaaaaaaaaagaataaaaataagaagcattggggagaagcaattttatctaggagcaagtaggaactctcagataagatagcgtctgccccagtcttcatgcctc

SEQ ID NO: 169636 - DNA, 248 bp, Homo sapiens
caggaggcagtgctgtgctggagataataaacatatctagtgctcgatctatttatatctgcagttcatgaatttatttgtctaccaacacaagtttctttgtttttttttttttttttttttggaagggattctccctttgtcccccaggttgaattgggggggcccaatctgggtcccttgaaaccaccgcccccgggttcaccccaatctcgtgcctcggggggataccccccggggaacccctc

SEQ ID NO: 169637 - DNA, 244 bp, Homo sapiens
ggaaacaagacatttgaagacataactcaaatgacagctttggtcttcaggaaaaaaaaactggcaaaatattacatacctatattttgatatgagtagtaatagaatttgtgcagatattaaaaatactttataacaagacagcatctttaacatcttaaggatagtgccaccttatttcttaaatggaccaaattattgtgtagccattcttcttgatatcagagtataaagtaggaaatag

SEQ ID NO: 169638 - DNA, 521 bp, Homo sapiens
ctgaggcgggagaggctgccctcttggctgtgggaggaaaaatagacatgaactattctattctgttcttccctcccaccattgcctacagtaataagagactaaccatcagctacatgccagtatgttttaaaacaaatgaaataaagttaagagaaaaattccacttaccacaactgactcaagaactaaaaagttgaatagttctataacagttaaagaaattaaagcagttggcaaacttcttgagccagatgatattacaggcaagttctaccaaattccaaagaacagttatccctattttatttatttatttatttatttatttttagagatggaatctcgctatgttgcccaggctggactcgaactcctgggctcaagcagtcctcctgcctcagccttctgtggagctgggacacatgtgcacaccaccacacttggcagattatttaaaacaaatactttcaaactataagaggaataccccccaagtccactctgtgaagccatcgtaa

SEQ ID NO: 169639 - DNA, 208 bp, Homo sapiens
caccaaaaaactattagaactaatcaacaaattcaataaagttgcaggatacaaaatcaacatacaaaggtcattaacatttctttataccaacagcaaacaatctgaaaaagaaatcaagaaagtaatcccattgaaaatagctacaaataaagtgcctaggaataaacctcaccagagaagtgaaagagctttactatgaaaacca

SEQ ID NO: 169640 - DNA, 460 bp, Homo sapiens
ggaactagcccggttgatgagcatgttgatattaacggcctggcttggccaaagcttccggcccagcacgctttagcatcagctggttattctgagaacattcttttcaaaacactctacaggacaaacaggccgagaggttcctttgtccacagctggcctctgaaactgagcagactctcaaagggttgagaagaaccccgaggaggctatcgtctgcactcagaggctgaaacgtttgaaaacaggtgcgggagggggcggggaggatggtcagtgacagcacattcttcagcaaacatgtgtcatttgtgcttttaccagagcggagcttttaattcctaaaatataacagcctggtgcaggggctggaagaagagggcgcgttttatgtgcaactctgctaagggcttggttgctgaatgaaaggtttggttccatggaggttcaggtaccttcg

SEQ ID NO: 169641 - DNA, 266 bp, Homo sapiens
ctgggtctgctgcctgccccaagctccagctcagctgcctcgccttcctggctgcagcttccctggcgcgtgctggggttcctgagccccccagacctccctgccttcttgtgacacggtagggccaactgtgggaggcaccgacacaaacctgggctacacagcagatgagggaggctgttcacatcacaaaagagtttaccgcaacaattctttggaaagtgactctctagggtgcggagaatggtgtgatttacaaaatgaga

SEQ ID NO: 169642 - DNA, 938 bp, Homo sapiens
caatatcactccacaagctctgtgaactaatagatttaagaagtgatcatcaattatttctttatcacaactgagaaaccatcaggaattatctgtctcctgctggaagaatacacttccacctaatgaagtatttttgttgaaaaataattgcctttagatttaaacacaggaggcggaacacactaacaaaaggtaagaaatcaacatccagatggagggaaactataggacaaatgacctagttttttctacaaataagaaacttcatcgaaattgcaagaattaagaaaaagagagacagagatggaagaatgcatggcttaaaaaatttgagacaaatccaacaaattacaatgagtaaattgctaacaatatcagcagaatgtagtatactggttctctcatccaactgttagaccataattaaaaggtgttgacatttttaatgaataaattttggctgtaactgatctatatgcttatgattttacagaaaagcagtaggaaaagtagcaccatataattaattattgaaatcatagactctggagccaaactgcacaaattagaatcccagctttgccacttacttgccatatgaccttgagcaatttacttaatctttatttttaaaaatgggggtgataatggcatccattttaaaaggttgacttgatgataaagtgtgggtacacacttccttttccaaaatccttgggtccctgtgtgtgcctgaactttaaaaaatagaatagatatgcccatcgtttaacttaatacccgccccccattgagtcctgggtgagtaccccataatctcacacagtatttctgcagcaaaatgtatgagtattcacaccaaatgagttaaagactatacatagccctatgtcagtgcagtgcaggctttaccaccgaagtagatttaacagcaa

SEQ ID NO: 169643 - DNA, 923 bp, Homo sapiens
ctcaagcgatcggcccacctcagcctcccaaagtgctgggatgacaggtgtgagccaccacccctggccctgttcactgctttatatttggctccagtacctcatatattataggcaatcacatgtttccggaataaatgaatggattctcccaacccttacctgtctacttcaggtcatctagagtggctgacaggcatggattggagactctaacggtacttgttttcatttttctgcccagcagactagaggacaaagcagcctggagggcagaggcaacctaaacatgcaaggagttcaacagttgtacccccatttacctggccacggtaggcccaggaatgggaggagcctactagtgaggccccgaagtgtctcactttccttatctcttccgttgacttgcactggctctcctcatttatccagccaccttctctgagctgataatccaaagcccatcagtaactagtccactcctgtctcctcttctccaccatgaatcaccaatgaagtcatggtgtcccaaataggtcacattccagcccacctctttgtcgaggccctttgaagatgtttttttctgagttgagcagaggctgtgaaatatgtgactttcggagctgtcctgcagagcttctccttaggggcatggtcgaggacagcaaatgcagagagaagcagtggcccaggcagagctcaataaagaaacaaaagtatattctcctcttctgcctttgcttctccttcgtccccttaaattctttttcttctggatttgaggtagaaagcacattctcctttgctcatatttaacttttctcacttagaaaaaaagtgaagctcgctgccagcactcatttaatttcatataaacatgctctctgagggtgaagcaaatgtgactgattttcaatgtg

SEQ ID NO: 169644 - DNA, 458 bp, Homo sapiens
ggttcatgccgggtgatcaggagaccatgatttgggcagctcactccccagctggcagccgggctaaatctcatcagtgcccatttagatctggtgctccgcccttgccccgaagggacaggctgcctgcagagagagccgggacctccacattttctgctgaggctccttttcccagcattggctcctctgcagctgctgggccacagccagaggctgtcagagatccaagggagtcattgccagtgtccttgtctaaggaggatgggccatggagaagccctccctgcccgctctccacccagatctgttgacagccacccctcacatgcccagggcctggagggtcccagcaaggctgagactatgagcagctgtcctactcacatacccatcccagcatccaggtcagcccctttgtcctggggtcctcaaggtcactggcgcccttccagcct

SEQ ID NO: 169645 - DNA, 433 bp, Homo sapiens
tacaatgacaggcttcatttgctgactctgtaagaaagttgatttctccaaggcaccccacacagtgaagtgcaattcacttttaccccaagtgaagtctttagtctaccctttaagcctttagtttcgtccaaagagagacaagcaactttctcaaggacatgaagatactaccctaaaaagcaacttttactgaaaagtcttatcaattcaatggaccaaaatatccaatagcattatatttactttacccaagccagataatagatgaatcatttacttattcatttattcagtcaataaaattgttttgagcccctactatgtgttaaggattagatcctggtggcacattgataagcaaaaccagacatgatccctgccttcatagagcttaattctcatggaagatacagacagtaatcaagtgatt

SEQ ID NO: 169646 - DNA, 484 bp, Homo sapiens
taaagaagaagccaagtgaaaaaggcatcaccagaagtaacttgaagttgttctgggcttttggcttggtgccagtctagctgaaaatcaggtagctgaggtgtggtgggaagctggagtcagagggaccaaagtggaaatgaatgcccttggacagaatgccacaataggccaagcacatggtaagcacttgatcgatgccagctaccatttttgcttatttgcttttattattaatgtttaaatttatagacagtgaaatggacttccatgtagtgtacagttctatgagttttaagacatgtagatttgtgtaaccacctccacaattaggttatggaagacttccatcccccagactctggcctcaagctgcctttcatagccaaactcttctccacccccaacccctgacaactgctggtctgttttccatccctatggttttgctttataaactcacgcagtaggtaaccttttgcaa

SEQ ID NO: 169647 - DNA, 341 bp, Homo sapiens
ataaggaataatgattaactatttagatattccaaatattgccttagcaagaatcaccacatgttgtcttaagtataaatctgtgtcttttcataaaactgacttgataaatattgacttacaggaaggtctccattaagaagccatgtatgatttatataaatcagtgaaattgaagtgccctttgtagcactaacaattagaaatagccagtagttatttctattatgtaactagtagtagtgaagaaaatgtcaatacagggaaactattctgataactataattatagataggtcagggttagtttgtgttgatgttttcttatgtttttctgatca

SEQ ID NO: 169648 - DNA, 356 bp, Homo sapiens
ggctgtgtctactccctggcatccaacccctgcctccagcctctgagccctcattgaccagaactgggttacatggttgtcaccagctgcaagggatgctgggaagctgagggagaggagggccatggttggcttagatgaatgaggatgcagggccaccccgaagaaaattggggttctatcagcaaggagccaggtggaatggatatcggagaggtaaatagcatctgccagtaaagaaggctgtaagacactgtatggggtgatcccatttgtgaagaaggatgtgtgatgcgcacaagtgtttaggaaaaacactagaagaattagcgatggtctctctgggaatggggatt

SEQ ID NO: 169649 - DNA, 476 bp, Homo sapiens
gcttaaagagggtaaaggagtcagctttagaaaagggaagagcatcctgggcagagcaaatagctagtttaaaggtgtaagcaagaggacttttatctctcctactttccaagctgatcttaaattcaattattataatccggtgtgtgattttatagacagttccacattttggggtcagaaaatatggtcaccgtagatctggggctaattacacacggtgaaacatcttctccctaaaaaaaccacatttatccacttgaaaaagcaggtcaaaatattctcaggggccgggcgcggtggctcacgcctgtaatcccagcactttgggaggccgaggcgtgcggatcacgaggtcaggagatcgagaccacggtgaaaccccgtctctactaaaaatacaaaaaattagctgggcgtagtggcgggcgcctgtagtcccagctactcgggaggctgaggcaggagaatggcgt

SEQ ID NO: 169650 - DNA, 366 bp, Homo sapiens
aggatttagtaaagcattgtggcacatactcaatgtgcaccaaaattagtcttacctgttaaaaaagccaaaatccctcactaactgtacgtggattctgagaaggcaatagaagagcatattcacaatgtgaagtaagacacatcagagttaggtttgttgcagattttacaaatttcaaggacgctaaccaatcagccactgtaatttttcaatcaattttagcagaggggatctactcccatctcctagatagagccacgcaggtgtcacagactagctcacacggcacagagacccccccaaaatctgcagacaggaaccactccttaattaagatctgaagtgactacttacacattagga

SEQ ID NO: 169651 - DNA, 135 bp, Homo sapiens
gtcagtttacttgattctccaccccacagttattgaacaggaaagtgtgaaggtaacgcgtcccataaccagccttcagaagaattacagctgctgtatctctgaactttcaagaagtttgtgcatcaattttca

SEQ ID NO: 169652 - DNA, 629 bp, Homo sapiens
tgagagagtttcactcctgttgcccaggctggagtgcaatggcacgatctcactgcaacctccgcctcccgggttcaagcgattctcctgtctcagcctcccaagtagctgggattacaggtatgtgccaccatgtccagctaatttttgtatgtttagtagagacagggtttcttcatgtttgtcaggctggtctcaaactcctgacctcaggtgatccgcccaccttggcctcccaaagtgctgggattacatgggtaagccactgcacccagccaggttgagtatcctttatccaaaatgcttgggaccagaagcattttgaattttatatttttttggattttgggatatttccattatacttaggttcagcatccctaattggaaaatccaaaatccaaaatgctccagtgagcatttcctttgagcatcaagttagtactcaaaaagttttagattttggagcatttcagattttgaatttttgggttagggatactcaacctgtactagcatatcctctcagttaaaatataataattcctctgttctctttgaaacaaggtagttgggtcatgactacatttttttgatatgataaataatgcttaatatggtttggctgt

SEQ ID NO: 169653 - DNA, 185 bp, Homo sapiens
tctagagttggcagtgcgacagtctcatccatactctgctatgtgcagatgttccgcaatttacaatgaaattacatcctaataaatccattgtaatttgaaaataccaagcaccataacttagcctgccttaaacatgctcagaacacttagattagcctacagttgggcgaaatcatctaaca

SEQ ID NO: 169654 - DNA, 319 bp, Homo sapiens
gtcaggagtttgagaccagcctggccaacatggcaaaaccctgcctctgttaaaatacaaaaattagccagacacagtggtgtgtgcctgtgtgtgccccagctacttgggaggatgaggcaggagagtcgcccgaacttctgaactgcaaaggcagtttcagaagttatcctaacccatttctgtgctgaagctcagaaaaaaggaggaccactcctgccactcagtgaatgtattaaagaaaaaaatgcttcatgacactcgttgaagatagttaggcaaactttattaaaggagggactaggaagatagctataga

SEQ ID NO: 169655 - DNA, 391 bp, Homo sapiens
tgcctcagcctcccaagtagctgggattacaggcattagccaccatgtctggctaatttttgtatttttagtagcgatagggtttcaccatgtttgtcaggctggtctcaaactcctgacctcaagttatctgccagtcttggcctcccgaagtgctgggattataggcatgagcctggcctaatttgtgttttattattatggtttttttcatggcatatacattgtattaagctccagcttttgggggcagtgtcccaaagttgctagatcttcctgtttttcaggaacggctagaacctatattcttaagtgaaatatcgtgggttttcagaagttggtgcctactttggcccataatttggggaaggccaggcagaataaatgtgtg

SEQ ID NO: 169656 - DNA, 415 bp, Homo sapiens
aaaataatggatggagtgaaagtttgcatactgaatagttagattgctgtccctcttctaactcaaggcctaatcctcttggcttcctgaaagctggcagccaagcttatgcttattcctgggaggagattggaagattcttctaaagaaaatgaccagcccaagaaaaattacctactatttggatgttcctgaaacaaaaatcaagatccttgccaatcactacatgtgcattttctgtatttaaaagccctgatgctcatatacagctttcagtcagctttttaatgttaaatatggaagccacatgaccagacatttgaggaaagcccctacataaaggcagaagccaaagtagaaaaaggagaataaaaaggaactggaagaaaaaaaacagataatgtaccatattaaa

SEQ ID NO: 169657 - DNA, 355 bp, Homo sapiens
caaactccccatctacactgcaatgtttcaaggccactttttcatcacctcgtaatgggactagagtaataaccatctaagcgagctctcaatatttatttttgcctttattccaatctaaataagtcatttcaaaacacaaatgtcatcaagtcaactacttgtttaaaacattcaatgatttcttattgatcttggaaaccaatgcaatgttcatattgagacacgatctggctgtgcctgcctttattacctgtctccctctactgcccctgctcctttttatccatctccagccacattagtttttgttcattttctcacacatgctttattagtttgtcagggaagccat

SEQ ID NO: 169658 - DNA, 323 bp, Homo sapiens
taacattttgtcttatgtatttcagagttctctaaagaaacagaggtggaatacaacccccagtcccattttcctccttcctcttcacagaggtaacccctatcctgaatctatttttattattccaattagaaattttaactttattgcatgtgcatatatccacatcaatctacatatttaaaaactttattcaaatagtattactctgtagttatcattctgcaagtatttctaaagctgcatgtatctatgttatgtgtagtctactgtgcttattttaactgctgtatgtggtttcactgtgtgagagacggaaggat

SEQ ID NO: 169659 - DNA, 314 bp, Homo sapiens
taacattttgtcttatgtatttcagagttctctaaagaaacagaggtggaatacaacccccagtcccattttcctccttcctcttcacagagacctgtggattgtaataacactggaaaatctacttcacaagagggaaagaagactgatatatcaaatgattctacagctactcccctaaattactgtatgatgctattacaaagatactctacactgtatttaaaatgactttactaattatgtcagtgggtatccctccagtaactgtgtacatatcttcctgcaattaaaaagattttaaacaatatcta

SEQ ID NO: 169660 - DNA, 433 bp, Homo sapiens
gcgtaatccgtaccattcattaacaatgaaagaaaaacaagtaaaggactcaagaactttccattaatttcttacaagctacatttctgccaattttattgagagatatcacggaacggtaaagatgacaaattttgctgtacaatgctctattccaacctcttcaattttcccatgactgttttacatttcccatatctttttctctcattttacatcacaaatttatacagaggatctatgggctagtatataccatgcctagcatgtgaacagcattattgttaagaaggaaattagagagtcaccacaccttccattaggaatctaacagttatgcttcttttcctttacagagtttccttttaccatattaagtcctccagtcttcctttcatgttactttaagacactgatcaaaatcttttgttcc

SEQ ID NO: 169661 - DNA, 471 bp, Homo sapiens
ctttataataatgtcaaataagcatacctgatatcagacaccctacaattgtgtactttctttttcctgggatatgtttagctcctttacaagaagatgaaagtgaaccaacttttataggaaaaaaatctgaaaacctaacaacctgccccttcaaagaaataatcaaagtaacatttttggttcaatatattttcccaaagaaatctgacaatatgatgcttacacagttttcttggcatttttttcaatgttcattatttgaatgatgctgttaagaagccaaccaaggaaacacacacaatttataaaacttgcataaaggaaatgtgtgctaatgtgacttgagaactccaggaagatctgcttcctcttagaaaactgtactgtgttctctttcattcatgtgttcaattattgaactaacatttgggaaaataggttagtctggctggagatgatgttttgtgg

SEQ ID NO: 169662 - DNA, 237 bp, Homo sapiens
gctctgtggcttccagcctggctttggtttttcatcacaagacattttattttatttaatttcattttatttttaattttttgacacagagtctcgctctgtcacccaggctggagtaaaatggtgtgatcccggctcactgcaacctccacctcccaggttcaagcaattctccctgccttagcctcccaaatagctgggattacaggcgcctgccaccactcctggctaattttt

SEQ ID NO: 169663 - DNA, 361 bp, Homo sapiens
catgccactgcacaccagcctgggtgacagagactctgtctcccctccccctgccaaaaaaaatcaatgatacagttagttctaagagaaggtataatgatataatattttttcttttcgcttaccttcattgtctaaatcgtctataataaacatacagattttttgccccttttcttgagactccgtttcaaaaggtggtatttgtaaatgtggtattttataaaatcaggtcatataaatttcctttaacctccctaccctatgcaattcaaaatattgcctttatctcgtctcctcagaattacagcgttcccattttcaaattttaaatagatgcagcattcctatcaaatgatta

SEQ ID NO: 169664 - DNA, 373 bp, Homo sapiens
gttgcttgttcactctgatggtagtttcttttgccatgcagaagctctttagtttaattagatcccatttgtctattttggtgtcttcttaaacttgaacacaaaaatctctttccgttcatgtattatagtacttccttgattttattacagttctgtagttttcctcaaataaatattgcacatattttgttagatttatgctcaaatttttaatttttttggggggtgctattgtaaatagcattttgattttatttggaaattccacttattcactgctggtgtatagggaagtggttgactttgtatatgtgccttgtatcctgctaccttcctataattgcttattagttccagaatggtttctttt

SEQ ID NO: 169665 - DNA, 433 bp, Homo sapiens
tggccctgggctctctcacttcctcagcaaccacctctttggaactttaatttccacacctttttttaaaacctgcacctcaagctttctccatcatcccagcctctctgcctgattccatcccatgtaaagtaacctcatctgagaacctgcaatcaccttttaccaaacacatgataagccttagcaacctagggactatgataactctggccttggcctaaggttacataagaacatgatagtttgctgaccttgtggagggaaatctaaatgaaatcaatataacaaacaaagctagccaagatcaggtatttccattctgagtataaaagcaactgatcttaagcaacgggcagagatgttaataccggagatatatttgtacaatcaaactcttgtgtgctggtgaaagactttacccccaaagtca

SEQ ID NO: 169666 - DNA, 441 bp, Homo sapiens
tgtgaaagtgtggtgtgagcttcattttctttcaaaagtgccgaactgcaatcaagagtaatttacataaaagacagcagttatttttgtaaaattacttcctaagaagagaccctgtagaagaaaccaccaatgttcatagtcccttatctggagtaagattttccagtggattctcaaggacataaggttttccttgtatgcagaagttatggtgagaaatcaagtatgcagaagcatctatcatcacctgcttggtagatctgaagatgacaggtaacttgtcaacatattgtcaacatacactttcctttccttccgctgtagcagcctggcagcttctgtacacactttattgtgcaggtgctttcttttggcagacatgttcagataatagagcaatccaatcaaaacatcagtgagactccctgacagaacatt

SEQ ID NO: 169667 - DNA, 574 bp, Homo sapiens
caagaaatttttatttgctgtatgagatcagatcgctgattcaggtaacatgcgtgtgtgccgtttaaagtaatacacaacgtaacatgaaaagtaatgtttatgaatagtgggaagccgaagaagaagggattttgagtcatgggatgtgattactagctatgacatttggaaactttagtaagctctcccagccatttttctcatctatgaaagggcaatatgaagaccttcttacaacatgtttgaagcgtttcagttgtctgataactggtattacccagcagtactctgatgggtaaggttcacttgtcaagttcaggataatgttggagctgcctagaaagacttggtactaatacttttactttatgtacaaaatgagaatgctatccttcttgatatatgcctatgtattcatatatattttgtctgtatatatgttcaatataaaagtcatttttcctcttgtaggaatttacagtatcaaagatgaggaaaatctatcagccagtgaatgaattcacatttttttacataaaacatagttattttctctctgctgtgcaaggtg

SEQ ID NO: 169668 - DNA, 522 bp, Homo sapiens
aatttacatcctagtatgggcatgctctgctcacaaatgcctctgctgagcagtttacatactgggtgaaaatgtacataggaatcctcatgggggatccaggtttgccagtgagattactatgtactcagactgaaaaagatgatttcttctgattacctgtgtgtctgccagaggtggggaaggactagaaagagattcctgcacaagccgttttgtctacttagagaatggcatgctagaagggttagcgagctaaattacagttttctttttgttgttgttgttggcttttatgtatatgttgaatagactaatagcatttgatgacccttttttttttttttactgtgaattcccggattttgtgtgtatgttgctcagagggtagtgcagtgagcaaagggatagggagattgtctgtttttttgtttgttgattggacacacttgctgctggtaatttgagcatctaaggatcttcctttatattgaagccctgaaccttttggtggaaggaaaa

SEQ ID NO: 169669 - DNA, 224 bp, Homo sapiens
caagacagaagaggaagaaaaagggaaagcagcagggggaaaaaccctctctccttaccttatattaaatggaagtagggtatttccaaatgaaagccttggctacctagtcatcctaaaaacaagtgatttccaaaaagacaacaatgagatttttaattgcttctagatgtacaagaacatagtccaggggagagtcaagacaacagccagctggtcgtggt

SEQ ID NO: 169670 - DNA, 142 bp, Homo sapiens
tattcattggatgtttaccatgtgacaaacaacttactaaatgctttacatgttgttactcataataacagccctattgttgtagatactcttatttttctaatttgacagatgagaaaactgaagcacagagaggttaaat

SEQ ID NO: 169671 - DNA, 543 bp, Homo sapiens
gctttacacaagatggcagctgtatgtccttttatgcttcttcagccttcgtgactatgtagactagtatttctaggtgccatcagtagactaacccagcgaatttgaatcttgtcttgaagtggacaaaagataagcagctcccactcacatggtatttgaatggcttgctctgagcaaaactttccactgcctttgacaggtggcatttatcacctagtttaaaaatagtcagttttcaggcatttgataatttcctttgatgttagattaaccaggaaaattatgtaaaatcactgtttttcttactactgaaaagcatttgttaattagcaggtgacccaagcactgtttaaggaggtatatccagacagtaaactcctggcagttaggagtgacatctgagccagctctgctgcagacctgtgaatagaagctctgcctctgaagccaccagatttgcacctgtgtcactcccagaaaagcacaaggaattgaactgagtcactcctaagaatcccctcccccactccctatggccac

SEQ ID NO: 169672 - DNA, 520 bp, Homo sapiens
cttagaggatcccgagatggagttgttataatttgcctcatagggatagtacaaggaaggggtaggctatgtgtttggtcagtgggttgagaatgagtgtgaatgagggttctatgtggttaatgtggtgggtgagtgagcgagtgagtgactgagtgagtgagggaagcttccctctggcttgctgggactgagttccttcgtaccaggaggtaggtagggctaacacaaataaagaagccaaacggtgttactccttgcctctcagaactggaacagagtcccctatcctccctctcagatgcatttcttaggggaagagccgcaggactttgcggaagccttcagcatttaggggtcttgggtcttcccctgacctcctgctctgtgcatattcattctcctaccacctggtgctcggtgccctcttaacttcatccgggcatcaaaggcctgttgtgccatttacttgctctacagtagctcatccttaacccagctctacctacctacacacaca

SEQ ID NO: 169673 - DNA, 748 bp, Homo sapiens
  misc_feature (736)..(736): n is a, c, g, or t
ggtcggtgaggctgactagaggattccgacgagttgtccgagttacttgggaggctgaagcaggagaatcgcttgaacctgggaggcagaggttgtagtgagccgagattgcaccactgcactccagcctgggcaacagaaagagattccatctcaaaacaaaacaaaacaaaacaaaacaaaaaaacaaaaccacataagtactaaaagaaaatatggatgaattctccattaccttggagtggggaaaaccttttaacagtgactcaaaatctagaagtagtaaggagagagagtgataaatttgattacatagaaataaaaagaaaaacttgtaacaaaaaagcatcataaacaaagtaaaaagataaggaataactacgaggccaggcatgtgtggcccacacttgtaatcccatcattttgggaggccaggtgggaggatcacttgaggccaagagtttgagaccagcctgggcaacacagcaaaactcctctctcccaaaaaaaaaaaaaaaaaaaagaagaagaagaagaaagaaaaaaatttaaaaacagtcagatgtggttgtacacagctgcagtcctacctacttgggaggctgaggtgggaggaatgcctgagcccagaagataaaggctttagggagccataatcaccactgaactccagccagggcaacagagtgaaaccctgtatctaaataaataaacataactcggacaactcgtcggngatcctcggagt

SEQ ID NO: 169674 - DNA, 629 bp, Homo sapiens
ctacactgtgcctcaaagaaccttacaactaaatgcaagtcaggaattgcagtttgttgcctgaaagcatgtgaagaggtaggaggctcattcagccagggtgttccaagagatagcatggagtggtggcccgggcactgtgctgtctgaacagtcacatcttgggagtcactgagaatgaaaggagaatcagctgttgagtatgttagggcatgtataaatgcattctcaattgcttgttcacttgactcggttgtacaagccatgaggggaaatgagatatgcagagatggcatgttgacaaacgcaaaatagtctttgaaatgaatcctgagttccttagtgtggttttcacaatgatacggtgaagcaaaggtacttctttctgtaggagcacacctctgaaattatcataaaagtcagtagaaaaaatgactcaatatacaaatattttctgtatagcttttctggaatgtgtcttatacataaagcttagttctcctgtagcttgaattgcttttcttttttgacagattcccttttaataaaatgaatgttagccagcagcatgattttgtcagaggaacaaaccttttcaattgaattacattaaaattctgttcttagca

SEQ ID NO: 169675 - DNA, 456 bp, Homo sapiens
ttgagggagtccgggtttgggtgcttgatacatagaaatatcatgaatagcagcagagaatacaagaagaagagaaagcttgggggagaagatagagaattatgcgttgggtatgttgaggatgaggtgcctgtgccatatccgggtgtaggtgcccaaaggcaactggaagtcatgagaagtcagggatagaggtaaatgtttgggagttgttaatacaggggtgcatttttaaaatatctgaagtatgttactggtggcactcaaagatttttaatgatgtaaggtattcaacaacatggaactacgtagttttaaaagaaattctcttgtaggccgcgtgtggtggctcacacctgtaatcccagcactttgagaggccaaggtgggtggatcacttgaggtcaggaattccagaccagcctggtgaacatggtgaaaccccatctctactaa

SEQ ID NO: 169676 - DNA, 323 bp, Homo sapiens
aaaaaaaaaaaaagtgcctagggcccatcaaaatcataatgtggccctgtgtggttgagcatcttttgaaaactcagtctggtctactggggtatagtagtggttatgtatctgcatatgacctctttgaggagagtaacctcgttgagaaaaggaacataccttcatactcctccagtatgttttttcagtacaatgaggaagtattcattcaaagaaatgatttttaaaaaattgaataaattaaaatttacaaagccaattttatcactggctttgattaaaatatgtaatggtgtttattgtagcctctacctaattta

SEQ ID NO: 169677 - DNA, 568 bp, Homo sapiens
agatctttcagctcagaggctgatgaatgaagagagaaggctgtgttaataggctaatcttaagatgcaaggcacccaggcagaaaacataaaacattgataaatgtgatactcagttttgtgaagtaaacttcatttaagtccaaagaaacaaggtgtgtcaaagtccaaggactcatccaagccatttatttcatagatgagggactgagggttgatgaggaaagtggcttatccaagtcagtgaccaagctgggtaaagacgagtaccattgactgataacatcttaaaatgttactcttccactggtaaatactcttgcatgactgcccaaaagctttgtgtcacaaagcaaacaacttagaatgttacttctacattggtagatcctccattggtagatactttaaagtcttaagccaggtctgggtccacttgtctcctgactttacaccctttcccatagattaattacccatctgtctactaatggtagttatttgtccagactccactgggctccagactcacagatccacctgtctactggaaatgttagcacattct

SEQ ID NO: 169678 - DNA, 381 bp, Homo sapiens
gacccgggacctgggcgggggcccctcctgtgttatcctccaaggccaggcttgaccagggcccactgccccctgtgaggctggacagatcctccccatgaccctttatcatcctgttcgcacctgctcagccctgaccactctgctgtggggctccgagctcctgggtccaaagccaacccgttttgctgttacccgtgcctggtacagtgcctggtgtcctgggggtacttagaaagcacggtgagggctgggcatggtggctcacacctgtaatcccagcactttgggaggccgaggcaggtggatcacttgaggtcaggagttcaagaccagcctggccaacatggtgaaaccccgtctctactaaaagtacaaaaa

SEQ ID NO: 169679 - DNA, 353 bp, Homo sapiens
tgagacagagtttcgctcttgttgcccaggctggagtggaatggcacaatctcagctcaccacaacctccgcctcccaggttcaagcgattctcctgcctcagcctcccgagtagctgggattacaggcatgtgccaccacacccggctaatttttgtatttttagtagagacggggtttcttcatgttggtcaggctggtcttgaactcccaacctcgggcgatccgcccaacttggcctcccaaagtgctgggattacaggcatgagccactgcaccccgctagccaacagtatttcaaaccacaaaccactcatctccacatattctgtattttagtcatatgaacaggc

SEQ ID NO: 169680 - DNA, 330 bp, Homo sapiens
taagtgcaagggagaacaaagaaagagaggaagttgcttatgaaaggtttaaggaagcaataacatttccaaataaggaagggccataagctatgagctaaggctggactgggcctgtccagacatgcctgagtaagccaaagcaactaactgggctgaagtgtaagaactaatggttgataggaggctttagagtaagaagctattatttctagtgtctattattttatttttaaaccaagatgagctttgaagaggaacttttctactttctacaattagccaaatttttatggtgacaatcaaaataagaattgaaaaatgatattt

SEQ ID NO: 169681 - DNA, 417 bp, Homo sapiens
aaaggctagaagatccataacttctactacctgactttataagcttcaactttgtatcatttttgccttggttaaatgaatgttgctttctttacaaggcattgatgtatttattgatgaactttggaagtaaatgctccttggagggttaacatttcagtttagtaaaagattcaatttagtaaaagattaatacgatgtgaagagaaaccagagtatcaacatttcaatttatttgaaagaattcaccactaaaattcatctagaaaatatagtcttggagatgatacatattttgaaggttcatcaagtccaagactgtttcttgtacacagtcattagagaattgaagcacttgcagaaatttccccctgaccaaatcaaagattgtcatgatcagctctctacacaattaga

SEQ ID NO: 169682 - DNA, 461 bp, Homo sapiens
ctcacactttggaatcagcctggaaaatgtcatcctcagttccttgtctttgctgacttttaggtggtacttgctgttcttcacagcgaccactgacaacccagcatcacaaatatgtgatgtgagcaaaaggaaatgtagagggatctaatgtggagactgtgagcctctggagctggtagtttgtgtgatgcatgatgatatagaatattgctgtggttcctttccatcgaaaatatagctattcctctgccgacatttgcagctgtgagaacagaacggcaggaatgcagtaggtgttcattggaggggtcgagtggaggagctcatctggttgccaggcattgctcagtgtccttggagatgagttgccatggaaacagtgaggggcagagaggaggggccgttcctttctagccaagtgagctgcagagacgaaggaaagtgaggcggacgtccca

SEQ ID NO: 169683 - DNA, 600 bp, Homo sapiens
tataagctccccaactgactgaacggaatccctcttggccaaggggaccccagagagaccttgaaatctaagttcctggccatgatgggatggaagctcagaaatgcctcattgtatcccatccctcactaacaaccattaggctttcttccctaagggctaaacagaaactggccctttcagaagagtatcactgatttccacctactacttcaccaagactagctttccacactctgaaatggatttctgtttgtggtctgttaggccactgtgtggtttcccctatgggattcctttttgtggttggaggtcaaattctttcttgcctgctgcttccaggaatgtgtgctgtgtgtctcagtgtgctgcacaggagggtcttatttcacctcccttgaatggaatggcagttatccagcaggtctgggtgcatgtataaatagagggatgcgtaagcctgcgtttaatatctagcacataaaccggccaccactgcgtgctacacagtcatgttttcattaaaggctgctgacagcaccgcagaccatgctgtggggcccagcaaaccacctaatcccactgcttgatcccaggcat

SEQ ID NO: 169684 - DNA, 184 bp, Homo sapiens
cggggacaggacaagtcctgtgctctgtatcaccgccttctaagggaggtggagtcttcagcaggacatgtacaccactggcagagaagtccctgtggacccaagctgcatgttgccccttgagagcattaggaagacaccgccttccatgtgaagggcagcctggcacagggcctggttgcag

SEQ ID NO: 169685 - DNA, 212 bp, Homo sapiens
atttctcttagcaggcagaaagaactcaaagctcagatggtcagggtcctgttggttcatcaagctcagcctgcctggaggcagccactgtgttgttccctctcttcgtcctccctctgcactctctcttgccacgggacatttgcacaagcagttccctctaactggaacactaagaaatatggaagtaaaaggggttgggagaaaagaca

SEQ ID NO: 169686 - DNA, 217 bp, Homo sapiens
aagaaacataagaaggataaaatcagaatccattgaaaattgttacctgggagtgtatacgtgggagagaaagcagtgagacctctctctctctctctctctctctctctctctctctctctctctctctgtctctgtgtctctctctctctctctctctctctgtctctctgtctctctctctctctctctctctctctctcttgatcgacagggt

SEQ ID NO: 169687 - DNA, 546 bp, Homo sapiens
tatgtctacatataagtgtgcattcatctaaagacataagtgattaacttcttttaatctataactaagatctgagtcctgaagacctttctctggagcctcagtaaatttacttaatctaaatgggtccaggtgctagggtgattacccttatcttgtctcctgctaaatcacagaggtttggggagttccttcagacctccaataaacttgtgtgtggaggcctggggaatttcttcagactgacaataaaacttgtttattccagtctggccaacatggtgaaaccctgtctctactaaaaataccaaaaagttagccgggcgtggtgacgtgcacctgtaatctcagctactagtgagacctggcctgccacaatgtggttaaggaaacatattaaaacatttttaaaaatcaagattttccatttcaatggccttgtaattgattgaaaagtttattttgagtcacatggtgttctagactcttgtggagggtttagattggaaaataagtaatgacagtgaagcagttgttatgttcgta

SEQ ID NO: 169688 - DNA, 424 bp, Homo sapiens
attttaaaaaatttcctagcagatactagttatagattaaattgtgtccctgccaaaatcatatgctgaagtcctaatccccagtatctgaaaatgttgccttatttggagattacttgatagagataatcaagttaaaatgaggtcattagggtgggccttaatgcgatattaccattgtccttgtaaaaaggggaaatttggacccagagatggacatgtacacgagaagataccgtgttaacatgaaggcagaagtcgaggtgatgcacctacaagccaatgaacaccaaaggttggcagcagagcaccagaagctagaggagaggcatggagcagattcttcctcacagacctcaggaggaacccttgatcttgaacttttagcctctagacctgtgaagcaataaatttctgttgatta

SEQ ID NO: 169689 - DNA, 422 bp, Homo sapiens
taactcagagctaacatcaaaatttcttcaacattaataattatttgcaaacaaacacaaaaagttcattttaattccacatttcccttacaaaacatcttttcttgtcatcagaatgtatgcatccatcttggttttcaaaattattaaaatggttaaatcttaaaccaacaagatactttaaagctcactacccatgcagaatccaaggacaagcactgattatggatatcataacagttatctataaggtttcagaatgtcacccactgatttctattattagtaagatttgctttacagaaaagaatagtgtaaatattcttttactcaatctaggccaaaacacctttttttttttttttttggggggggcccccaaaagagcgaccgcgggagggcatgacagcggggacgagggg

SEQ ID NO: 169690 - DNA, 471 bp, Homo sapiens
ccagccagagcaagacagcaagactctgtttctacaaaaatttttaaaaagtagccaggcatggtggtgtgtacctgtagtcccagctacttggggaactaaggcaggagcatagcttgagaccagaagttcgagggtgcagtgagccgtgattgcaccagtgcactccagcctgggtgactcagagtgactctgtctcaaaaagaaaaaaacaagttaatgagagactgaggtggacacggtacaaggcccccccattcccatagactgcctttgcatttatttctgaatgagttttgggaaggggatgacctctttctgctgtatctctaggaaataggtgagggctccagggataagcaaaaggtgtcccagcatcttggcatatatttccagacactctcccttcagttgctcatcagaggggccctctgagagctttccagaaaacttatgagagagtcaagcatt

SEQ ID NO: 169691 - DNA, 652 bp, Homo sapiens
tactggaaatatggagagctaataaatatattatgggatggggtgttacagtaatgagagaaatcctcatcttccacagtagaagtatgatagttaacaacaaactagaaattttaaaaatgaaaaacggcatttaaaatatttagaaggccaggcgtggtggctcacgcctgtaatcccagcactttgggaggccaaggcaggcagatcacgaggtcaggagatcaagacaagcctggccaatatggtgaaaccccgtctctactaaaaaatacaaaaattagccgggcatggtggtgcactcccagctactcgggaggctgaggcaggagaatcgctgaacccaggaggtggaggttgcggtgagtgagccgagatcgcaccactgcactccagcctgggcaacagagcaagactctgtcttaaaaaaatagatagatagatagatagagagagagacagagagacagacagaaaggaagtaagttgggcacagtggctcacactgcaatcccagcactttgggaggtcaaggtgggaggatcacttgaacccaggagttcaagaccagcctgggcaacatgtcaagaccccatctctacaaaaacattttaaaagttggctgggcgtggtggctcacgcctgtaatccc

SEQ ID NO: 169692 - DNA, 632 bp, Homo sapiens
tactggaaatatggagagctaataaatatattatgggatggggtgttacagtaatgagagaaatcctcatcttccacagtagaagtatgatagttaacaacaaactagaaattttaaaaatgaaaaacggcatttaaaatatttagaaggccaggcgtggtggctcacgcctgtaatcccagcactttgggaggccaaggcaggcagatcacgaggtcaggagatcaagacaagcctggccaatatggtgaaaccccgtctctactaaaaaatacaaaaattagccgggcatggtggtgcactcccagctactcgggaggctgaggcaggagaatcgctgaacccaggaggtggaggttgcggtgagtgagccgagatcgcaccactgcactccagcctgggcaacagagcaagactctgtcttaaaaaaatagatagatagatagatagagagagagacagagagacagacagaaaggaagtaagttgggcacagtggctcacactgcaatcccagcactttaaattaagaatatttagaaatgtgggagtaattccagaagagttgaaaaggttcaaagtatgttattactttcataacaactttttaaatagttgattcaattgttaat

SEQ ID NO: 169693 - DNA, 125 bp, Homo sapiens
atgcaaataaagttctttgcacctagtaaatgttcaatatacagttgctattattattttaatagtagtattacctcattattactatctgaatacaattagccttatgttttctcctatatcca

SEQ ID NO: 169694 - DNA, 222 bp, Homo sapiens
cctctagttaagtagtattattcatttaacaacaaaaaaatttatgcctaccttatgtaatgctatgtggaaggttctatagctacagcaatgaaccaaacacacccagaaaggcaagagagtacaatacacaatcgcaaattgtgatatctattctgacgggaaggtattgaatgctacaaaatgatgagtctgacttagtctgcagggatagggaagacg

SEQ ID NO: 169695 - DNA, 650 bp, Homo sapiens
tgttcctacacagacacactcaaccacacgttctcacatatatatgctgtaacaactgagaacaggttactgacttaatctaattcattctatcttcattgtaaaacttccactccagctgaagagcctgtttcatttcaattcaaagatttctcatatatccactaattgtatggcaaaactgactcatctccagactaagatattcaagctcaggaagtcaaataatagaaatgattttttaaatgtgtaagaggttataaagaaaaactttatgtgctccttatttaacctctattaagtaaaatcctttatagacctatctccatttctgcagtaaaagtgagctctacagttagcttgtaaggctaactagtgaaattcctggacttgttcttaaaaatgcaagttttagtaattaacaaaatgatgatgaagatgtcccttttccctacaactacagatggagggagatttttctttgccatacaactagcttaaaggattaatttgataagttgttaaactgagaactttcacaaaagtatccatcttgtttttgatataaatggagatacatgtagttattcataactgtcagtaatttgctgtttatcctgtttctatatatctgtccttgagagtataat

SEQ ID NO: 169696 - DNA, 463 bp, Homo sapiens
gaaattctccttcattggtaaacaggcagtcttggagagacactgatgtgactcacgcttgtgttcatattcaccacaattatggttggcagaacagacagacttattaggcaattagaaggaaataaatccaacttcagattgatctaccaaaatactcagtctctaagacttgtgctagatatagtggaactagtgatgagaaaaagtgtgatttctttattgaagagccatcattgagttatcctaggtctccttggagaaacttgtcaaaatgatccccggttagccttttgaatttccataccaatggagacatattgttgccttctagttccttaaaacaaaaatgtgataggataatttttaaaaaggattccatatggctatgaacttattaaaaatacataaatatctaggttatgaaatactagagtgccttttaaaattgattcagttgatg

SEQ ID NO: 169697 - DNA, 236 bp, Homo sapiens
gcaaaatcgagttcaatttaaatctcttttgagattctccccttcaactgacacagaaacaaacttggcaaatgcttggtagataggcaaacaccgcagtaatttgggatataccttctcacagaaacggctactactttttttttttttctttgagacggagtctcgctctgtcgcccaggctggagtgcagtggcgcgatctcggctcactgcaaactccgcctcccgggttca

SEQ ID NO: 169698 - DNA, 416 bp, Homo sapiens
tgagacggagtcttgctctgttgcccaggctggagtgcagtggcgcgatctcggctcactgcaagctccgcctcccgggttcacgccattctcctgcctcagcctcccgaatagctggtactacaggcgcccgccaccgcacccggctaattttttttgtatttttagtagagacggggtttcaccgtgttagccaggatggtctcgatctcctgacctcgtgatccgcccgcctcggcctcccaaagtgctgggattacaggcttgagccaccgcgcccggctcccatggaattcttttgttcatcttggccaaactcttgtatctgtagccagcagttcaaccatgatcagacaatcattcattcagttgcatctcagtttgcccttttcccaacaaacttactattattatat

SEQ ID NO: 169699 - DNA, 277 bp, Homo sapiens
ggcacgacagaacagtctctggacaagtcagaagtccaggccctcaggcacttttcttcctcccagtgaaaatgttacagagaagcataactataggaaagatttaaggcaggtattcaaaacccaagagtgggcatccctggaaaatgggattcagggtctggggagaagacttagacgtttacttcaattacttctaatttttacggtgagcaggtactgcttcggaagctttcagacactggagcgggttttcatggccctactgacccctgag

SEQ ID NO: 169700 - DNA, 540 bp, Homo sapiens
cactagtgtttgttcttctactgctgggctaagtgtttgaatttcactttcatttaagatttaaggctggacattatactccaaaatcattcctggcctttattgattagcactgatatagtgcatccaaactgaagatatatgacacccaagtcacactgggttttcaggccctgtttttcatctatgaataagcacactgaaagagttttgtttaatattattgaagttgaagcatgtcatgttcatttactgatatgtaattcattatgagcaaatgctgactctaaacgtgaagtcacatgaggtgtactccctgtgattctatgctatttagaaatgatcccttctgtggccgggtgtggtggctcatgcctgtaatcccagcactctgggaggccaaggcgggtggatcgcaagatcaggagatcaagaccatcctggctaacacggtgaaatcccatctctactaaaaaatacaaaaaattagctgggcgtgatggcaggcgcctgtagtcccagctacttgggaggctgagg

SEQ ID NO: 169701 - DNA, 200 bp, Homo sapiens
accacctctagagaaagccaaaggccatctgggaccactctcgaggtactcattcttcccaagaaggagcacatctgactcatggaagaatgtgtggtccccttcccagagactcttttgtttaaaagattttttttcttttcttttctgttttgtaagaggcagggtctcactatgttgccatggctggtcttgaactc

SEQ ID NO: 169702 - DNA, 127 bp, Homo sapiens
tctatcagtttgccagtgagatttatggtttacacttggtctctgtgaaaactctcggggggctttactgttacgtagcaggaatatgattatgtgaccaaaaaaacaaaaatccctagctgagatt

SEQ ID NO: 169703 - DNA, 371 bp, Homo sapiens
ttgaaggcagccgagttcccacatttacagagaaggaagctgaagctcctgggtgaagtaacttgccagggcagcctagccaggactttcgagatggctgggggttgagctcagctttgaaatcctgaagtcaaaccagtttagctagtgtggtgtcgtttgatggatatgtaaactacctggtattgtcactcttctaataacagtatacctcaaaccgagcaaatacaaacaccctttatctcagtgcatatcagtaactagtcccagtgctaggctgggctgtgggagaggcctgtttgtgtatttgtgttctgaggaaaggctgcctataatttggcttggccaacgtttagagttgacttggcacg

SEQ ID NO: 169704 - DNA, 210 bp, Homo sapiens
agtagaggcagtgaggtcagacggacctgggtttgagttcggaatctgcctcctaccagccataactcctgggtatgtttaagtcctgagcctcgttcttgttatttctaaatggtgagagtgatgggagacagaaaggaggaggggaggtgaggaaaactagatggaggctgagctcccagccttgtgtgtgacaggcgctcctgggct

SEQ ID NO: 169705 - DNA, 292 bp, Homo sapiens
ggttgcttactactattaaattcgtggtcgtgtcgacggtagtctaggacttatgagaagtttcatgtttattcagagacttaaactcctttcctctttctgatccaacatcctggagcacaggggtcaactcactatgaaaaatagctacccaatcatgggttctaaatttcaggaaggagaacgggtggagggcaaaatatagttctcactgaaaaatttttcacatactatcatctcattgcccacaaatcagtcgacccggccgcgaatttagtagtagtagtcgacc

SEQ ID NO: 169706 - DNA, 524 bp, Homo sapiens
tttttttttttgagacagagccttgctctgtcgcccaggctggagtgcaggggcatgatctccgctcactgtaacctctgcctctggggttcaagcgattctcctgcctcagcctcccgagtagctgggattgcaggggtgcaccaacacacctggctaaattttttgtatttttagtagagatggggtttcaccatgttggccaggctgatcttaaattcctgacctcatgatccacccgcctcggcctcccaaagtgtagcaattacaggcccagccgactctctgaacttttgtacaggtttttgtccatctgtctgttccatgacacacaggcactagcatatattcagctataatagcttataaatgcaagataatcaaataaatgaataaatgagagaataattatgcctgaacaaatggatggatggacagatggatgaatgaatgaatgaatgaatgaatgaatgaatgaatgaatgaaatctctcccaaagctataaccagcaagtcagacaatc

SEQ ID NO: 169707 - DNA, 243 bp, Homo sapiens
gaaattaatagcaatcatattcatttttcaatgacaaaacaaaatgtaagtatcaaatccttactctgtatatttcaattttcccagtttcattttaagtaacaccctaccaatgtacactaaatccgtcctttccaaaacatgtaagaattttgggaatcattccctccaaattctactttgaatagaaaatcatgcttaagcaatttcccattttttcttgcattaaactataaaactcta

SEQ ID NO: 169708 - DNA, 514 bp, Homo sapiens
agatagatctcagaccgctgtgctagcagtgagtgagtatctgtgggcgtgggaccctccgagccaggtgtgggatataatctcctggtgtgccgtttgctaagaccattggaaaagctcagtatttgggtgggaattacctgattttccaggtgccatctgttaccacttcccttggctaggaaagggaattccctgaccccttgcacttcccgggtgaggcgatgcctcaccctgctttggcttacgctcggtgggctgcacccactgtcctgcccccactgtccgacaagccccgtgagatgaacccggtacctcagttggaaatgcagaaatcacctgtcttctgcgtcactcgcgctgggagctgtagactggagctgttcctatttggctatcttggaaccgcaaacagtatgtttttcttacattttttcctttacctttttgtttgacttacaggggtttaagtattctgtattatcttgtttttattaaacctgttctagaaata

SEQ ID NO: 169709 - DNA, 532 bp, Homo sapiens
ctaatattaatttaatattttatacctataaataactaagctaacattctacttttctttttgtgatttatctttgggtttggtattaggtcctaatagcttggagttacagaatagctcgatgttcccttgaatagttataaatagccttttcaacttcctaaccttctagtatattttaattaaattaaacacatttacaatcaggtccttagaaagagaaagaaggtactttgtttgttttagacttaaagtaaaacaataaagtgaaaccacatagtccacttccctcttctctcagctgtggtctacagataggagactcacaatttttcccagaatggatgtaacaggtgtgatataaatgacctcttttagactctgacttaaaatgtctacactatctttgttgaatggtatgttaaaagaacatatttactatgtgaaggctagacttgtcaatataatgctcactttttgtttccaaggggtaattaacaatgaaaatatttggttaaaaaattaaatcccc

SEQ ID NO: 169710 - DNA, 368 bp, Homo sapiens
tttgatgttaccaatgtaattcttttagggcccacaaattgggctcatataagacaagaaacattatcaataaatgttgtgtgtgttctgattgctccacagattggctgctccccagcctctctccctttcctcaggcttccctgttccctgagacagaataatattgaaattaggtcaatgaacaatcctacaatggctttctaagtgttcaactgaaaggaggagtcgcacatctcttgctttaaatcaaaagctagaaatgattaatactaatgaggaaggcatgatgaaagctgagataggctgaaagctaggtctcttgagccagctagccaagttgtgaaagcaaataaaaatttcttaaa

SEQ ID NO: 169711 - DNA, 297 bp, Homo sapiens
atagacgtgagctaccgtgcccggccgcacatctgtcactttaaatctacacctagaaatgattaagcttagtgaagaaggaatgtcaaaagcggaggcaggcggaaagctcggcctcttgcaccaaatagccaggtagtgaatccatagggaaagttcttgaaggaaattcaaagtgctactccagtgaacacctgaaaaatagaaacagacataagtatcacttatgctgatatagagaagattgtagtgctctggatagaatagatgaaaccagccacaatgttaccttaatct

SEQ ID NO: 169712 - DNA, 492 bp, Homo sapiens
ctgattctagagatatcccctggagccgtttgcgtcctcagagtctcatgatcctaacgaaagaactaagcgccagtgtcttctcctcccagtggtgctcaggttaaacctaactgaactgatcacagctgttccccagatctccagctccatgaccctcagacttaaacaacagcagcaccagctcatccgtgggtctatatctccacgaccctcaagctaggaaaacatcagctcctccccgggtctccaaccgcacgaccctccaactagaaacacaccagctcctccctcagtctccagctccacaagcctcccactagaacagcaacaccagctcctccgcgggtctccagctttacaacctaagacattagtggcagcaccggctcctcctgggggctcaagctccaagaccctcagacttgaaccgcagcactggctcttccctggatctccaactcgacgatcttcagacttaaacaacagaag

SEQ ID NO: 169713 - DNA, 378 bp, Homo sapiens
agatctggttgtttaaaagtgtgtggcacctccccactctctcttgctcctgctccaaggctctctctcccgactctctctcttgctcttgttccaggcatgtaagacgtgcctactttcccttcgtcttttgccatgattgtttcctgaggcctccccagaagcagaagcactatgcttcttgtatagcctgcagaaccatgaggcaattaaacctcttttctttataaattacccagtctcagttatttctatatagcagtgtgagaagaaatgggttttcagattgcatctgaatgggaacataataatttaaataataaatttaatttataattaataataacatgtaattaattataaattaatttataatta

SEQ ID NO: 169714 - DNA, 180 bp, Homo sapiens
gcctttttgatccttataaccacccagagaggtgagcaggaaggatgacatctccgtttcaaaggagagaaatcaggtgagaaagatgaattgacttgcccaaggttacatcaggaggaagaggcagtttttggactttcaaattggaacttgactactagcttgctgtgtgaccttggg

SEQ ID NO: 169715 - DNA, 472 bp, Homo sapiens
tgagacacagtttagctttgtcgcccaggctggagtgcagtggcgtaatctcggctcactgcaacctccgcctcccaggttcaggcgattctcctgcctcagcctcctgagtagctgggattacaggtgcacgccaccatgccccgctaatttttgtgttttcagtagagatggggttttgccatgttggccaggctggtctcaaactcctgacctcaagtgatccacccacctcagcttccaaagtgctaggattacaggcgtgagccaccatgcccagcctacttttttcttttaagttaaatatagtacaaacaccaacaacagtggaacccggccattcccaatagcctcctgaaccttcacccgcattttccacttttacaacccactcagcaacaccactaaataccagagatgtgtggaatcttaggttctggaatgtttttgtttttatttttaattttttaaa

SEQ ID NO: 169716 - DNA, 578 bp, Homo sapiens
cacccaatcaacttttcatggttcagttgtggaaactgatgtccacagataaatgtcttgctatcatgtcagatagttctccagccacgactgaggcctgagtccccctagggcagaggaaatctcccatttctaaaagaaagccccgcactgttcatagcagtcacaacctctctcacatccctgaatcaggatccaacgacttgccaatcaacaaatgttgctggagagtttaccacaaacaagtctctgtgctaggccctgagaacacaagctgtccggcaacttcctgctccctaaagtcacagtctatggtggaggtgcaaacaagcgatcctgttggggcttcagggtacttcctcctgtgtgctttgcacgtagtaggtgctcagcgaacggaaacggggagactagttatcactctccaggcaagcccgcaaagaggcctcaggtgaaaagagaaaggaggatttttttttccggccctggctctgcgcaccgctccccagcgcgccaggcggggctgcgtccggagcatccttccctccgcctctgtcctggtccccgctcagcggccg

SEQ ID NO: 169717 - DNA, 295 bp, Homo sapiens
taatcaagaggtgaatgatgcttggtgggatgtgtggaggaattcctgcatcgcctgaataactagaaggaagaactttgacgtttgtgatcatttttgcagtgctgtgaactatacgatggtaaagccccagaaagagctatttcccattcattttgctcaccacacagggcttagtgcaacgcatggctcagagcacccacgggataaatgcttgtggaaggacagagccgtgtttctctgtcatcccatttatcccatcggatgccactgctcatggtgatctctggggagt

SEQ ID NO: 169718 - DNA, 132 bp, Homo sapiens
caggaaagaaaaggggcttttctaaggatacacagcaattcaaaggcagtacagtagaattggttaagggtactctatttgagctccaagcttggctttgctactttccttttttttttttttttttttttg

SEQ ID NO: 169719 - DNA, 170 bp, Homo sapiens
ggtagagaatgttctttattcttagaagatgcatgctaaagcacagggttataaagtgtcattatgtctgcagcttgttttcaaattattcaacaaaggtagatattacaaatatggcaaaatgttaacacttgtttaaactacatggtcttcatggtattattgtttca

SEQ ID NO: 169720 - DNA, 847 bp, Homo sapiens
ttattagaataaatgttgttgccaaatgaaaacatgacactgtatataactgctgaggcctattctcatgtttaaccttcctaagccagttttcttaagttggtggagatggaagactatagtaattttcctagcatgtctggcatctgctgctataaaagagacagcagtaagcatgaagactgtgtttcccatatttgtccaaatcactttgattttgcttttagagtcaagagtcttaaaaattggtgatttttccaattttttctgctaatagtatatttaaaaattagcatatgctttaggtacatgaaactttaaaaaagtaattataatgtacagttaaaaatttatagtaagtggatctcacaattcattttctaattagtaattgatagttttacccattaaaatgacaatgaaaatatttttactatgggttttcctcccatttgtttctaatcatacctttgataatattttataaaggcttataatcatagcagggaattaatttactacttaaattttatgtatatgtacagtacatttaaaaattaagtagtcagggcatggtggctcacgcttgtaatctcagcactttgagaggccaaggtgggtggatcatgaggtcaggagttcaagatcagcctagtcaacatggtgaaaccctgtcactactaaaaatacaaaaattacccgggcgtggtggtgcatggctgtaatcccagctcctcaggaggctgaggcaggagaatcacttgaacccaggaggcggaggttgcagtgagctgagatcacaccattgcactccagcctgggtgacatagtgagactctgtccccct

SEQ ID NO: 169721 - DNA, 332 bp, Homo sapiens
gtagaagaaaggtgagatggcatactgtctataatcagtgatacaggaaaaggaaatagagctttaagtgtattaaagttacaatagcaatacacagaggaataaaaataacgacatgggaaaggggagaggtatgtagagcgtatgaatgaaaccctatctatatcaggaaatcaataggtaatgtctaaagttgaaaaatcaaaaataggccaggcgcagtggctgacgcctgtaatcccacataaatataccatttattaatatgcaaataatcgccaaaaaacaggaaaaggaaaaatggttcaaactgattgactctggagatcagg

SEQ ID NO: 169722 - DNA, 347 bp, Homo sapiens
tgcggatgggaaataacattcatagtgagcttttccggctttcattctccagcttccatttgctccattttctagcttttattcttcagctcccctgtgctccatttcctcagtgaaatgagcttgtgctcctgctttctttctccacgtgattcacgctctccctgctcagtactaccagacacaatatccattcttcaaagcctgttggtaggcaggggtgccctgaaaaggcatttatgaacaaaggagaggtgagatgcagaattccatctgtctctatttctgctctgggatacagaactagaattattcctgcaaatggagtgttcatggtgagctgtgag

SEQ ID NO: 169723 - DNA, 226 bp, Homo sapiens
ggggtgactctagcaggatcccgacagcatcctaaccagatatgctaaaagagtatatgctaaatagactccagcctataaaggttgttactctgaaacaacagagaatacctgatggataaaaagagactgtaggttaaatcagtgacatattagaagctgtagtgctgatatgacaaattctctgtacagtagtcccactattacaggactagtcctgtgtagc

SEQ ID NO: 169724 - DNA, 418 bp, Homo sapiens
atgagagggtgtgttagtaagaagagcaagtgagccaaagggacaaagagaagcaataaggaggaagaaaaagatgaaaaaagaaaaagaaaaagaaaagaaaactctaaggcctgagatggtcagagagctgcccaaggtctcagcaagtcaggtgtagggctgtgcttggaattcagagctcctgattgcccaggctatggctagagaaggtttttcccagccaggtccacaagactggccctaagagaataaagataattgtcttcttaggcaaaatcctggcactggaagcattctttaatggccatgaatttgccccaatgcctctgaactaaaattcacccaaagaaacttaaacagatcattttgggcattttctctctttcatcataatccttagatttcccacaacaga

SEQ ID NO: 169725 - DNA, 599 bp, Homo sapiens
aattcaacttttctcagcccctggtaactaccaatatactttctatctctatgaaatggtctatcctggacacttcatataaatgcaatcatacaatatatggcatttggggtctgacttctttcacctggcacaaggttgtcaggtgtactcatgtcatatcatctatcaaaacttcattccttttattttattattttttacatgtaaagagagacagggtctctctatggttcccaggctggtctcaaatgatcctctcgccttgaccttgggattacacacatgagccaccatgcctggcctgaaatatattcttaaaattaaatctgaatcaagtgttgatggaatctaacaagcacttctctgggatagtatttataacaccttctacaagacagaactaataaaatgtagcttgcttacatctgaagaggaagtgacttttcaaacaatgaattgaaaaagatgatagctaaaaacaataaagagccttcttcctagggtggaatattgatattttatgtctttcagtaaagaaggcagtaggtcttttcatggttccaccttttaagattcaggcatttttagtatattca

SEQ ID NO: 169726 - DNA, 329 bp, Homo sapiens
gtgtaaaagtggtcccttttcactacatccatgccaacatctattattttttcattatggctattcttgcaggagtgaggtggtattacattgtggttttgatttgcatttccctgataattagtgatgttgagcatttttccatatgcttgttggccatttgtatatcttcttttgagaattgtctatttatgtcttcagctcactttttgatgggattgtttttttcttgctgatttgtttgagttctgcatagattctgaatattagtcctttgttggatatatagattgcgaagactttttctcactccgtggattgtctgttaa

SEQ ID NO: 169727 - DNA, 322 bp, Homo sapiens
ctctctctctcctcccccaccaccactttctgtaattccaattacatgtttgttagatctttcaccatatcccacacatctcttatggtgtttttctgtatttttctttctttttatcgcatatttatccagatactttcaaatgactgtcttcttgttcactaattctctgttctgcttctaatctgctataaatctatttactgaattcttcatttcagtcagtgcgatttttggttctagagtttccatttgactctattttatgaattccaggtttttgctgaagttctcatcctttcccttttttcttgaagatatt

SEQ ID NO: 169728 - DNA, 162 bp, Homo sapiens
gcctgagccccacgtgactttcaaatgttccactggacagaaatgtaggtgaaaaatctgagcctagaatctaatctcatgtgacatattaatagaaaggtttttttgcaagactttcatatatattgaaagcatactgcagcaaaccgccactgtgcacat

SEQ ID NO: 169729 - DNA, 416 bp, Homo sapiens
tgggatggcaacttgtgaagtggggccagtaggggagcgtggggtcctggagagcccctgggcctagttggctttcctgacgtgaccaaagcagaccccgagtgcagggagtgagctctcctgcgggaagctaaaaaccataaggagccttgccaaggggcctcaccaaaattgaaaaggtaagccagagcatgccattcctctgctcaaaacctacgaaggtaggccaggctcagcggcatgcacctgtagtccccgctcctcaagaggctgagtcgggaggattgcttaagcctgcgggttcgaggctgcagtgagccatgattgtgcctgggaatagcaactgcactccagcctgggcagcatagtgacacctgtatctaataaaagtaataaccataaaataaaaaaaaaac

SEQ ID NO: 169730 - DNA, 328 bp, Homo sapiens
tgttctctggttgccttgttggttgatcccttgaggcggtcgatacctattggtgatggagcaaaatgagcagtcggtgggtgttcagcagcttggcatgggctgggccactcaccagctttatgacctcaggcaagtcatttttacctccctggaccaatgtactcattatgaaatgagaatctgacctagatgattctaatattgagagggtgtgatttccattagatagagtccatgattccttcctttttaaaattggctgggcatgggacagggccagtggcttcgagtgtttacccagccaggggaggaggaaggacatagc

SEQ ID NO: 169731 - DNA, 370 bp, Homo sapiens
tttcatcaaagtgcctcagagacctcaagacaaatgtctccacaccatcttcaggcaggaatgttaacagttttctatatgagggttccatgtaagattcggttttacaagttttgcttataaaaggcttgcaaatgtttacaaaataaataggccttaaacttgtaacattctgtacatgtaatatcatcactttgtggtggtgtttatttttctctacttgatgctagaaacagtaacttttctgaagcttttgttttaaaaggtgttttgttttgtgtttttttttttgaaataaacataaaaataaaaataaaaaaacagtccagtgctagagctggtggtaaaagtgaagacatataaggaaaga

SEQ ID NO: 169732 - DNA, 158 bp, Homo sapiens
catatccctcccaaccacaggggcagtgcagtggtggctcagagggttaggtcctagggagaggcaaacacaggccctggaataggggaggtgggatccatgcagagaggagaggggaaggaaggcatgataactccagcagccatccgggataccga

SEQ ID NO: 169733 - DNA, 316 bp, Homo sapiens
attaaaatgtctaaacaaataactgaacagaaaccaaatcataggctatcttttcatccttctttgatccagagcatttagcaaaccaacctattatttgttcagctatggtagaacaaattctaatagaacaaattcaaataaagaaatgattgggcaggaccatttgataggttaataccttttaaatatgtgggactaactaaaaactaacaagctcaaaatgccaactggtacccattttttttttttttttttttttttttttttttccccccctttttgtggtggggggggacccctcaaagagtcaccc

SEQ ID NO: 169734 - DNA, 355 bp, Homo sapiens
gttatagaaaaaaatccaagggtctacagtcttttgatattctatcaatcaaaatagttgaagatgtcctacatgaaggcattacatgagatgctgagggagataccaagctggctgcctgacctcaagaaacaaacaacctagccagacagaagtaactgaggaagaagaaatcagtgttggtttcagaacattagatgtcaagtatacataaatgtcagtgaaagattgttattgggcagtattcagaggaaatcattaatgggctgcagtaagctagaggacttctctagaagaaaacctttgaccagttctttttttcttttttcttttcttttttgagacaaggtctctc

SEQ ID NO: 169735 - DNA, 146 bp, Homo sapiens
ggcttgaacccctctctcaccctcagccccaaagcagccgctcaagtgctttcctcaagccctgggccagcacataaagggctgcctcactcttaggtgtcttaggtcacgggcttctcaggagctcagaagtgatcacctctggt

SEQ ID NO: 169736 - DNA, 586 bp, Homo sapiens
ctcatagaaataatatattctgcatttgtatttttaaatcagtttttaaaaagtaacacatctaaaatagtaagaggcatgtctaaaattctagtgtaggtctgtttaacaccacagtgagtgctgcttttttttggtgattgagggcctactgtaatatatcattgtggcagcttctttggaagataagaaattatccaccagaaataaagaggacacattctcttttaaggaaaacaccatctcggcttttaaacacttttcttttttaaagggtgaaggaagccatggagatttcttaagaagagagacacttcctacctttcttttgggaagcactgtactgattctgttcagcagtgtacagaattggagccatagtagaaggaggtggagattggagagcgcctagctcagcacccttggcgactagttgtagccctgactccttggagtgatctgtatgtcactctgtatttggacacagctgtttcctcgggttgcatggtaacaaaccaaataatttgcctttaggctcttttgcttactatgtctgtcatcttttacacaactgaagcctttggtg

SEQ ID NO: 169737 - DNA, 225 bp, Homo sapiens
tgagaaacacccaagaattatcaataaaaaaataaattaaaaaaataataataataaaaagcaaggtgagactacagtactctccctctgccatgtgaggacaagatgccagccaacctataagccaggaagaaagccctcatcaggaaccaaagcagcagcaccctgatctgccgcttctagcctccagaaccatgagaaaataaatttctgttgtttaagcca

SEQ ID NO: 169738 - DNA, 151 bp, Homo sapiens
atcaaaggaaaggagaggaagatgaggaggaggaggaaagaataggaggtgagaagagaagggaaaggaagagacaagaagggaagataaagctagaacaacagaaaagaaatcaataaggatttacttgaaagaagtgacagtaaaagaa

SEQ ID NO: 169739 - DNA, 150 bp, Homo sapiens
cagtccattatcaagtatgtctttttccatgggtattttctcccagtctgtggcctccttcagttttgttccctcttcttgtgtgtccagcagattcacagctccttatgaaagaggtgcccaaaacaagagcagctatgggggagcatg

SEQ ID NO: 169740 - DNA, 413 bp, Homo sapiens
gagacagggtctcactctgttgcccaggctggagtacagtgacacaatcttggctcactgtaacgtccacctcgcaggagaattgcttgaacccaggaggtggaggttgcagtgagctgagattgcgccattgcactacagcctgggcaacaagactgaaactccatctcaaaaaaaaaaaaaaaagaaaagaaagaaatatgaaaagagagatgttgaaaaaatataaaatatcttaccagcaagtctataggtcactttaagagagtgggtgggttcaaacctgagctcagaaattcttgagaatgggaaaagcaagtattgacactcagggtgcttacattatatgaaagatggccccaacttgaacctttcttccagtggaagggaatgtcatagcaaatgtacttatc

SEQ ID NO: 169741 - DNA, 347 bp, Homo sapiens
gtcccagctgctcacttgcactgcttgtctggggagtagctcagcagggactctgagtctgcagaagaggaggctgttggagaactcagtggcagggcttgctgttgaggactctggcccatgagagtctcagcagcacctcagtcccacatggtcaaagctttatcagttgccaggctcatcctcaccctgcctgtcttgcccacgtttgccgagtacactcaatcagcataacagccagaacatagatgcagtttagtgacaacacaggtggaatacatgtggcaaatgaccagcttggggtttattttacacaaattaatacttggtgataatatttggaatta

SEQ ID NO: 169742 - DNA, 325 bp, Homo sapiens
gccccacagaagcattaatcagatttatacttttccagattacatatcctggcttaagtctgtaccctaatttacattaagagttggaatcctcacatggaaaggcgggggtgaagataaaaggagtgagacttaaatggacattcagagatgtgagaatgtggcttactttcttactttgcttgtgccatgtcagtgctagaggagcagccttgtttatagaaaattcattttgcattttcttaatttagggaaacatgtaccaccattgaaataacctctcagacttttgtttgtttgtttgttttactttgtgaaagcgtag

SEQ ID NO: 169743 - DNA, 356 bp, Homo sapiens
ttcaggaacttcatcttgttagctagcttgaaatcagcaagtgctacaaatcagggtttgatttattgttctgttgattgtctaaactaaagtgatagagaaaatgttaattatgcagattaaacttaaagatgtgtctgtagctattatattttgggcatagaaaaatctgagaaaatagccttccagtatttgaagacttacctaatttagcgaagaagttgcccacgtcattgacaaatgagtaaagttccaatacacaactttgttatttcacttttgccttgctcattaatgtaaatcaaaatatcaaccaatattcatgtcagaactatacttgcttgtcagttgcaatc

SEQ ID NO: 169744 - DNA, 260 bp, Homo sapiens
aggccccaggttcagttcaggtctacctgtgtgtcttctcatcctgggacttcagttgaaaacacagctcccatataagataatgtaggtcttgtggagggcatgggaacacaagagggttgctagaatttgcagcgactcctaaatcctttgtgtggactggcacactgtcacttttatccatatttgtttgttttgcataaaaggttaaattacgttttgttgttgttgttgttgttttgagacggagtctccctctg

SEQ ID NO: 169745 - DNA, 469 bp, Homo sapiens
gattcccaaggcatcgaaactttagtctaaattggaggggaccaggccacagctcctaagtcccacttggcagtttgaatttggcaactcagttggctcactgcagcattagggtaaaaaattttgaaaagtctattctgtgttatctttcatggaatcccagaattgaacattttaatatccaaaggggagtggcaattttaacttcatctagtaagaatatattagtgtgcctctcacaatttggaactcaataattaactattagaattctcaatggaaacaaaaacagtctatacatcttgatttttcctgaaaagtccttggtaccccaaccttcagaagtaagaagacacacattgccaagcacagttggaaaaccacagagtttgctgtatcgcattgaaaaaataactccaacaatgggtagaaattgaaatatatgtatttgagtattttggccagaact

SEQ ID NO: 169746 - DNA, 471 bp, Homo sapiens
attccacttagcgtaatgtcctcaaggttcatctatgttgtaatgtgtcagaatttcactctgaaatttcactctggaatttttaaggctgcatcgtattccattgtacacatgtatcacattttatttatctgttcactcatcaggacacacattgcttccaccttttggctattgtgaacaatgctgctgtggacctatttaagttcctgctttcagtacatttgggtatattcctagcagtggaattgctaggtcatatggtaattctatatttaactttttgaggaactgcaacacggttttccacagcgggtgcagcctttttcatttatattttacatttcttcaatgtacacaggttccagtttctccacatcctcgctaacacttgttattttccgttgtttttttaaaaaattagagccatcctgccgggcatggtggctcattcctataatctcagaactt

SEQ ID NO: 169747 - DNA, 266 bp, Homo sapiens
gacacccgtagaagcagctgggtccaccaggaggcaggagtgaggggaaggcatggcccagagccacctgtggcttccatgggcaggtctggccaaggtagggtaggcaagattgagcatgctcaggattggatagtgtggacaattctctaggctatagatgtcagcctctggttgtctagtatctgtccctggggtgatttagggcagggaaaatattggcttggtgtctgagagtcagataaaggaagtgttggggataaata

SEQ ID NO: 169748 - DNA, 439 bp, Homo sapiens
aggatgagaggcgtatgaaaagacttgagggcctccatgcacgtgggcaatggctggagctgcatctcctatttttagaccacatctgtgagttctgccattgttcctagtgtctaagagagtaatggccgttttcttctacaaattttaccctacgggaatcttcttctataacagccctaagcactaggttgactgtctgaaaccaagctgcagatcctagacggacttggaacagtagaaggaagggcatgtgccaggctctttccttcttgtttgttacttgagaaagaagaaacaagccagtctgcttttggttttgattggttgataccagtctggtaggtctgaagggagatgccaaaaccccactgctttaagttccttcctcaaaatatgtaagacagcgtaggtgctgttcttttcttttcagacggag

SEQ ID NO: 169749 - DNA, 481 bp, Homo sapiens
taggaagtaaaatctcaagtacagaaaatataaaaaggtataaagaagcagaaggatggaaactgccagtgtctccactgggaggatcgggatgaaacgttgcctggcagagcctcagacttcagagggaaggggcctggagctgtgctttgcagctgcccctgagtttccactcctggtttttgtgcatgcgggtgactgtgcaggatgacttagtgtcgtcatgcttatgagttattttgaatcttgcttttcaaaactttattatcaatacacaactttctatcatattacaaaatcttcttacacacagctttcaccagctgtaggctgtttccaaacagaggacctagccactcttcttttgcatgtttttttcattattgtaattaatatccttatacctaaagatctttctatatattggattttgttttaaaatcacagatttctcaataaaagttactgggtcaaaaggcat

SEQ ID NO: 169750 - DNA, 480 bp, Homo sapiens
gagggttgaatcacaactgctatttcatagccaggaaattgagatcaactgattttacttactcggataagaagtagttggctctagggaagctagaaatggaagtctctgtctttgattcattttattagattagtgtttcccaaacttggctggtcatcagaacaatgaaaaagtcatttttaaaatacagattcctaagcttaaagtctaattctactgattcagaatctctaatgtgtcaggctgcaatgattctatgtatgctagtggtagtaatgtttgtttttgctgctaagaaagtccaaagggagccttatatctgactgtcagaggagtggggtttcggagaataagctaggtcggcttccatatctaaaaagggaagtagattgaagatacaacttatatagctgtcactcatgctaagtgtctatcaaatcacgaataaagtgcaaataattcatatgtcatcaactc

SEQ ID NO: 169751 - DNA, 344 bp, Homo sapiens
agttgcccaacaccacactgctaagaaatagtggaactgagatttgaacccaggaagtctaactccagcttctgtgcctaaccagtctgctggctgcctctctgatgactaccttagacactctagtccagattctgcaagggtaggtgttccaaagcccactatttcatcctcattttcaacttgaatcagttggtctttattgcacagacctctgaattgaaaagggaaatcaggtctttcacctcctttgtgggaagagtgatgattggttagcgtgtctgccatggaaagtgtggtgatttttcaatgctgcttgctatggtgtagaggggattgacaga

SEQ ID NO: 169752 - DNA, 310 bp, Homo sapiens
cttgcattttcgaagagcttaatgaacatagttgtgtcactggaggtggtgagcaccccgcctgcggggtgtgcaacctctgatggtcagtgatgctgtgctgtgtgctcaggagtggggatggaactcagtgcttctacttcccttccctggacggggcccaggcacagtcaggctcgggcccccagccttggtaggggagaactttgttcttctcagcctacttagtaggggagggtgctctcggcccctcagccagtgatccaggacctcgaggagggggaggaaaaaagaaagggagggttggtgg

SEQ ID NO: 169753 - DNA, 794 bp, Homo sapiens
ttctgggtccactgttcaatcataatatccaggctgtataatgccactgatttatgatttataattagagattttatttactaaaaataaagaacaagaaagaaaccagctgaatatgaaaattggtttatggttcaatctgattccagatgtgggtgtttgaacatcttgcagtgaagttatcaaacactaatagggttgttacaactcaggtgcttaattgaatgggctctggttggccaaagaagatgagacaatctgagcatcagtaagcattaactgcaatataatgaatcatatcaaatatatttaaatccgtgagttcataatgatacttcaagaactcattagttttcttcagagtatgctaaggagccaactatgctttagagcaaccaaatagttgctgagaggaagtttcttttctcagatagaataaaacatcaccattttctaatgaattcctgaacctaagcaaagatcatgaatggctgctaactgcacgggcagaaacggacattagctttctcttaatgaaagttcacagtgctgcccatgaagtattcttgccaaaaaagttgaacccgaatgtgatcaagtctctagctctaccagtttacaggaaacacagaagacagagaaacacattaagtgataccatgtgaatgcagttagcaaaatataggttatggggaactcttagagacatatgtcttgtttttcaacgagcaaattgtagggagaaaaaaagagaaacggaggaggaaaccgtagattgacagcgtccctaagga

SEQ ID NO: 169754 - DNA, 612 bp, Homo sapiens
gagatatttacggattgacggtacggtcgatcacacactaaggtatacagctctacgcagtatagtgagtcagatgtgtacatgcccatagggggtaatcatcctctaggttaagggatggaccctttctggctcccagacagctccccatcccctgtcccacatagtccccctttaggtaaccgtgactctcacctctagccgcgtggatacgttgcccatgcttggacttcctatgagtggaatgctgcagtctgtactctttcatgtctgcctccttctgcttcatgttatgtttgtgaggttcatcctcattgtagcctggacctgtaacttgttctttttcacgggtgtgtagcattcagttgtgtgaatctaggaaaatgtaccccttcttccttgtggacaggtggtcaaggatgacaggcagtcggctttcagcttggagctcttagaactaaaactgctcccgaggctcgtcttccggtggcatatgaggatggcttatgttcgtcacgtgctcaggagtggggttgctggagagtcctgctgaaacgtcaccagcaggcattcttgtgggtcctgcagacacaccgtcagcagcgccttgtg

SEQ ID NO: 169755 - DNA, 216 bp, Homo sapiens
gaagaaattcaggattacttcttgttttctagcttcagcagccaggtggagggtggagccagaaaacaaaatggggaagatcagatctgggtggaagaataggtgttgagaaaatctaaagctgtttttcaacttgttaagtgtgaggtgcctaaaacctccaggagaaaatgtagagaaaacagatgccaagagttcatcagttggccgggtgca

SEQ ID NO: 169756 - DNA, 455 bp, Homo sapiens
agcgaagggtgctggaaggaaagaacaggttaggagagaccggaggtggggagaaagcagagaccccacccgcgtggaggaactgcgggaactgcgtggtagaaagagattaggtgcaagagaaggtccctctcccagggagataggctgtgggaagatagaggagcgacaaaaagttccaaaccttgacagcctccttcagggaaccagaaaagtaaaaacaaaaacacaaagatgtcattacttaggttgttattttagaaataggacctgtccactaaggacaacttttttttttttttttttttttgagatggagtcttgctctattgagcaggctggagtgcaatggcgcggtctcagctcgctgcaagctctgcctcccgggttcaagtgatttcccttgcccaagcctcctgagtagctgggatacaggcgcccgccaccacgcccgg

SEQ ID NO: 169757 - DNA, 627 bp, Homo sapiens
aatgtgagaaagcattttatctcttcatgatggtgtttttgttgtaccgtagcttcattcattgtaccgtagcttcattaggattacctttggacatctccatttaagttaggcagtttttttaaggagccacttgtggcttaatggcaattacgtttccatcataggcttttattttatttccagctttataggtgcttttcaacagtctttcgtattataaaatggaactttaaatgaacatttagattttaataagattgcttttcaaaagtacagtaattatgctttctttaaacattgctgcatttgtctcataatggaatgtttttcatgattgctacatttaacagttttctgtgattggaaatggtcatcaagtcaaagtgaaaattgcaattttcctatgttatcttgagaaatttcacttagagatttcattgaagttaattctatgtcactattgttggtaaatgaacagcttttaggaagcagtttctgtaatgaaatttcaaatgttctgaatatttctgttttatagttaactgtgtaatactttcattcaggttttcaaataaaattactgcgcagttaaaggaaagcaatgttatgtcgagctttcagtaa

SEQ ID NO: 169758 - DNA, 381 bp, Homo sapiens
gttaaattgtgatataaaaatgtaacagttaaaagaatacttacatggccgagcacagtggctcacgcctgtaatcccagcactttaggcggccaaggtgggaggtttggttgaggccaggagtttgagactagcctgggcaagatagcgagaccctgtctctacaaatataaatacataaataaattagctggtcatggtggcacggtgtctgtagtcctagctacttgggaggctgatgtgggaggatcacttcaacccaggaagtcagggttgcagtgagctatgatcacagcactacactccagcctgggtgacagactgagaccctgtctctctctatatataaaaaaagagaacctgtaatcccagcacttgagg

SEQ ID NO: 169759 - DNA, 351 bp, Homo sapiens
aaagagggtgaggccaggaaaggaggccaacaccctacagtgtcaccaccacctgctttcagggaagtcacgctgaagtggggacccttgaggcaagagttctctggggaaacagaggtggggagaagatcctaggacatcagcaactcaacccccaaagatcctcacccccagaagtccccttcaccagttttgtgcaacttgacagcctgattcttcagggtggaaagagcaattgaattctgggcagcaaccccagagccctgtcttctgccttcacccaggagacgtcgggtgtgaccactgaatctcagtccagaatcgagatgggctgcaccagcagccagaccc

SEQ ID NO: 169760 - DNA, 205 bp, Homo sapiens
ataggcagacactgcccagagctcaatatggacaactgtgctcctgtcgagctctgcagggctcagaatcagtcccactgctcctcacccgcacacttgccggctggttattttgtaccgatgttacacatagagtcatatctctccactgttctagagggaaagcttactacaatatttcccttggaagaaagagatacagtga

SEQ ID NO: 169761 - DNA, 560 bp, Homo sapiens
acacgtcctattcccatttttcttctgaggtattcatcttctatttgatggtaagagccaaacagaaaagattttaaccttttcttctatcacaaatattgtatgtttcccacttctccatttgccttttaattttgtctttttaatttgttgttgttttaatcttgaaatgtagcatttccagctagtcaaatcctctgcatttgtcctttgtaatgccatataagggatgatctaccgaagctggctaatgacctattagtttctaaaaagcagccagtgtaagtcccccaaatctgcacagcctgcagaggttccactcagtgttggccagatggaaggaatgtggagtagaaacgctaccagatggactatgagtcaggaggcccagatgcttgtcctgggtttgctgcttgcttgctgcaagtccttaggcaaatctcccattctctctgggtaccataaccctctgtcaacaaaatgaaaggtatggacactacactctcaaaagacacatcatttttttttctttttagtctggatgctcggcgtgtgcagga

SEQ ID NO: 169762 - DNA, 345 bp, Homo sapiens
acataccctttaatactcaatttaaatatcattccctctgcgaagcccttatctctgggcagtgcctactcctccctttcctgtattttcatcacgccttgtttatacctttcttatagcctttgtcatgaaactgattattagctttctgaaaagataataaaagaaagataataagaaaagacaataaaagaaaagataataaaaagattattatcttttctgccatggattgtaatcctcaagagggcagggattgtactttacttcttttcgtctgcttggtgacacagttactataacagcatgtgcttgataaataaataccacttatgctaaatacaa

SEQ ID NO: 169763 - DNA, 334 bp, Homo sapiens
agtgctctgttgtgacctttatttttatgagctgtgagaattaagaacctaccagttttagtttaattaagcagtaagacacagcagatggtgcatttgtgggtgatgattgcattccactggtttcctcaagcagcactctaaccctatggaatgctttgcctggagtatcacgccactgttgcaaaattaccaggaagacaaacacattgtaataatgtagtcagaaaatcttggaggacagtttagaaaaggacctgaactccacaggagttttagtagttagcagctactggaactaggatattaaggagaggaatccatgacataacgg

SEQ ID NO: 169764 - DNA, 392 bp, Homo sapiens
attggagatcccctccccacctgatcatggggtggcattagggtcctggagaagggctatagagaagcccagcctggtcccaggtcccacacagagcttctctgacccagcacccatgattgggaaggtctccatgttctgaactgggggtccatattctgaaaggtgggcatgcgcggcatcaccattgctggggctgccgtcaaaacacatagtgctctacttacccatcaggggagagaccatgatcacaaaggtggttttcccagggcgagtcttctccattgtactctggatgtgctgatccctgcaatttccccaaaggtgggaaactcgacttcataatttgtggtaatggggaactgcatttgcactctcccctggcattttgt

SEQ ID NO: 169765 - DNA, 302 bp, Homo sapiens
gctgcttaatcataacactgtttcttcaaatgagaatgcacacagaagcccactatagaaaagcagacagccaacccgtgttgagagccctgaaaatcgttggctgcacgaacctttccccactggacagatggaaatggacccgtggggcaatactgccccaactctctcagcccagggctctcccggccgtatcagcttaatcagtgccagaggcatccagcctgcatggagctgcctccagaaggccccaccagcaggcagtctcagggcagcgtcaaggctgcacacttctgctaaaa

SEQ ID NO: 169766 - DNA, 413 bp, Homo sapiens
tccacctcctgggttcacgccattctcctgcctcagcctcctgagtagctgggactacaggcgcccgccaccatgcctggctaattgtttgtatttttagtagagatggagtttcaccgtgttagccaggatggtctcgatctcctgacctcgtgatccgcctgcctcggcctcccaaagtgctgggattacaggcatgagccaccgcgcctggtggtttacgggtttttaaacacccatctgccttagaggcttagaatggctaaaaagcaatgccagtggatgcagtgcagccgagctggccattccacagggaagagtgtgagaatcccagagatctctcagcacatgggaggtagaatgtgtgcagaagctggtctttcctctacagacctttctcccctggtctaact

SEQ ID NO: 169767 - DNA, 437 bp, Homo sapiens
tttttaatgttctgaacttgtagaaatgtctaattaattttcagtggctcaatgagatttaggtatatatgagcatcttccaaaatatgtagagtcacttggcttcaggtctatgatgtgtgggatcatgtgatgctaaaaagcaccagggccccacgtttcctgacccctggtaaagttcactacccaccatcaaactggcaactgacatgacaccagaacgatcaaagggagatttttttgacttctaagcacacttgatgattcttttgtcattgtggttggttttcattgtgtcaataacttttggcagttggtctactccttaacctgaataatcaggattaatctctctgcattctgtctccaatgtctccactgatgtcttacataagctggttccaaatatgcatctcctggtggggaacccgagactg

SEQ ID NO: 169768 - DNA, 445 bp, Homo sapiens
gttttcagctctgaaactcacggaggggttccagtgcaaaggttgtcacatgctcacccagcactcacaccatcagaaacactccatgtttgcctttccttttatcccccaactatgtcctgggcctcctaggggaacacagactcagccccattagtggccctagatctgaagcctgcagaactttgttgcagagggaaggaaacacaattcctccccactggctccgagttggagctgagacacaaagtgaggacacaggaaaacccactccatcctatcactgcttggatgtgacgaagtggcttgtagtttacccagggggcaacacatgccttcagggtaatgattttaaggcaggatgcatttttaaatcacctggggaaacttgtcaaaatgcagatgttcaggactcagtctcaggctctgacttaataggtctgag

SEQ ID NO: 169769 - DNA, 242 bp, Homo sapiens
aaagaaaagtggcaaatggcagcttagatattctctggctaaatgtaggtagcagataatagagtgttaaagtagaaatgtgtcttccctatagactggacctttctggatataaagtaagagatgtatcaagtttctttttttcgattttgagacagagtctcgctctgtcgccaggctggagtgcagtggcgtgatctcagctcactgcaacctctgcctcccaggttcaagcgattctt

SEQ ID NO: 169770 - DNA, 916 bp, Homo sapiens
cagtgcagggtgccgggaacccagacggaacaactcagcctctttcctcagggagtaagtctaagacctggcttcgagtacattcggtgaaagaaagctcattgggagccgcaattttggctagctagtgaaaaaaatcaccgaatgcccctgcaggggttgccaggacttcctatttgtttttgttgttgttgttgttgttgtttgttttttttgagacggagtctcgcactgcactcctcctgcctagacgacagagtgagaccctgttttttttttttaaattatagtttttatttcataatcataaacttaactcagcaatccagttaggcttggaaaggaacacaggaaaacttggaacccaaggggaacggcagcaagagcacaaagataagatacggcgagcaggccgggcggtggggggcccgtctgtacatcctagcactttgggaggccgacgaacggcaaactcgcctgaaaccaggagtccagatccagccgggaaatggcacacacccgcccaacaaagagcaaacccgaacaaaccagacaacaacatacaccgatcgaccccgcacccccacactaccaccagaggcgcagaaaacccaacgctcgcgccggacaggcccaaccgccacagaacaagacagcggaacgcagagacgggcgcaggaaagacgggaaaaaaccggaaaggaaaagaagcacgaaaagaacacaacccgagcaccgagcgaacagacagaaggccagagagcaagaagaaacagccacggacccaaaagacaaaacgacaaccgcaccaaaaccagcgacgggaagccgcaaccaacccaggtcgaagcggcacaggggccggaggaaacgcccaaaggcgcccacaaccgagcgcgaccgggcgaaggaggga

SEQ ID NO: 169771 - DNA, 188 bp, Homo sapiens
tgccaatgtggagactcctctgttaccatgtcttcatactcttttgacttccctggctcctgggaggtccatgtccacaattcattcccatcccttggcagggctggccctccacaacctggaatctgtgtcatcctcaagatcttagcatccgattccccgactcacagccatccctggttcggctg

SEQ ID NO: 169772 - DNA, 506 bp, Homo sapiens
attccaatagcagcatatgcgaattccttctgcttgataccttcaccagcacttaactcttgttggatctttaaaaaattttatcctaagttattttttaaatacttgtggtcctaagtctttgtcatggtcttaatgttgcccagtactcatgctttgttcctttctctgatacagatgtatgcagggttcacctggggaaatgtaagaaatactgaaggatgggccgggcgcggtggctcacgcctgtaatcccagcactttgggaggccaaggcgggcggatcacgaggtcaggagatcaagaccatcctggctaacacggtgaaaccccatctctactaaaaatacaaaaaaattagccgggtgtggtggcgggcacctgtagtcccagctacttgggaggctgaggcaggagaatggcatgaacccaggaggcggagcttgcagtgagccgagatcgtgccactgcactccagcctgggcgacagagcgagactctgtctc

SEQ ID NO: 169773 - DNA, 448 bp, Homo sapiens
cttggggcctcgtttcctcacatatagcctggggtagggggtaacaataactgctaactcagaagaagattaactgatacaatccacataagagatccaggatagtgtttggaaagagacgctgaatacagtgtaactccaacaaggacagcagaggaagaagtgaaggaaagtgagcagccaactccagcctttacccccaacaatagagcctgagaactcttcttgatgcataagattcactaagaaggccctggggcccagaaagtgcttctggtaaacatgctatacctgggggaatatgtggtccccattctggagacaagccatctgcatagccaacttcatcacttctatgtgagctctaagagccgtattttaaaaattacatgaaaatgaatgctagtcaaacaagtagtaaatccaagaaagaggaaggcatagatac

SEQ ID NO: 169774 - DNA, 221 bp, Homo sapiens
gtaaaatacacgagtttctgcattcagaagaaagtatttcaggtaaaaattaactattaagcaacttttctcagcagaagaaatgcccaaattcttaaggacagccaagttgtgagttagagagctagtgttataacagatatttttaaatacatatatgaattacctccttacgttactttattcttgtgtttttagcaactgttgaaaacaattataag

SEQ ID NO: 169775 - DNA, 345 bp, Homo sapiens
caaacaaaatagtgaatagaatgtttcagggaggaaatagtataagcaaaggcatggaggtctgaaccataaaggtatttgggatgaactacaagtatataatttgatattacagagatgtaaattacagtgtcagagagagattggaggtgagaccggggaggacccagaacttaaaatttttgcttgctatgtttaggaattggaatattatcctcgaagtggtagagagttatttgaaagattttaaatagggagctggtgtgattaaatattttaaataaatcagtctggctctagggtggagaattgaattgcggcaagcaagaagactaggagactatt

SEQ ID NO: 169776 - DNA, 365 bp, Homo sapiens
cttgttattgggcatcagttatgtaccaggtgagcaaagcaaatgtggaatcttctcttaatattgatatgaagtaaatatgagtaggacttagcaaggtgaagagtgaacaggtatcacaggcatacagaaaaatacctggaggtcctgagttaggaaagggtttagcaggttgaaggaacaaaaataaggctagtgtggctagaacatagtagttaaagggggtagtgacagaagaggttggagaaaagacttgaggcagatcatacagggagtaaaggatatattatggctgatttcattttaagtgtattgggaaccattgaaagttttaaaacatgattagattttcatttttaagagat

SEQ ID NO: 169777 - DNA, 499 bp, Homo sapiens
tttaaaaggaacaaattagctctttatctatctaaggcagaggagtcagaacacttattcctatgagcgttcagggatttcaacatctatgggtagatttccttaaatagccaaggaggctgacttaaaggctaggagagccagccctctgtgatttggagagataataagttagcaaactggatagcataatggtttatgaaattcttccttcaaggaccattatctagtgctaatagtgttttatgtcttcctctcctgtgcttatttacagcataattataagagtgagaaaaaggggaggagttgggtatcaaaataaccatatgccaaattaatgcagccaactagaatctctggcccttggggcttgtttatcaattagttctgttgcaatttgagtttctgtttttccccacagaatgaagatactttttgatttcactcatatgccatctccaaggaaagtcatttgagatcaaaacatttttcagaaagg

SEQ ID NO: 169778 - DNA, 338 bp, Homo sapiens
cacaagtgagtctcagatgaacatgatggcagggataaagaaaagatgggactctcagctctgttctgctggtctcctcagaaaccactgtgtccatgtatgactaaaaatgcctctcagttattttccaacagtgcggcaaatgcgaggaaattaactatggtttgacattatggttagtctttttttttttttcaaatttgtcaatggaaattttcacaggtacacaaagatagagttagcgtaatacacctcaatgttcccatcccccagtttttcgacttgtaatcaacacatggcttttctcatttcttttataccttcacccacctttttct

SEQ ID NO: 169779 - DNA, 356 bp, Homo sapiens
agtgcagaggtttttgccttttggtttaagttagacttaatgtctacgtgtttcaatgtttagaatgctcagtcctgccagatagttgcagaagtaacataaaattgcttggaagttatcaatgaatgctagactttccaaactgtgcaggaatcttttgttcaaatgagagtaaatgaaacatgctgcccctaatgcatggaatggtgtgaaattctgactggtgtgggttcaagagcaaactgaaagggaaatcttaagacagagtatagtacaagtgttgctgaaaatgagactaatagtagtaaggggaaaatggggggtcaaaaagggccggccggatatagggtaccgag

SEQ ID NO: 169780 - DNA, 407 bp, Homo sapiens
atccacctgcctcggcctcccaaagtggtgggattacaggtgtgagccactgcgcctggccccttacacattattcgtaaattgttaacatgagtaactagttaaaggaaaaaatataatatctccatcctcctcctgaaaaacaaaccttttatttttattttatttttttctcattcttgctgtcatcttaaacaaggtgttgagaatgttttaactgtgagcactccttctcctcttacatattattgtgtagtattttggttctaatttgtgtttataccacctaaattagttatcattattattgctttatacagttgtgcttatttagatgtatatttatatggcattttctttcttacccttgcttcttgtatcctacttgtttttttggattcagtgtg

SEQ ID NO: 169781 - DNA, 339 bp, Homo sapiens
tagcaaattaatcaagctggaaagggggtcataggaacactagatttacagccagtggttcagaagcacaggtaaaacaacccagggcttgcaactggcactggaaatgtgggacagtcttgtgggactcagctctgaacctgtgagatctgatgttaactccaggcagatagcgtcagaattgagtaaaactgtagaacagccagctagtgtccactgcagaactggctatagtgtatggagaaaaacttctatacatctggtgtcagaggtggagcactgagggtatagtaggagaaaacagtttccacattgtgccaagaggactctacattggga

SEQ ID NO: 169782 - DNA, 317 bp, Homo sapiens
aattaatgtttttaattagcaggccgtggtggtgcacacctgcagtcccagctacttcagagccagaggcaggaagatcacttgagcccaggagtttgacgctgcagtgagctctggctgctccaccccactacagcctcggtgacagcaagaccctctcaaaataaaataataataaaataaatagagcatgcaaaacttatggtgcctattcaaaacacggcttcattttttccacagcctttcagtgagactaggtatttctctgaccttgaaaatgtttagagcaacttctacaactttgatcgtcattttta

SEQ ID NO: 169783 - DNA, 567 bp, Homo sapiens
aaatagcatttttacttcttcctcattcttgccatttctgttcttcagtttctatgttaactgctttgccattttcaggtcaactactgtttgttgccttaaatctatctgggagctgcttcaaatccatttggaagcaaggggaggatacattataaataaatgatatgttcagagatgggcagagttggaaagacatttcagtgagacggaaggccagtaaagcttttgtctatcagcatctgatatcattacaaacatattggtctgggcttagcttgcttctagaccatctggatttatcttcagctgagctaaacccaggaaaaaagacaaaaaaaacccatttggatttgctctgcagttcttattttgtttttcttctaacgcaaaccctgcttcaaaaattaagtgttgattttgactgatgataacaaaacaaaaatacaacctgatgtgctagctaaggcgggggggaaatgacaaaagcctcagagagcaggagccaagtgttcacttctccaggacgtttccttccctagtactggtttttcctaattcagcaaa

SEQ ID NO: 169784 - DNA, 541 bp, Homo sapiens
acgagttaactgtgtaacaaaccttcacatgtacccccaaatctaaaataaaagtttttttaaaaaggaaagaaatgtatccccctcggatagaaggggactgctgtaccaatactttagtattatttaagtcctggaacttggagtcattttgtaagtatttgttgactaatgaaacaaatttattcattcccttatgcaaagaaatctctacatctgcaaaaacataggcagagtttctgggctaacaaaaaagacaaatgccaatgcaaaggaagtctgaaaattgtgaacaaagattattaaaccagtatttacagatcgaacattttaatcacgtttctattctgcaaagtatgtttttctgtattagctcattttatccttacaggaatctgtgtagcattatcttcattttacagttgaggaaactaaagctcagagaggttatgtgaattgcttgaggacacaaagctagtaagtggtataaccagggttcacagccccctggtattttcactgcagattccacccttttttt

SEQ ID NO: 169785 - DNA, 396 bp, Homo sapiens
aaggggactaaaatgtttctgaccttttaacagactgtctcccacttgaatcacacacaaaagtacacattgtgtctgtatttactgccttactggacaatgggaaagagacaagtacacagaatccaagctcccttgtggacacaaacaaaagcaatcagaataaaaatcacctgtaagttctctctacatccccagctcgaaagggagaaaaagtgcagtcttgggaccaccagagatttaagcaagcacccacagccaccaaatgggaacctttaactccaataagaaggggaacttagatgagctgcactgcagtgatccagtcttttggaaaattttttggtacagatggcataacaacagtacactgacaaaaaaaggaatttaatctcc

SEQ ID NO: 169786 - DNA, 187 bp, Homo sapiens
ccacagcgaagaattagccggtcccaaatgttaacactgccactgctgagatgtcctgacctagaggaagctacattaggatttgagtactcagaaaaaatgcagttttacaaactctcaaaattacttaagtaggaaactcagattatctagttcaatcctctcacagtacagaagaggaaaatga

SEQ ID NO: 169787 - DNA, 622 bp, Homo sapiens
aaattccacctgtccttgaccatcatggatcatatcaaacagtgaaagcatggagtacacagcaatgcgtttcacaagctccccctctctgatgtcagacaagtggtgtggagccttgtggcgttcccatccagtcaggttccaagcccactcattgatccactgcagaattattagtgtcacttgaggccactttgtgtggtggctgtgatgatccagaaatgaagcagacacagcgtgctccgggaggatgtggtcactcagggcttgcaactgatggtaggaattctaccacttgacgagaagattctaaattctgggagagatgctgtttaatgaatctgagtcagaattcctgttatgttttaaatcttgctttcatctccaaaagcccttggattgcagttggtccatgttattttcatgaaaatgtacacattagaattcaggccattttgtcgcagtactatgttacaaattaaccatttcagcgaaggagagaatggctggtttgccgatgatgtttcattgttcctttctgaaaccacatccgaacaaaagctgaatcatccgtggtgtgactcatcagattagtccgacaaaagaattaccaaaatagggc

SEQ ID NO: 169788 - DNA, 255 bp, Homo sapiens
ccttatatgggcattatattttattgttagtatggagaaaggctattgatttttttgagaaatatatttatctaaacactttgccaaatgaatttattaatctagtagcttttaaaaaaattagaatctcttgtgttttctaggtctaccatagcattaccagaaaagatcatcttccctgttctttgacaatatgtttattgattgttttcctgttttatcatgtggtatgacctctaaaataatgttgaataa

SEQ ID NO: 169789 - DNA, 387 bp, Homo sapiens
actacatgaaaagcatggaagataatgacagcctagtggacaggcagatggaccccatggaaactcccttcccacaccagggctcagagcccaactctgccactcactaatgccatgaccatgacccagaccagtcatgtctctgagccttcattcctaacctgtgacacagggctaagaagacctacctcaagagaagagctgtgggcattatgagacaaaatgtattttaatcacccagcgcctaataggcatgcagtaagtactctaatggatgagctcttggactctgttcccctgctttgaggggttgcccacagaacagctctggtggagaggaaaaggagtgctctacaaggcaaggcagcagcagtccagctaaagcac

SEQ ID NO: 169790 - DNA, 127 bp, Homo sapiens
ctaaatatatatgcacccaaaactggaacacccggattcataaaggaaagattactaaatctgaaaagaaagactccaatgcaataactgtgggggaatttaccaccttattctcagcactagacag

SEQ ID NO: 169791 - DNA, 570 bp, Homo sapiens
tgagcctcaatgtcatcttcggacacagggtttaataagcctcggtgacactccatttgcaggcaggtgcctgcagttgagcctctactgccaacctccggccctgcttaaagacaggtgggcaggcgcccctgggccaccacacagtgggaggggactttggacaggccccgagctggaaggatggagcacagggggcagctctgaccccacctgagtgaccttgggccgctctctgcttccccctacgcttcagtctcccctgcctagtaccggcacctgctccgaggcttgctctaacctccggagtttccaggctcacatttgacctcccctcccggccttggtttcctcctcatatggcaacggggatctgccaccaggtggacccagctataggtcagagggactcaaggaaagaaaaggaaaaaacaaacaaacaaacaaacacccagcagggatttgtgatcgccccaggaaccttcccgaccaggccccaggctgggctctgcctcggccgcgcctcagtctcccgcacagagcaaaggacccatccactgcctgcggccg

SEQ ID NO: 169792 - DNA, 301 bp, Homo sapiens
gcattctgattgatagagaaaaagacatcagttttcaaagtattttcccttcttctggttggctcctctcctgtagcttctagaacatgtagcgttaggtgtgtttggcagatgtcagctttacgagggcagagaatctgtctgttttgtttgcttcggtattcccagggcctagaatggtgtctggtttataggtactcaataaatatttgatgaatgagcgaatgaatgaatgaggggcgtggggccccgatgaatgatttattaagggtacacatctggtaggtattaagacttggtc

SEQ ID NO: 169793 - DNA, 180 bp, Homo sapiens
gttcactgactcatggtggcttaatctccctgtaattttttattgtgagtttattttattgaatttaaatcattggaaattccaagggcctacatttgggatgctttccttcagaaggacttttatatacctctgctaaaagccagatggcatccggaccactttagtgtgcgcttcaag

SEQ ID NO: 169794 - DNA, 250 bp, Homo sapiens
ccagttcagaaattgtacctttcaaactgggagaaacgtttttctcttaaccttgtattcaggctattactgcgtttcagttcatttggagttaaatcaacttttagggccactgtgggtttattaacaatgtgtatatgaagtacattatgtttcacattcctaagaaccaactgactcgaatttttacaactccaatggtttagaaattactttgtaacataaaacaatcaggcagtattaacagttt

SEQ ID NO: 169795 - DNA, 683 bp, Homo sapiens
gctgagcaaggcagggaacggggcgtggcccccctgcccctggagctggacatcacacagtccatttgtgtgtatgcatgaatgtcacattctagagttcccctttccccaaactggtccagaggcagtccagggttacacctccagaggagagcctgagtctgtccactttccttccccaccagccccagcccaggcattgtggctgctatagtgcccgcctccctgccactgctcagcagccaagtgcaatcttcattaggcctccctccagtcctgtcccttctctacgtcagagattcttgtcatcttccacacaaagcccagacatctcaccttgccttccagagccctatggaagtctcaggtgactctccaggcccctggctgcctccagctcctcagggaccaggcttccttcctctgggcttctgcacacacagttccttgtgctggaaacactttggctccccatcttcatgttgaaaacaggctcccatctcctgggtctcagcttaaatcctacttcctcagagaagcctttccctttctaaatccttgtctccattgcccccctcctcgcttgcagccatcctagcatcaccacaatttcagatcatttacttgtttactacctgtctctccactagactgtaagctccattagggcagggaccacgtct

SEQ ID NO: 169796 - DNA, 514 bp, Homo sapiens
actccccacagctttttgttcatgctgcttgcatggatggtgacccactctctctggtcccaggcccaaggtgccattttgggagtttaaaatggggctgtggcccaccctcagcctgaggtcagactgacgcagctgtagtcaacaccaagcccaaaagggacagggagaccaggccatcctacacaaatctaggagaatacctactgctctgcagtaggctgctgtgagagtgagacatgcaaatttacactttctacagcttcttgcccacactatttgcctgggcggtcctccaccctccctgatcttaggcccaaggagtcacttttgagagtataataatgagcttctccccacactcagcctgagttcaggttgaagcaactgcagccaccacacagccaaggaggggcaggagagtcaggctctcctccagaccctcctcctagggcaatacccaataccctttttaggctgctgcaagaccaagatttgagcaggctacattccc

SEQ ID NO: 169797 - DNA, 956 bp, Homo sapiens
  misc_feature (678)..(678): n is a, c, g, or t
  misc_feature (828)..(828): n is a, c, g, or t
tgagatttcccgactagtccaaccatacacttacaattacactatgcactcacatgttcacgtatatacatacacacataggctgggagtccgtgtctcgaatgagggaggagaggtggagttgccggggctcaggcccggcctcgagcatgggcggatgagaggagtcgggagccgaggcctagggtccttcgggtgaggggagacggagccagcgaggagatggagcagaagcttgtggaggagattcttcaagcaatcactatgtcaacagacacaggtgtttcccttccttcatatgaggaagatcagggatcaaaactcattcgaaaagctaaagaggcaccattcgtacccgttggaatagcgggtttgcagcaattgttgcatatggattatataaactgaagagcaggggaaatactaaaatgtccattcatctgatccacatgcgtgtggcagcccaaggctttgttgtaggagcaatgactgttggtatgggctattccatgtatcgggaattctgggcaaaacctaagccttagaagaagagatgctgtcttggtcttgttggaggagcttgctttagttagatgtcttattattaaagttacctattattgttggaaataaactaatttgtatgggtttagatggtaacatggcattttgaatatnggttcctttcttgcaggcttgatttgcttggtgaccgaattactagtgactagtttactaactaggtcattcaaggaagtcaagttaacttaaacatgtcacctaaatgcacttgatggtgttgaaatgtccaccttcttaaattttaangatgacttagttctaaagaagattacaggccaatctgaaggtactccctgtttgctgcagaatgtcagatatttggatgtgctaagagtccattggcccagttaatcaacttttgtctggctgttgtg

SEQ ID NO: 169798 - DNA, 574 bp, Homo sapiens
ttgagaaaaagaaccatatgaatgaacaagattattcaaaataaatttaagcctgagttacttaaataatcctgagattgagttactgtaatttaaatagctgatatgactcctagaatctatattacttaagaaaaagtagattatgggtaggaagagtggaagaaactgttgacattcattgtaccattcgaggtatagaaatttccaaagcaaagaaacatttcaaaatgtatgcatgtcaactaatctatagaccaattcaaaaaggtaaagaatgaaatcgtatatttttaaatattacattaataaattggtaaggccataaactaatgttttcctccatccccacatattctgttttccccacttaatcttagaaaccatctaagaaaaataaaaatgagtctgcacttttcaaatttggatttactctcaaaaatctttgagaagatgattaagcaatattaaataaagcttataaaaataaggatttttaaatcttttagaactacttttataatcttttaaactagggcttttgttactttaaaagaaatatatgcaaatacta

SEQ ID NO: 169799 - DNA, 215 bp, Homo sapiens
gttcacatttactaacagttctccaatggacataattctttacaatactccaagacatttagcttactttaaaattaaagttgatatcattacatcttttcaaatacatttaataaacagaaaatattgtttttcattgttaaattctaatggtagtggaaagggacctgtgatatgaaaaaggcattgtaagtattccatgatattgatactta

SEQ ID NO: 169800 - DNA, 606 bp, Homo sapiens
  misc_feature (592)..(592): n is a, c, g, or t
ggattctggcaaacagtgtgcatcaaggccagtgctgtgtaggagaggaaagacttgattgtgttgacagagagaggttgataagtgaggggttaaagttaaaccataacccagttagcaatcaggatgtggcctgtggactttgcctgtcgctagggccttcaggagttggctgtggttggctgggggtggggaagatggggtgaggatggaacatacctcatacctcaggccagagacctaagtctgtggaggcaccttgtctccagctggagaggggagcacggcaggtctgtgtgcttccttctcagaagtccaattcacagagaaaatcgagccattatgggggctcatgcagcttctccacccacaaacatatctatgtctcccccattcttatctctgccctgccatcctgaggcagaggaaggtcccttctgctctgggcttatctggccccctgtgcccaggtggtatccttctcaggaaccttacaacatggctctttgagctcactttctgttggtttctaccattcaatgatacgtttgctcaattctactacttaatactccagctccaagcctgtagnggtaccagctccga

SEQ ID NO: 169801 - DNA, 453 bp, Homo sapiens
ggccttcaggagttggctgtggttggctgggggtggggaagatggggtgaggatggaacatacctcatacctcaggccagagacctaagtctgtggaggcaccttgtctccagctggagaggggagcacggcaggtctgtgtgcttccttctcagaagtccaattcacagagaaaatcgagccattatgggggctcatgcagcttctccacccacaaacatatctatgtctcccccattcttatctctgccctgccatcctgaggcagaggaaggtcccttctgctctgggcttatctggccccctgtgcccaggtggtatccttctcaggaaccttacaacatggctctttgagctcactttctgttggtttctaccattcaatgatacgtttgctcaattctactacttaatactccagctccattctatgtctttttttcttcagctcca

SEQ ID NO: 169802 - DNA, 116 bp, Homo sapiens
agcattttgttctattcaggccttcaactgactggatgaggctcacccatattagatgctttacttagtctattgattcaaatgtcagtctcatccagaaacgccctcacacccag

SEQ ID NO: 169803 - DNA, 198 bp, Homo sapiens
gtaagggccttcattagggcaagggtgaggtttgtagggcaggagatagttttgagaggcttggaagaacatcttgaataggacttgggtcctgaaggataagatgataatgtgaagataatatgaaggtcttcagcagagaaaatgtggaactagatgcccaaacaagaaggaaaattgggaagaaagtagactggg

SEQ ID NO: 169804 - DNA, 301 bp, Homo sapiens
ggttttctcctatggttatcctgagttggggtttataaggcagcacaggctgcctaatgctgcttttttatgaactgaaatcactttgggatattttttctgcaacactggaaaattttatttaaaaacaaaaaatacttaagcagatatctgtatcttttcaatccttttctaagagacaatacttattgggtctgcacctccacacttgagcttgttagcggtgctgtttctgctgttagccatgttaaagtgttaatcctgcacatttggtaatacaagattgttgacattaaaaaaa

SEQ ID NO: 169805 - DNA, 435 bp, Homo sapiens
caggaggctgagttgggagaatgacttgaatctgggaggaggaggctgcagtgagccgagatcacaccactgcactccagcctggatgaccgagtgatactcagtctcaaacaaacaaacaaacaaacaaaccctgaaataaacatcgttttaagaaaagcagcctcacctacacattttctctctcggttccttggctggaattgggaggcatggccaggccgagttgcaagggcagcgggaggtgagtgttctcctgggcagacttggtcaggatggggcagctggggaggaaggattagacactgggctggcttcatgcggggtctgctgtggcaccacgtgtcctgaggagaaggtggccaggcctgggagtgttccagggctgctttaggactcaggagagctggtactgatgctccattcactgtgagc

SEQ ID NO: 169806 - DNA, 119 bp, Homo sapiens
ccaagttataggtgcctggccagcctgtgggttggtgcccctgggtcaggtgcccactcctcttgtgtgctaaggattctgagcatgacaagctgtgtaagcaacagtctggagtcact

SEQ ID NO: 169807 - DNA, 294 bp, Homo sapiens
ccaaaatgcatattcttgattgatgagaggctctcctccaagttcaaggacccaggtccttccaccttatggctccaccatctacatcatatgacttccaaagcctttgtgcttcttggcttcaaattgatggagaagaaaaagcaatgggattatgttcacgtggttttgtggcgggggcaggcctgtatgtgctgcatattatttccacttgcctatcatttgctggaattcagtcgtagggcaacatgaaatggtaaggagttgagaaaatttaatctaactttatgccca

SEQ ID NO: 169808 - DNA, 571 bp, Homo sapiens
attccatgggccctacctattaaataaatgcctatagcacccaccaaccactgagacaatcacaaatgcttccacaaattccttaaatgaccctcaggctcataaaaaaacaaattagaattcaccagaaggtcctgggtccctacctggtcgagatggagaaatcactggctgacactcctccctagagcccctctagagcccccccaggcagagattacagagcagaggagcgaaggagcacagttcacagcacttccagtgtcttggagaaggggaagtggtggaaattaccactctctcttctccaactttgctcaagggtgtcacatcagcacacatcactgagacctctagtccaggaaagtcaaggtttgggggaataaaaagtagctctcctcataaaaacattgtggatcctgcctctgtgttctaagaataatctgaaacaatagtccatgaagtatgcctcatgtatttgtcaaacagtgtttcttaaaaacaccaaaatagatgcactgctcccaaaaataacagggaaaggcactgaaggccttgagcctctccccga

SEQ ID NO: 169809 - DNA, 222 bp, Homo sapiens
ccctctttgtgcaatatctatcatattacgtctatatacattgaaaaatcccatcattatatgtcttttccccatcagacatgtttttaaaaactcaaaaggcaggcatctgcctggagtccagaagatcgagaccagcctgggcaacatggcaaaaccccatttctacaaaaaatacaaaaacttacaggtagcacatacctgtagtcccagctactcagg

SEQ ID NO: 169810 - DNA, 669 bp, Homo sapiens
atgatgactagctctggtcaaagcagtaatgacctgaagtaggccagtgaaataagaattaaacaaatatgagaaatgtttcagaagaaggatgatacatgttactaactgatgaaatatgaggtgggttaagggagatatgagagaaagtgagaaatcaaaaatgtccataaatcctaccttggacacgtgagtatagttgctgttaattaatatgataaagtgggagaaggatcacatttgtggtgggggctaaataattccatatactagaacccttttgaatttgaggtttttctggtggttttatctagcagacttgaaaatatggacctggttctagaggtattttgatattaaagataaatacttggaacccgttaatgtgtgggtgttagttgaattcatggggatggatgtaacaacttaaggaatgcaagtataaagagaggaaaaatctgtctgcagattgaacatttcaggattggataagtagggaaagaaccttcatattaggcagaggaagagtggttagagatagaagcagaactgcggagagtattcttagagagcattgggaacaactgtttgaagaagaaagtaatagcaactgtttcaaatgctgcaaagatgccttgttaaatgaagagttataatattcactcaaaa

SEQ ID NO: 169811 - DNA, 665 bp, Homo sapiens
aaaaaagcggggggggaattggtatattccagtgcctatttggactaaaaggagttcaagacaacgcactctacagactccccagaccagggctccccttgggtgtctcatagaggcctcaaacttcgagtgtctggagctgagctttaggcagtagctgtgtgcactgaagctccttcctaagcctgcccctcatcctcaggctgcggttccccagtgtcagcagcttctcactcaggccaaagaaacttgactccattcttgactctcctttctctcatgttccaaatacttctcgcccccttctctgccgccatcctggccaagcgcccacctttgctcacctggtcccctgcagcagcctcccgcctggcagcctcacttgggctcttgtcccctggagcctgcaggatagtaggtgctccctgagtgaggaggaaaaagaagaggtgggagagtgtgccgtgggttgtccccgtgggctcctggaaccagggggaggaagttgagcctttccatgcatcagggcttattgcccgtgtcaatttttggacttgggggttcctattacgcactcagtcggggcattgtacggctctgtctgctcgggcccctgtaatgctgtgctacactgttagtattggtctattattgttatatgtgtc

SEQ ID NO: 169812 - DNA, 283 bp, Homo sapiens
tgctatatctggtatctacttttagtccctaaagaatgccattttgtttcaggaaaagctttagctttgctactgtagaaatgtgtcttacatgtcaagatttccttaaaatgcttggagggttcttacatttattttaacattccactccagctgcaactgcagggaaaacttcctgatcaggcctccaccatctctcacctgatggtgacctccacctggtctcctacattgacacccctgtctcctttactgtgaactttcaacacacaatcagatggat

SEQ ID NO: 169813 - DNA, 1295 bp, Homo sapiens
tttttgagttgagtctccctctatcacccaggatggagtgcagtggtgagattttggctcactgtagcttccaccttccagattacagtgattctgttgcctgagcctctcgagtagctgggattagagatgcacgccaccacgcttgtaacggcatgatgtgatgtgtgtgcatgaatacatggatggataagcccatggtttatgtagaaaacacttgatttgcaataaggtatattttttatagttgttatgattgtaagtatttttcatttttgttaactatcacaatgatgagttattagtaaggattggccgggtgaggtggctcacgcctgtaatcccagcactttgggaggcccaggtgggtgaatcacaaggtcaggagtttgagatcagcctgggcaaaatggtgaaatgccatctcaactaaaaattagccaggcctggtggcaggtgactgtaatgccagctactcgggaggctgaggtaagagaattgcttgaacctgggtggaagaagttgcagtgagccaagattgtgccactgcactcctgcctgggtgatagagtgacactccttctcaaaaaaaaaaaaattaaaaaacgtcataattattaatattattattattacaggcatgagccactgtgcttggcctgcctctgttttcacagacacatctcttcatactcagccaagggatccttcttcacatccatggtctctacattgctgtactcctcgtagactttactcattttttttgtgtgtatgaaattctggaatctacacaaggcatatttttgagtatatgcttgaaactagaaatcagaggccattttacctaagagatgtaaaactgctttcacctcaggccaccatactgctgattttttggatcttgttcattcttgtcccttgcccatattgtaatttgcatagttaaccttgggtcagtattttaccatttgctaaattagttccattttcctccaagctcaaaacttggtctatcccagtggaattatattcccacagatgtgcatgcacaaagttcactcctacgtgcccattcctgccctccacccttgccctccttttcctggccttgcttcacatggtacattgatttggatgcaaaatactgttgctttccagcctattgattttgtaatagtgaacaccccaatttccccatgagcccctcccctccaacactactctcactgagtaagtcaagaccttattcatccactggacaaaattataggaggccgcttaaatcagtgtgt

SEQ ID NO: 169814 - DNA, 828 bp, Homo sapiens
caaagtgctgggattacaggcgtgagccaccgcgcccggcatctgaactttgttttatttattttttttgagacagaatctcacttcctgcctgggtgatagagtgacactccttctcaaaaaaaaaaaaattaaaaaacgtcataattattaatattattattattacaggcatgagccactgtgcttggcctgcctctgttttcacagacacatctcttcatactcagccaagggatccttcttcacatccatggtctctacattgctgtactcctcgtagactttactcattttttttgtgtgtatgaaattctggaatctacacaaggcatatttttgagtatatgcttgaaactagaaatcagaggccattttacctaagagatgtaaaactgctttcacctcaggccaccatactgctgattttttggatcttgttcattcttgtcccttgcccatattgtaatttgcatagttaaccttgggtcagtattttaccatttgctaaattagttccattttcctccaagctcaaaacttggtctatcccagtggaattatattcccacagatgtgcatgcacaaagttcactcctacgtgcccattcctgccctccacccttgccctccttttcctggccttgcttcacatggtacattgatttggatgcaaaatactgttgctttccagcctattgattttgtaatagtgaacaccccaatttccccatgagcccctcccctccaacactactctcactgagtaagtcaagaccttattcatccactggacaaaattataggaggccgcttaaatcagtgtgt

SEQ ID NO: 169815 - DNA, 410 bp, Homo sapiens
ctgatatctgttttgttcattggactgtggacccattttaaatatttatcatctgctttctaaaccaatggcaagagtgtctgcataccagtgtggtgaggggagatacagtggtggaggggagatacagtggtgaggggagataagtccctgaatcagacttagctttcttgaggactcagtgctgactttgttactgtttactttagcaactcaggtaaaaacatgcgtcaaataactcttttgtttcatataaaacctgaggttttgcaagagacaaaacctcttaaaagtgagatttgttgtttaaataagaaatagtgttctattattaacccaggccagctgagacaagctttttaattagcctaaaaagagaggataatgtataaggagaatgaggtaggttt

SEQ ID NO: 169816 - DNA, 415 bp, Homo sapiens
actcaaatactgatcatttaagagagaacttgccaactcagagccatgggctaactataaacaagactttaaacctttttgctaatgccatagttaatctcaagtaataacttctgaaaacctttgaaaaggtctgagaatggctttctgtcaggggcctaaggaaactgtacattttctcaccgtgaaaccttgatcatgccagatataatcagactgtttatctggcaatgttaattttctgagtttacagtataacaattcgccaagattattggaacagaatcagaagaagttatatttgttaatcggccaattttctttttttgcatttaaaaattcagtgcaaaatggtatcacattttctagagtactgacgagactatgcctgaataaatgcatttgccaaagcgaa

SEQ ID NO: 169817 - DNA, 771 bp, Homo sapiens
gctaccagtgagtgaagggccggagggcccgggcaagcttgagcccaggatccagtgggcccactgaagtcagggcccacttttggggggctgggaaaaggaagggttgctgtgggaccactgggataggcctttaaacagcacttcaccattggcctgaatcaaacattgtcattcccagtgtcccgagcaccttccctgagtcttcataccttctgcctcctagcttatggaggaggagccaggggcttatcttttgggggaaatgagagcacgattaggcatcaagaagggttgatgagaaactggtaagggggactgtcaagaacagcagagtgctgaaatggtgacaaaagctctgggctccggccccagctctgtactgagaagctgtgagattttgggcaagtctcataacctctgaatgccaatttctcaatggaaaacagggagactacctaccctataggtctgtgtttggagaaaacaaagtgtaagcgctggacatacagtagcatcagaaatgctgaatccgttggccagggctcatgtgtaaggcaaacatttcttggccactcctgagtagcatggtcttgcaggaatatatgcttaagtgctgtgagagcacagaggaagctttgcccttccctagagggttaatggctaccaacgtgagaaggtcacggagttccttaatgagagggagcctagctagaacaggggatgaatgagaaattgttctgagaaccagaggcaaggctgcaaccagca

SEQ ID NO: 169818 - DNA, 511 bp, Homo sapiens
ggtgactcgggtcaaagcaggtgatagggatgagtcaggacagagcaggtgaccaggggaacaaatgtgaactaccgattaaaactgatggaaaaagttgtttactgaaactacaaggaagttaaactttaaaatggaggacaaagaactgaacatactgacatactgattctttgaaaagaaatctagaactcactgtatctaacatatctaaagaaactgaagtcaagatgtcaaagagatatctgcatcctcatgtttcactgcagcactgttcacaatagccaagatatggaatcaacctaagtgtccatcaacaaatgaatagataaagaaaatgtggtatatatatacacagtctttcactgtgtgtatatatatatatacacatacacacacaatggaatactattcagcttcaaaaattgaggaaatcctgtcatttgtgacaatatgggtgaacctggaggacattatgccaggcacagaaagacaaataatacatgatctc

SEQ ID NO: 169819 - DNA, 147 bp, Homo sapiens
ggctgtggctgcagagataggaatgaacagacttaggacatatttgaattatagcccatataatttaccagtgatttcaatgtggggatgagggacagagatgaatcaaagatggcttctgggttatgggttgagtagttggttgga

SEQ ID NO: 169820 - DNA, 541 bp, Homo sapiens
tcagaaaataaataaataaacaaacaaatcgatgaagctccagggggcagataaaacagaagtgagtcttggggtggaagacagggagaggcatctgtggctggatccctagaagccatctgagaacacctgcctgctttgccatcccagatcagggacagggtgccaaggacagcaaacagggctcagcacagcctgggcatgcaaatggcttgtctgtggttcacggaacaagctcaggaagctggcagggaggaaggggatatagtgaggcagaaaggagaagaacaaagttcaaatacacaagggaagggagtaggtggggctcacctaatgtcaacagcccttgggtgcaggaactctgtggagaatgtgaccccaagaagggagtggtggcaatgccaacatgccttggttaagagaaaaggccctttggctataatgctgtgtcctagttcccaaggcagcccccaactagatttccctcaaaatgcaggtgtgtgtatgggtatgtagagaaggtagagtaatcacatgcacc

SEQ ID NO: 169821 - DNA, 447 bp, Homo sapiens
tctgggctctgattggtcacaccttgctgacgccggaaccgagactggagaaagtttgaatgaaagcgctgcacactcaccgcgtggacgccgcacgctcggccccgcttcctcccgggcccgctccgcaggcagctgcgactccagcagctccagctttctcccactgccctcctccggacacccagatcctcctctccccactgccatcccaagtggcggaggcggacatttccctgaaactctgcgtccgctggggaggcgatccctggagaaggagagcatcctctccaaggctcaaagccacactctctctgggagtggtctatccgctccctgggccgggagtccgtcgggggagagccacctggtcatcccctttgtcctcctcttctccctcccttcccgcctagcgagggccgcaacaggtgcagaaggcgcggccgc

SEQ ID NO: 169822 - DNA, 200 bp, Homo sapiens
ggatctcttttgtataaatgttgatgctgaaaactgacttcctgttctgaacttttttcttttgagtggctgagtgggtgactgtcctaagataccagtatgacttggccgtttgcaaaggattgctcaacagggctttccccaagttgttcttccccatgagaggaacagttagcaaacagaatggactttggagttgg

SEQ ID NO: 169823 - DNA, 457 bp, Homo sapiens
cctcccacctgctttgactgaatgcctctggccccggagcctgcccggatggaatgagaatgccatggagccaccaccaatgaccaagtctgaaccggtttggaactaccattgcttctcttcccccacgtcttctaccctcctagggaaacagcttggaatttagagatcttatcctttaaatttcaaaaaagtaattgagttttgaataatgttctaagtctcctctgcaagaatgagatgtgctttttctaaagaggaatgctcatgtgatgtcagggtgggaggtgtgtgccagcagagccaggcaaggagaagttaaagaggccaataggaaactggacccagacttttaaaagggattgaaattgaaataaatcaaaggaggaaaaagtgggaggttggggcaagaacacattgtatatgggggaggaaggaaaggggaagcaaaagatga

SEQ ID NO: 169824 - DNA, 408 bp, Homo sapiens
taggtattggaagagtgtggttaaaagtagtcaatgtacattttgaagaaccaatatagaacatctagcaaaccagattcttttcggtgatggttatatgtctttttttacctgtatcaggggaaaaaaatagacccacacacacaaaaaaaacagtcaatgatcatttctaacttccttccaataattttgtaaaggacactgggcacataaacttttccttggtgctttttagatattcaagcaatttcttgaggacactgtgattcatgtttctgttggactagtgtgtaaaaacattcttccatacatttttgtgaaaaccactatgttcttttatgagctgccaggaaatgtggggaccggtggaccctagccaccatctctcttgatctttgccttctattt

SEQ ID NO: 169825 - DNA, 378 bp, Homo sapiens
tctgtctatatcatgagagtttttatcatgaatgagtgttgaattttgtcagatgctttatctgtgtctattgaaataactgtataattttttcccttaattctgttaatgtatcacatttaccgatttgcatatgttaaaccattcttgcatccctgggatgaatcccacttagtcatgatgttatctttttaatgtgctattgaatttagtttcctagtagtttgttgaggatttatgcatccatgttcaatcagagacactgtcctacaattttcttttttgttgtgttcttgtctggttttcttatcaaggccttgaaaataaatttggaagaattctctcctctccatttttctgaaatagttttaaaaggac

SEQ ID NO: 169826 - DNA, 303 bp, Homo sapiens
ttcctattagttctgtccctctaagagaaccctaatataattgctaacaagctccccaactggagactcacttcccatatgctagcacctgcatgctacactatcaggagcttcaccatagtagttaggagaatggggagggaaagaaggggggagtgaggggaatatggatggcaagaaccggtggtaacaatcatatgcattacacacgtaacgaaacgttaacactaaagtcacagttcaaaagtttttcttttgctggaagtataaacttgttcttacgatccttatgaactggctggg

SEQ ID NO: 169827 - DNA, 510 bp, Homo sapiens
agtgcttaacgaagatgatctcatttgatcctgaaaactaccttttgaaccagccaagcattatgatccgtatgctgtagaaggtggaattggagctcagagaagcaaaatgacaaaggtgacaaagctgcagcagagctggggtttcaaccctggcagtccaattccaggcccctgctcttcccaccagggacttcctgcagccttctgaacctattacgcattttcctgcctctgtgtctgcagatgctgttcttctacctcaaatgccttgatccttattctcttcacctggacagttcttcttcatcatccaagatccagctccttcctgccttctttaagaagccttcatggacctctcccctgggttatgccatcatagccactccatgcaattctctctcatagcacttatcttgctacattgaactgtctgtctctctaacagagtgtgagcccgccttgaaggtaggtaccctagcctttaccttgacatccccatattcc

SEQ ID NO: 169828 - DNA, 456 bp, Homo sapiens
acaaacaacaacaaaagaaaaaaaacaccaaaaaccaatattaaggaatcttccaatcaatgaacatgatatatctctctgtttgacttagggcttccttaatttttcttagcaatgctttgtagttcttggtgcagacactttacaaagctttccttatcttaaatcctacgtgtgttatgtttctggatattagggtttttggcttttgtatattgaccttctgtggctttgctaatttagcaaataattattaatcattgttaattgaatattattaattctagcagatttttctgtagattactttggatttcttttagacaatcatgttttctgcaaataatggcaggttacctcttcctttccagtcttcgtcctttttattttctgtcttattggattaactagaaacttcaacacaatgttgaatagaagtggtcagtgtgaatatcc

SEQ ID NO: 169829 - DNA, 410 bp, Homo sapiens
tggtttgttgttgttgcatagaataagatgacgcttcaaaacgacatttttttttctcagctcatgaggcacctatgagtgggtacttattgagctttttcacctctccaatttgcttcaaatgccaaacaaccatagaatggtagatgttgagtttttcagcaacttctcgtgttgttttaagaggttcagcttcaatgactgctctcggttgttgtcaacttccgacggccagtcactatgctccttatcttcaaggctctcccctcctttgcaaaacttcttgaaccaccactgcactgtaccttcgttagcagttcctgagccaaatgtgttgttgatgttgcaaattgtctctgctgctttacgacccattttgaactcgaataagaaaattgctcaaatttgct

SEQ ID NO: 169830 - DNA, 508 bp, Homo sapiens
gctttttgtgatttataccttactgtgaattaatttctcaaacaattaaaaaacttatcaactagttatagccagtttttagaagaagcaggtagcagtgaatatgaagacattaggcatgtcatgtgctagaaataaagaaaaaacatgcaaaggtaaagacagatttcacttccttccattttatgatgggtcagctggcatttgcaaataagctgattttcacttgcccagcagtgataatgatccataaatcatagagaaactgaacataaaagtgtggtcttttttcatgcagtttgtcactattctagtaacattaaaatatatatccaatggaagtggggtcaattagtgtcattcttttcatgctagttttcaagtaactgggtttttttttttcccccaaagccacgtggatgtcccatctggctggtagaaatgacatagtgagtattctctgggggaagaaagaagccatccatcctgcccatgaccctattgcaac

SEQ ID NO: 169831 - DNA, 357 bp, Homo sapiens
tccctctcaaaagaagaagaaaaatgttaaaaggacattattaagacaattagggaagtaacattataacaatgttaaattccctgagtgtcttgaatgtgttgtaattatgtaggaaaatgtcctacttttctataagcggattatttgttttatcattcattctataattttgacaatgattaacgtaaagcccattggcctatagtttctgaaatccaactaaatatttccttcttttaaaaataagcacgtttgttaccaccaaatacgagcctttcagagagataatgaggccctttgtggaaattaatcccagcaatattcattgctcaaccctcagttctaaatttcctc

SEQ ID NO: 169832 - DNA, 625 bp, Homo sapiens
tctttcccatggccctaggtaaattatactctaaatttatttattttttttgaaacagagtcttgcttttgttgcccaggttggagtgcagtggggctatctcggctcactgcaacctccgcctcccaggttcaagcaattttcctgcctcagcctcccgagtagctgggattacaggtgcccgccaccatgcctggctaatttttgtatttttagtagagacggggtttcaccatgttggtcaggctggtctcaaactcctgaccttgtgatctgcctgcctcagcctcccaaagtgctgggattacaggcgtgagccaccgcacctggctattatttttaacttggttttcatttctggcatagagactaatttgggtctaagttattcccattcctgctttgatttgctgatttttcaaacctgaagtccaaagttactgtttttggggtttggggacttggggagtattttacttttttttttttttttttttaagagacagagtcttgctttgttgcccaggttggggtgcagcggtacattcatggctcactgcagcctcaaattcctggattcaggcaatcttctcacctcagcctcccaagtagctgggactacagg

SEQ ID NO: 169833 - DNA, 295 bp, Homo sapiens
ctgcaccctccccctcccaggatgggggtgcgtggatcctcactcactcgggcaatgtacatgcattcattccccccacctttcctgtgtctcctaggctccggaccgcacggagaccctccctcttggcccctgccccaaaccgcgtccccctccgagacgtgcctccctcctcgggctccctgagctgcagatcctggatcctcccgcaccctcacccatcccaccctgtacctgcggggctcggcccgagcgggcggacaaggctggaggggagagggtcccgcgcggccgc

SEQ ID NO: 169834 - DNA, 365 bp, Homo sapiens
gatttcttacacatgctactaatagaagaggcattcaaaaataaatgactggtggccagcgagtggataacttgaactcccgacttcgtgatccgcccgccttggcctcccaaagtgctaggattacaggcacctttttaaaattattatattgagacagggtgtcactttgtcaccctggctggagtgcagtggcatgaccttggctcactgcatcctcaacttcccagactcaaaccatccttccacctcagtcccccaagtagctgggactacaggtgtgcaccaccacatctggctaatttttgtgctttttgaggagatggggttttgtcatgttgcccaggctggtctcaaactcctgg

SEQ ID NO: 169835 - DNA, 219 bp, Homo sapiens
aagttacataacagcagtactcacatgccaaaatcaccccctccctgagtcaaggctggaataggggcctcagccacatgagggagtcctgcacaggtgacagcaaaggtcagagaatcctgctctctcctccccataggagtttactacggaaaatttgcctaagaaggaccctgaacctcattgagctggaaccagaagcactatttggacaactct

SEQ ID NO: 169836 - DNA, 159 bp, Homo sapiens
tgaattgtcataggttgagggaagaaaagaactggtcttttaccacagatagtttaaaaagcaacacactaattttcatatcctacatttacacacaataagctaatattcactgggcacttactacatgcctgctactgtatgctgtccacccagtat

SEQ ID NO: 169837 - DNA, 384 bp, Homo sapiens
aatttcggctaataagagctagatgaagagcctcagctctggaatcgactgctgaggcctgaatccagggcccctgccccatgccccaacctctgatcttggctcctacttcccctctcagggcctcaatttccacatctgtaagatgggggtggcaatgcctacttgatagggacattgcaagggccaagtgaattagaacatgcaacgtccttaacccagtgcctggcctgtagaaagtgcttcatacatgctgactgtactcaaagagcactggctttggagctcctcagcagtggtatagccttgggggagtcacttcatctctctgaccccagtgttctcagctgtcaactgggaataataatatgcctgactcataga

SEQ ID NO: 169838 - DNA, 433 bp, Homo sapiens
tgaagatagagagatgaaagtgtttcatttgctgaataatgatggagacagtatagagagaaaataaacaaccatacttgaataaatgcattatctcaggccaaaaggagaaaggcacattggtgaaggatgttacatggttacaaatgtagggagaaatccattacattgcaggatcataaatattaagcatctggtgaacaagaaccatgtttggcagaccaaaaatcatactttattgaatctaaagttccaccacttgtaaaaagcaccattattttatgtaccactgaggaagaaaacaatgctaccatttaagctagtaattactgtaaaacatataatttcagaaatattaatatgtaaaaagtatacatcttaaagtgatggaagttggtatcaatctctccttcctgtttctcaacccaacagc

SEQ ID NO: 169839 - DNA, 502 bp, Homo sapiens
tgggcaggcactcgtgcctcggcctggttaaaaacaaggctgagggtccccggccaacagaaaggggagaaatccccgctcccagccctgtgccctattaccttgcttctagagctgtaagactccaccccaagaggccctatcctctctccggtggtgctgttttagggcaggcctcctgaggctagagccaagaatgggaaatctaagtcctgctctgggggagggggggaaggaggcctcagacaggggagccagcgatggaaaatcagcctgcacgatgtgtcctagtcttaggaatgagtaaggatgtttgggagggggcaccgcaagggtaccgggcgggggttgggcggagaggcagtcgagagtctatgggagtaagggactccggtcccaggagcgcggggcgggatgatcgaggccgagggtgacaggagccccagtgctgggagcaccttcttgcgccccgcccccactcccctccagatctggcggccgc

SEQ ID NO: 169840 - DNA, 299 bp, Homo sapiens
cgctggtctcaggcagccagcatttctagcccacccctgttctaatatggatgggctcagaactgagctagttgacttgaaggtgaattccttatctctcttccctcctgctgagagccacagaactctgggtctgagttctccaggggctgtagttggcattacctgtgccttttcactctaccatctgccctctctgtctgaacaggaacagctctcttctgtcttagctttgaaagggggcagggactgcttcagtttcgtcgacccgcccgcgaatttagtagtagtagtcgacc

SEQ ID NO: 169841 - DNA, 609 bp, Homo sapiens
acacacaacgtttattatagtttaccatcgtacatgggcacagtttgtggttccccaaaacaatttcaatggtaacatcaaagatcagcgatgacagatcaccacaacagataacgacgaaaatgggtttcctaataatgcagaggtttgaaatactgcaagaattaccaaaatgagacacacagatgtgaagtaagcacatgctgttggaaaaaatggtggcaatagataaagggttgccacaaacctttaaattgtaaaaagtgcattatccttgaaacacaatagagtgaagcctaataaaatgaggtaggcctggattttttggatacttgatagtatctaagtttcttctcaaacacagcaaacatttcacagttcaaatttgcccatcggtagagttttctctgtggatcttctctgttaatgccacatctgtctagagtaaaagttcaattcaatattgtgctatcaacttagcaacttgttgaagatgaactaacataagtacatgctgtgtgtgtgttctgtgtgcagacacaacacaggtgagctttccgtaagcctggatcttcccaatggcggtgcttctcgtgtgcaggccaacta

SEQ ID NO: 169842 - DNA, 218 bp, Homo sapiens
gttacaattccttagttcatcttgtggatctaaacaccccagagggtagagatgatgctggcatagctcctggcctgagggaacactcaccgatctaccagaggctgggacacccaccgtggggcttgcaggaggatgatctggttttgaatctgcacagtgctggttatgagcctgtgatctccactcccttccctcctcttacagcagagacaaga

SEQ ID NO: 169843 - DNA, 316 bp, Homo sapiens
ctggtatgcacagaacggactgaagggagcaaaagtagatgcagagaaactggttaataagctgttgccattttggatgtagagatgctggcagcttggactttaggagtagagagaagaggagatatttaggatttggagatggattagatgcggggtgagggagagagagtttcaagactgactcttagttttctagcttttgaaactgagcagatggatttgctttcactgagaaagaaacactggaggaagactgggattgaaggaaggggtggaggtcagtctggatcacgctgagttgtgtgtgagacat

SEQ ID NO: 169844 - DNA, 317 bp, Homo sapiens
agcctgtgggaaaatgactgagtgcccatagatgaagtgctttcaagactgtctggcacctagaggtatcatcgcagaagccttggatatgaacagaagcaggcagaggatgaagctgatggtgtgcatggtcactgtgctcctgcccatttttgagcttctggaatacaagctgtgcctttgcctggaatgtccctcccagtctgactaggcatcttctgatggggtttgacctggttgcttctaacactaggatggacctcttggcaatctctggatatctttctgtggtttgttataatggtaattattactta

SEQ ID NO: 169845 - DNA, 338 bp, Homo sapiens
  misc_feature (50)..(50): n is a, c, g, or t
  misc_feature (90)..(90): n is a, c, g, or t
cgcatgatgtgctctagaggagtccccgggatgtcggatgttggcattanggtcttgtagttgaagtacaacgatgattttcatgtcatngacggggatttgtgtggcataggggttaaagatataacaggagggagaatataatccttaaaatgtaggctattcaggccaggtgtttaactagactaagagacacttcataacaatcaattgaacaagacccaattacctaagtggggcattatacactaaagaaattcacaaagaacaatatgaagcaaaacaaaaacaaatacaaaaagtaagaaattaaaaagcagaaatcaccaaaacaaaat

SEQ ID NO: 169846 - DNA, 461 bp, Homo sapiens
agtcggccaggagatgatccccagccagatctgaagggctctgagaatataacaagttgtaaaagggccggggaagggggagagagaaaaaaagaaaaagaataaaggcaaaattaattttcacaattaagtatattcttttttttccatgtagttaatttccagccgctcacatttattgcacattaattatgcatacagcttttgtgcaacttaaaaagtgaggaatgtgatccttattcttttatggaggctccggctgccgtgctggaggcctccgaagcttcgggtcagaggggcaggagctgagtccccctctgcgagcagccagtggcggggccacctcacccccagccagtgccagggatcttggattcccccacctcgactttcttaaaagtgtttcctacagcaggggtggtgatcgggggccgagggggcctggacgattggctggatgt

SEQ ID NO: 169847 - DNA, 415 bp, Homo sapiens
agacaacaatgccaacccctaaacactgcttccttctttgccttggtgggtatttcattttcccaccatctccttttctgtagccactttcctgctattcctagtagattataggaggcctgaggaccattcccatgagagcagcaagtgtctgagcagggcagtagggagcgcttcctgccctaggctcttagacccccattttaccttctctcttatgagacaacagagattcacagatagctgagaccttgggcttacctgagctccgatccccttcaggaaccccggcaccaacataggaaactgcctgtctatagatgtgatttgtaagcgaaacaaatacctctggctcttataacggaatatgtactgcatccttgccacaccaccacccagtcttgaaacagataat

SEQ ID NO: 169848 - DNA, 288 bp, Homo sapiens
catccaggtcagatagccactccctgctccacatgtttttctaatttacctgaagagtctcctgagcctttgaatgtgatcacctcaagaaacatgtcacagtgcttttcttttcttttctgtttatgtgttcatctacaaaccctaggattgtatgttggtgtgtgtgggtatgactcacagtggtagaaatctgagatgtgcatacgggtggcagaagtatatatatttatatccgtgcatggcacctgatgtagcatattgtaaatatacaccaatatttgcaga

SEQ ID NO: 169849 - DNA, 211 bp, Homo sapiens
gatatattggtgcttgtaccggtttttcgagggctgcagggtgaagatggtaggagagtctggagaacgggtctgctctggtggcttatggactactctgtggaaggggctgctgttctggtagcatcgaaggagctttctacgggagcgctgtcaagaggattttggtgaatttgacgtacttggtttgataactcactttgcttttttc

SEQ ID NO: 169850 - DNA, 442 bp, Homo sapiens
agtactgggattacaggcatgagccaccacacccagctacaaaccacctcctttgcaaagcaagagaaacatttaaaagagtaataccttacttggaacctcaatatataaaacagataaaaaccagactgctatgggtaaaagcagctactgaatcccacctgtcagcctttcctcaaactccagcatcaccctgagtgaggcctcgttggctagggtttgaaaatggggctcactcagatgactttgaaaggcctttgagctccatcagaccacctgccagtctaagtgatgaaaacccaccgtggcgtggaactgccctgtgcagtccccaaagtgctcattctctggctgactgtaggctgcctagccctggaggcatcacagctagcgcaggcctccacccaccacacccaccctcctgatgagggggaggcaggaa

SEQ ID NO: 169851 - DNA, 326 bp, Homo sapiens
tgttgcccaggctggtctcaaactcttgccttcaagtgatattcctgccttggcctctcaaagtgctgagattacaggcatgagccatcatgctcagcctaatatgatcttaaataaatacactaaaatgtatagattttctattatcttgttaagaagcaacatgagggaagagttatggtagaaggacagacagtttggctctccttttataatgattctggaaatactactttcacagacagtttctcaattctccctcaaaccttgattctacctcactaagtacactattaggacaaaaaaagttatcatggtgtttgcaa

SEQ ID NO: 169852 - DNA, 219 bp, Homo sapiens
gacctgggatgagagctgtcaaactccacagtctgtgtccttaacgcacgcctgagctgtgcagggcagacaggcatggacctaggtcagatcagggtggtttgaaggcagagtgggggtgggaaaacacggaagaaagaagaggaaggaaaggaaaggaacgaaagcagggaagctgggggagttctgagagggagcccagccagggggagggagcag

SEQ ID NO: 169853 - DNA, 573 bp, Homo sapiens
agctagcacttgtttgctgaactgtggaagaactgcaaggtcacgcacattattcatgataaagcaactgagctgacaagtctgtgcttaattcaagaataaccagtaggagagagagaaaacacaaggagttaaccaccatcgccggtgctctctcaaaggaagaggggttaacagatgaattcgcaaagacagctcttctggccaagaatatggatcatttgcagcacagaggcaagttgatatatgtagcatcatgacagtgaagcaaattccacaaaaactgctaatggacggagaaatttcatggagaaaagctagcagacagagctggaataaaacaatggcagtgttccttgctcaaagaagcagtcccgggctgttctttgcccagggatatcttcccaagatgaccagaaatggcttcatgacctaagggtggacagcagtgttctattgtacccacatcatcatcgtctcacacggaagagatgaggcctgtcatcaatccatcagattactcttttgatagtgcaaattggaattacagaaaggtttctttttggagaaggg

SEQ ID NO: 169854 - DNA, 857 bp, Homo sapiens
aaaaaaaaaaaaagaaaaaaaaagaaaaataacaataacaaaaattagctgggcgtggtggtgcacgcctgtagtcccagctactcgggagtcccagctactcaagcaggagaattgcttgaacccgggaggcggaggttgcagtgagcagaggtttcgtcactgcactccagtctgtggactcaggtcttttgggcttgagaacccacgtttataacagccacatgcgcatatacacacacacacacctaagagcacacccacatacgtgaaggtgtatgaggcagtgtgcacagggacacacgtgttatctgtacatgggccagccattagctgatcttggatacatgcatatttttatttatttttgttttaaaaaatattttatagagaaaagctttcactatattgacctggcaagtctcaaactccagaccttaagcaatccttccgccttggcctcccaaagtgttgggattacaagcttgagacactgcgcctggcctcatgcacatttaacacatagggcaaacagacacatacataatatacatgtcatgtaatcacagacatattgcatagagcaaagcaatcccaactctacctcttaaccaggttattgaaccgctctgtgcctcagtttctctctctgtaaaatgggtgagtgataatggtgataccgaatcggaactacatccaaaaggtttagcacagtgtatagcgcatagtatgtggtctgtacacattagctcttaactatgatcttgggtagagttttcagctttgaatgttttcttctctggaaatagtcctggtagaactggtgtcccaaggatttagtgagaaagtgatgttcc

SEQ ID NO: 169855 - DNA, 494 bp, Homo sapiens
cactgtctgcacaggaacagaaaaaactcagcacggagccaagctgtattagagacagggaaaggttacttctgagagcctggaggcaagcagggcggggtgcacaggtgagtcttcccagctcacctccacccgatccttaccaatctactcaaggaacacaacaagttcaacgagcaccttgcatttggaaaacttcacattcaggagaaatgtacaaagtggatgtttaagcctctgtggtgccaagtgctgggctgcatataatagagaagtctcccacgcctcctgcaatctgtttcagcaagattgctttcacgtggaaaggcaactgctgccagcagtgatgccaaggtaggatatataagatggggaccctggaggttagaggcgacccactgtccaggttgttggggacttcaagggacatgacatttttggtgctaagacccaggccaatcgcaataaggtgcatcggtcgcttgggagaaaag

SEQ ID NO: 169856 - DNA, 283 bp, Homo sapiens
cccagcgaacacagacaaatttcccattaatttccctatgccagagagtgacattttcctaatctatctttcactgaaaattctggcttcatgaagaattctgaattctaacttgcttcttcctgttgacccaaggctttatcttctatcccttcccggccattaaaacccaaatgctttggaccctgcagaatctcatttgtttactgccgtttaaatattcacctttgacatttttttttttttttttttgccctagggagttcctctactttctttcccc

SEQ ID NO: 169857 - DNA, 394 bp, Homo sapiens
tggctggcttaattgtttcttttggaaacttttatggggccttagtagtttgaaagtctctagcttgcaaaggtgcttgggatgttcgttctttcattttctgtggctcattaccatttgagtaatgtctgctcattcgcttagtcggctccagttttcaggaataaaagccaaagcttttcagcactgaacaatatctggggtggtcagagatccccgtagcccaacgtagaaatcacgcactgtcattatgaatctcatgcatgttccaactgttttgcatggcatggtgacaaaactgactggcgtaggctgggatgtatagaatcatcttgtgccatatcaactctgtgaagtttttgaagctgacttttcagtgtcatccctgggccac

SEQ ID NO: 169858 - DNA, 423 bp, Homo sapiens
tttattaaaattctccacaataggatatgagttctgtgaggtcagggatcttgctgtgtctttagtaccagtgcctggtatgcagtaggtactcaataagtatttgttaaatgactgaacaacggtcggctttcagattcaggggcgttggtgcgacagtaaatcagcaaacagggacacaggacaggttgtgggactgtggagagatcggcaggcagctgatgagtggggccaccagcagtgtggcacctccagccttcagggcacaggtgggtggagttatgggagtgcctaggctcctcctcccactcctaccctctgccaggatcaggcccagcctgtacagggtctatgaattgagttctttctccttcaacaccagccttcacatgggtggatgccacagaagaggagagtatgacc

SEQ ID NO: 169859 - DNA, 386 bp, Homo sapiens
gcaggctgagtctggaaggacagagatgcaggctgggggaaagatctggttctggacatgctggatttccagtgcccctcagatatgcacacggagatgtgttcagaagagaacaacaaatatttggggtcctggttcttctattgcctggcgaggtggccagggtcacatccataaaccaaggcccagaaaggacttgcctgaattcacctcccatgcaagggggagagccaggcctgggatccagatcccaacttttagtttcctctggacaatgctggtgttgcccatggcactcacataaaaccggccaagttggcgccaatgtcagttgacataaattgttgtgctttggggacatggctggtcctacccaaagctacaca

SEQ ID NO: 169860 - DNA, 723 bp, Homo sapiens
cccggctaattttttgtatttttggtagagatgaggtttcaccatgttggccaggctggttttgaactcctgaccttaggtgatccgcccctctcagcctcccaaagtgctgggattacaggcatgagacaccacgctcagccatggccatgtgcttttgattgacttggcttccttctactttttgacactgaagaagtagatgtgaatgctgtaggaagacttgcatctcttagagataagagcctgaggcactacaaggattctttagattagcatttatttatcactagtgatatctctttcactttttctgttttgtcaaagaaacctaatttgtgctgcaagtatcggggcaagttatatgttgaagtctgaacttgatgttcacaattttaatagaaaaattaagaacattgaagttgacagcaaagatacactgagtgacttgggttttggtttccaacttcagagtgagcttgccattccacacactgattttaatgtggaatggaaaggagtgattcattctttgtgggaactaggaaggaaataagaaagctatagctatttttaaacttgcattctggaagggattgtgttttgggagtcctaactgcccattcccctcaccccactaaacagttttcttgctgaaaactctgtggtccgtgtttttttttgtttgttcattttttgtttttgtttttgtttttttacatc

SEQ ID NO: 169861 - DNA, 329 bp, Homo sapiens
gttttcaacgaagacaagtgtaacacaattttgagtatcttactattagggcatcaaacatttcagccactccctaggcccagataactatgtatatttccaaaccaatactcctcaagtttgcctgtctttacctatctgatgtaatatggatcctcaaaaatcagttcgtttcaacatacttctgtaattatataatgtctttccaactagactatagctccataagttcagaaaccacatctattttacaggaataatttaccagacaagcaagctatattgtaagaatatcttgagtaacaaatttgcacctgagttttacatga

SEQ ID NO: 169862 - DNA, 331 bp, Homo sapiens
agccctgcgggagggggtgttacattgtcgcccaggctggcctggacccccaggctcagcaatcctcccgccgctgcttcctgagtagctgggacctcagtctcccgcgcccgcgcccacatccctgctgtgtttatccagaaggtggtgacctcactcctcgctggcctgagcattccgtcccacatcccaggcggtggccctagggaagtctctgcagctgagcacagggtggactctccctcccaagtgaatggagactggaaagggagaggatttctattctgttttgtgggctgtcagcatgaaatcgtacgttccatccaggcag

SEQ ID NO: 169863 - DNA, 212 bp, Homo sapiens
agacaaaaacgttaaatttaattttgcttctagaagtgcagagaagagaaggaaatgatgacagatctttttaccttacaaaataaatgttagctatgtttcagcatgtgtcatattatgtgggtgaaatggccgtctgcgatctctgtctctcctaagccgaattagatttcccactgcatgttcctaactccctgagcttactcctgctg

SEQ ID NO: 169864 - DNA, 511 bp, Homo sapiens
gagcttccaaactgtctaatttagtcctaaggtgattttgatagtcaagactctaactcgatttgcatattaccaattagaatttcaaggcaatccaataaactgggcattcaaaatttatgtccaaattggatctaacagacttttatttagacttcctaatcatcataaatcttagatgattacaaccaatcaacaggggtctttcctcaagcaatctactacaaattaaagctaaaaagtgatggaaaaacataaaacctgagatcagggtttgcagttaatgtatgtttggaaacatgagtctgggctatgactggtctgtcgaaaaccatcccacagccacagattattatacctcaatgccccccaccacccgttttctcttctttgcagccatcttccctttcatcagactacagtaacttctgccacatgacaaatttgttcattaaagcccagtctttgaaggatattaaatgagaattcctaagatgaggcacgtatctct

SEQ ID NO: 169865 - DNA, 272 bp, Homo sapiens
ctagaatagattaccaaggaaaagtataaaatgtatgtaaagacttaggtgacacaggagccttcagaaataaaaacccaagagaaactgcatgttcacactcagattcaacgaagagtgggtggctgtgcagaaatgtgattggacagaagggaaggatctaatcgtagactggatggggaagccttgccccgtgtgtagctttcttccttccaggtacagggcagggcccttctggaatgaaggtctgggatccattttcagataaagta

SEQ ID NO: 169866 - DNA, 507 bp, Homo sapiens
agaggatccaggcaagcctacagcagagattagaataaagcagaataactacacaagaaatacttcactaaaggaaggacggaaagaaggaaaagaagacaacaaaacaaccagaaataaaaaagcaaagtggcaggagtaagtccttacttatcagtaataacattgaatgtaaatggactaaattctccaatcaaaagacatagattggctgaatggattaaaaaacaaaaaacagttaagaggttccaagatggccgaataggaacagctccagtctgtagctcccagcgtgagcgacgcagaagatgggtgatttctgcatttccaactgaggtaccgggttcctctcactggggcttgtcagaaagtgggtgcagcccatggagcagggaggggcatcgcctcactcgggaagcacaaggggtcggggaattccctttcctagcaaagggaagccgtgacagatggtacctggaaaatcgggacactcccaccctaatactg

SEQ ID NO: 169867 - DNA, 481 bp, Homo sapiens
caacaccaatatacatatgacacttttctagataataaagtataaaattaagagcatataggcagtaggaataaaatagccacaggtaataagcaactgctggtcacctgttgcccacctttcttttagagaccagatagtgaacaaaagatgatggggctacaggagaaaaacagctgtcttcagttctgtccacacacttgaactccagtatttagagatggagaaaatagattaaaagcaaacatattttgctatttggtcttggccctaatggtcaggctgtatttatctgttttctcctgtggtgtgggggactatgtgagtctaagcaccaatcacatgcatacatgtctacaggtatttctgcattacccaaattctctcacaaaacatcaaactttaaatcaggggaagaaatcagtacctagagggtgtccactgttagaagccaactggtagtcaacctgtctctgaatcc

SEQ ID NO: 169868 - DNA, 454 bp, Homo sapiens
gtggtggcatgcgcctgtaatcccagcaatttgggaggctgaggcatgagaatcacttgaacccaggaggcggaggttgcagtgagcagagatggtgccactgcactccagcctgggtaacagagtgagaatctgtcaaaaaaaaaaggaaacggaaggtagcttctagccaaatctgggacaactgttatgtttgaaagtatttcacagtaaagagttttttgttttttctttaaatactacatccaggctgggcacagtggctcacgcctacaatcccagcagtttgggaggctgaggcgggtggatcatgaggtcaggagtttgagaccagcctggtcaacatggtgaaaccccatctctactaaaatacaaaaaattagccgggtgtggtggtgcgtgcctgtaatcccagctactcgggaggctgaggcagaagaatcgcttgaacctg

SEQ ID NO: 169869 - DNA, 207 bp, Homo sapiens
aggtattgcttggcatactatagaccgccattgcctaaaccatgaatttcatcagtgtgttctataagttcaattttgtttctttccatagctgactggaatagactcccattccttacagcagtaaggtacaaaaattttctctaaagcagaatcaattagaatccagaaactgttgtcttctccagtgtacatatcctttaaaat

SEQ ID NO: 169870 - DNA, 546 bp, Homo sapiens
tggagcagttggggaacggaataggagagtaccaaaaaagatgcaaatgttcctataaaaaccaggaggcagtaagcctgctgcctggagccaggagactggacagtggagaaaatctcttctcagatgctcctattcatttgatggctaagtaaattattttgtagtgttaaacatggacgttgttgttgtttttaaatggtgggaaccttcccataactggcttattttctcatcggtctgtgtctcctattcttcagaggttgttcttaacgtcctccattcacctcaaatttcctacccctccaggttgccagttactgccagtcagaaaagaagctttagatgtcaactccctcaaattttgcctccaggcctgcacaattaacctgtactcacattcagtgctttgtcactagtgaagggcaaaccacatcccagtcccactttgttccttattctcctgctctggaaccacctcctcctccctgctcctgaaccacctccttcttcctgctctgaaactgctgaaacgcacctccttca

SEQ ID NO: 169871 - DNA, 341 bp, Homo sapiens
ctgagaatgccaaccgctgctcccatgggagactggatgaaagggcttatctcttgcctcaagcctagtgagtgggatttcagagaaaccagtggcagagcttgatatgtgagctcagtgctgatagggacaaaaggtgagagaactgctgaaggagattgggtcagcagaatagagagctatgattggaaatatactgtggtctgtcaacagagggccaggggtgtatctttcccatgaacaagacatgaactatagaagagagggttggtatggcgctgctgtagatcctgccaagagggcttttgggagtggtgaagaggcttcagcagagggacgct

SEQ ID NO: 169872 - DNA, 379 bp, Homo sapiens
gttagatttttctacaccaaacagatggaagacgtacaactgtgcagtatggtatctcctgcccccctgtggacgccgacggagttacctgtggagaaccaaaacaatactggacaggagcatgcttacaggcactttcaaagttgagcaagggatagtggcatctattaacataattttaagaaatcagagagtcatgtctaaggtatgtgtatcatttggcaacaaaacatccataaatgagagatctgtccacccagagatacaggaccaaaagcaaatagaattatcctgttattatctcaaatcggtgctggtattgttttaaaattattattttacaataatctagggagagaagattctcttaaataagtag

SEQ ID NO: 169873 - DNA, 392 bp, Homo sapiens
gcctgccaggatagctctgctggatgtgtgggcgacaagatgcctggctcctggacacttcgtggggagggtgtcgggctctccccacagagcactggaggatctcaccacacttctcaaaaggactggccattaaagtgccctggggcacagttgctcgggtcatcagggagttcggtgttgactctccctttggtctggggccagcactgaaagagccactccagggcacccatagctctgcctctggcgtgcgaaggaggctcagaggcaggtgctgcacacggagggagcctctgggtgaccagggagtcagtgacccctcggggctgtccccttcccccttccagctgagaggccctcacctgtactgggcctgaagctaccgctgg

SEQ ID NO: 169874 - DNA, 363 bp, Homo sapiens
gattacaaagattgtttctgtgctttattctagaagttttacttcttacatttaggtctttgattcattttgaattgtgatgcgttaattatggagtgaaaattgattttcttccacacagatacctgttgtttgaacaatattggttggaaaaacttttctcatttgactgccttgacattgttattgaaaatcagctgcttttttatgtttggatctttttctggattctattctgtctcattgatcgttattagggcctctgtgttttgaatactgtagctatataggaagtcttgacctcaggggtgtctttctgctttaaatgtgattttaaagattgctttggctatttgaggtaat

SEQ ID NO: 169875 - DNA, 167 bp, Homo sapiens
cgttgtgcacatcacatgtaccctagaacttaaagtataataaataaataaaaaagaaaggcagaaatagaggactctccctagaaaggcagagaggactctcatttttctcacgaagttctgcagaaatatttactctttcaattatgtgcaattgtaactttgaa

SEQ ID NO: 169876 - DNA, 522 bp, Homo sapiens
tgcaaccacaacttgagtggatctcaagggcattatgcaacatgaaaagagcccatttcaaaaggttgtatattgcatgattccatttatataacagtctagaaatgacagcattatagagatggagaacagattagtggttgccaggtgtgaggaatggggtggaggagggaaagtgtgacagtaaaagtggcacaagggagatctttgtgctgatggaatagttctaggctgatggtggtggtggttacctgagtctacacgtggataaaattgcagagaacgatacacacaaatgagtgcatttaaaactggtagaatctgaataaggtccatggattatatgaatatcagtgtcccgattttgattttgtactaattatgccacccagataattaaagagcttacccatatcattatgctaactataaagccgttaccattgggggaaactgggtgaggggtacacaggacctctctgtattatctttgcaacttcctgtgaattgataatcatttca

SEQ ID NO: 169877 - DNA, 104 bp, Homo sapiens
tttgaagccccgtgagtcatgcaagtggagattccaataggccgttcattgtaccaatctaagctaaagctaagacttgagaaccatcagtacacaggtagtta

SEQ ID NO: 169878 - DNA, 504 bp, Homo sapiens
tgagaagtcagattctgggtatggtctaagcagcatctggaaggtatgctgatggattggatgtggcaggtgaaaggaaaaatcagggtaacaccaagggttttggtctgagcaactggtggaggagtcattattttctaacagggaaatactacaggaagtacagcttttggaggtggttctgatagtagtgatgattctgaggtctttcatttgctgtgtaataggctctattatcattgcaaccatgaactaaagaaacctgtcttgaaaaggaatgaaagctactatgagtaagcactactagtgacaagaaaattcacaactaggccgggcttggtggctcacgcttgtaatcccagcactttgggaggccgaggcaagcagatcacctgaggtcaggagttcgagaccagcctggccaacatggtgaaaccctgtccttactaaaaatacaaaaattagccgggcatggtggcaagtgcctgtaatcccagctacttg

SEQ ID NO: 169879 - DNA, 352 bp, Homo sapiens
agaaataaagtttaactccaatgtacactttaacatgattatgctgtccccttgccacagggcttgggagaaattagactaagccaaatcaggtagccactcttgagaaaagtacataactaggctgggcgtggcagctcacacctgtaatcccagcaccttgggaggccgaggcaggaggattacttgagcccaggagttcaagaccatcctgggcaacagatcaagactgcatctcttgctaaagaattaaaattactaaaaattaaaaaattagttttcatttttaaaattaaaattactactactaaaaattaatttaaaaaatttttttactaaaattaaaaattaa

SEQ ID NO: 169880 - DNA, 357 bp, Homo sapiens
tttgttctgcaggggtgaactaaccccgggaggtgtctgggaagaagagtaaatagcttgggctttgtcccaaataagaaccagggctaatggctaggactgggcctgtacccacccgctgtaggaaacctggggtgtgcagatgaacatgaccagcagccatagcccaggggagctctcagctgtgtccgagagagggtggcacaaacttagcatccttgaggtgggattttgtgttacccttcatgatctcagactgccctcctgcctctacctgtcctggaaagcagcacaggctttaaatggcagagtgagaatgtcacacctgttgctgctgcatgtttctagtaaagtcag

SEQ ID NO: 169881 - DNA, 304 bp, Homo sapiens
aggaagtggcagtagccaagatcacacggtccaaggacttcattgttcctgacttccaaactcagaatttctgatcaaatacctactaagtgaatattaatctgaagaattatgtccaaacttcattcactattttgttttaattctgctacaagcaaggttttcccctggtcccgccaccctctttttggccctaggtggttttgcttgtgaccttcatgtctgttcttggttcctttccattcccatgccagccctcattgttcactcatgacaatagccagtttcagacagctcctgggcc

SEQ ID NO: 169882 - DNA, 114 bp, Homo sapiens
tcatccgtttagctgagttacctgagctaaagcaccagactccctcccttgaggtgacaccaaggaatgtccctcctgggatggcagtaacactaccctttgttgctcaaggca

SEQ ID NO: 169883 - DNA, 105 bp, Homo sapiens
cctcaactccttcctggggagggcatagttcacatctccttctgcagggcagccttctcctcacagactcctggcccttcagcctgggggtgatagccaggtccc

SEQ ID NO: 169884 - DNA, 315 bp, Homo sapiens
aggaaacttccaatcatggcggaagatgaaggagaaacatgcatgtcttcacatggcggagcaggagagaacgcaaagggggaagtgctttgaaacaaccagatctcatgagaagtcactcactatcatgagaacagagaacagcaagggggaaatccatccccatgatccaatcaccttccaccaggaccctcccctaacattgggaattacaattcaacatgagatttgggcaggaatacagagccaaactgtatcattctgcccctgactcctctcgaatcttttgtccttttcacatttcaaaacacaatc

SEQ ID NO: 169885 - DNA, 293 bp, Homo sapiens
gtttattcactgcatgtatgtcttttggaaaatgtctgtttacatttgcccacttttaatggggttgttcttttcttgtaaatttgtttcttatagatgctgtatattagactttatcagagagcatatattttagaatcaagtgtgcattatcctaaattaaatgaaaacaaattatcagaacatatgatagaataatgaagcataacaactaaaaaaaaccatattacatttcagggccaatgatctaattttgcttttcctctgactgttaccaggagggcagggcatgc

SEQ ID NO: 169886 - DNA, 363 bp, Homo sapiens
ggcgccccgcccaccggtcacccagcgaacgcggggcggggccgctgctggcgctgggccccagggcttgcagagagagggccacgccagcggaagggccggccaggaggtggcaggacttgccttactactgagtcgccggcatccccgcctcttccggcctctccgcccggagccctagcgtggaacatgacctttcggaccctctgggtggagacacagcctctgcctgggctgtgcagtgaggtggcaccaccatctcaggtcgtctggcccagtgcatctgtagctggcatgtgacttccagcaagctcctgcccctgagcgctgggaggagcaggtccagcaataattttttttttt

SEQ ID NO: 169887 - DNA, 821 bp, Homo sapiens
actgcactccagcttgggcgacagagcaagactccatctccaaataaataagtgaataaataaataataaataaaaatttaaaaaaggaagtgggcagtggaccacaggatctaagccaaatctgaggggttggatcattgatttggaggtcctagtgggggtaaagaattgttggagtcaggactaaacctggggaaggagtgtattccggtctggacaacagaatgctcaaagttaagatagtggaagaggttgtggttgttggtctagactatagaacactcctgtctaatagatcaagccatgtgtgtaatcatacattttctagctgcctgcgctagagaagtaaaaagtccattttaatatgtttaatatattaaattcaatatatctaaaatctaaaagtttaccacgtggtacagccacatttcaagtgcttagtagctacatgtagctactggctgctgtgttggacattacagctgtagaacggaaacctgtaggtgtggttggctgagatgggaggggcaagctaattggaagagaggaggtcaaggacctggagttcagggtattgcgaggataatcaggaagtatgagtggcgtcagagaaagtgacagtgggccagctaggacaagctgaagatgataaaaggttgagaatgtggaggattttgttgactgagcacaagctcttagatctaagtttggggcattaagggtggaagaccgtttgattaaagagatcagagccatgtggagatgaaaaataagggatgacctggaagtcttgggcttcctgtgttgcacaagcaaacag

SEQ ID NO: 169888 - DNA, 684 bp, Homo sapiens
gtctcaagaaatcctgaaacatgtgtagccccttgagggtagagtcgatctaagccttattcaaagtgtagcccaaccctagcatcccgttcagcaccaaagacgctcagtgcctgcttgttgaatgctgtttcctcaccttaatcagaaatgggagagtatccctgagtgtggagctgagtgaagagcaaaggcagctttctgaggcatatttcattgggaacacacacaatatgatttgtctgtttgggagggtctctgagatttatgtctattggattggagaaagaaaatcttttctacatcctcacctacttggagaacacattcactgatctaagaggctggatggaatgggcagctcttggcaaaggtaaaatgcacagttatcttatgaaataactggccaggcacagtggctcacgcctgtaatcctagcactttgcaacccaaactcagttgtgtatgttttggttcaacttactttacagatttggcagaatgtcgtggtctacttattttccaagttgtgtatgttttggttccacttatttcaccccattacccaggcaggtccttctgtaaagccaaacagtgaatattcaggttgtcaggcacacatctctgggcagctactgactctgtggtgtgccaaatacagctacgtactgtgtatggggacgg

SEQ ID NO: 169889 - DNA, 469 bp, Homo sapiens
tgacacttcacaggtcttcccagatgatttgctgctttacattgagccagtgacttctgttcccttagtaggtcttcttccacttccaagtgtgaaaaaccaccagtgttcctagcagctctctccctgttcacagtttcattcacatgcatatgaaacatcaatatctccaaagcatgctccagattctatctcagtatctccgaagctggcctcctaactacattcaggacagccagtctgatgtcctcaagcatggtataccagatcctgttcttgcatccagctccttgcagtggagaagtcttgatacctctgactattccttgcttctttagtgtgtttcactaataagtctgctttgacttcattccattttctttccaaagatacacgtacaattatttttattccttttctacatatggatgtcgacgcggctgcgaatttagtagtagtaggcggccgc

SEQ ID NO: 169890 - DNA, 215 bp, Homo sapiens
  misc_feature (3)..(3): n is a, c, g, or t
tancacaacttcgtccatcatgacctggcccagacatagttcaccatcttacgggtcctaacacgtgcgtatgggccctcggcggcgtgtgcagtctggtcgctcggcgtgtgcaccgagccaccacacctggctgagtttttttgtttgttttttaattattgccattgactctgctgtatctgtcaaaacttttttctctggtgtgtcgtaaa

SEQ ID NO: 169891 - DNA, 113 bp, Homo sapiens
cactctgtccttctgcagcacctggtgcactggggccacctggatcctcgactgttgaggatcccgatgctctagacccccactcaggggaggttacgactatgtgccacaca

SEQ ID NO: 169892 - DNA, 295 bp, Homo sapiens
cataaataacatgcccatgggtctaggaaagtgtttttaaaaaacactgccacataactggaaacagttactttggcttagtcttccacaataggagacctcctctcagaaagtctttgtaaccattagtatgtcaatttctccaaccagtttctctcatcttgccccttcctatatctgagtctggttctttcctctttctgcttcctaggggacttttcttctgggttgctgcagcctctaaactgagatgtgtcttcccacctgaaaataagcccttattccaagaagccaa

SEQ ID NO: 169893 - DNA, 653 bp, Homo sapiens
tgaacctgacgactcatttcaatagaataaggcaaaaatgatgggattaaatttcactaaagcagtgaaagactgataaacagaaaactgtagacactgctataagaaattgaagacataaattactggaagacatcccatgtttatgggttgaaagatttaatattcttaagaagacattactaatcaaagcaacctatagactcaatgcaatccctatcaaaatctcaagggcattttttgcaaaaatagaaaaacctatcctaaaattcatacggaatctcaagagaccccaaatagccaaaacaatcttaaagatgattaatatttcctcatgtcaagttactaacaaagttacagtaatcaaaactgtggtactggcataaaaacataaagaacaatggaacagaatagacagcccagaaataaaccctcacacatatggccaaatgattttcaaccagggagcccagtccagttaatggggaaaggaatcttttcaacaaatggtgctggaaaaaactggattatcgacaggcaaaggaaaaaagttggacccttaccttacttaaatacaaaattgattccaaatggatcaaagacctaaatctaggcactaaaatgattttttaataatagctatcctgcttgac

SEQ ID NO: 169894 - DNA, 416 bp, Homo sapiens
atgacagagcacgaggtccgcacaagaaattaaccagatgcagccacttgatcttggacctcccaacctccagaatcatgagctaaacgaacctccttgctttataaattactgagtcttaggtattctgtgatagcaacacaaaattgactaagacagtattttgatttcatttcgcatttatttattgctggcatacagaaagaccacttatttttgtatattgatgtttcacctagtgaccttgctaaatctacttattatttctaatagtttgaagatgctcctgagtttcctaggtacttgatcacgttatctacataaaatggcagttttagtccttcatttttccaatgctgtgtaacttcctaattttccttctatttttgccttattgcacttgctgggccagaaaa

SEQ ID NO: 169895 - DNA, 256 bp, Homo sapiens
tactttaggcttaatgcaacgtacattctctacagaaactattcaactctgctctggcagtgtgaaagcagtcagaaacgtacatgaacaaaagagtatggctgtttcaacaaaactttatatacaaaaacaggcggcagtggatttggcctgcaggccatactttgctgacccctttggtagaagatattaggatggtagttggtaaaggtaggaaatgggagaatcagaaaacaatcgagaaagtacggttgca

SEQ ID NO: 169896 - DNA, 327 bp, Homo sapiens
ccatttagacatcattcggtgcaagaataatgacagcttaaagaaggagaaaaagaatggctgctgtgaatcttcatgggtgatgccgttcagtgctggaaagggacctcctggagccatgctagttacgttgctttatttttaatatgcactttagctgaataaattacttaccttttactaattagttttggaacagtgaaccacatcaatcaaatctgtccacttgaccagaaaagttagtaatttagtaaaagcatggtttatgctgggcccctgccttgctccccgtctctattttgtttgttatattgaatagtcaaggtg

SEQ ID NO: 169897 - DNA, 236 bp, Homo sapiens
ttgccaagcgtagtacccaaatgggaagcagtttttcagatgttgcgatttagtgttgggtccttcagtagcttgacattttggggattggtactggtagagtatcttgtagtactaataatcaaatacagcatcatttgaaatgacaagggagccattgagtaggacattaggaggaggaaggactattctttggagtggttggtaatcagagtcttgggtactacgcttaggca

SEQ ID NO: 169898 - DNA, 592 bp, Homo sapiens
acgagccactgtgcatggccaacacatgtagacatttaatcaaaaccacagaaaaggtcccacttataaatggttcattcatccttgatacatatcttacagagattgttggtttttaacccatagagtgtactttaaaaacaagaaaattttatgactggctttcaaatcaggattgtaactgcataccttaggtttgaaagaagtatggcacatctcctagccctatagctatggtgtcagataaaaagacagcatgctccctgccccttctttcattctttctccctaccttctctcctaatcgaagagggggaaattatatcattttattcaagtaagccatgctttccaaaagtatgtctcattatgctaaagagaaaacaagaaaccaccaatgaataaccctttactatctatttaattatctttctaaaatatttacaaaggcaaacaaaataacttgccttgtatcagtaccacttagtaactattcggaactagtttggagctctgcacatgcaagtttttagcggtttctctgcaaaaaaatttaaaatgtttctttcagatagactgaaatattagaggc

SEQ ID NO: 169899 - DNA, 319 bp, Homo sapiens
tggcttggtctttcctacactacatgcatttttttttctactgcactaagttttgtttttattatttattagttccttctttctttaggtttaacttcctgttctgtataaaaaaaatttcttaaaaggtctactcaatcttgcctttgaacaccttgtaaaaagtaagcatatttattttaaagtctgtttctgataatgtcaatatctggagtccctttaggactctttctatttgttgtttctgctgggttttggtcaactaattttgtccctttgtgcacctggctattttttattgtgtgttgggcccacattt

SEQ ID NO: 169900 - DNA, 258 bp, Homo sapiens
actagaggttacgtagggcgaggacaatggcgggtgggtttgctacataacgaagaggtacatagagccctgggcacacaggtgcccaccaggacctggtatgccgtaccacagtgctgatcgctaccccttccctgggaccacaggcagcctccccttctagcaggagctcccagtctccctgagcagctttcctgatgacatcatacttcctttagagtatgtatgggtgtcctagagccaccatacccacggccc

SEQ ID NO: 169901 - DNA, 641 bp, Homo sapiens
agtgaaaacacacaactgaaaaagtccatgaggactgagtggaaattgacaagaacaaggggagttcatcaggaacaacttttccaggaaaacttgaggttcagatttgagaggataatatggctggatgaataggagaaaataagctactccagaggaaatgaaggaagttaagacatggaatcacaatccatttcacctctttgttcttttcttttaaccttaactgcaaccttccccatagtaagcagaggaagagtagatattgtttctgtggttaagttacagaaagtgtgttgcttgctaggtactgcaaagtatttttctgttagtgacaagcaaatcatatcaaattgttcaaactcaatttcaactcttataagaggatagacatgggttttgaggaaatggttatcatttgccttgttattacctcatctttgagccccaacatgtgcctttactacttatcccagtgattctttcaaaaaattatttaataaatcaaaatattccataagtcaaaatatcttcaggttgcggatttacctttgactttcatcttaaccaattgtttaaaattcccccattctcctctcatctattgtgtataaattcagattaaaatgtagttaaattca

SEQ ID NO: 169902 - DNA, 538 bp, Homo sapiens
atacatagacattggtagaaaataacaaaaacaaaattaaaatttacaaattgcttgtatttactgatttgcatgattttcacctaaactgcagaaaattgtccataggagtttttactagtagtattttatctttaccactgatctaatggtagaaaaagaaatagagctctaagagaggtttttttttcttctttttaaaagttatcacttgtcttttgtttacatagaaaagtgtggctttggaataaattatattacttgacccacctcccacaaaagttttgcttaaactcggcctataggctggaaggactaggatgaaaaggggtattgctaatggatactggtttctttttgagtgatgaaaatattctaacatttattgtcataagaggtgcagaactctatactaaaaaacatttaactgtgtgctttaaatgggtgaattttatggcacgtgatatatatctcaataaagctgtttaaaaaatcacctggtgacgtgaatccattggtcaaaaataaaataaagaga

SEQ ID NO: 169903 - DNA, 467 bp, Homo sapiens
aactgccccgatgatccagtcgccttccacctgatccccaactcgacaagtggggattatggggattacaattcaaggtgagatttgggtggggacagagccaagccacatccaaaccatatacacgcccaagatgacagttttccatgtctgaccctgcaatgacacaagctaagggaaaggcatagaaggacccacacttccacctaggcgtttgcacatatcctgtctgtaactccagtgggtcttcagagacaatctacaattactttctccaataaaaaaaaaaaatcttgagtgcttcgtatagaacagatactagatcaaaaagatgattataggctgggtgtggtgactcatgcctgtaatctaagcactttgggaggccaagacaggagaattgcttgagcctgggagttcaagaccagcctggtcaacatagtgagacctaagctctacaaatagta

SEQ ID NO: 169904 - DNA, 458 bp, Homo sapiens
caggagaatcgcttgaacccagggggctgaggttgcactgagccgagatcatgccattgcactccagcctgggcaacagagcgagactccatctcaaaataaataaataaataaataaataaataaataaataaaataaaaaagaaaacagtatgcagagtacaattccacttctgtaaaaaaaaaaatctgttttgtgcttacagagaataattctggaaaatgtaaataaaaattttaatcctgagttttcttgagatactgggaataagtgacatttatttattttacatatttttattatactggctttatttttattatggaggttaatattttataattagataaataaataatttttgaaagaaaagaaaaaatgggcccacactaacccatgctaaatgaggtcacagcagtaaatcatcctgtgggcagccgtcaagtctcatggttga

SEQ ID NO: 169905 - DNA, 137 bp, Homo sapiens
taagtagtttaatgagagtcctgtatttttgtatctactgaatgatgtggtgacagaaatttgcattgcttttactattagtaaaattagtaactgcagtagttatgcaaaagctaatatatgtgctgccttctgtt

SEQ ID NO: 169906 - DNA, 341 bp, Homo sapiens
cgggataagtccaaggagaattagcattaacaaaggggagtgcttctttggggtaatatgcatagtgctttggggaaatgataaatagactgagttggaaggaagagaaagtttgtgtattaaatggtagataatatgattggagaagtaaatttggactagccttttcatttgagaaacataatcattgaacaattacagagaattctgagcacatagccctgtgctagatacttactgagtatacaaagaggtgaagtataaagctcatgccttcaagaagcttttgagtcctggattcaggaagtagtcataaatatgtaaatagtgtctgaaagtga

SEQ ID NO: 169907 - DNA, 273 bp, Homo sapiens
tagacccaacttacacatgcccttatattcctgtgcggaatactgttttatgtaaaatcttttcagtatcaaatacctactcctagctctgtagctaatggtaggggttgctagggatgaatgtggccgtctaagcctgtcccctaaaatgaggctgtaagatgcacatttggaaaaggacttgtgcttgggcaagtgtctgaagcttatctactacagtaaatcatcagatttgaggtcaaggaaagaaagtgggcttgggttgtttttgca

SEQ ID NO: 169908 - DNA, 331 bp, Homo sapiens
aaaatgctgggaattgcaggcgtgagctaacgtgcccagcctgtcctctcttaattaatatgctcattctgtatgtctaagcctctttcctgcgtctaagccgaattaactgctcacccatctgttactatagcacttctcacattctatatttatctttcatgatagactaactctttgagggcaagggctatatacagtaatatgcccaaagttacagcaaacaagatttagatttaaatatgagctaatcaagtaaactagcttgtggtctaaagacccagatttgaatctggccactagtccaagtcacctaattttttttttcttt

SEQ ID NO: 169909 - DNA, 139 bp, Homo sapiens
gcctctttgccacttctttacctggaaaactccagttggtttatgtcatcgttcagggatcaccttctccccaagaagcttttctagccccccttccactctgacaggtgactcctctgtgctccctcaagccctagtg

SEQ ID NO: 169910 - DNA, 106 bp, Homo sapiens
aggcaccaatgtctcacctgcaatgtggctatacttatgtagcagatgctgtctttttctgttttctgtaccccaggcacctagagtaccacttccccacccatca

SEQ ID NO: 169911 - DNA, 1756 bp, Homo sapiens
tccatcttttcaggcacgctccgtaccatgactggctcataacatggttgcatgaggctgttactcaagggataggagtggtagccataggagtcagttgtacagggcagcgggtcccagctggcatgctgttcccggcacaggggaggtcgtctttgcctcacggggttgctctcatagaggcgggagtcggaaatgctatccatccgagtcatcaccagggcacggcctggctggggggttgccccaggatggatattgggaggcatggggtagtctgcaggacagctggaacgtgttccagttgatgggtgctgggcatgcagagctaagtgggggactgactgtttgtgggggccttgcttagaatcctctgggccatagctctgcactcgtgttaaggcttcatggtaaccatgaggaaaaggctgaagtcggttctgggatgctgagcggtgcagcttcaaattgccttcaggatgggtatcagctacagccaaatacacgttgttgtaagaggaatagttgtcattcctggtatggctcacacggctgtcagaacagaggttaggattccgggcatacaccccccggtctacttcagccatgtaatactctcggttatgcatgctgttgatgttcagtttggagaagtcacctaacattgaatagtagccatggtcccccatggattcaaactttgggtattgctcagcatagctaataggggtcccatggctgttggtaaccaagatgggaggatactgcatgctggccatatgctccaaagaggccttctggtgggggaaatgggaggatcctggcactgggctgctggccgaacgggtgttgagtgcacccactgcatggcttttggggggtgggattgtgggaacacttagggcagtcacaagcgaggggacagaactagcctcaggcttacgggcaatggacagccattcctcaggctccatagccacagaccggatgctgggatctgattggcgcttgggggccacacgtttgacctctgaggttatctcacctttggcactagacatccctgtgccacacttggccagggtgccttcactcatagttttcactgtggacagtttggcactgatgcggagctcatcagccaccgaacgctggggttggttggcccgctccggatggtagtatttgcacttgtggccgtaggtgcattttttgcctgaaaaataatgccttggggtaagactctctctcagtgatggaaccctctgtgccaaaaactgttgtaacaatctggtcactcaggttagggttttactgtttggggtaaaggcagaaaattaactgtccacaaagatgagagacagacaacaccaaggaggcatcatacactgtgatgggagagagaaagtggaaagctatggagaaaattgcagcataaaagctaagagctggctggatgtggtgactcctgtctgtagtcccagcagtttgggaggctgaggtgggtgaatcactttagcccaggagttcgagaccagcttgggcaacattgtgaaaccccgtctgtaaagaaaaatacaaacaaaattagctgggcatggtggtgcacgtctgcagtcccagctactcaggagcctgaggtgggagaattcttgagcctggaaggtcaaggctgcagtgagccgtgatcatgccactgatctccagcccaggtgacagagcaagagcaagaccctgtctcaaaaaaaaaaaaaaa

SEQ ID NO: 169912 - DNA, 477 bp, Homo sapiens
gagtacttttttagtttattttaatgcctttaagtttttggtgacttttacatttggaaaattacataaggtaaattatttgtagagattacaaagttagccatccatatgattgcacttttactataaggagatgccacacagttctctgcccttgatgacctcatattatttttgctgcaagagaaagcaaacaaatgacaaaaggtgaatatgaagacaatggaaaatgttatataaataattgccactcaaaagtcattctttaattcctgacaaattttggatgtcaactcaatgaggacaaatttgtgtaaggataaatttgtcaacttatcacagatgatggagagtgactttaaccaaatcatttctcttctctggtcttcagtttcttgatctgtaaattgaaagactcagtgtagctggagctctgatactccttcttcactgcaagattgcatgattttgtgaggt

SEQ ID NO: 169913 - DNA, 576 bp, Homo sapiens
tagtcgtctcatagaggatcccctgccgagatgcatactctggctttgtgactgatacaatgttatgtgctggatttatgtcaggagaagctgatgcatgtcagaatgattctggtggaccactagcttaccctgattccagaaatatctggcatcttgttggaatagtaagctggggtgatggatgtggtaaaaagaataagccaggtgtctatactcgagtgacttcttatcgcaattggattacatccaagactggactctgaaaaaaaaggaattatacaaaggaacataaagaccaccatcaagaaactgaagacaatggaaaatgttatataaataattgccactcaaaagtcattctttaattcctgacaaattttggatgtcaactcaatgaggacaaatttgtgtaaggataaatttgtcaacttatcacagatgatggagagtgactttaaccaaatcatttctcttctctggtcttcagtttcttgatctgtaaattgaaagactcagtgtagctggagctctgatactccttcttcactgcaagattgcatgattttgtgaggt

SEQ ID NO: 169914 - DNA, 1037 bp, Homo sapiens
atttacaacagctccatgtcaaagatagttttcaaaatagaatttcagtggtttatagttttgtttgggaacctcatgccttaaaattatgagataatcaccactaagaacagtgttgtgacccagcaactgagtgtattctaattacattgtgtcctctaggaaaaataattcaaaagattggactgtcaactttggaattgtagtaaataaaccatatatgacacggaaagtccaaaacattatttttcatgaaaattatagcagtcctgggcttcatgatgatattgcccttgtgcagcttgctgaagaagtttcttttacagagtacattcgtaagatttgtcttcctgaagccaaaatgaagctctcagaaaatgacaatgttgtagttacaggttggggaacactttatatgaatggttcatttccagtgatacttcaagaagactttttgaagattattgacaacaaaatttgcaatgcctcatatgcatactctggctttgtgactgatacaatgttatgtgctggatttatgtcaggagaagctgatgcatgtcagaatgattctggtggaccactagcttaccctgattccagaaatatctggcatcttgttggaatagtaagctggggtgatggatgtggtaaaaagaataagccaggtgtctatactcgagtgacttcttatcgcaattggattacatccaagactggactctgaaaaaaaaggaattatacaaaggaacataaagaccaccatcaagaaactgaagacaatggaaaatgttatataaataattgccactcaaaagtcattctttaattcctgacaaattttggatgtcaactcaatgaggacaaatttgtgtaaggataaatttgtcaacttatcacagatgatggagagtgactttaaccaaatcatttctcttctctggtcttcagtttcttgatctgtaaattgaaagactcagtgtagctggagctctgatactccttcttcactgcaagattgcatgattttgtgaggt

SEQ ID NO: 169915 - DNA, 526 bp, Homo sapiens
cagctgccaggaaactacatgcccaccctcccagtggaaggagtgactcagtgggccagtaaggcaggcgaatggtcactgacttctacagctagctgtcaccttgctcgctgtccttcctctgaagttgttcttaagcagaacacgttctcctctctgccagtggtgccatgtgggggcaagctcaccaaggtgcaggcaggacctccccacttcatagcagaggcctctgttctctcccctctcaagaaactaactagctgagacgggggaaatcaaaggacaaggaacagcccattccatccgggtcttcagcccagctttgcaagcaaagagctaaaactatattttaatcttcttctgattcctgtgttcactttgatccagaattagcctgaatgtctaatactgatgccaggtttatcattgaccagccttaaccctacccacttgaggacacccaacccagttgcttcacatgtggtctgagccccagtgatgaaactgtagcttcttcttgaagctc

SEQ ID NO: 169916 - DNA, 289 bp, Homo sapiens
tcttttgcttttaataatttaaggtaactccttcaaagatattgcaggtctagttcacaaaacaaattgtacagtgagctgagagcaactttctctgtcctgagttttgatgaagttgttttttttaaatcatgatcaggatacaggtcctcaattagtttgtctggaatttagtaagcggagtgctggagattggagatcagagtagcatgaagattgaataagatggggattgcacattctggtttacccagtttggaagagtaatgcataggtaatatacaggttg

SEQ ID NO: 169917 - DNA, 155 bp, Homo sapiens
agacactggcatccacagaagtaaaaataaaaagtaaggtataatttaaatttcacacggtcatggtcacatttttcagctttttgcacctatgttgtataaaaaagacaaaaatgcctttagaggctcaagttttcaggacttcctgaagctgt

SEQ ID NO: 169918 - DNA, 126 bp, Homo sapiens
atatctgccaccacaaaaatatacttaagtacatagcccactgacattataaagcaactatacaatcaaatctacataaaaactagctattaataagaacacaatgacaggatcaaatcctaacat

SEQ ID NO: 169919 - DNA, 306 bp, Homo sapiens
tactctagacgatcccatttcgacacttcagggaggggtgtaagatgaggacaaacaaaaagagaatcagcatatttctgggttatggaggggatgagatgaggaaaaagaaatacagcatgacagttaggagcgcagattttagtgttaagagctcttgttcaagactgtgctctaccactatggcgtgactctgagcttgcttttcaactaggcctcagtttcatcaacttaaaaagggataataatataaggaaatggcttagtatagtggcatactgaaaacactaaaaaaaaaaaatcagg

SEQ ID NO: 169920 - DNA, 469 bp, Homo sapiens
gcgacacagaagtggacagtgaatctaggaagacagcagcagacaggatccaggaaccagtgttgagtgaagctaggactgaggagcaagcgagcaagcagcagttcgggtgaagaaaggaattagagcccagtagaaattaggcagaagcaagttcaacttcatcagcatgtagaattctctcctaaaatcacagcccactctggaaaggccttcttcgtggggagggttatgggagggtgggctgcagggtggccatgagaccagcgtccaggggtgaggatttgcactgggaaagggtacgcggcgctcagggagctgcagcagaaacaggcctgagatctggggtcctgcggcacctgggcacagcaagtgccctgcagtcgctcctcctggccctccgtggctggccttgtccctgagtggggtcagcggccctgagggagaggcagccagagtagtgggtgat

SEQ ID NO: 169921 - DNA, 207 bp, Homo sapiens
aaaaagcttaacaaatgttcatagatgctttattcataaaagccaaagtctaaaaacaatccaaaggactgacacattaatagtcatgcagattttgcatgttcccacagtgggctattactcaaaacataaaggtatgaattgttggtacacacaacaacgtggatatgtcaccaaacgattatgttgaaaagaagcagccagata

SEQ ID NO: 169922 - DNA, 355 bp, Homo sapiens
cgccatgggagcttacagtggaaatgcaggaacattctccgctgcagagagtctgataacctcggtccttagatacacaaaaacaccccagtgtgctaatattacccagagcatcaaaaaggcatgcaaggatcaaattttgcatggttcctgctgagtgtaaaggaaagcactaagccattttctctgccctctagaagcttataatgtacagtcctatcacaaagcagaataaaaacatgaaacctataaatgggaatgccataaagtatttttatctctacaggtccagggcagaggaccaacgtcgacgcggccgcgaatttagtagtagtagtagtagtagtagtcgacc

SEQ ID NO: 169923 - DNA, 325 bp, Homo sapiens
agatagaatataaatcatccctgtcttgatgatcttaacatctatagcttttaatttattcttcagctaccaaaggagcttggtattagcttcattatgcagataagaaaaagagaagtttaagtggctcatgtatgataatagcaataataggtgatgatcctggaagctgaactcagatctccagaatctaagtctaaggtaattttattatttgcccctttaggaaaagagatagatgctaggataaccaaccgtcatggttttttcagaatagaagattttctcaggatgcaggacttacaggaaagtcctgggtaaacca

SEQ ID NO: 169924 - DNA, 276 bp, Homo sapiens
agccatacgtgcagtggaaaaggcacgggcgtcgaagcagaagcacagtttgaaagcaagctctgtgaggtgcaagcctgcacccctggactagttcctggatctcttggcactccagtttcttcatcttcaccatactgccacctaacctcctctgccacttcctgtcacatgaggtcatctcacacaggccaggtggctggcagagtcctccatccattgaaatcactgacttgtccacagttaggattcagaagtgcttggcatcactcctac

SEQ ID NO: 169925 - DNA, 386 bp, Homo sapiens
catttgcagttgtagatgtgggagggcttaggaaaactttaaagcgccatataaatgattatcaaggatctcaagaatgtaatgtcttcatctcttttgcccagataacactctacatgtgaataggttggacctcaatgcgtttcaaaggtagaattctagaaatatgacagggtcagtgtgaaacacgtttttgacaaaccccaatctgtcccagtaactgattaaagatgcagttgggctttggactaaaatccctatagacatagtatttgatctagcccattcaggctctgccccaaatttactgttaagaaaaaaaaaaactatcaaaataggaggtttctttggaactttctccctcttacgaaaacagtccccaggct

SEQ ID NO: 169926 - DNA, 478 bp, Homo sapiens
tgacaaggaaaggcattaataatggaaatggattgaaggtaacactgacgtgcagatcaggaatagctcacacggtgatgctcttgcactagaagcagaaactatcctgggatctaaagaaatcacttaagaagaaaacatttcctcttcattgagcctcagtaaagctgcatgaggagaattctgcacaattgttcgtactctagcttagaaaatggagttgattaagtggaaggaaactttaaaaatgtgacaaagatgatgaggtgattaaggggtaggttttaagtagcaagatgtggggaatttaagatgtatgactagtagcggtgacagtgaggtttatgatagctgcctataaatacccaattaattgcctaatgtggcaaatgagaagaaacaggcttttaccaccaaaagggaaacttgaagtatattagggaaacagtatttaacagtaggggtgatttggctgcca

SEQ ID NO: 169927 - DNA, 293 bp, Homo sapiens
caacttttggtggggatatgtgactacttaggtctgctggtttctagggtggcaagaaaccccagtttcttttaagacttttcagctggataccagatattgacagactcaatctcatcttggtgttcaaattttaagttgccaaactttagcttttggacttgtgtgacactcttactagatgcatacctagcctccagctaggtgatattgtgtcatccttaagaggccaacgaggtttcattttaaaagctagctcatgttgattgttagtaacttcctagtgtgttgtg

SEQ ID NO: 169928 - DNA, 290 bp, Homo sapiens
ccaagaggttgaggctgcaagtgagctgcaatagaaccactgcactctagcctgggtgacagaggaagaccctgtctcaaaaaaaaagaagtgtgaactttgatgaagtctagtttatctgtcctatcttttgttgcttatgttcttggtatcatatataagaatcgatggagaaatccaaggtgatgaagatttaactctatgttttcttctcagagttttatggttttagcttttatatttaagtcattaattcattttgagttaagttttgtatatggtttgaggta

SEQ ID NO: 169929 - DNA, 360 bp, Homo sapiens
ctctagagcatcccgttttggtgtgggtagagaagaggaacggagagaagtgaaagggaggaggacagggaggtagcgtggtaatgggagctgggggccaggccccggtgcgtggtgatgggagctgggcttggagtcttcagacctgctctgcccaccttccctgtcctcatggataacaccacctccctccacgttgcttcacttgagatgcgagattcagtactgggcctgggagggctgggccgacctaggcagctggcccttcccacttttctcccttcatgaccacgcagccactcctgcaaagcagcagagcccagcggtgcctgcttcctgtcaccctccctgcccctccct

SEQ ID NO: 169930 - DNA, 688 bp, Homo sapiens
  misc_feature (91)..(91): n is a, c, g, or t
  misc_feature (96)..(96): n is a, c, g, or t
  misc_feature (106)..(106): n is a, c, g, or t
tacagacgaggatgttgtaacagaacaggctggcaggtccacacagatgtacgtgccgccagccaaagtcatttctgtacttgcagagcanagcanaatgcctggnacataaaagacactcaatgtagagtgctgagtcaatgcatgggtgaatgaaactagcatcccaaagggaactgaggtgcagttccagtgcttgcagagaaaaggtctgcccaccaaatgtggtccagaaatgctgaggtcagcctccagcctagggacactggtaatggtggtggaagcagctgagagaagatttttctttcaaagctgaatcttcagatctggggaactaaaagaaccctccaagatcacctaacccaattcctaaatgtttcagatagggaacttgaggtcttggtaaggaaagagacttgatcaaagtcacacagtacattagggttacagccaggacacagttccatgtctcttgatcccaacccagggttctctgcaggacaacttttctcatctgggtcccacatggacgtagccaggagagcagctggtaggattaaatggccaccaagaatttctacactgctttttaaattgtcaaaactcaattgctgatagacttgtgatgcaggtttagagaaaataatgggtttgactaaggctccaagctaagaagccacttgcttgt

SEQ ID NO: 169931 - DNA, 195 bp, Homo sapiens
cccagcatcctcttggaaagaaacaccagttgactccagatagagcaacccaccaccccgtctctgggcctgcaggcctgcccggccagggacctcaagtaatccagaggagaaacattaggatgagtctgcctcctccttgagcccccaaatcccaccaattctgcaaatgcccacgttggaaaagatgccagt

SEQ ID NO: 169932 - DNA, 423 bp, Homo sapiens
ccacacaacccagacccatgccctgggacccacacacgctgtgtgttcgcgttgcttcagaaccaggatcagtgtccccctcttggtgttatcttccactgttcctggctcttaaacacaataccatgccaaacaaccttttaactagcccctagcctagggcctgattattttcttaggattaattccacaggaagtccgtctcctgtgttttgctacgcatcttgtgtggctttatgtagtgttctccaaagttgccttggacttagaagcgtacctttgctggaaaatcaaggaaaatgtggggaagaaagctgtgcctagaacattctttcatagccttaaaatgtagaccggaacggtggtaccatgagctagctcagactcacagccaagcttggttggagcctcggagtgctgtta

SEQ ID NO: 169933 - DNA, 179 bp, Homo sapiens
ccacctcggcaaatccaaagtgctgagattacaggcatgagccactgtccccagcctactatattgtctttatttactcatttgatgttaaactgttgattctatattttgacaattgtaaagagtgttgcaaacaacatagaagtgcaaattttttttattctgatgcgaggtggagc

SEQ ID NO: 169934 - DNA, 322 bp, Homo sapiens
gacatctcttagtctgtctgccaaaatgctaaatctgaaagatacctcaaataccgtttccttaggattcacaatagtgatgttatctgtagaagttgttggagaagttacaaatcttgcgacctctgtttgagtgaccctggggcaggaagcaacatatagaaaagccagctaagctaagcagttggcaggtcattgtttatgcttattctttagcaaagttcagaccctaccataactctaacctcggcttaggaatgtggcttcaatctcgaaacaaggaggggggtcagttttccttgcctcatcgtttaactataaa

SEQ ID NO: 169935 - DNA, 482 bp, Homo sapiens
ggtcacgctaatccagcacttggagttacagagacggagtcagacagcctgttcagcatagcaagaccccatctctacaaaaaataaacagattagctaggcgtggtggtgtgtgcctgtagtctcagctgcttgggaggctgaggcaggcggataacctgagcacaggagttggaggctgcagtgaactatgattgcaccactgcacaagagcctggacaacagagtgagacttgtctttaaaacacaagattggtcttcaaagagaataacatctgcggtgtcttgtgaggatggatgaggggctgccaagttcgcaatgaatgtgtcccatttctttttagtttatggacttaccataaactgaagatagcagtttggtgggttggagaagcatgtggtaatggtgggaattataatacattacttacagggaaagacaggcctttgaaaggtaaagcgtaagagtgagaatggaatac

SEQ ID NO: 169936 - DNA, 461 bp, Homo sapiens
ggtcacgctaatccagcacttggagttacagagacggagtcagacagcctgttcagcatagcaagaccccatctctacaaaaaataaacagattagctaggcgtggtggtgtgtgcctgtagtctcagctgcttgggaggctgaggcaggcggataacctgagcacaggagttggaggctgcagtgaactatgattgcaccactgcacaagattgtctttaaaacacaagattggtcttcaaagagaataacatctgcggtgtcttgtgaggatggatgaggggctgccaagttcgcaatgaatgtgtcccatttctttttagtttatggacttaccataaactgaagatagcagtttggtgggttggagaagcatgtggtaatggtgggaattataatacattacttacagggaaagacaggcctttgaaaggtaaagcgtaagagtgagaatggaatac

SEQ ID NO: 169937 - DNA, 129 bp, Homo sapiens
aaactgaggctcacagaagttaggtgattagttctagattaatgatgccaatgaataaactaaatcaaaaggaaagttttggaaatggccatatctatcagacagatgtcaatccagaaatcctgattc

SEQ ID NO: 169938 - DNA, 412 bp, Homo sapiens
gtaaggaaatgcagcagtccttccaacaccccaattctaggagtctccctaagtcccaacattaacattgccccaggaaatcagaccctatcagttgtcctcaaagctcaagtccgtaagcacagagccatacagctaatacccctacttgtagggttaggaatggctacagctacaggaaccggaatagacagtttatctacttcattatcttattactacacactctcaaaggatttctcagacagtttgcaagaaataacgaaatctatccttactctacaatcccaaacagattttcttttccagaaatttcctttaaataaaaattacaaaaagatcattcagaagaaagagcagctagacatttttgtttagtaattttctttttttaaaaaacaagtttttgtta

SEQ ID NO: 169939 - DNA, 718 bp, Homo sapiens
agcgggggcgttcagtgcagtgtggggcccagggaggctggagagaggctggtgttggcctcatcagttgcatctgtgtgccgaagccactctgacccctccagctcacgtggacacgcgggggctcccatccacgccccgatcccctgcctcaggtggcctgggtgctgccgctggcttcttcctactccctgggactcagaaagagggggagacagagagctcacattctgaaaggtgagatcatctcacttctgccagttcttggaaaagttattcgttcccagaaatgtttattagtcacccttttgttgaaagacattttggcaccaccagatggaaaaatcaaaatgcttctcacaggacgatttgtctcaagtattccgcctgacatcccacaaggatgatttctgaggatacaactcaaggaggatgttctgttggcatctgtggggagaagccagatctgttcagctgtgtgtgtgtgtgtgtgtgtgtgtgtgtgtgtgtgactgtgtatgagagtgtgtgactacgcatgtgtgattgtgttcgtgactgattgtgtgtgtgtgactgcgtgtgtgactgggtgtgtggctgtgtgactctgcgtgtgtgattgtgtttacgactgagactgtgtgtgactgattctgtgactgtaagtgtgactgtgtgagactgtgtgactgggtgtgtggctgtgtgactatgc

SEQ ID NO: 169940 - DNA, 589 bp, Homo sapiens
cctggtagtaagtccaagctgtccattaacaatggtcatgttaatgcatgtcaaattcataacaacactaatccttatagcttttaaagcactattctctagtcacaacatgcttcacaaagttattaaccatttcaacaaggttggttttgaggactcaaaaatttaagtgacgttccaatatagaatccaattctctaaaattgaaagggagggttgaacaccacattagtgttcatacaaactgttacagggaaaaaatagacaagaactgtgaaaatagagaagattcaagtcattttaaaaggtagtaaatttgcaagcagggcaatgttgaagctagattaagattaggaactagaaattataagagcatctgaaatgaatgtgaatgaacagaagctacagaaatcaggtgcccaggcaaggagacccagggtcagtaaccaaaacaagggatataggcatcaacaaagctgtacgaggagctgaaaaagactagtattttgaaggaaaaaaaaaatctaccccaggatatccatttcctgtctatggcgtgaactgttgtaaaagtgtatatgttggactt

SEQ ID NO: 169941 - DNA, 641 bp, Homo sapiens
gaaatcacaaggatattgattggggaagtgataagtgtccatgaaatctttacaatttatgtttagagattgcagtaaagacaggcataagaaattacaaaagtattaatttggggaactaataaatgtccataaaatcttcacaatccacattcttctgtcatggcttcagccggtccctccgtttggggtccctgacttcccgcaacagataaccaagagtaaaaattttgtaaaattttaggaaagtaaacggaggtattatcagagtcatatggtatctattgtcttaatgttttatcatactttcatattaatttaaattatggtatcatatttcatcatgctaagatgtaaccaattgtaattatgcaaatattttatgtaccactaagaaaagaaaaaaactgtcaaataaaccaacacaatatttttatctctttgtgttttaacttttcaagtggtcttttgaacttttttagacaagcatattaattatatataatttttgtgaataaacaaaagaaaatgtaagagaaataaattggtttacagattctcaaaacttagtaaagttgttctagttctttcaagtcaaagttaatatatctaactcatttctttcaatgattgccccttgt

SEQ ID NO: 169942 - DNA, 172 bp, Homo sapiens
tacacagaaacataagtgaaggaggagaaaaccacacaatgatctgatagggcagtatttttgatactataaagatgaattaatagaaatgtaaaattaataaatatatgtacagaatacaagccaggttttttattattatatattgcaacagacataaaatcactctgag

SEQ ID NO: 169943 - DNA, 457 bp, Homo sapiens
ttacaagcgtggaccaccacacctggctcattgattcatttattcatctgataggtatttattgaacataaagtgccacagaccgggtggcttaaatgacagagatttattttctaacagttctggaagccggaagtctgagatcaaggtgccggcaggactgcttcctccaagccctctctttttggcttgtaagagctgtcttctctctgtgtcctcacaaggtcgccctccgtgcgtgtctgtgtcctcatctcctcttattacggagacaccagtcctactggattagctcccatgctggtgacctcattctaccttaattacctccataaatgccctatctccaaacacagtcacattatgacatcctgggggttggacttcgacgtgtgagtttggggggatgcaacccagcccacaataaacagcaaatacgattagagcttctcacaga

SEQ ID NO: 169944 - DNA, 359 bp, Homo sapiens
tgaggaattacaaggattagataataggtctgggttaaaaatttaaatgactatttccaaattttcacaaaatataagtggatattcctgtattggactttgctaaatggcatataaattgcctctaccacacttagcagattgtttggattgtatatagaagtaaatgtttaaaaaaatgtaaactcataaggacatttatggactctgaatacacaaattatgtctgtcttcatgtatatgtgtatatatatctgaaataagtttcatagaacaatagttaccctccttaatgtggtggatattaatatttctgtggtattttcatttcttaaaaatattgatcacaactctgaatt

SEQ ID NO: 169945 - DNA, 571 bp, Homo sapiens
ggtgatacatgtgtttaaaggtcagttatcaagtcctgtgttctggaggtgggggcagcaaggcagttgaaacccaggaaaagaataattgactacattactcttttctagtcaacataatcaaggaaaaacagactctgatgagaccagtactgatgcagggaggctcccaaagagacattcattctgtccagaggaaatacctttgctaaagatattgagcctttatggtaggaggaggatataactgattatatataggtaaagatctagcttaacagacttgggatacttaaggcaaaggaggaacatcccagacactaacattcttcctatgtaaaacctaccttaaaactgctcctggtaagcttgcaatcactagctcatttattccttcaggtttaatgtattctttctatcctaattgtgaccatgaattaccctctgcctctttggtaccttgactttaatcaaagtatttttcaaaatatcacttgacttaaccttctcatcattgtaggttaacactgaccacatgtaagttaaaattaagtttatcaacatgtctcga

SEQ ID NO: 169946 - DNA, 225 bp, Homo sapiens
gaaggttaggagagcctgcgtggggtttgggccatcaggggccctgccttggcttttgttcctctgttctgtgcatctcttaccaccgtcttcattccccctgtgtcttttccttaccttggagctctgttctctctgatctgtgatattgagtttgtctgcctcttacctgttctaagaggctagaggagacctagacttctgggttcacatttgtccccgccc

SEQ ID NO: 169947 - DNA, 311 bp, Homo sapiens
tttaagatctcaaagaaatgatgtaatgtggtagtaaagagcaccaacttcagaatcagacaccttgggtttaaatttcagctccaccacttactggctaaggaaccttaggcaagttccttaatctgtctgcatgtcaccctcatctggaatgtggaggtggcagcacttgcttcatatagtgtagtaaggacacgagttagtgcaggtaaaaaacattttctaacacacagtcaacactcaaggattagctgctgttgatactggatagaaactactttttcttgtgttctgtttggcttttactgttg

SEQ ID NO: 169948 - DNA, 242 bp, Homo sapiens
gaaaattgttcactgttgatgattaaaataggaaaatacttcccactgatcattttgtttgatcaaaacttaacctcattaacaagaactacttaaatcaaggaatactgaggactttcctgttttcttaacgataaggtaaaaatcttttttccaatgaaatataacaaaacccaggttttcatatttaagataccatcacagtatttgaattctcttcctctctcatcattagtaaataa

SEQ ID NO: 169949 - DNA, 137 bp, Homo sapiens
gttccatgtggttttcagttcaggcagtgttctgagaagcagcagactataactgtatgtgtgtccttgaagccaggtgcagagttcccagctactgcagcttgggatttggtgggaaactactgggataagcttct

SEQ ID NO: 169950 - DNA, 456 bp, Homo sapiens
tatagagatcccgtgatgttatccccaacactctcctttttctttctttttctgaaaggtagggagggataggattaagtaaaaggttatctataaaagctgcgtgcccaagaagtctgcaagcccactgacgtccttggtttcatggtttaaagtgagatgctgcctagtaaaggggtgaatccttttacttgaacatccctagagctcatttaacgagagcccttttattcacttctaaagaaaatacagtggatattcacatcacaaagtcagatttctttttgtttggacatcaataaggacatacactcgctagtttgttttacacatcaggtaaaaagcatttgcttttccgttttcttctggaatggtccttaagtaagcctagtagatgactcctcagtgtttctttaaattcttgttactagtccagaaaggtgttggggataagat

SEQ ID NO: 169951 - DNA, 150 bp, Homo sapiens
ctctgtgtgctgcttacagttcagtggggcttgcccactgagaagagctggtcccctggcaggccatgtctcatgtctgaagatcattctcctgccttccttttgcccaccactctcctttttctttctttttctgaaaggtagggaggg

SEQ ID NO: 169952 - DNA, 277 bp, Homo sapiens
tggtgtgtttttctgatgttctgtcacagccctgcttaggaatgttacgtaattaaatcattaatagggcaaggcctttcttcataactcctctgatttatgtaatatgcggagacaagcagatgcctgtgcaggtttctactgggatgaccagttaattttcagcattcagactcctttatgttcttacgtacatcccttacccatggtagctttggcaattttttttttttttttttttttttttgagacggagctttgctcttgttgcctaggc

SEQ ID NO: 169953 - DNA, 341 bp, Homo sapiens
attgcatgttccttcccatggatagaggaaccctcctattccctggaggaagggttccttatactgtgttttgagcagaacagtcctgtcccactcttgaggtcctaactgcaggatttctagtggtaaaccaatctggactctcctagagaatgacaagaagagaggggcattcgatgactagttactatttctttccctagcataataataactatgagaatacttgctaattttcctaatatggatctgatcatacagatatagatgcaaacgaaagagaaagaaagaacctctatgaatcataatccgagtcaaccaaatacatatctcagtgtaca

SEQ ID NO: 169954 - DNA, 533 bp, Homo sapiens
ccttatttgaacacctttttctttattgaataccaaaccatgttatggtaacttggactttaataaaagggaaatgagtttgaactgaaattaggtatttgtttcatgtgtttgcattaataagcagaaaattaagtgctgtattggtttcatggttttgctgccctcttacatgatgagagaactgtgttaattctctggaaaccatctgacatgaaaatcagcttcattaatatgtttgggtgccctagcttgtaaattagctgaaggctagaagtcatttatatagaattttcttgttgacaccctaggcttaggggactggttgtctgtggggatagatcaaattgtgtacctttccaaaacaggttttaatgatgtttaaaagtggtcactgagatagtcttgaggatgtgctatgcagtagccaagccctcttacggtgtgttcctctcttagtgcccctttcctttcctacctgttcttcccttgcagtggtgtattagccttggacattaaaacatttgctttgt

SEQ ID NO: 169955 - DNA, 711 bp, Homo sapiens
catagattaaaagattttattccttatcaaaaactgccagaaacttcattatttaggaactgataatgttgcaaattattttctatgtgaacatatttaaatcacaaatttctttcgtgacttgtttatccagtaattgtaaataaataaagagcactggcatcaaactgatcaaaacagtcttctaactaggaagtcttataaacacaaaattaaaaaaaatcaagggtctctattgatctgtagctaaaatataagttatgatgagcaactcaacctcttgagtggctaaggttttcaaatacgttgttcatataaattcccgggaccaagtaataatttgctcttttaaatttgaacctattttcaacagtgtgagatatacattttatcccctttaaaaaatgtttttccattgccagagttggataaattacattataattagaagtcagtttacaaaaggtttaagtcttccttcccccctaagatgaagcaatggttattctggtttctccccagtacaagtttgtgaagactgatttagaaatcttagagtgttattaatagcaggtaaaattcaactatatcatccccttttaggaaggaaaaggttcaagttctgaaattacacatgccttaggacctcatttttcattgaaagcatgactaaatatggctaatggttacatcaatatttttggagagctt

SEQ ID NO: 169956 - DNA, 383 bp, Homo sapiens
tcctagttaataaaatggatataatcatgttttaccaacctcataagattgcggtgaagattaaatcatttcaatcattgccttgcacataattgcagtacacatcttcattattctgctgtgctccttttcctttgctttcctgataccccagtgcttggcattcccatgatgtacacatggcacttctatagtgtgataaataagtacacaagtagctaagttagtcaggtgagtgagatcttaaggtccatcttaactagttttactggtgaagaaactcaagtctagagaagtcaggtgtgagccagactggaattcaggcttctgattgagccacgtgctttctgcatggccatgtttgtacaaaaccacagcacata

SEQ ID NO: 169957 - DNA, 192 bp, Homo sapiens
gtcacaggatacgagcatgttgtgagcagtgagagctggctggcaggtgtgaggtggccatagtcagcttctcatctcttctctagaagttgcagatctagatggtttcagaatttaaaggtttttcaattttaggaaggtaaaaaggagtctataccatacattgtacaatacagagtattagagagccac

SEQ ID NO: 169958 - DNA, 311 bp, Homo sapiens
gaggatgaaggaggatacactgacatttgtagccctcccagggctttgcatagagaatggccactgtggccatggctaaaatgttgcaaaggagttggtctgtgcaattatcagatcttgcaagtcacaaatccagctatgcatttttttctggacaggaggcagggcttgccagaggagagaaagactctttgcacacagctggagcttttcagggtgaaagcagaaacatgctccattgacagcaaacttataaactgtcatggggtagttttctctctctttcctccctcgacctcagactgattggc

SEQ ID NO: 169959 - DNA, 554 bp, Homo sapiens
tttcagcatttcctatatgcaaaatactggactaaatgctacataaatccaaagatagtaaagaaacatgcattcactaagaagactataataaaaatttaccaatagtggatcaaatcatatgtattatagaacatcttcaataataatggtcccataaatgtggattttagagaaggaaacattaaaatggaaatacaacactttaaatacgtgtaaaatttagaaaatgaatttatatcccttaattgcatcaattccctccactttattaaaatatttacacatgcaactgataaggtaacttatctcaaatgatttaatgtgattgttaataataatcaggaattccaactgactcattaggagctttactttattaagaagttttccatttcctatttatcattataccctttttttctctatttcgtggacaattgcttttgcccttgggaaacttgttcaatctactgtaattatctttatgacacatggcctctttagcaaaaatgaataatagaaacaggcagaaagatacagacagaatgaaa

SEQ ID NO: 169960 - DNA, 110 bp, Homo sapiens
cgggaacaggtgcagcccagcccaggtggggccggctctcccctccgctgtgctggctcagggctgggagtccctggcttccacctcccagggcccgaaggacagcgccg

SEQ ID NO: 169961 - DNA, 310 bp, Homo sapiens
ccatgtggtaaacttttcagtccccacgtatgaatgagaacatgtgatatttgtcattctgtgcttggcttatttcacttaacataatgaacttcacttctatccatgtttctgcaaaagataatacgccaccataatcaagtgaaatttaccccagggatgcaaggatggtttaacatatgcaagttaatatatatgatatatcctatcaacataatgaaggacaaaaaccatataatcattttaacatatccagaaaagcatttgacataattcaatatccttttatgataaaaactctgaaaaaatt

SEQ ID NO: 169962 - DNA, 166 bp, Homo sapiens
tctgcttctgcccatctctactaaaaaatacaaaaatagccagaggtggtggtgggctcctgcctcagcctcccaagtagctgggactacaggcacatgccaccactcatggtttttgtttgtttgtttttttaattttgtagggacagagtctcgctatgttgtt

SEQ ID NO: 169963 - DNA, 378 bp, Homo sapiens
aaaaaatcttgtgctggtttggagcaagcagcaagattgagcacgtcacttagcctctgagagttgcttacaacagagcaccccctgtccatctgcagcggtcaagctatgggcagtcagcactgcatggcctggatgggagagcccaaggggggcagtcccgaagctcacctggaaaatgccacctttgctctgctgcatcctataactcctggggctggcatcctttcctgaaagctgagatttcagaaggctgcagcttaaagggaggaggtagtcagaaaagcaccatcttgcacaaagtcaaactgggtgctggaacgacgctctgccagtagggagacttccaaccactgcatgtctcttcctacagcagcg

SEQ ID NO: 169964 - DNA, 477 bp, Homo sapiens
ccagagtgataaccgtgagagttaccttgcaaagtgcctccgcctgttccttttatttcagagtcggctgctcccacactctgtgtccaagactctcggacgtgaggctgagagcgggagtggcagagccttctttagcttcacctgcagctgccggccacgtgctctgacacctctgaggcctacatctccagatcgcaccttccatgggtccttgctttgtattttcccgcaactggactcatgcctcctttctcattctgcaaacctgccaaggccatgcaggcactctggctctcaaaaccagctgggatgccaggactgaggctcactctgaaccacctgcgtgcccagggctgggcaaagacctggtgcagccaaacctcagaggaggaaaggcaacgttgtgagcaaattagaaaggggtcgggggagaaattcatacacacatacacatatacatgcatacacacatgt

SEQ ID NO: 169965 - DNA, 493 bp, Homo sapiens
ctcctagaggatccccctggtagcgttttctctatttctggtttgggaatttggctctgaggctaaggctgccacgaacctcagcctcatggatgacatatgcatatttcatgctaattctttcttcgttgtatacattttttcttatttatattttttttgagatgaagtctcgctctgtcgcccaggctggagtgcactggcgtgagccactgcaactgggccgtgaataacttttaaaagaacacatcgacagagtacttgaaaaggtgttcaacatcactaacttttatgaaactgcaaataaaactatagtgagatacaactttacacccattagaatggctactgtcagaaaagctttctaatttttaattagaagatacctaaatgcccaacaaaagggaattgactaggtagactgtagtgtagtcatattttggaatgcagactgtcattaataatctttgcaaagagtaatgccttcgaaaga

SEQ ID NO: 169966 - DNA, 381 bp, Homo sapiens
  misc_feature (7)..(7): n is a, c, g, or t
  misc_feature (22)..(22): n is a, c, g, or t
tagcggncccacggcaggtgtntcagactggttgcacccagaatcagcctatgttcacagtatggcatccagtcaccactcacttgatctggttttggttaatactgggaagacaagagacaaaatgttaattattatagacagtatttatcaaacaccaagctctgcctcatgcttagatttttagccagagatttaaaccctggaacttcagattaaaagtctgatgttttattaagtaagttgcccattgcagatcacaaaatagtaataatagttaaatgaatgggatattgaagctttgagagtcccctcaattagctttttgatgttttgtataactaaaagaaaaatttaagcaacagtacaacctgccggtgg

SEQ ID NO: 169967 - DNA, 491 bp, Homo sapiens
atcgagctcggtaccggcttatcagctggcagcagctggcagtagtgatagctgcaacagagactgcatggcctgaaaagcctaaaatatttactctctggccatttacagaaaaaagtatgccaactcctggtctagtccaacctactatcggacacctaaatcatccttatgtctgtgtttgtcaagactggaatgtatctgccaggcgcggtggctcacgcctgtaatcacaacactttgggaggcctagcgggggcagatcacctgaagtcaggagttcgagaccagcctgacaaacatggtgaaaccctgtctctactaaaaatacaaaattagctgggtgtggtggcgcatgcctgcaatcccagccagatgggaacgtggtcatcgcctgcctggtccagggcttcttcccccaggagccactcagtgtgacctggagcgaaagcggacagggcgtgaccgccagaaacttcccaccctgccag

SEQ ID NO: 169968 - DNA, 224 bp, Homo sapiens
tctactttgttccagccatggagtcatactctctttatcttttgactatccaaaggtgttctgttggacgactgatgccttcctccaaggtactttgggctcccaagtgtgcagttgacatttgctgtgccttctccaccaggctttagtttttgatgaatgctgagcttcagtggagatttgctagccttgggctttctgtgttcttgaatctctcagagtcc

SEQ ID NO: 169969 - DNA, 274 bp, Homo sapiens
tgctgggattacaggcgtgagccactatgccagccaagaatttttaaaaaaggagtttcactcagccgacctcattcctcagcagggcacctgtgtgcagggcaaaactgctcaaccctactcagcagccctgtgaaagctgctgaaaggatgagcagattgaggcctgaactgtatcttggatttagcagcctggaggtcataatggattttgccaagagtgatggggcagaaattggaccagtgtgtgttaaggagctagaagaagtgaaga

SEQ ID NO: 169970 - DNA, 416 bp, Homo sapiens
tactaacattgaatgtgaatggcctaaatgctccacttaaaagatacagaactgcagaatggataagaactcatcaaccatctgctgccctcaggagactcacctaacacataaagactcacgtaaacttaaaggggtggaaaaaggcatgtcatgcaaatgacaccataaacaagcaggggtagctattcttgtatcagacaaaaactttaaagcaacagcagttaaaagagacaaagagggacattatataatggtaataaggccttgtcacaggataatatcacaatcctaaacatatatgaacctaacactggagcttccaaatttataaaacaattactaacagacctaagaaacgagacaatccagcagcccaggaggtcgacgcggccgcgaatttagtagtagtagcc

SEQ ID NO: 169971 - DNA, 366 bp, Homo sapiens
tttggtagtgctttcacaaagtgttttagaaatacaaaagattaatataggaccacttgataattgttacatgcccacagctcactggactttttaaagcacacaccttcctacagacagtagacgtggcatgtaccagacagctgtcaagggctccttatcctttcctaacctcaggagtaagatttgtgatgacagaatcatcatgaatggtgattccaaatgaagtcacatgctgaggtaccaggtccacgtgaattccgggaggaatactatttatcccaatgcagttaggtactgtccctgagcttccagatggacccatcctccctggaggccttcagagctcccatcactgtggctcag

SEQ ID NO: 169972 - DNA, 679 bp, Homo sapiens
tcaagaccagcctggccaacatgatgaaaccccatctctaccaaaaacacaaaaattagccaggcttggtggtgcacacctgtaaccccagctactcgggaggctgaagcagagaattgcttgaacccgggaggcggaggttgcagtgagccaaagttgcaccactgcactccagcctgggcaacagagcgagactccatctcaaaaaaaaaaaaaaattatctgggagtagtggcatgctacttgggaggctgagaggggaggatggcttgagtctaggagtttgagactgcagtgagccatgatcgtgccactgtattctagcctgggtgacagagaccttgtctcttaaaaaaaaaaaaaagaatatgcttttcatagatatcttcctggctggctcccactcttcactcaggtgtccactccaatgtcaccccttcaaagaggccttcccggccgggcgtggtaactcgcacctgtaatcccagcactttgggaggccgaggcaggcagatcatttgaggtcagaagttcgagcccagcttgtccaacagggaaacctcatctcaaaaaaaaaaagaaagaaagaaagaaatccattcaatcagagtggggctttagtgtcaacccatctgtctgcatggggcaggtcacgtggcccttctccccacgtcgacgc

SEQ ID NO: 169973 - DNA, 738 bp, Homo sapiens
gagttgcaaagtattccacgttattaatgtatgatgacttatttaactattgccctattgatggacaatttaagttgtctctaattatatattactttgcagtgtgcactgttcacaatagcaaagacatggaatcagcctaaatgtccatcaatgatagactggataaagaaaatgtgatacatatacatgatgggatgctatgcggccaaaaaaaaaggaatgagatcatgtcctttgtaggaacatgatgcagctggaggtcattatccttagcaaattaaggcaggaacagaaaaacaaataccgcgtgttcacacttaaaagtgggaactaaataatgagacccaatgggcagaaagaggggagcaagagacagtggggactacctgaaggagaagggtaggaagagggagaggatcaggaaaaataactatcaggtactatgcttagtacctggataacaaaataatctaaaccgaacgcctgtgacacgagcttacctatataacaaacttgcactgcacatgtaccccaaacctaaaataaaagtttaacaaaattgcaatatgccattctgtaaatttttttctctaatattatgcttcaaattttatttttaaaattacactaggaatacacaaggaattacgtgaggaatatatgaatatattcttataaaaattgtaaaaatatagaaatgtgtaacaatgagagtaaatgcttatacaggcctta

SEQ ID NO: 169974 - DNA, 230 bp, Homo sapiens
gggggggacccagaattggcaaaggggctcctgggagactcagtaccaaccctgctggctctcttctcgacccatccaccccatctccttagggcaatgagatctgtcctcagcaccacagaaaatccactatctcaaggaacatgacaaaaagtgaggcgtcatttaagaggttttagatgatcagtgtttgatgcctgtttagttgctgtgattgaaatggccaacca

SEQ ID NO: 169975 - DNA, 471 bp, Homo sapiens
ttggatcccgtgcaccgtactttctcaactgtacattttatgaaatctaaatacagatcaagtgcttttgaggagaaatggtctgaaaatggcagtgaggcatgacaaggacaccctgcctacctccaggctgagtgacagtagggatgtggaagagaggcagggaccactttagacagctgcagggcaagttgagtcccaggtttaaagcaagaaggcgtggagaaagaagagacaagggcactggggtggaggttggagtgtcatgtgatgacaggctgtgaattagagggcacagtacaagggtctttgggaggaagtacgggagaagcaggcacatctctttgtctccagtgctgccaaatttcaaaatactggcctgagtttattgcatccattgaatactgtgcagggcatttctgtaaccaggaaactcatttctttcagttttggtaattttctattactttg

SEQ ID NO: 169976 - DNA, 597 bp, Homo sapiens
tggggataaaatccatggtgaacaaaagttgtcttgttgtgcagatataacctctcaggtagcagctctcgggtagcctgaggcaaaacctctctaggtgatgtgttgacctttgatttcttttccagagagaaaatctttcctagatctcctagatctgtttttaggcaaatatggggacctcagagaacctctgcttgcatccactgtttcctgctgtttatcaatcagcataccaaagtgtcatactttggggaattgtttcctgagctgcaacaattgtcatatttgggaatgcgtcacagaattagaaatgatcagacagttttaagaactaagactgatttttatggagccaatgtttacaaagtcctattgggcaaactggtctggtacctgatttataggtttccagtctcacagatgagaaacaaaggtcacttcctggcccaggaaattttgggaacctctagaagagaggaattcatccaaatctctaggaactgtaggtggacagttcttggcttggcttcctagccttgagaaagtgcttcctcagcctcccaaagtgctgggattataggcgtgagcccctgc

SEQ ID NO: 169977 - DNA, 831 bp, Homo sapiens
gctgtttcgcttcctaaatggcccagtctgttgttacaggaggacacccacctctgcccaggaggcccaggctaagagggctgcaggtcacgcatggaaggcccacctgactcagccttaagaggaggaagaagatgaggcttgtcgccctggggacccgcaccacccttgatgacgcccgactggaatccagctcgtgcactccagcctcctcctgcactcggacacctggcactgctctcctggccccaagcttatagggcacagggtgcactgaaggggccccacccagcccctcagagccagcgagactggatgctctgcctctgagccccttcagcccctcagccccactggatccctgtgggaaccacaggcagcccccaccgggtcaccctcccatctctctcctgatgggatcgaccccactcaggctcattcccaagatggtgagattctagaggcctcctgcagggagcagctgtttccccatcaccaccttaacattaaaatgaggctaaatgctctggtttcggggttttctagaaagccaggagactcattttaaaacagcctacaaggccaggtgcagtggctcacttgaggtcaggagttcaagaccagtctggccaacatggtaaaaccttatctctactaaagataacaaaaattagcctggcatggtggcaggcgcctgtagtcccagctacttgggagactgagggtaggagcatcacttgaacttgggaggcagaggctgcagtgagctgagatagtgccatgcaccccagcttgggtgacagagtgagactctatctcaaaaaagaaaaa

SEQ ID NO: 169978 - DNA, 443 bp, Homo sapiens
catctttttataaagaatttatggtggtatctcctctttaccccataatcccctacaattgggcttctttcccactacttttctgattcccctgaaataatgtagttgttgaaccggttgtatcgtaatgtttattccagttctttttcttccttgaccttgagacagtggcatgatgtcataaaagcagtcatctcaccattgcttttactggtggtgtgtacaaatattgaagcatttgaaagagagcaggagtaaatacatgaagatgatggtgttcctatctggtggcctggtttcattttctcgctgtggcatatagaatgtggagtcatttgctcagagtgaaggggcaggagtgggtaagggagcttgaaagagagtggagatttgaaataacctttgtgggtaatggaccagggactccccagaaactcagaaga

SEQ ID NO: 169979 - DNA, 184 bp, Homo sapiens
agagcgtgcagtgtagattccttgcatgtgcagttcacaacagagtttgctctactttgagaatccagtgcagccactgatccgacaggaggcggagctcaggcggtaatgcttgccaggctcccatcactcacctcttgctgtgccgcctagttcccaacaaacaggccacggaccagtagcg

SEQ ID NO: 169980 - DNA, 184 bp, Homo sapiens
agagtggggcttgaggctttttgcaaaaatgttgctgtccagcctagtactgtacctagcttatacttggtaatctttttctcaatcagtctagttaggaggttttcaattttatgaatctttataagaactagctcttacctttattgattttccttacctatttttaaattttaattgatat

SEQ ID NO: 169981 - DNA, 371 bp, Homo sapiens
cttactaaccaacaagacaggtccgtaacaaaatcatagcaaggtatgataggggcggtgatgggggaacagaatctgacagaagaggtgacctagattggcagcgtcagtgaaggcttctgctgaagggcttgaagcttgttctgagccttgaaagaggcagaattagccagacaaggagaatacaagaagttccaatagtaaaaggctggaggtatgagaggagagacttgacaactcagaagagccagcagctccatatccctggctctcactaactggtgaacaaggtgaataagcaggagggctcctcaccagcaaagtctgcttaagttggatgtttttatggtggtaagcgttctggtgagact

SEQ ID NO: 169982 - DNA, 396 bp, Homo sapiens
tattgagtggccatgtgagtggtttgctgcctcctatccgtcaatatccaatgccctgggacagcgggggaagtgggattccagcctttcatttattctttcacctatttgtcctctttactctgtgtacaaaaaagagaggattatactatcatagactgttgtttctaaacagaaactcaggctgggcacagtggaatacgcctgtaatcccagcactttgggaggccgaggcaggcggatcacctgaggtcagcagttcgagaccagcctggccaacatggccaaatcccgtctctactaaaaatagaaaaattagctgggcgtggtggtgtgcatctgtaatcccagctactcagaagtctgatgcaggagaattgctaaaacccaggaggg

SEQ ID NO: 169983 - DNA, 329 bp, Homo sapiens
ttaaaaagggcttcagcaggactctagcgctttttaaagaagaatttggtgtattccactatgtaacgtagtctctgtccaggaaccaggaggatgagtgtcctcagttttcctaatacttggtaacatttaataatagattgagttttgcttttgtttttcatagagactgtatagactctgtacttccatgtaactttctgccttaacctaaaaaggcattccctggaaggagatcttgtaacaggaagaaaaagcgaaaccaggaaaagagccagaaaggatcaacttggagatgggctgtggctaaatagtgggttttcctgaaa

SEQ ID NO: 169984 - DNA, 367 bp, Homo sapiens
aatagaagacttgttttggggagtagcagaaaaaaaagaaagctgaaaagaggaaccatgagatctgagtttgaagggatcctcaagattatcatatccaaggcctgctcctcttattcttacctatttatttccacataaacacagctttccctagtctgcaccaatgttttacatacattttagtggtggttctagattcctaataactttagacacagtaacttcagcatagtagttagaaatagactttggagttagaggcctgggtaaaccacttgctagacattcaactttgggtaagtttatcctttatttcttcatctagaaatgtgggtaatagtatacttacagtcgagggatgaag

SEQ ID NO: 169985 - DNA, 924 bp, Homo sapiens
agttttgaggttgacaactgcaagttgtgtgtagtgccaccgggtcctttgtctcctcctctgtcctgatgccctcagacctcagccaggccagggacgctcagtttgctttgccttctgctttccctcagctgggggatcttgggctggaagtcactctgatgaacatgtggaattcagctctaagtctctcctgagtcctctgttacctcccaggaggcatgatgaggcacagctacccttcacctccatgggtggcatgaagatacttgcaagtatcttttagacgaaaatatataccggtatttactgttacttgaattcctgtttggttcttgcatttcagatcaaaagaaagaagagtttagatagggatttacttgaaaatgtatctgtatctgttccacttttgaaattgtatggcaagaattcagatagcaggcgacacctacactatcattaagggacagatgacgtctttgaaccaggttttaacctgttagctcagacctatatcttcttctcttttggagaaaaaaaaatcagtctttgtgtgtccacactgaattttgctttgaatctggaaagaacacccatgttgcaggcaacttctgttgttctgtctctgagttcccacaaacaagcactaaaatctgcttagccaatagcaagcagcctctaaaatatcaggtcacttggggctctgtttcttatattcttttttgagacagatctcttgaaggctacacgcacaattcaaagaacataaagcctttgatttatttactgccatcagagtggtcctttccctgacttagatgatagagtctcaatagcagatgcgcggcactgtgggcttccactctattgaggccttttctacccactttctctgcttctgtaccgtttctgacacagtggtct

SEQ ID NO: 169986 - DNA, 689 bp, Homo sapiens
tttgtatttttagtaaagacaggggtttcaccatgttggccaggctggtctcaaactcctgacctcaggtgatcttcccaccttggcctcccaaagttctgggattacacacgtgagctatcgcgcctggccattgtgcattttgatatctgtgttataccagctgattttaatgagctgggaaactttccgtgctttattatgcgctgcaacaattcaaacaatgttgaaattatctattccttgaaggttgctgggcccatgaaagtccttgactaacctttcaatgtcttctatgctccctttgtgtatctgccgaggctttcacactaaggcgaagtttcagcatttatgttttacaggaagtcatcagcttcaggtctcccttatctcactgggtctgtcttctcaccctttcttcatcagattttacctctcctgctattctcttcaccccagccccactcttacacacatacacatacatttacatgctcatacccatatgtgcacacacacaggacagttcagtgcttttatgaatacttggctagaaaaactggagccacagtacattagacttacacagtgattcctgtggatagaactgggaccaataagtgaaaacaaagagactttgtctcagtttatgtatgtgttagtccagatgctccaagaagcagacacca

SEQ ID NO: 169987 - DNA, 507 bp, Homo sapiens
cttggaaacttccggaagtcatatcagtgttggggggtagggggcagtgtctgacactacaggcatggaaagcaaagttccccgccctgcatcagagacaaactcaggtgggccaaagcaagttcctgagcacacctgggctgagctgtgctcattcaaatcggtttcttaacagaatctcaagttcatctcaagcttggagcctggtgagcacttcatgaagagcaggttcctgggtcccagccgggtgacagtggccgagggacgtacccgacctccagaagcccgggaagcatgctgttccagagaagtgcacgctgctaacagcccattccagagcgcatggtgcaataattttttgctagctttaaaaagcagcacaagaaagaaattacgcggtttgcaaactgaagtctacatggtggatggagtggccagttacgtgctcagaagaatgcagctgtgggtttctgtttggggtcaagctttgccaaatagtagcactct

SEQ ID NO: 169988 - DNA, 638 bp, Homo sapiens
  misc_feature (410)..(410): n is a, c, g, or t
atgtgctgtaggtgatctagaggttaccgattggcgacatttcaacgtttgttaaaccgatgccatgtgacaggctctgcacttggtgatgggagcacccatgcttccttacagaatcctgatactatggcgaactgcttaacatgcaagaatttgaatctaggctgggtgcaatggctcacacctgtaatcccagcactttgggaggcccaagcgggaggatcacttgaagccaggagttcgagaccagtcaaagcaacatagcaagaacttcgtctctagaaaataaaatacaataaattagccaggtatggtaatgtgcacctgtagtaccagtgctttgggaggccgaggtgggagaattgcttgagcccggaggttcagggctgcagcgagctgtgattgtgccnctggtcagacagtgctgcttgtatttaggacagtgcttctgatcaagccagtgctgcttgtatttaggacagtgcttctcaaactttaatgtggacactaatctcctggggatcttggtaagttacagattctgactctctaggtctagctggggtggggtcccaggtgatacagatactgctggtcccagaccacatgttgagtagctggactgtaggagatactgg

SEQ ID NO: 169989 - DNA, 533 bp, Homo sapiens
agatggagtcttgctctgttgcccaggctggagtgcagtggcatgatctcggctcactgcaaactccacctcccaagttcaagcgattctcctgcctcagcctcccgagtagctgggattacaggtgcccaccaccacacccagctaatttttgtatttttagtagagatggggtttcaccatattggccagactggtctcgaactcctgacctcaggtgatccacccgcctcagcctcccagagtgctgggattataggcgtgagccaccgcgcccggccttgggacaggtctttaaaggaaggaaaccccctgtgcctagaaaggggtggggaccatctgataactgtgtcacctttacactcaaggtgactatacctcccactagcacaagtggtgtaaggtcagagcagaaatcaggcccttgagggccacccccacgggcctgatttggccccccaaccgcctgtgggcataaggctttgtagaaaggcagcacaagaaacagccacatcttgctgtgggctgaggtc

SEQ ID NO: 169990 - DNA, 139 bp, Homo sapiens
gtaggaaagaaatatgatagttcaagttagattactacttctttcagagttttttgacaaatgcaggtacagtgatagtgtcagttcatggtgaatttttgttaaaataaattacaaaaaatttgtgatcctggtatct

SEQ ID NO: 169991 - DNA, 301 bp, Homo sapiens
cacctgtgccctcaaagagttcatggtctagcaggaggtgaaggagaggcagttacgataggcggagaattggctgctgtgggagcacacagaagaggctcctaacacaaaggcgggatggggggaaggcacctagaggaagcactagcaagcctgggtcctgagaggtgaaggcaatgagccaggtgagaagtgaggacttgaaaactcaaggtgcaaatgagcctgaatttggctgtacaacagggggcagggactgcttcaggtcgacgcggccgcgaatttagtagtagtaggcggc

SEQ ID NO: 169992 - DNA, 354 bp, Homo sapiens
cacccacagagacaagccccacaccacacggactcacaaatgcagaagaagagttgaccctgccctcatgtacagatagtatgctggtgtgtagtgagaggcggctagtgttcgccacgcctgttgcatcaataactattccacagaacagcatacatggtcaaggaatatttttaatatttacaatgaggactgagtgtttgctaaatgaagaaatcaaaggagtacattctggagggctggtagactcccagagccagggtttttgagatgagagtgaaaataagcaggctgagagcagaaagaaagaaagttctgcagatagaagttaggatattaccacttcggccccag

SEQ ID NO: 169993 - DNA, 1527 bp, Homo sapiens
atcagcattaagttagcactagtttatagtttccagcatctaattcctctctaccatcacctttaaattaaaacaaacaaacaaaccaagtagtgaaacatttctttttgttttgtttgagacagggtttcaccctgtcgcccaggctgtagtgcagtggtgccatcttggcttactgcagcctccgcctcccaggctgaagcaatgctcccacctcagcctcccaagtagctgagactaccagcacacccaactaatttttttgtattttcagtagacacggggttttgccctgttacccaggctggtctcgaactcctgggctcaagcaggtcccccaccttgtcctcatttctttatattctgtttcaagcacctctcttattctctgtgatttttcagagatgataaacactggtttagcaatcatgtttgttaagttacaggtctatgggataaagcttctgtgaatctggagggttagaacttatttaaaataattgaggtgcttgcttataaatatgggaataaactctttttgaaaaatttaggtatgctattgtttacattttgtagattactcttcttgatagagaagacaaaaagatttttttgcctccatcagaagtcacacctaacatgcagtggtagaacaggaagttgtctctgccataaatatttacctctctaataatttggaatgcttacctccctctctaggtcctgctttccttatgttaagttcttgaagtcaaattaataattagatagctattagtaagcacagtcaatgaaaatggcattaaattgttttttgtgtgaaatttcatctaggttatgatcaaaccctttacccctctagcatatggaatatgactttttagtaaacagaacagtgtccttctgtttgttggacagtgttggataaatcttgacataaacatcctttttatagtctccatgacgacttttaccctaccattatatttattattgccaagattacaatttacctagcactagcatgcttttgcctcttgtttaaaccttcatagccattacttgtaagtcatcacagagtaatttcagaatgacatttgagatgcttaatacaattttcttaactagagagtcctgtttcttaagcctgtcttgaaatttctgggattcaactttgttcttgctgtctatggtaataacactaaaatttaacaattacatagcgctttgtttttcataagcagttcactcttttcctgtttaaatttcatctttacatattatgttaacagtgcacatccttaagtttattcagccagcatccttgtactgttaatgctgctgtttcctgctgttgaaacatgagccctatgaagtaggtagttgtatcttcttttttacaggtgaagaaacagatacagaaaagacacgcagtgaattaactctcagaacttagccttgagcctggatattctgaatttgtatactgggttttttgtttccttgctgtgttatatttaaagtgtg

SEQ ID NO: 169994 - DNA, 1136 bp, Homo sapiens
tgaccctctggagccgctgacggggaaggaaggtaaaaaaggagcgctaaagattggcgggggttgtgggaaagcaagccgagtgtacgggaagggccggctgcggcccgccatgtttgaacctggcaagagcgaaagaagccggttggaatgccttcttcctgcccaaactaataaaaccgcatgcctaccttttgcttagtattggctagggatgactaatcataacatttgtaagtacttacggggtttcctccatggagacacagaagtctgggacgtttctagaagcctgtggcaaatttgaaaagcaagatacaaaatagcgtatggagtctgattatcgctatgtcaataaattttcttaaaggacaaagcactgaaataaaatggaaataataattcttttaaaaaatttttaaattatttttatagagatgggggttttgccatgttgcccaagcaggtctccaactcctggactcaagcgatccccccacccccagccccgtctccgcctcccaaagtgttaggatcacaggcgtgagccaatgcgacccgtctggaaagaattctaaaacatggcctgcttggccaccgcccaggatctgcaagctgcgcgcccacaagtttcggcacccatttggactttcacaatcggagatggcagtggtgaaggcatcaacatcaaaagctaccaggccttggtattctcatccagtatatgcaagatactggcaacattatcatcaagcaatggcttggatgcaaagccaccacaatgcctacaggaaggcggcggaatcctgtttcagtcttccatggttcttccttcctgcgcttcttccccaaagctcttacgataaccaggctgcgtatcctcagtccttctatgaccatcatgtggcctagcaggactccccctgcagttcttcacatttcagagggtctgggcaacatccacatggcagcagtaggatccaggcatccacaagagaagaccaagccttatccaaggaggaagagatggagaccgagtcagatgcagaggtagcatgtgacctgagcaatatggaaatcaccgaagagctccgccagtactttgcagagacagagaggcacagagaagaactact

SEQ ID NO: 169995 - DNA, 165 bp, Homo sapiens
agatgtgctgcaggagacagccagcctccggcatggagcacagccgcaggcgggaggccgtatggttgttccctgaagttccatgtgtgtggaggagatctgctggccgagtggcctctgatggcgctctggcttaggacactcagcctccctccctcgtcacag

SEQ ID NO: 169996 - DNA, 482 bp, Homo sapiens
aaaggacaggagcaagggggaggaaggcagaacagataaatagttgaagaggctcccagacaggtcttccccccaatacagccagacccacggaagcttccaccagcccagacaggctttgcccttgtgctgtcgtgcaagaggagctctggggcctgactgctgctgcgtgggggaagagccagctgtctgggggctctcacaagtacagttctgcttcctctggcttcccactgttgggactcagaaaagagtactctaaaatgaaagcctcagaagttaaaagtttttctctgcatacctgccctcctttctctcaggcgcgttctcccctagtctagccttagaaactagaatccctcttccccatagaaaccagaacctcttttccccaaagccagccataaatcctaaaaatattactcttattttccctctgcctttctgtgtaaaaactggccataaagaaatgatccgactta

SEQ ID NO: 169997 - DNA, 903 bp, Homo sapiens
gtagttatgaagttctgatgagttatgaatgatgttttgaaaataaagtgattacagaaaatttttaaatgtatgcagtgagttataaatattatagtgacttaatatccaccccatcattcatttcaaaaatacttaagcctttgaccagttgaaaattttgcattgattatttttctccctgaaaatatttttatttcacttctaccacaggattctatcataattgaatatgctctatccttcaaagttttttactgatcagactgtatcattagggtcctaagaagcaaattttcttctggattgaactgttactattattagcaatacacagtttaatcaatgtgtttcacaaaatctgataaggaattgtaggcaaaaaaaaaaaaaagttacaagaaatgcatctcttaaataagttatctctgttggtgtcctaaggtttattacacctttctacctcagcagggcagcacaatgtagtaagatttaggatgtgccaggggggagaggagccattatgaaatgccaggtgggcctggactgcaggagtcctcagacagatcacttttagaagagttgggatctgaaaactgaatcccttgaaactcctcatgaccacgtgtccatattctcagggatacgcatgcctccatttgaagattgtttttacagaaataattggggtaaggaaaggagacaaggatgctagggattgagtctggaaagataggcaagaaccagatgacagcagggtcttgggggacacataaggattttagaatttatcccaaaggacagggaagctactgagattttaaggagaggagtgacatgcttatatttgatctttttaaaagttgttcaggcattgtggagagtatattttaaacagtttgg

SEQ ID NO: 169998 - DNA, 336 bp, Homo sapiens
agagatgatttaaagtataagggaggattacataacttatatgaaaatattatgccattttacggaaggaatttcagcatcctccaattttggtattcatgggggtcctggaactaatcccctgtggatcccaagggacaactgtatataggaagaaatttattatgagaaattggttcatgctattataaagacagaaaagtcccaagatctgccagcagtgaactggcaacccaggaaagctagtggttttgaggaaagctaaattcagttcgaggacagagaacctgggagagctgttcgtataaatcgcagtgtgtggcaggagaagaagag

SEQ ID NO: 169999 - DNA, 168 bp, Homo sapiens
gggattggtctaggtggccagaccggcctgagccacatggctgatatgccctcaggtcatgcttcggaatggtgtcactatccagtctgtcaccaagaggctagctgtgggattggatgtagaatttcaagctctcttcttagaggccccaaagacaagcatataggg

SEQ ID NO: 170000 - DNA, 186 bp, Homo sapiens
cctggggcagaggtggatcctgatttggaagagaaagaagttcatctcacccgccagaagcagtctcactgtgggaggtgataactacagtctctcctgggcatcccatcagggcctccctgagacccttggcccctgaattaatttgcattttcttgatttttaatgaagttgaaaatcgtttca

SEQ ID NO: 170001 - DNA, 146 bp, Homo sapiens
gtgagtcgaatcggggagatggacacatgggtgcttgttttattattttatgtgggaaatattcccattaaaaacataaaataaatatgaaaaaggaaaacaagacaaattaggcagtgtaagagaatggatggggttcgcgtggg

SEQ ID NO: 170002 - DNA, 236 bp, Homo sapiens
cctcgccagaaattgaacactgctgggtcttaaactacaccccccagaacttcaagaaaataaatttctattgtgtaagccacccagtgtatgatatttatatggcaacctgagccctttactgacataggaaaatctcaaataacgaatgaaatttacctaggtctccaggttgaaacacttcagagttgagaccgatataggaaaatgagggggttgggtgtggtgactcatgt

SEQ ID NO: 170003 - DNA, 456 bp, Homo sapiens
aagagttcaaaatgtataagccaaaagaactgttctttatagattcaaagttcagtaaaaaaaataatgagcataatttgaagttgagttgaatttgagatgccttctgaacattaagggaagatacttagaaagcaactggaaacacaggcccgcagctcagaggagtgagattcaaaattataacttgcatcaggattccccaactcaaatccctacagaggctagacagggcaaaaagaggactgaagaatgaggaagcacccagaggtggcttggtgagaatggtcaaataaagcttgtgggacagtcagtgaccttggtgttttctctatagcaccttctctaaaaatgaaggctttctatatctgcttcctgtgaaggatactgaatttaaaaaaaaactattccatcatatttgtctcttctagtctcagctttatttgcccatagaaa

SEQ ID NO: 170004 - DNA, 478 bp, Homo sapiens
cttgaaaaccactgtcgtagtgcaaactccttcctttagatgagtcttcagcagatatctctatccaaagatgtttctgttctgtttttcaagatgggccttagtagctctgttgggatatttcgttgtgatgcatttgagaaactctctggaattttcaggaattatggttcctaccataagaatataagaatttccaaatatgttccttctcttacgtgaatacatcccttccaagctggtctcccatcacagttccccgtggccctgcccctccttggccgatgccgtctctgaagcccaggtgtgcgtgctgctgctgctttctctcctgcttctgcgtcccgttcctcttcttagtcttgtggcacctggctgagccctgaagaaggcagtggcagctgggcatgataataatctggagtcttctcatcatggcagtctgcccttccctggggactgtagtaaactggctgga

SEQ ID NO: 170005 - DNA, 679 bp, Homo sapiens
gggacacagctgtgtcagctcccccagtcactcatgtcaccagcgggtagaccttgagagaccagtgggttcttctctcactgtccctccagcaagattttaggtgctggaaaggcaagagactgaatcagaaagcccagattcctaacagtctggagcagcctttccaaaggaaacattctcagtatctagtttttaattcttttggctggcaaaaattagatgcaagttcttgtaagacacctccagcccccaccctcagtttagatcgtaccaagatttccttagcatctggtggtgccctttgcccctgagggtttattgggttatagataggtagttatgacaacccgagtaatctggcggcatggggacacccagatgacagggctacactcttgtgccaagtggcaggaggtggtcaccttccaggcacgccgcctaccaccctacctgtgtgcctggattccagcaccatctccacccgtcccagagccaagcggccctcagaagtcacccagattcctgtaaaacagcatcatagttaacagccccaactctggaaccaccctggaagggccagggtcccaactctgcctcccgccccacagcaaaccatgcgtaatggctcctaccttggagcatggagtgtaaatgaattaatagatgggaaggacgt

SEQ ID NO: 170006 - DNA, 348 bp, Homo sapiens
caggtggatcacctgaggtcaggagttcaaaaccagcctggtcagtatggtgaaaccccgtctctaataaaaatacaaaaaaattatcagggtgtggtggcactcgcctgtagtcccagctacttggggggctgaggcaggagaatcacttgaacctgagaggcagaggctgcagtgagctgagatcacaccacagccctccagcctgggtgacagagcaggacccagcttcaaaacaaaaaaaaaacacaaaacaaaaaaaaaaaactgaggtggggtaagggggcttcactcttaagcctggaaagaacatgctctacccagagccgcttccactgaccaaaaata

SEQ ID NO: 170007 - DNA, 440 bp, Homo sapiens
ggctcatacctgtaatcccagcactttgggaggctgaggcaggcagattacctgaggtcgggagttcgagaccaacctgaccaacacggagaaaccctgtctctactaaaaatacaaaattagctggtgtggtggcacgtgcctgtattcccagctactcaggaggctgagacaggagaattgcttgaacccgggaagcggaggttatggtgaaccgagatggtgtcattgcactccagcctgggcaacaagaacaaaactccatctcaaaaaaaaaaaaaaaaaaaaaaaaagtcatacttttgctttgtttgtcatctttaagaagatcatccctatcgaaggtcataaacatattcttaatattttcacgtgtttattttccaaggttaggtcttagaaaattacaaaataaccatttgtaatttcatgttgtgaaa

SEQ ID NO: 170008 - DNA, 373 bp, Homo sapiens
caaaatgatggcctctaaggaggggaactgagtacctgagggaacatgaatggggagcaatttacccttcattctagactagggagaggttggtaacttttctctgtaaagggccagatcgtaaatattttaggctgtgtggaccacgtggtctccgatgcaacgactcaattctgccactgcagtgcaaaagcagcctcggacaatatgtaaatgaggggcatggctgtgtgccaattcagctttacaaactggaatttgaattttctgtgttaggaaatattgttccccctcccccagccatttaaaaaatgctcgtggctgacatggtggctcacacctgtaatcccagtgcttcaggaggttgaggtgg

SEQ ID NO: 170009 - DNA, 223 bp, Homo sapiens
ataccttatcctcccagcctactgttcagtgtttttatgggcacgctcattcctcaacaatactggtcccacagtatttttctctccaatcacaacagagcataccactgctgcctccaggcatggcaacaccatgtctggccaccaacattgccaaattggacaccacttccactctcctcactggaaatagatgctgtagccatttatgccactgctgccg

SEQ ID NO: 170010 - DNA, 360 bp, Homo sapiens
aaccaaaattcaaaccaaatatgtcaggttccagagtgcaaacttttcaccactgtaatataagctgtctgcatatttggcacagttttcaccatttgttaagcatgtggcccaaacaatgcaagaaggatctattgagcaactacactgtgcccccagcattgcagctgagggaggaagggcagcattctgctttctgagcactgtgacttccttgtcaaagcctaacttctaaagagccatttacctaccaaaagattttgctgctgtaaagaaagccattgcctggtacatgaccatagcaagggttagcaaactgtgacccaccaccagtatggcccataagccatacaaatagtc

SEQ ID NO: 170011 - DNA, 224 bp, Homo sapiens
aggttaggtcggcatcattcttcatcagtggactctacaacttaaatcataaagttctgtcagtaaaaaaaaaatctttactatcaatgtaaatatccatcaattatatgcacatacttccattgtaattataaagcagtcacaggatgagatgaaaaacattctaatattttctttttgcattctagtggatcaacttacattaccacctgggacacacacac

SEQ ID NO: 170012 - DNA, 149 bp, Homo sapiens
gtatgtatgagagaaagagaatgcctgtaagtgtttaaatgtatgtacattgatgaaagacaaattggtaagaaggtatcaggaatgattcaagatttctggaatgagtttagatgagaggttgaggctggtatatacattttggagtt

SEQ ID NO: 170013 - DNA, 223 bp, Homo sapiens
actttccttaaatccttctcgattttataaatattcttcaagtatatattggtgcccagcttcagaagataatagtcttgggtaaacatttttcccaatcacagtgacatcccactgactctcctattgcatacatttcataaagtaagatcttgacttgtctatgaggatttccatagctaagaacctagccagaataaaaatgtactgacaccagcttggt

SEQ ID NO: 170014 - DNA, 319 bp, Homo sapiens
gaaaattaagcggctttttgtcgcttacaattcttgcttagtcataagattcaaaatactgtgtagtttataagtacaatgtttggatggtaacttattgcatggtgttctaggaggacattaaatgtttgaatttaatttccacttgcaactcaccttattctgtagtttgagaaggatcagccagcttttactagtcttcatagaattctttgaaactctcttcatattcaaaacaagtccatataacatgtgaatgtgatttaatgtttagtgactacggagatgattaaggttagcagttgtgattgtataatag

SEQ ID NO: 170015 - DNA, 373 bp, Homo sapiens
tgaagaaagagtagaagatagttgggttggggtgggaggaggcagagaaagaagcatgtgtaaaggctcagagatatcaggtgtgcacgtgcctgtagtcctagctactggggagggtgaggtgggaagatcatttgagcccaggagttctgggctttagtgcacaatgctaattgggtgtccacactaaatttggcatcaacatggtgacctcccaggagtgaggaatcaccagtttgcctaaggaggggtgaactggcccagatcagaaatgaagcacttccgtgctggtcagtagagggatcatgcctgtgaacagccattgcactgcagcctgggcgacaagagggaaactccgtctaaaaaaagaaaa

SEQ ID NO: 170016 - DNA, 408 bp, Homo sapiens
agagcaaaaaataaaaagaaaaaaagaaattaaaaaaagaaagaaaaaattttaaaaaattcttttgaaaaataaattacacagtctgtgatactgtgttatagcaacagaaaatgaactaaggcgggttcccagaacctttataatcacatcagcttgttaactgctgttccacttgtaagcagctccccctcaggccagatattactggcataagtggaaaacctaggcacctgaaagtttctgacagcctttcagaaagttccagaaaggagtgcctttgttttcctcactaagtgagagattaaaaaagaaaatcagtaaaagtcacttcccctaatgcctacagttgtcatcctggaatcacacttttattgaatccaattcagcaaacatttatcgaagacc

SEQ ID NO: 170017 - DNA, 405 bp, Homo sapiens
cggcaaggttgctgtgagcaaagagcaagactctgtctcaaaaaaattttaaaaaattcttttgaaaaataaattacacagtctgtgatactgtgttatagcaacagaaaatgaactaaggcgggttcccagaacctttataatcacatcagcttgttaactgctgttccacttgtaagcagctccccctcaggccagatattactggcataagtggaaaacctaggcacctgaaagtttctgacagcctttcagaaagttccagaaaggagtgcctttgttttcctcactaagtgagagattaaaaaagaaaatcagtaaaagtcacttcccctaatgcctacagttgtcatcctggaatcacacttttattgaatccaattcagcaaacatttatcgaagacc

SEQ ID NO: 170018 - DNA, 429 bp, Homo sapiens
cgtgaaggccccagagagggagccaccatccagctgcagaggtggccacatccccaccaggtgagtctaagtgctgctgcaaaccagctccatataccagcacatgtgtctcagaccaaggaagtttatgatgcagggaggagagccaccttaatggaatgagcaacaaggcagctgcagtcacagggtacttttgggggaaataatttacatttaaaaattttaaataagtagattgagtacaaattgagagcaaaggcttctggctgaagagatgagaagcaaagcatggagcaatagaatgacactagatcatttcattctttcccttcagtgcttgttgtttaagagaaggcatgaaaacatatttgatctgaaaaataatgcattaactcattctacagctgagaagtcggcaagtcagggttc

SEQ ID NO: 170019 - DNA, 594 bp, Homo sapiens
cagcagccaatataaacagagaaaatgtatttccatgtatactttaattccaaaagtccaaacatcattactgagaatgctcagtaatttcataacattaaatgttgggtcatttttgtttgctttctgtcttaagacaaatggattctatttggattgcacccaattctgttactttttttaaatatcattaagttgattttgtgtcaacaagatcaaataacttgaaaaacttaccctctacatgaaaaatccccaatgtccttttgtaaacaaaacttggagttactcaagtgcattaactcttctgagaacaaataaaatgagttaagtatatgctgagaatgtcagattggttcatacacttggaaatgaatttaacaagaatcatttgccatctctatgaccatacacatgaaattaattttgcctcagccaaaaatcttgtttgctacaattaaacactgatgatgcaaatctatagtaaacatacatatttccaaatcctcactctttgttgagcaactgagacagatggaaactctcagctgcacaccatttaacaacataaatgtccacactttggacattact

SEQ ID NO: 170020 - DNA, 251 bp, Homo sapiens
ttaaactcaacatgctcaacactcaattcaccctcttcctctccaaacccatttgtcctcccataattcccaactcaactacagatagcatgcgaagactctaacagccccaggctagaagtctccaagtcatctccaaatgccactgccccctcatactgcaactaatcaaatgccaattccttttgatactatgtctcctttagttcaagtcatcattgtctctgatctcaacaacagcaaaagggtct

SEQ ID NO: 170021 - DNA, 596 bp, Homo sapiens
gccagggagaagccagggcgttcaaaggcagagagggagggacaacaggaacaacaagaaggaccccagacggggcaggaggaaggagggttgaattcaccaaggacttgggctccgccgggctgcttgtttctccttcagagagtcagaaaggagagtcagggacactcagcagagaagggctgaggtcctccaggggccttcggtcacgccacagggggagcagtctagacccccagcttcccctttgacagggaaaaagaggcacagggtgggggtcgaaggtggatgcactcgtgaccgagagtgcggggccaggtgtcggcagcccgtgttcagttcccgggtctatacacactgataacaaagttgagccgtgtgttatccggagccctggacaacacacagctcatgtggtcacagtcctgcatttgaggggactcggggggacccaccagcaccatgcacacgatggctttacgccctctcttcagcagcactcacctggtggggcatttgtctagtctacagctggtgcaaacaacacactccgtggtacctggggcgcctgggcccaggcctttaagtgcctgagc

SEQ ID NO: 170022 - DNA, 588 bp, Homo sapiens
gtattttgtgccaaataaagtactgatttctaaaactatcttttgaatacaattctggaagttttctgctatatcttatgtgcaataggttacatgtcgctaatttgtatcaattacatttggagttcttaaaaacaatgtggtattcaaagtagtcatagaagatattttgtgccttcatggcacttttttctgtcatataacgttgtaattttttggtaagacacatgaaaatttaagttgctttcacctttactgttttctcagagcttggtttctcatttttatgttatagattattttaaaattagatatgaaattcatagaaagtcataaaattgtgactagccatgaaaaagaattgtgcatgagcaaatatttccaagttgacacatcatgggtattcagagaccttcctctgcacaactgttacctatcctcctatgtaattctattaaaagagagtaattccttagtcacaaacctagttcctccctctcctcccacttctgccttggaacacgataaggcattactaagttgaacatcttggggggtccataattaaagattcaacatgtgcacata

SEQ ID NO: 170023 - DNA, 475 bp, Homo sapiens
attttcttaatggtatcttttgaagagaaaatggttttaattttgacaagtccagtttatcatcttttcttctttgtagttgtgtacttttgctgctgtattttaggaaatctttgcaaaatcaataatatgttctcctaagtttacttctaagaccagcactattcaatagaaataatatgtgagccacatatgtaattttaaaaatttttggtcaggcagggctgcacgcctgtaatcccagcactctgggaggctgaatagcttgaggcagataacttgaggccaggagttcgagaccagcctggccaacatggcgaaacctcgtctctactaaaaagtaataaaaaaaattagctgagtttgctggtgcacaactgtaatcccagctacttgggaggttgaagcacgagaatcgtttgaacttgggaggcagaggttgcagtgagccaagatcatgccacttgcattctag

SEQ ID NO: 170024 - DNA, 378 bp, Homo sapiens
atgcgcggtgactctaaggatcccattcactcagctgctgcctgtctcactaacttctctgcaaccttggagttttcagagggaacaccctcatcatcctgtgaccagatagacaaacctgcctgtatctgctcccgtttactcctcttcccttctgttgtcccacttctatcttttgccacatgcatctctcctttttatggataatcagtaaaatgagtaagattctctccagaagcctcatctttaaacaaaacacaccacactgaccttaccttcctagtaactaccacctctgccaggtctcccagctctctcatctgtccttctacattgttttctacttgctcccccatctgatctgttctccatatagca

SEQ ID NO: 170025 - DNA, 716 bp, Homo sapiens
tatcataaaggtgaaaagagcccagcagtaagctgtattagtccattctcacactgctataaagaaacagcctgagactgggtactttataaacaaaagaggtttaattgacttccagtttcacatagctggggagcctcgaaagggaaatttacaatcatcgcagaaggtgaaggggaagcaaggcacatgttacatggcagcaggagggaaagagagaagggggaagtgcgagacacttaccaaacaagcagatctcatgagaactcattatcacgagaacagcaagaggggaatcttcccccatgatctaatcacctcccaccagatccctccctcgacaagtggggactacagttcaagatgagatttgggcgggggcacagagccaaaccataaccgtaaccaactctggttgcagggtgaacaccctgaaacagcagtgctcatttattctgagagtggagctcctttttctgaaactcctcagagtgggacccttgcagtggctttgttgtcagcccttctggcagacgggcccctgttggagtttgccttttgttttctatgcagaacacacctctgcttccccacactgtggctacttcctaccttttccttgctcctcaaatctgtcacccctcctgctgcctgtctcactaacttctctgcaaccttggagttttcagagggaacaccctcatcatcctgtgacc

SEQ ID NO: 170026 - DNA, 656 bp, Homo sapiens
tttgagacagagttttgctcttgttgcccaggctggagtgcagtgaggtgatcttagctccctgcaacctccacctccctggttcaagcgattctcctgcctcagccttccaagtagctgggattatagacgcccaccaccatgcctggctaactttttgtatttttagtaaagacagggtttcagcaggttggccaggctggtctcgaactaggtgatccacccgcctcagcctccaaaagtgctgggattacaggcctgagctaccatgcccagcctgcattttatatacagacttacttgttttcacttcatgtattatggagggatttccacgctattatatgaagatattcaataccatttttctgtggctgcacagtatcctatggtattggcaataaagcattatgtatttaattagacacacattgattacattgtttctaatcttttcttattaaaaccacagctgcaattaaaaaaaaatacacctttggttacattttactttcttcctgcttaaattgccttatctgaaaatgaagatactatcagtcccacctcacagagttttttaaagaatgaaatacatgaaaaatatgtaaaattcttagttccagaaaccaggtaaatcctcagcaagtgttagatgt

SEQ ID NO: 170027 - DNA, 669 bp, Homo sapiens
tactgctcaaggtcatggccaaggtctgattgcaaaaattcaaaaagattgcaacctcaggcataaatggattaattagccatggaccaaacccttcatccagataaggggtaacggacagggaccgcaaaaggagtacttaaaacccggaaaactttgtaactgagccccttcagcctcttgctcaggcccactcccaccctgcgtagtgctttctcgctttaacaaatcccagctgtctgcttccttcctgtgtgtcattcgtttgttactttctgggttttgttcaattctttgttcgaaacgctaaggacctgaacaacgcacactcctggccttccctctggtaacaggatgaggggcaggctttgcgtggaagtagcagcaagccctggagcctaaggcttatttgttagccaggagtgatagcccctgtgccacgctgcgtcctgcgttccccgcacttgctgtacaagattttcgaaagctggagtgcggctcttctctatttttcccaggggcaccaggacccctaaaagcgcccgtgtatgtgcctcctatgatagggtagcccaggccctgggataagagtatgtgtggtttcttggcttggtgacactcccaccccctccatgaaccctccctcctttgacggccacgtttgaaata

SEQ ID NO: 170028 - DNA, 533 bp, Homo sapiens
aaagtttatgtcaaaactggctgaggacaaagaatgtgtaaagtcaaaagtgaaagaaaagttaaatatttagtgtataagaagtgtgaaactaaatggcaggaggtcgccaggagctctaacatgaaactggggagtgaggttagtaggcagagtcctgcattcccttccctctttgtcaatcttattggcagtttttcctatcacttccaatagcatttccagggtgggggaaaatcatacaccacacagtaagagtgatattctgtgttaccactggaaaggaaaccactaaagggtgtcggtagaagaactaattctgacctgttactagcttcttctgaggaatggtagaggtattttttttcttctattctattcctactttgtaataaacaaattttttttaacatgagatctttaaactgaaaaattggcagctagatagctgtacgaattttctaattaaaacattatcacatctctattcatcactaaaatcaaagagcaaaaaacaaaacttgtaagattcc

SEQ ID NO: 170029 - DNA, 497 bp, Homo sapiens
ttgactttccactcagattacaggtgtggaacttaggatcagaaaaggggagtgatttctgtaaaggcttgctaagttagcaagacaatatacccacttcaagagcactctcctgtcaacatgtattgaaaatttttaatatagaaggcactacattggcaattttgatgatcaaaagataagtttttctttattgcatgaatgtataatccattagaaaacatatacttgactaaaatttgcaaacatacagcatggggagtgattagcagagagggaaagcaagtatcatgctgtggcaaaacgaggaaggtgagagcatcaggaaggacagccatgagaggtgggcatgtgtggggaggcagcgatgatgtggagagcctgccagagagcatgtgcagcaggcacagtgtgaacagaggctcccaggtggattgtgggagccttagggggaagtttagataagagttctcctgggagaactatcgcactctata

SEQ ID NO: 170030 - DNA, 288 bp, Homo sapiens
ttggtgttctttacaacaacttgtcagtatacttttatggtctgatgttgtataacacaaactatgcattacattgcaacagaaaggatggcacagaaaagattaaaaaactaaagtaacaatgctaaaagttgaatattaaatgttaaccaaaattttatggtgcccttggatctactagtaataaaaaatttgaggcctcaatcaatggctgattttatttcaagtacaggttgaacatcccaaatccaaaatctgaagactccaaaatcatacactttttgagtg

SEQ ID NO: 170031 - DNA, 333 bp, Homo sapiens
agtggggggccacaagggcccacccagtccggctttccagaggcatcccttgagggcggccacatactctcaactccccgccccatgaccaacgggaccctgggaggacgcaagggagcttctaccccattgcagttgcacaaaagaaattgaacacttttgagttgcccttagcaacctaattgcatcagtacattgcacacaggagccaaagtaactgaattttgatgaaaagacggcggtaatttacggcatcacaaaattagttgtcatggcgacgggttaattacatctcaaattaacaatgcaagtgtggtgaaattaaatataaat

SEQ ID NO: 170032 - DNA, 369 bp, Homo sapiens
tcaaaagaaagaaagaaagaaagaaagaggaaagggagcacatgtagacattttgcctgatgatttgcagttattgcagctagatatagaaaaatactgatttacagttttgaaggaaggactgacagagacaaagaaaagcacattactcataataatcctaataacagtagtgagagtttaccctttgaggaattccaggctatgtcaggagaacagtgcatctgtttgggaaccagcatgaaattttggcagctttgggtcaaaagcgactgtgtctaacaaaagcaggaataatgacaattaacaatatgcacagaacactcagctaaacatgttatatgcattcactcatttaatcttgctagg

SEQ ID NO: 170033 - DNA, 411 bp, Homo sapiens
tctcgtattgaactgcggtttgtggcttgggtgactataaggataatggtgacattaatcagagataagggaatcaagctggaggaggatggggtataggaaacaatggagaggtaggaatgagacatcacatttaagtttgggcacagtggctcacgcctgtaatcccagcattttatgaggctgaggcaggagaatcgcttgaacctgggaggcggaggttgcagtgagccaaggctgcaaaattgcactccagcctgggcgacagagcgagactccatctcaaaagaaaaaaaaaaaggaaaaagggaggggaagtgtatttaaagatcccaacctaaaagggtttttccctatggagccaagatggccgaataggaacagctccagtctacagctcccagcatgagc

SEQ ID NO: 170034 - DNA, 589 bp, Homo sapiens
tatccatcatattcatcttcgtgaacgaggccctgtcggtgatcctgcggtccgtgcacagtgccgtcaatcacacgcccacacacctgctgaaggaaatcattctggtggatgacaacagcgacgaagaggagctgaaggtccccctagaggagtatgtccacaaacgctaccccgggctggtgaaggtggtaagaaatcagaagagggaaggcctgatccgcgctcgcattgagggctggaaggtggctaccgggcaggtcactggcttctttgatgcccacgtggaattcaccgctggctgggctgagccggttctatcccgcatccaggaaaaccggaagcgtgtgatcctcccctccattgacaacatcaaacaggacaactttgaggtgcagcggtacgagaactcggcccacgggtacagctgggagctgtggtgcatgtacatcagccccccaaaagactggtgggacgccggagacccttctctccccatcaggaccccagccatgataggctgctcgttcgtggtcaacaggaagttcttcggtgaaattggtcttctggatcctggcatggatgtata

SEQ ID NO: 170035 - DNA, 478 bp, Homo sapiens
cctcccacaagtgctgggattacagatgtgagccaccacacccagccagtaaattttcctcaacaaaatgtttcacaaatgatctttaccaccagcagggtcaaagcatattttagttcaatgtacaaccagctgaacaatttaataaccgagcacaaagacagcctttggcacaatttttcacaatccctctcaaacttaagagcaactactagttcttcatgggctttatctctgatttactgcctcagaacttcctaaggaggacagagctcaggaatctgtattacaagtttcccaggcaacgaaactggtttcagaaccacagccttaatacatttggtatgtgttggagagcagaaagataagggccatacttcagagctctagtcccataaaaatcccacaggaggagccactgtcacggcttctcctcacatagatgggcttgcacaacttaagagtaccaaggcataca

SEQ ID NO: 170036 - DNA, 181 bp, Homo sapiens
  misc_feature (62)..(62): n is a, c, g, or t
gaatcgggactctgtccccaaggaggatgggaaggaaagcacaagtagtgactgcaagctgnccacgtcagaggagtctcgccttgggagcagttcttttcactatgaggagtgacaagatttcatcacttgaaggaaagcctctgaaggaaagctccttagcaacactttggtgcaatta

SEQ ID NO: 170037 - DNA, 151 bp, Homo sapiens
tatgattagacagttgtggagcttgttggactaggatgtggatatgtgtattcctgttaacacatacatctccctcagttctcagggtaggatcaactcgtttagcaaactacccaggtatcagttttcttcttcctcactccatatgctt

SEQ ID NO: 170038 - DNA, 236 bp, Homo sapiens
tactaccatcaatactgttgttcactttggctgtctgtgcagaataccgtctaactaagcaaggataaaccaagaattagaaaaaaactaaaataactttagtgtgtcttctgcgaaacagagtgtgacattagttctcagattcatgagacatcagaatgtctgatgtgtaatgaaatatgtctgccactacagtgggaaacttatagttactaagtagacttgcaacaaaagca

SEQ ID NO: 170039 - DNA, 210 bp, Homo sapiens
atacaaaacaggactgagagggtcagagaattggatttgagacctaataagcaaatgactaaacctcacttcttccagtgttctacagttccataaatggcacatctccccaaatggtgaaaccagaaccctaggaatcatcctttttttctttcttctttttttttttttttttttttgagacggggttttgctcttgttgcccagact

SEQ ID NO: 170040 - DNA, 901 bp, Homo sapiens
agttcaaagacgttgaatcatgacagaggaatagagaagggccactaagtcttctgagagcagaaggtttaagattagagagaaaaatgcttcccagagggatctcaaattcatgggacaaaattcagaggacaagaatatccatacaggaaggcgcaaagaatgatgaacagaatggccaggcgcggtggctcacgcctgtaatcccagcactttgggaggccaaggcgggcggatcacgaggttaggagaccgagaccatcctggctaacacggtgaaaccccgtctctactaaaaatacaaaaaattagctgggcatggtggcgggcgcctgtagtcccagctactcaggaggctgaggcagaagaatcacttgaacctgggaggcggaggttgcagtgagctgagatcgcaccactgcactccagcctggcgacagagcgagactctgactcaaaaacaaaacaaaacaaaacaaaagatgaacagaaagatgccgtgaaggccacaaggacaaaatgcacgtaaccaaggccatgtggccaggccacctcgctgaacagctctggcaaccaggtttctaaacagaagaaccttacatttcttttcagacatttccaagggaattctgtcagaagcacgtcagaggtcacattttgtcatgtgaacatttaacagcaatgcatttttgaacaagtgatttttagaacatctttctgctgcttacagaaggctcttcgttattctcactaggtgcttggggtaacagcatagtcacttccacagtggctctttcctctcttataaatcatactaggacatgaaattctacctaagctactaagtaactttcctttgatttctaggtaagaattaaaaggatcacgtagtttttcagag

SEQ ID NO: 170041 - DNA, 380 bp, Homo sapiens
aaaaaagactccatgatttgttgctatttaaatttaagactgtcagaattatatctcagtagagctatgatttcacaaaaattggggggcataactgagctgaacaaagacctaaatggtatttacttagcgtttccctggccccactggacaggcccccctcctcacccctccagtttgcagtcactgcccgcatctaagggaaactttcattttgtcattgtttcgctcttaagtatacactcattttaatagttaaatatcaaacttcatgtgtttatttgatatttcagatcatgaatttttgttatttagagtatatacttgtgctgtgctaaacaaacaataaatagtataaatatcaaagttattaatttgct

SEQ ID NO: 170042 - DNA, 593 bp, Homo sapiens
ttaagactgtattttaaaatattattgatttaacgttggactagagacattaaagcaagtaaacatctttaagaatctgggaaccccttgctccaattaatattttaggcagtggagcttgatttaaaagtgcacgttttcttaacaactaatctagttttcagggctagtattctgttgactggtctgtcttttgggtgctaaataaaaatcggcatctcattgcattttaattgcctcatccgatatagcatattgtaaactggacattttctgaggagaaacaacatgcatttgcccatgcactggtgcatttaaatgtcaagtatgttaaatttattgctttcataaattgtatcgatagtaataaatttgtaatttgaaataaattacaaatataaataatatatttcttaaggtttgtgttacctcatgaattttccccactaatcatattacaagcaaattacttgccaatattaattgtgcctctacttgcaggcaacgttaatagtaaaataatgtaggtgccaacattaaaccttgaagggaaagagtactccctgaaaatggcctctcttttgttatcaggt

SEQ ID NO: 170043 - DNA, 297 bp, Homo sapiens
taagtttcgttactctgaccctacctaatattaaaaagagattaattaaattgttcgcaacaaaaataatatatttcagtgtttgtaacacgtagaagtgaattgtatgacaatagcataaaggctggaagagcagaaattgacatgtatttgcgctgggcagaataatgctcccctctttccccaaaagatatcaagtcctaatccctggagcctgtaaatattactttatatggaaaattgttttatgatgtgattaaattcaggatcttgagatgagggggctatcttggatga

SEQ ID NO: 170044 - DNA, 233 bp, Homo sapiens
gattgtatccgaacaggacactgccaatccttattttattttccagagtcaaggaaacttgtcttaaactaaatatactcctgtaaatattaggatttaaagatgtttgtttctctctgcctagttcctctagaatttgaaaactagttataagtattcttaaaccacaacaatatagttgtgtgcatcagtgcggtaagaatatattttcttgcgtaacagaacacaattgg

SEQ ID NO: 170045 - DNA, 282 bp, Homo sapiens
gcagagccaggattggaatttaggtctcaccatactctgcaacttcttagtttctccaacttgttttcttgtgcagcaaagtaaagaaaggtcatggtgagctggagagaatagggaaagtaaaggacacagcattgattctgaaaaaagtgctgatgctattgggaaaatcagaagagtattagcaggaggggaattaaagaaaacatcatttaaaaaatctcaggccaggcacaatggcacaggcctgtaatcccagcactgctggaggccacggaggct

SEQ ID NO: 170046 - DNA, 572 bp, Homo sapiens
aacaatctcacattcctcccaccctttctggctcaggtaagcttaccttgcaaaaactctacctatgagtatttgccttagaaagagacagagtgaaaggaggatgctctgctaccccacgctgagggcctgggttatttctgttatattggacttccccaaacccctgaagagttcaaatactgtattgtgctgctttaaccgacccctccccttaggtgcttgggatgggtgtgagacctacactgtgagctgcaatgagggagaaagtgggtatggccctttccacagcaccaaggctcttctccacccatctctttcatagtcttagggtgtgacaggatttaggggattaaaaggaaagtccagcaaaggtgcctgcttttccattcctcctcctgtgaggtgtgcaccatgttgggtcttggatgaggactcctcctttacatgcctggattagcaggatccgctcagaagacttaacatgaggggagattttccaaggagaggccaccctgccttccacatgaggagggtgtgccccggcagaggggtctgattcttgtcaggag

SEQ ID NO: 170047 - DNA, 352 bp, Homo sapiens
ctggggcctctcttcaggtctttcatcttccagtgggctatcctgagcatggtcatatgctgatgggtgcattctctgggcatgagcaagggctgcagggcttcttgaagccaaggctcagaacatgcataacatcacttctgccatattccctggtcaaagcaaatcacaagcccaccccagaagtaaaggaggaaatagagaagagaatagagatgcctcctcttgatgggagaagctgcaaataatttgtgatattttttggaacccaccacactaatttcagtgtggtcctcgcaattgcttggctgtctaaaaacatactccagtctagtgtgcatttctgaaaatg

SEQ ID NO: 170048 - DNA, 275 bp, Homo sapiens
tgggtggtttggacagtgagccagtatagtaacatactgtacaggtttatagtctaggagcaataggctataccttacagcctaggtgtgtagtaggttatactgtctaggcttgtgtgaatacactctgatgtttgcacaacaatgaaatcacctaatgacacattcctcaggaggtatacctgttgttaatcaatgacatgactgtatctatttttaatatcaagttaccttaattagaattcactctatctttcagggaactataaagattg

SEQ ID NO: 170049 - DNA, 120 bp, Homo sapiens
ccggtacctctctccacactggcccactggcacggtagctagtttccctgtctattccagttccatatgtcccttcactgtaatttagactaaaacacaagtgtccctgggcaaatatga

SEQ ID NO: 170050 - DNA, 511 bp, Homo sapiens
atcacttgaaactaggaggtagagattgcagtgagccgagattgcaccactgcactccagcctgggtgacaaagcaagactccgtctccaaaaaaaaaaaaaaaaaaaaaagatggaaagatggattaggtctccaaaaaaaaaaaaaaaaaaaagatggaaagatggattagaatcccattccactgtatggctcagtttgcatcactccctgtaaaacaggcataataatgcctacttcataggtttgctgtggggattaagtgaaagaaaataaaagccttggtacacaggaccaaataaataagtctatacatagcagctaggattagtattacaaaggtgttactaggtttttctgcttgccacctgagaaactgagatagaaagaagttaacagacatgcgtgtcccagaagcatgcctaaccatgctgccaaccactccgagaagacatttttttaagcttttaaccttcagagacaagttgtatttaccacttctgagaaaaa

SEQ ID NO: 170051 - DNA, 468 bp, Homo sapiens
tcattgtactatctagaaagaaaatgagatttaaaagtaatgctgaagatgcccacctttacttccctgcttgggttttaaaggagaggtggctttatgtacatatgaccctgctctcctggccacagcccatcagaacagaaatgtaccccaccccacacacctgggccagttatcttctctcctgggaacttggaaatgagacacagaactaagacagtaaaggttaggacagtaaagacaactaagcgttggggctcaaataatgttaattagaggctagaaaaaccaaagccacttaagaaataaatttttagaggagcaagaattaaaaacattgcaaagggactgaagtatgcaaagtaatatggagcagaaatgtgaggaaaaacagacgaaagaccaggcagacccaggtggaaatgtggatgaaagggctgcctgaaagccttcagtcccagtgaaggc

SEQ ID NO: 170052 - DNA, 524 bp, Homo sapiens
cagggtgcaaatgtgctatggagatttcagagcctgggcttcccagaggaggcctttgccccacagaatctttgctccatttctccactttgctgcctctatgaatcaatgattctgtgttgtccatttttcctttgcaatcttttgccatctcttcattaaaaatggtctccatcattctggccaagcacagtgactaacatacaataggtgtgcagtaaatgtctagtggatgaatacccagtgtgaacattaattgagcaccactagctgccaagcagccaagcaccctatatctgggagatgtagaatttaaggctgtgtagtcactgtcctcaagctgctcacagctttgtgtaagacactcaagggaacatgcaaagctcagggcagctcaatttggggcgagggttatggagaaaatacagtctgcatgcttttagtacatgcagttctgcatcttggggtgcagtgctagagtgaatgacacagtagaggtgacaggcttaggatttaaatttgat

SEQ ID NO: 170053 - DNA, 276 bp, Homo sapiens
gcccaccccccacacactgcggacacagggaaggaagccacaggacaagagcttggcaatgccgtgtcctcagggctccggcgcctacccatggatgtagtgctcgccctcccaaggccggtgtcctggtgacgatgccactagtgccaagaatgcttccctcctgcaggccccgctcccttccccattccagcagccacttcccaccctgcatttgttccctcctacctggccctcaccaaggcatccacccaatcctggcggggcctcagcaca

SEQ ID NO: 170054 - DNA, 356 bp, Homo sapiens
caaacgtaaataagaatagctacatcagcataattaatcagtattatggtgaatcacattttaaattaatccaatttcagtcatcagaaaaataaaatacaatgttaggactaggttgaacccaactgaaatagtctacattaatctgtttctgacttacagaaaagataggtcaaatttcatattttgatctaatgagaatacttgtgtagctattatattccttataaattctagataaggtttatttttcccaaacattttattatgaaaaatttcaaactttccaaaaaaagttaaaaactgttcagtgactacccatatacccaacatttagattctataattcttattct

SEQ ID NO: 170055 - DNA, 166 bp, Homo sapiens
gccagagaagagaagtctgagaatagagacctagagctctcaaatatttagaaatcagcttggcagaaggattcacaaaagctgactgagaagcagcagtcagcaagggaggaggcaaaccaagagactagatgtcttgaaagccacatgaagaaagtttatttag

SEQ ID NO: 170056 - DNA, 340 bp, Homo sapiens
tattagatggtaagagaaggcctctctgaggagctgacatttaaactgaggtttgcatgctgagaaagatctgggggaagagtatgctggttagatagaccagtgagtagaaagatcttgtggcaggaatgaatttagcatgattggagtatagaaagaagaccatcatgagttgagcacagtaagttggaggttagagtatgaaatgaaacagaggtggccaggggccagatcatattctccatataaaaaaccttaataaatttaactaaaaaagaatccaccaatcattttgagaagaccagtaagatatgtaaacccttatttgcctgatcaaagt

SEQ ID NO: 170057 - DNA, 399 bp, Homo sapiens
cttatgtttagatacacatggagaaaatgtttaatccacttaattcaatttagtatactttaatgaaattataatgaagatagatgtttctaatataaaatccaaaaactaggcaaggtgcagtggctcacgcctgtaattccagcactttgggaggccaaggtgggaggatcacgaggtcaaaagtttgagaccagcctggccaacatggtgaaaccttgtctctactaaaaatacaaaaaattagctgggcatggtagcgtgcacctgtaatcccagctactcaggaggctgaggcaggagaatcacttgaacccaggaggtggagattgcagtgagccgagattgcaccactgcactctagcctgggtgacagagcgagactccatctcaaaaaaa

SEQ ID NO: 170058 - DNA, 114 bp, Homo sapiens
gaactttgatatatcctaacaccatatgaaaatattaactcgaaatggatcataaataaaaatgttcaatctaaaactaggaaaattctagaagaaaacataaaatacctttga

SEQ ID NO: 170059 - DNA, 200 bp, Homo sapiens
aaacacaaaataaaaacaccccatcagcatcttaaccagcaaaccacagctgttctgagtgcattcagcatccagggttgtcatgtcctcacatgtttctcactcctcctgattcatatgcccagtgattagttaagatataaattcagtggttataacaaagtctccacaatttaaaaatggcttagaccagattaagg

SEQ ID NO: 170060 - DNA, 234 bp, Homo sapiens
tgactagcagcacaattgagctgctaataaaaagcagagtcaactgcttttcattattcacccactcaactctaatggcacttaatactaatgagtaatctagtggcaggtgccaggattgaggctttggttggataattcttctgcccgatagtgaaatgaagtcagagtttctaaatatgcctgacagcctaagggtaggtttgctcataggtagtcatttgctaaatatgt

SEQ ID NO: 170061 - DNA, 1027 bp, Homo sapiens
actcgagtgggtgcgcatgcgcaagaaggtgcctgcgggactggagcagagcgggctgcgagggtcttcccagcgcaggcgggttttccagtgttacttgcggctgggcgtgggggactagctgcctttctggcagcaggcaggaagccgcaaaaagtttctgagcccccgaacctgtagcggacgtggaaaaagaacgcccctcctcaagtgtctggctgaaagatgccacccagggaagggaactcgggctagctaaggaggccattcttgatgttgcttctagatctcatgtcatcaccgagccctcagctgctggtggcagctgctcagcagacccttggcatgggaaagagacggagtccaccccaagccatctgccttcacttagctggagaggtgctggctgtggcccggggactgaagccagctgtgctctatgattgcaactgtgcaggggcatcagagctccagagctatctggaggagctgaaggggcttggcttcctgacttttggacttcacatccttgagattggagaaaacagcctgattgtcagtcctgagcatgtatgtcagcacttggagcaggtgctgcttggtaccatagcctttgtggatgtttccagctgccagcgtcacccttctgtctgctccctggaccagcttcaggacttgaaggccctcgtggtgagatcatcacacatttgcaggggctgcagagggacttatctctagcagtctcctacagcaggtccattcctcagactggaatctgtgtactgtatttgggatcctcctgggctatcctgttccctatacctttcacctgaaccagggagatgacaactgcttagctctgactccactacgagtattcactgcccggatctcatggttgctaggtcaacccccaatcctgctctattcttttagtgtcccagagagtttgttcccaggcctgagggacattctaaacacctgggagaaggacctcagaacccgatttaggactcagaatgacttt

SEQ ID NO: 170062 - DNA, 461 bp, Homo sapiens
agtagctgggattacaggcgtgcaccaccatgcctggctaattttgtatttttttagtagagacagggtttctccatgttggccaggctggtctcgaactccagacctcaggtcatctgcccgccttggcctcccaaagtgctggctgggattacaggcatgagccaccatgccgggcctggtttttgtttttaattctgtttatgtggtgtgtcacatttattgacttgcagatgttaaaccatctctgcatccctggtatgaaacccacttgatcctggtggattatctttttgatatgctgctggattcagttagcaagttttgttgaggacttttgtgtgtatgttcatcagggatatcggtctgtagttttttttgttttatcctttcctggttttggtattgggggatagtggcttcatagaatgactctgaaaggattccctctttctctgtct

SEQ ID NO: 170063 - DNA, 425 bp, Homo sapiens
atgtgagctcgtttttaattcagttgcgtatgtgcattgagcttgccctgatgatgttctcgttggggcatgtcccacagagcagctcaggtcgttttgactctgggtacttctgcttacgctgtagctaagggcagctagaccgttcttgcagagcctaacattttgggtgccattttataatgcctgtggcaatttgcatattgacgtggcctccctgctggaagccagatgtccctgcaagccccaacgtcttcctttcattcaactgcacccaactctggacttgacttggttgattttctttgctaaagttcagagtctttactgtttaaaaatcaggattaaatagatgcatttcagtttcgaaggtattatttgcagtaaaactgccaacataaacattttataagaaagccatgtat

SEQ ID NO: 170064 - DNA, 133 bp, Homo sapiens
ttgcctaggctggtcttgaattcctgggctaagtgattgttctgccttggcctctcaaagtgctgggattacaggcataagtcaccatgccctgcttgccagcaagttttatactgctctttttggtagggaa

SEQ ID NO: 170065 - DNA, 393 bp, Homo sapiens
tctctgatagtgtcttctgtgtttaagatctgaaaaatggagaatgtgtggctctgaattctcctggcacctaattagagcgacacagctcttacggtcttggctgcttccctctcatgcaatgccacagctagaagacagttcaacagaaagggataaaaatcgattccttcaaaactcattatcattatccaaaacagtcaaactgtaagccttggaaccccatgttacttggtttcttactgatttaaggaatgaaactaggaatctcctcttatctgtggaggatacattccaagacccccagtggatgtctgaaacttcagatggtaccaagccctatataccgttttttcctattttttcctatacatacatgcctatgataaaatt

SEQ ID NO: 170066 - DNA, 323 bp, Homo sapiens
actccattcttttgcatgtggaaatccagttgtcctagcaccatttgttgaaaaaactattctttgccctattcaatggacttggcacccttatcaaaaaccaattggccataaatttatgaattttttcctggaatcttaattctgttcctttggtctgtatatgtatctttatgtaataccatactattttaatttctgtagcttagtagtaagctttgaaatcagaaagtatgagtcctttaactttgttctttttccagtttgtttctggatcccttacaattccatatgagtttgaggattggcttttccattactgc

SEQ ID NO: 170067 - DNA, 248 bp, Homo sapiens
cgagctcggtaccggctgagcagctggcagaacaactaagccaagacatgttaaagaagtttgaagagaaacaactgtaaaatttcaagatgggggattgttaaagatagtgaactccaagtttcttttcaaagaatcagtatgtcagtatgttcagctctcttattctttattctccatttttaagtctaacttcctggttctcttgccctccccccttgcctctagtttcagtaaacaactttcct

SEQ ID NO: 170068 - DNA, 441 bp, Homo sapiens
actttgctctttttcaagattgttttggctatttggggtgccttaagattccatatggattttatggtggatatatattttttttaatttctgcaaaaaaccttcctcattttttgtgttccatctgccacaggaccgttgtatatactgtatattcctggtacacttctctcctgtagtcagttgtctcaactcttacttatttctgagagctcagcttaatcatcacttccctaaggaagctgttcctgatccttccctcagacaatgccaggttctcacgttactatgaacctgtccttcatactctttttgtagttgactttacatttgcatactgtatttggtaacttacttagtgtctagatttcctctatatagtatgctccatgaaggtaagacctgtgactatttttgctcattgctatatccctaatgcct

SEQ ID NO: 170069 - DNA, 456 bp, Homo sapiens
tgagacagagtcttgctctgtcacccaggctggagtacagtggcatgatctcggctcactgcagcctctgcctcctgggttcaagctattctcatgcctcagcctccccagtactgagattacaggtgtgcgccaccacacctggctaatttttgtatttttagtagagacgtggtttcaccatattggccaggctggtctcgaactcctgacctcaggtgacctgccggccgcagcctcccaaagtgctgggattacaggcgtgagccactgtgcccaaccagttttgcctttttaaattatagaaacataatgtcaaatatattctctaaaaataaccctattggttaaaaagtaataactgccacatcaaactgtcaaaagcttagaaaggattaggccagcctatctgtttcctcaaaaaaaagaacagacattttagtcgacgcgggaatt

SEQ ID NO: 170070 - DNA, 404 bp, Homo sapiens
agtttcctgataccctatcattaattcagtctgcccttttttcatatcattctactgttttgtctcatcttccttatactttattcagagactgtgttttcatgaagtttgtgaaaaacattttaaaaattgtttaaaatgtactctttgtctatttcttgctattttttctttttgatattctggaatatatccacagacctgtgttggttttattttgtttaattcttgagagggaaacattctgttcaggtctgaaatttgcttttgggtcccttgttgtatacccgaatattgttagaatcagctcttagttcttaagctagatgcagggctgaaccacattgacatctgggattagttgagtggggctggaggggtaggccttaggccctctcagggga

SEQ ID NO: 170071 - DNA, 327 bp, Homo sapiens
gtcacgactgcgggagaaagccaagctcatttgcaatagcagcgtccaccagagcactttgcagagcctgaatgctgtggaaactctgggtctcgttcctgtcactcactcagaaagagccagagtgaaaagatgtgaactgtgcgtcctgcatgtggaaattgcctttcagcagagtccctgcccgtggagtaactcggctttcagggctagatcttaacaggcgccacactggttgtatttggagttggctcttcctttaagtagctgcgggtccccaagtcgatgggtctgcaccgtcatcattgtcacctaagccacctacgg

SEQ ID NO: 170072 - DNA, 490 bp, Homo sapiens
tagattgtcagaaagctaaaggtatgtatttatgaactaaaatgagcagcttcttgagtctcctggggactctgattcagtagatcaccagagtctggtgttctcacactagttggcacatagctgaagctcctattatgtgtgtggatacacagagagctgggattcctggaactttgaggaatatctgtgttaccaacatggcatcattgttgtctggagtgggtcataatttcaactgctgatcttcgtgaatgaatgaagatatttgcagactcacacttgtttatcattttgtgtttaactcatccagtattacatattcattgttattatgttctccaataccttgttaatactaagcattttttccacttgagacaggaccaagtcagacagatggtcttgtctccattttgggagctgggctccagagagaaaagaactccaacttcaaatacctgcataaacagccagtagtctggtttga

SEQ ID NO: 170073 - DNA, 459 bp, Homo sapiens
gcggccgctcccacttcagattggtaacacagatattcctcaaagttccaggaatcccagctctctgtgtatccacacacataataggagcttcagctatgtgccaactagtgtgagaacaccagactctgggattcctggaactttgaggaatatctgtgttaccaacatggcatcattgttgtctggagtgggtcataatttcaactgctgatcttcgtgaatgaatgaagatatttgcagactcacacttgtttatcattttgtgtttaactcatccagtattacatattcattgttattatgttctccaataccttgttaatactaagcattttttccacttgagacaggaccaagtcagacagatggtcttgtctccattttgggagctgggctccagagagaaaagaactccaacttcaaatacctgcataaacagccagtagtctggtttga

SEQ ID NO: 170074 - DNA, 234 bp, Homo sapiens
tctgaggcaggtcccattatatcccccatcgtatagatgaggcaaatggggttcaaaaaagttaagtaatttgctcaaggtggcagagcacggatctgaactcaggactgtctggcttcaaagcaagtgctctcattcactatgcctaacagtgcctgtcatgtggcaggcagtcagtaaattcttttcctcgttccctgagttccttgattacagctcctttagggcaagatc

SEQ ID NO: 170075 - DNA, 221 bp, Homo sapiens
atactttaatatttatatataaatatatatttttttaatcagcttttaaaatatttacaaaaaagcacactggagtctttattggaattacattgaagaaatgtacatcttcaatttggagaaacttatatcaatttcgagaaacttacatcttcaccgtattgggtcttccaatccatgaacatggtatatatctctccatttatttatttaggtcttct

SEQ ID NO: 170076 - DNA, 867 bp, Homo sapiens
  misc_feature (47)..(47): n is a, c, g, or t
  misc_feature (57)..(58): n is a, c, g, or t
  misc_feature (277)..(277): n is a, c, g, or t
  misc_feature (302)..(302): n is a, c, g, or t
  misc_feature (319)..(319): n is a, c, g, or t
  misc_feature (327)..(327): n is a, c, g, or t
  misc_feature (329)..(329): n is a, c, g, or t
  misc_feature (336)..(336): n is a, c, g, or t
  misc_feature (344)..(345): n is a, c, g, or t
  misc_feature (349)..(349): n is a, c, g, or t
  misc_feature (351)..(351): n is a, c, g, or t
  misc_feature (362)..(362): n is a, c, g, or t
gcggagaggatcgtggtactgctatggcggaatcatcggaatccttnaccatggcanncagcccggccagcgtcggcgaggcaatgatcctctcacctccagccctggccgaagctcccgggtactgatgccctcacctccagccctggccgtgaccttccaccatttgaggatgagtccgaggggctcctaggcacagaggggcccctggaggaagaagaggatggagaggagctcattggagatggcatggaaagggactaccgcgccatcccanagctggacgcctatgaggccgaggnactggtctggatgatgnggacgtanangagctgncggccagnncagnanggccgcagcanagcgggccatgcggcaagcgtgaccgcgcacgcctgagcccgggccaccaagcagaccgccacctacacccagacagagacatccctgccaatgagaccagccgatcgaaccgaacgacggacgccagcctcgccccttgctcacagcaaagccgcactggcccacgaaccgccctcccgggagccccccgcggaaagatacccgtaccaactgcggtcgcgcaccccgcagcggctggaatcgggccttcggcaggaaaggccatcttccgccccgcacccccctggggcaccggggttgccgtcccagctcgggcgcgccgcgagcccccagtggcgaggcggcctgtcccgcccaaaactgctctgcaccctcacggacacagcccgcatagtcggcccccgcggagagagcggcctcccccacggtgcgacacctacggcgcgtcgacaaaaataccgaaacccccacaacaccccctgcaccacagtagctccacacgcc

SEQ ID NO: 170077 - DNA, 514 bp, Homo sapiens
gctgatgaaaggcatggatacttaatctagtcacttgctttcttgatgaaagtcttcaacaaatcctgggagctgataaagggccagcaagggcagattctgtcttcttccttgctcacactatgggatctgatgacccacagctttcacttgggcttttggattacttactataagaagttgttccatttaattcttttaagtgatggaaaaaggatatttcacaaagagagccacaggttactggggtgctaggtggaggaagataactttttaagaaaggcagtgtagtgcggaagacaaaacaatgagctgagattgataaccgggttctacgtacttgactttgcactaaccaagtcaggttgaagtgattagctaacctcataggactgcagttttctggaacatcagaaagttagagataatgaatgttaaagttctctcaatcattagatttacaataaggatgagctttagaattacactaaactatgggcccaagtttgtattt

SEQ ID NO: 170078 - DNA, 352 bp, Homo sapiens
gagaatagacacttctttatatgtgcttttttacctactgtacaagcaaagtatgtttgttaaaattttcttttaatatgttgcatatgcaaagtggttttccaaacgctttcactaaactgttcaatgtcaactcctcaatgcccttaggaggagcgtgtgtcagaagttcctgccatttaacaggaaacagtgacccagaaaagctttggcatccctgccaaccccgaattaacagcagagacagcccagaagccacagctcctggctcctaatctctttttctccctaccagacttttggggcccctgaaaaggtgggattgccccatgataaatgttctatagagtca

SEQ ID NO: 170079 - DNA, 598 bp, Homo sapiens
tcatcagctcggacccagttctgcttcttgaaagtggtaagaaacactgggcaggataagttattttccctgttgtatcaggagctcaataaatatttttcagttgtttattgagttgattctcacagcagcgggtttcaccaagccttgaaaacctccattaacaagccaggaactcaagatggagttttctcccactggtctctcctgtagggggcggtgggaagggccgataaatagcactcctctgcccagcctgagctctgtaccaatcgagaatgaagacaaaaggcaagacaaggcagctggagaacaaaatgtcatggttattactaatcatagtgacagtggagcgtgtgggctcgcaaatgctgaaggccaggatgggctgagttgcccactcaggtacaggcagtgctgggctctgcaggaggtggcccctccctgtccttcctgggagagagtggaaaggacgcatgctccctgcaggcacgctggctccccacagaagggactgagttatacttacttgcctatttcatctctcagattcactcatagatacagtcaccaatgcaaggactggggaggagccatt

SEQ ID NO: 170080 - DNA, 140 bp, Homo sapiens
gtgaaaagaacactgagtctggtgacaaacacacaatttatggtttcactttcctcagctctaaaatatggctagacagtacataccttttggatgattgctatcaaaaataaatgaaaatgatgtgtgtatatatataa

SEQ ID NO: 170081 - DNA, 284 bp, Homo sapiens
tgtggggggggggtcctctatcatgtatctagctgattcaaatcatttttttctaaatgataggaacaggtgaaaagtgatatccctgggagtccgagcaagtagggatgcatttcttaaccagcagttctttaagtggaagtctgtgaacctctaaagcagcggagtcatgaaagacatttagaaaaatacagtcacctgggtcctgtccccagaaagtctgatgtcatttttctgggtgtctggcccaggcatcagattttttaaagttccccaggtgattg

SEQ ID NO: 170082 - DNA, 151 bp, Homo sapiens
catatcaggcatttcattaaacccaaaccaactgctgaagtggaagaaagtgacagaagctcaacagctgtgtgcctctgtctgagtgactggcatgactagatatgatgacgtggggactgccaccagaatgccttttggaggagtacca

SEQ ID NO: 170083 - DNA, 414 bp, Homo sapiens
ctttgtattagttttttattgttgccataacagattattatgagttcagcggctaagaaaaacatccatttattatctaacacttctgtgggttagaagtcccacacagatttctccaggctaaaatcaaggtatcagcaaggctgtgtccctgactagggctctaggaaagaatctgcttccaagctcactgacattggcagagtctaattccttgcagttataggactgagattccatttatttgcaggctatcagctgcgggccatcctcaggttccacaggcctctcttcagtccttgcacgtggcttcctccatctcagaaccagcaacagcgcaccaaatccttcttatgcttggaatctctctgattttccgttctgctgcatctccttcctgcctcctcaaatatg

SEQ ID NO: 170084 - DNA, 388 bp, Homo sapiens
acatggtggtaatcccagctacttgggaggctgaggcaggagaatcgcttgaacccgggaggcggaggttgtggtgagctaagattgcgccgttgcactctagcctgggcaacaagagtgagactttgtctcaaaaaaaaaaaaaaaaatgcttagagtcgggtgtcaaatatattagagtttaacttcccactccaccacttactaacagcgtgaccttgggcaagatacttttcctcctctataaaatgagggtgaaaataatttaatctatcacataaagttgtgataaggattgatataatacatgtaaagtggttaaccagtgtctagcacatagtaagtactcaaaacccacgcgtccggttctagatcgcgagcggccgct

SEQ ID NO: 170085 - DNA, 437 bp, Homo sapiens
tgccctcacagagtccttggttcagtcctccttcaccagggacatggggcttcagaaaccaccatcactgatccctgggtacacctccaacatgcagacccctcctggactcagcccgccatgcttgggtcaggtgacctcccacatatatacacacacacgcacacgcatacacacacccctctggagagctggacactgcccaccagttcccattcccgaaacttccatgctggctgtctggacacaacctctgtctgccaggatcccaggcacccaggtcccaagtctgagaagccatgcagaggagctgcccctcctgcactccaggccccatcagttggtcattttctgtgacttcctcggcaactccaggcccctcctctcccatggccacagccacgaccatggcctcccatcaatgagactgtagctgt

SEQ ID NO: 170086 - DNA, 355 bp, Homo sapiens
gttacaggatcttaggggcaggacactgtgggagagagtcgggcagctgaattcccgcaggtgggaatgccagggcccgaggatgttgcccctgtcctgaaggctgtcgcccgatcgctctatccaaggctgccctggggcagcgtcacctgggggtcctgcgggggcttctcagcacagcatccagcactgccacctagtgtgttcccgtcacgtctcctccccccgcctgcaccaggcaccagagacccagatgccaaggcctgtcagcttcctcaatgggaaacttttcttcagtgaacaaagctctgttttatagactttttaaattttcagctcaaaaaccaaagtctgc

SEQ ID NO: 170087 - DNA, 554 bp, Homo sapiens
  misc_feature (120)..(120): n is a, c, g, or t
gggagtcgcggtggctcagggcggttgccctggcactcgaggaggcgaggctacacgttcgaggccaacctggtcaacattgattaaaacaaaaaagaaaaacaacaaacaaaaaaaacntgtgtgtgcgggccgcgcctcgcggccctgaggaagaagagttttctaaagacacactccggtgggggcgcgcgggggccccagtatgggttaggttgaaaccgtgtgtcatagagtctgtgctccctaaggaagaatccgggcgccaaggaaccaggcggctgggagttctctccccacataaaaaaaacgcgccggggggcgacaccaggagcgtgttcgtgagaacaaactcccagaaggggagagttccgggagggcccatagcgggagcttccatataagacgaagggagcccaaagcgaagaacgcccagatattaaaatattaacgccccggcgcgcaggaacagacaacacaacgcacgatacacgataccagacgagactacacacgagcaccacacacacaaataacaacacaagcaaacggcg

SEQ ID NO: 170088 - DNA, 462 bp, Homo sapiens
gggagtcgcggtggctcagggcggttgccctggcactcgaggaggcgaggctacacgttcgaggccaacctggtcaacattgattaaaacaaaaaagaaaaaaaaaaaaaaaaaatttgtgggcggcttgggcctctgaaaaggtttttaaaaccattggtgggggcgagcggggccccatgatgcggctcagggtgaacagtgggcacaactggcgtggttccatagagggagacaccgcgggcacagagacatgagggcgcggggaattttctctacccaattctaaaaaagcggccgcgggcgggcaaaacccgaagcgctttttgtgaacacaaatctcccggagaggtggcagttctagggagaggccctttacgggggactctttctttacaagagaggagagtctcagagggaggagccgaaattatctaaattttagcgcccccgatcgctgga

SEQ ID NO: 170089 - DNA, 185 bp, Homo sapiens
gaggaccagctggaggcaggtggtggcggaaggcagtggaaggagggaggaaagggctcccttctcacgtggcccgggtgccacccccactcttgggggatgttttgtatctttcagttctcagacaccttgcatcagagtcacaagggccgaaggatcctgaggggccgggaaaggcctcccct

SEQ ID NO: 170090 - DNA, 364 bp, Homo sapiens
cagcctccccagtcctattttcgcattcatataactaaactctttttctttcttggtggagttttgaaatttatatttttaattctttgctcccttttttcctcttacaaaatgagtgccaagcagctaagttgtgctgagtggtagagtttgagtcagtcttggctggtaagctgtggggttaggagccgctccctggataccacctctggtgtctttgctatacaaagactttcatttagcctcctttgtatccagcaaaaaaagattcagtacccaaaatggtggtattttggtatagtatgtatcttacaaaacggcaaaagacttcaaaagttcctacaattttatcttgggggtttcc

SEQ ID NO: 170091 - DNA, 269 bp, Homo sapiens
agaagaaagaaattgaacaactttcactgtttgtattatttctctgtatatatgatcacgtttcttctttttgatgtttgtaacgcacttatcattggagacacagtgttagcactttgaaggaaatgtattgtgagattcttagactgcaaaagtgcttccgttttgtagtggtgatggtgtagagccaattacatatagaaccactctttattgcattccacttaacttgtcaccagattaactgatgcccacattcccctgcagaa

SEQ ID NO: 170092 - DNA, 319 bp, Homo sapiens
ggacagccaggcaaggaggtagaataggccttgtctggacagtggtcacctgttaggtccacagcttgtcctccctggcctgaccagccaggtgaggagagatccaaaccatccacctgaaagcattcagggtgcctgatgacaagaccccagccactgtgggctctcatgtcctggtaggaaggtatacctaaagcaggtggacctggtagtggtggacgctgtctgcctccccggggcttgtctgtttatgccagaccgttttcccatttgcttccacctccagctcagagaggaatcaccttcacacctctgctaa

SEQ ID NO: 170093 - DNA, 448 bp, Homo sapiens
tcaatactcaagagtcagctgatcatgtccttagatgcaccagaaatgatggtaaagcttgggagtgcggatacctttgattctaattattagcgaatgcctcagctcagcatcactgggctatatggggcctaaagcagggcagagccaatcaagaacactcaaagacagacagatgcagaactgggaatggacgtgtagggacgggaagctggagaaagatgggagcatgaatatgcatgtaagggtacatagatttggccgggcatggtggctcacacctgtaatcccagcactttgggaggccgaggcaggcagatcacctcaggtcaggaattcgagaccagcctggccaacaaggagacaccccgtctctactaaaaatacaaaattagtcaggcatggtggcgatgcctgtaatcccagctacttgggaggccaaggcagg

SEQ ID NO: 170094 - DNA, 518 bp, Homo sapiens
tgacaaatctttggggcttgggaaagtctactctacatcacttggggcagggcatgacatagcatatatttgggatacacatgcctgacagcccagtcttcatttgaggaatctgggatcaatacatgatccaaatcttggtactgtgggtcttgcatttggatttccatgtggatttcatttcggccagggctggagttactgtccctgttcatgatggtggtgctggtgacctatggggcatcctaacttccttcccaggcagatgtccctgctgcattggccaacatgtggctccaaaactagacttaaaaaagcataaagatgttcccatcattgatggggacaatctgagccatttgtgttttgaaactaattactagcccacctatccaagagctatagtgtgctcctgaatatgtggtcagaatctgttacagttatcacagctacttgtccttttcccttgaacaatgctgtagcaaaggcagaaacacccatcttccaatatgatttcc

SEQ ID NO: 170095 - DNA, 242 bp, Homo sapiens
tctaaactccaatctgattttactgccttgatttttaaaatccttttatagtgtcccagtgtctatagatgatgaatacctgaatgtggcaggagaaaggagtgtaaatggagaggttatatggatttcagaaagatttaggaagtggaatcaacagaccttggtgattgattaaatgtgggttataaaagagatgaatcaagagctgaaatatgctaataccgtgatgcgctttgattacg

SEQ ID NO: 170096 - DNA, 237 bp, Homo sapiens
aatcttttctcattcacttttatagtcttctcacacacacacactctgtctctgtctcaggaaataagaggaaaggaaaggaaaggaaagccagtgtgctttgaaaggaatctcccttgggctcaaaacctcagttctggccataatcccagcactttggaaggcccaggcaggtgtatcacctgaggtcaagagtttgagaccagcctgaccaacatggtgaaatgccgccgtctc

SEQ ID NO: 170097 - DNA, 481 bp, Homo sapiens
tattagccgacgagttgtccgagttacctccttttagaaaataatgctgtgtggttgtgatgtgtatgtgtttttctattttagggtggggtgttggaaagggaggggtggcttgttctgaaagaaagaatcctggttcaggctgttttcatttaaatttatattaggcaagagtaggtaatgttttttatttcaaatgtatctattttctttagccattagggctgccagattttagttagtataaagtaagctaaaattgatgagaatgtagaataataaatgattctactaaacattgtagtaccagagaatcataggtggtgaacaaacctcaattaatttctccagatctccgagctcctacttccttgtattgtttagctcataattttttttttttttttttcgctaaggtgctgtaatttgtgttccagcatgattttattggaaataactcggacaactcgtcggggatcct

SEQ ID NO: 170098 - DNA, 558 bp, Homo sapiens
tcttgattttaaggtggtctgcctttacttcaactgtctgtcattgctggaagcaagagacatcatgcagagtttctataatttttttatacgcaacacttggcatttaataaaaaattataccatgcatattagaagccaggaccaagaaaaacaatataaaacaagaaaggatagaaacagtctcacagtaatctagatattggaatgattagacatggactattaaataactgtaattggccaggtgtggtgagtcatgtctgtaatcctagcactttgggaggccgaggtgggaggatcacttgagctcaggagtttgagaccagcctgggtgacatagcaagacttccctggtctctacttaaccaaaaacaaacaaacaaacaaacaaacaaacaaacaaaagctgggcatggtgttgcatgcctgtagtctagctactacagaggctgagatgggaggaaggataatgtgagcctgggagatcatggctgcagtgagctatggtctaaccactgcattccagcctgggtgacagagtaagaccctctctcc

SEQ ID NO: 170099 - DNA, 178 bp, Homo sapiens
taggaaagttgtagagtttcattaatatgcacatgaacacgatacaagtgcctcccaaggaagtgatcgcctccaacagctgccagagtgagactgcatgaacgaacagacaaatgaaggatgttaagtgatgatattttctacaaaaaaaaaccccaagaattttatatgctgcaat

SEQ ID NO: 170100 - DNA, 269 bp, Homo sapiens
cgctggacttctattgcaaccatacacgtttctactggaaggaacgctgcagggacccaggggggaaaccgaggtccaagacccggccctgggaccagaaccatgcctcctccttacctctagttacctttccaaggctgtgccctggcagcggtgacctagaggagcaatttcaaaaacccaaactcccaacgtcaccttcctttccgcctgacctcactgcagtcgtgtgtactagggcttggccattctagaggatctcagtcctt

SEQ ID NO: 170101 - DNA, 204 bp, Homo sapiens
gttattttcttagttttgataaatataccatggtcatgtaaaatactaacactagtggaatctgggtgaaaggcatataggaactattttgcaactcttctgtaaatctgaaattatgagcaaatgaaaagtttaaaaaagtggacaatgacccaggagttgattttttaaatgaaaagttgtaacacacgcacatgctcatag

SEQ ID NO: 170102 - DNA, 726 bp, Homo sapiens
aggtgggtggatgatacattggtgtttgacacgttaatctctatactttatgtattttgctagtctaacataagcaaatgaatgtttcagttaggtaaccgaaattgaaaacaatataagcttcccatttcgaagaaggatagaatagttcacagtagggtaagccttaactaaaaacaaatagaaaaattaattaattacaaaaatagcaagcagaacttttcagaagtgagctgagaatctgcagtgttccctcaggggcagttactcaatctccacacaggttacaagttgcaaatatggactaggcccagagagaaggtcactgttaggaacaggaaacaagcagagctttttataaccctattgggctggagaaacaaaaatggagcttgagggttttcaaatgcatgtacatttttcaactctgacatttcatggattctaaagctgcacaagatttgaacaaaaactttgtgaaaacagagtgcgtttcttgcatgtatgcactgttcaataaataaatacctgccaagggttggagcaagggaaggtacatgagatcaataaatgagagttgaaagtacttgtaggagtaccagtttgaccttgatcatctcctcaacctctttttccctaggttcacttaaaaatctgaacgtatttagagggtgataaaccaggcttgcaccttgagggaagaccattgctgtggtacagggagaa

SEQ ID NO: 170103 - DNA, 214 bp, Homo sapiens
gtaacatctctcttctgcctccctccaggccccagcagctcgtaatctaggaatacatcaggattttcaaatcatcctatagtaattctaaagaaataaccatatattattatgagtgtttgccaagtataaagcactgttctggataccatgggagacacagaagagacatagcctattacctttttttttcctttttttctttttttttttt

SEQ ID NO: 170104 - DNA, 652 bp, Homo sapiens
ctgtctgcgttcagaggatcccgtctgccacttatccaagattatgagttgtgaccatggatcaaagtacaacatagcatttacttttcagttgcctgggcttattggggctaattttctattctcgttaaggaacatagttggatgaggaattaattagatggaagggagattttgacagctggaatttcatctttgcttttgtttaacatctatcatgggtagtgctcagggaggagcatgtgagggtgagatactaaaaaatatatatatgtatatgtgtgtgtgtatatatacatatatatatacacacacaccagaaaagaagtggaaaatagaaaattcagttatgtcctaagtccttagcattacaggaaaatgacagcataaaacctgaaataaaactacaccaggtacctcaatttgtagaagtcttataagaaaaaaataaataagagactcacttggaggttttatttttaactgtttggcttagtgtacacatctgattcttcatgagacacggatgactaaaattccatctcatctaggaagcctttctcctcctctagtcatatatcatcattccatttatggcactcctatttatggcatggaatcttacatgaaatttcaactaagagcgtgatca

SEQ ID NO: 170105 - DNA, 510 bp, Homo sapiens
ttttgaaatatacaatacattgttgttaactagagtcggccattccgctatcaaacattataacttatacctcctatctaagtgttgtccagagaacaaagtcagagccaatgcaagtctcccacatttagtcttgagacctgagtgttggccccctaaaatcttcaagaaatgaagctagttggctgaaaccaccttataccacaatcaagccctcaaagtcatcaaatagaataaaagaaaaaaaaacccacccaaaggtcaccagcctcaaagattaaaggaatataagcccacaaagatgagaaagaaccagggcaacaagactgacaaatcaaaaagccagagtgccctctgtcttgcaaatgaccacatcacctctccagttctgaaccaggctgagatggctgaaatgaaaaaaaatagaattcagaataggtatagacacaaagatcattgagctacaggtatatgttgaaacctaatctcctggttctgaaccaggctgag

SEQ ID NO: 170106 - DNA, 359 bp, Homo sapiens
tgatgaagaaatgaacctgtaatattagaggcgggaaaggatctcctgttgaaggaaacacagtctccataaaaacaaagtctgaacagagactgcaggtttatccctctaagcctgaaattccggctctaggaatccagcccaaggagataaaccctggttgcaccaccccaaattcatgcctaatatatgctggcacaaaattatatgtactcgcaaaattacgaagagccagtaatagtaaaatggtggttaaaagaaaaccaaggtagattcacttaatagtatttaatattacttaacaacatgggagaagatcatggtacaacattaggcagtaaaagaacagtcaaactatg

SEQ ID NO: 170107 - DNA, 548 bp, Homo sapiens
tgctatggtctgaatttggtggtgtcgccaaaattcacatgtagaaatccttactccaatatgatggaagtgagggctttgggaagtggatggggggagccctcataaatgggattagttcccttataaaagagagctgagagagaccccttctgtgtactaccatgtgagtttagagagagacagcgactgtctgtaaggaagaaggcccttcaatctgctggtgccttcatcttaaacttcccagcctccagaactgtgaggaataaatttctcttgaggagccacccagtctatggtattctgttatagtgaagggagcagagcaaggcagtaacccgacagaaaacagcttgtgttacttaaaaggggacacttccttcagttggcccaaagggtctttctcgaaactgctccagagcctggctgaagcaccctgcagccctgctgtgcagtatccaaagcagcctcttccaggacacacggcccccattcccaactgctccagctagaacagattcctgaccttcccgagcaccaccaataca

SEQ ID NO: 170108 - DNA, 154 bp, Homo sapiens
tggtgatattgccttgatatttcatattaactagggctcccaggtagtaatactgaaaaaaagttcaagaagctccagatgtccaattctccaggccaaaataaaggctggaagtctgtagatgtttaaagggtgtgatgctgaatggaggatc

SEQ ID NO: 170109 - DNA, 378 bp, Homo sapiens
tctaattgtttggtacttctgagataagacccttctgagtattctactgaatgtcctgtatatatttttttttttttgaggagtctctgtcacccaagctagagtgcagtggcatgatctcagctcactgcagtctccatctcctagtctcagcaattctcctgcctcagcctcctgagtagctgggactacaggtgagcaccaccatgcctggctaagtttttgtatttttagtagagacggggtttcaccatgttggccaggctgggtctcgatctcctgacctcaggtgatctgcctgcctcggctccccaaagtgctgggattacaggcgtgagccactgtgcctggccgaatgtcctgtaaatttttccattc

SEQ ID NO: 170110 - DNA, 545 bp, Homo sapiens
tgatgagctcggtacccttccaccagcaaagacaagtcaccactgtgcttgggcatcctgcccaccagccccaccgggcagccagagctccacatggtttccatcatggttacaaaataaacaaatgcaagtcactctgtcccttctgtggccccccacagcccgacatctgcacatctgcgagaacattctctcgtcattagagagatgccacttggggatctcagaagccatgtggggaagacagaaaccttcagctctagttcaggaacattaaacacaccatgctatcccagtttgttcataaaattcttgtgttaatgtcctaggggaaacaaaaaggatagctattttagcagcattctctagtttggttgggattctgtgtggaggagaagagctctgttttccttctggctgcaatgtcttgattctctgggtctttgtggttctccctgcatggccctgccgggctctggtgagggaagataagagtgtgctccaaggctggcgaggctggggttttcgtctgcacctggtgaaag

SEQ ID NO: 170111 - DNA, 520 bp, Homo sapiens
ccttgaggaagctgaaggtcagaaagggagagacgattgcctgaggtcacacagctgatggacagtagagctgggttatgaactcgaatgcatctgagcatacaggtccttctttgttacttgtgacaccttgatccacccaaaggtgccttaatcgggggattccaggcattgggaaggggctgtgggagatgggaggaaggaggattagaggagaaaggaaagggagaaggaaatgaaaaaataaggaggtataagaaaaggagaaaaggaagagaaaaatgaaggataagaaatagaaggagaaagggaggattgagaaagggagaggggagggaaagagaaagaaataagggggatgaaggaaaaggaatataaaagtaaaaccagaaaagatcgaaaagtagatagaagggaaaatagaaaagggaaagaaagtaaagaaaagggaatataaaaatgcaagaagagtaaggaaaaaaaaagagaagggttagatgagagagatagaaatagaaaa

SEQ ID NO: 170112 - DNA, 399 bp, Homo sapiens
atttcctgaatggaataggtggaattagggctaggctgccagagactgtgccaatgagcatcacccgtcatgtgtgagagagcagaagatagcctgtgagccagtgctctagaaaacatcatgtaggaggccggtcacggtggctcacgcctgtaatcccagcactttgggaggccgaggtggatggatcaagagatcgagaccatcctggccaacatggtgaaattccacctctactaaaaatacaaaaattagctgggcgtggtggtgcgcgcctgtagtcctagctgctcgggaggctaaggcaggagaatcacttgaacctgggaggcagaggttgcagtgagccgagattgcaccactgcactccagcctggtgacagagtgagactccgtctc

SEQ ID NO: 170113 - DNA, 213 bp, Homo sapiens
tttgggaggggaggtgaaggtttggattattgagtactttttccttttattttgatgatcctgttgggtttttaagtcaattttagcaatttatattttttcataaaatccattttattttcaaatttattacacattcacagattacattttcttatttttttatgcatatatacacacacacacaccccagttccctgtctatccagttct

SEQ ID NO: 170114 - DNA, 426 bp, Homo sapiens
cagccccacatcatcccattggcatgatggtgttctagagcagaaaaccacaggcctgtggctttccttacacagagttcccatccttcctaacagcttacttaattctcactcagttcatgtgcttagaatttaagttttcttttctccccatgcaagctacacgtgttgcatttacacacagtgaaaggactttatttttcatctgagtaattttactttggcgcattcaggatacgcccatgcaaacaaataaaatgttttgccacccaaaagaacatttttagaaagtgttcaagtgcaagtgtagttggaagaatcttttgtggggagccaaggtggctactgagtgtgcagaaagatttggattgggctcgcaacaacatggaggcacggggcatggtgcaacatgcttagtgacttatt

SEQ ID NO: 170115 - DNA, 207 bp, Homo sapiens
tggcttagaataaatgtctctttctaagtgtttattagagttaagcttgaattagggttggatacatgttatcatgttgttaagcggtaagagtttgtcacaggttaagaatagtctccatgtttgataaagcagctagtcagaaattaatagggaaatctgtggataggttcaaaatggtattgggggcctgggaaatagcagata

SEQ ID NO: 170116 - DNA, 314 bp, Homo sapiens
tggaaatcagactgcatttttaaattcatttgtacatgtaatatgatggcattttaattgtttttctcctaatctaaaggctattagtcattttatggcctgtgtgtcccaattgatgctttattagaattgagaaagtatgttcatttgctgcgtactgatgatcagtatcatgttattaccataccataaccatggtaaacatccctgacactggcaatatgaataggtatgatgtccagaagaaggtactttctttgtagaattttctcaacaattaagatagctgcccctaggtagctactatatgttgt

SEQ ID NO: 170117 - DNA, 473 bp, Homo sapiens
gcgaaggataggcaatgacttggggctcccgtccactcggctttgaggtccccgcggcccgatgacccggcctcggtgacagcagccgcgacggcggcaatctcgacagggagctaggcggctcatggtgggtcagggggcgaccgaggagggaccacgcggcctgtagggggcagcgccgagctcgggaggagacagcagccggcgggtggggtgggtctgggctgccccctccgggagctgccccggggccgcacggcgattgtcatacccggccgcccctgcccgccgtgggcttcctctcggcgccgcgggccttaacggggctctgaggggacgtgacagagctcggcacgcggcagcctctggggagttagggtccggagagacccacgcgtcgccccccgcccgcccggggccgggagatcctcgggagccgcctccgcgtgtccagagagtgtcggggcggccgc

SEQ ID NO: 170118 - DNA, 572 bp, Homo sapiens
ttccaagatacaatgggagtacaggcattgggtaaatactccatttccagaaaggagaactcagccacaacacaggggctacaggccccatgcaagtccgaaacccagcaggacggtcattaaatcttaaagctccaaaataatcttgactctgtgtctcacatccaggccatgctgatggagggggtgggcttccaaggccttgggcagctctgcagggtacatcccctgtggctgctttcatggactgatgtgagtgcctgtggattttccaggtacacagtgcaagctggggtctggaggaggatgaccttcttttcagagctccactaggcagtgccccagtggggactctgtgtgggggctccaaccccacatttcccctttgcactgccctactagatattctccatgaaggctctgcccctgcaggagactcccgcctggacatccaggcctttccatacatcctctgaaatctaggtggaggttcccaagcctcaactctcatcctctttgtacttgcaggcttaacaccacatggaagccaccaaggcttgtggcttgcactc

SEQ ID NO: 170119 - DNA, 242 bp, Homo sapiens
aagaataaagatataaaaagagaccactgaataattatctgaaataagaccaaaatattaagaaaattataaaagctcacaatacatgtaaaagtacaaaatttgcctttcaacattaatggccactaatttcgttttaacaagtagtttttgacattcacacatatgggagccatatttcttgttttgcaatgtgataaactgaagcagtaaaaggctcaatggaataaatatgcaccata

SEQ ID NO: 170120 - DNA, 263 bp, Homo sapiens
tacatgtgtttaagaaaagcacgggccagataaaaatggaggaaattactatatgcttttgaggtgtttatcagaaaaaggaaatagagaaactacaaccttctgcttctgtgttggtaaataaaatggaatgcagcaagagaaaagaaaaatatagaaatgtacatatgaactgagtttaggatagattttttctcttgatgccgaggttaggcatcaaatgagggttcaaagttgactccctctcatctagataactggta

SEQ ID NO: 170121 - DNA, 183 bp, Homo sapiens
ggcacctacatcgtgcgagagcaggtttgtggccagtggtctttgatcatgccccggtgtttagattaggtgtccggcaaacgaacagtgcttggaaaacaagtcctgctgatctcctacctcaaatggaatgtgaggtgacaatagggccagcaagcaaaaatagaaatctgagattgaagt

SEQ ID NO: 170122 - DNA, 500 bp, Homo sapiens
ttgaggcagtagtagctatagttcagttttaacatttgtcgttcactacccaaaggcatatcacttgaaaccataccaataaatactagtctctgagcaaacaaacaataaaaattacttttagctagacttgagcaaagaaaaactcttctggtaagaaggttttaagcatgcatgccattccaattgaattttgttttatttgattcttaccccaggacatctgagttgatctgtgtgcacactgaataaaggcaggggagagggcgtggggaacaaggcacctttctttaaaactgatttattacctaccttcagagatccaccatcataaagaaaggtattcaaatcatattccataaaagactgggtgcattttagtgaatggcttaatttaacaaatgatactaatactactaatacataccctgtcactttctcattgagaattgcttatgtgattaaatggacctatttttgaaattttagatttagtaaaa

SEQ ID NO: 170123 - DNA, 254 bp, Homo sapiens
ttatttcttgtggtacacagatgatggtatatcgacagacttaaaagaattttaatagagttgactttatgtgtctcagtctcaattgtatattaaggctgagggcaaggccaaatttaaaaactaagtcagtttagagacagaatcaaataagtgataatactggtaatgtttagatatgggaaaaatgtaaacatcatggtacttgaatgattcaggaaatagtggtggtttttttttttgttttggtttgg

SEQ ID NO: 170124 - DNA, 418 bp, Homo sapiens
tatgctgaatacttaattttatcacttctccattaactgttataaagacaagactaaacctacagtttgaattcattaaacaatatccaagcaaacagaaaagaagaggaaataggcaagccatgtttttctactagagtgactatacttatccctctttaaaaagaagtgatattttcaatttcagaaatttgattaaaaaactacatctatttttcctaccaaaaatactcaaaaaaccctctgctaattactctcaaaatactgcagatgtattcctttgaaaaaggaaatacaggatgggcacggtggctcatactggtaagcccaacactttgggaggccgaggcaggaagatcacttgaggtcaggagtttgagaccagtctggccaacatggtgaaaccctgtctctactg

SEQ ID NO: 170125 - DNA, 153 bp, Homo sapiens
atgtcagtgtctccctaatctacatctgtgagccctacctccattctgaaatcttaaatctgctctcaaatgcctcaaaaataccttgaataccttaaagatacctcaaactcaatatttacaaagcaaacttattttcatcattcttttcct

SEQ ID NO: 170126 - DNA, 408 bp, Homo sapiens
tgaaaaatactacgtgctgggcatggtggctcacacctgtaatcccagcactttgggaggttggggtgggcagatcaagaggtgaggagttggagaccaggctggccaatatggtgaaaccgcatctctactaaaaatacaaaaattagcgaggcatggtggcacaagcctgtaatacagctacttgggaggctgaggaggaagaattgcctgaacccaggaggcggaggttgcagtgagttgagatcgtgccattgcactccagctctgggtgacagagcaagattccatctcgaaaaaaaatagtacaaaatattttaaaaaataataaaagttgtctattctggctgatcatggtggctcacacacatattcccagtcgacgcggccgcgaatttagtagtagta

SEQ ID NO: 170127 - DNA, 328 bp, Homo sapiens
ggagagcaaaattaggacaaaagaaaggattctgtggagaatgagatgagagccccagaaaaggggagagtggggagatgtgagttcagtcctaagaagagagagaagccccagcaacatgacaggaggttgaaggccgtggagaaagaggtcctgtgggaaagtcctgctggagagaagccaaaggactttccacctccatgtgcaacattcgattaggttgtgtttcatgatataaacttcccctacccaaaacaccttcagcaagccaaactgcaacacccacccccacatcacaatatgaaacttactgttgtccggggttgtt

SEQ ID NO: 170128 - DNA, 618 bp, Homo sapiens
tatcctaagtattttaaattctttgtagctattataaatgggattgctatctatctatctatctatctatctatctatctatctatctatctatgtttgaaacacagtctctctttgtcgcccaggctggagtgcagtggtgtgatcttggctcactgcagcctccatctcctgggttcaagtgattcttgcgcctcagcctcccgagtagctgggaccacaagcgcatgccaccacacctggctaatttttgtatttttagtagaggtggagttttgccatgttggctgggctggtctcgaactctgacctcaagtgatccaccggctcaacctctcaaagtgttgtgattacaggcgtgagccactgctcctggccttacctcaatttatttaacagtcccctcacccaaatgtgaagatgataaacaattctttcctgtctgaattattctttctctcatgctggaattttggaacattttacaacttacatttaagaaggctagtttaaaaagaaacagtggaaatttccaccttttaaaaaaacttaatttctggtctattaactgctttgcaggaagaaagaaatatgaagaagaaccgcagacattctgga

SEQ ID NO: 170129 - DNA, 363 bp, Homo sapiens
tcggtatgagcatgctgtcttacttcattttctgccatgagcaaaactccctgagacctcctagaagctaaacagaaactggtgccatgcttcctgtacagtctgcagaactatgagccaaataaacctattttctttataaattactcagcctcagatattccttcatagcaacacaaatagagtaagacagccattaatatcatgcctatacctgagacagtggtatgcattaaacattacatctgcccctacttttctaggtcattataattttgggggtggggtgggagaagcatatgactagtgctaaccaataggctgtgggtagaagtgatgtgtgtcacttctagactgaagtat

SEQ ID NO: 170130 - DNA, 491 bp, Homo sapiens
cagttcctataaacttgataaattaatgagggaagaagagaagggagaaacaaaatatgcccagcttgcagcccactcggcgttcatcatgaggtcagctgctctctgacgcttcttctgagctgcatagtgcctgttgtgctgtagtcgtgtagaccctgtagtttcccttaactgctctatagatagagtttcatgatgttcaagttacgttttccttttgggagactgcttcaggtcctgtatactgatgcagctactgactcagctggtcttaaggaccccatgaggagctgactcaaaagaacagtttctacatcctgatgatttcatcccccataccccatccaatcaacaaccctaattttccaacccctcaccctccacagtcctcttaaaaaccccagctcagaactcctcagggagatgcatttgagggtctcctcccatctcctcacttgatgcactatgatcattaaactttctctgca

SEQ ID NO: 170131 - DNA, 352 bp, Homo sapiens
catccccatccctgaggccaagcagagaatcaaggctctgcacagccagggctgagtcatgtgctcactgatggaaccaatgagacatcatctccacccaaccttgtggattaaatacagggaggagtggtcccccaagaaaaatggaggtgctgttgccagaagaagagggggtagatgtgggccagaaaaacaacagacaccgtctgctcccacatttcttcaaagctactgccaggtgcttgcctctggcatggaggagcccttcaccctccaagacttcacactggccatttggccactgagggaggcccagaccaagctgacacctttccccagagccagccacatc

SEQ ID NO: 170132 - DNA, 494 bp, Homo sapiens
tttacttccggcagcaggtggtggggccatggtaaggaggcgggtggcgagccttgagggggtgatgctctttggggtcggggtcagggctggggcgggcaggccgacgctcgggtttcggactccgaggatccgtgggaggaagctctggcgtgtgttacagttcgcttttcccgggctttctcttgccctccttgggtcacatgcgcacagtagtagtagctaaaactcgccgagctctcacagtgcattaggtactaagttgaggactctgaaaccatcctctggttcactgtgttctgagtccccattttgaaaggcgaagaaaccgaatctcaggggtgtggagtaatttgctcacaaattactgttggagccagaattggaataagagcttttactgcttcactacccacctagtaatacccttgtgctacgtgttggggcctccctgcctcgctccttctccttctccgctgtttccccttccccag

SEQ ID NO: 170133 - DNA, 402 bp, Homo sapiens
tttctttttctttttctcattgccagtggagggaaatagtcttgggtgtttttgttcttgtttttttcttacagcagcacaaatgaaacaagatagacctttatggagatttaaaggtctaaattacaattaactgaggccataagggtggggccctaatccaataggactggtgtcctcataagaagaagacacagcatacaccagatatcttcctttctctgcacctgcacagaggaaagtctatgtgagaacacagcaagaaggtggctgtctataagctggaagagaggcctcaccaggaaccaaactaatggcacctgatgttggacttccagcctccagaaaataagttgccattgtgtaagtctgttatggcagacctagtagaataatacaccc

SEQ ID NO: 170134 - DNA, 768 bp, Homo sapiens
ctagaagaggttcaatatttgttctcatacacataatttgtctctagcttgggtaagtccctttctctttaggcctgtttcctcatctgtaaaataggggcagtaattatctatctcatgcaccaagacactatgtgcatctatacaactgtgagggcaccatccacgtcaactatgagcaatgcaggactactgtgtgatctatggcctgagaagggaagggtctttattgcactagaaaagtctgtgtaagtacattacatttttagtttgcatgaccttaagccatatactgtcatttgttatgagtttccttatgattaaaattaaggtgttggacttcacgatttcttaaggtcttgttcaattctaatatttaaaagtattacagtttattcacacattcgactaaaattcaagtaggacctaagacaagtgcagaaaattaaaaaatagttgaaatatgttcctttcctttaagagttcccatttgggtggactttatgctaactatataaagtccttctaggtaagacatttcatgctttttaactgtattttcttaggccctgatatgcaagtgcaattatcaaattatagcattgtaaaacattaagctaataagactaaacaattgcaaattttaaatgacatttaaaattaggcaaaatcttatctttagacaaataaaattgcagttgatccttcaacaacataggtaacataggtttgaaatggaggttattggcatgggatcctcgagagtcg

SEQ ID NO: 170135 - DNA, 811 bp, Homo sapiens
ctgcctcagcctcctgagcatctgggactacaggcatacaccaccatgcctggctaattgtgtatttttagcagagacggggtttcaccatattggccatgctggtctcaaactcctgaccttgtgatccactcgcctcggcctcctaaagtgctgggattataggtgtgagccaccacgcctggcccttttttgttttcctttatctgccatctcatctcacctccttgtgtaaacttgttccattctaaaattctggttttctccatatcagaacagtcaaacccccaccagaaagcaccaccccgttagctgggtccatgggattttgctgagcccctgccatgtgccaggcaggtttcaggcccccttggggataaggattgagctgtcgatatgaacgtccggttaatccctgtgcgcccgcctcacgtggcagtggggagaggccctgctgtggggcaccgcatgctgcttccatggtgcattgggttggagggctcttctcccgagggtgggtgtctcccatctcttgccttcacacacctgctgtcttgtttcatttgggactggacagtcccacaggtgacagctgttgggctgttgtatgcctgtttggtgttgcatcaaaggagtgggtttgaatcagcaggtgctctcaaagctgtctcctgggagacacagtactagtgagcatttattgagcacctactgtatgccaggcaccattttctgtggttaaatgcactgcctgtttacacaacagccctctaaaggaggaaaaacatatcagagtcccatggatggaaga

SEQ ID NO: 170136 - DNA, 472 bp, Homo sapiens
agtcctggtcccccactaaaaatacaaacaattagctgacatgatgatgggtgcctgtaatcccagctactcgggaagttgaggtgggaggattgcttgagctcgggagttaaaagctgcagtgagccgagatcactcccctgcactatggcctgggcaacagagcgagaccctgtcttcaaaacaaagccaaaaaaaccgtgtagggtggaaaatgatggcactgttggagcagcaaagatggagtgctgtgggagttcacttctttctcccagagattgcgctaggcaaggtatggtttatgggaagttttaatgcaaaaggtggcagttgtgcagaaagcagaaaagtgggtaaagcttgaatgagtggagatggaggcaagagagacagagaaatagtaaaaatatatattttttatcttttcaaaaacttgttgtacattggaattttccagtcaaaggctgagatt

SEQ ID NO: 170137 - DNA, 403 bp, Homo sapiens
gtcgcagtttctctgtcctgtgaaccatttctgaagtgaaatgttcagaaatgaatagaatctgattacaaaagaagacaatcaacagaaataaaaaggctggatttgggcaaatatgttattcttaccatatgggataccccatgtgtattttatttgcatgctctggaaataaataaccaaggcttgatagtgacatctggaaagatatacgttgaacaccatgactcagcacacacacgtgtttacatgaaaaaaaagtattcatgaaatgtgtcctgtttcattttcatttcaacaaaaattctttttcattttttttttttttgggggggggaaaggaaacggggacccccaggtgacactcagggggcccggggctcagaatccggaactcaggggc

SEQ ID NO: 170138 - DNA, 488 bp, Homo sapiens
tttctaatggaatcttttactatgtctgatagaattccttcatgtatgtattgctttgtttctaaatataagcatgacaggctcagagctgtccgtggtcacgtaggggtttttggaaataattttagcttcgggcatacccctgaacgtgggcagcgcctacacattgtcatctcagccccctcttacccttttgggaagtcctgataccctcatgaggaggttttttttctgcttcattctcaaatcaacgtggggtttccttatacccttggcccaactttaacttacacaattgtaacaggcagcattatattgagaatgcatgttgtagaatattggttctcacctctggccacaaatttattcacttagggaatttaaaaaaaaatccatgtctgagccttgtccctgagattcagatttaatttgcctaagacatcacctctgatcgtggatgggtgtcttaatgtggattccattggggg

SEQ ID NO: 170139 - DNA, 422 bp, Homo sapiens
ttttaagaggaagagacaccagagatctctctgtctccaacatgtgaggacacagcaaggaggcagctgcgtacaaggcaggatgacagccctcaccagaaccaaccacactggcacccagatctcggatttccaacctcaagaactgtgagaaaatgaattcttgttatttaagtcacctagtctgtggtattggttttttggtttgtttttgtttttgagatatgctcttgctttgttgccaggctgaagtggagtggcacaatcatagctcatcgcagcactgtactcctgggcttaggtgatcctccagcctcagcctcctgagtagccgggactacaggcacacgccaccacacttgattagttttttaaagtttttgtagagatgggagtcttgccatgttgcccaggctggtctc

SEQ ID NO: 170140 - DNA, 321 bp, Homo sapiens
ggtgttcctgccctcctccctccccaggagcgcaattcccatgaggagcccggctcctcttccaggagggcccaaacctgaagaaccccagccaggctgctggatgctttgtctcccctccacacacagctgtgagacttgcagaaagcctgacagactcccacctccaacagggttggagcacgtggatctctggcctctgcacccttgggtgggcaaccctggtgacttctcaaagatcacatagcagggtaggatccaagtggcaggaagaacctccatgttctcctttccactccttggctgacagatcagcctgtg

SEQ ID NO: 170141 - DNA, 270 bp, Homo sapiens
agcctgcgtcacaatcacctgaagggcttttataaaagagatttcttagtttttcattcagaggatttgggatagagcctaagaatttggatgtctaacaagttcccaggaaatccatgttggtttgaggatcacactttgagaaccagtgccaccattcaaggcctcgctgagcatctagtacgtgtaagaatccaaactgatcactttctccagctaaaaaacaactttcgtggaaacaaccttactcaacttaactcttactagcat

SEQ ID NO: 170142 - DNA, 241 bp, Homo sapiens
cagctcactaattaaaagactggaattctaaaattatatacatatttaaatattttagcatatatatacattcatatataattaaatatttaattcatatataattaaaatatatatctatttgtatatgatgcatatacatagtatttatgtaatatccattaggtatataaatatatattagacattatatatagtatgtgtttttcctttttttcttggccaacatagtctaatattg

SEQ ID NO: 170143 - DNA, 1690 bp, Homo sapiens
gcgctcggaattgtgggcgactcggctaatggcgtcggcgagtcttaggggcctggggagctggcgctgaagcttcttgccaggttggctggtgacacccggtgtggctgggccccgcggcagcggagggacctgcccgccttgtgggtttctcggccagagtcggcggagcctagcgggacggtgcgactgcggggggcgcctccgagaaaagccagaggtgttgcggggaagctgctgggggacgctcgagcaggctccgggttcgcagcccagggcccaagaagcgggctgctgaaggaccagagacaccgggagggagctgcctgtggccctaaggagctgaccgtgccagagcttgtttgtacctctcggaaattggctgggaccttggaggatcatgtccggcaccagcagccccgaggcggtgaagaagctgctggagaatatgcagagcgacttgcgcgccttgtcactggagtgcaagaagaaattcccacctgtcaaagaggctgctgaatcaggaataataaaagttaaaacaattgctgcacgaaacactgaaattttggcagcactgaaagagaacagctcagaggttgtacagccttttttaatgggttgtggaaccaaggaaccgaagatcactcagctatgtttggctgctattcagagactcatgtcacatgaagtcgtgtctgagactgcagctggaaatataattaacatgctttggcagctaatggagaatagtcttgaagaacttaagctacttcaaacagttcttgttcttttaacaaccaatacagtagttcatgatgaggcactttctaaggcaatcgttctttgttttcgactacacttcacaaaagataatattacaaataatacagctgctgctacagtgcgacaagttgttactgttgtttttgagaggatggttgctgaagatgaacgacacagagatattatagaacaaccagtactggtacaaggaaatagtaacagaagatctgtcagtaccctcaaaccttgtgtctaaagatgtatatatgcttttccaggatctttgtcagttggttaatgctgatgctccttattggctagtgggcatgacagaaatgactcggacgtttggcctcgaattacttgagtcagtcctcaatgattttccgcaggtctttttacaacaccaagaatttagtttcctcctcaaagaaagggtatgtcctcttgtgataaagctcttttctccaaatataaagttcagacaaggttccagcacctcatcttctccagcaccagttgaaaaaccatattttcctatctgcatgcgtttgctgagagtagtatctgttctgattaagcagttttacagtcttttggtaactgaatgtgagatatttctgtcacttctggtgaaatttctggatgcagataaaccacagtggctacgagctgttgcggtggaatcaatacacagattctgtgtgcagcctcaactattaaggtcattttgtcagtcctatgatatgaaacagcattctaccaaggtttttcgtgatattgtaaatgcactgggatcttttatacagtccttgtttcttgtcccccctactggaaatcctgcaacaagcaaccaagctggaaacaataatttaggtggctcagtctcagcaccagctaactc

SEQ ID NO: 170144 - DNA, 1131 bp, Homo sapiens
gcgctcggaattgtgggcgactcggctaatggcgtcggcgagtcttaggggcctggggagctggcgctgaagcttcttgccaggttggctggtgacacccggtgtggctgggccccgcggcagcggagggacctgcccgccttgtgggtttctcggccagagtcggcggagcctagcgggacggtgcgactgcggggggcgcctccgagaaaagccagaggtgttgcggggaagctgctgggggacgctcgagcaggctccgggttcgcagcccagggcccaagaagcgggctgctgaaggaccagagacaccgggagggagctgcctgtggccctaaggagctgaccgtgccagagcttgtttgtacctctcggaaattggctgggaccttggaggatcatgtccggcaccagcagccccgaggcggtgaagaagctgctggagaatatgcagagcgacttgcgcgccttgtcactggagtgcaagaagaaattcccacctgtcaaagaggctgctgaatcaggaataataaaagttaaaacaattgctgcacgaaacactgaaattttggcagcactgaaagagaacagctcagaggttgtacagccttttttaatgggttgtggaaccaaggaaccgaagatcactcagctatgtttggctgctattcagagactcatgtcacatgaagtcgtgtctgagactgcagctggaaatataattaacatgctttggcagctaatggagaatagtcttgaagaacttaagctacttcaaacagttcttgttcttttaacaaccaatacagtagttcatgatgaggcactttctaaggtaggaaaactgtttgccagagttcatatgtgctttgagacagtatttgaataagctggctgaaagagaaaagcttggtgccatttgaaccaaaagcaacttccctacagctatggtgatgattgacattgcatgttaataactgttggtaccttattttttccaggttagagttgaaatcacgttggggtgcttaagcaaagccccttgggtacagccaacaggctgagttgtgaataggaaatggaaaaaagagagaaagtagcccaagagtaagaatagggaaggagggaact

SEQ ID NO: 170145 - DNA, 370 bp, Homo sapiens
gttccccaaatcatttatatccagaggtcaggcatatggagctcattaaattccatacagcaacattgtaaccatgtgaaactttttgtttgcagtgcaatttaatgttgaatttgatttatgaggcactgcacattcttagtcctaggatgacagcatacacttctacaagcttaagtcatggtttggggcaagggggaaggcctttgaccagatgttggaattggaaatctgggcttatgctaagcatttgcgaagaagggagagcaccacatcttagagaaggtctatcccaacttgactgttatatcactgaggaaaccaagacctagagaatttcttttcctttttcttttcttttctctctttt

SEQ ID NO: 170146 - DNA, 850 bp, Homo sapiens
cccagtgtcttggttacccgcccccccggagttatggatatcgtcgatcctgtcgctcgggcatcagcaaggggagtcctactcggtcacaagaacactcagatggagatgattcacagtggggcttcaggtccagcctgactagggctcagaagacatgggtttgtcgattttaagcatatctttgcccctggagccaggcttatggctgactgcctgcaatccccaggactctctttccaaatcccctgctcaattcctaaccctgccctccttaaatcctttctattgttactcacttcaagctctcatttctctctatggattcttaatcctctttattttatttatctatttatttatttattttatttttatttatttatttgtttattttttgagacagggtctgactgtcgcccaggctggagtgcagtggcacaatctcggctcactgcaaactctgcctcccgggttcaggcgattctcgtgcctcagcttcctgagtagctgggattacaggcacccgccaccacgcccagctaacttttgtatttttagtagagatggggtttcggtgtgttggccaggctggtctcaaactcctgacctcaagtgatccgcccacctcagcctcccaaagcgctgggattactggcttgagccaccatgcccggctggatttctaatcctctttaaaatgatatatttataactcagtagctcagcgacatttatttatagggcaggtcatgggcaactgacccacatgaaaaaccaattgaattttaaattcctcggccagaggttaaatcaagttatatttcactcataaaatttcttaacttgg

SEQ ID NO: 170147 - DNA, 320 bp, Homo sapiens
aaactccggaggggagtactcgaacccggcgcaacgtcagtcccggcccgcagccgcgtcggcaccaccccggagcccacggttcacgcgctcgcggcggccccgactctctccttgataggaatggttgacttcacagaattatatggagtgactcgtcccactggattggaaactattttaagcctgaataatgttatatacaatgaattctaaatttcccttcaaagaaccggtatgtcagtatgttcagtctttgttctgcattttaaagtctaacttcctcgcagttgcaataaacaactttttccaccagttct

SEQ ID NO: 170148 - DNA, 219 bp, Homo sapiens
cagataaatgcctggacaagtcctgccaaggttggccatcaatggtagataggaaacaagctgctcccaactcagtagcccaagcatcactgaagccacagtgaacctcctccaccacctctacaggaaagtatgagcagatatatgggcgcctagaaagaagaccccattctgtcaccccatgggcaacagattccacagttgccctgagaagatatc

SEQ ID NO: 170149 - DNA, 808 bp, Homo sapiens
ggtccccgcttccccacgcggccccgcgcactccaaggaccccaacctgttaggtgagtccctgccccggggaggggcgctgggggcggcggcgaggatctagttgcgcgcgcgcatgcgcctcccgcccctctcccgggacaccagggctgcgcgtctcccaggaggcgccgacgcccctccctctacaggcgggaaaactgaggctgcggaggggacgctcttgcccaaggcccacggcgaggtgggccgaggaaggggcgggaccccggccccgagactcccaggcgcctttccagcaagcccagcgtactctgcgtgtcgcgggccactttaggtctaactgtcgcgcgtgggttagtgtcgccgcggtgtgcgcctcgagccgggcagcgaccgcgccggcgtatctgtgcctcggcgcgtctgcgaacggcacgtgtctttacagccgcgcgtgtgcccgcaagtgggtgtgcgcgccgtgccgcccgggaagcgggaggtcctgcgggcgtgcgccggacctgttgtcagcaggcctggcagatgggaactcagctccggaattaattgcttgtttgtctccggctgggaggccgcccccccgcccttccctggcgaccagttgctctgtgcctagccgggccccaaatgtcgccggcatccgcggccgcaggcagctccgggccaggctccgggtcagccccaaagcccgggtcaagccaggcgggcgcggcgggcgggctccccgtgacgcgagtgccccctgccggccgctgcgcacacggctccgagactggggaga

SEQ ID NO: 170150 - DNA, 101 bp, Homo sapiens
ttaacatctaggaaaccatcatatatgtgaaaggaactctgaggcttctcattttcctccatatttgctttggtcccttagctaaaattcacatttctatc

SEQ ID NO: 170151 - DNA, 704 bp, Homo sapiens
cattttaaaaggcaaataaatgcatataataataattacaactcaaagagatgacacatgaacaactatgattatctttgagcttgtacaggcagctgtctgccggtagcaattgtaaaatgcaccccaatttcaaagacactaaaatgtgaatgggaaaaaaaaccaatcttagaagacaaaatatattattatggagaaatttaaatatactccaatatgatactgttctgtcagaatctaatgacttccattggattggcctttcttcatgttaaacacaaggattccgataactaattcaagttcacttctcaaaatatttattcaatattaaaaaaataaatttccaggtgctgggattacaggtgtgagccaccacatccagcccctgaaccattttagagcaagatgcaaacaccaggactcttcatccctaaattcttctaagaatggaaagacattctgtcacataggcattactaagccctcaacaccagtgagtttataacactggctcttcagctaacgtcacctggaattagtctatgttcatattttgccaggtgtcccaatattgtactaggtaagcaggtttttttttttttttcctgatccaagggccaatccaggatcatggctgatcataagtaccatgactgaagaaaaataacatccagatctttctttgtaaaaatgtgctc

SEQ ID NO: 170152 - DNA, 624 bp, Homo sapiens
cattttaaaaggcaaataaatgcatataataataattacaactcaaagagatgacacatgaacaactatgattatctttgagcttgtacaggcagctgtctgccggtagcaattgtaaaatgcaccccaatttcaaagacactaaaatgtgaatgggaaaaaaaaccaatcttagaagacaaaatatattattatggagaaatttaaatatactccaatatgatactgttctgtcagaatctaatgacttccattggattggcctttcttcatgttaaacacaaggattccgataactaattcaagttcacttctcaaaatatttattcaatattaaaaaaataaatttccagggccgggcatggtggctcatatctgtaatcccagcactttgggaggccaaggcaggtggatcacctgagctcagaagttcaagaccagcctggtcaacatggagaaaccccgtctctactaaatatacaaaaattagccaggcatggtggcgggcacctgtaatcccagctacttgggaggctgaggcaggagaatcgcttgaacccaggaggcaaaggttgcagtgagctcagattgtgccattgtgctctagcctgggcaacaagagcg

SEQ ID NO: 170153 - DNA, 756 bp, Homo sapiens
ccatgagccaattaaacttcttttctttataagtattacccagtctcaggtagttctttatagcaatgtgagaagtgactaaaacagaggacaacacaaagatgaggtattgacaaccaatgttaacagtggggcctctcccccaccagatggatacagtcattctacctttccccgatttaaaacattactgtatcatatgttaacttcctaaatagatcagaacccgcctttagacttactattcagttctaaggcattgtgctacatgctaaggtaaagctgagaacaaggcagccccagtacttgccactatgaaatctacagatatacctcatcttgcctatttctgataaactttcttttacgaataaagatgcaaatatttgcttccaaacagttttctcaaatatccacaacatccctggccaagatatatgactgtaaatgaacaaaaagagaaagcatgtaccaatttctaagtgatgaaagtattattactacaatctcacatttatgtagcctaatcttcaagtttaaaatatcttactagttctgactgaaccagaaaagaaatctataaatcccaggaccttatcgtacatttgggtcatggcccaccattttgcttcctgtggcagtggtaagaaaagaacattcctctctctttccctacaaaacaactcattttgttcacaggaatatggaggaaggcatataagaaagtactcagtgagctgggtggggtggtgcatg

SEQ ID NO: 170154 - DNA, 438 bp, Homo sapiens
ttttattttttgtagagacagggtctcatcatgttgtctaggctggtcctgaactcccaggctccagcaatcctctcacttcggccttcccaagtgctgagattacaggcctgagccacaattacaggcctgagccaccgtgcccagccatgataccctttttaatttataaaacagactagccatttccacactgtcgtttcagaaactctttcaagacattttcacatcaccaaaggtagatataaaagtaacccaaagagtctttacctacatgtcattttattaaacatacaaataccatagttaccctcttttcatctttttaaatgaatggattaaacatgcattaaatcatgttaacaggtttaaaattgaatagtctttcacttaaatatatgtgtggttaggtttgtttttacgagcctctgaaactta

SEQ ID NO: 170155 - DNA, 361 bp, Homo sapiens
cacttaattcactgactttgtgacattgattatctaatagttctctaatagctcccctccatgaggggcgggtttatgtctttcttgtcaattagcccagctcagtgcctaaaagtagataaacatatggtgctgctgaataaatatttgataaatgaatacatacgtaaagataatttgatacatttattttttttaatttttttatttccataggttttttttgggtaacaggtggtgtttggttacatgagtaagttctcgagtggtgatttgtgagattttggtgcacccatcaccagagcagtatacacagaacccagtttgtattcttttatccctcacccgcttcccaccctcg

SEQ ID NO: 170156 - DNA, 585 bp, Homo sapiens
ccttggaaacaggccatcctgacagcatgtcaaggaagttgttatagggaattatttcagccagaagagatctctgcaaagcaatctgttccagcctactgtgtcatggagtagtccccacgtccccaatttttttgctggaaatgcagcggcagccagcgtgaagcctacacctgtcatgagctaatgtttgattcctgccaaagtttgcacttgggttccattaccagggtagagagtccttccagggaagcgtgttaatgtttaaccctttacccacaaattctgtctgtctcccggagaaacctaccacttgccaaaccactaccatgccctttggaattttgcttttgctttttaacattttttggttttgcaagcagactagagaaaggaaaattaatagaaactgggcttcacatgcaaggtccataggccgttttgaaaagtcaaggaagagtgaagctcatccttggccaggagaatatgcattggcagaaatgatataaagcctgatataggaagcaaacctgttagtgtgttaaatgtctcctttcttgccagccgtagaaagagctcggatct

SEQ ID NO: 170157 - DNA, 481 bp, Homo sapiens
tagaggagtgtgaagtaagtgtcctctggacgtgagacaaggtattagtaagcaggacattgtaagtttcacattttatctttaaaaatgtgcctttatgcattttactccacaacatatctgtttattttaatgcaaaagtgttacaccctcatccacaaattaaaaaccgctaaaactttcaaaatcatgctttgtatattctgttacttctggaatgtccctggtgccctgtctccttaccccagggacatctcaactgctgtttgagaagtattaatacttgtttaatacactttttaaaataaattttagcttatcaccataaaaaggtgattatttagaatctgttaccagactgtcacacttttacttgcttaagtaacttttgttccaaccaggaattttagaatatagttggttctagaatggaaaccatggtgtaagcaccatgaacataactcaaagtggttttacttta

SEQ ID NO: 170158 - DNA, 303 bp, Homo sapiens
cctgtggggcagagtatagaacatataatgaaacagaaatagaattctgaaaaaaaaattattaccttatctggaatttacatgaagtgttaacaggaaattatgcagcagttataaatgaaaaatatgggatttaatgtacttattaataaagatttgttacatacatgataccagtgtcccaaatctgctgtccgcagctgtccccaatttctaatgtttctgtcctcagatgcctcatttggagtcatcttattaccatgtaagctaatgccagtttctcttcagtgagtattccattcc

SEQ ID NO: 170159 - DNA, 357 bp, Homo sapiens
cggccaggactttcggtggaggtcgcggtggactgtcccgggaggtcttcctctctaatgtccttgtcctttacggcgtgggggcgatggtgatgctgaggcctgcgtctccctgcggcatctccatcccgggcgcgctatgggctgtgtctccccgcggcatctccatcccaggcgcgctatgggctgcgtctccctgcggcatctccatccccgggcgcgctgaggcctgagtttccctgcggcatctccatcccgggcacactatgggctgtgtctccctgcggcatctccatcccgggcacactatgggctgtgtctccctgcggcatctccatcccaggcgcgctatgggct

SEQ ID NO: 170160 - DNA, 306 bp, Homo sapiens
atataacatttctgatggtggtggaagcagaggccatcctttgctgtttcatgcccaattctgtaggcctgcctcagagagaaggggagcacaggtctcagcatccacagacttttcatggcggtgaagctctactatcaacacttggaaagagggaatcagagggtcttctactccatggctgcaactttttctcattttaaagatcctcctctagtctaatggatttatatttctctggctgacgtaattttgaccctacttcttggtaatacccgagccttaatttgatgaaagagtatcact

SEQ ID NO: 170161 - DNA, 255 bp, Homo sapiens
ctgttatatgccaggtataatgctggacactgcacacttattcattttatcatagaaaattaaagagaaaattatatgattattaagagcctgaatctcatactaggggaagtagtcctctgggttttatgtgatggtgggatgagataactgatgttaaaagacaaacgtggtatctttctggcatattagttttactcagagattttgagtgggaggagtggaagaacttagacaatttaatgactagagtgg

SEQ ID NO: 170162 - DNA, 404 bp, Homo sapiens
aggtagggctgacgatcaggagcgggtttttgggccgagtcctctgcagtgcccatctgacacccactggatgcgcagagtgggcagctggctatgagtctggaactcagagaagctgttcgctccggaaatacaaacctggggctcatagccatataaatgtcatttaaagccacgggactggatgagatcattaaggcagaaggtctaggtcgaaagaagagggccaggaccactacctgtaaaatgagccaatgacacctacacccacggggctctcgcgaggtgtcacgtgaacgcacccagcgagccctggaaccaggcagagaatcgcggcagccccgggggcggggcttccagggggcggggtcatacgggggcggggccgagggaccaagcggccg

SEQ ID NO: 170163 - DNA, 275 bp, Homo sapiens
tgttaggctcctggagggaccatcctaagaacaagcattctaaggggcgggaagcagaaactgccaggctagccaagggttatgcctgggactggcatagtgtcacttccaccatattctgttgacccatgtagtcatagggtctgcccaaattcaaggagctggaagaagagacaccaccttttgatggggagtggcaaggtcacatagcagagaattgtaggatgggagatattgctgtgattttctttggaaaatctgcctcagtgaggcac

SEQ ID NO: 170164 - DNA, 305 bp, Homo sapiens
ggaaaaaaaaaaaaagcagaacccaaacctaagacaagaatttgactgtaagtagttacaactaatgagtggataaacaaaatgtggtagatctatacaataaaatattgtttggccataaaaaggaatgaagggattaaaaaggctttcaaaattgtaaagccccacacaaggtgcttccttttaggttatttctataggctagcaaaacatctgtcagttaccaaccttggtccaatctaagagtcaataatggctgctgatatccatacccctgaggacaggggcctcaatatgtgaatgaa

SEQ ID NO: 170165 - DNA, 290 bp, Homo sapiens
tggtagtgttgacgcataacatttttctaaaattgtttcctcacttagtttccataatatcaaactaatctatttcttatattagctaattgataactactgaattgtcctttttcccatccttgaaatattggttgccccagaattcagttctctaactttttatctttcctgtctttactctctccttgggttatcttacggtttaaatattaatataatttgtatgctgacaactctcaaatctctctcaactaatttcccgaactccagacattgcctgctccgaa

SEQ ID NO: 170166 - DNA, 158 bp, Homo sapiens
atgatttggttactcagaaagataaaactaccaaaatatagactacataaagcagcaactaagacgaatgcataagccacggcagctgttgcaccttccacatgaacaaagacaacaagggcaaggaagctcctaaggaacctaaccccatcccctcc

SEQ ID NO: 170167 - DNA, 431 bp, Homo sapiens
tacccggcccgctatccggttcaatctttgtacaaaacttgaaatttggttattttagaatctagacctggccaggcgtggtggctcacacttgtaatctcagcactttggcaagctgaggcgggtggattacctgaggtcaggagttcaagaccattgcttgatgtttaatagcagtagttggcatttagcaagcagtcattgataatattgaccaattttatgtaatgtgagccttctaataattagtgtagttacaaaataattggagccatgctcaaactgtcaaatattgagaaaactgaattcctggtatttgaaagtgtctaattatttgcgttaattggtaagcccctcctgattttctacttaaccatgacacttcttccgtggcgcccatcttcattctcttgaacattgatactggaaga

SEQ ID NO: 170168 - DNA, 378 bp, Homo sapiens
cattgctcaaaactttcttagaccttattaatgaaaaactctccagaagcaaattctgagccatataaaaaatcagcattattgtttttatttgactgaaaatcaagcctatctttgagggggcgaagaaagtccaaatgagatactctctctcatttgaaagagctttgcaattcataagaaactatgtagatatgaaatgtcacagaatgggaagtgttaatggataagtatatccttactgagaatattaacaattttgccttaggcttttaaagaaattctgaaaaccccagtgttttaagctctagtaacaccattattgcttatatagtccccaaagtgcccacctgcagataacacccatctgagcatgta

SEQ ID NO: 170169 - DNA, 247 bp, Homo sapiens
tgtgccactgaactccagcatgggcaagggtgagaccctgtctcaaaaaataaattatagaaatcttcagtaatatttgtcatgagtgaaaaaaatccagtttatgatgggaaaagatagaaaataaaccccccaaaagaaaataactataatcttatctctcagagatcattaacattttggtgactcttcctattgtttttgttggtagacatatccatacgtgcatgtaatatgactagagtgg

SEQ ID NO: 170170 - DNA, 178 bp, Homo sapiens
tagacactgtgggtatagacaatcctttgacagcatttggctataaaggaatggagaaaatttgtattggaaagataggcatcaaaggaaagtttatcttttagttttgttttaatttttaatgttggtgatagtgcaggttatgtgcctcctaaagaaaattatccagctgagaggg

SEQ ID NO: 170171 - DNA, 272 bp, Homo sapiens
gtccgcacggtggcagcacgggggcaggacactggtgatcagtgctgctagggtgaggcaggaagggctgtggtgcaggacaggtgttggggtaaaggtgtggggtagtgcctttcatagagacagggtctgggcctctcgccagacctcacaccacactcctctcggatggagctaccgttgactaatctccctctttcccttctctctcttgtttctctgtcttccttcctggctttttctctctgcatgtggctgcctgttctcttcac

SEQ ID NO: 170172 - DNA, 1096 bp, Homo sapiens
cgcagtcttggctcactgcaagctccgcctcccgggttcacgccattctcctgcctcagcttcccgagtagctaggactacaggtgcccgccaccactcctggctaatttttgtatttttagtagagacggggtttcaccgtgttagccaggatggtcccgatctcctgacctcatgatctgcccgcctcggcctcccaaagtgctgggattataggcgtgagccactgcgcccggctgattttaagagattttctaaggtatgattagagaatgcagaatcacgtggattttatgcaggatccatctagacttatttcaaacttaaaggcttttgttaaaacaatttaattaagttgaaaagtgttatttaatttaatttatttatattttattttcagaagaaaggggagtagtgttgctttcttgtaccagcctgcagcttactgtcttttaaagcattatctatatacttaccctttcaaaactaatgacaaaaataattgcttattgttcttatgcttttagctttctagaagaataattccaagaatattagaaatctccttctctattgacaatttgtaggcaagttaccaaaacaattcatttcaaaggataatttgtaaaatacttggaattgcattagaaaccacatagaggtattactttgtataataaactgtgaaatatgcgaaaatatttgagtgggaggcgttgcaatttagttttctgttttaaaacttaattcttaaagagtagttatatgaaagtatgttatgaaatgagttgtactttgttcaattcaagaagttttaattcctatttgcgtacctagcacataatttttttcttgtaatgtgggcgtgttggtgaagtggagagatggttgtcctagcacgtggttgctgtgtgtaccttcccttttaaatatctcaatggcctttttaaaaggtgtttcttgcttgagtccttaattggcagtgactcctgtagaatcattgtttataattaccattaaaaatctactaatagaaggaatgtaagtttgttactgtacaggtatacttcattttatgtaataattttattttccg

SEQ ID NO: 170173 - DNA, 416 bp, Homo sapiens
cgcgcacgcctgaccggagcaccccgcttcacgggggcgttctgcgcgtccttcctccccggctgcctagatcacacggccccgtttcattcatttttactgaataacggtcgttggacaatttagagaagcagcagaaaccacgagaaaaacagtggagtcaaacggcggtaaggaccgacaaggctggcggggacattgagcaaacggcggcttctgagttggcacctgtccttcaccacgttgtgtgggaagtgtggggagtcgggattcccactcctccccagccttccggaaaaatgctcggaaatttccttccacattgacacctgattacagtctaaatagtaaccttattctgattgttaatgtaaccctctcgtaatctctacaaaaatactttagtttttctagct

SEQ ID NO: 170174 - DNA, 400 bp, Homo sapiens
ttgtaagatggagtcatcctctgttgcccaggttggagtgctgtggtgtaatcttgtctcactgcaacctctgcctcccgggttcaagcgattctcatgcctcagcctcctgagtagctgggaccgcaggtgttcgcccccaccctggctagtttttgaatttttaactttcaaatgattgactgcaaaaatcaggtagtcaatttaaaaataaacatctacacatgcgattctttttttttttttgtatttttagtagagatggggtttcatcatgttggccaggctggtcttgaactcatgacctcaggtgatctgcccacctcggcctcccaaagtgctgggattacaggcatgaaccactgtgccccacctaatttcttgttattcccatgatact

SEQ ID NO: 170175 - DNA, 223 bp, Homo sapiens
gtattaccatcagaggctccacctccctctgtagtcccagtcccttgggaaaatctcagagctggagcccttccctcatcctctggctccccaccccatggcttctcgaacagtgttcccaccaggaccttgggacaggagagaacgcctcacctgaaggactcccaaaactcaggtttctctaagctgctggggcagatgccaagagcctccactgctctct

SEQ ID NO: 170176 - DNA, 337 bp, Homo sapiens
aggaaagagagagacagggattgcttttaatatcttgatacaccaatggggaaaattgtatgcagtaaaatgaggaaaacatcccagattattttctggaaggacttgtcatctgaattcaaagtgggtcttgaaggtatcccagggacctgcctgctgtcagggctaggagagcaatgttctctttcctgcaattatttcaattctgccacacaataaggagtcctgggggccaaggaacagggaactgcattactagacatacatccctcaaagaagaccagacaaaattaccaaagtttcaggtgaccagactgaatttccaggagctacagtc

SEQ ID NO: 170177 - DNA, 310 bp, Homo sapiens
tgtttgtatcaagagttatttctgtctggtttgagtgtactgaactgaaagttggtaaagctctcgctggagagtaacaatcatcatagccaaaataggcttccatctgccagggtgtgtgtcaagcattttgtatgcatttgatgattcttcacagcaactcaataaagtaatactattgttaatcttacaaataagagaactgggttgtagagaggtgatgtaatctttttttttttttttttttttttgggcacccctggctccatccttggggggcccctaaaaagcccccgggagggtttgcaag

SEQ ID NO: 170178 - DNA, 143 bp, Homo sapiens
aaactgaggtgcagagaggtgaagtgacttgcccaaggtaatagagctagtgaatggcagggttggcacctgaaagtcagttccttctgcccccaaagcccatgctattaaccagtgggtcagcatttcctagatctgggtcc

SEQ ID NO: 170179 - DNA, 286 bp, Homo sapiens
atcgctttttccagctgtgtgtgtatggactaatagctactcatattaaatctgcatcagtttctatgggccaggttgctgtaaccaacaacccctaaatctctgcagcttcaaacaacaaatgttcatttctcatttgtgctccatgtgcatctgggcttgctggaggtgctctttgaagaggtctgtctttgggaggcaggctgatttctggggtggctgtcatcttgagagttgctggtcactgttagggaaataagagaacatggcataacaccacacaatt

SEQ ID NO: 170180 - DNA, 506 bp, Homo sapiens
tttgaacacattcagaagatcccatgggccctaagtattttaataagccttttcatctggcccgtatttctgaagaagaaaccaaggcaattaaaaaccattaaatggttggttcaacatcaaaagaagaatgatatcaggattggcccccaccaccagactgtcaactccaccctaagatctactgctgccttcaccgaatgatagaaaaatatcatctacccaagataaaagtgatagaatttacaaaacaaagccagatgatgaattagtatttttaaaacaatgacatgccagcctatactgttttacatagaaagaatgtcatctgtatcaccctaaggagattttaaatcatcatctaataaagcctttgccatttgcatgtgctggaatgtttacctgttttcaaaaaacagtcaacatagacagttttatagaaaagtttatggctataagagaaagagaaaggaaatgatgtatgtttctagtcgatttaaatcaag

SEQ ID NO: 170181 - DNA, 311 bp, Homo sapiens
gagccacagtgcccggcccgaaaagtctttattacatacccttgaactaggcactggagaaaagttctattagtcttcatctactttatgttctgaagctaaaatcagggtttatgctcttgccaacaagcaaaatatttagaattcagacttgtctagaacattagagatgtctgggcatagttgatcctaagatccactgaatgtataagctagtagctgagactagatttcttcataaaaagatgagtagggcatccccggcttagaatcaaatgtgtggtccagatggcagtataggatcagaaagt

SEQ ID NO: 170182 - DNA, 445 bp, Homo sapiens
aatggaatttgagaaatgaattcaaatgagttttcttagatgtttgcaattctttcttcctaaaattactatgatttacatgtatggagcagtaaatgcaaatgatttccaatcaccacgggtacgtgtactcaattacaaagtctcttaatgagcattgaaaagatttcagcattcactgaacaagacataaagcaaatgaactcttcagtgccctccccttcccacagagggctgaaagggactcactcttgttacaagaacacggccactcctccctctcttcctcttcccagtccatccctcaccccagtttcagccaccatccaaaaagaaatcgcagcatggcccttgaagcacattgagcttaaaagtgcctagaagataaagcctaaactgcagcacgacaggcaagacctttcaaaatctggcctcgaccatcctc

SEQ ID NO: 170183 - DNA, 536 bp, Homo sapiens
tgagtaaggtcctgggtataagtggatgggaggttaacaagttaatgtagctacattattacccaggagtttataaagcctggatacattcaggatacacaggcaagcagggaagcatggaaagtaaagaacacttttctaaaagaaaaaaaaaaccctccaaaaactaaataagtaaatcacaaaaacaaaacaaaacaaccactaatagcagctatattctcacctcctacttaacctttggatgatatctcttgtttacaggggtgagatcagactgtgtgtgtgcataattttgagtatggttgttttctcataagactatataaaaatgctgtgttctttaaatctgtatgaaaattatacatggatagcatggatatttttataacattccctgtagaaaatttgtaaaatatagaaaaataaaaaggaaaaaaagtacccataatcataccatctagagatcacattgtcattttggtgtttctctttctagacctttttatgcataaatattgatttctgaacaatag

SEQ ID NO: 170184 - DNA, 811 bp, Homo sapiens
agaacagggaaatgttattcacactgagcatctggtcttcactaaaaattcaaccaccatttcttgagtatttactatataacaagcattcggaatataaagatgaaaaattgtgtggaacaggagccacatacataaggggataattccaaataaagtagtacttgctatgagaggagtgtgtccagaatggtgcaagagctctgagggggacgtttactaaatctgggatttatagcaaaggaatacagtgggatcagtgggtagaaaattactaagaggaaacatcaaggatagacggccagagagtttctggccaaactgacttgatggggttagacatgaagaagacaaagtgcaagatgagtactaaagactaaagaacaagcaagaattaggtctgagatgaagcaagattccaagcagagagatccacttcagcagtggctcatggcacaagataacatgtttagtgggagaataaaattcagtgtgacattattataaagtgcaaagtgggaaatggcaggagctgcaggttgaggccgggttcaaagaaggaatgtttttgccatgctgatgaatttgaactttattatagaagcaaagtatttcaatatactgcagtattttaattgctggagtaaaactgtcagatttgcaacttaaatgagcccatttggcaatgatgtgagacaaaagaagaaacagggagcctggctcaggggttactaatagaaaccaatcaaaaagaggttagtgcctggactggggcagtgttagtatgggttgagaggaggttattgcacat

SEQ ID NO: 170185 - DNA, 545 bp, Homo sapiens
tctcatgacttcaatttctaaatactttcacatctctatctctagtccacatctcctgtctaaactatatgtgtgtccagacgccttttggacgtcttggtttgcacaataccacagtcttctcaacttatttaaaacttgcccaatctgctcttcttaactcagtgaatggtatcaccatcacccattgcccgagctagacactgggaatcaagtttttgcagttctttctcttgtttcttcaccacatgttctgttgacactgtttcctaattacctgtaagatccatccacttctttttattgcctctgctactatcctaatttagactatagccacctctcatttaaattatttgcaaaggcctcttaaccagttgcctgtgctatcttcacaccttcagactacaaaaatcacagattgtgtgctgggcagggtagcatgtacctgtggtccctgctactctggaggctgaggcaggaggatgacttgagccaaggcattcgagaccagcctgggcaacaaaatgagaccccctcctatc

SEQ ID NO: 170186 - DNA, 669 bp, Homo sapiens
agcctccccgagtagctgggattacaggcgactgccgccaccacgcccggctaattttttaagtatttttagtagagacgggtttcaccgcgttagccagcatggtcttgatctcctgacctcgtgatctgccctcctcggcctcccaaagtgctgggattacaggcgtgagccaccgcgcccggccgacccctgtagggttttaaaggagagaggcagcatcccagagggcaaaaagggcttcattcatggagaaagcaactgagctgggcagagcacagacggaatttgaattggaggccagaggcaaagggaactccaagtggaagaagaaacggcatgaaaaaagggattgagaaggaaaaggacaagatggtttggagagagagcaacttcagcctggaaaagcagaaatgagatgcggccaagaaaaagactccagcccagcctgccttggttctaaccctgactgttacttaacctctttctggctcagtcaagaaacttgagcactgcaagatgatcatgtggaatacctacttcaaacggatgttaagaggagtaaaagtgttcttgtttctaagtgcttgaaatgcagctggcatataattaagctatgcaaatatttactttttttttttgaaatgctgagtttactgatcactctaa

SEQ ID NO: 170187 - DNA, 280 bp, Homo sapiens
cagatctgcacctatatttagagaccattaacttctttagtactggggtgcagggcaaagggactcacacaaagtcatgaattatagagttagaaggatcctttgggttcatctctcatactttttgaaaaaagaaactaggggccaggcacactggctcacatatgtaacccgaacactttgggagattgagacaagaggactgcttgaggccaggagttcaagaccagcctgggcaacatagcgagacctgatctctagttgtctttttattaaaaaa

SEQ ID NO: 170188 - DNA, 379 bp, Homo sapiens
ggatcatgaggtcagggaatcaatcgtttttaggcagaaaaaaagaggacaatcaattaaaacccaagatggaaccattcccctggaattctagcttctggctctgcctatgaattggaccgttcaccaaaaatgaaatttttacaacagagatgagcctttcatttgctcctagttgaagctgcaaatcccttgtgccaagtattttgctggtgtcaattaaggcaggcttctcagattgccacagggaaatcacaataatatcatactctcttcagaaataacatttaggatttttgttagggaaacaatcaaataaagccctgacaaaattgtttctaggggaaaacatgcctgtaagggatgtctttggaaatga

SEQ ID NO: 170189 - DNA, 336 bp, Homo sapiens
atcattgccatagatccctgagaagcactccccctcccacagttgccattccaatcttgctacacagtataagagccctcttggcttctgagggttaaatgttgccatccagaatggttaaatgccattccagaatcgtgtcatccccaagacactaaggagccaagttccatggcagcatctcctagccacagagcacagccaccaccagctttctatgacaccagtgccccctcacgtccacattctgcattgccttagtgaagagcgcctcctctgggcagctccatgaaacaccttctggtctcatgtaataaatccgttctaacattccca

SEQ ID NO: 170190 - DNA, 737 bp, Homo sapiens
aagccaggtgaagtacctgtgtcatggatgctgagggcagtggagttcaaggtgtagcagtcacgatctggagatgtgttcccatgaatggtgtgcaaccggggagggagtatggctgtactcaggatcctcgtactggcactttaaaccaagatggtaagcacaggtttcagtatctgggtctccagggaggtgaactagcaggagcatggatgagattccatgatgtaaggcccagagcccagtgggagacaccataaggacctggtatctcctctgagttggagaactagggaggagcgagatttactggggttcctggggattgagtctgctcatgatttcatctgcccccatcatgcagggccatgtgacctttgaggatattgctgtgtacttctcccaggaggagtggggcctccttgatgaagctcaaaggtgcctgtatcatgatgtgatgctggagaacttttcgcttatggcctcagtaggttgtttgcatggaatagaggctgaggaggccccttctgagcagactctttctgcgcaaggagtgtcacaggccaggactccaaagctaggtccttccatcccaaatgctcattcttgtgagatgtgtatcctggtcatgaaagacattttgtacctcagtgagcatcaggggacacttccctggcagaaaccttatacgtctgtggccagtgggaaatgttttcatttggttctaacctgcaaca

SEQ ID NO: 170191 - DNA, 731 bp, Homo sapiens
tttgctgcctgcgagcgcgtccgcgggctgggcgtttccggctcgctgggtccgggccaggtaactggagccggaaaccggtggaggtggtgtccgcccgcagaggagcttgcctggtctcggtctgagcgtcgcccagcgatttgccaccgcacgcacgccggatcccgggctttaccgcccgcctttccaggccccgccccgcctaaagtcccatggccgaggcagcgctagtgaatacgccgcagattcccatggtaacagaagagtttgtgaaaccatcacaggtaagtggaagaagtcccaggtcttcactggccctgttccctaaagccatgggtctggcccacagatgcagggccatgtgacctttgaggatattgctgtgtacttctcccaggaggagtggggcctccttgatgaagctcaaaggtgcctgtatcatgatgtgatgctggagaacttttcgcttatggcctcagtaggttgtttgcatggaatagaggctgaggaggccccttctgagcagactctttctgcgcaaggagtgtcacaggccaggactccaaagctaggtccttccatcccaaatgctcattcttgtgagatgtgtatcctggtcatgaaagacattttgtacctcagtgagcatcaggggacacttccctggcagaaaccttatacgtctgtggccagtgggaaatgttttcatttggttctaacctgcaaca

SEQ ID NO: 170192 - DNA, 660 bp, Homo sapiens
tttgctgcctgcgagcgcgtccgcgggctgggcgtttccggctcgctgggtccgggccaggtaactggagccggaaaccggtggaggtggtgtccgcccgcagaggagcttgcctggtctcggtctgagcgtcgcccagcgatttgccaccgcacgcacgccggatcccgggctttaccgcccgcctttccaggccccgccccgcctaaagtcccatggccgaggcagcgctagtgaatacgccgcagattcccatggtaacagaagagtttgtgaaaccatcacagggccatgtgacctttgaggatattgctgtgtacttctcccaggaggagtggggcctccttgatgaagctcaaaggtgcctgtatcatgatgtgatgctggagaacttttcgcttatggcctcagtaggttgtttgcatggaatagaggctgaggaggccccttctgagcagactctttctgcgcaaggagtgtcacaggccaggactccaaagctaggtccttccatcccaaatgctcattcttgtgagatgtgtatcctggtcatgaaagacattttgtacctcagtgagcatcaggggacacttccctggcagaaaccttatacgtctgtggccagtgggaaatgttttcatttggttctaacctgcaaca

SEQ ID NO: 170193 - DNA, 1343 bp, Homo sapiens
aagccaggtgaagtacctgtgtcatggatgctgagggcagtggagttcaaggtgtagcagtcacgatctggagatgtgttcccatgaatggtgtgcaaccggggagggagtatggctgtactcaggatcctcgtactggcactttaaaccaagatggtaagcacaggtttcagtatctgggtctccagggaggtgaactagcaggagcatggatgagattccatgatgtaaggcccagagcccagtgggagacaccataaggacctggtatctcctctgagttggagaactagggaggagcgagatttactggggttcctggggattgagtctgctcatgatttcatctgcccccatcatgcagggccatgtgacctttgaggatattgctgtgtacttctcccaggaggagtggggcctccttgatgaagctcaaaggtgcctgtatcatgatgtgatgctggagaacttttcgcttatggcctcagtaggtaagatctcttaaaaccacaccatcaacctctgctggactctgctcttcccctttttccaggagtttcctgtctttcccagagttggacatgggcccttcttctttccttggttcttgacctgtggaagacataggcgttgtggttgccaggcctgggttttttctgccccaacatctactgtcctgaagccttttagttaagagtttgggttcagactcttgtaacttgcccaaccgacaccacttggttttgccactccttgctaaggtgactgttcagttctgtggtggacctgtgttacaggttctccccctgcctttagtagacgtgtctttagacctgcctttctcaggaattacaggtacttacatggttgctatttgtagggaaccctagactatgacagcaagaccccctcccaagggtttttttgtaataaatttccctcctgtagtctgtcatgggttggcgcaccctgggccagtgttgttgacccacctccctgtttttcccttaggatttcttctaccttccaggacccagatagtctcctgacttaagctggggacaggggagaggcctgtgttcctgaaagcgtagtgaagtcttcagccacagcaaggggggttaacagggtttgggacctgtgagtaggagcagtgggagggcatgatttgagggctgaactcaaatcataccaggcaaatgtcctatgttccccactattttggtgccagggctcatggccatacctcatttttctcttttctctgcctgcttgacaatttgcctacttgtcgtttctactgtgattgtcccctacctctgttctccacatctctcctgttc

SEQ ID NO: 170194 - DNA, 1337 bp, Homo sapiens
tttgctgcctgcgagcgcgtccgcgggctgggcgtttccggctcgctgggtccgggccaggtaactggagccggaaaccggtggaggtggtgtccgcccgcagaggagcttgcctggtctcggtctgagcgtcgcccagcgatttgccaccgcacgcacgccggatcccgggctttaccgcccgcctttccaggccccgccccgcctaaagtcccatggccgaggcagcgctagtgaatacgccgcagattcccatggtaacagaagagtttgtgaaaccatcacaggtaagtggaagaagtcccaggtcttcactggccctgttccctaaagccatgggtctggcccacagatgcagggccatgtgacctttgaggatattgctgtgtacttctcccaggaggagtggggcctccttgatgaagctcaaaggtgcctgtatcatgatgtgatgctggagaacttttcgcttatggcctcagtaggtaagatctcttaaaaccacaccatcaacctctgctggactctgctcttcccctttttccaggagtttcctgtctttcccagagttggacatgggcccttcttctttccttggttcttgacctgtggaagacataggcgttgtggttgccaggcctgggttttttctgccccaacatctactgtcctgaagccttttagttaagagtttgggttcagactcttgtaacttgcccaaccgacaccacttggttttgccactccttgctaaggtgactgttcagttctgtggtggacctgtgttacaggttctccccctgcctttagtagacgtgtctttagacctgcctttctcaggaattacaggtacttacatggttgctatttgtagggaaccctagactatgacagcaagaccccctcccaagggtttttttgtaataaatttccctcctgtagtctgtcatgggttggcgcaccctgggccagtgttgttgacccacctccctgtttttcccttaggatttcttctaccttccaggacccagatagtctcctgacttaagctggggacaggggagaggcctgtgttcctgaaagcgtagtgaagtcttcagccacagcaaggggggttaacagggtttgggacctgtgagtaggagcagtgggagggcatgatttgagggctgaactcaaatcataccaggcaaatgtcctatgttccccactattttggtgccagggctcatggccatacctcatttttctcttttctctgcctgcttgacaatttgcctacttgtcgtttctactgtgattgtcccctacctctgttctccacatctctcctgttc

SEQ ID NO: 170195 - DNA, 222 bp, Homo sapiens
ccaggattgaaagtcctggaaggaagaaacccaaaaagagattgaggaaaaaatcaaaataattcacaattctgtccaggccccatccttgtcagaaagccagattctacttcaatgactgatagtgctgaatcttttttggaaagaaaaaaaaaagaattgaaatagaatgctttggatctaccaagtaggaaattttggaagacaggaaactattaaata

SEQ ID NO: 170196 - DNA, 757 bp, Homo sapiens
caggcacaggagtcgctcctcatagcgagtctggtgcggcctacgcgcggcgcttcctttcggacctgaggcccagaccctcaaaatagagggagcggataaggaagtcataatattaatgaactctgaggactgctatgaggataaaatgggatcatcatcatcatcatcatcacttactcaatgcgtactacaatcctggcactcctctaagtgttacaaatatattaactccaacaataactccagaagaaatcctagtattgcataagtgatcttcatgaagcttcctattccctgtggagtttggaaggagaggcattcctgtaggcttctgctgagaagggaagaagagtcttcctgcttggacactgggcttctgaaaaggccatgtgctctcctatctcacagttttctttcttttactttttttgtttgtcttttttctctttttttattctttttttcttacctcacagtcttgtatgtgttttgactgtcacaagaatgagcattggatgtggtagaaaaaattcttggattagtgcctctcattagtccctaaaaataccatatgtatctggcccaactcctggtgactctctaagcttatgatgcattttttggtatgttctgtatacagttttgagcttccgcaatgatttttaaaacaggacaaaatcccattatgaaacttctgttatactccattaaattgtcaataccagagatacaggaaaattattttctcattcta

SEQ ID NO: 170197 - DNA, 848 bp, Homo sapiens
caggcacaggagtcgctcctcatagcgagtctggtgcggcctacgcgcggcgcttcctttcggacctgaggcccagaccctcaaaatagagggagcggtgagtctggcaagggttgcatacccgctacttctcctcgccagccttttcactgaacctagggatcctgggactcatccctccgaccgaggataaggaagtcataatattaatgaactctgaggactgctatgaggataaaatgggatcatcatcatcatcatcatcacttactcaatgcgtactacaatcctggcactcctctaagtgttacaaatatattaactccaacaataactccagaagaaatcctagtattgcataagtgatcttcatgaagcttcctattccctgtggagtttggaaggagaggcattcctgtaggcttctgctgagaagggaagaagagtcttcctgcttggacactgggcttctgaaaaggccatgtgctctcctatctcacagttttctttcttttactttttttgtttgtcttttttctctttttttattctttttttcttacctcacagtcttgtatgtgttttgactgtcacaagaatgagcattggatgtggtagaaaaaattcttggattagtgcctctcattagtccctaaaaataccatatgtatctggcccaactcctggtgactctctaagcttatgatgcattttttggtatgttctgtatacagttttgagcttccgcaatgatttttaaaacaggacaaaatcccattatgaaacttctgttatactccattaaattgtcaataccagagatacaggaaaattattttctcattcta

SEQ ID NO: 170198 - DNA, 153 bp, Homo sapiens
ggcggcgaggactgagccaggagcgccgagagttccagctgctcccaggctgggttctaattaacactggacccctgctgtctttgccagttccatgctgtatacacataatgagccgttacgactccagcaccaaagctaacgccccgggaa

SEQ ID NO: 170199 - DNA, 127 bp, Homo sapiens
atatatcaaagcttatcaaattgcatactctctgtgatgtttatcatacccccaatgtacttcaataaaactatttaaaaaaccaacgtgcaaaaatccaagtttacgggaccaggcaaatgactgc

SEQ ID NO: 170200 - DNA, 441 bp, Homo sapiens
tgtacgtactgtgtgttaccgtatttatacactgcattcagccaagtataaggcctgcgttagaccagcctacaggatactaatgaagcatggaatctggtacctatgacagaacaattctgagacagggagtcacgtaccagagggtgatcatgggctggttagggtcaagtggtcctgcagctagtcagtactggaactgatttttacttgttgtcttttctattggaccacgacttctctctggaatgaaaggaatcaacccaatgctattgtgcctaagtaattgaggttttagggtcagaaactcaaatattaccgcaggagaactaaaaccacatgggagctctcaaacaaggttgcaactctcacatctgggcagttagtcaagcaaaacagtgaagtggtaaaatgaaatactcattacacggtgacaccaca

SEQ ID NO: 170201 - DNA, 193 bp, Homo sapiens
cagagatcgcgccactgtactccaacctgggtgacagagcgagactccgtctcaaaaaaaaattaaaaaatgaagtgtacaattcagtggcattaaatacattcaaattgttctgtaacctcgccatcatccatctctcttcatcttctcaactaagactctatacacattaaacaataactcatcatttccc

SEQ ID NO: 170202 - DNA, 328 bp, Homo sapiens
attcccgtttccaaagacatcttcggagaggtccacatatccacttgcagattccacaaaaagagagtttcaacactgctctatccataggagggttcaactctgtgagttgaatgcaatcatcacagagaagtttctgagaaggcttctgtctagattttatgcgaagatatacccgtttcgaacgaaggccacagagtggtccaaatatccacttgcagatcctacaaaaagagtgtttcaaactgctgaatgaaaagaaaaagtaaactctgagagttgaacacacacatcacaggtcgacgcggccgcgaatatagtagtagta

SEQ ID NO: 170203 - DNA, 338 bp, Homo sapiens
gggtgtggtgtgtgtgaatgcggagtgtgcgagtaaacgtccgtgtgtgaatgtcagagtgtgggatgtggcatgtgattgtcagagtgtctgaagtgtacgggtatgaacgggcgtgggcgtggggccgttggacgagtgagtgcacatgcgtgtgcgtgtgccagtctgcgggcgtgggtgagggactgatggagcgtgtgccttcccagcaggggctagagatcagcctcgggcagtgacgctggggcacctcccctgccagccatcatcttccccaggctctgcaaggctcagctgcatgctggccgagggggcctggcacacagaagccgatc

SEQ ID NO: 170204 - DNA, 205 bp, Homo sapiens
catcttctaagatgtaataatagtatacaatgaaacatcaggaaaggagtcaaaacaattatttagtaccttcttcccgagaatgaaactaacatttgaaaagataaccgataaacaatgataacattgcaattgatgtagaactttgttccttagttcagctaaaaccgggtccttgtcacacaaccaggaaaagttaggcacg

SEQ ID NO: 170205 - DNA, 551 bp, Homo sapiens
atcaattgaggtcaggagttcaataccagcctggccaacatagcaaaacaccatctctactgaaaatagaaaaattagctgagcatggtggcgggcgcctgtaatcccagctactcgggaggctaaggcgggagaatcacttgaacccctgaggtggtggttgcagtgagctaagatcacaccagctactcaggaggccaaggcaggagaatcgctggaacccataaagcggtggttgcagtgagctgagatcgcaccactgcactccagcctgagcaacagaatgaaacttgtctcaaaaaaagaaaaaaaaagtaggagtagggatgtttttgtcaaatctaggaaatgtgaaatttcttctagaaaccacctgaattatattaaaaatattgacaatatatgagtttttaccttgatgaaaggagatatttctttttttttttttttactaaattgcttttatacaaagtctacaaattaaatctgcatataaggagagttaaatttaaatattaattttaagatttttggaaaatgcggcaatcgtt

SEQ ID NO: 170206 - DNA, 120 bp, Homo sapiens
atgtgatggagtggtctggggtagcaggacatgtgacaggcctcgaagttcagcactacaagcatggagcccatatccacaacatcttaaagcgcagaagctgggctgtggggtggagta

SEQ ID NO: 170207 - DNA, 82 bp, Homo sapiens
aaggggcagacccctaaggctgactgagcaagtctgagggggggtcccaggaaatagtattttaaacaagtatttcaggtga

SEQ ID NO: 170208 - DNA, 355 bp, Homo sapiens
tgatataggcagcaggtgaagatatgaaatttgtggtccaaaggaatagaaattccagctgggtaattccaggagttactcaagagccacaacccagtgagagagcacgtgcatctctttggccaggacacagagcaggcaagctcttttgtggtggagatgatgctctggacataagttcaaagcatcagcagagaatctggcctgagtccactatgaatccaccctggggaaccttcagataaatcgctttagtcactctcaagtcagcaagtagaatccaggggtttttattccccttacttttttccagtggaagtgcaaaatactcccatgtcatgtgcagcagtatacg

SEQ ID NO: 170209 - DNA, 310 bp, Homo sapiens
tgcctcagcctcccaagtagctgtggttacaggcacacgccaccacccccagctaatttttgtatttttagtagagacagggtttcaccttgttggccaggctggtctgaaactcctgacctcaggtgatctgcctgcctctgcctctcaaacaaagtgctgggattataggtatgagccaccatacccggcccagctcctttagatttattccctcttatgggatgtttttagagttcacgtaagtgcattgttccttggacctcctgtctaggcgttcactgccaatctgtagggttgccattggctg

SEQ ID NO: 170210 - DNA, 298 bp, Homo sapiens
gcaaacccttcctctcatgtctttgtgtttctaatggaaagactttttattgtgtgaaggaaggaaaaaaggaacttgtcttctagtaattggttatttgcagactctgtaagtatatgtactgaacattaagggtttatagccctggggtttgttcctaaatgggctacaaggagttttacacaaaacttttgcttaatgcttttttttgtgtggagaggacccataatccttataatactctcaaagatggctcaggatcccccaaaatgctaaaaatcacggcctaaaaaattcc

SEQ ID NO: 170211 - DNA, 460 bp, Homo sapiens
ttgagagggaaaggggggcacgaaggcctgactcatggagtggagcgccagaacaggaagtgggctacgtcatggtttcctggggagggatttggacaagcaggaggccccccaggtcccactagagatggagaccagaaaggtgggcactggtgcttaatgctggtgaaaggttcgttccacaaatcctgctcactgaagtggctgtcggttttgcattcactccggacagggatgttaatgtccccggccctcggagcaattccgcagccgtcaacccagatgctagttactcggtgaaataaaagagtggtcgagtctctcccgaggaagataatatcctgtcacaggcagtatgatctgccggccatgtgacagccgttccctaatgtttccaaatagacttttgaatagactcttgtctagaagaaagcaaattgcaagagcatttttggcagcc

SEQ ID NO: 170212 - DNA, 412 bp, Homo sapiens
cagtattgacaggtggggtctttaagagatgattgggtcatgagggctttgccctcatggattaatgggttttcacaggagtaggacttgtggctttataagaagaggaacagagacctgagctagcaccctcaggcccctcaccgtgttacgccctgcgctgcctcaggactctatagagagtctccaccagcaaaaagacgctcccacatgcagcccctcaaccttggacttctcggcctccagaactataagaaatacattttgtttctttataaattacccagttttaggtattctgttacaagcaataggaaatggacgaagacaaccatttaaaaccgtatttcccaacctttttttccactgtgacacacatgacagataaaatgtatgtatcagacaaccactt

SEQ ID NO: 170213 - DNA, 234 bp, Homo sapiens
gtatttacaaaagtcacacaacatggtgaacgcaggaggaagctgcagagatggttctagacttacagagaggaggctatatgcaaacccctgtatgacttgcaatgtcccatgaactctgcctagaaaaaaccaggtgttatcttttcacttcttgcctatagttgaggaagctctatacaaatccgaccctttatctgagtttctccccctccctgttcaccccatatttag

SEQ ID NO: 170214 - DNA, 470 bp, Homo sapiens
ctcttgtaagtcctattcaacgtaagaatatcataaaaccaggtgacttattaaaactacatttgcagctacccatctatgtgaatcaggattttcctcaatattaaatagctaaattaaaataagtgaatgccatctgaggcttttattaaataaaaactttcctccctatttctcaatttaaaatgtgaatttttcatttaaaaagcctctctgttttattggttgattgtataagaggcaactgtcatgatcttctgagtttaacaatacattgataagaaaatactgcctttatgtctgttatactggagtttcacagagattttgtaaaaaagttttgctgttaaaaactttgaaaaccaataccatagataaatttgtatagattttttgtcttaaaatgcacttttttactataaaagtaatatatatgcattgcaaagtatgaagaataaagaataataaga

SEQ ID NO: 170215 - DNA, 275 bp, Homo sapiens
ctttaatcaaatatagtatccttctcaacttcaacaacatattgatattaagcatatttaagaaagttgctttgtaaagtctttgtgtagtaagtacaatgtctggccttctcagggacatgttctgtcagttaatttcgttcctttgaatgggctatactttttccttatatgccttaggattttgttgctgttgaaaatggggtgtttgaaaattacagtgttgtgtctctggaaatcagagtctcctctttcaccgaggtttgctttttttg

SEQ ID NO: 170216 - DNA, 293 bp, Homo sapiens
tccttggaatgtagtagcatgataatcagccaatttaaaagaaagaaaatataaaagaatgaagaaaggatagaaatgtaagtaaaagagagtctgttgcagatgtactcaaagccaaacatttggaaataaaatgtgcaaataaccaaaaataatattaaaagtatagtaaaatcaaaccaaggaataatagccacttttacaatagtgtaattgcaaaatgacttccatggatgttcaaatgggctatcagtgtgaatgcaaaggatccaaaataggaacaaacgaaatgg

SEQ ID NO: 170217 - DNA, 523 bp, Homo sapiens
tcactactgcaaccccagagcaggaagggcaccagtgtagtttgaaaagctccctgacccccataatgcgacacttctcttattcactcatagtgttgtgaaaatgctttgacctctctctctgaaatactggctctctatctgtgcacactctttgattaggtggagattctgaaggcaaagacagaatcttacaaatctctgtccacatagtctggtcccatgcacacaaggtatatttaataggtaattgctcatgggctgattgattaaaaaaagttcagactgactcccgtcacaggttcctaagaagaaatataccatgaaactgaaggctacagctggcttcctaattaatattagtcactttgcagttcttaattaagaactctaaaataaagacccacctttccaccatgccaagtgggtatcaccttcattagtatttaagtgatgtagccacaacttcatttttatgctcttttctctgccctgccagatgggaacattagctgcatagtat

SEQ ID NO: 170218 - DNA, 370 bp, Homo sapiens
tgacttcttaacgccaccatttgtgcttgtaaacttcatgcaggtaaaggccatgcctgttatatttaacatcatccacctatcaccttgcccagtgcctggcggatattaggttctcaacaaatattggctaaatacatgaaaaatttattgaaggctcagctcaaatgctactgctcctccaatctcttaggctttctacaggactctgtccccatcttggggcacattttcacaatgtgttcatgttatctgagtctttttttcctatccggccatgagcaacctcaaagtcttatttacctcgacattccccaccgcaccttgcataatgcctaacacataaagggttcttagcagtagatgaatc

SEQ ID NO: 170219 - DNA, 313 bp, Homo sapiens
tccacccaaaacaatggaatgtacattcttctcatctatctgtacatggtacttactctacaactgaccacacaatcagacataaagcaagcctcagcaaatagaaatcataccaaccacactctcagaccacagtgcaatgaaaataaaaattaatactaagaagattgctcaaaaccttacaattacatagaaattacacaacttgttcctgaataagttttggaaaaacaatgaaattaaggcagagataaagaaattctttgaaaataatgagagcaagatacaacatatcagaatttatgggactcag

SEQ ID NO: 170220 - DNA, 341 bp, Homo sapiens
gggaaagccagtaaaatgaaatgacagtgccatatgtgagtgcaatgtacagggtcctccaagagttcccaggaggatgggtatcaaggcagtcttcctggagcaagcagttctttgaatgatgagcaggatttcacccagcaaagaggaatggaaatgactttccaggcagaggagcatggcttttgggagaggtgggctgtagaacttgagaatagggaggaaaatgtattcagaaatgaagttggggccttgctaagcagtttggatttgatttgtagataatgggagccaactgaagaaatttaagaagagtaacagaagttggttctcagttaaga

SEQ ID NO: 170221 - DNA, 1025 bp, Homo sapiens
gaaaacttccttaagagctaggaaaataatgtactttttaaaagtgagaaagcttccggggcttcatatagcatcactccctaatattgtggctatacagttatttgcagtgtgtatcagttatattatgctgcataacaaaccaccccaaaatttactgccagcattttgagtcaaaatttactggctcaaaataacaatcctttatttatcttgccattctgtgggttggtgatttgggctaggctcagctacgtgatccttctcctttcacctgggactattcatgtatctacaggtagctgcagttccatgtcagctaggctttgtttctgggggtcactggctgtcaggtggagagataatgatgactaagccatgtatctcatcatcctgcaagttaccccaagtttgttcatatggtgattgggcagggttccaggagagagcagaagcatcttgacactgagactcagaattcacacaacattgtttccagtacattctgattgttaaagcaagctatatggttagcctggattcaagaaatatatgacagaggagctacagggtcccatttcaaggagcatggatacagggaggggaagaaatgtagccatttttggcaatctgctatagtgtttatggggcacatggaaacagctgtggtgaatgagaagagcatggagtgtgagaggacttagattcccatcttatagtcccattccttcaccccattctgactgccagcactgtcaaatcttagtcttacttctagccgtctggcatctcagtcagttcaacaagttcctaggcagtcttgcaaataccaggttttctaccctccagccctccctccattctacacagcaccactacactagtcattcttcagtttatctttcaggacgttactcctcaaaaaccacctccctccctacctgccatcccctacaccagcctaggctcttctctagcttctccactcattttctggccccattctctcttgttcaagtcctgct

SEQ ID NO: 170222 - DNA, 215 bp, Homo sapiens
ctaccaacaatttatactttatattcttgtacatatatctttgtgtactgatagcaactgtcatttttcatggctataaaatattctcttgctgggattacaggtgtgagccattgtgcctggcctgtactgtaatttatttaatctatctctatttttggatatttggattgtctccatttttctgttactgtattagtcagggttctctagag

SEQ ID NO: 170223 - DNA, 391 bp, Homo sapiens
cattgaaaagagaaaattgacaaggtaaacggtcgtttggaggggccacctggggacgcggcccgagccctggctctacctgaagaatatcttctatttgccacacttcctctccccgtttcctttcttcgcccctctcctctttccccttcccctcgaaggtaatgagaactactggaccgattacgctaacctcttggccctttgtcaaaaaatggagccaaaaaggttgatttagacagaccccctgctcagtgcagcacctgttattctctgtatttatattaccaagggccttcggtaaattatgaaaaataggatgccacctgggacaacactgcttagacagcactggaagacctttataaatatactaggttgcttttctcca

SEQ ID NO: 170224 - DNA, 341 bp, Homo sapiens
gggaaacagattcaataacatcacaggagaagcttggagaaagacaacaggggcatccaaatgctgcagctttaacctactttctgggactgtcatctcgctgactgcacgcctttagatgcttcttcctcagtctatggggagagggacctggggctagaaataggagagtttgtggggaggggcaggatgctgcagggagtgggtgtgggcagaggttgcaagactgccagggttctctgtgtgccggaagtgcaggtttggctgtgaggaatggaatgttctctcttgccctccaagagcacaaacagctgtggaagagcttgaaaagaagattacta

SEQ ID NO: 170225 - DNA, 322 bp, Homo sapiens
atggtgaaacctcatctctactaaaaatacaaaaaattagccaggtgtggtggtggacgcctgcaatcacagctactcaggaggctgaggcaggagaatcacttgaatccaggaggcagaggttgcagtgagccgagatcgtgccactgcactccagcctggacaataagagcgaaactctgtctcaaagaaagaaaaaaaaaaggaaaaaggaaatgtgcacagagcacgtatgaacagcttcatcacccagtgaagaaaaaggatattacttgtctcccagaagcccctactgaatccttctcattataacttttctatt

SEQ ID NO: 170226 - DNA, 397 bp, Homo sapiens
ctcccctcccctcccgagttttcccataccccaacttgaacgcctttaaaccagggcttcggctgcccacacaggatttctttcctctaggagtttttgttggttggttggtttgttgtttgttgacttatagtaagtcccttgggggtcttttgttttttgagacggagttttgctcttgatgcccaggctggagtgcaatggcacagtcttggctcactgcaacctctgcctcccaggtacaagcggttctcctgcctcagcctcccgagtagctgggattacagatgcctgccaccacgcccagcctatttattttttgtatttttagtagagacgggatttcaccatgttggccagactggtctcgaactcctgagctcaggtgatctgcctg

SEQ ID NO: 170227 - DNA, 322 bp, Homo sapiens
tctcctatgttctcgtggcatgattcttcgactataccttaaccactaccacttaacttccaaggacaaaagccaacctgaattttgggggagttaagaagcagtgagaagatgatctatctgagaaacactctggggcctagagtgagtgagcaagagggtaattttttttccactaccaagaatcaaataaggaatcacggcctcagtcttaatggttcttcttcaactgtaagtatatcacttgcaaaacctgtggtggtctgttgctctcctctaccactgcaacttcaagggagccagctaactaggagaaggaaaa

SEQ ID NO: 170228 - DNA, 452 bp, Homo sapiens
gggtgtcgtgatcttgataccaagtcatcctaccagagggctgcaaagtggaacaagagaatgcttccaaagaagttaatattttgaactgtgaaacatcaccagagcaactgaggaactatttgctttttctgggaaattactgcagtcaagagagcttatctgagaaagctgcatcaagggagtaaacgttaagtgagtcaaactttagttgggaagcaaagggaattccttgtattagaagagaacaatagctactttctacagctctgaacaacccaggaagactatttgagactatgcatctcagagatataaaaattggtaagatatagaagagatgacattgaactctgtaaggtctaattctggcttagttacatactaactgtgttactttggacaagccacttatctactattgggtcttgatattcccatctgtaaaatgg

SEQ ID NO: 170229 - DNA, 349 bp, Homo sapiens
gaagggcgagtttatatcttcacagacctagtcaggaggttcatctggggccagaatcaggtgctctggggtgagccgacctcaggcaaccggagttcccaggctagggagaagcatccagaatgtcagggcgggaaaggtccccgaaacccaactctagtgaataccatatttttccgatatggaatcaggcagcacaatctcacagaggacttgcctggttgcccaggacagtgggagaaagccaggtgggtctctagatccccaggcctgaacaacattcgagttttcccttgcttccttgattaaaggctgctagagccacatgtggaggtgaaatggggaagtg

SEQ ID NO: 170230 - DNA, 355 bp, Homo sapiens
ccccactgtgggagtaggaagcgcgtcacccgggccataaatttgcggtgatggcgcctccggccgcctccccagacggagggacagggccgactccggagcaggtggggccgccgagactcgacctccgcggtaggcgctgcgcggcttctcccgacgcgggtcccgggcgcgctcggccgcccctcccgccgcatccgcccgcgcccggccccgccgcgggatttccaaagggcttttgttccgggcttggatgtagaggctttgatttttttaccacccgcctcaggagactttttgcttggaaaagtcctgctattaaaacaaaaacaaaaaccaatcaattccggaggga

SEQ ID NO: 170231 - DNA, 158 bp, Homo sapiens
acacgcgagggtccatacacttcttaaagtcagatcgctgtgacgaagttgcacacgccgaaggaccatatgtttcactgtatgtaattatacctgattttttttgttgtttgttttttgtgatggaggttcactcttgttgcccaggctggagtgca

SEQ ID NO: 170232 - DNA, 510 bp, Homo sapiens
tttcccctctttaagactgaacagtactcctgtgtgtgtgtgtctgtgtttgtgtgtgtgtgtgtacgtattctttatctattcatctgtcaatggacactttgtaaacccacctagtcttgaaactctgctgcatgtgtgatttgtaccatgaagcctccctaacatccaaagctatgatgacctctctcttctgaatgcattattgcatttaacatcattggtattttactttagtttgaatttcattatcctttaaatattgcagtcattctgtcatgtcacccactgaggagactgcacacaaactgcttgaggacaggagctgtgttatgcacaccttttgtcactcatgacagcctgttaacacactgccagacacatagccagtgctcaattacacggctgagtaggacagaccacacagttattaccccctttgagcacaccatttgtaatccagtagcacaaaggctctcatcaacgtcaacatccccagaaagagatctt

SEQ ID NO: 170233 - DNA, 670 bp, Homo sapiens
acatggatccacaaaggaaagaatcagagtattttacctagaaaatactaagagttgggtaaatcctcaggatcccagactcttccatgacatgacgctttcgtgataaataaaatcttattagaaaatacctccaagcttagagtggtcatttgattgttgccctaaagctatattgcagggctaaactctcagttaagaaccaacatctgaagacaaagatgtgtctggaaatctctcaaaagaaggatatatgctttaggctaaccaaagaaacttccagaaaaaaatggtggctaattgtctcacactgctaacaaaggcttggctggggaaaaagaaagacaaaacatagacaaagaaaaaaagagtttggccacaccaaacccataaactgacaggacccttgaatcaaaagcaagacttaaaacttagaatcatgaagttcagagagaaaaattcaactgtgtcctgcccaggaacctagccagaacccttttaaactgctgaaggactactgaagcaagtcaagccatcaagacacaaactcaggttctaaaagcagaattaagcaaggcttgaggaggggatttaaagagatgtttctctcattttttgagggccaagaaaaagttctgctagttatgcctcgaagacaaatgagttatta

SEQ ID NO: 170234 - DNA, 624 bp, Homo sapiens
ggccaacgctataaagtggtactgtgtttcattttaaagagagagggatggccaggtgcggtagctcacgcctgtaatcccagtaatttgggaggccaagatttcattttaaatgcagttataaaaccaaatattatctatacagacattaaattggtcaactgaggcttcaggccctaggccaacagaatctatatacacttttgatgtgttctatttacttatacgatcacctcaactcaagctttcacccctaagaaaaaagaatatgcactttcaccaatatgtatcctctttatctactctgtttttattttgaagtaaaaaacttcattttttttttaaagaattctctatgaaaaaagtgaaaatagaacagagttggagagcaagtcagtgctattcaggggatggcagatcttccagtgagaagggctcttcaaacgatttcatgcagatgctatgaaactatacatctgtttatcgtgaaaaaaccgaaacccctttcttcataatctgaattaaaaatagaacatggtataattattctagggaatgagggctgtgggatcatatttaatttgaagcacccctgtttaactggtatgtaaccataaccaggtc

SEQ ID NO: 170235 - DNA, 619 bp, Homo sapiens
ccacacatggaatgtggcagagtgacactgtgtgacttcagacatgaggctgcaaagaacactgcagcctccgctgtgctctctgggatccctgcgtggaggaagaggccacccatgaggacactcagcgaagacgtgcagagatgaccacgtgccaagaatccaaggcctcccgccaaagggcagcatctgcctgccggcagcacagtgcaccatctaggagatgggtcctccagccctagccgagccttcggaccacttcaccccagacaacatctagcctcacgcagccggaaccacctgtggcgaaggctaaaatgactccatcttggatgctgacccgccatgtggacttccgatgaaccctagttctgggtccttaggtcaaaacaaccttaatgttattgtaaacacaaaatcctgcccttaagcgagttacaggctgcggtgcaggtggcattcttgccttctcctgagggtggaccagcaggcggcattcttgcttcttcctgaggggtaggccagttgtcttacacatccttctgaagctcccgctccctttccctctgctacctaagccctgggtccgcgggtagcaatgcatggatctcgcggccgc

SEQ ID NO: 170236 - DNA, 351 bp, Homo sapiens
tcatcttggagtacttgaaattcccctgctgtcttcacttactgctgctgtcatccagtttctatattctctttctggttagttcattttgacaattcattccgtagctgttcagccttctcttgtgtgctaagaacaaaggatacattaggcctgacattaatgcatgccttccaagagtttatatttctagttgagaatgtagaaaagtaaaacaaataacttcagttttgtgttatttatgagagaggcatagtgatacagagcagggactgactctacctttgtaaagaactggaaataaagatggtcagagagggcttcccagggcaggtgatgtggagctaatag

SEQ ID NO: 170237 - DNA, 691 bp, Homo sapiens
tgttttacttattttctttccccatcccctagctatataaaatttaagcaggcagcacatgaataggtctctatttgaatttagtatatcataatattatagtaaactgtatagtgttcttaatttttaacctgtttttactacaacaaatcaaaacgtgacttggggagattttcataaatatttttgaggagacttttagagaaaatttaaagctacttggtagatttttgagaaacagtttcaggaatacctcatattttgttgtctctttatttatagattttcctagagcagggtgtcagcattagatagcaaattattggaccaactgctctctgaatagaagatctttgctgttttgtcagaactcagtagcagaacttttctgatattgtttgacttagcctaaagaggtgcctggagtgtaaaatttaagaagacactcattctcaggtgcgaactctgtacctcacaagcctgagaacagagtgcctccttagttttgtgcctggagtgcctcacttgccttactcttgtcctggccttgttacacatactcatattaaaatcattttttgagctcttcattcttgttttagtgaagaactgaaaagcttgggcttaagaggtagccaacacacatagatacatacctactttttattttgaatttatacttttcatctca

SEQ ID NO: 170238 - DNA, 779 bp, Homo sapiens
atgctcttattgttgaaattctttgaatgttgtatattactccgattatgtagaatgaaagtatgaagggactagggccaggagagaaaatgtcagatactaagttagtggtccatgtggacttgcagtagagggtatgtgagaggaagaaggaggagatggacacatacatgcaaaataatgactttcagaattaatggcttttacccctgtcactaaaatcagacatcggaaaattgacttagacagccaaatggtattgtaagttctcattcactatttggaagtgttgaggcctgatcggtgtttcctctgaagacctctggttctataatggtaaacattttgctccgtagtggattgttggctttaacatttgatagcagtactttaattaactgttatataattttgtagataattaaatgacaatttatttctttcaagctccataggaaactcattgctaatttagcaaaacttggagcatctcattcaagatagaaaaatccatttgaaactgaaattgacttattgattaaaggaattttcattataaagcagattatggaaaatatgggaaatgcagtaaaataaagagaagtgaagatcacttagtgttttatttatagagtatatcttatggaattagaagtttattaaaaagataatcactcctgtaagtcttctttaagagttgatgcttactctaaggttatatgagcatctttatgtccataatatacatcattgatcatatagactggtttgattttatg

SEQ ID NO: 170239 - DNA, 320 bp, Homo sapiens
ggactttcgaggatcccgcggcagcgagcacagtgctcaagatagaaaaatccatttgaaactgaaattgacttattgattaaaggaattttcattataaagcagattatggaaaatatgggaaatgcagtaaaataaagagaagtgaagatcacttagtgttttatttatagagtatatcttatggaattagaagtttattaaaaagataatcactcctgtaagtcttctttaagagttgatgcttactctaaggttatatgagcatctttatgtccataatatacatcattgatcatatagactggtttgattttatg

SEQ ID NO: 170240 - DNA, 440 bp, Homo sapiens
  misc_feature (100)..(101): n is a, c, g, or t
  misc_feature (119)..(119): n is a, c, g, or t
gggagatctgcctgggcatcaagcagagaaggcctcaatccaccactatctctgcacaggaagggttaggaaactcaagctcctgccccgggcaggttgnngctccaaatgcatggagntctgcctggatgtggagtgaagaggcccccctgcatcaccatctctacacaggaaggatggcagtagctcaggctgctgaaccaggtgcctggataaacaagaaattctgaacactttgagtctggaaattttcagaacacctagacagcatcagtcataactccatacctgtgtgagactggaagactggatagggctgaagttggagaaatgccttttcccagggttgtcagactgtcatttgttctgatgaagaccccgcactccttgagtggtcagccagttttatcccagggcagccacacttcagaggcctctgc

SEQ ID NO: 170241 - DNA, 481 bp, Homo sapiens
tgtgcacaatgaaatgtgttccaaaatctaaaagcaaatcacaggatggagaaaacctttaatgaacacagctaataagagctcattaacattcatacatatatatgtacaaatatatcatagtaagtaccatttcttcttggatccttcctggcactgtgctaactgctttctacaaatttagcttacataaacccttgatacacccttgaggtgagtaggtattatctatagtttacataagatgaaatagagcctcccagcagttaagtaacttgtgtgaagatgggacccttgttcctgatggttctagaaccttcatccttaatgataatgctaaagtaagtacatgaattgcctgaagaagtggtcagagtttatcaatagaaaatttagatagtactcagcgtgtggaaaatgtacatttatggaaatgataatgttcactatctctgatattctatgatcttttacattagca

SEQ ID NO: 170242 - DNA, 186 bp, Homo sapiens
aaatgccagtgggacagcaatacagcaattaaaggataaggcaggtaaggaccagatcatgttggacctggtcagcttcccttttaaaaggtttctattttgatctcagaaccataagaagacatggaagtatttccaacaaaaggatggcatgacatttataggctgactgtatttgtgttgttt

SEQ ID NO: 170243 - DNA, 383 bp, Homo sapiens
aagtaaaagtttcatctctgatgggctctggccagcgctgccccccgggccttctgctctagaagcccatggtgatcctcatgtgccattcacctggctacttggccctaatttcacacagttcgaagcccagaaacctgctgtttgagcctaccttcccagagtccttccttctttcatgaattgaacaaacattcattgaacacctgctttttgccagagattatgtgaggcatgggatatggcagcaaataagtcaactttgctgtcaatatatgtcatagtagtcattgttgagttgaggcatttctatttggctattagtagcattggtttagaaagagcctcaaaaccctctctagtggacttcttgtgagaacact

SEQ ID NO: 170244 - DNA, 632 bp, Homo sapiens
tggtagacaggtccctgacgataaagtggatggtgggatccacctagaagagaaggcagcacgctgagccctgagtgttacttctggaaggaaaaacaaataggtcccctgttccccactgtcaggagtaaccccagaaagccagtgtggattaaaagacccgggatgttgctgcatgtggtggtgtgcacctgtagtcctagagctactcaagaggctgaggcaggaggatagcttgagcccaggagtttgaggctacagtgagctactgttgcaccactgcactccagcccaggcaacagagcaagatcctgtctcttaaagacccaagaagcggctggatacagagacttatgcctgtaatcctagcactttgggaggccaaggcaggcacatcacctgaggtcaggagtttgagaccaacccgggcaatatggcaaaaccccgtctctactaaaaatacaaaaattagtcagacgtggtggcacatccctgtaatcccagctacttgggatgctgaggcaggagaattccttgaacccaggaggcggaggttgcagtgaactgagatagcaccactgcactccagccttggcaacagagcaagactctgtctcaaaaaaaaaaaaaaa

SEQ ID NO: 170245 - DNA, 531 bp, Homo sapiens
gagtgctcaaaaactttataaactttgagttattcttacaatagaactttagcttaagtaagtagaaactcatataatgatttaagtattagaatttcctacaacaatatttagattaaaattgttaataaaatacatgtccagtaataatggattggctaagttaatactatctgtctgaatttatatttatatattcagtaaagatcagcttaagtaccatttccatttgagagtctcagctttaaatgtaaaagcttgacaaactcaaactaatgccccaactaaatgtgtcactccaaacctgataacaaagccccagccacattgacattgtttatgttctttgaacatgccaaacttattaatacctagagccttggcactccagtcactattatattttctatttccttatttttattaatgttatcactactttgaaatgattcatttgatttctttctcttaattatcatctccttctactgaaatataaactatgagcattagggtatggcttactttctt

SEQ ID NO: 170246 - DNA, 895 bp, Homo sapiens
cttctgggttctaaagccaagtggtatgatgtggacatgaaaatggggcactcattgcagagatacttttgactgggtttgaagtaacaggagaggtctaagagaaacacgaacaggaataggagagaggcaaaacagagggctgacatctagaaactctcctgagaaaaataacactgactgacgtgggtaaatctgagggattataaagcaggcagaaaaccccaccaaggaaatgacgagatatccttctttagatgcctccaaaacagaagatgtgctgtttggcataagtgccatccagggcactcagacctgacaggagagtctacagagaccccatagaaccaagcaactggtgttctaaagctcttcccctaatggcccagggctgaggaaaaagcaaagccataacatcctcagggtcacaatagtacactgcataaaagccgctctgtgctgggcactacggagagcagaggagatgagaaagcacttacacaagtggagatggcccccacacaaggggaagacagttgggagggcctcagtgctgaccacagtgtggccccaccacgactcagactccaaggcccagtttctattccccaaagttggtcaccttagcccaccatactcagcatatttctcagaactgggatttctcaaaactggtcagtaaaaacaatttaagcaaagaggaaagtgaggatatcttgggtggtagagggaaaatgggaccttttcccaaatagatagcgagcatcctactttcgtacatcttcccatggctcaggcacaagaaagagtacactttttggagaaacgaaagttctgaagtccacgttcacagacagccaagaacccagatccctgagctcctcgtctgaacgcc

SEQ ID NO: 170247 - DNA, 573 bp, Homo sapiens
ataacatgatagaatcgagctcggtacaagcaactggtgttctaaagctcttcccctaatggcccagggctgaggaaaaagcaaagccataacatcctcagggtcacaatagtacactgcataaaagccgctctgtgctgggcactacggagagcagaggagatgagaaagcacttacacaagtggagatggcccccacacaaggggaagacagttgggagggcctcagtgctgaccacagtgtggccccaccacgactcagactccaaggcccagtttctattccccaaagttggtcaccttagcccaccatactcagcatatttctcagaactgggatttctcaaaactggtcagtaaaaacaatttaagcaaagaggaaagtgaggatatcttgggtggtagagggaaaatgggaccttttcccaaatagatagcgagcatcctactttcgtacatcttcccatggctcaggcacaagaaagagtacactttttggagaaacgaaagttctgaagtccacgttcacagacagccaagaacccagatccctgagctcctcgtctgaacgcc

SEQ ID NO: 170248 - DNA, 262 bp, Homo sapiens
gaagatttaatgtaattttttatttggtaaatggaaaaataatgtttttccaaaaaacagattacagatcataaagttagacaaaatcttttctcctagagtgatatatctgcatttgtaagactaaagaaagctttaggtttatcaaaagagcacaaatggttttattaggttggtgcaaaagtaattgtgtttttttaccattaaaagtaatggcaaaaattgcagttacttttgcatcaacctaaataagagttggaca

SEQ ID NO: 170249 - DNA, 561 bp, Homo sapiens
agaagtctgcttgctttcattgttcacatttgccttttaccaccgcgttgaggtttcggcccccttgggcctgaccgcagggcagtgtgaaggggcgaggtttcacctttcccctgaggatattcaagcgaccccccgccctgcagtgctgcctccgtcctgagtccagaagggcaggcctcccggtctttctggggtgcgattccagtggtctgttgctcccatgggtgagacactgccgtctctgagaggcacgctccccatgggcagagcctgagctgacctgtggcctggcctcagggctggttctcctaactcctaggaacctgtcggagacccagccccaagctaatgggaataacaagactcccccttcttgatggggcctgaccccacctcttgtccctgcaatctcacaaggcttgcaaaagccctgctcggctaccagcttctcggccaccccttccagaatcggcagccacaggaaaaggcggtttccccattccccacggctgctttgcacgctctctgcaggccttcgagatgctcctggaggggaag

SEQ ID NO: 170250 - DNA, 795 bp, Homo sapiens
cctcagaggattccaggcaaagctctaccttccctttgaaacgaaggtagggttgtagagagatgcagctttttggggaagtctacccttgaggatcggtattccataggacgtcattccgggatgggcagaacctctcctcaaacccttcccattcccaaactgcaaagaatgtaatggatttagtttcgattaggcaagcattgtgtgaggatttagaatttatcttggaagggcagagatatttttctgagaaggccagttgcctctggttttggagatccccacaggatatgacaagacaggcatcaaatgtgattgaggtgagcttgatctagttacattaatgataaaatagctgacggtagagagaggaaagaagacaaggcagtataagagggttaaagttttcgtagctttaggttggtagaaattggccctggaacaatagcccatgactctgaagatggtgatgctgttttgactggggtatgatgggtccaccccttttcggctgttcgggctgctgtttcagttaggagtgctaggtatggtccttcccaagctggctccttccagcttttgataaggatgtgatctccaggctggtattgatgtaccaggaactgtaagggtggcatctgtgctaaaatacctttagttctgaggtaagagaaagtggaaagccaagtatataatttgatcctttgtttcaaaggtaggaatgtcagtagtaagagtgtaaataaggcagtccacataacagagagataggccagtatctttctgagaggc

SEQ ID NO: 170251 - DNA, 886 bp, Homo sapiens
ggtgactatagaccgaaatagagcacacattaggtatacagcttagacggtgatgacctcaacggactaacgtgacataagtatggtgacaatacttcttgcatgtatctgcaggtggaattgtaaacctggtggtccgagatggtctaattccatcttcctatgtatctccttatattagtagtggtaacatttgtggtggtgattcagcatttcaatgcctcttctcatggcaacaacaaacgttttccttctgaatcaacattaacctagatgttactgcggatcaaaattagactctacattttcaaccacagaaataccgggcagagatatttttctgagaaggccagttgcctctggttttggagatccccacaggatatgacaagacaggcatcaaatgtgattgaggtgagcttgatctagttacattaatgataaaatagctgacggtagagagaggaaagaagacaaggcagtataagagggttaaagttttcgtagctttaggttggtagaaattggccctggaacaatagcccatgactctgaagatggtgatgctgttttgactggggtatgatgggtccaccccttttcggctgttcgggctgctgtttcagttaggagtgctaggtatggtccttcccaagctggctccttccagcttttgataaggatgtgatctccaggctggtattgatgtaccaggaactgtaagggtggcatctgtgctaaaatacctttagttctgaggtaagagaaagtggaaagccaagtatataatttgatcctttgtttcaaaggtaggaatgtcagtagtaagagtgtaaataaggcagtccacataacagagagataggccagtatctttctgagaggc

SEQ ID NO: 170252 - DNA, 301 bp, Homo sapiens
tattggcaattagagggggccttccctttgaaacgaaggtagggttgtagagagatgcagctttttggggaagtctacccttgaggatcggtattccataggacgtcattccgggatgggcagaacctctcctcaaacccttcccattcccaaactgcaaagaatgtaatggatttagtttcgattaggcaagcattgtgtgaggatttagaatttatcttggaagggcagagatatttttctgagaaggccagttgcctctggttttggagatccccacaggatatgacaagacaggcat

SEQ ID NO: 170253 - DNA, 408 bp, Homo sapiens
acgaggtcaggagatcaaaaccatcgtggctaacacggtgaaaccccgtatctactaaaaataccaaaaattatctgggcgtggtggcgggtgcctgtagtcccagctacttgggaggctgacgcaggcgaattgcatgaactcaggaggcagaggttgcaatgagccaagatcgtgccactgcactccagcctgggcgactaagtgagattctgtcaaaaaaaatagaaaagaaaagaaaagcaaatagaagtaataagttcttatcaatcagtaattcctttaaatatatatttagttattcaataaaaacattgctatagtgtgagcatcccctccaaaattcacgttaaaatttaactaccattgtgagaaaattaagaaatgaggcccttaataagttattag

SEQ ID NO: 170254 - DNA, 668 bp, Homo sapiens
  misc_feature (545)..(545): n is a, c, g, or t
ccacttttccaagtgataaaatctagtataacgtgtgtccaatcattgatacactcaacaatcaatattcattgaccataaaaggctaataacagcctgaagttactgtgtgattaatttagtgtttcacactccaagttaaaatatttgactgtccagaagcctttagtgtgttttctttctttcttctaaagtctacaacatttcaatgaagcggaatttacttgatcataaatagatgacctgcaggccattatttttgtagtaaccagaaatagaacacagctctttgaaaatgattaactagaagaatacaatgtttttcgctagtgtgggaacataccgctttcctcaatggaatacatctgcaattctcttaaccagcgacaaaccgaaaaagcaagtcaggctcacaagaaggagtgatagccgatggctttatggctttagtggagcatattttccccttaatagattgattatttatttaaataaagctttggatttaatcttaattacattctcctctttagaccccgagctgnggaggaaaaggaagtgttgagatattccatgccacttttaggtcaaaagatagaaagctccaaagataggaactgagttcagagaacgcaataggaacaccgatttcaaaaaatatcagcaat

SEQ ID NO: 170255 - DNA, 385 bp, Homo sapiens
acccaatggaatcccaggagcagtcaagggcagtgtcccatgcaacacggtctcccattctgtgaggggaggaaggttggatggctggagtatggagactacggaatgttctgaaaaagtttcagcaagggtaatggagggtcctagacccaaagtgacctgttagagacacccaagaacagatcttaggatacctgctgtattcaaccattctctggaagcagccatgagcagtgtgtcctctgcatccacgtagtgatagatatcagaacttgccatctagaaccgtgttcaaccacactctctgcaagtagaaaacctaaaagattccttctcatggccaccacaaccagctatggttaacaaaaggattccataaaatggg

SEQ ID NO: 170256 - DNA, 219 bp, Homo sapiens
cccctgccagaatacaccctgtctaaatcaggggttgataaagacagcccatgtgccaaatctggtcgccgctggttctagtaaatagttttattataacacagccacgcctattcatttacatattgtctaaggctgttttcaagtttgagcagcaaagttgagaaatgtagttataacagagaccatatggcctgcaaggcctacagtattttcttt

SEQ ID NO: 170257 - DNA, 125 bp, Homo sapiens
gcaataacagacatccgttctctcttgtcgagttaaaggtccgtttcggtcagcaagtacttaggacttgcatggctgccagagccaggtgtgctattcatctgggcttctccaggccaaagtcg

SEQ ID NO: 170258 - DNA, 236 bp, Homo sapiens
cgccttggcctcccaaagtgctgggattgcaggtgtgagccaccatgtctggcctaggtttactttcaagtgccatcttttcttggttagtcatagttgcacagagcactaattactgattttgtgacctagtactacagtgattatatttgccatagacatgagaatgggaattatggtgggactgttcccagatagtatccatcctgctgtttctaggacatgtttatgcatat

SEQ ID NO: 170259 - DNA, 499 bp, Homo sapiens
acttgcctttagactgtgatgcaggtttgacccgtgacaaaggaaagtgggaagaaaggagaattggggaggaacagcctcacattgcagcatagctctgaaaaaaatcccagccagccaagtagggagctctggtgcaaagctcacccatgtgtaaagattgtcctgtgctggccataaatggtgagccattgtaccaccattatgttcagtcataggctgagaactacctgggaagcacatggccttgactctaaaactgaacagaccctaaagcaacctgcaacttgaggctgtcagataattgcaccccttgactagtttctctcttgaagggagatctgaatggtacaccttcatgtctgccatagtaggcatttttctttgatataatcacagaagactcgggacacttagaacagggcttgacaaattatgatctgtgagccaaatccagcctgctgcatgttttttgtaaataaagttttgtgggaacaca

SEQ ID NO: 170260 - DNA, 320 bp, Homo sapiens
ctggagggtatcctagacagatgcttagagaagatggagtgtgagcattacagaccgagaacggcttcagcaggcaggcgaggttgcaggggaaaaggcgcttctagcaaagggaaccacttgaggccagatccagaggcagaagctaccagatctgtgtgaggacagatgatcagtccagcgcacgtgatggggacatgggggaacaaggtaggagatgaatctgaaatgtacctggagaggaatggtggatgcctttcaatgccagctgcaacttcatgctggacacacttggtaactgaattttgccccagtgcaca

SEQ ID NO: 170261 - DNA, 886 bp, Homo sapiens
taaatattttgtgccgcttgatatttttctcattatggatcaaaatttggctttctggtgtagttcattctcttgtaaacccattattggctattgtgtaactgagatcaatagtagtagaagtggtggtaatggataacattgatccatccaacgaatattttattgaatgtttattttgtgccaggtattgccctgtgctctgggaattcaccatgaacaaaacaggcaaaagtttctacctttgaggagcgtatattctaatggggaagaccaacaataaatgaagaagcaaacaaaacatgtattttattagttggtaataaatgcaataaagaaaaagaaaatagagatggaagataggaaatggggataggatgagcactgagatttatatatgaatgaatatatatgtttatatatacatatacatgcatatgtagatatacacacacgtatgtatatgtatatacgtatgcaaatacctagagaaagtctcactgaaaagtgatatttgacctagaggaggtgagggatatctgcatgaagagtgtcccaggcaaagtcagaagcttggtgagttcaagaaacagcaggccgggcgtgatggctcatgcctgtaatcccagcactttgggaggctgaggcgggcagatcacttgaggtcaggagttcgagaccagcctggccaacatggtgaaaccctgtctctattaaaaatacaaaaattagctgggcatagtggcacgtgcctgtaatcccagctacttgggaggctgaggcaggagaatcacttgaatctgggagacggaggttgcagtgagtggagatcatgccgctgcattccagcctgggcaacagagggagactctgtctcaaaaagaaa

SEQ ID NO: 170262 - DNA, 334 bp, Homo sapiens
aatgaatgggcttagaaaactagaaagcactgtccaaaagaccagtgtagatattatttcctagagattgcctttaataaagaacaggaagtactagaaaatcacctaagatatgaacatgcagttgacagaaaatatacatggctcttaagcatatgacaagatgcttatccttactgctaataagagatacaaactagcctcaagacattggttttacctgttcaattagtgaagttgataatactgttactttctatggagaagactactgttgagggaatggctgaggtgagaagcagagcctcctcctgtcgctgatggcagtataagt

SEQ ID NO: 170263 - DNA, 194 bp, Homo sapiens
ggaaggccaagcacagtggctcacacctgtcatcccagcaccctgggaggccaaagtgagagaatcacttgaggccaggagtttgagtctggcctgggcagcatagtgagatgccacctctacaacaaattttaaaaattagccaggtatggccagacgcggtagctcactcctgtaatcccagcactttggga

SEQ ID NO: 170264 - DNA, 707 bp, Homo sapiens
tgacagggtcttacactctcatccaggctggagtgtgcagtcgtgatctcagcttattgcaacctctgcctcctgggctcaagcgatctttccacctcagtctcctgtgtagttggaaccacaagcgtgtgccaccacacccgactaatttttgtatatttagtagagacggggtttcaccatgttgttcaggctgatctcaaactcccagactcaagcgatccacccaccttggcctcccacagtgctgggattataggcatgagccaacacgcctggccaattccatttatttctgatataaaatacaaacatatccagttaaaatagaaaattctgtcaaacatgtcaatgtatccaaagtaatattttagaatttcaaaattaagtcttactcaacatttgaatttgttcaattcccctccctcccactgtttttacagggatgaatttcagtgcctttctgggtacaagcttgattttgtttttcttttttcaatagcagggtctcactatgttgcccaggctggactcctgggatcaagccatccttccacctgagccttccaagtagctggggctacaggaatgagcctgattttcaataattgcaatttgctaagcttttaaaagctccaggttttggtgaccaatttttgaaccttttcattaagatttccaacagattctgaacagaatgcaacaaa

SEQ ID NO: 170265 - DNA, 367 bp, Homo sapiens
agtcaggacctgctgcctccaagtccgtggtacatcatctacctgtggaaagttccctgacatcccctgccattgtcccttctccttcgttcaccttacggtatcgattgagagcccatggaatatccagcacttgattgatcaaaagcagacacggtcctgccctcatggagctcccaggcctgggaaaggcagatcctggagagagcagctgtatcccaccataccagggcccacccacactctgcacctaagaggctcacgggtgtttacaatagacagtgcttggtgcataaatcacctcgtttgaccctcagcagcctgggacattggcaaccaggtatgatcccattttacagatgcagag

SEQ ID NO: 170266 - DNA, 247 bp, Homo sapiens
tctacagatccctaccgtctttaaatatcaatcattttcatttggagagtatgctttggttttgtttttcattttcactatgctctttttaataatacagggaagtagctccattttagaaagatttccatcaaaacagataaaaatgaaaggttcagcccaggaaactcaagctcagctctcctgcaatattctacaaccaggcattactcaaactactagaatgtcagcatttctaaccctccag

SEQ ID NO: 170267 - DNA, 681 bp, Homo sapiens
tttgccccacccaggactggcaaattagctttactcaacatgccccgagtcggataactaaaatacctcttagtctaggtagacactttcactggataggtagaggcctttcctacagggtctgagaaggccaccacagtcatttctacccttctgtcagacataattcctcagtttagccttcccatctcaatacagtctgataacagaccagcctttattagtcaaatcagccagcagtttttcaggctcttagtattcagtgaaacctttatatccctcacggtcctgcgtcttcaagaaaagtagaatagactaaaggtcttttaaaaacacacctcaccaagctcagccaccaacttaaaaaggactggacaatacttttaccactttcccttctcagaattcaggcctgtcctcagaatgctacagggtacagcccatttaagctcctgtatagacgctcctttttattaggccccagtctcattccagacaccagaccgactttgactgtgccccaaaaaaaattgtcatccctactatcttctgtctagtcatactcctattcaccgttctcaactactcatacatgccttgctcttgtttacactgccggtttacactgtttctccaagccatcacagctgatatctcctcctgctatccccaaactgccac

SEQ ID NO: 170268 - DNA, 506 bp, Homo sapiens
cggcacgaggcgggacatcccagagctgccacacacggagctggaggcccttgctgttgaagaaacactttctcagctgtgctcagagctacagatgttgaacaatccagagaagatcgctgagcagataagcaaggatctggcctggctcacgtcccacatgatgactctgtggacccagttcctggacacagtcactctgcactcccaagtgaccacttatctcacccaggaacaccacaccctgagggtgagtggccaactgctgtgcattctctgatcacatgcatttgatttctttggaggaacctttatgagaattagatcaagcattaggattggcctctagatcttcgtgctttcgtgtctctaccatgaccgtgcagggtggcgttgtgaacttccttagcctctcaggcctttgctgtgtcattcatagaatacttgccttggcaatctcagaggatttcagagcctatcacaagaaatattaaaagtattttgga

SEQ ID NO: 170269 - DNA, 265 bp, Homo sapiens
ccagattattttgtcccacacggtgttcccgtgatgtggtactctcccccttttcctaagaggaagacctcctgagagtcagactatagtgattgctattacagccagaagttttgcttgacgccagaacacagttaacagcccagcccaactagagaacatgcaaggtctacctgtcaccacctactggcccaactagaatcctaggctatactaaatagtgaagatctgcacagccaaagaataccagcaaagactggaaagt

SEQ ID NO: 170270 - DNA, 342 bp, Homo sapiens
gaggtttttgccaaggactccaaggggagtgcacttgatgctggtcgggacccaaagcacccagccctccctgagacattgtgtgagtcgggctgggcctcaaacacggcccccactgccccaccccagccagggtggtgcttgtgtgggaaggactttaaatccagctgccagacccctggacgggagaaggagagacggctggccaccatgcacggctcctgcagtttcctgatgcttctgctgccgctactgctactgctggtggccaccacaggccccgttggagccctcacagatgaggagaaacgtttgatggtggagctgcacaacctctaccgg

SEQ ID NO: 170271 - DNA, 278 bp, Homo sapiens
ggaaataaaaatataaagcagaggctgagcatggtggctcacacccataatcccaatacttggggagtccgagacaggcagattgcagattgcttgagcccaggagttcaagaccaacctggccaacatagtgaaaccccatctcttaaaaaaaaaattagctgggggtggtggcacatgcctctagtcccagctacccaggaggctaagatgggaggatcacctgagcttgggaggtcaaggctgcagtgagctgtgattgcactactgcactccag

SEQ ID NO: 170272 - DNA, 319 bp, Homo sapiens
gaacttcctgagtagctgggactacaggcacgcgccaccacgcccggctaatttttgtatttttagtagagacgaggtttcaccatgttggccaggctggtcttgaactcctggcctcaagtgatccgtccacctcggcctcccaaagtgctgagattataggcatgatccattgcccccagcctgttgaggtttttttttaaatcaggtatataatcaggtatatgctttgcaaatattttctcccagcgtattacttgtctattttcttaacagtttctttcaaagaatagagttaaaaagattttttgtatctttt

SEQ ID NO: 170273 - DNA, 467 bp, Homo sapiens
atggtggaaggtagaagggcaagagagtgcatatgtgcgtgacagaaaaagagagagaagtgggggtggactcactttttaatcaggaacctactcctgcaataactaactcttgcaataatgacattaattcattcatgagggcagaactctcctgacccagtcacttcttaaaggttccattgctcaacattgttgcactggagattaagtttccaacacatgaactctgggggacacattcagaccacagtacctaccatatcaggcagtaactttaatttaagttctaggctgagcatgttcatttgcatacatcatctttttatccacacagtaatgctcttcctgcatctatattgctactttcctttcccacataaaatttgggaactatattttaaaaatcaccacagatgggaagattgtttcctgaaaacagtctttttttttcagataatatctcc

SEQ ID NO: 170274 - DNA, 820 bp, Homo sapiens
ttcatgatagctgaaaagcataaacagcccagctgttcatcagctgatgagttgataaacaaaatgtgatgtagccctacaatggaataccatgaaatgacaaaaaggaacaaactactgatacgtatatattacaataaatgaacctcaaaaacatactaagtgaaagaaggcagatacaagggaccttatattgtatgactccacttatgtgacttgtctagaaaaggcaagtctgtagaggtagagaatagattattggttctagggctggaaatggggagtgattgcgaatggacattgagggatcttattgaagcaacaaaaatgttctaaactggatgatggtggtggttgtgcaattcagtgaacttaataaaaattattgacttgttcacttcaaatgggtgaatcttatatgtaaattatacctcagttttaaaaataaaagggatcgttaaaattgaatataattttactttgaaaaattaaccaaaaaacaaaaaaatacaaaaaaattttaaagacaacccattgtgtagcaattagaagtgcaataactttgtccttccaatttgtattttttacactttcaatattatacagtttaagaaaattataaaaaatacagagaaaatcatttgcaatttctccatacaaatacatcagttctcttttttcttgttctttccattaattatctatgcatttactttacatattaacagtactataacaataatctagatacaaatttgcattctgatttttttaattttaatggtataaatatttttccttgtttcaacatagtcctcat

SEQ ID NO: 170275 - DNA, 484 bp, Homo sapiens
agtgtactttcatttcaataaatctgtgctttcactgcttaaaacaaaacaaaacaaaaaaaccttaaaactaatacttcatactgcattttgaagtcagtaaaagctccaggcatagagataaaatttagaaaaatggaatacagtccaatcaattccaagttctttaagggcttataaaagactctgcaggacgagcttacacctataatcctagcactgtgggagaccaaggcgggaggatcacttgagcccggagttcaagaccagcctgggcaacaatacgagacactgtctctataaaaaaatttaaaaattagccgggtgtggtgggcccgtggtcccagctacttgggaagttgaagtggaaagatcgcttgagcctgggagattgaggctgcagtgagccatgattgcaccactgcattccagtctaggcaacaagagcgaaactctgtcaaaaaagaagaagaccttgcatatg

SEQ ID NO: 170276 - DNA, 387 bp, Homo sapiens
tgaatgactaactgaatgtggaattgaatctcaggccaaccatttgtgtttttaattattttatttttattgttctttatttatttttgagacagggtgtcactctgtcctccaggctggagtgcactggtgcagtcgtggctcactgcagcctcaactttccaggctcaggtgatcctcccacctcagcctcctgagtagctgggactgactacaggcacgcgccaccacacctgggtaatttttttttttttttttagatacagggcctcactgtgttggccaggctggtcttggacccctgagctgaagtgatccgctcactttggcctcccaaagtgctgggtttacaggcgtgcaccatggcacccggtctgtttttctttc

SEQ ID NO: 170277 - DNA, 204 bp, Homo sapiens
ggtaattacttaactatgcctacatcttagcagaatttaggcccctctcattctcccaacctggtttcttttcattggttttacaaaggtggtttagtttttgaaagagctattatctcttaaactataaactaaatttcttccaaacttaacttggtccatgctcaggaacagctaagggtagtttgaaggttaaagaaaaga

SEQ ID NO: 170278 - DNA, 397 bp, Homo sapiens
ctctgaattaaccaggttagaattggcagtttcttcagggaggcattactaatcaaacaggctcagaatcagaggtccaaggaaagaatgtttattttggtcaaattccaagtttattgtgggagcctttgagaggagccgcagacagcctttcacttttgaccataaaatgttttactacaaggatcattattctttaatcttaagtaaactgatgaaaggtatactgactgcagtctctggattataagaaccaaccagatttgactgttgcctgccatgtttcaaccacatagatcgtcagtggtgtgtggacgggattccctctagctgtcttgctgggagtgaggctatgtagtccggcctgactgaagatgcccttgcgcaccaggctttt

SEQ ID NO: 170279 - DNA, 288 bp, Homo sapiens
cagggctggtagccggattttcagagtctggcacagcctccctgtgtccagcagagggcgccagggaccgggctgagtaagcatgccggccgtcttggaagagccggtggcaaccttattctgagacaagatatttgcccggtggccttcctggtcagttaacttccacttttgccctggccttttccagtgtgggaagccccatgctccccctcactgggaattatttctgggtggtgtgcatccaatcctgaaagtgttggggaggagggagggcaacagaaggga

SEQ ID NO: 170280 - DNA, 377 bp, Homo sapiens
tcccttttgcaatacacaaaacgctctgagaacatttcttctcactgtgaccaaggccaccaataaataaagaagagatcacaaacatcctttggcgtctctgtacaagtgacttcagtaaaaatgacaaaattcttcccaattaatcatgagacaatcaaatatacatattttttaaaatgaactgcatgttaaccaactgagagcctttagttccttaacatgtttttattttcacaaccctttacattgatgcttttcttcaagttccaacaaacaatctgctcacggtcactggtggccacagccgcgggccacactgggagttgaggttcacactgaacgtggttagctagatgtctaaaacaaagcaacga

SEQ ID NO: 170281 - DNA, 413 bp, Homo sapiens
gagtctacaactagtaggggagcaaagcatgaaaataatcagctagagagagaaggtgttggatattccagtaaaggtatttgcaagtgtgcaagataaaaggagcacagaggagggcagcatccaggcgacatgtctcaaaggtgaactcgagtttggtgacatatgaggaggagaaaggaaggcaagtcaatgagacatttactgtgtaaagacacagaaatttgagacactgtggcacttttgggaactacaaataattctttgtgatgatgggtggtacggctaaatggaaattaataccttggaatggagtgggagtcacaaaaggccttaactaccagggagaggagtttgaagtgcatcaggggttcctacactagagcctgtggccctggggctctggggctgtg

SEQ ID NO: 170282 - DNA, 153 bp, Homo sapiens
cacacttaattatgtgttccagagatgggagctagacacatgtaaactgacatgctaccagcaataacttcttctcctgtgagaaataatctatagtaagagaaaggcaataaataatgatacacactgaacagctatgttcagtccacaggc

SEQ ID NO: 170283 - DNA, 268 bp, Homo sapiens
tcaaaattgctctgatcgcttaagcccaggaggtcaaagctgcaatgggccatcatccccaaaaacaggctggccagctgggcgtggtggctcacgcctgtaatcccagcacttttgggaagccgaggcggatgggtcacctgaggtcaggagtttgagaccagcctggccaacatgaagaaaccctgtctctactaaaaatacaaaaattagctgggcgtggcggtgggcgcctgtaatcccagctactcgggatgctgaggcatga

SEQ ID NO: 170284 - DNA, 649 bp, Homo sapiens
caggacctgtgatgtatgcccaacacgctgagctattttttgtatttttaggagaggcgaggtttcactatgttggccaagatggtctcgaactcctgacctcaagcgatccacccaccttggctccgaaagtgctgggattacaggtatgagccactgcgccgggccatgcaccacatttttaatccattcatctgccaatggacactggttgattccacatcttggctgttgtgaacagtgctgcaatcaacatgggagtgcagatatctctttgatatgctgatttcctttcctttggttagacaacctgtgagaaaatgatctgctctaagagcatatacaatttggatatttgcagaggtctcagatgaaatcttcagtgatgaggccacatctatcccggctcgctcaaggattgttggttgcattgtttccattacaacccagctggatccttgctgggttcctgccagcagcttccacacacctggagtgggttggcttttcctgcaggtttgcttctatgccagctcctgggagcagttgtctaccaggacacacctggggagctgataaacacacaaaagaaacatgtctggctccccagccagatggcaaggcctgaaacccctgagcgttttggaca

SEQ ID NO: 170285 - DNA, 500 bp, Homo sapiens
aaataacactgattttcaaagtcgttttaaaaggcagcttttggcagctgctatcttttgcatattctctttccgagattaaagaaccttcaggtgacaacacctagggtaaaaggatgggacatcaggctgcagacgtgcgtatgcgtgtgtgcacacgcgtgcagtcttgactaggtgtggaaaaaaggtccgaagagattccaaaatcaaaaaaattcccttggcctactccggccccgaagaccaactcagaccccaccagacaaactggaaagtctccaagctctcagtcgccccagtcggcgggggagtgagtggggccgaccggccttgcggccctgccacctttcggggcgactcggtttctccactgacacccccgggcgcgaggtctggtccatcccggagtgggagctaggcagggacgccacctggcagcccactctgggcccctggcccgcgtttcccgcaggcgccggcggcgtcgggcgcggccg

SEQ ID NO: 170286 - DNA, 176 bp, Homo sapiens
attaatatggacaggtgatgtggtagaattgtatgcatttagatcttagtgtgaataagaggtgtcccaagctacccttatgttaatggtgatatgatattttttatatatttgttgtttttatttatcgatttattttgtttgtttgtttgtttttgagacaggatctcactctg

SEQ ID NO: 170287 - DNA, 531 bp, Homo sapiens
catgctttcagtattggtgtatttttcaggttttactgggaaccagcctccttttaaaaataaataattgaaaccaaaatgtactttatatatttatttttgccaactgagagattatgcaaggaggaactcattttactttactttttttgagacagggtcttgctctgttgcacaggctggaatgcagtggtgcagtcatggctcactgcaaccttgacctcccggaccctagggagcctcccacttcagccttctgagtagctaggactacaggcgcatgccaccacaccctgctaatattttattttttggagagacggggtttcgctatgttgcccaggctggtctcaaactcctgggcccaagttatccttctgcctctccctcccaaagtgaagtgctgggataacgggtgtgaggcgctgcgcccagcctcattttttttcttagtcctgggcctgcttattgtttcacactttattattcgtgagcagttgtatacatgtttgtgacatgcgtctattacca

SEQ ID NO: 170288 - DNA, 445 bp, Homo sapiens
ggggaaatgcctagagtgcaacatttaaggaacaaaggactcactctcagggttttaagtgcttcctttaatgttgcatcctaggcacctctatggggctcactgctcagtacacagacactcaaggtgttattgccagttaaacagaaaagaagtttactgttttcttctttgctcacttgtccctgtgtgctgtttagctggagacaggggcaggaaacaagtcccagaggtcactccactgggactttcttaggagccataaatgctctcaggctcatcgtgtctgcagcgcagtgggagtctcccatctgtggttgaaggaatggatggaagtgtgtgagctagattgcacagatagcaagcagaacatttctggtgaacttggacacacagacacgtggaagttactgtaaccacctggattgcaagaaacctttccttt

SEQ ID NO: 170289 - DNA, 173 bp, Homo sapiens
tcctatgctttccagtatatctagaggataaccaatatagattctgcctttgaattagatagctaatttttctgtggaacattatggattgatttggggcaagaatcttaataaaagttgaaaaagtgttgctacttgtgtgttagtgagattgggctaggcaagttcatagg

SEQ ID NO: 170290 - DNA, 689 bp, Homo sapiens
agtctctttctgttatttaaaatttcacatttccacatggttctctgaacctgacacctgtgtttacttgtgcgtttccccaacattctggctgattctctgagcctgggaactcccagggcaccaggattcttggctgtgccccatgaagaattggcatctgtgtgtgcatctctttgttactgaccaggtgagtccaggcaagaaggtagctcactgttgcctagaggccttcatccctggcttagagacatcagtctgtttgggactctgctgtccagagtagcctggctaggtattttcttttccctgcgatgtttactgttctttcgtgggatttcagatttccatgatggtggaaggcttgtaaaatgaaggggtggagaagggttaccgtggcaggagcctgggccaggccaggtcgagccagtagcacagacagcttttataatggtctgcagggctgggaggcttgtaaaggcgatgcaggcagatagggggataaatcatgcaagcagtgggcagggtggtgaagccgaggttaggaattaactttgtgttggatggagcccaggttgtgggatgggaagagaggcctctcctcttttcctctcctctcagctctgttctttgcctctcctttctgttggctctattcactgcaggctgtgacatgtttgccctagccc

SEQ ID NO: 170291 - DNA, 410 bp, Homo sapiens
gtggcagagttgtcagtggctgcagctgcaggcagttcttaggcttcagagagtgtgtgcttcagaccctggtggagctgtcaggaagctccctatgctagtctcagggccctcgtagggattcttctgtggttagggttgcaaatgttcataatgagaatgtggacctctgggaatcactcacttatccttttcccacagtgggcagcctctccaagattccagctgagctggcagcctgcttccctcgcctccttccctgcctcaggtgtttcctgttacttctttgttaaattctagtgttctgtcttagatgctatgtttgaaatgtgattatctgcttgctatttggtttttctaagtgcaggtgccaagtatcagatctgttttcactttcttaatagtgtctg

SEQ ID NO: 170292 - DNA, 171 bp, Homo sapiens
tggacttgatcctgcgagcattgcagagccatggagaggtgttaagtaacagggaaaaggatctcaaatttgtcaaggtaattccttatcctgagagacacatggagatttgaaccagggagactgctaggaagtcctctgcagtttttgtaggggattctcatggaactt

SEQ ID NO: 170293 - DNA, 558 bp, Homo sapiens
tgtgagccacaacacccggcctattccttggttttatattagcagttacagcagtaactgagctccgacagcttacataggcttattttaggctttgttggaaaattccagaggaggagacatggccctcagaagtttgtggtttaacaggagaggtaagaagacacattttcataaaaaaagtaatattggccaggcacggtggctcacgcctgtaatcccagcactttgggaggccgaggcgggtggatcacctgaggataggaggtcgagaccagcctgaccaacatggagaaactgcatctccactaaaaaaatacagaattagccaggcgtggtggcacatacctgtaatcccagctactcaggaggctgaggcaggagaatcgcttgaacccaggaggcggaggttgcagtgagccgagatcgcaccattgcactccagcctgggcaacaagagcgaaactcctctgtctcaaaaagaaagaaagaaaaaataataatattgagagaaatctgtctgggaacacatgaaaattatgagctcagtgctaaggt

SEQ ID NO: 170294 - DNA, 259 bp, Homo sapiens
ccgccccgcgtgcccggcccgagggcgggcaccggtaagggagggcccaggtcagggcttcccgccagcgttcgtcccggccccgcagcttcctgcgccggagcggcccagaggcagaggcctgagctggagcacacgccaggagggctaaggttcccgggagaggggtcgagaaggcagcagggtcctcccgccgctgaggtttggcctcgggagcagcagatggtcggcgggagctcaacccgaaacgcagaagggg

SEQ ID NO: 170295 - DNA, 676 bp, Homo sapiens
agcgatgcaagttgatttcattatggtcagatgccagcaaaataaatctagatcatcattatgtatttatacccataaagggaagaacttggcatggattacaaggtatttaattataatttagacatgttatggcactcagtgttttgttttattatacctttcatgtattgacaggccagtgtgaccacagaaaatttaaccttcctgccagtccttctccctgacctcctgtattgctaggaagaatgaaaattagctgtataggaaaaaaaaagattaactttcataagtagcccatatgtgccgttgtaaagattcactctcataagtagcccacaggtgatgtcgtaagcatagtgaatacagagggggagagccgagtctctaagcacacaagctttttgaagcatctctgcttggcaaaggctcttctctccacctccaagttattctttcagactcacctctctttgaaacctttcacctcagccaggcgcagtggctcatgcctgtaatcccagccctttgggagcccgaggtgggcggatcacgaggtcaggagatcaagaccatcatggccaacatggtgaaaccccatctctgctaaaatacaaaaaattagctgggcatggtggcgggcacctgtagtcccagctgcttcggaggctgaggc

SEQ ID NO: 170296 - DNA, 104 bp, Homo sapiens
tcatttcctgctccagccccgtcctcccataggcagcttgctgcaacctgctgtggctgatccactgggtgggcccgagcaatggctgcatttctagtaggggg

SEQ ID NO: 170297 - DNA, 779 bp, Homo sapiens
ggttctggcggctgagggccgggtggcgcaggcggcctccggctgtgcccatgggaactaaaaccttcggttctagaagagccgggggagaggctccgggaagaccgaattcttcagaaatcgcagagagaccttggaccggatccttccctgcagggctgcgtcggggaagcgccggcacaagtatattcagcgacttccttggaagcgcctacgttagaatactacaaacttacaagctagttgatcagtttacctcccactagaaaagacagtatgggaaggcagaggccgcgtggcctggacccccgtctttgctgtcaggcttccagagtgaaggtggggctcatattcagactagttcctggtccattcattctttcagtcagtcagtcagtcattcctacagggccagaaacttttttttttttgagacagagtttcgctcttgttgcccagactgctcaccgcaacctccgtctcctgggttcaagagattctcctgcctcagcctcccgagtagctgggattacaggcatgtgccagcacacctggctaatttttgtattcttagtagagacggagtttctccatgttggccaggctggtctcgaattcccgacctcaagtgatctgcccgcctcggcctcccgaagtgctgcaattacaggcgtgagccaccgcgcccggcccagaaacatgttttgaagggcaggcaccgcacagggtgctggagacagactgaaggaaactgcacctctcagtgactcaagagagat

SEQ ID NO: 170298 - DNA, 118 bp, Homo sapiens
attgagggatggctgcctgtttgattcgtagtgtgctgttagtaaatggggtcctttctttgaaaagtgtgatcacacttggtaaaattttctgactgtggcatctgtgtagcaactt

SEQ ID NO: 170299 - DNA, 894 bp, Homo sapiens
aacttttctattcctaaggattttaaggctatgctatatgtaatccatagacctgttacagggaggaataattttaactccagtgactgagaattgactgagagaaagcactaccctgaactaatgttaatcataattcactgagcatgattaactgtgagactggagaaattgtaataagtgtcagtgaaaagacaaagcacaaatcctttcttactcacattttactaaacatttccttagtagtgaagaagaaaggtttatgattttaaccaaaattcagtgtgggggataaaaaggcagagaaagaaagaacaactctggcatggccctgttttaagatttttttcccataacaacttgaagtagtagcatggtctctagaatatttccttccgcccctctccttcaatcccgaaaagactgttttgtctctaataaccctgttttatcccctccccatagtttccttgtgaagtatttgcttacttctgggtcctttacttctacctgagcgatggtatcccccattttaatatatccctggctttcttctggtgttacagaataggagcaatctcctggattctcttggctctggctgtacctgacctagacgtatgctgtcctctgtcacctgccaccatgtgattcctatgctgttaagagtggcagcagttacgttgaaacctcccaattttatttatttatttattcatttatttatttatttattttgaggcggggttttgttcttgttacccaggctggagtgcaatggcgcgatctcagctcactgcaacctccgcctcccgagttcaagcgattctcctgcctcatcctcccaagtagctgggattacaggtgcgcaccaccacacccggctaatttttg

SEQ ID NO: 170300 - DNA, 347 bp, Homo sapiens
gattacaggcgtgagccaccgcgcccggcctaatcttttaatttttttgtagagacagagtctcactatgttgcccaggctggtcttgaactcctggcctcaaacaattctcccacttcagcctcccaaagtgctggaattacaagtgtgagccaccgcgcccagccaagcccccattttctccaggaacctccagctgctggaccccctgcagctggccccctttttcccaaagatcccctcttgtgaggcctccaggagcccacactgccctggtctccgcccaccgcccgcagcccctccgtggtcctctctgctgcttctccccatctccctgccttgtccag

SEQ ID NO: 170301 - DNA, 217 bp, Homo sapiens
tcgtaccatatgtgcgaacttagtgcggacacccgatcggatagcgcactacagcccagaactcctggactcaagcgatctgccagcctcagcctcccgaggtgctaggattacaggagtgagccactgcctggccataaatttcccaatattgactgaagactatcttgaacttgagatggaactgagctcctggatgtggtttaactcaagcaca

SEQ ID NO: 170302 - DNA, 288 bp, Homo sapiens
gcagtaaggactggtgaatccagacggtgggtgcaaggcatggcaggctccctgagctcccagcattcacgggaggggtgtgtgtctgcaggatggtggggcacctggccgggcacaggccttgtcctcaggagcagacacccaggaccacagcagatgcggcggccggcctagccgcacatgggcccgacagggaggggactgaggagggcagggagaagaaacagacaaagaaccaaggaggctttcctgtcctgcctcggagagtggccttggagcgtggccatg

SEQ ID NO: 170303 - DNA, 446 bp, Homo sapiens
gtgatttgttaagatgaggtcatactagattaggttggctgctaaattcaatgatcagcatccttataagaagaggagaagacacacaggggtacacagagagatgccatgcgaagacagaggcagaaactggagtaatgcaaagatgactcaagggatgtcaagggttgctgggagtcaccagatgctgggggaagcaaggaaggatcctctcctggagccttcagagggagcacagaaatgccagcgccttgatcttggaattctagcctctagggctgtaagagaatacatttctgttgttttaaaccacacagtttgtggcaatttgttatggcagccacaggaaactaacacagtcccctaacctcaaccactgagcttcactgactagctgggaagtttctcccaggaggccatgttgtccctgaagccagtcccaatgg

SEQ ID NO: 170304 - DNA, 344 bp, Homo sapiens
agaaaaggcctgggatggattttgatcatgttacaaggcccacttgttgcatttaatttaaagcagttgtcccaatttcattaccacagagcatagcgttttcaaatttattctttaaaagacagagatagtggcacaaaatgtgctgtgggtttaagcaatatttgattgatcatgtgattctatcagtatcttttttttcttttattttgcctcagtatacacatttctgaatgaaaagatagacgatgtctttattttaaacaatctagtggtggttgaagaggccatctggaaaggtgatgtcaacggagggtagggtggttgctggtggaggggagtag

SEQ ID NO: 170305 - DNA, 543 bp, Homo sapiens
gcactagagttccaacttctgtacatcctaacaattgttatttttttatagtagccaacccagagggtgtggggttctcgtcgttagttctatcttgtcttccaaacttgtcatcactgaagcacctgaggactcagtctccctgtcttccctttcccatctatttctatccctttggtgatctcctccagccccctggctttaaataccatggacatactgatgtatattgctagcccctacctcctgccagactctaggcttctcactgctgttgcctggtgggcatttctacttggatgttcagtaggcacctcaaccttaaaatgtccaaaaccgaaggcagattccaagcccctcatcccttgcccaccatgaacctggttctcccacagactgcacttatctgtcaatggcatctccattctacctggttctcaggctccaaaccttggattcatcccttccttttctcttttcctttctttctacatacaccagcaaattaagttggttctacttgcaaaattaacacagagcttt

SEQ ID NO: 170306 - DNA, 557 bp, Homo sapiens
aagaagacatacaaatgactaacaggtatattaaaaaaaaaagtacagcatcactaatcatcaggaaaatacaaatcaaaaccataattagatatcatttcatacctggtaaaacagctattataaaaaagagaaaataacagatattggcaaaaatgctgagaaaggaaaatgcttgtacgctgttggtgggattgtaaattagtactgcacctatgaaaacaagtatggtatttctcaaaaaactaaaactaacattaccatatatatccaaaagaaaaaatcaatatactaaaatgtatctgtatttccctgtttatttcagcattatttataataccgaagataggaaataaacctaagcatctatcaaaggatgactggataaagtgtggtatttagacacactgcaatattatttagccataaaaataattaaatcctgtaatttacaacaatataggtagaactgcaggacatcatgttcagtgaaatatatcaggcacagaaagacaaatattgcatgttcttactcatatgtggcagttaagaaggtt

SEQ ID NO: 170307 - DNA, 134 bp, Homo sapiens
tatattgattcagtttcaattgttgcatggcctttcattcctgggataattcccacttggtagtattgtatcatcttgtttatttattaaaaaacagacttactgcaatataagttacataccatgaaactcat

SEQ ID NO: 170308 - DNA, 313 bp, Homo sapiens
ctttggggaaaaagttctgtattcacaagttgacaaacttaataaagataataatacagatttgaaaagcaaaaatgtagattttgaaaacatggagattgagttcataacgtaaaacacatatttgtaaagtgtttaaatataagggaaatcacagacaatatggcaatcatctgaaaggtaattcagatacagttgcaaaaaaaaagaaaaaataagttcttcagaagaacaaagggtaatatcgcagtcaaaaagtaatacattgaggaatttttctgctagctgaatgttgtatttttaaacctgtgtt

SEQ ID NO: 170309 - DNA, 450 bp, Homo sapiens
agttagacccctttccttatctccaggacagagggctttctgtatcctgaggttcttgctttggtatactggaagaatcagatcacacgtgggcttggagaatgagtgcaaggttttattgagtggaagtagctctcagcagatgggggaaccagaagagagatggtgtgggaaggtggttttcccctggagtcgggtctctcagtggctggagctctcctctctccgccccagccaaactcggcatagttccacccgtctgtggcctgccggtgtgctggtgcctgttggtatgctctcgacattctctcaatatccagctgctggtgtgttcctcttgatgttcagctgcttgtgtcttggggtttttataggcacagcatgggggtgtggtgggccagggtggtcttgggaaatgcagcatttgggcgtgaaggcaggagtgcctgt

SEQ ID NO: 170310 - DNA, 314 bp, Homo sapiens
ggagacctggtccaagaaacaagaggcctgggttgccgttctgccctaccaataacaggctaggaaaccatctctctttctttagccacatccttttccaaagaggaaaattcaggagattagcatctactccagctacttcacaagatgaaaaactcttttgaaaaagtaaaacatggccatgtgcagtggctcacgcctgtaatcctaacactttgggaggccaaggcaggcggatcacctgaggaattggagaccagcatgatcaatatggagaaaccccgtctctactaaaaacaaaaaaaaattagctg

SEQ ID NO: 170311 - DNA, 604 bp, Homo sapiens
aacattcaggtgatcgggagattgttaaatgtaagaattctctaaaatgatagtttgcagtgtcataccgtgggctagcatatagcatgtgaaaccattctacttgactttgaactttgagaagtacacttttgatgcttatagataacagatcccaataacaccagtgcagcctgtctagttgcaaatactaacagtagaatgtttcttgccttgtttggtagaccatccatttctttcccttacttgttttatgtatatcttaaaggttgcttttttggtttgttgatttgttttacaaatgcttattgagtgtttgctatgtagaaggcactgtttctagacatatgaggataacagtgattaacaaaacacaaaactcctgccttcctaagggatagaaatacacgataaacaagtaaacaaattaattataatttgatatggtaatgagtgcaaagaagacaaccaaatgcagtgatatgatagaatgaagaattaaaaagctgctttgggtcggattgtgatgcttgcgtggagcttggagaagcagcagccaactgagggaagagtctctagccagtcacctgatgtcacgtacctc

SEQ ID NO: 170312 - DNA, 418 bp, Homo sapiens
caggaagctgtttttcccatgctgagtagtctcatggcactgtgtgccaccacagtgctgcccagccctgccaccctggactgaccgatagaggggagaccacagcgtcagctgctaacatggaaggacttgattgtgcaagagctgggtttcctgggaagtcaggcaccctgctccttcacctccccataacagctgtccccatggcagtctcatgacaataacaagccagccttgctattttggaaagcagtgagggacgtggagatccccattttgacagtattcatctcctgtgtgacctgggtgagttgcccaccctcacagagtcttttcaccgagttcacatgggactcaaatgggatgccatggttttaacccctggcgtgcgttagaatcacctagaggaattgaaaca

SEQ ID NO: 170313 - DNA, 285 bp, Homo sapiens
gccaagagtttgagaccaacctgggcaacacagtgagaccctgtctttacaaaaaatttaataattaccctagtgtggtggcacacacctgtagtcctagctactcaggagtctgaggtaggaggaccacttgagcccaggagtctgaagctgtagtgtgctatgatcacaccactgcactccagcctgagtgacagacaggttgtctcaaaaatctaggaaaaattttttttaaatttgttaaaaaggtagcactacctcaactagtttctggaacatgtttca

SEQ ID NO: 170314 - DNA, 244 bp, Homo sapiens
gaatagtcaatatagagtaagatttgaagaaacaatcttgtgcagatataatttttagtttttagttatctgtaaatgttggcaagcattccttctgtgaaccctggcattcctctcaggcttcattagaacacatctctcccactctgatctcttcttcatgcttggggctatgagcctctgggcatacctctgtcacaggtctctcaatgatctattatctaacatgtgactaaattgttct

SEQ ID NO: 170315 - DNA, 463 bp, Homo sapiens
tcatccaatgtgggggttttgaggaattcttcagataccctctctgctcctctcctccctcctgggctcccacagatctgttggggtccccgaggccgctcagcactgctcccttttcttcagtctcttctgctttcttttcctcagacgatgtgattttattgtcttcaggctcaccgattatttcttctgcctgctcacatctgcctgtgagtttctgttgtgaatatttactttttagtgtctattgtgagcatgtacttattagctctggaatttctctctggtttcttgttggatcttctgtctctgttgatatttccgtcgtgttcacgcgtcattttcttgactttctccacatcttcctttcgttctctgaggaactgaaggtttaagacagttccctaaaatctttgtctgggacatctaccgtcaggtgattttcaggaaccgtgtctgttgg

SEQ ID NO: 170316 - DNA, 208 bp, Homo sapiens
gtccctgtcatccagactggagtgcagtggtacaatcccggctcactgcaacctccacctcctgggttcaagcgattctcctgtctcagcctctcaagtacctggaattacaggcatgtgccaccgcaccccatgtaatgtcccgatcttgatggatgcactctggttatagaaatgtcctcattttaaggaaatacatgccaaagta

SEQ ID NO: 170317 - DNA, 409 bp, Homo sapiens
tttcacatccatcttttcatttgaaccttatcgtaagactgtgaggtagggattatgatgctcccactgccccttttttacagatagggagtgaagctcagacttggtcaagattgcagatcaggtaaatggcaaatccaggactctaacactggtctgtctgttataagatcctgtgccttaccctatactacaaagcatgtggaaaagtgaggcaaaggagagttgaacttgggggccttcttggtgacttcccactccaaggctatcttttcctttagtgctaaaaacagattccatttttaaaaagagagcctcaaggcaaatgttagtctctgttgagctatggcctggaaagtagcctttaggttgggtggtcttacggtttcaagtggtcgggtaccgagct

SEQ ID NO: 170318 - DNA, 396 bp, Homo sapiens
ccagcctgtatttagagcacatttctaaatgttttctgctttaatatgtgaatcacttgatatataaaaaggaaattaggccaggtgcaatggctcatgcctataattccaggactttgggaggccgaggtgggtggatcatttgaggccatgagttcgagaccaacctgcccaacatggtgaaacgccacctctacaaaaaatacaaaaattagctgggcatggtggcacgcacctgtagtcccagctattcaggaggctgaggcagagaattgctggaacctgggaggcgaaggtcgaagcaagccagggtcaaagcgagccagggtcgaagcaagccgagatagcaccactgcacttcagtctgggcaacatggcaagtctctgtcccctcac

SEQ ID NO: 170319 - DNA, 474 bp, Homo sapiens
gttttaggcatcattgattgacctgctgcaatgaaagttggttagctctgctatttttcattcccccatcttccagttttgttgcttgcattattttttcatcttcagggtttaaaatatttacgttatattctgcaaccagtatccacactgttttaccttacttctgcatttaaattgattcaaactcactatgaatctcttcatcagggtttctccattcctggattactcatttaaattaattttttttgttgttggcaggcttctaccagtaagtttctcaagaaaaatcctgagttcatgtttgagaatgtctgcttattgttttttgcttgagtaatataatacttttgaatcatacattctttcttccagctccactgtctcctgtagtggaatgtttttgtaaagctggttggattctctcctcccctgagaccaccatctttttggtgacttcttttcctgctt

SEQ ID NO: 170320 - DNA, 392 bp, Homo sapiens
cctgctgccatccatgtaagacatggcttggtcttccctatctcccaccatgattgtgaggcctcccaagccatgtggaactgtaagtccattaaacctcttccttttataaattgtccattctcaagtatgtctttatcagcagcatgagaacagccccccttctttttctctaccctctatcccttgacaacatgatataaaatcttgacttttgctactacatggatgggcctgaaggacactgtgctaaatgaaataagccagacagaaaaaaagatactgcataatttcacatatatgtggagtctaaaaaaacaaatttacatatataaagagcaaaactggttatagggggatagggagaactggggaatgtaggtcaaaggatt

SEQ ID NO: 170321 - DNA, 370 bp, Homo sapiens
aaccagctgtcgaactcttgcccaccccggtgaagccagcttctggacttgtggagataccgacagcacgaagcggctacactgccgcagagccaccctgtgccacctcgtcccccctcctctgcagcccagcagagctgacgggggcgggggcgtgcgcggtgggggctgacatcttataatacggatatacatattgtcacgctgcagaatcctccgcggcttctcgtcagcaagtggtagtcaccacactcctcctacagaattaaggaagtcttccaaaaattctgctgttggaactaaacagactgccttgcagctttcatgacagcacttggattccaagaagcagactgaagaatgtgggaga

SEQ ID NO: 170322 - DNA, 556 bp, Homo sapiens
agggtaacagggaaggtgtctctgagatgatgctgggcaggagccgagggggttgtggtgccagagctgctgatagctgtgttcttatgacctgcatcctgatggcttctgagccctggttcctctgaggcctctgcagcctgcttccgggcagggggccacacctgtgctcacctgtcctggtttgcctccagcactgtgtcctgggctgccctcgtggggcagggctctaacaagggggagaaggccctgaggaggtgcgggtgaggccaggtgagaggcacagaggatgtcctggcgcctcctgctcccctctccccacctgtgacctcacctcactcttctgcgtcctggcccagagcactgggacctcatcccagtatcaatcaggatgcctccctgatgtccctgggcacctctcactcaccttgtcccaaactgaccttggcatcttcccccagaagtgtatcttcccctggtgcccttatcagggaaggcgccactacccacctcatcgctgggaaaagagacctggggcctcatccctgatgcctcc

SEQ ID NO: 170323 - DNA, 137 bp, Homo sapiens
taacgacttggttgaatgcagaacgtcctagagtgaaagggagggaactaaccaatagtacaatgctgacagggtgatgaggaagtgttctggcaaacacttactataacagacagacaccgtagtacagtgtgaca

SEQ ID NO: 170324 - DNA, 627 bp, Homo sapiens
tttgaggcagcatggtacagaccatttaaagtcaagagatctgtgttcaagccccactcacctttatcaccagctttgtaggtttgggcaagtcagctatttagtgttagcttcctcacatgtaaaaatggaacctaaaaatagtgtctgatttagtggcgagtcttgaatgagatcatgtgtgtcaaagtactttgcaaattgtgaagagctacataatattagttgttactaatccagactatttgggggatgaaacgtttatgaagataggtgtggcatcaaagaaaaaaatgccagtattttaatatttgtaaaaaggagttagtttaaacctgacacatttctttttaaactgccttcacctgcatattcctatttatgctgacatgaccctatttatttaatgcatatgttgagaccaccagtcctttactcatcaagatccttgtgaaagaattttaacccctttgtcaaaatttaaggacctctcagaataggatgaaatgggtatgctgatttttaaaaaactcttgttagatttaggaacctctcagaataaaatctggaagcctgttccatttgcattatgagatttgcattacaatgcaggtaagttgtaatggt

SEQ ID NO: 170325 - DNA, 677 bp, Homo sapiens
acaaaccaaaacaaataaaataaaagcattaaaataaaagaccctgccactcaatctttgtatattggccgggtgtagttactcatgcctgtaatcccagcactttgggaggccaaggcaggaggatcccttgagcccaggagttggagaccagcctgggcaacatagcgagaccccatctctacaaaacataaaaattcaatatccggcaaagctatgctttgaaaatggagagatttccacttctggaacagcaatgtgaggaacttcatggaagtacttcctgtgaaacaagcaaagcttaaaccacttaaagtctcaaaactgtcctaaacgcatataacagatgaacacttacggagtaaaatctactgacacctggtacgaacattaagcctggtggcatctgagcctcagcctcctctttccctctcaccccagctcaccatgatgggtactacactcagggagaggggagcaggaagatggggacccttctcaattcccaaataaggtttcctggatctcatgggctgggcagaccaccagagtttcacatcctcaccgactccaagttgaagagactaagatcctggtgcacgtggccaagaagccaggggctcccttcctccaccttgcccaagcctcagagaggagactacccccgccacagcagg

SEQ ID NO: 170326 - DNA, 638 bp, Homo sapiens
cccaacacactggatcacttaggtagaagagacaaattcctggaaatacacaacttaacaataattgaattacaaagaaacagaaaatcggaatagacctatacctaggaaggagactgaatcagtaactgagaacctctatcaaagaaaagcgctgaaccagatagctttgctgctgaattcaagcaaatatttaaagaattagaaccaagtctcctcaaactactacaaaaaaattgaagaagaaatacttcccaactcattccattaaggtcagcatcactttgatacaaaagcctgacaaagacctcatgaggaaagaaaattacagatcaatatcccctacaattatcatgttgcaataatccttgacaaaatataagcaaatttaaatcagcagcatattaaaacaattatgtgccatgaccaagtaggattttatcctgaaatgcaaggatggctcaacatttaaaaaataatgttaacacaagcattaacagaaggaaggagtgcagtaattgaaagagagtggtattagtatagacatacaaactaataaaaccgaagagagtctagaaataaactttcacaaatacattgaatcaatggggaaaaaacaacagccttttcaacaaacg

SEQ ID NO: 170327 - DNA, 393 bp, Homo sapiens
tccgcccgcctcagcctcctaaagtgctgggattacaggcatgagccactaggcctggcccatactttcgatttgctttctttccatcccatttcagtcttcacattgttgactttgaatggcctttctatgaattttttcctattcacttctaaatccctattttaaggatcacctcatatctggattattgacatagcattctgactggttctaccctgctctattttctcttcccccaaaatacacacacatgcatatacacacagaccacacccacacagaccacacctacacaccatcctgcataccctttcttctcccaacataaacacacacaaacaccaacatccccccatattcttcctccatataatacacacatgcacatac

SEQ ID NO: 170328 - DNA, 357 bp, Homo sapiens
tgggcttgacaattataactctaggatgttgcatataccatacttggctacatctgttgtggaaatagagggatgatatcatttttttcacctctttctgtaaatagaatttatgtagcacatgtgggcttcctcaagagaaatttaaaaccccaaattgatgggatggtgagacctaccacctctctcaagcatgtgtctctccaagtgacacacataagacactatttaaagcatgtactttggatgtgtgagccactgctcctggccttgcagtttttatagtataagttgtctcagtccgttttgtattgctgtaaagcaggggtccccaacccctgggcctattaggaatgg

SEQ ID NO: 170329 - DNA, 365 bp, Homo sapiens
ctactccttaatggattccattagacagctatctagccaaccacccggaacaacactggtgaatcatatgccaacctttgtccctcctagaagttgtatgtctatatctggccgggtgcggtggctcacacctataatcccagcattttgggaggctgaggcaggagaatcgcttcagcccaggagacggaggtcgcagtgagctgagacgttgtgacagcactccagcctgagcgacaaagtgaaattctgtctcaaaaaaaaaaaggtacagggccatgtagcatgtgctgatgtagatgctgcagcaaataatccagatttagctaacattatggatggtgaccacaccatttagatggaac

SEQ ID NO: 170330 - DNA, 345 bp, Homo sapiens
ttaattaattcaaagacttacctgagattctgtttgtgcaataaaaattaaaaagattactcagtaatacattgggagaggtgtaactggggcattaaaatacgaatgtgtgtctaattttcaaacatcataagtattttgaaagcacttatacataatcaattaatatatgttgttaaataaattcatatgaataatatgtgatataaattagtgttttgtattaatttcaagacaattataaagagaatgtcaccatcactcttttgattcaatcaacagtccttagactggttccttgtaatgaatttaatgggttaataaaagctgtgttatttgaaatta

SEQ ID NO: 170331 - DNA, 176 bp, Homo sapiens
ttttaaaaagcagaaaagtagcagacacaatgacatcacaggcagcaaatacctggcactccagaaccactcgccttcctgcatacaaggcagacatgggtcacttagccagccctctttccctgagtgtgaacccagcttcagaatccagttctatgcagcaccctgggcaactg

SEQ ID NO: 170332 - DNA, 501 bp, Homo sapiens
ttatcttctagaaattcggtctcaactgtacactggacaatgagtccctctctgtcacttgctaccaaaaccatggaaattaaaaatctttaaaagtccaatgtacttaaagttttcatttctccactatttgatcaaggccaaactagatatgggtactctgggttgtgaagccatatgtgatctctgccttgacactctagtcctggttggtggccctcactctcagcacaggagtgcccggatgcacatcttcctgaaggccgacgctgtacacatcctagatgaacacagggttgtcattggcttcaaccaataggatcaggagttgagtgatgctgctttgttggggggccgtctaaggctgctagcactaagggatgggagctctgcttttcctagtcaagcagcttctctaacacaggatcaacatatgtctttccactgttggtcacttttacttcaaagagaaatatagagttgctgctaaggtgataattt

SEQ ID NO: 170333 - DNA, 612 bp, Homo sapiens
tccttctctgcccaccttgagttccgcaggctcagtggtctcttgagggtctttagatgaccaagccctcagtgtagccaagtgtgcctttccctctgaaatgctcacaccctcaggctcaatgatactttcattcttagggtatcccaccacggcatgcgattgcaccactgccctccatcctggatgacacagcaagaccctctctcaaagaagagaaagaaagaaaaagaaattctatgtaaggaaggaggaggggattgctattgaacagggtaatcagggaaggcctcactgagaaggtggccttggcatcagatgagaggcaagagcaagccacttgaacctggagaaatagccttctaggcagaggcagcagtaggtacaagggtcgggtgtgtttgaggaaaggcaaggaggtgagaaggtgcagcagtgagggggagatgtagcttagctcatgcaggaacttttaggctgtttgatgactttggcttgttcttcaagtgacatgggaagtcattgcagggttctaagcagagggaaatgtcttggttttcatcataaccttttgtctctgactaatgtgttgaaaatagactgtaggagttg

SEQ ID NO: 170334 - DNA, 124 bp, Homo sapiens
tccgtgtcctagtaggtatcacatcctccacctgtggtataaacctgagagccattcatacgctctctctctatctctctctctccacctccccattcaatcagtcaccaaatcttgtctattt

SEQ ID NO: 170335 - DNA, 262 bp, Homo sapiens
ttcctacaacagtcagcattcatagttcaaaaaagttagtattgcaaaaggagagtaattaagaattctttcttaataaatgttattgcaagtcattagagtttcatgaaagcagagacatatggaaaaatctccccagagcaataacaaacatttcatatagacagtatgccattcaggtgttcagcatggaagacatcagaaatattaatagtccaagcaccctaaagtgacttcagactaaagtaaatgaatgcgtccg

SEQ ID NO: 170336 - DNA, 695 bp, Homo sapiens
agattcatttttgtttcatatgcactttatacacatcacctgaaggtaattttatacaatatttcataataattttgtacatgaaacaaagttttgacttcattttgactgccacctgtcacatgaggtcaggtgtggaattttctacttgtggcatcatgtcaatactcaaaaaatttgggactttgcagcatttcagattttagattttggggttgaggaatgctcaacctgtattgttgccaccaacaaaactggcatcatctacagacaataaacctttaaaaatgcttcgcagaaacacaaagtgttttcctcaacatcttccttgatttttgtagttgaaacaagctcctatcatgtgccatgtgaagtagtgtttctgccctcgagaagtttggtaagagaaatgaggcagtacacaaatgactagatatgacgaagatgagttaaatgcctccgaatattttgtttgctcactagaaattcaagagaagagaacgctcagctagagtgaaccaggagactgcaacaatcttgttcatttggttattcacttatttaatgtctgtattttgtagatctagattaatgtgaatttccttagaacttacatcttggttggtttactcagtgctatatccccaatgtctgacatagtacctggttctcaataaatactttgaaacaattga

SEQ ID NO: 170337 - DNA, 672 bp, Homo sapiens
attgggaggggtaggtgagggtcgcgaggctgcgtgagcttctgagtgaacgcggtgcttttgggaacgcgggacgggcgacctgtggcgccaggagcgggccgaggcgcggcggcgccgctgccgtctggatgggaagttaccgtttacagcgaagtccacccaacgtttccgaagtgaaaggcgccgcgcccagccgggccggccggcggtttctccaggctggtgatgggcaagccgggtgtaccaagtccatgatgcacatgaggagcatttgtagccagtcactgaatcacctcatgactagcgggacaagcctcaaattcaccgcaggatttccgatctcactctgttgcccaggctggagtgcagtggcacaatcacagctgaccgcaaccttgacctcccaaggctcaggtgatcctcctgcctcagcccccaggtagctgggacctacagacagggcctcactctattgcccaggctagagtgccgtggcaggatctcagctcactgcaacctccacctcctggctcaagcgatcctcccacctcagcctcctgagtagctgcgactataggagtgtgccaccatgcctggcttaattttcatattttttgtagagatgggattcaacatgtttcccaggttggtctcaaactcttgggctca

SEQ ID NO: 170338 - DNA, 834 bp, Homo sapiens
gccccgccggggcttaagttccatgcgttggattcctcgcttgccgctgccgcccgcagccctccttgggcgctggggaagaaactcgctggcgggtgttctgtggcatctcagggggtggagggacgagcagcttcgggggcacgtcctcgtgtatcctgtggaggaccctgaccccgcaccccaccctcgaggccagaaatcggttgcctctggggacctgagaagcgagaccactcgcgcccctgacttgcaaagttggggtctttattggcctccgggattctgctcctggcggtttctccaggctggtgatgggcaagccgggtgtaccaagtccatgatgcacatgaggagcatttgtagccagtcactgaatcacctcatgactagcgggacaagcctcaaattcaccgcaggatttccggtaggttggattgtggggttggtgtttgcactccaaagagttgctgtgatttccctgtatctgtctttctggcttgttagatcttctcatttggcgtcctttctccgaagagttaaccaagacgtttggcatggtttccttgctttcctcctatcttttgctgctagagctgctttcgaaaagaagtcttttcttgcagtggtatcttttctttgggttacagtgttgttcatcctttctttgccgaaagaatgaatcccagtgcttcacaaggttacaaggaaaagatctgctggtagtgtttagtttttgttctgagctgatatgtgttagtagctttttgtttttaaattttattagtaaaatttcaccagtgaaccagaagctctttttttctattgtgaaat

SEQ ID NO: 170339 - DNA, 148 bp, Homo sapiens
ctttcagttttaaatgaagccacaagttccctgtataacatttgggagatagaggggagctctctagcctaggggttgaggtctgtgaccaaacgcctataaagttgtctttgtttggactcccccagaagcagagcctgagacaagg

SEQ ID NO: 170340 - DNA, 223 bp, Homo sapiens
cgttcattactatgatcgtattattgaccggaccaacacaacactgtacattgtaatggaatattgtgaagaaggagacctggctagtgtaattacaaagggaaccaaggaaaggcaatacttagatgaagagtttgttcttcgagtgacgactcagttgactctggccctgaagtaatgccacagacgaagtggtggtgatcatactgtagtgcgtcggggt

SEQ ID NO: 170341 - DNA, 487 bp, Homo sapiens
agaaatcgtagaaaagtggaagtaggacagttcctttaactgataaagggtaatcataaatgtgtatttaatggtaaaatgttgaaatcctttcttctgggattgggaggaagacggatgccactcttggcactggtgatcagcactgtgcagaagcccatagccagagaatggcaagaaaaggaataaagggtgcaaggattggaaaagaagaaatgaaacaatcagtaacgtgagtagtacgattgcctaggatgaaaatccaagagggtcgatgggaaaattgttagaatttgaaagtacgtgtagcaagtttcccagataaacatcaaaattcagaaatcagttatacatcttcatactagcaacaaagagagaattattttaaaatatatcatttatgattataccaaaaatatcaaatgcttgggaataaacttgatgaaagatgtgcaagagtctatacagcaaaacataaaacaacatt

SEQ ID NO: 170342 - DNA, 386 bp, Homo sapiens
gcatacagaggagagaacagactaaaacatccctaagagttcacattcgcaggatgtggtgactggtggaaaagggccaaagtgagggaagagtcatgataattcccaggtgtgaagcttgtttgggggaccgggtggaggcagtatcataaagaggagacagaatgtgaacacagaggagggacgatgattagtttggttttcaatatgctgattttggctgggcgcggtggctcacgcctgtaatcctagcactttgggattgcaagcgtcagcatagagccaccgcctggtttgaattctaatttggaaaacaatctgtaattaaaccttttgagttcccatttctaccttaaactttcttagttacatataaccatctagta

SEQ ID NO: 170343 - DNA, 749 bp, Homo sapiens
ctaagggctgcatctcaggctgaccacagggcaggtgccaagttaagtgttttcatgcactccctctctcaccacctgggaggcaggtatgattaaccccctgcagaaaaactcacagtggggaagcggtgccggaacccaaagtccaggctccaactccctggacgtgacatgctcgccagccggggtacaccctgcacaatgctgggagcatctccttgatgcctccaccatcaccgcctggagcgctgatccactcagcacattctggctaagcatctgctgtgtgccaggccccgtgctgggcagtgatgggaatgaaagatgagttagatctcatctctgcccccggggagcctcccatctggtgggagacacagacacgtggatctttgctggaaagggtaacaaggccatggaaacccaggcaggagcgttctagaaatccatccactttcaagtaggacttccatgcccgtaacatccacccaccgagctaatcacccccactcctgccccgctgccctgggacacctatgagatggcatcacctaaatcatcacaaacatctccaaaggccatgctgccagtgtagacacactcattccatgggtgttagtgataccaaatctcccccagctcttagactcgggaggcctgcttgatcaatgtgtgtgtcctctgacgcagtttcctcatttcatcagacctagtgttctcacactgaccacccatccattcaccagaca

SEQ ID NO: 170344 - DNA, 483 bp, Homo sapiens
acacactttttgtaatttctaatcatttgtcttatatattcattaatttgagcagtatttaatttgaaattttctaaccttagacttgaaagtttcatctggccagatacatctatcatattagagatgcaaatgataacacttaaattaaaatagaattttgtttttaaaaaaatttttaaataattcataaatcatatttttgttgaaagtttaaatcttagtgtggaaatcttataatcttataaagtgaattatatgttgtaggcaattaactctgctaaccatagcttagttttttcaagctgtaggggcctttgtgtgacattcactgtttgatgagattaacatataatctggccagacggggcctattctcatattcctatagtttattttagtttcataaatatatatgtatggaataaaactgataacattcctgaaaattaatgattctgttgtttattagggataagtgaa

SEQ ID NO: 170345 - DNA, 384 bp, Homo sapiens
gtgctgtgggctttctgtgtatctccagtgattctcacaatgcttcgattgtgagtttttttaattgtggtaagataaacattagatttaccattttaacaatttttaagtgcacagttcggtggcaataagtacattgcaattgttatgcagccatcaccaccgtccatctccagagcttttccatcatcccaaacagagctctggcaccattaaacactaacttcccatttcccctctccccagccccccattctccgttctgtctctctgaatgtgactactctaggttccttaggtaagtggaatcatacagtgcttgtccttttgtacctagctcatttcacttagtatagtgtcttcgaggtccatccatgttgtagc

SEQ ID NO: 170346 - DNA, 331 bp, Homo sapiens
gaaaagatggtaggatcagtggattatggaactttaaaaattatggactttaaaaatgttggagtgatgatatttgaggaggggaattgaaaagataagggatggcaggagagtgggatgctagaaattgagattgtggagggtgtcagctattggtaatgacaagttctggggtatgattgtgggaatgaaccgccgaggtcaagtggagtactggattatgggaggagaggatgaggtcaaggatgatctctacagatattaaaatcagtatgcatttgacaagaacaatgttggagagagtgtcatagccaggagctaaaatctttaa

SEQ ID NO: 170347 - DNA, 258 bp, Homo sapiens
  misc_feature (1)..(1): n is a, c, g, or t
  misc_feature (11)..(11): n is a, c, g, or t
nggtcggtacntactctcgggcctggggccatagtgaaacctgagtggtatttagtgcaggcagggtggcaggcaggctgggggcctctcagaagcgtggagctggcagagagagacctgcccggggcatcggaggaaagggcgactgtgcaggaacagagtagacgaggtgggggaacctttgggtaagaagagctgagtcaggagcattgaggcagcggttttcaaacctcagaagcaacagcagggcccgagagt

SEQ ID NO: 170348 - DNA, 426 bp, Homo sapiens
tagtaatctgatttgtagaaattaggtggtttcacaaggtggtagagtacatgacttttattttgccgttatctgtttaatatattagataacaattagaacagaagatgtatgccatttacctggttaactttgcattttttctcctgtattgatccgtttatagctgactttgaatatatgttctgtttttttagaatttagaattgtaagactctataatactgggtatgccattttaaaatttcctgtgtgttttaattttatgtagggacttacatctgtgttaggaacctaagtttttttgtttgtttgtttgtttgtttgttttgagacggagtctcattctgtcgcccaggctggagtgcagtggcgcgatctcggctcactgcaacctccacctcccaggttgaagcgattctcctg

SEQ ID NO: 170349 - DNA, 417 bp, Homo sapiens
aaaaatatcttaatattggacacagtagaacaatgctgatgagaaaaaatgaacactcagtgcaggcaggggttggtgtggtggatgtggatgtttgaaactgaaattgggcaatatctctgacccttttctcaggcaacagtacccatacctactatggtactccattggcttaattcaaatgacttctagctccagaggtagcatagaaactgtagttggttaataataagaacagtgaacacctattgagtttgtaaaatgttccaggctgtattttgagcattacagaatcagaatacccagcatcaggttcctctagccactactgactgaacatgagctgtcccaaatcaatcttaccagaacaatctcaaaagagatgttttctcttctgatatacatgaacatggccca

SEQ ID NO: 170350 - DNA, 258 bp, Homo sapiens
cccaactctggctatgggcctttccccccagtagcactggacaggttccacaggttccagctggacctgcccccaagcacaggtcctggccatggggaggatgatacgggggaagggtaaagtggacaaagaactgggcagggggaagaatatcgggacactggtcttctgtctgccacggacactctaggtgactgagggtaagtcatgtctcctctatcagcctcagtttccccttatgtaaaaagagagcattga

SEQ ID NO: 170351 - DNA, 290 bp, Homo sapiens
taactgagtcacgtcgaccctcagatgacatcaatcttcactcctcttctatccaactaccgactagacacacgtacacatgcgtatgcaccccacagatcaaacttatttcattttctctacctgttggtcacggccttttcttcttatagcttactttattcccattattagacctgtttccatgttactgaaccttttccatcaaacctcaagtcctttatcttgtcaacaactccgtgaagcttttatcaatctgcctgtcagtaatctctctcttatctgaactc

SEQ ID NO: 170352 - DNA, 270 bp, Homo sapiens
agcctgcccattcctcaagcaaactgttacaaaggaaagaaacctcatccaaacctcttctctcatattttcatctagctatacagttaaaacaacaggtctcagcacacatcctgaataaattactttagaataaggaataaaatgttagtaacaataatgattctaaattatgatacttcgttattgattaattttctctatgatgcaaaggcttttaaatattagtacaaactgaatgcttacttttaactggaagcacccccccac

SEQ ID NO: 170353 - DNA, 450 bp, Homo sapiens
ctttctgctcccaccattcaccttcacatcaccggcgctgcttgccatgacacggtgtctagttatgtgacagcgtacaactgaagatgagatttgggtggggacacagccaaaccttattacctatcatgaaagtgaaggagagagcaagaagtggaggtgggtagtagtaatagaggttgatataatttctcaggaccccacttgcctctcagtacctctcttcattccctttaagggtgtttgttataagcatgggacttaaagaatgaagatggctctgaaagacaaaagttgattttcagtgaccgttgatattgaggattttacagtgaacaggacaggcacggcccctggcctgctggagcccgcggtccatgggggaaacagacaatcataaatcaaaagtaaaccataaagatcgtttcagatgagtgcttggaaggaaat

SEQ ID NO: 170354 - DNA, 345 bp, Homo sapiens
tggtcagggtcccagccaacaactattccacagaactctgaggacacttctggatccatgattgcatttctggatgcttggaaattcgatttgactactatttccactaccagagtagcatctctgaaatcctaatacttttgtgttcctagctccctgttcaaagtctagttttaggcaagatcagatgcccacatcttatgtctgagaggtttggaaataattatttggtgtttggtgctcctaaaacagaaggctggttctaccaccaacaaaacttgtaaagagtatcttccctcttgttgtcccatcaggaagagggtttagattctaggcagaccaaaa

SEQ ID NO: 170355 - DNA, 188 bp, Homo sapiens
aagatttaaagttatttctgcttagcaagcatgaaatataaagcatcctgtgtacgaagatgcagtacctacaattaagcaagtactcttttgaaaaactaagcacacaggcccatatgcatggtggaagtcgttgggctcagtattatttggagctggtgcatatatttatcacactttaataacaa

SEQ ID NO: 170356 - DNA, 143 bp, Homo sapiens
gggcattactgaatgcagatggctttcacactctagtacagttgacccgttgtgagtcaggccattgtgagtcgggcctgtgtgctgtgctgtgtcctcagttctgggtccactctgctgtgtgtgattccagagtcccagag

SEQ ID NO: 170357 - DNA, 411 bp, Homo sapiens
cggcacgagggaagacaggaaaggaacagccaaggaagtttgtagaaaagtaagagaatgtaaaatgtggtagaaataccatgaatgtgttctaggtaagatggtctgtatccatcttgactgaccaagtaaataagacccaataattgaccactagatttggccacgtggaggttactggtaattttgtttgtttgtttttgtagagacagggtctcactatgttttccaggctggtcttgaactcctaggctcaagagatccacctgcctttagaaaattaagtactggctgggtgtggtggctcgtgcctgtgatcccagcactttgggaggatgaggcaggtggatcacttgaggtcgggagtttgaggccagcctggctaatatggtgaaaccccgactctagtta

SEQ ID NO: 170358 - DNA, 268 bp, Homo sapiens
caacttgccgttccgagagccacactatgttctcctgcctccgttatcttcatcatcctgtttcctctatgtgggaatcctccggacccccaggcctggcacacgtttgaggaaagaaataaatgatacaggaagattgccaggtggcatcatagggacaaggactgcttcatctgtggggtaccactgctggggagagccagagctgagaccctggatggagcagggtaccaggggttcccacgaggccatgcagcctgagatcagg

SEQ ID NO: 170359 - DNA, 555 bp, Homo sapiens
ggacacccagagacttgccgcgtggtgtagcctttactcctagagtctgctggggccaagcgtatgattcatgtgagcaagagagtgaacagaccttaggagagaagttaacagttgccacaggatccctagggagtgaggaaggcttagggaggaggtgaaggaaccatctccgtccacagaacagcaagtcagaggtccccagggatgagaagaatccagcaaatggtctagcccgccaacagacaggcaaagccctgcaactctgaaataagaactgggctgtgacactgcttcctctctctccctacactccaaacccaggaggactatctgagaagaaaaaggagaaattctgctctgggtaaggaaggagagaagttttctctattccctcctctgagcactggtctcacatcttcaggaagcccaacaggttagaagggtatgtgtgtgtgatctctgaggcttcaagattaacccaagttcaaagttttgctaatcacaaggcactggacattttgattgccgactaaagaatcttgatttttttta

SEQ ID NO: 170360 - DNA, 312 bp, Homo sapiens
atctcggctcactgtaacctctacctcctgggttcaagcgattctcctgcctcagcctccctagtagctgggattataggcacacaccactacaccgggctaatttttgtatttttactagagacagggtttcaccatgttggccagcctggtctcgaactcctgaccttaagtgatccagccgcctcagcctcccagagtgctgggattacaggcatgagccaccacgcctatccaggattggtgttcttataaaggaggttggagggagcttgtttgcctctcccaccatgtgaggatacagcaataggg

SEQ ID NO: 170361 - DNA, 497 bp, Homo sapiens
ctcgatctctcgacctggtgatccacccgcctgggcctcccaaagtgctgggattacaggcatgagccaccgtgcctggcccctcctgtgttctttaacacctcccaagcccaaaccctgttactggcagcaaatccgtgtgggtctgcagcaacctcaattcttgtctcctaagaagaaagaattcgactgaggggaataggcagaaggaaagaccaaggcagcctgggcaataggctctcatttagagcaggagagaaagtttattgaaaagctttagagcagggacaaaaggaatgaaagtacacttggaagagggctaagcgggcgacatgaaagacaagtgtgcagtttgaccttttgagttggggttttatatgttggcacacttctggggtcttgcgtcccttctccccagttcctcccttggggtgggctgttcacttaggcggtggcctaccagcgcctgggtggggagcatgcgcagtgtgtttact

SEQ ID NO: 170362 - DNA, 334 bp, Homo sapiens
tactgcctgttttacagaaatgactcacccatgagaaaaggcaaagaacagtagaaaacctgaatggtttattatagtgttatgtctgcaatttatggtcagagtcagtttgactctggtcttcacagagaaaataatacctgataagtctggatccagactgaaggaggaaatgtagtaagtagcagggaaatagtggtggggcacaggaaaattgtaagtgagcttctaaacataatggtgctccaaacagtcaaacatcataactcgtgtattttttatccgaagtgcttgaagctgtttcataaattccctagcacctcattatttgggt

SEQ ID NO: 170363 - DNA, 458 bp, Homo sapiens
cacgtcccatctgtgtaggaccccactgaaaatcggactgttcaactcacctggcagccactcccagagcccctggaactctggcccaaggctctctgactgactccttcccagatcttctcggcttagcggctgaagactgatactgcccgatcgcctcagaagccccctagaccatcacggatgccgagcttcaggtaactctcacaatggaaggcaggaacgtcaggcctctgagcccaagccaagccatcgcatcccctgtgacttgcacatatacacccagatggcctgaagtaactgaagaatcacaaaagaagtgaaaaggccctgccccgccttaactgatgacattccaccattgtgatttgttcctgccccaccttaactgagtgattaaccctgtgaatttccttctcctggctcagaagctcccccactgcaccttgtgacccccg

SEQ ID NO: 170364 - DNA, 165 bp, Homo sapiens
tagagcttaagtttaagtagagacaggcaataaacacaatacctaagtaaaaatccatagtactgtatattagaagataactaatgtggaaaaaataggacaaggtcaggaagatcagtagtgctggaagagtgcagtgttaaatagggtagtaagggtagattt

SEQ ID NO: 170365 - DNA, 302 bp, Homo sapiens
gaaataaatacttttcaacatacattgtcattatggttatatgttaataattctttggcttagactcgtagaagtagagttgttgaagcaaaggacttatacattttaataacctgtcaaattcttcaaaaagctattttaatttataatccctataatcactatcagtgttatgaaaaagcctatgttttgacaactcagaatttatacttttatttgcttatctaaggtatacaattttaatttaactttaaatttccctatttcattttagtttctctgattactaaggatatgaataa

SEQ ID NO: 170366 - DNA, 755 bp, Homo sapiens
tgagttatgggtcttcacgcagccagcatgctgtgttttgggctctgcctcttgtaatttttagaaattaattagtttattctttatttatatttatttatttatttattttcagatgggatcttactctgttgcccaggctggagtgcagtggtgcgatctcggctctctgcaacctccgcctcccaggttcaagtgattctcctgcctcggcctcctgagtagctgggatttcagaattccaggccatgaaagatcactgttttagtctgcgtggtgcagtggaacagatagacctcggtttgaatctcagctctactgtttactagacatgaaatggggaaatctaaaatgagatgccagaagcctcaaaaatggaaaaccccctgtgcttcacatctgaaaatctctgctgggggcagcaactttgagcctgtggggaaggaactgtccacgtggagtggtctggtgaatgcttaaggagctgcagaagggaaggtagtgaggagacagttaaatattgagcacgttttggtgcctagcattgtactggcctttcacatgctatgtttaatcacgcaggattgtatggaatgggattgtacagaatgaggcctgggtttgctaaatcctgggggagattgtctaagctgtcacttgaagggaaaactgtagcatgtgggacttaaaaacagcttgggatggagtttgaggtagggcgagagggaaaaagatcttggcagatacattctgaa

SEQ ID NO: 170367 - DNA, 105 bp, Homo sapiens
ggatggagacctccttctgcatatcccatcagtacccccaactctacaagccctacactgaatgtgtgatctccccgcaagtccatcattcctcctctaatggtc

SEQ ID NO: 170368 - DNA, 482 bp, Homo sapiens
tacagcaaggctatcccattcactagaagcttcagaaggtttaaatatacaaagcaattgaaaaacaagcagtgataatcagctaattaacatatcaaagaacagtaataacaaaactgtaactgcaatgaataatctaggtttgacaataattgacctgatagtttagtctcttccctcacctccacccaccattgtctactgtgcaaaggtgggatattaagtacctaatatgtgccagacactgaatctgtagacttgttctcatgggttcaaaaacttttttcaggctgagcacggtggctcacacctgtaatcccagcactttggaaggccaaggcgggcggatcacaaggtcaggagttcaagaccagcctggccaacatggtgaaaccccgtctctacaaaaaatacaaaaattagctgggtgtggtggcgtgagtctgtaatcccaagctactcgggaagctgaggcaggagaa

SEQ ID NO: 170369 - DNA, 311 bp, Homo sapiens
ggcagaggggaaccttccaccccagaggaaggaatttgagtcctaataccactggctgactaaagtgtcctggggctctaaataagtttgagtgtcagtcaggctacagagaatgttgtccttggaaaagccctggtacggcattggtctctgaggcagtgggcttgagatacaacccagtgcaacacctgctgcagtaatcacaggagtgttcacttcactctttccccaccaccaggcagtgcagtgcagggagagactccttcagcctgaggaaaggagaaggaagagatcagaagacttttttctta

SEQ ID NO: 170370 - DNA, 677 bp, Homo sapiens
gccactgcattccagcctgggaatagagcaagaacccatctcaaaaaaataaaaaatgaaatgtatcttgtggcaggtactttgagattatgtacatttcctgtttctcatactttcacaaactagtgttagcatccatcgatgattcctgtctgaaacggcttactgtggtggttgccgaatggtgatgtttgaaagctgtcgtcatcctctacacgttagagaactcttgtattttagagctttttctgctccccatctattcatttatgtatttatatttttaaagaaaaacttattctgacccttattaaagttagcaaggcacttagtgctttgggaggcaaggcaggacgatagcttgaggccaggagcttgagaccagcctgggcaacaaagtgaaacctcatgtctacagaaatttttaaaaattagccaagtgtggtggtgtgagcctgtagtcctagctccgtgggaggctgaggcaggaggatcacttgagtccaggggttcgaggctgcatgattgcaccactgtactccagcctaggtgacagagcaagaccttgtctcagaaaagcaagacaaagggcaggctgttcaggatgatcatgataggtatagggactgctgcaatgggattgtgtagtgggggagacctaggagcaggagtggggg

SEQ ID NO: 170371 - DNA, 368 bp, Homo sapiens
atgcctggcaccccatagagataagttgcagggactgccgtgaagggcatgaagggtggcccactttagtcatgcatttattcaatcacccaacaggcacagagcaggagcttcccatgttaggaattccagatgcaaaattatcagactcaatatggtgaagacatttttaggccactgatttctgtgtaatttgtgtccaatatttcaaagccatttaaaaaaggattttgactgcatgcctagtagctgtttcagatcattttttaagtacagaatggataattagtcttcagtgatttgcctcttaaatgtggccatttagtttgaactcctttttagttattttaaacagtatatgcttaaac

SEQ ID NO: 170372 - DNA, 290 bp, Homo sapiens
ccctgggtagatactccccttgcaacacagaggaagcttcatacccttggcagccagggaaggtgctctgctccaaactgcccaaggctgatcttgcatttgaatgatctaatgaggaagcagaaggcttaggtgcctctcccccagccaccattccctttaggaaatgtagtctcatggttctgatgggaaaatcatgaaattaaatattgatataatgaattccattgcaggaagtagtaattttaccagtagaaactgtcatttaattatatatgcatacatgcaaa

SEQ ID NO: 170373 - DNA, 471 bp, Homo sapiens
tggagtgaactttcactcactctcacctttgtaggtttctcaaaaacatatgaatttagaagcaagatacttggctttttcacatgactcaaaagaggtgtagaggaagagaagctccatcatcccacagatcttccagggtaacctggacacatccctaaatctccagctcctgggtctttgaaagcctgtttagggaaagaatttgtgattgtctcaaggttgagaggaaagagtttgggaaacaccaaggcatgggttggcaaaaagattacatcatcagtgaggaaatgaaatttccagaggtttttgccagatctgggaccagagacaaaggcctggatgaatttcctgtgtatttccatagaggtctgttatctagttgtatagagcctgtttcacaattaggctctttcaaatctggtatgttgatttaaatgccattataaataacttgataatgttgcctga

SEQ ID NO: 170374 - DNA, 419 bp, Homo sapiens
cagcacccactgcaattgtagatgataaaaatgaggcattcatcaagctaaccctttcgcctctagaatttcatgtgcactgagagaaaagtccattgatctacattcagctcttaaaaactgcacttgcttgttagaagacagaacatacactcaggaaaaacttcaggctgatactgctaagattttaacacatttataaaacttcccatcaatacctaatttattgagagtttttagcatgaagtgttgttgaattttgtcaaaggccttttctgcatctattgagataatcatgtggtttttgtctttggctctgtttatatgctggattacatttattgatttgcgtatattgacccaggcttgcatcccagggatgaagcccacttgatcatggtggataagctttttgatgt

SEQ ID NO: 170375 - DNA, 397 bp, Homo sapiens
cttgaagatgagcagcctgtggaaaatgatataatacatctatgcctacaatagagctccgcacagagaaagtgttcaataaacatttgctcaacaaagtaccaaaataatccccgactaggattctaagaacaaggaattggatctgttatatttgtattcctagcacctacacagtgcttagaacaatatgcactaaatatttatcttttaattggcatgcaatgacgacagtggaaaaaatggtggggctacaaataacatttcaaagacagaagcagaactcactgaccagaatggggaattgaaagaactctagtactatgcacagaaaaaggcaagtctagaagaggagttgagtttgaggaaagaagctaaatgtaagagaatagtatgt

SEQ ID NO: 170376 - DNA, 849 bp, Homo sapiens
tccccccacccaccaccccccaacacttagtcttctgaaaggtttgccaattttgattacctattcaaaaaaacattttcatttcattgatctttgtattcttttagtcttggtttcatttacttctgctcttttattatttctttctattaacattggtttgttttttagatgccttttttcacggagaaaaaaagaacaaaaaattgggggtttgtttggttttgcttttctagttccttgaggtgtatcgttaggttatttgaagtctttttacttttttgatatagacgtttattgctatacacttccctcttagaaccgcttttgctgtatcccataggttttggtattttgtttccattttcatttgtctcaagaaattttaaaatttactttaaaatttcttcattggtccatttgttgtttaatttccattaatttgtactgtttccaatgttcctctgattatagatttctagttttattccactgtgacaagataaatataatttcaattttaaaaatttgttaaaacttgttttgtgacctaatgtatgatcaatcctggagaatattccatgtgctgttgagaaaaatgtgtattctgcaactgttggatggaatgttctgtaaatatctgttaggtccatttggtccagagtacagtttaatgtctacgtttctttgtttcttttctgtctggatgatctgttcacattgaaagtgtggatgttccctagtattactgtattgcagtctatctctctctttaggtctattaatatttgctttatatatttgggtgctctggtgttgggtgtatatatatttaccattgttatatcc

SEQ ID NO: 170377 - DNA, 433 bp, Homo sapiens
ggtgcagggaaagaagtcgtaagagggaagttacacacatagttaaaaaaaaaagatctcaaatctacgctatacctcaaagaactagaaaaaaaaagttacacccaaagctagaagaaaggaaattctaaaaagatgacagcaaacataagtgaaagagagaatacaaaaacaatacgaaaaagctcaataaaagtaggagttgggccatatgggtttctcctgccccagcctcccgagtagctgggattacaggcgctcgctaccatgcccagctaatttttgtatttttagtagagatggggtttcactatgttggccaggctggtctcaaactcctgacctcaggtgatccactgctctcggcgtcccaaagttttgggattacaggcgtgagccatggcgcctggctgctaacattgttgttagttct

SEQ ID NO: 170378 - DNA, 570 bp, Homo sapiens
ctaaaggtaaaatgtgaatcctgaattagccgcaattaaatttttgacatctatgtgaatgggaacctaaaatatcaattattataacagaccaatggaacagagtagagaacccagagaaaccagatgccaagaacttacactggggaaaggacagtctcttaataaatggcgctgagaaactggatatccatatacggaagaataaaaatagatctctgtctttcatcatatacaaaaatcaacccaaaatggattaaagatttaaatgtggctgggcacggtggctcacacctggaatcccagcactttgggaggccgaggcaagcggatcacaaggtcaggagttcgcaaccagcctggccaacatggtgaaaccctgtctgtactacaaatacaaaaataaaaaaaaaaaaaaaaacccaacaaagaaacaaacaaacaaaaaaagatttaaatgtaagacctgaaactataaaactactcaaggaaaacatggtagaaatgctctaggatattggtctgggcaaaagattttggggggtaagacctcaaagatacaagcaacca

SEQ ID NO: 170379 - DNA, 239 bp, Homo sapiens
gttcttccacccaacgctcaagatttgcttcttcaagacaactctctgatcagctgagacccatagacacccagcttctaccacacatatgatggcattatcctagggcatggcagagcaacgcaagggaaaactctgggcccccaagtgatgtcatggaggagaactctcaacccagaactactacgtgagaaacaacgctctctcttctttaagccataggtgtgttgggaatcttt

SEQ ID NO: 170380 - DNA, 277 bp, Homo sapiens
atgaaggtgtggccgctggaagctgtcacttcaccactcctcttctgaagaaagagctgagccctgcacatgggagcattggtgaaaagggtggtagacgtttatcagtaaccttactggttttgtgctccatcctccatctcccaaagtccccctgaccttgccttcagctccaggaatggccacatgactcagacaaagccaaccagccatcccatttcagtggccagtgatgaatgattcagtgtttacccaaacgcatccaatcagggtgaat

SEQ ID NO: 170381 - DNA, 788 bp, Homo sapiens
ggaactgtcaggttcaatgaacaaagcgtggttgtgaatggaatgtcatggcctaagacaatgttagcaaggtgggtaagggtgcaggtcttgtgagtctgttaaagaaatatggtctactgcatgtgtgatgggaggcctttaagtggttttaagcagggaggtgacatttgctatccatttgttaaagatcactctgggctgctctgtgactactggatcataaaaagtaagagagggagatgcagggaaattgttgtggagattactgcagtagcataggctagagatgctggtggcttgaattggaggatggcagagagatagaaggagttagctggattagcaggtattttggaggtagagttgacagttcacagttcttgctgatagattggatgttgggatgaagtaaataaaggaaggtgtccggaatcatgccattattccagtttgaataatgaagtagatggtaagcaccttttagtgagatagggaaaactggggaaggaattgtttaagagggaagatttggagttgactctggacatacagagtttgaagagcttgtggcatccagatgaattggatgggctctaaagtcttttcgtctcctaatagaagaatgaagtctttccttttctgttaatgagttgctctttatttcctgcagacattctgatgtcaaaagcacatttagtttgttttactattgttgtgtatctgcaactcttctgcttgttgagtacaacaatgagttgctatgagaacacatggcaattcttgtg

SEQ ID NO: 170382 - DNA, 315 bp, Homo sapiens
caggggccagaaagctggtgacaccccttcagagccccgtctcctctggagccctcaggtttgatttgtcgctgctggagcatgagctccgagggtggcagttgcccccatccccacagtggccctctcactgggcccacctcagactgtcacaggctgggctccgggatccccagaagcccccgttgcagtctgggagcctcgtgcgtcggcagtgggtgagttatgatgtgagaaaatgtggggtgcagggaattggggtttccttttgagctcctgccccatctcgggcaccatcctcaccttagaaccgtg

SEQ ID NO: 170383 - DNA, 542 bp, Homo sapiens
ccaggttcttgctatcttgttgctccactgtgctcaccctgtggttgagtctgctgctccagtgcccacactcatgtccacacaccagccagtgagagaagggaaaggaccaaggggaagacacaccccctcctttagaggcatgatctaaaagtgacacgtggccttcactcatacccctttgaccagaatgtagtcacatggtcacacctcactgggagagaggtgagaaatggctgtcacgtcatgtccagtagttgtcatgtacaactgcgatgtgtgtgttagggaggggtagatatccgaggacaactagtaggtgcctgccatagcatgtgaggtccttttcagttttaaaaataaataatgtgtgcaagttccatgtctaattgcctattaacctatgaaaaaaattcagacactatccctcttgtgcagatgcctgtgtttgaaggtggcagaggaggtagatggaagaaagcccagcaggggtgaccttgtaaatttcgacagcatagtctgatggagtgtattcttttgtg

SEQ ID NO: 170384 - DNA, 201 bp, Homo sapiens
gtggttttggtgaaagcaaagggaaaagaagtaggagactatggatgctagagaaagtaatggaaaggaaacagtgacctccagaaactagagagatagaaacaagggcacttacaaaggggttggttttgtctccactgacaccaccatcttgtctcctcctctggcaccatggtggcctcctatctaatctagtcatat

SEQ ID NO: 170385 - DNA, 367 bp, Homo sapiens
cgcccggctaattttgtgtatttttagtagaggcggggtttcactgtgttagccaggatggtctcgatctcctgacctcatgatccgcccgcctctgcctcccaaagtgtggggaatacaggtgtgagccaccacgcccggccggtaacagtaaattttaattgtatttttaccacaataaaaaaaaatcctgatagacagatctagaacaaccatctcattttttactaacaaggaaactgaggtcagacagcagaaatgatggctgtgtgtggtggctcatgcctgtaatctcaacactttaagaggcctagttgggtggattgcttgagtctgggagtttgagagcagccaaggcaacatggta

SEQ ID NO: 170386 - DNA, 667 bp, Homo sapiens
tccattccagtgtcaatcaagttataaaaaaaatacgaaacacttactatatgctctgtcatgtactaagtgttttgagagccattagtttatttaagtaccaaaatgaacctatgaataattctgcctctgaaggaagagtttctagtttcaaatgctggctccatcattggcatataacctgactttatcacgcttcaattttctcatctagaaagcgggcataataaggattgttgtatttagtgagctaatataaaaatatgtgtatgttaaaaacacataataaatctaacaagcacaccacaaaacgaatagtaaatatatttggtactgcaagttggattttcaattataatgaaataactgactaacaaatctgtccgttctccaaaaacaagtagaaactgcatgaaatatttgaaacaatgatttttgaatcatgagtcacaggaaaacatataacaatggccaatgagagaaggaaaattagcactgtgggtgacacagccaacccaaactctgtctggcggcagtttcctgatcttagtgcagacaagggaactgaaacacaacaaagaacttactgaaatgtagagataattgaatttgggtaggataagaagtctgaaatttgtaaagcagaatttgtaaagagaagcagatc

SEQ ID NO: 170387 - DNA, 120 bp, Homo sapiens
ggtccccaagtgtccttcgtggagttcttattccgtgtgagcgaatcgtgcgtcggtgtttacttagctgtatggccccagcctgttaactgtgatctgttctacttctggagatttcta

SEQ ID NO: 170388 - DNA, 699 bp, Homo sapiens
cagcgtggggtcgcccggcagctcctccccacagagggtgagccaccagtgcagaggccactccacgaagaggcagcactgatgagaccggagcgcggctctgttccccccgtgcgtcctcccttgtttaactccagcagttgattttttttggaagccacagcgccccgtcatttctggttttaatcagcgcaggagctcagccgctggaccacacgttgtctgtgagccaggcagggtgcggactggagctgcagagttaacaaggttcctccagatgccagcgggggaggcctggggcggccagtggagaggagtgatcgttaataaggaacgtctggtcaaccccaagcccctcccagcggaggaactgagcaagccaggagccctccctcaactgggcagcacagggggattctgtaagcagagctgccctggcggagctgctcgggaggggtggggccaaagaaggggccggatggacgttgctggggtccctggagggagctggggggtcagaggtgcaggcagacagggaagacaaaggagggaaggaggagtggccgctgtggagctgctgtcctgcctggggaggccatgctgtcttttgcaagaattaaacgacttcctaagagagcgacggggagagccagactgcaggagggagggagaggcagagactgagaagccacagccctc

SEQ ID NO: 170389 - DNA, 348 bp, Homo sapiens
aatttatttcctgttctttctctttttagctcccaggattgctagagctccttgtagaatatttccgacgatgcctgattgagatctttggcattttaacaggagtatgaggtggggaagaagaagaaagaacaggaaataaattaagggagaaaagtggcctaagaacagaattattgacttgagagacctccccaagtcttctgtatcagttgggagaggcagagttgctcctttcccaaaggttctccacagagcaaattgttcatcttaatctcttctatgcccaacacaaagttctttcttctgcccaacctaccttcacgtaagcctatctccaggaacact

SEQ ID NO: 170390 - DNA, 650 bp, Homo sapiens
aaacttcgaggatccccgacgagttgtccgagttaaaagaactcctcagtaaaagaaagagggagagagagaaaaaaaggaaaagaagagaagagaaaagaaaagaaaaaagaaaaggaggaagggaggaaattgtgtcctatttatctttgtctttccagcaccaacccagtgctggccctcaataagtgcttggggaatgaaagatcactcgatcacttggccagtaaagcatcagaaccatggtttgatgccagaccctcctatgccaaatcccaagtccaggccattccctactcttctgcaaacagggggtgactggagaggggtagcaatagtagagaccccaacctgactcagcactatctgtatctgaactgaattacagaattactgaattacagggcacagtgaaagaacaaaacttcattaatcagaactctgcaaattcagggccgggcgcagtggctcatgcctgtaattccagcactctgggaggctgaggcgggtggatcacttgagatcaggagttcgagatcagcctggccaacatggcgaaaccccgtctctactaaaaatacaaaaattagccaggcatggtgatgggtatctgtaatcccagctactcaggagaatcacttgcacccaag

SEQ ID NO: 170391 - DNA, 208 bp, Homo sapiens
ctcaagattttaccatccttctacattctgcaaaagggattcattaaaagtttttaatcctttcaaaaaataggtactataccattgaaaaaaatccagactctcaaaataaatcctgaatggtttcttaatgttatcatactccattaaaaacagaaaagaaattcaaatgtgctaataaatgtactacatataccggaaaaagaat

SEQ ID NO: 170392 - DNA, 525 bp, Homo sapiens
ttgctttgtgatattttggggatgggactagcaaatagtggttttccccaatatcctgcctttagcagaactagatttaaaccattccaggcaaatgagaatctttaaaaaaaaataacttttttattttgaaataatgagactcatagctgcaaaacagtacgtagtacaaagagacccacgtacccttcacccagcatctcctaatgacattttatttcactgtagttcagtatcaaaaccagaaagttaacatcggcacattaccgttaactactggactagagaactcattcagttttcaccaacttttagcttgtattcatgtgtatctgtgtgtagtacgtatgtgtctgtccgtgtggttctatgcaattttaccgcacgttcagatctgtaaccagcaccacaatcaacatacaaaactattccatcaccacaagagaaatccattatgccaccactttgtattcacccccgttctacctgcctcaccccagtccctttaccctggcaactactaat

SEQ ID NO: 170393 - DNA, 109 bp, Homo sapiens
ctataatggccaaaaccaattttcagattgagaagaaaacataaactttcatgtaaaagattgcacaaacaacctgatatgtaaatctagctccactctactcttgcct

SEQ ID NO: 170394 - DNA, 452 bp, Homo sapiens
ggtgcaaatatgcacacacacaaaggttcttgcccggaggtgtgccatgaggaacgtggtgctgtcggcggatcagcacaagtaaacaaagaaggccaggcatgaggtcctgtctccagccaggtggaccagagtgggaacagagggagcagagagggaagagtgagcaggagaggctgtgatgaacttgtccctgaccagcgaagctatctgtcctgcggctggcagggactgtctcctgggcaccttggtaaaagactggtgattagttagttacaagctaagcagggctgagagtggatgtaaaggcgccaaattagctcttaccatctctgggaactagtacaaagtgagcttttcatctgctgaaatgctgtttatgaggcagtaaaatccagagccaagaggcatgaatgtatcctggttagggtaatactctcctgggcaagcag

SEQ ID NO: 170395 - DNA, 210 bp, Homo sapiens
tagacagggacttactctgtcaaataggctagggtgtagtggtgcgatcgtacctcactacagcctcaaactcccaggctcaagggatccgactgcccctccctcccaagtagaaggatcactggagcctgggaagtcgaggttgcattgagctatgatcacgctcctcttctgcagtctttggtgacagttgaagacgcttgtgttgac

SEQ ID NO: 170396 - DNA, 610 bp, Homo sapiens
agagagtggcataatataattgaaatgccggaggaaaacaaacacaaaaactaccaatcaagaatacttaacccagcaaagctatctttcataattgagaaggaaataatactttctccctcagtttcatgaaacatatgaattgcaaaactcaatggtatatgtaaaatagtgccatattcagaaaactgtaggactgtaataatggtgcataaggcaatttcatccctagtacatgagtcaaaaaacaaaaatattaatagcagctatagctaaaataaattatcaaggtatacacattaaaaatgatgtaaattctgccattaaaaacataatgttgagggggtatgaaaaagtatagaattgttgtatgcaaagttaattgttgtatgcaaagttaagttgttatcagcttatacttgattgtttataagctgttatcagtttatacttgattgtttataagatgttctgtgtaaacctcatggtaatcacaaagcaaaaatctttagtggaaatataaagcaaaaatagaaaggattcaaagcataccactatagaaaaccatcaaatcacaaaggaagacagcaagggaggaagacaaaaaaaa

SEQ ID NO: 170397 - DNA, 368 bp, Homo sapiens
ttagggcagatagaaacggcaaaatcattgtcttctgatcaccacccctactaattattgcagtgaagcctccttgcccatgtagaggtggctgggacagggcagaagaaggtggctgggcaggttggctcagagccccctgagatgggggatgaaggaggttaatttggcacatcgaaccccctcttctcataggagctttgaggtccttctcttgaatccagttggtaccgccccttgggctagcagaggaggagttgagcttgtctcctcctccccagtttccatagatttgccaggaagttggcaagtgggattctccttggctggtggaatttggggggacccaaaaggataggggtaagttg

SEQ ID NO: 170398 - DNA, 679 bp, Homo sapiens
gggaaggatgtactcgttatgaagcacatctccgctgtagctgacagtgctacatggaaccaagaaagtaacatgccccttgggtcctgtgtccagcatctcacagccaattgccactattcttccttggcaacttctgggatgctccaaagcatttattctgagtgagcttgggtagagttctgtggggcgctgagctgagaggatttgttctggaggcctttcttctgggagtgggtcgggtggctgttaatctttagaagggcacctccagcaaatctacttagctgcaacagaatcagcattctttgaaggggcaggggacagccatgacaccgcagctttcctgtccaggactcttctgacacactgctggaggcagctgccttcttttctgggaagggaggggtcttccaagtgccatgcaccctaggagtttcctctttctttggaggttctgagtgcaacttgggtgtcttgctagggggctggttctttttattcagaaagcctctctgttccaaaagttgccatttcttaacaaaattttgtgcttggcagttctttctaatgcctttttgggaggaggttccaccaaatcccgattgaggagtcaggtagacatggggacagtgggtggtggagggtgtgagggtggggtgggggagtgggggaatac

SEQ ID NO: 170399 - DNA, 192 bp, Homo sapiens
gctgctccctccttcctcgactggtccccgccacgccctccttccctgactggtcctcgccacgccctcctccctggtgctgacagctctgtcggcatgtgactgtgcctgtgagggttgcattggtttatagtttacacataaggaggctgcttttctaaaggaaatacaagttttagttgaacttgtgga

SEQ ID NO: 170400 - DNA, 579 bp, Homo sapiens
tttaaactcaaggagattaaggtaggcaataatattgcaattaagatgctaccattcaataaaagcttctactctgtatttttttcaaaacacatgacaaaaaaattaagcaaaagatagatttctttaaatccaacatgtacaataaatatactattctctatactttttcactccatgagacgcattcaactaaaaataacatttaacggtcattattctaattgtctttatcttcattcttagcaattatcaatgtcatagaataacaaacccatgatgacactgatgaaaagtatggagcaagctgtggaaccacagcttactggttgggaataactgattgatctagtccaactcgtttctctaaagaagcagcatcttagggcagtaagggtaaaaatcttgaccaagattcactctactcataggaggtagccctagaaatacaataaagcttttcatcaattacccccaactttgtggaagttaaataagccttctctgtgaaatctttgaaattagacatatcttcatttttgagatatatcaattaggaagagagccagttacctacaa

SEQ ID NO: 170401 - DNA, 128 bp, Homo sapiens
acaaagtttaaaggcagtaaatgaaatgaggtaaaatggagcactggtgttatgtgccttttcatatgagcctttacatataattatttgatccttttgttattgtttgggttagtgttttaagccct

SEQ ID NO: 170402 - DNA, 627 bp, Homo sapiens
ataagtaaacacttaaactacgtgaatggtttaatattgattaaacaatgatctccaagactaaactctaagcatggtaggtagaaggctctggaaggagaaaaaacaaagagtgggcttaatggtgtgcattgatttacagagaagtgtggactttgacctgccagatcaaaatcaggatttgcaatgattacccaaaatacagtcctagggtcccacccctgcaagctgatggtgaggctgggggctgaatggtcagggtcaaggatcaagttcttccctcagaaaggccagcttctcatccacacccacttccagaaatggaaactcaggcaaagtgtgggctcaaattgcatttcatttattgtttctaactacgggccacagacttcaacttgattagaaaattgtgctgacgcttcctgtgaagcatatcctgagacttccagaggaacttcagaagggaattttttgcacgtacccacttcttccaaatggcattccccctgcttggcagagcctgtggccacacatctgcccagacgcctgggcaggagactctgccaaggaagcactgttgaccagcttcttgggctcctgttgggagagggaaggtaggttccctct

SEQ ID NO: 170403 - DNA, 609 bp, Homo sapiens
ggagagcctctcctctggggtggctttcggacaaggctctgcttccccactggcccagcgtctctggctctcccgctgtgcggtctccagggctctgggtgctgcctggcgctggtgcaggcgtggcgcggctcgcaacgctccctgcagctgccatcgccccacaggctttcatacctggtttgggtggttcatttaatgaggacagtgggttctcgcgaacatcatggctggtgatttcctcggcagccttcaggggctgagaagactctattagcagcggccttctgcattcctccagcgcaccgggcactgtcatgcccatcggggtgacaccctcaggccccgtacgccccttggatgatgccgccagtgacgtgggggctcctgttgggtttctcccagtcggggacggcacttgctggctgctggaggcatggctggtgtttcccctcagaaggttttgtgaggctgcaggatcatttgttgcggagcccttcttctgcattgatatttcattagattccggcaacggatgcttcacatctctgagctcagaggtcctctctcctgaaatatcgtcaggattcctgggaccgtgtgaattct

SEQ ID NO: 170404 - DNA, 160 bp, Homo sapiens
tctggattcatctcttgattatctcccaccttcgatgcaggagcctgccacacctacccactggaactcaggaggagggcgggaaggaaggcctgagtcagggtttttaggaggagcagtaattcaaacatttcaggatatgccgcctggaggttctttg

SEQ ID NO: 170405 - DNA, 177 bp, Homo sapiens
tgaggaaggcgcttctcccgggctgctggcactgacgattgtttgctgagatcagaagtgaagacaagctctgctgccaggcgctcgccttgtgccaggctaatgcctgaagcacatctttccctcagtcctcacaacaacctgggaagtgactgcgtctttccccatttgacagag

SEQ ID NO: 170406 - DNA, 402 bp, Homo sapiens
aatttttttttttcaatggagtgggggcaaataaaagtaaagtgactttccacgcatagcagatccaatatgctcaaatgtcacccaaaggagtagagttaaagccatggctggaagttcatgagcatcaatcctgactcagtatattgaagagtattttagaagtaaaagctgtaccaaacatgggattagtcttcttgtcattcattcataaactttttatttctttagagatgaggtcttgctatgttgcccagggtggactcaaattcctgggctcaactgatcctctctcctcaacctccagagtagctaggactacaggcatgggtcactgtgccctgccgagaattcacaaacatttcttgagtgaagactctttgttatgcatggtgctagatt

SEQ ID NO: 170407 - DNA, 227 bp, Homo sapiens
ccaagctggacttgaagtcccggcttctagtgatccacctgcctcagcctcccaaagtgttgggaatataggcgtgagccactgcgcccagtttaatctgtcttttgttcaagggtctgttggatacagtgagttctagatttctcttagaggactcagcatgtatgttcagttctttgttctccatttaactcgtgcatagtttcagtaaacaaccttttccacca

SEQ ID NO: 170408 - DNA, 291 bp, Homo sapiens
ctcagtcactggggtcacaagagtaggcagctaaatgtggcctggccagagacagcactcattcctgcttcccacctgtgagacaaggtgtatgtggccaaggagaggccttccatgagactcagaaggtgaggagaggcagagaaatggcttctctcacctgtcaatcccgactgataagggcactgactgtggctgctgcagccatctttcccaacacagaacaagggcctaggaaggaagccagcactcccaggaaagccagtgtggagagagacagtgtggagagag

SEQ ID NO: 170409 - DNA, 432 bp, Homo sapiens
ctcatggcttggtgctgtcctcttgatagtgaattctcacaagatctgattgtttaaaagtgtgtgccacctcctccctctcttggtcttgctcctgctcttgccatgtaacacacctgcttcctctttgccttccactataaggtttctgaggccctcacgagaaaccaagcagatgttggtgccatgcttgtatagcctgcagaaccgtaaaccagttaaatcgcttttctttataaattcacagtctcaagcattcctttacaacaatgcaagaatggcctaactctgcggtcatttctccagtccctgaatgtatgaatggaatagatacactgggtatttggcccaaattctcatagtgggttctttacttatgagacaagagccatcgaagtagcgaaggtagaagcctctgaaaccgccctcctg

SEQ ID NO: 170410 - DNA, 628 bp, Homo sapiens
cgtggctaattcatactcatcctttaacactaggcctacaattgggcatgattttgtagatgatggaaacattctaaatttggattatggtgatggttgcagaaacccataaactggctaaaaatcattaaattatacacttcgagtgagtggatcttatatgagttctacctcaataaagctgtttaaaaaaatcaagcactagcaacacttctccaagaatcctccctggtgacccaccccatccagtataagccacaaatactccttttctgtgtcctagaacatcctgaacatacctcttcacagcacttaccatactgtatttcaattacatatgcatgtgttcaccttgctaatggtgagctccaaaatttaacactacctatggcacacagtaagtagtcaaatgtttatttaataaactaattggtatcttttctgttctcaacatatttactgctgatgagacaaatattagaagaaatgaatcttgccctaagccttaagttctaattcaggaaataaagggaatcaacaatttatttgagttcctgtggcttctggaacgttcacatacattaatttagctaaccctgtgagaaaagcagtatttttccatgtttat

SEQ ID NO: 170411 - DNA, 510 bp, Homo sapiens
ggccctgtccctacttccatctccaccttgtcctactctggttaaatagggagtacattgttttgccatatttctgttttatacatttctaggactgaacattttacagcaaacttgtattgcctttgtatgttcaagaaaaattatttttagaaatttaagcctgggcaacatagtgagacccagtctgtacaaaatatgaattaaaaaaaacttaaaaaatcagcaggcatgatggcgcacgcctgtagtcccagccacttggcaggctgaagtgggagggttgctcgagcccaggaggtcgaggcaggagtgagctatgacggtaccactgcaatccagcctgggcagcagagcaaggccctgtctcaaaaaataataataaaaataggccaggcacggtggctcatgcctgtaatcctagcactttgggaggcagaggcaggcagatcacctgaggtcaggggttcgagacctgcctggccaacatggtgaaatgccatctctact

SEQ ID NO: 170412 - DNA, 274 bp, Homo sapiens
attgattatagtccagaaaattgagcttaagagggggttaagtaaattagaataataaacttaatacgttctactagttctatgatatgtcaattgtactgtaagaaaactgttctgtagtcaggaaaatttacatttcactaagttaagtaaaattaattattaccattaactataaggacaaatttaaatttcaggactgaaggattcactccttatagttaagtaaaattattactattaagtaaataactattgctacttacatagtact

SEQ ID NO: 170413 - DNA, 380 bp, Homo sapiens
caagtattctaatgttggactttccaataacaaatataagtaatgagtagaaaagaggacctcaaaattacaggcgtctttgagcaaactcaaaaccttgcacatgtagaagtctggacctgagcggtaacaagtagttctgggagccccagggcaaaggaatgagggtgcatgccatgcggacactctcccagcctcacctcagttaaaacggagatgagaatctctgttctaccaacctcatgggattgtctggaggatgaaataagagaatatatacatgaaagagccttgaaaagtgtaatacaaagcatgatacaaaacaaaagggagtcctgactggagcgaggagaaaagcggccagtggaggggagcggccg

SEQ ID NO: 170414 - DNA, 168 bp, Homo sapiens
catgtcttccttaattccttatatgattttcccctttctgcaactatatttgcctgtgagaatatttctctgttttcactgagtttaaaagacttttctgagtcacttcatatgaacaccatcaggcatctttttctagaaaacttctgcactatcttaattttctct

SEQ ID NO: 170415 - DNA, 243 bp, Homo sapiens
gacaggtgaaaatcacagagtggcatgaaaatttccaagaatgtctaggtaggaaattccaggtaggtgccagtgcttagctttgtttcagggagcctccagcttaaaaatgcctgctgacatctgttgcctgtcccctgtatttctggctagggcaactgtccttaaataatacttgagccattgggggattttgaagaatttgggtaaagaaacgaagagagaaaagtttctctggaaagg

SEQ ID NO: 170416 - DNA, 303 bp, Homo sapiens
catgtgttggaaacttcattccccatccagcagtgttgagggggcggatttttaagaggggatgggtcacggggccctgccctcatgaaagcgttagttatcgcaggaggggttcctgataaaagaataagtacaggccccttcccctctcttcctctcctgcaggcaagcatgccctcttgcccgtccaccttccaccatgggatgatgcagcaagaaggccctcaccagatgtgggccccttgaccttggacttcccagcgttgagaactgtaagaataaatctttgttctttagaaatta

SEQ ID NO: 170417 - DNA, 386 bp, Homo sapiens
aactgtcaaaactcaacaacaaaaaaagtgaacaacccagatagaacatgagcaaaagacatgaagcgacatttcaccaaagaagataaacacatggcaagtaggcccatagaaagatgtacaacattattggtcattagggaaatgcaaattaatattccaataagacaccaccacacacctatgagaatagctaaaatcacaaaatgacggcaacgtcagatcctggcgaggatgcagagaaacgatcactcacacattactggtgggaatgtaaagtgacacagctacacggtgccaaacagtttctttacaaatggaacatgcaaccaccatgcaacctagcaattgaactcctggcatttatcccagagaaataaaaagtt

SEQ ID NO: 170418 - DNA, 307 bp, Homo sapiens
tggtattcccgccccctcccccctccgccacatttaggtctttaatctaccagtttttaaaaatatggtgtgagaagggtatataattttttcacatacagacatgcaattgtcctagtgccatttattgaaaagttactaatttctccactgtgtcacgtatcaagttctcatgtatctgtttctgtaccatagatttacatgtctatcctggcatcacaagggctgtgttatcactatagttttataagccctactgtcttttatgataggtactcccctatttttcctgtttaaaaaaaaaaaa

SEQ ID NO: 170419 - DNA, 342 bp, Homo sapiens
aagacacatagcggggcttcttgaagtgaataaagacaaggatttgtcctggggcatttgtggaaaacgtagaggtcctaaaatatttcattgcagaagacccatttggcagggggtaccaattttcaggactgtcctttacactggggacttcagagcaagaatgtattgcatactgtgtaataacccaatggaatccctgattacctatgagtaacaactatggtaataagtactatttatcagagagtaatgtagactctagagacgtgggacatcaggcaagttgtttaaaccctctttgtctcaatttcttgacctacaaattggggtaataacagt

SEQ ID NO: 170420 - DNA, 795 bp, Homo sapiens
cctggcattttcaccaccccgtaacactgccaaattactagtttactaagttccaaaaggttgaccaccattcatccatcctgttttataattgggcttctgggaccaagtgggtaccttctattaccccacagctatacccttgtgcttttcccatcatctttcctcctcaaacaggccccagatgctaaggaatggcagcatagtgacggaatttatcctcgtgggctttcagcagagctccacttccacacgagcattgctctttgccctcttcttggccctctacagcctcaccatggccatgaatggcctcatcatctttatcacctcctggacagaccccaagctcaacagccccatgtacttcttcctcggccatctgtctctcctggatgtctgcttcatcaccactaccatcccacagatgttgatccacctcgtggtcagggaccacattgtctcctttgtatgttgcatgacccagatgtactttgtcttctgtgttggtgtggccgagtgcatcctcttggctttcatggcctatgaccgttatgttgctatctgctacccacttaactatgtcccgatcataagccagaaggtctgtgtcaggcttgtgggaactgcctggttctttgggctgatcaatggcatctttctcgagtatatttcattccgagagcccttccgcagagacaaccacatagaaagcttcttctgtgaggcccccatagtgattggcctctcttgtggggaccctcagtttagtctgtgggcaatctttgccgatgc

SEQ ID NO: 170421 - DNA, 354 bp, Homo sapiens
ggggagttggggtgaagggtcccttcagatccaccacctgctacctcaggagggagccccactgtgttttgagtcggagtgggcagggggaaatccagtatcttgctgtacctatctacactaaggcatgaagtaacgtctagaaaaacagttctcggctggttgtggtggctcacacctataatcccagcactttgggagactgaggctggatgatcgcttcagtccaggggttggagcctgggcaacagagtgagacctcatctctattttatgaaaaaagttcaaaccacctgtgtggggaagaccaggtctctccacattctagctagcttcccgcctctggcggctttt

SEQ ID NO: 170422 - DNA, 453 bp, Homo sapiens
tcttcccctagtttaggtcacagcagttgagtcagggtatcatgctatcgcagggcacaaatttctatcatcatccatagatcactggattagttgaaaaagtcactcaaatgctgaccaggagcacatgaacttctgtttatttcggactttctgataaatggtggccaggtacacaaggttgaatctgttaaaattcactctaaaacacaatttgtcaaaaggaattaaaaatagcagaaaaaaagtccatttaaaccacacacccaaatcgactgttagtgtggactctcagttctaaatagtaaagaaaaaataactgccattcccacaggtttctgtgttcccatctttcctaatgacctttcctatgacatccttcatgcaataaatacagctcaacctttcagccaaaaccctgtagttctaggctctttcatgataatgatgaag

SEQ ID NO: 170423 - DNA, 368 bp, Homo sapiens
tttttgcatttttgaagagatagtttgccatattgcccaggctggtctcaaactcctgggctcaagctctctgcctgccccagcctcccaagtagctgggatcacagactcatgccaccatgcccggccaaattttgtattttcagtagagatgggatttcaccacgttagccaggctggtcttgaactcctgatctcaggtgatctacctgccacggccttccagagtgctgggattacagacatgagccactgcacccggccgaacttttatcttgaagtagatagtgtcaacaaatacaaaaataaaaataatgtctttaaatgaggtgatgtttagagctatatccatgaaaaatatgggatag

SEQ ID NO: 170424 - DNA, 388 bp, Homo sapiens
acaaccaactagatttaattgacattattggaaactctatacgacagggaatgtacattctttccaagtgcacatgaatgttcatgtggatcatatttggggacataaaaatctgaaaatatttacaaatgtggaaaatataaatatcatacaaaatgtatatctcaaatcataataaaattaaactagaaattaataaaagaaagatacttggaaaatgcctaaatatttagaagttaaacaacagacttttaaataatgtataggccaaagaggaagaatcaggggaaatttttaaaacgtattctgagttgaataaaaataacaatataaagcatcaaaactaatggattttagcttaagcagagtttagagggaaatgtataat

SEQ ID NO: 170425 - DNA, 734 bp, Homo sapiens
gggaagccttctgggagatgaggacacctaaggctgggtagagtttttccagctgaaggacattgaggtacatcctagtttctatcatcaggtagttcgttaggctatttcatatattcatgcccaaattagtggtttgggctgtgcactttctgaggatggagacaattcaaatgtctaccattgtcaggaaggtaacacaagtgagtgagacaggaaagatgtgagggacgtacactatagactgaagactgctcctctctaaaggggcagggctcctctgttgcagcctagcatttctgggcaagaatgcatgccctgtgtgatcaggttgtccaattttgtaagaggagccagaacttctgatttttaggtaaatatctactgatttttaaatgctgatcccttattcatctttttaaataatccagatcccaaatatgggctccgttgatgagctgtctcttaacttcccattggtcttttcaggccagtgcttaatgggatccttcactaccagcactcaggctcccattgctccagcacccactccactgaggctctttctaggaattgatgtggttatttactgagcctcgagagggcttactctgataccacaaggatttgggaaagtacaacagattttagagccaagagactatgagtggtctaattctccttaccactgatgataatgatatatttttttcttgattgtgactaattatatg

SEQ ID NO: 170426 - DNA, 889 bp, Homo sapiens
attcccatagatgagtggacggcagagatcactgtgtattccccacaacagatcatcaaagtgtatgttggaagccactggtacgcaaccaccctgcagacactgctgaagtatccagaactgctgtccaaccctcagagagtgtactggatcacatatggacaaaccctgctcatccacggggatggccagatgttccgacacattctcaacttcctgagacttggcaaactgtttttaccatctgaatttaaggaatggcccctcttctgccaggaggtggaggaataccacattccatccctctcagaagcccttgcacaatgtgaagcatacaagtcatggactcaggagaaagaatctgaaaatgaagaagctttttccatcaggaggctgcatgtggtgacagaagggccagggtcactggtggagttcagtagagacactaaagaaaccacagcctacatgcctgtggacttcgaagactgcagtgacaggactccatggaacaaggctaagggaaacctggtcaggtccaaccagatggatgaggctgagcagtacactcggcccatccaggtgtccctatgccgaaatgccaagagggctggcaaccctagcacatactcacactgccgtggcttgtgtaccaatcctggacactgggggagccaccctgagagccccccaaagaagaaatgcaccacaatcaacctcacacagaaatctgaaaccaaagaccctcccgccactcccatgcaaaaactcatctccctggtgagagaatgggacatggtcaattgcaaacagtgggaattccagccactgacagccacacggagcagccccttggaggaggccaccctgcagctccccttgggaagcgagg

SEQ ID NO: 170427 - DNA, 706 bp, Homo sapiens
ctaattacattattccttcttgtactacattgccacttctttggggtttgggaggaaaatgaattttcagtctatcaacggggaagcagaagattttactcatctcatcactatttttaacaacagtgcagtggttatcttcatgtgtaagtcagtctacatctctagatattttctcatggtggttttctagaaatagataaactgttcagattatgaatttcttgactcttgatatagatattgacaagttgattcctcaaaaaagtaactaatttatattcttagtgggttattcaataaaaggtgggagcagttactcaagggtacctacattcacatctgaaccccttatgtgggtcttgtatctcagcttctgtggaaaatttggcctcttttctgaatcactaaacttttctgggcctcttttatttgtaaaactgggataatcataccctgaagtaatgtatggaaaagctcattgaaagtagtattttattatttcagcaagtgcttaagagcctcctacttgtactaaatacatgttctgtactaggaactatggaggatgtctaaatgatgtgaacctgggcctcaaaaccaatttacagcgcggtggttcacacctgtaatcccagcactttgggaggccgaggccggcggatcacgaggtcaggagatggagaccatcctggctaacatggtg

SEQ ID NO: 170428 - DNA, 848 bp, Homo sapiens
taatttacggggtcacaattaaacccataatacatatatatctcgatcttgcaacatatattatctcgatctttgcaacatccattttctccatgttatagatgaggaaattggcttagcatggttaagaaactagcccaatatctcacagctagtaggaggtagcactggaatttgaaccaaaattttattggctctgaagtctgtgtccctaagccttaattatgatatgaaactttttttcctgtaaggtaacaacaaaacaagaagaaaagagaatgcctggtttatttatagggctaatttaaatgtgttagaaatgtaccttgattattttcgtgcttgggaatggtaaaataatctcattttgcattgtgctaaataatgaatttttttgctttggtggttgtcttaaatgtgaccacatgaaaaccttgcacaggcagtcatctcagttatacatatagtctttgttctaagttgaaataatagcaatgttgactgttaaactgtttttaaaaataaaatatatgattttacctagattaaaaaaaaaaaaaaaaaaaaaaaaaccttttgggcgcgtgcggccccagaaaggttcaaaccccttctgtggcgcgggccaataggaatggaacctggccaacgtggaccaaagagctggcagcaggcgggtctcccccaaaaaaacgccgggaccgccttcgccatcaaggggtcgcgctcacgctcaacaggtcacacagtacccctctcgtgggacagaagcaggaaacagccgcagacaagcaccggcagagagcagcccacacaccagcacacagacgaacaccacacagaccacg

SEQ ID NO: 170429 - DNA, 824 bp, Homo sapiens
agagaaggaatctttatctgtttctcctttcccaagggcaatgccattatttctgtctctcatacagactggctgtgagagctgcataaagggccatgtgttgctggagggaagaaagaaatgcaaaagagacttcttagttgttgtggtccagcatgaatagcgcatggaatcatgggcatgaagtgggaagatagctggaaggtggatggtacaactgatggggtaaaaagtagtcaagagatcaaatgcatttcaccggacttcttaggctatgagggaccaagaagtcattcagaaggtgtggtgccctccgcacaggaagcagacactcggccaccttctccctgacccactgcgatggctaatttcattaaccaatgtcaacttgccaggattaagggattcccagatagctggtaaagcattattttgggtgtgtctatgaggatgtttccagaagagactggcattagaatcactttaaggtcctggatagaataaaaaggcagaggaaaggtgaatttgccctctccttcccattctcctggagctagggtacccttcttctcttgctcttggacatcagaactccaggctctctggcttttggactctgagacttgcaccagtggcaccccaggttcttaggactttggccttggactgaaagttacaccttcaggttccctggttctgaggcttccagagttgaactgagccacactgccagcttcccccattctatagcttgcagatggcctgcatgcgactcagcctccataagcgtatgagacaactcctctgataaatcccctcttata

SEQ ID NO: 170430 - DNA, 341 bp, Homo sapiens
cgagtaattaaatgtccgaggtcacctctgactccaacaccaacaaaagccctcaaaatagctactgtctcctgcctccaataagaaactgaaccaaaaataataaggcaaagaaggaagaggcagaaaaaatccaccagccaaggccagaggtggagatgataggttgcatgctgcatcctgcattcctcacagcgtagcaacagcagctggagaacaaggacccacaggaagagatggggtcagagggcccggattacaaaggtgatatgcagccttttctattatcctgaggcttatgaggagctatttgagggttccaaaacctgtaagaaggtctc

SEQ ID NO: 170431 - DNA, 644 bp, Homo sapiens
cgcggcgcagtagcggctgtgactagcgggccggcccgggccaggacagcgggcggcgggcggcgcgggcctggccccgggatggctatgttccgcagcctggtggcctcggctcagcagcggcagccgccggccgggccggcgggcggcgacagcggcctggaggcgcagtacacctgccccatctgcctggaggtctatcaccggcccgtggccatcggcagctgcggccacacgttctgcggggagtgtctccagccctgcctgcaggtgccatccccgctgtgcccactgtgccgcctgcccttcgaccccaagaaggtggacaaggccacccacgtggagaagcagctctcatcctacaaagcgccctgtcgaggctgcaacaaaaaggtgaccctggcaaagatgagagtgcacatttcgtcctgcctgaaggtccaggagcagatggccaactgccccaagttcgtccccgtggtgcccacatcacagcctatccccagtggtggcaaagcttgggggcctgggcaggggcccgcttggcgggccgggcaacacgtcaacattcttttctgttcttggcattaattattgctgtctttttttaaaaaaaaaaagtttaaataaaatgtctcagagca

SEQ ID NO: 170432 - DNA, 592 bp, Homo sapiens
cactctacccccgccccgccagcaacatccccaacaggtccaccttcgcctgcccgtactgtggtgcccgcaacctggaccagcaggagctggtgaagcactgtgtggaaagccaccgcagcgaccccaaccgcgtggtgtgccccatctgctcggcaatgccctggggggaccccagctacaagagcgccaacttcctgcagcacctgcttcaccgacacaagttctcctacgacacctttgtggccttggcccgctgtcaccttcaaagctgactgtgccccgctgcgggaggggacggcaccccagtggtggcaaagcttgggggcctgggcaggggcccgcttggcgggccgggcaacacgtcaacattcttttctgttcttggcattaattattgctgtctttttttaaaaaaaaaaagtttaaataaaatgtctcagagcaaaaaaaagcgggcgtcaaaatacctgagggccatttacggcaccgtttgcacaggccctatggaagaaaacagagagccttaaaccgaaaaactccgatcgcagacacttgcaacgccccaatccagaaaatatgctcgacaata

SEQ ID NO: 170433 - DNA, 1666 bp, Homo sapiens
cgcggcgcagtagcggctgtgactagcgggccggcccgggccaggacagcgggcggcgggcggcgcgggcctggccccgggatggctatgttccgcagcctggtggcctcggctcagcagcggcagccgccggccgggccggcgggcggcgacagcggcctggaggcgcagtacacctgccccatctgcctggaggtctatcaccggcccgtggccatcggcagctgcggccacacgttctgcggggagtgtctccagccctgcctgcaggtgccatccccgctgtgcccactgtgccgcctgcccttcgaccccaagaaggtggacaaggccacccacgtggagaagcagctctcatcctacaaagcgccctgtcgaggctgcaacaaaaaggtgaccctggcaaagatgagagtgcacatttcgtcctgcctgaaggtccaggagcagatggccaactgccccaagttcgtccccgtggtgcccacatcacagcctatccccagcaacatccccaacaggtccaccttcgcctgcccgtactgtggtgcccgcaacctggaccagcaggagctggtgaagcactgtgtggaaagccaccgcagcgaccccaaccgcgtggtgtgccccatctgctcggcaatgccctggggggaccccagctacaagagcgccaacttcctgcagcacctgcttcaccgacacaagttctcctacgacacctttgtggactacagtattgacgaggaggccgccttccaggctgctctggccctgtctctctctgagaactgaagggaagcgcagccacccgcctgcgtctggggtcagggatgtccccgctcctgtgtcgcacctggcacctgctcgggagtgcacctcaccggactgagctcacaggaggagcctgcacccgcgcagaaggggagccggggccgagcctccgggcctgaatacgggccagccgccgaggccgccagagcagggccgcctggtcccaccggcgtcgctgggttcttcggtgcttctggccgagcaggcggcctacttgggcagggctggacgctgggacctggagctgccgccgtctcttcaaagccatgataccccctcgtgggaagaagggaccgacgcgcgagtcgcgctccgcagtcgagccgggaggaacccaggctgctgccctgcccagcccgaccctgccccggccccgcttccaccttgcgcattggaagaaatcccagcaccccagccacaggctgtggctgctcccagcagaggcggggccggcagagaaggggcctcctccacccagagtcctggccttggcccgctgtcaccttcaaagctgactgtgccccgctgcgggaggggacggcaccccagtggtggcaaagcttgggggcctgggcaggggcccgcttggcgggccgggcaacacgtcaacattcttttctgttcttggcattaattattgctgtctttttttaaaaaaaaaaagtttaaataaaatgtctcagagcaaaaaaaagcgggcgtcaaaatacctgagggccatttacggcaccgtttgcacaggccctatggaagaaaacagagagccttaaaccgaaaaactccgatcgcagacacttgcaacgccccaatccagaaaatatgctcgacaata

SEQ ID NO: 170434 - DNA, 1662 bp, Homo sapiens
cgcggcgcagtagcggctgtgactagcgggccggcccgggccaggacagcgggcggcgggcggcgcgggcctggccccgggatggctatgttccgcagcctggtggcctcggctcagcagcggcagccgccggccgggccggcgggcggcgacagcggcctggaggcgcagtacacctgccccatctgcctggaggtctatcaccggcccgtggccatcggcagctgcggccacacgttctgcggggagtgtctccagccctgcctgcaggtgccatccccgctgtgcccactgtgccgcctgcccttcgaccccaagaaggtggacaaggccacccacgtggagaagcagctctcatcctacaaagcgccctgtcgaggctgcaacaaaaaggtgaccctggcaaagatgagagtgcacatttcgtcctgcctgaaggtccaggagcagatggccaactgccccaagttcgtccccgtggtgcccacatcacagcctatccccagcaacatccccaacaggtccaccttcgcctgcccgtactgtggtgcccgcaacctggaccagcaggagctggtgaagcactgtgtggaaagccaccgcagcgaccccaaccgcgtggtgtgccccatctgctcggcaatgccctggggggaccccagctacaagagcgccaacttcctgcagcacctgcttcaccgacacaagttctcctacgacacctttgtggactacagtattgacgaggaggccgccttccaggctgctctggccctgtctctctctgagaactgaagggaagcgcagccacccgcctgcgtctggggtcagggatgtccccgctcctgtgtcgcacctggcacctgctcgggagtgcacctcaccggactgagctcacaggaggagcctgcacccgcgcagaaggggagccggggccgagcctccgggcctgaatacgggccagccgccgaggccgccagagcagggccgcctggtcccaccggcgtcgctgggttcttcggtgcttctggccgagcaggcggcctacttgggcagggctggacgctgggacctggagctgccgccgtctcttcaaagccatgataccccctcgtgggaagaagggaccgacgcgcgagtcgcgctccgcagtcgagccgggaggaacccaggctgctgccctgcccagcccgacctgcccggcccgttccaacttgcgcattggaagaaatcccagcaccccagccacaggctgtggctgctcccagcagaggcggggccggcagagaaggggcctcctccacccagagtcctggccttggcccgctgtcaccttcaaagctgactgtgccccgctgcgggaggggacggcaccccagtggtggcaaagcttgggggcctgggcaggggcccgcttggcgggccgggcaacacgtcaacattcttttctgttcttggcattaattattgctgtctttttttaaaaaaaaaaagtttaaataaaatgtctcagagcaaaaaaaagcgggcgtcaaaatacctgagggccatttacggcaccgtttgcacaggccctatggaagaaaacagagagccttaaaccgaaaaactccgatcgcagacacttgcaacgccccaatccagaaaatatgctcgacaata

SEQ ID NO: 170435 - DNA, 2519 bp, Homo sapiens
gaggactgagcagctggaggtgattttgcttttgcgtttcccgacgttgcacatctcaggtgaataagttctatgaagcgctcacactagtacgtggcccctcggtggtttgtcctcgaggtcgaaggtccagatgtccaggggctgccctggactccagagtggtgcggctgagcaggctgtggtcttgggtgcttgggcacctcccgtctctccctgctcagagttcttctctcctgggcagccagaaaggatcagaaccggtcacatgcagagcggcctcccgtatcccacagcagctccgttctctaatctgggtcttcagatgcggctgtgtctcccgggcaccttgcttggaatgtgttgcatccctcggagtccagcagcccttaggcagagctgggtgccgagcttgagtccaggagggcctcagacacctgcgatcttgcagcctgttgccctggacagtgggtgtgctgtgggtggaggatggcgccctgcctccacggaagcatccccagcttgcccctcagtcacacgaagcgtctgtccccagcctggggcatttctgagtggcctccacttggcctcttcctttttctggagcaagtatttgaactcctgcaggcgccagagatctccttacctgtttcccgctacccttctccagccaggtttctgccctcggccagattgtcctgcagtgacttgcttttggccatggagtagtggctgctcagtgcctgagattgttttagcagcagaagggaccgggtccccctgctgctggcaacacagacgcttgcttacagttctctggtcctggacacctgaggtctcggcctccccaggacggcccttccagattctcaggaccgccttgccctccctgccctgtctcctaggtgaccctggcaaagatgagagtgcacatttcgtcctgcctgaaggtccaggagcagatggccaactgccccaagttcgtccccgtggtgcccacatcacagcctatccccagcaacatccccaacaggtccaccttcgcctgcccgtactgtggtgcccgcaacctggaccagcaggagctggtgaagcactgtgtggaaagccaccgcagcgaccccaaccgcgtggtgtgccccatctgctcggcaatgccctggggggaccccagctacaagagcgccaacttcctgcagcacctgcttcaccgacacaagttctcctacgacacctttgtggactacagtattgacgaggaggccgccttccaggctgctctggccctgtctctctctgagaactgaagggaagcgcagccacccgcctgcgtctggggtcagggatgtccccgctcctgtgtcgcacctggcacctgctcgggagtgcacctcaccggactgagctcacaggaggagcctgcacccgcgcagaaggggagccggggccgagcctccgggcctgaatacgggccagccgccgaggccgccagagcagggccgcctggtcccaccggcgtcgctgggttcttcggtgcttctggccgagcaggcggcctacttgggcagggctggacgctgggacctggagctgccgccgtctcttcaaagccatgataccccctcgtgggaagaagggaccgacgcgcgagtcgcgctccgcagtcgagccgggaggaacccaggctgctgccctgcccagcccgaccctgccccggccccgcttccaccttgcgcatttggtactggcttttgtgatacttaggaaccctggcatcttttctatattatccagtgtgataatcttttcacgttttatagagcaaagacagagcagttactcttcatattgcaatatctgtgtttgactaggaataatagtatttttatggaacatttacaaaattatattttttaagaaaacaatcaaaacaagcattgggggattggggcaaggatggaaggagcagtggggcagctgccagagctcaggcgagccatggggtctgctgtggggtctgccctggccacccactgtgtgtctgggtccttgaggtttgtacgtttctctttgatgaccaggaagaaatcccagcaccccagccacaggctgtggctgctcccagcagaggcggggccggcagagaaggggcctcctccacccagagtcctggccttggcccgctgtcaccttcaaagctgactgtgccccgctgcgggaggggacggcaccccagtggtggcaaagcttgggggcctgggcaggggcccgcttggcgggccgggcaacacgtcaacattcttttctgttcttggcattaattattgctgtctttttttaaaaaaaaaaagtttaaataaaatgtctcagagcaaaaaaaagcgggcgtcaaaatacctgagggccatttacggcaccgtttgcacaggccctatggaagaaaacagagagccttaaaccgaaaaactccgatcgcagacacttgcaacgccccaatccagaaaatatgctcgacaata

SEQ ID NO: 170436 - DNA, 1850 bp, Homo sapiens
cgcggcgcagtagcggctgtgactagcgggccggcccgggccaggacagcgggcggcgggcggcgcgggcctggccccgggatggctatgttccgcagcctggtggcctcggctcagcagcggcagccgccggccgggccggcgggcggcgacagcggcctggaggcgcagtacacctgccccatctgcctggaggtctatcaccggcccgtggccatcggcagctgcggccacacgtgaccctggcaaagatgagagtgcacatttcgtcctgcctgaaggtccaggagcagatggccaactgccccaagttcgtccccgtggtgcccacatcacagcctatccccagcaacatccccaacaggtccaccttcgcctgcccgtactgtggtgcccgcaacctggaccagcaggagctggtgaagcactgtgtggaaagccaccgcagcgaccccaaccgcgtggtgtgccccatctgctcggcaatgccctggggggaccccagctacaagagcgccaacttcctgcagcacctgcttcaccgacacaagttctcctacgacacctttgtggactacagtattgacgaggaggccgccttccaggctgctctggccctgtctctctctgagaactgaagggaagcgcagccacccgcctgcgtctggggtcagggatgtccccgctcctgtgtcgcacctggcacctgctcgggagtgcacctcaccggactgagctcacaggaggagcctgcacccgcgcagaaggggagccggggccgagcctccgggcctgaatacgggccagccgccgaggccgccagagcagggccgcctggtcccaccggcgtcgctgggttcttcggtgcttctggccgagcaggcggcctacttgggcagggctggacgctgggacctggagctgccgccgtctcttcaaagccatgataccccctcgtgggaagaagggaccgacgcgcgagtcgcgctccgcagtcgagccgggaggaacccaggctgctgccctgcccagcccgaccctgccccggccccgcttccaccttgcgcatttggtactggcttttgtgatacttaggaaccctggcatcttttctatattatccagtgtgataatcttttcacgttttatagagcaaagacagagcagttactcttcatattgcaatatctgtgtttgactaggaataatagtatttttatggaacatttacaaaattatattttttaagaaaacaatcaaaacaagcattgggggattggggcaaggatggaaggagcagtggggcagctgccagagctcaggcgagccatggggtctgctgtggggtctgccctggccacccactgtgtgtctgggtccttgaggtttgtacgtttctctttgatgaccaggaagaaatcccagcaccccagccacaggctgtggctgctcccagcagaggcggggccggcagagaaggggcctcctccacccagagtcctggccttggcccgctgtcaccttcaaagctgactgtgccccgctgcgggaggggacggcaccccagtggtggcaaagcttgggggcctgggcaggggcccgcttggcgggccgggcaacacgtcaacattcttttctgttcttggcattaattattgctgtctttttttaaaaaaaaaaagtttaaataaaatgtctcagagcaaaaaaaagcgggcgtcaaaatacctgagggccatttacggcaccgtttgcacaggccctatggaagaaaacagagagccttaaaccgaaaaactccgatcgcagacacttgcaacgccccaatccagaaaatatgctcgacaata

SEQ ID NO: 170437 - DNA, 1764 bp, Homo sapiens
cgcggcgcagtagcggctgtgactagcgggccggcccgggccaggacagcgggcggcgggcggcgcgggcctggccccgggatggctatgttccgcagcctggtggcctcggctcagcagcggcagccgccggccgggccggcgggcggcgacagcggcctggaggcgcagtacacctgccccatctgcctgaaggtccaggagcagatggccaactgccccaagttcgtccccgtggtgcccacatcacagcctatccccagcaacatccccaacaggtccaccttcgcctgcccgtactgtggtgcccgcaacctggaccagcaggagctggtgaagcactgtgtggaaagccaccgcagcgaccccaaccgcgtggtgtgccccatctgctcggcaatgccctggggggaccccagctacaagagcgccaacttcctgcagcacctgcttcaccgacacaagttctcctacgacacctttgtggactacagtattgacgaggaggccgccttccaggctgctctggccctgtctctctctgagaactgaagggaagcgcagccacccgcctgcgtctggggtcagggatgtccccgctcctgtgtcgcacctggcacctgctcgggagtgcacctcaccggactgagctcacaggaggagcctgcacccgcgcagaaggggagccggggccgagcctccgggcctgaatacgggccagccgccgaggccgccagagcagggccgcctggtcccaccggcgtcgctgggttcttcggtgcttctggccgagcaggcggcctacttgggcagggctggacgctgggacctggagctgccgccgtctcttcaaagccatgataccccctcgtgggaagaagggaccgacgcgcgagtcgcgctccgcagtcgagccgggaggaacccaggctgctgccctgcccagcccgaccctgccccggccccgcttccaccttgcgcatttggtactggcttttgtgatacttaggaaccctggcatcttttctatattatccagtgtgataatcttttcacgttttatagagcaaagacagagcagttactcttcatattgcaatatctgtgtttgactaggaataatagtatttttatggaacatttacaaaattatattttttaagaaaacaatcaaaacaagcattgggggattggggcaaggatggaaggagcagtggggcagctgccagagctcaggcgagccatggggtctgctgtggggtctgccctggccacccactgtgtgtctgggtccttgaggtttgtacgtttctctttgatgaccaggaagaaatcccagcaccccagccacaggctgtggctgctcccagcagaggcggggccggcagagaaggggcctcctccacccagagtcctggccttggcccgctgtcaccttcaaagctgactgtgccccgctgcgggaggggacggcaccccagtggtggcaaagcttgggggcctgggcaggggcccgcttggcgggccgggcaacacgtcaacattcttttctgttcttggcattaattattgctgtctttttttaaaaaaaaaaagtttaaataaaatgtctcagagcaaaaaaaagcgggcgtcaaaatacctgagggccatttacggcaccgtttgcacaggccctatggaagaaaacagagagccttaaaccgaaaaactccgatcgcagacacttgcaacgccccaatccagaaaatatgctcgacaata

SEQ ID NO: 170438 - DNA, 789 bp, Homo sapiens
cgcggcgcagtagcggctgtgactagcgggccggcccgggccaggacagcgggcggcgggcggcgcgggcctggccccgggatggctatgttccgcagcctggtggcctcggctcagcagcggcagccgccggccgggccggcgggcggcgacagcggcctggaggcgcagtacacctgccccatctgcctggaggtctatcaccggcccgtggccatcggcagctgcggccacacgttctgcggggagtgtctccagccctgcctgcaggtgccatccccgctgtgcccactgtgccgcctgcccttcgaccccaagaaggtggacaaggccacccacgtggagaagcagctctcatcctacaaagcgccctgtcgaggctgcaacaaaaaggtgaccctggcaaagatgagagtgcacatttcgtcctgcctgaaggtccaggagcagatggccaactgccccaagttcgtccccgtggtgcccacatcacagcctatccccagtggtggcaaagcttgggggcctgggcaggggcccgcttggcgggccgggcaacacgtcaacattcttttctgttcttggcattaattattgctgtctttttttaaaaaaaaaaagtttaaataaaatgtctcagagcaaaaaaaagcgggcgtcaaaatacctgagggccatttacggcaccgtttgcacaggccctatggaagaaaacagagagccttaaaccgaaaaactccgatcgcagacacttgcaacgccccaatccagaaaatatgctcgacaata

SEQ ID NO: 170439 - DNA, 1353 bp, Homo sapiens
gaggactgagcagctggaggtgattttgcttttgcgtttcccgacgttgcacatctcaggtgaataagttctatgaagcgctcacactagtacgtggcccctcggtggtttgtcctcgaggtcgaaggtccagatgtccaggggctgccctggactccagagtggtgcggctgagcaggctgtggtcttgggtgcttgggcacctcccgtctctccctgctcagagttcttctctcctgggcagccagaaaggatcagaaccggtcacatgcagagcggcctcccgtatcccacagcagctccgttctctaatctgggtcttcagatgcggctgtgtctcccgggcaccttgcttggaatgtgttgcatccctcggagtccagcagcccttaggcagagctgggtgccgagcttgagtccaggagggcctcagacacctgcgatcttgcagcctgttgccctggacagtgggtgtgctgtgggtggaggatggcgccctgcctccacggaagcatccccagcttgcccctcagtcacacgaagcgtctgtccccagcctggggcatttctgagtggcctccacttggcctcttcctttttctggagcaagtatttgaactcctgcaggcgccagagatctccttacctgtttcccgctacccttctccagccaggtttctgccctcggccagattgtcctgcagtgacttgcttttggccatggagtagtggctgctcagtgcctgagattgttttagcagcagaagggaccgggtccccctgctgctggcaacacagacgcttgcttacagttctctggtcctggacacctgaggtctcggcctccccaggacggcccttccagattctcaggaccgccttgccctccctgccctgtctcctaggtgaccctggcaaagatgagagtgcacatttcgtcctgcctgaaggtccaggagcagatggccaactgccccaagttcgtccccgtggggtctgccctggccacccactgtgtgtctgggtccttgaggtttgtacgtttctctttgatgaccaggaagaaatcccagcaccccagccacaggctgtggctgctcccagcagaggcggggccggcagagaaggggcctcctccacccagagtcctggccttggcccgctgtcaccttcaaagctgactgtgccccgctgcgggaggggacggcaccccagtggtggcaaagcttgggggcctgggcaggggcccgcttggcgggccgggcaacacgtcaacattcttttctgttcttggcattaattattgctgtctttttttaaaaaaaaaaagtttaaataaaatgtctcagagca

SEQ ID NO: 170440 - DNA, 2007 bp, Homo sapiens
cgcggcgcagtagcggctgtgactagcgggccggcccgggccaggacagcgggcggcgggcggcgcgggcctggccccgggatggctatgttccgcagcctggtggcctcggctcagcagcggcagccgccggccgggccggcgggcggcgacagcggcctggaggcgcagtacacctgccccatctgcctggaggtctatcaccggcccgtggccatcggcagctgcggccacacgttctgcggggagtgtctccagccctgcctgcaggtgccatccccgctgtgcccactgtgccgcctgcccttcgaccccaagaaggtggacaaggccacccacgtggagaagcagctctcatcctacaaagcgccctgtcgaggctgcaacaaaaaggtgaccctggcaaagatgagagtgcacatttcgtcctgcctgaaggtccaggagcagatggccaactgccccaagttcgtccccgtggtgcccacatcacagcctatccccagcaacatccccaacaggtccaccttcgcctgcccgtactgtggtgcccgcaacctggaccagcaggagctggtgaagcactgtgtggaaagccaccgcagcgaccccaaccgcgtggtgtgccccatctgctcggcaatgccctggggggaccccagctacaagagcgccaacttcctgcagcacctgcttcaccgacacaagttctcctacgacacctttgtggactacagtattgacgaggaggccgccttccaggctgctctggccctgtctctctctgagaactgaagggaagcgcagccacccgcctgcgtctggggtcagggatgtccccgctcctgtgtcgcacctggcacctgctcgggagtgcacctcaccggactgagctcacaggaggagcctgcacccgcgcagaaggggagccggggccgagcctccgggcctgaatacgggccagccgccgaggccgccagagcagggccgcctggtcccaccggcgtcgctgggttcttcggtgcttctggccgagcaggcggcctacttgggcagggctggacgctgggacctggagctgccgccgtctcttcaaagccatgataccccctcgtgggaagaagggaccgacgcgcgagtcgcgctccgcagtcgagccgggaggaacccaggctgctgccctgcccagcccgaccctgccccggccccgcttccaccttgcgcatttggtactggcttttgtgatacttaggaaccctggcatcttttctatattatccagtgtgataatcttttcacgttttatagagcaaagacagagcagttactcttcatattgcaatatctgtgtttgactaggaataatagtatttttatggaacatttacaaaattatattttttaagaaaacaatcaaaacaagcattgggggattggggcaaggatggaaggagcagtggggcagctgccagagctcaggcgagccatggggtctgctgtggggtctgccctggccacccactgtgtgtctgggtccttgaggtttgtacgtttctctttgatgaccaggaagaaatcccagcaccccagccacaggctgtggctgctcccagcagaggcggggccggcagagaaggggcctcctccacccagagtcctggccttggcccgctgtcaccttcaaagctgactgtgccccgctgcgggaggggacggcaccccagtggtggcaaagcttgggggcctgggcaggggcccgcttggcgggccgggcaacacgtcaacattcttttctgttcttggcattaattattgctgtctttttttaaaaaaaaaaagtttaaataaaatgtctcagagcaaaaaaaagcgggcgtcaaaatacctgagggccatttacggcaccgtttgcacaggccctatggaagaaaacagagagccttaaaccgaaaaactccgatcgcagacacttgcaacgccccaatccagaaaatatgctcgacaata

SEQ ID NO: 170441 - DNA, 511 bp, Homo sapiens
ctggcctttgttgttttttttttttatttaagctcacaggctgtacgggcataggcagtgtgtgccatagtttgccatccccttcccagcgtcggggaagaggcgggtaagttctagacatctcaaaggagaaagaaaaatattgtctgagcaatggatgattgtcttgaaagcttccagataattaggctaagacaagttgtttcatttatctgttcccctgcttagcttggtcggaatctagtggtgtgtctgctgctaacatttatgatgattcacttcagactcaaggagggctgttggcttatctgcactggctgtcttggaggctgatttgagaggttttgtttggagctatggaattcagtcatgcttcatcatgcctctggtttatttaaaaacaaacaaaaatactgttttcgccatggctgtggtcctacccacaacctgctcccagcatttgagtgctgtgtgggctgggtcattcctgcttccccaggtcacgctaacc

SEQ ID NO: 170442 - DNA, 536 bp, Homo sapiens
aacctcccctagcgggctcaagtgatcttcctgccctggcctcccaaagtgctgagattacaggtgccggccaccaggcccggctaatttttttgtattttttgtagagacgagttttcactacattggccaggctggtctcaaactcctgacctcatgaaccacccaccttggcctcccaaagtgctgggatttcaggcatgagccactgcgcctggctggattgcattacttttagcacttctgtcgcttaaaagtgtatcccggcccctctggaaaggcccgatttccttcactgaaaatcacctcaccttagctcacgtcaatgcctccacaccatgtctcttggggcatctctgtcgacttactcacccactgctccccgcctttccagcttctgttttttttttttatcttctgctgattctcctggtagaagtttaattcactctcagggcctgagctctctggcccctgctggagactcgcaaagtaacatgtctgctactaacgtctcatctgcactctaacccgct

SEQ ID NO: 170443 - DNA, 349 bp, Homo sapiens
ttgatgctccgggcagttcttgcggaagttgatatgcagaaccatggagccgcagcttcggggtcaggctcatacccagcagccctgcttccttgtttaattacctgaagagcaaaacagtcaggctgggagtgtgtgaaaacccagtatctctcacagccgcctggcgctctgacatcctgcaaggccagccctgtctgtccgccagcgtcaggctggctcaaaccctgggttcctttctttcgggaggcattgtgtggaagagggtttggtcaggaatttgaggttcctgccaatgctgtgtcccctgctctccccttgtggaccacactgacagacatgcttgatt

SEQ ID NO: 170444 - DNA, 455 bp, Homo sapiens
caatctgtcatctaacaattgagctctttgtgattgttgaaaagcatatattaaatttctccagaaaaaagaatctattaaaaatcatgtaggaaggtgaaagactattttatatagcattataatgagcccaaattggctttttaagtcttgaagtccctgaaatgcacagagaacactatggaaaaatgcacacacacctttcgaacctgattttaacacaaaccttcatccttttatcttaatatgatgccaataaaaccatacccagctacatttcatctagtgttattggaggaaatatgtatcatattaacagaggcaaattctttcagtattgtacatgttgggtacaatatacactacttgggtgacaggtgcactaaagtcacagacttcaccactatacaattcatccatgtagccaaaaaccacttgtacctcaaaacctattg

SEQ ID NO: 170445 - DNA, 887 bp, Homo sapiens
catagtgcgcactaccccttcctgtggatgacggacactcctcacagccagcagctgggcgtttgcttagtttcccagatttttattttaccaacagtgctgcctgtgtgcacagcccggctgctggcgcacgctgtctgtggatggaggtatcaacttgacagtgctgactagatggctttacttccatcagcactttgtgtaaacgtgcaggaatttttacaaggtcaaagacagactacacagtaaattttggcaagggtgcagagatgtgtgctgaagaggagcttctccaggctccttttctctccccggagtagtcatttctctcatcggagttggctggaaccaaagctcagtgctttgtctgatttggcaccaccctgggggcatttggcagtgtctggagacacttggttgtcaggatgcgggacagtggaggccgggatgctgcctgacatcctgtgacatgcagcacggtgcccacctgtaccaccccacaaagaatcccccggccccgtggtcagcagcaccacgattgtgagatcctagtcgcagggcatcttgaacagcatctccttttgacggcctgtctcccggcgcagcgacgttcttcttggcgcttggattacaagtgcttctgcattcccacaacgtttccttacatctgaggctgaaacctgagctgacacgtgtgtgtcaagcgattcgtggagcacctgcgcacagagtgggccagtggtgaggggtggggactcttttctccgtggtggagtagcaggctctctgcctcaaccagtggtgccgagagtaaagtcatgacctgtgccaatctccctctttcccccacctctccagctcgatacacagctcctccgtgtacccag

SEQ ID NO: 170446 - DNA, 423 bp, Homo sapiens
agcctatagagcacattgaggtcttttggttcgccctcagtgaactttatcacatcaagcaggagatgtcggtgagcctcgctgccctgctgtgctccacccattggccccccttgcagcagcattcaggagaagacagaggcagcgtcttctgccagcctcctcggactggaaggagtaacaaggctttgaaggcatgcaggaataacacccacacagagccccaggggacatggatcgaggtctgaaaagcatttcttcccaccctctgctgagtcacctggactgccagaggtagagctggcatagggagtttgccagaagacatcaggaagaaacctctattttctctacaaacatcctttgagaacatttcaaacctgcattgacgttgatacgatgatcagaaaacgctcatacaca

SEQ ID NO: 170447 - DNA, 317 bp, Homo sapiens
atttttactagtctaggcatggagttgggggctattagcagtaagaaggcctcatggataagtgatttttgaggtgaatgtattgtgctgtggtcctaaactgctgtgaggtgaacaacgtaggcagtgtgacatcagtggaccaggtagccaagactgctgctaagtgactataagattggtagcatatagagcatggataccccagacaaaggaatgattcatgtccagggcaggatggagtgggacagcctgagatttcatcatgctactcaacacagtgcagtttaaaacttaagaattctttatttctggaa

SEQ ID NO: 170448 - DNA, 260 bp, Homo sapiens
aaacacaacagaatttataagggttaggaggtgaaattaaggaaattttcaagaaagtgtagtaaaaagagaaagaatagaaaataacgtagaaaaaataagaagcttagaggattggttcttacatccaaaaatagtacaccagattcagagaacataaaaaatggaggacagaaaaccatcaaaggaataattcaccaaaatttctcaaaaacagaagtttcctgattaaaagggaataacaacagatgatcatgaaa

SEQ ID NO: 170449 - DNA, 394 bp, Homo sapiens
ctcttggtgaggaacactagaactgattcctcctctgtagctgtaattttggaggggactcaatgaatacttctccgtgcatctgaactaaggctgacaccaggtatgagctccatgagtgggagaggcctccacactgcaggtggaagacaggccagtatccgcagactgtgttcttgcagctgatgctcagcagctcaccagagcccgagtccccattgacatccctcatcctagtttttcttctttatctgacctgaaatacctctcctgtctggctcctctctatttctgggtaccccttcaacttaattcaggccttggtcatcttttccttcctctctgctctctctggctctgaataaagacaagagagaaacaaccccattttatg

SEQ ID NO: 170450 - DNA, 497 bp, Homo sapiens
ttcaaagtctgccattcctgaatgctggaagaactgccaattagcaaatacctggaacatttctgtaactttatttttgtaaacaatgttgtaaattcaggaagaatatggcaggtctagaataagacttgaagatgtctatttttgcaaagtgattcttgtgttcaggcagcatacctaggagtgtcctcagcttttcagcccgtcctgcctcagtgcagggccatgttgagaacaatctggggatgtttcctactttggctgccactagaatcacgaggggagctttaaaaatatgaatacctaaatcccaccctcagagattccagtgcaatacgtctgggacactgcttgggtatcaggattttaaaataattcctaggtgattctaatctgtagctaaatctgaggaccaatgggatagttgttcttttttttttttttttgtggcagggtctcaatctgtcatccaggctcactgcagtggctcactgcag

SEQ ID NO: 170451 - DNA, 324 bp, Homo sapiens
ctgacttcagcctcctcatctgtaaacagaggccactggtgtctgctttccaagatccctcacacagctctggaattctagagtatgtgtgcagcaagggtcagaaggagaaactacacagccaccagaagcaactttcttaactttctgcttcaaggttgaaagagaagacaagggctgggtgcggtagctcacgcctgtaatcccagctatttgggaggctgaggcaggcggatcacctgaggttaggagttcacgaccagcctggccaacaccatgaaaccccgtctctactaaaaaatgcaaaaatcaggccaggcacgg

SEQ ID NO: 170452 - DNA, 146 bp, Homo sapiens
tttctggtagagtcatggcatgatttgactttactgaaacccatctggttgttctggtaagaataggtggcaagtgtggagcagggccaaacaggaaaaccagtcaggaggcaactgcaatactctaagataaagactagtggttt

SEQ ID NO: 170453 - DNA, 108 bp, Homo sapiens
gagtgatggatggaatgcctgtacttggaatatttttaaattaatctattttcattacattgaaagtatgacacacagagaacactaaaattggatgaggcactacct

SEQ ID NO: 170454 - DNA, 167 bp, Homo sapiens
agaaattatgctgggttcattggatatatctatgggaaaaaaatgaatcttgacctctacctcacaccacatacaaaaattaattttacatgggttacagatcaaaatatgaaggaacaaatgataaagattttgaggaaaacctaagaaaatacctttttcacttg

SEQ ID NO: 170455 - DNA, 418 bp, Homo sapiens
gacaaacaatattcaggacagcctcatgaccttaggcttgaaatctagaatatttgggcatggatggtcctctgagatcacttagtcttgatagatttaaactactaatttcaatatttgtgaatttgcattatttgcgacaacagacattgtttagaaacccgaggaaagttatctgctgcagtctatcatgaggacggtgggctatcacaatcacaggtattttttttggggggggggatgagaaagggcctctgaggataagcctcaccccatcctttcctcgggagaggagtgaaatgtctccagaagcaactgcaccactgcaaatacttcaccctccaagtatcacaggggaagccattccggcttctctatttgaaaacagttaccatattccccctcagtttgcctctta

SEQ ID NO: 170456 - DNA, 540 bp, Homo sapiens
atgtgaagtactggctcccccttcgtcttccaccatgattgtaagttctccgaggcctccccagaaactgagcagatactgccatgcttcctgtacagcctgtgggaccatgagccagttaagcctcttttcttttaaattacccagactcaggtatttttttatagcagtgttagagctgactaatacagactctaattggcaatgtatgacaaaatgcaaaaataaattttttcaaaagtatatgaggtagtgattcattacctgggatcattaaactttgaggtatctctccaggggtccttaagattttttattggcttttaagtaaacattttatttaagtataacatatttagaaaagtgcagtaggaggtagtgtacagcttaataaattttttacaggctgaacacacttggggaactagagaccaagtctgaaatcagaacatgacgagttctccacaagttcccttataccttcctctagtaagtactccacctaatcatcattctggcttctaacacaatagattaatt

SEQ ID NO: 170457 - DNA, 1110 bp, Homo sapiens
gaggactggagagacatggcagatgctacctgcacacttttggtaatattctgtgtgatgggatatgaaatggtccatagaaaaaaaccggaaaaatacgccaaggttaggttcattctaagagtctaaaaatttcaaaaaccaaaacaacattataaatggtgtttctcaaggacctttcactacctttttagattgtgcttgtgattttcaggcaagctaaatgtctgatgaagactgctcttcttttgttctgtgtctgacctactaattcctgcccatgcttcaaactcagttcagaaatcactgaaggaaccatccactgccggcctgcctgcaaccacagctgacagctgagttagttaggttttcctgtccctattatttaccagtttgtactgaaatgctttcatgggctgtgcttccagattatgagttctgtggaatcaggaagtatgtctctgtattcttgtattctttggcttttttgtgtagtaaagggactcaagtaatgtttgacagtgaaggatacaacttcattccttgcctgctttgataaattttagtaataaattcccaaaactatcatgttgattaaaaataaaaagtaaccgtaacctcacacattaactttattcaaacaaacagcacttacaggaaatgtaaagtagaaaaagatttctgcccactttacctacggagacatgataaacacgcaaaaaaaacctagaaattaagcaaaaaatagcacaataatttaactgaaagcaacaagggcaaaactgtctccttttgtagtttgtggtaccttatagtagtgctcattcagtttcgtttgcttgataaatctgaggactatgagatatcagagttactagtagggtaggagtgctgtaagggtactgggagaagtaggattagttaggggcagatcttgaattctggccaagaaactgatatttaacccataaagagatagtcactatatgttatcaaataggagaataacacaaatgagaaatgactgttaattcctgatgcataataacagttgtgagctttagtttaatgtaatatttgtaataaaaacgtttggccaggcaccatggc

SEQ ID NO: 170458 - DNA, 426 bp, Homo sapiens
gaaaaacccatctgtgtaccaggggtagtatatggcctactttgaaaagctcacatattaaaagtattaataatccttggctctatagcctggatctggctggtagtttagcaggttattagctgagtaacctttgtcaagttacttaatctctgtttcttcatttgttaaacgggcataagaatcactactttgtagggttgttgtaagaatgaaagatgatcatttaaatggccaagtgtaaaagtggcacctagtagacaatgaatggttgttattcaagacacagttcttccaaagaactatccctgtttcagccaaagcctactgtctgcagttgtagctagtttatcgcaaagcaaatgtctttgaatgctttaaaccttggatttgttatataaggttgagcatgtttgtgtcatttgt

SEQ ID NO: 170459 - DNA, 255 bp, Homo sapiens
acagccactgctgtgtttggggtgctgcagagcataatcataaatgtgggagtccagatacaggtcagctgttagggctccaggagtgtgcggacccctgccctcacctctttgtgtcaccggagctccggattaagggctttctgacaactcctgaccacactcctcatcttctttccctccctttgctgatgaagcaactgtcttcatttagctgcctgatggagaacatctgcctccaggcaccacagaaat

SEQ ID NO: 170460 - DNA, 238 bp, Homo sapiens
gatgtttgttgcaaaaaggttagtgggagcgtgtggatgacttgccccaaacccatccccactactggagaaacacctctacatggcctgaagcatctctgttctgaggacagccctttacattaacaattgtttaccaggtgccgaatgcttatcatctgagagagcagaactcacaggtgtgcaggctaggtaacaggaatatatgcttgaaagcagtgctttatccactatctgg

SEQ ID NO: 170461 - DNA, 251 bp, Homo sapiens
tgatttattagtacttacgaatgctctggggtgctttcctttattcattcagtcaacaagtacttatgaaacactcatttcagtgccaggtactgaggtagtcactagggatacagtggtgaacaaaagacaaagacatcctaatgggaaaatgagtaaacaaagaaatggtctgctattttgtagtaatttatattatgaagaagaaaaataaagcaggataagggtgagagagtgttggggataacatc

SEQ ID NO: 170462 - DNA, 515 bp, Homo sapiens
gaggcccccttctccatgggtggcaaatcctcacctatcgagtgagccatcatgccctggaagtccagcatccagtggttccaatctctctgccataactactgccaaaactaaaaaactactatgttttttagttgctaccacttcaaaagagtgaagagtcatttcaactctttaattctcccataaattaaagataatgaccatagtgtgcttggaaaactatgtttaggccgggtgcagtggctcacgtctgtagtcccagcactttgggaggctgaagtgggaggatcgcttgagcccaggagttcaagaccagcctggtcaacatagcaagacccttcatctacaaaaaaataaaaaaattagccaggcttggtggcatgtgcctgtggtcccagctactcagaaggctaaggtgggaagattgcttgagcccaggaggtcaaggctgccgtgagctgtgatcatgccactgcgctccagcctgggaaacagagcgagactctgtctct

SEQ ID NO: 170463 - DNA, 468 bp, Homo sapiens
gagctgaggggtagagctggggacaggcagaaatggctgcctctgggggtcccgtcctggtgggctcaggcgtctccttggcagagtgcttggagcgcagatgtgcagcagttggtcagtttcaggggatttcccacctttctaaggcttttcagcctgcttaaggaagaaagcggatgggtgatctgatggctccgcacacacggggtgtggcgggagagaggagggcttccctcccttgcgctgccttgggccagctcgccctcagggtgaggcctggccctcctggctctgtgcagcctcccagaaccacgtgctctttggtgacacagtcgccacctcgtgcagcctacccccggggccttcctgtgcccctgtcccctggactccggttgtctgtatctgggtgttaccatgccccttagtcctgcccaggcacagtctgcactctctcctgagcacccgtgc

SEQ ID NO: 170464 - DNA, 278 bp, Homo sapiens
tctttagttacctttgtgtccccagagcctagcaaacagtgagggcttattttatttttaattatctgggtgtggtagcgtgtgcccatagttccagctgctcaggaggctaaggtcagaggatcccttgagcctgggagttcagggctgcagtgagctctggtcacaccactgcactccagcctgggcgacagagtgagaccctgtttcagaagaaaacaaaaagttcttttttttccttttcctttttttttttttgagatggagtctcactctgt

SEQ ID NO: 170465 - DNA, 456 bp, Homo sapiens
ccactcagcacagaccttgacagataggtttttgttttttgcttttttgaagtacatgatatagacaggaacacagatttttaaatggtagctgttactaagtgtgggagagagctttgactctggcagtttgggatggcctttcaaaattgacaagtgtggttgtaagggttagagagtaagttggtgatgaatgatacactactctttggagaataaagagccaggtgtgagggtagagtgttctaggattaggagacttggatgtgtttgaaacctgaggagtaagaaattggtggagagaagggactctgagaggatgccagcagtattggctacagctttttcatcttccccaattatccagtaaaagcagagctccctttaatattgggagcaatattaatatgtttactcttatcacttgtatttatcattgtattagaggtcctaaca

SEQ ID NO: 170466 - DNA, 284 bp, Homo sapiens
ttcaagtctttggtggcatctctttcaagtttcccagtgcacctgactcagaagatagaatcagtctgttagctgaggtctctctgtgctggagaagcatgaaaagggccccaccagcatagactcagttctctttgaagtttaagatccatctacaaatggccatgttctttccttagcagaaggtattggggtttctacatacatgctactcactgctcacgtgtaagtaaggtaaaatttgagcaagtggaaaatgaccctgctgtaatccagatcataat

SEQ ID NO: 170467 - DNA, 198 bp, Homo sapiens
ccatgaaccctccaggtacacacttgaggttttaatattcctctagttgatatccagacctgtgaaatttttttttctgacgttatattcggaaacccaaatgactattcttattcatctttcccagtttttccccactctgtgtgcctaattttgccatttctcaccaattgtgaccttaaaaaattaaattcagta

SEQ ID NO: 170468 - DNA, 335 bp, Homo sapiens
ggagcacatctgacccgtatcattctggctgctgtgtagggaacagactcaggggcaggcttggggattgcagcaggcaggagttggtggtggctcaggacagggtggtgacagtggcacggcgtgaggggatctgatgtgtttggaagggagggccttgatggattgggtgtgaaagagaggaagccagagttttggcctgagcgactggcacactagagatgctgttcaccaacatggggaagccgtggtggttgagcaaggagattaagcatgagatacctgtcaagacacccaatgaggggtcaggaaggtggcagagacaggaatctgga

SEQ ID NO: 170469 - DNA, 207 bp, Homo sapiens
tagcttagtctttccatcatagaatcccctggcctctgcttagcgtctttatccctctcattcacataatggctgcttttcaaggctaagtccagtttcaaagagagcaatgctagcactctgctattctttctttctttgtacatgcctttagacattttaaactaagccttctgtcaaggctgaatatatgtgggatctgaaatg

SEQ ID NO: 170470 - DNA, 366 bp, Homo sapiens
tctttttcattgttatgtttccagtgtttagtagagctcttggtgtttaataattgtttactgaatgaaagaatgaaaatcaactttaccatgaacattagtcacagttcctcctatctctttattccctttcgtatctgttatgttggcctctgtttttctcacatttatttatttttattattattattatttttgctgttgttagtaagaaacctcaccaggaatttctcacatgtctttattttgtgcatctatttctacaaattgaccgtccatatagtgcttattttaatggctctgtaatctgtattcccattatagtttacttagcttttctccaggtgttaggcactctagcattca

SEQ ID NO: 170471 - DNA, 107 bp, Homo sapiens
aacataatttcaataggcactgattttgtcatttaatgctgagaagaggcaaaaaccctatatggattcttagaaataggactatgttggaatggaagagatggcag

SEQ ID NO: 170472 - DNA, 957 bp, Homo sapiens
gcagtccaacctgggcaaaatagtgagagaccctgtatctgaaagtaataataaaaataaaaaatataaatgaggtctcgttgatgttggacaattcaagaattcagacttgaaccttaaacctaggaaaagttactttgtatcaggattctaacaattatgcttcatatttgtgaagtcctttaaaacataattttctcaagttctttctttgagatctcaatctgtcttagcattttgtaactaataactgaaattttattcaaaggaattgtaaaccttaaaccaccaatttatttccatgtgaaaaagtgttacatatgacaagtgttttttgactgtaattgcgttaaatcttttgagaatgtaaatgccgggctaggcaattgcagttaatacatacagaggttagtgaagggcttattaagttgtaggggaagcaagctgggaagaatcagatcagatattttcctgacaaaaaaaaatgaccctacagagagcatcaaaatgtggtgttcttgttaagtaattgatcgtggtcttcgctttaatcttagttccgccaggcacggtggctcacacctgtaatcccagcactttgggaggccaaggcgggcggatcagctgaggtcaggagttggagaccagcggtggcaacctggtgacccccgtctctactaaagataagaaaatcaggctgagtgtgtcgggggtgcctgtggatccaggtacttgggagactgagcggagatggcttgaacccaggaggccacgttgcgtgactcgagatgggccaatgggcccgctgggacacaacaatttgctcaccattgaatcagacctctccccgggagtaaatggcccctaacgggtaagtaacaatgggcgggggggcaccgatccactggggggcgggccacacggaaatccccggcagtgtaacaaagcgacagcgga

SEQ ID NO: 170473 - DNA, 369 bp, Homo sapiens
ctagaggaacaccagacccacatgagacctctatcagcagaactgctggtgaaaatgtgaggaatgtctctgtccttccctgactcatcagacctcaggatgaccttccttcctgacacagccctcctgcgcaagtaactcaccatcttcctgtgcccagctaccaccagacacctgcaggtgagctcactgcaagcttggcgtcgtggtgctgcgcacagccctcttcagcacacagtgtcagcaccgtcctataaaatctccagccagcctttgtttctttgcagtcggcatctctcatgcaggctgccctgtctccttgcaacctatttttctactttctccaataaatcagcctttttctgccta

SEQ ID NO: 170474 - DNA, 109 bp, Homo sapiens
ccctcaccaagagcctgctcagcactctccaatttgatggacaccaaaatccttgccttggtccccttggtcctgcgtgccctcctctctggcctcatctcaagccagc

SEQ ID NO: 170475 - DNA, 261 bp, Homo sapiens
cgacagtccctcgtgttctggagaaaccagcctcccgctgcagtgaggtctcccatggtgacgggccatctcctggcctggctgggtgaccgcaagtggctatcctcagtcttgacggggtgtgtgtgtcacagtccaccgtgtggccacatggagctcaccattgagagggaaactcggcagcgcggtggggtcctccggacagaggctcagaaggcgagagaccaggggctcggtgcatcctgtgtcagcgtccactgt

SEQ ID NO: 170476 - DNA, 168 bp, Homo sapiens
ttgtgtagcctctgctgggaattcaagacatgagatagaagaaaacattaaccctaactctccaattatataggaaataatggataattcaaataacaggactccaaaatgctcagtacaaatgtgcaactgattttaacctcgtccaaataaagacgaatgaaacaa

SEQ ID NO: 170477 - DNA, 368 bp, Homo sapiens
  misc_feature (338)..(338): n is a, c, g, or t
actactactactaaattcgcggccgcgtcgacgtcctggtggcttgcttggatgctggtattgagagtggtgggctgggtacgttctcaggcccctggccagcaggtgtggtgtgggtgatggcagtagcagtggtaggataaccctctgggtcttgagcagtgcactctggtgctgacagtagatacaatgtgctgagtgggccagtcttcaggcccgcaggtagcatgtgcagtaggtgccagctgtggtggtagcagcagggtgtgtgggcctaatctcaggcccctagaagaggtgctcaggtgctgatggtggtagactaggctaggtcgacncggccgcgaatttagtagtagtagtcgacc

SEQ ID NO: 170478 - DNA, 184 bp, Homo sapiens
cattaagagcaaagtagtaaagtgaaaaaatatataaaggcctggactaagaccagagcagtggggctagaaagggtgaattcaaacgacctttcagaggctgaattgacagaatcaagccaccgacttcagcatcagatagaatccaggctgggtgcagtggctcacacctctaatcccagca

SEQ ID NO: 170479 - DNA, 346 bp, Homo sapiens
tccaggatgggttaaacgttacctctatctccaccccgcatcttctaaagcatctgataagcgctagagaaaacatcctgtgtgcagaggtttagatgctgacacagggtgggggagcaccaacgacccaggggccacgaggagttaatcccccgagagataggggcctactctttggaaagttcagagaaagcaaagagaaaaaagattccaccggctgttacatgtggttaccaaaacacaaaacacaaatgtaggtagagactctgtagcccaaaattaagaaaacaacgaccaaaacttctttagtccaagcggacggtactcacaaaaaaaggaaaagaaa

SEQ ID NO: 170480 - DNA, 581 bp, Homo sapiens
acgcattcatcaaaaccaaagggactccactgaaatggatacatcagaaacatctgaaacttatttcccagcaccctttgtcaaagtgaagtgggaggaccacctgcattagaagcgcctggagagcttgagattgcacgtcttgtactaaaggttccacctagaggcaaaacctggggctttaatgaggtctgacttcatgtctaatccatattacaaaatgtgtctcaagatcctctttctaccatgccttcaggtagaaagggaaaaaacacttaggtatcatttcataagccccagaatgcctaagattacaaagactgagaacaccaaatactggcagggatgtagagtacctcacatactctacatgtggtaggtgtataaactggtacaaccgttttggaaaactgtttgacattctctcatacagttaaacatatacccaacaatcccactcatcagtattgaccccccaaataaaaatatatgttcaactgtagatttatgcatgaatgttcatggcaggtttgcttctcagtaaccccaagctggaaataaatcaaacgtctatccacatg

SEQ ID NO: 170481 - DNA, 397 bp, Homo sapiens
gttagctgggcgtggtgttgtgcgcctgtaatcccagctacttgggaggttgaggcaggagaattgcttgaacccgggaagtggaggttgcagtgagccgaaatcgtgccattgcactctggctccgggcaacagagcaagacagctctgtgcagagaacagactcctgcggtggaaatgctggctgcctttgaggctgggttctgtgaccttgggtttcccagcctgagcttccagtttcatttataaaaggggtgacgtggccgccttcctgcaggcgctctgaaggtggcagattacacagaggtggtacgactcatacaggtttctgcaaacgggggccccatcaacagtcacctttccttagcacagcgccttcctcctggggtgacctcgc

SEQ ID NO: 170482 - DNA, 211 bp, Homo sapiens
tgagccctccctggcccattccatgatgggcatacacactgcacatgtatactcatgcacacatacatacacacatgcatacacaccaatacacatatatgcacacatgtgcacccatatacatacatacaacaggcccctgtgaattctcagcagggcatccatgggcctgggccatgccctccatgccctctatgccctccatgcccat

SEQ ID NO: 170483 - DNA, 507 bp, Homo sapiens
gagagaactggctccttctagacaggggaatatcgtggttagggttctggagtcagattcaatctgggctctgtcacctactagctggggaacaaataattgcgccttggatcatcacctataaaactaataatagctactaatcagattgatgtaagtgccaggattaaatgagagagtctacaagctataaaaagtgctatgtggcagctgcctttaaacattcctaacattggctttgttattattgttgctgcatttccaggtaacgcagaagggcttctctcttccctagcccatccctctgcctcatttctctcacattcctgcttctcctctttctcttccttttcaaccctgcaaaagccttggcttcgggagcagtggcaggagggagggaagaggaggctgcagccgctacagcctcatgccacatgggggcagcaaggccctctgaaatgtgggcctgcctctcccaccgcaccttctggcgggtgcaatggccca

SEQ ID NO: 170484 - DNA, 330 bp, Homo sapiens
cttcggctcggtacccactttccgagtagagctgagggaaatgttactgtaagagtttatcaagaaatagtgctatatgagtgttggagagtatcaaaatatgattttagtgaaacacatttgtgctttccttcctatgttatgatatttaagatgatagtcaagtttattgtcctgacttcaaagaaatcttaatccttcactggaagttaagtttgaaaaagtccaatttgtatgtgagtcattgttgtgatatcatttagcatttgatggctcattgcactcagactaagtgttagttgttactaattttatttactctaacagtat

SEQ ID NO: 170485 - DNA, 256 bp, Homo sapiens
ccagctgtcaggggaaaatttgtcatatttgaaccgacttcttctgtgccaagaacaaggtcagaaataaaggaaaggaataccctgtcacttattggatttgacagtaaattactctttgatgaacagatggactacaagagatttaaattcataatcagagtgtaatcatgaggaacagtgatttgaaatcttctgtcaacccatcagtgaaggacatctcacgagccctagtcacagaatcctgttttggtct

SEQ ID NO: 170486 - DNA, 469 bp, Homo sapiens
tcgatcgagctcggacccagttctgcttcttgaaacagttcctgcttcttgccagtcctcggggtctactccaggggtacaaggtgagagtggctctccagagtgcatttgccttttggtgccgcactgcatcctcactttgaccctgagcgctgcagtaagccctgcagggtgctccaccttgaagcacgggaagatctgatgctggccgccttcttccttcggttgcctgaaagggcccgtgtttatccttcgcttcacagagaacgcaacacacaacattaaacacacatagagagtgaaagagaacaaggcatcttcatcaaggagggcgcaccatttaaccacccgcgaccttgcagtgcgcctctgcaaagtggggactccgctctgtagcaggagatgggggtgttgacgattttgaaagtagttctcagttttccgaggcaaaggtgtctggggctgacga

SEQ ID NO: 170487 - DNA, 5191 bp, Homo sapiens
  misc_feature (447)..(447): n is a, c, g, or t
  misc_feature (3107)..(3107): n is a, c, g, or t
cctgtatacctgtgccactttgtgccttaaggaacaagcttgctcagcgttttcatttttcagtgcttctgagggtccccagtgtttctggatgacatcatggatcagcccagctgtcaacaattcagacttctggacctacaggaaaaacatgaccagggtagcatctctttttagtggtcaggctgtggctgggagtgactatgagcctgtgacaaggcaatgggccataatgcaggaaggtgatgaattcgcaaatctcacagtgtctattcttcctgatgatttcccagagatggatgagagttttctaatttctctccttgaagttcacctcatgaacatttcagccagtttgaaaaatcagccaaccataggacagccaaatatttctacagttgtcatagcactaaatggtgatgcctttggagtgtttgtgatctacantattagtcccaatacttccgaagatggcttatttgttgaagttcaggagcagccccaaaccttggtggagctgatgatacacaggacagggggcagcttaggtcaagtggcagtcgaatggcgtgttgttggtggaacagctactgaaggtttagattttataggtgctggagagattctgacctttgctgaaggtgaaaccaaaaagacagtcattttaaccatcttggatgactctgaaccagaggatgacgaaagtatcatagttagtttggtgtacactgaaggtggaagtagaattttgccaagctccgacactgttagagtgaacattttggccaatgacaatgtggcaggaattgttagctttcagacagcttccagatctgtcataggtcatgaaggagaaattttacaattccatgtgataagaactttccctggtcgaggaaatgttactgttaactggaaaattattgggcaaaatctagaactcaattttgctaactttagcggacaacttttctttcctgaggggtcgttgaatacaacattgtttgtgcatttgttggatgacaacattcctgaggagaaagaagtataccaagtcattctgtatgatgtcaggacacaaggagttccaccagccggaatcgccctgcttgatgctcaaggatatgcagctgtcctcacagtagaagccagtgatgaaccacatggagttttaaattttgctctttcatcaagatttgtgttactacaagaggctaacataacaattcagcttttcatcaacagagaatttggatctctaggagctatcaatgtcacatataccacggttcctggaatgctgagtctgaagaaccaaacagtaggaaacctagcagagccagaagttgattttgtccctatcattggctttctgattttagaagaaggggaaacagcagcagccatcaacattaccattcttgaggatgatgtaccagagctagaagaatatttcctggtgaatttaacttacgttggacttaccatggctgcttcaacttcatttcctcccagactagattcagaaggtttgactgcacaagttattattgatgccaatgatggggcccgaggtgtaattgaatggcaacaaagcaggtttgaagtaaatgaaacccatggaagtttaacattggtagcccagaggagcagagaacctcttggccatgtttccttatttgtgtatgctcagaatttggaagcacaagtggggctggattatatcttcaccccaatgattcttcattttgctgatggagaaaggtataaaaatgtcaatatcatgattcttgatgatgacattccagaaggagatgaaaaatttcagctgattttaacaaatccttctcctggactagagctagggaaaaatacaatagccttaattattgtccttgctaatgatgacggccctggagttctatcatttaacaacagtgagcactttttcctaagagagccaacagctctctacgtccaggagagtgttgcagtattgtacattgttcgggaacctgcacaaggattgtttggaacagtgacagttcagttcattgtgacagaagtgaattcctcaaatgaatctaaagatctgactccttccaaaggctatattgttttagaagaaggtgttcgattcaaggccctacaaatatctgccatattagacacggaaccagaaatggatgagtattttgtttgcaccttgtttaatccaactggaggtgctagactaggggtgcatgttcaaaccctgataacagttttgcaaaaccaggcccctttggggctattcagtatctctgcagttgaaaatagagccacctccatagacatcgaagaagccaataggaccgtgtatttaaatgtatctcgaactaatggcattgatttggctgtgagtgtgcagtgggagacagtatctgaaacagcctttggcatgaggggaatggatgttgtgttttccgtatttcaaagttttttggatgaatcagcttctggctggtgtttctttactttggaaaatttaatatatggtataatgttaagaaaatcatctgttactgtttaccgatggcaggggatttttattccagttgaggatttaaatatagaaaatcctaaaacttgtgaggcctttaatattggtttttctccctactttgtgattactcatgaagaaagaaatgaagaaaagccttctcttaacagtgtgtttacattcacatctggatttaaattattcctggtacaaacaatcattattctggaaagttctcaagtaagatattttacttcagacagccaagattatttaatcattgcaagtcaaagagatgattccgaattaactcaggtcttcaggtggaatggaggaagcttcgtgttgcatcaaaaactccctgtccgaggtgtgctgaccgtggccttgttcaacaagggaggctctgtgttcttagccatttcccaggctaatgccaggctaaactcccttttattcagatggtctggcagtgggtttattaactttcaagaggtgcctgtcagtgggacaacagaagttgaggctttgtcttcagccaatgatatttacctaatatttgccnaaaatgtctttctaggagatcagaattcaattgatattttcatctgggagatgggacagtcttccttcaggtattttcagtctgtagattttgctgctgttaacagaatccactccttcacaccagcctcaggaatagcccacatacttcttattggccaagatatgtctgctctttactgctggaattcggagcgtaatcaattctcttttgttctggaagtaccttctgcttatgatgtggcttctgttacagtaaagtcccttaattcaagcaagaatttaatagctctagtgggagctcattcacatatatatgagctagcctacatttccagccattctgactttattcctagttcaggtgaactgatatttgaacctggtgagagagaagctacaatagcagtaaatatccttgatgatacagttccagaaaaagaagaatccttcaaagttcaacttaaaaatcccaaaggaggagcagagattggcattaatgattctgtaacaataaccattctgtctaatgatgatgcctatggaattgttgcatttgctcagaattcattatataagcaagtggaagaaatggagcaagatagcctagtaaccttgaacgttgaacgcttaaaaggaacatatggccgtataaccatagcatgggaagctgatggaagtattagtgatatatttcctacctcaggagtgattttatttactgaaggccaggtactgtcaacaatcactctaactattcttgctgataatataccagagttatcagaggttgtgattgtaaccctcacccgtatcaccacagaaggggttgaggactcatacaaaggtgctactattgatcaggacagaagcaagtctgttataacaactttgcccaatgactcaccttttggcttggtgggctggcgtgctgcgtctgtcttcattagagtagcagagcctaaagaaaacaccaccactcttcagttacaaatagctcgagataaaggactacttggggatattgccattcacttgagagctcaacccaatttcttactgcatgtcgataatcaagctactgagaatgaagattatgtattgcaagaaacaataataataatgaaagaaaacataaaagaagctcatgccgaagtttccattttgccggatgaccttcctgaattggaggaaggatttattgtcactatcactgaggtgaacctggtgaactctgacttctctacaggacagccaagtgtgcggaggcccggaatggaaatagctgagataatgatagaagaaaatgacgatcccagaggaatttttatgtttcatgttactagaggcgctggggaagttattactgcctatgaggtgcctccacccttgaacgttcttcaagttcctgtagtccggctggctggaagctttggggcagtaaatgtttattggaaagcatcaccagacagtgctggcctggaagactttaaaccatctcatgggattcttgaatttgcagataaacaggttactgcaatgatagaaatcaccataattgatgatgctgaatttgaattgacagagacgttcaatatttccttgatcagtgttgctggaggtggcagacttggtgatgatgttgtggtaactgttgttattccacaaaatgattctccatttggagtatttggatttgaagaaaagactgtaagttaaacatatcaggggaaagccttgtttcaggctagcgtttcatgtaattttgagtagaaagtgtctcacatttttgttttggaagtcttggccaggcatggtggctcatgccagtaatcccagcactttgggaggccgcagcgggcagatcacgaggtcaggagattgacaccatcctggccaatatggttgaattcccgtctctactgaaagtacaaaaattagctgggcgtggtggcacatgcctgtattcccagatacttgggaggctgaggcaggagactcgcttgaacccaggaggcagaggttgcagtgagctgagatcacgccattgcactccagcctggcgacatagagagactccatctc

SEQ ID NO: 170488 - DNA, 621 bp, Homo sapiens
aaagtttctaagggaaaaattaattttttttgtttgtttttgtttttttgctatattataggtttgaagtaaatgaaacccatggaagtttaacattggtagcccagaggagcagagaacctcttggccatgtttccttatttgtgtatgctcagaatttggaagcacaagtggggctggattatatcttcaccccaatggtgggtctcaaaatctatcacagatgacttttacaaattattttataatcattattccttgagaattacagtgatttaggtcccatataaataaattattcttaaaaaccattgtatttttcacagtaaattaggacagaagatttcctcatggtaaaatagttcccttaactattttagtaaatataaattgaattttcattactattctaaatgttattctgtatgcattaactatttcattacagtatttgatactagagaatacaagctgtaatattaaagaatttatatcattagataatcttcccagaatgtttcttacacttcacgaaaattttaactctttcatttctttgtttttgctcactgaaacacgtttagtgttttaaaatacttttacttggtctcttcatgcctt

SEQ ID NO: 170489 - DNA, 1110 bp, Homo sapiens
  misc_feature (447)..(447): n is a, c, g, or t
cctgtatacctgtgccactttgtgccttaaggaacaagcttgctcagcgttttcatttttcagtgcttctgagggtccccagtgtttctggatgacatcatggatcagcccagctgtcaacaattcagacttctggacctacaggaaaaacatgaccagggtagcatctctttttagtggtcaggctgtggctgggagtgactatgagcctgtgacaaggcaatgggccataatgcaggaaggtgatgaattcgcaaatctcacagtgtctattcttcctgatgatttcccagagatggatgagagttttctaatttctctccttgaagttcacctcatgaacatttcagccagtttgaaaaatcagccaaccataggacagccaaatatttctacagttgtcatagcactaaatggtgatgcctttggagtgtttgtgatctacantattagtcccaatacttccgaagatggcttatttgttgaagttcaggagcagccccaaaccttggtggagctgatgatacacaggacagggggcagcttaggtcaagtggcagtcgaatggcgtgttgttggtggaacagctactgaaggtttagattttataggtgctggagagattctgacctttgctgaaggtgaaaccaaaaagacagtcattttaaccatcttggatgactctgaaccagaggatgacgaaagtatcatagttagtttggtgtacactgaaggtggaagtagaattttgccaagctccgacactgttagagtgaacattttggccaatgacaatgtggcaggaattgttagctttcagacagcttccagatctgtcataggtcatgaaggtgggttcctttttttgttaagcatattcattttcttttctatggatgttgtcttttgtctagttctttaaaacttgatagtttttccctttcattattttgttgaactgtgtgtgtgttaatctgcatagaacttctttgggagaaggctttataatgaactgtttagccagatttaggagccttgcaaaccaataccatgttctagcttgccattctctactggtatgattttaaggaagttaaacctgaaatgctt

SEQ ID NO: 170490 - DNA, 486 bp, Homo sapiens
tatagaatttttttatttctatgagatttacctatagtagctttctgtttaatgttcaatgttctataggagtttccttttaaatgttcagagcaggagctataccctctaggatatgcaaataatcaagtcttagcgaccttataaaatataatccacattatgaatcaaacagaatgagccttcagatctgattgcctaaggctcaaaatgttaatgctcctgaaatgccttgtacatattagctagttgaaattgcattaaaacaagagaacgaattgtagtcttgacctcagtctcatttcaccagcctttgcctgctactgccaacctgagaggggagcttctgctctgcagatggatggacagctgctgatcttcacctcctgtctgttcccacaattctaaaagaattaggcctgaggaacttaatcttctggtgttccattgtgaactgactttattaaattttttccaaagttcagt

SEQ ID NO: 170491 - DNA, 637 bp, Homo sapiens
cgacctcagcaatgcttgccaatgctttatccagatgctttctttgttgtttctggtaggtgttgctgacttgggtggagaggagccatagccccttttttctttatgctaatttcattctcctgttgcctatttcctgtctgtagactgcacatggccccggggggcttaaggtgattttccgaccttgcaatcacctcttaggatttttctgttaaacactcttaggtgtatgtgacagcagtagggacagaatgaactggcagtcctgtcacacgccgagctcaaagagagattggacagaaagagagagataaggtggtttaaaggcagaagtgtctcataaaccattaatactagggaggacgaaattcttatagtagtggtggctcaaaaatgatgacaacaaagctttgcagagcatctgctgtgaggcgaagaggtgagattctgggaagccaggacaagacactgtacccaggaactttatggtccaactgggtggggtgggaagcatggaaataaatcaatcccaatgcagggcggtctgtgtttagggtgccagctgatggctctcattggagtgcaggagagtgagcacatccaggcaggaagctttctgaaaggtggctttatg

SEQ ID NO: 170492 - DNA, 628 bp, Homo sapiens
cgcctgggtttgaatcctggctgtagcactcagccgtgtgacagcttaacctttccaggctttagtttcgttatctgtaagtcagggatattagtacctaggtttttgtgttgctgtaaagatcaaggggtcagtatgtataaatgcagaggacgatagtatctgtgctcagtaaacgccagttactgtcacagcgtgaagtggtcagtaattttgctggacaggagtctgattcctgggctcagtgaggcagtgtgaggagcacccacccaggtcctaaccaggtggtatcacatacttactcactgtcaggctgtgattaaagagaaaaacgagctttctttgtgggagtaaaaacaactcgcaaagaaagccaattgccaatgctgaaagcgtgaagcggcgtcaaggatctgtgtgtttcctggggaaaacagtgacatttgggttctctgtgcctctgggtcagatctttcacaaggtcaagggtctgtggtgtcagctgggcacacagcccagggcacacacatccagacagtgattagctcaagtttgcctgcggaggctgcgaggaggagatggctagagaagaattgcaattaagagcacccactgagtacatatatac

SEQ ID NO: 170493 - DNA, 799 bp, Homo sapiens
tcttggcattccaggcaacggaagagcctgaatgtgtcctgacttcttgcttagcaaaattggatcaccctgcactttgggaggccgaggcgggcggatcacgaggtcaggagatcgagaccatcccagctaaaacgcctgattatagtaactggctctgaattgctgcttctgctcaacttcctggatgctagcagtacccagggatgtaaagacctttcaactagagctcatagcaggcccttgtgtctgagaatgactgcttctgtgatctgatgagcacacgtggtgtgcatccagtggctctgctcttaaactaggcccatgactaccaacagtcattcttcctgggctgctgagaccagaaaataaaagtgccttccaaatggttcacagatgcagaggaattttgcctcaggatgaattgcatcttcagtctcacccaaacctgatttagataatatttcaatgagacttcggacttcagactttacagttgatgctgcaaccagttaaggcttttgggattgtcggaatggaatgaatgtattttgcatgtgagaagaacatgaagtgtgggggggccatgggcagaatattatggattgcatgattttgtctccccagaatacatatgttgaaattctaatccccaatgtgatggtattatgtggtgggaactttgggaggtaattaggttatgagggtggagacctcatgtaaaggattagtgcccttataagaagaaacacaagagcttgcttcctctctctgctctccactatgtgaagatagaaca

SEQ ID NO: 170494 - DNA, 767 bp, Homo sapiens
tcttggcattccaggcaacggaagagcctgaatgtgtcctgacttcttgcttagcaaaattggatcaccctgcactttgggaggccgaggcgggcggatcacgagcctgattatagtaactggctctgaattgctgcttctgctcaacttcctggatgctagcagtacccagggatgtaaagacctttcaactagagctcatagcaggcccttgtgtctgagaatgactgcttctgtgatctgatgagcacacgtggtgtgcatccagtggctctgctcttaaactaggcccatgactaccaacagtcattcttcctgggctgctgagaccagaaaataaaagtgccttccaaatggttcacagatgcagaggaattttgcctcaggatgaattgcatcttcagtctcacccaaacctgatttagataatatttcaatgagacttcggacttcagactttacagttgatgctgcaaccagttaaggcttttgggattgtcggaatggaatgaatgtattttgcatgtgagaagaacatgaagtgtgggggggccatgggcagaatattatggattgcatgattttgtctccccagaatacatatgttgaaattctaatccccaatgtgatggtattatgtggtgggaactttgggaggtaattaggttatgagggtggagacctcatgtaaaggattagtgcccttataagaagaaacacaagagcttgcttcctctctctgctctccactatgtgaagatagaaca

SEQ ID NO: 170495 - DNA, 944 bp, Homo sapiens
acctgaagagatgactgtcattctctgataagaggaaggagttacacctggtttgtgaacatatttatcttaataaatcacagggagttgttagagctcacccttttctttcatccaggagaatccagaagtgtcaatgtttctctggcaggagcccggcctgcaggttgggtgagaaactcacgaataggactctgacatgtgtgttcaactctcccttggaatgtctcacttttatttcagcacaattcccatgttcacctctgaggtgtaaggtggagtgggtagcctcctgcttggtgtgctaataaccaaaacagattaccaatcaccttccctttgttttccttggcatgctgaaaaaggcatacaaaaatactaatatgagcatcagagaaataaataaactcagaaaatacaagaagcagctgggcgcggtggctcatgcctgtaatcccagcactttgggaggccaaggtgggcggatcacctgaggtcaggagtttgagaacagcctgggcaacatggtggggccccgcctctactaaaaatataaaaattagtcaggggtgtggtggcctgtgcctgtagtccaggctgcttgggaggctgaggcaggagaattgcttgaactcggagggtggaggttgcagtgagccgagattgtgccactgtactacagcctgggtgacagagtgagtgagactccttctaaaaacaaaaaaacaaaaacaataaaaaagaaatacaaaaagcttagaacttgggtaatttttaaggtatagattttagattttagcaaaaatgtcttgcttctaggactggttttatcttatgccctttcttgagaattctaatgtctagtctcagaggacagtgaaaaactcacatatatctagtcagacttaactattgcatgtctctcgctgctcttcacaaggaag

SEQ ID NO: 170496 - DNA, 758 bp, Homo sapiens
attcacgttgttctccatacatggtttcttaggtgttggggggcagtcatctggaccatttactcagcttctagccacaatttctatttttttctctggggagtacatcttttgtataatgattcactcagaagccaagagtccttcctacaattcaaatgtaacagcagtagctactgttgttgtttattttccgttgtttatttattaagtattatgttaaatacttcagtatttttacagatttatgatgtagttgtcatacaaagaggtaggtacacagacatttgccagatcattctctgtcacactgcttaaagaaagagaacgttacaaatgcactttgagcatccggtgtacacttcagttgcattttccttcctgctcctgagagataaccactatcttctttaatgattatcatttccgtgtttatagttttatatgtttttaggtttcatggaaatagtattttattgtgtgtaatctctgccgcttgtattttttcattcaacattttgttttgtaagagttgtccatattgatgagtattcctctgataattttgtattttattgctctttgaaaaattcattgaatgactgtaccactatttattcattttcctgttaatgaaacagtgttactatggaattgttgtacatgtctccttgtacacagacttctctggatacatatatccaggagtggaattactatgtagtaggatatggacatcttcagattgactaggttgt

SEQ ID NO: 170497 - DNA, 510 bp, Homo sapiens
ccgcccagacgcggaggcaggcaccaggtcgacgaagaccatcccagcacagagcttccgctgaggacactgcaaggggcagccaatgcggaggcacagagctgtttgggaaaatcggtcagctggctctgagctgggaagaaagaggaattcacactgagcaacactctagccctttagtgggtctcattcccagaggataacaagatagagaaaatgttagcagaggcgttctcctaacagtgggatctggggggagtttgttttcctgcttctttatactttacaaaattcccacaacgaatgccataaaaaaaatgaaacaagatcataaaaaagagctggcaggtttggttacctgtgcgttggctctggggagctgacctttgtagggcgggtgctctgatgggggctgtaatgccgcggcgcccacaacctcacagggcactgtcttttaaccctaggtggatttcccaggcacgggccaagtcacctccccctgctgtcact

SEQ ID NO: 170498 - DNA, 2197 bp, Homo sapiens
cgccgcctccgccctcggcctcgcacttcctggcggagccatggctgcgcagcgggctggccgggggtctcctgaacccgggccccggccgccccgaccgcccggccccgccgccggggctgtccccgccgcgtccgtagcgcgtcctgccagggctgaaatctctttaatgatggagggaagcaggcagacgcgagtgtctcggccatacaagatcagcgaatcatcaaaggtataccgctgggccgaccactcaagcacggtgctgcagcggctgaacgagcagcgtctccgcgggctcttctgcgacgtcgtcctggtggccgatgagcagcgtgtgccagcccatcgcaacctgctggccgtgtgcagcgactacttcaactccatgttcaccatcggcatgcgggaagctttccagaaggaggtggagctgatcggcgcctcctacattgggctcaaggccgtggtggacttcctgtacggcggggagctggtgctggatggcggcaacattgactacgtcctggagacggctcacctgctgcagatctggacggtggtagacttctgctgtgagtacctggagcaggaggtgagcgaggacaactacctgtacctgcaggagctggcctccatctacagcctcaagcggcttgatgccttcatcgatggcttcatcctgaaccacttcggcacgctgtcctttacgcccgacttcctgcagaacgtctccatgcagaagctgtgtgtctacctgagcagcagcgaggtgcagcgggagtgtgagcacgacctcctgcaggccgccctgcagtggctgacgcagcagcccgagcgcgaggcccacgcccgccaggtgctggagaacatccacttcccgctcatccccaagaacgacctgctgcaccgcgtcaagccggccgtgtgctcgctgctgcccaaggaggccaactgcgagggcttcatcgaggaggccgtgcgctaccacaacaacctggcggcccagcccgtcatgcagaccaagcgcacggcgctgcgcaccaaccaggagcgcctgctgtttgtgggcggcgaggtctccgagcggtgtctggagctcagtgacgacacctgctacctggacgccaagagcgagcagtgggtcaaagagacgccgctgcccgcccggcggagccaccactgtgtcgcggtgctggggggcttcatcttcatcgccggcggcagcttctcacgggacaacggaggggatgcggcctccaatcttctttataggtatgacccccgctgtaaacagtggatcaaggtggcctccatgaaccagcgccgtgtggatttctaccttgcctccatcgaagacatgctggtggccatcggcggccggaatgagaacggagcgctctcttcagtagagacgtacagtcccaagactgactcctggtcctatgtggccggcttgccaaggttcacgtacggccacgcgggcaccatctacaaagacttcgtgtacatctcggggggccacgactaccaaattggcccctaccgcaagaacctgctatgctacgaccaccggacagacgtgtgggaggagcggcggcccatgaccacggcgcgcggctggcacagcatgtgcagcctgggtgacagcatctactccatcgggggcagcgatgacaacatcgagtccatggagcgcttcgacgtgctgggcgtggaggcctacagcccgcagtgcaaccagtggacccgcgtggcgccgctgctgcacgccaacagcgagtcgggcgtggcagtgtgggagggccgcatctacatcctgggcggctacagctgggagaacactgccttctccaagaccgtgcaggtgtacgaccgcgaggccgacaagtggagcaggggcgtcgacctgcccaaggccatcgctggcgggtccgcctgtgtctgcgccctggagccacggccagaggacaagaagaagaaaggcaaaggcaagaggcaccaggaccggggccagtgaccctagctgcgcctcttgggaccatcctcaccgtcacctcccagggctctgtagaccagcagcaacttcttagtattccggaaacattatgtacaacttagcagctttttttacttttatgattcttggtatttctatgatatcacagtaaccaattaaatactatctgtaacttta

SEQ ID NO: 170499 - DNA, 2536 bp, Homo sapiens
cgccgcctccgccctcggcctcgcacttcctggcggagccatggctgcgcagcgggctggccgggggtctcctgaacccgggccccggccgccccgaccgcccggccccgccgccggggctgtccccgccgcgtccgtagcgcgtcctgccagggctgaaatctctttaatgatggagggaagcaggcagacgcgagtgtctcggccatacaagatcagcgaatcatcaaaggtataccgctgggccgaccactcaagcacggtgctgcagcggctgaacgagcagcgtctccgcgggctcttctgcgacgtcgtcctggtggccgatgagcagcgtgtgccagcccatcgcaacctgctggccgtgtgcagcgactacttcaactccatgttcaccatcggcatgcgggaagctttccagaaggaggtggagctgatcggcgcctcctacattgggctcaaggccgtggtggacttcctgtacggcggggagctggtgctggatggcggcaacattgactacgtcctggagacggctcacctgctgcagatctggacggtggtagacttctgctgtgagtacctggagcaggaggtgagcgaggacaactacctgtacctgcaggagctggcctccatctacagcctcaagcggcttgatgccttcatcgatggcttcatcctgaaccacttcggcacgctgtcctttacgcccgacttcctgcagaacgtctccatgcagaagctgtgtgtctacctgagcagcagcgaggtgcagcgggagtgtgagcacgacctcctgcaggccgccctgcagtggctgacgcagcagcccgagcgcgaggcccacgcccgccaggtgctggagaacatccacttcccgctcatccccaagaacgacctgctgcaccgcgtcaagccggccgtgtgctcgctgctgcccaaggaggccaactgcgagggcttcatcgaggaggccgtgcgctaccacaacaacctggcggcccagcccgtcatgcagaccaagcgcacggcgctgcgcaccaaccaggagcgcctgctgtttgtgggcggcgaggtctccgagcggtgtctggagctcagtgacgacacctgctacctggacgccaagagcgagcagtgggtcaaagagacgccgctgcccgcccggcggagccaccactgtgtcgcggtgctggggggcttcatcttcatcgccggcggcagcttctcacgggacaacggaggggatgcggcctccaatcttctttataggtatgacccccgctgtaaacagtggatcaaggtggcctccatgaaccagcgccgtgtggatttctaccttgcctccatcgaagacatgctggtggccatcggcggccggaatgagaacggagcgctctcttcagtagagacgtacagtcccaagactgactcctggtcctatgtggccggcttgccaaggttcacgtacggccacgcgggcaccatctacaaagacttcgtgtacatctcggggggccacgactaccaaattggcccctaccgcaagaacctgctatgctacgaccaccggacagacgtgtgggaggagcggcggcccatgaccacggcgcgcggctggcacagcatgtgcagcctgggtgacagcatctactccatcgggggcagcgatgacaacatcgagtccatggagcgcttcgacgtgctgggcgtggaggcctacagcccgcagtgcaaccagtggacccgcgtggcgccgctgctgcacgccaacagcgagtcgggcgtggcagtgtgggagggccgcatctacatcctgggcggctacagctgggagaacactgccttctccaagaccgtgcaggtgtacgaccgcgaggccgacaagtggagcaggggcgtcgacctgcccaaggccatcgctggcgggtccgcctgtgtctgcgccctggagccacggccagaggacaagaagaagaaaggcaaaggcaagaggcaccaggaccggggccagtgaccctagctgcgcctcttgggaccatcctcaccgtcacctcccagggctctgtagaccagcagcaacttcttagtattccggaaacattatgtacaacttagcagctttttttacttttatgattcttggtatttctatgatatcacagtaaccaattaaatactatctgtaactttacatatcttgcttgaataactaaccctgggcccaggcagtgagcaaccccttgtatcttcacaggtctttgccccgtgttatgattcctcatgggtccttgctgactgtccccctgagagtagctggcacgtgggtaacacagaaatttctgtagtgaagcttgggcctcaaagggttctcttaggccacctagtccaagcctccccaaacctggctgaacttttaagaatacagatgcgtgagccccgctcagaattatggaatccaaaaccaccaggaacggggaggaggtggtgcccagaagctgtattttaactagttcttggaattctgggtatt

SEQ ID NO: 170500 - DNA, 1341 bp, Homo sapiens
cgccgcctccgccctcggcctcgcacttcctggcggagccatggctgcgcagcgggctggccgggggtctcctgaacccgggccccggccgccccgaccgcccggccccgccgccggggctgtccccgccgcgtccgtagcgcgtcctgccagggctgaaatctctttaatgatggagggaagcaggcagacgcgagtgtctcggccatacaagatcagcgaatcatcaaaggtataccgctgggccgaccactcaagcacggtgctgcagcggctgaacgagcagcgtctccgcgggctcttctgcgacgtcgtcctggtggccgatgagcagcgtgtgccagcccatcgcaacctgctggccgtgtgcagcgactacttcaactccatgttcaccatcggcatgcgggaagctttccagaaggaggtggagctgatcggcgcctcctacattgggctcaaggccgtggtggacttcctgtacggcggggagctggtgctggatggcggcaacattgactacgtcctggagacggctcacctgctgcagatctggacggtggtagacttctgctgtgagtacctggagcaggaggtgagcgaggacaactacctgtacctgcaggagctggcctccatctacagcctcaagcggcttgatgccttcatcgatggcttcatcctgaaccacttcggcacgctgtcctttacgcccgacttcctgcagaacgtctccatgcagaagctgtgtgtctacctgagcagcagcgaggtgcagcgggagtgtgagcacgacctcctgcaggccgccctgcagtggctgacgcagcagcccgagcgcgaggcccacgcccgccaggtgctggagaacatccacttcccgctcatccccaagaacgacctgctgcaccgcgtcaagccggccgtgtgctcgctgctgcccaaggaggccaactgcgagggcttcatcgaggaggccgtgcgctaccacaacaacctggcggcccagcccgtcatgcagaccaagcgcacggcgctgcgcaccaaccaggagcgcctgctgtttgtgggcggcgaggtctccgagcggtgtctggagctcagtgacgacacctgctacctggacgccaagagcgagcagtgggtcaaagagacgccgctgcccgcccggcggagccaccactgtgtcgcggtgctggggggcttcatcttcatcgccggcggcagcttctcacgggacaacggaggggatgcggcctccaatcttctttataggtatgacccccgctgtaaacagtggatcaaggtgagattaaagccagattatttcttttctcttga

SEQ ID NO: 170501 - DNA, 1551 bp, Homo sapiens
cgccgcctccgccctcggcctcgcacttcctggcggagccatggctgcgcagcgggctggccgggggtctcctgaacccgggccccggccgccccgaccgcccggccccgccgccggggctgtccccgccgcgtccgtagcgcgtcctgccagggctgaaatctctttaatgatggagggaagcaggcagacgcgagtgtctcggccatacaagatcagcgaatcatcaaaggtataccgctgggccgaccactcaagcacggtgctgcagcggctgaacgagcagcgtctccgcgggctcttctgcgacgtcgtcctggtggccgatgagcagcgtgtgccagcccatcgcaacctgctggccgtgtgcagcgactacttcaactccatgttcaccatcggcatgcgggaagctttccagaaggaggtggagctgatcggcgcctcctacattgggctcaaggccgtggtggacttcctgtacggcggggagctggtgctggatggcggcaacattgactacgtcctggagacggctcacctgctgcagatctggacggtggtagacttctgctgtgagtacctggagcaggaggtgagcgaggacaactacctgtacctgcaggagctggcctccatctacagcctcaagcggcttgatgccttcatcgatggcttcatcctgaaccacttcggcacgctgtcctttacgcccgacttcctgcagaacgtctccatgcagaagctgtgtgtctacctgagcagcagcgaggtgcagcgggagtgtgagcacgacctcctgcaggccgccctgcagtggctgacgcagcagcccgagcgcgaggcccacgcccgccaggtgctggagaacatccacttcccgctcatccccaagaacgacctgctgcaccgcgtcaagccggccgtgtgctcgctgctgcccaaggaggccaactgcgagggcttcatcgaggaggccgtgcgctaccacaacaacctggcggcccagcccgtcatgcagaccaagcgcacggcgctgcgcaccaaccaggagcgcctgctgtttgtgggcggcgaggtctccgagcggtgtctggagctcagtgacgacacctgctacctggacgccaagagcgagcagtgggtcaaagagacgccgctgcccgcccggcggagccaccactgtgtcgcggtgctggggggcttcatcttcatcgccggcggcagcttctcacgggacaacggaggggatgcggcctccaatcttctttataggtatgacccccgctgtaaacagtggatcaaggtgagattaaagccagattatttcttttctcttgaggactctctcggtttccttaacctagccttgactttccttacctctctggggccttgacaactatcctgcttctgaatgaggtgtgatgataaagtgacgagcagaataccccggggcctacatcctggacagggagagggagagccgacccaccccttcgaggggtccgtcatcgttcagagcagcactgcctggcggggctttctgtg

SEQ ID NO: 170502 - DNA, 1821 bp, Homo sapiens
ggggtgggattctaaaggatccccggatcggactacgctttccagaaggaggtggagctgatcggcgcctcctacattgggctcaaggccgtggtggacttcctgtacggcggggagctggtgctggatggcggcaacattgactacgtcctggagacggctcacctgctgcagatctggacggtggtagacttctgctgtgagtacctggagcaggaggtgagcgaggacaactacctgtacctgcaggagctggcctccatctacagcctcaagcggcttgatgccttcatcgatggcttcatcctgaaccacttcggcacgctgtcctttacgcccgacttcctgcagaacgtctccatgcagaagctgtgtgtctacctgagcagcagcgaggtgcagcgggagtgtgagcacgacctcctgcaggccgccctgcagtggctgacgcagcagcccgagcgcgaggcccacgcccgccaggtgctggagaacatccacttcccgctcatccccaagaacgacctgctgcaccgcgtcaagccggccgtgtgctcgctgctgcccaaggaggccaactgcgagggcttcatcgaggaggccgtgcgctaccacaacaacctggcggcccagcccgtcatgcagaccaagcgcacggcgctgcgcaccaaccaggagcgcctgctgtttgtgggcggcgaggtctccgagcggtgtctggagctcagtgacgacacctgctacctggacgccaagagcgagcagtgggtcaaagagacgccgctgcccgcccggcggagccaccactgtgtcgcggtgctggggggcttcatcttcatcgccggcggcagcttctcacgggacaacggaggggatgcggcctccaatcttctttataggtatgacccccgctgtaaacagtggatcaaggtggcctccatgaaccagcgccgtgtggatttctaccttgcctccatcgaagacatgctggtggccatcggcggccggaatgagaacggagcgctctcttcagtagagacgtacagtcccaagactgactcctggtcctatgtggccggcttgccaaggttcacgtacggccacgcgggcaccatctacaaagacttcgtgtacatctcggggggccacgactaccaaattggcccctaccgcaagaacctgctatgctacgaccaccggacagacgtgtgggaggagcggcggcccatgaccacggcgcgcggctggcacagcatgtgcagcctgggtgacagcatctactccatcgggggcagcgatgacaacatcgagtccatggagcgcttcgacgtgctgggcgtggaggcctacagcccgcagtgcaaccagtggacccgcgtggcgccgctgctgcacgccaacagcgagtcgggcgtggcagtgtgggagggccgcatctacatcctgggcggctacagctgggagaacactgccttctccaagaccgtgcaggtgtacgaccgcgaggccgacaagtggagcaggggcgtcgacctgcccaaggccatcgctggcgggtccgcctgtgtctgcgccctggagccacggccagaggacaagaagaagaaaggcaaaggcaagaggcaccaggaccggggccagtgaccctagctgcgcctcttgggaccatcctcaccgtcacctcccagggctctgtagaccagcagcaacttcttagtattccggaaacattatgtacaacttagcagctttttttacttttatgattcttggtatttctatgatatcacagtaaccaattaaatactatctgtaacttta

SEQ ID NO: 170503 - DNA, 2150 bp, Homo sapiens
cgccgcctccgccctcggcctcgcacttcctggcggagccatggctgcgcagcgggctggccgggggtctcctgaacccgggccccggccgccccgaccgcccggccccgccgccggggctgtccccgccgcgtccgtagcgcgtcctgccagggctgaaatctctttaatgatggagggaagcaggcagacgcgagtgtctcggccatacaagatcagcgaatcatcaaaggtataccgctgggccgaccactcaagcacggtgctgcagcggctgaacgagcagcgtctccgcgggctcttctgcgacgtcgtcctggtggccgatgagcagcgtgtgccagcccatcgcaacctgctggccgtgtgcagcgactacttcaactccatgttcaccatcggcatgcgggaagctttccagaaggaggtggagctgatcggcgcctcctacattgggctcaaggccgtggtggacttcctgtacggcggggagctggtgctggatggcggcaacattgactacgtcctggagacggctcacctgctgcagatctggacggtggtagacttctgctgtgagtacctggagcaggaggtgagcgaggacaactacctgtacctgcaggagctggcctccatctacagcctcaagcggcttgatgccttcatcgatggcttcatcctgaaccacttcggcacgctgtcctttacgcccgacttcctgcagaacgtctccatgcagaagctgtgtgtctacctgagcagcagcgaggtgcagcgggagtgtgagcacgacctcctgcaggccgccctgcagtggctgacgcagcagcccgagcgcgaggcccacgcccgccaggtgctggagaacatccacttcccgctcatccccaagaacgacctgctgcaccgcgtcaagccggccgtgtgctcgctgctgcccaaggaggccaactgcgagggcttcatcgaggaggccgtgcgctaccacaacaacctggcggcccagcccgtcatgcagaccaagcgcacggcgctgcgcaccaaccaggagcgcctgctgtttgtgggcggcgaggtctccgagcggtgtctggagctcagtgacgacacctgctacctggacgccaagagcgagcagtgggtcaaagagacgccgctgcccgcccggcggagccaccactgtgtcgcggtgctggggggcttcatcttcatcgccggcggcagcttctcacgggacaacggaggggatgcggcctccaatcttctttataggtatgacccccgctgtaaacagtggatcaaggtggcctccatgaaccagcgccgtgtggatttctaccttgcctccatcgaagacatgctggtggccatcggcggccggaatgagaacggagcgctctcttcagtagagacgtacagtcccaagactgactcctggtcctatgtggccggcttgccaaggttcacgtacggccacgcgggcaccatctacaaagacttcgtgtacatctcggggggccacgactaccaaattggcccctaccgcaagaacctgctatgctacgaccaccggacagacgtgtgggaggagcggcggcccatgaccacggcgcgcggctggcacagcatgtgcagcctgggtgacagcatctactccatcgggggcagcgatgacaacatcgagtccatggagcgcttcgacgtgctgggcgtggaggcctacagcccgcagtgcaaccagtggacccgcgtggcgccgctgctgcacgccaacagcgagtcgggcgtggcagtgtgggagggccgcatctacatcctgggcggctacagctgggagaacactgccttctccaagaccgtgcaggtgtacgaccgcgaggccgacaagtggagcaggggcgtcgacctgcccaaggccatcgctggcgggtccgcctgtgtctgcgccctggagccacggccagaggacaagaagaagaaaggcaaaggcaagaggcaccaggaccggggccagtgaccctagctgcgcctcttgggaccatcctcaccgtcacctcccagggctctgtagaccagcagcaacttcttagtattccggaaacattatgtacaactgtcgaattcggtaccagctcgatcgtacagtc

SEQ ID NO: 170504 - DNA, 1368 bp, Homo sapiens
cgccgcctccgccctcggcctcgcacttcctggcggagccatggctgcgcagcgggctggccgggggtctcctgaacccgggccccggccgccccgaccgcccggccccgccgccggggctgtccccgccgcgtccgtagcgcgtcctgccagggctgaaatctctttaatgatggagggaagcaggcagacgcgagtgtctcggccatacaagatcagcgaatcatcaaaggtataccgctgggccgaccactcaagcacggtgctgcagcggctgaacgagcagcgtctccgcgggctcttctgcgacgtcgtcctggtggccgatgagcagcgtgtgccagcccatcgcaacctgctggccgtgtgcagcgactacttcaactccatgttcaccatcggcatgcgggaagctttccagaaggaggtggagctgatcggcgcctcctacattgggctcaaggccgtggtggacttcctgtacggcggggagctggtgctggatggcggcaacattgactacgtcctggagacggctcacctgctgcagatctggacggtggtagacttctgctgtgagtacctggagcaggaggtgagcgaggacaactacctgtacctgcaggagctggcctccatctacagcctcaagcggcttgatgccttcatcgatggcttcatcctgaaccacttcggcacgctgtcctttacgcccgacttcctgcagaacgtctccatgcagaagctgtgtgtctacctgagcagcagcgaggtgcagcgggagtgtgagcacgacctcctgcaggccgccctgcagtggctgacgcagcagcccgagcgcgaggcccacgcccgccaggtgctggagaacatccacttcccgctcatccccaagaacgacctgctgcaccgcgtcaagccggccgtgtgctcgtgctgcacgccaacagcgagtcgggcgtggcagtgtgggagggccgcatctacatcctgggcggctacagctgggagaacactgccttctccaagaccgtgcaggtgtacgaccgcgaggccgacaagtggagcaggggcgtcgacctgcccaaggccatcgctggcgggtccgcctgtgtctgcgccctggagccacggccagaggacaagaagaagaaaggcaaaggcaagaggcaccaggaccggggccagtgaccctagctgcgcctcttgggaccatcctcaccgtcacctcccagggctctgtagaccagcagcaacttcttagtattccggaaacattatgtacaacttagcagctttttttacttttatgattcttggtatttctatgatatcacagtaaccaattaaatactatctgtaacttta

SEQ ID NO: 170505 - DNA, 339 bp, Homo sapiens
gagactcagagagagtgaagctgggttctggcccaggcggcctgactgcaaagctgtccacttccccgccctgccctgccatttctttgctaatgacggctactgtctatagagtgttcatggggtgcccactccctatattcttaaatcctcatggccctctaagacggcaggctgttccccggctcggagggggtaagcctggcacagccctgagctctccctctgtctctgcccgtcgaccctgcaggttcacgtacggccacgcgggcaccatctacaaagacttcgtgtacatctcggggggccacgactaccaaattggcccctaccgcaaga

SEQ ID NO: 170506 - DNA, 290 bp, Homo sapiens
agaaagggcatctggcagacagctgcatctgcaaaggcacaaaggcttccggcaagtctgctgacttaactggagcactggcttcctggctggggtggctggaagacctacagggccggggctgtggagtgccctgctgggaactggactggatccttgagcaatgaggagtaatccacaacaaaatgcggtctgtgttttagaaaaataattacagcacacagaggagagactggggggtgaagaaactgggaacgcacagacctgctggaaagctcttatgaagaact

SEQ ID NO: 170507 - DNA, 379 bp, Homo sapiens
gaaaatcacttgaacctgggaggcagaggttgcagtgagccgagatcacgtcactgcactccagcctgggggtcgcagcaagactccatctcaaaaacaaaacaaaacaaagagggagcctaaagtcagccctttgctgcagcggcccctgcactaacaggacctggaagtgcccttcagtaacattgggacccacatcagtccagaggaaggccagagcagctgcaggacctgttcccagccttccaaagcaaattccttcccatctcgtcctggcaccccttctggaggagaggctagacccccctgaagtagaggagagggaagactcagaggctcagggaagacctcacccaggcagctgctgccccagggcttt

SEQ ID NO: 170508 - DNA, 405 bp, Homo sapiens
tagattatactttttccttaaagagagaggaaattgtctgactgcagggtaagtacactctgctaatgagttaaattatgatatatgaatactttaaacctgaaatgaaaatacgaaagtgtttgtgttcaagttatcagcattacttcctacttttttttttttttttttgagacggagtctcgctctgttgccaggctggaatgcagtggcacgatctcggctcactgcaacctctgcctcctggttcaagcgattctcctgcctcagcctcccaagtagctgggactacaggcacatgccaccacgcccagctaatttttgtatttttagtaaagatggggtttcaccatcttggccaggatggtctcaatctcttgaccttgtgatccgcctgcctcggcc

SEQ ID NO: 170509 - DNA, 484 bp, Homo sapiens
tacagaaataaaaaatgaaaagataagcaaacgtgggtgatatactcacatatcagagtgaagaatttttactggaaatccggatgattacctccattttacaaaataacatcaaagtctactacagaaagaacaagggctgggtctgaaagactgggagtgagtaagcagcaactgtagctcagtgagaactaaactggtagaaaaacattctaaaaatctaagcacagctcctctatagccaaccaagatgttcagtgtctccaactacattgtgcagtcttacacttaagaaaacgtttaacgatctttacataatattcacccagtagcaaaagccatacatctgtgcattattattccaactccctaccttcccatcctcacctcctatcagtcactgatttcacttcccaaatattgttctaacaggccctgtggccctgttctagttccagcttccatgtcttgctcagcttataaa

SEQ ID NO: 170510 - DNA, 482 bp, Homo sapiens
agataaagactgggtactggcaggtggaaggaggggaggatgaagtcaaagtcaagattctctgggttggagtcaggtcttcgcaacccactcaccatatgacttagagcaggcaggtaacgcaccctgaacctccatttccccatctgtcaactgcgaagtaatgacaactacccctttaaagactggtattcaaatctattttttgtttctcttaagaaaggatgctactgaaaaatggtaaagccctttattgggtgtgggacgaagaggtccacccaatatgacatgtaatcagttgaaggtggcttgttccttgcccccggtgagggagctatctgggtgggcctctttgcagagtggccatctgtgcgccacacataaccgtaggtgatgaggggcccaattccatgagaagctgttcagttttggccaggacctccctcatacatgctggatatttccatcgggcaggcagtctc

SEQ ID NO: 170511 - DNA, 521 bp, Homo sapiens
atctatgccagaggggtgtcttttttaaaaattcttcttcattgctgactgaaactggcagatgattgaccagtatcctttgaccatctgcactttatttggaaggaagcaggggctgtccaccctgaaaaagagtgactgatgacatctgacttttgtcgatgggacttctcaagaagccattccttggagcttctgttacagctgtaaaccaaagtggagctggtgcttcttgggagcctcgccttacaactagttcctgcctttcgtccagtaccaagtcccccgttgcttctggtcagcccacttgtagacttccaggggacacatctttattctgtttcaggaaaccagtcacgacacgtccacatatgtatttgtgtatgttaatgtccagtatcacatcacccatgaaagtcgtgggcagttcaggagatacctgccttcatctttgttctttgttgccttaggttcttcagagaaagatcacaacaaaaaatgtacactgtcgtttacagcta

SEQ ID NO: 170512 - DNA, 105 bp, Homo sapiens
gctgctgggtagggaacaacagtgtctttacaagttggtgcattataaatacatttccataatttgaatcaagcctaccatctcctcctcatctccaaccacccg

SEQ ID NO: 170513 - DNA, 392 bp, Homo sapiens
aagtcacctggatgaatctccagagaattatgctgagtgaaaagagccaagcccaaagatgacctactgttcgattccatttatataacgttcgtgaaatgctctgcctatgctggacttgaagctttctgtctgtcaaaaaataaaagaagatggaaggaaggatgtacagaaggaagaaaaaaaaaagaaagaacctgtgactatgaagcaacacccaaagccactgtcagatgtcatggagatgagacctcacaagaaggccagaaaacaacagactaactccggatatgacaaactctttataaatacttataagtactgttggctacaatagttctaaagccttaacaaatgatgttgaagcaaaatgaataatgattattcctata

SEQ ID NO: 170514 - DNA, 328 bp, Homo sapiens
actcaattccgcttactctttcactatcttctttccactagtttcatcctaaactgagagaccaacatcaaaagaatcttctcaagtttctgagtgacggcaagaaactagactactgttaccaaggaactttttaaagcaaactgcttttgctgatatgaggagaaagttaattaataagaaaataccttaaatgtgttttgaagctgttaaaggtgtgtaacaattactctgaatttattatagcaccagttagagacccaggaaaactataaaattgcacatcagggcagagctgagagacgacatctgctttgggattgaaaaa

SEQ ID NO: 170515 - DNA, 805 bp, Homo sapiens
cacctctgtaactgttgcttgctgctttctctttaggcaacacccaaagccactgtcagatgtcatggagatgagacctcacaagcctactcaacgtgaagatgatgagaatgaagacctttatgatgatctgcttccacttaaagaatagcccatcatgatctgaaggcagcggtggttgctggtggaggatgtgagctttggaactggagctctttgattcaaagctctgccgcttactcactggataagaccatgatcaagttatttcatctgaaaaattgagttgactgcaggtaactgaaactgcggaaagtgaaactgcagataagagggaccactgtaaataagtgacatgaatgatactgcaaaggaccatagcctaaccagccaagcaaactggaagtacctttagactcacgctttgccaagctcagttccagaatcacatgatgaaaagaatgatggaaagaaaatgtttgtgatattaaaattaaggaaattactccaactcagagtttcatcctaaactgagagaccaacatcaaaagaatcttctcaagtttctgagtgacggcaagaaactagactactgttaccaaggaactttttaaagcaaactgcttttgctgatatgaggagaaagttaattaataagaaaataccttaaatgtgttttgaagctgttaaaggtgtgtaacaattactctgaatttattatagcaccagttagagacccaggaaaactataaaattgcacatcagggcagagctgagagacgacatctgctttgggattgaaaaa

SEQ ID NO: 170516 - DNA, 754 bp, Homo sapiens
ggcgccggtgcagaggtgctcaagcctcctcgcggtccgcagtcagtgccgccgcgcccggcctcccgcacgccccgcaggtagcgcccccgcccgcggcccagagtgcgctcgcgccggcaccagctcccggataaacggcgcgccgcgcggagatgacagccgaggagatgaaggcgaccgagagcggggcgcagtcggcgccgctgcccatggagggagtggacatcagccccaaacaggacgaaggcgtgctgaaggtcatcaagagagagggcacaggtacagagatgcccatgattggggaccgagtctttgtccactacactggctggctattagatggcacaaagtttgactccagtctggatcgcaaggacaaattctcctttgacctgggaaaaggggaggtcatcaaggcttgggacattgccatagccaccatgaaggtgggggaggtgtgccacatcacctgcaaaccagaatatgcctacggttcagcaggcagtcctccaaagattccccccaatgccacgcttgtatttgaggtggagttgttgagtttaagggagaagatctgacggacagaggacagatggcggaatcattcgcagaatacagactcgcggtgaaggctatgctaagcccaatgagggtgctatcgtggcagggtgcactggcagggtactacaaggacaagcctctttgaccagcggggaccctccggtttgaccattggcgaggggggagaaac

SEQ ID NO: 170517 - DNA, 257 bp, Homo sapiens
tattatgtttgcaagcttaatatccaaaaatgggccattcttccaaatgagagttccttcctgattatttagtatgctgatggtattgtcagacaggaagccatggttagaaagattcagaaaaatacaaacctttaagctagatgggcacttttgccctttaggtttatgaaaaatgccaacttttgtgaactacacaatcggaatcttgatttggttttcccggataacttatgtcataagaaatttggtaactc

SEQ ID NO: 170518 - DNA, 585 bp, Homo sapiens
actacccttatgaccttttttgcttaatgaagttacttcccttgcacccatgccccacgcttgggccataccatcctggcctctcagcactcagatgccaaattgaccacattggtaccactggacacatttaggactgaatttaagagaggaagaagtcaagccaacaggaaccaagtctgctttgattaacatgtgctgcaaacctattgggtgccaggcatttcaccagacactttataaaattgtgtcatttattgttccaagttcagggctctgagcttcagaggtgtgttaactactccctgattccacagccaggaagcagactgcctagtatgttgagcacaggggggcttgaccctgtgggcacaaagagtctatcaacaccagctgctttgggcagagctgccatgtcctggcctagaggctgtgtgttgtctcagcagctccaccctgcccaacctagaggagcagacaggggcctactgcagcatatggttgatccaagtggagggagggaagaggtctggaggttgcagcatccccaggggttcagagtagggctcgcatcagccagcaaga

SEQ ID NO: 170519 - DNA, 345 bp, Homo sapiens
acaaagatgcaggtgcgtctatgaaagcgaactttgtcgagatctcagtgacacactctgcttttccaaattgcctcaattggcagtgaatattagaaagagtcatggaatgtctctggaaagatacataggagaactagtgacattggatccttgtgggtagggagacactgtgtaagtgcatcaaagaggctgacttttcactgtgcacactccttcagaccactggaaattcggaattgtatacggtgtgcatgtattacctccttaaaactagctagctacctatctacctacctacctacccacccacctaccttcctacctggctaattcattagctaa

SEQ ID NO: 170520 - DNA, 223 bp, Homo sapiens
catggacatcttcaggaagccatcaatctgcctataataatgggtatatattttatatatgtcatttacataacagttccccttatctgcaggagatacatcccaagacccctagtggatgcctgaagctgcagatagtaccaaaccccctacatatactatgtattctcccatacaatcacattgtatagggcaggcagtgtatatagcatgaatacactgg

SEQ ID NO: 170521 - DNA, 504 bp, Homo sapiens
ctctgtgttatatccttgtattacataacaggacagggtggcttcagcccaggacataagggagaggcttgtcttccaagaggcagccatccctccctccccctggacttgtgtctgagggaaggagtttgccctgggttctggcaccaggtgctgggttctttgatcggcagccctggagtgacctcttggcaggtggtcagtttgggacaggaaagacacaccctcagagtggggacgggcctgcctcacatcctcggatgaccaaggccctgcttatctttccaggattgcttagaggactggtgggtagggggaaccaggccgtgtatttccccagtctctgaggacaaggaaaaccctcagacctgaggcgagcgggcgttctggaggctgggcccccagctgcggagcttgggggaccggcttgccctaggaggagcatgggcaagggcagaggccagggtgtcaggaattgtggttccaggcctggcactgcccact

SEQ ID NO: 170522 - DNA, 336 bp, Homo sapiens
ctcctctcaaattttaaaataatacaattgatttttttaatatccaaaaatagactgctatttcgtagcatttgggaggacagttttcctttagaagtgaaaagggatgattgagtgataggaaactgattaatctcaggatttcacaaggaaatgccgacccagcattgggccctcacacacaccattataattctttgatttcctgtcactgcagacagtttaaaaactgaaagtaaataggagacatggaaaatcaatgtgaggtgctgaattgttccagctgctgcggctctgttaattacatcatatttttatggagacattcggctcaga

SEQ ID NO: 170523 - DNA, 563 bp, Homo sapiens
gggctgcatccagacctctccctttcagggcccagcccctccagctccagcgaccccacctaggcacacggaacatatgtggaggaaaccagtgttcattttgttgaaagcaggggaattagagaaggaggcgagcttgaggaggggagaggctaaagggataaagcttccaacaatggcgatgttcctggattttgaaatacaatcaggtaaagcccgatctggtggaacgcccgtggccataatgacagctaacacccaggggctggagggggaagggcgctcaggcaggcgcgaaaacttgcacgccgccctactttgctcccgccccacttagcagccttccgcaaaactccagccctctcctctgcagcgcagaaaggccgcccgttcatgcatatgcaggaggataagtttagctcgcagccccccgcgctccgaccggcccagcgcggcactcggtgaatcacccgcgctcgggggcgggcgctcggctccggccgcggactggcgggcgactcagccactcgtggaccgcgcgccccggcctggcatcgcccttt

SEQ ID NO: 170524 - DNA, 530 bp, Homo sapiens
taagagagggtcctcctgcaagggccagacaaggaggagggcatgggcaggaaccgcgtccaaatcaacagcaaagacaaaggtcacctagaaagggggactccaccagactcttacccagcagcacgtccctcctgcctgggcctggtgagcgaggggctcaaggggaaactgaggcaggagctggcacttctgtgtgggtgaggagggcaccaatctgaggccccgcccgctccctgcttcggctcctctgtgttcccgggctgccgactctcaggaggctttgccacctgaagaacagggaggtcgagcaaggtaagaagagctttccagctcctgttccgacctgagagccgagaggcaccatcctgaagaatggccttggtcccaggcctccatgtgcgctgtggcagacaatgccagtcgatcacctctctttcctgacccagacacagcctcatgctcttcagccaagtgccccagggaagcccgccaccgatcagtcaagcctggagtaaaagatgaagcct

SEQ ID NO: 170525 - DNA, 423 bp, Homo sapiens
tctcagcaaagactatagcaccagacttttttttctgagacggagtctcactctgtcgcccaggctggagtgcagtggcacgatctaggcttcctgcaagctcggcctcccagtttcatgccattctcctgcctcagcctcccgagtagctgggactacaggcacccgccaccacacccggctaatttttttgtatttttagtggagatggggtttcaccatattagccaggatggtctcgatctcctgatctcgtgatccacccgcctcggcctcccaaagtgctgggattacaggtgtgagccaccgcgcccagccagcattacgcattttcattccagaagaacctgcctctctcccatgaaatatcccttgaattccctggccccagagaggctgggagccctgccgatgtctctttag

SEQ ID NO: 170526 - DNA, 656 bp, Homo sapiens
taccagagccgcaggggtgttggttaggaggccgctgtggcaaccaggctgggagccctggaaggggccagcagggtcagagtctagacaggatttggagacagcagatgggaattgctcacagaatgggtttgcctgggggctctttcttcatcctccaggtgtcctgcgacagatgaaccatttgtaacccccaccctctgtaccccagccctgggtcaggtgccccattattcacacacgctcctgacccctcattgccaggagctagcatggttgtcattaagcagtcacctgtggccctatgtccgagttccgcctgtgctctggccctcagggtcaaggtagcaggggcctggcctatgctgaccacactgagcatcctggccggcccctcctttcttacctccagggcttggactagggactgtctgttccccaggctcagtgatgctgttatcctggaggggcaagtgcttctcaaggaagtgtgggaggagggaacagtctcttacaggagaagcagggtaggcactgctgggacagacccctcctcattccatggaggcctcacatggggaacagaaggacggaggcctcacttggggagtaggagaatgtgacaaggccctctccggacccagcacctggccaga

SEQ ID NO: 170527 - DNA, 332 bp, Homo sapiens
ctcagggtagagtgtagtggtgtgatcatggcttgctgcagcctcaaactcccgggctcgagtgatcctcctgcctcagcctcctgagtagctgggactgcaggcacgtgccatcatgcccagctaatttttgtccttttttttgtagagacagggtcttgctttcttgtccaggctagtctcaaactcttggactcaagtgatcctcctgccttggcccactaaagtgctcagattagaagcatgagtgactgtacccagacaggataggcactcttaactcccatgttgtccaaaggtcaactattttatttttttaatttttttttatt

SEQ ID NO: 170528 - DNA, 251 bp, Homo sapiens
gagttgcaaatacaagacgtaacaagtaaaatactgttacgtggtgggtctctgtggcaggcttcctctcccccccatatggataattgtatactaaattcaccataaggtgaaaaatggatattgagttcccttcatgaaaagttatataaaatatatatttagcataaacttctccagagttgtcctttattaagtttctttacagaaactttaattggtgccatgattcttgtgggggaaagaatcat

SEQ ID NO: 170529 - DNA, 549 bp, Homo sapiens
atgttcatggaagctctatttccaattgcaaagacgtgaaagccacctcagtgcccatccacggtggactggataaaggaaacgtggtacaaatacaccatggaatactgcacagccataaaacaagaataaaagcatgtcctttgcagctggaggcctccatcctaagcaatttaactcaggaacagaaatccaaataccagatgttctcacttacaagtaggagctaaacactgggtactcatggacataaagaaggaaacagcagacactagagaatctgaaaggggcagagagggctggctgcaaagttgccttttgggtactgtgctcactacctgggtgataggatccactgcaccccaaacctcagcatcacacaatatagtaatgtaacaaacctgcacacgtccccccagaatctgaaatagaagttgaaatttaaaatagatatatctctttccatctctcctacttggacaagatgctcatcagaccccacagctggggctgccggaccccttccagggattcttcccagaggggcct

SEQ ID NO: 170530 - DNA, 124 bp, Homo sapiens
gagtaagagtcatccaaatttcaagactttcatttgtattctcatgctaatacaggagccaatctaaaagtagtattatataacataaagactcaagtattaattgatagctcttattaggatt

SEQ ID NO: 170531 - DNA, 744 bp, Homo sapiens
aaggagttcgagaccagcctgggtaacatggcgagaccctgtatcaatttaaataaaatttaaaaatagattctaaactaagtaaattgtttagcttattttacttgcttgacaaggcctgacaaaaataaatgatgtctttctgacacacaatataaaactggccgacagatcatatagagtagtgatagaggatttcagcaccctgggagatgctaaatatggtatagctgctaagtcttttctttgctgacaaagaattttatatcttaggagataaagaagagagtggtcataagtttaatctgtaagaacaaattgcttggtgaagtagaagtgattggaagtttttgggaacaggaaccatgacccaccccctaaagtttattacagcagaaatgaggagttctgagcatgtactttagggaaacagattttaaaatgtaaacatcattccaccctctgcaattttaaaaaagataatccttagagaaaattgaaagattgtcaacaagtaaaattatgattcactgcaaacaatactatgagaagaaaagttgccaggtggtgctgctactggtctggggaccacgctttgggaggtacccatgtatccgttggctttgtgactatggtaacacttaactctatttttgtaaggtgtctgttattttaccagtaaatatgtgataaaactgtaataataatgtaaaaattattaaagctttgagatatttaaaacat

SEQ ID NO: 170532 - DNA, 291 bp, Homo sapiens
ttccaagagtaacagtgctcctgctccaatgtgaccttacaaatcttacatagatttctctgtggtcaactctaatcagcaacactcagagacactcagtgaagaaagccctgggaaacactatttagtttagcccaggggaaattacaaggccatgtcaccttgaaactggaacatgaggagaggtgaggatggagctgctgcagccatgttgttaccataaagggaaagcccagagctgctgggcagctttgtggagcccagggatgaaactaatataatcaaatatag

SEQ ID NO: 170533 - DNA, 258 bp, Homo sapiens
ttaaatgagtttgtatacgtcaagggcttagtaaaatgcagagtacacagtaagtgctcattaaatacaagttgttattgttgtagttctgattggacagaaagcaaagggaaggggaaagtctggcctgagggggttttgctggatgtgtccttgtgcaggaaggggatgcaatgagtccccagatgccctgaggcaaagagaggcaggaaagagcaggtagatgccaaaagcggacatagcaggccaccaagccct

SEQ ID NO: 170534 - DNA, 290 bp, Homo sapiens
gttgctaatggtgagagtggagaagagcccaaagccaaaaaatgcaggcagactccagaatgtggaaaaggcgagaaaaaagatcccctagagcctctagagatgaaggtagcctttccaccacctagattttagcccagtgagatccacatcatactctgacatacaggagtgtaataaatttgttttatgccctgacatagtggtagtttgttgtagcagcaatggactagtaatatataaatatatatatacacacacacacacaaacactacccccccaccacaca

SEQ ID NO: 170535 - DNA, 366 bp, Homo sapiens
ccttaccattataaacaagagagtttaaatcacagaataattattttaaggaaatcagtatatatcattagaattatatttttatttgacatactaatattcttggtgatataactgtcagagttacttggagtatattaccaagttactcaatgtttttctagccagaaggctagatagatgtctagggaaaggcatattaatttagacttgtatgggtttttaaaaaatctttagcatttttgaaaaaatatgggccaggcatggtggctcacaccagcactttgagaggcccaggccggcagatcacctgaggtcaggagttcaagaccagcctgatcaacatggtgaaactgcgtctctact

SEQ ID NO: 170536 - DNA, 412 bp, Homo sapiens
tgtacaggacgggagggcaggggaaacggttggaaagcgtgacagtctgcttggctttgggtcagaaacggtcgctggatttgctcgaacggggagggggccagctggagttcagttcagggtagacgttttaggaaacggcagacgcgacagattgagcaaaaaactccgtggagccgagggtgggagacacgagctgcacccagcacagaggcaagaccggagagccaggtgtgcccggagccaggtgtgctcccgagtgggtcgggtcgatgcgcgtcgtggcccaggtggtctgtgtctgacgttcggtttcctcttgctggaggaatcgtgtttgttggaaattatttagtggaatacaaatgactgctgggtcatgctgggaattagattttaaaaacagaggaac

SEQ ID NO: 170537 - DNA, 628 bp, Homo sapiens
cagaaccactgaattgtacatttaaaaaaggaagaaaagaaaaatccaggatgtcagcactgtgctggccgcttcctggggccctcagtgagttcctttaaaagacaggcttagggtgacagaggccagcctggaaatggacaggaaacgccagcctttccgctgcggtccaacttgggctgacgccctcatcgcaacaggagagccctgcagggttgaggcaggagggtgaccggcgttagtcttcattgtaagattgcaggtccctctacatgggagcgagttgggccagggcagaggcacagagcaacatagactacaactggtccaggaggcagaacggtggagggtcgcgggcgggtgggtggtgcaccctggaggccgcgtggagcttcccagtgaactggcatgaagaaaagtatcacagcccgatggtggtgctgtttctggaggtggggaagggtgcgtggaggatccttcttagctttgaaaggaatttaggtctattggttataatcagtcatgtcctattaatttacattttcgctaatcttatttaatcttatgttaaccttttatattgattgttaagtcctatatgttgttgtgtaattagctataatgttat

SEQ ID NO: 170538 - DNA, 241 bp, Homo sapiens
cacaaaaatctgcacacaatttctaagacttcagaatctatctgtggccatgttccccaccccatccccacatgcaacagacaacacacagcattccttctaaagaacacttgatttcatagaggagaagggttaaagctgggataggcaaatacatgctctatggctcaagaaatgatattaatagatagagtttaagagcatcttcctatgatatgcagccagagaaggtttcaagttt

SEQ ID NO: 170539 - DNA, 325 bp, Homo sapiens
gcctggaaagagccgcatccctggccgtgaccaccggcgctactaccacgaccactggcggctggagtacctgatggacttcaaccctgcccggcacggcatggtgtgcatggtgtgcggcagctccctggccaccctcaagctcagcaccatcaagcgccacatccgccaaaagcacccctactccttgcattggagtccccgggagaaggaagtcatcagcaacagctgggatgcacacctggggctgggggcctgcggagaggccgagggcctgggggtccagggggctgaggaggaggaggaggaggaagaagaggaggag

SEQ ID NO: 170540 - DNA, 227 bp, Homo sapiens
cacgtgaggtcacgcgacgtagccccattaacatgaaacatccagaacagggagagcctagaggcccagcagaccagtgggtgccacggcgggagtgggcaggatgggacgggtcaggtgtgaaccgttagagacgtgggaggcccggggccatggggttgaccagccttgctacactctgctccagccccgtggataacaccccctgtgctgctggagcccaggag

SEQ ID NO: 170541 - DNA, 131 bp, Homo sapiens
cttccccacctccttttctgccctccaagactgccaaatacttgttgaacatatattattaaatgcctactacatgccagccatgattcatggtcttggggacacagcagagaacgaactgacaggactcc

SEQ ID NO: 170542 - DNA, 540 bp, Homo sapiens
accatatgctgcctgcaagaaactcacctaaagggtaaagacatttacagactcaaagtaaaagggtggaaaaagaaatttcatgcaaattgaagctaaaagtgagcaggggtacctacgctttatcagataaaacagtctttgaatcaacaacagtgggaaaatacaaagaagataattatataatgataaagaaatcaattccatgagaagacataataatcctaaatataaatgcacccaacactaaagcacccagattcatataacaaatactactagacctaaaaaaagagatagacagcaatacaataataggaaaaaacttcgacatcccactggcagcactagacaaatcattgagacaaaacatcaacaaagaaaatccagatttaaattgtactctagaccaaatggacctaacaaatttttacagaacattctacacaaaaaccacagaatatacattcttttcatctgcacatggaactttctccaaaacagaccatacactagaccacaaggtaagtctaaatacat

SEQ ID NO: 170543 - DNA, 440 bp, Homo sapiens
gttttcctttatccagggactaacattcaaggttttgtgaaaaagaaaattaattttgcattgacattctggatgttggtgataatttgtagtgacattatgcctattggttgtgattgtgacaggcaggcagactggatccaaatggacattacaagagccaaattaaatagtctgagcattggaaatttctgccttaaggaaagcagaagcttttcagcatgcacttgttttctacctccacaattatggattaatatacatcaattctaggcagttgaggaatgacatgagaggattaatggaactggacaacattacacaagtgaagtgaaaattctgtaatgatttttctgaggtgatgtagtagacaaggcaaatgggcatcagctcctagactttgcacctttagaatttcaagaaaatgattgaaaagagaa

SEQ ID NO: 170544 - DNA, 398 bp, Homo sapiens
agatgagactggagttgttaaaattgctactgaaatatgttccctatcaaatttaatccaaaggattattcttacttgattatagtaaagatactgctatcaacagtctataaagttcccctgacatctgaattaaaacaaaacaaacagtctgctatgccgttacctctttttgacatttaatattatattcatagcacccttttctttttcttttttttttctttttcttttttgagacatagtctcgctctatcgcccaggctggagtgcagtggcgcaatctcagctcactgcagcctccgcctcccagattcatgggattcccctgccttggcctcccaagtacctaggattacaggcgtgtgccaccatgcctggctaatttttgtattttt

SEQ ID NO: 170545 - DNA, 570 bp, Homo sapiens
ggtcataaaaatcacatgatacacagattttgttagaacaagaaccttatggctattttccagaaaactgttatttaaaaaacccttctgacatccacaatgctgatggcacccctaaaaggtatgtagtgtgtaacctgggtgacagagggagactccatctcaaaatagaaaaaaaaaaaaaagtaaccctagaatccttgtgttgtatcatttttctaaattgaaactttgatttcattctgctatttatggattgttcctgcccctactcacagcctaccttctttacattaaaaaggaggcctctttctgcaacacccgaacttgaagatgctctgtaaattagcacagattagtttactacgctcaggccactaagagtacagaggcctggctggatgagtaagaagaatcatggccactgtgtattgtgttcctactaagtgggccctttttgtataggatccatatttgttttcacagccactcaatgcagctataagaattattctccccatttgtcaagcttctggagtttacctgatttttctgaagatcacacagctg

SEQ ID NO: 170546 - DNA, 484 bp, Homo sapiens
tgggctggactgagtggctcacttctaaagaagcacttatagaaagcgaacagtgatgaaacccagaaaacactgccctgaccaacggatcaaggttaatgtcatcactgttgtcatatgtatgttgtagactcctgataggatgtgatgaggataatttgtctctatgagactttttcccaaaattcataatcccaatataatcatgagaaaaatattacacaaattcaaatggagggatattctacaaaatacctaactatccctcaaatttgtcaaggtcatataagagcaaagaaagactgagaaatagtctcaaactagaggattaaatctgtaacaatctgtgactactataaatctaaagttgttctaaaatagtttatttaatacaccagattaactaagtaaaaacagaaaaattacatgatcatctcaataaatgtaggaaaagctggcaaaattcaacactcattactgtgta

SEQ ID NO: 170547 - DNA, 618 bp, Homo sapiens
cttagttgattagagagggtttctgaggatgaggaagagggggggaaaccccaaacttagttcctgaagcaaaggtttacttccaacatcaaataaaaatccattcctgctggtgaagcaatgcaattattcatctaatcagcttttggcggcgtttgtgaggtgcagagaggcggggaagcggagagaagactactgccctttagagcagagcccctgctcgtgggctgagagcagcctggagtcctcccagtggtaggggaaggcaaacaaacctgatctgaaccttgtactttcctgggaggcaaatagaagagcagaaaacaggagggaggaagcaaaacaaatcactggttcgcccagaactctggtgtggaggccgggctggtgtcggaacttgttaataacacccttttagtttcttttcctgctttgccactgccatcactgaagtggtggaaaccaggactctgtgtgcacgcgcactcgcgtgtgtgtgtgtgggtgtggataagtggcaatattgatggatctgctgcagcctcttaatcctggtacatgggaggtgcctgcctcacctctaagaatctccccacatataaatagatattcatgtca

SEQ ID NO: 170548 - DNA, 394 bp, Homo sapiens
agagcatccaactgagacatgtacccccagctaactaaatctttagccaaagagagaaataactatcagtttcaaaagtcatgatgactacataatacaagcaaaccagctggtcaaaggaaacacagcttttcctggtaccgagacctggaaaaaaatttactacatagattctaatgatgatgatgatgatgatgccaacaggggtctggattagcaaggactctttcagttacaaacaacaggaacacttgcaaaccagcacaagcaaattgggcaactgatgagttcatttaactgggaaatattgggtggatctaatacagagtgcaactagatccaaaggctccaatggctcccaatgctcactcattcaagcatgtgagagtgagtg

SEQ ID NO: 170549 - DNA, 421 bp, Homo sapiens
atttctttggaaacgggatatcttcatataaaatctagacagaagcattctcagaaacttctttgtgctgtatgacctcaattaacagagttgaacctttgtgtggatacggcattttggaaacattcctttagtagaatctgcaagttgatatttagatagctaggaagaattccttggaaacgggaatatcttcatataaaatctagacggaagcattctcagaaagtgctttgtgatgtttgcattcaagtcacagagttcaatattcccttttatagagcaggtttgaaacactctttctgcactacctggaagtggacatttggagcgctttgaggcctatgttgaaaaaggaaatatcttcccataaaaactagacagaagcattctcagaaacttgtttgtgatgtgtgtattc

SEQ ID NO: 170550 - DNA, 465 bp, Homo sapiens
gctcacgcttataatcccaacactttgggaggccaaggcaaaaggatcacttgagagcaggagttcgagtctaacttgggcaatacagtgagaccctatctctaaaaaataaaaataaataaatacataaatgaaaagctttctctggatgcagaatggagaatggattggcaaaagcaatgagtagatgtaggaattctagtgtggagcctattgccataatccaggcgagagacaatgatggcttggactctagtaatagcagtggaaatataaagggtaaagggtttggagatgtgtgagatgtaaaatggtgatggtatggacatgggttgtgacggaaagagaggaggtagggatgctccctgggtttctgatttgtaatctagttgggtgctggtggcaatctctgagaaaagaacatgaggagggttaaatttgttgtgttgggatctagggaggcct

SEQ ID NO: 170551 - DNA, 283 bp, Homo sapiens
tctgtgattgaccaggcacggggcttggcgctgaggggcagagctgcagaccctgtggtgaaagagcttaaaatggcatgtggggttcagaagacaagaacgaattgaatgaactccatgtgagaggtgcagaggcttctgaaagagcaaaacaaggtggggttcagatattaatgctatgagcatttaataaacaccactagttgctcagcacaagagtggcaaacataagagacacagtccctggtcttggagggctgaagtgtactgggaatgacctttg

SEQ ID NO: 170552 - DNA, 364 bp, Homo sapiens
gagcatcaggcctttcctccttatcacctggttggggagctgaaaatatgttaaaatacagtcatctcttggtatctgcaggggatcagttcccagaccacctgcagataccaaaattcatgcttactcaagtcccacagtcatccctgtgaaacccactgacatggagggctagctgtatttattgaaaaccacatgtgaatggacccatgcagttcaaactgtgtgtggacccatgttgttcaagggtcagttgtgtatttgaagttaattagggatacaacaaataaatctgtttttccctccacatgtccaaatctcaggcttcatagagtctacctactccagtgctcctaccccgtat

SEQ ID NO: 170553 - DNA, 606 bp, Homo sapiens
taattaaattgttcttgtcattcagatctcagcttaataaatgtcatttcctcaggggcccctttcctatctacccaaattaaaagagttcctgagtcagtccctatcatgtcaccttgctatgtgttcatcgtggcagtgagtgttgcctgctactttctagcacctttagctgttaatttgcccatttgcagtcttctcccatgcaagtgctgtaagagtaaggcccttgactctttatccccagcacccaggacaccctgagcctagagtgagtgctctgtaattcataaaatggatgaatgaacagctggatgaataaacaagcttgacaaatgctggtttaaacaaaattaagtagaattctttacagtaagaccgttcgagcctttaatctactctgtggattgtgaatctcttgagcgtgtattatgtattcatgttcctgggaacagttttgggggagtattaatgtcaaaacttggtgtgttgaaggaattggattcattttcaagtataactaacttttaaagaacagtaaatcctatgtatggcacattttctttaagatttcttttactgttactatttctgctccatccctta

SEQ ID NO: 170554 - DNA, 320 bp, Homo sapiens
caagagatggtttagctctatgttgtccaggctggtttccaactcctgagctcaagggatccccctgagtggttgggactactggcatgcaccactggaaacccttattactactgttgactttaattccagttagtggactagttgagtgatcccagccatctcagcactggccaaagccttcctgtgttacctctacatgtaggcaggagactaaatagcttttcagaagccaatgaaagaaaagactgcttcggattagggagaaagaagccagtgttaattaactatttcaactgtcagcagccttcatctgaaag

SEQ ID NO: 170555 - DNA, 330 bp, Homo sapiens
gacctgtgtgtgccaggccctctgggttatggagaacatggaatctcagttggaatgatcacatacaacataagcatgcatgatcacattttccattccaaatgctgtcaccccatatttgacaacaggccagaatatctagtatcagctatgtcctggaaaatctaagacatatagtcatcatactaaatgtgcattttcttatttggcaaatatttatcaagcactactatttgccaggccctaaatactgaggataaaacaatgcacaaaaaaactgagaaatcccagccctcgtggaaaatacagacaataaataagtaaaataca

SEQ ID NO: 170556 - DNA, 254 bp, Homo sapiens
aaaagttcctagcagagtgtctgttgcataataatgatgtaagagcgttcacttctgcaatttggtgtgataaaacagaaaatgaaatctttatgtttgctttccaaacagcattttcattttttataattcataactcagggatatatatatagacatagatatataaatgtacacatacacctacagatacacacacacactctaccccccaccacacacatcactagtcatcatgaacacaatgaagcaga

SEQ ID NO: 170557 - DNA, 236 bp, Homo sapiens
tgaatacagctagtgcaggaagccctgggctttgactcgcttgttttcagtggtctccctgaagagctgcttctggaatcattcccttttctaggacccatttattttgagaagcaatgtggcaggttttgtcttttcatcagggtgtagagagcctgaaacccccacacaggagccacttcttgatgggggcaaagctgcgctatctagaaagctctcagtcccagaacctgcct

SEQ ID NO: 170558 - DNA, 388 bp, Homo sapiens
tccaggatgaaattcaaactcagttccccactccccaaggactctcgatagctcactccctcctgttctgctctctagctccagagagaagtgaggcagaaagatgctggacttaaagtcagaagacccctgactgtgtccaagttcaaggctcagtttgccttaatttcttcatcagcaatatgggcttcctaacttctgtcccacctatagcttataactctcagttgctctgaggactggaatgagatatcccatgtgaaagttcctacaaaccacaataggttatacaaatgtgaccgagtcattgtgatttttatcaggacttaaacatttagcatcttgtattgttctatcttgtctcactgatctggagtctccagatcca

SEQ ID NO: 170559 - DNA, 513 bp, Homo sapiens
gcctccctaccagacaggaagagccggagagagctggtctgagggacagcgtctctagccttgaatccatggctttcataaaccccttggacatctggtgagtgggctcttgggagagatgtcaggttggagagagctctggaggactgtctctggaggactgtttgctcaggggagatggtggcatgctgggaagtgaggggctgctcagtgagagagtgggaggcacagaagagcagaaagaagaagaggtgaatgaggagagaggaagtaggggtgtggaggagtcagtgggaggcgggaagagccagcctgtttgctgcactggtttgggaacattagagtgaagaaaacagatgttggggcaaacaatacagtctttcactttttggtatttttttggtggctttttaaaaaattctctgtcatattagcatattagcatcatgcttggttcatggaatgagaggccactgttgttggccctcttcataagtggacgttccttctcca

SEQ ID NO: 170560 - DNA, 248 bp, Homo sapiens
tcaaggctctgataattctgacaaagcagaaatatcactgtgatggtcgcttaatggtaaggcaaggcagatgtgtttgtgaattcttaaagctcatgcatctccatgattcttgttaaatcaataaatcttaaccaatttgcatgaacattaacaaaagcaccaaaaggaatgttttccagacctagatggtttgagaagcatctaggtttggaagatagagtccttcctttagctgtagttgatga

SEQ ID NO: 170561 - DNA, 320 bp, Homo sapiens
cctgaaaagacactttccttatgcgtgccactcagaggagccattttgctccagccttcaactcctcattgctagtaatttcaaatacttttcctggaattttgtggttctctcagtgattactttcatattgttttctcttttctgtcccatttctgctttgtttagcaagtaccagtaccagtaatagcttactttatagcaatttattttcacaaaaacccgtcagagactttaatagctatgtatatgtcctctatctttgtattcatggcttctagtcattttcaagataattgcattgatccagttattgagct

SEQ ID NO: 170562 - DNA, 764 bp, Homo sapiens
gcagcagtttccggggtagcctgggtggagactttggcagggccagtggtaggggaggcatcaccccagtcacggtcaaccagagcctgctgagcccccttaacctggaggtggaccccaacatccaagctgtgtgcacccaggtgaaggagcagatcaagaccctcaacaacaagtttgcctccttcattgacaaggtacagttcctgcagcagcagaacaagatgctggagaccaagtggaggcccctgcagcggcagaagacggctcagagcaacatggacaacatgttcgagagctacatcaacaaacttctgctggcagctgtacactctgggccaagagaagctgaagctggaggtggaacttgataacatgcaggggctggtggaggacttcaagaacaagtacgaggatgatatcaaaaagcatacagagatggagaatgaatttgtcctcatcaagaaggatatggatgaagcttacaagaacaaggtagagctggagtctcacctggaagggcttactgaagagatcagcttcctcaggcaactgtatgaagaggagatccgggagctgcagtcccagatctcggacacatctgtggtgctgtccattgacaacagtcgctccctggacatgaacagcatcatcgctgaggtcaaggcaccgtacgaggagatcgccaaccacaaccaggctgaggctgagagcatgagatcaaatatgaggagctgcagacgctggcttggaagcatgggatg

SEQ ID NO: 170563 - DNA, 385 bp, Homo sapiens
tacagtaggaaataaatgagtggcagatgagggccagaatatgagctttattatttattaatttatactgaccacaaatgtttgtcggatgtccactatttgccagccacagttaggggctgggaattctgtggagaacaaaacaaagctcttgctctcacagagctgacactctgctcaaggctgggcaggggcatgtacctgaggcctgagaagaaaatgggcattctgaaaactggccagagaaaacttctcagagaagcctgtggctggggggctcagtctggccaattttcaggcatggaatgggcatggtcgggactgaactctgatggtgcccatcccgcaggggcagaggttgccccctctctaggagtggctagga

SEQ ID NO: 170564 - DNA, 421 bp, Homo sapiens
cccactcagccatactttgtgccatcctaggcactgggaatatagccatgaacatctgtacatttggaatatgagaggactgtgattcaatcgcttgaatatgatcaaataatatctgtaaagacagaaattaaaagacatggaatcaagagggcaacatagactcgactagttttatacagtaggatgtttatcctaactagaaaatcaatgcattattgttaaaaagagaagcagcattctttacaaacagacatttttcttagcaggcacccaattctaactccacatgaaaaacctaaaataaaaagattttctttctttctttctttctttctttctttctttctttctttctttccttctttctttccttctttctttcctttctctttctttctctccttccttccttctttcc

SEQ ID NO: 170565 - DNA, 321 bp, Homo sapiens
ctgaggacccgcaacaacttcgtcattaagatctcaagaagtgtgtggacattcggcgtgtgcaatgtccagacactggcgaggaagaaactgaaacagctgtaaccactcacttaaatataccatggcattcgtacaaatgatcgtcgactttgaacccaagagctggggtccaataggaagacaactccaaatcaggccttaaaaacctggtttcagaatacacattgctgccttgcctttgtgggtatggaggctcggcgtgtgcagcaacaacttcgtccatacggatctgcggcgtatggattctcggcgtgtgca

SEQ ID NO: 170566 - DNA, 206 bp, Homo sapiens
agaaactgatgcgtgtggtaggcagaaaactagtcccccaaatatgcccatgtccttatccctgcaatatgtgcatatgttaccatacatggcaaaagggactttgcagatgtgattaaggttaagattttgagataagaaaattatcctagattatctggatgagttcaatgtaataaataataaagatccttctaagtgaaaga

SEQ ID NO: 170567 - DNA, 1502 bp, Homo sapiens
ttattgactccctgtcacattttctcaaatagctgcattccaaattttcactaatcttttctttaaaaaaatcctctctctacattttttgagaagattgatgccaactgacacgaactattgtaaatgtctatcttactactggaaatttttgtgtcccttcatctttatcaaacaatcagaacaggcactgactaacagcagctagtggcgcctgctgaatatcaggccagatgtgtgatctcagattcatcacctgtaaaatggggtaaataacaccaaacaggtgtaaaaactaaatgcagaaaaatgcctcgaatatgccaggtattcaacaaatgttaaatacaagtggcctgtccaagttttgggaacatatcatactatcacagcagcctaaaaaatccttacaatgtgagaaagtacaggctttattagacagggtctgtctgttaacagtggatattagtgtgatgagtcacagctccagctgtgttgctacatttcaaatggaactctgctgcaagactgttcacacatgctacatttcacatgagcctcctgtgcaattttattctaggctaccagaaaatttaagccatttttcagctctttaagaacataagccctttcactgagaaaattccagtccagtgccacacacagttcactcaactgtgctacttcatgcatgctattctgttcaccactaaaagagactttcaacatgaacttttccctctgtgatgcaattttgtgtgtgtgtgtggcgggggaggatgtaagagcacagtgagaagataagagttttcccgttttcctctctactcaaatcccgtctcctcaacccttttaaaactctccttacgatatttaacaaccatttcagtcactgtggaattctgttatggagagtaacatgaatttaacttaagctttcttttgtggaactctagctggaaattgctcataattccagaaaatgtttcttaacctctaacgaagtacatttaacttgaattttaaaagatttgaattgcctctcaccttattcaaaatcctttaacgaagaaagctttccagtataaagaaactgttctgaaataaactagagttctgagtggtggcttacttaaagttgtgttatagctgagtaagtaatatattattttgaagagaatataaaattgacttctctcagcccactgacccttcctgtcttgtccccatacaatgatttataggaaaagtatttgtaatacagacagttacttttctatcttcaactcaactgaaaactcagagaaaaactacagctggattggaagaaaaggacttgcttgagacagggagtaaaaacacagccaaagcatgactttagaagaaagaaaagaacataaaagcttggcataagaaaaggaaagaacaactccatttgagaaactagaaaactatcgcaaggcatgactcaaagtataacaatatacaaagataattataac

SEQ ID NO: 170568 - DNA, 449 bp, Homo sapiens
gcgctttatccacaaaaaaccttcccccaaactaattcctaatatttaatatgtgtttaaatgaatctttttctatacaatgtaaatggtaactttggtaaaatgttcccatgagttgttagaaagatttaactagctttgtaatttaagttttaaaacataaatatttgcagcttgatcttcttttgatagtgattgttggagcccagaattcaacatttataaattctcattcatgcaaacaaaacacagaccatcatcatacaacttactcctcatgtcctgagagaagaatcttctacttctttcagtctttggcctcccagtaaattccaatttcaaacaacttttaacacaaacttcactcttagatttttaacaagcttttcacacatacatcattaatgcttcccctaatctttcatgttgtactggctattgggcagttg

SEQ ID NO: 170569 - DNA, 289 bp, Homo sapiens
ccatagttaagaagttcatagcagctgtgtttggaacagctaccgatacatcaatggtaggcctagttttagaagtttcaatagcaacaagaaaacgtgcatgttgtggggtgaggggaaggacacctgagacaagtacctggtgtccttgtcctctgcaggccctcagcctcagccagaaaccagcatgcagttttccatcccttcggccctgcagcctcagacttccaagcctaccaggctattgaaacttctaaaactaggtgctattgaaacttctaaagctagg

SEQ ID NO: 170570 - DNA, 314 bp, Homo sapiens
aaaataagatccttgaccccaaataaaccagcttagtgactaagcagatttcatgtattccattcctaaagactcccttagtttgatatttcaataaaatgattagattataaacttcaaacaaatagaaactcttaagaaagtgacaacaaatgtacaaaacatgaaacaagtgaaaaatatgaaatatattctggaaatggtatctataaagtttgttttataaaaagttaaaataataccactaagggatttcttccccttttcttgtgttgaaacacttcagaatacccatgtatataggcatttacaaa

SEQ ID NO: 170571 - DNA, 486 bp, Homo sapiens
gacacagagagactccatctaaaaaaaaaaaagaaaaaataaaaaagaaaaaaaataattagagattcaattcagaagaacagtatctaactaagaagtattccagagaacagagaaaacaatcagaaggaaattattggaaaaataatactggacaaacgcccagaaccagtaggcttgagatttcagattgaaaaacctttgtgtatgcagtatcataaattcacataaatgaacaaaaaaaaatctaccagtgataccattgtgaaatttcagaaacaaaacatgatactaaaactgagaaaggtgagagagaaagagagaaaataaacacagctaacatgcacaggattaggatgagaggtgctgacttgatagcaatgttggaagttggagggcagtggaaagcaatgcttctacaagcttgggaaaatacagatattttcagacaagcaaagattcaaaccacaataaattcctgtataa

SEQ ID NO: 170572 - DNA, 414 bp, Homo sapiens
ccccaacaaagaaaacaacaacaaacaataaaataaagatataggcattaaatatatggatatatgatgcataaacaaataattttttttacaatacttcaggttacttgaagccttcttttgagtgactagatttaagtttgtgaaacaaggttttcagaagttttggttttattctctcagaaattttggcttcattttttcaacaaaacttttattgactgtttatttagcagatattaaatgtagcaaaattactatgacccagctgttgtccacaaggagcttatagtctaatcaagaaccaatttgtaataacaatgaaattaaaatatgattgtatattgaggtaagtgataatagaggtatgaaaagaaaatgccatcgcaatgtagtggaggggttggggaagga

SEQ ID NO: 170573 - DNA, 684 bp, Homo sapiens
cagaacagaagccctgagaggttatctgccttgatctgtactgtgtccccagcactcaagacagctctagcacacagtaggtgctggagtttcagctgtgaccaaaaccagatcccacccttgtgcacggggaccaggaggaattaggagctacaccaagccctgccttggagacctccctggtttgtgcctcggtttccttgatctttacagacttcaaacccacaaaaatcagccccgggcaccaagagcccattttccctggtgcttagatggggaaactgagtcccagagagtggtgaggactggttcaggcccacacagctcccttgggaagagaacttgggcttcctgcctcctgtgagccacggttttttgttgttgttgtctttttttgtttttgtttttgtttttgagacagagtgagaccctgcctcaaaaaacaaaaacaagaaacacccaaaaaacaaaagccataaagccaatagattaaatatgtgttaaggattgactgtttgccatgcctttaagaaaaataaagttggccaggcgcagtggctcatgcctgcaattttagcactttgggagggcgatgtgggcaaatcacttgaggtcaggagtttggaaaccaccctggcccaaattggtgaaaccctggctcttcttaaaaataccaaaaattag

SEQ ID NO: 170574 - DNA, 524 bp, Homo sapiens
cagaacagaagccctgagaggttatctgccttgatctgtactgtgtccccagcactcaagacagctctagcacacagtaggtgctggagtttcagctgtgaccaaaaccagatcccacccttgtgcacggggaccaggaggaattaggagctacaccaagccctgccttggagacctccctggtttgtgcctcggtttccttgatctttacagacttcaaacccacaaaaatcagccccgggcaccaagagcccattttccctggtgcttagatggggaaactgagtcccagagagtggtgaggactggttcaggcccacacagctcccttgggaagagaacttgggcttcctgcctcctgtgagccacggttttttgttgttgttgtctttttttgtttttgtttttgtttttgagacggggtctctctctgtcgcccaggctggagtgcagtggtgccatctcggctcactgcaagctctgcctcctgggttcacaccattctcctgcctcagcctcccgag

SEQ ID NO: 170575 - DNA, 659 bp, Homo sapiens
aatctatggtatttttttatggcagcccaagccaacaaagacagcatcattgctgtcacttacagacaagaaaactaagactaggagagagaaaagttaaacttgtccaaggtcacaaaagccagaaacaagtgaggtgagaagttgaccttgttctcctcaatccaaggccaggactcctccactccacatgtagatagccacctcacagtcaacagccaaatgtccacaccccagagtcagcattagaccaagatgtcttaccaggagacaaatgcctcatcttgaataaatatgttctaacaacttacccatgtaaaacattgaatctcatgagaaacaaaaatgcaaagtatgtagaaaactatgtttaccacttaactgacagtgataaaaagcttaatgatatccttatagtcttggaggggtttgtatatgtggtgaaacaggtgctcacgcactgctgatagactgtaaattggtcctagagagaaaaataaataaactggaaggagatatgctgtatgtttactttttttatggaaacatatgatatacctggaaattcgattgaccatgcatctatttcttcaatgggtatgcacagttgagctgttcccatgcaccaggcactgtaatgggacaactgcacatgacag

SEQ ID NO: 170576 - DNA, 279 bp, Homo sapiens
atcctttcaggctctctgatccgcagactggatgtttagggtgcacgtgttagtggaagccctgactaaactgacctttacaaaatgaggacatttatttctgcctccaaatgtgtgggggcctccacctgagggtatggtcatcattttaacaaacaaaaaagcaaaaggcacagctgacacacacaagtgccctgtaggagaacctatgcattactccaaactctgctcagatgtgtaacaaacttacaatattaacaaactctgctccaaacccca

SEQ ID NO: 170577 - DNA, 357 bp, Homo sapiens
catttttttaaatctaagaatctgaatttaatatctagcaaatatgtttgagagagacttccaaaaattgaaaatggatatcatggcattatttttatgcttttttgtgctttataaccctcctcttctacttgaccatcttctatgatagtggagtaaaagtcatgaggtacacctctctttatttaaatatatagtttttcactaaataatattgagcattctgggtatactcattttttaaaaaactgtgcggattgttttcttccaggcagacagttgtgaatagaatagaattctgctcagcattctattatatattttcaatagtgtcactctcagcacccaaataatcaa

SEQ ID NO: 170578 - DNA, 1080 bp, Homo sapiens
tctgaagatgcgccttactttgtatctggaacaaggataagtatcttctgtatcctgctctcagctgtcactgctttttaggccatcattacttgcttggcatactgcagtgcctcctaattgtctctttgtttctgctctggcctctctcatgtatcccccacatggccgctggttctcttttctttatggggtctttgtaatgtaatctctcctcctctagcctccccatgcccctcatttctccagtgtgctgtgctgtattaccaggtagcagaacgtaccctaatatcgcatgccttcctctgacctaacttttccatctgaccaattcctacttatctacaaggctcagtccaaggaaaactgataccgggaataatcataacaattgtgcacgcctcctcagctgctatgacaccttgccattatttcatccggatacttatcaagctacttgtaatgatctgtagtcttatttggactactagattgtgagctgtaatacaagtattttgtctctagtattaagccagtttatttggtttctatcattaaatacaatgttgaaaaaattctcagggtccaaggggagatgcttgggttgagtcagagataaagtaggaatatgcagttgaggaaggtaaggaagataatttagctgaagtaaaggaaaagtgcatagtgtgttcatagagtgggagttaagtgtaagagacattctagggaagtgaaggagaagctgaaagagcaagtagagacggtaaggtgaagctcctcttgccatgtgaaagagatcaaactttctccttaatttatgggaggagcgagcatagagaagtctgtgatgtctcacaaggttctcacttttacaattgaatatagaagtagctcttaggagaagcagaacgttcagaggggaagatgaatatggttttgggtacattgccttaaattgcatttttggtatttgggtggcgatgtctagtaagtaaaaagccaggaatgtgattttagagcttagagctagaagcaaggaactaggagttgtttagatgatgaaaactgaaatatgtatat

SEQ ID NO: 170579 - DNA, 698 bp, Homo sapiens
caagtatttggtgctctagtattacagctcacaatctagtagtccaaataagactacagatcattatcaagctacttgtaatgatctgtagtcttatttggactactagattgtgagctgtaatacaagtattttgtctctagtattaagccagtttatttggtttctatcattaaatacaatgttgaaaaaattctcagggtccaaggggagatgcttgggttgagtcagagataaagtaggaatatgcagttgaggaaggtaaggaagataatttagctgaagtaaaggaaaagtgcatagtgtgttcatagagtgggagttaagtgtaagagacattctagggaagtgaaggagaagctgaaagagcaagtagagacggtaaggtgaagctcctcttgccatgtgaaagagatcaaactttctccttaatttatgggaggagcgagcatagagaagtctgtgatgtctcacaaggttctcacttttacaattgaatatagaagtagctcttaggagaagcagaacgttcagaggggaagatgaatatggttttgggtacattgccttaaattgcatttttggtatttgggtggcgatgtctagtaagtaaaaagccaggaatgtgattttagagcttagagctagaagcaaggaactaggagttgtttagatgatgaaaactgaaatatgtatat

SEQ ID NO: 170580 - DNA, 401 bp, Homo sapiens
tctcaccagggcaaccactgttcagatttctttctccaaaggttagtcttgcctgttccagaacttcatagcaaagttgtcatgtggcttgtacttttacatatctgacttcttttgttcagcataatgtgtgtgagattaatctatgctcttgggtaaattatcagtagtattttgtttctgtttattactatatattctgtcttatgaacatattacaatttgtttatctgttcctattgatggacagttgggttgtttccaacctgaattataagcaaactagctatgaatattcatagacaaatctttgcgtggatacatgtttttctttctcttcagtaaatactaaagggcagacctggtggtcacagaacatattatgtttataagaaagcacc

SEQ ID NO: 170581 - DNA, 322 bp, Homo sapiens
tccagcacacgcgaatcacagaccatggtggttgatcctcaggtagttagggaggaaaataaacaagaagttatatatttaaaaccacgtttcaattttacacctgattaattgactaaataaagggcattagcacttctacttcctacagtccctccctttacctctggaaactagtgatttctaggttgttttgtgttgttaaggtgggccaccttttctttctgttctgcactcatagtcctgtttttaaatggattcacctctcatcactagccttttgtatggtgcctcggcgtgtgcagtttggacattcggcgtg

SEQ ID NO: 170582 - DNA, 267 bp, Homo sapiens
ggattgtataggagtaataaaacaagggtgactgcagcagggaggagtacgattactacacacataacagcttattgcctctcatgcgttcaagcacagctctatgccattcattacaacagacagccagggcaaactgccatagagctcactccagaaaaggcccggtcttgagtgcagagactaaatcttctcacttacatgtcttcctaatgtttccttacttcatcttcccatatcgagaataacttgaggagaagcaaaaca

SEQ ID NO: 170583 - DNA, 503 bp, Homo sapiens
tgtacagctctgtagaaatgtgaaggattatttttgttcttcagctcgccctctaacaaaggctgaataagtactgaattggccaaaaaagggagggcaaaggaaggaatgtgaatcttagggggagtagcaaaaaagctggaataatccccacactgtgtttccaacacttttcatgaagcccgagctccaagaaacagtacacatccagggagggaggtgagaaactggggacttgagggggaagggggttaggaggagagggaaaaggagcccactgctgtcaaagcccaggaggacatggaaggtccttgcctggtgaggagaagaagagggtgtctctcgagtcccagctcctgctgcgtcttccttcgtgatccagactctcttgtgatccacaaagcacagcttccagctttgagccaagaaatgctgccttccagtgccccccacctggcagctactgagcagattcaaatatgctcagggttggagcccagaga

SEQ ID NO: 170584 - DNA, 412 bp, Homo sapiens
aggtgggaggattgcttgagttcaggaggtcaaggctgtggtaagctgagatcacactactgcactccaccctgggcaacagagcaagaccctgtctcagaagcaaaacaaaacaaatatactaattgcccaagcatcattatcttttgtagattaatctattttaatgtgcctactgactgcagcagaaattatgtgtcctgaacagaaacaaatttctatagttttatatcttcccagaaatactattgttcaacatgctgaaagatatagctgagaacctaaagatctagtaatatgaaatgatgtttggcttctctgaacttaccacatcaagaaggcagcagtttgcaagcaatgcccctcctccaccaaaaaaggccttattatattctaaaaccaaggaaactgt

SEQ ID NO: 170585 - DNA, 747 bp, Homo sapiens
aagtcttaaatgtagctattttctttttaatttccataggtttttgggaaacaggtggtatttggttacgtgagtaagttctttagtgatgatttgtgagattttggtgcactcatcacctgagtagtacacacggaactgaatttatagtcttttatccctcactcccttcccatcctgtccccaaagtccattgtatcattcttatgcctttgcatcctcatagcttaactcccacatatgagtgagaacatacgatgtttggttttccattcctgagtgacttcacttagaatgatagtctccagtctcatccaggttgctgcaaatgccattaattcattcctttttaaggctgagtagtattccattgtatatatatacactacattttctttatccaccagtcatgctagttatgttctatgaagtagccacaatcaccacattactgaatactgaattattgcccctaggggaaatatagggtttgttactctgagctgctggtcactttttttttttttttttggtcaaccaatcaatacataaccttgctttatgtatgtttctatttaaagacaccttacttaatatatgctcttaattctttaacattaaacacatggccaatagcactctaactcatgcctgaaggaagtttttctaacccacatatttctccataaggcacatcactgctttcttgagttaggaacactacacagcacctcagcacagactaag

SEQ ID NO: 170586 - DNA, 186 bp, Homo sapiens
tactgtcatttggaggagaagagccactctggctttttgagttttcagcactgattctttgcttatctttgtgggcttatctaccttcaatctttgaggttgctggcctttcaatagggttttgtgggattctttttgttgatctttttgttgttgttgttttctgtttgtttttcttttcatagt

SEQ ID NO: 170587 - DNA, 315 bp, Homo sapiens
ctctatggactcatccaatccctggaccacatcttattctgtgaaacatatagaaacctagcttaagtaaattaataaaataaaatgaaacacgtaaagattcagaatgtgtctgaattagtacccaactacattacttaggtaatatttaggctttttaaaaaaaatttatgcaacctcatgtaacacctgtgtgcttggaaatgctgactattcttgtgcttaaagcttatccatgatctgcttcagagtttgtgtaacacaaaccccccagtttacatatatatatatatacacacacacacacacacacac

SEQ ID NO: 170588 - DNA, 416 bp, Homo sapiens
atgccaaattaaactttcatgcaccacttctgaataaattaaagtactaaagcaaaacaaacaaggaacaaagacagacaacaacgtggggtgaggaacaggcagaactaacccaagagtaaaatggagagaaattcgagggcgacaacaatgcagcagccctcgaagcccatcagggcatcccacaaagagtgtgaagaagaagctagaagatccgagagcaaagaaaggtgtaggtttcttctactcaaaagaaagaaggggaaacagaaatgctaggaaaagaaagcagcgtacagtcagctacaatacgaaatatttaaaaacccagtatgattttgagtaaattacagttaaagaacaaaattctcaaaacacatttgttgaatggcacaaatataaagacccatctgaaa

SEQ ID NO: 170589 - DNA, 384 bp, Homo sapiens
caaacaatagcttcatccaaactctgacatacactctttgtacagctgggctctgaaactgttttatggaaagagtggtcattcagtgtacttcgaggcacgcttagatcatgcttagggtgagataggccaagggcttagttaactcgcttatttaggtcgtagagatgtgaattttgacattttcatactagactgttagctttcgtacaagagttgatcgtttatgtgggaagtaactgtcactttaaaacaaattttatttttactcttgtttggtgcaaattgtgtccctgggttttatttaccttttccttcttagtctgtggcagcacgaatggaaaagcattacattaaataaatgtaatataagtgcatttttct

SEQ ID NO: 170590 - DNA, 412 bp, Homo sapiens
ggacaaatgcagaggcattcacattttccctaatagtttcaaacttttaccttgtctaagaaaaaattaaaaggtagatttaaggagggaaaaaaatgggctgaggttcttaatgctatcatttaacagaccatgttaaatgcccatcatataggtaaaacaggtccatcaccattgccaccagattccatacaggacaatgagacttagatccttaggtattcgactactaccaaaaaaaatatgtcaagttggttaacccaccaacatgttgtatttattatctgaactagagaaactaaatagtactttctattgagcatatcctagaacttgtaccatcttttccccaaaagttaaacattaaactaccatctatttcctctggacctacaaacttcctataggtaca

SEQ ID NO: 170591 - DNA, 344 bp, Homo sapiens
cctgggctcaagtgatcctcctgcctctgcctcccaaagccctgtgattgcagctgcgagctaccgcacccagctttcttttcttttgaacagttggtaaatgtgactctcttgagatctgtgcattcaagtgtaggtctctggggattcagtctcatactatcaaatattctcactttaaatatacaatatgctagagtatctctaactttttgtagcgtgggtatgaaagattgcaatattagttgaaaatatttatttttttccccatcttcttatttagagatggcgacattcttagtgtgtagactgaaataaatcactattgaaatgacatcaacgtg

SEQ ID NO: 170592 - DNA, 103 bp, Homo sapiens
gtatcctttttatgtatgctggatttgatttgctaaaatcttaagaattttttggtctatgttcatgataaactgtggtctatagttttcatgtaatatctgg

SEQ ID NO: 170593 - DNA, 716 bp, Homo sapiens
ggctggaaccacatttattaagccttcctagaggaggtgaccactgaaccaattattttaaaaatcagaatgaggcaggtgaaggatggttgtaggaggccttctagacgaagcagcaggagcaaagacagggaagcaaagagtgcaatatgtacaggcaaacacaagcaggcctctgttactgcatgcagggtgggtttaaagagtagtggcaatgaggctggagatatggcagggaacagttcttagagagtcagttttagccttttaggagtttagactctatccttaaagggaaaccccacatttatttatttatttatttttgagcacatatgtggtattagttcgtctttctatgcatgaagaatttggcttattaaaataattttaattattgggtatcagacccatttgtaaacagaaaaatacagttaagtgttttcttaggaaacagaatgtaaccgtactttttaaaacatcgtacagccatggattcaaccaactgtggatggaaaatgtttaggaaaaaaacaagaaaaaataataaaaaaccaatacagttaaacaaccatttacatacatttacattgtattaggtattataagtaacccagaaagataaagtatataggaggacgtgctagcttatatgcaaatactactctattttatataagggacttgaacatttggattgtggtatctgtgggggt

SEQ ID NO: 170594 - DNA, 332 bp, Homo sapiens
tgaatttatttatctttcccctaatccaataaatgtctctccttattcttcctatttacctcaccattaaataccgaaggttttcctatttcctcccaagttggcacattaacactctaatattcattctgatctcacagtattgaatctgagcatagaaacctcataacattcccagggataaatctgctacccaattcctaaaagataacacacagtttaaaaaaataaacacagtggtggtaattatacaactgtatacatgtgtcaaaatttgtcaaactgtacacttaaaattggtgaattttattgtatgtaaattatacctcaat

SEQ ID NO: 170595 - DNA, 451 bp, Homo sapiens
cacaccgtgagtggtagaggcgcagcagcagggcagacccagggctccagggcacgtgtgggccagggtaggtgaggcaggagagcttgcctgcagggcggcagggttggtgacgaactggccgcctcacgatggcccccactcactgagcactctgcgctgggctctccctgaacgcctacaggcctgagcctgctggtccgccacttggtgggtatgttcacttccattgtgtagacaggaaatggaggctccagagaggttaggtgacttactcagggccaagcagaagctaagtggtgtggtagaagaaacagaatctgaagtgaaacggacctgggtgggaatcccagctctgccggttccgcgtctaaggaccacctcccctgagagcgcccacccctccatccctcctgagcaaggtttctgggccaggagccatcctgtccca

SEQ ID NO: 170596 - DNA, 411 bp, Homo sapiens
ggcaggtacaggtttttatttggggggtatgaaaatgttctggaattaaataatggtaatgttcacacaaccttgtaaatatcctttaaaaattgaattgtttgcctcttaaaatggttaattttatgttgtttcaattatgtctcaattttttgaacgtgtgtgtatattatatatataatcctctaaactaacataaggagactatggaaaaatacttaactgatccgaaatgtgcaagaaagatgtgaaaaagcaacatagactggcaggacaaataatagcacatagaaaatatggtatattttatctcaaaatattaacaaacacattaaataaaaatagactaaattcttgtgtgaaagctaaatattttcaggctgtattcaaaatatattgacctagatatac

SEQ ID NO: 170597 - DNA, 303 bp, Homo sapiens
attctgactgacagagataaagatgctacatagaccacaaacaactgaaatcacaggtatcatgagagtttagttacagtgacaaaagcaaaaaagaacaaaggaagatcaggggatctgtgaagcatttgctctctcttttcgtaaggagccaagacacccacagtaaattcccctgtagagagctgctaccttaaagcaggatttgcattttcagaaatgcttccttcctctcctacatttcaatcgtagtaagaaacatttactcacattttcaatcttctgattttctagaaaccctag

SEQ ID NO: 170598 - DNA, 279 bp, Homo sapiens
atcccttgttataggttttcaatacggaattacaagaaaattaaatacaccaatatttttaacccctaactccaaagaacctgttgtaaggattagaaataatatattgaaaagactcagcatatacaggtaattgaattaaaaattcttatcaaccagccacttgggaggctgaggtgggaggatcatatgagcctgggaggcagaggttgcataagcccctgcagattgcaccacagcactcctgcctgagcggcagagcaagacactgtctcgagg

SEQ ID NO: 170599 - DNA, 289 bp, Homo sapiens
cttgaactcccgacctcaagtgatccatccaccttggcctcccaaagtgctggaattacagaggtgagcctctgcacgcagtgatcatacaattttatgtgacagtttccctgagagcaaatacttattttcgaatatgaaggtatgtttatgtgagatcaggcctactaacatatatttagaaaataataaagtgacctcaacttctgtgaaagaccctgcaaaatgagagaaaaccaacaaaaagggacaaggaaaggagggggttatataggtttgataggaagaa

SEQ ID NO: 170600 - DNA, 309 bp, Homo sapiens
gtggtggcaggcgcctgtaatcccagctacttgggaggctgaggcaggagaatcgcttgaacccgggaggtggaggttgcagtgaaccgagatcgcgccattgcgctccagcctgggtgacaagagtgagactttgcctcaacaacaacaacaaaaaagataatgtgtcccactggggttagctctgttacaatcacagaattacagagcctgtagaaagatctgcagatctttagaaacttaatgcaccttagaatttccatgcctggactaggaggccttgtgtagaggaggtttactggagatgag

SEQ ID NO: 170601 - DNA, 488 bp, Homo sapiens
tgcaattgaaagtagaggctttctctggagggaaaggtgaggaggatgtgatttggaagaacagcatggggaggcatcagttgtattgtaatgtttattttttaagctgaatgataggtacgtagatgttcattgtgttctttttgcctttttgtatatcttaaatatatggtagtgccatgattagcaggcttaatagccttgtgagtttaaatgtcactttcaaatgctgtatttttggtggagttgcttaaacacattccccttggaatctatacaaccagttaaaaaaatcatgtataaaccaccatgaaatataatgaaatgtactgtatatgcattttcatgaatgttgtgtcaaagggcttgtaggaaaaaaagatcgttaactcttttgcattcagtgaaaataggtggctttggaaatagtttcagccttgctaacagtttttttttcatgcttagaattaaacgaaataatttggaat

SEQ ID NO: 170602 - DNA, 310 bp, Homo sapiens
ctgggtggtgataacaagcagagcctcagaaattctgtaagggcccaagaatgcaacacagaacattcagcaccaaatgttgctaaatgtttcaactactttgaaaaatttaactgttccaaagcacgtctgtgactatgtatgactaaatgtgacatttataaaaatatgacagagcactgtagtcccagctactagagaggctgaagcgggaggaccgcttaagcccaggaagttcaagtcttcagagagttgtgactgcactactgcactccagcctgggtgacagagtgagaccccttcgctgaat

SEQ ID NO: 170603 - DNA, 223 bp, Homo sapiens
gattgcctagaccagcctcctatcagagactaatatgtcatatacaaggctacacagatgatgtaagtaatctatatttagaatagactgcagttaaaaacagactcaaagcagttgaacaacccactgctcaactgatttccaaccaatgcagttggcagaataaggccattttaagttgacctggaaaaaaaaatattttaagtcaggggtcagcaaacta

SEQ ID NO: 170604 - DNA, 361 bp, Homo sapiens
aggaagtgcagtagaggaaaatgtaggtggagacttccttacaccatcgagaccacacaaatgggcatgtgtttatagaaaggcccagtggtgaggatggcaatggtggtgagcactcccgagcacaaaggtggatgcccttcagctgtaagatcccttttccttgaagaattctccacagcaagctggctggccagccttgacttttctcttcctgaagggagcctggttctctactgactcagcagggaatgtgtcctttagtgctacttattgatgtgaggatatgaaaaacttccccaacctcaaatttgggacgtccttaccagtgtttctcaaatttcaatcactctagggctac

SEQ ID NO: 170605 - DNA, 439 bp, Homo sapiens
ttttcccatttcaaaaagagtacattctacatgctacattctaatgacttttatatctgtatctgtcttccaagcccatattagaaaggcaagcatagtgcagcagttgcaagcaggccgtcattttattgagatagacataccacttaataccaaaggaaaagactggaaattgagaccagaatacaaaatgtagtagctgggaaccatgctatgtggaatcaaactgtatatgcaacactgactgctaaagaaaattgtgaaactgtacttgtaggttttacttggaagctatgatcacagaccttagatggctgctttatactgcctggcagagtttgtatgctgtacttctcagacaactttttcaacctaaatcctttctctccaaaacttaagcatctgtacctcagcctcaccctaagctcttgaaacaagc

SEQ ID NO: 170606 - DNA, 173 bp, Homo sapiens
caccatcccacacaacactccagttgtgatcagtggattaaagcaacactccttggtgaataggcttcttttgatggtacttgcatttgaaaagagttttgttgaagcaatttagcttctaattaatgcattctgtgggggagatgttttttcatggagtcatcttcttgtgc

SEQ ID NO: 170607 - DNA, 294 bp, Homo sapiens
catccagaataggcaaatccataggcagaaagcagattagtgattaccagaagatgagataggggaaaatgtacaatgactgcttaatggatataaggtttattttggggatgatagaaatgttctggaattagaaagtggtaattgcacaacactgtgaatttattaaaagccaccaaattgtacacttaaaatgactgaaatggtagattttgttaggtgaattttttttttttttttttttttggagacagagtcttactctgttgccaggctggagtgcagtggtgcgat

SEQ ID NO: 170608 - DNA, 361 bp, Homo sapiens
cctagagtgaagatcttgcagctcactaggaatttccttgtgggcaaaatatgggggaggcatgtaacttttcatctcgttcaggaaccaaaaacggagaggcaggtttgtgtgacccagttcctagctagacttctccctttggcttaatgagtttggggtcccaagatttaatttcctttctcactgggccttcagatgccagctgctcttggctgtgagaccaggagtacgagtaggcagtgtgatggaaaaagcgccgtgagtaggggtacctaaattctcttttgttaccagctctgcagcctgggccgcacttgcagctccttaaccttagcctatccagccacaaaagaaaggt

SEQ ID NO: 170609 - DNA, 214 bp, Homo sapiens
ctgggcctgtttcctcctctgcaaaatgggagacaaactgccactccatcacagggctaacatcaggacttaagtgttagctgtgatcaccattcagcaagctgtcaaattatgagctggctcctcctgtcacccggtcacgccccctgcttcctctgaggctcccaagtagggtctatgaaggcttctgaccttgtgccccgccatccactca

SEQ ID NO: 170610 - DNA, 112 bp, Homo sapiens
cagcgagagcttcaagatcctcagtttgggtctaacatagagaatccaccagaaacacatttttttttcaagttttattttaagttcaggggtccatatgtgataaagttta

SEQ ID NO: 170611 - DNA, 1461 bp, Homo sapiens
agtcaccatgctcggcccaacatccacatgtttaaagcaaaacctgtggacccatgacgttgatttgccctatcccagttatagttaccatcaagtcccactcggagaagagacttgttggtaaaacagttctatttttataatagtagaagaaatccagctagcaatgtaatcctctttcttaaatgtaattgtacaactaacagtcatcacacatatgagggtagccagcaacgtgagagacaaaattcaagattaagttccaaaatcaacatggaggacaatttagtaaagagactagacctcttttataaaattataattactatgtagcagaaaggagccaggacaagaatgaataaacagattacaaatattgttgctgaaataaaaatgttcaataggaggattaaagtccaaaaagaaaacttccccaatacaaaaagagatagaagacatagagaaccaattcagactattaggaatctagaaagaagaaaatggagaaggaaatgctatcatgtggaagaggatttcctagggatgaataaaattcattgaatgcccagcaacagtgactgacaaaatactcactaagatacttcatagtaatactgtatcatatcaaggagagggagaaagagtgtcagtgattttagagaagccaaagaaccatattttcagtgcagcctttagtacatggggagacacacacacaaagctatcatttgtttagctttgtgatggcggtattagaagtttaggtggaaaatttggtgtattctggactgcgactttctcctctttgcatcctgattatattcatgaaatttgttaaaatcactatgagggattttctcatcctcagtcttttcctattctctataaatctttaataaatctcacactctcaagaggtcagagcatttgaaataaaaatcttaacagtattgaatattggtatatttcatccatacaatcaggaacaaatttaatagtaggaaaggaaataggtacattatatgtgtttctgtatatttatgtttatgtttttatttacatatgtatactgaatatatatttgttactgcttatagatcacatactatgtttcatcaactttaagatttcattaactataaaaatgtcattttatgaaacattaaagaaaaatattgcaaattaactcatgaccttataaagtacatctggatttcagagatgttaagtgtgaaaaaatatcttagaattcattagatatgcttagcaatatatgatactatgcagtagattccattgttttcttgaatagaggcttcagttttctaaataattttccacttataaagattaaaaattagttctgttaaaaatatgtatcatcttctatttggagatagttcagggaactattagaaaatatttacatatacctgaatttttaaaatctgtagctatata

SEQ ID NO: 170612 - DNA, 1407 bp, Homo sapiens
agtcaccatgctcggcccaacatccacatgtttaaagcaaaacctgtggacccatgacgttgatttgccctatcccagttatagttaccatcaagtcccactcggagaagagacttgttggtaaaacagttctatttttataatagtagaagaaatccagctagcaatgtaatcctctttcttaaatgtaattgtacaactaacagtcatcacacatatgagggtagccagcaacgtgagagacaaaattcaagattaagttccaaaatcaacatggaggacaatttagtaaagagactagacctcttttataaaattataattactatgtagcagaaaggagccaggacaagaatgaataaacagattacaaatattgttgctgaaataaaaatgttcaataggaggattaaagtccaaaaagaaaacttccccaatacaaaaagagatagaagacatagagaaccaattcagactattaggaatctagaaagaagaaaatggagaaggaaatgctatcatgtggaagaggatttcctagggatgaataaaattcattgaatgcccagcaacagtgactgacaaaagagtgtcagtgattttagagaagccaaagaaccatattttcagtgcagcctttagtacatggggagacacacacacaaagctatcatttgtttagctttgtgatggcggtattagaagtttaggtggaaaatttggtgtattctggactgcgactttctcctctttgcatcctgattatattcatgaaatttgttaaaatcactatgagggattttctcatcctcagtcttttcctattctctataaatctttaataaatctcacactctcaagaggtcagagcatttgaaataaaaatcttaacagtattgaatattggtatatttcatccatacaatcaggaacaaatttaatagtaggaaaggaaataggtacattatatgtgtttctgtatatttatgtttatgtttttatttacatatgtatactgaatatatatttgttactgcttatagatcacatactatgtttcatcaactttaagatttcattaactataaaaatgtcattttatgaaacattaaagaaaaatattgcaaattaactcatgaccttataaagtacatctggatttcagagatgttaagtgtgaaaaaatatcttagaattcattagatatgcttagcaatatatgatactatgcagtagattccattgttttcttgaatagaggcttcagttttctaaataattttccacttataaagattaaaaattagttctgttaaaaatatgtatcatcttctatttggagatagttcagggaactattagaaaatatttacatatacctgaatttttaaaatctgtagctatata

SEQ ID NO: 170613 - DNA, 146 bp, Homo sapiens
gatgctgtacacaggggagccagatatataagcaaataattagcatgcatgggctatggaaaggtgctcacgatggatcacgttcaataaaaaactatatgcaatgcatgcccagagttttgtaaaatacacgttaggaaaaagtt

SEQ ID NO: 170614 - DNA, 706 bp, Homo sapiens
ctcttcataataaatcttgctgctactcactctttggatccacaccaccattatgagctgtaacactcactgcgaaggtctgcgactttacttctgaagtcagcgaaaccatgaacccaccggttggaacaaacaactctgcacacgccacctttaagagctgtaacactcacttgcaaaggtctgtggcttcactcctgaagtcagcaagaccatgaactcaccggaaggaagaaactccagacacatctgaacatctgaagtaacaaactctggacacaccatctttaagaactgtaacactcactgtgagggtccacagcttcattcttgaagtcagcaagaccaagaacccaccagaaggaataaattctggacacagaagttaatatcaataattacacaaaaacccatataagaagtcactctggaacaagatttttagcctttgagccctgagtctatttttattgttaagtatttcatgtttatttttttctcatcctctacaaaaaagcagcagtaaacatgtgatgaccagccctttgtcagttaaactttttcccctggggcattagaggaattttgtatgagaactctcaaaatgccttacatactgctacgactaagatgttacccagagaatcttactttcttggtatcatttattcactttggggaaaaaaaaagcaacccataactggta

SEQ ID NO: 170615 - DNA, 340 bp, Homo sapiens
tgcttggttatatgtgggaagaaatccctgtacattgagaatgagaagtagcttagagcagtctgagctatgtgaggtttgcaaaatgtatcacacccagcgagtcatgagtatacttcagtcacacatacatacctgcacccaggcaattgtttaaaagcattttcttctttctttccttacctgtagtttccagactagctgataaatgacctaaaatgttatcacaagttgcagaatgtgacccttacccattatcttcatgttcctagaatttgtgatacaaaaaaaaaaatgtatagccaatcaatagcttatgttattttaatgaaccagtgta

SEQ ID NO: 170616 - DNA, 173 bp, Homo sapiens
tatattccgggtttacctcttaaaaaaatgacctgcactaagcactaaaattctttctcaaggctgtttgtgggactcaacaagttaagaccctagtactgatggtttttcagaaagtctatgtctaactagctcacaatgatatccaagctatcagctctctggctttattt

SEQ ID NO: 170617 - DNA, 584 bp, Homo sapiens
aatttagtaacaccagatattctccaaacctaagtttcacttggaattgccttttagtcatactttgggataaacagacacttacaggatgatgggctgcctcagtacatcagctgttttaagtggacagccccaatagggtttcactgcacttgaattagagtacagtaagtcagttggttaacacacactccattggtttagagcccgggaaatcggcatagggactaagctgtagtttcctttgtattttctaagcacatccaaagaaattaattttgcatgatgggaaccaagacttaaatagaagatgttttcaagtggcatgaagcatttcagaagccctcatttacacagtgtaacactaatgtgctattgatgtcattcctacctttttaaaaccagtccccaaatgatctcagataggcagcatctcatgagcctagttgctataaatacaggttgagtatccctaacctggaaatccaaaatgcttcaaaatctaaaactttttgagcattgacgatgatgtgcaaaggaaatgctcactggagcatttcagatttcagactttcggattaggg

SEQ ID NO: 170618 - DNA, 697 bp, Homo sapiens
tacatttcttgcaataatttgtagaatttacatctttacaatgttcaacattcccattcagaatcatgatatagatcttcatttaatcaaatctgtgcatgtgttagaaaattcaaagagtgtatttttatagtattgtaacttggtaatttatggctttagttgctattgagagtaaattttccagcatatttttaaactggttcttgctgataaaatacccggtgattaaaatatatgtatatagttgtcgttttacatataaaatattttaatcagcttgtctttgattactggtaaagtgagcacatttccatgtgtttattggccacattaatttttaccttttaattgctgctactgctgcttctgcttcttcttcttgttcttcctagttattcttgttaattttaacaattctttatattttaaggatatctttggaatatgttgtgaaagtattttcccagtttatctttttttcttaacttgttgctattttttgacgtattttaaaatatgtgcagaggcaaatcaatcatttgtttattttgtgataccttctttgcatttatttttagaacactttttattaaatgacttatcttcccttcctttttttgaggtaatgtctctattgtatactatatatatttgtatctatttctggactttatattttattccattgatatgg

SEQ ID NO: 170619 - DNA, 556 bp, Homo sapiens
tgtaggcggctgccaaaaccaagctcttgtaaggtccactgtctctttaagttccataggaaacacacctttagagctataaaatggcatgtctctcctttattacccaaggagaggcacacactggctcatgtttccctttctgtcatgacttccatgaatttcacagctaagtgtgctcgactgaagtaactctttcttaacctaagttttctggtacaattatcgcctctacgtccaaatattatgtctcctgttttatctttcttttgtctatttcatctttcatagagaatgtcactggatctttcttagaaggtgatgcatcaatagcaactgcagtttctaaaccaaaatttatcacatatgaagtcatatagtcatctgacaaaagggcagaatatttgaaaccagaactgtcccatatcctcatggaagataaaccctagaaaataaatacagggtggtgaggctggggtggggtggagtagggcagaaaactaacctttactgaatatcataagctgagaacttctcatgtattctcatttgatcc

SEQ ID NO: 170620 - DNA, 207 bp, Homo sapiens
caccaggaggaggcagcagcctttggggggttggtaggggaacccaggaacccggggaagggctgctgactatgggcctcgtggcagggtgctgatcctctctgagcctgcaaaatccacctctcgtctcagattgtgggaggtgagaacatcaacatcaggaagaaaggaagccagaagctgctggttgtagaaaaataactaaaa

SEQ ID NO: 170621 - DNA, 752 bp, Homo sapiens
agcacaatgtaaatttttataattttttaggtgcatgaaaaaatatatgctctttcatcgttgagtacagttgcctatatatgccaattggctgatatttattcacatgtataatatctttactttttaactctgttctaacaattatttgaaaatatgtgtaaaagtttcctactctgattgtggatcagtctatttctctttcatttttgttattttttcctatatattttaagctataatttttggtgcatacaaataacattttaattttcattttgttggctctatcaacaatatgaaatgctctttcttatctcaagtaatactttttgctttatagtctaattcatttaattttactatatctactccacaaatacttagatgagtatttgtatgacaaatattttcccattgttttactttttgccttttgtatctttttatttaagatatgtctcctctaagttacatagtattttaactttttgtgtatactgactaactttgtcttttttgcctcctgtagaatatttcctctgtttacatttgatgtaatataattaagtgggtttaagtctatcattttactacttttgtatattttttggttttatgttctccttttcttctattttgccttttatctaatcaaacttaaaaaaagttcttctctctctgtttgttagttaaaaattattttcattttagttgttatcccagagatcacaacatacatttttaactta

SEQ ID NO: 170622 - DNA, 269 bp, Homo sapiens
acagaactgtaatggattttctcttccttacgattttctaagtaacattttcttttctctagcttactttatcataagaatacagtaggcaatacatataacacaccaaatgtgtgttaatcaactgtttatgttatcggtaaagtttctggtcaacagtaggctattagtaattaagttttgggggagtcaaaagttaaacttgaatcttcaaccgtgtaggtggtcagtgtccctaaccctgcattgttttagggtcaactgtatat

SEQ ID NO: 170623 - DNA, 375 bp, Homo sapiens
  misc_feature (302)..(302): n is a, c, g, or t
  misc_feature (350)..(350): n is a, c, g, or t
cacccctcactgccttctcctggttcatcaaaccgtatcactctgctgaaatgcgtttgtctttagttgagaactatccctgccttttacaatttgtctctcttagaggcatgctgctttgacctattcaccctcaattttttttttcttttttcttgagacggagtctcgctctgtcacccaggctggagtgcaatgatgtgatcttggctcactccaacctccgcctccagggttcaagtgattctcgtgtctcagcctcccagctactcgggaggctgagtcaggagaattcgcctggnaggtggaagttgcagtgagccgagatcgcagcactgcattccagcctnggcaacaagagcaaaactccgtgtc

SEQ ID NO: 170624 - DNA, 184 bp, Homo sapiens
ccacccccatcttattggtcctcccgggccgaggcctccctgcgattggtcggggaggtccgcgaaggccccgcccatctctccgcccccgtccccgtccgccggtactttggacggcggcgtggcgcccctcctcccctcccggtccccgccccctggagcaaatgctgccgagctgcggccg

SEQ ID NO: 170625 - DNA, 866 bp, Homo sapiens
ctcaagttgaagggcatcggccacagcagaacagttccccacggctgatgggcactcacaggcaggcaggagggagcggttccgcacgacttcccggccccctcagtgcccattttacatctgaggctggcagaccagaagggccacgggattttgagccccagcctgaggccgggaagagggagctggggcaaacagagagcccaaaggcgggtccgattttgaagagtcaatttcctttgaagaggcatcacccacccggaggtggcatcacctgcccaggaagtatcacctgtgcctagaggaggcatcacccgcctagaggaggtatcaccacccagaggaggcatcacccacctagaggaggtatcaccacccagaggaggcatcacccacccaggaggtggcatcacccgtgcccagaggaggcatcacgcacccagaggaggcatcacccgcccaggaggtggcatcacctgtgcccagaggaggcattgccgccagcccaggaggcatcacgcacccagaggaggcatcacccgcccaggaggtggcatcacctgtgccagaggaggcatcactaccagcccaagaggcatcaccacccacctaggaggcatcacccccgagaggaggcatcacctgtgcccaggaggcatcacccgcccagaggaggcgccccaagttggcagggtggtgggggctgggcctctcagtaaatggtccagagcttcccctggcagatcaactgtttcttggggacttaaagaagaattggggtactgggactcccacttagtgaccccggagcctgaggtggcccacggaggagtgcccaagccctcagcagccagaccagctccaca

SEQ ID NO: 170626 - DNA, 823 bp, Homo sapiens
ctcaagttgaagggcatcggccacagcagaacagttccccacggctgatgggcactcacaggcaggcaggagggagcggttccgcacgacttcccggccccctcagtgcccattttacatctgaggctggcagaccagaagggccacgggattttgagccccagcctgaggccgggaagagggagctggggcaaacagagagcccaaaggcgggtccgattttgaagagtcaatttcctttgaagaggcatcacccacccggaggtggcatcacctgcccaggaagtatcacctgtgcctagaggaggcatcacccgcctagaggaggtatcaccacccagaggaggcatcacccacctagaggaggtatcaccacccagaggaggcatcacccacccaggaggtggcatcacccgtgcccagaggaggcatcacgcacccagaggaggcatcacccgcccaggaggaggcatcacgcacccagaggaggcatcacccgcccaggaggtggcatcacctgtgccagaggaggcatcactaccagcccaagaggcatcaccacccacctaggaggcatcacccccgagaggaggcatcacctgtgcccaggaggcatcacccgcccagaggaggcgccccaagttggcagggtggtgggggctgggcctctcagtaaatggtccagagcttcccctggcagatcaactgtttcttggggacttaaagaagaattggggtactgggactcccacttagtgaccccggagcctgaggtggcccacggaggagtgcccaagccctcagcagccagaccagctccaca

SEQ ID NO: 170627 - DNA, 330 bp, Homo sapiens
agtgctcaatcctggtagtgaagccatttgggaacttgttcaccaggactccaatttgacagtgtgaatgaatgcatgaagagaaacatatcccaccagcctttgcccacatattttgtgttttgccttcagatggctttgaagtgacctacatttttcacatggcctccccatgagaaaggatgagtttctgagtacgtgaggaggctggctgtgtccctgtggaacacagcaaagctaactggtcctttggggggttaggccttacatgtagtcctcactgcacagaaccacagtcagctggaataacaacctggagaaagccagtca

SEQ ID NO: 170628 - DNA, 269 bp, Homo sapiens
atatctacaaaaaaacttgccgagcgcggcggctcacgcttgtaatcccagcacttttggaaggcagagaaaggcggctgcagagagagcgatgctcctgtgaggcgtcttccaccagctcctgaggctgcagcacagcgctccgcccgccctcatctccggggagaggctctttgaattttctcactaaacaaacattgattgcggccccaggagaaacgaagacggaaggagctgtgctggggagcaggggttttagggttgcgttt

SEQ ID NO: 170629 - DNA, 133 bp, Homo sapiens
gtggcatgcggtagggatctaactcccccttccaaaccgcccctccctgtatagtttgagtcgtttaggagatttcccttgcgttcttttcatctattatcacatcattatcacttgctgtggcttttatagg

SEQ ID NO: 170630 - DNA, 364 bp, Homo sapiens
gccaaactcacccttttataacagcactaatcccacccaagagggtggaaccctcatggcccaatcacctcttaaaagtcccacttcttaataccattacaatggcaattaaatttcaacatgagattttgagaggacaaaattcaaaccgtaacaacagtctttaagaatgggaaaggatagtgaagctgtactgaaactctagtcctttgtaaaaaaaaaaaaaaaaaaaaaaaaaatcccattaattcagtcattcatcaacactatatgccacacacttttctagataccaggtatatataaaaggaaaacacaaaaattctctgctttcatgggactgtttttgtaacatactgagtat

SEQ ID NO: 170631 - DNA, 341 bp, Homo sapiens
tagtctcctaccccaaagttttgccttttccagaatacattcatataccttcccatggtatccttgggggaaatttgttccaggggttctcctccaggatacaaaatcctcagatgctcaagtccctcaatacaatgagtttgtaacttatgcacatcttcctgtatattttaaatctctagattactttttttttttttttgagacggagtctcgctgcgtcgcccagggtggagtgcagtggcgcgatctcggctcactgcaagctctgcctcctgggttcacgccattctcctgcctcagcctccctagtaggtgggactacaggcacccgccaccac

SEQ ID NO: 170632 - DNA, 334 bp, Homo sapiens
aatcacatcaggtaaatggaggctctaaaagaacctctgaaagtggagaaaggcatcttactctgtggtgggggattactgagccacagaaactaccaggcatatgtcaggtgtgggtggcacagggagtgttcttaggaaaattcaacatatgaatctgcacatttgggagcatatgtaaatatatttcccatgagctaagtgcctcccttagcaatgagaggtccaaactcagtaagttgcctggggccaactttaccaatggagggaaaaggccggcagttggacaagcggtgtttccactgtttggcagggcaagaatgcatagactccc

SEQ ID NO: 170633 - DNA, 503 bp, Homo sapiens
aggacaggccaggaactcggtgtggtagggtcagctcactctgtactcaaagatctgtcctgggcaatgaagtatcccaggccaaacatccacaatgtgtaattaaagagcagacaggagttcatggggcaatggaggtgatggagaaacagggattgggggccaacttcattttttcctagggaaattccatataatatagacacgctgctgtatcagtgccacctgtcttcatcttctgcctgtctgctcccttctgtaggtctgggtcacccacttacagtcgtcacttattaaacatgtcactctagggcagaaccagaccaacccagggtctggccctggaagtctgatatggtttggctgtgttcccacccaaatctcatcttgaattcccaagtgttgtgggaggggccccgggggaggtaattaaaacacgggggcaggtctctcctgtgctgttcttgttgtgatcgtgaaggagtctcacgagatctgatggt

SEQ ID NO: 170634 - DNA, 420 bp, Homo sapiens
tcaagaagactagcccaagagtgctctgctttcaggattctgcttccaattgccagtgggaacgattgctggttgcaagtggggaggggtccatcgtcaacgccagagaatggcaaactccttttgccagggccagctagtacagattttaggttttttgggctctgcggtctctgtcacaactactcaacttggaattgttcctataaattttataaaattaatcagggaagaagggaaggggagaaatgaaaataaaccaagcttgcagcacatttggcattaatcatgaggtcagcctgctctctgtcctgcttcttcatatttgctgcctattcccccagaatcacacagaccctgttgtaagactatagtcccccttaattgtaccataggtaacatcttaagcattgtgagaca

SEQ ID NO: 170635 - DNA, 254 bp, Homo sapiens
acacacatacaggagccactgattacttttaaaaaggacaatttacgtggtatttttaactagctttcttaacctgtggtcagcatattccatggtatcaaatgagaggatctgttgagggaaagcacatcaaaactgaggtccaatcgagcagaattcactacttacctagatggcatgagcgcaatgttcaaagaaaataaaattctgaccatgatgaagaaggaaccctatataacaagctctcccaattc

SEQ ID NO: 170636 - DNA, 745 bp, Homo sapiens
aaactaattaaatgaatgaccaattcaccaaattatggaggatttttcttctttttaagttttggagttttgctacaactattttgtagcccctcccctgtcccacatcccactgggagcctgggataatctgcgtctgactgtcagttactgataagcaggacatcccacaaacagattttcagcgaattggctttcagcaaactgatcatttggcaaagtggtcattaggcaaatgggtcatttggcgaagaggtcatttagtaaatcggctttcaacgacttcccctatgagatttctctagagtgagcattttcttgggttaaatgtacacttcatttccataattaatactcactagcggctagatgggaacagacaattaaaaaccctctggtttcttaacaggagcggaggtgcagagggcatctgctctgcaaggcgcagtgatcaggctcagcattgtcacaggagctcttgcggttctgtttgttactagtgtgacatacacagcaattcaatggaaaaaggactgagtggtatttgagtctcccgtagttgatcatcatatgtcttgataacccatgacaactccttgccacatgccacgggaggtccagcactccaagagcccagcagccagggccggattcatgggcttgcaacctggacagtcccacagggacacagaagagtccccactgtggtttaataatctgccatcaccatcttgaaattctttat

SEQ ID NO: 170637 - DNA, 380 bp, Homo sapiens
cttaatactccaagcatttccactgggataagtgagtgtacaagagaaatatggttcctgtctcagaactttaaacaaaccattaaaaatacaaaaagggggccgggtatggtgactcacacctgtaaacccaggactttgggaggccaaggtgggtagatcccttgagctcaggagtttgagaccagcctgcccaacatggagaatctttgtctctacaaagcatacagaaggttaactgggtgtgatggcatagtcctgtagtcacagctacttgggaggctgaggtgggaggatcacttgagcctgggaggttgaagctgcagtaagccatgattgtgccactgcactccagcctgggtgacagagtgaaatcttgt

SEQ ID NO: 170638 - DNA, 492 bp, Homo sapiens
ccagggcttctaggcatcaggagcaaagacacgatgtggcaatcctggttgcatgggcaagagtgggagaggggaagtggagtgagcatgaagtggctgccgagggagcggcggtgctggggaaagcggctctaggccacatcgggaggatcctgagtgccaaggagcccctgaaggtcttcgggcaggaggagcctctcagacctccacctggggggagttctagggtacggtgcatgagattcatttaggaagctcttatcagcatccaggatcaggcccagcagctgcatgggggaccaggtggagagaggggtggactggcaggttccggcaactcccccaaatctgggattaagaaaaggctccgaaatgatcatatggttctcagcctgggtgaacagagaaggggtctaatttggtcttttgttcattttgttttgtcttgttaaatcttcagtgcttgaaacagtggtgagcccatcataaacc

SEQ ID NO: 170639 - DNA, 294 bp, Homo sapiens
gatgaggacagcaggtcacagtaggagccagggattggggatgaggacagcaggtcgcaggaggagccagggtttggggatgaggacagcaggtcgcaggaggagccagggattagggatgaggacagcaggtcacaggaggagccagggtttggggatgaggacagcaggtcgcagtaggagccagggtttggggatgaggacagcaggtggcaggaggagccagggattggggatgaggacagcatgtcgcaggaggagccagggtgggggtagagggacagcaggtcgcag

SEQ ID NO: 170640 - DNA, 718 bp, Homo sapiens
ccagcacagtcatttcatcccccgtgcattccccaaaagcaaaaccaaagctcagcatgtgcttctagaactttctatatctggtgttcaggggtgggtggggtgcaaacggccaggccagcacagtcatttcatcccccgtccgttccccaaaagcaaagccagagctcggcatgtgcttctagaattttacaatcttgaattacggcttcaaaataactcacattccactataaggaggctcagaggatgccaccgagtggacggacgtgagcaggaccacagagacaacccagtgggacacgcaacactgttcccaagatgttagcaggggaaagagtcggacgaaatggcgaagtgtttggcacaaagaagaccaacaaatgacacaccaagccagtaaagacacctccgtaagaaagacacattcctccccaaatctactttaggagctactgctgtcaactctgactttctggaagtctaactagtacaaggtccaatcctcaatcgcttatgaaacaaaatcagaaaagaaccgggtagaaccctagtactccgcattataaaaagcacttccggcgggcacggtggctcacgcctgtaatcccagcactttgggaggccgagggtggcagatcttttgaggttagaagttcgaaacagcctggcacatggtgaaaccctgtctctactaaaaaaaaaaaaaaaaaaaaaa

SEQ ID NO: 170641 - DNA, 734 bp, Homo sapiens
caccactgaggaggccaaatggagtttggtggaaaatctctaattcattcaaggtattatatgggcaagcaatggctgtggcacagggtcccctgattactttgtaagaatgggtgggagggatgctgattttcaatccttttgcagatcttctctcatagtaacacaatagaagatactttgccactatgttgtttgccaaactcactgtacctacttgactggtaacaaaagtcccaagagttacttgggagaagacacttgaaaaagtatttttctaaatatgggcaaggatgctgcccttccccaaactgttagtataccacctctctgaccaattttcccaaggaagatattggggtagggtgaggtgtaaagaaaaagtggtcatgtaaatactggtaataaaagctgttcagtggggtagagttgggttgcaactgtagccattctaaaaatgggctatcaatgtccttttagccaaaagactttagtatacatcctcctcattctaccctcaggatattggatctttgcccctgatgggtatccatcccctttgaaactttagaaaggcaggttatatacagaatgttcaactaaagacatttccttaagtcatactttcatgctttctaaactataatcacccttatcatcccctgctgttatgctttccctctgctccctgtggcctaatgttcctccaccaccttattaaccttcaggatact

SEQ ID NO: 170642 - DNA, 119 bp, Homo sapiens
ttagagggcttagatatcaagagatggacttgcttttagttctttttcccatcctgttccctccctaccaaaataaaattgaccagctaatccgacttaataacactaaagaattactt

SEQ ID NO: 170643 - DNA, 763 bp, Homo sapiens
acaccttaagccttaagatctcaattccaagcatctcataatctgaacaaccctttctatttctggatcaattcccctaatacctccattcttaatacttcttcccaaacagggaagataggctcagtggattagattgaccctatcttaggccactaagtggattagaccactgaacctaacacttttttttaaagcatgcatcaattacctttatatcttaatttctcaccactctaatccctgccttgcccctttctcactgtcagtactcacctgacaaaaccccaaacctgttaaatctaactctctgtctattccatacctcttaccaagtagctgaacaagactgaagaaaaacacaactattctggttgtttgcactttaaattcatgaccacaaacctcaaagtgggccctctgtgctgccaggcaatcacactgctcccctttacagcaaaaggctttgaaaaggagttgacttagttgctatctccatttcctcccctcccattctctctcgaagctactctgtctgatcaggctttcattctcatcactcttcttagtcccagcagcatttagcagagttgattagtccttcctgtttaacaggtttctttacaaggcttctaaaacaacatatggttgtatctttcttccacctcgctggtcattccactttactcttcttggtgcacctgcctcctgaccaaccccagggctcagttctcaggccctccctctctatcaatactcggtc

SEQ ID NO: 170644 - DNA, 418 bp, Homo sapiens
cttggtcagtgcgtgtcaaatgaataaacaacaagggactgatcttcagtacaaaacaccccttctgcaatgtctgcttgtcgatcacacatggtctcaggaattcttttttatttaatttaatttttggggaacaggtggtgtttggttacttgaataaggtatttagtggtgatttgtgagcttttggtgcacccatcaccttgtgtgagcagtatacactgaacccaatttgtagtcttttattcctcacccccttcctaccctttccccctgagtccccaaagttcactgtatccttcctatgcctgtgcatcctcatagcttagctcccacttatgagtgagaacatatgatattgggttttccattcctgggctcaggaattctaagtgatgtatgtgtgtttgtctgacca

SEQ ID NO: 170645 - DNA, 215 bp, Homo sapiens
attgctttactaaggggcaggtacattaacttggttattgaggcttgatgggatgtttacctggaatgttctcaaaagggtgtgggtgagaactcccatttctgctttggctgaatctcttcatgtctgcctgtgatgcctgggactgtggcaactgttttataatcatgaagcaacaagtttaaggatgaagtcaataggctgggaggattaat

SEQ ID NO: 170646 - DNA, 409 bp, Homo sapiens
agagccagggaagtatctgggaaatggcaggaagaaggagggcggagccttgggctgctcccaccgagcaggttgcaaagctgcttctgggacattcatcctttccagccaggactagctgagcagacctaaccccggggccagcagcaggcactacccatgacagccttgggccaggtgtgtggggacagaatggggtccctctgggcacaagatggggtgtatgctggggagggggcatttctggcacaaacaccaggatgagcccaggcaaagggtgtgcaatgttccagggtgtggtatcctgtggcagacccagaatctccctccaaggaccaccacaaggcaatggtctctgtctctgggccagggtcacggtgaaatgtcactgtgaagacctgtgcttgat

SEQ ID NO: 170647 - DNA, 1104 bp, Homo sapiens
ttccagggctgtgtgcaccatcaacaaggcaaagctcctaccctggtgagcctacatttacgtgaaggaaagggttaaaaaggcaactgagatgcttcctggtagtaaatttaacagtacagctgtgattaaaaactaagccggatcagaagatgggggtgagattcctttaggcaggttgggcaggagccacactgaggaggcagcatttgccttgagtgggcactgctggtttgaggaggtggagttctgtcacccccacagcaccccagggctgctcgaggcactgccccacctcagtctgtaaactttgggcagaagaagttcaagttttcgacatcgaactttcttgtaaaaaagaagaggcccaaagtttgaggcggtgggattccttatcttgtgttgactttcacgggtcatcttcaccccaggcggtttctgctgtgaactcacaaatgagtctttgtccagttctcacccaacaactggcgtctcctttttaaaagccagcttctcttccctgccaaggtgcatacagcagtttggggccacactttggctctttagatgggaccttgtatacagctgacacggcctgcccaggtgacactatgaggggctgaggcggctgccttttccctttcaaaagggcgttttgttcctgtggccttgtggaaaaggcagaaggctctgaggcatctgaaatttggagaaagtaagcagcgtttccgctctgactcctcggacgcttcccccacgtgaccttcccaggagccccgctgcctttttgcctcccgcggctgcctcctgccatctctgcggccagatgagccttgggattggcctcttgtgggagagtttcctggcatcctggggacttgaaaaggggctcttttaccttctctccttctgtatttgtagggtcttgggtttatttttcttgaactttccttgtgcctggtttgcatttttaccttgctggtcctcggccagtttaaaaaccctgctccaggtcttgtcgtgttgtggttctgcatcaggaagctgcatcctgcatcaggttagggacttggatttagaaacatttcagtatgagtctttgtt

SEQ ID NO: 170648 - DNA, 791 bp, Homo sapiens
ttccagggctgtgtgcaccatcaacaaggcaaagctcctaccctggtgagcctacatttacgtgaaggaaagggttaaaaaggcaactgagatgcttcctggtagtaaatttaacagtacagctgtgattaaaaactaagccggatcagaagatgggggtgagattcctttaggcaggttgggcaggagccacactgaggaggcagcatttgccttgagtgggcactgctggtttgaggaggtggagttctgtcacccccacagcaccccagggctgctcgaggcactgccccacctcagtctgtaaactttgggcagaagaagttcaagttttcgacatcgaactttcttgtaaaaaagaagaggcccaaagtttgaggcggtgggattccttatcttgtgttgactttcacgggtcatcttcaccccaggcggtttctgctgtgaactcacaaatgagtctttgtccagttctcacccaacaactggcgtctcctttttaaaagccagcttctcttccctgccaaggtgcatacagcagtttggggccacactttggctctttagatgggaccttgtatacagctgacacggcctgcccaggtgacactatgaggggctgaggcggctgccttttccctttcaaaagggcgttttgttcctgtggccttgtggaaaaggcagaaggctctgaggcatctgaaatttggagatcgttgcaagtcccagtggacgaagttgttgctgcacacgccgagaaaccacactgcacacgccgaatgtccaacctc

SEQ ID NO: 170649 - DNA, 198 bp, Homo sapiens
tgggaattgagtgcaacatttcgggtctcagcttagatgtcacttggctgggtagcctttcctatcttggcagttctgggtgacgtaccattttcctaagggatcttacagcaccaagacatcttgaatcagagctcttaacacctgtatctatagattagctgaacaaattcattaaggccgacagtgagccaggcc

SEQ ID NO: 170650 - DNA, 538 bp, Homo sapiens
gagaccgcaccattgcactccagcctgggcaacaagagcgaaactccgtctcaaaattaaacaacaacaacaaaaaaggacaatctatgatatgttgtaaaatcattcggacttttggattactgttattttgtttcagcagcagtgggacagagagaagctatgccatatccttcccttagactatgctcaaagatattatgttatactggcttttctgatgatatttactttttgtttttatagttgttgcattgatgttactcatttaggaaaggtgaaagagaaatccctatgagaagcacaatgttaaatcaagattcattttagttataaatatgacctggatatttggagatatcttgaaattctctgttttgggggtttgggttgtgggggattggcttgttttgtttgaagaaatctgtatgtgaaagagcttgtctgtaacttcacacatatgttgggcagaaaccgctgcaagttagtacagggatttttgatcgaagaataacacacggtttctttttccaagccc

SEQ ID NO: 170651 - DNA, 243 bp, Homo sapiens
gccaggctgccacattgcaaaatctctccagataagtgaagctctgtgctcactcagataggaaaacttcccctactgcacttgaaatattttatcctcaaggtcaatagtcctccttctttctggaaaagtgaacatggaccagaggcctctctgtccaggtcaaaacacaggttctaaaatgtcctcccaactggcaatctgtatccatatggactaaaggcaatgtcctggcctttaggt

SEQ ID NO: 170652 - DNA, 483 bp, Homo sapiens
caagtaagcatgaaaaatgtacacagaactgtaagacatgttactatgcatcaagagcattaatttgcacaattgtctataatcttatgtttattagcaacacactctcgtgtatccagataaattaggattaaacaatgtgatcctgacatattaacacctcagctaccctggaattagtcttacccacctaaaacaaaaccttctccctaaaagccctcacaagaagtcccttatataaaagctgctttcaatcaaacaaaatcactttgctcttagaggagaatccctctgattgatcactcaacttacttgctcttctttttaaggcagcatttgaaaaaaattatatctttttgtctattagcacacaaaaattggaaacagcaaatttaagaggtcagagatggccaggcacaggggcttacgcctgtaatcctagcactttgggaagctgaggtgggaggattacctgagctcaga

SEQ ID NO: 170653 - DNA, 484 bp, Homo sapiens
atctgcctgccttggcctcccaaagtgctgggattataggcatgagccaccatgcctagcctagaaccatttctatctgcagaaactacaggtaatatactcagagacctgagtaactgaaaatttagttaaataagatctttgcattcccaaggatgaaatgatctagtctgagtgaaatttttggtgatttgagcttgttataagtataagtcagggccagccttggtgggtcacgcctgtaatcccagcactttgggaggcggagatgggtggatcacttgaggtcaggagtttgagaccagcctgatcaacatggtgaaactctgattctactaaaaatacacaattagccgggcgtggtggtgcatgcctgtaatcccaggtactcaggaggctgaggcaggagaatcgcttaaacccgggaggtggaggttgcagtgagccgagatcgcgcgccattgcagtccagcctgggcaacaa

SEQ ID NO: 170654 - DNA, 453 bp, Homo sapiens
aggtgctcttttgttgtgattaggaaattcaggccaaatgtcttggaagtggcagtagaggtcagaattgagtgtttgtaaaagagcacttatctctaggtttttaagcttttcagcagaaaccatgatcaattcggagatagcatacagaaagattaaataacatatgctgaacctccttttgtcttcaaagccccagtttagcccagcctgaaaacagttgagttaccagtgacagtatggtaatcctgaccagcattcaataccagaagaacaaattattttaggttagacatgaggaacaccttcctgaccaaagggttgtaaaatattaagaacttttacagaacttcctcagtatgttttaaagggcaactaggcgtagattagatacggtttctttaagaattttgtgtgatatataatgcatgaagaatcaactgacagagtgag

SEQ ID NO: 170655 - DNA, 250 bp, Homo sapiens
ggaagagattgtattctggaagtcaatttgcagtcagttgtttggaagacggtttttcatataagtaatcatacctgtttgttaatggtctccagccataataaactgtatacctgagcactgtttaggagaaagaaaattccaaatggaaattcctactgtaactcctactgtggccgagaagggttgggtaagtgaaacttattgactagatgtctactgaagaagagatagtcattgttaaaaaaag

SEQ ID NO: 170656 - DNA, 334 bp, Homo sapiens
attttaaatctcttgttttagcctcttctacttgtagagctaccaatcctagaagtttactagcaactctgcattgttacattttaatttgcattttgttttgcatatatttaatttgcatttagttttgcatttagtttgattgttcatttgcgtctctcctttctgaactgcctgctgttctttgctcactttttctattttattattattaagactagtcacgtgtagtagtgagaaggagggaaagagtctattggagttttaatatcatgtatacagtggatattaagaatatcaacacttccttttttttttttttgaaacagagttt

SEQ ID NO: 170657 - DNA, 281 bp, Homo sapiens
gagcaaggccactctggagtggggacactatctcattccagtagcagccctgtcacagactcctgggctcccctgggacctggcagccaccggaggcgaggggtctttcaagacctctcagctggtagacaggcctagaagctggcctcacagaggcaggaatgcagggaccagggaaaacatcgttgggagagctggaaaagggacagctggatggtgtctagtgttttgaaaaatctttgatttattggtagtaaaatatgtacatgctcattgggaat

SEQ ID NO: 170658 - DNA, 114 bp, Homo sapiens
tgctgggattaacaggcatgatccaccatacctagcctgaatatatatttttaaacttttctgtggcaaaagatacgtgattaagtcatagatcaagaagggatatttgaaaca

SEQ ID NO: 170659 - DNA, 544 bp, Homo sapiens
ccaggaggtgggttcaggggccctgctaccctgctccagaaggggtttggtgagatccaggagggctccctgttggagggggcatttgaactggggccaaaagaggcatgagatttccacaggcagaggaggcagagggagaccacatgtctgaacctctgttatgtgtcaggccctgtgccaggctcttcttgggcctgtcacttgacagcccttaacacaagggctgaacgccccctctctccatcccgcaagggaggctgtgagctggtgctcctcctgttcctctcaggccctgtctggggctgggagcaggtggtggaggtgagacctgggctcatttgttgggcaagtttcactcagtttccaaccggggtgagcagattgcctgcgtctgctgctgtggtgccacggaatggatgccaagccactctggccgctaccctcccctgggaggctgggtccctgccaccatgccccagcagagagtgtctgggaaacccctgggctgccctggttggtgccacatggtggccacctggcg

SEQ ID NO: 170660 - DNA, 410 bp, Homo sapiens
tcctctcttctgtcccccagctctcatttccagggtgaatattttgaggaccaaatgagggaatgggtacaaaactctttgtaaactttatgtaagtgctgtttagatataaacttttatattctccctgcactcctctatcaaactccctctaacccatcccaggggcaggctatgagcaaagtctgccttaaaactctactgccctaaccctcaaaataaaagatatatacaggtgaatcagccagactagaagtaggagagcagttgaagagaaaatttttacttttcctctgcagaacagcagaagataacaactttacgaaaagttccttccaagtctgactattcataaagttaaaacaaacaaaattacaagaccagaaaagtcaaggtgcatctgatataac

SEQ ID NO: 170661 - DNA, 319 bp, Homo sapiens
cctcttcaatgctccttttattaatatgattttaaaacaagatactgtgatcattcacctggttttttgttcttatgaaggtgctttcttgtgtggagaactttcttttatgtttttttgtctgtttcaattttgtgttcctgagtgggggaagatctcttgagggttctatttggttatcttgatctgcctcctctccttgttattttctatgtaaaagatcatgccatctacaaatacagacagttttatttgttctttatactctgtatgccttttattatttcttgttcttgcctaattgctcagcctagaatct

SEQ ID NO: 170662 - DNA, 328 bp, Homo sapiens
atatttttttttccagtcactaaaggaaggctgtcatttagcatgctataataagtactaaataatatttgttagggattctttttatgttaatctacctcctttcgtggaccttatgttttaaagatgttagtttaataacacgtatttattaatttctacttgtcattttttattaagtacaactatatcttaacatacaataccagagcttctggtcagctgaaatgagcacacagtagtgtgctgtagtaatctactttattccaaagctaagaagctggtatttgaatcagtacattcattctgtcataagtaagtgtatggt

SEQ ID NO: 170663 - DNA, 598 bp, Homo sapiens
cactagaggattcgtatgagtggcaatgtgactgagaggaataagcactacagtgggaatcaagaagcttggactgtggtactgttttatgcaatttagctacatgtccttgactctacacttatgaagagatgagcctagatcacttgtagccttccaaatttttttgaccatgatccattgaaaaatatattttacattacaactcagaaaacatctaacacacacacacacaccccatttccccaggtaatacttatccttatggagtgtgaaacactctattttctgtttttttcttgtctttctaaaatgctggttatatcttaccaattaatttcatgacccatcaatgagatgtgacttcagtttgaaaaaagtatccaagatgatctctgcataaatttctggttcccaaattccatatatgtaaagatctgatgctatttcatgccatagtgtttttccttctttgttttctttaatcgggaggagttcggggcagtaacgcattttgtaaatttaggagtgttaaggaatgacaacttccataatgaagccattgcctcacatgccactcacccaagaattctcatct

SEQ ID NO: 170664 - DNA, 144 bp, Homo sapiens
aggtagcttcctagaggaataatgtattcaatggataagctgttaccttacccttaaaatcgttttctaaattcttttttgactcttagatttgtaatataactcatctccccttttgtctcactttgcctttctctttaaccg

SEQ ID NO: 170665 - DNA, 1245 bp, Homo sapiens
ggtgagacaatgtggctatcaccatcaaagacactgggacaaacacagttgtgtgatacccagaggctcttcagaacaaaggcttaattttatcattcatttatatcactcaaattattttctcataactttatttttggcctgcaacaaaaatctctcaattcctcttcagatctttccttaaagtggaactaagtagaacacatgtgactcagattttaattattgcttatcttatttggatatgttttatcctcattaaaatgtaattattatagaaatgacagccccattgccaggaaaattgggagtgttatatgctctgttcagcttttggtaaaattttaattctatcaggtcaaattattattgtgttatttgtctacttttgttgcaacaggaatggaaggcattccacagattggtcaatttgtttgccttttgttgtgtgtctctccataaatctcaatgacaaatgtctttttaatttatctatttatctgtgttattttttgtctattaaccaaacttgatgtatttttcttctaaaggggttcagaacacgtcacccccaaatttattgttttgcatattgattattttgagctggagacacttgagaatcagcagatacagaaaatacgctttgaacaccttttatctaaaagcaggccataaaatttcccgtgaaaaagatgcccttcttgtaccaggaagagaagaccatctttatcactggagacttggagttgacaccaaaatcaatcgtacaaacaaatctattataatagtccttatcttccactagtctctcccatatatttcctagtcactgtcccacatttactgcctttggcccaagcctctttgttgtcacatcctcacaatttattgttgtttgtttaaaaagatatataactattgaggcctaataacttcttcaggtcttaattttccttatgaagactcccgtgtacatatgaaaaaaattaaacttgtatgtttttctcttacaaaaaaaaaactaaccagcacacacaacaaaatttttggcgcgccttcgccctcggaaaaagtttctcaaaaccaatccgttgggccggggccccatggttagtgacatggcactaaggtggcccaagagaacccgggcgtaccacggttgggttcccccataaaaacccgggcaccgcgtttgacacccacgtggcttcgggctccggtctagccacggcccggccttaa

SEQ ID NO: 170666 - DNA, 381 bp, Homo sapiens
gagaattaccgaaacataacacagaaacatgaagtgagcatatgctcttggaaaaatggatccaatagacttgctcatcacagagttgccacaatacttaattcattaaaaaaaagtgctaggtgtggtggctcacaactgtaatcccagtaccttgggaggctgaggcagaaggatcgcttgagctctggagtttgagaccagcccgggtaacataggttctgtttgtacaagaaaacaaaatagccaggtgtggtggtgtgcacctgtggtctcgagaggctgaagcaggagaattgcttgagcctgggaaattgaggctgcagtggaccatgactgcactgctgcacaccagactctgtgacagaacaataccttgcc

SEQ ID NO: 170667 - DNA, 252 bp, Homo sapiens
aactgggtaatttattcatctattcattagcaaatctctcctgtgtttagcactaagaacacaaagatagattttgcagtatggtttctgcccccaaggaaatcaaaggggtagataatatgtaagctaatacaaggtcagaaatgtaatgtgaggcatctataagtactatggttgtgaaggaaggagtaatgaatgtgttcagtcaaggaaaacattagtaaagaagctatatatatataacaaaaacaa

SEQ ID NO: 170668 - DNA, 396 bp, Homo sapiens
cattgttcaccatggtcctagcttgattttcttggggtgtgattattctttcttttctctctttctctctctctctttctttctttttctttctttcgagatggagtcttgctctgtcacctaggctggagtgcagtggcacaatctcggctcactgcatcctttgcctcttgggttcaagcgattctcctgcctcagcctcccgagtagctgggattacagatgccagccatcatgcccagctaattttgtatttttgtagaaatggggtttcaccgtgttggccaggctggtcttgaactcccaacctcaggtgatctgcctgccttggcctcccaaagtgctgggattacaggtgtgaaacaccacacccgccccccgccatgcctttttctt

SEQ ID NO: 170669 - DNA, 892 bp, Homo sapiens
gccgcccaggtccccccgggcgtcgatgaatgtggggtaccattccttgatgatgtggtcatgtttgtagtcggccttattgtcctttagatgttccacggtgttccgctcgctcttctcataggcctcccggggcttccggacagacaccttgcattctcggaccttgttgacgatgaattcttggatgagaaacctgatatcttccatgaggcagtcatcataaagaagtctgaatatcttggttgagagctagacttggaaacagagagaccctgtataataacagactaagaagtaaggaagacaagcccagccagtcccacaactatttcattaataccaggtaaagcaacagacctgccagtgaagcatcttggatcctttagctttagtaatgttcttgtagtaatttcggaagtcaatactttccttaagaatactaaagttttcttttgggaaaagagaaaaactgaggagaggaaacaaactgtcttataccttcttccatggtctttggatgaaggttaagttatgggccccaaaagtgggctagcctcatttggactaatactccatcctaagcagtatggtttcgaactaagttgcctgagactttctgtgcctccatttgtcacatggtataataatacctagttcattggaattgtcgtgagaatgacataagtgaaagtatgtatatttccatgttctataataaacctggttttctaacaaatttaccaagcaaccaataaaccaagttacttggcacatcgaagttactttattccaagttaataattatccgggaatttacccaaatccacaatttgccacactccttagtacattaaacgaaaacatcttattttaccggatcaccactctc

SEQ ID NO: 170670 - DNA, 687 bp, Homo sapiens
gccgcccaggtccccccgggcgtcgatgaatgtggggtaccattccttgatgatgtggtcatgtttgtagtcggccttattgtcctttagatgttccacggtgttccgctcgctcttctcataggcctcccggggcttccggacagacaccttgcattctcggaccttgttgacgatgaattcttggatgagaaacctgatatcttccatgaggcagtcatcataaagaagtctgaatatcttggttgagagctagacttggaaacagagagaccctgtataataacagactaagaagtaaggaagacaagcccagccagtcccacaactatttcattaataccaggtaaagcaacagacctgccagtgaagcatcttggatcctttagctttaggaaatctactccagtcctgtcctgtggaaactaatgggagtgccaggaggcctaaccatctgaggtgaattgaaaagaaaaagcagcgtgctgattgcagtgactggtgcatggatctcgatggctactctgtactgtaggcagtgatgacaccctgttgaggagattggtaggagccatagcaacacaggaggcacaattttagggatggtttacattcctagctggagtttccacaaagcccaggtgcttgcatagagccttacccttgcctataaacaactacatggtt

SEQ ID NO: 170671 - DNA, 487 bp, Homo sapiens
taaaattaagtctgttccacagccagagatcactcccatatcccatataactactccacaacttgagcctttactaacaaagaaatccaaagaacaaggtaaatgcttcagtggaaattatcagcacagaaaaatcctaagccacatattcagttattgctcaaacaacctcctacaaaataaggaggggagtcaggctaaacaacaacaggctaaagaaattttaattgaaatgtcactttcactattaaacaaaaaagccatcactgtgattgtgataaaagttgatggtgtcctgtttctttgtgtgaaattgcttttctctcatcactgacttaatttgattgcaccagtttgtcagctgtcacatttggcttccctcagttgcaaaatatagataatgacagtctaagcaatttaacagttatgtgtcaacattttacttcttctaatcaagataaactaagaattatcccccccaccccat

SEQ ID NO: 170672 - DNA, 553 bp, Homo sapiens
agtcctatctgcagcacctcagaatgtgaccttatctggaaatagggtctttgcagctataattagttacattaagatgggctcataccaaagtagtgtgggtccttaatccattatgactgatgtccttacaagaagagggtaagaccaggcgtggtggctcatgcttgtaattccagtactttgggaggccagggcaggtggatcacctgaggtgaggagttcaagaccagcctgaccaacatggcaaaagcctgtctctactaaaaatacaaaaaattatccaggcatggtggcatgcacctgtagtgccagcttcttgggaggcagaggttgcattgagccaagatcatgccactgcactccagcctgggcaccagaggaagactctgtctcaaataactaaataggagaagagacagagacaccgagggaagaggccagtgatgacagatgcaaaggttgcagtgacgcatctacgagcaaaggaactccaggactgctggcagccaccaagagccaggaaaaagcaaagcacgatgctctcctaagt

SEQ ID NO: 170673 - DNA, 2082 bp, Homo sapiens
agcagctctgtaatgcgcttgtggtttcagatgtgggcggcctgtgtgaacctgtcgtgcaaagctcacgtcaccaactgctgcagttatctcctgaatcaggctgagggtctttgctgtgcacccagagatagttgggtgacaaatcacctccaggttggggatgcctcagacttgtgatgggactgggcagatgcatctgggaaggctggaccttggagagtgaggccctgaggcgagacatgggcacctggctcctggcctgcatctgcatctgcacctgtgtctgcttgggagtctctgtcacaggggaaggacaagggccaaggtctagaaccttcacctgcctcaccaacaacattctcaggatcgattgccactggtctgccccagagctgggacagggctccagcccctggctcctcttcaccagcaaccaggctcctggcggcacacataagtgcatcttgcggggcagtgagtgcaccgtcgtgctgccacctgaggcagtgctcgtgccatctgacaatttcaccatcactttccaccactgcatgtctgggagggagcaggtcagcctggtggacccggagtacctgccccggagacacgttaagctggacccgccctctgacttgcagagcaacatcagttctggccactgcatcctgacctggagcatcagtcctgccttggagccaatgaccacacttctcagctatgagctggccttcaagaagcaggaagaggcctgggagcaggcccagcacagggatcacattgtcggggtgacctggcttatacttgaagcctttgagctggaccctggctttatccatgaggccaggctgcgtgtccagatggccacactggaggatgatgtggtagaggaggagcgttatacaggccagtggagtgagtggagccagcctgtgtgcttccaggctccccagagacaaggccctctgatcccaccctgggggtggccaggcaacacccttgttgctgtgtccatctttctcctgctgactggcccgacctacctcctgttcaagctgtcgcccagggtgaagagaatcttctaccagaacgtgccctctccagcgatgttcttccagcccctctacagtgtacacaatgggaacttccagacttggatgggggcccacagggccggtgtgctgttgagccaggactgtgctggcaccccacagggagccttggagccctgcgtccaggaggccactgcactgctcacttgtggcccagcgcgtccttggaaatctgtggccctggaggaggaacaggagggccctgggaccaggctcccggggaacctgagctcagaggatgtgctgccagcagggtgtacggagtggagggtacagacgcttgcctatctgccacaggaggactgggcccccacgtccctgactaggccggctcccccagactcagagggcagcaggagcagcagcagcagcagcagcagcagcaacaacaacaactactgtgccttgggctgctatgggggatggcacctctcagccctcccaggaaacacacagagctctgggcccatcccagccctggcctgtggcctttcttgtgaccatcagggcctggagacccagcaaggagttgcctgggtgctggctggtcactgccagaggcctgggctgcatgaggacctccagggcatgttgctcccttctgtcctcagcaaggctcggtcctggacattctaggtccctgactcgccagatgcatcatgtccattttgggaaaatggactgaagtttctggagcccttgtctgagactgaacctcctgagaaggggcccctagcagcggtcagaggtcctgtctggatggaggctggaggctcccccctcaacccctctgctcagtgcctgtggggagcagcctctaccctcagcatcctggccacaagttcttccttccattgtcccttttctttatccctgacctctctgagaagtggggtgtggtctctcagctgttctgccctcatacccttaaagggccagcctgggcccagtggacacaggtaaggcacca

SEQ ID NO: 170674 - DNA, 2178 bp, Homo sapiens
agcagctctgtaatgcgcttgtggtttcagatgtgggcggcctgtgtgaacctgtcgtgcaaagctcacgtcaccaactgctgcagttatctcctgaatcaggctgagggtctttgctgtgcacccagagatagttgggtgacaaatcacctccaggttggggatgcctcagacttgtgatgggactgggcagatgcatctgggaagtaactgctgcaagaacggacagacactgctgcagagaacttgccacggtgtttcatgctgtggctggtggttccaggctgcacgctccattctaggaaaggggccctcagcccagtcccttgcaggctggaccttggagagtgaggccctgaggcgagacatgggcacctggctcctggcctgcatctgcatctgcacctgtgtctgcttgggagtctctgtcacaggggaaggacaagggccaaggtctagaaccttcacctgcctcaccaacaacattctcaggatcgattgccactggtctgccccagagctgggacagggctccagcccctggctcctcttcaccagcaaccaggctcctggcggcacacataagtgcatcttgcggggcagtgagtgcaccgtcgtgctgccacctgaggcagtgctcgtgccatctgacaatttcaccatcactttccaccactgcatgtctgggagggagcaggtcagcctggtggacccggagtacctgccccggagacacgagcaacatcagttctggccactgcatcctgacctggagcatcagtcctgccttggagccaatgaccacacttctcagctatgagctggccttcaagaagcaggaagaggcctgggagcaggcccagcacagggatcacattgtcggggtgacctggcttatacttgaagcctttgagctggaccctggctttatccatgaggccaggctgcgtgtccagatggccacactggaggatgatgtggtagaggaggagcgttatacaggccagtggagtgagtggagccagcctgtgtgcttccaggctccccagagacaaggccctctgatcccaccctgggggtggccaggcaacacccttgttgctgtgtccatctttctcctgctgactggcccgacctacctcctgttcaagctgtcgcccagggtgaagagaatcttctaccagaacgtgccctctccagcgatgttcttccagcccctctacagtgtacacaatgggaacttccagacttggatgggggcccacagggccggtgtgctgttgagccaggactgtgctggcaccccacagggagccttggagccctgcgtccaggaggccactgcactgctcacttgtggcccagcgcgtccttggaaatctgtggccctggaggaggaacaggagggccctgggaccaggctcccggggaacctgagctcagaggatgtgctgccagcagggtgtacggagtggagggtacagacgcttgcctatctgccacaggaggactgggcccccacgtccctgactaggccggctcccccagactcagagggcagcaggagcagcagcagcagcagcagcagcagcaacaacaacaactactgtgccttgggctgctatgggggatggcacctctcagccctcccaggaaacacacagagctctgggcccatcccagccctggcctgtggcctttcttgtgaccatcagggcctggagacccagcaaggagttgcctgggtgctggctggtcactgccagaggcctgggctgcatgaggacctccagggcatgttgctcccttctgtcctcagcaaggctcggtcctggacattctaggtccctgactcgccagatgcatcatgtccattttgggaaaatggactgaagtttctggagcccttgtctgagactgaacctcctgagaaggggcccctagcagcggtcagaggtcctgtctggatggaggctggaggctcccccctcaacccctctgctcagtgcctgtggggagcagcctctaccctcagcatcctggccacaagttcttccttccattgtcccttttctttatccctgacctctctgagaagtggggtgtggtctctcagctgttctgccctcatacccttaaagggccagcctgggcccagtggacacaggtaaggcacca

SEQ ID NO: 170675 - DNA, 2261 bp, Homo sapiens
agcagctctgtaatgcgcttgtggtttcagatgtgggcggcctgtgtgaacctgtcgtgcaaagctcacgtcaccaactgctgcagttatctcctgaatcaggctgagggtctttgctgtgcacccagagatagttgggtgacaaatcacctccaggttggggatgcctcagacttgtgatgggactgggcagatgcatctgggaaggtcctggtggtgactccaaccctgccctcacatatcccaagagcaggctgactgccttccccattcccacctttccagtaactgctgcaagaacggacagacactgctgcagagaacttgccacggtgtttcatgctgtggctggtggttccaggctgcacgctccattctaggaaagggctggaccttggagagtgaggccctgaggcgagacatgggcacctggctcctggcctgcatctgcatctgcacctgtgtctgcttgggagtctctgtcacaggggaaggacaagggccaaggtctagaaccttcacctgcctcaccaacaacattctcaggatcgattgccactggtctgccccagagctgggacagggctccagcccctggctcctcttcaccagcaaccaggctcctggcggcacacataagtgcatcttgcggggcagtgagtgcaccgtcgtgctgccacctgaggcagtgctcgtgccatctgacaatttcaccatcactttccaccactgcatgtctgggagggagcaggtcagcctggtggacccggagtacctgccccggagacacgttaagctggacccgccctctgacttgcagagcaacatcagttctggccactgcatcctgacctggagcatcagtcctgccttggagccaatgaccacacttctcagctatgagctggccttcaagaagcaggaagaggcctgggagcaggcccagcacagggatcacattgtcggggtgacctggcttatacttgaagcctttgagctggaccctggctttatccatgaggccaggctgcgtgtccagatggccacactggaggatgatgtggtagaggaggagcgttatacaggccagtggagtgagtggagccagcctgtgtgcttccaggctccccagagacaaggccctctgatcccaccctgggggtggccaggcaacacccttgttgctgtgtccatctttctcctgctgactggcccgacctacctcctgttcaagctgtcgcccagggtgaagagaatcttctaccagaacgtgccctctccagcgatgttcttccagcccctctacagtgtacacaatgggaacttccagacttggatgggggcccacagggccggtgtgctgttgagccaggactgtgctggcaccccacagggagccttggagccctgcgtccaggaggccactgcactgctcacttgtggcccagcgcgtccttggaaatctgtggccctggaggaggaacaggagggccctgggaccaggctcccggggaacctgagctcagaggatgtgctgccagcagggtgtacggagtggagggtacagacgcttgcctatctgccacaggaggactgggcccccacgtccctgactaggccggctcccccagactcagagggcagcaggagcagcagcagcagcagcagcagcagcaacaacaacaactactgtgccttgggctgctatgggggatggcacctctcagccctcccaggaaacacacagagctctgggcccatcccagccctggcctgtggcctttcttgtgaccatcagggcctggagacccagcaaggagttgcctgggtgctggctggtcactgccagaggcctgggctgcatgaggacctccagggcatgttgctcccttctgtcctcagcaaggctcggtcctggacattctaggtccctgactcgccagatgcatcatgtccattttgggaaaatggactgaagtttctggagcccttgtctgagactgaacctcctgagaaggggcccctagcagcggtcagaggtcctgtctggatggaggctggaggctcccccctcaacccctctgctcagtgcctgtggggagcagcctctaccctcagcatcctggccacaagttcttccttccattgtcccttttctttatccctgacctctctgagaagtggggtgtggtctctcagctgttctgccctcatacccttaaagggccagcctgggcccagtggacacaggtaaggcacca

SEQ ID NO: 170676 - DNA, 321 bp, Homo sapiens
agatgggcaatggggatcaagtgaggtaagaggcacctggcaccctacaacgtgcagtatggccaccttctgttgtttgtgtaggtctcctgttgacccacaccttgggttccaaacccccatcggggaaacattcatgggatccttcgagagtcattgctagctctgtgtcaggtactgtgtgccattggtgctgggatggctgctgcagatcgatttcgttcacgatgtggaatcgtttgttagccccacagcctttactgtcagcattctctttctgagctgcttttttttttttttatgattttaataattttttca

SEQ ID NO: 170677 - DNA, 492 bp, Homo sapiens
gatctcggctcactgcaacctccacctcctgggttcaagtgattcttctgcctcagcctcccgagtagctgggactacaggcgcgtgccaccacgcctggctaattttttgtatttttagtagagacagggtttcaccatgttggccaggatggtctcgatgtcctgaccttgtaatctgcctgcctcggcctcccaaagtgttgggattacaggcatgagccactgcacccagccagatcattgtatttttaaaggtggatggtagatacttcagtgttcgttatattattatttaatgtgttcttgatacctaaaatattacataataaaagagacagagtgaatgagagtttttgaaaggtttaatgtaacaaatttttatacttcttttttaccagtttttaaaaaattttatttttaatttttgtgggtatataggtgtacattttatggggtatgtgagatactttgatgcaggcatacaatacat

SEQ ID NO: 170678 - DNA, 490 bp, Homo sapiens
ctgtcacccaagctggagtacagtggcaggatctctgctcactgcaacctccgcctcctgggttcaagcaattctcctgcctcagcctcccaagtagctgggattacaggtgtctgccaccacgcctggctaatttttgtatttttagtagagacggggtttcaccatgttggccaggctggtcttgaactcctgacttcaaatgatccacctgcctcggccttgcacatactgcttgcacatactgttccctctgcctagaacactcttctctccctttttctagcttattctctcttcatctttggctcaagtatctcatcctcagggatgtctccctctcctgctcccccagactgagctggtctcccttcaccttcccagaatcctggcttcgtccccagggccccaggcacttagacatcgggtgtggagggggttcaatggtggccccaaagagatgtgtccatgttctaatccctgaacctgt

SEQ ID NO: 170679 - DNA, 330 bp, Homo sapiens
tttgacccaatccccacccacattggccccagctctgtttcctgtctctgtgcacctgggcaccttgccccatttttctagctaaaactaacttgaaaccctcaccaggattggcaggtgcccctagggcaaacacgcagcatgaagagggaggggtctctggcctgtttgaaatttgtttcctttttgattttggcctctggagaatttccctttcttgttttccgtaagtgtatgcctttgaaaataatactgtaatactttattttgcatttaggaaaaattggaggagccctccaatcatttagtccattggagacaataagctct

SEQ ID NO: 170680 - DNA, 1352 bp, Homo sapiens
  misc_feature (1039)..(1039): n is a, c, g, or t
cactgggagctgcaagatcctcgtccgagaaacggggatgcaggccccgggccgtgcagacagggccgtcagaggtgatggtgtgcatctttagcaggtggcacaactggcgctgggaactgggggtcccttccctcaggagtccttatggaggcagaccctcacccagtgagggcacggagcccccgggggccctggagggaggagcgaccgcaggctctctgggccccgtgactgctgtgactcaggttcctttgcaggtgtgcacagcagggacgccctgactctcgccctctccctggcaggaggtggtccaggccacgctggtggtcctggccttggccatggtgcccatcctgctgcttggcacacccctgcacctgctgcaccgccaccgccgccgcctgcggaggaggcccgctgaccgacaggaggaaaacaaggccgggttgctggacctgcctgacgcatctgtgaatggctggagctccgatgaggaaaaggcagggggcctggatgatgaagaggaggccgagctcgtcccctccgaggtgctcatgcaccaggccatccacaccatcgagttctgcctgggctgcgtctccaacaccgcctcctacctgcgcctgtgggccctgagcctggcccacgcccagctgtccgaggttctgtgggccatggtgatgcgcataggcctgggcctgggccgggaggtgggcgtggcggctgtggtgctggtccccatctttgccgcctttgccgtgatgaccgtggctatcctgctggtgatggagggactctcagccttcctgcacgccctgcggctgcactgggtggaattccagaacaagttctactcaggcacgggctacaagctgagtcccttcaccttcgctgccacagatgactagggcccactgcaggtcctgccagacctccttcctgacctctgaggcaggagaggaataaagacggtccgccctggcaaaaaaaaaaaaaaaaaaaaaaaaaaaaaaaaaaaaaaaaaaaaaaaaaaaanaaaaaaaaaaaaaaaaaaataaaggcggcctaatttctagcttcctgggccaatccgccctatagggagtggactttacaattagacgggcggttgtaaaacaacggggggattggaaaaacctgtcgggaacccaaataaattggctggcgttcctctttgggcggcgggtttactatgggaggggtcccgaatcggccggccctttccaacaaggtgcccccccttgaatggcggaatcgcaaatggcaagcgctaaatgtgtttgtcaacaacttccgcgttaattgtttggttcgcggtttttttcttt

SEQ ID NO: 170681 - DNA, 297 bp, Homo sapiens
cccgatagcccgacagccccgactagcccgacaggaggaaaacaaggccgggttgctggacctgcctgacgcatctgtgaatggctggagctccgatgaggaaaaggcagggggcctggatgatgaagaggaggccgagctcgtcccctccgaggtgctcatgcaccaggccatccacaccatcgagttctgcctgggctgcgtctccaacaccgcctcctacctgcgcctgtgggccctgagcctggcccacgcccagctgtcgggctagtcggggagctgtcgggctagtcgggg

SEQ ID NO: 170682 - DNA, 478 bp, Homo sapiens
tcagtttcccctctgtaaagtgggactgtccaaggaggtccctcgctggccccccgtgcagggagggcttcaggctgcggcaggtaggtagggggctggcaggcacccacttgccgttggcccccactgtctcctttgcttgcagagctgtccgaggttctgtgggccatggtgatgcgcataggcctgggcctgggccgggaggtgggcgtggcggctgtggtgctggtccccatctttgccgcctttgccgtgatgaccgtggctatcctgctggtgatggagggactctcagccttcctgcacgccctgcggctgcactgggtggaattccagaacaagttctactcaggcacgggctacaagctgagtcccttcaccttcgctgccacagatgactagggcccactgcaggtcctgccagacctccttcctgacctctgaggcaggagaggaataaagacggtccgccctggca

SEQ ID NO: 170683 - DNA, 386 bp, Homo sapiens
ttgttgtctcagaccccttctttccttcaaagcacttatcacaatttgtaactgctttatttctttgttttcttcttagctgtctccccaattctctttgtataatttctatgaagagataagctggaaacatctctccttggcccttttcttttgcaggtcctgccagacctccttcctgacctctgaggcaggagaggaataaagacggtccgccctggcagtgatgtctcgtctctcttccctcctttttagctgaggcaggtggcagggtagaaggcatggtgtaggatctgggacctcaaaagtcaaggcctggacctgagcagatctgcaataatgtcagactcttggggtgaaaagggggatccagcattctggaggtc

SEQ ID NO: 170684 - DNA, 3036 bp, Homo sapiens
gcctgcccggaaaggagtgagcggcgcctagtcccgggctggcgggagtgcagttctgagtcccgcccggcgtgcgcggagcggggcagccagcagcggaggcgcggcgcgcagcacacccggggaccatgggctccatgttccggagcgaggaggtggccctggtccagctctttctgcccacagcggctgcctacacctgcgtgagtcggctgggcgagctgggcctcgtggagttcagagacctcaacgcctcggtgagcgccttccagagacgctttgtggttgatgttcggcgctgtgaggagctggagaagaccttcaccttcctgcaggaggaggtgcggcgggctgggctggtcctgcccccgccaaaggggaggctgccggcacccccaccccgggacctgctgcgcatccaggaggagacggagcgcctggcccaggagctgcgggatgtgcggggcaaccagcaggccctgcgggcccagctgcaccagctgcagctccacgccgccgtgctacgccagggccatgaacctcagctggcagccgcccacacagatggggcctcagagaggacgcccctgctccaggcccccggggggccgcaccaggacctgagggtcaagtgagtgagggatgacctcatgccctttctggccagcccagaacccctggccagtcgctgggctgggccaggctgagctccgactccttgtccagtgctctccccaggctggccccgcctcctccttcaggcccggaacttcccacagtcccaagccctagccctagggggttctcctcttctggtcctgcccgggaggcctcctgccttcccctgtgggcagggccagtgtgcccaattgcccgattgcccgtgctgggcagggtcctgcccggggggcctggtgggggaggcagggcaggaggttggagcagccctgcccagccccgtggccgccagctttgtggcaggtgccgtggagccccacaaggcccctgccctagagcgcctgctctggagggcctgccgcggcttcctcattgccagcttcagggagctggagcagccgctggagcaccccgtgacgggcgagccagccacgtggatgaccttcctcatctcctactggggtgagcagatcggacagaagatccgcaagatcacggactgcttccactgccacgtcttcccgtttctgcagcaggaggaggcccgcctcggggccctgcagcagctgcaacagcagagccaggagctgcaggaggtcctcggggagacagagcggttcctgagccaggtgctaggccgggtgctgcagctgctgccgccagggcaggtgcaggtccacaagatgaaggccgtgtacctggccctgaaccagtgcagcgtgagcaccacgcacaagtgcctcattgccgaggcctggtgctctgtgcgagacctgcccgccctgcaggaggccctgcgggacagctcgatggaggagggagtgagtgccgtggctcaccgcatcccctgccgggacatgccccccacactcatccgcaccaaccgcttcacggccagcttccagggcatcgtggatgcctacggcgtgggccgctaccaggaggtcaaccccgctccctacaccatcatcaccttccccttcctgtttgctgtgatgttcggggatgtgggccacgggctgctcatgttcctcttcgccctggccatggtccttgcggagaaccgaccggctgtgaaggccgcgcagaacgagatctggcagactttcttcaggggccgctacctgctcctgcttatgggcctgttctccatctacaccggcttcatctacaacgagtgcttcagtcgcgccaccagcatcttcccctcgggctggagtgtggccgccatggccaaccagtctggctggagtgatgcattcctggcccagcacacgatgcttaccctggatcccaacgtcaccggtgtcttcctgggaccctacccctttggcatcgatcctatttggagcctggctgccaaccacttgagcttcctcaactccttcaagatgaagatgtccgtcatcctgggcgtcgtgcacatggcctttggggtggtcctcggagtcttcaaccacgtgcactttggccagaggcaccggctgctgctggagacgctgccggagctcaccttcctgctgggactcttcggttacctcgtgttcctagtcatctacaagtggctgtgtgtctgggctgccagggccgcctcggcccccagcatcctcatccacttcatcaacatgttcctcttctcccacagccccagcaacaggctgctctacccccggcaggaggtggtccaggccacgctggtggtcctggccttggccatggtgcccatcctgctgcttggcacacccctgcacctgctgcaccgccaccgccgccgcctgcggaggaggcccgctgaccgacaggaggaaaacaaggccgggttgctggacctgcctgacgcatctgtgaatggctggagctccgatgaggaaaaggcagggggcctggatgatgaagaggaggccgagctcgtcccctccgaggtgctcatgcaccaggccatccacaccatcgagttctgcctgggctgcgtctccaacaccgcctcctacctgcgcctgtgggccctgagcctggcccacgcccagctgtccgaggttctgtgggccatggtgatgcgcataggcctgggcctgggccgggaggtgggcgtggcggctgtggtgctggtccccatctttgccgcctttgccgtgatgaccgtggctatcctgctggtgatggagggactctcagccttcctgcacgccctgcggctgcactgggtggaattccagaacaagttctactcaggcacgggctacaagctgagtcccttcaccttcgctgccacagatgactagggcccactgcaggtcctgccagacctccttcctgacctctgaggcaggagaggaataaagacggtccgccctggca

SEQ ID NO: 170685 - DNA, 3401 bp, Homo sapiens
  misc_feature (3088)..(3088): n is a, c, g, or t
gcctgcccggaaaggagtgagcggcgcctagtcccgggctggcgggagtgcagttctgagtcccgcccggcgtgcgcggagcggggcagccagcagcggaggcgcggcgcgcagcacacccggggaccatgggctccatgttccggagcgaggaggtggccctggtccagctctttctgcccacagcggctgcctacacctgcgtgagtcggctgggcgagctgggcctcgtggagttcagagacctcaacgcctcggtgagcgccttccagagacgctttgtggttgatgttcggcgctgtgaggagctggagaagaccttcaccttcctgcaggaggaggtgcggcgggctgggctggtcctgcccccgccaaaggggaggctgccggcacccccaccccgggacctgctgcgcatccaggaggagacggagcgcctggcccaggagctgcgggatgtgcggggcaaccagcaggccctgcgggcccagctgcaccagctgcagctccacgccgccgtgctacgccagggccatgaacctcagctggcagccgcccacacagatggggcctcagagaggacgcccctgctccaggcccccggggggccgcaccaggacctgagggtcaagtgagtgagggatgacctcatgccctttctggccagcccagaacccctggccagtcgctgggctgggccaggctgagctccgactccttgtccagtgctctccccaggctggccccgcctcctccttcaggcccggaacttcccacagtcccaagccctagccctagggggttctcctcttctggtcctgcccgggaggcctcctgccttcccctgtgggcagggccagtgtgcccaattgcccgattgcccgtgctgggcagggtcctgcccggggggcctggtgggggaggcagggcaggaggttggagcagccctgcccagccccgtggccgccagctttgtggcaggtgccgtggagccccacaaggcccctgccctagagcgcctgctctggagggcctgccgcggcttcctcattgccagcttcagggagctggagcagccgctggagcaccccgtgacgggcgagccagccacgtggatgaccttcctcatctcctactggggtgagcagatcggacagaagatccgcaagatcacggactgcttccactgccacgtcttcccgtttctgcagcaggaggaggcccgcctcggggccctgcagcagctgcaacagcagagccaggagctgcaggaggtcctcggggagacagagcggttcctgagccaggtgctaggccgggtgctgcagctgctgccgccagggcaggtgcaggtccacaagatgaaggccgtgtacctggccctgaaccagtgcagcgtgagcaccacgcacaagtgcctcattgccgaggcctggtgctctgtgcgagacctgcccgccctgcaggaggccctgcgggacagctcgatggaggagggagtgagtgccgtggctcaccgcatcccctgccgggacatgccccccacactcatccgcaccaaccgcttcacggccagcttccagggcatcgtggatgcctacggcgtgggccgctaccaggaggtcaaccccgctccctacaccatcatcaccttccccttcctgtttgctgtgatgttcggggatgtgggccacgggctgctcatgttcctcttcgccctggccatggtccttgcggagaaccgaccggctgtgaaggccgcgcagaacgagatctggcagactttcttcaggggccgctacctgctcctgcttatgggcctgttctccatctacaccggcttcatctacaacgagtgcttcagtcgcgccaccagcatcttcccctcgggctggagtgtggccgccatggccaaccagtctggctggagtgatgcattcctggcccagcacacgatgcttaccctggatcccaacgtcaccggtgtcttcctgggaccctacccctttggcatcgatcctatttggagcctggctgccaaccacttgagcttcctcaactccttcaagatgaagatgtccgtcatcctgggcgtcgtgcacatggcctttggggtggtcctcggagtcttcaaccacgtgcactttggccagaggcaccggctgctgctggagacgctgccggagctcaccttcctgctgggactcttcggttacctcgtgttcctagtcatctacaagtggctgtgtgtctgggctgccagggccgcctcggcccccagcatcctcatccacttcatcaacatgttcctcttctcccacagccccagcaacaggctgctctacccccggcaggaggtggtccaggccacgctggtggtcctggccttggccatggtgcccatcctgctgcttggcacacccctgcacctgctgcaccgccaccgccgccgcctgcggaggaggcccgctgaccgacaggaggaaaacaaggccgggttgctggacctgcctgacgcatctgtgaatggctggagctccgatgaggaaaaggcagggggcctggatgatgaagaggaggccgagctcgtcccctccgaggtgctcatgcaccaggccatccacaccatcgagttctgcctgggctgcgtctccaacaccgcctcctacctgcgcctgtgggccctgagcctggcccacgcccagctgtccgaggttctgtgggccatggtgatgcgcataggcctgggcctgggccgggaggtgggcgtggcggctgtggtgctggtccccatctttgccgcctttgccgtgatgaccgtggctatcctgctggtgatggagggactctcagccttcctgcacgccctgcggctgcactgggtggaattccagaacaagttctactcaggcacgggctacaagctgagtcccttcaccttcgctgccacagatgactagggcccactgcaggtcctgccagacctccttcctgacctctgaggcaggagaggaataaagacggtccgccctggcaaaaaaaaaaaaaaaaaaaaaaaaaaaaaaaaaaaaaaaaaaaaaaaaaaaanaaaaaaaaaaaaaaaaaaataaaggcggcctaatttctagcttcctgggccaatccgccctatagggagtggactttacaattagacgggcggttgtaaaacaacggggggattggaaaaacctgtcgggaacccaaataaattggctggcgttcctctttgggcggcgggtttactatgggaggggtcccgaatcggccggccctttccaacaaggtgcccccccttgaatggcggaatcgcaaatggcaagcgctaaatgtgtttgtcaacaacttccgcgttaattgtttggttcgcggtttttttcttt

SEQ ID NO: 170686 - DNA, 3113 bp, Homo sapiens
gcctgcccggaaaggagtgagcggcgcctagtcccgggctggcgggagtgcagttctgagtcccgcccggcgtgcgcggagcggggcagccagcagcggaggcgcggcgcgcagcacacccggggaccatgggctccatgttccggagcgaggaggtggccctggtccagctctttctgcccacagcggctgcctacacctgcgtgagtcggctgggcgagctgggcctcgtggagttcagagacctcaacgcctcggtgagcgccttccagagacgctttgtggttgatgttcggcgctgtgaggagctggagaagaccttcaccttcctgcaggaggaggtgcggcgggctgggctggtcctgcccccgccaaaggggaggctgccggcacccccaccccgggacctgctgcgcatccaggaggagacggagcgcctggcccaggagctgcgggatgtgcggggcaaccagcaggccctgcgggcccagctgcaccagctgcagctccacgccgccgtgctacgccagggccatgaacctcagctggcagccgcccacacagatggggcctcagagaggacgcccctgctccaggcccccggggggccgcaccaggacctgagggtcaagtgagtgagggatgacctcatgccctttctggccagcccagaacccctggccagtcgctgggctgggccaggctgagctccgactccttgtccagtgctctccccaggctggccccgcctcctccttcaggcccggaacttcccacagtcccaagccctagccctagggggttctcctcttctggtcctgcccgggaggcctcctgccttcccctgtgggcagggccagtgtgcccaattgcccgattgcccgtgctgggcagggtcctgcccggggggcctggtgggggaggcagggcaggaggttggagcagccctgcccagccccgtggccgccagctttgtggcaggtgccgtggagccccacaaggcccctgccctagagcgcctgctctggagggcctgccgcggcttcctcattgccagcttcagggagctggagcagccgctggagcaccccgtgacgggcgagccagccacgtggatgaccttcctcatctcctactggggtgagcagatcggacagaagatccgcaagatcacggactgcttccactgccacgtcttcccgtttctgcagcaggaggaggcccgcctcggggccctgcagcagctgcaacagcagagccaggagctgcaggaggtcctcggggagacagagcggttcctgagccaggtgctaggccgggtgctgcagctgctgccgccagggcaggtgcaggtccacaagatgaaggccgtgtacctggccctgaaccagtgcagcgtgagcaccacgcacaagtgcctcattgccgaggcctggtgctctgtgcgagacctgcccgccctgcaggaggccctgcgggacagctcgatggaggagggagtgagtgccgtggctcaccgcatcccctgccgggacatgccccccacactcatccgcaccaaccgcttcacggccagcttccagggcatcgtggatgcctacggcgtgggccgctaccaggaggtcaaccccgctccctacaccatcatcaccttccccttcctgtttgctgtgatgttcggggatgtgggccacgggctgctcatgttcctcttcgccctggccatggtccttgcggagaaccgaccggctgtgaaggccgcgcagaacgagatctggcagactttcttcaggggccgctacctgctcctgcttatgggcctgttctccatctacaccggcttcatctacaacgagtgcttcagtcgcgccaccagcatcttcccctcgggctggagtgtggccgccatggccaaccagtctggctggaggtgaggcccgggccccagcccggctgggggccccgcagcacccgcagccctgaccgccctcccctgcgttgccgcagtgatgcattcctggcccagcacacgatgcttaccctggatcccaacgtcaccggtgtcttcctgggaccctacccctttggcatcgatcctatttggagcctggctgccaaccacttgagcttcctcaactccttcaagatgaagatgtccgtcatcctgggcgtcgtgcacatggcctttggggtggtcctcggagtcttcaaccacgtgcactttggccagaggcaccggctgctgctggagacgctgccggagctcaccttcctgctgggactcttcggttacctcgtgttcctagtcatctacaagtggctgtgtgtctgggctgccagggccgcctcggcccccagcatcctcatccacttcatcaacatgttcctcttctcccacagccccagcaacaggctgctctacccccggcaggaggtggtccaggccacgctggtggtcctggccttggccatggtgcccatcctgctgcttggcacacccctgcacctgctgcaccgccaccgccgccgcctgcggaggaggcccgctgaccgacaggaggaaaacaaggccgggttgctggacctgcctgacgcatctgtgaatggctggagctccgatgaggaaaaggcagggggcctggatgatgaagaggaggccgagctcgtcccctccgaggtgctcatgcaccaggccatccacaccatcgagttctgcctgggctgcgtctccaacaccgcctcctacctgcgcctgtgggccctgagcctggcccacgcccagctgtccgaggttctgtgggccatggtgatgcgcataggcctgggcctgggccgggaggtgggcgtggcggctgtggtgctggtccccatctttgccgcctttgccgtgatgaccgtggctatcctgctggtgatggagggactctcagccttcctgcacgccctgcggctgcactgggtggaattccagaacaagttctactcaggcacgggctacaagctgagtcccttcaccttcgctgccacagatgactagggcccactgcaggtcctgccagacctccttcctgacctctgaggcaggagaggaataaagacggtccgccctggca

SEQ ID NO: 170687 - DNA, 3085 bp, Homo sapiens
gcctgcccggaaaggagtgagcggcgcctagtcccgggctggcgggagtgcagttctgagtcccgcccggcgtgcgcggagcggggcagccagcagcggaggcgcggcgcgcagcacacccggggaccatgggctccatgttccggagcgaggaggtggccctggtccagctctttctgcccacagcggctgcctacacctgcgtgagtcggctgggcgagctgggcctcgtggagttcagagacctcaacgcctcggtgagcgccttccagagacgctttgtggttgatgttcggcgctgtgaggagctggagaagaccttcaccttcctgcaggaggaggtgcggcgggctgggctggtcctgcccccgccaaaggggaggctgccggcacccccaccccgggacctgctgcgcatccaggaggagacggagcgcctggcccaggagctgcgggatgtgcggggcaaccagcaggccctgcgggcccagctgcaccagctgcagctccacgccgccgtgctacgccagggccatgaacctcagctggcagccgcccacacagatggggcctcagagaggacgcccctgctccaggcccccggggggccgcaccaggacctgagggtcaagtgagtgagggatgacctcatgccctttctggccagcccagaacccctggccagtcgctgggctgggccaggctgagctccgactccttgtccagtgctctccccaggctggccccgcctcctccttcaggcccggaacttcccacagtcccaagccctagccctagggggttctcctcttctggtcctgcccgggaggcctcctgccttcccctgtgggcagggccagtgtgcccaattgcccgattgcccgtgctgggcagggtcctgcccggggggcctggtgggggaggcagggcaggaggttggagcagccctgcccagccccgtggccgccagctttgtggcaggtgccgtggagccccacaaggcccctgccctagagcgcctgctctggagggcctgccgcggcttcctcattgccagcttcagggagctggagcagccgctggagcaccccgtgacgggcgagccagccacgtggatgaccttcctcatctcctactggggtgagcagatcggacagaagatccgcaagatcacggactgcttccactgccacgtcttcccgtttctgcagcaggaggaggcccgcctcggggccctgcagcagctgcaacagcagagccaggagctgcaggaggtcctcggggagacagagcggttcctgagccaggtgctaggccgggtgctgcagctgctgccgccagggcaggtgcaggtccacaagatgaaggccgtgtacctggccctgaaccagtgcagcgtgagcaccacgcacaagtgcctcattgccgaggcctggtgctctgtgcgagacctgcccgccctgcaggaggccctgcgggacagctcgatggaggagggagtgagtgccgtggctcaccgcatcccctgccgggacatgccccccacactcatccgcaccaaccgcttcacggccagcttccagggcatcgtggatgcctacggcgtgggccgctaccaggaggtcaaccccgctccctacaccatcatcaccttccccttcctgtttgctgtgatgttcggggatgtgggccacgggctgctcatgttcctcttcgccctggccatggtccttgcggagaaccgaccggctgtgaaggccgcgcagaacgagatctggcagactttcttcaggggccgctacctgctcctgcttatgggcctgttctccatctacaccggcttcatctacaacgagtgcttcagtcgcgccaccagcatcttcccctcgggctggagtgtggccgccatggccaaccagtctggctggagtgatgcattcctggcccagcacacgatgcttaccctggatcccaacgtcaccggtgtcttcctgggaccctacccctttggcatcgatccttgatggcgagggagcccctgagtccagcccacccctgctgccaccctagatttggagcctggctgccaaccacttgagcttcctcaactccttcaagatgaagatgtccgtcatcctgggcgtcgtgcacatggcctttggggtggtcctcggagtcttcaaccacgtgcactttggccagaggcaccggctgctgctggagacgctgccggagctcaccttcctgctgggactcttcggttacctcgtgttcctagtcatctacaagtggctgtgtgtctgggctgccagggccgcctcggcccccagcatcctcatccacttcatcaacatgttcctcttctcccacagccccagcaacaggctgctctacccccggcaggaggtggtccaggccacgctggtggtcctggccttggccatggtgcccatcctgctgcttggcacacccctgcacctgctgcaccgccaccgccgccgcctgcggaggaggcccgctgaccgacaggaggaaaacaaggccgggttgctggacctgcctgacgcatctgtgaatggctggagctccgatgaggaaaaggcagggggcctggatgatgaagaggaggccgagctcgtcccctccgaggtgctcatgcaccaggccatccacaccatcgagttctgcctgggctgcgtctccaacaccgcctcctacctgcgcctgtgggccctgagcctggcccacgcccagctgtccgaggttctgtgggccatggtgatgcgcataggcctgggcctgggccgggaggtgggcgtggcggctgtggtgctggtccccatctttgccgcctttgccgtgatgaccgtggctatcctgctggtgatggagggactctcagccttcctgcacgccctgcggctgcactgggtggaattccagaacaagttctactcaggcacgggctacaagctgagtcccttcaccttcgctgccacagatgactagggcccactgcaggtcctgccagacctccttcctgacctctgaggcaggagaggaataaagacggtccgccctggca

SEQ ID NO: 170688 - DNA, 2570 bp, Homo sapiens
gcctgcccggaaaggagtgagcggcgcctagtcccgggctggcgggagtgcagttctgagtcccgcccggcgtgcgcggagcggggcagccagcagcggaggcgcggcgcgcagcacacccggggaccatgggctccatgttccggagcgaggaggtggccctggtccagctctttctgcccacagcggctgcctacacctgcgtgagtcggctgggcgagctgggcctcgtggagttcagagacctcaacgcctcggtgagcgccttccagagacgctttgtggttgatgttcggcgctgtgaggagctggagaagaccttcaccttcctgcaggaggaggtgcggcgggctgggctggtcctgcccccgccaaaggggaggctgccggcacccccaccccgggacctgctgcgcatccaggaggagacggagcgcctggcccaggagctgcgggatgtgcggggcaaccagcaggccctgcgggcccagctgcaccagctgcagctccacgccgccgtgctacgccagggccatgaacctcagctggcagccgcccacacagatggggcctcagagaggacgcccctgctccaggcccccggggggccgcaccaggacctgagggtcaaggcgagccagccacgtggatgaccttcctcatctcctactggggtgagcagatcggacagaagatccgcaagatcacggactgcttccactgccacgtcttcccgtttctgcagcaggaggaggcccgcctcggggccctgcagcagctgcaacagcagagccaggagctgcaggaggtcctcggggagacagagcggttcctgagccaggtgctaggccgggtgctgcagctgctgccgccagggcaggtgcaggtccacaagatgaaggccgtgtacctggccctgaaccagtgcagcgtgagcaccacgcacaagtgcctcattgccgaggcctggtgctctgtgcgagacctgcccgccctgcaggaggccctgcgggacagctcgatggaggagggagtgagtgccgtggctcaccgcatcccctgccgggacatgccccccacactcatccgcaccaaccgcttcacggccagcttccagggcatcgtggatgcctacggcgtgggccgctaccaggaggtcaaccccgctccctacaccatcatcaccttccccttcctgtttgctgtgatgttcggggatgtgggccacgggctgctcatgttcctcttcgccctggccatggtccttgcggagaaccgaccggctgtgaaggccgcgcagaacgagatctggcagactttcttcaggggccgctacctgctcctgcttatgggcctgttctccatctacaccggcttcatctacaacgagtgcttcagtcgcgccaccagcatcttcccctcgggctggagtgtggccgccatggccaaccagtctggctggagtgatgcattcctggcccagcacacgatgcttaccctggatcccaacgtcaccggtgtcttcctgggaccctacccctttggcatcgatcctatttggagcctggctgccaaccacttgagcttcctcaactccttcaagatgaagatgtccgtcatcctgggcgtcgtgcacatggcctttggggtggtcctcggagtcttcaaccacgtgcactttggccagaggcaccggctgctgctggagacgctgccggagctcaccttcctgctgggactcttcggttacctcgtgttcctagtcatctacaagtggctgtgtgtctgggctgccagggccgcctcggcccccagcatcctcatccacttcatcaacatgttcctcttctcccacagccccagcaacaggctgctctacccccggcaggaggtggtccaggccacgctggtggtcctggccttggccatggtgcccatcctgctgcttggcacacccctgcacctgctgcaccgccaccgccgccgcctgcggaggaggcccgctgaccgacaggaggaaaacaaggccgggttgctggacctgcctgacgcatctgtgaatggctggagctccgatgaggaaaaggcagggggcctggatgatgaagaggaggccgagctcgtcccctccgaggtgctcatgcaccaggccatccacaccatcgagttctgcctgggctgcgtctccaacaccgcctcctacctgcgcctgtgggccctgagcctggcccacgcccagctgtccgaggttctgtgggccatggtgatgcgcataggcctgggcctgggccgggaggtgggcgtggcggctgtggtgctggtccccatctttgccgcctttgccgtgatgaccgtggctatcctgctggtgatggagggactctcagccttcctgcacgccctgcggctgcactgggtggaattccagaacaagttctactcaggcacgggctacaagctgagtcccttcaccttcgctgccacagatgactagggcccactgcaggtcctgccagacctccttcctgacctctgaggcaggagaggaataaagacggtccgccctggca

SEQ ID NO: 170689 - DNA, 2042 bp, Homo sapiens
gcctgcccggaaaggagtgagcggcgcctagtcccgggctggcgggagtgcagttctgagtcccgcccggcgtgcgcggagcggggcagccagcagcggaggcgcggcgcgcagcacacccggggaccatgggctccatgttccggagcgaggaggtggccctggtccagctctttctgcccacagcggctgcctacacctgcgtgagtcggctgggcgagctgggcctcgtggagttcagagacctcaacgcctcggtgagcgccttccagagacgctttgtggttgatgttcggcgctgtgaggagctggagaagaccttcaccttcctgcaggaggaggtgcggcgggctgggctggtcctgcccccgccaaaggggaggctgccggcacccccaccccgggacctgctgcgcatccaggaggagacggagcgcctggcccaggagctgcgggatgtgcggggcaaccagcaggccctgcgggcccagctgcaccagctgcagctccacgccgccgtgctacgccagggccatgaacctcagcccccacactcatccgcaccaaccgcttcacggccagcttccagggcatcgtggatgcctacggcgtgggccgctaccaggaggtcaaccccgctccctacaccatcatcaccttccccttcctgtttgctgtgatgttcggggatgtgggccacgggctgctcatgttcctcttcgccctggccatggtccttgcggagaaccgaccggctgtgaaggccgcgcagaacgagatctggcagactttcttcaggggccgctacctgctcctgcttatgggcctgttctccatctacaccggcttcatctacaacgagtgcttcagtcgcgccaccagcatcttcccctcgggctggagtgtggccgccatggccaaccagtctggctggagtgatgcattcctggcccagcacacgatgcttaccctggatcccaacgtcaccggtgtcttcctgggaccctacccctttggcatcgatcctatttggagcctggctgccaaccacttgagcttcctcaactccttcaagatgaagatgtccgtcatcctgggcgtcgtgcacatggcctttggggtggtcctcggagtcttcaaccacgtgcactttggccagaggcaccggctgctgctggagacgctgccggagctcaccttcctgctgggactcttcggttacctcgtgttcctagtcatctacaagtggctgtgtgtctgggctgccagggccgcctcggcccccagcatcctcatccacttcatcaacatgttcctcttctcccacagccccagcaacaggctgctctacccccggcaggaggtggtccaggccacgctggtggtcctggccttggccatggtgcccatcctgctgcttggcacacccctgcacctgctgcaccgccaccgccgccgcctgcggaggaggcccgctgaccgacaggaggaaaacaaggccgggttgctggacctgcctgacgcatctgtgaatggctggagctccgatgaggaaaaggcagggggcctggatgatgaagaggaggccgagctcgtcccctccgaggtgctcatgcaccaggccatccacaccatcgagttctgcctgggctgcgtctccaacaccgcctcctacctgcgcctgtgggccctgagcctggcccacgcccagctgtccgaggttctgtgggccatggtgatgcgcataggcctgggcctgggccgggaggtgggcgtggcggctgtggtgctggtccccatctttgccgcctttgccgtgatgaccgtggctatcctgctggtgatggagggactctcagccttcctgcacgccctgcggctgcactgggtggaattccagaacaagttctactcaggcacgggctacaagctgagtcccttcaccttcgctgccacagatgactagggcccactgcaggtcctgccagacctccttcctgacctctgaggcaggagaggaataaagacggtccgccctggca

SEQ ID NO: 170690 - DNA, 2743 bp, Homo sapiens
gcctgcccggaaaggagtgagcggcgcctagtcccgggctggcgggagtgcagttctgagtcccgcccggcgtgcgcggagcggggcagccagcagcggaggcgcggcgcgcagcacacccggggaccatgggctccatgttccggagcgaggaggtggccctggtccagctctttctgcccacagcggctgcctacacctgcgtgagtcggctgggcgagctgggcctcgtggagttcagagacctcaacgcctcggtgagcgccttccagagacgctttgtggttgatgttcggcgctgtgaggagctggagaagaccttcaccttcctgcaggaggaggtgcggcgggctgggctggtcctgcccccgccaaaggggaggctgccggcacccccaccccgggacctgctgcgcatccaggaggagacggagcgcctggcccaggagctgcgggatgtgcggggcaaccagcaggccctgcgggcccagctgcaccagctgcagctccacgccgccgtgctacgccagggccatgaacctcagctggcagccgcccacacagatggggcctcagagaggacgcccctgctccaggcccccggggggccgcaccaggacctgagggtcaagtgagtgagggatgacctcatgccctttctggccagcccagaacccctggccagtcgctgggctgggccaggctgagctccgactccttgtccagtgctctccccaggctggccccgcctcctccttcaggcccggaacttcccacagtcccaagccctagccctagggggttctcctcttctggtcctgcccgggaggcctcctgccttcccctgtgggcagggccagtgtgcccaattgcccgattgcccgtgctgggcagggtcctgcccggggggcctggtgggggaggcagggcaggaggttggagcagccctgcccagccccgtggccgccagctttgtggcaggtgccgtggagccccacaaggcccctgccctagagcgcctgctctggagggcctgccgcggcttcctcattgccagcttcagggagctggagcagccgctggagcaccccgtgacgggcgagccagccacgtggatgaccttcctcatctcctactggggtgagcagatcggacagaagatccgcaagatcacggactgcttccactgccacgtcttcccgtttctgcagcaggaggaggcccgcctcggggccctgcagcagctgcaacagcagagccaggagctgcaggaggtcctcggggagacagagcggttcctgagccaggtgctaggccgggtgctgcagctgctgccgccagggcaggtgcaggtccacaagatgaaggccgtgtacctggccctgaaccagtgcagcgtgagcaccacgcacaagtgcctcattgccgaggcctggtgctctgtgcgagacctgcccgccctgcaggaggccctgcgggacagctcgatggaggagggagtgagtgccgtggctcaccgcatcccctgccgggacatgccccccacactcatccgcaccaaccgcttcacggccagcttccagggcatcgtggatgcctacggcgtgggccgctaccaggaggtcaaccccgctccctacaccatcatcaccttccccttcctgtttgctgtgatgttcggggatgtgggccacgggctgctcatgttcctcttcgccctggccatggtccttgcggagaaccgaccggctgtgaaggccgcgcagaacgagatctggcagactttcttcaggggccgctacctgctcctgcttatgggcctgttctccatctacaccggcttcatctacaacgagtgcttcagtcgcgccaccagcatcttcccctcgggctggagtgtggccgccatggccaaccagtctggctggagtgatgcattcctggcccagcacacgatgcttaccctggatcccaacgtcaccggtgtcttcctgggaccctacccctttggcatcgatcctatttggagcctggctgccaaccacttgagcttcctcaactccttcaagatgaagatgtccgtcatcctgggcgtcgtgcacatggcctttggggtggtcctcggagtcttcaaccacgtgcactttggccagaggcaccggctgctgctggagacgctgccggagctcaccttcctgctgggactcttcggttacctcgtgttcctagtcatctacaagtggctgtgtgtctgggctgccagggccgcctcggcccccagcatcctcatccacttcatcaacatgttcctcttctcccacagccccagcaacaggctgctctacccccggcaggaggtggtccaggccacgctggtggtcctggccttggccatggtgcccatcctgctgcttggcacacccctgcacctgctgcaccgccaccgccgccgcctgcggaggaggcccgctgaccgacaggaggaaaacaaggccgggttgctggacctgcctgacgcatctgtgaatggctggagctccgatgaggaaaaggcagggggcctggatgatgaagaggaggccgagctcgtcccctccgaggtgctcatgcaccaggccatccacaccatcgagttctgcctgggctgcgtctccaacaccgcctcctacctgcgcctgtgggccctgagcctggcccacgcccagctgtcgggctagtcggggagctgtcgggctagtcgggg

SEQ ID NO: 170691 - DNA, 2626 bp, Homo sapiens
gcctgcccggaaaggagtgagcggcgcctagtcccgggctggcgggagtgcagttctgagtcccgcccggcgtgcgcggagcggggcagccagcagcggaggcgcggcgcgcagcacacccggggaccatgggctccatgttccggagcgaggaggtggccctggtccagctctttctgcccacagcggctgcctacacctgcgtgagtcggctgggcgagctgggcctcgtggagttcagagacctcaacgcctcggtgagcgccttccagagacgctttgtggttgatgttcggcgctgtgaggagctggagaagaccttcaccttcctgcaggaggaggtgcggcgggctgggctggtcctgcccccgccaaaggggaggctgccggcacccccaccccgggacctgctgcgcatccaggaggagacggagcgcctggcccaggagctgcgggatgtgcggggcaaccagcaggccctgcgggcccagctgcaccagctgcagctccacgccgccgtgctacgccagggccatgaacctcagctggcagccgcccacacagatggggcctcagagaggacgcccctgctccaggcccccggggggccgcaccaggacctgagggtcaagtgagtgagggatgacctcatgccctttctggccagcccagaacccctggccagtcgctgggctgggccaggctgagctccgactccttgtccagtgctctccccaggctggccccgcctcctccttcaggcccggaacttcccacagtcccaagccctagccctagggggttctcctcttctggtcctgcccgggaggcctcctgccttcccctgtgggcagggccagtgtgcccaattgcccgattgcccgtgctgggcagggtcctgcccggggggcctggtgggggaggcagggcaggaggttggagcagccctgcccagccccgtggccgccagctttgtggcaggtgccgtggagccccacaaggcccctgccctagagcgcctgctctggagggcctgccgcggcttcctcattgccagcttcagggagctggagcagccgctggagcaccccgtgacgggcgagccagccacgtggatgaccttcctcatctcctactggggtgagcagatcggacagaagatccgcaagatcacggactgcttccactgccacgtcttcccgtttctgcagcaggaggaggcccgcctcggggccctgcagcagctgcaacagcagagccaggagctgcaggaggtcctcggggagacagagcggttcctgagccaggtgctaggccgggtgctgcagctgctgccgccagggcaggtgcaggtccacaagatgaaggccgtgtacctggccctgaaccagtgcagcgtgagcaccacgcacaagtgcctcattgccgaggcctggtgctctgtgcgagacctgcccgccctgcaggaggccctgcgggacagctcgatggaggagggagtgagtgccgtggctcaccgcatcccctgccgggacatgccccccacactcatccgcaccaaccgcttcacggccagcttccagggcatcgtggatgcctacggcgtgggccgctaccaggaggtcaaccccgctccctacaccatcatcaccttccccttcctgtttgctgtgatgttcggggatgtgggccacgggctgctcatgttcctcttcgccctggccatggtccttgcggagaaccgaccggctgtgaaggccgcgcagaacgagatctggcagactttcttcaggggccgctacctgctcctgcttatgggcctgttctccatctacaccggcttcatctacaacgagtgcttcagtcgcgccaccagcatcttcccctcgggctggagtgtggccgccatggccaaccagtctggctggagtgatgcattcctggcccagcacacgatgcttaccctggatcccaacgtcaccggtgtcttcctgggaccctacccctttggcatcgatcctatttggagcctggctgccaaccacttgagcttcctcaactccttcaagatgaagatgtccgtcatcctgggcgtcgtgcacatggcctttggggtggtcctcggagtcttcaaccacgtgcactttggccagaggcaccggctgctgctggagacgctgccggagctcaccttcctgctgggactcttcggttacctcgtgttcctagtcatctacaagtggctgtgtgtctgggctgccagggccgcctcggcccccagcatcctcatccacttcatcaacatgttcctcttctcccacagcatgcattctgcggggtctctgcatctagtagggccgatctctgcgctcctgacggtgctcgcctttatccatttttccaggtcctccccgtatgccgccccggaatggcgggggggggcaaattcaccagcaggggctaggaatttggaaaatatactgtaattcagacactcagcttctgatctgagtatagggtgaattgatggaggggcatagctagtgagacagagctcgcctcctacaaggaggagaatgttgcaaaccgttttccccttcccaacctgggactatatgatttctta

SEQ ID NO: 170692 - DNA, 2094 bp, Homo sapiens
gcctgcccggaaaggagtgagcggcgcctagtcccgggctggcgggagtgcagttctgagtcccgcccggcgtgcgcggagcggggcagccagcagcggaggcgcggcgcgcagcacacccggggaccatgggctccatgttccggagcgaggaggtggccctggtccagctctttctgcccacagcggctgcctacacctgcgtgagtcggctgggcgagctgggcctcgtggagttcagagacctcaacgcctcggtgagcgccttccagagacgctttgtggttgatgttcggcgctgtgaggagctggagaagaccttcaccttcctgcaggaggaggtgcggcgggctgggctggtcctgcccccgccaaaggggaggctgccggcacccccaccccgggacctgctgcgcatccaggaggagacggagcgcctggcccaggagctgcgggatgtgcggggcaaccagcaggccctgcgggcccagctgcaccagctgcagctccacgccgccgtgctacgccagggccatgaacctcagctggcagccgcccacacagatggggcctcagagaggacgcccctgctccaggcccccggggggccgcaccaggacctgagggtcaagtgagtgagggatgacctcatgccctttctggccagcccagaacccctggccagtcgctgggctgggccaggctgagctccgactccttgtccagtgctctccccaggctggccccgcctcctccttcaggcccggaacttcccacagtcccaagccctagccctagggggttctcctcttctggtcctgcccgggaggcctcctgccttcccctgtgggcagggccagtgtgcccaattgcccgattgcccgtgctgggcagggtcctgcccggggggcctggtgggggaggcagggcaggaggttggagcagccctgcccagccccgtggccgccagctttgtggcaggtgccgtggagccccacaaggcccctgccctagagcgcctgctctggagggcctgccgcggcttcctcattgccagcttcagggagctggagcagccgctggagcaccccgtgacgggcgagccagccacgtggatgaccttcctcatctcctactggggtgagcagatcggacagaagatccgcaagatcacggactgcttccactgccacgtcttcccgtttctgcagcaggaggaggcccgcctcggggccctgcagcagctgcaacagcagagccaggagctgcaggaggtcctcggggagacagagcggttcctgagccaggtgctaggccgggtgctgcagctgctgccgccagggcaggtgcaggtccacaagatgaaggccgtgtacctggccctgaaccagtgcagcgtgagcaccacgcacaagtgcctcattgccgaggcctggtgctctgtgcgagacctgcccgccctgcaggaggccctgcgggacagctcgatggaggagggagtgagtgccgtggctcaccgcatcccctgccgggacatgccccccacactcatccgcaccaaccgcttcacggccagcttccagggcatcgtggatgcctacggcgtgggccgctaccaggaggtcaaccccgctccctacaccatcatcaccttccccttcctgtttgctgtgatgttcggggatgtgggccacgggctgctcatgttcctcttcgccctggccatggtccttgcggagaaccgaccggctgtgaaggccgcgcagaacgagatctggcagactttcttcaggggccgctacctgctcctgcttatgggcctgttctccatctacaccggcttcatctacaacgagtgcttcagtcgcgccaccagcatcttcccctcgggctggagtgtggccgccatggccaaccagtctggctggagtgatgcattcctggcccagcacacgatgcttaccctggatcccaacgtcaccggtgtcttcctgggaccctacccctttggcatcgatcctgtgagtcctgggatggagtgtccgtgggtggtgaaggcagctgggagtgggggctggggctcccctcggttca

SEQ ID NO: 170693 - DNA, 1160 bp, Homo sapiens
cactgggagctgcaagatcctcgtccgagaaacggggatgcaggccccgggccgtgcagacagggccgtcagaggtgatggtgtgcatctttagcaggtggcacaactggcgctgggaactgggggtcccttccctcaggagtccttatggaggcagaccctcacccagtgagggcacggagcccccgggggccctggagggaggagcgaccgcaggctctctgggccccgtgactgctgtgactcaggttcctttgcaggtgtgcacagcagggacgccctgactctcgccctctccctggcaggaggtggtccaggccacgctggtggtcctggccttggccatggtgcccatcctgctgcttggcacacccctgcacctgctgcaccgccaccgccgccgcctgcggaggaggcccgctgaccgacaggtgggaccggggcctaaggtgtggggggctgcttgcggggagaggccactgtccggtgtgtccctgactcctcgcttcctgacagactcctgagtggccaggagcaggcctggcgggtggtgggggacctcctggggctggagtgctgccaacactgcctgctcatgccccaggaggaaaacaaggccgggttgctggacctgcctgacgcatctgtgaatggctggagctccgatgaggaaaaggcagggggcctggatgatgaagaggaggccgagctcgtcccctccgaggtgctcatgcaccaggccatccacaccatcgagttctgcctgggctgcgtctccaacaccgcctcctacctgcgcctgtgggccctgagcctggcccacgcccagctgtccgaggttctgtgggccatggtgatgcgcataggcctgggcctgggccgggaggtgggcgtggcggctgtggtgctggtccccatctttgccgcctttgccgtgatgaccgtggctatcctgctggtgatggagggactctcagccttcctgcacgccctgcggctgcactgggtggaattccagaacaagttctactcaggcacgggctacaagctgagtcccttcaccttcgctgccacagatgactagggcccactgcaggtcctgccagacctccttcctgacctctgaggcaggagaggaataaagacggtccgccctggca

SEQ ID NO: 170694 - DNA, 595 bp, Homo sapiens
actctagagtatccctcccacagtccgacagatatcgatcattcgatcttactagatttcacagagcatgtactttattgttatttactgtcactaccttcccgggtcgtgacgtggcaaacctcttgtggagaggaggccgagctcgtcccctccgaggtgctcatgcaccaggccatccacaccatcgagttctgcctgggctgcgtctccaacaccgcctcctacctgcgcctgtgggccctgagcctggcccacgcccagctgtccgaggttctgtgggccatggtgatgcgcataggcctgggcctgggccgggaggtgggcgtggcggctgtggtgctggtccccatctttgccgcctttgccgtgatgaccgtggctatcctgctggtgatggagggactctcagccttcctgcacgccctgcggctgcactgggtggaattccagaacaagttctactcaggcacgggctacaagctgagtcccttcaccttcgctgccacagatgactagggcccactgcaggtcctgccagacctccttcctgacctctgaggcaggagaggaataaagacggtccgccctggca

SEQ ID NO: 170695 - DNA, 349 bp, Homo sapiens
attccagaacaagttctactcaggcacgggctacaagctgagtcccttcaccttcgctgccacagatgactagggcccactgcaggtcctgccagacctccttcctgacctctgaggcaggagaggaataaagacggtccgccctggcagtgatgtctcgtctctcttccctcctttttagctgaggcaggtggcagggtagaaggcatggtgtaggatctgggacctcaaaagtcaaggcctggacctgagcagatctgcaataatgtcagactcttggggtgaaaaggggcagaaaagggccaaggagagatgtttccagcacattctaacttggagtgagcaaatg

SEQ ID NO: 170696 - DNA, 2697 bp, Homo sapiens
gcctgcccggaaaggagtgagcggcgcctagtcccgggctggcgggagtgcagttctgagtcccgcccggcgtgcgcggagcggggcagccagcagcggaggcgcggcgcgcagcacacccggggaccatgggctccatgttccggagcgaggaggtggccctggtccagctctttctgcccacagcggctgcctacacctgcgtgagtcggctgggcgagctgggcctcgtggagttcagagacctcaacgcctcggtgagcgccttccagagacgctttgtggttgatgttcggcgctgtgaggagctggagaagaccttcaccttcctgcaggaggaggtgcggcgggctgggctggtcctgcccccgccaaaggggaggctgccggcacccccaccccgggacctgctgcgcatccaggaggagacggagcgcctggcccaggagctgcgggatgtgcggggcaaccagcaggccctgcgggcccagctgcaccagctgcagctccacgccgccgtgctacgccagggccatgaacctcagctggcagccgcccacacagatggggcctcagagaggacgcccctgctccaggcccccggggggccgcaccaggacctgagggtcaactttgtggcaggtgccgtggagccccacaaggcccctgccctagagcgcctgctctggagggcctgccgcggcttcctcattgccagcttcagggagctggagcagccgctggagcaccccgtgacgggcgagccagccacgtggatgaccttcctcatctcctactggggtgagcagatcggacagaagatccgcaagatcacggactgcttccactgccacgtcttcccgtttctgcagcaggaggaggcccgcctcggggccctgcagcagctgcaacagcagagccaggagctgcaggaggtcctcggggagacagagcggttcctgagccaggtgctaggccgggtgctgcagctgctgccgccagggcaggtgcaggtccacaagatgaaggccgtgtacctggccctgaaccagtgcagcgtgagcaccacgcacaagtgcctcattgccgaggcctggtgctctgtgcgagacctgcccgccctgcaggaggccctgcgggacagctcgatggaggagggagtgagtgccgtggctcaccgcatcccctgccgggacatgccccccacactcatccgcaccaaccgcttcacggccagcttccagggcatcgtggatgcctacggcgtgggccgctaccaggaggtcaaccccgctccctacaccatcatcaccttccccttcctgtttgctgtgatgttcggggatgtgggccacgggctgctcatgttcctcttcgccctggccatggtccttgcggagaaccgaccggctgtgaaggccgcgcagaacgagatctggcagactttcttcaggggccgctacctgctcctgcttatgggcctgttctccatctacaccggcttcatctacaacgagtgcttcagtcgcgccaccagcatcttcccctcgggctggagtgtggccgccatggccaaccagtctggctggagtgatgcattcctggcccagcacacgatgcttaccctggatcccaacgtcaccggtgtcttcctgggaccctacccctttggcatcgatcctatttggagcctggctgccaaccacttgagcttcctcaactccttcaagatgaagatgtccgtcatcctgggcgtcgtgcacatggcctttggggtggtcctcggagtcttcaaccacgtgcactttggccagaggcaccggctgctgctggagacgctgccggagctcaccttcctgctgggactcttcggttacctcgtgttcctagtcatctacaagtggctgtgtgtctgggctgccagggccgcctcggcccccagcatcctcatccacttcatcaacatgttcctcttctcccacagccccagcaacaggctgctctacccccggcaggaggtggtccaggccacgctggtggtcctggccttggccatggtgcccatcctgctgcttggcacacccctgcacctgctgcaccgccaccgccgccgcctgcggaggaggcccgctgaccgacaggaggaaaacaaggccgggttgctggacctgcctgacgcatctgtgaatggctggagctccgatgaggaaaaggcagggggcctggatgatgaagaggaggccgagctcgtcccctccgaggtgctcatgcaccaggccatccacaccatcgagttctgcctgggctgcgtctccaacaccgcctcctacctgcgcctgtgggccctgagcctggcccacgcccagctgtccgaggttctgtgggccatggtgatgcgcataggcctgggcctgggccgggaggtgggcgtggcggctgtggtgctggtccccatctttgccgcctttgccgtgatgaccgtggctatcctgctggtgatggagggactctcagccttcctgcacgccctgcggctgcactgggtggaattccagaacaagttctactcaggcacgggctacaagctgagtcccttcaccttcgctgccacagatgactagggcccactgcaggtcctgccagacctccttcctgacctctgaggcaggagaggaataaagacggtccgccctggca

SEQ ID NO: 170697 - DNA, 960 bp, Homo sapiens
  misc_feature (647)..(647): n is a, c, g, or t
actctagagtatccctcccacagtccgacagatatcgatcattcgatcttactagatttcacagagcatgtactttattgttatttactgtcactaccttcccgggtcgtgacgtggcaaacctcttgtggagaggaggccgagctcgtcccctccgaggtgctcatgcaccaggccatccacaccatcgagttctgcctgggctgcgtctccaacaccgcctcctacctgcgcctgtgggccctgagcctggcccacgcccagctgtccgaggttctgtgggccatggtgatgcgcataggcctgggcctgggccgggaggtgggcgtggcggctgtggtgctggtccccatctttgccgcctttgccgtgatgaccgtggctatcctgctggtgatggagggactctcagccttcctgcacgccctgcggctgcactgggtggaattccagaacaagttctactcaggcacgggctacaagctgagtcccttcaccttcgctgccacagatgactagggcccactgcaggtcctgccagacctccttcctgacctctgaggcaggagaggaataaagacggtccgccctggcaaaaaaaaaaaaaaaaaaaaaaaaaaaaaaaaaaaaaaaaaaaaaaaaaaaanaaaaaaaaaaaaaaaaaaataaaggcggcctaatttctagcttcctgggccaatccgccctatagggagtggactttacaattagacgggcggttgtaaaacaacggggggattggaaaaacctgtcgggaacccaaataaattggctggcgttcctctttgggcggcgggtttactatgggaggggtcccgaatcggccggccctttccaacaaggtgcccccccttgaatggcggaatcgcaaatggcaagcgctaaatgtgtttgtcaacaacttccgcgttaattgtttggttcgcggtttttttcttt

SEQ ID NO: 170698 - DNA, 2663 bp, Homo sapiens
gcctgcccggaaaggagtgagcggcgcctagtcccgggctggcgggagtgcagttctgagtcccgcccggcgtgcgcggagcggggcagccagcagcggaggcgcggcgcgcagcacacccggggaccatgggctccatgttccggagcgaggaggtggccctggtccagctctttctgcccacagcggctgcctacacctgcgtgagtcggctgggcgagctgggcctcgtggagttcagagacctcaacgcctcggtgagcgccttccagagacgctttgtggttgatgttcggcgctgtgaggagctggagaagaccttcaccttcctgcaggaggaggtgcggcgggctgggctggtcctgcccccgccaaaggggaggctgccggcacccccaccccgggacctgctgcgcatccaggaggagacggagcgcctggcccaggagctgcgggatgtgcggggcaaccagcaggccctgcgggcccagctgcaccagctgcagctccacgccgccgtgctacgccagggccatgaacctcagctggcagccgcccacacagatggggcctcagagaggacgcccctgctccaggcccccggggggccgcaccaggacctgagggtcaactttgtggcaggtgccgtggagccccacaaggcccctgccctagagcgcctgctctggagggcctgccgcggcttcctcattgccagcttcagggagctggagcagccgctggagcaccccgtgacgggcgagccagccacgtggatgaccttcctcatctcctactggggtgagcagatcggacagaagatccgcaagatcacggactgcttccactgccacgtcttcccgtttctgcagcaggaggaggcccgcctcggggccctgcagcagctgcaacagcagagccaggagctgcaggaggtcctcggggagacagagcggttcctgagccaggtgctaggccgggtgctgcagctgctgccgccagggcaggtgcaggtccacaagatgaaggccgtgtacctggccctgaaccagtgcagcgtgagcaccctgtgcgagacctgcccgccctgcaggaggccctgcgggacagctcgatggaggagggagtgagtgccgtggctcaccgcatcccctgccgggacatgccccccacactcatccgcaccaaccgcttcacggccagcttccagggcatcgtggatgcctacggcgtgggccgctaccaggaggtcaaccccgctccctacaccatcatcaccttccccttcctgtttgctgtgatgttcggggatgtgggccacgggctgctcatgttcctcttcgccctggccatggtccttgcggagaaccgaccggctgtgaaggccgcgcagaacgagatctggcagactttcttcaggggccgctacctgctcctgcttatgggcctgttctccatctacaccggcttcatctacaacgagtgcttcagtcgcgccaccagcatcttcccctcgggctggagtgtggccgccatggccaaccagtctggctggagtgatgcattcctggcccagcacacgatgcttaccctggatcccaacgtcaccggtgtcttcctgggaccctacccctttggcatcgatcctatttggagcctggctgccaaccacttgagcttcctcaactccttcaagatgaagatgtccgtcatcctgggcgtcgtgcacatggcctttggggtggtcctcggagtcttcaaccacgtgcactttggccagaggcaccggctgctgctggagacgctgccggagctcaccttcctgctgggactcttcggttacctcgtgttcctagtcatctacaagtggctgtgtgtctgggctgccagggccgcctcggcccccagcatcctcatccacttcatcaacatgttcctcttctcccacagccccagcaacaggctgctctacccccggcaggaggtggtccaggccacgctggtggtcctggccttggccatggtgcccatcctgctgcttggcacacccctgcacctgctgcaccgccaccgccgccgcctgcggaggaggcccgctgaccgacaggaggaaaacaaggccgggttgctggacctgcctgacgcatctgtgaatggctggagctccgatgaggaaaaggcagggggcctggatgatgaagaggaggccgagctcgtcccctccgaggtgctcatgcaccaggccatccacaccatcgagttctgcctgggctgcgtctccaacaccgcctcctacctgcgcctgtgggccctgagcctggcccacgcccagctgtccgaggttctgtgggccatggtgatgcgcataggcctgggcctgggccgggaggtgggcgtggcggctgtggtgctggtccccatctttgccgcctttgccgtgatgaccgtggctatcctgctggtgatggagggactctcagccttcctgcacgccctgcggctgcactgggtggaattccagaacaagttctactcaggcacgggctacaagctgagtcccttcaccttcgctgccacagatgactagggcccactgcaggtcctgccagacctccttcctgacctctgaggcaggagaggaataaagacggtccgccctggca

SEQ ID NO: 170699 - DNA, 1965 bp, Homo sapiens
cagagtcagctgagcctgctctgcagggcgagccagccacgtggatgaccttcctcatctcctactggggtgagcagatcggacagaagatccgcaagatcacggactgcttccactgccacgtcttcccgtttctgcagcaggaggaggcccgcctcggggccctgcagcagctgcaacagcagagccaggagctgcaggaggtcctcggggagacagagcggttcctgagccaggtgctaggccgggtgctgcagctgctgccgccagggcaggtgcaggtccacaagatgaaggccgtgtacctggccctgaaccagtgcagcgtgagcaccacgcacaagtgcctcattgccgaggcctggtgctctgtgcgagacctgcccgccctgcaggaggccctgcgggacagctcgatggaggagggagtgagtgccgtggctcaccgcatcccctgccgggacatgccccccacactcatccgcaccaaccgcttcacggccagcttccagggcatcgtggatgcctacggcgtgggccgctaccaggaggtcaaccccgctccctacaccatcatcaccttccccttcctgtttgctgtgatgttcggggatgtgggccacgggctgctcatgttcctcttcgccctggccatggtccttgcggagaaccgaccggctgtgaaggccgcgcagaacgagatctggcagactttcttcaggggccgctacctgctcctgcttatgggcctgttctccatctacaccggcttcatctacaacgagtgcttcagtcgcgccaccagcatcttcccctcgggctggagtgtggccgccatggccaaccagtctggctggagtgatgcattcctggcccagcacacgatgcttaccctggatcccaacgtcaccggtgtcttcctgggaccctacccctttggcatcgatcctatttggagcctggctgccaaccacttgagcttcctcaactccttcaagatgaagatgtccgtcatcctgggcgtcgtgcacatggcctttggggtggtcctcggagtcttcaaccacgtgcactttggccagaggcaccggctgctgctggagacgctgccggagctcaccttcctgctgggactcttcggttacctcgtgttcctagtcatctacaagtggctgtgtgtctgggctgccagggccgcctcggcccccagcatcctcatccacttcatcaacatgttcctcttctcccacagccccagcaacaggctgctctacccccggcaggaggtggtccaggccacgctggtggtcctggccttggccatggtgcccatcctgctgcttggcacacccctgcacctgctgcaccgccaccgccgccgcctgcggaggaggcccgctgaccgacaggaggaaaacaaggccgggttgctggacctgcctgacgcatctgtgaatggctggagctccgatgaggaaaaggcagggggcctggatgatgaagaggaggccgagctcgtcccctccgaggtgctcatgcaccaggccatccacaccatcgagttctgcctgggctgcgtctccaacaccgcctcctacctgcgcctgtgggccctgagcctggcccacgcccagctgtccgaggttctgtgggccatggtgatgcgcataggcctgggcctgggccgggaggtgggcgtggcggctgtggtgctggtccccatctttgccgcctttgccgtgatgaccgtggctatcctgctggtgatggagggactctcagccttcctgcacgccctgcggctgcactgggtggaattccagaacaagttctactcaggcacgggctacaagctgagtcccttcaccttcgctgccacagatgactagggcccactgcaggtcctgccagacctccttcctgacctctgaggcaggagaggaataaagacggtccgccctggca

SEQ ID NO: 170700 - DNA, 2484 bp, Homo sapiens
gcctgcccggaaaggagtgagcggcgcctagtcccgggctggcgggagtgcagttctgagtcccgcccggcgtgcgcggagcggggcagccagcagcggaggcgcggcgcgcagcacacccggggaccatgggctccatgttccggagcgaggaggtggccctggtccagctctttctgcccacagcggctgcctacacctgcgtgagtcggctgggcgagctgggcctcgtggagttcagagacctcaacgcctcggtgagcgccttccagagacgctttgtggttgatgttcggcgctgtgaggagctggagaagaccttcaccttcctgcaggaggaggtgcggcgggctgggctggtcctgcccccgccaaaggggaggctgccggcacccccaccccgggacctgctgcgcatccaggaggagacggagcgcctggcccaggagctgcgggatgtgcggggcaaccagcaggccctgcgggcccagctgcaccagctgcagctccacgccgccgtgctacgccagggccatgaacctcagctggcagccgcccacacagatggggcctcagagaggacgcccctgctccaggcccccggggggccgcaccaggacctgagggtcaagtgagtgagggatgacctcatgccctttctggccagcccagaacccctggccagtcgctgggctgggccaggctgagctccgactccttgtccagtgctctccccaggctggccccgcctcctccttcaggcccggaacttcccacagtcccaagccctagccctagggggttctcctcttctggtcctgcccgggaggcctcctgccttcccctgtgggcagggccagtgtgcccaattgcccgattgcccgtgctgggcagggtcctgcccggggggcctggtgggggaggcagggcaggaggttggagcagccctgcccagccccgtggccgccagctttgtggcaggtgccgtggagccccacaaggcccctgccctagagcgcctgctctggagggcctgccgcggcttcctcattgccagcttcagggagctggagcagccgctggagcaccccgtgacgggcgagccagccacgtggatgaccttcctcatctcctactggggtgagcagatcggacagaagatccgcaagatcacggactgcttccactgccacgtcttcccgtttctgcagcaggaggaggcccgcctcggggccctgcagcagctgcaacagcagagccaggagctgcaggaggtcctcggggagacagagcggttcctgagccaggtgctaggccgggtgctgcagctgctgccgccagggcaggtgcaggtccacaagatgaaggccgtgtacctggccctgaaccagtgcagcgtgagcaccacgcacaagtgcctcattgccgaggcctggtgctctgtgcgagacctgcccgccctgcaggaggccctgcgggacagctcgatggaggagggagtgagtgccgtggctcaccgcatcccctgccgggacatgccccccacactcatccgcaccaaccgcttcacggccagcttccagggcatcgtggatgcctacggcgtgggccgctaccaggaggtcaaccccgctccctacaccatcatcaccttccccttcctgtttgctgtgatgttcggggatgtgggccacgggctgctcatgttcctcttcgccctggccatggtccttgcggagaaccgaccggctgtgaaggccgcgcagaacgagatctggcagactttcttcaggggccgctacctgctcctgcttatgggcctgttctccatctacaccggcttcatctacaacgagtgcttcagtcgcgccaccagcatcttcccctcgggctggagtgtggccgccatggccaaccagtctggctggagtgatgcattcctggcccagcacacgatgcttaccctggatcccaacgtcaccggtgtcttcctgggaccctacccctttggcatcgatcctatttggagcctggctgccaaccacttgagcttcctcaactccttcaagatgaagatgtccgtcatcctgggcgtcgtgcacatggcctttggggtggtcctcggagtcttcaaccacgtgcactttggccagaggcaccggctgctgctggagacgctgccggagctcaccttcctgctgggactcttcggttacctcgtgttcctagtcatctacaagtggctgtgtgtctgggctgccagggccgcctcggcccccagcatcctcatccacttcatcaacatgttcctcttctcccacagccccagcaacaggctgctctacccccggcaggaggtggtccaggccacgctggtggtcctggccttggccatggtgcccatcctgctgcttggcacacctgaactgtgacgcacgcgcgctgcggggagccgtgaccgcagagaaaaaggccggttgtgac

SEQ ID NO: 170701 - DNA, 2916 bp, Homo sapiens
gcctgcccggaaaggagtgagcggcgcctagtcccgggctggcgggagtgcagttctgagtcccgcccggcgtgcgcggagcggggcagccagcagcggaggcgcggcgcgcagcacacccggggaccatgggctccatgttccggagcgaggaggtggccctggtccagctctttctgcccacagcggctgcctacacctgcgtgagtcggctgggcgagctgggcctcgtggagttcagagacctcaacgcctcggtgagcgccttccagagacgctttgtggttgatgttcggcgctgtgaggagctggagaagaccttcaccttcctgcaggaggaggtgcggcgggctgggctggtcctgcccccgccaaaggggaggctgccggcacccccaccccgggacctgctgcgcatccaggaggagacggagcgcctggcccaggagctgcgggatgtgcggggcaaccagcaggccctgcgggcccagctgcaccagctgcagctccacgccgccgtgctacgccagggccatgaacctcagctggcagccgcccacacagatggggcctcagagaggacgcccctgctccaggcccccggggggccgcaccaggacctgagggtcaagtgagtgagggatgacctcatgccctttctggccagcccagaacccctggccagtcgctgggctgggccaggctgagctccgactccttgtccagtgctctccccaggctggccccgcctcctccttcaggcccggaacttcccacagtcccaagccctagccctagggggttctcctcttctggtcctgcccgggaggcctcctgccttcccctgtgggcagggccagtgtgcccaattgcccgattgcccgtgctgggcagggtcctgcccggggggcctggtgggggaggcagggcaggaggttggagcagccctgcccagccccgtggccgccagctttgtggcaggtgccgtggagccccacaaggcccctgccctagagcgcctgctctggagggcctgccgcggcttcctcattgccagcttcagggagctggagcagccgctggagcaccccgtgacgggcgagccagccacgtggatgaccttcctcatctcctactggggtgagcagatcggacagaagatccgcaagatcacggactgcttccactgccacgtcttcccgtttctgcagcaggaggaggcccgcctcggggccctgcagcagctgcaacagcagagccaggagctgcaggaggtcctcggggagacagagcggttcctgagccaggtgctaggccgggtgctgcagctgctgccgccagggcaggtgcaggtccacaagatgaaggccgtgtacctggccctgaaccagtgcagcgtgagcaccacgcacaagtgcctcattgccgaggcctggtgctctgtgcgagacctgcccgccctgcaggaggccctgcgggacagctcgatggaggagggagtgagtgccgtggctcaccgcatcccctgccgggacatgccccccacactcatccgcaccaaccgcttcacggccagcttccagggcatcgtggatgcctacggcgtgggccgctaccaggaggtcaaccccgctccctacaccatcatcaccttccccttcctgtttgctgtgatgttcggggatgtgggccacgggctgctcatgttcctcttcgccctggccatggtccttgcggagaaccgaccggctgtgaaggccgcgcagaacgagatctggcagactttcttcaggggccgctacctgctcctgcttatgggcctgttctccatctacaccggcttcatctacaacgagtgcttcagtcgcgccaccagcatcttcccctcgggctggagtgtggccgccatggccaaccagtctggctggagtgatgcattcctggcccagcacacgatgcttaccctggatcccaacgtcaccggtgtcttcctgggaccctacccctttggcatcgatcctatttggagcctggctgccaaccacttgagcttcctcaactccttcaagatgaagatgtccgtcatcctgggcgtcgtgcacatggcctttggggtggtcctcggagtcttcaaccacgtgcactttggccagaggcaccggctgctgctggagacgctgccggagctcaccttcctgctgggactcttcggttacctcgtgttcctagtcatctacaagtggctgtgtgtctgggctgccagggccgcctcggcccccagcatcctcatccacttcatcaacatgttcctcttctcccacagccccagcaacaggctgctctacccccggcaggaggtggtccaggccacgctggtggtcctggccttggccatggtgcccatcctgctgcttggcacacccctgcacctgctgcaccgccaccgccgccgcctgcggaggaggcccgctgaccgacaggtgggaccggggcctaaggtgtggggggctgcttgcggggagaggccactgtccggtgtgtccctgactcctcgcttcctgacagactcctgagtggccaggagcaggcctggcgggtggtgggggacctcctggggctggagtgctgccaacactgcctgctcatgccccaggaggaaaacaaggccgggttgctggacctgcctgacgcatctgtgaatggctggagctccgatgaggaaaaggcagggggcctggatgatgaagaggaggccgagctcgtcccctccgaggtgctcatgcaccaggccatccacaccatcgagttctgcctgggctgcgtctccaacaccgcctcctacctgcgcctgtgggccctgagcctggcccacgcccatgctgtccgaggttctgtcgggctagtacggggggggat

SEQ ID NO: 170702 - DNA, 1295 bp, Homo sapiens
  misc_feature (982)..(982): n is a, c, g, or t
cccgaagaagccaccaggaagaggaagacacccactgcgatgatgaccactggcaacagagagccagtggtagccccctggattatggtctgactcaggacaagctgtgccccgacacccacggcaatcagtcccactgcacaggcgcaaaaggccagcaggaggacgtagagcaagaacttcacacatttcattcctccttccaccgccatggctgtcgggctagtcggggccgactagcccgacaggaggtggtccaggccacgctggtggtcctggccttggccatggtgcccatcctgctgcttggcacacccctgcacctgctgcaccgccaccgccgccgcctgcggaggaggcccgctgaccgacaggaggaaaacaaggccgggttgctggacctgcctgacgcatctgtgaatggctggagctccgatgaggaaaaggcagggggcctggatgatgaagaggaggccgagctcgtcccctccgaggtgctcatgcaccaggccatccacaccatcgagttctgcctgggctgcgtctccaacaccgcctcctacctgcgcctgtgggccctgagcctggcccacgcccagctgtccgaggttctgtgggccatggtgatgcgcataggcctgggcctgggccgggaggtgggcgtggcggctgtggtgctggtccccatctttgccgcctttgccgtgatgaccgtggctatcctgctggtgatggagggactctcagccttcctgcacgccctgcggctgcactgggtggaattccagaacaagttctactcaggcacgggctacaagctgagtcccttcaccttcgctgccacagatgactagggcccactgcaggtcctgccagacctccttcctgacctctgaggcaggagaggaataaagacggtccgccctggcaaaaaaaaaaaaaaaaaaaaaaaaaaaaaaaaaaaaaaaaaaaaaaaaaaaanaaaaaaaaaaaaaaaaaaataaaggcggcctaatttctagcttcctgggccaatccgccctatagggagtggactttacaattagacgggcggttgtaaaacaacggggggattggaaaaacctgtcgggaacccaaataaattggctggcgttcctctttgggcggcgggtttactatgggaggggtcccgaatcggccggccctttccaacaaggtgcccccccttgaatggcggaatcgcaaatggcaagcgctaaatgtgtttgtcaacaacttccgcgttaattgtttggttcgcggtttttttcttt

SEQ ID NO: 170703 - DNA, 369 bp, Homo sapiens
gaggtgggcgtggcggctgtggtgctggtccccatctttgccgcctttgccgtgatgaccgtggctatcctgctggtgatggagggactctcagccttcctgcacgccctgcggctgcactggtgagcgaccacccactggcctgggctgctcaaggcgtgagttcccctcaccaacccctctgcttctcacccccagggtggaattccagaacaagttctactcaggcacgggctacaagctgagtcccttcaccttcgctgccacagatgactagggcccactgcaggtcctgccagacctccttcctgacctctgaggcaggagaggaataaagacggtccgccctggcagtgatgtctcgtctct

SEQ ID NO: 170704 - DNA, 406 bp, Homo sapiens
cttcatttcctttaatctaaaacatgcttctactttctttgatctttcatgacattggcattttttaagagtcaaagatagttgtcttgtaaattgtcccacaatccggatttgtctgtttcctcatgacgaaattcaagttaagcatttttgggaaaaatactgcataggtgatgtatccttcctgcctcgtaactgcagatggcctgtaatactaagtttgatcacttgaccaaggtgaacttccagatctctccattgtaattattttgctgggtacagtggctcccacttgtaatcccagcactttggaaggctgaggtgggaggattgcttgagcccaggagttctacaccagcctgagcaacatggggaaaccctgtcactactgaaaatacaaaagtac

SEQ ID NO: 170705 - DNA, 417 bp, Homo sapiens
ttttaggaaagcaggttaatacttgcaccagatcctgttcacaggtatactgacagccccatcaacctctggaaggggaagaaagctccactgaagtaaaaataaaatcctagccaatttccataacagaaaaccaaatttgcctcagttgcaaatattttgttaccagggaaaagattcattttagacaccagataaggaagaagcactgatcaaagttcataatggttagaacagctgatatctgagagaaataggtctctatattatctaaattttattacaatactaagcagatctccagaaataaacagtaatgtttagttctttggagaaatacaatctctaaattatattcaatcatagcttttatctaacgtgaataaaaggaactattaaaaatccttaaaggcgggg

SEQ ID NO: 170706 - DNA, 394 bp, Homo sapiens
aatggaagcaattctcagaattaaaaatagatctagttaagtgtggttattactggggaatgaagctctgggagacttactgttttgagttattaccataaacatatactacttttatttattatcaaatttcttgatgtgtagttaacaaatgataaacctcaaatatttaaaatgtgcaatttgataagctttgacagaaatacacacatttaaagccatcaccacagttgaggtaaacatatccatcctcccaaaaaaagacacatttaagcttctcagtctgaatagtctgtgtttagtaacttatgtatagactttgtcttttagctatatcatcacttaattcagataccttttaatgacttcaaagattattttaatgataatacag

SEQ ID NO: 170707 - DNA, 382 bp, Homo sapiens
ctgctaacagtattttttaaaacatctctgtagtatctttatacttattacaagggataatacatatattgggtcatttgatcctctggataattctttgaagcaattaggaaaccaatcgttatctccatttacaattagaaaaaactgattgagactcaactgagaccagttttagaattcttagaattcttatctgtaagtatattagtatagggactctactcattctctttttaataagtaggtaattttgttgccccattcttaagagttagtgggaacaactaaaagagaatactgttgcccttaagagaagaacttcaaacctctggttttaggaaggagaatcttgcaggtgtagatgactagactgtgaggc

SEQ ID NO: 170708 - DNA, 463 bp, Homo sapiens
gaggtactaacagtagattctttgaagggactgggataataggaggttgctatcctttcatgttttaaggcagtttctgctttttccgtaataagcacacattgcttttataaaaataaaaataattcataaaagttcacttctgaagactcaggagaaaaagactcagcttaggtaacccctacataccaaagtatccccccgagcagaactgcctccctaggctgtcaccactgcctcgcacacgtatgactaatatcataccgatgacactttaaggcagctgcttatactcatgtctgtttctcttatagactgtgagcctcttaaaaccagtgaccattgctttttttatctttaatctctagcagatacctctgaatgcctgtcatgtcatggctactcaatgaatattgcagaataaacattgcattgtgttgtcaagttctcgtagaactttcca

SEQ ID NO: 170709 - DNA, 622 bp, Homo sapiens
aaagcctctatggatcacctgaaggggcataggaatcactgtcatacacagagtctattgtctcatgatttgcagtgctaggattctcccctgtagggagccactcttctgtatgttctgctggtaaatgattggtcactgaacaactggaaaaaaaagaactccacccaccttccatttctttcacttgccaatcagagcggtgatctttcatggtttctcttgttttatgctgtgctaaatcttttactaatatcccaagctgagcagtgttggtagtcaagacttatggctttagtggtagaatttatgtgatgcctggacacttttggccccaaatattttccccattcttcctgaaattcttgactttatacacattgactgaacatgtgtctttattttgctgaatgtctaaaattacatcatgagaagctcatctctttacattaacaagcttctaccttttaatatctccagggctgtcagcacatgaagacagggagtagtcatcatccacttcggaaggaatttaactgacacagccgctcacagccgctaactcttgatgttgaaatctacctgtcttggtgatcatcccacaaggtggtaaggggtaggt

SEQ ID NO: 170710 - DNA, 272 bp, Homo sapiens
gtcactttttggggttgtctgaggtttcctcctgaatagaagtgatgttagaagtgatgacatgtctgagtgagtgcatcctatcaggaggcacatttctcccattactggtaatgatttgatgccctggatcccttaattcccatcctggtttccaactatacccaaaggaatttgaaagttgtattcagtattatttggcaaacattggctcaacatgagaagctctacagaagaagggaaaaaagagcttctgtcctaagtacgcgaac

SEQ ID NO: 170711 - DNA, 195 bp, Homo sapiens
tataataaagttactttcaggctgtgtgtataagacatatatgaaaaataaatgaattttatgtttagatttggatcctatccttaagatactcattagggcgtgagccaccgctcccgacctatgtatcagttgtttttttcaagtaaaaatgaaaaaagaattttctttcttttttttgtcttttttttagaa

SEQ ID NO: 170712 - DNA, 318 bp, Homo sapiens
cttcccgatagaagaattgtgaaagggaaaagtgggtaattcacaaaggagtgaaaacaaatatctataaaaatacagacaaaattagacaactaataaaagaaatgaatattagaacaagaaaatatttctacttgcctttgccaaattgacaatgactctgtaaattatttttatcaattgtagccaatcaaatggacaaatatttcacatatatgttatgtgtgcttgattaatttcctgttgcttatcaagaaaagaattccattcattcttccaccacatgtttattaaacacttaagtctcagaagcaccat

SEQ ID NO: 170713 - DNA, 421 bp, Homo sapiens
caggacagtcttaaggaatatttttgtaatggaggcccaaaatataagaaggcctggagctgaaggagttgatgatggagctctggaaagtaggtggagtgtaggtacagcaaagccagcctggctgccagttccctgagacagtgttctgtttatctcctggttggcagtatttacacaagtaacctatacaccccggccctggatatcaggctggagtactttctgtaaatctttcagaggaaggcaagttagtaggcagctgggcatttaaaagatttcctggggaagttggaggagttttaggattaaaggaatttgttcagaggttgagactggattttgaggaaagatgtttaagtcagggacccagagatcggaagatcttctggtagatcaacatcaggcagttgggagtaaa

SEQ ID NO: 170714 - DNA, 219 bp, Homo sapiens
ctatccacacttcaccatgacaatgactgctaacctgattcatggacttatctctcacctcagttactgcagtgcctctctttactcatttttatgccacctcttccttcataaataacaatgtgtaatttaaaattcaatactgctcatatttccaaacagattttttaaaaaagaacttactgataatctatatattctaacaaaaaaattgttctc

SEQ ID NO: 170715 - DNA, 115 bp, Homo sapiens
tggcaggggggtggggggtggttctcatctgtggccccagagatattgggaattgtatttttttttttgctatgtgctccaaatagaagaatacttaacattcctggatagagga

SEQ ID NO: 170716 - DNA, 295 bp, Homo sapiens
aaatactctgaatggaacagagaacattacgtacatgtggatgccaaccttcttccacaacctagtaatttactttcacaaaagccacagtacattttcaaaatttttggagagtactttgcaactttagatgtgttccatgtgcaggtggcttgatgacagagttagtgacaggcaaaatgatctagggtataagtggacactggcagcaaaagaactgcaaagactgactcaaagttttcaaagaaaagagacaagatttttttttttttttttttactattacacctattag

SEQ ID NO: 170717 - DNA, 249 bp, Homo sapiens
tcaacatgtgtaagcagagacccccagttctaaactggttattaaccctgggaatagcacattggaggctgccaggtgatccaaacactagcatcaaacacttaattttaactgttgtaagagagacaatagatagtataaacaagcagagagaatataggacaaacttggaagggcagtgcttgacttttctagttgtgaataaattctgaaccttttcttccacactttatctgcatttgtcatata

SEQ ID NO: 170718 - DNA, 496 bp, Homo sapiens
atgtgtgctaaattaatgttgaaaacgtgagcttttggtctcccaggtccactttggtccatttctttgtgattcgtacttcacactaagcactcgttagaaacaacctctggagggatatcagaatttcaaacaatgttaacagagaagctgagtcagtctgggattaagttcagtcctagttcagccaaaaggaattgtctggaccctgttcctgcttgaggagatatcataattgggcagcttgtgtgagccatgggaacacacttgaatacatttacatgagaacatatttgtcttagaaataggtacgccaaagtgcatgacacctggctgggtgcggtggctcacacctgtaatcccagcactttgggggaccgaggcaggcagatcacttgaggtcagaagttcgagaccagcctggccaacatggtgaaaccccatctctactaaaaatacaaaaattagccgggcatggtggcaggtgcctgtaatc

SEQ ID NO: 170719 - DNA, 469 bp, Homo sapiens
  misc_feature (1)..(1): n is a, c, g, or t
ntctccctgtaaataagggttttccttcaactcctgtccattctactaggtggttggacacagctcgtctatcatccttagagaatcattccgctggacctccaaccctgcagccaggtcccttgcgtttccctgcaggtctccgcatgctgcgctgtcatgatcattttcttattttctcactccttttttaaatttttttccaaaaatccatcatggtctcctcccggcaataatgacaacaactactactactgtctatactgacggcttagtgtataccagacacggctctacaccctctacatgcattaacgtgttcaatcatagggaccgtcattatccccattttacagatgagaaaacggagctcaagaagtttagtcaagcttagtcgcacaactaggctaggcacagtggctcacacctgtaatcccagcactttgggaggccaaggcaggtggatcac

SEQ ID NO: 170720 - DNA, 317 bp, Homo sapiens
ttttctttgaagcatttttaaaccataatatgttgtaaggaaaattgaagggaatattttacttatttttatactttatatgattatataatctacagataatttctactgaagacagttacaataaataactttatgcagattaatatataagctacacatgatgtaaaaaccttactatttctaggtgatgccataccattttaaaagtagtaagagtttgctgcccaaatagtttttcttgttttcatatctaatcatggttaactattttgttattgtttgtaataaatatatgtacttttatatcctgatca

SEQ ID NO: 170721 - DNA, 433 bp, Homo sapiens
gctgtgatcaacgggagatgtctccccagggcgaggtactggttattcccacaagagtaacaagatggaaaactggaggcagtgatccctgaggccctaacgctgacccttctgagccacctagttccaatcagagctgcccctgccttacactgagggctgctgaactgtctggccctggccctacactcagcaacaagcctagagcctcactggcccagctgaggctgccaaagtagctgcgtggcatctggaatatatggtaaggcagccatcccaggcatctgcaaccgtggtctcccttcccttctcccgcccccagctgcaggctggctcccaggcaggccctactggcagggtctgatgccagtggtggggtcaccaaaggtcaccttgcccacctccccatttccaccatgacctgcccttgcct

SEQ ID NO: 170722 - DNA, 425 bp, Homo sapiens
caacactaaaccatttgttcctttctctttgccttcaacatttcccaatcagaattacttttcttactggacccttccctgcaaactggttcctcttcctgagttctctctctccatagaaggccacagtcattcaaattcaaaacctgtcatctttatttttttccctttatatgctatgactattcctgtaaaaaaaattttgaatgtttcacaagttcttcctctgctttccctcgtcccatcctacctacccacttgtatacatgtgattgtaaaaaatctcacatctagtttccctggttccattcttcccttttgccagtatggatagttgatatctgccctacatcagggcatgtcattgtcctgtttaaaaacctttgaatgttccccactgaattcagaataaacttgtctcctta

SEQ ID NO: 170723 - DNA, 452 bp, Homo sapiens
tgggggccacggcgaggaggctgagcgccccggccgggtggagtccgtcgcggcgaggagcgcgccgattctcaggggactttgccgcctgccggaggcgcccttgctgcggggtcgccccgggtcattcggccgcggtcctgcccagctgggccgccagtagtccccgcttccggcgcggcgggatgcgtggcgcgagcgcttagtccctcggaggggaggacgcgctcccgttcaccggtggacggcgggcgactccccgagccgacgaccccgacagcgacgggagcgacgcgcggctttctgacgggcgcgggcggcgagcggggccctgcggtcctcgggtcggcggcagacgctcccggcccgcgaggaaagcccgcgggaggcggctcctgccgctcgctagtcgctcagagcgcttccatttcctcctcccgacgcaacctggc

SEQ ID NO: 170724 - DNA, 748 bp, Homo sapiens
agatggagtcttgctctgtcacccaggctgcagtgcagtggtgcaatctcagctcactgcaacctctgcctcccaggttcaagtgattctcctgtctcagcctcctgagtagctgggactacaggcccatgccaccatgcctggctaattttttaaattaagatggagtctcgctctgttgcccaggctgagttcatatacagctcgacgtctcatcaaaggggtagaagagcatctcttttttttttttttctttgagacggagtcttgctctgccccccagtctggactgcagtggcgcgatctcggctcactccagcctgcacaatagagcaagacttcgtctcaaaaaaaaaaaaattgagattcaagatggctaagagtttggcaataagtatatattatgcaaggaagcacatacctgttattgagaaagggacgcttcttattcatctttatattattttaagaataattaatatctaatagtacttatgagctaggcactgttttaagcactttatatttgatctcagaaaattctatggaggttctgggccttttgaagctaggccataagaagttttgcagcttcagttgcaggctatctagcacactggtagctttgagctgccatgtaagaaatcctaccactttgagctgccatgctagagaggtctcatgtagatattctgtctgacaactccagctaatcccagcattccagtcatccttaccaaggtgccag

SEQ ID NO: 170725 - DNA, 313 bp, Homo sapiens
ggcagtgctctggaagggacttgtctgagctgggtctaaaggagtgagcctggccaggcaaggaaaggtgagggggagagtgtgcacatgagtgcaggtgcggggagaccaagccaccttcgggggctggccaggcaaggaaaggtgagggggagagtgtgcacacgagtgcaggcgcggggagaccaagccgccctcgggggctggccaggcaaggaaaggtgagggggagagtgtgcacacgagtgcaggcgcggggagaccaagccgcccttgggggctggccaggcactgacgctggcatctgtggcgg

SEQ ID NO: 170726 - DNA, 359 bp, Homo sapiens
gagacagagtctgtcttgtcaccctggccggagtgcagtggcacgatcttggctcactgcaacctctgcctcccaggttcgagtgattctcctgccttagcttcctgagtaactgggattacaggtacctgccaccatgcccggctaatttttgtatttttagtagagatggggatttgccatgttggccaggcttgtctcgaactcctgacctcaggtgatcctcctgccttggcctcccaaagggctgggattataggcttgagccaccttgcccggtccactggttagttctaacactagctagttctcaaactcatgccacaaattgtaagtatttaatacagcagcacttcact

SEQ ID NO: 170727 - DNA, 207 bp, Homo sapiens
gcagccatgccagtgttacccatattgcatgtcgtggtagtagatgcagccccccaaaataaaagtcaaaagatgctggcacattcctgaggttcttctcagccactaacaattggtgtagttcatcatcacctggaatgaccaaaatgtctcccatggaaatgtggctcagctctgtaggcttccatttaactttgtcaggttctg

SEQ ID NO: 170728 - DNA, 449 bp, Homo sapiens
attgaaatttgttgcttaaggaatcaacttgtcatttttgggaaatcatgtagtctatatgatcacattctggatcctttagtatgaataaaaacctattttgtgtgtgtttataactaatctttaacgtaggctggacgcggtggctcatgcctgtaatcccagcattttgggatgccgaggcgggcggatcacctgagatcaggagttcaagaccagcctggccaacatggtgaaaccctgtctctactaaaaatacaaaaattagttgggcatggcggcaggcacttgtaatcctagctacttgggaggctgaggcaagagaattgcttgaatctgggagacagaggttgcagtgagccgagattgcgccactgcactctagcctggacaagaagagtgagactctatctcaaaaaagtaaaaaatataaaataaataaataaaaa

SEQ ID NO: 170729 - DNA, 453 bp, Homo sapiens
cagcaccccactcccaagagcccacatggcagggcagggcctggagactggagggcgagcccctgagaccccaaagaacatcgaccagtcccaggagggctgctgaaccctgttcaggctccccggccaaaataccactgagggcatcagcttgatgaggtgcagcgactgggatttgattactctggccctgcctcaggcttttcccactctttcctgtggctccagacaggagtacccggcccttcccactcactgccccttaagtctccctcagcatccctcccaccccagcgccccagcccctgccagccacctgctcaaggcaggcctctctccctccctccgggcgcctgccctgccctctccgcctcccgatggctaggacaagatgatttacaagagcgtggcgggagggacggcgagccagattaatgcaccagtgagcggccg

SEQ ID NO: 170730 - DNA, 220 bp, Homo sapiens
tctgccctagccttggtgatgaggccctcacagcttgtgcatggcatccctgtcgataccaaacatcttcagcagctcagctggcttcccacttcttgcttcctgcttctgccagtgatgcctggatttaatgtatctgagagaaagaggtttaaagaggttgggttgctcaggcgtggtggctcacacatgtaatcccagcacgttgacaggtttaggt

SEQ ID NO: 170731 - DNA, 350 bp, Homo sapiens
agcaacatcccgtacgcccaatcccctaacgagtgtgtgataaaaaagaactggcaaattatagggtctatagaggattcttatggttgagaaaattccttgttctcaagggcacacacaggcctaccctctttttcatgtgtattcattacctaaatgcacctgtagctagtgcatattttacgtagcaaattccaagtatgttttaaactttaagcttttgtacttaacagcatagacttgaggcaacaggacttagttataaaatatcctcagaaaatttgaagctcatgaaaaagaaaagtcaatatgagctggtaaaccagcacttttttgggcgtacggggaga

SEQ ID NO: 170732 - DNA, 210 bp, Homo sapiens
atatttctattcatatccctgtctcgagtctttttaaagaaatatgagagcacacaaaattatgaaacacatgaattatgagcactcaaaaaatattccaagcattagttaaataaattatgttccatacattaaacgtgatgttttgccacaattagaaatcacaagagaatggccaggcgtggtggctcacacctgtaaatcccagca

SEQ ID NO: 170733 - DNA, 380 bp, Homo sapiens
tacgacgtaaagcatgtataggagaatggctcttgaagtccctggaaggcctgtgtggggccccgtgtaccactgctcagtgagtctgacacagccgagttcagggcagccatgcagagtgacaactggaactgaaatccagtctgctcccagccaggccgggcctcggtggggacatggccacacaagtaggtagaagtctttctttacatgaagacctgtctgcatttgaagctgtgctggggctgtaggtgcccagagggggcttttttctgagtgacctgggcagaggtgacacctcctctaatctcatgagccagagctggcaccatttgctgaccggtccgtccaggtgtggtggcctttcctgatacaaaggc

SEQ ID NO: 170734 - DNA, 351 bp, Homo sapiens
aaatctagcctctctttctgcagatattgcagtattatctaatatcacgctcactccattaataccttcaagtgaaagtttatattggcatctgttatatttattatttcggagtcatactctggtggaaaagaggtctgagcaaccctgatagaatatagataacgcataacagtcatttcaggggcttgaaactgcttttccactatggtggaagggacgatccacccaactagccattacctttaccaaaaaataatccaccctggtctgcccattagaggaaggtgtcttgtcttccaccaaaaggaagaggggttgtctgaagttttacttcagtgcttggtttca

SEQ ID NO: 170735 - DNA, 414 bp, Homo sapiens
cttgaccaaaaacctgaaagaagtgataaataaagcccaggaattctaagttactcaggatgcagggtctgtttcatgtgagtgacagtggaatcttcaatttctaatatgattttgggagaggaatgtgttcatagaagaaatataggccctgaggtgacttcctaaatttactgttagaccgagaccaaagccatctgtatttaggacatgggctgaacccagatgtcacacttggtggttttggtctcctgatggatccagggctttggattatcctgaagccagaggatgttgaaatgggactaaagtctcctatttgtcagagccagcataagttcagtgtgggacagttagagtctgaggataaaagtttttcctctgtatttcgcctgaattttctttctctaagaa

SEQ ID NO: 170736 - DNA, 243 bp, Homo sapiens
ttattgctggagttagcagaaggaaaaataaacaaaagccaaatagtgaaaaccttgtactcatttattcttagcagtttgtgttttaccttttagaaaatgtggagcctttgaaggtttctttaaaaagtattttgggacatttttgttagagaggtatggcaggctcattacaattaatttagcattacctaaatttgaatcctggctccagttctagctggttctgtaactgtgggcaag

SEQ ID NO: 170737 - DNA, 168 bp, Homo sapiens
tagaagcaccctgtgctgtgttccctcccccttggaggtctcttgagccttctcatctgtgaagtaggtgaaggcacaggagggccacgtgaggctcacacacactgctccttgcacggagctggcccggggcagggtggtgaggcttctccttcataaatctcactg

SEQ ID NO: 170738 - DNA, 402 bp, Homo sapiens
actggacttctgttgtgtgtagtgcatgtttcgtacatgccatttctgaggaactctttgtctcagtacagctttgcctcagctcagtctgtttcctcgagagaaattagaggtgtgctacttggtttctaacaatctccatacaaaggccttaaagacattttagtataagaaacataacatttctttctggcccacacctaatatagcttctgttgttaatactacttctctgctgccaccagccatcagcagtgatgagcagccatactaagcattttatattcattgtgttgaatactcaaaagaacccttcaccccttaaaattcagcgtggcttaattaatattgctaatttctctcggaccacaaaactagtgtttgaatgcgcacatcagccta

SEQ ID NO: 170739 - DNA, 437 bp, Homo sapiens
caggtgacctagacgatcctttggtccgagagaaattagaggtgtgctacttggtttctaacaatctccatacaaaggccttaaagacattttagtataagaaacataacatttctttctggcccacacctaatatagcttctgttgttaatactacttctctgctgccaccagccatcagcagtgatgagcagccatactaagcattttatattcattgtgttgaatactcaaaagaacccttcaccccttaaaattcagcgtggcttaattaatattgctaattttctctcggaccaatgcattggtccgagagaaattagtccagagaggtcctaagtatcaaagcagattttgtaaagaaaaaaggcaacacgtcagtgagaaaagcagcacaagatccggactcggggacccttttccctctttccgaaaca

SEQ ID NO: 170740 - DNA, 482 bp, Homo sapiens
tcataagcacaaacttccactgacagtccaaaaaatgtgtccctaagtttgctatcccacgcttcatgaagactgtgttacccattttcctctaatttctctcggaccaatgcattggtcgagagaaattagaggtgtgctacttggtttctaacaatctccatacaaaggccttaaagacattttagtataagaaacataacatttctttctggcccacacctaatatagcttctgttgttaatactacttctctgctgccaccagccatcagcagtgatgagcagccatactaagcattttatattcattgtgttgaatactcaaaagaacccttcaccccttaaaattcagcgtggcttaattaatattgctaattttctctcggaccaatgcattggtccgagagaaattagcatgactctgaagtttgtgctccctgtccctgtggtaagttgccatgtgcctttctaccctggcca

SEQ ID NO: 170741 - DNA, 436 bp, Homo sapiens
ttttttgtatttttagtagagatggggtttcaccatgttggccaggctggtctcgaagtcgtgaccactcctgaagtgctaggattacaggtgtgagccactgcgcccagctagggtgcaagttttattggtttcatcaaaaagtatcaggggccagacatggcggctcatgcctgtaatcctagtgctttgggaggcaaaggcagaaggatcgcttgagcccaggagttcaagaccagcctgggcaacgtagggagactccatccctacaaaaaatttttaaagtagctgggagtggtggtgcaccactcccaagtcacagctacttgggaggctgaggtgggagtatcacttgagcccaggagttcaaggctacagggagctgtgattgtactgctgcattccagcctgggtaacagagcaagaccctgtctct

SEQ ID NO: 170742 - DNA, 515 bp, Homo sapiens
catcatgggtcggggttcagtctgggatttgaggtcctgagatcaggctgagttcagtcccctattaatctataagatcaccataggcaaccatttctctttctatccccagtggccagctggcacacagttgatgctcaatttataattgttgaataataaatgaacaaatgctgcatgaacaaatgcattgacagacaggtggatggatcagcctgtgaccagcaacatcagtggctaagaaaattcctccctccattgcccctctcctccctactgtgggaagctaattagttcttgaggaatctgaccctgccctcccctcccttgccctcattagcactggccatggcatgctgagtctgtctccagggacagtctttccaggcatcttgccagcgaggctctgaattcatggactctcagagctggaagaattctgacagaggaggtatttcatcaccaccctgttttataggtgggaaacagagatccagagagtagcccagggtaga

SEQ ID NO: 170743 - DNA, 751 bp, Homo sapiens
taggggcagcagagaccgagagaggcaggcagacccataggggctcctccacaaagatgtatttgaaattgagggcttggttggcctgggagaaccatactttggcctgctctgagttacacaagaaatgtgaacaccctcgaaatagcccagccctcatggctgagggggtgttttcagagattttcagcagggaggactccttttattgttctcactctcgcctcatgacttgtgttgaaggatttttgtctgctagacaaattgaattcattaaatgactaattaactttgctggcttgtgttttattagttgggcctacagacctggtaatccgaagctgctgatggcagaagataaccgctgcttccacatggagatgatttaattgcatcccaagcagagaaatgtgatgttacggtgaatctgagcagccttgttatttattttacccaatggagtttattgagtatgtgtgaacaaagcacagcccctgccctccaggagagttgagtcttggaggagatacagacaaggaaacagccaatcacaatacagcattacataccaggcaagcacagggttccggggtcacagccttgggaggtgggctagatgttctccttctgtccctccagacgcactctgcacctgcacccaccctgctgcatgccccaggctcactcgaaggactgtgccaaccgccctcctctgccctgtctcttccagttgagtttttgccagtgggat

SEQ ID NO: 170744 - DNA, 355 bp, Homo sapiens
tcaacagctgtgctctggttatccactgctgtgtaacagccaagacaaagttgatgaaaacaaaagccccggtcaattccatgtgaatgtctgaatgtaactttacagtctatgtatttaaaaccatgtttatttcttgttcctcaaaaccagctctcccctgtgttggggaacagctccaccaccgcatcatggtgaccttgcatgtatccacttaggcagagtcttggcagaacgcctcatggtcttcctggatgtgggaggctgggaagcctgtgtacatagccattgtgaggagatcttctgttcacctccttatctctcctgggaagctgtcatgagacagtttctcata

SEQ ID NO: 170745 - DNA, 337 bp, Homo sapiens
tgctgggattacaaatgtgagcccagctgatatctaaaaaaaattttgtttttgagacagtcttcctctgttacccaggctggagtgctgtggtgccgtctcagctcactgcaaccttcacctcccgagtccaagcaattctcgtgcgtcagcgtcccaagtggctgggattacaggcgtgaaccactgcatccagccaggagttgttttttttttttgctattggtggtgagcaggaggtggcaagtgatggtttgtgtgaaggtgtatttcttattaaactgaccctgagctttatgcaagtcacctctggcctgtctgccttggagagaggcct

SEQ ID NO: 170746 - DNA, 443 bp, Homo sapiens
caaaccataacaaggaccttatataaggataaaaggatcaatcccccaggaagacataaccatcctaaatgtatgcacactgaacaatcaaactgccctttctttttctcgagtaacgctggagccgtacttcagtgaattcaggttattctagcaaatctcaccactgcgctagggatctccaagaccacctccacttgcagagatccagtagaaggactcacaggacttagcatttaattgtacgcatggctaagatttatgacagtgacacagtaaagatacccaggatcatgatggaaaaagaggcagagtctggtggaacccttgtgaggcttcctgtgtgctctcccctcccccatgagggatcatacaaagttcactcctcccccagcaatgaaatgcagcaacatgtgtttgaggtttcttcccagggaagcccg

SEQ ID NO: 170747 - DNA, 388 bp, Homo sapiens
ggtaaaacctgatcaccctggcctgcctgcagcaagaattcagttagctaagtttagtaaaaatttccctaccctcttagaaattttcaggagcccccacactccgctccttggctataagttcccacttttctttgttgtatttggagttggcccactctctcccctctactgcaaaatccattgcgataattcctacatctatcgtaatagtcctgatacagtctaccttaccagtttaacaagtgtcagaattaagtttttctttcaccagctccctaagtcttcctggacccactgctcccacccctcactcagggtgtgtaaattacttggtctggggctgtggctgacctcccctaacaagccccagaaaaagaccctgtct

SEQ ID NO: 170748 - DNA, 228 bp, Homo sapiens
gggggagagagtccaggacagagtttcaaggagtaaaacagtaaagtcaagcaggatgaagcacaaataatgtcaattgcttttgatgatctggaaggtaagactggagccaagtggcagggtcagggaatgggagagagcaagtgcagtttacatttccagagagtttggctgagaagtgagaagaacagacactgagagggtatggaggggttcatggtcaagaaa

SEQ ID NO: 170749 - DNA, 464 bp, Homo sapiens
aggcacaataaagacagaacctgggaagaaaagcccaatgggagatagaagtgaaaagtgatattaacgtggcactggtaaaattggaaacaattgtacttagcctgttttcttgacataacgtatgtgaaaatttgaaactatgaagtgcttcgcaaatgtaaagtattaatgacattgccagtaggtcccctacagtgaagggatgccggagagtgctggagagactgtagttcctgagttaagcagaccaattctaagggaagagtgcagtggtagagattcctagtgggaaaagttagatgtgtacattgagaacaccaagtttatctgaactgcgagagcgaaaggctcgatcaagaccgtatctggaaagaaaagcccaatgggagatagaagtgaaaagtgatattaacgtggcactggtaaaattggaaacaattgtacttagcctgttttcttga

SEQ ID NO: 170750 - DNA, 375 bp, Homo sapiens
actatggatgtccagttatcgcccaacaccatttgttgaaaaaatgatcttttctccattgaattgactttgtgtctttgtcaaaaatcaattgaccgtatatgagtgggcctatttctgaactctccattctagctcgttgatctttttgtctcttcaccatacacagccagttgttcttgattactaacatagctttatagtaattctctctaaatcaggtagcacgagtcttccaactttgctttttcaaaattgttttagctattctagttcttttgctttttcatgtaagttgtagaatcatcttgttgattcttttaaagaatatttgcagggcttttaatgggaagtgtgttggaagatttgacttct

SEQ ID NO: 170751 - DNA, 316 bp, Homo sapiens
cagatagaccctcagtgaatgaagagaaactggcttgttacatcaggatataacaattaatatgaacatttgagattattgtgtcctttttaataaaattaggtgctattaaaacaaaatctggaaaattagggctctttctgcatgtgacagaaaacccaacctaagttaagccaagaagaaagcctgatggtttaataactgaaaagtctgggccaggtgcagtagctcacacctgtatcacacctgtaatcccagtactttgggaggtcaaggcaggaggatcgcttgagcccaggagttcaagatcagcctg

SEQ ID NO: 170752 - DNA, 425 bp, Homo sapiens
taaaatgctgatctggtatggccgcccttcatgatgtcatccaggacccaggctgtgttccagctagtttctctccattctagttgtttttctggctggctaggtccagggtgtttcaagaccatgccaacattccatttagcaggaagtggggaagaaagtcagggaggaaactccagatgggcagacactagcagtagtacccgctactttgctcacttgcccagagcgtaggtacctgagctgcttttaactgttcctggggctgggggatggagtgcttattttgagcagccctagtgggagcttctactatgagagtaaaaagagagtggaagtcaggaggtaatgggcagcctctgccctagggctggctttactaagccctggtggcttcataaccaggtgataaagcaggccacttc

SEQ ID NO: 170753 - DNA, 582 bp, Homo sapiens
atgtatttcctcacttgatctttggcatttgggagggagacaatgtagatgtttcatttccattatacacatgactaaaataaagctctgaggagttaaatgacgagcccacgtcacaccactgaatcttgaaggggtggctgttggaccaagatcttctgactctgaatccagtattctttccactaccccatatccagccagaagcaataagaaaaatatttgggaaaactaacactgaaggagccagcatgtctctttcttgttctctcaacctccaaaacaattcaccagaaatctctggcaagtttcataaatgtctgagtcacctttggtgcacagttgattctgaaaaaaactacacacacatatgcacacacacacacacacattgatatatgcataaaatgtattatcatcccagtattgaaaaatctttatcatgttccatgttcttctcaatgcagtatgtgcctataacctagttcggtaactatttgctgaatgaatacattaatgtttatctcccttatggctacatcttcttttacatctcagaatcattcttctatttcagtctgc

SEQ ID NO: 170754 - DNA, 380 bp, Homo sapiens
ttcaatccataggaataccccaaacctgctgagctaatctttactgcacagagggtatcctcagcatcgcccctgttagtacaggcaaactttgttccttcagatgacttattggctggtgtgatggcttccacctgtaatcccagcactttgagaggttgaggcgggaggattgcttgaggataggagtccaagaccagcctgagcaacatagcaagaccctgtctctacaaaagaaaaaaaagtgacttgtcataccggattaagtaaccgttgttctcaaatataacacttcagataagtctttggttgcataatagatttttttcaattatattgtagtaggaaaggggacatattcttattgaacctttataaat

SEQ ID NO: 170755 - DNA, 725 bp, Homo sapiens
tgttcctcctacctcggcctcccaaagtactgggattataggtgtgaaccaccatacccaggctcaaaaagtgaatttaaaaataagtaactgctagatagtattaaaatattatcatttggaacaagtgaaaaatattttcacgtagccaggctgagttccagaatgaatttagtttaattgctttgcttaattttttttgagacagagtctcactctgttgcccaggctggagtgcagtggcgcgatcttggctcactgcaacctctgcctcctgaattccagcgattctcttgcctcagcctcctgagtatctaggatcacagacgcctgccactatgtctggctaatttttgtatgtttttcagagacaaggtttcgccatgttgcctaggctggtctctaacccctgagctccggtgattcacccgcctcagcttcccaaagtgctgggattacagacatgagccactgtgccggcctgttttgcttaatattgattgcttttagtttcagctttcaatcacaaaagacaatcatgcagtagataattaagtgtaatatggattactttgaaacttagcaatgagagtctttttttttctttttatacaaaattcctctaaaatgggaatatttttcacataaaataaagggaaacttagaaaatgtgtctaagtataatggaagcattcaaatgtttgttttaagctttctaatacatt

SEQ ID NO: 170756 - DNA, 119 bp, Homo sapiens
aggccatgatggactagggtgggccctttattcagtacagctggggtccttataaaagatactcagacagacgcagcaggaggagtccacatgacgatggaggcagagcctggagtgac

SEQ ID NO: 170757 - DNA, 248 bp, Homo sapiens
tgtttcccaacacatcagtgtgtttcttcgtttctcaaaatttagcaacaaacatttactgaacacttcagaagaagacagtccctgccccgaaggacctagttgtgtacccagatgatagtagcccaagcagacaagagctgcattagaggtttgttcaggttataggggtaggaagagatctgtaatcctatctggtgagggcggttgtgaaggctgagatgtcagtggggtgtaaggggaacaga

SEQ ID NO: 170758 - DNA, 226 bp, Homo sapiens
tctaacatgagattttgggcaggacaaatatccaaactatttcaaggggtggagccagtgcctaggctgaacctataccgcatcctcaggaccaacagcccagggtaagagtccagctggtacttacctgtccccattctcaacatgcattctctatttctttcttcatgtctttctttcctcttttcaattaagactttaatttgtttgtttgtttgttttcact

SEQ ID NO: 170759 - DNA, 494 bp, Homo sapiens
actgtagatagatcatccagggtgcagggttgcccagaatgcagggtgggggatggatttcaggaaagcaacagaggaagtggggaggaggtggctgcagctgcccacgtgagcgattatggtgtcttgggaccagatagtggctgtggaaatggagagaaatggccactaggttggtgtcaaacaaacgacacttgcccagtcccacaaatgctttgtggtctctaggagccatggtcctctctggtcttggctcggtcagtggggagggtcactggcttggccttgcagggctggggtggctcaccagccccagacttgagggcatgaagcgcctgctccttgctggcatctggctttcttagcttgcccgcctggcctgggcctcattaacaccagctggggctcatccccagagtgaccccagctcctggcagcctgggtgtgacatcctgctcttggggctttagaggagtctgggggggggagtcgtg

SEQ ID NO: 170760 - DNA, 732 bp, Homo sapiens
gacacagtagaaacaatgacagattctttcacaggaaaatatcataagaatattcacattttaagaattaagcagtggagtgcataattagtaaaatttgaaaaagaaaaactagaggtaagaagacctattaggagatgattaaagtccagaggggaggtcttaaaaagggcagcttctcttcaaaggcctgagattagaagtgcagtctcagtctctttttgagggtataataacagcttcaaaaggcatcctagttgcttcctaaattccctaaggaattctaagcatttttctaaacactcaaaatcacttaggaagaattattctttctaaatatgggaaaataaattgcaaagtgggaaaaaaataactggttagtgtatatagatttttaatccacctttatttttaaaagttattcacttgctggagtttttgtttagtggcaccatactgtaacattttactttacagggctgcattttttatgatctgaagatttttgaaaggattttgtatcctttattacatgatacattctatctcccttattaatctgttgtcccttgaagtaagataatcgatgtatatttttccaccttctacattgttgaaagtgatgactttagttaatactatagcaattcaatgaaacctaacagcatgaaatcttccaaaattctcatgaaaggtactgacaataccttgcaataaatgaatgaaaactta

SEQ ID NO: 170761 - DNA, 418 bp, Homo sapiens
cggatacctgacagttatacctatactcagacacagccacagccctatgctgtgcatggccactattcatcggatgatctcaagacaccttccgagcgtcagctcactccccttccaccctcagctccaccctcagcagatgataatatcaagatacctgctgagcgtctgcggattccgcttccaccatcagccgatgataatctcaagacaccttccgagcgtcagctcactccccttccaccctcagctccaccctcagcagatgataatatcaagacacctgccgagcgtctgcgggggccgcttccaccctcagcagatgataatctcaagacaccttccgagcgtcagctcactccccttccacccctcagcggatgataatctcaagacaccttccgagcgtcagctcact

SEQ ID NO: 170762 - DNA, 249 bp, Homo sapiens
caggaaaagatctgcagacctgacatttagaagttccctccatcatgctgcagtgacagtcacccagtgataagctctcccacacacacagagcttccaaatatctgttgctaactgacatctgaaaaacgaacagagatcccactagaacaaagaaagccctaacgtgaaagacaaagacacgaccatcctaaccaatccaacaagcagattaaaaaagcagagaaaacaaagtatggatcagaagaa

SEQ ID NO: 170763 - DNA, 346 bp, Homo sapiens
gctgcttctcatgtcgccccctaagtgcagactagttctcaccctcagcgctctaaccactgcctctagaagtaaaataagtgtcctcttgcagaatacttctacttccttctcctcaaacccctccagcttagaatctcataccatttgattatattgatcactctcccaatgtttagtcactttccctcattctttgcagtctttacaacctgacttaactgccattattttgatgtctcatttaaattacttaccttctttgacatttgacctcgtcatttccaatgtacttgctatcttcagtatctagctattcaatctcatgatctcagctcaaaccacg

SEQ ID NO: 170764 - DNA, 376 bp, Homo sapiens
tgtcagctggctttaagttttgtttgtatctaacagaagtacccatctgatatgaccccagttgagtttcccatagcttgcagtttcagggggttacagctgttctaaaggcctcgtaggtattgcctgtccaggaatgtttcagggctggtttttgttttaattttgcttttatatccaccagccccaccacatcaagaaatacacagatttagtgccagaggttccttccatccaaacctgggtttccttcctccttttggtgaagaaggaaaaagaaaaaacaagacaatcgctcgcccagccaagtcagcattgcgttcatttccctaagccccatttcctcaggagggcttcctccccttacagagttgcc

SEQ ID NO: 170765 - DNA, 322 bp, Homo sapiens
gaaaaagctgcagttcagaagacggctgaaaatttaaacggatttcagaatatcaaaacctcttgcagattttttttaactaaaatcacataaatacatcaagaaaaccttgttgctttaaacataggtgaatggattctggttttgtatcactgtattaatactcaatttttgataaaacctgtgaataattcccttttaactataggcaacttgattaaacacaaattttttccataagattcatcttatataaaaagaaaattgtctgacaaatatatccaggcaaaatgtatgcttgcaattctgaagacctcactat

SEQ ID NO: 170766 - DNA, 348 bp, Homo sapiens
tggcctcaggggaaggtatcctgaggtcctagtgggtgactggtgagtcacacaaaagagaagtaagtcctgctcctctggagctttcaggctgcttatggtacagtttgggagatgcatgtttaaaattcaaatccaaatcaacctactccgaaatgctgggaatacatcaaggaacaagagtgaaatgacccctcccctccattcatatgtgaagaattcccagaaacaatgcagagggcaaaaggaattggcactgatggtggtacatggatgtgtggaagctaccagctctggagaagggaattgtttaggtaaaaacagattcctggagatggagagttctga

SEQ ID NO: 170767 - DNA, 826 bp, Homo sapiens
gacatttcaactagcctctgtcattcctctttcttcctcttcaatccatccctatcctattgttctgtttttctctcccacgaagtgctctgatcatgtcatttcctctgactaaagctctcaatggatctttgtaccaatttgggttcttaattgcaaacaacagaaacagactctggttcacttagtagaagaggaatttactgggatgacatcagggaactcaaagaattgacaggaagcctcaagaatcaggctcaggaagcaagcaggagccaagagaagctaggcagctagaactttagctaaatcctgtcccaagtgcagcctgattaaggggcttgggggctgcttcccacatggctaccaccaccctgagcacttgctgctgccacctctgggatgaattataaacagtcctcttcctccttgggtcacttgttgaagatttagagtcctgactgggagcattgatttggctgtgatcttcctgctaggggccaggtgagcaagtatctgacttctcactaagactcacattagggaggctccaccaacatatgaagggggctcagatgctgggcagctaaagactccagtgtgtatccatatgcaggttcctgagcattgaagccctccaccatatgccacaaacgatcatctccagttttttctcacttccacaccatgttccactgaagcatgactgtgtgcagttccctgagcagtcctttcctgcctcagcccctgtaatagctgggccccaaaggtggtccgccttgaatcatgcttcacacctgtgtattgtcccctccccttgaaaggg

SEQ ID NO: 170768 - DNA, 464 bp, Homo sapiens
agccccagctgagaaattatgaaggcgactatagacacatcaaaatctattaccagaaaagttgccttaccaggaaaccgtaatttatagtgtatttttttaaggtgggaaggacacatgggtatggtgtattttaaaaggatttaaaagcactaaagtataggcacacctcattttactgcattttgcttgattgtgcttcacagatgatattgcattttttacaaattgaagatttgtggcaactgtgttaagtgtgtagacatcatttttctaacagcatgtgctcacttcgtgtctctgtgtcatactatggtaattgtcaccagctttcaaacttttgcattattattttatctgtggtcagtgatctttgacgttactattgtaatcgtttgggggcaccctcaagctatgcccatgtaaaacagcaaacttaataaatgttttgcgttctgactgct

SEQ ID NO: 170769 - DNA, 439 bp, Homo sapiens
tgggagctgcaggggcagaggcagggagctgtcaggcattcagccagcaagacgcactcagtacccacttggggttcagaatccccctccctcatcttcagatgggccagatgtccccaaagccagcggcccctttctgtttcaccctgtctacagaataaacccccagtcactgggggtgggggaagagtaaggggagaggggaaacgagatttggaggtctagctgctgctgaaacagccctcagttcgtctttattttgccttctgcaaaactggcctggtgttgccagctccttttgaggactttgctaccggttctcagcatccctcaattgctggcttaggattcatgggtttttaggggtggggtgggattagcatgtccagctgctttccagtttccaaagttctgtccctatcatattgcctctgattta

SEQ ID NO: 170770 - DNA, 360 bp, Homo sapiens
aaaattataaaagttatttttaagatactcaagatgtttagtaaacctaagtaagagaaaacgtattttaaaactttaacagctagttctattgtgccttttttatataaaaattatcatttttagcgcaaaaagtagaacccttttattacaatctagtgagggacacaaaataaaacctgagtggtattgtgcaagtagtgtataagttctaacttaaaatatttacttattaaaaaaatgagaacaatgatatattactcttttgataatatatccctgtgccattgctgctgtaacaaattactgcaaacttcgtgtctgtaaacaacacagatttattatattacagttctggag

SEQ ID NO: 170771 - DNA, 563 bp, Homo sapiens
gagtttatgaaatatttgaatcctattccaagtttaaaacctttgacatacagagtaacaaacccatcacactcacaagggtgataactgatctcccagtagtcaatatgttatttctgcagtcttgatttaattttctggagtttctatgttatttctggagtcttgatttaattttctcaattctacttacccaagaagtgtttctattttcaagtactagatcaagtcctaattcctccagaaaatcatctttgattttaagtgtcttccaaactttaatggcaattattatctgtatcattcatttatctttcaacctataaaaattattctaagtttccgacttcataggcactaagtctcttggaggcaaggtttgtgtattacaacaatttccatttccagtgcctagcataaaggaaagcacatttataatgacagccaacacatactgattaatattgaaatcattttattattttaaaaggtaactacatacttttttatgcaatcccaaatattatgaagtgataccattaaatattggtttcctgaggccc

SEQ ID NO: 170772 - DNA, 257 bp, Homo sapiens
catgcaccttgatgcttgagtgggttttgtatgaggtgtaacagcaaaccggggtaactttattcatgactttccttagattggatgtctttgaagcaagaaagggagatctcctggaattacttaagagaacaagcatatttgttttgtgagcttgactgatggccggtagagcagttgagtgaaatctctaaactgattagggctttcgttcaaataatcttctaccgttttcattaatttattccttaatgcta

SEQ ID NO: 170773 - DNA, 500 bp, Homo sapiens
tgcccgcatgctgattgaaaggttacgaagaaaacacaggaagagaaatccaggctacaattgttatttgcaagttagtgactggtcctggaacctgacactcccttcatgggtcagcatgcccagagtttttgtggttcatttaccccagaaggacttagtaccaaacatttcacagatttccgttataaaggtctttacaaacacagacccatgcaaaaggcccaactatcaccttcaacaacaatgcaatggccttccatggccttacagtagggccaagtcagcaaggacctaaacagcctccagtgtgactttgtcacagttcgcgcacctggttgttaatggccttcacctgacataaagcaaattgcctgtcacggatcatctgagcaaaagaagtcaaggaaattcaagtaaaaggaggaaaaatgtatgcatatgtaaatgcttactccaaagtcacctcatctaaagctcttgctcagaaagcaagtcag

SEQ ID NO: 170774 - DNA, 347 bp, Homo sapiens
gacaatgataacatgtgactgtatgtggctgtcttcaaaacagcaatgatttaggcacaactgtggatctcagattgttccgtgagtttggtctgataagattgtatgcgtttcccaggggtgccataacaaagtgccacaccctgggcggcttccgccaccgaaatgtattttctcacagctctgaggtcgaaagtccaagatcaaggtgtcagcagggctggttccttttgaggctgtgagggaggatctgttctaggctctctctcccccagcttctgggggctgctgcagtctttggtgttccttggcttatagaagcatcatcccaatctctgcttttgcgt

SEQ ID NO: 170775 - DNA, 467 bp, Homo sapiens
agcatggatgaccaagtgtcatcatatgctcagcattataaacatgtgcatgacagttagcacatactgagtgcccatgagtgtgcatgtgggtaatgagtgttttcttgttgttcagcagaggacgaggtcatctcattagtgttgggggaggaagacaaaaaggaggctctttctggaaagatgggggttcttttggaaatctggatgtagggagaacagacagagactttctggactggggattgagtggataaagtctcagggtcaagaagagggaacatggggagttcagatagagtgtaggtgggctgggcacatgctgggcccccagaagatgtgggacagccattgatgacagtgtctccacttgggtgtcacctgtatcagtttcctagggttgttgtaagaaattgccacaaaggtggtggctttgaacagtaaaactggattctctcccagttttg

SEQ ID NO: 170776 - DNA, 353 bp, Homo sapiens
cactataccatagcctctgtttagaaaggtaagcatttatagctattaagagaagtgttagtacagtgcttcattcatttaatattaatcacaaatattaagcatatttattcatcattgagtacggagaggtgaataagcagacatgatctatatcctcatgaagctgacagttcaatggggaaggcaacagtaaacaaatataaaaataaccacacagtttgataaagtcttttaaaatattacgtgttgctttgaaaaaaattaggaaaggaaacatactttggacagagactatttttttaatgaagtgatgtataaactgaggttaatcgaaaggtgtggctggtgta

SEQ ID NO: 170777 - DNA, 354 bp, Homo sapiens
aagacacaatctaccaaaactcacacaagaaatggacaatcagcatagtcctatattgttaaagaaactgaatcaataattaataactttccaaaacagaaagcaccaggcccagatggattgactggtggattcttttaaacatttaaggaagaagttacagtcagccctctgtatctgtgggttctacatctgtggattcaaccaaccacggatcaaaaatatttgaaaaaaaaagaaaaataacaatacaactataaaaatagcatatataaaaatccaggatagtagctatttacataacatttacattgtcttaggtataagtaatctagagatgatttacaatataca

SEQ ID NO: 170778 - DNA, 132 bp, Homo sapiens
caggggtgctcaggggagcccacgtttacagctgttggggcactgatgctctcccccattgcaccctagggagccctggagtcccagggaggtgggtgcttcaggctaccccttcttcccccatccaggcac

SEQ ID NO: 170779 - DNA, 333 bp, Homo sapiens
gccttgataggaaaagacagaagacactggctggctaccagtcttttggttgcacagaaggaaggcctgggcaagaaaaatgcttttttttggactggttccatcaatgctttgtccctgaagtcaggaagtacccttgccagtaagggactgccttttaaaattcttttcatactggacaatgcccctggtcaaccataactccatgcaacaatgaaggcatcaaagtagtctacatgtccccaaacgagacatctcttaattcagcctctagatctgggggtcataaggacctttaaggctcattatacactgtagcctataaaaaggatt

SEQ ID NO: 170780 - DNA, 295 bp, Homo sapiens
gatactctacagagggtgtaatagatgtgttggggaatcacagaaaagagcaaaaacagtttatgccaaacagattatatagtggagtccaggtgattaagtacacactcatgacataactgaaaggtaattattggggtctctagatcagttttttgggggcagggcacagaatcttgttctgacacccaggctggagtgcagtggtgcgatctcagctcactgcaatctctgcttcccaggttcaagcgattctcctgcctcagcctcccgagtagctgggattaaaggcagg

SEQ ID NO: 170781 - DNA, 192 bp, Homo sapiens
tcagcaaggcccagacctccaacacacaccaattccccattcatcttctcaaataagtgtggctcttctccccttagcccagaacatccccaggccaggagggacacagtattccccatgttgcttctaacctttttcatctgtactttcccccttcactcacctgtcactttctcctcagtcacttactct

SEQ ID NO: 170782 - DNA, 973 bp, Homo sapiens
catttttcctggacttgttctgcagagcgctcagatttgaaagccatttctagcctttgaggattaccactgtcctcagccaaactgcagggactcctaagtagatcagagctcctggaactttctcatcttttcagcatctcaaccctgtggaatcttttaactcccaagtgctaccaggatatttgcgatgtactctggaatccctctggaaggagctgtcctcacagaatgaaggattagaggagttaataaataagcaaacccaacctttctcctggggaattgtgatcctctctagaagctaggctgtggacctgaatttgcaggagaagccaggagtcatctgtgatgctctgctgatagcatagaacagccctggcagggccaggactactgcacttgcactgcccttactttgaagcagaagctggtgaacatggggggctacactggggaggtgtgtgtcagggccaaggtcctctgcctgagtcctgagagcagcgcagaggctttggaggctgcagtgtctccgatggattaccctgcgtcctatagttttgcaggcacccagcacattggaagccctgctgcagtccctcgtgattgtcttgctcggcttcaggtctctcttgagtgacctgtgcagctatgaggttttaaatctgctcacagcccagcagtatgagatattctccagaagcttccacaagaacagagaattgtttgtccatggcttacctggcttaggaaagaccatcatggccatgaagatcatggagaagatcaggaatgtgtttcactgtgaggcacacagaattctctacatttgtgaaagtcagtttctgaggaatttcatcagaaccctggatcttgctttccaagtgcctgtcccgccggcgtcgggtctgagcggctccctgtgctcggatggtttgtgggcaaccgctcctttcccccaccgccgcagtcc

SEQ ID NO: 170783 - DNA, 500 bp, Homo sapiens
taggcacacacaacttcacccagctaatttttatttatttatttattttttgtagagatggggtcttgctgtgttgcccatgctggtctaaagcaatcctcccacctcaccctcccaaagtgctgggattacaggcgtgagccactgcgcagccagatttgggtatttttaaaagatagctataaatgaacgtggccggagttcttctttagaaaatgaaccttgaggcctcaagaaactatagtaattagtgggtctgaggcccaccaagatccaatgaattgaagtgaactgctcagagttttatacccacagagagagcccgacctattcgtctcttcttgttcttgccagtgcttgctctctgtccatccatacctcagaatgactgacttatctcgacggccaaaaacaccactctcaaaatgccctagtagattaaagaggtacagttatggagatgtctattgaccttttcttaaattttgtgagagaaacaa

SEQ ID NO: 170784 - DNA, 445 bp, Homo sapiens
cacagagtcttgctctatcgcccaggatggagtgtcatggcacaatgtcagctcacggcaacccccacctcctgggttcaagtgattttcatgcctcagcttcccaagtagctagggttacaggcatgcaccaccacgcccagctaatttttctatttttaatagagacggggtctcactctgttgctcaggctggtctcgaactcctgacctcaagtgatccacccacctcagcctcccaaagggctgggattacaggcccgagccacgacacccagccccttaatttttaatttctctactattcttaactacttgaatatttacattgtttataattggaaaaaacatgttttccttggaagaaaaagtataaaacaaagagatattttaaaattagaggaaaatagctttcatccctgaaactaaactgttcgtttcagca

SEQ ID NO: 170785 - DNA, 469 bp, Homo sapiens
aggatctagagatggatgattctggataatctgggtggacccaatgtaatcacaaggggccttactgaagggaagcaggagtgtcagaaacaaaaggaggtgtgacaactgtgtcagaagtctgagtgacgcaaggccatgagccgaggaatgcagacaccctctagaaactggaaaaggcaaggaaataaattctctcctggagcctccagaaagaatgcacccctgttgacccattgtaaactcttgacctccataattatgagacaagtttgtgttgttttcagtcactaagtttgtggtaagactgcaaattatgaaacaactacaggaaaacattggggaatgtctccaggacattgttctgggcaaatatttcttgagtaatacctgacaagcacaggcaaccaaagcaaaaatgaacaaatgggatcacatcaagttaaaaagcttctatagcaaaggaaac

SEQ ID NO: 170786 - DNA, 346 bp, Homo sapiens
tatagagatgaatttaattattcaagaacacgtagctgattactgaagcagctgtaacttgagcaaggtctaggtgactttagaatcataactgttaaaccactttacatcaccttttctgtattatggtctgtctgtgaagcaagaccaaaacacatgggcagtgaatgtgtcaatacctcattcctcttgctgcttcattgcttagagttatctttgctctctcaccaattcttagcttccaactagttttaaaattttactcattctaccaatccttccaacccattccattctgttcccactgttgctgacccaattaagtactcaccacatttacctagac

SEQ ID NO: 170787 - DNA, 269 bp, Homo sapiens
agaaaaagggagtgccaaaagctgcaaataggttatataataaggtgaggagggagaatggaccagtcgatttagcaatatggaagttattggtgaacttgaaagacaagtttggtggaaaaagcagagtggaagcttgatccaagtggatttaacagaaaaaggaaagataaaaaattattttgaaaagccgttttaaagaggttgctgtaccaaggagaaaaacaataaattggttgctaaaagataagtggggtctaataaattct

SEQ ID NO: 170788 - DNA, 427 bp, Homo sapiens
aagaaagctatccggttccatgactaggttgtgttctgtggcacaattgcctttaagaaaaagagattatctttgatgggcctggcctaatcaggtgaggccttaaaaggaacttgtctcttcctgaagagatttgaagtatgggagagactcaacccaacagagattctccactgatagatttaaagatggaggaagccatggaaaatggcaactagtatcagaaagccagtaagaaaacaaggacctcagtcctccaactataaggaactgaattctatcaataccctgaatgagtttggacatggattcttctccaaagccttcaggtgagaactcagcctgactgctaccttgaatgtgacaccctgagcagagaacccaactgagctgtgctggacttctgatctactgaaccgagagctaa

SEQ ID NO: 170789 - DNA, 308 bp, Homo sapiens
gtgtgctgaaatggaatgatctccatgatattgtgaaaaagtaaattataaaacaggagacagagtatgctgccagttggagtggggggccttgggtgcagaggaagagctcatgcatacactgcttctgtgtgcttagaatacctctggaggaatgggaaagaagctgctgacagtggttgtcttcttcagaagggagctggctggctagggctggagtggaaaggaaacttactttttaccatatacccttctgtactctttgaatgttttagtcatatgtgtgtgctgtttgaatagtgccccca

SEQ ID NO: 170790 - DNA, 544 bp, Homo sapiens
ggtcactggccaaagagcactgtgggttctcggaagcacctgctcttccatcagctgtaaaccggaatgataaccagctcctaggctttggtttctgaatgtacgctgcgaacgatgcactgccttggcctcatggcaggggctggggaggcccgctctaccctgtaccccgacccgggcccaaagctgagcttgaagggccccctgcttggcttctcgttggacctggagctcacccatgaagccaggactcacgatgtggcgatgccacttgcgcatctatccccacgggtacacagagaggccactcgcccccaacccctctcctggaatgcaccatatccagccttgtgagtggatgggtgcctggactccctgggcccctgagtttggaggtggaggctttggcttcacgtcttcctgaaggacacctgttctcggctcagctccctccatggatttgggtggaaagggaacccggactggagtcagaagccctggtggggtccactggctagctgttgaggctgggccagtcacttgc

SEQ ID NO: 170791 - DNA, 313 bp, Homo sapiens
gttctcagacagatgactatatccttccctgggtacttgcagggtaagcacatcccctcgaaatagcagcagctctaaacatgaaattcttcctggaggattttcttactcttgagttctattctaccaaattttttgagcacttactgtcaggcattcagaatgtgagcaatgacaataatttacctacacttttgcacttacagtatgctgggcccagttgattctcaaaacagttctgggaattagctataaaaatgcccccatcttacagatgaggaagctcaggctcagaaaggcaaaaaaaaaacca

SEQ ID NO: 170792 - DNA, 103 bp, Homo sapiens
caccccaaacaaaactcattatggttctctcttgccttcagtatgtcatagttccctcttgcccatagcataatttttacatttttcaactctctggttacaa

SEQ ID NO: 170793 - DNA, 308 bp, Homo sapiens
caagatcctaaacagaaatggccacagtgggtttacacctgctaaagcagaaagccaagcacccaccacaggtgaagccattctggggaaacaaagagtgggtctgggagactcgcaagagaatccgaccagcggcattagaagaatgtcttgatcgtgactatcttcactgatgagctgagcattttccagaactctctgccacagaattcagctcccatatgccctggggctccccagtaccccaagaaaacctgtactacagtgcccaccacatactccagtaatttacttgtgtgtttgtctcc

SEQ ID NO: 170794 - DNA, 374 bp, Homo sapiens
tgagacagggtcttgctctgtcaccaaggctgaagtgcagtgttgttgcaatcatggctcactgcagcctcaaactcccaggctcaaatgatcctctagcctcacccttctgagtagctgggactacaggcacataccaccacgcctggctaacttttgtattttttgtagagatggcatttcaccatgttgcccaggctggtctcaagtgatcctcctgcctcggcctcccaaagtacaggggttacaggcatgaaccatcacacctggccctctttatccttcataattttccttgctctgaagctgactccatctgaaactaatacagctttattttttctttcatagagatgggggggtctcattatatt

SEQ ID NO: 170795 - DNA, 293 bp, Homo sapiens
gcgactctgtggatcccctcccaaggatgacgacatttggatgtttgaaggttgactgttagaagaaaagggtacaggtagagagtgccattatagattgattaacaagtttatcttgatcttgattttctgctttctaatcttctaatccataattataagccttgtaagtgtatttacttctttattttggaaacttctagaaaaatagatgttacatttgtgacgtttaaatatatggaatttgatgcctgacatattccttctgcctagttgagattatggcccaattc

SEQ ID NO: 170796 - DNA, 851 bp, Homo sapiens
ctgggatttttaagaaattgcctaggagagagttagttgaacttaaggtggtgtctaattagagcaaagtgccttccattttaacttcaatgaacttgccacgttggtctgatgataacccaagagtaaggagtcttggattctgatcccagctcagcttctagagacttggtggttttcaaattgttcttgagggactccttcaactgaagggctccctagttgccaagagtggttggttctgagtcgaggtggctttgatttgtcagctttggtcagagaattcaggcagggggcaggaagtccgtgttctgtagttgttttgttattttaccctttttataccttccattcaggagaagtttattagatgaatccgtgtccagaaatagagaattagttgccttcatcctttatattaatttcccttgaagtataaacagccaaagaagaaaagtacttgtgggagaaagggggttcagatcctcaaatttgaaaatagttttcaacttcaggaacgtgaaaggtgactgttaaccaaagtctgagtctcaggagctacttcatgtggtatgcttttacctgatgttatgttttagatatggctcattcattcggcacatgtgctgggtgcctactgtttgctggacactgcggagcctggtggatgctgggggaagcagatgggtctggtcctggcctccaggagcttactagttaaatgtgggagtcattgctaatcatttacactgtgtgaggagctctcattgcgggtgggagactgattgcctgcagtaatggggagaggatatgcctggttccctcctctcactccttgcttggacttttgt

SEQ ID NO: 170797 - DNA, 316 bp, Homo sapiens
gctcacccatgagcgctttaaccttgtacatgctcaatatccttatgaaatgcaatatcttatgatcctttaaataacaaatgaccttattcccttttatggggtcattaaggcctctaacagtccaggtttaaatcccagctactactgtgcatcttaatttactattcatatgtgaatctctctctggctcccaattactatacaacagcaaccggctcatcagattatccccatcggaatgtgtctgttaaagacatacagtttacatctgagggccctaattaaagtcacactactcgatacaccttgaaca

SEQ ID NO: 170798 - DNA, 691 bp, Homo sapiens
tgaattacatggaggacaagctccagctgactttccgtaaactcgcattaggattctaataggagacgacaggagcaggtggggataatgagctggcggaaggggctgcctatcacactgctcggtggcccctctttcacccccactttgcctcaggcattttctactcagctgtgaccttacttatggtgatgccaatccagtggtcaggagcgaggcgcccagcctgtgtctgaatcctcctactgaccctggggatccgtgcgacttgatcttagatattggtggtgaagcgccgctctccttgacagcatccaggaaaggtaattacctttgccaaaatgcaagtggaagttcaaagcctcagccttgaagagtgtccctggagacttccaggcccccaatgtgaatgtgaagccctcctgcccagtggggcaaggcgccggattgaccttcgcctgagtgggagggcagtcgctgtttgggtccacgttaggggcggtccaggtcaatttaacttgtcatatgccacgggaagacataagaagccaaacccacaccaaaacatgaaccgggggatggaatttattgctcctgtatcagctcccaccaaatctggtgccccgtggcattttctttctcaaggtcccacggatgcccagagagcagtcagaatcaggccaggcaccag

SEQ ID NO: 170799 - DNA, 754 bp, Homo sapiens
gagtcaaactccctctaaaaaaaaaaaaaaaaaaagggccaggtggcacatgccggtggtcccagcttcttggcttggaggctgaggtaggaggatcgcctgagcatgggaggcagaggttgcagtgagccaagatcgcaccattgcactccagcctggatgatagagtgagactgtacctctaaataaccaaaaccttgattacagccatggggtgggggtgggggtcaggggcgtctgactatggctggggaactcatttggtttttctcctctcttatttttttgggtagagacagggtccctttgttgcccaggctggtctccaactcctgggctcaagcaatcctcctgcctcggcttcctaaagtgttgggattacaggcttgagccaccgtgcctggtctgttttttttttttttttggcaatagagtcttgctcgcccagggtggagtgcagtggtgtgatctcggctcactgcaacctccaccttcagggtgtcaggcctctgggcccaagctaagccatcatatctcctgtgacctgcacttatacatccagatggcctgaagcaactgaagatccacaaaataagtgaaaagagccttaactgatgacattccaccattgtgatttgtttctgccccaccctagctgatcaatgtactttgcaatctcccccacccttaagaaggttctttgtcattctccccacccttgagaatgtactttgtgagatccatcccctgcccg

SEQ ID NO: 170800 - DNA, 816 bp, Homo sapiens
atctgaccagggacatacaaaaggattatcgaggaaagcttctgttgtaaaggggaaacctttaaagaaaatcagaattttattaaaacaaaaataagctcacattatactgttgttctgcagcttgctgctttcacttcataatgtgtctcagagatcttttcacgtcagtacaagtggacctctcgctttttttattatctgtgtattagtatttcatatatggatgtaccataatttatgtagcattttaagttgtttccaacttggcactattaaataattgctgttgtgaacatccttgtatgtatctacaaggtgggagatgcttttgcacatgtaaaactgtttctgatgcttgataacctagaagtagaataattttgtcagagattatgaacattttacattttgttggacatttcaaactgccatccagaatggttatactgatataatcacatgaattgagttaattcatttcctgtactatcatcagaaaatgttatttctttttatttttgtcaattctatggccaaaaagtaccttcttttaaatttgcaattcttcatgttagtgaagatgagcatttttatcatatgcttataggccatttctatttcttaggtgaactgctcattcttatcctttgtcactttttactaggttgccttccttactgatttgtaggagttctttaaatgttatggaccccttgtctataacatatgtgcaggtattttctttcaggcttttaattctacaggtttcaaattttgctatggttaaatctttcgttcttttccttgatgctt

SEQ ID NO: 170801 - DNA, 426 bp, Homo sapiens
caggaccttccaggtcgccccctcggtccccgcacccccaggccgcccgctcaccctcgtcgagtctcgctaatccctcctgatcgcgacccccgcaagagggagaaacgggtgtttccaacccctttcatgggggagaggaagccgcggggagcccaggaacagcgaccgcagcaagatctgcacccggagcctcaggaacagccccagaggccaaaactgcaccctgcgaaagagcagaaaacaggaccaggaacagcagaaacctccctgcaatcatctttccattagtcaatgctgatttcctctcccgaaaccaggaattcacttcccaccccagataacctaatataatctatatatataaatatataatatataatgttcttaaattattcctgatttttttttaaccaagctgccaag

SEQ ID NO: 170802 - DNA, 814 bp, Homo sapiens
gctgtttctttcagaagctgggctgggatgagaattttgggcaacctccttcgacgtgggggaggtcccatttccacttcatcactgttggagatcatggagctaagaagcagagccaagtccacccatgtccttggcagagatgacaggcacacagcttgtgcagtgccagaatatcattagcgtttcccttctttagtggtttgcttaaatttaaatccctggtaatctgtagaaccttctcctaggaaatggtgaagtctattaggagccacttgtgactccatgacctgttaaaaccagcaatgtgagtattatttggagtaaatttgttccacgtcaagttctggccttctgatgcaaatgcaaaggaacttagtctgttatgaacccaggttgatgacagaccagtccttgtggaataagattccctttaaaaactctttagccagtcgtgacatcaaccctagacctgtctgccttggcatttgctgtcaacatctgctgggctatgtaggcaggttaatcctccacttctcatgtggttgaaccagtgtgttttttggtaaaatggtgattgtagataagattagttccctgatcccctgccccctgtcccctgcctcttttcccaattcccttccttatgctggacttttaaagcttaaaaaaaatccgattgaatataaatgcctaatttcattctttgtgaaatggttgcttcctcctgattccctaattgtgctgtgttcgtgtcttgcactggaattcaacattcccttctccttttgtactgtgttgtgcttgctgtctc

SEQ ID NO: 170803 - DNA, 696 bp, Homo sapiens
  misc_feature (661)..(661): n is a, c, g, or t
  misc_feature (668)..(668): n is a, c, g, or t
gctgtttctttcagaagctgggctgggatgagaattttgggcaacctccttcgacgtgggggaggtcccatttccacttcatcactgttggagatcatggagctaagaagcagagccaagtccacccatgtccttggcagagatgacaggcacacagcttgtgcagtgccagaatatcattagcgtttcccttctttagtggtttgcttaaatttaaatccctggtaatctgtagaaccttctcctaggaaatggtgaagtctattaggagccacttgtgactccatgacctgttaaaaccagcaatgtgagtattatttggagtaaatttgttccacgtcaagttctggccttctgatgcaaatgcaaaggaacttagtctgttatgaacccaggttgatgacagaccagtccttgtggaataagattccctttaaaaactctttagccagtcgtgacatcaaccctagacctgtctgccttggcatttgctgtcaacatctgctgggctatgtaggcaggttaatcctccacttctcatgtggttgaaccagtgtgtttttttggtcccccccgcccccacccgcccccatcccaccattagttcccccttgattcccccttgcccccccttgttccccctgcccttcttttttccccnaaattcnccttttccttttattgccttggaacttt

SEQ ID NO: 170804 - DNA, 201 bp, Homo sapiens
actaacctactgcacccacagccgccctcatctcagatgatggcagctctgcctccagctgctctgctcccagccctcagagtcatcctcagctcccctctcactctgcccagtcctctagcaaggtctgtcaggtcatctttaaaacatacccagaatcggccaggtgcggtggctcacacctgtaatcccagcactttg

SEQ ID NO: 170805 - DNA, 376 bp, Homo sapiens
  misc_feature (31)..(31): n is a, c, g, or t
ctggtcgttcagaggatcccgaatctcgacnagttgtgcatatgggtgaggcagaagataggcattatgtgaaaagcttggttggtaggtgttatgggttaaattgtgtctccccccaacccaaaaaaaaagatatgttgaagtctaacccctgtccctcaaaaggttcacctttttgaaaatagggccattgcaaatagaattagttaacttcaaatgaggtcatactggacaagagtgtgcctcaatccaatatgactggtgtccttacaagaacacatccatatctcttcctaggttctcgtggttgactaaaaatcttcagtgttccttggcttgcagttgcacaacttgtcgagattctgtgccttcataa

SEQ ID NO: 170806 - DNA, 720 bp, Homo sapiens
gataattactctgccaaacatgagtaaaagttatctggtacataaacattctatcagaggtgaataaatagtgacatttcctccccctgcataagtaagcaaaagcacagaacatatccagacttatttccatatactcatcattaaccaaccaggtgaccagtctaaaaagtgactcaaaatatttgtgtgcatatgggtgaggcagaagataggcattatgtgaaaagcttggttggtaggtgttatgggttaaattgtgtctccccccaacccaaaaaaaaagatatgttgaagtctaacccctgtccctcaaaaggttcacctttttgaaaatagggccattgcaaatagaattagttaacttcaaatgaggtcatactggacaagagtgtgcctcaatccaatatgactggtgtccttacaagaacacatccatatctcttcctaggttctcgtggttgactaaaaatcttcagtgttccttggcttgcagttgcacaacttgtcgagattctgtgccttcataatcacattatactctccttgcgtgtctgtctttacatggatgtcttcttgtaaggacaccaatcatattggattgaggaacactcagtccaaatatcgtaactaaatataggatgtcaaatttaattcaacattatatatgggttatatccaacaaagagaatcatttttctttttttctttgagatgagg

SEQ ID NO: 170807 - DNA, 243 bp, Homo sapiens
gaggcacatttatgtattcagtttgacaatctttttcttgtaattgatgtacttattccatttaactttaataaaattatttatacatttggtttactatccgttatcttagttttgacttctatttcaacaatttatattatgtacctgtattagtccattttcatactgctatgaagaaatactcaagactgggtaatttataaagaaaatgagttaatgaactcacagttccacatggcc

SEQ ID NO: 170808 - DNA, 438 bp, Homo sapiens
caacagggtcttgctctgtcgcacaggctggagtgcagtggcatgatctcggctcactgcaacctgcgattcccgggtggcaagtaattctcctgcctcagccacccaagcagcctgtagtccacaggcgtgcgccaccatgcccagctaattattgtaattttagtagagatggggtttcaccatgttgtccatggttccatggctggtctcgaactcctgacctcaggtgatccacctcagcctcccaaagtgctgggattacaggcgtgagccattccgcctggccagcaggggctgttttgtttcctgctttcattccagggctggcacatgggaggcactcagcagataatgtatctgagttcatgaggcccctggaggtttgcttgactccaaagaccccaggaccaccagggtgtgagaccatggccagga

SEQ ID NO: 170809 - DNA, 194 bp, Homo sapiens
aggttcagggttggaggaagagtaggacaaactatgttcttaaccagggtccctgtttttaccaagcaataaatagacttatctgtttattgtgcaatccacagtggttagacttatctcaacctttcatttcctcttccctataacatgcacactatacaaacctaagcgtgaatttaatccctgaaagatca

SEQ ID NO: 170810 - DNA, 103 bp, Homo sapiens
gcccttttgccgttccattcctctctcttttcctctcctccagcttccaggcttctctctctccaccattaattccctgtgcactttctctttcccatcctgt

SEQ ID NO: 170811 - DNA, 540 bp, Homo sapiens
ttaaataagaaagggattttatcacgtggacagcaaagtgtgttcctttaaatgcaagggcagttcatctaggcaacagagctggtactggactgatgctggcaaccattctccctatctcttgccatctaattaaaacttctctcttgacatctactttatttctctgtctccaacttcttggcttctttatttctatggcagaatattgctgctacacagcatccagatttatagttctaccatctgaatcacaactccatatttctttggtgagaatctgaccgagtaatgttaggtgagttttgtgatagtatagagcagagcccctgagcacacactcaaactaaactgcctgggtccaatcctacctcacttgcaattagctctatgactttgggcagattacttaatctcaaacctcatttttctcatctgtaaaattggagtctgcaagagaaagtagtccggactgaaatcggccagaagtccctctcatgttatatctaaagtaaacctatctttaactgccaagctgtg

SEQ ID NO: 170812 - DNA, 121 bp, Homo sapiens
aaagaaactgtactctatgtcctctccccactccaggtaggcactcccccttaaacagcctcatggccacggaaggaaaatgcagctcctttctgctttaacccagttcttctcacaattc

SEQ ID NO: 170813 - DNA, 608 bp, Homo sapiens
cccaagaaagtgaaaggacaactgagagaataggagaaaatatctgaaaaataatctatctgataaggaacttcttctcagtataaagaacgtttaaaactcaataaggaagagagaatcccattgaaaaataggcaaaggatctgaacagacatttctccaaagaggacagacaaatggccaataagcacaggaaaagatactcaatgtaatatcaggcaaaagcaagcaaagtccacactacgataccacttcctaatcagagaataaaaactgtgctcaaaaagacagtaacaagtgttgacaagaacgtggacaaagtggaactctcctgtgccctgccggtgggaatgtcaaaatagtgcagccactttggaaaatagtccagcaattcctccaaaagttaaatagtatttaaccatgtgacccaggtcagggtcctaatatccatcagctgacaaaaacaaaacaaagcactagcaacggggcaaagaaggacgcactgacacactaccacatggacgcacctcgaaagactcatgctcctgaaacagccagacacaaaaggccacgtgtcgtatgactcatttaatctcaaatgtctagag

SEQ ID NO: 170814 - DNA, 536 bp, Homo sapiens
cctaattttgccttattgtcagtcactacttaccgcagcttggggccctcccaggaggctaaattattatcaaaggattagggagatgtagccttgcagctctgacatttctgattacttgtctatgccagaacactaattagctgtgactaattaagaaaaatgttcctgccatagaaaactatttaaaagaactgagaagtagaaaagcaattcaaaagctgagcagtgctcagatttgctgatgctctttagatttccaccagagccttaactcacctttaattgtgctcagaattaaaaaaagaaattccacatgcaaactgaccagaggattttgcttgaataggaaaaagaaaatgttgatcacctaagctctcttaccaatggtaaaactgtctttgatgaatggaaggtgacacaactttcattttcgtggagaaatttttctaaacaccaattgcataatgtatatttgcattcatccacctgagccagtaacaaaggcttaagtcactcaagaaattagaatattc

SEQ ID NO: 170815 - DNA, 396 bp, Homo sapiens
aacttaggggggcaaagagggcacaggtaactggaggatgacaaagagttctttgggaaaatgccactgagtttgagggattaactagaccacgagtggggagctcccggatggaaaggatagcgcgtgtcgaagctgggaggcagggcccctaccttctgcatcagcctgttgggggcaccggagacagccaggatggctcaaacacagcgcgcagagtgcggctgcagggttgctgggtcagactgtgcaagacccccttggccactgtaaagtttggatctcagtttcagccactggaggatttaagcaaggaggtgacctgatctcctttacattctgaaaagcttgctgtagttccatcgtggagcagggaccggggaaagcagtccctca

SEQ ID NO: 170816 - DNA, 345 bp, Homo sapiens
ccgtgctttttaatattaatattaatagtaatcagaaataaaaatggttgtgcgtcattttttactttatataaatggaagttgtacgttaactgtttggtccatgtccttctcacctttatcctgtgcacatgtagacatcacagtataccctaagggctgaaaggcaagcttcacaacagatgcaacccattttgtatgttgaggttctagctatcagtatatatcactgttattctccatccaactagggagacaaacttgagagataaatggaaattaaaagtttgtccgtgagccactgcacccggccatgcaaactcgcgttttaaacagaagaaactt

SEQ ID NO: 170817 - DNA, 341 bp, Homo sapiens
cggcctgatttccctcacttgatgtgtttctttgctgctaccagaaagggaaatcatgggagtgaagcctgccaggaccctcagggtaagctggcagcaggctctgcagctgcacttagttggggtctgctcagaccagtcaggaggaattcaggaggctttcaaagtcccaaggacatcctggctctgaaaggttttcttttgttaaaaaatgcactttgtgctgtgtgtggtagctcgtatgtgttaccccagctattcaggaagctagggcagaaggattgcttgaggctaggaattcaagactggcctggatgacagagtgaaaccctcatctctta

SEQ ID NO: 170818 - DNA, 373 bp, Homo sapiens
tccccctgcaaagtgggacaactcctagattaaagattgctagaaaatacaatgactaagtgtagtgtgattcattactgaatcttgaattaaaaagaatgtaaaagaattttttaaaaaatcttaaagtataaagggcattactgaatatgaaaagatgatgtgagatcatatcattgtctgcacacatatgaaagaaagataaagcaaatacgggcaaatgttaacaaccgatgaatgcagggaagggtatgtgagtgttcactgtgctagtccttcagcatttctgtaggtctgaactttctccaaaataaaaagtatctatggtgaggaaacggtgcaggaaggatagaaagaggagattatcaccaaa

SEQ ID NO: 170819 - DNA, 753 bp, Homo sapiens
tatgtcaaaaggtcagactgaacacatgcatctcactgggctcagaaatccactgaaaccacagaggggagtatttaaaacacataacccacaagtatgaggatggtgacagaggagtcaggagcaatggcattcctaagctagaagtgggtgagagctgtcactaagttagggaaggcaaaatactacgtggcgacttggcgaagaggagagagttcccaccaggctgactccagaaccgcagaaggctgagaaccagcagcccagagacgggagacctatatcaaagctgcctggggaacaactactgaagaagcccttaacgccccagtgctctccccacatggtggagggtgaaagtttttgtttttttttccttctgggactctgcatagtcccagagaaaaggcctaagcacctcatccccaaaaacaacctgaggaggccgttggaaagctccgagttgacaagtctcatccacgcacatgctcggtgcttccaatcggtgatcaagaccactgctcttcatccagagcaggcagcagggattcccaggtatccaaagaaaccaaaacaggcggtgtaatttaggactgactaagtaatggctcggccacttttaagtgtggaagcaaaactgaccccacagatttagaaaactgtaacactgcttattgggagaaactagtgtcaccctggctagttctgctccccaaattcaaaggtaaataaacggttgagcatgtccgatca

SEQ ID NO: 170820 - DNA, 649 bp, Homo sapiens
tcgctcctctacctccctgcaaatcagctggtggaatttgttcctcactgtattggtttctatcttggtcaccttaagacagactattctttgttcacacaacactgacttgcctaccaatggggagcctaataaaattttatgctgttataggacttttctgtgtcatcttcacctcctggtcttgcatcatgttgagggcaattacacatttatttattacacatcctcaaatataaaaccacgaaaactataccaaagacagcagcttttcaatcatccatcaagatataccagtttcaaaagacaatcctgagccacatcctgaaggtcattactcacgcgcgaaagctcatttcaaaggcctccttcatctcttgatattgtcagatagtgtgtgtgccaaagtgctgcttggggatctcaatagctccatgttatctctctctgggcatgattagtgtgaggtgcgggcaccaatttaggctccgtctacacaatgccaaaacagtccaagaagaaatgaaaccatccatcacaccactggtggttttagctacatgatgccaaattgtgttgactcatccgccccctgccccacaactgcattcactgatgatttgagttcactttgagtatctgacaatga

SEQ ID NO: 170821 - DNA, 170 bp, Homo sapiens
ttatttatttataattatccagccgtggtagtgcttgcttgtcctcccagctacttaggaggctgaagtaggaggatcgcttgagcccaggagatcaaggctgcagtgagcatgatcatgccactacgctgcagcacgtagtgctgagtgacagaacaaaaccctgtttc

SEQ ID NO: 170822 - DNA, 228 bp, Homo sapiens
agacatgtgcatttctttgttgtgagtttgtctcttccagaattctgacagctcagagtctttggcaggaccccaccatgtcttcagaggtggagaaaatcagtgaccactgctagggtgggcaagctctccctgacagcttgggagaagcaaacattgccttctatgcacaggcttccttcattgagttagtcacctttatttgaagtcaaatgccatttatctaaa

SEQ ID NO: 170823 - DNA, 657 bp, Homo sapiens
atacttgagaacatttaagttgttgtgatggttaatattgagtgtcaacttgattggattgaaagatgcaaagtatcgctcctgggtgtgtccatgacggtgttgccaaaggagattaacatttgggtcagtggactgggaaaggcagacccaccctcaatctggatgggcacaatctaatcagctgccagcacaaccagaataaaagcaggcagaagaacttggaaagactagactggtttagtcttctggcctacatccttctcccgtactggatgcttcctgccctcgaacattggactccaagttcttcagctttgggactcagactgccttcctttcccctcagcttgcagacggcctattatgggacctcagcttgtgatcgtgagtcagtactccttaataaactcccttttatatatacatctatcctattagttctgtccctctagagaaccctgactaatacaattgtgttacagggtgggctttggccaaaacaaaacaaaacagaacatggagtaggaagacagaatagggtctctgcctgcccacatgggaacaggtttccccttggtcatctactgggcatggtacaaaggccatgtggattccctggcctctgaacagaatgcagtggcactcccacgctgg

SEQ ID NO: 170824 - DNA, 272 bp, Homo sapiens
tagattccattgctctctccactttactggcaggaatgggtagctttaagtatcttcagctctttccagctccagagtctgagccctggataaatatcatctcatactatctaacctctaagttcccttctcattctttaagcttccataaatgcatctttcttcctctatttctattttattccctcacatttcatgggtaaatctttataaacacaccatttcaaacaatgctattttactctttctggctgccccgtgaatctttatag

SEQ ID NO: 170825 - DNA, 774 bp, Homo sapiens
atgcctcagccaccctagtagctggaattataggcatgtgtcaccacacctgtctaatttttgtatttttagtagagatggggttttgccatgctggccaggctggtctcactcctggcctcaagcgatcctcccacctcagcctcccaaagtgctgggattaaaggtgagagccactgcactcagccaatttcctattttttaaaaggctgaatagtattcaattgtgtatatagattacattctaaaaattaatttatccattgatgggcactttggttgtttccatgtcttggctattgtgaataatgctgctgggagcatgaaagaacagacatatctgtgacatactgattccagttcctttgggtatatgcccaagaagtgggatcgttggatcatgtggtaattatatttttagttttttaggaacctccatgctgttttccaaaatgactgtactaatttacaatatcaccaacagtatgcaagtcttcccttttctccacatcaccagcatttcttatcttttgtgtttttgataatagccagtctaacaggtgagaggtgatacctcattgtggttttaatttgcatttctctgatgactagagatcttgagcattttttcacgtatttgttggccattcatatgttttcttttgcaaaatgtctattcgtgtctttttcacattttaaatagggttatttgttttcttattactgagtagtttgagttccttatatattttgaatattagccccttacgtgat

SEQ ID NO: 170826 - DNA, 304 bp, Homo sapiens
cttgatctctttgaccccaggagttcgaggcagtagtgagctatgattgcaccactgcacaccaacctaggtgacagagtgagacctcatctccaaaaaaccaaaccaaaacaaaaaaccttcaagaaagaaaaaaagcttgaccttccctccctcactctttacagacccatggaatctgaagctctggtgttggagccaccaggcattaacaagccttctgggtgattcgtaatacgtttaagtttgaaaaccagggtcagaacttttaaacaagtgcaagtgtccagctaaaatgaattat

SEQ ID NO: 170827 - DNA, 429 bp, Homo sapiens
gcccagacatcggacacatgagtaagggaaccccccgatgacccagcccctagctccaggcttcttcagctgatgctgagtaaagcagaatgagttatcccagccagccaggtctgattcatgagcaagataaaagttggggtttctaaggacactacatttaggatgtttagttatacagcaataactatcattatcttccttcagcttttaatgtttaaaaatgcctgatctctttgtaactgtaaggaagctaaactgactataaaattcatggttataaactctagacattgctgacctgccttctggcacttagtcttactgtgcacgtttttgaggctacccagatcttttccctcaagaacctgactcgttttctgtatctggaagcttatgtaatccttgtttttactctatttttgaaaa

SEQ ID NO: 170828 - DNA, 105 bp, Homo sapiens
gagagaagtgttgagaatgaccctgagaactctggcttgagtaactgtggctggagatgcaatatgctgaaattggggaagctggatgaggaacaggtttgggaa

SEQ ID NO: 170829 - DNA, 408 bp, Homo sapiens
ctgtggagcccgagggtgggaacagagagtcttcttttgctgtaggtggaagcctgtctggctcctttccctctaaggtcagacagcttgagagatgtttccatcctcccatgcatgaccctgaggcagttagctggtcagttactcactgtgctctctgccaactctaatgagccaggaagcctccccgtgcccaggcgtgctgtgatcacagtgttcaatgatggggtgaggctacagcgtccagccaggggctgtgccacaggggccagaagatatctgacctactgtcactgcctcttccactctgttccacctgcactggggcaatgccatctgatgaacagatccatttattaattcaacacgtttgtattgagagcctgctgggtgccgggcactattgtc

SEQ ID NO: 170830 - DNA, 241 bp, Homo sapiens
cacgtgaaacctatctgccctaaaggaatcagtcttctgtctcctttactccccatttttttctttctataaaatttgcattattggcataacttttctctttactatgggttatctttgggaaggtgtaagggaatgcaaagatagctcacctccacgtcagagctccctgcacttgcaggcgtggagaggacatacccttcgtcactcgttctgtgcgttaggaccagagtggaagagg

SEQ ID NO: 170831 - DNA, 551 bp, Homo sapiens
tagaaaatgaaagcaatgagcaaggatgactcagaagctttactgaaggggaaaaaagcctgagggggggaagaatgcaaaggtttgagggaagatctactatgcacattaccatggctgccatctaatgttcccttatatttaaattgccccactcatggtccccatagcattgctgttattctttgtgcaggaatggctgtggactagagctgaggtaggcactcaactaaggggcaacccatctgcaattagggtagccatgtattagctggcttggcatgatggacattgatgcttcctagtatgtcaatcagaagtctttccagattttagacaggggaatatagaaaagactgactagctaaaagagaatagcagaggcacaaaaaacagccagtctctgttcctttgctttctgcttccaatctatgtgcctcattccaataaattctcttttgccaaaaggaggcatagtagactgattttctttttttctttttttttttttcttttgagcttcctagggtggccgggaatcctctaaagtc

SEQ ID NO: 170832 - DNA, 158 bp, Homo sapiens
tgatttttaagagtatttagatagtagaaaattattaattctctttattagctcaatactttgttcagccagcatttgcagagcaaaatctgcgtggatttatttagtgaaaattatcttttaaaaccacaaagatttaaccatagtacataaaattt

SEQ ID NO: 170833 - DNA, 650 bp, Homo sapiens
cccaacacaagacctgcccagaagggacctagaacctgggccttcattcctccatcccgggcacttctgctgcaggtttcctgactttccctcctaccacaacctctgccatctgcagccttctctcctaaatagaaattgacacctccacctctgactgtggagtcacctccacctccaactctgatgaagcttagaagtagtggctctttcattgctgatggtgagtggtgtcagggtaagagtgagaatgactcatttcagtgaatgaagagcagtaacaccctcccaccattcaattagttttattgtgctggaggcaggaggcacggttgtctttaagacccacctgtatgtattggtagagaagctcaattaaagaagaaaaaggcccacctgaatgatgttcactgttcattgcaaaaggttataatatcctgattaaattgtggtttataatatcctgataagggacatacaaagaaactgtgagaacacagagaatcgcttactcccatcttggggatgttcagggtttagaatgggtcttgggtgaaagggcgtttgtttaagctgagccatgatagatgagtaggagttcagcaaaaaggtgggagagtgttgggtatctagaacgtgtccagggtgac

SEQ ID NO: 170834 - DNA, 154 bp, Homo sapiens
accaggaggtgtagacacctagtcgcccttcccggctgtctcccatacgccggtgcacaccacgcgttcccaagatgcacatccctttattaccgtgcgtcacctcagtctcccacttgctttggtagagtctagaaactaagaatttgacccc

SEQ ID NO: 170835 - DNA, 533 bp, Homo sapiens
tggctactacacctaagactctccataaaggtcagagcgatttacactcccacccacaggtatcagagttcctgtttccccacacctcagtgtgtttgttttcttagtgcatttaagttagaaaagaaatggggagggatacagaataaagcgttatctagaactgtctcccgggcatcattccacctgagtgcttagaaagtgcctagcaaatgtggcctgaccttttgatgggacacaactgggcaagtgacagggctcactagaggtagtgacacacccctggccaccccaacacacctttcttatttaattcgttctcagcttagcaccacagaccaaccccaactctgactgacctgctcagggtggtaaccggaaagttaaacaactttggttttcctgaagatcgacaaatcattctccagtctcacaaagttccctgcacaaatgaaccggctttgaaagccactagcgtacttgataagcaggtcccaaaagatccagaaaacacttcggggtttttcactgac

SEQ ID NO: 170836 - DNA, 672 bp, Homo sapiens
ttccaagtgaggctgctcatgcatctgtggccttcatcctggtcaaagtattttggaaaactaaatgctctttctgtccaaagtcatctggccacggaaatgcttttccttctattttgagacaaaataactagagtagaaaaatagaagatcttgggtaggcagagtatttttttaaactttttattgaagtacaacatgtgtatacagagatatgtacgtatcataagtatataactcaatgaattttcacaaaccaatactcttgtaatgagcacccagatttttaaaaaagaacattatcaatccccctagaattccctttacattcctttccagtgattacaagaaaagtactttcctgactacgaataacacaggttagctctgtcagttttttggcttatttcagtggaatcatgtagcatatgtactcttttgtgtatctggctgtgagatttattcctcttcttattggttttttcttttttcctaaaagagactgcatcttgctctgtcagccaggctggagtgcagtggaatatcaaagctcactgtaacctcacactcctgggctcaagtgatcctcctgcctcagcctcctgaatagttgcaattataggcacgtgccactgaacctagcttattcttattgttgaaatgtagttgtga

SEQ ID NO: 170837 - DNA, 337 bp, Homo sapiens
ctagccaaactatctctctgttgtctttccactttatccatctattttttactttttttggaaacacaataacaatagtgtagaagtcttttcacattgcctgactctcctgtttgtgtcccataaggttccatgtactctgtccagaactcagcttattatgtcaaaggattctgtctggactggtcagtcagagatataagttctcattacctcagtgtgtgtgtttgtatctgtatttaatgatgtttgtgcttggcttaggctggggattttgaaatctttgcagagtttcccaatttgttgggcagttttagaaatgatagtatcagtagga

SEQ ID NO: 170838 - DNA, 377 bp, Homo sapiens
ccagaggctcacagttggatgagaaggcagacctataaacaattattatgcaagaagctctgaaacaaaggaacccatgacatttcttagcgtcattgagaaaagaaaagttaccagagtggtggatgggtggcaggtgaggcagctgaggcttggaggatgaaaacagctcttcagctgaacaggaaaccaaaagataaaggagacagtagtcacaatggaaacaaggcacagaaactgaaatcaaaatttcctcatgaaagggtaagccttatctttgcctagattattgtagggctatctatacagcctctggggtccctaagttcagtgtccctccatagtgatgccaactcacatatgtatagcccccacct

SEQ ID NO: 170839 - DNA, 327 bp, Homo sapiens
tgctgggattacaggcgtgagccaccacacccggctgaacctttctttttttactcattctagaattctagaatgaatggagtgcttactctgtatcaggttctgccatgtactagggataattggggacaacaaaacctgcctggcccctgcctgcatggagcatatagtctagatggaaagaaaaaaaagtaaacaaaactgataatgagtagaaagtgatatgaggatagaggtggctttaagaacacaggaagaggaatctacactagtctggacatcaagggtcagggaagggctcccagggaaagtgatgggataacagct

SEQ ID NO: 170840 - DNA, 755 bp, Homo sapiens
tctgcataacttgtttgatgactaagggagacccatagggccatttcttacagcccacagccaagccctctgtgaagaggaaaaggcaactcttccagcaaggaagtcctcaccccttttcaaaaactttcctagacaaacttgtaggctgttaatgactctagttatgacctcccagcccttactcaggagaaaccactttgtaatgtgggttttcaaccttggctgcacgttgcaatcacctggggatcccccgcaaccgcctgacaaagattctgatgttattggtctgaggtgctgcctgagaattggtgtttccaaagctcctctggtgttttgtgtttttctagcacaagaaaagttgtgagtcactgtagtgcaatacagttcgatcacaattgccacaattgtgtagggtccatcagaaccacctgaagggcttcatagaccacagctggctaggagctacccctaggcttctgattcagcaagtgagaggcagagcccaaggctgtatatttctaacaagttccaggtgctgctgctgctggtccagagaccactgcattagaggccagagttctcaactattgactgcacattagaaccatctggacaatatttaagacatactgatgcctatacaccaacccagactaactgaatcaaaatctctggtaatggggctccagagatgttttttaatgctcccaggggattctactgtagagcaagttgagaaccacttgtaagca

SEQ ID NO: 170841 - DNA, 279 bp, Homo sapiens
tgtccaaagctagtcccaagctgtggggagatgggaaagaggctgccctgaggaagtggtgcatgagctgtgatcagctgcgtacacaaaggccctgaggcaaaaaaaaggtggatggtcagtgagtgagactgagcatggcaagagtggtggctacaaggaggagggatggcctgggatgaggctggggagacagtaggctgtgaacgctgggatagtgatagggagtttggattctactcaagaacaggggttggcattgggtactacgctttggca

SEQ ID NO: 170842 - DNA, 676 bp, Homo sapiens
acagacacgtttccacttctaccacagtagaagagagagacggatggcacctgtcactatggccatgggcctcccaccgccttccctcacagtgggtctgtcacctaaacactctaccctcctggaagctacaccacagccatcgctaccacaagcagagcacaaagaatgggctatacctctacagggcagtgcagaatgagaaataggaagaaaaaggcaaatgaggttcagatatagacagcccctgcaatccaagcacccaagtctgatccgtcttgcctacaaatgtcccctctttggtcccctctttgacataagaaagaggaagtatgagggctctcccaggctacaccgtgaatgtggaagaggaagaccctatttccttcaagggcggcgagcggaaggaactcaggccctgtgcacttcactgtgtctctccacaccccggcagattaatcaccagggtgttgtctagcaggaaaggtatttccctcttccctttgatctctccctctccctgcccctctctgccaattgctccttccccacccatcaggtattactgtttgtggacaagtagttgttttcataattacctgattgttatgagggacaggatcgttatgagggactttgaacctgatgactctaaatcttgacagagattgatgtg

SEQ ID NO: 170843 - DNA, 146 bp, Homo sapiens
taacttatgaatcctttcacagagaaaataggtctgaaagcctttaaactgtaactccagactaaacaaaattatctcattttgatattcagaaaaacggaaggcatggcagttagacgatgcgctgatgaagggctgctccacag

SEQ ID NO: 170844 - DNA, 604 bp, Homo sapiens
catgattcacgactgagtctgaaagcagctgtttttaagcacatgttgactgaacagtggctgagagctaagcacttgtcatgactgatcttactggattttcctaataacccatgatgtgagtattattatttccattattattatttttaaatctaacagggaatctaaaccttggcttgggtaacttactcagagtttcacagccaggtcatggccaaagcagaatttgaacttggtttggctttagaacctgggcttttaatcgtacttgatacctactctgaaggcagcagatattgggaatcaagtcagaaggagactgggattcacagccaggatatccattccctgaagatgctgggtaacaagagactaaggcaggaagtgtggatggggagcaaggtcagaacacgaggagtgtctaagagcatctcctacctgggttctgtactgaacatacaagtagaacttcagggacagtaactttgaaggttaggaagagaaacagaaagggaatctagaatgtgtcacaccattccccccttgcttggctgtgaggccttctgaatatctgaagcaaataggttaattaaaacaaaag

SEQ ID NO: 170845 - DNA, 281 bp, Homo sapiens
aagccaagatctgagagtccagaccctcctgtgtgcaactgaaagccaacttttcaaatgagcagtactatttagactgctcccatagtatgcaaccaggaattacgtatgaggaaatggtaaattaagaggcatttaggaatggttatgattaagtattttcctcacaaagaaagaatgcaaagtagagaaagctccttgtttctagaactagggaaactttattccacgccagtacacatacattcctatgtttttaagggtaaacgtattaatctttt

SEQ ID NO: 170846 - DNA, 519 bp, Homo sapiens
gccatttctttctgacaggaatcattccgccacaagcgaacgagcctgggctggccttgtggaagcctagccgaggcctcagaatatggatgagatcatctgagaccatccaccccaggaagccagcaaagtggctagaacccgccataccaccgcagaatcacgattgctgttctgagtcactacatttcaggtgacttgttgagcagcaaacgagctgacgaacctaaagtcagaagatgctagcggaagaaacaggacccagaactccattggaaaatggggtatacagacttcgaggatgccagacaaaaagatcatttgaaatattgttgtcactaagccttctttgatcaagacaccatgagctcatgacaaacgcctcaatttccttcttctgtaaataaattaatacctggtgagatgtaaaagcccacttgaacggaaaacaacatgtttgatgaaattctgagagaagatacaacccaaggtatgaaaaattcagaacaaattatacta

SEQ ID NO: 170847 - DNA, 313 bp, Homo sapiens
ttgagtagtttgttgcttggagccttggtcaggagacatttcttctctgattctcagcattattctagcctgtctttcctgaagaaaggagaggctcaaggaaggtaaagtcagagaaggctcttctcaggggatttatagggtgtgctcccagctctgtgaagtatggtggagggcaaagagaggaagccttgtacatgggaagacccgcattccagatgaggttctacttttactgaggggcctccgtcctgctgagcctcaccttcctcttctgcttaaaaaaagtgcttaaaaatactgaccatgcctt

SEQ ID NO: 170848 - DNA, 1038 bp, Homo sapiens
gaactcttaacttccttgtcttgtcttccttacttgtttacgttacctgtccgtccattcaaccagtatgacaaggtccagggctgagcagctgagcaaacaagcaagcaaagaagcaaaatgaaaccctcactttttagaagggggtagagaggcaatgcaatgtatatacttcaacgtagtgtcatattttttgttcctgatcagggtcatttgaaggattgagttatcttgggctagagatactttgttttctctccaatctcaaccaaaaatgtgacatccttgaggctggagagggtatctgttcatctgtgtatccgcaggtcttagcagtgtgggtattcagtgaatgcatgtggaatgaacaaaggaatgaagtgaatgtgagaaacagagtaaggtacccccttctgtaactggggttgtttgtgtttataacttcttaaaaattttgcattaatcagggccactccacttatgaatgaaattgggtgtaattgaggtatagaacgtgggaacataggtgtatgtgtgataagagaccaggactggaggaggggctagagccaagggaagttgcaaaaggcccaaagtcgaaaatagcaggaaccaaatagaaagagcaccctttttcccaatgccacttccctcccatgacttgaatttcctgcaatttctcttcctccctccttcgtcctaattctctatctttggttattcaggagggccagcaccctgtggccccagaagataatgtggcaacgacttaggacacggagagagagcgtaggcagcagtgtgtcatttcccctcaacacccttggtagaatcatcatgtctgtcacattcacaagttcttcttcttctttttttttttttttttagcgttagcagtttccagcatctgcataaaatgatgtataaaatagagtctctgcctgtccttagagaagttactatctagggggagtgaaaggtcaactacagaaaagtgtagagaatgctaagaaagggctgaagggtggggtgtttgaa

SEQ ID NO: 170849 - DNA, 390 bp, Homo sapiens
acttctagtaccacatgtgaagagatactgcagtaaagaagttttaaattaagggctcagaaaaaatacattgccttagtctgttttgtgctgctgtaacagaatactggcgactgagtaatttatgaaaaggccagatacggttctggatgctgagaagtccaaggtcgaggggccacatctggtgagggccttcttgccgtgtcattaccatggctgaaggcaagagagcatgcacaatgagaggcagggaaggaaggaaacagaattcatccttttatcaagaacccactcttgtgataactaacctagtcccatgataaggacattaattcatttataagggcagagcactcaggacctaatcatctcttaaaggttccacctctc

SEQ ID NO: 170850 - DNA, 564 bp, Homo sapiens
agaattcttagttcaaagtgcttttcaaatcatctcctcatttatttctctatcacttcttctaggaagatatttcatcctgatggtatacattgatatgtataccttgatatgcagcctgggaagaataagcagcatgacctggggtcacagatgctctgcgatgggatgagtgggaacacagctgaccctggggtcacaaggacctcagtgatgggatgagtgggaacacagcctgcacttcagacccagatccaagtgtctttatctgagtagaaaaagcagaatccaagacccgggctttgggcatttccagcttccccagatggggaaaagccagtgccaggtggccacgctggggacattcatgacctcagcagcatggaccgtggtcttcagtgaggcctgcttgagagacggcttccgttgcagtgttgtgggcaggtggggcggtggtgactggtaggggggcagttgtgaaatgtacctggaaagataggcgtttatgggttcaaaactgtcttgtcaggagggaaccaagtgtgggtcagaacaaggccacgg

SEQ ID NO: 170851 - DNA, 662 bp, Homo sapiens
cgagagaaaagagctacaaagagaaagaaccctggagatgtgcagagtccccctgagtataccatacgtgctattcagcacgtacacgtgactaagctttcagagcagaaaaagaaccatctgaaaggaatagaggatttgtagaaaccattccaggaacagtgcttgatcccaacaaccagactggagaaacccataatttgtgtggatattagtttcctgaggccacaaacttggtggctaaaaccagtagaaaattacttgctcatacttgtagaagccagaagtccacaatcagttttactgaggcaaaatcaatgtgctagcagggtcttgctccctccagaggctctaaaagataattacttattgcccctttgtttctaggagctgctggtattccttgacattgggccacatcactggaatctctgcctttatggctgcattacctcctcttctgggtgtcaaatctacctctctttcttaaaaagacacttgtaattggattataacccattcagtagtccagaataatttccccagagcaagatacttaatcacatctgcatagactccttttccttgccaggtaatatttgttggtccagagattaggacctgatatccttggatggtccgttatcagccactactccaga

SEQ ID NO: 170852 - DNA, 441 bp, Homo sapiens
atccaaacctgggtaaatctgcattgtgtatagcagtggttccctatcaagggcaatcagatgtccccccagtaggcatttgtctatgtccatagacatttttggttgtcacaattggaggtgggttggggtctgccatgagtatctggtggataaaagttagggatactgctaaaggtcctataatgcacagggcagcctgtacaacaaggaattaggcccaaaatattaattgtgctgagatgaaaaaacatttttatacagacaatattgttactccacagctttctgttttcagatgttaagagtcctgcaaagttcctaactggtagtataaagcttaatatgtgctattaaaaattgcatgaaccaatatggctttttttttttttttttttttgaggcggagcctgggcaacaagagcaaatctccatctcact

SEQ ID NO: 170853 - DNA, 555 bp, Homo sapiens
atccaaacctgggtaaatctgcattgtgtatagcagtggttccctatcaagggcaatcagatgtccccccagtaggcatttgtctatgtccatagacatttttggttgtcacaattggaggtgggttggggtctgccatgagtatctggtggataaaagttagggatactgctaaaggtcctataatgcacagggcagcctgtacaacaaggaattaggcccaaaatattaattgtgctgagatgaaaaaacatttttatacagacaatattgttactccacagctttctgttttcagatgttaagagtcctgcaaagttcctaactggtagtataaagcttaatatgtgctattaaaaattgcatgaaccaatatggctttttttttttttttttttttgaggcggagtcttgctttgttgcccaggctggagtacagtggcacgtgatctcggctcactgcaacctctgcctccccggttcaagcgattctcctgcctcagcctccagagtagctgagattcaggcgtgccccaccatgcctggctaattttt

SEQ ID NO: 170854 - DNA, 548 bp, Homo sapiens
ttcctcggacaggtctacctggcctgcgtcctgttccaagtattattttgcagattatacttcgtaaaacctcaacttttttcgccttcttcctaaacacgaaccttcccggagtaaattcacgccgtaaacacacccagggctttgttttacacacagatttctccccctggtcccgagagaggttgcttttccttctgaatccaccgaggccaactcctgccatctggggtcgcggcttcctccgccgccgccgccgctgccgccgtgcggattcgcccgggttccgggtggcccgcgccggcccgcggctcgcaccccttcctgtctccgtctgcccacggcgggcggcgggcgcgcggcgcccagacaaaagctcgggccgtcgggcccacgggccccgggagcgctccagccccgaagccgagggtcctggcacaactttgcgaacgcagaggcaggaggtgccggcgcccgcggggtccgggtgctcccggggcagccggcacgcgcgtgggccgcgggcgagggcgccgggggagggcgcg

SEQ ID NO: 170855 - DNA, 535 bp, Homo sapiens
aaccgctcccacttggttgcggtggttcggggcagggagacgacgcagcgcgagcggaaagggcggttacccaacggccttagctctcatggcgtcctccgtggtgttacctaaaaataaagttatttgtgattagaaggtaatcgcctcctggtcatgcttccgctggtcaccagtgtctgcggggcgaccccatccttgtggccagagagggcctgtggctgcgctcaaggcgggagcggtccttagcggggccctgcgggaacgcccaggccgcgctcctttcccttgctcgcctggccttgaagtgaagggggaggtttaacaatgcagtgggaaccccaaagtttgtctcggccgtgctgctcacattccaaacaatgcaaaaggttgaggaaaacctcagcagttgaaaccgtgatgcatttcagcaaagaagtagctcctgtcctcgtaaaatcagtgaagttctcacggacgacctcattgagtgagttgtgaagcttgttgccttaatcagaatgatcagccagca

SEQ ID NO: 170856 - DNA, 520 bp, Homo sapiens
tcatagcaagcagtggagaattaattaagaaggtaaaagtgatcacatttctatgaaaaattccacagcaataaagaccagtgcagaaaacaaaacaaaacaaaacaaaacaaaacaaaacaaaacaaaacaaaaacactgagccagaatctgtgcaatgttagtcgagttgcctctgtggggaatattgaagcttttctgtgcccttggttggggtccaagtatgctttctccagcctcctgcagttgtagcttgcagatggtacaaaggttgggttgggagccttattgcaatccttgggaagccagttggaaaggagctcttcatcctgggcatcatggtcactgagacttaaacactgggccattagagggggggggtgtttattttttaagagttaagatgtttttttcttgtggtcaactaaagtgctccgtaacccaaatttcagcccagagtacatgaggcattttatgagtgtgagtagatcggctaggttaaaaagaaaaaaacaagcaa

SEQ ID NO: 170857 - DNA, 310 bp, Homo sapiens
agagggaagaggaggagaacattccaggcagaggctctgaggggagaaagagcttggagtgttggagggagaaaggagtgagggaagtggaatggagacaggaggtggggagacataaaatgcctggccaggggtaggcgtcaggtcatgcaaggctggacgggccatgggaaggaattctgatgcgaaaggctatgccaagtcagaggcttttgaaccagaaggctctatgatctgattttctttttcaaatcctcaccctggctattgtgagcttggacaacctacctagtacaagtggggagaacag

SEQ ID NO: 170858 - DNA, 403 bp, Homo sapiens
ttttcaccattgtccctctctggaaccatcgaaaaacttcctaactggatcccttgactcatacatttgccctttgagtttgcccacagactaattttccaactagcatacgagtaaaccctctgaaatgttaattcagatcacatctctcctgtatgaaagcttctaaagttttcccttaacactgaaacgaaggggaaattataatttgacatgaacatgaagaccttttcaataaagaatgctaagaacaactaacttaacattattctgaatgtttcagaaaaaatttggtgaagaaatggaaagagttaaacttgtaaaacaggaagtaatagaattacttgcagatgattgtgacatgagtctgcttggggaaaataaaagaaaaacaagaattact

SEQ ID NO: 170859 - DNA, 225 bp, Homo sapiens
ctctgagaagtactgcagttggggaaaaaaaataactctcatgttcactttaattccatacttccccagttttttgtgtatagtctctcttcccccaaaacactttttttttttttgagacggagtcttgctctgtcacccagcctggagtgcagtggtgcaatctcggctcactgcagtctctgcccgctgggatccagcgactctcctgcctcagcctcctgg

SEQ ID NO: 170860 - DNA, 735 bp, Homo sapiens
gctggaggcaccagagaccccaagccacgagctgaccgacgcaccgaggagctctctgtccgcggtcccgcaggttggcggcactggagtgggccgggcaggctctgcctccgccgcagagagcgcccggactgcgtggggctggggaagcatcccgggaacggcgggcggtgagcattccgggaaccatctctgggctgtctggggcggtggagcaagtctggaggcgggacgtggggcgagtatgggagccgccacctcgagacgtcttcccgccgtccccggctccaggagaccccacggccttctctcagctccttggcctactgccgtggccttggtgcccccctcctctggtggtcagctcagggcttcctctgcccatgcagtccccagctgccactgctgagggcctcagtggccccctctttggggcctacacgttccccaccttcaagtttcagcctcgccatgatagcatggactggagacgcattagcaccctggatgtagaccgcgtggcccgggaactggatgtggccactctgcaggagaatattgctggcatcaccttctgcaacttggaccgggaggtgtgcagccgctgtgggcagcctgtggacccggcactgctcaaggtgctgcgcctggcgcagctcatcattgagtacctgctgcactgccaggattgcctgagtgccagtgttgcccagctggaggcacggctgcagacca

SEQ ID NO: 170861 - DNA, 872 bp, Homo sapiens
gctggaggcaccagagaccccaagccacgagctgaccgacgcaccgaggagctctctgtccgcggtcccgcaggttggcggcactggagtgggccgggcaggctctgcctccgccgcagagagcgcccggactgcgtggggctggggaagcatcccgggaacggcgggcggtgagcattccgggaaccatctctgggctgtctggggcggtggagcaagtctggaggcgggacgtggggcgagtatgggagccgccacctcgagacgtcttcccgccgtccccggctccaggagaccccacggacgcaagctgtggagctgagtcgggttcagacaagccctgctgaaatacagggagaatttagaatccccaacactaaccctgtggtgatttgctgtaaactctgtcagcgcttgcactttggtcaagaaaactcaggccttctctcagctccttggcctactgccgtggccttggtgcccccctcctctggtggtcagctcagggcttcctctgcccatgcagtccccagctgccactgctgagggcctcagtggccccctctttggggcctacacgttccccaccttcaagtttcagcctcgccatgatagcatggactggagacgcattagcaccctggatgtagaccgcgtggcccgggaactggatgtggccactctgcaggagaatattgctggcatcaccttctgcaacttggaccgggaggtgtgcagccgctgtgggcagcctgtggacccggcactgctcaaggtgctgcgcctggcgcagctcatcattgagtacctgctgcactgccaggattgcctgagtgccagtgttgcccagctggaggcacggctgcagacca

SEQ ID NO: 170862 - DNA, 853 bp, Homo sapiens
gaatttgctctctgcctcactgcctgagctggaacatttgtcttctgtcctcagactgggctttaccccatctactcccaggatactcagaccttcagactctggctgaattataacactgactttcctgggtctccagcttgcaaatggcaggctatggaacttctcagcccacaatcacccttcagggtagaccgaggagagcacctccccttcctggtgaagggagcccgatacacgctggtgccggctggccaagaaggaggtggacaaacctggcgaccgctccctggcaccacctcaccagaggacagctcacacctccacaggggtcagaagaaaggagctgccctggggatggctgtgtatccctacaactgccaggcacatgccccttgaacacccgatgctacgtgtcccaaaggaaactggtctccacccacccccggcccgtcctcgtcctgggtaccccaccttagtaaatggcgccaccatctgcccggtcactcagcgagaaactcaactcctggcagcagatgacgggcactctggttaaatgactctctccagcctccaagttcaacctgcagggaagccctggaaatcctgtctccctctgccctgcctctccttcagctccgaaccccaccccactcagtacatggcccccaacaggctttcaaatgtctgccttccccaaaccaatctgtggttttaaaagaagtaaggtcaggtacagtagctcatgcctgtaatcccagcactttgggaggccgaggcaggcggatcacctgaggtcaggagtttgagaccagtctggccaacatggcgaaaccccgtctctactaaaaat

SEQ ID NO: 170863 - DNA, 410 bp, Homo sapiens
acacacacacgatctacttacaaacacctaaagagatggtggagaaaacacattgtatgaatcttaagctctctattcctctacacataaaaatgactttcagggaaagccttgcccaccagagttttcagtcactttcttcatgtcaccactgttaataaaaataaaagtgttattggtttaggattccatttcgtgtaagcttcgtctgcagcagttgggggcctttatgcgtgagaatgatgctttttaatgaatgttctgtgggcattttaaatgaaacaatagagattctgggcagtttgatcttgcattttccactgatatttgccttcacctctcagccccctgccaagtccctttccatgccacctcctgcctgctcatgacatccccgctcctctcagatc

SEQ ID NO: 170864 - DNA, 517 bp, Homo sapiens
ctaaaagtatggggctgtccccaaactacctggatttgaattccagctccaccaggtacctgatgtgatctctcagtccctcaatttccccattcataaaatgaagatgataatattgcgtaccacataaggttactggggagattaagtaaattctataggtaaagtgcttagaatactgtccactatttgataactaaaaatgttatctacttcaaaattaaattgaatttggtttaggaatttctcaactttcattgaattaattaaacatatctccccacacccccaactccatgttgatcctcgtcagcaagctgtggggaagcacaggtggagagggaccacagcagacctctgccgccgggcagggagagtgcaagcagcatgtcccaagtgcctgctctgtgcagcctcattacttgtcactatcctggccactctttgaggaaggcattgccattcccattttaaagatgaagctgtcaggaggaggaacatgtccaagtcacacagt

SEQ ID NO: 170865 - DNA, 960 bp, Homo sapiens
  misc_feature (838)..(840): n is a, c, g, or t
  misc_feature (887)..(887): n is a, c, g, or t
  misc_feature (927)..(928): n is a, c, g, or t
  misc_feature (931)..(931): n is a, c, g, or t
  misc_feature (933)..(933): n is a, c, g, or t
agtacgtccaagaccatactactattgagtttcccccactggccttggaattaataaaaactgtatttcttcaatcacattggactttatgtggtgggttactgcatgagccactgcacctggcctgaatctgtgaatttctttttcctttccccttccttttatatgacactgaaccgttagtttcacatgaacattgagaagtcttttttgtttacttaattttattttattttatttttacctcctgcgtgcatgaaatggatggcaaggaaagctttgcttgggcctcttcctgaaatccaagatggcaaatgcaagactgtaaggaatgtgatcgtcatttccaaaggatagagaccgcaaggggcagaacttagcactcatgcatcttttctagactctggctttggtctttgtagtttttgggtaacagcccttctgatagtcattgcctctttttcttaggaatgcctggtgatgtgtatacaatcatctaatcaaagaaggctttttttagagatcctggtgttttttaaatgttaccgttctgttttctagtcggctccaaccagcatgccttggtagctcttggatacatattgggacttaatgatttccatgctttttcaatctgttgctttgggactagtccaagaccatactactattgagtttcccccactggcctttggaattaataaaaactgtatttcttcaatcacattggactttatgtgtggttacttcatagtattgattaaaatcatttcattgtgtgtcatataaagattcatttatgagccactgcacctggcctgaatctgtgaatttcttnnncctttccccttccttttatatgacactgaaccgttagtttcacatgnacattgagaagtctttttgtttactaattttattttattnnatntntacctcctgcgtgcatgaaatggatgg

SEQ ID NO: 170866 - DNA, 772 bp, Homo sapiens
  misc_feature (650)..(652): n is a, c, g, or t
  misc_feature (699)..(699): n is a, c, g, or t
  misc_feature (739)..(740): n is a, c, g, or t
  misc_feature (743)..(743): n is a, c, g, or t
  misc_feature (745)..(745): n is a, c, g, or t
aggacgatggagaagtctgtcgtgactgctgaaatcccaggcgattttatttttacctcctgcgtgcatgaaatggatggcaaggaaagctttgcttgggcctcttcctgaaatccaagatggcaaatgcaagactgtaaggaatgtgatcgtcatttccaaaggatagagaccgcaaggggcagaacttagcactcatgcatcttttctagactctggctttggtctttgtagtttttgggtaacagcccttctgatagtcattgcctctttttcttaggaatgcctggtgatgtgtatacaatcatctaatcaaagaaggctttttttagagatcctggtgttttttaaatgttaccgttctgttttctagtcggctccaaccagcatgccttggtagctcttggatacatattgggacttaatgatttccatgctttttcaatctgttgctttgggactagtccaagaccatactactattgagtttcccccactggcctttggaattaataaaaactgtatttcttcaatcacattggactttatgtgtggttacttcatagtattgattaaaatcatttcattgtgtgtcatataaagattcatttatgagccactgcacctggcctgaatctgtgaatttcttnnncctttccccttccttttatatgacactgaaccgttagtttcacatgnacattgagaagtctttttgtttactaattttattttattnnatntntacctcctgcgtgcatgaaatggatgg

SEQ ID NO: 170867 - DNA, 498 bp, Homo sapiens
tgtcaaacaggaggatggctgtcgggggctggggtctgtgtttctctttcatccgtgttgtgatctgcctgagataggaactgctaaggtgcccacgaattcccaagagacatagtctcatcctcagaggtcacctgtagcaccttcaagaccccatgtatatttcatttcccctagaaggctcccaagccttctggaatattctgcggcaaaatcggtcgcagctagtgcactttgctcatcatatgtatctgtgacaggaactgagtcttaaatctccctgtctggcacatgggtgcgtgagtgatgtgaggtcaccgtctaacgcagcgtgtaattaggtgctgggcccagctgtgtccatccctggctggttccgtctgtaatgcaaagtatagtgttgggcatatggaggcagccggtatacatgcattgattgactgttgatactttccggatgtaaacggctgtaggcggggctttggcttaggttcccca

SEQ ID NO: 170868 - DNA, 418 bp, Homo sapiens
ctacagtgttaggttaaacacagatatgaaaatggtcatactgtgaaaggctgtgggtattaaaaccctatagtaaatttcaacactgttccaatgtcaaataagctcaccactgctctaaatgcagattacaaaactcactgaagactgtgataaggtgactcgtatctgtgagggagtggaggagaactgtttaattttgcaatatgcttaaacaaacttgcacagtgaatcactggttttcaacacaccaactttttatctagaaaagaactcccggccggatgtggtggctcacgcctgtaatcccagcactttgggaggccgaggtgggctcctcgggtcaggagctcaagaccagcctggccaacatggagaaaccctgtctgtactaaaaatacaaaaaattatctaggta

SEQ ID NO: 170869 - DNA, 393 bp, Homo sapiens
cccactcctgccaaagggcagcatccacatgtctcccaccaacacagattcggcagagccagcactgaagcagccttcctcccaagcaccttcgcctcagtccctgctttgccttggaatctaccatcagccccacctgtgctcccaacctcagtgcctccggtgccctcctcctctcaccatcctttcagcagccccaagtcagggatgattcgctcttgcttggaggacccacccttcctcccctgcccactgttcgtgctgtcaccaggaagatctcctgacccagctctgaccaagtcacgctcacaaatgccctctggcagcactgcatccattaaaggcagtccacactttttatgcttgcgcttgtgcttcccacctcctccatca

SEQ ID NO: 170870 - DNA, 432 bp, Homo sapiens
ggtttcaccgtgtttgccaggctggtctcgaactcctgacctcaggtgatccacccgcctcagcctcccaaagtgctggcattacaggcgtgagccaccacgcccagcctccccttactattttgtaagaggcttttgagaaacaatccaagcccttactaccttagttcctcctagagttgactgcacctctcggttaatgttgaagtttgtgtggctcgtcatctctgcctaactatgcaattcattcactgttgtattgggtttttctgtttctttgtctatttgttttaggaaaaaatagcccaaagctcactgtgtaattagcatttagaagctgaagatccccaactgctccagcctctgccgctgccatgctttgagtccacgcccaccagccttgctctcttcaataaaccacaagcatctcac

SEQ ID NO: 170871 - DNA, 259 bp, Homo sapiens
tcccttttttatttaacacctgcagacactgaagcacccaggggctaggtaacaccgaaggcaacacagctgtcaagtgattgactgggagccagggtggggtggggtgcctccagattgaatgtcgataacgacgtggtagctcccctgcgtagttacacacgagtgtacgccaggtatgtctgggacctagaattgccactgcaactggtatccacacagctgcttcagaactaataagctcgctcacgtgggcaga

SEQ ID NO: 170872 - DNA, 367 bp, Homo sapiens
  misc_feature (341)..(342): n is a, c, g, or t
atccacctgccttggccttccaaagtgctggggttacaagcgtgagccaccatgcctggctgctccctgcaaatgttctgaggcacaaaaatcatgtgcaaaaagaatatcaagggcagacatgaattaaattgacataataatggctgctaccatttaacgagagtaggaagggaatgacaccagaagaggacagacttcatggccctgtggagtgggtttttttgtttgtttgtttgtttgtttttgagacagagttttactgtgttgcccaggctggtctcgaactcctgggctcgagcaatctaccctcctccacctcctaaatttctggaagtctnngcaccaaccgcagttgaaagacgca

SEQ ID NO: 170873 - DNA, 695 bp, Homo sapiens
agatttgcagagatatgctcaagcgtgacttaagtgacttaaggctcatgtgttgcctccctatgtcaagcttttcacccagtgagctctttgagaacaggggctgcattttaggacatctcccccagtgtcttcgtagaaccaggcaagacacacggccttgttggaagtgccaaacatctattcttcatcagcagaatggatgagcccctgaaaggcatgagttgagctgcgcagtctgaactcagggaagtcctcgcagcgggctcccaattcctgcctctcaagaagcaagctgagccttaaagatggctgaaaatgtgaacagtctcagggccacgcagacccacctgagcagttgctctctgatgtctcaccgagccatccaccatcccagcgaagaaagggcctgcaagcagaccagaaaatgccccattcagtcatgctgcttagtcatggcccaaacctgcagcgtttaattctgctcactgtgactttattgcaatggcacacacatttacatcactttatgtgcgataacagtagagaagttagttaggtttttctgttttttgtttttttaagataatgagaaaagtctgtaatattcagccaaaatgtatccttgtggctggtgtagatttttggcgaaatgacactgtacataatcagaagaaggcaaacatgcatattat

SEQ ID NO: 170874 - DNA, 415 bp, Homo sapiens
gaccacaagtgcaaagacacagacatgaaatcgcacaatatttttagtgagccatagacgctatttgtgtttgaatttttcctcagtgatgttcttagcatcctttctgtaagtgctcttttattgtggggcttgggcatttgaatgaaaaatctgctgaattccattcatgagtgctgcaaaataacatttttaaattgttacttttttctgatgtaaacatttatgccagaacatcatatttttaaacaaaaagaaatgtgtatatttagcacacaaatgctctgagctcatgttaaaaagaaatctcctttggggatccagaagtgcctccttgaggaaaagacatttgtgctgagctgtgaaagagggctgggcattgtcctgggggaagaggatgtcaggaaatgggaag

SEQ ID NO: 170875 - DNA, 341 bp, Homo sapiens
aatctctgtggttgcacagaattcaaattgcagcaaaaatcattcagggctaaacactggaaaaatctcttaattctaaggtacatgacacaatggactcaaaaacagttgctgagtccctttcactggagaaatttaaagaaagggtatagaaaagttttgaccaattccacccaatcctgcatccccaattccaatctcaaggaccagtttccatctgatctctctccacctacagatggtggtcctgaatctccaaatcaacaaaccaaaaactgaatccatcatcttctcacacctggtttttccttccaactccctcatttctgtgacctgcccca

SEQ ID NO: 170876 - DNA, 409 bp, Homo sapiens
gaggtttaattgactcacagttttgcttggctggggagacctcaggaaacttacaatcatggtggaaggggcagcaggcacgtcttacatggcagcaggtgagagagaggggatgtgtgggggaaccaccacttataaaaccatcagatctcatgagaactcactcactatcacaagaaaagcatgggggaaacagcctccatgatccaatcacctctcacccggtccctcccctgacatgtggggattacaattcagattacaattcaagatgagattggggtggggacacagccaaatcatatcacattccaatcccttgctatgtcttcagacctaattctactcattgctcttatattaatctccattactgctgtacttcttgcaggatatgagcatagcatat

SEQ ID NO: 170877 - DNA, 459 bp, Homo sapiens
gagaccccggcgggggagcctaataatggcaggtaacagtcagcacttgccacgcgcgaggcatgttctcagtgtgtgtcttgtgtcatttctgtgatgcttgcacatcgtcagggggtacctaccactggaacctcctcttttaacaaatgaggaaactgaggcacacagcggttaagggacttacgctaggtcacacagcagtagagctgggctggggcagggggcagctcctcaagtggaacctggagagcccacggggcaaatggcggaggctggaggggctggcaagggagggactgcaaagggcctcacaggggctagacgagggccctgggcaccagtgattatggtgcccccccatgtggattgaagattaaacctcgaagcaagtgtataatgcccccaaaaatcacatttagaagtcatcacttcaataaaaatttctatattaaataa

SEQ ID NO: 170878 - DNA, 365 bp, Homo sapiens
tctttcaaatcgatgacctgacagcatgcagcagtggagaagggccacattagtcatcttacctaatgcttacatgaatggtgacattacagaacttcacctctgtcactctttcttattcgccccctttgtatccttggaggaatttttaaacactctctgagtttttaatgtttttcacttaaatgtattctctttcgcttggcaagatacgttcttcttaatcttcatctcttctttctcttctttttatgcatcttaagtatgaaagttagtaggtgcccagtggtgaagtggctggcctcactgtcgggtcatgtgccttttgcgtaatagatactcaaaaaatatgtgactgaaattaa

SEQ ID NO: 170879 - DNA, 509 bp, Homo sapiens
ggtcaacagaatgactatattcttctttctctggtacgaaccagggcagtgggccatctgagggatgtccgtcgcttggtagtggccatgtctagagccagacttggactttatatcttcgccagagtatccctcttccaaaactgttttgaactgactccagctttcagtcagctcacagctcgcccccttcatttgcatataattccaacagaacctttcccaactactagaaagaatggagagagaccatctcatgaagtacaaataataaaaaatatgccccagatggcaaactttgtatacaacatgtacatgcatttgatacagactacacatcattatcatcagactttattacacctacctcctgctttggtggaagagggtggagatcttcaaaatcaacacacagagttggaaaccagaaaggaggccatggctgttaaggtgactttatgccccatcaaacagacgccggcttgcggaaaaaaaactcagcctttaaa

SEQ ID NO: 170880 - DNA, 313 bp, Homo sapiens
ctgagttgttactcactggcctagggcccttgactgactgtagggcaagcttccagagctctgttacccaggctggtcttgaattcctgaccttaagtgatccatctgtatcagcctcccaaagtgctgggattataggcatgagccactgcgcctggcctccatccagcctgggcaacagagcaagatactgtctcagaaaaagagtaattaaaaaaagactctcttagaaaaatttttttctttcctgcgtttattttttgcctccatttcatggtgatgggaataataaattttttttcttaaataaaaa

SEQ ID NO: 170881 - DNA, 372 bp, Homo sapiens
aactggtctggacacatggcaggcttttaaaaattttatcatattgcaaaatcaacaacagtgtatagatacggtttatatttttgtcttcccatatcattttcttttgcaaactgtccccaggaactacccccaaggaaatttttaattaaggaagcttactttccattagtgtttgcatatgacctgaactgaccaatcagaacaccctatcaccctaggaacagttactggtccaagggtgaatgtcatgtggagcccaagtagagccaagcatagtcattttgagtggcttcctgtagatattcagtatccttctgaaattgtgagttgtgctgcactatataagcctagagctaccaggaccatcct

SEQ ID NO: 170882 - DNA, 475 bp, Homo sapiens
catatttatacccacttttaactgcgtgcagatcaaggggtggtttatgtggacatttctagggaagcggcagtaacttttgggtcatcaggccattgccatggaaaggggtggtaactcccaggtgttgccatggtgatggtaaactggcatgatgcgttggtgggcgtgtcttatggaaggctgcttcctccctgaccctgttttatctagtcctcaatttggtcttgtgtctgagccccacttctggagtcaagttctgcctcttatctccatttctccaactaagatctacaaatggcccatagcacacaaaaagatgctcaacatcattagcctttagggaaatgtaaatccaaaccacaagaaggcaccacttcacacccacaaagatggctacatccaaaagacagacaggccagcacggtggctcatgcttgtaatcccagcactttcaatacagtcagcaccacca

SEQ ID NO: 170883 - DNA, 287 bp, Homo sapiens
agtgtagcctaagagttaagagcatgggcgcttccctgagctggaatcccaattctgccagttcccagctgtgtgacgccgggcagcttatttcacctcactgctctcagcatcctccagtcacagtgctggcctcatggggttgcagtggggactaagtgaagatgcagagaagcacttggggacagtgtgtgtctagaatgtactgtgtacatggtagtcatcactgtaccacatcctcatctgcatcatgatatttttaaagtgtgatactctcgaacccgggc

SEQ ID NO: 170884 - DNA, 119 bp, Homo sapiens
caaatttcttttgggaaaaaaattaagttacaattatagcaccacagcaatggctacagttatagctaatgtaccaccaccaaccaatttgtaaagcagtgccatacaccttatttgtt

SEQ ID NO: 170885 - DNA, 266 bp, Homo sapiens
tgctgggattacaggtgtgagccaccatgcctggcccagcaactactcttaactttacactagttttcttcttatagctgcttactcttatacttaaaaatctgtagtctgcatatttccgagaaaccagtcgaaaccaaaaccacttttcccagcctcaaagatattaaatagaggagctctgattttaacccatctgttctcaatattgaatgctcttttgggaagagttgatgcataggatatgaaattgaacagctatttag

SEQ ID NO: 170886 - DNA, 374 bp, Homo sapiens
ctaatggaaccatctgggatcagcagattttaagtccctgaaggctggaaaagacttatacttggctttataattccccacaaagtcaggcccagcaccttgcacttaagtgtttattgaataaaagagtgacttgtgtggaagttattcattctgctttagctgtttttgtcattcattcccttttaactcttgtagtttgttgtgactttaactttcttacgctttttttgtggagctgctcgataaatatttgacataggtattatgtcattttatggctcatccagtgtcacacaagtagtaaatggtagagccaaaactcaaaatcaatgtcagtggattctgaaggtaggtgctttctggtacgctag

SEQ ID NO: 170887 - DNA, 599 bp, Homo sapiens
tgaaatagtcatttgtgaattcagacagttgtgttagcataatatttctggctctaggccttaaaaatactaacttaaaatgcagaaaccttatagcagttcacctgatgaagatgtgaacaccaaactgattatgaaacaagagtaggttctttaatgaatgtgctctgtgtttaatacattctttctcccttgccctgaatataaaagtcaggcttaatgctcaagttacacacaggtacaaaatttctatttttaatatagttttttcactatccatagtccacatactaatagtcattaagaatcaaaactatcgggccgggcgcgatggctcacgtccgtaatcccagcactttgggaggctgaggcgggcggatcatgaggtcaggagatcgagaccatcctggccaacacggtgaaagcccatctctactaaaaatacaaaaaattggctgggcgtggtgacgggtgcctgtagtcccagctactcaggaggctaaggcaggagaacagcgtgaacttgggaggtggagcttgcagtgagccgagatcacgccactgcactccagcctgggcgacagagtgagactccatct

SEQ ID NO: 170888 - DNA, 547 bp, Homo sapiens
tgggaactgtactttaagcaggacatagaaaacctgagactcatccagagtaggatttccaggtttcagtgtttcgtagagcaagtgaaatttgaagtcagaagactttaattcaagttttgcccctgctgtttagcacttatgtgaccttagacaattagtctctgtgagacgcagcttccttatctgtacaatgggggtaataatatcaatatctaacaggattttgaggattgaaaataaataattaactttatcaaatgtaaagtgctgtataatttttaatttactgatgagtctggaaaacatgtgagatgagccaaaaagtgaaggaaccagatatattttaaggaataaagatttctggacacatgtgataattatctttgaaaattttaaggtctgatatgtggaaaaattaagtttgctttgtttgttcctgatggcactgtgaccaatgtgtggatgtgtcatgagggagcatattggctcaacataagaaaggattttataatttcaaataaaagggagcaccacgagttataga

SEQ ID NO: 170889 - DNA, 382 bp, Homo sapiens
ttagggtgctactgcttatcagtttcacttctagctctgtgccttatttttctagttactgtcaaagttagtgtcttctgttatgtaaaaatgttcgtaatttattagtaaaaactacattgttcagcacccagcagatggtgggtgctaaagtggaatgaaaagagttaccaaacaaggaatacaaaataattcctatcttggtatcatttaaagtgaatctatgctagaaagattccataaagaaaaaaaaatgaatctatatacctacatatacagggaatctgaagtaatttttaaaagcaatgtcagaatggttttcttttcttatggccaagtaggcttttactggacctgaccttcctgcatataactcggacaa

SEQ ID NO: 170890 - DNA, 563 bp, Homo sapiens
gagccactgcggctggccaagatgctttatattcttttaaaaccattgttgtgtctatctgttaactgcacaaatatttaccaaatgcttaccaagagccaaggactagacttggcactgggtagaaactagtaaggcatggtccttcttctacatagaatcttagcattttagagatgagttcccagacatggtccagaaggtcacagttcacaccattaggcaaggcagtatttgaaataaaagtcatgtctaatactaaatccagtatgttctctccttcaggattttactctcattgctgccccttggtttgctatgctcttccccagacagctgcacagctcatttaatttagatctcatttaatttagatctctcaattaatttagatctctgttaaaaaaaaaaaaaagccctaggcagcaaggtctaacatatcatcctcaaattaaagagaaagccctttggtgttatttttctttatagcacttaccaactcccagtagaatgtaaactccagtagggcacatatctttgcctcttttatttactgctctatt

SEQ ID NO: 170891 - DNA, 253 bp, Homo sapiens
cttatgaggtcctgccttgtccttaacaacctctaggatgcaaactgccctaggaaaagcatcgaactgtctgcatgcctgcgaagcaacatcaatgatttggggttctggaaccaggtcatagccagcaagtgtgttcaattctttatgcaattcccaggcatctatctctggcttgttgaagcatgtcacccagcatgcatcaaactcctcatctgcctcatgtgaaccacggaagcagcagcaaactgac

SEQ ID NO: 170892 - DNA, 490 bp, Homo sapiens
tggctgctccggcccttccgcctccagctcggccatggggtcgcgcagctcccacgccgcggtcattcccgacggggacagtattcggcgagagaccggcttctcccaagccagcctgctccgcctgcaccaccggttccgggcactggacaggaataagaagggctacctgagccgcatggatctccagcagataggggcgctcgccgtgaaccccctgggagaccgaattatagaaagcttcttccccgatgggagccagcgagtggatttcccaggctttgtcagggtcttggctcattttcgccctgtagaagatgaggacacagaaacccaagaccccaagaaacctgaacctctcaacagcagaaggaacaaacttcactatgcatttcagctctatgacctggatcgcgatgggaagatctccaggcatgagaaggctggggggttctctccctctgaatggtttgggggtacccggtgggaa

SEQ ID NO: 170893 - DNA, 241 bp, Homo sapiens
cgctcacaaaaacaaatgcgacactgtgtaatcgggaggagtaattctcagcattaggtagtcctgtgttttgaagacctacttgatgtcaagtattgttgatcttcacaaaggaatatcattctcgttcctatcatgcagctcatatgccaccattttggtggcttttaccatttgccaggccttgccaggtcgggcttgtccgctcggaatataatgcagccacacacataactttaaa

SEQ ID NO: 170894 - DNA, 296 bp, Homo sapiens
atctttactctgtcctacctctcattttcaatcctgtttaaaagacgtttaagtgtccaaactttaacctcttgaagctagtcctctccccactttccatctttaaatgggcatatatacaataaaggctctgtccatctccatctcttatatataacaatactgtgacttaaaaaccaactcagtattggaaattttctaaagttctgtcctagagttctttcctgacctctagctccatacttctgattgcctaataaatatgacatggatgttcagtggaacttcccatctat

SEQ ID NO: 170895 - DNA, 238 bp, Homo sapiens
ctcgcaggctcagagagattgtgtagccagcatcggttcacatcattagcaggcagcgaagttgggatttgaatactgtgggcacctttcatgtggcacactcctccccactctgagtcctcctctttcttccctgggaatgagtagcttgcttcctaacaagctccagggctccagtgtccccatggatcctcccacagtgctcttttgcacatggacccctccactcccagttcag

SEQ ID NO: 170896 - DNA, 545 bp, Homo sapiens
ccctcagcagcatattaatacaggtgacacagcagcttggatgaacgcaggtctccccctgaggccccttaaaggcatgttcagatgattttcattatgcagagtgacttcagtgatcaatcgtttggtttttaatttgatgttcttaaccagatttggatgccgtgcacagaatgtaatggatcaaagtggcaatgaatagtggtaatagggacatgcattccatcttttttttgaaagacaaaataattgctcaatggcttgttctgccccaaacctggatacctatttggtcagaaaagtaaagaagaatgtatttctcaaatatcagccttaaggttcatttatcctgggcatctggacagccccctggctgaaataaggctgggaaagaacaatcactttgtttgtaggaaacttggaaggtcaggggactgctgtttgaaggtggtggagggtgatagagtcaactcaacactgtgatcatatgactgggttgtaatgtgactatggggaaaccacccaacctctctggtccatggttt

SEQ ID NO: 170897 - DNA, 194 bp, Homo sapiens
tgggttagtgggctcagcgtcagactttacactggtcttctctgtgccaaccaccctcaggtggagggagctttccaaatctgtcatggagtttggggtactgctcatcgtgataacaatttttatgggctcatgtagactcagtgggtctccgggttgagaagtatcgatgagagtaacagctacctcactat

SEQ ID NO: 170898 - DNA, 573 bp, Homo sapiens
aactccaacaaaataatttttttttagagacacagtctccctctgttgcccaggctacagtgcagtggcacaatcacgagctcactgcaacctcagcctcctgggctcatgcaagcttccagcctgacgctcctgagtacctggcactactatgcctggctaatttttttttgtattgttttgtagagacagggttttgccatgttgcccaggctggtctcaaactcctaagctcaaacaatccacccaccttggcctcccaagtagctgggattaaaggcgtgcaccaccatgcctggctaatttttgtatttttagtagagacggggttccaccatgatggccaggctggtctggaacccctgacctcatgtgatctgtctgccttggcctcccaaactgctgggattacaggcatgagccaccacgcccgagcgctttattctttgttgttgttgtttgtttttaagagacagggccttgccctgttgcccaggctgaagtgcagcagtgcgatcgtagcttgctgtagccttgaactcctgggctcaaacgatcctcctgtatcagcct

SEQ ID NO: 170899 - DNA, 149 bp, Homo sapiens
  misc_feature (34)..(34): n is a, c, g, or t
ctgcggtgattctagaggaatccccctcccaagngatgcagaaatttggtacgcagagaaaggggaaataaatataaataaggacttcacaaaaatgaaagaagcggtgaattcctagagggtaaatatacagaataccaaatcagttc

SEQ ID NO: 170900 - DNA, 456 bp, Homo sapiens
  misc_feature (48)..(48): n is a, c, g, or t
aggccggaccagatattgctatgcaaggaggctatcataatcagactntttcataactgtaagactttgttggcagccgtggtggctcaccctgtaatcccagtactttgggaggccaaggtgggtggatcacctgaggtcaggagttcaataccagcctgacggatatggtgaaacctcatccccattaaagacacaaaaattagccgggcatggtggtgggcgcctgtagtcccagctactcaagaggctaagacaggagaatcgcttgaacctgggaggcagaggcaattgagtttactggtttttatgtataccaatttgatttgggtttaatttccatttaagccttaaatttggctccaagtaatttttctctaagaatcttctctctccataacatgcttagcacagtgtctagcagttgtaggtactgtaagtcatagaaaatatctg

SEQ ID NO: 170901 - DNA, 384 bp, Homo sapiens
ggctcctctaagcagctctcactgatggactctgccatgagaaaagaccctcacactaacttcaacccttcagggccccacagtacctatctttgtgtagttgaggctttttggagcattctttaatgtacagaaatgagttgcaattttgtatgtgcgcctgataattacgaggccacacttgatgttcaggcataaagaaaaggagatagcagcttcctaactttaataattaaaccatatcagagcagtgttccatggtccagcaatgtgttttctctaacgttcagttgtcccccatcttaacacaaatgtgaaatgtagttatctgcctccaaaccatggtgagccctacagtgcaactggcaaaaatgatcacgacag

SEQ ID NO: 170902 - DNA, 216 bp, Homo sapiens
agccaaagggccttggaggccaggaccatggctcatgctcatctatacagagtatacagaagtgcttagtaagtgcttctctgaatggctgttgggaggggagacctggcgtcagcgccaaaactcccgacagccattgccacactccctgctgctccatcctcagggactgggctcagtaccacaaagggtgaggctgggggaacatgtcagcac

SEQ ID NO: 170903 - DNA, 461 bp, Homo sapiens
ttacatagttttttaaaaatagagatggggtcttgctttgctgccctgactggtcttgaattcctggcttcaagcagtccttccaccttgccctcccaaagtgctgggattacaggtgtgagccactgtgcctaaccttcattataatttatttaaccagtttcctgttgatggactttggggtttccggtttttgataatacaacccgtgctgccctagccagccctctgcatcgatcttgagtgttgagtgagtgttttcacttaggttgctagatgagaaattgctgaggtaaagggactgcttagaattttgatagatgtcaaaagttcataccatttatcctggtcctctagagtgagtgtgcctattaccttatacaaagcatttctattcccagcttccatctgattagcgaaaaatagcatcttattttcatttgccattttttgctggtgac

SEQ ID NO: 170904 - DNA, 358 bp, Homo sapiens
ggcatcagccagaaggcgaggctgtgaaggtggggcagtgggactgccagccttccctcgtaacccccataacccacagtcccatcgtgggaatgctgcttctccacatgtctcctctgtgtgccagggcttatcttctgtccctagtggacagaactggtatcttattagctgtctctggacaacaaatgggaagatgattgggaaattttagtttttaactacttctggctactagaaaatgaaatgctatcattaaaaatgagatatcctcaagccttatttatttattatttgtttatttgagacagggtctcacttcactccagcctgggcaaaagagcaagactttgtccca

SEQ ID NO: 170905 - DNA, 197 bp, Homo sapiens
ggagtcacaaaccaagcatcacgtcaaaccacttggagagcggttttaaatgcatattcttgggtaccgggtttactgaattagaatctttggagccagaaacatattttatagcctcccacccagatggtccttttctaacccagggtttggagaacaggtaaagcggctcaaaagaattgtctggagtctcggcg

SEQ ID NO: 170906 - DNA, 161 bp, Homo sapiens
tggaaggtggaaggccgggatagaagctggagaacagggaggaggctggtgccagggtgagaggtgatgggggcttgggacagagggacagcaatggggaaagagagaagtgatggattccttggatattttgcaggtagaaatgacatgattagccagac

SEQ ID NO: 170907 - DNA, 248 bp, Homo sapiens
gtgaagttaaaactaactctgtattaataatattccgggaagtgctcccctctgtcaacgttttgctcatgtcccaagtgtccccacggcattgccacgcaacacaagagaggatgcacattccctccatttaggcagcagttcaacagaactaacgggagagagtaagtcaatctttcaaaagtccaaaaatcctcaatccccattctcaattcagaccaggttcacagtctccttccccaccagag

SEQ ID NO: 170908 - DNA, 403 bp, Homo sapiens
tgctaaagtttttttgacgatgaggtgtgatgaggctgtgttattcctgagggaatgaatcagcattgtcactttgtacaggaaagtatcccagggttgttccgggccccagggcattatcaaaattacagccttagttagtttggtttggctagggatcatgtaagagaattatcttcccagcatgcagtaaaggaatccttctaataacttgtaaacttgtgatatgtagcttcgtgaaatattttatcaaaatttgtgcttatttttagtttgcagtaaaccttttttaaaatttgactttttatattttatggatggcttgagcatccatgtgtcaagccagcacattctcagctcttgcctcagagctggagctgccatcctgtccaaagcctgcagc

SEQ ID NO: 170909 - DNA, 176 bp, Homo sapiens
cccaatacgtagtagcaaacacgtagaggtactgctttggtggccttggattaacatcaagaaaacttctcttgatttttcaagtagagatcttgttctcttccctttctttctctgaaaccagcagtctctctttctctgctgaggcatgtggagctggagttggggtaacataa

SEQ ID NO: 170910 - DNA, 332 bp, Homo sapiens
gaagccctctatcactatttccattgaataatacattgaaaatcttagccagaataacaagaagagggaaaaattaaatatataagcatttaaaaagagaacataaaactctagcattagcaattgctaaattatctacatagcacaaaaacattttcagacaaattattaaaattcagataatttagtaatttttagatatattaatatacaaaagtccattgcaaatctagttattcatccataagcgtgagaaaatttttatttaaaaaaaaaaagataccactatggtagcaactaaagatataaggtaatgagaaaaacatcctaca

SEQ ID NO: 170911 - DNA, 386 bp, Homo sapiens
gtcccagctactcagaaagctgaggcaggagaatggcatgaacccaggaggcagaggttgcagtgagctgagatcgcgccactgcactccagcctagacgacagagtgagactccatctcagaaaaaaaaaaaaagagctgaaatttcactgtctataacaagaagattataggtaaaactgagaaattcagtagtggtaacctaagcatatgtttggaggaaagaaagtatatacccaaaagaaatagctaaaagactgtaaggaattacctttgtggggtaggaatccgtgctggcaaaatgacctaggcttttggtttatttggatttctaaacgatataaatatatgacaataacaactttaaatttattaaaatgtctagg

SEQ ID NO: 170912 - DNA, 285 bp, Homo sapiens
atccagtgggaaggctaggcccatgtctgcccagtttcacaggcagcggggagagcatcaggagccgggctaaagagaagggcagccccaaggcgccaccaaggccgagcggggacgaaacggccccctggagccaggaacaccaagtctgcagagtgaatccggaacagctcaccacctaccaagcaaaacgaaaaaccacccccaggaaaacacaaggaaattcagtcactagaacgcattccctacagcgtcagctttttaccccagaattgtcagacaaca

SEQ ID NO: 170913 - DNA, 189 bp, Homo sapiens
taaactggcagcagggttagacattactttcaaagcttgaggtagaccgagtcagcatgctagacaggcttctctctctaaccaaaactgtaatcttcaggaccagcaaactcagcccaaggcagctaatccccccaaccccatcctccgcgccccgtgcggctgatcggcagccctgattcgccaatt

SEQ ID NO: 170914 - DNA, 449 bp, Homo sapiens
gttgttatttccaataaaatcatgctggaacacaaattacagcaccttagcaaaaaaaaaaaaaaaaaattatgagctaaacaatacaaggaagtaggagctcggagatctggagaaattaattgaggtttgttcaccacctatgattctctggtactacaatgtttagtagaatcatttattattctacattctcatcaattttagcttactttatactaactaaaatctggcagccctaatggctaaagaaaatagatacatttgaaataaaaaacattacctactcttgcctaatataaatttaaatgaaaacagcctgaaccaggattctttctttcagaacaagccacccctccctttccaacaccccaccctaaaatagaaaaacacatacacatcacaaccacacagcattattttctaaaaggaggtaactcgggctctgt

SEQ ID NO: 170915 - DNA, 514 bp, Homo sapiens
atgctgatggattaaagtctctatgccctgttcagagctctggtcagattgttgctcttttataatatagtatccagtgttggcaaatcttcagtttttcaagagatattaggcatctagagttcttaatgggaaatttcttatttctataataattatgagcaactggttaaaatttcaaccatagtgcagaccaatagtaagtatttttagtttgcaggtttacttactgtaacttaccatgcttctcactcctagatttatgtcttcagatctgaatttcctgctgggttttaggcttatcccattgtgttctatatgtaggagttctgtgtcccacaggcatctcaaagaccatgaccctgaacctcttaatttgtattaggaagtgatttcatttataggatacctgtgagtttgaatcattatttcaccacctactagctcaccaaaaaagttactttatttctttaaagttctgtttgctcatatgtgaaatgggagtaatatttac

SEQ ID NO: 170916 - DNA, 388 bp, Homo sapiens
ttttgtctgtcttggaattaacaattgcctcaaagaaaaaaaagaacaaacaaaaaacaaaagtaacccagttgcctcattattttgtttatttgcttaattcttctcttcccactaacttagccacagagttagcagtatgatcaatcataccaagttattccttaggtccattttaatactgggtacatccttcctggaacactcacttctcttgctctgctccggacttctcttttataagcctgctacacaggtgtcatcctgggatttctcttgatcactttttgaggaatcccttctatgttgattcctttgtttcttggatctcctttttctaaaacgatgcatttttttttttataatagagatagggtctccctctgtc

SEQ ID NO: 170917 - DNA, 193 bp, Homo sapiens
agcagagtgtccaggcaggtcctggcaggtgtggtggaagattggcagtggccactggatgaggtgcatgtcctgatgcctcaggcagtcctggacagacggtcatttggctccttctttttggcataggttggccacttgtcaagtgtggccaggccttcaggctgggctgctcggtcataagctaagaggc

SEQ ID NO: 170918 - DNA, 440 bp, Homo sapiens
acttaatgcatgtgaagctcttagaatagtgcctgggaggcagtaagttcaatagatctgttcgctgtttttatcttctttgagtcactcagcaaccctaaggcttggtagggcagaggttattcccatttaacatgggaaaaaacaagatcacaccatggttaagtcataaagctgagaccagagctcaggtccgttggcccttagtcctgtgcttattctgtgacaccatacttccttccttatattatcaccttagagaagggagaaggtaaaagggcaagcagaaatgaggaaaagagaggagaaatacatctataaggctgggtgcagtggctcactcctgtaatcccagcattttgggaggccgaggcaggtagatcacctgagctcaggagttcgagactagcctgggcaacatggtgaaaccctgcctctaa

SEQ ID NO: 170919 - DNA, 322 bp, Homo sapiens
taatccaggtgagagaatgaatttagatggcggcagctgaaatagagaaaaatggatggaagatatttaagaggaaaaattggtaggatttatgatggatttgatgtgggggatgataggagaggaaggttgtcacggtctaggtttctggtatgcacaaatagattctggtctcattaatgaaaaggatgaaggaggtcagcattagtgggggaaatacatgagctgtgtttgagcttgtgctgtggtttgaatgtttgtgtccctccacaattcatgttgaaacttaatccctaatgtaatagtattaagaggcgtgatg

SEQ ID NO: 170920 - DNA, 396 bp, Homo sapiens
caggacctgaatggatgtgagctcatgtggctagtatgaggagagtggggccccattttagcacctttcaaagtcatcccatgtgggaaaatggaagaggtcctctgcaaaggtgagactcaaaggccaaggacctgacttagaccagagactcaaggatgcgacgttttaagccttcttcctgtatccagcgtgatcttggtgaccctctgtatttcattattttcattttcaaaatccttaataaaagcccctttgtgttttaagtgttctcaccacaaaaaatactgtttgggaggtaatgcatatgtgaattagctcaatttagccatttcataatgtttacatattgcaaaacattgtgtagcacacaataaatacatataatttttgtca

SEQ ID NO: 170921 - DNA, 391 bp, Homo sapiens
gttgaacacatagaaagtatttcaaaattgcctggctttagacacaggtgggcagacaggtaccagaagcagtggaaaggaagaaggggagagggatgcactttcagggtgcttggagattgtggcactctattctgattctggaatggagaagaacagggcttgtcactgtagttctgcttctaccactaactggctagaagacctttaccctggggacctcagtttctcatctacacagcggcagatgatctctaagttcttttggctatgaaatcctataattctctgattccttcagtttataaaccctaggaataaaggtcagttgtatatataggggccagtttaaacccaaaagctattttagaacctgtgtctacaccccaga

SEQ ID NO: 170922 - DNA, 128 bp, Homo sapiens
gttgaacacatagaaagtatttcaaaattgcctggctttagacacaggtgggcagacaggtaccagaagcagtggaaaggaagaaggggagagggatccctccctggcacttggctagaggtcaattc

SEQ ID NO: 170923 - DNA, 904 bp, Homo sapiens
ggcatcaaaggctgttgcaggagtgtggaccggccaggtgacgcagaatcagcttggatttttccgtctgctctgccatctgtaactcagtaactcagcagccagggctgttttatcctcccctcaagagaggtgaccagtaaatttagagttgagaaatgtgtcagaagtctttgaaattggtggaaggaaccacgaagtctatcctgaggcaaaactgacagtcagacaaagaccatgacttacgtttttacaaaagaactaaattggccgggcgtggtggctcatgcctgtaatcctagcagtttgggaggctgaggtgggtggatcatgaggtcaggagatcgagaccaacctggctaacacagtgaaatcccgtctctactaaaaaatacaaaaaaaattagccgggcctgatggcgggtgcctgtagtcccagctactcgaaaaaaaaaaaaaacaaacaaaaaaaatggggggggccccgggcccggaaaaagttttcaaaacacacctccggtgggcgcgggggccccagtggttagggggaactgggcacaagggtgccaaggagaacgggccactagacagcgggggggttttcacccaataaaaagccgcggggcacggaggggttgggacgacccagaggggctgacggactacgggccttcagggggcaacggacccgaataaatcccgccgcggtaggagaagaagcaacaaaacacaaccacgcacgacacaacgacaacacacagtcacgagtacaacagcagcacagtcgtacacaaactaagcatagacactcagtcacctcagacgacgcgcgacgcgacgccccagagagccactccaccgggagcgccggaactcaccagacatgacacgcgaaggactcatg

SEQ ID NO: 170924 - DNA, 750 bp, Homo sapiens
gacttgctgagtcttctggccttcatctttctcccatgctggatgcttcctaccctcaaacactggactccaagttcttcagcttttggactcttagacttacaccagtggtttgccaggggctctaaggcctttggccacatactgaaggctgcactgcaggcttccctgcttttgaggtttgggactcggactgcttccttgctcctcagcttgcagatggcctactgtgggacttcaccttgtgatcatgtgagtcaatactccttaataaactcccattcatatatacatctatcttattagtcctgtccctctggagaatcctgattaatacactgtccttcatttttctgttggttcccttcttgcttacacttattttagaagccagtctcttcccatatacttggagaaatagaaacttttcagaaaaggtctgagaaagatattatttctggtctcaaagagttcaccttctagttagagtgagagactggacttgcctagacttctcacatatgtattcttgtcctgagcctcttaggtgggtttgtgtcctgctttctgcaagtacatcgcaacttggtctctgcctcagtcaccccagggaactctgagttcatatgctctgtgtgcacagcaaggacctctgtgtgcacagcagggcctctgtgggcctgactccctgaaacaggggcaacactgccatcctcttcttagtcagctacatgagttcaactacttccc

SEQ ID NO: 170925 - DNA, 604 bp, Homo sapiens
tttctgcttcatagatgactgtctcttcactttagtctctcatggcagagtagggcaagagaactccctggagcctcttttatatgggcactaatcccattcattagagtggagccctcataacctaaccacttcccacatgtcccacctccatataacatcacattgggcattaggtttcaatgcataaattttggaggaatacaaatattcagtctgtagcaaccactgttcatctatggttggtacctttaggtttatatcagcagaaagggcatggaagggaactggaatgtactaaacacctaattcttaccttatggcttcatatctattttatcttcctaagaaaaatcttgtgaaagcagcattattatttccattttgaacattaaaacaaacagagtgcaagaatgcgtgaataatttgtccaagtttacccagatagcacagtggtacagggcatgacttgaatccagatctgtctagctttaaaaaatcattgctttttatttatggcctattactctctgttgacaccaaggctaccacatccacccataagcattctcctcagtcctcaaagaggctaaattctcaaagg

SEQ ID NO: 170926 - DNA, 309 bp, Homo sapiens
tcttggtcatctgtgtccctagcaccaggccacacactcagcaaaacaaaatgatgaggatgtgtctgtgggagagatgttaactcctccccatgaaggaccttctccagatatcctgttttttgttgttgttttttgagacagggtcttggtcgatctcagctcattgcagctttgaccttctgggctgaagcagtcctcccacctcaacctcccaagtacctgggactacaggcacaccacacccagctaagtttttgatttttgtagaagaaaatcactgtgttgcgtaggcttgtctcaaactcc

SEQ ID NO: 170927 - DNA, 621 bp, Homo sapiens
cctgctgcccaaacttgatacagttagttgactcatttaataaatttctgttaccttgctgtttattacctcctgaagagaaattctttattaagactctaatactgaatcctgtcctttttctgtctcagcccatttcttttatggattcactgctttctgtgaggtgctactcttgcaaagtcatggggatgttataaaaatatttgtcttaattcaggttcccacagtggcagattgaattcaagtgcaagtgatttattaaggaaatgctcccaggaagtagtggcaagggaataagaaacaggatagggaagcaggagaagccaaatctgcctgatgctgtggagagctctggaatgtaaattatgcccctgagtttgctctatgttaagacagatgagcaccatgtttgcactccaaataagtaattattggctacaggcttcctcaggagtagagaaacaacataaagtcctaggcacttgtgacttctccatatgagtaagggggctctggtggccagaaattatcccctgaagaaggttgcaggtgcaagtagcagtaaaacacacaggagcttggcagggatgatggacacacaaagttcataaaaaagga

SEQ ID NO: 170928 - DNA, 316 bp, Homo sapiens
agagaagggggaagtgccagctccccgagaagaaagcaggaggatgctgagagactaaagctgaaattttctgcctgcttcctcactcttttcgttggtttcagccgtctgaaaaacccttgtgagaggagcaaaaaggtcaagggaagattgttgccttgctctcagtcttcaaaattttcgatcctccgttttttttgttttgagacgcagtctcgctctgtcgcctaggctggagtgcagcggcgcgatctcggtcactgcaacctccgcctccctggttctagcgattcttctgcctcagcctcctgagtag

SEQ ID NO: 170929 - DNA, 451 bp, Homo sapiens
tgaaaccagggaaactggcacccactggtggtggtatcatgatgaggttggaacaggctgtgtcctagacttcaacaatggccaaaccaccatggcttaaatgacttatcctttaagccaaaaggccagaaagcttctgatgttaaactggatttcatttcaattctaatgcagctttattttctgtaattgtttttcattggagactagttaacaggaaagagaagaaacaaatttatgaacttaaaagtaactgaaactgacattatagaaatcactttttaacagaatttctccactgaaattaagttatggtctctactgtttatgatttagtgaaaatggtggttattgtttactgtaacttctttcaggctctatgacacagatcatatgtagaagctaataaaatcactgctaaatgctaaaattaaagaaaaaaatgatatta

SEQ ID NO: 170930 - DNA, 507 bp, Homo sapiens
tgataattacttgcagggagtttaccacctctgtaaagcacagagcagactggccacatggtaggcgccctagtatgtcaactttgttctctttctctgagttgtggctccactagctatttgtagacaggagatctttgtggcttcaggtaggtgatgggggactgaaagctaagaggaaaagcctcccctgacctgcagcttctctttgagctggcatgcctggaattcttggggctggctgctgggtttgttttccagatgtggaagcaatttaagttctgttttcttaatccccaacagtttgcctccgaagtccacattctcatttgaaaatcaaggccgttggctctgtttgcagggcagagggtaggctagatagcctcttcaaaccctttttgtttaggaaatgggcttactggggcactcagatctgggacccagggcattcttgggacagtcacaccccatccaggacttggttaaaaggtgagttcactttctctg

SEQ ID NO: 170931 - DNA, 656 bp, Homo sapiens
ttatgccatttcaagttatcttttagctcttctaataccttttcaactaattccatcagtagaatcacccaatgggggttttgttttcttgactggaccctgactaatacagtcccaaggaaagcaatctatagcctataccaaagacataaaagagagcaaaccataaaagaggaattgataataatgaagataaagtgaaaatctctaacatatttaatcaacttactagaagcatataatagactagatgatgacaatacagtatataaagagaaatggttcagcatttttcagaattactgaattctatcaattctcaaactcaggaagtccaatgaatcccaagcagaataaataacaatttctaaaaatccacacctaggcacatcctagggaagctgaaaatcacaaaacaattttaaaagcaatcagagagaaaatacaatacccctgtaaatgagctgcaattagcatgataacagactgatcaataggaatagtggaaactaaagacagtgcaacaacatcacaataggccaagagaaaaatactactggcataaaattctgtatacacagcagaataatcttttcagaatgagggtgaaataaagccattttcagacaaaaagaaagaaactgaatctgcacact

SEQ ID NO: 170932 - DNA, 319 bp, Homo sapiens
cgaggtgggaggcggggctggactctggagctgggctcagacaccagaccaaaatgaggactagataaaacagggaaggggcaaaagcagcttttcataagacatgcccaccagtgtgccatgtccgtttactattgtcccaacaacactcaggagttaccgcccctttccgtggcagtgaccccacgacccagaagttcctacccttgtcctagaaatttctgcataaactaccccttaatctacatgtaattaaaagtaaatataaatatgactgcaaaactgccttgagctgccactctcagcacactgcctatgg

SEQ ID NO: 170933 - DNA, 1632 bp, Homo sapiens
catagaatgagtatttacatatgactaatgaacatgaaaaggtagtcttgatcctatggtaaagccattcaggttaaggtgaagaccttttcacttcttatatttctaaaagttaatagtatatccaatgcttgcaagagtgggaggtagtagatgggagggaagtttggcaatacacagtaaaacatatagtgggcctgtcctttagccctgcaggttccaccagtgcaagtgtaccctctagagatgctcacagaaatacagagatcttctcccctgacagagattgaagccttattttgcacagcctggtgtccggggaaggcagagatacaaaaagtcaattctccattcatgccgcctccacacactgtctcctgatgaccactggctcccgcggtcagctggatgatggccaaacgtctcatctcagcatccaagctgcctttttaacccttctggcctcagcggttccctgccccggtcactcggcaaatgtgatgtgagcgatgtgcacatcctcggcctggagagcttttgtgagatctgggtctctcttctgcaaagcctccagagacagtcctgccccagccacatctgctcaccccagccaatctgtgcccaaggcagagctggccaacagatgggtcaggacatgtgggtctaatgggtgggtggacagaggacacatggtgagacggaagaagcaccacagtgtttcagaaaaggaatacttcattcccagtttggggtgaggctggaaaacttctagaaggaggcagcaatttcactgggccttgaagcttggtgaggggaaaggtgtgtcaggcggggaaaatggcataaactaagacacgtaggtggggcagtctagggggtcggcaaggcccctgtcctcaatgggagatggaagacattcctggaagagtgcctgaggcagtgcggtgaacgggtttgaaaacctcgtgaggggctgggctctcatctgtaggagccatggaaagagaaggatatgatcagggccatgaaatctgcaaccagtgtaggggaaggagacaagacaagcctcgaggcagaaggttcaagtcccagtgtggtggtccaggtgggagagcttgcgagctggggatgggggtgggagaggaggaacaggtgtggctaggacacagcagctgctagatgtgagcccaggaggctgtgagaccttccagtgacagggcggtcagaaagaacaggttaggtgggtgggttctgcgttgggttttggatgtacacactcacccactcactcctttctgaatatcagcatcacacatttatctttcccatcctccatccatctatcattcatccatcttccatccatccattctccatctgtccatccatccatatgcatccatccatccatcctccattcagccatcctccatctgtccttcatctatccatccaccctccatccatccgtctatccatcttccatccattcatccatccatcctccatctgtccatcctccatccatccatccatccatccatcttccgtttgtccattcttcatctgtccatccatccatcctccatctgtccatccatccatatccattcatctattcatcctccatcc

SEQ ID NO: 170934 - DNA, 102 bp, Homo sapiens
cctacacttagatgcaggaacaaagaaaggacttcaagttggaaattatatttaaaggggaagcagtgcataaaagtttggaaaatgtgcagcttcgtcatg

SEQ ID NO: 170935 - DNA, 476 bp, Homo sapiens
actacgatggccagtaccaaagatctaatgaacaaatcccctgcatttgggaactgagaatcagatttaacaaatatttgctgagaacctctaatggctcaatctttcaagaatatttccttctttagttctcacagtccttcaagttatatatcatttttgccattttccatttgaagaaaccagctcaaagacgtgaagcaatttgcttcatgtttacaaagctagtaagtagcatagtcaacgtttgaattagatcatctgacttcaaatcagtatccctataccacagctaccactgtagggtctacatacggtgtagatcacagtacaactaaggtggaatttcaccaaccaccaagatgcaaagattgagtgctgtggagacaaaggaagcgatcagttggaatcactctgtagatccactgggacttagaagagaagaggttgaacagcagtggactctgggagggttg

SEQ ID NO: 170936 - DNA, 951 bp, Homo sapiens
caaagcaattctactggaaaacaaaacaaaaaaaaagattagccaagcatggtggtgcacacttgtagtcctagcttcttggaaatcgaaagtggatgaattgattgagccctggaagtcaaggttgcagtgagccgtgattgcacagtgtactccagcctatgtgacagagcaagacactgtgtcaaaaaaaagaaagagagagagagagagagagaaagaaagaaagaaaaagaggaaagaaaaagaaagaattttgaggactgctttcagttttacatctcatgtacatctcatctttactggtttattattgttaattttttttccattggtaattcctctgagttttactttctaaaacatacccaaaatcttaccatttatcactacctccatacaactacgtttgtctaggccctcatcatagttcacctaagtagactctcttagcagccccttattggacttccagcttccattttttcctctatgtagtcttttctttacacagcagatagaaagatcttaaaacatttactcctctgcccaaaaccatcccaaagttaaagctataatccttagtatggcccttagagtcctctgtgactggcctgtgactgcttctctaatcgtatctcctaatactttctgttttttcactgtgctctagccatgggactttcttactgtctccctgaaatgttaaaagcacacccttagttcagaagatttgcatttactgtcttcctcccagactgcactcctttcagatacctgaatgagttgctcctacagttcatccaagactctactaaagtgatttcaccagaggatatccctgacctctcatatctacaattctcttctttccttacttgcaaagcagcctatatgcataactgtagatttttatggtttttttcctcctaatgtttaactgttttctta

SEQ ID NO: 170937 - DNA, 198 bp, Homo sapiens
agccaacataatcatgatcatatgctgatcatacccatgaaatttaacattgaaacaatactattatccagtatacagtctgcaatgaaactttaatcgtccccttgtccttcatggctttttctttttaaatccagaatccaaataaggcattgcgtttggctgtgaagcctctctggcctcctttaatccagaaca

SEQ ID NO: 170938 - DNA, 679 bp, Homo sapiens
ggctgttgcagtgaggtacaagtctgaagtagctcatctttttcgtcagtgttagccacacttgctttcaacttcagtcttaatttgtttccagttctaaaatgctttttaaaaaagtctgaggtagcaaagtagctgctggtacttcagcttgattctgaagaaataaatcttaaaagcgaatcaagccaactcatgaatttaaaatgaaggcaaagtccaattcgccactcccacccatttctcacaccagctgtccaccaatcgtggctgcaacatttctgacacgactaaatgggctgaatcacttgaaaagactcggcttcgctagtactcatgaagaaccgcactttcagccggatggggcagggccacgctcagaaccaccagctaagacccaatcctctcgctagggaaccgtaactaggcaaccagcaccagtcaacagcgcgcgctcgcttcaaaacagcaggttgccgcgggtaccgaaattaactccagagaaccagggtcagcagcgagaggcagaacagagcactaaaacctagtagcatcacaaaaacgaggcattaactgacgggtggtctgaagccggagggcagttttaaagaccacgcgaaaaggggtagacctactcaacgcactttgctgcgggtcacagttattttctcaaaacccc

SEQ ID NO: 170939 - DNA, 354 bp, Homo sapiens
ctgggcagtgccttttgggcaccagcatttaattttcacacttgcatgggagccctggcaggacttcacagttctcagacagccactgcctgcccacacactcctgatcccagtacttgctgagtgattctagggctggtgactctggtactgtgtccacattgcctcctcttgggtgacagagacagaacatgttcaattaagagactcttggcaacagcccatctatatcagcaattgttgatgctcagatcattgtcatgtatctcctttgtcaatgaacaaatattactgcgctactgtacactgggtactgtgctagaggctgaagatgtgatgaactcaacagcaact

SEQ ID NO: 170940 - DNA, 447 bp, Homo sapiens
gagacagagtctccctctgtcacccaggctggagtacagtggcgcaattttgctcactgcaacctccgcctcctgggttcaagcaattctcgtgcctcagcctctcaagcagctggaattacaggcacgtccgccatgcccagctagttttttgtatttttagtagagatggggtttcaccatgttggccaggctggtcttgaactcctgacctcaggtgatccacccgcctcagcttcccaaagtgctgggattacaggcatgagtcaccttgcccagcctgtgagaaagaattattctgtagattcctagtaaataaagagctacaagaacagacagaacaagttgtaaatgggacacagctgctacccagaggagcagggtggagaagcatcctcagaccacatggagaggcagtatcaatacctctgattagataaaggcaga

SEQ ID NO: 170941 - DNA, 222 bp, Homo sapiens
gttttatgatggtaaaacagatttagagactactgctggaaaaaatgtcatggcttgaaaatattatttaatgactcataaattatgaatctgtaatagggagtttttttttttttttttttttttttgagatggagtcttgctcttgtcgcctaggctgtagtgcaatggcacaacctcggctcactgcaacctctgcctcccaggttcaagtgattctcc

SEQ ID NO: 170942 - DNA, 257 bp, Homo sapiens
gttaacaggaattgaagcaaaagataagagcttcttttaagatgtaggtattggaggtagagagagttatacagattagagacatagcaagaaggtttgatttgattgattgtgtagggcaagggaaatggagaaggatgagtcaaggatgatagttctaagtttccgtagggagactggttgaacaaggatgccactcagtaaaggaaataatacatgaagaagagtaatgtgaaggccagggaagacagacaaat

SEQ ID NO: 170943 - DNA, 307 bp, Homo sapiens
gggcatggggaggcttcgctgtggagacaaggccctggacttggagaagaggagctgaactcttcctcctttatcaaatggacatgcccatttataaaatgggtgtgtcatgtgccctgccaatctcaaggtcagaaaagctcagggaggtgaaatttcttcacagccataacatggcattattcagcagctggagtggccgaggggactgaagatggcttctccaccctcctgctgcctctcctgcatctctggtcagcgtgcaccaccttagggcctccgcgcttgctgtccactgtgtttcagg

SEQ ID NO: 170944 - DNA, 449 bp, Homo sapiens
gccagtgaccgcccataatttctgaaaaatggcatctgaaaaatcacaggactaaataataactgaattgttcaatttacattttaagtaaattattcccaaactttgatattaaagatgtttattcatttcaagccagttgggacatactgatcattacacattgcaatttcattcagcaccgcaaagaggaaccacccctgtctatgaaatgtacccttttctctggtgacattggcccatccttatgagcataataaaatcgcagaatcaaagcgctgcaagagatcttaaaaccacctaagtctaccactgagagcccaagaatcttggaaggacttcacagctggcctcatgccttcactttatatctcagggcattttctctcatttgtaaagggacttgtccttgatcaaattggtaatgtcagccatgggaggagaaatca

SEQ ID NO: 170945 - DNA, 603 bp, Homo sapiens
ctttagtttcatcatctgtgaaacaaaggggttaggttagaataagaaatttccaaagatctttctacttctcacagtacgtggtgctgtgtcgaggtaacgtcctttacatacctcatgaagttagtgctagttgtaccatccaaaccacacataagttctgtgaatacaaccaaacagctttgttcacatgtatttgcatgtgtttcaacttaccgtgttctctgcataatgattcttcaacagtttgaggtaaagagtgaatatttcagtttaaaaatacagtcaaaagtatagtttcttattctggtggacgtggtttactactacctcctccccctgtgttttagtttgttgctgtgctagttttattgcatattttctctcctaaaaatagatggtctttatctaaagcgtagtttttataaatatttgcatctcaagtaaattttttcctaccacatggatttcatgtggtgagttccatgaaagcaggttgtgttaagagggcattctcctagtacctgtttattcttttccatacctctgccccaaggatcttgtttactgatgtcagaatactggcagtttgagtagtactct

SEQ ID NO: 170946 - DNA, 342 bp, Homo sapiens
aaatcaaaggaatgcaaagtccctgaaaaacagtatcaaccacccacaaaaaccaccttactctaggcttctagtttcttaggtaaatttcccactggttattgttttattccgtgtgtgtgtacacacttccttgattctttgtcttggggcctaatataaaaggttttatggctctccactatgctgcttctgctcctaagagtttcagtggacttcacgtgaacacttaggtttgcaaatcagcatcagttttataaaacaaatatttgtgttttttgttttttgtttttgagacagaatctcacactgacacccaggctggagtgcagtggcaagctc

SEQ ID NO: 170947 - DNA, 192 bp, Homo sapiens
cctctgcctgagacatccttcctctccctttatctgggtttagagtatttttttgattatatctggtaaagcaaaactccctttgataatctatatatgaaatggtgttctgttgttaagaaaagttatttgttatactaacccacaaaaatatcaatgtttttctttcaactccacttttatgacccccat

SEQ ID NO: 170948 - DNA, 762 bp, Homo sapiens
gaacaagcaatatgaaaaagagaggcaaagacttgttactggaatagaagaactacgtactaagctgatacaaatagaagctgaaaattctgatttgaaggttaacatggctcacagaactagtcagtttcagctgattcaagaggagctgctagagaaagcttcaaactccagcaaactggaaagtgaaatgacaaagaaatgttctcaacttttaactcttgagaaacagctggaagaaaagatagttgcttattcctctattgctgcaaaaaatgcagaactagaacaggagcttatgcttgaagctcaactagagaaaaaggaccaacaatttaaagaacaagaaaagactatgtccatgttgcaacaagatataatatgcaaacaacatcatcttgaatcactagatagactcttgacggaaagcaaaggggaaatgaaaaaggaaaatatgaagaaagatgaagctttaaaagcattacagaaccaagtatctgaagaaacaatcaaggttaggcaactagattcagcattggaaatttgtaaggaagaacttgtcttgcatttgaatcaattggaaggaaataaggaaaagtttgaaaaacagttaaagaagaaatctgaagaggtatattgtttacagaaagagctaaagataaaaaatcacagtcttcaagagacttctgagcaaaacgttattctacagcatactcttcagcaacagcagcaaatgttacaacaagagacaattagaaatgg

SEQ ID NO: 170949 - DNA, 1285 bp, Homo sapiens
gagcaacagagaaaaaattttttttccaagaaaagaaagatttataaaaatattgaacaaagcctcagagatatatggggaaggacctggaagatctgatattcttgtcttcagagtcaaaggagagaatgagattagtgcaggaaaatatttgaaggaataatgtctgaaaacttcacaaatttgatgaaggaaataaatttacaaatttaaaaaaatcaaagagaactacttctagacacatcaaaatccttgccaaaaactaaaacaaaaaactttgaaagcacccagagataaatgacactgcatataagggaacaaatgttaaaattactgcagatttctcatcaaaaactatggacataagaagatggaacaacattttttaaatgctgaaagagaaaaaaactgtcattctattttatatccaacaaaaatactctctaggaatgaaggtaaaataaagacattcttagatgaaggaccgcatagagaatttgtcaccagcagacttgttctaaaagagaatgctaaagaaagttcctcatggaaaaaaaatacctgagagaaacttgggacctcaggaataaaggaagaacaacaaaaacagtaaatatttgcttgaagctcaactagagaaaaaggaccaacaatttaaagaacaagaaaagactatgtccatgttgcaacaagatataatatgcaaacaacatcatcttgaatcactagatagactcttgacggaaagcaaaggggaaatgaaaaaggaaaatatgaagaaagatgaagctttaaaagcattacagaaccaagtatctgaagaaacaatcaaggttaggcaactagattcagcattggaaatttgtaaggaagaacttgtcttgcatttgaatcaattggaaggaaataaggaaaagtttgaaaaacagttaaagaagaaatctgaagaggtaaattaacatttactttatatatagcatatatttcaagtgattttttttaagaagcatgagatgtaggacaaaatatatatatatatatatatttcttttgagacagcgtctccccatgttgcccaggctggagtacagtgtcgcaatcttggctcacttgaacctctgcctcctgggttcaagcaattcttgtgcctcagcctcctgtgtagctaggattacaggtatggtggtgcatacccgtggtcccagctactcaggaagctgagatgggaggatcacttgagcctaggaggtcgaggctgcagtgagctgtgatcacgccactgcac

SEQ ID NO: 170950 - DNA, 412 bp, Homo sapiens
acaccagctgagaggtctgcatttcacctgcaccacccagcctgcaggcaccccaactccaagacactgagttccctccactcagtgagggaggagcccaggtccctgcccccaggccccggcacattcaggggagtgcagcacccgctaccaggaggtctggccaacaggtgcaccaaaggatgagatggcagccgcgagggggtctgcaggcacacaggaatcacgcccaggatgcaggagctcctggggccttccgagacggaagcagcactgaggcctgagggcaggaggggccttcgctgggaagagagttgtgtgtgagacccagagggcactggtggcacaagcaggtggaaccatcaccaacaaggacacccgcggcacacccaggccaggcagcccccacacg

SEQ ID NO: 170951 - DNA, 530 bp, Homo sapiens
gatctgcctgccgcagcttcccaaagtgttgggattacaggtgtgagccatcgctcctgcccagtatttcacatttttgatgccattataaatggtttccaattgtctgtggctagcatatagaaatacaattggtttttgtatactcacctgatattctgccacgttgctaaagtccctcactagttagactagcttgtttgtagaatcggtaggctttttcacaaagataatcatctcatctgagaaaaaagacagttaacttcttcctttcccatccagatgccttttctttctttttcttgcctgattgcattggctagaaccgccagcaccatgttgaatagaagcggtgagagcagacctcttgtcttgccctgatcttacaggaaaagcatcagtctttgactgtaaagtgccatgtttgctgtgggtgttgcagatgccctttatcaggttaaggaagttcccttgtattctcggtttgttgtatgttgttgggttgttttttttttttaatcataaaaggg

SEQ ID NO: 170952 - DNA, 114 bp, Homo sapiens
cgctgcctccccctcttccctcttcccacaccgccctcagccgctccctctcgtacgcccgtctgaagaagaatcgagcgcggaacgcatcgatagctctgccctctgcggccg

SEQ ID NO: 170953 - DNA, 976 bp, Homo sapiens
accctaaagaccaaagtgtcacactagtcaagggagtgactggagttatttctggtagcagtagccactggcatcctagaaacacatggacatttgtagcatgaattgacctattggtagtgcaatagctatacatgatttttattcttggcaaaagaaaatgcttcaaaaaaaaagtgatcaaacctgcacattgatcctgtaatagcaaatggaaggctatttctctgtactagcatttcagctttatgtgggaaagttacccgttctcctgcaagtacaatcaacccttgatgacttaagtattaattattctgggtgtagctcacccaagttttcttcctacatcttttggctaattccaccacacctcagcatcacagtcagatgggaaaaggggcaggtggattctcatgtcatgccttcttgtaccttattttcaagttttgtggtggaggaggtttaattatctgctcaagaatctggtatatatagccaggtgcggtggctcatgcctgtaatcccaggactttgggcaaggcgagaggatcacctgaggtcaggagttcaagacccgcctggcccacatggccaaaccccatctctactaaaaataccaaaattagctgggtttggtggtggacacctgtagtcccagctacttgggaggctgcggcaggagaatcacttgaaccccggaagtggaggttgcagtgagcccagatcgtgcccttgcactcccgcttgggtgaccgagccagactccgtttccaaaaaaaaaaaaaaatcggctatatgtaaaaactattaattatgtaacctcactccaatactgtactgatcaagatctgcccactcctagaggactgacccaatggcagatcccctactataatctttctgacaactcagtgacaggtaaaatcactctaatattcctaaaatatctagacacttgaattagaaatacagaacc

SEQ ID NO: 170954 - DNA, 574 bp, Homo sapiens
tgagatgccaggagctctccaggaagcacctcgtctgtaaaatagtgatggccccctgcaggcctcaggcacataccatgagctcagaccctcacagcacttaggagagtggcctaggctggccgggcacagtgactcacgcctgtcatcccagcactttgggaggctgagtcgggcagatcacaaggtcaggagttcaagaccagcctggccaacatggtgaaacccagtctctactaaaaatacaaaaaaattggccgggtgttgtggcacgtgcctgcagtcccagctagttgggaggctggggcaggagaatcgcttgaaaccaggaggcagaggttgcagtgagccgagattgtgccactgcactccagcctggcgacagactgagaccccgtataaaaataaataaataaataaaagtacaaaaatcggttcaagaaaaaagaccgcttctggaagccatgggcctattgatttgttttcagccggaaggtcggggcatgattaaaacatttccctaaatggaccccctcgggggggggcccgcgcccaaaatccccctttagtgggg

SEQ ID NO: 170955 - DNA, 477 bp, Homo sapiens
tgagatgccaggagctctccaggaagcacctcgtctgtaaaatagtgatggccccctgcaggcctcaggcacataccatgagctcagaccctcacagcacttaggagagtggcctaggctggccgggcacagtgactcacgcctgtcatcccagcactttgggaggctgagtcgggcagatcacaaggtcaggagttcaagaccagcctggccaacatggtgaaacccagtctctactaaaaatacaaaaaaattggccgggtgttgtggcacgtgcctgcagtcccagctagttgggaggctggggcaggagaatcgcttgaaaccaggaggcagaggttgcagtgagccgagattgtgccactgcactccagcctggcgacagactgagaccccgtataaaaatctttaaattccattaagtacaaaatttagatatctgaacttgtatacacctaagtatgtcccacctaagtg

SEQ ID NO: 170956 - DNA, 261 bp, Homo sapiens
catcgcttcgcaaaagtgttatacaatgcaaaaccacatagttataaatgtcaaataagcatagcagggagatttaagaatgccacaaataaaatgtaagcctgacttgtacatgcatgaatttgagcagagaaacatgttactgactactaattcactattatttccaagctacctaagggatcttagttcaaaagcaaatgaaatgtgttaaaaagaggactgtggtggtaggtagatatatttccattatgcatgtgg

SEQ ID NO: 170957 - DNA, 222 bp, Homo sapiens
agtactgagttttctttctgcttattgaaagagctattactccactacactgaagcagaagaaatatgaggatatagaaagattaaggcctattgaggattcctgtgaaacttttcaaagctgtttcagcatacatgctaaagttgttaccacttaactaattttagcaatctggaacactgggattgctgcagtttccgattgccacaacatcatcaattc

SEQ ID NO: 170958 - DNA, 720 bp, Homo sapiens
ccccagcccgcgcgtccggcgctcagcctccgctccagaggcgagcgctgcgcttcgggcgccgcaatctccaggacacggcctcgcggacaccttccgcctcggggaatcggcagcataggcggcgcgaacggccgccgccgcctcggctcctctctcgagtccttcccgtcacctcgctgagagccggtcctggtcgcggggacatctctctccttcctcggaggctcgtgggaccaacggacggacgcagccagcgagggccggactgcgggacgcggccagagcagttgaacatcagatacccagagtgacatcaggttaaaaaaaagcctgcaatttggatcttttcctgactcggaagcaaggaaaatggacaattgataatcaaaggctaaatctcttctgggatccactgaatgccactagagggtctgctcgagagaattcctgattgaatgacaacggcgctaagaacaaaatcaaagttctcctctggactcttccaaaacatttagacatttactggcttccaaaagaaggaactcatggtgatattgaccatttttaaagaaaataaaagcatgaagccgagcatggtagtacacacttggaatcccacatatttggaagactgaggctagaagattgcttgaggccagaagttcgagaccagcctgagcaacatggcaagaccccatctttaaaaaaaaaaaaagt

SEQ ID NO: 170959 - DNA, 587 bp, Homo sapiens
tgagaatagtctgagagggagagattggaaggtcgtttttaagcttgagaatggtaatagacatccaggtggagatgactaggcggcagatgagtctggagttcagggcagctctccatcgatatttctagctcgctttgtctacagtcatgagcagttgaacatcagatacccagagtgacatcaggttaaaaaaaagcctgcaatttggatcttttcctgactcggaagcaaggaaaatggacaattgataatcaaaggctaaatctcttctgggatccactgaatgccactagagggtctgctcgagagaattcctgattgaatgacaacggcgctaagaacaaaatcaaagttctcctctggactcttccaaaacatttagacatttactggcttccaaaagaaggaactcatggtgatattgaccatttttaaagaaaataaaagcatgaagccgagcatggtagtacacacttggaatcccacatatttggaagactgaggctagaagattgcttgaggccagaagttcgagaccagcctgagcaacatggcaagaccccatctttaaaaaaaaaaaaagt

SEQ ID NO: 170960 - DNA, 488 bp, Homo sapiens
gctcaagggtttgactgatgtatccccaacaccagtttgccctcaatgtgagacatggagttaaaggagattattttggagatttaaggtttaataattgccctgctggattttggacttgcatgaggcctgtactcattcaccaaactttgttttggctgatttctccattttggaatggaagcatttacccaatgcctgtactcccattgtatcgtgggagtaactatcttgttttttattttacaggttaattgacaagaaagactaggcttgtctctcattagactggagtttggacttttaagttaatgttggaaagagttaagactttgggtgactgttgaaaaggcatagctttattttgaaatgtaagaaatacatgagatttgggaggggccaggggagaatgatataatttgtatcttagttcttacccaaatctcatatagaactagaattcccagtgttggcgataaggggcctgg

SEQ ID NO: 170961 - DNA, 129 bp, Homo sapiens
cgtattgtcatattttcatggaattcagtgaattgcattttgaggaccagtgccattttgatgctggaggattccaccacctttgtggtgttgtttcctggaagagattctactactgaagtggtgttg

SEQ ID NO: 170962 - DNA, 249 bp, Homo sapiens
aatcagtaggcaaccacacccagtactttgtgctgggaagcttggtcatctgtgagagggtcagagagtatacccatgcgtgcatgccaccgaagggtcagtgagtattcctgtgtgtgcatgtctcagggccggagagagtatgtgtcactgagaggtcagagtgtttgtgtgtgtgtcaaagagggttgcattgtgcccttcactgaggggtcagagggtgcctcgcgtgtgtgtgtgtgtacgtgt

SEQ ID NO: 170963 - DNA, 546 bp, Homo sapiens
atggtctccagaaaatgtcagtgggacttttgttctttgtcaagcaccagaggttatatggttatttttctgctgcaagactttgaggatgttgactttctcagaaactttttaaaaaaataatccaataaggcaggaattcagttttgaaaaattacatataattgtattcataataagaatgtggttatttcataagcagttatgaaagaattattgttcttattcaaaagtgatccagataattgtgatattttctatggtgggctactggtattagcacgacttggatattatttgttgaaggaagtatgaatgaagttggatttgaccaatttcgtgtaaaccttaattgatttaaaactgggaaagaggggggtttcctggccattgctgatctaaggtgctcttatttgtttccaataaacagtaatctttatagaccttaatgcagatttaaaaaaatagttgtgattggctgagagaggcagggcatatatgtagggaaatgatttgccccaagcattccaatgaagtatgacttgt

SEQ ID NO: 170964 - DNA, 481 bp, Homo sapiens
gcctgcctcagactcccaaagtgctgagattacaggtgtgagccaccgcgcccagcatgtgccctttaattcttctaatagcaacatgaggtgctgttgtccccattttcagttgaggaaattgggaaggcaagaactaaaaaaacatctccagatgacacacagctcataacagaataagaactaagatcaggctaattccagaggccatgtacttaacttatgtacgatgttgtcttggtgccattaatttgatattaatttcatttacctgatgattaatgtttgtcagacagaaaaagtgatgcatatgagaagctgtggggccctttctgtgttggctcgtggggggccctgttcttgtcctggtccttaggtcttccgcagtgagtgcttctcaagcagtcttggtggacagaaaccttgttgtatgccagtcaatccgcttctgcatttcttcagaatatttttgcatttcctc

SEQ ID NO: 170965 - DNA, 262 bp, Homo sapiens
cgcgtatagagttcttctgatgcactgtaggagaggttgcttaaaccagagtttatattcacccctccaagtggtctctctagtctgatttagacctttctctccatgatagtgcagggaaatagatcggccatccatctctgttccctgcgtttcttcagaagttttctctgcattagcttctgtcttaacctcaatataagcagtccctttactcttcccatccttgctgactaatccaatctccacagccatttaggta

SEQ ID NO: 170966 - DNA, 210 bp, Homo sapiens
tctcccatcccatcaggtacaaaagttcccctgtatcgctgcaagagaatggcaggaacacccagagttcatggttctatctgccttcctcattagtccatcaactccttggggacagggactgtgtatctccccagaacccatccatgggatttggctcaaacatttgaccaataaaactaagtgtgtgtccaaaaatcttctaggcta

SEQ ID NO: 170967 - DNA, 422 bp, Homo sapiens
atctcaagaataatgaccactacagtaacagcaggtgtgcgtgcgggaccggcaggatccacacagcagggacatcagcaagcaatgggcagggcggtgtggaggagcacgctgtggagagaggagcacgaaattccccttcctaccagttagagtgaggagattcagccttttccggggggaggaagggttagagtgtctgccagcctctcgtggcttctgctgtagtttcgctttcggcattctgcaggggctccccagcccttcccagagccccgggcgggcctgagcgggccactttgcggtggctctgcgcgccagggtgtttcctggtccattagtgattatggccaaggctaggtatagctgtaaggagggtggaggaggggcaggctcgtcctgctggcagtgggacagcctgg

SEQ ID NO: 170968 - DNA, 345 bp, Homo sapiens
gaagctagccaatggtatagacagagatgatgtcattctactgatgatgaagctgaggcacagaagggttaaacaactggcccaaagccacagtaatgatcagtggcagagccaggattcaaattcgggattcaacccgacgccagagcccacattcttaaccatcagtagagtaagtttaagagttaattcacctaaaacacttggcaggtgcacagcacatagcaaacgccacaggcataatagggcttcacatctctttaaagtacatgctcatccctggaggtctccttccctcccttcctcaatattgcttcttcccacgactttcacccaaatcaaagc

SEQ ID NO: 170969 - DNA, 185 bp, Homo sapiens
tagaacattgtgggatgaaccggacacaccctggggactgagaaactatatggagccattgttagagtaagctggtgccaatgcagagaggataaaagagaatgcatgtttttttttttctcctgcctttacaggttatatttcttttaacactttaaactgtcaaataaaattcctcttggaca

SEQ ID NO: 170970 - DNA, 226 bp, Homo sapiens
tgacatctataccaagcacaatattgtaggtatggaactttgaaaaatagcctggaagaagataacatttgtgttagaatttgcctaataaacatatcatgagttatttctaaggatgctaatagcaagaggagacaaaaactaatttcaactcagcaatcaaaagattgtcacagtaatcaaaagattggaaggagaagttgaaacatgacacaagataaataga

SEQ ID NO: 170971 - DNA, 123 bp, Homo sapiens
ttgtcccaggatcccatcaggttcaaagtgtatgtagcctcagttatgccctctctctgtgtttctccacagaggtgacaggtgagatgcaggttcacagcagctctggccaaccctgcaaaa

SEQ ID NO: 170972 - DNA, 394 bp, Homo sapiens
acattggagtcttatatttttccagtggcatggaagtggaaattaaagtttctataaatgtatagcaaataactggaatatctgggtagaaacatcaggagtgcaggatagggaggtggcctgagtttagcctgtgactcactttttgagtcttagcaggttacttcctcctttcagttttctaccataaaaggagctagcagggttgtttacaaagattccaaaaacaaatcacagaactggacaaagaaaaggttgcttgctttgtttttttgttttttgtttttttccataaagcaggtaactgaggtgttgaacaggcattaactgaagataacaggggacatccaataactcatggccttcatagaactttcctaaaatgtcaaactct

SEQ ID NO: 170973 - DNA, 180 bp, Homo sapiens
aggctggaggtgggctctggtggatgctgcacaagtagtgaggctgtattacacatgaggaactctcagctagagaactaatcttaacaaggggggctgctagccaacctgctcaacttttgcctttagggacacattatctttattatcctggacagcaaatcagccttccctctgcct

SEQ ID NO: 170974 - DNA, 494 bp, Homo sapiens
ggtcaacttgctaaaaatcaacactgtggttgcccttataacataacttctttttctctctctgacatattttccttacaacgattaatgagcttttctatttttgtcttttccatgtttaacttgcaaagagaaaaaaacatctaagttgatacatctgagtgtcaggtagggaggatctgctgagcagagagaaaggggttttaagtagagaaataaatttgcagggcagctgctgaaaaagaatcatctaaaccataagacagaagagctctccccagaagggaacaagcagaaaaggagaaaatagggagacaaccactttccaagatacagtcatataggaaaactttctttcatttacccaagtattaatataagacatcagttttccagcctagaacacaagattaataataaatacagatttttttctgtcttcattattacagacattttttttcctgtctcaagctgataaagaaaaatcaaag

SEQ ID NO: 170975 - DNA, 220 bp, Homo sapiens
aagataataagaagacaaggtgcacagtgggagaaaatattaacaaactacaaatctgccaaaagactagcatatataaagtagtctcaaaagcaacagtagaggccaggcaccgtggttcacacctgtaataccttaggaattacaccttggaaaggtgaggcagaaagatggcttgaggccacaaattcaagaccagcctggacaacatagcgagact

SEQ ID NO: 170976 - DNA, 420 bp, Homo sapiens
aagcctggaattgaaaattaaatttttccatatgtctgaatttaaaccattggctctaataatggggaatctattttttctttcagttgaaatattttagatgtttatttttattcacttaattctttacaaaaaatgctttatcccaaagctgagtttctgacctctatgcacttttcaagttagtcttgagtgtggttttcttgtggaagtcagtgtggcactggataacatactgagggcatactatgtgcctcctgagcttcccatcctttttctccccaactactgctttaaaatttctccaactccatcaagctctcctagcctaccctaggccacatattttactacattctcatattattttctacctcccatgtggctgcttgatcacagttcttttttttttcttcttcc

SEQ ID NO: 170977 - DNA, 281 bp, Homo sapiens
cagcatttgaaaataaatcagcatatttctgcttgatggcgtgttagaaccatgcttttattgtcggaagttcacagagctggatgggtctagaaagatgccctctttcatgcctcccaccttagctgcatgaagttaatgtcttaacgtggattccccgggtctgcatgaattctggcaacagtttctgatggatcattatttttatgtgacttatgtaggacctgaagtgggaaagaagtgggtgagactagttcaccatccctcaaatctgactagtt

SEQ ID NO: 170978 - DNA, 171 bp, Homo sapiens
ggaaaaatactattttaagcaggaggcacatgatcagatgtgcattctagcctcagtagcccagatcaagaggacagcagtgcagatgaggaaaagcagggtagattcaagatatgtccaggaccatctggaagggtacagaatttctttttttttttttttttttttgag

SEQ ID NO: 170979 - DNA, 280 bp, Homo sapiens
tccattgctctggtggtatcctccggaggagttacaccagcaggcacatgtgacagagagagagagagagagagagagatggggtctcactctgtcgcccaggctggagtacagtaacacgatcacaactcactgcagactcaacctcccaggctcaggtgatcctcccacctcagccttcctcccatcccagccttcagctgggaacacagacacatgccaccatgcctgacttttttttttttttttttttgtagagatggggtcccactaggttgcc

SEQ ID NO: 170980 - DNA, 173 bp, Homo sapiens
agatattgaatattcccaacacagagaaatgagaaatgtgttactctcccccggggctcagtctacccatgtaaagcaggaccatggccttgggccccgtggcttctgctgtcacaagcttttatcaaactgagctctgacgttagacctctcgcttacaacacacaacttta

SEQ ID NO: 170981 - DNA, 351 bp, Homo sapiens
agaggggccaattgtgcagccaccctgacatccctaaattagctaaattagctgtgagccagatttggggccaattctcacatttaatgagtccttgtttccctcttacagggggcagagatattttgcccctgaggagtgtaaacatgctgccctatttcattcccaacttccagctgcttgccccaaccccaggtaggaaaaacaatccaatgttgatgttcaacatctccataccctttgaaggtttatgtgcaaaagaaaaattaggttaattctataactaagtgaaatatctgaattcaatgaaacagagaaaatccaggattttctcttctctgtacaacatac

SEQ ID NO: 170982 - DNA, 221 bp, Homo sapiens
gctgatgttatcgcccaacacttaattccatgtgatgtctgtttgtaacatgtttagggtctgaggagatatcttactcaaaaatgaaggtatttttcaacaagcattgctattccacaaacattgactgctttatgaaagcctgcagcagctatttcttagaaggtgaattcttttctcagagtgtgtgggggtgttggggataacatcaaagactcctg

SEQ ID NO: 170983 - DNA, 175 bp, Homo sapiens
gatgtgtgctggccttattcctaagggtttactcagctcttggagaacaccacagtgtttcagaagagggcctgtcctttcgaacaagtgaaaaatagcttcacctcctaacagggatctgagacacaacagtgagcacctacatcgaggactgaactgtctgggtttccatatt

SEQ ID NO: 170984 - DNA, 488 bp, Homo sapiens
atttttgtcatattcattatagtggttctcagccttggctgcatgtcagccacccagagtgtccaaattctcctcacccagaaattctgacctcatggagctggggcaggatccaggaattgatattttttaaacctcctcaggttgattctagcatccaaccggggtttaggcccgaggaccacagcctgccagttttcgtgtggcgtgacctttcctgccgatgataatgctgatgatgtcaagcctagctgaacgctgatgggcagtgtctgattaattgaatgaagtaaaaataaacaggttttaacttaatgtacctccccaaatctgtaaagagatccatggatgacatcagtgctgtccaggatggagtaagcccactatcgtccattccactcacggattagaactcaaaactctgaacagaatgaaaagcaaccccatcgggaagggggttggagcttgaatgcgcagcacattagaat

SEQ ID NO: 170985 - DNA, 176 bp, Homo sapiens
ccagcccatgggggcagctgtggggcataaaccctgcaaagccacaggtgcagggctgcccaaggccttcagagcccagccctcatgtccctgtgccctggatgtgggacaacgtttcaaaaagggtgattttggaactgtaggattgaatgactggccttctgggtttggagttt

SEQ ID NO: 170986 - DNA, 337 bp, Homo sapiens
agagcctggggccagagggccagacagccacagagctcctggcgtgggcaaggctggccaaggatggcgacgcccaggggcctgggggccctgctcctgctcctcctgctcccgacctcaggtcaggaaaagcccaccgaagggccaagaaacacctgcctggggagcaacaacatgtacgacatcttcaacttgaatgacaaggctttgtgcttcaccaagtgcaggcagtcgggcagcgactcctgcaatgtggaaaacttgcagagatactggctaaactacgaggcccatctgatgaaggaaggtttgacgcagaaggtgaacacgcctttcc

SEQ ID NO: 170987 - DNA, 519 bp, Homo sapiens
cggcacgaggggtgtctcaaataatatgctgtctctctgaacttacttgcagccagtcttgcagataaaatctgaatcaataacagaaaatagtactactgaggttgtggttacagatttgatcaccatatatgtctgttagctttacatagaaaaataatatattcagtaaccgaaaacaataaccctaaccccactcatgatgagagagttggaaaaaatggaggtctgatggaaattgatcgggattgtgaatatactctacatacggctagtggctgtcatattggacagcacaggtctaagcaattctaagtgtaagatcccactcctggctgagatgtgaataagagaaaacttgaagtttcctctaaaagttgtatttgtttgtctggttgtctcaaatgcaatggaaaccacagcatgacttttagcaggccccagaccattgccttgtgtgagttcaatcactgaatcttccttttcaaaagtaaaacattggatctggagcaaaatata

SEQ ID NO: 170988 - DNA, 321 bp, Homo sapiens
tgctgggattacaggtgtgagccaccgtgcccagccaggatttgcatttttcttaagaaatggctgactcctgtaaatggttcacttgagaaataacagaatcctgtaaactgttcaactaagatgaagcatatttgaaaatgtatcaagtaaatcaaacaaaaaagatttgctcagtgtattggccaaacatgctagaatacatggaaggtatctggggggaaatggtgcaactgatgttcacagtttccaggaagcaagtcttcctcttgttactggcagtttaaacttgagcatgttactaagactcttggagcctcc

SEQ ID NO: 170989 - DNA, 479 bp, Homo sapiens
gcacctgattagaccctcctgacccctctcttttttttctgaatttttctcttctttttttttagagacgtagtctcactcactgtgttgcccagaatggtctcgaactcctggcctcaagtgatcctcttgccttggcctcccaaagtgctgggattagaggtgtgagctactgtgcttggccccagttatgtttagagtactatattcatatattgctttctgtaagaaatggaatgaaaaagtaaaaactgagaaaatggcatcaaatgttaggaattgattgctgtgatttgagagcccgtgaaagattaccccaggatttgcttccattgtaatatattgttatttctagatctgggtgtgtgatgtttgtctaagactgatgaaaattcgttatttattcagataaaaacaatccagttaggttgtttttgagcctgctaaatcatttctaaatgaacactctagtgtctgaa

SEQ ID NO: 170990 - DNA, 340 bp, Homo sapiens
ctgcacactggggaaggataaagttacaacgattccaggggcactcagcctttcttgggttccgtatttgtttgcgggtagggaacattcccttcctgcttgggtatcatggatccacagatgccatacctcaagatggtgagttacataccttgtggagaaaaagatgaacatttttgattaagccaaatcagtattctggcaaaataataatgaaacatatgactatacatttagtgtaagcggatcagtaaacaagtatctgtggataacctgctacatgcaaggcactgtcaaacaggttatgagaaacagaagcttaaataagcattgcacttta

SEQ ID NO: 170991 - DNA, 566 bp, Homo sapiens
tttattccctgggaatttctatagataattatgttgtctccaggtacagttttacttcctcctttccagtctgtccatcttttctttttgcttccctaattatactggtgaagatctccagtacagtgcaaccaggggtgcagggaacagacaccctgcctggtctccatgtcagggatgcagtccgtccaccttgtattatatcagctggttttctgcaggtatcatttagctggttgaggaagttctcttctcttcctagcttgctgagaactttaaatcacaaacgagtcttggattgttacaaatggttgtgctgttcgcctacagagatggcctgcaccccctttcattctactgaaacaggtgattttccaaagagaagcaagcatcctgcattcccagatgggctccagcctcacgccatctttcccactggcctctctgtattactcctcctccccctcctgtgcccgaggtcttgccgaggatgacacgtacctcaaagggtgtgtgctggcctccactttcctcacccgtaagtcactccccgagacagaccatgc

SEQ ID NO: 170992 - DNA, 407 bp, Homo sapiens
cgaacagccaccatttgtaacaatccaagactcgtttgtgatttaaagttctcagcaagctaggaagagaagagaacttcctcaaccagctaaatgatacctgcagaaaaccagctgatataatacaaggtggacggactgcatccctgacatggagaccaggcagggtgtctgttccctgcaccccctttcattctactgaaacaggtgattttccaaagagaagcaagcatcctgcattcccagatgggctccagcctcacgccatctttcccactggcctctctgtattactcctcctccccctcctgtgcccgaggtcttgccgaggatgacacgtacctcaaagggtgtgtgctggcctccactttcctcacccgtaagtcactccccgagacagaccatgc

SEQ ID NO: 170993 - DNA, 141 bp, Homo sapiens
agccaggagaagccagtcccagggaccaaaggagagactgttttcctttcccatccccaatctgccccttaaaatgtctctgtattagtccattcttgcactcctataaagaactacctgagactgggtcatttacaagga

SEQ ID NO: 170994 - DNA, 801 bp, Homo sapiens
ctagagttcccatgccaataacctcccattagtacatagcacaagctgaattctgattttctagctgcagaggatgatctgaatgatgatgaggattagctcattcttgagtaggtgtgatcagtggatccctgagaactgcctcctcagccaaccattgttaaattcatccttcccctcatagcaggactgaggctcagctagcagcaccagtttaggaatgctcattgtttacagtcagggtccattctaattgggctggtatatgttcacattgatgttgctcatgtcttcctggttgttaaatatttacatggccctgaattttctttggggtacaagtggtttaggagacacttaagactgatgatgtaaccttacctgcaaggactggtttagtgatagggaagtggcctgagccagtccaaaaccagaagggatcccagagtttggttgggaattccaggacacaaatgtcccttcttgttctggatgttgtgatgtatggttgtgaagtctgcaatcattttgtcaccataaggaaaactagtctgaaggggaggctgacacacagagaatgacagaactgagagtataataaaaaataagtagtccagtacaaatagcacctaaagcccactctacttctaaactttttgagctacataagctaatatattcctttttgtaacttggggctttctgtaacttgaaacagagataatccaactgataacggagggatgtatcataaagaggatgatggtactatgacggtggaggttattgccatggtatctt

SEQ ID NO: 170995 - DNA, 139 bp, Homo sapiens
gtttgttcttatggaatttactctatgtatgtgcagcttaattttcagtcatagtctcaaggggaaccctgtgtagatttcctgagctcttctctgcatagctcttcctctttagcactctgccctgaagagtccatct

SEQ ID NO: 170996 - DNA, 285 bp, Homo sapiens
ttcccagacgacaccggctacccattaacactaactcttcatccctctccccataacctcgactctccccataacccctgaccaccaatctgctttctcttatgaatgtcaccactcaaggcacctctcctataaggggggggggggggtcatacgatatttgtcctttcttctcttatgaatgtcaccactcaaggtgcgtctcctatgggagggggtcatacgatatttgtcctttcttctcttatgaatgtcaccactcaaggtgcgtctcctgcggggggg

SEQ ID NO: 170997 - DNA, 298 bp, Homo sapiens
taaagagtctccaagtactttcaatccatacaatttcatcaactgctaaagtgagcataggctgtcatccacatttcccaagtgaggaggaagaagatcagagcaggtatggtgtggtcccctcgcctagaagcaaaaagctggaattctctctgcccagctctgaagtgggcaagcttaacctctataaacctcagtttccttttctggaagtccagggaagacctagatggtcttttccagctataaaatttccagtgtgatccaaagtcacactgagggctcagtgacagagctg

SEQ ID NO: 170998 - DNA, 383 bp, Homo sapiens
agtgcagagtcaggatcttccagacatgagcactgtgcctgtaagtgtcctgtaatgcaaacccctcctgcctgtgagagtactgtggcattccaccttaccaagatactgactgtgtgtgtccccaaaataaaggccagaaagtcagcttcacctcctgttgcaatgagagggagaccttacaggttaagtaaaacagtggatagcaaaattaaagagtgctgcatatgttccagtaggttttcactgagtacctttaagctgctggcacagttggagaagacgatcttgcctctctttttgcaaggggagaaaatcaggctggaatgatgttttatcctgcctgtttgtgtggacatgggaggcatgtttttaaaactgtt

SEQ ID NO: 170999 - DNA, 393 bp, Homo sapiens
gcgtgaattaatgaggctgcccgagccctggagcccgtctcacggagctgggtgccaggctggccctggacgggaggggttctgaccccctgcacctgccacagggcgacccggcagaagaagaccatgaagctgtcccgggccctctctgacctggtgaagtacaccaagtccgtggccacccacgacatagagatggaggcggcgtccagctggcaggtgtcgtccttcagcgagaccaaggcccaccagattctgcagcagaagccggcgcagtacctacgcttcaaccagcagcagctctcccgcatctacccctcctcctaccgtgtggactccagcaactacaacccgcagcccttctggaacgccggctgccaaatgggtgggtgc

SEQ ID NO: 171000 - DNA, 350 bp, Homo sapiens
ggaaacaggaaagtgcggctgattcctccacaccccgaccaccgcgcaggacccaggacccttctgaaaagtgagcattgtattgttctttagacttattttatatgaaagcacatcacgctctaagaagagtcacccaggctttctgttctcaggtggagcctccctacaccatacgcacacggcggctgttccccacgacacagcggggggcaaatgaccaccaggagccagggagtcccagggaaggaccctccctccagtttcagagcgagcatgaccctgcggacacttacatctcaagcttgtggcccccacaccaggaataaatgtctgttgttttcagctgc

SEQ ID NO: 171001 - DNA, 432 bp, Homo sapiens
caggaagacccaacacatgtggattttgttattgactaaaacatgaagctctgcagctcagtgactgagatttcctcagcagctgtctgtgttacaaacgtggagctattgagtcaaaactccaaggatttagggaaaaagggcatgttttccaaaatccttttcctgtcaactaaaatataagtagagaacctgaagcctccaaggacagaaagttttgatttggggaaagagctgggccaggggacctgggcacagatatgtgtcttggagatgctttccacccatgaaaagcctaggggtcatttgagaatgtaaagcctccttctggagggaaaggaaacacgggagtattcttcttcatgtaaagagggatgaacttttgtttacgggaaagaggagatcacaatggtgtacacactccacacccag

SEQ ID NO: 171002 - DNA, 390 bp, Homo sapiens
ctgtgaccccaaggatgcctcctgaaattgctgattcaatttctcctaataaaataggaacaataattagctaataagaaatcaacaattaaagctatgagagaattaagtgagatcatgtaagcaaagtacatgtcacagtgctctgcaaataggcagtgctcagaagtgtcaccttttctctttcttctctgagcctccgtcttctcttcggtaaaatgagaataatattatgcatacctcacaggggttaagcaatgtgaaagtactctgtaaagtataaggctgaaatgtactgggctcagaacctataggtctgttccattctcgacacacgtgatattagcagcacggtacatttaaggacacggcttgattctttaatcacag

SEQ ID NO: 171003 - DNA, 659 bp, Homo sapiens
tattcagttataccaaacactttacctttccccaaatttgccatggtttaccgaattccccttttctggaatttcgtccttgtgacaatcattactctggcaaatattacttgcccttaatgcatctttctttaggaagccttctctgactcacacaaggaattaatcatttctacctttgtctcaccactctatctagtacttatctatttaacatttattacactgtattgtaattattcagcccagctcaggacattcactggatggtgttctgttatttcttaaacacaggtaccctttttattttgggtttcctgaatcgatgttacttattttctgttgcttcctgaccacatgtttgatgtcataagaggtctgcaccctctgaacaatctggcctttgctcttttgctttacctattccgttctggaagcccacttagccaagcctttcatgcttgtctcacacacaccatgcaattaggtggaaagggatgacccagcaacttcaaattagtaaagtagagaaggcagagtaattaggtgagcaatatagctttgagcatatattattcaattcagttttttcagaaaagacatttttggaggatttgtaaggagcttaccaaaataataaagttatgcttcattttcca

SEQ ID NO: 171004 - DNA, 407 bp, Homo sapiens
tcaaatcattaagtcaaccgcctagaggaacttgattccagtttttgtgaaaagcaaacccagagcctagaaaaatgaaggccaaattcattgtacgtatcattaggctagttgccttgttttttttaacccattctgatttcttttgcttctagtatagcggaccagtgtgtattttttggctatagcatgtatgtttcatagagtatttgttaggattaactaatagcaggtagaggaagggttaatattctcatttttccctcctattctatctggagagatcataaaatacattacagttagagtcaacaatcaccacttgaagaaatctcttcaacacaaagcctgataaaatttacatctggtaaatgtctatttaagctactgcgaaacacatatactta

SEQ ID NO: 171005 - DNA, 313 bp, Homo sapiens
tggacggatgggtgatggatggatgggtgatggaaggatgagtagaggatagatggatgatagaggatggattgatggatgaatcatggatgaatagaggatagagactctacatgagtctcaataagtcccatgagcctcagtttccctatctgcaaaacggagatggtaacagtagtacctgcttcgtgaagtttaggtcttgtaagatgctgagcaagggcctggcctagtaggtgataaagagtggaagccacctatattaggttgaatgttggtctttctaaaatatgtccacctggaacctgtgaat

SEQ ID NO: 171006 - DNA, 419 bp, Homo sapiens
tttggtagtataatgttatgttagaaaaatgttacaaaaaagtacaatagggagtaagatttatgcttattaaagaagcatggattaaaaagattgagaaacatttattaaagagtcactgaggttcttgttttagaaggccatgattaatgagttggagaacaagaagcaaatttggtaatcatgtaaattatgagctgctgaccacctagaaatatatttgctgataagagctttcatataatgatcatattttatctttccaacaattagatactgtttacagcttactgatgtgtaaaatgagaaactttttttcctatgtttatcatggttttaaaacatttatcatgtatttaaaatactgtatgcactccaccacagacaggatggagaggaagatgtgacaaaagatgtgg

SEQ ID NO: 171007 - DNA, 164 bp, Homo sapiens
aagaaaatactattcttaacacactcatcacttaacacgctcatcacctataagcaagagctatcagaaatactatttaaaaatacatacatttctaatagctcttgcttataggtgatgagcgtgttaagtgatgagtgtgttaagaatagtattttctgctg

SEQ ID NO: 171008 - DNA, 576 bp, Homo sapiens
gatggaaatcagcccttaggaagcccagatattggacttagcagacaaagactttttaaaaactctataaatcgtgaaggacctcttcaaggagaactacaaaccactgctcaaggaaataagagagtacacaaacaaatggaaacacattccatgctcatggataggaagaatcagtattgtgaaaatggctatactacccaaagtaatttacagattcaatgctattcccaacaagctactgactgtcttcacagaattagaaaaaactaccttaaatttcatatgaaaccaaaaacgagcccatatagccaagacgatactaagcaaaaagaacaaaggtggaggcataacgctacctgacttcaaactacactacaaggctactgtaaccaaaacagcatggtactggtaccaaaacagatatatagcaatggaacagaacagagacctcagaaataacaccacacatctacaaccatctgatcttcgacaaacctgacaaaaacaagcaatggggaaaggattctctatttaatggtgctgggaagactggctagccatatacagaaaact

SEQ ID NO: 171009 - DNA, 742 bp, Homo sapiens
cggctagctcagtcggtagagcatgagactcttaatctcagggtcgtgggttcgagccccacgttgggcgtgagattttgtcggatggattagacttgcaacttggaagaaagtaaactaaataagaaaacgtggaagtgactccgtataccttgcaaatcgggaattgttggtcaggcaaacgcaaaacgctccaccaaccaactggcttcaggatcccctttgtcttgtttcataaaaaaaagaggccgagcgtcgtggttcatgcctataatcctctcactttgaccctaggagtttgagaccagcctaggcaacatggtgagacccccggcccttaaaaaaaaatacaaattttcgccaggcttggtggtgtgcgcctgtagtcccagctattccagagactgaggcaggagaatcacttgaacccgggaggtagaggttacagtaagccgagactgtgccagtgcactccagcctggacaacacagtaagactccgtctcaaaataataataaaaagaaattggccgggcgtggtggctcacgcctgtaatcccagcactttgggaggtcgaggcgggcggatcacgaggtcaagagatcgagaccatcctggctaacatggtgaaaccccgtctctactaaaaaagagaaaaaattagccgggcatggtggtgggcgcctgtagtcccagctactagggaggctgagacaggagaatagcgtgaacccggaaggca

SEQ ID NO: 171010 - DNA, 192 bp, Homo sapiens
cccctgtccccaccccaccaccttccagggtgccaggcagggctggctccaggcctgtccccgactgccattggcaacagtggccctgcagcccccagccctccccacccaggttttcggcccagtgaagaggccactggccaggcctcccaggcaggtgttttatgttcagcaataaaggttctatccgta

SEQ ID NO: 171011 - DNA, 182 bp, Homo sapiens
ccagaagagagctaggagaatgaggagtctttgaatttgttaatgaagaggacactgatgaattctaagggcatatttattagtgtttaagcaaactgcaaagggctgagaagtgagcagaatgtaatggttacaaataagatgatgataacttgagtgataatagtatacagctatttttg

SEQ ID NO: 171012 - DNA, 1959 bp, Homo sapiens
gagggggaagcgaggggcgtgggctgcacctgcgggggtcctcgggggccgccctcggggtgaaccgccctgtcttccctctggtcctcagaggcctcccttgcctcggcgggtgggcgagccgggctcgggaggaagagggggaggtggcattcgggagaggggcggggagggggcgcatttgcagggcgagcgggggctgacgaaggggcggcggggccgtcccgagccgggaggggcgctctggtcttggcccctggggtccctcgatccccgctgcagggaagccgcccgaagcagagggttgcgggagtctctttgctgagggagggagcgggggtcaccagtcaccgagacccccttcccgggctgcacaggcgggagcggggacccgggtggggagaggggtgtgggaggggagtttccgggtcggaaaagggagcgccctactgggttcgtggccgtgcttgcctagaggctgggcccaggtagggaagcgaagtggactcgtggtttttctccgagggacccaggctttgggatcccgggctccggggctctctgccccccttcccattctctttccggaatccaggccttccgtcttcctgcttgctccccacccccctatctgagcgccgcacgaggctccccagcgcccctcttttcccctccaccaaaaaaatcagttctcctgaattctgatttttcacttactaagctagtacagtgccacacacccagggattccaagcctgggcatgtccatgaatagaagagctactgggggaaggagaagactccaggatgtggcccagaccccccggaactgggaagctggggtacactgggcagtgagggttctgtcttccatcccacttgacccagcttgctgtctgttctgcagacattcttttaggggaaccccctgggtggcggggccctaactgagggaaattggtcacctggtgtctggggaggagtgggcgcttagcaggaggcaccctaaaaggaagaaaagttaaagagaaatgtcgaagaccaaatgcctgggtgcctgcagagaggaagataggatttgggcatctgcataccctgtgtggtgttggagatacatactacagaggaggatacccctgggcataggcctggcactggaggatgatatgtttgggagatcattaagatcttatggctatgatggggtggaaaattgaggtagcttctccagggacaaaataccagatttcagcatggtgatggatagagagagggtggaagagaacaggcatttctttggcgtcggttactgtcgtcttgtcactgtgctaggcattttacttacctttagaaagcagaccagaaagcaagaggtcagggaatcatggtaataatagtaataactaacggccgggcgcagtggctcatgccttaatgccagcactttgggaggcctaggtgggtggatcacctgaggtcgggagttcgagaccagggcctggccaacatggtgaaaccacatctctactaaaaatacaaatattagccgggcgtggtggcacgtgactgtaatcccagctactcaggaggctgaggcaggagaatcgctggaacttgggaggcggagattgcactgaacagtgattgcgccactgcactccagcctgggcgacagagagagactctgtctcaaaaataataataataatagctaacatgttatactgcctgcctgtgctagggacttgcatgtatcaaatcatttagtctcacctaacaactgtgcaaggcaggtacaatgtccattttacacataaggaaactgaggcccagagacttacagtagtaattgggccaaggccttgcataactagtagagccaggatttgaacccagctgacagactcagaagctctgacttccccctgctggtggaaacacccagccttgagagcaagg

SEQ ID NO: 171013 - DNA, 632 bp, Homo sapiens
tctcactcatagacaatgattttcatcagacacaatgttctataatgccatctgtcccacatgggtgggatgtgttggaaagatcactctgctggctccaagaatattttttgaacccaagaaaccctcctgtgcttggaagaggcattggaatcttgcctggaacttgttaaattgcagaaggctgaggagagcatgcagaaaaagctggaaatatgttacaatttgccaccaggggtctcggtcagggtgcaggagcagccctgggcagaggtgctgcttaagcacaacaagccttggctagtagaaagcaaagcttaatttcccaccacacaccagtgtctgccgagatggtcaagagaaatttcttctaagtaatcccttgggaatcttcttattccaatgattcagccttgctgaaactgtttggagaacttctctcaataacttccttcagaagctatggacctttcagcaactgctctacagtgcccatgtgtgccgggcggagtgcttgacctgtgtcattcatttcccccagaaactttatgcctctaggaatcatgttcttctttatacagatcaggctataccaggctcaaagatgttatggatttccctggggctccctt

SEQ ID NO: 171014 - DNA, 555 bp, Homo sapiens
tcttgaacccgagaggcggaggttgcagtgagctgagatcatgccactgcactccagcctgagcaacagagtgagattctgtctccaaaaaaaaaaaaaaaaaaaaaaaaaaagaatattactgctaagggctaggtgtcgtagctcgtatgtgtaatcccagcacactttgggaacctgaggcgggtgaatcacctgaggtcggaagtttgagaccagcctggtcaacatggtgaaaccccatctctactaaaaatacaaaaattagctgggtgtggtggtgcacacctgtaatcccagctactcaggagggtgaggcatgagaatcgcttgaacccaggagacacaggttgcagcaagtcgagattacgccgctgcactctagcctgggcaacggagtaagactctgtctccaaaaaaaaaaaaagttactcattgtattgtatttcttgccaatcttattagtcttttataggaagtttgaaagaaaattgattggtggaagtgagaaaaacttgtaccattaaattacaagaaatagccagccgggcacag

SEQ ID NO: 171015 - DNA, 328 bp, Homo sapiens
gagagaactaaggggcaccaccctcgtggggaaagcaagagatgcaaaactccgcaactgctgactctggaatggtgaaaggatttgtgccactcagacgcctcccgggtttgccacagccactcgaaggtgggagcaactgagaccacaggcgttggacaccgtggcaggaaacatagggcaccttctgagaagggaccctgacgtgagagctctgaacaccccatgccccatgcccacccagcacagtttgggaggacaggacccgctgggccagcactctgagatgacagagctggagaccagtgtccctctgcccttccgccca

SEQ ID NO: 171016 - DNA, 959 bp, Homo sapiens
aggatccagcctgtaccccacacaagggagacagcacctcccaggagatccactcagccacaacttcaccttctcctgtttcctccacattaccagagagcatctcttcctctcctcttcctgtgacttcactcctcacgtctggcttggcaaaaactacagatatgttgcacaaaagctcagaacctgtaaccaactcacctgcaaatttgagcagcacctcagttgaaatactggccacctctgaagtcaccacagatacagagaaaactcatccttcttcaaacagaacagtgaccgatgtggggacctccagttctggacatgaatccacttcctttgtcctagctgactcacagacatccaaagtcacatctccaatggttattacctccaccatggaggatacgagtgtctccacatcaactcctggcttttttgagactagcagaattcagacagaaccaacatcctccctgacccttggactgagaaagaccagcagctctgaggggaccagcttagccacagagatgagcactgtcctttctggagtgcccactggtgccactgctgaagtctccaggacagaagtcacctcctctagcagaacatccatctcaggctttgctcagctcacagtgtcaccagagacttccacagaaaccatcaccagactccctacctccagcataatgacagaatcagcagaaatgatgatcaagacacaaacagatcctcctgggtctacaccagagagtactcatactgtggacatatcaacaacacccaactgggtagaaacccactcgactgtgactcagagattttcacactcagagatgaccactcttgtgagcagaagccctggtgatatgttatggcctagtcaatcctctgtggaagaaaccagctctgcctcttccctgctgtctctgcctgccacgacctcaccttct

SEQ ID NO: 171017 - DNA, 144 bp, Homo sapiens
ggaacataaactactgctggaatgtgtcctgctctgagggcaagtggcatgaccccctaccagccttgaggcttaacggctgctggactactcctgcctggtgccctgccatccctgatctgccgctacatcttaccttgagag

SEQ ID NO: 171018 - DNA, 517 bp, Homo sapiens
ccattaacctttattcctactttcagaatagagatttgacattgcccagtgggattttcccatcataagtagtactgagtttgggattccctcccgctattctttttttcttctgcttgaaacaaataaatcttcagtactgactttccttttctttctttttttttccatatcagcaaataattggatatctgaaatttttcttgaagtgcttttttggcatttacaagcattttaaattataatgctgtttttcagagatggaataggatgaaggttaaggttggaaatcgaaggtgatcttccccctttagtgaatgagtaactctcagatcctctccagatgtcaaattctgttttgaaattggatgtaactatttacctatctcacaagaccaagatgaaggcatggtggatccattaaaggtttgtttgtacccttctcctctcacataggatcccagaagctacgggacttcccaagaacagtaggaagctgagccatctagaatcaccc

SEQ ID NO: 171019 - DNA, 458 bp, Homo sapiens
  misc_feature (41)..(41): n is a, c, g, or t
  misc_feature (86)..(86): n is a, c, g, or t
ttcatgactggtatacctgacaacaccggcaatgagatccngtagaggtggtattaaagatggtcactgagattaagaagattccnggtatttctcgaattatgtaataaaaactttaaagcggttactgtgcaaagtgttccaaaaagccacggtgaacactcttgaaataacagaaatagtctcagcaaagaaatagaagacatacagaaaaaccgtggaaagctttagaactggaaaatataagcttgggtaggctccatagtaaaatggagatgccaaaggaaagaatcagtgaacttgaaaacagatcaataaaaattatccactctgaacagagagaaaaatgattcaaaaccaaaagtatcttgtgacctgagaccataacaaaaggtgtaacatttgtgtcgtgagagtcctaaaagaagagaaagagcatggtggggctgaacaacaat

SEQ ID NO: 171020 - DNA, 329 bp, Homo sapiens
tccctactcccctccctgcaacccagctttcagattgtccaccttgctgggtcctcccacaggtgaactccaggctgaacacctggagtctggtgccagctcccccagcgccgctgtgtcacctgctggaggagctctctcctcacttgcccaccccacgccaccacccccatctccttcaccctctccaccacctcaaccatcagcttcatctacagcaccccgtgctgaaacttgtagttggccccaagaccgacaggctgcctgatacgtcatttctctaaggggtggtaatggctgggattatatgctgttgtctctgtgaatgc

SEQ ID NO: 171021 - DNA, 451 bp, Homo sapiens
ctcatcctggccctcctcttcccagtcccaggtgccaagcacctgggggtcagtcccccactgagtggtgtcttcatagaagtggagattccttttctgtttctctttcttgttgttcgtagttgattttagaaatgacacgggggctagagctttccccctgccctctttatcaggaactctttttagctttttctgtaactttttaacaaattgctgatgttatttgcaaaaaacagatgatacagaattgtgtgaagcagaaacttcttctcccaactcagtcacctcttttcagggtgacctcggaggcaaaagtggtatgtattttccattcttttctctatgcttataaatatatttcaagaattcagtccatttattatttatattggtatatctggtaaagcgaaatacagtttcttacttttaataatcatattgttgcaca

SEQ ID NO: 171022 - DNA, 339 bp, Homo sapiens
cagtgaactatttacagctgaagtatgtctgagatttgcttcaaaataatccaaggaggggaaagataactggggatatagacagaacaggactggttgatggttgttagaaacaggtgataagtacttcggggctcattatactactctgtctacttttacttatgtttaaaattatccataatttgtggagaggggaaggtgaactaaacacaaaattacaatattctgaaacaacttattatgctttaacaaatagtgatttagcatttcatgaaatgttttataaaagattttcaattaaccaatgtatcagtagatgatttctagtccagtgca

SEQ ID NO: 171023 - DNA, 602 bp, Homo sapiens
caggtcccggccaggcgaggccatgtggtagaacacccacattttgacaactgttcttacacacacaaactcctcagctgttgagcaacaagcttcccctgccacaaactgcaaccaggagaaaagcggcaacactgcaggccaggccacaaggattcacttttcccagtctggatttacaaatgtttgctcatctgttttttaacccgattcacacagcgtggtgtctcagaggctcaggcatgtgggaacagcattagggatgatgcacgtggcactaggaacaggagtgccagcgagcggaacagccagggacgccaagcaacacccaaggcagagcaggcccgaggccaccaggctgtctctcattcttcaggattctcagagacagtcaggcaacaccttctctctctcctcatctcatacctgccaagaaatcctcttctaacaggccatgattatcacatgttattaatgcctgctgcctaagatcagggaggtctatcgcttctggagacaagtacttggtgtccctgttgtgttttgatttttaaaagaaaaataacaatgaaaccatgttaatccaattcttcttttatctc

SEQ ID NO: 171024 - DNA, 623 bp, Homo sapiens
cggaatggatttgatacatgatggttagagacatgagtaagaatcagttcaagcaaacttagtttcaaattatacctttagcatttgttagctagttcacatggggaaagtctcagctgctctgaaataaatggtttcctcaactgtaaatactgtctacctcagggttgttaggaagattaaatgaaatgatacagtaaagagattatgtacagaaagaatgtgtcaggattccttccctatctcacacccctacccctctcttgccctacacacgcattcttgagcttaatgcacaccacaggaggaatattaaaggaactaatcaggaatagtgaaaaaggactatttagatgtaggttttctctgtgtgtgtgtgggggggggggtataaagtgcctttccccacagcctacccattcacaatactctcatggatagtcactgctgttatctctgaaaattgtcaatgcaataatttattttcaatttctctctaaagcaactaatttaaaccgtaagtgtcatggaatcataccaatctggacacaccctaacactagatgtaaaacaaaatttgcggaatagacatttgggagtctatatgttagcaactcttccag

SEQ ID NO: 171025 - DNA, 217 bp, Homo sapiens
taattctttagcccaaacacaattactgttctccacactgttccattgaacatctaaataagcatcccaaagcttatttcattcaaagaaaagatccagactaaagaataatcccaatgtatgaagtttacattttgtgtaaagtttttttaaaaagggaaaaatctataagtggtaatcaggaaaagacatgagtcattgtagacaggtgttgggg

SEQ ID NO: 171026 - DNA, 561 bp, Homo sapiens
ggctgagggtactctgtagagtgtccttcactctctcctcaagagggaacctctgtctctctattctctatatctttacacctttttaaaaaattacccttaagccagctttcatattcttctcatattgtggttatttggtcaccctattacatataaactccttgaagacaggacaaaggtcttaacctctgattttccttagcttgattcggtgtgaggcatatggtaagtgctcaaccaatattttaaagaaatgaatagaatctcttctttaattcagctatgtttcattattcaagatagctagcattttttccccttaaaacatctctttgggcaggctcggtggctcacgtgtgtaatcccagcactttgggacgccagcgtgggctgattgcgtgagctcagaagtttgataccagcccaagcaacatggtgaaaccccgtctcgatttaaaacaaaaacagaactggagatgcagagttgaaaagccccagttagactttagtgagaagccaaacaagtcaacagactgccagagaaaccatgaggtagaa

SEQ ID NO: 171027 - DNA, 390 bp, Homo sapiens
taaacggtggagctgggattcaaaccctagagacctagcttcaaaggccacattctcaaccttgactccatagctgtcaaccccaaagttgcaaagcagccagtggtggagctaggcccagaatgcaagtctcctctgggcagaaaagtcagagagccagtgaaggtgaataaaccaaggccagaaaagccacaatccaggcctagaaggctagtagctcctaggagctaaggaactaaggcctaattgctaaggagagggctccagggccctctccttcaaagggaaggaaggggctgacagtggggcagcctttgcctgcctgcctccctccctgccaacggggagccctgaccaaccccagctgagttgtcacctccctgtgctaat

SEQ ID NO: 171028 - DNA, 464 bp, Homo sapiens
ccctttcctgatgccaggttcacttggctactttcagatttttaactgagcaaaaacccagcccctcaccagtaagtactttgtaagtactcaccagtacttacaaaggcagtactataacaccttcaagatggggaaaccacggttttaaacagaaacacatattttccctcaacatggatgctttatcatatctctaacatagtaagagtagagagtcacaaaaccatgacctatattttccagactgttagaacagcaattgagaaaaactgtttatccaagaaatatctttaatgaaacaaaaaagaacaaaagcatacaagggaagccctctcttccaccctctttctcatcacagttttgcccttatcagataagacaggtaggggttccagggctgttaagctcatggggtatatcattaggaccagctctgtaactggaactgctcaaagaatgaa

SEQ ID NO: 171029 - DNA, 245 bp, Homo sapiens
taaaagctgcataacagacaacctcaaatctcggcatccatcaatagcatttctttttaacacatgtttgtggattgacgtggatttggctcatctaggctgaccgtagcctgacagtctcagttcacatggctctcctctttctgggaccagcatgagcatattctcattgtgatggcaaaaggtcaagaggacacacccaatggtataaacacctttcaaccctgttggcaccttgtctgctg

SEQ ID NO: 171030 - DNA, 213 bp, Homo sapiens
ttccacagccccacctctcacccaccggccccacctgcctctccaccttggggtctacctgcccttcaccccagccctctcagccctctggcaaaccccacgtctccctccaggtgggttcaaacacccctcactgccggaagctctcctacttccccagagactacatcccaaaaaatgccacctgcaaattgatcaagagcacctaagaag

SEQ ID NO: 171031 - DNA, 312 bp, Homo sapiens
aggaggcctcaggtcccctccacacggacctctccataggtctgcttcagcatcctcatgacatggcagatgatttcctcagagcaaattattgatgagacagagggagagggagagagaggggaggagaaggaagccacagtgtttttattaatatcacctagtctcagaaggcatgaaccagcagtttcactctactcttatttattagtaacaggttgttaagtccagcccatactcaagtggaagggaaattaagatgtaccacttgaagggaggaggatcaaataattcatgaacatatttttaaat

SEQ ID NO: 171032 - DNA, 351 bp, Homo sapiens
ttcccattcagaggacttataactattctagaagagctctcagctcctgcctctgctgctcccatcactgggtctctcaggttataagcctctgccgttcgactttgtggactccttttcccaagctcctctcctctgctcttctctctgatatcacacagatgtgtgcagagatgggcaggctggcgtgggctcctgcgcatgcacacaagctcctctgcaaaacctcccaactgcagctccacctccatggcgtcagggggtgttgagtgtagtctggaggactctccccctctactccagaagacaaagcagctgtccctagggctggggctcaaacacaagcttgtc

SEQ ID NO: 171033 - DNA, 264 bp, Homo sapiens
tctacctctgaagtgttcatgggagagtgaaggtagagagtggtccagagcaggtgggccccagcacaccctgtgtgtcaactgattctgagaatcatcaaatagacaagaatttaagtcttccgtttctgtggtcatgattaaggtgcattttttaaagacttaaaaacttactggctttaggaaggagagtttttataacctcccagcacaaagtgacatactttcattttctgctacttctgtgtagtgttgcttcactgt

SEQ ID NO: 171034 - DNA, 507 bp, Homo sapiens
acatgcttctcgtgtatcacttgttcttccctcctggtcctcctgttcttcctaagtggaggagaggcgtcagtagctgtgagaagaacctcaaggctcctgaagtatccatcagactactctggaagggattcccactgccggccaagtagggctacaggtattttagctcatagcgggtgatgatttgttaaggtcccaagcctcctggtggtcaaaggctgccttggctgctgtctgctgccctgtctctggccacctgactcgtaggcctggggactgaggacatgagctctgttgtttctcttctcagatctgcctagttacacaacttgtatggtttgaaaggagaagactctgggtgccaacttcattgggctgaggagctagggcaaaggtcttatgtgtaatttaataattctagtatcatgagaagaactggtcttcctttaattgttctgcctagcatgcttattaattctcttccatcaataaaattctaaggta

SEQ ID NO: 171035 - DNA, 331 bp, Homo sapiens
gtaacaggaaagctagtagggattctcagctcatttctttgcttattcactttttgtgggaaactgtgcctgaggttaattcagaagatgtttacgttcagctgtatttatgtaccaacatcgtgaacatggtctgcaaatacaggaggatctggatggacatagcagagattaaggtgcatgtgggtgtggcaaatgatgatacatttgcaaatctgcaggctgtaatgcctcactcttcttcactactgacactaaccaagctttatagatttttcgtcctgtatgcacttcaagttgacttgaagtcatgttcacttatgttatctgc

SEQ ID NO: 171036 - DNA, 355 bp, Homo sapiens
gattgtctctggtagccaagtgaaaatgcagcttaaattcagttacaggctatttctgtagtccagatatacacgcattctgttgtttaggtcatggatgaaacttataaagcctgtggaagtgaatacatactaattccttaaatcattttccctgtcaaggagtcttttaaaccatcctttggtagatgttttattgtatgtctcctaaatacctaattataggtaaactcataacttctggaatccagctggacaagtggtagaattactactgttatgagaactgagaagcccaaccagtgtttgcacctgaatgttgagtgatcctgtctgttcaaggatctaagtgcca

SEQ ID NO: 171037 - DNA, 518 bp, Homo sapiens
agtctacatatagataactttatgcatagtccagagtaaatgacaaatacagaattttaagcattaaaatgacattaatagtacgccagacaattcttggaagactagcatgaagatttgtatagatatagatgtagacataaatttcactttttacacgtgggaatacagacaaattgtaggaaatatatacaatataatcataaaatgtgcataggtgcaaaacatcagaatgagaaataactctatccctcactctcatcagtctctaatgtagactctactacattcaggttgattttttcaattgtttattcatactaacataccatgctacctcttacccacaaaccttccttgtgtgttttgaatattgttatcattcgtatgtaaaacgtacccatgttcaggacccagattaactgtcatctttttcctgaagctgtatttgaccttgtaagccctcaccaatatcctctctctttgacttcacattgcagctatgattcgaatctttc

SEQ ID NO: 171038 - DNA, 191 bp, Homo sapiens
agtcaccttcccataatttactgcccttaggagcccaagtccctttcctttgactatcacctctccacaatttattgccctttgttaaaatgatatataagctccttcatttaactacatctttgggttttcacttcttatctttgatgctacgatgcatgtaaaaatattaataaaatttgtgtgctttt

SEQ ID NO: 171039 - DNA, 712 bp, Homo sapiens
cctggatggctgcaaagacttcttttgaagaggaaacacctaacactaccctgttgtttctcctgtcccttatccttctgagtagactgggaccaagtatggcccgccttgtgaatctaaatgtctacatgaggccaaagtctctttggtgggtgttgcagaatcaataaagatttacagaaccccttctgatagtttgaagagaggatttgatacagaaaatgcacctatttcctgcaaagtaggggactatctttcagtgatgtttatccacagtcaagtttgaagctgtgaaacatttaatgaatcactatgtgctgagctgtactacttactacgacagacacatttcagaaagacactccaacatacaggtttaagtacaatataggtcttgggttactaccatggaaatatacatgctgtgttaatcacacaataaaaactcacaatatatatattttatcttgcttctcatcagcaaaaataaaattaatatgaatatataagttccatagagcactacgggaaaatttatatcaaagaaagctttatatttgtgtaatagtctagctttcagccttatatttcgcaaatacataatcccactgcagaaaatttgaaaatatacgtagcataaaggtatattaatctcctgaaatgacaaattttagagagagacatgtcaatattgctctgaatagcttcccga

SEQ ID NO: 171040 - DNA, 402 bp, Homo sapiens
tgcttcttggaatctgtgcatgctcattcctaagcttgtaataccttttccctattctgtatctcagaaagtgtccttctttattcccaatccctgttctctctcagtttggaagtaattgttcttttattgcaaattctcacagcacttagatttttatctcaaactctttaatgtaattaattgttttcatccatataatatagtcatgtgtacctttatgtaccacatcttcctttccacataggaagctccttgagggcagaagcgatgctctttgattcattttgtattcttcaagatggactagaacagcgtagtcaccttgtaaacctatgtggtggatagggtcggggaagaaaggaaaaagagggaaaaggaagagaggaagaaatcaaagaa

SEQ ID NO: 171041 - DNA, 781 bp, Homo sapiens
gaataggtgatagcacagttgaagcttaaaggataagaggacatctgcataaagggataggagaagtgccattcagagagtggaatcataggcacagacaaacaggattacaaatgttctgggaagacagtggagtggtacagaggatactgatgtggggatgggcaaaggtaagaggtttcataactgatgacctccattttcacaatgagtaggtcatctatgagaataagttgagcaggatcaaatgaagacttataacagtgaagaatattactgcaatttgtactgtagcacgaaaattgtccacacattgaaattaggactatattattttattttgggccacagttacttgaaacagattaagtaaaaactcaaaaatgactctaatgtgcatgtgcaattggcatgcaaaattttaaaaccatttcaaactacatcaattcttggtctatctgaaaaataacaagctaaaaaaatcaaacgttaaataactggttccaataaatttaaattactcattaaaaagaaaaagcactacaactttcaaattaagaagttaaattagcaatttagtatctaagtaagactcgttttctgttggtctgaggtttaaatgggaggagaaatcttttggaaaagacacatctcaaaaagcactccaaagcagaatcctttaggaatatcctcatgtcatagtatctagttcaacattatctgaataaagtcaaaacaaataaaaaaattttaaaattaagccaatataataagaattggg

SEQ ID NO: 171042 - DNA, 400 bp, Homo sapiens
gtcatgatgctgtttgttcaacatcaaggaaaggatgcattcagtgaggtcaacagaacactgcttgcttacagcaccacagcacatctcctcttacagaacttactccactggaatacttttctttggttatttcacactcactctgctatcttttttagtacaataatgcactatttctttgcttgtagtgcataatcagtattttaacagctcactgtgaaattctcgaggttccataaattcatctctgccgtatttaatacaactaatgaaaaacgtatatctgaatgtttcaccaataccaactgtaggttagtgtttcaaaatatttacttacttataactaaattgcaataaaagtatgcttaaatttttctgttcaaaaacagtaaaactg

SEQ ID NO: 171043 - DNA, 278 bp, Homo sapiens
tcctggactgctcatcctcaatccagaatttctgctcctgacaaccagccagcaagttattgatgcactttacaagactagcatattcttcctgaactaaactataggaaagtacctgaattcaaactcccatttctatgagccacatggaaattatccaagtgaaaacaggcaagataataggtattcatctagagatcaacctaatttcaaagaatgaagcaggttttctttcataagtcaaagaagtgtgtgtgtgtgtgtgtgtgtgtgtgtgt

SEQ ID NO: 171044 - DNA, 245 bp, Homo sapiens
tgcagtgcatgttatgaagacacgcaatgatccttttcctgtcagcaaatccaggagctcagagattacctgttttctatcttttcagtcaactatgggaatccctgaaagaccttggtttcttgttgacagaagttgagcattgctaccatcaggaacaacccaggtccctcttgatgaccaacctctaaagcctgccagtgcagttgcaacctctacttttcattggcccacttcatcccatc

SEQ ID NO: 171045 - DNA, 403 bp, Homo sapiens
  misc_feature (355)..(355): n is a, c, g, or t
tgtctgtgtgtaattgtacaggatatggttattggtatgaaaagtatgatattcttaactttctgacttgacaattttttggatcttggcataaattgtatttttgtattctgtcttctaaggcaagggttcccaacccagtttccctgttaggaactgggctgcacagcaggagaggagtgccaggtgagggagtgttattttttttttctttttgtactttaagttctagggtacatgtgcacaacatgcaggtttgttacatatgtacacatgtgccatgttggtgtgctgcacccagtaactcgtcatttacattaggtatatctcctaatgctatccctctccccttccnccccaccccacgacaggccctggtgtgtgatgttcccctccctgtgtc

SEQ ID NO: 171046 - DNA, 192 bp, Homo sapiens
tggtctgacaaaggagattttcctcatgtgcaacacggatgaagcgagtgtacctaatatcttcaattgcctagctatcctctcaaaatcaaatctaattacttgaatgaccaccaaaacaaaacatcctgctttacagagagattttaagtgtcaatgatggctaaattggtgatttctgtgaccttcaga

SEQ ID NO: 171047 - DNA, 6943 bp, Homo sapiens
gtgggggaaccctccttgctagcgttgcaaagaagggcccagctccgtcaggaatccagggatggagaactggggagcctgggccccacatgagattcatggcaggacttgtctgaggggccccagtgccagcgacccagccccctgtgcctggcccctctgtgggtctcaggacctgggtctgggctgggtgtttggaggaacctcctcccggctctcagacacctctgttttgtctgctgtggatgacttccagcttggtccccctgtggccctggcaggagtatcaccatgggagagggcaggacaggggctgggcgagcaggcctcccactagaccaggctactcctgctgtggaccagctacttccacctctgcccttggcttgccctcctcagagttctcagcctgagtgggccctggggacactgtcaccagagaccccacccctcatacccccagggacccagacccacccccagaagccatgtgacctcctcggctcagctgtgggaggcatgggctctgtcccacatgctgcggtagccacaaaggtgatccatactgggccaggtgcaccccgaggtgcccccctggaccactgcctccctccctccccctggcaccggctccagtctcctatgtgggggctggggagggggctgttggcagccatgccccagcaagcagggggcttgctgagggctgggccactgaccacctccccggcatcccctcaggcgtgttcaaccccaactcggaggaccccctgcccgggcagctcaagaagcagctggtgctccggatcatcagtggccagcagcttcccaagccgcgcgactccatgctgggggaccgtggggagatcatcgacccctttgtggaggtggagatcattgggctccctgtggactgcagcagggagcagacccgcgtggtggacgacaacgggttcaaccccacctgggaggagaccctggttttcatggtgcacatgccggagatcgcgctggtccgcttcctcgtctgggaccacgatcccatcgggcgtgacttcattggccagaggacgctggccttcagcagcatgatgccaggctacagacacgtgtacctagaagggatggaagaggcctccatcttcgtgcatgtggctgtcagtgacatcagcggtaaggtgagtgtcaccccctgccaccagccatcatggggaggggccacaccagccccttgtcccatgcccccccatgtgtccccagtgctgggtcctgaactcaggcagtgaggcctagggtcccctccccgggcctctgctcctctatctcaagaggggctgctgtgggggcctggctcctgagccaccagtgcccacctctgatctcagggctggctttgggcatctcgggcaggacaggtcctgagtgctccgggccttgccccgccctgtgtcacccatgcctgtctcagactcttgggggccttgcagcctccacccctacagtgctgccatctggcttctcagcagggaccgagtgatgcccctctcccctctactaccccccacccctctacttcctggtgtcacgtggaaggcagctgcccgggtttgcctgtgactccacacccagcatgtctgtcccctgccccaggtcagggtggggcctcggcttccgcaggaagtggtcttggtgccagccctgctgccctggctttgagctggggcccagtgccctctgggtcctgctggctgcagctggccctcggggaacccgcacacacagcaggaggggcctgcccaggcccagtgctgactctctcctgccatgctctcgggcccagaggtgccatccagcccctgccgtctatccacccatctgttcctcgtcccccaggctgcagggctccccacgccactgctgtggccgcctcacctgctccccctgtctctttggtcttgcagtcggcttctctatggccacagcctacttttagaagtgcagctctgttaggagccttgaaggtacccggtgcgcgggacagtgcggcccgccgcccctgcatgcccaggccgcaccccattagcatccatgattcctggtagcatttggagactgtcgctcatgtgacgtggatcatgacatggctccgggggccctggccatccccagccatagtggcatttacgaggcagatccagggttcagctgggtggccgccttctcactggcctctcctcccctcccctccctcagtcctccctcccctccctcagtcctccctcccctccctcagccccttccctggcgggcagcccgctggagcccccactgtgcccctcctatccccctccttctctctcctgcccccatctcggaccctcaggctgttggttctgagttcgcctcccactccctccctgtccttgccaaccatgccagtgcctgggatgagggcacccctgaggccggcgctccgagccagaatcccggatctgcttctaaatggcttcccagccactgtgaccaaatgcgtagatttgggatcttgaatcaggaagctgattcaagtgctggccatctgaacgcatctgcccagaggcgcccctgcaggggggtgacccacctgccgggcctgggccgctctgtgcacgagcacggctcgtcatgggggcgcggtgggtgctgtctcgggggcatctggcatgtgagggcccctctggcctctgcaccctggagatgcggctgcctccctctcagcagctgttctgcccaggcagggacctcctgggcccagctgtccaggaagattggctgtggccaggtgctggtgggctgggagtctgagcccatcttggcagggctcagggggcagcaagccagctgcgggccttgggggctcacatgagtggagggcagggcaagaccagaaaaggctgcctgggggaattcaggaaggcttcctggaagaggtggtacttcctagggcacgagtatcaccatgggagtgggcaggacacgggccgggcaagtgggcctcccgctgcacctggctactcctgctgtggaccagctactcctgcctgagggtggggcacacacaaccagggagtgccacgccagtgtcccctgctagcgccgggggctgcgggcctctgagcaggtgcaggctgtggtgggccaggctggggctcgaggtctctcctccggagggaaagaccttctctccatgcccctcaagggccccacatgccctggacaggtcaggcgagggcagtttctgccggaagggtggggtgggccatgtgtacttagatctgtagcagctactgtcccaggcagagctgccctagggaccctgctcctgaaggccctggtgtgtccacacacccccagcctgaggtggcccagcccctcggaccgagacacgcatggcacgtctgtggcacggtctggagagctggccctgggggagcagctgcagctgggctgggacccctggcaacagctacatgggctccttctcttgcaggtcaagcaggctctgggcctaaaaggcctcttcctccgaggcccaaagcccggctcgctggacagtcatgctgctgggcggcccccggcccggccctccgttagccagcggatcctgcggcgcacggccagcgccccgaccaagagccagaagccgggccgcaggggcttcccggagctggtcctgggtacacgggacacaggctccaagggggtggcagacgatgtggtgccccccgggcccggacctgctccggaagccccagcccaggaggggcccggcagcggcagcccccgaggtaaggcgccagctgcggtggcagagaagagccctgtgcgagtgcggcccccgcgtgtcctggacggccccgggcctgctgggatggccgccacatgcatgaagtgtgtggtgggatcctgcgccggcgtgaacaccgggggcctgcagagggagcggccacccagcccggggcctgcaagcaggcaggcagccattcgccagcagccccgggcccgggctgactcactgggggccccctgctgtggcctggaccctcacgctatcccggggagaagcagagaggcccccaagggtcctggggcctggaggcagggtccaggcggtagcggctccatgtcctcggactccagcagcccagacagcccgggcatccccgaaaggtccccccgctggcctgagggtgcctgcaggcaaccgggggccctgcagggagagatgagtgccttgtttgctcaaaagctggaggagatcaggagtaaatcccccatgttctccgccggtaagcccctcttgccctgcgtggtcctcccgcacgcccctggcatggctgggcctgggtcacctgctgctgcttctgcgtggacggtgtcgcctcgtgtgctcgtgctcgtggctctgtatccgtggcactgtctccgtggcactctgctcccttggcttgcctgtggcccatagccccagccctcctgtctgagcttgaggccctgggacttgggtggagctggtttgaggcccgacaggctgggaagaaccagctgctcttgctgagggtctggggccgggactgtggcctgacatgctgggcccctccggctgggcgcttccccaaactcacctcctgggcggctggcgacctgcatggcccctgatgcctttcctgggactgggggccacgtaccatcccattcccacctccctctagggcaggctccaggggtccctactgggaagtctgatgtgggcaggtagtgcagctgctgggcgtctcctgcgcccctgggacgcctggagcctgctgagtgctgcgtggagtagattccctgggccccagggcttcgctgctttgggctgaagcaccccactagaagggtgtctccttagcctggagggagggacatacacggagcccgccccacaccaccctgcccctccagacccccctgaccaagctttcctttctgcccccacccacgctgcctccgtagttaggaactgagagcggcgagtgacaggtaacggggcccagccccggtgtcccgtgctgtcccagcccaaggagggccccgtgtgcggcacagggcgtggactgggccccagcagcagcagggtggggacaccgagtgtgccgcgcccgggggatgcctcggggtgggagctgggcctggcgaccctcggcacggggcaccggggacaccaccctgatccgactcctctccgcctctctccctgcctccctctctctcttctgcttctccctctggctctctctcactcccccacctccccacagacacccgccccctctccacgcagcggccactccccccactgtgcagcctggaaaccatcgctgaggagcccgccccaggccctggtcccccgccaccagcggctgtccccaccagctcttctcagggacggcccccataccccacaggacccggagccaatgtggcaagccccctagaggacactgaggagccccgagacagcaggcctcggccgtgcaacggcgagggcgccggcggggcatacgagagggcccccggcagccagacggacggcaggagccagccccggaccctgggccacctgcccgtgattagaagggtgaagagtgaggggcaggtgcccacggagcccctgggagggtggcggcccctggccgctccctttccagctcctgccgtgtactccgatgccacgggcagtgacccgctgtggcagcggctggagccatgtggccaccgagacagcgtttcctcctcctccagcatgtcatccagcgacactgtcattgacctctccctgcccagcctgggcctgggccgcagccgtgagaacctcgctggagcccacatgggacgcctgccccccaggccccactcggcttcggctgcccgcccagacctgccacctgtgaccaagagcaaatccaaccccaaccttcgggctacaggccagcggcctcccatacctgacgaactgcagcccaggtccctggccccagggatggctggcctccccttccggcctccctggggctgcctttccctggtgggcgtgcaggactgccccgtggctgccaagtccaagagcctgggcgacctcactgctgatgactttgcccctagctttgagggcggctcccgcagactgagccacagcctgggcctcccgggagggacacggcgggtgtcggggccaggggtgagacgggacaccctgacagagcagctgcgctggctcactgtcttccagcaggcaggagacatcacgtcacccaccagcctgggcccggctggggagggggtggcagggggccctggttttgtgcggcgctcctcctcccgcagccacagccgcgtgcgtgccattgccagccgggcccgccaggcccaggagcggcagcagagactgcagggcctgggccggcagggacccccagaagaggagcggggcacccccgagggcgcctgctccgtgggccacgagggcagtgtggatgcaccagcaccctccaagggagccctcgggccagcatccgcggctgctgaaaacctggtcctgctccgcctctgaccgtcagtggtgggaacctgggcggctctggaggcccagggcaggggtgggcgtgttgtttgctcaggaaacagggcagccaggcccccaaaactgtgtccccctggctgccctgtgtcccctccacccctgcctccctcctgcccctgctcccggggaggaaaggctaaagctgctggcccggggcccacaggaggggcttcgaggctggccctgccaggcagttttcccggcgttttaggatctgtacatagagaaatatttaaatttttagaagcaaaacttatacaacattaaaatgataccaagtcc

SEQ ID NO: 171048 - DNA, 407 bp, Homo sapiens
  misc_feature (88)..(88): n is a, c, g, or t
  misc_feature (153)..(153): n is a, c, g, or t
  misc_feature (159)..(159): n is a, c, g, or t
  misc_feature (189)..(189): n is a, c, g, or t
  misc_feature (192)..(192): n is a, c, g, or t
  misc_feature (203)..(203): n is a, c, g, or t
  misc_feature (205)..(205): n is a, c, g, or t
gtggtaaaataatccaggcgtcagtcaaaggcatttaggtgactttaatattgattatattgtaaccaggaatttaagaaaatattantggaattaaagatatatatatattaacgaagaattttgtttgatatgtgtaggttaaagtaatantcaagntgattaagttgttaagtattgtttgtaatnatnaataaataagngnatttgtgtcccctccacccctgcctccctcctgcccctgctcccggggaggaaaggctaaagctgctggcccggggcccacaggaggggcttcgaggctggccctgccaggcagttttcccggcgttttaggatctgtacatagagaaatatttaaatttttagaagcaaaacttatacaacattaaaatgataccaagtcc

SEQ ID NO: 171049 - DNA, 261 bp, Homo sapiens
ccaggccctgggagctaaaacattctttcatcaagtgaaaaggagggtgttttttaaaaaaatgtgtcccctccacccctgcctccctcctgcccctgctcccggggaggaaaggctaaagctgctggcccggggcccacaggaggggcttcgaggctggccctgccaggcagttttcccggcgttttaggatctgtacatagagaaatatttaaatttttagaagcaaaacttatacaacattaaaatgataccaagtcc

SEQ ID NO: 171050 - DNA, 2807 bp, Homo sapiens
ttgccctgaactaccagtcagaggggcggatgctgcagctgaaccgagccaagttcagcgccaacggtggctgcggctacgtactcaagcctgggtgcatgtgccagggcgtgttcaaccccaactcggaggaccccctgcccgggcagctcaagaagcagctggtgctccggatcatcagtggccagcagcttcccaagccgcgcgactccatgctgggggaccgtggggagatcatcgacccctttgtggaggtggagatcattgggctccctgtggactgcagcagggagcagacccgcgtggtggacgacaacgggttcaaccccacctgggaggagaccctggttttcatggtgcacatgccggagatcgcgctggtccgcttcctcgtctgggaccacgatcccatcgggcgtgacttcattggccagaggacgctggccttcagcagcatgatgccaggctacagacacgtgtacctagaagggatggaagaggcctccatcttcgtgcatgtggctgtcagtgacatcagcggtaaggtcaagcaggctctgggcctaaaaggcctcttcctccgaggcccaaagcccggctcgctggacagtcatgctgctgggcggcccccggcccggccctccgttagccagcggatcctgcggcgcacggccagcgccccgaccaagagccagaagccgggccgcaggggcttcccggagctggtcctgggtacacgggacacaggctccaagggggtggcagacgatgtggtgccccccgggcccggacctgctccggaagccccagcccaggaggggcccggcagcggcagcccccgagttaggaactgagagcggcgagtgacagacacccgccccctctccacgcagcggccactccccccactgtgcagcctggaaaccatcgctgaggagcccgccccaggccctggtcccccgccaccagcggctgtccccaccagctcttctcagggacggcccccataccccacaggacccggagccaatgtggcaagccccctagaggacactgaggagccccgagacagcaggcctcggccgtgcaacggcgagggcgccggcggggcatacgagagggcccccggcagccagacggacggcaggagccagccccggaccctgggccacctgcccgtgattagaagggtgaagagtgaggggcaggtgcccacggagcccctgggagggtggcggcccctggccgctccctttccagctcctgccgtgtactccgatgccacgggcagtgacccgctgtggcagcggctggagccatgtggccaccgagacagcgtttcctcctcctccagcatgtcatccagcgacactgtcattgacctctccctgcccagcctgggcctgggccgcagccgtgagaacctcgctggagcccacatgggacgcctgccccccaggccccactcggcttcggctgcccgcccagacctgccacctgtgaccaagagcaaatccaaccccaaccttcgggctacaggccagcggcctcccatacctgacgaactgcagcccaggtccctggccccagggatggctggcctccccttccggcctccctggggctgcctttccctggtgggcgtgcaggactgccccgtggctgccaagtccaagagcctgggcgacctcactgctgatgactttgcccctagctttgagggcggctcccgcagactgagccacagcctgggcctcccgggagggacacggcgggtgtcggggccaggggtgagacgggacaccctgacagagcagctgcgctggctcactgtcttccagcaggcaggagacatcacgtcacccaccagcctgggcccggctggggagggggtggcagggggccctggttttgtgcggcgctcctcctcccgcagccacagccgcgtgcgtgccattgccagccgggcccgccaggcccaggagcggcagcagagactgcagggcctgggccggcagggacccccagaagaggagcggggcacccccgagggcgcctgctccgtgggccacgagggcagtgtggatgcaccagcaccctccaagggagccctcgggccagcatccgcggctgctgaaaacctggtcctgctccgcctctgaccgtcagtggtgggaacctgggcggctctggaggcccagggcaggggtgggcgtgttgtttgctcaggaaacagggcagccaggcccccaaaactgtgtccccctggctgccctgtgtcccctccacccctgcctccctcctgcccctgctcccggggaggaaaggctaaagctgctggcccggggcccacaggaggggcttcgaggctggccctgccaggcagttttcccggcgttttaggatctgtacatagagaaatatttaaatttttagaagcaaaacttatacaacattaaaatgataccaagtccctttccatttttacctggtttttcaccccaggtgtgtgtggtgtgcatctgtgcgcacctgtcctgagcctgccccgggaggcgcggctgacctggccacggcacaggcgggggtgcttgtgaggcaccagggctgctcaggacggccgtctgggccttgccctgaagcctgtatctgccttgcaccgaccacgccaccctctgcaccatgcctaagcctctgtcaactcccaaacgtggttctgataaacgtgctcaccagcacgcatgggcttcccgttcgctcagcctcctgtgccacttacttaccaggtgcccgtcggagcctgcgcc

SEQ ID NO: 171051 - DNA, 1228 bp, Homo sapiens
ttgccctgaactaccagtcagaggggcggatgctgcagctgaaccgagccaagttcagcgccaacggtggctgcggctacgtactcaagcctgggtgcatgtgccagggcgtgttcaaccccaactcggaggaccccctgcccgggcagctcaagaagcagctggtgctccggatcatcagtggccagcagcttcccaagccgcgcgactccatgctgggggaccgtggggagatcatcgacccctttgtggaggtggagatcattgggctccctgtggactgcagcagggagcagacccgcgtggtggacgacaacgggttcaaccccacctgggaggagaccctggttttcatggtgcacatgccggagatcgcgctggtccgcttcctcgtctgggaccacgatcccatcgggcgtgacttcattggccagaggacgctggccttcagcagcatgatgccaggctacagacacgtgtacctagaagggatggaagaggcctccatcttcgtgcatgtggctgtcagtgacatcagcggtaaggtcaagcaggctctgggcctaaaaggcctcttcctccgaggcccaaagcccggctcgctggacagtcatgctgctgggcggcccccggcccggccctccgttagccagcggatcctgcggcgcacggccagcgccccgaccaagagccagaagccgggccgcaggggcttcccggagctggtcctgggtacacgggacacaggctccaagggggtggcagacgatgtggtgccccccgggcccggacctgctccggaagccccagcccaggaggggcccggcagcggcagcccccgagttaggaactgagagcggcgagtgacagacacccgccccctctccacgcagcggccactccccccactgtgcagcctggaaaccatcgctgaggagcccgccccaggccctggtcccccgccaccagcggctgtccccaccagctcttctcagggacggcccccataccccacaggacccggagccaatgtggcaagccccctagaggacactgaggagccccgagacagcaggcctcggccgtgcaacggcgagggcgccggcggggcatacgagagggcccccggcagccaggcagttttcccggcgttttaggatctgtacatagagaaatatttaaatttttagaagcaaaacttatacaacattaaaatgataccaagtcc

SEQ ID NO: 171052 - DNA, 2474 bp, Homo sapiens
ttgccctgaactaccagtcagaggggcggatgctgcagctgaaccgagccaagttcagcgccaacggtggctgcggctacgtactcaagcctgggtgcatgtgccagggcgtgttcaaccccaactcggaggaccccctgcccgggcagctcaagaagcagctggtgctccggatcatcagtggccagcagcttcccaagccgcgcgactccatgctgggggaccgtggggagatcatcgacccctttgtggaggtggagatcattgggctccctgtggactgcagcagggagcagacccgcgtggtggacgacaacgggttcaaccccacctgggaggagaccctggttttcatggtgcacatgccggagatcgcgctggtccgcttcctcgtctgggaccacgatcccatcgggcgtgacttcattggccagaggacgctggccttcagcagcatgatgccaggctacagacacgtgtacctagaagggatggaagaggcctccatcttcgtgcatgtggctgtcagtgacatcagcggtaaggtcaagcaggctctgggcctaaaaggcctcttcctccgaggcccaaagcccggctcgctggacagtcatgctgctgggcggcccccggcccggccctccgttagccagcggatcctgcggcgcacggccagcgccccgaccaagagccagaagccgggccgcaggggcttcccggagctggtcctgggtacacgggacacaggctccaagggggtggcagacgatgtggtgccccccgggcccggacctgctccggaagccccagcccaggaggggcccggcagcggcagcccccgagttaggaactgagagcggcgagtgacagacacccgccccctctccacgcagcggccactccccccactgtgcagcctggaaaccatcgctgaggagcccgccccaggccctggtcccccgccaccagcggctgtccccaccagctcttctcagggacggcccccataccccacaggacccggagccaatgtggcaagccccctagaggacactgaggagccccgagacagcaggcctcggccgtgcaacggcgagggcgccggcggggcatacgagagggcccccggcagccagacggacggcaggagccagccccggaccctgggccacctgcccgtgattagaagggtgaagagtgaggggcaggtgcccacggagcccctgggagggtggcggcccctggccgctccctttccagctcctgccgtgtactccgatgccacgggcagtgacccgctgtggcagcggctggagccatgtggccaccgagacagcgtttcctcctcctccagcatgtcatccagcgacactgtcattgacctctccctgcccagcctgggcctgggccgcagccgtgagaacctcgctggagcccacatgggacgcctgccccccaggccccactcggcttcggctgcccgcccagacctgccacctgtgaccaagagcaaatccaaccccaaccttcgggctacaggccagcggcctcccatacctgacgaactgcagcccaggtccctggccccagggatggctggcctccccttccggcctccctggggctgcctttccctggtgggcgtgcaggactgccccgtggctgccaagtccaagagcctgggcgacctcactgctgatgactttgcccctagctttgagggcggctcccgcagactgagccacagcctgggcctcccgggagggacacggcgggtgtcggggccaggggtgagacgggacaccctgacagagcagctgcgctggctcactgtcttccagcaggcaggagacatcacgtcacccaccagcctgggcccggctggggagggggtggcagggggccctggttttgtgcggcgctcctcctcccgcagccacagccgcgtgcgtgccattgccagccgggcccgccaggcccaggagcggcagcagagactgcagggcctgggccggcagggacccccagaagaggagcggggcacccccgagggcgcctgctccgtgggccacgagggcagtgtggatgcaccagcaccctccaagggagccctcgggccagcatccgcggctgctgaaaacctggtcctgctccgcctctgaccgtcagtggtgggaacctgggcggctctggaggcccagggcaggggtgggcgtgttgtttgctcaggaaacagggcagccaggcccccaaaactgtgtccccctggctgccctgtgtcccctccacccctgcctccctcctgcccctgctcccggggaggaaaggctaaagctgctggcccggggcccacaggaggggcttcgaggctggccctgccaggcagttttcccggcgttttaggatctgtacatagagaaatatttaaatttttagaagcaaaacttatacaacattaaaatgataccaagtcc

SEQ ID NO: 171053 - DNA, 2424 bp, Homo sapiens
ttgccctgaactaccagtcagaggggcggatgctgcagctgaaccgagccaagttcagcgccaacggtggctgcggctacgtactcaagcctgggtgcatgtgccagggcgtgttcaaccccaactcggaggaccccctgcccgggcagctcaagaagcagctggtgctccggatcatcagtggccagcagcttcccaagccgcgcgactccatgctgggggaccgtggggagatcatcgacccctttgtggaggtggagatcattgggctccctgtggactgcagcagggagcagacccgcgtggtggacgacaacgggttcaaccccacctgggaggagaccctggttttcatggtgcacatgccggagatcgcgctggtccgcttcctcgtctgggaccacgatcccatcgggcgtgacttcattggccagaggacgctggccttcagcagcatgatgccaggctacagacacgtgtacctagaagggatggaagaggcctccatcttcgtgcatgtggctgtcagtgacatcagcggtaaggtcaagcaggctctgggcctaaaaggcctcttcctccgaggcccaaagcccggctcgctggacagtcatgctgctgggcggcccccggcccggccctccgttagccagcggatcctgcggcgcacggccagcgccccgaccaagagccagaagccgggccgcaggggcttcccggagctggtcctgggtacacgggacacaggctccaagggggtggcagacgatgtggtgccccccgggcccggacctgctccggaagccccagcccaggaggggcccggcagcggcagcccccgagttaggaactgagagcggcgagtgacagacacccgccccctctccacgcagcggccactccccccactgtgcagcctggaaaccatcgctgaggagcccgccccaggccctggtcccccgccaccagcggctgtccccaccagctcttctcagggacggcccccataccccacaggacccggagccaatgtggcaagccccctagaggacactgaggagccccgagacagcaggcctcggccgtgcaacggcgagggcgccggcggggcatacgagagggcccccggcagccagacggacggcaggagccagccccggaccctgggccacctgcccgtgattagaagggtgaagagtgaggggcaggtgcccacggagcccctgggagggtggcggcccctggccgctccctttccagctcctgccgtgtactccgatgccacgggcagtgacccgctgtggcagcggctggagccatgtggccaccgagacagcgtttcctcctcctccagcatgtcatccagcgacactgtcattgacctctccctgcccagcctgggcctgggccgcagccgtgagaacctcgctggagcccacatgggacgcctgccccccaggccccactcggcttcggctgcccgcccagacctgccacctgtgaccaagagcaaatccaaccccaaccttcgggctacaggccagcggcctcccatacctgacgaactgcagcccaggtccctggccccagggatggctggcctccccttccggcctccctggggctgcctttccctggtgggcgtgcaggactgccccgtggctgccaagtccaagagcctgggcgacctcactgctgatgactttgcccctagctttgagggcggctcccgcagactgagccacagcctgggcctcccgggagggacacggcgggtgtcggggccaggggtgagacgggacaccctgacagagcagctgcgctggctcactgtcttccagcaggcaggagacatcacgtcacccaccagcctgggcccggctggggagggggtggcagggggccctggttttgtgcggcgctcctcctcccgcagccacagccgcgtgcgtgccattgccagccgggcccgccaggcccaggagcggcagcagagactgcagggcctgggccggcagggacccccagaagaggagcggggcacccccgagggcgcctgctccgtgggccacgagggcagtgtggatgcaccagcaccctccaagggagccctcgggccagcatccgcggctgctgaaaacctggtcctgctccgcctctgaccgtcagtggtgggaacctgggcggctctggaggcccagggcaggggtgggcgtgttgtttgctgtgtcccctccacccctgcctccctcctgcccctgctcccggggaggaaaggctaaagctgctggcccggggcccacaggaggggcttcgaggctggccctgccaggcagttttcccggcgttttaggatctgtacatagagaaatatttaaatttttagaagcaaaacttatacaacattaaaatgataccaagtcc

SEQ ID NO: 171054 - DNA, 2062 bp, Homo sapiens
ttgccctgaactaccagtcagaggggcggatgctgcagctgaaccgagccaagttcagcgccaacggtggctgcggctacgtactcaagcctgggtgcatgtgccagggcgtgttcaaccccaactcggaggaccccctgcccgggcagctcaagaagcagctggtgctccggatcatcagtggccagcagcttcccaagccgcgcgactccatgctgggggaccgtggggagatcatcgacccctttgtggaggtggagatcattgggctccctgtggactgcagcagggagcagacccgcgtggtggacgacaacgggttcaaccccacctgggaggagaccctggttttcatggtgcacatgccggagatcgcgctggtccgcttcctcgtctgggaccacgatcccatcgggcgtgacttcattggccagaggacgctggccttcagcagcatgatgccaggctacagacacgtgtacctagaagggatggaagaggcctccatcttcgtgcatgtggctgtcagtgacatcagcggtaaggtcaagcaggctctgggcctaaaaggcctcttcctccgaggcccaaagcccggctcgctggacagtcatgctgctgggcggcccccggcccggccctccgttagccagcggatcctgcggcgcacggccagcgccccgaccaagagccagaagccgggccgcaggggcttcccggagctggtcctgggtacacgggacacaggctccaagggggtggcagacgatgtggtgccccccgggcccggacctgctccggaagccccagcccaggaggggcccggcagcggcagcccccgaggtaaggcgccagctgcggtggcagagaagagccctgtgcgagtgcggcccccgcgtgtcctggacggccccgggcctgctgggatggccgccacatgcatgaagtgtgtggtgggatcctgcgccggcgtgaacaccgggggcctgcagagggagcggccacccagcccggggcctgcaagcaggcaggcagccattcgccagcagccccgggcccgggctgactcactgggggccccctgctgtggcctggaccctcacgctatcccggggagaagcagagaggcccccaagggtcctggggcctggaggcagggtccaggcggtagcggctccatgtcctcggactccagcagcccagacagcccgggcatccccgaaaggtccccccgctggcctgagggtgcctgcaggcaaccgggggccctgcagggagagatgagtgccttgtttgctcaaaagctggaggagatcaggagtaaatcccccatgttctccgccgttaggaactgagagcggcgagtgacagacacccgccccctctccacgcagcggccactccccccactgtgcagcctggaaaccatcgctgaggagcccgccccaggccctggtcccccgccaccagcggctgtccccaccagctcttctcagggacggcccccataccccacaggacccggagccaatgtggcaagccccctagaggacactgaggagccccgagacagcaggcctcggccgtgcaacggcgagggcgccggcggggcatacgagagggcccccggcagccaggcagttttcccggcgttttaggatctgtacatagagaaatatttaaatttttagaagcaaaacttatacaacattaaaatgataccaagtccctttccatttttacctggtttttcaccccaggtgtgtgtggtgtgcatctgtgcgcacctgtcctgagcctgccccgggaggcgcggctgacctggccacggcacaggcgggggtgcttgtgaggcaccagggctgctcaggacggccgtctgggccttgccctgaagcctgtatctgccttgcaccgaccacgccaccctctgcaccatgcctaagcctctgtcaactcccaaacgtggttctgataaacgtgctcaccagcacgcatgggcttcccgttcgctcagcctcctgtgccacttacttaccaggtgcccgtcggagcctgcgcc

SEQ ID NO: 171055 - DNA, 121 bp, Homo sapiens
tatatctaaaattggtttacatatcaagatgatttatttaaactagaccaacatccacattcatttatgctatggaaatcagctttgattgtcttcgtagccaacttggaaaaaaaaatct

SEQ ID NO: 171056 - DNA, 458 bp, Homo sapiens
atgctagggtacaaaatgcttttttccacagccagtgctatgtcagtgctaagggttactgtgatgtagcaacttgaagatgatgaatgaatacatttgaagaggggatgtttgaaaataattctatagaactgcatttggtattgggactgttgtctaaaccataacctaaactactttatgcagttaggtaatagtctcatctcagataacaaaaggaagaagcagagacagaaggagaaggagaggtctgtgagaatccacagtcaggtggaaagagtgtaggcagaagatgcagggaataccttctccctggaaggtgctgggctggtagctccagaatcccaaggccagagcacaggggtgaaaccccagcaagggagagagaattagaatctgcaagaatctcagaaaaacagatttgaatgtctttttatgtggcaaaaccatgggaactg

SEQ ID NO: 171057 - DNA, 515 bp, Homo sapiens
caggaataaaccaatagcatttttccactcctgcctcctccctcaataacctccaccttcaaggaggtttctggatgcccaagtgacagaaagtcatcagtcccctttttctcggcaggagaactgcccaatcacatggccctacagcctaacaggtgctgtcaaatcgctgaaaaggcaggataagttcttgacaaatcggtggcgtcagaaaatcaattcccaaataccatgtaatttactgacaagcccaccagggcattcatattggacgggaacagatttcttccctgctattgaaacttctaaaactaggcctagtgttagaagtttcaatagcactagttggagaagtccccaggcagctatgaagtaatagagtgtgcttaatcatttgtaattcagacatgctatggaaacttctaagactaggaaacctcttcaaattgtggactctctatgtggaaaggtctgtcctgcacaaattatcagtttgagaagtttcaatagcagcg

SEQ ID NO: 171058 - DNA, 425 bp, Homo sapiens
ctggctttgaactcaggtgtgtctaacggccttgcttctcgttggctcatgtgaggtgcaatgttgatttatctcaggaagctggattttgtggaggaatagaggagtaacatgcagcttttttttttttttggtacaactttaatgagttagatttgtaataatgagcttgtattgcttttgtacctaaacatataaatacacatacacatatacatggacatgtaaatcgacctctgaacctttgagttcctagtaagtctacacacgtggggtgaggaaagccttcttcccttcacccaaccattgagccattcagcaggccagctgtgtcctgccagccacctgctctcctagccaagtctcacacaccagccccctttcctggcttcctctgctaagggtcccaccacctccagacttgg

SEQ ID NO: 171059 - DNA, 724 bp, Homo sapiens
acaccttgccccacacatctcgtcatctgcatcctttgtaatatccttcaaaataaaccaggaaacatgttttccttacttgtgtgagtctgtcaagcaaagtaatggaacccaaagagggggccatggggatcctaggaagcatgggtaaacaacctgtggcgtgggagtggcatcagaaggggcagtcttgtagggatgagccctcattctgtgggacctgacactatctccaggtagagtgttgagactgaaggggagggtgccccactggtgtctgctgtaaaactgattggttgctggtggggagaaatccccgcacatttcttggtgaccagcggtcacagaattcttctgggttgattgttgtgacgcgaaagcaggagaaaaaccgctttttcttcaggagggaaaggtcaaaaaatcctttccaaaatatactgaaagctatgaaacagaattcagaagttccaggactcctccaagttcatctacaaacaagaaaaggaaacgtcaaggagtgcaggctgcagcacggggggggcctcccttgccaggtggtgaggggccgacccacctctcctcctttgggggacacctgaaacagatagcacaatgcctggcacacagcatgtgttacacaccacagccaaacggcaggcgtgggagctatgaaattccaagttgcggccaggcgcggtggctcatgcctgtaatcccagca

SEQ ID NO: 171060 - DNA, 662 bp, Homo sapiens
ccttttaaaggtgcacaagaagatgtttattacatgtatcacatagctcctggaggtattgctttagtttgaggcaggtaagcactttaagaacacagcattctctcacagtctacgaagctgtgaagatgtgtcaggagaggaaattgtccagcttcgcaatggaccattttccttgggcttttggatactgctttttcatttaaatcagtgcctgggtgtgggcttagatttttcaggggcttcataggctacatagttgcagttgcctttagagacataaagaggaacaaaaagctctgtgcttgaataacagtctgttttgaccaggaaaaaaggcacagatggaggaaaaccctgaaggtacagcagggatcccaaggcccaaggcagggagagaatcttctccgcctccttgagtcctcagacctgcaggcttctggtgctcccacttagatgcctcgctgtctttttatttcattccagaaagaattccatatattatatttgacccttccgccaatcctatgaagtcggacagctacctgattttacagatgaggggaagggggctgagcagggctgccagaactgggaaccaggaggccatgatgccagagtaacaactggggaggctgagcccacacgtgcccatttggttt

SEQ ID NO: 171061 - DNA, 374 bp, Homo sapiens
tgtgggtggctcccatctcacctgtatttgtgtccttatcagtgtccaacccagggcctatctgctgaatggatagtgaaataatcactagataaataaatgcatgtagagatgcataaatggattggtgggtgggtggatggatggatggatggatggataaatcgatggagacagacagatggcctcccctttagtccagggcacagagatggcttcatgagtactcatcctcctgagggccccatgcttagaagggcctatgtttggtttaatgctctgcagtcatcattttgaaattgttaataatttttaacaaagagccctgcatttccattttgtgcttgccccacaaattatgtagcttgtcctgc

SEQ ID NO: 171062 - DNA, 246 bp, Homo sapiens
ccattatatcaacaggctaaagaagaaaacccacatgatcatatcaataaatgcagaagaagcatttgacaaaatccaacacccatttataacagaaactctcagagaactaggaatagacttcttcaatttgaataaagaacatctacaaaaaccctacagttaacatcgtacttaattgtgagaaactagatgttttcccaccaagatcagtaacaaggtaaaggatgtcctttctcagaacca

SEQ ID NO: 171063 - DNA, 164 bp, Homo sapiens
ctgtgcacttgggcccccaggcatgcggcttgctccggaaggtcccttacctgtggcactgagcatgtacttcctgcagtgcagttagaaatgcccatccgactctgcttgcaaagtgcagagagggagacacccttacaaatggagattgctggatagagtgg

SEQ ID NO: 171064 - DNA, 462 bp, Homo sapiens
ttcaccatacgtcgaggtcgcgatggacgaagttgtgctgcacacgccgagactccacactctcagagaaacctccatcccttttagctgtcaccctttcagctgtcaccccttaacttccctcatctcctccatctccagccctgggaaaccaagaatctactttgtgcttgtatggatttgcctgttctggacatttcatataaatcgaatcatataatatgtgggggttttttgggtaaccagcttctttcacttagtataatattttcaaggtttatttgtgttgtaacgtgagtgcgcacctccttcgtatggctgagtaatagtgtggacgctcggcgtgtgcatgcacacgccgagacaccacacgctacacagtttgttcagagccaggtttctatgcttttatgtgatttcttccctcaaacacttcttatactctgatgacatgcatacatg

SEQ ID NO: 171065 - DNA, 129 bp, Homo sapiens
tgaacattggggtccttgcatccaaggaccagcaggcaagaatagtcaccatcttagcagaagtaattgaacttgatcagcagaaaaaagtagggctgtacacattggggatgtacgtggaagaacagg

SEQ ID NO: 171066 - DNA, 337 bp, Homo sapiens
acacctgaacataagaggcaaaacagcaaaagttctggaagacaatatagaaacagggccaggcaaggtggctcatgcctataatcccagcactctgggaggccgaggcaggtggatcacttgaggtcaggagtttaagatcagcctggccaacatggtgaaaccctgtctctacaaaaatacaaaaattagctgggcatgatggcagctacctgtaatccaagctactcaggaggctgaggcaggagaatcacttaaacccaggaggcagaggttgcagtgagccgagatcatgccattgcactctaacctaggcgacagagtgagactccatctc

SEQ ID NO: 171067 - DNA, 399 bp, Homo sapiens
tcattgaagtaacttgtttttataaaaattttatagactgtcaaaaatgttttatatttcttatcatattttgctctcataaacactctgcagcaagctcattgatagaccagagctctgagtacttaattatcattgaaaagaaagctagatattgactctaagagccctggctcctactttgaggacctggtccccttggcacaatggctgtaatggctgtgccccaatagctacacaatatcaataggcaaacaatgtgaatgtaagaatgacaagttcacttccgaggaaggaaagaggtccaatgaaagtgtatagttggggatttaacttcactcctacaattgcagtttaccctgataatggctttataattattagaacactttgagctct

SEQ ID NO: 171068 - DNA, 225 bp, Homo sapiens
gttcctgtgtccaggagtagaggtgaattggggctctggatgccaagaacagaggaaggacaaatgccagccccagagaccctcacctcctcaagaccaacaggagctggcgcctgtccgcccagcagcagcaaagccagagcgggtgccagccagggtgggtaggcacaggcctgggcttgaagattgagacagcgctgccccctcctggctaattcacggctg

SEQ ID NO: 171069 - DNA, 561 bp, Homo sapiens
tcagacaggcaagtagtgcttcgctgatctgtgtccaaggctctttggagaatggaatgataaaaacacgtggacacaaagtttcatctttcccctttcacagggaggtgaccatttcacccttggtctacctgggaggccccaggctctcggtgaagacccctgcttttgtggggaatggagtgatgcagcactggaacatggcaggcaggggagacagtgcgtcttcacgttttcccatgtggagaccaaggcttggagactcagggggtctgttcaaaaccactcgatttgtgggctccatagcaccccagagcacatcccctctccggtggcctagaatgggcagaaggaaaagtgcagagcatgttaaatataagtgaaccccaagtttcttttcaaagaatcaatacgtcagtatgttcagctctcttattctttgattctccattttaaagtttaacttcctggttctcttcgcccccttgcttctagtttcagtaaacaactttcccaacagtcctagtcagtagttcacatctgttccctgtgtcacccaat

SEQ ID NO: 171070 - DNA, 587 bp, Homo sapiens
catgtgaaggaattggcaatcaacttagaatggtaaaactggaaggaatgttagagatcacgacgactttcattttacagatgaggaatcaaacatttgaaaaattattttaataaaaggaggcttcttgaaaaggaaaaacatttttcatggaattctacgtgttgtacaaatccaatcaataatcttttaacacctctctgaagcgctggccttaccatctttccacttcacacacacgaaaactaaggtataagcaagctaagcagttcactcattatctctatgaatcagcatcattgctaggaacggaagccaaaactttgaatgttggaccattctcacagatgtaggctgatctcattcgcagtgatgctggctgggggcgaggggaagccatgtttgggaagtcccctcatggaacactgcatttcacaagcagagtacttgctgactaacgcaaaatgcttccttaaatgagttccaatggataatgcagtctttaagaaacagaacagtacaatacatcagtttcaccatcttcctctaaaacgaagtgcctttgaatcctagacatttaaaatttg

SEQ ID NO: 171071 - DNA, 219 bp, Homo sapiens
ctcccaaagtactgcgattataggtgtaaggtactgtgcctggcgagaaagctctcatatttaatactgactgtagtagggccagtatagtagggctgattataatacaaagaagtttgagagcagcctgggcaacacagtgagaccccatctctacaaaaaatgaatttaaaaagttagcccagtgctgttgcacgcacctgtagtctcagctacttg

SEQ ID NO: 171072 - DNA, 363 bp, Homo sapiens
gttgtgggtggcaatcagaggctcgtggatgacactaaggaagccgtgcatcttttctaagaaggataaaggaaaagaaagttcagagtacttcatgatattgttgttttggtagaggaaaaattggaaaatccacatatgaggcaatgggttctattttacattgtaataaaaggaatgctttgaactgtgcttctgttttctcatttttagattttttatctcctcacatcttcaaatctgtgagcatttgccaagattcttccttagtcgtacatatgggctcccagcattgcacaacacttatccttaaaagttacatgcaatttatccccttcctggcatggtcagacttcccttttc

SEQ ID NO: 171073 - DNA, 427 bp, Homo sapiens
taggccacctgcccagactgaatttctttgaactgttctccctgcaggagagagagctgttggctcgtcccaggtttaataaagagtggccacagggaggtctcccatggctgagagttcattagctgggcaaggccaggctgcaggagtgctgagtcttgctgggaaacagcctcataaataattaaagctcggccacagctccctgcctgtgctgtagcccgcatctggccctcagtgtgcggcctggacgtgtgctcctgacactggacccagcctcatctccttcgtggatggagccatctgacgacagtgtggctcctttctgaacctccccgtcttcacctgaccgggcaactccaccatccagagtcctcctggggctcccaactatccagagaataaagtcagtgtagactcctctgta

SEQ ID NO: 171074 - DNA, 264 bp, Homo sapiens
cttactgacaggcactgtgccacctacagggtacagaaatgagtaagtctcatgcctgtaatcccagcactttgggaggctgaggcaggcggatcacctaaggtcgggagttcgcgaccagcctgaccaacatggagaaacccccctctctactaaaaatacaaaattaaccaggcgtggtggtgcatgcctgtaatcctagctgccccgtaggctgaggcaggagactcgcttgaacccaggaggcggaagttgcagtgagcc

SEQ ID NO: 171075 - DNA, 398 bp, Homo sapiens
atctacgcttgtgttttggggaacaaaatgaaggaagtaagcttacaataactttgtgtttaaacaaattcaatcaaaacacgcagaaaaaagagccaggactgaagaaaggatagttaagtagtctttcctatccagttatcaaaattcttaggattctaagaagatgccatctataaagtacaaaaactgaaaaatgctaatgtagctactttgacatgaaaagtgtctttggtgcaccaccgaagtaatccactgctgactaccttatcatagaaatgacaatgcaggaagaagtgagaatggagacttcatgggaaagaagtactagggcaaacctagaaggtctgaccctggtctctctaccactgaaggtcaatatgctaccccaccaaatg

SEQ ID NO: 171076 - DNA, 175 bp, Homo sapiens
acggaagcatatagtattctaatattctttggcaaggagatgaaaacaatccactttccttctctttagccctggtttctacattatcagtgccttgtgctccctaagacataaagaattatttgttagtgggcctacatgatccaccaactgatcccatatcaacttttttttt

SEQ ID NO: 171077 - DNA, 329 bp, Homo sapiens
gaagatgatgaaacttagatcaagtcatcactttgcctacataggagtggacctataatttgactctctccaaagtggatagtatttatattgggatacttttcaccaaaagtgacagaatatcatgcctcatattgtcttacacaacaagacatttattactccccataatgggaagtctggagatgccatgagcagggtggcagggctccagctctcttctgactcatttagctcttcctcactctgatacttcaggttggagacaagatggctgccctggtcaaggcctcaggccaagcatgatgatggcattttgaagaaaggtg

SEQ ID NO: 171078 - DNA, 207 bp, Homo sapiens
cagtgctggggccaggccaggggctggtctctgctcaggctcaaggtacacagggatgtggatctggggaagggtgctctccctggcctcctgacaacatgcacatctccacagatgccacacatttaaaggctcaaacctacctcagacactgctctacccatccccatcccctgcaagggcctcaccttcaccttgcaaatgtga

SEQ ID NO: 171079 - DNA, 612 bp, Homo sapiens
agaattgtgctttcagactcacaaggcctataaagtagcaagttggtcttggtctttctggccatgatcataaactttcaaccagcagccaggtcataacagggaggcactggaaggtgtaatgacaacaggttgtacaacatcagtgaagtggagccaaggacaaaggaagaggcaaggagagggagggatgttttacaacttaccgggaattgtgaccagtatgatgcacagagtttcaggcttaagatagggatgggaaaaagtagagaggggttaacaacagatgctgatctgtggctttcattaaataagttcacatgtgttcttaaggacctttgaattttggaacatctgtgacaatttatgattagaatatttgatgaaatggtttaaactgaacagaaaaacttccataccagagcatttttatcagatttttaaaaatgcacccaaagtctctatgaaacatataaaaataggcttatttgggtgtaatgtgaaagtgaaccagtccaactgtgccaccaagatcctgcctctgatgatgcttctttgccctcattcttctctgcctttcagagaccagccagaaaaatcacaacattcaac

SEQ ID NO: 171080 - DNA, 790 bp, Homo sapiens
  misc_feature (661)..(661): n is a, c, g, or t
  misc_feature (666)..(666): n is a, c, g, or t
ttttcatctttcttctgcccaggaagaaaatacttcagggatcttaacccaaaagcatggaggtccacaccatcctccaggatactacagttgacaactggatcccatctcctgtggattccctctctgcctaagagcagtccccgctgcatccttgttagtcaaggcgactgaggagatagtcatgggattcctccctgactgtgttttttcctcgtgccatggaagccgttttacacactcatcacacttggcatttttctgctagcggactgacctcctatgaacctcttctacttactattcatcatattattcaatcatgctgcaataaccttaaccctgtggctctctggacctctccatcagatgaaacaccacatggctgcttaactctgacagaccagcttttaattccttgggagcaattcctgtggacaatgctgagttgtcctggtttacagatggctcacatttaaagaatgagtctggcaagtattgtgcaggctgtgcagtcgtgacttcctttgagattgtgaaagcagctcatttactattaactacttcagccagcaggcagatctgtttgccctcgcttgagcctgagtccttgctacaggaaagacaatgtttatgtaagcagcaggaaggggagaatcgnagtgncattgaatatgaatcaaagctaatggggcctgggccaatattcaaggatcagctaaaatattctgtttcaaaaatggtatgggcacaagggtttggtcggctaagatcttgatagtcctatgga

SEQ ID NO: 171081 - DNA, 510 bp, Homo sapiens
tagataataggggttggccgatgggaagcaaaaatgcccccagagctttgaacccaggtgccattcattatttctatgccatctgccaggcattgcatagctattatctcatttaatctcctcctaatcttgtgggttggtattttcatccttatatcagagacgagaaaactaagggtcagagaaaattagcaattggtctaaaattgtacagttgtaacaggatctagaacagggacttcagtacaggcctccctgacccccaagcctgtgttctttctactgtactaggcttggaagacagcgtacgtgagagcaaagacaagctctgtccactctgtgcatattcagtgtaggtgctggtgagattcccgccttcaggtgtccagcaagtggttggagacatggagccgaatctcaaggacattgggaggattgaaggtcaaggcttaagaaccatctgcatcctcatttatttattcagcagctatttgttgtgtcttcgtggac

SEQ ID NO: 171082 - DNA, 386 bp, Homo sapiens
cgctctgaaggatgccacatcttttccaatgaattcctttccaacttatgttaaccaaagatggtttctgttgcatgcaacaaaacaacaaaagctagtagaaccaccaacatggtagaaacccacatctaccacagctatgccctctacagcatgcctggcaattgagctttactatcctcggatggggagctaatattattatgtagcaaccagttggtcagtatgggctgttcttcgttagcctgcacagatggacctcagtcctacttctcctttagaactgcaccacaaaaattctgtacaagagctctttggacatttgatgacagtgtaacctctgagctagagaggccaatcctcgagtatctccagactccttctaa

SEQ ID NO: 171083 - DNA, 101 bp, Homo sapiens
tgttcacatctcagaaaatccagtaaacagtgaaaagacatgcctcagagaaggtatttatagctgatataactgacaaagattggtatccagcatgaata

SEQ ID NO: 171084 - DNA, 946 bp, Homo sapiens
  misc_feature (40)..(40): n is a, c, g, or t
  misc_feature (157)..(157): n is a, c, g, or t
  misc_feature (555)..(555): n is a, c, g, or t
  misc_feature (614)..(614): n is a, c, g, or t
tcgtgccgcgaaagcagcggcggcgtttgcttcactgctnggaagtgtgagtgcgcgaagatgcgaaaggtggtttgatcaccggggctagcagtggcattggcctggccctctgcaagcggctgctggcggaagatgatgagcttcatctgtgttnggcgtgcaggaacatgagcaaggcagaagctgtctgtgctgctctgctggcctctcaccccactgctgaggtcaccattgtccaggtggatgtcagcaacctgcagtcggtcttccgggcctccaaggaacttaagcaaaggtttcagagattagactgtatatatctaaatgctgggatcatgcctaatccacaactaaatatcaaagcacttttctttggcctcttttcaagaaaagtgattcatatgttctccacagctgaaggcctgctgacccagggtgataagatcactgctgatggacttcaggaggtgtttgagaccaatgtctttggccattttatcctgattcgggaactggagcctctcctctgtcacagtgacaatccatctcagntcatctggacatcatctcgcagtgcaaggaaatctaatttcagcctcgaggacttcagnacagcaaaggcaggaacctagagctcttccaaatatgccagtgaccttagagtgtggctttgaacaggaacttcaaccagcagggtctctattccaatgtggcctggtccaggtacagcattgaccaagttgacatatggaaattctgactccgttaatatgaacgctggttgattgccggcgacattgctactacgcttattgccaatggcatcacgttgacaccatatactgtgacagcagctctggtatggttttccaacataagcctgaatctctcaaacatctgatcaatatctgagggccccactggttcggagaattacttacga

SEQ ID NO: 171085 - DNA, 290 bp, Homo sapiens
ggataatagccatgatctgtggacacatacgcagcaccaggcacacggataccttatctttcatcttcctgacaactcaaagacttagggatcagtattcatccccattttacagatgaggaaactgatgctctgagaggttaaataacctgctcaaggtctcacagccaaagagtccaggagccaggcctggaaccagagtgtggaggagatatacaggctcaccctggtccaccctctgagggcaaggatgttcctctctccacatgccatccttctgtcttgccact

SEQ ID NO: 171086 - DNA, 440 bp, Homo sapiens
catgagagaatttttaaaagtcaaccaacaatatcccagtcctcaccagcaggtggtttaaagcatctttcagaatttgaaatcagttttaatgatggtcactaacatgaatcatgttaacataattttaagcatgttgtacttaatgttctgattgagattttttaaagtttctgttttaattgctgttttggtgagaagaaatgattcaggaggtctgtgctttgttacctgtacccacatggtgctcaaggttgggtgagggaaagatgagcagttaaacacacaaaagtaggaattccagatcatcagagtcatttaattttgttttggacaagaaacgtttacatgctgaatcactctgccttgttgtttttttttttatcccattgtctcctggtatccattgtttccaatgagaaatcagctgttaatctcag

SEQ ID NO: 171087 - DNA, 328 bp, Homo sapiens
taactccagtctctgaatttccggggagactgatttgagtaataaaactctggtttcccatttagctggttctgtgtgaattaaactctttctctattgcaattctcctgtcttgataagtctgttctatctgggcagcaggcaaggagaaacctgttgggcagttacgctaatgggcagttacaccgatgtgaacccaggtatcaaggatggcagaggagtatctaaatgcaacagttggccctgaacctagactaatactacgctagtgctagagttctcaggaagcttccacttaaatcagataatcacaatgcaatgtgtcaac

SEQ ID NO: 171088 - DNA, 118 bp, Homo sapiens
tgttatacggtcgtaaagaggaatgaagtgctgatacacgctacaacatggatgagtcttaaaatcatcatgctaagtgaaagaagacagtcacaaaaggtcacatgttgcatgattc

SEQ ID NO: 171089 - DNA, 560 bp, Homo sapiens
cgagtagttgggacaacacacatgctacaggccaccatgcccagctaatttttgtattttttgcagagacggggtttcatcatttggttagacttacggttcttgagggacaagaattgccaagtataatttaatagaattggaaaggcagtggttgttttgaaagagtttgtctgtagagtacctgatggaagtgaggtacatccgtggtccccagcctttttagcactggggactggttttgtgaaagacagttttccacggactccagggtgggaggatatgcgagatggtttcgggatgaaactgtctcaccctagatcatcaggcgtcagattctcgtaaggagcatgcaacctagatccttgcatgcgcagttcacaaagggttcgccctcctgtgagaatctaatgtcaagctgatctgacaggaggcagagctcaggcagtaatgcttgcaggcctgcccaccactgctcaccaccagctgtgtggccccgttcctaacagaccatggaccgctaggggtccatggcctggggtttggggacccctgccata

SEQ ID NO: 171090 - DNA, 248 bp, Homo sapiens
aagacatgtcactgagctgatgagtgatgtgacaaaacttataacacttaggatcaatctcttaagctcctctaccactgcatgtacgttcctcaccctccaaatcaccaagtttctctaaaacacagttctgacactcttttccaagttgtcactgaccccttcatatacttcccaagccagtgaacctgacataagtgactcattaacatctgcattgtagccaacaagctcaattcaatctataa

SEQ ID NO: 171091 - DNA, 505 bp, Homo sapiens
agaaaaaaaaattgagagacaatatgccaatagacaatggtcagataacgaatgacaataaactgactgcagcctctgcagtaaccgggcagtcggctgcttgggaaggacgtggtcaggactgcttgctcctctattttttgtaccaccctccccatgtcagaaccaacccaagaaagcgctccccaaaccagtcacagaaaacatcctgcttcttgttagctcacctccagtttccaacagcctgcggtcagaaccacctggagccttccccgttttccaccccctgcgtccttgcgcctacccacaccggggatgttgctgactcccttgctgtagcaagctctgaatactgtttctcatttgggtggttttccttcatttctacgtttgagctactgtggctgagaacagaaagcatctgcaaaaaatgttttatgcttaatgaaaggagtagaataaaaatttcatatatgacatcagttaaactctgaaaaaaaataca

SEQ ID NO: 171092 - DNA, 755 bp, Homo sapiens
gtgttatttttattttaagtgtttattctgtattttattaagattttataattttatataataaaattcctataactaaaatgtaatttttataaatttatataaataaacattatccagttcaacatacagaatatttttcttaccacgggaagttgccttgtgccctaaaaagtcaatccactcttccacagaggaagctgccgttctaattattgtcatagataagctttgtctggtctttgaatgcttccatgtgatattaaataggatgtaatctttgtatgtgggttcactcaacatagtgttttcacattctggttatagctgtcttgttttttatttctgtgccatattctattgcatgacttgccaaaaacacagatggttatttaggttgtttcaaatatggggctattacaataaagcttctgtgaatgtggctatgtatatattcattcatattgggttatctaagactggaaatgttgaatcatgagacagacaatatttaattttttaaaaaccaacaaagagatttccagtgtggttgcactattttatactctcatcacaaatgtaaatttccaatttgacacaatttttacccaaatttggtgttgtcacaattttttcatgtaattttagccattcaagtggatgtagagtaatatttcattgtgctttcaattttagttccttgataacttttgaagtcatatgattattgaccattctgatatcttctctgtaaa

SEQ ID NO: 171093 - DNA, 314 bp, Homo sapiens
cagtaaaagcatggaaaaattcggagaaattagggctcaacctccccgcaggtatcacacagtttttctcttctcaggtctgatcactgctaggggttcttcatgagcatgtgattatgaggcagagagttgcttcttctcccaggctcctagaaacatgtgccccttctgcttggcaatctgcttggagtaagacataaacaaacaaacaaacagcaacaacaaaccccatgggatgatagataatcagtttttaaacatttttcagttataatttttaatatttattgtgttggggtatctgttcccactca

SEQ ID NO: 171094 - DNA, 248 bp, Homo sapiens
caattcaaagatagcctgatgcagtttatgctcccattcaactgtgaccttctttgggggtagttttatggttaggaactagcagtattcccagaggtgggatacgcatgctccagaattcgagcaagctgactgggcgccgtgcttcttgcttgattccaaggacaggcaatggcagcaggttcctgctccctttctgcctgcagcctttccagcctatttcctcaaagccctgacctcttgtaact

SEQ ID NO: 171095 - DNA, 302 bp, Homo sapiens
ctgtgctcctgggttcaagcgattctcctgcctcagcctcccaagtagctgggattacaggtgtgtaccaccacacctagctaatttttatatttttagtagaaaaggggttttgccatgttggccctgctggcctcgaactcctgacctcaagtgatctgcctgccccagcctcccaaagtgctgggattacaggcttgagccaccgtgcccagccaaaaatttttgttaaaacatcaccttgtcttcagaagaaacttttctgcgaaatcaggttaccattagtgtagggttatatttgt

SEQ ID NO: 171096 - DNA, 121 bp, Homo sapiens
gcggaggcgctggaggccccgggcctgtgactacaaagagggagtcgggggccgggccggaccggagcgcggcggcggcggcggcggcggccgaggccgaggccaggccccctcccctcag

SEQ ID NO: 171097 - DNA, 515 bp, Homo sapiens
tgctgtcacgatccgggtggccccagttagcgtcccatctttactgcttgttaaaattggaaattatgaaactttcttttttttgagacagagtcttgctctgttgcccaggctggagtgccatggcacaatcatgggtcactgcagtctcgaactcctaggctcaagggatcctcctgccgtagcttccagagtagctggggccacaggaatgcaccaccaccatgcccagctaagttttttcttttttgtagagatgtagtctcgctatgttgcccaggctggtctcaaactcctgaaccaaagtgatcctcctgcctcagcctctcaaattgctgggatgataggtgtgagccatcacgcttggccaaaaaattgtgacacttttgaatactccctccccagcccccagctctgccaggcctctttggttatgtgacccacatgttcccatttttgctcaagccagcttgaggagggtttctgtcacttgtaatcaaatcaaagcccccact

SEQ ID NO: 171098 - DNA, 325 bp, Homo sapiens
gtttagagcttggggtacggagtctcctgagcatggaagaggtaagacccatgaaagcctggacatgttatggcctcttctccaaccggacacagcaaggaatgtcagcagggccatgcctcagtttcccccttctactccatcctctgcatcctcctcatctcccctcctggcggccccttcatccaccttctccctgccatgtacctgtgttcttcttggagcacaaagttaccctgttcatggcctggctgagaaggcagtcccaggtttgaggtcccattatcctgcctgtgtgagataaggccactcattcattcctcat

SEQ ID NO: 171099 - DNA, 424 bp, Homo sapiens
agctgaactgaactgaggatgagctggggatgagccagggatgagctgaggatgagccgaggatgagccaaggatgaactgagctgagggtggcacgaggggacttctcaggctctgcctgctgcaggtttatataaagaatgtcacacagagtgtcattctcagaggagaaaaacaagacaaaacagaaaaagtcatttttgtgggagaatctatgacaggatgctcaatgttcactgcatagtgagaaaagcgggaccggaagccatgcaggcagggcaaccccagtgctgggagggaaccctgcgtggggactatggccatctcaagtcgctccttcactgcctgagtttctaatggtgcactgaaaccccagctgcacagccgcagatctgatgacgggcagtgcagcttccgcatccac

SEQ ID NO: 171100 - DNA, 417 bp, Homo sapiens
tggggatgagttgaggatgagctggggatgagttgaggatgcgctggggatgagctggggatgaggatttaaggaggggtgaagaccggggcccattagtgtactcttctctgtcaccatggccgcaattattacttatgtctctcctctgtgcaaaatgtgttcagtcccatcccaggatcccccaaagtctcatccaatcatggcatcgggcttgaagtcccagatcttacgccacattaagtctatatgggccttttcttgatccagaaacctaggatctagaaagatgagtcttcttcccttcccacactcagcatgcaatggtaaaaagtaagatgaggtaaccaaaattaatgctctcatttcaaaaacgaggaagcaaggcaggcacagtgcagtcactaatctataaca

SEQ ID NO: 171101 - DNA, 1047 bp, Homo sapiens
tcctgagagcacttctctatggaagctgattaaactttttggggtgagattgggagaggcaaatcaggtgaaggagaagtagaactgagtgtgagtttttattcagaaagctgaaccatctgataatggcagagtttagtgtattcagaaaggattgaaaaactaaagtggacctataggaaaagtaaataagtgatctttgtatttcattgcaatgtcattacaggcatacaccattttattgcgtttcacaggtattgctgttttctggtatagatggaaggtttgtgacaaccatgcattgagcaagtctgtttatccaacggcacgtgcttacttcaagtctctggtgtcacattttggcatttctcacaatatgtcagacgctttcattatcttgatatctgttaaagtgatctgtgatcagggatctttgatgttaatgttgtagttgttttggggtgtcacaaactgtgccacataagatggcaaactaaattgataaaagttgtgtgtgttttgactgttctatggcccagccactccctcccttatctctccctctcctcccgcctccctattccctgagacacaacaatattgaaattaggccaattaagaaccctacagttacctcagcaacatctagaaatgattaaatttagtgagggagacattgaaagccaagatagcctgaaagctacctgaaaggccccggtgtgtgatgttccccaccctgtgtccaagtgttcacattgttcaattcccacctacgagtgagaacatgtggtgtttggttttctgtccttgcaatagtttgctcagaatgatagtttccagcttcatccatgtccctacaaaggacgtgaactcatccttttttatggctgcatagtattccatggtgtatatgtgccacattttcttaatccagtctatcattgatggacatttgggttggttccaagtctttgctattgtgaatagtgctgcaataaacatacatgtgcatgtgtctttatagtagcatgatttataatcctcttg

SEQ ID NO: 171102 - DNA, 246 bp, Homo sapiens
tagtaaatccaagatccagctaagtaaaagctgaaaccagttgggattaaagaagaaggaatgaatttgtaactgggtagtacgaaatttcttaaaatcagtattttttaagtgcgtgaatattggaatcattagaatgcttaaaaacagtaatagtttttatagcaactctgttgctataaaattcattgaatttctcatatcagttgccctgaaaaatcctaaatatcactgttgttcacctag

SEQ ID NO: 171103 - DNA, 545 bp, Homo sapiens
gtggttttaatgaagtatttaaacatataaagaagtaattaaacagggtacttgttactattttaaatattttttaaagccttaagtctttgttgcacttacaattctatcttgtattagtcttttatctagcaactttatttctagtaaccttaattcatactttgtagcatgtctgttgggatttttttatacggacagttactgttcataaataataccagttttctatcttgccctttagtcctgttacctgttatttcttactcatattttactatgctggctatatgtcagagtctttcaagagtctgggatgttaccatctgtgcaagctaacaagctagcctggatactgtttcatggatgctggcaaaagacatgagacaaagactttattactcatggtacagcaagcagcataagcgtgatgttggcactggttctgtacagccccctaagacctttggggattgacagggaggggcccaggtggatgctgcccttgcactgagtttggcaaatcaaccacatatataaagagc

SEQ ID NO: 171104 - DNA, 608 bp, Homo sapiens
catgtattagttaaatgcacagcaggcttaaaattcctgttttctaataagcagtaatggatagataatgataggtaatgtgtttcacattttaaaaattgattgctgattatattcctggcactctttttaaatacttcatatcgactaattatttaatctttaaaataatcctcttggataggctccattattatcccattttacacatgataaaaatgaggccaagaggtttaccttcctatccaaagacctaactaggatgaatataaaaagctggggttcaaactcaagcagtctggcttcagacctataagcacacactatacaatactaccttcccaaggttaaactgagtcttaaagcagttacttttgagtttaaattcagattctcttctgaatccaacctataagactaagacctcatgatacaattcccagcacaagacatgaaaatatttgtcctataagtcaaccactatacacttcatgaactgcttaataagcacctgatatctctaattatcacaaatgaaatgtcctaaggcctaaaaaaacaagaaatgcatactaagaatttcccagaccaaatttaataagaacaaa

SEQ ID NO: 171105 - DNA, 396 bp, Homo sapiens
tttgggaggtcgaggcgggtggatcgtttgagctcaggagttcaaggctagcctgggaaatgtggcaaaactccatctctacaaaaaaaaaaattaatacaaaaaattagccaggtgtggtggtgcacacctgtagtcccaggtgctcggtggggaggctgaggtgggaagatcacctgagccagggaggtcaaggctgcagtgaaccctgattgtgtcactgatcgaacttcagcttgggtgaaagagccagactctgtctcaaaaaacaaaaaagaatgtatgtccaaaacaccacttacaaaaacacacacaaataaaggaatacatatcagtcagaatagttatccttatctatgagagggagggggaacaagagtgagtatatgaatggaa

SEQ ID NO: 171106 - DNA, 367 bp, Homo sapiens
accccctatcgcccaacacagatatatcgacaaatggaacagaacagaggcctttttaataactccacacatctacaaccggttcacctttgacaaacaggacaaaaacaggcaatggggaacggattccctatttaataaatggtgttgaagataacatcactatgttatccccaacaccacgagaatgttatgatggcataattaaatgaatgtaataatagctcataaaatagcagctcatttattaagtacttgctttgttgttctaagtgctttacatgttttgactttccatataatatatgccgctctcgtacttttggcctcactgctgtgatctgaactgagaaggagtggactgtca

SEQ ID NO: 171107 - DNA, 305 bp, Homo sapiens
cttccctcctcccagtaaaaaaaatccctgagttgtttcggaaagtcccatgctgaggctgggcagtgtggctaggtatcaaagtgctggagcctttccttgtatccatcaagctgaattcacaaagggagggagagaagaagggaggagaggctgggggctgcttctgattagcctgtcctctgccaaagtgagatgtcctctctctgtgggcaattaaatggttctcatgaatccaccatctgggctcagcaatgtgtgctgtggctgctttctctctccacccaaccccaccccacctctgg

SEQ ID NO: 171108 - DNA, 428 bp, Homo sapiens
ggctgagggcactcctattaaccacatccagatccaggaaaaaaaaacatgggcacaaaatgagggcttccaaataaatgttcaaaagaaagtagacaaaggcaagaggctgagaatctgtgcttgtgggcgaagccaggaaataaggataaaccacagaaagaaaaaccatcatgacaatgtgcctttcacaaccgtctttctcactactgctgcccctgggggcacatgatctcagacacacccaggtgcactggaccaactctaaagacaagacagagataacagggggagcagaatctccagacacttctgcttcatgacctggcataaccttcctggacttgggcattctctccggggacaagttcccaggcctatcagagcagctggttgcttgtttgttcacctgtcagcaaatcgagcta

SEQ ID NO: 171109 - DNA, 537 bp, Homo sapiens
gtctctcccatcgcagtgccccttgccttctcctgccctagtaactgcctgcggggatccaggagcccccaggccgcgccgaactgcagtggataggggggaggggggcggtaaggatgagggctacggggaggcagaaatgggttgggggaaggggtggtggaagggaaaagaaaaaaccggaggcatgcaagcggctccccagccagctgttccagctgctgcttcctccggcgcgggccaggcggtgcaatattcccccccgctccatctttctcaccactacctgtccccccaacccaccacacgcactcatccctcccacccacacccctagtagcggatctccggcctgtaagggggtagtagggaggagctggggggagggggaggcctgcgagtttctaaccttgttcttataaacaaacccacatgtgcagctgccgctgctgcaactcaccccacaatcccggatataagtcctgcccctttaagaggaaaaaaaagattcccccgcctgcctcccaccccacccat

SEQ ID NO: 171110 - DNA, 420 bp, Homo sapiens
ggggacctagagtgagaactggtggtcacgtcctacgcctaggagggcccctgggtgttcacccacccccccggggggccccatcctgggccagggtccgcttcctcgagggaaggggcgaattcctggaaggtctccttccgggcgcagttgcaatggattgccttgggggtgctgaaccctgctgggggtacagagacgtttccgaaactcagcggctcggtcgcccccaaaggccaggcggaacacacgcccacaccgcggctcccttcccgaagtaagaccgccgggccacggccgcccccaggaagccccgcgccccgcaccccacacccggggacacaaacaggcgccgggtagccgcgagggccggcgcggcgcctttaagaggcggcgggcggcgctgccccctggcggccg

SEQ ID NO: 171111 - DNA, 500 bp, Homo sapiens
gcagttatcatttcagagcagctgatactgtgttaagagatccatgtgactgccagttggagactcatgtgacacatacttaagatgccatagttagagaaacagtggtttcgaaaaagagctccacatcaagccaactggcagattatctgtgtttgatcaaaattgagctgcttctacaaggggaactatttagcatgtgacaggatgtttatatatgacgattaatgtgagtgtactgaaaaacatggcagtgattagcaagagggtaattagttgtttataaatttgtatttatctctcatgagccccaggggacacccctttcctggactgagatttagagcagctcctgctggcataccatggcttcggtggatgctgagttattttctcaacatactcttctcttcccttttattaatatgtctctacatactatttaccagctttttgcccatgtcatacttcctactctgggtacaaattattttggcatc

SEQ ID NO: 171112 - DNA, 193 bp, Homo sapiens
aggctgagcaatacactttttgatattaatttttaatacagcttcttgggaagtcagagcttctatttaatgaagaattgacgattcgtcagttcagctcccgcttcggagctggccttggcgttcgcagtctcatgtcagatttttgacaaggtatttgctgcttgtaaatgtgttatctttgtaattttgg

SEQ ID NO: 171113 - DNA, 477 bp, Homo sapiens
attttctacgctttttttttcttttgacaaaaagaggaactaaataatttagtatatacattagaatatttccccttccctcatactgttttccatttattcattcaactgacgaatatttattgtgcaccttctacatacaggcactgtcaggtgcagagagaaaaatacacagatacacagattactgtaacaattacaacaaactgtagggcctcattgtaactgtgttccccatcccaatccacaaaaccacctggcacttagtcccagaaggactaagagtcagattcagaagacagtctccttctgttgttgttgttgtttgtttgtttgttttttgagacggagtctcactgtcagcagtctggagtgcagtggtgcaatctcagctcactgcaacctctgcctcctgggttcaagcgattctcctgcctcagcctcctgagtagctgggactacaggcgtgcaccacca

SEQ ID NO: 171114 - DNA, 377 bp, Homo sapiens
gtctggcagactctaggccatgcacaattcaccctgcactgatagaccctgggccactctgatcctcctggctcttaggtctaggtttgtgtattaaaaacaaacaaacgcaaccaaacaaaacccaaccaactcacaggtaattctgatctgcatccagaacaacatctctgtagatcatcagtttcttttttttaaagaaatgtacatatccatatatctgtaaggaccaattaattgccaacactctgccattagagatacaaagacaatccccatgcatcaatataggacacagtttcatctttgtggcacttttagaccaatgtgggacagattaatcttagggtcttacaaaaggctgtaagagctgaggg

SEQ ID NO: 171115 - DNA, 171 bp, Homo sapiens
ataagcagtatgtcagtcatatttcccatccacaaaatatggtctgtttttatacccatgtatctatctatttatatactcacaagatgaatgtatgtgtttttcttcacattttcctgaagatatcaaagcccataaaacttaaaaaataaaaactacaaatgaaaatta

SEQ ID NO: 171116 - DNA, 439 bp, Homo sapiens
aaggcgggcggatcacctgaagtcaggagttcgagaccagcctcaacatggagaaaccccgtctctactaaaaatacataattagccaagcatggtggtacatgcctgtaatcccagctactcgggaggctgaggcaggagaattgcttgaacctgggaggcagaggttgcggtgagccgagatcgcgccattgcactccagcctgggcaacaagagcgaaactccatctcaaaaaaaaaaaaaaagaaaaaagaaaaagaaaatgacattcataatctcaccgccaagaaatagctactgttaatattttggcatccctcctatatatcccttttttctgtatatgttttacccgaacataggattatataatattttaatactttgagtattaaatatttaattattgaaggtattagctgggcgcagtggctcacg

SEQ ID NO: 171117 - DNA, 628 bp, Homo sapiens
gaaaagcccacagaaataaaatcagatagtattattatttaattgcttattaaggttatttataattaatgctatatttggacctaaaaacatgaaaaataaccaccctaaaataaaaatatatttcttacatttataggataatcactgattagaacttaatgcttccactcacttacacatcctaatgtataggcagagacttgaaatttgaaaaacatttccatgttgattattctatagatgtgaactttttagtgcaaatgttaattttgctatagatgtgaatttttatactggctaaaagtcaaaacatgctagatagaaacttaaaaaaaaatcaatgttttagtacagaaaaaggagagtatcaatggggtctcagctttctagtgcatacagtactatgaatgactacagcctctatcatttcaagttttattcttgaaacttacattcatgcttaatacttccaatagtctcaatggtctcagtaactattaccaagatcattgattcaagaaatacttattaagaacttactattatgtgtttatatttttaaacattttacagctataccttttgctattttatagacaaatataaaaaattatgttaatttagg

SEQ ID NO: 171118 - DNA, 1393 bp, Homo sapiens
tgtgaaaccagcagatattagtcttactcatcagtttctgcttactggaatgactgtagcatctcaatgtatccagtctactatcctaagggatcttctatttaggatagcccatagctacaggatgaacagtgagaaaatgttggccactgagatcctcctctgccctaaacttgcccatcacccttcccttaaaaaattataatttcaggccagccatggtggctcatacctgtactcctacccctttgggaggtcaaggcaagaggatcgcttgagcccaggagttcaagaccagcttgggcaacgtagcaagaccctgtctctacaaaaacataaaaaaaaattagccaggtgtggtggcacaggcctgtagtcctagccactcaggaggctgaggtgggaggattgcttgtgcctgggaggtcaaggctgcactgagtcatgattgcaccactatgcttcagcctgggtgacagagtgagaccctatctcaaaaaaaaacaaaccccaaaaaaccagttacgatttcccccattttacaaaataagaaacagaagctcagagcaattaaataatttgtctcaggttatacagatagtaaatggaagacctgagattcaaacccagatttgtctgactccaaaagtcaaggccataatgctttacactattcctgttgttagaaagagaagttgtttcaattttcttttttgctggctccaattctcagccttgagtttcaaattttaaaactgtataaacgttgttgtggtgaatacccttacagagaaacctctgtatctatgactattttacaacttttttttttttacaacttttacaactattttacaatcgtcaaactgtatttttaccagcatatgtatgggtgtataagagagtgaaataaagatagagaacacctctgaaaatttgaaaccctgggtgacctttcatttattgaggaaagtaaaatctggaaaaggcaggaacatattaatactttcaagatactttgtacagatctgaagtaatttattagtttaagaacacaaaaatgtatcatgtaaaactgagtttgcttataatatgataaataaaatttaattacatttaagtaaatgtgatttaactccaaaatttaattataaccaattttataaatttatttaaaatgcatttagttttgatacttgtaaaactaaaagtttaaaaaatatgaaatctcatagttttgtggctttataagaagcagtttaaaaagtaaaactaggccgggtgcggtggctcatgcctgtaatccctgcacttagggaggccaaggcgggtggatcacgaggtcaggagatcgagaccatcctggctaacatggtgaaaccccgcctctact

SEQ ID NO: 171119 - DNA, 433 bp, Homo sapiens
atggggttttgccatgctagccaagctgatctcaaactcctgacctcaggtggtccgcctgccttggcctcccaaagtgctgggattacaggcgtgagccactgcactggcctaaaggtttttttcgttttgtttccaactgggccattattatttccaacctataagatggaagtaattgtttctgccactcgtgcctcctgtaaggattaagtaagataaagtctgtggagaggcctctgttgacaccagctctagctcagcactgcttctttattcccccagggtaattacctaaacacaagcctttcattttatactaaggaggctggtgaacctcttcttaatctctgggagatgatatcgttggatgtccattggaggcagctgaaagtattagatcagaatcagaactgccaggtcccttcccacg

SEQ ID NO: 171120 - DNA, 213 bp, Homo sapiens
cctctgagtgtgagtgtgcaggggcacattcccaccctggtgtgtaagggccagcatggtcctcatttagggtggggctagactactgtattgatggacaagagggtattgctgtaaggggcgtgccgcccaaggtacaagtacacggggtgcatgtttatgaggcttgagaggtatcattccagagatgcaggggactaggaagccattttc

SEQ ID NO: 171121 - DNA, 487 bp, Homo sapiens
cctctttaattgaagaaaagcaaagagtgacactaatcaaagtaaaagaagggaagtactcatagctgaaaatggaactataaattgtttgctttttagagcaacatcagttctttgaaacccatacagttccttataatattccaaaacaaactgccatatggaaacctgtttagaaaggaataatagcactctaccctcctccccagccactaaattgaaacatacgtgaaaatttaatgtagttttttaatcaagctcagaaaattttttttttttttgagacggagcctcgctctgtcgcccaggctggagtgcagtggcgcgatctcagctcactgcaagctccgcctcccggtttcatgccattctcttgcctcagcctcccgagtagctgggactacagcttggctagtttttttgtatttttggtaaagacagggttccaccgtgttagccaggatggtctcaatctctcctgacctcg

SEQ ID NO: 171122 - DNA, 659 bp, Homo sapiens
tgctgcttgtttggagttggtaacagagttctcaccgaagcttcgtcaggtcatgctgaatgagatgttgcttttggatattcatacacacgaagctgggacagggcaggcaggagagagaccgccatccgaccttataagtagagtacgaggctatctggaaatgaggcttcctgatattcctcttcgtcaagttatagctgaggaatgtgttgcctttatgttaaactggagagaaaatgaataccttacactccaagttcctgcatttttgcttcagagtaatccatatgtaaagctgggacagcttttagcagctacatgcaaagaacttccaggccctaaagaaagcagacggactgccaaagaccttggggaagtggttgtccaaatctgtagtgtgtccagtcagcacaaacgaggaaatgatggcagagttagtttaataaaacagagggaatctacgttaggtatcatgtatcggagtgaactgctttcttttatcaaaaaattacgagaaccactcgttttgactattattttatcactcttggtgaaacttcacaaggtgcgggaggacattgtgaatgatattacagctgaacacatttctatttggccatctccattcccaactccagtctgtgactttgaagctg

SEQ ID NO: 171123 - DNA, 640 bp, Homo sapiens
tacataaagttttgttgaacttaataagtgcacatttaaacatatacatacatttaaaaatttatttttttaatggcaaagcctgttgatgcttaaattgtaactgatgtttgcctaaaagtgaggacagttcactgggagctgagggagaggagcctactcagtgaactcctacccaacctccaggacccatctcaaattgtccctattctgtaaagccttctcccaccgttctggttgtaacctaatgttcatattgcggggcatctcttcacaacaatcaatcttctctaaaccaggagctaatcctagaggaatgcaggaacttgttgcacgaagcattggttagtatgtgcttattaaacactcaatggttgcctaagacagacaggtacacacactcacaccctcacagtccagcagaagacactaatgcccacccccaaacaggatgtcagttcttctcaggcaacaggatccaggcacttggcttattatcaaaagagatcactttcaacatcccagcccaagcctcctcctttaacacaaatcacagccagaagagatcagagcggcccagagcaaactcagtttccagtgtccaccccaggaggctccccagtccttttgaggtcacctc

SEQ ID NO: 171124 - DNA, 621 bp, Homo sapiens
tagctgggactccaggtgcacaccaccatgcctggccaatttttgtatttttcgtagagatagagtttcgccatgttgcccaggctggtcccaaattcctgggctcaagagatcctcccgcctcataatccccgtgttgggattacggtcgtgagccactgtgtctggcctcatctggcttttttatctttatagtgatcttcacagtgaggcagaaagaacaggggtgtcgtcctatattttaccaaaagatgctgccattctgtaaatatactatagccatacagactccaaaatgaatgttgactgtcagcaataatgagggcagagatttagcagcaggtaccaaaggagatatgagcttgttgcactagcgagcagggctgtgctctcaagctgaggaaacactggtcactggaccacaagcctggtgagcccttatccctggaaatggttttctctcagacacatcctttagggcacttccgtatgcagcagatttagtgatcatggaaaaggtcaaggaaaaggaagaggagggaatggaggagaggcagattagagcagcctcttgttgacctgtgtgttcttccctggtagactgtcagccctgtgagggca

SEQ ID NO: 171125 - DNA, 661 bp, Homo sapiens
atgtttccctctaacatgagtatgtgctgcttactggaagcacatgagtgaatttctttgtttcttcacccaaagagccatagtaacaactttttctctatccactagggagggtaacagctgtgccacatggctctgtgtccctttccctgggtgctcagttttgtggtcagtacttgaccgcaaataaatgaacctcttacccaaggttgagatggagaatgaggagggataaagagctggcaaaatattgtgtagaaacaggaattgatgagatcagaatagattttgatctttcacagagagtaaaacatttcatcctctgtttctaaggtggtgtccttagggttgtgatgcagaattcagaagagtgtttgatggaccatgtttgtgttgggcttgatttcatatttagtgagataaatggctacataaaaacattgacttaaaactgacgtgagcagatggtagagaatattctattatttcaaattttaaaatagtgaaacagattaataaggtctaggttttcttccctgagaattttaacaaacaagtatcagtgacaaacagaatgttagttgtagtgaaagaggtatacgactgtcctatctaagaaacagaggatgtctcagctgttttggcctatatcaatgaaaac

SEQ ID NO: 171126 - DNA, 749 bp, Homo sapiens
gacagaacccaaaggaaaagagccagggtgcggattggcagaagctattctggcccatgtgcagagcatcaagaatgtgtgctgcaaaagagtctctctctgtcacccaggctggagtgcagtggcgccatctcggctcactgcaagctccgcctcccgggttcatgccattctcctgcctcagcctcccgagtagctgggactacaggcgtccgccaccacgcccagggagaagagaaaaaagtgcatgaagtaaagaaaaagcagggaatgagagaaaaaaatggaggagtgagtgccacagcccagtcagtaagtgctacatggagtctcactctgtcgccaggctggagtgcagtcagctcactgcaacctccacctcccgggttcaagagattctcctgcctcagactcctgagtagctgggactacagatatttagaaattattacaggaactttttctggacagacaagaacctaagtctgaacatctaaaaggctcacaaagaatcaagcaaatttattgaaagagaccaatacttattagacctatcttcgtgaactgaagatcgagaaaaaaattccaagaggcatttggacagaaaagcatgttgactccacaggaacaaaaatcaaactgcattcaaaattctcctctgcaatgtctaatagcaggagaaataaaatagtaccaacagagcttcaagggaaaaagactgcattctaagaatcctatatttaggaagt

SEQ ID NO: 171127 - DNA, 695 bp, Homo sapiens
tcgtgccgtccatatgtggatcctcataaatcaggacatgaaatctgggaagaattttcgatgagcttcactccagcagtgaaagaagtggtggaatttgcaaagcgtattcctgggttcagagatctctctcagcatgaccaggtcaaccttttaaaggctgggacttttgaggttttaatggtacggttcgcatcattatttgatgcaaaggaacgtactgtcacctttttaagtggaaagaaatatagtgtggatgatttacactcaatgggagcaggggatctgctaaactctatgtttgaatttagtgagaagctaaatgccctccaacttagtgatgaagagatgagtttgtttacagctgttgtcctggtatctgcagggaatctctgcatatagctacaaagtcacccagggaaggacaagctcatggagggctctttcctgcccattcgcctcatttaagtgcagccatccttcaggcccttggttaagcttccaaggaccctatgggtcaaggtgaagccatcagtgtctacagcttcagctattgcccgtgtgcagatggtgcttaatctctcttgtgccttccagacctgcattccagccacctaccaaacccctttctgtggatgccaagatctaatggagatacactatagaaggaagacctggccctgactctgaaattt

SEQ ID NO: 171128 - DNA, 671 bp, Homo sapiens
tctcctgcttccctcatctgttctcttccaaagaagctggtccttagcctgtattgcggagcaagctttcggcgaccagctggaccctgggcacccttcttcgaacaatggcttttaattctcagactagaacgtttaggattacaaaagaaactggttcttttcacattcttattcttgtgatgtagcattccgcatatatatatatatatatatatatatatatatatgtatccaactatcctaaaagacactacccttcatcattccatgccattagacatgtataggaccatgcatggtgatctcctccagacaaaagtaaatgctggtgcagaacaggatttgagtttgatgtcttgcatacaatgtgatcccactgtatgactacacaaatgttggcaaaagtgagttcagaggaaatggtaggcaagtacttcccagttttggccagaagatggagaaaaaagaattctcaaaaaatgttaaaggtgtctacagagaaatagacaagtgatgcacgacagatacatgtgtcagtctggtccctgcagttgtatttgtaataatacacattggagcaatttcatggccatcggttagagaatgtttgaggaatgatccattcatatcaagaaggacatttcaaagatcaaaacctgatggaaatg

SEQ ID NO: 171129 - DNA, 372 bp, Homo sapiens
tgagacggagtcttgctctgttgtccaagctggagtgcagtggcaccatctcggcttactgcaagctctgcctccattcttctgccccagcctcctgagtagctgagactacaggcgcctaccaccacatccggctaatgttttgtatttttagtagagatggggtttcaccatgttagccaggatggtctcgatctcctgacttcaagatctgcccgccttggcctcccaaagtgctgggattacaggtgtgacccaccgcacccagccagtatagttttctttaatctggaaggcttcctcagcctttcttgaattttccagagactgacatttaggcagagtacaggacagctattctgtagactgtct

SEQ ID NO: 171130 - DNA, 911 bp, Homo sapiens
tggtttgggcaggattttgagctaactggtctcaacctacaataaacataggggccaaaacacagaggccatctttggctcatttatgtaaccattcatcccttgaagaacatctgggttgtttccagtgggcaattataaacagagcctctatcaacattcctgtaccagttttagaatgaacataaatttatatttctctaagtactcaggagtagaattgacgttctgtcatatggatagccactgagcaagcctgtaaggctattttggtctgcccattctgtttcttcaccaatgagaaaactgggacctggggacagtttgcagaagccatccaatgggcacctgtttctcacagcacagaaattcctgcagccctccctccgtgttttgtttctcccttaatgtgagaggagaggacagaaccagatgcaggcagttccaacagtattgaatggctctaaggtgtggatccaagaccggtgacacaggtccgggaaattccatccgggacactgaccaataagagactgtgcatgatggctaaggtcagaagctctgagcgacgaatggtcaacacttcattttggcacgacaaccaggattatttcgcaacctcgtgccggccaggttctgcatttgaacaggtgcctgatgtgcggaatgcagtgctggagcactctgtgggttatactgggaaaaccttcctccgggtgttcaccatcaaggggacctcttccgtggtctggtttaggccggactggctggaatgaaggtggtcaccgagggagcgacgagaaattttccccggcatttgacagtttttccgaaggccactggtgtggttaacagtttgtggcacaacatggagctctcatttccaaaggcgaaaatattgtgagacactg

SEQ ID NO: 171131 - DNA, 542 bp, Homo sapiens
acacactcacacatgcacttgcacacaaacacacacatggagagagagagacagagacagaatgaaatactattcagccataaaatgaagaaaatcctgtcatttgttacaacatgtatgaacctgaaggatatatgttaaatgaaataagccagggacaggaagacaaatagcatgtgatgtcagtcatgtggaatctaaaaaagttgatctcatagaagtggagagtgaacttgtggtttccagggtctggggagatcaggtgtcagggttaaagagatgttagtcaaaagatagaaagaataagcttgagagatttattgtacaacatggtgactgtagttaataacattatgtactcttgaaaaatgctaaaaagagtggatataaagtgttctcagcacaaagataataatgatgtgaggtaatgcacatattaattagctagacttagtcattccactatgcatagatacttcaaagcaccatgttgtacatgataaatacagtacatacaattttacatgtcaattaaaaaaata

SEQ ID NO: 171132 - DNA, 420 bp, Homo sapiens
tgatttattgcttccaggacaacatggaggaatccactcccttttgcttaccagctccccacgaaacagacctcatggtgttctctacctccctattcccacccgtaatgctgccctggtcatcctggggtatgtccttgtatgttacctgtgcatgcttctctatggtacctacttggaagtgggatcgctggatcccgggagaaatgcacagtgaatgtcacaaaattctgccccattatctaaggtgggtcttgaagctctagcagcatgtcaccaggcagagaagggcggagaagggaccaaccagttcaaaggactgagagtccacagcatgtccagggttcagtgaattataggtgacccacccgaggggtggaacctttcagggaacagccgtgtaataaacacttgactgca

SEQ ID NO: 171133 - DNA, 372 bp, Homo sapiens
gtttctctggagaactgtgactaataaagggtctaataagagggcatggcacctagcaagagcagacattgataaatacaggaagaaagacacatagttcagagaatgccagaacaaagatgaagaaagaaaacaggaaaaaaagtcatagactgtactctatacaaagttttcagggaaagatgcagtattaatcatgtttctatataccaaattagcaaaagtggctttgtttatatgtgtggcaagataatagctcttattagcagactaaaaaaaaaaacaatttgaatttttatttaaaatcctgttatctgttaaaatgtatttaaataatgtcccagaaagcttctatttagcactaaaagcatg

SEQ ID NO: 171134 - DNA, 210 bp, Homo sapiens
ataacagtctaaagatttaccttcttacttctgtggatcgcttctgttggctgcctgcaccagtgagttaccttttttcttggtttattgggatattactatcagtgtgggtcaagttcacagatcaaaagtgctgtcattgggaaagctattaaaaatgcatagaaaagcttatatgatatgagactgggttaattagaagtgtttatg

SEQ ID NO: 171135 - DNA, 608 bp, Homo sapiens
tgagtgggtgaatacctggacggtgctcttctttcataagggtgacatacttcaactacagagcttgcatagggaattctttcttccagcaagattaatggttttgtgctgaggtcgccacagattctacctgatttatatttgccagtctgaaggccatgattagggaaatttttttgtgtaacagattgacgtcaatgaatctttcatatgttatacgaagaaattaagacatatagagaaaatttcatgttcacagggcagctgtatatgagtgattctggtcagaaccctcaaggctattctgtgtactctgtgtacaccggaagggctctgaagttttctggttgggctgaggagtagatgtctgtcccagtgccacgggattttcttttctggaggaagatagtacatcataaatgttgtctttttcttgtactgctggtgtgagtgcttctttattgatttgacatttgtattattgactctgaaaacattgagtggcccgagacctcacttcactgatttctgtgtcgaaaaacatccagagatcttcagatttgagctctcttggggtgctcctctgtgctgtcactgtacatgaaaaa

SEQ ID NO: 171136 - DNA, 445 bp, Homo sapiens
aaacaataagtacctgtaataataacattgaaaagattataaatgtttcctgatgtcacaaaaaaattcacataatgttttgattttaaagaacaaatgagtaccatgttttacatctatggactagttgcagattacttgtgtaatttctatacgttacaactataccaatataggtgtccttaatggctatgctaacagagagtaattacattatttttgaataatatttgtccctcaccaggggatgaggccaacttttcagtataacagataagtagattctaaagaccaggtgaaacttcaggtaaataccacaattcgttgaaaaaggtagaagtgagaattacataaaataattgcaaagcatgtaagggagaaattcattgttaaaaaatatattaatcagctcattcaaacctattttaaacaacctactatatta

SEQ ID NO: 171137 - DNA, 184 bp, Homo sapiens
agtgcctgcttttggcaagagagaccatcaagagactgaatgaccagtcactgcatgttttctacctagaatgataggaaactggtcccttgatgtactgtcttcaggagggacattgggctggctgatctgagctggaaattgatcttttatctttctgaactggcgcaagtgaagagatgac

SEQ ID NO: 171138 - DNA, 1201 bp, Homo sapiens
  misc_feature (100)..(100): n is a, c, g, or t
atggacaacgcctcgttctcggagccctggcccgccaacgcatcgggcccggacccggcgctgagctgctccaacgcgtcgactctggcgccgctgccgngccgctggcggtggctgtaccagttgtctacgcggtgatctgcgccgtgggtctggcgggcaactccgccgtgctgtacgtgttgctgcgggcgccccgcatgaagaccgtcaccaacctgttcatcctcaacctggccatcgccgacgagctcttcacgctggtgctgcccatcaacatcgccgacttcctgctgcggcagtggccttcgggagctcatgtgcaagctcatcgtggctatcgaccagtacaacaccttctccagcctctacttcctcaccgtcatgagcgccgaccgctacctggtggtgttggccactgcggagtcgcgccgggtggccggccgcacctacagcgccgcgcgcggtgagcctggccgtgtgggggatcgtcacactcgtcgtgctgcccttcgcagtcttcgcccggctagacgacgagcagggccggcgccagtgcgtgctagtctttccgcagcccgaggccttctggtggcgcgcgagccgcctctacacgctcgtgctgggcttcgccatccccgtgtccaccatctgtgtcctctataccaccctgctgtgccggctgcatgccatgcggctggacagccacgccaaggccctggagcgcgccaagaagcgggtgaccttcctggtggtggcaatcctggcggtgtgcctcctctgctggacgccctaccacctgagcaccgtggtggcgctcaccaccgacctcccgcagacgccgctggtcatcgctatctcctacttcatcaccagcctgagctacgccaacagctgcctcaaccccttcctctacgccttcctggacgccagcttccgcaggaacctccgccagctgataacttgccgcgcggcagcctgactcccccagcgtccggctccgcaactgcccgccactcctggccagcgagggaggagcggcccagagtgcgggaccagacaggccgcctatgctctggggaaaccgactcgcgccccatacccgacctagcagatcggaagcgctgcagctgtgcccgcagttgaccttgccaagccctccaggtgatgcgcggccatgccgggtgaggagaactgaggc

SEQ ID NO: 171139 - DNA, 133 bp, Homo sapiens
aactagaaggttagaaaatattatatgaaagagatgtgaggtaatccaacttaacaaaatgtaagtttttgtttgttctggaggagagaggagatcctcaccaattgaaacatcgtaaaaaggcaaagggcaa

SEQ ID NO: 171140 - DNA, 284 bp, Homo sapiens
gtgatcctccctccttggtctcccaaagtgctgggatgacaggcgtgagccactgcacctggccaaaccatttgtttttcatgggatattctaggaacacacgtggtgtgcagggcagggcctgcagtacaggtaggagctgtgctgtcttaaaatcaccaccttctcccagacccacatttttggaagggggcataaggggcaggtgatcagaagcaccacaggcagtatctgagctcagtgcatggcctcttgggctctagatatgggaaccttctgcaaca

SEQ ID NO: 171141 - DNA, 594 bp, Homo sapiens
ggaaatggcaatgataggcatttataatctccatatttagatatttccctcacagtgctagtttctgagcttattagaacctaatgttaaatgacgagttaatgggtgcagcacaccaacatggcacatgtatacatatgtaacaaacctgcacgttgtgcacatgtaccctaaaacttaaagtataataataaaaaaaaagaaatatcctggctatgagtcaagggtttaggaccttttgaggcacttgggtttagacaattctcagtgatgtgtacaggaatttgggtacaggaatactattcacaggtgaacagagtttgattttggctgaaggcatattatttgatccagataataatataaaaataatccaaatgttaggaccttagcttctgcgaaccctgacttgagaatagttagccatacatgtagttggactttatgtaggactaaccaatctcctctgcactatttttgcacagtacattgattatggtatccctgatgacctctgtccccatccttgtgagtagccttcattgctaccacccaaggatgttttaaaaaggctatgaggaaggatgcatgtag

SEQ ID NO: 171142 - DNA, 324 bp, Homo sapiens
tggcaatctggctgttagaccagaacaacaaaattgttccaactgattcatgacattcatcagctacctactcagaacagacatccataagtacacaaagatggatccataatagtgatgcaaagcatgcatcacttgttatcagataaaatactattgcatgttcttgctatcaggtgacagttgtgaatttaatcaaggctctacttgaattactcagtgagccacctccacccaattcatcccacaggaaagaaagtgaaaagaacaccaaaaaatgaaagtagcaacccaaaacactgcatacactgacagatgcactag

SEQ ID NO: 171143 - DNA, 562 bp, Homo sapiens
cgtagtcatcggcgctgcaggacggggtcctgggcgtgtgcatcacctcctcgtagctggggcaggatagcaccgacgtaggggtgggcacgccagtgggccggctctggtcaggcctgggggacgcaggcaggacctctttcatgtgagggcctgccagccagtctttggagtctgcacctgatgctgggtgtagcttattttccgcggcaggtggaataggagtcgactctttgagctttttgtctttaaatggagggtccagccccggcggtttcttagcaggaatgtccagacccttcttccgcccgtcgtctgccggcttcgccttctccttgagcttggggtctccggaccggtgcctcagcttctccatttgcttcatcctctccttgtgccgcttgtggcgctcctcgatctccaggtccttctgggacagcatcctctcgaagctggtcatcatcaggtcgccgtcccccaggagcttctccctgggcctggcgtctttcttgcctgggtctttggatggcgctaccttatcattcccgttgctcatcttcac

SEQ ID NO: 171144 - DNA, 164 bp, Homo sapiens
cccttcacctgatctccatgttgccagctcactccttcatgtccttccagtctttgctcaagtccgtctgctctctaagacgtgcccccaccatcctacttagtgatacaaactccacctcccaccgtgctgctccctggtgtcatgtgtcttactccactttt

SEQ ID NO: 171145 - DNA, 472 bp, Homo sapiens
accaaaaacaggatcagtcaacaaaagtagagatacagaggtcagcagccagcaaggccatgcccaacacccagtgcacacacacaggcccaggtacacacactcaagagcacattcaccacaccctgctgttataatcaggaacatggctatattctaggtccaaagagatgctggggacatgtcctagcaaaagataaattacaggaatgtaacaacgcccctaaaagctgtctttcctttgttaatcactagttccttgcctctcatacccattcatgatgccaaccaacgtggcaaacagcaacagccaataccactgtgcctgctgactaaagtccagtctgtatctggtttctccatttacttctagcctgttagcaaaaggaaaaataattttatcacatgcttgaacttgccaatgaataaatgcacagagactgattttgaatgacagctttgccatgcagta

SEQ ID NO: 171146 - DNA, 207 bp, Homo sapiens
cggtaccctctggttgcaagtgtctttacaatcagtcataagaatgatttatcatcatctcctaggtagtacatagttccaaaaactggtttcagaaaattttttgattggataaaatattcatcttttgccaagaattatcccaaggtgactttcttaagtctcataatcttaatatatgagtgtaatgcagaaatgaagggtaga

SEQ ID NO: 171147 - DNA, 258 bp, Homo sapiens
ctgtgggggtgggaggcatcccgggtgcctttctgcccctatacattttgttaacaaggcagctgcacttgtctgcttgagatgcgagttgatttcccgacgtcttctggcccgagatgtctcattcccacaaaggaggctgacccaggcggctgtgggtgctgccattttgttctcattgttttcacttgtgatactaactattgtttttctcccccatgccaagagcatgtgggagaaaaacaatagttagtatca

SEQ ID NO: 171148 - DNA, 375 bp, Homo sapiens
tacatgcttgtccacttcataaactgcttactgaagacaccttatgtgtgtttttccctactcagtcccttaactgtgattcaagcctttttccactgtcttgtccacagtcagggctggtggcatacctaattttaaaatgcctcgagtgtgggaaaacgttgccttaccacaactaccattccttttgcccacggattggggaatttcctaagcccaactcctctgcctatggttttgtctttgaactccctctcacatctagatttgcacattcttacaaacccttcgaggttggaaacaagcatttgctctcagcctaccctttggaaaacgagaccaaaaacaaacatctccagtgtgcatggatgctgt

SEQ ID NO: 171149 - DNA, 344 bp, Homo sapiens
aagtaaaagattgcagtgaaaaaataagcagtagtaacagactatcttagcagaataaaagtatttttgttcattttccaccttgtattttatgtggtattttgtattcgaaagctgttcttggaatattgtgtataaacttgaagtttacatgaaatcattactcttttgaactgagagttaaagctacttactctataacagcctggatatattcactcagcagcgtttgggttgtagatctaattaattagccattaaatttttttcccctgaaggaaactaacttctgaaactaatctcagtctctctttcccctgcctcattgaaatgattgtttaatg

SEQ ID NO: 171150 - DNA, 490 bp, Homo sapiens
caggatatacttattaatctcaggactccagttttggaaaattctcagctattatccttttctttattgttcctttgtcattacttccattttctttttctggaattcttataagataaacattggtattttctaatcagcttactgattagtatctcaattgctatttcattttcaaaaaattaattcttcttgctacaatttttttctgagtgaattccttaacattaccttccaatacactcaattctttccttgaaattcctttatttcatttattgtacttttatattaatgaacatttttaattttttaagatttctgattaagttttactcttattcacctattcttattttatttctatctttaatcatttcttgttcttttttaggtatgagtactttatcactaagcatctcaagcatattcatgctgaggtcattgtcagataatttcataaaatcaaatttatctggagtgaatgtta

SEQ ID NO: 171151 - DNA, 159 bp, Homo sapiens
tgatccaacaccctccacaccagccttgctgctcgtgctctggagtttctaaacaaggagctctgagtacccagatgaggaaagtgaggctcagagaaggaaacagactggccagtgggtcaagaacggtgaagctagacaaagtccaaagtgttgggg

SEQ ID NO: 171152 - DNA, 727 bp, Homo sapiens
tgtcctgcctcagcctcctgagtagctgggactacaggtgtacaccaccatgcccagctaaacttgtatttttagtagagacagtgtttcaccatgttggccaggatggtctccatctcttaaccttgtgatctgcccaccttggcctcccaaagtgctgggattataggcgtgagccacaatgcctgggcgagttgacagttttttatcattccctttgcccccgtactagcttggaaatgttctctcttttacttttcttttagtaatcataagacaatagcacgcattcgtgacttatcaaaatctaatatttagtgagtttttaactcttactgttttagtggttattctaaattttacaatatgcattttcaacttaccaaaattcaatattcattaataattatgtccttcttcttaacacaatgacttagagattgacactttaacttcgcttaccccatccagacttatatgccattgttatcattttctaaacttctctctatatttgaaactccaaaagacattattaatatttttctagagtcaacatccatatctacacattactattatgtgttttctacatttctgatcatccatctagatcattttcttcagcgtgaagaacatcctttagtgtttccttcagcatggctctgcggtgtcatatctctcaggaggggtgtccttgtgtgtgcagccgtgtgtgcatatgtgt

SEQ ID NO: 171153 - DNA, 194 bp, Homo sapiens
cagcggggagtgcggaatagttgtatagtcttctaaagctctaactgaccatcacaatataattgcagtattacaaattgtacaatattgtatttacataaatacaaaatatgttagaaattcagcagtggaggattatataccaatttccgtgacactaatgttaataagttctgataacctctcagaccagc

SEQ ID NO: 171154 - DNA, 652 bp, Homo sapiens
ggggtgcacgtgccccccgttaaggcacattgcttcgccctgggtagaactaagtgggcgactcttgggctagccccattttttcccctcagaccaaacaaatgagtgcttttttcccagaaaaaaaatttcacacagttataagattttgcagatcctgagtaagacagtccctgccgggcgcggtggctcacgcctgtaatcccagcactttgggaggccgaggtgagtggatcacgaggtcaggagttcgagaccagcctagccaacatggtgaaacccccgtctctactaaaactacaaaaattagccaggcgtggtggtgggcacctgtaatcccagctacttgggaggctgaggcaggagaattgcttgaacccagggggcagaggttgcaatgagctgagatcaagccacttcactccagcttgggcaaaagagcaaaattccatcttaaaaaaaaaaaaaaatgggggggcccttccaccttcccatttaaaatgtgccagacactgttaggtactaagggcatgtcctcaaatgtcctaacatggaggacttttgtttcttcataggtaggctagagctaatgatagcaccctgaaagggtactcaatttgtggagcctgagaaataaagataggtaagatcc

SEQ ID NO: 171155 - DNA, 471 bp, Homo sapiens
ttgggagagtggcaagtggtaaggctggggagtaggtgaggttttacagggtcttgcaggtcctggtaagagatggagattttctctaagtacaatggaaagtcaatgaagggttttacccaggagcgacatgttccaatcattacttaagatcactccagttgccatgtggagaacagaatggaggctggggaagagtgaacactcaaaggctattgcttaatccagcccagaggtgatggactacaaagctaacattggagatggtgaaaagtaactgcattcaaaatatattctagggtggaaacaacaggaccactgatggactggatttagggagtgaagagagagggctagatttttggtctatgcaattggatagatgatgagaagaaggttagaaacatacctttgagaaccatcagcacatagatgggtgaaatgacagagtgtggagagaaagggtcccag

SEQ ID NO: 171156 - DNA, 577 bp, Homo sapiens
ccaagaacacggcacgaggtgtggcgacagagctccatccgccgccgctggaagcggaaatggtaccgtgcacccgcccttcccggggaagtctgcaaacacagctgttccagagcccgggaaccgctggaagtgaggccacaagagctacaccactcgggggcgggggcaggaaggggccagcagcgggcgggggttcccaggtctacagctcctgtgagggccccaagaacctcctcctgcggcggccgcccccggcccttaagccgaacctggagagcgcccccgcacacactaaaatctcccggggagcagcgggaaacggactcccccacaccctccaggaaggacacacccgccctcccggccgttcacgggaaaggggaggttgccaatttggacggcgttcgcaggccagaactgcgccgagtcgccttccacggcgcaccaggtttaattagttaagcaaagagatcagctacaacgatctcttggcttggggccgggagagttactctgggaacttcaagttgcaagtttacaccggccttcctaggagcctggtcccataaaccct

SEQ ID NO: 171157 - DNA, 760 bp, Homo sapiens
caggcagagggcacacccccaacatttccctttcctccccttctgcaatcgcacccatcttccttccacccattttgggatgttgcaagggcctcgctgcaggatctgccagctgggcccgggcctcgagctcctttgggggcggaatggggcggggggatgagggcctatcacttacaccctcaggcactacctccagaagaccaccccttccaagccttggcacggcccccgaaggcttgcgggggccgtgcacccgcccttcccggggaagtctgcaaacacagctgttccagagcccgggaaccgctggaagtgaggccacaagagctacaccactcgggggcgggggcaggaaggggccagcagcgggcgggggttcccaggtctacagctcctgtgagggccccaagaacctcctcctgcggcggccgcccccggcccttaagccgaacctggagagcgcccccgcacacactaaaatctcccggggagcagcgggaaacggactcccccacaccctccaggaaggacacacccgccctcccggccgttcacgggaaaggggaggttgccaatttggacggcgttcgcaggccagaactgcgccgagtcgccttccacggcgcaccaggtttaattagttaagcaaagagatcagctacaacgatctcttggcttggggccgggagagttactctgggaacttcaagttgcaagtttacaccggccttcctaggagcctggtcccataaaccct

SEQ ID NO: 171158 - DNA, 245 bp, Homo sapiens
gctgggtgtttccagccacacctgcatatgaagaaaacaagcacccccagtagctggggtgtggagaagagagaggttagtgagatgctgctgggaatgtaaatcgtaggggagattatggtttttagggagagaagcgatttttctctcacttctccattggccaggacagcttttgtttttaacctctaatactcattttctttctgactccaaaaacaatgtgtattaattttagaaattta

SEQ ID NO: 171159 - DNA, 525 bp, Homo sapiens
cagtgacaaggatggggtggttctgagtgtttttccgttggacgatgggttgggagaggatggccagcgaagcaaatgcatgttttttatgagtcctctggcgcctttttgccttggctaccgaagcgtcttgaaagcagagatttttgaaagccccattgatttttgtgtcatccatctcagatcctgcctggctcagaattttggaggaggcctcatcactgctcagtcattctgacatttcctgggtgcagaaacactgcctctgcctccttctagaacgtgctcagattccccacagtcatttctgatgaaacccatctccaggagagggtaggtggccgagggggccatgctcatctttccctggcaaacttttccggctcaaaaggttatttgggatggaagctgagctcagcaccttctcctcaaaacctgagaaggaaggacagcagtgtgctcctgagactcatctatgctagaaaaaccagaagctgcttttgtctggggacttaacggaaagaa

SEQ ID NO: 171160 - DNA, 124 bp, Homo sapiens
gaatgttgttgaaagtggtgccagaaccggtttaggggtacgtttcagaatcttaaccttgagtcaattgcatgaaattaaatagctgtggtatcacttcactaacagtgatgtaattttaatt

SEQ ID NO: 171161 - DNA, 175 bp, Homo sapiens
gcctgccatccaactgcaacctggcatccatcatagcctaataagccttctacttgtccttaacttactcctttagattctcagaggcaacattaaacctttactgcactcaagcttccaaatgatctcctgtccctatcctcatgtatcttagattcctcaataattggaaaat

SEQ ID NO: 171162 - DNA, 247 bp, Homo sapiens
ttatgcctctcattgcccttgccccagtccctcagtgggtaccgcaagaagtagctgtctttgctatgtgaatttttcccccaacaagtatactcatgattcacagttgtctgaaacccaccctgatttgtagaattcacctgaaatattttttatctggaatatatctgccaccccatttttctagtttttttttccttcatattcccaaatctctaaagattctagagaacatttgctgagtagg

SEQ ID NO: 171163 - DNA, 514 bp, Homo sapiens
gctgagggtgcatttttctcagggatctggcagggggaccacagatgttgaaatcagctcaggggcaaagtctggttctatcgctgaccagctgtgcccatggtcaagtcacttcccctctctctaaacatccacttcctcatctgtgaaatgggctagcagtgtctgctttggagggttgacatgcataggaaaagcaggcccagggcagcaatttgagtaacacgaaaaagacacagcctttgaaatcagacagatgcgaattctgatccaggctcctgggagctgtgtgactttgtccaagtgacttcacgtctctaggcctcggattcttcagggataaaatggtactaacactccctccctcacagggaggtccagaggattacaggagacaacatggttaaatcccagcacgtggtacctggctcataggagggacccaataaacaaaagctattgccactgttatcactatttaaaaatgtttttaatgaaagaaagttctggaaaa

SEQ ID NO: 171164 - DNA, 222 bp, Homo sapiens
tgttagttgataatgtcatgtggtactgatagaattgaatgataagtatgtgtaagaacttctatacccagttctatgctaactgctatgtgtaaggacttctgtgtccagttctatgctaactgctataagaactacaaaataaatcaaagacttggcattttccatggaatgtagagtatagaacgtgaggggggtaaatccctaataaatttaactagg

SEQ ID NO: 171165 - DNA, 1879 bp, Homo sapiens
ctgcctaagcggtcgcggaagagcgcgcaggcctgccggggcgggagctagagatgctgttattctatcgtatgtgagaagtcggcccagagatggaaaactttattctgtatgaggagatcggaagaggaagcaagactgttgtctataaagggcgacggaagggaacaatcaattttgtagccattctttgtactgataagtgcaaaaggcctgaaataaccaactgggtccgtctcacccgtgaaataaaacacaagaatattgtaacttttcatgaatggtatgaaacaagcaaccacctctggctagtggtggaactctgcacaggtggttccttaaaaacagttattgctcaagatgaaaacctcccagaagatgttgtgagagaatttggaattgacctgattagtggattacatcatcttcataaacttggcattctcttttgtgacatttctcctaggaagatactcttggaagggcctggcacactgaagtttagcaacttttgcttggcaaaagtggaaggtgaaaatttggaagagttctttgctttggtggcagcagaggaaggaggaggtgataatggggaaaatgtcctgaagaaaagcatgaaaagtagagtcaaaggatctcctgtatatacagcaccagaagttgtgaggggtgctgacttttccatctccagtgacctctggtctttgggctgtctgctttatgaaatgttttcaggaaaacctccattcttctcagaaagtatttcagaattaactgaaaagatcttatgtgaagatcctttgccacctattccgaaagattcttctcgtcctaaagcttcttcagattttattaatttgcttgatgggttacttcaaagagatcctcagaaaagattgacttggacaaggctactgcagcattcattttggaagaaagcttttgctggagcagatcaggaatcaagcgtcgaagatctcagtctcagcagaaacactatggagtgttctgggccacaagattccaaggagcttttgcagaactctcagagtagacaagcaaaagggcacaagagtggtcaaccactaggtcactctttcagactagaaaatccaactgagtttcggcctaagagtactcttgagggtcaattgaatgaatccatgtttcttctcagttctcgtcctactcccagaactagcactgcagtggaagtaagtcctggtgaggatatgactcactgttcaccacagaagacttctcctctgaccaagattacaagtggacacctgagtcagcaggacctggaatcccagatgagagagcttatctacacggactcagatcttgttgtcacccccattatcgacaatccaaagataatgaaacagccaccagttaaatttgatgcaaaaatattgcatctaccaacatattcagtggataagttattatttctgaaagatcaagattggaatgactttttgcaacaagtgtgctcgcagatcgactccactgagaagagcatgggggcctcccgagccaagctgaatctcctttgctatttgtgcgtggtggctggtcaccaggaggtggccaccaggctcctccattcccccctgttccaattgctaatccagcatttgcggatagctccaaactgggatatacgggccaaggttgctcacgtgattggtttactggcttcgcacacagctgagctccaggaaaatacacctgttgttgagactacaagctccattggaatcgggattttgaactgtcttgttcaacactccactccagtgcctagacagtgccttgtgtatgtatagatactgacaaatatttcaaaataaataaaactgtatcagcattc

SEQ ID NO: 171166 - DNA, 951 bp, Homo sapiens
ctgcctaagcggtcgcggaagagcgcgcaggcctgccggggcgggagctagagatgctgttattctatcgtatgtgagaagtcggcccagagatggaaaactttattctgtatgaggagatcggaagaggaagcaagactgttgtctataaagggcgacggaagggaacaatcaattttgtagccattctttgtactgataagtgcaaaaggcctgaaataaccaactgggtccgtcttcaccccggttgaaaattaaaaacaacaaagaaattattggttaaacctttttccatggcaattgggtattgaaaacaagggcaaaccaaccttcttgggcttaaagtgggtgggaactctctggcacccggggttggtttcccttttaaaaaccaggcttatattgggctccaggaatgtggaaaaacgctttcccccagaaaaaattgttggttgcacggaacgaagttttggggaattggaccctgtaaatttaaggtgggaaatttaccgcatttcatctctttctacaatataaacctttgggggcccattttcctctcgttttggggtggaacccatttccctttccctatgagtgaagggaatatacccccctttgggggaagcggggccctggggacacacactgttgaaagagttttaataggaccaaaacctttttgggggtcttgggggcacaagaacgggtgtgggcaacgggggtttgcaaacactttctggcgaagcagaaggttccctttggggccattgggggtgtggggacagagactagaaagggaaaagcggcagcggaagggtgttgaaatacatgtggggggcgacaactttggtcctgtggaaagaaaatggccttgtgattacagaggtttagagatctccaagggggaaatcacccgggtatctaatacgaggaaagcgtaggaaatgg

SEQ ID NO: 171167 - DNA, 359 bp, Homo sapiens
tagttttacttctcccccccttttttttttttatatttaattgggggaagcttaggtccgtctcacccgtgaaataaaacacaagaatattgtaacttttcatgaatggtatgaaacaagcaaccacctctggctagtggtggaactctgcacaggacaggattatggttgattacttccatggatgtacacatggacaaggttatcaagacacagtcctggaattagttttttgcttcagctgttgtttctgatctctgaccagatgtaatatcctaactgtaaaacatgcctacgtttgtaactgcacgtcacccaccaaaacaaaataaaaccccaaatacctcttcccttcatca

SEQ ID NO: 171168 - DNA, 1625 bp, Homo sapiens
atcagattcttcttgggagatttgttgtggacatgtttagtgatagataaacctttgctgttaagccagtgggatgttggggttggtatattgaaggtttaacttaaactattctaattgaaatttaaaagaagaatgtagctgaatgtgccatacctctcaggtagattttaaacacttttttatattcacacacatcctttgcaaaatgtaaccttaaaattagaaaacatttaaaaatgtgaaatgcacatgaagttttattcatgcgcatgtttttctcctgccctttttcatctcatcagatctttcctaggtgggttcgtgttggcagcaatacaaatgcctaaccgagctgttcttcatactttgcttttaggatctcctgtatatacagcaccagaagttgtgaggggtgctgacttttccatctccagtgacctctggtctttgggctgtctgctttatgaaatgttttcaggaaaacctccattcttctcagaaagtatttcagaattaactgaaaagatcttatgtgaagatcctttgccacctattccgaaagattcttctcgtcctaaagcttcttcagattttattaatttgcttgatgggttacttcaaagagatcctcagaaaagattgacttggacaaggctactgcagcattcattttggaagaaagcttttgctggagcagatcaggaatcaagcgtcgaagatctcagtctcagcagaaacactatggagtgttctgggccacaagattccaaggagcttttgcagaactctcagagtagacaagcaaaagggcacaagagtggtcaaccactaggtcactctttcagactagaaaatccaactgagtttcggcctaagagtactcttgagggtcaattgaatgaatccatgtttcttctcagttctcgtcctactcccagaactagcactgcagtggaagtaagtcctggtgaggatatgactcactgttcaccacagaagacttctcctctgaccaagattacaagtggacacctgagtcagcaggacctggaatcccagatgagagagcttatctacacggactcagatcttgttgtcacccccattatcgacaatccaaagataatgaaacagccaccagttaaatttgatgcaaaaatattgcatctaccaacatattcagtggataagttattatttctgaaagatcaagattggaatgactttttgcaacaagtgtgctcgcagatcgactccactgagaagagcatgggggcctcccgagccaagctgaatctcctttgctatttgtgcgtggtggctggtcaccaggaggtggccaccaggctcctccattcccccctgttccaattgctaatccagcatttgcggatagctccaaactgggatatacgggccaaggttgctcacgtgattggtttactggcttcgcacacagctgagctccaggaaaatacacctgttgttgagactacaagctccattggaatcgggattttgaactgtcttgttcaacactccactccagtgcctagacagtgccttgtgtatgtatagatactgacaaatatttcaaaataaataaaactgtatcagcattc

SEQ ID NO: 171169 - DNA, 2170 bp, Homo sapiens
aggctggtcggcttcttccgcgcgttccgctttgcttcactgctttctcccccattcttgggcctgtggacctgtcctgaggcagaggccgagatgcgcgcaaccgcgggagcagccaagtggactggactcttttcttgacttagctaccaggagctagagatgctgttattctatcgtatgtgagaagtcggcccagagatggaaaactttattctgtatgaggagatcggaagaggaagcaagactgttgtctataaagggcgacggaagggaacaatcaattttgtagccattctttgtactgataagtgcaaaaggcctgaaataaccaactgggtccgtctcacccgtgaaataaaacacaagaatattgtaacttttcatgaatggtatgaaacaagcaaccacctctggctagtggtggaactctgcacaggtggttccttaaaaacagttattgctcaagatgaaaacctcccagaagatgttgtgagagaatttggaattgacctgattagtggattacatcatcttcataaacttggcattctcttttgtgacatttctcctaggaagatactcttggaagggcctggcacactgaagtttagcaacttttgcttggcaaaagtggaaggtgaaaatttggaagagttctttgctttggtggcagcagaggaaggaggaggtgataatggggaaaatgtcctgaagaaaagcatgaaaagtagagtcaaaggatctcctgtatatacagcaccagaagttgtgaggggtgctgacttttccatctccagtgacctctggtctttgggctgtctgctttatgaaatgttttcaggaaaacctccattcttctcagaaagtatttcagaattaactgaaaagatcttatgtgaagatcctttgccacctattccgaaagattcttctcgtcctaaagcttcttcagattttattaatttgcttgatgggttacttcaaagagatcctcagaaaagattgacttggacaaggctactgcagcattcattttggaagaaagcttttgctggagcagatcaggaatcaagcgtcgaagatctcagtctcagcagaaacactatggagtgttctgggccacaagattccaaggagcttttgcagaactctcagagtagacaagcaaaagggcacaagagtggtcaaccactaggtcactctttcagactagaaaatccaactgagtttcggcctaagagtactcttgagggtcaattgaatgaatccatgtttcttctcagttctcgtcctactcccagaactagcactgcagtggaagtaagtcctggtgaggatatgactcactgttcaccacagaagacttctcctctgaccaagattacaagtggacacctgagtcagcaggacctggaatcccagatgagagagcttatctacacggactcagatcttgttgtcacccccattatcgacaatccaaagataatgaaacagccaccagttaaatttgatgcaaaaatattgcatctaccaacatattcagtggataagttattatttctgaaagatcaagattggaatgactttttgcaacaagtgtgctcgcagatcgactccactgagaagagcatgggggcctcccgagccaagctgaatctcctttgctatttgtgcgtggtggctggtcaccaggaggtggccaccaggctcctccattcccccctgttccaattgctaatccagcatttgcggatagctccaaactgggatatacgggccaaggttgctcacgtgattggtttactggcttcgcacacagctgagctccaggaaaatacacctgttgttgaggcaattgttctcttaactgaattaattagggaaaacttcaggaacagcaaattaaaacagtgccttttaccaacccttggggagctgatctatcttgtagccacccaggaagaaaaaaaaaagaaccctagagagtgctgggctgttcccttggctgcatacacagtgctaatgaggtgccttcgggaaggggaactctgaatcctctacaacctattattataaaatgtttcaaagattagaaaagaaaagaaagctgtaataatcacctttgtttccatcacctagattaaacagtaaacatttaaaaaaa

SEQ ID NO: 171170 - DNA, 2669 bp, Homo sapiens
aggctggtcggcttcttccgcgcgttccgctttgcttcactgctttctcccccattcttgggcctgtggacctgtcctgaggcagaggccgagatgcgcgcaaccgcgggagcagccaagtggactggactcttttcttgacttagctaccaggagctagagatgctgttattctatcgtatgtgagaagtcggcccagagatggaaaactttattctgtatgaggagatcggaagaggaagcaagactgttgtctataaagggcgacggaagggaacaatcaattttgtagccattctttgtactgataagtgcaaaaggcctgaaataaccaactgggtccgtctcacccgtgaaataaaacacaagaatattgtaacttttcatgaatggtatgaaacaagcaaccacctctggctagtggtggaactctgcacaggtggttccttaaaaacagttattgctcaagatgaaaacctcccagaagatgttgtgagagaatttggaattgacctgattagtggattacatcatcttcataaacttggcattctcttttgtgacatttctcctaggaagatactcttggaagggcctggcacactgaagtttagcaacttttgcttggcaaaagtggaaggtgaaaatttggaagagttctttgctttggtggcagcagaggaaggaggaggtgataatggggaaaatgtcctgaagaaaagcatgaaaagtagagtcaaaggatctcctgtatatacagcaccagaagttgtgaggggtgctgacttttccatctccagtgacctctggtctttgggctgtctgctttatgaaatgttttcaggaaaacctccattcttctcagaaagtatttcagaattaactgaaaagatcttatgtgaagatcctttgccacctattccgaaagattcttctcgtcctaaagcttcttcagattttattaatttgcttgatgggttacttcaaagagatcctcagaaaagattgacttggacaaggctactgcagcattcattttggaagaaagcttttgctggagcagatcaggaatcaagcgtcgaagatctcagtctcagcagaaacactatggagtgttctgggccacaagattccaaggagcttttgcagaactctcagagtagacaagcaaaagggcacaagagtggtcaaccactaggtcactctttcagactagaaaatccaactgagtttcggcctaagagtactcttgagggtcaattgaatgaatccatgtttcttctcagttctcgtcctactcccagaactagcactgcagtggaagtaagtcctggtgaggatatgactcactgttcaccacagaagacttctcctctgaccaagattacaagtggacacctgagtcagcaggacctggaatcccagatgagagagcttatctacacggactcagatcttgttgtcacccccattatcgacaatccaaagataatgaaacagccaccagttaaatttgatgcaaaaatattgcatctaccaacatattcagtggataagttattatttctgaaagatcaagattggaatgactttttgcaacaagtgtgctcgcagatcgactccactgagaagagcatgggggcctcccgagccaagctgaatctcctttgctatttgtgcgtggtggctggtcaccaggaggtggccaccaggctcctccattcccccctgttccaattgctaatccagcatttgcggatagctccaaactgggatatacgggccaaggttgctcacgtgattggtttactggcttcgcacacagctgagctccaggaaaatacacctgttgttgaggcaattgttctcttaactgaattaattagggaaaacttcaggaacagcaaattaaaacagtgccttttaccaacccttggggagctgatctatcttgtagccacccaggaagaaaaaaaaaagaaccctagagagtgctgggctgttcccttggctgcatacacagtgctaatgaggtgccttcgggaaggggaagagcgtgttgtgaatcacatggcagcaaaaattattgaaaatgtctgtaccaccttttctgctcaggcccagggctttattacaggagaaataggacccattttgtggtacctattcagacactccactgctgattctcttaggataacagcagtatcggccttgtgtagaatcactcgccattctcctactgccttccagaatgttattgaaaaggtgggactgaacccagtaataaactccctggcctctgccatctgcaaagttcagcagtacatgttgaccttattcactgccatgttgtcctgtgggattcatcttcaaagactaatccaagaaaaggtttgacttagattttacctgttactctacattaaaaattgttttcttctgcattttagtggttccacaagtaatgtcatgtttgtagaattcattttttatcccaagaggcctttttgaactttgccaaacctttgtaccacagaatgttcatctgaacatgttccaagagccttttagtgattaaaatagaaattctttaaaggaaaaaaaaaggagatgcgcgcaaccgcgggagcagccaagtggactggactcttttcttgacttagcta

SEQ ID NO: 171171 - DNA, 2034 bp, Homo sapiens
aggctggtcggcttcttccgcgcgttccgctttgcttcactgctttctcccccattcttgggcctgtggacctgtcctgaggcagaggccgagatgcgcgcaaccgcgggagcagccaagtggactggactcttttcttgacttagctaccaggagctagagatgctgttattctatcgtatgtgagaagtcggcccagagatggaaaactttattctgtatgaggagatcggaagaggaagcaagactgttgtctataaagggcgacggaagggaacaatcaattttgtagccattctttgtactgataagtgcaaaaggcctgaaataaccaactgggtccgtctcacccgtgaaataaaacacaagaatattgtaacttttcatgaatggtatgaaacaagcaaccacctctggctagtggtggaactctgcacaggacaggattatggttgattacttccatggatgtacacatggacaaggtggttccttaaaaacagttattgctcaagatgaaaacctcccagaagatgttgtgagagaatttggaattgacctgattagtggattacatcatcttcataaacttggcattctcttttgtgacatttctcctaggaagatactcttggaagggcctggcacactgaagtttagcaacttttgcttggcaaaagtggaaggtgaaaatttggaagagttctttgctttggtggcagcagaggaaggaggaggtgataatggggaaaatgtcctgaagaaaagcatgaaaagtagagtcaaaggatctcctgtatatacagcaccagaagttgtgaggggtgctgacttttccatctccagtgacctctggtctttgggctgtctgctttatgaaatgttttcaggaaaacctccattcttctcagaaagtatttcagaattaactgaaaagatcttatgtgaagatcctttgccacctattccgaaagattcttctcgtcctaaagcttcttcagattttattaatttgcttgatgggttacttcaaagagatcctcagaaaagattgacttggacaaggctactgcagcattcattttggaagaaagcttttgctggagcagatcaggaatcaagcgtcgaagatctcagtctcagcagaaacactatggagtgttctgggccacaagattccaaggagcttttgcagaactctcagagtagacaagcaaaagggcacaagagtggtcaaccactaggtcactctttcagactagaaaatccaactgagtttcggcctaagagtactcttgagggtcaattgaatgaatccatgtttcttctcagttctcgtcctactcccagaactagcactgcagtggaagtaagtcctggtgaggatatgactcactgttcaccacagaagacttctcctctgaccaagattacaagtggacacctgagtcagcaggacctggaatcccagatgagagagcttatctacacggactcagatcttgttgtcacccccattatcgacaatccaaagataatgaaacagccaccagttaaatttgatgcaaaaatattgcatctaccaacatattcagtggataagttattatttctgaaagatcaagattggaatgactttttgcaacaagtgtgctcgcagatcgactccactgagaagagcatgggggcctcccgagccaagctgaatctcctttgctatttgtgcgtggtggctggtcaccaggaggtggccaccaggctcctccattcccccctgttccaattgctaatccagcatttgcggatagctccaaactgggatatacgggccaaggttgctcacgtgattggtttactggcttcgcacacagctgagctccaggaaaatacacctgttgttgagactacaagctccattggaatcgggattttgaactgtcttgttcaacactccactccagtgcctagacagtgccttgtgtatgtatagatactgacaaatatttcaaaataaataaaactgtatcagcattc

SEQ ID NO: 171172 - DNA, 2247 bp, Homo sapiens
aggctggtcggcttcttccgcgcgttccgctttgcttcactgctttctcccccattcttgggcctgtggacctgtcctgaggcagaggccgagatgcgcgcaaccgcgggagcagccaagtggactggactcttttcttgacttagctaccaggagctagagatgctgttattctatcgtatgtgagaagtcggcccagagatggaaaactttattctgtatgaggagatcggaagaggaagcaagactgttgtctataaagggcgacggaagggaacaatcaattttgtagccattctttgtactgataagtgcaaaaggcctgaaataaccaactgggtccgtctcacccgtgaaataaaacacaagaatattgtaacttttcatgaatggtatgaaacaagcaaccacctctggctagtggtggaactctgcacaggtggttccttaaaaacagttattgctcaagatgaaaacctcccagaagatgttgtgagagaatttggaattgacctgattagtggattacatcatcttcataaacttggcattctcttttgtgacatttctcctaggaagatactcttggaagggcctggcacactgaagtttagcaacttttgcttggcaaaagtggaaggtgaaaatttggaagagttctttgctttggtggcagcagaggaaggaggaggtgataatggggaaaatgtcctgaagaaaagcatgaaaagtagagtcaaaggatctcctgtatatacagcaccagaagttgtgaggggtgctgacttttccatctccagtgacctctggtctttgggctgtctgctttatgaaatgttttcaggaaaacctccattcttctcagaaagtatttcagaattaactgaaaagatcttatgtgaagatcctttgccacctattccgaaagattcttctcgtcctaaagcttcttcagattttattaatttgcttgatgggttacttcaaagagatcctcagaaaagattgacttggacaaggctactgcagcattcattttggaagaaagcttttgctggagcagatcaggaatcaagcgtcgaagatctcagtctcagcagaaacactatggagtgttctgggccacaagattccaaggagcttttgcagaactctcagagtagacaagcaaaagggcacaagagtggtcaaccactaggtcactctttcagactagaaaatccaactgagtttcggcctaagagtactcttgagggtcaattgaatgaatccatgtttcttctcagttctcgtcctactcccagaactagcactgcagtggaagtaagtcctggtgaggatatgactcactgttcaccacagaagacttctcctctgaccaagattacaagtggacacctgagtcagcaggacctggaatcccagatgagagagcttatctacacggactcagatcttgttgtcacccccattatcgacaatccaaagataatgaaacagccaccagttaaatttgatgcaaaaatattgcatctaccaacatattcagtggataagttattatttctgaaagatcaagattggaatgactttttgcaacaagtgtgctcgcagatcgactccactgagaagagcatgggggcctcccgagccaagctgaatctcctttgctatttgtgcgtggtggctggtcaccaggaggtggccaccaggctcctccattcccccctgttccaattgctaatccagcatttgcggatagctccaaactgggatatacgggccaaggttgctcacgtgattggtttactggcttcgcacacagctgagctccaggaaaatacacctgttgttgagactacaagctccattggaatcgggattttgaactgtcttgttcaacactccactccagtgcctagacagtgccttgtgcaattgttctcttaactgaattaattagggaaaacttcaggaacagcaaattaaaacagtgccttttaccaacccttggggagctgatctatcttgtagccacccaggaagaaaaaaaaaagaaccctagagagtgctgggctgttcccttggctgcatacacagtgctaatgaggtgccttcgggaaggggaactctgaatcctctacaacctattattataaaatgtttcaaagattagaaaagaaaagaaagctgtaataatcacctttgtttccatcacctagattaaacagtaaacatttaaaaaaa

SEQ ID NO: 171173 - DNA, 952 bp, Homo sapiens
cacgaggtggatttgggctaagactccaggtagcacctgatctagtggttctcaacattgatggcatgttggtgttaactgaagaatcccgaggctcctaaatttgaagaggaaaggttgatttcttatgcagcctgcaggcaattgttctcttaactgaattaattagggaaaacttcaggaacagcaaattaaaacagtgccttttaccaacccttggggagctgatctatcttgtagccacccaggaagaaaaaaaaaagaaccctagagagtgctgggctgttcccttggctgcatacacagtgctaatgaggtgccttcgggaaggggaagagcgtgttgtgaatcacatggcagcaaaaattattgaaaatgtctgtaccaccttttctgctcaggcccagggctttattacaggagaaataggacccattttgtggtacctattcagacactccactgctgattctcttaggataacagcagtatcggccttgtgtagaatcactcgccattctcctactgccttccagaatgttattgaaaaggtgggactgaacccagtaataaactccctggcctctgccatctgcaaagttcagcagtacatgttgaccttattcactgccatgttgtcctgtgggattcatcttcaaagactaatccaagaaaaggtttgacttagattttacctgttactctacattaaaaattgttttcttctgcattttagtggttccacaagtaatgtcatgtttgtagaattcattttttatcccaagaggcctttttgaactttgccaaacctttgtaccacagaatgttcatctgaacatgttccaagagccttttagtgattaaaatagaaattctttaaaggaaaaaaaaaggagatgcgcgcaaccgcgggagcagccaagtggactggactcttttcttgacttagcta

SEQ ID NO: 171174 - DNA, 321 bp, Homo sapiens
ataagaccactgagtgttgttcttgaaaactgatgcagaattagagaatacttaactctctcaagtttgggtacaatttctaagaatctatagtttagtgactcattggcactctaatgactactattccccccccacccactgcctcccaagattcacatgtgaaagaatgcaaattcaattcctcctgacaaagaaatctaaattcatggattttcccagctgtacccttgagcgagaactttcccaaagtgaagagcatggaaaaaaacaattggttttgcatgtttccttgggaatttcaggaggaaatggagctgg

SEQ ID NO: 171175 - DNA, 297 bp, Homo sapiens
tttcagccaaatcccatgcctcagttcctcttcatcttcagttgactgtgagagttaagatgaaggatataggaatttaaggtagtgcagccgccaaggttagcacaggttttgagttcaactctcagctttaccaaccatgtgacactgtgcaagtttaacttttctaagtatctgtttcctcttctgcaaagcagagaaactccttttatttttattactttttttcagagatggggtcttgctctgttgggtggagtgcatggtgcaaacatggcacgctgaagcctcaacctc

SEQ ID NO: 171176 - DNA, 313 bp, Homo sapiens
taccatgtggcattatagcctgttgatgccaagtaaatattaattgatcattcatattgacaggtatttaatactctgcatttcgcagatgctgtgggaaataaaaaggcacaactgatatactgattatcccttctatgatgtccctcttttctgaacttttcaccgtgttgtaattaaaacttgttttctaaagacacaacttcctctgctgccttctctaagggaggctttttacccatatccctgcatactcacattcctcaagacttaaaggctgttcggcagaggttgtcttgtttctcactgctgc

SEQ ID NO: 171177 - DNA, 547 bp, Homo sapiens
gtaagcaggtagatgttctttagagccatgagagtggaaggtagtataaatagaacagaagtggtgcaaggaccaggcttgaggacatagcatctttagaggtcaggaaaatgaaaaaccagaaaaagtgactgtttccctatactgtgtgatgttctgaggtgtgttggtgccacagttagtcttcagctaatgaacacttcgggtttttgtttgcttatttttgttttatttttagagacagggtcttgcccagtcaccccggctggagtgcagtggcgtgatcatagctcactgcagccttgaactcctgggtgcaaggatcctcccaccttagcctcctgagtagctgggactgcaggtagtcatcattatgcccagctatttttatttttttaatttactttttttttagacagaatctcactctgttgcccaggctggagtgcactggcaccatattggctcacaacagcctctgcctcccaggctcaggtgattctcctgcctcagcctcccaagtaactgggattaaaggcacccacca

SEQ ID NO: 171178 - DNA, 759 bp, Homo sapiens
gttttaacttttttaaaaaatgggactttggtgagggaatgaagaggccatcactttcccaggcagatagcctttctgcctccatcctctcctggggttctgcttgaagcctggtagagtcacatccccatgggccttgacactcagaggccatgctctcccaaagctctggctttctaacagccaggggacactcctgcttgggctgagacttgtgcagctctagtaggaatgtccctctgtgcttagaaaacacccaaagcttgccacggcatccaggctgcctactgcacccctcactcagccttctcgggccaccaggtgcccattccatgccaagctttgtctcctcaacaaagttgctctgcttgagccagtgaattctgtctccaggaggctgtgtcatggctttgtcttctacaagctcatgccctggagggaaggacagagtgactctgacatgtcagcccattcagtcattcattcctcaactctaataaatttcctgctgagtgtcaggtactggactggatttggggaatctggtgatgaacacatcagatggggccgggcgcagtggctcacacctgtaatcccagcactttgggaggccgaggcaggaagatcacttgaagccagagttcaggaccagcctggccaacatgctgaaaccccgtctccactaaacataaaaaaattagccaagtgtggtggcgcatgcctgtaatcccagctactcgggaggctgaggcaggagaa

SEQ ID NO: 171179 - DNA, 356 bp, Homo sapiens
aaagtccagcctcctggattagggtatcaggccccagctactaccaggcctctctctgtctagcgtgcacgctcgctctctcgctgtctctctctcgtgtctgccgcctcacaaccgcccttccctctgtctggcctgcacttgctccatcaaccgctgcctgattgctccttaccttcagctctcaagtgaaggagagcaaattatactttacctagggagcaactggatgaaaaggcatgcttagtgggtttgatatttttactgaatagcacatgatggagattcatgaaaattcccccaatgggccaaccaactggaatgtcacgtgagagtagggtttttaggaaaagttt

SEQ ID NO: 171180 - DNA, 491 bp, Homo sapiens
ggaaagagcctaggtctttgttctgctatatcccttgtgggctactataacaaggaaaaattcctgtgtgtaaaaagtcttgtgtcaggcagagttttttacttggactattgaagattttttttctttctttctttgtttttactatataaatactgtgactcttgcaactgatcatgttttcctcttcatattttatgccagaaagccaactacaagcaaaactcttttttgatactaatctcacttctggcactatctgattttcatgcacattttttccttgccttactttttgtttttattttaaatccatatgagatagctatattatgtgcaaccatgtaagctgctctaaatcactttttggataaaggatatccttgataaaaaataaataatggatagccatatttttccctttgggttctagtttggaataatccattatttatctcagaactcagcaagtcagaatcttgctccaagcc

SEQ ID NO: 171181 - DNA, 185 bp, Homo sapiens
gacaagaccctgaaacaaaagaaaaatgacacagagtatttagtattttaaaatagtttacatgggaagagtattaagaagccccatataaacatttttttaaataataggtatggctaggtcaccttgtagaatgtgttgtccagtcaccttcaaacaattcagacagggcagaaagcctacac

SEQ ID NO: 171182 - DNA, 376 bp, Homo sapiens
gctgcaaccactcaactccaaccctgtagtatgtaagcagccacagacaatacataaacagaggcaagctgcattccaataaatattaacaaaattaggcaggggccatatttggcccacaagttctaatcaacccctgctctaaactaacatctttatacaaatccaagtgatgtttttgttcaatggaatttattttcaaaatggagacactggttttcaaaatcaaaatttaggaaaaaaggtaaatcacatagttgagttattttgtttcttagctaaaacagtattttctgaaataccagtgatgctaagtgcttatactagtacatgtgaacctagccatctgatgacagatgaactttaattttcacta

SEQ ID NO: 171183 - DNA, 447 bp, Homo sapiens
aagccctggtggtggcatgacccagtgtatgtctgacaggggcacatatttgaatgaaagccacctcacctccatacagagatgggctgagggaataccaaatatgaagatgggagcagatccagatctactcgtctcagatgaaatgtccagtaagttgtattgcctgtattttgctccagctgaacagttgcactttcaagtaataatagttcaaatttatcaaatgctagcaggagccatgcattgtgttaatggagagagaccatccttattcactcttactcagtaaacagtgggtgaaactgcccttgcctaaatatagttatgtaatgctgtgtttccttaattgtatatccataaagcttttgacattgttttctaaatgtgttcctcaaaaaggagttgggctagtgaccaaagttttgaatagaatattgtaagaaa

SEQ ID NO: 171184 - DNA, 258 bp, Homo sapiens
acggacaaaaagattaaaaaataaacatagagcgggtaggataaaaagaaagcaatgaatcagaggacagatttaagctaaaatgtaacagtcattacatcacatgtacataaactaaatattccagctgaaaaatattgtcagatttgggacaaaaataaccaccataagcagtttatgagagacatattttaaaggcacaggcacagaaaagctgaaagtaagttaagaaagcaattaaccacacaaacactaatc

SEQ ID NO: 171185 - DNA, 201 bp, Homo sapiens
caggatctcaagctttggtcagatacaaagtcatatgttaaagagtgaggcgggtggagaggccttaagaagaacagtaactgcatggagtaatcgttaaatagcatgggagaaacgggcagcaccaacctgcccagtatagcttggaagttcacgcacaggtgtgaagaaggcagtcctggagggttgctgaccaaagat

SEQ ID NO: 171186 - DNA, 495 bp, Homo sapiens
ccttttgccaccagcctagggttagggtctctgtcattttctctcatgctgtgctgtgttgtagctccctgtgagtctccatggtgtagtgaaatgagcaaggctctgctgtaagacaagtctgggctcaagtgctggcctacctcttattggggtgtcctttaccagctttcttacctttctcagcctctgatcaaagctcactgcagcctcaaccttctggggacaagcgagcctcccgcctcagcctcccaaagtgctaggactacaggcataagtgactatgcctggcccaagcctgttttcttatctgtaaaattggaacaacaacaaaaaagtattctttgtagagttgtgtgagaattagagataatgtatgtaaaaaatctggcaccagtaatgaaacacagtaaaactacaaaaggaaagcaagtttttcctctgttttccctacattaaaacataataacattaaatgattattctgactgtatg

SEQ ID NO: 171187 - DNA, 509 bp, Homo sapiens
ctgaggccttcaccagaagcagatgctggtgccgtgcttctacagcctgcagaactgtgagccaaataaagttctttcctttataaattacccagcgtcaggtaagatgtaggggtagaatggtggcccctgcaaaaggtaagccttcctcctaatcctagaatcgtggatggtaccttatttggataaaaaggtctttgcagatgtaattaagaaccttgagatgaggagatcatcctggattatctggtggactgtaaagtcaatgacatgtattcatatatgacagaagagaagacatggagaagaggagggagtagttgtgaccgtggaggcagagaatggagtaatgtgatcataaatcaaggaatgctgacagccactaaagctggagaaggccaaggacagatattcaatcctcccgtagaagtacagccctgctaatgcattgattttggacttctggcctcagaactgtaagagaataaatttctattgttttaagcctt

SEQ ID NO: 171188 - DNA, 804 bp, Homo sapiens
cgaggaggagcctgaggaggaggaagaggaggaggaggacttgatcgatggcttcgccatcgccagcttcgccaccctcgaggccttgcagaaggatgcatctcttcagcccccagagcgactggaacatcggctgaagcattctgggaagcggaaaagggggggctccagtggggccaccggggagccaggggacagctctgatcgagagcctggccggccccctggggatcgggcccgaaaatggcccaataagcggagaagaaaagaggtctccgatgatgacctcgacccatcctttactgtctcaaccagcaaaggttggtcccaaggtctggggctggaggcacgggagggcagtggggtgagcatgagcctcaactgagcatgtctgccatcctgccccacagcctcgggcccccacggcgccttcaatgggaactgtgaagcaaaactctccgtggtccctaaagtgtcgggcctggagcggagccaagaacagcccccggggcccgacccgctgctagtgcctttccccccaaggaaccaccgcctccaccggtccctcggcctcctgtctcaccccctgcacccctgccggccactcccagtctgccacccccaccccagccccagctgcagcttcgggtctcacccttcggcctccgcacttctccatatggcagcagcctggacctcagcactggcaggtgagtggtcttgggggattgatgcggtccggaagggcctggtcagtttggtggcggggacacaggatggtacctgtggggtatgacttgaaaa

SEQ ID NO: 171189 - DNA, 339 bp, Homo sapiens
tgcagagcgagactatagaatacccgcgtgtgtacacgggaagctgaccaaggaatggagggtccatgctttggcatactatcctttccaaagcccttgagctacttctggttctccacggaaacccagagtggctgtggcactgagatgggccttcttcccatcttagaatgaagatctagattcaagtctgagcagagaccgcagatagagtagtgaggacactaaatcattgtagtcagtgtagggactcagcccataaaggtgtatttgagtttatccttaggggcgatttgcttgttgtgagatagtatgtcctagaagttaatgcgctaccca

SEQ ID NO: 171190 - DNA, 802 bp, Homo sapiens
cgaggaggagcctgaggaggaggaagaggaggaggaggacttgatcgatggcttcgccatcgccagcttcgccaccctcgaggccttgcagaaggatgcatctcttcagcccccagagcgactggaacatcggctgaagcattctgggaagcggaaaagggggggctccagtggggccaccggggagccaggggacagctctgatcgagagcctggccggccccctggggatcgggcccgaaaatggcccaataagcggagaagaaaagaggcgtcctcccgtcactctctggaagctggatacatatgtgacgcggaaagtgatctggacgagagggtctccgatgatgacctcgacccatcctttactgtctcaaccagcaaagcctcgggcccccacggcgccttcaatgggaactgtgaagcaaaactctccgtggtccctaaagtgtcgggcctggagcggagccaagaacagcccccggggcccgacccgctgctagtgcctttccccccaaggaacagagagagcgtcgacgctctctctgtggggaggcccaagccaagaagttaggaaacaattgcgttttcgccccagcggacgtgacctcggagaaggatgtgcaaacagctctggctctagcaaaaggaaagtttggccgtgtggatgtagctgtcaactgtgcaggcatcggcggtggtagcaagacgtacaacttaaagaagggcagtaccataccttggaagattccagggagtcttgatgtgaattcatgggcacttcaatgtgatccgctggtgg

SEQ ID NO: 171191 - DNA, 461 bp, Homo sapiens
gagaagctacagaagacaaagatggggagagatgctacagaaacccacatgaggaagccgcttgtgctgcctgggggatgggaggagagttgtggttggggaaagccccctaggatgtcttagtcaggtcctgaagtatagtcagaagtttgctaagaaaagacacggggaaaagttgttttgggcaagagcatgaagacgtgaggacccggcgtatttagagaatggtgagagcactgggacccgggtgggcagtggcgggagaagcagctggaaggagaggctgagagtagatcctggaggcccatgagcgccctgctgggagctgcgactttcccagctgcctcagcagccgcctccctcacctctggactctggtcttcctcaggcgtcctcccgtcactctctggaagctggatacatagtaagtgctatccacctgtcctggcccctccctgctc

SEQ ID NO: 171192 - DNA, 496 bp, Homo sapiens
tgatgcggttggcgtgggtttccaagtgggtaggtagcctggcctgcaggcccaaggttgtatcctccacttcgctccccagggtcctttcccccataccctggttttccttcccccttctccttcctcctccctcaattgcccctcccagctccagctggaaccagcccttctctgtgtctcccaagagtggagggatgtcctggagaaggaatggagtgagaggggccctctcataccctcatacccacacacatcagggataaaacactgtctccgatgatgacctcgacccatcctttactgtctcaaccagcaaagcctcgggcccccacggcgccttcaatgggaactgtgaagcaaaactctccgtggtccctaaagtgtcgggcctggagcggagccaagaacagcccccggggcccgacccgctgctagtgcctttccccccaaggaaatcacccgttctgtattctccaccagctgtgcaccgaca

SEQ ID NO: 171193 - DNA, 835 bp, Homo sapiens
cgaggaggagcctgaggaggaggaagaggaggaggaggacttgatcgatggcttcgccatcgccagcttcgccaccctcgaggccttgcagaaggatgcatctcttcagcccccagagcgactggaacatcggctgaagcattctgggaagcggaaaagggggggctccagtggggccaccggggagccaggggacagctctgatcgagagcctggccggccccctggggatcgggcccgaaaatggcccaataagcggagaagaaaagaggcgtcctcccgtcactctctggaagctggatacatatgtgacgcggaaagtgatctggacgagagggtgagtggggctagagcttgggtgggcagtgtcactgcttgtaaaagggactgcagcataaaggtcttctgcgtgcagcagacagccttcccttgagtgagaaacatggcttaggttgagtcaggattaggtttttgggaggaacgggggtggattgggagggtaaatggcgtcattttttcttttggtgactaggggttagctgaccaaggaatggagggtccatgctttggcatactatcctttccaaagcccttgagctacttctggttctccacggaaacccagagtggctgtggcactgagatgggccttcttcccatcttagaatgaagatctagattcaagtctgagcagagaccgcagatagagtagtgaggacactaaatcattgtagtcagtgtagggactcagcccataaaggtgtatttgagtttatccttaggggcgatttgcttgttgtgagatagtatgtcctagaagttaatgcgctaccca

SEQ ID NO: 171194 - DNA, 439 bp, Homo sapiens
ttgcccaaatcctcatcttacaaatgggaaaatagagggacagagaggagaaaactcttttcaataccccaaggcaggataaacaggaaagaaagaaagaaagaaaaaaaaaactaatttagagaaggagagctggagacaaagttcctaagaaaagaaaaaagtctgtagtgatagcgtcacaagatgtattacctcaggagtctatttgagagattgtgtcatgtcagaaaagttctagggactggagcctctttccttggtaagaggatgagaatgaaacaccagcccctcagtctgactcctggaaaaaagaacctcaggccgatgagcaataactccaacaatgtcatttccctggccatgctgagccccacaggaaatctcagagtttgtcatcacggcaagggcccacaagaatgtcgctgcacccagagct

SEQ ID NO: 171195 - DNA, 366 bp, Homo sapiens
agccagatttcgcgcggagaacgccgccccaatcccagtggccgtgtgtggactgcaaggtggtggcttgggtgagggttccagcagtgaggctggagagaactaaaaggacctggggtagattctgaaggcagagctaacaggacttcttgaccttcatcaatgcctcccctctacagggccaggtatggtggctcacacctctaatctcaacactttgggaggccaaggcgagaggactgcttgaggccaggagttcaatccagcctgggcaacatagtgagaccctgtttcaatttggaaaaaaaacaaacaaaaaaagagacagggcatggtagctcacacccgtaatcccagcacttcggg

SEQ ID NO: 171196 - DNA, 282 bp, Homo sapiens
tgagtaagcacatgcttacaagactaggtgctgatcagtacgctgcagtattcacagcaaccagtgtggcatgtgcagtgctgaaggtttctttctttttctcctatttcctaagttggagttgttattatggttgcttggttttgctcaactgttctggagtgtgttgctatggttacaagatggcaggggttacataggtgggtttggaacggaacaaatgatgggtaaactctgaggttgacagctattaaagtggttttttcatatcatgactcttaa

SEQ ID NO: 171197 - DNA, 156 bp, Homo sapiens
tctcactctgtcgtccaggctagagtggagtggtgctctcatggttccctgcagccccaaattcttgagctcaagcgattctcctacctcagcctcctgagtagctgcttcctgcttctgccgcttcctgcttcctgcttctgcccctcaccaaga

SEQ ID NO: 171198 - DNA, 246 bp, Homo sapiens
tccacaccacgagtgatctgatggagacgaaaaccacgtgacttggaatttggaagagtggaggggacccttaaaatacatgagaatcccactaaatttcaatgtggtaaatatttgactattatagctaatatgttctgcctgtttcaaggacctctcagccaccatctgccagagggcaggtggatggcgtcgctgaacctgaggtaccaagggctggggcaaagtcacgcagaggccactttg

SEQ ID NO: 171199 - DNA, 343 bp, Homo sapiens
tcctaccatataatttaaatatatcattagttatattatggataaaacattatatagtaattattaattttttcacaatggtcaacattctatcctcaaaaaaactgaagagcatgtttaaagatggattttcaaacatcttaatgaattttttgttcagaaaatatttttttaatatatggcaatggttgaaaaaaaacatagaatattgtagttcctcaaattgttaaacacagagttatatgatccagcaattctacttctaggtatatacccaaaagaattgaaaatacatagtcaaatgttcacagcaacattattcttaatagccaaaaagtggaaa

SEQ ID NO: 171200 - DNA, 395 bp, Homo sapiens
ccatcagctcctttattcactctgctactgttttcgtcactgtttcactgttcattaacacctccaggagagggtgagctgagtcaggacacctttgtggaattcaatcatttaagttatcaggacttatgaaatacatggatttaaaagaaggagaacatagatatgaaagatattgtttagagtcggcctcaggagtttaaagataccaattatttatgctatctattcctgtcatgccatctataatagagtccctaagtgtctccattccacttcattattgttagccaactttgagtataaactcccaaaaatatcatattatttttgtggtttcattaatagaaaattcagtttcagaaggtgcaaaagtcatgaaacccatctaagca

SEQ ID NO: 171201 - DNA, 784 bp, Homo sapiens
gactgggaaggaaccgcgcttggagtccagacatctggaatacggaagaggaagagacaccaggagtactcattcaagaaaaggccatgtaaggacacagggagaaggcggccatctccaagccaggaaaagaagtctcactgaaaaccagctctgttagcaccttgatctgggacttctcgcctccagaatagatcccttatgcaccgctttagatttttatagccttttatagccctaatgctgcatcagccagccctgcctgggctccagccagatgtcaagtaggttccatgtatcaacagcctctcccgggcactactttatgactcttctctcagaccacggaacttcctagttgacagaaacaagaatgtgactggaacccagcatgtgtaacctgaaagtacagggaagtggatgtggtgttgctaaaaagtttgattggtgggatgggagccagtgtataaatgttttccctttctccctcaagtgcttggacctgtgttatctcagaaaatcctgtggccaactcagtaacacatccctgctttactctcttctctcttattcctgaccccttgaactgctccaggactccagtaaaatattcttaacacgaaaaaaaaaaaaaaaaaaaaaaaattggggggggtggccggaaagtttaaaaacaatgtgtggcgggggcacaaggagaaatggttgtgcggtccagagaacgggtaaaaagggggtttacacaaaaaagcggggagcgggttggaaaacagggtgggaaggc

SEQ ID NO: 171202 - DNA, 576 bp, Homo sapiens
gttatgagaggcctccacgtggttgcccctggagtgctgctcctccttttgatctaactgggttcaccaccacatccatgctggagccagtagggaggggaagatgcacctttccttttaaggatatgacccagaagttgcactgccacatcactaccactgctatcgcattggccagagttagccatgacggtacctagctgcaagggatgctggtaaatgtagtctttactttgggtatccatgaacctagttaaaagttgaggttctattaccatgagagggaagagagaacagatactgggaagtcaccagccattgtttcacaaagggctgaggcatagccaaacacatttccagttggcaggtgaaggttcagcctgggacagggaagcgaacagacagaactaaagaaatagatttgtgagtaccaatctgctgaaaccataagcctaagcttttctctggggaaaaggactgtgttgatctgagtcaacagataggagtagtcatgcttgagacttattggggcaatgactacaagggaaaatgggaaggcgctcaggagacagtggg

SEQ ID NO: 171203 - DNA, 378 bp, Homo sapiens
accttcagaacaatgttaactagtagtgaacgtttcctgacttcagtggaaatgcctataatatttctgaactaagatgctggctttggacacagataatttcatgatgttaaggaagcatccatccatacttactttcttaagaatttttattaggaatggttgttgatttttttttttttttttttttggaaaggggttctaattgttccccccagcaagaagtccagggtaaaaatttgggttaattgaaactttggcttcggggcccaaaggattttttttttttaagcttccaagggggttgaaaagggcttccggggaggcttttaacagtttttaaggggcttaaaccaggaaatggttttaaccccaggg

SEQ ID NO: 171204 - DNA, 484 bp, Homo sapiens
gtagtgaggggtacctgtcccaggacaaatgatgacaagcagagagccaggccattaactgacccggtaagagaccccagggtggtatgatatcatgtgatagtttgaaatctcttccattgtccctggtcttcagtaaagccacattaacattttctagttgggtgtcagctgcattgagaggaacaaaaaaagcctccttgcttagagccaagcaaggcaggggataagagcatcccttccctcgtggccaggatctgaggttatagtggctatggctggtgagagatagcctaccccaatagggtgatctcacagcaccaagggtgatggtggcagtgcaaggagactggttgaaaaaaagtcaacaggattttcctgagccaacattacgagggactttgagatggtcttggaaataagtggaccctttgagacagtctcctttctgtgattgtgagtagcaaacaggttcataagatta

SEQ ID NO: 171205 - DNA, 604 bp, Homo sapiens
atagtctagtagcaaaatacttacagagcctaccacgtgccatttactctgcttgatgcttttgtatgaatcatcttatttacagaccaattacattttaaagcagatattattgtcactctttcataaatgatgcagctgccttggcagagagagatccaataaattacctaagatcacatcacactgagagatgggcctcaggtctgagcctaggactcccctcacagtgcgtgctgttttcgttatactgcatttctcttctctgcagaataatggagatggaagtgtcttacaggtcccctctaccttcctatggttatgattatatagtgctaccataccagtgagataacttattctcatagctttgagaatgtgtggttagaatgtgttcaaaaaagagtagtacagtattataaatgaatatcctaatcacttcccctaaagtgagaataaattctctttatttttactatttagctaaaagaccagcctttcgccagtcagtagtaaatattgaaactatctataccatggtggctactgtacagaatcaaaagaaatgaaacatataacttccatcctctagaattctatagtg

SEQ ID NO: 171206 - DNA, 183 bp, Homo sapiens
aatgaagagttaagcatccaacattcaaagtggattaataatttagtagcattcacaaaatcaatgtgttttggcaagtaacttgagaatgttcatgctgcattaggttagtgtttctatgtttgtattgtagcaaataatgcttgaatgagtacagctttcttccttccttccctcctatta

SEQ ID NO: 171207 - DNA, 677 bp, Homo sapiens
tagagatgggagtctcactatggtgccaaggctggtagtgaaccacctcacccagcccaggaggctgagaagtccaaaataaggcactggcagattcagtatctggtaagggccagcttctagacatctgtctttttgctgtaacctcatgtggaagaaagagctaacaagctgtctggagtcttttttttttttttgagacagagtctcactctgtcgcccaggctggagtgcaagcttgtaccctgttttcctttttcacttatatagaagtaaatggcatctattaagagttaaagaggaagaaggaatatgagacaacagaaaaatgcaattaataagatgattgccaagaagtaggaggggcctatttggaattgttcagcgtaaatttatagtggccaagaaatcttcataattactcaccttcctccacaaatatgctgtgacctgtgagggaaaacagaagaaatcgatggtggaaaaatctgacaacaggagtccagtaaaatataaaataagtgattgatgtcaaagtgcagactgtatctagtgcatacaggagttaagctaaacgtctcagactgtttgggttgctgtaacaaaataccataaactggtaacccttgtgccgaattcttgccttcagggccaaattccttatagggagtcgtttt

SEQ ID NO: 171208 - DNA, 167 bp, Homo sapiens
gtttattaagacgaatctggccccatcgtagtgtgggttaaaaaggtaagcagttttgctttgaagaattattttaaaaattctttttgcctagtaataatttgaattttcacatgtcatagcagcaaagattgttgagatttagtaatgccagtattaaccatacc

SEQ ID NO: 171209 - DNA, 403 bp, Homo sapiens
tacttccattcatttatgtccttttgtccagaaagtcaagcatttatgacgttatttgaatacaacagggtatgcatttactctttaacacttttgatcaatgtggtaaatttactttaaaatgtacttttgggatatatttgaagtcagaattgctttaaaattggaccacataaattttcccaatgctgagaaccacctcttgcatgtcagatttctatagaatatttcagatgactgccctgcgattcgtatcaccacttacttaataatctgctcaaacttggactacagtcatagttgtaagaccttaagaaaggagatattttctcatttagtatttttttgttaaaatgcctttggattttaatgaaaatactgacaactgtactttgctggttaa

SEQ ID NO: 171210 - DNA, 362 bp, Homo sapiens
ttcttggatactaactttataattatttctttttaagagaagagttccttttattttattttatttgagacagagtctcactctgttgcccaggctggagtgcagtggcaagatcatggctcactgcagcctccacctactgggctcaattgatcctcatgcctcagcctcccctatggctgggactacaggcatgcaccaccactcccagataatatttaacattttcagtagagacagttctcattatgttgtccaggctggtctcaaaccaggcatgagccactgtgcccagctgagatttatactttaaatttacacattccactatagagaaatacaccaacaccatagagagcttg

SEQ ID NO: 171211 - DNA, 600 bp, Homo sapiens
tgcagactctcaggctgagccccgcacgctccgtgcccgtttgcagacaccctctcaggctgaaccctgcacgctccatgcccgtttgcagacattctcaggctgagccccgcacgctccgtgcccgtttgcagactctctctcaggctgagccccgcacgctctgtgcccgtttgcagacaccctctcaggctgagcctgacatgctccgtgcccgtttgcagacactctctcagactgtttaggaaatccttctcttttcttatcacagagctacccatgctttcttttcaaaggttcagctttgctttctagtccgagatcttgactccgtccggcatcgtgtgtgtgctgtgagcagcccccagctgacctgccccacaggcgcctcctgcccccccgagtgtgtccaggcctcttctaagcccctgcaaaacccctgggactggtttccattcctggaccggttccagttcaatccctgtagttttataaatcataatatccagtaggcaatttctccccttttcaaagctatcttggcaattcttggtgccttcctgtcctcctgtgttgacttcacaacacatcaagcaccct

SEQ ID NO: 171212 - DNA, 261 bp, Homo sapiens
gtccactcgggagagcatctttaattgcacctggaacagcagcgacatcatgcagctgaagcagcaacagtggtgatcaccatgggctgtagaacatgctctttcctagttttctgacttctatgagcttgattcttaggtgatgggaaggagaaggaagcccttttgatgtgtgatagtggacttctcatccatcctgaagagtaaaggctgagagccagattcaactgtatttggaaataataaagtaaggtgacaact

SEQ ID NO: 171213 - DNA, 552 bp, Homo sapiens
tcatcttggataatcactggctcccccagcatcttaactgggcaccagctaagccactgtgctgcctaaatggacaaccacttctcagttctggaattcttcaaacacctagggttaggagggtcttcgctttggcagttagagttttctcaattcttttatgacacaggttgcaccggactcactcaactatggagatcagatgtcctcaggaaaaaaaaaaaaaaaaaaaaaaatacacacttaaggctgttcccgtggctcctctctcttcctgacacattccaaaaaggaatttatggatgttgggaaggacaaagggtgaggaatttctaggacatttaagaacgcccatgtaagcaactctatgcttgacaggccatgcacaataaaactcttgggcctgtaagcgagaagaaaaatttggtgtaagctgcctcatgggttgccaaaatgatgtggaaacaaattcatctgcatttctaaacaataggaattctccttgtcctcccaaacctagaatatttcatgtatgtgcttaagtcacaagat

SEQ ID NO: 171214 - DNA, 865 bp, Homo sapiens
gggtgaatgccattagggtccggccatcgctggcttcactctcctttagcaccttgtagatgtccatgcacacttccaccctcgcgccccacacgcgacgcagccctaccctggccagcagctgtgctttgctgcgggttccatgctgtagcagggacaggacccccaccccctgtcccgtctggccaccgacttcagcagaggctcggctgccgtgagggataccagtcatgggaaaactggcctccctgcagattcacagagcaaggtggttctcacagagaagtcagtggcttttttctacgttaatgctgtagcaaacgccaccttttctttcaccaccaatttatatttcttaacacccatggagcaaagtgtggtgatgtttgaactgtagcctggggctctcgctcccatgggactcctcggggaatttcccagcagcaggatcgcctctgtgtccttgcagggggtggcgtctgctgggggcacatcccatcgtgcagggggaacggctgaggtcacaggctttgcctgacaagtgccactcacagctgctgtccacgtgccagccctgggacacagccctctgccatccttccacccactcggaggccagggaggcacctccgtgccacactgcaggcaggcagggccgcgcttgggatctgccgccttcttgtcagtgctgctttgactaattgcctgaggcacggccggagtgacttgctatttttagaagctaattcaggcttcagatgccatctaggtaatgaggagagagttcaggaaagctgtatctaagctccagcaaaggcggcctcttccgtaccagctgtcgctgcgtttacactgagacgagcac

SEQ ID NO: 171215 - DNA, 1178 bp, Homo sapiens
gagtgcagtggcgcaatctcggctcactgcaagctccgcctcctgggttcacaccgttctccttcctcagtgtcctgagtagctgggactacagatgcctgctaccatggctggctaaatttttgtatttttagtagagacggggtttctccatgttagccaggatagtctcgatctgacctcgtgatccacctgcctcaatttaagtagtcgtgtgtggcttatacctactgtattgaacagtatctaggcaatcaacttgttagccacttttctccatttgtactgttcttgtccctaaacgagctctcatgatttctggcccatctcagtcaactgcagtggctgcctagctggtcttctaaattccactcctgagctgtagcctactaaacaaaaattgaaagtgatcttttaaaaatattagcttgagccaaatcaacttgcttatggaatatattgtccttttttttgagactgggtcttgccgtgtcacccagactggagtgcagtggcatgatcagagctgactgtagcctcaacctcctgggctcaagcaagccatcctcccacttcagtttctgggactgcaggcgcataccaccatgcctggctaatttttgtgtttgttttagagacggggttttgccatattgccaaactggtcttgaacttctgggcttaaacaatcctccttcagccttccaaagtactgggattacaagtatgaatcactgtgcctggctatatttgtcatttatttatttattttttgagaccagctcactcctgggcttaagtgatcctcctgcttcagcctcccaagtgctgggattacaggtgtgaatcactgtgtctggctgtatttgtcatttatttatttatttttgagaccaggtcttgctctgtcacccaggctggagtgcagtgatgcaatcatggctcactgcagccttgacttcccgggttccagcagtcctcccaccttagcctccttagtagctgggatcacaggtgtgtgccacatgcccagctaatttttgtatttttggtagagacagggtttcctcatgttgcccaggctggtcttgaactcctgagttcaagcaatccacctgcctcggcttcccaaagtggtggtattacaggtgtgagccagtgcacctggcccatattta

SEQ ID NO: 171216 - DNA, 501 bp, Homo sapiens
caccaacagaacaacaaaagacatgaataatgtaaaggaaaataaataggccaataagcataatgaaatacaattcagccaggcacactggctaagaggtgaaggtggaagaatcacttgagcccagaagctcatggccagcctgagcaacatggcaagacttcatctttaaaactaaaataaaatcgaaaaataaaaagtaatacaattcaaaacaatcatgaaatagtgttaaaaataaaaaccatatgactgtctcaatagacatgaaaaagcattcaataaaatccagcatctcttcatgataaaagccctcaacaaactaggcatcaaaacaatatccccaaaataacaagagccatctatgataaatccacaactaacatcatgctgaaagggcaaaagctagaggcattcaccttgaaattagaaaaagacaaggatgctcactctaaccactcctattcaacatagtactggtagtcccagccagagcaatca

SEQ ID NO: 171217 - DNA, 380 bp, Homo sapiens
gggtaagggggccgcagtcctgtaagatctccccttggtgccctcggcaggggtgcactgtcctgtaggatggtggggtgtgggtgagggtggctgcagtcccgctgttctccttgagtgggatcctgggctctctcccagcccttgccacccagaaaaccagacagcagcctggagccacttgtttgctggctgtggtccggcatcttggcagttctgttacccactctgctgcctcaatcctgcagacatcacttgacgtttctggcataaactttgcctgaaaacatacatttaaagatgatggcttaacctattcttgtgttgtttttttttaaattatactttaagttttagggtacatgtgcacaatgtgcagg

SEQ ID NO: 171218 - DNA, 583 bp, Homo sapiens
aatagatatagtgccaaatattggttccaaaatcatttttcataaaataaatcagggttccttagagaaatggctggttccagggccgaggctagtgaaatactagatgagccaggaacatcttactatgttgtcaaaaaggaagaaagtgctcaaagaaagatggaagatgtcaaatggacacaggaaccagttataaagagattcccattggccattctcttcataggggtgaaagaaagttcttccttatcataggatgttaacacgtgtagaggaaatatggaattagaaaatcaccactggggaaacaccattctaataactgttactacagatgctgaaactagggagtgaaagtgtaatgggaaacaagatgtttataaagactcaaagtatctcatccacaagatacttttaattaccaaggaaaaaaataacaattttatagcaggaaaatgtggcagataccgttttagccaactgattaaagttaacatcattatcaatataggctgtaatgtgcctcctgatatgatgcactgacagaaacccaacacttctaccctattccttccaaaaa

SEQ ID NO: 171219 - DNA, 790 bp, Homo sapiens
  misc_feature (17)..(17): n is a, c, g, or t
gcggtgttctagaggancccgtctgccacttttccaagggaggtgacaatggggtccaaagtgtctgtgcctttatggctcgcaactatgtgctgagtgtggcccaatattcctgctccaaatggtcacaccatgtctacagcaaatcagctgaccggggtggcaacccctggctctgctcaacaataatgacaaccaccatttattgagcccttactatgtgccagaccgatgctaagtgctttcctcagatgtttccatttaactcttaaaatcaccctaatgagtatttcctattattttacagatgaggaaatgagagtttagaaaagtaacttgcaaaatcatactgctggctccatgacaaatgttgattgaatgttgtctgggcggacagaggcaaggatgaccggaacaagacaaacaaacgaaaggccgactgacagaccactcgggtagcactttttctgggattaagcttagaccttgtaggcctatcagccagaagcagtgtgtaaaataagagcagctgactgggcacggtggctcacgcctgtaatcccggcactttgggaggccaaggcaggcggatcacgaggtcaggagatcgagaccatcctggctaacgcggtgaaaccccatctctactacaaatacaaaaatatccagctgggcgttgtggcgggatacctgtagtcgcagctactcgcgtggcttgaagcacagaatgccttcacccggaagtgaacttgaatgactgaatcagccatgatcaactggaacaacagac

SEQ ID NO: 171220 - DNA, 387 bp, Homo sapiens
ttgtacttaggaacactggacagaaccccagaactatgcttgggtgccattttaaacagaaaaagcacaaaaattaaaacaaaaaaagacactaaatagaccacaaaaagggttcttgtttacctgttcaactatgcagctggcaagcaaaacaacatgaaacaagaagtatgggaactgaaacaagaaggcaaagtaacacctttttcaactccagctgggaaaaaggaaatcagaagactcaaatttctaccactctgtacatttgagaatgatggcaaaagtgctgagagcattgatttgggggttacaaataaattttagggagtagatggattcacagatatggaatccatgatcagtgaggattgtactgaccaagaaaaa

SEQ ID NO: 171221 - DNA, 727 bp, Homo sapiens
gcaggtgtaagccaacatgcctggctatttaattttttttttttcaagacagagactcactttgtcacccaggatggagtgtagtggcacaaacttggctcactgcaacctctgccacccggattcaagtgattctcctgcctcagcctccggaatagctgggattacaggttcctgccactacgcctggctaatttttttttttttttgtatttttagtagagatggggtttcaccatgttggccaggctggtcttgaactcctgacctcaggtgatctgcccacctcagcctcccaaagtgctgggattataggcatgagccaccacgcctggcctatttaatttttttaagtaacatcaaatgataacacaattaaacagttagtctaaaatgatttatccagccatgaaaagatatggaggaagcttgaatgcctattactaagtgaaggaagctgatctgaaaaggctacatactgtctgactccaactatatgacattctagaaaaggcaaaactttggagacagcagaaggatcattgattgtcaaggattatgtgtgtttgtgtgtgggggtgtggaaaaagcagagcacagacaacttttagggcaatgaaattactgtattataactatatactataatggttaacacgtgtcattaaacatttgtccaaacttatagaatgtgcaacaccgagagtgaactctaatgtaagccacg

SEQ ID NO: 171222 - DNA, 397 bp, Homo sapiens
atgaaacacaaaaaagaatactgtaaggaaagaaaattacaggcaatatccccgatgaacatatgtgcaaaaatcttcaacaaaatactaggaaacggaatccaacagaacattaaaaggatcattcgccatgatcaagtgggaattgtcccaggaatgcaaggatagttcaacatacacaaataaataaataaaaggataaatggatgataaaaatgtgtgtatccatatgtgtgtgtctgtgttatacacacatttttatattatatatatatatacactcacatatacacattgtgtgtgtgtgtgtctgtgtcttatatacagacacacacacacaatggaatattattcagccttaataaagaaggaaaccctgcctttgcatcaacatgga

SEQ ID NO: 171223 - DNA, 413 bp, Homo sapiens
gagatggagtctcgctctgtcgcccaggctggagtgcaatggtacgatctcagctcactgcaagctctgcctcccgggttcaaacaattctcctgcctcagcctcctgagtagctgggactacaggggcccgccaccatgtcaggttaatttttgtatttttggtagagacggggattcaccatattggccaggctggcctcgaactcctgacctcaactgatccacccaccttggcctcccaaagtgctgggatgacaggcatgagccaccatgcccggccagaaccttgtcagttctatctctaaaacataactcaaacccaggcacttgtctcccgttccactgcatgcatctctgtccagacagccaccatctccctcccaggccaccgcccaggccctgctccacgcc

SEQ ID NO: 171224 - DNA, 169 bp, Homo sapiens
cgaagacttttataaacagaagtagcttctttcctggacatcatttacatgtagttttatgaaaaaaatattgtaattaaatggttagcttactgaatatataaaagtcttcgaaaatttggcaaggaatttaaaaccattcttttaaaaatcaatcctatcaatatat

SEQ ID NO: 171225 - DNA, 385 bp, Homo sapiens
ccgagcctcagtgtcctctatcaaaggtgattccacccgcctcatccacccagaccactgccagtcttggtggtgagggagactgagtgaagacggtctgcttgtcaccagtcaaaggccaaccaggagaggcctaaagactagtttggaaggtgaaaaaaagaaagaaaaggtgacagaaagccagggatgcctgggcacaccctagactcagggagcccaaggcaggctgccttctctgcagcaaagctcaatgcccgttagcttgaggatacctccagcagcagcacccaggtcagcgtgcaagggcttgagggaatgaaggatactctaggcctctgcccgggccctacctggaaacaggcaaagcccatccacacaggag

SEQ ID NO: 171226 - DNA, 225 bp, Homo sapiens
ttttccgtcgggagaagctaaagaggtgagattcaataaatccgcaagaataatataatttctggttttctaaacatcactgaatcttcacacaaagggctggcaaagagtgtcactcacgtggagcccagtcccctctatggctgctgttcccgctaacaggtagccagggcggatgtcccaggtgacttgccacccacgtgccgtctgccagatggctccgtc

SEQ ID NO: 171227 - DNA, 148 bp, Homo sapiens
accgattagaattcagccttatgcaatcttcccaccactccaatcattcctccattcccctgtttggcccatgagacaaacacagacggtgtctccttgtgaataatatttattctgctgctgactgttctcctctaattcaacacca

SEQ ID NO: 171228 - DNA, 168 bp, Homo sapiens
aaagggcaccctttaccacttctccctgtgcacccatgagaatttcatttctctagggcaggtaaagaattgcacctgcaggctgattgagtgcgcacttttccttttaacattaataggctccgacaacctctccaccaccaccacaacgcggcacatttacatcaa

SEQ ID NO: 171229 - DNA, 214 bp, Homo sapiens
agggagggatggagattctgcaagcacgtgctccggagccttgagtttcaaatcctgagtcgtccaggtaaaagtatgtgcatctattaccaaccaggtggatgtctaaaatacatccctcgacagccagtcaccgggttctgcccacccctgctccaaagccaaagtcccagcaccctcggcccctctgacttgggtcatcccccagctccca

SEQ ID NO: 171230 - DNA, 428 bp, Homo sapiens
cagaagttgagaaatgaaaaataagacaagggcaggaagtatgatcttaaatgtaattgcaggaaagtccacctgtcattgagaagctagtacttgcgtgaagaactgtgaaagacgaggaggggagccagttgggttctgggaggagattgttcaggcagagggcacagtaaatgcagagcactgaagcggcggcgtggccgaagcggcggcatggggggtagagtgaggaggctgctgtggctggcaaaggaagtagcaggaggtgacctgaagggtcaccgtcacagcaggaccttgtcagccagtatgaagactgtggcttttactctatgggaagttgtttaagagttttgagctaggggccccataaaacctgccttagggtttaagaagctgcttctgtctgcactgtgaagaagagactt

SEQ ID NO: 171231 - DNA, 407 bp, Homo sapiens
aaccaatctaagtccactttctaatgacacaatgccatttaaggagtagtgtgactactgtataaaaacaaaatagtcataattctttcctcctgtcttatgtgttattgctgtcatttgtttcacttattcataagcttatgcatatttacatgtatatgcttatgtatatatattcacctaagtatgcataattaaatactttgctgccattattattttgaacaaactcttatctattacatcaagaataagaaaaatagaagtttttgttttacctttagttactcattctctgacattcttcctttacgtagtttctgaaactatatcattttccttctttctgatacatttctttttttattaattgcaaggcagttctgccaaccaattctctcaatttt

SEQ ID NO: 171232 - DNA, 962 bp, Homo sapiens
  misc_feature (955)..(955): n is a, c, g, or t
gcacccatctttctcagtgactacaaactagcccagcaccaagcggcacgtgaattgtttcacctgcaccccatgactggacagctgcaataccaggggcctgaggcgggcacggcatagcccaagtcgccttatgcatgatcctgtcctggtacacatgtttagaagggagattgccacctgcagaattccagttttcctctcaaaaatctacatattcaggcagggtgcgatggctcacccctgtaattccagcactttgggaggccaggctggtctcgaactcctgacctcaggtgatccgcccacctcggcctcctaataaacactttttaagagcaccttccaagtgacaggcaagtgttctaggcactgggcagacagccctggacgaagcagacaagacgcatctgccccgtggggtcactctagcaaggcatcaggaagtgctcagaagcataacccagccaggggcacttccaggagcaggttcattgacagaaagtggacagttcagcttcatgcatctcctcattgcgcctctcggctcccagagccccaccatgggcccttactggctctagtccgccctgtcccctagacggtgcgcggcggcggtggccttggcgacttcttaccgttcggcgcgagcgcgggacgccgtcaccccaagcaagacgacgggggtcgggctgcggcgtctcggtgccttccgtctcggtgcgacaatccggatctcggtgaacacaacggatcactcctctgaaggggtttcagtcaccccagcttccatggaggaccggggggggcctggcgatggaaacgggcggaggtacggaggcccgcccagggggcggcgagagatgaaaccaccggaaaacgggggcggccaagctgggcccccgtgggcggggggaaaccggggggaaaaaaaacaagggggaagacactaagncattata

SEQ ID NO: 171233 - DNA, 1281 bp, Homo sapiens
  misc_feature (807)..(807): n is a, c, g, or t
  misc_feature (857)..(857): n is a, c, g, or t
  misc_feature (903)..(903): n is a, c, g, or t
  misc_feature (974)..(974): n is a, c, g, or t
  misc_feature (1017)..(1017): n is a, c, g, or t
  misc_feature (1023)..(1023): n is a, c, g, or t
  misc_feature (1037)..(1037): n is a, c, g, or t
  misc_feature (1041)..(1041): n is a, c, g, or t
  misc_feature (1050)..(1050): n is a, c, g, or t
  misc_feature (1092)..(1093): n is a, c, g, or t
  misc_feature (1101)..(1101): n is a, c, g, or t
  misc_feature (1123)..(1123): n is a, c, g, or t
  misc_feature (1126)..(1128): n is a, c, g, or t
  misc_feature (1134)..(1134): n is a, c, g, or t
  misc_feature (1158)..(1158): n is a, c, g, or t
  misc_feature (1160)..(1161): n is a, c, g, or t
  misc_feature (1170)..(1170): n is a, c, g, or t
  misc_feature (1177)..(1177): n is a, c, g, or t
  misc_feature (1202)..(1202): n is a, c, g, or t
  misc_feature (1246)..(1246): n is a, c, g, or t
acggagtcttgctctgtcacccaggctggagcgcagtggcacagtcttggctcactgcaatctccgcctcccgggttcatgccgttctcctgcctcggcctcctcagtggctgggattgcgggtgcccgccaccacgcccggctgatttttttgtattttttagtggagacagggtttcaccgtgttggccaggatggtctcgatctcctgaccctgtgatctgcctgcctcggcctcccaaagtgctgggattacaggcgtgagtcaccacgcctggccaattatttgtatttttggtagagatggggtttcactatgttggccgggctggtcttgaactcctgacctggtgatccacctgcctcggcctcccaacgtgctgggattacaggtgtgagccactgcgcctggcgtagacaacccaatttttaacaaaagcaaagatttttaacaggcacattccagaagagggcatgctgacagttaacaggcacatgggaaaagtggtcaaacatgagtagccatcaggaaaatcaacgacgtcctactacactaaaatggaagaaacattgccagacgtggccatttgcaaatgtcgtttcctggtctgtgtcttttgattctcctgacagcatatttgagttaattttttaatgtgtaaggtatgagtggaggtcctcattaaaaattgtttaggctggctgtatggctcatgcctgtaatcacagcactttgagaggctgaagtgggaggatcatttgagcccaggagtttgagaccggctgggctaacatggcgagaccccntctctacaaaaaataagaaaattagctgggtgtggcaccacgcatctgtngtctcagttgtacaggaggctgaggccagaggatcacttgagcccnggagattgaggctgcagtgagccatgattgcagtaagatgtgatcacatccagttacatttgattttcagntaaacaacagaagtttagtggaggctgggggcagtggctcacngctgtnatcccagcactttnggangctgaggcnggtggatcacctgaggtcaggagttcgagaccagcctggccnntatgatgnaaccgtgtctctactaaaaatncannnaaattngccgggcgtggtggcgggcgcctntnntcccagctnctcaganggctgaggcaggagaatcgcttgancccgggagacggaggttgcagtgagccaagattgtgctgctgcnctccagcctgggtgataagagtgaaactccatctc

SEQ ID NO: 171234 - DNA, 754 bp, Homo sapiens
ctcatttaatcctcctaacaacatcatgaaattggttacgatattattctcattttttttgttgtttttttgagatggtggctcacgcctgtaatcccagcactttgggaggccaaggcgggcggatcacctgaggtcgggagttcgagaccagcctgaccaacatggagaaaccccatctctactaaaaatacaaaattagctaggtgtggtggcgcattcctgtaatcccagctacttgtgaggctgaggcatgagaatctggtcaaaactccatctcaaaaaaaaaaaaaaaaaagtataagcattcttttacctattatgaaaatgggaagaaaataatcaaccagggttgatatgcccaagagcatgccttgaatgtatcagctaccccaaattcccttttttgactgtttgagtgcccaaagaagataagaaatccgaagtttatttactgctctataagttaacattgaaggagataggaggaaagaacacttttctacaaactggatataggtagaatgctataagcttagctgaaacacttatgccatctatggaatgaggacccattagattatttgacctacctcctctgtgaagatcacatgagaggaagtgtgtgaagccctacatgagtataaggtagatggagaggccaggcacagtggctcatacctgttatcccagcactttggatctcgagcccaggagtttgagaccagcctgtgcaacatggcaaaatcccgtc

SEQ ID NO: 171235 - DNA, 437 bp, Homo sapiens
cttttgttgcaatcgcttttggtgtctttgtcatgaaatctgcccattcctgtgtccaggatggtactgcttaggttgtcttccagggttttcatagttttacgtttaagtctttaacgcatcttgagttgatttttgtatatgatgtaaaggaggggtactatgtagcttcagtcttctgcttatggctagccagttatcccagaaccacttactgaatagggagtcttttccccattgcttgtttttgtcagctttgtcaaagatcaggttatcataggtgtgtggcctacgattttaaaacccctgatttttaaaataggctctctgttctgttctattggtttatgtccctgtttttgtaccagcaccatgctgttttaattactgtagccctgtagtatagtttgaagtcagctttgttctctttgcttagg

SEQ ID NO: 171236 - DNA, 245 bp, Homo sapiens
tcagaaatgctctaagactcccttttacccctaccatctgccaacttctgtcaacacaaactgctaagaaagggaacctatttttcagcctagtattcttactatggcagagatagagaaaagtcatgcacatattacataagattgtcaagatctgccagggattcaccctctgcctctgagcaagactgtttctaacacgaataggaagactaccagagaagggagagagaaatctgtttcct

SEQ ID NO: 171237 - DNA, 172 bp, Homo sapiens
ctagtggccaccttcattggactgggaagacagagaagtagaaacagaccaaaatcttcatgcttgggacctttgataatttagcttcacccaatcaagaaatgaggcccaatggctgtcattaacagtcaggcaacatgtccaatccacacggagaatattaagagacgga

SEQ ID NO: 171238 - DNA, 300 bp, Homo sapiens
aggcactttgcacttcacctgctgaaaacgtggtagtcataaacacgctggtagctcaatcgtcccacctatctttactatgttattcattcctagcagtggggcctgggtcaaaagttctgcagggttttaaggctttggatcagtggttcgggattgtcctctgggacgggctgagaagcacacatgcctgccggtggtgacaagcattccttcctagtgcagagtcaggtctgcacctggcaccccctacccatccaggttgggtccctggcattcagttatgtggaacagaccaga

SEQ ID NO: 171239 - DNA, 440 bp, Homo sapiens
agcactttaggaggctgaggtgggagatttgcttgagcctaggaatttgaggccagcgtgggcaacatagcgagaccctcatctatatatatattttaatgttttttaattagctgggtgtgatgatgtgcacctatagtcatggctactctggagaattgcttgagcccaggagttcgaggttacagtgagctgtgattgtgccagcctgggtgacagaccaagaccctgtctctaaaaataaaaaaaaaattttaaagactatataaatattacaaggccaaatttacattctgtttcttgtacagttttgtgtgggaactctctagagtttttttaatttttcccccttttttgtttcccttaggttcttcttttttcccttctttcattgcctacctgtactgtagcctaaaagtcttatcactctgtgctttgaa

SEQ ID NO: 171240 - DNA, 411 bp, Homo sapiens
cgtgggccatagacaaaacattcctataatccgatttcaaaggaaagtgtccaccttatttaaaccataaaacaattaagcccagacgtctagccagctccgcgctgctgttttgttcggccccattgagaacccagaacagggagacaaacagcgccataaaagtggcatttcggggctgcggaaatgtacctatccgctgccttctcaagtggaacaatctttagggttttgtgattctgacaaaggagcagaggagaggtgggaggggaagattaggggaagagggcgtttgctagcccctctctacccccagctttcatttctttccccagatgcgtgttgtgttgttaattcgtaaatgatagcgaataaaaaatgattccaatcctgacctgcaggctgggctgg

SEQ ID NO: 171241 - DNA, 342 bp, Homo sapiens
agatggacagtgcccccctagccttttttactggaacagatccaaggctgagaagctgaaatcaggagcagcccatgggcccactgtctacaccgagggagtcatgagcagcccatggaccactgtctacacccagggagtcaggagcagcccggggactgctgtctacaccgagggtgtcaggagcagcccagggaccactgtctacactgagagcgtcaggagcagcccagggaccgccgtccacaccaagagcgccaaggagcagcccagggaccgccgtccacaccgagggcgccaaggagcagatagtagcccagagacccaggggaggctcacctt

SEQ ID NO: 171242 - DNA, 649 bp, Homo sapiens
tatatccgaggaaactaaggctcagagaagttaaataacttacacagcactgattttaccgagacctggctgaacaccccttattttttctctatctgttagggacacttacagaatcttggggatctttgtgaagccctctctgtcttatgtgtaattattaaatctattccttttgtactttttgtactgatgtaaccctgattgattactgtagtgttcacttcctaataagtttccccgcttctgctctgtttatcaataaagctattctactgctatgagatgacttttctctaaatacttcttttttcatgtcagcttattgatctaaagtcttcaattaatgattgttagccagattttcttaatttgacttttaagtttctctgtaaattaatcctagtctattattctaaacttactttgttttacttgccagcatcaagtgtgtatttcacccagaatgatcttctagtctgtgaatataccatgtaaactttgttctgtgtcatttgtcctaaatcctgatcatcttttaatgtacaattcaacttctgcctcttagacactttactttttaattccgtctaaactttaaagttacttatctgaatcattggcatcatttgtgccctcttcctttttg

SEQ ID NO: 171243 - DNA, 301 bp, Homo sapiens
ccccctaacccttgttcactagctcctcaatattgcgtaaggtaacttttctgtatcaaatgtagacttttcctattagcttgaaatatccagtgttgctctatttcctaacagagcaaagtgcaggatttaagatgtaaatgccgaatcatgaaaagctgttgattttatatgtgtactaataagaatgtaaaagttcagtccaattaaagaccataagatgtcatcaaacctttctaaatgctgtatttaaaagtctgcggctgggcgccatggctcacacctataatcccgacacttt

SEQ ID NO: 171244 - DNA, 421 bp, Homo sapiens
ctattaggtatacaaatgttaaggatttgctacataagacactgtgattgttttagatcatcttacaatctagttgaggtaggactaacctgaaaataagttgtgcatagagcagtgagtgcccaatttagtgataaagatagtaattgctgtgggatcttgatggtggtggtttgctgcgagtgtatggcactaaccccacccaatccctctccacttcttggccttgtttatgcagataaacaagaaaagtaaggtcaattgtgaaggaaggagaagacttaaggcattttacgcttgccatcttgattgacaggtctagggacatttgggtcaggatgggccataatgggatggggagacactttctgcatggaacaaagagacttgagagaaaacatggaagtgtcttggcttgatt

SEQ ID NO: 171245 - DNA, 283 bp, Homo sapiens
gatgctctgtctcccacagggcagccctgggcctgtctggttttgctggaagcagtggctttgggaggttggggatggaggtggcccctcatttcagggcccttcatacttcagccaccaggagttaggaatgagacagtaatgatgccaagagggaaactcagaggaaaagcccaactgcccagaagtccagttccctcaggacacctcctcctcctgctgctggtctctcttggaggctctggaagttgcctaggtccctgctgactcaccttgcccccta

SEQ ID NO: 171246 - DNA, 245 bp, Homo sapiens
acttgggttactggtataatctgctttagggtggattctcagcagaatggaaaggcaaatgggacttggagagaaaatggccttgaagcagtctctgttgccctgaaaatcacttttcatttccaaaacatcacaacttccttttactgaagatctctttaagatccagaagcaaataaacaccatattcttaaacagcacaggtttcccaatgtcagttataatatctggccaggcatggtggg

SEQ ID NO: 171247 - DNA, 222 bp, Homo sapiens
ccctggagacgagcaggggacaatggccaagtacccaccttttggcgggtcacagcccctctggccacaccaagagccacagtccccaggtgcgatcccaggtctgcctggagtcagggaggggtggggacagaaaggcttccagggccaggagcagacacacactgcaaggccacccaagaccacactcaagaccctaggccagcaggggaccctcctgtc

SEQ ID NO: 171248 - DNA, 592 bp, Homo sapiens
taagtctatctccatcctgcccctctccccttgaattactaaattaactatggaacagggcaaaggagtaacactctgacagggcatggcagcctgagaagtcagagctggaagcatccagttgcctgctcttcacttgtgtcaggctgttccttcctggcacgggggctggagggaggccagggagcagcgaggctgcacggcagccctggcacagagcctcggctgccgtctggggatgaaactgggctctggcaccaggagcgtggttccagctccctgacccagaactgcctgtgcaggggctgctctgccacttgtgccctggtgggaccccactcctcctgcccctctgaggcagggcagattcaggagcagagctggatctggatggaatggcaagtcagggatgctggggcgaaggcaagtcatatcccttctgcagaagcagcctttagggatgtgcctgtgatggggaagagaatggcatgtgtgttcagcaagtgacagagtgggctttaccgcagctccttcctctgctgccagaccagtggcctcagctccatcaacagcctccctccatgactcccca

SEQ ID NO: 171249 - DNA, 180 bp, Homo sapiens
tttcacaggatgttggtgacgtagcgtggctagtttccacataggcttcactcatttttctgacatctcaactgaagtgactagaacagctgggagctggctgggcgctctttgcggtctctcattcaaaacgtctctctctctccacgtggccctatctccagcaagacagtgtcttag

SEQ ID NO: 171250 - DNA, 293 bp, Homo sapiens
tcaacatggtataagtgttacatcaataccatttcagaaataaaacactagccatgcaaaggctgaagcaaattgttttccaactaaatgctggcagcctgctcttatagattaagaccaggtttctccacaaagcactgaagcagcaaatttaaaaggaggcaaatagaacatagactatatagcaacagagataaaacagttcattacctagctaatgtttgcatttttctgctttagagcatgtaaaaaattagagataacaaaatgacacttaatagacgctggacatg

SEQ ID NO: 171251 - DNA, 320 bp, Homo sapiens
cataacattgtgtcacaattgcctacagtattcagtacagtaacatgctgtacaggtttgtagcctaggagcaataggccataccatataacctaggtgtggagtaggttataccatctaggtttgtgtaaataaactctatgatgttcacacaatgatgaaaccatatagtggtgcatttatcagaatgtatcccattaagcaatgcatgactatatttatcattaaattatgtatcgtatcataaataaagcctattcaaatgggtgacgtgtttaaaaaataacatctgttgaaccattaaaattttaccataaata

SEQ ID NO: 171252 - DNA, 550 bp, Homo sapiens
cttaattttggtggctggaagcctcaggaacacgacaaattccatagcttcatggaagaacttactttgtttctgttgctattttcatgaaggcagcagggaaaggacatgacttgctgcccagtctcttcatctctctttgtaaatttgttcactaaaaacttgagactaagattaagcctttactcattgccctccaatttacagagaaaactacaaaaatacgccacaccctatgaaacactccacattaaatagatactactaaaaaatttcaatggggcaaggcactgtggcttatgcctgtaattccagcacttggggaggccaaggccggtgaatcacttgaggccagaagttcaagaccagcctggccaaaatggcaaactgccgtctctactaaaaatacaaaaattagctgggtgtgatggcgcatgcccataatcccagctatgcgggaggctgaggcacaagaatcacttgaacccgggaagttgaggttgtaatgagctgagatcgtgccactgcactccagcctgggtgacagaga

SEQ ID NO: 171253 - DNA, 452 bp, Homo sapiens
ctgtttccatttcaaaggggattcacaacatcattttatgtcccttgggctcaaaaactcagaagatcaccaggctcagtggctcacgcctgtaatcccagcacttttggaggccaagtcaggtggattgcttgagccctcaagtttgagaccaacctgggcaacatggtgaaaccccatctctaaagaaaatatacaaaaattagctgggtgtggtggcgtgtgcctgtagtcccagctactctgatggctgaggtgggaaaatctcgtgagcctgggaggtcgagggtggtgatctgtcagcctgagtgacagagcgagacttcctcccaacaaaaaatgaaaatctacaggccacagtttaactctttttctaaacattatgtctactataactgtgaatttgtttgatattagctttgttataaagttgaaataatatttacaggctc

SEQ ID NO: 171254 - DNA, 676 bp, Homo sapiens
caactgtcactgtgtggccagttttgcttcatctatatgcccagccacttcttcctctcccatcttattttaaagtagatcccagttttgtagggttttaagcctgcaagttacatgatttgatttacatttttaaaaatttctggccaggtgcagtggctcatgcctgtaatcctggcactttgggaggctgaggtaggcagatcacaaggtcaggagtttgagaccagcctgaccaacatggtgaaaccccgtctctactaaaaatacaaaaattagccaggtatggtggcgcacgcctgtaatcccagctactcgggaggctgaggcaggagaatcgtttgaacccaggaggcggaggttgtggttagctgagatagccgagatcccaccaccgcactccagcctgggcgatagagcaaggctccatctcaaaaaaaaaaaaaagaaaaagaaagaaaagaaaattgttaaggggcaaaaaagaagcagaaaggccaatcaggctacttctgtgatccagaggaaaaatgagagtggcttagactaacagtggtgggactggagatgagggaaatggatgtgtgggagaggcctggattcatcgtttctgttgtcttttctctccttactgaacttggagtttcttgaggtgatgggctttgttttactcatc

SEQ ID NO: 171255 - DNA, 239 bp, Homo sapiens
gagtgttgagaccagcttgggcaacatagggagacccacccatctcaaaacaaacaaaaaacccaaaggaatgttaaaggcagatatctccatggaggcatttcaggcctatgacgccctcccgaagctctcttctccatcctccatcctccattccactcaggctttctggtctagcctaatgggcatcccagccagatactcccgactcccctctgcctccttcctctcaccctgga

SEQ ID NO: 171256 - DNA, 194 bp, Homo sapiens
gacctatggcagcccccctgggacccctccttactgtaggtcccccccaacccttccctgcactgtagcctctgcagggacccagaccggccctcaggggtcaccatctggtggggagggggatggaaggtagagaaatgatccctgttccataggagagagccagtgctgggtgggtattgatctgttgcttt

SEQ ID NO: 171257 - DNA, 404 bp, Homo sapiens
gcaagacagaatttcaataggaatctagggaggctgtgtgattggagaaggtagggacctttaaagcgagctagtgcttgagtggacagaaagcttaatataagtccactatataacaaagctaatgtgctgttggactacattaatagaagcatggaattcagttcctaggaggtaatcatcctactctgccctattctgtagtggtcatcaccatctgaagtcctccattctgtactgatatcatcattcaagagattgggtgactagaataatgaaaggagtcaaaagcatgtcatgtgagaatagttagaagaactgagctgtttggcctatgaataagcagtctcagagaaagcattttgaggttttcaaatacctaaaggactgggattaggaaagaa

SEQ ID NO: 171258 - DNA, 414 bp, Homo sapiens
ccaccacacccagctaatgtttgtatttttagtagagacggggtttcaccatgttggccaggatggtcttgatctcttgacctcgtgatccgcccaccttggcctaccaaagtgctggcattacaggcgtgagccactgcacctggcccataatctcttccttaaatcttagaagtgccctgggtgaattatatggccctcttatagctaacactcttagttagaaaacatattatgtgccaggcagcattgtaagcatttgatatatattaactgaggcctcacaacagccctgtaaggttggcactgctttatccttgatttgcagatgagtagactgaggtacagaaaagttaagtaacttgtctaaggttgtacacctagcaagtagtagggtcaggattcaaacacaag

SEQ ID NO: 171259 - DNA, 430 bp, Homo sapiens
gtcgtcgggcactctagtccaaggataatggaatagccagttcacacgagaaggaaatacaaatttcctacaatataaaaagtgggaggatcacttgagcccaggagttcgaggctgcactgggccatgatcatgccactgtgctcgctctggcctggatgccagagtgagaccccatctcttaaataaaagaaagaaaaaagaaggaaaaaaacagaataatgcccttgagattcatctaagtcattatgtacatcgttcttgtttattcctaaatactattccatagtattgatgcaccagtttgtttaaccattcttcagccataggactttttgcttgtttctagtttttggctgtgtttgtaattatttgtaattgttacaaataatcctgtacaggtttttgtgtagatatgtttttgtttccc

SEQ ID NO: 171260 - DNA, 483 bp, Homo sapiens
cacatataaaatcctatgagagcagaaaggcccctgagctggcctggcctggactagagttccagctttgaatctggcaccatcattgagagattgtgtgaccttagacaagcctcttaagctgtctggtcctggctctcagatagggtcaataatccatgccccacaggccactgtgaggatgaaacaggaaaggtctctgaaagcatgcagctcagtgcagggagaaaccagcaaatatctgctgcaagttcaccgagaaaaatcaaagctgtgctccccactgcatggaatagtttctttatttttattgttttaattaattaattaattttagagacagggccttgctctttcttctaagctggagtgcagtgggtgtgatcacagctcactgcagccttgaactccttgctcactcgatcctcccaccttggcctcctgagtagctgggactacaggggccccccagcacacctggct

SEQ ID NO: 171261 - DNA, 960 bp, Homo sapiens
  misc_feature (960)..(960): n is a, c, g, or t
gagcgagggctagtcccggaccgccgggccaggggtccggcggcagcagacgggtaccgtggcggccaaaaaaatgctcctgtaccgaggggcccccgccggccctggcgcgccgggctgcgggctggcccggcccggcggcggcccgcaggccttcgggatccgcctgagcacgatgagcccccgctacctccagagcaactccagcagccacacgcgacccttcagtgccatcgcggagctgctagataatgctgtagatccagatgatctgccaggacggtctttatagatgttgaggaggtcaagaataaatcttgtttgacctttaccgatgatggatgtgggatgacacctcataaactacaccgaatgctcagctcttctggcctaaatcccgtccttcgatatctgtacaggtgctggggagattttacttgcagaactttcctgtccaggcaaccatcaaactatacgaggactcagacagcgaagaacgaagaggaagatgaacgagcaggaggatgacacgaagagacagtagcgaggccaaatgaaaaggggccagaacgggtgtgtgacggctaccagggtcatacccctaaagggcacacaagtcaatgccccattcttcagacccttacctaatcaaaattggaggcacgcaggagtctggttgggggtcaagatgacgtggaaagtattgagcagacatcagttagccggcaggtttactccaagcaagatagagttgtctgcatgaaatgggtcaactactgccagtcacctggttactgcatggctgtgcgtcaggccttggatcacaattgttggttgctgtggatacaaggcaggtcacgagctacacgcaggttagttacaccaggagtggcacggagaagcctcgcgtgagatcatctaagcttacgaacaggggattccactagaagacggcacaan

SEQ ID NO: 171262 - DNA, 2286 bp, Homo sapiens
gagcgagggctagtcccggaccgccgggccaggggtccggcggcagcagacgggtaccgtggcggccaaaaaaatgctcctgtaccgaggggcccccgccggccctggcgcgccgggctgcgggctggcccggcccggcggcggcccgcaggccttcgggatccgcctgagcacgatgagcccccgctacctccagagcaactccagcagccacacgcgacccttcagtgccatcgcggagctgctagataatgctgtagatccagatgatctgccaggacggtctttatagatgttgaggaggtcaagaataaatcttgtttgacctttaccgatgatggatgtgggatgacacctcataaactacaccgaatgctcagttaggaatccaacttacaggggatgtgaaggacctcttcaaggagaactacaaaccactgctcaatgaaataaaagaggatacaaacaaatggaagaccattccatgctcatgggtaggaagaatcaatatcgtgaaaatggccatactgcccaaggtaatttatagattcaatgccatccccatcaagctaccaatgactttcttcacagaattggaaaaaactactttaaagttcatatggaaccaaaaaagagcctgcatcaccaagtcaatcctaaggcaaaagaaaaaagctggaggcatcacactacctgacttcaaactatactacacggctacagtaaccaaaacagcatggtactggtaccaaaacagagatatagatcaatggaacagaacagagccctcagaaataatgccgcatatctacaactatctgatctttgacaaacctgacaaaaacaagcaatggggaaaggattccctatctaataaatggtgctgggaaaactggctagccatatgtaaaaagctgaaactggatcccttccttacaccttatacaaaattaattcaggtggattaagacttaaacattagacctaaacataaaactagaagaaaaccttggcattaccattcaggacataggaatgggcaagcacttcatgtctaaaacaccaaaagcaatggcaacaaaagccaaaattgacaaatgggatctaattaaactaaagagcttctgcacagcaaaagaaactaccatcagagtgaacaggcaacctacagaatgggagaaaattttcacaacctactcatctgacaaagggctaatatccagaatttacaatgaactcaaacaaatttagaagaaaaaaacaaacaaccccatcaaaaagtgggcaaaggatatgaacagacacttctcaaaagaagacatttatgcagccaaaaaacacatgaaaaaatgctcatcatcactggccatcagagaaatgcaaatcaaaaccactatgagatgccatctcacaccagttagaatggcgatcattaaaaagtcaggaaacaacaggtgctggagaggatgtggagaaataggaacacttttacactgttggtgggactgtaaactagttcaaccattgtggaagtcagtgtggggattcctcagggatctagaactagaaataccatttgacccagccatcccattactgggtatatacccaaaggactataaatcatgctgctataaagacacatgcacacgtatgtttattgcggcactattcacaatagcaaagacttggaaccaagccaaatgtccaacaatgatagactggattaagaaaatgtggcacatatacaccatggaatactatgcagccataaaaaatgatgagttcatgtcctttgtagggactataaatcatgctgctataaagacacatgcacacgtatgtttattgcggcactattcacaatagcaaagacttggaaccaagccaaatgtccatcaatgatagactggattaagaaaatgtggcacatatacaccatggaatactatacagccataaaaaatgatgagttcatgtcctttgtagggacatggataaaattggaaatcatcattctcagtaaactattgcaaggacaaaaaaccaaacaccgcatgttcagactcatagatgggaattgaacaatgagaacacatgaacatacgaaggggaacatcacactctggggcctgttgtggggtggcgggaggggggagggatagcattaagagatatacctaatgctaaatgacgcgttaatgggtgcagcagaccagcatggcacatgtatacatatgtaactaacctgcacattgtgcacatgtaccctaaaacttaaagtgt

SEQ ID NO: 171263 - DNA, 839 bp, Homo sapiens
  misc_feature (281)..(282): n is a, c, g, or t
  misc_feature (347)..(347): n is a, c, g, or t
  misc_feature (353)..(353): n is a, c, g, or t
  misc_feature (615)..(615): n is a, c, g, or t
gcttctcgtctgtcgccatgtgagatgtacctttcactttcctccatgattgtgaggcctccttagccacatggaactgccctggcaatcactattccagtctctgcttctatgagtttgactatttcagattccacatgtaggaaatgctggagtccttcatccgaatggtaaatggcacttgtgacaaaaatcaaagtaactaaaaaagaatctggttgaaacctcagtaacagttggcctgtctactgcctcacactaacaagggggagctaataaanntgaggtcagaacacacaatgtggaaatgaaaaccttattcttgtcaatggatggagggtggtganccccanctttacaagtgtctgtaattctcactagcagtatattagagggcaaaagatttgaacagacacatcagaaaagaagacatacaaatggcgctaagcacttggaaggattctgaacatcattagtcatcagtgaaatgcaaattaaagccataatgaatggcgctatacattttcagaatggcaggattgaagaccgaaaaaaatccagcgttgaggagagtgacccaatgggcgcgacagccgtggtgcatgatccgcgagnaataccatgtgacggtccggcaggaggtgggcatctacaggcagggacagctcagagaaacaactttttaaggcgggggaccgacttctattccgaatgttctgccaggctcttttgtcgtgcccccataaccggggggggcttctgggaggcggcacccgctcccatgcgcccaaacttgcaaccgcggggggcccccccacgtttcgcggcatattcgctgg

SEQ ID NO: 171264 - DNA, 1034 bp, Homo sapiens
  misc_feature (476)..(477): n is a, c, g, or t
  misc_feature (542)..(542): n is a, c, g, or t
  misc_feature (548)..(548): n is a, c, g, or t
  misc_feature (810)..(810): n is a, c, g, or t
gcttctcgtctgtcgccatgtgagatgtacctttcactttcctccatgattgtgaggcctccttagccacatggaactcaaatctggggctacgtttctaagaattcccttcactgaagagttccaagttactggaagaaacttggaacaaaaggagttctgcatgaattttgaaaggtctactgactcaacaggcagtcagatatgtaagatgggtataaagcggtgagagtgaggacaaacccataatcaatgtctggatccctgatgaactgagactcacattgatctttcaatatgtccaagcctccaactggaatgatttggttatcctgcaggaaatgctggagtccttcatccgaatggtaaatggcacttgtgacaaaaatcaaagtaactaaaaaagaatctggttgaaacctcagtaacagttggcctgtctactgcctcacactaacaagggggagctaataaanntgaggtcagaacacacaatgtggaaatgaaaaccttattcttgtcaatggatggagggtggtganccccanctttacaagtgtctgtaattctcactagcagtatattagagggcaaaagatttgaacagacacatcagaaaagaagacatacaaatggcgctaagcacttggaaggattctgaacatcattagtcatcagtgaaatgcaaattaaagccataatgaatggcgctatacattttcagaatggcaggattgaagaccgaaaaaaatccagcgttgaggagagtgacccaatgggcgcgacagccgtggtgcatgatccgcgagnaataccatgtgacggtccggcaggaggtgggcatctacaggcagggacagctcagagaaacaactttttaaggcgggggaccgacttctattccgaatgttctgccaggctcttttgtcgtgcccccataaccggggggggcttctgggaggcggcacccgctcccatgcgcccaaacttgcaaccgcggggggcccccccacgtttcgcggcatattcgctgg

SEQ ID NO: 171265 - DNA, 1012 bp, Homo sapiens
gaacttacggctaggtacgaggccctgggtgttacggtctggctgcccggcggttgagagcatggcctctccaggggcaggtagggcgcctccggagttaccggagcggaactgcgggtaccgcgaagtcgagtactgggatcagcgctaccaaggcgcagccgattctgccccctacgattggttcggggacttctcctccttccgtgccctcctagagccggagctgcggcccgaggaccgtatccttgtgctaggttgcgggaacagtgccctgagctacgagctgttcctcggaggcttccctaatgtgaccagtgtggactactcatcagtcgtggtggctgccatgcaggctcgctatgcccatgtgccgcagctgcgctgggagaccatggatgtgcggaagctggacttccccagtgcttcttttgatgtggtgctcgagaagggcacgctggatgccctgctggctggggaacgagatccctggaccgtgtcctctgaaggtgtccacactgtggaccaggtgttgagtgaggtgagccgcgtgcttgtccctggaggccggtttatctcaatgacttctgctgccccccactttcggaccagacactatgcccaagcctattatggctggtccctgaggcatgctacctatggcagcggtttccacttccatctctacctcatgcacaagggcgggaagctcagtgtggcccagctggctctgggggcccaaatcctctcaccccccagacctcccacctcaccttgcttccttcaggactcagatcatgaggacttccttagtgccattcagctctgaggccagagcatggtcctccacccttcctgccattctgccctgggctcctcaggtagttggaattcctgacttaggacttggggttgggtccaaggtgcttacatcccaggggcctcatgcctaagatagagggtgggagcgaacccacatgaaccaatacagcccagctccaactagatccag

SEQ ID NO: 171266 - DNA, 1230 bp, Homo sapiens
gaacttacggctaggtacgaggccctgggtgttacggtctggctgcccggcggttgagagcatggcctctccaggggcaggtagggcgcctccggagttaccggagcggaactgcgggtaccgcgaagtcgagtactgggatcagcgctaccaaggcgcagccgattctgccccctacgattggttcggggacttctcctccttccgtgccctcctagagccggagctgcggcccgaggaccgtatccttgtgctaggttgcgggaacagtgccctgagctacgagctgttcctcggaggcttccctaatgtgaccagtgtggactactcatcagtcgtggtggctgccatgcaggctcgctatgcccatgtgccgcagctgcgctgggagaccatggatgtgcggaagctggacttccccagtgcttcttttgatgtggtgctcgagaagggcacgctggatgccctgctggctggggaacgagatccctggaccgtgtcctctgaaggtgtccacactgtggaccaggtgttgagtgaggtgagccgcgtgcttgtccctggaggccggtttatctcaatgacttctgctgccccccactttcggaccagacactatgcccaagcctattatggctggtccctgaggcatgctacctatggcagcggtttccacttccatctctacctcatgcacaagggcgggaagctcagtgtggcccagctggctctgggggcccaaatcctctcaccccccagacctcccacctcaccttgcttccttcaggactcagatcatgaggacttccttagtgccattcagctctgaggccagagcatggtcctccacccttcctgccattctgccctgggctcctcaggtagttggaattcctgacttaggacttggggttgggtccaaggtgcttacatcccaggggcctcatgcctaagatagagggtgggagcgaacccacatgaaccaatacagcccagctccaactagatccagattccaggtttcttgcttctttcttgggttcctcagttctctcctgggttccccaacctcctctgccaccacaccaaaccaccagtgatgcatcccctggggcaaagctcatcataacccctctgcacaccagccagcctggagaccgttgttcctggggcctgttactgatcctcatctagccttgatttatccacaggagactgcaggctttgaac

SEQ ID NO: 171267 - DNA, 1065 bp, Homo sapiens
  misc_feature (943)..(943): n is a, c, g, or t
  misc_feature (946)..(946): n is a, c, g, or t
gaacttacggctaggtacgaggccctgggtgttacggtctggctgcccggcggttgagagcatggcctctccaggggcaggtagggcgcctccggagttaccggagcggaactgcgggtaccgcgaagtcgagtactgggatcagcgctaccaaggcgcagccgattctgccccctacgattggttcggggacttctcctccttccgtgccctcctagagccggagctgcggcccgaggaccgtatccttgtgctaggttgcgggaacagtgccctgagctacgagctgttcctcggaggcttccctaatgtgaccagtgtggactactcatcagtcgtggtggctgccatgcaggctcgctatgcccatgtgccgcagctgcgctgggagaccatggatgtgcggaagctggacttccccagtgcttcttttgatgtggtgctcgagaagggcacgctggatgccctgctggctggggaacgagatccctggaccgtgtcctctgaaggtgtccacactgtggaccaggtgttgagtgaggtgagccgcgtgcttgtccctggaggccggtttatctcaatgacttctgctgccccccactttcggaccagacactatgcccaagcctattatggctggtccctgaggcatgctacctatggcagcggtttccacttccatctctacctcatgcacaagggcgggaagctcagtgtggcccagctggctctgggggcccaaatcctctcaccccccagacctcccacctcaccttgcttccttcaggactcagatcatgaggacttccttagtgccattcagctctgaggccagagcatggtcctccacccttcctgccattctgccctgggctcctcaggtagttggaattcctgacttaggacttggggttgggtccaaggtgcttacatcccagggccngcnaaaaggggggccctacaataagcgccctaaaaaaaaacggtttcgcggaagggacgacggctttccttaggacgcctgtgtagtatccaacatcgcacccacgctcctcgccgtctccg

SEQ ID NO: 171268 - DNA, 1057 bp, Homo sapiens
gaacttacggctaggtacgaggccctgggtgttacggtctggctgcccggcggttgagagcatggcctctccaggggcaggtagggcgcctccggagttaccggagcggaactgcgggtaccgcgaagtcgagtactgggatcagcgctaccaaggcgcagccgattctgccccctacgattggttcggggacttctcctccttccgtgccctcctagagccggagctgcggcccgaggaccgtatccttgtgctaggttgcgggaacagtgccctgagctacgagctgttcctcggaggcttccctaatgtgaccagtgtggactactcatcagtcgtggtggctgccatgcaggctcgctatgcccatgtgccgcagctgcgctgggagaccatggatgtgcggaagctggacttccccagtgcttcttttgatgtggtgctcgagaagggcacgctggatgccctgctggctggggaacgagatccctggaccgtgtcctctgaaggtgtccacactgtggaccaggtgttgagtgaggtgagccgcgtgcttgtccctggaggccggtttatctcaatgacttctgctgccccccactttcggaccagacactatgcccaagcctattatggctggtccctgaggcatgctacctatggcagcggtttccacttccatctctacctcatgcacaagggcgggaagctcagtgtggcccagctggctctgggggcccaaatcctctcaccccccagacctcccacctcaccttgcttccttcaggactcagatcatgaggacttccttagtgccattcagctctgaggccagagcatggtcctccacccttcctgccattctgccctgggctcagtagtggatcctgactagcctggggtgtcaagtgtcctccgggctcatgctagatggggggggcgacccttacatagcatcataaaaaaaaaaaccgttttccgggggaaagtaaggcggcatttcccctttagggaagggcctttggtattcgtttcaatctcgtaaacggcgaacccc

SEQ ID NO: 171269 - DNA, 1038 bp, Homo sapiens
  misc_feature (916)..(916): n is a, c, g, or t
  misc_feature (919)..(919): n is a, c, g, or t
tacagccttagtacgaggctggggtggaatcggccgaggctctccaggggcaggtagggcgcctccggagttaccggagcggaactgcgggtaccgcgaagtcgagtactgggatcagcgctaccaaggcgcagccgattctgccccctacgattggttcggggacttctcctccttccgtgccctcctagagccggagctgcggcccgaggaccgtatccttgtgctaggttgcgggaacagtgccctgagctacgagctgttcctcggaggcttccctaatgtgaccagtgtggactactcatcagtcgtggtggctgccatgcaggctcgctatgcccatgtgccgcagctgcgctgggagaccatggatgtgcggaagctggacttccccagtgcttcttttgatgtggtgctcgagaagggcacgctggatgccctgctggctggggaacgagatccctggaccgtgtcctctgaaggtgtccacactgtggaccaggtgttgagtgaggtgagccgcgtgcttgtccctggaggccggtttatctcaatgacttctgctgccccccactttcggaccagacactatgcccaagcctattatggctggtccctgaggcatgctacctatggcagcggtttccacttccatctctacctcatgcacaagggcgggaagctcagtgtggcccagctggctctgggggcccaaatcctctcaccccccagacctcccacctcaccttgcttccttcaggactcagatcatgaggacttccttagtgccattcagctctgaggccagagcatggtcctccacccttcctgccattctgccctgggctcctcaggtagttggaattcctgacttaggacttggggttgggtccaaggtgcttacatcccagggccngcnaaaaggggggccctacaataagcgccctaaaaaaaaacggtttcgcggaagggacgacggctttccttaggacgcctgtgtagtatccaacatcgcacccacgctcctcgccgtctccg

SEQ ID NO: 171270 - DNA, 468 bp, Homo sapiens
tcaacctccgcctcccaggctcaagcaaacctcctacctcagcctcccgagtagctgagactacaggcacccgccaccatgcctggctaatttttgtacttttttagtagagacagggtctccccatgtttcccaggctagttttgaactcctgagctcatgcaatccacccacctctgcctcccaaagtgctggtagcgcctggccctaccccttctacattaaaggctgggggagttcattcggtacagcccatcataagcacaggccccggacactgttctaggggaccgtgacttgtgcttaaggctgcaaacgcacggagcccagatggtgctgagatgccccatctccactctagcgttgagcctggtgtggtcccagcgggaaccctaggcaggggagtggctgcagggggagcctcctctctcagcctcagaccagggacccctggccacgtgcttgtgg

SEQ ID NO: 171271 - DNA, 288 bp, Homo sapiens
tctctaagaatcatttgttaaatgaaatgccataatatccagtggggtgaaggtggaaggaacaggcatgcctatattctgttggtagaaatgtaaatagattcaactttcatgtgaggggtatttggcaatgctactttttaaaaaatccgatgcacattaaacttttcacccagtaactcaactgccaggaatttttttttttttttttttttttggggaaaaaaacagttttcacttccctcaaaaaaaaaacatatttttttattcacccaccatttttttttc

SEQ ID NO: 171272 - DNA, 262 bp, Homo sapiens
ttgctggaacccaggctgtcattctgatgtgtgagtctcacctaactcctccgcctgtctgggctcccgtttccccatctgtggcccagattttgaggatgtgctctagttgggtggtcatgtgctgcaagttctgtacaagggcttgtgcccattcatttattcattaccctgatggttggccttagggacacagctgagcagctgtctctactcagtgggaaacacagacagcgatagaagagaaatcagagtcagtggg

SEQ ID NO: 171273 - DNA, 517 bp, Homo sapiens
ttatgtatgctgaatgagtgagtgaatgaagaatgatggacacaagacaagagagaaaatacactgaggagatagtaagaaattgacccaagacatgagataacagagttttatttctactgccttgagattattacaggaattaaagttgtaatttttctacttaaacataaaattcatatgtagtagagattaggtaattagattatatattgggttagatgattaattagattttataattagatttgattggtctatatttatctgatatataaatagattatattgcattattggattattagataataggatttatataaaattattccgtcaacgaactgccattttacaattattcctaacatataaaaatgcacttctggctgcacatgatggctcacgcctgtcattcctgctatttgggaggctgagggaggaggattatttaaggccagaagtttgaggtgagattagccttagtaacagtgcaagactctgtttctaaaaaaaa

SEQ ID NO: 171274 - DNA, 418 bp, Homo sapiens
gatgggcgggcagcggcggtcacctgtgcatcctagacctgcctggtgttaaggactgtgcttgcagattcctcacaacctggtagagccaagggctgggcccttgtaggctaggatttggggccccctcagccacccaatagctgtggggccttggcagtcacttaacacctttgtttaatttccatatctgtaaaatggatgctagtgaccacccaccttaaatatcctctaatgagcatttctcagtgttggtgctactgtcatttttagccggataattttccattgtgggaggctgccctgtgcactgtagggtgttgagcagcatcccagcttctccccttgtgacagctgaaaatgtctccagatattgctacatgtcccctgggaggggtacaaaaattgccccagttga

SEQ ID NO: 171275 - DNA, 341 bp, Homo sapiens
tagaggaaacaacaactccgtttgaggggccaggaggatcttatggatgggctgctgagccctaaatgaatgtttgccaagagcagtccacggaccactgcgtgttggtgaacacagagctgctggtccacaaggtctccatgagggatgaagaatattatattgtgcttttctgtaatctggaccctctttaccagagcttcccagctgaggtaccacaaatgggttacaagtgggcaatgacatgaagaacgttgagataccagatgaccaccatataatcaagaactactagaaaattttagtgtgtaaggctgggcgcagtggcccatacctgtaat

SEQ ID NO: 171276 - DNA, 185 bp, Homo sapiens
ggaaagagaattggagtgggggattagggcatgaggagaatgaaatagcaacagtaagacaagcaataaataagacataatttgaatgaaaggaacacagaagtgacctggtctaacctatttaggttagaagtgagaccacaggtctgatgagggaagtggttttcctagtgccacacagctag

SEQ ID NO: 171277 - DNA, 307 bp, Homo sapiens
gagactcaggacctgccctccatagttccaatgcaggagtctggattgctcctccccagaatatccaaggcaccctcacagcactatctcaggtgtgagctcagccctgggtagctcagaggaagggaataaatgggaatgtaccatcttagccacaagcatagcttagggagcctataatgatcattctttccttcactcatgtacaaatgatgactgaacacagctcaatgcctgacacaaggcccaatgtggggcgggggataggaggttgccccgggagctgtaggggacagaaagccagtct

SEQ ID NO: 171278 - DNA, 256 bp, Homo sapiens
cgtgtgtgcatgtgtgtgaatgcatgtgtgtatgcatgtgtacgtttgtgtgggaatgcatgtgtgtgcatgtgtgtctgtgcatgcatgctcctgctcacatggtgttgctgtaggaagccaggaagtctcctcaaggccactccttgtccactgctgtccatttccaaagaccctcttttcagcatccttcctgcctgttctaagccacggtggtgaaaatccaatccccaggctgtgaaagcaacttccctct

SEQ ID NO: 171279 - DNA, 230 bp, Homo sapiens
gatctagaggatcccttgcttgtggtactcctccgctgctcagctcctggctgctgcgctcaccgggcacgtaaatcagcactgccctgtggcccaggtaaatcagcactgctgtgttccaggtaaatgagcactgccctgtggtccaggtgaattgtcagtgccctgtatcccaggtaaatcagcactgccctgtggcccaggtaaatcagcactgctgtgttccaggt

SEQ ID NO: 171280 - DNA, 259 bp, Homo sapiens
ttgtgaagatactttcctcctttcctgaaatgcatgtgggtgcacacacaggcccctaggatcgtggtcccagaggtgaggtggctgaggacctcgtgcgagggacaaggaccaggccctacacgttgggacgttgaggaaggctgcacatggcagtggccttcaaagtaatgatctccccggtcggctctcaagcactttcacacatgtgggctcgttctgtcactcaaggccagcagaaggggaaccagaagtgtca

SEQ ID NO: 171281 - DNA, 327 bp, Homo sapiens
ggctgacttagaggacccgttatcgccaacacccactgccatctaccctccacctagtctgtcatcaggttaccaaactcaacccaaatcccttttccaaagcagcgtgatgaggtttgctacttactttctgcccaagtcctgggagccctgttgtccagtagggctatgattcctctttaactgatccccactatggcagtcatttctggtctagagtagttgtcccatctttaacaatttatctcattcttttgagaggccttggctactctgttattctccttagttcctgctgactgcaacagtgttgggcgataacatcag

SEQ ID NO: 171282 - DNA, 369 bp, Homo sapiens
atctcccaactcaggaagtgagtattaggttgggttcatctgggtggccccgtccacctgttctccctcctctagcctttgcacatgccgttcctttgcctgtttcatcctttctccgctctactcttcttcaaagacccagttcattttatgatccctcgctagggcctcaaagagactaggggcagaaatcagacctgactcacttctgggtccccagcattgccctacacagagcctggtgctaaagtgaagtgaagttatataaatatttacacagtgatctgaactcaggggtaacaacaggtctttggggtgagaaaggggagtccatgaagccaagcgatgtctgcctgacagggcccgtct

SEQ ID NO: 171283 - DNA, 164 bp, Homo sapiens
tccaagtagttattgttggtgtagagcaatgctattgatttttgtagttgggttggctgcatatctggcaaccatgataaactctcattagtttcaatagtctattgagactgttgatttgtctgggtagatgatcacaacacatagaaataataacattttat

SEQ ID NO: 171284 - DNA, 464 bp, Homo sapiens
gagttcaatgaaaatattttaattgatgcttaaacgtggcaattaagttgaacaggtacttctgatgtaaaatcgtaaaactctaccaacaaaagcaaacattatacttaataaaagcaaacattatacctaacattgccattaaaatggggaacaagacaatgaagcagactttgatcattattagttgcactggaagtgctaatatcagtgtagtaaaaataaataaaattggaaaataattatttacagataatacttcacaaattaaaaagtagcactggtaaatccattagtactaacagacttcactcagtatagaaaataaatagaactaaaatataaaagattttgggactggcacagtggctcacgcctgtaatcccagcacctcgggaggctgaggtgggtgaatcacctgaggtcaggagttcaagaccagcctggacaatatggtgaaaccc

SEQ ID NO: 171285 - DNA, 295 bp, Homo sapiens
gagccgagattgcaccactgcactccagcctgggtgacagagcgagactccgtcttgaaaaaaaaaaaaagacaagaagcctcagattgttgaatcctattggtccgtgtactgcagggtgaggttgtgtggaatttgtgtagatagagtccaccgaggaatgagcaatgatcttagcaaatgcttgggccaaggtggcaaacagggttctctgcccacagttcggagatgcccagtgggagcaaagagaaacgagtccccagtaacacccagcaggtacctttgcccctggaaa

SEQ ID NO: 171286 - DNA, 334 bp, Homo sapiens
tcagacagcggacccccgagaatggagtttcgctctttgttgcccagagtgtaacgcaggtgaacgatcttggctcacgtgcaacctccacctcctgagtacaagggattctttggcctcggcctcccaaagtgctgggattacaagcatgagccaccgcacctggacctgcagtgtgttttgatcagtattattgagaatgaggcaccagtttcctctctgagccatcccttactctaatctggtggttgtcactgggggtgattttgtccccggggccatctgacaatgtttggagacactgttggttgttacagctgagtgggtgggaggt

SEQ ID NO: 171287 - DNA, 452 bp, Homo sapiens
ccagtgagagaaggcaagaacactagtgacgggaaagaaaaagatgatctgcaaactcatgaaaaagcagcctgtacatctgggattttcttctaaactgcagagtgggatatttgcactttccttcaggcaactttggaaagtggatcatagttctggtagctcttgctagaggacgaattgtactcaccactccataaggctttgatcctaacagtgttcaatcagtagcagtcatcattgtatacttaaagccttggacgtggggcagagagataaggaagaatgaggaagcaaagcagttacagaggacggcagaaagaaggctgccatcctgccctttctcccactccagctggggatgagcaaccagctcttttcatttaacccctttgctactctgacagtcatcagggaacactgaactaaaagggctggctgtgaaactacta

SEQ ID NO: 171288 - DNA, 432 bp, Homo sapiens
ttacagttttgtggcatttcaatgaataatgtgtctcaggttctgggaaccctatttatggggaacactcaacccacaacaatgtcacaccatggtagatactgaagtccccccaccggcaagaccaaattctgctaccttctcacatggagaataaaggtatcgggtttgctttaggaaagtaatgaattctcaatacactccaggtacccacagactcaaatgaccctgtgtggaaggtgctagcagaaacacagccagagacacagctgccctcacaaagagcccactgtagggtgtggaacctagaggctgaagggcatcaagaggccagtggatagcctggacttcatccctgctctgcccatctcagcaggacatgtctcaggcttcaacaagttgccaagttcatcttttatatctttttttttg

SEQ ID NO: 171289 - DNA, 259 bp, Homo sapiens
ctcgggggcagttttgggggtgtctagcaaagacctggaaggccttcccggttaaccctgacttcaggagctgctgcactgggtcatttgtttcctcagtgctgggccttaaactttacctcgtacccaaagcagccatggctaagacccttgctagcagctcaccaggcatgtaggaatctgcaggcctgggcatgggcgcatggaatgattaactcttcatgttcgagggagccaataatagtctttacctcatagg

SEQ ID NO: 171290 - DNA, 181 bp, Homo sapiens
ggtggtggaaatatgtggactaacagggtagcagtggagcatctgaagcaatatcttcccagagtttacattctagtgagcgcattaggtagtatatacaaataaataagacaactgcagattataccaaatgctatagaggaaatggagtgatatgctggagatttattggaggtggtac

SEQ ID NO: 171291 - DNA, 574 bp, Homo sapiens
gtaaagcttattttcaaatgcatttcccactacccaagactatataaccccatctctactaaaaatacaaaaattagctgggcgtgacatgcctatagtcccagttactctgaaggctgattcaggagaattgcttgaaccgagaggcagaggttgcagtgagctgagatcgcgcctgccatgtcctggatgacatctgcctggggacactcgaggcagacacagccccggttgcaggctagccactggtctgtgcatcccctcatcctaggcagattgggcacagggccaggcaggctgtggggagggctctccgcctggactcagtaccatccagccattccctgaaggtgactttgccccccggggatcccaggccatatcttcacacattgggtgcacccagcatctggtgggtggggtctggggatgctgcaaaacacgttgcagcagacagcatggcccaccgcagagaattctccaacccgaaggtccatagtgcccaggctgagaagacctggtgtggaaaaaacaggatcgcatgacagtcaagttgcccatggccttttgcagg

SEQ ID NO: 171292 - DNA, 311 bp, Homo sapiens
cccagcttaaacgcacaagtccttgaccttttcacattttgtggggcaagccctagctggagtatgaagtgaaacctcaggactttcttgccagatcccagagaaggctgggagggcctaatggctggttactgatttgagatgctgctgcgttattcctcagggagtggcactttcagggctgtttttctctcgttcaaaccaaagaagttaatattagaacctgctttcaaaagcagtgtatttgtggactctgagttttatgtgtgttgggttggtgcccaggggtgaaggcagatgtaaattatttg

SEQ ID NO: 171293 - DNA, 275 bp, Homo sapiens
ccaggctgggtgacagaatgaaactctgtctcaaaaaaaaaaaaaaaaagtacagtgtagtaccccacaattgctatcccagaaaaacaatttaaaattacctcaaaatacattgaatagttatgagcacatgtaaaatatataaggcaaaattctatacttgtttctttaaaacatccatatgatgtttaaaagaaacaagtgggagaatcacttgaacttgagaggcggaggtcgcggagcagctgaagatcgtgccactgcattcaaggctg

SEQ ID NO: 171294 - DNA, 581 bp, Homo sapiens
tgctgcacagggatgcctacccacagtggaatgaaacttaagtcaaccctttctctcttcttgaccacatgtatcatgacacataggaacgaaattgtgtagcagcattattttaggctgatttacagtttcctgtacttgtttttatttcctggttttaaaacctaatattataaaattgtttgaggaccagttcagctgtcatcaggttgactttgagacctgtctgtagcctctgagaatcctatttctttctttctgagaagtcagctttagaagccccctttcacttctgggacagccgaagatatcctacaagtactattgctgacagtcaggactaaatagttcactcagcagttataaagtaatggtcactggaagtttactatcttctgaagcggcagcctttgctgctacggttcctcaattatctgccctattggaaatgggaaggaagagagaggttattagcttttcatagaaactacgttggaactcctattcctgttttgaccagatacctgtttgttacacattctggtgtatgcggtactccacgagattagaagtgcatattc

SEQ ID NO: 171295 - DNA, 705 bp, Homo sapiens
aagacggagcccccatatccaaagatagccaaggagaaagaaagacccctgttgccagagccagtgggcaaaggcaacagaaaaggagacaagggtcctaatgggatgagatcctttcggatttaggcttttacaaactcctgagaactggcaggttgacagccataaatggggtaccaaactttctactcattggattacaagttctcaggcatccagaatgatgaacaaaatgacaatttctagggcttctgtgggagagtatggaaaggtctttttgaaccttttaatgctgtcaacggaagaatgatgaggttcataaatttggaaaggagacatttcttcatttttatgtttatttttattttttttgagacagagtttcactcttgttgcccaggctggagtgcaatggcgtgatcttggctcactgcaacctccgcctcctgggttcaagcgattctcctgcctcagcctcctgattagctgggattacagatgcccaccaccacacctggctaattttttgcagttttagtagagacagggtttcatcatgttggccaggctggtctgaaactcgtgacctcaggtgatccactcgccttagcctcccaaagtgctgggattgcaggcatgagccacccaaccagtgagagatttatttcctataaagggttgtagcctgcagggttgtccttctga

SEQ ID NO: 171296 - DNA, 372 bp, Homo sapiens
gtcaatctttccttcaaattgtttctgaaggctttgtgcacccacattacttgcaagaaatattttcgtatgttttctgctaggaataagagactgcctataacaagtaaaattcctttagctgatgggtgtactttttgaattatttggaatatgatccttctgttaaatattaggccaggccaggcacagtggctcacgcctgtaatcctggcactttgggaggccaaggtgggtggatcacctgaggtcaggagttcaagaccagccgatacagattgttttttaggtgagtgactgctaaactcttgtttctttctttttttttttgagacggagtctccttctgtggcccaggctgtagtacagtgg

SEQ ID NO: 171297 - DNA, 179 bp, Homo sapiens
tgcaaacctgcttagagagaggagaaaacagaagaagactgttgtgtttaactgaaactgaaactgcaaatgaaggggtttttttgtcattttatgttttctttttggtttgtattcctcaatccgtgccttgataacaattcataaatctaggttcaaagagtacaaaatccatatta

SEQ ID NO: 171298 - DNA, 546 bp, Homo sapiens
aacagtatcagaaaattgaaacttttcagttggtatttatgaaggaagatgttccttgcagtcctataacaataaatagttgtctctactaaaaataatatttgaatcattttaaattgagtctagaaaggacttcagataataacagctgttaaccatttattgaatgtatgccatatgctgagactgctaggctctaaatacattatctttaattttcacaacaacccggcaaggtgggtggtgtacaattttgaagctcaactacactaaacaagaagtgaataggcagtaaaatgggatttcagtgttggacatacctggtctcaatcccttgctctttcatttgttagtagtgtgaacgtggaccaaaaaactaccttttaggccctcattttcttcactgggttgttatttgataatggtaataatcacagaattatatttattgagctgttatgtgccaagcaccattgtaagtgctttacatatactcttttattcctcataacaacccagtgaggtagaaaaagaaattggcggccg

SEQ ID NO: 171299 - DNA, 400 bp, Homo sapiens
aaaaaaggcttcttgatatgggtctgggttgtggtttttaaaaaatataaccccaaaggacaggcaacaaaagcaaaagtagacaaatgggactgcatcaaaataaaaagcatctatctgcacaacaaaggctcaatagagtgaatagaccagctatggaatgggagacaatatttgcaaaccatacttcttataaggagtaaatattctagtttataaggaaatcgagcccctgactgccaccaccgctgccgcccagagactgctgagcccttgttggtctgccatcaccacccactccagaaacagaacatccagtcatggataaaaatgagctggttcagaaggccgaactggcccagtaggctgagagatatgatgacatcgcagcctgcatgaa

SEQ ID NO: 171300 - DNA, 308 bp, Homo sapiens
ctggagtcagttacaatcaaggaaaactagttttttggcctgagaactggaaggatggagttaccataaacgaataactgcaatgaggaaggccaaagtggattaaattgtcctggccaacatagtgaaaccccatctctactaaaaatacaaaaaaattagctgggcgtggtggcgggcacctgtaattccagctgctcaggaggctgaggcaggagaatcgcttgaacccgggaggcagagattgcaatgagccaagattgcaccattgcactacaacctgagcgacaagagtgaaactccatctc

SEQ ID NO: 171301 - DNA, 154 bp, Homo sapiens
acctactggtccagctcttcttcccctctttgattattctgtctcagcctcctttctttgtccttcgcctcttaaacactggtgtctcctgagtgtttctcatttctcacattctcttagagtgaactcatagttttaactatcacccaggctg

SEQ ID NO: 171302 - DNA, 632 bp, Homo sapiens
aagagtggatggcgaccagttcaatgtatctaagtaagagtgccataaggagggggtctgcttggtgctaaggtctagttcaagttgtcaaagcacatgtaggaggagaaaggtatccacgcagggcaggggtagcaagtactcctgtgaggcttacaagcctaggagcatctgcattaggggttaggataataagaaaataagtaaatatgctgagataacaagccaggtttctcaccgtctaatgtactctgctggacttgtaatgggaggtagcagtaggaactcatggttttcaatattgatagatatggaaattatagaaaggaatatgtgcactatatgtaaatgtacatcattatatacatacatacattctctagctctgtccattgagaggcctaggagcagctatatcccaactgcaaggagcagcatgttcagcacccagaccttggcttctaaataccattctccactaaaatgaactagggggtccttggagaaatggctgactccagaactaaagcagaaaaaggacaagataagcctagaacataatgtgccaaaaagcaaagaagtactcaacgactgacgagatatgtccaagaacataaaacctgcttgaaaag

SEQ ID NO: 171303 - DNA, 315 bp, Homo sapiens
caactttattcctttaatcctttgaaaaaagcaggacttgccaacctggtttaaggaattatctgttgcattcaatgtttttgctgtttaaaaatacagactgattccatttttgatgatgtacagtgggccttggcgccccagtggattcttcctttaagttccttgtcactatgggcatcttccctgattattttgctgttatctctttcctgtgggtttcttcagtaggattctatgtgtgggctcagttgtcacagaggagacagtgtcccatacccagggaatgcctagagcagcatccacattgttttt

SEQ ID NO: 171304 - DNA, 137 bp, Homo sapiens
aggtagcatctcaaatcaatgaggcaaagatatgttattcagtccatggtgtgaaacaaatgagtaggtcaatgcaaaacaatgttactagcacaagttaattgctacagattgtttttttttttttttattatact

SEQ ID NO: 171305 - DNA, 238 bp, Homo sapiens
tgaaaacattttgaaaatcaactggaaagttctatacagtattggacagagttcagcatggtgtcttatacaatgtagatattaaacacattttaattgaattcatttagaggtggaattttgaatgcaatgtgttgaaaaatatggattttgctataataatactaataataatttaccatttgttgggtcctaacatacaactagtattgttttaaatgccttttcaatcatttac

SEQ ID NO: 171306 - DNA, 493 bp, Homo sapiens
agaatgttgtcagtttgcatttgtctggtgttccctggttggattcagatgatgcatctggggcaggaatatgtaggtagagatcgagaatcactcatataagcgagaaagtggataccagaagaggtggcgttccggagcagaaggtagagagagcacacgctggagtccagggcgcggggaggcccaggggtgtttgggagcccagaggagttgttgcagtggcggtggatgagggcgtgagaggacagggcctctgtgtgggcaggggctgtttgcaatatcaggaagaaggtggattatgaggagaagggatgactccttgaagcccgagctggtttagtgagcagaagttccatatataccatcattcctggggtgcgtctgtggcacgggagcggcccgtgtgaccctctggatgaaggaggttttgtacctgttgagttggaaacgtacctggttagagtctttcccaaggaaatccagaacccct

SEQ ID NO: 171307 - DNA, 370 bp, Homo sapiens
aagcttctattctccagaacagaactgaaaagagagccagcaggccaaggatctccaagtcagatacatcatcagaggggactcaggaaagggaacgtgttgccggatagtgtctgagggtgggcacccggggacagatcctgaggagggaatgtctgtctgtgtgatttaacagggagcaaactcaggagaaaggaagggaaggtggcagagccaggcaagggaaggaggtggtctcggctggggaccaactcaggccatccacaggatgccctggaacatgaaccgcaccatggagtttaccccacatggaaacaaggaggagcagccctttgcacccctgagtcagccagggctggtgcagggtgag

SEQ ID NO: 171308 - DNA, 453 bp, Homo sapiens
ctgggagtggccaatgaggtggaagtgaaaaccagagggggcggggtggaaaagggcctccaggaacactcagctaggaggcaagtcttctgctctggcttattcctcctttttgctgctggaacatgactgtgatggctagagctgcagcagcaatcttgtgaccatgaggtgaccttgaagatggaaatcagagctaagaatagctgagcaagagagaaagggccccaggctctgaagacagtgggctgcctacctctgcatttctttcccaaaggagagaactgaacctgtgtcttgatcaagccactgatttgtgttctctgctgcttgtagcagaatccaatcctagattattacgcaattttggaactgtgtttcctggttttcctcttacctcttgggttgaccttcccatttctgtttgtgggtaccttcattgtccctctaata

SEQ ID NO: 171309 - DNA, 322 bp, Homo sapiens
cactctgttgcccaggatggagcgcagtggtgcgatctcagctcactgcaacctccgcttcccgggttcaagctattctcctgcctcagcctcctgagaagctgggattacaagcacgtaccaccacgcctggctactttttctatttttagtagagacggggtttcacccatgttggtcaggctggtctcgaactgaagtcaggagttttctagctccctttgatgaggtggcagctctacctgggtctccactttaggcagttccaactccttggagttggtccatatcccctttctgccttagtttcattttacctagc

SEQ ID NO: 171310 - DNA, 303 bp, Homo sapiens
aatcttcaaatacccaagaatgactgtaaagaaatattaagttcctaatgaaaaataccatagtaacacagaattttgtcttttaagaaaatgctgaatgtagctgatgaaagaggatgaaaagtagggttgaatctgaattatgaagagcaaaatgtacagagtttgggaagaattgagaacttctaagacaaagccaatggctaaattgatctaagaggaaggattggagtgactttttgtttactccagctttgtacaacttgctgtgttcagttgtgctagcatacttttctgtgagct

SEQ ID NO: 171311 - DNA, 333 bp, Homo sapiens
gaagggagggaaagagaggcaaaaagataaacacagaaaagaagagaaatctaactaggattagaaggataaagaggaaaggtaagtcagttcctctaagcttataggtgtgctgggaacattgatgaatgaatgcaggaatcactgagtgagagagggaaagacctgaaatgggaggcatccaaggacaggaggggcagggctgacaggagctggagctgcaagcatcttgggaggtggtggggagggaattgcccaggaggataaagaggctttggtttttgggtcacctcggctaggcaggggctccgcttgtgctcggtcagaacaggg

SEQ ID NO: 171312 - DNA, 165 bp, Homo sapiens
aaccaatgatttcttcgacagtgtagtgcatatttacttgtattgatatactttctaatttttttaagaggtagagtctcaccctgtcatccaggctggagtgcggtagcatgataatagctcactgcagccttgaggtcataggctcaagcaatcctcccattt

SEQ ID NO: 171313 - DNA, 366 bp, Homo sapiens
aattaaatcagaatcagtgggaacagacctgagcactggtaatttttggcagttgtattctctttaaaatccccaggtgcagtcagtactgagaaatattggtatatggcagtgattctcagagttgatccctggactagtagtgtcactatgagttggggacttgttaggaaacacattatcaaggcttgccccagatttactgaatcagaaactctggaggtggagcccagcaatccctgttttaacaaactctctgggtgattatgatgcatgttaaagtttaagaaccactggtatatggtgggggtgggagcacagggggagtagctacactgtatctataagtatccttcatggtcagca

SEQ ID NO: 171314 - DNA, 342 bp, Homo sapiens
tccctgtggaagagataagagaaagtgaatgaaggtttgaaaagaagcatggagaccttcaaaattatcaaatttttgagtttaaggtgatatttacattaaaatagcttgccagtgatgagccaatgaagggaaaagcttacttttcagttagttatgatttccagggcagaggaaaagtaacaaggagacagggtcaaaggaagtgagaagctgaacagaacttttaaagtttaaacttaaagaataaaaacacaagagaaccagaaacaggttcaattatgctgaatactctatttcccaaacctatcctctacttgtctcattaatgtctatatttct

SEQ ID NO: 171315 - DNA, 465 bp, Homo sapiens
ttcctggcataattagcctgttatgtggctatgccttttgaaactactagaccaaatgtgtgtgaagagtaattgaccacaggataaacctaattgtgttttgtgaaggaggtgtggttaagtgagctgcaatgtgagaagagaggagaaattctctaatgcaattattctcagagttcctgagactctcaggagatctgcaaggtcaaactctcttcaaataccaagatattatttgccttttttggtctgtttctctcataagtggacagatgagttttccagaagctacacaacatgtgaaagtgcaacagattgaatgcagaagcagagacgaaaatctgactgtctcctattacaccagtcattaaagagattgcaaaaatgtaaaacaatgcaactctcctccttaaattattgttttgggaaaaaattttgaaaaatatagtatttattttaacatgt

SEQ ID NO: 171316 - DNA, 501 bp, Homo sapiens
gaaatgtaggatttttgtcggagtttgtaatgccaacaaagaatctcttctgcacatgatagcctgcgttggttttttttcccccatttattttcttctttccttttttctttttgaaaagtgctttaaatgcaggtttgtaatttatatcaaagaattactttaaagttctgatgtctcaggcaaacataagatgcctgggatttggggagatgaggttcttttgcatgtctatatctgaatattttattgccgtgtcgcaaatgttggggcaggcagacaggctgggtaggaggggtcttcctacagcccctgggctgtgaaaagcctttctttgtgcctttcaggaaaggactttttctctgtgagaaaaaaacagctttcctgattttagggagactggacctgtctatggcctccaaaggggaaaatctggggtcatgtcctgctttcagcaactggctttgaagctacctttttgggtccacttcctagggactg

SEQ ID NO: 171317 - DNA, 589 bp, Homo sapiens
cctagcactttgaggagaccaaggcagaaggatcacctgaggtcaggctggtctcaaactcccgacttcaggtggtctgcctgcctcggcctcccaaagtgctgggattacaggagtgagccaccgtgccaggccttctccaggctcttggcaccttagccagaaacaatttaaggacaagtgcaaaagtcatgaacgtaggcagatttcctgcagagtaaagggactcactgaagaagaggaacgtgggggtcctcaagagagtgtctcatgccctacaaggtgtggggctgacctttatgggcttcttcaactaaagaggggtatattcatgaagattccaggaaaaggtaaagatttctcaagaccgtggtgccacaatttacacccaaatacaggtgttcctggagccgtcttggcactggtgggtgtacggtttcatatgttactgattgtacagtgagatcctaggtgaaacctacatcaaatacagcgccatgttgtgtctggttggtcgtagccagcttggtcctcatcctatttttcagggacttattggcccttagcgcatgcagctatttcaagtttc

SEQ ID NO: 171318 - DNA, 417 bp, Homo sapiens
gacaagacctagattttgacagctgggatcttcaggtgctgctggtctgtcccctggcctaggggatggtccctagagagtctcttacaccgatcagaagcagccttatgaacttcttgccagtcagcctagtgtttgtctctccctagagattttgtccccccttccaaagcctctcaagacccatttctccgtttcctcggaggacatttgctggtcagagggtaggcacctctccatctaaactgagggaagctggtggagtcacattttgggggaagtttcagagtcaaagacctgtgtgaacctaacagaatgttggaatggctggtgcttttgcacacaccaaatgtgttagcacactcacctttatgcacaggacagcgggaattctaggtctggaaaaaaacccaggtg

SEQ ID NO: 171319 - DNA, 469 bp, Homo sapiens
tattaggcaggggctgccggggaataaacgaggactccaaattttctgtaggaggggttttggggggtgagcaattcagtctgggagagagaaggcctttaatcctagtgaatagctctttgcactagcctgggaggaagctgaactgtcatcctgccttgacttaacacagcctttaccctagaagctacagcgccactcttcagaggtctaccctgtgtgcacacagggagaagacgcttaggttgttaaagtcagcatgttaaataattttctgaaatgcgactataactagaacccagctgacttcccccatagccattcttacctatcttattactgattgtctggtacaatcacaaagtgcggtggtactgacacctaccttttagggttgtttgaggatttcatgggataatgaatgtagactgctttgcaaacagtgagctttcaataaaagggatctatt

SEQ ID NO: 171320 - DNA, 548 bp, Homo sapiens
taggtcaaatccaggaacccctgttttccgagttacgtaattttgcagaacggacacagaggctcctgggaaaaactgcctgtccgcctgttaatattaaggtccatttataaaattagaagctatgttgaacagatgaatctgaaatggaacttgcctattaaagttttttgtttttgtttttgttttttttttttggtcagatagccttatttaacctttctgtgtctcagaggttggtggcctttgcctatggtgccttcatggaaaaagttctaaatatagctcctgtttgttgttgaataatgacttgcgagggcggatggtagagtttccaacttctttaagtcagcaaactggacaagagggcatctagtccgaaggaaagccatgtgcctgagtgttcagcactgctgctgtttttactgtggtcctgggtttagtggatgttcagtacactgtgcctgtctctcttgattgtccttctcctcccagtttttacctccaaaagcctgtaactttttcttttttttctttttttttttttg

SEQ ID NO: 171321 - DNA, 218 bp, Homo sapiens
tacattgacaaagctacaccatttatgctaaaaaatctatgatacatattcatcttgaaaactaaacatatactttccttccatccttctggcaaaattaccccaacttactgtccttttactatggatagcatgagcatttttcctcataaacaacaaagagaattaacactaaacagcaatgaatagaaaactgtagtgtaaatgttttataccac

SEQ ID NO: 171322 - DNA, 168 bp, Homo sapiens
tgacataagcggagttgaatttactaatatggttttaccaagagagtttttcaggagagtagtggaagggaatagaagtatacacaaggaaatgattacagtgatgaattgtggaatataagctgagtaggaagggaagagggtcttgaaaagctggtaggcttatca

SEQ ID NO: 171323 - DNA, 371 bp, Homo sapiens
tgctcaaaacagcatacaataaatgttacctcctttcatttttcttaagttaatgtttttatgcccaatcctgttttatcagcttaaaacccaaatgttacgtaaatataacatatagtatgactatcattttaatcagtgattcagaatctggctttgaaaacaaaaatctcccaaatactttacttatactgtatgcatttgacatcttatgaaatgtacatacctctatgtcatttcgaatatgaagtacctgtgtttttattttaataaaggttcaatgagaattgatttgtacttttattagcagattatagacatttgaaaaatggtaaaaacaaactaagactagaacactttacttcattagc

SEQ ID NO: 171324 - DNA, 393 bp, Homo sapiens
aaaatcatccacaatcccagcactttatcctttccccagacatctacacacactctcttatttttaaaaattgaggttctacatcatggtttgatcatctgcctttaaacccatttttgctggccgggtgcagtggcacacacctgtcatccagcactttaggaggccaaggtgggaggatcgcttgggcccaggagtttgagaccagcctgggcaacatggcaaaaccccatctctacaggaataaaaattagctgggtgtggtggcatgtggctgtagtctcagctactcaggaggctgaggagggaggatcgcttgagcccaggaggttgaggctgcagtgagctgtgatcacgccattgcactccagcctgggtaacagaccctatctc

SEQ ID NO: 171325 - DNA, 527 bp, Homo sapiens
atattgaggcgtttagcatttccaatgaagagtaaatccgctgtggttgggtggatgagcgtggtcacagtggtgaaactaaatgcttggatttctgtgatcagatggggtcatctccactcatcacttcctgaagtcactgcccatttcgtcttgcaatctgtgactctcacctttagacccagctttggaagcctaactgcagagacattaatgcatgtaaatgtgcaaaatatgtaattttgccccacaggcagctttggtgttctcatgttatagttcttaatctaaattgtaggtgctaaacaaaactacctgccttaatggtaggcagaggtatttgaaaaattaatgatctacttgtttgctgaatgtccacaatacaagctttgatttaaaaaaatcatgttaggatagcatgtttattacatactatttattatcatacttaatatttcttgcctatcaaaagtaaaaacctgatgctttatgttaaatgtttcttgcccattggagcctgttcatgg

SEQ ID NO: 171326 - DNA, 381 bp, Homo sapiens
gtgtgatttcactcttgactctcatttgtaatggttgttctgcctttattaattccacatagcacagaacaagtctggagaagtacatataagattgcaaaatgtggttatctggcatgggataagaattaggttaaagttggggaatgttcctttaacttctcactttgtatgttttttcaaaatggtgaacttcctagtgaattttaacactttcatttttcaactttaacatgtatttgcaaattaataagtatatataacctagcaattacatcccagttacataatcatgtttactaaaaggcatacattagaatgttcctagcatcacctcttgtaatagcttcaaacggaaatattgaagttctacaaaagaag

SEQ ID NO: 171327 - DNA, 747 bp, Homo sapiens
aggaatctaggaggaagtctctatcccctttggggtaaaggcacagagaatttcaggcagtaatttcccccttcttggagtcagtcccaggttagactcagactcattgagctactgctatgtagacatcccatcgcaggccaggctgggatggggcacttctgggcagcaggatgtcatggctgattcagcttatctggaagcccagtgatcaggtgtaacagaggcagtccccgaaacttagaggggttgtgatggggcccacagcaggcaagcctacctagaaactcaagatcctgccctacgagtgagagcaagccctgcgggagggccaggcgatgaaagcctgcagaggtgaggcccgcaggtgcctggtgggactcaggctgtgttttagaaatgcacctggaaatgattatgtgcatctggcaggcaaaggggccatagagaaagcacgggcattcattagcggagctaaagagggggaaggtggactttcctctcaagcctgggaatgtggagggctgcctttctgggtggggactgtggggatgcacagaggatgtgtgtgtctatttccaatggatacatgtttgaaaggcacacaggaggccaagcgcagtggctcacacctgtaatcccagtactttgggaggccgaggcaagaggatcacaaggtcaggagatcgagaccatcctggctaacatgatgaaaccccgtctctactaaaaatacaaacaattagc

SEQ ID NO: 171328 - DNA, 357 bp, Homo sapiens
acctaaattgtagtgtacatactaacactagaatcattaactaattttagacaatttaacttccaacactattgtatataagtggcatgaatttacttgatgggcatcatgaccctgtgttgattttctttctacaagtctgcatgcaaatgatgtattttgtgatgttagcagattaatttccaaacacaaaatgaagcatgctttaacagttgtaacagcattattctaatgtctgaaaagaggcattgtttctgtgaaaatacatttacaaactttatattgtaaaacacctgttgaagatagcatcaacatttcctatgctcatttctacctttaaatttggaccaattcttt

SEQ ID NO: 171329 - DNA, 393 bp, Homo sapiens
agtccttccttcttcccttcctcttcccctttcacttccccttccccttccccttcccctttccctttcccttccttccttcctgccttccttcctttgtatttgcttataactatatgctggatgcaatgttaagtgccgtgggtactgtaaggaataagatagcatccttgttctctaggaagtcacaatacagacgatgaaatgcttaagaaaactcataattcagagcaagagaggccagagcctgaaataaagatgtgttattgtttgcacatatctttacaaaggtatgtataagatgccatgggaacacaaagaagcaaagagcaaagtgagcctattggagatcaaggaagatcatgtaggcttggttgaatagatgagcagggg

SEQ ID NO: 171330 - DNA, 192 bp, Homo sapiens
agagtgactggtttgtttcaacacgtaaaactggcatcaacctgtctgtgggtttcaatgctgttgcattgcagggactgaaaaagtgactgtgtaaggagaaggggttaccctacttttttcaacagggtaactaaattcagtttattgttctaaaacagaggggtgtgtgtgtacgtgcgtgcacgtgcg

SEQ ID NO: 171331 - DNA, 357 bp, Homo sapiens
ccagctagggcgacggagcaagactcagtctcaaaaaataaaaaaacaaaaaattctggtaagtgaaatagaagatactgttatgtaaaagtagagggctggaggaaggtcagcagagaggaggagaaatgatggaaattgcttgttatgttagacagggtgacacggaaactttctctcaggaggtcatacctaaattgagaagtgaggatcataagaagtcagctgtgtgaaagatcatgagaaaagctgatcaggcagagggaacaaaagtatcaagatcctgttgcaaaaaatagtttgtcatttttgagaaattaaaatgagaccatggtaatgagtttgagatttattcta

SEQ ID NO: 171332 - DNA, 881 bp, Homo sapiens
aagctggactgtcagatggggtcagtgcttggcactccctgactgccaagctcaggagttggtcctccacctggggagagattcggtcagactttcaggtttgggagatcttcaggaccatctggagggggatgggggtctccatagtcccattctctgggccccaagccttggattgggctggagacaaggcaggagaggaagccacaccagtgtgtttagagaatggcaggatttatgagaaaagaaatggggttccatttgcctgtgtcccagcctgagagcaggaaacccaagactattcagtcacaccaagatggtgcatgctgcagggtccaccccttgctgtcctgctgacctgggcagtgaggagagctgcacttctgaggctgcaggtgcaaagcaggcacccacctttgcccctagtactgcaggctgctgccaggtaggtcccagcagttgtcattaaactccaggaaggcaatttttgagctggatctgatgcctggggtggcctggtgggtggccagccctggaggagaggaggcaccccaggcaggggaagtgtaggctgtaactggaggtctattggataagtagttgtgaccagggtagggcatttggagccttgtgaattctcatgacaggtgccccagccactcttcaccaaaagaagccaagttgttttgagacaggctctcactctgtcacccaggctggagtacagtggcaccttcagggctcactgcagcctccatctcccaggctcaggtgatcctccctcctcagccacccgggtacctgggaccacaggtgcatgccaccacacctggctaatgttttgtattttttgtagaggtcgggttttgccatgttgccaa

SEQ ID NO: 171333 - DNA, 272 bp, Homo sapiens
gagatgaaagcagaaagacttcagtgtacatttattgagtctgacatttttctctcacctgatagagacacctgcctgggctgagtgaggtgggcagtggcctgagagtgggaagggaagagacttgggagggaggtggtgctgttgctgttccttgcttccaattttcccctaggccacagggctctggccaagacagcagctttaaccctggttttaagggctggatggggagcttgggtgggagaggacagtgggagaagtgggaattg

SEQ ID NO: 171334 - DNA, 669 bp, Homo sapiens
aaaatctatcagtgtaatctgtaacattgaacaaattaaaggagaaaaaccatatggtcatcccaatagatacattaaaagcattcaataaaattgaacaataattataagaaaaactcttggcacattaggaataggaggacaatttcttaatatgataaaaagcatttacaaaaaataagaaaaaaattttaagaatagcaagcatgccactttaaagtatgaaagaaaaggttgcctgttgtcatgcaaacttgtcaacattatactagaagttctacccaatgcagtaataaaaagagaaagaagagaaataaaaagattgactagcaagacagaactgttattatttgcgcatgttactattacctatatagagttaatagaaaatgtctgcaaatatgctggactaaaaatcagtttataaaataataactcccctatcaataatcaattgataaaaagaaaaagcttaccagtaataataacaaaaactatagaataacaaggataaacataacaggcacttataaacaatttatctgaagaaaactataaaactttgctgagagacatttaaacaaatagactggtaagactaacacaataaaacgcaaatttcttccacattagtctgtaaatagaatcctaggttttcaggtgttttat

SEQ ID NO: 171335 - DNA, 722 bp, Homo sapiens
tgaaagaatggctactccatactctatagactactccctcagggctgctggttggccatttttatggttgtttcttgataatatgctaaacaagggaggattattcatgagtttacagagataggggtgggtagttcctggaactgagggttcatcccctttttagaccaatatggggtaacttcctaatgatgccatggcatctgtaaactgtcatggcgctggtgggagtgtcttttagcatgctaatgcattgtaactagcatgtaatgagcagtgaggatgaccagaggtcacttttgtcaccatcttggttttggtggtatttggctgacttctttactgcaacctgttttatcagcaaggtcttcatgacctgtatcttgtgctgacttcctatctcatcctgtgactatgaatgccttaacctcctgggaatgcagtccagtagatctcagccttgtcttacccagccagtattcaagatggagtcgctttggttcgaacacctctgacaacatcattcctccttaggccttttgtttctgtttccactgaatgcaggtaagtgctatgggccagaggaacctggagaaggtgggtgtgccattgtagcagtggtggctcagttgagcctccaggcagctgcataatgcaacaaagcaagaagggagctgccaatcaccaagtgaaaatacatggacgttagtgttcagtccgga

SEQ ID NO: 171336 - DNA, 399 bp, Homo sapiens
atgggtgatttcactttgtaaaagtttattgtgctctgtacttacaatttatgcactttgcacttttctgtttatatattttctttcacttaaacatattgccaagaaaatcaaggctgtattagaggatgctatctagtttggaatggctttcttgcttagaaaaacttcctgctttgcagctctgcactggtgactgacagttgtgacattcagcagttctattacaatctactgaccaaatagagctttgagcaaacagatttcacaaaaggcagtgggtggccattgagttgtttgttttctgcttgtatctgcttagggtggtattagcagcagtaataggtatatcttctgatgttgattctggaatttgttatttgttgacttattctcatc

SEQ ID NO: 171337 - DNA, 556 bp, Homo sapiens
caggccttagagggtttcacttaatctggaatcaattgaaacactgtaactaaaaggttcatcacaatatttagtctttatagacccaatttccaaaatatcaaagttgaagggaagtagagtcatttttcatcatatttgcaaaaaaattctcccacaggctttggacctgcatctggagggaaaaataagagattaatggggaaaaaaatcatattatatcttaccttatccactgccccctgccttcaaatctttccccatcataaggtttcttcagtcatgcacaaatacttcagagactgctacctcagacactgccgtcagcgcccagaggattgagatttagtctttgcatcttaattacagctgactctttttcccttgttctgagctgagttatagcaaggaaagggggagatgaatgaatgacccatgcatctgacatctaatatctgctacttcagatttggggtttgatttagtgtctctatcagagagtttgaggaaacaaagtcttttatcttctttaaataaattcatgcactgaagcaca

SEQ ID NO: 171338 - DNA, 775 bp, Homo sapiens
tggggtggaggcctgggccctgtaaggagaggaatgttggttactcccattttagggggagaagactgaggcccaggcaacatcctgtaggtagctgggggcagaggcagcactcacatttaggaccattctcgaaggttcatgctgccatgccctgcctggggccttggttggggaagtggtaactgagctggggcctggttgtgcagggtgggccacgtgcctgccttccccgcctgctgggcctccctcttgtccaccatccgcctctgcctggctgactgtccattctgtctttgctgacccctccttctgctccgtgccttctgcttctgtgtccccagtgcccaacacagagcccagcatagaatgggcacaagcaaagttttgctgagctgtggggaaccctggggaagagtgactcgcgcaggccgttgcagggcagggatacgcctaggccaggagggaggagggaggaggggcagtggggtcagaggccagcctcgccagctctaggtgagccactctctggttcctcctgctaggcccatttgtcaatcttgctgaaaaaatgtgtgtgtaggggcaggagcaaggagagagagagatagaaaacaagagaaagggggagagaggaaaaggaaagacaaaaactcccaacatcaaaaacccaagaaaacacattggcaggttccactttcaatcctaagaaaggaaagccagccccctggtggccactgagtctccaccacctggatgcaggtcgacccagtgg

SEQ ID NO: 171339 - DNA, 445 bp, Homo sapiens
actggtcacactggggctgcctcaggcagtggggggtggaggagaaaccacacaaggccagaggcatctctgggaactcctgagcataccttagaaccagcagcctcctcccggcacggggagcattgcggatcctcacgtggagctcggttgagttcagcgccaggctgtctggcggtgactcgggcacgggacagatcctgacttgctggagcattcagaggtgttcattatggaatccctgtgggtttcctgtctctgtccttccggcttcagttctccatctccccagggaatcctccccatgtaacatcaggctgtgactcagcccccagcatctttctccctttctcttacacgctgggccggataatctttatactgagccttctgtgcgctccccttttgaaagccccaaatcctgcttaatctcagcagaaagcct

SEQ ID NO: 171340 - DNA, 386 bp, Homo sapiens
ggaagtgccaccctattttaagcaatcagatcttatgagaactcagagtgagaactcactcgttatcaagggggcagtgccgagctgttcatgagggatctgcccccaagatctaatacctttcactacctaatctaatacctttcacctcgtctaacattggagatcacatttcaacatgagatttggaggggacaagatccagaccatatcaggtggggtcagaggtcctgctaaaactgtgactatcagggatgttattcagatattagtgttctgtacttaatgggtgctgggtgggctgcctgtgtaaaaaacaaaaaaaaagatattgacacacatacacatacacacacacacacacacacacacacacacacacacac

SEQ ID NO: 171341 - DNA, 343 bp, Homo sapiens
caagtttcaatttggtttctgctttcaaaatcttgtcatacaatgacattgtacagacgtttaaaagagttttatttcttaggagagtggcccctttcctaatagctctgtactttaaaatagaattcccatttagatgaatcacattttaaaaagtagctactgtgagtgttttacgcttgtggaaacatatagcatcctcataagcagcatgagagcctgtcaccatacagcttttgatgtctgattaaatgatcgtagggacatctggagggagttagttttgaagtaactggtgtgaagcactggagaatccgaagccttctgacagactaaaaccatt

SEQ ID NO: 171342 - DNA, 491 bp, Homo sapiens
gtaagctgccctgacaggacagttgaaacacaattgtctaaagggttaaaatgtctgtccatttttcaaatgcgatggccactctgaatcaaatctgattgggatggagaatccaaatgtgtaaaacaaaagtcacaaaagacaaacagagcacagtatttcagtgggggaaaaaaaataagctaaatttagtcacttaagtcccagctcttcttgggatatatatatgatttttacgagaactaatcctatccggaaacatttccttcacctttcccttagcccttttccttcggtcatgcagtctcttaccgtgctaattatcatattaatataatcctcacttgcgatccttcctgactttattccccatgctcagattctcctgaaagcataacgctttcctaagtatacacacaatccatttaaaagtctttgtatgcgacagcctaactattcaaacacgaagtcatttctctaacggtcctaga

SEQ ID NO: 171343 - DNA, 1273 bp, Homo sapiens
cctgatgagcggtgcttccctcagatgatatgtgggcaccctgaagctctcacgtaatggttctgctgtgccgggttgtgacccagctgtccttggtaggctctcctgtttaatgagcaactgctatatgccaggccctgttctagaaacagatgaggcccctgttcccatggaacttagatctgagtatgtggacagagtgagtaggttgccagataatgtcagaggtaagaaaaaagccaggcagaggacagcagtgctggtttagacaagggttggcaaggcctccctgataaggggacgtatttgcgcagacacggaagcagtctgatggaaggcttgccctgtagggacctggggtgcagactgagctgggaggactcttggcttgctccaatgaggtaggggcgaagagagggcagaatggcccccgtgctggtccagatgtggccagtgccagatcgtatagagccgtggaggcacggtaaggacttggggtttgagggagatgagggccctgagcaggggtgccatgatctagcctctgctccagaaggatctgtctggctgccatgtgggggacatggagtggagcaaagacaggagcccagtgagagtcgagggagaggtgacctcagcttgggctgcggtgcaggccatgggactggcaggaggtggctggggttacgctgtcttttctaacattcagcattggctcaggggccaggtcagggctcacagactgttgctataaagggctgggtggctttcttccccacagctactcagcctaatgccattgcagagcacatgtagccatggacaacacaaggggcgtatccgtgttccaggacagccatattgacaggaataggcaggaggccagatttggtcctcaggctgtaatttcttggccccttgtctagggagaggtaaacgaggggaggagagatcagtcaaggatgacgtgagggtttgctgggagcaccaggaatcctggagaaggtagtggcaagagggtgcagcaagctcagctgggctgggatcaagtctgaggacttaatgtctcctctgatctccagacccataagggagatgctgagtagacaactggggcttatgggtctggagttcagaggagagatcgggaaggtgtccatttggagtcatccacgcagagatgtgtgaaggctgctcaatgattttgaggtttaaagaaaaaaagagatgtgaaaccaggggccctgatgaggctgcccaggtggtaaggaag

SEQ ID NO: 171344 - DNA, 792 bp, Homo sapiens
gactatggcaggtcgtgcgggtgttaattggccgagggagcactgggtgccatgatctagcctctgctccagaaggatctgtctggctgccatgtgggggacatggagtggagcaaagacaggagcccagtgagagtcgagggagaggtgacctcagcttgggctgcggtgcaggccatgggactggcaggaggtggctggggttacgctgtcttttctaacattcagcattggctcaggggccaggtcagggctcacagactgttgctataaagggctgggtggctttcttccccacagctactcagcctaatgccattgcagagcacatgtagccatggacaacacaaggggcgtatccgtgttccaggacagccatattgacaggaataggcaggaggccagatttggtcctcaggctgtaatttcttggccccttgtctagggagaggtaaacgaggggaggagagatcagtcaaggatgacgtgagggtttgctgggagcaccaggaatcctggagaaggtagtggcaagagggtgcagcaagctcagctgggctgggatcaagtctgaggacttaatgtctcctctgatctccagacccataagggagatgctgagtagacaactggggcttatgggtctggagttcagaggagagatcgggaaggtgtccatttggagtcatccacgcagagatgtgtgaaggctgctcaatgattttgaggtttaaagaaaaaaagagatgtgaaaccaggggccctgatgaggctgcccaggtggtaaggaag

SEQ ID NO: 171345 - DNA, 511 bp, Homo sapiens
ggaacgtggaaagtctagactgactaagcctggcctccatctgtctctggtgctggatgtttccttccctcgaacatcagactccaagttcttcagcttttggactcgggcttaacaccagtgatttgccactgaaggctgcactatcagcttgtctacttttgaggttttgggactcaggttggctccctggctcctcagcttgcagatgggctattgtgggactttaccttgtgatcatgtgatggtatagatggccttcgggaggtgatagatcatgacatggagccctcatgaatgggattcatgctctttcgaaagaggccccacgactgccttaccccttccaccatttgaggacacagctaggagataccgtctatataccagaaatacacaagagaagagacctcattgaaacctcaacagacaccaaatctgctgtcaccttgatcttggactccccagcgtccacaactgcaagaaataaacttctgttgtttataaatta

SEQ ID NO: 171346 - DNA, 627 bp, Homo sapiens
ggaacgtggaaagtctagactgactaagcctggcctccatctgtctctggtgctggatgtttccttccctcgaacatcagactccaagttcttcagcttttggactcgggcttaacaccagtgatttgccactgaaggctgcactatcagcttgtctacttttgaggttttgggactcaggttggctccctggctcctcagcttgcagatgggctattgtgggactttaccttgtgatcatgtgatggtatagatggccttcgggaggtgatagatcatgacatggagccctcatgaatgggattcatgctctttcgaaagaggccccacgactgccttaccccttccaccatttgaggacacagctaggagataccgtctatataccagaaatacacaagagaagagacctcattgaaacctcaacagacaccaaatctgctgtcaccttgatcttggactccccagcgtccacaactgcaagaaataaacttctgttgtttataaattaaacaaacaagaagaaaagaaaagagagcaccagcacaaagaaaacaacggagaagagaagagaaagcgcggccgcgcggggggcccacggagggggggcggggccgaaggggggcc

SEQ ID NO: 171347 - DNA, 829 bp, Homo sapiens
aatgatgttatttgctggagtaattgatggagttgcatgtcttataacctctggaataacggctgacaatctctcaagtctgcgccttagctggactcaggttcctcttctccccacagcctgactgcctccattagcttcacaaaagtggttgggtttcagggcaaggcccattgtcatttaaactgtagccgaaatgacttccaaagttagcttggcccaatagcccaggaatatttaagtggaaggcaagatgggggatgggttagcttagctctctttcactctcatagttttctcactggtataatttttgcaaaggcggtttcatgcctgccatctctttcgtcgctacctctcccagttcccattcttagctgttttatgaaatgcttctagtttcatcctcttataccaagttctgggagactgatttgagtaataataaaactccagtttcccatacagccggctctgcgtgaattaaactcattttctattgcaatttccctgtcttgataatcagttctgtgtaggccgtgaggaaggagaacccgttgggtgattacgagactgtgttactgcccactacctaatggatacatttagcctggtatccaaacccatctaattatgaccataactatatttatcaccttgctctgctttcaaacgatatgacacacaatgaatgaaaactttcatttttcatcttcatttgtgctgttccctttgcctcaaatagccctcaacttgcctacagtaactgtaaaatttgccacctaaaaaaaaatctcaaaatcctctctatgctttgatgtccagcaaa

SEQ ID NO: 171348 - DNA, 511 bp, Homo sapiens
tggcacagtgccccatacacagaagacatttatggacggtagtggctattacattccctggcacttgggagacactcattgaatgtttatagggtggatgcagaagcctaccataaaaggcttcattgagtagataggccttaaaggataggtgagatctgggcagacattgataagggaggaaggcaagcagccactccctatgggaggaacagggtgggcagaagaagagaatcagaggcttgcccagtgctgccctgctcgggcaagtgaaggaatcagtctggaacaaactgggggaagggctgtaggaagggcagaaagggtagaaaggggagtcaggatgagcatgtatggggacttctgagtctgcctcgccagatggctgttttgccaggccagcttgctctgcctgatacttgcccttggttccctctttttttttcccctccttttctttctttctttatttttccttttgagatggggtcttgctctgttgcccagactg

SEQ ID NO: 171349 - DNA, 166 bp, Homo sapiens
caaccaattgcccaatatcccaaaggtgacaaatatatatataattatctggtctgcaataggacatgaaacctgataatacatgagtaagcaaaacaagtcatttagaagatgaatcttaggctacagattatcttccacaacaatgtaaaaattgtaaagtttt

SEQ ID NO: 171350 - DNA, 587 bp, Homo sapiens
cggtcgggtctctggctctccaggtggcccttttaggtaaagtccacttaaacgtgactccagacatttatttccaagtctggtggactagaaaccctaaatgacccagccccaatttcagaaaaggaaaataaatgaaactggataaatatgaaacaaaagaaaataacattttagtgaatcaacatgccagcaataaagtgaggcatctatcttactctgaaacttggaagcaggagtttccagtttcaaagtaagatactgagcctgggaactacggaaagtaaggaagatccaaagcagcctccacccaaaactaagtactgaactctgatgacctttcgtttccatttgagagctacaggggcatgagaaacagaaaattaagcccacccaaggtggagagactgccccaccaagtgaagcctagaacatctatagccttagtataagggtaagtaggaaacagactagcaaagaaggggaaagaaagaacatgcctatcttgagaagtcttaactacaatccccactcatatgggttttcagccaatacacactatgtctgtgttttgaaaaaacagacaa

SEQ ID NO: 171351 - DNA, 560 bp, Homo sapiens
tgagacggagtcttgctcttgtcgcccaggctggagtgtgatggcgcgatcttggctcactgcaacctccgcctcccaggttcaagcaattctcctgcctaagcctcccgagtagctgtgattacaggtgcgggccaccacgcccagctaatttgtatttttagtagagacaggtttcgccatgttagccaggctggtctcgaactcctgacgtcaagtgatccagccgcctcggcctcccaaagtgctgatattacaggagtgagccaccatgcccagccatgaatctacatttgatgaaaacatttctttataatattctcaacataaaattatgaatattagttatcaagaatataatctataataaaagtgtgataatttaatcacagaatactactttgtattttctatcgccatttttttaaagagtggagaaacaggagaggagggtaggagtgtcagaatgacctgagcaaagaaccgttaccctccaggcaaagaatctgtcagttccttttcttttccactacatgactctagcctaagcaacctcctgg

SEQ ID NO: 171352 - DNA, 361 bp, Homo sapiens
cagcccccgttcccgccctcactctccagcagccccttcttgctctcctggcctttcttgtccccatccataaacctaaagcctctctgcctgactgccaccggcactcacacccctgctgtcatggagcccaaatgacccgatggctgtggagtgggtgccagggcagctgtgcctggattcacgcctcaaaggacagacacctggagggattcagcagaggggctgcttggggcagtcttcatctgggggttgtggaaggggcacccatggggaggacgtggctcccaatggggggtggcctggacaggggtgcagttgggaccactggtctcacccgctccctctcccccactccaga

SEQ ID NO: 171353 - DNA, 247 bp, Homo sapiens
ttgggcccctctttcctgatactccttaaaggttgttgcttccaggcttatacccagggtttggggcctcctgcctccctgaattctaaggagtagccacatgttccctctggaccagccctggtcaggcctggggagaagggcctgtcttttcttcgagcttccctcaccttcaggtgaccccagtgtagcagacataagaggcgttcattcagcaaatactaattaagcactggcctctcccggc

SEQ ID NO: 171354 - DNA, 446 bp, Homo sapiens
aggggctgcaggcaaccgtctctcttgtgggactctgcagagagccgtgggttctggctctgactcttgatgtgtgacctcaggcgctgtgtgcccctctctgcgcctccagttcactgttcaaacaatgagaggaatgccccgactgtggtctgaggccacccccatcagcacctggggtgctttgtaaactcctagttcctgggcacacgttggatcctcccagtcagagcttctgcatgtaggatctagagagctgcatttttaacaagcaccctgggtaaatgttaggaccacaaaagtttgagaatcactagtccactagaatatgtggctctaagcacagatctgattctgactgtgtgactctgtctgctagagggcagagttgatcccgcatcccagctccattcaggtggtcaccacatgctcactgtcctgctaag

SEQ ID NO: 171355 - DNA, 291 bp, Homo sapiens
cttctccagagcagaggttgtcagtgatgagcagaacaaagatttgagaagcactttccctgcatctggttcagactctgctcatcaataatttcatccagaattaagcaaagtatttgttactgcacacacagatcataagtgctctgctgcactgtacatctgaaatgcaacaaccactggtttgctctgtctctctctcaacttgatctctatcattaacttcacacctgatttatcatcttcttggggaaaacgcatttataataacttttgctattcctggaatat

SEQ ID NO: 171356 - DNA, 201 bp, Homo sapiens
tcagctggacaaggcggggtcagctggacaaggatgggtcagctggacaaggcgggggtctaggtgctgatgagggcagtccagtgcgctcttgttctgggacaggctccagtccccttgctccagcaggtctggggcaaggaggtcagaggtggtgggagggcccctgctctctgtttccacttcgtctggatccttgct

SEQ ID NO: 171357 - DNA, 464 bp, Homo sapiens
gtttctaggcagtatgaaaatgaaggaaactttgctagtgcaagaagttggtaggccgggcgcagtggcttatgcctgtaatcccagcactttgggaggctgaggcgggtagatcacttgaggtcaggagttcaagaccagcctggccaacatggtgaaaccccatctctactaaaaatacaaaaattagccggatatggtggcatgtgcctgtaatcccagctacttgggaggctgaggcaggagaattgcttgaacccaggaggcagaggttgcagtgacctgagatcgtgccattgcactccaccctgggtgacagagccagaatccgtctcaaaaaaaaaaaaaaaaaagaataagttggtgaaacaattggctgggataaccttgttcctatgtgtgaatatgtttttagcctcattgtattttttgctgtcccttaaagtgctgtgagataattttag

SEQ ID NO: 171358 - DNA, 1063 bp, Homo sapiens
tgaagaggaatggtaggggtagtcctggtcccttccacctctgacatatgtagtcttctgcaggtcaggctgtttgtgtgtgtgtgtgtgtgtgtgtgtgtgtgtgtgtgtgtgtctgtcagagattcactcttgttgtttgtttgagacggagtctctctgtgtcgcccaggctggagtgcagtggcgtgatcttgactcactgcaacctccactcctgggttcaggcgattctcctgcctcagcctccctagtaactgggatgacaggcatgcgccaccactcctggctaatttttgtatttttagtagagacgaggtttcaccatgttacccaggctaatctcgaacttctgacaccaggtgatccgcccgccttggcctcctaaagtgctgggattacaggcgtgagccactgcgcctggccaagtcaggctggttattgatctgctcccctaaaagaccatggcatgagttctgtgggcagagagggggcagggagttgccagtgcagtccccacaagcagctcagtaggcccctgtggtggccctggagggcagctggcagaagtcagaaaggcaaatgagcccccgtgacactgctgtgtccacagaattctccactttgagaatagggcccaggagaggggaactgaaaagaaaggcaacattctcttgggagaggaaggagggacagctctggaggagacaggccaccctggagcccagcccaccagcactgttgcggtgggaggcttgggccctctggccaggctcctgtgtgcttggagccaccccgtgtgcaggggagacctctctgggaggtcagctgaggcctcgtagttggactgttgatgatccccgtcgtcttctctgcccccatcctcttcttggctcaccctgtctcctgtctggtagagaagattctccaatctgtcaagggttcaggcctgctgtgtggctgagggtgctgagagctgccctttctggcagaatgtttggccctcctaggttaatatttggggctgggagcgttggggagcttggcctgggcagtgagtcaa

SEQ ID NO: 171359 - DNA, 492 bp, Homo sapiens
  misc_feature (68)..(68): n is a, c, g, or t
  misc_feature (101)..(101): n is a, c, g, or t
ccattatcatggatatctatcacctcaaacatttactttgtgatacaaaaatccatttatactcttanttatttaaaaatatacaatttttaattattttngacggtagtcaccctgttgtgctagcaattactagtttttattcattccaactatatatttgtacctgctaaccatcagtacttccaccccaaccacccactacccttcccagcctgtggtaaccatccttctactctgtatgggggatctcagatcccccatacagagtagggagtcaggaaggacataggatttccccattgatgtatctttgtgtcaagagctgaaaaatgtaggagggtactgccttactcttctgagctaatcaaaagcagcagcaagtacacagtgaaataagatttagttgttaagtggcagagaagagtgttacagtttgaaagtttatgttgtatactagacattatgtctaagtactctgttgggggatct

SEQ ID NO: 171360 - DNA, 424 bp, Homo sapiens
atcaaacttcaagcttctgccccaggacctttgtgcttactgctctccaatctggaatgcacttcacttggtccttttttgtctcccattttaaagatggtatctccctatgttgccccatctggagtgcagtggttgttcacaggcacgatcgcagtgcactgcagcctcgaactccccagctcaagcaatcctcccatctcagctccctgagtagctgggagtacaggcacatgacaccatacctggtttccagttctctcaccacattcaagaatctactcagatgtgaccaccttatagctgttttcaccacctaatttaaaatagcacagcacctccacaaacctctattccccctccctgagcgctccattcctttacccattcatacctcacgcatcactcatcactacctgacatc

SEQ ID NO: 171361 - DNA, 387 bp, Homo sapiens
tgtgaggtagggatccagtttcactttgtccgttatgtagacagctgagtggcttgggaccatgtgtgggaatgctcctctttcccatttgccagctctgttgtgtgtgcgtgtggacctgtttctgggctccatcttctgtccatcagtctgttggtctgctccatgccagcactcccttgtctacaggctataaatcttgacatcagatagagcttgttcccctcccctgttctccagggatgccttggctattcttgacctattggtcttctgtggagattagagaatcatcttgtgagttccctatgaaggaccctgtagataattttcttttttttttgaggcgggattttgttctttcacccaggctggagtacagtgcac

SEQ ID NO: 171362 - DNA, 657 bp, Homo sapiens
atggctcttctgtgcttgtgtgctgagcccgagtgctcggagcagacctcagaataccagggtacagaggaacttgggtcacagtcctggagcccagcctcgctgggtcctgggagaccacattttctctggacccttcatacagaagcctgggccgggtgtggggggtgccagctgcctggtgttgttctccaggttcctcttgttgttggccaccagcctctcgctgcctgtgttgcagctcttctcctgtggtcttctgtttacatcattggaggcagctctgggtgcccagcttgttggaaggggggccccatagcgatgtgtcattgactaaaaggcacgttctttctgtgtcgagttggtgtagaaaccgtggagctggtatgagacaggaaggatgttgacatttctcttcagtgaaccctgctcagcctcttgatttccacctctgtcgggaatgttgctgatggggtttctgatgcatgtttaccatgcacgggtgtctcccattagtcaagagctacatgtttgtctctccgtgtagagagccagatggcatgtttgcatataaattatttaagagaagaagtctagtcgaatgacagactgaagtagagttgttagtgtccttctatgtgtggcctggctcgattg

SEQ ID NO: 171363 - DNA, 521 bp, Homo sapiens
tgtaccacaccaccctgtgtggcatatggtgagcaacctaacctctctgtgcctcaacttccttatctataatgtgaaaatgacaataacaataggtactttagaggtttgttggggaaaatacatccatttatgcagataaagcacttgcaacgaagccagacacatgtgtaaacatgcaataaatagttattgttagccatcgactcactttattgaccaaacttggcccccaaatatttgctaactctgagaccccagctcgctatctgcagagccacatgggcgtcccatttgccagtggcatctgaggacatccttagaagaacagctcctaagggtttccagggatggcagcattatcggaattcctgctgtaaactcacgtgaacatatgctcttctattaatagttcatttttaaacaacaacaaaacaagcctcggattcttgaagatgccttggtaagttgatcttatgtccctgcatgatgaattgttctgaatgtattccgtgaagatc

SEQ ID NO: 171364 - DNA, 136 bp, Homo sapiens
tgagcgaatggtgtttgctgtttcctgcaaaagtcccaggggttgttgggtacacaggtcctgtctttggccacaagcaacctgaaatgaggcttggtcttcttcccgggaccccgggctgtgcctcacttggggg

SEQ ID NO: 171365 - DNA, 156 bp, Homo sapiens
tgctgggattggaggtgtgagccaccgcgctccaccctgatggacatttattacatgcaaactgacgactatctgcagggagtgggtgtgtttggaattaggcctggggagaagcggttccaggattccatatatggggaatttaaggtgtggaga

SEQ ID NO: 171366 - DNA, 212 bp, Homo sapiens
tctactaactcagctcaagcaatctaggcccttcacaaatataacaatgacataatctcttgcaattaatttatggaccctatagattgtttagaaaccattcattttgttgaccaaatacagtgttcgcttattagtttatatggcatcaaagacacattcacattaaattagcattttaatacataagttacttttaatggtgtgataaa

SEQ ID NO: 171367 - DNA, 319 bp, Homo sapiens
tgatcagttttactttagaaaaatgaaataatactgtgcataatcttttataacttgtttggcactgaagtacttttgtaggtatttttgtgaacatcataattatgcagcatagtatttagtatgtatatccaattctattgtaattaatagtgtaatttttaataaattccttttgggcgtttgaatgttttgattttttttagtataaaatctaattggtgaacattgttaaactaacatctttgtactttagacaattatttatttgggttaaagtcctagacatgtagttgttaagcaatattaaaattgaaca

SEQ ID NO: 171368 - DNA, 572 bp, Homo sapiens
tttaaaaatcagattttacataaaaatctcagacctttggcttctcttgaatcacaggatccagcaatactaaatccacaaggaaaactggagctgcctcctttagtgtactctcaagttacctaaagtaccgttcagccaatttctctaattgatattatgctgtctgtgccctataggcacttgagttcttcagtctctacactagggtttgcaagatatggaaggggaagatgggaggatggaaaatgagtctttcctgaagaaaccttgcaagaggttaaagacgagaacagtgagtggtcccaactttcttgatcatatagccctttccagaggcaaatttaatgagaaagaactgcctacaatagccaagggctggtaagtacctatcttccagagggtaaaaggatacagtaccaaaacattcctattaaaagaaaaaagggggccgggcgcggtggctcatgcctgcaatcccagcactttgggagcgcgaggcaggcgggtcgcctgatgctaggagttcgggacccagctggccaccatgatgaagcatcatctccactaga

SEQ ID NO: 171369 - DNA, 590 bp, Homo sapiens
ccagctctctgtaccactccttatgttgctctttgctcttcccttcatctttctcctctattttccttctctcaccattacagagaggtcatcctgaagtgtctgggctgcagtaggagctgccaaacattcacgaaccaccacgttcacattagatgcagagataaaactgcacaaagtctcaatacactattttgcatcactcatctgggacaaagtaaaatttttcaaagtcaactcaaaagaggaaaacaaaaggtattgcaaatctgttctctgttaggcactgagttagtgctggtggataagagaccttgtgcccaaagagcttgcagtccggaggggaggcagacgaggaacacaggctcaaagtgatgcaatgtgagaagtattgggacagggctgaaaacctaccccagcacgaagggctcaggagcgcttccaggaggaagtgacccaccacctgagcttctgaaaaagactgatagtcactgtgtcttgtggaagtttgaaaaccaaagacacttctgctaggtaacatccactcagcattgtagagacccagccgtttaactttccaggtaacatca

SEQ ID NO: 171370 - DNA, 528 bp, Homo sapiens
tttaatttttgcctacctgatgggtgaaaaatgttacttgatgtttcagtctgcacttctttaattcctggggcagctgaacatcttttcatgcttatgactcaactgtattcctttttcattgttcaaggctgtgcccatgttgctgttgacttaccacagcctcttttgaatatgctttgttatttttgttgtgcaaatggtttctcctagcttgtcatctgttttttgttgttgttgttttgttaacttactttatggcattttcccctcaggcttcttaaaaaaaaagaagcttcattgagctataattgatatacaacatctgcacataaagtgtaaagtttgattaaacatttgtatatacctgtgaaatcaaatcaccacctcatcacaatcaaatttcaaaaagtttcacctagtttatcatattgttgaatgtgaatcctttccttatggccagtggattttatgtcttgttgaaacgactttgtcctgctacagtgataaaaatggtcttcacgcttg

SEQ ID NO: 171371 - DNA, 417 bp, Homo sapiens
gcttctgccatacctgagatggcaagaccaacccctccttcctcagcgtactcaacgtgaagacgatgaagaccttcatgatgatccacttccacttaataaacagtaaatatattttctcttccttatgattttcttaacattttcttttctttagcttactttattgtaagaatacggtatgtataatacatgtaactatagaatatgtattactcgattgtttatgttatcaggaaggcttctggtaaacagtagactattagtaacgtttttggagtcaaaaattaaaattatgcaaatttttgactgtgcaggggagtgggggtcagcacccctaaccctggcattgtcataggtcaactgtaaacctaatgttatgagtctcctttaacaggaaacataatgatagtgaag

SEQ ID NO: 171372 - DNA, 312 bp, Homo sapiens
ataaaattagaatgagtagagggagaccgacaaactttcaactgttttcaatgacaacacttatttctatgcccttgatttttttcatttattcattccagaaatatctgttactatcatataccaactacagttggcctcctagtcagaacagaaataacaagggataaactattgctcatgtataaaaatctcatgtccataattttagcggactctaaaacttgaagtaaaatacacatgcatgaagttttagcaaataaagattagtcctttaaactagaatgtatttaaagtaagttctattccttg

SEQ ID NO: 171373 - DNA, 275 bp, Homo sapiens
gggaggatgacatataagacaggagttctcagactccaccatgcatggggaacaccggtggagctttcacaatgcctgttgctcgggccacaccccataccaactaaatcggattatctgaggtgggtccacgcatcagtcatgctaaagctctgcagtgagtccaatgtacaaacgaaattgagagtcagcagatgacagtcttgctactcaaagtgtggttcacagaccagcaccattggcatcatctggaaactgttagaaatgcacacttg

SEQ ID NO: 171374 - DNA, 393 bp, Homo sapiens
tccccaaaggatcctattcctgatctctaaatatgcccctcaccagtgcagagggaggagcagtcagagcctgggagacttgcctacctggagctgcacccatctttgaggccttgctctgtttcctggaacctgaaatggatttacctattctacacatttcatagaaatgaaatcacataatgtgtcacattttgtctggcttctctcacttggcataatatttttgggttcattcatgtcatagtatgtacttcatttcttcttatggctaaataacattttatgtatataccacatttcctttatccattcatctgttgatgggcattttggttgtttccaccttttggctgttgtgaataatgctgctatgaacatttatgtacaagc

SEQ ID NO: 171375 - DNA, 360 bp, Homo sapiens
caatatctgtcaacaattttatgtaggttgaacatctcaaatccaaaactggaaatgctccagtgagcatttcctgtgagcattgcatcagcactcaaaaagtttatgattttagagcgttttagattacagatttttggatttggaatgctcaacctgtatgtgaaagaaaggaaaaggaaaactggacaacataagatgaactggaatctatacagtaggattaaatgaacattatagaactgcagaaatacagtatctgaaatcaaaaactcattggagaccagacacagaaaaagatgggattcatgaactcaagtacagtacaaatgaaaatacccaatttgaagtggcatagat

SEQ ID NO: 171376 - DNA, 546 bp, Homo sapiens
catgcagccttttatatgcctcatcacattatggccagtgattctttatccctcctatcatatacctcctcagaatccccttactgctggcttcatagttcattccttttcctgcaggctcatttggataggctagctgctgagtcgatcagcatcttatagcatggaggcagaattgcagaaggcctatcaggcattaaacagttttgctttctcactggcaaaaatagtcaacactgtgcctctcctcatgcaactttaacatgtacttgacttttaagtatgccatttaggaagctttctttttactatgaatcttatctacttggaattatacttaatttttccaggactgcagatgaataaagagagcttaagaagctactttgctaatgtaatccataactttgctacctgagttaacaaacgttcataacactattacatttattctttctgaaagggatatttctgacattttcaaagtctggaaaacatttataactaatgttgagatcagacagaattccatgtgaggagataatt

SEQ ID NO: 171377 - DNA, 254 bp, Homo sapiens
gcagtggcatgatcttggttcactgcagccttgaactcttgggctcaaatgatcctcttgccttagccttctgagtagctatgactacagacaggtatcaccattcttagctcatttttcattcctttcatagagacaggttctcattccattgctcaggctggttgtgaacacctagtcatgagcaatcctcccaccttagtttccaaaagtgctaggattatagctgtaagccactctacctggctgataaa

SEQ ID NO: 171378 - DNA, 316 bp, Homo sapiens
gcccggtatccaggaaacttacaatcatgacaaaaagtgagggaaagcaaggcacatcgtacatggaggcaggtgagagagagagagagagagagagagagagaggagagagagagagagttaatttaaaagtacttgtactcggccgagacatcctagcaggaggtttgggtgcacatgggggcttcccccactttgaagtgagtcgtcacatctgtattagaccctagctgttgcttaggcaaaaatgatgatttagaagaagatggagagaagaggagagttaatttaaaagtacttgtattcggccggacgt

SEQ ID NO: 171379 - DNA, 346 bp, Homo sapiens
ccaaagtcccagagctttctgatttttgcttcttcttgctaggaaagcaattatcctataataatccttctttacaggtaaaaatattttatggtgcacctgcctcccttgccagtggaatgacagtctccatagacctgtgggccatctgggccctgggccagcctccttgtctcacactagcttgttggggacctgcccttgctggcacccatcattccagctccctcctgttgtaactcctgccccaaatcccaggacttgtcgctgccagctttttcccctgttgttccttgtcttcccacccttctcaggactcaggtcaccaggataggtggacatccaa

SEQ ID NO: 171380 - DNA, 333 bp, Homo sapiens
catggtgagtgttagaggggaaaagggcagggcagtgagagtaaaacaggagtctcaaccttatccagtgactgtacactttccgattgtcaatattgtaagtattcaaaccaaactgattgaaacctggccgggcataactcggtggccgagccagcacctctgagcagggcactggacaggctgagcttcctgccacctgactgggaaactctgtttgaagctcagaggtttccagatctccaatttcaagtcagtaagtggtacacctcagctggcaggtggccccctttatgttatgtagctttccaaagtgttccactgtggaatctg

SEQ ID NO: 171381 - DNA, 781 bp, Homo sapiens
taagtctttaaaaaaaatgcttcatgcaaaataattaagaattagcattaaagccttaatgaatgggtgtcattttctaccagcctaagtttcatcaagaacaaatacaagtatattttgaatttagatacctcctttaatccatttggcatcaactgtttcaaatcatgagaaaaatactaggaaatttaagttttagtaaaactctgtcaagttaactttgaattttatatcaagaagaaactattgagaaaaaaacctcatgcttttacacaatagtatactattttcttaacagcaaacagacatttttctcttacgtaccagctcataatatgtctgtctaaaattgttgggacggatgttttgtcccaaagactttctcagagttgtgcacttagtgttgagccataactactgtctggatgcccagaggaggcacatataattttattattttaaaatagcatctgttagccagccacggtggctcatgcctgtaatcccagcacgtggggaggctgaggcaggcggatcatgaggtcaggagattgagaccatcctggctaacacagtgaaaccccatctctactaaaaatacaaaaaaattagccaggcatggtggcgggcgcctgtactcccagcaactcaggaggctcctacctcccacctcagtaggagaatggtgtgaacccgggaggcggagcttgcagtgagccgagatcgtgccactgtactccagcctgggcaacagagccagactccgtctcaaaaaaaaaaa

SEQ ID NO: 171382 - DNA, 695 bp, Homo sapiens
ttgcaactgcggctctgtgtggagcgttatcaggatttgctcaatgcgtgtgcacagagatgcaaaattgcctttaccagaatcaatcttgggttatgtgtggtccaaagaatgcttctaagccccctgcggtaggagtgagacctggaagatatgggcaatgagacaaaggcccccagaccaccactggggagggggttctattcacaggacgggggagcctgcttgggaaggagcagggacagagctgggctgctctgcatgacacagcgggacagggattggctgggaggagatggagtgagtattcaaaaggcaggaggagggagacagggccgcagacctcagggtgggaggggtatgtggggttgggaggccctgacgggtctctggaaggcgaaggagctggcagggcttccaggttcactgtggagcagctggggtgctcttttgtctgctctgcctgcctccgaggtctctgggtgtctccctggctcactaaagctcgtgtgtggtggatctttgagggggaacttgaaaaagacacaagctttgccactgggacactgcacagggcccccgccagggtcctcaagctcaattcccactcgtgtccacctgcccggccccctctgctcatccccggccttgccaggggcacatttttacctccagtgcagctgcagagggagctg

SEQ ID NO: 171383 - DNA, 203 bp, Homo sapiens
tgatgtggtatctgaattaatttcgaccaccttattaaaggtttgtcctggagaaaagtagaatttgggatgacctttgtaaccccagacggaactgaatttttgaacatgccttagactagctttgaaaaaagtctaacttgttaccaagtcattcttttaaggaagaactgcgattgatctttccctggctgctggtggac

SEQ ID NO: 171384 - DNA, 254 bp, Homo sapiens
ttctcctcgccaccctgtctgtgacaccttactagctagcatcctggggcacggtgttcatgtgaggcagtgctgactctgggggctggggtggtgcaaagataacaagactcaggtcctcctccaaagcacttttaactctcaacaaaataattcatttttaccaactgctgattgcatttcaggcaccatgctaacgacatctcatgcagtatctagacccatccttgccacaaggggagatggtgttattg

SEQ ID NO: 171385 - DNA, 255 bp, Homo sapiens
taagctgaaatcacaaccacttgtcaactgtgtaaacttttatcaattattaacctccctgtgcctcagttttctcatctgtaaaatgggactgataataaattgttataaaattgttgagggactaaatgagttaattcatgtaaagcacttaagacattgctttaccatatggtaggcactaaacacatattaacctctgctattattgactttaatcaataatatttttaccttcttttttggtcacgcaca

SEQ ID NO: 171386 - DNA, 338 bp, Homo sapiens
tgctcattcaattgtttcagttacttacagattctggatattagacctttgttggatgcacaatttgcaaatattctctcccattctgtaggttgtctatttactctgttgatagtttcatttgctgtgcagaagctctttagtttaattaggtcccatctgtcaatttttgtttttgttgcaattgtttttgaggacttagtcataaattctttctcaacattgatatccagaatggtgtttctgaggttttcttctaggattgttatagtttgaggtattacatttaaatcacagtgtaatttgttagtgtaacataactactgtattcttgattc

SEQ ID NO: 171387 - DNA, 210 bp, Homo sapiens
gcctttggatttatggagaaatgactgcatttagcaaaatatgtctgtttttttttaatgacagtcttaagtctgactgattatatttatccccatctctgtgttcttctttctgaaatacacacctctctcttcttttcttttctgcttccattgaaggacttttggcccaagtgggtgtttgtattcattgcaccagccagcccaagt

SEQ ID NO: 171388 - DNA, 278 bp, Homo sapiens
ctgagatcgcaccactgccctccagtctgggcaacagagtgagactcctttaaaaaaaaaaatttaaattaaaagaatatgtattgacactgtagatttgtgacatatcaagattagaagttgaattagtagtgccataataaagttactagataaagggcttatttttgtgatgctaacttgatatgtaccatatatgtttttctcatactggtgcttcttaggatataatatttttagttaggatatgatacctgtgacttttaacatagattcag

SEQ ID NO: 171389 - DNA, 823 bp, Homo sapiens
ccatttaatagctgtagcatctttgaggctgcaaggcttctctttgccccaatttcttcatctataaatgggggtattattaataatagtgctatctcatacattcatatatgtagaatatgtagagtacttagaatttggcacatggtaaggattatgtaaatgttaacttcgattttagaacactgtaatagggtaatatgagctgctatagcacacatagcccatatatcagtgacttgattcactagattatttctcactttgtaaagtctaaaatggatattctcgataggtaggtgcttaccaacccaagtgacactttttactattaagatgttagaatatctacctagaaagtggagaaacttaagctgatcctagcattagtcatatatggcccatatttaggcctagaacaaaaaagctgctaataaagacttacaatataggaatgttttgaattttcaagtagaggtttaggctttataggaggtaactaattacttttaacggggcgaatgaagtaaaagtaagctcagaggcagcaaaacatagaagtaactcaggctagataggaagggaaaattggttcatattaagcacagggagaaagaatacctttgagtgtggagcattgttagtgattgaggtggatcataagtgaatacagcagtaggagttgatgaaagttaaattaatatggctgccggaaaccagtaatacaccatgaaatggatgaatctgagatactagtaacccagtaggaaggatggataaagtgttccacaaagttctgaaggaatagtaacagattcataaa

SEQ ID NO: 171390 - DNA, 541 bp, Homo sapiens
ggggaagccattacatagcattgaagtcaagaaaggcattcctgaggaggttacacttaattaagtaaacaccttaactaagagacacttcagaatatggcagaggggatgcgtgtaaagattgatttgataaacaaaaaggctgaaatgtagaaagcaaaggagagagtgatatgagaggcaggagatctttcatgcaggatcatgaataatttttatatctttctcagcgggaagccattgacgagtttggcgcaagggggtgtaatgatatggtttatctttttttaaaaaaaagtttggctgctttttgtggaattaattagggggcaagattaaaagcaagacaataaattaggataatattgtagtagtcaaggtagaagtggtcggggcttcaattagcatgatgtcagtggagactggggaagagaagttgataggttgaggatatgtttggatgtagagcttacaggacttgatgaactgtacattgagtgtcagaataagaggaatcaaaaggttttgtttagcctgaggt

SEQ ID NO: 171391 - DNA, 686 bp, Homo sapiens
aggtaacagtgcattcagaattagctcacgaagccaacttcagaacctacagaaaagtataagtacaaatgctcaaagacaaatgagacaaatgctcaaagaatgggcccatcctcacaggccctttaggggaggggtcatgacaaaagcaccaggagcacctggatgttgtaacatttgagcatcagaaagacaaatggccgtagagacccaaacacacgaagtcacaggagatccacagaagtgctcaagaaagtcagaaaaaaaggcatttcacgaatcaccattgggaaaggttaactaactactcactttgaaaagtcacagctcaaaggaaaggataaaactatcctgcctttcccagaggcactatatttcagagaaaccaaacagtcccaactgctgagtaaaacaagagtttacagatggattcacagctgaattccgccagacattcaatgaaggaattggtaccaatcctattgaactactccacaaaatagagaaagagggatccttcctaaatattatatgaagcagtttacctaatacaaaaacaggaaggattaccaaaaagaagctacagataattccctgtgaaccaatgaaagttcttacaatatagctagaatcaaagatatgaaagatatccctgacagggtcacccggagaaaagcaaagtgacc

SEQ ID NO: 171392 - DNA, 384 bp, Homo sapiens
cgcgcctatagtcccagctactcaggaggctgaggcagaagaatcgcttgaacctgggaagcggaggttgcagtgagccaagatcgtgccactgcactccagcctggtggcagaacaagacttcgtctcaaaaaaaagataatttactgtttaaacaaaaagcaatgtactgtgggatttataacatatgtaaaacatatgttaacaatagcacaaaggttgggagaaatggaaatccactaatatcagctaaaataataccaccaagaagctaaagagaaaattaaacccaaagcagaaggaaataataatgatgagggcagaaatcaataacaaaggctgggcatgttggctcatgcctgtaatcccagcactttgggaagc

SEQ ID NO: 171393 - DNA, 370 bp, Homo sapiens
tttagattaaggtgatagttttcaaagaacattgaaagggacctgtcatattcagtaaagaagcgaattgaattaaaaacacaaacctgacagaacacagcccatatgagtgtacccacacatgttggtgagctcgattcataaccctgagcccccgagactcacaaagatggcctgaaacagatacaggcaaagggctaccaaagttctcgctttcagggctatcaggtctgaaggaacaggctggctttcttagttttgttttgttttttgtttgtttgggtttttttgttttttgttttgagacagtgttttgctctcgttgcccaggctggagtgcagtggcacgatctaagctcactgcaacctc

SEQ ID NO: 171394 - DNA, 535 bp, Homo sapiens
gaatgaaaataggaagttgcagaattatttatctatatctatctattatatatagatagatggatagtatcaatatttaaaaaattattcccccaatgcaaaacttcagttaatcatgaaaaaacatcaaataaacccacattgagggaatattctacaaaatacttgatgtgtaatcttcaaaattgtcaaggttgtgaaagtcaaggaaagactgagaaactgtcagagattgtcgtattcacagataggagactaaagagatctgataactaaacgcaatgtggtatcctggaacacaaaaaggacattagtgaaaaaactggtgaaactggaataaggtctgaactggaataaggtctgtagttctgttattagtattgtgctactgttaatttcttagttttgaaccagggttacataaattgttaacattaagagaagctgggtgaagtgtatgttgaaactttctatactagctctgcaactcctctgtaaatctaaaattatttcaaaataaaaagctaaaacagaa

SEQ ID NO: 171395 - DNA, 228 bp, Homo sapiens
cagcattaatatataaactcaagttgccagagtctcaaatgtagcatatgcagagtgcagggtaagggtttctcttgccaacagataaaatgcactccaggctcccattggtgttcgcaaatgccagtcaccaaaagtcagctttccccctgaaaagcaagttttgtttttgcacaattaaatggtaccttggtgaaatgagatagagcctttctcataggaagtgat

SEQ ID NO: 171396 - DNA, 458 bp, Homo sapiens
tggtgatccatgctttcaggtatccaaggcatgtagattgggatggctgaccctgcctctgtcacatagcaaagtaccccttgttaggaagacctagtgagtttcagctggtcagagggcccaggtctgttgcacacactgaaatacacctagtcacatggaattagtcgcataccttcagtgatatctgcttaaattttatactgactggtcagatacactcagaaagaaacaggatcctggcatagccttgggcagatccacacagatgcatagttagatagtcctaggcggttcccttcaggcaggtctcctggtcacaggtatcctgccaacttcacccaggcacagccttaggcagaccatgtcagaaggactctgggagatgctgcatgtcagacacccacagctgggtgccctcaggcagagccataccctgagatacatgtggccccaca

SEQ ID NO: 171397 - DNA, 493 bp, Homo sapiens
cactggccttacctggaactttttcttcaaacttcccttcagcctacaaagagtcgtgttacaaaacctctgaatccaaattctgcctccttaccttgtcatgtcttggcatgagtctatgcattagtctcagactgatttgattcatgttagttgtggccacctcatatgtattttcttgtgtacaagaatggagcctagttttataaatgtgataaaatgcactggattttttttttcttttttctggaaggaattttgaaagcttgaactgttgtctcctggagtatgttagagtataggaatgtctcgagatacctgactttgtccatgaacttctgcatatccttgattatcaaatatcacacaccacaactgaaagtatgttttatgatcattcattaatcctctccattgcaaaggctgagtggcacatttaagaggttggggaacatgaactgatgggcacactccttttaacattgcttcatta

SEQ ID NO: 171398 - DNA, 728 bp, Homo sapiens
gatacagtgtctaggctacttggcccttaaaattaatattgactaaatgtttaattgtctgttccattctagacataaagatcccattaattcacaacatttttttccatctcatgtgatgatgtggctaatattattatgctaattatttctagttgcttggtttcaaaaactatgagacccgattcaaatggtgaatgagagtccttggctcctttaggccactagggtgctccattgctctgaatggcatctcagcgtctggttgagtttatccagaataaagtgaaatcacatgagcatgttattctctactcactgaaaaagatcaggaagacagggtcttgacaaaaaatgcagtacatctcagaaatctggagaagaaagtggaagacagccaggccgaattaacgaaaatcagactcaaaatattttttaaaaattcagttttattacattctgatacagtgcatccttagcttataagttataaacaggtactaaaaatgatgtcaacaaaaaagctgtaatgtacagtatttctttgcatatagtaggtggctattaaatagttgtttgaggtaaaatttacctataaaagagcagtttgacatacaaatctatttgatagaactagctcttgtggcatttttacttaataaggatcacataagctaaatggaagtcactattaatttcaaatattttatttgattacataaatattc

SEQ ID NO: 171399 - DNA, 383 bp, Homo sapiens
gaatcttttgtatcagaaagtaaagttctcaaagaatgatagggacatgttataaggacacaggaaccagcataacggggcccccactggccaaatgcagacaatgtgtacatagtaagacaaatgaatgtagataccatcttagccaggtgatgaaacaaactggtatcgcactactcctgctatgatgcagtgagaacccttctgtgatactcccctcaaaaatgaataaatcaaaaggatcacagaaaaacacaaattgcaaggcattctataaaggaactgagctttgtgcagtggcagtatcgtagccagtgaggtttatcggaggcgtgatcactgctaattgaaaacttttctataaaggaactggtctgtagtta

SEQ ID NO: 171400 - DNA, 565 bp, Homo sapiens
ctaatgagaggtgatgttcagctaggaggagtgcttcctctgctaccaccgttgtccccactgggattccaggtgcatcgagaatgcagacagcaaggcttctgtttgtagattggttgtgggaaaaaaaaaccccatactcacaggattcttaagacaaatgcagtggatattttgtgtttgaaaatgttctatttcttctttgattcttccttttctttctggtacttttaatttgttgtgagaagggtgataaagctaataatgcaccaaggaatggaaagtgcttccatctttgcagaggtcctggaaagttaacttttggtctgaagccaaatcccgatgtaggacttgaactcatgacctaatcccagaggcaagaatgttaccagctgaccaacactgaccctcataaaatgtagacatttaaaatactcctttgagtagtcctgttgctgctttctatgttttcttctctctttcagtcgtttccagcagtgttcctggcctccctgttaggagcacagttttaaagatctatttttctcactgtctttccatttgc

SEQ ID NO: 171401 - DNA, 453 bp, Homo sapiens
gggacggacatgtgggcatgtgctgctcaagacctgcagggcagtagcaaatcagtgcagtgtatggaaggagaaggtgctagacgtgcggcctgggcctgactcctccagcccttcatctttgccttcatccttcctcctgcccaacatgcgtccagggcatcacccaccatgcgtggttaatgccagccttcaggggaccacagggcttcttctgtcagccccaggcagcactgtcccagggctgtgaccttgacctctgtggctgccagcggttaggatgcatcccccaccagtctctccccaggaccagggcccaggagatcacctgctgtggggcacaggtggcctcaggtacctggaggcatcgccagcctgatccatgccaggcaggctgcccttcccccactgttaggagaggtagggcacaggagctcgatgctggctgtgaag

SEQ ID NO: 171402 - DNA, 1510 bp, Homo sapiens
  misc_feature (236)..(236): n is a, c, g, or t
tgctggctgtgaagaatgtgtaggcggggctgaggtgagctggcagagggagcaaagcatgagttcaggatgggtccatggaggccaggtccaggtgggagctaggatgatgcccacagctcctgcctgcctgcaggagggagctctgggctgtgcagcgtttggaattgtgagtatgggggctccagcatcagggccacagaagaatgttgcagtcacaggctccatcaggagcngaggcgccggtgccctgacggcagggggcagttgggccttcaggctcctcttcccctgacacaaagcaggccccaggtcgggaagacccgggttcaggtcccgaatgccgctgactggccgtgggactgtggcatgttactggccctcttgaagcctcagtttccccatctctagaatggagctgcaggtcctgcttacctcacagggctgtggtgaggattacacgagatgataaagtacttagcccagggcctgtcacgtagcaggtgttcgttattattccctatctggttccctttcctaccccatcccagcctcatgttccaggaggaaggaccctgcaacccaccccatttctgggacgcaggctttgccgttaggtagacttggactccagcactgactccacactgacttgccgtggactctaggcggtcacctctgcgtcaacttcctcatcaggaatgcagtgtgatgcagtacctattccttggggttgcagtttatgaaatgatctaagtgtttgtcaggggcttagcacagtgcctgacacataggggctcagtaaatgtcagccgtgacactggtgattttgggggagacccagcgctctccacccatgcctgctgtcctgcccctgcagctccctccggcccaggtggtctgctttgagtggggcactatttggggtcataagagcactgccctgacctccctgtcatctgaggcagctggaaactccaataggcagagaccaagagctgagctgtgcagaactctgcttccctaggcacctccaccctgtccatctctcccccaacacccctgtacctggcctgaagctgctcaagacctgcagggcagtagcaaatcagtgcagtgtatggaaggagaaggtgctagacgtgcggcctgggcctgactcctccagcccttcatctttgccttcatccttcctcctgcccaacatgcgtccagggcatcacccaccatgcgtggttaatgccagccttcaggggaccacagggcttcttctgtcagccccaggcagcactgtcccagggctgtgaccttgacctctgtggctgccagcggttaggatgcatcccccaccagtctctccccaggaccagggcccaggagatcacctgctgtggggcacaggtggcctcaggtacctggaggcatcgccagcctgatccatgccaggcaggctgcccttcccccactgttaggagaggtagggcacaggagctcgatgctggctgtgaag

SEQ ID NO: 171403 - DNA, 363 bp, Homo sapiens
ggggtcctggcccctgttgtcagtgcaggtctggggccgcaagctgggctcagccctcaccgctgcccacgggtgcagcggcacctccccccactgactgtggccttttgttttctgggtgacagtagcatcaggcggtgtgtccgggtgactaatctcctccaggctgggcagctgtcacagggcggcctgaccaggcaggcaggaaagctgacaccctggggagggctggcaggccggtgccctgacggcagggggcagttgggccttcaggctcctcttcccctgacacaaagcaggccccaggtcgggaagacccgggttcaggtcccgaatgccgctgactggccgtgggactgtggc

SEQ ID NO: 171404 - DNA, 585 bp, Homo sapiens
ttttcctaccaatgtatggtcacggctccacctaaaagaagtcttcaatatttagcgatcaaatgaatgtcaagatggaatctcagaccctgaactgtaaggatcttctctattctacatgcaaagtactccttatctttctcaggtttctgctttttgtaggaaacacagacaagcattgagagtgtttgggatcaagggtctggaaattgtctgtacagacaatttccttgtttcacgtcttgaagatgacatgaatatagagaagatattttgaaagatttgaagaaaggataccaaggaaatatgacaggtcagcaaatatctctgtcctggttttcttctattttctcctagggagacatgacctgttttcaatcaagcatctctataaaaatgatggtctgtcttttcaccagtggagaagattcagaaaaactataagtagtatgtgttaggaaaacaatagttttgttttcatcttcccaatttaaattatgttacatcactgaatattaatgaagttaagtagctcttcaaattcttgcactgcatttagcttttccctcctgttaactgcctatc

SEQ ID NO: 171405 - DNA, 353 bp, Homo sapiens
ttcaggattcctaaaggctgacaggtctagacaaaggtggggccagagaatgagcccatttcctgtgttctcccagactatttattcctaatacccttcaccatagtcaccccagtacccatgtcttgtgcattcccatgtaggcggcctaggatgtccttgggatatggattatgtattgtctcccctgacacattcactgagggtagagtccatgcctgttttcctttcctttttgtctctctctcagtcccatcccaggctctaggcttctcacccaaaagctctctccctgtctctttgtttcccccatattctggtatgaattctttgggtatctctcacaaactgac

SEQ ID NO: 171406 - DNA, 563 bp, Homo sapiens
gtgaggcacatcattaatttcaatctgcaacattctgatcagtatatactgtcaacatgtatgtttccaagtctagactttttttttgagacagaatctcgctgtcacccaggctgaagggagtgcagtggcatcatcttggctcactgcaacctccacctcccagattcaagagattcttgtgcctcagactcctgaggagctgggattacaaacattgcaccaccactcccggataatttttgtatttttagtagagacggggtttcaccatgttggccaggctggtctcaaactcttggcctcaagcaatccacccaccttggctcccaaagttctgggattacaggcgtgagccaccgcacctggctccaagtctagactttagatgtgcttattctcaaagagaaaaaaatttccagtagagtagcagaggtagctagatagccctggtttaaccctgttagaaccgattaagaatccagcatagaagcaaagtatttaagcatgtgacttatattctcagcaaatgttcccaaaatcaataaatgtctgacctgagt

SEQ ID NO: 171407 - DNA, 730 bp, Homo sapiens
  misc_feature (19)..(19): n is a, c, g, or t
  misc_feature (23)..(24): n is a, c, g, or t
ggccccccacccacgccancttnncggctaggtagcgaggccgggtgtgggcccctctccacactgccacagctttccgcagtggggcctgacatggaggggtgagcccagttctgtgctctgggggaggcctctgcttcagcatgaaccattatagggtgtgtgtgtgtgtgtgtgtgtgtgtgtgtgtagtgtggtatgtgtggtgactgtgtggggtgcagcagctgtgtgggggtggggggagaaattttgtgtatatagatgctgctgctgtgagaagaaggcgggctgtgacacacactcaattgtttatttattgatgctccctcacacacattaaaaacaaaaaaaaaaaaaaaacaacactcagagggctattttagtcgtcggcggctgcaaggaagaagaagagggtacgatagaatagtgcggcactagtggcgatcataggcgtcgtctctccgtcgcacccgatgcttttctgttgctacacgaggagtggagacagcaccgctcgcgcggcctccctcccctatatttacgaaagaccgctcatgtattctactttcttcagaatacacgccaggtggtccaacccccgtgctaaataaagatgatccgccggacgaaacgacaacccccgcccgacgcacaacaccaaacaccccggccctaatacacggccgaggccgatcacatcatttacgatgcaaacactccacaacgg

SEQ ID NO: 171408 - DNA, 324 bp, Homo sapiens
  misc_feature (19)..(19): n is a, c, g, or t
  misc_feature (23)..(24): n is a, c, g, or t
ggccccccacccacgccancttnncggctaggtagcgaggccgggtgtgggcccctctccacactgccacagctttccgcagtggggcctgacatggaggggtgagcccagttctgtgctctgggggaggcctctgcttcagcatgaaccattatagggtgtgtgtgtgtgtgtgtgtgtgtgtgtgtgtagtgtggtatgtgtggtgactgtgtggggtggggtggaattaattttgtgttatgatgttcgtgtgtggaaaagcgggtgctgcacgactacttcaatggtgttattattatgtccatacaagccattaaaaca

SEQ ID NO: 171409 - DNA, 461 bp, Homo sapiens
tttgcttgatataggaagactggggatggtggttttggggagggggagtttttttggggggccatgtgaagtttaggctgttacttttggggaatgttctaggccagaattagagaaataagtcaccattacaaggatggtatttgatgtcatgggcttgaatatggccagggacagagccgtagggcactctagcatttcaaggttgagaaggaatcagcaaaggagattgggaaatggccaaagaagaaaaaaggagaggccaggcgcagtgagtcacggctgtaatcccagcacatggggaggccaaggtgggcagatcacctgagatcagaagttcaagaccagcctggccaacatggcgaaacgctgtctctactaaaaatacaaaaattagctgggcctgtaataccagctacttgggagggtgagacaggagaatcgcttgaacctgggaggcg

SEQ ID NO: 171410 - DNA, 278 bp, Homo sapiens
actcacaaaatataccagatgtaaaatcctatagcatttctcatttcttcattccttcctaaggcgagagccagttttgaactccaagtatcaggacgcagagctgtccaaaccaggagaataattcgcaaatgaatgagccagagcctgatgcatttccattgtgaagaaggatttttatgtcattacacagaaatgtaatggttaaacctgggtattttaaattaaatgcaaaacatgtggcatttgaaattttttaaaaaaccaaacttactgat

SEQ ID NO: 171411 - DNA, 2166 bp, Homo sapiens
  misc_feature (829)..(829): n is a, c, g, or t
aagtatatgagatccttttttaattctacttttaatgatgttcgataataatcttttagctaagccattattcttcctgttttgcatcttcttttcttacttcaatccctgataataaggtcacgtgtcagagatcaaatagtataggtaataggttacctaaataggtatttgcataataggttacctaactaaataggtttttgcctaataggtatgttgattatttcgcttacttgattctttatgagcctttttttccttgcgacgtctttggtattaattgttagtcaagatggatgtagaaattttccatatgggatgtttctctttgaattcatgttgttaaaatgatttcttttggtggagtgctgatcttttttatgattgtttcatatagataagaacagactacaaaaaaatatgcctttcaatcctgaagagtaacctgaactatacactagttttgtgctttaattttcatttgtaatctgccttcaataaagagttaagctagtggaatttatgtcttagcttgttataacacaaacacgaatatttgtctgcttggcattaaagggtaaagatattccatagctgggaatcttaatctgaggtacgtgtaaacattcagggactatatgatctctgagaatttgtatgttgtaagtctttgtggcagtgtatacatttgtgttgcaacttattaacacatacaccgggctttttttttttttttagaagattcgtagctttcatcatattctcaaaaggtttctgtgacccatgagatggtttacagtatggggaagcatcaaagcacttgcanagttgatggttatatgtgtgtgttattatttcagccacccattatcatgtgcttaccaactgcctaacagtgcatacatatgtagaagttttattcttttctcctgttgccatattatacgtctcatttcacagcagaaaaacaactgcatgacagagacaatgtggttcaaaccattttacccttgtattcattgactgctacaaaacaggaacattaaatacctgattgtcaccaaattgggtagtctcagcacttctacactcgtaattgtgctggaaaagtggaatgctagcactaataattagattttggtttggagggttttttatttgtttattcttacttgtataaatttatggggtgcaagtgtagttttatcacatgcatagattgcattgtagtgaagtcaggacttttagggggtccatcacccatgtaatcacgttgtacccattaagtaatctttcatcatccacctccttcccaccttctcaccctttggaatctccattgtctatcattccacactccatgtccatgtatacacattatctagctcccatttataattgagaagatgtactatttgtcttttatgtctgacttgttacacttaaggtaagggctatccatccattttgctgcaaatgacatgatttcattttgttttaatggctgagtaatcattcgttgtatatataccacattttctttattcagtcatctgctgatggacacttaggttgattccatatctttactattgtgaatagtgctgtaataaacacatagtgcaagattttggaaattttacttttgtggcacgttgttggtatttactcaggatctttggatttgcttggctgcatgtatatgaatcagtgtgtttatttactgaaatatgtgcaaaagtcttgtctttggtggattaatttataatataaatccacaaaagtcagattctgctcctaagtatattttacatttttaaatttaatgccagcaagaagttacagtactagaattgccttacccctgagagtatcaatgatcagatcatagtatcaggtgactgggctatagaagatgacttttattacttaacattatgaagttactagggctgatttagaaatcgaggaacactggtgaaaccccgtctctactaaaatacaaaaattagctgggcgtggtggtgggcacctgtagtcccagctactcagaaggctgagtcaggagaattgcttgagcccaggaggcagaggttgcagtgagccgagatcgtgccactgcactccagcctgggcgacagagtgagactccgtctcaaaaaa

SEQ ID NO: 171412 - DNA, 521 bp, Homo sapiens
aagtatatgagatccttttttaattctacttttaatgatgttcgataataatcttttagctaagccattattcttcctgttttgcatcttcttttcttacttcaatccctgataataaggtcacgtgtcagagatcaaatagtataggtaataggttacctaaataggtatttgcataataggttacctaactaaataggtttttgcctaataggtatgttgattatttcgcttacttgattctttatgagcctttttttccttgcgacgtctttggtattaattgttagtcaagatggatgtagaaattttccatatgggatgtttctctttgaattcatgttgttaaaatgatttcttttggtggagtgctgatcttttttatgattgtttcatatagataagaacagactacaaaaaaatatgcctttcaatcctgaagagtaacctgaactatacactagttttgtgctttaattttcatttgtaatctgccttcaataaagagttaagctagtgga

SEQ ID NO: 171413 - DNA, 610 bp, Homo sapiens
ggcacgagggtagagttaacagaaagcaaggctctgtaagatgagccttgcaggcaagagctgaaggttgctccatgaggaaagcagaggcctgagaggaaacgtggttgaacatcaaaaaccaataggtgggttttagtgaatttaactaatgccttccctattgattttgagactagaagaatgtaagcaataaatatcctaagaaaccagagtatgctcagctcagcactgtattaggcctcagggtggatatggaagaaaacaaggccatcgaggttattgaagaaaccagaaaaaggacaggaaaacttaaatattacaaggccttggcccagtgcggtggctcacgcctgtggtcccagcactttgggaggctgaggcgggtggatcacctggggtcgggagtttgagaccagcctggctggtggagcctcgtctctactgggaatgcagaggttagccaggcgtggtggagcatgcctgtggtccagctgctcgggaggctgaggcgggatggtcgcttgggcctgggagacggagattgcggtgggccgggatcgcgccactgcactccagcataagctgcagggtgagactctgtctcaaa

SEQ ID NO: 171414 - DNA, 365 bp, Homo sapiens
taagagacaggttttttagttcagataatgcaatttcttttgcttttgttgattgtacacaaaacactatcagtttagaggagcactgcattttaacttcttatatgctttttaatttcttaattgaaaaaagctctattcttgcatattttgctaagagatcacataaatattgtagcattcatggtcaactctaggcaaaatttcaagatggtgaaattcatccttgatgcgttctcagctctcaattccatctttgtgcccttcagtctctcttccccacctccattcttctcaaccttcctttctcttctcctaatatttctaatgatcttaatctgctcttcagctaccactgaccactc

SEQ ID NO: 171415 - DNA, 519 bp, Homo sapiens
cccacttccacttcctgagtttctgacagtgggtctggagtacaacctgaaaactttcatttctaacaagttcccaagtaatgctgctggtccagcaccacatacttagaaccatttaaaaaataaaagaaaaagaacccatcaaagacaagaccagggtatttatgatgtggcaaaatcttcaccaactatgacacaaaccacacagaggcagggaattttgtctgttctgacactgctgtattcctggtacctagaatggtggctggcatatgctaggtgcttaacacctatctgctaaataaatgggtcagccggccctgtggttgaaactggggccagcgtgggtataggtgagcaaggaaaatagctgcagaagcaccagcaacaaagggaatggctgcttactgttgaactgtcctgaaacggaagcccaacttaatgacaaccacaataatgtaaaacaaattaaacatcacattcccactacccagaaccggggatgggatcctctgatca

SEQ ID NO: 171416 - DNA, 865 bp, Homo sapiens
gcccaaagggctcaattccctttgcataacatgagcaagatgctcagcagagtcctccaaccagaggggcacaccaggaactaactggtaatatgctatcacttcttgtcttgtcttctccctttatttttcctagattcctttcatcttcttagatctgctagaagtagtatgggccgaaccctggtctaaagcagcacatgatacaaaggaactaagtctaaacagacaacttagaaggatttagtccttggcctggcacagtggctcaagcctgtaatcccagcaccttcatgctcagtcagaacagttctagtatttctcacttcactgggaagactcatcttctgttaattccaagtccctgaagctgatttgcgttaagattaaaaggactgtgctcacttcacaatctcaactgagcactactcaagtcacaaaacctgtattattctggatatggccttctcctagtgttcactctttctatgcttcctcatggatctgcttcctgctaggcccaacttctccatttagaagtgttaaatcaagtttagcctaggcaagtttatgcctccttacatcttttaagtttggcctaaagatttatctgtacataatgaactataacctaaatggtggtagaaatagactgtaacctactcttgtgccaatcactgagttttggccactcaaagggggccaactgttccagctgagccataaccaatccagctgtttctgtacctcacttccattttttgttcatcactttcctttttctgtccataaatcttctaccacgtctgcactggagtctctgagcctactgtggctcagaaggctccccaattagtgaactgtt

SEQ ID NO: 171417 - DNA, 457 bp, Homo sapiens
aagcagatgcccaagataaacaaagagaaaaaacactgagaggggtgtagaggagaaggaaaagtgactatcattaacaccatcaccttggtgtagaagagctacccaaaagtatttccagttccctgtctacaggctgaaatgtaaaacctttccaagtagaaggccatctatcccgttatgaaggacgtagggacaccgaagtggcaactccagaatctccacagaataggaactttgggagcactgactatgggtagaaaacacagaggagtaataaataaaactggaaaaacaacaaaaaggaaacctgggggagagaggaggcaggtgttgaggaacttaccttgatgctgcatttgcacaccagcctccctcccaggaaggctgaatcctctccgagaaatctttcggggccagcattatattagagctaaagtatatttcccaccaattt

SEQ ID NO: 171418 - DNA, 360 bp, Homo sapiens
gttgactagtcagggttgatttagatagggttgattttcccattccgtaagtttttctttctgaagaataaaacttccccagatagaattgttttttcttcaaaaatataggatagttgctctagaactttcttatctggagacagtttaactacagttgtatacagacttatgtctatcattcacactcatagctgcctctgtgttcattgctgctgcagctagctcattatagagactgccacctctttctcttactcgactctcccagtgccttctggccactacagctagcttaaaatggcatttcatacaccttggtcaccgggagagtttacttctatctactttttcatcccc

SEQ ID NO: 171419 - DNA, 418 bp, Homo sapiens
agcacattggccacaaaataccatgcagatccccaaggacttcactagagaggaaagcaataatccagcgactgaacccaggtgtctctcaccaaaccctaccctttctggtctctaggccagggcagttcctccaccagtcccgacgtttgcgctacctaagcacgtttggatttaacaggaccatttcaactccaagacaggcaagctgactggtattatttgcaaagggtcaagtggaaaccctagaacagtcattcaagcaaatggctcctagtatctcaaatggggcggtgggaggctggggaaatgccagagagcaagaggaagtaggagaaaagagtgggagagagaggcggaaagacaaagacaagccggcacccagacttggatctgggcaagggatgagggaagggcc

SEQ ID NO: 171420 - DNA, 301 bp, Homo sapiens
gtttaactttgtgatataagttgcagattcttttcctcaggttttcatttctatttttcctgtagtttgtaccttttccatttttatggatatctaaactcaaccttaacttgacaaatggaaccttggatttctatccttcctttaacctccttctcttctagtcttcctcagtgaagaaacagcacctctcatgtgtctctactcatacatagcccaagcccaaaaccaagaagttatccttgcctcctctttccctccctccctgtctctaatccatcctcagtggtattgacttcct

SEQ ID NO: 171421 - DNA, 373 bp, Homo sapiens
ccactggttgcgcagaaacatcaaaggcaactatgatccaaatgtactttataactttgggggcgaatcataaccaaaaacaagcctgcccacttagagagagttaggtggggaacagagggagacaacagagggttgacagggaatcagccagaacactggtgtcagaggattctgtaataaatatgtggtaatacaggcaaagccatagaaggtggggggaaatgcaggcaagaaaaataacactgtgatataataaagaatctgcacactgtccataaagtctggaaattaactttttttaaaaagtgtgtatgtgtgtgtatttgtatacacagtcatcaaggacatcttcactataaaaaaaaaaagt

SEQ ID NO: 171422 - DNA, 404 bp, Homo sapiens
tcccgccttagcttcccgagtagttgggactacagatatgtgcccagctacaagctggctcttttatttttggggcagtttaaccacttggcattgtcaggtcttccctaagcttcccttggtcttttcttccattttgctgtttttttggacattaaataatttattacctctaccaggtgcttggacagaataaagtaaaagagagaatcgttatgttagaaaattaacttgtgcaaggtgacataaaattctctctgctgttgattcatccatgctggctttgccagtggtcatgagggtaaccagtgattcaactgtatgggagggaatctgccctttctgagtggatctcacaaggtgattcctgtgtgatgatgtaaagatgagaacctttctgggaa

SEQ ID NO: 171423 - DNA, 117 bp, Homo sapiens
gatattcaaccctcactgacattttaaatccaggattttatatctgttcccaactttccatgtcaaatgctattgcctttgttcattcatgagttcactcaggaaatgtctaagtat

SEQ ID NO: 171424 - DNA, 229 bp, Homo sapiens
ggcacctgcatcaagtgaggcctcctgggattctggcccaaccaggggaactggtctggacatgcctggttgtcatgttgtgtaggcagccttgttctcctctccaggtcggaggctgcttgagtccttgggtagctgggagcgtgctgatgcatgttcctaacatctccataaggtctaacgtttatagacttcctccctgtgcatttatcactttttttttttgaga

SEQ ID NO: 171425 - DNA, 249 bp, Homo sapiens
cggctggcggcctccggtaacagaaaccgactgatgaggcggaaggtaaggaagatggaagcagagggcagagctgggctctgtctggggagagggcaggagacgagtgttcacgtaccatggaaaggggaagtcacacacatgcgacttggccccgggggtcccgttccccgacactacacaaatatacctgaaagcctcagcgacggggcccaggcaggatggtcctggctgctctgacggcggaag

SEQ ID NO: 171426 - DNA, 567 bp, Homo sapiens
aaggggtcctgggaaggctggcttgggaagagttccgagcctgaagggtacaggtgggtcagcaggtgggaggagctgccatcatccatgatgtgtggaccatgagtttcttctgagagtgaacatttccccaggcaggtgttttgggggaagggaatgtgccctgcaggcaggtgtggccctgggtagctgcatggtcgggtgcatgtggccccaggcagatgcatggtgggtggtgtggccccaggcaggttcatggtgggggagatgtgcatggtggtggggtatgaccccaggcaggtgcatgaccaggtggtgtgactagaaggcttcctccatccttgctggacggggggtcccacactgcctgggccctctctttgggtcacaggcttgctgccccttttgttgccatttctgggcctgtgttagccaaggtgaccttcagcagccaccatcatgcacagagaaggacctctgcgcctctcagagtccctggcctgacaagaagaaactgaagccaaaggcagcccaaacctcggggcaccatgggccccttggcggccg

SEQ ID NO: 171427 - DNA, 420 bp, Homo sapiens
aaacagccagattttcattaatagtagaatggcagcggattacattcatacaatggaatgccatccagcaatgctaatacctacaggtaaccacatggatgaaccacagaggtataatattaaatgcaaaaagcaagatttgtaagaagatgcagtatgatttctgttagacaaagttaaaaggcaagcagacaaaatggaatattgtaaaataataaatagcagcaagggaaccgtcatcaaaaaaggcaggttaatagttggtgttttgggggaaggaagaagattccatcaattaaagatgcatagagggctcctgaatccagcatgtttcattttctgacacagcggtttttgtatgtaatggtgatgttaatgatgataatgattaaagatcttctttaagaatggaatatgttg

SEQ ID NO: 171428 - DNA, 409 bp, Homo sapiens
tggctttctgttgttgttgttaatctgctaagtgagggctggtagggaggtaatcagagggatattttgcacttccagaggttggccttaaaaagagttgagagccactacacttacaaaaggaaagggaagagaggaaaagggagaaacctagtgtggagggagggacagaacagaaaaaaagggagaggaaggaggagtgaaacagagacagaggagggtgcaaaactaagatgggtgttataataactaaagaccccttacccaggcaatagctgcaagagctcagctttagagaatgtgaaggcagagaaagcacacatccttcggaggtgaccagaccagaaggtcaggacctagagccacagctcaatgccaggaggacacacagcctcagtaaagcactcta

SEQ ID NO: 171429 - DNA, 540 bp, Homo sapiens
gtgttaccgcaaatgtttattgtagaaagaatggtttaatctttgtcaatttcgttaaaatgtacaccttattcagagtctgtgttaaatcatcttaataattttttaaagatttagaaacagttgtattttatatattggaattttttatattgttttgattttaatacttgattaaaataaatatttatttgagagcctttattcctagggttttgttaacacttgaattttgatagtttcaagaatatttttaagtagctgggggaagttacatacttgattttctagcactaatggtagtaacaatagcaataaaaataggcctgtaatatcattacagataacaaccaatagaaattccagttttctttcttatcagaaagaggaagcctactaatgtataatgaattcgactgacctaaattgagaaaatcgtcctcatcatggattaccactttctgcagagccagtataacatacactgatcatttctttaattgtactggaactaactttttgtttggtttgagacggagt

SEQ ID NO: 171430 - DNA, 295 bp, Homo sapiens
gtctgaaaaacaaaaggtacagttctttgttagaaatactttaaaacagtaacagaaaactatttttagggtatctccaaaattatatcaccattattctctttttgttagtttcttttgctttagtcctttgctccttttgcctcttcagaaggaactaccaccatcaccaacaaaccaaaacattaaatatacacgcagagcccaactttctacatgtgaaataaaaatataccttgtctcggccgggcgcaatggctcatgcctgtaatcccagcactttgggaggccgagg

SEQ ID NO: 171431 - DNA, 453 bp, Homo sapiens
caggaaacacatagccctgtagaaaatcactggagaagaggatgattggagttcttcatttcttaaaaaacagtttaggttttccctgtctgccctagggcccatgtcttgctggaaaatatgctacttagaaattaaggcctctgggttcaatttttggccccagtgttgacctctgtgtaagcctggcaggatgtctcatttctgggtcaccttttccttgccaacatagtgaggtatgtagaccaaatcattgctaagagccttctaactctaagacactaggtttagtcagccaaaagcatgtgattttcccagatttcccaaactccttgtacctaattgaaagtacacaatgaacttgcaagaatttaagcatccttagatgccagtcttcactttgggtattttcctgcctcctcagtgaaacttgacacctctagtttgtcatta

SEQ ID NO: 171432 - DNA, 159 bp, Homo sapiens
ggaacgttcatctataaatatatgagcagcccagacactgaccatgagtcactggtcaccacagaccacactgggtcaggacagccccagaggaacacagcgcacatgtgaacctctttggggggttctcccgccctcaccaccaagtgccactcctta

SEQ ID NO: 171433 - DNA, 302 bp, Homo sapiens
tagaaattggagaaatgaagaataattttttatcccacataataagtaatttgtgaattgcaagtatttctaaatacttgaagacatccctcacatcccctcttctgattgctgagtgcataatttcctaaagcttttttttttcttttgttttttggagacattgtctcgctctgtcgcccaggccggagtacagtgagctgagatcgcgccactacactccagcctgggtgatagaacgagactccctctcaaaacaaaaaattaataataataaagtaacataaagtaaaaaaaaaaaa

SEQ ID NO: 171434 - DNA, 224 bp, Homo sapiens
agggtcacatggctccagatccctccctgaggggtctcaaactcaagtgacttcaggggccagacaggtaacaaagagtgaatacatctcttgcatgtaggacaatagagagtagtggatatcctggtgaaaaaagctctgcaagttgcatttcttaccacctagcagatatgacctagggaccatgagtttgagacccctggtgcagctctgtctgagctcca

SEQ ID NO: 171435 - DNA, 182 bp, Homo sapiens
ttctactggaccctgcaaggctcaggagagtgcttgacagctcccagaatgagacaatgacctagccagaacattaaggagactacacccgtccttcagactccaaagggaaagctaggacggcagcagagtcatcctaaggtgaggcactccaggataacattttcaatatttttccttaa

SEQ ID NO: 171436 - DNA, 256 bp, Homo sapiens
cttccccagctcccctggctggtgggaggagagaggggatcagttaaggggtccctggcgctgccctgggtccctcttccctccccaaggccacggctcccctcgagggggccctcaccttcagtctctagctacctttccccgctctggctcattcaaacccaggcgtggaaaccctgccggtactatgagcctaggaactgcacctctgcaaataggcccaatattgacctttttttttttttttttttttttt

SEQ ID NO: 171437 - DNA, 479 bp, Homo sapiens
ttggcttatctaaatatcccacattgagtacaattgcttaagactggggtccacttccattaacaagtctatgtgagacaagaatcaataatgactgtgataaaatagcagcagggcactgtggctcatgcctataatcccagcactttgggaggccaaggcaggcggattgcttgagctcaggaggttgagaccagcctgggcaacatggcaaaacgctacctctaccaaaaatacaaaagattatccaggcatggtggcatgctcctgtagtcccagctacttcggaggctgaggtgggaggattgcttgagcctacaaggtgggggtagcagtgagtggagattgagccgctgcactccagcctgggtggcagagtgaggccctgtcttaaaaaataaaataaaatagcagacaagttgcatatttaagtttcatccagagttatgttgttgaatacacatctccatccaaattta

SEQ ID NO: 171438 - DNA, 431 bp, Homo sapiens
attagagggcttggctcccactgggttgcaaaaatagcataggcacacatctaagctccatcttacattgacactccatgaccccacgtgggccaccccagtgtcatggcccagtctggagaagtgaccctgcgaaaaagctgtgtatgccctgtaggtagacttgacccttctgtgcaagaaattttgatgtcctgcgagcacccagaatggtctaggagagagggaacaggctccagtggacatattctcttcgccctgttgactccctcctccatgggaagagacttggcttaaacaagcctagagcaggtctgtttaaggtctggggccctgagtaggaatctacttacccacgtcgaaggtagaattgggaagaagcactgttataaactcaacagaaagtgatactgagtttcattttttttttt

SEQ ID NO: 171439 - DNA, 701 bp, Homo sapiens
ataaccaagggtcgcagtgcatgccctaactatcagactctgacagtttcagggagtgtggctggttattgaatccaaccaataaatgaatgctgttaatgttaacttaatgtatatgcctatgaccttgtatctgagtactggccctgtgtttctgatccctgcagggggtgggcagtagggagtggctaggggatgtggcaacctgtcgctaatttacaaccctcaatcatgaggtaagaattggaaaatcattccatcattccaggatgtccgtccatcattccagggtgtccatttgaccactgagtaagagcccatctctgccctctggagctcccacgtgatccaggaagagaagtatatgaacaagccacaatggtttgaggtttactgagcagaccataaaaggaggtggaagctccgttccatgaaagaacagataaagaggaattaggctcaaaacaccttcttgtgttggttttttccctttctcaactagattttgggttcttggaggataaatgttgtaccttcttttgtctctcctatgacacttagcatgtctggtatcttggagcatacagcaggtgctcaatagttgcttgtgcttactcatttgaatgcctacagggcctgtaacatgccttgcagatgttaggtatttggtttttgttaaataaatgaaattgatattctct

SEQ ID NO: 171440 - DNA, 352 bp, Homo sapiens
tggacacgtgacccaggcttggccaatcacagcattatagagagccctgttgccacaccatttcagcaacaggcatgtgacccaatgagatttaattctggaactttggtcacaactattcagttcagtgaatctctgtttgctgagagtaggatgtaatcgtggcactgctggcagccagcttcccactgcaagcagagatgctgcctgagaatgagaccaagacagagggggaaacagaactgagagatggagacatgaaaccaagtcccagtggcattgcatgagacatcagatccagtcttgcttcaatcttcagtcacattagcaataaattccctctattgcctga

SEQ ID NO: 171441 - DNA, 358 bp, Homo sapiens
agtttacctgtgattactcagaaaatggattcactgatggctacctggacatctataaaaataagtagactttgtacttatttcaggcaaaggcagtgttagacgtgaaagtttctgtctgcattaaccattaccttcctctctatcagacactcattctgtgagaagataattggtgcatgacagtgatttggatattgaagggccttttcattgtgtattgtagagagaaccttatgtgggtggttaatttaagacttctgtgataagcccctattccggaggtggaggaggatgctggacaggctttgctgagacagtcttaaatttcagtcaaagtcctgatagtcacctaatg

SEQ ID NO: 171442 - DNA, 293 bp, Homo sapiens
ttaccctgaacatgaaaacaaatacaacattatttatattgaaagctcatagatgccacctcccccgccttatttgagaaatattgattttccgtgcattatgacctaaagattttactttagttctaataaaaatcttgcattatctgcctttttactgtagatattttagcttcatgtgttttatgttttttgtaatctctccttctcccctcattttaccaagttatacacccccagttactttaatgtcctaaaagttttgtttttatctctttattattattatacct

SEQ ID NO: 171443 - DNA, 368 bp, Homo sapiens
gaggtaagggtgggaatgcttttttagcattgattgatttcccacaattgcagtctgagcaactggaatgtaactctctccattggataagtccatgatagtcctttgcttctttgtgatacatttgacttggaatatagtggcaggttattatttgggtgaaaacactatgctaagtcaatgaaaaatgccaaacctggattctcaagatgaatgctctttcattcatctcagtaaaacaaagcctaaaacaaacactcagatgtgggtgtatatttaacctgtttaatagcaattatgatatgtgtgattaggttcacttccatattttctgtgtaccaccctgtattgttcatagaacttttctt

SEQ ID NO: 171444 - DNA, 502 bp, Homo sapiens
agatagaggggaaccatgcaatgagcattttcaagacagcacacggccagactgagaaaagaggaagaacctggttgaataggcatcatgtgtgacacggttccctgtagctttctggccagtatactttgcattctgtggctgttacttagtgatacaaagcattaaggaattgggagctatcacctgtgaatcagactgatttctactgttacactggcatcaggtctctattgacaattttatagaatcaaattcacgttgcagaactaactttgcaacagatcataccatagtaacaataatagctattaaactttgtgccttggcactgctaaacactgtacatatatcatcctatttagtcttaacataaagccacagggtgcaatggctcacacctgtaatcgcagcactttgggaggctgaggcagacggatatcctgagcccagaagttcaagaccagaccggacaatatggtgaaaccttgtctctatgaaa

SEQ ID NO: 171445 - DNA, 364 bp, Homo sapiens
gcactccagcctgggtgacaaaacaagactccatctcgaaaataaataaataaattaattaattaagtagagctgagcatggtgactcactcctataatgccagcactttgggaggctgaggtgagcagattgcttgagcccaaatgtttgagaccaggctgggcaacatagggacaccctgtctctaaaaaaatacaaaaattaaccaagcgtggtagctcacacctgtggtcccagctactcaggaggctgaagtatgaggatagcttgagcccagaaggtcaaggctgaagtgagctatgattgttgtgctactgcactgtggcgtgggtgacagagcaagaccctgtctcaaaacaaaac

SEQ ID NO: 171446 - DNA, 235 bp, Homo sapiens
gtggacaagctgccgtctacaccttgctttccccatcataaaatggagataacagtgacagtcctgccaggttgctgcgagcgtcggggtgccttctccagctccccctaccctggccaccctgtgttcaccaggaggactgaactcgtggagggcaggggtggcttcccttcctgtccgccatggcctggcctggagtagatgctggaaactgaagtggcagtctctggacccc

SEQ ID NO: 171447 - DNA, 419 bp, Homo sapiens
ctgacactagtgcctcccagggaagtggaaagtgtaaggaaagagtgagtgaaaatttgaaagcagaccattcagtggagtgtgcatggtgagggatagttcttgggcactgagcctggaagaggctggcactcactccatgggcactcctgcctttctcttcttgcctcacacttggtaacagcaggaactggttagggttaggcaccagaaagatgtgactggaagcacctacagtgagtgtgggacttacatatagcttaccatttgcttgtggggtgctccaacctgctgattggtgctttgaagtctacagttaagggtgaaattaaatcccttaaatttattttccttgttttataatgattttcttggttatcaaaataacatattttcatcatagtacaaaatacagaaaa

SEQ ID NO: 171448 - DNA, 155 bp, Homo sapiens
gctccctcctccaaactgccaaaagcttgtggaagtccctgggcttcctaaaggaccaggagggagggctcaacctcacaaagcagggagtctgcaggtgacagacagaaagaacagctcctcctgagcctcagcaggccctgctgaactgtatc

SEQ ID NO: 171449 - DNA, 805 bp, Homo sapiens
tctccagggaccactggagactggtcttctgagggctgctccacggaggtcagacctgaggggaccgtgtgctgctgtgaccacctgacctttttcgccctgctcctgagacccaccttggaccagtccacggtgcatatcctcacacgcatctcccaggcgggctgtggggtctccatgatcttcctggccttcaccattattctttatgcctttctgaggctttcccgggagaggttcaagtcagaagatgccccaaagatccacgtggccctgggtggcagcctgttcctcctgaatctggccttcttggtcaatgtggggagtggctcaaaggggtctgatgctgcctgctgggcccggggggctgtcttccactacttcctgctctgtgccttcacctggatgggccttgaagccttccacctctacctgctcgctgtcagggtcttcaacacctacttcgggcactacttcctgaagctgagcctggtgggctggggcctgcccgccctgatggtcatcggcactgggagtgccaacagctacggcctctacaccatccgtgatagggagaaccgcacctctctggagctatgctggttccgtgaagggacaaccatgtacgccctctatatcaccgtccacggctacttcctcatcaccttcctctttggcatggtggtcctggccctggtggtctggaagatcttcaccctgtcccgtgctacagcggtcaaggagcgggggaagaaccggaagaaggtgctcaccctgctgggcctctcgagcctggtgggtgtga

SEQ ID NO: 171450 - DNA, 674 bp, Homo sapiens
tctccagggaccactggagactggtcttctgagggctgctccacggaggtcagacctgaggggaccgtgtgctgctgtgaccacctgacctttttcgccctgctcctgagacccaccttggaccagtccacggtgcatatcctcacacgcatctcccaggcgggctgtggggtctccatgatcttcctggccttcaccattattctttatgcctttctgaggtgagtgatccccacctccccaccatgtctccctcccgccctcaagggaggcagcagggcagggtgggaagcattcaggttgtgcagcctctgaccgttgtcccctccacacgttagtgtcctcatcccaaaatggggttgggggttgaaatgtgtcagagctatttcaggagcaagtggcagaaactcaactcaaattggcttaaacataatagggaatgtgtggttcacgtaactgagaatagcaaatagcaaatagggttcatgtaattgaaaaacccaaggtgcatggacttctggcagggttcgatccagggggtcaaaagaggtccccagaacttggtctccctctacctctcacagctttgctcgccccttgacagtcacatcgggcagctttaccaccctcaggggccctggctgcctcaggatgcatcatagctccttagctgc

SEQ ID NO: 171451 - DNA, 559 bp, Homo sapiens
ttgaccaagtcacaacggctccagaagaaggagcttgggactccatttaggatcctcccaagggaacaggctcgcacaaaaatcctagggccacagagaggggtgtattttattctggaaaaagatgcagtttggcaatgccagcttggccaaatgtcaagtcaacctcatttgtctccatgctcttgtgcagcccctgtgctggcatctcccaccacaagcacctctcttccctggcaatggttgcatcaaaaaacaaacaaacaaaaaaaacctgttggccaggcacagttgctcaggcctgtaatcccaatactttgggaggctgaggcaggcagatcatctaaggtcaggaattcgagacaagcctggccaacatggtgaaaccccgtctctactaaaaatacaaaattagacaggcatggtggtgcgtgcctataatcccagttactcaggaggctgaggcatgagaatcacttgaacccaggaggtggaggttgcaagtgagccgagattgcaccattgcactccagcctgggcaaaaagagcaaaatcctga

SEQ ID NO: 171452 - DNA, 217 bp, Homo sapiens
ttccttctgcttctgcctaacgaagccggctccatcctcccttcctccttcagcatgccaagccagcctgacttggcctttcctgcctacaaatctaggcaaaaataagacaaagcaaccctctaaaaatcatccatcgagattacattactttcaagttgttatttatgaggttggttgctgccactagaataaaattctctgctcagggtcttag

SEQ ID NO: 171453 - DNA, 611 bp, Homo sapiens
aggccggtgttaatcggccgagggtctgtttgtgtatctgtttgtctcatctactagggcaggggctttttctggaagggccggagaataaatatttttggctttgtaagccagaggtcatctctgtccagaccactctgctttgccgttgtagcaagaaagctcccgtgggcgagtgtgcctgtgtttcagtaaaactttatttatggacacaaacgtgaattccgtgcaatttttacattataagacatttttcttcttttgctttttttttcctccaacgactaaaaaatgtcaaaaccattcttagactgcaggctgtacaaaaacaggtggcgggcaggattgaacctgtgggttgtagtttgcaaatacctggctagggtgtgagggccacactacggaaagctatggaaaccatgtcagcctcacgacccctagaatgtacggcagctccttagacgtggtgggtgttgagtggacattccttgttgagtgaatgaatttttttttttttttttgagacagagttttgctctgtggcccaggctggggcgcagtgggctgatctcggctcactgcaacctccacctcccggattcaagcgattc

SEQ ID NO: 171454 - DNA, 465 bp, Homo sapiens
catttctttctctcaaatcagtcctttgaaaaattgacattataagaactgtattttttccaaagtcagcataattatgttctgtaaacctctaaaataattaaattttcctctttataaaaacctctctttaattgggaatttgaaaactgcctggatatttgctgatacttagtcattgttaataatttttgaagtatgataatagttttgtggttatgtttatcattacctttcaaagatatatactaaaacatttatagatgaaattatgtatagttcttggagtttactttagaataatttgaaaagcaagtggatgaggatataggtgaaataagattcatcatacattttaaatttgtgtagatcattgatgggttccttggaagtcactgtgctattctatttacttttgtatatggttaaagaaatttttaatgtctcttaatagatatgcaggtc

SEQ ID NO: 171455 - DNA, 595 bp, Homo sapiens
agaaatactgtgtagctgcaatgataaaaagtgagagttaatgaagctgtgtgaatggagacaacagacagtacattcaaaagtgagtgagacttttctttgatacaattctcattatttatcattacaataggttcaagaatattctcaggagggtcctaacattccttttaaacaataaattcaaccccaaaccaaaggatcccacaatatatagcagcagatgtatcctaggaaagtcttccaagttgaatgttctacttggcgccttcttaattctggtcattcccaggggatttatttctcactcttgaatcttcagctgcttttgtttttgaagcatacgatgtcacatcggtaatggtaattgactgttgccttcctaaaaatatcttaggcttcgtttcccaaccatatcattttggggataggaagtgccctagattccttaaaatgtaggattctttatagtcagaatggtacacgtggttgtgctaaaaaggtgacgcagcaagtttggtgccgagcgttcaggacacagaaaatgcacagtgtctgtggaaggctgttaggactgaaataattgcataccacc

SEQ ID NO: 171456 - DNA, 561 bp, Homo sapiens
cttgttaaatccaggagacagctgtcatgtgagaatgaaggtccagtgctgctttccagctctccaaggaaaactagaaatccagatttctatattaaatcccctgatagcttgaggctggtaactaattcagaacattagagaactgtaggggcagcaccaaacacaaacatgtgtaggatacaccctgagttactaggttgttacttcaatggagttttctgtttctttgaacttcagaaattataccaagatacatctaattaaaaactcttggctggacgcagtggcttacgcctgtgatcccagcactttgggagtccgaggcaggtggatcacctgaggtcaagagttcatgacgagcctggccaacacggtaaaacctcatctctactaaaaatacaaaaaaaattagttaggcttagtggcgtgcatgcctgtagtcccagctactcagggaggctgaggcaggagaatcccctgaacccaggaggcagaggttggggtgagccgagatcatgccattgcactccaacctgggcaacagagagtaaactctgt

SEQ ID NO: 171457 - DNA, 1028 bp, Homo sapiens
ttttggtgggttttggccggcttctgtaccacaacctgttttagcagtaaggcctttatgacctgtatcttgtgctgacctcttatctcatcctgtggctaagaatgcctaacctcctgggaatgcagcccagcaggtctcagatccatttgacccagcccctattcaagatggagtcgctctggttcatacgcctctgacaatggcgtgtggggtcaagggttaactgagctggttccctttcggcaaggtaatttgatcgtgggttgactttctagtcctgtttccctggtaacctgagaaagttgtctatgctactcgaacaacatggcttatgataaaaataaataatgatggggcttgtggaggcttaaggaataggcttatccttggaggaggctggggaactccccgtctccagctccagtggtccaagggtgtggaagagaaacagccaccacttgagaggctcccaaggaaactgtggtttgtcccacagcacagcaaatgtggctcatggattctgggtcccaaaacagagctccgtgggtcagaccatcccgaggcagaggctggtctcagtgggagcagccgtgcacggctctgcgtgagagctctggtcacccagagccagtccagctcagtaaccaagcaaaccacatgctcttctttcttgaataatattttccacaataacacgccttaaggaaatgccaacgaagcccggcccacaggtcagaaaaataatgaggtcatttaacaatgcagacagcccgagactgaggtagcatttgtggccacattcttggacatgacatgaaaccatcttcttgtatttcagggtctcaagaggccaaagtctccttcatgtgttaattcggagctcagttctgactggctggtggctgctccttccagagttatcagttttggagctgaagcagctcttcagaaagacagtggttttcccaagacagagcaaggctgcagctggttgctaagcaaagggggatcaaaacatctgtctg

SEQ ID NO: 171458 - DNA, 279 bp, Homo sapiens
gagcaagacagagctgctgccttcccggcctcacgcaccctgcccaccagcccctcggaagcatgtgacgacagcagagggtacaccagagacaggacagacacagagagaagacgagagagagggcagctgcccaaataacccctgtgagccccgtggctgaatggcaggtgagatggggcctggcctacactggacagatggggaacctgaagcccgaagaagaaacaagactgactcctccagaaactgcattgtgggttatgggtgtgcaggggc

SEQ ID NO: 171459 - DNA, 215 bp, Homo sapiens
gataggatggcagatggcaacacagagacaggacagacacagagagaagacgagagagagggcagctgcccaaataacccctgtgagccccgtggctgaatggcaggtgagatggggcctggcctacactggacagatggggaacctgaagcccgaagaagaaacaagactgactcctccagaaactgcattgtgggttatgggtgtgcaggggc

SEQ ID NO: 171460 - DNA, 292 bp, Homo sapiens
acaggggcctcccagcagctgcttcagtgggcctggcagggcagtctggaaccaggaaacatgagcctttccaaagtgacttcctaactcccaaagcaataaatcacagtggctgaccatggatacaaagcccatgggctacaagagctcttggacttacagggtctgagagtgaccctagaccctgtcagtccgtgtgctttgggatccccttttaggcagcacatgctaaggaatttgggctttattctggaaagcattagggatccagccaatgattttaatcaagaaa

SEQ ID NO: 171461 - DNA, 983 bp, Homo sapiens
tgatgttatccccaacaccattgtcccatcttacagacaggaaactgagcccagagaggttaagcaacttgcccgaggccatgcacctggtcagtggaggtacctggctggatgcccactgtgatgtcagagccacttagcaccatgtgactaacatgctctgttgtaaagcacaagtggcaccttgtaatccgtgacctggggtctctgagtgctagtggtttcccttttaactgtaagcccatttggcaaggttgtgtgctgggcacccaggagccgggccatctttaaggaccttcctgagatctggagtctgacaggcctgggttcgaatccctcttctatactcactaatcactggggttttctaggccttggtttgcttctctgtaaaatgggcctaatgctgcctacctcagtggcctggcaggagtgaatcagcccgagatctggtggatacttagaaaacatttaccaccttcagaccccctcacccaggcctctaaagctgtggtcctcaaacctcacagtgtccttccctgggaagaaacagccctccccagaagtgctgggtctgcatgcctgggggctttaaacgggattctgatgggaggtgctgcaggaccaccactgcggtaaggtttctgcaaaccttgtacaaatgggagatgttggcatcccccactgtctcttcccagggcccttgctgcttttcctttgtggcatccatcacacttgtaattacttgtttagcatctgtctgcttctctgggctgcgtgtgctggccttgttcatggctgggtccccagcactgagcagcctgcctggggcgtaataagtgtgtgttgggaaaacaaacaaacaggcgcctggctggctgaataaatgctcggatgctcttcagagcagctggactcagtgtccccccaccccaaggcctgggttctgacacaggctctgcggccacacacttcttgtgtga

SEQ ID NO: 171462 - DNA, 443 bp, Homo sapiens
gcttttacaaatatccatacattctctttgttacacaaaattgattatttttctttaaatttacttgagatgaaacatttttaaaagtttctactaaaagtaaaagcattaattgtacaatttcccttatctttatcagtttcgttcctctcatgtgaaaaaaagttataattgatatttttaaaagtggcatgctgtttactttgggacttgaaaaataaaatagctaagttccctgattcattaaatttaatcataggtaaagcacttacttctcaccccatgagtaacagcttatgtcgaatcaccactatcttcctcatacaagcaaggaaagtcactacagctatcttttgcagaattaaacaaaacacatattcttgccaatgtatttctgactcctaattttaatgtattaaaatgcttaaaagctgtttttaaca

SEQ ID NO: 171463 - DNA, 216 bp, Homo sapiens
actattaataatcttgacgttgccaaagtcacccttgttcagggacttagaattttcacaaatcctatgtatgtttatatttgaattatttcataacttttaaaagcaatatagcagttgatcactggacttaagcaacttggttttggctctttctcttactatctgggtggttctactcagcttatttaatgtccctaagacttagctccttca

SEQ ID NO: 171464 - DNA, 349 bp, Homo sapiens
tctgaaatgttgatcaaggtctgagctggctcaaaacctgggaaaagacttcttagactgctgaactatttaaaaagaagcatgccggcacggtggctcacacctgtggtcccacctattcaggaggctgaggcaggagaatcacttgaacctgggatgtggaggttgcagtgcaccgagatcgcgccactgcactccagcctgggaaacagagtgagactccacctcaaaaaaaaaaaaaagtaaataaataaataaataaataaataaataaaaagcagcacattactgcatgtttacctagcatctcagataaagaaatcagagtgaacatgaaatgctaaattag

SEQ ID NO: 171465 - DNA, 143 bp, Homo sapiens
ggtagtggtcatgaatcttcgggttggtctttgataaaaaaaattgcttctttcaaatttagttataaaaactctctcgttccaataatttaaatgtttatcacaggtagtagccaatattctgagcttgaagtttcttctct

SEQ ID NO: 171466 - DNA, 202 bp, Homo sapiens
gggcgacaagagtgaaactctatctcaaaagaaaaaaataatcattggcaataattgctatcctattgattgattgattgattcagagtgtcactctgttgttcaggctggagtgtagtggcttgatcttggctccctacaacctttgcctcttgggttcaaacaattcttatacctcagcctcccaagtagctgggattac

SEQ ID NO: 171467 - DNA, 298 bp, Homo sapiens
tccatcacctcgccatctccaaacattcactcaggtcttctgcaggtgaatactggaatcaaagtttacctttctctacaatttgcaacaaaagaactgtgcaggccaggtgcagtggctcgcacctgtcatcccagcactttgggaggccgaggtagaaggatcacttgaggccaagagtttgagaccagcctgggaaacatggcgaaaccctgtgtctacaaaaaatacaaaactcagctgggcatggtggtgcactgcacaccaatggtcccagctactcgagaggctgagatgg

SEQ ID NO: 171468 - DNA, 230 bp, Homo sapiens
actctagtggatccttatgttatccccaacaccaagcaagataaagaacattttcccctgactccacaaagttcccttgcatgtcatcccggtcatcccaccctccacaaccaggcgatcactattctcatttattttcctcttagatctagactgttgtataaatgaaataatgtaatatgtactctgtgtctgatgtctttaattgaccataatgtgtgagagattaa

SEQ ID NO: 171469 - DNA, 201 bp, Homo sapiens
aaccatgttgctcaggctggtctcgaactcctgacctcgtaatccgcccgcctgtgcctcccaaagtgctgggattacaggcgtgagccaccgcgcctggccaacttgcttacattttaaagtgctttgggttgttgggtcagagtatgctattattattattattattattattattattattattatttattttttttt

SEQ ID NO: 171470 - DNA, 368 bp, Homo sapiens
tggaaaaatgggtttctgagacattttaaattattccttgcttgtctttagaggcaaaattcagataagaaagcttatcaattatacttttgtttctactcaaaaactcatgactgctcactcaaagactccttgttcttatcttaaaacattgtttacagtgtcccagatgaatggcaacaaatcctggggtttggtgtttggatggtacatttccctggggaaagaaataacagtttgagatggaacggggttggggtgggagaatacttctcattctgaggaatatttaattttgccaagatgagcatttctagttcttagtctgttgacgaaaagagctatggtttgtttctggaacttttgat

SEQ ID NO: 171471 - DNA, 184 bp, Homo sapiens
gaaaaaacgaacaaaaatttcctaagtctgcccactcaaaagtcctagaagcagcgacaacccaataacaataaacactcctaggaacatagattgtattctctaaaaaatgcttctggccgggcgctgtggctcacgaggtcaggagttcaagatcagcctggccaatatggtgaaaccccgt

SEQ ID NO: 171472 - DNA, 415 bp, Homo sapiens
gaaactccttgttggctcaactgctcttcacagatgcataattttggagtccatacaccaccctggtcactctctttagaatacactccagttttgtacatttattctattttcaactgtatgttaattttaaagtacagcatgcaacatgaaaattaacatgcacacaatgagaggagctgtgttaggcgaaggagcttattgatgattactttgctttttcaaaaattgtgtttaatgttggcatataccccatcttccatagaaataaagtagggtgttcaggatctaatttcaaatgtagactagtaatctcaaagtgtaatgggacaattatatcccttgttcaggagacaaaattgctcccaaaaccttcttttgttctgttttttcatggcatattttaagcttaaaa

SEQ ID NO: 171473 - DNA, 160 bp, Homo sapiens
aacaaaatctgtattacttttacttattatggctatgtgtataattatatgtctagttttcttttttttaacagttaacttgatattctataccacttgaatatttttaattctggaaaatcagtttttcctagtgctcccttttccaactcttctcact

SEQ ID NO: 171474 - DNA, 245 bp, Homo sapiens
cacttaaatctctccacattttttcaaaacatatgggatataaactatgttctatctttaacttgaaaatccttcaaatttaacatcagtttctgtgttaaaaaacaaaaacaaaaaacaaggctcactgctcaaatgcttaatttgtaaatccttcaaatttagtgtcagtttcaattttaaaaaacaaaaacaaggttcaccactcagacataacttttcacttacctgcgctattctcttct

SEQ ID NO: 171475 - DNA, 220 bp, Homo sapiens
tgacaacaaaggaatggtcaaggcctaacaaacagaaacagcgatgcaaattgcctaggagatggagcggcagtcactggagctggcgttgcccagactttggttggcttcagggtgacagttcaagaaggcagctcctcctgtgggccagtgagcttgctccaagagcagccctttccagctgacgcccagagtgacccaaaggctctcccggaaagtc

SEQ ID NO: 171476 - DNA, 366 bp, Homo sapiens
atttcggcacgaggaccacatgtgcatctcagatacccatggccctattccacttccgtgctgcacttgctagcccctcagcagtaacaaccttcctctgtccacttaacactcaaagactagctccactgatcacctaccccaggccaagtgactgtcacagatgaccacattggcacctggccttatcctccaggttgaataaacaccctaggccccatcaaagtcatcaaaaaatcctggtgattccacagagtgctgaataagcacaaaggaaaaaaaggacagccatttgcctcaaatacacctatgcctctgcatccaccttatatccactcttcccttgaaagtgcactgccaccccca

SEQ ID NO: 171477 - DNA, 194 bp, Homo sapiens
gatattattccctgtgatgggtgtagcaaaagagtaaatgtgaggcaaggcacatttttctttaattctttatcccctcattctccacaccttcaccacataagatagtataagtctattagacttagtgaatcgttgaagtaacttaaggaaataatattttaggaagagggaaaaattaaacataacacagt

SEQ ID NO: 171478 - DNA, 605 bp, Homo sapiens
ccattgtgccacaactcactcagcctgagagatgatcccaaggctgcttgttgaactgtgggaatggttgctcctctgtagcaatccttgagtgaagcccaagggaaggctaaacctcagcccaggcaccgacacccaaactcaaattacccttcccaggttagagcaattggtctcagcttggatacagctcagggcaagcccctgtgcttcacagccttgctctttaggaagtccgtagaggaacccagctccactggtccctcaccagtgtggtctccaagtccttcctggagagccattctccccaggcccaggaagggaaaaaagctcatctggtaactgctggcattagcagagcagataccgggtgagagctctgtctctgcaggctggaggtggagccatgtggttaactgctccccgccaccaagctggctggtcacatttgcagagagaaccttgactttgtcatttgattataggtagaggcattcctaattttcacttgtgatttattattgttcttttcccattaaaataattttcttctaagatgcaaagtactaagtatttgttatagaaaagttatgataatgcaaaca

SEQ ID NO: 171479 - DNA, 233 bp, Homo sapiens
tggcaaagtaagtgcaaagcatgcaaggcgggcagtcaggagccgggggagatccaggactaagcactggcaagaccaggtactacctggagtgtctgatcccagggaggacttagacccttttttaaagggctttcaactgataaaatcaggccacttaggatactctcccttttgattaatgtaaagctaactaagtagggactttaattatatcagcagaatctctttat

SEQ ID NO: 171480 - DNA, 467 bp, Homo sapiens
caattttttatttattttattttttttagtagagtcgaggtcttgctatattgcccaggctggtctcgaactcctgagctcaagccagcctcccatcttggcctcccaaagtgctgggattaaattgtccttccttgctttatgcgcgttcattcagcagatattcaccaactacatggttagtgtcaggtctgtgctaggttcttaagatacagagatgggtgaagcaaggcccctgtctcacttgttggaaacatattattgtatcagtcatttgggctgctagaacagaataccacaaattaggtggattaaacaacaaatctgttttctcgtggatctggaggctgatagtccaagatcaaggtgttggcaggattggcttccgatgtggcctctcttcctagcttgcagccagctggcttttcagttagtctgcgcatgtacactcctggtgcctcttattc

SEQ ID NO: 171481 - DNA, 385 bp, Homo sapiens
tcagctctctgatgacatatgcagtggcaaccaggctcggtggctcatgcctgtaataccagcactttgggaggccgaggtgggtggattacttgaggccaggagtttgagaccagcctggccaacatggtgaaaccctgtctctactaaaaatacaaaaattagctgggtgtggtggcacatgcttgttatcccagctactcaggaggctgaggcaggagattcactagaaccagggaggcagaggttgcagtgagccaagattggggcactgcatttcagctttgggggcagagcgaaactctgtttcaaaaaaacaaaaacaaaaccaatctatattggttctaacctttatctatagacaaaagcattggtttatgaaaac

SEQ ID NO: 171482 - DNA, 379 bp, Homo sapiens
gtgtttcagctgcccattctaagatacatttaaatggatctccaaaaagtcccctagtcaaatatcaagccaggatcttacactgtgattcagaaagaaagaaaaaaaaaattggcctgtaatcccagcaacttgagaggttgaggtgggaaggtcacgtaggccggaagtttgagaccgacctaggcatcttagtgagacactgcctcaacaaaaacatttattaaaaaattagtcaggtgtggtggtgcacacctgtagtcccagctactcaggaggctgaggtgggaagatcatttaagcccaggagtttgaggctgcaatgagccataactgcaccactgcactccagcatgggtgacagagtgagatcctgact

SEQ ID NO: 171483 - DNA, 229 bp, Homo sapiens
cacctgtaaaatggaggaagtaatacctttgttgcactgatatggcaagaaatagaaataaaatgtataaaacaactgggacaaaaacagccctcaatgaatgatagttgttagtttatcaaataattgctttaattattttttcccccggccctttcttagctgagggttcggaaaagcatctgttgctccttgaggttttcttttcttctgccctgaccagagcttc

SEQ ID NO: 171484 - DNA, 474 bp, Homo sapiens
gctatttgctgaaagacacctttggcaggactccaaagagtgggcagaaccacatactaagctatttttcaaagttcaggtgtcttcaggaattgtccataataaagataagtagaatttccttacaatggaatggtgcagaaatctaacaggcagagaaagaggggaaaaaaccttaagcaaaggtgtggcaatataatctctttctctggcattatctttttgctgccagttagattcttttagtcttgcaattcccttatacaggaaatgagaaagatgagtggaaggagacgataagaggagaaatttcagagcaagggcaagtgtgttaaatgaatgactgcctacagtagggtgtgtccaggaatgtctgggggtgtgtttgcatccttagtttatgcaagttatgcaccaaagctttgcatccttagctatgcaagccattttggtggaagtgttgtttctcatact

SEQ ID NO: 171485 - DNA, 556 bp, Homo sapiens
tatttagtatataatatgatacaaactatgaagaacataaaggctatttgtaacatatggtgcccaaatctaaactgggatgaaggcacaagatgtcccagcactgtcctccagtggtgtcctggcctaacaccatcatcctaaatttcagttctaatgccttagcaaatggccagggtgtcaacagaaaagggatggacggcagtgacgacatactgcagtccaagtgaaatttgagtagagagttctaatgtaaatgactattttaaaagacgtttgcagtggccagacatggtggttcacacctataatcacagcattttgggaggccagggcaggatcaattgaggtcaagaggtcgagaccagcctggccaacacagtgaaaccctctccatcataaaaatagaaaaaattaactgggcatggtggtgcacacccgtaaccccagctactcgggaggctgaggcatgattgcttgaacctagaaggtggaggtcgcagtgagccaagattgtgctccagcctggccaatagagcaagactctgtctcaaaa

SEQ ID NO: 171486 - DNA, 528 bp, Homo sapiens
gaggtagaatcactggattgtgggtccttgtgaagacaaaggactgttgaaacctaagtactaaacgacatgaggaggactgataggagagagtgcctgggaaataagaaactacagtcacaggaagactaaagcttggtgagcactagtctaacatgaccatgacagaggaagaataaatgacagtgtcaccaagaaaacagaggtctaagaactgagagggtggggcattcaaaataacctgacaggggttgacaagtttttttttttttttttttaacacaaagggccacagagtaaataatattaagctttgtagaccaaaaggtaaaatcaaggatactgtatacaaactcatataagagagaaaacaatttccacaaaaattttattaatgaaattcaaactatgataataataatgcataacttttcaccatacagttctactaatgaaaacgctggaattctcttttatagggcttcaaaattagcattccctatcattaaaatcaattgtaaatgtatg

SEQ ID NO: 171487 - DNA, 520 bp, Homo sapiens
gatcacctgagcccaaaagatggaggctgcagtgagctatgattttaccactgcattccagcctgggtgacagagtgagaccctgtctcaaaaaaaaaagaagtagcttgtcctgccctctcccaagcaactgtcaacttgcttggaaccagtgttcccattgctctggaggttctatgctgaggctggtgtgatcatgagttatcgaagatcccatgctccaggttcacgtttcctgaataatgctgcttagtaagtcatttcctatgtcatcctcccataccccgccgagctttgttttttgtttgatgaatggaaagactgcatgaacagaagcagcatgggaaaagatacacgtatgttatttggggctggcccccctctgcctggccgctggtagtcacccttgtggggacacctgaatcccagttcagaaagcactggcatcctaggtactcgcgaaaggtacctagagtgaacgtggcaaggctgggcctcggagccacaggacactgtcatc

SEQ ID NO: 171488 - DNA, 524 bp, Homo sapiens
tcaggtcctgcggccactctagtcattcatttgcccaaccctgactgaatacctcctccaagccaggccttgttcagggcactgggcagagcacgctgagcagaacagacaaatcaccctgcactcaaggagcttatcacttccaggtgaggaagatagacaacaaatacatcaaaaaaggaaaattgcagtatgtcaagcagtggtaactgccaatgaaaaaaaataaataaataaagtgggcgagggggaataagatgttggaaagagtgaccagaactgtaagcggcgtgaccagggaagccttccttcagaaggagcctactgagtaaagaccggaagaaagtgaggaaacccctgagcagacatgtaggggcagatgttcttagtagaagaaaaacaagggcagagaccctaaggcatgtgcccagcaggtctgaagaagagcaacaaggccaaccaagggatgttttcaaaggactccttttcctgctctattagtgatggactagggagtagcatgg

SEQ ID NO: 171489 - DNA, 673 bp, Homo sapiens
gcaaatgaaaccccctcccccagagttacaggacagcagcttcccctgttaggaattaagtcaggagtcaaacctgagacgggctaacagacctcactgcaggtggaacaaatgaaaccccctcccccagagttacaggacacatttttaggtcttagacttcaatatttaaaatatttgtctctggaatttgaaaataatatgtatgccttgtttactggattaaaaggctaatcacttattcatctgattagtaatcaaagtgtctaaaatttatttaatacttgatgttactttgttttatataaatgtgtatttctacgatagttttagtgtcatctaatattattttcaatgttgtaatttttatttatatgaatctttgtgttatacatcttaatgtcactggtattaaaactatatgtgcaaatagcttgaaatagcacctaacacatcatggattctatgtaaatattcaccactctatttcatcacattttaaccaattcatactattcttcatttgctaacattttatttgtcctcattcaaatttgtgttggtgtcctgtctacatattaataaaagagaggaggtaggcccagacttccatctcgattaaatactaagacattttcctagttctatttatacacaacattacatttgtctc

SEQ ID NO: 171490 - DNA, 244 bp, Homo sapiens
gattacaagcgcccaccaccacacccagctaatttttgtgtttttagtagagatgaggttttgccatgttggccaggctggtgttgaactcctgacctcaggtgatctgccccctcagcctctcaaagtactgagattacaggcatgagccaccatgcccagcctctgccctgtttttatcagtttacctttatgactgactgaggaagtcctgaagttgcagctgctccacttctgagtgatc

SEQ ID NO: 171491 - DNA, 358 bp, Homo sapiens
tgagaatcagtatttttacatgcctactacacataacacttgttctaatacagggtatttcttcatagttgcattagaatttgagactttttttttggttcctggccagagacaatttatgcaatttactgtgaaactaaatggagctggacaaaaaaaaaaaaaaagttcacttaaacttgccaagaattgccgcttgggggtatacaagtttgggcatttgcttaggactgttgctctgaattccttgagggaagggggaatctggatgcagtttcagctagaaacagatttgtttgctaataattgtggccgtgatagtgtgatgagtgagatcttttttcacttgtccacctct

SEQ ID NO: 171492 - DNA, 346 bp, Homo sapiens
ttgaccagctccctcactccaaaatcataccaattccagtatcaatctctcataagctttatcctgctgttttacccaaaccagacctctgtggcttctacctaatgtttttctttgagacggagcctctctctgttgcccaggctagagtgcagtgatgtgatctcggttcactacaacctccgcctcctgggttcaagcaattctcctgcctcagcctcccgagtagctgggattacaggcaccggccaccatgcccggctaatttttgtatttttagtagagacagggtttcaccatgttggccaggctggtctctaactcctgacctcaggcgatccgcctg

SEQ ID NO: 171493 - DNA, 799 bp, Homo sapiens
tcagtggtgcaatgatagctcattatcacctcaaacttctggctcaagccatccctccgcctcagcctcctgagtagctaggactgcaggtgggcaccatcatgcctagctaattgttagatcctttttttttatgttctgcattttttcagttatttttacatatttctctcttgatccatgcagttataggatatatccttaattttagaaagtaaggacttttcgaccaggcgtggcggctcatgcctataatcccagcactttgggaggccgaggtgggcagatcacttgaggtcaggagttccagtccagcctggctaacatagtgaaaccccgtctccactaaaaaataaaaaatcagcccggcatggctgtgggcgcctgtaatcccagctactcaggaggctgaagtagaattgcttgaacctgggaggcagaggttgcagtgagccgagatggtgccattgcactccagcctgggtgacaagagcgaaactgcatctcagaaacaaagatgcctagctttcaccttgttgatgtttttctaaattttggaataataaatttatataggaatactgcaagaatagtccatttttttctgatgtcccaacatcaccaaatgtatccatcacaagtaggaatacatggaaacattaatgccagccactaaccattcatgtttacccagtagtcccaataatagctttgtcacacaaaaacatgattatgttggctgggcacagtggctcctgtaatcctagcattttgggagcccaaggcaggagttcaagac

SEQ ID NO: 171494 - DNA, 391 bp, Homo sapiens
  misc_feature (333)..(333): n is a, c, g, or t
ctcattttcctcagtctcattggacgacttcttactgtggtgctagagtgagcctctgcccaggtcagctcataactgttgctgtgagaccacagactttaggagaactggaagtttaggatttcttcagacctctctttcactttttccagcattggcacaagctgactagttaaggttctgcatttagaggtaggtggattaggaacccagaacaggctgctggaagtaattctctggttgtcacaccttatttagctataagtgttcaatgtgaaccaaagccttatgaagattgttagccttttaccctgtttctccctcgtcctcccnagagtgctgggattataggcgtgagccaccacgcccggcctttacctcaattttttta

SEQ ID NO: 171495 - DNA, 172 bp, Homo sapiens
cacagccgcccgggcagctgcaaacaccggagcatactcacatactccggggtgcacactgacgcgcatcccccgggtctccctccattttccatccccttccccagctccctcctgtcgccccagtcccctctccatcctcatcccgttccccatccccggcgcgcggccg

SEQ ID NO: 171496 - DNA, 284 bp, Homo sapiens
gagacatacattacaatcattcataaaaactgtttttaaaaaaaactttaaaaaaaaaagcaaaaaagtattttatttttaaattcaggagatattaacagtaaaaacaaaaatatgaaggggaaggatatacactaacttcacatagcagatactcctagaaagaaagaaaaaatggaataagaaaaaagttatccagtgagctttacctctatgttttacagtatttgggtagaggcagtttagcccacagtatgagaagattactatctgttaaatatgga

SEQ ID NO: 171497 - DNA, 259 bp, Homo sapiens
catttttttggttaaaagaagatttattcgaaatcagcctggacaacatggtgaaaccccatctctactagaaatacaaaaattagccaggcttggtggtgggcgcgtgtaatcccagctgttcaggaggctgaggcaggagaatcgcttgaacccgggaggcggaggttccagtgaactgagatcgcgccattgcactccagcctgggcaacaggagtgaaactcctattgcccaggagttttgagagtgaaactctc

SEQ ID NO: 171498 - DNA, 764 bp, Homo sapiens
gcagtgagctgagaagatcacgctactgcactccagcctggacgagcgaaactccgtcaaaaaaaaaaaaaaaaaaaaaagacctgtccaggctcaagtgctccttcctcctcagtcgctgagactacagggcgtgccgctacacctggctaattttgtgtcttttttgtagagatgggggttttgtcatgttgtccaggctgtccttgaactcctggggtgaagcaatttgcctcctcagcctcccaaagtgctggggttacaggtgtgagccaatgagcctgcctactgttattttaatggcataaacatcacctccagagcttagaaaggagagaaagaaacttaggcaattgatgtggagctctttattaaagaaaccagctgttagtttacccttcagcaccttgaatgaagtgtgaatttctgttagtaaaatgaaatacctcttttcaaccagaagatggggctggactcccttggaaagaaactgcagaggctcttttcgggaaccggtttcctgtgctcgctttgcctgtagtttctgtcactagtacccagctgtggtcactagtacatcagaaatcacacagcagctccaaaaatatactgatgcctccacccagaaattctggttccataggtctggggtgtcctctaggtaagtgattctcaaactctactgcacattggaatcattgggacacttagcactccaagcccacactgaaggaatcagcatgccggcgaagaagccaccagcc

SEQ ID NO: 171499 - DNA, 330 bp, Homo sapiens
tgaagtgagtaagtgacttatcaaaggtcatacagctaataagtgacagccagaatttaagcccagacagctgagttcttaacagcattattatatacactaatgaaaacatttattttccagaaaggacattaggttcttctttccagtctcccactgtaaacctccttatcccatgaccttgcctcttttcaataggatgtctgctccccaggggctcttcaaggaaggagctcttgaggactccaggacttaccctcatgctttttcctgctagcagagtctgagatctccaccaaggctcattcccagtcactgctgataactttt

SEQ ID NO: 171500 - DNA, 156 bp, Homo sapiens
tggtttggacatattaacctcttcgggtctgtttcctcatctgtaaaatgaggtagaaattagatgaatgcaagtaaggaatttacatcaatgtcttagctattcagaatgaatcacagcattctgaacttggcagaaaacaacataaagagccag

SEQ ID NO: 171501 - DNA, 249 bp, Homo sapiens
catagaaggaggtggcagctgtctggggcttcccagacagcaagcaggagaaaacccgtgcacagacactccatgtgcatcttcatgggtttcagttttgccttccactagatacctttacagcaggggaggattttattatttgtcccctacactttgccaactcctaacaggggctgggagactgacagggtgacccaggtcaccacgggggagatttctgctcagggagtagcggtaggaggaggc

SEQ ID NO: 171502 - DNA, 615 bp, Homo sapiens
accccggatcgctatcgcccaacaccaacacaccggtatgaaaagtgtgtacaccatttataaccaattagaaaatgtatgaggaaatagactctcatccacaatagctgcgagaagtaaatattatctagaaataagattaacaagagaaatgtaaggcctatataaataaaaggataaatctatgctagagggtataaaagaaacacaaaaatagaggtatgccatgtataagacccaacataataaatagttctaccaaattaatttataaattcaaagcaatttcatataaccacagtaaagctttttaaatggatgtaataacctgattataacattaatctgagagtcatcaggcataaagcaattttgattacatctcaaaacaatccatggtgttggggataacatcacgtgatgttatccccaacactcatcactgatgataccagcactttacaaataaattgtttcaccatgggaacttaaggccataccactcagctgcccaaagcaaacacagcccaaggcagtgaagcttcatggggaggcagaaggatccagccaagcagcaattagtgaccagagctgtggtggtgttgggcgaggaga

SEQ ID NO: 171503 - DNA, 359 bp, Homo sapiens
tgggagcacaggaaaatagcacagggtagctgttcaatgtagaagccaaactcagaagattagcagaggacaggttgataatcaaggtccaaactcaatatttgaaaagaatagtagaatagtgcaaaccttcagcaagttgactaggaggaaaacaagaaacagcacaaacactgatggtggaagcaagcaaagccggggatggagcggatttgacaaccgttgagaacaccgtgttcaacgtacacaatgcattcgaagtcctagatgaaatggacagttttctaggaaaatataaatcaccaacatatgctcatgatgtagtggcagatgtgagagtctggaaaccagagggggga

SEQ ID NO: 171504 - DNA, 250 bp, Homo sapiens
ccctcctctcccggagagggagcaccgccgagagtttccgttccctttgccattcccttccccctccttttcttttattttcgagagaatttcttcttggcttattggtttaatttgatttttaaaattttgggttgcttttgtgtatgtgtgctttttttttctttcctcattttatttgcatccagagcatggcgggctgcgggctgtcggaagacaccctcttctcttccttcttttacaactacgg

SEQ ID NO: 171505 - DNA, 198 bp, Homo sapiens
cttttccaacaacacgcattaatatatacaaattttacttaaatatgcctgaaatttaagaacaactctaaatgactattaaaaatatccacacattaaacttttggtttagtagtaaccccgatcttttttttttttttggggtcccggacccgaattcggaaaccggggcaaaagtggtccctggtgtaaattggc

SEQ ID NO: 171506 - DNA, 536 bp, Homo sapiens
tgcctcagccttcctaagtgctgggattacagacgtgaaccactgcgcctggctgacaactagtatctttgaaattgcaatgcatcttacaattgatgtgatcagaaagaatagtgtcatagtttaaatggcagttttttaattgataagcagtttttattgttaggcaataaaataacagtgcgtcttagaattgatgacatattaaagttgataaaatacaataatgctaattatttattttctattcaagttgtaagaaaatttatgaatatctgttgtccttgtagtgagtccatcccctgtcctctttaaactgtctgggccgatttcagtgattctgttttgcttcacccaaaccaggcttatatgcccatcaacccagaattgctctcacaattgtgtatactttttgctcctcatttagaaggaccagggattggcagtagttgctcctatcttctccccatcttcttccactcttccctctacaaatctttataggctcatgtcccctggtgggcctgtgtggcaga

SEQ ID NO: 171507 - DNA, 289 bp, Homo sapiens
tgcccaccctccttcctacctcgagtgaagagacaggggcaggtggccagccaggggggtgttcagtgacctcacgggtccagcatgcacagggcctggccccacagcccagcacccctccccacctggccttcacagtttcttctgcacctggtgacaggtgacattcacctgcacgacactcccgcgaacctggtgacggactggcagctcggtgaattccagctgagtgcctgtgattccacccccttacctcccactcaagtgacaatgtaagcgtgacctcgaa

SEQ ID NO: 171508 - DNA, 587 bp, Homo sapiens
cacgggaagtgagggttaaagggtcagtttgatccaggtagaagctttttggcaggaataccttgtagttgatgctgtgaactcacagtgcattccctgggggctgcaaggtcaggttgtcctacgattcatgatggtgagttttaccatttgttaaggaatgactaccagatccctctactgcagagtttattttcttcttatgaatattaagcatctgagaggtggcatgctgcatggtaatttgtttcctaataagcttccaccctatggttttagaggcttcactttgatcaggtatttcattggttattgcaaagtcatggttgtctaattgttccctcttttacatttattagttggcattcttcttaaagaaaagtgtttttgtctttctttttttagtagacagagtcagtgatttatatttatttagtgtattgtcaattcagtcattatcttttgggtgttgaaatcatcccggatttagccagggagggctcttctgactggctccggtcccccagggacagacccctcggcctctgttgtgccctcctgcacctgcctgccttttgctttcctac

SEQ ID NO: 171509 - DNA, 329 bp, Homo sapiens
gagttgtatgaatcatgtgagagaaatttatgacagtcataattagtgcaggagtaaaggaaataaagaaaacggaccaaaaaatttttacaaggtaggaaaaacagggcgtggggagttagagaaaataaagggactagtactactcctgggtttctgttctgaaactaggtaaatagtgaaactttttgctgacacagagaatacaataagaaaaatagattacagtaacagatgacaggtaactgcgaccaactaagtgacacatattactatattccatttttaattatagttactcatgtaattatcctattctgtacatcatt

SEQ ID NO: 171510 - DNA, 404 bp, Homo sapiens
agaatagccctcaagtttcctgaatcctgcaccctctaggagcaactacaactgtgaaatcaagctttgattaatgtcagaaatacgctggatttgttaccagctaggaacttggaagtaacaggaacttgcttctgaaactggaagtttggctctggatggcctgatctttgtagctgtttctgcccaaatggattctcatctcatttccttatattaaaggaatttgtgtcttttgcttgggtctgtgggtatttttgctagcattgtgtagtagtcaagagaataggacatgagcaagggtatctgcatttgaaactggctctgccactttctaactgtataatcgtgggcaacttcacttctgttcttcaatttcctctcttttctgaaatgagggtatt

SEQ ID NO: 171511 - DNA, 165 bp, Homo sapiens
aagtaacagtgaatatgagaaacacgaactgtgcggttttgttggtgtgcagggaaagtgaggcggagaagtggaaagtaggggcggggctgccttatggcacagctctgcttatgctattctctgggaaatcttcccgtggctcccagctaacttagcatccag

SEQ ID NO: 171512 - DNA, 672 bp, Homo sapiens
gttttttggttggttggttggttggttgttggttttttgtttgtttgtttttaaatataatttcatattgggtaaaacaaaaggttttccttaacttgtttagaattgtttaggaaaatactagttaggaatctgattttttttctcccccatggatttgtggttagcatgtttgtactctaatattcatgctacattttcatgtttaccaatataaaaaccttttttgtaattatttatatggagtcctgctttgagttaacatcatagaggaacgctttttttcagcaaaattgttttaaattaatgtttctaaagtgtataaaaatggttgggtggattaaaagcaattcagtttcacatgaaccatttgtccacatggaaataaatatgcagcacaattacacggcagaaggtacgaaaaggtgttgctgaaatcatgagaaaatgtaatacaggcggacgtcagtctccacaataaatttgcatatgtccttttttgggggcaaatacagtcatcattttaaatgaagtcgaagagttatttctgtaaacaaaacaaaagtcctccttgtcatactagacagcaaggaagcaaaaattgttagggtcatgtcaaaaagactcaggagtcaatttgaagaggttctgaccagacaataaatataataa

SEQ ID NO: 171513 - DNA, 496 bp, Homo sapiens
ttccacccatattcacaccataaacaaaaattaaagtacatgaacctaaatgttaaaccaaaacctataaaaattttagaaaaaaatcataggagaaagcctttttgactttgaattaggcagatttcttagataataataccaaaagtacaatccataaagaataaattgacaaattgtacttcatcaaaattaagaacagtatcttcaaaagatattgttaagagaatgtaataaatttgctatggtttaaatgtcccctccaaaactctggtgaaatttaatcgccatcgtaacattattaagaggcaatactgttacaatattacagtattaagagatggaacttttatcaggtgataggttataagggctctgctgtcattaatggattaatgccatcatcgcaggagtgggttccttataaaggaataaatcaggctgagagtggtggcacgcacctggagtcccagctactcaggaggctaaggcagga

SEQ ID NO: 171514 - DNA, 305 bp, Homo sapiens
cttgcctgagtacagacaggttttcctgactctaaaattcaagctattaaccgcagtctctccaactttaacattcaaatttcccattgtgaatgtctgaaaaatgcttacagttctttttttattattattatactttaagttttagggtacatgtgcacaacgtgcaggtttgtcacatatatatacatgtgtcatgttggtgtgctgcacccattaactcgtcatttaacattaggtgtatctcctaatgctatccctcccctgtacccccaatgcttacagttctagagtgaccaaaaaaa

SEQ ID NO: 171515 - DNA, 632 bp, Homo sapiens
gttactgcactgctgtaatttagttcgaaatgggactgcatgatcgatacctccacctttgttctctttgcttataatgcactagactcttgctctggctttcaggctccataccaatttggaactaatagaattttcaactctcaatggacattttaccaataatggtagtttaatgggaatagcattgaatctgtaaattgctttgagctgtatggctatttttacaatattgattcttctatccagcagcatggaatgttttccatttgttttgtcatctctgatttcattgagcagtggtttgtagttttccttgtagagatctttcacctccctagttagctgtattcctaggtattttattctaaaatagttgtttgccagtctgagaggacaatctgttaatccttaggaaagtaagatggtaaagccaggaaatggtgagaaatttagaacgctccaatttaaagttatacaaacattaacactttttctatagaggatcaaattgggatctcattaagatggcatttgccatgttaggaatgggtcaattgaacatttagatcatcagtttcaaaatcatccaagtatttaagagtagaaacagatgttgtgcatgtgtataa

SEQ ID NO: 171516 - DNA, 411 bp, Homo sapiens
tatcatgaggaatggaagtcagccatactgttgctccaacatattttccacttcttgctctgcaaattcccaaaacatgttcatagggcccttataaatcccttcttttaatctcaacaacttatttgcccctaagaatgaattagctatcagttatttacaccttacttggtatttacgcattttattatctctctccaatatttgaagtttaggtggtgctcattgagacgtaaagcctttccagttatattgaagcaaggtcttaagagggacagaaattcttcacggaatgtacaaaaatggtaccatctggatggctccctaatttgccaacaaataggcacaatgttatactagagggccagagttcctaagatatgatggcaagtatccttccttaagaactga

SEQ ID NO: 171517 - DNA, 130 bp, Homo sapiens
tttatccatcagggctcttttagtaccaaaaaacagaaaacctgactccaatgaacttaaatgaaactgaaaggtccaaggatagatttttaacttcaagcacaccttgatccaggagctcaagcaatgg

SEQ ID NO: 171518 - DNA, 198 bp, Homo sapiens
accaatgaagattaggacttttgtgacctggaggataggatacttagtgagcaagttttaactgttggggaagagaagaattcaagtgggctgttggtggttctgagatgtaggggccaagtacaaagactagggtgagacctctaggagctaaaggcagcctgaggctggcataaattaagttaaaccattgttagg

SEQ ID NO: 171519 - DNA, 352 bp, Homo sapiens
aaccccatctctactaaaaacacaaaaatcagccaggtgtggtggcgggcgcctgtaatcccagctactccagagtctgaggcaggagaatcgcttgaacctgggaggcagaggttgcagtgagccaagatcaagccactgcactctagcttgggtgacagagtgagactccatctcaaaaaacaaacaaaaaacacagctcattccctagattaaaattccttaaaggatgctctgcgattgggtgtcagcctctctcctattatcatcttttacaccttctcctctgctttctatgctccaagaactaagtcttttgtctgttccttgaacatgcctagctcattcctgt

SEQ ID NO: 171520 - DNA, 406 bp, Homo sapiens
ctcccctaagaagctctgtagtaaacatttgaaattttcctgcctttttaacgtgtagattttttcatagctctggtgtcactttgacaaaatttgaatatcagttgtatcactaaggtattgctcacctctaaactcacgtaatatgcctgaacatatttttttacttagtttactatggtgggtataagattgaatatatggtagtttgtttttactccctcttatagaatttactttctgaaatactagcagactttaaaataagatgttcttatatcgtatttactgattctccattaaactcttaatccttagctatccaatatgtacatatctaaaagaaatatataaatttattgtaaattggtttatatgttaaaatcacagattatttatataatgg

SEQ ID NO: 171521 - DNA, 641 bp, Homo sapiens
ttattcctgagagacacagataacaagggcaattgaaaccatttgcaagatcttccacagacctccaccaaaggctcacaatatgcgaacatgggactgaagagagccctcctctgtggtgcagtgctggaggaagggagcagcttctacaatgggaaaaatacgaagccccaaccagatccttctcttctagggaacaaaaactggaagggactagtggaggaacagcaagcccagttacccgcaaggcacaagtgaatgcgggggagtgaaagaaaaaaaaactctaccactgtaggggaaggaaacagtgttggacccagggtcttataccaaagacattagagatcttactaatgtctctaataccactgaggcaagagcagagaaactcttttccagataacaccgacaaagataaaaattgcagtctggcctagaggagcaagattactgatagagtcccactcatgaggccaaggcacataagccaaacgctgagaactgatcaggaaaattcagaaacaccttcccacatgccaactaccaatctaagcacaaagtaacacgagagaaatttgaagccaatggcgcacttaaggtaccctctgcaacaacaaaacagaaactcagcttaactc

SEQ ID NO: 171522 - DNA, 390 bp, Homo sapiens
gcagtgagctgagattgcgccacttcactccagcctcagtggcagagtgaaactccatctcaaaaaaaaaaaatggatctcttatccgtctgtgagataagagatcctggccgggcgcggtggctcatgcctgtaatcccagcgctttgggaggccaaggcgggcagatcacgaggtcaggagatcgagaccatcctggctaacacggtgaaaccccatctctactaaaaatacaaaaaattagccgggcatggtggtgggcgcctgtggttccagctactcgggaggctaaggcaggagaatggcgtgaacccgggaggcggagcttgcagtgagccgagatcacgccactgcactccagcctgggcaacagaacaagattccgtctca

SEQ ID NO: 171523 - DNA, 691 bp, Homo sapiens
aagtccacagcagcgcagcagccaggggtcattagccagtccatcttgcaaagtcatcagtctcaaagactggttcttaaacaagtgagcccagcccttttcccggcactaaacttctagctgatgaagagctcctggccattgggtacagggatccccgcaaggctcaggcgacgctctgatgccagaatactgagaggggaattcaaaatgaacacctaaccagaaccatcctgcccatggactctttcagccacagtcacaattgatgactagttctaagaagaaatggctcttgaactgttccggggagtggaggatgagacgacttttgagttcttaagtggggcttgaatgttacttttggagcaaaagtagtccaggaggtacctctcaaaaaatggctggagctagatactccctgctttgcaaactgcaacacgccctggctgacgagtccagtctgctcatatacagctctttcttatctaacattttacctaacaattttcttttccacatttgcaaggatggctccctttttacttgttgacaggggttgtgcaggctggagagttggtgtcttagctgcccattaaccttgttggaaaacacactcacttcacttgtatcaaagagttgctggaataactgatgaaagaatgcaagaaataaatagttattcatagga

SEQ ID NO: 171524 - DNA, 305 bp, Homo sapiens
cctcatcttgaatacttccaagacaggaaaatactgcctttcatggtggctatgtcatgactggatgatagaaagttgtttccagtggaaatctgtgcttctgcaatttctacacttttatttaggttctgcctttcgaagtcatacaaaataaatttactctttctattccatataatagtactttatatatttgacaagttttctgaggtcccctttctttttattagcttccagcctcttagcatttttgacattcctatctatgatgcttaacgcttctaagtgtgtgtgtgtgtgtgtgt

SEQ ID NO: 171525 - DNA, 132 bp, Homo sapiens
ctaactgagcataattgcgctccaaatgtactattccagtgcagcaatcctgtctgtagcaatagggaccagtcacacagcctgaatacaaaaagatagggggctcactaacaaggttgcctattctggtca

SEQ ID NO: 171526 - DNA, 390 bp, Homo sapiens
tcctagccagtgttttgacctcaaagacatcaaaaactgtcctatcgactgctgtcatttggctcaggagcccaaggtcactgtttgtttggatgttgtgtaatcatgagagtaaagtcatcatcagtatcatgtaattaatatattatttaagcagtcatttcaaggggaataatttgatgtggaaagataaaaataactctggttcttccattaattcattaattcattcagcgtaccaagtacttggctcactgccaggcactggcatgcagagacctgtgcattttattcagcatcctaagatgtttcagaaaccaattgtttttcctgaaaatcagattatatttcccaactcttactcctttctctgagcctcaatgttcctaa

SEQ ID NO: 171527 - DNA, 430 bp, Homo sapiens
ccagtctctaggtctaaggaatggctctgagcttactgttccacctgtacctgtatgatcagcgccgtcaaatgaaggaactcaggagccctcttcaccacctccttcctccagccttaccttaggggactgcttgaagactagcgagcattccctttccgtgacatcacgtgcctccacccctcaactccagtggctggaacaggaggctaagcatctcttgggcagctagtatttaaagctctttgctcatttctatatgtgtgtcttctccccagagaaaaagatggcaaatcatcatggaagagggatgagagattgaagaactagagttaaaattggggtttggagagggttacagcttaaggaaacttgagaaacgacctcttagaatagaatcctaggattgactaaaaagcatttgcccaga

SEQ ID NO: 171528 - DNA, 301 bp, Homo sapiens
gacagagcagagtggtgctggtggcaaggagaacagagggagaagcacagcagggaggacacctggggatctggagtgctagagagtggggatgagggtataacagggaagagagaatgtaacagggagagcagaggaggcgctgagatgggagaagaggcggaaatatttgtgttaggggaaactgaagaatggagagaccaatatgagagaaacagaattgtttattttaggtacgcactggctcagtggattcatatccaaaaagctgagcactgaacaaagacagagcagggttttt

SEQ ID NO: 171529 - DNA, 346 bp, Homo sapiens
actccaggatcttcccctccatacatgcatcagcttctctccttcctcacataggacagcctggccctgtccagcccaggggcttccagccctattccagctcactcagccaagaaagggctcatcagaaaccagagatgttagaaggcagagggcagtataaatgataaccaacatttttttggtcacctttacaaattgctgctcctgtgtgcagccttatggcttctcgtggcccatcacacacagaagtgtcacagataacacttcatgtcagtatcacacaaactgacctgtcttccctgtgagtctcttctctaagcaggtcacctgcagaggtggggca

SEQ ID NO: 171530 - DNA, 437 bp, Homo sapiens
  misc_feature (430)..(432): n is a, c, g, or t
cagccttgacttcctgggctcaggcgattttcccatctcagtcttccaagtagctgggactacaggcacttgccaccgtccccggctaatatttttatttttttgtagagatagagtcttgctacattgcctaggctagtctcaaactgctggactcaagccatcctcccacctcaggagttctgggatcacaggcatgagccaccatacctagcctagaactgtcactttcttatgcctctttgctttctctttacttccattatgggaacatcattctccataaagaaataaggtttttttcccttcataagtattactgcctacagaagcgataagcagagaacagagctgcagggagggcagatgttaggttttccgctggggtctgttctgttagtgccctgcttaaaatgctccaaaacatccnnnaaccc

SEQ ID NO: 171531 - DNA, 394 bp, Homo sapiens
ttaggagagtggagagagcaggcagaggtcagagtacacatggtgaaaaaagagaaaagctgctcagcctcatgggtgtgcctgttggggtggagctcttgcaggtgtcaagactgatggttggaacaactgaatgatgagagtgggaggagaagggcagaaatacacagaaaaaccctatgttgtggttctgggcttcctggcaccttcagagctgtgtggctggggaagagagcctggaaaaacaccatcgtggccatccctctgtctccaggcaggaggtcttaaaaccattttatatttcactcatttgtttaattctctcctaaaatgctccacagcttctctagggttcccctcaccaccctgacaaataaataaatcattaagttga

SEQ ID NO: 171532 - DNA, 527 bp, Homo sapiens
attacacaagtccagttatacactttatttttcaatgtacaattattttttactacagatcgttttgtgattgtaatatatcaaagtataattcatatgtttctgagtcctgaatgaatacttaaaaaaaatgtttcatatttgtctttgaacatgtagtgtcttgtcctgcaaacacatacggacttttcatttttatttacatgaagttaaatatataaatgtattgctctaaaaataaaccgttaggtgtaagaaaattacagagcaagcaatagtgtttgtgtgagagtttgtacctattttccaaagaaaagatcaatattggaacaaagaagattcttttataaggtggataatttactagaaatctagaaacctaaaacattgtgaaatcaaatctatatttctttggatttaattactgtaaaatctaattgttgagactctccccatgtaaattgttttcatttgttactcatattacagctataatttacttgtttcttcttttgtttttactttat

SEQ ID NO: 171533 - DNA, 230 bp, Homo sapiens
gcggtcgaccagacaaccagtgtgccaggtgccacggaaatagtgccatcctcagagctgtctccccccgggtttaggcacttagtccccaaatcacaaactcctagaactggaagagccctattagaaatccggaccagcccattgccctttctctctaaggcagtgactctcagcttgggaggagatgatgacagtcttggacagggttagagcagggtagctagagg

SEQ ID NO: 171534 - DNA, 327 bp, Homo sapiens
agtaaacaggccattccagcacagtaagtattgtgataaaagatgtacagagggctgagaaagctcctaaggtcaggaaaagggtattacagtgcctttagaaactactggaagctcagtgtggctgaagcacggaagtcaagaggaatagagtgggaaaagaaggggctggaggtctaaaggctgcagtgggccatatcaccaagagccttgtgcagtatgtgcagaagtacaaacacagagggcagtgggaaactaactaatgctttaatccaggttgtgacatgatataatgacctggtggctttatggagaataataggttac

SEQ ID NO: 171535 - DNA, 485 bp, Homo sapiens
tgtgattggaacagttctccagaggaggagtattcttcccagaaggaatgaaggtcctgtggaggcccaaggagcagatccggccaccttatcctgtgtgaggagctctggaatgcattgctgctttccaggatagctcccaagcagggagaatccccttccactgcccaatcatggacagcatacagaatgactgcaacagctgggcacatcaaaggatactgtgtagttgtccatgacctcatatggctataggtattttataaacaacatgggaagatggctgctgagggggaaggaatcttttctgatgtgcacagttcatgtttctttgcttggcatagccaaacaccagtggatggtatcatctgtgctgtgaacagattctgattttgaactccatgctcttctagagaggaacagtccaaggaccacagtctggcctggcttttcttggtgcatggggcttcctgcacatacatgct

SEQ ID NO: 171536 - DNA, 413 bp, Homo sapiens
agaggagtcaaatggctttgaaatataattggaggtatagtctttaggacatggttataaataggatgtgtgggtatgaggaataatcaaagatgatttctaagtttccagcttcagcaactgaatggattgaatacctatctctcaagagttagggttactgtgaggaattcagactataatatttatacatcacccagcaccagggccagtacattaggtgagtggctataaacaggaggcttcctcaccattactgcattactcttcccccaagaaaccctcacacagagcaggtttaatgacttctctgtcctcatttttcactcacctccatcacacagaatccaggactattctcttcacttttttcccacacagtttgcctactcaaatactcaggggaaaaaaaa

SEQ ID NO: 171537 - DNA, 452 bp, Homo sapiens
caaggcccccaaggtccactcctgctagatctggtgtggaaatagaggagggagtgaaaatctggggggggctgaccatgtcagccacaccaagctaggggagcctcagccacgtccacaccaccttctgtggccactcctggagacatggattaaaggttgatgcaggtgtgtctgtgttagaaggcgtttcaagatgtgactttagctgtaagaggcaggatatgtaagtccttgcatcccctttagaaagccgggttgtgactcctactgcctcaggggtgccttggccctcctggtcttgcccaggctgggatcttcctggatgcagctttcacatcatagatagtctgcatacacaagaccatttgcaaaggacatactgaagattaagtcatatattctatcgagaccatcctggctaacgtggtgaaaccctgtctctactaaaa

SEQ ID NO: 171538 - DNA, 341 bp, Homo sapiens
ggtcaggctggtctcaaactcctgaccttgtgatctgccctcctcggcctcccaaagtgctgggattacagacgtgagccaccgcacctgaccttagtttttttctgacgtggtcctcttcttttatctctaagacttatgattgctaagacaacaaaagataccatcgttactggccaaccttggaatttggtcttgggaaatggaggcctgtagtttgtaacccataagaagagactgaaggggcctaagtgcagatgagaatccctggtgatagaacagacaagaactggagatcaatgccaatagtttgtgatgaacgtcttggggttcctgtgtga

SEQ ID NO: 171539 - DNA, 320 bp, Homo sapiens
agtttcaaaggacatggagtaaatatcttggcaataggaaaaaggttaaaggctttggtgagagactggatgggggcagagcatgaggaatggatgtgaagcaggtgccatcaactgagagcgaatacagaagatgcaggtacatcaggacaaggagatgcagaaaggaagagccagcaccaaacacagtacctgcaatgtaagttttcaaccaatgctgcaagaattaatgagaaagaggcaaaagtatgtttcctcctccttactatctcataatcccatgtagtttaataaatataagtactagccaggtatcttcc

SEQ ID NO: 171540 - DNA, 241 bp, Homo sapiens
gagtgtgtatgtgtgtatttgtgactgtgtattagtgtgtgtgaatgtgtgtatgaatatgtgtgaatgtacatatgtgaatatacatgtatgggtgaattcatatgtgtatgaatgtgtgtgtgtgaatgtgtgtgttcatgtgtatgtgtctatgaatatgtgtgtggttgtggatgtgtgaatgcatgtgtttgagcgtgtggatgtgtgtgtgaatgcatgtgtgtatgagtgtgtg

SEQ ID NO: 171541 - DNA, 757 bp, Homo sapiens
acagacccgccccggcagcccggcccaccccaaatcatgtgtgtgtgctggggggtgggggctagtggggcagaggataagcaggctggaagagccgactcctacggctgcgatccaagaggtgcctgcaacagttgccccccgacttctgtcgcccccatggaggcaaacaagtctggaacagggaatgggggtctgggagagaagatgaaaagactgaggatcagagaggtgagcagtagctttcccaaaggcccagagccaagaagcgttgaagcttaaaagcacgccgcggcagggaagatcaagcaagccctgcgcctatctgcagcttgatctctctgtactgagccatggagctccttcttggaggcgtgaaatgctccccatccttcaggagacaacagcaacagccagccactccttgtccagtcagcaatgctggaatacctctgcagctcacagtccaacgcccacagccttcgagtcagtttcttgatattcggcaatgcactggactcctgatcccatcagctcctggctgaaggtgggccaacccttccccatttccttcaattcaaacatttcctcatgtccctcagtgccaagccctgtgctgggagctgaggacccagaggtgagctagatctaaaatctgacctcaaggagctaacagtctgagaggaagactggagtggataaaaataccttggtaatttatcacttaataaatatccaataaatgctattatgtgcc

SEQ ID NO: 171542 - DNA, 216 bp, Homo sapiens
aaaaagagctcacaattctgtcctccctggaagctacaattcaatcatcctcttccaaacgtccaaatcccagcttcagtgaggctatctcacacagcaacctgcctgggagtgacctgcatgcaaaacttcaagagtttgagggaaacttgagggaaacttgcagaaaccagcttgccaaggaaaaacgctcccagtgcgttcaatgaaaaagca

SEQ ID NO: 171543 - DNA, 496 bp, Homo sapiens
tgagccaccacgcccagccataaacctacttctcttaacccaataacctcatatcagctgttgtactatagtagctctcttgttatttgaggggatggggggagtgtagccagcgcagcccacctgagggtaattgttctctactttttaacctactttttcatacttcctaaatgcagcctctggtttttaacccattatgtacatctttcatgatctcatcagtcaatccagaatttgaaatatttactattgagtttcttactttactgcaaaatttagcatttgtttttgtgccttattttatttttcaaattttacttcagccaacactattgatcctttctcttctaactcagttatagtcaaaccactaactgattaaggggaaaaaacagaagcttgattgtgatgtttcattttgcaaattaactaaaacctaagaaaatcctgggtatcccttgaaattacagtaaaatcttagtaaagatcttcg

SEQ ID NO: 171544 - DNA, 580 bp, Homo sapiens
gatccctatgggtcctcctagccctaaacatctcgagtacaagtatcagaacccgtactgcatgggtacaatgaaggtgttacgatgagcaccttttaaaattttgttttatttggtgttcagtttttataacaattttcttctgatgtaataggtgagataaggttttacaactagattcctcagtaggagtatttcctatatatcaatgaaaagaatggagaggggaaataaaacagctatggtgcccaacaagaacactacatggccaaaagcattccacagcgagcgcgcgctacgataggagagaatcattggaaaggaaactagatttccaccattttattctttttcctttcttatcctctcctacagagaaaagcccagttttaatcttcacttaatccccaaagagatagcaaaagccacagcaatccttacacatttttttttgttataaagaaatggacaaaatattgacaaggcactgtttttccacacatatcaccaatcttatttagcactgtggatgccgttttgcaaatgtcacccaccatcagccctcgctccgctgcggccg

SEQ ID NO: 171545 - DNA, 480 bp, Homo sapiens
tattaaaaggaaacaccttgggcttctaatgaagacaccagaagggccacccaccaggagctagggcaacactcctgtggggaggacagaacggaagccgtcatcactccaaaacaaaaccctggtagggtctcactgggctgctgttacgctggaccctgccaaaagaaaacacagccctgtgaagaaacatcagcaccagcttctaccatctgtcatttacaacgtccagcatccatttaaaaatgacaggctgggcgtggtggctcatgcctgcaatcccagcactttgggaggccgaggcaggtggatcatctgaggtcaggagttcgagaccagcctggccaacatggcgaaacccgtctccactaaaaatacaaaaattagcgaggcgtggtggcgtgcatctgtaatcccagctacttgggaggctgaggcaggagaatcacttgaacctgggaggcagaggttgcagtaagc

SEQ ID NO: 171546 - DNA, 267 bp, Homo sapiens
cggcacgagggctacctctcctgccgggctctggggtcaggcttccctcccccaactcccgccagatgccactctgtaaaccctgaagctgtgctcccacgctgcactgcaccgcgcacatgaattccccgaggaatttcttaatgcgctgattcagattcaaccgtgggggtggcccgagaccctgcatttctaatcagctccaaggaatgcgagaccacgctttgagtagtagcatctaaaacatgatataaatgtaggtcatga

SEQ ID NO: 171547 - DNA, 665 bp, Homo sapiens
tatgtgtgtagagctgatttagtattcccttagtatctttttcatgtctgcagggtctttaatggtgtctcctatttaattcctggtattggtaatttgtgttgtttttttttcttggtcagtcttgctagagttttgtcaattgcattgacttttacaaagagtcagcttattgtttcactgattttctctgttgtttttctgtttcctgttcattttttcccactcatatgtttattattttcttccttctgcttgctttgggtttgtttgggtctccttttgctagcttcttgaggtaggaacttagaatttgatttgagattgttcttcttttctaatatatgctataaatttcatgaacacttgaaaagaatgtgaattctgctgtagtacagtggaggaaggttctacaactatcactttgatcttgttgattgggtatattactgagttctgtatccttgctgattttcctgtcctattctatcaattgtggagaaaggtttgttaaagttgtattcagttataagtgtggatttatgtcttctttcttcagttctatccatttttgcttcatgtattttgctcctctgttgtttggtacacgtttagaataactatgtcttcttggtggagtcctctcttacattatgtaatgttct

SEQ ID NO: 171548 - DNA, 390 bp, Homo sapiens
gctggcgtcgcggtggtccacgtgggcatctctgttggtcagcgtttccatgccttggtagcaggctccaagcccttccctgccctgtgtgtttggcatcttgggttggccgccataccgtatcacctctgtcataggcagtgtagtctttgggtctctggaggactttaaacgcttccttagttgaacctcagagtcagtttggcctctcccttgcccagggaggaaaccccctctttccagccttccagccaatgaacagatggtcagtctcgcaatgtgggcagaatggagacaggaaattccacctccgtgccctagcaccagcagtgtaaggagtgtccaccgtgagccagatgctgggggagagtcaccagggctgacaggcca

SEQ ID NO: 171549 - DNA, 677 bp, Homo sapiens
ttgccaagatcagacagcttggttagataataatgccacacaagaaatcaaatctgttatttacagcccagtggttgtttgcttcttcacagcccacccttcctcctttgaagtgtacgacacacctagatttcttcttggagtgatatagtggaattcctcaaattcttctcataactttaaaagaatgtggtatttgtattagtctgctcaggctgccatgacagaataccatagactgggtagctgaaacaacagaaatgtattttcttacagttctggaagctggaagtccaaaatcaaggtgccagcaaggttggcttctggtgaggcctctctccctggcttgtagacagcaaccttttcactgtgtcttcacatgatctttcctgtatgtgtgcagactcctggtgtctcttcctctttttataagggcaccagtcctattggattacggccacatctttatgaccttatttaccttaattacctccttaaaggccctatctccaaatatagtcaatcatattggagttatagctttatcatatgaattcaatccataacagtattcatcttcaggtccttaaaacacttcttaaatcatttggtgtttttttttaatttaaagaaatatccaggtagagaagattataaataagtttccttatgcttat

SEQ ID NO: 171550 - DNA, 329 bp, Homo sapiens
aagtctcacctaccagactccaccctgtcaccacaggaaaccaaaatatcaggctatggctggaacccaagtgctgaaacacttccgaaagcaaggggtctgttgtctctgaatgttgggtgataacaaccccatccccgccttgccatcaatagatttgtttgaagtccttccaatcaaaatccacccttccagtgcttaccaacctgtccttcctaatccttaaaagctgccccaaaccccatattggggagacagatttgagctggactcctgtcttcttgtttgtcgacttgcaataaaggtttgcttttctcaaaaacctggtg

SEQ ID NO: 171551 - DNA, 432 bp, Homo sapiens
taggcgtgacctatgggaagctcacattcctgactcttttggcatatgccttccagagacagcagtcacatcaactggaaaagaagacaacactctaaaaacaacatctatgaaagaatgcctctgaaactgtgtccacttctccccttcacccctgctcctggctcagaaactatcaacagtcagctttgtctgccagtcaagctcccatccatagatgggcactgagcccgccccacacattggcctggtcgcctctttccttgttttccctggcatgagtttcctagggctgctgcaggaaacaccacagctgcatggcttaaagcaacacgaatgtgctctctcacacttctggatgacagaagcctgaagccaaggtgccagcaggccacactccctctgaaagtctaggagactcctcctttgagt

SEQ ID NO: 171552 - DNA, 305 bp, Homo sapiens
agtaacatcagcaccacctgggaacatagaaatgcagattttcagccccactccagacctactgaatctgaaactctggtggggcctagagtctgtgttttaaaaccatctaggtgactctgatgcaccccgaagcttgagaaccactgtctacaagtacatttcatgactcaatcgctggttaaggctgctgacctcggcctttgtagttgatgagtcattaacattgaggccttaactttcctggccatctgctttccttggtgatatttattcaaaacaggtgacatttattcaaaaactat

SEQ ID NO: 171553 - DNA, 642 bp, Homo sapiens
cgaatcctggctccattactttcttacagtgtggtttggggcaagttacctaccttatccaagcctgtttgttcatctgtaaggtagggtgatagcaccttgcagaattacaggattagagataatacccataacatacctcacattgggcctggaaagtacccagtgtgtgctatcttcatctcttcacctctaatccttagtgcagtgctgtgctcagtaggtacactataaatactggttcagcaggttagggaacaaattactccccatgcccaggtagttttcattttaaaagcagaactaatgaggcccaggtctaacccaaagaaaaaggcctaacaatgggatctgagaccctgtgtaggacgggagtacagtgagaagcttggggcatgtgtgttggatctccttagtagaagcccacatcctgcccatgcagggtgaaaatgacccacagttgtcctgatcctgaagcccctccttggttcccatgaggagagcaggaaatggaagggaaacaaggttgacagctcctgggccctctggacttcctgccatcccaatgcccatggctccctgagctgggccccaggaataggtaaggacagagaggcaacagcaacaatgaatcatgttgga

SEQ ID NO: 171554 - DNA, 477 bp, Homo sapiens
tcaagtgttattttgctagaaatctgaacagcagattcattaagctatcactataagcagaaccttttctacggttcagtccaagagacttctcagagcccaaatatcgtttatatccccttcctgggcatctgtgccatgaagaaggtataaggggagaggaactcacatttcctaagcacttaccatgtgccaaatcctctaaatacactgaatcctcacaataagactgtgagagggggattttttaaaaacccattttacagatgaagaaatgggctcataaaggttcaggatcccccaaccaagtgtcagagcaaagatgagattccagacctttctgactcccaaccattggctggggctgaaatgcttccgttgccagaagggagcattccccctgaccgcccagttcaccacgctcctaccacagcccactgcactctccctggttcacatcacccaagtacattccca

SEQ ID NO: 171555 - DNA, 231 bp, Homo sapiens
ctgatttgcattattgatttggataatgaagaacagatgaaacttggtgctaatatacatacattttatacttttattcatgttcagcaaatctagcatatgcagatattcagcacatgctaattcggttgctggggtccataatattccaatctaggggttggtaaactatggcccatcggccaaatctgatctgtcatctgtttttgcatggcatgcaaactaagcatg

SEQ ID NO: 171556 - DNA, 143 bp, Homo sapiens
gtgtttcttactatgacaatctagtacacagatgaaacaatttttaaagggctactatttatttaaagtacactacagaacactgaactacacaaaaggttattacatttcatgtaatactcctatgattttccaccatgctt

SEQ ID NO: 171557 - DNA, 772 bp, Homo sapiens
  misc_feature (111)..(111): n is a, c, g, or t
  misc_feature (130)..(130): n is a, c, g, or t
atgtgtacaattctggccaacggcggaagctatgctgttcaagaccttctctcggaaagtggtggtggtgtccctaatgaggaagatggaagaagaggctggagtgagganggaagtagagggagatgangtgcctgaatctataatgctggagatgaaagccaacttctctttgcctgaaaaatgcgactatatggatgaggtgacatatggggagctggagaaggaggaagctcagcccattgtcactaagtacaaggaggaggcaaggaagcttctgcccccctccgagaagcggacaaatcgccgaaacaaccgaaacaagcgtaaccggcagaaccgaagccggggccaaggctatgtgggcgggcagcgccgaggctacgacaaccgggcctacgggcagcagtactgggggcagcctggaaacagagggggttaccgtaatttctatgatcgatacaggggagactatgatcgattttacgggcgagattatgagtacaacagatacagagactattacagacaatacaatcgggattggcagagttactactaccaccacccccaggacagagaccgatactacaggaattactacgggtaccaagggtatcggtgaagcccctgcatggtcacctgtcagccatgaagctgaatctctgggggtgcagggcacccccgaaaaacaacaaggaaacagggctgtcggagtggggctgactgcgggaagggtggtggggggaaggtgcacacaggtgcgagggga

SEQ ID NO: 171558 - DNA, 398 bp, Homo sapiens
ctgcacacagcaggcattcaataaccactcgctgtttaaccctcatcatggcaggaaaataagccgtggctgggtgctcagagcctggaatagcatgtatgggggtggggcagggagggcacagagccacgtggagccagggccctaacgagaaacaggcctcagcactgaggagaaattgattaccctgcctctcagtaccaggccttctctccagagctcctgcaagagacacagacctagggtggaggccccagcctgagcctcttcagggctatccagcccctagtccccagcatggaagctaatgagtgtatttataacccaccttgtcccaaaaagaattacaagcatttttcaaaaagggaagcaataccgtaagaggaagtaaatttaga

SEQ ID NO: 171559 - DNA, 221 bp, Homo sapiens
tatgcagttaactacttctgttatccttgaccatctcagtccggccaaaaacccaaaagtaaatgaaaaaagacttctgaaaatggaggaaattagtcttcagaaagccctttccttttttctggaactgccactatcaagtcagatcctgctgctttaggttgttaatgttaccagctaagtatctttttttcccctataacctcataacaccacacact

SEQ ID NO: 171560 - DNA, 556 bp, Homo sapiens
tataatgtatattagatattaatagaatacaagagatcaaatgttgtctactccattgatatgcactgagtaaaatacagggacaaattatttacaaagaagtggggtggcataatggatggataggtggtccaccttgataactacgcatctacgcctattgaactgagtatgaaaaactcatctcagagcagaactagaatgctcgtgcgctcgagatagtgacatcatctcgagtaggactgcccgttactaagatatatctagatacttggaggaatcctctacaatcccatgtagtatgcactcgctcagcaagtcactaggattatattttgattgcagtgaataaccatggactaatataactcattgattaattgcaatattaaatgcaatcagacaatgctgagtgtggtggcagatataaattttccaggtaacacacaagattaggcttctgcttttaggtaagatactatgcctggaggatgaaagatacacagaagtaaaagatgtggtccctgcaccaactctatgaccttatcaagacatt

SEQ ID NO: 171561 - DNA, 326 bp, Homo sapiens
tatctgacgaggtcgtctcctggttcttttctgacctgtcagttttctttactcgcgtatttttctctgtttaagttttaaatataggtacttcttagatatgacaccaaaagtataaataacaacagaaaaaatagataaactgggtatcatcaaaattttaaattattgtgtttttcttttcttttctttttttttttttttgagatggagtctcgctctgtcatccaggctggagtgcagtggcgcgatctcagcttactgcaagctccgcctccagggttcacgccattctcctgcctcagcctcccaagtagctgggacta

SEQ ID NO: 171562 - DNA, 373 bp, Homo sapiens
gcagccccacaggagcccaggttgcatactccaatgagatcacaactaagtcagggttcaaagagaataagccccactcttcaaagagtgggaggagtgagggggtctctgggggcctcacacatcattactcccagctttgtgtggtttgggaggccaatgtgaatgtatgcggggaaggtaatgaattttgagacccagagaacaagctcgtttgagcagtcttgattgatgatcctatgtagatccaacttggctttaccatgtcctggtctttggtgcagactgggttctccctgtggaacaatcgtgcattgctctgtaaagcactacctaggattgagatgctttaggcacatcttaggaatagatt

SEQ ID NO: 171563 - DNA, 695 bp, Homo sapiens
cagatcacagcaagctattccagcacaagattcctcattttaagaccagcttaaaaacaaacatagatgatggtatcccctgggcaggagaggaggcctgggattcctacccctggcacatatgtttcacaagagtttcccacacatggcagatataaccaccatctatacaaacccagagaggctctgagaagcctacaagagccagagaaccagagagtgtagagaaacttggagtagggagaggaaggggcctagcacttggagccacctctttcttttccctcaccaaaacccatcagcaatgacacctcaaccccctcctgagcagggtgaggccctgcaacatcaatgtgtctccagaccactctcctttggaagaggtaatgaaaaaggggctgatttgagtcgtccaagagttcctgatacctgactttgggaaggacgaccacgtaacctatcctgactctggatttacttgtttgctttgcgtgggttgttattggaattaatctgcatcatctaagaatacagtcattgaactgggtggggtggtatctataaatgctaagagtgacaggaccaaggaggccaagaataatattgaccattaatccacatttactgctatggaaagatggccagaatatggtactgattgagaataaggaggttctcaaaaaagcttgaaaagt

SEQ ID NO: 171564 - DNA, 670 bp, Homo sapiens
gagacagggtcttgctctgtcgctcaggctgatgagcaatggagcaatctctgctcagtgcaacctctacctcccaggcccaagagatcctcccacctcagcctctcacttacctggggctacaagtgtataccaccatgcccagctaatttttgtattttttgtggtagagatggggttttgccatgttgcccaggctggccctgaacttatgggctcaagtgatcttcccacctcatcatcccaaagtgctgggattacaggcatgagccacagcacccaacctttttacacagtattaaatgcccaaataatttacttctaatgacagagtttatttaaaaatttaaattttaaaatgctcagaggaaggtctgtctttattatgtatgacatcacctgcaattgaaagtatctctggtcttttaactttttgatagaagtggtttcttgaggctgcaggccaggacttggatgtcaacaacatgagtgttgccattcatgcagccatcagaatcaacctctgaactcatttccatggaacctgtttgcgaacttgaaaatctacgcacatgcataaggctccagaaaagcattcttgatgaatcagaataggtacagaggaagaaattttttagttgttcaaatcaaagactgaagttccatctct

SEQ ID NO: 171565 - DNA, 255 bp, Homo sapiens
cctccttaattcctttcttcttcttatacagggacttgggagtccacatgtgctagatggtgtagccacaggatggagaagagtagctgacctatactgaacatttcaatgagtgaaaaataaacctgtgctgtgttaagcttctgttccatttcagaatatttccatcgctacaggattgatctcttacctggctcatccttaccaatgaaggctcttcatattttttattctactgagatatttgtaattagt

SEQ ID NO: 171566 - DNA, 156 bp, Homo sapiens
aggctttagaaactcctctgtgtgtattaagtccctgcgaatactcttgcacacctgtccagtagacatgcccagccaagagaacatgccagcataaaagtgctgccaggcttgcctatcagtgctaccaagccatttgttttgcacttccaagaa

SEQ ID NO: 171567 - DNA, 458 bp, Homo sapiens
cacgggtagcatcctctgtgacatcctgtgaggttacagcatgtgagcatccagaccactttgtgaaattagaactaaaaccaaaaaggctggttggcccagtgacaccaatgacagtcccacatccatctacatttcaagttcctgggaggattcttttttgctgagtgtgctatagagtgagatttaatctttagagttcatctagcagcacctctgtttccacctgacatactcaatatctgtgcttaggccagagacacaaataagaggcagctagtacaaaaccctcttccccatctgccttcatcatagatgaacatcaaggcctctgccctgccatgtctggagatgatagagaagcctggtagattttaaatatttattgatttacaccctttccccagcagttgaataatgattattgacagaagcactggggacatatcagttttaca

SEQ ID NO: 171568 - DNA, 378 bp, Homo sapiens
ctgcccactgccaaagtgaccctgacctcaagtcagttcatgacactctgggcaagaccttccagtgtgtccccagctcagggagagctgagaccctgtcattcgcccctggtgccatcagaccgcgcccctccccggcttggggccctgggatgtgtgctgtgctgtggcgcatggctgatctcgtgttgtacagcagtttattgcccagtgccacctcccctgccacaccctatttaaaacacagcccccctgacctcagcacatccatcctctcttattggtatctttctctagagtgctgattttcatctaatacaccatgtacttcactcacctattacttcctttctcccccaccatgtaagtttcatggag

SEQ ID NO: 171569 - DNA, 483 bp, Homo sapiens
aaccccgtctctactaaaaatacaaaaattatctggacatggtggcaggtgcctgtaatcccagctactcgggaagctgaggcaggagtcacttgaacctgggaagtggaggttgcagtgagctgagatcctgccattgtactctagcctgggcgacagggtgagactcaaaaaaaaaaaaaaatacagtgaaccacaaaaactttagatacgataaaaagatgactttccccccaaccttattctttccttcttattgctgttgagttttaatcccagattcagatccagtggaaaggaaagtaatttctcagagcgaaggaggatgaggattccaagggaggacgaggaggagttgatgcaccaccttttctgttagaaggaggggcaggaagaacactgagaaggcagaagcaggaagcagtgctaaaaagtttagaatttgggaacttttcagatcccagattctgggcttagaaatac

SEQ ID NO: 171570 - DNA, 460 bp, Homo sapiens
ggttgactccaaccagtgggcactccatcccatggcttccaaaatcctgcagctatcctgccctatacacaaagagcccagatccaggccccacacacttgatattggggccagactcttccacctgtgaaacctcacaggttcctgcagggagtggagacacacagaacctagctcccctggagcctgcaagacttgggccaccagaatcccagtaggtccctgaaccattgtcccccagtaagtctgcagagctgtgaaatgcagacaataacccttccctgcctgaaagagcacttttctggggagcccatgggagtcaggagcaaaagcatctgtcaaacaagtagatacccagagagtcacgtgaaatcatttctatgcctctgacagacgcttcttgagcgaagtttctgccctgagcccgcctgaccccttaggctgggctcagtaccctacc

SEQ ID NO: 171571 - DNA, 399 bp, Homo sapiens
gcaacttcatatattaaggactatggcaactgtaaccttacaaaacatatttcttaaataattagagtttgaaagtcacaattacacgtttatgcatggactacagaatagatgtgttaggcatggaaacaacattattcttgtacatcttcatcagagctcttgactaacttaggtgcattgtcagtgagctgttatcttgcgagacaaatggacagttatttctgggagaacataaaatcttttacctgcattatttgtgaaaaaggaatcagtatatgaaggtagccagttgcccagacataagattttttgacgaaggcaggcaaccttctgcacttaaagagcctgccccaaacttaccatcttctttcactatagtcggtggtctgtggatct

SEQ ID NO: 171572 - DNA, 780 bp, Homo sapiens
tagccaggcatggtggcgcatgcctgtagtcttagctacttgggaggcgaaggcaggggaatcgcttgaacccaggaggcagaggttgcagtgagccaagactgcaccactgcactccagcctgagcaacagagtgagactctatctcaaaaaaaataataataataattaattaaatgaagaataaataaataatatacattgttcattcattaacattgaactcacagccaacggcactacagcactcacgcctgaatggagtttatttaatgcatgtattttctctgtaagacacatcacagacttcttggacttgtgaatgctaagcagcacttcagcactatgcttgggggttaatttaaatggcaaaacaaccaacaaacagtacaaaaacaggaaaagcatggcattaaatagaccacaaaaaggatacctgactattgtatgagagctgaaaaagaaggcagaatatcatcctgttcaaactcaaattctttgacactctgcgcaaacacatgactatgaaagtgctgtgagtactgatttgggggttacaaaaaatagtaggtgagttcacaaatacaaaagctgaaaacaaggaggatcgactgtattttcgtagacaatctaatctcagaagatttcagttcagacaaaaatcatgataattactgtattacaaaagggcactagataggggggaaagagtaaaaatcacaattaaaacaaaggttcaaaattctgcagcaaccatatccagttacactttaatatgtt

SEQ ID NO: 171573 - DNA, 480 bp, Homo sapiens
ctggattcccactctgccctcaggagaccttgagaaggggtgtgagaaatgaatactgacatgcagaccaagggccgctaggcagtgtgtatattaattattcttgaagattagtgtatttctttttttagattaagaaaatgtgaattcccaaaattgtctttctataccttattttggagttcactactataaatttaatagcaaactacacttttcaatactcagattatctttatcatgatatgttgaggtagatattaaaattaatgtctcggccaggcacgatggctcacacctgtaatcccaaagtgctgggattacaggcgtgagccactgcgcccccgcccaggagctcttttcttatgacatataaattatgacatttatattctttatatgactttatgttctcttcttatgacatttaaattctttaagtagtttgttggtccaataaactagacgttgtataatcta

SEQ ID NO: 171574 - DNA, 664 bp, Homo sapiens
ggtttcaccatgttggccaggctggtctcgaactcctgacctcaggtgatccgcccacctcggcctcccaaagtggtgggattacaggcgtaagccactgtgcccggccgcctggctagttttttgtattttttgtagagacggggtcttgctgtgttgcccgggctggtcttgaactcctgggctcaagtgatcctcttgcctgggccgcccaaagggctgggatcacaggtgtgagccactgtgcccggtccggagagtctgttaagtgtggcctcctagttgatgggcctaagccaagccctgagtccaggctgaggtctggcctgggagagttgctttggcgtcctcagctcataggtggcctttagccacctatggatccaggtgagcccacggattgggctggggcacacgtgacaaggattggccaggaagaggaagaagaatgtggaagggagaccgagcagaggctgtcagcaagggaggcactggccggagggagggggtgttccggaagcaagaggcagaggtgacggcagccaccgcgggtggaggggacctttgggctcatgtgacctctgccaggtgcttttcatgggtgtacaggtcttgacccctttgatattctcaacaacctctgagtgtcgacacagttgtaccc

SEQ ID NO: 171575 - DNA, 202 bp, Homo sapiens
aggtgaaacaacagacgcacgtctaggaatttcttcacaggtaacatcaaggacttggaaaggtgtagtcacacactacttacctctgcattgtttatagtacagaaaaacagaaagtaactgaaatgtccagcattagaagattcatcaaacaaattctggtttgttcattcagtgaaacgccacgtggcgtctgtgaagg

SEQ ID NO: 171576 - DNA, 173 bp, Homo sapiens
tatatattctagatattaaacccatacagctatatgatttgcaaatatttgctttcatttttctgggttatttttactctgttgatacacaaaagtttttaattttgatggagtccaatttatcttttttttccttttgttgcctgtgctttttgtgttagtctaaggaatca

SEQ ID NO: 171577 - DNA, 596 bp, Homo sapiens
taaactctttgcttggtttctccctatttggtctagagtggagtgagtttgtgtgtgtatctgtgaatgtactcatccttttttgtaaaaatggaagtggatagaaaatgaaatagagaattctttcccaatttatttctacttctctccttcattttctatgttgaactaagaaaaaaacattgtaatgccatcacatatgtatatatgtatttttcctgtgtcttcttttaaaaaatatttaagatctacagagatagacgtaaaaacaattttaaaacatcaggaaatgggagtaaaatgaaaatcatcacgaaaaaaggcaacgtagaaagtagttaagagctaagattccaggactttgttccaacctggctcccttcttttctcagctacacaactttgggcaaataattttgtgcataaaacaaagtttgtgttaagtacttatttgtggcattttccactcgtggcatcatatcagcactcaataagtttcagattttggagcattttgaattatggattttcagatggggatgctcagcctgtagctatatgaagtaggtaatgattttatcaccattttgcaaaca

SEQ ID NO: 171578 - DNA, 205 bp, Homo sapiens
ctctttaagggatgtcatggggagaggggagggtgaagaaaatcaccagtaaaactattgatcatttttgtctcgggttaacacccctctctgcgggcctcacacttgcgtgttgtctccactctggctttgcagaagtgcggagctcctgtcctgcaggtattgtggtcgtcagacccttctggagatgtcgagtgggccaggg

SEQ ID NO: 171579 - DNA, 574 bp, Homo sapiens
tactatatgccaattgtgatgctcaatttcacttgtcaaaatcttgaactaacctaaaaatagatatagccaaactaacacaaacaaacaatgagctgataagacagtgtagaacagtgatcacaaaaaggggagaaattaggtgagtactatgactgtcccagcttactgctttctgcttggagaacttacaggataaagtgtagggagagagaacttgaacagagcctagtagtctccctgagttgagaagacagttgaaaattctggaagaccaaaacaactaaaatttgcaaggcagagcactgaagagaagaaaggcgcatggagacaagaactgcacagaaagagactaaacatattgccttccagtcttcaggtgaatacttatcaatagatggatataagtcaactacccaaggccagggaaacaaccatcttgtgttagtccatttgcattgctataaagaaatacctgagggtgggtaatttataaagaaaagaggtttatttggccacagttctgcaagctacacaagcatggcgccagcatctgcttcttgtgagggcttca

SEQ ID NO: 171580 - DNA, 333 bp, Homo sapiens
ttcgattatgtttatttatttagatacagggtttcactctgttgccctggctggagttcagtggtgattatggctccctaaagcctttatcttctgggctcaagcattcctcccacctcagcctcccaagtaggtaggactgcagctgtgtacaaccacatctgactgtttttaaatttttttctttcttcttcttcttctttttttttttttatttatctgggtaaagaggagttttgctatgttgcccaggctggtctcaaactcttggactcaagtgatcctcccacctcggcctcccaaagatctgggattataagcatgagccaccac

SEQ ID NO: 171581 - DNA, 913 bp, Homo sapiens
atgtcgtagcgcatggcccagaatggaacctgaaaatgccaagatgaaaatgcccacgttcagcactccaggagccaaaggggaaggtccagatgttcatatgactctacccaaaggagatatcagtatttcagggcccaaggtcaatgtggaagccccagatgtcaacttggagggtctggggggaaaacttaaaggccccgatgttaagctgcctgatatgagtgtcaagacaccaaagatctccatgcctgatgtagatttgcacgtgaaaggtacaaaggtgaagggagagtatgatgtaactgtaccaaagctggaaggagaactcaaaggcccaaaagtggacattgatgccccagatgtggatgttcatggcccagactggcacttgaagatgcccaagatgaaaatgcccaaattcagtgtgccagggttcaaagcagagggcccagaagtggatgtgaacctgcccaaggctgatgtggacatttccgggcccaagatagatgttactgctcctgatgtgagcattgaggaaccagaagggaaattgaaagggcccaagtttaagatgcctgagatgaacatcaaagtccccaagatctccatgcctgatgtggacttacatctgaaaggccctaacgtaaagggagaatatgatgtcacaatgccaaaggttgaaagtgagattaaagttcctgatgttgaacttaaaagtgccaaaatggacattgatgtcccagatgtggaggttcaaggcccagactggcacctgaagatgcccaagatgaaaatgcccaagttcagcatgcctggcttcaaagcagagggcccagaagtggatgtgaacctgcccaaggctgatgtggacatctcaggacccaaggtgggtgttgaagttccagatgtg

SEQ ID NO: 171582 - DNA, 429 bp, Homo sapiens
aaggctgataccaatgataggaagcactggcttccgaagcgtttccagcatccccaaacagctccttaaacccaatcctatgttgcaattcccaaaactgtgtctccaacctagacttctgaatcaccaatgcttgacccccgaccacacctaggtgtcccagcaactcaaactaaacatgatcaaagctacattcatcttctaaaactactccttggtctcagtgatgccatcacctttagtcgcttatgttagaaatttgagaattgtcaacaattctcttcttttacatcttcaaatccaacccatcaccaagaccaggattccccttgtgaagtgcggctcctaccttccagttctcatccccactcccatcatcgggcccaaacccccatcctctctctctcatggacactgcagcagcctccc

SEQ ID NO: 171583 - DNA, 386 bp, Homo sapiens
ctgagaccgggtcttgctgtcccccaggctggactgcagtggaacgttcatggctcactgcagcctcaagctcatcgcacccggctgactaaaacaaaaaacaaaaaacaaaaaaaaatttttttttgtttaatttgtagagatggtgtctccttgtgttgtcctggctggtctcaaacttctggcctccaacaatcctcttgccttggcccgcaaatgctgggattataggcgtaagccactgtgcccagccacatgtagcatttcttcatacacctatctataggtttgtagccctaaacaatatactattattttttgcatgttttcaaatgttatataaataatatcatactctacaaggactatgtatgttgtttctatac

SEQ ID NO: 171584 - DNA, 257 bp, Homo sapiens
catacctcagtccttaatggggtaggccacacgtgtggtgcagctcaagtctgtacagcacgactttaggctggaaagagctctctcccaggcacccaggtatgcattcattctaccgagagagaagcatcctgacacacagccctgtccttacctctaagcatcctttggagtgccataacctgggaaagattcttactgatttcttttttgtttgttttttgaggtagggtctcactctattgcccaggctgtag

SEQ ID NO: 171585 - DNA, 533 bp, Homo sapiens
agataagaaagtttaatcactaagcaaactgcaaagcactgaaagcactgcttcttaccctaaatgaagcccactctgctgtgggaacaaattaatatatattatgtatggaaacccaatccccacaaagtcctcaagaattaagcatcaggaactattaaccatatgttagttatcctgacagactgttccatgggcctggtctgagggagtttgggacagaaataagtgcaagaaaacatttgtctatgaccccagatcaagtccccgatcttgctcggttctatccaaataagcgattttcatcaaaatgatgcttctcttttccttctgtgcttgcctcccagtgaacactctagggtcacggaaatgactccagactctcttacaattggcaataagacaagttaaattacatgagtgtctcaatccctttctgtaaacagggaagaaacagtaccaatatcatgaagtttcaagtatcaaatggagcatgcaatgtgtttatcacagtatctggtatacagcaatgg

SEQ ID NO: 171586 - DNA, 240 bp, Homo sapiens
cgaactcctgggctcaagccatcctcccacctcagcctcccaggtagctgggactacaggcatgagccacaggcctggtttatatctttaaggtaaggttagatctaaattgagcctttacttgaagtcagactgatctgcatcagcaccatatgttatgtttacttttttttttctttcaatgaaaatgggcctgaggagattggtttgtatacggtacataaactggcatttaagatg

SEQ ID NO: 171587 - DNA, 423 bp, Homo sapiens
  misc_feature (157)..(157): n is a, c, g, or t
cccctgcacacgccgagtgtccacacccagctacagatactagctttagaagatgaatgggaaaagttagtttggatcatgttgtagattgttttaatatttgagggatagtttttaagtttggtgactcggcgtgtgcacaacaacttcgtccacnagatctgacttgaagaagtgtatggtcattcggcgtgtgcatgcacacgccgagtatccaaacgccgcatatcctggtggacgaagttgttgcgcaacaacttcgtccactgtgatttcctgttctgtttggtctggtcactcggcgtgtgcagcaacaacttcgtccacactgatctgcaacaacttcgtccattacgatctgatttcaagaagtatatggagactcggcgtgtgcagtgtggccctcgcgtgtgcggtccggct

SEQ ID NO: 171588 - DNA, 512 bp, Homo sapiens
cattaacacccctaaacatctttgcagaaaattcaaaaacatggccttccggaaatatttgctgctagacaaatgtaaaagccctaaagtgcctataccaaggggaaatgagaacagtcaacatcctcatgtccctccagaaagtgtcatcagcttcaggcccacgggcacccagctacctgcaagccaccttcgcaccaagctgcgggctctgaaatgcactcagcggaagatgaccctgagtcctgtgcagcaagacagcagttaactttatccccagaacttcctgcatgaaactagctaagataaagagccaactcgagtcctcagaacacactgtgagggcaccaggctgtgtagaccacccactcggtgccaacttcacccccacttccgttgaggcaggcatgtttattggaagtgtaacacgtttttggttgggggacattgagtgcttttgagtgattttcattagagtataaggtatcttgattaaagcatttagttaaaat

SEQ ID NO: 171589 - DNA, 193 bp, Homo sapiens
tgactcctctccccacaccctgcctccaaacgcatcagcaaattctgtgtgtgctgcccgcaagacatagcagcacccttaccatatgcaccaccaccaccacctccggcttcttgccaacatcctgttccaagcctccataatctctcacttggatagttacaatagcctcttttttttttttttttttttt

SEQ ID NO: 171590 - DNA, 431 bp, Homo sapiens
gcgagccggtaccccgaagtgcccaaatgtaaagcttcttcaaaagaataactcatatattttgacactcaccatgttgctagcctgaatgcgtggaagacaaaaacacacaaatcaagtctcttacatttctggaggcacaatatttaacatctgctctgagtttaaatgttaattaaataaagactaatctcctctcacatatctacagtaatctatcacttgcccacacataccaactatctggaaagctacagggtgaaaaaagccagtaaagtgagatatcccaaagaagtaaagtccatcacttggcttctatgaagctcaagagaaaaagaaagtacagaactgagagggagtataagaaaaaattctagacgccaggtgcagtggcacacacctgcagtcccagctatttgggcggctgaaac

SEQ ID NO: 171591 - DNA, 418 bp, Homo sapiens
ggaatctttaaaagattcaatatatgccaaatgtaaagcttcttcaaaagaataactcatatattttgacactcaccatgttgctagcctgaatgcgtggaagacaaaaacacacaaatcaagtctcttacatttctggaggcacaatatttaacatctgctctgagtttaaatgttaattaaataaagactaatctcctctcacatatctacagtaatctatcacttgcccacacataccaactatctggaaagctacagggtgaaaaaagccagtaaagtgagatatcccaaagaagtaaagtccatcacttggcttctatgaagctcaagagaaaaagaaagtacagaactgagagggagtataagaaaaaattctagacgccaggtgcagtggcacacacctgcagtcccagct

SEQ ID NO: 171592 - DNA, 224 bp, Homo sapiens
ggatcttaactaatttctgatcaaataaataaaataaaaacagtcactcaggctgacaagggtaagggaaatgtggtccgcccccaccaccttaacatcttgctatgaaaggacgtttcatgatgataacgtttaaagacatccgtaaggcgatggcttttatctgactggaagttagcaaaacattagagatgactgaagtgagtcgctgctgggtatgtcca

SEQ ID NO: 171593 - DNA, 540 bp, Homo sapiens
gacatcgagaggccaccgtcatcgtcttccatcgaaaggcgtttaaaagcagtcacggccatgcgcggtggctcaggcctgtgatcccagcactttgggaggccgaggcgggcggatcatttgaggtcaggagttcgagaccagcctggcaaaacatggtgaaatccggtatctaataaaaatgaaaaattagtcgggggtagttgcgggcgcctgtaatcccagctacttgggaggctgaggcaggagaatcgcttgaccccaggaggcagaggttgcagtgagcccaggtggcgccaccgcaccccagcctggacgacagagcgagactccatctcaaataaataaaataaaaacagtcactcaggctgacaagggtaagggaaatgtggtccgcccccaccaccttaacatcttgctatgaaaggacgtttcatgatgataacgtttaaagacatccgtaaggcgatggcttttatctgactggaagttagcaaaacattagagatgactgaagtgagtcgctgctgggtatgtcca

SEQ ID NO: 171594 - DNA, 797 bp, Homo sapiens
accgcacgacacaaacaaaaatagagcaggtaagaggccgcggttgtaatcggcagatgctctttgtagctaacagtgaagatttacctcgttctgctcagaggccttgctgtggagctccactgccatgtacccagtagggtttgacatttcattagccatgcaacatggatatgtattgggcagcagactgtgtttcgtgaactgcagtgatgtatacatcttatagatgcaaagtattttggggtatattatcctaagggaagataaagatgatattaagaactgctgtttcacggggcccttacctgtgaccctctttgctgaagaatatttaaccccacacagcacttcaaagaagctgtcttggaagtctgtctcaggagcaccctgtcttcttaattctccaagcggatgctccatttcaattgctttgtgacttcttcttctttgtttttttaaatattatgctgctttaacagtggagctgaattttctggaaaatgcttcttggctggggccactacctcctttcctatctttacatctatgtgtatgttgactttttaaaattctgagtgatccagggtatgacctagggaatgaactagctatgaaatactcagggttaggaatcctagcacttgtctccaggactctgaaaaggaacggcttcctcattccttgtcctcgatacagtggcacattggcacacctagaatccactcagtactccagtggaccagtgctgttgaagatttgaggacttgttaaagagcactgggtcatatggaaaa

SEQ ID NO: 171595 - DNA, 710 bp, Homo sapiens
ccgagggcagttaagagttagccagctatggccggacacagtggctcatgcctgtaattccagcacttcgggaggccgaggcgggcggatcacgaggtcaggaaatcgagagcatcctggctaacatggtgaaaccctgtctctactgaaaatacaaaaaattagccgggcgtggtggcgggcgcctgtaggcccagctactcaggaggctgaagcaagagagtggcgtgaacccaggaggcggggcttgcagtgagccgagatcgcaccactgtactccagcctgggcgacagagcaagactctgtctcaaaaaaaaaaaaaaaaaaaaaagccagctatgaagtgatggaaacacattccaggaagagaagattgtttgaagggagtacagagggatggcaaagcatgacatatttagggaatgacagatagcctagtatggttggagaaatggaggctcatggatgagtggcaggatgggatcctaaatatggagactgtggtcagattacaagagacttcctgtgccaagatgaggagttgaaacttcctgctgaaggccacagagagccatggcagggaacacttcctaaataacaatgtggttttggagcacagcaacctcattgctttggcaaagtctccaataagtgtgatgaaatcttctaggatgaagactgaaaatgatgcactcagctttcttctgga

SEQ ID NO: 171596 - DNA, 198 bp, Homo sapiens
ggagagaactaggagaggcaccatttccaaagatattgtcaggggtttaatagaattgatgaaggacaccaattcttagattccagacaacaacaaactgaggaaaatacgttttttaaagaattgatatctagatacattgtagtatacaagaaagggaagaattaaaaaataaccagaggaaaaaaagactactca

SEQ ID NO: 171597 - DNA, 560 bp, Homo sapiens
gacaataggcgacagacagctgtgtgcattgtcacaacctccctgtggggtaagaggattatcccctctttttaaatgaggaagccagggttcaaagaggttgaataatctactcaaggccacactagatctagcccagctagatcatagtgggctggaaacctaaccaaggtctgatagtcaacccatgaaaccagggattcccaaaccatgctcatccattcagtcatgtcgcctgttttgactgggcgcctgctacatgccaggtgctttttcttttctttctctttttttgttttttgttttttgagacagagtctcactctgtcgccaggctggagtgcagtggtgagatcttggctccctgcaacctccgcctcctgggttcaagcgattttcctgcctcagcctcccaagtagctgagactacaggcacccgccaccacgtccgtctctactaaaggtaccaaaaatagccaggcatggtgacgggcactgtgatcccagctacttgggaggctgaggcaggagaatcacttgaacttggagggtggaggttg

SEQ ID NO: 171598 - DNA, 188 bp, Homo sapiens
atctaaaatcccctttttatgcaagagatatctcagatcagtgaggcatgcctgcagctgaagtccacactctgtggggacctcatcccattggactgatagacgtggcttggtcatacaagccagagacagtgagcgacagttttgccagaaaggatattttgctgacttccacagttatcccctga

SEQ ID NO: 171599 - DNA, 621 bp, Homo sapiens
tctgctggagttctaaaagacccagcacatacccacattccttccatcttatcactgacatctcgactcattttctcccagctaaatgccctgtttttctgctttgcaccgttattggttgggcaagagtgtcctctcagtaatatttcgtgattaagcacatggcatctcaaatgcatgacagtcaaactgtacttttgtggatgagcttagaagacaaccatgatttcatgatttcactgttctggtggggaaatattttccaaggtccaaatactatcgtactagtgaacttttacaataaacttctgtgtcagctggtgactttctaaatttcttcagggcgcaaggtggaaggaaaatttagctacgactgaccagccaaggtgtgatactgaacatttgggggtaacactgagctcttgaaaataccattaatagtcaaagcaatagcaagaccactgtctacaactgttaatttggttgaagagaatatacatggctctacttccctatggctcaaatatgtaagaaaaagatggacgcatgcttacacacacacatacaaacacactctctctctctctatcaattagcttgcaacacatttttggatatatc

SEQ ID NO: 171600 - DNA, 233 bp, Homo sapiens
tagatccattcttctttccctgttcctattcctgattcgttttttaaagaaaagtattcagtcttttcattaatattgcagcgacttcagcacttccccgcccctcccccagactcctactgtccttgaatgaggaaactgagagaatactgattgagctggtgaatggaaacgttcctttcctgaaaatggaatgctttacaaaaaattgcattccacaaaaaaacactcaa

SEQ ID NO: 171601 - DNA, 481 bp, Homo sapiens
ttgagcactttcaggtggggaacgcacaccccctccagtcaaaatcaccagcaaccacccactctaaggctcagccaaggtctgctccttcctgcataaagccatatccatgcacaccgcctctgacagagaaaagggaggaagcatctacaatacggtctgaagccacccacatgcaaaaagttggctgtgacatcatactgtacacaggtccatgctggaaacccacctgtccagtaagaaaatgactacagaataggagactcactgaatgaagtaattcatttttgacacttgctaacaggaaaaactactatgacatattggaatgttaggtgaaaaagcagggtatttaagatatacacaacacaatcaaaactattcaacacagtgaagactagaggaaaagttgcaaaaagcaatgcagttacttgaaggaaaagaatccatgtactttttttctaaatatgaatgcccttat

SEQ ID NO: 171602 - DNA, 714 bp, Homo sapiens
caggttcaatcgattctcctgcctcagcctcccgagtagctgggactacaggcgcgcgccaccgtgcccggctaatctttgtatttttagtacagatggagtttcaccacgttggccaggatggtctcaatctcttgacctcatgatccgcccacctcagcctcccaaattgctgggattacaggcgtgagccaccgcacctggcctagattacttctaatacctaacacaatgtaaaatgccatgtagtaaataatcatactgtattgtttagagaataatgacaagaaaaatgtctgtacaccttcagtacagagataaccatcataggcctgactacattttccatccacagttggttgactctgagggcatggagggctgactgtacctgagccacctcttctttaatatttcacatcactcttttcctcacaggacccattttccattttaattcttccacatatttttatcctaaggagatatttttatgtttgaaaatcttattgattatgctatatacttgtctacaacaaaaagtatatataaattgaaatctgaaatttttatttcctgtgagaccaagtgttagaaaacattcttctgggcttacttatcattacaactgtcagaacacaactaatcaaacacaaatatattacaaagtttgaataataattattagtcatgaaagtgtcactcattagtcat

SEQ ID NO: 171603 - DNA, 397 bp, Homo sapiens
cctccccagctccaccctccttgcccaggaagtttctgcgatccatagaaccctctattattacctgctcttccccttcatccggtccaagggagtcagcccttgccttaaatatttctttgaatttcctgccaagaacaccagcgctttgtctttctctgtcatgggaaaactattttaaattccctgtttaactggtcataaacgtctagagaatgtaccacgcgttttgctggagaagcacaaaagagtttcatccacctctgcatatttggttcatcgtccacctcttaggggaggttttccaggatagtagtcatgcgtatgtatcctgaagccagaatgcttggttccaatccggtttttcctacaataaatgtgtgattcaggtaaaata

SEQ ID NO: 171604 - DNA, 167 bp, Homo sapiens
caatcaagggagtcttttaaaaagcagataagttctttcttttctccctgcttaaagtgctttagtaactttttcttgtactcagaacaaaatccagactccttgcctatggggtatgatgtgattcattccctccccagcgacttcctctctttcccttctcctca

SEQ ID NO: 171605 - DNA, 401 bp, Homo sapiens
cttctcttaaaacatgtgatttagaaaatagggaaaagtaaaaattttacaggcagctcactaattgagatgaatgtgaagattaactttataaagctccgttgcattttctgggtcaccgtgtgtgtgtatgtgtgtgggtgtgtagttgggatgctagatagatgccatgccagttgcagaatcctattgacccacagaatgtgggagatatatccaaatccatatacatatctatatctgtacacacacacatatatatacatatataaagtattgttgtacaagagcactatggttggtctcttcagaatctgtgtcatttcatattttcagaaagaatacattttaatcaattttctaaaaattgaagttatgtttttagtgttgttcaagcatat

SEQ ID NO: 171606 - DNA, 357 bp, Homo sapiens
agttgcatgacctttgctacagtctcattttggaacattttcataactctaaaagtaaactctatgattattttatcatcactaagaatattcacctccagcctgacaacaagtagtttactttgtgtttgcatatatttgtttgttttgaacatttcataaaaattgaatcatgtaaataatataaataagaataaaataaaccattcttgtgtaaaaaaaaaatagacaaacaatagttattcacttttatattctcacttgatctacaacaaaaaatttatataataaaatctcttgggggggggcggggcccaaattccccttttagggggggtttttaaaataaatgggccg

SEQ ID NO: 171607 - DNA, 278 bp, Homo sapiens
cgactctacaggatcccggcagctatccggttcaattgtgtgggtgtgcacatgtgcatatctgtggggggcgcattcaatcgtgtgggtgtccacgtgtgcatatctgcgggtgtgtgcattcgattgtacgggtgtgcatgtgtgtctgtgggtgtatgcacattcaattgtgtgggtgtgcacgtgtgcatatctgcgggggggtgtgcattcgattgtgtggatgtgcacatgtgcgtatctgtgggtgtatgcatattgaaccggatagcttg

SEQ ID NO: 171608 - DNA, 760 bp, Homo sapiens
cccgcaagtcgaccggcggcaaggccccgaggaagcagctggctaccaaagcggcccgcaagagcgcgccggccacgggcggggtgaagaagccgcaccgctaccggccggcaccgtggctctgcgggagatccggcgctaccagaagtctacggagctgctgatccgcaagctgcccttccagcggctggtacgcgagatcgcgcaggactttaagacggacctgcgcttccagagctcggccgtgacggcgctggcgctgcaggaggccagcgaggcctacctggtggggctgttcgaagacacgaacctgtgcgccatccatgccaagcgcgtgaccatcatgcccaaggacatccagttggtcagccgcatccgcggggagagggcctaagcgaaatccgctcctgctcccaagaagggctccaaaaaggctgttacgagagtgcagaagaaggacggcgagaagcgcaagcgcagccgcaaggagagctactccgtttacgtgtaggaggtgctgaagcaggtccaccccgacaccggcatctcgtccaaggccatgggcatcatgaactccttcgtcaacgacatcttcgagcgcatcgcgggagaggcgtcccgcctggcgcactacaacaagcgctccaccatcacatcccgtgagatccagacggccgtgcgcctgctgctgcccggggagctggccaagcacgccgtgtccgagggcaccaaggcggtcaccaagtacaccagctcgaag

SEQ ID NO: 171609 - DNA, 534 bp, Homo sapiens
  misc_feature (49)..(49): n is a, c, g, or t
  misc_feature (67)..(67): n is a, c, g, or t
  misc_feature (70)..(70): n is a, c, g, or t
  misc_feature (81)..(81): n is a, c, g, or t
tgttggggcgtcaggggcaggcaatggtgtttaagggcccaggtgacanagcacagtgcaaagtggnagnagaggcatttntcctgtttctcctagaacacagcagaaccacttggcaggcctgctgagcagcagcagtgaagtgtcaggaaggtgcctcctcctggcaagcatggcagcagtgacagtagccaggggtcctccccaaatatcttgtcaagagaacgtgggcatctatgagagacctcctctaggcacagcttcaggggcaggacaggaagatgttggtggtccttggccagatgcttcctataataatgaaaagcctgaatggttgggcagctggcagactgtggcctgcatcttatctgtgcgccatccatgccaagcgcgtgaccatcatgcccaaggacatccagttggtcagccgcatccgcggggagagggcctaaggtatatttttaagtggtcgatctaaaggatcttttcagagccactgccgttttcatcaagagcagctgtaccggctctcca

SEQ ID NO: 171610 - DNA, 419 bp, Homo sapiens
tggggaagttatttgcactttctctggagcaattttgggattccgtttaacaagatcttgctttacatctctgagtaattgatgtaaatttgatctgtaggagtggccagaagaatatcatccataaaatgaatgatatacgcagtgggaaacatattttgagactcctttaatgctcttcctacaaaatggtgacataatgtaggactgttaagcatgccttcaagtaaaacttgccattgatagcaagaaacaggttctctatgattaatagaaggcatagagaaggcaaattgaggcttatgcttctcgtgtaatggtataataaagaaacaatccttaaaatctattactacaagaggccagtctcttggaatggccgccggggaaggtaaaccttgctgtaatgcacccattgg

SEQ ID NO: 171611 - DNA, 385 bp, Homo sapiens
cctgggtctggagcgtggggtcaaggcagggcagggcacctacaggagcagggacagagctgcagtccagcagcagtggagcccaggcaggctgggggcagggtgcagaggcagccaccacagaagcacagcccctggacatggggtctggctgggaacgagctggaggccccctagattcggggggcgggggtgccatttgcagagacagggaaggggtcggcttagggctgccaaggaggcgcgggctgggacccgttgctagtgtgatggcctcccagctgccgccccctcattgcccatgtcaccgcaaggcctgtcctgccccgggtatggcgccgtcccttggcgtccttgcagttcacccgggaccacaagatggcgt

SEQ ID NO: 171612 - DNA, 605 bp, Homo sapiens
  misc_feature (130)..(130): n is a, c, g, or t
cttgaggctaggaggttgaggctgtagtgagccatgatcatgccaccacactcagcctgggagacagagtgagaccctgtcttgaaaataaaataaaataaaaaaaaaaaaaaaaaaaaaaaaaaaaaangggggggggtgttaaagacaataaatctattttaatgcttcatttaataccatattttgttagatattttggtcttttgaaatcatcggcaaaatattggtgttgtttatttgaaaattttgatccctggaatctctggatcagactttgagaaatacgaaatactcttcaaatctatcatccgactcttcttactgtgtcatgtaattatgctaatttttcacatttgtaaggatgataagaatgaaaaaaactgatttcggtgctaaaaaattatgttactaaaagacacaggtttgtgtgtaaatatgccaatggatagttgaaattaatcgttctgccttgttagtttttttgtagttgtagacttctcagtactactgtgtataagtcttaccacttgtcaacctcacttttttctttaaaattaatgtgtaaaaatggaaatctctaagtaaaaagcattaccagtttt

SEQ ID NO: 171613 - DNA, 374 bp, Homo sapiens
tgtttgccacttagttgctgaagagacatcagcatatggcttatttatgaactcatagtttgctttgaattgggaaagaaatttttaaaagagattaaacattaccttctttgtccaaataagccttaccaaattatcacatctaatgtgttttcttttgtaacaaaagatttaatgcacaaagcatttagtcacaccagccattactaagaatagcttggtcagttgcctgagaagttccttaccccatgcagtcgatcctccttattcacagatttcacattggtgaattcatctgcttgataaaacgtattttaaccccaaaaccaatacacagagcacttccacagtcattttcagacatgcacagagaa

SEQ ID NO: 171614 - DNA, 315 bp, Homo sapiens
gggaccttaaaaaatgcacttatttatgaaatacagatactgcttcctatgtacaggccaggtacaattttaaacatgtttttataaataataagtcaatcacagttggcaggataatggaataggaggccccctgctcatatacccacacagcaagaagcatttggcagccatccactgatagaagtgcctcagtgggagctttgggatctagggagcagatgttaaaattctggtataggccaaaaccaaggaggctcattttaatagggcaggcccacacttgggtggcaattttgctgactatggagtaag

SEQ ID NO: 171615 - DNA, 474 bp, Homo sapiens
tgaattattgatgagccactgaaagcaaatgtctctccttaagcgatttatttacctattcacagtcattgctattgagcagaacagagaccgtagcatggctaatccatacttggcgctagcctcgaagtgtccagccagcagtgtggacctgcagggcacaatgtcactggggagctcactcacctcagcattggccgcaccccttaaaccagccaccagggcctctgaagactgcattgtgtggacctctcagcttggccttcaggttgaaggctgacggctgaggaaaaggctttgtggaattttctaaaggcagaggttcaggccccaccccgggcctcggaattttctaaatgcagaggctcaggccccaccctgggcctcccgcttccctccagggctgacatctgccctctcagtcagcaaaacctccctccagctctgctgtgccagggtaggagccagggatct

SEQ ID NO: 171616 - DNA, 470 bp, Homo sapiens
agctacaaacttgcaagatttaaaaaaaaaaaaatcaaaacatggtttcacaatgatgatagaagcttacccctcactccagataatttagtactagctgggtgccgtggagcatgcctgtaattccagcactttggaactacaagcatgaactaccacgcctggctaatttttgcattttttgtagagatggggttttgccatgttgcccaggctggtctcgaattcctgggctcaagccatctgctggcctcagcctcccaaactactgagattacaggcgtgagccaccctgcctggcccaaccttccttttttaatcaaatgggtagcagatgggtttaacaccatctgtgaacagtccttactgatataaagtgttacatcatttaaaaaaaaaattcttgggaaggtttcttagatacatgggaaggtttctagatgctgctcttctgtggatcagtttggaca

SEQ ID NO: 171617 - DNA, 446 bp, Homo sapiens
tcaaaccatagtggtccccctgactataaaatattccctctcattcaggatccaagatcagagtatctgagaaacattgccatggtagagaagggataacacctttttggaggagcacatgagttgatcaggtggccagcaaatgttgtgtcttgtgatgtggaatattactgggaaacttttaagacaaaccgtaagccagatatattgtttcaaaaaactactggtatcatagcctgtttctcattttttacctttgcatacaactcatggaaactaatggctaaattttgctgtgtaccaaatgattccagttagttaaaacagatcgttttatgggtcagtaggttggctggtcagttgtgggtatggctagttcagcccatctctgtggactgcagatggttccactgaggctggatggtctcaaatggactcactcacct

SEQ ID NO: 171618 - DNA, 872 bp, Homo sapiens
tgggacccacaagaggacagtgggggtcttgggtacagagtgagtccactgggtccagagagggcaaaggggccagcaactagaggacatggaggttaaggcagccttggacaaatgcaatggagtgcacatctgtgcatggggcacaggaaccagtgcctgggggacagacacacacagccttgtgcaagcgcacatgagttcatgcccacgggaccacgaagaaacacagcttcacaagttgaaggttcaccagctgtgccatgcacacaggacactcaggccaccccccaggggcaggcctggcccaggagccctgggcagccaccaggcggccacctggcaggggtaggggagccaaggagacaagaacacccccaacagctctgtccttcctccttgattcccagcacaaagtgctgcggagcccttagctgggcctcctgagtgctcagtgtcagctgtggctccacctgtgggacatcagatgaatcactcatcctttccatgcctcacttttctgctctgtataatgggataccaatcacacagtaccatgagtggaaaaaaaaccaaaagaaacaaagaatcagtcgaaaaacaacacacgaccaaaaaaaaaaaacacccagggcggggcatatattgggggcggggcgagaacaacgcgtaatataacgcggccaaggggtaacacgtgtgtgtccggacccacttttttcgcaaaacgcgggagaaaccagggggggcccccataggaggagataacaatcgaacacggggactcgttaatagcgcgcagacgacccgcgaatacagtagtagagagaattgtgacaaacagctctcaactatatcaaagcacgctgtga

SEQ ID NO: 171619 - DNA, 393 bp, Homo sapiens
aagaaggcagccagcaaggatggtcttgggatgtagtgtgatggtagagctgggctttaataataaccatttggagagctcttactgtgtgccgggaattgttccaattgctttcatgtattaactcatttaatcatctctaagggataggtaggttgccctcatgaagcttaccttctgaggtgaattttctccaaacatatattaaaatgaactatgttgtactagctcaagaatagacaaacagattaaattactagaaactaagtagagtccaaaaagataccctgtgtatgtgtatgtatacatagtgcatgaaaatgtgacgtttcagattgtttctgttatgtctattcataactagttaccttatgaatttatgactactgtgtg

SEQ ID NO: 171620 - DNA, 538 bp, Homo sapiens
ataaaagattcacttttatttggttgactaaggttggctttgttcctggaaatgcagttgaaagttccccattatgattttaactcttctcagaagcaaagcacactttgataaatagccaccaaaaattttcatggagatacaataacaccacttatcagtgaatctcaattcaagatgttatggaggaatagatttgctttgattctgtctgcttctttgggttttttaataattcaaatatctggccacattccagagattctcagaaaaatcttaaatgaagccatggtatgtgttgtttttgaaaaaatgaggccaggtgcggtgtcacgcctgtaatcccagcactttgggaggccgaggtgcgcagatcaagaggtcaggagttcgataccagcctggtcagaatggtgaaactccgcctgtactaaaaatacaaaaattagctggatatggtggaggtgtctgtagtcccagctactcaacaggctgaggcaggagaatcacttgaacctgggaggcagaggttgcagtg

SEQ ID NO: 171621 - DNA, 188 bp, Homo sapiens
cagaggattaccctacgagcgcattcctagaactggtgtggttcttcctacgagcgccacctcaagtgctaagagatcacttattaaattaaaaggatttccaagagtcagggacgtctctcccagcctgggggtgtccttcccaaactgctacattcccaagtaaattaagaagtcccagccctgaa

SEQ ID NO: 171622 - DNA, 638 bp, Homo sapiens
cacagtgttcaaaattttatgaaaagtaattgatctaacgtgcctctgatactagatgtggtactgccttctccctggtctgttgatttatccttgaatctagactcaaaggatatcacctttgagaattaattggcttaagcctttagctttaagtctaaagactcaaaataatgacttttttttttttttgcgatggagtttcactcttgtcaccagttgtcacccaggctgaagtgcaatggcatgatctcggctcactgccacctccacgtcctgggttcaagcaattttcctgcctcagcctcccaagtagctgggaatacaggtgcacaccaccacaccgggctaatttttgtatttttagtagagatggggtttcaccatgttggccaggatggtcttgaactcctgatctcaggtgatctgcccacctcggcgtccccaagtactgggattacaggcgtgagccaccgtgcccggccaaaataatgacttttaaattgtatatcagtttgattacaatagtaaattattctattagaaataatagaaatgtttattaatagggaattgataaaataaaataatatcgtatgcgagtaaaatgctgtgtgcccatttaaatgatgtggaaa

SEQ ID NO: 171623 - DNA, 296 bp, Homo sapiens
atctctaccgccaattaaatccccaaactttgctgattaaccattgaaacaatccttttaatccgtccattttttcactttgattttttcattgctaactctctatgtgaagccacctcacctttttctcagaatgtcagctataatggcctagctgatctcccagtcattccaggcttgcatctgcccaaactaccctccactctaccccgtgctgttttctaaatgacaaattttatcctgttgcttcccaacttcaaactcctcaatgacttgcaaatgccttcaagcatata

SEQ ID NO: 171624 - DNA, 250 bp, Homo sapiens
acacctgtagtctcagcactttgggaggccaaggcaggtagatcgcttgagcccagaagttccagaccagtctgagtgacatggtgaaaccctgtcactactaaacaatgaaaaagttatctgggcatggtggcttgcacctgtatctccagctacttgggaagctgaaatgggaggatcacctaagtctgggaggttaaggctgcaatgaaccatgattgcaccactgcactccagcctgggcaacaga

SEQ ID NO: 171625 - DNA, 176 bp, Homo sapiens
tgatgggtgattttgagactatccaaggtatcaccatatcagtgtcatagaaacccttctgggaagccttcaatggtggaggaagctcccttcctgatttcctaattctggaaaccactggtctttgggtgattctctatcttcctgaccatcaacctttggcagtgcactgtgtc

SEQ ID NO: 171626 - DNA, 643 bp, Homo sapiens
acctctgaaatagtaaagaggaagaggagcatgagcagagatgcagtggcagagaagaagtcactgttggtgttttatggcttttaccttttcttggggaaatgggagacagagtaagcccggtcagtggtgggccaagaagccctacacatggtaatgctccaatagctcccggggggaagtgagtaaggaaacctgcttaaaataaatataagggtctttgaacagctccaaaggtccagctgggagcagcatttgtaactccatagagaaaccatttggtaaggtcacatgatttttcactggaggcatcgggtaggatgggagaaaggggcagttggcttgatctatcatgggagactgaaaagacagagagtgaagcagagattccagggtcaaagggtgagaagtggcagtgagagagtacctgcaatgactatgggattggggacaggtaaggacaaggtccagggactggtcctatagatcagaggcaaggtgttggatgggtcattgatgtgaatgttagagttcccagaatgatggcagaaaggaaaaatcctggtgaaatattagggagccacttagatgtccccaaaatatggtgaaaagcatgagatgagggtggcccagtataagcaag

SEQ ID NO: 171627 - DNA, 5475 bp, Homo sapiens
  misc_feature (1620)..(1620): n is a, c, g, or t
  misc_feature (2517)..(2517): n is a, c, g, or t
  misc_feature (2670)..(2670): n is a, c, g, or t
  misc_feature (3016)..(3016): n is a, c, g, or t
  misc_feature (3039)..(3039): n is a, c, g, or t
  misc_feature (3128)..(3128): n is a, c, g, or t
  misc_feature (3294)..(3294): n is a, c, g, or t
  misc_feature (3796)..(3796): n is a, c, g, or t
  misc_feature (4026)..(4026): n is a, c, g, or t
  misc_feature (5286)..(5286): n is a, c, g, or t
  misc_feature (5422)..(5422): n is a, c, g, or t
cggaacggcggcgcttcgctgcccgggagcgccagctgcgtgaggaggccgagcgggagcggcggcagctggctgaccgtctgcgctccaagtgggaggcacagcgcagccgggagttgcggcagctgcaagaggagatgcagcgggaacgcgaggccgagatccggcagctgctgcgctggaaggaggccgagcagcggcagctgcagcagctgctgcaccgggagcgcgatggcgtggtgcgccaagcccgggagctgcagcgccagctggccgaggagctggtgaaccgcggccactgtagccgcccgggggcgtccgaggtttccgcggcgcagtgccgctgtcgcctgcaggaagtgttggcgcagcttcgctggcagactgacggcgagcaggcggcgcgcatccgctatctgcaggcggcgctggaggtggagcgccagctcttcctcaagtacatcctggcgcacttccgcgggcacccggctttgtcgggatcaccggacccccaagctgtgcattccttggaagaaccgctgccccagacctccagcggctcttgccacgcccccaaacccgcctgccaactcggatctctagacagcctgagtgctgaagtcggtgtgcgctcccgctcgctaggcctggtgtcctctgcgtgctccagctccccagacggcctgctctccacgcacgccagctcccttgattgcttcgcacctgcgtgttcccgctcgcttgacagcacccggagcctccccaaggcctccaaatccgaggagcggccctcctcaccagacacctccacccctggctcccggaggctctcgccgccaccatcgccactcccgccgccaccaccaccgtcagcccacaggaaactcagcaacccgcggggaggagaaggctctgagagccagccctgcgaagtcctgactccctcacccccgggcctgggccaccacgagctgataaagctgaactggctgctggccaaggcgttgtgggtgctggcgcgccgctgttataccctgcaagaggagaacaagcagctgcggcgtgcaggctgcccctaccaggcagacgagaaggtgaagcggctcaaggtaaagcgcgcggagctgaccgggctcgcgcggcgcctagctgaccgcgcccgcgagctgcaggagaccaacctccgggccgtgagcgcgcctatacccggcgagagttgcgccggcctggagctgtgccaagtctttgcccgccagcgcgctcgggacctgtcggagcaggcgagcgcgccgctggccaaggacaagcagatcgaagagctgcggcaggagtgccacctcctgcaggcgcgtgtcgcctcgggtccctgcagcgacctgcatactggaaggggcggcccctgcacccagtggctcaacgtcagagacttagaccgcctgcagcgcgagtcccagcgggaagtgctgcgcctgcagaggcagttgatgcttcagcagggcaacggtggcgcttggcccgaggcgggcggccagagcgcaacctgcgaggaggtgcgacggcagatgctggcgctggagcgcgagctggaccagcggcggcgcgagtgccaggagctgggcncgcaggcggccccggcgcggcgacgtggcgaggaggccgagacacagctgcaggcggcgctgctcaaaaacgcctggctggcggaggagaatgggcggctgcaggccaagaccgactgggtgcggaaggtggaggctgagaatagcgaagtgcgcggccacctgggccgcgcgtgtcaagagcgcgatgcctccggcttgatcgccgaacagctgctgcagcaggcggcgcgcgggcaggacaggcagcagcagctgcaacgcgacccgcagaaggccctgtgtgacctccatccttcctggaaggagatacaggcgctccagtgtcggcctggtcaccctcctgaacagccctgggagaccagtcaaatgccggagtcccaagttaaaggtagcagaaggcccaagttccacgcacggcctgaagactacgcagtgtcacagcccaacagagacatacaggagaaaagggaagcctccctcgaggagagcccagttgcccttggggagtcagccagtgtcccccaagtttcagagacagtccctgccagccaacctctgtccaagaaaaccagctcccagtcaaactcctcctctgaggggtcgatgtgggccaccgtgccgtcctcccctactctggacagggacacagccagtgaggtggatgacctggagcctgacagcgtgtccctggccctggaaatggggggctcggcggctcctgctgcccccaagctcaagatcttcatggctcagtataactacaacccatttgaggggcccaatgatcaccctgagggtgagctgcccctcacagctggggactacatatatatcttcggggacatggatgaggatggcttctatgagggggagcttgacgatggccggcgggggntggtgccctccaacttcgtggagcagattccggacagctacatcccaggctgcctgcctgccaaatcccctgatcttggccccagtcaactcccagcggggcaggatgaagctctggaggaagacagcttattatctgggaaagcccagggantggtggacagagggctgtgccagatggtcagggtgggctccaagacagaagtagcaacagagatcctggataccaagacggaagcctgccagctgggcttgctgcagagcatggggaagcagggcctctccagaccccttctggggaccaaaggggtgctccgtatggctcccatgcagctacacctgcagaatgtcacagccacatcagccaacatcacctgggtctacagcagccaccgccacccccatgtggtatatcttgatgaccgagagcatgccctgaccccagcgggcgtgagctgctacaccttccagggcctgtgccccggcacgcactaccgggngcgggtggaggtgcggctgccangggacttgctgcaggtgtattggggaactatgtcctccaccgtcaccttcgacacactcttggcaggacctccctacccaccgctggangtgctggtggagcgccatgcctcgccaggtgtcctggtggtcagctggctccctgtgaccattgactcagctgggtcctccaatggagtccaggtcaccggttatgctgtgtatgcagatgggcttaaggtttgtgaggtcgccgatgccactgctgggagcaccntattggaattctcccagctacaggtgcccctcacgtggcagaaggtctcagtgagaaccatgtcactctgtggtgagtccctggattcagtgcctgctcagatccccgaggacttcttcatgtgtcaccgatggccagagactccaccctttagctacacttgtggcgacccatccacctacagagtcaccttccccgtctgcccccagaagctgtcactggctcctccgagtgccaaggccagcccccacaaccctggaagctgcggggagccccaggccaagttcctagaagcattctttgaagaacccccaaggaggcaatccccagtgtccaacctgggctcagaaggagaatgtccgagttcaggggctggcagccaagcccaggagcttgcagaggcctgggagggctgtagaaaggacctgctctttcagaagagtccccagaaccacaggccaccttcagtcagtgaccagcctggggagaaggaaaattgctnccagcacatgggcaccagcaaaagccctgctccaggattcatccatctacgcaccgagtgtgggcccaggaaagaaccgtgtcaggaaaaggctgcccttgagagggtacttcggcaaaagcaagatgcccaagggttcacacctccccagctgggcgccagccaacagtatgcatctgacttccataacgttttgaaggaggagcaggaggcactgtgcttggatctgnggggcacagagaggcgagaggagaggagggagcctgagccccacagcaggcaaggacaagctctgggggtgaagagagggtgccagctccatgagcccagctcggcactgtgtccagctccatccgccaaagtcatcaagatgcccaggggtggcccccaacagctggggacgggggccaacactccagccagggtctttgtggccctctctgattacaaccccctggtgatgtctgccaacctcaaggctgcagaggaggagctggtcttccagaaaaggcagttgctaagagtgtggggctctcaggacacccatgatttctacctcagcgagtgcaacaggcaagtgggcaatatccccgggcgcctagtggctgagatggaggtggggacagagcagactgataggaggtggcgttctccggcccaagggcacctgccttctgtggcccacctcgaggactttcaggggctcaccatcccccagggttcctccctggtgctccaggggaactccaagagactcccactgtggactccaaagatcatgatagcagctctggactatgatcctggggatgggcaaatggggggccaggggaagggcaggctggcgctgagggcaggagacgtggtcatggtttacgggcccatggatgaccaaggattctattatggagagttgggcggccacaggggcctggttcctgcccacctgctggatcacatgtccctccatggacactgagcaagcatccttgcccaggtagtggcctctggctgctcacaccctgccagaggagaagcaagcgttcagaccctcacaccagcacccctcctcaccaccataagtagcatgtgctccaagtgccactgtgttaaactgatggtagtccttaagcgtcccctaggctctgaaagtagcaggacttaagcctgagttatttgcaaaagcaaacacaacaagccaacccctgagagtctgagaagccatttcaaagttgctgataactatggcaggtatacggagaagcgcctttttctgtggccaatgtgtgttttctctgggaggttaaggttatctgtccattgccttgtacgaaagtctcaagaaaagtctacatcttaaaaaagaaaaagcaatctgagtgttatttttgggatgtgagggtgatctggctgcgacatgtgtcaccccattgatcatcagggttgattcggctgatctggctgactaggcgggtatccccttcctcccncaccactccatgtgcgtccctccagaagctgtgtgctcaatggaagaggatgaccatccccgatagaggacgatcggtcttcagtcaagagtataagagtagctgcgctcccctgctagaacctccaaacgagctntcagaatgttatttttctgtcttatgtccaacccctcattaaaatgttcatag

SEQ ID NO: 171628 - DNA, 5228 bp, Homo sapiens
  misc_feature (1620)..(1620): n is a, c, g, or t
  misc_feature (2517)..(2517): n is a, c, g, or t
  misc_feature (2670)..(2670): n is a, c, g, or t
  misc_feature (3016)..(3016): n is a, c, g, or t
  misc_feature (3039)..(3039): n is a, c, g, or t
  misc_feature (3128)..(3128): n is a, c, g, or t
  misc_feature (3294)..(3294): n is a, c, g, or t
  misc_feature (3796)..(3796): n is a, c, g, or t
  misc_feature (4026)..(4026): n is a, c, g, or t
  misc_feature (5039)..(5039): n is a, c, g, or t
  misc_feature (5175)..(5175): n is a, c, g, or t
cggaacggcggcgcttcgctgcccgggagcgccagctgcgtgaggaggccgagcgggagcggcggcagctggctgaccgtctgcgctccaagtgggaggcacagcgcagccgggagttgcggcagctgcaagaggagatgcagcgggaacgcgaggccgagatccggcagctgctgcgctggaaggaggccgagcagcggcagctgcagcagctgctgcaccgggagcgcgatggcgtggtgcgccaagcccgggagctgcagcgccagctggccgaggagctggtgaaccgcggccactgtagccgcccgggggcgtccgaggtttccgcggcgcagtgccgctgtcgcctgcaggaagtgttggcgcagcttcgctggcagactgacggcgagcaggcggcgcgcatccgctatctgcaggcggcgctggaggtggagcgccagctcttcctcaagtacatcctggcgcacttccgcgggcacccggctttgtcgggatcaccggacccccaagctgtgcattccttggaagaaccgctgccccagacctccagcggctcttgccacgcccccaaacccgcctgccaactcggatctctagacagcctgagtgctgaagtcggtgtgcgctcccgctcgctaggcctggtgtcctctgcgtgctccagctccccagacggcctgctctccacgcacgccagctcccttgattgcttcgcacctgcgtgttcccgctcgcttgacagcacccggagcctccccaaggcctccaaatccgaggagcggccctcctcaccagacacctccacccctggctcccggaggctctcgccgccaccatcgccactcccgccgccaccaccaccgtcagcccacaggaaactcagcaacccgcggggaggagaaggctctgagagccagccctgcgaagtcctgactccctcacccccgggcctgggccaccacgagctgataaagctgaactggctgctggccaaggcgttgtgggtgctggcgcgccgctgttataccctgcaagaggagaacaagcagctgcggcgtgcaggctgcccctaccaggcagacgagaaggtgaagcggctcaaggtaaagcgcgcggagctgaccgggctcgcgcggcgcctagctgaccgcgcccgcgagctgcaggagaccaacctccgggccgtgagcgcgcctatacccggcgagagttgcgccggcctggagctgtgccaagtctttgcccgccagcgcgctcgggacctgtcggagcaggcgagcgcgccgctggccaaggacaagcagatcgaagagctgcggcaggagtgccacctcctgcaggcgcgtgtcgcctcgggtccctgcagcgacctgcatactggaaggggcggcccctgcacccagtggctcaacgtcagagacttagaccgcctgcagcgcgagtcccagcgggaagtgctgcgcctgcagaggcagttgatgcttcagcagggcaacggtggcgcttggcccgaggcgggcggccagagcgcaacctgcgaggaggtgcgacggcagatgctggcgctggagcgcgagctggaccagcggcggcgcgagtgccaggagctgggcncgcaggcggccccggcgcggcgacgtggcgaggaggccgagacacagctgcaggcggcgctgctcaaaaacgcctggctggcggaggagaatgggcggctgcaggccaagaccgactgggtgcggaaggtggaggctgagaatagcgaagtgcgcggccacctgggccgcgcgtgtcaagagcgcgatgcctccggcttgatcgccgaacagctgctgcagcaggcggcgcgcgggcaggacaggcagcagcagctgcaacgcgacccgcagaaggccctgtgtgacctccatccttcctggaaggagatacaggcgctccagtgtcggcctggtcaccctcctgaacagccctgggagaccagtcaaatgccggagtcccaagttaaaggtagcagaaggcccaagttccacgcacggcctgaagactacgcagtgtcacagcccaacagagacatacaggagaaaagggaagcctccctcgaggagagcccagttgcccttggggagtcagccagtgtcccccaagtttcagagacagtccctgccagccaacctctgtccaagaaaaccagctcccagtcaaactcctcctctgaggggtcgatgtgggccaccgtgccgtcctcccctactctggacagggacacagccagtgaggtggatgacctggagcctgacagcgtgtccctggccctggaaatggggggctcggcggctcctgctgcccccaagctcaagatcttcatggctcagtataactacaacccatttgaggggcccaatgatcaccctgagggtgagctgcccctcacagctggggactacatatatatcttcggggacatggatgaggatggcttctatgagggggagcttgacgatggccggcgggggntggtgccctccaacttcgtggagcagattccggacagctacatcccaggctgcctgcctgccaaatcccctgatcttggccccagtcaactcccagcggggcaggatgaagctctggaggaagacagcttattatctgggaaagcccagggantggtggacagagggctgtgccagatggtcagggtgggctccaagacagaagtagcaacagagatcctggataccaagacggaagcctgccagctgggcttgctgcagagcatggggaagcagggcctctccagaccccttctggggaccaaaggggtgctccgtatggctcccatgcagctacacctgcagaatgtcacagccacatcagccaacatcacctgggtctacagcagccaccgccacccccatgtggtatatcttgatgaccgagagcatgccctgaccccagcgggcgtgagctgctacaccttccagggcctgtgccccggcacgcactaccgggngcgggtggaggtgcggctgccangggacttgctgcaggtgtattggggaactatgtcctccaccgtcaccttcgacacactcttggcaggacctccctacccaccgctggangtgctggtggagcgccatgcctcgccaggtgtcctggtggtcagctggctccctgtgaccattgactcagctgggtcctccaatggagtccaggtcaccggttatgctgtgtatgcagatgggcttaaggtttgtgaggtcgccgatgccactgctgggagcaccntattggaattctcccagctacaggtgcccctcacgtggcagaaggtctcagtgagaaccatgtcactctgtggtgagtccctggattcagtgcctgctcagatccccgaggacttcttcatgtgtcaccgatggccagagactccaccctttagctacacttgtggcgacccatccacctacagagtcaccttccccgtctgcccccagaagctgtcactggctcctccgagtgccaaggccagcccccacaaccctggaagctgcggggagccccaggccaagttcctagaagcattctttgaagaacccccaaggaggcaatccccagtgtccaacctgggctcagaaggagaatgtccgagttcaggggctggcagccaagcccaggagcttgcagaggcctgggagggctgtagaaaggacctgctctttcagaagagtccccagaaccacaggccaccttcagtcagtgaccagcctggggagaaggaaaattgctnccagcacatgggcaccagcaaaagccctgctccaggattcatccatctacgcaccgagtgtgggcccaggaaagaaccgtgtcaggaaaaggctgcccttgagagggtacttcggcaaaagcaagatgcccaagggttcacacctccccagctgggcgccagccaacagtatgcatctgacttccataacgttttgaaggaggagcaggaggcactgtgcttggatctgnggggcacagagaggcgagaggagaggagggagcctgagccccacagcaggcaaggacaagctctgggggtgaagagagggtgccagctccatgagcccagctcggcactgtgtccagctccatccgccaaagtcatcaagatgcccaggggtggcccccaacagctggggacgggggccaacactccagccagggtctttgtggccctctctgattacaaccccctggtgatgtctgccaacctcaaggctgcagaggaggagctggtcttccagaaaaggcagttgctaagagtgtggggctctcaggacacccatgatttctacctcagcgagtgcaacaggcaagtgggcaatatccccgggcgcctagtggctgagatggaggtggggacagagcagactgataggaggtggcgttctccggcccaagggcacctgccttctgtggcccacctcgaggactttcaggggctcaccatcccccagggttcctccctggtgctccaggggaactccaagagactcccactgtggactccaaagatcatgatagcagctctggactatgatcctggggatgggcaaatggggggccaggggaaggtagcatgtgctccaagtgccactgtgttaaactgatggtagtccttaagcgtcccctaggctctgaaagtagcaggacttaagcctgagttatttgcaaaagcaaacacaacaagccaacccctgagagtctgagaagccatttcaaagttgctgataactatggcaggtatacggagaagcgcctttttctgtggccaatgtgtgttttctctgggaggttaaggttatctgtccattgccttgtacgaaagtctcaagaaaagtctacatcttaaaaaagaaaaagcaatctgagtgttatttttgggatgtgagggtgatctggctgcgacatgtgtcaccccattgatcatcagggttgattcggctgatctggctgactaggcgggtatccccttcctcccncaccactccatgtgcgtccctccagaagctgtgtgctcaatggaagaggatgaccatccccgatagaggacgatcggtcttcagtcaagagtataagagtagctgcgctcccctgctagaacctccaaacgagctntcagaatgttatttttctgtcttatgtccaacccctcattaaaatgttcatag

SEQ ID NO: 171629 - DNA, 770 bp, Homo sapiens
gcacagcttccagacccttttggggatcttgctcctggaggcagagcggagcctgcggagagcgacaggcacccgcttccaggtcctcggagccgcgcttgtgggggctgggggtcccctgctgcccattgactacctccaccccgagcgtccgtgcgttctggtggcagcagacggcaggcggctatccgcggagcaggaaggcgacagaacttcctatgtccttgcgtggggtcatgggcaggcgtgtctgttgtggagtttcgtttgtttgttgttgttctaacccaggacctggaagccccttctctgatcagcgccttcttccagctttgaatgcggcagggcccaggcggggcggggacgcctctgctcctcctgggacctaaatcacaggagtccttggccacgttcagccataagacattattcacttgggctgcgaaactcctggcaactattaggcaggggaggcccagcccctgttgggacagagacgtagtagtcatgtgtcacccgtagggctttcacaaggtaggtgggtttcatgtccacggagagatcagggtggagatatgtacataggtctatatctatagatataacgccaagagtgacaaatagtcagcagtgaactttcctgggacgcatcatctgggtctctaggtcatcaacgacatctcaaggtggtctggttaacgtccaggaaaatgtccccaagggaagttgcatttaaattaaacgaccagacgaaagaaaactatatttcc

SEQ ID NO: 171630 - DNA, 1784 bp, Homo sapiens
gcacggcggcagctcctcacctggatttagaagagctggcgtccccgcccgcccaagcctttaaactctcgtctgccagaacccgccaactctccaggcttagggccagtttccgcgattctaagagtaattgcgtgggcacctgtgctggggccaggcgcaaagaagggagttggtctgcgcgaagatcgtcaacctgctaacagaccgcacatgcactttgcaccgaccatctacgtctcagtctggaggttgcgcactttggctgctgacgcgctggtggtgcctattaatcatttaccagtccagagccgcgccagttaatggctgtgccgtgcggtgctcccacatcctggcctctcctctccacggtcgcctgtgcccgggcaccccggagctgcaaactgcagagcccaggcaaccgctgggctgtgcgccccgccggcgccggtaggagccgcgctccccgcagcggttgcgctctacccggaggcgctgggcggctgtgggctgcaggcaagcggtcgggtggggagggagggcgcaggcggcgggtgcgcgaggagaaagccccagccctggcagccccactggcccccctcagctgggatgttccccaatggcaccgcctcctctccttcctcctctcctagccccagcccgggcagctgcggcgaaggcggcggcagcaggggccccggggccggcgctgcggacggcatggaggagccaggcgaaatgcgtcccagaacgggaccttgagcgagggccagggcagcgccatcctgatctctttcatctactccgtggtgtgcctggtggggctgtgtgggaactctatggtcatctacgtgatcctgcgctatgccaagatgaagacggccaccaacatctacatcctaaatctggccattgctgatgagctgctcatgctcagcgtgcccttcctagtcacctccacgttgttgcgccactggcccttcggtgcgctgctctgccgcctcgtgctcagcgtggacgcggtcaacatgttcaccagcatctactgtctgactgtgctcagcgtggaccgctacgtggccgtggtgcatcccatcaaggcggcccgctaccgccggcccaccgtggccaaggtagtaaacctgggcgtgtgggtgctatcgctgctcgtcatcctgcccatcgtggtcttctctcgcaccgcggccaacagcgacggcacggtggcttgcaacatgctcatgccagagcccgctcaacgctggctggtgggcttcgtgttgtacacatttctcatgggcttcctgctgcccgtgggggctatctgcctgtgctacgtgctcatcattgctaagatgcgcatggtggccctcaaggccggctggcagcagcgcaagcgctcggagcgcaagatcaccttaatggtgatgatggtggtgatggtgtttgtcatctgctggatgcctttctacgtggtgcagctggtcaacgtgtttgctgagcaggacgacgccacggtgagtcagctgtcggtcatcctcggctatgccaacagctgcgccaaccccatcctctatggctttctctcagacaacttcaagcgctctttccaacgcatcctatgcctcagctggatggacaacgccgcggaggagccggttgactattacgccaccgcgctcaagagccgtgcctacagtgtggaagacttccaacctgagaacctggagtccggcggcgtcttccgtaatggcacctgcacgtcccggatcacgacgctctga

SEQ ID NO: 171631 - DNA, 387 bp, Homo sapiens
aaccaagttataaaatgttgtcagaaggagagttatatggtaaacagaagccaccccctaatattgaggttaatattcaactggtttatttaatagcaggagagaaactcacttcagtgttcatggatgtcaatttgagattctgagatattcagtcactctgacttgatgaatatccccaattctggatcatgatttttctataccattccctaacatgtggctcagaggcctaagctaagtttcttaggccacacactgtccactgactaccctttgtctagtgctgagttgagtagagccataacacactcccatctctcctcaagagaatgcatttgtaagactgttaattctgtaaccaaggggcagagttgaaaacagcta

SEQ ID NO: 171632 - DNA, 729 bp, Homo sapiens
ggtgacttgctcctccttgccttccaccatgattgtgaggcctccccagccacatggaactaccagccaacacttacggaaaatagaacctacgttgaaatattgggggctggtttcctctatacaagaggagtcatgaatatttatgaaaggagaaatcgcacatgcacagcaaggcaatttacttctatagaagggtgcgccctcacagatggagcaatggatgacctgcctgcagaaggagctacccactgaaggtctcttctctgctgagagctggacactcattgggatgaactgcctgtggaaaggagctacccactttgggtctctagagagctgttctgttgctcagtgaagctcctgtgcatcttgctcaccctccaattgtctgcatacttcattcttcctggacatgggacaagaactcaggaccaaatggtgggactgaaagagctatgacacaaacagggctcaagatttaacagccaacaacaaaacaaaataaagcaaaataaatgtcagaatgtgtgagctatcagatcattggcctgtggatattcaagtctgaactgaatttgaattgtctcttttcggggaaatgatgcacattgtatcatgtcaggcaataattttctgtatatgttatggatagtctgtactgtatgtgtgtggtggggatggtatgaatgcatgtgctggctgggaagtaaagcgatgaactgcaac

SEQ ID NO: 171633 - DNA, 911 bp, Homo sapiens
ggtgacttgctcctccttgccttccaccatgattgtgaggcctccccagccacatggaactaccagccaacacttacggaaaatagaacctacgttgaaatattgggggctggtttcctctatacaagaggagtcatgaatatttatgaaaggagaaatcgcacatgcacagcaaggcaatttacttctatagaagggtgcgccctcacagatggagcaatgaatgtgaattcgaattgttgcagaatgtcaaaggagaactcttcctgctgtctcagaatttcagctggagctacagagatcaaagagaggttgttaaatacccactaatttgaaagcgagttgacaggccagctgtgcagaacatgctaaggggtaaccccaaaagacagataagcctttgtctatgacgtgcctcaagccaatacaaggagaaaaaagaagagcaataaaggaaagaccatgaggatgggtttctgtgagaagagctgtagatttttcctttcttctccataccttgagccaagttgggaggttgtaaaaatcctctgacagagcttgggtgtgcttcctgccaggaggaagactaacctggaacaagcgggtggggagagaccttcagagaatttggactccctacagtcgggggcacagggttttgtgttgacttgcacttgtagaagtccgatgccagccgggcgcggtggctcacgcctgtaatcctagcactttgggaggctgaggcgggtggatcacgaggtcaggagatcgagaccattctggctaacactgtgaaaccccgtctctactaaaaaaaaatgcaaattagccaggtgttggtggcggcgcctggtatcccagttacccggaaggctgaggcaggagaatggcgtgaacccgggaagcggagc

SEQ ID NO: 171634 - DNA, 630 bp, Homo sapiens
ctgttaactcctcaccgtcagcctccgagaccatgatcattctccctcctgaaacaatgaaagcatggctttgagaagaggcgtaccacctgaggttctgtggccaggacatggcagactgggactagagctggacattttgccccaaggtgatggatcccatcctgagccttatacacttgaggaattttctctaccttcctcacacagaagccacttgctcacttgtgttccatcttgtgtgcttgagctgacatgtgcatacaccacctgttatgggctgaagtgtgtccctgccccaaatttagatgttgaagtcctcactctcagcaccttagaacctaaccatgtttgaagaaaaaatcttctgagaggtaattaagctacaatgaaggcttcagggtgggccttaatccaatgtgactggtgtgcttataagaagaggaaatttggacccatggaaagacaacagaagcatacacagacagagggacaccgcgtgaagacactgtgaaaaggtggccatctgcaagccatggggagaagccttgagagaaactagccctgccaatgccttgattttggactgctagcctctataactgtgagaaaataaatctctgttgttta

SEQ ID NO: 171635 - DNA, 195 bp, Homo sapiens
aggtcccccagatatctcagggtatgcaaacaacagcccagctttctgtgtctagattgtgctcgctggtgggtcacgtgtgggtggctggagtcctagggaaaccccacccacttctctgccctccagcggggcagccaggacgtgaggtctggtccttgagttctgtgtcctctctcacttcaccgctccggt

SEQ ID NO: 171636 - DNA, 383 bp, Homo sapiens
catctttcaaggctcagatcaaagttacctctcttgaagccttcctcaattcctctgaacagaattattcaacttttcttttttgttatcatcatacttctttcatagagacaattttgctgtaattatttttctcatctatcccctgactgggcaaaaggcctatacaatacaagaatggtgatatattcttagtttctgtcccagaactttgcacacaaatgtctctccctcaacaaatatttgaatgaatgaatgatcaaacagagttagattccatcataaggtcacactctccacaaatacaatcatctggtaagtaagaaatcttgtaggacatgctagactcttgtacggcaggggattgaaggagacactgttta

SEQ ID NO: 171637 - DNA, 248 bp, Homo sapiens
aagatgcaaacaatacaaaatagatcaatgtgtcctcagttccattgtccttttcaaggataattactgtgagcagtttgtatgtatttctagtctctatgtttagataacagggccttatttatttattctgcaacttgctttttttttccacttaacagtatattttggtaacttttccatgtcagtaactttttcttttcttttttttctttctttttttttgagatggagtttcgctcttgttg

SEQ ID NO: 171638 - DNA, 203 bp, Homo sapiens
agttccttgtatctctgattttctcctagtccattggctcgcattcgtagtatgccattttccaccctgcaagtaacccatctctatcaaatgtctagaaaaggtagtatttttgagaaatcttaaacatttatagtttggaaaataatttctgtagaaacctgaagaaattactggaaaattctggcattctaaacagaatg

SEQ ID NO: 171639 - DNA, 127 bp, Homo sapiens
gggttgttgcaaagagttcatctaaagaaaactcaacaaatgtgcacttaactttcagaaattgcaggattaataggcatctaattcagtatcaaagaaagtgggcagattaaccccaccatactct

SEQ ID NO: 171640 - DNA, 358 bp, Homo sapiens
ccatgttacccaggctggtctcaaactcctgagctcaagtgatagccccgccttggcctctaaaaggggtgggattacatgtgtgagacactgtgcccagcctcattttatttttaaacaaaatcttcaaaaattgtcctgatttaataagaaaatacaacatcctaaaacatgatattaatatttaccatctttagttgtacagattctttatttctttgtaaagaacattattaggtcttcataagaaatgaaatattgctctttatgagtttaatgcacataagtaatctataattctgtatgaaacttttacaatcccttaagaaatgtcctgcaaatttgataatatcaaatt

SEQ ID NO: 171641 - DNA, 251 bp, Homo sapiens
ttatggtctgtatctaggagacttgcacctctccatttatttgccagggacacctgtccagcacacgtcaaggaatgaggcagtgattgagcggctttggagtctctcttctttccctaacatgggcaggcagaaggaagttcccaaggggcccctcagagggaatctggcagctccaacccaccagcttggctgccatcgtcagcagaagaggacaatcgcataacaccacacacttcctccaggccaca

SEQ ID NO: 171642 - DNA, 978 bp, Homo sapiens
ctccccctcatgagagaaacaaaatgaaatgcaaacatgctttgaaagagcacagtcttgtcctgtccctctgcatcccctctcctcatttctaatgaaaaaaatagtcttccctttccctggttccttcaacagtctcttccttaggttatttttttcctctctcctttcctactccatccagacttccccctgcctaatcttaaagagatgaattggaagaatatgcagtcgtgtcagaaggatgccattgtcagttcacacaggcagacactaataggataaagtattatctgacttcctttaagtccagaaattaagtcttcttgcaatggcaatagattataacttataaccactgtggctggcaggctgcagaaacaggctgttagtatctgaggcctcagctccatttctgggcctattgtgagggatgcactcagcattcctccaaacacagctgcatgatccagggaactggcacttggctcctggatggaactgcctctgtggagagctgcctataactcattcagttcacctgccgtgggagaagctgtctgaatggtcttaatgaacctggatgagtgggcaggtaaagggaggaagccagggtcttgaagactgggaagaagtagcccgaggcaaggaaaccaaactttgcacagggaacacttagtgtgtgaaagctcttctcagtcatccttgctgactcattgagcaggtagtaacttatctagtgactaaatcagcaccagcttagagacacagggaaatgagggttgagaccttaaaggaactgtaaaagagactacaaattaaggagttgccctggagaggaaatatcatgagaaatgttaggaagaaagagccatcattcttcaaaatggagggcctcatgcaggatttcctaggtcctgttatggcagatgagtgtactcaaatggggaatatgggacaggaaacctgatacaataa

SEQ ID NO: 171643 - DNA, 444 bp, Homo sapiens
ctccctgtggagtcaggactcattactctgctgtctttgatgtgtgacaacaggcaccaactatcgccaactagagaagctcaccagagctctgatgttggaagtttttattggggcctcagcatgtagacatgattgactggttggtggattaactgtctacatggttaatcttagtgtccaggtcagctgatactgcgtgaccaaaagctcctaccccgaatcccttgattagtatttctggcatagcaagcccccatcagaaacaaagacattcctcttagaggtaatatagattacctttcagcaccagagggcaaaggccagactactttttaggcaagtacacattctttactacatcccacccatccgtccccgacagggagctggccagaaatggagccctcctgttaaattgtctgggcctgtctttgaggcgca

SEQ ID NO: 171644 - DNA, 202 bp, Homo sapiens
tctctctctctctctctctgtctctctctctcactctctctcaaagatcccctcttcacttcattgggtttgggcacttcatgccatgccaccttcctcctgttgcacggacaaagtcctgcttgggttctaaagcccgcactaggtttatcctctgtgtggatgcccttctcaccttactttgacactctacccaaggctg

SEQ ID NO: 171645 - DNA, 460 bp, Homo sapiens
ctccaaggcacttacaatacagccgacataatacaataacagtatcagtaaacttcctgtatgaccttcattatcttcaataaatttttaaaaaagcttttcaaatccattatataattatttcccattgattttactaaaattctattgattactctatctccatttactcaacttccaaatcatttcctttcctttattcattaagttgaattaacataagttctttacatgattcaagtctataagaagtcgaagggtatgttttttaaagtgcatttttttcattttattaagcaaacaacacatttaaaatcatttcaggacgaggaatggtggctcatgcctgtaatccaagcaattggggggggccaaggtgtgggaactgcttgagcccatgagttcaagaacagcctgggaagtatagcaagactccaccatctctttaggaaaaaaaaaa

SEQ ID NO: 171646 - DNA, 525 bp, Homo sapiens
tgtcattcctgggcttcctttcagatcctttgcttcctccgtctcttttggttttgtctcttttggttttcccctgtttaaggacatcttccaggacctttgctagaaaaggtgaatatatcaagcagataaaatctgaggtcttttatatctgaaaatgctttattctatctttacaactacaagaaatgtgatagttattggctggaaatcattctactctcagatatttctaaactaaacttcattgatgtataatttacatacaataaaatgcacccattttaagttcaacaaattttgtacagttcaacaaattttgagaaaggtataaacccaggactttccactcaaatcaagaaaacagaatatttctatcacctctaaaatttccttcatgttccttggctatcaatcttcctaactcaggcaaacaatgatcagacttctattactacagattagttttgcctgtttgagagcttaaaaaaaatctgaatatatatggcttttttcacttagcat

SEQ ID NO: 171647 - DNA, 215 bp, Homo sapiens
agccattactcgaaaagggtacgttatacctcacatgaccgacagacgaggaagaaacaatcagtttagtcaaaaagaggtatttagaaaatgttctttggccctatagccacccttctcatgttttccagcttttcagtcttggcactgctattccatgataaatatgatcattttcaccttaaacaaacacttgcttgtgcaggaaaagggaa

SEQ ID NO: 171648 - DNA, 333 bp, Homo sapiens
aacaggcatgtggaggtagatggaaaggcattccaaattggagaaaagcttgagcaaggcaaggaggcatgacgtgttcatggtattattgcaaattgtattttaaaacttcattcctgtttgttcctagtatatagaagtataattggtttttgtatattgaccttgtatccagcaacctagctaaattcacttatttctaatagcttgcttgtagatttttttggatattttacacataatgataatctaaataatttccattctgtttctcttttccaatcataatacattttatttttcttacattatagcactagtacaggccagtac

SEQ ID NO: 171649 - DNA, 787 bp, Homo sapiens
ctaattacataggggactatatgataaaagatacgatgttcatgtacaactattatctactatggagtttatatcactttcaagtgcctctgcaaactgttttttagcagggagaaaataagaataaaaatgggaaaatggaaatccaaagatctgattcctttaaagatgctgcaatagaagtagccactgccaggtctgcatctcctggtgcaatcagataatccatctatctagattggatagatacttgaggaggaataattcaaggtaatttccgttacaccactatccatgttttctcaagggaaaaacatgtatttgcttcttttgattaacatgttagtggctgcaactaaaacatcaagtggtcggccgagcagaggttttcctgctggttttacaaaatcagtacagcgggccacctctcagcatcagcttcgcctggatttacaagtaaactcttcagtatggctgaacagggtatgtgggtgtgtgtatattggtagctgtatggaaactggattgctctaataataaacacatttcattccctgcattgagggtgctggatccttgctaaagatccttttttccacttagttccataaatattccggggaagcatggcctagtgtgagttgtcagaatgagaacctgttgtgatatttcatcagcacccactcacagtgcacttactctcctttacctgtaacttacaccttctctgtaccctctggaattaaaccgaagagaaaggatgaaaacaagatgatatgtcagaaaa

SEQ ID NO: 171650 - DNA, 431 bp, Homo sapiens
tctgaggctcagccctcctcggagcccaccatctcgaggctcctggactgtaagggacccctgcagtccccagagcagaggccagcaggggctgagactatgaggcaagcagcccatcgacccaggcctccttaggaccagcccagccacccagcaagcgaaagagcagcagcagagagcagagccggagataaaggaccacagcggaccactggggatcacccccagcagctcctgaagcctctggccgggctgaggggttgcgacagacggccagacccacagacactgacagacacacaacgacaccgatgcacacagctgcacgacactgacacactcagatacaaccagggacagcatcacatactgccacagccctgcaatacagacacccacacacacacacacaaacaactggcaactctgaa

SEQ ID NO: 171651 - DNA, 667 bp, Homo sapiens
gatcctccctcctcagcctcccaaagcagtgggattataggcatgagccttcatgcccagcctgattatccttttgcaggctgctgttttttccacttcatatcaggaatgtctttcctctgtcaaaaaatagagtatggctcagcagtccctaacctttttggcaccagggactggtttcatggaagacagtttttccacagaccgtttcggggcatgatttcaggatgaaactgttcaactttagatcatcaggcactacttagattctcataaggaatgtgcagcctagatcctgcgcatgtgcagttcacaatggggtttgcgctcccgtgagaatctaatgcagccgctaatctgacaggaggcggatctcagtggtaatgaccacttgaccacccctcacctcctgctgtgcagcttggttcctagcagaccacagactccgtgatccaggagttggggacccctgatctacctttttcttttttttttaaattttgtaattaaaaagtcttttttagacagagtctcgctgtgtcacccaggctggagtgcagtggcacaatctcggctcattgcaacctgcacctcccgggttcgagtcgttgacctgcctcagcctcctgagtagctgggattgcaggcagttgccaccacgactggc

SEQ ID NO: 171652 - DNA, 435 bp, Homo sapiens
acattagcagagttaaattttacttaaaaaaaaaaaaagaaaaatcaagggacaggtctagcatcggtatacttatctatttattacaaataacagcaagcatccattatgcacagagaaacccagcagagaggtagagaacaactgctttgaggttatgtcttcaagtctgtaacacagctgctgaaatgatacacaagtaccaaaagaaaatacacaagtaaagcttacattacactacacgttaagaattaccaagcactggccgggcgcggtggctcacgcctgtaatcccagcactttgggagtccaaggcgggtggatcacgaggtcaggaaatcaagaccatcctggctaacaaggtgaaaccccatctctactaaaaatacaaaaaaattagctgggcgtggtggctggcacctgtagtcccagcta

SEQ ID NO: 171653 - DNA, 992 bp, Homo sapiens
gagacaggctccagcgaccccttgggaactcgcccccagcactacccacccccacagccatacttcatcaccaacagcaaaacagaagtgactgtctgagctttcaccacagggagcaccctggagaccacactcaactgagagaggcaaaaaacaaccccgcccacaccctccccatcctcccctaatacatgcgtccacacactcactctcaacaagaaccaactctaaacctactggggacacagagtcgcgcttttcctaggtcatgcctgtaacgtgtcggcgggcagctgagaaagaccgaagcgtggacattcagcaatacagcaaaggggaaaatgaggcacactctttccacttcaggcccaagatggccaactcacatgcccaaaccgtggggctgagttttcttttcctcctaacttgaaactgaaatccatggtgacaaaatataaaagtagcacaatttagagaaattgtccatttgagcacatacactacttgccacgtgctgtctgtttctaggttcgaaagccagggtggaaatgggggtagagaatgagggaggacacaagagaagagtgtattctggaagaggagttgttctgggaggaatttgcccacattagaagcatttttctaattccaagaagtggtgacgtggacgtaaaattttgacgagcatgaaacagtaactggaccccaaccattctatttatagtacttttcatatcatccatgttgaaagcaaaaaacaacacaccctcaaactcacagaaagtaaatagaccctgaacccaccgacaatgatgggaaggaaaaaacaaaaaacaaaaaacattttagagaactcccataaggaccatgaccgtggaaatgggagggatgggcttttacggagagggtccggagagtatcaaataactttttaaaaagaggattaaaatgtaagcccactacaaaacagataaaaacggcaaattaggtgt

SEQ ID NO: 171654 - DNA, 273 bp, Homo sapiens
tttcagaacaattttaatggaatagttttgtttattattaaaggtagaatgttgagatatttattggtatcagtagaaaccaagacattttcagaaaatatgaatgtaaacttaagttataaaaaaattaataatactttacctgttataaaaataaataaaccatccctggttttttcttttttataatttcagaggagtttcccttaacatcagtccttagaaaaatctcaccatgtattccaggtcacatttaaagagacattctaattt

SEQ ID NO: 171655 - DNA, 287 bp, Homo sapiens
gactgtctttagcaagccctgttcctaagggaatataagtagctttatataagctctttattctgcttaatacctttttctgtttctggacttagcatatacataaattattaaaatctttttctaatacatgcaaaagtgagatggggcatgtagaatatgaatggtacacgacatattttggtgaaagggttttatttccaaatgtaactatttaacttacaatgagttgtatttaatgatgaaattaaaaagcaaattaagtatccccattatgttctaaataa

SEQ ID NO: 171656 - DNA, 470 bp, Homo sapiens
tattgtggtgaattccagcctactcatgttgccttggggattttccccactgaaggagcatatattaactgatgccagctcagatcagagatcagagatgacaggacacagtccctgtccccaaggaaatactagtctggtctgtaaacaaatccagttcaactttggctaccacacacgctgaagacagagttaccctacagaaaagagagacagagctattcaagtcaccaggatttcccatctcacacttcggaaaaactttaaatatttctttaagttgaattaaaataatagcatgatgacaacaatagataatttattgagacatttctatgtgttaagcaaggtgcaaagtgcgttctgagtattaacccattgacctccttttttctgagatggaatctcactctgttgcccaggctggagtgcagtggtgcaatctcagctcactgcaacctctgcctccc

SEQ ID NO: 171657 - DNA, 649 bp, Homo sapiens
gcctcccaggaagctgcagaggaaacccctccaatctgcaccccaggagcctcagacaggaaccccttgagttatgcggcacgctcagcacgagttcctcgtccagaaaccctgacgacgcagaggtgccccacaggagctgggcccgagaggctcagccttgcctccgagtggaagcatgtccacactgccgctcggacaggtttaagtgacagcaggaatgtcatgggcccctggcctgtgtgaggagtggaatcctttccttctttccagtatttattgagcgcccaactttgtacaaacaccgtgccaggtgctggaggtcgtgaggtcacaaggggctgggcctctgtactgggggtccctccccagggtagaggttggcagctacccggggtgtccagcctcacttccccacacccgtggggcctcaccatcaggcttggcgctagttcctgctcacccggacttagcttcacaatatttctcagctcagctttccaggctccaccaggtcagtgcaggctggcgcacaaatggacacacctagaccgcctctggtctaacgctttcaccaggactacggctggatcccaaactgttttatcaagggataccaggggtgggtgcctcagtctgacccagccgg

SEQ ID NO: 171658 - DNA, 540 bp, Homo sapiens
agacctaagtggggaccattttaggactaacaaattggaagccagtaataaaagacgggcacaagggacaagtcaaacactggcataaaggggagatttgagatattgttagtcagtgccgagaaaaacaacacaacatgactcaagcaattagggagaaaatcattaatatagagcaaatccaacttaaaaaaatgctatccctgacacaaagagcttcagcaccaaataaatacagtgaaaaatattcaagtacataatacagaagaatggccttgaaattaagaaatcaccacatctgcagatctaaaaagtactctatattccttgaaaaattgtttcagaataatgggtgctgaaacatatgcatactaagtaatctagcattgaggataaagtaaaaaatatctagcatctagggaaaaaataaagagaagtccccggaaataaataaaataatataaataaaagataatctcagacttctccaaggtaacattcaatgctagatgatattagagcagtgtttaccagaatttg

SEQ ID NO: 171659 - DNA, 689 bp, Homo sapiens
ttccccaacccactgggcctaccggcactaaaaaggtcactttgtccctggatgaccaaacacaggccaatgtaacttactgggcttgttttgccccagccatagctgaccacttcctccttcactcttgttgttgatcacctttgggcttagtctttctccatctctgttgagtccttctcccctgccacctactccttcatgctggggttctctgtagctctgtacctgacagtcacgttccaccctttcctcccagaagctcgccaacccccgtggactgctggctctcaaggcggccactagcccagctccgacagcagctgacaatgcacagtatgcggcccagggcaggccctgtgctgagaggcatgggtgaatggctcatttcatcggcaagcccccgccaccagcaggcgccgttctcctcgcatttctcaggggaggaacctgagacaatgaggttaaggaagttgttcattacaagtggaagaaccctgacttacttgaattcaactttgaagcccacattctctttttctgtgtgtgtgacagggtctcactttgtcacccaggccgcagtgcagtggtgtgaacacagctcattgcagtctcaacctccctgactcaagcaatcctcctgccttagcctcctgagtagctgggactacaagcatgtgccaccacgc

SEQ ID NO: 171660 - DNA, 223 bp, Homo sapiens
tcacaaatttaatacaaggacctaactcttgattctctccacaacgccaaacctgtttttcctctaattgtccccacctcagtcaactatattatccacctagctgcctaagccagaaacctaggaattatcccagattattattcttttttttgttttgttttgttttttgtttttgactcactcactctgctcaggctggagtgcagtagcgtgatctctg

SEQ ID NO: 171661 - DNA, 673 bp, Homo sapiens
gtcttccacttccggattattcaatttatgttaggacaaatcttgactagatcaacctgttttccatcagataattttaaaacaatgtgtaatcttgtttgtctacattctctccccagtttagctgtatttgaattactaaatgctttatcgtcaaactgtacctagtctaacttatttttcttttgctgtcgttttacaagcattttaaaattctaatattcatctctggtggtgtttaacacaaggttctcttattcaagtttcaatataaaagtttttggattatttgggtgctagtttcttgcttggttatctgttcgtttttttaagttgatttgtaatttccaaagagttatgcatacagcaataaaattattaatatgcctcccttatcttttctgaattgtaagcaagggggaggttttagactgtaaaaccaaagttatcaaatctagttattatcatcctgtattggaggagatacaattcttttattttcacaatgttaaaatatgttttcattctccatttcctagctatctttttttaatgtgtactgaggaacctactctctggaccactaattatagatgctagagcccagccttgaccaggtggttagccccacaaatgaacagatgataaaaagctgcatttttagttcttattt

SEQ ID NO: 171662 - DNA, 148 bp, Homo sapiens
aattttaccatgttcttattcatattgtatattttatctgccaaggactggtaaagaagtatgaaagtctcatgcaactatagtattgcctttgggttctccttgtattttcagcagttatttatttattttgagacagggtcttgct

SEQ ID NO: 171663 - DNA, 103 bp, Homo sapiens
acttgcttaatgaactgaaattgatgtccttgggaaaaaaatctcctatgctagccttaaaggagattgttataactactcagtgttaagttcattaaacaaa

SEQ ID NO: 171664 - DNA, 369 bp, Homo sapiens
agctggtccaggctgtgtaaagtgaacaggcagagattccagccaggcctgagtccattctctccccagtccctggcctggcctcacctcctgcccatgtgctttctctcaacttgtcgcagaaaacaaagtttaagatccctgtctttcatggctccccataaaaaggctgaatctagaagtgaagaacttgaaatcctccagtcagggtcaagcccttatctgagcgcattgaaaggaaggagaggaaggggaatgggttggtgaggagttagaagcctctggccgggtgtggtggctcatgcctgtaatctcatcactttggaaggctgaggcaggcggatcacttgaggtcaggagttcaagacc

SEQ ID NO: 171665 - DNA, 208 bp, Homo sapiens
aatgcaaatctcattggcattttttttgctgaagtagaaaagaaattctaaagttcatgtagaatctcaaatgacctgaatagctaaaacaatcttgagaaagaaaaaaacaaaaacaaaaactggaagcctcacactttccaacttgaaaacaaattatacaagtacagtaatgaaagcagtatgatattggcataaacacggacat

SEQ ID NO: 171666 - DNA, 585 bp, Homo sapiens
agagtaaaacaatttttattattctatttcacagcagacaaattctcccaaatgattattgtaaataaacaaaaagtatactacaagtgtatttccataatactaatgtaaagaatataggaaaacaatatgattacttttaccaatattatatattttgatgttgtcattcgatagtggaggaaacaattatgaagagagtggaatggagctgcaagtacccatgctcaaagaaataggaaataagcctgaaagacttgcctttaccccatgtgttcttcccttccatcacatacaatcccaactcaacttgttgatctacttattttatattttatgttagtttataatttcaacttttattttagattcagggtgggtatatgtgcaagttcgttacctgggtatattatgtgatgctgaagtttggggtatgattgaacccatcacccaggaagtcagcatagtgctcaacagttagtttttcacctcttgccaccctccaggggaaaacctccctcccttccagtagtccccactctcatttgttgccatctttatgtccatgagtaccccacatttagc

SEQ ID NO: 171667 - DNA, 430 bp, Homo sapiens
tgggaggcttggtgctggctgaggtgtgtcagtgactgccacgggctgcacccctcactgttgcctgaagtcacccaaggtcgcccaaggtcagtgggaaatatccagggatgacggtggatcctgggagcgcctcacaacagctaccttcggcacagcacgactttggaaggcctaaagtttgaaccaaaaatggagcccctgccgctctccccatatgggattcaaattgaaaagctacaaggaatgaatgctatggataaactgctgaagatggttcctgtccatttgactctgaagggtgtcttctttcacgttgaagaacaggagacaatcaaaatgtgaaacgtatgctgaagccaaccagaacatcaaaggacagtcaaaagcgctaaccatgaaactatatttctactaatacattctttta

SEQ ID NO: 171668 - DNA, 295 bp, Homo sapiens
tcagagggtaggtaagaaggatgtcaacagtctttcctcaagacagctcagactattaagtgatttgcataaatcaaggttattgatttaacaagtctggttatttggtttctctggtaacctttggttctattctagtagtaatcagattaggaatttaagaagaatgagggagctccccaacaaaggtgacagccccaaaaagtaattgataatactgagggggaaaccccaagatatatagagcagaaaagaacagggctgggcgtggtggctcacgcctgtaatcccagca

SEQ ID NO: 171669 - DNA, 494 bp, Homo sapiens
gatgggagcttcccaaacagtggaagcgctgagcacagcagcgagactccatgggggaagccccgctgggcaggagctgtgtgttggggctaagaatgcagctgggcgtccactcacagccagatgctcacgagaaccccgctgcttaagggcaggcaggagggtgttctgatgggatgggggcacggacccccagggtgggcgaaaacagctcccactatctctgtggagcacacgacaagctcgcttggcctcctggcgccatacgtggcccatggctctcaaagcgtcaactgtcagagcccctggagtgtgtgcgaggcctgggtgacatccggggatggggccaggccctcctgcccagcagggtgctgatggggaatcagggcaagagcctagagtgctcggcagcgacgggtgccaggcacgcagaggccacgtgagggagcacccagtccaggctccgggcagctgtaagccgggatgactggggc

SEQ ID NO: 171670 - DNA, 239 bp, Homo sapiens
ctgtctcatgtcaatccctttgtgaaaattagagcttttaaagtctaggtttagcttgcttaaactgagaaatggccaggcaaatagtcatgtcagtagaaatataacatctaaaagtcaagatctttttcccttcctttagttgtcattatttgtgaaatttcacaccagaagacaattgtgattttttttgaaccagaaagattgtgaaaattagctcgtattagacctgtgatgaa

SEQ ID NO: 171671 - DNA, 288 bp, Homo sapiens
ccctggcccagcaggtggcctcccggatcccctcgcttctggagccccaggcatgctgtcggacacccagccctgctacctggacctgaggaatccagtcttttggaaatcggaagactggaaagaagagctgggtctgtgagggtggcagtggccagtctggggggtgcagaggaggcacatcatgaagcctgacaccagggtactcgtcacgtgatccaggggtggtgggcagcagtgctttgccaaagtacatgtatcggtctgtgtcagggctacagctcccag

SEQ ID NO: 171672 - DNA, 668 bp, Homo sapiens
tctttaactgcaacctttattaggatatgacccactgtacacattttaaacaggaatcctacatttctccaaaagtgagacataatctaaactatggctgcaattggactgaatcagtaatatactgaacaacactgaatagaaagcagcaccatacaattgcatctaactattgcagttaaaaagatttgaaaataaaaaaagcaaattactcttctgaataagaagccatgtcaattacacgaatatattcttacaatatgcaagactggacataatggaaactttgacaaaaactgaacaatcatggaataactatatatccatttcaaattttaaagtcttggccgggcgcagtggctcacgtctgtaatcccagcactttgggaggccaaggtgggcagatctcctgaggtcagatcgaggctatcctggctaacacaagtgaaaccccaatctctactaaaaaaaaaaaaaaaaaagaaaaaaaaaaaacatttggtggggacgccctgggccctgagaaaaaagttttctataaacccctcgcggtggggcgcggggcccagtggtcagggtgacccggggccaaggcgggttgccaagagaaaccccggggcaaggacaagggcgtgggtttcctccccaaataaaaaaagccccggggc

SEQ ID NO: 171673 - DNA, 504 bp, Homo sapiens
taactatggagaagacattgaaaccctagcaggaatttcctggatgacaacagatgctttacataatttaaggatactgggatttattcaggtttgaatacgtttgttgagctacaggaatgccacaggggttgtcccttataacccagaggatcagggtctctgttgagatagaggcatgggcagcggcagcagcagaggtacttaaaggtccagctgagtgtgaacttcaggacaccatctaatggtagcttccccaccttctcttctttcgcattttttcttttttcttttttttgagatggagtctcgctctgctgcccaggtttatgtgcagtagggcaatcttagctcaccgcaacctccacctcccaggttcaagtgatactcctgcctcagtctcctgagtagctgtgattacaggtgtaaaccaccacgcctagccttctttctcacttttttttttttttttttgagacggagtcttactctgtcgcccaggct

SEQ ID NO: 171674 - DNA, 401 bp, Homo sapiens
tcatcttagctaggttccccaggttccctacacaacaccccagactgctcttgcttcctcagacatacccttcatgggcagagccttgcaactgacataggccagaatacccttgtgccacacttatgaaaagctaaaatgtgataacctttgtaaaatattccttgatttccttaacttattattattaacatccagaatttatttctccctttgacctcttatggactttataccttaattatgattcatatttggtaccctactgtcatttatatatctgtgtttcacattagattctgtgtgtttttagactaggatattatctgtctatttattcttagatttagcacagtacttgcaggtagttaagtacacaataaatgttcattgttaattta

SEQ ID NO: 171675 - DNA, 365 bp, Homo sapiens
aggccacggtcagcgctcagcccctcccctgtgtgtgagaaacagattcaatccacggtggtcagacatgggcgtctgccccacaggtgagtgtgaggctggcattggtcccatccctgctgggcacaatcttgagctgacactgagtttgggggagtggggcaggagcagcggcaacaatccccttcatcaggctgatgcctggacagccgtgggagaaaccctttatgaaaggtcaggtgcgtgggaggagccgccccacaggaatgacaaccatatgaggacaaaatagacagttgttgaaatgcattagacagacatcgtgaaggtgaaaaactatattaaattaacgccattaaaaagga

SEQ ID NO: 171676 - DNA, 415 bp, Homo sapiens
gcctcccactctgtaaaaacacaggagccctatgccaagcagccatggttagttagctctttgacctcattttctaccactgtccatttgaatgcccctgccacgccagtctctctgctgttcctcctttcacattctgcagcgcattgttttcttcctattttctccccctccaatggtccctgacatctgacgtgggtccctgaccacctcgactcaaatcttacctcatcagcaaggtttccctgaccatccaattaaattgcaacccctcagcacacactcacttgtctccctttctttccattctttctccatagcagttatcaccatcatacacaggatttgtttgggtaaattgtcttgtttcttttatctcccctatgtttcatcttagtgcaggcagggatttttg

SEQ ID NO: 171677 - DNA, 352 bp, Homo sapiens
gaggttcagcgagagcactgaagcagagcgctgggtgcacggtagctggggcttccagtagctggctctgagttgaagattcaagggcaggtgggatcaggtggggtgaggggatacctgggaggtgaccccaggaagctcctggtagggaatgggacatgagacaggaagggaaggagccctacagggggcaccaactgccaacagacatgacacatgtggatgagtggcgctcagccccgcctgggacagctgggggacagtgtagatgctcatctcagaggggtcccactcaggggcgaggagcgtggggtgttttggtttgggtttttttttttttttttttagacgg

SEQ ID NO: 171678 - DNA, 333 bp, Homo sapiens
ggtgagagcaagggtcaaatatcaaacgacaaggcctgtataatgtaggctgtctaatagaagacactctctacaataaaggggagccaaggagctaccaaatctgagtaggtgtgaactaggggtaaaccaacccttttgtagatttgtagcttgagtttgcatcatttgggtaattcagagaacctcaacccttgaacttgattaatattgcttctagactggatgcaaacccaggtacttttcagaagcaaataacattcactaaaggaaggtgccttctatttagacttcaaattatcacagaaaatatattttcagtatcatgacaag

SEQ ID NO: 171679 - DNA, 454 bp, Homo sapiens
acatcgcagtgatcgagctcggaccagggttgcttggattcccagaggaggagacatctgtgctgggttttagaggatgtgtaggagttcactgaagaataaaggaacagtccatgaagagggaacagcatctgggtaggcatgaaggaaaaagagacaatggtatgctctgtgctcaggagggctggtagaagcgtgggatgtacagactgggcttacatttgggagcattttgggctcagcattttgggaggctgaggtaggtggatcatttgaggccagtagttcgaaaccagcctggccaacatagtaaaaccccgtttataccaaaaatccaaaatattagccaggcatggtggcatgggcctgtagttccagctactcaggaggctgagccaggagaattgcttgaacccgggaagcggaggttgcagtgaaccaagatcacaccact

SEQ ID NO: 171680 - DNA, 152 bp, Homo sapiens
gccccagcctccctacattgaatttgaaaggatctttagtgtcaggattgttcagattccagataagagtaattcagaggtatagtgaattcagctgtttctaatgtattgggagggcggaggagggagatgcaaagtgtcctaggggtttc

SEQ ID NO: 171681 - DNA, 442 bp, Homo sapiens
cacccacctctcagtgatggaggagtttttgaatcatgcaggttcttggctcggagacagcatggtctatacagaagcagcttggatttgtcaagacctcagttcaccacgcagctctgctgcattttgagtacctgtgggtaaatgacctcacctcttcagccttatctgtacaatagggatgataacactcagcttacttcacaggcttgttgtagggagaaggtgatctattgtttcctaaagctgtttttgaaaacggtgactcactctacagatatgatttgtgtcttctgttttctcctgcctgatgttttccattttggcaacttagaatctaggcatacctcaggtagagcttgctgacacactggtctatttttgaggtgggtaatactaatattgagttcaagagaattttttcccccctctgaactatgct

SEQ ID NO: 171682 - DNA, 362 bp, Homo sapiens
ggaggctgagacaggagaattgcctgaacctgggaggcaggttgcagttgcagtgagccgagatgacacaactgtactccagagcctggacgagacagagtaagactccatcaaaaaaagaaaaggaaagggaaagggaaagagaaagaaaaaggaaaaaggaaaaggaaaggaaaggaaaatagagctctataaatcaatacaaataaggacaacctaatggggaaaacatgagcaaaaagccagttctcaaaaattaaagagccacaaatcacatgaaaacatagccaggttctcttgtaatcaaaatgcaagattagaacaaagctggcacctcttgcccattggccaatatataatga

SEQ ID NO: 171683 - DNA, 391 bp, Homo sapiens
tataagttttggtaggctgtgttgtgttcattcatctataagtattttctaatttccatgtgatttcttctttgattcactgattgttaaattccacaattttgtgacctttccagttttacctgttattgatttttaacttcatcccattgtggttggagaagatactttgatatctattttttaaatccactgatatttaatctgtagcctaacatatggtgtatcctggaaaatgtcctacatacacttgaaaagaatgtgtatgctattgctgttaggtaggattctgtctgtgtctgtgagatctagttggtttactgtgttaagtccactatttccttacttattttctgtctggttgttctatccattattgagagggggtact

SEQ ID NO: 171684 - DNA, 525 bp, Homo sapiens
ctgatgtgcagggactccctaaatatgtgcacatagcaagtatggggtcatcattctagcccagctgtgacatatttattcctaaaggtaatatttatctctgaaagttttaggagttaagtgttgatgactatttattcccttgctgtagagcatcccttaggagtgaactcagaagatcattaggcagagatagctcaaattcttttttcctacacttgctttgattctgtaagttgtttcttttctgccaacctgctctataatttgagtcagcctagctaactgggtcatacaatctaattctgaaataaggcctgtcaagggaaaacattttccccagtaatggggaaaaggtacttgaatttctaacatcattctttaagtgattgaaaatgtcgtgaactcttgcttcactgacttctgcctctcctgccccaaggtctttgcacgtccctaaagatgtaattcagctggaatttgtggttgtggagtctatgttacatgaagacaaatcgaaagaga

SEQ ID NO: 171685 - DNA, 469 bp, Homo sapiens
agcaacatttcaagttcccctagccacagttttagggtagctagtgctgctgtattgaatagtgtagccttagactttcaactgctaggactagggctgactttgtagttaaatagccagtccccatccagacatccccagatatactttatcccaaagaaattttttaaaaaatgcaaatactactaaaaagggccattagcaattctcagcaaacaccatattgctttgattcaaatccatattctctatgattctcccatttaaaaatttctgggattggagtttcatatgggatttgtatgtattatgtagtagtgttttttaccctttcttaaaagctattatcagatttatgatttgtctcagtgatgacattgtagaatgctgcatttttgtcacctattaaaataattatgtgatttgttaatagcaagtttgagcacagggacactttcatttttctacc

SEQ ID NO: 171686 - DNA, 589 bp, Homo sapiens
ctattcgataaaacataaattgaagtcccccaccccccacaatgaagttgttccagttccctccactgcatgtcacaaactgaatcctaagtatgcttctagaacaaatcacactgtaccctggttatctgtttacttgtgtcacttggctagattttaagcacctcagaggcaaggacctgtcttcatctgcatttactcagcaactaggacagtatctagcatacagctcaaattactacatacttatctatcaaatagattcatgaatgaagcaagtttctagctaccatctttgaaaatggatcaactgaaattaaatgcaaatgtgtacctatacagcattaagatcaaagatttgggatctcaacatcagagtccccaaagtgtaaaatatccagatctgttttaaaatctctcaaactttgatgggcatacaaaccacctgaggatctcataaaatgcaggttctgcttcagtaggtcaggatggggcctaagagtccacatttctttttttctttttcttttttttttgagacagagtctcgctctgttgcccaggctggagtgcagtggtgctatcttgg

SEQ ID NO: 171687 - DNA, 256 bp, Homo sapiens
aggttcaaccccgatagcaatcaaagaaatgcaaatagaaacaatgacaacacgtcagctcctccctcccgcagtaaattatgaaagatttttcaaataacactcaaagctggccaaggtgttccctctcctccaaagctaggaggagtggccgttggcacaacatttccggaacaccatttgtcaatctgcaccaagagcctctgacccagaaattgcacttctggaaagcaagcctaaagaaacaactgctaga

SEQ ID NO: 171688 - DNA, 360 bp, Homo sapiens
aatagccagggtgtcatgggggtgcaggtaagagcctagagggagggaccccacctcaacctgggagtaatggggaatacttgaaagagcatgtaaccttgagctgaaccgtgaaagagtagcatgagtaaaggtgcaggggcatagaagagccaggaaacatatgtttcaggtggctgcagtgaggacaggctggagatgaggtctaatgtaaaaaggggacagataatggtgtgtggggaatttggactcatccttactctagagtcagtgaaagattttaaatggttagatttaggtttaccccctcctttccttttttcttccctttctaataatcattttggtagtggacgctag

SEQ ID NO: 171689 - DNA, 448 bp, Homo sapiens
gcttctgttgacctggtagggctggttggcttggtccagttggtgaaatgcctctgcaaaaggttacctgcatggtaaggagaagaagtagagcgtggcgggggaaagggagctggtggctcactttgggggctagtcactaatttggagggagagggggtgactggctttatggatgggtctttctgtactttggtggtaggactgtctgtggtctgaggtgcttcagcctcaccactaggctgagatgtaaagagagatttgggccggactggcgtactcttaggtgtgctcttagcaacatcagcatctggaggaatggcataaagctcttccacactgcaagctttagggccagatacagctatgtccagaagaacctattggagttcgatacaccggcaatcatcagagagccctgggcgtacgggatagtatgggatcacac

SEQ ID NO: 171690 - DNA, 492 bp, Homo sapiens
cctcagcctcccgagtagtagggattacaggcatgcgccactacgcccggctaattttgtatttttagtagagatggggtttctccatgttggtcgggctggtctcaaactcccgagctcagtgattcacctgccttggcctcccaagttattattttttttatgagacttgatcttgttgtgttgtccaggctggtctcaaactcctgggctcaagcaatccttctgcctcagcctcccaaatatctgggatgacaagtatgcgccaccgtgtctggctattttaattttaataggagttattttatattctcgctatcttcttccattctgtttgccttttttatagggtcttttattttttgaatttgaatttttgaattttatgaatctctgtggtaagtactctcgttttaagaatctttctgggctgggcgctgtagctcacacctgtaatcccagtactgtgggaggatcactcgagcccaggag

SEQ ID NO: 171691 - DNA, 216 bp, Homo sapiens
acacaggattaagaagtaggtaaacttctgaaagttcagtatactagaagcactcaaaccagtaatatgccaacaacctgatgcactgccaaaagaaaatgtgaagttttcctaatagttgtattttagtacagtggtgaaactggaaagggcacttggggtttattagaacgaggcagagtataccccaatgtccctttctctaaatgcagtgga

SEQ ID NO: 171692 - DNA, 176 bp, Homo sapiens
agtagagacggggtttgaccgtgttagccaggatggtctcgatctcctgaccttgtgatccacccgcctcggcctcccaaagtgctgggcttaggggcatgagccaccgtgcccagccgataattatcaatttttagcattaagctttccatttttgtctggcacctgagagttaa

SEQ ID NO: 171693 - DNA, 840 bp, Homo sapiens
tgcctgattttcacacttactagaaagctacattactcaagacagtgtggtattggccgaaggataaacatattattaatggtatagaaaatagttcagaaataggcccagacacatatatttatctgattttcagcaaaactgctaaggcaattcagtggaggaaactggtaatctttttaacaaatgatttttggacaattggacatctgaatgcaaaacaatgaatcttaacctttaagtgggcaatgatttcttagacatacagaaccaaactgtgaaagaaaaaataaaccagctgtacatcatccaaattaaaaacttttgatcttcaaaagtcactgttaacacaattcctatcaaaatcttagcattattttttgtagacatggacaaatttattctaaaatgtatatagaattatgaagtaactggaaacaattttgagtaagaagaatagagctgaaaaaaatcacaccactagattctaactaagacgtaacatacagcattatactcaggacactgtggtattgatcaaaagatagatcagtgaaacagaattaaaagtccagaagtagacccgtacaagtagagccaactgaagtttgacaaagatgcaaaagtaattcagtggggagaaatgatgctttttgcaacaaatggtattagtataattagataataaccaaagaaataaactttgacttaaaactcttatacaacagttatcatagatctaaatgtaaagtgtgaactataaaacttttataaggaaacaaaagagaagatctttttgatctagggccaggtgaacatttcttgtaccaaatccataaa

SEQ ID NO: 171694 - DNA, 690 bp, Homo sapiens
tgcgtgctaccgtacaagctgctaaccataatggttttattatccctgacagcagcaatccaccagcatcagccacccacatgttgcccttgagactgccaaatctgtaaacgctctgaggctccacagaggggctggaaagtccgtgtggctttgcttcctaacagtcttgcctgtcatgtgtaatagacaggggcctgctggcttctggctctctagaaaacagtcttaaaagctttccccaagtcccaagatgggttaaaaccatcacctaaaaccataaagtttttaaaatctcacaatctcaaaatgtaaaattaactccaagttacacaaacaaaaataaggcaaaaaaggggtcattttcaagatcaatttcccattttatgaacattaaaacatttcatcaaaatccagattctggatgttgccatagctccctgagacagaaaaataatattgaggaaaaaaccccactcatttacccttgatagcttttccaatggaattccttcactactctgaaaccacactatgccttgaatatgccagcaaaaggcatttttgtaataaaaatgtttttcatggcaagacctaaaaagtatcaacacgaccagacgttaatgtatgtgacagcaaaccagggaggtagtacacttttaaataaactgctgcccttataaaaagcta

SEQ ID NO: 171695 - DNA, 439 bp, Homo sapiens
aaaccctgtcattctcaccagggaagcccaaccagccccatcacaagctcttccttcgtcacctggatctcgtcagcctctctgccacccaagggtcccatcaccccacagcctagccgggccccctttccactcttccaccacgttccctgcagcctctctgagacttcaaggctctcgcaccggcgcctctgaaacccccggcccgcagagggcgccgcgtcaaggacagcgcgggcagactcgggagggggcggggccgcagccacggtcgctttttatgaatgggggagcgggcggtgcgaggccttattactatgccgcgcaacgcgcgctgcgccccagcgcgccgcgcccattggctgatcggaccgctgacgtcaccgaaccggtggccgggggcggggcggggtgactcacgccgcttctcccgcggccg

SEQ ID NO: 171696 - DNA, 458 bp, Homo sapiens
tttctttggcaatctcaattgcaaatgaggataaggaaaatcctcccagctcacactctgctcccagctacttgttcttgagttaaatgagggcttggctctggcctcagggggcaagagcactgttcgttatttggtggtgggggagggggttgggggatccgtcagcacttacatgcctttagagaatctgcctttacagaacttgaagagctctgatggaggaacagagatgctgtggtggtagtggccttggaggtggtggtagtggcaatggtgatgatgatgatgatgaaagaagaagaaaacggtgatggtaaatgtcatctataaacacaagcaaaaagcagcaacagatacctttctagtcattgccaaccatagtcatgaagctgcttctgttcccaatgcaatcccattgtggtgctccccctctgcgctaaacacatccagcttca

SEQ ID NO: 171697 - DNA, 409 bp, Homo sapiens
cagtccctgctttcagagaattcagagtcaactgagggagaaagcaatgtaaacaatcactatgctagacagactatgataaatcccatagtagatgtgtgtacaggatacagcaatcaatattatagttaatgtttattggacagttaatacatgccagacattcttctacacatatacatactctcatttaaacatttctatgagggagacctatatctatttttacacaagaggggaatgagtatcagagagattaggtaacttgttcagggtcacagagctagtaagtggcagcaggatggtaaacccagtgccacctgatttcaaagcctatattcctaaccgtatgtctattctggtcttgtaactctttgaggatctcatgacaactatagatatatgccca

SEQ ID NO: 171698 - DNA, 225 bp, Homo sapiens
catgcaaaggaaattttaggcactggcagaacagaggtggggcattatagagatctgccagctgtttccttaaataatgcaaatctccttacaacgtggcaagacttcaaactgttttcactaatttctcagggaaaaaaaaaaagacaaaagtaatctgaaagtgggggggatggaaaattccaaaagctaccccattagtaatactgagtgactgaaggaata

SEQ ID NO: 171699 - DNA, 488 bp, Homo sapiens
ggcgccatcttggcttactgcaacttctgcctcccgggttcaagcgatttcaagaaattgtatgtgaaacaatttcttgatgtgaagtaggggtccagtttcattcttctgcatgtggctatccagttgttccagcatcatttattgaaaaggctattatttgtctattggatggtcttggcacccttgttgaaaatcagttgaccatagattaatggtttttttgttttgttttgttttgtttttggactctcaagtttattccattcatctttatgtcttatcctgtgctagcaccagactgtctggattacagttgttttgtaataaattttgtacttgggaagcagttttgctattttgttctttttttttttttttcaaattgttttggctattttgggctccttgcaatgccatatgattctaataatttgaatcttctttctttttttcttggtcaatctagagtcctttgttttcttgca

SEQ ID NO: 171700 - DNA, 265 bp, Homo sapiens
ggtgggaggtggagctgggagtagcaagatcgcaccaccacacccggcctgtgattcattttgacttaatttttgtttaagaccagaggtatatgttgaggttcttttctttttttcacatgtagatatctagttattccagcaccatttgttgaaagaactatctttcctcaattgcattgccttggcacctttgtcaaaaatcagttgactgtatttttatgggtctgtttctagactgttgcattctgtgtatctgtccttt

SEQ ID NO: 171701 - DNA, 675 bp, Homo sapiens
gccttccaagtagctgggactaccggcgcccgccatcgcgcccagctcatttttttgtatttttagtagagagggggtttcaccgttttagccaggatggtctcgatatcctgaccttgtgatccgcccgcctcggcctctcaaagtgctgggattacaggcgtgagccaccgcgcccgacctattggtttctttttttgacacggagtctcactctgccacccagggtggagtgcagtgatgcaacgtctccctcttgggttcaagcaattctcctgcctcaggctcccaagtagctgggattacagaaaactcttgagttctccctgaaaggagactaaagaacaatcctctgcagatgtgtctgaatcctaaaatgaacttaaggatacatgtgcaggacgtgctgattagatttttgccagtgaagagtgacagatacaatgagaagatatccctctgtaagtcggcgaatgggccctcatcagacattggatctgtgtgcaccttgatcaagaatttcccagcttccaaaactgcaagaaataaatgtttgttgtttaagccacccagtttgtggaaagttgttaaagtaacccaaactaattaagatgaggacgatcaaaaagttcaaaggatttgagaaataaagcactggggcagattgtaactgta

SEQ ID NO: 171702 - DNA, 525 bp, Homo sapiens
gggattacaggcatgtgccacaacacccagctaattttgtagtttttttttagtagagacagggtttggtcaggctggtcttgaactcctgacctcaggtgatccacccacctctgcctcccatagtgctgggattacaggtgtgagccactgagcctggcctctttgttgactttttgtcttaatgacctgtctagtgctgtcagtggagtgttgaagtccccccctattattatgttgctgtctctctcatttcttaggtctagtagtaattgttttataaatttgggagctccagtgttaggtgcatatatatttaggatagtggaattttccttttggactagtccttttatcattatataatgtcactctttatcttttttaaccattgttgttttaaagtctgttttgtctaatataaaaatagctactcttgcttgcttttggtgtccatttgcatggaatatctctttccactccttcagcttaagtttatgtgaggccttatgtgttgggtgagtc

SEQ ID NO: 171703 - DNA, 213 bp, Homo sapiens
tgtttgtttgtttttgttcctcacaaataccagatgtcattgtatttttccttctttcttatcagtgcaccctggaaactgcttcagattagttcatagggattagcctcattcttttttatggctgcatagcactccactatgtgtatctatcagtgtttagtgaaatagtctcctatgttcatttaatttccaatattttgtctttttttt

SEQ ID NO: 171704 - DNA, 301 bp, Homo sapiens
tgagctcaggcaatccacctgcctcagcctcccaaagtgctgggattacaggcgtgagccactgtgcccagcctacagggagcactttagctgtgttaattgagaaggttgttcagtgtatctaatcctaccatacaactaaaaatggaagaccctattaagctccttgagttctaaaaacctcatgtagggtgggcgcagtggctcacacctgtaatcccaaaactttgggaggccgaaatggccgagatcgcgccactgcactccagccttggtgacagagcaaggctccatctcccca

SEQ ID NO: 171705 - DNA, 372 bp, Homo sapiens
gtgactgtggacagcccctcagcagggggtcatgcctgtggacagccccgcagcagggggatcatgcctgtaaacagccccacagcaggaggatcatgcatgtaaacagccccacagcagggggtcatgcctgtggacagcccctcagcagggggtcgtgcctgtggacagccccgcagcagtgggtcgtgcctgtgaacagccctgcagcaggggtccgtgcctgtggacagctccgcagcagggggatcatgcctataaacagccacgcagcagggggtcatgcctgtggacagccccgcagcagggggtcgtgcctataaacagcccctgcactccagcctgggaaacatagtgagagcccatttatta

SEQ ID NO: 171706 - DNA, 236 bp, Homo sapiens
cagaggcacctccggaagggcctgggtgaggctgctagacagggcagcggggcaccctcctcccggagcccccgcctctgggctgaggctcggatccccaccgcctcctgcgcatggaggaggcgagaagcgcagggagacgggggccccagacggcaccccgcaggctgccattccttcaaccaagatgtagagaacgccgtggacaaaagctttaaaaaaattctgaaacctct

SEQ ID NO: 171707 - DNA, 329 bp, Homo sapiens
aatcccagctacttgggaggctgaggcaggagaatcacttgaacccaggaggcagaggctgcagtgagccacgatcacaccactgcgctccagcctgggtgacagagcaagactccatctcaaaaaaaaaaaatgtggttattactttatctattcacaacacttccctacagactcctggagttcaccttctttccgtaaacagggaaccaaccaacagacacgacatatcctccctctcccactactctatccacattcttggtttccttttttctttcacttccttctggaacttgagagcagaagtcgcgcgggatcctctattt

SEQ ID NO: 171708 - DNA, 572 bp, Homo sapiens
aatcccagctacttgggaggctgaggcaggagaatcacttgaacccaggaggcagaggctgcagtgagccacgatcacaccactgcgctccagcctgggtgacagagcaagactccatctcaaaaaaaaaaaatgtggttattactttatctattcacaacacttccctacagactcctggagttcaccttctttccgtaaacagggaaccaaccaacagacacgacatatcctccctctcccactactctatccacattcttggtttccttttttctttcacttccttctggaacttgagagcttgtttggaggttctagcaggggagcacagctacttgtatacccttgactgaagaccagtcctctatcggggctggtcgtcctcttcgacctagcatgcagctttgggagggacgcacatggagcggtgagagaggaaggagacacctacctatccagccagatcagctgaatcaaccctggcgatcaatggggtgacagatgtcgtaggaaccttatcaatctgggtattctgagtcagtttcgtgtacagtgatgatgatgattat

SEQ ID NO: 171709 - DNA, 164 bp, Homo sapiens
tgctcaggagttgatctaagacaggctctaattgcaccttaataagcttgttggggaggagttgggggtggggacataacaagccctacctgccagggtatccgggtgacagtggccggtggccgagcaccccggcctgaatagctggggactaatgcaggaga

SEQ ID NO: 171710 - DNA, 562 bp, Homo sapiens
ggacctgtaaaagagatagcaaaaatggcaaatgacactatcaaaactacttttcacatttcaaaggatgaaaagccaggagatttttctcacctccacatctctgtaaaatctttggtcatgttaagagaaaaaaaaagtaataactttttaaggatattttttctctgtgacagcatctacataaaacattaataacagcatctacttaaaacaaagagcaaagacagatcgatgtttggctttgtctgtgaacatttgttaaaaaatgcgagtagatcagcattatgatagcgaggcaggaaggcaggcacggattgggaattggagttatctagttcttgacccagacaaacctgagacccattttatcaagtcagtgaggcaaagtactcctcactcaggtgtgctacctttggtcagaacccccccaccatgagaatgtcagaactgcagagtcccctggcagtatactttattttaaaaattgattcatttctgaaagtggagctcgactgtctcctgacctgctgtctgtcctggtcctacttacagtgtggta

SEQ ID NO: 171711 - DNA, 544 bp, Homo sapiens
ggctatggtctgacatcagcaaagcttccctttaactgataagacaagcaatttcattttcgtccttagtgagtgtaaggtattaagacactacctaaaattcttcaaaatggtatcttcttctctccttgccaagctgtgagactaacaatacctttgacaagctgaaaaatttcttagctgcctgctgtctccgcaacaaatttccttcatcaactaattcactaatttgggccttcttgagaactcagctaatttgtaagaacaggtggcttattccataagtgttcaataaagattcacacatgattacacatacagcattgccttaaaaacaaatgaagaaatgtgtgtatttatggagaagctaaagagacagacaagagattctttagtagctaactgtgtgcatctggtgatctggcaaaattcttcccagaaactggtgggggaaggaagcagaagtaggtgacataaggatataaagtcctggtcacatggacaattaactattcttggggaagctaccaagaggttatagata

SEQ ID NO: 171712 - DNA, 875 bp, Homo sapiens
caccatttccttgttcttctttctacttactcctgcccagcacatctgtattgcctgggttgtacctgtaatggaatcatatagtgtacaatcttccgtatctggaggtcagataacccttcaaagaaacttttgagaacaaaggtgatggttagagagccatggaggcatgaataatgatttttttaaggtgggagaggtttgattaaaggcttgagggaaggagccagagaaaggacattttaagatgtaagagaaagaagagatacccaggggggtaaggttcctgaggtggtagaaggagatgtcatgtggaataaaaaacctttgtaaaggttccgaaaagctggagggaaaggggagttttcgtaataccatctttcttggtgactgctgggttgaaagctgtttcatgacttttccgtggctatagtttgtttttgctggtgacagctgctgctttagaggatgcccttggctatgctctgtgaatggccttgtcacgaacactttctgtttgtctcctcccttgtagtgcgagctgttaatgctcagtggggccccaggggaggtgggctctgtgctcttctccctgttctggtccgtccaaggcagcctgctatcctggtgctacctgcagctgaagagcacggactctggagccaaagatcttgccgtggaccttattgaaaaatatgtgggccagtttctggcaagcatgagagcgattttggaatcccttttctcacagtacagtggaaaaaccatagtagaaagattatgtaactcagtgttttcaatggcagctcgtcaactggttatcttcctgctggacttctgcactttagacatcccacactgcgtgctcttgagag

SEQ ID NO: 171713 - DNA, 449 bp, Homo sapiens
tgaagagtcttggtaattcagaaggtaccccaaaatgctgccataccatccttcattctgacaatgcattcataaagaattccgcgtttcagagcaagtaagcacaagctgtgcctctgtgagtgcctaagggtactgctttacgcgtgctatattcatgaggcaatgattgtgcaaatgttttgctagctcagagcgttgagagcaaaccgtgggatgccttagtgggtagaagggtaaggaacaaggaagaaaaaccgattccgaagtactgagtgaaacagggcattctgcttgttgctagtgaactgtaggaatagcatataagggaaggtagtaaaaaaaaatttttttactcatttgaaacttcaatttataaagcatgatttgggaaaatttattattagatctttttgttgttgttgttgtttttgagacagagtctcact

SEQ ID NO: 171714 - DNA, 252 bp, Homo sapiens
agcgattctcctgcctcagcctcctgagtagctgggactacaggcatatgccaccacacctggataatttttgtatttttagtagagacagggttttaccatgttggtcaggctggtcttgaactccttacctcatatgatctgcccacctcatcctcccaaagtgctgggattacaggcgtgagccaccatgcccagccggggtcctttgaaaacacaaacctgaccactgctgtaaacctttcgatggcc

SEQ ID NO: 171715 - DNA, 298 bp, Homo sapiens
taggagaagcccaaataacataatatatatattaagatgtcatagaaataagcaaagggtgatttcaaatataaaaaagccacacaggcagatgctctaaactgcagtttttcatgtaccatcaagttgcttttcacattcagaactctatgtctactgctctgtggagggaggcagcagggactgatatactgaatgatatgaagatcctcctagtcacagtcagaagctcccagcaatcagactagataaaccacaaagacataccaaactcagtgtacatgcaaaccagggaaga

SEQ ID NO: 171716 - DNA, 656 bp, Homo sapiens
tttctccaactcattcaagtacaacatttggaggccccagcgagaaacgccatgaggagagagccgggctcccccggaaggacggccggcttgtggggggtgccacctaaaaaaaaaccttcaggtcctcgaaaagtgaccgtcttccagaggagagcggatcgactacccggtgggtgcccataaaaattccacctctgagtcctcgacttctgaccctgaggtcacgtaggtcagatttgacttcagttctaggaagagggaagcggccctgatgagggtgtccctctttcgactctgcatgtttctctaggacgctagaaggtagagccctggttttctgttaggcacctctgtgtctctttctaggagggaagtggccctgacaggggccctcccttgactcagtccacatcccaggatgctggaggactgagtcctggtttccggcagaccggtcactctctctctctctgtttctatctctcatctttctcttgttcaagtttcttgaagaatctccaagaaagaaaaaaaaaaactgttatatactctgtgtgaataatgaatgagtgagggaggacaagggctcgcgcttgtcctccagtttgtagctccacggcgaaagctacggagttcaagtaggccctcacctc

SEQ ID NO: 171717 - DNA, 444 bp, Homo sapiens
agcgttgcagaggtgctggggcatgtggttcagagggctctatgcaacttcagacatgattatgctccattcacagatttattacggcaggagaaagttttcagataaccctgagttcacgtcagaatactgaatcaagcagttaagttgtggtggaataataatagtaatggtctcagctctttttctgcctcgctgtgtccacaccatttggtagtgccctctatactgacactgggcttggccaggtgacttgctctgcccaacaggacaagcaaacataatataggcaaagacttgaaaagagcttatgcactggagcttgctctcttgctgttcttgggaccctgccaccctgggagcaagctggggttagcttactaaacaaggaaaggttctaggcctagtcacgccattgcttcagcctatagccaagcaaccact

SEQ ID NO: 171718 - DNA, 312 bp, Homo sapiens
gggttgatagttctttttattcagtatttgaaaaatgtgctacttccttctgaccaccaagattttggatgagaaatcctctgctgtttaaatcattttcccccagagggtgagccagcttcgggattgcaactgagaagtgggactattaaaagaaagtcatgcccaggtggctcaccaagctggagaagggacaagagacctctggagcttcgcctttatagctgattgctttttgaatcccagccatcccagcctccacagtctgaagcagaaacatctcatccaaactgcatttgtgtgagcaagaaa

SEQ ID NO: 171719 - DNA, 303 bp, Homo sapiens
gcgctcactcattccctgccacacgctgctcattcattaaaagcccctgattcctccccgctgttctaattatgcacagcagtaataaagatgcattctcccttaccaaagaggcctatttatatgaaaagagagcatttcgcccccacaagattgagtcgtcactccaggccttattggaatcaaagcagcttctcttctgagattgtccaagccctgcctgactcccctccagcttggcccactcctgagcatccacatttccaggagcgccactgcagagtgggcaagatgtagacgcca

SEQ ID NO: 171720 - DNA, 403 bp, Homo sapiens
tctgtggaattgccacactgtcttctaaggtgttgaactggtttacagtcccaccgacagtgtaaaagtgttcctatttctccacatcctctgcctcccaggttgaagcgattctcctgcctcagcctcttgagtagctgggactataggcgcctgccaccacacctactaattttatatttttagtaaagacggggttgcaccatgttggccaggctggtctcgaattcctgacctcaagtgatctgcccacctcggactcccaaagtgctgggattgcagccatgagccaccgcatctggccatatatattatgataggcttgtttcacttagtatgtttcttccatgctgtagcatgtattagtacttctttctttttcatggccaaatattccattata

SEQ ID NO: 171721 - DNA, 381 bp, Homo sapiens
tgccagaaatattgttaggtgcctgccatacttacaaagaaactatgagaagctttttaaattaaaaatacgtatggaaataagatatgaacactgcaataattttcaaaactcaggctaaggataattattgcaaatgaaaatatgtaacttgaactccatggcagtcaaggtaataaaatgaaaataatgagttgcatagctctaatttttaataaaaggaagcatatcatttatattatcagttataaagctcgtagttttagaaaaacaaaatgcatttaaatcagaacttttaaaagtaaaactggcctttgcatttttataattaattatatctttttttatttctgaaactatataacaaatgggacactttgg

SEQ ID NO: 171722 - DNA, 542 bp, Homo sapiens
aataataaatacaaagaaatatattaatctattaaatatgttcagccagatttcaggatacaagttaaatatacaaatacaaactgtatttctatacgctagcaataaaaaatctgaaaatgagatgaagaaaacaatcacattgataataatatcaaaaataaattatttaggaataaatttagcaaaataggtacaagactagggacctaactcaacagaatgacatctcatatacaagattggaagatttatttttttttacgtggcaatactcacaaattgatctggagattcaatgcaatcaatatttaaatcccaggtacccttttgtagaaattgataaactgatcttttttaaaaaaatatggaaatacaagggacccagaatatccaaaaattcttaaaataaaaaccaaagacagtgtgatcacactacatgattttaaaaactactacaaagcttcagtaaacaagaaaatgtgggaatggcataaagatatacacatagactaatgtaatagaattgaaaaatacaaaaa

SEQ ID NO: 171723 - DNA, 211 bp, Homo sapiens
gcttgtatttttttcttcctcatctatagttgatcaagaatcatcaaaagatagaagtgcctagaatttttacagatttcagatatcaatgcaatcaagtgacatagccaaaatatctgtaaagcggatggaaactgttcttgctaaatttaggaatttctgttacttgattaagaattttcaaacataagattatatttgcagaaaagta

SEQ ID NO: 171724 - DNA, 535 bp, Homo sapiens
tcagttatccacaggacaatcacatgtgacccagcatcagcagctattgatcaagatatattgaacgaatgaatgaatctttgtaggcatttttaaatcccgggcctgttgctccttgcacagtgccatgttcagccttccatcactgcctcaccagggtgcacacaaggaatgtaaatttcaatataattaggatataattagagaagcaaatctgatgcaggtttacatactaatcccaaagattagaattacctatactactactctccaaggttaactctgtggaagaggcaccgcagcatgcaacatcacataaagaaaactgacacttcctgagcaaatagttttcgtccatatcacttattcccatccattcctttaatacatgactattcctgatccagttaatttgaagaattcagtctcctctccataaaggctgatttcacaactacagtttctcaaattcctctctccccaaaaaggggtgcacttacggacttcgcttaagaaaacaccaacaataaacggc

SEQ ID NO: 171725 - DNA, 392 bp, Homo sapiens
gcctggactagtcttcaacacaccttctgctctcaaggccatttccacggccatgtttgagaacatcagatcaacccaattttctgtcatactcagtcagttgactttactggcggacaaaatagatagttgccttcctgttgtgatttctaggatcttaggggaaagcccttcttcttcactacccttctatcccttcccttaaggttttaaatccttgaatgaggattttaaaaatcattctagaatgaaagacaggtttaaagtgcaaatatattaaaaagccaaggacgcattctttaatgagtaagtaaaatactaagcaattcgttttgggagaaagaagggctaaaagagaaaagtgtcaggtaacggatttttgattttttttt

SEQ ID NO: 171726 - DNA, 638 bp, Homo sapiens
aaagggttgcttaagctttagctgtaccaaaagccccgaatttatttagtttagttttagaaataacaagattttgttaggtattttcctgtggagtatattatattcacctagggagatatcttctgtctatagctatgaaaagaaattaaatttctatttccttgtaattgaaagttgtgaccaaaatcaagaccatgtgtagacatttcctctagctcataagcaagagtagtgttttattcagctgtttacttaaaattccaaatggtgacttttaggcctagatgtctatttgttaagaggcaggaggggctctgtgtggtggtggttcttgctggtaatcctagcactttgggaggcccaggtgggaggattgcttgagccccggagttcaagatcagcctgggcaacatagggagaccccatctctacaaaaaatcagaaacttagctgagcatggtggcacacacctgtagtcccagccaccgtggaggctgaggtgggagtattgtttgggcctgggaggtagatgctgtagtgagctgtgatcctgccactgcactctagcctgggtgacagagtgagacgctgtctccaaaaaaaaaagaggcaagagattaaattagacacagttt

SEQ ID NO: 171727 - DNA, 454 bp, Homo sapiens
aaagggttgcttaagctttagctgtaccaaaagccccgaatttatttagtttagttttagaaataacaagattttgttaggtattttcctgtggagtatattatattcacctagggagatatcttctgtctatagctatgaaaagaaattaaatttctatttccttgtaattgaaagttgtgaccaaaatcaagaccatgtgtagacatttcctctagctcataagcaagagtagtgttttattcagctgtttacttaaaattccaaatggtgacttttaggcctagatgtctatttgttaagaggcaggaggggctctgtgtggtggtggtttttttatagaatacaacaattatgtgtggtccagttaagttgaatccttgagaccctaccttaatatcctcctgacatattacgtgaacttaatcttaataattattctattcttacttct

SEQ ID NO: 171728 - DNA, 521 bp, Homo sapiens
tcacataagacctagtatatagtaggcagtcaatgaagatcacaatgaattggctagactttgatttattcatttatgcaaattgcctgacattcaaagaaaaaagaaggaaaaaatggacctcttatcatgtgccagacattgttctaagagggaaagatactgtgaaaaagaaaagtccctatcctggtggatcttagattatcgtggagaaggtaaggcaacaaacacaaaataaatacttcatataagttcaggtaatgataatgcgtgaaaaagaagtgttcttcctgttagcagtgccaacatccgctttagtgctctgctgcactgcaaaatgtgtggatgttcttgagtatgtctgggaactagctaaaattagggagttaaaatgatccagcttagctcaggctatagggaggatttctctcccaggtgtttgttttgttttgtttttgagaaagggtctcactctgtcacccaggctagagtgcagtggcctcaacctcccaggcccaggt

SEQ ID NO: 171729 - DNA, 463 bp, Homo sapiens
aagtgtatgcaagaggttcgtcctccacaagccgagattagatcaatcagcatctgtggacagaattaggaaagttaggattgggtagagagagaagtacaactatgatgatcaatggcatggtcaacccagtgaaggactctagggcatacgtggccctgcattgggccaaagtggcttgaccacttattcatgcatccatgggcccaagatgtgggagaccgcaggaaaagtaagccctctagtgaccctctgcagctgaggtagaccctgaaggatgtgccagcaggaaacgctcccttgaacggggatctgggagattcctctcccaaaccaactcaccatgaaattagagagaggctctaaagataatttaggccccatttttgggatgattaatttgataaacatgattatatttatcatgctatttctgtcaattcttttacaccatccacatctg

SEQ ID NO: 171730 - DNA, 542 bp, Homo sapiens
tggagacaaaaatggagggacgtactcagagaatccagcaaaaaggcaaagcaatggaaaatgtgacagagggtatgaaaatcagagaaaacagataggagggccaaggcctgaataacagcagttccagagagagagaagaaacagaggagaggagataatcaaagaactcaagacattttcttaaagcagaagtcccagggtcaccagactgaaagagccactgagtgagaaaactgacccacaccaagacccatcactgtgagacgtcatgttctagggttgtagagaagatcctaagacaggaccctaaagaaggcaacaggactgagaatggacttggagcttttaagagcaacccaggaagttagatggcaatggagcaatgtcttgacaatactgaaggaaaatgatttccaccccagaattctatgatagatttcaatctactgcaaaatagaataaagacatttccagcattttcagatatgtgaaggatcaaagtatttccctctcatgcatcttctctgaagaagaccaca

SEQ ID NO: 171731 - DNA, 423 bp, Homo sapiens
actgagtgcgttctcagactcgccagagggctctggtgtttttgtatttctagcaatgatgaaggggcagagaagggcttaaaaaggaaggctcccttggccttccagcttgataagccctcaggcacaaaggcctcctaaaacactttctgtctttagataaaaccagaccacaccttgcatttaccactgggtgtcagacagttattggtgatcctaaactcatgctgtctgatacagtaactactagacatatatggttattgagcccttgagatgtggccaatctgaactgagatatgctgcaagttaaaccacacgctggattttgaaaacaatacaaaaacctgtgtgaaacatctcatgaattattttctaattgattgcattactttatattgatttttttttttttctttgaga

SEQ ID NO: 171732 - DNA, 584 bp, Homo sapiens
ctgttcaaccgcacctctcatctcccatctcgattcactacacaatggcaggaactcaacaaagaacagcagacccgaggccgtgcaaaaagctgctgaattgtacactttggatgggtgggttgtgtggcatgtaaattacatgtcccccaaaaaaattacatttgtaaacatgtaaaccagaagcagggaaaaggtggtactatagtaaacttctccatggctgcctcccttcctctctccactccaaaccatggtctatgtttgccaatggtcacaaatactgtggtttccattttcagcatgccgatgtgtgctaggccccaaatttccagtccacagttaacagacagctttgtttgtttgtacagaaatttcaaacagttttattctaagatttaaaaccaaagcaatagcactgatgctaaaagtacaaatttattacaaagtagccttgagtacaaatttatttcaaagcagacaaggccaggcatggtggctaacacctattatcccagcactttgggaggccaaggcaggtagatcacctgaagtcaggagttcgagaccagactggccaacat

SEQ ID NO: 171733 - DNA, 442 bp, Homo sapiens
caggggctcctcggtcaccaggctggaggcccacggcccctttgccggcagcgcccatcatgtccacaccagcagccacgtggtcagtctgcccagctctgtccagagcatggttagtaacagcaggccaggggcggccctcacagccattcctgtgtctagacacgggcaggggcagagctgcctcggacccccatccagggccaggacactgcacagcttctgcatgaggacgctcaggctggctgccacagcctgggccagctctccgagcaaaaggaacgggtggggaaaggccccctaacccgccctggcagccccaaggcactggcaaaagccagcagccattctcaaacagggcggacccagcccgtgcacacgcggcccgcaaactcagaatgggttttactgtgtggaacggcagagaaagaaaaaagagcga

SEQ ID NO: 171734 - DNA, 820 bp, Homo sapiens
cacgatcatgatgagaattgatgatcggacacgctgatttcattgtctgaagcggcactggagacccaggaaaaatctcgctgaatccgcctgccccagcagcggcctgatctgggttccgctgattcctttcgtaaccgcaccacacccgagctacaggaccgcactcagttcagtgaccgagacttagccacccttaagaagtattgggacaatggcatgaccagcctgggctctgtttgtagagagaaaattgaagctgtggcaactgaattaaatgttgactgtgaaatagttcggacttggattgggaatcgaagaaggaaatatcgtttaatggggattgaagttccacctccaagaggaggccctgctgatttctctgagcagcctgagtctggttctttatctgcactcacaccaggagaggaagctgggcctgaagtaggagaggataatgacagaaatgatgaagtatccatctgtttgtctgaaggaagctctcaagaagagcccaatgaagttgttccgaatgatgcaagggctcataaggaagaggaccaccatgcagtaaccacagataatgtgacaatagaacttatcgatgatgacgaaagtgacctgataagtattctggagtagaaccagtaaatcctttcgtggattatagatgacgagtcaattacttggaatgggtcgagaattcaaagcaaaatatttaagttgaatttgaaaggtgtttacaggagtggaaaggcaagggcgggtgataccggaaggaggtaccgggggggggaaacctcaggtttgggaaattggt

SEQ ID NO: 171735 - DNA, 360 bp, Homo sapiens
  misc_feature (59)..(59): n is a, c, g, or t
tacctgtgaaacttttctgcaatataatcttatgtttgaaaattcttaatcaagttctnctcccctgacatctctgtatttctgtgagcatctctagagggtacacttgcactggtggaacctgcagggctaaaggacaggcccactatatgttttactgtgtattgccaaacttccctcccatctactacctcccactcttgcaagcattggatatactattaatttttagaaatataagaagtgaaaaggtcttcactttaacctgaatggctttaccataggatcaagactaccttttcatgttcattagtcatatgtaaatactcattcaatgcttgtcaggggagaagaggtcgg

SEQ ID NO: 171736 - DNA, 420 bp, Homo sapiens
tccccccaaaatcccacaaaagaataaaagtagagttaaaactaccttcactccatcctctaatcccactcttaataattacaggatttatctttccggatcatttctatgcacaaacacataaaaatctctaaattttaaagagaagtataattatcctatacacacacacactggcaattttaaaaattcaataatgtatactggacctatttccagaaagatagcctaacattccactctatgtatcatagtagatattttggatgtttccatttctcacataacacacaatactacaaaaggcatctctccccatcatctctgtatttctgtgagcatctctagagggtacacttgcactggtggaacctgcagggctaaaggacaggcccactatatgttttactgtgtattgcc

SEQ ID NO: 171737 - DNA, 365 bp, Homo sapiens
tgctacttttttcttctcctttgtaacaaaattcctcacagtcatttgtactcaaaagagttgtctacacttgctatctccgtttcttctgtaccatcctcacttaattccattctaatcagatttttgctcccattactccacagaaactgttcttatctaggtcattagtgacttttctattgctaaatccagtggttgattcttagtcctcatcgtactgaatctaccagcagtatttaatatagtatatagttgatacagttagtcactctcttctccttgatgcattttccttcacttgacttacaatacttcttcaagtatgttcttggtttcttaccttaataactattcctgctcag

SEQ ID NO: 171738 - DNA, 700 bp, Homo sapiens
accatcaccctaacacccagcgcagagacagatgtgtccctggtctaccgtggcttcatctacccaatgctgcctggagggccaggtggaccaggggctgaggacgtggccgtgtggacgcgggcccagcgcctacacgtcctggcccggatggcccgtggccctgacacggagaacatggaggaggtggggcgctgggtggctcatcaggagaaggagacgcggcggctgcagcgccctgggtctgctcgcctcttccctctgcctgggcgggaccacaagtatgcagtagagatccagggccagctcaatggctcggcaggccctgggcacagcgagctaactctgctgtgggatcggactggtgtgccaggaggcagcgagatctccttcttcttcctggagccctaccgctcgtcgtcctgcacctcctattcttcctgcctgggctgcttggcagaccagggctgtggctggtgcctgaccagtgccacctgccacctgcgccagggcggagcccattgcggggatgacggggctggtgggtccctgctggtgctggtgcctaccctctgcccactctgcgaggagcatcgggactgccacgcctgcacccaggacccttctgtgagtgaccggatccgatgtacctttttagattagaggcggggcggggtcatgctataatctgccttggagc

SEQ ID NO: 171739 - DNA, 215 bp, Homo sapiens
accaggatgcaaatagggcacggataataggaggcaagaacaacaaaatgtggtcaccaattcattaagaaaaaaaatgtttcctctggctatctccatgcacagctgcccagatactagggccacaatgtaaaccaggaaagttagggctatataggttggacacagtattctagtaagaaacatcctaattatattaaatttgaagcataggc

SEQ ID NO: 171740 - DNA, 219 bp, Homo sapiens
taagctgcatcgcccaacaccaagaacaagcgatgtttgcttttaactgagggcaaagtaacttgcccactcgtgcagagagagccaggggtgggaccctaggccggtctggctctaaagctggtaacttccttgttgtggccgttagtcataaatgtgtgcaggtgagaacagctaaccgcaatcttggtcatactgtgttggggatgatttactaag

SEQ ID NO: 171741 - DNA, 258 bp, Homo sapiens
cccatctaacgccaatagcaccaacctccaaggctaacacacacacccttagaagaatacaggcacagggcccacactctagaaagggaagagacaacctaaaaggacataagtgcgcaacacaggcgcgttaaaaagcttcccatctgggttctagcgcacgcattgaaggcgcgcccgtctctactaccctcgtgtctcctaccgcgcacgcgcaccgcgtcgacccggccgcgaatttagtagtagtagtcgacc

SEQ ID NO: 171742 - DNA, 299 bp, Homo sapiens
tgagctctgacttgctcttggaaacacttcgaggcttagcctccccactttgtttcccgagagtgtgacctgttcccctccaaacacccccttctcctccagggccatgcccacccgtcaaaatcccccacgggcaggacgaactgtgggtgtcagtcaccatctatcctgcatcctggttccagggccccccccagccccgcctccatagggacaggcgtgcagacacccgtccctggctgcttcctcttgtggaatgggttcaaaagtaagcagtgttgtttacactgacaaactga

SEQ ID NO: 171743 - DNA, 101 bp, Homo sapiens
ctggctgcagttggacccacaggttgtgaggactcaagagcaggatctctcctcctgctatcattttataaaatgctgaagggaaaaatgagctccgcaga

SEQ ID NO: 171744 - DNA, 342 bp, Homo sapiens
aataaagtgtgatccagatgttaacaaacttgattcttcttactgactgaatcattattgttcagaaaccctttgatacaatgggaaaaaaaaatgctgttgatataagaagggagtcaaatattacaggactggactgttgattaaaaaattatttttaaagcacagtagctatgaattactgtgctgttgtatttgtctctatatgtgttgctgatttctgatcttggatcatgtttaaaaccagtggcagtctgtaaataccaacaattattatcttttgatacccttttaagttatgaaactcatattgttgaagaaatacctggattcattaagaaa

SEQ ID NO: 171745 - DNA, 242 bp, Homo sapiens
tcaaaaatatttataaagaccatagaaatagataaaaatatgacaaagtgaaactatcagactacaaaatggagcatcagctacaactgttattaaaaattccatacaatatgggaggtaatatctgataataaaataaacctgtcttatgcaggtgcatcatgaatattattatgtacaacttaattattaaaaataaataaataggctgggtgcagtgactcacacctgtgttcccagca

SEQ ID NO: 171746 - DNA, 350 bp, Homo sapiens
aaggctaggttaacacataagggctgagttttggttcttccttaatcagattttactttttgtgaaaggaaaataaaatcttgggaccccaatttaactctgccaataggaaaaaaaataaactgaaagccgagtcatgggagaaactgcctctccttttgtccctaagcagatgctacagataaaaggccagatatctccacagatagttattctatcttcactttatcttatgtaaagtgccgatttactgagtgtgagatgaatacaaaattgaccattctcttttttgtcattctgcttttttcttttttttatcttgcaacatgtggattcagtaatgtgaccat

SEQ ID NO: 171747 - DNA, 554 bp, Homo sapiens
gggaatgagcagacaatgcaggcagggggagaagctgagtccaggtgaagaagagggaaaaaggtcaaagccagagagaatggggcttgaggctgggaggaggggcaaggagaagctacagtggggaggtgaaacctccaggtgagatgccaggaggacctgcagggtgtgctgaagtgtgggagaaggtgaattaggacaagaattctgggctaggtctgagaccaccataggatgtcactgagtggatcttcaagactgtcctaaagaaaacagacagaaagtggtaggtcactcagggatgggaggtgaggcgtgaaggggcgagaaccagcaagtagtgttaagtgagtggccagcaagtgtattaggccattcttgcattgctataaatacctgagcctggttaatttattagaaaacacgtttaattggctcatggttctacaggctgtacaggaagcatagcactggcatctgcttcaggggaggcctcaggaagcttacaatcgtggtagaaggtgaagcaggagcaggcatgtcacatggccaga

SEQ ID NO: 171748 - DNA, 204 bp, Homo sapiens
ctgcctcctctcaggcaaagctaagggcatgatggcactcagaggaagaggtggggatggggattgaggtgaggagctcccacggcccccactccccgcctgtttggttccactggatcacgggtccagaatattaggtcttgatggtacctacggtggggtctctcatgggagcaagacaggcacctcctcaggcaccaggat

SEQ ID NO: 171749 - DNA, 479 bp, Homo sapiens
tagaggatcctgacagatccctaaccagaagagtaaagagtatttcaggtacaggaaaagcaggcgcaaagacctaaatgcaagaaactacatcaaaggttgggcacgctggcttacacctgcaatcccagcattttgggaggttgaagcgggcaaaatcaccaggtcaggagtttgagaccagcctggtcaacatggtgaaaccctgcctctactaaaaatccaaaaaaattagctgggcgtggtggcgcgcacctgtaatcccagctactcaggaggctgaggcaggaaaatctcttgaacccgggaggcagaggttgcagtgagccgagatcgcgccactgcactccagcctgggtgacagagcaaaactctgtctcaaaagaaagaaagctgtgtgtgtgtctcctcttctctccccagctcactctttgatcattttcatctgtttgttgttactgtctttacagcatctagcc

SEQ ID NO: 171750 - DNA, 529 bp, Homo sapiens
ttgccattctgaacatgacacacacatacacacacacacactccaccttaccacctcagtagacactcctgttagcaaaggattgagattgcactttttgtgaattatgcactgaatctataaatgatatttagagaactgacatctttacaacaattaacctttgaatctaggaatctagtatatatcactatttttatacttaacgtctgggccttgacatatttaatgctttttaaatgtttttgttgtgtctttattttaagataacacacatatttactgtgttttgctgaagtttattatggcatatcaaatttatgtccagtaaatttgctaaactctcttaattttaataatgtatctaagatgatttggctttttttatgggcacaattgtagtatatgtgaaataatgtttaattcattaattttaaacatttccttttaaaaaattatggatttatagccttaaattaaatgtatattaattatgttctagatatttgaatgcgtccgtacattgctt

SEQ ID NO: 171751 - DNA, 226 bp, Homo sapiens
ctagattttgaagacagatattcccctttgagagaatcgttgtagtgatagtagttttggaatgagtgtgtaactgtcttacatattgactttagatttatacatcttagttgtagggactgccatttatttcccttccatatgtattccagaggtcaataggtacttaataaataagaagtaaaaatgactattttcctaagcttttccagcattatttgatgat

SEQ ID NO: 171752 - DNA, 390 bp, Homo sapiens
aaaaagcttgtctctttattattgacattctgtcagcttccaaaattttttgaactgactagaatggtgtatgtaattggctattttacgttgacacttttcattctaacttgtaagaatttcggtataggctgggtgtggtggctcacacctgtaatcccagcactttgggaggccaaggtgggcggattacttgaggtcaggagtttgagaccagcctgggcaatatggtgaaatcctgtctctacaaaaatacaaaaaaaattagccaggtgtggtggcacatgcctgtaattccagctgctggggtggctcaggctggaggatcacttgagactgggaggcagaggctgcagtgagctgagattgcaccactgcactccagcctgg

SEQ ID NO: 171753 - DNA, 239 bp, Homo sapiens
tgggaggctgtggcaggtggatcgcctgagcccaggagttttgagaccagcctgagcaacatggtgaaactctgtctctgcaaaaaaataaaaaaaagtagccaagtgtggtggcattcacttgtagtcccagctacttgataggctacttgagccggagaggtagaggctacagtaagctgtgatcacaccactgcattccagcctgggtgatagcaagatcctgtctcaaaaaaaaa

SEQ ID NO: 171754 - DNA, 582 bp, Homo sapiens
ctaatatccccattttgcagatggggaaattgaggtcacagacattcagtaactcacctaaggccacacccccaagttccttaggcaacagatgggagctgagcatgggggccagagggacagtaggggcagtagcaagaattcactttagcgctggttgaatgtgaggttcctgcagggaatccacatggagggcccaggaggaggtcagatcagtgggtctggggcaaaagccagtttcctggagtctcatcagatgaaggagtgaaaaggcagggggagcagcccaggataaatgccctattctctttatacgtggactcagaatcacttctcacacacgtgcctctaaccacccattgcctgtgcctctggctttgtaacctcagacaaatccctcccttttctcagcctgctttcacatctaagatgcagagatgaccatccctgccttccacggcgcccagtaagggggagggatcattagcattgttacaatatttcctgtacttgtcagtctggcaaacacactccctccaaaacttcaaccttccacctgccagtagcttccccttcctccca

SEQ ID NO: 171755 - DNA, 118 bp, Homo sapiens
gggattacagacgtcagccagcatacccggttgtatgctgatgttctaattcaatgtgataccaaagacctgagatagtctctcccactctggccccataacatatgtccacgaggtg

SEQ ID NO: 171756 - DNA, 344 bp, Homo sapiens
ttaattcaactgtagatctttactaaaggattgtgctaccctatgatctgtgtggcacagtcacatgcgcaatgcttccccttccagggcttccccccaacttcagtggtgagaaacactgcacatgggctgcttggctcatctgcattgactgtatatcctgaggccagtgcacaatgtccaggtcaacaacatgtttttcaaaacgtggtttaacttgtttgttgtagctacaaaaatcagccagctttgcagaagacaattcattaaatgaatgaagactggtcatcatgcccaaatacagacaaaacactgtgactcaagcatgctctcattatagagac

SEQ ID NO: 171757 - DNA, 743 bp, Homo sapiens
cttcaaacaccatgaggacaaactcccaggtgtttaggatctgctagtggacccctttaattctcaggaagacagagatgcagggagattctcagaaaaccctcttgagataaacactctactgtgactaatttaaaccacactaaactgccccagtttcaaggcttcccactttggggcaataaacgtagctatttactgcagtcaccctctgatgttacaatagatggccttatggaagtggataatcccagtactgctcatttatttctccatcacatttttagtaacaaaagaaatatacgcttgatacagaaaaactgtaaatcttaaaaaaaattacagaaaagtatcatccctaaaccagctcccagattagatccctggatctctcttcaccagcatgagccacttaaattccaggtgctgtcacgctgcaatactaatcatctgcctcgcccgtgttctactgtgttttgacttcccatttcaaaagaattcagcagtaagggtcataaaacactgtgtattaattccaaacagatttgctatttgttttttaaaactatgaagataattttaaagaaaactcaggatggcagaaaggctgagctgagcacacacacaccgaggaggaaggccacgtcccagccagctgcagctgtccctggcttgcccggcagtgccattgtttacacccaaagcctttcccctgtaggaatgatgtcacctggagcaagctg

SEQ ID NO: 171758 - DNA, 566 bp, Homo sapiens
  misc_feature (58)..(58): n is a, c, g, or t
  misc_feature (238)..(238): n is a, c, g, or t
  misc_feature (338)..(338): n is a, c, g, or t
  misc_feature (351)..(351): n is a, c, g, or t
  misc_feature (398)..(398): n is a, c, g, or t
  misc_feature (408)..(408): n is a, c, g, or t
  misc_feature (491)..(491): n is a, c, g, or t
gagatagaatccatctaccgtaaaattcacttaagtgtacgattcagtgcttttttgngggggaaatttgtaagattgggcaaacagtaccacaacccggctttagattttcatcattatgcatgtttttatttttatcttgctattttttagacagggtctcactctgttgcaatggggtgatctcagctcacggcggcctcgacctcctgggcccgagccgctgtcccacctcagnactcccgggtagctgagaccacaagcgcgcaccaccacgctcagctaatttttgtatttttgtagacacagagtttagccatgttgccccgggtggtctnctaactcgtgggnctcaagtaatcctcctgcctcagccttccaaagtgctgggattatanggtgtgagcncactgtgcctggccgctatgcatatttttaaaagttgattttaagagctgtatagttgctagagatattccctcattttgtcncatttacatctaatttttgtttatgaggtttttttggggggattgttaaaacaatgacaatttcatttgttcaca

SEQ ID NO: 171759 - DNA, 276 bp, Homo sapiens
ttattatacaggatttgacttttaaaaaccactatttcactacaaagattgatgtatgggaaaggagaacctggcaatgtggtactattgaaaggcagaagctcaaagatatcagataccaatctggtgtctatccaaagacaacactagaataaaaaagtatagatcattcttcaaaaatattcatcccctcccattgatactctttgggagcagcatacttctctaccccttgtcttgggcttggctatgtgatgtgctttggccactgggatg

SEQ ID NO: 171760 - DNA, 336 bp, Homo sapiens
gcaggggaggcactagcagctctgccacagcagccactttggagtccctaacaccaggatgtcctgattttcatgcacttagccctgtccaaggggagtctcaatttgtgtactcttttttttttttttgagacagagtcttgctcttgtcacccaggctggaatgcagtggcatgatcttggctcactgcaacctctgcctcccgggttcaagtgattctcctgcctcagcctcccgagtagctgggattacaggcccctgccaccacacccggctaattttttgtaattttagtagagacggggtttcaccatgttggccgggctggtctcaaa

SEQ ID NO: 171761 - DNA, 160 bp, Homo sapiens
ggatttctgtaattactctgggttagtagtgtgacaatcttgaggtcagagggagcagtcttctctgtaaattcacagtttgaacaaagccttctgaaagagatcattgttttgctttgcatgtacaaacaataaatgtacactgtagttatcacatgga

SEQ ID NO: 171762 - DNA, 548 bp, Homo sapiens
ctattgaaacttctaaactgtgctattgaaacttctaaaactagggaaacttctaaaactagggcttgccagcaataacatccactggactgatggacgttgtctaagggctgtttaaccagacccagcctgcctttgttcccaggacagcctcagccccagtgctgagctgcagcgccccctggaggaagagagacagctgcacctcccagcccacagttggaggggctcttctggtgaaagtcagtctccttggagaaaaaggataaaacttgctattgaaacttctaaaactaggcctagttttagaagtttcaatagcagaagattgctattgaaacttctaaaactagctgatgcagtggcagaacagtgaggcattgtgtcctggatcgtctgggagcccagtgtcaagtccgctggaatgcaggaagtagaacagaatcgccacgctattgaaacttctaaaactaggcctagttttagaagtttcaatagctcattcattcattcattcaacaaacattcagaggtacttaccatgtgcc

SEQ ID NO: 171763 - DNA, 270 bp, Homo sapiens
gtttttacctgtgcttctgaccaactggctaaaaatcagggttctgcaaccccttccttcagttttaataatttgctggagaagctcacagaattaatggaaacctggttactaggctcttacaaatgttattttaaaggatataaataaaccgtcaaatgaagagttacagaggcaagatgtacaatggtgaaggagcttcaattcccttggagaaaggtgtgccaccctctcactacatgaacatgttctaggttacctttctggaag

SEQ ID NO: 171764 - DNA, 506 bp, Homo sapiens
ccgagggcctgcggggcggggagtagcctctggctgtgagctgggaagccctcactctggagggacctggttcctgctggtaggtgtctcccaagggcctcccataggggtgttgccccaagacaggctgaggggtaggggctgcaggcaccgtggaggggtcttcctgccacaggcagcccagcttaaagtgagggtggctgcatcattctggcctggtataggcatggagtgttggagtccgggagtgctgcaggctggcagggatgggggtccacacacaggagtgcatgggctgtgagcttagtagactccttcataaccaaggtgggtggtgtccccacacctctgccaggagcctacagggattgactcagttctgttgagaggcagcttagtgagcaggtgggagtcagtgagatagctggagacttgatgtgtggccagggacatggtgagaggaggggcctccgtggggtgggaaagggtggggttcagtggtgggg

SEQ ID NO: 171765 - DNA, 622 bp, Homo sapiens
acatctagtataacagttgcttcttccaattttttggattgccttttgtagggaaaggttttttttcctgaagatatatctgtggttttgtttgggtagggtactttcgctttgattctggatgtgtgcagaagtggagtcttcatataatttcttcaattgtaaatagcatcagtggtgtttgtgattttcccagtggcttaagctgcaatagttagtggtaacaacttgaaaactgttatggaggcctagagcttgtgaaattccattaaaaaattgtaaaggcacatattcataatggtgctgagaactttctgtcttttaagtgaagaatattaaatttttttacaattatttttgaccaaaaacaacataattctatccagtccctatgagttcactgcctttgtagaaaatggcattgctttatgaatctgggtgctcctgtattgggtgcatatatatttaggatagttagttcttcttgttgaattgatccctttaccattatgtaatggtcttgtctcttttgatctttgacggttacaagtctgtattatccgagactaggattacaacccctgcctttttttgtttcccatttgcttggtacggattagcg

SEQ ID NO: 171766 - DNA, 655 bp, Homo sapiens
tagctgggcgtggtggtgcatgcctgtaatcccagatactccagaggctgaggcaggagaatcacttgaacccaggaggtggaggttgcagtgagctgagatagtgccattgccctccagcctgggcaacaagcgcaaaactctgtctcaaaaaaaaaaaaaaattaattaactgggcatagtggcacgcatgcttgtggtcccaagctactcaggaggctgaggcaggaggattgcttgagcttaggaggttgaggctgcagtgagccaagttcatgccactgtactccagcctgggcaacagagtgaggccttctcttaaaaaaaaaaaaagactgtagagccagactgcctgggttcaaatctcagctctactactaacttggacaagacactcaacctctctatgtcttagtttcctcatctataaataaggttaagaacagtatcaacctcacagagtgttgtgaagattgagttaaaatatgcaaagcagggtagtatatgtatatgtaataagaggcaagtacaaataagagctattattatcattaacattattgttacatgaaaagcatgatatttaattacctgtagtacaacacaacatacttagtgaaaaataacataatggaaaatgaatgtttagtattga

SEQ ID NO: 171767 - DNA, 414 bp, Homo sapiens
aggaggggaagtgtcacgttaagcctgtgccatgaggtgttccttgggatctttgaaaactcttcttctgagtgttaatgatagagcaaggccctagcgggaaacccttctccccagtaagtcatgccatgtcaggagtgaccaaattagtagtgatgcagggcaggtgacccccaaagtggagcttaccccatgagagttcttagctttccccagaaaataattcaagggcaagctagaggtagaagaaaacagctttatgaaagaggcagtgttatagccctggtgatgttgcagctccttgactgctcctgcagagtagggccaacccctcagcagagagaagcagctcagggcagttttgcagttctatttataccacttttaattacatgcaaatcaggaggcagttca

SEQ ID NO: 171768 - DNA, 359 bp, Homo sapiens
tgtcttcaaattttgtctaccacattgagtcaaatagaaggtatgaaataagaagccagaaataaaaacatattaaatgccccattaaaaagacaatgattatcacagcactttgggaggccgaggcaggcagatcacgaggtcaggagatcgagaccatcctggctaacatggtggaaccccgtctctactaaaaatacaaaaaattagccaggcgtggtggcgggtgcctgtagtcccagctactcggaggctgaggcaggagaatggcgtgaacccgggaggcagagcttgcagtgagccaagatagcgccactgcagtctggcctgggtaaaaaagcgagactctgtctcaaaaa

SEQ ID NO: 171769 - DNA, 748 bp, Homo sapiens
atagacactcatagaaggtgacaattatatgaatcctcttttcaagaagaccatttaaaggagtgaaagggattatttaaaacatcgttagttgcaagttgttttgagaagcataagttatatcaatattttactagttatattttgagggacataaatataaaaatggagagtattctattatttcctgtaattgttcagtaaacattaaacatgtttttctattagaatttttcacataaaattgaatctgtattactatggaaagaacattggatttataatttccctccaattatcaactgaaaatactccaatattttccccaaatatcagaacaaaggtttgactttacaacttattatttaacagtgcttaattagcttttgtctaattactgtcccatgtgtttgggactttcttcatttgataatattaaatactttttcaaattctcaggtgataggaaagcaagagcagatcaaagagaaatgagagagtatacccaatatatacttcctgtgcccttctttcttttctaatgcaagcaatgggaacatagaaactatttgaattttaaacgactggatataaaattctccaatccaatgagggctgaaaataatttttagcttcaaaatttgcatttaaaatgataacagtgagtaatgatgtattagagttaaagaaacacttgtgacagatatctccattcgctgataaagaataaatgcttccaccagattta

SEQ ID NO: 171770 - DNA, 365 bp, Homo sapiens
gtgttcccacaagccagagtggaaagacctcctaattcaaagggcatcgtggaggctgcagcagggtagtgtgtcagcaatggggccagattagccccaggctgaaggacccacactaacgaggcttctaagcaatcctcaaaaggattccaacacaacccaagaatattcaaagtaataccaaaaattcagcacccacccatgtacctttcacaatgtctataccattcaatcaaaaactatcacacatagaagcaggaaaatatgattcatacccagggtcaaaatccatcaatagaaacagacccagagaagacagatacaatgggatttgtatacaagaacagtgaggcagtgctaactag

SEQ ID NO: 171771 - DNA, 873 bp, Homo sapiens
catatataataaaatatatttcacctaatatttaatttatgtgtttattatttttacaaaagaagtctgtgacaccataaaactggtacccacagatgctctccttattctcacttccacccatcctcaattgtgtacccacttgtgagccgtcactcctgtaaatcaggcaatgttgactggattcctgtgcccccctttcatttcccaccctcaggctccagtcctgtctttatccagatgcattcacagctggagactagccaggagagaaagcaaaccattggcctcaatgaggcagggctggagaccaaagtgcagggaagccctactctgccctgctagccccgcaggtcaacttgaaccacctgagtgcctctggcctcccggctagggaggagacagtcatccacagtccagccccctgccatgagctgcagcctcagtctgatccacccacccacctgggacagggagagagtgacagaggagaagggaaatgcttgcaggtgaaaatctgcctgcttttcctacagcaatgacatatgggcttcgagtagtttctgtttgcatcatctcacaagacttgattgttaattttccggagttttgcaggctggcagttaaacaaagacatcatgcaaaattaaattatgcaaacttaagagttaaacaaaggccaggtgtggtggctcacacctgtaatcccagcactttgggaggccaaggtgggctggtcacttgagcccaggagtttgagaccagactgggcaacatggcaaaaccctgtctctacaaaaaagtacaaaaattttccaggaatggtggcatacacctgtagtcctagctactgaagaggctgaggctgaaaga

SEQ ID NO: 171772 - DNA, 847 bp, Homo sapiens
catatataataaaatatatttcacctaatatttaatttatgtgtttattatttttacaaaagaagtctgtgacaccataaaactggtacccacagatgctctccttattctcacttccacccatcctcaattgtgtacccacttgtgagccgtcactcctgtaaatcaggcaatgttgactggattcctgtgcccccctttcatttcccaccctcaggctccagtcctgtctttatccagatgcattcacagctggagactagccaggagagaaagcaaaccattggcctcaatgaggcagggctggagaccaaagtgcagggaagccctactctgccctgctagccccgcaggtcaacttgaaccacctgagtgcctctggcctcccggctagggaggagacagtcatccacagtccagccccctgccatgagctgcagcctcagtctgatccacccacccacctgggacagggagagagtgacagaggagaagggaaatgcttgcaggtgaaaatctgcctgcttttcctacagcaatgacatatgggcttcgagtagtttctgtttgcatcatctcacaagacttgattgttaattttccggagttttgcaggctggcagttaaacaaagacatcatgcaaaattaaattatgcaaacttaagagttaaacaaagtgctgggattacaggcctgagctacagcgcccagcctctgccttattattttattcccacgagaacagagatcgaatacgcactaaagtcagactctgtaaatagatgggaatgtatctgacatagcatgttgcagtgaatagtaggtatagcgatcatcatgagtata

SEQ ID NO: 171773 - DNA, 526 bp, Homo sapiens
gatctgtaaatgtaagcaaatatttgaatgcacggtagcatggtggaatcagagcaagaatgtgaactgaaatttttgccatctgtttctgattttcccctctagattcactctccatttatatcccccagagtctctgtcttgggaggctatgaattaagtcaatgggctcccttcctttctgtttatcagttggatttggtcagtggggagtccaggcagggatctgcaggaggaaggacattgggagctgggtatttctctcctggactcactctgtatgagtcactacaggctggctgtgttcttcaacagaaggttattgctcttcccaaggtgacagctcctatgggactcactttctaacagggtctcataactgtcccttgctttgttgtttattggcacctagaaatgataaagttgctggccccaagctcatgaagaattccttgaagcctccttatacccttccacagctttgtaattagtctttttgtaaataaacccacttcaaattatccta

SEQ ID NO: 171774 - DNA, 273 bp, Homo sapiens
tcttgctcttccctagataatgttgaaaggcttccaggacttagtccttgaacttgatctcttctctatgtttactcactaaataatgccatctagtctcctggctttaaaattccagcctgggccaggcacagtggctcacacctgtaatcccagcactttgggaggccgaggcaggtggatcacctgagatcaggagttcgagaccagcctgcccaacatggcaaaaccgtgtctctactaaaaatacaaaaattagccgggcgtggtggt

SEQ ID NO: 171775 - DNA, 177 bp, Homo sapiens
agagctttcaaggggagcaaaagaagctagtttatagatgtagccaaagccaacacctctcttcccccaccctggaagagaggcttgctggggagaagctgtcaggtgaacagccacgaaaaaagcagatgccaggaggtgtcctctccacacagttcctggctctttagcaccatg

SEQ ID NO: 171776 - DNA, 821 bp, Homo sapiens
gcccatctcttcacataactgaaagatggctggttctcccagaagagccagaggcctctaaatggagtgaggtcctttctctgcatgtcctgtctctctccagaggtgggcttggaatctctttcgctttgaccggtgactaccatcccctccactcctgtccctcccctgcatcactccatgttacccctggccccagaggtctctgaggtcccatcaccttctgatgactctgtctgcagggatgagtctgttgttactgagccgctagccttcagcttcctctcccatggtcattcccgaggctgcccactccccctagttgcccacaagccttatgaactcccatctccgttcctcctgtgtggcctgttctggttccctctcctccctgtcaggctcactgtatctttgtttcccatgatcctgcagtcagggaagaccaagccccagttactttcctgatgagctcaaagtccagaatgcagtcacgtgactggggtgggaagccatgcacagggccctgagagggtgtgagggattcgaggcagctgtggaaggagagcccttccagctgagatgaattcagccccagagaggcactaaacaacctaaggatggtacagttccccagttattaaaaatttgcatacttactataaagggtttagtaaaacatagtctagaggaagaaaaccagaaaagcatgatgtgtccatcttcccagtgcttaacattttataccgtgttcttttcctctctcccactccgcgtgagtgcttctatgtctttatattggtagatcttacttagaatctgac

SEQ ID NO: 171777 - DNA, 452 bp, Homo sapiens
tcaggtcaaacatgtttactgttaactcatttattcaaagcaaattttctcagtatctattgaccaggcaataggatatgtctttctacaagtgacattgagaaatgcttccttttgtctctcttctgaggaagagaatcttcttgctcctgagaaagaaaacatgagccagtcagattcctttttatgcatatgtgaagaatgtctgatgttctaattttctagtatgtctcaaattatgctacttgaatttccaggctctttcatgccttttatttagttgaggctttggtgttacaaatctgatgttcacatgccagttctcttcaacacagttcttctgctttatcattggatagcatgagcttttccttgccttggtgctcacatgttccatgtacaggatattgactctctcagttctctttctaatggcctctctcaggctgttg

SEQ ID NO: 171778 - DNA, 502 bp, Homo sapiens
gacaaaatacatggctgagaattaaggatcactattacgttcctttttgtttagaaaaaaatgtactttaagtctatcacatctaatttaggaagcagcccttccaattgtggcaggtttggttccaaggcagatttgccagaattattgaggggtgtgggcaggagaggtatgagaatttaaaaacacaaacataatccattagttcaatgcacgcaggagggtatgtttcgtgatagctggagagtaatcctccatattactgaaatctctattccatataaagcttgctcagaattaacctatctcaatgaaagacatacaatcttatcagaacttatcagatcttatgacccagattcttcaagtcaagaaaacaactttcttggcattgtctttccaagataataatctagtttatccaacaaggaaaatccttttatctcctccttcatccacaacttttctctactttcccacatctcttgaccgtgggcttact

SEQ ID NO: 171779 - DNA, 265 bp, Homo sapiens
attcgcggccgcgtcgactcattccattccattccattccattgcattccattccattccattccattccattccgttgcattccattccattacattcggattgattctattcaactcccttactctccattacattccattccattcgggttgttccattccattccattccattccactccattccattgcactcgggttgattccattccattccattccattccattccattccggatgattccattccattgcattccg

SEQ ID NO: 171780 - DNA, 479 bp, Homo sapiens
gagtgacaaaaagaaaaaaaaaaaggaaattattgtcgtatatattgtcccttcaaaggctggaatcattcgtattccattcagcaagtttcagcaatacatcaaacaaaatgtatcacttaattgaggaaaaatcattctaaaagatacaaaaaaccctgaaaccatcagttaattgaagcatttactttgtaaatctgtagaaaacgcttctgttattttgtatttttaaaaaatcatggctgggcacggtggctcatgcttgtaatcccagcactttgggaggctgaggctggtagatcacgaggtcaggagttcgagaccagcctggccaacacagtgaaaccccgtctctactaaaaatacaacctccgggggtccttatgatttggctgttggttaatattaatgcttgaagactaacatgaatctttatttcctcccaatacttgggttacaggttggctatgctacggagg

SEQ ID NO: 171781 - DNA, 344 bp, Homo sapiens
tctggggggaagggggctgagggatagaagatgacacactgggtgcagtgtgcactgctcgggtgatgggtgcaccaaaatctcggaaatcaccactaaagagcttatccatgtcaccaaacaccacctgtttccctaaaactattgaaatcttttaaaaaagtttcagtggctatataaaggaacatttataaaccatgatgccttaaacactgaagttctagattaacttaatccaaattactactttaattactaaaaaagcatatgagaatagagaactcatagttcttgcggttttaatctttgtgtcaccatgtgttggtacagaaccaaccaattag

SEQ ID NO: 171782 - DNA, 236 bp, Homo sapiens
gaacattatagccttccatttgggggcggtggtatttgtttcttgaaatgccttttcggatgctcattatttccagtcaagaattccttttgaacagctactctggccaggcccaggagagtcagtggtgaacagaagctgacccaggctctctccagcaagttggtgacagggtgagcagtgacagtctcaagtgctggatcctgagctctgacccgcagccctgtggtgatagg

SEQ ID NO: 171783 - DNA, 662 bp, Homo sapiens
tacgagttcaccatgttgcaggctgtcatgaactcctgacctgaatagatctgcctcagcctgccaaagtgccgggattataactgtgagccaccatacccagcctgtgtgtagtttttctgtgaaagaatatgttggttgcaagtatgagaaaacacaagttgggctggctttagctgtatggccatgtattggctcctctgacttaaaaggccacagtaggattgacttaattgagcagcccaggctcccctgctctgttctcccctgtgtgcactcgcacactttgttatcaggctggcttcattatgttggcagaatggcttgtggctcacatcttagagccactcagtaaagcttagaagagcctaaaaatgacttctgtcatctcttggccataacggggtcacttgcttacccacaaccattaataggggtacatagggttatgcacatgagttgagagctaagccacaaccccttgagcaaatgtggagggagcttctctcgaaacatggttgctatctaaacaaaaacctggagtgcttttaggaaggggaggacaaggattggatgccaggcaggcaacaaacagtggttattaagatgctcccccagggctggggcgggggctcacgcctgtaatcctagcactttgggag

SEQ ID NO: 171784 - DNA, 390 bp, Homo sapiens
ggagaggtatgtcaagggtctgattgggcccacccaggatggtttgcccctctgatggaggaagtctggtgacagagaggttgcaacctcatgggatgaggttctagggtcaaggtatgaagtggaaaccagagattgccaactacttatcatctcacacagctggattcccgttcggtgtggtgagaggcaagcggaactggagacaagttccatccccttctcgtcttccattcgggacatccgctcacggaacagggtggctgagtgtctacatctctctctctctcccttttcatcctgaggacctacagttgagttcctcttcgtgacggtgtgtctgctgggactcacctgcatgttcacgtatggatagaattcctatcgggg

SEQ ID NO: 171785 - DNA, 444 bp, Homo sapiens
tgagagggagtctcactctgtcgcccaggctggaagtgcagtagcgcgatctcggctcactgcaacctctgccttctgggttcaggcgattctcctgcctcagcctcccaagtagctgggactacaggcatgcaccaccatgcctggctaatgttttttgtattctttgtagagacagggtttccccatgttggctagactagtctggaactcctggcctcaagtgatccacccacctcagcctcccaaagtgctgggattacaggagtgagccaccatgctcagcccatatataatcattttaaagcacataaaacaagaagttggaagcactgataatggaagcaaaactaatgctaaggtattagtaagattaggagaattaaaaaaacaaggcaggtaaagatgttaacttagaaaattatagctaagctattaaggagt

SEQ ID NO: 171786 - DNA, 845 bp, Homo sapiens
gggctttcaaagaagcagatccaatgcccactgcccttcctcactcccctaatagatgtagggcaccatggacttttacagactgagggacatactctggatgagaatagtttaccctatcaaggaaaagtaagttccccagatgaaacgccacagataacaggcatattgtaagtcaggctttgtacgttttccaaaactcactacagggatcccctttgaggtgcagaatcttgtatcacaataatcacgattccttggccaaggccttttgatgtcatggtccgtgtttttctccggatcgttgggcatgcggaggcagaaggagagcctggcagagtgaatgacaaacgcaagggaggctgcagaggggagggagtgagggcggcccagggcccagcccggcgggagccgaggaagagaaggaccagccagccaagggcgggcggctccagaggaggcccgggactcccaagtttcccagcctcttccaccccacgcggatccctgccccgacgctgattcagggggtcaaagcctccggcggggcggaccgcggcggtgactggaggcgccccagtttctctgggtgtggcctgcggaccccctcgggagcaggtcgtcccgcaccagtgtctgcccccggcccccagggacacctgcacccgccccactcacgacggcgcgtcaggtccccaaccaggcgtggggcggggtgggaaggtctcggttcggccgccccgcctgtgctgtccccaccgccccccggcctcgggcagcgcgctcccgggtcacccacctcccgcgggcatgcgcagggcggcccctccgggcgctgcggccgc

SEQ ID NO: 171787 - DNA, 189 bp, Homo sapiens
gcggccgcctactactactactactgctcgaattcaagcttctaacgatgtacggggacatgccaggcaggggctgaccctcctgcagcttggacctttgacttctgaccctctcatcctggatggtgtgtggtggcacaggaacccccgccccaacttttggattgtaataaaacaattgaaacacct

SEQ ID NO: 171788 - DNA, 508 bp, Homo sapiens
cttgacaccagcagggtgacatccgctattgctacttctctgctcccccacagttcctctggacttctctggaccacagtcctctgccagacccctgccagaccccagtccaccatgatccatctgggtcacatcctcttcctgcttttgctcccagtggctgcagctcagacgactccaggagagagatcatcactccctgccttttaccctggcacttcaggctcttgttccggatgtgggtccctctctctgccgctcctggcaggcctcgtggctgctgatgcggtggcatcgctgctcatcgtgggggcggtgttcctgtgcgcacgcccacgccgcagccccgcccaagaagatggcaaagtctacatcaacatgccaggcaggggctgaccctcctgcagcttggacctttgacttctgaccctctcatcctggatggtgtgtggtggcacaggaacccccgccccaacttttggattgtaataaaacaattgaaacacct

SEQ ID NO: 171789 - DNA, 843 bp, Homo sapiens
cttgacaccagcagggtgacatccgctattgctacttctctgctcccccacagttcctctggacttctctggaccacagtcctctgccagacccctgccagaccccagtccaccatgatccatctgggtcacatcctcttcctgcttttgctcccagtggctgcagctcagacgactccaggagagagatcatcactccctgccttttaccctggcacttcaggctcttgttccggatgtgggtccctctctctgccgctcctggcaggcctcgtggctgctgatgcggtggcatcgctgctcatcgtgggggcggtgttcctgtgcgcacgcccacgccgcagccccgcccaagaagatggcaaagtctacatcaacatgccaggcaggggctgaccctcctgcagcttggacctttgacttctgaccctctcatcctggatggtgtgtggtggcacaggaacccccgccccaacttttggattgtaataaaacaattgaaacacctaaaagaaaaaaaacaagaaaaaaaaaaaaaaaaaaaaaaacaaaaaaaaaaaaaagaacaaaaaaaaagagagggcgggggccccgaacaaaggaaacccccgcggagggggcccaagaagcaacaggaggaacccacgcaaagatatggtgaacaaagggggggccccccaaagggggagcacgatcaaaaaaaaagacgacacaacaggaaccgggcataaaaaacaacacgcggaacgcaggaacaaacgcccgacaagcaagaacaacggaggaaagaagacaacaccaaaaaggaggggagacacaaaagaggaacaaagcaacactaaa

SEQ ID NO: 171790 - DNA, 754 bp, Homo sapiens
  misc_feature (754)..(754): n is a, c, g, or t
cttgacaccagcagggtgacatccgctattgctacttctctgctcccccacagttcctctggacttctctggaccacagtcctctgccagacccctgccagaccccagtccaccatgatccatctgggtcacatcctcttcctgcttttgctcccagtggctgcagctcagacgactccaggagagagatcatcactccctgccttttaccctggcacttcaggctcttgttccggatgtgggtccctctctctgccgctcctggcaggcctcgtggctgctgatgcggtggcatcgctgctcatcgtgggggcaggagatccagggctcctaaaacatgaccgaggttgagatgaaggcttgttcatggagtcaaaaatgtgtctaaaagaaaatggccagaaaggactacagagcctcgacttaataccaattgaagggcaatgctgttagattaaactgaaggcgacttaaacagcttaaagtttagtttaaaagttgtaggtgattaaaataatttgaaggcgatcttttaaaaagagattaaaccgaaggtgattaaacgaccttgaaatctatgacgcagggagaattgcgtcatttaaagcctaattaacgcatttactaaacgcagacgaaaatggaaagattaattgggagtggcaggatgaaacaatttggagaagatcgaagtttgaagtggctggatgacagaagtcccggatggcgaagaaacgaatagaggtgggttccn

SEQ ID NO: 171791 - DNA, 738 bp, Homo sapiens
cttgacaccagcagggtgacatccgctattgctacttctctgctcccccacagttcctctggacttctctggaccacagtcctctgccagacccctgccagaccccagtccaccatgatccatctgggtcacatcctcttcctgcttttgctcccagtggctgcagctcagacgactccaggagagagatcatcactccctgccttttaccctggcacttcaggctcttgttccggatgtgggtccctctctctgccgctcctggcaggcctcgtggctgctgatgcggtggcatcgctgctcatcgtgggggcggtgttcctgtgcgcacgcccacgccgcagccccgcccaagaagatggcaaagtctacatcaacatgccaggcaggggctgaccctcctgcagcttggacctttgacttctgaccctctcatcctggatggtgtgtggtggcacaggaacccccgccccaacttttggattgtaataaaacaattgaaacacctaaaaaaaagcagcagcaagaaaaaacaaaagaggggcgagccgtctcttaacagtttctcccttgcgaaggcgcgccccctcgcttatccgcggtgtaccccagctttctattggactacaaacaggtggctcccctattagcgtgcggctcgcctataatataccgcgaagcgacccgttggccgcgcagcgtctttccacacacgtctgtgtgcactcggggcacaat

SEQ ID NO: 171792 - DNA, 206 bp, Homo sapiens
aaaaaagagcaaacaatggtaaaatgttagcaaagttagagctgagtggtgggtacaaggattactatggtgttcctttctgtatcttaaaatggttatcattacagttttagaactgaatctggttttaaatacaggccgtcacgtgaggtgggggtttttttttttttctcccccttctttctttgggttttttcgtctttgtc

SEQ ID NO: 171793 - DNA, 731 bp, Homo sapiens
aaaaaagagcaaacaatggtaaaatgttagcaaagttagagctgagtggtgggtacaaggattactatggtgttcctttctgtatcttaaaatggttatcattacagttttagaactgaatctggttttaaatacaggccgtcacgtgaggtgggggttgctctgctctgtctaatccccacacaaagggcagcccttgccccattctctccgtccatcccttgctgacgccagccgtcgggagtcagccccttgctgtctgaaggctgccggcccgtggcccatgccgagctcctgtttgtctcagaagaactggcttcctcaagctttgatagggccaaaaggaggaccctcatcttcaagccctaacagccttcctaaagtcacccagacctgccagttctgcccaggcgtccagacggcaggcatcttagacgtcgctgcaagggtctgctccagatggtgagcaccttagacagacgttgctggaaggcactgctctgaacggtgggcacctaacagacgttccgggaaggcactgctccggatgttgggcatcttagatgttcctggaaggcactgctctggacagtggacaccttagacagatgttcctggaaggctctgctccgatgttcctggaaggctctgctccgaacagtgggcaccttagacagacgttcctggaaggctctgctccgaacagtggacaccttagacagatgttcctg

SEQ ID NO: 171794 - DNA, 482 bp, Homo sapiens
tacctgcctggagaaatgatcattttttccttcaaactttgctcttcccttttaattttttgagtagtgctttctattaactccctgacttgtacctcaatgctttggacatcctctgatttccctgctaagattaccatctccttaagtgtatcaaactcaatcaaaatcctgtcatctttcacatcattttttatggtgtcccacattgttggatccactttaattgggttgactttatatttagacctgatgctagagagtgttgtggaagtatctgcctgccaggtcttgattctcggtcttccttcattgactaaggtggctgctggtctgatggtaactttaccactgagttgggaccacgtgagctcacagtgacaacgcctcatttcatcgtttatctcctcaatgaggtgattctttttctgtaagaacttccataagggaagatctagtgactcttcaaatggtgctggaag

SEQ ID NO: 171795 - DNA, 844 bp, Homo sapiens
tcagaatagatgaagaaaagatgaaaggacaaaaggatgtggcataaagataacaagctgagatgaaaagggaccaaaatatgataaaggagtcatttcaaagtgctgcaaactaataattataggtaccattgaagaagagggcaagcaatcataaaaaaagaaacaatcaaaggcctaggtgaatttgattttttgatgttgattaaagccttgagttaaaagtgctgattggttactagaaaatatttatgaaaaaagacccatacttagacataacatggcaaactgaaatgtaggtttaaataaaacataattccataagcatccattaaccagaaaccgattatgtaaaaaaggaatgaaatcaatctggtatcagttttattctttgcagcactaatatcaggaaatagaaatggaccaaaatcttcaaagttctcaagttctcaaagggcaagattggggaatcagggttttcatcctacaaacaagtcattttgtttttgtattgttttgtttttaaatacaagggctctcagaatggactactcacatgctcttatctacaaaataagtagataaaattaataggctgacttaataagattcaagatatcgagaacaagcaagtattattcttatttttaaaatttgatattgagcataaataatacaaaagcaaaaaaaatcaaaagtaaaaatttatatgaaagagagataatggaaagaaaacagacaaacaaaacatcagcatggtgatatgtgtctacttttaagagcgagtgtaagcaagataatataagtaaaataatctgttatgacaataaatataaatgagtta

SEQ ID NO: 171796 - DNA, 891 bp, Homo sapiens
tctaaagacctcctcagaagagagagtatttgtacacaactttgccagagagggaagcttggcagtgtgaacgtgtgtggggtgtcccgggcgcggcgggcagtcagggtggccaatacaaggtgctggcggtgaggtgggggcggactgagcctgtgtagtgaagtgtcttgaggaacgtcagctgtatcttttaggaaaccaaaactgcatagacattgaacccaggcagaaggtcatgaagtcagagctaagaaatgctagtggggatagggggtgagatagagttgggaaatgtttcagagctacaggtgacagttgttggtgtccagttggatatgtaccatgaagggaagaagcagtcagagtgggcaccaagctttctagcctggaggactgaatggttctgtgcacatttcagatggaaagaatagaggcccacagaaagttaatgagatgcattttatacataccagttttgaattttaaggacctgtggggtagatatccaagatggctattcccagtaatttgtatttatatcttgctacatcgcagaaaggatttgaagctgctaacacacataagatataagattaaaataggctggacgtggtagctcacacctgtaatcccagcattttgggaggccgaggcgggtggatcacttgaggtcaggagttccagaccagcctggccaacatggtaaaaccccatccctactaaaactacaaaaattagcaaggtgtggtggtgcgtgcctgtaatcccagctattcaggaggccaaggcaggaaaatggttgcaggaggcagaggttgcagcaagctgagatcatgccactgcactctagcctgggtgacagatcgagactccatctcaaaaaaaaaa

SEQ ID NO: 171797 - DNA, 657 bp, Homo sapiens
tgcctgttgagtacaagtgctaaaatacaggtttctcagtattgtttcacatgtaaagcaaaaagccttttaatgcaacacctttttcctttttaccaggtgattttgttattgatctctaatctgcccctttagctgtattaaatgcttaaagtgttctgcttttccatgtagccttgatgctagctatttgtgtctataaattcattaacattaaaacaggatctatatagactattagagtctatgagttagaaaatggcatattacatacttgtttagggcataaataacaacataaatttaagattatctgcataaatgttataaaaatatgttcgttgataatatgttatgagattttaattatgtatttataaggaacatatttttcacaatctctcttttctttagcaatcactgtacacttaccaggagaataagagtagtcaactccatttcttaccatatccatccatacctagaaagaagaaaaaaccaaaactgggtacatttttatatataaagatatttgaacacggctgggcacaggctcacgcctgtaatcccagtactttgggaggccgaagcaggtggatcacctgaggtcgggagttcaagaccagcctgacaacatggagaaacccgtctctacta

SEQ ID NO: 171798 - DNA, 262 bp, Homo sapiens
tggggcttcctgtctgtcccacccgttcttcaatccgttttctctcctttattgtagatgctctccttctgtcattccattttttcttctgatggtttagaaattactctctttcaatcttgagttagcatcgtaggaattaaaacacacatatttataaaagtttaaaattaaatgttaagatcactgtaccatgaccttcaacatttaattttaaactttgacacctttaccctgctaaacaatacagtacagtgacctt

SEQ ID NO: 171799 - DNA, 524 bp, Homo sapiens
agaatgaggttgagatttctttttctttcactattctaaagatgttgctctactgttttcttgcttgcattgtttccaataaaatatttgtcattattttggttcttccgtacatagcattttcccccctttggctgcttttttttttttttttttgagacggagtctcgctctgtcgcccaggccggactgcggactgcagtggcgcaatctcggctcactgcaagctccgcttcccgggttcacgccattctcctgcctcagcctcccgagtagctgggactacaggcgcccgccaccgcgcccggctaattttttgtatttttagtagagacggggtttcaccttgttagccaggatggtctcgatctcctgacctcatgatccacccgcctcggcctcccaaagtgctgggattacaggcgtgagccactgcgcccggcccttggctgcttttaagatttgctttattactggttttgagtaatttgactgtaatgtaatttggtgttattttcttcaca

SEQ ID NO: 171800 - DNA, 568 bp, Homo sapiens
ttttggcctagtcctgcccacaaaggtgccagcagtcaccagctgaactgcccagtagataagacaccagagctaacacaaagactccccacttgattgcttcctttcctgccttttaaaagtacccgttgtcagctccaaaagtgaagcaatacacttaaggcaggatgcccgtatttcttcccctaagctagccttggaataaatcactttttttataccagaccttgctcttgaaaagtggactctgcaggtggcaaacaactaacctacagtttggttacagctggggtcaaactcccatgcctctctgactccttttagatacttctgacataaccatcggtaacttggttttttttttttcacacgttgttgtcctactttcttgcaaaatagttttgagacagttttaaaaattgaaacacacataaagaagtacatttaaaatttttttaatggagtaagagtaaaaacagttcagaaatttattaccccaatattctacagaaaataaatttctgaactgtttaaccatttaaagacaagtaaccatttaagatttatt

SEQ ID NO: 171801 - DNA, 208 bp, Homo sapiens
agcacagtggctgccctgtactgaaacttctaaaactaagaaatctgtgtgggatgaatagcacccttagcaccattgctaccttatgtgattcctaccatgaaaatctgcactttaaaaagcaggaaaatttgaaatccctagttttagaagtttcaatagcaatctacctggaaaaacaactggatgaactactaagtagaagaaa

SEQ ID NO: 171802 - DNA, 1541 bp, Homo sapiens
  misc_feature (3)..(3): n is a, c, g, or t
  misc_feature (132)..(132): n is a, c, g, or t
  misc_feature (284)..(284): n is a, c, g, or t
  misc_feature (440)..(440): n is a, c, g, or t
tgngacggagtcttactgtgtcacccaggctggagtgcagtggcacagtctcggctcactgcaacctcagcctcccgggttcaagcaattctcctgtctcagtctcccgagcagctgggattacaggtgccngccacaatgcccagctaattttctgtatttttagttgagacagggtttcaccacgttggccaggctggtcttgaactcctgacctcaggtgatctgtccccactctgctctgcttttctaagtcattgtcttctcaccgaaagtgtctgtcntttcctgtgtttcactgtggcaataatgcctctgatatgtacagggttggcgctctgttacccgattgctttccagctgtgtctggttcccattcatgctgcctccagcaacggataagtatacggcagcacctccttatttgagtgcaaatgtcnggttgtaatagaggtagatgattcttggtgtggtgccgtggtcattgtcgttttgtgtcatggtaacatgtcatccgacgtcggccgtccacaaatgtctgcagctacgatggaccctcagctgctggacaggaaagaggatcaagctaagaaggcccagagtgtgcaagcagagagagggtgtggacagaaaaccttgccttctccagggctagtggcgaaagctatctcaggctggctcaagtggagagaaaaaagcatgagatcaagcaatggacagctggggaagggctggcttttatttcctcagctcccaagctcagtccctggcactgggccgttgcctttgtaggtccctctgtgcccaggtcttgctatgggggttgtttcttggcattaaggtctcagttcaaacgccaccgtctccaagaagccctcactggtcaccctatctaaagtaaccctcactcctaaggacaaacctgttttttcttcctagcatagaccactctctgaaatcaccttgttctcccagtcatctgctgcccttggctgttgcgccagctataacatggcactctgccttgcccactgctttgtccccaggacccagccctgtacccagggtatggtaggtataagaggcctggaggccactatggaagagctcctgccagatggtggtggagtgcggtcatgaggacctcggcctccagtgtccccctccactctttcccagccctgtggtcttgggaaagtcatttaactctgctaagcctcagtttctgcatctgtaaagtgggaagaatcctctccaccttaagccttgctatgaggattaatgagatgcgtgtacagagtttagtacacggcctgccacattgtgagtgctcaataaatgttggccgttctcttcattatcgtcagcagctaacttcaggaacgagatcccctagggcagaatctaaggagaaactttcctatatcaaattgtatcttgtattgtggtactgaattgtttaactggtcctgaatgatataactggaatgaaaccagcttgtcatgtatatgtatacacataatatgggctgtcatatata

SEQ ID NO: 171803 - DNA, 511 bp, Homo sapiens
aaaagagaaagtatgaatatttataaataatatggtatctgggggcgaaaaacataataaaataataagaaagtagcttactacagaaagtaaagttctctgtgtaagagaatcatttaaatgaggtaaagcgattgggtcaaacacattaaaaatgcttgcttgccatcaagatacaatgagaatgaagagaaaggtgcagcttagtaaagccatacaacatatcagtgcacaggcagaacatcagctcactgtaaaataatctcaggctagtagctttcaatgacattaagggtttcagggacaggctaatcactgagtccattttagagccgtttggttttggccaaggggagggaagaagcaggtgataaaaaccatttcatcattttcaacacttttacgtaaacagatgtagaaatatcttcacacagcataatgaaaaatcacaaaggggctagatttgtaacacaacaaacaggttcaccacgtcattcgaagaaccaattag

SEQ ID NO: 171804 - DNA, 241 bp, Homo sapiens
atgaaagcataaaattggtgtgggattgccacttttttactggtatttcttcagaagccccacatgggctgcatttttcaaattaacattttgtatttttttttttaataaagaatggagcaattttgggcccagtgcagtggctcatgcctgtgatcccaacactttgggaggccaaggtgcgtggattacctgaggtcaggagtttgagacgagcctggccaacatggcgaaaccccgc

SEQ ID NO: 171805 - DNA, 235 bp, Homo sapiens
aggactccgtcacacgccgaagccccataacagaatgcacttggaagaagcagcgttttttcaattcttaaattctctagactctatgagtaaatactaaactgtattttcaaaggagaaacaggctggttctttcaaaatatggtccatttaaagtacttatccaggtcagatcagctgcttttttttttttttttgagacggagtcttgctctgtcgccaggctggagtgcag

SEQ ID NO: 171806 - DNA, 591 bp, Homo sapiens
aggactgggcagacacttgagaagtggccatcagttgtattgagcagttagcatgtaacactgtgtggaaacacacaggttttccttgggggagtgaagacagagacaaatgtggggcaatgaagtcagagacaaagacacttaatggctgtctcttcccaaatatacaccatgtttgggaagaatgcatctggaggcttttgggaaaaagaaatatttcataatcaagtgtttgcctaggatgctgcccttttcctaaaggaaatttatcaacatctgtttcacagccacaagataattgcatgtttattgaagttttgagatccatttatactggctagagcactcactgaacagttttgtagtcttcttataaaatattagattgggacttgttagagttatagattataaacaccacccaaattcaacattctgtaaatttttaccaccagttttatggctgaggctatcttagctctcttgacttccatccctagtacaagttgttggcattttgaaaggaaccctttcccctatctacagcaaaacaaaatttaaaataatttaacaaagttgacttttcactga

SEQ ID NO: 171807 - DNA, 654 bp, Homo sapiens
acaattttgaggttttgtttcctcgcctgttcactatgcctctacaatattcctccactgccctaagggagtgaaggtaaatgtttcagtgtgtcttcccctggaaattcttgactagttggtattttagtagtatttatttatttatttattgagttggagtcctgctctgttgcccaggctggagtgcagaggtggaatctcggctcattgcagcctctgactcacaggttcaagtgattctgcctcagcctcctgagtagctgggattacaggagtccaccaccacgcctggctttttttctgtaatcccagcactttgggaggctgaggagggcagattgcttgaggtcaagagctcaggaccagcctggccaacatggtgaatacaaaatacaaaatactaagaatacaaaaattagctgggtgtggtggtgcatgcctgtaatcctagctactcgggagtctgagacaggagaatcgcttgaactcaggaggcagagtttgcagtaagccgagatcatgccactgcactccagcctgggtgacaaagtgggactcagtctcaaaaaccaaaaacaaacaaacaaaaaaaagaaagtaaagaatgaatgagtcttgcttgctttcctgtttcctagtctcattatccaa

SEQ ID NO: 171808 - DNA, 258 bp, Homo sapiens
cacacacatacaccacagacatacacacgagcctgcaatgatggaagcaaaacagaacgtttggagatattcactgccgtttacaaggccacagtaagcagtaagcagattttctactcccctctagcagagaacatggtaggaaaagctagacattgtagacagcagtaagaacctaacagtcaacagtggacaatggattctgaaactgagatcctatactgcattcacacacgttaaggggcagggcgctgggaa

SEQ ID NO: 171809 - DNA, 477 bp, Homo sapiens
tcagcaatatgcccaagagctcgtgtttgcaatgctcgagtcccagccaggggagaaatgggtgtaagggacccacaggggaacaatttgtgttgacttggagctccacatgctccttcaaaggaagggagaaccttggaaggaggaaaggactgaagactttccagggaaattcaagagtctcaggcaattagtcagatccagaatatagatccaatattcagaagcagaagagggaaatgcaattatttgggggtctctctcttctagtctccttctgaaaagcccttttctaagacctcaattcctatgtctactcaatgggtatgattcctatcactttctcgtaagtacattttccttcaaagtttaaaaattttgtagatcttcaagtgcgtaaggcatagtagtgctaaacagaggtggaagtagtgaagggagttttgaacgtaaaaacataaatcgagagatgatgaa

SEQ ID NO: 171810 - DNA, 357 bp, Homo sapiens
ccagcctgggcgacagagtgagactctgtctcaaatgataatagtaataatcataatttaaaaaattaaaaaactgtgtaatagttggggcaaataggagtgggatgggtgctgtaggttgattggtcaagaaatgtttgtctcaagaaaatacttgaactgagacttttacgtgatatgaaggagccgtgcaaagatctgtggatacaatacgccagaaacgaacagataacagatgtccaaaatgcgaacacacctgacatgatgcaggaacaaaacagtaggccaatgtgactgtagtgcctacagtgtgatgggaagtgggtggagggcagtgtaggcattgtaagtcatggc

SEQ ID NO: 171811 - DNA, 260 bp, Homo sapiens
ctcagagagctacgtatcctaacaccaacacccaggtacaccctcggcagggatcccggtacacgcacaccctaccgggtgttctcacaactccaggtcgggcgatggacacccccagaaacagatatattcagtgcttcttgtaagcagggatccctttttctctccatatccccatcacctagcccagtgtctggcacacagtaggtattctgtaactcttgaatggatgaataaatgatttgttgacgatgggagga

SEQ ID NO: 171812 - DNA, 367 bp, Homo sapiens
caccaagccaaggtgggccgcaactgtggctgttacagttgattagttgcttcatttaacatacaagatgtctggggcagtggctcatacctgtaatcccagcaccttcagaggccgaggtgggaggattgcgtgaggccaggagttcgagaccagcctgggcagaatagcgagacccccatctttagaaaaaataacaacaggccaggcgcggtggcttgcgcacctgtagtactgctgaggagggaggatcccttgaacccaggagtttgaggtggcagtgagctataatcgtgctattgcactccagcctgggcaataaagattctatttataaaagaaaagaaaatgcaaagccagatgatgg

SEQ ID NO: 171813 - DNA, 470 bp, Homo sapiens
ctcagagaggagggctcacaggatttgacctttaccagcgatttctgtccatatgtggatgtaaacagttctggaacgttatgcatgcagttagcgaatccttgaattatgttctggtttgtacttgtcccatccatccaaacaatcatattacagtcgatgatgccactgcacttggccaagttatttatttttaatctctcttgcccttctcccaaggcaggcttaagttgagactattataggtgtctaataacctgtgacagagtaatgagtacatgcttaagatgttataattagccaacaccaacacagcaaaaaatataattccagccaaagattctggaaaatccctcagaaggagggataacaggatttgacctttaccagcgatttctgtccatatgtggatgtaaacagttctggaacgttatgcatgcagttagcgaatccttgaattatgttctggt

SEQ ID NO: 171814 - DNA, 201 bp, Homo sapiens
tacggcagggacagcagaaaacatgtaaagcactgtgggaatgcagagtggcagcgggaaaggctctaaattaggtctactgtggtccctggacctgcagcagcagaatcactgtgaactgaatagaaatacaagtctagggcccccctccagacctacagacacagaaactctgggggcagggcagagaccagtatttgt

SEQ ID NO: 171815 - DNA, 449 bp, Homo sapiens
gggacatggatgaaccttgaagatattatgctaagtgaaaaaagcaagtcacagaaaaacaaataatgcatgattctacttagtatcaggtatctaaaatagtcaaattcatagaagcaaagagtagaatgctgattaacaggggctagggagagaaagaaatgaggagctgctaatcaatgtgtgtaaaatttactacatgagatgaatcagttctagagatctgctgtcctacatggtgcctagggctaccaatactgtattgtactacaaaaaaatctgttagaagggtagatctcaagttctgttcttaccacaataaaaaaaaattaaggtttagcctatgtatcagcactgtgaaagggcttttattttattcttttcctttcatttaagggcactgtctaatttggcaagagcacagacaatttacatttttccagttatgt

SEQ ID NO: 171816 - DNA, 404 bp, Homo sapiens
tctcttatcgcccaacacattataggcaaatcaattttgctcatccaggctttgcttgcctgttaattttgtgcaggcgctttgtcaagattcaccagaggacaaatgatttggagaaggacaatgtaagagataaaagcatgaacagtataaccgggcaagcattagaatatttctgatatttaagtacaaatcctctttcttacttatccataaacccctgtctttgtaacacctagcacaggccatgctggttaatctggcagcctagaacaagaagtctctattcattctaattctttttattctttttttttttctttttttctccacatctgtagcaattgtaggtgaaataagaacagggagagtgtagcgggtaatggtgttggggataacatgca

SEQ ID NO: 171817 - DNA, 442 bp, Homo sapiens
  misc_feature (105)..(105): n is a, c, g, or t
  misc_feature (209)..(209): n is a, c, g, or t
ccatgcgtgtcatctgagcctctggcttccctgccagtccagccctggcagtgtcctacttcccagggctgttgtctgcctggcgggaaggtcctgggcaaaggntcagtctttgtactctgagagcagactacttggctcctctctgttttttatcagcgaagttggatatatctctcccacatttccctaatcatatgctatatatnggctttttttttcttctctatctcccaaatacatcaagatgtttgtactggatgaagctgacgaaatgttaagccgtggattcaaggaccagatctatgacatattccaaaagctcaacagcaacacccagggtgagggcagtcttgcttgaatagctaatgattcttgaaaaatagtaagtgcccagggggaaccaaatactggattcttgagcctttttatgcatctgctt

SEQ ID NO: 171818 - DNA, 373 bp, Homo sapiens
  misc_feature (105)..(105): n is a, c, g, or t
  misc_feature (209)..(209): n is a, c, g, or t
ccatgcgtgtcatctgagcctctggcttccctgccagtccagccctggcagtgtcctacttcccagggctgttgtctgcctggcgggaaggtcctgggcaaaggntcagtctttgtactctgagagcagactacttggctcctctctgttttttatcagcgaagttggatatatctctcccacatttccctaatcatatgctatatatnggctttttttttcttctctatctcccaaatacatcaagatgtttgtactggatgaagctgacgaaatgttaagccgtggattcaaggaccagatctatgacatattccaaaagctcaacagcaacacccaggtagttttgctgtcagctacaatgccttctgat

SEQ ID NO: 171819 - DNA, 706 bp, Homo sapiens
caatcttaagaagcaacaatgctgcagttaagaatatgtgtggattggccaggcgcagtcactcatggctgtaatcccagcactttgggaggctgaggcaaacagatcacttgagcccaggagttcgagaccagcctgggcaatgtggcgaaaccccatctctacaaaaaatacaaaagttagccaggtgtgatggtgtgtgcctgtagtcccagctactcaggaggctgaggtgggaggatcacttgagtatgggaggcagaggctgcagtgagctgagattatgccattgcactccagcctggcctgcagagctagctagaccctgacacacacacacacagcaagtgtggatgtttataatagtgaaaatttggaggcaatctaggtatctaatgggaagattaataaaattatactacatgtacccagtacagttccattaagcattaaaatcattttgtggatgtgtacttctggactttaattaggaaaaacgggatgaggaagaagactatgaaagatcaagtaaaatgtcatagaaaagaaacaaaaaaagtatccaaaagaaaattaggtataggtaaggaaagcaaatgggatcttatttatgtgttttagacaaaagaatatatgaaatagtaaagtatattaaaagacaataggaaagcttttttgaaataaaagaaaacctgaataggaaagg

SEQ ID NO: 171820 - DNA, 384 bp, Homo sapiens
tcctgggcttaagccatccacccgcctgggcctcccaaagtgctgggattacagaagtgagccaccgcgcctaatcgggtggtttgtttgtttattgacggggtctcgctgctgcccaggctggagtgccagtggctgttcacaggtgcagtcctggagcattgcatcagctcttgggctctagcgatcctccagagtagctgcagctgggattccaggcgcgccaccgcgcggggctcagaatgggtttttatattgagggttatgctgccacctagaggatatatgtagtaccgaactgtgtgcgcagggaggctgaggttgcagtgagccaagatgatgccagggcactccagcgtgggtgacagagcaagatttcatctc

SEQ ID NO: 171821 - DNA, 622 bp, Homo sapiens
aagacagagtttcactctgtcacccaggctggagtgcagtggcacaatcttggctcactgcaacctctgcctctggagttcaagtgattcttatgcctcagcctcccacatagctgggattacaggtgcatgccaccatgcccggctaatttttgtatttttagtagagatggggttttgtcatgttgcccaagctagtctcaaactcctgagctcaagtaatccgccactttagcctcccaaagtgctgagattataggcgtgaggcaccacacccagtccaaagaagaaatcttaacagaaattttaaaatatattgaactaaatgaaaataaaaatacaactatcaaaatctatgcaatgtagctaatgcagtgcttagaggaaaatttatagtatgaatgcatatattagaaacaaaaaatctaaaatgaatacgcttccactttaggaaagtagaaaaagaagagcaaattaaatccgaaacaagcagaaaaaaattataaaaattagagcagaaataaatgaaactgaaaataggaaatagagggaaaaaaatcaagaaaatcaaaagctgtttctttgaaaatatcaataaaataagcaagcctctaccactggg

SEQ ID NO: 171822 - DNA, 584 bp, Homo sapiens
agggttactgtggttaaatcactatatagcaaccaagccaggccatttcagggttctgaaagcaggagtattgcaacagcagctaatgtatgcaagctcaactctagatgggagaaggagagaatggggagctgactctgtgggtcatcatccccaccaatgcccaacatcctaggacaggccttagctgcagactagggtttctgacatgcctcctccttcctggcatctgacaacagatggccctgcactacagaaatagcatttataagactaaaaagctctacgcaaaagtgttactggaaaaattcatgccatgtaaaggattctgattttttacaacaaaatgcaaaaagaggcaactgtataaaaaaagcactggcgcagaatcaagcaaccttggaaaagccactccccttctctggacctgtttcttccatagtaaaatgaacagatttggccaggctagtggctttcaagcagtagaccagagctggcactgaagctgcccttgagaagtgagtaaaaggacagcccaactactaggacttggagtcttctattcctccttcaaccaagccaac

SEQ ID NO: 171823 - DNA, 267 bp, Homo sapiens
tctcatggagacagagagcaaattgatggttaccagaggctgggaagggaaggtggagatgagtataatgaagagaagttggttaacgggtaaaaaaaatagttagataggagtaataagttctggtatttgatagcacggtagggaaattatatttcaaaacagctagaagaaaaaagtatatttcaaaacagctagaagaaaaaaagtataatgttcccaacacaaagaaaacataaacattagaggtgatgaatatcccaatta

SEQ ID NO: 171824 - DNA, 452 bp, Homo sapiens
cgcagccctcgagttatgcggcccccatttcccaccacaataaagatccacctctctatcccaggttttattccatcatatttaaggcttggatgtaatttttggaacaattgactgctttatttagttggtggggagaggagtaggagagagaagcaaattacagtcaatgacaggaccagggattctgagcatacctgcatgtatgcatactagacactgatgttccagccagtgaaaggagatataacttctaaaaaacagtatcaactttattatgcttggaagtaatgagaagagaggcaagaagcaggcaatggtaagagaaagcgggtgggacgtagtggcttgcacatttaatcccagcactttgggaggtcgaggtgggaggatcgcttaaacccaggagtttgagaccagcctgggcaacatagtaagtctccatctcttca

SEQ ID NO: 171825 - DNA, 935 bp, Homo sapiens
  misc_feature (1)..(1): n is a, c, g, or t
  misc_feature (10)..(10): n is a, c, g, or t
  misc_feature (15)..(15): n is a, c, g, or t
  misc_feature (25)..(25): n is a, c, g, or t
  misc_feature (717)..(717): n is a, c, g, or t
  misc_feature (732)..(732): n is a, c, g, or t
  misc_feature (738)..(738): n is a, c, g, or t
  misc_feature (758)..(758): n is a, c, g, or t
  misc_feature (778)..(778): n is a, c, g, or t
  misc_feature (786)..(786): n is a, c, g, or t
  misc_feature (801)..(801): n is a, c, g, or t
  misc_feature (811)..(812): n is a, c, g, or t
  misc_feature (815)..(815): n is a, c, g, or t
  misc_feature (817)..(817): n is a, c, g, or t
  misc_feature (822)..(822): n is a, c, g, or t
  misc_feature (845)..(845): n is a, c, g, or t
nacttaagcntatcnggcctctctnctttaaggccgtaccaggaatgttgcatagaacgaccgcctcttcggctgcgtggcttcggagcagctttgactacaactcccagactgcatcgcccctgcccccccacttccggagctgacttcacttcgaggaaccttttccctccaggaatcaaggattttcttttgctttgtggccggattttgctactgcttgctcttcttactttaattatttctgtgactacctcatggcttaactcatttaaatctccccaagtttatctgaaggaagaagaagaaaagaatgagaaaagacaaaaacttgtgagaaaaaaacaacaagaagcacaaggagagaaggccagcagatacatagagaatgttttaaaacctcaccaggaaatgaaattgagaaaactggaggagcgcttttatcaaatgacgggtgaagcctggaaattaagcagtggtcacaaacttgggggtgatgaaggtacaagtcagacatcttttgaaacatcaaacagagaagcagcaaagagccagaacttgcctaaacctttaactgaatttccgtctcctgctgaacagcccacatgcaaggagattcctgattacctgaagaaccttctcaaacagcagaagaagtagttacttgtgtgctctcccgatgtccccaagtgagaatgtcctgaggagaaggttttngaagtcctacagctnacaggncttatttgactggatgacgngaattgggtacacatatctntatacagnctttctacttccttnccagaaggcnntgnantgganggaggccctcctagaggacatangaatacctgtgaccctggcttctcccggaggggaaggaccacccactaggaagaaggagagccccttgttgatgagacattttctttaac

SEQ ID NO: 171826 - DNA, 125 bp, Homo sapiens
caaaagatatccaaaattgaaccactactcttcatctttaactctgtcactctgctgcaatcactatcatctctcacataattacctgaatagccttaaaactatttctacccatagccccacta

SEQ ID NO: 171827 - DNA, 486 bp, Homo sapiens
ggcgtgtggcaccatgcccagctaatttttgtatttttagtagagatggggttttaccatgttggccaggatggtctcgatctcttgaccttttgatccgcccgccttggcctccgaaagtggtgggattacaggcatgagccactgcacccggcctgcagatatttttttcagttagctacttttcttttcactttatagtatttttttacttaattgtggcacaatacacattagtgttttagccattttaaagtatacaatttagtggcatttcatacattcacagtgttgtgcatccatcactgctgtctagttccaacagattttaatcacttctaaaagaaaccctgtactcattccctttgccctctatcccatggctactaatttgctttctgtttatggatttgcctgttctgaatattgtatacaagtgggatcatatatagtagacccttgaggaatgggggggttagggtcacc

SEQ ID NO: 171828 - DNA, 372 bp, Homo sapiens
cctctaccatatctttaagccacactgagaatgtactgttttcctaaggtgtagtttgggagcttacaagtttgttttctttaatgatgagtaccataacgctattatcagactttttcctcttttccaaacctgtttttatttcctttgtagtttttatttagaaaaggttcttcttaattatgtacggatttattgtgaccacatcaatgggtttatttattgatttttcatgaatcactgctctccttggcacaggtcagggtgtgtttgtaaccatcattatatgtgttatttttattccatcaactatagcattgttactaattaccacagagagctggaacggtgaccgttttgggtacagcgcga

SEQ ID NO: 171829 - DNA, 208 bp, Homo sapiens
gcggccgcgacgctatggcgcactggagtaccctgttcctggcagtaagtgcttctgggttctggcgttgctgctcagtggggcccaagtttgcggacccgggatctcaggatgcaggcagggcttatgccccgcgccggacagggcgtagggtgggcctcctcctgcccctactcgcgcggtttgctcctcagtctccttcccttgc

SEQ ID NO: 171830 - DNA, 729 bp, Homo sapiens
cattggacagctttgaagaatgttagggatccataagaatgtacagttttgaattaaagagaagaattgagcatttatcctgtttttcctttatggattatgtctaaggataaccaaatgttgatgacagaaaatcctttttaaagatacctttagccaaagaatgaagaaagaatgatagaattgaaatgttaccatttttgcaacccctaatgaaataatgaatctagccagttgttatcaattgttgctaacataaaaaatgagagacaaacagacacgcctcttcatagaagtatatgataccacctataaaatattactgccagaaaaaaaaatcaaactttggatctaattaccaattagatcagcctttagctctaacaaccaatttgcaatatttacaggagatacaggagcatgttgaatgacaccataaaaaggcaatcagtaaaatttagtttattataaactatataggataagtgatccagttgctgcaataaatatattacagaaggtgtgtattggcgggtgggagataaaggagcaatctatagataaaaacagacttaagggacataaaaacaactttaatgtatggatcttatttggatccttaagaaaacaaattgtaaagtagcatgagacatttgaagaaaatagaaatagtttttaagtgtggtaatgatatcgtggttatacgttgttaaagaatgcctttagagg

SEQ ID NO: 171831 - DNA, 416 bp, Homo sapiens
tttcaccctccaccatgattatgagacctccccagccatgtggaactgtaagtccaattaaacctccttttcttctcagtcttcggtaggtctttatcagcagcagaaaaacaggctaatatagtaaagtggtaccagaagtagtgtggtacattgctgaaaagatacgtgaaaatgtggaagtgactttggaaccgggaaacaggcagatgttggaacagtttggagggctcagaaaaagacaggacaatgtgagaaagtttggaactctctggagacttgttgaatggctttgcctaaaagcctgatagcaatatggacaataaggtctaggctgagttggtctcagatggagatgaggagcttgttgggaactggcacaaaggtgactcttgttatattttagcaaagacact

SEQ ID NO: 171832 - DNA, 127 bp, Homo sapiens
tggatactaagatacatgtaaacacaaacagttcaagtataaaatatgggatggcacaattgtacccaaaattgggtagagaaaaaagttataatttattgttgctagggtgaatttttaaaaatgt

SEQ ID NO: 171833 - DNA, 538 bp, Homo sapiens
ccaagatcgagccactgcataccagcctgggtgacagtgtgcgactctgtctcaaaaaaaaagaaaagaaaaagaaaagaaaactgagatttaaaaaaattaaggttaattaaggttattatatccatgtaactttctgtatttcttttaaagttcttgtgctactaattttcagggctttgactcctgagtctaaaaaggtcactaactcccgctaaattgagagcaattgaagcctcatcttcagatctaggagaagatgaaaatcagaataagctgcagtcatgagacatggcgccagaaattaagactattcaaaccctctagtcccagggactattgaagaagaagtgggtgtgtaagcttgtaaggacctattttaacagataaaattagttcagtttctgtataatttatagataatttaatttaaagagttttttttttttttccagataaggtctagatctgtcacccaggctggagtacagtggcatagtcctagctcactgcaacctccacctcccaggctcaagtg

SEQ ID NO: 171834 - DNA, 462 bp, Homo sapiens
ggatcgaccacacccagttggtatcagtcaacagtgtatcatgccgtgtgtttttttaattcatgatttcctcttgaaactccactgaggagtgttaactgtgtgcgtttttttaaattcagttttgtatgctagcattctttaaatgtctgccagaagtttaatttgaatttctgatccctgaaggcagctagacagaatcattctagttcttcataaattgccttctatgattcattgttaactcataaaacatactcatttctatatactcaaacagttaaggtagttacagtatcggaaattttttttttttttttgccttatatttaaatcgtcttttgagaaagaaatcaagaattagcttgaactcccagttaaggcatgaaccctgtagcacagaaaacatcagaaatgaatgttgttatctcaaggaggttaaggtagaaggcatgaaatctg

SEQ ID NO: 171835 - DNA, 660 bp, Homo sapiens
agaaaatggattccactcaaaaacttggaagtgaacatttatagcagctttattcagaactgccaaaacttggaggcaaccaagatgtccttcagtaggtgaatttgtaaacaaactgtgatccatccagacaatggaatattattcagtgctaaatggaaatgaggcaccgggccacgagaagatgcagaggaatgttagatgcatgttacgaggtactagggggaaaggagccaatctgagaaggctacaaactgtagggctccaactacctgatgatctggaaaaggtgagactacggagatggtcggaagatcatggttttccagggttaggaggaggcagagatgtacaggggtagcacagaggatttttagggcaatggaaccactctgtatggtgccataatagtggatacatctcattaaagatttgtcaaaacacgtagaatacacggcaccaggagtgagccctaatgtgaactgtgtttggttgatgatacgtcagtgtaggctcatagattggaacacatggaccactctggtaggggatgtggatggtgggggtggcctgtgtatgtgggggaggtggcatatgggaaatctactttccacccaactttgctgtgaacataaaactgctcaaaaaaatagtcttttt

SEQ ID NO: 171836 - DNA, 395 bp, Homo sapiens
acttgctgaaccacacttcttccttagaattatataataaatacagaatatgtacatttacttgtgtatagctgcctgtgatttacctatagtaaggtcaaaagcattctatggacatggtcttccttgagcccttcttctgtgctgtcattttcctttgccagggaaatggtttctcaccatccctcccatggacacctatgtctggaaatgtctaaaacacttttcgaatagcaagttgctttctcctataccagcaagaaatttttgcaactccacctgtccctcaaagcaatgtggccacaataacctctgcaagtctgtctgcctatgctgtttctttttctaatacccaactaatttattgatttatattgtctttacgtctcctctgg

SEQ ID NO: 171837 - DNA, 402 bp, Homo sapiens
gggcctgccgcccccccgcatcaggatctgccctcagtggtttctacttcaggaaagtcctgcagtcctcttggcatagcaaggcctggtgggggtgggtcccagaccaggaccctgatgccccttccaaccccagaaccctagaacccgggtagggggtcctcagagctctttccctttgccccacccaccctggcctgtcacttggaaataccctggacagtttctctgcctggtgcctgtggctccttccggaactggtgcccatgcccctcccctcttggttcccaggcgccaggtctgcctgtgggaattgaagtcagcaggaggcaccatggcactgggaagcgtccgggctctggcccagccctggcccaggtgccccacagagcaggcggggaa

SEQ ID NO: 171838 - DNA, 202 bp, Homo sapiens
ctcagttgattgttcctagtaactctttatgaatattaccttgttcttcaatgctcctttccttttatcatcagtaagctataatatttactagctagtatcctcaatatgcatctcatctgtgaataatcgtagccatgtgaagcaagcctataaagggatgacaaatctgggatatccatgacactactcccctctcctg

SEQ ID NO: 171839 - DNA, 148 bp, Homo sapiens
attttacaggtgaggaaactgagacaaaaagctgaagttacttgcccaagatcacatggctggtaaatggcagacctaggcgttgagcctgtgcctcctcagagaccctatccagtgccatgggagtcatgctacccggcctcctgag

SEQ ID NO: 171840 - DNA, 261 bp, Homo sapiens
cataaagaacaataaagtactcctcccaaagtgctgggatgacaggcctgagccactgcgcccgcccagtccttggtactttttgaagaagggctgtattctcactgtgcacggccccccgagtcccacccccctctgccctcaggtcaccacggacctgcatcacgggtgcacagaccagcacacgggcacctcggcctcagccccactggcggccggcatgatcgccctagcgctggaggccaagtaggtgactgcggg

SEQ ID NO: 171841 - DNA, 167 bp, Homo sapiens
agaccagcctggccgacatggtgaaatcctgtctctactaaaaatacaaaaattagctggtcatggtggcacagttgatagctcaatgaaggctgtggaatgggggctttcaggtttggttgcctgagccaccagtcgttctgctatgacatggacaggaccacagg

SEQ ID NO: 171842 - DNA, 339 bp, Homo sapiens
ctagcttgggcgacagagagagactctgtctcaaaaaataaaaatttaaaaaaataaataaataaaaatttaaaaatcaactaaactagccaggttcaaggttgctctagaataacattcttcgtggttgtaattggctgtgcttcatggggtggagtccgggcagcgctctgagaagtgcgtgcagcctagggcctttctcaccgagagctcagaccgaggtctccatgagccccggggagcaggaagccactgaacctcatcctgggtgtgttgagacagaaggaaaggctgagaactgcagatttagagattgctaaggcaaaggaaggagataga

SEQ ID NO: 171843 - DNA, 126 bp, Homo sapiens
taaactaaccaggctggtattagtgattcttaaattctacaccaatgtgctgaataattgagttttcaaattgactttctgtatttgtactttacatctatatattgagtcttagcccagtgatct

SEQ ID NO: 171844 - DNA, 261 bp, Homo sapiens
gatgtacacgtaaaggttaaagaagattaagaagatatcccttaggaaagagtttttaaacttttgaaaatgctataagaattttgaaaataatatacccctctggatgtctgcaagcgacattaagaaatttttttcaatacaaaattgtgttatttttaaatgtatcaatggaatctaaatagcatagcaatgtgatacctactatcctgtaaaaaaataccagttcagcatttggaaattttccattattcttttttc

SEQ ID NO: 171845 - DNA, 344 bp, Homo sapiens
ggacgcgatttcctggctgcgctcccggggtaggaggtttgcgctgggtcccatcccccggccggtcctgctcaggaaacgcggagagaaagccaggaaccaggcctgccaggccctgcggcccctcagcgccgtccctcctccccggccctcggctgcaggaagccggctggcgggaacgccctgcctggtgggtgggaaaggccgagagcgcgcccggcaccggcggcttcccaggcccgcggccggctggcggcgcggagctgtcactgcggcaaacggcgaacgcgccggccccctcccccgccgcccgcaagcctggtgcagtcggcccatgagtattt

SEQ ID NO: 171846 - DNA, 203 bp, Homo sapiens
  misc_feature (177)..(178): n is a, c, g, or t
  misc_feature (185)..(185): n is a, c, g, or t
aaaaataaaaagagaatgctaggttgctgaaagagaaaaaagcaaagagccagtctgagaaacaccacggaaaatgtgtgttttttttcgtgttgattctcctggtaggctcctgggctattctctagtcagctctctggcagcaaagcatagtatgatttcagagtatcgggtccnnccaatcnaacatggcaactgttctg

SEQ ID NO: 171847 - DNA, 846 bp, Homo sapiens
tgtcctcacatggtagaaggacaaaaaagggccgaagctagttccctccagcccttccctccagccctttccctcaattcattcatgggagtggagtcctcatgacttaattacttcccaaacaacctcacctcttaataccaccaaagttgagattaaatgtcaacatatgaattttgggggacattcagatcaaagcagtattatagcacatttgctttcagaaatgcataatgatatatttttgtgtgtgtttgtttttagccagggtcttactttgtcacccaggctggagtgcagtggcacaatctcggctcactgcagactccaccttgcaagttcaagctattctcctgcttcagctcccctccccccgcaaatagctgggactgcaagcctggccaaatatggtgaaaaccatctctactaaaacatacaaaaattggttgggacgtggtggtgggtgcctgtactcccagctacttgggaggctgaggcaggagaattgcttggaaaccaaggaaggcggaggttaccagttgaagccaagattcgacaccatttccaacttccagcacgggggggacaagaggccaaaacttccggctaaacaaaaacaagccgggacgagtggacacaagtgcttgtaagtctggaatcccagcaccttgggaaacgtggctggacacatccccgttagtgggaattgacaccccgccaggacagtggggaaaacctatctctataaaaatcaactacccaaaggtggtgtaatgacgtaacccgaaccaagaagtcgggggaatttaaacccgaggcggaaatggagcaaatggcaggagacgg

SEQ ID NO: 171848 - DNA, 342 bp, Homo sapiens
accactgctggggacaagaggcaagttggctgagcacagagccaacgggagaagggcagtatgccaaacagttgggaccgaggcaccccagcaacatcggccctgctgtccctttaatgaaacggttgtgtggtggccggtgaaggccatcactggaagtctctatcgccataaaccaccagggacagagcaatgtggcctttccacttccctgggcaaagcactgcagtcgtcccaggagcagagctactgctggctgcttctctaggtcgagatggaatctacacacaggcaaaactgcccactacagggtacacttagatctgaatgtggacaaacata

SEQ ID NO: 171849 - DNA, 215 bp, Homo sapiens
agttatgtaagatctcagttagacatgccattacatacagttaaaacaacaacagcaacaaaaaagcaaagaacatgagcggagagacaacactggtgccatagacagtgtgcagtggttattctactacaagcaagaggtatccaaggcctgaataaaacagtagtgatgaaagttcacttgcagaatgctcataaaggtaattgagggtagca

SEQ ID NO: 171850 - DNA, 795 bp, Homo sapiens
ggattgagatcagctctgtagtaatgacatgaactaaaagtaagagtgatagaagtttctccaaaagaaaataaggactctttagttactaggaatgagataaaaacaagaatattcacaatagtatagaaacataataataaaaatgtgttatttaatgattgatacaatactagattctctgtgggccttacttaagtggctttcaaatgtttttgcatattaaaatcacttgggaaggttttaaatatctcagtgtcctggctgcacaccaggccagttaaatcagaatttcgttagtacctaagcctgtgtaatttgttttgaagttccttaggaaaatcatgctaacaagaactaggtagacagatctggtagagtcaaggttcaaaaagagggatttcaggggacagagaagttcacatgggagaagcaggatccaatggagagaacagaggggcctcaaagagagagagaaagaaggacctccagcctaggaggtacctatcaaaagaagcgtgggactccaatctagtttcagagagtacactcaaaatcttaagtatcagaattcttgccagcttcagtgtatgttcagtggttcaggaatctgactcaccagtggatccccattaatcagtcagacgtgaattcaaaggtgcaaacatagggtcctgggtccagtgatgaatctgattctgagtcacagcaccataactgttaaagaaaaaattactcagtgatacttgttaaagcatgataaggctgactttcttcagaatcattgagatatag

SEQ ID NO: 171851 - DNA, 168 bp, Homo sapiens
ccttttttttttggtttgaggattattttttaagttctttagttctcagctaagaacggtgacagtaggggtagaaaatgagagctatacttgtgtcctaggtttgtcttccttctaagactgtaagtgtttaggtaaaatgagtagctgaatgaacaaagaaaagga

SEQ ID NO: 171852 - DNA, 781 bp, Homo sapiens
cggccgctggaggggcgccgctctcagggctcggtcaggcggcccctgcgactcctggtgcccggctgggacacgtggggccggctttgcggagtcagcagggccaaggtgcgcggggtgcgctcccccccggaaccccgccccttctcaccccatctcgcttttttgggagaggagagtggagccgtcagcacccactggcagtgtcggtgctgtgctgggagtcctcccagaccagcccactcctcctggtttgagcttccgatccatccctactcctttacggttcttcttccccgtagttaacctgcggagaggaggaggtactgtctccgcacaaggtactgcggaggtaccttgcggaggaaccttgcggaggaggtactgcggtggggaggcaggggggaggcgcatctgcctccgcacaaggggtctaatggcttgcttattccttctaggccaggttgaaaggtttttaaaagcaggtgggggtgccaggatagtgagaaaaacaagaaaagacactgctttttaccccatgcggggcagagctggtctcctttctgcaggtgttgaggggagttgagtaggagcccagagctggtacaggccccgtttaacgtgcccccgcagagtgagggctgggggtcaccccataggcaggggagcccttctgggagggaattcctgcttaggtgggaggttgacctgaatgacatctaggtcctctacctcccagatgccgaattttcagggaaggaaccaaatggatgtatggccc

SEQ ID NO: 171853 - DNA, 476 bp, Homo sapiens
gaggcaggaggatggcttgaggccaggagttcgagaccagcctgggcaacatagggatataccatctctacaaaaatttaaaaaaattagtcaggcatggtggcttgttcctgtagtctcggctgctagggaggctgaggtgggaggatcacttgagcctaggaatctgaggcaacagtgagctataattgtgccactgcattctagcctgggtgacagtgagaccctgtctctaaaatgaaataaaataaaaataataattcttacaatgaaggtaagagagaaggagaatgggtggccatccaggtgtgatgggggttcttcattggtggaagagagagaatactctagagacagcctagcagaggacactgggaggcagatatccatacttggcataacagtctttcagtgagacaagaattctctatgtgcatttttttttttttgagatggagtctcgctctgttgtccag

SEQ ID NO: 171854 - DNA, 306 bp, Homo sapiens
atagcgtacctctactcccctgacacaaaatcattcaagaagaaatagataccagcctgagcacatggcaaaatcccatctctacaaaacatcaaaaaaaaaaaaaataagtcggggcatgggggtgcacaccttgtaatcccaggtagctgccattaccggtgcccaccaccacgcctgggtaatttttgtatttttagtagagacggggttccaccatcttggccaggctggtcttgaactcctgacctggtgatccacccgcctcggcctcccaaagtgctgggaatataggcgtgagtcacc

SEQ ID NO: 171855 - DNA, 460 bp, Homo sapiens
tcaaccacacaagtgagattatgaagaatcttcagatgactccaaattaggcactggtttccaaaatgctacctgtaaagacatcagaatctttccctgatggaagcaataaaaaaaggttacatgaggttccaaagagaaagaatttccctgggaactgtaatattttctgtattataactaccatatgcttttttcacttgaacttgggccaagatttcagaagattggcaaagacatgaaagaatataactgtttttaaaaaaaataaagggcattatctgtagtagagatattttataaaatagtctgtaaatcaggcacttcattttaaaaaaatgaaatattttaactgaaaaacctgaacacatctggtttcttaaagacaataaataacgcaacatcttttgatccatttcatattccatttttgcctctgctcccagccttgactttcttg

SEQ ID NO: 171856 - DNA, 851 bp, Homo sapiens
acaaaaatgcaagtagagcccattttcaaaaatcagtctaacaagctgcatcacaaaaggtttccacctggagtttgcaaaaggctttcagagctagattctcttaggcttgcattgagaaaagggcttaactgcttctcagaggcaaagctacagttgtggagcaagggaaggcctacctgacccaagactcagtagttctgtaatttattaagaacgtgatctgttaaacaccggagactccgccaaggagcaccagcatggtgggagcaggggcacacagcccagatggcagaaggccactccacaccacgggcatttacccagcactttctacgcaccagccactccctagctgcgggaccccaagctaggtaccccgctcctctgccgatcggtccccgttctcagacaggtggcccagaatcaccaccctggccaatttgcagggctgctgcgaggctctaatgagacagcaaatcaccacatacatgccaagaattgctactcgcttcaactgggcttaacctcatgatatgcaatgacagcctcaagagccgagcacacgcggggcacatagtaggtggtccacaaacgtgggtgccctttcttcatgaaagggaaggggacgaaggaagaaaaacactccggtccaaaagtaccctcaagcccttaccccacagcgtggatgccccgatttcccaggtccctccgcaaccctcagtagaactcccaccgcgccctgggctgctgggggcctccccagccgggtcacagtgcacctgaacgccccggtccgtgccacctcgcccgcaccggccaccgcttccctggaacgcggccggcggccg

SEQ ID NO: 171857 - DNA, 310 bp, Homo sapiens
tgctgcaatcccagtctcaggtgggattttcccacctctgcctcccaaggagctgggaccacaggtgtgtaccaccccacctgtctaatttttgtagagatgggtttggaccatgttgcccaggctggtctctaattcttgggctcacctagacctccgaaagtgctgggattacagatgtgagccaccgtacctggccttcactttggattttatcaggaaggaatattgtacatggtgaacattttgtagaaaaataccaaagtagatttatatttattgagtgcttactctgggtaagggactgttt

SEQ ID NO: 171858 - DNA, 715 bp, Homo sapiens
cctccctggcactcaactgacagacaacaggatttctcgtggcgtccagggctgcatgtcctcttgggttacctcgacctgatcagctggctccactgtgtgtttccagtgtgaggtgtgaggtcaccatccgctgccattacacaaagacccatttcccctgggccattgctcaagtatgacagagctgattgtcctgtatggaaactcagccactcacagctctgcccagtgagacaggcaatgactatctgatcatggttgctgacacagtgcttgtggtggggagtgtccctatctggaggcaaacagccgagtggctgctgtgccctcaacaagccccaccctgcttcacggtgaggaaacagcccccacccaaccagtcctctccccagcctccagttgagtcaggtgcccccctccaagtgtttatgtaatttgtgctgatcttaccagggtcaaagcacttaccacattactttgtctaactattattctttcatgacacaaaacatatttattgttgaaaatgtttaaatgtagtaggtaacatctattatcccactacctggaaataatagctgttgacagattggcataactccaagaaatttttttaaatctggaaaacatcgcttttaaaactcattattattcagtgatctgtgtcaataaatggcattgaaacagctagatagacactttcctccttcag

SEQ ID NO: 171859 - DNA, 427 bp, Homo sapiens
ccacacggcggcctttccctggggaggtttttcttgaagatgcttctattaatcattataactccagcatttgtgcagagcaaatgctgtacctgacgccaactggagccctgctgggggctctgccagagctacgggatggcctcaagggagctgaggcttgcaggcaggtgcagcttccggtacattattaggattaaataaaaacaaggaaggccgggctcggtggctcacacctgtaatcccagcacttcgggatgccgaggtgggcagatcacgaggtcaggagtttgagaccagcctggccaacatggtgaaaccccatctctactaaaaatacaaaaattagccaggcacctgtagtcccagctactcgggaggctgaggcaggagaatggcgtgaacccgtgaggcggagcttgcagtg

SEQ ID NO: 171860 - DNA, 327 bp, Homo sapiens
actctcccgtggacttgctgcctgtccaggctctgcacccccatcctgcctgggtcacgcagccctctcgcccagggctgataccctggacccgcatgggtttgcgttcaggctgaagatggcctgatccttgctgaatggggaatggtattctgcacattttcccatgtatgtgctctgagtttaagactgggggctggggagatcctctctccacactgggtaggacatggtcatcctgtcatctgtcactgctggatgacatcctccccgtagatgaactcagggagaagggagtcttccacacgtgcttggagagaggatctc

SEQ ID NO: 171861 - DNA, 143 bp, Homo sapiens
ttaaaacatcaccacatgttataacattatgctttaacaaaaagaacgatgaagtcctacattatcctgacacatctgacagaagctgcagtttgatatgaatcatcccaccaacacaaaagtagcatgataaacaaaaatta

SEQ ID NO: 171862 - DNA, 443 bp, Homo sapiens
gaagtgttcttagagatttgaggacaaaggagaaggtataaagtcattatctatggaagtgagggattggactagggtgcaggccagtaaaacatggcttgtgaaccaaattctgcctgccctgtgtttttggaaacacacaaagttttgttgtaacccaagcatgctcatttatctgttgtctatggctgctttcctactggaatagctgagttgaatagttacaacagaaaccatatggcttgcaaagcatacagtatttactctctggccctttacataaaaagtttgctgacctccagactagggaaatctagtataatttccaggcagccttaaaaactctttagaagttaatggtccagaataatgacaaatagctgattgttgaatttcactatcttcattgcccctgttagagagttttgagctggaaagaccga

SEQ ID NO: 171863 - DNA, 380 bp, Homo sapiens
ctggggggtttgggaagatccagacagatcagttgtggaggaagtaattccgagatgcccattagagaagtcaagtggcccaaatatcaatattattgttgttgttattttaacttacatatcttttggcactattttctaaagatcattttatctaaaaatattctaatatcatatttattgtcaacaggaaatatttgttaaagcactgctttataaattgctgaagttaaaaagagatgtatggtcactagtcttggaaacttgaaagacaaaatacaaaggaatcaggcaaatagcaaaataagaaagcatatatacaatggcaaatgaggaatggtagaatatggaggaaacagtgtgtgtgggcataggaggtg

SEQ ID NO: 171864 - DNA, 242 bp, Homo sapiens
ggatgctttttttggcttctgaacacaagtaaccaactcatctttcaggtctcagctgaatttttttttcccaggaacttcctctgtaacctccccgcctccaaaccttgtatttgggttagacagccctcttactgccagttactgaatctcactaaacttcaagatccatgagacaaagatatgtcttgttcagtatgattcccagcacacaaataaacagtgttgaataaatttgtcta

SEQ ID NO: 171865 - DNA, 155 bp, Homo sapiens
  misc_feature (17)..(17): n is a, c, g, or t
atctgaggatccccaancaacatgaagcacatggatcaatattgagaagaataacagaaatattagagtacaaacattctaataatttcctcttcctatatctgacaagatttttttttttttttttttgagatggagtttcattcttgttgcca

SEQ ID NO: 171866 - DNA, 309 bp, Homo sapiens
ccataataaattcgcttgagttttacatattttcctgaaaggaagatgaagatttcatcttgtaaccaccatgctgaaaattgtacatgactcatgtactggcttacctttgctgtgtcaaatggtgatgagatgtcatggggataggatattatgatcattggaatactttcattatccaagaaattggtgacttggcagggaaaaggatggagtttgtaaaaacatttgaaatttatttcaaatgaaaatgcgtttctttgtgtgaaagttggaaaggttatgaagcaagttgaaaactgcggcacc

SEQ ID NO: 171867 - DNA, 472 bp, Homo sapiens
gtgctcagtagctatatatgaccagtgactacagggttcctctccagtatcagaaagcagggcaaagcaggagagacttggagctgagagatgataaattgataactggcacaggattatagtaattatgtggccacatatggagcattacatataattaaaagccatgttctaaaaagttacgaaaattttaggaaaaggcttatgtgaagttcaaacagaaaccacctatgtattgaaaaagaaaggaaatacactgaaatcttagcaatggttatctttgggaattagtattgggctgttttggtttcttcttcctacatttatgtattttcaaagttggtttaatgagcacacacagtttatccacataaagtttatgctcttgtagcacagaggtatcctttgtaactctaagcagtggagcttattagaagtctaggcccctaagcttcaatttggtcgcaatttg

SEQ ID NO: 171868 - DNA, 189 bp, Homo sapiens
tcgtatgaggttcgataaccatgcacactactataaccaccctaaccctgacttccctaattccccccatccttaccaccctcgttaaccctaacgaaaaaaactctacctctctatactaatctccctacaaatctccttaattatgacattcacagccatagaactaatcatattttatatcttctt

SEQ ID NO: 171869 - DNA, 258 bp, Homo sapiens
atgtgtgaggtgctctagaggaccccttgtgtccactattactaatagattttcaaagtagtccatgatttaaaaactattaagagctgctgctctgatcagcaataaatgaaaaaatttaactgataatacaagaacaaattaagtaccaactaacacaatcagtcagtcaagacagcgccactgaacttccagcctgggtgacagagcaagactctgtctcaaaaaaaaaaaaaaaaaagaaaaagaaaaagaaag

SEQ ID NO: 171870 - DNA, 387 bp, Homo sapiens
aaactgagtagtcaggagatttgatagaattaaaagcataatttcatgtaattctatttattaatagtgttataaccagtggtagttccaaggctgtcagtacgattttgagatgacttgatttgaaattgtcatgtaacaaaacagtactacatttaaagtgtcttattggaaagtgaaacctccaatttttgtactgtctttcttggtttgttttcaagaacttacttcccttaatgcttttttggaatagatcatttgggaaatatttgtgatgtctgtaccatatgtttttaaaatgttgtcgttgttacacattctagaatgtgtcaccacgccgcttattagggccttcaaagttgcccccttgacttcctctaccaaagc

SEQ ID NO: 171871 - DNA, 541 bp, Homo sapiens
ggaatttgtaggtctaagtgtaaggtagtgttagcacaaagttagtcttcagttttctaactgtattttaatgttaaattttgggctttgatcatttcattttgtttttgtccctacttgaaaaatgtttagcttattaacctaggggaatgggggaatatagtattttgtattctgccctatcacataaccagctgagccagttagctcagactttcctaaatgattcaccttttggaaaaagccagtcatggaaagtttctgcccaattaaagactttcaggaagttctgagcaagtgaaaataaagttaaaatggaatttctgttgagaacacttgaattaactattactaataataggccttttcctgtcagagttccctcttgtgcgttagaggtggtctataatttaactgttctcctgcttgaagatattttgatacttgaatcccttattgcttgttaaaagtggagttgttctaggcatactgtcaatgaagagtaatctgtaatattacttggtgtcaattactaaagttc

SEQ ID NO: 171872 - DNA, 425 bp, Homo sapiens
cgagaagctgggttcctgctccacctcggtgatcaccaggcccatatgcacaggcagcttctccaaggaacgaccgtccgcgcgccagcgcatccggtggtgtgcggctgccaggcacgaccccccgcgcgggtgccggtggtgacggcggttcctgccgactgccgggggcttgcggagcgtgaagccgagcggcgctaggaccgcggcagaggcggctcggcagcagcgccgccagatccagttccaggtgccgaaccgaacgcggagccaggaggtgagcgtgcggtgcagacagagcagcgcgtgcagcacccgccacaccagctcgtacagccccgtcatactcttgtggccctcggacaacccctctccctcccgcccactcccgcagcgcgacggctttttatccgcccctgcggccg

SEQ ID NO: 171873 - DNA, 694 bp, Homo sapiens
ctcactgaaaaaaactgacatttaattaaacacttggaggatgtgaggttgttaaccaagccagcatctgaggataagagcatccaacgcaaaagcagccagtgcaaaagccctgagcaggaaacgtgcctggtgttttcaagaaacaaggaggccactgtgggtggagcagtgtaaattagagaggagctaatggggtcagagtatgtatggccttgtagaccatctgatggcctttttcttttaccttgagtaaaggaggaagtcattacaaagttttgggtggaagaatgacatgatctgacttatgctttaaaaagatcattctggctgctataaataagctacatagaattataaactgtagagaattaagggatatcttttaggggactattgcagtaatccaggagaaagtagtgtcttattccaaggtagagcattggaggtggtgacaagtggctggattctggaaatacatgtgctccttgacttaaaatagggttatgtcctgataaacccatcgtatgttgaaagtatcataagttgaaaatgcatataatacacctaccaaacaccatagcttagcctagcctatcttaaacatgctcagacaacttatccgacagttgggtaaaatcatctaacacaaagcctattttataataaagtgttgaatatttcatgtaactta

SEQ ID NO: 171874 - DNA, 379 bp, Homo sapiens
ggttcatgtgcaggtgcaacctgccccgcagtcacgggacacagccacatggagccgagccacgctctcagagaaggagccagggaagaaacaccctaactgcactcctcccttcttctggcccccagcagccataggccctgggcccccggtgagatacccatagagatcagctcccaggcagcaggatggagggtgtagactggacatgaagaggcagctggaatgtatcgggcactcagctccagctcaccacgatccaggcactcaagttcccaagacaatagtttctgctctcagataaatggaataattaaggatcaaaaggttatcaacaggtaaccaagcataaacagattttttttttttttttttttag

SEQ ID NO: 171875 - DNA, 485 bp, Homo sapiens
gtttttgagaagggtgggtggtgatgaagaaaggctgaagtgttgccttgtaaaatggagacatattctcgggaagctaatattctaataaagcagaaaaaaagagcagcaatctaaaggtcccatccttgccttgttaggaaagctatccccatatcagctaagaacacaccaggcaaccagtttccactcaatgcaatctgaaaatcagcattatgttgatcttggtacttctgcccaatagagtagtttggttagctactggttccttttcctaacagaaactattagtgaacccaatggtactaattgagtctagtaaagtgctgagcattatcagccattagctgaagttctaccctaaatacaatccaaatacaatggcagggtgacctgctggctggtagcagtagcaacagcaatgaaggaagcaagggcttatggtagacctcctttgtggccagtgttgtagctctactctccgc

SEQ ID NO: 171876 - DNA, 344 bp, Homo sapiens
aatgggttaagaggaagggattacgtataaaattcctttaaggtatgaaaagctttgttgacagagtgttacatatttcattcccagtcaacaatcttttattgtcaatgtctgaccatgttgatatatttgttttgtttttctcctcctttgtaactgtattataaattttttatattaaacaaatatagaacttaaaatttagtttcttagtagtagtcctgaataattaacatcagttgaaattggattgtttgtgctcagtgccttggatatgtacaaaacctgtttgcttcaaattagtgagttagaaaatattttaatcttttcatcctgctcccctc

SEQ ID NO: 171877 - DNA, 516 bp, Homo sapiens
atgttatcttcacaccttgtagtgataatgtcacagatttttaggatttttgtcaaacttgtagtgtttcaaatttgtaataactaatgtcatatactatttgaattggtgacattatttctggaagctatgcatattagtttactagggttgccatagcaaaatagcacaggttgggtgacttgaacaacaaatttattttctcagttctgaaagctagatgctcaagatcaaggtgttaggagagttgcttttttctgaggtctctccttggcttctaaacggctatcttctccctgtgccttcacatgctctttcctctgtgtgcacatacacacctgtgtccaaatttcctctcataaggacaccagtgacactgtattagaatccaccctatagacctcattattttatttcgagatggggtctcgctctgtcactcagactggagaacagtggtgcgatcacgtttcactgaagcctcagtctcctgggctcaagcaatcctcccacctc

SEQ ID NO: 171878 - DNA, 599 bp, Homo sapiens
gtggccgattggcggagcgcactcctgctgtttctcccaccatctcgtggatgtcgtccctcgggtggtgagagaactttgcagtgggctggagcgccctttgcggagaagcacacgaaggtgaaggaaggaaagaaagaagaccggagtgaatgaatggatgctctgtgaatgaatgttggtcctggtgatgcgggcctggtcctggcctgtgcatgtggcatgagtgcagccctgaggctgctgggctgcccttgatgctcccctgtgggctcgatggaacatttgtggcaacttgctgtgtgaacttgctctcggtggagtagccccgtcgggcccggaggtttgtgcaaccgcggagaacaccgagtgctggtcgcacggggcgtgccgagccgccttccggcgcgccctccgcactttccccgcctagtcatccctcgctccccggccaggagcctccgccgcgtcctcaacctctctcccttttgcgtcccgggaccctgcgagcacccgggccgagggcgcagccgagtcttgcgggagtcgccccgaaagcgtcgggtttgtgtggggttagcgggggccgccgcgccacc

SEQ ID NO: 171879 - DNA, 584 bp, Homo sapiens
ttccctccttacttagcctaaattccaggccaaatcacagaatccttcccctgcaaccatcctcagcatcatggttctacttttccttcaatgtactcaggaaaaccacaaccctgaagaaatccaattctctgtttactccacccttgcaactgttgagctgaatatggctgaagaaaacacataacctgattgcttctcagcaaccatactacatttccctagttcagtggttctcaattttttcaatatagacattaatcattccagcaccaattctagaaaaggttacccttttcctcacttaactgccttggcatctttgtcaaaaatctactgaccaaatatatgtgagcctaattctggactctctgttcggttccactagtctatctacacacaaataccacactatcttgactactgtagctttatggtaagccatcaaataagtttgtagtacaagttctccatcattactgttagttttcatttttcattactccaggtcctcttcactgccatatgctttacaatctacttatcaatttctacaaaaaatttaaaaaactgggtgtgttatg

SEQ ID NO: 171880 - DNA, 442 bp, Homo sapiens
atccaagcccctaccatctcatacctggactttgacagtggcttcctaattgatctatttgcttctagcacaattccccttttggtccatttttaacacaacagccaaaagtgattcttttaaaccttaagtcaggtcaggattatagcactgaacaactctacactgacttctgtgtgaacagggcccccatgaaatggtacaatgtgacagccttacagatcatatcactcttttgttcaaacccgtcccatatcttccaatctcactcagagtaaaagccaaaacataaaggccttatttgacctaggtgccttgttacctctccgaccacatttcccattactgacactctcactcactccactccaactatcctggcctctctgctgctctcaaatataccagacaagctccttcattgtgtgcattcactagcaac

SEQ ID NO: 171881 - DNA, 238 bp, Homo sapiens
tggaccacccgctccccccattgccctgtgctgcactgagcacctgaagacagcagaagattccttggcacagttaagccaggccaaccctcagtcctgggtcacagtggagactgggacatggccctctcctccaaagctcaggggccgatgggatgcagacggaatataggctttgaatgtaggcaggatgaggaccaccgtgatagaggagggaccaggtgctccgggagcacag

SEQ ID NO: 171882 - DNA, 456 bp, Homo sapiens
caatgttcttccccagctttccccacagttgctgcttctcctcctcaggtgtcagctcatatggtgtttcctcataaacaggcctttcttgcctgccctacctacgggcccttctcatctcacgtcatcgtggaacttccttcaaggcacttgcaccaccggtgatgactggtgagttgtttactctgtttctctgtgagggcaggaacttgtcttattcactgctgcatgcctggcaaacagcacaggcctggcaaacagcacaggcctggcacgtagtaggtacacaccattaagtatgtactgaatgactggagctggaactatcctgagcctgtaagtccaaaatgctgtcccaaagtaaaactcacgcccagtctctggctgcaaccctgactataagcaatttggactgctggtccttatgcatcatgcagaaatgctttgctgctcctc

SEQ ID NO: 171883 - DNA, 505 bp, Homo sapiens
aggttttagttgtttcttctttcttcttcaagattctgctgggacccagacctgggtttggagaaggaaaaacccttccaggtggaaagcagttgccagtgaaccaaggactgctgtggaaagtgattaagtccaggaaggagggaggtttgaacaaagagatgtctggaggttaggagggaacactttctaggagagatgaaatttaagctatgccttgtagctgaagaagtttggtaaattgttggtttccagcatatgcttttttgtatctcaaggtaaaaagctgggctagggagggtggatgcctttgcgtggtaaacaccgacgttgctaagtaattatctttgaatagaggagaaataaaacttaaggaagaggctgttgactaagcagggaaggtagaagagaatcaatttcattgaatatcttcaaaatgttgtgaatgtgttttgagttgtttttcctccactagctctgcactgctacttttctttaggcaaaa

SEQ ID NO: 171884 - DNA, 789 bp, Homo sapiens
aacatttttaaatgtttaaagttggataggtgacataattgagtatttgaggagagtagtgaaggtttggaatagataccaaaggaaacaggagagatcacaccaaaacttaaagggaataccaactggtgctaagggcagctgaggttggaaatcatacaatcatagtggcaccaaatggagaggtcaaggaaataaaattctaaataaaaagagctggaagtataagagattgtgagtgaagaataagacgttgacgtctgagattttcacataatgacaatgtgtaatttgtggccatcagtgttggtcaggagaatcaaggtaaaattattggttttgaacgtgtgaagctccagaagtatgagtcacccatttggacactaagatacacaatatgacaaccagagttaaggtaaaaggaaaactatgtgaaattattccataagtataaaggagaaacccaagatacgggagaggtcagtgtcatgaaggagtgaagggtagtataagccttaatactaagataccaaagactaaattccagtgatatcagtgactccagcacttactaatttatccatgggatgtaatatgcagacatttttccaaaaaatacatttgaactagtataagctacatattatattttccctatcttaccaatacaaccaaagatatttatggattaaactatctacttttgcttcctcacagcccgcagcatttgccataccatgtattatcagttgataccataagccattaggagtagatgaagaggcacta

SEQ ID NO: 171885 - DNA, 648 bp, Homo sapiens
atagcacttgagggctcaaaggatctaaattggggagtcaggtggctgggtggaaaagatgaaaatacaacaaacagttttatatgttaaatcatgttaagctgaattcagtgtctaaactgggttttttattatagctccaaatttctataacataacgaaatacaatttagatactaattaggccaacttaccctataattctttaatgattcagtagggaatgtttgaatatggggcaggataatgggtaaagctgttatcctatggaacactcagaagaaaaagcccattagtatcttggtggggataatggaattgactgttggtgatttcaggaagtctttgtttgagatctgtgagaaaaattttgtcacattttcatcttcttcaagatcttactatccctgaaaattacttaatcacaaaaaatatgtgtttagtataataatagtataaaatgacattatgaaaagtatattagtggccgggtgtgtggttgcttacgcctgtaatcctagcactttgagaggccgaggcaggcagattaactgagggcaggagttcaagaccagcctggccaacatggtgaaaccctgtctcttctaaaaatacacaagtagccgggtgcagtggcgcgcgcctgta

SEQ ID NO: 171886 - DNA, 490 bp, Homo sapiens
ctctaccagccaaagagccgcctgcacttgtgtactggggcacacgaggccacagtgggaaacatatttgcaaagctgcaccttcactcttaatagaagtctgacacctccaagtcacagtcacacaggctctgtgtcctcaaagccctaggtcacagaggactcttcccagagtctttgagcagcagggcctgcacatccacaacaggttctcatccaaaagctcaaatgacatattttctgaattaaaatccacatgtctggaagcatttgtaaggctatgctctccacagcgatctacgcttacaaataattgtggttgtcataaatcattggaatcagcctttgaggcacttgaaaatctgacagcaccattattgtggcttttcaaagtcaggaaaatgtgtagatgggagaggggtctcatatgcaggggattcccaaagattgatattctattaataaaatgacttctccattctgtctcata

SEQ ID NO: 171887 - DNA, 560 bp, Homo sapiens
ccgagttttccatgaaaattctatcctattatcatagtttgtaaaagctgtggacaagtgtgatggaatgaatcctattagcttgtgtaattataaagtgatagaagacatgagccagtgtcactcttattccaatccagaaacactgagattagttgactcttcattcatcttctctgtccaatctgtcactaggtccatgtgtcattgtttttcctccaaaatattccttcatcctgagctctttgtcacctaggacctggactactacagtaaccttgctccttgacttcagattttatctctgctaaatcaactggaatgtccccactatgtaccaaatgaattcccactttagttaataaatctagattgccttatttccctttgatacaactaatttcagaattcaactcaaatattatctggttgtcttttttttttttgaggcagggtcttgctctgtcatccaggagtgcatgagccaagatcacaccactgcactccagcctgggcgacagagtgggattccatctaaaaaataaataaatacataaata

SEQ ID NO: 171888 - DNA, 327 bp, Homo sapiens
aacaagcctcaaagagatgcatcagccacagctgtcctggcaagaggcctcacctccccctgctggaaggatatggacctgaggctgccgggaccaaccaccacacataagctgagagtgaagccaacacagtggaatctggagccaaagatggtgagaaatggagtcttaatgatattctttgtgtctctgatcaagctgtacctaaagcctggacttttcaggggcatgagacaaaaaccttccttttttggctaagctgctttgagttggccttgctgtctcgtgaaaatgaaaaggttcaagactgatacaatctcttctcag

SEQ ID NO: 171889 - DNA, 105 bp, Homo sapiens
aagctgcaggccccttgcagtgtggccgaagcttacctttctaacctcatccactacacctgagcacttgctcctccttgaatagagtgcacagggtagttgtca

SEQ ID NO: 171890 - DNA, 1406 bp, Homo sapiens
ccctgcgccccacatctcccaactgctgaaggccctcacccatcaatgggccgagtgattgctggacgcgtggtgctgagttaacgccacagcagtagctttttgcccccgtggactagttttatacctgcccttccccatccatcatttgaatgatgtcatttgttagttgtgccaggtttacatgaagagcaagtgagcctatgttttctgttcagcctatgggatcctgcttattgctttggggacaccacattagaaaagagttacaagggctgggcgcggtggctcacacctgtaatcccagcactttggggaggccgaggcggacagatcacgaggtcaggagatcgagaccatcctggctaacacagtgaaaccccgcctctactaaaaatacaaaaaaaattagctgggcgtgctggcgggcgcctgtcgtcccagctactcaggaggctgaggcaggagaatggcatgaacctgggaggcggagcttgcagtgaggcaatattgcgccactgcactccagcctgggcgacagagcgagactccgtctcaaaaaaaaaaaggagttacaaagtagaggttatcagtggctgatatcaggctggccttgtttggatggggaaaaggaactccagaactgaaagacagagggactggactgcctcttgagtgtggaaggtggatcagagccaagcagggagctggggaaccagcgctgggagtggcttgcctggtggcgcagacccagctcactcaagatggatctcatactggggaagccaggagattcagctctgctccgaaggcccttcctgtctgcacgtgggtatcactgcatgaagaggagtagagacccgattgggcagaagccattccttgttctattttggaagctttttggctgaagccagtgtttcatacgaggaaatgaaagttggctgatgtaattcagtttaaaataggtgtcacctttggggacctaacccagattgtaattttcttttgcatgctgggtattcagaactcagcaaagaatgtgttgtcaggattgcaactgaggttggggggtaagggtggagactggctcattgttggcaaaagcttctgttagattgataaactctttccaggtaacagttgggacctcattgatcccgatagatcttagaagttctagcacatcttaatttccttaatagtttaattgatgaagagcattgatgaagagttaggaggtctccctgttgtacctacattttccgcttttttagaatgagaagatgagaacgacctccagttcacatgtacgggtgctgtgaggatccagtaggggagatacagtgctcagcaccaagcaggtgcaagtgagcacaatccaattttacatcaagttacccctc

SEQ ID NO: 171891 - DNA, 187 bp, Homo sapiens
ttttggataatattgtatttcatttgaataaggatgcatcttaaaatctactggtatacctctttttccaaaattgaagtgaaagtagtaatacaatatggagctttggaatttattctgaaggatactgtagcttatgagtggtcatggagctgattaaataaatgttgtttaagcaattactccc

SEQ ID NO: 171892 - DNA, 145 bp, Homo sapiens
acatggagagagtaatgagaaatttgacgcttttccctctttctctgtttcctggtttagagctgctgcatcccacagtgaattactagctacaaagagaagggactgctctgggactgacaattgagaacatttacaattagct

SEQ ID NO: 171893 - DNA, 235 bp, Homo sapiens
tagattgtctcctttcctttcccttcatctcttaattagtttcagttggttatattacattgccaacaagaccaatgccacagggtccctcaaatgacatttcccatccttagccatttatcccataggggatacatttccatcaccagaagaggctttttgttttgtttttttaaacacaaagtgggaagagaaggaaggaggaaaatgacagtgatgaagatgaaagttaatc

SEQ ID NO: 171894 - DNA, 429 bp, Homo sapiens
ctagaaagtcctcatatatttgaatttctagtgtttcccttttgccaccaaaatacatatactccttctcacccccattccccaaataaaagcagcctcaaatttacctatcagagtccaggtataccttaaagactgaggaagcctagctaattctctccacatgctgacaaagtttctactgcttgaagctcaggtgagtccccaggaaccccagttttttgaaactgtacacggaatagcagaatgacacttctcccaacacccattctgtgcggtctttgaaaaatataaatccagggtcaagtaactaaaaaaacacagaagacaaatagctaagtaatagcactttataaactactcagaactcctgaataaactgttgtaaaatcctaaagttgttagctataaagcagcaacttaacaaca

SEQ ID NO: 171895 - DNA, 465 bp, Homo sapiens
cagaataccgcatagtacagtgatatatttaagtttaatatctgaatttctccagataagattttgttttaatatttaccccctctcaaaagtttatttatttgagacggggtcttgctgtgctgcccctgggctcgagtagtcttcctgccttggcctcccaggtagctgggattacaggcataagctaagtattttaaaccttaaaaatacatgtatacctaataagatgttatttaacgtatatgtattatttaggaatgactttttgtttctaatctttagcagtatttatccttcctgatagttccccaggtatagaggttattgtatgtatttttttaaggctgggtacagcggctcacacctgtaatctcagcactttgggaagccgaggccagtggatcacctgagctcatgagttcgagaccagcctgggaatatggcgaaaccccatctctatta

SEQ ID NO: 171896 - DNA, 628 bp, Homo sapiens
  misc_feature (559)..(560): n is a, c, g, or t
  misc_feature (563)..(564): n is a, c, g, or t
  misc_feature (568)..(569): n is a, c, g, or t
  misc_feature (571)..(572): n is a, c, g, or t
caacaacggattggcgacatttcaaaccataagaaaattttacaaaaacacatttagacatggagacacattttctaaatatgaatcactgtgaggaaagcagtttaaaaataataatagcttctataatttatgagtgttaaccatggtttatgtactacggcaagaacgttgaggaaatcatgcaatcatgcaatttgtaaatacattcttgtaaaaaacaaaaaacaaaactcatgtggtggagaagcagactgagtaaaatgtccaagttactccttcacaccactcgcaaaaccattcctgtcacttttttttttaagagacagggacagtgtctcactctgttgcccaggctgggcaagagtgaaactccgtctccaaaaaaaaacaccaaccaaaacacttaaaatgcaatcctttatcaagttaaagtggggcaagtcctccttgggttgtttgaagctgcagcccttctcctcatccaaacctggtcatgatgagcagcattaggatgggacttcggcatagggaatcccaaggtcatggtaagggtttnngtnnagtnntnngggaatcagacagaggcagagttgaatcccagctctactgtttccagctttctgac

SEQ ID NO: 171897 - DNA, 629 bp, Homo sapiens
aggttcaatcttccttcccccagtctccatccaatataatacactcatccctcagtatccttgggagattggttccagacctttggtgtataccaaaatccatggttgcttaagtccctgaaacaaaatggtatagagactgggcacagtggctcatgcccaaaaccccagtgtttagggaggccaaggcgggagaatcgcctgaggctaggagtttaagttctgcctggtaagacccaataattaagactccatgtctataaatttttttttttaattagcctgacatggtggtgtgcacctgtagtcctagctactaaggaggctggggcaggaggatcacttgagcctaggaggcagagcttgtggtgagctgagatcgcgtgcaccactgcactctagcctgggcgatagtgtgaggctctgtctcgaaaaaaaaaaaggaaaaaaaaacttacagtacggaatatatagctccctgtactgaattcccacagtgactagccagttattaaaaaatcattggctgaaataatccatcttttctccactgacttgacgcactttttaatcataatttccacattgtggatgtgtcttttccttgatactaaagctaacagatgaca

SEQ ID NO: 171898 - DNA, 169 bp, Homo sapiens
tgtatagcagaagtagcagaggggccacaaaagcaagcactgcctacttttaagtgtctctgcaaaccagggcatatgaggcctcatttgcagaaaaaaaaagagtgaggtctaagttggggaaattcaaggtcaaagccaggtttggaccgaattatttgctactact

SEQ ID NO: 171899 - DNA, 197 bp, Homo sapiens
atatatatcaaaaattactttaaatgtaaatgaactaaacaattcaattaaaagacaaagattgtcagatttttgtttatttcctgatttggatggtgtctacatggatacgttcattttgtgaatatttatacagctgttcttttttttttttttttttttttagatagagtctcgctctattgccagactggagt

SEQ ID NO: 171900 - DNA, 135 bp, Homo sapiens
tatttaaagtaccaaagctcttggtattctcctattggtcttctcaaccagttcttatctttccagtcacactctttctccatctccaggtagaataaataactttgttattgtgttgatttaattctgtcttat

SEQ ID NO: 171901 - DNA, 621 bp, Homo sapiens
aagacaaacaggagcagttttcaaggagcccttcccttatctctaaggtctgggcctggaattcagcttggcccatttactatgccagctctgtgcagggtgcagagatccaagataaatcagacagggtctctgctgtcagtgtgctcaaggaaagaggcttttaggggaaacaaatctaaacgactgccagctggaacttcaactctgtaaagcagcaccctgccacatctgcctgctggaacattttcatctgctgggctcacgtagctgtgcaacagctggggctggggtcacattctgggctgatctgatgattattttggctagagtgagctcatcctttttgttttcaggagctgttcaagggtggtctgatggtttggatcaagactagctgtatcccggagaagaatacgttgacttttctggggtggggtctggggcagaaagcaagaaggctgccttacttcaaggaaggctctccttccaccttctgccctctgagtgccttgtatgcgcaagtgacactagacaaagtgcttaacacttattacctgacttgaatctcccaatggccctgtaaagcaggtactccattatcatcaccacccttcttta

SEQ ID NO: 171902 - DNA, 251 bp, Homo sapiens
agactattccgtgaggagcttttgcttactcttcctgttcttagccctgtgtctcattcttgcctccccttacactggataactagaaacttttatgggtttactaggacagatggcttcctcctcatcagtagcctcttcctcacattattacaggtcaaagctttcctctgccctatcttgtcaagtactacacttccatctgcattctgtctctagcaatttgctaaactttctcatctactgattaa

SEQ ID NO: 171903 - DNA, 321 bp, Homo sapiens
tcctatccttacagacacaaggacacaggtgggaatggcttttcatatgcaaattccatgccatttgcttcctattccagccaaacagttgtgcagaagataaaacgaatcagggagtgctccagggagtgctcccggctctcaggagtactgtagggagtggagacaggaaggaagccatgacagggaaggtgacaatattggcccggtgctctagatgcagttctgcaggcgctcactgaagagactgctggagaaggcaggaggatgtgctcgcggtttcctgtgatgtggtgagggcaggtggagcttcagcaccca

SEQ ID NO: 171904 - DNA, 257 bp, Homo sapiens
actttctgaacttgtttccttccctctaaaatgcgtttaatattctaccatgaaaaaatcactgtgagagaaatagttcatggagatcagttaccttaatgacaagtgtatatggaattatgagtagaagtataaaatcttgctttgtaggacaatctgcaaccattattatttgtcagcttttaaaatgcaattttcctgtattatttccatggatgatttgaaataggtgatttttgttagattattgttagata

SEQ ID NO: 171905 - DNA, 1414 bp, Homo sapiens
  misc_feature (2)..(2): n is a, c, g, or t
  misc_feature (850)..(850): n is a, c, g, or t
  misc_feature (1367)..(1367): n is a, c, g, or t
  misc_feature (1413)..(1413): n is a, c, g, or t
gngggcgcacgctcttcctgggtcaagagccggctcggttctgggattctgaggctccccaccgcggtccggcttctctgggagactgtctacaaaccgacgagaggcgtcaaccttttaccctagggggcggatttgggtaggagccgagcgttcggtcggaaacgcccccttcttcctcctgggcggggcaagtgaggccaagtactgggcctccagggcgtcgtacctctgtgagacatggctcgctgtggggaaggcagtgcggcccccatggtacttctggggtccgctggagtttgcagtaaggggttgcaaaggaaggggccgtgtgagcggcgccggctgaaggcgacggtgtcggagcagctcagccaggatttgctcaggcttctaagggaagaattccatacagatgttaccttctctgtgggttgtactttgttcaaagcacacaaagcagtccttttagcaagagttcctgacttctattttcatactattggacagacatcaaatagtttaacaaatcaggagcctattgctgtggagaatgttgaagctttagaatttagaacgtttttacagattatatattcatcaaacagaaacataaaaaactatgaagaggaaattcttaggaaaaagataatggagattgggatatcacaaaagcaacttgacatcagttttccaaagtgtgaaaactcatctgattgttctcttcagaagcatgaaattccagaggatatcagtgacagagatgatgatttcatttccaatgataattatgacttggagcctgcatctgaattaggagaagatttattgaagctttatgtgaaacctngttgcccagatattgatatttttgttgatggaaaacgttttaaagctcacagggccattttgagtgccagatctagttattttgctgcaatgctgagtggctgttgggctgaaagctcccaagagtacgttactcttcaaggtataagccatgtagaactgaatgttatgatgcattttatatatggaggaactctggacattccagacaaaactaatgttggtcagatactcaatatggctgatatgtatggactagaaggattaaaagaagtagcaatctatattttaagaagagattactgtaatttctttcagaagcctgttcccagaacattgacgtctatactagaatgcctgattattgctcattcagttggagtggaaagtctttttgctgactgcatgaagtggattgtaaagcattttgcaaggttttggtctgagagaagctttgcaaatatacctcctgagattcagaaaagttgtcttaatatgttgattcagtccttagtaantataacctgaatactcttttgtgtgtttgccattaaaaagtttatnc

SEQ ID NO: 171906 - DNA, 750 bp, Homo sapiens
ggaaaacgttttaaagctcacagggccattttgagtgccagatctagttattttgctgcaatgctgagtggctgttgggctgaaagctcccaagagtacgttactcttcaaggtataagccatgtagaactgaatgttatgatgcattttatatatggaggaactctggacattccagacaaaactaatgttggtcagatactcaatatggctgatatgtatggactagaaggattaaaagaagtagcaatctatattttaagaagagattactgtaatttctttcagaagcctgttcccagaacattgacgtctatactagaatgcctgattattgctcattcagttggagtggaaagtctttttgctgactgcatgaagtggattgtaaagcattttgcaaggttttggtctgagagaagctttgcaaatatacctcctgagattcagaaaagttgtcttaatatgttgattcagtccttattgtgggtggctggagcctgtctgcagctaaggacccaaggttggaaccaaccctggacaggataccattccagcgcagggtgcactcacagcacagaacactcacttatactgggacattgtagagaagccagttcactaaatgtgcacatctttgggatgtgggaggaaactggagtgtccagagaaaacccatgcagacatggggaaaacatgcaaactctacacagacaatggcctggccaggaatccttttttcccttatca

SEQ ID NO: 171907 - DNA, 416 bp, Homo sapiens
aattgtggtaaacagttctaggacagcagaagattctaattgtcagcatggggttcatttctccttcagccaacatccaaaccactgcttaagtatacaagggaaggcttcaggatatcaatagcatcttaatgttcaaaattcacagtgataatcagtgactgcagaatcacttatatcttccttacacactagagttatctgaaattagtgttggtagttgataagaaataatgagaacactgtaaatgccttcactcaatccaatactgtgttaatcttttttaaatgttttattgaaatccaaaaaggatagagaggctgaaagaatttctgactcagcctgtagttcttcaagatcaattactgtcctcattacaagatacttacatttacagataggaaaggtattcccc

SEQ ID NO: 171908 - DNA, 307 bp, Homo sapiens
ctggagcaagtgacccagcccctcctacctttggcatgctcatctagacaactggcatagaaacacatttctgacagggctatggagactgtataatgtgctttgcagatgggaggtgcccagtaaatggtataaggggcttcaacccctacattcccactccaagatagagaaactaagcctcatagggataaaatcttcacttaaagccaaatatctattagtgatttttctactacaatcacactgtcctctcctaggatacagtgaaaacattcctgagtcacagcccaaagctcatagagca

SEQ ID NO: 171909 - DNA, 344 bp, Homo sapiens
ctatgatggtctgtggaagcgaactcacatatctccgaggtatgactgtacataactgtgaaaacctgaaattaaataaactgtattgtctacagatgccaaaacagtggcaaaaaaataaatagcccttacttatattttaccctgagtgtggttctgaatttgaagaatggttactcagaggcaaagagattggggaaaaaaagatcagtctaaatcttgatattatttctcctagacttaaccggtctccagggtccgcaataggggagactttgggttcatcatgggatctctaaagtaagtggcttaatgataatattgcgagctttattactatcatg

SEQ ID NO: 171910 - DNA, 479 bp, Homo sapiens
tcccaagagtctccaggctgaacaaataatcgactgcttctcaagttaccttttaaggcaccactgctcaagaacaagagaactttttgaacaggtgagccaaacatgaggctactgtctgcaatatcctggtctcctttattaggtatgcctatttagttccctctattgagaatattcccactcacctctacctctgctccaatctgaaagaagcccaaagtcagcagttacgcatatagtctccatgtactgcatctggatgtactgaatctccatgtactaatgcttgatgccccatcccagcatcggggtcatgatcctgctagctagtacttccatacccatgttctctcacactggttttaacagtcctgggctgcaatcaacatgtcccaggccccagtggccactgttcccaggagttgccatgcagcaggctccttaacccagttttttttctcactcctttgcatggg

SEQ ID NO: 171911 - DNA, 354 bp, Homo sapiens
actgctggcttctcaccattttatgtcgctgagttgttgggtggcctcaggcaagacccttcccttctctggcctgcagattcctcatttgtttgtcagcaggagggagctccttctatctctgctattaagttgaatttggttcctggaagctggtgagagagtatcgtaacacccagtttggttggcctgtgtctttcagatattaactgttacctgattagctggggtctcaagttcctatttcctgtgcttttactaaggaaattctcagacttatcaatgcaaatatggtatcaattttgttgctagaccaaatatgattttttaaaatagagatttcccactatgcta

SEQ ID NO: 171912 - DNA, 166 bp, Homo sapiens
ctggatacattcacttcccctctgccatctcctgccccacattttctaagccaccactagatacgttaaattgtataaattgtatacaaccactgtatcaagtataaagtatagatataatgaataatcctattttgcacagaaagaaaccagagtgtggagagag

SEQ ID NO: 171913 - DNA, 267 bp, Homo sapiens
caattcaaatataccgcatgtccagattcatgtgcagatttgatcttcagtgttactaagctgctttcagaatctctgctccagttatttccttgaattcgtgtgttctcacagattgcaactgagctttttgttaatttgctttatttactggcacatctaatatctgaatcagctttatcaggtattttactacccagatttcttcccacctgcacaattaatccctttcgtaagggattaattcatcaacattcaacaagccct

SEQ ID NO: 171914 - DNA, 150 bp, Homo sapiens
aaatcattcaccatgagcaaaggtcagcagacaaaataagcgagaggatcagtatccccaagaagttgagatcatccatcaaactaacaaagactataggaaaagttatgtttaagactatttacaaggaaataaggctgagcaaaagaa

SEQ ID NO: 171915 - DNA, 422 bp, Homo sapiens
ggaatcctcacagagctcctgctggctgtgagcactgcatggacttgcaaatgccactccacttctttaccttggtttcattttgcacttgaagataaagctcaaaggacagcatcctggaaaagcacatgtacccaggaggcagacaaccctggcttgagtcctgtccatgccctttcctagctgtgatattcagcacatcgcagggcctcctcaaatatatactgtctaacgtggcagctggtagccacaagccacgtgtatctattcaaataaaaataaaaatgaaatgaaattaaacattcagtgactgagtcacaccaggtttgagccaagtgctcagtagccacatggtgtccatggtattggaaaatacagacagagagcatttccatcaccacagagagttctattggaaagtg

SEQ ID NO: 171916 - DNA, 467 bp, Homo sapiens
tcattggtctgccctacccacttggtgcacagtcaaaaccaaattcactctccttttcttttaaaggaaacttaatggccacaagctaggagtcatgggaataattgcgtggcagcatctgtgagcagatcacacttaggatgctccacaagtcactcctctgaagtggtagaaatgttggccgggcgcggtggctcacgcctgtaatcccagcactctgggaggccaaggcaggtggatcatgaggtcaggagttcaagaccagcctggccaagatggtgaaaccccgtctctactaaaaatacaaaaaattagccaggcacggtggcaggagcctgtaatcccagctactcgggaggctgaggcaggagaattgcttgaactcggagggcgaaggttgcagtgagccgagatcgtgtcactgcattccagcctgggcaacagagtgagactctgtctcaaaaaaa

SEQ ID NO: 171917 - DNA, 205 bp, Homo sapiens
atctcttataggaacctatctttaaacctccagagttttcataagtattagcaagcacatttttaaatgccatatttcttcctcccattcctccccttcacactctttaacctaaatttcgtgttcaatggagtgaatctggaggcactgccttgacatttcactataagaactgaaagactgggagctgcgtctgctgtaggag

SEQ ID NO: 171918 - DNA, 176 bp, Homo sapiens
atgttgaatgcttgagaaagaggaggcaaatgtgaggccattagatgaaaagaataagtagcattcctaagaatagtttcttcccaagcccatctttttccatgactctttacatgttagtgttctccagtgttttggccccacttgtcttttcattgtttatgcaagtttgtttt

SEQ ID NO: 171919 - DNA, 431 bp, Homo sapiens
taacaactgtgtgaagcaactaagtcaaattttatcattcactcattgtacggatgcagaaatggaggcatggagatggaagataattgaccacgactataataagtaagtggcaaaactaagatcagaactcaaatctcttaactctggctttcatgcttctacatatggcatactgcctctccagagggacaatacggagatggtgatgaagtgattcctagtttgcaagattcaaaatatacacacttggtatattcatagcgtaagccaatattacactcctggagttgaatattttgtcgataagtttccaaatgttacaattccataaagaaatgtctatgttttacttttaaataagatattttttccacccattaatactctgttttgatggtatctcagagaacttacgtgtgggattttag

SEQ ID NO: 171920 - DNA, 375 bp, Homo sapiens
taggaatgtaacagcattaccaaaactagaagttagttttttggagtaacaaaagacgaacttcaagaaggttaagaaaaaaagaaaattaaaagataaagcacatactatcaactttatacaaatgaagaaaacatacaaaataaataaattccggagaaaatactcaaaccttaataaaaaagaaatcatataggatatggaatgtcccagtttctccaacaaatccatagcataagttggggggggggtggaatcctgattcaaacaagccaactataaacacacattttgaaatgagagtaagacatatttaggtacagactgagaaatgggtgatattaagaaatcattaactttattgactataacaat

SEQ ID NO: 171921 - DNA, 882 bp, Homo sapiens
agatgttacaatggccttgtgaccttgtaagtgagccatgtgcttgcaggtgggctgcgctaggctagttgcgaattagcattttcctgacggcccatgaagcaagctgtgtggttttcatttctagtgggtggaagaaaagatggcactccagggactaagtcctaggaaattctgccatctggcataatgttggaggcagtgtgtgccagggcaggaaatatgggttcttgggctggctctagattggccctgtaatctctaatgcctcagtttctctaactgtaaagtgggacagataatcccactgctaccttcttgtgaaggtaaagtatgcaaaggccctttgaaatgtcgagagcacggttctaaatgtggcttgcctgccaaaggaatttgccaggcctactgggaggcagcagtttgcttctgtgtcagtttctacagtctgtgctcagacaggtacttaagcatctcacatccataaatctcacctcctatctatagtcagcaaataagaaaaagggcaggctgatgctctgcttctgtctgatcttcttaccaatcctacccttgcctcccctccccctgacctgatgcgatgatcttgctgctctccctcatctgttctgggcctgtcagtttaatttaacaaggttctgggagaggtttgatttaatcaacccagttgctgtatccatcctgctcagaggtccctcagtgtcaccaccgaggctcagattagacagtgacaattacttcttctttcctggctattgcctcccccttccctttcactccctggagggaacaaggaggcagaccaatctcttgggacctaagaatagatgcgggaggatcaaaggagggaaacaggctctg

SEQ ID NO: 171922 - DNA, 678 bp, Homo sapiens
agcaatatactgagagtgacttgggtgattttctggggtgatcaaccacattccatgagcaggttaactgtggaagacacctgcccttgagcatcgcgtttgggccacatgcgtcaatggggaaatttgtgtttccattctgcttcttgttttgccttcacaacttcagggatagaagcgtattccatttttagttaataatcagctctctggggcttccatgtaatgagtcagaaactgatgactgactccactctgctcattatcatgtctcccaaaaacaacccgagaacccactgtgtcaagtgaagctttaatttttcaggggaggttttctccattgagaccaatacatcttttcttgtgacagatccagttaccatatttccttatttttaactgtcgaaaagacagttaagctgcaacagagtatggtgagtttaccaattttaatacttgaagcaccaaacaaaggatcagtgttgcaggctgtctcttcttgactttttccagctctccttagcagataaccaggatgatattttttctgctttacaacatgatgaatgctatatctctatattaactctgaaattgaattgcagccaaatattcctctcagctgcattagaattttctaaagaacatgagacacataaacttagtcttcttagttca

SEQ ID NO: 171923 - DNA, 581 bp, Homo sapiens
gtactcagtggtgcagctctccctggtggcaccattatgttggaaaagcaatgcctgatgcatggtaagtactaaacagaggtcagccacaaatattgcctgggcactatgcattactgaggatttctggtggaaagataactcattctagattacctcacaggccctggccagcctagaggtgactttcattgggtcaggcactattcccttatctaagaagctccagattctaaacacaataaaataggggaacctctcagaatcatgaaggcatatcaagcagtccgaggattcttagagtggggcagtgtgatccaaatagcctggcttggactctacagtaatgctgttactacacaggcagagtatttcagtcttcagataggctaaccttaaacagaagagggcgcatttcagctgaagatagggagtgaggtaaaccaggctggaagaatcatgagcgtaagtacagatatgcagtttcattttgattgcatggcataaatatatacatttaattcatgcttaatttggacaatcccaaatttctgctacaacaggttgattttcattctttt

SEQ ID NO: 171924 - DNA, 1353 bp, Homo sapiens
gagaacaagaggctacctccagttaaccaggacataaagtccccagcggttcctgtcacacctgctcctccctccccagggtgcatccatgatcgtggatgtttgcccaggggtgaccatgtttggctggcttggaatgctgtgcattctcagagctctgttagtgtcccctcttgggggtcagagatgaggtgtggcagggtctagaggaatgagtgtccaggcagagttcagaaggtaggaatgtccctcttgatagggctgaatcaagggattcctggctttagaaagggtctgctatctttgcaaaaatgtgcaagtatctgtagccagtgtaatgaaatcacttccaaatccagcctgttacctgacttttgtcattgttttcccaaaaatttgaggtatcattgaaacaggtcattttaaacaaatctattacggattctcagggttggaaataattcgatgattgcttagtcctcccccacccctagaacaccccagcacatctgaagatgagcgcctctccctgggtacctgcaagtgatcaccttggcctgcttgcatacctgggctgataggaagcgcgccatccccaaggcagctcctgctgtggttggacagtgctgactgttagacagttcttccctatattgagccaaaatctgtcctgccacttgctggatcttggttgcagaccttcccattcacccagttatatatctttgctttcaaaatagtcaccttgagagaccagacatttttctgaaaacatcattactcagaattcagattcccctctgggatctgtcttcagaatcaaagttagctcttttctatcccctgtaagtcagtccccttttgttgtagcttcacctcgtttgtgacccccacttcacccaccttccccaccatctgtggctccatatacctttcgaccattttctgctggaagaggaagattcacggcccctgaggagatccagaggaaagagacggtctccaagggtgctgtgcagcaaggagcccaggagtggtatgaaccgtaacagtgcccttagagtaaatgtgcggcccctaagaccctgccctcaggaaggcggccttcccctgcagtcctgtgtcccacccctgggtctctgtagggtgccatccagggcaagcaacccaagcactgcttcccaccgggtgatgagccatgcaggcctccaaactgcacgtcatgattcatccctaaagtgagtttggccttgagagtccccagggtcctcccccactgggcaggggtcctcaaagccaaagaagcctggtgacacaggcacccatgggaggtgggcccagaaaggggcttcc

SEQ ID NO: 171925 - DNA, 1039 bp, Homo sapiens
gagaacaagaggctacctccagttaaccaggacataaagtccccagcggttcctgtcacacctgctcctccctccccagggtgcatccatgatcgtggatgtttgcccaggggtgaccatgtttggctggcttggaatgctgtgcattctcagagctctgttagtgtcccctcttgggggtcagagatgaggtgtggcagggtctagaggaatgagtgtccaggcagagttcagaaggtaggaatgtccctcttgatagggctgaatcaagggattcctggctttagaaagggtctgctatctttgcaaaaatgtgcaagtatctgtagccagtgtaatgaaatcacttccaaatccagcctgttacctgacttttgtcattgttcttcccattcacccagttatatatctttgctttcaaaatagtcaccttgagagaccagacatttttctgaaaacatcattactcagaattcagattcccctctgggatctgtcttcagaatcaaagttagctcttttctatcccctgtaagtcagtccccttttgttgtagcttcacctcgtttgtgacccccacttcacccaccttccccaccatctgtggctccatatacctttcgaccattttctgctggaagaggaagattcacggcccctgaggagatccagaggaaagagacggtctccaagggtgctgtgcagcaaggagcccaggagtggtatgaaccgtaacagtgcccttagagtaaatgtgcggcccctaagaccctgccctcaggaaggcggccttcccctgcagtcctgtgtcccacccctgggtctctgtagggtgccatccagggcaagcaacccaagcactgcttcccaccgggtgatgagccatgcaggcctccaaactgcacgtcatgattcatccctaaagtgagtttggccttgagagtccccagggtcctcccccactgggcaggggtcctcaaagccaaagaagcctggtgacacaggcacccatgggaggtgggcccagaaaggggcttcc

SEQ ID NO: 171926 - DNA, 1300 bp, Homo sapiens
aaaaactctaaatccctgttctggaggatggcaaaagttgaaaattggagacagaattaaattataatggtaacaggactagttagatggtggaattttcaacctggcaaatctgctttttcaagaccagtcttcatttggaaggagtaatacacagagacttggggatcaggtactcctgagtgattcacacacacaaaaagctttaatttccggattttcctgcatctgcggggcccataaaagtatcccaagcttctctgttaaagtgtagcattccctctttcttaaatatgattcaaagaccttgcaagatggcaccaaatccattatctatactcaccttcctttcttctaacctgagccataaataagattagtcacaaaacatcctaccaagaaaagtattatgcctattaaaagaagaaaggaactatacccggaagatgctacaagagaattacgggcctggatcttgacatactgatcaagaggagtaaaacagaaggtttgataacaaagcgttcatccatatgtgagcatactcccacagtacaagagttagcaccttgacaagcaacccaaggaaaggtgttaattgctgttagaatagcttttagaactttggataatgtgatgggctacactaggaaattagaaatctagaatgactaagtaggtggtgaaaggagaaaaaaaaaagctcagaaaattgaatgtgctagagtaggtgtactatataaggactaaaatcaatcaaacaaacaaaaaacacccgtccactatgttctgtggtagggcttgaaagtcactttttatcaaggcaataaaaaatatgatgagggtgaccttgatgccatttaaagtgtcatatggtgactgtcttctgtagactagagcttgtggtaggagatgctattacagacaaaagattctttacatcaaagtatctaataagattctgcagtaatggaggacagggagcaatgcttaaccatcttaaataaggtggatacaattataaaatccgtgacaaaagtcagagtggcagcaaatttgacttgaacctcagagagttatgggatcgttaatcaaagatgatgttcttagggtcaaggaagactggaagctatcaagaatgctcaatccatgggaatcaagaacaatcaaagctgaatctgacaatcttcgccagattctggacttcagtctacattatttccagggatctattgattaaaggaaaagttaagactccaaaaggaacaaacctgaaacatgcatcaatctcaaagtgacc

SEQ ID NO: 171927 - DNA, 424 bp, Homo sapiens
cttctaccattcttccccctctacttcagccatattggcctctttgttgttcctcaaacacctaactaagcacattcctcaggacctatgctcttactatttcttctgcctggaacattcttccctcacatatcaatatggttcactctcttccctcttttggttctttattcaaatgccattttactgaggcttcccctggctaccctatttaaaattataaaccatcaacccttccttcattcttcttcataggattttttaccatttaacatacttcaaatgcagcaaattaaggagttaaagggagatgggaatggacattggcaataagcacggacccttctttttaaacagattgtgtggaaagagaatacaggaaactacaggaaactaaacaagaggtcagatggctaaagtatga

SEQ ID NO: 171928 - DNA, 456 bp, Homo sapiens
ttgagtttggggttcaggagacagccaggcaaagaagcttccagagcagagctaacttgactcagaaagctttacaaggagtgtctttctgtgacatgttttttttccctctcctttgaagaaggaagagatggcaaaactccaccatccatcttcagacacatactcttctcattaaacataggcctttcttcccaggaaagtgagcatttgctgttgcatttgcccctctggtgtgctggccggtgttcctgttttaattcaggatgctgttcacccctacagtgttctctttgcatcactggaagtcgttttggagtggaagtccatttggaccatgaaaacatttgatcttgtcgggtagtttaaaatttcatttgtcaggtcagtgttttgattgttttgaccttgaggctttttctcacggtcaataccttggcagttttagaaagaact

SEQ ID NO: 171929 - DNA, 481 bp, Homo sapiens
cggggaaccctgccccatgactgctgcagggagctggaaggctcccagcaacacagcctgccccctctgggcagccaaccagcagcctgttcagctaagtccaattcaatacatgttcatggagctcctcctaagcacccgacagagagaaattgtgtcttcaacggactcaaaagcggaggggagagaaacacagagacatgtctctttgtgatccccagcaagacaagcagaatataatggaaggccagccaaaggataggggagcacaggaaagagggaggcccagtgcagcttcacggtggcacagatatttgcatcatttgtgtcttgaagaataaagaggttgtcagcagtcagagaaggagacggaaaggccttctgggttacaggagcaacttgagcagagcccacaaagtttggaaatagatgggccattagggacaagaagggtctgtgtggttccccaacagggtttgtc

SEQ ID NO: 171930 - DNA, 309 bp, Homo sapiens
aagaccctggacaacatgctgaaactacctgtatcttgatgggacaatagcagccacagcctacagtgtggcttttgaactttgcaataagtactagttatgcatctgaagctatatgatccaccttcaaaatctgcattctcttttcatgaatggatatttcagaatctttttttttctttcatctaacgctgagataatagtaaataattcagaatttatttcagaatatttttgcaattgtcctttttgttgttgttaagggaagttgaaacaatctctacagaacttttttttttttttttgaga

SEQ ID NO: 171931 - DNA, 422 bp, Homo sapiens
ctcagaaaacagttcaaaaggtagaggaggctatgcatcctgatgcccccaccatacctcctatgtttgttaagtgcatatttgttatgtgacttggttggtttttttgttttttaaaccactccaattggctgttttgccaaaggccctccatttgagcttgtatcctaatattgccactcaggagaattactcctacacttcacaagcacaagaaaaaaaaaacttcataaatatttcatcaagtgattacactgttatttcttaccttcagaagtataactctcagcaccctagcacaaaatgactttgaggagacaccctcactccatctttgcttttggaaagatactctgtctatgagcacacttctaacactgacttttagagctcaatgccatagtcctggagtaactttctca

SEQ ID NO: 171932 - DNA, 382 bp, Homo sapiens
cctacaccaccaaataccagtagtacctttccctacttctaacaacctaaaatgtctccagccagatgtcccctaaggggcaaaatcattttcagtcagaaccactgtttagcagtaacctgtaagacaaaagtataccaaaaagtagaagtaactttatggattcctagatcagtgtgttctgctatcactgtcttctaggctgccaggatttacgcttttaatagtgtagtctagtactaccttgccattatgttcagaagtaaatgtgaatttaagttgaatagtagtgttttaaaatatgtaatccaaatattcctaattttttattttattttgttttgtttttagggacagtcttattctgtcacccaggttggag

SEQ ID NO: 171933 - DNA, 612 bp, Homo sapiens
gttccattaagattttttatacctattatttctgtcatcatcatgttcatatttacctctgtttttgagcatatggcatataatagctgttttaacatgcctgcctgctattctatcgtctttgttaattctaggtcagtttctactgattgttttctcctgcttatgggtcttattttcctcctcctttgcatgcctatattttgtttgtttgtttgtttgtttgtttgttttaacagcctgggcgacagagcgagactccgtctcaaaaataaataaataaataaaataaaataaaaataaaataaaataaataattagtatgtgaatgagaattttgatgaaattaatgacttatagaaaaatctccggaagagttatatttacattagaaataaaattttttttaacccatgggagaaattgagaaaactggtagagaactacttctgaaaacagtgtctgggtatttatcaaatatctggaagtatatgagaagggtctctttcatattactatatgcctctgtctcttacagaataaaactcatatacctgcatgtggttcagaatgtgtcacacacaagcaagaacaatcatcaaagtatagggg

SEQ ID NO: 171934 - DNA, 350 bp, Homo sapiens
gaagtcctgccccacctcaccccatcaccaggccatgtctctgtgcccccttagtgatcctactagactggggagcaactcactgtgttgtgccattgtctactcttttgccatgtctgcatcccccaacaggatgcaagctcagtgcagacaggagctacatctggggtcttgttcaccatcatctcgctcacacattccaaggcttggtacagagtaggaactcaaataatagctgtaaatggaatcgatcagaataacaataacagtctagagaaaaataaaaaatctcaccactccagggcgagcaagacaaatgggcttgtcccattgttgagacggaaagcttt

SEQ ID NO: 171935 - DNA, 378 bp, Homo sapiens
tctgtgacgggctcaggaacacctggttgctgctctccatgagctgttccaactgtgaagcaaaagcttcatgcataaaggcatcccaacgcagtcaatgacgcacaggagaaagaggacagagataagcttcttgcctgttccagacactgaggatcaggcagagagagaggctcctgccaggctgagcttttccggagtgtggatatgaacacccgtcgtgggtcctgaggtggaagccatgtgtggaagatggagggcatccgttagaaggagtatagtccctgatggtcactgagctgcagaaccagcgtgggctgcttcatgctggatgtcacttactagagagcgaaattaaatgtgcttcagatactgtta

SEQ ID NO: 171936 - DNA, 325 bp, Homo sapiens
tagcacgtacttggggctttaggtgggaggactggcagaggccactccatgaacgaaaggaggctgggcaccaggggctgagtaagaactgttttgaacagaatgggagctgactcacatctggaggagggttctcaggtggggtccctcggtattgctgtaactgggtcaatctgattgtctctcttcaacctttttcaaccatggtaagcacgaatgccctaagccattgactgtaattaatgaatttctctcctatgcatctggattgtacagtctagatgtacaagttgtactatccttgggagaactaagaaaatagttg

SEQ ID NO: 171937 - DNA, 316 bp, Homo sapiens
ggttgcagtgagccaagctcatcccactgtactccagcctgggcgacagagcgagaccctgtctccaaaaaaagaaagaaaggtcatagagtatcagacttgcaaatgtgattcatactctgccagtcatttcagggtgcattccccttccttattttgtaaacttctctccttactcaaaggttagttatctctcagatcagacaaaggagcagctgttattcaactatagatccaactagattcgaatatgttttccaactagattacatcctacaggtacataagtacagtggtcgatcatactatacaacta

SEQ ID NO: 171938 - DNA, 488 bp, Homo sapiens
tccctacaccaatagatgtggacaagtatcaggatatttttttacttaaagatatagtctgtgagcataatttctattttctaacacctccaattttgtataaagaattgggaagctgattttgtataaagaattgggaagctgatttttcagagctgaaataactctaaataagtttggcaggatccgagaagaaacttgcctcagctctgtcatctgctgcacagagcaacatatctgacttcacatggtatttttggaagccaagacaacttctttaggatggctgccacataaaatacataaaataactctaccccagatagaatcagacatgccaacactgattccactagaactgtttaagtattaagggaatttttaagaagtaagggaattttttctaaatcccagatggggttttttgtttgccaagttccttcttatttcttgtaatctttccttattgcatgtctgtgttgggctaa

SEQ ID NO: 171939 - DNA, 686 bp, Homo sapiens
tacatctaggagctaatggcttattggtgtcttttagtcaccagattcagatagtatatttagttgaaggttgcagcagcacacacttggctttctcatttgtgttagcttcacttctagtacagaattgaataggattgaagagacggttttcctgtttgtgtctgtggcaactttttcgatgatttgtggtttaattctttaaacatttttgatcacttatcacctctttctctgtgaaggcttaaagtattcagattctaatgttataatcttttcatcagattatttaattttggagaaatcaaggtcagaatagcagctgacacagttgtctctgaatagtgacctaaaaattataatacttctttttttttggcctggattttatggtctgcctttgtggcatcagatttttaaataagattatgtgattgtgaatcatgtatttcttggtctctggcctcttaaacaggtaactatatgacttggaccctttttaagtctgttttttaaaaaatgttaatctctcacatggtttttaaactgttgacagtattgtacttgacattaattttgttaggcagttaatgcattcttcggcataactttgtttcttgggtcttttcaagacctgtcaaagaaaacaaaatgctaacctgactttaaaggggcaagaaaatccc

SEQ ID NO: 171940 - DNA, 302 bp, Homo sapiens
cagaggcggtgggagtggggctcccgaggcagtgcagttggctgtagctgggcgcctcggttaggtgcgctgtcagtcctttccgagtgcctggcccagtctctcccgcctcggcccaacatggacttcagagaaattctcatgatagcttccaagggacaaggtgtcaacaatgtgccgaaaaggtatagtttggcagtggggcctccaaaaaaagacccaaaagttaaaggtgtccaatcagcagctgtacaagcttttcttaaaaggaaagaagaggagctgagacgaaaaggtatgta

SEQ ID NO: 171941 - DNA, 299 bp, Homo sapiens
cagaggcggtgggagtggggctcccgaggcagtgcagttggctgtagctgggcgcctcggttaggtgcgctgtcagtcctttccgagtgcctggcccagtctctcccgcctcggcccaacatggacttcagagaaattctcatgatagcttccaagggacaaggtgtcaacaatgtgccggtaagtagcagctggggcatcaatgtaggggaccctagtcttccaagttcggaatgtgtgtggcccatggaacttctgggcagcccgctatcggctccgggagaggaaagacccggacg

SEQ ID NO: 171942 - DNA, 433 bp, Homo sapiens
agagacagggtttctccacgttggccaggctggtctcaaactcctggcctcaagtgatttgcctgcctcagcctcgcaaagtgctaggattacaggcatgagccatcatacccagccttaaatgtatacacaattaaaaaaaaattactagaaatggaggtatttataaagttccttggcaatcctgataccatggccacagtgaaataatgagtataatacacagcagcttccagctacactcaaaatagaagcatgtgaatttcatatagtaagtttgaaatctaaatgtttaaaataaataaaacgttaactgctatcctggacatttctcatgcttgatgataacccaacatcttttaattatcttttccaatgattggcaaatttctcccattctaagttcacctccttgaaggagaaaccagaaact

SEQ ID NO: 171943 - DNA, 571 bp, Homo sapiens
gcgactctacaggatcccgtgatgttatcccaccaccaccatgcccagctaatttttgtatttttagtagagatggggttttatcatgttggccaggctggtcttgaactcctgacctcaggtgatccaccctcccccccggcctcccaaagtgctgggattacaggtgtgagccatcacgctgggccaagcaatcctcttgtacctcagccttccacgtacctgggactacaggcatgcaccaccatacctaggtaatttttgtttttgtatttttttagagatgggatttttccatgttgctcaggctggtctcaaactcctgagctcaggcaatccacctgccttggcctctcagagtgctgggattacaggcatgagccattgtgcctgatcataccatattttctttattcagtctaccattgataggcattcaagtcgattccatgtctttgctattgtgaatagtgctgtagtgaacacccttgtgcatgtgtgtttatgacagaataatttatatttctttgggtatatacccaattattaggttgcttgatgaaatggtaat

SEQ ID NO: 171944 - DNA, 434 bp, Homo sapiens
ctgagccatcctcagagcacagctggtggggaacttcacccgtctggtcactcctgaagcagtctggctggcagccacaggctgggatcccagttgttggaggtcagtgcacacagcggctatctgctgtagcagaaagaatttaggggaggaaaggcttgagaaggaagggcaagagagagcagactttgtggcatcagtcaggtatatgtgcttgtattaacatgaacctgagaggctgatggtattacatggaattccaagtttcgactgcatgaattctgtctcttgtggtttatctatggccaccatcaaccgatgttgtgtgataaaacgtttaaagtatgtacaactgaaagtggagatggatactaggggcatttaacgttttaagctttcctccagggttttttcctcagttacatggaggatgg

SEQ ID NO: 171945 - DNA, 673 bp, Homo sapiens
tatgggcattcagagtaaatgtatgagagatagtaattagttgatttattttctgtctctgctgaacttgaacctgctaaaaagtgagcctaggtctttgttaactggcatcccgagagtatgagaccagtgataagatctaagcaaaaaggtgactcacctcttgtttgaaagggcagacatactcagcagtgatgggctgcatctatgacctctccctcccttttggacttaatctgtgacaacaaccttggctaccaatcagcctcttaaccaatttagtcaggaaacaagcaaggctggcaaaggcagacaaaacactgtctctgaccctcaaagataagcacaagataaggcaaaataacagaatgagtctttgtcatttaactatacacaaattgaaggacagaagaatctctgcccatcacacaggacagaagaaaagcttataaggtatgaaggataagaatagtaggaactggccgtgtgcagtggctcatgcctgtaatcccagcactttggaggccgaggcgggcagatcacctgaggtcaggagtttgggaccagcctggccaacatggtgaaaccccgtctctactaaaaatacaaaagttagctggccgtggtggcaggcgcctgtaatcctagctactctgtatgggggatcacggag

SEQ ID NO: 171946 - DNA, 214 bp, Homo sapiens
ttatgcttccaagtctggcctccccatcaaaagagtgcttgtaccccaagattgccgaagacataaaacactcctccgcaaattttggaaaatacagtgatactcaaacccactgcagatcaacatcccaactagatatgatgtgttcattatcataggccagctctgctgcattttcttataacactgatttgcaaagcccaaccatgacaac

SEQ ID NO: 171947 - DNA, 440 bp, Homo sapiens
ggaagtagagtcgagtttcttgagagttaagacatgattgagattgtatttttgttaaggaagcgtgaccaagccagaagaagcaaggaagctgaggatatgtgcaaagaagtgattataccgatttaccatggaatgtaaactaagcttcaagggcatcacatgggtgtgggccacagacggcctggatcgctgggttggaggtaccaatgagtcagcagtattattgctctgggagatcagacaggctgaacaaggaagagaaagtggggaccagaaataaatgtttttggtgctattcgaaactgtattttccttaatagaagattaattcttcaggaatcagaccttcagtgtatgtgaattaagatgataaaaggaaaggaagggactgttggatcaaataaaaaattatttattcatcatttactttatgccct

SEQ ID NO: 171948 - DNA, 449 bp, Homo sapiens
tggcagaagtacaaatggcacctttaccagaaggacactgtaaaagttcagtgaagctctgcggtttccggtgtggctgtcttcatccctaatcctaaatgttaactttgcaaccctgtaagatttcatgtctgtaccagaaactttttgtgaggaagccttgactggccattagggagcagaacagtgagggaaagtctcaagagtaatatatccgcgtgctgagctgtggaaggaatgaacagcggcctttctctgaatggtaatgtagctctcaaaaacgctgcctggttcttaatccaaatgtccagaaccattctgtgcctggcagcacacatccagacaaatgaaagagggtctcttcacttgctaaaagccattataaggagaaataaagaaaagggaaaaaattaaaagaggatctctaaaggaactttcgtattgcctgc

SEQ ID NO: 171949 - DNA, 3175 bp, Homo sapiens
ggcaggatcgaggccgcgggttaagtcggcacgaggggcagaagcgcatgaggctgtgggacttgccttccatttgatttctgaattgtgaaggtgcatgctttctggaggcctgcacagacctttcccacccgctttcctgaaagaatttgacagggaaagtgagaccgcaggaaggctttttgggggaaggtttcttcaatgctagactctctcaggcagagctgcatcgggccccctgccttccctgctcccaatttcctgagaccgcccgcccccacccagaattggggatcttgatcaggtagccacgatggaggtgatgaacctgatggagcagcctatcaaggtgactgagtggcagcagacatacacctacgactcgggtatccactcgggcgccaacacctgcgtgccctccgtcagcagcaagggcatcatggaggaggatgaggcctgcgggcgccagtacacgctcaagaaaaccaccacttacacccagggggtgccccccagccaaggtgacctggagtaccagatgtccacaacagccagggccaaacgggtgcgggaggccatgtgccctggtgtgtcaggcgaggacagctcgcttctgctggccacccaggtggaggggcaggccaccaacctgcagcgactggccgagccgtcccagctgctcaagtcggcattgtggcatctcatcaactaccaggatgatgccgagctggccactcgcgcctgcccgagctcaccaaactgctcaacgacgaggacccggtggtggtgaccaaggcggccatgattgtgaaccagctgtcgaagaaggaggcgtcgcggcgggccctgatgggctcgccccagctggtggccgctgtcgtgcgtaccatgcagaataccagcgacctggacacagcccgctgcaccaccagcatcctgcacaacctctcccaccaccgggaggggctgctcgccatcttcaagtcgggtggcatccctgctctggtccgcatgctcagctcccctgtggagtcggtcctgttctatgccatcaccacgctgcacaacctgctcctgtaccaggagggcgccaagatggccgtgcgcctggccgacgggctgcaaaagatggtgcccctgctcaacaagaacaaccccaagttcctggccatcaccaccgactgcctgcagctcctggcctacggcaaccaggagagcaagctgatcatcctggccaatggtgggccccaggccctcgtgcagatcatgcgtaactacagttatgaaaagctgctctggaccaccagtcgtgtgctcaaggtgctatccgtgtgtcccagcaataagcctgccattgtggaggctggtgggatgcaggccctgggcaagcacctgaccagcaacagcccccgcctggtgcagaactgcctgtggaccctgcgcaacctctcagatgtggccaccaagcaggagggcctggagagtgtgctgaagattctggtgaatcagctgagtgtggatgacgtcaacgtcctcacctgtgccacgggcacactctccaacctgacatgcaacaacagcaagaacaagacgctggtgacacagaacagcggtgtggaggctctcatccatgccatcctgcgtgctggtgacaaggacgacatcacggagcctgccgtctgcgctctgcgccacctcactagccgccaccctgaggccgagatggcccagaactctgtgcgtctcaactatggcatcccagccatcgtgaagctgctcaaccagcccaaccagtggccactggtcaaggcaaccatcggcttgatcaggaatctggccctgtgcccagccaaccatgccccgctgcaggaggcagcggtcatcccccgcctcgtccaactgctggtgaaggcccaccaggatgcccagcgccacgtagctgcaggcacacagcagccctacacggatggtgtgaggatggaggagattgtggagggctgcaccggagcactgcacatcctcgcccgggaccccatgaaccgcatggagatcttccggctcaacaccattcccctgtttgtgcagctcctgtactcgtcggtggagaacatccagcgcgtggctgccggggtgctgtgtgagctggcccaggacaaggaggcggccgacgccattgatgcagagggggcctcggccccactcatggagttgctgcactcccgcaacgagggcactgccacctacgctgctgccgtcctgttccgcatctccgaggacaagaacccagactaccggaagcgcgtgtccgtggagctcaccaactccctcttcaagcatgacccggctgcctgggaggctgcccagagcatgattcccatcaatgagccctatggagatgacttggatgccacctaccgccccatgtactccagcgatgtgccccttgacccgctggagatgcacatggacatggatggagactaccccatcgacacctacagcgacggcctcaggcccccgtaccccactgcagaccacatgctggcctaggcggcctggccccagtgcggttcctcatctgagaggctctccgtgcaggcgatggggcaagacagaaaagtgcctgagctggggaagccggggtgtaacttcctgctgcaccctgcgcctccagaggtcctccgtagggtctttcttgggatagtgttctgctcctgcttttctgtcctgggcatgggtccagggcctgacaccccctccagggcccaggttcgagacccaaacccccaaaatccaaaacttctcttgaaaagttcagggaccgtccaggggagatggggaggagatatggagtgagtcacctgctccagaagatgccagcttctctctccagggtgcttagttggctttgcccacccctcactccccagggagctctggggacagcttcctcacacccctgtcccacccacacagctgccctagctgaccccgagaagtgctcttggctgacccctctggtgtgtggtgaggggctttctcttccccttcctgtttcagacccccccatttcccgcacatggtgtggggggctgggggaggtccaagcagagtgttttattattatcgctttatgtttttggttattggtttttttgtatagaccaaagcaaag

SEQ ID NO: 171950 - DNA, 365 bp, Homo sapiens
ggatggtgaaattgctatggagtgtgagattgctgtagaaggtgaataagaggcctggactaagccaccaatactcaaatggcacttcttttgtcctcatgtcaattatgtgactttgccagcctctctcagcccctatgattgcacctgggttaccggaggtggagagaggatgcctgtgttggtggcagcaaagaggtcaagattcaaagcccaccccgcatgcattccgtgggccatcctgagcgtcaaaaaataaaatagattcatcaagggaccaaagaaaaataaagaccacagagtataaatatttgactactactgcctactgcttgtccttttttttttttttttttgggggaaaa

SEQ ID NO: 171951 - DNA, 444 bp, Homo sapiens
cgggtggatcacctgaagtcaggagttcgagactagtctggccaacatggtgaaatcctgtctctactaaaaatacaaaaattagccaggactggtggtgagggcctataatcccagctgctcaggaggcttaagcaggagaatgacttcaatgtgggaggtggaggttgcagtgatgagccaagatcatgacatagcactccagcctaggcaacagagtgagactccatcaaaagaagacgaagaagaaaaagaagaagaagaagaagaagaagaagaaggaagaggaggaggaagagaaggaggaggaggaagaagaagaaggagaagaccaccaggtaaagaaataaggagaacactatccaggcctcaagttcaaagtcatagtgttgtaaaaatgtgatgtggatttaagttgggaaagcaagaggctttactagctga

SEQ ID NO: 171952 - DNA, 465 bp, Homo sapiens
aaaaatcctctgtgctcctacctatcctttttacttaaaaaaaaaaaaaatgtagccactggggctgggcgtggtggctcacgtctgtaatcccagcactttgggaggctaaggcgggtggatcacctgaggtcaggagtttgagaccagcctggccaacacggcgaaaccctgtctctactaaaactacaaagattacctgggcatggtggtgcacgtctgtaatcccagctactcgggaggctgaggtaggagaatcactgaacccgggaggcggaggttccggtgatctgagattgcgccatcacattctagcctgggagacagagcaagactccatctcaaaaaaaaaaaagtagccactggaaagatttaaaattacacgtatgggctgggcatggtggctcacacctgtaatcccagcactttgagaggctgaggtgggcggatcgcttgagcccagca

SEQ ID NO: 171953 - DNA, 372 bp, Homo sapiens
actaaaatacatgtttcatgccattacttattttgaattcctgattgcttttagacatggaagaattgggagaaacaggtagtatgaaagtatttgggaaaacgaagtgccttaacaatggatgcatagcatacttccactttctgaggtgtgccatcctttgggcctttacaggttaagttccttacagagatagtgatgtggccaataggactttttttggttgcccagcagtccaggttaatgtgatgatcaaataggagaaagcttttctggaagaggaactggggatagaaaatataatagacgggtttagttaatctagccttctcaactgagaagtatgtgagaagaggaaaaggaaattaggag

SEQ ID NO: 171954 - DNA, 451 bp, Homo sapiens
gactctcagagagattaaataacttgcccaaggtcaaacaactagtaagtggcagagctgggattaaaaatcaggtttatataaacttgaatacttctgtccttatctgtgaccagtccaataagaggtatttcctctcaaatgaactggtggatgggagtggttaatagcatggctactagagatggactatttggtttgaattctggctgctccatttactggcttatttgagaagtcttctaacttctctaagcttcagttaccttatctataaaatggggataataatacctaccttttagaggtgttgaaaggatgaagccatgccgggcgcggtggatcatgcctgtaatcccagcactttgggaagccgaggtgggcagatcatgaggtcgggagttcgggaccagcctgaccaacatagtgaaaccccttttctactgaaaaa

SEQ ID NO: 171955 - DNA, 645 bp, Homo sapiens
agctatgagtatcataaggaaactaaagaacatatgggaaagattgataaatatttctgtgaaatttggtagaaatataactaaaaaattggggaaaattataaagattaggaatttggcactaagctttctttgtaaaaacctaagtattttcttcacattaaagaatcagaaactaggccgggcacggtggctcacctgaggtcaggcgttcaagaccatcttggccaacacggtgaaaccccgtctctaccaaaaatacaaaaattagctgggcgtggtggcacacacctgtaatcccagatacttggaaggctgaggcaggagaattgcttgattgcttgaactcgggaggcggagggtgcagtgagctgagatcatgccactgcactacagcctgggcaacagagggagactgtgtctcaaaaaaaaatgacaggtgcggtggctcacacctgtaatcccagcacttggccaaaatattactattatacatgttcgctcatttatgaaccactaacaaaaatacctgttacgtacaaaagagaaatctagccaaagggcttctcctctttataaagccaccaaaagtaacccttttctgtagctgatgaactggaatacctgtctcttcctcactgatgc

SEQ ID NO: 171956 - DNA, 164 bp, Homo sapiens
ggaagaaaaactcctgtggatccacctctctgaaaaatgagattgaaaccctgggccttcctttcttccatgccagtcaaagtgacccagcgtggcaggagtaagaaaacagtccaggttttgaatgtctcttccaacggctgacatggtcctgcccctcagcg

SEQ ID NO: 171957 - DNA, 371 bp, Homo sapiens
gccgtttggaatttcattttgaaattctctttccactaacatttatagttttggcacagttgccctttaaaaagacagcgtatcaattgaacataaatatattgtgtttaaactatatgcctgcttgaataagtgcagtacttatttgtcagggcatatattatgttggagtatgatgtcatgaggcttaaggaaactaatgcttatcatttgttagtgcttaaaacaaagtagagatagccaaatgcatttctctacttccttattgccatacagctctccttgtaagttaataagtatcttattgcaaatcagccctgtatctgttccaaattcaaatgttgatggttgagcttccagtattttctccc

SEQ ID NO: 171958 - DNA, 273 bp, Homo sapiens
gaagagaagagatcagaggccaggagttcaccagcacagccccagttccttgcaccaggacagtttcatggccaagccctgctaccctgttagtcagggtacccggccacccttgagactcattggctaaagaattcactcactacaccgctgtccggtatggcttttgtcctgttacaaaaacccccagtttggccgaaagataaaaatggaagggaaaaagaagtttcatggtattacttacataagattaaactaaaagttaacattctc

SEQ ID NO: 171959 - DNA, 175 bp, Homo sapiens
gcccactacctcccctatgggccctcacactccaggccactgttcccctgccctaatccccctagagccaggtgacagacaactagagacagcatccaggccccagagccggctaacattattcaaacagctaatcctaaacctgctcaacctgcctcgcccattccctcccaca

SEQ ID NO: 171960 - DNA, 745 bp, Homo sapiens
  misc_feature (457)..(457): n is a, c, g, or t
  misc_feature (474)..(474): n is a, c, g, or t
ttcagctctccggtccgtgcctccaagatgacaaagaaaagaaggaacaatggtcgtgccaaaaagggccgcggcacgtgcagcctattcgctgcactaactgtgcccgatgcgtgcccaaggacaaggccattaagaaattcgtcattcgaaacatagtggaggccgcagcagtcagggacatttctgaagcgagcgtcttcgatgcctatgtgcttcccaagctgtatgtgaagctacattactgtgtgagttgtgcaattcacagcaaagtagtcaggaatcgatctcgtgaagcccgcaaggaccgaacacccccaccccgatttagacctgcgggtgctgccccacgtcccccaccaaagcccatgtaaggagctgagttcttaaagactgaagacaggctattctctggagaaaaataaaatggaaattgtactaacaaaaaaaaaaaacncacaccaaaaacaaacntttgggggcgccctatgggaccccggaaaaagagtttccaagaaccctcgggtgtggggcgcggcggcgcccaagataggggtacgtggcaacatggggccacaaggggggtccccaagagagagacacgcggctccagaacatgggggggtggttttccccacccataaaaaaaagcgcggggggacaaccgaagggtctgggaacaattcccagaggagtcccgaggactacggggtgcctccaacggggtgcccacggaacgaataca

SEQ ID NO: 171961 - DNA, 714 bp, Homo sapiens
tggcctagagaacactcttctctgacatgctttgcttctttaacacctacttatctttcaggtctcttcctgtttctctcatttttaaatttttattttaagaatttataaatatatacaaaagtagagagtatgatgaatccatcaccatttctatgtatccattacccaccatcaatagctgtggggatttgatctctttaaaaattaaaaaaaagttttcttgaaatcccagtaaataccttttatttttttcttcctagcacattaacacaatttgcaatcatgtatttaatgtctcttttctccattagtttataagctccataaaagctgttttctatattgtgatatatccagtgtctcatacagtgcctgaaacatgataggttctcaaatgtgaaaggaatgaattatttaataactgaaaacgtcgctaaggggtttgaaaagacgagcatttgatgaaaactttttgaaaaagattggtaagaatgacttaggcagctttatattaaaacaataggtaccgttaggctcagattcatatacttattaagcaaccttgtgctcttaatttttttccaagtaagcttctgtgtaaagcaaactcagtgaccttgtgaagagaatattatttgagtttataagatattgtccatagtaaataactaaattagctttgggggatcactcttgggcaaggtaaaatga

SEQ ID NO: 171962 - DNA, 206 bp, Homo sapiens
gagttgggattgtgatgcccaacccatagccagatattttctcaggacgagaaaaggaagatttttggcactggattacatgcttggatcattggaaaagttagagaagtgattattatttttgttgtcactagagaaaaatctgtttttgcagcaccagagtaatgctgagagtttgaattagaagctttaatgttaaacagctg

SEQ ID NO: 171963 - DNA, 1303 bp, Homo sapiens
ggtctttaccgctcagcttcccggagtccgcgcaggagcgcgtctgaataggaagcgttttcggacgtggatgcggcgttttgtcgctgccagtggtgtctggagaggttcgggctcggtcctcaggtcctggctcccagaagcaaaataactcaagtgaagcaatgaaggaagaagaaggaggttgctggccttggatatcataatttctggggacaactttaagtggacactaatatttctgactaggaaaacttcaaaaacttcatggcaaatgcagaagagacaaagacgtatagtccatgttatccactattttctgagcacagaagaaaatgatcaagacccaggaatcactgaccctggaggatgtggctgtggaattcagctgggaggagtggcagctcctggacactgctcagaagaacctgtaccgggatgtgatggtggagaactataaccacctagtatcactggggtatcaaactagcaaaccagatgtactctccaagttggcacatggacaagaaccatggacaacagatgctaaaattcagaataaaaattgtccaggaatcgggaaagttgacagtcatctgcaagagcactctccaaaccaaagacttctgaagagcgtgcagcaatgcaatggacagaatacacttagaaatattgtacatctcagcaagacacattttcctatagtgcaaaatcatgatacatttgacttgtacagaaaaaatttgaaatcaagtttaagtttaatcaaccagaagagaagacatggaataaataaccctgttgagtttattggagagacagggtctcttgagaggccgaggcaggcggatcacttgaggtcagaagttcaagaccagcctggccaacgtggcgaaaccctgtgtctactaaaaatacacacaaaaaattagctgggtatggtgctgggctgttgggagccgaaggcccatgggatgtgaccaactcagcattccactggaggctatatgatcaaacagcaaactttatcatgaatgcacgatgtgggcaaactcatgactgcttccgctgccagaaggtttgctgagggcaatcgcttcctggtgctgagctccttgaggttatctactgggacatctagagaatgccatcttgcaaaccctactctggactgagtagctgaccccttcttccacccgccttctcactatctcttttgcctaataaatatggagggctgtgtaaagctcagggcccttgtccactagaggcaaggtgtcccctgatcccttcttccaaatat

SEQ ID NO: 171964 - DNA, 1636 bp, Homo sapiens
actccccagacattccaagctagaatttctggggatggggttcggactctgcatttataaaaagagccttcttaaatttgaacatctctgccctaaattgtggattggtgctcccatcaccattcccacactgtaacaggatggattcagggcagattgtctccagcaatgaatcagacaaaagtgctccaccaaccaggcccttgaatcaccttccttgtcccgtgaatcagcacagcctgccacggcaaagttttatcagcccactcctggaaatgatcagtgaaggtcccatcatgggctgctcatagtcctgtggaccaggtgctaaacttacctaccagagattaacattccagatgaacggggctgaaatttaatcctggatggaatatgttataacactcaagaaatacgaacatgaaattcttattctctagaaattacaaaactcctcaggtcctggctcccagaagcaaaataactcaagtgaagcaatgaaggaagaagaaggaggttgctggccttggatatcataatttctggggacaactttaagtggacactaatatttctgactaggaaaacttcaaaaacttcatggcaaatgcagaagagacaaagacgtatagtccatgttatccactattttctgagcacagaagaaaatgatcaagacccaggaatcactgaccctggaggatgtggctgtggaattcagctgggaggagtggcagctcctggacactgctcagaagaacctgtaccgggatgtgatggtggagaactataaccacctagtatcactggggtatcaaactagcaaaccagatgtactctccaagttggcacatggacaagaaccatggacaacagatgctaaaattcagaataaaaattgtccaggaatcgggaaagttgacagtcatctgcaagagcactctccaaaccaaagacttctgaagagcgtgcagcaatgcaatggacagaatacacttagaaatattgtacatctcagcaagacacattttcctatagtgcaaaatcatgatacatttgacttgtacagaaaaaatttgaaatcaagtttaagtttaatcaaccagaagagaagacatggaataaataaccctgttgagtttattggagagacagggtctcttgagaggccgaggcaggcggatcacttgaggtcagaagttcaagaccagcctggccaacgtggcgaaaccctgtgtctactaaaaatacacacaaaaaattagctgggtatggtgctgggctgttgggagccgaaggcccatgggatgtgaccaactcagcattccactggaggctatatgatcaaacagcaaactttatcatgaatgcacgatgtgggcaaactcatgactgcttccgctgccagaaggtttgctgagggcaatcgcttcctggtgctgagctccttgaggttatctactgggacatctagagaatgccatcttgcaaaccctactctggactgagtagctgaccccttcttccacccgccttctcactatctcttttgcctaataaatatggagggctgtgtaaagctcagggcccttgtccactagaggcaaggtgtcccctgatcccttcttccaaatat

SEQ ID NO: 171965 - DNA, 235 bp, Homo sapiens
aacacgaacaagagaggaatgtagcagttttggttaagaacccatccttaggatacgcagtcttagaactacttaaggaaatacactgaatttgatcttgcatgttggatgaaatcgattacagactaaatttcaagtagtctggaagagggaatacttagtcttttctagactaaagatgtgtgtgtgccagaatctgtgtagctaatggtgttggggataaggaggggagtgt

SEQ ID NO: 171966 - DNA, 627 bp, Homo sapiens
actttgtcatctggctggagtgcagtggcgcgatctcagctcactgcaacctctgcttcccgacttcaagcgattcccctgcctcagcctcctgagtagctgggactacaggtgtgcaccaccatgcctaatttttgtatttttagtagagatggagtttcaccatgttggccaggctggtctcgaactcctaacctcaagcgattcacccgccttggcctcccaaactgctgggattccaggtgtgagccaccacgccccactctatctatctatctatctatctatctatctatctatctatctatctacctatcatgtatctatcactttcaaatgtcaaagagccctaccaaattatgtgcctgtttatcagtttaggaagtgtgagttgtaataacttattctttaccttaagggagatactatggcatgtcccagatgattggacttctaaaatcttcactgatgtggtaagttagtgaacattcatgaggtttatctccctctttctgtcactcatttgcattactatggcttctacagtgattgccacttcctgatcaccaggtcaaattagcatgattttattggtggaatgaaccagtgctatgttcttcagaatgt

SEQ ID NO: 171967 - DNA, 639 bp, Homo sapiens
gtgatacagattccttcagctctctcagatatgcttaactcttgagctagttagtgtgtaccagataccagaataaataattggggaagcctctcattggtaaacccttagctttctaatagatatctagagtactcatgatgtagtggggttgggggaaggtggtaactttgtcaagcaagaagagtttgaacaaccatagtttctttgagtctttcacctgtatcctgggaatcaatcacttggatgttttagatttgaattttagcttatgaattactaaaatctagtgtattatagtaagtataataaagcctatgtgtaacaggactgtacagtagagtaggttgttcctatttacgtaataacataatggtgaaataataaagttcaagtatttattgactctactaagagctccagtagggaatacagtgtcatagtccctgctcttaagatattcacaggcttccaagggaaattatgaacaaatgattaaaatgacatgttaatattttgagaagataagctcaggaaaggcatgtaggtcagctgatagtgttggggagaaggattattggaaataaatagtatttgtgtagtaaggcttgactatttacagagcatagttttcatttg

SEQ ID NO: 171968 - DNA, 187 bp, Homo sapiens
tcccggaaggagaagtccacagaaacctcaaatgcctgcgagaggaaggaacaaagggaggactcacagattgacacgctgggctggcggctggccctcgaatctatagggtctgggcttttaaacttcttttttcaaagctccgcctcaaaataatggctagagaaagaagttttggaggtggccg

SEQ ID NO: 171969 - DNA, 440 bp, Homo sapiens
tcagagccaaaacaagaccgtcccagattagttcagaggaagcagccgggcagcctggtgcatggtctctccaggagcaggctggggcgtgggagtcacctgtagcctctgcccttcatggtgcgctccgctcagcctgggccggggacaccgttccgtctggtttgtgtggtcgacgtcaggagactaaacatggacttcccagtgcccccgtccttcctgtgcctccggaagcgcgtgtgcatcaaaggtggcgtgtcttgaggcggccaggccggagagcacacaggatgcagccgtcaggacctggcgtgggcttcctgctgcacacagcgcgttgctggcaggccccgtgaggcggtctttaaagggagggctgcggagtcctcaaagtatgcccgaaaagaggctcaaggacagggcgatcatttcagccaccc

SEQ ID NO: 171970 - DNA, 582 bp, Homo sapiens
tgagactccgtctcaaaacaaaacaaaacaaaaacaaacaaacaaaaactctgctccccgattgctccaggggactgctttgagtaataatagaactccagtctcccacacagccagctctgcatgaagtactccttctctattgcaattcccctgtcatgaaaaactggccctgtctagacagcatgcaaggtgaacccactgggcagttacagaatcccctgacctttctccccatggtctccttctccaaagcctagtccaagccagtgagaaaggaggaaggaagaaaccagtcaggcaggcagttagggtgggtcctcagttgagttctttcaaatgaaagaacagcctgcaggcacagacaaaggaacttgcacaagggggcttgcctaagacgtgcctatagctgcatagacccagcaccttgggatgctgaggcaggtggatcacctgaggtcaggagttcgaaactagcctggccaacatggtgaaaccccatctctactaaaaatacaaaattagccaggggtagtggcatgcgccagtaatcccagctattcgggagcctgaggcaggaga

SEQ ID NO: 171971 - DNA, 428 bp, Homo sapiens
tgagactccgtctcaaaacaaaacaaaacaaaaacaaacaaacaaaaactctgctccccgattgctccaggggactgctttgagtaataatagaactccagtctcccacacagccagctctgcatgaagtactccttctctattgcaattcccctgtcatgaaaaactggccctgtctagacagcatgcaaggtgaacccactgggcagttacagaatcccctgacctttctccccatggtctccttctccaaagcctagtccaagccagtgagaaaggaggaaggaagaaaccagtcaggcaggcagttagggtgggtcctcatccagaccacaagagtggtttctcagacctcacacaagaaagatttcagggtgaacccatacagtattgtgaaagcaagtttattaagaaagtaaatgattaac

SEQ ID NO: 171972 - DNA, 1188 bp, Homo sapiens
ccagggaacactgatgtttaaaaaagtggtagagaaaacgtggggaaaggtcaacttttgttaaaatctcttattcatgtggctgtttaattcctctacatcacatcctctcttctgttcaccctggaggtgtaaaacactataccaaaggacagaacacactatacacgtttagaacatttcttctgaggatagttactgctgcggtaatgcaggtactgttgtggtgatgctaatgagaataaatcttgctaaaattaagaatcaagacagctgaagacctatggaaagcaattgaccgaacagtactacttcaggtcaggtaagcagtggcagtacaagaatgaagaatggattctttgttaccaagcaattaacaatctagttgggtatttactgggtaatacaatacaaagtaagcaatggtaattggttatgtgtatgtcagttgtggcatgatagtttctacctcggctatctgctgaagccctttctgtctgtcttctctccctgtccagctttgttcttgcctgcctttttattttttacagtccctctccttttttgcaggggggcggggcggtgctagtgggagtatacatacccctcgttaaccacctgtgatgtaagttaagatttttttttaaatgtttctgttttttaaaaacaagtgaatagagcatttattatcatggaggataaaatcctcaaagaaaaaatctgtttagcttttaaattcttcgtgaaatcgctaatctttgaggcgaaaaattttttcccgtaaatttaggagaacatgagatttgagtttttaaggactttatagcgtgcctatgtttattgtagattttaattccagagagctggtgattggaaatcatggacctatttgttccaatttaaactttcagcatttaaaaaggaagagataagagagaaccagacaggaggtatatagtttgtagaaagatacagatatttaatgtaatcccagcactttgagaggctgaagcgggcagatcacctgaagtcgggagtttgagaccagcctgaccaacatggagaaaccctgtctctactaaaaatacaaaattagccaggcgtggtggcacattcctgtaatcctatctacttgggatgctgaggcaggagaatcgcttgaacccaggaggcggaggttgcagtgag

SEQ ID NO: 171973 - DNA, 525 bp, Homo sapiens
ccttcacagcatgtgtcagaatgtattactaccatatcggacacagcagatctatcagaatttggccctttggttttagaaatattgatagtttgaacatataaatctgtcagaactaatgacctagcttttgaggttctggaaagagcagtttcattatttggcaaatcctttttttttaaaggaggaaagtgtacaaaaactgtctcaaatcagcaaaattgctgataaaaaacatataattcaaacgcccatgaactaacatgactaaatgacatctctatcttttctataatttaaaaagcaaagaagacaacaatactatcaaactagcttgtgaaaatcaggtaatattcaaacttttaagttgtctaaaatgctaagatttttaaaactgaaagtatagaatacaattttgaagtacgaattctgagattagaaggaaaactatacaaaatttgactactggccgaagcctacctataaacttttcaattgaattttaaatatccatctgtaggatct

SEQ ID NO: 171974 - DNA, 286 bp, Homo sapiens
tgcactccagccagggggacaagagggagacttcacctcgaaagacagacagacaggctagtacgttttccacaaatttcaattttactctcttcccccaccacacacacacacacaaagcatttgagggatgggaggaagaaactgagatcacagggaaaattgtaagagacattcagaaggacaggtcttagaaatttactagttttggggggaggtcagaacaggtgtatataaaagaatattaagacagttcccaggtttaggcatatgtgactagatagag

SEQ ID NO: 171975 - DNA, 328 bp, Homo sapiens
agatacaatgagataatgcctgataaattttcagaaatgacaaaaggcatgaattcatagatacaggaagcatactgtaaaccaggtagaataaataaagagttccacacttagacaccttggcatgaaactgaggaacaccaagtcaaaaggtattgccaaagaggccagagatatatcacctacaacaaaaggcaccatactgatttctgaaaaacaacaatggaagccagaagtcagtaatatgatccagtatttcattaactttaagatgccatcaatgctaaatcacaccactattttatacagcaccagtaaagaaaaaaag

SEQ ID NO: 171976 - DNA, 616 bp, Homo sapiens
tagccgggcatggtggtacatacctgtagtcccagctactcaggaggctgaggcaggaaaattgcttaaacctgggaagcagaggttgcagtgagctgaggttgcgccactgcactccagcctggaagacagagcgagactgactcaaaaaaaaaaaaaaaacaaaaaaaaaaacagcaaaacaaagttaatgaactcacaggtgttcaagaaatcgccatcattttgaagaatatgaacactgtgctctaatggattgaaacttgaatcctcaaagtagcttatgaactactatgtggtctaaaataaaagtcaacaactacatataggaaatcatgtgggtttttttcttgacttaaaaataaaattaagaaagctgtttttctaaagaaagcatgttatgcaatataatttcttccattagagttaattcttcttatttaaactttttggaagtttggtttttctaaataagagtttctaggacacgtatccagaataacaatcaatctggcagaaatatctcgtgcttacaataagcagtggcatgaatttcttactcttctctgtatgtgattcgggtaatgggccttccttggccaacctacacgtttaa

SEQ ID NO: 171977 - DNA, 330 bp, Homo sapiens
actgagggagtgttctgggtacagcctggtgggcctgtcggtattgacactgcatgtagagtcctctcaggtcagcagggcttcccgcagggactctgaacccagaagccccaaaagctagatcctgtgctcagaggtaaatggctttgctggagttctgaattaggagagactaaacaatcatcagattccaagcagagagcatctctctaagcctaatgaatctcctgccaggcagtgggatgctgagcaaaaaatgacctggagagaggggctgaatgtgagggaagaaccccgcatctgcttgtaatcctggttctacctcggact

SEQ ID NO: 171978 - DNA, 782 bp, Homo sapiens
cagctggtacggcccgcgtttgatatgtgaccaggcctcgcgcacgcgtgcgccacgcgtcgcccacgcgtcgcggacgcgtgggctgaaaaaaggtatgattatctggaatttaccgacgctagaggtcggaaaacacgctatgacacaaaagttggcactgataaatggcccaagaaagtgaccttcaaggccggtcctcggttgcagttcctctttcactctgacagcagtcacaacgaatggggctacaaattcactgtcactgcctgtgggctgcccgatgttgccgtgtcttgggggctggatttacagctcctcgtctcccggctgatgggacgcctggcttcccagtgcatggcgctcaagtctgtgcgccagttaggaagtaacatggtagtacctcaggcaaaaatggcattagtcctaagctccccactgtggaaacctgtcttcaggcatcaggtttgtccagagttggaattagaagcaagctggcccactcacccacaccggaatagtaaggagggtgaagtctaactcctcaatgtgacagtcaaggctctctgcagtctcctttcaccttacctatctgactctagttcccatcactccccagctgagacttcaggccaggttaagaacattcctgacgacccctgccgccattttcttcttgattttgcccagtcagagcctgctcagaacttctgtgggccatattcagaacttttcaaaggattcatacaggcatgtagaaaacaggccccaaagacagatat

SEQ ID NO: 171979 - DNA, 663 bp, Homo sapiens
cagctggtacggcccgcgtttgatatgtgaccaggcctcgcgcacgcgtgcgccacgcgtcgcccacgcgtcgcggacgcgtgggctgaaaaaaggtatgattatctggaatttaccgacgctagaggtcggaaaacacgctatgacacaaaagttggcactgataaatggcccaagaaagtgaccttcaaggccggtcctcggttgcagttcctctttcactctgacagcagtcacaacgaatggggctacaaattcactgtcactgcctgtgggctgcccgatgttgccgtgtcttgggggctggatttacagctcctcgtctcccggctgatgggacgcctggcttcccagtgcatggcgctcaagtctgtgcgccgtaagtgcacatccctgtgctttcccttcttacaaccacggtgaagtgcaagatgcgcgcttgccctcttgtaggtcgtttccacgtaatggcagggggttaataatacgccttttcagtttcctttaaaccgaaagaataaagtgtccactcaataccattgtcacgaagctttttgccttagactttggaacatagcaggaaggctgccatgggttctctgtctatggaggataacagcttttttttttggcaacattgtcatttttttgcaagtaggtgta

SEQ ID NO: 171980 - DNA, 168 bp, Homo sapiens
tctgctcactacaacctacacctcccaggttcaagcaattctcctgcctcagcctcctgagtagctgagtagtataacttctcatcatttgaaactactggcaattgagcttatctcagtttgtttcctgagtttgcacttgaagagaattatttgtgtgtatttttt

SEQ ID NO: 171981 - DNA, 338 bp, Homo sapiens
atatgtctttgtatatccccaacacctatatgatacctagcacaaaaatgttaaatatatgtttaataattaaattacattctctagtcagtgcctagagaacacatatactacgtcatttagtaaacagtgagttacctgcagaggtatcagacctccagggaggaaagttaacattgttttaaaaaccgcaaagtcgccgtgcgcggtggctcacgcctgtagtcccagcactttgggaggccaaggcgggtggatcacgaggtcaggagatcgagaccacggtgaaaccccgtctctactaaaaaaaaaaaaatacaaaaaattagccgggcatg

SEQ ID NO: 171982 - DNA, 481 bp, Homo sapiens
gatccttaacttcatcacatatgcaaagtcccttttgcaatgtaaggtaatgtttcacaggttctaggaactagggaatgcacgtcttaggcgggggacattattctgcctgctaccccagattcaaactagagaacctggtctgaaacaggtggcttaggaaactaccctgcggccacaatgaaagatgaatgtaatgagtgatggaggctaccttaccttctaatctcaatgagattttgtttcataagccccagcttttcattcatagtgatcagagcaattttagatcatatatttaggggttgtttcttgtctatcttattcactgaactgtaagctccatgagggcagagactatgcctatcttattcatcactatctccctcatgcctggctgtggcaaacactagaggtagcctcccaccagctatttctacctcctctttttttttttttgaaatggagtctcactctgttg

SEQ ID NO: 171983 - DNA, 278 bp, Homo sapiens
agggtatagtaagatcagaacggccaccatgaggctttcctccacctggctagtgcattttataggcttcccaatttgtaagagaaccaagaccacagagaaataaagtcattaattctaatgctaaaatcagttttatgggtgagaaattcccagcaaaccactgggctagggctggggaaggaaataaagcctttacctagtcttctgactagttactgggcagagcagaggctccataaggaccctcactagacgtcagtaggttacagagtgtg

SEQ ID NO: 171984 - DNA, 286 bp, Homo sapiens
ttcaatatcaattcaagctactaaaggattgtgataacaaactgacctgtaaatatgaatgaaatgccaatttcagacccaaaatgattaaacatgaagtgtaaaatagtgggtaagaggacatgagaggagaaaaaaggaaactggtaggagctacatataaaagacaactttgtaacactttttcaaaattgtttgtgttttatattactaccagggttacatcattactttctttggccctaagatttttgttcttgtaaactcttttttccgtaaaaataaa

SEQ ID NO: 171985 - DNA, 285 bp, Homo sapiens
ctggactttggggctatgtccacacccttgagcaaggtggagagttaagccaattatttaaaatttgtttttgagaccgagtctcgttctgccacccaggctggagtgcagaggcgtaatctcaactcactgcaacctcacctcccgggttcaagcaattctcctgcctcagcctcctgagtagctgggattacaagcgcgcagcaccacagctggataatttttgtatttttagtagagacagggtttcaccatgttggtcaggctggtcttgaacgcctgacc

SEQ ID NO: 171986 - DNA, 498 bp, Homo sapiens
agtatgtagtatgttgctttggttagtaggtaaaatatctgcagcaagcatagtttttctttttttaactagaggggtgtgtatgctcccagtgactcacatattcatgcagtaagtaatatagctttagatccaaaatatttatcttcattttacttagtaaatggtgagtaggtatttgaagactaaagaaataagtgagttttagtccttaaaactgggtttgtaatttatgccatttagagaatggcatcttacaagcatgtgaagtactaaagttatttctactttcatttatgttgtatcttggggaagggaagggcgtttctctggagagacttattggcttattctcatgttcccttcatggactctgtgccattcttctttatattgcaatataggtatacaatcctgaaaactgatattaccagggcaagtaacacaggatcccgttgtcagaatttgctgcctgaaacggtgaaaccaagggccatt

SEQ ID NO: 171987 - DNA, 304 bp, Homo sapiens
aaataaaacagtctatagcacaatttaaaagatagcatttatcctttgtgtcaatttagaagatataattacacgaagcaatgctgtctggtctgtaagcatttctacatacccaagattgcgtgaatgttaaaggtgttagggtttgtttatggggcaccagaggaggtaacaggagtgaggctggagcattaaagagaaaaataagaaagaaagcaaaatcgggatatggacaaatgatagagaaacaggaacggaaaatatgacggaattctatgcaccaaagtccacgccctataaaagg

SEQ ID NO: 171988 - DNA, 420 bp, Homo sapiens
aggaagaattgggcaatagattcgtcttgttttatctctttttctaaatcctatccaaagctccaaaaagatatatgaagctagtgtcatttgaaaaaaaaaaaaaaatgaaaaagctcacccctctaaaaaaaatggcaattatttttgaagtgcattagagttgtggcactaaagactgaaaacacctgaggttgcatgccagcctgtgacaggaagctgtcatctcaatgacttctgacaaaagaattaaactagacttggtgatggctgggcgagagacaacaaaaaattgagctagtgccatttcatactgcagaccaattttgaagatttaaaatgtaaatgcagtctaataaaaatgttaatgcacacaccctttgacccagcaaatccatttctaggatttggatatccaaa

SEQ ID NO: 171989 - DNA, 166 bp, Homo sapiens
catagagagagagacagagaaaaacagagagaatcagacagagagacatacagagagagagagaatcagatagagacagagagagacagaaaaagacaatcagatagagatagagagacacagagagagacagggagaataagatacagagagagagagagacagc

SEQ ID NO: 171990 - DNA, 473 bp, Homo sapiens
caggtggagctgacccagagctcgacccgccccaccaggagggagttccccagagctcagagtgttccagcagggcctggaaattctcttctgtttctaagattctgccatttgattctaaaattctaaggactctttattcttttttgtttgctttaattaacttttgaccatgtaatacatcgacatgattcaaaatacaaaaagcacaaaaaagtatacaaagaaagtctcctcactatctttccagacagattttaagcacatgcacatgtacatatgcatttcctttttcttttttctttaaacacaaacagtcgcctactccaccctctgttccgcaccttaacagaattcttggagctccttcttcgctgcattaaagcatccctgttggtatccatcccttgctcctgctccctggtctggatattccctgattccctaggcgtctagccagttccctgttgata

SEQ ID NO: 171991 - DNA, 528 bp, Homo sapiens
tattctgctttttcactttcagttttcaataaattatgtgagacattcaacacattataaaataggcattctattagatggttttgcccaactgtaggctaatttaagtgttctgagcatgtgtaaggtaggctatgatgttcagtaagttaggtatattaaatgcattttcaacttgtgatattttctatttacaatgagtttatcaggaggtaaaaccaccataagccaaggaacatatatattacctaatgtatcatcttctgaacatctcaagctactatgacaaggattcattttcagaagtttaatccttctaatccacaaaattaaagtgtgtacagttatcagaaaaataacacttcatatctttagtaagagtacaaatttgttgaatatttttaagggcgaatttcccaatatctactgaaagtttatgtgcaaatatcctttagcccagcaatatcacttccaggaaataacctgtagatattctcacagaagcaagcaaaaatacatgcagaaaca

SEQ ID NO: 171992 - DNA, 308 bp, Homo sapiens
actctcagatcagaaaatgtgggtgatacctagaaaatataaaacaaccgagatccaactaagaaaaagtaagcaaaggaaactgcagcaaagatagtggtttaggtcttcccaaaggagataaagagaggatccaagcttaaaatgcaaagagcaggggttaggggtgggatatcatcaattttatcatgtaaaatttgcattccaaatgacttagccaactaggcctctcctcctcttcttgcttaaagagttgacagcaaggctgtcagcttcaggattaagcccaggtactggtctaaagtatt

SEQ ID NO: 171993 - DNA, 806 bp, Homo sapiens
atgagggtctccctggttgccagaatggtctcaaactcctggactcaagcaatcctcccgcctcagcctcccagattgctgggattacagtgttttaagatttgaatgtgacgtctccaaattccagacacagcccctcatttgcccagtttgctactacaggccggcgataggcacagtgcggggaacctgcccagaagcccaggggcagatcagggaacgggggtgtaagcaggcaggaaaagccaaggcaaggggggggcgcgagaaaacctaggcagaagcatttcttgcacagctttggacgcaccacacacacaagagacaccactcgggcggccagtcacctggttctaggtggagaataggaaagcgatgatagaaataggctctctgagtgctctgcatctctgcaacagagaggttaaagcaaaacccaggcaaaggaaaaggagaaaccaacagaaagaattaaaaagaaccactcaaagcaaccagcctaccaaggagtagaggcgggaatgcaacatggcgcggggctgggaccctgggcttcgaggctcggggctgcccttgactttcccacacacggaaagcgctccgcccaggaggacccggccacggtgtgtgcgcaaggcagtggcctcctgtttcggtccgaggagccctctctcatgggagctacagagggcagagaccacctggcctatgtcagggggcacatgtgtaccccttgtttggcagctcggcccactgtggaggtgggaagatgaccagccgcaaccaagtggaggcagggggcgaag

SEQ ID NO: 171994 - DNA, 360 bp, Homo sapiens
tcataccaatagatgcagaaaatgcatttgacaaaatccaatacctattgatgataaacagcctcagtacactagaagtagagggaaacttcctcaacttgataaagaatatcttttaaaaaaaaaaaactcctatggctagtaccatacttaatgctgaaaaactcaaagctttccaagaatgatcaggggaataaagtaaggatgcccctttcaccactgcttctcaatattatcctacaagtcctagttaacgcaataaaatgaaaaaaataaaaagtatatatattgggaggaaagaaacaaaactgcttttgttcacagatgacatgattgtgtaaacagataatctgaaaggac

SEQ ID NO: 171995 - DNA, 393 bp, Homo sapiens
cttccagtttaatctctctccaatgtgaaaggcaaacaattctatactattgttgtttcatttttgcttcatcttaaaatttctgggaaaatataagcagaaataagcatgtttttgcaagacaatcaactggataggtagccaggaaatatcaagtcttaaatttaagaacaagccttaactcaattagagctccaattaaaaagtggaatattcaggaagcattcagccttccccaaaagaggttaagaggggaatggagagatcagaaagcaatggatctccactgggatgtccttagaaggataggtttcaggagaaaaatagacattttactaatcacctcataacctcctaaggcaggtgtctaatgtatgaactaccaggatggtc

SEQ ID NO: 171996 - DNA, 601 bp, Homo sapiens
gcgtcagggattcagagggccaaggcaagcacctgtgcagaacactagcaagctggtatagctgggagcatctgcgtgcacatgaaggagggtgtaccactgggaaaggggacgtgtgcacaagagaaggtatgtgtgcatgaatgggtgtgaactgggtgtgtcacatgtgagggttacatgtatgaaccagggcatacaccctcatgagtaggggaggaagggtgacacacacaggttgtgaacgtgcatgtgtgggaatgaatccaagtgctaaatctgtgtgtgcatgcacagttaagtgtgagctgtgaacctgcgttgacacaagtgtatgaaagtgtgagagaaaatgccagtgggtgtgtgcatgagtgtgctgtgctgcttatggaggctcagggaaggagccatctgctatggcaggcaggacctgagatgtctgctcctaatttcatctttctgagcagactcagaagaaacaccaaaacttgggacgggagaaagaagcctcatcttgaaccccagatgattctttggaaggggtcgggagcctgccttttcttgtccccgaagtcagccgaggtgccagtgtcctaca

SEQ ID NO: 171997 - DNA, 465 bp, Homo sapiens
taattcacactctttccctaagtgattacatggttaagtgttcttagtaaaaaacaacaaaaactgctcctacctgatataagcaaaaaaggggtttattataagaatagtaggtagttgagctatagactgagacacagaggttttggagtgaaaaatcacatctagaatcactacccagaactaatcagatgacacccctgctgacactgatgcaagggctggatgcagtagcctacaccactgatatcactggcttggaaactatcacgctagcctcactgccttcattaccccagaaattcaggcccctgtcgctacttccagagaagggttctcatcattccagatgttctgcatcactagtgtctaattcaaaatatggagcagttgcatctgattggcacagcttaagtcatgtgcccacgtctgagcttcaaggaaggccagcaaagagtatagtaa

SEQ ID NO: 171998 - DNA, 189 bp, Homo sapiens
acaaataaattcacgtcttccaccatttgttttcaaatagggtaaaaccaagattaaagttccctgctcaactgctatgtcataggtttcagtgtttcccttccttcttaatttgcttaaagaaaattccaagaggttattaaagaccttgatgccatattaagaatatttcctgggaaaaatgtatgt

SEQ ID NO: 171999 - DNA, 505 bp, Homo sapiens
atattaatatagccatacctgctttcttttgctgattttttgtttgtttagccaaatatgtgtgtgattttagtctgatgtagcatgtccatctcttcattgttaataacttgaataatttttccttctacattttaaacaacatgtatgtcctaaaactttcatttcaatgccattttcaaacagacactgtaacagtggattggtaaaacatcagtccagacaatgatttgatttttgcagtttacctccttttaagccaataacaatcctgcattttgagttgtgacctcaataaactaggctctcactggttgttcccacagctcttcagggtatctccaggtcaccagcgtgttaatggaccctgatggtattaaaaagaagagacattcaacaaccaggctccttttccctctcatgtttaccgcattgtagctttatgttttgatttaaaagttttttccttactggggggagaaagtatcatttttcatattcaaag

SEQ ID NO: 172000 - DNA, 172 bp, Homo sapiens
tggatccaagagatcctcccaccttggctttccaatgtgctgggattacaggcatgagccactgtgtccagcctgagtactggcattgttaactgagggtgagacactagggctgaaagtcaagggccacaccggtgtttgagatgagtcaggctgggagggttccacggca

SEQ ID NO: 172001 - DNA, 373 bp, Homo sapiens
ggagaatcacttgaacctgggaggcggaggttgcaatgaaccaagattgcaccactgcactccaccctgggcaagagagtgagactccatctaaaaaagaaaacaaaaaaagaaaacaccattaaacaccagtccagggtggctctgacatcccggggtcttgttctagcattgaacctggcagtgcttgggatcatttcagcttgttaacgtgcatggtttagctctcagagtgttttgttttgtcttgttttcattcaggtgcttcatttgaaaattaatagccccatttaaaaacagcagtatttcctatgaaaatccagatttctagccagtcttaaaaaatctgaaggtccattaagtctgtgcctga

SEQ ID NO: 172002 - DNA, 473 bp, Homo sapiens
gtgatttattgaggtaaatgtttcgaacccaaatgaccactcctttcttctctcttcaaatcctcaccactcccagcccaatcttattcctcaataattatttatcgtctggaagagtcaggtgtttcaaatgaggccagcatggacttttcccaacagggaggtattttttaatatctaaatgtcggcctatggcccttgctgttaaggctccagatcaaataggggcaaaaggaattgaaagccaaatcacaaaaataagtaaaaactccaactaacaagaatttcacaacagacataagctgatgactattttattaaagcaatgtggagtactactaaatgctactatgttctggaaatgtaggaaattggttgaagtcgtttttctcttgttagtctcatgttaagctgttcatactaggatctcttgggttattttttcccaattaatacagttgtctactaattta

SEQ ID NO: 172003 - DNA, 453 bp, Homo sapiens
cctttcccttcttagggaaatcatatatataaaatcatatatataagagactaaagcagcatttaaatgtggcatgttattaaaatataaacatacaatatatgaaataatagtattaagtatagttttaaaaagtatcctggttagtcttacaagtcaagtattagcagcttcattaaaggagcattctacagcttgctgtctgtcacgaatagttttcctatttgttgttacatgcttaaatttgataataagaatataataattgaggctggaaatagcagtaaccttccctaagggatcacatgttttattagctgtgggtaaaaaggattcatttgtggaccgtatctgtttcatcacaaagtcctcacttagggtcatgcttttaaaactaaaatcagattttagttttaggaacattagactacctccaccagatcctgcacagta

SEQ ID NO: 172004 - DNA, 203 bp, Homo sapiens
cctaggtgatccatatccgatggctgttagatgttggagcataaaagtgaggatatctttgttcagttcaggaccctctgaaaagttattcctgctccagagctcccctggggtcaaggaaggctatctcaagcctgaagtgcagtacaacttctccttctgcctaaacctgcctcctttctctctcttttataaatgttaac

SEQ ID NO: 172005 - DNA, 677 bp, Homo sapiens
caggcttgcaatttggtgtcagcagagacatcctcagcctagatttggtgggacttggtgcaggtgaatacagggattgatgtggctgtgaatgggggtggggtggtggctgagccagattgcaggagaacagggaggaatgggaaaggaaaagagggaaacccccaccccagggaaacccccaccccaattcagggcatctgtcagaggcaaggtggcaggagagaggaaagtcaggaagtatgatgagtataaacccactcaagaactgcaggggcctttgctgccttctgcccaattggccttttgtcccatgccatgttagcaagttcttgtcttttatggattaatttggtcatttaaccaatatttattaagtcactcctctatgctaggtgttggatatgcagctgttagcaaatcagatagaggttcagttctcacagagttgtgtccttgatgggggtaggggacaggcaaatgagcaattaaccagacatatggactggcccatcctggggcctctcaggacctggtggttggctgccccttttttctggtacttagatgtatgctatgtcctcacttggaagatatttctattcctcctgactgggtccttcacaatctgtattaaaactcacattgataaataaaaaaatttttttcagattaaa

SEQ ID NO: 172006 - DNA, 753 bp, Homo sapiens
gtttaatactgagaatcagagtccagccagagaccatgaaggcagaagggggcccatggggccatcttcccttgtcccctttacattatttatggacaggtcaaactgagaccctgagagggcaagccacttggccaaggtcacagagcagcttgctggcaaaaaagccgtatcaccccccacttcttgctgcaggggagttgcaccccatgcgcagctctaaaagctggtgcagcatttccaaagtgtgttctgaaggacactttggagaggaacagtgggcttggtggctttagaggcctgtgtccacagctcacaccaggcaatattctgggcttgaattgcagctctgcacttcggccagtgacttgtgcctcacccctactactccctttttttaagataggctggtgatagtatgcagcctcagagggttgtcatgagccacttagagaacacagcctatgcaaagtaaatgcttattaagtgtaggcattggcccagaactgttctaccacggggtgtggggatgtggagacaatcaggaagactggtgggcatacactgagcggctgcagaagccaggagcctcagagatgagaccaacgtgtgtgcagcactctccacaagctggccccagtcacttatgcatcacatcggtacagcaacccttatgaggctggccttgcggggaatccctgtactacgggcatagctgaacctacccgccgacacttccttccaaggcaggcc

SEQ ID NO: 172007 - DNA, 426 bp, Homo sapiens
gaagctaaaatataaaacttttagaagaaaactaactcttttgacctgagttaagcagtaaatctttgtgactttgagttaggcagtaatttctttgatgcaacatcaagagcacaaataataaaagagaaaaaagttgataagttgaacttaatcaaaataaaaaacttctgtgcttcaaaggacaccaacaagtgaaagaacagccccacagaatcagagagcatatttgcaaattatactatctgttaagggactagaatataaaaaacacaaatcaataagaaatgacaaatgatctaagttgggaatgggcaaaggattacaagatatttttcaagagaaaaatatgcaaataagcacatgaaaagtcactaggaaaatataaatcaaaagcacaatgagatatcaattttcacccactag

SEQ ID NO: 172008 - DNA, 661 bp, Homo sapiens
tcatagctgttctagaggtatcccggtcatgcgacaaagatgcccacctcatcctaattccccaaacctatatgttttctttcatggcaaaagggaatttgcaggtatgattaggtcctgatacagggagattatcttggattatctgagtgggaccaatataatcatgagggtctttataagagggaggcaagagaattagagtcagagtgtattactcagagctttccagagaaacaaagccaatgtaaagtgtgcacatacacacacacacacacacacacacacacacacacacacaaagagaattgttataaggaattggcttacatggttataaaggctaaggagtcctaagatctgcagttagttattcggagacccaggaaagccaatggtgttgtttcagtccaagtctgaaagcctgagaaccaagacagtctgttgtgtaagtttcagaccagaagccacaggctagagactcaagaagagctaatgtttttgaaggaaaacaaaacaaaacaaaatgaaacaaagcaaaacaaaacaccaatgttccagctcaaagtggttaggcaggaaaagtttcctcaaacttgagggagggtcagcatttttttctattcagctttcaactgatcgagtgaggttcacccacatt

SEQ ID NO: 172009 - DNA, 525 bp, Homo sapiens
cagcattgtggctgtccccacagatttcaatgtggagttaagctgccgagacccccacctgccctcctgtgtgcctcaggcccctcctggtcccaggtcacccacaccgtctggcttccagcgagcgcttctcggagaaacagccggctccccacagccagtcttggtcagtcctgagctcgggtattccacagtaaagtgagcgacatcacctgtctgaaaagcataaggagactcccacgtggcggtgctgaggggccacatcctgggcaccaggccagccagtgccccgacatgagtgttgctggctgggaagcagctggcatttggattgaagtcctgcaaaaactgccatggccagagcctgccaggcagagcctgcacagagtggcccaagagctgggcacgtgctgggcctgggtggatgtggaggctgtgccatggggtgcgggggaccctgctcacagctcaccttgtggtcacccagcactgaccccgttcacagctcgccttgtggtcacccag

SEQ ID NO: 172010 - DNA, 1052 bp, Homo sapiens
  misc_feature (598)..(598): n is a, c, g, or t
  misc_feature (771)..(771): n is a, c, g, or t
  misc_feature (1009)..(1009): n is a, c, g, or t
gaaggcctggcacgctccagccaaccagggcgtcacctgcagctcgtccccctgcccgggcttgcctcgagcgccctgccgccgccggagcggggagggtgttgggggcaggtggagccgggagggcccagctgagaattcagggttgggggctcagagggcactgcggctaggagcccgtcaaagcctgtcgcccaccggggcgagggcaggtgggagcgcctggccgtgcgtcgcgcgctggttggccagctgacgccccagtgcgcatgcgcgtccgaacagccctgcgggcggagcgactgtcctcccttctggtgtactgggtgggaggtggaactagtcggacaaagccctcgcgtcggacccttgccagaactcaattaatggatgcctcgaagttgacgtacatatatattcagaaatgttttgccacctgagacctatgaggaggttatgtctagagaagatatttccacactggtttcccttttcaagagctttatcgggagctgaagcagtcaatgccttgaggcctttctattttgcagtacatccagatttctttggacagcaccccgtagaaagggaaatcaantgaaaattctcttaaaaggttaagtgtctacctagaaaacctccagaaaccaggcttcaagtctttgaaaccaactcagcttacattttatgtaagagaaacagaccagagttcctccgatggccaggaaccttttagtacttccggacttcaaatggaaggaggaagagctngatctgaagaatgctgaagtatgttgaagacaactcctcacccagtctctccaggactagtatctgatagtatatgatctcttaccttttattttctcataattgactattgggagatcaggagtcacaaattcctttttcttggcagtttctccatctacctctgacttagagtttattaaaaatagcctattcttcaatatttcaagatagaaagtcaattcatagccctttgtgnaggaacaggtatacctgaagaatgctgtactaatgaatcatag

SEQ ID NO: 172011 - DNA, 1124 bp, Homo sapiens
  misc_feature (598)..(598): n is a, c, g, or t
gaaggcctggcacgctccagccaaccagggcgtcacctgcagctcgtccccctgcccgggcttgcctcgagcgccctgccgccgccggagcggggagggtgttgggggcaggtggagccgggagggcccagctgagaattcagggttgggggctcagagggcactgcggctaggagcccgtcaaagcctgtcgcccaccggggcgagggcaggtgggagcgcctggccgtgcgtcgcgcgctggttggccagctgacgccccagtgcgcatgcgcgtccgaacagccctgcgggcggagcgactgtcctcccttctggtgtactgggtgggaggtggaactagtcggacaaagccctcgcgtcggacccttgccagaactcaattaatggatgcctcgaagttgacgtacatatatattcagaaatgttttgccacctgagacctatgaggaggttatgtctagagaagatatttccacactggtttcccttttcaagagctttatcgggagctgaagcagtcaatgccttgaggcctttctattttgcagtacatccagatttctttggacagcaccccgtagaaagggaaatcaantgaaaattctcttaaaaggttaagtgtctacctagaaaacctccagaaaccaggcttcaagtctttgaaaccaactcagcttacattttatgtaagagaaacagaccagagttcctccgatggccaggaaccttttagtacttccgttatctgtgaaacatatcaaagttgaatactaatatgcataccagctctcaaagaagctaaaaggaggctgacaggcccatcaatggacaagtcttattactccttacctttatttacaggaccctgcatgaagaccttgcaccaagtctcgagagtggacaccatcttcaaggcttacgggagaattgagtaaattctctgggcacacctggaaaaaattctcgcttgcttcaagttatgtggaacgaacataaatctgttaccccgggaaattgtgacgtctcgtttttctcacaaagtggcattcgcaacagatcacggcgtgactgcaacagagtgtcaccacacgaaatagtaaacgtgcgagtgaaatggggcg

SEQ ID NO: 172012 - DNA, 980 bp, Homo sapiens
gaaggcctggcacgctccagccaaccagggcgtcacctgcagctcgtccccctgcccgggcttgcctcgagcgccctgccgccgccggagcggggagggtgttgggggcaggtggagccgggagggcccagctgagaattcagggttgggggctcagagggcactgcggctaggagcccgtcaaagcctgtcgcccaccggggcgagggcaggtgggagcgcctggccgtgcgtcgcgcgctggttggccagctgacgccccagtgcgcatgcgcgtccgaacagccctgcgggcggagcgactgtcctcccttctggtgtactgggtgggaggtggaactagtcggacaaagccctcgcgtcggacccttgccagaactcaattaatggatgcctcgaagttgacgtacatatatattcagaaatgttttgccacctgagacctatgaggaggttatgtctagagaagatatttccacactggtttcccttttcaagagctttatcgggagctgaagcagtcaatgccttgaggcctttctattttgcagtacatccagatttctttggacagcaccccgtagaaagggatgatacatggaagagttttcaatgccctagtgatttttccttatgatgcatgctgctggaccactcccctacaacatcagttaatgtgtgctccaggaatacaaactgatatgaaaaatgacttatggtagatgtagttaagacagtcaatatattttaacattagaaaatacagtcagtccttcatatccatgggttttacatccatggattcaaccaacctcagactgaaaatattaggggaaaaaaatacatctgtactacacatgaacaaacttctctttctgtgtcattattccctgaacaacacaggataacaactacttacatagcacttacattatattagatattataagtaatctagaaatgacttacaagtatatggg

SEQ ID NO: 172013 - DNA, 1193 bp, Homo sapiens
gaaggcctggcacgctccagccaaccagggcgtcacctgcagctcgtccccctgcccgggcttgcctcgagcgccctgccgccgccggagcggggagggtgttgggggcaggtggagccgggagggcccagctgagaattcagggttgggggctcagagggcactgcggctaggagcccgtcaaagcctgtcgcccaccggggcgagggcaggtgggagcgcctggccgtgcgtcgcgcgctggttggccagctgacgccccagtgcgcatgcgcgtccgaacagccctgcgggcggagcgactgtcctcccttctggtgtactgggtgggaggtggaactagtcggacaaagccctcgcgtcggacccttgccagaactgaaaggcaccatttccttagagaagaccttcctgagctctccccgccccattccaagtgttgcgtctgggagtttctcatattctgtgcatgtttgtattattgcatttactgcgttgttttatacttatctgcttgtgtctgtttttacactcccccctccctctaaaagtcttttgagtattagaattgtcttaataattttctagtcccaatgctttacgcaggacctggcccataagtggtgatgaatgggtgagttaaagactcggtatgcctcccaagtgtgataagacagtgcaacctcttcagttattttatagcattttccaagtggaagtatagtgggctaagtgcagtatggacaggaaccacctatgtaagaatttatctgaagacgagaagcctgcggttgatgtggatgtcccagacttttggagctagtgtctgaatgagagcacccaactctactctgaagcaatgtgtcttcagtcagctgatagtaatttgattttctgtgtagctagtcctgaaagaggaagaacattagatctgaatcttctagttgtcttagcagttataatctcaaagtaaatttacagattgacattccagttatcaggccttctaatttagcttccccaaggcccacgtatttctgtcttgaagtgataaaattgggttctgttcttacaaggttgaagactaacccaagatctgggcgttgtgaagcggcaggcagccatgcctgccaacctgctggacattgtctctacttagaattttggtttttttaatctgaaaagtacataaa

SEQ ID NO: 172014 - DNA, 543 bp, Homo sapiens
ggaatacaataaacaaaaaatatgaccgtgaaacctcttctggtcatatggtcatgtgtgtagagtggtactctgcagaacatacttcagaaaccactgacaaaaaagaataccaaatgcgaatacaaggaaaatctcagtttcatgaactaagtacagcgcatagaagtagttttgttaaaaagaaacattttagagcttgatcttagagcatgaaaagtctcaaatgaggattccactcattcactcagaaaagatcctgcaggatatggtaagaaggaaaggaggaaaggaaagaagggaaaacatttaatgaacatatgctatgtgcaaatcatgacaggaaaaaggacagaacatacatgagaagcagcaagcaggtcatcctggccaaagcataatatagtgaaagacaagactagatctaatatctgactagatagaaaaggatttaaatacacagtttagatgctatgacagtcactaaatttgttttttttagtagaaagacaacatgagacttgtcatatcataaaagcaacc

SEQ ID NO: 172015 - DNA, 259 bp, Homo sapiens
tccaattccttcctcgcgcccccgaaagagcggcgcaccagcagccgaactgccggcgcccaggctccctggtccggccgggatgcggccggtacccgctccccgccgggaacaacctctccactcttcctgcagggagctggtgccagccgacagccgcgccagggccgctccgggtaccagggtcggatcgggtgacgtcgcgaacttgcgcctggccgccaagccggcctccaggctgaagaaggacccgccccgg

SEQ ID NO: 172016 - DNA, 249 bp, Homo sapiens
ctggaagagttaggggtgctgagcaaggagcaattcagaaggtggcggggagttcccaggactgcacataaaaattaattacagaaaagaaatacatcattaacgtcagatctcacaataggtcccagtgtgactattatgtgaaattaattactccctactttatttttttaatcaccttctccgtactctgaaaatagtcctaattactgacattagttgtttaagtcattaagggtgatcatgtta

SEQ ID NO: 172017 - DNA, 187 bp, Homo sapiens
acctagatcctccataagagcagaatttactgataaattgttttgattttaggatactgactgcagacctgggactagggtaatgtaagtgaggctcacagggtgcaacatttccagaagcacccactcgcaggtgctgaccctgcaggtgtcacaaatctgagaatccatgcctctgtaaaatttt

SEQ ID NO: 172018 - DNA, 224 bp, Homo sapiens
gaaacagattgggagcaaaccacagtagtataatggggtattgtgtaatgtccttccctgttcacgtgaggcctggaagtagtttaaagtagtcaagtagagcttctcaaatgaagaatttcattcagtctctgctaaactacaaaatttatgactcaaattggaaacacggtgaaaattttgagtcacagttaaatgtttaagtagtttaagataaatctgtt

SEQ ID NO: 172019 - DNA, 1935 bp, Homo sapiens
  misc_feature (1384)..(1384): n is a, c, g, or t
gttacatgccaagcactaatcaggatgctaaggataccgcagtgaaacagtctccgccccgtggggcttacattcaggcggggaatactgtcaataaacagcggtaatggagaaactacagcagggcgaagggaatggacccgagacgttggtagctacttgattttcaagtccgagagggcctcactgataagaacactggagtattacttgtagtctgaacttgtgcatttcttttgtgtattccatttgggcataaaagaaggaagattagtaaaggcagtttatgggtgtaaaattagagcagcagcacttattgaaaacataaacaatgaagttatggctgatattgaccacttatacctcaagcaccgtactaaggctttacatcgattattagttatgttaatttcccaccaactctaaggggtaatcctattattattttattgataaaaagactgagacttaaatttgctcagtgctacattaccaaagtgaccggactggaatatgaacccagcccccatcgtgtgctcttaacaccgcaatgcacagcacagtaaccaggaagccttagctgtgtttggtaggcactcatcatttaagatgctgtatgcggccgggcgcggcggctcacgcctgtaatcccagcactttgggaggccgaggcaggtggatcacgaggtcaggagatcgagaccaccgtgaaaccccgtctgtactaaaaatacaaaaaaaattagccaggcgcggtggcgggcgcctgtagtcccagctgactacaggctgaggcaggagaatggcgtgaacccgggaggcggagcttgcgatgagccgagatcgcgccactgcactccagcctgggcgacagagcaagactctgtcttacagaaaaaaaaaaaatgctgtatgctgggactgtgctactagatcttgtttattccttccaaaagccaagtgaggaaggtactgatattgacctcattttacagatgagaaaacagaggttttgtatcttgcacaatcagtaagtggtagagctaaatattaaagctcatgatttattcactatcatacactatttcgtggttactcattacgtctctaagttttgtcagccaacgtgtgaatgaaaatacaactactcacaaaggaaggccaaatgagcaagtgaatcagcacaaacttattttcttagttaaaagactcaaggaccatatgatttcccgagtaatcaaaggacctactcttaagttttgtcagcagtgtggctttaaggtttttttggtttttttgttgtttgcattatagtaggttaaactggctttatcaaagatatagtatttcaggctcacagttacagaaataatactaattattnatttgatgcttaatgtgtatgaggcactgtggtgatttttcatattccagtactccagcctgggtgacagtgcgagactctgtttcaaaaaaaaaaaagcaaaaaaacccccaaaatttatatttcaacctaagatgtatttttatatctctacacatacatacgaaagaaaagtttcacaaaacaatgcctaactttgcagcatatgagtcatgctttttctattgtttttactttttaaaaaatgctaatcaagatctactcatggggctgggcctggtggttcacacgtgtaatcctagcactttgggaggccgaggcagagagatcagctgaggtcaggagttcaagaccagcctggccaacatggtgaaaccctgtctctagtaaaaatacaaaaaactagctgggcgtggtggtgggagcctgtaatcccagctactcgggaggctgaggcaggagaatcgcttgaacccaggaggcaaaggtttcagtgagccaagatggcgccactacactccagcctagacaacagagcaagactccgtctc

SEQ ID NO: 172020 - DNA, 453 bp, Homo sapiens
aggctctgcactttaaagcagtgtcatcattctgtgcagtgcggagctctgaggaggtctggtaggcacagcaagtggtaggaaacctgttaacagctccaagaaaaacaggtatgtaccattcctgcggttgctgacctctttgtggggtaggacttgactgataattcgggaggcatgatgcatcctcactagaaggttttgggggtgggacagatgatttgggcatgggaaaattagtcataatcataattacaaactttaaaggaatgcttatcaggcaccaggtactgtgccaagagctttatgcgtgccttcagaagttcatgctttcttagcattttgcttctatctagagatgtgctgtcttcctgaagaacaaatccaaatgtgcaggaaagtcagcttgatgcttaaaatccatcatgttggaaataaatggtatacaaatca

SEQ ID NO: 172021 - DNA, 334 bp, Homo sapiens
cactttttacatatgagactaccatggtatgaagttcaattatgatgactgatttataaacatcatttcttgtttaacgtgggtaatttttaaaagtatgaactggtgagaatgtcaaatggtgcagccaatttggaaaagtgtgacaggtcctcaaacaactagacatagagttactgtaggagccagcagtttcactcctgggtatctgtcaagagaactgaaaacagatgtccacacaaaacttattcatgaatgcttacaacagccttattcataacagccagaaggtgcaagcaactaattgtccatcagctgatgaatggataaataa

SEQ ID NO: 172022 - DNA, 330 bp, Homo sapiens
aagaggcaggggagctatgttattcaagctcaagaaaagtatgaaagtaaaggcttctgttatgacactgggttttacctgctttcccattgttgtgttacaaaccaccccttactttttattcttttcacaatctctttccacgcagacactccatgtggttagcttggacttcctgacaacatggtggcctcaatgtatctggatttctcatatgaaagcccaggactcttcacgaaggccaagacggaagctgacagtcatgtcaagagctaggcctggcagagtgtctttttccactgaactcagtgcaagcagggtgaggtcagc

SEQ ID NO: 172023 - DNA, 515 bp, Homo sapiens
tgcacacattttgtaccttttgatatttttctaaagatcactgaggctattaattttttcatatttttttctcctgttctctagattttgtaatttctatggatataacatcaagtttctgtgtccttcttctgacataagctgttggtttctttcaggtgcctttattagattgaagaagtccttttttccagcaccatttattgaagatactattctttcctcattcttgttcttgacacctttgtagaagattagttaaccttatatgagtgggtttatttctgtgatttcaattctgttccattgctctatgtgtgtttttatgccagtactctgttttgattgctatagctttataatagaatttgaacacaggaagtgtgatgcttctggctttgtccttactgtatggttctctttctgttttttaaaagtcagtgttggttgagctttttttaaaaaaatctgcaattcaatatttttcatcaatatttttttctctccctttttgg

SEQ ID NO: 172024 - DNA, 248 bp, Homo sapiens
tgtcccagtctgtgcttaaagcaggatgagaaagctttgccacaggaaatgagataatgcatgtacaaactcatttatcttctcaggaaaatacattactttaagttgtatctttatgctctacacattttaacagacacacagcagttacccttggtttttcttctttactgtcactgattcacaatcataattaaaaatgccaaacgcatctttatgtgaaacaaaataatttttttcttattttt

SEQ ID NO: 172025 - DNA, 173 bp, Homo sapiens
tggaaataatatactttactctctggctcactgtaaatgtgcacagactccaagcaaagctcctgtctttcgggcttgagttttagagacaaaggtttgccatgcttacaggctgaatgtttttccctactgaacaaactagccagcctttatttcaagccgaatcactttgt

SEQ ID NO: 172026 - DNA, 393 bp, Homo sapiens
agagatcagagacagagcgacagagcagggaatagagacaggagaaggcagagatgggagacacagagaagtggggatggacagacagagaccaggagtcgcagaaagacaggatggtgaaaggcagagcagagaagagacagaggagagtgaggaacacccagcagagagacagagacacagagaagaggaaacaaagagacttggagaaccagaggcagagatagtgcaagagcagagatcagaagagcagtggcgggttgggggccggagagacagggagacagagacacagagggagtgaactgggcagaggcacggagggggacaaagtcagcgaaccgcttctgctccaggtcccccggccaggctgaacgttttgggaggggctgg

SEQ ID NO: 172027 - DNA, 607 bp, Homo sapiens
aaacacaaagcataaaagatcacagagaaacctttacagtcactgccacataatgacatttcagataacaacagactgcacaaatgatggtggtgccttagattgtaacaccatatttttatggtatcttttctatgtttagatatacaaattcttgccattgtgttacaggtgcctacagggttcagttaaatgacatgctgtacaggtgtgtagcctggagtgacaggctattccatatgccctaggtgtgtagcagactaccacctaggtttgtgttaagcacatgccatcatgtttacaaaacaacaacattgcctaacaacacagctctcagaacgtaccccctcattaagtgatgcataactgtatttaaatggaaatcttattttgaagtgctttaattaaaataagatcttatgaggctatactttttaccactgaccttttaaccaagatcttatgagactacacttttttccactgaatatgtaaaagaaaactaagaaaaaaaccaaaatactctactttttaaaattttcccaagacattagaaaaaaacctaagtaccataatcttctgctttagtatactgttatttatttaa

SEQ ID NO: 172028 - DNA, 134 bp, Homo sapiens
gccactcctgggcgcgtcccggggggaagacgccaccgccctggagtctcaggggtcctcgccccatcccggtccaggccgtttgtgtatctttgtaaactggcaagcgcggtaacttccttccctgaattaaa

SEQ ID NO: 172029 - DNA, 266 bp, Homo sapiens
atgccccagcgcccacaggcacccagaggctgcgtgcaccctggtggtccctgtcgaagcggtcacggctcaccgccagacacccttggtccttacagctctggctctgccagccacagacatcttcaaacagagcccatgaaaagaaacactgcttcagctttgctcccaccgccatcctgggacccagggtccacaaggagaatattttcttaaagtaactccctgatttgcgggggtttacctgccgtaggggaaatttttta

SEQ ID NO: 172030 - DNA, 545 bp, Homo sapiens
ttggataaatagctagaagaagatgagtggatcttacattaaatcttgcaggaaactgttactctgttttctcaaatagctgtaccattttgtatttccactagcaatgttcaagagttctagttcttcagcaggggcacagtggctcatgcctgtaatcccagaactttgggaagccgaggccgtcggatcacttgaggtcaggagttcgagaccagcctgaacaatatagtgaaaccccgtctctattaaaaatacaaaaaaattagctgggcatggtggtggacggctgtaagctactcaggaggctgagacagcagaatcgcttgaatctgggaggcagagattacagtgagacgagatagtgccactgcattccagcctgggtgacagagtgagactccgtctcaaaaaaagaaaaaaaaattctagttctccaacattctcacctacactagatatcgtcagtatgttttttttttttaacctacacattctaataagtgtgtaggtgtatctaagtatggtttcaatttgaattttcc

SEQ ID NO: 172031 - DNA, 392 bp, Homo sapiens
ccaggaagcagagttatgaagcaggtaagggataggtgtgacctgctgtagggagtgataccgaaaatgacggagtgtttttgataagcatgtaggtggtctacagagctctcagttgccaccagggagaggaatgccaaggtggagaaaagcatctcagacactctaggatcgactgtaggcagctgagaggatggtagtccactgacttacacagagagaaggaaaatgtcaaatacattcctgcacttgctgtggaagcagggaggtgtaggaggcaggagtttggaaacaaatatattggtgagaactagcagagcagagttttggagaacacggacgtggttgcaagacctaaggaaaggtgtgtagtgtgagatgctacgaggaaa

SEQ ID NO: 172032 - DNA, 228 bp, Homo sapiens
acaggcgcccaccaccacacccagctaattttttgtatttttagtagaggtgaggttcaccaagttggccaggctggtcttgaactcctgacctcaggtgatccgcctgcctcggcctcccaaagtgctgggattataggtgtgagccaccgcacctggcccagtgtgctcatttaaatgaacatctcctgtctcgtaggcattgttctagtgttggggataacatca

SEQ ID NO: 172033 - DNA, 309 bp, Homo sapiens
atctctaaatcaagaaaggattcctgttctcattttctcccctacataaagccaagttcaggatgaaatctcacaatgatgtatgagaaagggtacactttctagacccagtgtacaacaacaaatacaaatttaattacatcacttaccggtttaaagtccctccagtagcttcccaaactctacacagtaaaacacaaattctgtcaatcaagcttttgaaagtttctttatgacctcctcatcgtttcttccccagtcataggtgtcagtactcaagacttcaatttgggtacttttagctcccca

SEQ ID NO: 172034 - DNA, 675 bp, Homo sapiens
cagatgagacctctcccccttgggcagggccatctgctttacttagtctgctgatttaaacattagcctcatgcagaaacacccccacagagacacccaggataatgtctggccaaatatctgggtatcccatggcctggtcatgttgacatataaaattaatgatcacatgaagtagttattgcagggggctgacacctaagggctccccacagcatccctgcaccagggaggggaagacagatgcttggagctgggtggtggtggtggtggtggaagtggcaaaccgtggtgacattctggctgtattttgcaagtaagcctacaggatttgctcgcatagcagatgtgggcgatgaatgaaagagagaaatcaaggaggatacccaggttttggtctgagccacaggaaagacggggctgccactgcctgagaggggaggactgcaaggaggcaggctgggtgaccaggagctcaccgtggacgtggggggtttgagagcctgttcagcatcccatcaggggtgtcaaagatgcggttggatataggagtctggagttctgggaacgactaggcaaggggtgtaaacacggacatcatctgcagatagggtagaatctaaagacagcatctgaatgagagcactgaggtagggaggagccttcccctggccg

SEQ ID NO: 172035 - DNA, 433 bp, Homo sapiens
tgtgttttaatcatttgtggtaatatcgtataatttatgacctcaacttttgttaaataccttcatggcaaaggcactatcagaagctgctgcaaaacctcacaccatcagcactggtgaaggagaaagccgttgctttctgctttcttctgtcttcctaatcttgcatgagtttatctcactggaagaacatagatcacatctggaattctagaggcaagagggtctaaaaattgtagtgctgaggcttccagcctctgtagcacaaaaaagagcatggggcacagaagaatacttataacaaaacaacaacaacaaatgatatccagcacacttggttttttaaacaattttttatttttattttttagagatgaagtttcatctcgtcacccaggctggagtgcaatggcgcaatctcaactcactgcaa

SEQ ID NO: 172036 - DNA, 201 bp, Homo sapiens
ggcatctgctaggccttgttgctttgctcatagcagacattaccaacctaagccttcctgctaagcctagacttagcagactacattattacacaaatcagtcagcattggcatctatttgtcatctattgttagtaattccctaagacagctgaactaagacctatagaatgagcagaaaagaaactgactcagagcggg

SEQ ID NO: 172037 - DNA, 489 bp, Homo sapiens
cagttctagactcctattctttagcattccgttacgtccagaccatgtgacaacctccattctacaaatatgtaaccacaaagaaggtgagtggggaggcaataagaacccagactaacagaacatcagaaaagctggcatacgcacacataaagaagggggagaatataggactatatgggagggaggaaggtcacagaaaatgattacggttttgatgttgtatttgtgaaggtgaggaatactaactatatttctttagtctttgaagatcaccatatttagccattatctatcaactgttaagccttgggtaaacttcatgtccttgcaccactcaagttacacattggctctgtgaaatatttgcaagtggtctggcgcggtgggtcacgcctgtaatcctagcactttgggaagcccaggtgggagaatcacctgaggtcaggagttcgagaccagccaggccaacatggcgaaatcccgtct

SEQ ID NO: 172038 - DNA, 220 bp, Homo sapiens
atgcctggagagggcctggaagccctgtgccacacccccatgccttgccctatgtacattttcatctgcatcattggcaacatcctttataataaaccagtaaaagtaagtaaatgttttccagagtcttgtgagccattatagcgaattatcaaacctgaagagtagcttgtgggaagtcccaatttatactacaggtgacaacttggtacttttgaca

SEQ ID NO: 172039 - DNA, 367 bp, Homo sapiens
cttcagagctggcgtgtacagtgctacattttaaatacctgagaaattattccagggacatactgggaagcattcttccaaaagaggaacccttttccaaattaaagatagacaggtcactaacatagttaacatcaactaatcatagaaaagcctaagagtatttgtcaaaagattgaaacatttggcaaatctaattaacatacagaatagctgtgtaacgtttttttttttggggggggcatattgtagatgaaattgcaatcgcaaaattacacatacaaacacacttttcagggaaaaagttatttgggtttcatcaaattcacaaaggaggggccataaacctgcaaaacataaaaatgat

SEQ ID NO: 172040 - DNA, 317 bp, Homo sapiens
tgagggaaggagtgactcctgcggtggttaggaggcaagtgagacctgggcatctaagaccctgtagaaagcaatcgccttttgtgtttgtgatagagactcagaagctggtgctgcttctgtccctctcagtatgaccccaagcctccccagaaaaggtctcttccaactctaaagtgaatattagaatgtgagttattcattttctgtgttttctgtagcagatttttgtcctggagattgccttctccagccctctgcacactttggtttgctttcccttttgatggttagtgactgcttaatgaatgtaagta

SEQ ID NO: 172041 - DNA, 170 bp, Homo sapiens
agtctggaaagatggcactgttgaagatgtcattattattataggaaatgccatgaaagtctaaacaaaagatttctatgggagaaaactgtgtccagacgtagtacatgatttcacaggatttatgatagagccagtcaaggaaatcatgaaacagattgtggatatgg

SEQ ID NO: 172042 - DNA, 352 bp, Homo sapiens
tagccaaatggctaatttcccacatctataaagagttcctgcaaatgaataagcaaaaagcaatggcaaaaatggcaaaagatatgaagagacagttttatagaaaagaaaacacaagttactcaaacatgtgaaaaatgccgaatctaactcacccgaagggaaatgcaaatgaaaactacagcaaggtaccacttttcacccatcaggctgacaaaagccaataaatcagctgatgctttatgggcaagggtgtttttatagaacaactatccattgctaagagagcatgaatcggaggcacttggcaaggaggccatttggcaagatcaaaatgatgaaagtacacatt

SEQ ID NO: 172043 - DNA, 425 bp, Homo sapiens
tttgtagtttgggtaatatatcctctctgctgtaaatgccacgtgtagttttattttcatacttcctcctttgcttcctgcacattcagtgtgtctgtaagtcagtgttagagtttctgcaagagactgaatcctgaatgagaagaaagtactgctaaaactaaaaacatttttctttttccctcagttgtggaataaactagttttcagtggttgaaagcaaaaatccacatcttgttctatcttgatagtcttagaagtgcctagggaaagaagtaagaaatgttcattttagatttctgtaacctcagtagtttgctggtagcaaacatttctttttgtgtctagcaagaatagggtcttgtggactccattctcaagaatggaaagattaagtggttttttctccttcatcttataagtgt

SEQ ID NO: 172044 - DNA, 178 bp, Homo sapiens
ccaagtagctaggagtacagttgtgcaccaccacacccttataatttttttttctcttaaagccctgagcttacttctctacaagctaatttaaaacatttttttgtagagacagggtcatgctatgttgtccaggctggtctccaacttctggctcaagccccttagcccccatttc

SEQ ID NO: 172045 - DNA, 346 bp, Homo sapiens
atttattgtctgtctcctctatcagaatataagctccttgagggcaaggatctttgtcttattctctgatgcatcttaagcacctggcacatagtaggcgctcaataaaagtaactggatgaatgaatacatgaacacattaggtatactgtacagcatactgttcaaggaaatgctatataactgtatctttttgaaaatgttacctgttgccctacaagataacttatccaagttagtgacaaattatttttcttttctcttttatctgcttagtagttcagacattctcatttttagacatttctactagtggtctgaggctatgggatacacacgtatatat

SEQ ID NO: 172046 - DNA, 367 bp, Homo sapiens
caactttggtgctaggggaaagatgatattttctccaccagatctgtgattaaaatggatgctcccgtgcgggtggtgcatgtctattacaacccggtgggggatgctctcgtgcgggtggtgcatgcctattacaacctggtgggggatgctctcgtgcgggcggtgcatgtctattacaacctggtgggggatgctctcgtgcgggcggtgcatgtctattacaacctggtgggggatgctctcgtgcgggcggtgcatgtctattacaacctggtgggggatgctctcgtgcgtgcgggtggtgcatgtctattacaacctggtgggggaacaggtaggtgcatgactattacagcctggtggg

SEQ ID NO: 172047 - DNA, 464 bp, Homo sapiens
aaagccacgactgcttcaagtttaatgaaaattgatccccatgacaatagagagtgacgactctacaggtgcgctgggttttttgttctacttaatttaaattcctgaaatgggagagagggaagggagtttaggaatttatttctattagaatatagaagttattgcaaaaccctaactgtaaaaacgcaccaatataatcggactttgcatacagtagctaagagaatccaaacatttcagtgaaacagtgaatttgcctggagggcagtgaacaaggagaggcctgtgagtggtctcagagagctagtcttagagcaaagggaatttcctctccgccctctgaagtttccataactgagtctgctgtcatcaactgacagtagaccaattaactggagaaaaggcaaataaagttattacctgtgtgggggcacacagtactcacaggaaagtgagtaccc

SEQ ID NO: 172048 - DNA, 220 bp, Homo sapiens
tttccatggctgggtcgcgtcccgtgcgtgttggtccttcggtctacggaaggacactcaggatgctgctagtttgtggctgttgtggtcagttctgctgtgaacatccacggatgcgtctttgggtagatagactttttcctcttcttctgggggcgtttcttgttaaagtttatcctcaggtgttactggtttttgtttttttttttttggagagtgt

SEQ ID NO: 172049 - DNA, 414 bp, Homo sapiens
ctgcgcatcctgtctggggttcatacacaacaaagacctgatttctctcctgtttcccctgggttccagtagaagcccaagcccctccaggaaccccttactgttactgtgaaggcggaatatggctttggttaattgaggccaactcacagtgctagatcaatccccctaaaccacaagggcggagggtgggaccagataggttattaagggaaatttgggtactcttttacccagagggtgaacagatgctaaatggcccaactatgcacatgtgtagccatccactgcaacaatgcgtagtagttggttaataaatttattttcatttaccaattgatttatcagcaaaatgaataaaaactaagtaggctacctgtaagaaaaggtaataaaatatgtaaaaatgaatta

SEQ ID NO: 172050 - DNA, 401 bp, Homo sapiens
gggcgtgagcatgagtaggaagaggttataagattaggaagtacccagagttctgtattataacacattgatttgatttgtggagtccaggccttaagtagataaaacagagcactttaaaagccatgtctgctgggtgcagtggctcactcctgtaatcccagcactttgggaggccaaggcaggcaggtcacctgagtttgagagttcgagaccagcctgaccaacatggagaaaccctgtctctacgaaaaacacaaaattagcctggtgtggtggcgcatgcctgtagtcccagctactagggaggctgaggcaggagaatcgtttgaacccagcaggcggaggttgcattgagccgagattgtgccactgcactctagcctggcaacacagcaaga

SEQ ID NO: 172051 - DNA, 614 bp, Homo sapiens
ccatgctaactctggaagaaactgtgtaataaataactaagggattgaaaatggactctaaattcatttgttagcagtatgacattggaaaatataatgcaacttctttaaatctcagttcctcctttgtaaagttgcgatactccctattagaagatcaataagtcctcttccaggctccaagcgcaagtgttccggggaatgagatggaagctacatccctttatggtccagcctcagcagtcacctggtgtaacttccctgcactctgttggtgacagtaatgccagcctgcctagtttcaagggaaggacttagtctacctccagataaggaaatggcaatgtcacattctagaagggcatattgctgtgagatgtgtgatacccatctttggaacatatgccacatcagatttctgttctgtgaaatgaagaaaaatgagttggggctggagttaattggtaagacctcttccaacattagaatgatgcaattctttaaaattaaaatccaattttctttaaaaaaataatttacaaaatgatgatatgcttttttagagagtctactttaggatatctttaaatagagaggtaccctggtacagtaag

SEQ ID NO: 172052 - DNA, 481 bp, Homo sapiens
tcgtcttagagcggatcatcttgtaaggatgttggtgatcttaattttttatgcttttatattttgcctcagtttaagtgtaatcagcaggaagcagaaaatatattcatcattttcaaaaaatatttaaaaattcaaatattaaaaaaatacagagaaaagttaacaaagctactgtatacatcatctggctccaactgttaccaactctgaggacctttagtcatccttactccatgctctcccctaccaccggatgtactgagcagcagagaatgggacctgggagggggcctattccaggtcaaaggggagagactactcctggtcaacggggaactactctgggtctatgagaggactagttcaggtagatgagggactactccaggtcaatggggaaccactctgggtcaagggaagactattccaggtcgggcaaggggagctattccaggtgaagaaggcggatgcaggggtg

SEQ ID NO: 172053 - DNA, 245 bp, Homo sapiens
aaggctgcagtgaacagtgatcccaccactgcactccagcccaggtgacggagtgactctgtctcaaagaaaaagtacctgcacaaaccaaagccaattactctgtcttcagaatagacatccaaaaccaaggctacaatccaagtcttcaataatgaaagttttctggccaggtgtggtggctcgtgcctataatcccagtattttggggacagaggtgggaggatcacttgggcctaggagtt

SEQ ID NO: 172054 - DNA, 337 bp, Homo sapiens
aggaggatgcatgggcttagagtgatgccaagaaacatttggtctgaaaagggctcacttttatagagtttgtcctttgtctgaggtccttaagttagtgtttggcgtagattgcaggctgacttttgagagttggtgtagaattaagccttgtgtgccttcacctatgcaagtaaacctggacagaggcctagagaccaggccgaaggatgttaacacatccctgtcacaagcagtttcctacatgctcattgtttctgcttcaatatccccatcacttcttcactttggcgtcctgcctggaagtggagatttgtgggtgacagatggtggggag

SEQ ID NO: 172055 - DNA, 332 bp, Homo sapiens
gaattcctatatgttcaaaactatcgtttgtagcctttctgtgtgaataatggcttggcttgttttaaaacaaaaaatcactggctcatactttattcatttgtttttttgagacaaggtcttgctctgttgcacagactgaagtgcagtggcatgactacagctcactgcagcttccacccctggggcccaagccgtcctcccaccttagcctcccaacatgtgtgcgccaccaagcccagcgaatttttttttttgtagacacagggttggggtggggagggaggagtctcatgttgcccaggctggtctcaaactcctgacctcaagtg

SEQ ID NO: 172056 - DNA, 366 bp, Homo sapiens
  misc_feature (192)..(192): n is a, c, g, or t
attcgcgaatcaccatgtagtagtctttaggctgattcacaaaagtagcgctggagagaaatctggatggtattagtatatagatggtatttacaaccaagggaaatggatgagatctcctagagaacaagtatagagtaggaggagaagaccacactccaaggaattcaagagaaaatgtaagagcttgtngttagagaaaccaacataggaacatatttcaggaagggagtttgagatcagcctgggcaagacagcaagaccccatctcttaaaaaaaatgttaattttcaaaatgtggttccacagcgttgatactgggaatatttactagacatgcaaattcttaggccccaccccaaacca

SEQ ID NO: 172057 - DNA, 409 bp, Homo sapiens
atatatacgacctaattgttgctttctctggatttccttcaagaagcaaaaattgggtaggtgaagttagaatctttgaggagtccccatctctgccagaaatctgaaccaattgagaaataaaacaaagtggcagatcaaatgggggccaaactatcacctccattaatggtaaagccaatattaaagtagtaacttaaattgatgggcaagtgaacttcctagtattgaaacatagacagagttggctttgtggacatgccttcaggtggcatggggccccatgctaaaagtcccacagttgggattaaatgttctgtggtcacattgttaaaattcttaacaattttatctttgaatttgtgttttgcaagtgaagttcaatgtgacaaagaaccatgctctgggg

SEQ ID NO: 172058 - DNA, 384 bp, Homo sapiens
ttgcatgcctatagtcctaactactccagaggctgaggtgggaggatggcttgagcctgagaggcaaaggttgcagtgagcccagatcacaccactgtgctccagtctggtgacagagtgagatcctgtctcaaaaaaaaataacaaacaaaactaatctatagtattagaagttaagatttattgttatctctttgaggcaggtgttttgattagaagaggacataaagggggcttcaggtaaacttgaactagtctatggtttaacctcaatgttgattacatgagtttgttcactaaaaatttgacaagctgtatacctgtaacttgccaatttcttgcatttatattacacatcaataaaataagtttaaaattatgttg

SEQ ID NO: 172059 - DNA, 620 bp, Homo sapiens
gacttgtggattttcccttgttgggtgctggttatttttgcattcctataaaatatctagctttattctgagatgtagttaagtaatttggaaactctggttttttctgttcttgctgtttagatttgttaaatggaaccagagtgttgttattcctcattactgaggcaagactgagtactcttcctaatcccactgcaatctccgccgcccaggttccagcaattctcctgcctctgcctcccaagtagctgagattacaggtgggcgccaccacgcccagctaatgtttgtatttttagtagcaacagggcatcaccatgttggccaggctggtctcgaactcctgacctcaggtgatccgcccaccccagcctcccaaagtgctgggaatacaggcgtgagccaccgcatctggcctttttttttttttttagatggagtttagctcttgttgcccaggcggaagtgcaatggtgcgatctcggctcactgcaacctccacctcccgggttccagcgattctcccacctcagcctcccaagtagctgggattacaggcatgacccatcacacccagctaattttttgtatttagtagagatgggttttcaccatgt

SEQ ID NO: 172060 - DNA, 108 bp, Homo sapiens
ccatcactggcaaataaagccacaaccaagggtaagcttatgcttctgaatcccctatctaggggagcagacagatgtgtaaacagatttaccgagggccaggtaggg

SEQ ID NO: 172061 - DNA, 256 bp, Homo sapiens
gttggcaattttttttattaccatttaaatattgctgcttggttttggtctgtttggagtttctatttcttcctggtttaggccaggagggttgtatatttccaggaatttgtctgtttttttctaggttttctagttaatgcatgtaaaagtgttcatagtagccttgaatgatcttttgtatttctgtggtatcagttgtaatatctcccgtttcatttccagttgagcttatttgtatcttctctctcctttt

SEQ ID NO: 172062 - DNA, 275 bp, Homo sapiens
tccacaacctcctgtcttacccagatactcctttctattgattccaggtctttagctaataactctttcaaccaattgtgaatcagaaaatattttgccaggcacggtggctcatgcctgtaatcccagcactttgggaagccaaggtgggtggatcacctgagatcaggagttcaaaaccagcctgaccaacatggtgaaacccccgtctctactaaaaacacaaaattagctgggcatggtggtgcatgcctgtagtcccagctactcaggaa

SEQ ID NO: 172063 - DNA, 481 bp, Homo sapiens
aaagagttatacagtctctgtcactttgtattataatttttatacctctctcttcctcactgaactgatctcttgaggaaataaattattctttacttatctttacagttctagagactatcaaagtcctgaacacttagtattatagaaactaaacaaatggtccaatactataatcttaaaacattttttaaggaatagtttgtttactagagaatactaacccaaaatagaaattatccatctagtttcataggaaaacttaatttatatttttaaaccattttctgcaatctgctgaaccccaggaagtgacataagcctcataactgctgccaaattaattttcctaaggatcaacctgatcatattgtttcttggcttaaaaccacatgtcatttcttggcttcctttcttgtgctgagaaagataatgtccaaatttggttactggctaccaaggccctctgagattgggaaat

SEQ ID NO: 172064 - DNA, 346 bp, Homo sapiens
cccaatgtcctttcaagttaaaatgttatgctctggctggatgtggctcacgcccgtaatccaagcactgggcgccgtggctcacaccggtaatcccagtactgtgggaggccgaggcgggcagatcatttgaagctagtagttttacaccagcctgggcaacatggtgaaaccccatctctactaaaatacaaaaataagctgggcatggtggcacatgcctgtaatcacagcttctcaggaggctgaggcaggagaattgcttgaatctgggaggcggaggctgcagtgggctgagatcacaccactgaactccagcctgggtgacagagcaagactccatctc

SEQ ID NO: 172065 - DNA, 771 bp, Homo sapiens
tgagtccataaaaatccctggattcgtacacacactcttcgggatgacctgcctatgcatgaaactgaggattggtagcccttttagaggaacacgtgcttccagaccaggttggagtgcagcagcgtggtcccggctcactgcagtcttaaccttccctggctcaagtgattctcctacttcaggttcccgagtagctaggactacagactgctgtgctatgtggctcaggctggcctctagctcctaggctgaagggactctccccatcctcctgcctcagcctcccaagtagctggaactgtaggtcacctctgagatagcaagactaacccatcctcttcctcctcctcctcagcctacttgatgtgaagatgatgaagataaagacatttatgatgatccacttccacttaatgaatagtaaatatatattattttccttatgatgtcttaataacattttcttttctttagtttactttgttgtaagaatacaaaatatgtgtgctaatgagctgtttatcactaaatcttcctttcaacagtaggctattagtagtataagtttggggaaagtcaaatgtatatgtggatgttcactgcgtgggagttagacctcaagcccgagttgttcagggtcaactatatttgttaagggtctatgctgtatacagaggtggaactaaaaatcttggagccaaacagtacgtaaattgggttggtcaatctaacccaagggtgagggattgaaattagtcttgaaatagg

SEQ ID NO: 172066 - DNA, 489 bp, Homo sapiens
atggtggggccaatggaatcattacccaagacgggcattttcagggaaacagcttagataaggccaggcgtacagtagctcccacctgtaatcccagcatttggggaggctgaggtaggaggactgcttgagcctgggagttcgagaccagcctaggcaacatagtgagaccccatatccacaaaaaatttaaaaaaggagtttgtgttcctgtagtagcatacttgggaggttgaggtggcagtatcacttgagcccgggagttcaaggctaaagtgagctgattgagccattgcactccagcctgagcgacagagagatacgctgtctcaaaggaaatacaaattaaaaaaccagccgggcatgctggcgtgtgcctgtagtctcagctacttgggacactgaagtgggaggattgcttgagcccaggagttcaaggctgccgtgagctatgattgtgcctctgcactccagcctgggcgacagaga

SEQ ID NO: 172067 - DNA, 122 bp, Homo sapiens
agagtattgggtgatttaagaaaaatgagaacaatgatatttcttgtgaaaaattttaaactactgagaagtacttgatctttcttgagagatagataacatttatggaagaataatgtaga

SEQ ID NO: 172068 - DNA, 540 bp, Homo sapiens
  misc_feature (48)..(48): n is a, c, g, or t
  misc_feature (54)..(54): n is a, c, g, or t
  misc_feature (59)..(59): n is a, c, g, or t
  misc_feature (72)..(72): n is a, c, g, or t
gagccatcgcccaacacataccactcaattccctgacctcaggtgatnctctgnctcgntctcccaaagtgngggaattacaggcgttagccaccacacccggctatatgaaggattttaaatagacactcgttctctttttaaagtaaatatagtactatttcagttttatagctagcctccttggcctcccaaagtgctgggataacaggtgtgagccaccgcgcctggccaagacgtgcttatttttttaaatagttgaacaatattctgtagtatggatgtaccatgttaagttgtttgattttcttaagatgtctggttagtatattaggcagtttaaaagagccttagggcatattgtgctacgtggaaggtgtctctttccaaatgtatttctccacagagtgagtttttctggttatgatggtgtttgggggattttgtttagagttttttaaaaaatctgtacttatttctatttgtatatggtactgatggattaagcagataatttttattcctgccttactttgatta

SEQ ID NO: 172069 - DNA, 204 bp, Homo sapiens
aaaaaaatagaatataacccttgagatcatgaatgtcactgtaaaagcacagacaagtttatttaaataaaattataaagtaagtaaaagtattaagtggtatgtggaaattataaaattgcagagatctatgcaaatgattaaattcgggccaaaagtggattagagggagaatggggaataactgccaatgggtacagggtt

SEQ ID NO: 172070 - DNA, 598 bp, Homo sapiens
  misc_feature (163)..(163): n is a, c, g, or t
gggactacaggcgccctctaccacgcctggttaattttgtatatatagcagagacggggtttcaccatgttggccaggctggtctttaactcctgacctcagtgatctgcctgcctcggcctcccaaagttctgggattataggcatgagccaccgcaccagncgcaaaaggtttaaaaatttaacctggggcatgggtgggtgcgtgcgggtagacccgatctactgtggcttcacataaccctccttcttaagcctcccaaagcactagtattacaggcatgagccaccatgtgtggccaccactgactttctgaaccccgagtgtattagccaccataacagacaccttttgtctgatacattctgtggatcatattccttttttatatataattttaccttttattttagatttgagtggtacaggtacaggtttgtttcatgggtatatcatgtgacactgaggtttggaatgcagatgatcccatcacccaggtactgagcatagcaccccacaggtagtgtttcagccctggcccctccatctctccaccctctagtattccctagtatctactgttcccaactttgtgtg

SEQ ID NO: 172071 - DNA, 589 bp, Homo sapiens
ataaatccagtttgttggtatatgatgatttattaggggaacttacagacagaaacgtggtcttgggtggctgcaagacaggtcgatatctacactgttacttcccagacccaaggcttgtataccataggggaaaggtatacatgctccagcaagacaattcaaggcaaccctccagaacaccaagaatgttatatgtgtcatagcctataatttatgtgataacatcaaggttgctttgatctaaaatcgggatttgtagtgagcacatattcttacactaaggacaataaattaagaagaaatcaggaggcattcacagaaatggggtcattcagaagtcaatggtggattaacatccaagatggagtcattttgtctctacacaaagagatctggttatttttgtggcatacaagatttaacattacgattatgactggtaacataaaccaagacatatcagatttctaggactcgcgtactattttggaacacatattacacatttatacaaatataactcaaggaaaactaaacaccattttgtatttgccaatgcttcccatgtgattttaacatactgagt

SEQ ID NO: 172072 - DNA, 109 bp, Homo sapiens
ttaaaattattatttttactccctcttttcagcaaatagaaaagtttctttgctcattttttcctattaaaaatgtagttcatgattattccagaaaatacaaataaca

SEQ ID NO: 172073 - DNA, 455 bp, Homo sapiens
gatcaggagagcaatggtgtatttccagtttgagtccgaaggcctgggagtcagcagagctgctggtatatttatgcccaaaggccaataaactcaagacccaggaaaagccgatgtttccatttgagtccaaagcaatgctacaagaaaaacttggaactgtaacatccccctgcaaactgggaaggagctaagagaccaaagaatgattcagacaagtccagcttgatgagtagatgagtctatcaggacttatgtacatggcactcctggatagcggcaggacagcgctggagatctgcgccacctcccgactccaaactgcttttaaattaatttcctggctctttgcctactgtgtttgagtgatgagactgtttttcttgatcggttctcagatactcactgggatgtttgggttcttagagacacctgctcctcggttgggcaccctg

SEQ ID NO: 172074 - DNA, 105 bp, Homo sapiens
cttaactttaggcaggtgattcgggccacctttagaaacacggagaggggcgccctcctgaccacccactacatggcagaggctgaggcggtgtgtgaccgagtg

SEQ ID NO: 172075 - DNA, 736 bp, Homo sapiens
ggagtagcttttgtttctcctgtaataaacttgcattcactttactctgaatttgccttcattcttgaacaagatccaagaaccctctcttggggtctggattgggacccatttccagtaacatcttcctggcaaaccaccaagggacaacactggagaaaccccgacccaaaagaatagactgcagcactaattggccaactttgcactacggaaatgacattagacaaaaagcaaatttgagcgattttcgtatcaaagttcgaaatgggtcataaagcagtggagacaactcgcaacatccacaatgcatttggcgcaggaactgctaatgaactgacagtgcaatggtggttcaagaagttttgcaaaggagacaagagccttgaagatgaggagcacggtggccagccatcagaagttgacaacgaccagttgaaagcgatcgtcaaggctgatcctcttacaactacacgagaagttgccaaagagctcaacatcaaccattctgtggtcattcagcatttgaagcaaattggaagggtaaaaaagcatggtaagtgggtgccttatgagctgagtgaaaatcaaaaaaattgtcattttgaagtgtcatcttgttttatcctacacaacaacaacaaaccatttctcaatcagactgtgatgtgtgatgaaaagtagattttatgcaacaaccggtgacaaccagttcattggctagactgagaagaag

SEQ ID NO: 172076 - DNA, 666 bp, Homo sapiens
acatggcaaaaccccgtctctactaaaaatacaaaattagctgggcgtggtggcgtgtgcctgtaatcccagctactcaggagactgaggtgggagaatcgcttgaaactgggaggccgaggttgcagtgagctgagattgcgccatcatactccagcctgggcaactagagtgaaactccgtctcaaaataaaaataaaaataaaaataaaaggaatgatcacttcctgtttcatgaatgaggaaactgaggctctgggagatgggaaatcctgcccggaatctcacagctggaggccaggccgggctttgaatccaggcaactgagtctgagtggatggtgtgtgctttgtgttggagctggcccagggctggatgaaggcaacatttaattaatgaaaaccactaccccctcccggctgttacctcttgagcgcttttctatgaagcatcctgtttaagcctcgcactctgtgatgtggaggtgcagtaattatccccatttcacagacaggatgttgaggtcagaggggttgagtgattgtcatgggccaggtctcagccaggcttgctaaccctggagtctgccgtctgctctgaagtggtcactctcagctggagagctgacctggcccttttgcctttgtgatgtacggtcctgaaaaa

SEQ ID NO: 172077 - DNA, 352 bp, Homo sapiens
cccactgcaggtgaccttgatgccaacaggcggcgggccagggggatgatgttgatgacaatcttcaactacacttgaggatgaagtgagacatggggtctcacttcgacagggtgagaatgaattggcccagaaagcactcatttctcctttcagcaaacattctttgtgaggtcgccacagtctttgcctatgttttacaaatgtgactgagaacagatgaaagatctgcccaaggtcacactggattctaaaacctgtttctaactgtgtcatcctccagaacgtgaatgtgcatctgggaggatgatccccaaccaacatgtgatctgaaagtacatattgcccatta

SEQ ID NO: 172078 - DNA, 154 bp, Homo sapiens
agtccctgcctaataggccttcctgaatcgcctgaagaacaaaatgtgatttgtgtgggttgtttgttagtttaagctacagatagagtaatacagtttaagcctggtttgcctggggcattccagtatatacaggtatcccagtgtgattgtt

SEQ ID NO: 172079 - DNA, 567 bp, Homo sapiens
aataaaaatctcagtagggtttttttttctagatacagacaagctgattctgaagtttatatgaaaaggcaaaggaactagaatagctaaaacaatttcaaaaaataagaaaaaagttggaggaattacaccatcttaagacttagtaaatacctacaataattgatcatgtagtattggtgaacgggtggacacagatcagtgtaacaaaataaagagaccttacaaatacggccattacatttttggaaaggtgtaaaggcaactcaatggtaaaatgacagtcttttcaacaaacaaacagtgttgcaagtgaaaatccacaggcaaaaaaagaacctcaatctaaattttacatcttatataaaaactaactctaaatggattacagatctgaagtaactacttttaggggaggattctaggaacatggcagagtaggaagcactaggaatgtttcccctcttagaaaacaattgcactggcagaatctgtctgatacaactattttggaactctggagtctattgaaggcttgcaaattccagggggaggcttgaacagtaa

SEQ ID NO: 172080 - DNA, 142 bp, Homo sapiens
tctgtgtccagagaccatgttttgcttatccatttcttaagttcatggacatctgaactgtttccactttttggccattaggaataatgctgctgagcacattcgtgtacatgtttttatctgtacgtatgttttcatttct

SEQ ID NO: 172081 - DNA, 254 bp, Homo sapiens
ggaattatgtaaagccccacatctaggagccagacattaaggagcttcctttactctatctctactcctaagatcagttctgcaagcttaatctcattttgaagattgagaaacagagactcagatttaataagtttcatcaaattccttataaacaatcaatatacccttgagttctagcctctcacacattctaatcatggctggcccgtaatcattccttcagcattcctaactccagatggtcattcaca

SEQ ID NO: 172082 - DNA, 514 bp, Homo sapiens
agtccacccttaagatccttgccacccattattttgtttcagaacgcttaatccatcaaggaaggttaaattggattaccccagtagggaagggacgggggctgtaagcatgagggattatccctgtaaagggctcgtggtgtgtgtgtgtgtgcgtcctgctagtgttgaatgacggagacctgagtttggattctgaatccaggtgtattcgatgccgctccggcgtagaacgggttaaagatgcccccagccaggtagagccagactgggagttgtgcaaggtctcaaccccctaaaagcggcccctcaaattgaagatgagtaaatcatagttcgtaaatcagaaagattatccagtactacgttactctgtttatttccctttcgtcatccctgagtcttgggtcaagtccatcccagctctgtcctccaggaatcaagggaaatacgcaaacccgcggtgggttcgcagccgcaggaaggacaaatcttgcccccgccgcggcggccg

SEQ ID NO: 172083 - DNA, 353 bp, Homo sapiens
tgccgttgacaagctgtgtgacacaggataagccacaaccctctctgaacctcagtctcatcctcagtctcatagcgctgatgatgcatactgtgtaatactgttgcaagaatggaataagatgaagcagaacaaatgtccaacccagcaactggcacatggcaggtgtgcgcttaatccctgcattcttagtgggatcagtattcccaagagagtgaacatttatgggaaagaaaagaaatcttactctttatgaataaagtacagatataaaatacaatacataagcagatgtacaatttatctgtggaattaaaatttcatggggtatgtagctaataaagaatctttag

SEQ ID NO: 172084 - DNA, 663 bp, Homo sapiens
taccttaataaaagggactttacagatttgataaaggatcttgagataggaatagtatcctagattatccaggtggcctcaaaatacttgcaacagtctttgtaaaagggaggcaggcggtcagaccggggaaaaagtgctaaactgctgacttagaagatacagaaggaggaccctgtcagggaatgaaggtggccccgagaggctggaaaagatggaaacacattctccccggcagcctccaaaaggaacacatatccctaacaataccttgaatttatgcttctgccttccagaattaggggaatccgtttgcgttgttttaagccaacaggtttgtggtattttgctgcagcaacagtaggaaacaaatgcagccatgaagtgaatgtccttctgtacctttgagtgtatgtataggtttaaaaaaaaaatgcccacctacactaatcaatacggacaaacacgggattgtctatgcgtattactttgtgatttctctcttcatccaatttgtggtgaacaacagatacgttgtgaacaactttctatgctatgtattttaatggctgctccctcgcttaggaatagttgatgcagtatttattttgttttcgtattcttttgctgatggaggctggccttgctggctgtacatttatt

SEQ ID NO: 172085 - DNA, 460 bp, Homo sapiens
cccgttctgctgcttcctgcttctggccgcttcttctgctgcttcctgcttctgcaatgggccagaacttcctttttaaggctgaataatattccattgtgtggatagatcacagtgttgagcagcgattcatcaaagccaaaaagtcggttccacactttgacagtcgtgagtaacacagctgtgaacatggtacatgagtccctgtgtagacatgctttcctgtctctggatagataaggaggctccatcttgacataggcacccactgtcaccaccgcagggaatgtggcacctgccttttactgttcagcagagagtgacacacatcatttctatctcatctcattgccgtgccatggctgacttcagaggaggtgggaaaatgcacttctgtcataggcctagaagtgggtgaactggaaatacttggtgactaggatcagtactttagaagaga

SEQ ID NO: 172086 - DNA, 1327 bp, Homo sapiens
aggagactccgtctcaaacaaacaaaaaccttcatcttaaaattatagggtaagaatttagaaatacaaggaaaaatggccagccagttataacaagaagctttaagacatctcttttcagaatcagtggatcgactgctgcacacacactagaatggctaacattttgaaatgctgataaatatgcagagcaactggagttcctcacagctggtaggaatgcaaaatgactcagtcactcaaaacagtttggcagattctttaaatgctaacatacacataccatatgaccaagcagtcccactcctgggtatttagagagatgaaaacttagttcacacaaaacctgtgcgtggatatttatagcagctccattcatagtgaccaagatgtcttccaacaggtgaatggatagcgatgtatccatatggtggcaaacatgccacaattcggatgaatctcaacatcatatgctgagtgaaaaagccagtctcggaaggctacattctgtatgattccatttatatggcattcttgaaaagacaaaactatagtgacagaacagattggagattgccaggtgttggggttgggaggagttgattacaaagaggctgtacaagggagtttgtttgtttgtttgttttggtgatgaacagttctgtatcctgattgcggtggtggtaacgtgagtctatacatatgttaaaatttatagaactgcatactctcaaaaaaattagttttactctataataatattagagcttaaaaaattcatccctcttgcccatcagtagatcaggatatgaaggataccattgaacataaatattttgtatccatgatgaatacaaagtatattctcctggaaaaccaatagaacattcatataaatgattcctatgaaggtaaaaaacttacaaaattcaaagatcatacagatcatgtgctctgtataatgtaataatagtaacaaaaggcctgtccacttggaaatttttaaatgatcttctaaataactcatttaaaggagaaatcaaaataaattgcaaattatttagaattaataaaaacttctctaaagctgaggaattctaccaaagaggtgttagaggaaattgtatagattttgatttactttccaggaagaaagaagacaaaagagatgaattaaacatttaaagctaagaaagagataaaccaaaagaaaggtgaggaattggtaaaagcagaaatgaataaaatagcaaattttgatcagtgaaacacaggtttttaaaaatgaaagataaacctttgtaaaatatgataaagaaaaaaaagc

SEQ ID NO: 172087 - DNA, 205 bp, Homo sapiens
tttgaaacctggcaaatcctcctgggggagactctgccagaacgtttcatgtcatccagccatttctgagaggagaaccggccttccaagcagaagtccctgggtgaacactatcgcggagtcccgtaagttattttaatgtagacatcactttaaactaacctttcaccatctgttctgtcctctaataacaaatgcggaagag

SEQ ID NO: 172088 - DNA, 576 bp, Homo sapiens
gatcccaggcaaagctatatggaagtgtattgacattgttaaaggtagcatacattttgtttctgaaacactgttcataatggtaagatattgagtgagatcctcattttcttgcatagaaaatggatttatgtctgagagagcaaatttgtttgaattaagtttttaatgtgtggataatattcattgctgctgccatttatcggagccaccttttataatcacgctttaaaggaggagttgtttacgttgcatacaattttcttaggaggcttataagtacatactttttttctcttatggattaaattaatgaatacagtcaacagatcattacagaatacctactgtgtgaatgactgatcttcatgttaccttttcagttctctttgaaagtgagtgaaggattgtgtctctcatataactggaaatacctgtcttaaaaaagtatttgtatataaacttagatgaaacatatctaggatcactatctttcagtttttagaatctctacaatttattaattattccacacatgttgacatgagactcttaccatttgattaagcaagaaaa

SEQ ID NO: 172089 - DNA, 244 bp, Homo sapiens
aatggttcgacactgtactttcactcaattttgctgtgaacctaaagatgctctgaaaaataaagcctactaaaaaaaagttgaaaagatgccatgtttgaagaatgctgtccactaagcacaatctcttctcccttatagctactgttcttggcagagctacttggattaacaatggtgcctggcagagtaacacagagaccataggaatagacattttcttgagtacagtgatcgaagacca

SEQ ID NO: 172090 - DNA, 1115 bp, Homo sapiens
tgggggtggctgggccggggaaatggcggcttcaggagagagcgggacttcaggcggcggaggcagcaccgaggaagcatttatgaccttctacagtgaggaataaagatggcatatagcataccagagattcattccaactagcattccaactctgacagtgacaccaagaatgttttcctgggactgcctggtgcttgttctccctggcattgtcttcaggtgaaacaaatagagaagagagactcggttctaacttcgaaaaatcagattgaaagactgacccgtcctggttcctcttacttcaatttgaacccatttgaggttcttcagatagatcctgaagttacagatgaagaaataaaaaagaggtttcggcagttatccatcttggtgcatcctgacaaaaatcaagatgatgctgacagagcacaaaaggcttttgaagctgtggacaaagcttacaagttgctactggatcaggagcaaaagaagagggccctggatgtaattcaggcaggaaaagaatacgtggaacacactgtgaaagagcgaaaaaaacaattaaagaaggaaggaaaacctacaattgtagaggaggatgatcctgagctgttcaaacaagctgtatataaacagacaatgaaactctttgcagagctggaaattaacaggaaagagagagaagccaaagagatgcatgaaagaaacgacaaagggaaagaagcacgattgaagctcaagaaaaagccaaacgggcacacacgagagtggcagaaaaactttgaggcaagtcgagatggtcgtgtggacagctggcgaaaacttcccagccaatacgaaggggaacgaacagagagacacatcggactttctggggaccaccgaaggtacaactggggcacgtggagtgaaacggaccagggcacacagggcagaaacctttcccgggaaaatcacatacgggggtggaaggaagcaatctttccgcacagttcaccgcacatgagaagacatatgcgcgtcagccacacggcgtgcaacagacataatgcacagcagaagacctgtggcacgagaagcgggggcggcaaacacacctcctcgacccagac

SEQ ID NO: 172091 - DNA, 906 bp, Homo sapiens
tgggggtggctgggccggggaaatggcggcttcaggagagagcgggacttcgaaaaatcagattgaaagactgacccgtcctggttcctcttacttcaatttgaacccatttgaggttcttcagatagatcctgaagttacagatgaagaaataaaaaagaggtttcggcagttatccatcttggtgcatcctgacaaaaatcaagatgatgctgacagagcacaaaaggcttttgaagctgtggacaaagcttacaagttgctactggatcaggagcaaaagaagagggccctggatgtaattcaggcaggaaaagaatacgtggaacacactgtgaaagagcgaaaaaaacaattaaagaaggaaggaaaacctacaattgtagaggaggatgatcctgagctgttcaaacaagctgtatataaacagacaatgaaactctttgcagagctggaaattaacaggaaagagagagaagccaaagagatgcatgaaagaaacgacaaagggaaagaagcacgattgaagctcaagaaaaagccaaacgggcacacacgagagtggcagaaaaactttgaggcaagtcgagatggtcgtgtggacagctggcgaaaacttcccagccaatacgaaggggaacgaacagagagacacatcggactttctggggaccaccgaaggtacaactggggcacgtggagtgaaacggaccagggcacacagggcagaaacctttcccgggaaaatcacatacgggggtggaaggaagcaatctttccgcacagttcaccgcacatgagaagacatatgcgcgtcagccacacggcgtgcaacagacataatgcacagcagaagacctgtggcacgagaagcgggggcggcaaacacacctcctcgacccagac

SEQ ID NO: 172092 - DNA, 993 bp, Homo sapiens
tgggggtggctgggccggggaaatggcggcttcaggagagagcgggacttcaggcggcggaggcagcaccgaggaagcatttatgaccttctacagtgaggtgaaacaaatagagaagagagactcggttctaacttcgaaaaatcagattgaaagactgacccgtcctggttcctcttacttcaatttgaacccatttgaggttcttcagatagatcctgaagttacagatgaagaaataaaaaagaggtttcggcagttatccatcttggtgcatcctgacaaaaatcaagatgatgctgacagagcacaaaaggcttttgaagctgtggacaaagcttacaagttgctactggatcaggagcaaaagaagagggccctggatgtaattcaggcaggaaaagaatacgtggaacacactgtgaaagagcgaaaaaaacaattaaagaaggaaggaaaacctacaattgtagaggaggatgatcctgagctgttcaaacaagctgtatataaacagacaatgaaactctttgcagagctggaaattaacaggaaagagagagaagccaaagagatgcatgaaagaaacgacaaagggaaagaagcacgattgaagctcaagaaaaagccaaacgggcacacacgagagtggcagaaaaactttgaggcaagtcgagatggtcgtgtggacagctggcgaaaacttcccagccaatacgaaggggaacgaacagagagacacatcggactttctggggaccaccgaaggtacaactggggcacgtggagtgaaacggaccagggcacacagggcagaaacctttcccgggaaaatcacatacgggggtggaaggaagcaatctttccgcacagttcaccgcacatgagaagacatatgcgcgtcagccacacggcgtgcaacagacataatgcacagcagaagacctgtggcacgagaagcgggggcggcaaacacacctcctcgacccagac

SEQ ID NO: 172093 - DNA, 651 bp, Homo sapiens
actctattgatcccccacatattttctatggccttcagtcaatttttttaaaggatttaataagttcaaatatgtatctatggcttaaggttacaaagaatatttttctttgcctccagtatactttgtattaaaaaaattataaaaggccataggtattcattttcaaatatttgaaaaaaaaaggcatggcacaattaaagcatatgcagaaccaacttggattattgctatatttctttctttctagtgtgtacggatattgatgacatttttaggtggctcttaacaagaacattttcctctctttagatgtgaatgcatagacagatattttctatgtaaacttttcatcagttcttgatagcaatagataacatttcctataatattccacacacacattcagccttcatccactggagcctgttatttagtctcctcagatgagctttcttcacgttgggcaattttcatcccttattgattcctcatgtgccttgcttttcatgtaaagatgtattcctaaatgcatcaagcagaccctctataacacatccatgtgttgcaaggtcctggtccacatgccatacaaaattaacttgaataatcctgtcacctatttagaagtcagcatggtggtcacccctg

SEQ ID NO: 172094 - DNA, 792 bp, Homo sapiens
agctggagaaggtagggaaaatatatccatcctaggcacattgaagtccatgaagaagaaatccaaagcattggaacagaatatattttaaaaactaattcaagaaagcttttgtgaagtaaaacaagacacaagagcgtctgccgtttgcaggtacgcaccctataccggaggaagtggacaggaaacagtgacgatcatctgcacgtgccatgagtggcttgtaagggaaagttcgttagattcttcagggcagcgttccgtgccagggtcttagaggcagcaacacgagaggcccaaggaacgtggaagccaaaatattatcctagctttggagtccctcatgtaaaatctgtcaggttttgaagactcaggtgtagggagtctgagtgctgtgccccatgaagactccaccatggtcggctttgtgaccagctcccttcgctgcagactcttaattttgcagggcgttttcatgtgacacattgatggtttctaatacacaggtgtgccgtctacatccagtgactccgtgaggtctttcagaaacgcttcgcaggactctgttaatcatggtgccataactggttagggtcaaaggagcaagtgacaaaatgaacaaataaagagataaagagaggtgcacaggtgtgacgtccatagtcagtacatacaggctgaactagggcttaggacaagtgctgtgggctgtgtgtgacaaccagttgtggttttgtaatgtggcatctgtaagcagcctgtgtctcaagaggacattttttagcagattgg

SEQ ID NO: 172095 - DNA, 326 bp, Homo sapiens
ggcatagtctttaagggctgcagactaagttcatctttgtgctcccgtgctgcttccatttcaaaggcttcgccagcgaatcccgtgagtcattcctggaaccttcaggagtctccatggtgatggggttgagtgggcctgggggaagccagcattcactccacttcctaacaagttcctcttttctgatttttttttcttttttttcaatagagactggggctgaggcttgagcttttttgtttttttaaacaaatcacaaaataagaactccctaagccttctttccccatttttttggaaacccattctagataaatatataa

SEQ ID NO: 172096 - DNA, 246 bp, Homo sapiens
aggacaaaaatagtttacccagcatttatactatgctctttggagctcagggtcaaagatttcagcaggagttttctttagtaacctaaatttacttactttcttttactacatcaaaatggttttaagtgtctattcacataacaatgaatgtgagggtctatccaatgccaacaagttggatcactactgaggtggaaatagcgtggcttaaacaaatcgacagcatataattgaggtcacaaa

SEQ ID NO: 172097 - DNA, 191 bp, Homo sapiens
ggattgggacccctttcctgtaacatccctagtgcttatagaatccattaagtcatgttttaaagcacaacttcccctgaaacaacctccaaaccccttaccagagatgctcttcaataattaaaataacaaagaagaggccgggtgctgacatctgtagttccagcactttgggaggcagaggcaggcag

SEQ ID NO: 172098 - DNA, 120 bp, Homo sapiens
tccatgctccagccgcccggagatcagagcttgccacgaaaggctgcttttagccctgatcacagggcagaggattctctagaagccctctcaggagagggtcttctgggcgggaagcgt

SEQ ID NO: 172099 - DNA, 338 bp, Homo sapiens
ctacaacttttccttaattctttagtttagctactctactgtccctctgaggagtgccatcttattttttgtgtgtttgcttctaatatttcatggttctatttcttttatttctagcactagaatgttttctttcaaggatgactttcacctatatgcaaggtagacaactgtcttgcattttgcatgacgtacacttccctttatattgattatagataaatggttatctaaatgttttgaatactagttatttcatagctatctgattataacaactattagataaaaactattttccaaagactatcgagattacagctgttgcaataaacatg

SEQ ID NO: 172100 - DNA, 984 bp, Homo sapiens
ggcccatcctccacaccccctgctcccttactgtcaccatggctgaccactgaggagggagccttggttaccagcatccagggagcaaggcagcttgttagttttagtttggtgatttaggtcccttttcctataggccattgctcctcccagagcctggagagtttcctggaaagcaaacatttgtgcagggcagcagttggaagcagggccacacactcttcggatccctgatctagttcccctcagcctggctgctcagccactcacactcgagggtgtgcaattgcagggtcagcagccgggagtgaacatctccttaaattgtgtgccccgggtgcctcactcaccgcaccctacttccatttcaaacccgctacactgttttcaagccttacctttaaaagctattttcaggaaattcccaccccattctagttttgtgccctccttgcaccctggagttttaactcacagcacttacaaaactaaagccaaatgattattgatgtatttatcagtcgaatgcctgctttccctgctatgctgtgagccccttagaaggtcaggactgagtttgtattgtacatcccaaagcccaacatgcagtaaagaagtgattgctgaatgaacaaacatagttttcaaattttttgacactatttttcactggcctggagcaagagtgagcatcctctttttgccgataagaaataatattgcctgaaacgagagggtctgtggctaccaaagtggtctgtgtgtgtgactgtgtgtttgcatagtgcaaatgtgtggtgaatatgcatatttgtgggtcatggtatatgtatgttcgtgcatgtgtgttgtatatattctctgtgttgtgtgtgcattgcattatgtgtattaaatggatgtcgtgcatgtatgtgtagtacatgcaggtactgcgttatgtggtgcctatatgcttggtgcatgttactttgtgtatgtgat

SEQ ID NO: 172101 - DNA, 375 bp, Homo sapiens
aaggggcaccagccactgtgccatgtacttggcaggagcgagcgaaacttcaggacggccccgaggaaggcatctcttcatctctgccctccacactcggaggtgaagcatcttgcctgagggctccagctcgtacgcagcaggactgagatcggaagcaggcaggcttgttcgagaacctgtggctctcatcactgtgctgcagctaaacgcagaaaaaggaagcacagaccagcttcccgcatgaatggaagtgcagagaccctccataaaatcttagcaactagaatccagcactgtaggaaaagaatagtcacccacagtggcgtacaccagcggtgagaggctggttttgtgtcagtaaatccagtcata

SEQ ID NO: 172102 - DNA, 133 bp, Homo sapiens
tcatgtgctcggcccttcctggtctaaatgcaatacaaatatttttcaaaagatgctaaatattcttgggaattcaacacaataagaactcacatttatacagtgcaaaagattttgtgagtcgagcaatctg

SEQ ID NO: 172103 - DNA, 597 bp, Homo sapiens
ccatctacaatttacctctaatgaccctcaatgtcaattaacttttttggtctaacttcagagatggttagtatcaatgtgcacataaaagaataacaaaggatgatgccatttaaaccttataaattactaatgaagccacatgactaattaacctagataaaaaacaaacggctaaatacccaaccttcaaatctttgctcaaatgttagctcctcaattaagttcccccaatccatttaaaattgtaactcattcccctccccacactccctatacctttaatctgctttcttctaattccatagctcttatacactattatacataggctggtaatttaatgtctcattgtctgcctagtcacattagaatgtaaactccaaaaggacaatatgtttgctttattcactgattcatcccaaaaaccccatgtacatagatgcttcaataaagctgtattcaacgtagatattttaggcccttctacaagatatttaactgcaaaagatgaacagtctcactgaaatttaaatggaagcatgatgaacaactacattaaatcacagcacattttttttttttttgagatagagt

SEQ ID NO: 172104 - DNA, 394 bp, Homo sapiens
ccatctacaatttacctctaatgaccctcaatgtcaattaacttttttggtctaacttcagagatggttagtatcaatgtgcacataaaagaataacaaaggatgatgccatttaaaccttataaattactaatgaagccacatgactaattaacctagataaaaaacaaacggctaaatacccaaccttcaaatctttgctcaaatgttagctcctcaattaagttcccccaatccatttaaaattgtaactcattcccctccccacactccctatacctttaatctgctttcttctaattccatagctcttatacactattatacataggctggtaatttaatgtctcattgtctgcctagtcacattagaaggctggggttacgtctaggt

SEQ ID NO: 172105 - DNA, 527 bp, Homo sapiens
gataagaaacaggaagtgctcccccaagccaagttgattctctgagcaacattgaggggcttcaggaacactcctgtgtatctggccacgtactccttagggccttgctttgtgtgcatgtttgtaccttgtatatcctctgccttttccaattcctcacagcctccaggcgtcctgacacagaccccacctctagttaaagaataaaaaccagagctcctctctcttgcactccagcatctttctgtaaatgctaaatatgtaatatcacatttgacgtaatgccaaaaagttacatttttatggaaaaaactgagagaagtaggagttttttaattcactataggtccctaaccagtacatttcccggctctgagagagctgtttaatttcttaatgacttcaagttttacctttatatcatttgtgaaggagaggaatcataattatagcttttacaaaccttttttgtttttgcaaaacttgtatggtttgcaaacctgttttgtgactgacatttttactgt

SEQ ID NO: 172106 - DNA, 327 bp, Homo sapiens
agaagttcttgaatagctctctgttttctgagttaagattttgtgttttggtgtgtgaagagtaagaggggtatcatggagtagatgggggtgaggtagaatgggaggtgtgcaagagaggacacctgaggaccgtgtgaaggcaagtgataatcagactaggaagctggctggacacaaccttccagtgggagaggcggaggtgagggggcagctgcttctttaactaatcaagggctcaggttccagtaccttccttttatccccatccacagtttggcctgtctcttctcatctgcaaaatctcctcttttctttttccccctc

SEQ ID NO: 172107 - DNA, 410 bp, Homo sapiens
gggcagcagaggcagagctcccctagccagccgaggagaggccaggaggactcagcttctctgtagggtggaggctgggaagaggcttcttttaggcccagcaggcagagcaagaggaggatggagtttgctcatgatgccagagtcccctgaatatgctggcagtgcgaacacagggagaagagctgggccctgggcaggggggtggggtcaaagggcaggaggcaggctgcatctccctaccacaagaagcctgggtggaaggggccttgtgaaggtaatgtttggctgggagaagggagggggctcctaaaggagagtggataacagcaaaaaactcctggatggtcagcctagcagtaggcaaggacttgagcggagactgagatcacgatggatatctccaggca

SEQ ID NO: 172108 - DNA, 745 bp, Homo sapiens
cccaggctggcctcgaactcctgacctcaggcgatccacccaccttggcttcccaaagtgctgggactacaggcatgagccactgtacctgtcttaaacatctccttatatgattgctgaccattcattcacattcctcttctgtgttggtacaaaccttttgaccatttttctcctgtgctgtttgtcattttcttgtttatttgtagcagctcttgccacactgatagaaggagtggtggcagctgacctctgccgatagaacacctgctatcgggtttaagcaggtggattcactcactgaactcacagcggcctaaccaatgagggctgtacttattcccattttaaaggtgaggaaatagggctgggcacagtggttcactcctgtaatcccatcactttgggaggctgaggcgggcagatcacttgagcccaggagtttgagaccagcctgggcaacatagccataccctatctctaccaaaaattcgccagttatggtgggatgcagctatggtcgcagctactggggaggctgaggtgggaggatcacctgagcttgggaggtggaagctgcagtgagccatgatcacgccattgcactgcagcctgggtgacagagggagacctgtaccaaaaacttaagtaacaaaggtgaggaaacagaggcacataaaatgaggtaattttcctcccttctgtgcctattttgaaaacgtttttaaaatctttacaagaaacg

SEQ ID NO: 172109 - DNA, 463 bp, Homo sapiens
atgaccagggcgctgaggacagcaggctcttccacagggccttggggaggtgccagactgcaccacttcctccctctcattctgttcctgggttagggcaaaaatcaggaagctctcgtcttctgaacctcacagccacccctttgggctctcccttcagaaagtgtgttgaccggtgggggcgcggtggctcacacgtgtaatcccagcactttgggaggctgaggcgggcggatcacctgaggtcgggagtttgagaccaacctgtccaacatggagaagccccgtctctaataaaaatacaaaattagccgggcctgtggcgtgtgcctgtaatcctagctacttgggaggctgaggcgggagaatcgcttgaacccgggaggaagaggttgcggtgagccgagatcgtgccattgcactccagcctgggcgacaagagcaaaactccgtctcaaaaaaa

SEQ ID NO: 172110 - DNA, 278 bp, Homo sapiens
gaaaatatgaaaggctgcacaccaggttgtttataaggcagggaagaattgcaggatggggaggggcaatggagaaccaagcacaaaaggaaaagatttttaattttttttgttttatttaatttccaatgtgatcatattttcattttattttttaaaagacaaggtgtaatcatatttgtgctaaacatataaaaattgtatttgtgttatataaatatataaagctggattcagtgacacaaaagggattttaatgtttttagaccaatcactgt

SEQ ID NO: 172111 - DNA, 512 bp, Homo sapiens
tgtgcagtgcacagaatgtgcaggggcgtggtgaagactgcacacatttggtgtgtttgcacagtgcgtaaactctccggggcacgagctcttaggagcgcaggactccgcgcttggtgggtgcagggggcgcctgttgccaggagttggtggggagccacagtctccggctgggtatgggggcttgtcgggcgtacggcacttgttcctcccagggcagagcggctgtatccgaggcgggtttctggggctcaagccccaactccccagccgccgggccggctaatagctccctgtctgtctcccgccccgcccgctccaggtctggttccagaaccgacgcgccaagtggaagaagcgcaagaagacgaccaacgtgttccgtgcgcccggcacactgctgcccacgccaggcctgcctcagttcccgtcggctgccgccgccgctgccgccgccatgggcgacagcctgtgctctttccacgccaacgacacccgctgggtggcggccg

SEQ ID NO: 172112 - DNA, 167 bp, Homo sapiens
aaggttatgatgtcagcagcactggaggtgtaaaccggactgttgtgtgttaatggatttaatgggccagagtgggggcaaagaaactagcagggttagtagagctgccaaggagaccaggtatatcatcaactagccgtgttgacatttagaaagccctcttgtct

SEQ ID NO: 172113 - DNA, 155 bp, Homo sapiens
tgagtggattacttgaatctaggagttcgagaccagcctgggcaacaaagcgagaccctgtctctaccaaaaaaagaaaaacgattcatccattttgttgcacaaatcagtaatttgttcctttttattgctaagcatcacatggcaaaccattt

SEQ ID NO: 172114 - DNA, 365 bp, Homo sapiens
actggggcagatattatggagatgaaagattcactgcccttgaagagcttattaacctgggcaaagaaatgaaacaagagtatcagacaacatttaatcaagtgggaaactgtcaatctctaccaataaactggagattaaggaagaccacagtagattaacaaagcctcagttaagtgaaaagattgggggaaggagcactggaggcaggcaaatagatcaggttctagtttatgccttttctagtcagctgtgaggccctggacaagtcatttaacctttgtgaaataagcgaattgaacttggtgatctttaagatcacatctggttctaacttccaatgacttctgaatttgaagtcttgc

SEQ ID NO: 172115 - DNA, 651 bp, Homo sapiens
aatattcccaacacctctgtaaaatgggtattatgcttattttgcatatatgggaactgagagtcagagaggataactcagtaacttgtatgtcatatacacagcaaggctgaagccaggcattgagctcaagctgtctggctctgaagcctggattctcttctttctctgctgacttctacgatagtacattcaaaggccctgtgatgggaagaagcatggcatatgaggttctcaaagggattctgccttttacatggttaggttgatagtttagaagaagcaaggggcccaggttggtgtttcacccttgtaatcctagcactttgggaggccaaggttggaacgatcgtttgaggccagtggtttggggctgcagtgagctatgattgcaccactgcagtctagcctgggcgataggctacagagagtaagttaccacatttcaaatagccagtatgtagcaaagccaaaatttgaacctaggcacagaagacacaccaaccttctatacaaagtgctatctattgccttggtgctatggaagcatttctgtcacatgctgtgctttgatgtatgtacaaaaggagatgtgggaaacagaaaatgaaataagcagggtttattttattttatttttttcattcctaa

SEQ ID NO: 172116 - DNA, 508 bp, Homo sapiens
tgtctgctcaggcagagtgtcttgaggtggtactattatgtctagtgtttgctagaatcaggggtactattatgtctagtgtttgctatagttccaaaagctcgattttcccgatattcttggaattcatcaggctctttgactcccattatccacaagaacagagtcaaatacaaatcacaaggccaatttactaatttgtattaatacgttattttatggagctccaccccttaatatgtggtattggtcaagttacttcacgttaatttattctcctcttctgtgagaagggaattttaactagtagctacctgatgtgacacttcaatgagttaataacatagataaagtgcttagagcattgcctggtacacagtatgtgctccaagaatgtcaaccactattgttagcacgctaggtagagtgctccactctaatatttgaaataacctgtgcctcctgcccaggactccctttctggtaaaagaatagcttaaattgcaga

SEQ ID NO: 172117 - DNA, 316 bp, Homo sapiens
taaaaactgggtatcaccatgttgtccaggctggtcttgaactcctgacctcgtgatctgcccgccttggcctcccaaagtgctgggattacaggcgtgagccaccttgcctagccttgttctggaattagtggtgattgttgcacgatcttgtgaatatactaaaactccctgaattttatgtaaaagggtgaattttttggtatgttatgtgaattacatttcaatttttaaaaattgattctccaaattatgtacatatttaaagagtacatgaaagagagggagagaaagaaaagctggatgcgagatgccg

SEQ ID NO: 172118 - DNA, 404 bp, Homo sapiens
agtaatctaatcaaatgagacttcactgtcctttgtactattttaattttcacaaagaaaatgtaggcatatggttcttgaggaataatgactaacactcatttagacataccatgtaccagatactgtttgaatcattttacacaaattaacccatgcatttctcatcatagtctgtgaggtatatactgtgtctattcccaactgtcagatgagaaaactgaggcccagagaggctaagtaatgtaaccgggccacatagcctagtaagtgataaagcagaattcgaacccaggccatctggcttcaaagtccatgcactaaaccacagcccgtgggcccagactggtggtttttgtatggcccctgagctaagaatggtttttacattttcaactaattga

SEQ ID NO: 172119 - DNA, 502 bp, Homo sapiens
attttttgaagggagttgaagaaaaaggaaaagaggtaaaaatattgaatgtaatagttctacattttaaatttattgtactgatgtttgtcgtactatgtaccaggcattttgctaaacactgggaatatagtggtaactggccctattgctgcctttttcctaataagatgatatgctggctattttattatcttatggcagaagtgcttttgttagatacacttcaatatcgacttaagacccttagaatgccaagatttttatgtttctcatcagatattaatcattaagcatataactattataagataagatattatactgctattcaagccagaagttcatttagggcagaagatactaggtgcttcccgtgtttctcaatgttctgtgtcagcctgtaaggtgagatgtatatagtctaaatgatctttcagttctcttatatatagatgggtaatgcggacatgcagttttgtgaaacctggcacttcaaaca

SEQ ID NO: 172120 - DNA, 421 bp, Homo sapiens
ccctccccaacctgcagaagccacaagcagtcttccctctgaaggctgatcctgacccattaccctaccccacagcctggagacatccaaatgaccccagcacacaaatggcccttctctgagagagtgtcctcatggctggaggccagaatcacactccagcttgctcttgtggttccaaagactcccatttgtaaattcctccgacatgaagatgcaatgccagcccatctgctctgccaacctattctgcaagatgggaatgaaaatgacttggcaacagcagatccctgccacccccttagaattcttcagggccaaactggcaacagcctggtatctctacgaagagtgcaagggagcccacattttgactaacacctactgtgtgccagttggtatcttaggtgacaacaacaat

SEQ ID NO: 172121 - DNA, 351 bp, Homo sapiens
acatacatacatatgcatgtgtataaaatgggatttgaattatagacttagacctgtcttttcatcaaaataaataaacaaacatgaatttacccatcagaaaacttcagttgtcaggacctgtgtctgatatttagctggggaaatttcccctgtcactggggtggtggatgttgtctcagagctgaacactgggctggtggggtcatcggaggatgatgaggatgaatcaaggctgttctcccactttctccagggctgtgcctgggaccatatgtgtatgtgtggctgagaggaggcatgggtcccaagacatgggtcatcagagactgaagctctccagggcagcct

SEQ ID NO: 172122 - DNA, 231 bp, Homo sapiens
cagcccttcactgactcaacacctttcccaccctgttggccacccacagacatgcaggtgactcaggagctgcagtcaggccgtgggctcatggtcacatgtgtcacctatcacgcattcaaggactcacgaaacaggaaggctgggatgaaacctcaggctcaggaggccagtgaagggaaaaatgcaagagcctggctctgcggacgtgttgggcgataacatgagaca

SEQ ID NO: 172123 - DNA, 532 bp, Homo sapiens
acacatgtagaacactggaaaaaatttagagaaatctagaatgaggaagaaattcagctgaagaaattgtaagtgttgacctagagaagagaagacatggagtgttcctgatagctgtcttcaaatattagaaagaccttcatgtgaaaggggcctggggatgtcccacatggtttctaagaggactggaactggtgcacacttcagggaggcggatttgtgatgagcctaagaaaggatttcctgagagacacaactggcagaagatggaacagaatgctttaaaaagtagtttcccatcatttgggatgttaaaataaaggataggcaacaacatatttaagttgaagtagattaatggaattgaatccatctagagcttgaaccagattatctttatgattacttttataaatctatacattttatatagtggcaagtagttgatataatcattaatctatatcccataatactgtattatggtttttaatttaaaatttttactattaaagtttaaaggagccaaatt

SEQ ID NO: 172124 - DNA, 413 bp, Homo sapiens
ctcccaccagatcccacaacactgggaaatcaaaatgagattggggtggggacacagccaaaccatatcagggtgtaaaagagttatatcttcctttgaatttcctgtcattctcttagtttaattccctgaaaaatcatgtatattttaggtggtttgctcccttttcccatggaatccagtggtaaaagcttataatattctgtgtatttagggtagggtttccaatattaagacctaaaaatatatttgtattaagtattttcaagtttctttaatctctatttttcattagaaaaaatgtgtctattaaatttcttgtaacctaagggaaacctcatctgtgaagaagtcattatctagaaacttcacttatctgattatttgatatgatgctggaaaaaggaaaagcc

SEQ ID NO: 172125 - DNA, 638 bp, Homo sapiens
agatggagtcttgctctattgcccaggctggagtgcagtggtgcggtcctggctcactgcaacctccgccttccaggcccaagcgatacttcgactcaaaaaaagagaagttatctctaggtaagatcatgatggaaattttcatcttactttatacctttcactgttgaaattattttacagttgaagtaaaggaaattttacaatatccaacaagagccgatgtcatttatttaatatcaaaattaatattggaaaaatgtctatactttaggctaccacccatctgcctgaattaatcagcattaatacttaattttaaatattacctgtcaacgcaggtcactgaatgtgatctcctttaaggtattatcatgtaataaactgctacaaaaagtctaattctctcaagagttttatagtcatccacttcattttcaggtcaacattttaacatattttcccatatttttttctgaagctttaatctctgcaaagcccatctttaaatttgaaggaaaaggtagaagagtgaggagcagcagtaattaacttgaatttggaacttggatataactaaagacacattttgcttcttcatttttatgtcagtttgcaaaggaaacagttatgatttt

SEQ ID NO: 172126 - DNA, 641 bp, Homo sapiens
caccatgcctggctaattttgtatttttagtacgtatggggtttctccatgttgatcaagctggttttcaactcctgacctcaggtgatccacccgcctcggcttcccaaagtgctaggattacaggcgtgagccactgcgcctggcctgaaaaaaattttaaagtttgagaaaatacaaaattttcatagtctccaagtatttctcctaagatctttccccctatgagggggaaagatagtaactttacaatggagaaacccagcagaaacctgaaccaaatgaacaagttcaacatcatcagtaagaagaactatcaatgccataactctgatggaatgcactgggaaggattccacatcatttttgtgctgtaattgccaaaagtgtgtaacttcagtccaatcatggaaatacatcagacaaacccaaatcgaggaacatttgacaaatagtgatcagtactggttcaagatgtcacggttatgaaagataaggaaagattgagcgaactgttattgcagtcctacaaaatggcgagagactaagaaataactaaatgcagcgtgatcctgggtggaatttgggaacagaaaaaggacattagtggaaaaagtggtgaaactccaataaggtctttt

SEQ ID NO: 172127 - DNA, 443 bp, Homo sapiens
tctatccactatttactttaaacttcattttgtgggattctgttcctgctagtctttgtgaagcttgtgccaacgaacatgttttctataaacagcagtaaaaatgtattcctattttctgcaaataaaaatgccatccatccttctggctcattctattcctcatttgaactctccctctctctgtcaaccttctattaggtacaagatgaaatatgtatttaatcatgaggtcacttaatcagtagatggtattttcatgatttgtttatggtattaaaacataaaatcaggatcattaaggttgctaacacctcacagaaagtggaaagcttttaattctgctgtaagccactgaagaattgtgttctaagctgtgataagtacaaatcatccagattgctttaaacgattactgacttcgcagaagacaaatcttaggt

SEQ ID NO: 172128 - DNA, 462 bp, Homo sapiens
gggtcacggtcaaactgttatgtcccggagccagactgcctgggtatgaatactaactccatcgcctacccactctgtgacctgaacaagctgcttaacctgagccaccatttttcctcaataaaatggtgataatcataacaatatttacccaaaaggatttttgtcaattttaagtgctgacaaaatatttaaaccaagtacagtgcttaaaacagttcctagtatatcataagagcttcataaatattagggatttaattcttggcatcttccgacatactagtgatcaagtttggcaaagtcgccaagtcactaaatgtgtgacttgcaagtcaaactgcctaagttcaacatttaccagatgggtaatcggagatgaactgttcaagttttctgtaactcaagtatccacaactgtaaaacacgtaataatacttaccttataaagttgtcagaagt

SEQ ID NO: 172129 - DNA, 270 bp, Homo sapiens
ctcattggagcttctcttagaaagcaaaccttccttttccagggccactggctcctctcaggacatctcacatgcagtgcaagtggccccactgagaaacattccacctatccagctgcacttctttctaaattggaagagtaaaggcaaaagaacagtatctactataagatccctgagaaaagccatcaagagacacacattctaatgccactgagagttggtctcttaaatattaagattggaccacaaagctgtacagttattcta

SEQ ID NO: 172130 - DNA, 850 bp, Homo sapiens
atatcacctcagatgagagtctggccgcttctaaagccaccacggagacagaggcaattcacgtttttgaaaatacagcagcgtcccatgtggaaaccaccagtgctacagaggaactctattcctcttccccaggcttctcagagccaacaaaagtgatatctccagtggtcacctcttcctctataagagacaacatggtttccacaacaatgcctggctcctctggcattacaaggattgagatagagtcaatgtcatctctgacccctggactgagggagaccagaacctcccaggacatcacctcatccacagagacaagcactgtcctttacaagatgccctctggtgccactcctgaggtctccaggacagaagttatgccctctagcagaacatccattcctggccctgctcagtccacaatgtcactagacatctccgatgaagttgtcaccaggctgtctacctctcccatcatgacagaatctgcagaaataaccatcaccacccaaacaggttattctctggctacatcccaggttacccttcccttgggcacctcaatgacctttttgtcagggacccactcaactatgtctcaaggactttcacactcagagatgaccaatcttatgagcaggggtcctgaaagtctgtcatggacgagccctcgctttgtggaaacaactagatcttcctcttctctgacatcattacctctcacgacctcactttctcctgtgtcctccacattactagacagtagcccctcctctcctcttcctgtgacttcacttatcctcccaggcctggtgaagactacagaagtgttggatacaagctc

SEQ ID NO: 172131 - DNA, 398 bp, Homo sapiens
catttggtacagtagtaaaacacttgagactcgtcataaatttagccccaaaggttagagctttaggaatttctgccatgggttgccatggttctgccacaggctgaggcagaccattgagacagatgccagaatattgggaccacattgtattataacttttgatattttacttttgaggctgtttaaagtattgttgtgtatgtgtgtgtgtgcgtgctatttcaggagtaggagtagggggttgggctatttggagaatctgatggaaattatagcaccattttccaaaaataatacacatccacagacacacacacacagagtatttagaaacagtttcaggatggccaggttagtaatccacctgtgacttgctgtaagggtagaaacttttc

SEQ ID NO: 172132 - DNA, 263 bp, Homo sapiens
gcggccgcctactactactactaaattcgcggccgcgtcgacgaggctgtttaaagtattgttgtgtatgtgtgtgtgtgcgtgctatttcaggagtaggagtagggggttgggctatttggagaatctgatggaaattatagcaccattttccaaaaataatacacatccacagacacacacacacagagtatttagaaacagtttcaggatggccaggttagtaatccacctgtgacttgctgtaagggtagaaacttttc

SEQ ID NO: 172133 - DNA, 181 bp, Homo sapiens
ccgttctgcttctgccctcaccgaccctgttctcatataaatctggccaacgaactgtttagcaaactgttccactggagggcagccccagtgggtgacagctccccagcaggaccaaaacacagcgacttttagatgtggtggactccctgaaacatggttaagactcctcttctgaaat

SEQ ID NO: 172134 - DNA, 272 bp, Homo sapiens
acacattcagcagtgtaaggagaacaaatggtcaatgaaaaagacttcagtgacgtatggagacgacaatgggaccatgtgaaaaaatcaagtaagaagataattttaacattcatacctgagtgtcaaacattctataatgaggaaaattagacttaaataaagctactaggtttccttaatgggacattattggtgactttcaagataatcactggagaacaaaaatcgaggacagtaaattaaagagtgaatggaaagcgatgaagcag

SEQ ID NO: 172135 - DNA, 303 bp, Homo sapiens
ggagaaagagtgatagggagatatgggggaaggggcaagagtcaggaaaagagaaggccaagtgtgggggctctgggagagaggcacactttcctggactctgcctggcagccaactctctccatacaagtgcctttccaggttatggtcattgttccctcttgtctcttcaaacctaggagtcagggaaggcttctcacaggttccagcccccaaggcgctgtagtctccctcttgtttttcctaaaccccaccctcagtattgtaaatagtccctttattaaactcccctcaagctcctga

SEQ ID NO: 172136 - DNA, 299 bp, Homo sapiens
gggattgctggggtatataagaaactgcaaaactgtattctgaagtgattgtcccatttcacatttcacatttccatcagcaatgtatgaatgttctagttgtacatctttttaaaaatcaaccacatgtccctttttgcaatagttgtgacaggcttttcagttttatttagatagtgggtctcttcagtattcctgaaaagagtatgaattccccaggtagcctctgttgtggtattttttagaaagagacacggtagtactgtggcatatccctccctacactccgcctcttggtg

SEQ ID NO: 172137 - DNA, 459 bp, Homo sapiens
ggttcttggaataactagagattttcagttgaaacctggacattaattgaaacttgatcttatctaaattttctggtttagctggcttcctttcatactacttgaacagagaaaggtgaagtaccacattgtaactgccagttgtagatagaagttcagattcccactcagccgtcattgatatcctagctttcttactgctaggcaggggttgagtactggcctcctgctaggtctccattccctgtctgggaggtgtagaaatgccacactactgttccccaggtagcgacccctgagacatcaagaccaactcctcctcttcctctcctttctcagcttattcaacttgaacatgacaagaatgaatacctttatgatgacccacttctacttaatgaatagtaaatagattttctcttcctcgtgatggttttttaataatattttcctttctcc

SEQ ID NO: 172138 - DNA, 514 bp, Homo sapiens
gctttgtcatttatcagctgtgtgacatgaacctgctctgactcagtttcccacactgtgaagcacaaatgaatggcccgtctgcttcgcagagttgcttgtgagcattaactaaaacagtactttgaggcagccagcatcgctatgatgaactcaacggtgactccgccacctgcttcggagtcctaactctaaacctcacttgtctgtgaccttgggcaattccagtcacttgtcccagccctcctcactggtctacccagcaaatgagattaccatataatgagataaaataagatacctaataaaatgatacaaacgagatatacagtaagataaaatgagatagggtgagcactgcccaaaatatgggtcagggcttagcagttttgctgatacagcaaggtggggagatggccactaatgctccttcatgtctgggactcccgtgactcttttgggggcccagatacctctgaaagtggctaatgcacagggattatcctgccagctg

SEQ ID NO: 172139 - DNA, 401 bp, Homo sapiens
aaagcagtagtttttgtttagagagtgctaattgtgtgccaaagcactatcctaagcttcttatatatctttacccatttccttgcctcaatgactcattactcatttaattgtcttaataactccttgaagtaagtattattgtttccatctcacagataatgaaactaaaatttagccaggttaaatgatttgctcaaagtcacaaagctagtgagttggaaagctgggattcggacccaagcgatattcccctaaagactgtgctgttaaccttcatgaatgctgcattatttacagtgcgccagatatttagcaaaatactgaacattttgctgtttttctcactgttatcacaaggcatttcaactaacgtaataataaaagactctctcctcaca

SEQ ID NO: 172140 - DNA, 463 bp, Homo sapiens
tggatatccaccttcccaacctccacctgaaatgtgcccatcgagtcctggcaccttttaccatttcttcacaatgaaaaaaactaaacgatggaagggaagggagtacccacgatcaccaaaccctgtcctctgcaatgtgaaatgtgctttgaagtcctttcaccctgaggcttgcccgccttctgctggtgaaagaagctgggggctaggcgcggtggatcacgcctgtaatcccagcactttcggaggccgaggtgggcggatcgtctgagctctgcaacccagagagtgacctgcatggagcgtgccagctgaatcccttgtcctgtgtcttctggctgagttctaccataggaaacaccgccacgtgggagaacaggaagacattgatgtctgggtgcttattcctaaagcttcctccctgaggtcacctggaggttgctgcatctctctactgaag

SEQ ID NO: 172141 - DNA, 275 bp, Homo sapiens
tgtcactactatgctattgaaaagttgatttctctgcaatgaaaggaaaatgagcactgtttatattcctaataaactacaaagtatttcagattaaaaaaacacactggtcagaagctcactgtgaaataccattatctttatattactggccaggctttgctaagctgtcaaatactgccctcaggtggcattaatggctcaatgcaagatgcattatacagcgttgttaatcatgctaacaaaaccatgttaaaacaaataaaatcaaaacc

SEQ ID NO: 172142 - DNA, 311 bp, Homo sapiens
ccccaaccgcctctcagccatgcgggaggccttcgccaggagccgcagcatcagcaccgacgtgtgacctgggcccgcccccgggatcctggccttgaaggtcctgagacaatggggggattcctttggcacacccacctggccccaggccccaagtggggcttggctgagccctcctggaatccctgtcctcaggggaggcccaggcttggggagcccccaggctcgtggcagggataaggctcattgaacacaaatgtgtcctggggggaggcacagctggggcctggagctagaaggaccaggtgacc

SEQ ID NO: 172143 - DNA, 611 bp, Homo sapiens
cacgtcagcatgtcagcagcggtcatagtctacaggattgtaaatgaccccatatctttccttcagtaagcctcaaagcttaaatacttaatattacaaggcaattgatctagaaatagatgacgctggttgttgaagacctaggtcttttagcctgggtcaccataagtgatcttttttctctgaatttaaaaaaaaaaaaaagcataattacaaagcgtaattcttccctcatttttcataatcccacagaaaactgcgtgtagggcagctcaaccttatcaacttatgcctcaactacatgggaaaaaactccccaataataactccccagtaataactcaatcatcttttaaagctgggtaagaaacatgcatcattaacaagctcaatgctcacagaaagacatggctgaggtagagtcctgaagcacgtatggaaaattttaaccccaccagcaaagacaccagcgaggttacccacacacatctctaagggccaggagagtgaccatcagtcccctaaaaaattggaaatggataatatgaatgcaaaattgctttcttcttcctttttggactgtggccattaccacccaaaaggccactggt

SEQ ID NO: 172144 - DNA, 457 bp, Homo sapiens
ggagttctcaggtcagaattaattcagggcctctgccttctggttgaaggttttcttaattatacaattcaccacaaataggactttcaaagagttttcaactggatgtggacatgaaaatgccacgatcctttacacaatgacgtgtatgtcactcaaatttctaaaatagatgaaaacctcaaaactttaacgccttttaataagtcaagaccatctataatttctggattgtaaaaatcacatgaaatgtatgtattttgctttaaaatatttcaagcaaaaaaaggtaaaacaaattcggcaaataattaacaaaagtaacatttagaggatgactatatgggtgctaatcacactatactttctacttttatacatggttgaaattttttgattataaaaaattgttaatttaaaaagcacaggaggttgaggatttgcttttgtaaaaaaa

SEQ ID NO: 172145 - DNA, 167 bp, Homo sapiens
aagggagataacctaacaatgataaagcagtcagcttaatcaggacaaagcaaaaacaagaggctggactaaacacatgcaaaataatacttatttttaaaagatgcctcttgcatcaacattcttgttcctcctcatgttttagctcttatgataattaaataaaa

SEQ ID NO: 172146 - DNA, 324 bp, Homo sapiens
tccctcactttccagttgggaataaataaactccatatcctctaggattgtcgagtcagtatctttgacagaaaaccctggctgagaagctcccactgaggagcaccatctgaagggcttggcacaatgcctggcctgcaaaaggcatgcaggaaatggtacttggtattatctaagtccatctccatggcttcccactagagaaaaagtcattgtggagaacatacttggatgtatgaaggcaatcagaaaaccagtcaatggcgtgctttcctcttctctaacctcagagtggatttggatgagaagactgctcatccccaa

SEQ ID NO: 172147 - DNA, 169 bp, Homo sapiens
gggcatctgctgacagtggagagcagtggtgggggaaggggcttgaggaaggtggcacccagaggggtggagaggagatgtctgactgagggccatctgaggtcacggtgcatcctgaggacagagctgagattggatatcaacgatgtgggctcagcagccctggagt

SEQ ID NO: 172148 - DNA, 132 bp, Homo sapiens
gaggtcgcagctgcagtgagctatgatcactagtcactccagcctgggtgacagaataagaccctgtcagaaaagaaaagaaaaggaagggaaggggaacggggcaaagaaaagggaagaaaagggaaggga

SEQ ID NO: 172149 - DNA, 633 bp, Homo sapiens
aaacaaacaaacaaacaaaccaggtcccacaggagccagtgtctcttacacaactccatagactgagtttccagggttctgtaaaagctatgctaattaaaagagccatcacagggaagtcaaagctatagcttccttatgaggtatttatggttcatttatagttcttgagtcttgatgcaaatttactaatcacagggatcatttttactacaagtagtgttacctaataacagttgaggtacctagttttacagatggccagggaacagagccaaaagagttaactgaagcttaactctactcatacttgtattatctgcagtgcctttcattaagaagtattccataatatttcttttgcttattttgatgtaatgtttttactctttttaaatttattattattgttattattatttttgagacagagactcgctctgtcacctgggctggagtgagctgagatggtgccactgaactccagcctgggcaacagagtgagactccatctcaaaaaataaaaaaagatgagttatctatttcttcaggcaggttcttcattagtatttcttacaactgaagttttaatgagaattggaaagcaaaagattgaagttagccaattttgtt

SEQ ID NO: 172150 - DNA, 514 bp, Homo sapiens
cttataaactaccactgtaaatagacagactcattaaagtgaaaggacattttaaatcaattagtaagcaaatcaattaggtggcaaagacaagattatttttccttatggtagttgaagaataatgcttaacctgtcattctaattaccaagcacggtgttctctttggaagatcatttcaacaaaacattattttcatccagaatttgaaccttgagattgcatggtattttagaaatctattttagaaatctttggcaaaggttactattaaaacaatcgcattcatggaaaatcagtataagagcaactaaaataactcacaataccagtaaaatcactttgtcatcttcttaagacttttaaagagcatttgtaagtaactgaatagaaggccaaagggtgtgtaggtagcccagaccatcagtgggcagccagggccagggcaggggccacggttgcagcctgcattcttctaaagggcagagcaaattaaagttgaagcaggagcta

SEQ ID NO: 172151 - DNA, 206 bp, Homo sapiens
tggtcaagcttgtctcaaactcttgacctcaagtgatctgcctgtctcggcctcccaaagtgctgggattacaggcgtgagccacagtgcccagcagaatatcctgatttttaaacattgggctgcacgttagattggccgggtccagttttgtgtagaacctgggcctgagcatgtgaaatgtgagctgggggcggtcgggcagt

SEQ ID NO: 172152 - DNA, 647 bp, Homo sapiens
gaccctgtctctaaattaataaattaattaattttaaaaataaaagaatagttgttgcttcttccctcaattaaggatacctttaagattttattggtgtatttattattaatttaaggctgagtttgactagatcttactagggattcctttcagtatatcacaaactagttatcagtgcctaatatttatcacaaatgtcccagcgctcctatcctcctttgtcatggtttatttttccccaagacaactgaaacgatagcatgtacttccatcagtaactgtggctcaccatagcaagtgaaattttgaaatgttctttccaattagaattaacacctttagaacactgtagtagtccaagaagcaaattgactaagtaatgatgcctactcagctgacagcattttgtgattgtttttaaaatgcacacttgtcggccgggcacggtggctcacgcctgtaatcccagcactttgggaggccaaggcgggtggatcacgagctcagaagatcgagggccatactggccaacatggtgaaacccggtctctactaaaaatacaaaaactatctgggcgtggtggtgcgtgcctgtaatcccagctactcgggaggctggggcaagagaatcgcctgaaccaggg

SEQ ID NO: 172153 - DNA, 606 bp, Homo sapiens
gcacccgcccaagcctcaagtcttgtctagctttccaaatgatctgagaatttctgatcctttttaacacactccttttttgcttaattggccaaagttagctttagatcgcctgcttatgcttggctagttgctgtactagactcttccatgtctgttacaaattttccatccaaacaaccctgaggtaggaattattactgtcccctttttaccaatgaagatgcagagtcagagaagctgttccttgcctgaaggtcacatagctaatgagggccagagctgggacttggagccctacaagctggctccagggctctcacattgaacttttgtgctgatctgcttctcaccctggctattaggtccaggcagaatgactgccaaaatctctagtgaggagctaagtcaaaagttggctggaacaagccaagtataagaaatggggtattgaagaggagacattgaacgggatgccgctcctggtctgagcctggctgccaggttcatgccgtgctccaccgcacattggggagctcagagctggacagagctggaggctgctgcagacttgatgcctagagcttcctgtccaccatggagctc

SEQ ID NO: 172154 - DNA, 481 bp, Homo sapiens
ggaatttgtttgttgtttgttgtttccttttatctccttccacgggcaggcgagcgccgccgccctcactggccttgtgacggtttattctgatgagaactgggcggactcgaaagagtccccttttccgcacagctgtgttgactttttaattacttttaggtgatgtatggctaagatttcactttaagcagtcgtgaactgtgcgagcactgtggtttacaattatactttgcatcgcaaggaaaccatttcttcattgtaacgaagctgagcgtgttcttagctcggcctcactttgtctctggcattgattaaaagtctgctattgaaacttctaaaactaggcctagttttagaagtttcaatagcaatatctattaacattgtcatgtacgtgctttgtggcagaaatattcacaaaaaataactttttaatttttttttttttttgacacggagtcttgcactgttgcccagg

SEQ ID NO: 172155 - DNA, 2621 bp, Homo sapiens
  misc_feature (1)..(2): n is a, c, g, or t
  misc_feature (606)..(606): n is a, c, g, or t
  misc_feature (1722)..(1722): n is a, c, g, or t
  misc_feature (2252)..(2252): n is a, c, g, or t
nncacaggaatgactcaactcccacaacaaggcacatcctttgtgaaatttgagaatgcccagattaaaaagaagattcttagagcagaaacaggtcacattcgaagctcagaatagcatcagaattttcaagaaccacctctgaacgcaggatggtggaagagtatctttaaaaatgttgagggatttgtggccttcagtgctgccaaggaagcatcattcaagcctctcttcccactgtgggcatgtctaaaccagagtctcctaaagagcccgaacagctgtggaagccttgaaacagcgaagccttgaaacagccgagtccggggagcccttctgaaccatggggaatgctcatgactgtgtggtcctagacccagactccaagcactccgggggctttgggttggtcatctgccactgtggaggagatggatgcagccatgaatcagggccacaccaggtggttggaagagctgtggaacctcagagagctgtctgaagagaagattctcaaagactgggtgcccatgtgactgtggaaaagatatttgttggtggcattaaacaggacaccgaagaacatcacgtaagagattattttgnacaggataggaaaattgaagtgattgaaatcacaactgactgaggcagtggcaagaaaagggtctttgcttttataacctttgatgaccacgactccgtggataagattgtcattcagaaatactatcctgtaaatggccacggctgtgaagtaaggaaagtccaggttgcagcaagacatggctggtggctcatccagccaaagaagtaaaaggggtcctggaaactggtggtggtcgtggaggtgatttggtggaagtgacaagtttggtcatggtggctttcatgccaaccatgatggtggtggatatggtggcagtggggatggctatcatggatttggtaataatggaagcaattttggatgtggtggaagtgacagtgattttggcagttacaacagtcagtcttcaaattttggacctataaagagaaaaaactttggaggcagaagctctggcccctatggtggtggaagccaatattttgccaaaccctgaaaccaaggtggctgtggtggttgcagtagcagcagtaggtatggcagaggcagagggcattcatttctgccggaaacaaggcttagcaggagaaacaaggcttagccagagcagcgacagggaagccacaggttacaacagatttgcgaactcaaccaggcacagtggtgtcagggcctagctgcttcagggatatgcttcagacaatactcatgtgtatgggcaaaagactcgggggctgtaattgtataacagggcattttagtttctgttctctggaaactgaaaacagtccaacaaagaattttaatgtagactatttttgcacccatgctgttgattgccaaatgtaatagtctgatcatgacgctaaagaaatgtgtctttaaaacattctgagggaaaattgtctttttttttttagtttttatgtttttgtgacagggtctcactctgtcacccaggccggaatggagcgatgtgatccttgttcactgtggcctcgaactgctggactcaagcagtcaacctaccccagctgcccgagtagctggggctacaggtgtgtgccaccacacctagctaatttttttatgttttctagagatggggtctnaccatgttgcccaggctggtctggaattcctgtcctcaagcaatcctgaacctcccaaagttctgcaataacaggcataagccatcacacctagccagaaacttatttttaatgtataattacatacccaaacaatcaatcaattatgatagcagaagaaagatatttttagatgtccagcatctcagaaatttgacctccagtgtgtattttctcaaggaaagaaactattagaggattgtgccaccaagtaaagtaaaccaaggagaaatggaagacaccaaatataagaaatggaagattcagtgtggggaagagattggaagtcttaggacgacagctgcagcaggaccagagagtagccagcctgacatgtcatccagagtgctccaggaaggcaagggctccaagagagatgtcttcagagaaagatgcaaatcatagattccttcacatggttgatcttgtttaaagtattgctcagaaggggttcagaagaccaataatagtgacatagaaaactaagcaancaaaatataaattcataactccatgaaaagcaatttgtgctcaaaaggaaatatgatgacagctaattatagatatttttgtgatggacagtataacatgtccctggaaaaatttattttctacggaattgagccctaaaaataccagagcaaggaacctatagcttaagagagtcctaaacaacatgatgaaacctcatctctaccaaaaatacaaaaattagccaggcacggtggtggatgcctgtggtgccagctattcgggaggctgaggagggaaaattgcttgagactgggaggtggaggttgcaatgagtgcagattgcaccactgcactctaacattattgacagagtgagaccccgtctc

SEQ ID NO: 172156 - DNA, 723 bp, Homo sapiens
ttgcctttgtgttgcacacttatgcaagcttggttgcctggattcaggactccattggggtccaaattcttgcttcagagagtctttgttctgatggtaactttaattaagagctttgcaagtccctctgtgaagagttgctccattagaacttaagaactgtccccagagaggtcgttcctgtttccgatcctccaaactccaagcccagatttaccagatgcctcccttagagggctaacgagcaggcactatgggggcagagaggtcctacctgtacgggatacaaggattcacacttatcccatcatacccctgctgaagggcattaaatgcttccctgttggcctggcattcaaaaattggagaattgcattttgaacaccggcctctgcaaatggagtttgctagggttaaactgtgagggagatgggaagtgaccttgcacggtaagggagagctgcattggtcaataagacttcctagaggaagcagagcttgggcagccagtgcaacttgcagatgcagagggagaggaaaaagctgccaggcaggggatgcagcatggtgcagggcatggaggtggaacagggtgagactgagagatgggccacagaagctctaggtcaccacacccagcggcgttccgctcctctctctctttctctctctcatcgcttcacccctgtggtccctgcaaagttgggcccatttcctcttacc

SEQ ID NO: 172157 - DNA, 572 bp, Homo sapiens
ccaccatcaactttaggaggagggaaaggggtggctctgggaggaaaagccagaatcccctctagccagcagagagagaggaatggctgcatgttttctcccccaatccaaggcactaggttttggctaggttgcaggttccaagctgctctcctgctgtgtcggtgagttctggttaacctgcaacctcctgatgtggccactgcagttcatcgagtcttcagggactccccatggcctggagtactttgccttgcttacatgggagaggagaatggatttatagagaacatcatctaaatccaacttgaccattgtgtggccacacttgctagattgctatagtctaaatctagcattgtagaaagacgggggagcttggagctgcacaaacccaggtctggaacgggctccttaccttggaaggtgaatgatcctggtaggactcttagcctccctgggcctcagtttctttatctgtttcatgggaatgaggatctcggctggttggttgggtgatgcgggggctgtgtgaaaacagcttgtcaatacaagctgaaatagaaatattt

SEQ ID NO: 172158 - DNA, 970 bp, Homo sapiens
tatgttgaggggactccaaagtaggatttctcaccacactggtaaaatagggggactgcctattttagtctcatttagggataagtataatggctgtttcctaaattcagagttctgtagtaaactgataactaagagattcttttctgtcatttttcaaataaagcattgtgacatctggtgaaagaaaaaaaaaaaaaaaaaaaaaaaaaaaatgttggggggggccggggccctggaaaaagttttaaaacccattcgggtggggggggggggcccagtatagtgttaggtgtgaaccggggccaaagggggtcccaaaggaaaaccggggccaggacacaagggcggggctctcctcacaccaattaaaaaagcccggggggaaaaccgaacggttccggaacaaaatcccgaagagggcgcacgagggggaccaaaaggggggaccatcacaagcagggagtccaaaggaaagcgcgagaacattcacattaagccaggagcgcgggacacaaacaaaacacacgaaaacaacaacaaaacgagaaaaaacagagagagacacagacaacacgaaagaccagcagcaaaacagagagacaaagagcgaaaaacgcaaccagcaaacacacggcgagagccgaccgaacagcgagacgcagacgaaaagaagaataagccaagcgagacgagctacaaacacaaaaccagacaaagcacagaaaccaacacagcggaacaaagcacaaacaccacgagaagccgtaagagccagggaggagagacccgcaaaagagaaggaaacaggagcaggaagaaagaagcgacccgaaaactaacgaaaaagcggccgaacaacacaacaacgggcacaccacgaaacggaaaacagacaaaacaccacgcaacgcaacgacacagagacgaacagcgcggcaaagaggacacacacgagcaaacagcagaa

SEQ ID NO: 172159 - DNA, 251 bp, Homo sapiens
tgtgctaaggaaagaatgagcttctccatcatacacttggatggggctttctccactgtcagttgcccattgacttggtcctaaaagtgggtctgctaccttgttcctcacgtgatccccagggttgagtcttctggacacccctaggggagaaggcccctaaaggccaatggtgtgctcacatgtcctcctggaccctgctagaagtggggcagaggaagtccagctatggctttttacatgcgcaggat

SEQ ID NO: 172160 - DNA, 271 bp, Homo sapiens
gagtgataagtacatccactgagctatgaggctgctacgggtcacaggagaaaggaccaagccaagaaagatggcaatggggaagaacaggataaccccaccctgatcatctctatgtgtctttgccctgctggggccccagatggcggggtgtaagagtgctgatttttaactagataaaaattattaaatccttcctccttgggtccctctttggtgcccaaccatagggctgagccccatcagctcaagctcacatagtcacagaccg

SEQ ID NO: 172161 - DNA, 145 bp, Homo sapiens
tcgcttaaaatgagattagagaagagtgtgaatggaggagaggtctgaggactgagttttcaagtgccccaacattaaaagattaagaggaagaggaggaatcaggaaaggagactgagcagggatggccaatgaggtaggagga

SEQ ID NO: 172162 - DNA, 1244 bp, Homo sapiens
tgacctccagagctgtaaaatagtacatttgttttcagctggtaaatttgtggtaatttgtaacagtggcagcaggaaactaacacatcatcttgctccagatattgacacccagactcttacttgggagagaacaaaattctatcttgtctaagccaatgccactttggcctttgccttagagtcaagcctgccgaaggattttctgtttcttttgacaaagacgcagggattgaagggggtggccagttgctcaagcagtttagctgcatggcagaaactgctagttgtcatccctcaatatccatcctaccttttttccatagtaattgaatttcagctgggttcatcatcactcagaataaatactatatttcccagcttctgtggcagctaggaatggtcatgtgactaggctctggccagtgagacaccaactgaaatgttgtaaggctttgctgtttcttcttcagttcttcctttctcctgctccctggagctcggatgatgccatctttgatacaaggtcaagaccccagagcaacaaggtagcaggaacctgggcctctgcaccatggaaggctattagacaaccttgctaggcttctccaggaaaataaatttctaccttgtttaagccactgttattttgggttttctcccacttccagccaaaacaaatcctgacatgcagtcatttctggtactgcttctcaagcttttgtctccattcactcaagttttattctgaaggggatggttttattctcttggtaagtacatctttactagattcaaattttaaaagtattatgatgatgtctcttcctaaccattttacatggtatttagaccaccaaagatgacctcacaaagtagctttatacttctgggaaggaacaccaggccaccagcatgtgggaattccattggtggccagctgaagcacctggtctcattcactttactggcttcactgcaaactgcgtcagaggtttccactgaaatatcacccaaatgagcccagtgattatcctaaacacttgaatgaagagctgatacataggagccacttttgcttctgccagagtcccccagacttgttcctacctgcagatgccctgttattcagtccttacctaaatacctgctagagctgcagagtctataattcttactgttcatcctaggacacattcattacttgaactggagaggcagcaaggactgcccacacccccaaa

SEQ ID NO: 172163 - DNA, 345 bp, Homo sapiens
ttaatctgtaccctcccctgtctccctttcttccctcctcttccatccctatttctcttctctttgcttccattatggcagagtatcaagtcccacgtctcactctcatgtatccccagaggaaagagctgctcacattgaattgggagcgtttattctgcacctgagtggagcatcagagctttgcaatattttccgtgttgaactcatggatagaagtcagatgatcctatgaatgaattttaccttgggatgagttaatcaagactcagttccccagtcagttttctggaacgccataaaatttaggaagattagcttgtacttgctgcttgggcttaaaca

SEQ ID NO: 172164 - DNA, 1069 bp, Homo sapiens
  misc_feature (850)..(850): n is a, c, g, or t
  misc_feature (852)..(852): n is a, c, g, or t
gcacagaacaatagctctaagtttcccagaccctcgtgtggaggcttggtcaaaaggcgaaacctgaagaaatactttagcacaggatgaaggaggaagtggcagaagggtaaaaccaacccctgtcaaacttcaccaagtggctctgccccggactcagctccaccacatcctactcttattgggagccaagcaagaaggactaaggtgactgggacctgggcagtgggagaatgggcagtgggagaaagatcatgaggaagcagaaggggctttgttttggtccagggaaccaaatccagcactataaccgccaccagtcctgggagtcactggcagaaaaaatcagaacagggaatgcaaaggtgctgctctgcctctactgagcacccctccccatctctaagcctcattcttatattctataaaatggggattatgacatccacctgtgtgtcctgttgacctgtttgtaaaggtagaataaggtaagtgagtatgaaagcactttaaacatgtaaagcactatattacaggctttttctcactcaactgaccctagtcattaggatgggtagacatgacaagaaggaagaagaatgcagatgccggggagcagagactgtgaacatctcaattttgcataacagaactatggtgatggtcttatggagcagctagtccaggttctcatttgacaaggaagctaaagcccaaagaggggaatgaatgttccatggtcaagagatgatcagaggacaaacctggtcccacggatgccaggccagtcctttatcaacccaaactctggttgcccaggtgaaggtctctagaggagaacgcaggccanancaagggggcacaccggaaacgcgggaaagaccacaagaggacagagctcaggggggtagtagctacatggaaaaaagtgaagcacgaagaccaaaaaaacatataaaagaagaacaagacgcatacacagtaatgtcaacaagcgaacaaatactaaagcgactaaataaatatttatatattgctgttttttttttttcttcttttaggagacgga

SEQ ID NO: 172165 - DNA, 673 bp, Homo sapiens
gagagggaaggcggggaatgctacagccccaaccaggaggctgtttaccaggctatttgagaagaaactgataacaatatcaagtcacttcaaatagtagaaaaaacccacttgagttcctaagacaggaccagtaggatggtcccaaagcccaaccgaaatacaggtaacagtttcatatccatcgacatacagaaaccagtaattagtctgagcagaacaatattgacagcaaacaagctcttggcaaagaaagaggttgagttccagagtagaaagcaggagttttcacaaagaagaaaaacgacagagtgtaccctttcttaaaggctttgctcagctcacaggcccagcccagggttgaggcaggcccagggcagggctccctgtcctgctcgggggccctgagcaagccttaatattatggtcctccagcacgctgctgaagtcggcagttggacccttcctggctgagagccatggatacttggtggtgtgaacagacactcatggctcccgtgtgaggagcccgtttccccacagggatcagatccacagaatatgccgcctttggcaggctgtcaaagggttcctttattctcctggggcaggactggctgagctctgctctgtaacctttggcagagatagagcactgatgtcctctgacgca

SEQ ID NO: 172166 - DNA, 581 bp, Homo sapiens
gcaggtgggccatgtgtcccctgtccctaggccctctctgtctcctccacacagaggccaagagcctctgcaggatcttgaggcccatgatgttgtttgctcacagcccacttcactcactgtgggacctgcttggtgcctggtgaggactgttcctgcccctagatgtggtctccagcagatatttgcttcagcttatatttttggacaaaggaatggagtgacatggataatatttaaattggaatggactgtgccttttatctgaaaaagttctctaattatatttttcttatcctttttgatgtctcaagaaaactcactaagatccgtttatacaaacatgtttgaatttgacctcacaatggactaggctttgtaggagactgaactcatggtaatgaatattagtaattttggtggaatttttctgtggtaaagaatgaaacaaggaataccaggaggattgggccctaattttccccagaggggtccttcttttaggcctcactttatcttctagcaagacagctgtggtgttagacttctgctccttggcctaaaaaaagctggggccctga

SEQ ID NO: 172167 - DNA, 145 bp, Homo sapiens
ggtgattctagaggatccggaagctgcgggaatcatctagagcttccaaccaaagggaaaagaggaaaattttgctagctcaggctctctaaggatctaaaggaatggatttcacttttctgatattgcccagccccacccactc

SEQ ID NO: 172168 - DNA, 120 bp, Homo sapiens
aaagcaaaccatgctctgtccagagatgaagataaattgggcatgataaaaaagaatcttccttggaaaagaacgacctgacagtgtgatttcttctaagatgtttctatctatacaccg

SEQ ID NO: 172169 - DNA, 741 bp, Homo sapiens
gccacggtgtggcctcagcatcagggatatttgcaacatccatatggcttccagaacaagagagcagggaggtcggcatctacgattaataagacatagagaagtcattcaccagaagtcctcttagaaaaagcagtgcttttgactggaaaagaatgatgagttgcaaaagtatgatagaggaaactgaggtactgacaggtcagagcgcctccgagagaaaaaggcggtggccttggagctctggtctccttaactgcaccctgggaagtcttcacacggcctttcttcccctggtggtctaatctggagtcagatccagccgtcagctcttacagacggggaaggaccgggagccaacgggaaaacaacaggtttctataattcatcattcactcctttctgaaaacctagaatgaaaaagtttagcagctcagcgccgcggcctctctccattctctccccaaacacatcggcctgtttgttctctttcatccccgctcttcctgttgcattctgccggttcaatggggaaggagtgaaaccggatggctggacccagtgcggggaaatgacttcagagccacctttgtttccctcattcctttgagcgcacttggccctgcgtctctatgaaagggcttgtttgaaccattcggaacatccagcaagccagagatgctgcggccagaaccgctcgcatcttttcaggctgcctgagactctgggttaaactgccaa

SEQ ID NO: 172170 - DNA, 417 bp, Homo sapiens
ctcctgctttgctgggtatctctttccataaaacccacatctccacagaatctttgagcgggatcctggcggtcacctagcactcataataagtcaaaaaaaaaaaaaagtgaggactgcaaagaagtgacttgtaattcagtttaatttcaattcaactaatacttactgattctgagtagggggtcactgtgctatgctctgaaaaaggacaaaaatataagcacctcaggtccttcttgccaaatagggatatgaccattaagtgcacacatatatttaaaaaatcattctctttatggcttctggattaaggactctttctctactctgagtttataaacatactctccagtattttcttgtaatgctttagggattaggtttttgttatctaaaatacttttacaaaacaaa

SEQ ID NO: 172171 - DNA, 487 bp, Homo sapiens
tgatgtgtcacgaatcaaactgtgtatttgaaatcaaaaacagaataaacagtttacaagtaataactctacaagatttaaaagtgagggtaatgacttccatagatatgtctcctagagtaaataggaaatcgttaatgactatttcatgagtgaagtttcaatatattttttaaaattcagaataaacgtcaagatggacttcattttacctaacacaacaacttggtcaccctctcatcctaaaaatctctataagtaaaactgattataaagatacgttaaggcagtacatgacttgctatacagtttaaaaaattatatgattgatgtgctttctttgatcattaagtcttgcaaaaatacttcttcaacctaaagagagtaatagatttgtttctaaactacctatttattctggtttttgtaccacctagaacataaatgttaaaaaatcttttaatctaataaatgtaactatttgtta

SEQ ID NO: 172172 - DNA, 344 bp, Homo sapiens
gtaagggtacctggacttgcggctttttaggtcggcctggctccgctccttccgcggtgacgaggtcccccggcctcctagggttgggaagagctgctttcctgactctcgttccctgcctcaggcttcccttatcccaatcgcttcgaacccttggctcagcgtagaggagtcaagcctggattctagtcccaccttgcccattagcagctctgtgacctgggactgttcacttaccctctctcagcctcagtttccgcatctgtacaacgagaggtcctatctcttaggtccttacaatttttaaactctgggattcggtggcaattaaatgtgtaatgaca

SEQ ID NO: 172173 - DNA, 624 bp, Homo sapiens
tgtagatctttctccttcaacctacttttctcttttaaatattgaagccctgacagtcatctctggagaaaggcacagaccacagactctttctgtaatttcgtgttcttctaggtatgtccttaacattagctaaattcctaaagcaattgagacctgtctcagacactttttggtttacacaggaaagaggcatcaagaatgactcaagcctttaggtctgaacgctgttgattggggccatttgctaagatagagaagatgggctggagcagctaggcatgggaagttgtgaggcttgagaagctgcttagagaagcaaaggagatgtcaagaaaggtaacggagtgtaggagtctacatgggaggcatcttcaggcacagtgagttaccaggacatagagatgatatttagagacttgggtctagggggctgggcgcagtggctcctgcctgtaatcccagcactttgggaggccaaggcgggcccatcacctgaggtcaggagttcgacaccagcctgactaacatggagaaaccccattgttggggaccagcctcgacacttacccggaatgagaagagacaggttaagagctcataaaggtgggagccaggggacca

SEQ ID NO: 172174 - DNA, 153 bp, Homo sapiens
cctttaaacagggctccctcacaggtgcactgggaaggtttggggaagatgtaaatccaggtatctttttccaataattaaaatcagcaccttgatatgtctctggcattgtgatgtacattttaattcttattttagagacaaggtttcact

SEQ ID NO: 172175 - DNA, 147 bp, Homo sapiens
gcagatgatactgtcattcactaagactggaaacacctgaggatagacaagtctcagtgaaaagtggtgattccactttgggacccacttgagtttgagatgccccgagaacctcaagcggacacgcttggcaggcaacacagatcg

SEQ ID NO: 172176 - DNA, 650 bp, Homo sapiens
ccagaatccacccttcatgctgctgctaaacatcatcctttctaggttttaaaaacatttgatagctttccactgacaatagtgaagatttcaatttctggatgccatgcatgatcattataggatctgatcccaaattatcttttcagtctctcctgctaccatattctgtatacatacactatgctctggccatactgatcagtcacaacacatactgtcaatgcttccacgccacttgagcacaatatgtcgtcagcctacaatgttcttcctgcaaccctcaatctaattctaaggtatccccatctcaccccataagccccaggcaaagttaggaacatcctcatcagtactcaagttgtactatttatatacctttttttggtatttaatccgctagattttcagcaaagaactggagtttattcatcttttaacatcaccctatactttgaactaccatcctcaagtaagtgctcaataaatatttgttggatgaatgcaaacacactctttttaattcctacatcattataattaactgagaggttggagattttacaaggactctgttttatgtgtcaggcaagctaaagacttgaaaaaatagaaataaaacagaagggtaacagatatcttgaccaaac

SEQ ID NO: 172177 - DNA, 596 bp, Homo sapiens
ccagaatccacccttcatgctgctgctaaacatcatcctttctaggttttacatgcatgatcattataggatctgatcccaaattatcttttcagtctctcctgctaccatattctgtatacatacactatgctctggccatactgatcagtcacaacacatactgtcaatgcttccacgccacttgagcacaatatgtcgtcagcctacaatgttcttcctgcaaccctcaatctaattctaaggtatccccatctcaccccataagccccaggcaaagttaggaacatcctcatcagtactcaagttgtactatttatatacctttttttggtatttaatccgctagattttcagcaaagaactggagtttattcatcttttaacatcaccctatactttgaactaccatcctcaagtaagtgctcaataaatatttgttggatgaatgcaaacacactctttttaattcctacatcattataattaactgagaggttggagattttacaaggactctgttttatgtgtcaggcaagctaaagacttgaaaaaatagaaataaaacagaagggtaacagatatcttgaccaaac

SEQ ID NO: 172178 - DNA, 633 bp, Homo sapiens
gtcctgtgtatatgtatatttctcttctgaaatggaattaaatcagtcttaatactgaaaaatactagccaaatatttgatttcttttatcccttatatatttttcagatttcattattggtttttaaaagacatttatgtgtacttttactttttctaattactaagaagaatattcaaacctttgtccatgactttaaattacaggaaactgtttcaaaaacttatcagtagtacatgatatgagtatgatttgtttttagaagtttcaaatgagtcaccttgaagtcatggagaggctaccgcttaccacatttaccattctgattaatttttcttttggcaaagtacaaatcagtaataacctactaaagcctagtggttgctgttgatatttcagtaaggtgatgttgattaatcagagtgattacttaccaagtgttacagatttactcaaattattgggttttcttctactatagtaatttcatatgcagtaataatttgcttaagacattttgcttcatatgtgcgttgaaaatatcaatgtagaacttaaaatttgtatccatgctgcaagttaatgtggttgcctctgtgaccgttgaacatagtttcataataaagcctgga

SEQ ID NO: 172179 - DNA, 401 bp, Homo sapiens
gcggccgcctactactactaaattcgcggccgcgtcgacaatgagtcaccttgaagtcatggagaggctaccgcttaccacatttaccattctgattaatttttcttttggcaaagtacaaatcagtaataacctactaaagcctagtggttgctgttgatatttcagtaaggtgatgttgattaatcagagtgattacttaccaagtgttacagatttactcaaattattgggttttcttctactatagtaatttcatatgcagtaataatttgcttaagacattttgcttcatatgtgcgttgaaaatatcaatgtagaacttaaaatttgtatccatgctgcaagttaatgtggttgcctctgtgaccgttgaacatagtttcataataaagcctgga

SEQ ID NO: 172180 - DNA, 633 bp, Homo sapiens
gttttgttccttttgttccaaatggctttggctattttgggtcttttgtggttctatatgaattttatgattattttttctatttctgtgaagaatgtcattggtactttgatagggattgcattgaatctgtagattgctttgaatagtatggatgttttaaccatattggttcttccagtccatgaacttttactgtaacccatcagttttggtatgttgtatttccattttcatttgttttaatgaatttttcaatatccttcttaatttcttcattggcccattggtcattcaggagcatattgttaatttccatgtgtttgtatagtttccaaagttcctcttcctattgatttctagttttattccattgtggtcaggaaagatacttgatattatttccattttttttaatgttttaagactgattttggggtctaacatattctctattcttgagaattatccatgtactgaggagaaaaatgtactgagaagcagcagccaccattggatgaaatgttctgtaaatatcaagtatcaaatagaccatttggtctgtaatgccaattaagtgtgatagttcttctttgttggttttctgtctaaaggtctctccaatgccaaaag

SEQ ID NO: 172181 - DNA, 629 bp, Homo sapiens
cattcatacacaagtgtgtgtgtggacccatgttttcactgatcaaggcctaaatacctacgtggtgcttcgtgaaccctggatgctacagtctctggccacagcactaaatgtatgctgagatctggcttcacggtcgagggtgttgctggttttcaatgtgcctgacataggatcaatggtgaatgcaccacaagcctcatcagtcagaaaatactcagtttgcccattcaggccttcatccttgtccacagctgaaagcacaagaaccactgttcccacttcagcatcttctctcacagaggactggtaataaagtgtgggaaaagaaggactgtggtcattggcatccaaaactctaacttgcaggtgtattacagagctcctaggtggatctcccaggtcagagcacagaatgacaagggtaaaattgctgatttgctcccggtccaaagcacgagtggttgagagttctcctgacatctcatttatagtaaagcactcatcagtatttccatctattaaagaaaacaattacaaattcatttgaattgaaaaagtagcagctctttgctagcactatctatggtattcatttatacattcattaaaaatatatttattcccga

SEQ ID NO: 172182 - DNA, 120 bp, Homo sapiens
agccaaaggtttatgtatatgttttattcaaacactgtcttagaaaccatttgccctgaggatgtgtcctctattttgtcagtttaaaaaggattcttttcagttagtgcattctcatta

SEQ ID NO: 172183 - DNA, 170 bp, Homo sapiens
agttctggaggcttaaagtccaagatcagagtgccagcatggttgggttctggtgagggccctcttctgggttgcagactaccatcttctcatatcctcatgtggctgaaagacagagagagaggtctctggggtttcttttataaaggcattaatcctattcatgaaag

SEQ ID NO: 172184 - DNA, 559 bp, Homo sapiens
agtaaaagaggaaggagctcctgggtgacctgaagcatccatccctagacagcagggacattgtcagattccccagaatgcaaccacttctgatgagcctgaagttccagggaacacaacagaaggcttgatattgcctgatgataagtccctagacagtagctgcgagcttgagcactggggtctaatcagacactccagggggaaaggctccatacccacctgtccagagtaaacaggtatggctccatgccctggggttagacagagtcacctgaccagtgcaggcagaaaaaaggcccacagctgctccatagaaggaataggactctatcataaataagagccattgtccccaaaataataatattaaaggtaagggcaagacgctagccagtgcctgccttaggttgcctgtggttcagcctatccgtgtgctgtagtcacaccaattctgaacctgtccacatgcatcaggatgggagttgagcagaaaggccccctgatgtttattgctgctctgctgtaagcccagccaccaggttaacaggccactggt

SEQ ID NO: 172185 - DNA, 247 bp, Homo sapiens
ccttttgtttcccatatctcagttttctttttgtctcctttcttccttttgttgttcactaaggaatatttaaaaagtttcgagtattataaaacattcaacttttggggaatgagatggagatataataaatggagataaatatgtacatttaatatcttcattttacaaaagaatctaatcaccattaattacagtgttacagtatgccctgttacagctgagagttagggttttgcatccacta

SEQ ID NO: 172186 - DNA, 224 bp, Homo sapiens
taacactgtgttgaatagaagtggtgagcaggattgtggcgagggtttgcagttttgtcctgcagagggggtgctgggcttaaacaccaaatgaatggctcgtggaagagggactgcgatgtctgaggccctgaggcagaggactggggccaagaaatgcagctatgagggggtaactggaagatagcactgggaacagacatagacacaaggtgcatatagat

SEQ ID NO: 172187 - DNA, 419 bp, Homo sapiens
ggagtctgagaaacataaatgtgcaatttttctactctactgaaaacacatgtccaccaaaagcaattccccctttcttctaaagtaaaatatgatcatctttcaatcacttagaaactaaaagcttttatacattccaaaaggcctagtttctttgtggagcttaaacaattgtgtcactaccaaatcttctttcctactagcagaaagaaccacataggaagccaaatccaaattcagacttagactaacacagaacaggtctgtgataatataaagtctatccctgtacttatctttattaggtttctataattagagtcaagttgctttttacgagacaaaaataaggcaaatagctcagaaagaaaagacaaaataccttttagtttctaaatacatactttttttttttctgg

SEQ ID NO: 172188 - DNA, 229 bp, Homo sapiens
aaagacatttccctgtgggcatgtggtgccctccactggggccagaattcccaacctgcctcactctccccatctgtgaaattggctgattccctgaggtccctcccagcactgactatcaagtgacagagaacctagaaactccaggagctccatcagagccctgactacctgtccaagtgagactgtgggagcctcactcttctcacacctgtaaactgagggtgct

SEQ ID NO: 172189 - DNA, 448 bp, Homo sapiens
aaaaaaaaaatttagccgggtgtggtggtgggtgcctgtaatcccagctactcaggaggctaaggcaggagaatcacttgaacctagggggtggaggttgcagagagctgagattgcaccactacactccagcctggttgacaagagcgaaactccctctcaaaaaaaaataaataaataaataaaaataaaatctgtactcacatcctagatcaatactaacttaaatgtaaaaaattaaaaaaaatttaacctgacaatttatttacacaaaagacaataataagccaggctcagtagtacatgccaattgtcccagctatttgggaggctaaggcagaagtatcacttgtgcccaggaattcaaggctagccttggcaacatagcaagattctgtctcttcaaaaaaaataagacaaatgacaaaataggaaaaaaagacttgca

SEQ ID NO: 172190 - DNA, 510 bp, Homo sapiens
tacaactatctgatgacaatattcttcattcttgtaagctcagttaacatcttttcacttcccatctgataagtgctagctgctgatttttttgctcagtatctccatttatatcaatttattttcatctctagagcagcgcatcaggctgctctctcgtgaatatattgttacttttttctggcactggaatatacaactatccatgacagcaaaatttgagggccatattgagatcaccggctgatatggtgaccatgtaaatataagtttaaattgcttagttccacgttagaatagtttaatcaatttctgtcccagaaactggatatgaaacaggttagatgaggaagcttatatggaaaaaaattatctttcatcctctccacatatacatttttcctgagactaggtcatatgtatattcattttgtacacattggggaattggcatagtaatttattcaacaaacattaattagcaccttactttgtgacaaatctgtaaaa

SEQ ID NO: 172191 - DNA, 142 bp, Homo sapiens
ttcaaaagctaaaaaagaaaattcagtctcagtaaaaacaagctgtttcagcttaaaactagatgttgttcaaatgaagttctgcatacacatagtacttctcccatctttgccaagttccctaagatatatagcatccaca

SEQ ID NO: 172192 - DNA, 429 bp, Homo sapiens
caggcaaacaccatcctacggacacccctcttctcctggacagacagcaggtgagtgactggccactagagcaaggacgcagcccccagcagcaaagcctttcggcggccgtggccctgcgctctgaagccttcccacgtgcaagtcgcgttctttacacggtgctctgtgcacttactctggactgaacaggggagagtgacttcaaaacaaaacacaaaaccaccaaaccaaaacttcccacttcgcctaatactccattcagatcgagaactcaaggaacatttgttcaacacgctcagaaaatgcagggttagtgataaggatttcagttttggaccgaaatggatcttaaagactttcaaacttgatgcctttaacctcttctaggagataaactcccagtgaactttctgaagtttctgcttc

SEQ ID NO: 172193 - DNA, 407 bp, Homo sapiens
caaagttaagaagatcatagctgaaatttgtgagcagattgaaggttgtgagtctctacagccatttgaactgcctatgaattttccaggtctttttaagattgtggctgataaaactccataccttactatggaagaaatcacaaggaccattcatattggaccaagtagactagggcatccttgcttctatcatcagaaggatataaaactagagaacctcatcataaagcagggtgagcaaatcatgctcaactcagttgaagagattgatggagaaataatggtgagctgtgcagtagcaaggaatcatcaaactcactcatttaatttgcctttgtcacaagaaggagaattctacgagtgtgaagatgaacgtatttacactctaaaggagattgttgaat

SEQ ID NO: 172194 - DNA, 516 bp, Homo sapiens
tccagcaggaagtatgtatccctttctgatgcaaatatgaaaaaagaacgtttaaccactatttattttaaatagcaaccatttgtttctgttggcattcttgctgggaatgtacagttttcttctgaactgatctactgctgcagtggagaaatagttagctgaagggcctcacaaaatggcagcttatgggcagccaggaaatcttcttatggccagctacaattgctcacacatctggaggatcacctaaaccacacccagtggtcatcacttctctgctggataccatgatgtatgccttcagatgataaagaagaaaaacagtgcaactaggtaactttatatatatgaactgaataaaaacagtttactcactgacttataccattttaaataagaagctggagcttcacaaatgtgaccatttcaagttgaataatacaagtatgtataactgaaggttaggggtaaggggtcagggagaaggaagcccttgtggactactagcaggag

SEQ ID NO: 172195 - DNA, 433 bp, Homo sapiens
tattttaccatatacatcaaaataaacaagtgtacattcttttatacaaatggagccaacaatgcttgctgttttgtagcccatttgctttaaatgatatgacacctttatgtgtaaataagagttagatgttaaattcaacagtttcacaatagttcataattcataaaatcaaccacctactgactgtaattaaatagtttctggctttttgttactataaataatatgtgggcgcggtggctcacacctgtaatcctagcacttagggaggccagggtgggtgggtggcttgagctcaggagttcaagaccagtctggcaacatggtgaaacccccctgtacaaaaaatacaaatgttagccaggcatggtggcttacacctgttgtcccagctactcaggaggctgaggcaggacaatcactagaactc

SEQ ID NO: 172196 - DNA, 246 bp, Homo sapiens
agccaggagagagtgcttctgtcatagtggaggtcttgacttgtggacaccccagaaatggactggtttggcctttgctacaaaaggagctgtcaatttagggactgaaaaaggactgccactatgcatattgaaagcctttgcttaaagatgcattcggggcttggtgcggtggctcacgcctgtaatcccagcactttgggaggccgaggtgggtggatcacctgaggtcagaagtttgagacc

SEQ ID NO: 172197 - DNA, 345 bp, Homo sapiens
catttgctttaggcattcggcatacctaatgatttccatctttgtctcaacattactgttttcactttactgtacttgtttccattctcactcattttataaagtaaaggtaaaatgcaataaaatattcaaccaattgtgcaaatcaatactgttctatgaacaaagatgtgagttcagtgaaacaaaattatcagctggcaagcagtgccaccatcaataatattaatagaaatgtgtgtttggcagctgatatacaaaaatccaaattaggcattaaaaggccatttaagagtgtcaatgaataatgcttatgcattcaagatgcacaaaagccaaggacca

SEQ ID NO: 172198 - DNA, 555 bp, Homo sapiens
catgcccagctaatttttgtatttttagtagagatggggtttcgctatgttgcccaggctggtctcaaactccttacctcaagtgatccaaccgcctcggcctcccaaagttctgggattacaggtctgagccaccatgcccgaccaagaagtcatctatattagatctactctttggaatcactgaggttttgtgtcctttcatgtggtaagttaatataatgaattttctgtatcctttgcctgaatttcccatactgtttcctctttaaatttgaatgttgtgttggtacatagtctggcctatggatttttcagtggtgattatatcttgttaaatttccttcttggtctcctttaatgcttttggcctttcttttaatcttgtctgattagactgtgtcaccttggtcttgtgtgttgtttgtctttacctggtgtatttttgccctatgagtatatcttatcttcttacacactttgaaataattttagattcatatagacttccaaaaattgtacaggagtttctgtcactccatgagtgagtggata

SEQ ID NO: 172199 - DNA, 254 bp, Homo sapiens
gaatggagggaaaactggctgcgttcagcttactaagaagtcctatgttggtctccaatggggccacctctaaggcatatggaaaggtaaattttgattttaatttttaaatcttgaaatatattctatttttaaaagtaattttaatacaattaagtgcattcataaaataaaaggaacaaaagaggcaaagaggggagagaaaggaagactcacagaggaaattatgctgttttagcaaggtttagccagtg

SEQ ID NO: 172200 - DNA, 339 bp, Homo sapiens
agtgacagcaaaagctgtaatgattcttcttaaaaaaaaaaaaaaaaagagtaaaactgacccatctctctttctgagttccatctacccctttcagccagggagaagattggaaatttaacactgacaattgccctacttttcaatattttctaccagaaggcttaacctaagcaacatgaagtcttttttccctatttgatcttcccactctcattgttgctctctcctctctcatctttacttcctgatttagagataagccatttttgtaagttcaaaccccaaaaaggatctgttcacacggagtgacagcaaaagctgtaatgattcttctta

SEQ ID NO: 172201 - DNA, 690 bp, Homo sapiens
gaaagaaagtgtggcttagctgagtgcagtggctcatgcctgtaatcccagcactttgggaggccaaggaaggaggatcgcttgagcccaggagttcaagaccagcctgggcaacatagtgagaccctgtctctgtttaaaaatgtggcttacagttgtaggtttgtaatccagagggagggcatggcggaggttctcacctgatgtctttttcattatgcagcaccatctgtcaaacattaaggatacagctggaagcttgaggagactgaggagcatttaaatagttattgatgtgggatattgagcagtattgagggacctgctgaaggctaggaccatgaatttatggtggttccagtctgtgctgttatttttctccagtagcactcagcagtccagatcagggcaagggaattattgacaggagagtgactgaagtgattgaaatgatacagtgagcaacctaagcatgatttaaaaaggaaaatgtgactgggcgcggtggctcacatctgtaatcccagcactttgggaggccgaggcaggcggatcacaaggtaaggagttcgagaccagcctggccaacatggtgaaaccccgtctctactaaacatacaaaaaattagccaggcatggtggtgcgtgcctgtagtcctggctactcggggggctgagaatcactgagga

SEQ ID NO: 172202 - DNA, 520 bp, Homo sapiens
ctcatgcagtgggagctaaatgatgagaacacatggacacatagtggggaacaacacacactgggccctaccacagagtgaaggctgggaggagggagagggtcaggaaaaataactaatgggtactaggcttaatatctgggtgatgaaataatctgtacaacaaactcccatgacaccagtctacctgtgtgacaaacttgcacatgtacccatgaactgaaaataaagttaaaaaaaaaaagaattttccctaaaagcattatcacacctaaagtttccaagttaaaatttcaagggctgatggccgggtgtggtggcttaacatacgtattttctccataaagcacatcacagccttcttgcttttagaaacactagatggcacttcactatgctcggggctattttaaacagtgaaatcaccaacaaaaagcataggatgcaaaaaagtggccctaaatagaccacttgtttattcagtctgtgagctggaataagaaagcatagaattagctgt

SEQ ID NO: 172203 - DNA, 495 bp, Homo sapiens
cctactgactagaaggttctttctcaacatctcctcactgcaagtccattccaaatcccatgtttctttttcctttgtccactggcttaattatttctgtcagtgttaacagcatttttcttggactcaaaggctgttatccttgggaatatctttgaggtttgtctccaacttcaaaactatttgagggttcactgaccaaaagcaccttggtaatgctttaaataaatacatattcctagaccctgttcgagaccaactgtatagtggtagattttaggacccagatttctacctcttacagaatgagtaaatctttgctaatggttacttttcctttcaaatatctgtcaaccttcccatttcttttcaaacctactgcagtcactgtaactcagaacttccttatccttgactagttactatgacaggcaccttctgggttacatccttcactctaatatcagcatcttctttacagaactcatttggact

SEQ ID NO: 172204 - DNA, 522 bp, Homo sapiens
cagatttaattttgatgtaactgttagtgcagaaataggtaagctatacatatgttgaggacaggaacggtaagtcaaggtttttatctcttacgttgtactttatggttatttctgtggatctttggtgggcaagtatttctatttggtgtttcccaaggtgtttttatttgtgccacacagtttctgaataaacactgaggatgaagagtgaatacagggtggaagaaagataattaaataggacataataatctagattttttttttttacaggaacagtttctccctaaacctataaattatgttagttcaatcccaacaaacctcaatgattctaagaacactcaatataaactattctattttctcttctaaaaaaaaaaatctaggttcttttttttttgtttttagaggatccggctgattggcaggcatcacggctacatcttaaatgtgtgttacaatggcaatcttcattttaatttccgatgagaggagaggaagaaagcccactctgaa

SEQ ID NO: 172205 - DNA, 154 bp, Homo sapiens
tggaggagagggaatggggagtaacttctaatgggtatagggtttccttctgggtgatgaaaacgttcttgaattatagtgatgatggttgtacaactctgtgaaaacgtaaaatcactacatcaggccaggcatggtggctcacacctgtgat

SEQ ID NO: 172206 - DNA, 394 bp, Homo sapiens
gctgggtgtggtggcaggtgcctgtaatcccagctactgcggaagctgaggcaggagaatcgcttgaactcaggaggtggaggttgcagtgagccgagattgcgccactgcactccagcatgggcaacagagtgagaatctgtctcaaaaaacaaaaacaaaaacaaaaaaccctagaggataaaagaactataacatctgggataaagttagctgttgaaataaatacaagtcctaccgttggggtagtgtcagagctggcctacgtctttgactttgagattcctagcagccagagcaaagaaagaaatagattattcccactggagccacagtggccataacaaacagaagccatctgtttagatgctgggaatggagaagacttgctccc

SEQ ID NO: 172207 - DNA, 372 bp, Homo sapiens
agcattcttagctgatgtcagctttagagggctctggcctgcaggcatttggtcaagtgctagaacctttgtcccatggcttgggacttggaatagaactagactcagttcttcaggccatccatgagatggccttaagcacagatagtctgtcactttcttcacccacacctgtacaaacatccagatacatgtggtatagaatattgagtaacttttcccgcagagtgcgttgtactattcccgagaagtccaaagcaaagccatttaccacctcgaaagaaacaagagtgttgtagttttcttgccaacaggagaagaaattagaaactggagtggagaacggatggtgtataccacgatgtgaaagga

SEQ ID NO: 172208 - DNA, 605 bp, Homo sapiens
tggaatgagatgatagagtggattttgccttaagtctttattaagttaaagcaagcagatatttgtggctcctgtgtgtgcagctagaccttacaatcattgttggtagtaatatttaagggaaaactaaaacagtgctagccctaccctttaaaagtatctattctaccacctgttagaccatgattttagcttaagttccctgaaggtttttttcatacatccacgagcctgaggtcacagcttaaacctctgttaacttcttaataattagccaactgtaagcaaaaatgggtcacagaacagatgccactattaaagtcccacttgaggttattaattattataaagttaaagtaagtctgttcagcatacttgtggttatatttctccaccatgttcagttgcacagttgctgaactgggaagagagaaataaggcgtttagagagacaccacaggaattttgccctatgctggttttgactattccttataccagtatatgatatgcccttatttaaacttacaacatgagatttttttgcaaataaatatgtaaataataaacaaatgaacagccaacccagacagccaaattcagat

SEQ ID NO: 172209 - DNA, 437 bp, Homo sapiens
tgagctgatcccctccctgctcccagctgagctcccacactggaggcgggaggacagagagggctgcagtttgactgtgagactttgagccctgagtagagttatgggtactgttttggagtttcccttgccctgggttgaaatcagatcacgccactgagccccatccaggacctccctgtcttacaccagtaggtggtcagttagcagcctgttggaatattctctggagatacagggtgagggcagggcagtgggtagggaaggatgaacttgaagcagctattcagatgcaaaagccaacagttctctgactttcccctaagggaaaataatcagtcacgagggagtgataaatatgtgtggggccttgtgcttgttaagcttttgcttgtattttccttgtcagctctgatcctcttggaggccatacgagc

SEQ ID NO: 172210 - DNA, 416 bp, Homo sapiens
accctgacccccgccaccccaaaaaagaactgtaaataaatattaaattctagttaataatatgtagagggaagacttgcaacttcctgctacttagtttgaaatgcatcatcaaaataaagtggccaggcgcagtggctcacacctgtaataccaacactttgggaggccaaaggtgggtggatcacctgaggtcaggtattcgagactagcccgagcaaaatggtgaaacctcatctctactaaaaatacaaaaaattagctgggcgtgacggcaggtgcctgtaattccagctacttgggaggctgaggcaagagaaatgaggcaagagaaacacttgaacccaggaggcggaggttgcagtaagccgagaccgtgccactgcactccagcctaggtgacactgtgagactcc

SEQ ID NO: 172211 - DNA, 233 bp, Homo sapiens
tccacaagaacatttagaactttgctgcatttggaaagaaaaagtaaaaatttcaggcatcatattcaccattgacatagaaatagaagtcttactaaatgggctgggtttcttaatatggttaagttatgcagaaaatagaacaaagatcgccccttaggagataaactttgcttagaggtactggggaagattagcctgtgagtttatttaagtatttacgctttgattat

SEQ ID NO: 172212 - DNA, 558 bp, Homo sapiens
aaaattaacttttttctcttgaattagagatcaaaaaacagaactacaaaacctcgagcagattgttggcatttattatttgattggaaaaccatgaacttaaaatcattatgtagctgccatatttttatcagtaatattactcttataatgtttgattttattgtctatagtaacacattaaggtgactttagcatatttcaacttttgttaatgttggagaattacacatagttttgcaataatgtgtaaatgtaataaaaatatcaaacagtggtaattttgactgataatgttagttatcaggacaagtgttagaaaagcaaatttaatcaaatggtgcccactgattttataggcagtttcttcattcaaagtaaaagtgatgttaaattgaagaacttgtcagtctcatgctggaggaaaatcagctttaggattagaaaaaccaaactgcaaattagatgaaataccacattaattagatgaaataccacattaatgttaaaaaaaaccggtgttatttggttacatggaaataaaataaaacggttttg

SEQ ID NO: 172213 - DNA, 292 bp, Homo sapiens
aaaaacccacagtgttcctctgagtggatagaaatttgaaattcttttcattttgcttgtcctgtattgctattataaaaagggtaagctttttaaaaatgaaaatacattgatttttaccatttttgctttgttttttatttatttatttatttatttattatttatttatttatttatttattctgagagggagtctcactctgtcactcaggctgtgttgcagtgagctgagattgtgcccctgtgtccagcctgggcgacacaacaagattgtatctcaaaaaacaaa

SEQ ID NO: 172214 - DNA, 489 bp, Homo sapiens
ctcatcagtttcccattagatttaactgcctccagaatataaatgtttatatttttggtatccacatactcacatatatatatatttggtatcttcatatatatatatatatatatatagagagagagagagagagagtttacataaaaaattaagtccataagaagttataaatttagaatatggttttacagtattacttagaaaagtagaaaaaagtctaggtagaaattatttgcatctttagaactgaacaaggtctcaaaagcatgacttaaactaattttgctgatgggtcatctgtaggtagatggggaatgaacaagaaaggatatcacacatatggagaacttaagaaacaaaggcatgtgtgcatttgtgaggagacaagcctaacctagataggagggagatccttgttgcaggatgataggaaataagattgaataaatggcattaagcctgattaaaggtctagtgaaaaagtta

SEQ ID NO: 172215 - DNA, 356 bp, Homo sapiens
ccacctcatctgccaacactgacagtggaagcctctgtcccatctgcccagtgctccccgccaaggacagagtcagggccttaggaaagctgtttttggcacctgagtgcatgtgtgtgtgtgttttcaaacagggttccactccagtggagagagagaaaaagactttggtcgacatggacatcagttaaaacctctatccagaaactaactaaccagtgtttacttgtgcgtcatagctagaggttctcgggacttcattattttcagccactttcctcccagaaaacactggccatctcatgaatgaagctgtttagccaaggttagaatatgcaagcagatgagggggtggc

SEQ ID NO: 172216 - DNA, 396 bp, Homo sapiens
ggaggctgaggtgggagaatctcttgaacccgggcaacagagcttgcagtgagccgagatggtgccactgcactccagcctgggcaacagagtgagactgtctcaaaaagcaaacaaacaaaaaacccatagagactattttgggtcttcatgactacctgacatctgacatgtcagtttgaggaatttagtatatttaatgatgcatttgattcactattagtgatttgtatgttttaaagagtaatttagatagctttttcccctctatcttccccagtaaatattgaagcaaataagaattatatataccagctgtcttgctttttatccactgtttatatcctgtttatcaagtgacccacccagttttatttggcactagctttttatata

SEQ ID NO: 172217 - DNA, 507 bp, Homo sapiens
ctgcgtgtctccctgaccccaccggacacctgccccggaccttcctaacgtctagggggtgacgcacctgagtggagattctccatgcagcaccagggatttctgccatcgtggactttttaacaggtgttctcaggatgaggacttttggggtgcaccccccaccggcagcagttgcgtttctgggcttgagattcaaggcatgactgagcaggtgggggatgatgctatgcattttttggcatgaggtctctttcaagtaaatgaagaggccatttcagaaacactgcagagagagaaatgtgagcacacattttctgctctggccaccatgattcttttgcatctcgtcaccatttccctgcacttatgccacccccttccccaagctccagggcccactaactgtgagaacaacgaaaagcattagctatggactcagcatgcttcctccccgagagctcccgacagccagcagaaatcaataaattaggataaagaaaatga

SEQ ID NO: 172218 - DNA, 191 bp, Homo sapiens
ttgcgatcactgtactccagcctggcgatggagtgagactccatctcaaaagactaaataaataaataaataaataataaaaaatttatcttctagtctgatcctctcacttcaaagatgaaatcattgacgactaaagtcagagggtttgatgtgggtatattcttctaattaatagtacagtgcttttc

SEQ ID NO: 172219 - DNA, 615 bp, Homo sapiens
gactaatacatccatttcaacgcagcatgtactacagagcagtgtacaaatgcaaaactgctttaaaatgcatttagttaagactgctctgttgcaatctaaaaatcagaatataaaatctgacaaaagatttttatgtttcttcaggtgcaaaaaataatggaaatataggcataaatattttcactttcagggcattttaaagatatacggaaataaggaacagaagcttatcagcattatagaaaatctggtatgtatcagtgttttgtttcttctatccatccccttctaaactcaaaggagctcaataaatatttagattaaattaaatcacttaaagacacacttctcccccatacctacagcaattctaccagtgaaatagcttataattcttactttaatgccacatcatttttgctaaatgagcaataatgatatctaaattaatacctcacttggatgcctaaaactacaattttcacatatacaagaaatagtacaacaatattcagcaatgtctaactgaaagctattttcttcccaaaataacgtaacatattcgaaagtgtgcaatcacagtgcacgtgatctaatttccttcagtgccaa

SEQ ID NO: 172220 - DNA, 458 bp, Homo sapiens
ggctgtgcgaagggaagacaccacgatgaggtccagggacacaaagaccttcagctcagttgggaggggtacagtgagagatgagagaagaaaagtaaacccagcagactgcctaaaacctgggtgtttgtctgcctctcagcaggtggatggggctaggcaggggcaggtgtgtgggtcagggaactcagctctatgtctgcttcttgctcttggctcgtcaggcactctatacctctctagcctcatccctgtcccctcctactaggaaaggggacaccttcccacccttgaggggtttggggtgaggatgagcagctgttaacacaggaaggtggaagggatagaatccaggaatgggtgtgttctctgtatccttgaactgtgtctttcaggcttgcagctcctggggtggagctctctagctcagttctacccaaagttaggaccatacctgg

SEQ ID NO: 172221 - DNA, 482 bp, Homo sapiens
aactcaacagtatcaccctggggacctgtggtaggcagaataatgccccccacttcaccccccaaaggtgatcgtgtcctaatccctagaacctgtgaatatgttagattacatgacagagagaattagggttgcatatggaattaaatttgctcatcagctgcccttaacataaggagggtatacttgattatccagatgggcccagtgtaatcacaatggtccttaaaagcaaaagagaaaggcaggagaatcagaggtcagagtgataggaatgctgacttcgaagatggaagcaggctgtgagcctagggatgcaagctagaaaaggcaaggcaatggattctcccctacagccctagaaggagtccacatcacacttgatttcagtccattgagacccatctgacttctgagttccagaactaaaaaatggtaaatttgtattgttttaagccatgcagtttatggtaatttgttac

SEQ ID NO: 172222 - DNA, 199 bp, Homo sapiens
tgttcatctttgtatcagctcagatgtcacctgtttagaaagacctccttcacccaatcagtccatttagcataatagtcgtatataaacagcacattggtttttattccttataactgtcattctttcacattcttatcatgtttatatgtttggaagagcagcagattgtctggattttccccactgtattcctcag

SEQ ID NO: 172223 - DNA, 514 bp, Homo sapiens
aaagcagcaatatgaaaaaaatagtattaattctggtctttgtcccattcagtgatgttcctcagccaaaatttattagaaactcttcctaaccttactggttgcaggggtatgtggtcaggacactcgtatctttttttgataaagctctcccactttgaccttcagcaaaaatgtcaaactgagatgaattctacacaaacccttctcatttctgctggcccctcaccttttttggaaaggacaatgcaaagtgaagccttttctcatttattgatccttatgattctcattgttatgttattttggggggtgtcacaatattgaggttgtgatggacttttcattatatttacttctgaagacctaagtgaggtttcagtgtgggcaaaaatgttaatgttttgaaaacacatgtccgtcctatgtcattgataatataacaatacatttgatgagtgctaaacttaataaatattatatttaaataaagtttataatcattttatcctta

SEQ ID NO: 172224 - DNA, 181 bp, Homo sapiens
ccggtggggtgggtgtggtggttggtggcggggaagggcaaagacagggtgttgaaaggaactgatgtaagatcaggatctactgatccacattcaagacttgccacatttctgtgactaagcgaaagtgttcccttctcttagcattatttctaactaaagcaaaatcatcctcacctct

SEQ ID NO: 172225 - DNA, 572 bp, Homo sapiens
gcaagactgattccatatttgaaaggtactctcctcaaactatttgagaaaacttttatcttttagacagaaattctgcattgaagcttttaaggaagaattcactttaaaatagaaattgtatttctattcttgaataagcagacctttttaaaaacagaaacatttctaaaaatccttctgaccatgacttatccaactttggaaaacaagacctaccagtgatgcttaataaattacaaatgagcagcaaaattccttattttttatttgtgtattgttgatgctttaaaacaattttttcagaggtttatgtccaacttatttaccttattctgtttcaagccatatgtcaaatatataattaatgatatacgggttactcaaaggtgctaggaagcctcctctcttttctatacctgggcagaaaggtataataatataataatgtccaataatttcacagatttatcatttacaaactttgctagtttatcaccaataactctacaagttcatcatttacagacgttgctagtttatcaacagcctcctaaattaacaaatgaact

SEQ ID NO: 172226 - DNA, 544 bp, Homo sapiens
ctccataaccacatggagcttatttcaaactccagaaataacaaaaagaacccggggggaccaccctcttagaataactccccatgggtgatgaaaggaaggcatatcaaattcactttaggagagaagggattctgagaaatggattttcacgatgtccaaatggagctggcctatagattttcctctggattatactggcctgctttgccttcagatgagcacagatggtcacattcatgaactggggttgctgaaaacacatttttaagggggctcgacatgtgttaaaacaaccagaagttcttgaacaaaattactggtcagccaaactggttttttgtttttgtttgtttgtttgtttgtttttgaagtaacaggctatatgttttagagcagttttaggtttttaggaaaattgaatggaaaatacagagctcccgtggcccctcccctccattcccaaaagttcttattatcagtgtcctgcattcacttgatgcatttgttacaactgacgagagccaatatgcctactttatta

SEQ ID NO: 172227 - DNA, 244 bp, Homo sapiens
tgcatggtttccccgaagtggagaacccctcaaaagaggctttgctcactttcgtctattgaataggcagaaaaagaagcaaacagtccattccaaatttcaagaatttaaactcgtatgaacccttcaaactctggaacttggccttcacccagcctcacatcagaagtgctctctactctgaggtcattctgacaaacttcattttatcaaattccattaaatataattgtttggcaatcta

SEQ ID NO: 172228 - DNA, 565 bp, Homo sapiens
gatggggggagtggcaggtgggcagggaacagatggtaggaccttgagtgcccagctaggggctgagtcttccttctgccaaggatgggctggccatggaaggtgtctgagcagagggcacagtcagatttccacatcagaacaaccaaggagccgggggcagggggccatggcatgcagaaggggtgagttttagaaagttcagaaccagtcaacttacggtgggatctttcccatctccacaccctctgtgccctccttacaatgggttcagtccctcttgctactccatcttacaaggagctgtgaaggtgttgagccctgccccgctagccggcgctcacctgctcccacgtggtgctgttcctgaggtctgctctgatagaagcccccagcaatgcctgtttcatcccagaaggacccccaacggctcgtttgagcaagtccctcagagacaccgcaaaaaccctccaaggatccttgcacaggacaccagaatctgcccccctagcatgaatccagtgtcccagtctccagaagagaccccccaaacaagtcctggaat

SEQ ID NO: 172229 - DNA, 347 bp, Homo sapiens
cggtgtgacatttttttcaaggatgagctttgccagctccacgtggaagtccctaaagctcctccttccacttcgaagcgtgactgatgcctccagggcctcacagccgcttctgaagcacttcctgaaagccagctccaccctggcgaggccctgacctcagcggacccaagcccaggacgatgcctgttgcgttcttctccccctgtagcaagtcaccttccccagcagcctccatgttgtctgggctctccctgtgggggatgccaggggagagtgagagagcagaggtggccaagatggcatgtgctgccttctctcctggaacatgctgcttccacacggca

SEQ ID NO: 172230 - DNA, 107 bp, Homo sapiens
cttaaatctgtgctttagtgttcttcatcatctttgaaaaattctcagctggtcacacctcttcagaattgtttctgttccctcctgctcctcttcctctcctcttc

SEQ ID NO: 172231 - DNA, 493 bp, Homo sapiens
aggatggaggtcacacataggaaagcaacaatatgaaagaagcccaggtctcagacgctgtgcaatgtccacttccaggtccatatgtgtgaaaaaaataaacttctgtcctctagaatagctgttattttggggtgtcttcactcagagtcaaacttaatccttaagaatatatcttctaattagtcctcctgttgcaatttgtcaacaagttaattctccctaatgatcaccgattaatcctctactaactaaaagaagtcttcaaaaccctccatcatcacaccacaaacccagtccaattactctacacatctagattgatttgccttatatctgctttttcaactataaaactgctttgtaaaaataactgaaaactaaactccagacagtgtatctgaaatgaatatttcaagaaggaaaaaatatcgagacagaaggacatatagtcagtgcccaagcccctccaaattacatgccttctgcctaa

SEQ ID NO: 172232 - DNA, 213 bp, Homo sapiens
tgggctacagagcgagactccgtctcaaaaacaaaacaaaaaacaaacaaaaaaaaccactgtacccttaggctgtcattccctatatccctcacccatccaaccctaggaaccgcttggattatagttttaaaggttatttttattttatttttttctttagaaactccaattatatttaggttggatctcctttgttttccatgttaacta

SEQ ID NO: 172233 - DNA, 414 bp, Homo sapiens
atatccctcagccctttccaagtgcaacttgatgtctagaccagtgtagtagctgctggctacatgtgatgctttagtttcattattattattattattttgagacaaggtcttgctctgtcacccaggctggagtgcagaggcatgatcgctgttcactgcagccttgacctcctgggctcaagcaatcctcccacctcagcctcccaagtagctgggactagaggtgtgcgccaccacacctagccagtttttttattttttgcagatacagggtctcactatgctgtccaggctggtctcaaactcctggactcaagcaatcctcctgcttcagactctcaaagtgctgggattacaggcataagccaccatgcccggctccttcagtttagattgaactaagtcaaagtg

SEQ ID NO: 172234 - DNA, 463 bp, Homo sapiens
gttgtggatgaacttagtggcagggctaagagcagccccgcctcgctccccgagctccgatgagtgagcagggcagtttctcccagcagcgaggctgcactcactgctgccctgctggggacctgacgcccagtgcatgcccccagctctgcattctgcagacccagaggcaagagctggccccagcattccatctgcccattccttgacacctaccggaggcccagtgtctgccctcccatcttctcctgggccagcggcaccagctcaccccacctgctcgctccagccactcaggggcctcctctttcctttcttcaaatgcatttagggatcttgaaagctcattttaccttcttgatcagatttgaatgctcaccagtgcaaacagactaattgaagagctcaatgaaaccgggtaagccagctttcacttcaggccaggccaactccccttactaca

SEQ ID NO: 172235 - DNA, 170 bp, Homo sapiens
ataactgaatgcatattaacagaatgtgtctcttcatgtctctgacaggaactggaacaaatgaaagctttgccacattgcttgcattcacatggtttctctccggtgtgtgtccttccatgattttgaaggctcttggcagatgtgaaggctttcccacaattcttaca

SEQ ID NO: 172236 - DNA, 685 bp, Homo sapiens
agaccctgtctcaaaaaaaaaaaagaaagaaaaaaaaaaaagcctggggtttgagaccaaagctccaccttttccctagtgtttcctgcaaaacttcaagggtggtaggtaagcagtataagatacaaatgttccctcctgtaacatggttgactcttgggatttaacaaaagttttaattctgaagatgaagaggcaaaacattttatttacatgcacagccctaataaccaagccccacctttctctcagagaactggaagaaccactttcaaactgccctgctctgccttgtgttccctcattcctgtcggaggttggcacttcgcatcctgtgccctgatgtcatattctatgtccttctgagattctcttctgaggccaggcccaagtctgtcacacagtatctaaatttggactctcagagatgtatcctaaagcaacaggctcattcagtccccagaataaggcagtaggatgtacaaaactcagttcaggttccctccactacactctgcactctccctaacacaagaatctatggcactcatctgtgtgtatgtccatcttttgctacaacagtagttctccaacttttcggtctctggaccccctatgatttgaatgtatgtgtcccccccaaaattcgtatattgaaacctaaggtccagtgtgatagtattaa

SEQ ID NO: 172237 - DNA, 387 bp, Homo sapiens
caattctggacttcggggcaattctggactatccctctctgtgcatcctcttcatttgattgtgggaagcctcaagtggagccaaagaaatgtcccagaagcattgtagggggttgtgtggcccacccacattcctggccctggcaagtcagtcttacaacaaggcctgccatcatcactgacagagtaatcccagcctgtctgccatccccaaattacgtggtcaccgcctggattgaatgttatgtcactggctggggagaaacccaagaatctttttttaaatgatcgtatgtttcccttacaccaaaagcaagcaaaaagccagtagaggtcactgagtctcttaatcataatttcagcgttcatattgcttcccaggtaagt

SEQ ID NO: 172238 - DNA, 741 bp, Homo sapiens
gcctttttcaaaatgtggcggtggcagggaaggttgtctgctccagaggcttccctagagtgaagagctctactatgtatgctttatgcggcagaaggagtgctttggaggagtttttaaatttgttttttttttaaatcttatcggttttaattgtagcaatgattcaagaaacgttagtaggtgcccataacttcggtggtggagatccaaaagtgaacaagacagtgttctggctgctaaattcttcttaactggttatgcctggagaccttcacttggttctgtgccagcactgcccatgaacttcatagactgtgatctttgctaaggcctaaatgaatgaagcaggtgcaggaccggaagcagaagacagaaagtggagaccagatgtttgaagctgggtaaaggcagggatggagcaggaaccgaggaacaaaccttggaactagttgcacttgcccaaaggaagttctcgtttgattgactctgtctgctgctccatagcgactttccagctctcaggcctgatccaaggagccacagagcatgcccatcaagagctatgtgggaccatgggggcgggcctgggttttatgtgaagtaatggcttaaatcctggcatgacagttcgcagtccagcatggcaaccagcagcccagcatgaaggaggcagacagttgaacagattatttttatggcttacttaaagaaatagttttgatgtcaaatccattttgg

SEQ ID NO: 172239 - DNA, 660 bp, Homo sapiens
gcctttttcaaaatgtggcggtggcagggaaggttgtctgctccagaggcttccctagagtgaagagctctactatgtatgctttatgcggcagaaggagtgctttggaggagtttttaaatttgttttttttttaaatcttatcggttttaattgtagcaatgattcaagaaacgttagtaggtgcccataacttcggtggtggagatccaaaagtgaacaagacagtgttctggctgctaaattcttcttaactggttatgcctggagaccttcacttggttctgtgccagcactgcccatgaacttcatagactgtgatctttgctaaggcctaaatgaatgaagtgtacacttctttggttcactggaactgaacaacagctgaatgtttaaccttgatcaggtgcaggaccggaagcagaagacagaaagtggagaccagatgtttgaagctgggtaaaggcagggatggagcaggaaccgaggaacaaaccttggaactagccacttgattgccgagccccatagaagacataatttacaagaaactcatagagactcaaaatgtaaggttctctgaaagaaattgaggtgtagttcttaggttaagggaaatgattaacttgatttatctatgaaggttttttctcagtgtgg

SEQ ID NO: 172240 - DNA, 402 bp, Homo sapiens
aggagaatctactccatgaaaattggcaagtaccataaacaaggcttcccgaacccctctctacctcagagccagtttaccagcataccagcagatgcattttatggtaaattaatgggcttcagaaccaaactgcttaagaaaataaactttatcacagccttatgcttggaataagatgacatcattgaaacagttatagtcctggttcagattttttttaatgagcctgtattgtatgtttgtgttagttttctatagatgaaatttacagtaaaactagaaaatctggaccatgagtaggaaactatataaagtacggtacttctatacagctcagtagcatgattttttttcactgccacggacatagaacagtctcttaagatggagtggtaagca

SEQ ID NO: 172241 - DNA, 407 bp, Homo sapiens
ggggaaaatagaaagtgagacaggaaaggagggaaagcaaatacagagtgctacgttatccagcaggctacagcatcataagaaccttagctggctgctcagtcatgttggaaatctctggagaatcatggcacctctcagaatacttctggggacaggtttgagggaggatggctgagagatttatttgttggctccctctcatatcctgtctcttactggtcagagttgcctgaaggatcttaattattctatacttttgggtttgttacttggcttctctatgcagctgctggaaaagcagctgatttggggtaacagggcttctgccacagcaggcacagtgaggaccaccaaagcctacctgttaacactggggaggtagagaccactagtggtaggctgag

SEQ ID NO: 172242 - DNA, 766 bp, Homo sapiens
  misc_feature (628)..(628): n is a, c, g, or t
caatgttctcatttcacacacagttctccagaggaaacacacagatttataatctgttattcaacagtcattttttcaataggatggtatcatctgtcttctggagtgttgccaaaataggaggcaaagagctagaatgaataacccttatcaaatccaggatgatgaaacgaagttagctctgaagaggaagactgtgttccaaagatacagcctaagctcaacatgcaaggcagccgttcatgaagctgaggctcacagcccctttttctgcagagtggccaagaggcggctccttccagcaaggcactgtgcttcaggtggagagcccctgggtcctaggagaggtgctgggaccacaggtgcctgctaatggtccaggtctttggagtggctgctgtagttgcttggaatagctgggaaggaacaggattctatgaaggagacagtatagccagaggaggcagggtgggcaaaaaatagaaggtgatatctgtgaagccaaaggaaggatgaatgtcaaggaggaagtcatcagtgattttgaaggatgcagaaaggtcagggtagatagatggagaacagaaaagtgccttttggatgtagccaccaagaaatggttagtaancttggagagaacagttggtacgagttagagcagcagcagatgcggagtgagagaaatggacctgataggggagcctgaatagcgtgtgaaggaacggacgtcgagtaggctggaactaccgtttcaggaccgggctaa

SEQ ID NO: 172243 - DNA, 119 bp, Homo sapiens
gccaaagttacagatgtagaaacaggttttttagtagtgtgatgtatttctgagattgttgaaagtgtaagatgttatttgaagtggcacagaattagctgtttggtcacgggagaaac

SEQ ID NO: 172244 - DNA, 572 bp, Homo sapiens
cttcagcgtctctttctcagagccacttgccagccagccatctcctgcattactgtttattctcagagtacactgaaaaaagtgtttcctgaatgagcatctcccacaaataaatttaacaaaaaaggaaactgagatggtcaccttcagagcaaacaagccaacggtgtagaagaggcaccccaatgcccatcccaccggcacagtagcaggtggggcaaaaagtgcatgggtcttatgcaagccaacagggagaggcgactagaaaggcttaggggaaaggtggcccctgggtgggattctgaaccactttcctggggtatctgtcctgtttgtgcccacacaagtgcatgtgtgctgggaaccggcagcaccaaggaggctggggccatcctaagactgcagctgtgcgacttcctgtagagaaggcaggacaccaagtccttttcagcaaggcagtgacggacagaagtcctgtgggcagcagctttcataaagtgtggggtcaggcaggctggaagcaggaccaagagggaggctaccaccacagttccagcatgaggcagcaaggg

SEQ ID NO: 172245 - DNA, 873 bp, Homo sapiens
  misc_feature (514)..(514): n is a, c, g, or t
agggtgtatcaccactgcctgcaaagaattcaagtagtaactggcctcaggataaagataaaatcaaggttgtggccatatccattgttaaggccccagaaaagtttaccatgttggggctgggtgtggtggctcacacctgtaatccccgccctttgggaggccgaggtgggaggccaggagttcaaggctgctgtgaactgattgcaccactgcactctagcctgagtaacagagcaagagcctgtctcttttcaaaaaaaaaaaaaaaaaaaaaaaaaaaaaaaccgggggttttttggggggggcggagacaaaaaggggcgtcattagaacgggcgccatggggccacataagtgtggttcccgagaccccaggtctcttgtggtggacccaagggtgggaagacatcgcgcggggtcccccatattagagggagcgccagtataataattctccaatataacgccacggcgtaaacccgtggcataaaataaccttcgggaagaagancagctaagacagcacaaacgagcgaagcgcacacagcagcgcacgcaaatcaaccaccatcgaacgacaggggcgacctcagcccaggcctgtacggtaaaccaaaggacagaccggggggagccggaggagaagaacacgctagatcgaaacagaaggggacccacacaaaacaacaagacaaacacggacccagaaaccaaagaagaccgacaaaggccgagcacgcggcaagactacaaaaacccagaaacaccagaacagtcagcacaagcccaggaggacggcggcagcgagaatgcgaaagtcgaagaagcaaggacgccgggcaaagcaaagaccaccaggaaggagacaac

SEQ ID NO: 172246 - DNA, 277 bp, Homo sapiens
caaacagggcccggcacagagtgaatgctatattagtattgggaagctaagttttttaatgtagagaagccaagatgcaaaatgcaggctttttctgagcatgggttatttctaccagccaccctttgctcctaggactggctctgagagagcaattacctttccctgtagaggaacagagtctggggccatctctgagtgtcacgcaaagctgcaggctgcagctcaccactgctgagtggatctgcctcagaaacagatgaaccctgcggaggaa

SEQ ID NO: 172247 - DNA, 182 bp, Homo sapiens
ctccagaagtggctgagaggctgagaagttgagcagagattctgacaaccctgctgggccaggggcgaaaattggaatccaaggcatgccacagaatagaagcctgactactcatgctctaagttaggtcattagaaaaccaaaccctcggaggacgtatacactagaaatagtatggacgt

SEQ ID NO: 172248 - DNA, 521 bp, Homo sapiens
caggtaaaagaatgccaatgcagtgcttctcagtagtttttaagcccatgcctcctttagataaacatatatctttaccactccatcctaaaactctgattacctttcctccccataatatgtaggtgattatatttcctacgtatctccagccaagatgattttgttaagcttcactctctatagtatatattgtagagaaaggattccccccaaatgtaaattagatgagaatgttgagttaagttaataactacatacatcctggggacattctaacatgcctgtgtgtgtatgtacttcttcatttcttctccatcctttgaaaatcaccaaggctaagtgccatagccaaaagaataaatgagaagggtgaggtttcctctccagtgcacttgatactaattgaaattagggtccacagactaggaaatttagtgaaatgggtgtattaaaagaacgagggtctggtcgaacagtctactctgagaggaagaggggtataaaatacaatatgagga

SEQ ID NO: 172249 - DNA, 175 bp, Homo sapiens
ctggccctctgcagacagctggagcccaagatgagttgcccttttgtgaaactagagaaaccagtgcagcactcgaactctgggtaaacggagtcatatctaagaatgtggagtcgggggcctgcgctacacctgggccacccacatgggacagaaactccaagctaacaaactg

SEQ ID NO: 172250 - DNA, 613 bp, Homo sapiens
tctagtaaaaatacaaaagttagctgggcgtggtggcaggtgcctgcaatcctagctactcgggaggctgaggcagagaactgcttgaacccaggaggcggaggttgcagtgggctgagatcgcaccactgcacttcaacctgggagacaaaccgagactctgtctcaaaaaaaaaatgtacaaaccaaaaaggaaaaataccatcaacccaacagaaaaatgtggatgtggacaactggaaacagaaaagacgagacccatcatggtggctcacatctgtaattccagtattttcagaggctgaggtgggagaattgcttgaagccaggagttcaagaccagcccaggcaacaaagtgagactccttctctgtaaaaaaattaaaaattagccaggtgtgatggcatgcccctgtagtcacagctgcttggtaaggtgaggtgggaggattgcttgagcctgggaggctgagattgcagtgagctgtgatcatgccactgcactgcagcctgggtgactaaagcaagaccctgtctcaaaaaatagaataaaaagacttaacatttctataaaaatgtcaatgtaggccaggcgcggtggctcacacctgta

SEQ ID NO: 172251 - DNA, 527 bp, Homo sapiens
actaattctaacaaatgtgcatagataaatttctaacagaaacagttataatttgagttgttaataatggcttgatatagtatcttaaaatacaagtacttctctgtgtgttgaaattttacttagtgctcactttagtttacagactttattaaaaaggtgtagattccatttatcatcttagttgttttaacatctgtttacataggcctttcttttataattaatagctaaagcaagtaattgtgtggctttgacattacagattttaccaaatgatacattgaaaacatggacgttgaatgtatttgtcacttttaagcttctttttgatatctttgttgatgtagttgcctacttagacatttgagagtataatatggaattggattattggaaatgggttgtattgccttcaaattcactttcgtttaagactgtaaaatttgtatttccaagtgcataaaatgtaaagtgtttagaaatagaaataaaaactgctagactatcccccatattttatgtct

SEQ ID NO: 172252 - DNA, 430 bp, Homo sapiens
gcggccgcctactactactaaattcgcggccgcgtcgacagtttacagactttattaaaaaggtgtagattccatttatcatcttagttgttttaacatctgtttacataggcctttcttttataattaatagctaaagcaagtaattgtgtggctttgacattacagattttaccaaatgatacattgaaaacatggacgttgaatgtatttgtcacttttaagcttctttttgatatctttgttgatgtagttgcctacttagacatttgagagtataatatggaattggattattggaaatgggttgtattgccttcaaattcactttcgtttaagactgtaaaatttgtatttccaagtgcataaaatgtaaagtgtttagaaatagaaataaaaactgctagactatcccccatattttatgtct

SEQ ID NO: 172253 - DNA, 650 bp, Homo sapiens
taaagataccctggggaggttttcttggagatgctctattaatcattataactccagcatttgtgcagagcaaatgctgtacctgacgccaactggagccctgctgggggctctgccagagctacggggatggcatcaagggagctgaggcttgcaggcgggtgcagcttccggtacattattaggattaaataaaaacaaggaaggccgggctcggtggctcacacctgtaatcccagcacttcgggatgccgaggtgggcagatcacgaggtcaggagtttgagaccagcctggccaacatggtgaaaccccatctctactaaaaatacaaaaattagctgggcacctgtagtcccagttattcgggaggctgaggcaggagaatggtataaacctgggaggcagagctggcagtgtcgtgatctgggctcacttcgagctccgcctcccggattcacgccattctcctgcctcagtctcccgaatagctgggactacaggcgcccgccaccgcgcctggctaattttttgtatttttagtagagacggggtttcactgtagtctcgataacctgacctcatgatccgcccacctcagcctcccaaagtgctgggattacaggcacgagccaccgcgcccagccgaaa

SEQ ID NO: 172254 - DNA, 176 bp, Homo sapiens
cagaaatagcagattttctcagagcactgagtctagtgattgtccacgtcaaggaggcacacacacaattttacccacacccctgatgtctcttctgtatggaaaatgcaatcagtgatgaataggtccgtacgacagttggggtaccgcagctcgcaatatcgtaactcattggt

SEQ ID NO: 172255 - DNA, 711 bp, Homo sapiens
gctgcagaagatactgacctaaacagatggaaaaagtcaagcaagagtagattagtaatcactacttcaatgagcccaaataaagatatggctgaccaagcacaaaagctgtctcaggaaacacagcaaaaaggcccatggaatattagggaaaacgttaaccctcagacatcatcaaattcattcacttaaaaaatatttcttaaaacctactgtatgtatggcagtattctaggcattagcaatggggtgaccatgccaggccaaagccctgccctcacagaacttacaatctaatgaggaaatctatgtggaagagaacactgaataaggcattaccataaaattccagaatgaagccttttaatacagagagatattttcatggaagatatgttaacacaatatttaaccctctctccccttcaaaggaagccctgtagcctaaggtgctcattgtttctcatcctctcaaaaaaaaaaaaaaaaaactctaaaacaatagagaagtgcatttaaaatacatctataaataaaagcacaactagtcttttacttccaagaaagcctgtcagcggcacagcagctcatgcctatatcccagcactttcagaggccaacaggagcaaatagcttgagttcaggcattccagatcagcctggacaacatgaggaaacccgatctctacaaaagataccaaaattagccgg

SEQ ID NO: 172256 - DNA, 507 bp, Homo sapiens
atatgcatttgtcaaaacagatcaaactgtacatttattatctgagcattttattatatgtacattatatctcaaagaaaatataagttgtattagggtcagtaggataattaaaaatgtggttttacaacttttattatcagagctagcagagaatacaggctctgaatgtgaacatacagcatttgctaaatactttggcaatatgtgtcaaggagaaacattgcttcagtggccaaatcctatgagtatttttatattactttgcagcaactgaaagaatttaaagatataaggggtctatcctattgggtgctgctgggttagaaacattttaagatcagataatccaaaacaaatatattatattattccatttgaaggagtgagcaataagttttataatttttgtatcggatagatacttttttaaaaaagaaacaacactacatttttcttcactttttctgtagaccatgggatattttgtgttgctttggtgattgt

SEQ ID NO: 172257 - DNA, 398 bp, Homo sapiens
ttccattatatcttgagcagtatattcaaactaaaatttaaaaacttattttgttttttcttatgtcctccaaagttttcagtggctgttcacaataaaggctaaatttctcattctactaactaggccttccatgacgcagcccttcatatttatttctgcataaatacaactaaaagctgaatgatctcttcactttaccaagaacagattttacacatcacaatatcacatccaccacttattcctatgtccaatatttattgagcacctattatgaaggctttaagccagaccgtgagcatcagaaaaagacagaataggaaaagacaaactcctttcctcagggagctcagtttcccagaatctacagataagctcttttactacagagtaaa

SEQ ID NO: 172258 - DNA, 895 bp, Homo sapiens
taggggaccaggggctgggactcagggacgggtcccagccagggcagctggagactcaaccaattcctcgcctggctcaggatgccacagaaatgggtccctacaccagcctttcggattccctagaacaggtggaccacaggaatgagccatgccctggggctctgaagccccctacaaacgcagctcccagcctgctcacacaaaagggctgggccaaggtgggcccagacaggaccaggtgtgctatggtcctcacagcagccaggagggtggaaatccccggggagccccggcccagggtccccactccccacgcgggggacctgtacgcaccccagcttcagggcttctgctgcctgaacacgaggtcaaggtatggagggcgcagctggcacccgtagtaacgacttcatggggcccctgccctgcagcctgccccctcctcccgcccccttaaaaggcctctgtcttaaaaaagaggacccccatactggtggctggagtttcgctgtgtcaggaggctgggcagaagcggtgggcaccctgggaggagtgagggcccaggacagcgcctccactcgcttctctgtctaggctcctgggggcgggggaaggtggccgagcagcagagttcggctggcagagccagtcgaaaggaggccgcccacccacccgcggagagaaggggttagggccggcagcccccgcagaccctggctgagcctgtttccccagacccacggggcaccggccagcgcccgctgacaacttttctaccgcctggaaaagtccagaacaactcgggggcggggagcgggcgcgggagcggaccccggcggcgggcgctgtacgcgtggcactgtttacgcgagcggcccgggaggcgcggccg

SEQ ID NO: 172259 - DNA, 774 bp, Homo sapiens
aaaagaacgagaacattcagggacagtaacaggacagagagatcaggcattcattcagttttaggacggcttcataaaggaaaggacctttgggctgggacttgaaagataagaaagactgctaggcgaaagaaggaagccccacgtggagtgagcagcctttgcaagggtctggcaaaaaaaaaaacctcctgaaaaacttgacattgatatggtagaagatacagataatattcaaatgaggaggatggaactagttttctattcttgctgtaacaaataatcacaaatttagctgcttaaaacaacacatttgttatcttacagttctgtaggtcagaagtcccacactggtctcagctgaaatcaaggtattggcagggttgcgttccttctggaggctctaggggaaaatccatttcctgctcattcaagttgttggcagaatccaattccttgagattgtaggactgaagtccctgtttccttactgtctgtcagctgacagccattcccagctttaagaggctgcccacagtccttgattctgagcctccttcctccatcttcaaagccaacaatggcaggttgagtccctctcacattttgaatctcccctgcctcttctgtcatcacatctctgagctacctttctttctccatcatctgcttttcagagctcatatgattagattgaatttcatcaaataatccagaaataatctccctgtcttagggtttgtaaccttaatttcatctgcaaagttcctttct

SEQ ID NO: 172260 - DNA, 288 bp, Homo sapiens
aacgtgccctcatccagtacagagagaaatacagataacaagtgctcaccaggccccgcaaaagtacattaaaaaaaaatacattccggaccaggcacggtggctcacgcctgtaatcccagcactttgggaggcagaggtgggtggatcacgaggtcaggagatcgagaccatcctggctaacacgttgaaaccccgtctctactaaaaatacaaattagccgggcatggtggcgggcgcctgtagtcccagttacttgggaggctgaggcaggagaatggtgtgaa

SEQ ID NO: 172261 - DNA, 3691 bp, Homo sapiens
  misc_feature (3)..(4): n is a, c, g, or t
  misc_feature (3523)..(3525): n is a, c, g, or t
ggnncgagggaaggcaggaaggaggcagccgaaggccgagctgggtggctggaccgggtgctggctgcgccgcgctgctttcggctcccacggcctctcccatgcgctgagggagcccggctgggccgggccggcggcgggaggggaggctcctctccatggtccagaagaccagcatgtcccggggcccttacccaccctcccaggagatccccatggaggtcttcgaccccagcccgcagggcaaatacagcaagaggaaagggcgattcaaacggtcagatgggagcacgtcctcggataccacatccaacagctttgtccgccagggctcagcggagtcctacaccagccgtccatcagactctgatgtatctctggaggaggaccgggaagccttaaggaaggaagcagagcgccaggcattagcgcagctcgagaaggccaagaccaagccagtggcatttgctgtgcggacaaatgttggctacaatccgtctccaggggatgaggtgcctgtgcagggagtggccatcaccttcgagcccaaagacttcctgcacatcaaggagaaatacaataatgactggtggatcgggcggctggtgaaggagggctgtgaggttggcttcattcccagccccgtcaaactggacagccttcgcctgctgcaggaacagaagctgcgccagaaccgcctcggctccagcaaatcaggcgataactccagttccagtctgggagatgtggtgactggcacccgccgccccacaccccctgccagtgccaaacagaagcagaagtcgacagagcatgtgcccccctatgacgtggtgccttccatgaggcccatcatcctggtgggaccgtcgctcaagggctacgaggttacagacatgatgcagaaagctttatttgacttcttgaagcatcggtttgatggcaggatctccatcactcgtgtgacggcagatatttccctggctaagcgctcagttctcaacaaccccagcaaacacatcatcattgagcgctccaacacacgctccagcctggctgaggtgcagagtgaaatcgagcgaatcttcgagctggcccggacccttcagttggtcgctctggatgctgacaccatcaatcacccagcccagctgtccaagacctcgctggcccccatcattgtttacatcaagatcacctctcccaaggtacttcaaaggctcatcaagtcccgaggaaagtctcagtccaaacacctcaatgtccaaatagcggcctcggaaaagctggcacagtgcccccctgaaatgtttgacatcatcctggatgagaaccaattggaggatgcctgcgagcatctggcggagtacttggaagcctattggaaggccacacacccgcccagcagcacgccacccaatccgctgctgaaccgcaccatggctaccgcagccctggctgccagccctgcccctgtctccaacctccagggaccctaccttgcttccggggaccagccactggaacgggccaccggggagcacgccagcatgcacgagtacccaggggagctgggccagcccccaggcctttaccccagcagccacccaccaggccgggcaggcacgctacgggcactgtcccgccaagacacttttgatgccgacacccccggcagccgaaactctgcctacacggagctgggagactcatgtgtggacatggagactgacccctcagaggggccagggcttggagaccctgcagggggcggcacgcccccagcccgacagggatcctgggaggacgaggaagaagactatgaggaagagctgaccgacaaccggaaccggggccggaataaggcccgctactgcgctgagggtgggggtccagttttggggcgcaacaagaatgagctggagggctggggacgaggcgtctacattcgctgagaggcaggggccacacggcgggaggaagggctctgagcccaggggaggggagggagcgaggggctcacacctgacatgtattcgcctccagggggcgctgtctccctcctttcagatgcctttgctcaaagcttggggtttctttggtgttaccatcccagctcccgggaggcccttaagccccagctgtcggtttttacctgcctgttgtggatggatgggggatacccacctttctgaagtgtcccctttctcccatcttaaggggctctcctccctcaccctcctagagaaaaggtgcacttccttaactctttctactcggggccctaagtgacggtcctaagtgggatggctctccttctcccaagctgcagtactggggaagggctgggcgcttttcctggaaagggaggccacagattctttcccatgggggctctcttccccagaccccagatccaaggtccctcaccctgcctgccccttcctcccagcttcctggcagcatcgtctggtcggtgaaagccatagcatggacaccccatggggagcttgtcttggggagggttctgggtggaagctggcaggcatacagcaccctctaccctccgtggccatggcaacgtccagggcccagaaccctgaggagtgagcggccgagacgctgctccccaccccccacctccatgcctcagcctttgcctaccccaggaatgagcttggcctccaacatcccttgcctgctgccattagtagagggggcccctctgcatctgagccccccatccctgtgccacctgggtgtggagcccatggaacactctggtccgcctcattttaaaccaaaaaactgctccttcaccctcaccctgaggccccaggggagaggacccgtgggatggtgcccaggggttgccttgggacctcggatctcctctggggggcttggctgctgctgttgctgctctgtatttgcctctcgtgattctgtttgttacccatgttcacttcccccaggagaggccttggtaccccctctcccctggggcatccctttgccttggcatccctgtagcccagcaaccctgcccctccccagcatcccagctgggccagagagagccgagtgtgccaacaaggactggggcctgcccggctgcccgcctcagggatgggcacctcatgcctgtctcgccacctcctgtgccaatgtcccaccctccacctgggggtggggtgcagcttccacttactgattagaagacaccactgccctcccttcccccctccctgtctggtgtcctgtgcccccatctgtctgtctatatttgtctgtactcccctaggagaagtattttgccatatataaaaccactgtcctgtcctttgtggctgcctcccaagcctgcttctttgtcctcgccacatagtcgtcagcgtaggcacctgggagctgctgatatgcacggggagttgaaagggtgggtgcctgaagatgttgtgccctgagtcattgactcaaaagaaaagatgatcctttgattttggccctctgatgtattgcnnnagccaggagtgcttgggcagtcccagctccacactgccctgagccccttcacttacctgtctctccacaagtagagccaaaggcaatgggaagctcaatgttgctcagtgggtgagatccagacccactggtgcaatgtcttaaatacacatgactgtttttctgc

SEQ ID NO: 172262 - DNA, 1708 bp, Homo sapiens
  misc_feature (3)..(4): n is a, c, g, or t
ggnncgagggaaggcaggaaggaggcagccgaaggccgagctgggtggctggaccgggtgctggctgcgccgcgctgctttcggctcccacggcctctcccatgcgctgagggagcccggctgggccgggccggcggcgggaggggaggctcctctccatggtccagaagaccagcatgtcccggggcccttacccaccctcccaggagatccccatggaggtcttcgaccccagcccgcagggcaaatacagcaagaggaaagggcgattcaaacggtcagatgggagcacgtcctcggataccacatccaacagctttgtccgccagggctcagcggagtcctacaccagccgtccatcagactctgatgtatctctggaggaggaccgggaagccttaaggaaggaagcagagcgccaggcattagcgcagctcgagaaggccaagaccaagccagtggcatttgctgtgcggacaaatgttggctacaatccgtctccaggggatgaggtgcctgtgcagggagtggccatcaccttcgagcccaaagacttcctgcacatcaaggagaaatacaataatgactggtggatcgggcggctggtgaaggagggctgtgaggttggcttcattcccagccccgtcaaactggacagccttcgcctgctgcaggaacagaagctgcgccagaaccgcctcggctccagcaaatcaggcgataactccagttccagtctgggagatgtggtgactggcacccgccgccccacaccccctgccagtgccaaacagaagcagaagtcgacagagcatgtgcccccctatgacgtggtgccttccatgaggcccatcatcctggtgggaccgtcgctcaagggctacgaggttacagacatgatgcagaaagctttatttgacttcttgaagcatcggtttgatggcaggatctccatcactcgtgtgacggcagatatttccctggctaagcgctcagttctcaacaaccccagcaaacacatcatcattgagcgctccaacacacgctccagcctggctgaggtgcagagtgaaatcgagcgaatcttcgagctggcccggacccttcagttggtcgctctggatgctgacaccatcaatcacccagcccagctgtccaagacctcgctggcccccatcattgtttacatcaagatcacctctcccaaggtacttcaaaggctcatcaagtcccgaggaaagtctcagtccaaacacctcaatgtccaaatagcggcctcggaaaagctggcacagtgcccccctgaaatgtttgacatcatcctggatgagaaccaattggaggatgcctgcgagcatctggcggagtacttggaagcctattggaaggccacacacccgcccagcagcacgccacccaatccgctgctgaaccgcaccatggctaccgcagccctggctgccagccctgcccctgtctccaacctccaggtacaggtgctcacctcgctcaggagaaacctcggcttctggggcgggctggagtcctcacagcggggcagtgtggtgccccaggagcaggaacatgccatgtagtgggcgccctgcccgtcttccctcctgctctggggtcggaactggagtgcagggaacatggaggaggaagggaagagctttattttgtaaaaaaataagatgagcggcaaatt

SEQ ID NO: 172263 - DNA, 630 bp, Homo sapiens
gagctttgcatagggtagacacagggctgctgaggtcctttctgcagaggtgcccagggctgagagttatggagcattcaagggtcttgacactggctctccatgctgatccaaccaggacccgcctctctgactgggtgcattgcctgagtccctctagctcctcttccttttctctctccccaaaccaggtacttcaaaggctcatcaagtcccgaggaaagtctcagtccaaacacctcaatgtccaaatagcggcctcggaaaagctggcacagtgcccccctgaaatgtttgacatcatcctggatgagaaccaattggaggatgcctgcgagcatctggcggagtacttggaagcctattggaaggccacacacccgcccagcagcacgccacccaatccgctgctgaaccgcaccatggctaccgcagccctggctgccagccctgcccctgtctccaacctccaggtacaggtgctcacctcgcccaggagcaggaacatgccatgtagtgggcgccctgcccgtcttccctcctgctctggggtcggaactggagtgcagggaacatggaggaggaagggaagagctttattttgtaaaaaaataagatgagcggcaaatt

SEQ ID NO: 172264 - DNA, 3494 bp, Homo sapiens
  misc_feature (3326)..(3328): n is a, c, g, or t
atttcaaggaactattataaagtaaacatccaagtaaccaccactactgtcaggaagttgtacattacattgtggtttgccctctagttgccatcctcccctgtgtgcctcctctagaccaagccagtggcatttgctgtgcggacaaatgttggctacaatccgtctccaggggatgaggtgcctgtgcagggagtggccatcaccttcgagcccaaagacttcctgcacatcaaggagaaatacaataatgactggtggatcgggcggctggtgaaggagggctgtgaggttggcttcattcccagccccgtcaaactggacagccttcgcctgctgcaggaacagaagctgcgccagaaccgcctcggctccagcaaatcaggcgataactccagttccagtctgggagatgtggtgactggcacccgccgccccacaccccctgccagtggtaatgaaatgactaacttagcctttgaactagaccccctagagttagaggaggaagaggctgagcttggtgagcagagtggctctgccaagactagtgttagcagtgtcaccaccccgccaccccatggcaaacgcatccccttctttaagaagacagagcatgtgcccccctatgacgtggtgccttccatgaggcccatcatcctggtgggaccgtcgctcaagggctacgaggttacagacatgatgcagaaagctttatttgacttcttgaagcatcggtttgatggcaggatctccatcactcgtgtgacggcagatatttccctggctaagcgctcagttctcaacaaccccagcaaacacatcatcattgagcgctccaacacacgctccagcctggctgaggtgcagagtgaaatcgagcgaatcttcgagctggcccggacccttcagttggtcgctctggatgctgacaccatcaatcacccagcccagctgtccaagacctcgctggcccccatcattgtttacatcaagatcacctctcccaaggtacttcaaaggctcatcaagtcccgaggaaagtctcagtccaaacacctcaatgtccaaatagcggcctcggaaaagctggcacagtgcccccctgaaatgtttgacatcatcctggatgagaaccaattggaggatgcctgcgagcatctggcggagtacttggaagcctattggaaggccacacacccgcccagcagcacgccacccaatccgctgctgaaccgcaccatggctaccgcagccctggctgccagccctgcccctgtctccaacctccagggaccctaccttgcttccggggaccagccactggaacgggccaccggggagcacgccagcatgcacgagtacccaggggagctgggccagcccccaggcctttaccccagcagccacccaccaggccgggcaggcacgctacgggcactgtcccgccaagacacttttgatgccgacacccccggcagccgaaactctgcctacacggagctgggagactcatgtgtggacatggagactgacccctcagaggggccagggcttggagaccctgcagggggcggcacgcccccagcccgacagggatcctgggaggacgaggaagaagactatgaggaagagctgaccgacaaccggaaccggggccggaataaggcccgctactgcgctgagggtgggggtccagttttggggcgcaacaagaatgagctggagggctggggacgaggcgtctacattcgctgagaggcaggggccacacggcgggaggaagggctctgagcccaggggaggggagggagcgaggggctcacacctgacatgtattcgcctccagggggcgctgtctccctcctttcagatgcctttgctcaaagcttggggtttctttggtgttaccatcccagctcccgggaggcccttaagccccagctgtcggtttttacctgcctgttgtggatggatgggggatacccacctttctgaagtgtcccctttctcccatcttaaggggctctcctccctcaccctcctagagaaaaggtgcacttccttaactctttctactcggggccctaagtgacggtcctaagtgggatggctctccttctcccaagctgcagtactggggaagggctgggcgcttttcctggaaagggaggccacagattctttcccatgggggctctcttccccagaccccagatccaaggtccctcaccctgcctgccccttcctcccagcttcctggcagcatcgtctggtcggtgaaagccatagcatggacaccccatggggagcttgtcttggggagggttctgggtggaagctggcaggcatacagcaccctctaccctccgtggccatggcaacgtccagggcccagaaccctgaggagtgagcggccgagacgctgctccccaccccccacctccatgcctcagcctttgcctaccccaggaatgagcttggcctccaacatcccttgcctgctgccattagtagagggggcccctctgcatctgagccccccatccctgtgccacctgggtgtggagcccatggaacactctggtccgcctcattttaaaccaaaaaactgctccttcaccctcaccctgaggccccaggggagaggacccgtgggatggtgcccaggggttgccttgggacctcggatctcctctggggggcttggctgctgctgttgctgctctgtatttgcctctcgtgattctgtttgttacccatgttcacttcccccaggagaggccttggtaccccctctcccctggggcatccctttgccttggcatccctgtagcccagcaaccctgcccctccccagcatcccagctgggccagagagagccgagtgtgccaacaaggactggggcctgcccggctgcccgcctcagggatgggcacctcatgcctgtctcgccacctcctgtgccaatgtcccaccctccacctgggggtggggtgcagcttccacttactgattagaagacaccactgccctcccttcccccctccctgtctggtgtcctgtgcccccatctgtctgtctatatttgtctgtactcccctaggagaagtattttgccatatataaaaccactgtcctgtcctttgtggctgcctcccaagcctgcttctttgtcctcgccacatagtcgtcagcgtaggcacctgggagctgctgatatgcacggggagttgaaagggtgggtgcctgaagatgttgtgccctgagtcattgactcaaaagaaaagatgatcctttgattttggccctctgatgtattgcnnnagccaggagtgcttgggcagtcccagctccacactgccctgagccccttcacttacctgtctctccacaagtagagccaaaggcaatgggaagctcaatgttgctcagtgggtgagatccagacccactggtgcaatgtcttaaatacacatgactgtttttctgc

SEQ ID NO: 172265 - DNA, 691 bp, Homo sapiens
gagctttgcatagggtagacacagggctgctgaggtcctttctgcagaggtgcccagggctgagagttatggagcattcaagggtcttgacactggctctccatgctgatccaaccaggacccgcctctctgactgggtgcattgcctgagtccctctagctcctcttccttttctctctccccaaaccaggtacttcaaaggctcatcaagtcccgaggaaagtctcagtccaaacacctcaatgtccaaatagcggcctcggaaaagctggcacagtgcccccctgaaatgtttgacatcatcctggatgagaaccaattggaggatgcctgcgagcatctggcggagtacttggaagcctattggaaggccacacacccgcccagcagcacgccacccaatccgctgctgaaccgcaccatggctaccgcagccctggctgccagccctgcccctgtctccaacctccaggtacaggtgctcacctcgctcaggagaaacctcggcttctggggcgggctggagtcctcacagcggggcagtgtggtgccccaggagcaggaacatgccatgtagtgggcgccctgcccgtcttccctcctgctctggggtcggaactggagtgcagggaacatggaggaggaagggaagagctttattttgtaaaaaaataagatgagcggcaaatt

SEQ ID NO: 172266 - DNA, 1843 bp, Homo sapiens
  misc_feature (3)..(4): n is a, c, g, or t
ggnncgagggaaggcaggaaggaggcagccgaaggccgagctgggtggctggaccgggtgctggctgcgccgcgctgctttcggctcccacggcctctcccatgcgctgagggagcccggctgggccgggccggcggcgggaggggaggctcctctccatggtccagaagaccagcatgtcccggggcccttacccaccctcccaggagatccccatggaggtcttcgaccccagcccgcagggcaaatacagcaagaggaaagggcgattcaaacggtcagatgggagcacgtcctcggataccacatccaacagctttgtccgccagggctcagcggagtcctacaccagccgtccatcagactctgatgtatctctggaggaggaccgggaagccttaaggaaggaagcagagcgccaggcattagcgcagctcgagaaggccaagaccaagccagtggcatttgctgtgcggacaaatgttggctacaatccgtctccaggggatgaggtgcctgtgcagggagtggccatcaccttcgagcccaaagacttcctgcacatcaaggagaaatacaataatgactggtggatcgggcggctggtgaaggagggctgtgaggttggcttcattcccagccccgtcaaactggacagccttcgcctgctgcaggaacagaagctgcgccagaaccgcctcggctccagcaaatcaggcgataactccagttccagtctgggagatgtggtgactggcacccgccgccccacaccccctgccagtggtaatgaaatgactaacttagcctttgaactagaccccctagagttagaggaggaagaggctgagcttggtgagcagagtggctctgccaagactagtgttagcagtgtcaccaccccgccaccccatggcaaacgcatccccttctttaagaagacagagcatgtgcccccctatgacgtggtgccttccatgaggcccatcatcctggtgggaccgtcgctcaagggctacgaggttacagacatgatgcagaaagctttatttgacttcttgaagcatcggtttgatggcaggatctccatcactcgtgtgacggcagatatttccctggctaagcgctcagttctcaacaaccccagcaaacacatcatcattgagcgctccaacacacgctccagcctggctgaggtgcagagtgaaatcgagcgaatcttcgagctggcccggacccttcagttggtcgctctggatgctgacaccatcaatcacccagcccagctgtccaagacctcgctggcccccatcattgtttacatcaagatcacctctcccaaggtacttcaaaggctcatcaagtcccgaggaaagtctcagtccaaacacctcaatgtccaaatagcggcctcggaaaagctggcacagtgcccccctgaaatgtttgacatcatcctggatgagaaccaattggaggatgcctgcgagcatctggcggagtacttggaagcctattggaaggccacacacccgcccagcagcacgccacccaatccgctgctgaaccgcaccatggctaccgcagccctggctgccagccctgcccctgtctccaacctccaggtacaggtgctcacctcgctcaggagaaacctcggcttctggggcgggctggagtcctcacagcggggcagtgtggtgccccaggagcaggaacatgccatgtagtgggcgccctgcccgtcttccctcctgctctggggtcggaactggagtgcagggaacatggaggaggaagggaagagctttattttgtaaaaaaataagatgagcggcaaatt

SEQ ID NO: 172267 - DNA, 3063 bp, Homo sapiens
  misc_feature (2895)..(2897): n is a, c, g, or t
ggggttctccctggccatccctcccccatgcagccttcccccccttctttaagaaggtaattctcgctgtgttcttgcaagaggtgggggaaggctgcatgggggagcctggagtctgggggagaggatctaatgtcatctccactctggggtttcccctccctgcttccccccccagacagagcatgtgcccccctatgacgtggtgccttccatgaggcccatcatcctggtgggaccgtcgctcaagggctacgaggttacagacatgatgcagaaagctttatttgacttcttgaagcatcggtttgatggcaggatctccatcactcgtgtgacggcagatatttccctggctaagcgctcagttctcaacaaccccagcaaacacatcatcattgagcgctccaacacacgctccagcctggctgaggtgcagagtgaaatcgagcgaatcttcgagctggcccggacccttcagttggtcgctctggatgctgacaccatcaatcacccagcccagctgtccaagacctcgctggcccccatcattgtttacatcaagatcacctctcccaaggtacttcaaaggctcatcaagtcccgaggaaagtctcagtccaaacacctcaatgtccaaatagcggcctcggaaaagctggcacagtgcccccctgaaatgtttgacatcatcctggatgagaaccaattggaggatgcctgcgagcatctggcggagtacttggaagcctattggaaggccacacacccgcccagcagcacgccacccaatccgctgctgaaccgcaccatggctaccgcagccctggctgccagccctgcccctgtctccaacctccagggaccctaccttgcttccggggaccagccactggaacgggccaccggggagcacgccagcatgcacgagtacccaggggagctgggccagcccccaggcctttaccccagcagccacccaccaggccgggcaggcacgctacgggcactgtcccgccaagacacttttgatgccgacacccccggcagccgaaactctgcctacacggagctgggagactcatgtgtggacatggagactgacccctcagaggggccagggcttggagaccctgcagggggcggcacgcccccagcccgacagggatcctgggaggacgaggaagaagactatgaggaagagctgaccgacaaccggaaccggggccggaataaggcccgctactgcgctgagggtgggggtccagttttggggcgcaacaagaatgagctggagggctggggacgaggcgtctacattcgctgagaggcaggggccacacggcgggaggaagggctctgagcccaggggaggggagggagcgaggggctcacacctgacatgtattcgcctccagggggcgctgtctccctcctttcagatgcctttgctcaaagcttggggtttctttggtgttaccatcccagctcccgggaggcccttaagccccagctgtcggtttttacctgcctgttgtggatggatgggggatacccacctttctgaagtgtcccctttctcccatcttaaggggctctcctccctcaccctcctagagaaaaggtgcacttccttaactctttctactcggggccctaagtgacggtcctaagtgggatggctctccttctcccaagctgcagtactggggaagggctgggcgcttttcctggaaagggaggccacagattctttcccatgggggctctcttccccagaccccagatccaaggtccctcaccctgcctgccccttcctcccagcttcctggcagcatcgtctggtcggtgaaagccatagcatggacaccccatggggagcttgtcttggggagggttctgggtggaagctggcaggcatacagcaccctctaccctccgtggccatggcaacgtccagggcccagaaccctgaggagtgagcggccgagacgctgctccccaccccccacctccatgcctcagcctttgcctaccccaggaatgagcttggcctccaacatcccttgcctgctgccattagtagagggggcccctctgcatctgagccccccatccctgtgccacctgggtgtggagcccatggaacactctggtccgcctcattttaaaccaaaaaactgctccttcaccctcaccctgaggccccaggggagaggacccgtgggatggtgcccaggggttgccttgggacctcggatctcctctggggggcttggctgctgctgttgctgctctgtatttgcctctcgtgattctgtttgttacccatgttcacttcccccaggagaggccttggtaccccctctcccctggggcatccctttgccttggcatccctgtagcccagcaaccctgcccctccccagcatcccagctgggccagagagagccgagtgtgccaacaaggactggggcctgcccggctgcccgcctcagggatgggcacctcatgcctgtctcgccacctcctgtgccaatgtcccaccctccacctgggggtggggtgcagcttccacttactgattagaagacaccactgccctcccttcccccctccctgtctggtgtcctgtgcccccatctgtctgtctatatttgtctgtactcccctaggagaagtattttgccatatataaaaccactgtcctgtcctttgtggctgcctcccaagcctgcttctttgtcctcgccacatagtcgtcagcgtaggcacctgggagctgctgatatgcacggggagttgaaagggtgggtgcctgaagatgttgtgccctgagtcattgactcaaaagaaaagatgatcctttgattttggccctctgatgtattgcnnnagccaggagtgcttgggcagtcccagctccacactgccctgagccccttcacttacctgtctctccacaagtagagccaaaggcaatgggaagctcaatgttgctcagtgggtgagatccagacccactggtgcaatgtcttaaatacacatgactgtttttctgc

SEQ ID NO: 172268 - DNA, 2674 bp, Homo sapiens
  misc_feature (2506)..(2508): n is a, c, g, or t
gagctttgcatagggtagacacagggctgctgaggtcctttctgcagaggtgcccagggctgagagttatggagcattcaagggtcttgacactggctctccatgctgatccaaccaggacccgcctctctgactgggtgcattgcctgagtccctctagctcctcttccttttctctctccccaaaccaggtacttcaaaggctcatcaagtcccgaggaaagtctcagtccaaacacctcaatgtccaaatagcggcctcggaaaagctggcacagtgcccccctgaaatgtttgacatcatcctggatgagaaccaattggaggatgcctgcgagcatctggcggagtacttggaagcctattggaaggccacacacccgcccagcagcacgccacccaatccgctgctgaaccgcaccatggctaccgcagccctggctgccagccctgcccctgtctccaacctccagggaccctaccttgcttccggggaccagccactggaacgggccaccggggagcacgccagcatgcacgagtacccaggggagctgggccagcccccaggcctttaccccagcagccacccaccaggccgggcaggcacgctacgggcactgtcccgccaagacacttttgatgccgacacccccggcagccgaaactctgcctacacggagctgggagactcatgtgtggacatggagactgacccctcagaggggccagggcttggagaccctgcagggggcggcacgcccccagcccgacagggatcctgggaggacgaggaagaagactatgaggaagagctgaccgacaaccggaaccggggccggaataaggcccgctactgcgctgagggtgggggtccagttttggggcgcaacaagaatgagctggagggctggggacgaggcgtctacattcgctgagaggcaggggccacacggcgggaggaagggctctgagcccaggggaggggagggagcgaggggctcacacctgacatgtattcgcctccagggggcgctgtctccctcctttcagatgcctttgctcaaagcttggggtttctttggtgttaccatcccagctcccgggaggcccttaagccccagctgtcggtttttacctgcctgttgtggatggatgggggatacccacctttctgaagtgtcccctttctcccatcttaaggggctctcctccctcaccctcctagagaaaaggtgcacttccttaactctttctactcggggccctaagtgacggtcctaagtgggatggctctccttctcccaagctgcagtactggggaagggctgggcgcttttcctggaaagggaggccacagattctttcccatgggggctctcttccccagaccccagatccaaggtccctcaccctgcctgccccttcctcccagcttcctggcagcatcgtctggtcggtgaaagccatagcatggacaccccatggggagcttgtcttggggagggttctgggtggaagctggcaggcatacagcaccctctaccctccgtggccatggcaacgtccagggcccagaaccctgaggagtgagcggccgagacgctgctccccaccccccacctccatgcctcagcctttgcctaccccaggaatgagcttggcctccaacatcccttgcctgctgccattagtagagggggcccctctgcatctgagccccccatccctgtgccacctgggtgtggagcccatggaacactctggtccgcctcattttaaaccaaaaaactgctccttcaccctcaccctgaggccccaggggagaggacccgtgggatggtgcccaggggttgccttgggacctcggatctcctctggggggcttggctgctgctgttgctgctctgtatttgcctctcgtgattctgtttgttacccatgttcacttcccccaggagaggccttggtaccccctctcccctggggcatccctttgccttggcatccctgtagcccagcaaccctgcccctccccagcatcccagctgggccagagagagccgagtgtgccaacaaggactggggcctgcccggctgcccgcctcagggatgggcacctcatgcctgtctcgccacctcctgtgccaatgtcccaccctccacctgggggtggggtgcagcttccacttactgattagaagacaccactgccctcccttcccccctccctgtctggtgtcctgtgcccccatctgtctgtctatatttgtctgtactcccctaggagaagtattttgccatatataaaaccactgtcctgtcctttgtggctgcctcccaagcctgcttctttgtcctcgccacatagtcgtcagcgtaggcacctgggagctgctgatatgcacggggagttgaaagggtgggtgcctgaagatgttgtgccctgagtcattgactcaaaagaaaagatgatcctttgattttggccctctgatgtattgcnnnagccaggagtgcttgggcagtcccagctccacactgccctgagccccttcacttacctgtctctccacaagtagagccaaaggcaatgggaagctcaatgttgctcagtgggtgagatccagacccactggtgcaatgtcttaaatacacatgactgtttttctgc

SEQ ID NO: 172269 - DNA, 819 bp, Homo sapiens
ctgcgaagcgggggttgccgagtggtaaaaaagatgtttgaataaacaggaagtactgtgcggctgaagcacactcgaagagaaaacacactggaacattgccctttgtaggcaacctcagggaggtttgcctccacagtagctggctgggctctcactaaatgacaaagaaaccacaagaattcctcaagtaattcttcactttcaaagttgaaagatcagttggagcttgcaggtaattttcaaagttgcatttagcacttaaagaaatctattaatgccacacatatctaaaccgctccaggtctgcaagcagcgacacagcacacgcagtgcgccctggctagaccaagccctagccaaacacagctcattcacgcagacaaatacacaccaacagggtttcgggaaacctgctcttgagatatttttgtggtgacatttacataggcaggatgctttaaaagaaaaaaaaaagaagaagaagaaaattcagattttgcagactttagaggattttgtcacatgtatttttaaagaacacatcgtcccgtattccagggatatgccctggatctggctttgactggctgtcctttacattttctttctccaccatcaaccaaactacctgtttatctccagatgcctagcttgcctaatggaacactccttaacccgccccaaaatgattgtcacagtcctgtcttccgtcaccggagtaattcagcaaatactgtgaagaaaagtaaactgctgaaggcacagcaagtcagcttgaaaaacaggaggaagagttgaacagccatattcaataac

SEQ ID NO: 172270 - DNA, 706 bp, Homo sapiens
gaaacaatgcaaccaccattctcaaacttcagtgagtagaagaatcatggcagcttgctaaaatgcccgagtctcatctcagatattctgattcaggatgactgaggttaccacctcattggttgctgcatatctgcataaccacactgaagcatccaggcgctttctgtgtgaaaggcagttgagagaagttggggcttggcatctgagcagaaccttgactctcttcaaaagggggctgacacactggagaaaccctggagaccaacagctggcttgcacaaaactcggacctcattgctcttcaaatatttatgaataattttcttcaacgtgtttgctaactgttaagaatattagtttttgctggtcttcttactcatggcccatctgaagtcccctggcctgaccctcctgtgaagtcatcccgctgaacgggcgccaccgggtcggggcattgccatagtgtcagcccacggggccataaacacaggctttgctggatccctgccccttcaactgggggaggctgggtggtaagatgagaaggcgccttccttccagcccattttctccaaagcagcaagtttcgagaacgtcacatttgatacatggcatagaagaggaatatcctcaaacacaactttcgggtgattatctcctatcctaagtgccatctgtatggtattatgcttatgtgactgca

SEQ ID NO: 172271 - DNA, 587 bp, Homo sapiens
aggtgctgggaaatgttgcaatttttatctcaaataaggctgaatttacagtagttttaagtatttcacttttaattaaaaggaagttaactgattacatttaaaccattttaataaaattagagtgatgttgatgtctaactgtatcttggttttaagcaaaataagtaagttgactgtcaaattaataatggaaattaatagaaactaaaccataatcagccaacagtacttaactttgattcactatttataaactccaatttgcatataaaatctttactgccagattgccaataaactgagctagtcccttggtagttaaaatcagagcaaggattgcgttgctatttattttttgtccagtgggtggcagcataactcaactggttatcttgtgtacggtcatttgaaattttttatgtgttttaaaggttttaatttctaaatctcttgtactacaaagtgtattctaagaaaactttcctccaaatactctgtttatttcttgctaaagtgaataagattttagataataagaaaattgcttgatatcctttcttcataggtttcaaataaaataaata

SEQ ID NO: 172272 - DNA, 448 bp, Homo sapiens
caggcattttctagcctcgaaagtcgaagcacaacattccgggcatggctgaggacctaaatagcagagttgatgtatgtttggagcccctccatgagtcttgcttaaactacagttgtagctggcgctccagcagccatattggacaatgaggaaccttgaaaatgtaggcttcaggctggaaaggatcaaggccatcaagctacagatgttcctacgaatggaaccccaaatgagctcaatcacaattctaccaagaaccccgtggaccaacccactggcccttgtgactggcctagagagttccccctcctggaggacactacaatgcagggccccttcttcatccctatccagcagaaagtagctagagcagtcatcaacccaattccccaaacagcaagtgtggggttgtcctgtcagagggggggatgagagggtgaaggcg

SEQ ID NO: 172273 - DNA, 505 bp, Homo sapiens
aaaaaaaaaccgtaccattacaagtcaaggtcagtgaggaaggattaaggacttctacccaagcttcctgctaaagactaactatgcttcaagtttaagccatctaccttttgaactagattccatttacattattctacagaggaggaaatgaaaagtactgatatgctggaatacccgaagagggtcactatgacaaagtgactagcttctcttccagttagatctcttctgaaagctttggaagaaaaacagtattcacagacaaatcatttttttattctctaatttcatatttaaaagcactacagacaaaattttagttacctatccagacaacctcctctatcaaccataataaatactcaaatgtgaatagtttctagtcttgaagtatatcttatgctcatctctccttaccatagttttcttatttcacagcagaccagtgaattatttgtagaagacagacacaaatctatgagctggtatttgagaactacta

SEQ ID NO: 172274 - DNA, 255 bp, Homo sapiens
aattgttaagcaacacataagcatgataaataccaaattcagtacagcagcttcctctggggaggaggaagaggtcacaaccaaattagcaatattttatttctgaactaggatgctaaagcaggtatatacttactgtataatcatttataccttttcataggtcctaaatattatgtaatttttaaacaatatctatatatagatataatttaagttggccaggtgcagtggctcacacctgtaatcctaaca

SEQ ID NO: 172275 - DNA, 348 bp, Homo sapiens
gctaattgatttgttataggttcatccctttatgtcagttctgtctaccacttaccatagctgtcatccctttttcctggaccactgaaagaacattacaattggtcttccatctctagactggtccctgccaatttctcaacacagtcctgccagttattttctatagtataagctgataatggcatccccttgtgacttcgtaacacttttaaggtaaaattcaaaatcataagctttttcttgcaagaccctttacaatctctctgctccctatagctctcatctcccaacactgttctgacatgcatctttccagccagccttactgaaaatcgtgtagatcct

SEQ ID NO: 172276 - DNA, 133 bp, Homo sapiens
ctcctccaacttccatcaatgtctgcccttgggtctggttttaaactctaaggtgtaaatgactcataatggctcaacattttgtccctcccaagaggtatttttaagtctaaggaataaagatttaatagta

SEQ ID NO: 172277 - DNA, 232 bp, Homo sapiens
aaaaagaaaaaaataaatgaaaaagagtgggaacttccatgtaaaagtgatcattttaaataaagaattaccaatgggacttgtgtgttcatgtgatttccttaaacgtatttgttgccttaggaaaagctacttaaacttcctgaacatcagttttctcatttgtaaaatgtatgtactttataatggtgttgtgagtgttggatattaacaaacgttatcttccttagag

SEQ ID NO: 172278 - DNA, 213 bp, Homo sapiens
cggccgcagggaccttcttgcatgctgaatcctcagtgcaaatgaaaacaaagggactggtcactaaaggaaatcctgttgtctccatgataatcaactccaagaagtgctgagaagtgcccaagcccttgggtccctgctgggctcctgccctctcttgccacagggatttcctccaagctggaatcaccatttccttcctaatcctggcca

SEQ ID NO: 172279 - DNA, 872 bp, Homo sapiens
ggagtgtggggtttcttcgcggctgctcaagatgaaccgactcttcgggaaagcgaaacccaaggctccgccgccagcctgatgatgcatgccacggtggacagtagagcagaatccattgacaagaagatttctcgattggatgctgagctagtgaagtataaggatcagatcaagaagatgagagagggtcctgcaacaggaatatggtcaagcagaaagcctgggggagttttaacacgcaacaagaggcatgtatgacgcagcagggggacaattcttgcccaacagtcattcacacatggaaccaggccaattataccatccagtctttggaaggacaccaagaccacggtggatggctatgaaactgggagtaaaggaaatgaaggaaggcatacaagcaagtgaagatcgacccagattgaggatttacaagaccagctagaggatatgatgggaagatgcaaatgaaatccaagaagcactgagtcgcagttatggcacccagaactgcatgaagatgattagaagcagagtggattgcactaaggtgaatgagcttctgttgattgaagacagttctaattgggcatgaggcagccatcctgaaccttgcaattcccagaaggtgtccccatgttacaaaaaccaggttggagtcctggtgggtgaacctggttgcacagatcctggttaagaatttcaccaatcaagcatttttgtgaacaacccttttttggctgcgacattttcttccaattgcgaaacattagcgctcctttctgggaaggaaatgctttttcacaagacctggggaaggctcgcaaaagcctttttgaaacacgaattatcgggggccaaatagacag

SEQ ID NO: 172280 - DNA, 665 bp, Homo sapiens
tgacatttgttaccattctgttgttgaggacgaaggaagggttgggaactcagagagagatcaaaggaagcttaatattttccatctctgggagcccagtgaccccgtacacctactaaactatcccagaccctggatattttgattctggagagtctagttcaggtccagactgctgcatctgctgtccctcgaggcatgccaagaggcacatgggagaatgatgggcacccaggaactcaggttaggctttgctggatgagctcgcccctctataaagagatgacattaaaatctaaatttaaaaaagtcaggaaatctatggtgaaaatttgcttgttttagtttgttagaactcaatattcacacacaacattgagatatacataataatcatcagagattttaatttttttaaatatcctgttttaccacaagcctcctgatgtgtatattagaagagagtcatgaagtgtaggcagcaagcagaaggaggcagaggggctggacaacaaggcttcacatcaacaccatcattaaggtaatgatcctttatcaatattgcacaagaccaaaagaaaatatttatttaccattaaaaataatgatgtgggtatagatttgcatgcatgaaaaagctcctccgagacatactgttacattta

SEQ ID NO: 172281 - DNA, 359 bp, Homo sapiens
aatcatggagaatgataggcaaaagcgaatctcattgttttaaaactatcatccaaatcacgagtgcttttctgaagcatagtcatttaggagatttctgagtgtgtgggatacaaagaagaagagaaacagggatcgacaagttactgagaattcaccattgcaggcacaggggtgcttttatgccttttatccttttataaaatttatttaaggccaggcgcagtggctcatgcctgtaatcccagcactttgggaggccgaggcaggaaagtcactggaacccaggagatggagattgtggtgagccgagatcgtgccattgtgctccagctgagtaagaagagcaaaactccgtt

SEQ ID NO: 172282 - DNA, 352 bp, Homo sapiens
gagttaattggagtagggttgacagaatataaacactgtgatgttgctaggagcaagagcatgaaggcaaacgattcttttcctattatctaaccttcctctgtgctgaaacaaaattattacttggaaaaggtgttaagtggaatcgtccatgatgtttttaaggataaatttattttttcttatgtaagtatatctgtcacaaaggaagatattgaacataagtactgaactttttgtttcatcataatgtttggttgatgtgacaaaattgttttgaagtatcggtctcttgaattaatgtacttaactctttttagtaagttgtttgtgttggtagtttttggcaaag

SEQ ID NO: 172283 - DNA, 320 bp, Homo sapiens
ctgggtctcctcatagactcctctcatcctccttcatttgtgcctgtctttactgcttctggggagagtgtcctgctcgcctggggccctgggcctccttgcaatgccacactctcatcccagccccacccccgagtctagctgggcccctctggtagggttgggatagagctggccaaatgaggccagtgaaggccagagctctggggcaagcagctttcctctcttacaagctgatggttgcagaatggggctcagcctactagaaaaagctggatctccctcaggtgaagcagcaaactcaggggggatgggaagct

SEQ ID NO: 172284 - DNA, 290 bp, Homo sapiens
ccaccttggcctcccaaagtgctgggattacaggcttgagctaccatgcctggctaagaatttccttccttttcaaggctaagaatttccttccttttaaaggcttaataatattgcattgtatgaatatgccacattttgtttatccgttcatctgtctgtggacatttgtgtgtttctaccttttggatattgtgaaaaggaatcactagatcacatggaaattttgtgtttaactttttgaggaacgaccacttcattttccacaaaagctacaccattttataatc

SEQ ID NO: 172285 - DNA, 761 bp, Homo sapiens
cctgtttctgcaggcaggctaagaaactttccccataggctctttacctgttggtgtaaagcccttttgggcaaagccccacctgggctcacctggtcagtaaacattgattccgtggttccatctggctgtggtgacttagcacttacaagctggctagctccttgtggattacggctctgtgagtgtttcctaggccccatactgccaagtcggggcagctctctcttctctcatccataaagccaggccaagctcctcattttccctgtgagcaccaagctcataaacctatttgtcctttgcctttctttcctctttccctagccctaccactgccattcaggaagtatttattaagcacctactatgtacagggtaccagaccatatacttgagcccttgatcacatactatcttatatgacttgagttatgtaatttgggcttcctcaacaagactgtaagctcctagagggcgagggagcgtgtcttctgctgcttctgtctgccttatagcacctacagaagaacccagcatggtcatgtgagtaaatccttggtgacttgccttctaggctcacaagttcaatgtgagctctttctccggggaaggatgagaacaaggagagtacagctcagttggctgtgtggtctcagtatggacctagtcttggggctcttgcatgccagggagggagaagggccagtgatcccagaccctttggtactcctttatcctctctatccacacagaacccc

SEQ ID NO: 172286 - DNA, 350 bp, Homo sapiens
gggagatttgttttggtgctgtgaaggtgtttgtagagttaaccccagcttcagtcaagggcttatcacaagtctattatccttatcctgattgttccttgttatcacttgaaacaagtaaatcacgatttttaaaactgaacttttaaataaaataagtagataaaaataagcaaaacactaatgaaatcagttaaaatagtaaaatagcttaaatgcattaaaaaataaatagccactgtggaaaatagtatggcatttcctcaaaaagttaaacataaaattaccctgtgatccagcaattccacttctggtaatttatccaaaagaattgaaagcagggtcttgaa

SEQ ID NO: 172287 - DNA, 528 bp, Homo sapiens
agtcttatgagagttcatgcatttgatgagggaagcaaggaaaagaacaaactgaaaaatgattatttgatgattagatagcgcttccattgacagaaatggaaaatacaatagaaaactttgagagaggtattcagggacagaagagttggaagagcaaacaattactgagcaactccatatacatttctatgcatattactggttttatcctatttaacctcatgatagatggtgaaaccgaggtagttgaagttatctgcccaggagcacagatagtagcaggtctagagaagacaatcagttcagtttgtgtcatgctaaattagaggaagaggtggaaaacttaggtgatgacatgtagcactgattggagctccataaacagagcagatccaagatagatttggggtgagttatgtgcatggttaaagtcattatgttttagaatgtcaatggagagaatatagcattaaaacaaagaggcaggagagatggtcaaagaaaatagaaggcaacaatttttca

SEQ ID NO: 172288 - DNA, 442 bp, Homo sapiens
aaactctcatctgatggaagaagaaactgaagtctgaagttaagaagaacaacttgacctgcccccagcctgcctgtcgtacgtgtgacactgttgcccttccatatatatgaagaaatgtatatggagtacttgccatggggcaggaatgaggtaaagtaggaccaggactagggtaagacaatgagacactagggtgaaaaatttaaggcagtcagtcacaggattgtatcagttcgggctctgtacttgcacagacctgaaaatgagtaccttcttgaattttccagctgaggctactcttgcttcaccatagtcctgcccctgtcattaggcattgggaatatacatagataaaataccaatcaattacttgaggtcaaggagttgttagtctgctggaggagagaagtagagataagtaaacagtcgtatgtgtgat

SEQ ID NO: 172289 - DNA, 510 bp, Homo sapiens
agatgtggcctggctgcttctaacaacctatgctcacacgtggagcaaaaaaaagtaagtgtaatttatttttactgcaagggaagcatagcgtaaaagcttaaaaactttgcagcctagtcatgtggcagaaaaataaaaagcttttacaagagaggaactcgagcaggctgtggagcaatcattgttagagatatttgtataacttaaaaaaaaaaaaagcaagtgttgatagccaagacaatgggaaagaggacttgaaggcattttagatatctaaaaggcagccccccatcacagaccctgaggcctaaaagaagagaatagtttctgggatcaggcccaggaactgctgccttgggtagccttagaacatggctccctgcatcctggccactgctccagctccaggtgtagcacagattggcccagttacaactccagtcactgcttcagagggtgcaagccataagccttggtagctttcatatggtgttaggcctgtgagtg

SEQ ID NO: 172290 - DNA, 368 bp, Homo sapiens
gaaactactgctgaaaggggcaaatccctcttccctccattctctctgtatttcatcctattggcagaatccaacaggcaaaggaaaacagtgggttgggctgggcatggtggctcatgcctgtaatctcagcactttgggaggccgaagcaggcagatgacctgaggtcaggagttcaagaccagcctggccaacatggtgaaaacccgtatctactaaaaatacaaaaacgtggtggacacctgtaatcccagctactagggaggctgaggcaggagaatcacttgaactggggaggtggaggctacagtgagccgagatcgcatccatgcattccagccttggcgacagagtgagactctgtctc

SEQ ID NO: 172291 - DNA, 212 bp, Homo sapiens
tacattcacaatgttgtgcaatcatcacaacccatttccagaccttattcatcatcccccaaaactctgttctgtaacattaagcaataactcctctccccagcccctggtaaactattctactttccgtctcttaattggtttattctaggtacttcatttaagtgctctcaaacaacatttgtccttttgtgtgtggtttatttctcccg

SEQ ID NO: 172292 - DNA, 216 bp, Homo sapiens
agttaccctgttgagtgaaatgttatgtggcctatggctgtacttacaccactctgagctttattttcagctaagaaaaaggggatattgtctaccaggtagcataacattcagaattaaatgaaatcacatatttaaagcacttagcactgtggccaagcaaataagggaagacaaaataaatgtaagttttcttcccccatgtgcaagactttg

SEQ ID NO: 172293 - DNA, 165 bp, Homo sapiens
cactaacgatggggttcctgaacagagtggtaggatagtactgctgccagctgtatttttctctcctctgggaagttccatgacctctggggaagccccgaagcttctagatccaggttcttcctttcaacgggtcctgagggaacccacagcctaatcccaggt

SEQ ID NO: 172294 - DNA, 392 bp, Homo sapiens
tttctccccaaattgatttatagtttcaagggaattctaatcaaaatacaacagttttatttgtagacatgtacaagttaatacaaaaatgtgtatggaaaagcaatgaacttacaagagtcaagacaatcttgaaaaataataaaggtgaaggattaatatctaatatcataaagctacattaaaaatataccattttatggtatattaaaaatatcttctggtttcttttgtgtgttatgccacaccaacttagctacatttatgactttcaatatcataattatgatattagatactatgatattaggtaccaataccatgatactggtgtcaggataccatatagacacatagactgtggttgtctacaggaaaaggataaggaaggt

SEQ ID NO: 172295 - DNA, 329 bp, Homo sapiens
cagaaatgttgtgctcatatttcgtgacagggtatggtctcgaatatgaaaacatgattctagatgttcctgggttaaattggttgtccgaaaaaatatctaatatcataaagctacattaaaaatataccattttatggtatattaaaaatatcttctggtttcttttgtgtgttatgccacaccaacttagctacatttatgactttcaatatcataattatgatattagatactatgatattaggtaccaataccatgatactggtgtcaggataccatatagacacatagactgtggttgtctacaggaaaaggataaggaaggt

SEQ ID NO: 172296 - DNA, 428 bp, Homo sapiens
actggcagaatgtcaaagactgtcttgtgatttcagcttcttactcgaataaaataatatgtttctcatgaagatacatgtttatacattttagatgtatttgttttcaggaagtggccattattttgcttttgcatagaaataatagtggattatgtaattctgtgtaaaaagtgcctttaataagtctgtttatataaaagtaatctccagcgctctttctctacctctgccctcaaggttgggcagggaggagaggaattgcaggaaatggaacaaaagtccttctgcttagtatgccaggcatggtggtctacttagtaggctcatgcctgtaatcccggcaatttgagaggccgaggcaggcagatcgcttgagcctaggagttcagacaagcctgggtaacgtggaaaaatcccgtctctac

SEQ ID NO: 172297 - DNA, 920 bp, Homo sapiens
aagctttctgactgctccaaaaaacgaagaaaaagattcagggagagtaagaggatgaagagagctggtgaagcagctgaccaaatggcccgaggtggtatgcagccgcggtaaagcagggcccctccgtgaggcacagccgcccgggggttccctaggggaagcaggggctgcggcagacgcctctcgggcaggtcagggtatgcaccctcccgcaggggctcccaaggccgggcgtgcgtgaggccaggtccacgggcacaccactgtgaacactgattaaacgtggcctccacggcttccaacccccaggacaggaccaaccctctgcccccggctcaggccagagctcggcgagaccgtcgctgtttaacaagcatttgctatacgccaccttgcattatgacagcatgtgacccacacagccatcctaggaagcaggtaacagccctactccattttgcacggaaagacttgcctgaggtcacagagagcggcaggcctgggatttccatccagggatccgactgcagagcacgactctggagggtcttccttcttgctcctcccatccttccactgtccttggatcccccattttccccctgcacaatctcctaattcctatgttcaacttctcattttcaactggatctttcccaatggcattcaacacacttggtgtcccccaccttagagtagaacattcaagcagcacagcctcctgaaggccctcactcatccctttcccagcctgtttgcgaaatgctttgtcaggactcaaagttaagtctcacttccgtccaattcccatccccacaccaacacagttctcaagtcaccaatgggtaaaaggcttcagtgatccactcctacagccaaaaggcactgctcggtctcttcagcctcagatggttcac

SEQ ID NO: 172298 - DNA, 133 bp, Homo sapiens
agagctgaccagagatgcagagttggaggaggcaatggtcgtcatatccctggaaggacccaagtgcatgctaggtgactgtttggcaggaatatatatgacttttcaggcccccggttccctgcgattttag

SEQ ID NO: 172299 - DNA, 457 bp, Homo sapiens
cattaaatgccttttccccatttaggatcatcgctctggaatattggcaggaaggttctgtggcatagtttccttgccttctaacttgccagcattagctgctaactctctctctgccctttgtttaaggtctgaaattgaatgaatggagaaggtcattttgtttgcccaacagccacatccaaccattaggcagaaaatacagtgttctctggctcctggaagaaaatcttattagactaattgctttatttatataacttgtcctcttcctatgaaatcagacagattttgaaagaggaaaaaaatacttgtggccattacttatattttagtgagtaaagtacatttgggcccagttatttcaagactcataatgacacagcgttaaactctataatctggaacatccaacaactcaaaactgaagctgcctcctgtgtgcccacaagatgtg

SEQ ID NO: 172300 - DNA, 617 bp, Homo sapiens
tgcactccagcctgggtgacagagccagattccatctcaaaaataaaataaataaaataaaataaaataaaccaagaagcaaaaatgatcaaggatagatcactggaaaattctgacaaaaattttatgaagaggtctaagaaaaaatgataaagaaaccagcagagtatgacattatagaagccacattatgaagtagtttcaagtagaagaaaaatagagaccagtgattcctcaggaaaatattccagttcgaagtctgattgaagggggtatgtagaaagggaaaatagattcatatggtgagaaatgttcatgataagtaaagaaaagtgagaaaatagaggaggatgtagaatcaagtgagtggttttactgtcaaagcagaagtgacttggattgctcatcatgtgaaatggaggtgactatacagatggagagggtaaaggaagatggagttaggggcacaatgggtggaatagggcacagagcaacaagcagaccagtaagaagagtcagttgacatcagagttcacattcttgaatttaaagcatctttcttaccaaatgttaaaatggtagaacatggcaggaatgcagtgtgtgtaaacacagag

SEQ ID NO: 172301 - DNA, 505 bp, Homo sapiens
ggccttgaacttcagggagggttttcttccccttgaaaagaggggaggaggaagatgtagtggcttaaaggaatcatgcatggtcattgaaatttgccatcagtgaaagaaaacataaatttagagatttctgaaataataagctgaaggccattgaatcactctccttaattagcttagttttctatcccaggcaagaaatctgttatcagttctgttatcaatttgtttataaaagaactactatgtgccaggcactgtttgaggtatttagaacataccagtgtacaaactcaagatcctttccttcatggaaaagacatcctagcacagcagaacctatggcactgagatgaataagaaaatcttaaaacaggagctaacaaccgttgcacaattatgagataagtgcactggcaagagattggtagtgaatattaacaaccaccatttattattcaacaaatatttactgaatacttactatatgtcaggctctgtgctt

SEQ ID NO: 172302 - DNA, 572 bp, Homo sapiens
  misc_feature (548)..(548): n is a, c, g, or t
gttacacttatcgcccaacactcctgcacgatagactctggttctaatgcttgttcagtctcttcaaactgcattttctgccttttaagtatgcttgtaattttctgttgataggtagacatgatacactgggtaaaaggaattgcagtaaacagggctttcatcctgttttcaggtgttggggataacatcgcccaacactcctgaaaggtgaccaagattactggcagcaacttaactgagataaacaggcttcaagttatgtgcaatacccagtgttccttgcttgctaaagtaataaaagcatatatgaatgcaaggtactgagaatattattatagggataatattgcatccactctcattgattgattgattgattgagacgacgtcttgctttgtcgcccagcctggagtggagaggcgcgagaccttgtttcaaaaaaaacaaaaattttttttttaccttttttttaagagacggactcttactatttggcccaggctgttctcgaactcctggtctaaagcaatcctcccggcttagnctcccaaagtgttggggataacat

SEQ ID NO: 172303 - DNA, 313 bp, Homo sapiens
ggtacatgtggcttgtggctgatgcactggacagtgtacatataaaacatttccatcgttgcagaaacttctattgaacagcagttgtattagtccgttctcaacactgctgtgaagaaatacctgagactgggtaatttataaaggaaagaggtttaattgattcccagttccacagggctggggaagtctcgggaaacttacaatcatggcagaaggggaagcaaacatgtccttcttcacatggaggccgcagcaaggagaagtgcagagagaagagggggaaaagccccttataaaaccatcagatctt

SEQ ID NO: 172304 - DNA, 387 bp, Homo sapiens
tagatttgttttgtccatgtttaagggcacctaagtgaaatcatataggatgacatactcctttctctctggcccccttcacacagcacgtgtgagacccatccgtgttattgctacctgtgttcttccttcaagttggctgtatgtggtctgctgtgtgttcattcaccagttatgtctcccttcttccaatcatgggggtttgggtggggagttccagttgggattatttggattagcactgccatgaacattcctgtgtgtatctttgggtgaacatacgtgagtgttttcgttgggcactaatgtttctcctaagtggttgcaccaatttccactccctctggcaacctgtgtgtgttccagttgccgtgctgcattattgcc

SEQ ID NO: 172305 - DNA, 358 bp, Homo sapiens
cctaaacaagcatctaggagtatatatgtagtttagagagagaaaaagactatcacaaagcttggctattttttatctttagcactcacacatttccattaaaagtttaccacaataaaaaagctgccacaaaacacaaaaattaaaaaagcttgtcatcacagtgtaaaagtcaacaactagagtacttagaacatgataagcatttagccaatgttttaaccactccactccaccccgcaacacacacacagagaggggggagatccaagatacatgctagtcatatgtgccagtcaaaagaagatacagagaattcatacagcaggtaaagttcatattttaaaatataacagta

SEQ ID NO: 172306 - DNA, 336 bp, Homo sapiens
agatgaccctgaaaggtggtgagcttcccattcccagaggtatgtgaatagaaaccttgagcttccagaaggaggtgggcagtgagaggtgttgcaggcatgttttgccagccacacattggacaccccttgctcagtcaagaagccacatccaaaccctcggaccctttcacacttggagcttttgtttgaaaggtcagacttcaaccctcaaaatgaagatgactttaaaaagctggagatggaccaaaaagtaaacaaaatgcaattataatttcatagatggaaagtaaaacaaatttttttaaaaagaagaaggaaataaaataatacata

SEQ ID NO: 172307 - DNA, 399 bp, Homo sapiens
tgagacagagtctcgctctgtcaccgaggctggagtgcagtggtgggatctcagctcactgcaacctctgccacccgggttcaagcaattctcgtgcctcagcctccagagtagctgagactacaggtgcgcaccaccatatctggctaatttttgtattttttgtagagatgaggtttcaccacgtcacccaggctggccttccaggtgcacggggctcctggattcaagcgatccactcgcctcagcctcccagagcactggagttacaggtgtgagccactgcacccagccactcagggagcttctgagctgtatcctcgtgccagtaggcgaagctcctggagagggcatgggtgcctgtgtgtcccacttccctgccttatgtggtaagtccac

SEQ ID NO: 172308 - DNA, 549 bp, Homo sapiens
gcttgattaccaaaacggagcactgcactgaggtcgtggttcttcttccaaattgccattcttttacagaatgggcctctaggttttcagttatccatcttacacacattttcttgtgcccaaaaagaagtcaactagaaagcataagctacccaatacctatttgagcacaactatagactcatcactagtaagctataaagcagcaccggaagtagctcttgccatctctaaccttacaaattcaattcaacaggcaagacaggagaacaattaaaaagagaaggctctgtggtagaagagaggtctatgataatcctcaaaccccagacaaattaaagagcttcaatattagcttatcattaggaaagggacagagcgccctaatattttaaatttcaattacatacagtgctatagggcacatataaactcacacctatagataaagatacaaaatcataaaatttcaaaactggaaggcacttacaaaccacctatatccattctaagtctagcgttctaatatacagtaaacatcttcatctc

SEQ ID NO: 172309 - DNA, 205 bp, Homo sapiens
ttacaagcgctaggagccagagggagacagtggaagaagctagcatattagaatccagtttaagagaatgaggaagactgtagaattgcgggtaggggatggctgctattactgtcgtggcagtgtgggcctggggttgtcaagtctctaggactttttctcccagtttttaagtgctgtcttacattttgagccctgtgctggc

SEQ ID NO: 172310 - DNA, 494 bp, Homo sapiens
tgggtgctctgaggatcccttagtgtcaactgtgtgcagagaattatgctagatggcactggtgatgcaacggatagaacacgtccttgccctcatgaagctcataaccaaaagtacagccagactgaaaaacgcggaaaaagggaagtggtagggaaccggtgggggagtaacacacatacaaattctgacctagtgagtatagagagaccacttggggatgctggtgatagaccttaaagagccttgtgttgaaagggtcttggaaacatgacagaaagaggaaggatattctggacaggaagaatgcctttcacaaaaagctcagaagcaggaaggcaaatgtaaaatatgaatgatgtagtatagacagaaggtaaactaaagaagttaggtgggaagtcaaatcatcatggatttttaaaactcgaagctaccaagtgcggatggagagtcaccagctatcagacctgacagtatacagttgacactca

SEQ ID NO: 172311 - DNA, 155 bp, Homo sapiens
gagtgaggggatcaagaggaccagggtcataactgaggatctcaggacttaggggagaggaagggattgcgggtacccaccagcaggaaactgacctgaactggctcccctgcctaacttcccatcctattttccacctctcagggttgagtatg

SEQ ID NO: 172312 - DNA, 191 bp, Homo sapiens
ctggagtcaatatgaagtaatacctttttaagacagtttggctgactgcatttaataatgtccaatcatgctaagtgcaataattttgtattgggttgagtggcttgcatttgccacctgtggcactgtgatgcctgctgtatgctattttcacttgggtttcactctctctttaattgtcctgcctttta

SEQ ID NO: 172313 - DNA, 295 bp, Homo sapiens
atactgtttctccaagctacagcttttatggtaattcctagtggttttagcagaaataaccagccacaccacaaataaactccctgaaatctattttgttaaatgctgtggaactacagggaagccactttgtggactaagagcagcttcctagtagaaggcaggtcttcagtaggactaagcaggacggtggtaagaaaagttctagctggctacacttgaggcaccaaaaacgccatccatgaacattctctggctttgaacccaaaagcactttttacttcatttgagtatg

SEQ ID NO: 172314 - DNA, 353 bp, Homo sapiens
tggtctgtggtccgcatggtagaactctagccagggctgtggcttttcattttggggacgttgggagcagtatagccacagccccaggtgagctctgtgaggtggaagagattggacattctaacccctttgcctatggataactgaatgagtcaagatccaggcaaaatgatttgacgtagcaaggttttgtcaaagcagtagaagcaaggctcctggttctcatgtcagtctgttgtctgatatatttgtatctggtttttgttcttgttgttgttacagttctggttgtgagaattagggaaaagcctgtaaccacgaatcagaagttctcttcttttgctaacttttct

SEQ ID NO: 172315 - DNA, 483 bp, Homo sapiens
cctcttttggaaatgacttgagggattctgcatcatcacttacttcaatgctcttttcttcttgctggctaatgtgggtgcgctctgggaaatcaaagctgctcatgctgaggaattaactctaaaagctgggagtatccagagcagaatagtatctttgcctagaaaaatggtgtcattttagtggtattactgagatggaacacacagcaagcaaaatggtggcctaaagcaactgtgggccagtggttgcagaccttgggaacaaagctgccaaaggaaatcacagcagattcctagagggattgtgtctacctgggcagccccagatattccgggtttccttacttgagagagagcttgttctaggacagcagccctatctggaagtttctgagatattctaaggaagttttcaagaagaattagactagctgtaagtcccttccttactcatcttccctctcaaatacaacaacaaca

SEQ ID NO: 172316 - DNA, 613 bp, Homo sapiens
  misc_feature (564)..(564): n is a, c, g, or t
  misc_feature (613)..(613): n is a, c, g, or t
ctattctgatcttgttttaggaagtcaagaatgactggataaagatgaggaaagactatatacttagcaggagtggcaacgacagcaatattacagaggtgccaagatactgtgaggaatatgtggacagctggtcaactgaaggaaattcacacagaattactcgattggttcaggcagagatttttatttatttacttttttttttgagacggagtcttgctctatcacccaggctggagtgcaatggtgcgatctcagctcattgcaacctccacgtcccaggttctagcgattctcccacctcggcctcccgagtagctgggattacaggcacccaccatcaggcctggctatttttttttttgtatttttgtagagacagcgtttcaccacgttggtcaggctggtcttgaattcctgacctcaggtgatccgcctgcctcggcctcccaaagtgctgggattacaggcgtgagccactgcacctggccagggttaaatttaagaactgtttactacttgttatattaccacaaacagggtaagtctcttgactgtgtntgcatgccaaaaacacctgctactttgatcgtgtattggtccctttttn

SEQ ID NO: 172317 - DNA, 111 bp, Homo sapiens
tgtgtggagctggcagcatctgctcctcaccacctcagaccagtcctaccttccctagctacttccccatagctgcttccactgcacgttcttctgaaccctgacggacag

SEQ ID NO: 172318 - DNA, 254 bp, Homo sapiens
ttttggtggtggcaagacaactggctttggcatgatttatgattccctggattatgcaaagaaaaatgaacccaaacatagacttgcaagacatggcctgtatgagaagaaaaagacctcaagaaagcaacgaaaggaatgcaagaacccaataaagaaagtcagggggaccgcaaaggccaatgttggtgctggcaaaaagtcgaagaagtaaagggctgcaatatgttatctgcggccattgtggatttttc

SEQ ID NO: 172319 - DNA, 631 bp, Homo sapiens
tccagaggaaatacatgcccaaaaccaaaagaacatttctgggtgagtattccatttcctgtcgactccaagagtagcaacacagtcctttagctaggaattctgagctggagcttcctttcgtcactgagagacatgtcctaggccctgcttcctctttgtaaaatccagatggcatcgtatccttaggctacctcatggacttgaactgaagagcaaataacatgtgtaaagtatactcactatacaaattaaaggcaagaatggaagacgagactataagaagctgatccagttctgttatggccaaacctgaggtgccattcatttcaacgagtccagggtccagcccctactctatggctaggagcaccctctggagattggggcaagttcctaatgaccatatactgctgagaaagccagataccatctagctttctccagttcctcccaactcttcgcagttctcattctgtatgggagaagaggggaaattagaaacagaagaggagggccaggagctgtggctcatgcctgtaatcccagcactttgggaggccgaggagggcagatcatgaggtcaggagttcaagacaagcctggccaacacagtgaaaccccgtctcta

SEQ ID NO: 172320 - DNA, 212 bp, Homo sapiens
gatggtccctgcctgcagaagctctcagcctagtgcagggaacaaacatgtgaatacatgcccttctatttggtaaaatgaatggttgagagagcaagaggggaagagatgactctgcccatgaagatggagaaggtatcaggaaaaggacataattgggctgggcatagtggctcacgtgtacaatcccaacactttgggaggcctagtag

SEQ ID NO: 172321 - DNA, 670 bp, Homo sapiens
atttctgagtcagcttcactcttgcatcatctgctttgacagttttcttggctcctgtaatgagaaaaagggaaaaaaatgctgcagcagctggggctggcttcctgatcccaccctgggaatcagagtctcagctattgataaacatttctagccatacctagaaggagaggaccttgcttctgtgtgttgaacagttccaagaactccatggtgaacttcctatgaagaaccctccataaccctcaacccttcaaacctgacggtatacctcattttgttctcccgtctctggcattcctcacccacccacgctgactggtctttccaaagttcatttctgtaatataggatgtctttggtttcaacaaacatttgtaagtgcccctgagcctggtctttgctatacactggggattgagaggtgagacacaagcccatggggaaatgtatgttaattagaaaagtgaaaaaattgtgtatatgggataattccaactgttttaaaaaaaaaatcctaggaaaaatgcaaatgcctatttcagagaaagaaatggaaatcccaaggtggcaaaaaggaaggcagaattcatcctgaatgtaactggggtttttttgttttgttttgttttgtttgtttgttttgtttttgagacaggcatgggattac

SEQ ID NO: 172322 - DNA, 430 bp, Homo sapiens
tggaccagcagacgcaaggtcttgagggtggtgaattggaagtgaacttgaggctgggaaggcagggaccaaatcaccaaggccttgaatgtcaggccgagaagggggatttgagcctgtaggcaatggagagctcctggaggatttaaacaggcacagcagggtgcggttggtaattctatgaaacccgtctctggcttgtgggtggtgctggaggccgagagaccaatctggagggcgagtgatccagcctcttagagtcaaagggacccagattttactcccaccccattgcttcctacctctgtggcctgggacaagtaacttatttaaaatgtgaggatactaattcttgctccactgatttggtgtattaaataagataatgaattacatgtgcaaataaataaaaagtggtttgtagtgtgta

SEQ ID NO: 172323 - DNA, 241 bp, Homo sapiens
aggggaggaaggaggggagaaacaatcacccaagtttccatttctaatttgggttggaaaatcatacttccattccttgaatactaacttcatgttctggcctacagttaagacttttggtcttatactaggaggaaaaagcctaaaaccacagctgttggtcccatacccttcttggctcactccattttggtgcctgccaaatctctacacatctggtagccactcattcctgctacac

SEQ ID NO: 172324 - DNA, 551 bp, Homo sapiens
ataggtattcaataaatgttacagtattagcatttttttcagttgtagtagtagtagttgtagttagacccaagaacaatggattgctggatttgtattttttatttattcagaaacctttttgaattactttgggacaacatggattaacctatgggacattatgttgagtgaaatcagccaggtacggaaagacaaatactgcatgatctcatttatatgtagaatctatattgaactcctatagaaatctaaagttgaaatctaaagtagaaatctaaagttgaactcctggaagcagagggtaggctggtggttaccagaggctgggagtaggagggagcagagagttggtcaaagatacaagttccagttagagagaaggaatatgtttttgaggtgtgttgcacagcatggtgaatatggttagtaataatgtatattttagaattgctaagagagtaaatttccaatgttctcaccacaaaaatgatatatgaagttattattccatagtgtatacatatcttaaaatatcacattgtacacct

SEQ ID NO: 172325 - DNA, 295 bp, Homo sapiens
tgcatttgttgaatggggtaaaaattgcatagcatctcgagtgctgtgcctacaaattaccttgataaatgattgtgactcagcaaagcttaggcttttgccctagttttggaggctggggctaactagagaaaaaatggagggtctgttgggtgtttctgctgtttttacaaggcttcataattccccattgtctgcgtgtgtgtgaatcagcaagtggttcgcatcctgattgggtggtgtgatgggagcacccacctcgcagagcctcagagccctcattgtctcccttttc

SEQ ID NO: 172326 - DNA, 500 bp, Homo sapiens
ggtcaggcactgaagcctggtcaggcactgaagcctggtcaggcactgaagcctggtcaggcactgaagccgggtcaggcactgaagcctggtcaggcactgaagcctggtcaggcactgaagcctggtcaggcactgaagcctggtcaggcactgaagcctggcctaaagctttctaacaaactttcactcctgctctaaaacttgccttggtctctcctgcgttatgcccctcagccgaattctttcttctgaggaggcgagaattgaggctgttgcagacctgtgcagattcaacgccagtaacagcatggtcatggctcactgcagcttaaccccctgggctcgagggatcctcctttctcagcttcccaagtaggtaagactgcaggcacacatcaccatgccctgctaattaaacaattttttttgtgtagagacagagtctcactttgttgcccaggctggtctcgaactcctaggctcaagcgatactcctg

SEQ ID NO: 172327 - DNA, 403 bp, Homo sapiens
ggaaggattgcttgagcccaggaggttgaggctgcagtgagctgtgatcgtgccactgcactccatccagcctgggatagaatactgtcagaaagaaagagagaaagaaaggaaagagagagagagagaaagaaagaaagagagaaattatacctgggtttggaccctgtgctcaccacaaaggagctgtgaccttgggcaatttatttcctagagtccaagtttcccaactggtacagaggagaaaaataataataacagtaatacctgacaggttgggagagattgtgctggtgtcacagagtctgtgacggcacttgtaagggagtgctgcataaatgagagtggctgctgttgttgcattattatttgttttacatggttataaaacttccctcaagcc

SEQ ID NO: 172328 - DNA, 380 bp, Homo sapiens
cgaaatagcaatttatacatttttggccaaaacaaaccaaagttactacagcaatgaaataacattatatctgtatatagaaactgcttgctaaattcatgatatagaagcattcagaccaatagataaacgaaaacaaaaaagacacataggaaatatagcctttaaaaataatgcagatgctcctctacttacaatggggctaagtcttgataaacccatcataaatggaaaatatctcaagtcgaaaatgcatttaatccacctcacctaccaagcatcatagcctcacctggccgacccgaaacacctgcatcaggctacagttgggcaaaatcatctaacgcaaggcctattttataataaagtcttgaatgtct

SEQ ID NO: 172329 - DNA, 588 bp, Homo sapiens
ggagaggctgggaagcccttcaaccagaggctgaggacatggaatccccaggagtgcctgctgctcatggtagaagtggccagatctcgatgcggcacctgtaagagccccctgctgcttcctgcccccagacccactgtccccagagacctctcaggcttgctgaggagcatgcatctctgtcacttgctttgggtcccctcggtcacctcaaagatagatgcttacagcccgtgggtgacctgctgtttccaccccctcccgatgcccctgccccactggtgtgaccactgctcctggcttgcaatgtctgtgcagctatgacagcctgagttcctctcagggtgggtgtccctcctgcagaaagcccgccctgtctcccaggccccagctctggtcctgggcagaggagggaaggactggggtggtggctgatggattctcatgttgcctctttcccgtattcccctgggctcttctctcagaacatgccccctgaatcctgacggctcactgtgtctcatgtaggaagcccccagtgacatctcgtgccctgcacacaagtccctgaacctgggcccctcccca

SEQ ID NO: 172330 - DNA, 598 bp, Homo sapiens
cgtatggaagatgaaagcatggatggtaaggcacagaagtgaagtagtttagtcaaggctagtgagtggcagaactaggattcacacctactctttgtgacattgactcttaggctgtttccaccacttttccagtagaaaattgatttttgattgtaaactaatttgagttggctcgacttagtgactgattttctttaactgatgtcaaaagaggctgacgcttaagccagaaggcagtttataaacttttggctggagcagtgtagcagcaggaccagaattctatgatagctggtcactgtatcccttctgctgtgagacagtttgtgtgggaggcccaatgggcagagtcagagctcagaatcctggctaaccttgaatgtgacatgtcattgaactgtgacagttctggtataaaaatatgcctcccaggtagagcagaatactttcaccagctgatcacagaacgctcttccttggacagaggaaaatctcttttacttcacctctatgaagacactcacccagtaacaaatttttttttttttttttgacactgcactccagcctggacaacagggcgagagttcatcta

SEQ ID NO: 172331 - DNA, 347 bp, Homo sapiens
caccaccaggcagcttcctggccgttggtaggttcctgcagctggctgagggaacagggaccggcaggggactttgttaggggagggttgggatgggcagtgggcccctgaaagttaatatattggaacctagctcgagtgtcgttctttccaattccgaaagtagaaagagtaaaaataggggtgattggggtggggttagtagaatgcctctctcagggcgctcccccctcccccaccgttttagagagctaggcctcagccagtcttgccactcccatctcagtgcttcctgaagaggctgttttgagtgttgatgaaaagcaatgcaattatgccaaacagta

SEQ ID NO: 172332 - DNA, 464 bp, Homo sapiens
tacatctggagttaacacaagtaataaacacatctacaccaaaataaagtggcgactattttccctataaatgtaatatcattcaaatgtacatggggaggagtaaaaacttatagagcatggcaaatctaaagttactgcctaagtttaggtatggtcagaagtacccttgaggccgggcacaggggctcacgcctgtaatcccagcactttgggaggccgaggtgtgcagatcacttgacacctcatcagctcctgacaactcctgacaactggtcaggagttcgagaccagctggccaacatagtgaaaccccatctctactaaatatacaaaaattagccgggcatggtggtacacgcctgtagtcccagctattcgggaggctgaggcacgagaatcgcttgaacacgaaagatggaggctgcagtgagcagagatcatgccactgcactccagcagtg

SEQ ID NO: 172333 - DNA, 235 bp, Homo sapiens
aggcccttcttatatactaatactaacagtttaagaacttaaatctctttttcccctagtgggattcttattcctttctttttcttcaatgtttgagttcaggggtacatgtgcagaatgtgcaagtttgttacataggtaaacatgtgccatggtggtttgctgcacagatcaacccaccacctaggtattaaacctggcatccattagttattcttcctgatgctctccctcc

SEQ ID NO: 172334 - DNA, 443 bp, Homo sapiens
tccttccatacctttcattccccagccatgtgacccaacgcgttcacaagttccagggattaggtcatggacacttttgggggccaccatgctgccaaccacagggaagaaagttccatcaggatgacagttgtgggctgggaaaaactccagaatgaggagcaaggaagtggtttgccctctccttctctccatgttgacactggttctcttctgctgcatgctagagaccttaggagagggagaatgagtggcttcttcccattcatctccccgcacttctgtcaggaaatgaaatcccacgcagcactttctgtttcagttctcgtggagtctacgtttctaattggcaccaagactgccagctccatctccgactgtccctctgtctctctcactgcatctgcctctttgtccgcatccttctgcctcctgtccctgtc

SEQ ID NO: 172335 - DNA, 568 bp, Homo sapiens
agctgtaaggtggggcccagggggaaatgttgggcattttgtttgacctctgtggctcctgccaacaatttaggatagctgctaaaaaaataacaaaaagctttgggccttaatgaagacacggtatgcttatcaaaagatgtcccatcactgtgcactaaatgaggacatagattttaaaagaaaatgagtttactagacagtgaaaagaaagaactatgcgcgacagaaaatattaatatctaaaagtaaatatttaaaagtgtcatctggaaataaaaatctttctagaaggcaaaacaagaaatatgcgaaagttacaatatttaacacaatattgagaagaatttaataattagagctatcaagggaataagttgcctcataaactaggtaagctccctacgattggaagtatttatggagaggcttaccaactgtcaggaatgttgtaaaatcaattcctgcactggaaaagaaatacattaaatatttctaaggcctttcccaccaacagtttatgtgattccctgccctacccttaccattaatgtaatttatgatacca

SEQ ID NO: 172336 - DNA, 784 bp, Homo sapiens
gggacaatggtgtggggaaatgacatcaaaggtccaaaagaaagtttcctagcaaggctgccaccaccctggggcagccaacttaggggtgcaggacagttatgagaggtacagagttaagacaagccaccggtctgggctgtgaatgagtgtgaatcagcatgagtgccgcttcctcggcccccacttcaggagaatgcacccacatccctgccatctgatgaacatggaatggtttttcttacctgggaaagaatagctggagcctccgaccacagggttttcccaaggtggggaaaccaagccgggttcttagacaagttaagtacagatgtccacaagcactgcagctggagacagtgctgagtggacgtcaggtgctgacgaccacaagacacacacgcccagcaagcgtctgatgggggtctcggatgcagataaagatggagaagtcctactctaaagaagccaggaggcccacgtggaaaatctgcctttcacactgccccatggaaggaggaatgtatttgttccagaagaaagagaggaatcatgacctggataaagcagcgagttaagaatgccagcttgacctcagaatgaaagcttctatttagtttgtttttaaaggtaggatctcactacgttgcccaggctggagggcaatggctattcacaggtgcaatcccactactgagcagcgtgggagttttgacctgctccgcttctgaccagggcaggtttacctctccttaggcgactggtggtcccctgctcccagaag

SEQ ID NO: 172337 - DNA, 355 bp, Homo sapiens
ggccttaagaagaggaaggccgtgacctcacttaggttctaacaggatcccccagctcttttgatgaaattaaatcgcaggggtaagggcagaaacaggacactcattcagaggccgatggggtgatagggcagtgatgatggaagctcagacccgggtgctgagatgcggtcccacctgatgtatatttgggaaataaactgatcaatgggttaggtatgtgggttatggaaaagatacgtttcaagggcagccgctagatttggggcccgaatcaacaggtgagtggctgaatacccactcttaggaacaacacatttttgcaacatgatccagctaagtctcatgtctgaat

SEQ ID NO: 172338 - DNA, 397 bp, Homo sapiens
tcccccataatccagaaaagtaaaagtatgtatttatctagaagaagcactcttgtaaattgttactgttatgttaatggcttctcaatgccaacaaaataaatctgaacttcgtagtgtgacattcaaggccatctaagatctggtccttgcttacctcctctactttaatattcttagcacatcatttctatgcacacataccctctgcacaaaaagcaaatggaaaatctggggctgtactagtttttttttttaatttccaaaacgtattatggagttttgttgtcatcagtcaccctctacctggaatgccttcttcctcattcactttacctgcttcaaatggttgatataaaaatgacttgctagtgcctttaaactggaggtggtacat

SEQ ID NO: 172339 - DNA, 655 bp, Homo sapiens
agaagaccaagcaggcagacgtgttcgggggcccgcgggttccgagactggagactggacctttggctgtccccacgtgcattctaggtcaacggtgcggtggcagaaccctggggctctcccccgcggaactcggccctggccgaggccccaaccacgctagtaggaggaggccgagcatccctcctcgaaatcgcgaaatcccggcccgacaatgtagccacggagtcgaaagccgcgtgcgaacttggcactcacaaagcctagataaccgtctattttctcctgtaaaataggagggatggacccccacagatcattgtaaaaggttcttacaaagaaaaatcctcctggactgggcacggtggctcacgcctgtaatcccagcactttgagcggatcacacttcgagaccaacctgaccaacatggagaaaccccgtctctactaaattagccgggcgtagtggcgcatgcctgtaatcccagctactctggaggctgaggcaggagaatcgctttaacccgggaggcagaggttgtggtgagccgagatcgcgccattgcactccagcctgggcaacaagagcggaattctgtctcaaaaaaaaaaaagagagaaaagaaaaatcctggaagtcaagtaaaaatgtgtg

SEQ ID NO: 172340 - DNA, 1859 bp, Homo sapiens
  misc_feature (1379)..(1379): n is a, c, g, or t
  misc_feature (1407)..(1407): n is a, c, g, or t
  misc_feature (1411)..(1411): n is a, c, g, or t
  misc_feature (1414)..(1414): n is a, c, g, or t
  misc_feature (1417)..(1418): n is a, c, g, or t
  misc_feature (1423)..(1423): n is a, c, g, or t
  misc_feature (1427)..(1427): n is a, c, g, or t
  misc_feature (1440)..(1441): n is a, c, g, or t
aaaaaaaaaaaaagatgtgagggtgatctggctgcgacatctgtcaccccattgatcgccagggttgattcagctgatctggcggctaggcgggtgtcccctcccttccttaccgctccatgtgcgtccctcccgaaactgtgcactcggtcgaagaggacgaccatccccgatagaggaggaccggtcttcggtcaagggtatacgagtagctgcgctcccctgctagaacctccaaacaagctctcaaggtccatttgtaggagaacgtagcgtagtcatcccatcaccctttgctctcttttcggactcggcccgcctgcacccaggtgaaataaatggccttgttgcgtgtacacacacacacacacacacgcgcgcgccgagcatggtggcacactcctgtagtcccagctactgggaagactcaagtggaagggttctttgagcccaggaggcagaggctgcagtgagccgagatcctgccactgcaatccagtctggccaacacagcaagaccctgtctcaaaaaggaaaagaaaaaagactagtagaaaaactctgtaaaagagccatgaagggagacggtcccgtcagatgcgaaaatcctcaggccgggtgcggtggctcacacctgaaatcccaatactttgggaggccaagacaggtggatcacctgaggtcaggagttcgagaccagcctggccaacatggtgaaccccatctctactaaaaatacaaaaattagccaggcatggtggtgggcacctgtaatcccagctacttggcagactgaggcaggagaattacttgaacccaggaggtggaggttgcggtgagccgagattgtgccattatactccagcttggacgacaaaagcaagaccccgtctcaaaaaaaaagaaaaaaaaaaatcctgtgtcgggcctcagtttaaaatgtgtggtacagtaagatcatagacaggcagtcagagacagacccaagtacagatgggcattcactgtctgaccaaggcagccccttacatgaacagggtaaagatagacttgtctaaaaatggcattaggcacctgaggagccatctggaaaaagatgaagtcagatgcaaacctcactttgtatactagataaggatccaatgtagtaaatatttaaatgctagtgctagacccaaaataatattagtgtcaagcatgaccttttaactatgactcaaattccagaagccatacaaaagacatgttttttcttgtcttttttttttctgagacgaagtttcactcttgttgcccaggctggagtgcaatggtatgatctcagctcactgcaacctccacctcccgggttcaagcgattctcttgcctcagctacttngcagactgaggcaggagaattacttgancccnggnggnngaggntgcngtgagccgagatnntgccactgcaatccagtctggccaacacagcaagaccctttctcaaaaaggaaaagaaaaaagactagtagaaaaactctgtaaaagagccatgaagggagacggtcccgtcagatgcgaaaatcctcaggccgggtgcggtggctcacacctgaaatcccaatactttgggaggccagggcaggtggatcacctgaggtcagggtggtctcgaactcccaacatcaggtgattcacccacctcagcctcccaaagcgctgggattacaggcatgagccactgtgcctggtctagaaatctgtatttttacataaaatctttctatttaaaataatagcccttctgctctggtccttgggcccttcctccaaaaaataaaaagagtataataaaaaataaaatgtgggcaatctattc

SEQ ID NO: 172341 - DNA, 414 bp, Homo sapiens
ctgagacgaagtttcactcttgttgcccaggctggagtgcaatggtatgatctcagctcactgcaacctccacctcccgggttcaagcgattctcttgcctcagcctccccagtagctgggattacaggcatgcgccatcacgcccaactacttttgtatttttagtagagacggggtttctccatgttggtcagggtggtctcgaactcccaacatcaggtgattcacccacctcagcctcccaaagcgctgggattacaggcatgagccactgtgcctggtctagaaatctgtatttttacataaaatctttctatttaaaataatagcccttctgctctggtccttgggcccttcctccaaaaaataaaaagagtataataaaaaataaaatgtgggcaatctattcaaaa

SEQ ID NO: 172342 - DNA, 637 bp, Homo sapiens
  misc_feature (11)..(11): n is a, c, g, or t
actctagagtntcccatgccaataacctccatctaaagtcaagaccaaagaaagaatcttaagaactatgagacaaaagtgtcaggtaacccatatgttaatctaacttattagattaaaggacatttttcagcagaaatctcacagatcagaagggattagggtcctatctttagctgccttaaacaaaataattgtcaggcaagaaatttgaatccagcaatcctaaggttcataaatgaaggagagataaattatttttcagacaaatgctgacagaatttaccacttccaagccagcactacaagaaatgctataggagttctaaatcttgaaacaaaacctcgaagtacaccaaaataaaaccttcttaaagcataaatctcacagggaaagcaataactgacaatggggggaaaaaacaaggtattcaagcaacaactagcatgatgcatataacagtgcttcacatcttaatactaatgaacgtaaatggcctaaatgttccacttaaaagatacagaatggcaggatcgataaaaatccaccaaccaagtatctgctgtattcaagagactcacctaatacataaggactcacatcaacttaaggtaaagggaggtaattggcattcca

SEQ ID NO: 172343 - DNA, 731 bp, Homo sapiens
agactggcttaaggatagcagagaaggggatgccaggggtgacttctaggtttctagctttcgtaaccagccactgagatagggaactttggagaataatgtagtttggagagagaactgcatttagttctggacatttttagttcgaggtacccttgagatcttgtcagttctgtatatccagccatctcctgggtatctgtacttggttcatttatcataatctcaaaccaagagtttctaaaatcggccgtgttcatctttctctaaaaccccctcctgtgttcttcacatcttttggtggtaccaccactatttatcccagagatctgggcccaaagctgattcatctttgagtcttccccagtggctagtctcttttgctttctacctcggtccttctctacttctagatcctcatagcctctcacttgtactgaagtatcagctttcatggttttgaggagtggttgtagcccacttcttgctagtccagaatgctcagtgctgccagatgaatcttcataaagcaccagttaatcatggcattcctgttctccagaagcatcctttagatctcagtctccctgatcctagccgtgtagtactccccaggaaattcccatcaccgttgctgaaacctggcctatatttttttaaaataaactctccatgcttttcccacatgtgcagctgatgtgactcttacttgcttctcaaatgccaatctc

SEQ ID NO: 172344 - DNA, 391 bp, Homo sapiens
aagacagcagactgaagcctattatgttaactcttctgcacagaagggagttcatgtttgaggcgtgttatttcagatacataaggttattttcagtgtttagttgattacttagtaaacataggttgtctttcgaacgagttgtgatgaaggagaaccgtgtcccatccgtttgcagtggtttatccactgtctgcatggtgtatccttaacatggacagcagcgcacatcctgcacttggtcatctcattctttctgtttctatttagcactcactgcatttctctttttcatggcccttggccctttcaggcgttccccctctcaacattgtagatatctgcatattggaaattcacacccggaaataaaatagaaatatgtagttta

SEQ ID NO: 172345 - DNA, 486 bp, Homo sapiens
ctgtaatcccagcacttcaggaggccaaggcaggcagatcatctgaggtcgggagatcgagacccacctgaccaacatggagaaaacccgtgtctactacaaaattagccaggcgtggtggcgcatgcctgtaatcccagctactcagaaaggctgaggcaggagaatcacctgaacccgggaggcagaggttgcagtgagctgagatcgcaccatttcactccagcctgggcaacaagagaaacttccttgccaaaaaaaaaaaaggtagcatttccttagagaaaaaattagttaacagcttgtgcaatgacagcacagatatttaaatcattccaatgtcatcgtcacatgacagcttaggataacgacacttattaggtatgcagctttagacaaaacaatctttctgagtacaagttttcccttctgttaagccacaaaaaagaaaggggtgttgggcgataaatcacgcgatcctctatc

SEQ ID NO: 172346 - DNA, 154 bp, Homo sapiens
gaccatcctcaacattcttggtggctgcaaccttagtaggctttgaccattaattaaactgacatgattcacgaattggataaaggcttttgacagtaggaataaacatcagatgggtagattgattccctatccttaaggaaaagaaccacag

SEQ ID NO: 172347 - DNA, 624 bp, Homo sapiens
agtggcactttgtaataaaatcttatgtttattttccactgttgaatacacataccttagtgttcccagagagggaagcctacaatgctatccaatgaatagtttgcagatggattaaatacatgtaccaatgaaataaaacgtgcagatttggggctttttgcctcctacctttgctctgggcccagagctccccgatgatgacacgggaggtttgtgcaaagatctgaagtcaagaaggattagtttaaagagtcagatgaaaaaggacacaaatgaaaatgcttctgcatgagcctgaaaaccaacacttagcaatgagtgattctgactttggggcctgtaacaaataatagcaaatgagggaagtttccagtggcttcacagcaggagggcaatggccagggaaccactgtgaaacagatcagtcaacgggacttcctggttcttgaggaagctttgaaggcagggagtgtggcatacatgtaagggtctttgttgctaatatttttttttgaggcatatactttgcaggggcaaatcttcaagttgccacttcctgagaactccctcattttagtgaatatatatttcaagcccagtagttgaatagcactattattg

SEQ ID NO: 172348 - DNA, 3884 bp, Homo sapiens
  misc_feature (1224)..(1224): n is a, c, g, or t
  misc_feature (1230)..(1230): n is a, c, g, or t
  misc_feature (1246)..(1246): n is a, c, g, or t
  misc_feature (1295)..(1296): n is a, c, g, or t
  misc_feature (1299)..(1299): n is a, c, g, or t
  misc_feature (1321)..(1322): n is a, c, g, or t
  misc_feature (1326)..(1326): n is a, c, g, or t
  misc_feature (1335)..(1335): n is a, c, g, or t
  misc_feature (1337)..(1337): n is a, c, g, or t
  misc_feature (1345)..(1345): n is a, c, g, or t
  misc_feature (1353)..(1353): n is a, c, g, or t
  misc_feature (2889)..(2889): n is a, c, g, or t
  misc_feature (3835)..(3835): n is a, c, g, or t
gcgacgtcagaggcgcgggtgttcgcctacgtcactggggcgctacggtgcctggagctgggcggtcttctcgtcagagtggggactggtgagagcgacctccccgccaggtcctgtgtgttgccggctgaagaagggtagctgaaaaattcagacccagcacagtgtttatgttggtcaaaaatagaaaactatggcgcggccgaggcgggaggacccttcaggccaagagcagcctagcaacatggcgcaaccccatctctgtagtcctacctcagccccccagctacttgaatccaaagattcaaggctccagtgagctatgatcccaccacagcattccagcctgcgagattgagatgatgattattccccaccttctaagagacaaagaccaacgagccaccacagccaccagtcccagaacccgccaatgctggggaacggaaaatgagggagttcaactctggccctcacaatccagtggaggagacgaaactcatctgcctctgtccctctgggcacgcctcatgccaggtgcatctgtggacaggggccacgctcctgggcttccaaagttggagaaagctgccaggctcaggtctgaaggccagaattctacagtaagtcctactgagtcaaggtgggagcagggtcggtggcttccgaggctctgcgggagaatccgtttcctggcggtagaggtggcctgcactcctcagcttgtgctgcccgtctcgaatgactggagtttcctgcttctgtcactacacctcccaccctctcccatcacctgctctgctcttacaaggatccgagtggagtcttgctctgtcatccaggctagcagtggcgtgatcttggctcgctgcaatgtctgcctcctgggttcagatgattctcctgcctcagcctcctgagtagctgggactgcaggcgcccgccaccatgccctgctgttttgtatttttgagaaatggaataatcgtatcgctgatctatgtaaacaaattgaagaattgtctgaaagaaaatatgacatgaacttatgaattcaacaggtgaagatttacaacttgataaatcagctttgtgagctcgagctgtaaaagccaaaggtccggtgatgatcccatacccttttttccagtctcatgttgaagatttttatgtagaaggccttcccaaaggaattttttttttttttttgagatggagttttcnctcttntcgcccaggctggggngcaatggcgcaaccttgctggtcactgcaacctctgcctcctgggttcnnganattctcctgccttagcctcccnngtcnctgggattncnggtgcccnccaccacncgaggctaatttttgtatttttagtggagatggggtttcaccatgttggccgggccagtctcgaactcctgacgtcaagtgatcttcccgcctcgactcctgacatcaagtgatctttccgcctcggcctcccagagtgctgagattacagacgtgaacccatgcctggccaggaattttgtttttcaggaaggctttctactaatggaattcctggccttgagaggatgttactttcgaaggaaaggatttttttgttattaaaagagccacctaagctgaagattcccttgagaacaagtactgtcctgcggtttcatggcccttcttccatttgtggttcttgcgaagtggaatttaaatgacatcttatcaagatggataaaccctagtttcccagtgctggaatatagaaaatggatggacaagtaaatcccactcagcacccatagtccaggcatggggacctcaacacacctgagccccagacatcacctttcattctggacctaccatgaaagacttctgaatccaggaagagaaactgactgggcaacatgttattcagaaacaggaccttgccctgtcactcaggatggagttcagtggtcctatcatggctcattatagcctcaaactcccaggctcaagcaatcctaccatgtcagccttcccagtagctgggactacaggctggagtacagtggcacaacctctgctcactgcagcctccacctgccaggctcaagcaattctcctgcctcagcctcccgagtagctgggattacaggaagtgaccgcacaatgactcaagctaccacatactgttgattgtgaaatgccagttgaagcatatgtcctgcgagcttaggggtgctacaagttgaccactgcagcagtaaagatgactctgaagaatggcgtgggatggatcctttcgaatgcatttgagcagcggtctccaaccacagggccacagagctggagctggatctaccatgaaagacttctgaatccaggaagagagactgactgggcaacatgttattcaggaacaaaaagatttggactgtaacttaaaaatgatcaaataatagtgcatgcatcaagtgcaatgggaagctcttctggagagtgagagaagcttccagttaaggagatggggtctcaccctgtcacccaggcttgagtacagtagtgctatcacagctcactgcagccttgaactcctgggctaaggatcctcctacctgagcctcctgagtagctaggactggtctccctctgttgtccaaggctggagtgtagtagtgctatcacagctgactgcagcctcaaccttccaggctgaagcgatcctcccatctcaacctcccacgtggctgagactacaggtgcttgccactatgcccaactaatatttggaatttttgtatacgtggattccagaggggtgacagcgaaacgtgggaccatccagttgcaggaaaacaagcttaacacgcccactgattctacattatgctcctacctccnggcagcctctccaggcccagaactttctccagtcagcctctacagaccaagctcatgactcacaatggcctatttaggcccataccctacgtcacggcagtctccgcagatgaggctactgcctcacaacagcctccacaggcacagctccatcgttacaatggcctctttagacccagctcctgcctcccagccttctctccaggccctgaactttctcaagtcgacctcaccaggcccagctcatgcttctttgcagcctctccaggcccagctcctgcatcttggtggcccctccaggcccagcctctgcctcccgtcggcctctacagtcccaacatctgtctcacagcagattcttcaggcccagcatctgcctcactgtggaccccccaagccaagctcccaacctttcagcagcttctacacacccagctcctgccacccagtggcttctttaggccaagctcatgcttcacaagggcctttccaggcccaacttttgtctcatggcaaccttccctggccagattcctgcctgtctcccagcagcctagacaggcccaggtcttgcctcacactggcctctctacatccagcttatgcctcacggtggcctctccaggcccaactcctgtcccaggacgtcatctccgggcccaaaacttactcaagtcagactctctagtcccaactgctgcctcctggtggcctatgaaggcccaaaatctcctcaagttggcctctccaggcccagctcctgcctcctgtcagcgtctagaggcccaacctctgcctcatgggggcttctccaggcccacctcttcctcttggctgggtctacaggcacaactgctgcctcacaacagccttttttggcccagttcctgtccagctcatggcggccaatgtaggcccaaaacttcctcaagtcaaactctccagnccccacccccagatgcatttattagaaataataaagttctttcttagct

SEQ ID NO: 172349 - DNA, 469 bp, Homo sapiens
ctctttacaaaaatatttttcaaaattaaataaatgtagctaggcatggtgatgtgtacttgtagtttcagctactcaggaggctgaagtgggcagatctcttgaggtcaggagtttgaggccagcttgggcaacatagcaagatccctcactctacaaaaaaattaaaaaaataaccaggcatggtgacactcaactgtactaccagctactggggagctgaggcaggaagatgccttgaactcctgggctaaggatcctcctacctgagcctcctgagtagctaggactgtaggtatacatgacgatacttggctaatttttaaattgttttgtagacacggggtctcactttgttggccaggctggtgtcaaactaatggcctcaagtgacccttccacccctgcctcccatcctcgaggcatgtgccaccacaaggagcacttgttcaattttctaaaaaaaaaa

SEQ ID NO: 172350 - DNA, 1426 bp, Homo sapiens
  misc_feature (431)..(431): n is a, c, g, or t
  misc_feature (1377)..(1377): n is a, c, g, or t
catgccttgggagctaagtggttgctgcacttgaccactgtgaagactggtgtgggaagggtcgtttcggatgcacttgagcaggggtccccaacccctgagccatggagccgcaaggagccacacagcaggaggtgagtggtgtcgagtgagggagtgagggaagcttcgtctgtatttacagccactcccctttgctcacattcccgcctgagctccaccttctcagatcagcagcagcattagattctcataggagaacgcaccctgttgtgaactgtgcatgtgagggatctaggttgcgctgtccttatgagaatctaatacctattgatctgtcactttctcccatcacgctcaggtgggaccatccagttgcaggaaaacaagcttaacacgcccactgattctacattatgctcctacctccnggcagcctctccaggcccagaactttctccagtcagcctctacagaccaagctcatgactcacaatggcctatttaggcccataccctacgtcacggcagtctccgcagatgaggctactgcctcacaacagcctccacaggcacagctccatcgttacaatggcctctttagacccagctcctgcctcccagccttctctccaggccctgaactttctcaagtcgacctcaccaggcccagctcatgcttctttgcagcctctccaggcccagctcctgcatcttggtggcccctccaggcccagcctctgcctcccgtcggcctctacagtcccaacatctgtctcacagcagattcttcaggcccagcatctgcctcactgtggaccccccaagccaagctcccaacctttcagcagcttctacacacccagctcctgccacccagtggcttctttaggccaagctcatgcttcacaagggcctttccaggcccaacttttgtctcatggcaaccttccctggccagattcctgcctgtctcccagcagcctagacaggcccaggtcttgcctcacactggcctctctacatccagcttatgcctcacggtggcctctccaggcccaactcctgtcccaggacgtcatctccgggcccaaaacttactcaagtcagactctctagtcccaactgctgcctcctggtggcctatgaaggcccaaaatctcctcaagttggcctctccaggcccagctcctgcctcctgtcagcgtctagaggcccaacctctgcctcatgggggcttctccaggcccacctcttcctcttggctgggtctacaggcacaactgctgcctcacaacagccttttttggcccagttcctgtccagctcatggcggccaatgtaggcccaaaacttcctcaagtcaaactctccagnccccacccccagatgcatttattagaaataataaagttctttcttagct

SEQ ID NO: 172351 - DNA, 886 bp, Homo sapiens
cgccatgttgcccggcctacgcatcgggggcgtggcccagtgacgtcacagctaagcgcctctgtatcgtcgcgaatccgtcgcggaacctgtcttctgtctttacccagagctaccatgagcaagcggaaccaggtatcgtacgtgcggccagccgagccggcgtttctggcccgcttcaaggaacgggtcggctacagggagggacccaccgtagagactaagagaattcagcctcagcccccagatgaagatggggatcacagtgacaaagaagatgaacagcctcaagtggtggttttaaaaaagggagacctgtcagttgaagaagtcatgaaaattaaagcagaaataaaggctgccaaagcagatgaagaaccaactccagccgatggaagaatcatatatcgaaaaccagtcaagcatccctcagatgaaaaatattcaggtttaacagcaagctcaaaaaagaagaagccaaatgaagatgaagtaaatcaggactcggtcaaaaagaactcacaaaaacaaattaaaaatagtagcctcctttcttttgacaacgaagatgaaaatgagtaagtgtaaatattttgaatttagtctactttgaaagtatatggagtgttcattaaaatcacattttttcctattataaagatactacaagttctttatagaaagtttaggaaatagagaaaaaaatttaataaactacatctattcatcaatacccctctgacttaaaatgccaactctatagaaattagctagtattaacattttgttatttcccttgtgtggttgtatatatatgtaaattatatttttaagcaaaatacattttttgtgtgtaaacaaaattttataaatacaactgtattgc

SEQ ID NO: 172352 - DNA, 916 bp, Homo sapiens
cgccatgttgcccggcctacgcatcgggggcgtggcccagtgacgtcacagctaagcgcctctgtatcgtcgcgaatccgtcgcggaacctgtcttctgtctttacccagagctaccatgagcaagcggaaccaggtatcgtacgtgcggccagccgagccggcgtttctggcccgcttcaaggaacgggtcggctacagggagggacccaccgtagagactaaggtgagccttcgccagtcgtgtttcttcggaagcgcagccagcccgccactttcaacttttgcctctacttggagggtgggtgctgtcgggtccctcttttcacccgcgctcgaacccaattccggtggaactcggacccccaggctggttcttttcaagcgaccacagccccctacgcccaggaagctctgtagttttcagagcgctgctgtgttcctgaaaatgaactgacgtgtaaaccacctggtccttggtagatggtaaagaaagatcactttattgtctcttctttctcacttgtttacctcaaaagctgtgagttcgcagggtgagttagagttacagcgtcgtcccgtattccagataaggacacaggccactcgatcaaatgacccccgccccaaccatgtcctaggactcgagtctggaacgtcttcggaggaatgtcctgaatctgtttctatgctttgttaattaaaaataaataaaaataatatagagaaggtcgggcacagtggctcacgcctgtaatcccagtactttgggaggcctaggtgggcggatcacctgaggtcaggagttcgagaccagcagagccaatagccaatatggtgaaaccccccgtctctgctaaaaatacaaaaattagccgggcatggtggcacatgcctgtagtcccagctactccgga

SEQ ID NO: 172353 - DNA, 5177 bp, Homo sapiens
  misc_feature (3375)..(3375): n is a, c, g, or t
  misc_feature (3514)..(3514): n is a, c, g, or t
cgccatgttgcccggcctacgcatcgggggcgtggcccagtgacgtcacagctaagcgcctctgtatcgtcgcgaatccgtcgcggaacctgtcttctgtctttacccagagctaccatgagcaagcggaaccaggtatcgtacgtgcggccagccgagccggcgtttctggcccgcttcaaggaacgggtcggctacagggagggacccaccgtagagactaagagaattcagcctcagcccccagatgaagatggggatcacagtgacaaagaagatgaacagcctcaagtggtggttttaaaaaagggagacctgtcagttgaagaagtcatgaaaattaaagcagaaataaaggctgccaaagcagatgaagaaccaactccagccgatggaagaatcatatatcgaaaaccagtcaagcatccctcagatgaaaaatattcaggtttaacagcaagctcaaaaaagaagaagccaaatgaagatgaagtaaatcaggactcggtcaaaaagaactcacaaaaacaaattaaaaatagtagcctcctttcttttgacaacgaagatgaaaatgagtaagtgtaaatattttgaatttagtctactttgaaagtatatggagtgttcattaaaatcacattttttcctattataaagatactacaagttctttatagaaagtttaggaaatagagaaaaaaatttaataaactacatctattcatcaatacccctctgacttaaaatgccaactctatagaaattagctagtattaacattttgttatttcccttgtgtggttgtatatatatgtaaattatatttttaagcaaaatacattttttgtgtgtaaacaaaattttataaatacaactgtattgcaaatgttctttgtcctgcttctcacttgacattgcattatgagtattcttccaggtcagtaaatttcaaaaacctgacattaatagctacagataatttcataaacatctcattgtatctttttcattagcaatagctccactttgggtgggggagatgataatgtgccttgttaaaaatacctccccaactcctgctaagggtggccatgagactcagctctggcaagttaagaaatacaggtggaattctgcttgataaagctgctgggttttttgttacaaaaggacagacttggcaaacatgagcctttgctcttatcttttcatcctacttggagtgcagagataaaacctgagtaccagagccacttttaggcataaggaaggcagccatgtgctttgggtcatgttagtaaaaagactcagagcttggctccttgctgacatgcctggaggagctgctacaccagcttggattgctgacctctgacttcttggtagtgagaagaataaacactgtgcttaattaggccttggtcaggtttcttttatatgcagccaaatgcagtcctaagtaatacaataaataactggtcaaactgttactggtggagggtgtccaggttcttggcattttggacaaataattgaacaaaacgcacaaagcaatgaatatcctctagaggtttgccattggttacttggcgtacaccctgtgtaaatgaagtagtggcccgtgacctgtctgattggtgcagaaagtgaccaatcagaggctgaagtgaagttacaaagttatactcctgtgtaaatgaggacttggcctatgaccagtctgattggttgcaggaggggaccaatcagaggcactttcatttttcatctgcaatgcagaaaaggcaaggggattgcaaagggagtagcctctgatccttttgttacttaggtatggagaggtggggttttccttttgattcagttctaggaagtcaatgtgaatcagccttaggttccctgtctccagaccctattctcctgcctcattttccccctgagagacgtgatcctcgtaaatctttatgggaggctgagagactgagggtctttcttctgtaactgcttcatgctaacttgggacacagtccctacctattggagatcacgtaactctcaccctgctttgtctaggggagacagggtagcttcttgatggccggtggtgtcttctcctgaaactggctagaaatcttgtcacatgatcatctaacttggtggtctctaggcaaaaggaaatggatttggttaaaagatttaacagatatggtccaaaaaccaaggcaaatataatcattaataatgggctggccaagggagggagccatgaaacccaacttagtgccctttaggtgccccagctgttgtcatattttagaggcccagtcagctagttttcaggtggtgtcccttactaatcctgattggttgacatcaaaacagcattcttcttctaggaaaatacataagccacctgtttcagcagttaggagatctagtccccttcgattttgcaaagcgaccactgccaaggagcctatccgaatttgtaaggtgacaatactttgagcaatgttatccaggctttccataaaatccttggacaagcgttggtaataggatagggaagttgcaatcccgctaactcccattcctacctctgctgttattcctagccgttgtgtctggtggttgcagttaaaggtataatgagggattggttgttgggagctatattaatttagggacatacaatatttctgtctccagtctaccacttccaccaaagacaaatcacagcagaaccgacctaacttcaaaataaactgcagtcccatatactgggcctgattacccacacaaagtgcaacaagaatcattgtccatatagactctcctagattggctttgctagaacatttcacaaggccatttcagtcaaagtcctgagaaagtaaccggtttcaattgtgccctattacaaaagaaaacgtggttattaactttatacagacaaatgccatgaattaagaatattcataaatagtttacaaattctggagaaattagaatactcaatacacttaaagtgtatttcaaggctataaatagctcaaaataaaaagattattcagactctgaaaaaacaaaaagaagtagcaatatttcaaacaacaaaagccatacaaattatttcagtcttccattagttcatttcagtccatgtaatcaactcctgctctacttcatattcatctttatgaacacatcagcctttcaattagtgccttggaagttttctgtctaatccaatggcacactctccaaagttaccagaaacctgcattcaagagttcttttcatgaactccaaagaagtaagccttggactgtagctgattataagtcactttttttttttgagaaggatcanagcaaaacatcaattatggatgacaaaagtcttaagacagccataaagacacagttgacaaatgtggctatttctgtggcttacaacaatttaacataatcattacaacatatattaagacatatcagaattttagaantctcatacaatcctggaacacatattaacaacaaatctctatcagtataacccaaaggaagctaaacaccacctcacacttgacaatgtttcctgtataattcaaacattacaaataagcctaatataagcctaatatgtcactcttgaacttcaggaagcctaatatccaaaaagttagtttaaggtcaaaagtttttgaattaacttttttccattagtatggtcatatctttcttactaatttgtaagttatgtaatttatcaatttttttttgttgttctgtttcccaacctctatgtcagataaagaatcacccaggccagacacagtggctcatgcttgtggtcccagcactttgggaagccaaggtgggagaattgcttgaagccaggaatctgagcccagcctgggcgacaaagcaatacccctatctctacaaaaaataaaaaatagccaggtgtggcgacacacacctgtggtcccagctgctcgggaggctgagcgggaggatggcttgggcccaggggttcaacgctgcagtgagctgtgattgcgccactgcactccagcctgggcaacagagtaagaactgtctcaaaaaaaataaaaaatagaaataaattttaaaaaaagaattacccatattctctttgtttttgtttattcacattaacctttattctatctggaatttatttgagtatacttttttctcaaataatcaattgtcctagaaccatgtgtttctcatttatttgaaaggccatctagtgagagatttctccaaatgttggggtagggaagggaggggaagcactttaaagtctgagcctttagaggtgattcctcaagaccctgcttaatcctaacaattttcctcattagtaaaagtcagcccaaactgggggcttgttaagatccttaccagccacatccatctgaaattatgaatttcaaagtatcttacaaatttggtgccacattatcttttttaagtttgttttgttttgtttttttgagacagagtctcgctctgtcacccgggctggagtgcagtggcgcgatctcagctcactgcaagctccgcctcctgggttcacaccattctcttgcctcggcctcccaagtatctgggactgcagtcgcccgccaccacgcccggctaatttttttgtatttttaatagagacggggtttcactttgttagccaggatggtctcaatctcctgacctcatgatccacctgcctcggcctcccaaagtgctgggattacaggcaggagccaccgcgcctgggcctttttttaagttttaagtacctataaagaacactgaaaggtgatgtgtgtggatgagctaggaagacctgaaataggctctctctaaattaatcaaattaatcctgaagccattctgcaatactgtctttaatgtatactcacttgttatagaagccagggttttttcccctaatttgtatcattgctatatgtgttattgtaccaaactacactgttttaattgctgtaaattttaatatgtcttagtatctgggtgtgggaatcttgaaagcatggagtttgtgttattcaccactgtattctcaaatatcagaagagtatctggcctactaagtgcacaataaacatagttaaaatg

SEQ ID NO: 172354 - DNA, 5002 bp, Homo sapiens
  misc_feature (3200)..(3200): n is a, c, g, or t
  misc_feature (3339)..(3339): n is a, c, g, or t
aattcgcggccgcgtcgacacgacagaagggacccaccgtagagactaagagaattcagcctcagcccccagatgaagatggggatcacagtgacaaagaagatgaacagcctcaagtggtggttttaaaaaagggagacctgtcagttgaagaagtcatgaaaattaaagcagaaataaaggctgccaaagcagatgaagaaccaactccagccgatggaagaatcatatatcgaaaaccagtcaagcatccctcagatgaaaaatattcaggtttaacagcaagctcaaaaaagaagaagccaaatgaagatgaagtaaatcaggactcggtcaaaaagaactcacaaaaacaaattaaaaatagtagcctcctttcttttgacaacgaagatgaaaatgagtaagtgtaaatattttgaatttagtctactttgaaagtatatggagtgttcattaaaatcacattttttcctattataaagatactacaagttctttatagaaagtttaggaaatagagaaaaaaatttaataaactacatctattcatcaatacccctctgacttaaaatgccaactctatagaaattagctagtattaacattttgttatttcccttgtgtggttgtatatatatgtaaattatatttttaagcaaaatacattttttgtgtgtaaacaaaattttataaatacaactgtattgcaaatgttctttgtcctgcttctcacttgacattgcattatgagtattcttccaggtcagtaaatttcaaaaacctgacattaatagctacagataatttcataaacatctcattgtatctttttcattagcaatagctccactttgggtgggggagatgataatgtgccttgttaaaaatacctccccaactcctgctaagggtggccatgagactcagctctggcaagttaagaaatacaggtggaattctgcttgataaagctgctgggttttttgttacaaaaggacagacttggcaaacatgagcctttgctcttatcttttcatcctacttggagtgcagagataaaacctgagtaccagagccacttttaggcataaggaaggcagccatgtgctttgggtcatgttagtaaaaagactcagagcttggctccttgctgacatgcctggaggagctgctacaccagcttggattgctgacctctgacttcttggtagtgagaagaataaacactgtgcttaattaggccttggtcaggtttcttttatatgcagccaaatgcagtcctaagtaatacaataaataactggtcaaactgttactggtggagggtgtccaggttcttggcattttggacaaataattgaacaaaacgcacaaagcaatgaatatcctctagaggtttgccattggttacttggcgtacaccctgtgtaaatgaagtagtggcccgtgacctgtctgattggtgcagaaagtgaccaatcagaggctgaagtgaagttacaaagttatactcctgtgtaaatgaggacttggcctatgaccagtctgattggttgcaggaggggaccaatcagaggcactttcatttttcatctgcaatgcagaaaaggcaaggggattgcaaagggagtagcctctgatccttttgttacttaggtatggagaggtggggttttccttttgattcagttctaggaagtcaatgtgaatcagccttaggttccctgtctccagaccctattctcctgcctcattttccccctgagagacgtgatcctcgtaaatctttatgggaggctgagagactgagggtctttcttctgtaactgcttcatgctaacttgggacacagtccctacctattggagatcacgtaactctcaccctgctttgtctaggggagacagggtagcttcttgatggccggtggtgtcttctcctgaaactggctagaaatcttgtcacatgatcatctaacttggtggtctctaggcaaaaggaaatggatttggttaaaagatttaacagatatggtccaaaaaccaaggcaaatataatcattaataatgggctggccaagggagggagccatgaaacccaacttagtgccctttaggtgccccagctgttgtcatattttagaggcccagtcagctagttttcaggtggtgtcccttactaatcctgattggttgacatcaaaacagcattcttcttctaggaaaatacataagccacctgtttcagcagttaggagatctagtccccttcgattttgcaaagcgaccactgccaaggagcctatccgaatttgtaaggtgacaatactttgagcaatgttatccaggctttccataaaatccttggacaagcgttggtaataggatagggaagttgcaatcccgctaactcccattcctacctctgctgttattcctagccgttgtgtctggtggttgcagttaaaggtataatgagggattggttgttgggagctatattaatttagggacatacaatatttctgtctccagtctaccacttccaccaaagacaaatcacagcagaaccgacctaacttcaaaataaactgcagtcccatatactgggcctgattacccacacaaagtgcaacaagaatcattgtccatatagactctcctagattggctttgctagaacatttcacaaggccatttcagtcaaagtcctgagaaagtaaccggtttcaattgtgccctattacaaaagaaaacgtggttattaactttatacagacaaatgccatgaattaagaatattcataaatagtttacaaattctggagaaattagaatactcaatacacttaaagtgtatttcaaggctataaatagctcaaaataaaaagattattcagactctgaaaaaacaaaaagaagtagcaatatttcaaacaacaaaagccatacaaattatttcagtcttccattagttcatttcagtccatgtaatcaactcctgctctacttcatattcatctttatgaacacatcagcctttcaattagtgccttggaagttttctgtctaatccaatggcacactctccaaagttaccagaaacctgcattcaagagttcttttcatgaactccaaagaagtaagccttggactgtagctgattataagtcactttttttttttgagaaggatcanagcaaaacatcaattatggatgacaaaagtcttaagacagccataaagacacagttgacaaatgtggctatttctgtggcttacaacaatttaacataatcattacaacatatattaagacatatcagaattttagaantctcatacaatcctggaacacatattaacaacaaatctctatcagtataacccaaaggaagctaaacaccacctcacacttgacaatgtttcctgtataattcaaacattacaaataagcctaatataagcctaatatgtcactcttgaacttcaggaagcctaatatccaaaaagttagtttaaggtcaaaagtttttgaattaacttttttccattagtatggtcatatctttcttactaatttgtaagttatgtaatttatcaatttttttttgttgttctgtttcccaacctctatgtcagataaagaatcacccaggccagacacagtggctcatgcttgtggtcccagcactttgggaagccaaggtgggagaattgcttgaagccaggaatctgagcccagcctgggcgacaaagcaatacccctatctctacaaaaaataaaaaatagccaggtgtggcgacacacacctgtggtcccagctgctcgggaggctgagcgggaggatggcttgggcccaggggttcaacgctgcagtgagctgtgattgcgccactgcactccagcctgggcaacagagtaagaactgtctcaaaaaaaataaaaaatagaaataaattttaaaaaaagaattacccatattctctttgtttttgtttattcacattaacctttattctatctggaatttatttgagtatacttttttctcaaataatcaattgtcctagaaccatgtgtttctcatttatttgaaaggccatctagtgagagatttctccaaatgttggggtagggaagggaggggaagcactttaaagtctgagcctttagaggtgattcctcaagaccctgcttaatcctaacaattttcctcattagtaaaagtcagcccaaactgggggcttgttaagatccttaccagccacatccatctgaaattatgaatttcaaagtatcttacaaatttggtgccacattatcttttttaagtttgttttgttttgtttttttgagacagagtctcgctctgtcacccgggctggagtgcagtggcgcgatctcagctcactgcaagctccgcctcctgggttcacaccattctcttgcctcggcctcccaagtatctgggactgcagtcgcccgccaccacgcccggctaatttttttgtatttttaatagagacggggtttcactttgttagccaggatggtctcaatctcctgacctcatgatccacctgcctcggcctcccaaagtgctgggattacaggcaggagccaccgcgcctgggcctttttttaagttttaagtacctataaagaacactgaaaggtgatgtgtgtggatgagctaggaagacctgaaataggctctctctaaattaatcaaattaatcctgaagccattctgcaatactgtctttaatgtatactcacttgttatagaagccagggttttttcccctaatttgtatcattgctatatgtgttattgtaccaaactacactgttttaattgctgtaaattttaatatgtcttagtatctgggtgtgggaatcttgaaagcatggagtttgtgttattcaccactgtattctcaaatatcagaagagtatctggcctactaagtgcacaataaacatagttaaaatg

SEQ ID NO: 172355 - DNA, 5087 bp, Homo sapiens
  misc_feature (3285)..(3285): n is a, c, g, or t
  misc_feature (3424)..(3424): n is a, c, g, or t
cgccatgttgcccggcctacgcatcgggggcgtggcccagtgacgtcacagctaagcgcctctgtatcgtcgcgaatccgtcgcggaacctgtcttctgtctttacccagagctaccatgagcaagcggaaccagagaattcagcctcagcccccagatgaagatggggatcacagtgacaaagaagatgaacagcctcaagtggtggttttaaaaaagggagacctgtcagttgaagaagtcatgaaaattaaagcagaaataaaggctgccaaagcagatgaagaaccaactccagccgatggaagaatcatatatcgaaaaccagtcaagcatccctcagatgaaaaatattcaggtttaacagcaagctcaaaaaagaagaagccaaatgaagatgaagtaaatcaggactcggtcaaaaagaactcacaaaaacaaattaaaaatagtagcctcctttcttttgacaacgaagatgaaaatgagtaagtgtaaatattttgaatttagtctactttgaaagtatatggagtgttcattaaaatcacattttttcctattataaagatactacaagttctttatagaaagtttaggaaatagagaaaaaaatttaataaactacatctattcatcaatacccctctgacttaaaatgccaactctatagaaattagctagtattaacattttgttatttcccttgtgtggttgtatatatatgtaaattatatttttaagcaaaatacattttttgtgtgtaaacaaaattttataaatacaactgtattgcaaatgttctttgtcctgcttctcacttgacattgcattatgagtattcttccaggtcagtaaatttcaaaaacctgacattaatagctacagataatttcataaacatctcattgtatctttttcattagcaatagctccactttgggtgggggagatgataatgtgccttgttaaaaatacctccccaactcctgctaagggtggccatgagactcagctctggcaagttaagaaatacaggtggaattctgcttgataaagctgctgggttttttgttacaaaaggacagacttggcaaacatgagcctttgctcttatcttttcatcctacttggagtgcagagataaaacctgagtaccagagccacttttaggcataaggaaggcagccatgtgctttgggtcatgttagtaaaaagactcagagcttggctccttgctgacatgcctggaggagctgctacaccagcttggattgctgacctctgacttcttggtagtgagaagaataaacactgtgcttaattaggccttggtcaggtttcttttatatgcagccaaatgcagtcctaagtaatacaataaataactggtcaaactgttactggtggagggtgtccaggttcttggcattttggacaaataattgaacaaaacgcacaaagcaatgaatatcctctagaggtttgccattggttacttggcgtacaccctgtgtaaatgaagtagtggcccgtgacctgtctgattggtgcagaaagtgaccaatcagaggctgaagtgaagttacaaagttatactcctgtgtaaatgaggacttggcctatgaccagtctgattggttgcaggaggggaccaatcagaggcactttcatttttcatctgcaatgcagaaaaggcaaggggattgcaaagggagtagcctctgatccttttgttacttaggtatggagaggtggggttttccttttgattcagttctaggaagtcaatgtgaatcagccttaggttccctgtctccagaccctattctcctgcctcattttccccctgagagacgtgatcctcgtaaatctttatgggaggctgagagactgagggtctttcttctgtaactgcttcatgctaacttgggacacagtccctacctattggagatcacgtaactctcaccctgctttgtctaggggagacagggtagcttcttgatggccggtggtgtcttctcctgaaactggctagaaatcttgtcacatgatcatctaacttggtggtctctaggcaaaaggaaatggatttggttaaaagatttaacagatatggtccaaaaaccaaggcaaatataatcattaataatgggctggccaagggagggagccatgaaacccaacttagtgccctttaggtgccccagctgttgtcatattttagaggcccagtcagctagttttcaggtggtgtcccttactaatcctgattggttgacatcaaaacagcattcttcttctaggaaaatacataagccacctgtttcagcagttaggagatctagtccccttcgattttgcaaagcgaccactgccaaggagcctatccgaatttgtaaggtgacaatactttgagcaatgttatccaggctttccataaaatccttggacaagcgttggtaataggatagggaagttgcaatcccgctaactcccattcctacctctgctgttattcctagccgttgtgtctggtggttgcagttaaaggtataatgagggattggttgttgggagctatattaatttagggacatacaatatttctgtctccagtctaccacttccaccaaagacaaatcacagcagaaccgacctaacttcaaaataaactgcagtcccatatactgggcctgattacccacacaaagtgcaacaagaatcattgtccatatagactctcctagattggctttgctagaacatttcacaaggccatttcagtcaaagtcctgagaaagtaaccggtttcaattgtgccctattacaaaagaaaacgtggttattaactttatacagacaaatgccatgaattaagaatattcataaatagtttacaaattctggagaaattagaatactcaatacacttaaagtgtatttcaaggctataaatagctcaaaataaaaagattattcagactctgaaaaaacaaaaagaagtagcaatatttcaaacaacaaaagccatacaaattatttcagtcttccattagttcatttcagtccatgtaatcaactcctgctctacttcatattcatctttatgaacacatcagcctttcaattagtgccttggaagttttctgtctaatccaatggcacactctccaaagttaccagaaacctgcattcaagagttcttttcatgaactccaaagaagtaagccttggactgtagctgattataagtcactttttttttttgagaaggatcanagcaaaacatcaattatggatgacaaaagtcttaagacagccataaagacacagttgacaaatgtggctatttctgtggcttacaacaatttaacataatcattacaacatatattaagacatatcagaattttagaantctcatacaatcctggaacacatattaacaacaaatctctatcagtataacccaaaggaagctaaacaccacctcacacttgacaatgtttcctgtataattcaaacattacaaataagcctaatataagcctaatatgtcactcttgaacttcaggaagcctaatatccaaaaagttagtttaaggtcaaaagtttttgaattaacttttttccattagtatggtcatatctttcttactaatttgtaagttatgtaatttatcaatttttttttgttgttctgtttcccaacctctatgtcagataaagaatcacccaggccagacacagtggctcatgcttgtggtcccagcactttgggaagccaaggtgggagaattgcttgaagccaggaatctgagcccagcctgggcgacaaagcaatacccctatctctacaaaaaataaaaaatagccaggtgtggcgacacacacctgtggtcccagctgctcgggaggctgagcgggaggatggcttgggcccaggggttcaacgctgcagtgagctgtgattgcgccactgcactccagcctgggcaacagagtaagaactgtctcaaaaaaaataaaaaatagaaataaattttaaaaaaagaattacccatattctctttgtttttgtttattcacattaacctttattctatctggaatttatttgagtatacttttttctcaaataatcaattgtcctagaaccatgtgtttctcatttatttgaaaggccatctagtgagagatttctccaaatgttggggtagggaagggaggggaagcactttaaagtctgagcctttagaggtgattcctcaagaccctgcttaatcctaacaattttcctcattagtaaaagtcagcccaaactgggggcttgttaagatccttaccagccacatccatctgaaattatgaatttcaaagtatcttacaaatttggtgccacattatcttttttaagtttgttttgttttgtttttttgagacagagtctcgctctgtcacccgggctggagtgcagtggcgcgatctcagctcactgcaagctccgcctcctgggttcacaccattctcttgcctcggcctcccaagtatctgggactgcagtcgcccgccaccacgcccggctaatttttttgtatttttaatagagacggggtttcactttgttagccaggatggtctcaatctcctgacctcatgatccacctgcctcggcctcccaaagtgctgggattacaggcaggagccaccgcgcctgggcctttttttaagttttaagtacctataaagaacactgaaaggtgatgtgtgtggatgagctaggaagacctgaaataggctctctctaaattaatcaaattaatcctgaagccattctgcaatactgtctttaatgtatactcacttgttatagaagccagggttttttcccctaatttgtatcattgctatatgtgttattgtaccaaactacactgttttaattgctgtaaattttaatatgtcttagtatctgggtgtgggaatcttgaaagcatggagtttgtgttattcaccactgtattctcaaatatcagaagagtatctggcctactaagtgcacaataaacatagttaaaatg

SEQ ID NO: 172356 - DNA, 593 bp, Homo sapiens
ctgagtgtcactgttcacgattattataaatatctagaacagttgctaacacatagtaagggctcaataagtattgaatggatgaacgctttccctaatatttgtatctggcttcccctggaacctctatcagtgttccttaccttcccttccctgtccacttgggccgtttattttgagtagaacccatttgcattacctctgttgtgacttacttgcaacaagattaatcttcccttatacctctttttagtatagcatatatcccttagttttgtaattatttgaatacattttttactctcttgggaagcaagtctaacttatttttactttcctattactgaagatgaacagtggctaacataataaacacccattaattatttttccttgaaccgaatgtcatgagaaaatataataaaaagaggtgggttagttttaagctaccttaataaaattcagtgttcagattcaaggtgacattgagcccagcaacacaccttcattggtcagatcacatcaacagtattatggttatatctgggatatcacactttacaggatggcattgtaatacagtgtcacagagt

SEQ ID NO: 172357 - DNA, 534 bp, Homo sapiens
gggaaccccacttatttttaggcttcagctcagacgctacttccttcagaagtccctttctggcacactaccttcctcatgtggcttatttgttcctcttgcaccagatcactccgcagcttttgagtttgtatatggcaacaatgaacaaggtataatcctcgctgtagataaactcatcatatttgtttttctccatggagtgaaaatgttttaagctcatataatgactatggtcagggaaaaagccacacaaataattaggatatgttgtgacagtgcacaaatagaaacacacataatgtgcttgagaacatgataaatgccggttttacctttccttccctcacctgaccaagcttagcgagacgtgtggcatcttcctcatctttgctcttcagtgccaggtatggaataggtccattatggacaggtgccttattgaactgagcagagccacgaatgtcaggctgggagtgtggtcgctggagtcaggccttggtttacatcctggttctgcttcttaaccactct

SEQ ID NO: 172358 - DNA, 712 bp, Homo sapiens
attatgccttatattaccatgcttggtactacttgcctctgcatttggctgtggtcaacaagtaatgcagaagtgactagaagttactatagatatgggtttagaggtggcttttctgtgcaggtagaagttaaattgaaatcccaaacgccgtgacgttctcagtgggagagttttccttttagagggaatgtatggctgaaatacagtgaaaaatgttggagaaggaggctaaaactgtatcctatatcatcttatataggattggtaaaatagtttgtgttttattctaattatgataggaagccatgtgaaatgacagagttcaagtaatttgactcatgcatttaaaaatgttataatggagcaatcattgaatgaagaacaatgacttaaaaataaaaaaaatctaaaaattatatatttatttttatagacagggtctcattctgtcacctagttgctgcagtgcagtggtgtgatcgtagctcattgcagcctccaactcctgggttcaagcagtcctcctgtcttggccttccaggtagctgggaatgcaggtgtttgtcaccacgcccagctaattttaaaattttctgtagagttgggggtcttgctttattgtccaggctggtctccagctcatggcttcaagcaatccgcctgcctcatcccctcaaagtattgggattacagttgtgagtcaccatgc

SEQ ID NO: 172359 - DNA, 565 bp, Homo sapiens
agctctgtcccagtttcttcatgtggataaaaatgtgggtagtaatagtatctcagactctcataagattgttatgaggttaaaatgagataatccatgtaaaatacttagaaccctgcatggcagtgtaagtgctcaataaaaatcagctgctgcttttattatcaccaccccttccagtgtctttttgtgtgtgtgtaaaaaggcagtggaagttccttgggataaagatatgttatgataaagattgtttgataattaaaacaattaaataaataaaactttctagcactattgtaaatctcagacactggcaggtactaggagttcaaatatgaacaagaagctcacaatctaatgggggtaaattgatgtgcacacaatcataatatagtaaggaaggacttaataacacaatttgtgccaaggggatagttaaagaaaggtatcacagagttactgacattagaattgagtctgtgggcccagtagagacaacgactttggcagatggagaagaagaggagcagaggttcaagcaaagtgaaaagctccgcttaaaaca

SEQ ID NO: 172360 - DNA, 412 bp, Homo sapiens
gaccctcagagaggcgaggtttcgagggcacgagttcgaggccaacctggtccacatgggttgaaaaaaaaaaaaaaaaaacctcgcgccgaattcggcacgagcaaggggctacggtctacaaggcagtattacaaacaattactctgggacccaacaagtccagaccacacataaagatcaggaatcttaagctttcaagttagaaatgaaatatgaagtagcacataaataattcctagttcaaatttcacttttgtttacatttgaaaaacaaaaaagctactaactccatttatgaaagcttcgcatgatgcagaaaaacaaagctttctgaacaaaacagtttctaataataacttcaagttgtcttggcccagtgtaaaatatgaaataaaccagtattgatcat

SEQ ID NO: 172361 - DNA, 2677 bp, Homo sapiens
ccccctttttaaccacaaaccgaattttctttcatttaggtgatctatatatatctatatcgtatagcttatagcttatatctattttaaataacttaaagccgctaaaatttgggggggaacagctttcgccctggagcggtgcgcgatgctgtctcatgccgacctcctggacgccaggctaggtatgaaagatgccgccgagcttctgggccaccgggaggcggtgaagtgtaggctgggcgtggggggctccgaccccgggggccatccgggggacctggcgcccaactctgacccagtggagggagccactctgctgcccggggaggacatcaccacagtgggctctactccggcctcgctggcggtgagcgccaaagacccggacaagcagcccgggccccagggcggcccgaaccccagccaagccggccagcagcagggccaacagaagcagaagcgccaccggacgcgcttcacccccgcacagctcaacgagttggagaggagcttcgccaagactcactaccccgacatctttatgcgtgaggagctggcactgcgtatcgggctgaccgagtcccgagtgcaggtctggttccagaaccgacgcgccaagtggaagaagcgcaagaagacgaccaacgtgttccgtgcgcccggcacactgctgcccacgccaggcctgcctcagttcccgtcggctgccgccgccgctgccgccgccatgggcgacagcctgtgctctttccacgccaacgacacccgctgggcggcggccgccatgcctggcgtgtcacagctgcctctgccgccggcgctgggcaggcagcaggccatggcgcagtcgctgtcccagtgcagcctggcggccggtccgccgcccaactccatgggcctgtccaacagcctggcgggttccaacggcgcggggctgcagtcgcacctctaccagcccgccttccccggcatggtgcccgcctccctccccggccccagcaacgtctccggttcgccccagctctgcagctccccggacagcagcgacgtgtggcggggcaccagcatcgcctccctccgccgcaaggcgctagagcacacagtctctatgagcttcacttaatgcagccgcgccccggcccgctccgcccccagcaccgccccgggggccgccccgaggcccttccggcgcgcacccggaccccggcgccctgccccgtcccgccccggccttcgccccgtctcgtttcgtcctcgcctctctcctccactcgctcgggctcaccccaagccccagcccgcgaggcctcccctccgcctgatttcgatcgcccgcggtcccccgtctcccggccgcccctcttcccttcccacccagctgcgccctcggctcggtctccagcgcctcagcccacccttcccgccaccctggcctccctgctggcgctggccgtgctcgcgccctcctcctggccttctgacgggcggcgttcccacccacaccttcgacgcgacgcctacgacccccctcgcccgccgcctcccctccggtcccctctttccccacacttcgcgaccctcctcccgcgcccggcaaaaagtatccttcccgccattttacgtaccagggagtcgactcaggatctgaaatcagacaccaatggactggtttgtgggcagaaacacacacactcgcactctcgctcacgctcagacgctacacacgcgcgcgcacagacacggtgcacctaggtcacacacggacgtgttcaagggacagcacaatgttagggatttttgtcttaaaggaggacaagcattgctaccaaccgcctcatctgagggcccaactgatatgatttgatttatccttgtactctccaagctcctgtctttctttcctctcccaccacgctacccttgcccagtccacccagtcacatccgtgcagccctctcttggcttgcaagataacgcttttatttttattttatcttattttcattttcttaagcacaactgtgtgagagtgtagaagggaaggcttctcaggaggaacgtgacagtggattgggtggctggagtagactaaagcagtcatgtgacgaggaagaggtgatctgacccattttgataagtctttataaggaagaataaaataaacgtgtaagcaaaattttcttttgtaaaagcaaaagccacatctcttttctggatccttcaggactggggtttgtttgcttccttttctgtttctgtcttctcgctgctctgtgcccttggttgttttgtggtggtcctgtcgtccctcgtgcccctcggccacctgctggcagccgatgggggcactcggacatctacaaccctgcaactttgtacagagaaacacaatcagctctttctgcatgtgctggtcaaatccaaacccagagaacagaagcgctttctaagaatgaacaaatatgtgaaataggatgttttgtgtagataaagcattcttgttacatactggtcaatttgtgatatgttttaacttaatgtctgtgtttatttatggaattcggttttcttaataaatgtttgagctaatataaagcatattatttgacttttccggacaagtttatatcaagttaaatgtaaatggataaaataaaatcattttcagtatgtg

SEQ ID NO: 172362 - DNA, 259 bp, Homo sapiens
accttctagcttccacctgaacactcatcttggctcaagaactagtcctccctaagcctcagtttcctcatctgtatattggggtcagtacagcccccggctcatggatgaataagcctggccctccatatacgatacctgatcccaccattcacaggctgcatgggagctttttatttttcaattgtgcaatttgtgttttaaaaatatatgacatgaggccgggcatggtggctcacgcctgtaatgccagcacttt

SEQ ID NO: 172363 - DNA, 481 bp, Homo sapiens
ccctcccacaacagtaactcctcctaccaaaggcaacttacctgctttctaccgatcagcacataatacctacctttaaatttaaaaaattaaagataaatatatcctttgaccccagttctccattcctttattcatttccttctcctaacagaaaaaattttcaccaaaaatgttgcctgtagtcacggcttcgaatcttttacctctaattccctccttcccactccactgagcctactctccacaatgtcaccagtgacctccatgttgtcaccaaatccaagggcatctgtctctcttctagagtcgttggccagccagcaacattcaatgtcccctttttccagaaaccatgactgctctgggctcccatgacatctcatgggttttctcaagtagtcacctttttggatcatcctctgtgtgttcttaaatgtcacagtgcccagagctcactcctgccccacctcttttctat

SEQ ID NO: 172364 - DNA, 277 bp, Homo sapiens
cagagacagggtttcgccatgttgcccaggctttcagtggtttttagtatattcacagagttgtgcaactatcaccacaatcaattttggaatgttttcatcaccctaagaagatacccccaactccttacccatgacctccctatcttcccatctgctccaagcccctggcaaccactagtgtactttctgtctctgtagatttgcttgttccagacatttagaataaatagaatcagcaatatatgaccttctgtatggcttctttcactcagca

SEQ ID NO: 172365 - DNA, 672 bp, Homo sapiens
ttattataacctttatactcaacatcggtgcatcttaaagtgactattaagcatcaaaaacctgagtgtggatatcccatgggtcaaataactagtttaataaataaattttcatttttctatttgcaaatcattctgaataaagaagaaatcccaagtgactgagacatgccacgatgagacaactgacaaaacaggagcttccatggcaagtacagtttctcctgaagtatattgtgatggcatgcaagaaagctcacaacattcaaaacaactagaaattcccatctaaaaaggctctggtaatggctactctcagtggttcaaaaacaaaaaaatgtccagctttcatgagagaatagagaggacataatccatctcctgaagagtattcaaagaagtttcaaatcctgacaatgtcaaaaaatgaatctactggaactttttgagctagtgttctaacttgccaaataaaataaggtaaggactgcccagaaatgagtcactgctttgaaatataatctctctcttttatttgtgtcactaagtctattgatgatatggttaaccaaggagaatttttctatacatgtgttatgttgaaaatgtttacagtatattcacctgtatgttctcagcgtccacctgacagacccttttcataatagaaaa

SEQ ID NO: 172366 - DNA, 345 bp, Homo sapiens
gccgcccattttgaagcggggggtctggatgaatgggtctgggctgggcctaaagagcccagctgttccctgcaccagactggagctaagaggagcaggtgctgcatttagctggccccatctgccagggaggtgctgagtggggagtgacaatcactgctttccccacgaggggtccaagcacttgaagttaccttcatcttggggagaaatgtttctcagagaagattctagcctccctgatgattttttatagaattctggaagtttcagagaatagaacatttgggtctgaaatgtgcactcttttgtggcagccatgagctcttcaaggctgctgtggat

SEQ ID NO: 172367 - DNA, 594 bp, Homo sapiens
tcactctatgattgtcccaatttgtttttctatgccatgacaaaaacaaaatactttcaaaatgttctgagcatttaaatgaacatttaagtgtatgtaaataaacttatttaagtaacttttatgttggtaataaaccaacacatgcattaaatacctcttcagcgtaaacaggaaatactgatgacgatgccagcatggaactgtcaattcacattacagcacaattaataatcaatctgactagtttagtgatatttaaaggacacaattagtcactatatctgccagaataattgaatatgttaacattctcctcgcgtaaataccaatttcattatctcatatctttctctttactcgtctccagatagcaatagccctccctgtgtgggtcatgtagaaatgacccagaacttgttggtctaatattttcggtctaattctttccaacctttggtaaacttagaaagcctgcagggatctcatattgatgattttcaatcttttaattgtgatagtctttttgttattctgtcttttcaccttcctttgcctgtccatctataattttcaattcaagtttatatcagt

SEQ ID NO: 172368 - DNA, 203 bp, Homo sapiens
gcaaaagattttttatgtaagaacttaattcatatatacatctctggctttgaacttcgagaaaattattatacttcttgggtggctgaaaaattcttggccttaggcattttagcaataattgttcagaactgcacagcctgctatgtcttattcccttgctacagctgtttactttgtgataactgaacgaacaatgcgga

SEQ ID NO: 172369 - DNA, 123 bp, Homo sapiens
gccctacgtgcctaatgaggtactctgtataccacttttttttaaatgagcagagtgtggctatttactctacatgaaaaagatatggtatattatacatgttttcttcctagtttcagaaag

SEQ ID NO: 172370 - DNA, 440 bp, Homo sapiens
agatgcaaatcccaactctgttattttactaaatgtgtgaccttgggcaagttaattaacctgttttggtgtcctcctctgtgaaatggagttaatcgtggtatttaacagaattcaaaatgtagtgtgttctaaagcgctgtgcctggagcatcatcaccactaggtggttagggaagtaaaacacatttggcacacatcattcaagaatggccagaaaatccatgtcttcccacaatagggaccaattttttgcctttcaccagacaaccactgaatgttaagaatctactgtgtgctaataactgtgtccttgctgtatgacagaagctatttggagcgctctcaagtgcttattacagctagtcaaggaaaccgcatatataaaataatactggatacaagactatacaattaaatactggtgtatcactaacaac

SEQ ID NO: 172371 - DNA, 227 bp, Homo sapiens
gcatgggttttcatttagaatacttttatgtgatgaatctgagctttagaacaatggaatcactttcccagagtattaggaagagaattgatgatgattaaatcccagttcttcctgattccaaatctcacagtctatctctgcactatcttgcctccttactctgagttaaaatcggatgaattcttttcacccaccagtgttaagtctgccttctggcataaaaa

SEQ ID NO: 172372 - DNA, 250 bp, Homo sapiens
ccacatgcacacagatgagcacgggtacacacacacatgcacacacacagatgagcacgggtacacacacgcacacccacatgcaggtacacacacgcacacccacatgcacacaatgcaggtacacacccacacccacatgcacacacatgcaggtacacacacacacacccacatgcacacacacagatgagcacgggtacacacacgcacacccacatgcacacacatgcaggtacacgcacaccca

SEQ ID NO: 172373 - DNA, 158 bp, Homo sapiens
actaaaatgaagccagccccccttctgctactccagagaatcatgaatggggcagtggggaaacacagaaacagattccatgaaatcagccatgcaagattagtttgaagataatgacactgggcttaaaggaaatccattacaaatgaaacttataa

SEQ ID NO: 172374 - DNA, 210 bp, Homo sapiens
cttccacaggtagttctagctacttgggaggctgagatgagagtatgacttgagcccaagagttcaagactagcctgggcactatggtgggtccccatctcttaagaaagaaagaataggaaaaactaaattagtataagaactaattacttaatttgtataagttatgaatatgccaaatgcaatttagatgctttttcaaaagagcac

SEQ ID NO: 172375 - DNA, 200 bp, Homo sapiens
aaaaaaaatgcttacaatgaaaactaagtgaataagtaggatacaaaattgtatatgcactgtttttaattatgttaaaagtacatagaagactatataaaaatatactaaactgttatacagtgagactaggggtggttttaatttttattcttgatatgctgtattttcttattctacaatgagcatgttttataaac

SEQ ID NO: 172376 - DNA, 330 bp, Homo sapiens
acagatgctctcacagcagagcaacctcggggcatttagtgtgaggcaaatgctcagtccctcacttacaggtggaataaagagtgtcatcattttgtggtaagttgaagaatggtccccaaaagatgtccacgtctaaatttccagaatttctgaatatgttaccttacatggaaaaaatactttgaagatgtgattaaagattttgagatgaggataatattttggattagcttggtgggcccaaagaaatcacaggggtcttcaccaagagggaggcagaagagttagagaaggagaagtgaggatgaaaaagagagatttgaagat

SEQ ID NO: 172377 - DNA, 463 bp, Homo sapiens
ggctcttctggctctgggtctctgtctccctctctctgtcgtctctgtgtcttcctttgtctctgggtctctgtctccctctgacctgggtcttgtctcttggaccccatctctccctccctgtctctgtccatctcccttatctgtctctgtctatactggcgccactatttcatcttctgtctctctccctgctctctctccctgtctctgctattcttgcgctttctcttttgtcctcttacaacttggcttctccccatctctgaatctgtctctctctttcctgtgtgtctctccctgtctgcttatctctcctttctctatctctgccccttgtttatctctctccctcctctttctcatttgtgtctgtctgcctcttcatctctgcctgtctctctttctccctctctctccctcccccatctcccctctcttctccgtccccatcccctacgcc

SEQ ID NO: 172378 - DNA, 428 bp, Homo sapiens
atgaaaaacccgagggagcaggtgatgtggttcccgggggctgagcaatggctccaagcatccaaggccccttgcctttctggagctgggtgagaagatcccagaaggagagcagtggcaactctttgccttctcctcctgacctggttctgatgctttttcttttttttttttttctgagacggagtctcgctctgtcacccaggctggagtgcagtggcacaatctcggttcactgcaacctccgcctcctgggttcaagtgattctcgtgcctcagcctcccgagtacctgggactacaggtgtgtaccaccacacccaactaacttttgtatttttagtagagatgaggtttcaccatgttggccaggctggtctcaaactcctggcctcaagtgatctacctgcctcggcctcccaaagtgct

SEQ ID NO: 172379 - DNA, 707 bp, Homo sapiens
cttgtttgctgctaagtgtttcctgccacctggcttcttattcaaccttttagatttcatgttaggcaaacaagcaacagtgttcattgaggaagtactcactagattataagtactagctagtgtggctgaactatctgttgtcacaggaggtgctgcagttgttgttaatgaaacacagttagctgtagtggtttgactatttgcagcagtttgagaattggcaggctggctaatagacaattgtacacagctttgcccagccatctgtgatatgctttgattgaggctggccaaagcaccaaatgtattcagggcaacattggtatttggatcttcgctggtggtgggttgaataatttgcataggggtttgatttgtagttcctgatgaagacatcacaggctgcaaagcaaagagctgtccatttaaagaaatggtttgaggctgttggtttgacatggtaacagaaaaagtttgtgttgagttagacgctgataaagatgaaggtcttggtaatatgtggacaagatgctttcctccaaaagtctgtggtgttggaacattttgcactgaattattagaccctattacagtattggctccattgatggggagtcgaacagaaccaggaggtggagcagggaggagtggcaaaggattctgattagcagcctgtatgattactatctgttgacctactgttt

SEQ ID NO: 172380 - DNA, 594 bp, Homo sapiens
ggtgaaaccccaactctactaaaaatacaaaaattagccaggtgtgctggtgggtgcctgtaatcccagctactcatgtggctgaggtgggagaatctcttgaacctgggaggcaaagattgtactgagccgagactgcaccattgcattccagtatggggaacaagagcgaaactccatctccaaaaaaaaagaaaaaagaaagaaaagaaaaagaagaaagaaaatcgctttgggagaaaaggttttatgcaaatggccaatcatgattaattgatggggaggctctcaggcaaaggatcggatttcacagataagtgtgtgtgtgtgtgtgtgtgtgtgtgtatatacatatatacatataacttggctctcctgagaagaaaatgttcattcagtgtaaggcaagatagtgtaaggcaagtatatccaaatcaggggtgtccaatcttttggtttccctgggccacattggaagaagaattgtcttgggccacacataaaatttaataacactaatgatagctgatgagttaaaaaaaaaaatcgtaaaccaaatctcatgttttaagaaagtttacgaatttgtgttgg

SEQ ID NO: 172381 - DNA, 132 bp, Homo sapiens
aggtaggaaagaaggaaggaaggggagagaaatgaaagaaagaaaaataaaggaagaaaattcagaaggtacaaaaaggtttatgtaaacttccatccctcctctgccccactcatacagttcctcttcggg

SEQ ID NO: 172382 - DNA, 100 bp, Homo sapiens
tgctgccataacaaaatgccattgactgggcaatttataaataacattaatttatttctcacagtactagagactgggactttcaagtgaccagcaagtt

SEQ ID NO: 172383 - DNA, 255 bp, Homo sapiens
cctgaggactaatgagattatacatcttttcatgtgcttactattcattcacatgtgttcttttgtgaagtgtccattcaagttttttgtccattttcttctgggttattattgatttatggttcttcatatagtctggatacaaatccatggttatagatacgtactataaatacttcagtatttatttcccaagaacaatcatattctcttatataaccaatactattattgcattcaggaaatttaatattt

SEQ ID NO: 172384 - DNA, 448 bp, Homo sapiens
tcccgcccccttttccccaagctggggacctcagagaatccattctcctcctgccctgcagagagtcacggagcacgtcctggctttctccgtactgggttccagaaatacctggaaccctgcatgacagaggccgagctcagcacactttctggttctggaagggggtgtcagacagatgaggaaatgtgcaggagtcttggctgcctctctgtcccctgtgagaaattccaggctcgtcagtgagcacccccaggcccttcaggtggcgttggaggttttagaagaaaaaggcgaggttcctctcggtgtccttgaagatgtcgttgctttgctcatgttatcaaacaagggctgggatggtcaccatttgcagttagctgtaggggacgtgatgtccttttttttgtatttactggttccttcttgagacctcggtaggctccaa

SEQ ID NO: 172385 - DNA, 251 bp, Homo sapiens
ggcctagatcgctgtgaggtctatggaagtttccacaagcttgctgggtagttctcgaggcaaactcggaaagggagtcccttgtctccctggaacggatctttcttggcatctctgtcacactcattaggtgggcctggtgtcaaccccatttgcaggccaccccaaacttgatcaaaggtccgcttctggcaccccataccctgtcctacaggaaatacagggacaggctcccaataacaacacccagc

SEQ ID NO: 172386 - DNA, 355 bp, Homo sapiens
tcgaagcccaacactgcgctgctaatggaaagacagagaacagcatccatatacatttccctagaatatcactcaggaaaatatatataatataaagaaagcaaggatttggctgataattctctagcagaacaggccaaatacctctcataaaattaaaaatacttgcaaaaaagatccaattataaagccacaaaaaaaccctaattttcttcttgagtacagcatgatttttaaattgggaatttcccaaatacagtgccaaaaaatggagtccctcaaataccttaaaattcggttgttgttactgctccttttcctaaagccagataaaccaaataagttaggatttaca

SEQ ID NO: 172387 - DNA, 467 bp, Homo sapiens
cccccacagccctgctgggggaagaggaggagaccagcccgtagccagcccagcctcagccccagcagcctgtggctggcagggcctctgcctacacagcaagctctcagagtggggggatgggagcagcgcccaggcacccacccagctcccccaacccagagtgtcaccggggacctttaccctgaatggggatggttttaacagcccctagagagggtcagggcatctgtgacaggacagggtctgagccccggactttcacctctcagcccagtgcccttttccccgcagcagcctaagctcccagtgattctctgggggagggatttctgatggggctggttctaaagaaaagctctccagggcagggcctgtgaaacccaaggactgactgctgcgggggctggatagcctttggggacagaggaggggagagggtggcagaacctaaacagctgcggccg

SEQ ID NO: 172388 - DNA, 582 bp, Homo sapiens
agtccatctttgcttaaactaagccatagcagccttcagttgtttgcaacactgactgacagcataggttactatgtatcatttgtgggctcagtcttagtaccatatagtgttccttcatctgccaagggcattctgctattggtgaacaggcaaaaagagggagagttaccgttaacattctaagaatcttacctaacctgacacctatggacagtgctggagcctctcagaaacctagtcacaggtgcccacgcaagcttcatcttgccagaaatcacaggaaagcaaaattgagatgtacctttaaatatatcctgtttcatacaaaggcatgttttgctttgcaaaaaggatctctaagatttgctttaagatggtgctctcatttttgcatgtctattaaaattttaaatgggtctaccacaaactgcagcgtatgtgtacaaggatgcacgaagacagatgttggtaaactaccatcttaatgtcaataaaaatataaacaatataaacatctagtaaaggagaagcaaataaataactataaaatagccacaatgtgaaaatactgtccaacag

SEQ ID NO: 172389 - DNA, 332 bp, Homo sapiens
gtgcaggagggccctgggccagtggggaagcaaatgagagctgatgagaggccttgaagcctggaggctgggccgaggctcaaaggcctgggggaggagatgggccatgccatccactggtaggttttagggttggttcttgaaataaagagagacacttatttaaagcagcttctctagtcctaggcctgtcaagctaggcagagaggagtgaggagaagctctcccagtccattcaagctttatcctagcacagatttggttcattgtcttccctctgaaattgaggtggaatgttgtcttgggattctgagtcagtcttcctcatccag

SEQ ID NO: 172390 - DNA, 258 bp, Homo sapiens
aatcgtgagatttctgtaatacagaatgcgttccattgttattattaataatagtctctactataaatcacatcaatcactgtgtgagcattttgcacatgtaatctcaaattctcatagagaaatactgttggctacacagactcagtaatttcaatcatgatactattgttttaaacccatcaatatgctaatccattctgccaggtgcaagagaaaccaaagagtaataaagtaatttcagagccttctgacctc

SEQ ID NO: 172391 - DNA, 377 bp, Homo sapiens
ccaactgtgtgactttgtggaagtgacttaacctctgtgcttcagcttcctcatctatacaacagaggtaataatagtgcctgtcttgtaagttgtttaaccatgagagtcaaatgaatttatgtatatgcagcgttttagaactctgccggacacataagtgcataaaaatgttagctattattatggatcttatctgatatcatcctaattggctttgtaagaggcagagaaaagtctgactaaatctatcgtggaccaataattcatggaaaggtgctacagtcacttttttttttttttaaccagccagtgtagatttttatcaagcaagaggattgtcaattatctgccagaaataaagaaagaaagcctta

SEQ ID NO: 172392 - DNA, 350 bp, Homo sapiens
acggtcccctggctgacctctctcccacgaggcactgaggccctgctctgctggtgtctccatgtccatgtcctggggatcgagagcagccctgcgcgccttctgctcaggggagggtgggccgggggttccagcaggcaagggggtcgccaggaccacagcccccaggtctgggccttctctctgcccccggcctccttcccagccttgtgcccggtgccctgcgcctcccctgcccgctcccctagcccttcccctgcagcaaggggtgcatctcctccccgtgcggggagccctgcgcagccacataattatgcatgtaagatataaacagagctgtttaattatcc

SEQ ID NO: 172393 - DNA, 109 bp, Homo sapiens
cccctatggctgcttgggctgtgagagtccgtctgctttgaaggggctacagatggcattctcgactctagcagccttcggagcaacatgctcctttggaaaagagaaa

SEQ ID NO: 172394 - DNA, 480 bp, Homo sapiens
tctctcggtatctgtctctcagtctctgccttctctgtgtctcgtacggtctcctgtctttcttggtctctcggtcctgagcgctctctcgccctgtcactgatgaccgctggcttttggctctccgtgctcgctcttcgtgtgtcccggccacgcacggctcaccagctcgttttccccagacgcggaaagtctaccttcggcgtgcgggtttcccaagcgcgccgggccccgcctgcggccctccggcgggctctgtctgctggaggcgctccgctaaccctgctgtcgcctctttccaccagcgcaccgcctaggcaagccagctgacgccgggggcacagaccaccctccactgagtgcggagcagccaaggtgagtgcaccgatgccccttccgcccctccgatccctccccagctgccctggttcgagccgactggagaaatgaggctgcaacagcgaagccagcctgcggccg

SEQ ID NO: 172395 - DNA, 407 bp, Homo sapiens
cacactcacacaccagcaggctcatctttgtacaaactcacacttaatctccaaaggcagaatatattacgttggaaatacccaatttggacttacaccaatttcatgataaatagcatctttccatttcccatcaacagtggccatcagaaaagtaatgcatttcatagaaacaatattttaagttgaccttgtgtttagtgtccatttttgtgtcttaaccccagatcaagattcccatgagtaaatctattcacctagaacgaagagccacggactctcattcacatgtccatccatccccttcccttgcatacctgcccacgcatacccacaccgaatgctctatacctctgctacaagccttgtgccagctgaggacaggcatgtcataaacacctcctggt

SEQ ID NO: 172396 - DNA, 445 bp, Homo sapiens
cctccctgtccccaaagcagcgatgcatctgaaatggcctaaaaaggcgtggaaacccaggggttcctgttctggcagaagttcctcagttgcccacagggcctgaggtctggggtgaggaacacctggtccagatcaaagagcttttagggtgtggggctggatttttgcatacaggttacatcaggagtccaggagtaaaattaattcttagaaggccagattacataaaaggcaaggcagagagggttctgcaaacactaaccgcctcttgggtgtctgatggtactcctctcatggcctcagcctggagggagctgatgtgggaggaatctgtgggccctgacctggaatgctgcacagtggcctctgccagtgacaggggcgggcaaggctgagtctagaagcaaatgccagcccacaaatgtgcagtgattggcgccta

SEQ ID NO: 172397 - DNA, 709 bp, Homo sapiens
ttgagcccatgagttcaagaccagcctggacaacatagcaaaaccccatctctacaaaaaatagatattagtgggcatggtgacacatgcctgtagtcccagctactcaggaggctgaggcaggaggatcactcgagcccaggaggtcgaggcaacagtgagctataactatgccactgcacatcagcctggacaacagagcaagaccctatctcttaaaaaaatccctggaaaggtggcaggcaggaagtttagagtgagcagactcacagcagcatgggctgtgcttgctctgaggagcgcttgctgttggtttcagcgtgaggccctctacctcccagggagggtgacttggggtactcaaactcccacccaattcctggccctggcaggagtatcgtgacaatgagcatctcagtcaacctgtgccacagtttccttatcctaaaatgcaggtgatcccgctgccttgcacagggctgtgacgaagagactatcattcattcattcattcattcattcagttcctccacaaatgtttattgagcacctactacatgccagagaacgaaacggcccaggggaaagcggaagggagaacaaaacccgcgcaccgggcatggccccgaaggacgagcagagtaggaaggtactagaggaagccagagggggaagggggccacgccagtccgcgggccgaaccccgccg

SEQ ID NO: 172398 - DNA, 673 bp, Homo sapiens
ttgagcccatgagttcaagaccagcctggacaacatagcaaaaccccatctctacaaaaaatagatattagtgggcatggtgacacatgcctgtagtcccagctactcaggaggctgaggcaggaggatcactcgagcccaggaggtcgaggcaacagtgagctataactatgccactgcacatcagcctggacaacagagcaagaccctatctcttaaaaaaatccctggaaaggtggcaggcaggaagtttagagtgagcagactcacagcagcatgggctgtgcttgctctgaggagcgcttgctgttggtttcagcgtgaggccctctacctcccagggagggtgacttggggtactcaaactcccacccaattcctggccctggcaggagtatcgtgacaatgagcatctcagtcaacctgtgccacagtttccttatcctaaaatgcaggtgatcccgctgccttgcacagggctgtgacgaagagactatcattcattcattcattcattcattcagttcctccacaaatgtttattgagcacctactacatgccagacaccctactgggtcacagggagacagcaggaagtggaagaaacaaaaatccctgtccagctggagcatttgttctcaggaaggagacagatgacaagatgcataagga

SEQ ID NO: 172399 - DNA, 438 bp, Homo sapiens
agcccagggcaatctaagaagacatgatcactaaatgtgatgtgggatcccagatgggatcctggaccaggtaaaaactaaagtaatgtttcaacttcagtaaataataatgtatcaatattggtccattaattgtggcaaatgtgccacactaatgcaaagcgttagtaacagggaaaactgggagcagggtatatgagaactttttgaactgttttcacaattctcctgtaaatctaaaactcttctgaaaatagagtttattctttaaaagtgtctggaggatgtgcacaagggtgtggcagcagaggggctacaggtaaaaaatcatgacatctggaatatttccttcaatttttgctccacacggtgactatcttaccctgctcccattaaactctgaacaatgttatcagcctgaaaaatggattggcagga

SEQ ID NO: 172400 - DNA, 618 bp, Homo sapiens
  misc_feature (1)..(1): n is a, c, g, or t
naatcgagctcgtgtaccccgcgggttatgtcttacgagtattgaacataagtagtcttttgcaactctcatcagcccagtttaatattacctatttattataatgtaatgctgctcgcacaactgagaaaatactgttgctttaccccctccagctctgtagcagccacgcagaaatcatagaactgtaaacatatgctaattacacaacctatgtaggcaatcaatattaagaaaaatttttactgcccggtatttctgtggttgaaaatgtagagtctaattttgatccgcagtaacatctaggttaatgttgattcagaaggaaaacgtgttgttgttgccatgagaagaggcattgaaatgctgaatcaccaccacaaatgttaccactattaatataaggagatacataggaagatggaattagaccatctcggaccaccaggtttacaattccacctgcagatacatgcaagaagtattgtcacaatacttatgtcacgttattccgttgaggtcatcaccaactaagcttataattaatgtgtggtcaatttggtcaatgtcaccagcgtagcatactaacaaaaacaagggttgcaaagtcaaatgcct

SEQ ID NO: 172401 - DNA, 4143 bp, Homo sapiens
cgggccaggtttccaggctcggccgccgcctccatcccagcacctgcggagggagcgctgaccatggctccctggcctgaattgggagatgcccagcccaaccccgataagtacctcgaaggggccgcaggtcagcagcccactgcccctgataaaagcaaagagaccaacaaaacagataacactgaggcacctgtaaccaagattgaacttctgccgtcctactccacggctacactgatagatgagcccactgaggtggatgacccctggaacctacccactcttcaggactcggggatcaagtggtcagagagagacaccaaagggaagattctctgtttcttccaagggattgggagattgattttacttctcggatttctctactttttcgtgtgctccctggatattcttagtagcgccttccagctggttggaggaaaaatggcaggacagttcttcagcaacagctctattatgtccaaccctttgttggggctggtgatcggggtgctggtgaccgtcttggtgcagagctccagcacctcaacgtccatcgttgtcagcatggtgtcctcttcattgctcactgttcgggctgccatccccattatcatgggggccaacattggaacgtcaatcaccaacactattgttgcgctcatgcaggtgggagatcggagtgagttcagaagagcttttgcaggagccactgtccatgacttcttcaactggctgtccgtgttggtgctcttgcccgtggaggtggccacccattacctcgagatcataacccagcttatagtggagagcttccacttcaagaatggagaagatgccccagatcttctgaaagtcatcactaagcccttcacaaagctcattgtccagctggataaaaaagttatcagccaaattgcaatgaacgatgaaaaagcgaaaaacaagagtcttgtcaagatttggtgcaaaacttttaccaacaagacccagattaacgtcactgttccctcgactgctaactgcacctccccttccctctgttggacggatggcatccaaaactggaccatgaagaatgtgacctacaaggagaacatcgccaaatgccagcatatctttgtgaatttccacctcccggatcttgctgtgggcaccatcttgctcatactctccctgctggtcctctgtggttgcctgatcatgattgtcaagatcctgggctctgtgctcaaggggcaggtcgccactgtcatcaagaagaccatcaacactgatttcccctttccctttgcatggttgactggctacctggccatcctcgtcggggcaggcatgaccttcatcgtacagagcagctctgtgttcacgtcggccttgacccccctgattggaatcggcgtgataaccattgagagggcttatccactcacgctgggctccaacatcggcaccaccaccaccgccatcctggccgccttagccagccctggcaatgcattgaggagttcactccagatcgccctgtgccactttttcttcaacatctccggcatcttgctgtggtacccgatcccgttcactcgcctgcccatccgcatggccaaggggctgggcaacatctctgccaagtatcgctggttcgccgtcttctacctgatcatcttcttcttcctgatcccgctgacggtgtttggcctctcgctggccggctggcgggtgctggttggtgtcggggttcccgtcgtcttcatcatcatcctggtactgtgcctccgactcctgcagtctcgctgcccacgcgtcctgccgaagaaactccagaactggaacttcctgccgctgtggatgcgctcgctgaagccctgggatgccgtcgtctccaagttcaccggctgcttccagatgcgctgctgctgctgctgccgcgtgtgctgccgcgcgtgctgcttgctgtgtggctgccccaagtgctgccgctgcagcaagtgctgcgaggacttggaggaggcgcaggaggggcaggatgtccctgtcaaggctcctgagacctttgataacataaccattagcagagaggctcagggtgaggtccctgcctcggactcaaagaccgaatgcacggccttgtaggggacgccccagattgtcagggatggggggatggtccttgagttttgcatgctctcctccctcccacttctgcaccctttcaccacctcgaggagatttgctccccattagcgaatgaaattgatgcagtcctacctaactcgattccctttggcttggtgggtaggcctgcagggcacttttattccaacccctggtcactcagtaatcttttactccaggaaggcacaggatggtacctaaagagaattagagaatgaacctggcgggacggatgtctaatcctgcacctagctgggttggtcagtagaacctattttcagactcaaaaaccatcttcagaaagaaaaggcccagggaaggaatgtatgagaggctctcccagatgaggaagtgtactctctatgactatcaagctcaggcctctccctttttttaaaccaaagtctggcaaccaagagcagcagctccatggcctccttgccccagatcagcctgggtcaggggacatagtgtcattgtttggaaactgcagaccacaaggtgtgggtctatcccacttcctagtgctccccacattccccatcagggcttcctcacgtggacaggtgtgctagtccaggcagttcacttgcagtttccttgtcctcatgcttcggggatgggagccacgcctgaactagagttcaggctggatacatgtgctcacctgctgctcttgtcttcctaagagacagagagtggggcagatggaggagaagaaagtgaggaatgagtagcatagcattctgccaaaagggccccagattcttaatttagcaaactaagaagcccaattaaaaagcattgtggctaaagtctaacgctcctctcttggtcagataacaaaagccctccctgttggatcttttgaaataaaacgtgcaagttatccaggctcgtagcctgcatgctgccaccttgaatcccagggagtatctgcacctggaatagctctccacccctctctgcctccttactttctgtgcaagatgacttcctgggttaacttccttctttccatccacccacccactggaatctctttccaaacatttttccattttcccacagatgggctttgattagctgtcctctctccatgcctgcaaagctccagatttttggggaaagctgtacccaactggactgcccagtgaactgggatcattgagtacagtcgagcacacgtgtgtgcatgggtcaaaggggtgtgttccttctcatcctagatgccttctctgtgccttccacagcctcctgcctgattacaccactgcccccgccccaccctcagccatcccaattcttcctggccagtgcgctccagccttatctaggaaaggaggagtgggtgtagccgtgcagcaagattggggcctcccccatcccagcttctccaccatcccagcaagtcaggatatcagacagtcctcccctgaccctcccccttgtagatatcaattcccaaacagagccaaatactctatatctatagtcacagccctgtacagcatttttcataagttatatagtaaatggtctgcatgatttgtgcttctagtgctctcatttggaaatgaggcaggcttcttctatgaaatgtaaagaaagaaaccactttgtatattttgtaataccacctctgtggccatgcctgccccgcccactctgtatatatgtaagttaaacccgggcaggggctgtggccgtctttgtactctggtgatttttaaaaattgaatctttgtacttgcattgattgtataataattttgagaccaggtctcgctgtgttgctcaggctggtctcaaactcctgagatcaagcaatccgcccacctcagcctcccaaagtgctgagatcacaggcgtgagccaccaccaggcctgattgtaattttttttttttttttttactggttatgggaagggagaaataaaatcatcaaacccaaaaaaaaaaaa

SEQ ID NO: 172402 - DNA, 4191 bp, Homo sapiens
cgggccaggtttccaggctcggccgccgcctccatcccagcacctgcggagggagcgctgaccatggctccctggcctgaattgggagatgcccagcccaaccccgataagtacctcgaaggggccgcaggtcagcagcccactgcccctgataaaagcaaagagaccaacaaaacagataacactgaggcacctgtaaccaagattgaacttctgccgtcctactccacggctacactgatagatgagcccactgaggtggatgacccctggaacctacccactcttcaggactcggggatcaagtggtcagagagagacaccaaagggaagattctctgtttcttccaagggattgggagattgattttacttctcggatttctctactttttcgtgtgctccctggatattcttagtagcgccttccagctggttggaggaaaaatggcaggacagttcttcagcaacagctctattatgtccaaccctttgttggggctggtgatcggggtgctggtgaccgtcttggtgcagagctccagcacctcaacgtccatcgttgtcagcatggtgtcctcttcattgctcactgttcgggctgccatccccattatcatgggggccaacattggaacgtcaatcaccaacactattgttgcgctcatgcaggtgggagatcggagtgagttcagaagagcttttgcaggagccactgtccatgacttcttcaactggctgtccgtgttggtgctcttgcccgtggaggtggccacccattacctcgagatcataacccagcttatagtggagagcttccacttcaagaatggagaagatgccccagatcttctgaaagtcatcactaagcccttcacaaagctcattgtccagctggataaaaaagttatcagccaaattgcaatgaacgatgaaaaagcgaaaaacaagagtcttgtcaagatttggtgcaaaacttttaccaacaagacccagattaacgtcactgttccctcgactgctaactgcacctccccttccctctgttggacggatggcatccaaaactggaccatgaagaatgtgacctacaaggagaacatcgccaaatgccagcatatctttgtgaatttccacctcccggatcttgctgtgggcaccatcttgctcatactctccctgctggtcctctgtggttgcctgatcatgattgtcaagatcctgggctctgtgctcaaggggcaggtcgccactgtcatcaagaagaccatcaacactgatttcccctttccctttgcatggttgactggctacctggccatcctcgtcggggcaggcatgaccttcatcgtacagagcagctctgtgttcacgtcggccttgacccccctgattggaatcggcgtgataaccattgagagggcttatccactcacgctgggctccaacatcggcaccaccaccaccgccatcctggccgccttagccagccctggcaatgcattgaggagttcactccagatcgccctgtgccactttttcttcaacatctccggcatcttgctgtggtacccgatcccgttcactcgcctgcccatccgcatggccaaggggctgggcaacatctctgccaagtatcgctggttcgccgtcttctacctgatcatcttcttcttcctgatcccgctgacggtgtttggcctctcgctggccggctggcgggtgctggttggtgtcggggttcccgtcgtcttcatcatcatcctggtactgtgcctccgactcctgcagtctcgctgcccacgcgtcctgccgaagaaactccagaactggaacttcctgccgctgtggatgcgctcgctgaagccctgggatgccgtcgtctccaagttcaccggctgcttccagatgcgctgctgctgctgctgccgcgtgtgctgccgcgcgtgctgcttgctgtgtggctgccccaagtgctgccgctgcagcaagtgctgcgaggacttggaggaggcgcaggaggggcaggatgtccctgtcaaggctcctgagacctttgataacataaccattagcagagaggctcagggtgaggtccctgcctcggactcaaagaccgaatgcacggccttgtaggggacgccccagattgtcagggatggggggatggtccttgagttttgcatgctctcctccctcccacttctgcaccctttcaccacctcgaggagatttgctccccattagcgaatgaaattgatgcagtcctacctaactcgattccctttggcttggtgggtaggcctgcagggcacttttattccaacccctggtcactcagtaatcttttactccaggaaggcacaggatggtacctaaagagaattagagaatgaacctggcgggacggatgtctaatcctgcacctagctgggttggtcagtagaacctattttcagactcaaaaaccatcttcagaaagaaaaggcccagggaaggaatgtatgagaggctctcccagatgaggaagtgtactctctatgactatcaagctcaggcctctccctttttttaaaccaaagtctggcaaccaagagcagcagctccatggcctccttgccccagatcagcctgggtcaggggacatagtgtcattgtttggaaactgcagaccacaaggtgtgggtctatcccacttcctagtgctccccacattccccatcagggcttcctcacgtggacaggtgtgctagtccaggcagttcacttgcagtttccttgtcctcatgcttcggggatgggagccacgcctgaactagagttcaggctggatacatgtgctcacctgctgctcttgtcttcctaagagacagagagtggggcagatggaggagaagaaagtgaggaatgagtagcatagcattctgccaaaagggccccagattcttaatttagcaaactaagaagcccaattaaaaagcattgtggctaaagtctaacgctcctctcttggtcagataacaaaagccctccctgttggatcttttgaaataaaacgtgcaagttatccaggctcgtagcctgcatgctgccaccttgaatcccagggagtatctgcacctggaatagctctccacccctctctgcctccttactttctgtgcaagatgacttcctgggttaacttccttctttccatccacccacccactggaatctctttccaaacatttttccattttcccacagatgggctttgattagctgtcctctctccatgcctgcaaagctccagatttttggggaaagctgtacccaactggactgcccagtgaactgggatcattgagtacagtcgagcacacgtgtgtgcatgggtcaaaggggtgtgttccttctcatcctagatgccttctctgtgccttccacagcctcctgcctgattacaccactgcccccgccccaccctcagccatcccaattcttcctggccagtgcgctccagccttatctaggaaaggaggagtgggtgtagccgtgcagcaagattggggcctcccccatcccagcttctccaccatcccagcaagtcaggatatcagacagtcctcccctgaccctcccccttgtagatatcaattcccaaacagagccaaatactctatatctatagtcacagccctgtacagcatttttcataagttatatagtaaatggtctgcatgatttgtgcttctagtgctctcatttggaaatgaggcaggcttcttctatgaaatgtaaagaaagaaaccactttgtatattttgtaataccacctctgtggccatgcctgccccgcccactctgtatatatgtaagttaaacccgggcaggggctgtggccgtctttgtactctggtgatttttaaaaattgaatctttgtacttgcattgattgtataataattttgagaccaggtctcgctgtgttgctcaggctggtctcaaactcctgagatcaagcaatccgcccaccacttcctcgtgcttcatctctctcccgtgctggatgcctcctgacctcaacatcagactccaagttcctcagcttttagactcttggacttacaccagtggtttgccagggcgtcttgggccttcgcacacagattcaaggctgcactgtcaactttccaacttttgtggttg

SEQ ID NO: 172403 - DNA, 3603 bp, Homo sapiens
caccccccccctccccccaccaacctctctgccagacttaggtacagctgagtttaagtcgcacgcggattatcatgggggtaacattggaactggtaatcaccaatagtagttgttgctgctcatgcaggatggaagatcgtcgtgcgttcatgaagagcttttgcaggagccactgtccatgacttcttcaactggctgtccgtgttggtgctcttgcccgtggaggtggccacccattacctcgagatcataacccagcttatagtggagagcttccacttcaagaatggagaagatgccccagatcttctgaaagtcatcactaagcccttcacaaagctcattgtccagctggataaaaaagttatcagccaaattgcaatgaacgatgaaaaagcgaaaaacaagagtcttgtcaagatttggtgcaaaacttttaccaacaagacccagattaacgtcactgttccctcgactgctaactgcacctccccttccctctgttggacggatggcatccaaaactggaccatgaagaatgtgacctacaaggagaacatcgccaaatgccagcatatctttgtgaatttccacctcccggatcttgctgtgggcaccatcttgctcatactctccctgctggtcctctgtggttgcctgatcatgattgtcaagatcctgggctctgtgctcaaggggcaggtcgccactgtcatcaagaagaccatcaacactgatttcccctttccctttgcatggttgactggctacctggccatcctcgtcggggcaggcatgaccttcatcgtacagagcagctctgtgttcacgtcggccttgacccccctgattggaatcggcgtgataaccattgagagggcttatccactcacgctgggctccaacatcggcaccaccaccaccgccatcctggccgccttagccagccctggcaatgcattgaggagttcactccagatcgccctgtgccactttttcttcaacatctccggcatcttgctgtggtacccgatcccgttcactcgcctgcccatccgcatggccaaggggctgggcaacatctctgccaagtatcgctggttcgccgtcttctacctgatcatcttcttcttcctgatcccgctgacggtgtttggcctctcgctggccggctggcgggtgctggttggtgtcggggttcccgtcgtcttcatcatcatcctggtactgtgcctccgactcctgcagtctcgctgcccacgcgtcctgccgaagaaactccagaactggaacttcctgccgctgtggatgcgctcgctgaagccctgggatgccgtcgtctccaagttcaccggctgcttccagatgcgctgctgctgctgctgccgcgtgtgctgccgcgcgtgctgcttgctgtgtggctgccccaagtgctgccgctgcagcaagtgctgcgaggacttggaggaggcgcaggaggggcaggatgtccctgtcaaggctcctgagacctttgataacataaccattagcagagaggctcagggtgaggtccctgcctcggactcaaagaccgaatgcacggccttgtaggggacgccccagattgtcagggatggggggatggtccttgagttttgcatgctctcctccctcccacttctgcaccctttcaccacctcgaggagatttgctccccattagcgaatgaaattgatgcagtcctacctaactcgattccctttggcttggtgggtaggcctgcagggcacttttattccaacccctggtcactcagtaatcttttactccaggaaggcacaggatggtacctaaagagaattagagaatgaacctggcgggacggatgtctaatcctgcacctagctgggttggtcagtagaacctattttcagactcaaaaaccatcttcagaaagaaaaggcccagggaaggaatgtatgagaggctctcccagatgaggaagtgtactctctatgactatcaagctcaggcctctccctttttttaaaccaaagtctggcaaccaagagcagcagctccatggcctccttgccccagatcagcctgggtcaggggacatagtgtcattgtttggaaactgcagaccacaaggtgtgggtctatcccacttcctagtgctccccacattccccatcagggcttcctcacgtggacaggtgtgctagtccaggcagttcacttgcagtttccttgtcctcatgcttcggggatgggagccacgcctgaactagagttcaggctggatacatgtgctcacctgctgctcttgtcttcctaagagacagagagtggggcagatggaggagaagaaagtgaggaatgagtagcatagcattctgccaaaagggccccagattcttaatttagcaaactaagaagcccaattaaaaagcattgtggctaaagtctaacgctcctctcttggtcagataacaaaagccctccctgttggatcttttgaaataaaacgtgcaagttatccaggctcgtagcctgcatgctgccaccttgaatcccagggagtatctgcacctggaatagctctccacccctctctgcctccttactttctgtgcaagatgacttcctgggttaacttccttctttccatccacccacccactggaatctctttccaaacatttttccattttcccacagatgggctttgattagctgtcctctctccatgcctgcaaagctccagatttttggggaaagctgtacccaactggactgcccagtgaactgggatcattgagtacagtcgagcacacgtgtgtgcatgggtcaaaggggtgtgttccttctcatcctagatgccttctctgtgccttccacagcctcctgcctgattacaccactgcccccgccccaccctcagccatcccaattcttcctggccagtgcgctccagccttatctaggaaaggaggagtgggtgtagccgtgcagcaagattggggcctcccccatcccagcttctccaccatcccagcaagtcaggatatcagacagtcctcccctgaccctcccccttgtagatatcaattcccaaacagagccaaatactctatatctatagtcacagccctgtacagcatttttcataagttatatagtaaatggtctgcatgatttgtgcttctagtgctctcatttggaaatgaggcaggcttcttctatgaaatgtaaagaaagaaaccactttgtatattttgtaataccacctctgtggccatgcctgccccgcccactctgtatatatgtaagttaaacccgggcaggggctgtggccgtctttgtactctggtgatttttaaaaattgaatctttgtacttgcattgattgtataataattttgagaccaggtctcgctgtgttgctcaggctggtctcaaactcctgagatcaagcaatccgcccacctcagcctcccaaagtgctgagatcacaggcgtgagccaccaccaggcctgattgtaattttttttttttttttttactggttatgggaagggagaaataaaatcatcaaacccaaaaaaaaaaaa

SEQ ID NO: 172404 - DNA, 2175 bp, Homo sapiens
catagggtggcgcttagggtggctcatcgcggtggcgctttgagtggcgctttggggcaggatgtccctgtcaaggctcctgagacctttgataacataaccattagcagagaggctcagggtgaggtccctgcctcggactcaaagaccgaatgcacggccttgtaggggacgccccagattgtcagggatggggggatggtccttgagttttgcatgctctcctccctcccacttctgcaccctttcaccacctcgaggagatttgctccccattagcgaatgaaattgatgcagtcctacctaactcgattccctttggcttggtgggtaggcctgcagggcacttttattccaacccctggtcactcagtaatcttttactccaggaaggcacaggatggtacctaaagagaattagagaatgaacctggcgggacggatgtctaatcctgcacctagctgggttggtcagtagaacctattttcagactcaaaaaccatcttcagaaagaaaaggcccagggaaggaatgtatgagaggctctcccagatgaggaagtgtactctctatgactatcaagctcaggcctctccctttttttaaaccaaagtctggcaaccaagagcagcagctccatggcctccttgccccagatcagcctgggtcaggggacatagtgtcattgtttggaaactgcagaccacaaggtgtgggtctatcccacttcctagtgctccccacattccccatcagggcttcctcacgtggacaggtgtgctagtccaggcagttcacttgcagtttccttgtcctcatgcttcggggatgggagccacgcctgaactagagttcaggctggatacatgtgctcacctgctgctcttgtcttcctaagagacagagagtggggcagatggaggagaagaaagtgaggaatgagtagcatagcattctgccaaaagggccccagattcttaatttagcaaactaagaagcccaattaaaaagcattgtggctaaagtctaacgctcctctcttggtcagataacaaaagccctccctgttggatcttttgaaataaaacgtgcaagttatccaggctcgtagcctgcatgctgccaccttgaatcccagggagtatctgcacctggaatagctctccacccctctctgcctccttactttctgtgcaagatgacttcctgggttaacttccttctttccatccacccacccactggaatctctttccaaacatttttccattttcccacagatgggctttgattagctgtcctctctccatgcctgcaaagctccagatttttggggaaagctgtacccaactggactgcccagtgaactgggatcattgagtacagtcgagcacacgtgtgtgcatgggtcaaaggggtgtgttccttctcatcctagatgccttctctgtgccttccacagcctcctgcctgattacaccactgcccccgccccaccctcagccatcccaattcttcctggccagtgcgctccagccttatctaggaaaggaggagtgggtgtagccgtgcagcaagattggggcctcccccatcccagcttctccaccatcccagcaagtcaggatatcagacagtcctcccctgaccctcccccttgtagatatcaattcccaaacagagccaaatactctatatctatagtcacagccctgtacagcatttttcataagttatatagtaaatggtctgcatgatttgtgcttctagtgctctcatttggaaatgaggcaggcttcttctatgaaatgtaaagaaagaaaccactttgtatattttgtaataccacctctgtggccatgcctgccccgcccactctgtatatatgtaagttaaacccgggcaggggctgtggccgtctttgtactctggtgatttttaaaaattgaatctttgtacttgcattgattgtataataattttgagaccaggtctcgctgtgttgctcaggctggtctcaaactcctgagatcaagcaatccgcccacctcagcctcccaaagtgctgagatcacaggcgtgagccaccaccaggcctgattgtaattttttttttttttttttactggttatgggaagggagaaataaaatcatcaaacccaaaaaaaaaaaa

SEQ ID NO: 172405 - DNA, 2105 bp, Homo sapiens
acagcacagaggaggtggacagcacaggaggtggatgcagagaggctcagggtgaggtccctgcctcggactcaaagaccgaatgcacggccttgtaggggacgccccagattgtcagggatggggggatggtccttgagttttgcatgctctcctccctcccacttctgcaccctttcaccacctcgaggagatttgctccccattagcgaatgaaattgatgcagtcctacctaactcgattccctttggcttggtgggtaggcctgcagggcacttttattccaacccctggtcactcagtaatcttttactccaggaaggcacaggatggtacctaaagagaattagagaatgaacctggcgggacggatgtctaatcctgcacctagctgggttggtcagtagaacctattttcagactcaaaaaccatcttcagaaagaaaaggcccagggaaggaatgtatgagaggctctcccagatgaggaagtgtactctctatgactatcaagctcaggcctctccctttttttaaaccaaagtctggcaaccaagagcagcagctccatggcctccttgccccagatcagcctgggtcaggggacatagtgtcattgtttggaaactgcagaccacaaggtgtgggtctatcccacttcctagtgctccccacattccccatcagggcttcctcacgtggacaggtgtgctagtccaggcagttcacttgcagtttccttgtcctcatgcttcggggatgggagccacgcctgaactagagttcaggctggatacatgtgctcacctgctgctcttgtcttcctaagagacagagagtggggcagatggaggagaagaaagtgaggaatgagtagcatagcattctgccaaaagggccccagattcttaatttagcaaactaagaagcccaattaaaaagcattgtggctaaagtctaacgctcctctcttggtcagataacaaaagccctccctgttggatcttttgaaataaaacgtgcaagttatccaggctcgtagcctgcatgctgccaccttgaatcccagggagtatctgcacctggaatagctctccacccctctctgcctccttactttctgtgcaagatgacttcctgggttaacttccttctttccatccacccacccactggaatctctttccaaacatttttccattttcccacagatgggctttgattagctgtcctctctccatgcctgcaaagctccagatttttggggaaagctgtacccaactggactgcccagtgaactgggatcattgagtacagtcgagcacacgtgtgtgcatgggtcaaaggggtgtgttccttctcatcctagatgccttctctgtgccttccacagcctcctgcctgattacaccactgcccccgccccaccctcagccatcccaattcttcctggccagtgcgctccagccttatctaggaaaggaggagtgggtgtagccgtgcagcaagattggggcctcccccatcccagcttctccaccatcccagcaagtcaggatatcagacagtcctcccctgaccctcccccttgtagatatcaattcccaaacagagccaaatactctatatctatagtcacagccctgtacagcatttttcataagttatatagtaaatggtctgcatgatttgtgcttctagtgctctcatttggaaatgaggcaggcttcttctatgaaatgtaaagaaagaaaccactttgtatattttgtaataccacctctgtggccatgcctgccccgcccactctgtatatatgtaagttaaacccgggcaggggctgtggccgtctttgtactctggtgatttttaaaaattgaatctttgtacttgcattgattgtataataattttgagaccaggtctcgctgtgttgctcaggctggtctcaaactcctgagatcaagcaatccgcccacctcagcctcccaaagtgctgagatcacaggcgtgagccaccaccaggcctgattgtaattttttttttttttttttactggttatgggaagggagaaataaaatcatcaaacccaaaaaaaaaaaa

SEQ ID NO: 172406 - DNA, 1882 bp, Homo sapiens
  misc_feature (29)..(29): n is a, c, g, or t
acttcgtctgcgtctctgagttccccgcnggtgtgtgggtggcctgcagggcacttttattccaacccctggtcactcagtaatcttttactccaggaaggcacaggatggtacctaaagagaattagagaatgaacctggcgggacggatgtctaatcctgcacctagctgggttggtcagtagaacctattttcagactcaaaaaccatcttcagaaagaaaaggcccagggaaggaatgtatgagaggctctcccagatgaggaagtgtactctctatgactatcaagctcaggcctctccctttttttaaaccaaagtctggcaaccaagagcagcagctccatggcctccttgccccagatcagcctgggtcaggggacatagtgtcattgtttggaaactgcagaccacaaggtgtgggtctatcccacttcctagtgctccccacattccccatcagggcttcctcacgtggacaggtgtgctagtccaggcagttcacttgcagtttccttgtcctcatgcttcggggatgggagccacgcctgaactagagttcaggctggatacatgtgctcacctgctgctcttgtcttcctaagagacagagagtggggcagatggaggagaagaaagtgaggaatgagtagcatagcattctgccaaaagggccccagattcttaatttagcaaactaagaagcccaattaaaaagcattgtggctaaagtctaacgctcctctcttggtcagataacaaaagccctccctgttggatcttttgaaataaaacgtgcaagttatccaggctcgtagcctgcatgctgccaccttgaatcccagggagtatctgcacctggaatagctctccacccctctctgcctccttactttctgtgcaagatgacttcctgggttaacttccttctttccatccacccacccactggaatctctttccaaacatttttccattttcccacagatgggctttgattagctgtcctctctccatgcctgcaaagctccagatttttggggaaagctgtacccaactggactgcccagtgaactgggatcattgagtacagtcgagcacacgtgtgtgcatgggtcaaaggggtgtgttccttctcatcctagatgccttctctgtgccttccacagcctcctgcctgattacaccactgcccccgccccaccctcagccatcccaattcttcctggccagtgcgctccagccttatctaggaaaggaggagtgggtgtagccgtgcagcaagattggggcctcccccatcccagcttctccaccatcccagcaagtcaggatatcagacagtcctcccctgaccctcccccttgtagatatcaattcccaaacagagccaaatactctatatctatagtcacagccctgtacagcatttttcataagttatatagtaaatggtctgcatgatttgtgcttctagtgctctcatttggaaatgaggcaggcttcttctatgaaatgtaaagaaagaaaccactttgtatattttgtaataccacctctgtggccatgcctgccccgcccactctgtatatatgtaagttaaacccgggcaggggctgtggccgtctttgtactctggtgatttttaaaaattgaatctttgtacttgcattgattgtataataattttgagaccaggtctcgctgtgttgctcaggctggtctcaaactcctgagatcaagcaatccgcccacctcagcctcccaaagtgctgagatcacaggcgtgagccaccaccaggcctgattgtaattttttttttttttttttactggttatgggaagggagaaataaaatcatcaaacccaaaaaaaaaaaa

SEQ ID NO: 172407 - DNA, 1803 bp, Homo sapiens
taggctaggtacgaggctgggggttgaatcggccgaggaagagaattagagaatgaacctggcgggacggatgtctaatcctgcacctagctgggttggtcagtagaacctattttcagactcaaaaaccatcttcagaaagaaaaggcccagggaaggaatgtatgagaggctctcccagatgaggaagtgtactctctatgactatcaagctcaggcctctccctttttttaaaccaaagtctggcaaccaagagcagcagctccatggcctccttgccccagatcagcctgggtcaggggacatagtgtcattgtttggaaactgcagaccacaaggtgtgggtctatcccacttcctagtgctccccacattccccatcagggcttcctcacgtggacaggtgtgctagtccaggcagttcacttgcagtttccttgtcctcatgcttcggggatgggagccacgcctgaactagagttcaggctggatacatgtgctcacctgctgctcttgtcttcctaagagacagagagtggggcagatggaggagaagaaagtgaggaatgagtagcatagcattctgccaaaagggccccagattcttaatttagcaaactaagaagcccaattaaaaagcattgtggctaaagtctaacgctcctctcttggtcagataacaaaagccctccctgttggatcttttgaaataaaacgtgcaagttatccaggctcgtagcctgcatgctgccaccttgaatcccagggagtatctgcacctggaatagctctccacccctctctgcctccttactttctgtgcaagatgacttcctgggttaacttccttctttccatccacccacccactggaatctctttccaaacatttttccattttcccacagatgggctttgattagctgtcctctctccatgcctgcaaagctccagatttttggggaaagctgtacccaactggactgcccagtgaactgggatcattgagtacagtcgagcacacgtgtgtgcatgggtcaaaggggtgtgttccttctcatcctagatgccttctctgtgccttccacagcctcctgcctgattacaccactgcccccgccccaccctcagccatcccaattcttcctggccagtgcgctccagccttatctaggaaaggaggagtgggtgtagccgtgcagcaagattggggcctcccccatcccagcttctccaccatcccagcaagtcaggatatcagacagtcctcccctgaccctcccccttgtagatatcaattcccaaacagagccaaatactctatatctatagtcacagccctgtacagcatttttcataagttatatagtaaatggtctgcatgatttgtgcttctagtgctctcatttggaaatgaggcaggcttcttctatgaaatgtaaagaaagaaaccactttgtatattttgtaataccacctctgtggccatgcctgccccgcccactctgtatatatgtaagttaaacccgggcaggggctgtggccgtctttgtactctggtgatttttaaaaattgaatctttgtacttgcattgattgtataataattttgagaccaggtctcgctgtgttgctcaggctggtctcaaactcctgagatcaagcaatccgcccacctcagcctcccaaagtgctgagatcacaggcgtgagccaccaccaggcctgattgtaattttttttttttttttttactggttatgggaagggagaaataaaatcatcaaacccaaaaaaaaaaaa

SEQ ID NO: 172408 - DNA, 561 bp, Homo sapiens
  misc_feature (6)..(6): n is a, c, g, or t
  misc_feature (10)..(10): n is a, c, g, or t
tcacantgancatctgcccactctctgtctcttaggaagacaagagcagcaggtgagcacatgtatccagccaaatactctatatctatagtcacagccctgtacagcatttttcataagttatatagtaaatggtctgcatgatttgtgcttctagtgctctcatttggaaatgaggcaggcttcttctatgaaatgtaaagaaagaaaccactttgtatattttgtaataccacctctgtggccatgcctgccccgcccactctgtatatatgtaagttaaacccgggcaggggctgtggccgtctttgtactctggtgatttttaaaaattgaatctttgtacttgcattgattgtataataattttgagaccaggtctcgctgtgttgctcaggctggtctcaaactcctgagatcaagcaatccgcccacctcagcctcccaaagtgctgagatcacaggcgtgagccaccaccaggcctgattgtaattttttttttttttttttactggttatgggaagggagaaataaaatcatcaaacccaaaaaaaaaaaa

SEQ ID NO: 172409 - DNA, 1282 bp, Homo sapiens
ggtgagggcgagcagagctggtgagtcggcaacgcaggaattatcatgggggccaacattggaacgtcaatcaccaacactattgttgcgctcatgcaggtgggagatcggagtgagttcagaagagcttttgcaggagccactgtccatgacttcttcaactggctgtccgtgttggtgctcttgcccgtggaggtggccacccattacctcgagatcataacccagcttatagtggagagcttccacttcaagaatggagaagatgccccagatcttctgaaagtcatcactaagcccttcacaaagctcattgtccagctggataaaaaagttatcagccaaattgcaatgaacgatgaaaaagcgaaaaacaagagtcttgtcaagatttggtgcaaaacttttaccaacaagacccagattaacgtcactgttccctcgactgctaactgcacctccccttccctctgttggacggatggcatccaaaactggaccatgaagaatgtgacctacaaggagaacatcgccaaatgccagcatatctttgtgaatttccacctcccggatcttgctgtgggcaccatcttgctcatactctccctgctggtcctctgtggttgcctgatcatgattgtcaagatcctgggctctgtgctcaaggggcaggtcgccactgtcatcaagaagaccatcaacactgatttcccctttccctttgcatggttgactggctacctggccatcctcgtcggggcaggcatgaccttcatcgtacagagcagctctgtgttcacgtcggccttgacccccctgattggaatcggcgtgataaccattgagagggcttatccactcacgctgggctccaacatcggcaccaccaccaccgccatcctggccgccttagccagccctggcaatgcattgaggagttcactccaggtcaggacttggggcacggggacaggggccctgggagtgggaccacccatggtcttgcaaactggtctctaacaagagccaggcttttctctgtactatccaaaatatggaactaatatgtggaggggaagccacgggtaaagttttcaggaccttgatatgagaacaatcaaaactatcagttctgagagaagcagtaagaccctcataactggtggttgtttcagcaaaagtggggtggccccttgatatagatgtggaaaaggtacttaggaagcacagacaccacctcccatctcctcactgcctcctatggggaactttacaattagga

SEQ ID NO: 172410 - DNA, 446 bp, Homo sapiens
aagtgctgggattacaggcgtgagccacggtgcccgttgcaccctgcttttgactgaaggagagagtcaagacaaaaacaagtttacgagattaaaggtggtacatgcagctaactcaacactgtacgaggtagtttgctttagcgactgggtgagtgtttgaaggggaaccacagaggaaatatggtgcttaatatgccacacttagggggcataagtgtgaaatctttcccttccttttactgccgcctccggccgaaacccccacccagttgatgctttgcaaccaatggttcttcctcttatagcatctcggtgtgcctcctttccatgactgctgctttaagctgttttctcatccacagaccatggctccctggcctgaattgggagatgcccagcccaaccccgataagtacctcgaaggggccgcaggtcagcagccc

SEQ ID NO: 172411 - DNA, 3570 bp, Homo sapiens
ggtgagggcgagcagagctggtgagtcggcaacgcaggaattatcatgggggccaacattggaacgtcaatcaccaacactattgttgcgctcatgcaggtgggagatcggagtgagttcagaagagcttttgcaggagccactgtccatgacttcttcaactggctgtccgtgttggtgctcttgcccgtggaggtggccacccattacctcgagatcataacccagcttatagtggagagcttccacttcaagaatggagaagatgccccagatcttctgaaagtcatcactaagcccttcacaaagctcattgtccagctggataaaaaagttatcagccaaattgcaatgaacgatgaaaaagcgaaaaacaagagtcttgtcaagatttggtgcaaaacttttaccaacaagacccagattaacgtcactgttccctcgactgctaactgcacctccccttccctctgttggacggatggcatccaaaactggaccatgaagaatgtgacctacaaggagaacatcgccaaatgccagcatatctttgtgaatttccacctcccggatcttgctgtgggcaccatcttgctcatactctccctgctggtcctctgtggttgcctgatcatgattgtcaagatcctgggctctgtgctcaaggggcaggtcgccactgtcatcaagaagaccatcaacactgatttcccctttccctttgcatggttgactggctacctggccatcctcgtcggggcaggcatgaccttcatcgtacagagcagctctgtgttcacgtcggccttgacccccctgattggaatcggcgtgataaccattgagagggcttatccactcacgctgggctccaacatcggcaccaccaccaccgccatcctggccgccttagccagccctggcaatgcattgaggagttcactccagatcgccctgtgccactttttcttcaacatctccggcatcttgctgtggtacccgatcccgttcactcgcctgcccatccgcatggccaaggggctgggcaacatctctgccaagtatcgctggttcgccgtcttctacctgatcatcttcttcttcctgatcccgctgacggtgtttggcctctcgctggccggctggcgggtgctggttggtgtcggggttcccgtcgtcttcatcatcatcctggtactgtgcctccgactcctgcagtctcgctgcccacgcgtcctgccgaagaaactccagaactggaacttcctgccgctgtggatgcgctcgctgaagccctgggatgccgtcgtctccaagttcaccggctgcttccagatgcgctgctgctgctgctgccgcgtgtgctgccgcgcgtgctgcttgctgtgtggctgccccaagtgctgccgctgcagcaagtgctgcgaggacttggaggaggcgcaggaggggcaggatgtccctgtcaaggctcctgagacctttgataacataaccattagcagagaggctcagggtgaggtccctgcctcggactcaaagaccgaatgcacggccttgtaggggacgccccagattgtcagggatggggggatggtccttgagttttgcatgctctcctccctcccacttctgcaccctttcaccacctcgaggagatttgctccccattagcgaatgaaattgatgcagtcctacctaactcgattccctttggcttggtgggtaggcctgcagggcacttttattccaacccctggtcactcagtaatcttttactccaggaaggcacaggatggtacctaaagagaattagagaatgaacctggcgggacggatgtctaatcctgcacctagctgggttggtcagtagaacctattttcagactcaaaaaccatcttcagaaagaaaaggcccagggaaggaatgtatgagaggctctcccagatgaggaagtgtactctctatgactatcaagctcaggcctctccctttttttaaaccaaagtctggcaaccaagagcagcagctccatggcctccttgccccagatcagcctgggtcaggggacatagtgtcattgtttggaaactgcagaccacaaggtgtgggtctatcccacttcctagtgctccccacattccccatcagggcttcctcacgtggacaggtgtgctagtccaggcagttcacttgcagtttccttgtcctcatgcttcggggatgggagccacgcctgaactagagttcaggctggatacatgtgctcacctgctgctcttgtcttcctaagagacagagagtggggcagatggaggagaagaaagtgaggaatgagtagcatagcattctgccaaaagggccccagattcttaatttagcaaactaagaagcccaattaaaaagcattgtggctaaagtctaacgctcctctcttggtcagataacaaaagccctccctgttggatcttttgaaataaaacgtgcaagttatccaggctcgtagcctgcatgctgccaccttgaatcccagggagtatctgcacctggaatagctctccacccctctctgcctccttactttctgtgcaagatgacttcctgggttaacttccttctttccatccacccacccactggaatctctttccaaacatttttccattttcccacagatgggctttgattagctgtcctctctccatgcctgcaaagctccagatttttggggaaagctgtacccaactggactgcccagtgaactgggatcattgagtacagtcgagcacacgtgtgtgcatgggtcaaaggggtgtgttccttctcatcctagatgccttctctgtgccttccacagcctcctgcctgattacaccactgcccccgccccaccctcagccatcccaattcttcctggccagtgcgctccagccttatctaggaaaggaggagtgggtgtagccgtgcagcaagattggggcctcccccatcccagcttctccaccatcccagcaagtcaggatatcagacagtcctcccctgaccctcccccttgtagatatcaattcccaaacagagccaaatactctatatctatagtcacagccctgtacagcatttttcataagttatatagtaaatggtctgcatgatttgtgcttctagtgctctcatttggaaatgaggcaggcttcttctatgaaatgtaaagaaagaaaccactttgtatattttgtaataccacctctgtggccatgcctgccccgcccactctgtatatatgtaagttaaacccgggcaggggctgtggccgtctttgtactctggtgatttttaaaaattgaatctttgtacttgcattgattgtataataattttgagaccaggtctcgctgtgttgctcaggctggtctcaaactcctgagatcaagcaatccgcccacctcagcctcccaaagtgctgagatcacaggcgtgagccaccaccaggcctgattgtaattttttttttttttttttactggttatgggaagggagaaataaaatcatcaaacccaaaaaaaaaaaa

SEQ ID NO: 172412 - DNA, 2819 bp, Homo sapiens
cctggccctcccagacacatagtaggtcctcatggaatccaggtaccctctgggctgagccataaggacaaagaaggcctggaaggcccgagactgtgctgcctgtgatgcctgctagcttacctccccctcctcctccctactgccacccgcattgggcaacaggcccctcacctgtccaacctcttgtgttgcagatcgccctgtgccactttttcttcaacatctccggcatcttgctgtggtacccgatcccgttcactcgcctgcccatccgcatggccaaggggctgggcaacatctctgccaagtatcgctggttcgccgtcttctacctgatcatcttcttcttcctgatcccgctgacggtgtttggcctctcgctggccggctggcgggtgctggttggtgtcggggttcccgtcgtcttcatcatcatcctggtactgtgcctccgactcctgcagtctcgctgcccacgcgtcctgccgaagaaactccagaactggaacttcctgccgctgtggatgcgctcgctgaagccctgggatgccgtcgtctccaagttcaccggctgcttccagatgcgctgctgctgctgctgccgcgtgtgctgccgcgcgtgctgcttgctgtgtggctgccccaagtgctgccgctgcagcaagtgctgcgaggacttggaggaggcgcaggaggggcaggatgtccctgtcaaggctcctgagacctttgataacataaccattagcagagaggctcagggtgaggtccctgcctcggactcaaagaccgaatgcacggccttgtaggggacgccccagattgtcagggatggggggatggtccttgagttttgcatgctctcctccctcccacttctgcaccctttcaccacctcgaggagatttgctccccattagcgaatgaaattgatgcagtcctacctaactcgattccctttggcttggtgggtaggcctgcagggcacttttattccaacccctggtcactcagtaatcttttactccaggaaggcacaggatggtacctaaagagaattagagaatgaacctggcgggacggatgtctaatcctgcacctagctgggttggtcagtagaacctattttcagactcaaaaaccatcttcagaaagaaaaggcccagggaaggaatgtatgagaggctctcccagatgaggaagtgtactctctatgactatcaagctcaggcctctccctttttttaaaccaaagtctggcaaccaagagcagcagctccatggcctccttgccccagatcagcctgggtcaggggacatagtgtcattgtttggaaactgcagaccacaaggtgtgggtctatcccacttcctagtgctccccacattccccatcagggcttcctcacgtggacaggtgtgctagtccaggcagttcacttgcagtttccttgtcctcatgcttcggggatgggagccacgcctgaactagagttcaggctggatacatgtgctcacctgctgctcttgtcttcctaagagacagagagtggggcagatggaggagaagaaagtgaggaatgagtagcatagcattctgccaaaagggccccagattcttaatttagcaaactaagaagcccaattaaaaagcattgtggctaaagtctaacgctcctctcttggtcagataacaaaagccctccctgttggatcttttgaaataaaacgtgcaagttatccaggctcgtagcctgcatgctgccaccttgaatcccagggagtatctgcacctggaatagctctccacccctctctgcctccttactttctgtgcaagatgacttcctgggttaacttccttctttccatccacccacccactggaatctctttccaaacatttttccattttcccacagatgggctttgattagctgtcctctctccatgcctgcaaagctccagatttttggggaaagctgtacccaactggactgcccagtgaactgggatcattgagtacagtcgagcacacgtgtgtgcatgggtcaaaggggtgtgttccttctcatcctagatgccttctctgtgccttccacagcctcctgcctgattacaccactgcccccgccccaccctcagccatcccaattcttcctggccagtgcgctccagccttatctaggaaaggaggagtgggtgtagccgtgcagcaagattggggcctcccccatcccagcttctccaccatcccagcaagtcaggatatcagacagtcctcccctgaccctcccccttgtagatatcaattcccaaacagagccaaatactctatatctatagtcacagccctgtacagcatttttcataagttatatagtaaatggtctgcatgatttgtgcttctagtgctctcatttggaaatgaggcaggcttcttctatgaaatgtaaagaaagaaaccactttgtatattttgtaataccacctctgtggccatgcctgccccgcccactctgtatatatgtaagttaaacccgggcaggggctgtggccgtctttgtactctggtgatttttaaaaattgaatctttgtacttgcattgattgtataataattttgagaccaggtctcgctgtgttgctcaggctggtctcaaactcctgagatcaagcaatccgcccacctcagcctcccaaagtgctgagatcacaggcgtgagccaccaccaggcctgattgtaattttttttttttttttttactggttatgggaagggagaaataaaatcatcaaacccaaaaaaaaaaaa

SEQ ID NO: 172413 - DNA, 440 bp, Homo sapiens
ttaaattaaacatttaaacttatgatttcagattctatgatttgtatcgattggttcacatattagtgtcagaaagtaaagccaaagattgcatggcaaaggcaaattggagaaattctctaaaagtatttcataaattttcggaagaagattgtgcagatgttcgcaatactgccaaaggtttactagacactatccccatagtttttcaaagagtaggtcagtagaacaaaatacaacaatgctgacaaaatattgaaaaggctgcaatgacaaactataaaggatttgagaaaaatcttaagcaatattcaagcatatcagaagaaagttatgctaactaccaaaatgatactctccttaatttgaatgttttaagttggagatttgatgagtaactggcagtcataataaagaggcaatgccccagttaggctacc

SEQ ID NO: 172414 - DNA, 175 bp, Homo sapiens
tgagaagatgctaaggacacagcgcagagtggaagccgaggcccaggttgggggtcaggagctgggctgggccccggagggcgctggcatgcacagcctctggacgtcagcccgacaccgcctccggggcttgctcattccccggccttgctgcttgccccctgctacacctggg

SEQ ID NO: 172415 - DNA, 397 bp, Homo sapiens
atttaaatgtaggttctgcattcttcccagtgaattctatttttcttaattggcttatccaattcattatctgtagaaacttcctaaaactggctgtcagtgttatagttccactacctgacttcataacaactactaagctacagtacaaagactgccatttatgttctaacatttttagattttccaaattctgaactggtgttttgcaggaatgctccactttgtccaataaggaatcttgttttgtgaggagtagatgagttaatatatgtagagtatgtaagacagtgcctgatgtgtagtgggcactcaatacatgttagctattatcatttattgaatatctgctatatttgacagactatatgaagtattttacatgcaaatttctcat

SEQ ID NO: 172416 - DNA, 1085 bp, Homo sapiens
cttaaatctactttgctaaaaattgcaaaactactactgtaaaaactgtagggtgtcacgaatcagactccagtcatatggctcccagcaaagagaaattaccactttttgtaaaatgtttttcagattccgtgtctggtgactgtaactttaagatgccttttataaggcacataaataatctggcacaaatctttatcattttgacagagtttcttttatgcttgtgttggtgattttgttgcatttaacccatggggacttaacatctctgcttttccaatcaggagcttggttctaaccttttgggagatgattaaagagagaggttgagagagagagagagagagagagagagagagagagagagagagagagagatgtttcgtcctcagcttttgcttccattttttttttaagaactctgggctaataacttctaatctttatagaatatttcaaagaaatatatttgttcttaaagatacataggtttgagatattgagtgctacaagcatttattttggttttaccttaacatattatgattcctcagttttgttggcatttagtaattatgtttatgtttttatcttatcaaaaaatgtcttcttacctttgatatttataatcactcctcggtcatgtaaatagtttgctttatattttactgttttaaagtctgtgaccttacctgccctcttctgtagcaaagtgcagcatttaactcaggaagctatattccccccaagtgtcattaatatttgcataagattaaaaacactccagtcggccgggcgcggtggctcacgcctgtaatcccagcactttgggaggccgaggcgggcggatcacaaggtcaggagatcgagaccatcctggctaacacggtgaaaccccgtctctactaaaactacaaaaaattagccgggcatggtggcgggcacctgtggtcccagctacttgggaggctgaggcaggagaatggcgtgaacccgggaggcagagcttgcagtgagccaagatcgtgccactacactccagcctgggtgacagagcaagactccgtctcaagaaaaaaaaa

SEQ ID NO: 172417 - DNA, 509 bp, Homo sapiens
ctgggaggccaaggtggcggtgagccaagatcacgccattgcactccagcctgggcaacaagagtgaaactccatctcaaaaaaataaaaataaaaataaaaataaagagattattccagcatcggcaacatggcaaactttgcctatacaaaaaattacctcgtcactgtgatgtgtgcctgtagtcccagctactcaggaggctgaggtagaaggatctgttgagcctaagagttcgaggctgcagtgagctatgattgcaccgctacactccagcctgggcaacagaatgagaccctgtttgaaaaaaaaaaaaaaagagtcaggtgcggtagctcacgtctctaatcccagcactctgggaggccgaggcgggtggatcacaaggtcaggagatcgagaccatcctggctaacatggtgaatccccgcctctactaaaaatataaaaaattagccgagcgtggtggcgggtgcctgtagtcccagctactcgggaggctgaggca

SEQ ID NO: 172418 - DNA, 402 bp, Homo sapiens
atttatgggaatggcaccgcaaagttcgaaggtcatgagtccattgtcatgcagtgaacattgaaggggtaaatcttggatttgcctcctactccgttacccacccttataacataaccgttgcattgttgggcagattacagtatgaaagtcaggtgatctcatctcttccagcttctggggtcaccctttcccctaatacttaaaatggcttgagccatgtactataagttcagtaccttttcttctctccaatattctgataataatggggcttacctttcctggtcatctttctttgaatttctgctgctacctcagtgtttcacctctggccactgctgtctcctcttcgctctgcactgcccgcttctctaatctcccagacatcccccgagccat

SEQ ID NO: 172419 - DNA, 718 bp, Homo sapiens
tgatttcggaatcatctaacaattgaatccctgctgttgttatttcatctattaatgtcctagatgtctcagataacattgccaggtgtcttgagagcattcgtctcttggatggtgtattagtccgttctcatactactataaagaagtacctgagactgcgtaatttttaaaggaaagaggtttaattggctcacagttccacattgctagggaggcctcaggaaacttacaaccacggtggaaggggaagcaggcatggaccttcttcacatggtggcagatggcggcaggagacagaagagtgaatgaacaaagggggaagaaccctttataaaacaatcagatctcgtgagaactcactcactattatgagaacagcttgggggaaactgcccccatgattcagttacctccacgtggtctctcccttgacatgtggggattacaattcaacatgagactttgcgtggggatgcagaaaaaccatatcggatggaaagtattgtcattgaactaatttgcccctcttggcacctttattttcttagactcctaatagatcggcacatcagaccatagaacatataagtgcagaactatctgattcctaaggtaaaaactgcttagattctcaccctgagacccttcaagaagtctgggtggtagccttccaaatatgcatttaacttcaaagaatacgatttagctattacaa

SEQ ID NO: 172420 - DNA, 396 bp, Homo sapiens
ttaccatacctaagtaaacagcagggtcacttagatagtggaggtctaagggagctcaaatctaaggaagaacaggggccaaatgaacaggaggaacatgctgccttgctgtgagcccacagcagcctgttaaattctgcacagaggttagctccttcccctacctcttgggggtctggggatttgagggagtagaacctttggctttagcagaggctggtggttgaggctgcagaaaaagtattagataccctcttggcacttccaggctgagagaccatggagcatttagtattatgggccaccagactttgtttcagctattttgtagatgacgtttcatcttaatgcttgcatcaacccagtgcggtagatatatcttcatttttaaaaaga

SEQ ID NO: 172421 - DNA, 545 bp, Homo sapiens
agggaatgatgtagatggaagaaggactggtatgctcctgaaacagtaagggctcaatactgatggatgatccagatgagtaaagggagagtagttagatggtagggcagagaggtgaggggaacaagatcatttagagcctgttggacaattcaaagactctggtggttttcaaccttagttaaattaagagccactggaaggtttgaatgatatgaggtaatttactttttaaaaatataactctgcactggggaaagaaaactctattcaataaatggtgctggggtaattgaatagccatatgcagaagaaaggaactgtacctctgtctcttactgtatacaaaaatgaattcaagatggattaaagacttaaatagaagacctgaaattaaaaaaaaaatcctagaagaaaacctaggaaaggttcttctggacttggtgtaggcaaataatttatgactaagttctaagaaaaaaaaaacacaccaaaacaaaaatagataaatgggacttaattaaactaaaaagcttctgcacagc

SEQ ID NO: 172422 - DNA, 221 bp, Homo sapiens
tgtctgcattttggggaaagacctgccctcaaagcaaaggctttcaggctacaggctggcttcaatgctagggtgagcggtgaatagtgtgcatagtgaatacttgctttctggtacaacctcataaccggggcacggtctcagtgaataacagaggacaccctgcacctaagttactttttttttttttttttttttgagatagagtctcgctctgtagt

SEQ ID NO: 172423 - DNA, 632 bp, Homo sapiens
atttccaggtagatagtgttggaattgaactggaggacacccaactggtgtctgttgcagaactgattgtttgcttgctggtggggagaaatccctacacatttggtcatataagtgttctgtgtcgattgctgtggtgtgagagcagaagaaaaacagtttgcttttaacataatgtcccagacctttctattaggcagggccatgtgccttgtttcagcctataaaatataagtggtagcgaaacgatcacttctgggttgagccatgtaagactcccccattaccacatccacattctctttttcctagacaacacatactgagacagtggcttcataaaatggaggcagtctggatcctgagtcacatgatgaaagagccaccaatgatccatgttagtcttggcatgagggagaaagaaacttgctgtgctatgcaaatgagatttagaagttcgtttctgcagcataacttagactagtctgataaatatacagaggtacttcatttttctgcctacacactaccaagtgacaacaggggtaaaataagtgggagaaaatacatacaagtgggcagaaggaagagttagagaatgctggaaatctctgaaaaatgaggaagaaaag

SEQ ID NO: 172424 - DNA, 366 bp, Homo sapiens
cctctgttgcccaggctggagtatagtggcgtgatctcggctcactgcaacctccgccttctaatttctatatttttggtagagatgtcccggctaatttttatatttttggtagagatggggtttcaccatgttggccaggctggcctccacctcctggcctcaagcgatccacccaccttggcctctcaaagtgctgggattacaggcatgagccactgggccggtcagtgcccttttctctgaagtccttaaacctgggcatgacttccaggggctgagttcttctctttattcaccctaccctaaaatatcatccagtctcagggctcccatccattcactgctgaccatcccaaacttccc

SEQ ID NO: 172425 - DNA, 895 bp, Homo sapiens
cttgaaagaaacagcagccaaactgctatgattcaaaccacccaagtggagaagaagttaagaggcaattttcatctaaagatacagcatgtgaaatgagacaggctctttggaacaggcaggattccaacagaagatgagagaaaagccttcccatcagagacaccagcaagaggcaagaatgtgtagagcttattccaggcacagatggacaaaagtcaaggatgcaagtaaggaaggaggaggatgtaaaaagccagtaggaaggataggaccaaaccgcaaaggataagaccaaactgcaaaggatcttcatgttctttgtaactcactctagaactgtgagccactcaacactttgaggcaaaggatgtgaccctgggttaagctttatctaacagtagtatatagctttgaaaccaaaaagccttgacacttgcttcctgtcaacaagggataaaaaatcaatactgacttttccacttggagctgggaagaccaagcttccctggcccttccagcattgcattcactctcaacagccaattaaaaggctaaggtctataccttctctgccctctttatcataatggatctaatagtgaaagtagctgggtgaagagcatgatcccatccacctgcgctttcacatccagcaggcactttaaaagtaaaacaatcctataatcatttatatcctttgggaaacaaccaaagtatttgttgtgaatctaaatatagtcatgggaaaataagagtccgatggcagaggaaccactgcggagagcacagcccagagaggatgttgccttgagtctgaggcccttgctgactggtgtaccagcgagccttccactattccagtcaacccacaccgtggcccagcagcatggga

SEQ ID NO: 172426 - DNA, 548 bp, Homo sapiens
gagtcggtaccgggtcagtacggatgtgaccctgggttaagctttatctaacagtagtatatagctttgaaaccaaaaagccttgacacttgcttcctgtcaacaagggataaaaaatcaatactgacttttccacttggagctgggaagaccaagcttccctggcccttccagcattgcattcactctcaacagccaattaaaaggctaaggtctataccttctctgccctctttatcataatggatctaatagtgaaagtagctgggtgaagagcatgatcccatccacctgcgctttcacatccagcaggcactttaaaagtaaaacaatcctataatcatttatatcctttgggaaacaaccaaagtatttgttgtgaatctaaatatagtcatgggaaaataagagtccgatggcagaggaaccactgcggagagcacagcccagagaggatgttgccttgagtctgaggcccttgctgactggtgtaccagcgagccttccactattccagtcaacccacaccgtggcccagcagcatggga

SEQ ID NO: 172427 - DNA, 396 bp, Homo sapiens
agggtgtggggcaagagttttcaaggaagaggagcagcctgtgcgaaggcctggagacagaccggagcttgggggactcaagacagttttcggcacggtggaaatgcggagtgggcggcagggccctatgggagacaaggctttctttagttgtgggcagagctgggagtgagtgcacggtgacagaagcacagacaaaacaccagcaagtggacagaagtcaccggagtgccaggtttgcctcactttgaaaaaccctacacacaggcacagattatctctgagaggggacaggagtaggtgcttccataatgaagagaccacaaggatttcaaagcaagaaagtctctcttttcttgggacccttccaaaaggacccctcttggaatattgtta

SEQ ID NO: 172428 - DNA, 297 bp, Homo sapiens
attagggcaaaaacaaataattgttctttgaaaatcacttggtcaataatttgtaggtgtgtagtaactgtcatactagttggttatgtatgtgatcttagctctccacctaagttatgaaatctttgtggttatgtttgtttctatctctttggttttgtttttttttttcctggaacgctctctttatcttgtttcaacccaactcctgctgataacacatttctcaaaaccctaccaactggagatctttcctgcagcttccgtcacggccctcggactcagtccctcagcaga

SEQ ID NO: 172429 - DNA, 185 bp, Homo sapiens
ggtataacagcgatcattctgagactctctgtctttcaactgcgtgtttagactattcacatttaatgcaaattaaaggacacattgggatttaggcctatcatttttatttattttctatttgttccctttattttggtattcttctgtttcccttttcatgccttccgctgtgtattccgaat

SEQ ID NO: 172430 - DNA, 153 bp, Homo sapiens
aaaaggaacaataaccaagattttattgagtgcaaagcacagttctaactgttttatatttattagctcaactaaccatcataccaaccttctgagaaaggtactaatattgtcgttatttagagatgaagacgtggcggcacagggggattg

SEQ ID NO: 172431 - DNA, 176 bp, Homo sapiens
cctggaaggtcattccctccatcctgagaagttgggggcgggggggtacttagaggtggaggctgggattagaatcctcacccttctgcttagtggctagaagaccttgagcaggcccctcaacctctgtgagcctcggtctccaaatctgtacgttggggtgaacgatgattgta

SEQ ID NO: 172432 - DNA, 332 bp, Homo sapiens
ttatttcttcactatttcattactcaaaatatcagaaactggacaaagactaaaatcaaatcccattttaaatttttcattgatataagtaatagagcaggagttttactgagtaaatagttataggaaatcagatcaatatcaatgaagtatatcagtgttttccgtaagtccacaacatgttttcctgaagactaccagtaggattccacttgtcaaattgccttctttttgtttctattcctcttgacttaatatacaactatcccctggaaatacctttctacaacctctgagacacagcaccttttgtattacatgcttttactgta

SEQ ID NO: 172433 - DNA, 997 bp, Homo sapiens
aagtaagtgccaaaaaagtgtttaagcctgagtgtggtccgaaggtttagagcagacacaggatgggagctttgatggtggaggcggaaagaaagatcccaggcaggagagacaattgaagcaaaggccttgagttgagaattggccgtgccctcatcctttcctgtttcctttttgtttgggcaatgaaaagagcatggactttggggttggatgtgcctgcattcaggtcttgacactgctgtattaccgctcccaatttcttcatgaaacaagattaacagtatcacttgtatcagttagggtttgttggttatgagcaacctaaacccactctggctaacttaaacataaaaggaatctattgggatctattgacctgccaagcctcagaaaggacaggaatcagggaagcttcagagacctaagaggcagcagctgatagtatcttcagagtgctgctgtcagaataaacctacaagggctgttttctctccttgtcccaaccagatcaaggttcagattcctgagaaagaacctccgtggttaggaagaacacaagcacattgattgacagcactaggggaggtgttgttcccaatgggaaatctagatgctactaccaagagaaggaggaatggtttatagtagggcagaacccactgctgtccatggcaaaccagtgaaatatttagaagatagaaatatatgcaaaggccaggcacagtggctcacgcctgtaatcccgacactttgggaggccgaggcaggtggatcacctgagatcaagagtttgagacaagcctggccaacatggtgaaaccccatctctactaaaaatacaaaagttagccaggcatggggtcaggcatctgtaaacccagctacttgggaggctgaggcaggagaatcgtttgaactcaggaggtggaggttgtagtgagctgagattgcgccactgcattccagcctgggcaacagagcaagactccatctc

SEQ ID NO: 172434 - DNA, 1525 bp, Homo sapiens
cctgtagtcacagctctttcggagggcaaggcacatggatcacctgaggtcaggagttcaaggtcaggctggccaacatggtgagaccccatctctactaaaaatacaaacattagccgggcatggtggtgcatgcctgtagtcctggctacttgggaggctgaggcaggagaatcgcttgaacacgggaggtgggggtttacagtgagtcaagatggcaccactgcactccagcctgggtgacagtgagactctcaaaaaaaaaagaaagaacttggcacaagcccacaagcctaggcaatataacaagactcccatctgtacaaaaacaaaaaaaaaaaaaaaaaacaagagaaaacacagttgttcgggcgcacctggcgccacagagaagagcttccgaagaccatcgcgtggggggccggggcccaagagttaagtgaacggtgccagcgcggtcccagagggaaaccgcgcgccagcacagcgcgagaatcccccataaaaacgccggcgcaccgaccgtctcggacaccaacccgaagggaggccggaggacaaagggggatcaaaagaggggcccagggagcaaaaaaatagcccggcggggagaacacccacgaccccccatcagcagcgacacccacacggaacaaacccctacacacacaccaccgcaccccgccacacaccaacaccacaccccacccaacgcacccacgacacgcacacaccgcccacacagcgcaggcagcaccaccccgacccccccgccaccgcgagagcaacccgcaccacacgcacgacacccaacacaacaaacgcataaacccccgccaccccgcagacacgaccgcgcaagcccgcagccagcgccgagcccgcgcccgaccgccccaccagccacgcgcccggggagaggggcgcgagcgcgcgcagccaggggagagaggccgcggggggcacacggcgcggaacgaggcggcagacgcgcaggggaagaagggcgggcagggggcgaggcaggggcccgcggggagcaggcagcccgggcacgagaaagacaggacgacgccgcagaccagaggggcgagccggcaagagtcacgacaggagggacagaggaagcagaaaagacgcgaaggaacagagagggggccgacgcgagaccaacagggcggagcacgcgcgacgacggacggcaccgcgggaggggggggacggagcacagggcgaggaggcaggcagcgaacagcagggagcacgaagacagcacgccgcgccgcgcagagaggaccagaaggccagaggccatctgcctaaagcatgaagggatatggagaagcgcaacaagctactcggtacgtacctaacatggggtgcggaggagagagcgtggacagacgaggaggggataggaagttggcactgagagatatgaggagagtacgaaggcgagcgccaagcgagaggaagtgtagcgacaaaagagtgaacggaccacgacgcaggggtggacgtcgca

SEQ ID NO: 172435 - DNA, 470 bp, Homo sapiens
cagagtcttcaactgctacttctgagctgaggctgctgccttggtatccacacaggccttgctatttggggggtttaaggaactcagtgggattcctgggtttgccaagaccatctcctggtgttccttagaccagacagatgacctcgtgactggctgtttcttcctcctcagtttggaggagctgggaggggctccccatggggtgctctgcagacaagggcagtgtgggtttaaactcccagtgtcagggttcgcagaagggtagagtatccctgtgaagacagttccactttggtgtgtggtttatgtcttgtgtcaaataaaagggcaactactttcttctttggggactattagctcatcacagtggttcttagagaccctaaaaaagcactgggtctcgttgttatttatgttttgctttctaagtttgtatgttttcttaaaatttttggtgaccttagcta

SEQ ID NO: 172436 - DNA, 691 bp, Homo sapiens
ttctcccagaagagaagggagagcacatgcccaggctccatggacttccggttctcccctcccttcgcacccccacaatgaggtcacgacgggatgccaccaccagctggtcccttccagagctctgtctgaactccaccagccttgcttctggcctcatcctgcagacccaggggacacctccacttgcaagttcagtccatgggcactgcacactctctcggccccaagttgaaccccttttcctcacccaacatcctccatttcaacaaatggcagcgttgtgggtaaaataacacctccttcagagacattgacatcctcatccctgacttcggctgcagctcagtggtgcaatctcagctcattgcaacttccacctcccaggatgaagcaatcctcccacctcagcctctccagtagctgagacttcaagctccctccagcagccgagctgatttttgtatttttttatagagatggggtttcaccatgttgcccaggctggtgtcaaatccctgggctcaagtaatctgcccacctcgacctcccaaagtgctgggattgcctgcgtgagccccatccccggcctgctcatttccttctagtgctgaagaatattccgatgtctggatagaccacagtttgtctgtccactcacctctaggcagacatcttggttgcttccagt

SEQ ID NO: 172437 - DNA, 541 bp, Homo sapiens
tttcaatcatcggttttcctacttgcagttcacaatatatactggtcactctttataagatttaattatgcttgagtttttgtgtgaaaatacctcttgactgctgcttctcaaaagttgagctagataatacttcctttctgctgaaactaatggtggcttttcaaagcaatttgcgtaaattacaggcacaatctaacatgcttgaaactgacctgattgtctgcataccatcagattgctttagaaaggagcagaggaaggaaaggaggtgtcaggggtaactccaggaattggaatggcataggctccctctgccagagaaacaactctgctcttgatctaaataaatttgaattggtacctcatcatctggatccatttggatacatttagcatcctttgcgggtgtctggctatacaaaagctaataaagaactcgctacataaacgcagtccagttgtggtattctggcattgttcacacagcataaacacgtgctttgtaaaggtagatgaggcgaatgagtttgagggtcct

SEQ ID NO: 172438 - DNA, 404 bp, Homo sapiens
aaactgcctgccctcctctccccagatagacccaccacaaggcaccctctggagaatagaaccagcaactcaatgtcaatggaggcccctctctggataatctaggtctagagtaaacttcctcagacctctccaggttgttaaggccaaaagatccaaccctgggtatctgaggactcgaatcacacagcaatctgcctgaggtctttccaagagctagaaatttggcaagaagggggccccttggaggagaaggatgaaaaggcctttgcctggtgcctgcatctgcgagtgggtcagagggtggggcatcaggaccatgttctctgcagcaagaaaatatctcatttcaagactttcagggctggagttggtgctgggctagccaaaccggaagcgtgggc

SEQ ID NO: 172439 - DNA, 358 bp, Homo sapiens
cttgcaaggtagcattttggccaccattttattgttaacaaaattctaataaaacaataaaatggtagcccaaattcttaccatagaatatttaacaggccatttatcatctcataaaaatgtagaattgaattgaaattaattatgtgtgtgtctcaagaatatctgtctcaaaaaggaaaaaaaaacaaaatagaaaatagagggctaacacgatgaatccaagaaaagggcccactggatttggcaatgacaggttactggtgacctttagaaccaaagctgtcttgatagactgctgatggtagaagccagattgcagaggaggaaagaagtcactgcttaaaggagctctttg

SEQ ID NO: 172440 - DNA, 1829 bp, Homo sapiens
ggcacgaggctcatctttgagtcacttcaaggaggccttccttcattctctgcttgaagcaaagacctctggttttactctttgatagcacgctattctttccttcatggcactctccccttagcttggaaaaatgtttatgtggttcaccactctctactttgatggcattttgtttgctgttgcttgctagtatgtagcatactacctggcatgtggcgtatacttggtaaatattttgttagttaaatgaaaagatttgcttggtatttatggagttctttttatgttgaggcaccatgctaggtgctcaggagaaatgtcataccaggtgtcattatggtgcttagcctgggaactggcaatgggggagacatattacatgcataaatctgttcttacaatgcagagtgatctacgccatgggaaaggcatgcacacgatgttatgagaacaaagaaaaggggcttagccatcagactggtcaatcacggatgactttctgacggaatagacgttttagctgctgagtatggaaagatgaactgttgctctctagatggagggaaagccagaggtggaaatctaggagagcacggtcaaaggtggggggcaaataaaaattaaggcactgttgtagggatgcatgggctggagtaaaggatgcttgtgaggtaaggacactgtggactgcgctaaggactttcaactctttctagaaagctctttgaggccactgagtgacatcagttagagaggttacctcatcaggaactcatcagtttggccttttgaaaagaatactatgacaataaacaagatggacagacggaaggttggttagattatgaaaaaggattactgtgcaggctgtcaacacatatgctcccaactaagagagtactggctaaagagataggtaatgggggaatggacagaggaatcctgaagccttaacacctattatatagactttagtgaccacataggtgtggggtttgactaatggaatcaaagctgatgcctcagtttcctgttttcctaggatagtggaactagagcaggtttggatgataaatgagttcatgtatagatttggatatagaggtctgggactcaagagagacatctcagctgaagatataagtattatagtcattagcaagtaagtggtggctcaggctacaggtttagatgaggttactcagtagagtgacagtgaagcaagtggagtggttgggatggaagcctcagggagctacaacatcaagttacgaggaaaataaaaagactgatgtcagggatggagagatatttaaaggaggaggagtaatcaacagtaacgaaaatagacggctagggactgggcacagtggctcacacctgtaatctcagcactttgggaagttgaggtgggtggatcacttgaggccgggagttcgggaccagcctagcctacatggtgaaaccccttctctactaaaaatataaaagttggctggatgtggtggtgtgcacctgtagtcacagctactcgggaggcggagtcaggagactctcttgaacccaggaggcagaggttgcagtgagccaagactgtgccactgcactccagcctgggtgacagagcaagactctgtctcaaaaaggaaaaaaaaacaaaatagaaaatagagggctaacacgatgaatccaagaaaagggcccactggatttggcaatgacaggttactggtgacctttagaaccaaagctgtcttgatagactgctgatggtagaagccagattgcagaggaggaaagaagtcactgcttaaaggagctctttg

SEQ ID NO: 172441 - DNA, 269 bp, Homo sapiens
agtaggaactgtcttataacaacctacattattgtattgtgtttgcatcattgtaggaaataatttttagcttgagaattttatagtggcatcagtctgggcagattatgtgtgtattttctcataactgtatctgtattgagcctatttgtttgtgttgtcatggatgtgtggtttttagggtcataggtcccaatatgataatattggtgtttctactagacaaacttcttattcaaagtctactcttaaaatgtgtttccaaaaac

SEQ ID NO: 172442 - DNA, 289 bp, Homo sapiens
gagaggccttcctttaccaccagaggctgctgttagctttaactccatgaaggaagatcactggagcacaagtttagtacctggaacccaatagctaattagctactgaatgaatgagtgaacaagtatttatcaagttcctactgcatccagcattatgtcaagagctacaaaggatccaaaagaaagtttaaataaaaactcttcaagaattactatctatttaaagaaaatatgccataacaacttggtatacgtttttaagtcactgcaagaagcatttgggaag

SEQ ID NO: 172443 - DNA, 169 bp, Homo sapiens
cctgaggaagaggctttgggggcctttaaaagtaagtagaaacaagttaaagggataatttgagaggaacgaggaagtggaatactggacattgaattgcaaggaaaaagttagaaggataagtatttaaaacaaggctgaagtagagagaacttactgtttagaagtg

SEQ ID NO: 172444 - DNA, 199 bp, Homo sapiens
agctcaagggaaacaccatatggacagccagggttccctaagaatcaacccaaccagatcatcccacagaggaaactgtaatatcagtgtcccttccaatcagttttgtagtacacaactcttaaggatcatcagaaatgtaatgaaagcctctactgtaacagacagagaccaaagaaaagaaacagaaaaagcgatt

SEQ ID NO: 172445 - DNA, 210 bp, Homo sapiens
acttcattgttgtcttattttcagaaattatcacagcttccccaacctttagcaacaactatcctgataagtcaacagccatcaacactgaggcaagactcttcagcaaaaatattgcaacttgctgaagactcagatgatgatgatgatattttagcaatacagtttttttttttcttttttctttttgtagagatgggtcatcctatg

SEQ ID NO: 172446 - DNA, 362 bp, Homo sapiens
gcagatgcaaaaatcaaaccaagaccaactataagactaaatgtaaaagctaacacccatagcaacttacaaaaaaaaaaaagagagaaatttaaaaagtcttcatgaatttcagttaggcaaaggttttttagacaggatccagaaaataattactataaaagaaaaaactgggccgggcgcagtggctcatgcctgtaatccctgcactttgggagggtgaggcgggcggatcatgaggtcaagagatcgagaccatcctggccaacacagatactaaaaaataaaaaaaattagctgggcatggtggtgggcgcctgtagtcccagctactcgggaggctgaggcaggagaattgcctg

SEQ ID NO: 172447 - DNA, 300 bp, Homo sapiens
  misc_feature (35)..(35): n is a, c, g, or t
  misc_feature (40)..(40): n is a, c, g, or t
  misc_feature (53)..(53): n is a, c, g, or t
  misc_feature (57)..(57): n is a, c, g, or t
  misc_feature (60)..(60): n is a, c, g, or t
  misc_feature (116)..(116): n is a, c, g, or t
tgccctcggactcccaagtgctgggattacaggcntaagncaccatgcccggnccanatnggctaatgttttaaacagatccttcttgtctgccctgtaggacgacaaattatcangcgcaggggtggaagctggagccctgttcattcctctcttccctctttccctcctctcctccctctaggtagtgcaagcagcagctgttgaccctaggggcacatatgcttgcctggcctatctgcacttgagcttcctatgggtgcccatcttggcctgcatgctgcaggacttgcgcttctg

SEQ ID NO: 172448 - DNA, 329 bp, Homo sapiens
gaagaattccctgattctctgatatgcttttttttaattaaaagaaaaaattgtatcaaaaaaatccacacacttttttctttttggatacaggctcataatgaaaaacaggagacccttgccccactcctccaatcccagcatgctcctcaggcaatcacattcttctggtggtgaccttcatatccctaagtaaaacgcttatattgctatttcttgatttatgaacgccagatataaacaaagttgatttttctttcttttttgctgtgatagatgagagtttgtctcaattctccctcttttctttttttccttccttttttttt

SEQ ID NO: 172449 - DNA, 688 bp, Homo sapiens
gtggggagcagagtaaaaacaccaccaggagctactcccttgctgctcagccttaattcaacattgccctgcttgtgacttggagctatgagcctccaggaaaatcctcgggttatttctaacagaaccctcttccatcttattcctatggctaatatcaacaacagcatcaatagtaacccttcgcttactgagcacctactatgtgctttacacacatttaatctcatttaatccatgcaacaatcccatgagctagatgctaatatactccattttatagatgaggaagctatacttcggagagtttaagtaactgttcaagctcacacaactagtaagtgacataacaaagagaaatggtagaaaggcctgaaaaggaagaggagtggagtgaggggcaattgacatcagagtaggcctctttaagctgctcctgtttgagcagctgcccaagtgagctggcagagtatgggaacaactgaaagcccccctcccagcagctcacctcatggcctacctggaaaagaaggatccctgggccccaaaggttgacactctcatctcttccaaggagacttccaaactagcagaggttgttcagggaccaggggcactttatcctcagggagaggataaagaccatcatgctttatacttcctagaccgagacactttacctttccag

SEQ ID NO: 172450 - DNA, 418 bp, Homo sapiens
ggcggccccgccccccgcagctccgggcccagctgtcagagcagctttccctcaggctgggcggagcgtggccacttccgccaggaggcgcctttgtgtcttctaagttaagcctattcagtggatttcttattcctggaacccaaacctgggcagtaaaccctccggggcttagaggccgctgcctccacagactggccgatcccgccctgaagtgccgctggtggaacagcccgggcggaaccgcccgggcggaaccaacgggctgccgcggggggtggggccacggtccccccccttctgccttcagtggaacggccccggcggaaccaacgggccacggggatgcactacgcgcaccgtcgtcctctccctctgcctgcagtggaacggcccgggcggaaccaacgtgcggccg

SEQ ID NO: 172451 - DNA, 445 bp, Homo sapiens
ccctaagcatgtggctaagggactccgccatgtacacactgaagatgttccctaagaatgtggccaagggaccgacgccatgtacacactgaacacatttcctaagaatgtggtcaagggaccgcactgaagacgttccctaagaatgcagccaagggaccgctgctgtgtattcactaaagacattccctaagtttgtggctaagggaccgccatcatgtacacactgaagatgttcccgaagaacgtggcaaagggaccgcactgaagacgttccagaagtgtgcggccaagggactaccaccatgtacacactaaagacattccctaagaatgtggctaagggactgccgccatgtacacactaaaaatgttccctaagaatgtggccaagggacccacaccatgtacaaactgaagacgttccctaagaatgtggacaggg

SEQ ID NO: 172452 - DNA, 511 bp, Homo sapiens
atgcaaatgacctcaaatacatgtcagcttactttgctgtggcaacatccatgtgaactgctttgtacactgtgaaaatatttcactccagcctgcccattttgtgtttactctgggctggaaaagactttgccaaaacattaaaaactattcttttcactaaattaatagtctatctgctttcagaagatgtatcatctatctgtacacatttttgctggttttgtatatcagattttttcctctcaagaaacatacttagataagctaatgaagttgttttcttcaaagtaatatatctatataatgactgcattggcaaatcaaccgaaatgtgaatgttgtgcctagtgagtgagtcatgttccatcattatttctttccaaatttctttgccagttcagtttgaaccatatattttgtagctcagcattgcaaacaacagtaatactgttttaagaatgagtgttataattgcatagcatttgtatgcactttatactttgcagag

SEQ ID NO: 172453 - DNA, 470 bp, Homo sapiens
aatctttccaacctctgaaatttagataggatctggctcagaaaaaaataaaatttgttcaaagtcacatagctaacatgtctagaagctcaaactggacactaagtctcttcatcctttatcagcaagcacgctactaaatacaatgtgggtacatataaacatgtgcacagtcaacccgttctaaacattgctggcactgtcataaatagaacagggtctttgttttcaggatggaagagggtccaatgagagaaacctcagacatgcacatgtttatgtgtataatgtaattcttcagcagtaaatacaagcccacgggtctctaggagaaacaatgtggaggattgggttggcaacagttttccataaacagtgacacttgatctgagcatcaaggtacactgaacacatctgaagtcagaacaccaggataaaattactcagtcacttataagcaatgaaacttt

SEQ ID NO: 172454 - DNA, 622 bp, Homo sapiens
gttcacaagggggtattgtgtactcattttcatttgaataatctgaatcatctttctctgtatctttccaacacttcagcctctgcaatctcccagccaccgcttcacctcttttgccttccagatctggcttccttcctgacattccttacgtttatgctccactgagacagaaagacacaaatccagttccagcagaaagcacagatatggaacaagagaaacatttcagttaaacagattgagtgttacagggcccagaacctataaatgcatctgttcaactggtctttttgttgaattaaaatttggtgaagctaggtcagcaaaatataatgatgtcaggactttcacagagatgaggaaactgcatttctaaacaaaagccttcattaggtgatttttattgaagggtttatttctgcctttatgaacaaaaacatgtatatatcatatagatatatttagtatcattaatatttcaatgttgatcagccaaacttatcaatagcaactattgcctcataataataggtaccactcaatcagttgctttctatgcatcagacactgtgctgttttaaaataaagcctttatccctggacttctctattttccgtg

SEQ ID NO: 172455 - DNA, 515 bp, Homo sapiens
gcggcagtgaatcgagctcggtaccgcatcgaatcatcttgggggactgaggtgggaggatcgcttgggcccaggaggcggagggtgcagtgaactgagattgcgccactgcaatctcagcctgggagacagagagagacgtctcctgttctcctggagaacaacaagtcatgatgtcagacaagaacttggattttggagacacgggtttgaatttcagtcattcattcttttattcagtaaatatctagcaagtactgacatgtcccagatgttgttttactcactggttatacgatgggagggagacagagaaagagagagagagagagagagagagagagagagacgctattctaaaagcttgaagtctaggctgtgcagagtggctcatgcctattatcgcagcactctgggaggctgagatgggtggatcatgaggtcaggagattgagatcatcccggctaacacagtgaaactccctctctacaaaaatacaaaaaattagctgagc

SEQ ID NO: 172456 - DNA, 455 bp, Homo sapiens
tcttgagtaaagtactgatgtcggtgaacaatgagcgcgatgtcaggcgcacagcaggtcctcaggcagcactagctgaatatgtgaacaaatgagtggacagagggatggatggaaggattcttgaagcttccactgcacagggctgttgaaacaacacaacgcgggacctggatgtagatttcatctcgcagctgagccatgtgcttctctgccttgcatttcacccaagcccccagtatgagggggacacagggctggctcagagcagaccccgctcagcaaaactcactgaactcccaacagggcaaaacctgcaggccccacagggagcttgggacctgactgagaagaatcagggttcccaggggtctcagtcacagggaaggtcacatccatctctctggggaacattatcactgggttgaaatggtcgccaatccggtaaaaagaca

SEQ ID NO: 172457 - DNA, 717 bp, Homo sapiens
agaacacaaaaggcaaggcacagagagatgacctgggaggcagggaaggaaagcattcccagagagtctctttctgtcacccggtctggagtgaagtggcgcagtctcagctctctgcaacctctgcctcccaggttcaagcaattcttctgcctcagcctcccaagtagctgggattacaggtgctggacggctgaaagccggggttcaaggcatcagcaggtgtggtgtcctccgaggactttgcccgtggtttgccagcatggtgacgttcttcctggggtcctcaccgtggttccccttcctctgggagtgccaggcatcgcgttaagtgtctacttctagtgtgtccgacttatccaggcccccgccgaaccctagggtcttactgatggagtccacgccaggactggagtgcacaggcgtgatctagtgatcaatgctggctccgtatactgtgactggcggagttcactgcgccctcgactcgggaaacgctagaaggggggaagactcggcttgagatctgtgcgacgcacgagaggtagagcagtccacttggcgatccaagctaattgtatctccaggtactgagcaacacaagcatagacatataatctcaattataaacaagatgccacccgtaagactgcgtaagcgaaccttaatggcgggtccaataaatgactctatgttgaattgcttttttgggaaagt

SEQ ID NO: 172458 - DNA, 136 bp, Homo sapiens
ataaatgttctggccttggcctagcctggggtcagattccactatacagatggcctctgttaagaaaactacttggggacaggtctgcctccctccctcaaatcaccctgagggaaccaagctactactagctaca

SEQ ID NO: 172459 - DNA, 545 bp, Homo sapiens
tgtctactattcaactgcggtttgcatttaaccttcctatcaaaacagtgctagtctttcttgcaacctctttttaaatttaatacgatgattgcctgacaatgggaaaagggtcctggctaattaattaatgttataatacatggccattaaatgatgtttctggtaaccccataattaacatgtgacactcttaataaaataagtaaataaaaattatgctgttacaattatattcaaagtaacttgtgttacaaaaatcctgaacaaaagtatacatcactgattttctatttttcaattctatttttgtattttccatctttaaagaacatggtttatatttttttttaaataaaattgtttgccattagtaagttcaaattcgaaggctaggattcctttttgaagtgcctgggaaaaaaattcaaccgcagttgaaagacgcatgcgtctttcaactgcggatccttagagcagcagaacaaggttctggacaccaagtggaccctgcttgccagaccacgccacccaagactgtgagg

SEQ ID NO: 172460 - DNA, 404 bp, Homo sapiens
ctccaacaccctagttcctggcaaccatcttcttggttaaatttattattgattcaatccttacttggtgtttgtctatttagattttttatttcttcatgattcaatctttgtaagttgtatgtttctagggatgtatatttcttctgggttattcagttttttggtttataatttgttcatagtaatcccttacagtcccttgcatttctgtggtattagtgacgatggatcttatttcattcacaattttatttatgtgcattctctctcttttccttggttagtttatctaaaggcttacaaattttgtttgtcttttttgcatttatttttaaatttttttttaacttttgtttttgcttgagggatgcatgtgtaggtttgttatatacgtatattgt

SEQ ID NO: 172461 - DNA, 181 bp, Homo sapiens
agtactatattaaggttgtagtctcaatagggacatagggaaaaataattagaaagaaaaacattgtcattgttttagccttgaggggatgtttttctatgtatatttaaattaactgtttaattaaatatgcatggcatgaaaacagtgccctaagggacagtcctagcctttggctagg

SEQ ID NO: 172462 - DNA, 842 bp, Homo sapiens
ccagcggtgcccttagctgtcaaggatgctgtgggaagagtggagcctcgaacccgagacgctagacccaatttggtgcccatgggaggagtgggagtggcagaggcagcgagaccactcctttcttggcccaccatttctctcaccatttttactgcagtgaactcctctcagggtggggggctggtacagaggcaactccgctttcataactctcacagggtcctttgtcggaggtgtccctgccctcctaccccagcgtggtgggagtgcgacgccaggcttctccctcctccctggcctcctgtgcctccagcctccacatctcctgagatcctccccaccccacacttacacaggtccccacacgcccctggtgcccctaaaccgccacccaaccccactcaccctggggccgggactggggtgtcagagctgagccagggaccttgggaggtggctgggaccggcgcctcctgctccctctttcattttccctttcggatttggccaggatggaggacaggacaggatggctgagaggggctagcgctcccccttctcttaaaggaacagggtgaccctgctggctggctccgcccttgggaacaggcacggaccacgccccttgctgggctctgtggccctcactctttagctaaatttccatctggaaatgggggaggtgttgatctagggtttcataccccatatacgtacctttatgtcttgctagtgtcttggccttcctcaaccttaatttcgtaagtttatcccttatgctctgatcttaacatatcttatatgtgtcttcctctatctatttactgctttattatcct

SEQ ID NO: 172463 - DNA, 1165 bp, Homo sapiens
ccagcggtgcccttagctgtcaaggatgctgtgggaagagtggagcctcgaacccgagacgctagacccaatttggtgcccatgggaggagtgggagtggcagaggcagcgagaccactcctttcttggcccaccatttctctcaccatttttactgcagtgaactcctctcagggtggggggctggtacagaggcaactccgctttcataactctcacagggtcctttgtcggaggtgtccctgccctcctaccccagcgtggtgggagtgcgacgccaggcttctccctcctccctggcctcctgtgcctccagcctccacatctcctgagatcctccccaccccacacttacacaggtccccacacgcccctggtgcccctaaaccgccacccaaccccactcaccctggggccgggactggggtgtcagagctgagccagggaccttgggaggtggctgggaccggcgcctcctgctccctctttcattttccctttcggatttggccaggatggaggacaggacaggatggctgagaggggctagcgctcccccttctcttaaaggaacagggtgaccctgctggctggctccgcccttgggaacaggcacggaccacgccccttgctgggctctgtggccctcactctttagctaaatttccatctggaaatgggggaggggggtaaccagagccacatcctttatcgaggaagctgggggattcctagaagcccttcccagacagaccctcagtctggagcctagatccactacgcactaaccatgccctgtgaagatggtcttcggggacagagggaggtttggtgctggagtttaaggggcagcaaacatctaacagcttctggttccagctctgccaccgctcaccttggacaaatcattcggcggtactgagccaggctttcctgccttgtcaacaaaggcggccagtccagctgacccccaagtttccttccagctttacatcttttttggaacggggtctctctacatagcccaggtcgatcttgaactcctggcttcaagtgatcctcacaccttagcctcctgagtagctgggattctctacttcttaatattgaattcccaaccatattacagagaaccaaaaaaacccttgtgcctgcaaaaaaaaaa

SEQ ID NO: 172464 - DNA, 536 bp, Homo sapiens
acagtcggacaaaaacaaacgcagacacaccctgctcaaccgagatcctctgccatcagctctgaagacagtgacgtgagcgtgtcccagcagctcaggccttggccacaggtgacccactacgcagcctgcacgagcccacaatcccccccgacatgtggcttcctccagccacaggcactgacgagggtgcggccaccccaaaaagaaaggccccagcccacagggagcgccatcgggcccaccccaaccaactccccgtgtgacacgaagggccccagcctgctacgtctgtctgcagctctgccacgagcatccttccccagcccacaggtctgcaggcggctgccacctgagccctggcctggcagtggtgtcctccgcctggctccctgaatgttcaccagctcctgcgggttttcctctcctcatgctcctgggggtggggcacccatcctgcccgtgttgcctcctgctctatgttcttgacgtgggatggcggccagggactctgccctcgctcagtgcctgccctt

SEQ ID NO: 172465 - DNA, 450 bp, Homo sapiens
ccttgaccttttctggctcctaaaacagcactctagaagtcttgccactgggcaggagaggattggatttcaagctcctaagtatgactatgtgatattcaagttttgccccctgtgctttccatgaggaattaggggctgactctgtcatcccactcctacttcatcttcatggatttggtcaggcatgagcatagacttagtggccaacctctgaccacaccactcactgctagaggctccctggggcggtaaggatggagtaagagactatggttcacaaggacagacttgaggactagctggggcccctctgctacctctcactggcttggagaatggtgtttttctatttgcttgtgacagcaggcacttcattttccctcctttgggaaatttgaatggatctggtagaatgaatgaagaaagcccatatgtagtgtgggtggt

SEQ ID NO: 172466 - DNA, 321 bp, Homo sapiens
tcaaactcattggcatggggtccatgagatcttggccttcctgaatgggaatgacttgctcagtgccttcaaaaggtgagccctgaagacaggtaagtacctatttcatcacagatcctggtttcaatggtttctccagtgccactcatcaacttactagctgtatttcttcaacagcctgttaccaatttaggaaaaaaaagtctgactttaagaaaaccaattcctctaaaaatctaatatttgctccataaaaagactcaagagtttcagttagtaacaggaaagtctaaacatggcagttctgtggtcctctggttg

SEQ ID NO: 172467 - DNA, 499 bp, Homo sapiens
tgaattcaaagaagatgaagaaaaccatgtcacaagttgtgcctgctcacttctctggccggggaaatgtgctcctagataacatgctctaccccgagcacgtttggagcacacacacatcccatgatccaagaaagggggaagatctttccctaaaaaattaacaaaggaagagttaatggatgctgggcagatggaattagaaattgtgtatagctggtatcaaggacccaaatgctgggcagaaggaattagaaattgtgtatagctggtatcaaggacccaaatgctgggcagaaggaattagaaattgtgtatagctggtatcagggacccaaataacaatgtgttaagccaattaaggcttcatttttcttttaactaaaacaaggacagaagtaggtaatccaaagttggtgtaatagctccactgtcatcagagagccagacttcctatgttttttgctataccatcatggtgcatgatatgttcccacag

SEQ ID NO: 172468 - DNA, 343 bp, Homo sapiens
atgataagaaaaaaacctttttattttggaaaaatgagagtaaaggaattaaaaatgtgcttagagttttggttttacatctggttgcttaaaccaactggagtttgtttttgtatatagcatatccatgttgtaagttaatacatcagataaagataggtttaggtaagatagtccacatatttaacaaacagtatggtacaggcattgcccaagcaggtagtcgtgaacaatttgtacagatatagcagtgtgtatcatttgactctcagccccaatagatccatatgtaccaacatgaagtgatctctaagacacattttttagtgggaaataaaagcaa

SEQ ID NO: 172469 - DNA, 1412 bp, Homo sapiens
tctcaaaaaaaaaaaaaaaaaaaaaaaagattttctgagtctggtatgctagggtggatttcatggtcattgtgctcaaatgtagagataggatatatttccctgctcctgccacaggcaaggtgggactaccctaacttagaaaactgtcggccgggtgcaatggctcatgcctgtaatcccagcactttgggaggcaagatgggcggatcacaacgtcaggagtttgagaccagcttggtcaatatggtgaaaccctgtctctactaaaaatacaaaaattagccaggtgtggtgatgcgcgcctgtagttccagctactcgggaggctgaggcaggagaatcacttgaacctgtgaggcggaggttgcagtgagccgagatcgtgtcactgcactccagcctgggcaagagagtgagactcgcctcaaaaaaaaaagaaaagaaaactgtcacttcaccttggtttgtaacggcaagtccaagtgctcctgggtttctacaactgagagaagctcctaatatcctgggctgtaccaaataatcaaacgaggtctagtcataaaatcctagtcaaattgtctgtctgatcccctagactttgtaaaggagtgaagagagaaatgagatgaaggaacataaagaatgtaacttcaagggtcaaatgaaacaaagccggcctgaaggagagaaaggagcggtcaaatccatcagcctaagacctttagtccatgtttaaattgatttatacaatttccaaacattacaggtagagtaaaaacttcgaacttttggctccaaacacttctctgctcacattcagaaatggaaggatcagataagacctgagaacaaacttcaagagatagatgggagtctttttgatggctgaaaaaccggttcctacgagatctgagccatttcgtcacaaacaaaagtaagaagatgggtagttttctctgatacccccactgcatctgagatttctcatgctttatctgaattcattatgctgttctttttgaaaatccaagatatccagcctggctaacatggtgaaaccctgtgttatccaaaactcaaattataccagacctggtgggcatcctcttagtccaagttactggagagtttggccggaaaatccttgaaccgcggatgtgcagtgtcgggcccaaatttgcctatggcttcaaactgtggacaaaaggggcctttttccaaaaatgcgccattgggctattggcattagcatcttggggggtaaactacctgcgcgttacaaaaggcgcgtgaacctgtttccctctatattgtgaaaactccttctcctggcgatatagccacctaggcttcattctcgcctgtggcgtgaatatggtcattttttttacgcgtcctttcttctccct

SEQ ID NO: 172470 - DNA, 1353 bp, Homo sapiens
tctcaaaaaaaaaaaaaaaaaaaaaaaagattttctgagtctggtatgctagggtggatttcatggtcattgtgctcaaatgtagagataggatatatttccctgctcctgccacaggcaaggtgggactaccctaacttagaaaactgtcggccgggtgcaatggctcatgcctgtaatcccagcactttgggaggcaagatgggcggatcacaacgtcaggagtttgagaccagcttggtcaatatggtgaaaccctgtctctactaaaaatacaaaaattagccaggtgtggtgatgcgcgcctgtagttccagctactcgggaggctgaggcaggagaatcacttgaacctgtgaggcggaggttgcagtgagccgagatcgtgtcactgcactccagcctgggcaagagagtgagactcgcctcatcctgggtttctacaactgagagaagctcctaatatcctgggctgtaccaaataatcaaacgaggtctagtcataaaatcctagtcaaattgtctgtctgatcccctagactttgtaaaggagtgaagagagaaatgagatgaaggaacataaagaatgtaacttcaagggtcaaatgaaacaaagccggcctgaaggagagaaaggagcggtcaaatccatcagcctaagacctttagtccatgtttaaattgatttatacaatttccaaacattacaggtagagtaaaaacttcgaacttttggctccaaacacttctctgctcacattcagaaatggaaggatcagataagacctgagaacaaacttcaagagatagatgggagtctttttgatggctgaaaaaccggttcctacgagatctgagccatttcgtcacaaacaaaagtaagaagatgggtagttttctctgatacccccactgcatctgagatttctcatgctttatctgaattcattatgctgttctttttgaaaatccaagatatccagcctggctaacatggtgaaaccctgtgttatccaaaactcaaattataccagacctggtgggcatcctcttagtccaagttactggagagtttggccggaaaatccttgaaccgcggatgtgcagtgtcgggcccaaatttgcctatggcttcaaactgtggacaaaaggggcctttttccaaaaatgcgccattgggctattggcattagcatcttggggggtaaactacctgcgcgttacaaaaggcgcgtgaacctgtttccctctatattgtgaaaactccttctcctggcgatatagccacctaggcttcattctcgcctgtggcgtgaatatggtcattttttttacgcgtcctttcttctccct

SEQ ID NO: 172471 - DNA, 358 bp, Homo sapiens
ggggcccctggggtcaaaggatggacaccgccttccctggggccatcccagtgatgggatgtcccatctcacgggcctgccattccagcaccactgggagagtgcctgctccgcctccaccagctgtgtgacccccaccaagtctctaaccctccacacctctgttttctccatgtaaaactgaatgagggacaactgagtgagtataggtcaaattgctggcacttagaagcaatcaatgatgttttatttatttatttatttatttttgagacagagtccaggctggagctgcagtgagctgtgttagtgccaccgcactccagcctgagtgatgggagtgagattctgcctcaaa

SEQ ID NO: 172472 - DNA, 584 bp, Homo sapiens
ggccttggggtcacaatagatggtacattaggatacgattcaacatggttaagaaaggttaactaaggttatagggcaaattggaaaatgttttccaaatgtttgtcttaactctgaaaaatgtttggcaaactccccctcccccctaatttggaagtggtttgttttagtcgttttggaagaaataaatatttgcattagaccaaacatttggggcaaacagttctccccatttctgaggctctgtgtgagtaggaggagatgtttcatgccgataacactcatcccttttttggccaaatcgaaggtaactttcgatgtgagcttcacatgcttttcacataactgctagaatgaggttgagcaaatggaaagaaaagaggaagccaagcagcttgatccttccagacctagggatggctgatgacctggcatttgaaggatgtaatcgttaaagaaaaattgcctttctgctcatgggcagggaggctggatccaattaagacaaggaaaacgtatgttaacttggaggaaaaatttctaaacagtcaattctgtaatcctctctgaagaggaagaggcca

SEQ ID NO: 172473 - DNA, 678 bp, Homo sapiens
aagatcatgctggccatcatcaccaagatgaccctcacccaggtgtccacctgggttcgccaacgcacgccggcgcctcaagaaagagaacaaaatgacatgggcgcccaagaacaaaggtggggaggagaggaaggcagagggaggagaggaggactcactaggctgcctaactgctgacaccaaaggtactgaaaacgttcaccaccccaccttaagggttttacaagtcatcaagcagtttggtctttcaaaagctgccctgtagggtagattttctggaaggtcctcagacttacccttgcacttccctgcctgtctcagagcattagcctgtgcactgccttctacctgtaattctctacacaaccggcttcttcttgacatcaaagtgttacctcctaaagttcttcctgcctcacccaagccaaaatagcctcccagttattttctgttctgccagcctgtttggatttcctttgccatacttgtcactgtgagaaagtttacatacccaacttccctctctagaatggcagctccaccagaagccttacttgctgccatatgccctacacacctaatacctaaatgatggctggtgctcagtaaatatttgctgaattaaatgatataacagcagccacttgtagatgttgaaatcgagtaaaaactgcc

SEQ ID NO: 172474 - DNA, 541 bp, Homo sapiens
tccaggaatggagatggagacaaaagggaagcccgtagtcaaagtcagatttggcaaaacagaattgggatccaagataaaaacagtcttaagatgggaataaagaaaaagtaatgattaccaggagcccccagacacacactgcatggaacagaagatcttgctgcttttcatttgctgaagaagcaccagccatttcttcgggaaactctttatgattttgcctcctcgagaattttacctgccttttcagttaagcatcaagatttatcacactgacttctggctagggatgaataagatgtaacttgctgaataccacaaatgagagacctggaagctactatgagccatgaaattcccaaaggccatcactggtgaaatactggtcgggcttctgggaaaggtgaataagagcatcatggcaagatgtcagcagtaaagcagagtggagactgaagctaaattgttcccaactcaggcgttctctgctcatagaacaatagcagtggctaaggtacatgattgagtgctaactcta

SEQ ID NO: 172475 - DNA, 181 bp, Homo sapiens
cccttcccatctccaagcctgtaggtgtcctctttcctttggcagggactccctaccctcgggcctccaccttgctccctggtttgcatcactgaggtcccggctcaaatgccacccctcagagaggcttccctgacgcctcatcccactcacagtcacatcactctctttgttttttgtt

SEQ ID NO: 172476 - DNA, 558 bp, Homo sapiens
tcagttccaagcctgcccgccaataatctcgagttaacgattttctgaagggataagggtactcaacacaaaaatagtagttttccctcaaagatttgtctttgctactttcaatctttcagacatgcctgattaactatgaaatctgagtattaatagaggaaacttcagaatgaaggaattgtatgaaagacaaatattaagattatgtcaattacatgggagaaattaatagatacattcttgcacagaaatgaagcttgaaaagaactggtattggccaggtttgaaggctcatgcctgtaatcccagcactttgggaggccaaggcaggtggatcacctgaggtcaggagtttgagaccagcctgaccaacatagtgaaaccccacctactaaaaatacaaaaattagctgggtatggtggcacacgcctatagtcccagctactcgagaggctgcggcaagagaactgtttaaacctggaaggcagaggctgcagtgagccaagacagcgccactgcactccaacctgggcaacagagcaaaactccatctc

SEQ ID NO: 172477 - DNA, 643 bp, Homo sapiens
aatacatttatggtttgtaaattatatctcaataaaagtgttattaaaaaaagattatagggtgggggaaaagggtgtagttatcggggaggaaaggggtgagaaagccatgctaaggagtaccaacttgatgctggaggccgtgagagacactgaacgattttaaacaggaggatacagtttggatgtttgtcccctccaagtctcatgttgaaatgtgatcccccatgttggaggtgatcctagctgggaggtgtttgggtcacaggggtgggtccctcttgaatggcttggtgccctcctcacagtaatgagtgaatcctcacactattaattagttcacccgatagctggttgtttaaaagtgcctggtctctctctctcttgccccctctcctccccttctaccatgagtaaaagtttcctgaggcctccccagaagctgagcagatgctggtgccatgcttgtacaatctgcagaaccctgagccaattaaacctctttcctttataaattacccagactcagatattccttttttttttttttttttttttcagatggagtcttgctctgtcgcccaggctggagtgcagtggtgcgatctcggctcactgcaacctccacctcttgggttcaagc

SEQ ID NO: 172478 - DNA, 379 bp, Homo sapiens
cccagtgaatcccaagcaaaagaaacatgaaaaaaagaacatgaaagcacatgataatctatttatgactacaggaacaaagataaagatggcagtagctttcctgttgaaaataataaaagcaagaagacaatgaagcaacatctttaaaaatatggaaggaaaactaaattgtcaacctagaactctatatccagtgaacatatatttcagacacacaaaagctaaaagagttcattactggctggacgcagtggctgacacctgaaatcccagctactcaggaggctgaggcaggagaattgtttgaacctgggaggtggaggttgccgtgagctgagattgtgccattggactccagcctgggcaacagggcgag

SEQ ID NO: 172479 - DNA, 164 bp, Homo sapiens
ataagagtaaatgtggagtactggggacaaacactggactgcagagaactgaggagaaaggtggggaaacaggcaacaagcatggggtttgtttcttcgggagaagtcaactataaaggaatgcagagaagaggtgttgagagaggattctgttttcagtgggg

SEQ ID NO: 172480 - DNA, 602 bp, Homo sapiens
gtgaaaaatttttcttaaagacttttcctgtccaaaacctgaaaattccaaagtcatgcatataaaagatatttagaaacaaaattgttaaaacgcttaagaaacaaaattgttaaaactcttaaagtatacataaatgagcttttttgttgtaatatctaagtcccaacaacttgttcagtatctctcaaaagagtgtgttcagcattgctggtgccattattatgctttgtaaaactcttaaagatttgattgtgtgaaatgcaaaagaggaagataagcccaagaagaaaaacagtttatgttgtctcacacttaatattttggtaagcattttctgtgcaaataaacgtttacataattgtgaatctcatctttggtagaggttttatgaagagtagaatgacttgattttttttgaagttagactagttgaggcttttttggagggggagtttggttgcacatgtggacttgttctggaagggtccaaagcttaaatacactcctgtaaaaaaaagtaatgggtcattattttgctttttttatttattcatttttaaaaactagttacttcccattaaagacatttgcatatcccc

SEQ ID NO: 172481 - DNA, 414 bp, Homo sapiens
ttaacatctcatcccaaccaggtgaaagtgggggaaagttgtgcatgtgtgtatattgcatgaacaatatgaaaaggaaggataatttagttcatagtagtttttcttctgaacgtatctttgggagtttaatctccttttgattctctaatatggattagtcttgttatataatcttcaagtcttttccatgccagtacttttcaagggcaccttatgttcatatggtttttccttaccttttattcctttgtgtgtttttttggtgctgaattacaggtgattgtttcagaaattagaagaactactctggctgtttacaaagtgatgatctgaaatgcttttacttagtgcctagattttctctaacattgaatgatagtgggttataagaagaagttgaacatactttgt

SEQ ID NO: 172482 - DNA, 217 bp, Homo sapiens
tttccatagagtgtctataaacgtctccagaaagacgtctagcatttgtaaagtatatttcattaagacagagtagatttcaagcatcagattccaagagaagagcatgctggtcctatccctaacactacaatttctcttctcctgaagccacttttccaccatctctaagcacccatcacccacacctgtcccttaatttcttcccatgttctct

SEQ ID NO: 172483 - DNA, 391 bp, Homo sapiens
taactgaatgtattccttccttcctaagtaggtttgatattacagcctcctgttgttgaaaatccatttcttccgtgttcttctgccaggggaaattccatttcattaatgtaaatgggaattttcagaatagaaatagagaaaaaagcttatccagaaaaaggggaaaatactgagccagaagcagcaggagatgtaccaggagaatattacgggtcagatatcaaagagaaagttcacctttaacagcacaaaccataatttccaccctattttaattgcaaaaatggaatgcatattgtagcccttcatacataatgtatcattttatcaaccatcttgaatgttaaaaagattcagacctgtaaaactcttgtgtatttttgagaag

SEQ ID NO: 172484 - DNA, 555 bp, Homo sapiens
  misc_feature (180)..(180): n is a, c, g, or t
acggccccgccgcgcggccacgccagccatgtttatatagccacgcggagacctcgcgcacgcgcccaggccgccgccaccgccccgggtttccccgggatccggccgcgtgattggccaaggagcggagccgcgcccgtgacgtcactggggacggctccagggagcgttaaaatcttnccccagaatcgccagcaaggaggggcgatgccagaaacctatcacgtgggaggggcaagctgcacttggaaaactgcggcatccgtgttcctctccttgtgtcccctgtagtgtgttcctcgaaaagccagcactagactatctccaggattctattttttaaggagaaaatggggaggactgatttccgagaagagtgactcaataagaattcaatcacgcattttcagtgtttttctctgctgtcttcacactgaagcgttgctaaaattcgcagttagaattgacattgtaaaaattaaaatggcgtatagttttatagtctgtgagatgtgcctattttcatattttagagttaaactgcctaaaatctta

SEQ ID NO: 172485 - DNA, 442 bp, Homo sapiens
aatcaagtccccaactactgtctaagaaagatgaatattgatttataactccttgtcacctggctaccatgcttgggtaagtttaggggcatttaattatgactcagaaagtgtggatgtaaagtctccagggaaacacttggcttgtattttggagatgtcttatttaaaggatggaccatctgttgaaaaaggagatcctcttcctcttggtgcagtagcccaagaatttcttctagttcttagacactagggattacctacaagctaggcagtaggatagacaggtctggccaggaaatgcccagtcattcgactgaacatcacgctctccttgcacatacatggctgctccacctctgtttccaccgccgacacactgcacacctacatcccttggacccaaaacccactgctgctgctggtgtggacttctagcgtt

SEQ ID NO: 172486 - DNA, 162 bp, Homo sapiens
catgctcctgccatttccccacaagcatgctgcggccttgcgtgagaggaccagagatctcctgtcgtcttccaggcttgctgcaagtgcagctgagatgaacataagtaatagactcattaattgtttcatcgtgactcaggaaaaccactctgtaaagtc

SEQ ID NO: 172487 - DNA, 255 bp, Homo sapiens
tcctataaccagatacctctgttctggaaagaagaataaaactgatttttgttggccttccagcacaacaagcattataatgaaacaaacaaaataaataaataaataaatatttactcaatacctaaagagcactgtccatgatctttttgctttcattttaagtgtattttaaaatttacagatagtaaaagtcccccttttggtgtactgttctatgagtttaaaaaatgcagagactcatgtacttaccac

SEQ ID NO: 172488 - DNA, 290 bp, Homo sapiens
actggtttggaaggaggtgaaggcaggagctatatgactaccaggggaagactgccgcaggcatagccggggcaaaggccctaacgtacccagggaccaacagggaggcccgagtggcttgagcaagagagtgatcagtgagtaggagaaggcagcaggagaagctagagacgactgaactttacaggccacaaaagactaaggctttggggaggaagaggaacggaagagaaaggagctggagtccagcggcagaaggagttaatgcgccatgagcagcagcacaagag

SEQ ID NO: 172489 - DNA, 424 bp, Homo sapiens
aggaacaagtaactgatgtatcaggcttaaggaaactgaattctaaaccagtagagggaaagcacaaaagctaccaagctgcactgcagaaactacaaagtactcaggactcaggaactgatggcaccaggtacctctggaagtgggggtgaaggtgggttgaaaatctacttaagaagcagtcagagtcccatattccttacccctctgctgcaccagtgacctactcctcccctgttcctccaggtggaggactggaggtttaccctagcagacaataaaacagtaggtctctggactggaacccccaggcacaaaggtgattcagtaaaggaaatattaaagattgagcccttggtcctcttctcctacttggttcccaaagtaccagcagccaggatttccaaaaagagaaaaaagagta

SEQ ID NO: 172490 - DNA, 533 bp, Homo sapiens
caacaagtgcaaagaccctgtggattgatctaagctggtgtgtgttaggctcagaaaggtggccagtgttctagaagtaaagtgaacagaaagaatggcagcaggtgaagttaaatttgaccttgatgggtctgttctgcagccagctgtagctacatcagcaagtcagtcagatatacaagtagggatgtcaatcaggagcctaaatctgagacatgagacagccatctgtgagtgtattgaattttaaaccaatggaactcagtgagagggaaactaaagaatagaggatgactgagcacagagcaccccatcatttagagatctagaaaaggaagagaaaccaaatgagaggctgagaagtaaaacacagtgaggcaggggaaagaccaggtaagcctgcatgattgtctagggaggaaagtgatttgtgaaggagggtgtggccaaccaacagtgtctgatacaagggaggtgctcaaggaatacctgacatatgattgcatgccctatctacataatggctttgtaag

SEQ ID NO: 172491 - DNA, 257 bp, Homo sapiens
cactgtgtttgtcaggatagtcttgatctcctgacctcgtgatccgcccgcctcgccctcccaaagtgctgggattacaggcatgagccaccgtgctggccaggaactaaatttcagtacttgaattgctaaatgttatgctatggactatggacagtaaaatattaatggtcatgcaagaatgaggtgaccattgttcattgagagattttagggggtttacaaactccctcaaattgtatggtaaagtttatacg

SEQ ID NO: 172492 - DNA, 405 bp, Homo sapiens
agggacaaaattttcacattccaacttgaacagggaagtggtaacaattgatttagataggagtatcagaatttcattttgctaaggccttttttgtgcttcttaatgcagtaacactttaggatagaatgaatattgttggtatcaccacttctgcaaatgtgctcactcttcttttctgtttattctagaaggtttactcacacactaaatatgggatgcaccagttttttatgctgcaagtttgaaataataccatttatttcaactacttaaaaaatatggggctaggtgcagtggctcatgcctgtaatcccagcactttgggaagctgagatgggaggattgcttgagcccacaagtttaagaccagcctgggcaaaattgtgagaccctgcctctgca

SEQ ID NO: 172493 - DNA, 473 bp, Homo sapiens
ccacactaacgccctcacgctcagctcttaggaagccacagctgggaccccacgtctccttactgaagaggctgacagttcttgaaggtggaggggactcagcagcaacactaaacaggctgggatgcaaatacctggtagcagtttagaagaaaaggctacctgccacttggtcccctgtccctttctgcatcctcggcgtgcacaggcacgcattctcagtacacaggctcacatggccgttccttggagatggggctgagcaggatctgacttctgtgtctccatcttctggcttttctgttgaggggtgggcactgagaactcattgtttgccaccatgctagtgcgtgctgcagaggcctcggttaatccctagagcggtggctcccaaactctactgcatgtaggatcacctgggatcactgaaaacagatgctggctcctgcccccagacagtctgatttaattgg

SEQ ID NO: 172494 - DNA, 439 bp, Homo sapiens
agcagcttgaaatcttgcccttagaggataatccttcttttaaggttttgttgctcctctgttaaagtatggctacctcagtgtagagttcgctcccctaaggatctctctgcatttataaacatactgaattcttctaccggctctctttcaaaccccaagctgggaagaaatgggccttcacatgcaaagccttgtttggtggtgagattggggtattggtgagcagtgaagagtgtgaaagagggagaaaacaaccaggatcattacaggaaagctgggcctttgaaggttgtaggtaccaagagggtacatgctgacagggacatcaagatgccaaagatgtgtttttaaaataaaaatacaggtttattaaagtacatctacatatagtaaagttcactctttcagagatactttctttttttaattctctttg

SEQ ID NO: 172495 - DNA, 260 bp, Homo sapiens
atgagacaatttgtaagcatgtgcttaaaggccaaagtggaatgttaagagcatgaaaatggctgcatggggtggtggtggacttacaagtgattttccaaaaaggtttccagcatcacacttaccattaccacctttgtattataaatgaaaatggggccgctgctggttggaggtgcccctgctgggaaggagaatgcttgctacaatatataaggctggcagtcatcataaacagggctccttggcttcagtgttgt

SEQ ID NO: 172496 - DNA, 410 bp, Homo sapiens
tggggtttcaccttttgccacacttaaagtatcattgggtctgttgagtcagaaggacaagtcatagagcatcttgagaccaccttgttgcccaggctggtctcaagcccctggattcaagctgtccacttgccttggcctcccaaagtgctgaaactacaggagtgagccaccacatccagcttccttatttcttctccaaagctcaactcacacattgctccccagaaaggttgcactgatgacaatggtttgtctcccctttctcttgatcctgtctgtgctcactcctctgccccatctttgccacactctgtttcctttcagagtcggtggcttccttctgtctcatccagtgaactgagagctccttaaggaacagagtcttactcttgtgtttcaccttcaat

SEQ ID NO: 172497 - DNA, 590 bp, Homo sapiens
tgcagctggtccaagtggaagaaatacagaatatctttttgaacttgcaaattctattaggaaccttgtgccagaagaagcagatgagcatcttttcgctttggaaaaattagtaaaggaacgtttagaagggaaacagaacctcaattgcatataatttagtcttcagagaattaacttcagtgcacaatgacaatatgatttggaaatacgtttacttaaagatcttatttttaatgtagtgaggatattatttaaacttttattttaactggaaatgtcctgaaacacatatttaaaatattgggatacagtgaaagaaaaattcaaattttaataacataaagatttcctaactttatgttattgaacacttactcactagaagtgagttctttagaaaaatacagtgaaggactcagttcagtcttgtttttatcagagtgataatcatcctgtttcacatcccaatactattttgaaattctaaacaattaaaccaaaattccaataaatataaggttatgccttcaatatattcctatacaattctgtacccatggtttaaaatacacaaaccttaaataaca

SEQ ID NO: 172498 - DNA, 499 bp, Homo sapiens
  misc_feature (308)..(308): n is a, c, g, or t
  misc_feature (353)..(353): n is a, c, g, or t
  misc_feature (416)..(416): n is a, c, g, or t
tagcctaacctgtgaattacattgaatatccaacggaaaataaattctattcctacacaaactcttctagaagttcagaagtttctattcccaaagaactggtgttaccttcctcaacttattttatagagctaacatgaccctggtccccaaatctgacaaggtaaaaatggaaaaattaaagactgatctcctttataaacacagatataaaaaccctaaacaaagtattgttaaaatttagcaacatataaaaaggatagtacatatgaccatcaggttatattaaaaaaaaaaaaaaaaaaaantgaaagtggaccgctgtctcataccatatgcaaaaaattactcanaatggatcaaagacttaagtgtgagagctaaaactctataactctgacattgtttgtctgtgnccccatcaaaatcttcattttgatttcccacatgtgtgggagggaccctggtggtcagtaatgaattcatgggggcagctccg

SEQ ID NO: 172499 - DNA, 208 bp, Homo sapiens
tggaacaaaaacagtgatgggaaagcccatcactatttcttcagttgttcttactaatagagcagtagcagttattgtcctcgtgcaaggtggccattttttagtcacagagtcttgtatccttctggtctgttttggtctgcacgtttttgtgttagactgccctaaggcattgtatgatttcatgaacaaacaatgaaaatggaat

SEQ ID NO: 172500 - DNA, 457 bp, Homo sapiens
tagtaacttatgagctctgattttgagtgcccggtaaatactgcatgcttaatacatattttttttttaattacaaggatggaagagatggactttaatccagactgaagaatttagggaagaaaaagaatcctctgcatggtaggattcattgtaactataagaatggtgaagttcgtgtggtaaacaatcgtggaaatctaacatcagtttctaatataggtcaatatcctacaacttaatctttgactcaggcagaactttcctgattcatcaagacctgctggaacgcctgattaaaagcattaaccaaacatgagcagagtagaatggatgaaataagtagtataacagggaaagtactgccttatttcttacaaagcgctagactataaagaaacgcatgaggcgtggtagctcatacctgtaatcccagcactttgggaggccgaggagg

SEQ ID NO: 172501 - DNA, 646 bp, Homo sapiens
cagacctggatactgatcccaaagtgttaaattcaactacatgctggagattagagatggtgccaataaaggacccagaaccaggatcttgattgctatagacttattaataatccaggtcaaagagagtgacacacactctctcaagacctggggtgagggagtctgtgttatctgcaaggccatttgaggctcagaaagtctctctttcctatagatatatgcatactttctgacatataggaatgtatcaggaatactcaaccatcacaggcatgttcctacctcagggcctttacatgtcctgtttactctgtctagaatgtccttctgtagatgacctggcttgcctcgtcacccttcaggtccttgctcaagtgtcatcttctcccctagttaaactaccccacaccctgtctgctttccttgcttatttttctccatagcattttaccatctcttacattagacatttttcttatttatttgtagtttataagcttcatgaggcaagtaactttgctttgtttcttgctgtatctccagtgcccagagcagtgcctggtatataataaatatttattgactgagtgaatgagttttacatggccttatgaattaacggtgagtctaaatgttataatca

SEQ ID NO: 172502 - DNA, 558 bp, Homo sapiens
tctgcatggcaaacccactattttcacttggattacttaaggttattttgagtgtcaaggagcagggagctgatgctactactgctaatgaaggatgaagagaaatgaggggtagaaggtgggtgctgaggaatggcagggcagagaggaattactaactgggatggttggaatagggatggcggctcctctgtaaagtggagtggttaatgaccacacgacctcgaatgtctaaccccgagattctttaagcctctattttcaagtgtgtctaacaccccctcattcaaagaccacctaggaaagtcagagggccccattaagcacatggactttgctatgggatggacttagggtggagtccctacctactctgctcctcacagggtccctctgaacttcaccttcctctgtaaaattgaagtcatagttacatggctgctggaacagttaaacaaacagagcatactaagagtacctagcacacaataaatgcccaacaaatgctaatattacaattcacaaaggaagcttactatttccaagcaatcgccaccc

SEQ ID NO: 172503 - DNA, 899 bp, Homo sapiens
tcaaatatcctgatgtttgaaacttaaagtggttcagcggtacagggggcagagagagagagagacaagaggcggtgtgtgtttggggtgtgggtaaagcaaatatggtgaaacatttacagttggtgagtctagaacaagtggtacaaggttattcattgtgctgttctttcagcttctttgcagactggatatttttttcaaagctaaaagggaaaaaggaaaaacagtaattgactgtaccctaattcctcattattaagcatactttttcagttatggcaatgcttcagaaatataaagacataccctcctttataaaggaaagaaaattattgcggaccccccccccccaaaaggttaacttaaagttctattaatgtaaccaatcataaggtgttttttacaccattttttattcacaactgtgttacaggcctttgtacaaccaattttaaattattgccccctgtttctccataagagtaaaacatattactccaaaaacacaatttcaaatgtaataaaataaagtgtgccgatttttttataacttccaaggttttcaagattaaccaatttgtgcgcgccttacataattaaccaataatctcggaataaacgggcaataaattggtggctgaaagtataggttcccccattctaaagaatatacaagacgggtaagtgacgtaccccaaataccggtcctgtggcaagtggccactctattgacaaacctctggccatgtgataaatccccggttaaaaagcctttgttggcgatacacccaattttgagcgcagtgaaaaacctttggtcgcgggccacacgggacaaattaaacctcttatatatgtgagcctgcaaatataacccctttggttatacctggaca

SEQ ID NO: 172504 - DNA, 153 bp, Homo sapiens
acggtggaaggggaagcaggcacatcttacctggcggcaggcgagagagagagagaaaaggaggaactgtcaaacgccaataaaacattggatctcatgagaactcactatcacaagaacagcgtgggggaaaccacctccatgatccactca

SEQ ID NO: 172505 - DNA, 398 bp, Homo sapiens
tcggaggaaggtcgtggggcgctgggggcccggcgccagcccgtcgcggtctttgggcgtccgctcctcgccgcccctcgccccctgcccggccggtcggtgctgagttcggtctccccggccccggcggagcggcgtgcggcggcgccccccagcggcagcctggggcccacgcccccgcaccgtgtaccccgtgcaccccgtgcaacccgtacgcccggcgcgccccgggtccgcacccagcgtcggtccggggccgaggctgcggctgcggggcccggggtgcagtgaggcgctggggccgccagggggtgccgctttccgggccgaggggctccgagggtggggaacgggacgggcggcggctcagcccagcagggggcgtgctccggcggccg

SEQ ID NO: 172506 - DNA, 419 bp, Homo sapiens
gtcctttgaagaagataataactaagttactgattctcaaagtgtggtctccagaccagcagtaacagcattatctgggaacttgttagaaaattcttaggtaccatcccagacttaccgagtcaaaaactcagcatgaagaaccaagcagtctgtgttttaacaagaattctgatgtacagaattctgatggcttagggcaggatttggaaacctttttctgtttgagtccatatagcaaatattttaggtttttaggccaaaaggcaaataaaaggataccatgttggttcttatataatgaaacagaaagacaaatgtccacaaaatttttattgatgaaattcaaaactttatttgtggacatagaaatttgaattttatataatattcacatatcatgaaatattaatcttcta

SEQ ID NO: 172507 - DNA, 523 bp, Homo sapiens
gaggagctgacagaaacggggggtgccagtggccagggcgggtggtgtctcagagctggtctcggaaacatcagttcctactgtgtagagagatctcaggttgggcgcagtgttggagtgtgggtatggagcccagcatccatgggaaggacacaaaaaataaagggaagtttcagaaaaaggtctgggcccagtacagtggctcatgcttgtactcccagcactttgggaggcagaggtgggtggagtgcttgagctcagtagcttgagaccagcctgggcaacatagagacctcatctctgtttaaaagaggagagatgggggagagagaggaagaaggagggagggaggacgggagggactctgaaggactatttgatttgaaatatgaccttcagaatatgtacactccagagacggtttcctgagtctgctagtgctgaggaggaagagcagtcagaaccaaatggggattgacttgtgaagacagggaattgttccttagggacagagaggaacctg

SEQ ID NO: 172508 - DNA, 513 bp, Homo sapiens
agaagtgcagggaagactattttagaagagctgggttaagtatcaaaagttttgcttacttgctatataaacaaaggcaattcttttaatccaagtttcagttttgtcatctaaaacaagggaggtacagcctctatgtccatctgagagggcagcttgagcattcagcatggaagcactttaataagccacagataaataagctgtaactgaaatcgaaagagtgctggaatatgagtcacaaaatcagaaactgaatcccagctctttaatctactatgtaaatttgagcaagttacctcactgaacctcagcccctacacctgcagaatgagatattccaaaatgactgtagattaaggaacatgataaaatagctggtgaaaagggagctctggacatagtcacaatcccagctctgccatgtgactttggccaagtcactcagtttccccaaacctctatttcaaaaatggggtgaggtattatacctatctcttaggaggtgttatt

SEQ ID NO: 172509 - DNA, 526 bp, Homo sapiens
tcaccacatccatgccaacatctactatttttttttgattttttgattatggccattcttgcaggagtaaggtggtatcacattgtggttttgatttgcatttccctaatcattagtgatgttgagcattttttcgtatgtttgttggccattttatatcttattttgagaattgtctattcacgtccttagcccactttttgatgggattgtttgtttttttcttactgatttgtttgagttcattgtagattctggatatcagtcctttgtcagaagtatacattgtgaaaactttctcccactctgagggttgtctatttactctgctgactgttccttttgctgtgcaaaagctctttagtttaattaagtcccaactatttatctttgtttttattgcatttgcttttgggttcttggtcatgaaatccttgcctaagccaatgtctaaaagggtttttccaacgttatcttctagaatttttatagtttcaggtcttaggttcaagtccttaatccatct

SEQ ID NO: 172510 - DNA, 705 bp, Homo sapiens
gctatggtaaaaaatcatatcaaaaagctacaacttttgaatatgaagaaatgcttttatattactgaatgcgaccaacaagtaggctgggaatccttctcctgatacctcactagaggcaacactctattttcttgcttttgtttgaatgggctggtcaactgagtgtctgatgaagtgctgagctgggcttctgtgagaaatccgcatataacctgaatatcccaaactctctggccaagcttctaactcttgtagccattcctgccaaatgataatagtaagttagcattttctaattcagtagcaataaagggtaagaaaagaaactgagtatagatactttcttttttttcttttttttgagatggagtcttgctctgttgccaggctggagtgcagtggcacaatctcagctcactgcaacctccacctcctgggttcaagcgattatcctgcctcagcctcccaagtagctgggactagaggcatgtgccaccacacccagctaatttttctatttttagtagagatgaaacatcttttaaatccaataaactcaatagaatggttggcagagtatactaaaaatttaattaagataaagcaaactttatattcactctctaagatatttaggttttggaattattttctcagtttccctttatgtatgtcacccagatgttaagtcatgatggggga

SEQ ID NO: 172511 - DNA, 286 bp, Homo sapiens
tgcagatggccatagggcattaggtggtggcaggacatgctgctggtgatcatgtggcagctgcagttgaaactgaggggctgtggctcagctgagaggccatgccacatggcggagcatagaaagagatgagcagagggtgacaaaaccaggcttgggcaacacccatgactgggggtggcagaaggaattaagccagtggaggagatggaaagcgagtggcccaaagtgggagaaccagtagagcattgttgcagaagtggcgagaaggaggtggtcactagtg

SEQ ID NO: 172512 - DNA, 600 bp, Homo sapiens
tgctttggggactagcatgctgaagggaggctctgagaacatcctgtttgctggcattaatagtcctgaggtttgctgtttccgatcttccccttgtgaatgatcagtgttgacataggaagctctgtactgattcccctcccttcacggaagcctggcacagaaagcatgcccatgactgcccaaccactggttataagggagcaccggactgaaaaaatggagcttgtcaactctgggaatgaggctgacaagaagctgctcccctggcacattccttgaatcttcctcctgcttaggcctgtgtcctctccatcccacccccatttcattgatggttccagggctgagtgcccagagtgaggggatgtgtcttaatgctgatacaaatgggtctttaaaggtatataacaggcagcaaaagccatgtgtcacttgggtacgaaggggatgtatgtcctctttctacttcagagttttcaggggactgtatcacaattttggagcactagcaaaacccacttctgactttatgctacatggttatgtgtttaagcagctgagccccaggtgatgcgtagcaggtgaggctcaaccctg

SEQ ID NO: 172513 - DNA, 130 bp, Homo sapiens
actgatatgcagtttacaaggattagataatatcataaaatgttgattctcaaatgacctataatttataatttaaagccatctcaatcaaaatcccaaatgacttttggaacttcacaattctgaactg

SEQ ID NO: 172514 - DNA, 192 bp, Homo sapiens
ggacaaggggcagtattgtaagctgtgctctgagatggggagcaggaatacagtcacttccttgcaggttctggtgaggaggttgagggggaggtggccacagcagctgcactgctagaagttccctgtggagtcctcaccctcacagggcattttatgctgtttttattgaagctgaggcagaagcgtctt

SEQ ID NO: 172515 - DNA, 642 bp, Homo sapiens
tagcaagagacttttggaaatgtccttcttagctttctcacctagctgtcaaagaaagctgctaaagagcatcagaatccgtgtggactgagtcaatgcacagtactcccagagatgcataaaggaggggttctcaaattgtattccaaggaaccttaacatttgcccacccacctaaaggtcaccaaggaggaagaaaaggcaaaacaaacaagacttcatctagagaagctagttccgtgttaatctggtcctctgttgggcatgtctacgattgtcatttgaaaaaaaaaattcttttgtcgttgttgtttttgttaagtttgaaaaccactgctaatctacagtttacattcatcaatcttccatcttttgtgttaggtggactgtcacaaatgtagcctaggattcctttccgtagcaaaccttttaatagaacatcatcattttcgtagccaatatttgaaaatgactacaaatcatgtgcctctcccacgtcctcagagaaagtgctgccgacagcctcattcatattagggtttttaatgtgaagttgccacctcctgagaacatgtcttttagttatttcaaagcctttccagcatcttctcagaaaacctcagcagtggagggcagcccagt

SEQ ID NO: 172516 - DNA, 625 bp, Homo sapiens
gcccacagtgatgctttatggtagaggtctctgtaatgcaacaaattgtccaggcataataaccaagcttttgtaatcaggcagagaatttcttctggctttgctttttctccttgatttctttccatcttgttgtcttttagcatctgactcgctttttccatgatctcctatgtccgaagggttccccgggtagtgtcctgtgatggagcgcatgggaggtcagcatgggttgatgttccctttgtgccgagcctccgtgggcaaccaatggcccgccaggctggaagaccaaagttctcagactctgaattggtggagggggttcctttttaagaacaaattggcttcaatcctgaatatagtccttgccttctttatcctccttatttaattctgcccgggctttcctgttttccacatgcatgtcatagtatccatttatggttttctcttaattcatgccatctaacctttagggaccagtggcaagggctcacatgaaacttagaagttactggagggagagtctcaatttgcttgatatagcacaggatgggcaggtggagggcacgtgcttgcttacagcaaattccctcgcataacctagatctgtgtcatttgg

SEQ ID NO: 172517 - DNA, 346 bp, Homo sapiens
gcgagaggctcccccccgtaatatgtaacacaaagaaattacaacactggaagtgttatgtggttttttattggtctaattaagttttttaaaaaggaaattcccaccacacatctagatcacaagttttcttccccacagtgacaactccacagcactgaggcactgttgacaatggtttgagccagggccattaaattgctttggaacttacatttacagtgttaccaccaactggacctacagatatttagctgggagtcccctgaggatggggtctatgtctagtattacaattactgctatggttaatagctaatttttttagagcactttatatgcctgg

SEQ ID NO: 172518 - DNA, 298 bp, Homo sapiens
gtcaaccctacctcaagctggaatcatgaagggctgcatgcttagactaagagtgaactagttttgcatcagctgggtaaatgagagacacaaggctttgattttggattaaggtaaacccagacttatggtgcttagccaaaggagatggaattttctggagcaagttactatcatcctaggctacaagcttctcctgctgataaattttcaaatacaatattcagcccacagttaaagatccatgcacatgaagatatgagattccatgaatgtaagtgactagaaataaaagaaa

SEQ ID NO: 172519 - DNA, 487 bp, Homo sapiens
ctatggatgtggcatcctcagagttggtttgtaaaccagctactgctgggatcatgatgtttgggatcacaccccagaccagagcacagcaacattaagaagggggcagcatattcagttgtgctgtaactgacttgacatgaggtggtggggatgactcctgcaaaggagaactaaacaccatgcatgaattaagaccctgtatttagcagacaagagtacttcatccaccaggaagaaaagtattaagcacagggatgatttctcagattctatctgtttggtcagcatctcccctgagattttgcaattcgctttgttttgattctgtgatcactgagcaagcttctgactgttacttcagtcaccccaggcaccttaatactcaaaaggggtatcttgggtcatagaaataaatatctcagttactgggacggtagtgcctctcattttataggaataaatttgttttgttgcatatacatca

SEQ ID NO: 172520 - DNA, 246 bp, Homo sapiens
acttctgacctcaagtgatccaccctcctgggtctcccaaaataatgggattacaggtgtgagccaccatgcccggccatttttggtggacctttttatggggctaaacgtctggtgtcttgtggctacagaagaccagtacttgcttgaggaggagacctgagaggtcagctgttctcaggtggagttttgcccgcattcccctttgtagttgcaggcatcacccccattgtccccacccttctg

SEQ ID NO: 172521 - DNA, 196 bp, Homo sapiens
cccagggaaagggtgatagccttgattacctgtcacatgcaaattgggtgttgactacttgacacctgctttctgaggttttacacatcttccaccataggaagagtcctttcctataaaccagagtctaattagaactagaagagttttcaacaagtaagaaatgtgggaaaaccaagaggagtcattgttcagt

SEQ ID NO: 172522 - DNA, 394 bp, Homo sapiens
gcaggcacattagttatccccaacacaaccacacatccctaggctgaaaacatcaacaaaaggaaggtactgtggccaggccaggctgggtgtgttgaagtaggggtgtcttgggaggagtgggcagaggaagagagggcaggatagttcacaacaagttcagacaaatgatgcaggaagtaagaggagcgcctgccaggcacccaggacaaaggagacaggcctgacccctggcaccttctccacatggcctgtttccacaactttgttctttgggggtgctgtagcccgaagcatgtccccactctgccctgtgcatgtgtgtgtgtgtgagtgtgtgtgtgtatgtgtgcatgtgtattatagacaaatgtaatggtgttgggcgataatt

SEQ ID NO: 172523 - DNA, 364 bp, Homo sapiens
gttcgctcagtcttggtgttaaagatgcctgagcagtaacaagtcactgtacattaggaacatttctgtgataaatgtgagagataaaaaccaaaatgcagtaaaaaatatgacctaagataattaagaaaatagaacagaacccaccaacagttataaactataaattggaaaactcgaacatcagcacagagatttgggaagttataacatccatgaaacaagaacaagatgctctggagagaacacaggaaaaaaagaaaagagttcctggaaattaaaaaaaaaaatcttgacaaaccaaaacattcaatagaagggctggaagattaagtcaagagactctcccagaaagtagaatgaa

SEQ ID NO: 172524 - DNA, 166 bp, Homo sapiens
agaaatcaggtgggagccacgaagaacagcaggcaggagccaggaaagctgcaggggcagggttcccagagactccctagactctggagatggcaccgcaggcttctggtacctctcatgccaggagatgcttcctcacagcccagaatgagtagctggcaacaat

SEQ ID NO: 172525 - DNA, 119 bp, Homo sapiens
tgtcttacccctcagagagtcccagaagacagaagcacagggacaaatgaaacccttgcccttttcttccccaacctaaattctgattcctcctctttaggtgatctccttttcttaag

SEQ ID NO: 172526 - DNA, 104 bp, Homo sapiens
atagcttatgccctccttactttctttgctgtggcaaaggacttaatgactagtctcctagtatatatttgataagatgggatagatgcataataggggtcact

SEQ ID NO: 172527 - DNA, 460 bp, Homo sapiens
agtagacagggtcttgctctgttgcccatgctggagtgcaatggcatgatcatggcttactacagcctcaacttcctgggtaggtaggactacaggcatgtaccaccacacctggctaatttttgtttttattttttgtagagatgaggttttgccgtgttgcccaggctggtctcaaactcctggcctcaagcaacacacctgcctcagcctcccaaagtgttgggattacaggcgttagccattgcacccagtctcttttttttctttctgttcctcagacttgataatttcaattgctctattttgaagtctgctgatgctttattttacctgctcaaatatgcttttgaatcattctagtaaggttttcacttcagttattgtacttttcagctctggaattttggggtttcttttcttgttttctagctttccatcgattatttccattttgttc

SEQ ID NO: 172528 - DNA, 249 bp, Homo sapiens
accgttcgtgcagggatgcctgtatgccctgtgctccaaagtatgtcaccacatcagcctccaggggagaagcaattaaaggacagttctcactgcagaactgaagcccagttcctgagatacgaaagctaagtgaaaccattctggtgtggagtatgttattcagtttacttcttggctagaaacaaagaggttaaaattgagaacacaggattcttcacatcaggagatgtccgaggcccttccttc

SEQ ID NO: 172529 - DNA, 513 bp, Homo sapiens
atcttaaaaaactagagaaacaaagctgcagtcctagctactcaggaggctgaggcaggaagactgcttgagcccaggagttggaggctatgtgaaggtggaggctatgtggagttggaggctataagtgaagctatgatcgtgcttgtgaatagccactgcattccagcctggccacataccatgtctcttttaaaaaaaaaagaaagaaaacaaaaagtagaactcagggctcattaaacagggtaaatctgaaactaaaaattgccattcactagactaaaaggtcaaagaaaactcaatcaatttataaattactccaaagtgggccacaatcaagtgaggcactagggccagttcaatgaggtctcaatcatctttgtatctgcaaagcctagcataatgctaacaattaggaggaaaagaattacgtaaaaatgaaaggctgggcccggtggctcacgcctgtaatcccagcactttactattcttttctacttttctgtaattaac

SEQ ID NO: 172530 - DNA, 265 bp, Homo sapiens
tccgtctcaaaaaaaaaattgtctttgggttttagcagtttgattatgagtctggacatgaatttctttgtattttgtctgattcaagtttgctaagcttttggagtctgtagagttaatatgttttgctaaatttgggaagttttcaggcagtattttttctttcttttttttttttttaaatcgagatctgagaaaggccatattttaaataatgtttttaaagaataaaaatactctttctcctatccttatgggatttttt

SEQ ID NO: 172531 - DNA, 1120 bp, Homo sapiens
gaaaacaccaaatggcggatgacgccggtgcagcgggggggcccgggggccctggtggccctgggatggggaaccgcggtggcttccgcggaggtttcggcagtggcatccggggccggggtcgcggccgtggacggggccggggccgaggccgcggagctcgcggaggcaaggccgaggataaggagtggatgcccgtcaccaagttgggccgcttggtcaaggacatgaagatcaagtccctggaggagatctatctcttctccctgcccattaaggaatcagagatcattgatttcttcctgggggcctctctcaaggatgaggttttgaagattatgccagtgcagaagcagacccgtgccggccagcgcaccaggttcaaggcatttgttgctatcggggactacaatggccacgtcggtctgggtgttaagtgctccaaggaggtggccaccgccatccgtggggccatcatcctggccaagctctccatcgtccccgtgcgcagaggctactgggggaacaagatcggcaagccccacactgtcccttgcaaggtgacaggccgctgcggctctgtgctggtacgcctcatccctgcacccaggggcactggcatcgtctccgcacctgtgcctaagaagctgctcatgatggctggtatcgatgactgctacacctcagcccggggctgcactgccaccctgggcaacttcgccaaggccacctttgatgccatttctaagacctacagctacctgacccccgacctctggaaggagactgtattcaccaagtctccctatcaggagttcactgaccacctcgtcaagacccacaccagagtctcggtgcagcggactcgagcccagcgtgggctacacattagggtttcatcccagaaacataacggcgcatcaggtgtgaacaaaacacaaggggggcgccgaaggaaaccccgagggccacactctgggacccgttttggaacagggccaaaggagggtaaaaagagaggggcgacaaaaagagagggaaagcagggcagagagcacacttgggcacagaaaccagagagccgaaaaagtgggagaccgcttgaccacaacgacgcgcg

SEQ ID NO: 172532 - DNA, 382 bp, Homo sapiens
catttaatgcatgcagacgaggctgagtttgggaaaagagaagtaattagcccaaaggcagagttaggaaaagaccaggacgaaaacccagaccactgggtgacctgataaacatttcggttggaaagactcctcccacctgatgccctgcttatgcctggggtacaggcaagttaactacaaccaaaacctagggattcagaaacagcaggagcccgcctgtcagaactgcgccctcatcaggctggtcttcaaaataacttgaggtcaagccagtttgagattctgcacagggagctagagctggatccctgaactcccaaatccacatccaaaaccaacactgcaatcaagttcacttttccagcacttttgatataca

SEQ ID NO: 172533 - DNA, 303 bp, Homo sapiens
gcacctactgtatgtcaggtccaagaccctaaagatgtaaagatgaataaggtggtgaccctgccttccagtttccacagaggtggggaatatggataaaagcagacaaagccattgccatgggataagggcagagaatagcatgtgcaaattatagaaggtgagggataatataccattttccagaaactgatggttcaatgaggctaaagcatggagttcaagaaaggaaaccagatgagattaactgcaatgtggttctcaaacttaaatgtgcataaaaactggccttgttggctgggc

SEQ ID NO: 172534 - DNA, 293 bp, Homo sapiens
gttcaggaggtgtttgcactcacaccattctactaaagaagctccaatcagggactctgttgacctgttctttggcaaacctaatgaccaattcctagtcggcctaactacgatagctagcagcttttaacaagctgacctcttccttctttctgagattttttttttttttcactaggctgtctataccacatcctctcttggttttctcctacctcattcctgatcagttttcttcattggtgcttccttgttttgggaggaaatcgtgggactctttcacctcagcacag

SEQ ID NO: 172535 - DNA, 307 bp, Homo sapiens
attttttagctccaaggtttgattaaatttttatgatatctcttttgttgaatttctcattcagataatgaactgttttcctaatttcattgaattgtctatctgtattctcttatatctgagttttcttaaggtcactattttgaattcctttttaggcaatttgtaaacttccctttctggggaggggggaaggtcagttgcctgagaattattatgttcctttggtggtatcatgtttcctggctttttcttcttcctttttttgggggaggaggggagtggggcagtgtcccattgtcaccca

SEQ ID NO: 172536 - DNA, 649 bp, Homo sapiens
tgcccttgtgacctgctcactggaaaggaagaaatgaccgagggagaagggagggcatttgaggggagaagaagaggatggagaaaaaaactggatcatctcgtgacatggaaagaaaggtctgagctctgacgatcccctcacgtgattataggcatgaggactcactcttcgaattgtttgaaaattgaatggactggctcacaccttctgaaatttcttggaagctctggagtaactattccactaaagaacagcgtgtttttggctgaaatctgtgactgtttgtttttgagttattttaatctctgtgtcaagcatgaaaacctcagcagcctgggatttataattagatcccactggcatgccctctcacctctcaaacatgccacagtgctttggctctctccttgtgcaaacctccctttgatatttttggatatcgataccaagtgtatctgcatattttaaccaactgatatgcatatcctgtgatctgaggcattcgctcaatgtggggcatcaggccagctgtgaacttcctttaaaatttattttgtgtcaaatgattccctaatgctatagctcccttgaactgctagatttatgaaaattctgcacaacacatagctcagagaaaaaaaaaaaa

SEQ ID NO: 172537 - DNA, 280 bp, Homo sapiens
caaggccctatctcaaaaacaaacaaacaaaaaacccccaaaaaaccccaaagcaaaaaacacatctttggaactgtttaatgcatttagggagcatggagtccttatggtggtctgttatgggcttgaggcttcaccaagcccctgtgaaaactctgagtgctgtctccatggcggggttgcagtcagtagcaagataacaaaactcagatgggaaggacaaagcgcaacatggacgctcacgagtccagccaaattctgagtgcttaagaagaggcct

SEQ ID NO: 172538 - DNA, 308 bp, Homo sapiens
ggaactgaattttaaattttacttagtttaagtttcagtagctacatgtgagtaagtggccaccatgttgaacaatgcagatgtataggaatccctttcatccttcaaaactcattcagacttctggttttcagtccagcatgtaagaccttagaagtcaccattccatcctaataacaagtaaaaagctaaacaaacttaaaaatacttaactctttgtatattttttggaaaagtgaggttatggggcaaactgcatttcccaaactggagagacagacaggtagatacagagaattacagaatta

SEQ ID NO: 172539 - DNA, 695 bp, Homo sapiens
tgtcttcttctgagccctccaaactgttccaaactctgcctgttacccagttccaaagtcacttctacattttctggtattttttcagcaacaccccactcctggtaccagtttactgtgttagtccattttcatgctgctgataaagacataccccagattgggaagaaaaaatgttcatttggacttacagttccacatggctggggaggcctcagaatcatggtgggaggcaaaaggcacttcttacatggtggcagcaagagaaaatgaggaagaagcaaaagtggaaacccctgataaactcatcagatcttgtgagacttattatctgtcagaagaatagcacaggaaagaccagccgccatgactcaaataccacctcctgggtccatcctgtgacacatggaattctgggagataaaattcaagttgagatttgggtggggatacatagctaaaccatatcagaacctttgtatataaaaggaacattgatagaggatgatgaaatcataggaaagaccgacagtttctgaaggactaattctataaagtctgctgtttaagagttcttaatagtatttttttaatgaagtgatttaagttgcatggttaatgatcaaaacttctggtagaggctgggcacggtggctcacgcctgtaatcccagcattttgggaggctgaggctgg

SEQ ID NO: 172540 - DNA, 388 bp, Homo sapiens
atttagtacaggtttctcgggcacctgaatgctatgctatgcataacaggcagtggggatgagcaatgagcaaaacagacaaaatccctgtagagcttgcatcttagtgggagaaataaaagtatactaggtcagacggtgataagtgctatgaagaaaagtgagacaaggtaaagaagttggagagtgactagggatggagggggttcagttttagtaatgcgggtaatggtcaggggtaggcttcacggaggtaagggagcttgctgtggggatgtctggcggaagagtctgagccagagggatactgtgaatgcaaagaccctgaggcaggggtatctttggcttgctgtggagcagcaagaagtccaacatgcctcagaggctt

SEQ ID NO: 172541 - DNA, 698 bp, Homo sapiens
ggctaatttttgtatttttagtagagacagggtttcaccacgttggccaggctggtcttgaactcctgacctcaggtgatccgcctgcctcggcctcccaaagttctgggattacaggcgtgagccaccgcaccctgtgtggtagagtacttttacagatatcatttcattttattctgatggcccagggaaggataggcattgttgtgcccactttaaacagatgaagggactaaagccacaaatggctaagtgacatatccaaattagtgaagtagctctttgggtgaggaaactggccctgaccttgaatttgggccttcagacaccaactccaagcctgtttcccttcatcatgctgcctcaagtttgttggtctttttccagtttctttatatggatgtgtgagttcaacaagttctgttcgtgaagccactaatatttagatataaaatagagccctggtgccaagcagttattgcatctccctggaaatgatcactcaagtctacagcaaagaaaagattaaagttgtttactgagatcacctaaactttaaaggaccatccagccacagttgagtaaaggtcactagtaacatgtcaccagccacctggtttttttgttgttgttgttgttgttttttaagcttggttaaaagctactgtttaactgaggagagctaagcaggtacttct

SEQ ID NO: 172542 - DNA, 675 bp, Homo sapiens
gagtacagtggtgcagtttcagctcactgcaacctctgcctccctggttcaaatgattctcctgcctcagcctcccaagtagctgggattacaggcgtgagccaccgcaccctgtgtggtagagtacttttacagatatcatttcattttattctgatggcccagggaaggataggcattgttgtgcccactttaaacagatgaagggactaaagccacaaatggctaagtgacatatccaaattagtgaagtagctctttgggtgaggaaactggccctgaccttgaatttgggccttcagacaccaactccaagcctgtttcccttcatcatgctgcctcaagtttgttggtctttttccagtttctttatatggatgtgtgagttcaacaagttctgttcgtgaagccactaatatttagatataaaatagagccctggtgccaagcagttattgcatctccctggaaatgatcactcaagtctacagcaaagaaaagattaaagttgtttactgagatcacctaaactttaaaggaccatccagccacagttgagtaaaggtcactagtaacatgtcaccagccacctggtttttttgttgttgttgttgttgttttttaagcttggttaaaagctactgtttaactgaggagagctaagcaggtacttct

SEQ ID NO: 172543 - DNA, 615 bp, Homo sapiens
tattcacatgcccaacactggggttagtggtattcactgtgtatgtgacacaccagcatgggttagtggtattcctccatgatgtgacaacatcggtatgggtcagtggtattctgctgtgtatgtgacacaccagtttggattagtgggtattctgccatgcatatgacactggtatgggttagtggtatttgctatgtatttgaacacactggtatgggacttcggccctgagcactagtgacactttgagctggatgagttgtgggtttgagctgatgagccgtgcccccactgctacccgctacgtgccaggagcacaccccccataaatgtctccagacagctccagatatttcctgggtatccaagtcgccctggcagagaaacactgcatgagacacggcgttagggtctggtgggagactcaccacagtgccaaggtggctgcagtttgcttgtgacatgggcgtgtatctgagtgtgaaggaagctggtttttgtgagctgcctcccgagctcagaggtgacagtgggcactttccccacagagacccctgaagttgttccttggagaacaaagtggtgaggggcggggattccagaccttgaggc

SEQ ID NO: 172544 - DNA, 742 bp, Homo sapiens
cgcgatggcttacgcctgtaatcccagcactttgggaggctgcggtgggtggatcacttgaggtcaagagtttgagacaagcctggccaacatggtgaaactccatctctactgaaaaatacaaaaataagccgggcatggtggcgcacacctatagtcccagcttctggggagtctgaggtaggagaatcacttgaacccaggaggcagaggttgcagtgagctgaggtcatgccactgcactctagcctgggtgacagagcgagactccatctcaaaataaacaaaacaataacaataacaaaatcagcatgtactgggcaccgtggatacgccaggtactgctctatcccgtttacatattgtgacttagtaaatgcccacaacccagtgagattgatattattattgcccccattttatagatgtggaagctgaggcccaggtcccttccatgggcaatggcgcactgggctacaggctacttagctactctatgataagatgataatgtgcactgtttactgagcacctcttatgtgccaggcactgctcatagaattgccacacatggccaataatccccattttacatgcaaagttatgataggagagggggaagaggggaaagggaatggagcaacaggatctggggcaatgggacaataggggatgggatgtgtctgggtgagacccaaggtggggtatggatggggagagctcctgggtctggggcaagagg

SEQ ID NO: 172545 - DNA, 595 bp, Homo sapiens
cttacagatcgagctgtttttcttgaataaacactcgtcagagtgctgtaagcctttagttaatttccagaattttgagaaagttggttatttgacagtttttgctagggttttcattgcttttatggaagagtggattattagaggtcttactctaccattctggtatggaggtgagatctctttaaaaatgtgtatgttgaatgaggatgtcattctttatgcatgatgacaacgtctgattggtaacaccttggttacaaggtgtacccatgctggtgggcagcatcaagttacttctcatggtccacccacagattaagatccttaccacatattgtttcagccaagtgtggtttcttcctggacagtctgcagctctctgtgacattagcttctttctgtgttgtggtatcacgctatgtcttagggagctatggtatagagtgttgctacatgatatacaattaaagtcagcttttactttgcagttactttgtagtcataccaaatgtagcatagttactctaccaccaattcttctaatctgaggcaacactgtacttctaatctgcagtttccttgtgaaagaaaa

SEQ ID NO: 172546 - DNA, 622 bp, Homo sapiens
cgtccaagcaacagatgcccgcttctgtgactccaccccttacggaaagtctatgggactctctgaaatgtatgagtgatactgttagaaagcggcaagaaaatgaaaagaaaacgtggatgttttccatatttgagttgatgcaggctggagacaacagctgccagagctgcaaggcagaacaccctgagaagtggaaccggaggatccaggcgcctgttgaagggataaatgagagccgtggcgtgtggatgggactctttctgtcttccgtttggctgaagctccaaacgccaggagtaacccagtgggtagcaagcacccttccctccacctctgcaggaattgcaaaaagcaatggtaaaaaaaattggtttgtgatccttaccccagtgctcaaggaggttggagaagctgaaagagaggactggttttgatatggtttggatttgtgtccccacccaaatctcatgtcaaatggtaatccccagtgttggaggagggactggtgggaggtgattggatcatgggggcgaatttccccttgctgttctcgtgatagtgagtgagttctcatcagatctgattgcttagaagtgtgtagtgctggccgggtgcggtg

SEQ ID NO: 172547 - DNA, 259 bp, Homo sapiens
agtctttgtccttaatggctagatgattatttctcacagcagtgctttagaggccaggagattttgcaagttctgtgaagttctgtgtccttcagttctaaccttaaatgttgtaagagggatggaggagaatctttcaagttgaacaaactgccgcttgtctgtctagcgttaggagacatttgtccactgtctcatcccattgtcttcaaattgaaggctgtatatttaactgtctttttgtagcactcatattctg

SEQ ID NO: 172548 - DNA, 666 bp, Homo sapiens
acaaaagattgttttgaattttcaaatttaaattagtggacttcctaaactttgggataatttcggtaaatgttttttgcttcaaaattacaaacttctatacaattataaatgtaattttcacctaacttatttaatttgagataaattcaaagatatcatgaatagttattataacttttaactacactatatttgagatacttatttttataacactttaagaaaaaaattacaggtcatgcattattcccacttctttttattgttaatttatctcatttataaaaagtgatctctgtgttctgggggaaaaaaagctttcactatgacattatatccattttctctcttcaataaatttataaaattttcacagttaagtgtaacttattcaaaaaatgttagttaacaagatttttaagtacattttattagcaaagttcctagaatcacttagatccctaaatttaatttcctagttagttactgaaaggattacttaactactataatcagatacctttacaacatcaacaaaatcaatggaacaaaatgtcaaaatagaagaaatctgtcatgtttctgctgggagccacttattcctatatattctaatataaaaagatgatgtaaaacaaaataaacagttactggatttatcat

SEQ ID NO: 172549 - DNA, 315 bp, Homo sapiens
gagtgcaaacggtcttgagactgagaggtctgggaaacactggtttagcctccagtctgcaggggacaggtgtgaaagtcagctcccaagtcaaccacatttagtcaaaatgctcacgatgcctcaggaaggcacagtgtagcaaacacactctggcttctggggagtcctggtgaccccaagcctttagtcccagagatggctgctgtttacagtgttggactctagacactggccagctgtgcggagtctgatcattttggggaactatgagatgttcacgccgtaggtgtcgttattgaccggaggagctcc

SEQ ID NO: 172550 - DNA, 552 bp, Homo sapiens
tgaaacttgggctgagcaatgctccaccatttccgtttcgactgtgggtctctttcttgcctctactgggaatgagaaacaggagttcagaggttcctggtctgggaagacatacaacaagcacatgggttatgggaagcctcctcctgctaatgtgtatttatactttgtaagctctgattcatccaagcattggaacagaaatctgcttcctgaggttctgtttttaaatagatagtttgcaaaaacaacaattatttttcttaacattttttttccaccccacaagcagctaaacatcccagctcagggtatgtcagtctccagcaatgccaacaaacagcttggttatctgagctagaagggtgccctgaggcagttctctacagttctggccccagaagtcttaaaaacaaagtttagaaaccattagggcaatcttgttgcatcacttcaaatccacgaggtatttcggggtctattaaaaataacgaatttccgtttgcgaaccattgccttccaatggctgttaaaataaaactaagagcaggt

SEQ ID NO: 172551 - DNA, 462 bp, Homo sapiens
tgtcctgggcaaaggacctgagatagatcaatgctattccagccaccctggctttatgttaatgtctactaaaaagtagagtttaggtattgtaggcacacaaatttaaactatttgaaagctatcatattcttaaaaattatgaaattcaaaatccctttttttttcttactggacttgtgagcatatgttaaagccataggtactcaaaaaaaaaagtgggtgaatatttaaaggggaaaaagtctcatgatggcagacaggggaagtactgttaatacacaagacaggattgatttgaacgggactcctcttgtaaccaaactgaatgagacctggagaaatcaaatcagcaaacagctatatcaattttagcaggaggtctctggcataaaacaatacttaggaatgaatctcaacattttcaatttcaggccaagtatattagcctctgcattatct

SEQ ID NO: 172552 - DNA, 262 bp, Homo sapiens
gtgattgcatctaatcaggactttttctgaaactgctgccaggaaaatgtgtgctaggaaggttaccttctgcagctggacttttatgatgcactggattatcatggccttagatataccatcagggcatggagtggcaacagtgctttgctgtcttgacgcatctcaggtagaggatctcttagggagctttctgattgaatcccacgcccattttgagggaagggaatgggccatgggtctcatccctgcctagcgctgc

SEQ ID NO: 172553 - DNA, 647 bp, Homo sapiens
gctgcgcttggataacaagtaattcaacgcacgcacttaacagaaatgttaaactataacaagcaccatttgaggattaacaggaacatttttttgaagatttcaaacgaactcgactttcagtataattgtacctaaagtatttataaacagctcatcggagcctctatttgtcatagacttttgagttgattgtgggaccacataataggaccatttttttttggtctttaaaatggtggtaaatctctgtatgcacttggcttttttattaaacgtactccaaggtgagtcttgactctttagtgtaggacaagattgtacactaacaccagcatggacctgctttctcatgtgtgtctgaaatgtgagccacgtagtgtcggcctgctgtgaagttaacattgccaggacgattcttctacagaaataattctcaatttttttccagcatttagtagtgaacgatcatcaatccatcactggtaatacatttctggttcaatataacttaaggatgttctagtagtgcgtgaatggctgcaagttagtaagtttgttttgacattgtttaaatatgtaatgttaagcttaggtttaaaaaagtaaagctggtaaactgggtctttgtcatttgctttaaaaaa

SEQ ID NO: 172554 - DNA, 169 bp, Homo sapiens
ggaggcatttcaaagaagaactgacattgtgacagattagaggtaaagagtagaaggacacagtctgttagattcctttatgcattcattcaacaaatattaagccactccaaagtaccaggcactgtcctaagctctgaggatttggttataaataagacagttatgt

SEQ ID NO: 172555 - DNA, 524 bp, Homo sapiens
acgaaaccagctttctcttaaggattacccacatgcagtccacgcaccctcacctccattcactcccaaaaccactgcagttgggtgtcccctctcgagtccaaggagatggccttggtcaaggtcaccaaaaaccttcatgtttccaatgacgataaacatttctgtcctcctctctccaacctctcagctcctagagccctgcttggctcatcttattctgcttttcctcttgcggctcctcctctagccaaacagaaaacctcagggctcctcagtgttcttcctctaagctcttttccctggtaagctcctccacacccacaacctgaaatatcatctagaagaatgaacgctagtgactcccaaatgcggaggtcctaacagtgacaacaataagtgctatgtaagtattagctctcacgtgccaggcactgttcaaagaactgctttatgtcccctaacaacacgaggtggatactatcattacttccactttcagatgaagaaacggaggcacaaaa

SEQ ID NO: 172556 - DNA, 448 bp, Homo sapiens
ctacggtgtcttccttcgcaggtctgtccccccaggcagaaggattccagcccagggatcccccatcccaccctgactgcatcctgagaaggggggacgccacttcgggaaggttgttggggcagcacaggccctggggccctgctctgtgaccttgggcggccccctctgtctctctaggcctgtatgcaccactggcaaagggggcagggcccaagtctactctaaaagctcccctttctctccagaagctttggagtctcccaaaatgcctgctgggtctctgcaggactggcacctgtcaccggaacctgtctgggagggacgagaacacgctttgcaagaggaagctctgcctcacagagccctgggctcactcagggaccctggccagcagctgcttcctctccccacagcggagagagacccaagggtcccagggcggatg

SEQ ID NO: 172557 - DNA, 292 bp, Homo sapiens
gtaactgactgactgaaggacaactgctcttatgcaaactcctctgtgggtctttcaagtttatttctggtgaaaggtcccactgtggagaggaggaggccttcaggctatgcctctaaggccttggaaacatcagagaccacgataggtcactgggaaaaaactaaaggcagatacacccctctgcccacctccctgccagtccctttgttaatgcattgtaagtcaggtgaaaataagtgagaaaaggggatctgcctaaaaaatgaaacagcaggccaggcgcagtggc

SEQ ID NO: 172558 - DNA, 780 bp, Homo sapiens
cccactccccagggctgcctggggtcacccccaaatcttgctcccaaggcctgcctctgggggcccaggcccagaggccagaggccgcctcagcaatcctgaagcagacagcagatggcagccttggatcagccctttctggctgtttccaggctccagctgaaggtggaagggtggttctgctgtgttctcttccttggaatttctgggaaaaccacgagcgggactagaacccaaaatcttcattccatcgtcaatgaaagccaaagacacctggaccttggaaacagtctgagccttcctgatggagagcggatgaggaccggagggaaagggacaccggactttggaaacagtctaagccttcccgatggagagtggatgaggaccggagagaaagggccctgagaaagtaggctgctgccctggatcccagacccaaccagagtggcacagagtcctccagaacagagcgtgcccccgggagagccaccggccctgctgcacctgctggggtgtccctgctgttcaccctccctgggctcctggaccacagcggggcagagtggaggaggaggtgtgcacagaggcaccattgttgtgggaagcagtttgttggtgaggagggagctgcggtcctgcatgacatccacacgtgtgacatccacacgcgtgaaatcagcacacacgcgtgacatccacacgcgtgacacccacatgcgtgacaccagcacacacgtgacatccacgcacatgacatcagcacacacgtgtgacatc

SEQ ID NO: 172559 - DNA, 248 bp, Homo sapiens
ttcaagttcccaatcattctcggcattctataatcacaggcctcagagagtaatgctcccaatggccctcaaattatggtttccttaggaggctattaaatcttgatttctgagaggaaaattggggattttgtgttttcccttttagacttgagtgttctgttactgtggatgagctcttctagaaacttccaagcagtttcaaaggggatttagatgtcatcaggaagtgtggttgacaacgtgat

SEQ ID NO: 172560 - DNA, 333 bp, Homo sapiens
agaagcattaagtgtgataatatatcttatgctataataaggagctagtgtacaattttgatcagggaggaaataggcaatgtgggctagaaatcttaccatgatgttgtaatcttacagttcattttcctttaaataaaagaaaaactttcattgaaggatttttcacaaacaccaccatcataggtttgtgcttttctcgttttgatcaatgtttttatgtagtaaagcaaaatgtatgctatagatgtgctttacttttttaattgtaaaactattttataacacttgaatgtttgaggatagacattgtggttattttaaatagcttgg

SEQ ID NO: 172561 - DNA, 226 bp, Homo sapiens
acaaattagagagatgacgcacctgaataggaaagataaggcctaagagtatgtgagatacagtaagttcctaaactaggataatgagagtgaaacgtaagaaataaaacagaaggaaagtcggtaagacttgaacagccacagaatataagaaaattggtttatagggtgatgagccggtcatgctttctaaccctgaaccttaattttgaaatcccaggccagg

SEQ ID NO: 172562 - DNA, 127 bp, Homo sapiens
gagtctacagtagatatagagaaaacatttgttagacttcatcaatcattcataataaaaaaaaaatcttagcaaatttgcaataaatgatggtttcttccatccaataaagggcatttactaacaa

SEQ ID NO: 172563 - DNA, 268 bp, Homo sapiens
tggccccggcttgaggggtcttcccgttctcttcatccctgtgccagtttctgaattgttaggccagggttggaatcccacctctgagtgatttcaggcaagtgtcttgttctctggttctccatttctgcacctgaaaaatgaaaacaatggtttctcttcatgaagggagttcctgacccaccggttaccagacagacggtggctatgatgattgttattctccaaaggcccttctctaggacccacagcctccagaccccagtag

SEQ ID NO: 172564 - DNA, 151 bp, Homo sapiens
cagcggccgtttcagcaggtgctgcagttgttcagatggaaagtgggatgccctgggccaggtttggcagtggaggcggacacagcagctggattacagacatttggcaccaggacatgttgatgaggaaaagggcagaccagggatgact

SEQ ID NO: 172565 - DNA, 502 bp, Homo sapiens
cagcggtccagatgtaacacacaggggcatgggggtggcagacctgggggtcaggcattggccctgatcatctctggaaggaatgaccctaaatggagcgagaagcagagcttagacacctggcggccacttcctgctcaccttaggcaagcgccttcctctttggctgtagttttgtgcctccacaagctcttagtcctggagtcagccagatctgaggttccatccaggtgtgatactgatgcttagcctcaggctagtgccttcaccgctaactgttgttcgtgaaaggagcgctgctcacctgagaggagggctggaggaagtgagagaggcagagtaggagtttatccagcccagtttctttatcgacttaattttctttgccccccttcttggagggagtgagggtgaagaagggaggagggtatcgacccgctaatgagcacttttatttacagaacgctttttatatagtccttctggacacctacagcagccc

SEQ ID NO: 172566 - DNA, 107 bp, Homo sapiens
ggatctgggtgggtatctgcttccttccccaaataagcccatctagggctaggctgaaagtgactcacttatgcagaggccaccaaaccatgaagcacaggcctgca

SEQ ID NO: 172567 - DNA, 508 bp, Homo sapiens
gacacacttcgtccactctgatttcagaagaagtgtttgggcactcggcggccgagagaccaacaaatgacccaaagggccacagggaaaggataagatgtggcatctcccgttaagtcaggcccacagaaggagcctgaatcaacggagctgctttcggggttccaggtaaggagagatcccctattacctgcctcctgctgatgctacccagcaagagctccctccccatatgcagaactccccatgatgtgatctaatactttcatctcagaactaagaaagctctttaaactcatgaaaagatcaacatctttagggactagctgaccagttcacttgtactcaaccactatctttaccaaaaggcggatttctttttctttaagtagggacagagtttcaccatgttggccaagctggtcttgaactcctgacctcaagtgatctgccagccctggcctcccaaagtgttgggattacaggcgtgagccactatgcccggctt

SEQ ID NO: 172568 - DNA, 537 bp, Homo sapiens
gagccacctagatagtatgtataatgacagatagaaatggtagatagctggggttgtgtgggactgttttctgctaattccatgccagtcagttacaaaagcattacctgttaactagggaagtcagtaaagttcaactacaagataccagcttaacaggttcaagtgctacacagttttaccagaggaaggatgttaaaggagtttagaggtctgaaaatagcctaaatgtcaagagaaaataatgtattcttgttaaataagtttccaatagatgaatttcagattgttacaaatacaatttcagactgttatacatacacacactattaaaaagcgataattttaaaatgcatattccaaggtatattcatataattttacaatgcatatgcaaatgttatgaaccaagctttaaaatatcaaagattaagccaagttccagactccactaggcccacaagcagggcaggtgaattctaactcctccattttcagcttttcctgctacttccaataaactgaacatcatcctct

SEQ ID NO: 172569 - DNA, 318 bp, Homo sapiens
tgctgagactacaggcatgagccgccatgcctggccccttaatccgatgtgtttttaaactagaagagcatcgacacatacacataaatctcacggttaactaaataaccgtataactaaaatgtcatactttaaactatttaagaatgacatgagctttcttaaaacccatgaaacttgtacccaagctaagtatcattgactttcccagctcagtagctgggtttcatcacttaatatgctccctctactctttctgtccttgattgaatcagataagcatgtacaaacattgagccacaggagagccattaaaaa

SEQ ID NO: 172570 - DNA, 686 bp, Homo sapiens
gacttaagtgaagttagtatttttttttcttaaatgtgtagtagaattcaccagtgtaaccactgggattggccttcacatttggagaagattttaaattactgattactgataaaataaaaatattttatcagtatagatattcggatttttcacttcttctttgaactcattttagaagtttgcatctttctgggaacgtgtacatttcatccaattatctaatgtgagtttttgtaattgtcccttaaaattcttttaatttatggttagtctgtagtcatgtctcttattcttgattttatgattggctgcttgtctctccctccctctctcccaccttccttccttcctttctcttcttcccctcaccccaaatcctcagtctacttagaagtttgtcaattttgttaccctttcaagaagttgttgctttattttagtttttctgttgcgttttatattatgttttattaatttctgctcttgaatttcctttctttcttccctttatttttttccctcctttagcttcttgaggtaaaaactatgattattgattttagatctttcttcttttgaatctaggcatttaaagctgtaaatttccctctaggcactgacttaattgcatatcatactttttgacatgttgtactttctattttcattcagttagagatatt

SEQ ID NO: 172571 - DNA, 503 bp, Homo sapiens
cagggatgctgtcaccaacacagaagagtgaccctccaaccttagcctgtccacttctctgtcagtcaacatagcccagcaaccatcaggccatacaggcagaagatggctttgctgtcacataaacaactgtatgtttttccctcactgtgggtacccagggaaagctgtggacagtggcatgctctctacctccctgtttgcactgtaacctgccaaatggtagattttaggacttgtcattggaacaggaattaatacgaaaacatccaaaactccatgaagcctactcaccctattccttaaacactctccaagaggaccttcccctccctagcaacttggtaagacacttgtcaccccagcctgaggtcaaagaagagcagttcttctcttcttcctcaattcatagtctccctttcctggttccacccctacttgatgtgtcagccccaggttctctgctagagcacatttatttgccccctacccctgaccagcac

SEQ ID NO: 172572 - DNA, 570 bp, Homo sapiens
gtagagtgagtttggaagtattccctccttttcaaagagttttagtgggattcataatcattgtttaaatttttggtagaattcagcagcgaatccatcaagtcctgggcttttctttttttgagacagggtgttgctccatcaccaaagctggagtgcagtggtgtgaacactgctcactgcagcctcaacttcccaggctcaaacagtcctcccaccttagcctcctgagtagctgggaccacaggattagcctgacaggattaatcctcacaggattagccaccatacccagctaattttttattttgtagggactggatcttgttatattgcccaggctggtctcaaactcctggcctcaagcaattctcctgccttggcctcccaaagggctgggattataggtgtgacccactgtgcccagcctgggcttttcttcaatgggagagtttttattatagcttcaatctcattacttgttattggtggaattccccaaactgtcccccgaaccagataacagtcagatagcacaaaccaagtcaccgtcagaaaaaaaaggtgacg

SEQ ID NO: 172573 - DNA, 440 bp, Homo sapiens
gaggactgcttaaacctaagaggctgaggctgcagtgagccatgatcgtaccactgcactccagcctaggcaacagaccaagaccctgactcaaaaaatcccaaaaaaacaaaaaacagaaattgcttttcttatggtatatatcttgcctattataatcaataaatatcatttttattaatatcctcttaagtagtataaagacatcaccagttgcctcataatactatttcaagatctcaggttatcttcttagtaattttgcctgagttcccagtcactctcaatattctgtcctctcattcagtcccaaacaaaaaataaacaaacaaacccttttctaaatgtaaaaaggggcaaggaatggtggctcatgtctgtaatcccaattcccttgggattacagggggggagccccccgcgcgaaactgaaatttttt

SEQ ID NO: 172574 - DNA, 349 bp, Homo sapiens
tttacctggactgaccacactttgtttagtcccttgctctcctttggctgcttctcctgtggtgatttaaacagaaaaaaaaaattcttcacctgatcatagtatcctcagctaccatcctatttctttcccccctttgcagccaactatcttgacaaacgttttgtatctgcgtctcaccaccaactttctactcagctcctgcttcgctcttgcccagacactttctaattacaaagtgtacctctcctttctctgcaatctttcgtgtgaccgtgatgctgcatttggttctgtttcatgttctccctttgggcacctcaaacgactgcaaacccttggcctctat

SEQ ID NO: 172575 - DNA, 542 bp, Homo sapiens
gtgaacaccagtcccctgtgttatcattatgctggtgtccataaatcgaacctggccctttttcctcttcatctctctggatcctcccaaccaccctctgaagcaggtggtcttgtttccacttcacagggaagaaactgagctcagagagggaaagagacctgcccagggtcagccagctagggaaatggcagagctgagatttaaagccatgaccactgctggcagagctggtatcagatcatcttagggttgtttaaagccttccacaggcggagcgcggtggctcacgcctggaatcccagcactctgggaggctgaggtgggtggaccacctgagatcaggagtttgagaccagcctggccaacgtggtgaaaccccatctctacaaaaatacagaaattagctgggtgcctgtaatcccagctactcgggaggctgaggcaggagaatggcttgagcccaggaggtggagattgcagtgagccgagatggcgccactgcacactccagcctgggtgacagagcgagattccgtctc

SEQ ID NO: 172576 - DNA, 505 bp, Homo sapiens
ctagaggatccccaacttcgacggacggcattcaaaatatatacactgaggaatggcattctagtcgtgtgggagctcaaaacaagaactgaagaggctctttgtttctcacaggaattagtagacaaaagatagctcctgattcttccaactttattagatttctattgcaactttatagtgtatcagactctggcttctggaatccagccagagatccccaagccttgagaaacagaaacaacaaatttaatctccaaatcttctttctctgagaccatgctggcctggaaaaattgggcttaatatagacttaatgctagaatcaacatcattaacgagacctatactctctaacacagtagctgctgggtgaatgcgtccgacggagcgcttacggagattcaacttcttccgggttaagtctggggagagtgtatgtgtcgaggaatgtatccatttcttctagattatcaagttaattggcgtagaggtgttagagtat

SEQ ID NO: 172577 - DNA, 364 bp, Homo sapiens
tgagtagagattgcacctgggcaacagggcaagaccctatctcaaataataataaaaaatagtaaaaatagggaaagagtttcacaaccatgacctgaaatgtaactttcttcacaaagacatgaacgggttcaccagtgaaacgaccccggttgccacttgcatgtcacctcaggcttaaggaggctgaagcatgtgcttcctgtttcacagccacaggcacccgtgagctgacgttaaacactgacagcagatgagccagttgctgatgcacggccagtgggcacggcactctccctacccatgtgttggcacaaagctgtttaatgttagttaggagtagaaatattttactttttccctg

SEQ ID NO: 172578 - DNA, 528 bp, Homo sapiens
agacggagtctcactctgttgcccaggctggagtgcagtggtgtgatcttggctaactgcaacctctgcctcctgggttcaagtgattctcctgcctcagcctcccgagtagctgggattacaggcacccgccaccaagcccagctaatttttgtattttcagtggagacggggtttcaccatgttggccaggctggtcttgagctcctgacctcacgtgatccacatgccttggcctcccaaagtgctgggattacaggcgtgagccaccgcgcccagcctgactatgttttagccactgttatacatacttattctacatgaattattccactccattctaacagccctatatggtgggtactattaaccttcacttttcacaaacagggaaactgagtcacagaaccattaagtaacttgccctaaggaaaggcagctaagcagtggtagaggcaaagattgcaatcccaccagtgtgatgggctctcttgtctgacactctcagaggtgtagggagttgactaa

SEQ ID NO: 172579 - DNA, 665 bp, Homo sapiens
ttacttaaagaaatatttcatcagctcctgtcttggttttctcttttatgcaactcttattgcaaaatactctggattgattcattgtcttgaatttttcctcatatgttatctttttctttttcttatgttttgaatttttcctgagctctgtcttctagaaaatcaattaaatcttcagcaacataatcttttgtttttaagtttttcagatcttctgcctctgtctctgggtgctaaccccctggtgggagattcctgtcttcctgcgtgcttggttttatttctgtagctctttggcttgatcctgggggcggccctactgctgcgagtgactgcaggtgggaaggagtggttttgggattgcagagacattccttcaattaaccagccagatttcagcctcatggtcccacagctcaacctgcttgctggagccctgtgccctggcaggaagaggggctgccaccctcactgctcagctgtggttcctgcagccagtgatcatctgccacagcctgcctgtcctgtgatcccgcctacgttccgtcttctggaaagccacctgactatctggtctgcttaaggctcccatgctcgctgctttgctctgtgtggattaatgtactttggtgaattcttattgtcatgccataaaatttaga

SEQ ID NO: 172580 - DNA, 727 bp, Homo sapiens
tgcgtaccagacatataatacattgtgcttacgcttaagctaagcatttagtatttttaacaattccataacagaaaaggggaaagcagaagtttccttttcggtacacagcagtgcaagcagaagtttaaatctcaatagttgactattatttggaattaaaatattttgcaacaaaagaagatagtattcctctaaaataaaaaacctagtttgtttctcctatccctatacagataatccaggttatcaaatcccagttatattttcctatgccactcatatacacatttaaatctcaatcctcatgaatcatgaaagagagaagggaggaagggaagtgaggcaggcagagaaaggaaaacagcacatcccaggaattggagaaaatgctcacaaactgttaaaaattttccactaaacaatcccctatgccaaggcttttagtttactttagtttataaacaagcaggatttccatcaatccaccagaacaaggaatcaaatcatttttaaaaaggtatctcataatagagaagaagctagatgtaagtttcacaccttgaggctaaatcagatgtgtttaagctctttgaaactcattatgcactatactgatcttgattttcaaagaaactcacaatctaagtgcagctacgtcttacagcaaaatgtgctggcagatacacctaggaagctctcagattgtcaggtactgtggggctga

SEQ ID NO: 172581 - DNA, 356 bp, Homo sapiens
gcctctcagaatgcccacttctgtgttctcccccaaatccttgctaaccgcttcatcctacagtctctgtccatccctgttcttttgtgtttgtctctgtggacttgggctgaggagagtgtggtttctgcagcaccactgtgttcttgaccctggtcctggctgtgtcccctgatccgggtcttgaccctcagtcctatcatgccccctgaccctaaccgtgcctccctaaccatgattagtccactggccctgaccctgatcacgtccctgaccttgatcacgtccctgatcacaatcgtgcccccgactctgaccgtccctgaccctgattgtaccttttggccctggctgtg

SEQ ID NO: 172582 - DNA, 607 bp, Homo sapiens
cctcagccctcaccccggggtcccctcaaccctcaccccgggttctcccctcaattctcacccccgagtctcccctcagccttcaccccagggtcccctgagcccacaccccggggttccctgccctcagccctcacccctggatcctctcagccctcaccccagggctgcctcctttccctcaccccaggcttccctcccctcgtcccttgccctttgcccctcatccgcttccaggaggagctgaggtctgagcctgggtttctggctcttgggtctccctccctgtttgtctgtgctgttctttgttgatttctctgtccatccctgttcttttgtgtttgtctctgtggacttgggctgaggagagtgtggtttctgcagcaccactgtgttcttgaccctggtcctggctgtgtcccctgatccgggtcttgaccctcagtcctatcatgccccctgaccctaaccgtgcctccctaaccatgattagtccactggccctgaccctgatcacgtccctgaccttgatcacgtccctgatcacaatcgtgcccccgactctgaccgtccctgaccctgattgtaccttttggccctggctgtg

SEQ ID NO: 172583 - DNA, 471 bp, Homo sapiens
cttagaaatcgcttaaaacaccttttggatctgctatgccctgccaaacaatctccaatggatccccatcacctatggggtaaagtttaaacttaggctagtattcagagtcctccacaatctgagcccgactatttcctctcggcaatcctacatgaacattttactcaagcccgatttgtcgacactagtgtttctctaacagaactcagggcttgttgtttaaggatagagccttgattttgccgggaggctagtggtatgatggtgggggtgctgatagcatttcaaacaggggagggcaggatcagagaaaaaccatgtttctcttttctctctctccctctgtcccatgaagtatgcctagattgtcttagccagaaagtgtttctttaaaagaccaattactgttcctgcgtgtttgggggagtggggagggcgatgggaaggagagcatcaggaagaacagct

SEQ ID NO: 172584 - DNA, 1787 bp, Homo sapiens
  misc_feature (1180)..(1180): n is a, c, g, or t
  misc_feature (1432)..(1432): n is a, c, g, or t
  misc_feature (1744)..(1744): n is a, c, g, or t
  misc_feature (1770)..(1770): n is a, c, g, or t
accaagaggaagatgggaatacctctggccgctccgggccctccctgtcgctgaagcccctccttcctccgctggccgggtctgcaccgagcaaccctgcagatccagtgggccatggaaaattggattctactcacgaacctggcctggagggcgggggtgggatgggggcgggttaccgggaaggggcgcgagtgcgtgctgtttagccctgtagggagacatgatttccagaagtctttaggaacccagaggccgccgcaagagtcacggaatccgatttcaacctgataatttctaagggactggccacgttcttttattatatggctattgcctcgtaccatatatggcttgaaatcggtagatcattagctagaatttgagaatcctacgacatacggaggttctacagaactaagaatgtaactgtccttaacagggactctccttcagtaaggcgttccactttgtccaaggaaaaggactggcgttacagtagacacctcatagcgcaggagtagaggggagggtgcttcagcattaatattctgcgattttaaaggacttccggaaatgaggggggcgtctcaataatggatttgggcaagtcgtttctttgtgtgtttttctattcctcaagcttaagcaaaaccttaggctcaccgtaaaatcatcctttccaccccttttcagtagcagtgccttcaggtttcatttcctccttcctctgcatatcgatccacaatgcaaattgcaggccctcatcctcacaccaagattcctacacccagctaaagctgtcccagacttcatatccttaactcgagttcacctttttaatcctagaattcaaaggacttatgaactgtgaccatatcttacctagtcagtctcttacacatttttttcaaactgtgcctctgctttttcccccagacccaccgctctgtgcccttatcatgtttttcccttctatttgctaatcccaaaagagtaatttcaagtctcttatccattagctgactaacctgcccataaaaaacgctgttctacttaaattccccggccattcaatgttgtataaccttatgtacaggatgagataatgtttgcaaaagtccattttaaagaaccctcaaagacaggcgccatagatggccacttgcagtgatgtttngttcttccctagctcctgcagatacctaaagatagtccataatctttttgggtctcacttctgcaaattggagttcatacttgcgctatcttttgttgaagaaccctcaagatagttgcaaaaagtattttgaaaagtataaagtgatgggtttaatgtaaatgttttattcaatactactatcctctagactaatttggttgtagttcacattacagtagctgcttcgtaagtgatttttgggctgggcgnggtggcttatgcctgtaatcccagcacttcgggaggccatggtgggtggatcaagagaccgagaccatcctggccaacatggtgaaaaccctgtttctactaaaaatagccgggcgaggttgcattgagccaagatcgcgccactgcactccagcctggcgacagagcgagactccatcttaaaaaaaaaaaaagttatttttgttttgggggcagtggtggcatgcacttgtaatcccagctactagggaagctgaggcaggagaatcgtttgaagccgggaggcagaggttgcagtgagcggagatcacnccattgcgctccagcctgggccacangagcgaaactccatctc

SEQ ID NO: 172585 - DNA, 663 bp, Homo sapiens
tttgagaccttgtgtcaaaaaaaataagaagaagaagaagaagaaaagaaaaccaaatctggattactcttacataactgtcctactccagaattgatcatggcttcctgcttttggggccccaccaggcctattcagccttacttcccgccccctaccacagtcatcttctttattaagcatttagtaaaatggaggatagaatggttaatttaacctttattcagtcttgtcacattcttgagtgatctctgcaagtgttcatgattattgtagcactcagtagctggcaaagatgtaaaaagttagagtgaatatacctggaacatattctgaaaatctgtttgttggcagtggtggatttgtctttgtacctttttacaaattccatcagcgtatttttctcatttgccctttattaaaggcagaggatcggattgcttcattgcagattactggaggttcttgcaagatatgacctctgagttcttcaaggaagaaattcctgttttaattgttgaactatacttcaaagatgatgtaaagaatttgctgaaatatttatgttaaaactcattagacattaaagtctaatttcattgtattgattgtggataatgtggataatttcattgtattggtatctttctttctgtatctagt

SEQ ID NO: 172586 - DNA, 660 bp, Homo sapiens
cttaaaaaattttttttttttaaacaaagacacaagccaggcatggtggctcacacctgtaatctcagcactttgggagcctgaggtgggctgatcatgaggtcaagagattgagaccagcctggccaacatggtgaaaccctgtctctactaaaaatacaaaaattagctgggtgtggtggtgcatgcctgtaatcccagctactcaggagtctgaggcaggagaatcacttgaacccaggaggcaacgtttgcagtgagccgagatcgtgccactgtactccagtctggcgacagagcgagactccatctcaataaaaaaaaaaaaaaagacacaaacatacacattagcctaggcctgcacagggtcaggatcatcaatattactgttttccaccttccacatcttgtcccaccagaaggtcttcggggcaataacatgcatgaagctgtcatctcctgtgataatgatgccttccggaattcctcctgaaggacttgctttatagttaactttttaaaatacataagtagaaggagcacattctaaaataatgataaaaggtacaccatagcaaatacataaaccattaacagagccaaatactatcattatcaagtgttatgtaaggtacataattatatatgctatgcttttat

SEQ ID NO: 172587 - DNA, 474 bp, Homo sapiens
catctccttcccctggggggatcggcgaggtgaagaagtcgtcggtggtctttctcggaatccgtgaccatacttatttgctcaggaagaatgcgtgaatgctggccatctgccaggagccgtgtagctcacgggggttgaacttagagactgagcccacccctgtatgtaagtggcctgaagcttaacagctcttagagatgccaacaggaagggccgtctgggcccaggaggcccatgaatgagaaagcagcctgctctaagcagtcaccatggctgtcatcccagtctctctcccctctctcccttgaccactatgcatgggccacatccacctcctttctgtgctttctacattctgggctcaccatagggctttcgtgcttgctattcccactggcgggaacaccctgaccctctgtgtttaaatgtctcagctgtgacatcacagaaactttgcaatcccctaccccc

SEQ ID NO: 172588 - DNA, 593 bp, Homo sapiens
gagtgcagtgacacaatctcggctcactgcaacctctgcctccagggttcaggccattctcgtgcctcagcctcctaagtagctgggattacaggcacgcaccaccatgccccgctaatttttatatttttagtacagacaaggttttgccatgttggccaggctggtctcgaactcctgacctcaagtgatccacccacctaggcctcccaaagtgctgggattacaggtgtaagccactgcgcccagccacagtcatcatttctaaaacagtgcccaagcaaggggaggtgaaaccaaaaggaaaggctcaaggaatgtttgtgggcttcaaaggataagccactatggcagcaaacctcacacaatgaaaatcaccagtgcctcttattcactattcacaatttgtgccttgctgcctctttttcccatgaatcccttttccctttaaccaacttcctgtgttatgaatcaggcctgtcaatgatatccaagggcactgcttagcactgctagcagaacttcacttattcaacttaataaattctaattatatattcagcattgggccaggtgatgagaatcttaatgct

SEQ ID NO: 172589 - DNA, 353 bp, Homo sapiens
tgagctcggtaccttcctgtactgttctttgagtttgctattaaaatacacaaactattttttaagaaagcacttaaggccaggcgcagcggctcacacctgtaatcccagcaacttgggaggctgaggtgggagaattgcttgaacctgggaggtggaggttgcagtgagccgagatcctccagcctgtgcgacagtgagaccctgtctcaaaaaaatagccaaaaaacaacagttgcatacagtgtttgttttgatggaaacaattattgaaatgaaggctgtctagagtttttaaaatacacttagaaagtagtgatttatttagaagaaaatggctttaatagttgaaa

SEQ ID NO: 172590 - DNA, 142 bp, Homo sapiens
gggacagtgtcttgacatgtaatgaaatgactgtcatttcatcctgccatgtaacttacaatttttatagggattaactactagttagaaaaatgcagcatttgcctagagacctctaggaacccacacaaatgggccacat

SEQ ID NO: 172591 - DNA, 485 bp, Homo sapiens
tgttatttttatttcttgggggtggggagtgtgccttctggtttcattttcctgtcccagtcttcctggcactgaccatggccacgccagaaagaacagggcttggactttggagttagacggccctggggccagatctagctcttgccacctagcagggtaactgcaggtgacttacccatttcctcactgaactggaaaagcacccccagggtattgtgagacacgggctgaacttgggatctgtttccttccatgccacctgaccattccgaatccctgaggctcctgggaggggggtaggagtaagctggggatgtgactgacagcagagagaaggcgggaccaggaaaggccaagttcaaatacagcacagagatttacatcaataccacgcgtgtctcacaatttgaataaggacacgtcaaataccagaagagctttccatggtgggcgtgggggaaggggtaggcctggggaatgga

SEQ ID NO: 172592 - DNA, 293 bp, Homo sapiens
ttcttagtattctttgcagatagaagtccctttgcaaggtacagtttggatataccctctcagataatgccttataatcactgttgtaatagaggtggttgttatgtagttacagtgggggcaaacagttgaatataatagactggtgccagcagattggattaaataggtatgagtacagcacagaagatacggatggctctcttcctctggactacaacaaatggccctagctgcccaccagaactcttctttgcttgcagagctttgggatatgaaggcaagggaatgtt

SEQ ID NO: 172593 - DNA, 176 bp, Homo sapiens
aggccccaacacaggttagcagagcctgggggagaacagacatctgacattctccccctacactgccccattgaggctggctccactggtgacattttcatacctgaggctcgaggatcaagtacgcccattttattattttatttttagagacagggtcttgctatgttttgcaa

SEQ ID NO: 172594 - DNA, 308 bp, Homo sapiens
taaaacccaggctgtttgactcagcctttttcttcttgtctccttaccaatgtggaacacattaagggttagcttagatactgccctattacatgtaaccttgcctaaaatttttaatttttagtatttttccatcctgaattcagaaagcatttaaaaatttttatttatttatttattttttgaaatggagttttgctcttgttgcccaggctggtctcgaactcctgacctctcgtgatccgcctgccttggcctcccaaaatgctgggattataggcgtgagccaccgcgcctggctaattttt

SEQ ID NO: 172595 - DNA, 897 bp, Homo sapiens
cacctaaccaagatgagccaggatggagtcacaccaggcagagcggggggcctcatgccttcttccagtctagctcagagcccctcacagctgcaagattgactggtttttttcccccaatagggtggaactggctttattttgtagttataaagaacataccatggagttggttcttgggagttgtgttctaaaggcaatctattaggcaagaattgtctgtgatcaaaactcccatgtttcattgactctaagatgccattggttgtaagaagcatcatttttaaatgcatcagtaaaaaagaaaacatactgcccttcgaactatgacaaagcacttctgtgattcacactgattttttaaaatgaaaaatatatctgcatcttagaattaatgacatatggtgtttgaaaacccccaagaaggcaccactttggagaccaacacatcttattttcccagaaactctaatagcattttctgcattagtacagactgctgctttagattaggcagcaggctcatgttcaggccatgttgtagagaatcctccagcatagcaagataccatcctccaagagactgaggggatgacagagttgcatcttccatcccaggcttgctgcagggcatctacccatggacaatgggcaaggttgctgctttactgaaatttaactgttatttccttgtcttctctcactcccaagtgcacatttggtaacagaagtctcattagtgaaatgtgggtgctctgactccactgtaggctcattgtgaaaactgaacaatacaaacaaatataaaaaagaatgtagaaaacacctataatcacaccaaagatcatactatcaacatttatgcctagatctttccaattaaaaccctttatatga

SEQ ID NO: 172596 - DNA, 583 bp, Homo sapiens
agagtaagcctgtttctaaaaaacaaacaaaaaaacaaaaccccgtgtcacaatattagttttgagtgcatcaagcagcaagcctcttttgctcagtaacaaaacttttggcttttaaatttagctgctgcagtattttatcttctccttacctgtcatattatttattttcccttctttcattacactttactgtccttttaagcatttctgattttttcttatttttcatctctttgtttccaagtcttacctgggttctctattaagactcttttttcttttccttttcagtttctaagtggcaggcaagggagggtatcaaataaccaggaaaggttgtatgtctttcttcttcccttgagacaaatttgctaccaccctgatggttctccttaataaattttctatcttcttcaatattgattatccaactccactcccaaataaacatatatacttccaatctaggtaactcaattcccaaaacaaaaaatttatctaatgtaacaaacattacattgatgaaatgctgctgctttttcctgtcattcactaaactgtacttttatgaggagcttca

SEQ ID NO: 172597 - DNA, 580 bp, Homo sapiens
tgaagacagactaggagccattctcatctggggtgtgtactgagatcaccacatttctagacccgccaagataggacctctagggaggaaagtactgtgaaggaaatatgcttttttcaaactccacaaatgtttctaatgcacaagaagggttgaaaagtactggcttaagaaaactaaatcaacagtgcccaaaataacccagtggtggcagcagtaaaagtcattacacgacagaccacatgaaaagcatgaactggttctccttgctttcaaattataagtttccctgctacatcccatgaccaagattccctaggacgccaaaaaaggccactactgctactgctacagagctctaagcactaacagtggctccaaagcaaatactagctttaaaaagaaaacagcctccctcttcctgggtaggtgtctggtgcttgaggggtatcggagtggaccaggcttgaggggcacaatgaataaccctataccttccaatttgaaattagaagcaaaaaacgctgctaaaatattaattcacagaattgacttccagaaatgacctgataagattatt

SEQ ID NO: 172598 - DNA, 611 bp, Homo sapiens
gctctgaggcgctcacttcacacttgggaggatccaggccggggcaccatctctgctgagtattcgctctgctccctcgaggagcagtgcctgcctcagcatagtgacttatgtgacactggagcctgtggcccagctccctgccctgttccacggggaggccacttaggaactcaggcagttgtatggtgtggtggcagcaaaccctccaggagtctctgttctcatcgatcccatgtctggagacatcaggaagttgaatctggagcaggacaacccagacttctgcctgtgtcccaccggggcgccctcaggtcctcccaacttgcctggtttgctctgctgtgaactcatccctcattgtccctgggttttcagagaagcagaggtagtttctctttggatttcctgagacagtagctgtgactgcacctccgcagagcttgaaaaggcaaggggatgatgacagcagcgaggggtaatgatgagggtgaggagaagtatgaggtggtgaaactcaagatccccatggacaacaaggaggtcccgggcgaggcgcccgcgccgtccgccgaccgggcgcgtccccacgcgtgccccgactgcggccg

SEQ ID NO: 172599 - DNA, 344 bp, Homo sapiens
taaaattttacccaaatataattaagagaattatcaagcttttaatgtcaggagggcccttagcggatatagtctcccactcccacgtttacaaagatggaattaagctactgacaggttaagccccaagttagctcggcacagacaagaacccaagtctctgactcccactctgtacttcctctctccccatgaaatactgtttgttaaattccttttacgagtatgtatgtttgtgtaggtcttccctgtaagactggctttttgaagttaaacccacagttctgtatatttcctttaatgtattaaatcatacattaaaaacaatttgctaacatcaacag

SEQ ID NO: 172600 - DNA, 490 bp, Homo sapiens
aaaatatccatactacccaaagcaaaatatagattcaatgtaactgctatcaaaatgccaatgacagtcttcacagaaatagagaaaacaatcctaaaatttgtgtggaaccacaaaagaccccaaatagccaaagcaatactgagcagacagaacaaagttggaggcccgtcacgccacctgacttcaaaatatactacaaagccgtaggaagcaaacgtcctagtatttgtataaaaacagacacacggaccaggagagagaaactagaaataagtccacattcacagccaaccgatttttgacaaaggcacaagaacatacattagggacaggacatgctgttcaataaatggagctggctctactactatttggaaggtcattgggctctactttgtcctttgtattgaaaacagtgtgggatcaatgtgtgtgtatgtgatttggttgttgggttggctttgctttttcattttttattttcctt

SEQ ID NO: 172601 - DNA, 539 bp, Homo sapiens
gtaggccggacctccttcaccagcttaagctgtgctagtactaaattgaataaacatttccctctaatttccccttaatgtcctcagaaacacagatgagggatacatcttcatatgactcctcagagcactaaaatgatattaaaacactcttcccacaagaaacgcacagacgagggattcttcagataataggaataagaaatgtgaaataaattagaataaaccatgcagctattttaaatatttactcctggaaaaatagtaagttacacagaatcagttttgggaataacttttccattttcacctttttatgattattgtaataattggaggaattaataaagtaaaaccatctgaataagttcatcccaagctgattctgatggatggtgtggcggatttttaaactctcctctgtcacgggctgctgaacagaaggaaccctgtgaaagttgtgtcatcgtcctcatcagcaaacaagccattgaacctctctcctcctgtcacctgcagccacacctcatccccgagct

SEQ ID NO: 172602 - DNA, 202 bp, Homo sapiens
gaccctcacaaaccctgtgtccttccctagttctctttcctattaaaaataagaacctgggcagaaggcagaagcaggaagcaggcagaagcaggaagcagaagcaggaagcaggttaatggccatagaaaaacagaggtaagaaattcagttaggtcacaattatagtagataacaagatctggaaagcagtagcagtggg

SEQ ID NO: 172603 - DNA, 869 bp, Homo sapiens
tgtagttccagctacttgggtggctgaggcgggaggattacttgagcccaggagtttgatgctgcactgagctatgattgccactgcacttcagcccgggagacagaggaagactctgtatctgttccccccaaaatttagtgattgtatttctttacatcatactgtagagagttgatgtttgtgttcactccactaacctcattccactttcccctgccagtatacttcagaatatctcagatccaattcaaaatttaatcttaaaaggtataattattttcacagtttcatagtttagttttgatcactgaaagcatttctttcattttgtctaatcgaacaaatttatgcaaagaattggggacttattcctcattagtattgttcatctataggtggaaataagttcaagtatgtgttgcagtattaattaaaggcaaagtgacctacttgtactatattctgaataaatacttattgaatgaatgaaaaatagaagagtgactcaattattttagaatcttaagttatacagatttatgtaatgtctattttgatttttattaattaaccatgaatttatcctactctagtattgagaaaaagaaaatggaactatagacccttctttcatatgatacttaggaatgtatctgcactgtatccagaaagtcagttacatgccctgtttaccaattgaattctgcttcactaaggataataataactgacattgagtgcatggcatatgatgggcactgtgcaaattgctttgacatgttttgttcatttaatccacacaatggtcctatgctataaaaacagttaatatctacttttttaatagatgaggaaactgcagctta

SEQ ID NO: 172604 - DNA, 369 bp, Homo sapiens
ccgtgcccggcccgaattttaacactacgctttttagttattgattgtgggtcctttggcaagttgcttaccctttttgagctttaattttctcttttaaggattgcctttaaaaatataagtatttattaggcatctagaataatgtctggaagacactccagacatggaagtcactcaatacgtattacttttgattattattgcctttatgcctttgattttctttctcctattctctttctctagtcacttgccattcattattaggcttggatgaggccatacatttacgatctttgaaaaagatggtttacctcttcttccctcttaatattacgtcatcagtgtgatatatctgccaaaaaa

SEQ ID NO: 172605 - DNA, 336 bp, Homo sapiens
aactaagtaaattctaggataatttctgttgatctgttctcaatttcactgattctatcctctgtcgttcccactctactagtaagtgtaacccgtgaggttttttcttaattttggtgactgtatttttcatttctataatttccacttggttctcttttaaattacttctgtttttggctaagattttctaattttcatttgtttgcagagaatttgtaattgcttcttgaagtgtttatataatagcttctctaaaattcttgttagataattccaacatctgattcattactgattcatgtggattgtcttttcttattaaagttatgattt

SEQ ID NO: 172606 - DNA, 939 bp, Homo sapiens
  misc_feature (787)..(787): n is a, c, g, or t
  misc_feature (798)..(798): n is a, c, g, or t
  misc_feature (819)..(819): n is a, c, g, or t
  misc_feature (825)..(826): n is a, c, g, or t
  misc_feature (834)..(834): n is a, c, g, or t
gattcacggcgaaatgagactgttcgtgagtgatggcgtcccgggttgcttgccggtgctggccgccgccgggagagcccggggcagagcagaggtgctcatcagcactgtaggcccggaagattgtgtggtcccgttcctgacccggcctaaggtccctgtcttgcagctggatagcggcaactacctcttctccactagtgcaatctgccgatatttttttttgttatctggctgggagcaagatgacctcactaaccagtggctggaatgggaagcgacagagctgcagccagctttgtctgctgccctgtactatttagtggtccaaggcaagaagggggaagatgttcttggttcagtgcggagagccctgactcacattgaccacagcttgagtcgtcagaactgtcctttcctggctggggagacagaatctctagccgacattgtttgtggggagccctatacccattactgcaagatcccgcctacctccctgaggagctgagtgccctgcacagctggttccagacactgagtacccaggaaccatgtcagcgagctgcagagactgtactgaaacagcaaggtgtcctggctctccggccttacctccaaaagcagccccagccagcccgctgagggaagggctgtcaccaatgagcctgaggaggaggagctggttaccctatctgaaggaggagattgctatggctgtactgcttgggagaagggctagaaagtttggccccgtggggcccagcagaatccagtggtgctgtgntggcgaaggantgtgtcatcaccagggccccnttgttnnattccccntggacactggtgtgcaagcgagtttgcggtccgcgggaacctttttgtggcacttgtaccaaacgctctggtcccgattatactacgaacggatcgatggccgaa

SEQ ID NO: 172607 - DNA, 767 bp, Homo sapiens
  misc_feature (615)..(615): n is a, c, g, or t
  misc_feature (626)..(626): n is a, c, g, or t
  misc_feature (647)..(647): n is a, c, g, or t
  misc_feature (653)..(654): n is a, c, g, or t
  misc_feature (662)..(662): n is a, c, g, or t
gattcacggcgaaatgagactgttcgtgagtgatggcgtcccgggttgcttgccggtgctggccgccgccgggagagcccggggcagagcagaggtgctcatcagcactgtaggcccggaagattgtgtggtcccgttcctgacccggcctaaggtccctgtcttgcagctggatagcggcaactacctcttctccactagtgcaatctgccgatatttttttttgttatctggctgggagcaagatgacctcactaaccagtggctggaatgggaagcgacagagctgcagccagctttgtctgctgccctgtactatttagtggtccaaggcaagaagggggaagatgttcttggttcagtgcggagagccctgactcacatgtcagcgagctgcagagactgtactgaaacagcaaggtgtcctggctctccggccttacctccaaaagcagccccagccagcccgctgagggaagggctgtcaccaatgagcctgaggaggaggagctggttaccctatctgaaggaggagattgctatggctgtactgcttgggagaagggctagaaagtttggccccgtggggcccagcagaatccagtggtgctgtgntggcgaaggantgtgtcatcaccagggccccnttgttnnattccccntggacactggtgtgcaagcgagtttgcggtccgcgggaacctttttgtggcacttgtaccaaacgctctggtcccgattatactacgaacggatcgatggccgaa

SEQ ID NO: 172608 - DNA, 158 bp, Homo sapiens
gtattaaatgcatgggacaaagttttagttaatgcaaaatttagtttatatcatatttgctccctcatattctcacaaatctaaattgccatgctcttccacagaggcaagaaaaaagtaatgcctaactcgtgggctctaatcatggaggttatggg

SEQ ID NO: 172609 - DNA, 401 bp, Homo sapiens
atcccagctactctggaggctgaggcaagagaattgcttgaacctgggaggcagaggttgcagtgagccaggatcatgccactgcactccagcctgggtgactagagcgaaacttcatctcaaaaaaaaaaaaaagaaaagaaagatcagtagggcttcctggccagagtcaggtctgtcatttagttatcaaagcccagaacttggcttggagcgggggtggctgcctccaaggaaaatctgaaaggagagtagggcagaagcaggcagatgctcatcctgtctctgttcggaatgcccttgagatctgaccctgtgccatcgagggactccaggagcagaagaaagcttcctgtgaccatggccgacctcgtgggccattctgaagccactgagcatca

SEQ ID NO: 172610 - DNA, 552 bp, Homo sapiens
ttatgcttggttctgggaaattcagttctccccctacccagacacacacacacacacacacacacacacacacacacacacacacacactcctgatctaaagctcttggcctatcaagaaaagatggttaggtatctgggcagttgtgtaatacattgtcacaggtatactgtcagaagcttacattggaaagagaaggcacaggagaagagagtggttggggttatctggaggttggagaagctgttctcaaggctttatgacagaagtcatccttgagtgtagtttcaaaagattatattttaaaccaagtgaatgacatctgaaaaacatagctttcttatattcactttaggatattaataaccaatccttttccttaagtagcctcttgactggctaaatgtacctcttcaggttcagagacacattctagaatgttacagttttctcattatgcattgtatctgttccgtgttgaagtacctgtaggaagaaaattaagtacaggttttgtgtgtaggttgagagctgatcctatcaagggtgtgt

SEQ ID NO: 172611 - DNA, 499 bp, Homo sapiens
aaggtggagggtgtcaggagtactgggtgagagtcctggcctgtactcccaaagctgaacccaggggttcagtcccccagatgggctttctgttttttgctccttttgtctctgtttctcatctttgtttctttcggtttttttgtttgtttgtttttgagacaaggttttgctctgttacctaggctggagtgtgatggagcgattgcagctcactgcaacccaaaacttctgagctcaaatgatcctcccgcctcagcctccaaagtgccgagattgcaggtgtgagccaccacgcccagctaatttttatttttatttttgtagaggcaggatctagttatgttgcccaggctggtctccaactcctgacctcaagtgatcctcctacctttgcctcctaaagtgctgggattacaggcatgagccgcggcactcagcctgtttctcatcttcccatggctctgattccttatttgtctctcatctcttatttgtc

SEQ ID NO: 172612 - DNA, 534 bp, Homo sapiens
atcttaactcataatctaagaactgcagctcagtggagtgaagcaagtactgcctttggccatgagataacctggattctggctccagcccaccattaaatggttctctgttcttgggccaggcatttaatcctatgagtcgttgctgcgtcattgcaagaacataatgtaaagttctttcagtgcccagaagttatgtaacagctgtgaggtggttagcatatggtgtagaggttaagaggtctggttttggatccagctaagttcaatttctaccttcatcacttgccttgtaccgttgggcaacttatttgatttctgtgagtcttatatccttatatatgtaaaatagggtcataaacacatttaatgcctaggttgtattgagtgttctatgatatgactcataggaagttctgaatagtgtcttgcttttagtaagggcccataattttagctattactattattatttcttaacaacctcttgtccaaaagctgttattgttaattaaaattatatttattaaaatg

SEQ ID NO: 172613 - DNA, 360 bp, Homo sapiens
agagctttgttgagctagctgttgccgcaaaactgccgggagaatcccactggtttgccttggggaccacaaaaatggtggtcctgggggctgtttgtgtaaatcacctggtattttgtgtgtttcttgcgtgcaacccggcttggccgtgccttcgtggtgggcgccttctccatgcaggcccattttccctccaccaactactacttgtagattcactttatagcgtgcaaaagcggagaaacatctctgtcccctcttttggagggctaagctggtggctgattatatttcctcctaatagaacaaagtaaaaaactgaatcccaaataaagcctgttgattggacaaggcttctca

SEQ ID NO: 172614 - DNA, 216 bp, Homo sapiens
ctgcttctgccaccccaacaagggacaactgagtcagcccatgacaggggcctcccatcctccccttgaacatgtatgtgtacatggttattatcagccagtgtgataataggttttccttctggtccctgcagcaggatagatgctgtcatcagtgagaaatggccctacaggacagtctcggactcaaaggaatacttggtgttggcattttta

SEQ ID NO: 172615 - DNA, 214 bp, Homo sapiens
tttccacttgtcacacagacttcccgctgggtgccctgcaggttcctttccataaacagcatggatttcaaatcaagcagggcacaaggcctctattcaggggccttcaccctgttacaaaaaagcacaaaggtgcaggacagcctcacaatgggcaaacaaatgagcaggccccgcctcctcctccaacacacgtgcacacagtgtctgccca

SEQ ID NO: 172616 - DNA, 689 bp, Homo sapiens
ccaatgtccaatttgtcatccccaacacctacatctgcaatatccccatctcccctaagattcaccatggctatcatcatttccatacactataattggacaacaaaatgaactaaaacaacaataaaacaacagaattatgagatacagcaacaatttcattataccaatacaaatttgcttgactttgatcaccaagcaaattatttaaaactaagtacaactcccattgcatttatacgggacacatccaaatcattatcagaaaaggtgcaaagtgttcattatctgctcctccaggtaaatacaaatacaaatctcgatcattttttaagttcctaagacactgggtttatgttgtgtgtatgcgtgtgtttgtatgtatgtgtgaattgttactaacaactgctaactctgtggaatagaagactaaaggtatttttatttaattctgtaatcccagaacatcatcacaaagtggcctaaattaacacttttgtttagggggaaagtttatgtattcactcaataaatatttactaatagcttataatatgtaggctacagagctgtgtgctagagatgctgtaacgaacagttcagccaggaacctgccctccgctaatggatcctattggagactctatatctctttactctctggtatcagtgttagctcattgtgtttt

SEQ ID NO: 172617 - DNA, 493 bp, Homo sapiens
tgtacaatctcacaccctgtaaagagaaagattgctgatttccaaatattacttttgccttttcctaaggccataacggatgcccatcagaactaaagcccgcacatgcaaataaaataagagacagcttagagggagattcatgattcacccgacattaatcatggagcctccaattctgacacatccaaggtacacagctgagcttatccatctgaactgtttccaatggcagcatcctagatataatgtaattacaatacaaaacatatcaaaaccagagtttcactctgagggccgaaagacaaaaatcaattaaaaaaaaaatctgctgagcttgagaatgtaaactagataaaaggttaacactctgaagtaacatattttatactgtgtcagaggcaattaaattcccagtgattggagatatgtatcagagtttgaatgaactatgtgtaggatttgctttaaaataataaggtgttggggagga

SEQ ID NO: 172618 - DNA, 421 bp, Homo sapiens
gggaaaggaggagaagggggctgttgggcacctggaggaggtggaggaggagaagaagaaaggggtctgggaaaggatccggttcaaattaagttctcaagcgctggtggaaggtttagctacaggtcacggagaagatcagggaagcaacaggacacgcggggcaagggagcgtgaggcttaggagcaattagagggagacaaaaaggttctgctatccgccaaaccttcttcggtctgggccctcccttagcaaacctggggctttatactccctctccaccaatccctgatgaccccggtggtgcctcacaatggacaatgccaagtagcgcccgcatcattccaatgacccctcccccatctcagtctcccacactcctcgcaaggacaggtcctctctggaaccttcacaaacctg

SEQ ID NO: 172619 - DNA, 233 bp, Homo sapiens
ggtgatcgagctggtacagggttgcttggttgcttcccacaacttggcaagagagaatgggctatactccctctccaccaatccctgatgaccccggtggtgcctcacaatggacagtgcctcacaatggacaatgccaagtagcgcccgcatcattccaatgacccctcccccatctcagtctcccacactcctcgcaaggacaggtcctctctggaaccttcacaaacctg

SEQ ID NO: 172620 - DNA, 214 bp, Homo sapiens
gtttccacaagatctcacaagtactttgatgttgatagttcactcagggatagtctaggatgaagattgggaaactcatctttattcatgtaaagagaaatgtaacagccaagcagactagatatttatctaagcaggtgagctcattttcttcccagtaggaacctgttcttgggaaaccaaaacaggatcaaaaggctgctgaatgggttta

SEQ ID NO: 172621 - DNA, 173 bp, Homo sapiens
cacccccaggtgggaacccccagccagcagcccctttcccttcactgaagttctgcttcctgaccctttctcagtgtacgaacccaggccttgaccttcttcccacatctttatttttatttgtttgtttgtttatttatttattttgaggcagcgtcttgctctgttgccta

SEQ ID NO: 172622 - DNA, 398 bp, Homo sapiens
tgccattactataagaactttcaagataatgagggcgccagtatgctcatccttcttgataacaacaaaagctttgggaaccccttgctggatgaaagaagcattctttccccccctctatcagtgtggcatcactcaggtgtctacctggaacagacggaactacctaaagaatggtgtgctgaagtctaccttaaaatctgccatggcccatgaccccctctccccagtgctctctgatcctcgtctggacgccatggaccagtggctcctgagtgtcctggccaccgtggagcagtgcactgaccagtttgggatggacactgtatggtagaagacacaatgcctttctcccacttgtaactctcaataaaaaataagtgaaacttctttttaca

SEQ ID NO: 172623 - DNA, 278 bp, Homo sapiens
tgagtcacaagtctctgtgctaaaaaataaccaatttatatgtttgtttttagtaataaaaacggtaaagacaggtgaccataaagtatgggcacctttttcaatgttatgatctaggaaagaaatagattactatttacatgtagaaactctctgatcatactttatctatacagaaatacaacgatgtttgactgattcatacaacataaaaggggggtcctgactgaaatgaatgtaagtcgtcagtgcaggtgggggtttaaggtagggatctg

SEQ ID NO: 172624 - DNA, 249 bp, Homo sapiens
ttccccttgaaacccagcagaagacaaggatgctcattttcaccacttctattcagcatagtactgaagttctagccagagcaagtaggcaagataaagtaataaaagacatcaaaatagcaagagaggaagtcaaactatttctctttccagatgatatacttctataccaaaaaacgatatagtcactggctccgagataagataacttaagaaaaggctcagcatacaaaattgatgagcaaataa

SEQ ID NO: 172625 - DNA, 220 bp, Homo sapiens
taaactggaagacggtcaattggttggtggcttaggcaactgggtctgtgatgtcatttgctgagattgggcagtgggtcagggggaggtgccaaaatgagctccacttgggacatgttgaggctaagataactgtggagcattctagagagaaatgcaataggctggatatgtgagactgaaggtcaggatggagcctaacaccagaggtagagatttg

SEQ ID NO: 172626 - DNA, 511 bp, Homo sapiens
agaaagagaagagaaacataagacaaaatcaatattttagaaataccaaattagtatttttcaaaacttatgaatatcgatccccatgtttaaaaaactcagaacctcaagcaagagaaacacaagcaaaaccacaagcaggcaaatcctagtaaaactgttgaaaagtgaagagaaaatcttaaaagcatccagaagcaaaaaaaaagacacattaccttccaaaaaacaacaatagaaatgacagctgacttctcaacagaaatgatgaaagctggaagtaatttaataacaactttgaaatgatgaaagaaaaataagacacaatctagaatcttaactcagtaaaatatgcttcaaaaaatatagtgaaataaaaacattttgaagcaaatgagaactgagggcatttgttgccaacaggcctgcgttaaaagaataataaaagacagttattctggtagaagaaaaatgatccaggatggaactataatatgcaggatgaaaagga

SEQ ID NO: 172627 - DNA, 338 bp, Homo sapiens
actccatgcaaatggacaccaaaagcgagcaggtgtagctattcttataccagaaaaaacaaactttaaatcaacagcagtttaaaaagatgaagagagacattatataatgataaaaggactagtccaacaggaaaatatcacaattctaaatatatatgcacctaacactggagatcccaaatttatgaaacaattactattagacctaagtagtgagatagacagcaacacaataatatgggggactttaatacaccactgatagcactaaacaggtcatcaagacagaaagtcaacaaagaaaaactctacctaaatgataccctacaagtgaa

SEQ ID NO: 172628 - DNA, 247 bp, Homo sapiens
ccccccctcccccccgccaccgtcccacccccacagagcagctaagaaagctgtttgatttaacccgtggtttcccaaatactttagaccactaattaattttgttttctgaaacattcgttaatatgttcacagaaaattgtggcattcactttggaaaatatatctgtttaagaacagataatgaatacataacaaatttagaactgtgttaagattccataactaaaaccactctaaactttct

SEQ ID NO: 172629 - DNA, 379 bp, Homo sapiens
ctccctcactggctgtttcttcttaggtgccttggggctcctcttgccctatttgaacatcagtgttgggtgctccaacgctgtagcctcagcctagctcccttcttgtctactttaactttctgagagctctcattgggcttggggctccagaatcatctgtatattgatgactctggctcagacttctccttgagttctcaatatggatagccagctgtctactaggcacctacacttgttttgtttaaatctatgaaacagaaccattaactcctccctcccctttcctcctaattcttcaattctcaaaattgcctgtcttggaatatgactaccatccacccacttaagtgcttgaagacccctccccctcgca

SEQ ID NO: 172630 - DNA, 804 bp, Homo sapiens
acaccccagccctgttgcccagatcacttggtgacccgaagctccgttttctgcactccagataacagagtcagcttcctagctgcttccttcttggactgggcgtccggaggagttcaccctcttcctcagggtgtgtgttcaggagctgtcttggagcatgcacataaattcagctcctggaacttcaaggcataaggaaatgggaccatgcgaaagtcaccatcacatcttaatccgtgactgcgctgcccaacatcgccccgagactaaacttcccctagaagttcagtttcacaaagatagaaaaattatttgggcaaaatgctgctgtccaatctgaatgcttgcttctacgaagccaagaggaggcgcctgcagctcctttgaacggaggaagtcacgtcgcctggtttggaactgaagacaaggaaagagcgagccgtcgagggtgagcacccggagaccatgaccaggatgaccgcaggccctgacagcaaaacatcatcgttgtggtaaaaaagatgcccctcaggagagctgtttcctccctggaatttgggtcgaatagaaaatatttcaccagcgcccacctgagcatttggcaactcagtccccgaccacaaactccatcatcttagaagagaagtccaggcacccaggggctgaacggcagtgcgggctttgacaccacacgagccgccagagaggcggcacactcagccacacacactgtgtacacccacacacctgcacactgcgcacacccacacgcagccagggacactgcacacccacacacct

SEQ ID NO: 172631 - DNA, 247 bp, Homo sapiens
tctagcctcttttataaggcagcagtcacattcatgagggtgaagcccttatgacttaatcactttccaaaagccccaccttttaacactatcacattgggtattaggttccaacatatgaattttggggagacatgcagatcatagcagtgtggaggatcatatgtaatttactttaagtggtttaggtttgcatatgtgtgaaagtgaagcaaatatggcaaaaggttaacagttgttgagtatg

SEQ ID NO: 172632 - DNA, 197 bp, Homo sapiens
gtgccactggcattgagtggctagaggccaggaatgcttctaaacattctacagtgcacaggtcagcccacgacaaaaaaaagaaaaaagtttggcccaagatgtcaatagtgctgaggctgaggaatcgctgagaggtttaagaggttgagcgctctcaaatgtggggaagaagacttatttttcatataatgctt

SEQ ID NO: 172633 - DNA, 318 bp, Homo sapiens
atgtcatgtggatgggcctgtttacgtgatgtgccatggaagggagtggcaggtgggcagcttggagtgaaaagctaagagagtgaggtagctaactgcatctgtacggagaatcctgggtctcttttatggaaaactggaggcccagacctgcgtagctccttgaaggccatgagagcacctcgtccaggagtgggcaaggttgggcatgcagtaatgtaaatggagtagtaaatgtcagctctgactgcagcatttcagttcagctttctaccacactttggaggtatgcagccaactgcacctaaaacccagcca

SEQ ID NO: 172634 - DNA, 468 bp, Homo sapiens
gcaaatgtttattgagtgcctactgtgtgccagaaactattctaggcgcttaggatctagccgtgaacaacagatcgaatcctgctctcaagaaattgcgtcctagcgggaggctggaacccaagactgactgactccaaagtctaggcgccttagggaacagggaagaaggggatgtccctcacctgtgttcaggaccttcttggtaaatgattccaggacttccatgcgcattatgctggtgctgcacctataactcaccaagtccaaatggagtctgtcttcccccactccaccctcccctgcatatcccaatccacattctgttagatctgtgcccaccttacacacagcctttaatttcccaccccaactagtgggataagtgcccataagactccagtttctgtgccattccattttccgtgcagctgccaggaatactgataaagtgaaaatcaatattta

SEQ ID NO: 172635 - DNA, 229 bp, Homo sapiens
taagtgcacctggggactccaggtgtgcaccagggcgagagatgaatttttacttctgcgcttagaagaaggcaggcttggagggtgagtggcatgggcagtagccctgtgagcattctgtggagtgcctaccaggtgccagacattgggctgggatgttacctgtgtctccttgaaccagttttgtgggctaggtattgctattcccattggacaggaaaccagaggc

SEQ ID NO: 172636 - DNA, 339 bp, Homo sapiens
gcagcgacgcacgctgatcgccatcttcaaggagaacaagcggccgtccaaggagatgcaggtcaccatctcgcagcagctcggcttggagctcaacaccgtcagcaacttcttcatgaacgcgcggcgccgctgcatgaaccgctgggctgaggagcccagcacggcccccgggggccccgccggcgccacggccactttctccaaggcctgaggcgccccggccccgcgccctccctgcctccacggcctgggcgctgtgcccccacgtcacctccccacatcctgccggcccggagacccgcccccagggggcacctggagggggtgctatccggg

SEQ ID NO: 172637 - DNA, 435 bp, Homo sapiens
gatatgccactacacatttaaccagtactcgatgtccatgttggttatttctaatttttcaccattataaacaaccctaaagttaatatcctcacatatgtgtttgcatactcgtctgtcaccttaggatacgttttctaaaggtagaactacagctttgaactcctaggctcaagtgatcttccctctcagcctcccaagtagctgagactacaggggggtaccaccaaacctggctaatatttaaattttttatagagatggagtctcattctgttgatcaagctgtttgtgaacccctggcctcaagcaatcgtcctgccttggcctcccaaagtgctgggattataggtgtgagccaccatgcccgccctcttctaattatctgtcatgagatggatctccagtcattgcattgaggtttatgtatttaat

SEQ ID NO: 172638 - DNA, 273 bp, Homo sapiens
ggtgaaactgcgtctctactaaaaatacaaaaattagccgggcgtggtcgtgagcacctgtagtccagctactcaggagactgaggagggagaattgcttgaacctgggaggcagaggttgcagtgagccaagatatcccgccactgcattccagcctatatgacagagtgaggctccgtctccaaagaaaaaagaattaagccccaggaaagtctgaaaggaccagcatcaaaagattccctagccaaggcaacagagtgagaccctgtctc

SEQ ID NO: 172639 - DNA, 328 bp, Homo sapiens
tacctcaccctccagagtaactggaactataggtatacgctaccatgcctggctaattttttttaatttttaatttatttttatttttatttttttcgagacagaatctcgctctattgccaggctggtcttggaataagcaagacgccaactatgaaaaataatgggctgggcacaataacctgtaatcccagcactttgggaggccgaggcgggcagatcacctgaggtcgggggtttgagaccagcctgaccagcatggagaaaccccttctctactaaaaatgcaaaattagccaggtgtggtggcgcatgcctgtaatcccag

SEQ ID NO: 172640 - DNA, 434 bp, Homo sapiens
agcatttttgtactacagcaataatcagctaaaaatacattcacaaagcaaaaaaatcaaaacttttacattgacagaaaacagtttcaaagcactcccaataaaaattccagtggcttttaggaactcaacttattctaaaattagtatgcagccgggcatggtggctcaagcctgtaatcccagcactttgggaggtcgaggcagacggatcacctgaggttagttcgagaccagcctggccaacatggtgaaacctcatctctacttaaaatataaaaattagccgggtgtagtggcacatgcctgtaatcccagctactcaggaggctgaggcggcgaatcacttgaacccaacagccggaggttgcagtgaactgagatcgcgccattgcactcgagcctgggcaacaagagcgaaactccgtcccaga

SEQ ID NO: 172641 - DNA, 508 bp, Homo sapiens
ccccatggaagatgatgcttcctaatatccttaattattctttgaagtgtccacagcataatcttaagtgagctcgtggtcttcactgcactctcaaacctgctcttcctgcagttttctccatccttccagtggcttgggcaagaaactttggggtcatctttgacctctctcacatctcatagtgctctgcagcaaatcctcagtcccacattttgtaagattctccctactttccaggccttctgcaaagcatgaactgcaaaggctcgaggaggaaagaaagcaacactgaactcccttgagtggttagggttttggttcctaaattaaggcacagttttccttttccttgaattaattatctaactcttcctcctagggcagaatcaatgggccaaatggcctcattgagaacatgacatccaaagggagagtggcaggagtcaaagtattattataatgaatagaaataggtgagggagaaagtaatgggatttcattggtg

SEQ ID NO: 172642 - DNA, 173 bp, Homo sapiens
atggaaattcacacaccatccacagcatccattaagcacctccatccaacctcaaaggaagagtctggtgggaggtcaagtcaaatgatgtccctttttcaatgagaatagatcataactattcaaaaatctgcattcaaatgtgctaagaagaatctgggtgggcctggcac

SEQ ID NO: 172643 - DNA, 394 bp, Homo sapiens
ggtaaagactcctgttatccctattttatagatgagaacactgaggcacagagattataccagctgggctagcgagtgaccgggggaagcctccagatccatgcacacaaccgccaggtttatgacacctctagaaatgtggccagtgcccctggggtctatcagcatctcttgctagaccagcagagccctaaaaaagaagacaacagtctcccagcaaaatgttgcaagcagcacaggctcaggaatggacagactggcaggcaagacacagcaagaaggcagcagtctgcacaccaggaggagagtcctcaccacaactcagccctgccacaccctgatcctggactttcagcctccagagctgtgagaaataaatgcctgctgtttcagc

SEQ ID NO: 172644 - DNA, 541 bp, Homo sapiens
taaccacattgaaatgtctgaaataacagacatagaattcagggtctggatggcaaggaagctcaacaataaaatccagaatttggatggcaagcaagctcaatgaaattcaagagaaaattgaaagccaatgcacggaagccagaaaaacaatttaagacttgaacaatgacatggccatattaagaaaaccaaactgaacttccggaattgaaaaattcactatgaaaatttcaaatactgttggaagtcttaacaaaagactagagtaagctgaggaaagaatgtaaaggctcaaagacccagtcagacaaaaataaaaaagaatcaaaaatatgaacaaaaccagcaataaatatgggattacataaagagacaaagcctatgactccttggtattcccgagagagaagaagaaagaataggcaatttggaagacatatttgagaatataatctataaaaaatttccagtcttgctagagaggttgaaatgtaaatttgagaaactcagagaactcctgcaagatactatacaagat

SEQ ID NO: 172645 - DNA, 1027 bp, Homo sapiens
acaagattgtttcaatattaggcaatccattaatatacgatattaataaatatagagataaatcatataattatctccgtagatgctgcaaagacctttaacaaaaatcaacatcttctgataaaagcactcaagaaaataggaattgatgggtattttcttaacatgataaatatatatacacacctttgatgtataggtatatgtatatatacacacacacaccttaaagtcatcatcataatggaaaacaccaaggacatttttactagtaccatcaggagcaaggcaaggatatctagtaattacgctattattcatcatattactgggaatattagccaatacagttaagaggaatcagtagaagtacaacagaacagaagaaataaaactatctctatttgcagatgatatgatagtatatctggaaaaccctagagcagggtttagcaaactgagagccaaatttagccatatatacttggttttgtattgcctctgtcatcttttgcactacaccagcagagttgaacagttgtgataggaactttttggcacacaaaaatgaaatatttacagtctggtgtttttactgaaaagatacagtgtgcggacttctgcactagaaaatcaatggtaaaactaactcaaataataaatcagtaactagtagcctataaaattggcattcagaaattaatattttatatatatatgtatcaataactaccagttagaaaatagagtggtaagggaaaccccaattaaataacaatgaggaagataaaatacttaggaataaatgtaaccagaagtatgtaaaagctatttgagaaaagctttaaaatacttgtgaaagacaatctcaataaaaataccaacatggccttttggctctatgagcagcaccacggcagttggcgagaatgagcgccttatgaaaggtggcagaagggagccaagacgaaagtggctgatctattttctaagaaagattgatataatgtgaaagcacctgctatgt

SEQ ID NO: 172646 - DNA, 486 bp, Homo sapiens
tttttccatgttggtcaggctggtctcgaactcccgacctcagatgatccacccccttcggcctcccaaagtgctgggattacatggtaagccaccgcgcccagcctctatgctttctttcaaagggtacatacaatgcataggatttggagaggtggggaagtgtggagagagaaggtgtttttaagaatttggcatggaaggacaagcacaccttaatcctcttccaggctcaaccaaattccattctgaagtgtttaaaagcaaagctttggaatcagacacacccaggacaccatatggaaactcttgcacagtgctgggcccagaggactgcctcttcccagctttggaatcaattccctgggactcctgggagaccagcacctgacggtcagatagcttatgaggagatttggcccacagagaccataagtgccctcaagcaacaagaaaggtgcacccaaacctgacgactggatctgg

SEQ ID NO: 172647 - DNA, 463 bp, Homo sapiens
ccagccggtccaatgtatgatatgagttggagaagggtccatgtgaacagcagttgaacatgggtcagccttctctgcttcttttctagaagcctcctgcagtgtactgatatctttcttactgcactgatcatagttattctaagtaattgtttactgcttgctttccttgcttcactgctggtacctgaaaaaccagagactgcctgtcttggtcaccattgcatcattattgcctttcatgtggttgacattcaacaaatttgttgaattgaagaatcttgagaaaattgaggttgaattgaatagctcttccaggcacctaactactaattgacagaggtgactgcaaaacctgtggctttaccctattcacaatgactttatgaattaattactctgggcctgggattcttcttccataaaaatggggcagttgtactaagattaagatccttgtttc

SEQ ID NO: 172648 - DNA, 801 bp, Homo sapiens
aggctgcctagattcagggggaggggccgtagcctccatcatctaatgagaggagttttaaaggctatgttttaaagttgatatagtcccattcactgtgtgtggtagagtttgttcaattgtggtaaacttactgttttaaacttagccttcttgaacccttgacaagttgaaaagacagccttctgccctctgagtgaatactgatgatcaaaaataacaccctatactctattccttcttacctgttcattctccgatatagtatttgcaaacagacattttacttgttcaactaacacttcgtggcccctcaatcacttcttaggctttattattgttatttaatataaagaatactgtgatcttgaaaagtagagtttgagaacatcttccatgagttttaacatagaatgaagggcacaggatgtttttcagccatttcatttccaataaatagttatttgacataaagaagcttgtgatagtgccagtttcacctggcagaacacaccatcacacacacaaaaaaatttagcagttggaaaatagcaatttatgattaaacaaccaaactgcctgatttgatgcttttgtgtttccataaagtgagatactttgaagcttctctcctggagacttgtatttatcctcagtataacaggtggtggcgtaaagggttgaaagaaattatttaagcaaatattacaggaaagtggccagaaaactccaaatacaaacatatctgcatctccaaagaagcataatcatttttttaaaagtctaggtgggtttttttgt

SEQ ID NO: 172649 - DNA, 656 bp, Homo sapiens
acaaagaaaatgaaaaaccaagtcccagaccataagaatacatcagcagtacatacaagtgaaaaaggaattatatacatagaaccagaagtataaagaactcttaaaactcaacaataaaacaatctaataaagaacaaaggattttgaacatatttttcaaagaaacagatatggtcatctctctaagcataagtacatgaaaagatgcataaagccattagtcactgtggaaacaaactagaccacaataattttgcactcaactacacacctactagaatgctggaggtagggcgagtattcgcaaagatatgcaggaactagaattctcaacagataaatggataaagtgcagtattattcagataatggactactattcaaaaataaaaaggaaaaaccctttatacatgtaatgacaacatgaacaaagcataataacatgagtaacaaaaaatgccaaacttaaaaaattacatactatatgattccatttatatgaaatcataaaacaggcaaaactagtccatatgacacagaaagatcaatactagcttgagtttagggagggcagcagaatgactgcaaagtaacatgagagaacttttctggaaatatggagatggtctatgttctgaatgacagtggttgta

SEQ ID NO: 172650 - DNA, 657 bp, Homo sapiens
tgacacaaatctgcggtttaacctacattcagtaaagttctgagccacccacaagaaatgtctggggatttaactttgtggatgaaccagaatggcgttagacaaaatcaaccagatacactaagaaaaggcactgggaggccacaacacagtaaaagcagcacaaaactgggggtcagtccgggctccatcagttctcaatagtgggaccctgctttccaaatagtaaggcacaaatgataaggaatgctgcttattaaccaagaggactagcctgggagcaagtatgctaggttgtagccccagctctgccatcggacaagccaactcctcaatctataaaatggggaggagaggccaggcgcagtggcttacacctgtaatcccagcactctgggaggccgaggcaggcagatcatgaggtcaggagattgagaccatcctggccaacatggtgaaaccccacatctactaaaaacacacaaaaaattagctgggtgtggtggcacgcccgtagtcccaactacttaggaggctgaggcaggagaatcacctaagcccaggagtacagtgctgcgatgagctatgattgtgccactccacttcagcctggcagcaaagcaagagctttctcagaaacaaaacaaaccaaaaacc

SEQ ID NO: 172651 - DNA, 521 bp, Homo sapiens
ttgtgcgccctactgtcccccacacctgaggggcactcgggagacagagtactgggggcatgctgttgtcaccacggcctgctggggtcatgtcacagctcagagccttggtccccccagctgtaacgttagcatgagaatggggactctggcagtcgaggaacacccaccctcccgcagcctggctgggcaagtgctggatgggggttgcagtgggaccccaaatcttgatcagatctggggaggggaccctagcactaccttgcaggggggtgagggaccaggggtgggtctccacagaccctactgcagccacaggtgtggagggagtgggctacactggcctaaaactggcctgaagacagctggtgggagaacccggctgttcactggctggaaggacgaggacgtgctgggctgggggccacagaggctgcagctggtggggcagcttcctgcggtcacaacaggtcaacagcacctggagttagtgtttcctctaaagtaaagtatttgagaga

SEQ ID NO: 172652 - DNA, 385 bp, Homo sapiens
ttcagttatctggatttccaggccataaagactatggcttttctccagtaaccctgccacttagctggaccccagagtaaaagcagcacaaagagggaaatcatgccacatcactcccttcctgagtgtggattccccaccagagaatgactgcttctatttactcttcaatgcgttcaggtagttgctttttgttatgacccacattaatagctattatctgtgggaagattgaaccggtagggccttacttagccactcgtggaattgcaagtccgagtaaatgtatttaaacgaagtttggtgctcaatggcatataagcaggacctacaggtggctactcatttgaataaccaaaaaccagtgtagaacctcagtctataa

SEQ ID NO: 172653 - DNA, 180 bp, Homo sapiens
acttcattctaatattttgttactgaaaacagaaatgcaatgaaatgagcttattccttatttgctttacaaattcataataatttggcatttattataaccctgctgccttccccaaacatttgcaattaacccaaaagtaaatttccttggtttacgaaaaactgattttttatccag

SEQ ID NO: 172654 - DNA, 122 bp, Homo sapiens
ctggagtggcttcttcggcacctcttctccttctgggaggctctgacattagtttctcctgtatccttttacaaatccagtgttggggactgatcacctgctggaaaccatggtgagagctg

SEQ ID NO: 172655 - DNA, 177 bp, Homo sapiens
gactcgcaggaagcgagagccgcgcggctcggctcgggctccgactccgactccgattccgactgtcagccccggggcccgcgcaccccggcctgcgggcgcccctgctctcggagacgccctctgcgccgcggggcccgtgtgggcgccgggctccggggaccgctcgggcggccg

SEQ ID NO: 172656 - DNA, 260 bp, Homo sapiens
tagaggatcccccgatgttatccccaacacaagcatctaatcgtagaagaagctgcttcattggtctagctggttttctctcgtgacttataatatgcagaaatagtctggtgtggtttcaggtgtacatgtggaatgcctgcctgcctgcctgattaaagtgaggggtcgttttcagacttttgctgctagaacagctgggtaacacaggtggatcctgtgatcagtatttgaggtttcagtgttgggcgataatttct

SEQ ID NO: 172657 - DNA, 309 bp, Homo sapiens
atgtgggacagggagcaccaacacagacacaggcccagacttggaagatgtaacacccaccatccccagcacacacctgaggaaggcataggcctattttcctttcttttctttttgttttctctcctttttttttttttttttttttttgagacgcagtctcgctctgttgccctggctggagtgcagtggtgtgatctcggctgactgcaacctccgcctcccaggttcaagagattctcctgcctcagcctcccgagtagttgggactacaggcgcccgccaccacgccctgctaattttttattt

SEQ ID NO: 172658 - DNA, 512 bp, Homo sapiens
ggaagaggaatattaccaccctggggtagacataccctaaggtgacccacactgagtccacccttgtgtaatcccctccccttgagtgtgggtgggtttttaaccaatagaatatttcaagggtgatgagctattactctcatgaccaccttacattttcaggactatgtcttatcaggttgaaaacagtctcttgctggccttgaaaagcaaaccgtcatgtgctaactgcctatagatagggagacggccatgtggcaaatagctttgggtggcctctagcaccaggggcagtctctatctaatagccagtaaaaaaaaaaaaaaaaaaaaatggggccctcagtcatgcagctacaaggaaatgtattcttccaacaggctgaatgagctggaatgaacttggacgcttctcccattcaagcctccagatgagaacacagcctagtggacaccttgatggcaaccttgtgtgatcctgatcagaagacccagttaatacaatctcatta

SEQ ID NO: 172659 - DNA, 428 bp, Homo sapiens
gcatggctaattttattatttgtagagatgaggtctcaccatgattgccaggctagtcttgaactcctagactcacgcaatccacgcgagctttgcctcccaaagtgctgggattaccttcgtgggcttattgaccatttgtacatcttctttggagaaatgtctattcaaattatttgcccattttttaatctggttatttgttttgtttttgagttttagacattctttgcatattctgtatataaatcccttgttagatacatgatttgcaagtattttttcctgttctctgggtttcctttttctctcttgatagggccctttgatgtacaaaagttaaagtttgatgaagtttttcattttttgcctgtgcttttggtgtcatatccaagaaatcattgttaactcaggccttgtgaagcttt

SEQ ID NO: 172660 - DNA, 370 bp, Homo sapiens
gatattttcactgaatataaaactatggattgatggttgttattttattgttccattttctcctggtctccgtagttttgggtaggaagtcagtaattaattgaattgtagttcccccatatataaagtgtcatatttttctctttttgtcaagatttttctctttatacttggctttcaacagtttgactattatgcacttcattgtgttcttaatgtttattatcctgcttggtgtttttaaatactatataaatttaatcaaatttggaaaaaaacttgcatagaaaatatctgcagatattttctatgagatggatgaggtagaaggtgaaactttgccatcatcctctacaacattggataattt

SEQ ID NO: 172661 - DNA, 304 bp, Homo sapiens
tctgttcaggcagcccaccttgtccagagttattggccgttattctgaggcagctatggaaggagagccagattcctgctttattcctagtgttgagcattgcaaagctgctgctgctgcagccctaagaaccaacttcaggcttctgagcgcaagacaagaagatgtcatcctgcctttgagtttttcagagggacagtagtgcttattgtttgataagttaatatgtatttgaggtgtttaggcattaagttttcttattttgcttttttcgttgttgtttttgagacggtgtctcgctcta

SEQ ID NO: 172662 - DNA, 285 bp, Homo sapiens
ccatagctggtttctccctccttttctctcaactttgctgcccttggactgtaagtacatctttcttctcagtgcccacgcttgctggggatgtagcagcctcctctcacatcaggccaggcttgtcctgtccctggcacatccgtgcttgtttcctctgtcttcatcctccctcatcatctaagtcctctgcatcatacaccccagttcaaatcccacctccaacaccacgtcttcctcctctatgccagaattcacttctcatgagggggcttctgggtgctg

SEQ ID NO: 172663 - DNA, 426 bp, Homo sapiens
gttgagtgagaactgtctgccaagggagcgtaggaaagatctgccctggcttccgagtgcctagggtcaggtcctggctcttccacttactagcaacctctttacttccccatcctccacttcctcatctgtgaaatgggatggtcatagatccctacattgtaggattacatgagtaaataaaatgctatgtacttataaaacaataacttactgttcaggcactgacttctgaattttcttggaggacagttcccacattttgtgactctgcttttgtcactctgctggtcatgacagctgcctttctctgctcatttgatattttctaccagtataaaaacagatcacaccactgcactccagcctgggcgacagatcgagactctgtctccaaaaacaaaaggaaatcattccagataaagc

SEQ ID NO: 172664 - DNA, 328 bp, Homo sapiens
cagtctgtagagtgaaccaaaatggctatacctgagaaggtgacctttgtgttgggaaatgaaagctgagagagatgtcgtcagatggaagagaggaggtattccagatgaatggaaaagcatttggacacaccaaagaacgacaggggcaagttttataagtttgtactcttaatattcatggcacagagtaggtattttctcaatgaatgaataaaatgggatttcacattgcaaaaatgtcattgtcttcattatttaaagtcctgttagggtagcaatataattaatcattcatggttggccctaagctggaaatagaccttgt

SEQ ID NO: 172665 - DNA, 432 bp, Homo sapiens
tttgtggccctgagtgcccctccagtggttgttccctctgctcctgattgttccctctgctccttatgggtgtgctgtcttacccatcccccattgcctgggaatctaggcagtgagcaggggcagtcagggagctctcagggattgttgtcttgggcagcctgatgtccaggatctgaaaactgtcgttgcctacgtttcatcacatttgttagttgtttcaggcaggaagacaatgcttagttctcccatctcagccagaagtggaagtcctttccccatggggacatttctgacagtccatgtctgtgtcagagctcttctcaggcccagctggagtggatgggtgcatttcttagtagccccacagctgtttgtgggcacagtggaaatagagaaaacaatgtggatgggtaggacttctggttatta

SEQ ID NO: 172666 - DNA, 154 bp, Homo sapiens
agcactgggtctgaagtttgagccatgtcagccaagggttagagctggacacagaagccactatagggatctcaagtagaaagggatttaatacaggaaattctgtatttacaaaatccttgcaagaaaaaaatctggcagtctaaaaaaaaaa

SEQ ID NO: 172667 - DNA, 1577 bp, Homo sapiens
caaccctccaaatgactcccacctcctcccaggaacgtactgctaaaacgtgccttgatcttacatactttctaagtgtatttttgacttcccagtagccattgctctcactgtcatgtatcagatgtgccagtactttctctcagatggggccctctcctgatggtaaatcctcagtcatattacatgtaattcggttaccactaggactctgctatattgctcttctggacagttcccattgaagcttctggtcttcaatgtttatgctcttatacgtaaattggagtttttagtcatttcatctccttataatgctgtggggtcagctatggacgattttatttgctctttttcttggcctgtatggtttttatgaggtgggaggagaggaagtagaaattagaggatcgtgggccgggcgcggtggctgacgcctgtaatcccagcactttgggcggccgaggcgggtagatcacgaggtcaagagttcgagaccagcctggccaacatggtgaaacccgtctctactaagaatacaaaaattagctgggcatggtggcacatgcctgcaatcccagctactcggaaggctgaggcaggagaatctcttgaacccgggaggcggaggttagagtgagcccagatcatgccactgcactccagcctgggtgacagagcaagacactgtcttgaaaaaacaacaaaacaaacccaaattagaggatggccattaacctataggggacttaatctgtgttttttatgtgctatgcttgaaaatatttgtgtttgctttaaaataatttgcaattcaggttttgtataattggataattggttatacttctgttttaccccattgttctctcttcaaactctcttggaagtatttgtcatggaaataactatgaggttatattttatagctgtctgtcaatcatgtgtgtaatccttgttttgcagatttctactcttatcaagcaggaatctgaaatgccactttaatgttctttcttcaagtgacataatttcatgctacaaagtaaatgaaatataaaatctggcacattttatgatacatttacaagagtataatattcagaaagtggatggtgattgttgcactcaatttgcttgctagtaagaccatatatgtaattttcacttctgtgtccaaaacttccaaagataaagaccaatgacgccctaatgcttgtactccacaaaaatattggtgtaaaattccttacagatctttcttgtcttttttattctgagactgagtatttattacctttataatattaagatgctttttgtgtgtgtgtgtgaaatactaacgccaaaattttttttaatggcttatttggaaaaataaaaatttagcaattccatttcggttcccccgtttgtttttttgaaaccctattagttttttaaatatacggtgcttctttggcagcacatatactaaaattggaacaatacaaagaagattattagcatggcccttgcacaaggatgacatgtaaattcatgaaatattccatgttttcttaaatataaaaaaaata

SEQ ID NO: 172668 - DNA, 195 bp, Homo sapiens
ccccagggaggcacacaccagggcagggctaggagacactcagcctcagtagccactttccagtcaagggcctggggtcacagaaacctcagggctccttcctgtaagtcggggtggttctcagcagcaagctttcactttccatgcctggctgggacagctgggtattgagactgaagagacagcccacctctc

SEQ ID NO: 172669 - DNA, 179 bp, Homo sapiens
ggagacttgtgcaatcacagattactgggcctcacccagagtttctgattctgcaggtttggaagggcctgagaatttgccttttcaacaagttccaggtgatgctggtaatgctggcctgggaactacattttgggaactattgcattgtagcaatccaataaaattagaatagcaag

SEQ ID NO: 172670 - DNA, 520 bp, Homo sapiens
gagttaagaactaaaaaatgtcaccactgagttagaaactgttagaaggctagtgctggatatctggttaaactcgtccgatacactgcagcaagactaaaagacaaaaagaaaaaggtgtgtatctatgcaaatttcgctaatatggagatagaatttcactaatacggacatagggactgagagaatcatttgacttattataaactttaaaacataattgggttctaattcataaagaatgtcatttccattagacctgtattacaaaaaagaaaaaaaaagtcatcctaaatcttaacgtacacacgctttatcaaaagaatttccgtacccagaaatcaaaggcacttcaaaagtctcatttcgtatcttgagtttgttttaacatattcctcccgcaaaaacgctctggaaatcaaagaaaacttttttaaaatttaattcaataaaaatgacaccgactggctgaattatgatgggttctgagtggcggttgaaataacacatttttcctcta

SEQ ID NO: 172671 - DNA, 521 bp, Homo sapiens
atgagccaccgcgcccggacaacacagtgttttaaaccaatgctgggataaagcatccaggctcttaggtccctggaactcaatggctgacagtcttgctttcagtttttcctctgaaatgaggcaccatttattcatgcagtgtgttgtggcaccacaaggactggcctcaggggccagacactgagagggagtaggagggagaagtaggccaacacacccaggcactctctaaaatcaggcagagcaactgccagttataggcgagttgcattttatggtagaattaaaaaagttctctctctctctctcttactcccttcctcctccgtccacatctctgtcctttgtccaaaatttgccatctgactattatgcagactcttctcaaatttccactggaagacggtgcgttggcccaactgagccaacgcaccgtacggacaggattgacagattgatagctctttctcgattccgtgggtgacggtgcgttggcccaacacggtgcgttggcccaa

SEQ ID NO: 172672 - DNA, 639 bp, Homo sapiens
atagaataaaaaatagcatgcagaagaatgagtacttcataagacagttctagtgtccccaaatcatatgaaattatgaacacctacttaactcagtcatcaaagaaatgcatatttaaaacacagtgagaaactactgtacaatcagtggaaaaatgaaaattttaattccaagtgttggtaagaatgtagaataagtaaaaccctctaatactactgttggagcataaatctgtacaaccttgtgaccagcaaatccattcttgggtataagcccagcaggactgagtatgcatgttcaccaaaagacatgtgcaagaatgttgatagcatcagcattcataatagttccaagctaaaaacaacccaaatgtctgtcagcagtgcaatgtataaataaatggtggcatattcataaagtgaaatattgtactgcaaataaatgaaagaaccattgctttatacaataacatgaatgaatttcgcaaacacaatcttaagggagagaaaccagatgcaagagagtatgtattatatacatttatataaattatgtaagtttcagaaacaggcaaaactaatcaatgatattagaaatcagcatattatttacttgaaggaggatttgggtaatgatgg

SEQ ID NO: 172673 - DNA, 354 bp, Homo sapiens
ctctgggatccttttccagatggtttcttccttttagtggaaggttttccatttgaatgatcaaataagggaactgactacgtaagcagaggagggttagcctaagtggagaaatgaatggcttacaacaacgatttctagacttcaggcattctcctcagcattcataaattttaccatgatcaatgacttgatatttttaactgactccattttttttgctttaatgcattattcaaaagaaaatgcttacatcacttccataaatggaagttgaccttctttcgctatacaaagatgcaaacctgaaaattaactccatgaacatcatcctaaaattctagccagatatgg

SEQ ID NO: 172674 - DNA, 271 bp, Homo sapiens
gagctcggtaccgcttctgcttctgaccttcctcttcctccatagccaagtctgagagcttgaagccttggccccgccttgggcctcctcgcagccctctccctcacctaagaccctgcctcaccgagaccctgcctccaaaaagaaaaaaaaaaaatcctgaaagataagaaaatcttgaaagtagtaagagaaaaatggctcatcatgcccaaggatattccaataagattagtggctgactgctcatcaggaataatggaaggcagaa

SEQ ID NO: 172675 - DNA, 292 bp, Homo sapiens
tgactaagctttgcagagaaatatcatcttcccaacccaatgattagaaaacatctgaaaatctcaaatgcacatatggatgtatccgtgccggtgttaaagaaattgcagtgataaaatgagaaaacacggtttccttgatctgaagtattgatttttaattattttcggcccagagctgaaggtggcagaagagtagcccaggagccgagggctcggtgctggcgcggacgccttcccagcctgcggggtgtgcacagggcgcttacccactcagagtagaacctgggag

SEQ ID NO: 172676 - DNA, 165 bp, Homo sapiens
tctctacaaaaaatacaaaaattagctgggtgaggtggtgtgtgcctgtagtcccagctactcaggaggctgaggtgggaggactgcttgagcctaagaggttgaggttgtctgccactgcactccagggtttagggtagaagaagcaggagttcctgttgattg

SEQ ID NO: 172677 - DNA, 622 bp, Homo sapiens
agccaacaggacatgggctgaccctgcctgtggctactttacactcttacccgtaaatgtttgaaacgaccttgccgttcaaatatttcaaacttgaaacagactttgtatacttgggggttatcacctgtctgaaggtgaaaggtgggagctcaatctagtcttaatttgcatgtattttattatgaacaaggctcagcatctcttcacctgaagcacagacacctacattgatcagggagtgaaggggtcagagagaagaatgccaattatagttaattcacctcatctgccagggatggtccattcaggaccatcaatcagacaaatgcccaaacaggacacgaagacaatcccaatgagccaaactagccagctaccctccaattagctcaagaactgttctcgaaaaactgaaaggcaacaaagtcccataggaattaaaaacgacttaactacactctgcacacactgtaaggaacaatgtgttcttgtaatcttgtgccccccactcgctcctcttgtaactgccttccagccattcatgccaccatcctctctctccttatcttgcattgaaagaacaatacagtggacaaaaagctaaattaacttataaaaa

SEQ ID NO: 172678 - DNA, 271 bp, Homo sapiens
tgttggccattcgtatatcttctttagataattatctattcaagtcctttgcctatttaacaaattgaaccatttattattgttgagttgctggagttctttattctattatacatattatatccacatatactgatgtcatatcacatatgtgatttgcagacatcttctcccattctttgagttgttgttccactgtcttgagggtgactttttttttttgagatggagtctccctctgtcgcccaggctggagtgcagtggcacaatc

SEQ ID NO: 172679 - DNA, 460 bp, Homo sapiens
ccggatacctttgattgtggagcccagttactggaacacaagctttcgcctgggttaatgctgtctgagggctgagtttaaacattggcttctcagctctggaattattctgcctgattaaaaacaaaaataagtttgcattggcaatataagttagttagatagcccatgttagtgccacccatgatgataaactaggccagacattctagtagtatcgcgactgggagagaagatgtagaaaacaagttggtgggcaattttcccccgatgtcttctttgttcacctttatatttcaaagtgagttggaaggagatgccagaaacagaaagggaggtggattaggaacccttcggtaatatttctttataaaatgaggaattactgcatgctaagttgtgatgctaacaatagatgttaacaagaataatgcaagtaaaataactggcagtaaagtaa

SEQ ID NO: 172680 - DNA, 415 bp, Homo sapiens
caagccttctgcttaggagttgataaaccagaactagccatccactgtcctctggaaatttcttcacagctgagactctccaggacctttgtaaaacttcaccttgggcaggcgcggtagctcatgcctgtaatcccggcactttgggaggctgaggcaggcggatcatgaggtcaagagttggagaccagcctggccaacatggtgaaaccctgtctctactaaaaatacaaaaattagctgggcgttgcggcacgtgcaaggatcaagttgctggtgaatgtattatagaaaaacagggcagaatccacccagatttacagccacacaactctgggtctgaaccttccctgtctcgacagcgacggcaaaagaggagagaacagactgagcacagaggggaaaagagacaggt

SEQ ID NO: 172681 - DNA, 775 bp, Homo sapiens
ggccaacacagcagccattcaagcaatcctatacaaccgatatcgccgatacggggccgcgggaggtgggtgcttctcggcggcgagctgcgactcggagagactcctgtccgcaggtgcatggcttccgggcgggcctcgggcagcgagctccagccccactgagaggccgcggaccgcctggggacttgtgtttgtgtgtattttaagccaacagcccagaaagggaaggcgactggcccccggtcttcgccagtgtttcccggccgggttactggtggtcaggagggaagccaggaggctgccgggctccgaggccgattccttgcgaaccatctccgttaaagactccgcgccgggcagcccgggactccggcggtacccgcgcaaactttgtcccagcgccttggctcaccgtgaatgccctgccttgaaaatttggagttttttgtttcctgaaagtggtctgcttttccgattttatctgtgttttccatttttaccttcttattgtcaatttgttttcaggcattattaattcaacaaatctttgtactgccccttaccacgtgtcgatggttccgtggtttggtggaaatagatcgcgctttgaagtcaagacggatcggccatggaattttggctctgagatcctctgtgtaaccgtggatgagctacaaggcctgctgagcctccatttgtctggttttgtggttgttttaatttatctttttccatttgaagttgtgggttttgcataaaattgaactgttac

SEQ ID NO: 172682 - DNA, 205 bp, Homo sapiens
tggtgtatgtgtaccatatttgttccatattatgtttatgagatctacttatgtctttgtacatagttgtataacacaatgtggctataccatagtttattcattgtactcgttttctgttttgggctgttagaaatcgtgctgccatgaatcttcttagacatgtctttggtgaatgtatgcacatgtttctgttaggtgtata

SEQ ID NO: 172683 - DNA, 146 bp, Homo sapiens
gtattcaacattaaattcaatttatttcacattaatgtttgcaaatacatcatcaattcttacatatttcaaatcaacttcaagtacagaaggcttcctctcaaataagtctcctgaggtgacataaagactgaaagaagcctatg

SEQ ID NO: 172684 - DNA, 431 bp, Homo sapiens
actaagggaacagagatgaagaagacattggttcccccaggaagagaggcgggaaggtggaaggaagcaggaaaaggcagataggcctagaatcagactcactacttgagatgggatgaaggtgaagaccctccctgacaaaagagtagtaagcaatagcagacaattctacctttaccgttggtgaggaacacaacaaaaaacaaaaccaaaaatacatttgggccattgttttcattctcctgctcctatgccttcaactaggagcttgtcacagctgataataagcaaaggggacatggagggggttcatctcaccttactagatattctctgatgaaaatctttacaaggagctaggaaaagcaaaatatagttggtcctccatatccatgggttccatatccatggattcaaccaactgtggatca

SEQ ID NO: 172685 - DNA, 252 bp, Homo sapiens
ctgtattcttcgttgattgtgaacctttgtggtagagactggggaggacagtaccagctccaaaacaaattgttccccaggggaccgaccatccatgtaggtaggcaaaacaagatggtaaaataagatggttaagagacagtgcaccgcagtgtgtgttcagcgttaggtggaataaggaagaaatccctgtggatcgggaaaatttcacaaaagacgaatggaactgatgatcaaggaatcgacctttta

SEQ ID NO: 172686 - DNA, 289 bp, Homo sapiens
tgtgaagaactagtccatgagtctcatcatcctcaaattaaggaagctctgaatgtgatttgtgtttccttaaagtttactaataaaacagtagcccacgtagcttgtaacatgcttcacatgctggttcattatgtacctagacttcagatttaccagcctgattctcccttgaaaattattcaaatcctaatagctaccatcacccatcttttaccaagtacagaggcttcatcttatgaaatggacaagagggtaatttaaattttgtttgatgattagtatgtgg

SEQ ID NO: 172687 - DNA, 279 bp, Homo sapiens
tccatgccaggcactgtgctatgccttttacatactttatctcttttagtccgctgagtgtcgctaggagctggacatctgttattatctcatttccctgaggtgttgagtagttaagtaactttcccaaggccacaccatggtttcaaagcctgtagtggcattcaggtgttttggactcgcctgaggcctagcaagcttggggaagatggaaggcaaaagttggggaggggtggctttggtatccctcctgcgtttgctgttggtaaggccagtgac

SEQ ID NO: 172688 - DNA, 148 bp, Homo sapiens
aatcccgtcaagcaaattgtgtgtcatagaaagtcttaggacagccgtgtatattttctcccccaatgaatcaattgaaaatgagaagctcttaccgccatgttccgggcagaagctatcaaaagtataagccatgatattataattt

SEQ ID NO: 172689 - DNA, 700 bp, Homo sapiens
ctactaaaagtcatcttggtgcgccatgccaggtaccttgctccagtcaatagagattttcttttgaaggtaagcaatttagagaatgaatttgctctgccgtctggttggaggatgggtgccaaggttagatctttaaggaaataatcttattagtccctcttattaaggaagcctctgcagtgagtagactttgaacctgcctgataaaaagtaggtcttgtcaaacagctcacagctcctagtgaaaaggttgaactttgttggtttagatcatccaatccaaatgcaaacatgtttctaagcttctgtttgcatactctgggagaaaaagaagacttccttttttttccttgactctgacactaatagtattctgaggcgatggcagctcccatggaaattactaaatcacggtgttagtggcgcatacagaaaggcagaagtttccagtgtaacttgaaatgtaaagcttccaattgtcactgtttgggtccttttatttctttaaatcttcatttttttccccttaacggaacttggtctccccatttcgccaccattacatgtccatactaaccccatctggaagctgtaaggctgaaattttgacagctttgtcattttcatagctgtgaaggttgatgttgagcttacaggattattgctctccaggaatacttcactttaacttcaggaa

SEQ ID NO: 172690 - DNA, 525 bp, Homo sapiens
tacgcattcaagcctaacaccctgcctctttctctcacccctaccacccacacgtttatctaagaattctttgctgctaattcacaaacactaaaaaagactttttgaaaaggattaaaaaccatgttgtgttaagcagcaaactgatgttacatcctgggcacgaggaaaatctgtgtgttagactgtgcctagcatttaggtgccatctgcaattgttcggctgtttgcattttcatggttccttttgacagtagttccaaacagctcctaatttttgttcacagagataagtgctaaggattttagtacagtgctcctggctgtcatatttctaaaaaaatcaagtcagcagctggtggcaaataaaccagtgctctctctttcactacctgtaacttggtatgattgtaattgttaataactggtgaaaatacagggataagctggctgtgagccacccagcagaggtggactcagccttgcaaaggaagctctttgaagggagggatactgttctagtca

SEQ ID NO: 172691 - DNA, 478 bp, Homo sapiens
cacaacttagctttaaaaatatttacagtaactacctcaagttgcatatacttctgatccttttccacaaaagtagtttgtataacaacaaaatgagaagggacacagtccgtattccagaggagagaattaacctcttcttacctcaatgttccctgacatcaagggggataataatatctaactcagaattatggggaagactaaatgagataatccctggcacttagaatggtgctagacaaaaagtaagtgtttagtgaaagttattattaatataaaattagaaagattaaaatttgcatgggccacagtggctcacgcctgtaatccaacactttgggaggacgagatgggaggattgcttgagtccaggaatttgagaccagccttggcaacatggtgaaaccccatctctacaaaaattacaacaattagctggatgtggtggtgcacgtctatagtcctagttactcaa

SEQ ID NO: 172692 - DNA, 152 bp, Homo sapiens
tggagattaggtgctatatttagatacagaacatgcctctgacacttgggggttgaatgtatctagactggaagaaaacttccatcagcatattcaacgaacaaaatgtaagtacttatattatccaaaacacaagagaaatggataacagg

SEQ ID NO: 172693 - DNA, 671 bp, Homo sapiens
ctcaccctgccacccaggccagagtgcattggcatgatctcggctcactgcaacctcccgggttcaagcaatttgtgcctcagctcccaaccacttgggaggctgaggtggaaggattgattgagcccaggggtttgaggctacagtcagctatgattgcgccactgcattccagcctcgggaacagagtgagactttgtctctaaatatatacaagtcactaaacaaaccactacaacccacagcaagtaacaaaaaccctgaggagtgaagaatctggtttccagagttaatagtaaagtaatattcagctttcaacaaaaaactgtgaagcatgcaaagaaagtatagcccactcagaaaaaattagaataaactatctgaggaagcatagacattggactttaagacaaaatttgtaaatcaactgtctcaaaagtgctcaaagagctaagggaatacagggaaacaatgtctcatagagattgtcaaagaaattataaaaaggaaccataaaaattagctgaaaagtgcaataaaaaaaagggggaaaaaatggttctaatagcagatatggccagacagtagaaagaatcagtgaagctgaaggtagatcaattgaaattatccatctgaggagcagaagaacaaaggaaagaagcaatttaaga

SEQ ID NO: 172694 - DNA, 409 bp, Homo sapiens
aagagagtaacttatagttctacaataggaataagaccttgccttctcagtagtttctattggtgtttaataccttgaatgtgggcaccactgagccaaagaaactccttcagacaagggtgttgtctcactatgctgttcacagttgaagcaatgaaggcaaacatatctggccaattcaggtcaggcagtgatttgactcattgctggaagactgtgatcagtctttttcagccaatgcccctggtatctttgagatgctagggtggaagtggctgggagaaatcacaccacacccaggtggaggtgcaccaggtgcatcacttctgggcctcctccccaggacctgccgtgcacaagcgctttcctgctagagttataccaatcacaggcatatctcaatatgaga

SEQ ID NO: 172695 - DNA, 302 bp, Homo sapiens
cataaatcagacaggatctccctctgttgcacaggtgagtgcagatgagctatctcagctcatgcaacctctgcctcctggatcaagcaatcctcccacctcagctcctccaacagcaatacggtggggttaccactgatctagctaccctatggaatttattcaccctgttaatgagtggctaagatttaataatcttaactaaagttcccaatttcctaatggactcaacacaaaacatttgaaagctaatttcagtgaccctagtttttggtatgatgtagtattaaaatgcaggtcta

SEQ ID NO: 172696 - DNA, 891 bp, Homo sapiens
aacaggattggatggaaatctgcattccttgatcactcagtctatagggtgaacttacaatggccctcatgcttaatcttgaaatacagggatggtctgatggagtgtgctggagaccctgctgagatctttggacaactcctctccagtccactacctgaatcctttctcttctcctcaaaaaaatctgagactatccaaatgaagagtaaataaagggagaagtaagaaggaaacatgagacagagaggcagcaggagcagaatgaaacttggggagcagagggagaagccaagaaaacttactggacttggagccaataaattggccatggcatgaaggtttctgccagcaatatggcagcccattccagctctttccattttcttttcccagctgtgctgccaagcaccatgcttaggctggtttaacagagattatgctaggaggattttctaacattcatgtcctgattaccccttatctgattccttagcagtagccttcagtggcctcagagaattccaggttcagctgtctgaacagttcaatgactgtttgtaagttctgacttacgatcaaggcaggaaatgtgaaaagcatttttaaaaaggaaaaaaaccatccggcgttgttaacatttttgttattccagtattttcccatgcatataaatatgtgtacttcttttatttttcacaagagtactctcacaccataatattgttttataaccctcttttccactgtgctctagtgtaaacattttactgtaccaaatctttttccacaaaaggatttttaattactgcatagatttctattgaacggatgtactaaaatttacctaaacagctcttattattcaacatgattcaaccattgttacaa

SEQ ID NO: 172697 - DNA, 502 bp, Homo sapiens
agatggagtctctctctgttgcccaggttggagtgcagtggcatggtcccgggtcactgcaacctccacctcctgggttcaagtgattcccttgcctcagcctcctgagtagctgggactacaggtgcatgccaccacgcctggctaatttttgtatttttagtagagacggggttttaccatgttggccaggatggtctcgacctcctgaccttgtgatccacccaccttagcctcccaaagtgttgggattgcaggcatgagccaccatgcctggcccatttaacttctatattattttcctgttggtggatttaccagtgcaaactgagcagcttaaaacaccatccagttattatctgtttccatgagccaaggctctgggcagggtttaactgggtcttctattccgggtcacaatactgcaaccagagtgtcagctggggtctcatcagatgctcagtgtcctcttccaagcttattcagtttgtggactgaattc

SEQ ID NO: 172698 - DNA, 225 bp, Homo sapiens
gtagcagaatgttttctgtttttttctctcgattttcccttcttttatttattcatttatttgtttgtttttttgagacagtctgactcttgtcacccaggctggagtgtagtggcacagtctcagctcactgaaaccgctgccttgaggtagggattcaagtgattctcctgcttcagccacccgagtagctgggatcacaggcgtgccccaccacacccagct

SEQ ID NO: 172699 - DNA, 342 bp, Homo sapiens
cccatagaccatttcaagtaggatgaaacttgttcttattccttgctgttttcattctcagtgtaaactgtattctcaaagctgtagatttcacatagaattcacaatgtagagcagagtttctcagccttggcactgctagcatctgggccagataattctttgttgtggagggttgtcctttgttgtaggatgttaacggcatccccaactagatcccagtagatctacccactagatcccagtagtatccccagttgtgactaccaaaaatgtctttagatgttgccaaatgtcctgacagaatgcaaaatcacccccagttgagatggattttcacca

SEQ ID NO: 172700 - DNA, 538 bp, Homo sapiens
tcattctgtcttgcctgccaccatgtaagatgtgccttttgccttctgccatgattgtggaggccaccccagccacgtggaactaaacaggatctcactttgtcacccaggctggagtgcagtggcatgaacacagctcactgcagcctctacctcctgggctcaaacaatcctcccacctcagcctcccaagcagatgggaccacagggatggggttttgccatgcccaggatggtcccgaactcctgggctcaagcaatccacccacctcagcctctcaaagtactgagattacaggcatgaaccaccattcccagccccatctcaatcttaagaggcaccacagcaaagtgagaagacagactacctggctctgtcaggtctaattgtgtgaccttgaactctctgtgcctcagttttcttacctgtaaaatgaggatcagatgctttataattctgaaaatgtacagaggcaatgtattttagaaagcttggaagaatggttggtaaatgtttaataaatgttcatttttattg

SEQ ID NO: 172701 - DNA, 362 bp, Homo sapiens
ccccaggacatcagactctttttttccccagcagcttcaactctatgaggaaggtgagacagggctggggttgctgctcggccgcttgccttggccggtgccctccctcttattctgcagtctgtatagaagttgcatccatttgccagccactctaagaacaaagtatggccagaactaggaagtaaccttgacagagttcttgaactcctcagagggaaaaatgttctttattccattatcatgttaaaaatcagtaaacttgtatttaacaatgtacttctgcagttgtacagctgttgtacagtttttaaagatctttgaattctattccttgtttcaaaacagaggaaacagagaca

SEQ ID NO: 172702 - DNA, 362 bp, Homo sapiens
aagtcaatggacaagagataactaacataacagaccgaagcaaactaaatcccaggccagcagtggcgaagggcaaagacccaacctgatttatggtgcaaaatccctcaaagacacaggaaattggtggcaagaggtgcttcaggtgggggaatgaaggtggttaaaaacaggaagaatgggttggagatctgtttatagagcagccaaagctccaaacgttctctcttctgtgcacacccagaggacagtgagcagtggaggcatgagtgatgcagtgaaaacaagggaattaagtgaatttacatggtgagggctgaggtagtcactctccacccccaggcctcttctttttttttttt

SEQ ID NO: 172703 - DNA, 757 bp, Homo sapiens
taacaatctcagatgagactaagtgggtctcttacttttgtgtcgtctagtaaggagccataactgaaatatcctcctttttattaccataatgatataactataggaaaagaaaaaacatgagccatgattgacagaaattactctccttgtcagagatcatttcctctgttgcagtgagccaagattgcaccactgcactccatccagcctgggcaacagagcaagacttcgtctcaaaaaaaaaaaagaaaagaaaattcctttaacaaggttccaccgtgtggttataagatatatcgcgcctcggaggagaaattttaaccaccacccttgtggtttcaccccagcgcatattctactatccccgggaggaagcgcagtagtgtagtgtgcagagaaaaccccaagggaaaacccaggtgtctcctagaacactcacggagacttaccagggggtacccaaaattcccacgcggggcctatatttccccgtggaacaggaaaagcaaaaagcaggggccacaaaagcggggaacttttcctgtggcaccacgggatacgtagggaacatcacccggtggggctactctctcttgaacaaaagactatctctaaaagaaactttaaaaaagcagaaggtctctcctgtgttagcaaacgaaagaaaggccaaacacactaggggggaccccccgaagaagggggaagaaaccccccagtgggtggaaaacaccaacccacagaggggccacag

SEQ ID NO: 172704 - DNA, 577 bp, Homo sapiens
taacaatctcagatgagactaagtgggtctcttacttttgtgtcgtctagtaaggagccataactgaaatatcctcctttttattaccataatgatataactataggaaaagaaaaaacatgagccatgattgacagaaattactctccttgtcagagatcatttcctctgttgcagtgagccaagattgcaccactgcactccatccagcctgggcaacagagcaagacttcgtctcaaaaaaaaaaaaaacattaaaaagtacacatgtctaagtatacatgtcagtgaaattttacacacttatgtaaccagcatctacatccaggaagcagatgattgccgacaccccagcaaccagttctcacactccgttttcaggtaccatcccctgcctattcctgcaggagtaactgctctactgaattctgacagtattgattaattgtatcttaaaaaatcaaaacttaaagattttctgtcaacagagcaaccagggacccagaggcagaagccaggggagccaccacaggcagagggcacagccttgagtcagaggattgttctcagaccttga

SEQ ID NO: 172705 - DNA, 447 bp, Homo sapiens
tccagcctggttgacagagtgagataccatctcaaaaaaaaaaaaaaaaaaaaaagtgtggattcctgagtcctatcccggatttattagattacagcctctggtcgtggagcccaggaatcgttattctaatactttccaggagagtctggtatgaatcctgagccaagaagcactttttcagagcttagaacaatgcttggcacatttcagtgcttaataaatgtttgttacattgaaattaaagttgtacaaatggaaatctacttgcacaagaatatatagtagagtggtcgggcgcagtggctcatgcctgtaatcccagcactttgggaggctgaggcgggcggatcacgaggtcaggagatcgagaccatcctggctaacacggtgaaacctcatctctactaaaaatacaaaaaattagccgtgcatggtggcgggcac

SEQ ID NO: 172706 - DNA, 447 bp, Homo sapiens
tgagacggagtttcgctcttgttgaccaggttggtgtacagtggcgcagtctcggctcactgcaacctccacctcccgggttcaagcgattctcctgtctcagcctcctgagtagctgggattacaggctgcaccaccatgcccagctaattttttgtatttttagaagagatggggttttttcaccatgttggccaggctggtctcgaactcctgacctcaggtgatccacccacctcggcctcccaaagtgctgggattacaggcgtgagccaccatgcccagctcagtcatccttttaatacacttggttcttcttcacggcactggtcactttatgtttgcaaacctccttggtgggttagtttgtttaatgttgaaaggcctactcagcagtaaggtgcatgagggcaggattttgtctgccttctgtgctgtgatattgca

SEQ ID NO: 172707 - DNA, 462 bp, Homo sapiens
agcgaaattagaatatgtgcataatgcaatggggatataaaatgtcatagctgctatggaaaagagtatagaggttcttcaaaaaaactaaaaatacaactaccatatgatccagcagttctactcctgggtatatgttcagaaggattgaaagagtaatcttcaagagatatctacactccatgttcactgcagcattatacacaataaccaagaagtagaaataacccaaatgtccatcgacagatgactagataaagaaaatatggtggccgggcatggtggttcatgcttgtaatcccagcactttgggaggccgagactggcagatcatgaggtcaggagatcgagaccatctggccaacatggtgaaatcctgttactactaaaaatacaaaaattagctgtgtgtggtggtacacacctgtaatcccagctacttgggaggctgaggcaggagaa

SEQ ID NO: 172708 - DNA, 180 bp, Homo sapiens
gggaaaaagatactgagtgtaaaagatattgagtgacaattggggggggcatgtcctcatatctgaatatagcattcatataagccatctaagtgtcttaaatagtggataaaaatgatattggcaaggagtagagaactatttttatctatcaacattcagagggaaaagacgaaatct

SEQ ID NO: 172709 - DNA, 377 bp, Homo sapiens
tctctagaagctcgctgtaagtagttagaggtaacaatgcagcagcctgagcgctttcttgcttcaaaacttcttccaccagatgcactatttcattacccttaagttcagccttccacaaacccctagagcatagacaaaatgcagccaaattctttcccatagttaaaaaggatgaactttccttcagttcccaataagttttttattcatttccatgaagagacttcattaaaacagccttcaccatttatatttctttattattttttaaatatttaatttattttaatttctattttatcatctataattctagcagcattttggtcacaaccacttaaccaatttctaagaagttctaaacttttcctcac

SEQ ID NO: 172710 - DNA, 400 bp, Homo sapiens
agaattgggttaggaattaaagtttagtgacaaatttagaaacatccaaatccattactgagttgccaccatatgcacatactattgtatttgcttgagaaagttgaaaaaatattttgagacaatttctgtccttggagattttacagtctgataggagagataagataaatgaaaaaatcttaaacacacatgcacagatgcatataagcaggcacacacacatcctacatacagatacacatagtaatacgtgttaagtaaatataaaaaacagccagaaaagacatgatgtgttagaagtctagagactttgtatctattcgtattcctatcattattttatttgcttaaatattcttatcctgttttattctctctaaatatttgagatagtaaa

SEQ ID NO: 172711 - DNA, 309 bp, Homo sapiens
tgtgtgcctcatctggcctatgaattctcactgctgtgtgtttcatccttgctttggcactttgccctgtgtaccttctcgtccagttccactttcattggctaccatgaatatcatttctcctgggccccaggctcctatttcctgtccctgaaagtaggtctgggcttcttgggtcaaacaaaaatggtatctacaaattactttgtctcaaggagtgtttctagatatagttagtgatcaaaaatgtgcttccaaacaaggaggaaagcttgtgggtaaaagccttgatagtaaaaaagatgttta

SEQ ID NO: 172712 - DNA, 555 bp, Homo sapiens
tagttgtattccttcttgaaagttagattctaagtcaaaggtatatttttaaattttcatagctaccaccaagactacactccaaacaggttgcagtaatttaacttgtcactgtgtgacagtgtttgccaaagtctgttctttcagagtatgaggttcttttggtatgtggcagtatggaactctaggccttgactcttgcttcaaccagaacatctctgcatccagtcttaagattccttatatagttttctttgttcagaagataccacaactttaaaaaggctcagggtgaggagttggtgggggtgtaaaaatcattggtctcctggaacaagaggggaggacattggtgtcaaatatcaagtcctcaatttgcaaaacaaaaaggtaaaacagccttccaagtggagaacagaataacccatttcagcaaaccataaagagtatgatacttagagcctagggacaacagaaagaggtgtgagacaccaggctataaaaatggcaggctctgaattatgccaggcttcaggagtttgggtctttaggcct

SEQ ID NO: 172713 - DNA, 261 bp, Homo sapiens
gggaggggaggaagagcatttctggccaagagaaagcaacgtgtactaaggcatggaggtgtgaagtgccattacgtgtggttttggaagatccatacaaatggaaataaagaatgggtttaaaggtttggatggatgtgacactagagggatggtgaggggccagaacatgaaaagccttgtgtggtaagcaaatgccagtgtcacagaagcttcctatgtatgccccacaatctgtatagcctgcctcctcaggcaaac

SEQ ID NO: 172714 - DNA, 499 bp, Homo sapiens
aggactgtcacgacggcccccatccctcagaggacctggaggtgacaccccagcctgtggcaggcccaggagagagcgtcagccactgcccagaccaaggacggggccacccatacccccataactgcaccatgagcacaggctggaggcccacctctgaccccacatctgatggtctttctgcctctgggatcataagcccgttttaagaggccaagcttccctctgtgtggtttgtctgaattccagattcattgctttattcccctaacacatttatataatcagccactccccaaatcacaaggaaatttatttaaaacattttctccaatttaaatggcaattaaattagatcttgtggagacagctgggaatgaagataaatattttatttgctttttgttacgtaaaaaaatgatgcatcccaagaatgcaaacaatgtttatttcacagagtgagtaggattgtctgtggataacaggtgcatttacttac

SEQ ID NO: 172715 - DNA, 247 bp, Homo sapiens
agacaaattcgtattaaatgatattctacaaaacaccttgcctggattcttgaaaaatgtcagcggcatgcaaagattaaaaaagaacaaggaagccgggcacggtggctcacgcctgtaatcccagcactttgggaggcctaaatgggaggatcgcttgagcccaggagttcaagaccagccagggcaacataaatgaaatcttgtttctacaaaaaatgcaaaaattagccagacgtggtgtatt

SEQ ID NO: 172716 - DNA, 908 bp, Homo sapiens
agcgggtgcttggttggtgaaggttttcaaaccggagctgtgggcgcggcgctgctctgccgttgggtgaggcgcggagcgaagtgaagggtggcccaggtggggccaggctgactgaaaaagatggatactatgatgctgaatgtgcggaatctgtttgagcagcttgtgcgccgggtggagattctcagtgaaggaaatgaagtccaatttatccagttggcgaaggactttgaggatttccgtaaaaagtggcagaggactgaccatgagctggggaaatacaaggatcttttgatgaaagcagagactgagcgaagtgctctggatgttaagctgaagcatgcacgtaatcaggtggatgtagagatcaaacggagacagagagctgaggctgactgcgaaaagctggaacgacagattcagctgattcgagagatgctcatgtgtgacacatctggcagcattcaactaagcgaggagcaaaaatcagctctggcttttctcaacagaggccaaccatccagcagcaatgctgggaacaaaagactatcaaccattgatgaatctggttccattttatcagatatcagctttgacaagactgatgaatcactggattgggactcttctttggtgaagactttcaaactgaagaagagagaaaagaggcgctctactagccgacagtttgttgatggtccccctggacctgtaaagaaaactcgttccattggctctgcagtagaccaggggaatgaatccatagttgcaaaaactacagtgactgttcccaatgatggcgggcccatcgaagctgtgtccactattgagactgggccatattggaccaggagccgaaggaaaacaggtactttacacacccctgggaaccagggagtccaacc

SEQ ID NO: 172717 - DNA, 868 bp, Homo sapiens
aaggctaggtagaggctggggtaatcggacgagggaccaggtgcgtctgccgctggattgtgataggaagcagagtgttcgtgtgaaagatggatactatgatgctgaatgtgcggaatctgtttgagcagcttgtgcgccgggtggagattctcagtgaaggaaatgaagtccaatttatccagttggcgaaggactttgaggatttccgtaaaaagtggcagaggactgaccatgagctggggaaatacaaggatcttttgatgaaagcagagactgagcgaagtgctctggatgttaagctgaagcatgcacgtaatcaggtggatgtagagatcaaacggagacagagagctgaggctgactgcgaaaagctggaacgacagattcagctgattcgagagatgctcatgtgtgacacatctggcagcattcaactaagcgaggagcaaaaatcagctctggcttttctcaacagaggccaaccatccagcagcaatgctgggaacaaaagactatcaaccattgatgaatctggttccattttatcagatatcagctttgacaagactgatgaatcactggattgggactcttctttggtgaagactttcaaactgaagaagagagaaaagaggcgctctactagccgacagtttgttgatggtccccctggacctgtaaagaaaactcgttccattggctctgcagtagaccaggggaatgaatccatagttgcaaaaactacagtgactgttcccaatgatggcgggcccatcgaagctgtgtccactattgagactgggccatattggaccaggagccgaaggaaaacaggtactttacaaccttggaacagtgactccac

SEQ ID NO: 172718 - DNA, 902 bp, Homo sapiens
agcgggtgcttggttggtgaaggttttcaaaccggagctgtgggcgcggcgctgctctgccgttgggtgaggcgcggagcgaagtgaagggtggcccaggtggggccaggctgactgaaaaagatggatactatgatgctgaatgtgcggaatctgtttgagcagcttgtgcgccgggtggagattctcagtgaaggaaatgaagtccaatttatccagttggcgaaggactttgaggatttccgtaaaaagtggcagaggactgaccatgagctggggaaatacaaggatcttttgatgaaagcagagactgagcgaagtgctctggatgttaagctgaagcatgcacgtaatcaggtggatgtagagatcaaacggagacagagagctgaggctgactgcgaaaagctggaacgacagattcagctgattcgagagatgctcatgtgtgacacatctggcagcattcaactaagcgaggagcaaaaatcagctctggcttttctcaacagaggccaaccatccagcagcaatgctgggaacaaaagactatcaaccattgatgaatctggttccattttatcagatatcagctttgacaagactgatgaatcactggattgggactcttctttggtgaagactttcaaactgaagaagagagaaaagaggcgctctactagccgacagtttgttgatggtccccctggacctgtaaagaaaactcgttccattggctctgcagtagaccaggggaatgaatccatagttgcaaaaactacagtgactgttcccaatgatggcgggcccatcgaagctgtgtccactattgagactgggccatattggaccaggagccgaaggaaaacaggtactttacaaccttggaacagtgactccac

SEQ ID NO: 172719 - DNA, 927 bp, Homo sapiens
agcgggtgcttggttggtgaaggttttcaaaccggagctgtgggcgcggcgctgctctgccgttgggtgaggcgcggagcgaagtgaagggtggcccaggtggggccaggctgactgaagtgagtagtgggggtgccagaccagaaagatggatactatgatgctgaatgtgcggaatctgtttgagcagcttgtgcgccgggtggagattctcagtgaaggaaatgaagtccaatttatccagttggcgaaggactttgaggatttccgtaaaaagtggcagaggactgaccatgagctggggaaatacaaggatcttttgatgaaagcagagactgagcgaagtgctctggatgttaagctgaagcatgcacgtaatcaggtggatgtagagatcaaacggagacagagagctgaggctgactgcgaaaagctggaacgacagattcagctgattcgagagatgctcatgtgtgacacatctggcagcattcaactaagcgaggagcaaaaatcagctctggcttttctcaacagaggccaaccatccagcagcaatgctgggaacaaaagactatcaaccattgatgaatctggttccattttatcagatatcagctttgacaagactgatgaatcactggattgggactcttctttggtgaagactttcaaactgaagaagagagaaaagaggcgctctactagccgacagtttgttgatggtccccctggacctgtaaagaaaactcgttccattggctctgcagtagaccaggggaatgaatccatagttgcaaaaactacagtgactgttcccaatgatggcgggcccatcgaagctgtgtccactattgagactgggccatattggaccaggagccgaaggaaaacaggtactttacaaccttggaacagtgactccac

SEQ ID NO: 172720 - DNA, 976 bp, Homo sapiens
agcgggtgcttggttggtgaaggttttcaaaccggagctgtgggcgcggcgctgctctgccgttgggtgaggcgcggagcgaagtgaagggtggcccaggtggggccaggctgactgaagagagccaaaggaaatcaacatttgaattgactacccaatgtcctgcccctgtttctgtcctgtagcacttaggaaagatggatactatgatgctgaatgtgcggaatctgtttgagcagcttgtgcgccgggtggagattctcagtgaaggaaatgaagtccaatttatccagttggcgaaggactttgaggatttccgtaaaaagtggcagaggactgaccatgagctggggaaatacaaggatcttttgatgaaagcagagactgagcgaagtgctctggatgttaagctgaagcatgcacgtaatcaggtggatgtagagatcaaacggagacagagagctgaggctgactgcgaaaagctggaacgacagattcagctgattcgagagatgctcatgtgtgacacatctggcagcattcaactaagcgaggagcaaaaatcagctctggcttttctcaacagaggccaaccatccagcagcaatgctgggaacaaaagactatcaaccattgatgaatctggttccattttatcagatatcagctttgacaagactgatgaatcactggattgggactcttctttggtgaagactttcaaactgaagaagagagaaaagaggcgctctactagccgacagtttgttgatggtccccctggacctgtaaagaaaactcgttccattggctctgcagtagaccaggggaatgaatccatagttgcaaaaactacagtgactgttcccaatgatggcgggcccatcgaagctgtgtccactattgagactgggccatattggaccaggagccgaaggaaaacaggtactttacaaccttggaacagtgactccac

SEQ ID NO: 172721 - DNA, 1074 bp, Homo sapiens
agcgggtgcttggttggtgaaggttttcaaaccggagctgtgggcgcggcgctgctctgccgttgggtgaggcgcggagcgaagtgaagggtggcccaggtggggccaggctgactgaagtgagtagtgggggtgccagaccagcaggtgcgtctgccgctggattgtgataggaagcagagtgttcgtgtgaaagatggatactatgatgctgaatgtgcggaatctgtttgagcagcttgtgcgccgggtggagattctcagtgaaggaaatgaagtccaatttatccagttggcgaaggactttgaggatttccgtaaaaagtggcagaggactgaccatgagctggggaaatacaaggatcttttgatgaaagcagagactgagcgaagtgctctggatgttaagctgaagcatgcacgtaatcaggtggatgtagagatcaaacggagacagagagctgaggctgactgcgaaaagctggaacgacagattcagctgattcgagagatgctcatgtgtgacacatctggcagcattcaactaagcgaggagcaaaaatcagctctggcttttctcaacagaggccaaccatccagcagcaatgctgggaacaaaagactatcaaccattgatgaatctggttccattttatcagatatcagctttgacaagactgatgaatcactggatgggactcttcttggtgaagaattccagactgaagcacgagagcacgaggcgctcctactagccgacagtagatgatggacaccctggaccgtaagaaaaggcgtccacggatcggaggagacaaggggaatgactcatagtagcaacaactacaggactggacccatgaagggggcaacgaagctggggcaacttaggaacgggactctggccaggagcgaggaacagatgacaacggaaacgacgcaccggaagacagaaggggccagaagcgagacggtggcaccagaaagaggagccgaacagacagcggacccacgggtcggggggcacgcgaagtcaggagccgggcccagaggacacagacgacacgaagcagg

SEQ ID NO: 172722 - DNA, 114 bp, Homo sapiens
tggctcggcactctgtgcccttgtgcaaagacacagaaactcgcttgtttccataaggaaagcccagtggcagtgccaggaaggggtgccctcagcccctcctgccaccccaac

SEQ ID NO: 172723 - DNA, 504 bp, Homo sapiens
gtaatgggagtcattattcaagatgggaggaaagaaacaggaattagatcagaaacaaatgaccagaaagagagatgaaatacaaaagctacatgaagtcggcagtgtgaagcctgactcgcaggagagtggattttgttactgtttgctttttcttgtccaggataatccaagactggcagaaagtgagaataccgattgagatccaaggacatcctcatgggagtctgtgcagacacgttttcatcaagaacccctctccaagcagctggtccagcccagctaaactgggggctgctgtttgtaagaaaattaatgctctgggccaagcacggtggctcatgcctgtaatctcagcactttaggaggccaaggcaggcggatcacttgaggccaggagttcaagaccagcctggccaacgtggtgaaatcccgtctccaccaaaaatgcaaaacttagctgggcatggtggcgcatgcctgtaatcccagctactcaggagg

SEQ ID NO: 172724 - DNA, 309 bp, Homo sapiens
tgattgagcatgcctgaagactgttatttgaaatccttctgatgtgtcactgttaggacgacagtgatcactacatgctaatatttgttaaatgccaggaattccttcagacactattagagaagggcaaggaagattctcgagggctaatcaagctcttagagaattcagttagtagtgaccatttgcaatactgcaattgcaatactgtgctctccagtgagctgacaaggccagccaaggcaaagtggagaggaagtggtgctttgtggcagaggacctagaatcagtacctggtgtctctacctc

SEQ ID NO: 172725 - DNA, 481 bp, Homo sapiens
agagcatacaggtttttgtttgaacagttgttttcaggtctttggggtatatacctaggaatggaatcattaactcatatggtaaatctatttgtaactttatgaggaaacatcaaattattttacacgtaggctgcaccatttcatattgtcacaagcagtgtttaagagttcaagtttctgcacatctttgtcaacacttgttattttttagtataactattcttgtgtgagttaagggttatctctttatggttttaattatggtaatgatgttaagcatcttttcatgtgcttgttggtgaagttgtgtcttttgtcaatttttagattgggttgtctttgctatggagttgtaaaagttctttatacattctggataacagacactgatgaagtatctaatgtgcagacattttcttccattttataggttgttggaacgtaataagagttaatgtgtggtctctgctgcagtgtc

SEQ ID NO: 172726 - DNA, 125 bp, Homo sapiens
agttagagtgagaccctgtatcaaaaaaataaaataaaaataattgattccctttcttttagctccaagaaatacagagttgaacaaagaatatattatattggcagttgtgggtggaaggagag

SEQ ID NO: 172727 - DNA, 420 bp, Homo sapiens
tggacttttggactacctgggcgttcctttatttgtctctttctgatttcctatgtcaaagataaacaaggtggaaggacagattttaatcagtaatatactattgcaaagtgaaaacgagtctagcatgagctgaactcaacttctgaacccagtcagaggtgactaggcattttaaagggaggatgagggaagagggaagggtaagtgagggctcaggagagtcagggaaatgaaaaattacaaaaagtagaaggggggtggtaaattagtccattctgtgttgctataaaggaatacctgagaccaggtaatttatcaagaaaagaggtttatttgactcatggttgatgaggacctcgggaagtttaccctcatggtagaaggtgaagagggggcaggcatgtcacagtggcggta

SEQ ID NO: 172728 - DNA, 285 bp, Homo sapiens
acggtcagtgttaggagctacaagagatgtagaggatacaccaagagcaagggccttactctctcagagcttccaatctgcctgtaaagacgatatagttgtaggtggtgttgtctgagtgttcactcagttgccaggtcagaaagcttggccaagcttcagcttcactggttcctcacttcccatattcaattggttgccaagtcatcttgatcctatttccaaaatgcttctcaaatttacttggtttccctcctcctactgctgctgcaactctatcaggct

SEQ ID NO: 172729 - DNA, 648 bp, Homo sapiens
cagccccctggtaagagctgcttcttggaacacaaagagccgttgcgtcctccagccggccttgaggaaggtgtgacttctctgctcccagcaatgtcttgggcacccttctctgccctgcacaccagctctgcctgcagggtgcctggacactctgggtgtctactgtgtccccatatggtgcttgcaagtcttcctcccagactgccccctgcttctgtgtcccctccctggtgcacagcaccacatccagcccccctcccacccagcccacccaggtcctgcccacgtgacccccagtctttctccagtcgcacctcctctgcacgctgaccgccatgtcttgtcctctttttctttttttttgagacagagtcttgctctgtcatcccagctgctggagtgcaatggcgcaatcttggctcactgcaacctccgcctcccgtgttcaagtgattctcctgcctcagtcctccctgggactacaggggtacaccaccatgcctggctaatttttatattttcagtagagtcagggtttcaccatgttggccaggctggtctcgaactcctaacctcaggtgatccacccgcctcggcctcccaaagtgctgggattacaggcgtgagccaccgtgcccaggctgt

SEQ ID NO: 172730 - DNA, 696 bp, Homo sapiens
tgggtgtggcctagctcccaagaaactgctgtgggtggggcatctttccttataggactcagtgggcctgacctagcgcccaagaaactgttgtgggcggggcatctttccttagaaggctcagtgggtgtggcctagctcccaagaacgtgctatgggcggggcatctttctttagaaggttcagtgggtgtgtcccaatccctaagaaatggctgtgggtggggcatattttcttataacgcttagtgggcgtggcctaggtactaagaaactgctattcaagggatggtccctgagacctgccttccagggtccgtgcaggacctttccccctccctagtgctgagctacaggccccttccgccctgcagaaggatcccgcaaacgtggattacgaggatctcttcctctactccaacgcagtggccgaggaagctgcctgcccggtgtctgcccctgaggaggtatgtatatgacaggaggctggcacctcccacctggctgaggggcaggagtggaggtggtcaacagcttccagaggaggctccttctagaatgagaatgcgatcctacagcttggtgctttaaacctttccagtgcttttgcaacaccgagattaaaattcaaactacaatctgaggtcctctttctgcctatcacctacccagcgccagccctgctgccataccgtct

SEQ ID NO: 172731 - DNA, 701 bp, Homo sapiens
cactctcttacgctctgaccaaacaatatgaattctataatttttaattctatatcacttctccaggtacatatcatattttccaagacccatgattattttcatggtggaggtacaagattcagcaaatagtcatatagaatatacttaagttcaagattctgaaaaaaataatacttttctattatgatatctgcatacttgcatgcaatatgtatatgcaatactttataaatacactaacttttatctattatttatctgaagttcaaatttaactgtgtcttttgttatctctcaactccaatgcatgggaaccttggtgttcttctgtccaagcttagctccaactacctccggagacccattggagaaagacaccagtttttgagccaactactacaattcttataatgtagataccattgtgtcttaaagtcagtttttttcttattattcttgtgtccaaaatgacagtaaaacacaaacaatatgactgtgctgatacgtgttggtggcacctattaattttttggttctggcactgaagataaatatgtgtatttatgagattaatcttttagctcgagaataacaaccacttaataaaatatacaattttgcttttataaactcaaatttagattaaattttttttcaagatgatggattagagactttaagcatgcttcagccacatg

SEQ ID NO: 172732 - DNA, 432 bp, Homo sapiens
aaattctttgtactatttttggaagacttactaagtctgacataattccaaattagaagattttttaaatgcttaattattagagatcaaaaactgcaaccaaaagtactcagaactataaaaactaaagacatctcatttttaaaagtatgagtttattgaaatacacgaaacacaattaattcttccatcaaacaaactttcatttcatctgtttctgagattacagtggcttagtctccatcaattcacctattacaactaatataaatttctcactgtttcattttcaataactttcatatttctgtttctattacctggctttacatttcagaaatattccctattctacaatgttttcaaatccattaaagtttcctgtcaaaaccactccaggcagggttcaatggctcacacttataatcccag

SEQ ID NO: 172733 - DNA, 1391 bp, Homo sapiens
tcaacaagcgcctggcacactcagccaggcccgcgggcatctgctgcgtgtcccgctccgggctcagtgccctcgccgccgccggcactgcctcgatgttccagctgcccatcttgaatttcagcccccagcaagtggccggggtatgtgagaccctggaagagagcggcgatgtggagcgcctgggtcgcttcctctggtcgctgcccgtggcccctgcggcctgcgaggccctcaacaagaatgagtcggtgctacgcgcacgagccatcgtggcctttcacggtggcaactaccgcgagctctatcatatcctggaaaaccacaagttcaccaaggagtcgcacgccaagctgcaggcgctgtggcttgaagcccactaccaggaggctgagaagctgcgtggaagacccctgggacctgtggacaagtaccgagtaaggaagaagttcccgctgccgcgcaccatttgggacggcgaacagaagacacactgcttcaaggagcgcacgcggaacctgctacgcgagtggtacctgcaggatccataccctaaccccagcaaaaaacgtgagctcgcccaggcaaccggactgacccctacgcaggtgggcaactggttcaaaaaccgccgacaaagggaccgagcggctgcagccaagaacagactccagcagcaggtcctgtcacagggttccgggcgggcactacgggcggagggcgacggcacgccagaggtgctgggcgtcgccaccagcccggccgccagtctatccagcaaggcggccacttcagccatctccatcacgtccagcgacagcgagtgcgacatctgagttgcccatccaggatgctcagaagcagattccagtgtaaaaacgagaaaaacaaaatgaaagaggggaagaagatgagagacctgcaaatccagcgccagagaagccaggtgaccagggacccgcgggctcgggttgccgtttcccgccccaccccgcggccggcctggcttcactggcgccctttggccgcgaccacgggaaccagcggtgaggcctgacccagcaccacgttcttcttgctttgctttttcctaaggattttgctgcaaagtctccttcggaacccgaactgcaagctgagcgcctgcccagattctcccatgggtatttcacgtcgaaaggacgctgttacatatgtataactttcgctttaaagtttttttttaacaaaacatatatatgctgtttatttacttatttaagagaccgccatggtaggtttctctgtagcttggggaacttgctgtttctaaacatgcaggctggtggtgatgggttctgtgtggagaagccaaacaataaaacaacctagtgggcaaccttcttaattaa

SEQ ID NO: 172734 - DNA, 496 bp, Homo sapiens
ctcatccagcttagttgttgctgaatattggagacacttttggttacagtttaagtgaaacttgccagcttcatcctaaaatgcatgtactgaatggatttaacatttattagctttttccatgtttatttttctgcctaacagaatataatagggatggagggaagccataagtaaagtgttgcccttgctgtgtacttgccaggaggttggaagtaaatttcagattatcagcagttaaagtggggtctcctcccctgaagaatgaaatatcctgttgtagttctttgaaagtgccatagtagctggtgtttattttatgagggaaaaagaaaattttgaaaaaaattttttttcttaacagggcagatcaagcataagctgccctgctgagcaatcattttatgattaggagtccctaaaaggttccatagagccaactataagtcatttgtttgaaactggagtaacaggtttccataggagctgattgtag

SEQ ID NO: 172735 - DNA, 370 bp, Homo sapiens
agggggaggagaaggaggagaagggggcggggaaggagcgaggggaggacggagcaggcggatcccgaggactctgcccgcccctcctgcggtagggttgggggctcagagggagaggcgagagcgggcttttcctcctcgcggctcaccttgtcgctggagcaatctcaggagatgctccagtgtttgggaagaggggtcgctccaggacagaggggctgttgtgcacaccccgtctgttgtgacctcggacaggtgggcacctggaacccccggaattcccccaaatcttttaagatttggaaaaaagcccgctgccattcccccacccccaaaatcttgattatctcgagaaggggaaggaaaagaa

SEQ ID NO: 172736 - DNA, 556 bp, Homo sapiens
cttggggttcatggagtttcttgaagctataggctttgtgtttcactaaatttgggaggttttcaatcattaagtttttgaaatcttcactcagttttgcattctttatcctcattctgagactctgatgacatcagtgttagaccttttggtattgtcctacaagtacctgaggctctgttctttttttttttctttttaattttccttcttcttttaacgtttttctctcttgttcaaattggataatttctattgatttatcttcaagttcagtgactctttcctctgtcatttccattctgctatggagctcagccaatgaccttggggtgggtttttttattccagttattcagatgaaattacttattaaatttccatttggttgttcttcatctcttgtattagttcaccaatactttctatctttccatacatttcaagaatgcttgctcttatttgagtagtgttataatagttgcttgaaagcccttgtcacataactccaacatctttattatcccaacataggcatctgtcgattgtattttcc

SEQ ID NO: 172737 - DNA, 322 bp, Homo sapiens
aactcggtctgaatactggaataaaaaaccacccaagttcagtgactctttcctctgtcatttccattctgctatggagctcagccaatgaccttggggtgggtttttttattccagttattcagatgaaattacttattaaatttccatttggttgttcttcatctcttgtattagttcaccaatactttctatctttccatacatttcaagaatgcttgctcttatttgagtagtgttataatagttgcttgaaagcccttgtcacataactccaacatctttattatcccaacataggcatctgtcgattgtattttcc

SEQ ID NO: 172738 - DNA, 476 bp, Homo sapiens
catctgctgggtccagctcacctcataaccaagagtctaatgctgatggctcccgggaaccaccactttcttggcaagaaggatccatgcagtgtttctcatcaaggagtaaggggcgtgcttctgcatttctgttcacatcgtctttcttcctacctttctattgctttttcttgtttttgcctgcattccttttatttgcctatcatattttcttcttattttttgtttactttaatattagctcaaactccagtttcattatgaggctttccttggttactgtagtgtaccatgagttctcagttctctatttctattttattgcatgcattcgtgttctgcttgtctggtgcagaccataaacttcctggcactgtgtcagctttcctgagtatgcactatgtgcctaacactgtgataagagccttacacttgccatgaggtttaatcatgtgagttgatcttgttgtctt

SEQ ID NO: 172739 - DNA, 192 bp, Homo sapiens
ttcactttgttcccatcattccactgaatcactgcttgtcactaccaatgagttccatactggtaaatccaaagggtaattatcagtcttcatcttatgttacttatcgacagcactggacactgttgatcattttcctcttcttgaaacactcctggttgccttctaaaacatcatttccggctgggcacg

SEQ ID NO: 172740 - DNA, 558 bp, Homo sapiens
ttagaaaatataggtagcacttgctgaatcacagtccttccagaactcctgtcccagggcaaacaaagatttggtttatatcctgcaaacctctgtgtttgcaaattacagagcacttctgagagctggaatggcgatttctagattactatggagactgcaacccaactgcctctcccaccccgccagcaaatccccccaaatgattttgttttccaggggagacattttttcccttccttattgcaaaatagatggagcatgttcatgttgaagagagacagtgaggaaatctgggacaagagaaataagattagatgtcatccacagcagcaactcattttctccatttggatgtctggccccttgaactctgagacacaaaaccctgcacctgaccagcatctgaactgttccgtttgacagcagtttatgtgtataattttctccctaatgtattctgcaaatggtagagtagaaatagcaaatgaaagacattgcaaggcctagctctctcccaccccttctttccctggcctggtgtcatttgagctcagt

SEQ ID NO: 172741 - DNA, 281 bp, Homo sapiens
atcgcgcccctgcactccagcctgggcaacagggcaagactccatcaagatgaaaagaaatgaaatgacatgacatgacatgacatgaaatgaaatgcaaaaaaatctgtatataacaccattaatacaaagctccaaacttggcataagtaataatctattgtgtagaaaaacatatacatgggataagactatatattttttaaaaaccaaagaaatagttaatagaaaattcaagatagtctgggcacggtggctcatgcctgtaatcccagcacttt

SEQ ID NO: 172742 - DNA, 290 bp, Homo sapiens
gcacataagtagatgtaaagaataaggaaagtcctagctagagcagtcaggcaagagaaggaagtaaaaggcatccaaataagaaaagaagaggtcaaattatctttcttcactgagatatgatacctagaaacccctaaagactccaccaaaaggctcttagacctgataaacatcttcagtaaagtttcaggatacaaaataaatgtgtaaaaatcagtagcggttctatacaccaataatattcaagctgagagccaaatcaagaacacaatcctatttacaatagc

SEQ ID NO: 172743 - DNA, 205 bp, Homo sapiens
ggccaaagctggaacaatttgagcaacaaaatataaaacaaatatacatgaatccacactaatacaaacaaatgataaaataaatgagagagaagaaacaaatccaagattgagaaaccgtaacagattgttagacagtaaggaaatatgatgactaaatgcagtctggtatgctgaactagatcctggaacagaaaaatgacat

SEQ ID NO: 172744 - DNA, 270 bp, Homo sapiens
gcacagcctgagctgcaatgtacatttgcagtattacttttcttaatctcaccttcattactgaaggatatttttggtagatacaaaattctggattcacaactctttttttcagcacaataaattattgttccaatttttttctggcctccagagtttatgaagagcaatccagtcattcaaatcattgttcacccagaagtaatatatatttttttacagttctttcactatttattttgtctttgattttcagcagtttgattatga

SEQ ID NO: 172745 - DNA, 143 bp, Homo sapiens
aataaaaatacagcagagaaatgaccactgctttcaacttagcagcaccggtttaagtgatcacatgattgtagttggcactgtttgaagaagttccaccaaaggaagcatgaaagcccaagtcttgacttggtttttgagca

SEQ ID NO: 172746 - DNA, 338 bp, Homo sapiens
gtcatcttgggtgatctctgctattttgagaaaacatcttcctgaacttggttttcaaaatttcactcatctgcttcaaatcctaagcctcaaagggcaggcatgggggtgaaaccacatccaatttcagccctattttcacaccatgccacacacagctggcaggccaggaagggtgatgtcaccacaccaagtggcacatcatattctcaactggaggagatggtccttgctaacgtgtgtggctgctcctagctgaagaggctcagtcatcgttcacgggtcctgtcgtttctgagggctgcttttggtaattatttcatatgggggcactgcac

SEQ ID NO: 172747 - DNA, 434 bp, Homo sapiens
gagagttcagcatttctctctcaaaaattcatagaacacttagaaaatcagcaacaacctcatcaaccagtaggttccagttgaaatttatagaacactgtacccaacaaaagcagaatgcatattgttttcagatgccatgaaacatataccaggatagagcaaatccataatggactaaaactagaaatcagtaagaggaagataacaaaaatctccaaacacttggaatctaaacagtacagctataaataatctataggttaaagaagaagtttcaagggatttaaaaatacattgaactgaatgaaaatgaaaatacaacatatcaaaatttgtgggacatagctaagcagaatttctagcactaaatgttttcaatagaaaagagaaagtctcaaattaattatttaagctcccacctaagaaccccc

SEQ ID NO: 172748 - DNA, 490 bp, Homo sapiens
cagagcagaccaggatgtcccagagtgggtccagaccataataatagactttaaaatgctggcaagtcttaggagcaagggagatgatgtaaaaagaaaatggcaggctgggtacagtggctcacgcatatagtcccaatgtgtctggaactggttccttccggtgggttcttggtctcgctgacttcaagcatgaagccatggaccctcgtggtgagtgttacagttcttaaagatggtgtgtctggagtttgttccttctgatgttctgatgttcagatgtgtccagagtttcttccttccagtgggttcatggtctcgctgacttcaggagtgaagctgcagaccttcgcagtgagtgttacagcttatcaaggtagtgtggatccaaagagtgagcagcagcaagatttattgtgaagagggaaagaacaaaacttccacaacgtggaagaggactccagcaggttgccactgctggcttgggtgg

SEQ ID NO: 172749 - DNA, 263 bp, Homo sapiens
agctgcagcaattagcatgacttaattatccaggtcagacagaagtgaacgcctgcctgctcacgggctgacaatgatcagggctgcaaacacagctcagcatgatgggacatagattccagcttactggcagcactgccggcacctgagctccacatacaccgccgcagcccaccctcattacacataaaggaaccactgtcccaggcagaagttctggaaaaggactcactcaaaccataaccacagacaccaacagccca

SEQ ID NO: 172750 - DNA, 476 bp, Homo sapiens
aagaaatgtggtggggcctggacagaatgaacaaggcggggagatgaggtctgcacagtgagctaaagctggatcacataataccttctaagccatcataaggagctgggattcgattaacctccatgttccacctccagcagagtgaggatgggggaggaagaggactccttgtgctgttaatgtccgtagcaaacaaaccagaatgaaatggcagggtgttggagctaaaccgaaccctgtcagtaattacattaaatatacataagctaaacagtctaattaaaaggttgcgactgtcagaatggatttagaaaagcaagacccaactatatgatgcctgtaggagatgcacttggaatataaagacacagaggcagaaacgaaaaaaatggaaaacagtaagcagaagaaaggcaacatggctatagcaatatcagacaaaataggcttcaagacaaggagcattatcagag

SEQ ID NO: 172751 - DNA, 324 bp, Homo sapiens
tgggtgagctcagagcccagaaatccatgtcagccccagccccagctatttgcattacgccatcctgcttctgctgagagtctatgctttacaagagagcacatcatgtctacattttatgtggtttaccattcatggggaggcaataattacacttctaaacaaagatgaagggggtgagtgtcatctgaagtcagcctgtgacttcctttatttcataccctttcttaatcccctgtatttttgtataaaatatatgccagtgtccaaatactctcatattcaggatctcatgtggccctcaaagcaataggtggggaatta

SEQ ID NO: 172752 - DNA, 464 bp, Homo sapiens
ttctgagacctcttatagagaaaggaactgagccctggggtgctccaacatctaggcatcaagagggatcaggagaagtctgtacaagaggaacagccaaaaaggtaggaggaagaccagtatcggtggtagtggaagccaagggaagatggtgtttcaggagggactaatcagctacgttagggtgcggctgagagattaagtcagatgagaaatgactgtaggcattagcaatgtggtggtggtggtggtggtgcaggtctttgaaagtcatgaatcgtgtttcactgcagttgtggtaacagtatgatcatgggatggattcagagagaatgggagacagcaagtataggctacttgctaaggagctctgctccaaaaatcctccccgttcctatatcaaaattttttccttgctgctgcactttaccatcagtatacaaacatgtttcctcttccattta

SEQ ID NO: 172753 - DNA, 453 bp, Homo sapiens
actctaaggatccccggattgaagtgcttactcacatgtcataaattaaccacagcttcatgggggtgtagggctatcccttctccctgcgccttcccatctcgtccatgcctagttttagaagtttcaatagcaacaacaacaacgaatagccagactttgtgctgcatgcctgtcgttccagctacttgggactacacatgcacgccaccacatctgactaattttttaaaaaattttttgtagagacaaggtctcactatgttgtccaggctggtctcaaactcctggcctcaggtgatcctcccaccttggcctcccaaagcactgggattacaggcatgaggcaggtggaactcctgatctcaggtgatccacctgcctcggcctcccaaagtatggagattacaggcatgagccacggcgcccagcctaggggtgtattccaatcgg

SEQ ID NO: 172754 - DNA, 148 bp, Homo sapiens
tgtcatattcccaacactaataaccaaaatgcctttgaagatttttctgtcaccagtgtatgaaccaacagtttatcacagtataatttgatttttctgttacatatgtatgtgtatgtgtgtgtgggggtgttgggcgaggacatgt

SEQ ID NO: 172755 - DNA, 240 bp, Homo sapiens
catcctccgccacaagggatggaaagttccccgggggctccggactctgctccccaccaggaaggatggaggagtgggagtgagagggagcggggggcgccgagctctactcacacggggatctcattggccagttcgcttggaaacaaagagacagacagtgagaggcgggaggaccgggaggtgagagagaggcgggaggacagaggtggcagcaccgggccgtccctcctgggccct

SEQ ID NO: 172756 - DNA, 289 bp, Homo sapiens
catttaaatggttgaaaaaaaacaaaggaagagcaatatatcatgacctgtgaaagttacatgaaattcacgtttcagtgtccataaagacttattggaacccaagcgtgctcattcctttagggcttgtcgaaggccgcttttgtgctacagtggcagagttgaatagtcaaggtggactatatggcttgcacagctgaaaagatatttattcatctaaaattttattttaaaaattgataatgaataatttacttaatcataaataaaagataaaattaatattcta

SEQ ID NO: 172757 - DNA, 342 bp, Homo sapiens
catactttcctgcctggccttacaaatgggtcaccttttaggaaaatgagacagtaaaaggaagtgatctgagaattcaagaggactcacagtgttctcacggaaacctgccaaggcatggccagtactttccagacaaatgagtgcttaccactgcttggtacagtggcaaaggattggtacgggacatggtcacacagatccatttcatgtattccagcagaaactatgattgttaatggggtttgaagatgccagtgaggggcagagatgcatcaaaacaaacactgaagagggactgtgaagaagctaatttcattaaggccccaatagcattaaaca

SEQ ID NO: 172758 - DNA, 466 bp, Homo sapiens
taatctactcctgaacggactaagagctattattctcccacattgtggagaggcagggcatgatctgggactttctgaccccttgaagactagcttttctcctgtaattctttagagcctgggccgccctttggtggactttggagtctggttcattccaggaccttcaaaggcctgacaacaatgtgcaaggggtcagcaggaacatggtgaagacagttgttgtcagcccgccaaagatggaaatgatttggattttttagtctttcgaggattgaaacaaaataaggagcatagctttatattggggaagcttggctgtcctcatgtaaactcaagaatgttgatgtgagttggcttacactactcatactcatcctgcctactccagtagatgactggtcactcctgctgtgagttttggctagttcagctttcagcagagataccaatgatccttcacgta

SEQ ID NO: 172759 - DNA, 465 bp, Homo sapiens
ggctggaatgcagtgacatcatcctgtgtcactgcagcctcaaactcctgagctgaagtgatcctcctgcctcagcctcccaagtagctgggactcctggggtgagacaccataccgcctaattttttgttgttattgctgttaagacgggtctcactatgtctcccaggctggcgtcaaacttctggcctcaagcaatcttcctacctctgcctgccaaaatgcccaggattacaggcatgagccattgggcctggcagattttttacaagcagttaaactacaacatcttgcttaaaataagccaaaagtacaaatgttttgtagtatacacaaattagagagatttaaaaattcaacttatcaaatagtgacttagtgttagagaataagcaataatcaagactaatacatggtcaggtgtggtggttcacacctgtaatcctactgaggcagaagaacagg

SEQ ID NO: 172760 - DNA, 403 bp, Homo sapiens
acaaacaggaacaatcacagttccccggggctgttgtggggctaaaaagagagttgcgtctgcggttcctggcatccctaagctagctctttccttctccattccctctccgtgtgtgtcaagaggaaggcactgcagctctgagaaggctgggagctgccccgacggggcagtgctcccccgccctgcacgggccccaggcctttccctcctcttcagtgggaagtcactgcctgctaagtgagaagcggacctgctgactagggaaatacttctccaggtctctgacacttccctctcctgtcccgagatgacacacaccggccagctgcatcatcacgtgatgatcaaagtcaacatgcctgagtgctcacttggtgccagcaactgtttaaacaatttc

SEQ ID NO: 172761 - DNA, 359 bp, Homo sapiens
tgaacaagtaggaggaggggaatcaagacatgttaaggctggacacaatttccaagtgggaatgttacacaggcagttacgtttgccagcctgaagcccagagaagatactggggcaccacagtaaagatatttaagtccatgagactcagcagcacttaaactaaacaggaacaatcaagttacagagagggaacaggactcaggaccaagggaattcaatgatttacagatctaatataggaggggccttgtgtacacagaagaaaatctgggtctttaaattttctgtgggcagaatatattacagacagaagtgtgtagataaatctataacctaccttgacaccatacttaaaa

SEQ ID NO: 172762 - DNA, 402 bp, Homo sapiens
gtgaaaaaggtgtacaaaaatatttatgaatgaactgaaaacaaaaataaaagtgcttttagatgtcattttttatgacagtgcttccctttctgatactacatataaaagtttttgtattaagttttggaggagatagaagtagtgaaggtaaaacttcttgttttttcctgttgtttaaaatgttaaataagcagaagctggtttattgtctaaatgacccacaccagtcctctgttggacacagaagtcttcctttagtggaagctatcagtcattttgtctcagcacattcaactgttgtttgttcagattttttgtaattcaaaatactttttgatacctaatgcatgattttttgtgagttgtcctcagtaatttgtaagtcttatatagggaaac

SEQ ID NO: 172763 - DNA, 424 bp, Homo sapiens
cccacgcagcccctgtccccaggccaggtcctggagaggggggaaactgaggctgctgagagggcggcccacccagagctccctgtgctgggagaggttggccgctgtccctcccagctgggctcagaggcgctaatgagagttaaatgtaggacgtgagtcacctctaggagggggctgggaccacccccagatgtgggtccagacgctcaggctttttcctactcccctgtgtgtcaccccctacccttggcagggtggggcatgagttctgaccttgctgaccaggctctgtcaccctggaccagcctcacttaaatggctggctgcctcaggagcgggtgctgtgggaccacaggagactctaaatcccgggataggcccagtggaccctgaggacttaggggatggaccaacacctggg

SEQ ID NO: 172764 - DNA, 360 bp, Homo sapiens
tttgaaggtggggaaatgggtcctgtgtcatggatgtgggcagctggagaagctggaaaagttcctgcacagatgccgctgaagagaggtgccagggaagggcagagaagaggcagtctgtcccttaacataaggctgattctctcgaactgtgcgaccggcagaagcagatgtgtgtgaactggacacagattgaagaatctgcccctgttgaggtggatgggcctgattgttgtcccccagcgtcctaaaacttgtatggacttggataatgaggaggcttgggctgagatgtgagtcctgttggagactccctctctacctctcaccgtggtccctctcaaatacccaacggaattc

SEQ ID NO: 172765 - DNA, 384 bp, Homo sapiens
tactcaggaggctggggcaggagaatcgcttgaaactgagaggtggcgatcactccagcctgggtgacagagtaagactccatctaaaacaaacaaacaaacaaacaggggaatactgtactttcctgaaacctgctgtaaatccaggcaaggtattatggcacttttaaagtcctgactagattggaatggatctattttagggtaaggcacggttcaccagcagattattctggccccagaataatctctccggaggcaaactggtagtcaattgtcctaaactcaaaccctgcctccaactcttgtcctgagttgaggtctgtcttcctctaaagccctcagctgcagcagggcccttaatcaagatctggaatcccctga

SEQ ID NO: 172766 - DNA, 591 bp, Homo sapiens
agcaggcttgttcctgcccagcatcttggaagatctcggactagtgctccctgcagatgattgggacctaagaaacagagccctgcagaaggactggcaagaccacatgtcccggggtggccagtgtttccagcagtgacacttgggattgaaaccaacctttgcagagcgagagaccccacagtaccagctgtgccactgactgggaagtgcccagccttggccctagagtgggaaaatggcctggacatgaaatgtgtggggacctgacacctgtgctggcccctgcagcagaggcagaggcccaggcaggcggggacctgcttttcccagggctctccagggagtccctgcacagccctcaagagcctgccctgcgttatcatcctcaaggtcaagaaacttccttgggggagtctccagagacaggcagcctggccatgccctggcggacccacccactctactccaggacctccggatttggtctgggagtctcggcacaggggagtctgccatcgaaccagccacctgcatcagagccgggtccacctcctccgtcccgctgtggctctttgagcctcagtttct

SEQ ID NO: 172767 - DNA, 433 bp, Homo sapiens
ccagagtgctgggattacaggcgtgagccaccgcgcccggccggaaatggaagtcttgagaatgaatgttggccctttctattcagaaaatagcctgtgctccagcatagcatcatcaccatctgggagctacctaggaatagagtctcaccctaccccagtggtaccgatatgcacattgaaaagaacgaatctagaacacttttcactccttttttattacttggcttgggaattacaaatttcggtggactttttggcaggagtggtttttgatgtttgtggagaatgttgaagactacagtgtagccacatttactttacattggaaataatacaatataaaacatgacattttatttgcaaaatttgaaataatgacttctaaattacaaacagaattaaaaatttcaaagctggcaggctggagata

SEQ ID NO: 172768 - DNA, 781 bp, Homo sapiens
gctgctttgatcatgtttgaaaggaagcatagaaaaaagattgaaaagctgggtctctaaggtaggaggtctgggatctgtttattctacttagttcaagttggaattgatgctgttaaacatgtgagatgaccctaaactactcttcagggttaaggcaggtctgaggcagatggatgaattacgcaaatggactaggttgagaaaagttaatgataaaagggctgggctggaagactgggtcgaggaagaagagtgatacttagggtttactcacatcttatctaggcaacttttctggtcttgatttgggctttaagggccatgaatacacaaatatacttaaattcctacatttccagtatatatgatgtaagaaatttcaaccaattggtctgaatcttctatattttgcacttctcatcaggcacctagccaacggttgagggctgatcttctgacttggctttcctggttgaccagtgctggttctataacccaattaactatcagaattccaagcaatgaactaagcttgctggtttcatcctggcagaaatgaacataatcttgagctaaaattgtacagttgtagtccaacaataatggcagatacaaaggctatagtcccaggacaaagacaagcatttcacctgcataaatctcatttagcacttaacaattctgtacaggagatattaccaataaacccattttacagacgagtaaacaaactcagctagattaccaagtgaagaaagcgatggaagccacatctaaa

SEQ ID NO: 172769 - DNA, 836 bp, Homo sapiens
gctgctttgatcatgtttgaaaggaagcatagaaaaaagattgaaaagctgggtctctaaggtaggaggtctgggatctgtttattctacttagttcaagttggaattgatgctgttaaacatgtgagatgaccctaaactactcttcagggttaaggcaggtctgaggcagatggatgaattacgcaaatggactataatgtgtaatctgtgcatgtgtgtaacaataaaatacagttctatcaagattttggttgagaaaagttaatgataaaagggctgggctggaagactgggtcgaggaagaagagtgatacttagggtttactcacatcttatctaggcaacttttctggtcttgatttgggctttaagggccatgaatacacaaatatacttaaattcctacatttccagtatatatgatgtaagaaatttcaaccaattggtctgaatcttctatattttgcacttctcatcaggcacctagccaacggttgagggctgatcttctgacttggctttcctggttgaccagtgctggttctataacccaattaactatcagaattccaagcaatgaactaagcttgctggtttcatcctggcagaaatgaacataatcttgagctaaaattgtacagttgtagtccaacaataatggcagatacaaaggctatagtcccaggacaaagacaagcatttcacctgcataaatctcatttagcacttaacaattctgtacaggagatattaccaataaacccattttacagacgagtaaacaaactcagctagattaccaagtgaagaaagcgatggaagccacatctaaa

SEQ ID NO: 172770 - DNA, 438 bp, Homo sapiens
actcatacaatgaaaaagatttgttaacaaaagcagatgtattccttctgtttttgacacaagacaaaagtgattcagagcagtagctgatgattgtgactaaattatggtacataaaatggaaatggctaatcaggaaatgtgccatggactgtcttcttgggcatgggacagagaactgagaagagtgtggctatcaagcctgcctctggcactcaccactcacttttgtggaatcctgttgaatccacctctggtgttttaagtcctagagagaaacctgggggaatctgtgggagaggtactcttcttaactctatttccatttaagggttataacaaaatggctatgggacttgaatacctgttgatgtgatgatgttgaagaatagattttggacatttctgtcaaagaataaaataatttttataatttca

SEQ ID NO: 172771 - DNA, 382 bp, Homo sapiens
accttagtgattatctggtcaaacctccttgtacaacaatgggggaaacggaggcccaaagaggaaaagaccagacttcccacaaccaagcaaggggaagatcggggccaatgcctgggtttcttgactcccaatctagtgcactctctgccacacacccaggagccttaaacaaggaggcctctagggtccactcagctggtggcccccgtatcgttctctgtccttggcccaacaccagccctagctccgtctctcagagttcgctgctgctgcttaggcctgacatccctaagcggggggaaggtgtccatgagctaacactcaggtcccctccaaccctatgactccaggtccatagtgtatgaggccctgagccctg

SEQ ID NO: 172772 - DNA, 480 bp, Homo sapiens
aatactctacacacacattcacacatacacacacatgtacatacacatacacacatatgtatgcacaccacacacatactctacacacacatattcacacatacatacacacatgtacatacacataaacatatgtatgcacaacacacacacatactctacacacacacatattcacacatacatacacacacgtacgcacaccacacatacatatatatagatacacacatacatacacataaacacatacatatatgtactaacaccacacacacacacataccttgcacatgagatgtgcaaatgtagggactctgtctttaagttttgaacttgaagttgctggtctaggatgttacatgaaaagcttaaaacttctgggatagtttttcagcctttgggactgggtttgagaagtggttcagcagaggagcggagcctgcagggcttagtgtgcatgaatgcgtccgtctgcgg

SEQ ID NO: 172773 - DNA, 368 bp, Homo sapiens
taaaaataatgtacatgaaacaatgaaaatacttgcatagattttttaaagtcactatgaatcatagtgatttgtttgttactataccaaaaattcacagtcaagccatttaataaacatgactgttatatgtgaaagcatctcaatatcctaagattaagcaatttcatgcaaaggaaatatttctgtgtattttttaggtagtatttagatctgcagctaaaaccctttaaacattttgttagttgccattcatttaaaactccagagctcatgtatcatacaaaaatatcagaaatttcttttttaaatggaaatatagtcctagggtcaaagaaccttttcagaacaactagaccttcatgata

SEQ ID NO: 172774 - DNA, 409 bp, Homo sapiens
gattgttttcatcattgtggattattttttctggcttctttgtgtgcctggcaaggcattgtgaattttatctgttggctgctggatagtcttctgttcctctaaatgttcctgagttttgtcctgggatgcagttaagttacttgggaaagtttgattctttgggtcttattcttgtgatttgtcaaggagtgctcagtctatagctcattacataaggaataataatgcaatatagctaaataatatacttcaaggcaatctttaagtttacacttaagtctaatcttaaaagactgcaaaagacttactaaatgatcttagcaacaaatttaatcctctaataaaaaacatgaaaataataatttctgaaaaaaatattcactttcattaaaaactgcaaagcact

SEQ ID NO: 172775 - DNA, 771 bp, Homo sapiens
gagaggatttaagggttttgttcccagcgggaaggtgagaggcaaaaggatgctctgaaatgactgtccccctcatggcagcaggtgggcagatcaaagctgctcagtgcctgccccgtggaggcttcggttggctgcctgggaggagctgggtcaccagggccatcagctgagcttggtggtttgaggaggagaggcctgggcacattcaacggccagaatggcggcccacaggctgggcacacaaggcccctgagcagactgaggggagctgccacggctcctggcttgtgcccggcacatgctggctcgaggacagccagccccagaggcccagaattactgagtccaatccaagcccagccccggcactagaaccttgctccagcttctttttctggcccagttagtgcctacccccttccagttccagctgcaaacaggagccatgactccctttcagggaaggctgggcctctttccctgccccctgtgccccctccctccagcctccctaactggaaacactgggacttaaccatggaaaccctagggaggccccggggctccagacagccgcctttgctgcccagaggtgaggccttgcctaaagctccaggcctctgaccccatgggcagtggggcaccctgtagacatccctgcctgtagctcttcttagtgcctagaagtggcccccactccgaccctgaaaactccggaatgctaaggctggtgggcgatcagagctctcaccctctgcttgaactttt

SEQ ID NO: 172776 - DNA, 349 bp, Homo sapiens
ctgtaatcccagctactcgggaggccaaggcaagagaattgcgtgaacccaggaggcagaggttgcagtgagccgagatcgcaacattgcactccagcacgggcgacagtgagagactccatcttagtaaaaaaaagaaaaagaaattcacttctccatccccagtaagtcagaggtggaatccaagaacatgctttttttttttttttctttttcttttcttgagacagtgtcttactctgtcacctagtctggagtgcagtgatgcaatcatggctcactgcagccttggccttcaggggtcaagtggtcctcccacctcggcctccagattagatgggactacagg

SEQ ID NO: 172777 - DNA, 886 bp, Homo sapiens
attaagttcggagcagcccaaggctgcggatctagcctttctccctccggtctccagacccacgcaggttaaggcagccaagcagagacagcggagccccggtgcgtggttcaggcctggtcaacaggtaggagggccagactgggggccaggcacagaggagggcaggcccgcccgcaccggcgtccagggtcccgggttccgggtcccgggactggaggaggtcgccggcagcccgcccttccagaggcttgagattgggtggacgagacctgaagatcctctcggtctggaccccgactttcgatctgcttagagacctaagccgcgagcctttgcccacacggagaaacgtactatctaatatctaacaaccctgtactgcagtgtctggaggttgcgggaaggagacagtgtctccctttgggaaaactactgaggacttctgtatatcctacttcttctggactccataagttacaggaccgaaggaaactgagaaatagagaaaaggtgccgcttgcccctttaactccagaaaagggtggctgcagatggagcagcttggactttattttttacgttgcgggaagcccgccggcagcggcttatgccaattgattttcccagctcccagccctggatgtctagctatctccaggacagtttgttttttctttttctgtctttctttctttccttcaatgtatcagaagaactgaagctcgctgcccgcgagttcctccgagtcccaggatggaagaagattatttcactaagtctcagaggtattatgcatatgaaagaaaaaagtcctcattcaggactgaagtgtgggtatgaagttttggaccctttgcggtggaagaggcgaaaataacgggag

SEQ ID NO: 172778 - DNA, 263 bp, Homo sapiens
tgtttcattacactaggagcatattgcttgttcatatctaattcattcttagatcttccaacactgcttcccaactcatcccaagcacagtgctttattcaagtagaggtagaaacaaatttgttgagctgaatcatgttaaaaccgtagagtatatatgttagcatgaagaaattgggaagtgacttcaagtcagatgtccaggtttatcatatatatatatatatatatatatatagagagagagagagagagagagagag

SEQ ID NO: 172779 - DNA, 294 bp, Homo sapiens
ttttgtgaagattataagcagtgtgcattttaacaaaaattaataaccttcaatcagcacctttaaagaaaagtgttcggattattcccttaataaacatcgtaatatccaagaacaaggtctgaataaaaatgaggtgaagaagtacccattcattaaagtcctcaagaattgtttagtgctttcctttatagctaaaagctgtaggagaaacaaatatatgagatctgaataatcaaaatattttagaagggaacaatatcttaacaagagcactggtattagaaaagggct

SEQ ID NO: 172780 - DNA, 282 bp, Homo sapiens
ctccctccctcgccctctccactcctgcctcctggagactcagcgagctcgtccctcattgactctacatcacccctcacccaccggtcccaggtgcacacacgagaccaggcccagaggtacagggctgtggccttcgagctgccagcccaatccatttttctaccataccaaaaaccccttctttttcagccctcatgaccgcgtcttcctccaacatcccagccccggtcgtaggctcggcaagcccgctccagggcccacttcccatctcggcggccg

SEQ ID NO: 172781 - DNA, 574 bp, Homo sapiens
gggcacagaaagggcatctcacggcagggcccgttcccgtctttacctctagctgggttagctctctcagcctgccctgccgggctacattcaggggagcaaaactttgcccaacatttggcaagtgattatccaccctgaaatgtgctggtgatattattaactcatttccttatcaacaggtaagacactagcatgagcttccattcattctgcagaaatgttggcatttattcctttaaaatcagtttcatattaacctacattatgttctgtgtttaacatttttcatgagaaacattacacaaccttcgcctctagcttacaaatcccacacagaaggtatagacaagaagcccacatggggccgggtgcggtggctcatgcttgtaatcccagcactttgggaggccaaggcgggcggatcacctgcggtcaggagtttgagaccagcctggccaacatggtgaaaccccatctctactaaaaatacaaaaaactagccaggcgtggtggcaggcgcctgtaatcccagctacttgggagcctgaggcaggagaatcacttgaacctg

SEQ ID NO: 172782 - DNA, 647 bp, Homo sapiens
gacatagtgggtcctgctctatagaaaatgagcatatgacccttaataaaaaacaggtagtttttttatatacagaaaattaccctaaatgtgattatgtttctttattttttgaccgtagaacaggaatcttaatcttttttgtgttatggactcctttggcagtgtggtgaaagcttttagagttcctttttggaatatgtttttatatgcaaaaataaaatacatagaactataaagaaaaccagttatattgaattatattgatatatagttatcaaaatttaagaagtatgatatggtatgaaaatatccatgatttctactggtaacaaatccatttgtctaataagtctgctattactgctgtagcttatgttcatcactgaagtgaaaataaagatacagtctttttcatccaaattcacagacttcctgaattctatcatagaccctgcctcagagatatgagttccataacccactctaggaagatcacattctaaacacaagagtttactcaccaaatattctggtagaatagtggcagagtaaaattgttcaactgtaagaactattacatgtgtccctcatggttttttctttcctgaaatattctactacatgtccaggccgaagaagtataa

SEQ ID NO: 172783 - DNA, 547 bp, Homo sapiens
caatggagtgttaaagtctcccactattactgtgtgggagtctaagtctctttgtaggtctctaagaacttactttatgaatctgggtcctctgctattgggtgcgtatatatgtttagaatagttagctcttcttgttgaaccctttgctgttatgtaatgccttgctttgtctttttttttttttttatctttgttggtttaaagtctgttttgtcaaaaactaggattgtgactcctgcttttttctgatttccattttcttggtagattttcctccatccctttattttgagcctatgtgtgtctttgcacgtgtgatgggtctcttaaacacggcgtatcaatcggtcttggctctttatccagcttgcacttctctgtctttcaattggggcatttagcctatttacatttgatattagtattgttatgtgtgaatttgatcctgccatcatgatgctagctggttattttgcagacttgtttatgtggttgctttatagtgtcattggtctatgtacttcagtgtgtttttgtagtggct

SEQ ID NO: 172784 - DNA, 523 bp, Homo sapiens
aaacagagctctttgaagaaatggtaatttcaaagctagagcacagaaagtataagatgagcccagaatatctttttgtacaagaaagtaaggcaatgctcaaagaatgatggagacatgcccaaaaaaagcagagaagccaacttgaaaagattccaacaggccaaatatgggacaatttgaacatcagaataaaatggtgacagtcacagaattataacccattgaagaaaggaattcatgacatcatattaatataaataataattgaatattgaaattcgttaaaggaaatgagatatttatgtagtcttaaggtatcttctcacaaattatgtattacttacaaaggggaaaagtgcaccttgacatgagaatcttggcagaaccactttaatcaagaggtttagttgagcattatcagtaacagagtaaatcaaaatcatgagccacttgatagatacaatgagaaaataaagcatcacttctgtgacaccctataaaaaatgaatctaataatgag

SEQ ID NO: 172785 - DNA, 576 bp, Homo sapiens
actagaaagccaattagaactttatggacagggcttggagggcttccaaagaatagttccatggagcattggagggcttccaaggagcagtaacctgacagtcttgatggggcaccccaaatgtcattgacagatattacagggagattttcttttctctagaggagaaattcatacctcttaccttgagaagcaaatataaacctggttgctagcattctgtgaaatcagtgaagagactggagttctctcagtgcacacactgatttttcacttagtccctaggtttctgtatggctccacctcccacctgacattgtgtttattctgagtgcagagccagagaataagctttttcctgtttgtgttgaaacatggaagtcccctggctgtgcaggcaggaggaaggatcttgaatctaagagttaatctgataggctttcaaccaatactccagatttcagcctctatcctcaccctgccttccaaatcacctggtgcctccaattctggaaacttgcatgggttcttcagtgtgaatggcttccttctttgtctatggcatccttctctgca

SEQ ID NO: 172786 - DNA, 557 bp, Homo sapiens
ctttcacaacattattccgggacccagtctccttccatctagtggctctgtcatcctcctagggccttggagtggtctgcttttgaccagctaatgggaggggagaggcagaataggatcctgtgaagacttctagggtcaggtctggaaatatcttttgctcacactccattggccagaacaagactgcctcagtgcagaggaagctgggaaatgtagtttagtagggtacccagaaggaaaagggaaacagtctctgccacactgaagcaacaccaaaatctgagggttggatgtaggaagaagcacctgcaaaagatagaaaagagcctttaagaggatcacctgaagccaggagtttgagaccagcctgggcagcatagcaagatcctatctgtacaaaaaataaaaataaaaaattagcctagggtggaggcatgcacatacagtcccagcaactcaggaggcttggggccaggagtttgaggctgcagtgagctttgattgggccactgcactccacttaagcctgagtgacagagcaaaaccctgtatcc

SEQ ID NO: 172787 - DNA, 333 bp, Homo sapiens
agcttgttagaaatttagaatatcagactttattccatatcttcagaaaaaataatctgcattaaccagatctcgagtttattgtacacattaaaacttgagaggtaccttttaactcaacgtgccttttccatctgaaaaatacacacaacttattctgtatgatgcacatatagcactcagaaatggacatgtttgtgtttatgcccttaattttatactttatcatccagaagagtaccatgtgtagtctgaatgtaaccataaaaaaaatcatttggccaggcggggtgactcacgcccataaaataatttttaacagaaatattttct

SEQ ID NO: 172788 - DNA, 391 bp, Homo sapiens
agcttgttagaaatttagaatatcagactttattccatatcttcagaaaaaataatctgcattaaccagatctcgagtttattgtacacattaaaacttgagaggtaccttttaactcaacgtgccttttccatctgaaaaatacacacaacttattctgtatgatgcacatatagcactcagaaatggacatgtttgtgtttatgcccttaattttatactttatcatccagaagagtaccatgtgtatgctgattctgtggatcttatgccactttcttttctcagggcaagaagtacattagaaaatatttctgttaaaaattattttatgggcgtgagtcaccccgcctggccaaatgatttttttttatggttacattcagactac

SEQ ID NO: 172789 - DNA, 2067 bp, Homo sapiens
ttaagttgcaaaacctgaaactttaaaggaacaaacataacacatttgattgtagaaatgagggaaaaagagtgtgtgtgggtatgtgtgtttatgtacatatgtgtatatgtacagtggaagatgccataaacagatttgtaaaagttaaaggacaggctccccagagaaatagccagtgtgctccatccacatcaagcctgagtgtgagagagttctggataatcctgttacctggctgtgactttggaagtggagaccatgatctctgccttctccctcatatcatctgtcttaaggtcacagataccgcagccactgccaggtttccacaagccagtcacctttcaggtggagaagtagcttgctatagcagccagtttctcgagtttgcgcgacagtgccactggaacaatggctcattcatgtcagatttccagagagttgggcagcacacttgtgagaatccagctgtgaacaagccattgctgtctttaggagcttatgtgccaggtggtaaagtgtacatatgcaaataaaatggtaagatgattgcaagttgtcatgaagataagacagcattgtaggggtgaggtgaccctagattagacaggttggctgcagaaggcttctctgagggtgtaacacttgttttgagagctaaaggatgaacgggaggagcatcatgagtaggagggaggcaggagctttctggatagaggcagcagcgtgtgtaaagagcttggggcactagaagaactggaagataaatggtgtgactgcagaatgatgagtgagactcaggaggcacgacatgaggctggagaggtgggcagggctgtgcaggtctcagtaaggagtttgattttattcaaagtgccagggaccattggatataaattcttcataaactgcatgcagaagagagattaaaaggttggcagaaaggaataaaaatgaaactggaggaccaagctggtaaaaattgcccccaagggtctatcagaatcctaactcacttagaccaataagatcagtggttacttatgaacaatacgtttgaaaagacctatgaaaaaacacgtgaaatttggagtttctctgtctctcatgtttcctgtaagtaattcgctagatatagagactcgattagattttgattcagtattttaggcaaaaatattttttgggtggtactgtgtacttcctattttgtcacaatgataggcatataattatatgtttagttccccactttaatgatgctaaaattaattagtgagttcaggtgttatgcctgattccttcatcataaacttctccatcaagtttcaccaaatcattttaacagtgattaataatcattggctagatacactatttcattagagttgcaaaataatagttttcctagcatttcttctttatttattggctaattttctttgattaagcactttcctaaatggagtattcaaaaaaaactatataaacaggaaaagcaggataaatgcttgatttcaccccccccccccacccccagcagttttcagaacaatagcttggtgccttaacacctccacagagagatgaccaatggaatttttcttaatatcattattgactcactttttttattgtggtagaatatgcataacacaaaatttacagttttaaccatttttattatacatttcagtggcataagtacattaacaatgttgtgcagccatcaccaccatccatctccagaactttttcaacatcccaaactgaaagtcttggccaggcatggtggctcatgcctgtaaacccagcactttgggaggctgaagcgggtggatcacctgaggtcagaagtttgagaccagcctggccaacatggtgagaccctgtctctgctaaaaatacaaaaattagccagatgtggtggcataagcctgcagtcccagctacttgggaggccgaggcacgagaattgcttgaacccaggaggcagaggttacagtaaaccgaaattgtgccactagtactccagcctgggtgacagagcaagactccatctct

SEQ ID NO: 172790 - DNA, 745 bp, Homo sapiens
gaggtgggtgcttcttaattttggctttcctcctttctaacatgtgcctttaaagctatgaattttcctttaatcatggccttgacttcctctcataagttttaatgtctgcagaatctgtagtgatgtcctgtttcagtcttgatattggtaatttgggccttctctttccttttgttcaccttactagaggttcattacttttatgattttttttttcaaagaaccagctttttgtttcacttacttttctccagttttcctgttttccatgtcattgatttctactattatctttagtatttcctgccttctgtttgctttgagtttaatttgctcttctattttctagttttgaagcagtgtcgttgtctgggtaaatacctgaggtttgttgtctcacaacaaggaaaattgagtatgtggacacacaggaagtgggtttaggagctgaggtttaataggcaaaagaaagagaaaggagactagaatagcactctctcctgccagagagaggggctcctgagtgggacttccagcctgcagcaaagtgctctggattttataggctggcttgaggaggcgctgtctgatttataggggtcaaagattggttggaccaggtttgacgtctacatagcatgcgaggaagctggcgaccccatcctaatcttctattatgcaaatggagttgttacttggccggtgccatgttgtcttctcctcactgtacacgtggttggca

SEQ ID NO: 172791 - DNA, 516 bp, Homo sapiens
gaatgaagatagggacaggctggagtttggggaaactacactgaaaattattgtagtaattcaagtctgaggcaatcaaggctcaaatttagaaagctgagttattaatggaagaaaagaagaaatagattttaaaaagactagtagaatgaatccccagggcttaggtccagtttgtagtgagcatggggtgatgaaagatgagagagaaaaatgtaaaagatgaaagaaagagattagaggacaaaaggcttgggacaaaaggtaattatagacacactgagtttgaaacaatggctgcaagcccaggatatggtacaactttgacgcctccttaaacttgaggggattaattttgcagaaaaataaaatgtgaagaatcaagactgaacagagtagcatggcaataagagattcactgacatgtaaaagtatcctaagactttgttgacacctgactgatcaaatgatcacagggcctattggatttacttaaaagaaaacttcaaacttcat

SEQ ID NO: 172792 - DNA, 511 bp, Homo sapiens
aggaagaaaataacatccctgtagacattgaaagcacaccagaaaggcatgcccataaatggatagaagctatagagtagtacttaaaattgagttttaagacatttagaaaatgatacaagatatgaaagaacaacaaaaataaaattgaagaacttgggaaaatgttagtaatagaggaaaatcactcataaattaagactagaataaacaacagctgatgaacaacagatatgccctaaaagaaatgaaagataaaaatggaggacttttagaaatcagaaagaaaagagataaaaaggattagtaggggtatgacaaactctagagacagaaaaaatgcaacatacagaacaaaatcaaatgactactttgatgaaaaaaatttggaactacacattggaagagtaacctgcctacctgagattattatactgggacaaccaatggcaatatacaaactttgggtttgactagacaaaaacagcaaatgacttacaagagcaagagt

SEQ ID NO: 172793 - DNA, 456 bp, Homo sapiens
agtgtccctgtagacaaataagcgaaatgcactccttatctccttctctacaaacacactcccgatttcaaaaagttgttcctcgtatagcttcttctaaaggggggaaaaatacattcatatttccagagctgttgaaagtgagctcggccttggaactggaggcgcgccgggggtcgcaatgcaggcacaggcacgtacagacctttgcaacaatccggtacctgagggccctagtgcttcctgccaaggagggttttccaggagttaggggtctgcgatggtggtgtggtaggctgatggatggagcgggaaacagtgtgtaggagagggattgtaaaagaaacatgccttttaaaataaaaaatcagactggtctagggattgtcgtggttgaaaatctacagttgttatttcttggaaaaggggcctggctgggagagacattcaaagctg

SEQ ID NO: 172794 - DNA, 661 bp, Homo sapiens
ccaaattattttccaaatcaaaaattataatagtgaatacgctttttaaaactatatatgccctttaagtattaagcaatattctgtttttagatgtctgctgaagatagcttggaggccagagtaaagaaatggcctccaaagcccacccttctgttatctttccccaccctcccccacaacccagccaccagcacttatcatctctagcctcgtttcatgtactctttccaggataaattggccagacaatgaatagaagccctgggtcatccaaaaaaacaaaaaaggcatgctatgcaagactcctttgaataataacttccagtaatgttggcaagaagacactttgaaggaagcatgcaatgaccttggggacaatttggcaatatgaattaaaaggctttaaaatgctcatatcctgtgaaccatcaattccgcaaccaagaatttatccagaatacttcattgtggatgagcacaaagatttatccgcaaggatgttcatctcatcatttttataagagcaagtaattggaaatgatctaattgtacgacaggaaattggttaataaactgtggtacatgcttacgatggaatacatacaacttttaaaatgatattttaaatacttactgttgaataaaacaaaatgttaca

SEQ ID NO: 172795 - DNA, 618 bp, Homo sapiens
catgatgtatatatacatccatatacacacatactcatagaaaaaagtctttcatcttttaaaagttatacagctctggaatttaactagcatactagaaggcaataattaatatagaagaaaaagagaccaaggaatagggaacaccagagggttttggataaggtcagaaaaatgtgtgctactgtagcaataacgcttgaacaaagaagtgaggaagtgggctgggtgcaatggctcacacctgtaatctcagcactgtgggaggccgaggcgggcggatcacgaggtcaggagatcgagaccatcctggccaacatggtgaaatcctgtctctactaaaaatacaaaaattagctgggcatggtggcacacacttgtagtcccagctattagggaggctgaggcaggcgaatcgcttgaacccaggaggcagagtttgcagtaagctgagattgagccactgcactccagcctgggcgacagagcaacactctgtcacgaaaaaaaaaaaaaaaaatgaagtgaggaagtgaaagaggaagtcgtgttccctacctgagggaagaacattacaggtacaaggaacagccagtgcaaaaatcttgaggcaagagc

SEQ ID NO: 172796 - DNA, 109 bp, Homo sapiens
tcttcaaaccctacacattcaagcaaaacagacaacaaacactagtgcaagagaaggcatgactttgaattaaaaatgacagtcatttataaaaagatgcattggagat

SEQ ID NO: 172797 - DNA, 321 bp, Homo sapiens
tagtaggctcggtacctcatttgctcatctgcttaccacaaattacaaattccagagaaaagaacaggctttcctcaacaaagtgtctcttagcactttccaagactcactataatatagtaagggaagacaatgcagtactggagtaaagacagacataagaggtcagtggaacacaacggagtcaaaaaatacacacgcattggatatattcactgatttttttggggggagggggtaaaatccaaggtaattcaaaggaataagaatactcttttcaacaaatggtgttgaaacaacaggctatctgcatttggggtg

SEQ ID NO: 172798 - DNA, 385 bp, Homo sapiens
ctccaatggctttttcaatgcaacagtctataatactaattaggggtcaggtactctccctattgaagaacagttttaagaggattaacaacatcaaaacattcttaatttagtcaactgggagatgctttcttcctgttatccctgatgttaacatttcctatcacatcaggttgcattagagcctatctttggttagacaacaccaaggatttctaattagaactcaagaatgaagataaacttactcatcttgatagtggatcttacacattcaactttccagttaacttccagcggcatttgtgaggcttaattaacatttgtaaagctccatgatgcccttgtatgacagcactgcagtaaagcaaaggactgtgattat

SEQ ID NO: 172799 - DNA, 282 bp, Homo sapiens
tatcaccagtccagagcaacaacaaaaaattcactcaatatgaataacaaacagtggacaagatgtaaaacagtgtcaaacctagctgttatcaaaagaaatgatcaagtaaaacaaagacctaaatttttacttaatttactaaaatattaaatgataatgtacttgtatacccttacaagatgaaataattatttttgaaagtagttttataatgtattctaagcaataaaatgtatgtgttacttaagccagctaattaattcctggaattttattcta

SEQ ID NO: 172800 - DNA, 407 bp, Homo sapiens
ggtgtggtggcaaatacctgtagctctagctattcgagaggctgaggcaggaggatcgcctgagcccaggagttcaaggttacagtgagctgtgatcatgccactcgactccagcctgggtgacagagcaagatcttgtctcaaaaaaagtgggaaccaatacaatgactcttggcaagcattcaactcaactagtggaagcagactgaccacgtctacaggagaaaaaccttcaagcttcaagcatttagagaggaaataagagtatgtcagttaacataaggagctaaatggaaatcagttaagagagcttctatacaagtcttaaggattttctaggccaagtgctgtgactcacgcctgtaatcccagcactttgggaggccaaggcagatggatcacttgag

SEQ ID NO: 172801 - DNA, 375 bp, Homo sapiens
tggcagcagaatacatattcttttcaagtacacatggaacactctccaggatagaccatgtgctgggtcacaaaacaagtctcagatttgaaaggattgaaatcaaacagatatgtttattgaccacaacataattaaattagaaataaacaaaagaaaggtatttggaaaagcttctaatatttggaaattaagcagcatacttttaataggtcataaggaaaatttaaagacagtttgaactaaatgaaaatataaatacagcatatcaaaatttgtgagatgcggctcaagtggtgcttacaggaaaatttataactttaaatcctacattagaataaaagaaaacatcagataatctaagcttctacctta

SEQ ID NO: 172802 - DNA, 299 bp, Homo sapiens
cggggattcgctatgttggccaggctggtcttgagcttctgatttcaagtgatccgcccacctcatccttccaaaatgctgggattacaggcatgagccactggcctaaaaactcttcactattgttctcactcccaaatcaagtgcctatgtcagcaggactattactattcaggctgctgtgaccctgctcttgctctgtttcacttacatttggctcaaaaggactaggtatcgtctttttttttttttttggtagagacagggtcttgccctgtcactcaggctacattacaatg

SEQ ID NO: 172803 - DNA, 256 bp, Homo sapiens
ttggtgtcctcagccaagctgagcatccctgacctctaggtagagtccacattcctgggggcctggccttgtgctgtgggcatacgattgtgtttgaaggagggagcccacgggactttctccaaggcttggatacagtgtgttgctggggctaccctaacagtgtggccctttccccctcatctacctggcactcttctccctatggaggtggactgtgctgggccatgtctacctactccacgggctccacggg

SEQ ID NO: 172804 - DNA, 402 bp, Homo sapiens
tacagataaacactgtcaactttttattgagctacctacagtatttttgctatgcatatctgtatatctcttttgcaaaattaagattgcattttcataattttataaactatttttcttacttaacaatatattgtgaaatttcacaaggcttttccccaatattgtaaagtgttttcatgaatattattttaatgtactagattgaaacatatagaattagtaatatttaatgttttttaacctatagtgtacttttttttttttttactagagaaggtttgtgtaaattagcagtacatttatttcttcctcatttcagaaaatagcaaaattgtatgcaggaaaatgggggaagccagaagaccttgcgacctggcacccagaggtcagatgccattt

SEQ ID NO: 172805 - DNA, 346 bp, Homo sapiens
aagtactaaaatatcaccatgtacaaagtgccttagggacacaaaatagggagcaattaactgaggaattaagagttgtgttatatggaaactagtctttgaaagtgagtggggatttccagatggagcagagcaaaggccagccagtgctggaggaagaacaacagcggcatcatgttgtcatagaagaaacgcagggagcaaacaatggagccagaggatgaattaaatatgtcagtttggagctagtgccttacttcatgctaaggtgtttcatgcttatcaactagccattaggaagccatcaagtagcagaatcatttctttggtcatttctgatttcaaa

SEQ ID NO: 172806 - DNA, 129 bp, Homo sapiens
atgaggctgcagtgagccatcatcgtgccacagcactccaacctgggcgacagagtgacctgtctaaaaaaaaaaaaattttaagtaatgtgataatatatggtaaatatcaatgaataggccaagtgt

SEQ ID NO: 172807 - DNA, 404 bp, Homo sapiens
cggcacgaggttttgttgccagatagcaagtcgtttgagacctgtttcatgccatgagggacaaaccacatcttgaagtggcgtggttgacagttgtgtcaaaaaaataaaacaaggcattatcaaataatcttctgaaatttctgcctatatcatgaaaggaggatgtttgatgagcagaagttggtgtgggattcataactaaactgtccatctgtgggagaattctgcaggcttccatcactagtgtgtgacacagcaaagagatgacagtcctattcagctcccaaatctgtggttccagggcactgctattggaacgaggctcagtcttgggtgccactcaaaagggaaagtacagatggattaaagagtgatcaagcaaaaaaaaacatttgcggccg

SEQ ID NO: 172808 - DNA, 386 bp, Homo sapiens
ccaatcattaagctctcaaaatacaaatatttcgatgttactatgatgcactcatctggaatttagtaaaaaaaaaaaaagggatttcagccaggcgtggtggctcacacctgtaataccaaggcaggaggatcccttgagcccaggagttgaagaccagcctggggaacatagggagatcctgtctctacacatttttttttttaattagccgggagtagtggtacatgcctgtggtctcagctactcagtaggctgaggtgagaggatagcttgagcctggggggttgaggctgtagtgagccatcatcataccactgatctccagcctggatgacagagtgaggtcgtctcaaaaaaaaaaaggggggtgggggggtttcata

SEQ ID NO: 172809 - DNA, 205 bp, Homo sapiens
tccagccatgtgacagtgctgcagttcaggtgacctgctgacaggcacaagaggcaattagtgctggcctactaggagcatctgctctgggtacactcctgaggtggggtcaccgcacagtgtagcacgtaagggagcccacagtagcagcctagctgctaacatctccgtgcattttttttttttttagacggagtctcagtct

SEQ ID NO: 172810 - DNA, 220 bp, Homo sapiens
ctataggaaatagacacgttcaaaccctggggctcacatcatttccctgttcatatggcctgtcctggagctggttaagatattaagttaagggaaagtataaacgttaatgggtttttaccagattcttcccccttacttccgtaaacccatgtgctaacaggcctttcaacaaagtatactgagatgaaaattaacgcttaatacactctggaaagtg

SEQ ID NO: 172811 - DNA, 169 bp, Homo sapiens
agccacatctatgagacagatttttaaggagatttcagagccctccacccagccctgactccagtcccttcagctacaagtatgaccccaagtgcctgacttggtttttctcattcatcactgtgcactttgatttctaaccttagcctcgcggatgatgccagtttgt

SEQ ID NO: 172812 - DNA, 465 bp, Homo sapiens
cctccgtggctcaagggagagaggactggcccagggttcccctggaagatagtggcagagataagcctccagtgtgggtctgataaccagacgggagccagtaaaggcggggtgatttcctctgtccccaccccccaaatcattcaggggtagggccaaagaaccctctatcatctccctttttagcgcccccccgtcattcctttctgcttagcgggaaggccaggtggcaagggtggggatgggatggagatagttttcagcagggagtgtgggctggcccaactcagccatgagccagcttgtcctagtctgaagagagcagggagagtcttgggggaagagccctccaggctccacattcctgaggaattatgagaagaccccctgaaactcaggccagagcccttagttggttccagccctagtccaatcctggctgggtgatcaagagcatatccctta

SEQ ID NO: 172813 - DNA, 902 bp, Homo sapiens
gggctcagtgcgccatgttgctctgtggtatcgcagtgccttgcaaatgccctgtagcagatgaggacacaaattagacactgagggcactggaagtattttgggcatttcacctgcccagcacttcttctggccactgcaccatcattttcccttggagaaatctctggtcttggtggaattgccaatcaaaatgcctgcctacaatggatacccccatgcccccaggccagcctatcagactctctttctcttgagcagacatgggaacagctggcatgaatttgtcccaataggaccatccatgtgattgtgctcctcagatcccagctggccgtgattcctgtccctccaagcctggttattcagttctttctgctactctgggaactacttgtatctgtctcatacgttcattttcttgcctagattaagttgttttctgttgctggcaacctgagaaccctaagtgataggaaagccaatctgcagcttgcccttggacctcatcctgcacagggagaggttgaaataggtccaaccagggtcacagggtccccggagccctgctttccccagtgatggtgaagccctggcaggaggaaggccagcaggcagagccgcttctgtcctgtgatgtcgtggaagagctggcctgcctaatctgggtgggggccagtgcatagaaatcctgatagctggccccgggtcagagtccttactatccgtcgatgaggggggccctcagaggcagcggggggccagccgacgaaggcggccaggggggccctggacaaacgagagcgggcacgacgggagagacatcctgaaaacagcgggggggaggcaacacgcgggggggaggggccaacacgccccctcacgggacactggcatatagg

SEQ ID NO: 172814 - DNA, 790 bp, Homo sapiens
gccctgtgcgccgttgtctccgacggcgctgcctccctcgacccgtggctcccccttcgcaagttggcgtggcctcctcccttttgtccggccctggtccggtctgccgcagacccctcagctgcctgtgcgccgagcatccctggagtcacccgggccaggcgtgtcggtgccgagcagggcgcgtagtggggcagggtggcacgtggctcgtccctccagcgggatgaggctgccaggggacggggcgctggtgcaatggagcgatggaacgtccacatcctggaagcaccgtgctgcaagttgccatgcgtcgtcaatggagagtatcccgctgttcaactaacgggcctgatcaaacttgccttcctgattctccaagaccatggtgcaagttctacagatctgactgagacagcagatggattacactagtcattgtcgactgaggaccggattgcctagagctgccctcctcggagcacctgagtgtggcggatgccacctggctggccctgaacgtggtgtccggcggtggcagcttctccagctcccagcctattggcatgaccaagatcgccaagtcagtcatcgccccactggctgaccagaacatatccgtgttcatgctgtccacgtatcagacagacttcatcctggtgctcaagcgggacctgccctttgtcacccacacgttgtcatcagagttcaccatcctgtggtcagtggctagactgtagcagccgagaacctcggcatcaccagtggcttcgtgaagcccaagctgggt

SEQ ID NO: 172815 - DNA, 266 bp, Homo sapiens
cagcatgtgctgctttgtgtttctgtgtcacattttggtaaatctcacaatatctccaactttttcattattattatatttgttatgatgatctggaatcagtgatctttgatgttactactgtaactgttctggggtatcataaaccatgtccatataagatagtgaacttaataaatgtggtatgtgttctatagctctaccaagagactattcccccatctctcttcctctttttgggccaccctattatctgagacataaca

SEQ ID NO: 172816 - DNA, 484 bp, Homo sapiens
tacaagtgtgttccttggactggaaggcattgataatccaaacaatatataaacacatatggaaaatccttgctcagctctaatctccttacatagcgtttcccaccctatactcaattctttttactaatttcttgtgaattctttttttgtttttatagcaaatgcaagaaagttaaggtatattcttttatccccttgcctttctcttacaaaatacaattgtggtaaaacacatgtaacaaaatttagcattctaaccattattaagggtacagttcagtctattcgcattgttgtgtagctaatcccctgaactcatttcatcttgtaaaactgaagctctatactcattatttttaagtaaaatatgtgtctaataaaattaaccctttgttagtattgagttttatgagttttgacagatacagtcatgtaactactaccacaatcgagatatataacaataccattgcctcccacc

SEQ ID NO: 172817 - DNA, 318 bp, Homo sapiens
  misc_feature (50)..(51): n is a, c, g, or t
ctgattatgggactgtttaatagattaatgtgactgcaaaagctaaaatnnttcctaggttattgaaaagtcatattctcatctaaatctactacactgtcattttatattcaatttaaattccctcttcccccccgcagcaggaattaaaaggagtttcctttctttgctcgttcgccctctggttagctgctgcttctgacttttccagagctggggcaaagggaagcaatgtaaagaaaattgaagggtcttacttaactgtaggtgctgttgtaatcttgctgtatgtctccatggcagctgcccaaatgatga

SEQ ID NO: 172818 - DNA, 330 bp, Homo sapiens
caacacagttaatttctaatcaataaaaaggaaatcaaagaaaatcatctgggacaaaagacattttctggagatagcaagagcccagctctcctcctgacaggtttgctttgaactccttctctatggtcctttcgctctctctcacctagcaaagggtttcaaatgtgcgcacacaaattttagtgaagcccaaacacagctgctctgcgcccccttatgcctttgctctcaccggttggataaagtctattgtctcttaatctgctgcacaaacaacattaaaatagaaatggattttttaaaaagcaaactccaaccgcaatgcca

SEQ ID NO: 172819 - DNA, 486 bp, Homo sapiens
acatttaatggcattttattatagtttacagaaaattgttacatcaatttccattacactagtagtttttaaattttgtggagacaaataactacaccgtttcttcatatcatcaaaccaactatcaccaagccccttttttttttcttttttttgagatggagtcttgcgtcttcgcccaggctggagtgcaatggcgcgatatcggctcactgcagcctctgccacccgggttcaagcaattctcctgcctcagtctctccagtagccgggcagggtggctcatgcctataatggtacaggcacgcgccaccacccccggctagtttttgtagttttagtagagatggggtttcaccgtgttggccagttggccaggctttattaaaaatacaaaaaaaattagctgggcatgggggtgcacaccttggatccccagttcttttgggggtgggggcggagaattatttgaggaaggagaattgc

SEQ ID NO: 172820 - DNA, 839 bp, Homo sapiens
gaaattttaattttttttgaggtatcctctgtagtgataaatgaagcacacaatagattcttatcacggctttcaactgtcacattgaagaacttagttgtttgcatgttctgaaaacttatttctctgtccccatgatacccttttttacaggaatattctatatcagtaaaatctcggtcatttaaattatagacaaatatcaatttttatttctacattacatctcctaaaatattttcttatatacttatctacttttttttaaggaaatgaaagctgatttgaccagatgagaggctaattacataattaacatacagatacacttttcaaaataatagtgaataaaaggcaatcttgaaagtttatccttttattaaatttctgttttaacactcactagttagcagaatgctatcatttgcccttcttgaaatgaattgttcacctttcagatttgccatgatgatagcactgcagaaactcttttttttctttggagacggagtcttgctctgtcgtccagtctggagtgcaatggtgcagtctcagctcactgcaacctccatctcccgctgtaatcccagaactttggggaggcaaggctggcagatcactttagatcaagagtttgagaacgacctggcaacatggtgaaacccgtctaaccgaaaaaaaaaaaagacaaaaaaaatttgggggcctggccgaaagttttaccactcgtgggcgggccaagggtagaccggctacggtgcaaagaccgggcagcaggtggtcccaaaaaaacgggacacgggtgacaccaaggtgggtcggtacaggcggcaaaaccg

SEQ ID NO: 172821 - DNA, 262 bp, Homo sapiens
tttgcacttatttcactgtggtaacacttggtgccttctcccactggctgtcctctcacagcctttgtgatctttgatcttggaatgcttgttttctagcagttgaaagctgaattgaatttttaaaagttcctctagtgcatgctgaagattttattagcttgctgcggcagttccattttagttcctctcatagcatcctctcattgagagctgttatccattttgtgctcttgagaagctccgtgaaattatattgcag

SEQ ID NO: 172822 - DNA, 274 bp, Homo sapiens
aacgcaatggctcgtagtttggtttactcgatcttggctggcactgtaaagcgtatgtaccttttttgagtattttctaattccctctaattcccagggtttagaaaggatgtgcaaatttgtgcgttgaattaaaggacttatgcagatgagtttttggttttaggggagagttgattacaatttttcttggtttcaaagcagttttaaactaagtttcaaaaatagatctcttctttttcaacagtattccaaactgtaatgttaatcctag

SEQ ID NO: 172823 - DNA, 287 bp, Homo sapiens
ccaggaaagatgagaggagagaaaggggctaagaggactcacggagccacgagagcactgatgttcagctctcctggtggaaggcaatggattctgccctgagctgaaagactgagaagcagccagcacagtttttagagctacgggcgcaaattccaagagtccactgagttgaaagtgattgtccctagggtggatgctggttggggcaaagggccgctgtttttcctcacaagccctatggatacacaggctcactaaagattaaaacaggaaaaaaacaaaca

SEQ ID NO: 172824 - DNA, 416 bp, Homo sapiens
ttttgactattgagttggagcactgagatttgcaatatccccatattcaaacactgattcatgagtaaaagaatgaaaccagagaatccacatggttttggataaattgaaacaagtaaagaaaggtccctaaacaccacaggtatccactaaaatgaaggagcaataatgtataaatgtctctggctagcttagagacctgtgtgttaggaaatgatgtcagtgatgagttaccatagaaagctctgggaactgccttgatggcttgggctgaatgttataggtatgaaagaaaagcatttgaatagtccttttaagatctttctagccctgagcagtcatatttttggaggccctactcctcatcctatcaagcactaaatagacccacatgccacattagatacaattttgct

SEQ ID NO: 172825 - DNA, 498 bp, Homo sapiens
tactgtttgaaaatttacaagcagaatgtattaatttctgaagaaaagctcattttttaaagaataaaaaagccaaattagatttaagttagaatattcttcctataccaggcaatctttttagatgatgtaacaaaagcagccacacaatggaagggccagtatgcataggttaaagcaacaggcctttcaaatgcaactaggtggggccatgcttctctgtctaagagcttccctaggcagaatttggtctactttgtctccatttatcctaactctagtatttggaacaaaaaggggggtcaaccaaaaataactaacagagaatggaaacataatggagaaagaaccatgtgagttcatcctagtttttttcatctggcatttctcccagagacactcttgacaagctaaaaagaaggatggatgggtcttctgtttagcctcatcttttattttttttaaaaaagtcagcatttctaactccaggatctatta

SEQ ID NO: 172826 - DNA, 458 bp, Homo sapiens
ccattaacttgtttaatcctcacaacaactctattagttatgttcttctattattcccattttatggataaagaaacaaagacacatagaggttaagagtttctgcccatggaatatagccaggaagaactggatgcacaatgagaggataaaatttgaacccaggcaaatccccaattaacaaccactacactatatgtggctggtcaaggaaaatatgatgttttattgaagactttaacagtagataaaggaatagagtttttctaatcatctaaaggctgttaatagtgttgacaataacaagttttaaattctgatttttcactactactaaagatagatacaccagattctcatttattaaattcatgaccaaatccagaatttgtaggctttccctaatctggatccatctttccaattctatgtcatctcccactagtttctagcacacg

SEQ ID NO: 172827 - DNA, 520 bp, Homo sapiens
gccccggagcacatggtgacatgctggagaagctgggcagtgcccaggagttggcacgtggggactcggttcgctgagttcgctgaaagcaaatccgtgttttgcatgagcggcctgtgtgtctgctggctctaaacctgccttgttttgtccagctgtggctgggatctgtgactccttggaaggcatttcacctcactcagagtcacaaaattcaagcaatgacaagaacagtgcctggagtagaataccatttaaattttatttatattcatttattcactgtcaaatatcctttttatttaaccaaatttcaaactgttagaaacagtggaggttatggaacccagagtcaggcagatcctcagagtttgtctttatttgcagctgtgagcacagaactcacgtatgttcatctcagaaagatcacagaagcacaggtgcttagaagagctgacaccaagcatgtggaaggaatttaacttcttcatgtattggtacaactgaaacaaattatgcc

SEQ ID NO: 172828 - DNA, 340 bp, Homo sapiens
caaatcacctctcccttagaatctactcactccagtactcctcaccaaccacagaggaaaccaattcgccaccctcactcacaccagagcattgtgttattttctagttggatccacgcttctattgcatggttttccggttgaatccaggcttctcatttctgctccattcttaccacatctctccccagctcatgaacctgctctgacacccacttgtctgatagatggtggatacagtacgctgtctggatgtcaataacttctatcatttgcccactgtgggggagttttctacatttcccaaccttaggacataccttctattctacttgggctg

SEQ ID NO: 172829 - DNA, 398 bp, Homo sapiens
gtttcttctgctgtggtgcacctaagctcaagccttccttctctccctccccttctggccggtatggtatctgagctcacagacagacaaggcatgttagaatcatcagatcatgagcaccgtgctgggatttagccctctccaaagtcaattcttacagtccatactttgcttaaatcctcagttgttgaggtctgctctgctgtcagtaatcccaggctataaatttcccccaaatgtgggcctagataagtagaggttgatggactcagcttattttcatggatgacaggaactggaaagagaaagggcattgaaaataaaagttatgcagaatagtcataacctcttactgttcaggattaagaaagcctagctagaatgaagccatgagaatg

SEQ ID NO: 172830 - DNA, 920 bp, Homo sapiens
ggggtttcaccgtgttagccaggatggtctcgatctcctgacctcgtgatccgcccgcctcggcttcccaaagtgctgggattacaggtgtgagccactgcgcccggccttttttaagaaatattcaagctgttacctaaaggggctgtacccttttcactcccaccatggtgtgtgagaattccaggtgctctgtatcctcagcaacacttgctgtggtcagtcttaatagtggtcattctaactggtgtaaggtgttttgaaggaaaaaatcacattaaacttgtgctctcccaattttatctggggaaagaaataagaaagccagaatccgcaacattgggcgaatgttttcttgcatgacagcagctggctagagcagaggagtctcagcattgctgcagaccctgtttcaaagccacatagagatgcctgcctacttctcctggagctccaacacactatagtccccaaacattaaggcccagtgccagttgtcatttatcattgtgcttgtattattgtttttctgagactagtgggatatttctctatattcatgtcttttaagaaactttttcactaaaaggctagttttttgttttagtattactttatatataacatgtacaaaaacagatacaaatcacaagttgtacaactctttgaattaccacaaagtggacacttctttgtaactacaactcaggtcaagaaatgaaacataatgaaactcccatcatgccccttcctaatcagtaatgtaccctcccacctcctacagttaactactatcctgatctccattgccacattagtttggaccatatgatgttgctgtttttgtgatcggaaatgataaaatagtggcagtttcagatggttcagcctttttttcatttatatgaaaattcaatatc

SEQ ID NO: 172831 - DNA, 278 bp, Homo sapiens
gttaaggctgcctaagtttaaatagtgttacttattctcaaaatatgtagcagccccacttaatttctcctaattaaaggtacccgactttagaggctggagtccgcggccgggtcgcggcgccattgcacaggttggtacccttttcacaatcagaaactagtgggtgtcaaacggaaatgcatttccctagatcttaatcttaaacatagacgtttaggccagttccaagaaacacaatgatcctctttgttttaacacctgacaaggagcaccaa

SEQ ID NO: 172832 - DNA, 474 bp, Homo sapiens
tcgtacctggagcatgggatagtatagggcttgtgtttgatttgtgtttgttattagggggttttttgggttttgttttcacttgatcttagccaaaaggccgagaatcgatggggttttggtcttcttaagagacagagtcttgctatgatgcccaggctggagtatggtggctattcacaggcatgatcatatcacactgtggcctcaaactcctgggctcaagggatcctcctgccctttccaagtagctgggaggattgcttgagccccggaaatcaaagctgcagtgagctgtgattgtgccactgcactccagcctgggcaacagagcaagaccctgtctcaaagggaaaaataaaggaaataaactaaatacccagccacgagcagattggttaaataaacccatttaatgccaaatatgtcataaaatggcactctctggggaccagtcttttttcctccaataat

SEQ ID NO: 172833 - DNA, 699 bp, Homo sapiens
cgcgcgggctgcagggcaagctgcaagggcgagtgtgcggctgccttcagcttttcagccgcgagtggggtggtgtggagcggcggggtcagctcagggcaggcggatggggcgcatgtgcccagggcagagccctccggccttggctgggagagtggccttcggtcccagggcagagctcagcccccagggccgggcctcccgagggccgcggaccgtggggacatggggcaggcgtggagccggacccgaagccaagccttagatctgtgcgggcagatgcgtggccgaggctgttaaaccggtgctgtaaaggcctcgttttctctccctgagcggctccccacatccccatgctgagaagaggccgcttctcctctcccgtcagctgtgcccccgggtgcagcagctacgggtccagccctttaaaggttgaagacgatcacccaccccatgctttcccagcaaggaacaggtcttgcttttatgagggtagagaggacattcaagtggtcggtcttggaaaactgccatccgaaggattgcaaacattcttggggggagagaagaatttgtccccgggtggaggaggactgctgggggctcgaggccgctgatgaagggaattcatttcctctcccgggtgcccaggattcagactgatccagacatctgttgggcgggcagccagtatgcccc

SEQ ID NO: 172834 - DNA, 480 bp, Homo sapiens
catggatttcagagacctgaaaagccctgccggcctccaggtgctcaacaattacctggcggacaagagctacatcgaggggtatgtgccatcacaagcagatgtggcagtatttgaagcagcatctggcccaccgcctgctgacttgtgttatgcccttcgttggtataatcacatcaagtcttacgaaaaagaaaaggccagccttccaggagtgaagaaggctttggtcaagtatggtcctgtggatatggaagacactataggaagaggagctaaagatagtaaagatgatgatgacattgatctctttggagctgatgggaggagaaaagtgaagaaacgaagaggctaagggaagaacaccttccacaatatgaatcgaagaaagccaaaaaacctgcactcgttgccaagtcttccatcttatagatgtgaaaccttgggatgataagacagatatggcaaaattagaggagt

SEQ ID NO: 172835 - DNA, 472 bp, Homo sapiens
acatctttggggacgttattctgcctaggacaggctctctttctgtgtttccttagaaccctcatctatatcagattatattagaagttgtctgtttatatatattttattgctgctactactactactgctactactactgtagtctactacattttacagacttctcaaggtcaggcactgttcgtttcatctttgaatcctggcattaccacagcccctggtgtacatatatggtgcttagtaagtgtttgctgagctaaagggaactctttcaactccctgattttacttatgaacaaactaagaaatagaaaactgtgctttttttttttttttttttgagacggagtctagctctgttgccaggctggagtgcagtggtatgatctcggcttgctgcaacctctgcctcccgggttcaagcagttcttttgcctcagcctcccaagtagctgggattacaggcgcc

SEQ ID NO: 172836 - DNA, 262 bp, Homo sapiens
aaggcatcggcgtaagatgctaatccaagacggttgagataagattttctgtccttttaggagttagagacctgagtttgtgtgtaagataagaagtaggaactaataaagaaagaacaatttgaacagaaaaagaatgttgacaaaagcactttaaagatatcaaggttctggattagaattgtctttggttgtaaaaataagaaagtcagtcagagaatttaacataccagttaccaccaggcataacaaataagtatag

SEQ ID NO: 172837 - DNA, 223 bp, Homo sapiens
gtccttactcctagaaccaggctcagtatcatacatagggcaagtgcttaaaagtgtcataatttgaatcacacaccccataagacatctattcatctctcagatgtaataactcagagatgatttcataataccaccacattttaatttttatttattcatttatttttttgagacagggtcttgctctgctgcccaggctggagtgcagtgatgtaatctc

SEQ ID NO: 172838 - DNA, 556 bp, Homo sapiens
agactgagtctcgctctgttgcctaggctggagtgcagtggcaggatctcagctcactgcaacctccacctcctgggttcaagcaattctcctgcctcagcctccggagtagctgggactacaggcgcatgctgccattcctggctaattttctgtattttagtagagacgaggtttcaccatgttgcccaggctggtctcgaactcctgagctcaggcaatctgcccgtcttggcctcccaaagtgctaggattacaggcataagccaccgagcctggcctctccctctttctttctctgtctccccgatccccaatcctgccacaaataccttcttgttaatcaagtgttagctaataatttccctgattcttccagacagagttagtctttctcctagcctcatgtccctgaaaacaatgatctttttgtgttatattaacttaaaggtctggttcttatttgattaactccttgaggtaagagcagagttaagctttttgtcactgctgctgtttttgtcttgaaatgtatgaatatccaggacttagtcca

SEQ ID NO: 172839 - DNA, 324 bp, Homo sapiens
cctttaaaaatctaagaaaaccttttgcttaaatttccatagtggttttatcagcacctcctatggcatgagtcattttctacctcatatgcaatcatctgtgtacttgttttatttccttttctacaatgtattgttcctggggacagtttttgccttcttagtcactgtatccctctaaatatttgcatatagtgttaaataatatatatgtttgaaaaaagtgagtatcacagaattggactctctttgaaactaggaacactgacatgctaatttctcctttacaacaaaaggctttcctaagaatgatgggagaggcca

SEQ ID NO: 172840 - DNA, 119 bp, Homo sapiens
ctaatgaagttgagcacccattcctaaagtttttggattagtgcttttgttctagttttattctaaatagtttataattcccattttacttatactttagccaagagttatttttttct

SEQ ID NO: 172841 - DNA, 272 bp, Homo sapiens
atttcagaatacttatttaaaaatatttctaccatgctttctgccaaaaatgaaatgtaattcaaaagcatccattggaaaaattaaacctctttctgccagaataatctagtgttagcatttcatgccttcttaaaaacagattttatttttcaaatcagtttgaagtttacagtgaaattgagaaggtatagagatttcccatatcctcttccccctagacatacataggccccctcactatcaacatcccacactgacgtggtacattt

SEQ ID NO: 172842 - DNA, 366 bp, Homo sapiens
tggtgatggaatttcactcttgttgcccaggctggagagtacaatggcgcaatctcagctcaccacaacctccatctcccaggttcaagtgattctcctgccttagcctcccaaatagctgggattacaggcacctgccaccacgcccggcaaattttttgtatttttagtagagacagggtttcaccgtgttggccaggctggtctcgaactcctggcctcaagtgatccgcctgcctcggcctcccaaagtgctgggattacaagcatgagccaccgcgcccggccgtaaaacttattttgatgcagccaaattctaatctctgagcatcttttggtaaatatgcataaggcagtgtgtcaaac

SEQ ID NO: 172843 - DNA, 227 bp, Homo sapiens
acaggttccagccaaccctgactcggttttcagtttaaatgttagcagtgcatcttgaatggcttcttggaaatagctggtgaggttacactaggtgctatagatgtttgacacccagagagctcctggtcactcctggctgccctgcaggtatcaagtggccaagtgagagctgtgccggaagcacaggttccatagatgaccttggctggggtttccagggacac

SEQ ID NO: 172844 - DNA, 923 bp, Homo sapiens
cagagccctacacctctaatttttaaatctttgttttatgtaccaatgttttactttaactgaactcattcaccctgcattgtgagactggttctatgctatgcattgcacagattaggactgtgatatgtcatggctataagtcctcactctatgtttttaaaaaatcatttctaactagttgttagagttttacttattaactttggtgcttagtggctgactcaacagttacatggttacatctccacttggcttaatgctttattttgattttttatccctctacttctgtcaggagatcatttttagtggttgatacttactttttttccctagtcttgagtttgggatctttattttaatgtttgtttgctcagaataactgctgctactttttatgataaaatagctttgtttgcctgtacgtgctttgtgtattcttgggccaaaagattaatttctctgatggagaatattaaaactcaaagttgtgtaaaggaccagaatttatttgggtacttacatagaattcctcagataaaatttccaagtggaatttccctccgccccactgccacccctttttaattctccctccaattttaaatgtcactgccttgtctttccccctttgggcctctagaactgtttcaaaagtgcccatgggtgggaagcaaaaacaattaccttatgagaataagaagaaagttttttgggagcagtatagttcattttccttgctcatatttaattggaaaatcagagaagcggcattatatattcgcattggagttacagaactttctgttttgacagattgggttattcataggtatatcgtaaagcatttcttgatggtataatacaggccagtgtggtcttgtactaccccttagtgaagccttaaacgatggtcagta

SEQ ID NO: 172845 - DNA, 173 bp, Homo sapiens
atgacctggaggggcaaattccctggtcctccccaaacccctcctttgtgggtgagtgtgaatggggaagagggaggggagagtggcttcctggaggaggtaggctttagggagccccagagcgggctcaaatagacacccacacctctccaaccccctctaggtaggaagtg

SEQ ID NO: 172846 - DNA, 902 bp, Homo sapiens
cgggtaattcagtgtccgtgtcatcagtggtacatgcctacagccgtgttgaaattgtgtctggagaagcacatgaaccagactctccctgatttacaaggctcttcgtcatcgggtccctacttaactctaatttcatctcttgtcttatctataatttagtctgatatcatacattaattatatacactgtacattgatacacagcatttatttgaaagacagacctcttggatgtgactatggagacaagaccagcagctcgagaccattcaatccaaggtataaaatggaggaaaatcagctccatcatggtctgaattgaggatgaggcagaagagcagagaatagctgatgcccaggtggcagcaacttcactctttccctgtggagttgcagggtctccccacctccactgcgttgggacatgccgtgtgccatctctttatccatagctgcctccggcatcagcagagaaagtcatgggcagatggagctttggattagttcttttttccagtcttcctttactttatctggataagattgggcagattgaatttgatcttctatactggggccagggagcagagtggatctagaccatgcagcttttccctactgtcaccagattgggagcagggattggctgccattgtcctctccagcctctgtgttcctgggacaccgctgactggaggctgctcctcttctaagggggtccggcacagagcgccacccagagcacatggcaccttctctctcctcctgcaccagtctccttgccctctgtattgtcatcatactgaagcaaaccatccaactcaccagcctctctctggaatccagtctcattgattcctctccctgagactcttcctcagtctccttttagcccctca

SEQ ID NO: 172847 - DNA, 438 bp, Homo sapiens
ttcccccacacacacttctaccttctctaagatgtatcacttgcctcttataagaataaggaaagaaggtacagaatattcgcagccttagagttaactcctgcccacaattgccatctctacaggcaggcaacatggccccttgtcacctatgatgctaagaataggctccaagatcaatggacaggtctacatagaaccacgtgcacatagttggtgaaacctggcactctccaaaaggccccaccctcaaaatttggggtctttccaggtcctgataggctaggaaataactgagagtaatcatttctcccaaagaacttatttccctacaacaaagaccccaaaccatgtccgagggagtcctgaccttgcccaattatgctgggtaaaaagaaagtttgtgtctatcagatggtgttggtgtattaatgggga

SEQ ID NO: 172848 - DNA, 398 bp, Homo sapiens
atgatcctcccaagtggctcccaaagcactgggattacaaccatgaaccaccacacccagccttactttttcttcttcatcttaatttcctgcagtttttacatggaccaagtaataaagaatataaatatggtgttttatggagtcttagagcgtgctttacagttagaagattccaaagagacagaattcaaacaactttagtcaaaatcacattaggaagtagatataactggcctcagtggttttgctggaaagagaagaatgaacactgagtgttaccaatgggacttaatattgcataaagcacacaaaacttccccgccagtgggcatcgtaagtgacaggaaggctgtttatcactgaaatcaattaattccaaataacacattgaatcc

SEQ ID NO: 172849 - DNA, 516 bp, Homo sapiens
accagggactggattagaatctttgactcctaatcctgtgtgttttgggccgcaagagcacaacagagctgaggttagatactagagtcccttctggcctctcaggcctcacagtccttgatgggaggcaggtaggtgatgatggtggttcctggaagccctggaggctggctgtgtgagaagctggccagaggaaagagaaatttaaattcattgtatgcgtgtcttgtggttacaaaactatgaatggaagggagtccatcagggtggctaatgcagtgtggtcaggaaggcttcatttcctgccccagggagaataaatctttattggagtccatgggatgctctcagtctttgtgagttcttgcttattgggggttatccagctgagaagggcagacctagtgtctcacatataggaagaatgttagtgctgggaagtcttccagttaacatatccaacaattatttttcaagtgtgtttttagagagaatgtgtacaatagaaagaacaga

SEQ ID NO: 172850 - DNA, 411 bp, Homo sapiens
tttggaaaagtattatatactagtatctatctgttacaatgaaataaataataattaataaaaattaacacatgccaggcactgtgctcaggagtttacacatttcatttaatcatcctaacactttgaggcagatgatattattgtccttattttgtagatcacaagaaagagacaaaaataatttgcttaagcgcatgaatgcagaaccaggacttgaatctgggctatctgatccctagcccctgcattaactaaaagttagaagttccagtctcctgtcttatatatattctctgggttaccttgagcatgtcacatccttctctgatgcagtttcctcatctacataacaaggcaatttgattagaacagtatttttcaaattatggctcaataatgcattagtgg

SEQ ID NO: 172851 - DNA, 405 bp, Homo sapiens
accgtgggaccacacagcgtcaaactggtctatgaacatcagggtgggacatcccgagcgctggctgctgcctcctctgtgaaaagtgaagtaaaagaaagtaaagatttcatcaaacccaagttagtgactgtgattcgaagtggagtgaagcctagaaaagccgtgcggatccttctgaataaaaagactgctcattcctttgaacaagtcttaacagatatcaccgaagccattaaactagactcaggagtcgtcaagaggctctgcaccctggatggaaagcaggttacttgtctgcaagacttttttggtgatgacgatgtttttattgcatgtggaccagaaaaatttcgttatgcccaagatgactttgtcctggatcatagtggtaaggcaattctt

SEQ ID NO: 172852 - DNA, 448 bp, Homo sapiens
cgctaaactgtcgcatgtttgataattaattcaccaccctattaggtaggggctgccagggaataagcgaggactccaaattttctgtaggagggcttgttgggagttggcaattcggtctgggagagaaggttttaatccgagtgaagagccctttgcactagcctgggaggaggctggactgtcatcctgccttgactcaacacagccattcccctagaagttacagcacttctagggtcacctgtgttcggagatctaccctgtgtgcacacatggggaagaggcttaggttgttaaagtcagcatgttaaatcatttcctgaaatgcgactgtaactagaacccagctgacttcccccacagccgttcttacccattttattactgtctggcataattaccagcatgtaaactccaagaaggtgcttcatcttattttagtgcc

SEQ ID NO: 172853 - DNA, 286 bp, Homo sapiens
taagatggtaatgattccaaagcgcagctcaagctcagtggataaacaacagacctcaaaccctggggggctcatgttctcatcatagctctgggcaagtcacttaatctcatggttccttctcaattttctcagctctgaaacggggatggcagcacttcacgaggtgtttatgaggcatactaagatggttgtaaaacattttacaaatgtttaataactgatgcccttttcataatttggctttataacatctttcattattcattcagtggtgtggaaataa

SEQ ID NO: 172854 - DNA, 589 bp, Homo sapiens
gaagcctttggcctgttgctcctcacagatagtttcaactccacgcaaaacctgccgaatgaacacttgcacatgagtgtcctgcggagatttgcggaagagaaggttgagctgctggagaaggccatcgcacagtgcttcgcctgcatggagcagcctctgcaagaaggggtcaggaccgccaggacttcttaccgctgcatcctcagagcatgcttggtgaggagtaaaggaaaccaaggttttcatcagaccctgaaagctgtttgcctgaaaaatggcatctatgcctccaggactctggcgagaattgatctaaatgaagccctcactcagcccgtctatgaccagatcgaccctgtttttggaagcatttttaggacggggaagcccactggttcagctctgatgcctcacatagatgcttttaagcagtccctgcaggagaatcgcttgaacccaggaggcataggttgcagtgagccaaggtcgcgccagcctggacgacggagtgagactatgtctcaaaaaaaataaatgttcatggaaaaggaatatattttttttttctccctcacccccttcctta

SEQ ID NO: 172855 - DNA, 264 bp, Homo sapiens
ttggtattctttgcccaacatctgtttcaaagagcagaactaggtagaaacttgaggaagaaagagagctttggagcaatggagaataaataccattggcttcaaggcttgggactgtctctattcaaaagcaaagttcaggctcgcttcacgatgacgtctatggctcgaaggacacaagagagaaaacaaacaaacaaaaactgtggccgttgaattcagtgagtatttatggagcctaatgcggtaaagactcagccgatt

SEQ ID NO: 172856 - DNA, 354 bp, Homo sapiens
ctgggcagagaaggggacagtgtccttgcttagctcagcactcactaccctgtgctgaagaagccccatttgtcctgagggcgcctgtggcttccagaaccagctgtagcaatcacagagctaaggaaggagctgtccagctggggttctacccactgccaccccaccctagctctttacctccagggaagccccagctcatgggatgggcacagcctcgggcattcatgggaacctggtcacctgccatgtcacatacccaggctgtccccaggaatgtggtcctcccatacatgcctatcagttatgccaggtatgatgccaaaactaggggacctggcttctcttctttgg

SEQ ID NO: 172857 - DNA, 465 bp, Homo sapiens
attcaattaacacttttaatgttaacaggtgtggaccatcaagagattgtctctccctggctgccgaattctcattcttagagaggcaatttgttaattgctgaaccatcacctgacatttctagtgggtcgggagagagccctctgctgccctgttgatgcctaactacctgtaacaatctgattattgtaagttttcctgtatccagtatcacctccaatatttatcaaggagttgtgtgaaataccacctcacaaccagatgaagaattttatcaccacctcctccaattcctcatgagggagaagtaggaattgctctgagcctaaggtagaaaccgttcctgaaatgttgaaaaccgtcattgtgagtaggtgagtggagtggtggagtagtgaatcacctgtacaatggcactgtcaaaagacaaaattacaacacatttagtttaaaaataaaaaaaa

SEQ ID NO: 172858 - DNA, 200 bp, Homo sapiens
tatctttggagtcctattttagcaattgtaaagcatcgttatttgaatttagaaattcatttctgatattacatttctcaggtatttgctagatgaaatgtggattaaatgggtaaaaatattaatgtatttttctaagctattataccatgttgctataattgcatatgtactatctgtaccgaccgttatgggtaaac

SEQ ID NO: 172859 - DNA, 475 bp, Homo sapiens
gggaggaaatctgctttattttctatgaggtcattatccaatattatttattaatatattcacatacatattcaaaatatgacctttgaaagataagcattgtgagataccatgctttttatctacaattgatcatgagctaattcattgatttatgttataaaatgtgtatcactggctttcacaggtttaagattaaaacccaatttaattaaaacccaagatacattaaattttatctttgttatatctatgaaaaaataatgcatagaaaatatctgcagatattttctatgaaaaacactctatttatgtctcactatttaattatctaatgttatataaatagtcacatacagaatgaagaatcagagccaggcacattatagaaaagaatctgtgacttcctaatcttgccatgagtagcaagttattctaacagtttaatcatggaattattcaaatttgcttctgt

SEQ ID NO: 172860 - DNA, 389 bp, Homo sapiens
tcccctaatattgtttagacttccatcagcaactctcactttctcctatcatctttttacttgtctttccattaaattgtgagctctttgagtcagaaattacatatttcagaactcccttcccacccctcagaatgtttactcattgactgcaaaagaagtttaccattaggtagggaagacagatatgtatgtaaataacaataaagaatacaactgttcttctcaaggtaatcactgacttgtcactagccaaatccaatgagcatgtttgcaacaagtgtttcataccattggctaatactgtcttctttaatgtctttctccacctttagaagacacgagctcccttgatttctattatgctgctgtttatgtctttgttcttc

SEQ ID NO: 172861 - DNA, 254 bp, Homo sapiens
agttggtaaatgatgaccttaaaataattttgataattgtatatgagaaaatatgacaacagcatgaaaaagatggccaatgtcaacagaaaattgaaatctataaaactaatctagagtgcattctagacatgcaaattaaaatttctaaaactaattatcggggaacctgcccccgataatcacgtaggttcttttctattttccctaagcattggccggtttgagaaataaagggacagagtacaaaagag

SEQ ID NO: 172862 - DNA, 653 bp, Homo sapiens
tgccttcctgctgctttccatcttgccagagtcagcttccctccctttgcagactcctatgttcaagaaatcattgcttctcaatgttacttcccactggaattacctgagaaagttttcacagttccagtgcctgggttccatgcccagaatttctttttttttctttttctttctttctttctttttttttttttggagatggagtctcgctctgtctcccaggcgtggagtgcagtggcgtgatcttggcccactgcaagctccacctcccgggttccatgccattctccgtgcctcagcctcctgagtagctgggactacaggcgcccgccaccacgcccgggtaatttttaatatttttagtagagacggggtttcaccatgccggccaggctggtttccaactcctgacctcaagtgatctgcccacctcggcctcccaaagtctggggattacaggcttgagccaccgaacccggcccagaatttctgatttaatggtccggggattttggaggctcccggggggatgctcaggtacacccagggctgagaaccagagttcagagagctgcagaggttttctctgcccggtttgccctgaccaggattcccaagtgtggagtgccttgcacctgcccaattcccta

SEQ ID NO: 172863 - DNA, 348 bp, Homo sapiens
aaaattgcatcatagcacagaaatgaagaaagagttatacagccaagattcacaggggaaaaagaaatcattcccactgccactccaatacaatgcaacttaaagtcatgccataaagttatacaccaaaaggtttatagttttttggctttggttttttgttttttgttttttttcagcaggaggagattatagaggacctttattttctacattatatgtttttataaggtttgaaatttttataatcatccagtattacttttatcatctaaagagacaataaagattttttaaaacatgtcataatgggtatcagaaattttcctgcttggaattttatttttt

SEQ ID NO: 172864 - DNA, 573 bp, Homo sapiens
caatttgggtttttctgatgtatcctcataatttgatttgggttattcactttccacagaaataccacgtaagtgatgttgtgaccttttcaggtgcattctatcaggaagcacatgaaaacctgtttgtcccatttactggtgacattaacttttatcacttacctaaggtagtatctaccagctttttctactataaagctgttattaccccctttataatgaatacatttcttgtgagagaaacattgagactatgtaaatatcttatttcctcatcaaactttcacccattattttagcatctactggtatttcttgcctgaaacaatttttactgtgatggctgccaaatggtgatatctaactttcatcattctttcaacatgtattagtttatattctgccttaggggggtttaatctcacttctttccttcctttccttgtttgtttatctgcatgggctcatggattcttatgtcgttctatgggttataatctgtttctatcattatttattttaatgccaaaaaattataatcttgagattatgtcagtaaatacttttttt

SEQ ID NO: 172865 - DNA, 572 bp, Homo sapiens
ctccttcctcagccccccaagtagctgggattacaggcatgcgcccacacgcctggcctttgaagtttattgaatcattatttcaattaagattcagattctaaaacttatctatgtacattttgcttatcttaaggaatagcaacatgtaatggttgaggttttttctctctaaaataagtaaaacaatttacatggactttaaaatggatttacaaactatagatttgcctaaagaactttttttacaattctgatcaaagaacagaaattttgatggaatagacaggcttaaaaaaaagttggtcactccacatgtaatacataacctgtgacagcatcatagattgtgattataaaaaatgtgtatcacttacaattataaatgtagacatgacaataagttacttaacaaggaaaacagtatcagcctgggcaacaagagtaaatttccgtctcaccaaaaccaaaaataagaaaaaaaaatgtgcaaagaatatttataaaaacaaaccctggtcaattgggggaaatatttccagcaagtattatagaattaacgtatttcttca

SEQ ID NO: 172866 - DNA, 496 bp, Homo sapiens
ccaatatcctgccactgcactccagcctgggtgacagcacaagactctgtctcaaaaagaaaataaaaataataaaaaataaaaattcttctatctgtatgcctaagtgtatgcatactaacaaaataagtatagttactgcttattgagcagctactaaatgtgaggcagtgtgccaggtacattctgtaagtggtaagatggtgctcctctccacgttggctgagcacggggcgctggagatgatggcgtgagtgggtgccggctgggggccggcccacaggctgtctctttccttctgttcgtatatgaggtggtttgtccccaaaactattctgttttctttcagctgctgtaagccagtttcttgtgtttttttttttcaaataataacacttacatttgaatactgtaagctagatatgtattatgctgtaatatgataaactaagtctttattaagatataggttattcacacctgtaatccttattca

SEQ ID NO: 172867 - DNA, 403 bp, Homo sapiens
gggcaagagattagactagtatcagatttttcaaaagcaacctacagatcaaggcaaccatggaacaaaattttcaagacacttcagaaagtatagaccaagggttttatgtcttgccaaattgtacctcaagtgtcaaggctatcaaaaataattttgaacatagaaaaactaagttaatactgtatgtgtgtgcccttacctgagaaatttatatactagggtagaggtttgcagatgttttttggtaagggttcagatagtaaatagtttaggctttgtatcctactaaattctgttgactctgttgtcactactcagttcttccattgaaactgtatacaaacagtataaattgcataaaagggtgaatgtggctatgtccaataaaacctgatttaca

SEQ ID NO: 172868 - DNA, 124 bp, Homo sapiens
aaaaaaaaaaacaaaaaacaacaaacaaaaaaagaaaatgaaacgggacttgtactcagcgactcctgctctcttctgcttatttcctgtgtggtccccaagccctgctgagccctcctcttcc

SEQ ID NO: 172869 - DNA, 394 bp, Homo sapiens
agaggaaggcgaggcccctccctggaaagtcagagggggccccaggccattctcagctggggcttaaagggaagcaaagaggggatgagaagatgtgactgcagccaggatttggttgaggaatggtgggagaaagaactggaaaggtagattaggttggtggtggggagggctgcactgggaataaaatccaggggcctcaccatccagcaggctccccatggtcccaccctactgtgtgtcccagcccctgcctgctggagactcttactggcttcttctcctccgcaggcgaagcccgttctcccctcagggcctttgcacttatcccttagcctggaagggtctttctctggctctgcctggcaggatccttctcgttctcatctcagcc

SEQ ID NO: 172870 - DNA, 398 bp, Homo sapiens
  misc_feature (13)..(14): n is a, c, g, or t
gactagaggatcnnatgtatcgcccaacactacttctttagttctgaagcactgtaaagtatattttagattaataatttccaaaccaagaaaatgaaagcctatattaattataagaccccaaacagaaaaaatcttgtaaaacgatcaagaccataaaattcacataccttctatttggtcaatgcagagacacagatctttgttccggagtttgaatttaaatgcaaagcttcagagcctgaaaatgtctaaaattagacccatgactgacaactggcctaggctcaatgtctttggaatgtgctctactaaatttgctaccatttgactgtgttccctccaaaattcaggtgttggggataacatcacgggatcctctaggtcagccctcgaca

SEQ ID NO: 172871 - DNA, 262 bp, Homo sapiens
cttctgaaagaatggtagctgttgtattttggtaacatgaccagtagaggtcatagatgagttctttaattatcttggagctacaactattgtgtctgtttatacaaggatctattcattctagatgtcttggtgatcagtgtggattaccgcacaaacaatttggcggtagtgattagcgtcgatcatgaaaactgcacattaatgatgcctcagattggcttccccttcatatatgacctagtcttgggagccaagctga

SEQ ID NO: 172872 - DNA, 427 bp, Homo sapiens
ccagctgagcaaggatttggggcaggatatggattcaagagattttatgtgcccatgaaggaaggcttgaagggctcatggtcatttctggtaggctgataggcactcaatgtggttatcgttgaccctatcttcaactctcttagtaaaccagtaatttaaaaagaaaaaggaaggtttaatttcccatttcaatttaaaataaatttacccagtttccttatttttatttacatctgacatgaaaatctttattgttatttctgattagaaaatcaatagtttagctgggtgcagtggcacgcacctgtagtcgcagctagttgggaggccagagggtcacttgtgcccaagaagtcgaagctgtagtaagccgtgatcatgccattgcactccaacctaggtgacagcatgagaccctgtctca

SEQ ID NO: 172873 - DNA, 242 bp, Homo sapiens
agagacctcactttgtatcttgacacaaattctccaccaaaaataagttaaaatttgaggcttctttgaacttgggtcagaattaaaggaactgggcacactatatatatcttgtttccatggagaacgttattggtaaagaaaagttcacatctctcagatctttagaaatgttttcatgaaagagcaaagttacaatgtgtattttaacaggtgaggccaatacagtgtgcactggatta

SEQ ID NO: 172874 - DNA, 307 bp, Homo sapiens
agggctctcagtctagctagtaaaactgtgctattaatgaaggattataatagaatataataattgttatcacaggagtctatgaaaagatctaacagggcaaaatgcaaaagtagggagatgtaggttagggcaagctgtctaggggtgaaatttgaagactgaagaagaggactggggagtgctgtctaggcagaaggaatagcctccgctaatcatgggtataacaaggaaaaagataataacaaaagtcatgggcatgtgacgagtgaacgtggtaaatgtggtcgttatctagacggtagcc

SEQ ID NO: 172875 - DNA, 813 bp, Homo sapiens
agtgtctctactaaaaatacaaaaattagccgggtgtggtggggcagcacctgtaatctcagctactcaggaggctggggcaggagaatcgcctgaacccgggaggtggaggttgcggtgagccaagattgcgccactgcactccagcctgggtgacagagtgacactctgtctcaaaaaaaaaaaaaaagttaataggatcacaggttatctatgaaagacatgtcctttgatttctacctcatgctgtacacaaaaagttagaggcaaaccatggataaaaatgtcagcactataactacaaaatttctagaagaaaacagaaaatatcttaccatcttggcatagccaatgattcattagacgagagtcataaggaattaaccataaaagaaaaaattgataaaatagaaactcatcaaaagacaacattaacaggctagaagaaaatattcactatatatatatatggcaaagaacttgtattcagaacataaataactcctacatgcacagatgtatgtaagttttgtctcaaaaaaaccctagaaacactgagcttgagttaatgatgtgcatgctgcaatatttcagaaagaaatatactgatgtctgcaacttactgcatcaaaaatacaataaactgatggctggatgggggatgaacaaatatgtgatataaaatatttaaaaaaacaaaacaaaaacaaaactttctcaatttttaaaatggccaaaatatttgaaaaggcacttcacaaaggtagatatggaaatggccaaaaaggaagaagttcttcaacattatgtcat

SEQ ID NO: 172876 - DNA, 420 bp, Homo sapiens
gctatggtttattgagcttcactgtagaatgcatgggcggaaacctggtcatttcattgtgcaactcctaaatgtccgatttgtagggacttcctctgaggctatttcagtttctccagaaaatattccagaatcccacctggggtatattcatttggaagccagcattctgacagctaagcaagggaggggagctgaaaataagaggatatattgaaaatcattatgaggagcaattagatccccagatccctcccccaacttcaagcatcaaggtcactacccttcattccatagaagactggagatattaaactagaggagctcttgactcaggagcaccagacacagagcgtaggtgagatgccctagtgaaaaaagattgtcaatgtctatctgctaaatgttgacatttatttt

SEQ ID NO: 172877 - DNA, 469 bp, Homo sapiens
gggccaccttctctctcacaatcgcacctagtaaatgcgggcatatttagctctcacatcgacaacccccgtcaaattagatgctattacgaaggttccaatttttcttaggaaaacacgaaacagattgtctctgaaagaaggaaaaaatgaaaagtgtccatccagttataatggaatggcctcgatttacatccttgggtcgatttctcttagctgcccgcccaccctttgcagcttctgccaagcttctcaaagcaagggctctcaggctgacacgcaaggagcagggtgtggggaagggggatctgcggttgagaaaatgtgtctggtggcctctcagtggcgtacataaaaaccaggatgcccctcggtcccaacgcccttcctttcgcctgttagcctagaacccctgaaggacacgaagcctgactgggttgcgcccgaggtcagcgctgagtcgcggccg

SEQ ID NO: 172878 - DNA, 304 bp, Homo sapiens
cagacggttcttaccaaggaactgtctgtccccaccacatggatggttttcctggcagaggtgtgccctgtgagggggtcactgctcctggggttggcatcgtgaggctgagcctgcaggctgcacaagtatgttccactgagaggctgccctggtgactccattactcacgcatccctgccacacagtgcagctgggccgtggccccagcacagggttcatttacatagctgcacaacaggaagcagtctagtgtttagagctgccctggcccactgagagcaaattgtttcaggtgctgtgg

SEQ ID NO: 172879 - DNA, 498 bp, Homo sapiens
tgctgttcttgctctccttttccactgggctaacttctctccatttttcaaatctcagctcccacattacctgcagaaagctttccctgccacccccaggcttcctggtcatccccatgtctccctctgggctcctgcagcacctggctattttctgggtggcagttatcaccacaggcattgtgtctgccatggtgcccaatgtgcccacagtactcagcccagggcctggcataagctggaaagcacttgctggatgaaagagtgaagaacatgggcctatttccaactgtcacagaaaacacctgccccgcaggtgctggcagggccagaaaatcaactgtgactcctctgctgttgcacaaattcagcagccagtccagggggtcatgtcccagaagggtaagctcggggtggcactcctctctcatccctgtatgtcagggccacccccacagcaagtccctctgagctactctcatgtcacacagccctggc

SEQ ID NO: 172880 - DNA, 244 bp, Homo sapiens
gagaatatgagtagccaataatgctgtcacagcctgggaaagagacggcaaaggggaagaggcagccgcttgagaccacggagccacagccgcccattcccagcagagctcggagaccacagtgacacacctgcccattcccagcagagcttggtgccattctcaggtctcccaagctgaccccaggtgtccgtgcttttatgggttaataccaccagggtattgaagtagattttgacaatca

SEQ ID NO: 172881 - DNA, 673 bp, Homo sapiens
gagaagattagcatggcccctgcgcaaaggatgacacgcaaattcgtgaagcgatccatattgttttgctttccacacatcttcggtgcggtgcccgttcacgctttcctccacaatggtcccacgcagctccagttttgtgaaccactcggctccgtgtaactggtcaaacagttccggaatcatctgtatgtagtcctgtctgttggtcagcatgtcctgcaggtcccagtattcctcctgtagcctggctctttcttgcatcctggcacccacaggttcccaaggcgcggtggagggacactcgtaaaaggtctcgctgtgatcactgtctccagcctgctgaagctcagagggctctgattcagaaagatcatcggatccgtctgagcttggctggtcggaagtctcatcatctgcttccttcgggttaaacacgtcggccaggtctgagtatgggtgtggcagtccgggtagcaggctcatgccgtgcctctctagggcaatgcatggcgggggcgggcggaagcagttcttcaggcagtagggagagtggaaggtgcagcggcctttgatccagtcgacttcgggggcgtggactcggagccagcggatgcctaggaccacagagaagttcggtgaaggtacgatgtcaaattcgatggactcctgg

SEQ ID NO: 172882 - DNA, 500 bp, Homo sapiens
gctacatgatcatcgtcatgactttatcagctgatagatatccagctgttggcagtgtgccaaattctgggccaagtttgctataaaaacgatgccactgaaccctaacaatgccctaagagataaacattattaccatcctgttttataaatgaggagctggggctcacagctgtccagcgactcccagcacccaaggctagcaagctacagctctgggctgccagacactaaagccaagcccacatcactgcactgggttgcagtgttctattccacacgccagaattctagattgtttgagtttgttacaaacacacgtatctttgtaactagaaaataaagatttaaggccggacgcagtggctcaagcctgtaatcccagcactttgggaggctgagtcaggagaatcgcttgaacccacgaggcggaggttgcagtgagccgagatcgcaccattgcagtctagcctgggcaaaaagagtgaaagtgtgtctcc

SEQ ID NO: 172883 - DNA, 499 bp, Homo sapiens
gctacatgatcatcagcagcagtagcatcattatcgggattatcagtattgcagatcccacagccagaggtgcccaagacgtctacaccaggggctacaaacaccaatgccaacagaagccatgcaaggaaagtgactgagtgaagctggccaggagtagtacaaaagggaagggtggggactgtggcaaactggagagcagacatccatctaaagggtaagctgtgactgtgttccaatcaaatgtcgccaggcaaaagtacagccggatttctgtttccctacagaaattggaaagccatatttttgcaaaaaaaagtcctacttttaaaaccctgtgctacttaattctaatatgttcatggtaaggcaaagaaactagaatagccaaaacaattctgtaaaagaacagtgttggaggattcacattatccagttttaagaattattatggccaggcacagtggctcatgcctgtaatcccagcactttgggagga

SEQ ID NO: 172884 - DNA, 459 bp, Homo sapiens
cgtttctgacagtgataagtactgtgaaaagtataaacgcagttacatgaattagagaatgacagggttttacagccgactcacttttcttagattttgaatggctaaaattttggacaatgctatggaggttaagcaaactccgtcaagctagtttacagtcttctgcaaggcgaactttagcggggattttgtactggagtgaattccttttcacagattttctcttagcaccttgtgttattgcagtaacagaaatgtcttcctctgatgttgttggtagagcgcaccagacggtgaggaatgcttttcaaagctcagccgctgtgtcctagtcagaaatatgttgtgttgctgttatttttgtggtgtatgagaatttatttctagtttccatagataacggaaagcaatgacaagtcaggaagtaaacaaaaaattaaaagcattataaaagta

SEQ ID NO: 172885 - DNA, 223 bp, Homo sapiens
aaggattgcaggtgatttttattttattctttttgcttacgtcaattttctaattttatttcagataagcacatattatttgtgtaatagtaaagccgtgttattaaagagaagaattacccaaagagactcagttatgggagtcctggcctccgccgctctggtctctgcagctgctccaatgagcgggacataggaaagatacagcctcggccatactgaa

SEQ ID NO: 172886 - DNA, 528 bp, Homo sapiens
agaaaaagacagtaaggaaaataaattatacatatttattttgcagaatctaagatgtcactgattattagatatatctatttcagaaatgctaaaatgtgaaaaatatatatgccaagagtcaataaacatggcaataagttagaccagtggtaggatctgaggggaaaataaagtagtaaggaaggaggacaggcagagttgggcgggtttgagtaaaagcctgaggggagtgacagaatgaattaagtagatctctaggagaagaacagagggaaaaggcaaagactagatggagagcagccactgctttaacacacagaatgctttcataaagacaacatggattccactcagagaaacctccttcaaccactacatttacagctacccttcgtctcctttcaaatatgaggaaaataatttactgagaaataatgtatcttgattttctaatcagaaggtaggccaaggatgattcaactatatagaaggaaaaaactcaagaaaacacactgctatatctaa

SEQ ID NO: 172887 - DNA, 674 bp, Homo sapiens
tacttctgcctgaacctgcccctcctggaccttcctactcccaatcaggcaaaaggtacccctgagtcatatttaactcctcccttccactaccctctcactatctaggacatgtctctccagttggccccatagtcatagccctagcccaggcctctacgttgctcttctgaacaactgtatcagcctcttccacggtctttctgcttccagtgtctcccctcattccaggacatcttctacaatgcagaaactgtaagttttgcaagttcccaccactgctaaccacttgagtcctggatcaatgtgtcccttccaccagcccttccaccagcctcccttcaccgctggtgtcttccatgatcatgctgctgagcctggtgggcagcgacccctgaggcacagaagaacaagagcaaagaccatgaagccagagtctccaggactcctcactcaaactcggacatggacgcaggttgggtgtgaggggggtcccagcctttcggtcttctatttccctatttccagtgctttccagccgggtttctgacccagagggttggaacggcctggaatcctcttcccaacttcctccaggtcatttcccagtgtgagcaacatgccaaccttagtgtttctccagccagacagatgcctcagaatgaagggcttgg

SEQ ID NO: 172888 - DNA, 226 bp, Homo sapiens
ttgtgaacattcacctctggctaacaggagtccaaaagtcagtaatttgttatgggatggaaattgcattaggctaaaagaactggtcaagaaaacatttttaactatagatatacgtacatacagagccctctgctggtgattacaattattaccatttgggactacaatttcccataaaccataatttcacttatcctgttacacttattaattatcctaaaag

SEQ ID NO: 172889 - DNA, 688 bp, Homo sapiens
atgtcattgttctggtcctgttataggtgcaaaataaatacttattaaagaaataaatgaatgtcttttctgaatgattccaagtgtgtgcatggcgatactggtatattttattatgtttataaagtgatatgtagttttacagaattctgtgctataaaagtaataatgttttgcacagcctatgcactgttgatattcttgatgttcataattagggtatatcctttgcttttataatagtgctgatgaatcagtttagatgagttctggtatttttgaataattcctcttgtaaccagtggcttgcatttgcaagatagtaaccatggttaggttatttggtctacccatggaaaagagaaaaggaaattgtttccagatattgtggaaataggggagtccttaatgatcattttcttcaatcttctcattttacagaagactatccgagggaggttctgttcaaggttatgcaggaaagcttagaggacagattttattaccgtaaacgtagcaacagagttaaaatacatcaaggatcctgggaaataaaacctttatgatagctaagtttcttttatttatggcaatgccagacatagagagcatgaatggtatagcttaaaaagtctggtatcatctagctacaatgaacccagccaattgtgtagcactcacacctcgg

SEQ ID NO: 172890 - DNA, 232 bp, Homo sapiens
gtttaaacctaggcaatctactaatagaaattgtgagttaatgttcaactttaaaaacattttcctaaatgccaatgctgatatcttatttgaggtgaggacataggagaggtgaacaacagacttaaaatttctacttttctttttcattctttctttttaaataaaaatactgcaatccctacttttgattgttttatagctcaattgataaggtgtgttcctctttttt

SEQ ID NO: 172891 - DNA, 255 bp, Homo sapiens
ggaatgatactaaatgcagcctgctgcagccgcacccacactaaacatggaggagggctacgaagagtagcagggccctgcatgaagggtgacacgtaaatttaaaaaacaatttcggccgggcgcggtggctcacgcctgttatcccagcactttgggaggcagaggtgggcggattatttgaggtcaggagttcaaaaccagcctggccaacatggtgaaacctcgtgtctactaaaaagaaaaatccaaaaa

SEQ ID NO: 172892 - DNA, 272 bp, Homo sapiens
atatgggaccctgaaggacacagatgaagtttagtttggattccaagtgcgataggagagccagggaggcagtttaattagggtggtgaccgattcagtttatatggtaaaacatctcactctctctctctctctctgagcatggattaggggtgggtgtgtaaacttagaagttgggagcagttgagaagctaatggtcctggtgacagataatggcagtttaaggttgggtaccagaatggatatgggagggaagtggatggactctgga

SEQ ID NO: 172893 - DNA, 770 bp, Homo sapiens
taaaccatttcaagagagtctctggatttcttgatccttgatttgtggttttcatgttgtctgtgagctccagcagggcctcatcagccctgtccgtggtgctgctccagctctgtgctccccgataggtggccctgcgctctatgcacatccttcttaacataggaaagatgtatgcctttcaaagaaaggcattcaagacagatcagcaccaagtggaggctctacccacagatgttaatgtgcattaagaaacagcgttactgagaaatctgagccatcattccagagtctctctcctggggagaagtttgtttttactgctgggtttttttgtttggttttaattcagaatttggaactagaattatttgtaataaacctatcaaagcctagcctaagggctgccatctctgtctaaattctagttgtttatacagtataaaaaagacatttctaaagctctcaaagctgatcctcctcaatagtaagggactgtgtgaaagtttgtttatgctggcttagcaaccttcttttttcccccagctacagtgaaaaagcaaacttttggccagacttttagactataaatagagttatcatgtctcagtcaatgagggttaaaatgttctttttaaaaaaagaaaactttggaaattccaagaaggggcagtcacttttaatcattttgtaatcttggagactgctgtctacgggatggaagagatgttagcagaagggagggggcaaactgtgcagaaacagcttca

SEQ ID NO: 172894 - DNA, 270 bp, Homo sapiens
aaggtcgttatcgtgcttgcactcgggactgagttcacattgccttctacctgccagagaagctctgagctcctggaggaatgttccttttcttctgatgaaaaatgacgaggtgaacccctcgtgcctcggcgtaatgtggtcatcagaggtcgtgagaagagcacagaaatgcgtgtttctcataatcgcctggatgctaatcactgcgtcaaaacctcccgtgagccgctttctccacagaatggaggtggccgggcgcggtggctc

SEQ ID NO: 172895 - DNA, 325 bp, Homo sapiens
tcaagggaggctcttggtgtctcaccctgactcagatttgtggaggacaggaggctgggccaatgacagaactctgaccaatgagggaactgctccattttgcccccaaactttcgggttgtaattatacccctacttaactcatgacaccaactcttccccaccaatatgtttggagagacatatttaattttaaaagatgccaggttaaaaggaggttggaaaattttttttctggaaattcaccaatgtccttttaaaaatcagagatatgatagaatgtcacaatactagggatgagaacgaatgttttaagaagaggtag

SEQ ID NO: 172896 - DNA, 511 bp, Homo sapiens
ataaataaagatggcatagccattaaagttgtagtttttagatactagagcaggagcatcattcattttatgaccccatctccacccatgggaagctgatgagttttgtgtattgaattcgaagagcagagaatgggggaaaaggagattcccccattgaaaacctagataatgagagaggcggaaccaaaagcagactcagaacttcactgagaataatgggggtgtagtagtcaggtgagagagactggactaccaaatcatcgttgctatccagttattccagatgaaagatactactttacatttcttagggcatcatttttaagtgttggctttcagattaaatactagttgagagtggtgggaagacccagaaggaatacttaaactataataaatatgtactttgtgtatccattataaatatgtctaacatccctgatagctttaccctaagctttcttgtttaatggttaattttagtgtcacaaataaagtttgtgttaat

SEQ ID NO: 172897 - DNA, 168 bp, Homo sapiens
ctggtgggagaattattcacctttacatcaagaaggttgggaaaacacctgaacctgcatgtggcatgtgcctagccagacttcgaggagttcgtgctatgagacctgaagttcttgtgaggttccctaaaacagaaacacatgtcagcagggcctgtggtggttccg

SEQ ID NO: 172898 - DNA, 117 bp, Homo sapiens
tgctgagattacaggtgtgagccaccacgcccagccgagaaccttaatttctttcaagatccctgactcaataatcctactcctggaaatcctaataaaatgccattattcaaactc

SEQ ID NO: 172899 - DNA, 482 bp, Homo sapiens
cctcatggcacagagccaccactgccttcctgatgccagaggttgatcacatgatgggggcaggaggccgtcgagcaggaaaggggtgctgtctaaagacaggtgtggccagtgcaggggagagccagcatttcttcttggcgtgtgtagggggaggttaaagtcttagtggttgatttaaaaaattttagaaatgaaagtaaatattgaagttagtcattttatgaggctaggcttactgggatatgtttctggataattctaatttgtaagaaactcttgtgtttaatattaatcactgtcattcagaggaatcgaaacagtaacatgtcttgtttccttatactgcctttgaacacaaagtgaagccttgtttcaaaacttgcagacaacaggccatttaaacaaagactacacattttaagttgaaatttaggggaggattatttaacattcttactaataactctttggttacaatg

SEQ ID NO: 172900 - DNA, 414 bp, Homo sapiens
ttcccttccaccgcatcatccaggtggaacgtcacatggtattcacataggatataagtctagtttgcccccaagaagtaacaggcttatttgcacttaatttatttttaagtgtgctgtctttggaagactcataggccttttctagtagaatcttacctagcatcagccctcataaatttgctgatgtaattttaagttatactttctagctgctggagcacgcatgagcgagtgtctatcctatttcctcaaagttgctcaacttgcttaagaaatacataactgcatattggacatcagaagtgcttggttctagctgggggaaaaggatggttaattcccccctaaagcatcattgttttgcaatcgagtgaatcggatggattctccttcccttggatacttggcctg

SEQ ID NO: 172901 - DNA, 374 bp, Homo sapiens
aggaaatgtttttagggaattgggctaattgatagcaatgcagtgataggatcttaaaataacagtgacaaggtcgtagtgtttaactgtcagataaatggcaaggtcaaagtggcagtcaggaggagttacttgaggagatcagtggagttggttaatagaaaataatattcttaagggcaagatagatgggcagctaacaaggctatatcttgaacaatataatggaaagaaattattaaaaaacggttgattaagaggcaaagtgcaactacacaaattaaaaaagcgttatcccttgactagtttctgatcctgagccagtgcttaggcctagaacccattgatcaaaaaaagaggttgaatgtacagga

SEQ ID NO: 172902 - DNA, 534 bp, Homo sapiens
gttaacaatggcattgacctcagcaacttacaattcagaataaatatataggaaatgtatatgccacagaatttaagaaatgatgatttttgaccttgagactgagttttgtctgtttctaaaatgttggtaagtcattatgcttttccttcctgcctacccaccccatggctcaccaccaatttaaaatatctattctcatacactgtcctcatgtcacatctgattgtctctggagaaaagacctctggttttagatgtgaggacactgtgttttataatctccagggacttatcagagataagagctttttaacctacatctaagaaatagatgtgctgcatattcaccaacatcagagcaaccgattcctcaagaggttcgagatctcagtagttggcactattgctgtttatagccgtctatttcaggtttaactagaccactcctgaaaatgttccaaggtccagtcatgaaattaatcactaacataatagtgattattttcactattaacaggattaacataatag

SEQ ID NO: 172903 - DNA, 546 bp, Homo sapiens
taccgcgtgaactgctctccacctctgcaattttaaaattcaatggcctactttttgaacataacctcctaacataccaactttcaactcatcaaggcctactatacccgagcacccactgactcagagtcaactcccttcgtggcttaattttctgtcaagcctcacaggaaaagctattacttcagtttttaatctttctacctgactctgtctcctttttcttccattacacttgctgaattccaaccctgtaccaatccaagtaataaaagtagaacactgaacacactaatgaaaatccacacaaccatacaagctgcaatcattgtcagtaatttacttcaagcacaaatagccttcaaagatgtcccaaaatctgtgcatcagtactccactccaatgcccacatgtcccattagcaacccagattttctcaacttctccttaagatccttaacccacctcctactccttctctactaatcggaatcctttcattaacttctgcatccatttttgtgagggaagaaggaattgtttttg

SEQ ID NO: 172904 - DNA, 172 bp, Homo sapiens
taccgcgtgaactgctctccacctctgcaattttaaaattcaatggcctactttttgaacataacctcctaacataccaactttcaactcatcaaggcctactatacccgagcacccactgactcagagtcaactcccacaccaaaacagtactttattttgcaaattttgg

SEQ ID NO: 172905 - DNA, 798 bp, Homo sapiens
acctggcttctactagaggaggtacagaaaagccaccgagggctacagctcgggaaaagtctcaccggatcatctagatcctgagcgggcaatgctagccctgttctccaatcccaacccagccgaggcttggaaagtggcctatttctactgcctgagcaacaacaaacacttcctcgagcagattctggtaacagcactaacattgttgaaagaagaagacttcccaaatcttggctgcctacttgatagagaattcaggcccctcagttgcctgcttgtactcctgggctggacacactgccagagcctagagtcagccaagaggctgctccagaccctgcacaggacccagggcccaggctgtgatgagctcctcagggatgcctgtgatgggttgtgggctcacctggaggtcctggagtggtgcatacagcagagcagcaaccccataccaaagagagatctgttgtatcatttacacggtggagacagccactcagtgctctacactctccatcaccttacaaaccttccagccctcagggaggaagatgttctcaagctcttacagaaagtgccagccaaggacccccagcaagagcctgatgcagttgatgctccagtccctgagcacctgagccagtgtcagaacctgacactctaccagggcttctgtgccatgaagtatgccatctatgccctctgtgtaaactcacaccagcactcccagtgccaggactgcaaagacagcctctctgaggacctggcctcagctacagagccagcgaatgactc

SEQ ID NO: 172906 - DNA, 797 bp, Homo sapiens
aagttgcataggaaagatgtgaccggaaaagcactgagggggacagcctcgtgaaaagtctcaccggatcatctagatcctgagcgggcaatgctagccctgttctccaatcccaacccagccgaggcttggaaagtggcctatttctactgcctgagcaacaacaaacacttcctcgagcagattctggtaacagcactaacattgttgaaagaagaagacttcccaaatcttggctgcctacttgatagagaattcaggcccctcagttgcctgcttgtactcctgggctggacacactgccagagcctagagtcagccaagaggctgctccagaccctgcacaggacccagggcccaggctgtgatgagctcctcagggatgcctgtgatgggttgtgggctcacctggaggtcctggagtggtgcatacagcagagcagcaaccccataccaaagagagatctgttgtatcatttacacggtggagacagccactcagtgctctacactctccatcaccttacaaaccttccagccctcagggaggaagatgttctcaagctcttacagaaagtgccagccaaggacccccagcaagagcctgatgcagttgatgctccagtccctgagcacctgagccagtgtcagaacctgacactctaccagggcttctgtgccatgaagtatgccatctatgccctctgtgtaaactcacaccagcactcccagtgccaggactgcaaagacagcctctctgaggacctggcctcagctacagagccagcgaatgactc

SEQ ID NO: 172907 - DNA, 2242 bp, Homo sapiens
  misc_feature (1481)..(1481): n is a, c, g, or t
tttaaatgaaaaatcaagacacgcctaattaaacacagatattaaaagttttatttgacctttggctggttcctttttatggtcttaagtgctttagagaatttttaaacagattgtttatttaagctgttggcaaaagcatagtttcattagtaagttccattctgcaagtttagctactggatcccaaccattttcaggttgcgtattgcatattgttgattttcacatcttactctctcactgttcccttgtggaggaataaaagattttagaatagagtactgggaaatatcaaaatgtacacaccttgtatgcatatcactgtagctggcaagtgcaaaaaaagaagtagcatgaagtgtaaaaggagaagggaggtaattgaagtgttagatggtttgattgactgcaaatgggacaggaaaaaaaaggtagtcatcacctatttggagctaaatatgttgggaccacagaagccccctaaaatgtttcctggaagggacttggtacaattggctatgaaattgtactcaaaaccacttagtcagtactgcccagggaaatggaacctgtagctggctgccaacacacatacaatgtggtcatggcggggcggtagggaaggattatttacatttttttagttctggggaaaaatacactaatggaggaaacctggtttgaggacagctctttgatctatcttattgtagtagccatcttatgacaagagtaagaagttctggatctcaaagtggtgatccctgactttaggcagtttctgaaaaacttaagatcagtgagagaaagatgcaattggtcttattcattcagacatgaaataaggcaaatgagtgttagagggagagtgcccctaagtataggtctttattaggcagtcaaatgaagcaaactgtaggaagaaaaaaatgtggattgtattgtatgatttttataaataccaaaaatgtatacagattggaactacttgtatcttccattttcttgaccatgtcatttttaagttagtttattaagaacatctccatagtagcttatcggtagttttagcatgattacatgcaaaaacattcagttatctatgataaaacttgaatctttaaaaccaattcaacatgaacagaattatgttttgaagttgagaggatagtggctccaggttttgcctataggtgttttcttggaccacctttcaatggaagtgtaatttattactttttttccaaaggagagtcttaggtgccctcgtcttaatatctaaattatgtgcatcctacactagcaagaataggagtgctctacgctcttgctaaaggtaaattgtttgccagttctttcagaatcgtggttgagaaaatattcatggagtatggacattcagtccatttgtagtctgaatattaaaattgtgtcttttcatcacgctaaaatacctgcacaagttttttggagacagngtttcgctcttgttgcccaggctggagtacaatggcgtgatctcggctcactgcaacctccgcctcccaggttcaaccgattctcctgcctcagcctcccaagaagctgggattacaggcgcccaccaccatgcccggctaatttttgtatttttggaagagatggggtttcactgttggccaggctggtcttgaactcctgacctcaagtgatccacctgcttcatcctcccaaaatgctgggattacaggcgtgagccactgtgcctcgccccacacattttttttttgagcgttgcagatgtatcgtgccacactgtccttagatgctggtgatacggtgatatgtggtccttgtttttaagacctttataggaaagtggagagaagattaaacttgtgattacagtgcagcatgctagcctgccactgaggtggtattataaaagtgctgtggtgtgggcacgtggcccatgcctgtaatctcaacactttgggagactgaggcgggacgatcacttgagtccaggaattcaagaccagcctggccagcatagggagaccttgtctctaaaaaaattaaaaaattagtctggcgtggtggcacgcacttacggtccaggctatttgggaggctgaggtgggaatgaggtgggaaggtcacttgaatccaggagactgaggctgcagtgagttgtgatcgtgccgctgcactccagactgggcgacagagggaggccctgtctccccggccccgccgc

SEQ ID NO: 172908 - DNA, 1992 bp, Homo sapiens
  misc_feature (1481)..(1481): n is a, c, g, or t
tttaaatgaaaaatcaagacacgcctaattaaacacagatattaaaagttttatttgacctttggctggttcctttttatggtcttaagtgctttagagaatttttaaacagattgtttatttaagctgttggcaaaagcatagtttcattagtaagttccattctgcaagtttagctactggatcccaaccattttcaggttgcgtattgcatattgttgattttcacatcttactctctcactgttcccttgtggaggaataaaagattttagaatagagtactgggaaatatcaaaatgtacacaccttgtatgcatatcactgtagctggcaagtgcaaaaaaagaagtagcatgaagtgtaaaaggagaagggaggtaattgaagtgttagatggtttgattgactgcaaatgggacaggaaaaaaaaggtagtcatcacctatttggagctaaatatgttgggaccacagaagccccctaaaatgtttcctggaagggacttggtacaattggctatgaaattgtactcaaaaccacttagtcagtactgcccagggaaatggaacctgtagctggctgccaacacacatacaatgtggtcatggcggggcggtagggaaggattatttacatttttttagttctggggaaaaatacactaatggaggaaacctggtttgaggacagctctttgatctatcttattgtagtagccatcttatgacaagagtaagaagttctggatctcaaagtggtgatccctgactttaggcagtttctgaaaaacttaagatcagtgagagaaagatgcaattggtcttattcattcagacatgaaataaggcaaatgagtgttagagggagagtgcccctaagtataggtctttattaggcagtcaaatgaagcaaactgtaggaagaaaaaaatgtggattgtattgtatgatttttataaataccaaaaatgtatacagattggaactacttgtatcttccattttcttgaccatgtcatttttaagttagtttattaagaacatctccatagtagcttatcggtagttttagcatgattacatgcaaaaacattcagttatctatgataaaacttgaatctttaaaaccaattcaacatgaacagaattatgttttgaagttgagaggatagtggctccaggttttgcctataggtgttttcttggaccacctttcaatggaagtgtaatttattactttttttccaaaggagagtcttaggtgccctcgtcttaatatctaaattatgtgcatcctacactagcaagaataggagtgctctacgctcttgctaaaggtaaattgtttgccagttctttcagaatcgtggttgagaaaatattcatggagtatggacattcagtccatttgtagtctgaatattaaaattgtgtcttttcatcacgctaaaatacctgcacaagttttttggagacagngtttcgctcttgttgcccaggctggagtacaatggcgtgatctcggctcactgcaacctccgcctcccaggttcaaccgattctcctgcctcagcctcccaagaagctgggattacaggcgcccaccaccatgcccggctaatttttgtatttttggaagagatggggtttcactgttggccaggctggtcttgaactcctgacctcaagtgatccacctgcttcatcctcccaaaatgctgggattacaggcgtgagccactgtgcctcgccccacacattttttttttgagcgttgcagatgtatcgtgccacactgtccttagatgctggtgatacggtgatatgtggtccttgtttttaagacctttataggaaagtggagagaagattaaacttgtgattacagtgcagcatgctagcctgccactgaggtggtattataaaagaccatgaggacgagcacggcgcatacctgactctctacccttcggacccatctgggatcctc

SEQ ID NO: 172909 - DNA, 195 bp, Homo sapiens
acaagcccatcccccaacaccccaccaagattgcagaaatgctggttagttgatttctaatgtcagctgttctttcagtgagagatttgcagggaagaaaatcagatgttgttttgaagaagtgcttttgtttttttgaaagcaaaaactgagaatttattgtttcatgtattggaagtgttggggataacctga

SEQ ID NO: 172910 - DNA, 177 bp, Homo sapiens
tccagatacggtggaatgggaagtgttgaaaatgcttccaatgctgtggactgggagggttggtggatgaagatacctgcttatctctggattttgcaaatataaggttagtctagcagtctttgccaaactgtggcaacaatcaatagtatcacaaccagtgactaagaaatataa

SEQ ID NO: 172911 - DNA, 121 bp, Homo sapiens
tggtgtagtacacagaataaactggagtcaagctggttttgaatgctggttctttttactgctttttgagtctacaaagccagtctatcaagtgaggctaaaattggctaccttggaaatg

SEQ ID NO: 172912 - DNA, 810 bp, Homo sapiens
ggttagaaaacttgctaaagtcatggagcatgtatgttcatagagctggggttgaaaacatctttaaaaatgaccatttatcttcttcctcttggccctatctgacaaggttgtgaaaaacacatgaggaaatatatgcataagcactttgagatcttgtcaagtgctgttcaaagtattaatagtagtagcattattttccttcctgacatcccaatgataactagagtgaaatagtgtctaatttcttcagtaagcttcgggtctcacaggacacaaatgaaagattgggcagaacctgactgtctttttggtcactgcttagaattctattcaggtgtgagccctgagtgtgcagtgtccacctgctggagtcctgcacacagagtgtgcaggcatcctggacagcctgcccaaagaggagcaacaggaggcttccaggaagggaggtgtcaagaaccagctgctgagacctagtggctgattcctgtgaattgcatggataagccagatgcccttgtggtgctggcaaggaaatcttaagatcttaagaaggagaatgggagttgctgaaataacaaaccgaaacaaagacataaccatgtaaggtcaaaagcacagattaaaaaaaggtgaccacgttttagctcttggaaacaaaatgtttagagagaggcaaattgttggcagacagatttgctacggaagtctttttaaatagtgaaagccctgcaaatacagcataatcccagcatctgtgtgtatttggaatttaggcaattatagcctcaagaattcagaatccatttt

SEQ ID NO: 172913 - DNA, 761 bp, Homo sapiens
aaatgggagtttccctgcacaagctctctctctttgcctgccaccatccatgtaagatgtgacttgcttctccttgccttctgccatgattgtgaggactccccagccacgtggaactgatcagcagatctgttttcactacctcaaggtacacagccccaaacactgcccatccccagctccccatgcacatctttcctgttggagaaaccaggagagagatgagcatttctgttccagttccgaactccccagagagattctgatgggcccagcttaggtcaggggatagtcttcactcaagagttcctgagataacagagactggagtagcaggcattgcagaactgattttataaaggaagaacgtgtaccataaatattgctagttaagagcatgtatactgttgagttctacctcctcagaagtctaaaaggtttccttcctttgagggtgaagaagcagtaacaggcgtcctccatcagacccctctctgtgggcacctagaacacttcccattgacgtctgcttcaaggggaggtcactaaaagtgccccacatgatgcagcagacatttcgctggtcccagtgccctccccaagaccttccagatggtgaagtgttaagagtctaaaatggagtaaatgatctgcagaaattcagtggtgtcagaggagccagtccaaagtcactcggctctaaacgctgcgattctattattttaatgatgcccaggaacacaaagaggcacgacagaccc

SEQ ID NO: 172914 - DNA, 518 bp, Homo sapiens
cggcacgaggaaaatacaaaaatcagctggttgtggtgttaccctcctgtggtgttaccctcagcctcccaaagtgctaggattgcaggtgtgagccacagcaccctgcctaaccatacagtttgaaataagtagggcagtgtattattagggaatgcaaaagacaggaaacccacatttgcctgtgccaaaggaaaaacgaagggatatttgtagtgcacatgactgaaaggagcagacgctagcttccagggcagcgggaccgggtgtgaacagccttccctgggcttccgctctgtctctggctcctgtgctggctctctacatttacattcttgagcactctaggtttacatcttacccttcagcagcaccgggaagagagagatgatctatcttttctttttctttttttttttttttctgacacagagtctcactctgtcacccaggctgattgcagtgagccaagattgcgccacttactccggcctgggtgacagcgagactccgtctca

SEQ ID NO: 172915 - DNA, 447 bp, Homo sapiens
agctaaggctgcagcttcatctcccatggaaacctgggctcactaggaggggcaaggcctccagaccactgtcttaccatagaagccgcctagcaaactgcaaaccaagcagaaaatgcaggctgggctgaggaggcctctaactgatcaccagccaagcagagaaggggtgagtggcatgtgaatgactgctagctctaggcctggaccatggattcaaaccctgctggctggccctccaccatctcctgctccagtgaagactgtggcatccattagtgaggctagagtacacgcttctgactgtggaatccttctcattttctggctctgccatccactagctgtgtaactttgggcaagtgtggcctgacagccgaaagcttacccccactccttgctagctatatagctgagggcaagccatagaacttctccgagcctctg

SEQ ID NO: 172916 - DNA, 310 bp, Homo sapiens
taataattccttttattgaatctgcatcttcaagctctgttagttataatgcactgttattattctagagcccttgtgatgtgatggtaaggcattttgtgatggaagggaaagtgctctataatcctgtaaattaaattttagtcttttaggggtctgcatttctgagctatggccttcatatgtgtttcttagcttttatctttcccctcataaggaagacaggaaaactagagcagaatttgactgattgccttttccccagatagattaggtttggttctggttgttgtttcccttggagagcagt

SEQ ID NO: 172917 - DNA, 347 bp, Homo sapiens
attgcgccactgcactccagtttggatgacagagcgagaccctgtcaaagcaaaaactacaaaaaattgagctctgtgttaatgtccaacactctgccctgcccacccctggttcctgatgtaaggcccatggggcctcccttccctcccctggactctggctgggtggttttgaagaattttctgttatcggaaaagcaatgactattaggatgctctttaactgttctgtaataagcaattctaaacttgaggaagctcctccctgcttccatctgtaacctaggtctttctacattgttttttatttttcgggagtgctggtgcacacaaggatggtttttgtt

SEQ ID NO: 172918 - DNA, 967 bp, Homo sapiens
aaatagcaacatagagtttcttttggagcaagaaaaaatgcttaaagctaactgtgtgagagaagaagagaaagcagcagaattgcaattaaagtccaagctctttagctttggagaatttaattcagatgctcaggaaatactgatagactcacttagtaaaaagattactcaagtatacaaagtctgcattggagatgctgaggatgacggcctcaacccaattcaaaagctggtttcgtgatgagaaaatgaaagaaaaacaaagacaccaacaggaaaggctaaaagctgctctggaaaaagcagtagcacaaccaaagaaaaagttgggaagacgacttgtctttcattcaaaacctccatctggtaacaaacagcagctacctttagtcaatgaaacaaaaacaaaatcacaagaggaagaatatttttttacttgaataaaagcagtaagacattttattaccagaatgtcttaggtgtattttgtaaattttaagtctttaagtattcatatcataagtattattccatatagctaaacactttcttctatactttgagttgtcccacttggggatacacaaagatagtttactgataaaactatggtaaatgaacactgaagtgtaataatggccattctcttacaacatgagaatgtaaatgatgtattttctcaacccatctgtagggaagttcatagcatactgttattactatggactatacattttaacaatgtacaaccctaaaatacctgaagggttttgaggggcttaaaactcaacctcgaggttatgtctcagaacataatggggagactggtttttatttgacattacattttgttcagagaacttttttctcttcagtgaacaaaccgtatgccttcagcctgaatgtcagttcccaatttctgttgtgccctgtctgtacaatcattttaatttttagaagatgc

SEQ ID NO: 172919 - DNA, 961 bp, Homo sapiens
attttatattttccaaaatgatgaaatttcttcccatttcaaaatagtatttgttgtcgagatttacctgaatattcaaaagccacggttatgagtaaagatgaagtgtcattttcatttacctttaaaggaggtcttctagtcacatggctcattaacaaatagtaatgtacttttcttactcaatgtgatttatagttacaagaatgtttctcccttcttgtgacaggtttcgtgatgagaaaatgaaagaaaaacaaagacaccaacaggaaaggctaaaagctgctctggaaaaagcagtagcacaaccaaagaaaaagttgggaagacgacttgtctttcattcaaaacctccatctggtaacaaacagcagctacctttagtcaatgaaacaaaaacaaaatcacaagaggaagaatatttttttacttgaataaaagcagtaagacattttattaccagaatgtcttaggtgtattttgtaaattttaagtctttaagtattcatatcataagtattattccatatagctaaacactttcttctatactttgagttgtcccacttggggatacacaaagatagtttactgataaaactatggtaaatgaacactgaagtgtaataatggccattctcttacaacatgagaatgtaaatgatgtattttctcaacccatctgtagggaagttcatagcatactgttattactatggactatacattttaacaatgtacaaccctaaaatacctgaagggttttgaggggcttaaaactcaacctcgaggttatgtctcagaacataatggggagactggtttttatttgacattacattttgttcagagaacttttttctcttcagtgaacaaaccgtatgccttcagcctgaatgtcagttcccaatttctgttgtgccctgtctgtacaatcattttaatttttagaagatgc

SEQ ID NO: 172920 - DNA, 1074 bp, Homo sapiens
aaatagcaacatagagtttcttttggagcaagaaaaaatgcttaaagctaactgtgtgagagaagaagagaaagcagcagaattgcaattaaagtccaagctctttagctttggagaatttaattcagatgctcaggaaatactgatagactcacttagtaaaaagattactcaagtatacaaagtctgcattggagatgctgaggatgacggcctcaacccaattcaaaagctggtaaaagtagaatctcgcctggtagaactgtgtgacctcatcgaatccattcccaaagaaaatgtggaggcaattgagaggatgaaacagaaagaatggcggcaaaagtttcgtgatgagaaaatgaaagaaaaacaaagacaccaacaggaaaggctaaaagctgctctggaaaaagcagtagcacaaccaaagaaaaagttgggaagacgacttgtctttcattcaaaacctccatctggtaacaaacagcagctacctttagtcaatgaaacaaaaacaaaatcacaagaggaagaatatttttttacttgaataaaagcagtaagacattttattaccagaatgtcttaggtgtattttgtaaattttaagtctttaagtattcatatcataagtattattccatatagctaaacactttcttctatactttgagttgtcccacttggggatacacaaagatagtttactgataaaactatggtaaatgaacactgaagtgtaataatggccattctcttacaacatgagaatgtaaatgatgtattttctcaacccatctgtagggaagttcatagcatactgttattactatggactatacattttaacaatgtacaaccctaaaatacctgaagggttttgaggggcttaaaactcaacctcgaggttatgtctcagaacataatggggagactggtttttatttgacattacattttgttcagagaacttttttctcttcagtgaacaaaccgtatgccttcagcctgaatgtcagttcccaatttctgttgtgccctgtctgtacaatcattttaatttttagaagatgc

SEQ ID NO: 172921 - DNA, 298 bp, Homo sapiens
ttatgaaataaaataatctgttatttttccttaggtattaaggactgcaagaagctaaatgacagctctcttctagaaacaactctaaagattaaagaaaaacctattttcagatacattgaaaataatttattattcaccatattttattatttgaaaaaatcctgtatggtattaaatctttttttttttttttgagacaaactcttgttgcccaggctggagtgcaatggcacgatctcggctcaccgcaacctccacctctcaggttcaagtgattctcctgcctcaggctcct

SEQ ID NO: 172922 - DNA, 228 bp, Homo sapiens
gaaagcctcctatcaagtcctcccaacagaacacccatgatgactcatgaggatgttgaaggtgttttcctgtggcaactgtgagtgtctttcttcaaagtctgttttgttcctgcacattaactgatttatataaaataagagaataaatgcctagactcccatgagtctatcttttactgataaactctagttctgaggacagaagcctgatggagtcagtatagg

SEQ ID NO: 172923 - DNA, 479 bp, Homo sapiens
tctacatcttggttttcttgaatgtatctcccggaaaattctgcaaaggggctgaaaaaactctagtttttattattattattattatttttcgtcctgagacagggtctttttctgtcccctaagctgatgtgcagtggcacaatcatggctcaccacagcctccaactcctgggctctagcgattctcctgcctcagcctcctgagtagctgggattactggcgaatgacaccatgctcagttattttcatttttggtagagatggggtctcaccatgttgcccaggctggtctcaaactcctggcctcaagtgatcctcccacctcagcctcccaaaacactgggattacaggcatgagccactgtccccagccaggaattacctttaaaattttaggtgtgataaatatgttgtggttaattttttaaagagtttgttttttttttaaacaggttcattctgaaatatttactgg

SEQ ID NO: 172924 - DNA, 1070 bp, Homo sapiens
ctcccagagttaacattcttttgattgagcagttttgaacctctctttttctagaaactgcaaatggacatttggagcgcttagaggtctaatgtggaaaaggaaatatcttcacataaaaactagacagaagaattctgagaaacttctttgtgatgtatgtgttcatctcacagatttgaaactttcttttgattgagcagtttggagacactctttttgtagaatctgcaagtggacatttcgagtgctttgtggcctgtggtagaaaacgaaatatcttcacataaaatctagacagaagcaatctgagaaacttctttgtgatgtgcgcattcatctcccagagttgaacctttcttttgttggaccagctttaaaatactctttttgtagaatctgcaagtggacatttcgagcgtcttgagtctatggtggaaaatgaaatatcttcacataaaaactagacagaagcattctgagaaacttgtttgtgatgtgtttgttcatctcacagatttgaacctttcctttgattgagcagtttagaaacactctatttgtagaatctgcaagtggatatttggagcacgttgtggcctacagtagaaagggaaatatcttcacataaaatctacacagaagcaatctgagaaacttctttgggatgtgtgcattcatctcacagagttaaaccttccttttgattgaggagttttgaaactctccttttttagaatctgcaagtggacatttggagcactttgaggcctaaggtggaaaggaaatatctgcacataaaaactagacagaagaattttgacaaaattctttgtgatgtgtgctttcatctcacagatttgaaaatttcttttgattcaacagtttggaaacactctttttgtagaatctgcaagttgacatttggagcactttgcagcctatggaagaaaagtaaatatcttcacataaaatctagacagaaacaatctgagaaacttctctgtgacgtgtgcattcatctcacagagttaaacatttcttttgattgaggagttttgaaactctct

SEQ ID NO: 172925 - DNA, 682 bp, Homo sapiens
atgtccacattcacagctaacaggagccaccagcaccaaagtttaaaggccttgggaggcctgacataatacaacaatattttattgagtacctactatgtgctaagcactgtgctaggtgccaaggttacaaccataagcaaaataatagatcattttccattctctgggtgctacagttcaatgggagacactgacagagtggtgcttccaatgccaatgctaaatgctctaatgtgggtggaggaggtggaacaggttattctgagagctcaaggaagggcgaaggggacaatcttctcaggagatagtgtcctccaagctgagacctaaaggatgaagtggaagcaaagaaaagacttccagaaggggagactcaagagaaagccggagctttgactctgggtatacagaaaaactggaatgccttagatccatctcatacaagaaaggaaaccgtgtcacctcagaatggagtgtttttctctttttagtgttttattaagtaatcctcctcatgggttgtgaggaaaaccctacccaggaagcagcagtcttttgctctctcaacaagaattttccctaactttgcttatctggtaattggtgaatctgaagattgttcttatctgataagatttcagagtattaggaagacattccaattcttcctgactttatc

SEQ ID NO: 172926 - DNA, 433 bp, Homo sapiens
agagagagagagagagagagagagagagagagcccttccccagctagtctggcagcaagtgatttctaaaggccagaaataggaaaaaaaaaataatcgaatcaaattgacttttggaattgtccttatgaagcacaagtctacaacctttaactcatagagaacacagtgagcatatctgctttgactggcaacttcaaaaaacccctctcccagaggcttgggaaaacacatgttggacacagactaatgataatgtggaacaattattacaatgaacacaataattgtatttgttttatgaacatgatagcctgaagaaacccataccaagaaatattttacgtgttgtcatcattaagaagtcagcaaaccttaaagacaaacacaatctattcatccatccatccatccatccatccatccacccatt

SEQ ID NO: 172927 - DNA, 288 bp, Homo sapiens
agctaagaaaggatggaaacaaatgtagtattttgcaggtgaatttttgagatgccccatttacttgaaattttaaataatggaggtaaaagactttagttgaagtttgaatgtctcagaatgatgaataaggagtttgtcaggtattatattttcagtgttagtgcagagtaattccttgtaacacaaatggctgatttttgtaatatgtacacacaagcttagtatggtatgataataagacaacaaaaacctagtagcctttgctttttttcactttgcagttga

SEQ ID NO: 172928 - DNA, 393 bp, Homo sapiens
aagcctggttttgagagtccctttttgagacataattgttatctccctgccatttttttcaaaagaaggaatttatcgtactccctaacacctctaagattaaaagtagcttaattcttggctgggcacagtggctcacacctgtaatcccaacactttgggaggccaaggcaggcagatagattatttggagtcaggagttcaagaccagcttggccaacatggtcaaacctcatctctaataaaaatacaaaaatcagccagacatggtggtgggatattccagctcctgggaggctaagacattaggatcacttgagcctgggaagtggaggttccagtgagtcaagacaccaccactgcactccagcctgggtgaccaagcaagactct

SEQ ID NO: 172929 - DNA, 623 bp, Homo sapiens
ggctctgctgtagcctcacctcagcgcattcagggctctgaacctgcctctgggcccattgagtgttttcacatctttgaacaaagagaagattgtcacagaccagcagacaggacagaaaatccagatagtcaccgcagtggacgcctccggatcccccaaacagcagttcatcctgaccagcccagatggagctggaactgggaaggtgatcctggcttccccagagacatccagcgccaagcaactcatattcaccacctcagacaacctcgtccctggcaggatccagattgtcacggattctgcctctgtggagcgtttactggggaagacggacgtccagcggccccaggtggtagagtactgtgtggtctgtggcgacaaagcctccggccgtcactatggggctgtcagttgtgaaggttgcaaaggtttcttcaaaaggagtgtgaggaaaaatttgacctacagctgccggagcaaccaagactgcatcatcaataaacatcaccggaaccgctgtcagttttgccggctgaaaaaatgcttagagatgggcatgaaaatggaatctgtgcagagtgaacggaagcccttcgatgtgcaacgggagaaaccaa

SEQ ID NO: 172930 - DNA, 494 bp, Homo sapiens
tggtctggaaaggcgggacaactcaaagttggccatggaggtgcttccaggtcttgggtgggttcaaagattttctcattggcagttggttcaaagagttatctaaaggcctggaatcaatagaaaggagtgtctggattatgagaaagggttgtggagaccaaggtttttattatgcaaatgaagactccatggtaaatggtaaatgtctcttatcagttgaaaacagtgccagactcttcagttaattctctcctagagagagacctgggaaaggaagaggaatgtagattttacaaaatgaatatactaagcatgctagattctaatgagattgctctgatttgacaatattaaaggttttcttaataaattgacttccaatcttatctttaatgtctgtagtactcttgtgcactgaatattatttttttcattaaacacttttctgtagatcctgaggaaaagatacaaaaaaaatttgaaaaactcaa

SEQ ID NO: 172931 - DNA, 374 bp, Homo sapiens
ggggagcccagagcccaccagctgaggcaggatacttggtgcatgtggggaggcggggctggcggagcgtgagcggcccccgctggcctccagcacccagctggtgccgcggcagccctgtccactccagtgtctgcatggcgccgcctccttagccaggccttaccttctggccgcatttcccccacaccagaccaccccttgggctgcagctggactggccttggtgaatggcagatctcactgttcccctcctctgccaggtgctaggtagagcctcactgtgaatctcatggctggccacagcctcaccccgaccccaccccaccccaccccagcacagtgtgctctccctgagcccctttccatagcag

SEQ ID NO: 172932 - DNA, 492 bp, Homo sapiens
gctgcaactacaggctcatgccactgtccctagtgccataatatgatcttttaaataactaactatgccttaatttcttttttgtttgtttgttctttgttgttgttgttgttttgagacggagtcttgctctgtcgcccaggctggagtgcagtggcgcgatcttggctcacttgcaagttccacctcctgggttcatgccattctcctgcctcagcctcccgagtagctggggactacaggcgcccaccactgcgtctggctaattttttgtatttttagtagagacgaggtttcaccgtgttagccaggatggtctcgatctcccgacctcgtgatccacccgccttggcctgccaaggtgctgggattacaggcgtgagctacggcgcccggcctaaccatgacttaatttctaatcagagaaataacatttaatatttcagataaatttcccaagttgtaagccaagaagcaggctatagtatctct

SEQ ID NO: 172933 - DNA, 169 bp, Homo sapiens
ggtgcccttcccgggtaaaactctgcggtgcttcaccaaagaaatcacagaaaaccacactctgacagcagtgtcttattctattagtacattttaattagaacaggagcaatggatgcattatgaatattcatggtgggttattaaaatgcatcattaatcggtgggg

SEQ ID NO: 172934 - DNA, 408 bp, Homo sapiens
ggcactatgtagtttataattttctttgtaagaactttgtgacttaagaattctctcaattttacgaacgcactgataggcgtaagcaaagtgactttccctaaaaaatcatgaactgacaacagacttaatctcaacttcaagtcccggcttagccacctattaagtgacttgaacttgggactaagcctgttgtcggttcagccctctactataccatcctgcttcattggtaaattagtcttttgtcttcttgaaaagttgggactacttagggctgttcaaattaagcagcatcttagtggaaggcttgatcctgtggtattcacaaagccctgtggaaattgtgaggagaggcagactaatgataacagcaaatgggttagcactgattgaacacttaccacg

SEQ ID NO: 172935 - DNA, 178 bp, Homo sapiens
aacagaacaagaaagatacaagatatatttttaaaattcagccctttaaaaaagtagtgcatattcccttttatcagtcaaagtttaacttttgcttattcttttataacatcctcatttcatgatttcttcagcagatttaagtattacataatatttgtcgatacaaaatgccaat

SEQ ID NO: 172936 - DNA, 313 bp, Homo sapiens
gattaagaaactttcttgatacaaaaatagaggatcattcatggtactacaaaagatatacaggaaatgatataatatttcatcaggattggtatgtgttatctgttttctaaatgactatttcatggataagtaacacttcagttatgaaatcttaattctcatcagctgagattttatggcaatgggctgtccagtatgaaatattttattttgattttaaagtctctctacatattaagtctaagtgctttctaaattactaattccagagtgactgtcacaatgtgtcacctcagtgctactcaaaatg

SEQ ID NO: 172937 - DNA, 204 bp, Homo sapiens
acatagtacctcttgcaagaacaatgagaagctagatcagctcctatttcccctgcacataggaaatctcagaatgtaggtatgtgtatccacacccgaccttcgtgcacacacacattagagatgctaattatgggaagacagcagaggcagtgcaagcttcatactgtacccggggagggggagtttgcaaatattttctcc

SEQ ID NO: 172938 - DNA, 544 bp, Homo sapiens
gagttttttttttttacttcaagttatgctgatttaattacaaaataagcttttccaaggcactggcctttgtaatgaaggtaaatattacatgtttgctaaaaaacagggttttataaaactcctcacctcatataaacaattgtaagtcttttgttttttccagaaaaaaaaaaactttcactaagtattagtcactcatatatctataaatctcagaggaatttccccaagcactctggcttcccaagtaggagattgtttctcctagttcaagtctcatttcactgttaggctggctgttatttcatggtgacttgccatgttaatagtatgtcttctaatccacgaatgtgatatagctctccaacttatttgagtcctcttcagttttactcaacagtgttttgtagttttctgtgtataggttttggaaatccataattaaatttatccttgggtattctatggttctttgttattatgaattgtattttttatctcatttcccaattgttttgctggtatacagaaatataattta

SEQ ID NO: 172939 - DNA, 131 bp, Homo sapiens
cagccggtacctgaacttctctgtgttaccaaatgtgtatttggtaacacagagaaagttcaggcctgaagattaaataaggtgacctgacatctttccaaattatcttgccctagtttcagaaacaaaat

SEQ ID NO: 172940 - DNA, 460 bp, Homo sapiens
ctccggatcaggatttgttcaaatctcaagttaacgaaggccttggggctggcagagccaagggcccttcccactacccccatcccttggggcgagggcatctgcctctgggctgcggccttcagctcagtccagtggccagggggagcccaagccctcaggatacacctgccctgcttccaggaacaatcaggccagacagagcccgctgactcgtgagcagcccagagctgcactggtccctggactgagactcatggggcacaccccagcgagcatctcagtgagtgctgcctcagaagaggggagatcagggtgaggcaggggacgctcccgagaggctgctggcccaggcctgatgtggagtccagatggaaacagaccgcaggaatgggcactgtcagcaaagccaggcaactgagctgggaggctccaggcagcggctgccccacacgccaac

SEQ ID NO: 172941 - DNA, 425 bp, Homo sapiens
atcttcaaagtgatgaatgtcttttttgtatgttaatgaggtggctggtggctcctagacagcttcaagataggaggtggggctggtcaccagaaagaagaaggtagggttagaaggttgggactcagccctactcttgccctctgggaagggagaggggctgatggttgagctgatcgccaatggctaatgattaaatcatgcctatgtgatgaagcctccataaaaacccaagaggacagggttcagagagcttccgggtaacgtggaggtttctagagggcagcgcacctcccttctacggggacagaagctcctgtgcttgggacccttccagaacgctccctatgcatcttctcatctggctgttcatctgtatcctgtaaaatatgccttgtaataaaccaggaaatgtgtttctctga

SEQ ID NO: 172942 - DNA, 209 bp, Homo sapiens
aaaaaagaaaaaaaaaaaaaaaggaagagaggtgagggccactctagggacaagggtagaggttgagacatggtggtgaaggtgccagacctcaggcttcaggcccagatggggttgggttcgggattatgagctgaaggtggaaagtgctcctagagccctagacctcaggctgctgagctggggaatggggaatgaagtagtgagac

SEQ ID NO: 172943 - DNA, 640 bp, Homo sapiens
ttaatttctaatcctttcctaatcagtgtatttattctcccatctctagattgaacctctgcagcaacctcctaatgggcctccctgttatcagatgttgaatctttcagtccattgtccacacaacattaatagtatatgtcatttgcgtgtttatgaccctacttggttttccattttatttaggataaatttaacttttataaaatattcacactctgttcctcagtggtcactccaatttcatttaatttttctccttactataagaattttatcttcttttatttcctcagaagagttaaacctttttctactttggggtcttcatatatgttgtttctcttttctggtatactctttttccctgatgatcacatggctgattcttgctcagcaaactcttagcttaagtattgtctccttccttatatttgcttagccttctgtaaccacattgaattagattctctctctctctcatttgttattcacaaatccctgtttccatcagaacatttactgctgtttataattacctgttattttggtcatttgctattgagactcttaaattccatgaaggcaggaacaatgtctaacttgtttatattgcatctccaagtactttgaggtgcta

SEQ ID NO: 172944 - DNA, 545 bp, Homo sapiens
aaagatttgaaccagcaattactacagaagatatactactgatgggaacgtaaaatgatacaatcactttggaaaacaatttggtagtttctttagaaattaaaaggccgaggcgggaggattgcttcagcctaggagtttgagaccagcctgggcaatgtagggagacttcttctatacaaaaataagaaattttttaaaaaagtagctgaacatggtggtacatacttgtagtcccagctactccagaggctgaggtggtaggatcacttaagcctgagaggtcaaggctgcagtgagccatgatcatgccactgtattccagcctaggccacagagcaagaccctgtctcaaaaaaaagaaataaagcacacatctatatttcctagccactttactcccagatgtttacccaacataaatatgtcttcatgtgtccacagaattatgtacaaatattcataccagctttatttctaatagccccaaactgttcgccaacagatcgtcaatcagatcgaccaccagatcgcccaccagatcg

SEQ ID NO: 172945 - DNA, 431 bp, Homo sapiens
cctacttcagcctcctgcgtagctaggaccgcaggcatgtgccactatgtccagctcatttttataaattttttgtagagacgggaatctgggaatctccctatgttacccagtctggtcttgaactcctggcttcaagtgatcctcctgcctcagcctccagagtgcagggattataggcatgagccgccatgcctgggccaattgtgtgatgtctgtgaaagcaaactcttcatatttttattcctgtgatatgttatttgggtaaccggatagctatattggaaactaaaacttcttatgtttatgaggtatgaatattataaaaccattttgttttttccatttattttctggcttgtcagttttaagaatttccacctcttctttctttagggcttcaataactttacaactaattgtgtagttta

SEQ ID NO: 172946 - DNA, 220 bp, Homo sapiens
caaatctgtacttttgtctgttcagggtcttttgcatttttatgtgaattttagaataaacttgttaatttctgaaaaaagcctgctgttattttgatagggaatgtaatgaatctatatagattagttttgggagaattaccatcttagctataataacgcatcttttttttttttttttttcttctgagatggattcttgctctgttacccaggctgg

SEQ ID NO: 172947 - DNA, 536 bp, Homo sapiens
tgtaccatctttgggataaaatgcatgcatccgtaattatgtcataaaaggattattgattttgaaccataaaaaggcttattggttttgaatcacaattaacataggtatacttttgaagattttgactgttgtatttaaagtttttaaaaaatttttattttattattattattattatttttagagagctcacatcctaagcaattgcctcattggtacctatgtaaagattaaattaaaaagaggacacaaaaaatgtgatggctagccttagggacacccttagcaagattaaatagaaatcagacttagaacaaaagctaaaatccacacctgcaaaaaattctccttttccatccacctataccccccttaacctccaactctctgtccctgaccaccaaccccagaagatcctctggcactctgagtccctggcttaaaccaccctcgcaaaatccagtcccatctcctcagacctcaatgagttttaagttttcaagatcatgtgatctggggtaatctttgataaa

SEQ ID NO: 172948 - DNA, 388 bp, Homo sapiens
gttccagatagcaggacaggaaacttattctgtgttgttcatctgctatctccagtatttaaaatagatgctagcacacacaaagcttcaataaacgttatttccttttatgataggattactaggctggtatgttataatcaaaccatggcaagaatatacactaacaggagctaacacatttgataaaatctcatgtagctttgataacaggactgagaaatttcagctggagtagaagacacgggtagtttttttgttttgttttgtttgttttttttgagacacagtctcgctctgtcacccaggctggagtgcagtggcaccatctcggctcactacaacctccgccctccggattcaagcaattctcctgcctcagcctcct

SEQ ID NO: 172949 - DNA, 306 bp, Homo sapiens
ccaaagggccaacctcttagctctatggccggtggtcttgtgtgagttttgtggtttggagtattgtcatcattagcagttctattgtttttaccctttgtcaaacagcagtaattagtgtgttattaataatagtattgattattaataacattgatcaagcaagtctgtgtcagacaaggtgctagaggttgtgtttaatccaatcaaaacccctaagagtgggaaggaagctggtcctaacctggagggacacaaggaagttttcagggcatggaaaatgtctctaccttggcctgggtggtg

SEQ ID NO: 172950 - DNA, 190 bp, Homo sapiens
catgcctatcactgtccccgaaggccttccagtgggatgaaatgtggagatggaaggcagtgacactgatgatcctgaccctgtctaggtccaggctaatgtgtgcgtttgtgtcttggtttttaacaaagaagtttaaaaggtaaaaagaaagttaaaaaatttaaagtagaaaacagcttacagaata

SEQ ID NO: 172951 - DNA, 283 bp, Homo sapiens
gagggaaggggcaggattatgtcagcagtgtgacggatacagtgtgaggtcaggctccttcctgccccaccacgggggcctagaggtcatggggagggtccctggcaggggattcaatcattgcttggccccatgacagagtatattctaaaaatgccttaagtttttttctttcaaagtttcttcctgttttgcataatggccttttgcctttgacatcctgaaaccgcagagctgtcattggtgttgcaggacactgccagcttgaaaaaaatcaacaaca

SEQ ID NO: 172952 - DNA, 389 bp, Homo sapiens
ggggtcttgctctgttgcacaggctggagagtagtggcacgatcacagctcactgtagtctctacctcctgggctcaggtgatcctcctgccttagcctccagagtatctgggaccacaggtgcacaccaccatgcctggataattttttaattttttgtagagactgagtctcgctaaattgcacagcctggacttaaactgctgacctcaagtgatcctcctgccttggcctcccaaagtgctaggattacagtagtgagccactgtgtccagcaccatgcctagttctttttctagtgattttttttttaaaggatagtctttgcaagtctcttactgcttaaaaatggaaccaaattaatttagctctgcttctgcccatgcacc

SEQ ID NO: 172953 - DNA, 678 bp, Homo sapiens
aattttttattgaatgccagacattgagaagtttactttgagatacatataatgtttatttttatgaatatttttgagctttgttctggggtgcaggtaagttccttggaaagagcttgatgcttcaggtcatgtttttacactttttttagggggtgggccctgagcagcattctactcaacaaatccttgagttgtgaaggttttcaccatgattggcggaattcggagttcctctgggccgtgcgtgagtgctggggattgttttctctaatattcgctggtgattctttatctggcatggggtaggagtgcctaccacagtaggaatttgaaatgcaggtatttcttcacttgcctgcactgctcagtagaagacttgaagggaaccctctgcaaacctctggcactctctctctctctgtacagctctgcacaacccccagctcagggagtgctgcttcttcctcctgtctgactccagagctcagtctgtggcagtctttctctgcagtcacttacttgctcattcatttcatctggtcttaaggctttcaatatgatctaaagctgatgattccttaatttctagcttgcctaggcttctatgtacaattgcttacttgatacgtccacttgaatgaatgcctattaggtttcttaatactaacgaaataa

SEQ ID NO: 172954 - DNA, 327 bp, Homo sapiens
gtacctctcttagcttccaattgatgctgtaacaaattactacaaactcagtgactgaaaacacaatttattattttagaatgagaaggccaacattagcctcactgggttcatgtcaagttgtcagcaaggcaggttccttttgaaggctctcgggggaatctgtgtctttccttttttaacttctagaggctgcctgaattccttgactctggccccttcttccttcttcaagtctagcagcatagcattttccagtctcttatctgattctgcttccattgtcataactttgtctctggctctgatcctcctgagcccacctgg

SEQ ID NO: 172955 - DNA, 297 bp, Homo sapiens
gcttacctttattttccaatttgtattagatgaacatgcattacttttgcagtaagggaaaaaagttatttttaatttaagaaaatggtcacacaaagacaagagaagtaatcttctattaataatgagcttatttcttacaaatgacaattctgaatgtttcgagctgataataaatgacaccattttctttctaactaatcttcttgtaacattctcccaacttatttgactataggaatttaaaagcaagttcaactaccatctgggaagttattaattactgtattcctcact

SEQ ID NO: 172956 - DNA, 502 bp, Homo sapiens
cggctcattgcaactttggcctcctgggttcaagcaattctcgtgcctcagcctccctagtagctgggattacaggtgtgcaccgccatgcccacctaattttttgtgtatttttagtggagatggggtttcgccatgtgctggtcttgagctcccgacttcaggtgatcccccagtttggcctcccaaagtgctgggattataggtatgagacaccaccccagccaatgtttctcaaagtattaaagatacatgtttacttaatgtggcatttgctactttttaaaaagaaatatttgtgaggtattttgcaagggagtaggaattaggtgaaggaattacctttggagaaaagacatccacagagctctaattgcttttcactttaaggtgtatctcaatatagactacactttccccctgtgagagagtaggtaaatgcttatacctctttgcctgattacttcagcccttatgaatttctcccttgactaaaattcct

SEQ ID NO: 172957 - DNA, 450 bp, Homo sapiens
ttaggcagagctggtttgtcacgtccaaaatcaagtattttcatagacttaaccagatattttccaacaaagttccatcatagcttcttccccagtaaagcctatagattttctaaccatctgtgaaagtgcttttaaaaatgcataaaaaagaaatgaaatgatgtctcacaagagaaggaagaaacagcaactaatctgccctgggaattatattacctttttcatgagtgtcattagtaaccacaggggctttcctaagagcctttcgagtatctttaattttgaaatctgctgaatatgtctttactgttaatttttagttttcattcttcccttgaaaggaaggaatttgatgtagcttcctcaggcgtgtttttacaaaatcctagagcaaactttctcataaaatttactcaaactttatttaaaaatgcaacagaccaatca

SEQ ID NO: 172958 - DNA, 373 bp, Homo sapiens
cctagacgaccccttacacggtagatttatctacaatgttggtcattaccacggtagatttgcagtgaagaaggagacatatgcatatatgtaagtaaatataatcgaggtatatttagcagacagaatcaatagacttgatgagtgatggactggatgtgtgaggagtctagatcacttccaggttgctgatttgggcaactcagtactaatcaatgaaaaagaagatccacagggaggaacttgtctaaggggtgaggtggggctgaacagctgcgtttgagactggagaagtgtgtgctgggcatgggatgcacaagtggaaatgcctttgggtctgcagctcagacatgggcatgaccagcatagagat

SEQ ID NO: 172959 - DNA, 318 bp, Homo sapiens
agccagtgtatcaagccagatttcccagagagtaatagttaaagtctataaaatagagcaatgacctctgaggtctaagcgttttgacagacttcttttatacagatactctgcacagaaaatatatttatggtactagaaaacaaaacaaataagatggctattataaattttcccacaagttcccataccaggcaggagaatgagactgccatttttgtaaatcctttttttttttttttttttttttttttttttttttttttgggaaacaaatttgtgcctttggccccggggggggggggggggggcccctcc

SEQ ID NO: 172960 - DNA, 229 bp, Homo sapiens
aggcatgtgccaccacacccagctaatttatttatttattttaatggacacaaggtctcaccaagttgctcaggctgatcccaaactcctggcctcaaatgatcctcctgcctcagccttccaaagtgttgggattgtaggcataagccatagcacctggcccaggtgatacctttaaaatatttcttcaaattttttttcatttttatgtgacctcagcgtatttcta

SEQ ID NO: 172961 - DNA, 611 bp, Homo sapiens
ccctcttatgcaagtgtcgattatgtggcaaaaatgacctaaaccaatggttcagcatttttcatggattcccttctttcaggacattgaaagactgttcttgctagctttgcctactcataaatattaccaggacagaagagcgctaaatgtaacattttatacatgtggcactagttaacataaatttagggggaaacttatcttaaatctcaatttcctcagtatcaaaatattgatctattttctttatgggttgaaagggaagcatgcaatttcaaaactgaaagggaatgaggaatcactcagtaagtacttggattctgcctgcatcctcttctataagcaaagaaaaagcagctcatagaggcaatttgtcgttagtaacataccttcttcaggctgtcctcatcgttctgtttcacttagaaccacgtgtcaccctttccctgctctgacccaaaacattagagggctgagtgacgtggactgtgtcccacgctcctgtattaaggagcttccagctgggaacttgaaaaagatctgcaagtgaaaggaagggaggaaccagggtatttcttcccacttttgctctgcctcaggctgctact

SEQ ID NO: 172962 - DNA, 461 bp, Homo sapiens
cccttctctatgatgccaaggtggggagcaatgtgatctttaatacaaaaggatgttaggcagtaaagtgtcttaaaacacagacatggatttcctttcttcttcctttgaaatatgaagacttttcctggttggttttgggggaagatagaaatcatatattcataaaggacacaccccatattcagagttcagaatttggagtttccaataatcatctcatgcacgagagctgactccctctgctggggctgccccacccccagttccagcctttccttctttcatttttatttatttattttcttagagatagatagagtctcactctgttgcccaggctggagtgcagtggtgcaatcatagctcactgcaaccttgaactcctgggctcaagcaatcatcctgccctagcctcctgaatagctaaaaccacagacacagcaccatcacgccaggct

SEQ ID NO: 172963 - DNA, 938 bp, Homo sapiens
tgagggtcagagccctggcacgctctcccaagagctcatggcattgcctgggatggggccccttttgctgagaggctctgcctaaaggggagatggtgacagccacaggcttgcgctccccgccacctacttcctaacccaaggcagcatcaccctttccgacatttgcggcgaagctctttttccctgactttggagttaccccagctacctttcctctgaagaaatgcttgtgaaatgcagcttctcagcaccctgctaaaacgtctccttttgcaagtcctggtctgtccccaacagtaccgtcatgacgatgcagcctccaagcagctttgacatcagagccagcgctcctgtgggcctgggggcagggggtcgtggtgcctacagcgagaaagacacacaagcagcacgcagctcgcgctgtgctctctcggaagaaggagaccttaccttcaggaaaaatagagccacagcagtgccacatgccagggcgagcattctggttgacaggggccaggctgtacttgctgctagggtctggtgacctggggccagagaagcaggctggagccctcccaaaattaggcatctctgtgaggaaaagaaaatgaagctgtcccttccacaaggctacaaggacatctctctccaaaaaccatctttttccacccgggcaaatgttttggtggaaaccctgccaggaagcaacattctctagcagtaaccaaagggccctgggaggcacccgaagtcattcccgggagccaggattccttaaagagagctgcatacttttcagctcagctatcctttaaatattgtttaagggtatatgcagcacacatttttaagtttaaatatttgcaaaggatagaatttgtcttgtatcattatttaagttccttaaatatatgtttgtgcaaacctcgaaaaaa

SEQ ID NO: 172964 - DNA, 546 bp, Homo sapiens
gaaaaataaaaaagattaacaccaactaataataaaatagagcaattacaacaatatactgtggttaaaagttgacatggatatggtctctcccatgcttgctctttctctcactgtctcaaaatatcttattgtactgcaccataggcagttgaaactgcagaaagtgaaagcatggataaggagggactactcttcagtcatgatctctgtctacagcagtttatattcttgtagataacatagggacaaacatagggaaagttaatcaaaattaatcaaagcttagttcaagggtttctttgtccacagagtattctcagacgttaccagctaggtgacttttccttttcccccaacgactgggaaagtctgagaatactttgtgaagaaagagggccttgaactaagttttgagagtagaatttggacagttcaacaggcagctatgggcacccttgatagaatggaaaagtagggacctggacatgaacttaggaaggtggaggattcaatcgttcaaggacaagtcacatgtggcatgtc

SEQ ID NO: 172965 - DNA, 419 bp, Homo sapiens
gagagaataatagtaataataacagcaaacattttgggagcacttaccaggtagcagctgtcatgcttatgttgcaagttctttctgttctcacagcagccttggaagtggagtttactctccccttgaggaagctgaaggtcagaaagggagagacgattgcctgaggtcacacagctgatggacagtagagctgggttatgaactcgaatgcatctgagcatacaggtccttctttgttacttgtgacaccttgatccacccaaaggtgccttaatcgggggattccaggcattgggaaggggctgtgggagatgggaggaggtctggcctgagatcaaggtcatcagacgcctcctagctcctcggggggaacatccctaatccctgaatagcccaaggtctgccacagctgaaaa

SEQ ID NO: 172966 - DNA, 339 bp, Homo sapiens
tatcactaaacacaaatggatttactgagtactatacaaaccccaaagagcacattacaagttgaagagggtacagtatcaattatatcattatctcaccctactctctgggtgaatagtctgaaagcctaaaattacagttgatgttagatttcttggcttcatttgcaaattggagtcattttccccctttttgttgaatgccataagcacatgttttattgttgaagagtaccagtccttatagtttgttatgatgtttttcttctttttgtcctacatgtcaaaggacctttaaaaaaaaatggattgtggaaaattggtgtaacgttgtatttc

SEQ ID NO: 172967 - DNA, 228 bp, Homo sapiens
ttcttggccattagctcctcaaatattgctcctctcccattctgtctattctcttccactgaaatttttgttagacatattttggaccttctctttctatctaccactacctcttaccctctccttcacactcttaatctctttatcattctgtgtgggattctatagaatttgcttagatctttacacttactatctctttagtctgtttttaaaactgtccagtaa

SEQ ID NO: 172968 - DNA, 205 bp, Homo sapiens
gcaggaggatagcttaagcccaggagttggaggctgcagtgagctatgatcaggctacttcacccagcatgagtgaaagaatgagactccatctacaaaattttttaatgtcaaaaccatttttaaatgtcaaatcaaaagagacatggtacaaagtgcttcatgacataaatggttttgaaccttatattgatattagattgca

SEQ ID NO: 172969 - DNA, 852 bp, Homo sapiens
agataagtattgaggcgctgctatgggggccctgctaggaggatttccctggactcaacgggttcctgtccaaggtcctttcattatccttcttcgccgatggagaactgagatccagagagtttaactaactcacccaagatcacatcagctactggggtggaagtaggagctgatcccagaccaacttgctcaggaagaaaggttttctcctgtgttggatatggtagagcctccgtacataccgggttcatctgaattctcagcctcagctgcggtcacgcgcatcaccagcctctcacctcccaaatcacaccaaagaagaataaaataggcatccatcggaaattcccgtctgctttcgacacacatttttgtaaatgttcgttacatcctagtaggggtgagtgtgtgtctaaggcaggcatgttgatggggttggggaagttatggcccaccttaaacgtaataaccttgcgcagttctttgggggctgcgagtacactacaggcatgaatgttcagtcacctgatcttcattccagacgctaggaaaagcaggccggtgtaaggaagaaagcctttcaaatttgtattggctcctatttagtatttgtcagggctccagggctgcactccagtgaacgcctcacttaggacaagattggacactcgacagaccacatatttatctcgctctctgtcggtcagtgcgttccaaagcccaagccgttatggaaaacaggctcggaaaaatgcatatttcccccaacatctcagactaacaagctgccccttcagcaaatatcctattgccccagccacggggatcaccttcatgatgccccctccc

SEQ ID NO: 172970 - DNA, 124 bp, Homo sapiens
gacctggtgatctttccttaaaaaagaataatttagattaaaacattctttagcttcctaacctctgccctttgttttgtacctttcctatctctctctgatcccaaagtgtttaatatactga

SEQ ID NO: 172971 - DNA, 378 bp, Homo sapiens
tggtagatgttttccgctaacctctgcagagcttttggcagctatttgcagacacatgggactgacagaccctctgcttccaaaagtgtctctcctgctcttgtctttcagcaccctcagggtctcccagaggcaccctctctggcagagccttgttctgctccaggtgacctcacgggaaggtggctcttggcacctgtggaaggccatccatctccttgacttcaaggcactgttgtcaacttagggggtggccccaggttgcccctgctcattccctcgaggtctcctctccaaatttgaaatcatctgaaaggccccaccttttgttgcctttttagcttgagaataaacatgtaacagcaccagcagcccata

SEQ ID NO: 172972 - DNA, 288 bp, Homo sapiens
gacttcgcgcgcgcgccccccacatcctcctcgggacacttgtccctggatcctctacccctggccggcccgaggccgccttctcgggaagccccaccagcccccaagggtgttttcccttggctacctgcgctgcgaggagagaagggaattcagagaaggggtacaaggggggcgtccctgggagggggcgcgactggaggagacagaacggggagcgggtgccaaagcgcgggcctttgctccgcctgggcgcagtgggagcaccaactggcagagttggaaact

SEQ ID NO: 172973 - DNA, 413 bp, Homo sapiens
ccacgttgtgcccaaatgagtggaagttgtgtggtgctcagcacacctgggttggccggagggattggggttggggttgggttgaggtcaggaagacatcctagagaaaggctggctttgagccctgattgatgatgaggcagcctgtgattgattcaaccagtacttcgttgtagggggtaatatgggtgaaataacttagtggttaagtctgctgtattaaaaatcagtctataatccccagacaattcaaattcttcagtatcttaggaaactcttctatacccagtggatgtttaataattcagattgtaaatggatttaaaaacatactggctggtagagtaggagacttcagcccactggacacatgtggaagggtgtggtgtcattctgagaaacaagagccaccc

SEQ ID NO: 172974 - DNA, 707 bp, Homo sapiens
gcagtgggcaaggtgaacctgttgggtgggttacaacattgtgaattttactttgttgggtgctggatatttttgtattcctgtaaatcttgagcttcactcaaggatgcagttaagttacttggaaatagtttaagcctttcatctcttgcttttataatttgttaggcaattatagagtggtgctcagcctaagactgattgtttcccactactaaatgctctacccaatgccccatgagttatgattttctttccagtctggtgggaagaacaggcattattcctggacctgtgtgagcaccaggttctattccctctggtactttgtcctgtgaaccctgtcttgatctttatcgactctcatcttgatctccctaactcagggagtgttctagactcaagagcagttcccttttcccgtactggagcctggagactctctcaaggcagtaagcaagactcatcttgtttgtttcctgtatctgcttaatttttaaatttttttgtcattgtttcaggtgggaaggtaagtcagaccctttaactccatcctgcccagaagacttcattatttttctttctccctctccctgccttctttccaccctcttttttaacttattttgaaataatttcatactgacaagaagttacaaaaacagtagagagaggttctgtatacccatcactcagttcccctaatg

SEQ ID NO: 172975 - DNA, 470 bp, Homo sapiens
acactggctgggaacttctgctctcagctgccaagatgagctctcagaaccttaagacctggaccccatctctggactccaggtccctggagagacactcggagcccagaatccacaaggcttagagaaatcagggctgttaggaagtgtttttaaatgcacttgctttaaaatgagtaaaaggctaaggaggacacgaatgccagcctgcagctccagccttgaaattcagagcccaggacagaagcagccacctgcttgcagtagcgttatgtttggcggcagggaggggatctcagaggagagaagtccacttttgagtcctgactctttaaactgaactaatccagtcttgagaggaaggcccctggaacaccttgctgagctcttcttggttctggggctgacaggcaccttagggagacttttaggagactttcaggggtctctgttaggtggttgtgggatgc

SEQ ID NO: 172976 - DNA, 260 bp, Homo sapiens
agggaaagagctccatgtgatatttcagcaagcaacatctcaggccatgtaaattttggagtgaaactgcttttacagttttgatgtgtgctttaaaatttctcttagaaaaatgcgttgttctttagtgggtttttaaaaaagtatttagatgggactgttagggaggtaggtggtagtttgtgtttaatattttagttgggtgatgaggaatagtgtaaggagtatgggggtaattagcacaatgatgtagaaataga

SEQ ID NO: 172977 - DNA, 514 bp, Homo sapiens
gcaccacggtgttctaattttctggccagaagctggacatcaatatattctcctaactcttcagactccgcaaactcccactcaagcccctccatgagtcctcaagcctgtccctttcctaacttgccacagcccagacttgcctccctctgtcccactgttacatggacctgcttacagctccctggccctgccaaatggggtgtgggggtgggacagtgtcacacagttctctctccttggaacattccccaacaaacctggtctttccagctcaccttttcacctgttctcattgcctttcctggaagccagatgaccctccgatcccatgcaccctctcctgctgctgtccctgtcttcactgtaacttgttcatttacacgcctgcccagttcaagtgccaacttgatcttattttgttcccacaaccccacgggttaggaactatcatcgtccctgtttcaaggaggagaaaactgaggcaaggacagggaagtgacatgatcaagac

SEQ ID NO: 172978 - DNA, 499 bp, Homo sapiens
aatgtttggtttaaagccattgcctttgctctatactattaaccctctagatatatgccaaaattgcccaattgttcaaacctaatgtcaggcttgggactctgtggtccgtgtcttcaattgactatttcctcatgatacagtgatctaataactgccgctcaggtcagggaaaaataaagcactcaagatgaaagcttgcattgcaaatctctttactgtttctatacaaatttcactgtaatatactctctttgacagtgtgctaggccagtatttcctctggaagacactgttgtagaaaccaataatgattttcctgagaatgttccctagcctgataaaagaacagaaaataattatgttgacaaatccagccaaattgagatgttttatactttcattttaaacatagttttcttggtcttgctagtagacttacatctgcagaatatacaagtgactaaaaataattctttcaaattgtagatgaaataaa

SEQ ID NO: 172979 - DNA, 525 bp, Homo sapiens
gccctattccgaagtacactaccatgacagcagagttgtcatctgttttatttactattagatccttcaggcctaaaacagtgttcaagaaatatttactgaacgaatacataaagacattaagtaactgaaccagaactaaaacccatgactcctaggtcttatactgcaaccacagtatcagcaaataatctttcataaggggattattctctgattaacaggaaatacaggaatttaatttgtgaacacgctaggtagaagcagaaacccaaatccaaatccaaatttaaacatttaaaattcattctataactaagatctaacagtcattttcttcccagtaagaaataaccaaagcatgctaaaaatcactggactaaattggtgtcaaaactgccacattgccaggcatgggggggtcatacttgtaatcccagcactttgggaggccgaggtgggaaaattgcttgaggccaggagttcgaaaccagcctgggcaacacagtgagacaccatctccac

SEQ ID NO: 172980 - DNA, 293 bp, Homo sapiens
caaggagactaggtcatctcagcatgtcacaagatgctcagctggcctggcatggtggctcactcacgcctgtaatcccagcactttgggaggccaaggagggaggatcgcttgagcttgggagtttgagaccagcctgggcaacatggtgaaaccctgtctctacaaacattataaaagttagccaggcatggtggcatgtgcctgtagtcctagctacttgcggggctgagatggcaggattgctgagccacagaggttgaggctgcagtgagctgtgttcacgccactgc

SEQ ID NO: 172981 - DNA, 196 bp, Homo sapiens
agatttcaattcaacccaagcaaatgcatagtatatatgtgcttatatatatgtaaaaatctgaagcctctgagacaaaagtcttaagacaatgtagcaggtgtcaattttttaccaagataatgatgagaaccctaaatcagaatgttacatacttaaaaccaatttgtttcagtggcatatactcaagtgtcaa

SEQ ID NO: 172982 - DNA, 528 bp, Homo sapiens
aatgagagattttctttggagaaagctttcaagtgccaggcatttctccccatcatgtgcccccctagtggaggaggggagagagggtgctctactgggagcacttcacaaactcttctggaatgtaactcgtgtggcacagagggtgatgccaggctctggggaagtgtcaagtcaggagatgctagctagctggctgtgctgatggcagaatagggagaagtgactgctgtcagaaatggcctattccctcaaggtttgtggaggccaagaatgtggacgtgttcccagcaggccaggatcaagacagcctatagctatcttaagagcaactgggcttttgaagcagtctatgtgggatggactaacagaaaccagagtcaaccaggagctggtggagatggctctcaagagagaatcagcgacaggtctccaaataatctgtaagggactaatttgaaaggtagcttaaatgtcagggtctaaggagaccaatgcccagtttttctaagttccaggcaagtgaga

SEQ ID NO: 172983 - DNA, 350 bp, Homo sapiens
taatgtagatgaatttattaatattttacttaatagtgccatttattttctaagaaatattttcctacctgaaggcataaaagtaatcatctctgttatcttcaaaaacatagtgttgccttttacatggaggtctgtaagttatctgaagttgatttattttgtggaggacagtataatgttcaagtaaggaatcaactttttaaaaatataaatagtcaattatcctagcaccattaaaagtttttgtgggaaatacatacaacaaaatttaccaccttaactatttttaagtatacagtccatggtattaagtacattaatattgttgtgaaaccatcatcaccatt

SEQ ID NO: 172984 - DNA, 220 bp, Homo sapiens
agtagaaagaaactaaaaatcattagtaatcccttatccagagtaggcttgttgacattttggtattatttgctgctagcgtttttttctatttttagcctatttgatcattctatagaattttatgtattttcctctgtgagcagtttcttaggtcattaaaaacaattgtctatggctgcaaaatactcccttttatggatgtttgatatatctccta

SEQ ID NO: 172985 - DNA, 283 bp, Homo sapiens
aggtacccaaggagatacaaaggcaccatggccctttggttagaaagaagagattgtggaggctggatagaggcctccacaggatagacaggagtcaagttgtttttatgaagaaatcctggaggaggcaagctcatcacctaaagaaatgaacattatcctcatatcagagcctggaggctaaacactggttccagtatttctcattaccccattccattcccatctctggaatttagatggaatctcagcctcctctccataacctcagggtctaagggcc

SEQ ID NO: 172986 - DNA, 455 bp, Homo sapiens
agcgggcggatcacttgaggtcaggagttcaagaccagcttggccaacgtggcgaaaccccatctctaacaaaaatacaaaaaattagctgggcgtggttgtgtgtgcctgtagtcccaactactcgggaggctgaggcaggagaattgcttgaaccgaggaggcggaggttgcagtaagccgagatcgcaccactgcactccagcctgggtgacagagcgagactccatcttaaaaaaataaaaaataaaaataaaagtcttcttgatttccagtgtattcctcctgcactttttggcctgtttggaccacagatttgtggctttttatgaaatacacctgtagattaattttcagtttttttatggtagtagacagtcaaaggctagatcactgtgatgagtagggcttccacatttaagaaaaagctgtaatgaagtgaattgaatcttgct

SEQ ID NO: 172987 - DNA, 433 bp, Homo sapiens
tgggagcctagccatcataaatattggactgcccatctcctctttggtttatttctcttccttctgctcccagtgaagctgaattctagtggtcaggcccattgtattcctgcaatagctttgtcttctgctttctggaccctgggtctggtatgagaataaaacgaatctccttgattcattgacattgaacacctggccagaactcccaggctctgttctggaggtggtttctctgctagttctggccacggctgaccttgctgagtaggactctgctggcttccactgggatgccctgcatttgggtaggagaggaaagtttggatatgttaatcagattgacttttctaagcttcttcagacagaggtttggttctgtgttagttgatgtcttgtgaaaaaatagaatgtgactagaaaaatagaatgt

SEQ ID NO: 172988 - DNA, 505 bp, Homo sapiens
tgaggaatgataggggcgtctcaccggccctgcacgctgtgaaagcgttttcgttttgttggggaggagacggaagcctcattttgcaaattcagcttctgaccacgcagtcaagaccaaagcagtccgtggcgtggaagcggggcagaaatgaggttacctggcggcaagggacctggggcgcctcgagctttgagcataggtccgcagggccggggcggttggggaccgggaggctggggtggggctgaagacctcgcgctaagagcgccttactttaaggttagtttctcggatcgctgaacccggggctgaaggaccagattgagcaggaggcccagtgaggacagttactggtgaggcaggggccccgagtgcgaatcctaccgctgcgccctccttagtgacccaaggctgggaggtgagcccagccgggtccaggcctgcgccccgcctagagccctcgggggcgcaataggaagcggcgaggagaggccgcggccgc

SEQ ID NO: 172989 - DNA, 304 bp, Homo sapiens
tgcatcttggggaggcagcgtacacagcattattgtttgtgaggcaccaaccaacaccagaaaggcattttatttgtgcgcagatactatatgtgcagagatggctatctgtgaagataaatgcttcagggactttgagctttagaaaaaaatgggatctggctaaagtttctcctctctgctttctcagttactttaatcttttataaccttacacaggccagatggaaatggaggcttccactcatctaaggtgtagaagtaagtaaaccaccgaaatttcacaaatgaacacacgtggtat

SEQ ID NO: 172990 - DNA, 989 bp, Homo sapiens
ccacatataaaaggctcaaacacaacagaagttatttctggttcacttaacagtataaaatgtgtgttcctggtctgggcagctttccttcacgtacccaggaccttttcttctgcagccttgccttctccagggactcactgttacctgtgtccagactgtggaaggatgatgagtgtggagaagacatatctgcccttcagtcttggcccagaaacaatgctgatacctccactgacattccactggcaagaacagcccgtgcgccacacctggaatgggaaggatggcgaggaaatatcattgctggtgggtagccacctcctagaacttccttctctagatgggctcacaaattccagtgtcagtgagccagtgctgccacagataactattctttgaaataaggaatgccgaagagagccagttctgtgagggagtattgggaattcacaccatatcaagcaagagaaaagagaggaagtatttcaggggtgcaccacctatgcatgtcatgtgatgccaaaagcaacccaccacttgggataaaaaacagtcagctgatcatttgaccttgaatccagaaacaccgatcaaagtaaaacactcacagctcggcagccggcttgccgcttgctcatttttgcatcacacaaatccagccgaggaagcaaaggttcaaatcatggcatctgcttgcagatctctgagaaacaagggctgtggccagaggagtggacgtgcagtcagtcaatatggggtgggcttttctgaacaaagattccgagaagaccatgagcttgtcagacagaaatctaatctgcatatgtgatccatgcagtcctaggtatagattgcatatacatatacaaaatttgtttttattcaatttggaaataattgttgaccatgatttcctacagctcacacaaatgaggtaagaacaaaggtgatcagtagttaataatggactgggactgtttgaaaag

SEQ ID NO: 172991 - DNA, 935 bp, Homo sapiens
ccacatataaaaggctcaaacacaacagaagttatttctggttcacttaacagtataaaatgtgtgttcctggtctgggcagctttccttcacgtacccaggaccttttcttctgcagccttgccttctccagggactcactgttacctgtgtccagactgtggaaggatgatgagtgtggagaagacatatctgcccttcagtcttggcccagaaacaatgctgatacctccactgacattccactggcaagaacagcccgtgcgccacacctggaatgggaaggatggcgaggaaatatcattgctggtgggtagccacctcctagaacttccttctctagatgggctcacaaattccagtgtcagtgagccagtgctgccacagataactattctttgaaataaggaatgccgaagagagccagttctgtgagggagtattgggaattcacaccatatcaagcaagagaaaagagaggaagtatttcaggggtgcaccacctatgcatgtcatgtgatgccaaaagcaacccaccacttgggataaaaaacagtcagctgatcatttgaccttgaatccagaaacaccgatcaaagtaaatccagccgaggaagcaaaggttcaaatcatggcatctgcttgcagatctctgagaaacaagggctgtggccagaggagtggacgtgcagtcagtcaatatggggtgggcttttctgaacaaagattccgagaagaccatgagcttgtcagacagaaatctaatctgcatatgtgatccatgcagtcctaggtatagattgcatatacatatacaaaatttgtttttattcaatttggaaataattgttgaccatgatttcctacagctcacacaaatgaggtaagaacaaaggtgatcagtagttaataatggactgggactgtttgaaaag

SEQ ID NO: 172992 - DNA, 419 bp, Homo sapiens
atagtattttgatggtagaagtttgatggtagaattttgatggtagtattttttgatggtactattgtgaaggtagaattttgatggtagtattttgatgatagtattttgatggtagtattttgatggtagaattttgttgctaatattttgatgaggcagtaaggtgtcaattatactagggggcagcagaaagcgttattgtttagtttagagcagtaatgtccaataaaaatgtcagtcacaaatgaaaaccagatgagaattttcatttttcaagtagccacatcagaaaaataaagtacaggtaaaaataatttaaacagttaattttaactcaatatatcaaaatattatttttcagcatatagcaaatacaaaaatattaataaaatattttacttttttcatttgtaata

SEQ ID NO: 172993 - DNA, 1688 bp, Homo sapiens
  misc_feature (1)..(1): n is a, c, g, or t
ngcacattttggatcctttgggattcccccacgggagtagtcaactgggcagcaggacacagtctagagtctagtaaactggagctgatctaagcaccagaacctgagctgatggcacaactgcccagtgcccagatgccggctccccgaacacagcccgacctcatcctggttcatccagtgctggccctgtctggacgagccccaagcatcctctgctcggtgccctgggacgcctgtgaactcctggccacggctatgtggtggaagacacggattctgtggggggttttccttatctctaggactcgcccacctgctcccatgcaaatcctcattttaactctggatcccagtgaaggagaggtgtgttgtaagaagaggaaacctggacagacaggaagaaaccgagtgaggatgacgacagccacctgcaagccaggaggagaggcctcaggagaaaccagccctgggacaccctaatcacaggcgtccgcccccacaacggtgagagaatgtttctgataaaaccacccagtttttgatactttcttatggcagccccagcaaacaaaaactggctccatggcctcccctgtcctggcccctcagtctctacgacctgggcaccttgcaagcacaagaaagggaccctccagttcggggtgcccacacaccttgctttcttccttgagctctggtcaccaaggaggcaaaggggagagaggcttccaaggggcccatcatttggaaagggaaaaccagcttctgttgccgtggcaactccactgggatgctctgctatttgcacattttgaaattggaggtgggtagtgagaagggaaaaaggaaagaaaaattgagggagatgagagtatccagggcaaaagaaaggagagaaaagcaaatgaagtttaggaaaaatccagcttcggacaggtgaccctgacagtgcttaatgacctcagatgagtcccagggccgcggggacttccccattaagtcatggtggctccagccaatgtcagcccaggtcccccactgtcagagaggaaacagaggctcgaagatgagaagtgccctgcacaaggtcaccttgtgacttggaggattctccaggtaaaagcagccgtattgggggaaggcctctattcttgtaatgaaccaaacgtttgtgccaaccccccaaattcatatgttgaagtcctaactcccaacgtgatggttttatgaggtggggtctttgggaggtaagcaagtcataagtgtagaaccttcataaataggattaatgtccttataaaagggacccccaggacctggatatggtggtgtgaacctgcaatcccagtgctttgggaggctgaggtgggaggatcccttgaggccacaagtttgagaccagcctgggcaacatggcaagaccccatctatacagaaaatacaaaaattagccaggtatggtggtgcacacctgtagtcccagctacttgggaggctgaggtgggaggatggcttgagcccaggagtttgaggctgcagtgagccatgattgcaccactgcactccagcctggaaaacggagtgagagtgtcttaaagaaaaaggggccctagagagttctctggtaccctggtttcagacttctagcctccagaatggtgagaaataaatatgtattttttacg

SEQ ID NO: 172994 - DNA, 342 bp, Homo sapiens
agaagaaggagaaagattggagaaaggttggttgttggagcaatcagaacatacacacatttattaagtttactgtgttatataagtgtggttcatggtgcccccagtaattataatagcaacatcaaagatcgttgactacagattttaataacagagataataatgaaacagtgtgaaatatggcaagaattaccaaaatgtgacacagagacataaagtgagtacatactattgcaaaaatgatgtcaacagacttccttgatgcagggttgccacaaaccttcaatttgtaaaaaatgcagtatctgagaagtataataaaataagatgtgcctgtac

SEQ ID NO: 172995 - DNA, 842 bp, Homo sapiens
tccggctagtcgggtcgcgggttaatcggcgatgttaggccaacagggaagcgcggagccgcagatctggtccgtcgctcgcctgggtgcctggagctgagctgcggcaaggcccggctcctgttcgaccgcccgaggggtgtgcgtgtgcgcgttgcggagggtgcgctcagagggccgcgtcgtggctgcagcggctgctgccgccgcaggggatctaatatcacctacctgtccctgtcactcttgacacttctctgtcagggctgccgcgtgggggggggcgggcagagcgcggtcggcgttagctttccttattggaggggttcttgggggagggagggagagaagaagggggtctttgcccactcttgtttcgctttggagcttggaagcctgctccctaaagacgctctgagtggtgcccttctgcccacatcccatgtcttcgtttgcccgctgactttccgtctccggactttttcgcttgagccttccggaggagacgggggcagcttggcttgagaactcggcgggggttgcgtcccctggctctccccgcagcggggaaactccgcgcctagagcgcgaccggagcgggcagcggcggctacgggggctcggcggggcagtagccaaggactagtagagcgtcgcgctccctcgtccatgaactgcatgaaaggcccgcttcacttggagcaccgagcagcggggaccaagctgtcggcgtctcctcatcttcctgtcaccatccccagccgttagccatggcttcggttctggctcccggtcagccccggtcgctggactcctccaagcacaggctggaggtgcacacc

SEQ ID NO: 172996 - DNA, 270 bp, Homo sapiens
gcctcggcagtggagagctgggctagaactcagccggcctggctctacatctcaggctctgaggcagctgactgcactgggtaacctttgaggtgccaaccgtcaaggcgtccttagcctgagctttccttctcccataaagcctctgttggtccagactcaaggtttccacttgatgagccatgagctgctgggtgacttagccctgagcaggccacccaggccatttcgggcccacaggatccctggtgacagccccgtttccattca

SEQ ID NO: 172997 - DNA, 177 bp, Homo sapiens
taataaagggggcagtagagagagattactttggtgtggggagtagaaaggctcaatcatggaagtgacattttgagcttactcttaaggaattaatgttttgtgaaacagagaaaagggggcattttagatggaaaggaagcccaaaggcatgtgcttggagcatagtacttgggt

SEQ ID NO: 172998 - DNA, 589 bp, Homo sapiens
gtgttggagttgcaactgccagatggtattatgagtaagggaaagtggtccagctctacccagcttgcagagtgatttccaactcagtacttcattccacaaacattcactcatgaaagggtgcctgccttgtgccaggcactgggctgagggcccagaaaggaggacacagcccctgctcccaagtttactgagggaggcagacagataaagtcaacaattatgacagagcccgagggctttgatggaggcctcagagagaaaagacgccacagggaggggcccttggccctctatctgctcagagcctgcttaaaagtcatgcacctaaggtgcagaaacacagttaagttctccttcatcttacctcaaactcatggtcttccactgctcaggcagactacctctactatggttccgtagacaaagctttgaagattagagcagcagcgaactaaccttgatctcatcagctttgcattagaacccactctctgactggattaggggctaggttggggtggctgtaacctgaagtatctagaaaatatgatgggctagagaatttcacctttggttgtgtgctgga

SEQ ID NO: 172999 - DNA, 302 bp, Homo sapiens
ctggagtgcagtgatgcgatcacagctcactgcagcctcaacttcctgggctcaggtgatcctcccacctccgcttctggagtagctgggaccacagttacactgcaccactcccagctaatttttaagatttattttttgtagtgaggggctctcagtatattgcccaggctggtcgcgaactcctgggctcaagtgatccacccaacgtcgacctcccaaagtgctgggattctatgcctaggtcaaaataaagcatttttaaaaaagtctttgaactaaaatttctagggtaatttggt

SEQ ID NO: 173000 - DNA, 331 bp, Homo sapiens
agtgggtgcctatctggggtgtcatagaacaggaacacaaatggaattgtgttacgtctgtgtggagaatgaagaaggagtcaagactagacatagggagactaactggtggtttcaataatccaggtaaaaagagagggacctagactaagagtagcagtagagatgaagattaagtggacagattccaaaaattagtaagatcaattggacttggtcagtgactggatttagggacgtatgtagaagagacaggggttttagtttaggaccttccatggctccacatggagggcctggagccaggccctgccatgtggagccatggaag

SEQ ID NO: 173001 - DNA, 133 bp, Homo sapiens
acttcctaatatttggaagtaaaataatttctttccaaaatttgatgtggctgtgaaactggctaagacagcttgttcattttgctttagttgacagcattaaaagttacagaattgcaggctaggtgcggtg

SEQ ID NO: 173002 - DNA, 162 bp, Homo sapiens
ttacacatgccttcctctaactcctataccataagatagattccaaagccaactcgcctgccatttttcaatagccacattgcatccaagtcctaaaagaaatttttcctccagcagatctgtagtcaattttacatttcagttttaggttacctcactgat

SEQ ID NO: 173003 - DNA, 304 bp, Homo sapiens
cttcccacaccaacctcccaaagtgctgggattataggcatgagccacctcacccaccctattattattattagtcctcccaacaactcttaagaaaaacatatcatattcttatccccattttttatacaaaaagaaaattaaatgtagatttgggaatttatagccagcttttaattgatggctagcatttgaattcaagtctaattgtagagccctttcttatccaggaagactatgtaacaggagaaaggaggaccatgtagaactctgaggaataccaatgtttaagaggtgggcagga

SEQ ID NO: 173004 - DNA, 600 bp, Homo sapiens
gaatgctataaacaggactatactaaggtaaatgctgccgtaccctaaaaaggctgagccatctctactgatagttagattataaactgactccatggtggaagaggggtactgctaatgtttgcgatgtggtattctcatatgcactagacactctttagacctttggaaatgtattcttgaaatgcttggggctgaaaagataatcccagtttggagctacaggagaaagtgcaagctacagtttctgaaaaagatatccagtctttccccagacattgaagtgagatgccttgattgaggtgacacagaaaaaaaaacaactaaaggagagaagcagcatttatatactttttttctctgaaagaaaaagtagaagtaatttatcagaattgttattttgcgagatcaagagattgacttcattttggagaaggatttaaacttaaatttaataaggtcagaaacattgtgattttatattgtttacattgtattatttgagctattatatcatctctgttcttggtataatcttgtcaggtgagtttggttgggcaagtaatcctgttcaacataatccaacaaaagaaacaaagc

SEQ ID NO: 173005 - DNA, 479 bp, Homo sapiens
cctttcagagctggaaaggtgctggcgaagctcgcctggtgtgccaaaatgacctggaattggaggagtctgcgattgtggaataatgaacttcgaatgatgtgattctggatgaggacttggatcaagagaatcgcaaattaattgtgccagagaagctttcattcattcaacaaatatttattaagcatgttttacactccaggaactttacaagaaacttgggctacttggtgactttactcaccaggagtgggttcagactcctgatggatgagctccaggtcctccctaacaagactgcagacttcctgagggcacagcccacccctcatgctttgagtttctcatataacccatcatagcaagtagaagatgcttcagaacatttgtccctatgagatagagtcatattctatttagcttgggacatggcaggtactcagttgttaaataaaaaatagttattgagtaattta

SEQ ID NO: 173006 - DNA, 518 bp, Homo sapiens
gttaattcttggaaatgtctttctattgtttctacaataattttcttcccctctagcttccctttttcttctggatctcgttaggtattgaacctcttgagttgattttctaatttttgtcatctccctctctcattttttgtattttgtgtttaattttctggtatctaattcaccttgattttctatctttctggtgatattttcatatgctgtcactcttacagttgtcaaacgccttctcctgaccttgcccttgtgttctgtttactctgcccacctcttcgattctccccattgctacctggtgttttggtttctttttcttttcttttcttttttttttttttgagacagagtctcgctctgtagccaggctggagtgctgtggcgcgatctcagctcactgcaatctccacctcccgggttcagtagctgggactacaggcacatgccaccacacccagctaaattttgtatttttagtagagactaaacatacatttcaccatgttggc

SEQ ID NO: 173007 - DNA, 196 bp, Homo sapiens
  misc_feature (13)..(13): n is a, c, g, or t
cgtccactctgancactggggactctgaagctggggaggactctgaactgggctgggtggtgaagaggttgaatggctgctactacacatggtcccagcagagctccatcgaggaacctctgccttttgctttcagctcttataccataaatgaatgcccttttcttggtcgttttggtttttttttttttttttt

SEQ ID NO: 173008 - DNA, 363 bp, Homo sapiens
taaataaatattaatagtgaacagcagagggcgtcgctgatcagaatttggagttaagattgaagaaattatacagtccacctcaaagctccatttcaggcaatggacagtaagcagaactggtcacatttatcagtcccaaatttgaaaaaatgagaattttcttggacagttaagagaatttaaattttctgatttccatctataagcagtttatataaactgaagatatactttatgtacagccaccctggctaagcagcccccatactctctcttgccactatagactatactgttgtttagactttcttcatcttactcttggtccaagtatctctgtttaattttcctctccaagta

SEQ ID NO: 173009 - DNA, 355 bp, Homo sapiens
ccaggatggtctcaaactcctgacctcaagtgatccacctgtgttggcctcccaaagtgttgggattacaggcgtgagccactgtgcctggcctgatacgaattaagtgtaaagattgatcatggttgggaagatgagaccttaaatgggaaaaggacaaagactgtttgtttgcatgtgttcagaatggtgtatggtcaagtactagttgactgtctcctatcttggccaagtctcacatcagctaatatcttaacttgagacatgtcattggtagataattatttctattcattgatataataaaaatttgctatcttttaagaaaatgaaccagcagaattcttacctcagt

SEQ ID NO: 173010 - DNA, 252 bp, Homo sapiens
agaaaaaccgggaatatgaatgcaatcaccttatgattcatagtatttgtacttccaggttttaatatatcagggttttgttgtggctgttcttaaaatgtaaagctggaagccatcccagagggatgatcctgtttgttattcaagttgattggacaacccttatgttgattttcgaaagtgatgcaagaatttaaaactggccatagctttcagggatctcagtgctaataaactaaaacatgacttgta

SEQ ID NO: 173011 - DNA, 375 bp, Homo sapiens
attccttcagctggcaaccgtccatttgtaggggcagaggcggcagggacatagcctcctgcttggagctgggaagcgggggcggtgagggggacacagaggaagactacccagctccacccaggcctgcctgtgggggcacttcctgcgggatgcggggactctgatgagacccaaaggaggaatgagaaatgtgggcagagctggagccggccagggatgggatgatcccacaggtgtgagagcaagggagtgccctgtccgcacctctgctttctggtgtccccaccatacctttctgttacgtcccttctctccttctgagaggctgtcccatcccagctgcacaccattctcattgaagtgaaaaggctg

SEQ ID NO: 173012 - DNA, 352 bp, Homo sapiens
gaggtgagattctgactatcacactgattcacatgcctggggctagtcactgctgacttttgctctgcatttcctatttgtaagagaagattaggtggggaatatgccaacagaaggaaattactttgaaaaagcaaagttgaggaagaaaaggcatctgaaggattttaataatagagataacctcatgaggtctgtcctatttattaattagaaaatggcaatggtgtagcagcttcagaagaaggtaaaaatgggcggaaagagggaacaaaggagagaatataaataagagccgggaaacatggccacagcccttaaaaaggtgatcctttcatcaagacatgtgcac

SEQ ID NO: 173013 - DNA, 360 bp, Homo sapiens
tttgagttcatgagtgtagacagttctttaaggacaatatacttaacgctcatgactgagaatgatgtaattttcatccacagtcatggaaaagtgatagacaagaaatagtagcttccaaattttacataccaggtggagttttcaaattttatgtaaccattatatattctaaaggttataaaaattatacacatatggcatttagaaatgtcagaccaaggttttaaaggccctttgaacatttctagattacataagctgattatcattttgttcacgcttatacataaagaccaagaaatactaaaactctcaaggagaatatttcttgcttgataaaaatcagccaattctagg

SEQ ID NO: 173014 - DNA, 181 bp, Homo sapiens
cctcaggtgatctgcccgcctcggcctcccaaagtgctgggattacaggcgtgagccatggcacctggcatgtatttttctgttgttatttttgtggtttcctgaagaagacatgagaagattcagagctaaactttgttcccactgggaccagataatgaaatgctttttttttttttga

SEQ ID NO: 173015 - DNA, 288 bp, Homo sapiens
ccgtgaagatcggcgacttcgctctgaagatcggcgacttgggctccatcaagagtatggacactcggcgtgtgcacacgccgaaggtccagactttatcagtgtgttagagagaagtcaggccctgttctcttctctggggtgtatgttttgtgatgatggcgatgatgacagtggtgatgatgatggtgataatggtgatgatgatgagtatgatggtgataatgatgatgatgacattggggatgatgatgatagtactggtgatggtgatgacgtggtgcatgc

SEQ ID NO: 173016 - DNA, 259 bp, Homo sapiens
gccccacctccagcactggggagtacaattcatcataacatttgggcagggacaaatatccaaactttatcagtgtgttagagagaagtcaggccctgttctcttctctggggtgtatgttttgtgatgatggcgatgatgacagtggtgatgatgatggtgataatggtgatgatgatgagtatgatggtgataatgatgatgatgacattggggatgatgatgatagtactggtgatggtgatgacgtggtgcatgc

SEQ ID NO: 173017 - DNA, 552 bp, Homo sapiens
gcgtttgacagggagaacaggtacagtatatcttgggtgtgtttaggcacagtggagatagggagggctaatagatgaatgggtaagattaccttttagaatagaacaaagaaccaggaaccaaaaccctttgaagaggaactatttgttcttaacaacggcagcacaagtgggatccatgcaatgccatcccactttcccagtagagagtaaactccagattctaaacaatttgggggtcaagcagcattgcaactgcaagagaaaattctaaggagggcttagtactagacctcataacctctgccaagagcatcccctttggggaggttgaggtctgcaggatcccccagagcatcctcctgtgggctccaatcttagagtgtcagatgtctctgaccttaggtgggcactggcgccactttccatgtgttccctccagagcctgctatgagctttcctttggtacctgggtgtaatccctgacttttagcatccttgtaatttgataaggccacgctttcccatgcttcctgttccgtgaactttaat

SEQ ID NO: 173018 - DNA, 153 bp, Homo sapiens
aaaaaaaaaaacacacacacacacacacaaaccgcttattaggttaaacaaccactgtcaatgaaacttttgcatgtgcctcatactgagtaatgtgttttgcattgctaccaaggatagataacgtaaaatagtaatttacaaaacaatata

SEQ ID NO: 173019 - DNA, 220 bp, Homo sapiens
atggccggggtggctccagagttagttcctaagatacaaatctcgtcaagcccctcctctacttagaaaccctttgctggctcctcattgcccttttattaatttaaaaatatttaataactcattaacaatcacaagcctattacttgctaacataaatatagatttttgaaataaaaaataaccatgttttcccaaacagaattactgagaagagtgg

SEQ ID NO: 173020 - DNA, 130 bp, Homo sapiens
aatgcaaatcttacctcacaagctctaacctaaatcacagagacatgcatgtttcatgcattaacactcggaaaaacaccttggcccgggaatggaccgtcacaggcttgcggatgatcagcccatcttt

SEQ ID NO: 173021 - DNA, 259 bp, Homo sapiens
agccatgtgtgtctattcttgatggatgtattcctaagataggaagcatttctaggttaggtggttcattgcatcaacatcacctttttttattatctcagtcctcattccaagtctcagtgatgatcccgtgctgctctcagcctgctgaggtgtggatgatttcttcctaaactacgtcgctgctgctgttgctcttgactctgagctcaggtctttgttacaaagaattcgtcgttcagttactaaacttccttgt

SEQ ID NO: 173022 - DNA, 343 bp, Homo sapiens
caaccatgtgctttctggccatacttcacacttacttcccaactgggacagatagcatttcttaagtctaattccaaacttctgggataatctgattgcccttcattgagtcagaagccagtggatagggacatggaagatgctatagctgggctccacccttgcaggtgagaggagcagtttcaggaaagtctgccaggcatgagctgagaccttaagagatgtcagctagaattagccactgtcagtatatctgcttctgggtcccactcttcatcctgcttttcaaggttttcaaatatacactcctactcagtctcatgaaaattattatttttaaaat

SEQ ID NO: 173023 - DNA, 276 bp, Homo sapiens
tatagacagggtctcactatgctgcccaacctcaagcaattctcccaccttggccctgcaaaatactgggggttataggtgtgagctacggcacatagtctaaagtgatagtttttggtttcattttgttgagaaagggtctcactttgtcatccaggctgagtagtggcatgatcatggctcactacaacctcagcctctcaagtagctggaactacagcagcatgccaccacgcctggctaaattttattttttgtagagacagggactcgcta

SEQ ID NO: 173024 - DNA, 398 bp, Homo sapiens
tctcttcctctacagcaatgcttatgttaggcttttcgaacaagccttcctcatgcggatccctgtgtgtgctccggggacgggacgcgcaggcccttcggggttgtgtaggtgtcatctgaggatccagttgctcttccctgcctgaggagcctgagcttttatcagagctcaccgccctctcccacacagtctctttgatcagtatttacacaatgttaatgagaatggaaaaactccatgcttctttcttggtgtgaaagatccagcaaatgagatttctaaaacttgagttttaaaagttttcctgcagtttaggaatatcgtctactttctaataatttcaagtgaattttgagtttaggagggcatgtgctttttctaagttggaaaaattt

SEQ ID NO: 173025 - DNA, 311 bp, Homo sapiens
agaaataacatctctgctggagcactgtccctgttgcttcccccatcaccatctacgcagaccctcccctggccacacagcttctgaagtgcagccacacctaccataggtgacaggcgggttctgtcggggcacagcgccgtgagccggtgcacgctgagattaatacacagtggtgcaggtgtctgggggcttagggagatgctcatttggccatcctgcctcgctgaggtcccagcagctccgcctggccctcaggggcactcctggtggctttctagatgctcactgtccctccccttcctgcccct

SEQ ID NO: 173026 - DNA, 581 bp, Homo sapiens
tcctatttgccttaagaagcctggcagagagtattgtttaacttaacaaaacatagtcacagttttatttttcaattaaattttaaagccgggaagaaaaatatctctcagatgtttagagaaagaatagctaacaagttacaaagtaaattaaaatataaaagtataatcccacataaaattctgaacaaatttaagggcatattggcatcctggaatctctgtaacaaaataagtagatttgcaatcacctaatattaacaacagaaataaaattcaaccacctcactcacatgaaatttctcaattctttaatatctttacaggtttcacgggtccacagctttggttaggcagaaaaaacagcactgtgtctgatcaggcttctgactctaatattaacagaagggagaggcaacagcaaaaattgagctacaatacacaattctgaaatgctgccacggaaaaaagacttagcactttttcctaccatttccattttctttgcaacaaatctgtcctttaagactaagatgttaagatatgacttatccttgctgaagccatctccttataaatgc

SEQ ID NO: 173027 - DNA, 545 bp, Homo sapiens
tataatccaaattaaagagggtttcagacatcagggttaactttcctactctgatgtcactgatcgtgggttgcattgcagctgcagaggattccctccaccatcctgggacatggacaaggtaacaccctgatgttaacgtccaacactaccttcagaatcccagctatattactccacctcttcctacagccttccagcccacaaataaagactcttccccatggaggctacagcctgcatgacacattgctatgggaaccaactccaaaattagcaaacactaagaacaggagaactccaaaacagagagaccagagtggcaagcataacgttaggaggcaagccgagaacacactgttgagggctcagagccttactgacaagaaaaccagagtctaagaaattcatcattttcattcttatctcctgcctaagatttttttaagtctcttaagcctaggaccattggctctctctctggaattctggaaagggcacaaatttgtccttaatagaataaactgtgtgttggggataaatca

SEQ ID NO: 173028 - DNA, 334 bp, Homo sapiens
tatcactctctaagctcagccaaataagatctccatgagtacagctgtgaacattgtatgggacactccaatagcaacactagacagggatcccaacgagagaccagagtggcaagcataacgttaggaggcaagccgagaacacactgttgagggctcagagccttactgacaagaaaaccagagtctaagaaattcatcattttcattcttatctcctgcctaagatttttttaagtctcttaagcctaggaccattggctctctctctggaattctggaaagggcacaaatttgtccttaatagaataaactgtgtgttggggataaatca

SEQ ID NO: 173029 - DNA, 500 bp, Homo sapiens
ggattatctttttaattctcttcggtgtatacctagaagtggaattgctgtgtcatatggtaactcttatgtttgtcattttgaggaactgccaaatcatttttcaaagcagttgaatcactttacgttcccaccagcaatgtatggcactttcagtttctccctattcttgccatacttgttattttctgggtttttttttgcctttttttttttttcttaaatggtagccatcctagtgggtgtgaactggtgtcttgtgatttttagtttgcatttccctgatggctaatgatattgagcattttttttgagctgttgaccatttgcatatcgtcttttgaaaaaatgcctcttcaaaccctttgccctgtttttattttttattttcactttttgagacagtggcaccatcccagctcactgcagtgtcgacctcctgtgctcaagcaatttttccccctcagcctgctgagtagctgggaacacaggcatgcaac

SEQ ID NO: 173030 - DNA, 658 bp, Homo sapiens
gaatgcaagctcctgcttcccagaggacttgtctaagtgtaaagtgtctgttatttaattccttgccttttgtggtgttttctttgtgtgtcctagcagatgcttctgtctttaggtaccatgtcacagttggctaagatgtacttgtctctgtgtattctaaccctggtatatatgccagaaacatagcccttttctctgacagaccatgagcacatacggtaggctccaaacactgaaacattacacttgtaaaggtctgagagggtagtaatgggtttcactattttcaatatttcatagactttataaataatcacatatttattggtgactagttaactacaacatcaagcctctgtaaacttagctagaattatatcaagggtgacaatattagttaccttattttgaacataagtgttagcagatatatgtctcataaattaaaaatgagcaactattgaataatgaatagagtaatgctgacagatttgttgaaaacatgagatctatcaataaaaatgatgaaagtagtcctgataggtggtagaaagttttgagttaatttgtggcacaaagacacaattattcatttggtctatggaccttatttaagtgctacatttcatagtaagaagggcttttaaaagcaaag

SEQ ID NO: 173031 - DNA, 210 bp, Homo sapiens
ataaataaattatgatatatttacatacaaataaaatagcaaaaatgaatgacattgatatgcatagccacatggatgaatttttgaaaatattatcaaggaaaaagagcaattcaacaatatgtacagattgattccattacaaaagtttataaatttgtaaaaactgtgtgtattgtttaaggttatatatgtgtatgtgtgtgtgta

SEQ ID NO: 173032 - DNA, 462 bp, Homo sapiens
tataattattttttgtaaaagggtggaaagagaaattgcctcagtttgttcattcatctgaattacattaaattacttgactgtgtaagtcagaagttctggaatatgaaacaaaacgtattaattggccaagtcccagtctgtgctttatacaattagcccaatgttacaaaaacaagtatcccttgttatccaaatctattcagtttctgagtttggaaagtgaaaggtcaaacacagagtggtaactgagtttcctttggtcagagaggctcaatatctgacaagctagcaattacttctttcttcaaagcaaaataagcatcaatataacatagctttctgcttttaccactaatcaatagcccgagtcacaggattattggcttgtatatttaagtgtgcacctgtactattaggcatttaaggcaaaatttgacactaaataaactattacatcta

SEQ ID NO: 173033 - DNA, 548 bp, Homo sapiens
tggatttgcaatcaaggttaatcaaacttagtatctggtttctctttatctgattatagaatcttacatggcaaaggagagctcttttgaaatccactcctccctcccaatttgacagaggtcaaccagttctagaaggtttccgggctcaccccaagtcctcagtgagggagacctgtgagacgtaggccatcgaggatggtgaaccaattttcatggtcttagtttcacaacataccatggccaatggtgggtcatctcttaatttaaaactagtgacacctcccagttgggatcccatttctaccttttgcccagccccccatggtctattctcatcactgcagtcaaagcgatccctaaaaaaaaaaaaaaaaaaaaaaaatctctggtcaggaatgctgccgacgagcatcccggcttaccttggggttagcttggccggtcgtgcctataatataaatctcccaaaatcagttctaagttgggtaacatctctgacatgtgcggtggatcccggcttacatctgaaccattcctccgtcgta

SEQ ID NO: 173034 - DNA, 568 bp, Homo sapiens
tgtcttttcctgggttatttatttgtagaaaccactctggtttcctactacttcaaatacacctacaggaagccactggcaggtggggttctaacgcataggcctgttttactgccctgggtgccaccggctcattgtgatgggatcagttacctggatccctgcacgcaggtgaaatttacagccctgggctatagaacaaaaggccctgttctgtggaagaaaatgggttctgataaagctagctgggaggagaggccagaaacagggagtcctaggttctagtcctgggagaccttggcagaccttccctgggcctcagtattctctctctaaagtgagacccaggaaaatgcatattttagtgcttacccagggccagggagctgtgacagagatatgtaaggatgacagttcctgactgcataatctcagcttgcaatcctgagctccgggacccctaactcaccactaggggaccccaggattccacataatcgctttcccctccaacccaacattttgctatgaaaattttcaaacacacagccaagttgaaagaatctca

SEQ ID NO: 173035 - DNA, 261 bp, Homo sapiens
agaacccccttgatatttttctctgccctttggcccttggggaggggggcatgctgagataggcaatctgatattagccattggcctctgctggggctggctataatcagatgcttgtgccacccccaatccactggtgaccaagtcctgcccacatcattgagctaatgtctcccatgctgtctctgtcctccctccatgatggtggctccttgctaatctctcacctgaactggaagcaaaccacctacttagatctgg

SEQ ID NO: 173036 - DNA, 511 bp, Homo sapiens
tttcaagaaaaatatcctttaaatattggataaatatgtaaaaatatgtatataaggatgttcattacagtattatttatagcaacaaaaaatagaaataacttcgatgttcaacaataggggattgactcaacaataggtgattgaccaaattgtaaaaactatacaatggaatcatgaatagtcatgacaaattatgttgtagaatatctcccccagctaaaaattagttcaattcccagctctatgaaggctttctgtctgccctggcctaacaggacctcttcctccttgaagcttattcatgcttattgtctacagcatcctctggcccccacagtggaagaacaagtgcagctcacacccggctggctctgagctgtgctaatggaaggggagcggagcagagcaatcctgaacaatagataattcattcctttgtaaatgcatcagataatttattttgcagtggattcaccttcctaattagctttccccatgttagtattaa

SEQ ID NO: 173037 - DNA, 637 bp, Homo sapiens
ggcaatgtccccagccgactgagtgacaagggtcctcctcagaggctaaagccagcatctctccagttcagttgccctgactgtagatgggtgctgtgtcctggggcctgggatgccctgagttctcgagttaaccgctgtcagtcatgtgccctccagggcagacctcaagaaggaggcagttccagggatactgcttattcagctcaccaggctcgcaagggtctcttccctacttccgatccaccttcagttgatcaccctggccttgcctggagagggaatttgaaattctgtgccctaatcctgactgcttctctaggatttctttggacctttcgttgagatgctgatattgaagaaaaggtcgtgtgaagtccatgctcaccctgttaagaagtgtttgtgggtcccctgctaaagcagaactgaaaccctgtttctgtcattctgtcagctcgtggcctcaactgggcacagcgcttgggttccctcttgtaccctccctcttggtgtaagggatggccctgaagaaggtgaagagcaatctatgtgatgatctatttcatttattagcccgagtgaaattggaggcctcttttcttttacagagtcattgtcgagcaaggtcagtcca

SEQ ID NO: 173038 - DNA, 489 bp, Homo sapiens
atatggcatttgcgtaggtagatcaacagtaaacttctacatacataggcactgagtaggtgtttataaaatgctcactgaatcaatttgtcaggacaaaactaattctggaaagtgaaatacatggagtcatcttcctgttttccagctgtagcctgtcagcaccactacctccactgtccatggggatgccaactctgcccttacttttggccataatatctacagaggcctgttactactgtgacctgggcttcagatgactggggtcctgttgctcctccattcttgactcctggctaagcctttcccagccatccacatgcaaaccttagttgaaaaggcctagtcagggatcagcaaatgacagcccatgggccaaaactgaccagctgcctgtttttataaagttttattggaacacatccatgctcattcacttatgtattatttaaggctgggcaacaagagcaaaacgccatctcatta

SEQ ID NO: 173039 - DNA, 406 bp, Homo sapiens
gtaacacaataatagtgggagattcgatactccactcaaagcactagacaggtcatcaagacagaatatcaacaacaacaaaaaatgaacttaaactataccctagaacaaatggacttatcagatatttacagaacattttactcaacaactgcagtatatacattcttttcatcagaacatggaaccatctccaagataggacatataataggccacaaaacaagtctcaataaatttgagaaaatcaaaattatatcaagtactccctcagactagagtggaataaaattggaaattaactccaaaaggaaccctcaaaaccatgcaaatacatggaaattaagtaacctgctcttgaatgatcattgggtcaacaatgaaatcaagatgaaaattaataaat

SEQ ID NO: 173040 - DNA, 637 bp, Homo sapiens
tggataaacaatgcctcacaggagagaaataaagcattcaaaggaaccctctgtcaaaccatgtccaggattctagaactcaaattcttcgtgttgactaagatggcaatttgttacttttaggtcattctaaatgaccacccgggacaaaagtgaagcaatgctgagaaatctagtataaaactacataaagaaaggtgcatcctgcaaaaaccctaagaaaatcaaacaaactcctgctgaggcaggagtctagggtttctcagaagaaattcagcaaagataacaacattgctggaatcacctaattcaaatacagaaattagtacttcaatgactacaattctttgaatgagaagttcattgaggctgctccattccattacggatggccaagtaaacacttatatgattcactttcattccctgtttagcaaatctaggtaatattattaacacccccaacaaataaactaagttttcaactggcatagctttaagtgccccttatacttctaaaggtaggggtacctacttttgggggctcaactcacccccaaattccttctttagagaggtaaggaacaaagattaacaaggctgaagagtataaacaggtcggaaagcctccaaaaag

SEQ ID NO: 173041 - DNA, 270 bp, Homo sapiens
agggagaggaagggagttccaggctgagaggagtgagtgagggaaagtaggagtgaagagggtacccagaaactggatgatccagcagctttagttcagtggggtttgaggcacttgggaactcaccaaggcgaacctgccacaagctacccagggtctccacctgccaaccttcagcagcggctctaggctgctgatgccagctcctcgatgtgtgagctcctctggccttctcccttggtgagctcacacattcatcatcatttacag

SEQ ID NO: 173042 - DNA, 375 bp, Homo sapiens
ccatgttggtcaggctggtcttgaattcctgaccttgtgatctgcccgcctcagcctcccaaattaaatgctttttacatgatcctattttgaaatatttatgtatgacttgactgagatggctgacctcatatgtcatttctgagactaaacattacttccttacttggtatgatgtttagtttgttttgatacaaatacctcaaatctggaaaggatattgaggatattgacatcctgtatccaaaaagtttattcctgaataagtgcgtctgactactttataatgatttccaaggactgaaagtttatgagctctcttagtgacctcttccagtgtctgatcaccccgtcagttcaagtacagaatggtat

SEQ ID NO: 173043 - DNA, 474 bp, Homo sapiens
ggtcacctcgcgccgtataagagaacaaggatggtccaggatcagtccaggattacatattgcatttggttgctgtgtatcttcagatttctttaacttgaaatagtttctcaactttccatcatctttcatgaccttaacattttttttatgagtgcagcccatttattttgtagaataaatgtagaatattttgtccttctgtttgtggttacctgaggtttcttcctgattagtgttaggtcttacaattttggcaggaatcctgcagaagtgatactgtgtccttggtatattagtgtgtcatataaggatacatatgacattactggtgatgctaattttcatctctggttcctttccctttgtaattactgagtatcctatggggaggtactggagacaatgtaaatatcctatttttcatcaaattttcaccaactagttttagcatccattgttaattcttgactg

SEQ ID NO: 173044 - DNA, 280 bp, Homo sapiens
cgatatgagtaggagcataacttaacattttttttatgagtgcagcccatttattttgtagaataaatgtagaatattttgtccttctgtttgtggttacctgaggtttcttcctgattagtgttaggtcttacaattttggcaggaatcctgcagaagtgatactgtgtccttggtatatgtatttgtttttgtaccagtaccatgctgttttggttactgtagcctagcagtatagcttgaagtcaagtaatgtgatacctccaactcatatcaaaca

SEQ ID NO: 173045 - DNA, 558 bp, Homo sapiens
tgaacatactgcttccctcacgggctggtcaccacggcaggcacaggacagcagagcatgtcacaggccctgatgtccaggaaagcaaagtctttgcagtggaggcaggcacaccaacactcgcaacacagtgtggcaaagaaaagcacagggtgggagtgaggggatggggactacccagagaaggggatcccagaagaatttctgaaagaggtgacttctgtgcttcattgtaaaataaagcagggaggtagaagggagggttttggatacaaaggaaaggacaagggccaccttttcttctcactacagcatcagcgtcaatcgagcatcaagcagtagtcgagcagaccgtgcagattcagccactggacgaatccagtgaaactggtctaggatgcatggttactatcactgccccaggactcagggatgcccactctcaagtagatagccattcgctcacctgttgtggcctgttgggagatggaacagcctgtctgctctgctcaagccttcgcctagccccatgcagtacagaaaagcccttctctctgg

SEQ ID NO: 173046 - DNA, 167 bp, Homo sapiens
tcctggccaccccacatggcacctggcactcagagtcggcctcctggcctccccacatggcacccggcattcacagtcggccctcctggcctcccctcctcgcctccccacatggcgcccgacactcacagtcggccctcctggcatccccactggcgcggctagga

SEQ ID NO: 173047 - DNA, 207 bp, Homo sapiens
ccatagttttagaagtttcaatagcgacgagagcgagagagggaacgggagcgagatagataaatacaagatagctttttaaataggtttttttcttaatacaaatatacagtatctataacacatatttatgcaacattccctcccattgctccctggggataaattaagtgcacgggtttataaatagggtatacaaaatgaaca

SEQ ID NO: 173048 - DNA, 580 bp, Homo sapiens
ccttttagttctgggaaaaataatctgtcataaagaagataaaacatggttgtgtgggaataaatgaacgccggccccgtgagcgcaggcagaggctgttccctccaagcccgctctgcaagggcctgggcgccgtcctgcccgcgtggcgaaggctcctgggggcacgggagcaggaggcatcatggagaagagggaagctccggggtgccgagggggtgctgtaggcacgcggagctgtaggccggctcgccacagtcaggcccttgtgtgatgggtcaggagagcaccgttctctgatgggtccgaaattgaaagcggtggctaaaaggagggcagcgggaagacaccgatcaagtcctgagcatttggggccgattgctgcagaggtcacagtttctcctcctgggctgcagactgtgggtcagtattacagtctaccgttgtttatatcatgtggttaatatcaagcatgcgagcctccctgtttcctgggaactgacgggtaccctcaatgctcctggtagattgtttatatacaatctaccattgtccatttgtgtattcagtctcattttga

SEQ ID NO: 173049 - DNA, 194 bp, Homo sapiens
tcgaactcctgacctcaagtgatctgctcccccctcggcctcccaaagtgttgggattacaggcgtgagccaccgcacccagccttcattgttattttatgtctgtttacttattctgtctccctccatcaaaagataagccccggggctggtccaatggtagtgggttatcagaactttttttttttttttat

SEQ ID NO: 173050 - DNA, 192 bp, Homo sapiens
tgttatctgcctgcatcaaacctcactgtcctcatgtcatctgctctgaggatgagggccagcttcacagaactccggaaatcaccaggtcctagtctccagttgtataaactgcactgccctgggctcctaattccttcaagtttgttgtgttgtatttttttttttttttttttttgacacagagtcttg

SEQ ID NO: 173051 - DNA, 928 bp, Homo sapiens
ggtaggagacgcagccccccagtctccctgggcatgaactctctgggttttgagtctgaaaaattccagaaaagggattcattggcccatcttggatcaggggctcacacttaggctagtcagctgtaccctgggggctgtcctgccataggtggggagcaaggggaagatgtgttctccagaagagagctggtggagggcagtgctgggctgtcatcctcatagcaggcccctgcagtcactaaatcatatatgtgatcatgagcttgtgggtgatgtcctcagtctatcctgagtcattcagagaaggttcagctggaagaaactcatggtctatgtgtactacatagaatcaaatcctcttcttcccctgaacacagagagtgattgtggtgagtgaaaagtgagtccacgtggactggaggagttgggcaggttttacagagtgggggttgtgtaagacagacgatgagaagacagctcagggcatcatgtatggaatgaactggaaaaagattggagacagagaaactgctgcattacagggtagcagggatgcaaagggagagcccacttgaaaatgattctttatggagattggatgtggagagaggaaggggaaggggtagtgagagaagaggaggaagatttgggtttctagatttgtatgatggtgattcccttaacctgagacaagtaatgtaggtttgggagaaacttggtgactttgactttgatcaggactagagccctgactctgactttgaactggagccctttgaactctagccctgaaaagggtcagggctagagatgaaggttgagaagtcattagataggggagtgtgtattcaaaccaggagtccagaatgagcttgtccagaaaagagtatagactaggaagagagaaggggtacagcataggact

SEQ ID NO: 173052 - DNA, 864 bp, Homo sapiens
gtgcttttatctcaggttgcccaatggataagtacattactttttaactctatgcctgattgaccaaggtaaagctgaaagagtctcatctgaactataacccaagtgggtaagccagtcccttggcactgcccaggaagaagatatggatgggaggactactccttcttgaatgcagaggataaaagttatctgggagctcttttacgattgttggagaagataggagaaagtgaagaagggaagaagagaaaaaaacagagaagaaagaaggaaaagaagatagagggacaagtagaagaaggaaaggaaaggaaaagcaaggaaaaaggataacctgtcctctttgactagtaggctcaccaactcttctttaccatggaagggatttcagtaggaccaaaggcttttcccatgaaatagtattttatcttgataagaacctagcacattggttaccaacctccttaaattgattccctcaaaaggaagaaagtgtatctggaaatcctctgaaacttccagagtcccccaagcccagtgctatttctaccaggggagaaagcagagctctttgtatatatgggtaggagcaaagtaagattctcctccccctttccccaaacccgaagcagaagtttctcctgagatttcaaccagtaaaatcaccatataatagattaggcatcctgagaagttcttaatggaacgagagctctcactaatcaaagcaggaaagaacagggccttgaagaaatcagaaatctaattagggtggaatttcaagagatctgactggatgttaaataagttgtagaagcctcatccaaaggattaactcagtgcagagacaacgcagaagtg

SEQ ID NO: 173053 - DNA, 300 bp, Homo sapiens
tatatcaactttctgtgtcaagatctttaggtgaagaacagttttctgtgggatctgtcaacttcatgaaacagaccaatatccagaaaaatactaataccagagatacaagtaaaaaaacaaaagaccagctcatcatcgacgctggtcagaaacattttggggctactgtgtgcaagtcttgtggtatgatatatactgcttccaaccctgaagatgaaatgcagcatgtacagcatcaccacaggtttctggaaggaatcaaatatgtggtgagccaaaacatagtctttcagtttg

SEQ ID NO: 173054 - DNA, 406 bp, Homo sapiens
caggcagggacttggccccgggaggccgccgtgggggcaagagctgggcctggagaggcccctgggaggcaagagtggggcctgcagaggctgttctccaaccagtgctgggcctgtacaggccaccgggaggcaggagctgagtccaaagatgttgttgggaggccagagtcgggcctggagacgcagccgggaggaagagctgggcccggtttttcacttctggcagcctcttggcctctaatttttttatcttttgtgtataaatcccaaaatatggaattttggaatatttccatcattatgtaaatatttgggtaggtaatttatttggagtgagtttctgcaccaagcccgaattttttattttattttccttattatttggtgttaaacaggtttaatg

SEQ ID NO: 173055 - DNA, 261 bp, Homo sapiens
tggaaaatgagtcagggtggagtaagtaatcgaaataagtctgggtggagcaggtatcagaatgagtcagggtggagcaggtgatcgaaaaaggttgctttacggagaagtttaaaagtagaaggcaaagaattaaacatactgacatattgattttttaaaaagaaatttaaaactcatatctaacaatcacttgaacccgggaggtgaaagttgcagtgagccaacatcgtgccactgcactccagcgtgggcgacaga

SEQ ID NO: 173056 - DNA, 278 bp, Homo sapiens
aaagaacttaaaggccaccagcatggaaaagggattttacaatgtttctggcagcctgcaagctgataaggctatgtgactactaaattagtgtgggggctgcagctggggaggctcaccttggagactgaatgctgggtgggtaggagtcccacgtggggctgaaaatcacagggttccatgggatgcctatagtcagatcacttcacggattctctccttcttccacccctgccgtgggtacaaccaaggactagaaaccatatatttatccctct

SEQ ID NO: 173057 - DNA, 656 bp, Homo sapiens
ccagtatacagtctgtgttttatatttcatgcatagtgaactacataactaagggcaatgcatgtacatagaattgctgtattgcctggctgttatataactgtagttgtgatatcataattgaaccctctgacactgttagtcaattcttttttttttggagacagagtcttgccctgttacccaggctggagtgcaatggcatgatctcggctcactgcaacctacgcctccttggttcaagtgattcttctgcctcaccctccagagtagctgggattacaggtgcctaccaccgtgcccagctaatttttttgtatttttagtagagatggggtttcaccatgttggccaggctggtctccaactcctgaccccgtgatctgccctcctctgccccccaaagtgctgggattacaggcctgaaccaccgcatcctgtcgttagtcaattcttactccttataatgctgtgtatttacttgaactcatacatcagaaggtagtgatcttaaatgtatttcagttcttatagtgtgtgctggtggtaagtagaagttgtggcttttttcttaagagggattgtttagaggtctgctggctgtataaatgtacttattatttcgttgctagtcttatcatgggttacaatatttt

SEQ ID NO: 173058 - DNA, 757 bp, Homo sapiens
taaggaggtgaaattcaacagaactattttggggtggagatcttgaggcccacagtttgtgagtggagtatgtagatttttggtttagtccttgtagctatattgtttaggaataaaatgggaggcaggtttgtctaacacaggtcccagcatgacttttctctttggatagaattgctgtattgcctggctgttatataactgtagttgtgatatcataattgaaccctctgacactgttagtcaattcttttttttttggagacagagtcttgccctgttacccaggctggagtgcaatggcatgatctcggctcactgcaacctacgcctccttggttcaagtgattcttctgcctcaccctccagagtagctgggattacaggtgcctaccaccgtgcccagctaatttttttgtatttttagtagagatggggtttcaccatgttggccaggctggtctccaactcctgaccccgtgatctgccctcctctgccccccaaagtgctgggattacaggcctgaaccaccgcatcctgtcgttagtcaattcttactccttataatgctgtgtatttacttgaactcatacatcagaaggtagtgatcttaaatgtatttcagttcttatagtgtgtgctggtggtaagtagaagttgtggcttttttcttaagagggattgtttagaggtctgctggctgtataaatgtacttattatttcgttgctagtcttatcatgggttacaatatttt

SEQ ID NO: 173059 - DNA, 404 bp, Homo sapiens
atttggccactaagtggcctcctaaatggctgatttctttttaaagtatgaagattgtttgctgtggcattattaattacacacagatttgtaccactttcctccactagaattaaggaaatttgtaaaaccaactcgtggtcagactccagcaaatgacccatcgttttccaccagtgtctctgtttctatgtaaaattatagattaaacgccaagtcctctgcctccacctgtccagggtaagtaaccacctccagaagtgagaagctgggagtggctctgagaggggctgactcaagtattctcctaataaataggggcgggcgaagcatcagggcgaatcccacgtgaggcagaaaagtgagctgaactatcctggagtgttttgttgcattccatatct

SEQ ID NO: 173060 - DNA, 698 bp, Homo sapiens
  misc_feature (357)..(357): n is a, c, g, or t
  misc_feature (366)..(366): n is a, c, g, or t
gtatcattcgatgccagtagctggagttctacctcatttctaattcattttattgtagtgtaatttacatacaatagaatgcacatattttagttataggttttgatgcaattttatacatgtttaggcctgagtagcctaccttgatcaagatgtagattttcccaactccgaaaagctccctgtgcccctttgcagacagtctggcctgccccatgctcagcagtgactgacctgctttttctactgtagattgtacagttcatgcaaatggaacaatacagtggtgtcctctgttgccctctgtttttcagtcaatgagtagtacttccatttatgaataaaaaatattcttcnccccaaaancccccctttttccaaaacccaaatttttttttttgaattttttattttttttatatcacggacgaagaggaggggggggaacagaacggggtcgaaaaaaactcctcatcaagaatcgcggcaagacaagcggggagcaaggcttctttgatccatcatcacccccacactcgtttttttcacacccacagacaaaaaagggctgccttctcggtggtctggggggggggagcgggtgttctgatgagggagatcaacgacatcattctgcaccacacgagtgtgggagttatttacatcctgtcaaccatccccctcgaggaaacacaatg

SEQ ID NO: 173061 - DNA, 258 bp, Homo sapiens
atggtcttgatttcctgacctcatgatccgccggcctcggcctcccaaagtgctgggattacaggcgtgagccactgcacctggcttcagaagaatttatttttagtcttttccttaccagtttttatgaaacaactgggcaagaacactgttagatttcaccaaaaaattgtgatgaatcattgtctttatgatcccatttttgaaaattgacattttaattgtaaaccaaaaataaaattctaagcccccacaact

SEQ ID NO: 173062 - DNA, 670 bp, Homo sapiens
ggaacaacttaattaaaacaagcctcaattttaatacgtttcaaatatttcttcctggggaaactttattttatgtgcattttattttatttgaaaattgacaagttgtataataaattagatgttatactgcaggacaagatatgtattattaaacaaactgcaggacctcttaaaagtcagaacaattgagaaagctgttccaaaataatatcagtaagtttagaattatatagaataaaaactgaaattgctgaagaagtttaaaatgctttctaacggggggggtcaatggaacgtaatatacgactaactacaatttcaaaccacgtgtgttttattacaccttacacattctcaaacaacagggggttacgaaaacacacgtaaaatctccaaaactcccaatttcccttaaattttgtcaaacaccttcggcgggcacaccaatttttccaaaatcttttttccacaaaccttcttcttccggccactttcctttccttcccagccacaccaccaaacaacgtttctttaacacttataccccccccccctcacagacaacacgcataaaacactgttcagcgccagccctgtcccgtctccccacaaccaaccctaacaacacacacacaacaacatcacaccacaccaccatttatagaga

SEQ ID NO: 173063 - DNA, 888 bp, Homo sapiens
tgttacttaattatcatacccattgaatcagattttagaaagtgtgctggaggccgggcaaggtggctcacacctgtaattccagcactttgggaggtggaggcgggcagattacttgaggtcaggagtttgagaacagcctggccaacatggtgaaaccccatctctaccaaaaaatgcaaaaattagttgggcatggtggcacacacctgtagtcccagctacttgggaggctgaggtgggagaattgcttgaacctgggaggctgacagatgttgcagcgagctgagattgcggcctgggtgagagtgagaccctgtctcacgaaaaaaaaaaaaagaaataaagaaagtgtgctgtgtgctgggaagtaggactttgtgaaagattaattttactcttttccaatatgggtattgattgttctattcattcttcaggactaaggcaatctatttcaaaaaagaaatgagtaagcctcacttacctgcataagggcttaaggaccatggctctgggaatgggtaaatgtgagatgaaaagcaaatctgagactatgcccccaggcctcctttatatttccctgggcagggatcattccttatctcaacctctcaactaggaggaaagtggctgaaaggtaaaggaagctgtttccttcacgctgatactcctgtgcacttcatgaccaactcttctccaatggtctgtctgtggaagggggacaagttctcctgactgtcttcccagacactcacacgatcagctccacgggtgctcgcatgcagattcagcctatatgtctgtctttctgactcttttctaagaagctctgagccttttgcatccaccagggcctgcaggaccgacctgctgaaagcatagaag

SEQ ID NO: 173064 - DNA, 461 bp, Homo sapiens
tgttacttaattatcatacccattgaatcagattttagaaagtgtgctggaggccgggcaaggtggctcacacctgtaattccagcactttgggaggtggaggcgggcagattacttgaggtcaggagtttgagaacagcctggccaacatggtgaaaccccatctctaccaaaaaatgcaaaaattagttgggcatggtggcacacacctgtagtcccagctacttgggaggctgaggtgggagaattgcttgaacctgggaggctgacagatgttgcagcgagctgagatagtgccactccactccagcctggatgaaagagtgagactgtgtctcagaaaaaaaaaaaaaggaaaaaggttcagatggggactaaggaatgaccatgggatgggggacctgggagatcttggaccacggtgagagctgtgtgtgtgtgtgtgtgtgtgtgtgtgtgtg

SEQ ID NO: 173065 - DNA, 163 bp, Homo sapiens
aagtcagggcaacttctggccaccagagtcccagcattagcaaagttgcctgggcacttaatcaccatttgccacaaattttctgaggaatatgctctaaatgcatgccctaaaagttcaatttttgaaacacagcaatactacctatttgtaagacaggctc

SEQ ID NO: 173066 - DNA, 164 bp, Homo sapiens
gtgaaactgacagggattaattgctggtatcactaagaaagtttagaggaagaggatttggggttctaaactaaggtttgacaggaaaaattaaatgcaaacttagattaaacatacatttcaaaacacaaaatttggaagtaaaatccgttttggtgtaaaac

SEQ ID NO: 173067 - DNA, 191 bp, Homo sapiens
aatatttagcatgtgataatttagctagggaaaaaatacatgtataaaaccaaactatgtggtccacggttcactctatttaaaaatacgtagtcctcataatattccctttaacagcctgttgtagctctttggtgttcagcccaagcacatctgatatacgctggtgccatcaccaggaacatgtgtcc

SEQ ID NO: 173068 - DNA, 538 bp, Homo sapiens
cctaggggagggagtagcaggcagcagtggaacagctcccaacccaactcaatgaaagtggaagtctttgatttgatatgtgtatgagtgtacacatatatatgcatactcacatgcactcacatacatgcacacataatttgctctatacacctgattttctttgaagaagtgctctgctgctaaagataattttgaaaaaagatcaatttaaaaattggaaatatgaaaaccaggatttgaatagagagaggaaaaaaattgggaagaacagcttgagtagaagtaggaaaagggaaaagtagaaggagggcatgggatattgttttaccttttttgcaagcaatgtattaaattattcattggctcaatttatattgataaatttataaattatatttcaaaataaaatttatgccatgctatgcccttgcaattcttttactgggtataaataccaaagccatgatcaatatgaccattaaggagcatattcaagggtaggcagtgtatagttgtttatttgctagggagttga

SEQ ID NO: 173069 - DNA, 311 bp, Homo sapiens
ttcatagattttcaagctttaactcttctatctatctctgaatcatttactattcatttttaaaggttaaaaaggcaatctgtctttagaacagatatcctgattttaaagtaagtattttatcttcatctgttttcgttatataacgattaagcatggaacattgcatttcttgattacttgttcaaatacatgcattaatttttattgtcataatttaaatcatgaaaattaggggtaatgcagatactatgaatttgtattttattataagatttaaactgttttttctatttataataaatgatgag

SEQ ID NO: 173070 - DNA, 473 bp, Homo sapiens
ggtgattaggtcatgaagaccagagccctcatgaatgggattaatacccttataaaagaggtcccagagaactgccctgcccctcccaccatgtgagccagaaagtgggctctcaccagactttgcatctgccagcacctggatcttggacttcccagccactagaactctgaagaataaatttatgttgtttataagccacctagtttatggtgttttgttataaaaacccagcagactaagatgtgatctaaacaaactaattaaaagacagaaatttataaacatgcattttacaaaaagacccaactatatgccttctgtaagtaatccactttaaatgcaatgacattgatattttaaaatgtgataaatgtaatgaaaggatggaaagcatacattatgcaaatactaattaaaagaaagctagaatggctacattcacatcagataaatatcagaaacaattaaaa

SEQ ID NO: 173071 - DNA, 152 bp, Homo sapiens
tctcctccctcttcattcagaaagttctcctttctataggcccatcagctgtgtgtcagctcttattcttttctccagtttttgagcccttcaaggtttttttaaaaattatttatatctctgtgatgcattctaggtgatttcctcagaag

SEQ ID NO: 173072 - DNA, 707 bp, Homo sapiens
gaatgggtggtgtcgctatatagaacctgctgattttaactataatctttagctgataaacttttcattttcattttttttaaatgaaacaggaatatccaaccataagatctgcaactaaatttttattattacacatttttcttggaagaaaatcagcatctgaaatatataatgtatgacttcaagtggagcactgtaatccacaagcagactcagatttgggcacttcaggtgagtcacatatggaacacagcattctttgcaaaaattaatcttttggccccattcaatgtggttatttttggccaggcacagtggctcacgcctgtaatcccagcacttggggaggccaagactggtggattacctgaggtcaggagttcaaggccatcctggccagcatggcaaaaccctgtctctactaaaaatacaaaaactagccgggcatggtggcgtgcgcctgtaatcccagctacttgggaacaaagcttgtttgtttgtttgagcagagtctcccactgtcacccaggctggagtgcagtggtgtgatctctgcttaccgcaacctccgtctcccatgggcaagcaattctcgtgcctcagcctcctcagtagctgggattacgggtgtgcaccaccatgcccagccagttttctgtccttagtagaatggggttcaccatgtggcctcaagtgatccgcct

SEQ ID NO: 173073 - DNA, 127 bp, Homo sapiens
gatgaaagtctttctatccgtatttgagtgccacatcaacctttcttcagactcaatttcccatggtgtctaaatcctgagcaaagacaagctggcagtttgtctcattccactgtttttaagaggc

SEQ ID NO: 173074 - DNA, 260 bp, Homo sapiens
tagacttgggaatgtcaagagaaacacatgcctttcagtcatttgcacatgagcctttcttctttggtcattgtcttagatattcactccacagaagagaactccgagaacagcatctgaatgctttgaatgtggcgctgcatcagggtcaggcagtgtagtattaggagaccagtttgggtgcatgtagcagatccaaaatagcagtgtcttgcacaaggtgggtgcttatttctttctcatgtaacagtttacagttt

SEQ ID NO: 173075 - DNA, 719 bp, Homo sapiens
aggaaactgagactcaatttgttagtgaaagtgcccaaagttcacaacactaataaatattccagccaaaattaagacctaggcctgtctgattcagtcttagccaatacaggacactgcttccttcccaggcttccccttgggatgcaatcctggcgatgttccatggcagccatgcaggcctgggggctggactgctgtgttagcctgggaagcctttggttctgccatgctcttctcccctgtgcttagtaaggaagggtaaggctcagcctctataacaaagaggcctagcaatcattctgtggatgaaagaagatggaagtttatttgtctcccatgtaactgcctggtgaactttccaagtcagcaggaagctccattcaacacagacatcctgagacccggattccttctgtcttgatccctcaccacccactagggcactgttgtgcctacaaggctgcagctaggtgtccacaagttcaagccaacaggaaagggaagagagcctggtagagacatgaccaccgtcttttttattttttatttatttacttatttttgagacagaatcttgcttggttgcccatgctggagtgcagtggctggatcttggttcactggatcttggttcactattgcctcgacctcccaggcccaaggaatacccagcctcccaagtagctgggaccacaggtgtgcaccaccacacctgg

SEQ ID NO: 173076 - DNA, 214 bp, Homo sapiens
cccaactgtgaaggctactcacgttctcaccctgctgtatcgtagaatggagctgaaatacaaaattgagattcaacacattcagtcccgaccagaaacatttcaaggaaatctgtgctcacagcaagattgagtgatgggacacagcgcttgagatttcaaggcaaatgctttttatgtcgtactcaacatgattagcttcacacgttaccca

SEQ ID NO: 173077 - DNA, 498 bp, Homo sapiens
ggtgaggacacatcctccagctctgctggggacaatgtggggaattctgtctggagcaaggccttcgataagcttgaggcagcttgtaactcttagcgtttagactttcactggctgagttgttattcttcatatttgaatctaagagccatggagagttcttagattgttagttttcctggacagttttctttccctatacctccaacccaaacacttcctttgcccttcaggtgaaaatggaaatgctcttcactcttgggatgggccctcaccttttagtaagtgttatggttgggtgtcgattaaaattaagggggctgtgtgttgcaggactactcccttgttcagagccttgctttagaatgggagctgccacgggaacagagctcatgctatgttaatatgactttattgcggacacggtgatgatctaaaatcctttgcaaaggcacttgaattttgtaaacaccactgtgttctcccactccagataca

SEQ ID NO: 173078 - DNA, 316 bp, Homo sapiens
ctcaattcaagagatcaaaaccatcctggctaacatggtgaaatccagcctgggtgacagagtaagactctgtctcaaaaaaaagaaaaaagaaaaagaaattaggctcaattaaattaccttttaaaaattaaaatggcatgaaggcatttcagattgaaaagcaaaacaagggaggatctaaaatacttttaataatagcaacaacaaaaaactatacatataaaagcttgtgggttgcagctcaaatacgatttagaggaaaattaatggtcttaaatgccagtattggaatattaatgagccaaacaatgct

SEQ ID NO: 173079 - DNA, 232 bp, Homo sapiens
tgtttttcttctgctgagagccaaacccaagtaggtttgcttttgattagaatgattaggctgccccaggggtgactgggagggtgttttcagaagagactggcctgtgagtcagtggactgaatgagggaatatccaccctcaatgtgaccaggcagcatccaatcagctggtggtccagctgaatagaaaggtggaggaatgggctggatgttgtgagaggctgaggcag

SEQ ID NO: 173080 - DNA, 488 bp, Homo sapiens
ggaatttgtaaaataaaaatctttattcatttctccactttatgaatcagttcttcaaaattccagacagaaaataatgttcaaaattcaaggctttggattcacagacttttttttaacagaaccagctggcatatgacatccatagtaactgttaacagcaagacactctcagaaaagcaccacctgcaaaccagctggttcactagaggacagataaacaacctcaaggaaaaaagcaggaaagaggtctaacagaacgggtcacagagaaacaagagcccatctgatggcacccatatggcccactatgtccagcccaactttagaatagaaaataagcaaggacccttcctaagactccagtgtaaatattcatcagcagagaaagcttatgtattttaacatttactcctaccaagaactctgaagtaaatgctaccgttattcttcatttatagattaggaaactagggtacagaaaggtt

SEQ ID NO: 173081 - DNA, 1889 bp, Homo sapiens
  misc_feature (3)..(6): n is a, c, g, or t
  misc_feature (1883)..(1883): n is a, c, g, or t
ggnnnnaccatgttagtcaggctggtcttgaactcctggtatcaagtgatctgcccgcctgagcctcccaaagtgctgggattacaggcgtgagccactgcgcccggcccctgtcctcccccttttacagatgaggcagctgaggcccagagtcacagggctggtgaggaacacagcctggatcagagcccaggaagcctgggtcaaggctcacgtctcttgagtgaggggctctgccctcctccatcctgttctttgtagtgtcatctttcatgacctacatggagacattcaaatccggggatgacacagagcttggagggagagacgtgtcaggagacagaaacagtgtccctggagatatcagcaggcaagtgtgctgagctcacactgagagccagaggggattctgaaaactagactgatgattaaaactgcttaaaaactcagcagcctccccatgctcccgggattaatgatgcaggctcacattgactacacacgtttataccaggcgccatgttctttgccgaaactcccgctcagagcctggatgatctgcccctcacctctgccctcgttcccatccactctcccctccttgctctgttccagccacactggcctcttgctgttcctcacactctccacgtccaggcacaccccagggcctttgcactggctctcactgctgcctccagtgagctccctccagatcttcttgggtgcagctcatgaggactcgctctaatgccaccccctcaaacaggtcctcctggccttcagtagcccaggctgtcattctgtgtcactgtactctgttccacatcccgtgtcccccatgggaaacaggtgccaccgtcttagtcacaaggcacttgtaacgtgcctggcacacagggcatgctccatcctgaacataagacgtgtggatcttgtttgattctcacgtgaccccaataagtagatactataaggcccccacttttcagtgtggcccaagttgggccctgctgaaccctgttaccctcctcaacaatcacccgtacacactgcttcctctgcctggaacccaccccccaacccgcacccccactctaggcccactcctgcccacccatgttaatttgctggggcagccgcaacaaactaccacacactgagtggcttaaactgcagaaatgtatcatctcacagttgcggaggccagaagtccaagttccaggcgtcaacagggtggttccctccaagggcggtgagggagaacctgttcctggcctccctcttagcagccggtgggtgtcagcacgtagattcatcacccccgtctctacctcctcttcgcatgatgttctccctgcatctgtgcccacatttcctctttctgcaaggacgccaatctaacgggattaggggtctaccctaatgacctcattttcacttgattgcctctgtaaagactctgtctccaaatgaggtcacatttggagatgctggggcttaggacttcaatgtagctttttgtggggccccagttcaacccataacaccactccttgggtatcaacacagacacgcctttcttgcagaagttgtctgaacccccacaccaggctcagcccacccccagcacctgtcccagggcacagcgaccgccactcccttggcaacttgcttcctctctgtcacccccatggggcccagaacagagacatcctgaacctcacccagaccacacacttagtaggtgctcagaagatgtacctggagagacaacaaccctatccaacaacagctttcccagtgatgaaatccagagatggcttgtatatgtgtgtgttggtgtaaacatatgtaaactaagcatataaaatatcagcagnagacac

SEQ ID NO: 173082 - DNA, 380 bp, Homo sapiens
caggatcccctgctgctccctcttcacacatcaccatggtctctcatcaacatcacaacagccacttaactcatgttctcattccatcttttttttttgagactgtagcgatttcctgcttcctttaaggtagtgatttttaactttggctgcagggagctttaagaaatctagataccaagtataatttgtagcaccttggcttttctccactctcttctgaaacccaaagttattttagaactttaaacatgaggacattattccgcactgctgtatcctgagctcacagcagaaaggactgaattgatttgcttgcattacattgtaaagggggtagatgctgtaaggggaaccagcctttcccctggacttgagtc

SEQ ID NO: 173083 - DNA, 449 bp, Homo sapiens
attcactgtatctgttctgtcagaacaagtctatcatctgttgttttggatggagtgtggccagccctgcctttggatgtaaggaaatcaggaaacgcttgtcagatgtcaacaccgtgccagacactccgctagggatttccacgtaaatcactatattcatttctgttgctgctttaacacatttccacaaatttagtggcttaaaataattgaaattgtatcatctcacagttctgtggggtagaagtctgacgtgggtgtcactgggcaaaaatcaccatgtgggctgggctgcattcctcactggagaattgtttccaagcacttttggccaaatatagttccttgtggttgcaggactgaggtgtccccttgctggccatctgttgggggctgtcctcagctcctgaggcctctatctggtctttgcatgtggtcccatcagc

SEQ ID NO: 173084 - DNA, 254 bp, Homo sapiens
gctgacctagaggatcccccgactcggaccatctcacagttctgtggggtagaagtctgacgtgggtgtcactgggcaaaaatcaccatgtgggctgggctgcattcctcactggagaattgtttccaagcacttttggccaaatatagttccttgtggttgcaggactgaggtgtccccttgctggccatctgttgggggctgtcctcagctcctgaggcctctatctggtctttgcatgtggtcccatcagc

SEQ ID NO: 173085 - DNA, 402 bp, Homo sapiens
cagatggagcctttgattgtggggtggacgagcaggcagtagccctactgggtgtgcttatgtgttacgccacagaccttacttgactgtcacagtgttcccgtactttcctttctgttccaggatccagtccaggggaccacattgcatgtggtcacaccagcccagcaccccctgcccggggacagctcccgcctttccttatttcacacacagtttggtggtctccatgtaacacgggatcttcatagctcccagaaggaaagccatgcagcggcagcgtgtgtctgaggcccgccttgctcaatagaggaagaacctgacttgagaaaatcctgctttcattcttgcagggtttctggccttattccagaaactttctcctgcctctaaatatcagaa

SEQ ID NO: 173086 - DNA, 495 bp, Homo sapiens
atatatgtttccattttctgtaaatattttaatttttatgtagtcaagaaatctatcagtattctcatttgtaatttttttacacattttagtgtaaaaattaataaatttcagagctttaattatggaaactattccataaaactataaaatgtcaatatcatcacaataacaaaaataaagcctaggtcaggcacggtggctcacacctgtagtcccagctacttggaaggctgagtcaggagaatcgcttgaacccaggaggcagaggttgcagtgagccaggattgcgccattgcactccagcctgggtgacagagtgagactccatcccccaaaaaagaaaaagttagatagcaaagcattgtgtttattgtgctacagcattatggctaggctaaaagcatatacatcttatgtagcctcacatttccatatagatgtctcactgttacctcgactacagtgtgaccagcattgacaacattaatcttt

SEQ ID NO: 173087 - DNA, 511 bp, Homo sapiens
ggtttgccccttgaccgtcactgccttatctcatttttttcatatgaagattgagtatcccttatcctaaatgcttgggaccggaaatgtgttggatttcagattttttcagattttggaatatttgcttatacataatgagatattttaggaatgggacccaagtctaaacacagaattcatttatgtttcatatacattttatgcatagagcttgaaggtaattttgtacaatattttaaataattttctgcatgaaacaaagttttgactgcattttgactgtgaacgtcacatgagatcaggtgtagaatttttcacttgtggcagcatgccagccctcaaaaagtttcagattttggagcattttgggtttcagatttgtgggttaggctgcccaacctgtattttaaaatgattttgttgtatgatttctaggttgtggctgtacaaatcccagttagctcatgctataaaatagactcatatttcccccttttatacaggggtt

SEQ ID NO: 173088 - DNA, 458 bp, Homo sapiens
ctctgcctcccgtgttcaagcgattttcctgcctcagcctcccgagcagctggaattagaggagtgcaccaccaaccacaggtaatttttttgtatttctagtagagatgggatttcaccatgttggccaggctgatctagaactcccgacctcaggtgattcacccgcttcaggctcccaaagtgctgggatcacaggcgtgagccacccagcctggtcttttctattttcgtagagacaggttttcaccatgttgccaggctggtctcgaactcttgacgtcaggtgatccacctgccttggcctcccatagtgttgggaggcggcagccacagtgaccgcctagattccatatatcttaagtgaaatttggcaacaggtaccaagagctacaaaactcaagtttattttatatagtttcatctttgagactataataccaaggttgggcctcacg

SEQ ID NO: 173089 - DNA, 705 bp, Homo sapiens
ataccatgtcttatcagtggtccctgtctcccttcttgtacaatccagaggaatattttttatcaactattttgtaaatgcaagctttttagtagctctagaaacatttttaagaaggagggaatcccacctcatcccattttttaagtgtaaatgcttttttttaagaggtgaaatcatttgctgattgtttattttttggtacaaccagaaaatagtgtgggatattgaattatgggaggctttgactgtctcgggtgtcagcttaacattccatagatgggggggttagtttttatatcctataatacaaagcatattaaatggcaatatggagtcagtcctgcatttaatatcttgaacattttaaattacttctgttgccatgttgttttttagtagaattgtttcctaaagaaaaccactctttgatcatggctctccctgtcagaattgtgcactctgtaacatctttggttgtggtagtcctgttttcctaataactttgtcactgtgctgtgaaagattacaaatttgaatatgtagtgtacgtgctattcagttgtgaactggtgggccgtatgtaacagctgaccaacatgtgaaaatactggtacttgatagcctcttaaggaaaatttgcttcccgattttaagctggaaagtcactggaataactttaaaaaagaattacactacatggct

SEQ ID NO: 173090 - DNA, 494 bp, Homo sapiens
cccaatatttcattgttttccatacaaccctagagtaggggaaaagtttggagactagctctaggttttatttatcagtcatatcttgcctcatccttctttttttttttgcactcccagactggagtgcaatggcacaatctcagttcactgcaacctctgcctcccgggttcaagcaattctcgtgcctcagcctcgcaattagctgggactacggatgcctgccaccaagcctggctaatttttttttgtatttttagtggagacggggtttcactatgttggccaggctggtctcgaactcctgacctcaagtgatccgcccgccttggcctcctactgggattataggcatgagccaccacacctggcctcatccttctcctttatcttcagttgtcacagataaataagctatgttgaatcagaaaaaaaggtagtttaatatatcatttggggaagaaacatcaattctgtatcaatctcatgtttt

SEQ ID NO: 173091 - DNA, 366 bp, Homo sapiens
ctggtgtgggtggggcagcataaactataggggagtaaatagtagaagacctggtggccaccagccatgagaaaagaggcagaccttgaggagtgataaaaaccaaccaaccaataattgcatgatgaggaaaagaaggctaaacagtatcagaatactggagtcgtgatttgaatggagggagtctgaagcagcaacccctgcttctgacctcagtctgaattgaaagcagttcatgggtcacccttaaccatcatacaaagttgcctctcttcacaaaaactgtcttatccattctcaagaaataaggaaaagagaaagcttgtggaaaggatccttcctggctggcagacagatctgagttaa

SEQ ID NO: 173092 - DNA, 607 bp, Homo sapiens
tactattgactccattttttctcaggagcacatggaaaattatatgtatcccttaattattacagcagcgattttatttatggtttggctgttccaagcaaaatgtgtacaatcaattaaatttcttgtttcctgattacaagaattttactacatgtttattatagaaaatttagaaaatacggaaaagtgcaaagaaaaagataaaagtcacctactagcttaaaaagtacttaaggtggcttagaagaaaggttgtattgtggttgccagcgaaggttatctccaatcaatcaataatttaacaaataattcagcgtatatttacgaatgtcaagtgctactttcctttgctttcctttgggatcggtacaactttagaaattgattgaggttttgctactggtagataagtctctgaatctgtctctctctctcttgctcagagttggggcagtaggattcagttggttatctccagtgtccaacccagtgcccagacatcagaggacaatcattggcaaatgatatttattgaatgaaaggggctttccaaatgtgtaataaaacaggaggaaggaagctgaggaattgagcaggggcctaa

SEQ ID NO: 173093 - DNA, 539 bp, Homo sapiens
aggactacaggcaggtgaccctgcatctggcttaatttttcctgagattgaaactccaataatactcataaaatcttctttgctctgatgatttttcaaaaagctaagttttatctatatttgaagggccaagaagctagaggaatggctcccacaagattataaaaccagcacgaaggaatacctaacctaagttgaagcctagcagagaaccaaggcacttaatgaggcaacttctcatagccggttcacacaaaacctaggaaactagggagcatacatcatgccatagcctagcttcctggtgtgtggtggtgtgcacacacacacatatattaatatgtatagaagggatggaagaaaaaagagaccaagggagaaaaaagacgggaaagaaaaacacaatagctacccccttattatccttgggaattcacactaaacactaaactaaatactatttcctcctcctggaattatatatgtggagcctttgctttacatggaggggaaagtcatagcctagaaagagaaaaatg

SEQ ID NO: 173094 - DNA, 762 bp, Homo sapiens
aatatgcatcctaaaagaaagtaccatgtataatggttaaaaatgcaggctcggatcaggtgctggagtatcaatgcaggctatgctacttattcactgtgtgactttgggaaagttacttcatctctcaatgcctcatttttctcagctgcaaaatgagaatgataaactacttacctcacatggtgactggaggatcaaatgaaataatggagggtaagaaggtagaatagtgtctggcatatagtggggtgctcacttgtagcgctagtagttagcaatgtgataattaccagcaggtacttttcatatgtttagcaatgacttagaaaggctagtggattttaatggaataaaagcgcaatacgtagctaatagtgaaggtggggtaatatgtttaggtagctgcaccagaactaagagcatgagaaagtgggaaagggaaggtaattctctcactgcagtgaattgtagtgattctctagttgccgttgatgtgctctttagtcctgagtttgcttacgaagtgcttctgtttaaatcaacccataagcagcctgttctaaccttgcttattgttggtctccagtttctccctttttaattttctttttattgaaggagaacacgaggtctattacttgaaatggggaaaggctacagttgggagttgaatgagctcattgtaccacaaagggtcccatttgcagtgtaagcatcatttagatgttcttcagagcctcctttctgaagaatgaccat

SEQ ID NO: 173095 - DNA, 156 bp, Homo sapiens
tcgaatctttgtcagaggagtattaccattagattgaaaaaaaggaaaataaataatacacacttttaaaaaaactccccattctcttattctcacttttaggaaaagagactgactaatatcttctgccacaaataccgatgttcttaaaaatat

SEQ ID NO: 173096 - DNA, 691 bp, Homo sapiens
ggctcactgcaccctctgccccctgggttcaggtgattctcctacctcagcctcccgagtagctgggattataggtgtgtgccaccatgcctggctaatttttgtaattttagtagagatggggtttcatcatgttgcccaggccagtctcaaactcctgacctcaagtcatctgcctgcctcagcctcctgaagtgctgggattacaggcatgagccatcgtgcccggccacatccagacttcaggtgtggaaaggaatcatggttctcacaggtggctgctttcagcagctgagggggtttctctttctggccttcatctcttcctctctttttgcctgctcgctcttctttctctctctctctctctctgcagatttctgctttctgggctcttgcctgccccacacctaagccctgtgctaagccctttacctcctgagcttatgtaggcctcaccaccatcctaggaggtaggtattgttataaaccccattttatagatgaggaaactgaggcaggagcatcaggaggcttctcaagacgaacaacacacaacaaacacaaaaaaagaccgcgcgcccgccgcagccacacaaacaccaccaacacacacagcggcgcaccggcccacaaagcacgcaactcgtccacagcgtccaagacaaccgggcaaacaagaggggcccaa

SEQ ID NO: 173097 - DNA, 777 bp, Homo sapiens
gaaagctctagagttaaaagctccagccagacacctgtgagagtgggactgataacaggaaggttggttgagaatctgtagttaagaatgattcaaacctacaggttacctctccaattgcaggcaagctagatcattgcccttctactcagtgaaaaccaaaggcttattcactagaggggttaaaatggagtccattgacagggggactatatagatagggcattagaaggctgtgtaaagaattcagacaacctgtaatcccagcactttgggaggctgaggcgggcaaatcacttgagatcaggagttcaagaccagcctggccaacatggtgaaaccctgtctatactaaaaatacaaaaattaggtgggtgtggtggcaggcacctatagtcccagctactcaggagactgaggcaggagaatcacttgaacctgggaggcagaggttgcagtgagccgagatcacactggtgcactccagcctgggctacagagtgagaccctgccacaaaaaaaaagaatttagacaggttacaagtttgctattatctaggacaggaatcagcaaacttttttggtaaaaggccagtttataaatatttttggccttgtgaaccttgtgctcgctgtgacagctatgcaattctgagaaacagcgtgtgcaatgtgtggtaaatgaatgcttgtgcctgcgttccagtaaaacttatttacaaaaccaggcataggctaaataggggtatagttggccaaccctaagtaccacattga

SEQ ID NO: 173098 - DNA, 306 bp, Homo sapiens
gtgacctagaggatcccaacttcgacggacggcatttaggctaacatgaaggaaaagttggaaagcaaaattgaatataaaacatggaaactctcaaagaactattgaaaaaggaaaataaaattcttcctttaaagcacactccagaattaagttccaagggtctttccatatcaaaaaggatgctcccacagcaccatcacttccctgccttattctgctcaccctttattttagttgtctgtttgatgtctgtggtctctgctgggtgggacgactttggaggatggagaaccagagcaccat

SEQ ID NO: 173099 - DNA, 969 bp, Homo sapiens
  misc_feature (7)..(7): n is a, c, g, or t
ggtctcntgttccgcaggatggggttgttaaagtgttaagaataaggcctactttaagagataccaagtgaaatttagaagacgacgagagggtaaaactgattattatgctcggaaacgcttggtgatacaagataaaaataaatacaacacacccaaatacaggatgatagttcgtgtgacaaacagagatatcatttgtcagattgcttatgcccgtatagagggggatatgatagtctgcgcagcgtatgcacacgaactgccaaaatatggtgtgaaggttggcctgacaaattatgctgcagcatattgtactggcctgctgctggcccgcaggcttctcaataggtttggcatggacaagatctatgaaggccaagtggaggtgactggtgatgaatacaatgtggaaagcattgatggtcagccaggtgccttcacctgctatttggatgcaggccttgccagaactaccactggcaataaagttttggtgccctgaagggagctgtggatggaggcttgtctatccctcacagtaccaaacgattccctggttatgattctgaaagcaaggaatttaatgcagaagtacatcggaagcacatcatgggccagaatgttgcagattacatgcgctacttaatggaagaagatgaagatgcttacaagaaacagttctctcaatacataaagaacagcgtaactccagacatgatggaggagatgtataagaaagctcatgctgctatacgagagaatccagtctatgaaaagaagcccaagaaagaagttaaaaagaagaggtggacccgtcccaaaatgtcccttgctcagaagaaggatcgggtagctcaaaagaaggcaagcttcctcagagctcaggagcgggctgctgagagctaaaccaagcaattttctatgatgatttttcagatatagataataaactgatgaacagcaact

SEQ ID NO: 173100 - DNA, 549 bp, Homo sapiens
tctgacccttcctcctgtttcattatttcccccagcgcttgtcaccgcctcatatatcctttcgcttttttgtttatgatctgtttccaaccagctccacgagggccggatgtttgtgtttgattcacagctgtatctcagacgcctgtcaccgtgccctgcaccgcggctcgcgcacaggaggcgttcaacacacgttgttgacgggacgaaggaaggcgggatcgcgaggccagctgtgcaggtggcctgggtggagagggatgcacggccacgcgcgtctccttggcccgatcccggagcccgcccccggcctccccggcaggctgggccgggcaggcaggagttaagccgcgctcgcttccgacccgcaggtggcgccgtcctgccttggtgcccggctccgggcgctccgaagtgcgggacagaatagcagcgagcgcggagccgaagctcagccccgacttgttgatctcgcccaggcagccgccgccgccgccgccgcgggagcaggaggaggaggaggtggaggaggtgccgcgcggccgc

SEQ ID NO: 173101 - DNA, 461 bp, Homo sapiens
ggcaggacccagcgctgcactcaagcctcagccaggcccttcctgcaggacccagcgctgcactcaagcctcagccgggcccttcctgcagaactgcaggggcatcaggcaggtgatggaagccagaggctcagatcgcccactgcccaggccctgccagtgacgacatctgcttctctttcctgggaccagaggccccacctctgctccccacagcctggctctgccggcccagtcctgaggccactgcaaacaagggggctgtggcctcctgattactcactggccctcggctgcctgggagctgcagggacccacccaggctccctaccacctgcgaagcccacagtgccccccaggtgcctgacgtactgttgtgctgttggtggtattattaccacctcgggccatgcgatgacccttttgcttatctgcaaaataaagcgggtttggcagcaaga

SEQ ID NO: 173102 - DNA, 404 bp, Homo sapiens
ggttgccttctcagatggcctctctgacctcctaagctaagggagcccctccactatcatactgttattttctctgtgacacttaacactgtttgaaactgagttgtgtacatttttattgcttatctccctcaactagaacaataagtttcatagcaactgagactttttcctatttactaggtgtatccctgcatctagaacagtgtgtttagatagtaggtgctcagtacatattgttgaatgaatgagtggggctgggattctaaaccgtaggccattagttctcaggtggtataccatgaggcctcccatattcaattttcataaacatagaaagttgacttttgttataatcaagcatagagcattttagagcattttgctgagcgggttgtgcagtg

SEQ ID NO: 173103 - DNA, 733 bp, Homo sapiens
cgcacggcgaggcatggacgctttcatgggtggttacgcgacagttgccaggaccgagggcgaaaccggctgcaaggcattgtgggacattggaggacttggaatatgcgctagaaggctcaatccaagcccattggaagaggaagacgtacgcagcggagacagctgatccggagtcggggcggcctgccaggtgcccaacctctcccagagcatggcgtcttgggcacgcccctgccggcggacagtgcgtcctctagggccgggagctgcgggccgagttcgcgtgggccctgcgctttcatccctgccggggacgccggggttgcgggataaaccgctcgacacaccctgcctccctgactgcgcctgtgtgacacatacgttcactggtggggcacgcatcagatacggatggcagtggttttgaagtgggaggccctgtataaatgtaaacggttattactgtaaatgctctaacagagctgcctggggggcgcttccagggaagcgtggcaatctcaggccgggagaggagaggcgtcctgggccagggcgctgcaggaatacaggtctggcgatgtgcaagtacacagattcaccaggcaacagcattgcggcaagggtgggatggggaagccagacctaaggccagaaaaggagattgcgaccagagcatgcctgctgtgactgtcagagtaagctggtttcaactttattagagacttctaag

SEQ ID NO: 173104 - DNA, 140 bp, Homo sapiens
aggggaagtaaaaataatggaattaagcagtgggatcatcccccttcaaaagtcttacatttattagcatatatttatttttttaagacagaagtccacaaactatggcataataaacaataatgctattctggaacatg

SEQ ID NO: 173105 - DNA, 456 bp, Homo sapiens
gtgaaattctgtccccccaccaaaaaacaaacaaacaaacaaacaaacaaaaatatatatatatatatgtacacacacacacacacacataatatatacatacataatatacatatatacataaatacgatgaagcaaatgtcacaaaatattaataattggttaatacctgaagggtatatgagtattataatttatttcaaatttgtataggtttgagatttttttttaaataaaaagttggaaggaaattaatattaataatgaaaaagacactcagtgagtttcctagatggtctaccttgaggttgaaatagtcagcaaaagtaacacaatctgttccacaggtgtctaattcacacaaacatgaccatactgaaggtcttgtgttttatagcatccagagaagacagttcctgtcagtaggggacagatattactctaaagcggaattct

SEQ ID NO: 173106 - DNA, 478 bp, Homo sapiens
ctgttcccattttaccaatgaggaaactaaaattcagcgaagtgatgagactttgcctgaggcccctggttactagtgagggcattcaacttcacagcatgttaaatttaccagtgcaacaggatacatgaagagattttactaagaccttctttccttcaccctttcacctacccaatatttactgagaatctgctattcttaggccttcgaagtcagagatgactttaagtacatggaagtagcattcccccctggttccctgggtgccttgaggggtgagaaagggaagagtgtgctgaggctactcagtgatgaacccactttcccctaagccagatctgcaaggacagtacttgcagagagagttcctccctctgtctgatctttatcttggaaacaaaagtgatgccacgtagctttggtgaagctattagatgagttttctaagatgggacatgacctatttgtaagccag

SEQ ID NO: 173107 - DNA, 707 bp, Homo sapiens
tggagacggactctcgctctgtcgcccaggctggagtgctggagccttgacctcctgggctcagctcaagtgttcctctcacctcagtctgccaagtagctgggactacaggcatgcaccatcattcccaactaattttttaaaatttttggtagagatgggggtttcatcatgttgccaggctggtctcgaactcttgggctcaagcaatctgcccacctcgtcctcccgaagtacagggttataggcatgagccaccactcccagcctcagatttttttattgatgaattttattataacagctacaatactgagatgcataacccttccctttcctgatacccagttatcatctgtttctgtttaatacactccttaagtacctcacatttgctattcccctgccccccatggtctatgcatcttcttcattgaagtggtagtagtctttgttagctcatctggtcatgtcatcaattcagagcacattacctctttagttcagaacacattaattgcttcccataatcttcaggacacggccccatttcttcacgtggcttggccattgcttccctgttcagcttcccccacactccctcacctacaccttctgtctcagtatagtactgctagtctccagacatgccatgcctttttatgcttctatgcgtgttttcctgtctttaatgtccttgtccatgt

SEQ ID NO: 173108 - DNA, 637 bp, Homo sapiens
accttctgtattttaactgcttttgagcacatcttacatatgtgtttttgtgcagttggctcttcaggatataacttttagtcatattaaatagcatgtaagtgtctgttttagtcttgatcctattattcactagataatattcatttattccagttttggtcatccgcagattgggcaggcatacagtcttcaggtcatcaacaaaaatgttaaacagcccaactcttggtgccagtttccctctccctttgcctctctgctttagtccttgtggcctttttaaaaattacctcaaagtcaccgtgctgcttcctgtctcaggcacttttcataacctctgcctggagtgtcctccttttgccatttccctactttttttttaatccctaactctgaccattctgacctcaagtaaaatgttgtttgcccagggacttcttccctgatacaaaactaggtcaagtcccccttttataggctttcacagcacctgtacttgttcacctagcacttctcattttgtaattatacatttatttgtgtggttactgtctcttctccactgtattggatgctccacagtggcaagaaccatgtttcttttgttcactgttttatctccagaacataagca

SEQ ID NO: 173109 - DNA, 302 bp, Homo sapiens
  misc_feature (5)..(5): n is a, c, g, or t
  misc_feature (12)..(12): n is a, c, g, or t
  misc_feature (15)..(15): n is a, c, g, or t
tcagnggatccnagntatcagcagagaagagggtgtgaggaaaggaaagtgagtcgattctagaaacagccaaacagaaaaggtatcaaggaaagaaaggaacagaaccctccaaagccccctcaaaaacacaagttcaattctgataaggtactcccctgagtaaagttccagaaccaattctccagaaatgattcgtgtggtgtgaaaataattcaatctcaaaagacaattagctcttctgacctggcctaacctacgaagctgcacataatctctattacttctctgctggatacctt

SEQ ID NO: 173110 - DNA, 666 bp, Homo sapiens
tgctcctctttctaatgcttcttagcagatttgctgttattagacatgtagatttgtttgatagttaaattacgcttcctcactgccatgttttcgagaactaatctgttaaattatcttttgatgcctatttacatggaagggaaaagtgggttatcgattatataaacatataaatattaatgcatttgttcgcttcgcaaaaaaatactcagcaaaaaaaaaagagacaagtgagcagtgcacacacatcttaggatttcgcaaacaatattgaacggacagcgactgcatttagggactggaacaataaacgatgcaaaaaaaaaaaaaacaacaaaaaaaaacactttgttggggccggccttggggcccttggaaaagagttttattaaacaccattccggttgtgggccgcggggccccagtgatatggttaaggtagacacgttgggccgatatagggtggctccccaaggagaagaccccgggcccattggactataggcgtttgggattctcttccccaaattaaaaaaaccggcccgggcggaacaccagacgcggtcttggaaacaaatcccagaatagggagtccggaaggccaataacggggccctactcagaggagtccaagaaggctcgattatattacccgctgctggc

SEQ ID NO: 173111 - DNA, 147 bp, Homo sapiens
atttcatatttgttcaactttcatgactcttatgctgggaactcctagcataatagaccattagcagaatgtataggtgttgattaccttataagtcagtctgtctctgtctctccatttccatagaaatttagaataacatttcta

SEQ ID NO: 173112 - DNA, 493 bp, Homo sapiens
ttagtgtccccttagagttgcctaataggatcttagtgaactaacaatcataaacagaccaatagaaagaaaccttcttccttagaggaaaaacagtttcagagtcttggggtattcagtttgctcatgttgttagaatagtttcttttgccaaacactgaacattggggctgtgttttcttgttcaagaaggaggaagaggctatatgctaatgacagaaggcagctacttgcatgggtaatagactcaaaggaatgtaaatggctttcataaggcaaaatatctcgtgtataaacacttcaaaatctagaactcatatttcattaacaaagatattatttccttgtcttatttaaaactcacaagatattttaaaaattatgtttgatattgggatattaaagaaattcttttattttggaattttctcaagatgagacaaatgtagaattatgcatttgtttaaataccaatggaaataaaaaaatcact

SEQ ID NO: 173113 - DNA, 421 bp, Homo sapiens
atggtgaggcccggactgttgaatgttcaagttaattcatagttttaaccagaattcttttttcttgattttattatttttgattaaaattttggaaaaatagagctagatttttcataagtaggtctttaaggtgcttttaagaaattgcttttattagaagatatgttatttttgacatttttaaaatgtcaaaacttcaaaaattataaaaattgctgcttgtttttatgcttgaagaaaatttttaaacttttgcttattgatatgtaatatttgtgcatatttatgtgatattttgtacgtgcatagaatatgtattcaggacatttggggtatccatcatcttgagtatttatcatctctaagtgttgggaacatttcaagtcctctcttccagctattttgaaatatacagtgt

SEQ ID NO: 173114 - DNA, 195 bp, Homo sapiens
caccatgtttatcctgagttcttgccatttatcttctcatactgtgtccagatacattgaatttgtaattcccagaattcacaatactccgtctcgtctccatgcctttgtgtacactgttcctcaggctggagtgccctccttgcttttttgtttcttctatgcctttcatacctaggtcaggtatctcccttt

SEQ ID NO: 173115 - DNA, 424 bp, Homo sapiens
tgagggagaaaagggaggacatgagatcagagggtgagggcatgtggaaggacattctccacatgagatggagagaattgcagggtttggggtgggaaggaggaattttgtctccaggggacatttagcaatctctagaaacattttttatcatcacagcggtggaaaagagggtggagtagcagtatgacactaagtgggtagagggtacctttcaatgcacaggacagtgttttcctcccctccccagcaattaccgggcccacagtgtctgtggtgtcaaggttaagaaccctggtttcaagctcatggtgactaggtctgacttttgtgttaataggttcacgttggctatgttggggacaactttagaagaggaaaggcagaagcagaggcacccttgatccaggtgagaaataatggt

SEQ ID NO: 173116 - DNA, 349 bp, Homo sapiens
ctcctcccccatcatcctgcccatccctggcactagaccctcaccccagaactaaataagatgcctgattcagagcaggccacactgactaccaaattctggcaaattgtaaatactgtgaatggtcttgggccctctgcttccctgggccccttcttctctcggtccactccccatgcagacccctccttggctgtggggtggcatggacggcggggcctttaggcattggcattggggagagtgcaaacttggccctgattctccactcctagctcaggagtaggtcagaaaggcccagaatcgccctccagactgaaataaataacaaaataaataccccctcccc

SEQ ID NO: 173117 - DNA, 560 bp, Homo sapiens
cagggtgggctcctcattactgctaagtgggggaagaagtttaggctttcccccgtggcaatggagacctgtctccttacgtggccctctctgacaccaacccatgggagtgagacatgccctgtaaggggctttggtggccgtggaggcaaggaacagtttctctcactgtgtttggctggagtagcgtggggttgccgaaagtcttctgtctgcggaggctgtacctttggccctttggcaagagagcagtctttggttaggatttccaggttgctggcttctttatctccatttctgggatatatgtgccaaataaaacaaaatgaaacaaaaaccagggaacacacagtcatatagttcttttaaagcactacatggccaaagttttcagccagtgtgctttcttcttttcgtatttcagagtctccttatgtttattttgtacacaatatcctaggttttactaaatgggaagaataagaagaagtatgtctactatctttctattctaacaatattttgttattatataataaagtccattttaatattattga

SEQ ID NO: 173118 - DNA, 218 bp, Homo sapiens
gagccgcgtcccatttggatagcggatagtgggagcactccagttagaagaggagcatacagtaatggaagcagaaaagccaggagtgtgtgacatctggagtactaaggaagaaatgtttcaagatggagggagtaggcaattgtataaaacactgctaaatgaggattaaaaattgaccatgtgaccaagtgaagtagttgaaatttgataagaac

SEQ ID NO: 173119 - DNA, 490 bp, Homo sapiens
gccgtcacatgtcactggaaagctggagcacatcacagccgaccagaagcgcacgatgccatcagaatccagtgatctgaggaggttcccaatttcccagaacaacagccacgttgcactgtgacctatccttcagcttcctcaattggttctggtggtgggagtagagaagctgatggcatgactgtacttgttcctcgagagactcggtcttgctctgtgtttgtagacagggaggccacagcaataggctgcagcagagtggttgtcatgccagtggtgactgtcaggctgtggccagagcccttgagtgtaagatccggggtaggaaggagtggcttgaggatgctgacgaggcagaaagcagatccacttttaggaatgaaattcaccttgtttttgtcaggacaataaaaggctgggatttcatgaagctgttttggcctagacatagaacagacaacccaatgcttttaagtcactgaactta

SEQ ID NO: 173120 - DNA, 388 bp, Homo sapiens
gaagcatggaaagtctgtgctctggaaaagacactggcaccagcaaccctggattgctgtagaaaagggttctattttttggatataaaattatctactgtatcagaagacacatatgcagatttaaaacttgagcattacccagcagttttatgccctctaccctaaaggttagtgactaagtggttgcagcagtccaggcagtgggagaagagctagcaaagccactagcctgctccagaagagatgactcagttactggcatcttaagggccaagcatgtgggatcttgctaatggcaccctgctcacagtttctgctccacggttcagccagaggtctgtctaggttgtccagtgccaactggagcactggattaaacgttgag

SEQ ID NO: 173121 - DNA, 426 bp, Homo sapiens
gccctgggagtaaatattctgggacaggcacagggggtgtacagggaaagagtctttcctctctgtggcatctgggaggctttaggatgtgggaaagatggtctcctcatctcagttgcccctcattttcaggcagacacgtatgaaatgattacactcccctgaaagatcagcttctacataattcaagatcatcctcaatctctctcatcagagaggaagaaaagccgcatgaattatttacagaacactaagttatttccttttatgagctccaactttgtttttgtctctgcaaactgagattttgtttatccatgaatagtttccccaggggcatgaaaaatatgactcttaaattatgaatgaggttttttgtttcagtccatgttaactaaaacatgcaaaataaactatgtttttcat

SEQ ID NO: 173122 - DNA, 412 bp, Homo sapiens
tacttgcagttgctatttgaaccccaaaacaacattgcacccagccaagattttacctgccaatagcccaatttaaaatgtgtcaagaaacaggctatgcctaaaagcaaaagtcagctgtaaataataaatcttaaagaaacaattgtgtggccgggtgcggtggctcacgcctgtaatcccagcaattcacgaggccgaggcaggcagatcatgaggtcaggagatcgagaccatgctggctaacacaatgaaaccccgtctctactaaaaatacaaaaaagttagccgggcatggtggcaggcatctgtagtcccagctacttaggaggccaaggcaggagaatggcgtgaacccgggaggcagaggttgcagtcagccgagatcgcgtcactgtactccagccttggc

SEQ ID NO: 173123 - DNA, 536 bp, Homo sapiens
cagtacaaggcttccaagatggtgtgttctcagtaatcacctatttccagcaggaaaaagattgtctttgtcacattttctcttatgtgtgggagggaagttgatctgtttggcggctgccttctttgtcagttctcactgaaatttgagacaaaggtgggaaagctgagggtttcaatactcatttttgtcctgagctgttgacagtccactagccagaaagaagttaagacttctggaatcatagcatcatatggaatggtcatttactgcacaaaatacatagaaaccttgtatttattcatttaacaaatatgtgtgtatagaccattcattcattcacttattcatgccaggtaccatgctggaccttgtgaaatcattggtaagttaaatggatgatgttcttgttctcagggaacttacagtcttgtggaaaggcagacagtaaacacatcctataatgataagttatgataaatgctctgaaggaaaagtataggatactctgagaggttttaggaaacaaaatgtga

SEQ ID NO: 173124 - DNA, 336 bp, Homo sapiens
aggtgacaatccatcacttgccatattctctttattacaagtgagtcactggacccaccacatattcaagaggaaggaactgcacagaatgtgaataccaagtcacgggtttggggggaccattttaaaagcctggttaccagaatctcctgtccttttctgagcttgtgtagctagtgtcagagaggtggattgctggtttccttggttgttgaggaactgtggagaaatgtgtcggaagtgcccttagccatatggtaaaattcccggaagtagatatgctaataatttgtcagctattcccttgtgagacttttctagatctctcttccatcc

SEQ ID NO: 173125 - DNA, 342 bp, Homo sapiens
cctcccgagtagctgggacaacaggcgcccaccaccacgcctggctaattttttacatttttagtagagacagggtttcaccatgttagccaggatggtcttgatctcctgacctcgtgatctgcccgcctctgccttccaaagtgctgggattacaggcgtgagccaccgcgcccggcctcttttttcttatcctctgacttgggtcaggtactgacctaggtcttggctttatcacttattatagggtatgtgactttggacaagctgctctctgaacttcagcttctccatttttaaaaggtagaaaataatattaatactacccatctgggagggttc

SEQ ID NO: 173126 - DNA, 162 bp, Homo sapiens
cggcttagctctgtcccttggggtcctgctgactctataaactttcaactcctaaatccaatgctggctcacccaggaaagaaaaaagcaaactgaacaataaaattcaagctgtagcttccgttgtgactcaagaataaaaaatgttaatggccaacagca

SEQ ID NO: 173127 - DNA, 238 bp, Homo sapiens
gtattattgtggctgtcactcaggttttctgctcattggtagacaaagggtgaggaggtgactgaaattggaacagtggaaggacccttcaccaaaacctggaacttcagaagaatggcagggctgaaaatgattagtgttaattcattccagttgtgttaccctacccataagactgcctgaaggagcctgaacttccacgtgctgtcttccatataatgtgatctgaggtgaagag

SEQ ID NO: 173128 - DNA, 156 bp, Homo sapiens
ctgcaacacttgttaaatctgagatggctgggtttccacttccagagtttctgaacctgccaatttttggtgcagcttaataatttgtatttcttttctttctttttttttgacggagtttcactcttgttgcccaggctggagtgcaatggtgca

SEQ ID NO: 173129 - DNA, 493 bp, Homo sapiens
actgcactccagcctgggtgacagagctagaccccgtctcaaaaaaaaaaaaaaagaaggtggtgtgggctcccacacagttgagaggagactcctgaggggaaggggaaacagttgcccagatctgctaagagcgttggcaatgcttctgcctcctcctctgttgagcctgctcctggaagggattgacaaaatagtatgaaatctagaaatagctttattcccaaagaggataccggtggtgttattgaaaagagcaaaaacttggaaagcacctacatttttaaagtaaggaattggtgaagtcaatagttgtacatccatttaacaattatttagtagctaattggacaattatgcttaagaagttttcagaaaaagtttataaagccatgttatatgaaaaagttaagttataaaatggcatatactgtataattataactgctccccacccccaaaaaagccaaatcgtagtggaaaatgactagga

SEQ ID NO: 173130 - DNA, 114 bp, Homo sapiens
ctcttgctccttaggcaactaaggttttcaaaccagtgccctagcttatctgatagttaactgtcattctctgtattatttgggaaaagttcttacatcagtaacatgaatttt

SEQ ID NO: 173131 - DNA, 286 bp, Homo sapiens
acttcacattctcacaatctcagaaaataagaaaaccagttgctaatgtattattttcattttcactaaaaaaaagaaaaaaaaattcccaatttgtctctttttgctttcataagcaaatctagccatacacaggtaagaaaagaactcctcaaaagatatatatataagtgaaacaatgcttcctgagttagagtacaatcaatccatcagaaaaagataacttattgtagcaatactaagtagaattatataataatgtggcatgtacatgacaggaacaaca

SEQ ID NO: 173132 - DNA, 206 bp, Homo sapiens
tagctgggctttcggcttggaggagcccaaggtgcagctttcttcggttgtccagaatccaggtttttccaaaaccaatcacctccaccatgctgccaaagttcaaccccaacgagatcaaatttgtatacctgaggtgcactcggggtgaagggggtgccacttctgcactagcccccaagatcggccccctgggtctgtctcca

SEQ ID NO: 173133 - DNA, 990 bp, Homo sapiens
actgagaagctcagcggtagcttttgggaagcaggacgttctcaccaggagagcgtcctctcgagatttctgctccctccattcagggcgtttgggagccaccccttcattttttaaaaaaagtatttctctgtgaccgacggccggggccttctgacggtctgaggtcttgcttgggccagtcacctcctgtcacggtccgcggaggggggaaggataagagggcgaggagctcatcgctcgccacccccgtgggcttcttgggcgcaggtcggagctgggtgggccggctccccggcccctggcttgggcgaccatgtccgcatccgcccagcagctggcggaggagctgcagatcttcggcctagactgcgaggaggctctaattgagaaatggtagagctttgtgttcagtatggacagaatgaggagggaatggtaggcgagcttatagccttctgcaccagcacacataaagttggccttacctcagagatcctgaactcttttgagcatgagtttctgagcaaaagattatcgaaagccaggcatagtacctgcaaggacagtggccatgcaggagctagagacattgtttccattcaagagctaattgaagtggaagaagaagaggaaatcctcttgaactcttacaccaaccttcaaagggttctcagaagcgagctatctctaccccaggaaacccccctaacaaaaaggagtgtgtcaacctcgtaggcccccatcagctactctcaccgtcacgtttctctccaagtgctaatccctcccagaaatacaactccacgaaggtaacccgaggcccaaagggttacctccttcggcttagccacaaggacgtatctggactgggacaaggaggagtgggaacacataagccgaaggcctcggatgtcagagggcctaccgggacgctaaatccggttcaaacgccccagacaatcgaaaggccagacacgtacaacgacg

SEQ ID NO: 173134 - DNA, 655 bp, Homo sapiens
ccgagattgtgccactgcactccagcctgggcgacagggtgagactctgtttcaaaaaaaaagaaaaagaaaaaggataaaaaaaaaaaagagaaaatataagaaatgctgatgagtcctgctcaatgagccatggttactttgttccctcagtggagcaagttgctactttcaaggcggggctggggttccaaaccccttatgatgactgtcacacacattcttagtagatgcccgattctgctccttgacacagatttaagcacggcgtctggcacatagccatatgttccacagaaaccctccatccgcttaatttatgcttttggcatctccacctcgttatcagactggagagggtggggactcttctcactcagtgcaacaccgaaagtatgccccgtgctctgtgctaaatgaagaaaaaccaagctggcatctcagaggcgctcctgttcattaaagcctcccatcacagagaacactggggcagtgacgcacaggctgccacagggccctcacccctccagcctctgggttttctaactaactgttccaagtcagtgttgtgggtcaccaggaggcaaagtccatggccagcccactgcaccttcccagtggccagtggccataccaaagtcgccttccaggtaca

SEQ ID NO: 173135 - DNA, 1147 bp, Homo sapiens
  misc_feature (4)..(4): n is a, c, g, or t
  misc_feature (6)..(7): n is a, c, g, or t
  misc_feature (938)..(938): n is a, c, g, or t
ggcngnngctggggacggtgcgcgcggcctctcgcagctcctgccaagccgggcggaccgagcgcgcccgggacgtccgcgcgcatcgcccgtgcaaagtgtgccgggcctggcatctgctcgcggctggagcccggccagcgccactggctcttgaggcacccgaccctgaggggaagaaagcctggactcgccccgaggtcagacttgtattgtaacccaggtctcagatgaccatccccggggctctccaaattgtcagttccagctgctgatttcaggtgtccccggaagcagccggtggggccaccgtgggtttctggtttctttttctcttcacttaaaagaccccgccacgaccccacgagcgcaaagacaaaaccatgcgtacattttattcttgttatttattggccaaatctccgtggaaatgtaaaggatgaaaagagagttcgccgacaacgtacggtcaccgtcacgccctctgaagccctgttaattaccctggcgcccgcgtgcgcccgtccacctgcactcaccggttcacagctgtggacgcggacatcctgcggcctttcaaggctgagagccaccacgcaaggttcggcttaatgccctggcgcgtgggtgcgaatatgcgaggcacctgacacagaaatgtctacggagcagagaaagaccagagaaagcggccgcccagtagaccttaccggctgtccggcatacaggagttctaagtcctgacgccagcgtccccgggaagtagagaaaagcgtgccttgcgtgcctgggaaaccagagcccaggatgccgcatggcctggagaggagtttgctcagggtctccactcaactcattttcctcccgcaaccacgcggaggaaaattctgaagatggattccctgagacctagcaactacttgaattccccaaaagangctttcatgtctccccagactgagtttctagcctcaggaaactacgcctccgcctccgttgatttctgccatcattctctctttctctctccttccttccctctcccttttttatcttcctctctccctcctctaatataaaatgacactatcaattcctcgtattcataaagatcagtttgccacagttcgcaaaattgagcctcacc

SEQ ID NO: 173136 - DNA, 181 bp, Homo sapiens
ggcaaaactgacttcaaagtgtggggagggttcctcttcccgggacgcagccttcccgggcattggcagacggtgccccggttagacagagccgctgaccaccccgccaccccgaggctggacgcacggatgcacacctggtcctgggagagacaggcgccccttcctttccgcaccccgc

SEQ ID NO: 173137 - DNA, 409 bp, Homo sapiens
tacaggtttgagccaccacacctgactgattattcttatattttagggagtatgatcaatacttattagtggtcagtgatagtggagaatggtaatatcatagacaaaagcaaaccacaaaacatttgaaataatttaaaaatagaaaatactaggatttttctcccctgcttgttcagttaatatattcatgtggtagacagttttggaaatatatataatctcttcatatagaaataattcactgttaaaatttggatgtgcttcctctaatctccgcattaattgatatttatgtatatgtaatatattcagcatactttttcctctattgtttgatatttaagcagtttctgtttttcagatggctttcttcatatctttggtaatatggacatcggtatacgta

SEQ ID NO: 173138 - DNA, 503 bp, Homo sapiens
aaaggctcaaaggtggcaacttttctcaaaattatctttaccaaaaagagtaaccatgctcttcttgccccattttccccatttctcacccccgtctcaacaagattcctggtaggttctggtgaccggggctgagccacacacctatgctctaaatgcaaaggaggttgggaaagtgtgtgcctggcatttccagtctccgtgtgagatggtagagtctgtctgcttggaggaagtgtgggtgcaaagcagggaagaagtaagtagagtgattgctgggtaggcctccaacacggtctttcaaaacaagaaaagaagaaaaggggagttattcatggatctcatgttcaggacctggcacagtgctttgctttctgcattgcaggcattcaattgatattttttgattgtggaatcattatcatggaaatagaaaatcaatgtcaggtcaggcgagtgagtagtgaaattaattattctttccaggccatgactagatgaca

SEQ ID NO: 173139 - DNA, 721 bp, Homo sapiens
ccccaccaacaacattatgaggtaggtattagccccattttacagataaagtaactgaggcttaataacttacctgtgatcacacattagaaagtaggggagccagcgtcccatccaggcttgcttgactctagagccagcgtgatctaaaacaccataccgcctttggtgatgccttcttcagacaccaaagttgcattattactctacaacttgagaaaaactttatttttatcaacggatgcttgcaagttagtacttaccttttactttccaatataatgtacctttaaaatcaccttataaaatcagccagtgttcctgaattatcttgctagtgttccaccaataaccatcccctttactgtcatgaaaacagcttggcaatatcaagtgtaccaaactgtagaccgaggatgtcaggttcctgttcacaacaagtaaaatgtatgcttaaagtatattgtgaaaccaataaacctctcagtggcttcatatttgtcatgtgggttcctgcatgtgcaatttaagatttcccattgctttcaggagctgttgaactcctgaaagaagtaactaaacattttgttattaagaattaaacaccaagtgatagcaaaatcaaataataccaagtttaaccctaggaaacttgttaaataaccatggtactttcataaaatagagtattagactactacttaaaagagtaaaatagact

SEQ ID NO: 173140 - DNA, 341 bp, Homo sapiens
tgtgccgctctgaatcccctttaattgtgttgaataatccttttaatttattagttagaatttggtttgctagtattttgttgagggttttttaagtctgtagtcatcagagatattgacctgtagttttcttttcttgtagtgttcttttctggctttgttatcagagtcatattggccttgaacagtgttttcaagtgttcaacaagaacacttggccttgttcagtgttttctatgtaaaacaagtttggaaaaattccctgcactttgaatgtttggaagagtttgagaagggttggtattctcaatccttctttaaatgttctttaagtgtaggtt

SEQ ID NO: 173141 - DNA, 315 bp, Homo sapiens
ataaggccaacacaaaaacttgatataaagaggaatttattaatttgtgagcagcaacaagaaaaaggcaatttctagaataatgtaataagttctttccaaaaaagctcttatttcatgtgcagtagtttatttttgtagcttatatgctagaaaacattgaaataacttatctaagtgagataaaggtagtattctacttatgctattatagactgtcttacattggtctggaaagatacttagtttgaaaaagaaattttcaaatattgaaatggtttatgatgtaactgactaattttggttcttttggat

SEQ ID NO: 173142 - DNA, 519 bp, Homo sapiens
catatccaaattgtaagggtgaagaaaaaccagatgcagttaggatcttctcacttcccaaaactggattcaggtgaccctttgctgcagccgctacccagagcaaatgtaaatcctctctggactgatcttttgagttatttttataacttttcatgtttagtgttggaaagttatttaaggtatctgaggaaacaaggcaacatgatgaaaatccgaaagaagcgacagatgatgggacagagccaccgtgcccagccataattatcacttttaatgacagcataaaattccattgatagatattatttattggactactgtcccccaaataatgtgaattttaagttgtttagagattttcactgtgataataatgtcaagctatgccttcgcttaaccttgcatcctcctcaaagtgctcccatatctccatttcattcatagccaggttttctctttcatttacttgtcaaatcattccaatctggatcccatctccatgactctcccaaatta

SEQ ID NO: 173143 - DNA, 376 bp, Homo sapiens
tattagggaattgtggatatatcccatctggccacattacatagctctctggctttttggagccagaagtgtgtctgtctttcaagccttttttttcctctcttgggaaatccctgttcagtttggtctgtagaataagtgccccttatgtaattttgtttttcctttttagtgtttgagaaactttcaaaaagggaacgcaaatattgtagccaaccagagtgactctgtgcctcactccccaaggattcagaggatttatggcttatctgtaatactgttactgaccaattcaaaaataaagattccagaaacctgagaccttatggattctttataaggttgactgataatttttatgcagaatagcaatttg

SEQ ID NO: 173144 - DNA, 210 bp, Homo sapiens
ccagttctccaccccaaaaagaggtggggaaaagaaggaagtcaggcaagcttggcagattgattctaaagttcatctggagaaataaacatgttaggcctgccaagaaattgttgaaaaagaatgaggatgaacttgccctatcagatatcaatacacagtataaagcagagcctggtaaactctgtatgaagggccagattgtaaata

SEQ ID NO: 173145 - DNA, 150 bp, Homo sapiens
tagagtaggttcttggaagaacgaaatcctattaacttattacaaaagttatctaagtaagatatctaaatgcctactacagcattacactgggtaacagaaatcttgccttcaaaggcctttaacacatttcaataatttactaaatgc

SEQ ID NO: 173146 - DNA, 618 bp, Homo sapiens
tagctgggcgtcgtgaaggatgcctgtaatcccagctacttgggaggctgaggcaggagaatcgcttgagcttgggaggcggaggttgcagtgagccaagatcacaccactgcactccagcctgggtgacaactgtctcaaagaaaaaaaaagttgcagaagaagttcttcaaggggtccttaggaacagcctgctccactctgacctcccgtgaggacgggaaggggacccacgccacgcagctgtgggcagctctggctctggccgtagcggccacagtgtcctcacctgcagcgcagggcatagagggctgttggtgtggggccaagagtcacacacttcctccagtctgagcccatgaccctttagaggaaaggaatggagtatttttcctgccttttctattcaaacggtactttagaataacccaagagtagataaaaggcagtgtctcagcccagaaatgttcatcaataagtgaagaaggagcaggatggtcagaataccacccatcaggtgcaatcctcataaatcaatggatgtaggcatggattcttgacagctgctggggtcacgaaggggagagagttaggtgtgaggtgagccctggtgtgcac

SEQ ID NO: 173147 - DNA, 553 bp, Homo sapiens
ataaagtccacgattatagttgacgacatcaactatctttgtcagaaaccaatagaacaagtaggcagaaaatcagtaagaatatagaagacataaacaatactaccagctgtctgacctaatgaacactggtagaacaatttatgcaataaaagcagaatacagttgacccttgaacaacatgagattgaattgcatgggcccacgtacacccggattttcttctgcatctgccacctcttgagacagccaagtccaatccctcctcttcctcctcctcctcagcctacttaacatgaagacaacgaggaggaagacctttacgataatccacttcacttcatgaatagtaaatatatttcctcttccttatgattttattaataatatttcccttcctgtagcttactatattataaaaatacagtatataatacaaataacatacaaaatatgtgttaatcaactgttcattaaggcttcgtcaacagtgggctactagtagttaagtttctaggaagtcaaaagttactgggtttttgagcatggtgcc

SEQ ID NO: 173148 - DNA, 343 bp, Homo sapiens
cgcctggccgatgaaatgttaagttcaatattttaggtcctatgagtagagaggagttaggcaggttcctttcatggaaagcctaagctctgttaaagaattcctctaggagagctactgaaggattttcatcaatgaagtggagtaccaggctcatattcacatttaaaagagaacctagggccaatgttcagaaacagattttagaaagacaagagaccaaagtataatctctaggaagacaaattatgtgactagagcagtacatatacaagttaaaactacagtaatcgagacataaggaacaacaaatagatcaatgaaacaatacaagcaaacagat

SEQ ID NO: 173149 - DNA, 395 bp, Homo sapiens
ccaggcgctgacaaaaagggtcatgtccactgaccaaaaagaacaaacagcctttcttttggaaaggtttggaagccacaaccatgcctgttgaggtccaggtgaagaaatgaggactgttcattcttgaaagggagataattataaccatgcagcagagacttcatttacctggtacttgagtaaggcagcggtcagaagggagtttttgtttttgcttgtttgttttttttttagacagggtctggctctgtctcccagaatggagcacagtggtgcaatcacggctcactgcactccagcctgggtgacagagcgagactgtgtcaatcagtgaatcaatcaaagattttagctatttgatacaacaaagtactactatcacaaatatatta

SEQ ID NO: 173150 - DNA, 1289 bp, Homo sapiens
gagtagatttgttattgtttaaaacttactaatacttgagagaggagaagatgatattcctccaagattacctttttcttcagacagacacctcagaaagaacccttttaatacttcatttgtactgcatttcttcaatttgatttgattgtaatggctcttaagttaggtcaaacttaaaggggccattttacagtgaacaaagtgagagtaagtccagaaaagcctgcatgtgagggtgggggtgcttaactccagataagttacttgaatttgctgtagaacacaaatgatagattgtgtggttgcggggctggcacaaggatagaggaaaatgctctcctttggggaagaagagtgttatggcagggccatttctctggttatctggcaagaagatcagattagaatgcctaatagggaaactctaaacttaacaaagggtaaacaaaagggctagtggtagaggcaggcagcatggaagaggaagggaccagacaggtggtttagagatggtctgtgaaacaacccatggaactgtgaagtgtttcatttattcaacaagcagttattgaacccctgttcatatgccagatactttcctaggtgatggggacacaaagatgccttagaatggttaggaagacattctagtaaaaacaacgaagtaacggtttaaaaaaactcagagcagctcagtcatgccttaggagagtgtgcagagtgcttggaggagcttaatgagatggtacaaggattcaggcatgttttacctgctaacttccaccctgctctctgctggtgtccatctccatgttcacttttacagcctacacctttcagttcaatgaaacttttggctaccctcaaacatgctgtactgtcacgtttaaataattttggtttttattgccaattagcctggaagttttattcttttgaattaatcttcacatgttgaaatttgccagaatgaaaataaagatttggccaggcatcgtggctcacgccagagtggccaaggcaggaggattgcttgagcccaggagttcgagaccaggctgggcaacatagtgagaccctgtctctatttttaaaattttaaaacatatttgaggtgcctatagtccagctactcgggaggctgaggcaggagaatcgtttgaacccaagaggtggaggttgcagtgagccaagatcacaccactgtactccagcctgggccacagagcaagactctgtctcaaaaaaataaataatactttttaaaataaagtaaaataaagatt

SEQ ID NO: 173151 - DNA, 329 bp, Homo sapiens
ctcagaagattacttgtgtcatggagaaaggcctttgctccagatgaaatcacagagtgttgggactggactacatcttagattccactttgtgcttgagaaaactcaggcccaaatgggttaagtaacttggatctggtcagccagctagttagtggcaaagctgaactcatgaatcaaatgtaactttcagccaaggctttcccgttatacctcctcttaacttcctatcaagccatttaaaagagaagtgactggagaaacaaaataagggcaatagagcgaaacacttaataatcaatcaccctgatcccttgataagtggtata

SEQ ID NO: 173152 - DNA, 692 bp, Homo sapiens
aggagaatgcttgaactcaggaggcggaggtgcagtgagccaagatcatgccattgccctccagctctgggcgacagagcaagactccgtcttggggagaaaagaaagaattgtcttacttcttttctcactctgcatggtctctctgctagcttatttacatcagtaacctcaaatgcaaatggcttacatcaaatctatagctcactccggacccctctctgcagttactgcccctgcttggcatctctactcagctctctcatagatactgaactcaccttttgcctaattttgcaaacctggctcttttaggtttccatctccattagtggctccacagttcacccagtctttaaagccagaaacttctgaagttattctagactcttcttccttagcttccacaccaattactggtcacacaatcctaattgatctttcctcagatatctaaataaataactcagatccatcccccgtttctcctttcccacaggtgctttcttagttcagaattttgtcgctttatacctgcgttgctgcaacagccttctactttccttgcctctaccatgagtatctctcattctgtctttcaaaaacactgatctgaaaatttcccttctgtgtaaaattaacgattctttgtagctggcagaatacagttttgtatggtacgtcgttagcat

SEQ ID NO: 173153 - DNA, 664 bp, Homo sapiens
aggagaatgcttgaactcaggaggcggaggtgcagtgagccaagatcatgccattgccctccagctctgggcgacagagcaagactccgtcttggggagaaaagaaagaattgtcttacttcttttctcactctgcatggtctctctgctagcttatttacatcagtaacctcaaatgcaaatggcttacatcaaatctatagctcactccggacccctctctactcagctctctcatagatactgaactcaccttttgcctaattttgcaaacctggctcttttaggtttccatctccattagtggctccacagttcacccagtctttaaagccagaaacttctgaagttattctagactcttcttccttagcttccacaccaattactggtcacacaatcctaattgatctttcctcagatatctaaataaataactcagatccatcccccgtttctcctttcccacaggtgctttcttagttcagaattttgtcgctttatacctgcgttgctgcaacagccttctactttccttgcctctaccatgagtatctctcattctgtctttcaaaaacactgatctgaaaatttcccttctgtgtaaaattaacgattctttgtagctggcagaatacagttttgtatggtacgtcgttagcat

SEQ ID NO: 173154 - DNA, 259 bp, Homo sapiens
agctgtatagctaggtattcattcattcagagatacatttttgtaaatctgtagtcattctgctagttattcagttttaatacttccatgtgaatatatctgaaaagtttatgcatgattacatgttctttatgccccaattcatgtgaaattcctcttgaccattattttgggatagcagacttttgtttctcttgcattttgtgattttctctttattgcttagtgagctaactttgctttatcctttctttgatag

SEQ ID NO: 173155 - DNA, 540 bp, Homo sapiens
acatggtttctacctttacattagaaaagtgtaagtttcttgtaaaacagataaatcttataaattaaaacttgttagattttatcttctcaaacttgggcatgcttattctttactcctatgctcatgatctctccctctctctccccctgttaaactgttgaacacaaaggacataaagttgttgacgtaaagaaagaaactgaggcaaaactgataaagcagacagtttatttaggccaaatttgaggactgcgacctgggagacacagatttttttttgttttgttattagaatctagcacatcttgagagacacagagtcaagttgcctggaatatatgctctgattagtattacttacaagtgggttttttaagaaaaaaagaaaaggtagttcctaagttgaacatgagctatcgattgacacgttgaaattgtaccacaaattcaaggaatacgaagataatgggtgatagtcactgtgcaacttgggatagctttcaggtaatttatcagctagtgtagaaactacaggga

SEQ ID NO: 173156 - DNA, 656 bp, Homo sapiens
cgtggcggcctatttgactcatgctattgacatcagtaataaaatactaacataaaagctgatagagccctatactcttgtcaggatctgtgcattgattatagcattcatttctaacaactactttgcatgctaagcaagccatatgcacctcctactgtttgatgttagtcaaaaccaaagtctttatgaaaattgatgccactcaatgcaatttagcaatcatctataaagcaactactatgtgccaggctcaattctagccataaacactcggggtacatcagtggggaaaaaatacagacaaagatctgttcttgttaagtgagggaaaatagaaaagaagcaataaccagaaaatgcaaggaaattataaaatatggttcaatgagacaagtgctgtataataacaacaacggaaaaatggaactgcataagagaaaaatggcaatggagaaagataaagtataaaattttgaacgaattgctcagggaaggttttatgggaaagtgacatttgagcaaaggtcagaaagagacgagactgtgagccctatagctatctgggggaagatgcttccaagcaaagagaataggtgggagcatgcctggttcattcatggaatgccaaggagtacagtgtgactggaaggtat

SEQ ID NO: 173157 - DNA, 493 bp, Homo sapiens
tggttaaattaccttatattcctgtgcttatcttcaaataattatagtaatgtctatctcattaaatttgttatgaggattatatgaatcaatacacacatggtgcgcaaagcagcttgtgactcacactgtgaatttaatgtgctcactaattgctgtgacttcttgcattagactctcctgggcacgaatctgaactccattataaaccattgcatgatgttaggtcatcatggactcttgtggatgttagtgtcctaatccacaggaacccagaactgtcaggaatcctgacggaggcagactgaagctccgagaagaagaaacatgaatgcactttttaagtgctaaataattgtatgtttcatgctgtaattttcattgtttgtactgaataataaaatgcagaaataatctcaaagtcacttcaatgattttaaatttctactaaatctaagggatgcaagacggaaactagctaggagtcacctga

SEQ ID NO: 173158 - DNA, 351 bp, Homo sapiens
ggggacgcgtcaccagtcgtctcccttctccatgacagagtccggatctacgtggctccttccttgtgccctcagatcgaaatatccattgagcatccaggatgtagcggatctcatcgtccgtgcggagcgtccgatctgagtatcttattttgacctcgatctcccttgagttttaagtccttcctttaacaagacaatcagtcacctgcgatagataattattttcagaatagtctagtttgtcattttgtacaatagtttattagtatctaaaattcttctgaatagtaaatactgtcaggtgttaacttgagatttgaatactctcagagagtctgttggcctagc

SEQ ID NO: 173159 - DNA, 312 bp, Homo sapiens
tggacaaggctaaggtgttgtgttgctctttgaattactatagtatctgtcacagaatttggtacaaataggaaaaccacattataaggcatctagagaatccagtgccccttctagtcttggtaagattcttagcctagactttataaagaggtgatattgctctgagaagatccaggactacagaccacctgatgtgcagtgattctgtggcagaataaatgacacatgcaccacgtaaagtattgctaaactgtggtgaggtatttttggtctgttcacttattttaaagtatgcctgtagttgactag

SEQ ID NO: 173160 - DNA, 211 bp, Homo sapiens
ccttctgcttctgccccaaggtgcccatttccccactccgctcccccttccctgtcacggatcaaaatctcacatccaaaccctctacctccctttccagtttctgattctaacctctcatctgcaaaataaggtacccatctctggcctctgcttcctgcttctgccaggcttttttttttttaaatttattattattatttttaagaga

SEQ ID NO: 173161 - DNA, 1302 bp, Homo sapiens
cggctcccgaagagaagggccgagttgcccgcggctccggcccacagcggccccacagcttctccgaggcgttgcggcgcccagcctccatgggcagcgaaggcctcggtggagacgcagaccccatgaagaggaaaccctggacatccctgtccagcgagtctgtgtcctgcccccagggatcgctgagccctgcaacctccctaatgcaggtctcagaacggccccgaagcctccccctgtcccctgaattggagagctctccttgatgccctctgttagggcccaccccaatcccagggcagaaggacatgagggagcaaagagcttgaggaatgccatactccggctggtccgggacatggaaattcggactcagggaggacccgggctgggcaatgactgggagacttgcctgggttcccaggacttgggggtcctgactcccagccctcatcctgccttacccctctgttcccagccccagcctttctaagccattgggaatagaatggccccttttgttctggtgtccaggggtgattgtgccaaagctcttatttccagtgccaagcccccagaggcttgtaagagttgggatgagggatggagagggactgggtctctgggaacaggttggaggtcttatctgtggactgtctgactcccagctgaggccaagatggggcatgtccccgtctctgcttagcgtctgggtgagaaaaacaggctgtgatccagaagaagggaagatagagaaggagggaaaggatgtaggcgaaggaggtgagagacaggataggaggaaggaagtggaggaggaggtgataggaattggaaggaggtagaagccgtgcagaggaagaggggagagggacgaaggaggagcgatgaagaagaggagggagacaaaaagagggatggaggagagagggagtctggagaacaaagggtcctttctctggggaggggtgcagtgggcggggctgacactgtcagccaatcctcccatcggggaagagaatcctggacagggacaggatggggagggtatttataagggctttttggtgggagatgggtacccagtgggggccactggagggtctccgggcacactctggcccttcccagaaagggggtcgtttttctcgaatcttcaaccagttgtgtattggaaactagggcgcattttactattgatcacagtcattatattgttattatattactatttttattaaacctccccccactgaagtgtggggggcaaaataagtatttatctcctcaaatgccaca

SEQ ID NO: 173162 - DNA, 348 bp, Homo sapiens
  misc_feature (49)..(49): n is a, c, g, or t
ctggctcctccatgtcactgctctggtaacctgacgggtatcatgcgcngccatagtctgttccctctcccctctgcaggtataattcaggaagacatctttacctcctctctctccccaccctctctgcccaccttcaacgtcatcgtcaaattgttttgatacagcctctgaaatctattctaaatatatgtccttctctctattccctctgccctgggtccaaccccagccctggtcactttctgcaaatgcctcttaaactcccctgactcctgtcctcctcacacagccaggagcatcagtctaaaggacctcggatggggtcctttcccggccaaaaccccc

SEQ ID NO: 173163 - DNA, 202 bp, Homo sapiens
tggtacctaatacaatgtaaatactatgtaaatagttgctatactatattttaaaattagtgttctcttttatagttgcattatttcgtgtgtgtgtgtgtgtgtgtgtgtgtgtttgtgtgtgtgtgtgtatgtaaatatttccaatccatgattgattgaattctgggatgtggaaacctcagataaggagggctgactg

SEQ ID NO: 173164 - DNA, 2435 bp, Homo sapiens
ggcgggcccagcgagcggacgccgggcgcggcggcgcgcggagaagtgcggcggagcggcgcctgcattagcaggtatgcaaagaagccttttcaccctgatgtccttagagataatatggatcagtccagagttctcctctgggtgaaagcagaaccctttatagtgggtgccttgcaggtcccccctccatccaagtttagtcttcactatctcaggaagatatccacctatgtgcaaatccgggccacagaaggagcttacccgcgcctctactggtctacatggaggcacatcgcttgtgggaagctgcagttggccaaggacctggcgtggctttacttcgaaatatttgatagtctttcaatgaagacacctgaggagcgcctggaatggtctgaggttctgtccaactgcatgtctgaggaggaagttgaaaagcagagaaatcagctttcagtggacacgctacagtttctgctcttcttatacattcaacagttgaacaaggtctccctaaggacatctttgattggcgaagagtggcccagtcccagaaacaaatctcagtctcctgacctgactgaaaaatctaattgtcataataagaactggaatgattacagtcaccaagcttttgtctatgatcatctgtctgatctcctcgagctgcttttagatccaaaacaactcactgcatcatttcattcaacccatagtagtctagtgtctcgagaagctgttgtggcgctcagcttccttattgaaggtacaataagtagagccaggaagatctatccacttcatgaacttgcactgtggcaaccactgcatgcagatagtggcttctcaaagatctctaagactttctctttctacaaactggaaacctggttgaggtcctgtttgactgggaatccatttggtacatcagcttgcctcaagtctggaaagaaattggcttgggctcatcaagttgaagggaccaccaaaagagctaagattgcttgtaatactcatgtggcccctaggatgcaccgactggtagtgatgagccaggtttacaagcagacactggctaagagctcagacactctggcgggggcacatgtaaagattcatcgttgcaacgaatcttttatatatctgctctctcccttacgatctgtgacaattgagaagtgcaggaatagcatctttgtcttgggccctgtagggactacacttcacctccacagttgtgacaatgttaaagtcattgctgtttgccatcgtttgtccatctcttctacaacaggttgcatctttcacgttcttacgcctacacgcccacttattctctctgggaaccagacagtaacttttgccccttttcatacacattacccaatgctagaggaccatatggccaggactggccttgctacagtgcctaactattgggataatccaatggttgtgtgcagagagaacagcgacacaagagtcttccagcttttaccaccttgtgaattctatgtatttattattccctttgaaatggaaggggacacaacagagatacccgggggtcttccatctgtatatcagaaagcactgggtcaaagagaacagaagatacagatctggcagaaaactgtgaaggaggctcatttgacaaaggatcaaaggaagcagttccaggtactggtagagaacaagttttatgaatggttgattaatacaggacatcgccaacagctggacagccttgtaccccctgcagcaggctccaaacaagcagctggataaggatcttacatgcagacactgggccctggaaatacaaggataaatggaggatggtgctcatcttgaaacttgaaactaaattgggaaggtgctattgctgcttaagagacattgggacttttctgtcttttttttttttttttttttgaggcagagtcttgttctgtcgcccaggctggcgtgcagtggcgcgatctcggctcactgcaagctctgcctcccgggttcacgccattctcctgcctcagcctcctgagtagctgggactacaggcgcccgccaccacgcccggccaattttttttgtatttttagtagagacggggtttcaccgtgttagtcaggatggtctcgatttcctgacctcgtgatccgcccatctcggcctcccaaagtgctgggattacaggcgtgagccaccgtgcccagccttctgttctatttaagaactttgatttccattccattttcatttattactgtttaggccgaattttcgctaaacttctgactttcatataaacatattgcttatagaacatcagaagactcatctttgtgatgcccaaatgaaaaagttggtgaaggtagtaccattgtatgtatgttaatattaaagcaactgagtgtagatttgcaactata

SEQ ID NO: 173165 - DNA, 967 bp, Homo sapiens
  misc_feature (66)..(66): n is a, c, g, or t
  misc_feature (854)..(854): n is a, c, g, or t
aaggtctccctaaggacatctgttcaactgttgaatgtataagaagagcagaaactgtagcgtgtncactgaaagctgattttctgctcttcttatacattcaacagttgaacaaggtctccctaaggacatctttgattggcgaagagtggcccagtcccagaaacaaatctcagtctcctgacctgactgaaaaatctaattgtcataataagaactggaatgattacagtcaccaagcttttgtctatgatcatctgtctgatctcctcgagctgcttttagatccaaaacaactcactgcatcatttcattcaacccatagtagtctagtgtctcgagaagctgttgtggcgctcagcttccttattgaaggtacaataagtagagccaggaagatctatccacttcatgaacttgcactgtggcaaccactgcatgcagatagtggcttctcaaagatctctaagactttctctttctacaaactggaaacctggttgaggtcctgtttgactgggaatccatttggtacatcagcttgcctcaagtctggaaagaaattggcttgggctcatcaagttgaagggaccaccaaaagagctaagattgcttgtaatactcatgtggcccctaggatgcaccgactggtagtgatgagccaggtttacaagcagacactggctaagagctcagacactctggcgggggcacatgtaaagattcatcgttgcaacgaatcttttatatatctgctctctcccttacgatctgtgacaattagatttttcagtcaggtcaggagactgagatttgtttctgggactgggccactcttcgccaatcaaagatgnccttagggagaccttgttcaactgttgaatgtataagaagagcagaaactgtagcgtgtccactgaaagctgatttctctgcttttcaacttcctcctcaggagcgcctggaa

SEQ ID NO: 173166 - DNA, 1695 bp, Homo sapiens
ggcgggcccagcgagcggacgccgggcgcggcggcgcgcggagaagtgcggcggagcggcgcctgcattagcaggtatgcaaagaagccttttcaccctgatgtccttagagataatatggatcagtccagagttctcctctgggtgaaagcagaaccctttatagtgggtgccttgcaggtcccccctccatccaagtttagtcttcactatctcaggaagatatccacctatgtgcaaatccgggccacagaaggagcttacccgcgcctctactggtctacatggaggcacatcgcttgtgggaagctgcagttggccaaggacctggcgtggctttacttcgaaatatttgatagtctttcaatgaagacacctgaggagcgcctggaatggtctgaggttctgtccaactgcatgtctgaggaggaagttgaaaagcagagaaatcagctttcagtggacacgctacagtttctgctcttcttatacattcaacagttgaacaaggtctccctaaggacatctttgattggcgaagagtggcccagtcccagaaacaaatctcagtctcctgacctgactgaaaaatctaattgtcataataagaactggaatgattacagtcaccaagcttttgtctatgatcatctgtctgatctcctcgagctgcttttagatccaaaacaactcactgcatcatttcattcaacccatagtagtctagtgtctcgagaagctgttgtggcgctcagcttccttattgaaggtacaataagtagagccaggaagatctatccacttcatgaacttgcactgtggcaaccactgcatgcagatagtggcttctcaaagatctctaagactttctctttctacaaactggaaacctggttgaggtcctgtttgactgggaatccatttggtacatcagcttgcctcaagtctggaaagaaattggcttgggctcatcaaggtattttttaatattttaatctacattaaattgaatgacaacttaaggaacctagtgttttctaatatattagtgatctcgtgtcttctctagaagacctaaaaaatactgctcctataaaagagaaaaaggaacatctgtcttttgtgcatgactttttctctcaaggattatactaaaatattaaaaatgatagtaggattacaaattatttttatcttcttttactgttatttttctaaataaccatatattatgtacctggtacatgtgtaataaaagtaaacgtatgtaataaaaataaacaagaaatgttttaaaagaagaagaataatagcatactcatgtgacctcccagtatttcagcggtgttgtttacaagggtgtcccggtggcttgcagggaggtacagtctgagaaggcagtcacgtaacggtgtgactgtgttaggagaacctgcgcgtattttttgagtgtcagtttgtgcaacacaccgtgcccagccttctgttctatttaagaactttgatttccattccattttcatttattactgtttaggccgaattttcgctaaacttctgactttcatataaacatattgcttatagaacatcagaagactcatctttgtgatgcccaaatgaaaaagttggtgaaggtagtaccattgtatgtatgttaatattaaagcaactgagtgtagatttgcaactata

SEQ ID NO: 173167 - DNA, 1361 bp, Homo sapiens
  misc_feature (1248)..(1248): n is a, c, g, or t
ggcgggcccagcgagcggacgccgggcgcggcggcgcgcggagaagtgcggcggagcggcgcctgcattagcaggtatgcaaagaagccttttcaccctgatgtccttagagataatatggatcagtccagagttctcctctgggtgaaagcagaaccctttatagtgggtgccttgcaggtcccccctccatccaagtttagtcttcactatctcaggaagatatccacctatgtgcaaatccgggccacagaaggagcttacccgcgcctctactggtctacatggaggcacatcgcttgtgggaagctgcagttggccaaggacctggcgtggctttacttcgaaatatttgatagtctttcaatgaagacacctgaggagcgcctggaatggtctgaggttctgtccaactgcatgtctgaggaggaagttgaaaagcagagaaatcagctttcagtggacacgctacagtttctgctcttcttatacattcaacagttgaacaaggtctccctaaggacatctttgattggcgaagagtggcccagtcccagaaacaaatctcagtctcctgacctgactgaaaaatctaattgtcataataagaactggaatgattacagtcaccaagcttttgtctatgatcatctgtctgatctcctcgagctgcttttagatccaaaacaactcactgcatcatttcattcaacccatagtagtctagtgtctcgagaagctgttgtggcgctcagcttccttattgaaggtacaataagtagagccaggaagatctatccacttcatgaacttgcactgtggcaaccactgcatgcagatagtggcttctcaaagatctctaagactttctctttctacaaactggaaacctggttgaggtcctgtttgactgggaatccatttggtacatcagcttgcctcaagtctggaaagaaattggcttgggctcatcaagttgaagggaccaccaaaagagctaagattgcttgtaatactcatgtggcccctaggatgcaccgactggtagtgatgagccaggtttacaagcagacactggctaagagctcagacactctggcgggggcacatgtaaagattcatcgttgcaacgaatcttttatatatctgctctctcccttacgatctgtgacaattagatttttcagtcaggtcaggagactgagatttgtttctgggactgggccactcttcgccaatcaaagatgnccttagggagaccttgttcaactgttgaatgtataagaagagcagaaactgtagcgtgtccactgaaagctgatttctctgcttttcaacttcctcctcaggagcgcctggaa

SEQ ID NO: 173168 - DNA, 583 bp, Homo sapiens
ggcgggcccagcgagcggacgccgggcgcggcggcgcgcggagaagtgcggcggagcggcgcctgcattagcaggtatgcaaagaagccttttcaccctgatgtccttagagataatatggatcagtccagagttctcctctgggtgaaagcagaaccctttatagtgggtgccttgcaggtcccccctccatccaagtttagtcttcactatctcaggaagatatccacctatgtgcaaatccgggccacagaaggagcttacccgcgcctctactggtctacatggaggcacatcgcttgtgggaagctgcagttggccaaggacctggcgtggctttacttcgaaatatttgatagtctttcaatgaagacacctgaggagcgcctggaatggtctgaggttctgtccaactgcatgtctgaggaggaagttgaaaagcagagaaatcagttgaacaaggtctccctaaggacatctttgattggcgaagagtggcccagtcccagaaacaaatctcagtctcctgacctgactgaaaaatctaattgtcataataaggtactccttatatcttgatctc

SEQ ID NO: 173169 - DNA, 405 bp, Homo sapiens
ggcgggcccagcgagcggacgccgggcgcggcggcgcgcggagaagtgcggcggagcggcgcctgcattagcaggtatgcaaagaagccttttcaccctgatgtccttagagataatatggatcagtccagagttctcctctgggtgaaagcagaaccctttatagtgggtgccttgcaggtcccccctccatccaagtttagtcttcactatctcaggaagatatccacctatgtgcaaatccgggccacagaaggagcttacccgcgcctctactggtctacatggaggcacatcgcttgtgggaagctgcagttggccaaggacctggcgtggctttacttcgaaatatttgatagtctttcaatgaattcccggcgccctgaattcagactttcactaggt

SEQ ID NO: 173170 - DNA, 328 bp, Homo sapiens
tgaagaataacaagtctattgacagcagatttcttaacagcaacaagagatgctagaaaataattaaattttagctttaaaatacagatagaaagtaattatcaatctaacatctctataaagtatcacttaagagtaatggcaagagtgcagtggctcacgcctgtaatcccagcactttgggaggcagaggcgggcagatcacctgaggtcaggagttcaacaccagcctggccaacatggtgaaaccccatctctaccaaaaatacaaaaattagctaggtgtggtggcacacacctgtaatcccagctactcgggaggctgagg

SEQ ID NO: 173171 - DNA, 265 bp, Homo sapiens
cagatgccaggggcttccagcctgcaccctgcagcctgctggccaggcgcgccccatcgcgccccattgcgccccatcgtgccatgtgctaactttgcctcccagaggcggatcttgcgttgggtccacctcagagtccccggtgcccaccacagggtccccacagagcagaaatttggtgggtgcttgaaagttagatgaagtaggtcactggttttctctcccctggggctttgcccttcctctgtgcctttctgaaccccat

SEQ ID NO: 173172 - DNA, 484 bp, Homo sapiens
atgagccggtccaaccgaagtgccaaatatttgtgaaaagtcttaagaagtaagcaattttaattatgtatcttgatacagagcccagaaaaaaggacagagttatgaaagcaatgcctggagaaccaacccctcccagcattttcaggaggcacaagtgagccagggaagacatgtagcgtagctctgccccacagctcttggcctaggtgctgcagacatccacgtgtccccaggccttcccgtggccacttgtctataccccagaatcaaacaggtatcaacaatatcacagaagcaacagttttatgaccttaaacacctaccagaaataggctaaacctatttgactagtagacccaggcaaaaatctctaaattaaattctgaaaatatttctattttattttaccaacaattttaaaactagcctcatttaccaaagattactgaagtcacatgaacttgaaaagcatttgggctta

SEQ ID NO: 173173 - DNA, 2780 bp, Homo sapiens
tattccttcaatatccctttggaagagaggagtgacatgttcacatgggacccctatggaccatgggaaggctgtaccaaaatgtgtcaaggtcttcagcgaagaaacataacttgcatacataagagtgatcatagtgttgtgtctgataaagaatgtgaccacttgccacttccatcatttgttactcaaagttgcaatacagactgtgaactaaggtggcatgttattggcaaaagtgaatgttcatcccaatgtggtcaaggatatagaaccttggacatccattgcatgaagtattccattcacgaaggacagactgttcaagttgatgaccactactgtggtgaccagcttaaacctcctacccaagaactatgccatggtaactgtgtcttcacaagatggcattattcagaatggtctcagtgttccaggagttgtggaggaggggaaaggtctcgagaatcttattgtatgaataactttggccatcgtcttgctgacaatgaatgccaagaactgtcccgagtgacgagagagaattgcaatgaattttcctgtcccagttgggctgctagtgaatggagcgagtgccttgttacatgtggtaaaggaacaaagcagcggcaggtatggtgtcagctgaatgtagatcacttgagtgatggcttctgtaattcaagtaccaaacctgaatctctgagtccatgtgaacttcatacatgtgcttcctggcaagtaggaccatggggtccttgcacaaccacatgtggacatgggtatcagatgcgagatgttaaatgtgtcaatgagctagctagtgcagtgttagaggacacagaatgccatgaagctagtcgccccagtgacagacagtgctccgtatcttgtggaagaggtactcaagcccgctatgtaagctgtcgtgatgctcttgatagaatagcagatgaatcatattgtgcccacttaccccgacctgctgaaatatgggactgttttaccccttgtggagagtggcaagcaggggattggtcaccctgttcagcttcctgtggccatggaaaaacaactcgacaagttttatgcatgaactaccaacagccaattgatgagaattactgtgatcctgaagttcgccctttgatggaacaggaatgtagcctggcagcctgccctcctgcacacagccactttcctagttcccctgtgcagccaagctattatctaagcacgaatttgccattaactcaaaaacttgaagataatgaaaatcaggtggtccatccatcagtcagaggaaaccagtggagaaccggaccatggggatcatgctccagcagttgttctggaggtcttcagcatagggctgtggtctgccaggatgaaaatggacaaagtgctagttactgcgatgcagcctccaagcctccagagttacagcaatgtggtccagggccttgtccacagtggaactacggaaattggggagaatgttcacaaacatgtggaggaggaataaaatcaagacttgtaatatgtcaatttcccaatggccaaatattagaagatcacaactgtgaaattgtaaacaagccacctagcgtaatacagtgtcatatgcatgcttgccctgctgatgtgtcatggcatcaggaaccatggacatcggaggatcttaaagtgaaattgctgcctcaaaggaccatcatcttgtgggaactaatgaaaaacatattttgccatggaaagcactcacatatgtatttaataaatgtcgttactgaccatctactatatcctaggcactgtgatccagagacaattgaaacatatttcttatccctatggagtttacagtttacttggggagatttgaaatactataagaactcactataaaaagatatttttattagctatcttagattggaaatccactttctgcttactgtgtctctgttccatcttctttcattttattggttttagtttgcaagcctagttcttaagaagactgtggattactttcttggaattttttcccaattaggagagcagaatcctaactgctaatgagattgaattgtaatggcatttgtttctgagcatagacgttttattttccctacccattcatgacttcaattcaccgagcattaaacatttacttaggtctcatgctttatattagatattgaagcaattaaaattaagtgtttgtgagtcagattctctgttttagaggtcagcaaactatggtccaggtaccaaatctggcctgttgcctatttttaaaataagttctattggaacacagtcatgctcatttgtttacgtgttatctatggctggttttgcactacagcagtagcattgattagttgcaatagaaactctgtaactcacaaagcctgaaatatttactatctaactttttctgggaaaagtttgctgacccctgttctatttaataaacattataatgcttttaagtttaacataaaaaggtacttagatttatagaatattaaaattacaaataattcattccaggtcagttttagatgtttttgatcctttgatattttacattttaaggtttatcaaccttctctacatatccactgtgatattcatgcaatgtttatgtaaatgtatctatactatattccaatatatttttgttatgctattttttgtatgtaaattatatcacaagtgaaaaatctgaatgctcattaaagtcctctgtatagatgacttttcaacctcac

SEQ ID NO: 173174 - DNA, 1769 bp, Homo sapiens
taatttaatactgtcttttattcctttctagtgagatctcaaaaactttaatttctttttacttaacacttatgatagaaatgaaaattgtttcctaatgcaaacttgaaagtcccaccttttcatcaacaaattctaatgaagctcccagtataactcaagtgttttgatagattttctcaattcaaattgtgattccaatgaaggagattctaatgtagggtttgattttgattgagtcaatgctgattttttttttttaccatgtaaattcattatgtggaatccgcagtttgtgcatattttgtgttttattcttgtcagtgctccagcagttgttctggaggtcttcagcatagggctgtggtctgccaggatgaaaatggacaaagtgctagttactgcgatgcagcctccaagcctccagagttacagcaatgtggtccagggccttgtccacagtggaactacggaaattggggagaatgttcacaaacatgtggaggaggaataaaatcaagacttgtaatatgtcaatttcccaatggccaaatattagaagatcacaactgtgaaattgtaaacaagccacctagcgtaatacagtgtcatatgcatgcttgccctgctgatgtgtcatggcatcaggaaccatggacatcggaggatcttaaagtgaaattgctgcctcaaaggaccatcatcttgtgggaactaatgaaaaacatattttgccatggaaagcactcacatatgtatttaataaatgtcgttactgaccatctactatatcctaggcactgtgatccagagacaattgaaacatatttcttatccctatggagtttacagtttacttggggagatttgaaatactataagaactcactataaaaagatatttttattagctatcttagattggaaatccactttctgcttactgtgtctctgttccatcttctttcattttattggttttagtttgcaagcctagttcttaagaagactgtggattactttcttggaattttttcccaattaggagagcagaatcctaactgctaatgagattgaattgtaatggcatttgtttctgagcatagacgttttattttccctacccattcatgacttcaattcaccgagcattaaacatttacttaggtctcatgctttatattagatattgaagcaattaaaattaagtgtttgtgagtcagattctctgttttagaggtcagcaaactatggtccaggtaccaaatctggcctgttgcctatttttaaaataagttctattggaacacagtcatgctcatttgtttacgtgttatctatggctggttttgcactacagcagtagcattgattagttgcaatagaaactctgtaactcacaaagcctgaaatatttactatctaactttttctgggaaaagtttgctgacccctgttctatttaataaacattataatgcttttaagtttaacataaaaaggtacttagatttatagaatattaaaattacaaataattcattccaggtcagttttagatgtttttgatcctttgatattttacattttaaggtttatcaaccttctctacatatccactgtgatattcatgcaatgtttatgtaaatgtatctatactatattccaatatatttttgttatgctattttttgtatgtaaattatatcacaagtgaaaaatctgaatgctcattaaagtcctctgtatagatgacttttcaacctcac

SEQ ID NO: 173175 - DNA, 218 bp, Homo sapiens
agacggcccacgactccggccctgttcaggtactgaggtaatgcatgttcaggctggaatatttgaatgctgtctagaggcacaagaaggaaatcaaagccacctgtggtcacattgcctcgagatggtttttgttgctactctggactattttttaggctcttcctccatgcacctattttaaagcacattcttccccatgatggagccatgcacct

SEQ ID NO: 173176 - DNA, 452 bp, Homo sapiens
ctagcagcgaccttccttctgcaaccccagggactaagacgatacacgaattcctgattcatctcaggacagactaactcagggcctcagcttacccacccctaaaatggattcgcaaagcccactaatacacagaagacacaggaagctggggaagggagtgtttcccggggacctagactgaggatccttgaatctgaaaagttttgaaggtaggagcaaacggaagtggtgggagcgagccggacaggcggctgcctgcacaccccgaggcggggactgtgtagaaatctggggctttaacaggggtaggagcccggcttggcgtctcctctgtaatctgtcccctccaggcctccgtattcagtgagccctgcagtccggctgcccgtcctccgcaggtttctttctgggccccatgccccagtgtcttagccctcattcccgagccc

SEQ ID NO: 173177 - DNA, 319 bp, Homo sapiens
gcctcttctgtggcaacgaggccaccatctccccctgccttgagcctccctgttccagctgccagtgtgttccaaactctgcccctctatcctctctcaggcaggcccatcctccttcaagatcccctcaccaggcccagctctggtctgaggcactgagaatggagccagcatgggaggcgagaggtgtggggttgtttcatctctcagggagcgtatacagccttccccggctccaggactgaactgcagacctggccgcactggaagtgggtggtccttctctgctggctctagggggctggaatggggtcacatc

SEQ ID NO: 173178 - DNA, 326 bp, Homo sapiens
aataattccacctcaatatgacaatcattactgaaaagtgctttttctaagatattcatgaagtagtcttctggctaaaagataatagtgctgtcattgttgatccaaataacttattatagtttatggcattttgttgcttgaaatattagtcaacaatatttatataacagtttatgtaacttttatgtaaaataaatcctatatagtattttaattaaaaataaaaatacccattcagaaaaaaaagttctaaattttattgttgttatataccagaataaactcataacaattttgcattgttatttttcattatatttttc

SEQ ID NO: 173179 - DNA, 310 bp, Homo sapiens
gtcctgggacaatattttagaaaaaccttatttcaacccaacactcctttaaataaactggcatttaaaacgtgtcttccacacgcagggcagttagagctgcacatgggagaggcctcctgggcagacagtggagagcccatggcgccgcctcagggcagggggcacttgctggggaacggcatctccatttgccgtcttaagtctaactgggatttgcctacacaggaaatactgacttgcagttcctgatgtgctgaacaaaaatgccagatttatgaatctacaaatgcatttctgttcactatcg

SEQ ID NO: 173180 - DNA, 421 bp, Homo sapiens
ggacaacagagaaggaaagctctggccccctcagactcatcgcttcacttctccccaaacgctcttgattcggttttgcacatagctggaaatgtgttcggcatcttaacactgggacgggccatcgaagtcagaatgtccttctagtagttgctctctagcacttaaactgggctctgacattctcttgagaattcagacatcagagaagaagtccccttcagtggaccccagtcatcaccgtgatcccgtcctgactcccgtcctcaccgtgatcccgtcctgactcccgtcctcaccgtgatcccgtcctgactcccgtcctcaccgtgatcccgtcctcactcccgtcctcaccgtgatcccgtcctcactcccgtcctcaccgtgatcccgtcctcactcccgtcctcaccgtgat

SEQ ID NO: 173181 - DNA, 926 bp, Homo sapiens
  misc_feature (22)..(22): n is a, c, g, or t
aggctagtagagccgggtgttnatcggcgaggaaatggacgctccacttaaggaggcgccgggaggcccaaagacatctccaggatgtaactgcccaccaggacctcctggtcccactggaagacccggactcccagggacaaaggtgccattgggatgcctggacgtgtggggtcccccggagacgctgggctgtccatcattggtccccgcggccccctggtcaaccaggaactagaggtttccctggatttccgggtcccattgggctggacggcaaaccgggccacccaggaccaaagggcgacatgggtctgacgggtcccccaggacagccgggaccccagggacaaaaaggagaaaagggtcagtgtggagagtacccacaccgggagtgcctaagcagcatgccagcagctctgcgctccagccaaataattgccctgaagggcgaacagagccaggccagcatccaaggtccaccagggcccccaggcccccctggaccaagtggacctctggggcacccaggactgccagggcctatggggccacctggcttacctgggcctcctggaccaaagggagacccaggataccaggctacacggcggaagggagaacggggcatgccagggatgcaggcgagcatggagccaagggggcgcccggaattgcggatggctggatgaagggtgagcccaggtaatcccagggaaccaagggtgagaagggggctgaaggctcccctgggcttctgggctctgggggcagcaggggcgaggacaggcgatgctggcccactcaattggaggaaggagaggggaactggcctcagggtcctgggccccaggcaaaggagaaccggggtcgtggcagttggccccagggagcagaaaagggacgggacgcagtggaaaagggac

SEQ ID NO: 173182 - DNA, 606 bp, Homo sapiens
agtggaattattctgcattttatagatgaagaaatggacttggaataattaagttatttacagctaacccgcaccccagatctcttgacctagccccctgcatcctgcctttgccccagagtgcttttaatgttctgcattgcatggtctttttgttcattttattttatgtatcatagttaatactaaactgaacgtttgctgctaagacctatattattttatattcccaatgaatatgacttctgcataaaaacatttaactagggtaatcattttatagtatgtgcctgttgtctctgctatatctatcaccttcatgtgaagacagagaaaatagaatatgctgtgtattcgaaataatttcttctttacaatgatgtattctagattctaacatttacatatgagagaagcttcataaatgttacgttttctgtggccgctatttctgtcttatctgtgctgtctacacagtgaggacagctgcagagacactgccagtctcatgaagtgtccattgtgaaggcccatgtgtcagtgctgctgatggcatgcaggagttggtcagtaggatggttaagaacatgggctctggagtggacg

SEQ ID NO: 173183 - DNA, 290 bp, Homo sapiens
tggagtcttattatcgaattctaagagttctttgtatattctgaatacaagttctttatcaggtacatgatttgtaagtatattctcccattccatggcttgtcttctacttttcttaatgggccgggcgcggtggctcacagctgtaatcccagcactttgggaggccaaggcaggtggatcacctgaggtcaggagttcaggaccagcctggccaacctggcgaaaccctgtctctactaaaaatacagaaattagctgggtgtggtggcggtgcgtgtaatcccagc

SEQ ID NO: 173184 - DNA, 884 bp, Homo sapiens
  misc_feature (867)..(868): n is a, c, g, or t
ccgggttcccgctcccgcttctcccaccacacttccctgcaagctgagagaagcggctctggccttgggcagcccagaaaggggctccctcagtgcagcggtgggctgaagggctcctcaagtgccgccaaagtgggagcccaggcagaggaggcgcccagagcgagcgagggctgtgaggactgccagcacgctgtcacctctcagaactatttactcagaatgagtgaagagacagtcttgctctgttgcccaggccggagtggagtggcacagtcataattccctgtacccttgaaatcctgagctcaagccatctccataccttagcctcccaagtggctactacagatatttattccaaatcaatcctgcaccagaagctccatttctgcattcgcttccagaaaacacagcagccgtatgtgaatttgggagtggtcccacgaaccggttatgagacgaggttttggagctggatcacacctgacacaactggcattgaaaaccttattaccaagagcctctggcacaaggctgctatgaagaaatacccaagactgggtactttctcaactttcaaattgagctgttcagaatgtgtgaacatttaagatgagtccaagatactgaagcagagcggattgagagcggatataaccattaagcagatgcgacctatgaagatctcataagaccggtcgggttagggtcttggtttaacagccaggtttgcaggcccgaaactgagtattaagtgtggatctgggcggtaaaggcggcagtttcccaagcggttggttgggaaaaaaaaatgggcgccgtttaagggggaaatattgagtaggtacggcatgtttagtaagnngggtgatttgacggta

SEQ ID NO: 173185 - DNA, 1050 bp, Homo sapiens
agcgggttccgcctgccgctggcgccgttgtttccggctcaactggggagctgctggagctcttctggcctctggttttccgactgcttatccgacgctcctccctctgtctctgtagctggagaaggtagtttccaggaaagttttccggtttgcaggccgcgcacatcgggcaggggccatcctcggtccccttgctcgttgctcgcagccccgttcggctacaagtgagtttcagggcgtcatggccaggggccaccgcggccagccgggtgtgaggctgcctttcgctgcccgcgcgctccagtggtctctgggtccgccggcgtccgtttcggcctgaacgcagcccctccgcggcgacgagcagtctcgcgccggagctcatggcctcggaggcgccgtccccgccgcggtcgccgccgccgcccacctcccccgagcctgagctggcccagctaaggcggaaggtggagaagttggaacgtgaactgcggagctgcaagcggcaggtgcgggagatcgagaagctgctgcatcacacagaacggctgtaccagaacgcagaaagcaacaaccaggagctccgcacgcaggtgcgcggtcctcctcagccccgcgccccatccagcccaggcgaggccttcgaagcccgtgatagcctcggaaggggtccctggcaggggctcagaactactgtagagtacttaaagtaaataagtagaagctcagcgcagttacaattccaagtaccttaggagcaaacctgagttcaggttacttgatttaaatcaatgtctcgcggctggcgtgaattgaacttaagtactgtggctacattgtcttcattctcacttgacctaacatcccattggcagtaggcgcatttactgtagatcacatttgagtttattaaaatgctggacttgagtcagaatcccatctctgctattcactgggtgtgtgaacttatataccgagtctcagttccccattaaatgagaatgatagctcacagtagtaaaggtgaagtaaaacaaacaattttac

SEQ ID NO: 173186 - DNA, 3368 bp, Homo sapiens
agcgggttccgcctgccgctggcgccgttgtttccggctcaactggggagctgctggagctcttctggcctctggttttccgactgcttatccgacgctcctccctctgtctctgtagctggagaaggtagtttccaggaaagttttccggtttgcaggccgcgcacatcgggcaggggccatcctcggtccccttgctcgttgctcgcagccccgttcggctacaagtgagtttcagggcgtcatggccaggggccaccgcggccagccgggtgtgaggctgcctttcgctgcccgcgcgctccagtggtctctgggtccgccggcgtccgtttcggcctgaacgcagcccctccgcggcgacgagcagtctcgcgccggagctcatggcctcggaggcgccgtccccgccgcggtcgccgccgccgcccacctcccccgagcctgagctggcccagctaaggcggaaggtggagaagttggaacgtgaactgcggagctgcaagcggcaggtgcgggagatcgagaagctgctgcatcacacagaacggctgtaccagaacgcagaaagcaacaaccaggagctccgcacgcaggtggaagaactcagtaaaatactccaacgtgggagaaatgaagataataaaaagtctgatgtagaagtacaaacagagaaccatgctccttggtcaatctcagattatttttatcagacgtactacaatgacgttagtcttccaaataaagtgactgaactgtcagatcaacaagatcaagctatcgaaacttctattttgaattctaaagaccatttacaagtagaaaatgatgcttaccctggtaccgatagaacagaaaatgttaaatatagacaagtggaccattttgcctcaaattcacaggagccagcatctgcattagcaacagaagatacctccttagaaggctcatcattagctgaaagtttgagagctgcagcagaagcggctgtatcacagactggatttagttatgatgaaaatactggactgtattttgaccacagcactggtttctattatgattctgaaaatcaactctattatgatccttccactggaatttattactattgtgatgtggaaagtggtcgttatcagtttcattctcgagtagatttgcaaccttatccgacttctagcacaaaacaaagtaaagataaaaaattgaagaagaaaagaaaagatccagattcttctgcaacaaatgaggaaaaggatttgaactcagaggatcaaaaagccttcagtgttgaacatacaagctgcaatgaggaagaaaatttcgcaaatatgaaaaagaaggccaaaataggcattcatcacaaaaatagtccccccaaagtcactgttccaactagtggaaatactatagagtctcctcttcatgaaaacatctctaattcaacatcatttaaagatgagaaaatcatggagactgatagtgaaccagaggaaggtgaaattacagactctcagactgaggatagttatgacgaagccattaccagtgaaggcaatgtaactgcagaagatagtgaggatgaagatgaagacaaaatttggcccccatgtattagagtaattgtcattagatcacctgtgttgcagataggatcactctttatcattactgctgtaaaccctgctacaattggaagagaaaaggatatggaacatactctccgaatccctgaagttggtgtcagtaagtttcatgcagaaatttattttgaccatgacttacaaagttatgtccttgtggatcaaggcagtcaaaatggcacaattgttaatggaaaacagattcttcagccgaaaactaaatgtgacccttacgtacttgagcatggagatgaagtcaaaattggagaaactgtcttatcctttcacattcatcctggcagtgatacctgtgatggctgtgaaccagggcaggttagagcccaccttcgccttgataagaaagatgaatcttttgttggtccaacactaagtaaggaggaaaaagagttggaaagaagaaaagaattaaagaaaatacgagtaaaatatggtttacagaatacagaatacgaagatgaaaagacattgaagaatccaaaatataaagatagagctggaaaacgtagggagcaggttggaagtgaaggaactttccaaagagatgatgctcctgcatctgttcattctgaaattactgatagcaacaaaggtcggaagatgttggagaagatgggttggaagaaaggagagggcctggggaaggatggtggaggaatgaaaacgccgatccagcttcagcttcggcgaacacatgcaggcttggggacaggcaaaccatcctcatttgaagatgttcaccttctccaaaacaagaacaaaaaaaactgggacaaagcacgagagcggtttactgaaaacttcccagaaactaagcctcaaaaagatgacccagggaccatgccttgggtaaaagggactttagagtgaaggctaatcatagaaagaaaacctctagtttttttaaaaatagaatttggaaacttattttttctccccaaaagaatcagcagcacaggggaactatgtcacagtttacctcttcctgattcagaaatgtgtatggtttgcagcttttaaaaaccatttttttaaaactaataaatagtgactgaaccaatttatgcagtaaatagactaaagttcacagggcacggatgagtttatcaaacttcgttattttatcttcatttacaacatccatataagcaactagccatataagcaaaattcatagaactactaatgacttaagtgtacatctgttcttgtctccatatattcatgtaagatgcacaacaaaagaaacatcagaagtttataaaaataaatctgactatacgcatcctcatttattccctttagaacctaggtaaaaaatgttgcgaaaacatgggtagtggcgcatacattttgttatccttgaaatagcctaagtaatgttattgaagaactaatgaacaggtaacatattgtagaaaattagtctttcattgttttcttctgtgaagaatctgttgctatgtactgtatattcagcatttatatttggtttgtttcatagctaatgaggtatttagatatgaacaactgaatacatattgaaatagtgtgctggcttttgtagttttgataaagaccattgcaggcaatggaattgtgccagagaaatctgatttctagtacaaaaggaatacttagccagggcctcaagctcaagatacttattgaaaacatcctcaattgcaataaaaacattataacatg

SEQ ID NO: 173187 - DNA, 2639 bp, Homo sapiens
tgggtcatagctgactctagaggataaaaccgatgaagatgccgctttctatcgaaacttctattttgaattctaaagaccatttacaagtagaaaatgatgcttaccctggtaccgatagaacagaaaatgttaaatatagacaagtggaccattttgcctcaaattcacaggagccagcatctgcattagcaacagaagatacctccttagaaggctcatcattagctgaaagtttgagagctgcagcagaagcggctgtatcacagactggatttagttatgatgaaaatactggactgtattttgaccacagcactggtttctattatgattctgaaaatcaactctattatgatccttccactggaatttattactattgtgatgtggaaagtggtcgttatcagtttcattctcgagtagatttgcaaccttatccgacttctagcacaaaacaaagtaaagataaaaaattgaagaagaaaagaaaagatccagattcttctgcaacaaatgaggaaaaggatttgaactcagaggatcaaaaagccttcagtgttgaacatacaagctgcaatgaggaagaaaatttcgcaaatatgaaaaagaaggccaaaataggcattcatcacaaaaatagtccccccaaagtcactgttccaactagtggaaatactatagagtctcctcttcatgaaaacatctctaattcaacatcatttaaagatgagaaaatcatggagactgatagtgaaccagaggaaggtgaaattacagactctcagactgaggatagttatgacgaagccattaccagtgaaggcaatgtaactgcagaagatagtgaggatgaagatgaagacaaaatttggcccccatgtattagagtaattgtcattagatcacctgtgttgcagataggatcactctttatcattactgctgtaaaccctgctacaattggaagagaaaaggatatggaacatactctccgaatccctgaagttggtgtcagtaagtttcatgcagaaatttattttgaccatgacttacaaagttatgtccttgtggatcaaggcagtcaaaatggcacaattgttaatggaaaacagattcttcagccgaaaactaaatgtgacccttacgtacttgagcatggagatgaagtcaaaattggagaaactgtcttatcctttcacattcatcctggcagtgatacctgtgatggctgtgaaccagggcaggttagagcccaccttcgccttgataagaaagatgaatcttttgttggtccaacactaagtaaggaggaaaaagagttggaaagaagaaaagaattaaagaaaatacgagtaaaatatggtttacagaatacagaatacgaagatgaaaagacattgaagaatccaaaatataaagatagagctggaaaacgtagggagcaggttggaagtgaaggaactttccaaagagatgatgctcctgcatctgttcattctgaaattactgatagcaacaaaggtcggaagatgttggagaagatgggttggaagaaaggagagggcctggggaaggatggtggaggaatgaaaacgccgatccagcttcagcttcggcgaacacatgcaggcttggggacaggcaaaccatcctcatttgaagatgttcaccttctccaaaacaagaacaaaaaaaactgggacaaagcacgagagcggtttactgaaaacttcccagaaactaagcctcaaaaagatgacccagggaccatgccttgggtaaaagggactttagagtgaaggctaatcatagaaagaaaacctctagtttttttaaaaatagaatttggaaacttattttttctccccaaaagaatcagcagcacaggggaactatgtcacagtttacctcttcctgattcagaaatgtgtatggtttgcagcttttaaaaaccatttttttaaaactaataaatagtgactgaaccaatttatgcagtaaatagactaaagttcacagggcacggatgagtttatcaaacttcgttattttatcttcatttacaacatccatataagcaactagccatataagcaaaattcatagaactactaatgacttaagtgtacatctgttcttgtctccatatattcatgtaagatgcacaacaaaagaaacatcagaagtttataaaaataaatctgactatacgcatcctcatttattccctttagaacctaggtaaaaaatgttgcgaaaacatgggtagtggcgcatacattttgttatccttgaaatagcctaagtaatgttattgaagaactaatgaacaggtaacatattgtagaaaattagtctttcattgttttcttctgtgaagaatctgttgctatgtactgtatattcagcatttatatttggtttgtttcatagctaatgaggtatttagatatgaacaactgaatacatattgaaatagtgtgctggcttttgtagttttgataaagaccattgcaggcaatggaattgtgccagagaaatctgatttctagtacaaaaggaatacttagccagggcctcaagctcaagatacttattgaaaacatcctcaattgcaataaaaacattataacatg

SEQ ID NO: 173188 - DNA, 501 bp, Homo sapiens
gtttttaatgatatgtacaaatacttacattaggtcaaaatttttcaaattataatctctagtaccaaaggagaagaggtaggacatattctaaatttttcatggtaattaaaggtagatttatagatgacattttcttctatagcctctgtttctaccagaagcatataatagtttgtgtttctaaaaaagtattaagtataataaaatttaaattatcaaaggctcaagttaacatcatcatatcatacagaaaacttgtccatagttttgaaaagtataataattaataattgcttgatttcactttctaagtttcatgcagaaatttattttgaccatgacttacaaagttatgtccttgtggatcaaggcagtcaaaatggcacaattgttaatggaaaacagattcttcaggtgagtgtatatgtgttaatttgttacctgcacattatttttaaactgatttttttttatttctgaagggcataatctttatca

SEQ ID NO: 173189 - DNA, 1219 bp, Homo sapiens
agcgggttccgcctgccgctggcgccgttgtttccggctcaactggggagctgctggagctcttctggcctctggttttccgactgcttatccgacgctcctccctctgtctctgtagctggagaaggtagtttccaggaaagttttccggtttgcaggccgcgcacatcgggcaggggccatcctcggtccccttgctcgttgctcgcagccccgttcggctacaagtgagtttcagggcgtcatggccaggggccaccgcggccagccgggtgtgaggctgcctttcgctgcccgcgcgctccagtggtctctgggtccgccggcgtccgtttcggcctgaacgcagcccctccgcggcgacgagcagtctcgcgccggagctcatggcctcggaggcgccgtccccgccgcggtcgccgccgccgcccacctcccccgagcctgagctggcccagctaaggcggaaggtggagaagttggaacgtgaactgcggagctgcaagcggcaggtgcgggagatcgagaagctgctgcatcacacagaacggctgtaccagaacgcagaaagcaacaaccaggagctccgcacgcaggtggaagaactcagtaaaatactccaacgtgggagaaatgaagataataaaaagtctgatgtagaagtacaaacagagaaccatgctccttggtcaatctcagattatttttatcagacgtactacaatgacgttagtcttccaaataaagtgactgaactgtcagatcaacaagatcaagctatcgaaacttctattttgaattctaaagaccatttacaagtagaaaatgatgcttaccctggtaccgatagaacagaaaatgttaaatatagacaagtggaccattttgcctcaaattcacaggtaataaaatgctaaacatgaaactgttgatgcccaagaacctgtccttctttgttgttattatgtggaaagatagacttctttggtccgtcacagcatatataagggttataaacattcttatgtgtaattatgcaaagaatgttgtagtttttccaaaaccagaattagaacttcttcatatatgtagtggttttcctactacattgtgttccaaaattttgtgatctacataaactaaaacaaaatttgtccagatattttgactgaacaaaagaactgtggacaacaataccacatttacacctaaaaaaaaa

SEQ ID NO: 173190 - DNA, 2999 bp, Homo sapiens
agcgggttccgcctgccgctggcgccgttgtttccggctcaactggggagctgctggagctcttctggcctctggttttccgactgcttatccgacgctcctccctctgtctctgtagctggagaaggtagtttccaggaaagttttccggtttgcaggccgcgcacatcgggcaggggccatcctcggtccccttgctcgttgctcgcagccccgttcggctacaagtggaagaactcagtaaaatactccaacgtgggagaaatgaagataataaaaagtctgatgtagaagtacaaacagagaaccatgctccttggtcaatctcagattatttttatcagacgtactacaatgacgttagtcttccaaataaagtgactgaactgtcagatcaacaagatcaagctatcgaaacttctattttgaattctaaagaccatttacaagtagaaaatgatgcttaccctggtaccgatagaacagaaaatgttaaatatagacaagtggaccattttgcctcaaattcacaggagccagcatctgcattagcaacagaagatacctccttagaaggctcatcattagctgaaagtttgagagctgcagcagaagcggctgtatcacagactggatttagttatgatgaaaatactggactgtattttgaccacagcactggtttctattatgattctgaaaatcaactctattatgatccttccactggaatttattactattgtgatgtggaaagtggtcgttatcagtttcattctcgagtagatttgcaaccttatccgacttctagcacaaaacaaagtaaagataaaaaattgaagaagaaaagaaaagatccagattcttctgcaacaaatgaggaaaaggatttgaactcagaggatcaaaaagccttcagtgttgaacatacaagctgcaatgaggaagaaaatttcgcaaatatgaaaaagaaggccaaaataggcattcatcacaaaaatagtccccccaaagtcactgttccaactagtggaaatactatagagtctcctcttcatgaaaacatctctaattcaacatcatttaaagatgagaaaatcatggagactgatagtgaaccagaggaaggtgaaattacagactctcagactgaggatagttatgacgaagccattaccagtgaaggcaatgtaactgcagaagatagtgaggatgaagatgaagacaaaatttggcccccatgtattagagtaattgtcattagatcacctgtgttgcagataggatcactctttatcattactgctgtaaaccctgctacaattggaagagaaaaggatatggaacatactctccgaatccctgaagttggtgtcagtaagtttcatgcagaaatttattttgaccatgacttacaaagttatgtccttgtggatcaaggcagtcaaaatggcacaattgttaatggaaaacagattcttcagccgaaaactaaatgtgacccttacgtacttgagcatggagatgaagtcaaaattggagaaactgtcttatcctttcacattcatcctggcagtgatacctgtgatggctgtgaaccagggcaggttagagcccaccttcgccttgataagaaagatgaatcttttgttggtccaacactaagtaaggaggaaaaagagttggaaagaagaaaagaattaaagaaaatacgagtaaaatatggtttacagaatacagaatacgaagatgaaaagacattgaagaatccaaaatataaagatagagctggaaaacgtagggagcaggttggaagtgaaggaactttccaaagagatgatgctcctgcatctgttcattctgaaattactgatagcaacaaaggtcggaagatgttggagaagatgggttggaagaaaggagagggcctggggaaggatggtggaggaatgaaaacgccgatccagcttcagcttcggcgaacacatgcaggcttggggacaggcaaaccatcctcatttgaagatgttcaccttctccaaaacaagaacaaaaaaaactgggacaaagcacgagagcggtttactgaaaacttcccagaaactaagcctcaaaaagatgacccagggaccatgccttgggtaaaagggactttagagtgaaggctaatcatagaaagaaaacctctagtttttttaaaaatagaatttggaaacttattttttctccccaaaagaatcagcagcacaggggaactatgtcacagtttacctcttcctgattcagaaatgtgtatggtttgcagcttttaaaaaccatttttttaaaactaataaatagtgactgaaccaatttatgcagtaaatagactaaagttcacagggcacggatgagtttatcaaacttcgttattttatcttcatttacaacatccatataagcaactagccatataagcaaaattcatagaactactaatgacttaagtgtacatctgttcttgtctccatatattcatgtaagatgcacaacaaaagaaacatcagaagtttataaaaataaatctgactatacgcatcctcatttattccctttagaacctaggtaaaaaatgttgcgaaaacatgggtagtggcgcatacattttgttatccttgaaatagcctaagtaatgttattgaagaactaatgaacaggtaacatattgtagaaaattagtctttcattgttttcttctgtgaagaatctgttgctatgtactgtatattcagcatttatatttggtttgtttcatagctaatgaggtatttagatatgaacaactgaatacatattgaaatagtgtgctggcttttgtagttttgataaagaccattgcaggcaatggaattgtgccagagaaatctgatttctagtacaaaaggaatacttagccagggcctcaagctcaagatacttattgaaaacatcctcaattgcaataaaaacattataacatg

SEQ ID NO: 173191 - DNA, 531 bp, Homo sapiens
cattttaacaaataattagccaggcatgccaggtgcggtggctcacgcctgtaatcccagcacttgggaggccaaggcgggtgaatcacctaaggtcgggagttcgacaccagcctgaccaacatggagaaaccccgtctctactaaaaatacaaaattagctgggcttggtagtgcatgcctgtaatcccagctacttgggaggctgaggcaggaggaaccgcttgaacccaggaggcggaggttgaggtgagtcgagatcatgccattgtactccagcctgggcaacaaaagcaaaactgtctcaaaaaataaataaataaataaataaataaaaattagccaggcatggtttgtccacctgtagtcctaactcctcttgaggctgaggtcagaagctcacttaatggcaggagttcgaggttacagtgaactataattgcaccactgtactccatcctgagcaacagagcgagaccatctgaaaagaaaaaaaattgtaagtaaggaccaggtagccactcagaaata

SEQ ID NO: 173192 - DNA, 246 bp, Homo sapiens
gatcatgtgaacctaggagtttgaggcttcagtgagctatgatcacagtgttgcactccaacctggctgacagacactctgcctcaaaatcaatcaatcaataaattttaaataagaaaaaacataggctatagagagtttgttcataaaaatacgatatttcaaaacgtgggatacaattaaagcaggacttagaaatttataaacttaggccaggtgtggttgctcatgcctgtaatcccagca

SEQ ID NO: 173193 - DNA, 117 bp, Homo sapiens
tgaggtcatggagtaactggaaccgtggtgcagccactctggaaagcagtatggagcttcttcaaaaaattaaactggactttatagatttgctgtttcatccagcaattccacttg

SEQ ID NO: 173194 - DNA, 496 bp, Homo sapiens
cgtatgacctgattcctgtgctgtcaacattcatcagttctcttctttctctgctagtcaacctcacccactcaggtgtgaccacgaggaccagagccgaggtctgggcaagagtgctcacagctgaagggcttatgacacacaccggctcaacgggacagacatgggacaagtgtgcctgatcatggtggcgttgccaagaagcagctgtcgcactgccatgggttctacgtgtttcttgggcagaggacgcatgggaccagaatgggcaccaggaatggtggtgaacaaaggccccatggttctgcatgtttaggtgtctcttgtataaaggcacattgtgaattgaacatttagtgcccaggagcctcatgcatattaagtatctcttggcccttgtgtctcttccttcccacatgtaacatacctgttctctgtaactatctattctgaacgtatctaaaaaccatgtcttgcctgtgttatacaaaccaca

SEQ ID NO: 173195 - DNA, 472 bp, Homo sapiens
  misc_feature (452)..(453): n is a, c, g, or t
  misc_feature (460)..(460): n is a, c, g, or t
atttacaatcatgaacagaactgttctctggccttatagattacatatccttagcaaaaactgctgcatttggagtctaaggaaaggagaagatgcattagttagagaaaaccaggtgtaatttcagaattcactgtctccatttgtattgcattcactggagctgaccctctaaacctacaaattctggggttcccatgtattttttggatgtgcagaagactccttggctgtgtggaggattcttgtaattggtctgagttttctgtgtctgagatttctgtataaaccttcatttcttgtggcgactaccactaattctctccagcagcctgggagagaaagaaatggttggagtattttaccaggattcctagcacttctgcattttgcacttgctttttttttttttttttgggaaagggattccaaccccggcgggggaagggaanntttgttnaaaaaaaaagaa

SEQ ID NO: 173196 - DNA, 995 bp, Homo sapiens
aaaatagagctaggtacagaggccttgtggtgaatcgaccgaggcggcccgtggtgtcgacatgaccagtgagctggacatcttcgtggtggaacactgacccttatctgacgaggacgtgtatcgcctctggctcgatgtgttactcgtgtgacctgacgcggtggccctgcgtggtgcgctcgtgtgaatcctggagcagactggcgccacggcagcggtgctgcagagcgacaccatggaccattaccgcaccttccacatgctcgagcggctgctgcatgcgccgcccaagctactgcaccagctcatcttccagattccgccctcccggcaggcactactcatcgagaggtactatgcctttgatgaggcctttgttcgggaggtgctgggcaagaagctgtccaaaggcaccaagaaagacctggatgacatcagcaccaaaacaggcatcaccctcaagagctgccggagacagtttgacaactttaaacgggtcttcaaggtggtagaggaaatgcggggctccctggtggacaatattcagcaacacttcctcctctctgaccggttggccagggactatgcagccatcgtcttctttgctaacaaccgctttgagacagggaagaaaaaactgcagtatctgagcttcggtgactttgccttctgcgctgagctcatgatccaaaactggacccttggagccgtcggtgaggcccccactgacccagactcacagatggatgacatggacatggacttagacaaggaatttctccaggacttgaaggagctcaaggtgctagtggctgacaaggaccttctggacctgcacaagagcctggtgtgcactgctctccggggaaagctgggcgtcttctctgagatggaagccaacttcaagaacctgtcccgggggctggtgaacgtggccgccaagctgacccacaataaagatgtcagagacctgtttgtggacctcgtggaga

SEQ ID NO: 173197 - DNA, 787 bp, Homo sapiens
aaccaggcgtggtggtgggcacctgtagtcccagctacttgggaggctgaggcaggagaatggtgtgaacccgggaggtggagcttgcagtgagctgagatggcaccactgcactccagcctgggcgacagagcgagactccgcctcaaaaacaaaaacaaaaacaaaaacaaaaaaaacccataacacttatcacagatgacactatcagccaaagctatttcactgcttactcattaaacagacccaacactgaaacaatgccaaggattcatccattcaaatagaaggcacccaacatatcattttagggttaaaaagcacacaattgattaattagaaatcttagttaggaggagtttgtatcctagacttgacaggtaaaacaagctgttatcaacaatttattttttaagcccctccagtgaggccatttcagtcatatactgtgatcagtccatagttagattaatcttccgcaccttcatttgttgcggtaggtgttcaatacatattgttgctcagaatagtgatgcaaaagtgctgccaactaagcacaatcaaagaaaggctcaaggatccatgagtccagagagtaaacaaagtggaatacccattatatgagcatctcacttgatgaagaggtcaaattcgttgattgttttcctttagaccaggtgaagtgaaaattttgcagatttccaagcaataaacatcttagccaagagccactggactcatttagattatgtatctacgctgatttaattcatcaactaaatgccag

SEQ ID NO: 173198 - DNA, 236 bp, Homo sapiens
tggagggttatgtactctcagagcttcacctgttacattcgcatggacagcccctctccggctcagccccgactcctcccctatactcccttgtcagttgtgcctagaggtcccgtcagcatttaaaacagcattttaaaactaaattcatcatcattcatgagagcggttcccatcttcttcttttttttttttttttttttgccaccttagacttctctttatgaatttctact

SEQ ID NO: 173199 - DNA, 624 bp, Homo sapiens
aagctctcagtgggccagctgagatcacgtgaccagcctgaaccaatcactgtgcctgtggagacacggtggctctgattggcctggcttatatgtgttgcttggatctagaggtaggataaagcccactcaggccacatggacagaaagaaggaagagagagagggctgaaggcaggggcaaggcaaatgggtgctgtgtagagacaggcaaacccagcagatgccctgagcctagacctctggtatgctgaatgctggaagccattgggtttacttatatatatttcacggtgctgagaaacatctgtttgcattatttatttgtgaatcattcctaatataaattgtgttgctgttttaaatttcctatgaaatacgtttttaagtatcacgatattgcgtagtcaaatgtaatattgtttttgcacatggttctgtatacatcatagattctaaattaaaacttttgatagaaattacaaaatttgtgttaccttactgtatgggcatatttaaaagctaacatcctagtttctggagattctgatctaccaatatttcccatgctgaatcataagcttcagcatttctttaacaatatctcggcgtttggtataaaacc

SEQ ID NO: 173200 - DNA, 264 bp, Homo sapiens
aatgcaaagcgggggggccagacctcagtgcttcactgtggcatttgccgccagtcccatcggagccccaagtggctcattctggcctccctgctagcacttcattctttgcctttggtcctcgcctgagtggggagttcctgacagctgttccccagggctgcctaccccagaagccttcgtgtggcagagaggataaggagccacccacatataatgaagagttggcagtgaaactctggggggaaaggtattggcgagaag

SEQ ID NO: 173201 - DNA, 251 bp, Homo sapiens
aacaaaacatagaaaagtcaattttttcctcagttagttaaggaaaataggtgagaattaaacccaagccttctagtatttaacctgggattgagtttgtattttggttattataaagataagcatattgatttttgtaactatgttaaaagcttctgtgggctaagcacatctataaaattaacgccactttgttacaagtaatggaaagtttttcatttaaaagagtgtaggtctactcaaatccaact

SEQ ID NO: 173202 - DNA, 313 bp, Homo sapiens
agcctggccaacatggtgaaaccccatctttactaaaaataaaaaattttaaaaatgagccagtcatggtggtgcatacctgtaatttcagctactccagaggctgaggcaggagaattgcttgaactcaggaggcagaggttgcagtgagccaagatcgcaccactgcactccagcctgggcaacagagtaaaactctgtctcaaattaaaaaaaaaagtatttttactattttttaaactgtcgctggaatagaaatagaatttatttttatgttgtcatttgtatttctataaagttaatcatgttactt

SEQ ID NO: 173203 - DNA, 187 bp, Homo sapiens
tgctgggattacaggcgtgagccaccacgcccacccccacagtcttaactcattacagcattttggtcacaaccatcgaacaagtctctaagaagttccaaactttccctcatcttactgtcttcttccatgccccccaaacgcttccaagctctgaccgttggggccctagatctcctcaaccagc

SEQ ID NO: 173204 - DNA, 825 bp, Homo sapiens
atctgccaagtcttctttgccatgaaaggtaacatattcacagtctccagtgatcaggacatggacatctttgtggggccatcattccgcctagcacagtcaattatacattcctatgtaaaaaataggaaacatttctctatctctcaccacacacaaaaatcagttccagatggactgtaactctcaatgtgagagtgaaaaataaaggtttagaagatatagaaggatgtcttcatgatattggggtagtgaagaatttcatagccagaatacaaaaaacaaaaacaaaaaacaaaaaaaaccccttaagattgagaaaatgacctagattaaaattaagaacatctttttattaaaagattctattaaaaagtgaaatgaaagccacagagtgagagaaggcatatggagcaaatgtccacgtaggcattcaccccagcaaggtggttatcactaggctaaaactggacaaagaccgcaaaaagatcctcgaacggaaagccaaatctcgccaagtaggaaaggacacagggcacatacaaggaagaaaccctggagcaagatgcaggaataaggtaaccttatgtacaagcttgattaaaacttggaacaaaaaaaaaaaagaaaagacgtaggtaacagaacagaagcagaaataaaaaagagtggggaagaacaagaaaaaaaaggtgtggtggggacgacaaaaagataaaaaagtggtgggggcgccaaagaagaaagatattcaaaaagacgggaagagtgggccacaaaaacgggggaggtcaaaaagagatggatggtaaagaagggtaaagg

SEQ ID NO: 173205 - DNA, 480 bp, Homo sapiens
atatagtgaaagcttaatattgtttagattagaaatataaaataattttgattattagacaatagtactattgagaaactatatgaaatttaaaacactaaaaggtaagcctgttttcttaacatccaataacctttaaatattttggttactctgaatacacaagtatcttacatactacaaagtgtgcaaaggtagcgtgtatttgatgagggcatttactgaaccttccaggtggtggttatatattcatacttgaagaaactcatcataatttcaggcactagtcaggacagtctttaattttatgtgccaattttttttgcattttatttttttgtagagacagggcctgctgtgttgcccaggctggtctcaaactcctggtgtcaagcagtctttctgcctcagcctcgcaaagtgctgcgcgattacaggcatgagccaacatgcccagccttgtatgccgtttcttttttt

SEQ ID NO: 173206 - DNA, 391 bp, Homo sapiens
ttcgtgaggtttgggaacataaatggttaaagtgcatgggccctttaagaaacaaggtgcagggctgtaagaaaatattcctagacaaggtcagacggaagtggaaggtactggagctgttgtttctctgcatgtggtgaaggagtattttgtggatccaaagtagacagggcataagcagaaaatgcaggtgaccccagcagccgctgagccggcctggattcgggcaaagaaagcagcgtcctcctggtgcaaacagacacagccacaagtgcaggacacgcagtctagaaagtccggaaggtaaaataaggtcttttaaaaaatacagcttgggtgtatatttaaggcacaaatatgagatacattacatatttgtaattacaaagag

SEQ ID NO: 173207 - DNA, 247 bp, Homo sapiens
attctgtgttactggctatgttgtaggtatttcacaagctgcctaacttgttgctggaggcagagagatggatgtggaagggaaagctgattctttcaaaaataggagggtaaagactattctctgtgcatatgagcctcaactacaacaatccaaacttttggttcatattgcatttttctttgttatcctccagagaataaagttaaaattgaaccccagagacaccagagagccaaggcactag

SEQ ID NO: 173208 - DNA, 162 bp, Homo sapiens
gggaagctgaggcgggcatgggagaattgcctgagtccagcagcttgaggttattgtccactgcactccagcctgggtgacaaacagagactctgtccctaaaaagtatgcaatatttaacctgctaatcattaagaatcatataaatgcattcttttgaca

SEQ ID NO: 173209 - DNA, 492 bp, Homo sapiens
tcaggtggacacacaggtctgagtgtgttaaacactattacctacaggcacagggtgaggtgttccagacagaggtacttgcctaagccagagccagctgctgagctgcagtatcttgggaattttatttccttaacatttcttggtttagcaaggtccatggcttgatacttttaatctccacgaaatcatcaggtacaggagggattcatgatcatcatggtggcagaatcacagggagttctatgacaacagggaatcctacacaaaaagaactgggtcctctagaaggaaaaccagtgcctgttgcgataaaaaccagcaacacctgcagggcatcatcatcactcgccactcccaaaggccgcttcctggtctgcattttcttgataaagctaattcctataaaataaagagggaaacaatccacgtgtgcttatgtgatgaattttatttttgtcaagaggccctaagtccgtataagtacaacca

SEQ ID NO: 173210 - DNA, 236 bp, Homo sapiens
ccttaaaatctctgccttaaactgcaccagcccccaaaaaatccaaggggggaaagcaggcggggggagagcagattcccccctccccctctcctctcccatccctcctccttcctcctccctttgagttaacaaggccccgctcactatatctctttatattaaatatatatatatattagagaagagcgagggagagggagaaccacctccacccccctctttaaattcttttt

SEQ ID NO: 173211 - DNA, 766 bp, Homo sapiens
aaaccatacatcttctcagatgctcaaaggccttcttcctttgggtccaaaggaacttttccccaccatgacattgctacctctgtggctgccgtttgtatttctctgccagtgagaacagatcacatagcccaggaaattcacagtgctgaatcacgagaccacagccagactgcagggaggactctgacatcaagctccccagacagcaaagtcacagaagagggcagagcacagaccctcttgccagggagaccttcatctggacaaagaatttcagattcggttccactggagtcaactgaaaaaactcatcttgaaataccagcttcaggaccaagttcagctagttcacaccacaaggaagggagacacaagacgttttttccttccagaggccagtatgggtgtggggaaatgactgtcccctgcccctctttaggaagtgacggtaggaaacgtcaggtatctggattaatcactcggaaagattctgtggttccttctaagccagagcagcccatagaaattcctgaagccccttctaaatccctcaagaagaggagtctggaaggaatgagaaagcaaactcgagtagagttcagtgacaccagcagcgacgatgaagaccgattagttatagaaatatgaagcttccagagaaacatggtgtctggtcaaaaagactgttgacgcttcacaagtaaatgttgtcaggctggcggaagaactaaactctatctgtgaaacacctacagattaggaa

SEQ ID NO: 173212 - DNA, 337 bp, Homo sapiens
gctaaacttaattagtccaacgatcctacacatcaaaccctactgtttgatgtattctgcgagatgtccaagccgcctacagctggctaagggtcacaatgaaaaggcagccaggcttaggtctgggaactgaaatgagctgttctaagtggagcttttcttccattttctgaggctgcactgctctgaccttctccaaatcaatcctttgcggattaacatgtaaagcagtgtcgaattaatttcagaaagggaatatgagatcagcctaggatcatacaaaacatctaactcctaaatacactaatgcttctagccattcaatgagaagctgtca

SEQ ID NO: 173213 - DNA, 183 bp, Homo sapiens
tagtataataagcaatttagtgcaagttgagaagcaacagggaataaagctggaaaatctggaaaaagataaatcatacagagtaaagcaataccatgctatgaaagttggtgtccatattggaggtaatgggaaataatgaatgattttttgtaatataagacatatgtaataactcactgt

SEQ ID NO: 173214 - DNA, 601 bp, Homo sapiens
ggaaaagccaaatagagtatcttaattatgccaaatattctggcacagtctcagattcatgtatttggtcttgttgtctccagatccacatgtatttgttctagttttaggatctaaaaatttgggaatctaaaaatgtggccccaataactatgctacactcattttacataaagttatcttaagggaacaaaacacctacatggattactccaaatctttatgttaatttgaagccagcaagaggttgtatttgtacctgtaggtgttacctgacctcaagtgagtctatgtatgttctggttctgcagtatcttcttgttttaagttatttttttaaaattcttcttaaattttaatttaaaaaaatttctcatccaagctttaaccaacatggaaaatttcaatggaatcattgttctggttaaatactaaacttacttaagtgaaaatgctcaaataaagattaacttttgttttttggctgggcatgtggctcacacctgtgatcccagcactttgggaggatgaggcaggtggatcacctgaagtcgggagttctagatcagcctggccaatgcggtgaaaccccatctctact

SEQ ID NO: 173215 - DNA, 152 bp, Homo sapiens
atcaatattgaattacactgtgggtaggtaacttgtgctgaatcctgtcatcagatcttttcctgaaaagttttaatgactgaagaggcaaaagaattcaaagctgctgctcctaaaatgcagtgggagcacagagtgatgtaaatggcccc

SEQ ID NO: 173216 - DNA, 443 bp, Homo sapiens
cttttccattaaaaagaaggaggaaaagagaaggagagcaagagaaaaaaaaattaccttatatgtctgtcttcttatataagaaagtgacaccatacaaagaaacaactattcaggctggtgctagagggttggggagccgaggaatccctggggagcagtcacagggaattccatccaaaagtccaacatgcagtgaatatcccacaaatgttagtggtgcctctgcagaggtagcaatgttgaacgcctcgagtattcccggatgattttgattaatttcctcattccttttctcctgagtccagatatccccagcatagattgcttcccacatagtatctccaattttaagtaatatatagtctaatatctgtttctttattggctaagtgtctttctctgcgtctcctctatatcatcaatagtcctctgtcatcttt

SEQ ID NO: 173217 - DNA, 504 bp, Homo sapiens
aactccgcaactccagctctgtgcacctgcggaaactgaagctcgggagaccgagaccggacccagagtcacacaaacgggcaaaacaggaggacgtggggctgggcccggcccgctgacctccaactccgagtctgcgccctcccttacctctgcccccagccaggcccactgacccccaaccctgagccctaggcctccgcccagaacacagcggcgagcgaagtgtggagtaatgcgcacagtccctttaagaggcacaaggccctgatcgcgcggccccgacaacaacaattccattggctggagcgtgatctctggccacgcccccacactaaatatttggagtcctactggtccagagcccgggccccgcctccctcgccctctgagcccgggcgccgcgccaggttcgctgacgcaaacgcgttgccccggcaacctctccccgtccccggggcaaaggggccccggcactggagccagtgcgcaggcgcgcggccg

SEQ ID NO: 173218 - DNA, 379 bp, Homo sapiens
gtcccaagtcctgctcctggtttgctggcttgctcgtgtaaaccaccttatattatttttttttctaaaaatactccaaagcaattgaaagagtcccttctcccaccagccagccctggccccagccccagccccggggagcgggcgggtaggcggggaggtgggccactgctttattaaacacagggaaaactaatatttacggaataaaatttatggagcagccacgagaattcgacccttttatgtgcatgtagagtgggggttgggccaggctgggggcctcagggaggggcccaagccagggggcagggctggaatacagcctggctaggccaatttgtcaaagcagggatttccctggagttgccttaggatg

SEQ ID NO: 173219 - DNA, 337 bp, Homo sapiens
tcttgaagccaatggcaggaagagcaataagaacacatacttggaatgcatctgccctgcaaacatcttggtgttttccacctcagttaggctgtacatccaaatatgcacacaggaagacctcacacatgcttaatgttaagggcatgtgaaaaatgtcaaatacaagttaactcttgcaatgcttacccaacatacagctaataagttaaattctaatattctaaaagaattaggcaaacatttagaacaagcctaatttatttttctgtgttccattctgaattaaacagtgggcactacaattgtaaaccatctaataatttttgtttatttg

SEQ ID NO: 173220 - DNA, 213 bp, Homo sapiens
ggctatctgtacaactcccaataaacccttttatgtagagctctcgaaggccagtctgtggcaccactctcaaagactgcttcacacatcttttttcttcttgcagggaactggcaagtcacacatcttattcttgactccctcctttggaagcctgtttgtttaatgtaagccttttgtgtgcgtgtgctttttttttttttcgggagggac

SEQ ID NO: 173221 - DNA, 1279 bp, Homo sapiens
ggcactcactccttcccgccgcttatgaagaagatgcctgctcctctttgccttctaccgtgtttataagtttcctgaggcctctccagccatgcagaactatagggtttcactgtgttgaccaggctgcacttgaacctctgacctcaagcaatccttctgccttggcctcccaaagtgctggaattatagtcatgagccaccacacccagcccctaagtggacatttaatccatgtacattcaaggttattattgtctatatttgatataatcaaatacttagtcatttttaaattattttaatagtttcaaatatatttgttaaatttgctctatttgaatcaggatctaaagaagtttcaaagttgcatcagctaatatatctttttagtttttaaaaatatatatgaattcctttctcctgctttttagctctgtgtatttgctgaataatccaggatattcatcctgttgaatattccataccttgtgattatcttattaaatcctacggtgttcttgcatgtttctctcctcgacatatttcctgtatgtgccataaaatagagaatatttaccaattaggctcatttctagttggttctatgtgctccatattatactttatgtgtattcacttcatgtgatataaaaattgatcagtaggttcaggtattttcagctgattcattccatatatgttttcttctgaaacagttattcgtcattttagcttctattggttgttatcttaggcccattaattcattgggttccaaatgaatttgtctgtatgttagtgtcccatgaaacaattcttttctccgatgttttataacttaattaaaaagccagatcttgatttttagcagttgtaatttttttctgttaatttaattacatttttatattacataaaacagctacatgatttcaaagtcaaaaatataaaataagatgtattcagaataacttttatccctgtgccttgccctgtttcctcctcctgccataagaaaattatatatgtattatgtttttgccattttaagtatgcttatttaaacatttataaaatatatacttatatatgcatgtaaatccaatgtatttatccctgttttaacataaaaatagcattctggtggcaaaaaaaaaaaaaaaaaaaaaatgtggggggggggcgaaaaatttataacttgtggcggggccaggagaaagggaaaggtccagaacggcggaaggtgggtccaaaaaaacgggggggtgaacaaggg

SEQ ID NO: 173222 - DNA, 394 bp, Homo sapiens
actacaggcgcccaccaccacccccagctaatttttgtatttttagtagagacggggtttcatcatgttagccaggatggtctcgatctcctgacctcatgatctgcccacctcggcctcccaaagtgctgggattacaggcgtgaaccaccgtgcccagccaagatggagtttcactcttcttgcccaggctggaatgcagtggtgaggtttcagctcactgcatcctacacctcccaggttcaagcgattctcctacctcagcttcccaagtagctggggttacaggcatgcaccaccacacccaactaattttttgtgtttttagtagagatgaggttttgccatgttggccaggctggtctcgaacccctgacctcaggtgatccaccca

SEQ ID NO: 173223 - DNA, 468 bp, Homo sapiens
cagagtcaacacacattttattgatttaaatgtgagtcaacacacatttaattgatttaaaatagaattatgaagtggcctatttgacttgagacctttaacctgggcttgtagtgtaagcagttggaacatgaagatgctggtagacagggtatctctcttaattatttgctcttaaagcagcagctacttcctttagagaacattgtttctagtgaaacattaacttctggaatagtatctattgctgtctggaaccataaaggaagttgttaaatttcctgcatactataggaataaaactttagggctagtgaagtgattgcaaagagtataaggttttggtgtgatgtgaagcagtgtatatataacagtagtggttaagggcaagggttttggagttggacaaaaccaggctctaattgcgatgacaaggtcaagctgatgacattgggcaagttacttaac

SEQ ID NO: 173224 - DNA, 548 bp, Homo sapiens
atcaattaaatatgatgtcaatggtacagagaaaggggctgggaagagaaggggagcaaagaaacaggagcaaaggagtgctggacaacatcacaaggaagtggttcatttaacaactgggcagcttccctgtgcaaaagcacactgaggactgagactaaccaggtgcctgctttcctggagcttcagttccaaataacttgcactgtgttttgtaactaaacattgtagacagccgatgcatggtttcaagctgtaaaactacagctaatcatttacatattgtttattagactcactgtaaacaacatcccattaaaatgaatatagaactgaaaaatgcttttaactttgagcggttatggatagcactatggggccagctataatattagtaaaatatcacatggtttggttaggaaattcttgtagcacgatggtgagcctcaagtctatgataatcagcctggaagataaagcagttctattttttgcacttgtttgatcatattttccacatatcttcaaagacaggcatttgcatggtg

SEQ ID NO: 173225 - DNA, 146 bp, Homo sapiens
gaaaaattagccaggtgtggtggtgctcacctatagacccagctactagggaggctggggtggtaggattgtttgagcctgggaatttgaggctgcagtaagccatgagtgtcactgcactccaacctgggtgatggagcaagagc

SEQ ID NO: 173226 - DNA, 254 bp, Homo sapiens
tgaaggttgcactcaccctgatgttgagctgtctcttaaaggggaaaaagaaacattaagggccggtgcgtctgtggatttaatgcgcaaaggtgacaaaaaccaaattattaatgcctgggcagtgaaggtgatggcaaccaaacggacaatgtgcaatagacttcagaatgtagagcgttgttaattgtgaagaaaaagccatacactcagtcccacaaaggagagagggtacaaggacgccagcatcacct

SEQ ID NO: 173227 - DNA, 713 bp, Homo sapiens
ctctaatctcttggaagactctggctaaaacaaattcatttttggatcagtacccagtgcctttttcataacaggtattcaatgggcatttgttgaaccaactaatgagaaagtatttattcaacaagtatttattgagcactgaggagatgtattactataaaataagttcacagtatatagtgttattaatactatggtcattaattaataataatttcaccaccacaacactgtaatgcagcctccagaaagccagtgacataaactggaagtttgggtgacagagtttacagcttctgattatttagacttaaagcaattagccttgctgttcccactgttaaccacagagaaggacatgttcccaagtttccacctattcacttcttgattaataactttaaagtcattccaaacctatcaagactcagagatagcgctgggcctttcctgtagtgtggggtttgtcttcaggaacaaaatcccacttctgcagcctgcagtgtgacccatctgttttgtatcccctgtcattttgggaacagtgtaacactgtggaggccaggctatacccgaggttagagaccccacctttaaaattattactctggggaaagcaggaaatattgtttcaatcataaggataaaatatggacaactatgaaccacttaagaagtttcatagcagttgccttcaaccacaaaaccaa

SEQ ID NO: 173228 - DNA, 489 bp, Homo sapiens
taacagttcaaagaatgttatgtattgtggaagtgaagaaacaaatcagtctgacctgggtttgtctcagaagcttcacagaagaagcaaagatttaagccaggccttgatgcaaggtgacagaaagacatgggctgctactatgcctcaggcacacggctgggtgttaaactgttaatccttatgataccctgtgaagtaggtgatgacatgtccattttacaaccaaggtaactgaagacaggtgaggctaagtgtgccattcaaggtcaaacagctagtaagcaacaaagctagcatttgaacccaggtctgctttactttactccagagcctgtgtactctcatgatctgccttacttattacacagcaacatgaaagaagaccagaaaaactaaagttctttctaacctcaaaattcaatcattgaacgggggatgtggagggagtgggggttgtgtgctcactgctgctatgtcttctccgta

SEQ ID NO: 173229 - DNA, 424 bp, Homo sapiens
gagaaatacgagggagactaaatgaatactatgtcaaacaaaagtgtcttgtggagtcaaaaatatgcagaattaaaataaatgacaataatgacaaaaaaggtacgtgattggtaaatgaagcctaaatatccaaaggtccacgcactgacagaaaagtgatacaactattaatttatattagagttcaataaaccaaggatgcatggtataacctgcagggtaatgatttaaaagaaatgaggtggctcatgcctgtaatcacagcacgttgggaggccaaggttgaagaatccccgaggccaggagtttgaaaccagcctgggtaacaccgtgagacccgtctctaaaaaaaattttttttttttttggagatggagtctcgctctgtcgcccaggctggagtgcagtggcttgatctccg

SEQ ID NO: 173230 - DNA, 618 bp, Homo sapiens
gtcccaaaagttaaataaaatataaaatataaccaaagtgcactgtatggctcagctctaaatagtatttatacaatcggattaatattaatactgaaaattgatttaatgaaaattatgatagaatttctctccgtgttgagagaatgagggaagggaaatacatactgatggtgggaggaggccagggacagggagaagtagaagggagttcagtgcttatcttcataaaagtgagtcgactataactgagaatgaaaaatcaagcttcaggagtatgaacatcgccgggcacggtggctcacgcctgtaatcccagcactttgggaggccgaggcaggcagatcacctgaggttgggagttcgagaccagcccggccaacatggagaaactccgtctctactaaaaatacaaaattagccgggtgtggtggtgggcgcctgtagccccagctactcaggaggctgaggcaggagagtcgcttgaacccaggaggtggaggttgtggtgagccgagatcacaccattgcactctagcctgggcatcaagagtgaaactctgtctcaaaaaaagaaaaagagtataaacatgttattttgaagaagctgctacaagt

SEQ ID NO: 173231 - DNA, 304 bp, Homo sapiens
gtgccgtagacttgtgttatctatctcaataagcttaatatcaaaccatgcatgcgcacacacatccgcgaagccacagaagtatcagcagtgctttttaatggttgctgcttttaacgtggttaaggtttctttgatttaatgttggaaaaaagtcacatgccaaaaatgaaaattgcattcgattaaaatgtgattaatgccccagagcagccacgacagctcaatttctttaagaggaacctgagtcaactcacttaactcacttaccacgagacttttcatactcctcggcaaaaacgaa

SEQ ID NO: 173232 - DNA, 330 bp, Homo sapiens
ccagactctgtgtggcatgggggtgataactgtagaccctccacctctggggattaaatgagctcatacatgtaaaggcacagaggaggcactcactgaatgatgattgtttcattagtgtctttagaccctcagcacccagcaccataggtggatgccagtcattattggttagaccaaacagaacttcaaggcagctgggcatggtggctcacacctgtaataccagcactttgggaggccaaggtgggagggtcacctgaggtcaggcatttgagatcaacctgggcaacgtagtgagacccagtgtctatttatttaaaaaaataa

SEQ ID NO: 173233 - DNA, 394 bp, Homo sapiens
aacagtgcagccttcagtctgtgactgaaggcccaagagtgcctggcaaatcactggtgtaagttcgagtccaaaagctgaagaacttggagtctgatgtttgagatcaggaagcatacagcacgggaaaaagatgaaggcgaggactcagcaagtctcctcattccactttcttctacctgttttattctagccacgctggcagctggttagatgatatccactcagattgagggtgggtttgcctctcctagtctactgactcaatgttaatctcctttggcaacaccttcacagacacacccagcaacaatactttgtatctttcaatccaatcaagttgacactcaatattaacaatcatgccacatgattcgattagttttttattttg

SEQ ID NO: 173234 - DNA, 141 bp, Homo sapiens
tagaattctattttgatgtgtctatactgttttttgagtgaatcgctttgtataccttttttagtcatttctgtagatagtacatgataccagtaccattagcacggtctcctagaatggaaattgttccaattagagtta

SEQ ID NO: 173235 - DNA, 596 bp, Homo sapiens
gtttgccagaatacaaaagacattctgttcagaaagttcaagaagaaaaactgaagaaccaggacagcagctgttccctcatcccacagagaaaccaaaggcatttgcaaagttccctgaggccaagaagtgaatttaagacataacatggctcaagtggaagcacaacccctgatgggtctccgttgcaggaagtgtttgctgcattcatcctcctcataatattactgacaaccccactaccctatcacctataaaactgcctttctgggagggtctcctttccaaggccacacagctcaccatgtaccactcctctaggtcagaacaagttttaccaaaacttaggacaatcagtgtaggagtgcacagcgtggacactgcgtgccctgagatttggtcaaaatgtaaccaaaggaatccacccggcacaactacagtgcctcatgttccccagctcttagcagctgctgctgagagctcactctgggacatctggatgagaaacctgtttgcaggccccccaaccccagcagacgctgtaccgagacgctcttacgcggaagacggctcagctagtcccttactataaatac

SEQ ID NO: 173236 - DNA, 637 bp, Homo sapiens
aaaaaaaaaaaattacaggaatacatttagcaaagaggcaccaaaattgagataagagccactgtcccacctgtgacatcttctgacatctttcattcttgagtcatgggggttgcaagccagggaacagagtcttctgcctggaagctaaaaccaggttttggggtaggttcagagagactgttcagactgaatatgcatgttgccaggtcaaaaatatcccgattgcaagagcatttgcaaagacaatggtgctcagggaaagataatgctgtgtgtttaaaagggaaaaaaattaaaagaatggaaacaaagaagaaaaagtgaccggagggtagggtgaccatatgttctggtttgcaaggtacagctaaagttatgtctgctgtcctcgtgcaattattatagtgcccctttcactctcttaagtgtctggatttggatgataaagcatatgatcaccctaccaaagacaggaagttagccagaagacccatgtatccattttaaacggtgcggcctgatctgtagtcacgctcatgctgctgcgcagctgagcgctctgcaccacctctgcctcgccctaccacgccctgcctgggtctcctggaaggctggagcggaacccacgatcctg

SEQ ID NO: 173237 - DNA, 545 bp, Homo sapiens
ggggtctaatatggcaaaaccctcagctcccccaacccatctctttaaggaacgtccctccccaacaccgggcccaggccgcatggatccaaggactagtacgtcatctcttaccaacacagagagatcagcttctagtgatagaggccttttatgctgacttgaaaaacagaaaaagagagaaaaaagaaacccatttacaaaaataaaaatcccatgctgttaatttcatgccagcataatcagaaattcccctttctactgtttccccttaaaagccccggtgtccttattatgctggtgcagtctggaaaaactatggttgggttttgcctacgtgaggcttatctctgcagctgcaaggaggggatccggtactttattgtcagcatggaaacttccgctaaatacttagaaaaaccttaattctaaattcctagctcactttcaactgtgtcctcgggacctgattttcttcggtgtgaacagattgtgttcagcattgcagtagaaagggtccaagttaggtaagagaaaggacttcc

SEQ ID NO: 173238 - DNA, 685 bp, Homo sapiens
aaaaagctacatgacatggtgtgacggggctgagaatgccagaaagtccaagctatcgccttggtttctggttataacccctgattccagagtgatctttataaaattgctcagtcagcaatgcctcctgcagtggaggctgtagggcttccttgcaagccttgccggcaggttcaagggcctcctgctgagtctcttcccaggaactgctcagcctaaggaaggcctctctcaaggtcacacccgctcctggggcagctgtatccaatgactagttggtgtgggggtacaaagacctgacccccttgtctggactggggacaactctggagagctattcccaggggatgtactgaggcctctgttgtgagtatatcacagctcaacttctctctctgtccagttctgcatccctgagttaaccccaaagacaatccccaataagtttccttcgggcacctcttagagtctcttttccaggaaactcaacctacgacacctgccaagatgcacttagggaacaaagaaacccaaccagggtctccattctgggccaatgccactggctctctcagctaacctatttttccttctgctgatatttgaggaggcttcttgctcctcgttagaaatggtcacatactggttaacgacattgttggctgtggagccaggctgcttgagt

SEQ ID NO: 173239 - DNA, 609 bp, Homo sapiens
gggttgagttcttgatttggttctcagcttggtggctgttggtatacagcagagctactcatctgtgtacatcaattttgtatcctaaaactttgccgaattcatttaccagttataggagctttttggatgagtttttagggttttctaggtatatgatcatatcatcagcaaactgcaacactttgacttcatctttaccactttggatgctcttgatttctttctcttgtctgattgttctggctaggacttccagtagtgtgttgaatagaagtggtgaaagtggacatccttgtcttgttctagttctcagggggaatgctttaaacttttctctgttcagtgtaatgttggctgtgggtttgtcatagagggcttttattatcttaaggtatgtcccttctatgccgatgttgcagacggttttaatcataaagggatctgaattttgtcatgctttttctgcgtctgttgagatgatgtggtttttgtttttaattctgtttatatggtgtattacatttattgacttccatttgttaagccaaccctgcatccctggtataaaacccacttgttcatggtgtattttctttttgacatgct

SEQ ID NO: 173240 - DNA, 142 bp, Homo sapiens
cacactgggccagatggatcaaaaacatctcccttaccactctgtcatggtccaaaagtgtcaaccatgataagctgcagcctattcaagaagtacaaatcagaatgtggttgatctagaagctataacatgtgaggcactg

SEQ ID NO: 173241 - DNA, 340 bp, Homo sapiens
cccagctgagaccagaagaaccacctgcctagattgctgacccacagaatcatgagctacataacttttttaagccactaaattgtgtggtcactttttatccagccatgggtaactgacaacataagacaatgtgtaaaatcactgaagaggatcaggctatatggctcgtaggacagaaaaggaagcgatagattctaattgcagcaacctgggaagacttccctggagtaagtgctgttttacttaaggattatggagttgtaagtactagaaacttgatcgcaacttgctcagagttcaacggacttcattgctttactaaatggaaagctccaaa

SEQ ID NO: 173242 - DNA, 844 bp, Homo sapiens
  misc_feature (588)..(588): n is a, c, g, or t
  misc_feature (594)..(594): n is a, c, g, or t
  misc_feature (599)..(599): n is a, c, g, or t
  misc_feature (641)..(641): n is a, c, g, or t
  misc_feature (654)..(654): n is a, c, g, or t
agccgattgcagggagaaactgttttcgcagcagtgcgcctcccttttccagccaccggttctcctgaccccgagtgtggggggtgacttcagtctcctgacatccagtgttctctcgagccagtttccagcccacagaaaatgagctcttccggaagtgggcatcttattccaatcccctccctgtgaatgtgtggagaaaaagagatgggaacgaggcagaggaaatagagaaatttgaaagagaaatgaagaatgagagacccattaacagaaggcaaagtagaaggttcacaaattttaagaaagggagaataaagtgaaaaaaatctcagaaggaatccactcaacagacgaggattcacttccaaagagacatattatgcaaggaagcaacttggaagaggaaagaaaagaagtcaggaatggccttactcagggacccttgaaattcatggatgtggcatagagttctctcaggaagagtggaaatggctggacctgcgcagaggactttatacagggacgtgatgttggacgatttataggaacccggtctccctgggaatctggcttcctgacctgagngtaccntccangttagaggcaaaaggagagatcctggactctgcagagtggangagaaaatagacnacgatcagaaggcaggcttggatcacggtgtgaccaagaaccttttgtcacgtcccaaaggccaagctcggaagcccttgtcacatccggagcctcctctgggaacaatggccacgtccaactggggcgacacagggggacatggatcacggacagaagcctcatgcaattgacggaccgctaaatatcc

SEQ ID NO: 173243 - DNA, 448 bp, Homo sapiens
aatagtttcagggggtccccctacacctagttggccagagacaatccttatttatgcctgtggtcgcattcagtgtaataactaatagcaatccctttcatgttcaaaggtatgcctgttaggaaaataaattataaggtaacactagttctgggtagcacactgtcgtagctagtctcagtgtgaaataacatggatgcagagggacaggtaaaaaattgctaggtgctatacgagataagttgttacagagttcagactcaaggtcaggttcacctattcagaatgcttcctacaatccaggctgttttgaaatgtatattaagagctggcagaaactatcatcagagtgagcaggcaacctacagaatgggagaaaatttttgcaatctatccatctgacaaagggctaatatccaggatctacaaggaacttaaataaatttac

SEQ ID NO: 173244 - DNA, 695 bp, Homo sapiens
tggcctcccaaagtgtcaaacctattcttaattactgtgtttgacttcaggacttccctccaggtcttactggaaacaaagcttttgcagtcagaaggtgcaatgacataggtataagttgcttttggttccactagtagctgaagtaattttaactataagttgtatatatgcgggcaatgtaggcaagagctattgggaaatacaccttttgcgataatgctgttggttctgtgaaagggaaacggtgtggggaagaaagaggtgaggctaaaagcggtcctaaagagcagaattaggagtatctgaaaagcaactggaagaaagtttagctactttacctatacattattagaagacatttgtgacttttttttttttaggatggcataacgaggataaagtagatcttaaattgcttcccacaattgatacaaagtacagttgatcaattattgcttagctatagatttcataactaggctctctaataggaatgaaccttatattttgaagagttactaggtagaagcctgagtggttgatgttacctgtaccagaacatagaactattcatattttcagttaggaagttgaatgagcctctgcaactgagaataaggggaaaagagaacacattataagttggtactgcattgtatagggtgaagaaacacataaaccatataattgga

SEQ ID NO: 173245 - DNA, 722 bp, Homo sapiens
tggcctcccaaagtgtcaaacctattcttaattactgtgtttgacttcaggacttccctccaggtcttactggaaacaaagcttttgcagtcagaaggtgcaatgacataggtataagttgcttttggttccactagtagctgaagtaattttaactataagttgtatatatgcgggcaatgtaggcaagagctattgggaaatacaccttttgcgataatgctgttggttctgtgaaagggaaacggtgtggggaagaaagaggtgaggctaaaagcggtcctaaagagcagaattaggagtatctgaaaagcaactggaagaaagtttagctactttacctatacattattagaagacatttgtgacttttttttttttaggatggcataacgaggataaagtagatcttaaattgcttcccacaattgatacaaagtacagttgatcaatcagcatatgtgtaatttctaatccaagtattgcttagctatagatttcataactaggctctctaataggaatgaaccttatattttgaagagttactaggtagaagcctgagtggttgatgttacctgtaccagaacatagaactattcatattttcagttaggaagttgaatgagcctctgcaactgagaataaggggaaaagagaacacattataagttggtactgcattgtatagggtgaagaaacacataaaccatataattgga

SEQ ID NO: 173246 - DNA, 694 bp, Homo sapiens
aatcttacactttctggtcatagatggtactttctaattgtgtcctcacatggtgccttagtccgtcttttcactgctataaataaataaccaagactgcgtaatttataaaggaaagaggtttaattgactcacagttccgtatggctggggaggcctcaggaaacacaatcatggcagaaggggaagcaggcaccttcttcacaaggcagcaggagcgagaggagcaagcaaaggaggagcttgccaaacacttataaaataaccagatctcgtgagaactcactcactatcatgagaacagcatgggggaaactgcctccatgatctaatcatcttccactaggttcctcccttccacatgtgtttatcccttataaacatcctgcctgccagaccccaccttggtggccacttctggaggattcaacctgggacagcctgagagaccttgatctttccataattaccagccagaagaatttacctcattctaccctctggagactctcctccctgatactcatctgccacaagagacacactcagggccttagtgcatttatactgcaatgatttatttaaatttacacaaagtcagatgtgggacaagcacccctctctcatcttgtagctatgtcttatgaacacaaattcttagtggatcacagtagtgagactgacaattatttct

SEQ ID NO: 173247 - DNA, 618 bp, Homo sapiens
tcatagcgtttacagatgtcatgaggaggtcccagaccaattaaataacagtctatggggggtggaaccgcaggcttcaaaagtctttaaagctcccctggtgattcctgtgtgcagccaaggttgagagccacacctctataaaaaatcttaaaactgagcctttccgtgcatttactttacttgtttggccccagagacacttgaatttattatctgagtatgtgattaaaagcagactggtttctagactgtaattcagttctagttctacaaccttttgtgtgaaccttgacgtttttcttatttataaaatggagattagaataacctattttatagaggtattgtgaggattaatgaagatgatagactgtagagctcttagcacatacttggcatatagtaggtactgctcgttaaaagttagctgttatcagaatccctctttgaggtaagctgctttatcccttttactcttgccaggtttgtcatgggtaatttcaaattttgaaattggcagaatttgtttatgtagctaaccacctccttttattgtaccttaaatgaacatcaaggaatatgcaaacatccagtgtactttaatcagaagaaagg

SEQ ID NO: 173248 - DNA, 378 bp, Homo sapiens
gactctgtctcacaaaaaaataaaaaattaaaaaaaaaggtctgctcagaaataggggaaacacgggatcaagaccattagagatttataggctgggatgcacaccatgtcttcagagctagccggctgtgtcttctccccgtttctttcactggtgaataacctttcgtttgaaccagcattgattgttctctccatgttccactgtggctccccatggacactgctaggtggaatctctgagaaaacaggcacttcgcagtcggcgcatctttctctgccagcttagggatgccgtcaaggtggaggaagggtattttggccatgttcggagtcgttgtttttactcactcttcttgggatagctttcccaccctg

SEQ ID NO: 173249 - DNA, 310 bp, Homo sapiens
aattatttatgcaatagtcaaaattgaagctacttgaacaaggtcacacagcctattattgttaagctacatacaattagaatctaggtctcataatttctagctcaatgcccttgatactatgattattattcctatttaatatgggttttagaatatttattaagtaataaatctagtggtagggttaaatcatatttactattagtatagtcgaggctaagttggagaaaataacttagtaattgtcagatacaatagcgtgtctatactaaaactgtacatggtaataaaaactaacagacaaata

SEQ ID NO: 173250 - DNA, 975 bp, Homo sapiens
gcctgtctgaccggaacaccgaggccttctcagctcacgggtgagcctgggtcacactacagcactggctgctgccctttagacctgaggtcaccaggtcgaggggagccgtgtctggtgcctgcgggaacctgagcctccaggcccctgttgctctgtggctagatgcccccactgcatgaagcgtgtttagagagctttggcattgctctgttgtgtgccgtgggttttggaagcttctgagacttcctaggaggctccgggtttgacccacaggactcactagctctgtcactgactagctggctcatcttgcagctatgacttaagctccatgagctttagttttacctaaaaaggggacacagtgctagggtgtctgtgagaatttcattaaatacatgtgaacacatatgtaccgtaaagtcctagacgaatactgcggaagttcattgcttgacttggggcagggtgacaaatcctgccttgtctctgtgtgccctcgggatctgtggcagggagggggtgctggggtagaagcacaggtccgtggctgtctgaggacccccagccctgccccttgagaggagtggacagctgggggaacaggggaaccccgactactctgggaactctgagctcatacccaggggagggagaccaaaacctgaccaccgggaggattatccccagcttagtttcacagtcttgtccggccccctcacatctgcaggggatgaggtgagtcaggtccagcagaagagaggtccggacacagagagatctcttccctcacagacaccctccctcacctgggaggagcccggaagacttggtcatctaggaggtctaggggttgccttgcacccaccagatggacagacatgaaaggttgacactaataagggctaacatagacacggagctgtcagagcacacatatgctgctgctgggactgcaaactggtagacggc

SEQ ID NO: 173251 - DNA, 203 bp, Homo sapiens
cgacagaggcaggattctgcgtgatagttcttcaggttcacttcacagattagctgacacttaactgttctggaagctgggccaaggagtgctaacatggaaattgagtaactatagttttttgcccaaggtacaggagaataaatatgagtagatagaatctcttaaattaaaaatttctccagtaaatttttcctaagtct

SEQ ID NO: 173252 - DNA, 657 bp, Homo sapiens
gtcacccacatttgataggtcagaattttgctttttgccagtctcatgggggtgatgccatttctggtagttcccctgattgccagggggatgagcagcctgccctcaactgccccatgctgaaggccctccaaaggcagcatgaatcctcacagttcccagcctgtgccctgacaacctaggaggacacgctggtctggtccattgcttatctgaaacgattccctttccctgttccttttgttgccttgagtgtcagttttggacctcccactgagcagttttttctgtcacgtagccatagacaggactgagttctttggaaaataatcacatcccactgttgttcccattcgttcattttttccttcaactaaccaacattattcagcactttactcagcacaggatgtggaaccgaaggcctggcttttgggacactcaccgtccccagtcagctctgtgtcctagggagagacccatgagctctctgggcctccttttgtttctctgtaataaaggactaaagctaccagcctcgctgcgggttggaaaaaagaaagagttagtgtaacacatgtgaatgtgtacgaaggggtttagagacagacaaaacattgcaccaaggcagggctcgctggagtgcagacccaggaa

SEQ ID NO: 173253 - DNA, 285 bp, Homo sapiens
cactgtttacagctgagttgtgtaatcacccaagattactttactttcttgaataataatggagttaataattatccattgcttgctgccttagttctgtctgtacttatcattaattcaaccctaaatatcctcttaattggtagttcttatcagagagtctatcaattatttttcatgaagaactctttcctggaaacttctgacctgctcctgtctcaggtaagtcagaaagccctgcaaacatcctgggatccccttccccatattcctttgtagctgtcc

SEQ ID NO: 173254 - DNA, 591 bp, Homo sapiens
taggaacccccacatattttctatggatgtgattaagatgttaatcatttttctatttacagattacattataatggataatcaaattgctgaataggaaataaatcttgaagttatggtatacccatgaaataaaatatcctacagctgtctaaaaagcaaaatatttaatatgggaacatattgacaatatatagagcagactacaaagcaatgtacattatgatttcatttttgagaatataaatgcataactatgcatagaaaaataagcaaaaacacaacatcaaaatgttaacagagtttatctccctagatgcatagaaaatatctgattttctatggatccctagtgcttaatacaattcctaccaaatattatgcaagtaataaaattgcagtgtcattgaacattttcagatatgcatttatttctactaattaatcttagtagtattagcagccttgactaaatattatttctaaattgatcaacatgcgatgcaaagcatgctacagaattgaattaagaaaagaatttccatgagagatatgcatttacaattttgtagatttaatctttgcatagac

SEQ ID NO: 173255 - DNA, 880 bp, Homo sapiens
gcgtttagcccaaggcacctgtgaaggagaaaaatctgatttagaatacaagctaccccaacataattggcctcaagattgtggctgttttcaaaaaactcttccatcttgtgtagaactcacctactctggggccttggggaggggggtctgtgaacatggaggccatggtgttcgttggccacctccttttagattaactgcgcagcctgtgtcttcacttctgctctgtacatggagaagacagggaaggcaaggctgctgcttacctgaaggagttcaaagtgtaaataagacaagcccattagatctatcaggggaaagccgtttaggtttgtttgagacaagatatatggtgtagaccacagaccttacgtttagggaaagcgtacttcttcagtgggctgagtttcttgtaacagaaggtgtggtcggatgattacagctggggttgaattagatgatttatggaacagcttctgccctgaaattttctgattgagagatggatgtggtctggagtatgtgaaaatgggatagatggagggaaggttaggggagaggtgaacagggcctcttccagggtcttgtggaagaccctgttcgacgtttcctcacgtagactgtctgatgaggctcttccagggtgtggtatggccaggtgtgtaaaatgtagggagcacaaggcaagaaagggctgcaccgagctgcttcctgcctcagggcctttgcacttgctgtcccatctgcctggaatggccttgcctcacatcttcatatgaccttggctccttgtcatctattgactcacctgtcacttcagaaaagcccttgctaccatctggtctgccagtcactctttatcctattttcatgtttt

SEQ ID NO: 173256 - DNA, 555 bp, Homo sapiens
ccattgacctcccagcacacctgggctgccctatctgcatccttggctattgctaaaacctctgctttctggagtgagcctgctctgaagttgatagataccactccttcctccttcccattcccttaagtgtcaaccaaatccttgtgactttgctgtgtctccttccaaagccacgcgttctgtgtttcaatcctctagggcctattaagtgaccagatagtttttgtgcatacaaaattaactgattttgcattgtatttacattttgataggctgaaaatatgtcttaatgttgcagcgcctggggggcctcttcttatctttactttcacccccttggtgatctcatccagttccaaggctttgaatacatctatgaatagatgactctcaaagttatattccattgtagactaccctgtctgcctatttgatttttccactggacagtctaatagacatcccagaatgagcatcgggtaagtccaaatcctggtttccatctgcagccttcttcatctaagtaaatggcaacttcatttgtccagctgc

SEQ ID NO: 173257 - DNA, 459 bp, Homo sapiens
ctattcatgatcatgactggaattgctgcatgttttgtgccagccacttcattcctgccaaacatcctcccaatttgcaaggattcttgggtttcattttgaaaataaagcagtaaaatgcttcttaagctcaacttatgtggggtcttattcttcattagtacttacttaagctatactgattagagtaacatcttaactcttttgaaatgcttattttgattgacaaagtgacatggaatttctaaagtgacaaattgaccaaggagcacagaaacaagtcaatagaattgtgatgttagcttgagttctgaacactcaacacttggaaagaacctcataccaccttttgtgccagagacaccgagaacctgaaaggctgtcagtcagatatttctattagctgaagcaagaaaacttcctcatcctggtggctcctaggccaaaatttgcagggga

SEQ ID NO: 173258 - DNA, 211 bp, Homo sapiens
tcaacggctattataacccagtttgctgtcgcagattactagtcgaaagaaatgttttaattgtcttcaagtgactattttaactttgcagatgcaaagcaacaggtataatgtactaaatcataacttaattaaaaactgtcacataaacaatgtagcaaggatataccttctaaaggcaatcaccatttaagactttactttctcctta

SEQ ID NO: 173259 - DNA, 420 bp, Homo sapiens
gcttacttggcttgctcttggggagaaatcccctgacatttggtcatagaagtcatcttctacggtgatgattgttgtgagagcacaggaaaaatgatttgagttttttccaaagagtactaatacctagtatttaagtttttttttttcttttattgagacgcagtctccctctgtcgcccaggctggagtgtagtggtgcaaaatcagctcactgcaacctccgcttcctgggttcaagcaattctcctgtctaagcttcccaagtagctgggattacaggtgtgtgccacgaagcctggctaatatttgtatttttagtagagacagcattttgcgtgatggccaggctggtctggaactcctgacctcaagtgatccgcccaccccggcctcccaaaatgctaggattatatgcat

SEQ ID NO: 173260 - DNA, 374 bp, Homo sapiens
cagctggtgaatgtaagcttctgacgtacttgggctaggactgtgaacttagcctctgatgccaaggagcaaacatggaatgaaagcaggccaaaggccttttgcataatatggcagtaaggcaggaagggaagttcattccactttagagaggcagtgtttgaagcatgaggaagtttgccagccagagaaaatgggaataccttctgtgcagagtgaatacaaagatacaagggtgtgaatgtgcagttagggaatggggaagctttagtaatgagactgttaaggtggattgtgtcccttgtgaagggactcagacgacataaatcagttaaaaaaaacaaaactaacttcagtttttgaataggtatagg

SEQ ID NO: 173261 - DNA, 529 bp, Homo sapiens
aaaaatgaccattcaagttctttgccccacccccacgtgtttttttttgtttttgagatggagtcttgctctgtcgcccaggctggagtgcagtggcgcaatcttggctcactgcaacatctgcctcccaggttcaagtgattctcatgcctcagcctcctgagtagctgagattacaggcgtgcaccaccacgcctggctaattttttgaatttttaatagatacagagttttgccatgttggccaggctggtctcgaactcctgacctcaagtgatccctccgcccgctttggcctcccaaagtattgggattacaggcgtgagccactgcgcccagcccctatttttaattttatcttttttttcccctccaccttaagactgagactttgcccatttttttaattgggttgtttattgagatgtaggagctgtttatatattttgtatgttaaccctttatcagatacatgatttacaaatattttctcctattctgtgagttgtctttcactctcttgaagtgt

SEQ ID NO: 173262 - DNA, 536 bp, Homo sapiens
tcagccctggggttcagggttaggagttaggagcggggaaggagtcccagctgggggatggggccgatctgtagtgactttgagcacctcctaatgttctcggttgcccgtccaccaagacctcagattcctggtgggcttgcctgggccccattagtggctcaaggtcccgtttcccagttttctccctcctgggcttcccagacctgcacagagtgggtgctcaataaatgttatttgagagaataacagtgattccatttactaggcagggggccataagccaagcttgaatctcatagcaggaaaccccatttacagagggagaaactgaggttcatggggctggtttgtcctttctacccatcgtttattgactgattgattgatgcattgattgagataaggtcttgctgtgtcgcccaggctggagtttagtggtgagcctcgcttgcaccactgcactccaacctgggcaacagagcgagacgagaccctgcctcaaaaaataaataaataaataaataaataaattt

SEQ ID NO: 173263 - DNA, 232 bp, Homo sapiens
ttcatacccaaggttgttagaattggacttgattggagatttataagagaaaatcattagcagcatgggacaaatatgaagcccctttattttattttattttattttattttattttatttgtattgtatttattttgaggcggaatctcactctgttgcccaggctggaatccagtggcacaatcttggctcactgcaacttctgcctcccgggttcaagcaattctcct

SEQ ID NO: 173264 - DNA, 740 bp, Homo sapiens
cctcgaaggcccaggcccttatggctggatcctgaaacgtctcatgggggccaccctcatgggaacatgcctgggctcgaccgacccctgagcaggcaaaacccacatgacggtgtggtcaccccagcagcatccccttccctccctcagcctggtctgcagatgccaggacagtgggggccagtgcagggaggcccacagccctcggggcaacatcgttcaccctgccctgaaggacctgttcccagcggggtgccctgtgccaccagcgttcctcatttccccaccccgtccatcctacatcagggccctggtcatgagcaacacagccctctggtggctcccccagcagccttgcccagtgacggaagagacgaggtgagccacttgcaaagtggaagccacctggccaataactctgatcctgaaagtacattcaggcaaaatcccagaattgtgaatcactgggcaagcccagagctcaggcagaatccaggagtgaagaatgagcaccggcccgcctctgctcttgtgaaccccctcgcccggggagatagcccagaaaaccgtacgcaccacccactgggggctggggccgggtctggctgtgccccgctagaagcagactcaggagcttcaggagctctggcgatgtttttccaagggggagagacagaaaatgaggagaatctctcatctgaaaaagcaggcttatctggtcaagcggactttgacgattt

SEQ ID NO: 173265 - DNA, 217 bp, Homo sapiens
cagttcagagcctgaagttcagactctgccatatcttcctcactacattccaggagtggatcctgaaacgtctcatgggggccaccctcatgggaacatgcctgggctcgaccgacccctgagcaggcaaaacccacatgacggtgtggtcaccccagcagcatccccttccctccctcagcctggtctgcagatgccaggacagtgggggccagtg

SEQ ID NO: 173266 - DNA, 259 bp, Homo sapiens
gtcctgccatgccagcatgcccgtcgcccacgggccggcggtcggcggcgcggggttggggatggcgccgctcgggcttgccttcggctgtggcttggcggtagctttccagccaggagccgggtccgcgctgccaagtgaagctggggaggggggcggggaggcggggcggggagagcgccgcggggggctgcgcgccgattggcaccggcgcagcccgggccagcctcgggactatcaggcgctgtgccgcggccgc

SEQ ID NO: 173267 - DNA, 321 bp, Homo sapiens
agatgagcacactgaggaacagggaggaaaagtgacttgctcaaggtcacaagatcttcttgagcctgcactgtccatgtcctctgctgcacagtaccttccaatctccatgcactacatatctcactgggctctacaacatcttcaagtgagacaaatcactagctccattttaaagctgaatgaattgaacccaaggctaagcctttcacctctaagaggatggtgtgtttaataacctagctgttactattggctgggttgtgcgacctgtggaagtcaccctgcagctagatttctgcggaacctcaaaggcggggg

SEQ ID NO: 173268 - DNA, 365 bp, Homo sapiens
ctcacacccatcctttttccatgtgctccttggagaataggacaaattcctcactccagaggactaatacccaagcccagtggtctcctaaagcaatgctgctcatacttaatcatctgaggaccttgttaaaatgcagattctggctcagaagttccctggtggggctgagagtctgcatttttaacaagctcccagggaccactccagtggacaccaactcttagccctcacccctagttcctcagccccctccccacactcagcctaagggcaactcacactgtgtctctagaagttctctagtagcctttgaagaaagggtgttacagctcttttaaaacacaaacccaccccctcagcag

SEQ ID NO: 173269 - DNA, 455 bp, Homo sapiens
cctgtaagaatgtatcttataccatttcattcccagctctgaatcctccagtggttacctatcacaattaacaaagaaatccaagctctttactatggtctgtgtttatctgctccttggactgtgtgtattctcgtttcctcctcccagtgcctgcagcgtgactggtctttgtggtgatctttgggctcatcaagcgctgtctgtattcagactctgcacagtgtctcttctctctgccctctagacattcacttaactcattccatcataccattctgacctgctcaagtgtcacctcttcaaaaagattgttccagagctccctatctaaagtagcagtccctgtctccctgaatgtgattaccctaccttatgtttctttgtattattatgcttttttatttagacaaggtctcaccctagcctgggtgacaaagtgagactccatctca

SEQ ID NO: 173270 - DNA, 516 bp, Homo sapiens
cctgtaagaatgtatcttataccatttcattcccagctctgaatcctccagtggttacctatcacaattaacaaagaaatccaagctctttactatggtctgtgtttatctgctccttggactgtgtgtattctcgtttcctcctcccagtgcctgcagcgtgactggtctttgtggtgatctttgggctcatcaagcgctgtctgtattcagactctgcacagtgtctcttctctctgccctctagacattcacttaactcattccatcataccattctgacctgctcaagtgtcacctcttcaaaaagattgttccagagctccctatctaaagtagcagtccctgtctccctgaatgtgattaccctaccttatgtttctttgtattattatgcttttttatttagacaaggtctcactctgtcaccaaggctggagtgcagtggcacaatcatggatcactgcagcctcaaactctggggctcaagcagtcctcctgcctcagcctctcaag

SEQ ID NO: 173271 - DNA, 619 bp, Homo sapiens
cacattaacaatacttagttgattgttgcttctgtgaaatgctcttttctgctacattggtctaccttgtctttatatgcctttaacactttagtatgtataacacaatctaacacttcatacaatttattatttccctagttaaatttttgaaaagttttgagtataaaattgtgtgttatatatcttgtactgaacatgtagaaaagactcagaatatgcttgtgattgattgtcaggttattaagaactatccagcatgtatgaattttgtaaatatgctcacaggaagagttacttcaaatctgactgtgccagaaaccactgactcatgaccaggtgtggtggctcacacctgtaaccccagcactctgggaagctgaggcaggagcatcacgtgagcccaggtggccgagatctccctgggcaatgaagcaagaccttgtttctacaaaaaatgtaaaaattagccaagcgtggtggcatgcgcctgtaatcctagctacagaggaggctcgggtgggaggatcacttgagccccagagttcctggctgcagtgagctatgatcatgccaccgcactccagcatggatgacagagcgagaccctgtctctaaa

SEQ ID NO: 173272 - DNA, 248 bp, Homo sapiens
atcccaaaatgataacagggttattgctgggtggtctgattacagctgatttctattttcttccttttgtttattcatctactctaatttttctatgattaacatgtattaattgtgtaatattttcccattttggaacaactgattcaagttcatgttttaaatcccatctcaacagtatgattaaaacactagatatcagagtgtcattccttggagcaggagaccaagcggctcttaattatttt

SEQ ID NO: 173273 - DNA, 386 bp, Homo sapiens
tccagagtgatcctttgaaaatctcatttctctgctcaaaaccctcctgaggtttcccatcaccaaggatattaaggataaaaaccacatccttcataccattgtctacctgtgattccctaatcgtgtccctttgctcactccctctggcctcttgctgttccctgaacagcagtctgttccagccacagcagcccctttgccctatgtgcccatccccgtcagccttggcactggctgtcctctctgctgggagtgccctttcttcagatgctctcatgcttcgcttctttgccttgttgacatttggtcaatgtcaccttctcagtgaggcctaccctgacctccctgtaggaaaatgcaactcacctcactcccatgccccg

SEQ ID NO: 173274 - DNA, 529 bp, Homo sapiens
ttacttgaacagctttgtggaatcctgagatgctctcagctcattaaattccaaacaagttctgctgcctggcgtgatttggagaatgttctatgttggtttaagcaattctcctgtgtgttgtattgtctgtgatttaagtgtggactcttatttgatgtgttcccattttcccaccatccttggcaatatgacctcttcagtcacgttggtgagttgtcctttttactttagtatgtgttgcaagccctgcctgctgcctgagagtgagctgtgtagctttctgatttattctgcacgcctttgtttatctcagcccagcccaagactgtgcatggtcacggcactaatcagccaacatcacgctgcgttaggagcattagtctttatcaagaggactttggggcatatgtgagcatagctcctggtttctagttacatgaagaagaaaatggacatcttgcataggctcgctgaataagcagaaatgctgtgaacggtcttcatgatttgatcattaaagaaaccc

SEQ ID NO: 173275 - DNA, 245 bp, Homo sapiens
ttaagatctagtttcagaaaataattttcagttccttgttttcataaaaatattagaattagaagtaatgttaaattgtttttcaccactcatctggttttattaatcagaaaaggtactgtttcctaacagaaaggctgatgtgatgtactgacttgtttggaaccagccatggcctaatttctgattagatatagcatttatcttgagattatctgataatttaagtctttgtatttttttag

SEQ ID NO: 173276 - DNA, 968 bp, Homo sapiens
ctttcaccttgttggtcaggctggtcttgaactcctgatctcaattgatccacccgccttggtctcccaaagtgctgggattacaggcttgagccactgtgcccagccttttaaatttattttattttatttttattttttggagacagtctcactctcacccaagctggagtgcagtggagcgatcacagctcactgcagtcttcacttcctgggttcaagtgattcttatgcctcagcttcctgagtagctgggactacaggcacacaccaccatgcccagctattttttttttttttgtattttagtagagatgggatttcaccatgttttgcaggctgctctcgaactcctgagctcaggcaatctcccaccttgggctcccaaagtgatgggatttcaggcgtgagccactgcacccagccctctgcttctttttctcatatttcttgagtattacaagggatgggattcagcaaaaatgttggggggaagaaacccaacataaatgcttcctgtatcaaccatgagtggcaggtcccctacccctttcccatccccacaagctaaattggaggactggggagtcataattcccgttacgtgttcttgttgctgattggggaaattttttacttcaccccccttggtatcattagctcaggaaaaagttaaatttgtttcttctatatttgcctataggaagaggaatatttgtctcttctgtcgacttgaggaacgacacattaatcaaaggaagaataatttgatataactatatgcatctagttatccagcttggaccttgtatgataggggtataatagttggaaattttgaaaaaggatgtagtcctgccatatgagggacagctgcatcagaccttctctctcttttttttttcttttttttttgagatggaatcttgctctgtcgcctaggctggagcgcagtggcgcaatctcgg

SEQ ID NO: 173277 - DNA, 749 bp, Homo sapiens
tccataggtagtattctgataattttggactcatactcaaattcacaaagttttgaaaagtcattgtgaatacattaagagaaataacagaatctgacctgcaaagactgcagattttggaattactggattagagtattcaaagacacacaaaattttttttaacaactctaaaattcggatgacagtgcagcattaaattgacacaaaatgatgtgtttttcagtacttgatggcttagatttattgaaatacagtatgtgtaaggaatgaaagaatatccaaagattgagaaggaacaagacaaaaaatggtgggggtggaggataagcaagagcatatgacaagaaaaataagatttggaaacagtgaaacatctagacatgaaaagcaaaacagataaaatgagccagaagaccaagatgaagaaattatgtagaatgtatgaaaactcaacaccagggacattttgaaaggtcaatgaacatctaatagactaccagaaagagatgatagaatggtttgggatgatatttgagggtattttagctgagaaattttccaatttgatgaaagtcatccttgcatttgaggaatcaagaaaataatctgtagacccattgagctaatttgtagatgacagacaacgtgggaaaccagagtggtgaaactcttgataagcaaaccactaaaaatagtctctaaaagagcaagagaaagaaagcattatctacaaagtaacagcagtt

SEQ ID NO: 173278 - DNA, 923 bp, Homo sapiens
tgggcctccgggaaggggactgccctcctctgccttgtctggcagggtgcatgctgccagctaccggtgtgctgtggggccctgcctcccagagtctttcacagcaggcttggagctctctcctttacctgtttggggtggatggggagacagaatcccaaatctaagctttgcttgaggcctgcactctgtttccaaggctctgaattcctctggaaagagctgacattagattcctggctgattgtttggtgaaaaatcccatcagaggcagggcatggtggttcacacctgtaattccagcgctttgagaggctgaggtgggaggatcgcttgagcccaggagttagagaccagcctaggtaacatggcgaaaccctgtgtctacaaaaaatttttaaagattagctgggcattgtggcgtgtctgtatttccagctactggggtggctgaggcaggaggattgcttgaacccaggagtttgaggctacagtgagctatgattgcaccagttcactccagcctgggcaatagactgagaccctgtctcaaaaacaaaaattcccatcagaagccggccctgtcctcctcatcccctcagcagctgggcaaggagtgagggccccaagcccagctagcatcctgcttcatagcagcaggtgattctcgctggcagatgcatagaaggcagatgttgtgggtgctgaaaggagctgttcggtatttgctctagggctcattcattcccaagacctctatgcccagccgtgaggaagggagaagagttgggagggcgttcagtcttgaccgagactctgcaatgaaggcctgggcgtgaacagggaatagggggcaggctcacgacctgaacgtgggctgcttgctctgctccagagcctgcgttttctgacatccccccttg

SEQ ID NO: 173279 - DNA, 309 bp, Homo sapiens
ttcctctctttcaaagttccgctcctacttctttaggaccttccctggtcttccctctgagaactccatctctctagcctatgtacaacgttcttgatactgcatatcactcgactctctgtcttgcattttagttatactggtccacgtttcttatcttgcctattagagcatgaaattctaagggaagggggttgtagacttatccttacatcaatcctagtaactcacagcgcagagcattccctgaaatgatccttggcaaaaggcatcaaatactctacctgatagatgtggtgtagaaatgaa

SEQ ID NO: 173280 - DNA, 165 bp, Homo sapiens
atcccgaggattcctgcccggatagcctgatccaagatcttgccactgcactccagcctggttgccacagtgagaccctgtctcaaaaaacaaaaaagaccagtgtaaattaactagactaaggaggaaagtggcaaaagatatggtaaaataggtaaccaaagg

SEQ ID NO: 173281 - DNA, 367 bp, Homo sapiens
tgtaggaggggtgttgggagttggcaattcggtctgggagagaaggttttaatccgagtgaagagccctttgcactagcctgggaggaggctgaactgtcatcctgccttgactcaacacagccattcccctagaagttacagcacttctagggtcacctgtgttcagagatctaccctgtgtgcacacatggagaagaggcttaggttgttaaagtcagcatgttaaatcatttcctgaaatgcgactgtaactagaacccagctgacttcccccacagccgttcttacctattttattactgtctggcataattaccagcatgtaaactccaagaaggtgcttcatcttattttagtgcctggca

SEQ ID NO: 173282 - DNA, 483 bp, Homo sapiens
tgaaccccaagaatggagtcgccgctcttgtagtcgccggccttgttttcttcttgcacgcaaatcccggaacgaccggaaccgccatccccgcctgcgtcccaggggcgccccattacgcatggcgggggggcccgcggggctactccgggaggggatccgtgaggccgaggccggggagggctgcgaggtggctcgcgggggtgcaagccggagcggggctacacaccacacaaacagcctccctttcccccggaagagcgggcgagggaagacgcgggctagctctgggggctccccaggactgtgggagccaggcgaggaccgcaaggcggaagggagtgctgcagacaaaccatcggccccacctggaagacattggtggcctcgtggccggtggtgaacggtctcacgcttccccaaagtggcgtgcgctactctagcgtgggagggaaaggacacaaacttggccatctgccagaa

SEQ ID NO: 173283 - DNA, 219 bp, Homo sapiens
cagggtgtgcagggctgcatctgtcacaggtcactggctgcgtggccggaggtgccaggcaggacagggagcccaatcagagatgcccaggcctggtgcgaggagcccactctgtccatcctgccgtccgcggctgtcatgcaccacctcatcccctccttcagggccagggacagtccctaggactcagcctccccccgcattccccggtcctgcccc

SEQ ID NO: 173284 - DNA, 436 bp, Homo sapiens
cttgttcaactgcggttgcacaaaggagtgggactaggccatctagctaccaaacaaaagtggagatagaaaggatcaagttcactttctgggggcctggtgatgggaagtcactctatcctttctctataattcagaagaagagccttagcccagcctcctatattggagatgttttcatagctgcccacttataggaggaatcacctggctaaattctatgcagtgtttcaaaattatagctatcgctacattgtgaacatggtgataatgttattttaattatccagccattcctccaagaaatcagaattcctttgttccacctcactaggggtaagcaaggattataaatcatagctaggaaatttaaagcaacggattatttaagaacaccatgggccaggcgccgtggctcacgcctgtaatcccagca

SEQ ID NO: 173285 - DNA, 416 bp, Homo sapiens
catctacaacaatgcctgaggctgccagaatcaagagcagaggcgtggaacagactccccctcacagccttcagaaggaaccaaccctgatgcctagatcctgaacttcacatttctgtcttttagccccctagtttgtggtacgttgttactaggcagccctgggaaattaatgcggtgaggggtggggaggacaccaagcggaacattagcacagccagggaatggtatctgggtggcaatagggagcggtggggactctggcaaactggagagcccatagcccagtggaagccggctccagctggttgttgccgcgtgggattgcaagcctgagcttcagactctctaaagaacctggaaatctagatttgtatgtgaaatcatgaaatcacctcatcttttaatgttggcta

SEQ ID NO: 173286 - DNA, 617 bp, Homo sapiens
aagtagttcatgttagttcatgtgaaatcagacatctaaaagtgctctgcgaagcaggcaggaagcaccggctgtgccctgccttcactgggatcactctgcccccaccacagggacttgggaaactgcttggttttaccatccaagagacctgggggtgggagataaggagcaaaccctctacttcttcaagccctcactccagcaaatcctccaggcagccaggcaatgctgaagtccctgtccaagggggtctaggctgagcccgggtggagtgggttcttgggccaaggtgcctggaggggactgaaggcctctacccaaagtcctcatgagaactgggtgggggagcctgtgttcaggtgaggggtacggaggcacctctgtggcacagcctttgcgaggagggctgtggagggagacctccggggccggggtcgaaggacatcgtgtgggcgcgaccgcagtgctgggcggggggcgggcgcttgggcttgggccctgcgtcctgtgcgtgttggtttcctgtgggcacgtggggccctcggaagaggggaggagggtgagcacgtcctcagagggcagacccagcgaggcgtcgtggcagctgcggccgc

SEQ ID NO: 173287 - DNA, 117 bp, Homo sapiens
tgctggagttacaggtgtgagccaccttgctttgcccctattctcagtgttcacagggaaaaatgccaggaaggttttgtgcacccagccttcctccctctcactctttagtccctt

SEQ ID NO: 173288 - DNA, 371 bp, Homo sapiens
tgagactacaggtgcgcgtcaccatgtgcagctaatttttgaatttttttgtagagcgggggtctccttacgttgctcatgttggtcttgaactcttgggctcaagtgatcctccttcctcagcttcccaaagtgctgggattacaagtgtagccaacatgcctggccttaccaaggttttaagcctttcttgataaagttttatgttttcttcataaaatgatgatatttcttttgtggaatttatccctgggtaacttacgttcgtttttgttataaattatatttttgttataaattatatttttgttttcttttttcttcaaccctggcaaatggatatattttctttttttttttttttgagacag

SEQ ID NO: 173289 - DNA, 117 bp, Homo sapiens
ctgctgagaacaaatatatactaaaatatggcaaaatctagggaagtttggattttaccgtcacccaataattccagtcccagaaacgtaacctaaaacagtaattttcaaattgtg

SEQ ID NO: 173290 - DNA, 393 bp, Homo sapiens
agaatgagggacattagatagaattcagtgtaaaaacaaagtttatcttcagggtcaagtgcttaagaaagccactataatatagtaaaaagggtatgatttgtagacagcaatgctgggtacgaatcagacatctgttacttcacagttgtgagattttgggcaactaaaccattctctcatggaaatttctttattaaaaatgcaggaataataaaaattacttcatcagattcttgtgtgaattaaatggtcaaatattgtaatagtgcctatcatagattaggctctgaaaacaaacaagcaaaccgaacaaactggatccagaaaattttcaataggttcacgtttcccagtgtaaaataggatagtcttggttgatgttcccttttc

SEQ ID NO: 173291 - DNA, 121 bp, Homo sapiens
atcccagaggttggggagggatgagcagggaagaggggactccaaaatggagtcctataggcttagtaggggttggttaactgaggaagatatggagtgaccagttaaaggacagtgttgg

SEQ ID NO: 173292 - DNA, 322 bp, Homo sapiens
cgcaatgatgtcatgtgacaatgttagaccatttgtgataaaatgaaaggaaaacgcagtggcatatgcctgtaatcccagtactttgggaggccaaggagtattgcttgagctcaggagttcgagaccaacctcggcaacatggcaaaacctcatctctacaaaaattagctgagtgtagtggcatatgcctctagtctgagctactcagggccctgaggtgggaggattatttgggcccaggaggttaaggctgcaagtgagctgtgatcatgccactgcactccagcctgggcgagagtgaaaccctgcctcaaaaatt

SEQ ID NO: 173293 - DNA, 430 bp, Homo sapiens
ggaagcatctccattgtgcggatgggtaaactgaggcccagagcgcgcggttgggctggccacggaggcagggccgccggatgctgtgcggggatggggccctgcaccccttgcgcctctcaccatggggcctcaggcccctgttgcccggcagcgtctctggagtgggcattttgaacgagctccctcctgattttcacacagacttaagcctgacgaccgtgctggggcggatgtctgcccctctggtgaccaggtcacagctcccttgggaagacgattgactggggaatggggaccctggggagggggccttcagggtgccatctgtctgtttacgccagaaaacagagatttctgttttctttcgctgggctcacagcaggtgcttaataaacagatcttgtggcgggagcagaggacagcgagg

SEQ ID NO: 173294 - DNA, 363 bp, Homo sapiens
cttgtgaagaaggtgcttgcttctccttcaccttccaccctgattttaagtttcctgaggcctccccagccatgtagaactgtgagtcaattaaaccaattttatttataaattatccggtctcaggtagttctttatagcagtgtgagaatgaactaatacacactgatttattgacccactgtgagacagtaccctttaaatcttatcatgtctttaaaatgctaacattcagggaattagctaagcagcattccagatgagatcagatctaagacaagataaaatccttaaatgcttaaactgcctgctttggattccctgcaaaatttaccaaaaaacaaacacacaaacaaaaaaatg

SEQ ID NO: 173295 - DNA, 292 bp, Homo sapiens
aaaagccaagaaaaacttccacctggcaggtgtcatgaaccagtttaagccagtttggagcaaataaacattgctactcttactcctgccggttgacctcagatgacctctcaccagtactgggtgtagaccatcacccattagctggcctggggagttttacagtgcatatgagggtcctggatgtcgtcttggacatttgatgatgtttctgcacagaataatagttctgcagctaatacataggaaaatccaaaaatttctgctttagagtagggagcttgggccacag

SEQ ID NO: 173296 - DNA, 562 bp, Homo sapiens
ccaggctcaagtggaagaaatgaggttgatgatgaatcagttggaagaggatcttgtctcagcaagaagacggagtgatctctacgaatctgagctgagagagtctcggcttgctgctgaagaattcaagcggaaagcgacagaatgtcagcataaactgttgaaggctaaggatcaagggaagcctgaagtgggagaatatgcgaaactggagaagatcaatgctgagcagcagctcaaaattcaggagctccaagagaaactggagaaggctgtaaaagccagcacggaggccaccgagctgctgcagaatatccgccaggcaaaggagcgagccgagagggagctggagaagctgcagaaccgagaggattcttctgaaggcatcagaaagaagctggtggaagctgaggagctcgaagagaaacatcgggaggcccaagtctcagcccagcacctagaagtgcacctgaaacagaaagagcagcactatgaggaaaagattaaagtgttggacatcagataaagaaagacctggctgacaggagacacttgcatccac

SEQ ID NO: 173297 - DNA, 477 bp, Homo sapiens
aaaacacctcccattatgcaacaaagtccaattacagaaagatatttaattaagcctgtactaagaaagttctaaatacccttaataatgaacccaaacctaaggaggattttataagttagcaagagtgtaatttgcttcacagtgcagttatcagattgatgtaatctcagcactctgggaggccgaggtgggcagatcaactgaagtcaggagttcgagaccagcctgaccaacatggagaaaccccgtctctattaaaaatacaaaattagccaggcatggtggcgcatgcctataatcccagatactcaggaggctgaggcaagagaatctcttggacccgggaggcagagatagcggtgagctgagatcatgccattgcactccagcctgggcaacaagtgcgaaactgcatctcaaaacaaaaaaacaaaatgtttgatgaaaaaatgttcatctcaaagcaaaaaattc

SEQ ID NO: 173298 - DNA, 175 bp, Homo sapiens
cagctactgttatggtgcagggccacaggctctcccttttaaagggcttcacagaagacaaaagggtacacaaaaagaggctgtgtatcctcacaaatttctccttttctgtccatttttaaatcacttagaatagtgcctcctttacacttaaaatcccaggccttacttagat

SEQ ID NO: 173299 - DNA, 313 bp, Homo sapiens
cattctttagtgtcagaaccatttgtgattatagtggttttacccctgccctactgagcgcatttgttgtaacccttagcgtgcatcttcactctgtggtacactcagatgtaaatcttccagaggctgatgggtgcttgatagtggcctttccttcaccaggaattgctctgatttctagtgaagtaaaataaccttccataaaagcatgaaaagtgtctggtcccaggtttcagtcctaactcagttttcaccttccaggttctaagtgcacattgaattttcttcctagacagtactcaaaaggctgggg

SEQ ID NO: 173300 - DNA, 625 bp, Homo sapiens
gggaaggtgagacaggaaaatcacttgaacccgggaggcagaggttgcagtgagccaagatcaagccactacactccagcctgggtgacaagagtaaaactccgtctcaaaaaaaaaaggaacaattgtataatcccacttatgtgatatatctagaaaaggtaaattcacacagacagaaaatagaataaaggcaactagagatcaggagaaggggatatggagagttagcgtttaatgggtaaagagtttctgtttggggccgggcgcagtggtttacatctataatcccaacattttgggaggctgaggcaggtggatcacttgaggtcagaagttcaaaaccagcctggccaacatggcgaaacccgtctctattaaaaaaaaaaaaaaaagaaaagaaaaagaaaaaatttgagactctgtctcaaaaaaataaataattaatttttttaaaaatacaaaaattagccaggcctggtggcacatgcttgtaatcccagctaatggagaggttgaggcatgagaattgcttgaccctgggaggtagagtttacagtgagctgagattgagccattgtactccagcctgggcaagagagcaagacttcatctcaaaaaaaaa

SEQ ID NO: 173301 - DNA, 196 bp, Homo sapiens
tgtcttttttttcagtctatgaaacttattgtttcattgtgcttccatacacacacttacacgtacaatcaatctgatgccttcttttttttatattaaatggcagtgagccatgaaagactacagagaattataagcagagtctgccttaaaaaaaaaacctcctccagtgacagtaattggataaatgctattt

SEQ ID NO: 173302 - DNA, 567 bp, Homo sapiens
tcatgggagctgaaaggcatttttctaggtattgggcctacaagagtgttacagtttagcagaagaaacagaaaaataggcaggtgtgatgttactgatgcaggaggcacggattgctctgagtacacccgaggagcacctaatagtgaaacagctaccatttgttgaacactagtgatgtctcagacagtcacccacatgctttgttttctgttttctcccttagcaatgccctataagccccgccccttacccaaggcctttactcacactcactgtgtcctcacaacaacataagcaaggggtaaaaattcacagcctgtggagtgcagagccatgctctttcccctttatcacgcagggcaccattaatattttaaggcacttcagaaaaagacctgtctcggagaaagagagtccaaaagaacatctgtctcctcacctcacgctactttgcacctggccatatttccaaatcaattccacaccctgtttgaaagcagctcaccttggggatggattagaaaaatcgcaagccccaggcctgggtatgtgagtgagtttcgg

SEQ ID NO: 173303 - DNA, 433 bp, Homo sapiens
cttctggaattttgtttgttttcggctgagatgagttgttcattaaacagaggtcatccaaggcgtggcaggaaccacaaggccctggttttctgtgcactagaggacaagaaagttatagctcgatccactgggccaaagcagccctgaccacatattttgacaagctcagtctgcagaaagcaaaagcattctgacaagccagtcactgaaacaaggagatctttcacttaacccttggcaattattagcttgataatgggcatctgctaggtgtagctgaatagtgaacaagacattactaggcagaaaaaaataaccttacagcggggtagaaatatttaggtccccctgcaaacactgattgagcacttattccgtggcaggaacgttcacacgcattaactcagccctgggtgactcgggaatggca

SEQ ID NO: 173304 - DNA, 504 bp, Homo sapiens
ctctaagacacagagaacaatagcagagcccctgcccaggggcgctggggtatctccctcctcctttacaaagtgagtaggggagagaaatttggctgggccctccatccagcctagaccaacaaccaggaagaccgcctgtgccccagcttctattgaagaggaggctgagctcagcactggacaggacctgagtgttcagcatcaggaagaaaactgggctggagcccctgctcccctctgcacactctcgcctgctcggttgctcttcctggctctctggagaactcagggagccgctggctgaggacgccccacccccaagcagaaataagaatgaagtgcctgacctcctaccctgacccggggcagtgccagccgccgcgtcctcaacccctgacccacctgctgcagctcgtggcagcggccctgtatgtggagcccccgctgagcccaggccggctctcctgttatgctgcactattaatatttaaaactatctta

SEQ ID NO: 173305 - DNA, 256 bp, Homo sapiens
tgatctttctctcttgttctttgggaaacagtcacagagttctggcgctaataaatactataaaaagtaggaaatacagtctaaagaagcagaatattctgtttaaagttgatgtggtgctttttgtgcaccaagcattggctcaaaagcctgaaaattaggcagcaatacttcctaagctcatcttcaaccataaggcagaaaagccaaacatatctgaaaatataatatcactggtaccttataccagcactaa

SEQ ID NO: 173306 - DNA, 609 bp, Homo sapiens
tggtaaaaggaaaatggcagctctatgttactaccagtagtgaaggtgaatgatggattgttacatacagagtaagacttaaatgttgtgaagtttcctacagtttgacaaccaaaacatctaaaaaattcaaataaattttaaggtaatcttgatcttggttgtgagttgcaccagagaggacagtttatttttagttaacttgtacttaacctgcacaataagagtggtgactgactcaaatgtaggtagtactttattgtattccaatttaaaaaaacaaaattaagtctatattttaaaaactctgacaatagcaagatatttaatgaactctacttcatatctagttcattttttttttctggtttgaaaaaaagatcagctttccctgaataaacaaaaatgaatgtaaataaacatgaaaatacaaaaccataatttccaaaaacgaaatgaatgggccaacagtaaaatgcacaatgagccacaactgccctggtatttaagaaaataaaggtcaactgtgggtcataaagaagtatcaacttttaaaaatatatgtatgtattgctactcatagcatactctgacctaaaagaggcagat

SEQ ID NO: 173307 - DNA, 466 bp, Homo sapiens
cagcctctgaagtcagcagtgaatacatgtgacacaggatttcctccataatgctatgtgccacgaatgcatgaaggaatgaatgaaaagaaagcaaatgtgtgggaataatctacaagagttggtaagtcattggaggtggagatgtatatctaatgggtgggaatgcacaaatttgtaaatatgtgtcaagtgtaccattgggtacatgcggacaaggaatgtggagggaacaggagctgatacgtgagaaggagcacatttcagaatcaaaactattctgctttctaatactggctttgccacttatcaatcttgtgacttaaggaagttttctactctgagtctcagcttcatctctaaaatgaggataatgataactgtttgtgaaaaatattaagttggataaaataaaacaatgtaaatgactcaatttttttttctgagacaaagtcttcctatgtct

SEQ ID NO: 173308 - DNA, 135 bp, Homo sapiens
cccagagaggagagaagggtacagagactcagagagagagatctcgagagacaagagacagagatgggaaggggcggagaatgcaggaggaagggagaggaagagctctctaggtttacttcaggccccaaagcc

SEQ ID NO: 173309 - DNA, 311 bp, Homo sapiens
ttatttgtagttgaatatttacaatttcaaacgggttttctcttttcaataaaaagaaatgtgcctaaaaaaatacacacacacacacacagaaaacattttggggatcttggagtcacagagtagagagtagctggtttcctccaaaacttttagactttttagctgatctataatacttaaataaccagagcaataaactcttctcatttttacagtaatagaaatgtcaatattgtccattgattatctgtcctggtgggcctagtttggaggaagggagcacacccaacaattaatcagctgtcatt

SEQ ID NO: 173310 - DNA, 199 bp, Homo sapiens
ccacatgtaaaataatgaagttagacctctgcattcatacaatatacaaaaattaaaatagatcaaagacataaatgcaggccagacatggtggcttatgcctgtaatcccaacactttgggagactgaggtgggagatcatttgaggcaaggaattcaagaccagcctgggcaacatagcaagacccccatttgtatt

SEQ ID NO: 173311 - DNA, 588 bp, Homo sapiens
catatttacagtggccatataaactgtccctgtaggagttcctcaaattagaaacagtaagccatggagaaacttcactgtgctcattctttttctaaggtgaaagtcaaatgccattagtagtatgtaatttttcatccataacaaacttaagaattcatctcttctatagttttcttccttttcagaccataggaaaacgtgataccaatggcggaaaagatgacaacgtgtgaagttgctttgcaaattatggcagtgggccactctacataagggttatttcactgtggctgatcttgccttttgtgcctccttttcttgagcataacccaaagattttaaataaagactaatccaaaatgtcaacaataaaacagttttgctgtggattttaaacactagtatggatgagttagggttatctgttattctctggacttattgctccatcccagggatctccatttgttcacttgagtagccattgctcctctatgcactaattataccttgggattcctttttatttgagatgggggtctcgctctgtcactcaggctggagtgcagtagcacaatcacggct

SEQ ID NO: 173312 - DNA, 279 bp, Homo sapiens
ctgggtatagtggctcacacctgtaatctcagcactttgggaggctgcttgaggctaggaggtcaacaccaacctgtgcctgtagtcttatctactcgggaggctgagacaggaggactgcttgagcctcctgagtagctagaacaacaggtatgctctaccatatctggctaatttttttttaaagctacatatgtcatgaacgcataaaatttatgtagatcctagtctattttatcatttactaccataaaatatatatgtcttttttttttttct

SEQ ID NO: 173313 - DNA, 480 bp, Homo sapiens
tcagttctgggaaatccctgcccctttcctggaaacctcacaaataatccaccctttgtttagcatagaatcaagaaataatcataagaacactcagttaagcagcccatgtcgctgctctatggagtagccatttttctgtttcttctttaataaaattgctttcactttactgggtggactcgtctcgaactctttcttatgcaaggtccaagaaccctctcctggggtctggatcaggacccctttccagttacactacctccttaagccttctgacctcttcctcaatagtatgttgagaaagttctggcactatcctcctcattttactctaggccaagttcaatcctgaccatctgttaggactagctctgggatctcctgctatagcactggatcttgagttgtgggtaaaggccctcaaacgggaaaaactccccagggccaggcttatattccaccccacccccagtccaa

SEQ ID NO: 173314 - DNA, 156 bp, Homo sapiens
ttgatcaacagagcggcatttctggtctcagattcctggattgcaccaaatgacctctgaggggataacagaggactccacgcaggaagggttcaggcagtcatgttgcccaacatgtgcggtgacagcataaacaccagggtgacttgtcccagg

SEQ ID NO: 173315 - DNA, 800 bp, Homo sapiens
tcacctggcagcctcgcggcgctaaagccggcggagcctgagacagcgcgcggcgaggcggtcacgctccacccccgcgtggcggcaggactcggatttcgcccctggttttaaaattgtgccggtggagcccgggacgctgggaagagcgttctgcgcccctccagtcgcggtctccgccctaaaccgacttccagagccgcctctgctccctggaggggcgcagtggcggacaccggcgtcccacgaagtcgcaggtcctcagtctgagggctgccccgcacgctcggaatgcaggagggtctccgcctcgctgcgctgcccctgggggcggaggcgtgcgctgcaggcgagagaggcggcccggtatcgatggagaagcacagagggctttgaggtcgcaacgtcccggttgctgagcggagtcgggagtcaggttccaaagggacagcgctcagggttgtaatcaccacccggcccaccgcttccgcagctgcgagtctagggcggagctgttgggtggaccgagcaggcgaggcgcaggcaggcagcggctccgcctcggaatccgcctcgaccggggcccaggtgcccgccccacctgtccctcggtcaccccaaccctgtttcctcgacccccagcactcctccaggcctagttcgcttcagaagcgcaagacccggaaaacaaggaagaagcgagctcagcctcaatccccgtccccaccccactttcgggaccgctaagctggagaattgaagggggcggaccccggattaaagccgctcccttcccagcc

SEQ ID NO: 173316 - DNA, 145 bp, Homo sapiens
caccagaaaatgccaccatattccctttctgttaatctccaacattctggtttctaaacaaaaaattaatgatctgctcttaaactttcaagaaatggaatcacactatgtactctttcaggtctgtctggtttcttttgcttca

SEQ ID NO: 173317 - DNA, 316 bp, Homo sapiens
ggaaaactctagcctgatgtaaaaatctacattcattctgcagcactatggtaataggtgttttatgattctctcctttgatcaacgtgtctggttatccaacttgtgaagctcttgtgagggcttctaaagtatgaagatgagaacaacaggttagttaatcttggcattgcatgaccctagatacccagtcattatttgcatttaacgtgggatatcagaagtgtccttatgcgaatgctgtgtgcgtctattcctaatgaactgcttagtgtgatgtaggtagtgcctacgacacttcttctttgctcctcta

SEQ ID NO: 173318 - DNA, 334 bp, Homo sapiens
acaacacagagaaagatctgaatctttggccaaacatgatagaaaggccttcataacagtttacagagacaatcttcaattttgtatgcttcatacattttacagaatctgtaacagtgtgagaaacaagaccaaagctcatcaacataaaaatttccacagccaatttataaagtttatgaagagaattctattagtgaccaaacagtacatttttatgctatccagctgttttacttcaatggccaaagaggacgtgtgagaataaatcatcatcatttgtaaaaagtccttgggggactcacatgatagtctaactgtcagtataatctct

SEQ ID NO: 173319 - DNA, 476 bp, Homo sapiens
tgtcatggaggaagctgggatgcagttgtggatgagtgaatttatgatggggaaatttaacacagggctgattcatggcttttcatcccaggcctgggggaagctcagacccctgtactccggctgccttcatttatttcagactcgtgtgtgaagaggccgggggtgggagaagggtgaagaaaaggttgaacaccaggcatggggcgagagcgccttcacccaccaggctcctcaggaacccagtcctgggaaatggccttgcagagggaacagtcgcagctgggttccattctccagtttctaaaaggaggcaggaaaaaaatcattctgcacatttgcagtcgtctccctgcctggcttttttttttctttcctgcaagcacagaggacgtggtccctgtgtcctgccacagcgcgtgggggctcgttaattaaagagccgagcagatgtcactgttcattaagcgcggccg

SEQ ID NO: 173320 - DNA, 309 bp, Homo sapiens
cagtgtttgcaaaaaagaaggtgttaccactttttacccctagctgtgtcaatggaacagccaatgccttggcctactgtgactggacacgcattctgacttgcagctgcagtttcccttcttatggctgctcccagataagaccgctgcacagaacccagtcctggcaactgctgcctggtcctctccagcggcctgtgcagagttccacactagctccttgtttatatcagtcccgtaattaagccagggccaggaagagaagtcccaaagagggcaacgaaagtgcaaggcaaagaactggctttc

SEQ ID NO: 173321 - DNA, 323 bp, Homo sapiens
agggcaatggggtctgacagggtacactttaaggcaggagtaggtgagagaaaaataattgttttggccaggcgcggtggctcaggcctgtaatcccagcactttgggaggccgaggcggatggatcatgaggtcaggagatcgagatcatcctggctaacacggtgaaacccctgtctctactaaaaaatacaaaaaattagccgggcgtggtggcaggcgcctgtagtcccagctactcggggattacaggcatgaaaccatgcccagccgatttctctcattttttgttttttttttttaagagacaaggtctcgctgtg

SEQ ID NO: 173322 - DNA, 512 bp, Homo sapiens
ccttgtaccatccttgcaccttctctgaactcctctgtatcaatagttttacttcttaacattattttctactctagaaaaacttcaaaatggatacattttgctcaaataataggcaacgttccctgtttgggcatttctgttctttcctgcaggcactcatttactcattccacaagtgtctgccaaaggcctgctagccccacgcactgtgcaggctgtgcagacggattgcagacgcagccacaggtcagcacaggagagtgagaagtgacttcaggacaccaggcacatccgtcagcgaccaagcaggaaatcgtccaaaggaagagactctagagaaaggattctttacggaggtatgggtagggctgggggaccacacaggagatggcggggaaccccgagacttctcacagtgggcagtgccaccttccctacgactaaaggagcaaggaaaggcaggtgagagctggaacctagaggagaaggctgtcgtcatgaagggtcag

SEQ ID NO: 173323 - DNA, 276 bp, Homo sapiens
ttagtacacacaggccaaaacaggcacctaatttgctcaccctgagtcacctaaaagctgagctgcagatgggcctcaggtaccctgaccctaccacgactcatctccatctttctctgcatgttggttttattccttttcctggctggaaaaatggtcaccagcagcttgcaggccccacactccctgcctacccttcccagaggatctgagcatgaaagcggtaatgttagatccatgggcttaggaataatgcctagctgtgctgactggggc

SEQ ID NO: 173324 - DNA, 849 bp, Homo sapiens
aatgacacgtaaaggtttaaaattcagggatgtgaaaccatacagcaggcaaatgaaatttaaaaagtaggtatagcagtatcacaatagacaaaaaagtaatcaagaagcaaatctttagaagggaaaaagaaatatttttaccaccaaaaagaataaccttccacaagtggataacaatcaccaattatctatatacttaacaatatagctttgaaatatataaagaaaaaaagacaaaacccataacacaacttgacaatcacaatcagattagaacacctctctctgaaaataagagacaaatcaaaagaaaaataagtaatactatgaaggctaggaataacaaattctaatcaacctaagagacataatattaacctgataacgaatatatgtactcaggaccccacataaaaagaactcacttcacagagaatggctgcacagcagccaacaaagaaagtattaacaaatttctaaatactgctaacctgcagatcatactcactaacctaaatacagtaacataagaaataatgaaataacagacaaaaaaaattaatgggaaattttaaaccacattttaaaataatgtatgggtttgagaataaatgaatggttaaattttaaaatcaaattgaatgacaatcactacactacctgagaaaactgtgagatactaccaaaatggtactcataggaaacagtacatcaaatggcatttcagagaataaaagagtttaaaaataaatgacttatttcaaaacaagcactagaaaaatgaacaaagtaaaaagaacaaaaatagtagaattgattaggataaaagaatgtaataaatacatg

SEQ ID NO: 173325 - DNA, 211 bp, Homo sapiens
tgacagactcgaaatactggttttctgatttctaatacaatatgtcatattattccccaaaagtaaataaatatatttgtacaagtgaaaaatgaaaagaaaatgtctcgtgtagatatgattcttaaagagggtatttgctatggattgcatcctaatgggggcctctttaggcagtggtttgtttgtttgtttgtttgtttgttttttg

SEQ ID NO: 173326 - DNA, 463 bp, Homo sapiens
agttagggcctcagtatcctcagctgtgctacatccaaggtagatcctccatcccatgaataggggctgggtggaagaagggacccccacctcttgactatactgacccaatactcagccccagcaataggcagctggggactggatgagaaatgctgtcatcccacccctcctaggaagatagctctctgagtggaagcttggaaaacagggagcctcgtactcttggctgcaccagtctggagtggagtttccatcttgctgagctgggattgggaaggaagggactatgccctggttcagacaccacagactcactattcttactgagcagtagtaggttttcttgaataaatgtttcttcatatgctgtatgtccccaggaccatttgcagagactttaaatagttgtccttttatgattttcaccagttttgccaaggagtttgtccacagagctctt

SEQ ID NO: 173327 - DNA, 450 bp, Homo sapiens
tctagtcagacataaagctggagaggttggttctgcccctgaagatcgaaggtttggcagtctttcctattgccaaaagaacgatgtcggaggccacatccatctccctaggtgtcgatgtgacgctgtctccacgaactggtttgtgggggagcagactttgccacaggccctgtttgagttccttactctttacacattctcagaactctttctccccctgtcttcctgccacttccttttctaccgttttcatcctggatgtgttgatgcgagatccacacagtgccctggctcaaattttacccaggacactctcaggacagggtttaaatacgaccccaatcttcacaatcccaactctgctgggctgagttgccaagtagaggttggcattgtggcttccgaggacttgaactgaattgagcctctgtctccgctcccctggca

SEQ ID NO: 173328 - DNA, 285 bp, Homo sapiens
catctgaaagctagatctcggagaaaatgtgacatgaaagcgaacagatggggtaattgaggaccaaaaaaaaaaagaaaatgctgcagggctttctgtgatactaatatcttctgtttagctgagcagcacctgataaattagggcataatttcatctgtataaaatgatataaatccttggaagggaggcatgagaattatctagtaaatatgaagatttccaaaataaggagtacttattttgcaacaggtaatattaggcaagttctaggtcatcaaattg

SEQ ID NO: 173329 - DNA, 212 bp, Homo sapiens
tggtgttctcttagcttcctgaatttgtagtttggtgtctgacattaatttggggaaaattctccatcattattgcttcaaatactacttttccattttttctcctctgttattccagttacatgcatgttacaccttttatggttgcacggttcttcaatattctgttctttttttttttttttttgagatggggtctcactctgttgccc

SEQ ID NO: 173330 - DNA, 484 bp, Homo sapiens
caaaacacgccacttccttttccagcaccaactgggtgctaccagcactaactcgtcttctaagcactaagtagtgcccagtgggccatggcagcctataagaagggctgactaccagctgtgtgaccctgggcttaaggccatgaggcagggctgggcagtgactcttcgctaacctgggagtgggagacctttactgtagctgcaccacttacctgccggtgaccttgctcaagctgcgtcttccctgggccgtggtttctgcatctgtaaaatcggagaaatgcactaggacagtggttcttaaggtgtggccccttcagcatcagcatcatttgagaacttgttagaaatactaattctaggctgggcatggtggttcatacctatgatcccaacaatttggaaggcccaagcaggaggagtacttgaggccaggagtttaggaccagtctgggcaacagagcgagacctcgtctgcaca

SEQ ID NO: 173331 - DNA, 643 bp, Homo sapiens
ggcgcggtggttcatgcctgtaatcccagcactttgggaggccgaggtggtggatcacctgaggtcagcagttcaagacaagcctggataacatagtgaaaccctgtttctactaaaaaatacataaaattagccgggtgtggtggcacgcgcctgtaatcccagccactcaggaggctgaggtggaagaatcgcttgaaccaggaggagaaggttgcagtgggccgagatcgcgccattgcactccagcttgggcaacaactaaccatcaaccacagaaaaatgccaaggaaaaactcagacagcttttcatgatcttccaatcataatgatgaaaaattaaagggatatgatgcataatttaaaatacgctgtctgggcgtggtgcttcacacctgtaatcccaacacttcgtaaggcttaagcaggaggatcgcttgagcccaggagttcgagaccagccagggcaacatagtgagaccactgtctctacaaaaggtttaaaaattagccaggcgtggtggtgtgcgcctgtggtcccagctaccccggaggctgaggcaggacgatggcctgagcccaagaggtggaggctgcagggaaccgtgtttgtgccactgtactccagcctgggcaaccaagc

SEQ ID NO: 173332 - DNA, 692 bp, Homo sapiens
aatgtgccggcacataatagtggataaataagtatttgatgcatgaatgaaaattacatactgttactcattattagaggataaagtaggcgggacacaaagtgagtctggaaagaataggcattatataataaagacgttatattcgtttttcaagctcttcatcaattcaacaaatatgtgtcaagctaccactgtgttccaggtatgctattcaaaatgaggatatgttggaaagctttcttatgagaggatgaaaagttttcacttctgataacttttaggctgttaaggaataaaataagataggaccctccacagatccctaatgagttttttttgcacgaatagcaagtcatttatgcattctttcatacattcattctataaacatttaattgatactgtgaaatagatattttgaaaggtcctggaaatacaataatgaagaaacaaaaagactccctcaagttgctcgatttaggtgatgacacagaaagatccttgctgtaatggagtatgtcaagagtagtggaaacatggcagagtagtttaaactgaaacttgaaaggattagaacagctagtctgatgctattgggataaagaaattttaagctaagaagcaatcccaacaaaagtccagagacttgagagaacaggactttaagggaattgcaagtaggttcgtat

SEQ ID NO: 173333 - DNA, 495 bp, Homo sapiens
tggctgaatgccagaagaaacatttggcttggcttgcattttacacaaacacacacacacacacacacacacgcaaatttttttgagagacaaggtcttgtgctgttgcccaggctagagtgcagtggtgtgatcatactcgctgtaccctcaacctcctgggctcaagctatcctccctcctcagcctcccaagtagctgagactgcaggcacatgccaacactccagctaattttttaaattttttgtagagatgaggtctcattatgttgcccaggctgtctcgaactcctggtcttaaatgatcctcccactttagcctcccaaagtgctggaattacaggtgtaagccacctcacctggactgcattttttttaaaataaaaaagtatattaaatataagaatcacacttggtataacagacacaaacttaccatctctactcctcatggaacatgttcactgtgtgaaatggcatacagaacagactgc

SEQ ID NO: 173334 - DNA, 319 bp, Homo sapiens
ggagctatactatgaaaagaaaattgcttaattttaggagtgaaattacaaatgagaaatactgcagcaaagacctgcccttctaaaagttcttgaatctacctcaaatttctccagacaacaggtttatctcagcatcttctaattcacctttcttttcctctaaaaccagccttgaagttaagatttttaaaaaattgtacttggcagatttaattatcaatgtggcaagcttatgtgtgcctgtgtgtgttggctgattgtagaaaaccgtaaacatgaaaaggtagacagagtgacccagtgagcccccacacat

SEQ ID NO: 173335 - DNA, 381 bp, Homo sapiens
tcaaacacattcagctatttggttgtgggttttcaggaagccaggcctttgcatagtgcagatgctgtaaaatggtatcttgaataaagaaacttaaatattgctttaagtgagccacacctgtgtcatgcatcctttaccaggaaacctatactgctgggagtccatacaaggagtcctttcttgttgtctacttgacaagacatggctctccactaggctgcattatttaagggccaaggtaatgggatggggtttttcttctgtctttttcaaatgaaggagctcttgaagacttatgataaattatgctggaagttatcaaaatattctattccaagtgcttttagaaatgattttttttaaatgatttttttttct

SEQ ID NO: 173336 - DNA, 155 bp, Homo sapiens
cccaggctaagccggcatgttcagcagtggggggtcgcagctcaggggtcaccccatgaagccactggtcttcaccgtggatccgcacaggggtctaaagctgcctgggtcctgacctggcactctgggtccacccagctacccccagcgaaacc

SEQ ID NO: 173337 - DNA, 544 bp, Homo sapiens
agaagtctgcttgttgctctaccctctgtagctgagctaatacctgaggtgcaagacagagagtctcctttattttccccctgcttttctcaaacaggagtctttcactgtagccctcacagctgggaatgtgctgggtcacacctgaagccagcatgtctcagagcccagtgcctatggtatactacctggatagtgctgttgataattcagggccttggcgctctttagtcagcagggggtaaatcctgccaggtttcctctgtgacagggcagcactgagttaagttaaagtgccccagtcactgcattctccctctactaaatgcacagatttctccccaccacgcagccactgctggggatgggggaggcatggcagaagcactcccttagtcaccctggctggtgtcttagtaggttgtgtgcctcctactctagtccactggctctgggcccagcttagcactagggcttgcctaggaattgcagtccttgtggcctaacctgcccctcaagaccacttagggccccagagcactct

SEQ ID NO: 173338 - DNA, 379 bp, Homo sapiens
tttctatccaaccccatccatcttaagagtgaagagatgacagagcccagttaactctctccctcactaggcccccgctcaccctgttccctatatccaaaccaccaaggcctaccaacccacccagttcaatctgcaagaaacagtcctatagaatgactggttctatctaatgggcttcccaaagctcaggtatgcccaagtatcagctttcatcacattactttaatagggttagcatcactggtccaggccttttctaatcatcttcaaaaacgaccacttagttacccatggctgacaacattctacaaaggaggaggcgggaagacttaaggcagcaggaaaaagtcaacaaaccaaccaacaatccagaatg

SEQ ID NO: 173339 - DNA, 191 bp, Homo sapiens
ccaacccacttctgtctccccagggtttctcacatgttttactgtactttttcagatcattaactttctcttttttcaagcaaggttgatgttgtgcaaggttaggattcagaaggagttggcaacttgtgttcctttataatgaagattaacaataaaacttcacgttggggaaaaatgagctcagtaca

SEQ ID NO: 173340 - DNA, 367 bp, Homo sapiens
cttcggacatgataagtgcgcgatcgaatatttggtactaccacctagatcagcagctgcgagtggaattacccgggtgccgcgccctaggcttaagggatcaccggagcggaccacctggcccgcgcggacatccgctcggacctcaatcaggtaggtaccaactaggtaaccttaggcaagttgctaatctctctaagcttgtatttccttgtttgtaaagtggggataataccactgaccattgcaagctttggaggaaaattaggtgaaatgatgtctgcaaagcactgggcatgtttatggacacttagtgtcagtatgcttccctattctctctttcgtggtctagagtgcagattttgag

SEQ ID NO: 173341 - DNA, 578 bp, Homo sapiens
taggtcacacagctattaagtagcaggacaaggatttgattggctttatagcctatgtcctttctattacactaaactgcctctccatatgacaatttaaagaaacattacacccttggaaagtatcagcaatagtagtgtgtttagcattcaaacgtttgttagaaaaaaagagagtggtggtttatgaaaagtaggtacagggcgagcataccttcatttctgctactttctgctgcagtggttaactgtgtgccttctgcctcccctcagtcctctggctggttatgtttattacatgttctgacagttgaggcctgtggtgaaaaatgataacagatttgtattctcaagatcatctccagatgctgactagaagcacctctggattcatgatatatttatctttagtatttcttgaagatgaatgattgaaaaaaaagttctaggagcacttcagcataaatcacagagaattcctttctgtggcaatatggaatgtgtttctctatttctttaagaagaataatgtgtgtattaataacttggttggaatggggactgggccaagatgagat

SEQ ID NO: 173342 - DNA, 468 bp, Homo sapiens
gctacctaatatttctttgattaatacaattcatttaaccagtatttgctatagataagtacagtttgcagtttgagacttgccaaaaagtaaaaaagtaccctggtgaacaaattttattatctttgtgtgctttgaatctatctgaagtttaaattactagtatggaacttgatgggtaaagggtagccgaatttttgatattatgaaattgctctccaaagagaccatgccagtttatactctaataaatagatacataggtaaggggtggtgtatgtttctccacacttcggccaacacacttttcatcacacttttaaatctttgccaaactgataagtaaaaaatagtatctattttaatttgcatttccttaatagagcgaggttgaatctattcagacacttcctgttcttagctccagtattaatttttccactgagttatttgtctttttattcttgg

SEQ ID NO: 173343 - DNA, 585 bp, Homo sapiens
ttagaaagaatttggggtagatttcatattattttagtttgtaatgattttgtactttatattgaactaatttacctgggattaattttggtgtctggtgtggtttaaggatttccacattgaagatggggagatgggctgaggggatatgttagtattccacacaggaaggaacaaaggaaggtacaaaggaaaaggaagggaagctaagagttttaggaaaatgtgagagggagaagcagcttaactgatgtgacttaatgggatgtggggtgggaaggactataggaggaatcttgggtttcttgttttgctgatgctgctagcttcactataaacatttccattatcttcctgtgttaattccttattttgtctggttgttttctggaacttctactaataataattataatggtagctactaccagttattaagcaactgcaggtccacaaagctttctctagaacccttggagcaagatgtgtttcagaattcagaatggtgcagattttagaaaggtgaacaggtcatatactatgtgtggcataacatacccagcaggggctggagcagtaccccaa

SEQ ID NO: 173344 - DNA, 674 bp, Homo sapiens
gtgtgaaagcagacatgactacatataaaattcacagtatggctgtgttccataaagctttatttacaaaaatagatggtgggctgaatttgatttgaggggctggagtttgctggctcctggtctagataactctaggcatgtgtaaatttctgtatatctcaaaatgtcattgttgtttttaaagccaaacaccgtgtcttagaactgtatcattagtctcagcagcacggtgctttgcatggagtacctgtcagtagattttagttaaattattaaatatacttgactttgtcaaagcatataaagagagaaagcaatactaatacactagaatgtaagttccatgaaggcagaaacttccatctgtgttatttacagctctattttcagcttttagatgagggcttggcacataattggtgctcaataaatatttctcagtaaataaatgaaagcctgactttggaagaattaaaacgtaagagctaggtggaacaactgtatgaatggaatgtctaaaacaggttttttccaaacttttcttcggtgaaattacagttgagtgagactgtaatttcaccagtgtttctttggtcacatctcttcagggtgaccaacgaatcagaatagatgttgctataagatgggatcatctgtgccagctgggtcga

SEQ ID NO: 173345 - DNA, 204 bp, Homo sapiens
ggccttttcgccctggggaggatagatgtctgtgcactcctatgcaaattctgggaataaagtgcatatttaaagatttgctgaagtcatgtgttttggggtaggtgttaaataccaagataagaatcagttattaaatttactcagggctgggggtgcaatggcttgcgcctgtaatcctagcactttgggaggctggggtgg

SEQ ID NO: 173346 - DNA, 273 bp, Homo sapiens
ttttgcatccctctccctgtctctttatcctccttcttcccctccctcccactccacctccccttctcttccctcttttctctcttctccacttttccagaaacagaccccccacttcatgttctttgcctcagcctaaacaaatggaggaacggccagcaagggtcacatgttcatgcaggagaaaacagtggagaaggagagacgcagaacagcatgccgaggtccccagtgagcgagggcaagagatgtgggctgtaactgtgcccatgg

SEQ ID NO: 173347 - DNA, 175 bp, Homo sapiens
catattccagtccattacatcttcagtgttttctctttcatgtaatcccaatggtgtaaagattaaaaaataagagtattttgtctattccacatgacaacaaatagatgcaatcattcccaagcccttacccttccttctaagactttatctaccttcacccctcctctgactc

SEQ ID NO: 173348 - DNA, 144 bp, Homo sapiens
gagcagcaagtcaactgctagggctacgcgaggcaaagttggttggcaaccaggttcctcaatagctgtcatgctccagaaaagagccacttctacagcaggttccagaaaaaataaaggggatagattaacgtaaacattcaa

SEQ ID NO: 173349 - DNA, 463 bp, Homo sapiens
agtaaaatctctcttctagctgacaaacatttcagtatttgaagcagtctgtctagcatcaatccaataggtttttaatctacgagttccccaagtgtggtgccccaatcggcagcatgagtatcacgtatggacatatcagaaatgcaaattctgaagtcccagcacatacccacagaatcagaaactctgggggtggaacccagcaagctctggtttaacctgtcctccagatgatcctgatgcacactgaaggccagcgagctggaaaatcattaaaagtgaaagaggagaagtcgagaaacccttgggatgtggaatcagaatgtgttcattaaggtatctcggagatgttaggtaaaaagctacgtccagtgctcagggaactgcagttctataatcaagaggtgaaaaaaaaaaagatgcatcagtcttaatctacacagaaaaagactaattttca

SEQ ID NO: 173350 - DNA, 629 bp, Homo sapiens
tactggctgtttggacttactatccttgccatctagagttaacgtagccatgatggagtgttctcctggatccaacttgctaatatattatttagaatttctggtctatattcctgagacagaaactcagttttgacaaaaataaaaataacataaacaaactgtcataaagagaaatacatcactgctcatatctatgtttttgtgtcaatttaattccatgcgagatattaagatattattgttgatgtctaaatcatttaaaatactcaaaccataaggtattaaaaaattatcatctatatctaaatcatttaaaatactcaaaccatgttctaagttccatagcatttgctatacaagggttcctagtatattaaaaattttaaaaatatgctaaataaaatatttcacttaatattaaaatgcaaactacttaaacattaacaataattgtacttgccttcttagaatttagaaaggttgtttgttatatgatgatttcagggccaaagactctttcaaacacatctaagaaaatataatttgatacttttttccttataaatttcccagtagtaacaaaggaaatccaaaatcttccataattgttacagtaaccacaagtt

SEQ ID NO: 173351 - DNA, 291 bp, Homo sapiens
gtgttctctgtagcttctgcaggcctacttgtggatcaaagcttttgatcttactcaggaaataccccatcaacaagacgcttcctggttgtgtgtcctttaagccggatgtcagaagtggctccgtgcccctcgttgtatgtcaccacgcgttgaggccctcctaaactagatccttcgggacagctacagtggcatggacctctcacttcctgttctccttctgattcttcttcctcttcctcctcctacccctcttctttaattcttctccttctcctccttctcctc

SEQ ID NO: 173352 - DNA, 378 bp, Homo sapiens
ggctgctgttctagaggatccctggaatgatcactgatagcagtaaatggagaatcccgttggcaagactccatctcaaaacaaaaaaaaaacaacaaaaaaagaagtcaccatttggacagggttaatgtccttgttcatgtggaggaggtagggctgtgttccacagtggagcatggaggtttggcacacaggtgatctataaggtgtctcttggtacttccttgtccagtgtttgtggtaaatggacacgagaaaggcccagtgaccaccccatgaagtcagccacctggaccaacagaaatactagccatagattaaaggaatctagaatggctagtagagaagagttgttgatatcaattttaccgtctgtag

SEQ ID NO: 173353 - DNA, 542 bp, Homo sapiens
tagaggatcccctcctacgagcgcatattcagagatggaaacaagaagttttaaaataactcccagactcccaactgtacatgtatttacaaatgtatgacttgatcattgatttttagagggtaaacagaaccagacaagttcatatttttaactaggttatagcctgaatattgtattcggaaggaccatgttatttattaaactgtgtgaggctgccatgattatgctgtagataggcagaggtctccagagtcaattggggttgttgaatcacattcagcgaatgtccttccatctcaattgaagaagcttgctattgagggactcccctgaagtaatcaattaaaagcagtagcattaagcagctaatggtgctgagaaatcaatactggtatggggaaggaacaattccctgcaatgatttctatgcaaattctgattcttatacctaatgacattaggattcactaatgacacataactcaaggaattgcttctttcccagttaagcatgaagcacatttttgcccctacaacct

SEQ ID NO: 173354 - DNA, 205 bp, Homo sapiens
tacaggtaaatgggcccagcccctgagtttctgatctatcgactgtggggtgggacctgagaaactgcatttctaacaagctcccaggtaatgttgatgctgctggtcccccacagtttgacaaccactgagttggacaaggaaggagaggaagaggagcagagatttccaagcaacaggacagcttgcgtgatggcctgaggtg

SEQ ID NO: 173355 - DNA, 408 bp, Homo sapiens
atttatatgtatgtatttaaactgtgcctactaggaatacaatcctacccgtccacatgatgagctatacctgataggaggcaagttgaagccccaagttgatctaaaaatgagaaatactatgaattactgaaggcaacagggtatgtgagataggaaggcagggtgtgggaaatggtagaatgagcaagggggctcgggagtgtggtagatgcattacaccaagtgtttattactttgatgattggtggtaatgagagaagatgagagaagaggagtgggatatggagaaaacaatttcctagtcatctgtatgccccgtgacagtacacagcaatagcccagcaggagtgcacaggcaatatgtgattatgtcaacaaacaaaagttgaattctttatgtcaaca

SEQ ID NO: 173356 - DNA, 378 bp, Homo sapiens
ctggtgagcaggagccaagcccatgagtcatgggccttctccatgttcttcctcaacattggaaacaactttgttttggaatattgctcgtgaggaatccaaacacatagtgttgaatggtgaagggagataaaagatgagatagcacagtaggctgccttcccattcacttgcctaggccagtgatgtaggcgttgatcaatgctgtgtgagtgttctgtggggaaagtccggcaactccctctaaccatagtagcagactttgatcctcctgaaaaggttccctttgacctggttgttaagcattgtggatggtagtgcttgattatttccccccaccctggaagtacttgctagtataagagaatatgctgtctt

SEQ ID NO: 173357 - DNA, 692 bp, Homo sapiens
attctcgtttctttttgggtcctctagggtgttttaaaatttttttcatacaggtttggacacttcttactaagtttatttctggatgttttgttttatgttgctatgaatggagtcattgttggcatatatgaagctgttgatttctacatactaatattattccctgctttccttagttatttgtaattagattatataattgaggcagtaggcatccttgtctgtttagaatctaatagaaatgcctttagtgtttttctattacttttattatcatgatttgcttttcagtgtttttacattagataagatactggcttttgtggtcagatacagattatgattatataaatatagattacccatgctgcctgggtcagtgggagtgtgagcagaaagactgaggacactgctaatagccaaggtgcaacaaccaggaaaatctgttgattgaggaaacaacaatccctcaaaatttcgttattgcatccttaaacaaaaaatcaaatgggacaaaaataagatgtctattcctattcttctgttttctgtcgattcccttcttttgggtgactgtttctttactcatttcctctgtttatcttttgtggtctatttatagctttgcttccttcttaaaagttttgtgtcttaagttcattttgttatgtttcagttttcatctgctt

SEQ ID NO: 173358 - DNA, 809 bp, Homo sapiens
ctttgtagattttaatttgggatagctttatattacagtgttgactaaagttaaaccgccttgatttgttatgattgtctaataaagaaacttctgatggtgtgctaaagaaatgaagttgaactttcagctgtgtgccctcaagtaaatggttcttttttttttttttttgagatagagtctcactctgtcgcccaggctggagtgcagtggcacaatctcggctcactgcaacctccgcctcccaggttcaagcatttctctctgcctcggcctcccgagtagctgggattacaggcacccgccaccacatctggctaatttttgtattctttagtagagaagaggtttcaccatgttggccaggctgatcttgaactcctgacctcaggtgatccgcccacctccgcctcccaaaatgctgggattacaggcgtgagccaccgcacccagacaagtatatgtttctttactgcaattatggattgcctgggtgcactagcataaaacttcagcctcacacatgccaattctcaagtatatgggtctatgacaattttctaaaatgaatcaagtatcaattgaacattagagtataggaatcattcaaaaggctgattctgaaaaatgaaaaagaatagcttcatgttgatttccagctttttgcaatatcatttacgataactagaaaacactgaatcattctaaaattattatgggaatttgcttaacttcatttaagttggaaaacagatcttacacagccttaacaaggcttctaagtcttgccctttaatgacgtaattgtt

SEQ ID NO: 173359 - DNA, 474 bp, Homo sapiens
cgcactctggaagcaacacataatatttttgtttagtataagtatgccccatgctatatttgggaatacttacactaaaaggatatttattgtttacctgaaattcagacctactcagtgtctcgcatttgatcctgcaagcctgctccgtgggccgctggggctctccctttctaagggaggcacctgaaagtgtgaggatcaagagcagtaggaggtgtcagtaataaacctaataagcactgtccagggcatgacacgtcacctcagccccagagcctgctgaatccccaactcctgcttttctgtacctccccttcctcccactggcttctctgcttctgagctgcctgcctctggactttctcttttagtctgtgactttcccctaccctcacctctcctctttttttcctcattttgctctcactgatccgtaacacgtaattaaagtttacatatttgagtgttggt

SEQ ID NO: 173360 - DNA, 250 bp, Homo sapiens
gcccaaccacttacccatttaaatgcttatggactgtgactattttgaaaagagtgcaacactctttcgaaagttactcaccccattccgaatctgtcacctttggtggtcagcatgcttagatgaacagcgcttcacacaaggagtgtaaaggaggctctataactcttggagtgacacctttttgtgaaactgtcctttctcctatcatcttccatctgagtgagttcctgtttttactgacctgtaa

SEQ ID NO: 173361 - DNA, 298 bp, Homo sapiens
atgtgataaagaatctctgcttgaccaaagtgaattttacctacttatcttgggccttaaataagaatagataaattttgagtaaaagttcaacataacaaaggcacaggagtgaccctgttctatttcaggttataccatcagaggcacaaatgctaatgggaggaaggctggcagattccaaaggcaccactaagagattgcttaaagataaaacaatttaccttcattggaagcagaaaatgtgggttggagaattacaagattttttccatataactttaaacttttctcagta

SEQ ID NO: 173362 - DNA, 460 bp, Homo sapiens
caggaataatacgcgatgtcttttgaaaacaacagtcttgtctttcatgcaatgcttctgcacagaaacagccgtgagctgtcagtgtacagtgaatgggagaaagactaacaaaatgagcttccaagtatttttgagagatgggtttggcaccctaaaaacccccatggccagcaccataaaagaaactagaaaccccggagagaggcagaaagcggtccgcactgggcgggacctccactccaggggcaggcaggcacatcagtctggcaggaaggagcaagcgctgctgctcgtctctcagcacacgtggcaagcccaaggcagcaggtggtagagaaacagccgcttggcacaggctcgaggatggcgggagccgccaccctggcaccagaaggagttcagctacagtggcatcaagttcctgcttttataccagacaggacatgcctatatcctt

SEQ ID NO: 173363 - DNA, 244 bp, Homo sapiens
cgactggctcgctcgtcctgccgcgcccggggcgggctccagggagccgcggcttcacccgcgcaggggccgggcccgcatggagccgcggcgggtgcgggccggggttcccacggtgcctgtcgccgcgcgccggcgcgattggggcggcgagggtgggacgggcgccgcccggggccccctcccccgggccggctcctgcagaactagggggcgaggctgccgggaacgggggtggcggccg

SEQ ID NO: 173364 - DNA, 519 bp, Homo sapiens
agactgctggtgaggagtcagatgagacatgatgctagcttggacctgtattggagccgagaacaaagtggtttaattcttgggtgtatttcctaaatagagctgttggaatttgctggtggaatagaattcttttctttttctttgaggcaggatctcgatttgttgcccagcaggagttcagtggcacaaacatggctcaccacagcctcgaacccctgggctcaagcctcagcttccccagtagctgggaccataggcatgcaccactgcgcctgactaatgtttaacattttttgtagaaatggggtctcactttgttgtccagcctggcctcctaaaatgctgggattacaggtatgagctactgcgcctggcctagaaggaacacaatatttgaagggtagagtgtgtgagagaatgtgtcaaggatgatttcagggtttttggcctgaacatctgaaaggatggagttgacattaactgaaatggaaaagaaagacgcagggtctaggagag

SEQ ID NO: 173365 - DNA, 547 bp, Homo sapiens
agacagagtcagtgagatgggaagagcctgttgcccaggctggagtgtagtggcgcaatcttggctcactgcaacctccgcctcccaggttcaagcaattctcatgcctcagcctccagagtagctgggattacaggaacgtgccaccacgcccagctaattttttatatttttagtagagacagggtttcaccatgttgcccaggcttgtctcgaactcctgagctcaggcaatctgcccacctcagctctccaaagtcttaggattacaggcatgagccacggtgcccagccgagactccatttcctacagaaaatttaaaaattagccaggcatggtggtacgtgcttatagttccaactactcaggaggccaagatggcaggataacttgaacccaggaggtcaaggctgcagtgagccatgaaaaaaaaggaaggaagaaagaaatacccagctcttctgagtcccaattatagatgggaaaccctgggtgtgaccttctattcctcatgggcaagacaggacactgttcccagggtcacgg

SEQ ID NO: 173366 - DNA, 625 bp, Homo sapiens
tacctgtgctcctctggctaccttagtgctggcccctgaaatcccaaagtctgtgccctcaccctctcttcccccagctgggactcctccaggtacaaaaaaggttgatggtatttctcatacttcagcattggcacctgttgcttcctctcccaaagagtgcccaactgaggactctggtgcttctgctactgcatcttccaaaggaactctgacttacctagctgattccccatctcctttaggggttagtgtgtctcctcagactaaaagacctccaaccaagaagggttctgctggccctgatactcctattggaaatctctcatcccctgtttctccagttgaagcttcatttcttccagagaatagtctttctttccaaggctctaaagactcaccagccacgacgcattctcccactcctccatcccccaaaggggcccctactccctcagctgtgactcctctgtctcccaaaggagtaacactaccccccaaagagacccccactccttcagtggtgaatctgcccttccccaaagagggtccagctactccagcacccaaacaggctcctgctctatccatgacttcttcctcccccaaaaaggcccgagcaact

SEQ ID NO: 173367 - DNA, 638 bp, Homo sapiens
aattgaaaggctctggcatccagcagagctgggttcatacccagccttgataccaggcatctccgtttctgcctcagcctggctgtggcctttgtctctctgagtctctttggtttctttgagactcgtccagtggaccaccggaccctccaaggccgcgggggaggcctccagtggggctgtccttgaggggcccctcctgggatgcaggctggcaccaagccgctcacagtcacatccccacgcgtgtgccggctctggcacccgctccacgcgtgggctgccacgtggctccgaaagagccaggaaggagacggccaccgtccaacagggaggacaggcagatggagagggtgactcagcacgggggccagatgtggccagatgagaagagtaaacacgaaggccagacctgctgaggccccctcagagctgggcagggatggtgggggccgagcggtgacagacggacgggagatggggctgggggagatggatggcaccagcaggctcagccgagtgaggaaagccagacagatggtctcgttaaagaagccagcccgcgtgagggaacagggctccgcgcaggagtgggggacaaggcaggctcctccttgagaggggctcctccggcctgg

SEQ ID NO: 173368 - DNA, 363 bp, Homo sapiens
tgtactaagtccctgctattttacacagacaatggtcctaaagaagacactctggcactcctctgagaaatgtcaccagtgcctcctacacagaaaagctctcaaatgtggttttcttatggaaaataccacaggagggaaatgaagagttaagagtccttacagactcatatacagaacagcaattctaaaaagtagtgggaaaagcaatcattcaaaattgtgcatctctgtaacttaaaaaaaaaaatcaccattaaacagaacataggcaactttctcttaagtgtccaaaataaattattaatgataactggagataaatactacagatgagggatggtggggtgcgggggcaggagg

SEQ ID NO: 173369 - DNA, 467 bp, Homo sapiens
cgtgtgttcttgtgctggtggttcttgtgctggtcgagctgccgcagtgtgagattaagtgcaagcctatctcgctccagaccacttagtcgtgtggttctttgctggcaggactatggtgaatctccttaagcactctctaatcagacatcctgagtcgtcccaattcttagaccttttatacctgtttttctccttctgttattcatttagtttctcaattcatccaaaaccatatccaggccatcaccaatccttctatacgacaaatgtttcttctaacaaccccacaatatcaccccttaccacaagacctcccttcagcttaatctctcccactctaggttcccacgccgccccaatcccgcttgaagcagccctgagaaacatcgcccattctctctccatatcaccccccaaaaattttcaccgccccaacacttcaacaccattttgttttatttttc

SEQ ID NO: 173370 - DNA, 643 bp, Homo sapiens
atgtgtattcttggttagtgaatcctcactataacccccatgaagttggaccgttcctgtccccatctcacaggaaacaggcacagagaaattagttaacttgcctaaggtcatctgggtagcaagtgacagaacagggatttgaagccagaactttggactctagagcccacgcttttagtgaccaggcagacctgggaagtcttggagtccccaggggacagagcttccaggaacaggggagggcggagcagacctcatctccatccctcatcaattgtgcccatgctggctctcctgccgccagccttgccaaggggtcctgcagccctgacgtcaggatcaaccacaaataagccagagggaaagctgcacagagccccagggcctctgctggccaggcttcccaaacctccctggactgtggctgctggtaagccagactcgacatcccaaccaagcaacccctggggttgcttggttgaaactgcctttgcaaaattatgactgagacggtgaaagagatctaacttaaccaacgctagctatcttgcctctaacctccaagctgtccttgttcattcctgggcataggctgaactaactttgggagacatttagtttatagtttgaaacaaagatg

SEQ ID NO: 173371 - DNA, 780 bp, Homo sapiens
atgtgtattcttggttagtgaatcctcactataacccccatgaagttggaccgttcctgtccccatctcacaggaaacaggcacagagaaattagttaacttgcctaaggtcatctgggtagcaagtgacagaacagggatttgaagccagaactttggactctagagcccacgcttttagtgaccaggcagacctgggaagtcttggagtccccaggggacagagcttccaggaacaggggagggcggagcagacctcatctccatccctcatcaattgtgcccatgctggctctcctgccgccagccttgccaaggggtcctgcagccctgacgtcaggatcaaccacaaataagccagagggaaagctgcacagagccccagggcctctgctggccaggcttcccaaacctccctggactgtggctgctggtaagccagactcgacatcccaaccaagcgcagaccggccctgcacaaagtactccgattttatcatctattcccttttatcctgtctttgttcagcattgatcacagcccacctggtggattttgacatgtctcaacccagggtttgaaaaccagtgatctgtacagaagttctcacagaaagaatgatgtctggaatttgctgtaaaatacttcagtaaaacaacaacaacaaaatgctgtggggcacagggaggcgtcaccatgagagcagcgggatgctgtttactgttgagactgggagataggagagcatgacatactggtgtgtttgtttgaaaagtaat

SEQ ID NO: 173372 - DNA, 414 bp, Homo sapiens
ttaaatgccaccaacaaatatctttttcacagttaagtgggcacctggtctttgagaatcttctctggagacagctctctttggttccacaactcttccatccaccttgtgtggccttgcattcatagctgcatccacctcctccacagtggcatatgtgacaaacccaaagcccctggagcgcttggtgtttggatgtctcaacccagggtttgaaaaccagtgatctgtacagaagttctcacagaaagaatgatgtctggaatttgctgtaaaatacttcagtaaaacaacaacaacaaaatgctgtggggcacagggaggcgtcaccatgagagcagcgggatgctgtttactgttgagactgggagataggagagcatgacatactggtgtgtttgtttgaaaagtaat

SEQ ID NO: 173373 - DNA, 1281 bp, Homo sapiens
attcacaaaattggcatgtgtaaactttattaaactttaagctatttcctaagatgaagatgacaaacttggagggaaacttcattcatttggtttatttttatttttatttttatctggtttgagacagaatctcactgtgtcccccaagttggagtgcggtggtgcgatctcggctcactgaaacctctgcctcctgggttcaagcgattctcctgcttcaccctccgagtagctgggattacaggtgtgcaccaccacacccagctaatttttgtatttttagtagagacggtttcgccacattggccaggttggtgtcaaactcctggcctcaaagtgatccgcccaccttggcctcccaaagtggagcccccgtgccccttgtttgtgacctgtcaatataaatatgctcagtagcggggggaggggtggggggtgaaaaaggaaatatgtttaatattaagactttggccttttagtgtaaactgatattcaaaaatttcttcatagaacatttgcttctttgcttgatcatttttctaattctgtacatctaaaatgcccagaatttgagttgctgttatagtctactaacatagaactttggagtaataagatgggaatttgtctctcttttgccaagacaagtattcgtaatctaacacagtattgttgccacgagtacgagtatgtgatagactgttgagaataaagaaagcaggcacagttggtcagtcctaagataaaggagatgttttttcttatatgtttgtgcattaaagaaaaaaaaatcttgaatctgaccaatgatgttttttttccttgtaagaaaatttaacaaatgtttggcaagcttctggaatctaaatttgaaattatacatttgtcattttctttaaatatttcttcaccttagctttgattatgagaaatcactgtcctctgctgttctttttttttttttcttttgaggcggagtctcactctgtgccaggctggagtgcagtggtgcaatctcggctcactgcaacctccacttcctgggttcaaatgattctcctgccgcagcctcccgagtagctgggactacaggtgcatgccaccacacccagctaatttttgtatttttggtagagacagggtttcaccacgttgtccatggccaggatggtcttgatcttgaccttgtgatccgcccgcctcggcctcccaaagtgctgggattgcaggcatgagccaccgtgcccggcctgtcctctgtggttttctgggcttatg

SEQ ID NO: 173374 - DNA, 705 bp, Homo sapiens
aatgcaggtaaagagaatgtggtcatatgctggcaatattttgaaggtagagtcagaaagatgtgtttgtggactggatgttgggtgtaagaagacaagagagaagtcaaggatgattcaagattttaggcctgagtaattggaaggagggagtcgccacaaactgatttggggaagcagtagatagagcagatttggaagacaacctcagaagctcagtgtgggatatggtgacttggacgagccaattagtcatccagtggatggtggttggatgtccaagtctgaagttcagaggagagggactttagatctaactgtgggaatcactgttgtgtgggtgtacttaaagatctaaggtgttgagatcaccaaaggagtgcatgtagataaagaagctggccaagaactgaaccctggggactttcagtggcgcagggtcagggagatgtgtccaatgttattgactagctgagtaataaaaagactgggacttgattatattcatcattggatgtagcaacttcaagttctttagtgactttgtgaacccctattggagccctacaggattttttaattatactccatagcatttagaaaaatatttatcacagcctaatggctgaagagaacaatagtctcaaaacagaaagactccatttagaacactgttaaaacacagtgacctcaaggactaagttt

SEQ ID NO: 173375 - DNA, 386 bp, Homo sapiens
gaaatagtgagggccctggattttaaaatagcttgtttcagatatttaatttctaaacaactttctgcagtgctttctatcaaagctaacggcacaataaaactttgtgttgatgtcatgaaagctgtatatttatagtatgttggctatggtgaaggagacacagagaatttagatcgacaagacaaggcttggtatgattctgttttgttgcaggcaaagggggaaaaaaaaagaaaaaatgagaaacaccagagaattgtgtctcaggtggttgcaaatttttaaaatccattgtgttctgtctgaaaggtgaccccactgcctgggctggataagggactggccaccattggatcatattataattattattaccactcaga

SEQ ID NO: 173376 - DNA, 158 bp, Homo sapiens
ggaggagggccgggccttctgggtctgggacagttaagttggaggtgccttggagatgccagtcctgattgtctggcagacagctggatcaagggagaggtctgggaggtgccagaatggttgaggctctagagacagggcctgtggagtgagggagg

SEQ ID NO: 173377 - DNA, 406 bp, Homo sapiens
actagtgatccacttccatgccacagcacacagtaaaaatgtgacactgaacaggacaacccttcttgtaaaatcattcctttcttagaataagaacacagagtatcccaagaggaaagtcctgggacaggggattgagaaggaaagcaaaggctttgcgagaagcgcacaggaaaggcaggggggaaatcccatgcagactgacaccgggggcagcgggagcctgtttcggaaggagagaagagacccagatcactgaagtagcttcacaaaaaggaacccttcagaacgaagaccttttaaaaaattcagtcttgtgtttttttgttttttttgttttttttgtttttttttgagatggagttttgttcttgttgtccaggctggagtgcagtggcatgatctc

SEQ ID NO: 173378 - DNA, 259 bp, Homo sapiens
tgtattctttaaaagagtttagttttggcacataattgagttacttagaatcagcctggtcctttcaaaacctgccttgaagcttagggtaggtttagaaaggcctttagtctatagctaatttaaccccactttgaagactctagccaatgtcctttgtatgaaacagtctctccactatgcctaatggaaacataaactattcccagctctgtgtgagctcctggaattgttcagtgttctgatttccagtgtgact

SEQ ID NO: 173379 - DNA, 247 bp, Homo sapiens
tcaggtatggggcaacaataggcacagggtctgcggttttctctaccatcaagcaaagtggcccaagccatcagctgttgagaaaagcgtggcagctgcttttagatcttaagggcgtttctacagctttgagggccctggtattttcccttttctttgctgtctaacccacatcttcatgttacggtttcattcggcaagtgtgacgtgagctcaatgtgaagtccagctcttggcttttgtctag

SEQ ID NO: 173380 - DNA, 411 bp, Homo sapiens
cttaaagtacctaactcctttgtgtgtcatcgcaatttctctgtgatcccgaccctgcctacctctgtagcttcacttttgccactccctgctcacgttttacaccacagcaataatgaatgtttgcatttccccacctataccacacggcttttctctctcttttttttgagacagagtcttgctctgtcgcccaggctggagtgcagtggtgcgatcttggctcaccacagcctctgcctcccggggttcaagtcattctcccgcctcagcctcctgagtagcttagattacaggtgtgcaccaccatgcccagctaacttgtatttttaatagagaccagagtttcaccatgttggccaggctggtcttgaactcctgacctcaagtgatccacctgccttggcctcc

SEQ ID NO: 173381 - DNA, 196 bp, Homo sapiens
tacatttaatcccaacactcaacttctagtactactatctaaacactctctcctaaggccaccagtcaccagacccaagggtctgtccaaaggctcacttgcagttgtcatgctacctaatctctctgtagcatgtagcactgttttctatcatctcctttatgaaattctctcctctatggtgttggagatacca

SEQ ID NO: 173382 - DNA, 508 bp, Homo sapiens
aagaaaggaaggggcttgtgctgggcacttggagtttatttctgattgcatttgctcatctcctgatgagagattttagtctaaaaaccgtctccagagcctcaagctctcttggctcagtggtctgtttccatgcactgagagaggtgtctgcaggagagcatcgtgcttgaccttccacgctctcgtgtccactagcaggcaggttttctgacacaggctgcggaattcaggacagtgcatcatggagaaacatacatcttgggggccattctaaagaacagacatctgggtcctcctcacagcttattctattactggaatggaattggcttcacctttcagtccctgtacccccaaacacctgtgctccctgccatactctagaatcccaactgttaaaatagatgggtaagtcattccctcttttttttcatttcatcctgttcttattgtcaagtgacaattcttattctttttttttttttttttttttttttagaaaagg

SEQ ID NO: 173383 - DNA, 523 bp, Homo sapiens
aaaacaacagaaaacttttcatggctcccaggagcatttatatgactaacaagttatctttccttgctgatagttccactttcctcgtgtttgacagaaatgactcttagtttaggaactcctcattagctgtttccaggagcagtggggtatcattttgatgcttctttatttcttctatgcaactaaaatacaaagtgaagatacgatgtctctgaaatgataaagctacatttgtcaaaaagcacatattttccattcgacattttggcttaaagaaatgaaaactacagaatgactttttcctttatctgggtctgtgctgtgtatttacctatttaaaaagatatacaggtgaaaaatattttttgaaatgaacttgtctgaatcaagatgcacactcttgcagcaacatcacagggtgtctctgtcactgaggactctgtcctcatttgtgtgggctgactgggtcgctggctgtgggaggcacacatttgctatcttggtgcagcagtttgtagtc

SEQ ID NO: 173384 - DNA, 633 bp, Homo sapiens
gtggttttaatagactttatattttagagcaattttaggtttacagcaaaattgagagggtacagagatttcctatatagttgttgtccccacacatgcatagtctccaccattttcaacatctcccaccaaagaggtacatttgcagtaattgatgaacctacactgacacatcattatcactcaaagtccacagtttacattagggttcactcttggtgttgtacattttagggggttggacatatgtacaatgacaggtatttataattatagtatcatacagagtagtttcgctgccctaaaaatcttctgtgctccaattattcctccctcccctcccccacccactgctttttactgtctccatagttttgccttttccagaatacatcccagtgtcatatagttggcatcatttaatatgaagccttttcagactggcttcatttagtagcattcatttaagttcctctgtgacttcttatagcttgataactcataatttgtcatagcttgatttaagcactgaataatgactacatgcaccacaatttatttacccatttacctactgaaagacattttgggttgagttttggcaattatagataaagctgctataaacatcca

SEQ ID NO: 173385 - DNA, 664 bp, Homo sapiens
tcagattatggaaagtcttaaatatcaatgtgatgaaatttttgaacatccggtttccaaatcagtattcaatttttttaaaaggatgtacctggttatagtgtgcagtggaggggatacatccttaaacaaacaggctgcgagtcagtcagcaagatacagtttagtcctcatccttttcagtcttactgctaccatcctagctcagtgcttcatcacttcctttctggattatgttaagtctcctgatcaagttcttaccttcaaatattatcttttctggaatatttggaaacaatgcataaaatagattcatctccaaaaaaagttcctttgcaaataccgttctccttgcttagaaaaatttcagatgttctccatttttgacaaggaaaagctgaattattttttaatatatatccacaattaaacacttgcccaaataataactgtgtttatagcctatatcttttcattcttttttttctgttactctttaatgttctatacattttctttttgacatacattgctatattctggtcaggtttaattacatacaaaattcctaaccctgtgtttgtttttaatgatttttagatcatttaatcattttatcactgaagatttggtgctttcttttttttcttgatttactttattt

SEQ ID NO: 173386 - DNA, 895 bp, Homo sapiens
cctctaggtcacactactgccaccactactgctacaactcattctgcctccactgccaccagcagcctctagcgggtttgatgttcccacctatcccagaacattgagccttcccacttaactccgcagaaaggatgccaggaattttttacaagtgcaatgctagcaaaggctggggaaaatgagacaaaaaacctgatttccaagagcagacaagttttacaaggggcagtcttcttcgctgaagttgactaaaatttagccacgggttggcttgtgctggtgtggttcactgggtacatccacaagactacaagaatatcactgctgtctgcagtcttcccaggggaggaccaccctacccttggcccacaccacggatggcggccccacatccaccctctgatgcagcccagtcccttcccttctgttccgcggcagcaccggtgcctggccacttcccttgccagttcccttcctgtttcaaaaactctcatctcttcacaaaattccctccagggatgctagttcctgttggaaaaggtcttgaggtgtgtcacaggcaaagtacaaatgatatgcccagggccagatggatgacaggcccctaagctcagctagtccagagtcaggaggggacctgcagaattctaatggtgaatgattacactcttacagttttggaattccagcaaaaacaccaatactaaaatcaccaaccaagacaaagacgagacttacggcccacgcaggcttctgcacactctgtgcccagacatggacagattaatgtgggttggttggttggtttttttccaagattactattccacagcaaagtacataggcaacgctgaccaatatgcagaaacataattactatctcaccaagctg

SEQ ID NO: 173387 - DNA, 177 bp, Homo sapiens
atccactggcatacaatcaatgccataaactcctctaccaacagaaatgaccctgtcattcatcatacaggtgctctctctctccctctgataagctcctaaacttcaggtttgtgtcagagacaaagcaatgatcagagctaactgcggggcttggtgaatcaaacactcatccac

SEQ ID NO: 173388 - DNA, 406 bp, Homo sapiens
aactactttcctttctagctctgtggattttcctattccggacatcttatgcaaatggaacatgtaatgtgtggcctttatatcgggctttttgcagaatattcacttagcacaagtttcattcgtgttgtagaatctattaaacacttcattcctcgatattgctgagtaatattctattgtgtggatataccacatttttccattcatccgttgaaggacatgtgggttgtttctactttttgactattacaaataaaatgctgcaatgaacattcatgcacaagcttttatgtgaacatactttcagttgtcttgggtatatatctaggagtagaacttccgggtcatatggtaactctgtttagcatgttgaggagctgccactctgctttttaaatcaact

SEQ ID NO: 173389 - DNA, 506 bp, Homo sapiens
tattctgcttggggctcattaaacttcctgggatttgtgagtttatagtttccatcccatctgaaaaatgttcagctttttttcttcaaatatttttttctgatctccctcttcttgaaagtccaattgtaggtatgataagcaacttgctattgttccacagctgcttactgaagctctgtttttatcttaagcctctatttcttttctctctgtgctttgtgctttattttggataggtttttattatttatttatttatttatttatttatttatttatttattttgagacagatgcagtcttgctttgtcatccagactgtagagcagtggcacgatctcaacttattgcaccctccacctcccgggctcaagtgagtctcctgcctcagcctcttgagtagctgggattataggcatgagccacaacgcctggctaatttttgtatttttttattttttagtagagacagggttttgccatgttggccaagctggtctcga

SEQ ID NO: 173390 - DNA, 399 bp, Homo sapiens
tgcatgtgtcttttttctgatccttgaaaactaagctcattcacttactggggactttgcacttgctgttgagcctagaaacttcttcatggctggttcctccttatgcgggagtcagctcggagcatccatcgctgactaccctatctaaagcagctacagtaaatcctcgcttaacatcgtcagtagtgttcttggaaactgtgattttaagtgagacaatgtactgtataacaaaaccagttttacaaagagttagattcctatggcatacagtacatcatttcacttaacattgcagtttccaagaacctatcaacaatgttaagtgaggacttatactttaaagcaatatgttggttttattgcagcatcttcttcgagtttccatgtagctct

SEQ ID NO: 173391 - DNA, 660 bp, Homo sapiens
gaggcaaccgatttcaaggagtagacaacagaaagagtaagactgaaatgcctgaaagaagggaaatttatgaggtgcagagagagctcaagtccaactagagtaccatagtcttaatgaactggaggaagcaaagattagagcttgggtgaagaggaatctacaaagagagggtacccaagaaaaatctgacttagcgattacccatgagtccacagctaaggccaagttgtgtaacagcagggaaagatcactctatatatcaagctactacagggttaagagcatagaagagataacagagagtcagtagtattaaagggagaataggatcaggccaacaaagtccacaaaagatccacaaggaaaacagagctggaaggctaaaagaaacatattacactttcagagattcacattaacaaaacataaagtcaagcctaaaattaaggtggcaaccagtaaataaactgcctactaaaacaaaaatatccacttttcaatgaaaggtaacagactccagagtctctatatattagccacaaagtccaatattcaatcaaaaatcactaaatatacaaagaaacgtgatccatagaaaaaattttttgaagtcaatagaaaccaaacccaagatgtccagatgtcgttctaagtaga

SEQ ID NO: 173392 - DNA, 277 bp, Homo sapiens
agatattctagcatgacatgctactttcctactgctgcttaacagaaatttgtcatcttactgttctgtaggtcagaagtctggcatggcctaaagttaagatgttgattcctctttggagactgcgagtggaatccatttcctcaccttttccagtgactggaggccacccatattccttgctcatggccccctcctccatctagcaaaggcctgtggaatcctcatattgtatcattctgaactcttctgccccgcatttccacttttaaggacc

SEQ ID NO: 173393 - DNA, 342 bp, Homo sapiens
gccttgtttttcagcacactcctataaattcaagtcatattgtaaatatatacatttggtaacatcttaagaaaagtggggaaaaattataatttgttcataatgggaatatcatagttatcaacacaagtttaaggttatattgattaaaaacaaaacaaaactcaatatttgaagagcaacctaacccaggattgcagaaattgcctccagcagtaggatgccaaggagttctaattaaacagactgaggttgggggattccagggagaaaaaaataaatagaacccctttctcatactatagattttcttttcatatactcttatcaagtattttgaaa

SEQ ID NO: 173394 - DNA, 372 bp, Homo sapiens
taattatttgataaatgagtgcgtggtgaaactgactctagataaatgcccatagcattggactgtaatttctaaaaaagaaataggaacccagttctgtggaaaactggagggaatcaccctcagggagtttgggaaggattcactgaggtggtgacatggcagctgagcctgagctgtcaagttaggaacaaattagaagaggaaattccaggcagagtgtatcagaagtgcacgagttattccaaggatgatgggttattagtttgttttgactggcatttaatgtgcatcaaggtggggtgcgatggaaaatgaggctggagaggggctttgaggtgaggcttgtaccttgtgaacactgatgtttga

SEQ ID NO: 173395 - DNA, 184 bp, Homo sapiens
cagtgggaacctttaacaaaggttccaatttttccacatctccaccaacacttattaaattgtttttttagtaatagccaagtgtcttagtctgttttgtatgtgataacagaataccacagactgagtaacttataatgaacagaaatttatttcttagagttctggaggctgagaagtctaa

SEQ ID NO: 173396 - DNA, 383 bp, Homo sapiens
ccgccggactctagaggagcctcgtatcgctcgcagaagccatttcatatctgtatttctactgctcatctataaaatgaacttggtctagagtccaggcaatccataacatatattctattaaactgttttttctatttctatttaaaagtacctatacacagccacaaggatttatctccttctaaggtttgaaacagctgctgagttccagcttactgaaaataccatctgctctcacacaaatcagctaagactttataaacaagaataaagcactcccaaacccagtcctgaagtcccatcttacatatgtcaaacttattttaatcagcttttttgaaaagaaccctttgaaaaagtgaactacgtttgaaacaaac

SEQ ID NO: 173397 - DNA, 333 bp, Homo sapiens
cctagttttagaagttcaatagcaaccgaaagaagttagcaggagggaggaaggaaaaaggtgctatgaaacttctaaaactaggtgctatgaaacttctaaaactaggcctagttttagaagtttcaatagtcaaaggaagtggcaggaaaaaaataatgggcaaggcaaaaatgatgaaataaaaatccaggaagcaacataaagtattaacaaaaccaaaggttggttctttaaaaatagtacaaaaatagacaagcctctggttatattaagatgacacagagaaagaggggagagggatggaagaaggaaggaaggaaaggaaggaag

SEQ ID NO: 173398 - DNA, 271 bp, Homo sapiens
ctttataataaaggttactcaccagtatgttttcatgatataatggcagaattgaattttagccttcagatttcaaagcaacctacttaaagtttaacaaagtgaaaatacagtaaatccatagaaacataccattatgttaagaagaaaagaaatgaacttccatggactactacaatgagagatggtctcagacttcaaaatgaagcatagtaagtgttagtagaatattgcactgccatttaggacaatagaaggaagtcgattttga

SEQ ID NO: 173399 - DNA, 737 bp, Homo sapiens
ggggcgggtatgcgggcagtaggaaggagaaagaagccatcctgggctctgagaaccgctgggtgcaccaggccatgtcacacacacagcaactcatttaatcctcacgcaactgcctgggtccgtgtgcccaggacccatccatggccacacagctagccggaaacctgatctgctgtagctaaaggccatgtttgctttctcagttcagggccgcctctttgaaatgcctctttggccgtgttaggaagacccaggggtttggggcagcaaggaggcaggaagaaggtctgggggagttatttggacaatgaagagagccaggcgggtcaaccatcctcttggctttgcacttgacagcaaccgcctccctcctgtttctcattttcttttattattaaatgctctaattttcttttattattattgttttttaaacatagagatggggttggccgagcacggtggctcacgcctgtaatcctagcactttgggaggccgaggtgggtggatcacctgaggtcaggagttcaagaccagcctggccaacatcgtgaaaccccgtctctactaaaaatacaaaaaaattagccaggcatggtggcacgcacctgtaatcctagctactgggaagatgagaccggagatcacttgaaccccggagatgggtgttgcgtgagccgagatccaccctaaaaatattattacggggagaagatgggccctaaaaaaaaaa

SEQ ID NO: 173400 - DNA, 349 bp, Homo sapiens
catctgtgcatgaattttagatactcagtgggaacaactagaaaaagggaatggatagagaagaataaatcacatagcagcaggaatagaagattttgctaatttttcagcatatttggaatataaactgaggtgtgatgtggcataaagttaccatgcatagatctggacacaaaaagtgtacagcaagtaaacttgacgagtgtgacatgaaaagttgtatttgatctcatagattaacagtacgttttaatagagtaagattcataattggaatcagaaatgtaataaaaagaatagagaatatgtaaagaacatatttgatgtgcttatgctgagacaggagaat

SEQ ID NO: 173401 - DNA, 471 bp, Homo sapiens
cctcaggtttgggaccgacacatccccagagtctgccttagcaaacacctactccacccacaagtgacccgatcacacccacccacgcatcgacccacgcacccgtccatgtctaccaagggctgactctgctgggcctggggcccatagcagtgcacccaacagtcagaaacatccctgtcctcgcagcactcacattctagaaggaaggaggcagtcaatgtatgagataaatcagaaaaacatctactaagtcgggtgagaaatgctgacatagaaaataacgcagcaatcagaaaggagctgaggggaggagaggctggaattctcaataaagtggtcaaggccgggcacggtggttcacgcctgtaatcccagcactttgggaggccaaggagggaggatcgcttgagcccaggagttcaagatcagcttgggcaacctagtgagaccctgtctctaccccaaaaa

SEQ ID NO: 173402 - DNA, 219 bp, Homo sapiens
gcacagccctgcaggcaggaggggccccaccttactgaggatcaaactgacatgcagagagatggagtcatttatttcagtttatattgtccaaaaaagtcaaagcgaagatttgaacccatttgtcaggatagaaggagcctgcgacctggcaaggcagcaccaggcgatcccggctgtggtccgtggtagttaaggtggggctcctgccgccttctg

SEQ ID NO: 173403 - DNA, 272 bp, Homo sapiens
gagggagctggggggcgcggggtgcatggtgagcccagagtccatagtttaaggtgcagaatttagactagccattatcaggtaaaagtatgtcacaggtggtcaaaaaggtaataacatctaagaagtagacatgctattcaataaccaagttttctgaagacttcatcaggtatcttgaaacccaggaaaaggaggcatgccagccttcagcatggaggaaaacaaagtggcatttgggatgtgctgaaaaggcgtggggacactcaggt

SEQ ID NO: 173404 - DNA, 248 bp, Homo sapiens
aggctcagccaagagttcttagtaaagatccctttactccccaaacgaaaaaaaaatcagcaaaagaaacattaatatttggttcatttcaattttataagccttttgtgaacaaaattgaaagacaaaccacagactcgaagtaggtatttgcaacatataactgaattagtatctagaatatataaagaattttcaacatcaataagaaaaggacaaagaaccaacaacaaaagaaccacactaac

SEQ ID NO: 173405 - DNA, 440 bp, Homo sapiens
ctatgacttacagtactacaactgctagacactgtgctagcatgtaatggagagagaagattcttagagaaaaattagttggagccaaatttaaggcttaaatggaaattaaacccaaatcaaataggtatacataataaaccagtaaactcaattgcctctgcctcccaggttcaagcgattctcctgtcttagcctcttgagtagctgggactacaggcgcccaccaccatgcccggctaatttttgtgtctttaatggggatgaggtttcaccatatccgtcaggctggtattgaactcctgacctcaggtgatccacccaccttggcctcccaaagtactgggattacagggtgagccaccacggctggccaacaaagttcttacagttatgaaaaagtctgattatgatagcctccttgcatagaaattcctcag

SEQ ID NO: 173406 - DNA, 228 bp, Homo sapiens
agagctataggggaggtagaaagcggggtcgccggcagcatgtcaggtacacagacatatagtcaaagaatgggctacagtgtggaaaaataccgaaggagaggcaatgggacacggctgatcatgcgatgcatgaagtatctgtgtcagaagaatattccattttacggctctgtgctggaagaaaatcaaggcgtcatcagaaagactagtgcactaggtttcctt

SEQ ID NO: 173407 - DNA, 336 bp, Homo sapiens
  misc_feature (17)..(17): n is a, c, g, or t
  misc_feature (19)..(19): n is a, c, g, or t
tcgagccggtccggaanantctggtggtgatcatacatacattccttactcagtaaggtagataatagtgtgctctgagacttgagatttacagcagaagcttaaggttcatttgttgttcattcaccaagtatttattaaaggaaggaacccttcaagccagttttaaacaagcagaccttctccagagttgaccctcaatttaccgcagattgttttcgccttctgtccttacatattcctgagtgcatctcatgacctggtttttaatcagctggcctgctgtctgtttctaggtctggtatgctgccatttgcatctcatcaccaccagaat

SEQ ID NO: 173408 - DNA, 316 bp, Homo sapiens
ggaggctccctagcaacagcaaatggagttgtccagggttagggttggagacctggctgttctgtgggaattgcaagctttcttaagaaatctctattttattacagttatccttctttgtgcgattgcagtgggctgaatggaaacacctggtttgtgctgtgttagactgcatgcttgagtgtttgggatttcaagctcgctctctttctctcactattaggacttttctttttcttcttcctcttctctctattttggttctattctttttttttcttttttctttttttttttttttttttttttgtggtgg

SEQ ID NO: 173409 - DNA, 601 bp, Homo sapiens
attcatgctctataaaaggaagaatttgacaaggttttttctctagctcaaaaccttctaacattcaatttttttgctgtgtttattcccaacgtgggtagcaagacaatccacaatcctcaaagcattcagatagacgcaaattttgttcaagaacgtaagggaaagtgtatgtgtcgaggaatgtatccatttcttctagattttctagtttatttgcgtagaggtgtttgtagtattctctgttggtagtttgtatttctgtgggatcggtggtgatatcccctttatcattttttattgtgtctatttgattcttctctctttttttctttattagtcttgctagcggtctatcaattttgttgatcctttcaaaaaaccagctcctggattcattgattttttgaagggttttttgtgtctctatttccttcagttctgctctgattttagttatttcttgccttctgctagcttttgaatgtgtttgctcttgcttttctagttcttttaattgtgatgttagggtgtcaattttggatctttcctgctttctcttgtaggcatttagtgctataaatttccctctacacactgc

SEQ ID NO: 173410 - DNA, 101 bp, Homo sapiens
ctctgtgcctcctggctgtgcaacctgaagcaagttacttccctctctgttcctcagtttctaggtctacaaaatggacatcggaacagaattaacccccc

SEQ ID NO: 173411 - DNA, 550 bp, Homo sapiens
ggcacggctactgaggagcaagcagcctccaagcctggcagtgccagcctcctctgtgtctggaagaacaaggctgcctcagaacccggagcctcctgttggctgctttattcagaccctcccccactttccagagaagccaacttcttgaggaggaaagagaagcaccaactcctggtgccacatccagggaccccagggctggttgtgcgtgtggcgtacacagagcaagcgtgctctcccttctccttcgctctccagcctgaggcttgtctgccctccagcttgggccaccgccaccctgagcagccttttctgcctccccttcctacctcccctgccttgggtttctaaacccctaaccgtgcactgtcagggcacactggcttccctgtgatgctcccagctaatgtcaacccagatcattaataaatccacctcgtcaggtaatgagacacccgggaggggtgtggaaaggtgtgagttcttcaagccgattgaagtcccctcatcagtgaccacaggaatgggcatgaatggggaatttgag

SEQ ID NO: 173412 - DNA, 571 bp, Homo sapiens
gactttgcattaggactaaatgctgccctgtcatagcagaaagcaacacagggcagagctcagctggtgctcaaggatggagaacttagaacagacctagccagaggtaaatcacccatcccagctgttgaaacctgagttccagcaagccccaccaccaagagctaaagtgccctgaggtcctaaataaacttgaaaggcagtctaggcccacaaggactgcagtttctgggtaagtcctggtgctgtgctgggctcagagccagtggacttggggtggacctagtgagacagccagggcaaccaagggaatgcttacatcacccctctcccaaacccaggcagctcagctcagcttgtagctccaacagagatgccttccctctgttcaaatacaagagtggagagagtaaagaggaccttgtcttgtaactaccagcttagccacagtaggagagggcaccaggcagagtcctgaggcccccatttcaggccctacctcacagacaacactcctaaacaaaccctgggccagaaggaaatctgctgtcttaaaaggaaggacccagtc

SEQ ID NO: 173413 - DNA, 588 bp, Homo sapiens
ggtagggggagtcgcccttgaaaagagagtctatcattttcctgtaggtattcctcggagccagcagctctaagctggcgctgtggccagcggggcccactgcaggcagagcatctcgcttgtttgacctctgtattgggcgtacacagaagagttcactgggagaaaggtttctgctgcttaggaaaattttgaaagccattgccttagagtcatctgttactctctaaatgtagcacagcttcatttgcctcctcataaggcaggtttcttcttcttcacacagctagtatgtgtgtgtcctcatcaacatactctgctctgccagactatttagcactcgattgcatgaagttctgtgcttcatgtgaagcagcctttagattgctaactagattattagctttaatagagacaaagacaataatagagaactttttatttttatggaattacattttttaaaagctcagggcccggcgtgtttctgaaggagctggcataggtgtatgttgtaaattggtattgccttctagaaagcagtcgggtgttaagtatccagagtcattaaaatgtttgtaaccttta

SEQ ID NO: 173414 - DNA, 136 bp, Homo sapiens
acattttaaattttttgtagagatggggtcttgctcggttacccaggctggtcttaaactcctggcctgaagccatcctcccaacttggctcccaacgtgctaggattataggcatgaaccattgcccccagctgg

SEQ ID NO: 173415 - DNA, 431 bp, Homo sapiens
ccctgtagggtttgccgtacctcccaagataggtggaattcttgcctgaccctcagggtgggcttcccatcctaggccccatgttggaagaagatgcttcttgcagagcctctgactgctgggaacggaaacccagacactttgaactgggagcctgcccaataattggctaaactcttgagtgggaaggactataaattcagagtttctagtgtgactctattacataaaatgtgtgaacttggagcaaatatccctttcttctgaaaaaaaaaaaacacttcaatggatgccttgtaaacgcaaagataaaccacttcaacggatgcctcatttttgcaaagataaaccaaagacttaattctttaatggaatctattagagaccacaagctcaagtgttctgcataatgtataaatgtcttctctata

SEQ ID NO: 173416 - DNA, 717 bp, Homo sapiens
  misc_feature (535)..(535): n is a, c, g, or t
tcctgcctgtggctaagggtagcagctgcccatttaaaacctccttttaaactttatttgctgtcagtaaaatctagaacaacagcttggcctagaaagactggagtttgaatcctgagtctttctcctgttagttgaggaaacttctgatagtttttaagctttcctgaggcagagctcatctttgaaatgaggaccacggtacttacctcacagagccattgtgaggattgtcaattaatacttgcaatggactcaggctggtctccaactcctgaccttaggtgatccgcgtcggcctcccaaagttcttggattacaggcgtgagccaccgcacccagccaggcagactgatttcaattcttttggttatacacccagtagagagatggcgggatcacatggtagtcctctttttaatttttttgagaaaacttcatactgttttctataatggctgtactaatttacatttccattagcagtgtgccagggttcccttttccccacatcctcaccaacacttgttttctnttggtcttaataaaagccattctgacaggtaaaaaaacaacaaaaacaaaaaaaaaacccgcgggcctttttgttgggcgggggggaaaggggtttaaagggcccgggtcatgtgttccctgccccgtttttgtcccagggggaaacgggggcccaaggggcggaaacgaacggcgttaagg

SEQ ID NO: 173417 - DNA, 1011 bp, Homo sapiens
gacaaggtctcatgatgttgtcccagctggtcttgacctccagggctcaagcaatcctcccaccttggcctcccaaagtgctaggaatacaggcatgagtcaccatgcccagccatattatacatttttaacttacaatagtccacattcaattgatattaaaccagttcacttgtagtataagaatcttccccagcctggccaatatggtgaaaccctgcctctactaaaaatacaaaaaaaaaaaaattagccaggtgtggtggtgctcgcctgtagtctcagctacttgggaggctgaaacagaagattgcttgaacctggaagcagaggttgcagtgagctgagatcgtgccacgcctaggcaacacgagcaagactccgtctcaaaaaaaaaaaaacattttcccggcggggggcacagggggctccacggctgtgtaattcacatcccacaggcatttggggagaacccacaggggaaggaggcaagataacgagagggccagaggcagagactccggtctcgaacaaattaaacctaaattattcgctcccatctccttccactatataggtcctcgggatatgggccatggtgcctacccttcaaactatctgtataaagcccccagggacattttatacacggcagagaacctcaattattaaagcaagtggagagggtcactcccctggtattccaaacttgggggtttgccacggcaggtcgacctggtcgaggtcaagatttcaagacccgtggcaaattaggaaccgtgtgtttcacaacatacacattgagtggcactcactggaggggggaccgctgaacccagcaatcgggaggtaacaggcactggtgacccggggaaatggcgacaagaaaccaaaccagctagacaagggagatcgtcacaaacaatggcgggcgcatgcccccgcgggggaggggcgacaccacccctcaagcatcaacagggcgcctcagcccagcggcaacccaccaat

SEQ ID NO: 173418 - DNA, 339 bp, Homo sapiens
agagataccgggagcattcaatgggaaaaggacaatctcttcaataaatggggctcagaaaaccatatgcagaaaaataaaaccagaaccctatgtctcaccatatacaaaaattaaataaaaatggactgaagaattaaatacaagacatgaaactatgaaactgctacaagagagctgttgtaacccagttacaacagttcaggatgagcacactagtggttgccatttactttttttacaaaaataaagttctccttaactaacttcaaatggtgagtacagaaaattacatcaatcacactttaagcaccattataggcgagctgacctcctgtc

SEQ ID NO: 173419 - DNA, 511 bp, Homo sapiens
gaaaaaaattaaatttagtcatacatgatggtgtgcacctgtagttccagctactcaggaggctgaggtagaagtcttgcttgattccaggagtttggggctgcagtgaactatgatagcaccactgcactccagcctgggaacaaagcaagagtccacctcttaaaaaaaaaaaaaaaaagagagagatgtgtgtcgatgaggtttaagactgtgaagacaactttctaaggaagaagtgaaggtagtcagtgaaaagaggaaatggctaggactgagactacaggaccttcaacttgtaaagtctggtgaacaaaaatgagccttcaaaggataccaagaagtaatcagggaggtaggagaaaaactgtaagagccttgtcatataagtcaagtgaaaagggtgttttgaaaggaatgagcaacagctaagttgttctagaaggttgaggaagatgagactgaagatgtttattggatcagtgaaacacaggccattggtgactttggc

SEQ ID NO: 173420 - DNA, 443 bp, Homo sapiens
tcataaggaaatggtttacgtgattatagaggctgagaaatctcatatctgcagtcagtacgctggagacccataagaactgatgatatagtttcagtctgagaccaaaggcctgagaagcaggagagacaatggtataagttacagttcaagtccaagtccaaatgcaagagaagaccattgtcctagctcgaagaccatcaggaagagggagcatattctccattactcagcgttttcttctattcaggccttcaacagagtggatgaggctcaccacattggggaggacagtttacttaactctgtctagcaattccagggttattctcctgcagaaacttcctcacagacacacccagaaaaatgtttaaccaactctctggacaccccatggcccagacaagttgacacattaaaattaaccatcacaaatcccaagg

SEQ ID NO: 173421 - DNA, 193 bp, Homo sapiens
ctctatccctttactttgctttatttttcttcatagcacccagaataacatatttttgtttttctatttgttgtcttttccttctctacaatgcaaacactgtattgttttgtttgctcactgtccccaggatctaaatcagtgcttacaacatagtaggcccccaatatttgttagctgactcaatgaatga

SEQ ID NO: 173422 - DNA, 286 bp, Homo sapiens
taccaggacccagctgtatctcctcagcagccagccccaccgaagaagctctgcctgtgaagggtgctgcagcaacatcagcctggcctttgcacatctcaaagtcagcccagtataaaggcaggagcttttaattgaaaggcatttaaagacacagtacataaagccaggcacaatggctcacacctgtaatcttagcactttgggaagccagggcaggaagatctctctgagcccagggattcaagaccagcctgggtaccatggcaagatcttgtctctagaa

SEQ ID NO: 173423 - DNA, 188 bp, Homo sapiens
cccaaggaggctgattagctggaacacagctggctgagctgcaaaccgcagcctccttgagagcatccctccccgcagatgtttattttaaaagcctcctcccaagtgtcggtttttactctccctcttacttaacccctctcagcagccccacaggcctggctgggctggacttcaggaacctctct

SEQ ID NO: 173424 - DNA, 657 bp, Homo sapiens
  misc_feature (321)..(321): n is a, c, g, or t
  misc_feature (491)..(491): n is a, c, g, or t
  misc_feature (570)..(570): n is a, c, g, or t
  misc_feature (582)..(582): n is a, c, g, or t
  misc_feature (639)..(639): n is a, c, g, or t
aggagagaaagataaagggagagagaggttaagagatttttcatctatgaaaattagaggaagaagattaatgttctagagaacgttaagaaatcttcctcctcaatgaaatacattatatattatctttatgtactcttaagaaaaacgagcaaggaagagtatcttcattattctcattttctctgagttggaaacaaaaacatgaaggactccaactagaagacagatatttacatttaaatagattagtgggaaaactttaagagtttccacatattagttttcattttttgagtcaagagactgctccttgtactnggagacactagtagtatatgtttgtaatgttactttaaaattatctctttattttataaggcccataaatactggttaaactctgttaaaagtgggccttctatcttggatggtttcactgccatcagccatgctgatatattagaaatggcatccctatctactaactntaatgcttaaaatttacataaaatgctttatttagaaaacctacatgatccagtgggtcagccttgccatgttcagttncacttgaaattngagaccatttaaatttcaactgtttagggtggaaaatgaagttctggaaaacttgcncatgaggatttccttaat

SEQ ID NO: 173425 - DNA, 362 bp, Homo sapiens
cagaccttgggccaagcagcctttgaggtggtaaccagctcataaacaagagctggcatgtgccaacaaagtctctcatcctggctccagagttggctgaggagagaaatttgtggaagcctctgtaagtggaggattgttcttggctttggcttttgtgtggctggatatggagtagggagggagcttggacctggtctctggggtgtaggcatttccctgagaggaggattttttttcctttccttgttttattttttcctccctgtccttcccttagtgttaacatttcaaggtacaggaaatgattggatactgattgttttataactctcttaggacagcctattaatattctgctg

SEQ ID NO: 173426 - DNA, 333 bp, Homo sapiens
gctgactaaggagcccttgggctttgaacaaacatcagcagtaaccaggcagtgggtgccatggccttggggtggtggtggccatggatagagaggctccttctgcttgaggaaaggaaagagaagagtgaaagggacattgcttgcaatgtgggtgccacctcagccacagtaaaatatggcatgaagtaggtttctaaagttcctagtgccaggccatagcttcagcatggcattcctagacctaccctgggccagaagggaacatactgccctaaagggaaggacccaggcctggcaggatgcaccacttgctgactaaagaacccttgg

SEQ ID NO: 173427 - DNA, 638 bp, Homo sapiens
aatagaattgcctattcaagaggaaaaaatatcataatcattaatgattttaagtcaaatattactcaatcacaaaatttaagccattcttttatacctgaattaacaaagagatccaatcattatccctcatttaaaaattaaagaaggcactactccattctaaaatatatttattaattcacaaggtattaattataatataggagtataaattatcatttaaaatgctgtgatgtattatattccatcaattcctaagttttactaattataggtaaaaatctaactaaaaatagatgatttagttagattgcaactgacatatattgcattttcctggtgctaaaaaataaaaacagatatttcaacctatttaattttctttttatttttttttaattacacttcaagttttagggtacctttgttttttccaacagactaagaagtcattacatatgaacctgcaaaatatcatagattttgtcagatcacggatcacaaatatgtcaaagaattgcatcaagtggatatgttcaaattgagcctatcttctatttttctgaaactgattatatccaaaatttttgacattcagtattaacaattagtctcatttttaccattagtttcta

SEQ ID NO: 173428 - DNA, 360 bp, Homo sapiens
aactggatggagaatccactcccaagctcacatttgttgttgtctacaggactcagtcgcctcatcacatgagcctccccacagggctgcctcatgacatggcagctggcttcctctagggtgagcaatccaagagacctcagtgagaaagaggacccaaaataaaagccatggtcttttataattttggaagtgacattccatcccttctgctgcattctatttcttaggagtgagtgaatatatccagtgtacagtcgaggaatgtacaaatacaagaataccaggaggtgggactccctggcggccatctgagaggctgcctcccatattcaaataaataacactgtggcaataata

SEQ ID NO: 173429 - DNA, 577 bp, Homo sapiens
gagagaaggaggctgtgttccgggggagggtatgaggtttcaagacctgctagagagagaggtgcttgggtagatggtctgctatatcctcaggaagagctgcagctccctggagcctgtcaccggggtctgaggccagagttgcctggaccatgatcagaagtgctgctgccagaacaggggaaccattgtaagggaaccctgtaaggggggactcccgccaccctgcaccttcaccacaatggccacctccacacccaaactgccttgtctatcagagctaggctcagtggggagtagctatttttctcccctccctagggaggatccctaatcctatctcttcttccttttttctcctaaagtttctattttgagggtcagtggactcattctttggcactgcagggctttctaaggaggggaggggctacatctcgttgagatgtagcagaggggagaggcttactccccggctctcctgctctccctgcatgtgcctctgggggagtggggaggctattctgggctagggggtggtgtgttagtagagtggaccccttccagtcctctgccc

SEQ ID NO: 173430 - DNA, 614 bp, Homo sapiens
aacattattaacccgaccacccaagtaggttccaaatcccagccatcattacactctttcatctaccaaatctaatcagttaacaaatcctatcaattcttcactttttaaataaaccctttttcattcacactaactagaaccaccctattttcaaacaaagaaattaaggctgctgaaaatagtagaaattaggataaatataaaagactttcttcctatttttaattgctctaaaacactggctagatgaaaccccgtgtctactaaaaatccaaaaaaaaaaaattaaccaggtatgtggtaggcgtctgtaatcccagctacttgggaggctaaaggcgggagaatcacttgaacccaggaggtgaaggttccagtgagctgagatcgcaccactgcactccagcctgggcaacaagagcaaaactccatctcaaaaaataaacaaacaaacaaacaaataaataagccgagcacggtggttcacgcttgtaaatcccagcactctgggaggctgacgtgggcagatcacttgaggtcaggagttcgagaccagcctggccaacacagtgaaaccccgtctttactaaaaacacaaaaattagcccagt

SEQ ID NO: 173431 - DNA, 696 bp, Homo sapiens
ggactgggacgtaacaagagcttaatagctcttgtttgttgaatgaatgaatgaatcatcagagaggaaaacgagggagacagtttgtcaatgttggagttaggaaatactgagaaggtgacatttgagttagattttgaatttcttcaagtagaaaaagcagaaatgaaactccaggcagcaatagtagtgatattttattgttgttgttttgtttcatgagtggaaatttggaaaacaaccaaacgtttataagtccaacttttcttcattcagtattcaaatattacaatttaacttcagggtagaggaggggaaatacataatcttacaatccaaataatttctgttgactaaaagaatggcagtgaaaaccttggcactaatttttaactttataaaatgttattttgtggacatttttgagaaatttcaatacaaaggcagtgttctgatcattcattgtctatgatgattttgcactgtaacaagaagctagaaagatagaaactaaagtttgtaagacagaggttcctcatcactgctgttcatcagggcttctcagggatggttctgcaacaaaatcacctgttatattggttaggatgcttttggctgcaagtaacaggatattcagccaaaactcccttcaaaaatacagatgtactttgctcatacatgaagatgtttgaaggt

SEQ ID NO: 173432 - DNA, 403 bp, Homo sapiens
ggactgggacgtaacaagagcttaatagctcttgtttgttgaatgaatgaatgaatcatcagagaggaaaacgagggagacagtttgtcaatgttggagttaggaaatactgagaaggtgacatttgagttagattttgaatttcttcaagtagaaaaagcagaaatgaaactccaggcagcaatagtagtgatattttattgttgttgttttgtttcatgagtggaaatttggaaaacaaccaaacgtttataagtccaacttttcttcattcagtattcaaatattacaatttaacttcagggtagaggaggggaaatacataatcttacaatccaaataatttctgttgactaaaagaatggcagtgaacctagcgctctaggaggggatcctctgatcg

SEQ ID NO: 173433 - DNA, 184 bp, Homo sapiens
tggagccctcccccccatccccatcgtctcgggttaagtagaaacgcaaattggggtgctggggagaggttccccaaggtttcatacccggtggctcaacctgctttagaagcgattgcgggccgcgtttggaaaatgagagttaggaaagctaaggttgtgtcggagcgcttatttttcctta

SEQ ID NO: 173434 - DNA, 101 bp, Homo sapiens
cggaagtttggactggtgtaaccacagtagttatttacggccagtgtcctttcttctttcttttttgagttaaccaggatacatttattaaatatatccag

SEQ ID NO: 173435 - DNA, 204 bp, Homo sapiens
aaacacaaactgtgaatacgtatgtaaatgctgcaacaatgtcaagtggcattcaagtgtctacactcagtcttgatttctgtacttatcttgtcttagatcatttagcacacaggaactctttacagccataatttgagcaacactagcctagcacaaaaattgagacttctaatactattacttgacttactctatcactgg

SEQ ID NO: 173436 - DNA, 369 bp, Homo sapiens
acattcatagcctcatgagcgcatgtctgtaaatatggggtctcaatagcttcatgcattttcctcactagccagcgagttctctggcatacttaatcaatcctctactattcttggataggaagtactaaattgctgaggttttaacaaataccatgtttcacttaggcagtgtagaaattatcccagtataagtacattactatttttatgtttttgatttttaacttttattattttaaaaataacataatgtgtattcataatggaaacatataaaatgcagataagtaaaaagaaaaatatacctgatcccaccatgtggagataatagcaaccataataaatttgatgtatacctgatttaga

SEQ ID NO: 173437 - DNA, 400 bp, Homo sapiens
ctgggtcccaagcagttggcagagggtgtcttgcagagatgagaacagaggttatgctgtatggaagaatgagaggccatcatctcccccagggtcaagaaagagcctgtctcacctgcagaggcgagagttgatcattatgggcctggaaagttgctagcagaagcagtacaaagctcagaaaggtctaagatcctatgttttctgagcttagctactgtatctagagtttgttctaaacaatctgggactgttcatgaatcttggaagaggacagtgttgaaggtcaaagtgtggaaagacaagatgctatctcacctttatgactgttagattggcatgccttttgcaacaggtaaagtgtgcatgggtgggtacacacacacacacacacacacac

SEQ ID NO: 173438 - DNA, 1101 bp, Homo sapiens
ctggagcggtttcattgcctacattccgcattggaaaatagaagcaggcacaatgaagggaaaaggccgaggcatcagcgtgtgaagaccgcaaagacgatcccgagtacagttgtgaacagcattgctgctaggctcctcctgcagatcatctgaaatgaacctctcttattgatttttattggcctagagccaggagtactgcattcagttgactttcagggtaaaaagataacagtcctggttgttgtcatcataaacatatggaccagtgtgatggtgaaatgagatgaggctccgcaatggaactgtagccactgctttagcatttatcacttccttccttactttgtcttggtatactacatggcaaaatgggaaaggtaaggaaaatgactcggaaaatgtgcatgaaatgtactagggtttttgcttggttaaggtgcctaaatgcttaggtcaaataccctggcaatctgcatgttacatgctatctgctggcagtttctttctgatataaaaatgaaacagtattcttggacagaggacacagaatttctaattccagtggggcttgttttgttttcagtttcttataattgtacttggagaaacagatactgatcagtgttttatattctaaaagacagccaagttgaataataaagactttcgttttggcaaaaaaaaaaaaacaaaaaaaaaacaaaaaaaaaaaacaaagaaaaagaaagcaggggcacaaaaaccaaacggaggacaggacagaaagaaaaagagaagacgacaaaaaaaagtacgaagaggagggacaagcaaaaagcaacagcgcaaagacaaagaaagagaaaacgggcaggaccaccacacacagaagcaggcaagcatggaaacgaagaaacaccgatcggagacaactggcacgaagacacacaacacgacaccgaagagaaagaacaacaaaaccgaagccagacaagaaaaacaaagagcaaagaatcaaaccgaacgacgatagcaccgagagaaacgactatagaccagacaacgaagacgacaagaagcagaacgaaaacgagagaacaaggagaaaaagcggaa

SEQ ID NO: 173439 - DNA, 736 bp, Homo sapiens
agaaacaagagattgaggagatttgctgggttgggtcaggaacataagaggttggggaaaagcaagggagtcactgggctgggtcagcaacatgagaggtcagggagtttgtacagtccagataaaaaagatggaaagtcagagaaatatgctggattggtgttaaaaacaggggaggttttctaggtcaaaactggaaccaggatgtttgctgggtaaataaagtatacacaagagtcgggtttcttcaggaagggttgctgagtcaagtcagaagcataggtcagcgtgaagaccaggggaggtcaagatttttctagtcagcctcaggagcacaagagatcaggggacatttgtcggatcaaggagaggaaccttgaggtcatggcatgctcaggggagttttctacatcacaggtgggaacatgggaggtgacagggagattttctggattgcatatgagcccagtgagctcagaggacagttgctgcataagggttgcaaacctgggaggttgcaggctttgctggatcgggttcgagaattctgaaagtcataggaatttttgccaggttggggtcaggaacacataggacatggcaggatatcactccgcctaggtgatagagtgagacttcatctcaaaaagaaaaaaaaaaagttggggggaaaaaagatattacaagcatcacaaggccaggccctgtactaagtgctgggatcttcccaacccag

SEQ ID NO: 173440 - DNA, 653 bp, Homo sapiens
tcgagcttgccgtgtggaggcactgctctagttgatttacaaaacgaaacaagaagcgtcgaaaacacatcgaatcaacaaaacaccatcgtgaattctcgcaactgccctgtgtgggaggcactgccgctacctccatctgcagaggggtaggggagcctgggagctggtgggcggagggccgggtggggtggaactggcatctgcctccagggctgggctcctcccattgctgatgcctgggtttcactgtgctcgtaaaagccacgggtcaattatgcttattacctgttctgcaggtgagaaaacgaggcacacaggggtgagcaattcgctcagcttgaaagtggtagaaccaggacccagcccaggccatggctcgggacccactctgtaatcactcactgggggccccgcagtaatgagctctttgaagaaaggtgagtcactgaccttggctgtgcctcagtttcttcatttgccaagtggggctctgctgcccctgcctctgccctgctgacttgcaagaagagtgaacgaatggaattggatgaaggcttccggaaacttccatcaggaaagcgccctggcctgggagaaagccggtcctggccggctttgcctgcaatgccctcagtggccagtcacgtccc

SEQ ID NO: 173441 - DNA, 581 bp, Homo sapiens
atcacactgtacagcattgcctgttgtttgtttgaatgagtatgtaaatggtttactacattaatgtaactcttttcattttttgacattaaaaaacattaagaccttccttttctaatgtagattctcacaccgcccctcaatgtttttaacattgtgctgtgtttacgaagtggtgttgctgtaatctcaatgggaataattgttagacaatctaattattctagtgttttttacataataatcaggaaatgaagcatgtatatgctacatctgaaaacctttgtttagttacacttgcctgtgcatagttcatccaggggtatgtgctttaatcttgagttacttagaattcagggcacctgtgccccagcctcccatgtcgcctcacttctccacctggatagtgcagccagccagatctgcttactcacctttctactttattcacctactctaatcctcatctcaggatgattcctaaattatcctcttctccttcagaagctttctcaaaactaccttgtccatgccttctttatcaattaactacaccaaacccaggaatgtgtcttcagtta

SEQ ID NO: 173442 - DNA, 412 bp, Homo sapiens
cctgacactctgtgggtatacaataggcactccataaaagtcccttaagaaggtcccttaaataaatgaatgatgataaaaatggatgcataccaagtgtactgatttttttttaaataatgttccatatgcttttacaatatgaaaaatactttttcacttataatccccttcgatcttcccaatgacccaacaaggtagggaattgtttgcctatggcttatctaaagttactcagaaaaatgatgggatttaacttactctccagagttggagttctcttttatgttgccatgaacattaaatgtgcttaatatatgttcatttagtgcagtggtgctcaactggatgtaattttatccctcagaggacatttagtaatgtctgggcatatttttggttgtcactctag

SEQ ID NO: 173443 - DNA, 122 bp, Homo sapiens
ccctgggggaatgctttttctaagattttattgcaggctcccagtggtacctatagccctttgtggtccggctgccaggtccacggaggaggaattcacctgttccagatgccagcagatcc

SEQ ID NO: 173444 - DNA, 241 bp, Homo sapiens
cagtcgctggaaaagagaggctgcagtgatgtggatagcacactcatctgaccggctctagctcctgctatcgcttcccagttccctcatgagagaacagactcagccgtcacctgcaccaggccgctctccctgacccccaaggctgggtcagctgtcacagctgggtcccctgttttcccccatcactctggttcttgaagcaccttcctattacgtcgcaacctgcgtgagggcagca

SEQ ID NO: 173445 - DNA, 837 bp, Homo sapiens
gagggccacgtgggcagggaggagcagatgtccatgtggctcagcccctgcctgggtaagcgagtccacagttcactaacttacacaataccatccacaaacaagtagccactatgtccacagttagcaaacacacacacacacacacacacacacacacacacacacacactggtccgtggaaaacttgtcttccatgaagccaatccctggtgccaaaaaggttggggactgcggtctaggaaaaagtctgtaccccatagcctttgttctggcctcgcccacctaacaagatttctctcctgttactcccttactgcccagcatttctcaacatttttacctattttctttaagaaacatttagaaagcagaaatgaaacttctcccacactgccacccctccctagtcccatgattcctaatcttagttctactttccatagtttctattacaaaagatgatagattaattttctcctaatataaaattataatattgtatatacattctccaggggattctgatacatacctccttagttgagaatttgctgtggtgacataatcaggagtttgtcatattgaaattcatggattctttgagcatttaccaatcttctgtgattagaacagagaatgaaaagagcaatgggctgtggttctagtccccaaggtacattcccaagaaaaaagaacagtgcagtaaaggctccaggatgtgaaaacaatttatttttacagataaataacattaccagttctcaggtcatgttttgacaatcttcctttgcactgctagatccagatgagcatagcggctgcccatcttgattt

SEQ ID NO: 173446 - DNA, 1180 bp, Homo sapiens
gagggccacgtgggcagggaggagcagatgtccatgtggctcagcccctgcctgggtaagcgagtccacagttcactaacttacacaataccatccacaaacaagtagccactatgtccacagttagcaaacacacacacacacacacacacacacacacacacacacacactggtccgtggaaaacttgtcttccatgaagccaatccctggtgccaaaaaggttggggactgcggtctaggaaaaagtctgtaccccatagcctttgttctggcctcgcccacctaacaagatttctctcctgttactcccttactgcccagcatttctcaacatttttacctattttctttaagaaacatttagaaagcagaaatgaaacttctcccacactgccacccctccctagtcccatgattcctaatcttagttctactttccatagtttctattacaaaagatgatagattaattttctcctaatataaaattataatattgtatatacattctccaggggattctgatacatacctccttagttgagaatttgctgtggtgacataatcaggagtttgtcatattgaaattcatggattctttgagcatttaccaatcttctgtgattagaacagagaatgaaaagagcaatgggctgtggttctagtccccaaggtacattcccaagaaaaaagaacagtgcagtaaaggctccaggatgtgaaaacaatttatttttacagataaataacattaccagttctcaggtcatgttttgacaatcttccttttaaaagttacaaatcagagtttttgcttccagggcagaaagtaatttagtaaagctggctggaactgcttagatccagcatgaagcatagcggtctgaccaatcttgatattatttctttgttttaagttaatcttgtttcttctagaacactaatgttattttccttaatctcttgattactaaaatgtaatttctcctcataagctttgaacttgattttaaagttctttgttcttttgatttttcaattgttctttgaaactgaatgttaaacattctgtgatttttttttaagaattggttaaacacgaccggataagtatgttttaagtaaagagaaatgataaaaataagatttttttgaggggtggagggagggggacagt

SEQ ID NO: 173447 - DNA, 590 bp, Homo sapiens
aagaaaatccatgcctatacacattataattagactgctgaaaattaagacaacaaaaaatcttgaaagcagtcagagaacaatgatgtattacctacagagagtaacaatttgaatgagagcagacttctcataagaaactgcggagaaagtggaatacattactggcgggaaagcaaatggttcagatgctgagaaaaacagttttactatatgacctcacaattccactcctaggtatacacccaaaagaaatgaacataaggactcaattgagtacatgttcacacacgttcacagtagtgctattcagaatagcagaaaggtagaaacagcccaaatacttaccgacagataaatgaacaaactgtggcatatacatacaattattattcagccatagaaaggaatgaagtggctaggtgcagtggctcatgcctgtattcccagcactttgggaagccaaggcgggtggatcacttgaggtcaggggtttgagaccagcttggccaacatggcaaaaccccgtctctactaaaaaaaatatacaaaaattagctgggcatggtggtacgttcctgtaactccag

SEQ ID NO: 173448 - DNA, 856 bp, Homo sapiens
aggacaccgtggtgtttaaggacggccagttaaccagagccccttttcctcaggggacaccgtggtgtttaaggatggccagttaaccagagccccttttcctcaggggacaccgtggtgtttaaggatggccagtactggatccgaggccggacctcagtggacatcatcaagactggaggctacaaggtcagcgccctggaggtggagtggcacctgctggcccaccccagcatcacagatgtggctgtgattggagttccggatatgacatggggccagcgggtcactgctgtggtgaccctccgagaaggacactcactgtcccacagggagctcaaagagtgggccagaaatgtcctggccccgtacgcggtgccctcggagctggtgctggtggaggagatcccgcggaaccagatgggcaagattgacaagaaggcgctcatcaggcacttccacccctcatgacccggcagactgggactgcgggtctggtggggagcagcagacgtccccttcacaccgagaaccacgggggcccgtccaagacctggcctcccttaaacctgaaccccccaaatcaggtcacgtagaatcaagaactgtttgggatgaaatcaccatgtggggtccccagcctcgggccagttgttgcagctcaaggagaccgtccctggtgtcacctctgcctggtcaccgccgacctcatctgtgcagcgcggtgcagccagcccctggccccacgtgctgaggcacctcccgccccacagtgccctgcagttgccaggctctccagggcaggtcccagaggtttcccacaaaaaacaaataaagactccactggaggaaacaa

SEQ ID NO: 173449 - DNA, 813 bp, Homo sapiens
  misc_feature (31)..(31): n is a, c, g, or t
aaacttaggtctaggtacgaggctgggtgtngctgctctgtcctctctgggtgggagccacctgtgtgatgatgcctgagttcagccctcagcaggtttgggaaaagttcttaagttctgaaacgccgcggatcaatgtctttatggcagtgcctacaatatacaccaagctgatggagtactacgacaggcattttacccagccgcacgcccaggatttcttgcgtgcagtttgtgaagaaaaaattaggctgatggtctcaggctcagctgccctgcccctcccagtgctggagaagtggaagaacatcacgggccacaccctgctggagcggtatggcatgaccgagatcggcatggctctgtccgggcccctgaccactgccatgcgcctgccaggttccgtggggaccccactgcctggagtacaggtgcgcattgtctcagaaaacccacagagggaagcctgctcctacaccatccacgcagagggagacgagagggggaccaagggccccagcccatgctgttgtcctgacatgcctctcctgggattcctgcctctgccctgctggtactaggctgctggccacaccccacatctcaggttcctgaatacaccggcccttcctggctctcaagtctgtgccctgcagtgcccctgcccccaactcgaggacctcccagctcagccagttccaaccctgtctgcagggacggggctcagcctgtgcctgggttggggacaccatctagtcagaaatgtcccgcaagcaacgtgatggtttgggatgaagccctggtggggctttc

SEQ ID NO: 173450 - DNA, 852 bp, Homo sapiens
ggtccggcccgactcacgaccccgcgggacccggccggaacccggcccgaccccggcgcgcgcgcggcggaggacgaggaagagtgtggcgaggcagatcctgccccgtggccgcggccgtctcgtaggtgaccgggctggtccacaagtgggcatggaccaaagacgacgtgatcctccacgtgctcccgctgcaccacgtccatggtgtggtcaacgcgctgctctgtcctctctgggtgggagccacctgtgtgatgatgcctgagttcagccctcagcaggtttgggaaaagttcttaagttctgaaacgccgcggatcaatgtctttatggcagtgcctacaatatacaccaagctgatggagtactacgacaggcattttacccagccgcacgcccaggatttcttgcgtgcagtttgtgaagaaaaaattaggctgatggtctcaggctcagctgccctgcccctcccagtgctggagaagtggaagaacatcacgggccacaccctgctggagcggtatggcatgaccgagatcggcatggctctgtccgggcccctgaccactgccatgcgcctgccaggttccgtggggaccccactgcctggagtacaggtgcgcattgtctcagaaaacccacagagggaagcctgctcctacaccatccacgcagagggagacgagagggggaccaaggtgaccccagggtttgaagaaaaggagggggagctgctggtgaggggaccctccgtgtttcgagaatactggaataaaccagaagaaactaagagtgcattcaccctggatggctggtttaagacaggtaggacccagccccatgggagtg

SEQ ID NO: 173451 - DNA, 329 bp, Homo sapiens
gaatgcactcttagtttgttctggtttattccagtattctcgaaacacggagggtcccctcaccagcagctccccttccttttcttcaaaccctggggtcaccttggtgtttaaggatggccagttgttgcagctcaaggagaccgtccctggtgtcacctctgcctggtcaccgccgacctcatctgtgcagcgcggtgcagccagcccctggccccacgtgctgaggcacctcccgccccacagtgccctgcagttgccaggctctccagggcaggtcccagaggtttcccacaaaaaacaaataaagactccactggaggaaacaa

SEQ ID NO: 173452 - DNA, 1435 bp, Homo sapiens
gtctatctcaggtagtcgcgtgtctgtctctaggtcgatgcgtatcttctcaggtagtagcgtttcatactcaggtagctgctctgtcctctctgggtgggagccacctgtgtgatgatgcctgagttcagccctcagcaggtttgggaaaagttcttaagttctgaaacgccgcggatcaatgtctttatggcagtgcctacaatatacaccaagctgatggagtactacgacaggcattttacccagccgcacgcccaggatttcttgcgtgcagtttgtgaagaaaaaattaggctgatggtctcaggctcagctgccctgcccctcccagtgctggagaagtggaagaacatcacgggccacaccctgctggagcggtatggcatgaccgagatcggcatggctctgtccgggcccctgaccactgccatgcgcctgccaggttccgtggggaccccactgcctggagtacaggtgcgcattgtctcagaaaacccacagagggaagcctgctcctacaccatccacgcagagggagacgagagggggaccaaggtgaccccagggtttgaagaaaaggagggggagctgctggtgaggggaccctccgtgtttcgagaatactggaataaaccagaagaaactaagagtgcattcaccctggatggctggtttaagacaggggacaccgtggtgtttaaggatggccagtactggatccgaggccggacctcagtggacatcatcaagactggaggctacaaggtcagcgccctggaggtggagtggcacctgctggcccaccccagcatcacagatgtggctgtgattggagttccggatatgacatggggccagcgggtcactgctgtggtgaccctccgagaaggacactcactgtcccacagggagctcaaagagtgggccagaaatgtcctggccccgtacgcggtgccctcggagctggtgctggtggaggagatcccgcggaaccagatgggcaagattgacaagaaggcgctcatcaggcacttccacccctcatgacccggcagactgggactgcgggtctggtggggagcagcagacgtccccttcacaccgagaaccacgggggcccgtccaagacctggcctcccttaaacctgaaccccccaaatcaggtcacgtagaatcaagaactgtttgggatgaaatcaccatgtggggtccccagcctcgggccagttgttgcagctcaaggagaccgtccctggtgtcacctctgcctggtcaccgccgacctcatctgtgcagcgcggtgcagccagcccctggccccacgtgctgaggcacctcccgccccacagtgccctgcagttgccaggctctccagggcaggtcccagaggtttcccacaaaaaacaaataaagactccactggaggaaacaa

SEQ ID NO: 173453 - DNA, 1331 bp, Homo sapiens
  misc_feature (181)..(181): n is a, c, g, or t
gcaggaagctgggggtccgctgctgccgctcacaccagccatctacactggagcagtagaggaaccggcagaggtcccggtcccagagcaggatggaggaacaagggcgccatgatcatctacaccagtgggaccacggggaggcccaagggcgtgctgagcacgcaccaaaacatcaggnctgtggtgaccgggctggtccacaagtgggcatggaccaaagacgacgtgatcctccacgtgctcccgctgcaccacgtccatggtgtggtcaacgcgctgctctgtcctctctgggtgggagccacctgtgtgatgatgcctgagttcagccctcagcaggtttgggaaaagttcttaagttctgaaacgccgcggatcaatgtctttatggcagtgcctacaatatacaccaagctgatggagtactacgacaggcattttacccagccgcacgcccaggatttcttgcgtgcagtttgtgaagaaaaaattaggctgatggtctcaggctcagctgccctgcccctcccagtgctggagaagtggaagaacatcacgggccacaccctgctggagcggtatggcatgaccgagatcggcatggctctgtccgggcccctgaccactgccatgcgcctgccaggttccgtggggaccccactgcctggagtacaggtgcgcattgtctcagaaaacccacagagggaagcctgctcctacaccatccacgcagagggagacgagagggggaccaagggccccagcccatgctgttgtcctgacatgcctctcctgggattcctgcctctgccctgctggtactaggctgctggccacaccccacatctcaggttcctgaatacaccggcccttcctggctctcaagtctgtgccctgcagtgcccctgcccccaactcgaggacctcccagctcagccagttccaaccctgtctgcagggacggggctcagcctgtgcctgggttggggacaccatctagtcagaaatgtccccagcagagagcagaacgtgagtggcgtgtggaggagtgagacgccccgtggctgtgcagccctctccaggtgtcagtcagctgacactcctgcctctgagcacctgctctgccggaaatggcagaaatgttgccagagaaaggggcggagcgggggtggggagcatttctgtcttaaattaaaacaaaacttaactgcttcacacctgcattggctgccgcgccacctgattgttcctgcttgagtttctttaattatttgtgtctgctggtttcttccctgaagcagtcttgaaatagaagcagcagcctcagc

SEQ ID NO: 173454 - DNA, 571 bp, Homo sapiens
ggtccggcccgactcacgaccccgcgggacccggccggaacccggcccgaccccggcgcgcgcgcggcggaggacgaggaagagtgtggcgaggcagatcctgccccgtggccgcggccgtctcgtaggtgaccgggctggtccacaagtgggcatggaccaaagacgacgtgatcctccacgtgctcccgctgcaccacgtccatggtgtggtcaacgcgctgctctgtcctctctgggtgggagccacctgtgtgatgatgcctgagttcagccctcagcaggtttgggaaaagttcttaagttctgaaacgccgcggatcaatgtctttatggcagtgcctacaatatacaccaagctgatggagtactacgacaggcattttacccagccgcacgcccaggatttcttgcgtgcagtttgtgaagaaaaaattaggttccgtggggaccccactgcctggagtacaggtgcgcattgtctcagaaaacccacagagggaagcctgctcctacaccatccacgcagagggagacgagagggggaccaaggtaagccactctgctcttg

SEQ ID NO: 173455 - DNA, 1636 bp, Homo sapiens
  misc_feature (181)..(181): n is a, c, g, or t
gcaggaagctgggggtccgctgctgccgctcacaccagccatctacactggagcagtagaggaaccggcagaggtcccggtcccagagcaggatggaggaacaagggcgccatgatcatctacaccagtgggaccacggggaggcccaagggcgtgctgagcacgcaccaaaacatcaggnctgtggtgaccgggctggtccacaagtgggcatggaccaaagacgacgtgatcctccacgtgctcccgctgcaccacgtccatggtgtggtcaacgcgctgctctgtcctctctgggtgggagccacctgtgtgatgatgcctgagttcagccctcagcaggtttgggaaaagttcttaagttctgaaacgccgcggatcaatgtctttatggcagtgcctacaatatacaccaagctgatggagtactacgacaggcattttacccagccgcacgcccaggatttcttgcgtgcagtttgtgaagaaaaaattaggctgatggtctcaggctcagctgccctgcccctcccagtgctggagaagtggaagaacatcacgggccacaccctgctggagcggtatggcatgaccgagatcggcatggctctgtccgggcccctgaccactgccatgcgcctgccaggttccgtggggaccccactgcctggagtacaggtgcgcattgtctcagaaaacccacagagggaagcctgctcctacaccatccacgcagagggagacgagagggggaccaaggtgaccccagggtttgaagaaaaggagggggagctgctggtgaggggaccctccgtgtttcgagaatactggaataaaccagaagaaactaagagtgcattcaccctggatggctggtttaagacaggggacaccgtggtgtttaaggatggccagtactggatccgaggccggacctcagtggacatcatcaagactggaggctacaaggtcagcgccctggaggtggagtggcacctgctggcccaccccagcatcacagatgtggctgtgattggagttccggatatgacatggggccagcgggtcactgctgtggtgaccctccgagaaggacactcactgtcccacagggagctcaaagagtgggccagaaatgtcctggccccgtacgcggtgccctcggagctggtgctggtggaggagatcccgcggaaccagatgggcaagattgacaagaaggcgctcatcaggcacttccacccctcatgacccggcagactgggactgcgggtctggtggggagcagcagacgtccccttcacaccgagaaccacgggggcccgtccaagacctggcctcccttaaacctgaaccccccaaatcaggtcacgtagaatcaagaactgtttgggatgaaatcaccatgtggggtccccagcctcgggccagttgttgcagctcaaggagaccgtccctggtgtcacctctgcctggtcaccgccgacctcatctgtgcagcgcggtgcagccagcccctggccccacgtgctgaggcacctcccgccccacagtgccctgcagttgccaggctctccagggcaggtcccagaggtttcccacaaaaaacaaataaagactccactggaggaaacaa

SEQ ID NO: 173456 - DNA, 1024 bp, Homo sapiens
aaagagaaaaaaagaaaaatgcgatttggaaatgtggaggtcgaggttgacagcgacaccgaggtcgaagccagttgcccctggagagcgagagactgggctgggccgactcccacctctgtcgcgagaggcctacgggcaggggcaggtgggcagggggactgtgctgggtctctggccgcgtctggacggcaggcgacactttctccacaaaaagcgtcaagaaaccacgacacttggtttctggacttttccgcggaacagtaaccagaacaatcgccatgaaggttcgtttctgtcatggctcagtgcagcctggacgccctggaccagcccctcctgcgcctgggccacggccgctgccttcagggcatcactggtgggcggcacaaccatcctccctttggggggttaatttcatttctttcctcccttctttaatggtgaatggaggagcaccgagcaccactgcagtctcagtttcagatcccatgcgcctcaggctgtgcttgtctctgcagaaatgtcctggccccgtacgcggtgccctcggagctggtgctggtggaggagatcccgcggaaccagatgggcaagattgacaagaaggcgctcatcaggcacttccacccctcatgacccggcagactgggactgcgggtctggtggggagcagcagacgtccccttcacaccgagaaccacgggggcccgtccaagacctggcctcccttaaacctgaaccccccaaatcaggtcacgtagaatcaagaactgtttgggatgaaatcaccatgtggggtccccagcctcgggccagttgttgcagctcaaggagaccgtccctggtgtcacctctgcctggtcaccgccgacctcatctgtgcagcgcggtgcagccagcccctggccccacgtgctgaggcacctcccgccccacagtgccctgcagttgccaggctctccagggcaggtcccagaggtttcccacaaaaaacaaataaagactccactggaggaaacaa

SEQ ID NO: 173457 - DNA, 580 bp, Homo sapiens
acctgtccgtactgctgggcgcctgagttcctcctgctgggcactgtcagggcagtgcgcctcaggctgtgcttgtctctgcagaaatgtcctggccccgtacgcggtgccctcggagctggtgctggtggaggagatcccgcggaaccagatgggcaagattgacaagaaggcgctcatcaggcacttccacccctcatgacccggcagactgggactgcgggtctggtggggagcagcagacgtccccttcacaccgagaaccacgggggcccgtccaagacctggcctcccttaaacctgaaccccccaaatcaggtcacgtagaatcaagaactgtttgggatgaaatcaccatgtggggtccccagcctcgggccagttgttgcagctcaaggagaccgtccctggtgtcacctctgcctggtcaccgccgacctcatctgtgcagcgcggtgcagccagcccctggccccacgtgctgaggcacctcccgccccacagtgccctgcagttgccaggctctccagggcaggtcccagaggtttcccacaaaaaacaaataaagactccactggag

SEQ ID NO: 173458 - DNA, 459 bp, Homo sapiens
cacgccgcctttaagaactgtaacactcaccgtgagggtccacagcttcattcttgaagtcagtgagcccaagaacctaccaattccggacacaaaatgatctgtcctgaagaatgtttaaattgataccaacatagcctcaatagcataaaaacactctgtttcatattgtcccaacttaagtctttataaattgtgtgcctactaaaagatatataaccataagccgggtgtggtggctcaaacctgtaattccagcactttgggaggctgaagcaggcagatcacttgagatcaggagtttgagactaccctcaccagtatggtgaaaccccatctctactaaaaatacaaaaattttgctgggtgtagtaacacatgcctgtaatcccagctgctcgggaggctgaaacaagagaatcacttgaatctgggaggtgtaggttgcagtcagctgag

SEQ ID NO: 173459 - DNA, 262 bp, Homo sapiens
cctctagaatgtatattattatggccaccattcttactcttaaatatgcacaaggtatcgctgtagatgtatgttcttcagtgaaagctgaaaatggtctatcccttaaagccttactgtctttcttttctttctttctttttctttctttctttctttcttttttctctttctttctttctctttctttctctctctctctttctttctttctctctctctctctctctctcccctccctcccttccttccttcctttctt

SEQ ID NO: 173460 - DNA, 505 bp, Homo sapiens
cctacaacacacaggacggcctccaacaacaaagaattactcagcaatggtaccaggtttgagaaaccctggtctagctagaaatagcagttgcgaatcacaagcagctcccatttccttattatttggccattcatacacaaagctaaacaggcaacatctcattcagtaatttttccccaattgttagcactggctttaaactgttgtccaacaagcaacaagtcatttacccctaagccacaatgggaaaagttagcaaagacagaattctacttagtgataaggaggccaaacaatttagctgtccttggggaatatatcacttccacactcgctgtttctattctaacaggacattaattacagcattttcttcactggacaatttaacaaaaggatgctccattacaagacatgagagagagaaaggggagctgggatctatgttaagagtatgtctacaattaatacctcactatttaacctctctgactggccctgc

SEQ ID NO: 173461 - DNA, 1109 bp, Homo sapiens
gggtgcacgacagggacgcctgagcaaggacccaagcaggggacacctgccaggatgcccaaccccagaggcagtgggagctgttggggagccgtggtcccagtcagcggtggcttgatgagggctgctcccacttcatccgcaggattccagccgcagctaccccacacccgagctgtccctagtcgcccaccgcggccggacaaagccccagcagccaaggtgctccgtggggagggtttcttgggtttcttgaagccagtatttcccatagtatcttacgtcccagcagaggcctccactgtgcccggaccagcggcccactcagtgagtcgagtgtgcacctggcacccctctttctggaaatccacgaacaatgggctcccagcagaggactgaggctgagcaggccacttccctggagctgaccccacagctgtgtaggtacagggtggccgtgaacacttagggctctctcgggctgtgcgcttcttgttcactgcaaggagcagggtgttggctcctgaccaagccctgtcactgctgcccagccacacgtggggccccttcacccacccctgaccacctcatgcaggtgaagccactgtggaaacagcctggcagtcccttgaaaaatgaagtcataaaccccagcaattgcactcctgggcctctgacagagcttgcacgtcccctccaaagctcgtgttaagctgtgagccccagtgccggaggtggggcctggtgtgtttgggttctgggggtggatccctcatggctgggtgccatgaacccactcaccacagtgagttctcacgaggtctggttgttgagaagtgtgtcatacctcccccacaactctctgtcttttgttccggctctggcaatgtaacaagcctgctcctccttcgccttctgccatgactgtaagctttctgagggctgaccagaagcccagcagatgccagcaccatgcttcctatacagcctgcagaaccgtgagccagctaaacctctcctcataaatcaccgagccccaggtttatctttacagcaatgcaagacctgactaatacagcaccagctccccaaaataaaaagaaatattc

SEQ ID NO: 173462 - DNA, 161 bp, Homo sapiens
gccagcaatccccatcagtcctcaagggttaacttaagtttcattgcaccaaatctagtctcaagaacagtgcacctgtatacatagttctttctacctgaaagtccttgcctcagtcctggtcttcctgatctactcatcctccaaggcctgctcaggtg

SEQ ID NO: 173463 - DNA, 449 bp, Homo sapiens
atctgatttgaagctctatgggaatagctggattagccaacaggtgggctttggagccaagtgtttgtcaatctgaatgtctttgcagtttttccagagaagacttgtctagtctactttggagatgttggcctggcttccaacatttggcagaatgaaactttggagaaggaaaggaacagtggagacccctggctcagattacatgctttcatgtaataccttttttgatttcagtcaaagcctgtagtaactgaggtctgtggtcttcatatcacagagttctctgttctttagggaaggtggtcaaggtgagagacagtagtcctgtatgtgtgaagggttaaggcagagacctggaggtccaatctctctctaaataaacttacaactagtttctaaagtttccagcctcatgtctcactcctgttttttgtggtatacagtct

SEQ ID NO: 173464 - DNA, 695 bp, Homo sapiens
ggctgggtttatagttttgtaacccctataccaaattttgacaccttatagtatttggcagggataagtatggaattgcttgattaataaatgcaaacagaaatttatgctggaaattcttaagatatttctaatattactttatcaataattttaaagctagattagttattaaatattttacttaagttacataaacttgaaaaagcatttgactagtcttttcttttttagtacctgatttaaacacttttatttttttaagccaattaattagagctcttttatatatttttagtggtgaaacattgtgtacacaacacataaatacatagacatattaggcatgctgatagaagtacatcttatagattcataaaaacttttttttccttagactttcagattgttgataacctgtttcacaagactgagcagttgccagctaatttgcatatcaaaggaaacaactcaggtgaaaatcaaatagcgaaatttacattataaggtgcagagagaagaagtttggtgtgttagagggagattaaaacagacttaattgctaattaaagataacattgtagaaatgataaaggcctttgaaatacacacacacatgcacacgcacacacacacagaagattctatagcttttactttagaacttttagccatgagataaatacaaattcact

SEQ ID NO: 173465 - DNA, 340 bp, Homo sapiens
aaatcctagagtcagcaaacccctctgctctgcccccatacctgggtagcagttcctctttgatcccacctctgagtatctgtccaaacctctctcctgtcccacttttcccgccacttcatcactcccctttcttacctggcttctagctcccagctcccagtccatctgactggtccacgccccattcattttcatttacatccctctccctctgccacactccagctccagaacctcccatggctccctactgccagcccagccaggccaagcctgtcccacacccccaacacgctgagttagagcaagagcacagatgtgggaggcagcagcaggg

SEQ ID NO: 173466 - DNA, 399 bp, Homo sapiens
agacccaggcatctgggctcccggctgcaccatctggcccaggcgtacactcctctggttcaatgctgccccagcctgaggcgtagcaggtggtccccagtgctggctcctgggtgggcaggtccatgaccttcacagcatccgtgagctcggcaggctctgacaggcggagcagcatgaggtcgtggctggagtcatcacctggcctgaggaatcgattcttcaggaggctcatatcgtacagcgggtgtgggaagctgtggctgacctgaaatacctggcctgtgtcttcaggatgaaacaggctgtgccgacccagcaagatcacgcttttgctggggagggttgacgcgggcgtgaatttagtagtagtagtcgaccctggaattccggatcggt

SEQ ID NO: 173467 - DNA, 248 bp, Homo sapiens
cagctctgaatgattaattgatttaaacaagcatcatctgattccatgaggaatccttcagtcataacagttttttgtcataacagttttctaattgtgtggcttatatctcattataccaagttaacctagctatataaatatttgaattgtcacaaaataattttctaattttcttagcttcaataaggcattttttcttttttttgagatggactctcgctgttgcccaggctggagtgcaatgg

SEQ ID NO: 173468 - DNA, 254 bp, Homo sapiens
aatgctttctgcttttaagccttttctgcctgatatcaatataactatgccttttaaaaattacgtcttttaaaagttctttcagtttcaacctttccatatctttatttttaaggtatatttcttataaacatatagatggatcttttttttttttttttttttgagacggagtctcgctctgtcgcccaggctggagtgcagtggtgcgatctcgactcactgcaagctccgcctcccaggttcacgccatt

SEQ ID NO: 173469 - DNA, 478 bp, Homo sapiens
agagacaaggtctcactctgtcgcccaggctggagtgccatgacacagtcatggctcactgcagcctctaattcctgggctaaggggatcctcccacctcactctcttaagtagctgggactacaggttcatgccactgtgcctggcttatttttagttgagacggggtttcattttgttgcctaggctggtagttggttattttcttatggctgagtttaagagttctttatatattttggatgcaaattgtttagcagatatgtattttgaaaatattttctcttagtctgtggtttgactcttcattctcttaattatgcccttctcagagcaaatgttttcaattttaataaagtccaactgactaattttttgtcatggatcctacttttgatggtgtatctaaaaattcattgtgacattcaaggtcacctagatttcctcccatgctattttctagaagttttatgtttta

SEQ ID NO: 173470 - DNA, 352 bp, Homo sapiens
cgggattgttgcctagtcggtctggagccagccgcttggcagcagaaatcagtcggtaatcacattgccacagcggctcctgggctgcgtgccaggcagtctgcatgaaaagtctccccagatcctcctccaaattaccttgagaaatctataaacgcggtacaccacagcaacaaaatcatatgatcatctcaatagatgcagaaaaagtaattgacaacattcaacatcattccatgatcaaatctttcaaccaattacatatagaagaaatggaccgcaatacaataaaggtcatatgtgacaagcccgcagctgacatcatacctaatggtgaaaagctgaaagcttt

SEQ ID NO: 173471 - DNA, 566 bp, Homo sapiens
aaaacactaaaaaacattgaaataatatcaagcatcttctctgaccacaaaaaaataaattagaaataaataagaggaattttggaaactatataaatacataaaaattaaacactgtgctcctgaatgaccagtggatcaatgaagaaattaagaaggaaattgagaaacttcttgaaacaaatgataatggaaacaaaacataccaaaacctatgtgatacaggaaaggcagtactaagagggaagtttataggtgcctacattgaaaaagaggaaaaacttcaaataaacaatataatgatgcatcttaaagagctatgaaagcaagagcaaaccaaaccctaaattggtagaagaaaaggagtaataaagatcagagcagaaataaatgaaacaaaaaattcaaaatacaaacaaaacaaaaagttgtttttttgaaaagtcaaacaatattaacaaaactttagtgaggctaagtaaaaagagacaagatccaaataaataaaatcagaaatgattacaacagatactgcagaaattcaaaggatcattagctgctatcat

SEQ ID NO: 173472 - DNA, 648 bp, Homo sapiens
tctaatcccaactactcgggagactgaggcaggagaatggcttgaacccagttggtgaaggttgcagtgtgctgagatcacaccattgcactttattctacttgggtgacagagcgaaactctgtctcaaaaaaaaaaattctatttaaaatagtggccttggccaggcatgtggtggctcacgcctgtaatctcaacactttgggaggctgaggcaggaggattgcttgagcccgggagttcaagaccagcctgggcaacatggggaaaccccgtctctacaaaaaaatgccagagttagccaggcgtggtggcatgtgccttgagagaatgggttagagagctagaacaggtcagagacctttttgtcctatgtgaaaatgtacaatatacaagagttactccctgaaaactacccgcatctcccactccctaaaagtcatttttgaccttacagggggctcatattaaaataattaggtcaggcgaggtggcttatgcctgtaatctcagcacttcgggaggccgaggcgggcagatcacgagttcaggagttcaacaccagcctggccaaatagtacaacaccgtgtctaccgaaaatacaaaaatcagccggtcatggtggtgggcacctgtagtcccagcta

SEQ ID NO: 173473 - DNA, 657 bp, Homo sapiens
gagtaacttgagtgagaacaatgaatgaataaggggtcttgctgagaatgagatttgaatttgagtttttggagctggagtagggtagactcactactccagcttaaaatgtaggtgaaattagtggaggtgaaggtcactgcagataggagactggagttagagtcaaaatggccaaggctccactcagcttccatagaacagcatatggagtctgtggatcgctcttgagaaaatatttgcaccccagggtttctaatgacatgacgttgggggacattttccagcagtcaattttcagagtattcaaatgaagttaacttgttccatctcagacctgtgtgctccctcactcctctttactctggtcatgcttgtcagatctccttctgggacagcagagtgtgaggaacacaggacagataacagactggattcaggaatcttcacttgaaggtaatcctgacacctgctaccacatggatgaaacttaaggacattatgctaagtgaaataagccagtccaaaaaaaaaaaaagacaaatactgtatgattccactcaaatgatgtacttaaagtagtcaaatcatagagacagaaagtagaatggtgcttgtcaggagctggaggggggaatgaggagttattacttagtg

SEQ ID NO: 173474 - DNA, 336 bp, Homo sapiens
ccaaggattattgtgaataaaattatgtcactggcatggaacacagatgcttggtttcatgctacagtggggctaggtctccagttaattcaaaggctatataaggataatttgatataagttaaaaagaaaagggagcaacaacacaatctattatataagttttattttataattcctgtatctacaattaagtatatagaagttgttatgggtaaaagatttgaagaagaattacctagggagcatgccaaaccatacaggttgaccaagagagtttctatctgcagaatctaaggctggtgaaagatcagtaaatgtgaagaaatgtattct

SEQ ID NO: 173475 - DNA, 134 bp, Homo sapiens
aaaaaaaagacctattgtaaagctatagtaatcaagatcatgtggtattggttaaggaatagatgaataggtcaatggaatagaatagagagctcagaattgactcacataaatagtcaattgatctttgacca

SEQ ID NO: 173476 - DNA, 522 bp, Homo sapiens
aaaaaaaaaaaatatatttccttttgaaacactaagttttgggtttatttgttggttttaccctaacatcacagttagtgtgtattctctgggcacagacaagctgcgaggttcagggacgcagcctgggggagagctgagagaggaggctgaggatgtagccatgtttatagaactcttttcaggcatgggtcttggcagacagatgggcaggtccaaggtttatgggcattgactgcaagctggttgctgtagaagagctccagggtggtacatgacctcagaggaaaaagggaggagtcaagaacactgaaaatgctgcggccgtttgcaatccacaatagcaaggaaacaagatatttacaaatgagataaggatggttaagcactcagatgtcttcagaaggagaattaacatatgtgtagtttcttacactttacaaagggcgttcacaggcattatcttaattagcagttcaaatagaaagttaaaaagtgggagtctaaacttagggcactctg

SEQ ID NO: 173477 - DNA, 497 bp, Homo sapiens
aaaaaaaaaaaatatatttccttttgaaacactaagttttgggtttatttgttggttttaccctaacatcacagttagtgtgtattctctgggcacagacaagctgcgaggttcagggacgcagcctgggggagagctgagagaggaggctgaggatgtagccatgtttatagaactcttttcaggcatgggtcttggcagacagatgggcaggtccaaggtttatgggcattgactgcaagctggttgctgtagaagagctccagggtggtacatgacctcagaggaaaaagggaggagtcaagaacactgaaaatgctgcggccgtttgcaatccacaatagcaaggaaacaagatatttacaaatgagataaggatagagggattaaggatagagagattaaggatagagagataaggatagagagattaaggatagagagattaaggatagagaggttaaggatagagagattaaggatagagagattaagaa

SEQ ID NO: 173478 - DNA, 132 bp, Homo sapiens
gggtcatgtttaagccattgtcagttgctattataattacagtgattgttatctagtgaaagctttgctggcagaattccaccagaaggctaaaacttgcatccaagttttcattaagctattggggtttgt

SEQ ID NO: 173479 - DNA, 796 bp, Homo sapiens
tccgggcttctgggtcaccgccttcctgaaccacccgcagctctcagccatgatcagccctcgagatgaagacatgctctgctacctgatgaatttggaggtgagggagctcaggcactctaggacaggttgcaaattcaagttccgcttttggagcaacccctacttccagaacaaggtgatagtgaaggagtatgaatgcagagcctcaggccgagtggtgtctattgcgactcgcatccgatggcactggggccaggaacccccggccctcgtacacaggaaccgggacactgtccgaagcttcttcagctggttttcacagcacagcctcccagaggccgacagggttgcccagattattaaagatgacctgtggcccaaccccctgcagtactacctgctgggggataggccctgcagagccaggggaggcctcgcaaggtggcccacggagaccccttctaggccctacgggttccagtctggctaagtgctgccttgggatgtgcggcctacataagcttcctcatgcctcctacgggtggcggatctgggctcaggcccatggtgggcgctctgttgtctgctgtctgctgtctgctgtctgctgtctgttctgtgcactcccgctctgcgtggttcggtggactcagctctcaaattgtggccctcgtggccagtctctactgtttccatatggcctcttgctgttctgtgttaacatcacgtggctgtcacatgccgctgcgtctacactaagcacccagtgctgtggatgtgcactgccataatc

SEQ ID NO: 173480 - DNA, 618 bp, Homo sapiens
gcttgagtgacaacttgaggacaagcggcgcctcgacaagatttcacacagcagctacgggggccagagaagaagcaccgcatggtgtggcaagagaaggaggacatgcacaagcaattggttgaagcttcagagacattgaaatcccaagccaaagaactgaaagatgcccatcagcagcaaaagctggccctgcaggagttcttggagctcaatgagctcatggcagagctctactcccagaagcagaaggtgtgggacaaggaggaggagatggaagtagccatgcagaaagctgacatgatgtggcaggagatctgaagatccaagaagctcagaaagaggatgctgtttagccagatgtggtggctcacgcctgtaatcccagcactttgggaggtcgaggcgggtggatggcctgaggtcaggagtttgagaccagcctggccaacatggtgaaaccccgtctctattaaaaatgcaaaaactaaccaggcatggtattgggtgcctgtaatcctagctacttgggaggctgaagcaggagaattgcttgaacctgggaggcggaggttgcagtgagccaagatcatgccactgcactccagcctgggcatc

SEQ ID NO: 173481 - DNA, 639 bp, Homo sapiens
aattatcgattgtcagggcaaagggtaaatgagggcaactgcaggtggaagaaagtcacccataagggctttctgggtctgcagcgtttgtagtaggtgctacttctattcttgcagtgctgggagacgggcgggggaagatgcagtccctgctgacaattgggtcatctgcgcgcagagaaggccccgggatgtgcgaggacatgggactgggagtccggaggcagtctggtttgagctgtcactaattggccatgtgacctccctcagccggcttcgtcctctctgaagcaaaaggctggaattggggtggctggagcatttttattttatgcttttgtatttgaatgctgttgggtttgggcctcaccgtttctggttgtctacacctgcctttttcaccgttgcaggtgacgttgcctgcctcccctgaaggtgtttgaacctggtgagatgtataaagggcccttttcagctcaaaaaatcagaattctgtgctgggttatggttggctctatcagggtcacttatgaacgtattactactgttctcttttcattcatccccaatttaatggcttttgggcaccagtgggtgtgcccagtgtaagctctcatggcacacctgctagttaaaggg

SEQ ID NO: 173482 - DNA, 357 bp, Homo sapiens
aatgcctatcttgaaatggtatctctgctatttgcttagtatttatttactttttagagtaaaagcaatacatacacttaaaagaaattaaggcattcaaaacatatagagtgagagaagcatcttttcaccctggaccccagccagtcagatctcctccccagatacaatgtcaccatcagtttctcgtgcccccttccacggatacactatgtgattgcaagcatctatgtaggtttaacttaactgatgaactccggatctacaaaggtgactgagagggcagtgatcagctctcctacaacttgcctttagggaactgaccatctggaagaggagccgatgagcaacaaaaca

SEQ ID NO: 173483 - DNA, 772 bp, Homo sapiens
ccaacattttagggtttgagaggccaggactttggtgtcaggcaagtggagtttggatcctggctcaggcaagtgctggccgggcaaacagctttacctctccctgcttctgctggacaaactttacaatggggatgaattgtgggggcactcactggaggagcatgcccgtgtgcaagaggatgcacgtgcccctgcccacagacctagagcctttttctttttaagacagggtctcactctgttgctcaggctagagtgcagtggcacaatcatggctcactgtatccttgacctccccaggctcaggtgatcctcacacctcagccttccaagtagctgggactataggctcacaccactacgcctggccaatttttttatttgttgtacagatgggttttccccatgttgcccaagctggtctcgaactcccgggtcatgcctgtaatcccagcacttcgggaggccgaagcgggtggatcacctgaggtcaggagttcgagaccagcctggccaacatgatgaaacctcgtctctactaaaaatacaaaaaaatagctgggcgtggtggcgggcacctgtaatcccagctacttgggaggctgaggcaggagaattgtttgaacccaggaggcggaggttgcagtgagccgagatccaccctgggtaataagagtaaaactccatctcaaaaaaaaagaaagaactctggacaagacaagcaggaggcttgccagctgctggctggggcatcgctgccttccctgcc

SEQ ID NO: 173484 - DNA, 437 bp, Homo sapiens
aacactgcctgtctgtatgatctttaatcacaagttaatttttaaaagcttcattagtgtgctgtttttctaagctgaaattagttttttcgacttggacatatcagcttagctgcatttgccttattttcttattatcataacctatggctggtggtgtcaatttgatgagaggctgtgctaataacacccaagttgtgggtttcattctcgccacagggagggcagttcgtctcaatggaacaggcagacctatcttgtccagtcttgcaaacgtgtatgagggtctgggtgtaagggtgaatgtttgctggacctgggtgttaaagctttgtagtccccatcagtataaagctgtttctgctcctgctgacctggctcagtgcaagtcctgtaacgatgggtaggctgctggctctgctccttcatgaaggacg

SEQ ID NO: 173485 - DNA, 201 bp, Homo sapiens
atcaacttagtcattaaccagctgtggacttagatgggttatttcatctttctaaaacttaattttgtcttatttaaataaaggtagtaatgttacctacctcatagatttattttaaagattaaatggtataataaatgtatctttgtaaattaaaagtagcttttaatatatgtaattaataggcgaaagaaagcagga

SEQ ID NO: 173486 - DNA, 426 bp, Homo sapiens
tgcagcagagcaggacgttcgctttcccttctccgcctgtgtgttcttcctgcactgcctaactgctgcttgctcatttgtgcttccgtgtcacccctcctcagccctctgaactctgcacgtcaggacttggcacacttcctaactgctgcttactcatttgtacttccgcgtcacccctcctcagccctctgaactctgcgcttggacttggtgtgacttcccttccccgcctattctctagaggcagtctcttggtgactcctggtttgggtcagggcacgccttaggtctctggatggctaccaaccccaggttccctcagctctagccccataagagaggaggcctcaggagcgcctagggcagccctttcagcctgggctgtgggaagggaaggtggacagagaggagaccccatgccta

SEQ ID NO: 173487 - DNA, 404 bp, Homo sapiens
atatatttaggcatcttcaatttttaaaatgacatttaaaactctgaaactgtctgagatcactaagggagagtgtagatactgaaaagaagaaatccgaagactgagaattagtctgattttcattttctggcttttcagaatgcagcagtaggctctctagaaacagatggaggggaaaatcttccttctccccctccatcagaatgaagacaaattgtgccactatacataagcctgtggagggcttctcttaaatagctatgatggtataatctgtttataaactaagtatcatagtctaacttaatggagcaatccgaatacgtaaatgtaagtaagaatccaacataaaaatttctatgtgtatatatgatttattaaacattttgtcaatagtattt

SEQ ID NO: 173488 - DNA, 480 bp, Homo sapiens
ctacacccaatgcattagatatcagttgaattcgtctctattaaatatcataacttaagcttgtcgtgttccactttcttgcatcatgtcgtgactgatatacccctcgcttattaaaccaaacctaattccagagcctcaactttgaagaaagggagaacatctatttcttaaactccacttaatactgtaaaaattataactccatagcatctattaatcccattacaatgcaggtactgagagcacaaaagaacattaaataatccacataaattatattatgctatttttggtttttaaaaataaactattacttgaatgacaagtatcaagtatacagatatttcaaatttacaaacacattttatgactcaaaaatcatcaaaaagagacatttaatctttttttttttctttctttttttgagacagggtcttgctctgtctcccaggctggactgtagcggcataatctcag

SEQ ID NO: 173489 - DNA, 1335 bp, Homo sapiens
ataagcaggattcaaggctagtgtagaccctttttttcctaagagtaaggacacggaatatcaaagtaacaaagggtgctgccattttagtttcaatttaatatcaggatattctttgttttagaaatgtagattttgacttttacagtttgaaaaagggtacctcagcctcttcagtactggttttttggcacatttcaacagaaatattagattccctttctttttcttaatagtgatcttctaacaagtttcttggaaaaactatcattctaagggaaatccctgtttataacctattaatatatttctattcctagaagagagtctagcagggattctagtaggaattactgagtgttttggaaggcacttgatagaggcatctctgctttccagcacagggattctcagccttctaaagatctagaccagtttccaagctagcttctccacagcccaccactgcctagtgtttgcttgtgtattctctaatggattttaggaggataggccttctgacagagtcatgaaagactgaaggcatgtctagggaaataaaacctgacttgcccttcagcaggaatgactggcagcggatctctgtgttcaaggaaagggtgagcgctaagcatgccagtgatggatccgaagtatttagatggattgcagaccaggaattagagaccgtttgtgactcaaggaacttgatggatctgtttagagccctacatgaatttgccaagggcagtgatttttatgaaattcaagaagcaaacgacttcgatacagctagaatatgttgcagtcttcctatttcaaacttgattttaatatttttaccaagaagtttaactgacaactctgcaaaattttcattcagtatcattaaacctgagttaaatgtttgcttagcttatcctcttagatgttcttctgttgaacaggcaggttgcccttaacagtaacttgctacttaaattaccttttattagttagtcaagctgcaaaaatatcattagtgtggcgtctttattttggctttatccatatgaagtattcattattttcattctttttgagaattcataaatgtcttaaagcttcagtaagaattgttgggaggtttgacatcaagtaacgccttcctgtgtagcagtataaccctaatttagaactcttgttttcctatttcagtcctcatatttgatcatagaaaagcacttttgtgattctataggagtcaaaaaatcagccaagagtaggtaagtcagtcagcacagaaatcagaaagtgagaattttctccaaaaaatctttttaaaaaagtcctgct

SEQ ID NO: 173490 - DNA, 248 bp, Homo sapiens
atcttaaagataatttaggagtgggtaaggggaaatgagctcttcctagatgtcagggaaagcatcatgagcctagtcatgggtgtttgaatgaatatgatatacctagggaacagttttaaaaactgtctggattagagtggcagctggagaagactgagaaataaggttgtgtaagtgaatatataatgtttatgatacatgaaaaatatgtatttttttcagcagtgaatggtacatatgctggt

SEQ ID NO: 173491 - DNA, 452 bp, Homo sapiens
gtccttacaaagggtgagtttgtccctctcttgcctctaggccctttcaccttgtgctgtgtgattatgcagaagggaagccttgccagattctggctctttgaccttgggctttccagcctccaggactgtaagaatatacatttccattctttgtatattacgcagtttcaggtattgtgttatagcatcacaaaacagactaagacaacactgataatggatttacagcccaccctaaatccaagctgatctcaatacccttcagttaatttcttctgcagaaaatcctttttccaaataagatcacattcttcatattcaggttcagcactagctatgatggaatagcgtgaaactaactagggtgcctatcagaactactacacaaaccctggtttaactaggttatgagatgcaaaggggcagctcacattctgtaggtacttttt

SEQ ID NO: 173492 - DNA, 266 bp, Homo sapiens
ttagaaatcactaaaagccatctagtgccagtttatctgttgtacataatgttttaaatcaggctatttaaaatcattttggggcagaagtatttatcttttttatcttctcattgactcgtaacactattcagtgaatttgggcagaagtagagagtcatgttttaactttgagatgcagttttttacatggctcttaagttaaactgagtacatttccaaaagagtttttctgaaaaatactttagtagcaaaattagtagaat

SEQ ID NO: 173493 - DNA, 381 bp, Homo sapiens
gaggtgccccgaaagcttatagtgtatatcttctatactactttgtatcttatattacctttcccatcagaaaaatcctcacccagtttctttctttctccccattttagaggaaacacttatgtgtactatttttcacttcatcttgaaaacaacactgccattacttttatcactttttttcattactttctcagacaaactccttaaaccaagagtcttattttccctacttaagtcagattttaaagattttaaaatactctgcaaaattctaaattatgatgcaattcaattaatgtgatgttttagaatacagagctattacatgtttaagctcattgtctgttttccttaatttttggcttccactgtttttta

SEQ ID NO: 173494 - DNA, 258 bp, Homo sapiens
ctgccacgccgcactccagctgaaaagcactttcagatccattatgccattacctcatcatagcaagtcagggaaactctgttctctctaggggggcagtgacaaatgcctgtgtgcagatggcatcattcataatcctagtggtatccagcacagcccaccgctgcagtcaagcgaacagagaggcataaatgtttgaagtgaacacagatgaatgtagagatacagccacatccatcacttgcactttccctactt

SEQ ID NO: 173495 - DNA, 366 bp, Homo sapiens
ttacatttgtaaatggttgaaaacaaatattggtgacacacaaccattctatgaaatttgcattttacagtctgcaaataaggttttgtggcaggacagctcgcctgttcatttatgtatcaccttcggtggttcccaagctacatctttgcttttggttttgttctgagacagaatctcgctctgtcgcccacgccagagtgcagtggcgtgatgtcggctcactggagactccgcctcccaggttcaagcgattctcacgcctcagcctcccgagtggctgggattacaggtacctgccaccatgcctggctaattttttttagtagagacggggtttcactatctttcccaagcagatcgcaa

SEQ ID NO: 173496 - DNA, 604 bp, Homo sapiens
cttccatggggtcgagagattactgggatcaagtcccctgagcagtgcccaccgatgacagcttatcaaagggaaaaagtacaacaataaacacatgcagtggccctctctggtgtgtttacacccatgagtatctatgtagagacagacacgctgcagagaaatcactctccatgactgttcgtatacagggaagagagctgttcacagagagagaagggagggctgtatatgtggtgtgtcaacaggggaataaaagggaagaaaaaaaaaaaaacagaaagaaaaacaaccagagtaagaaaaatgcatgaaaaataaataaaaagaaacaaattaataatgaagaatccacggtggactctcttcaatttaatttattcattctttgaaagtacaagagggtctggagaagaaagggaaggtaaggcatatgggcaagcaggctctgtctgatgagctcccagttgggctggcagataccaggataatatataccactgactcagacacccacactcacacaaaaccctcattccaaaggcgcagaggctttctattgatttgaatgcagatttaacctgcttactcttaacctccccca

SEQ ID NO: 173497 - DNA, 525 bp, Homo sapiens
accgctttcccatgcactcatttgcatgcatgtgcatgttcgtgtgtgtgtaagttctatgtagttttcacatgtagatttgtggaaccaccactactatcaagagctgttccatctcctcagtgatccctcatgctacccctttatatcacatccattttccttgcttatccccattctcccatccctaaaccctggcaaccactaatctgttctccatctttgtaattttgtcattttgggaatgttatattactggaattacaccatatgtaacctcgagattggctttttgttttcactcagcataattcccttgaaattcatccaaatggttgtatgtattaatagtttttttctttatgttgctgggtaatatgccatggtacatccgtggtaccatggtatactacatgtatactacacaccatggtaatggtgtctttagctattaactcattgaagggcatttggaatgtttcaaatttttggctgttacaaataaagctgctatgaacattaaaa

SEQ ID NO: 173498 - DNA, 969 bp, Homo sapiens
ttcttactggatgaattcaagctatacaggaatatttcatatatccacaagggagaaggtaaaagatggaacatgaggaggggtctgtttcaaatcagacctattcttcagaagctttcatcactgctacacaaagaaaggaggttgctgcttcaaggattctggagccaccaaaatccccaaacaggacctacagaaaaagccttcacagagactactgaggataaaccaaataatatggctaatagaagatacaccacaaaatccagtcattgtaacataaactgaacttccttatatatcttttcctaggcttagccaaaagcaggagaactgcaactctatgtggtattgtctgatagactggattttttccccaagcaagaggtggacagctttatgccaggactagatttacagtcaatctgggtgtgtgtctttactttttctttccctccaaactacctcagaaaatgtctggctattgtgccttgatatgtaataatgcagggctttaagtactgcaaaggtctggaaaagaaagtccctcagtcccagttatggctcaaatcttacgatttctctagcagttgttttaatcaaccaaagctggttggcttttctcaatgagccaagcaacatgagccttctaagttaagcgcagaggggctgcttgtcagcatgactcccaatggggtggctaacatggaatatgctccagagtctagaaatcaggacagcacagctgctgttttcctccacatgcacctccagcttggtgggtgggggaggaaaggaagaagaatcagtaaattgaaacaggaggaatgctttacatgcaacacacaagactcactgcttaaaggtgagatgaattcagaggtctcaacacatgattaggataccttcactgacacaatggtccccaaaattcaacctggaggtccagccttgcccgtctggcaaaaa

SEQ ID NO: 173499 - DNA, 300 bp, Homo sapiens
ttcttactggatgaattcaagctatacaggaatatttcatatatccacaagggagaaggtaaaagatggaacatgaggaggggtctgtttcaaatcagacctattcttcagaagctttcatcactgctacacaaagaaaggaggttgctgcttcaaggattctggagccaccaaaatccccaaacaggacctacagaaaaagccttcacagagactactgaggataaaccaaataatatggctaatagaagatacaccatcccatgtgtctgtgtagaaaatgaccgggtcctctagatc

SEQ ID NO: 173500 - DNA, 846 bp, Homo sapiens
gacaccagtgcagcgggggggggcccggaggccctgggatggggaactgcggtggcttccgcggaggtttcggcagtggcatccggggccggggtcgcagccgtagacggggccggggccgaggccgcggagctcgcggaggcaaggccgaggataaggagtggatgcccgtcaccaagctgggctgcttggtgaaggacatgaagatcaagtccctggaggagatctatctcttctccctgcccattaaggaatcagagatcattgactttttcctgggggcctctctcaaggatgaggttttgaagattatgccagtgcagacgcagacccgtgctggccagcgcaccaggttcaaggcgtttgttgctatcggggactacaatggccacgtcggtctgggtgttaagtgctccaaggaggtggccaccgccatccatggggccatcatcctggccaagctctccattgtccccgtgcgcagaggctactgggggaacaagattggcaagccccacaccgtcccttgcaaggtgacaggccgctgcggctctgcactggtgcacctcatccctgtacccaggggcactggcattgtctccgcacctgtgcccaagaagctgctcatgatggctggtatcgatgactgctgcacctcagcctggggctgcactgccaccctgggcaacttcgccaaggccacctttgatgccatttctaagacctacagctacctgacccccgacctctggaaggagactgtatttaccaagtctcccgatcaggaattcactgaccacctcatcaaggcccacgccagagtctccgtgcagcggacccaggctc

SEQ ID NO: 173501 - DNA, 317 bp, Homo sapiens
gtctctgatgttgtttctatgaatgcaaagtctaaagctcaacagattctcctgttacaaatgctgcctacctccaggtagattccatctctgccaagtctatttattatgaagcggagtgtgggtatgggcagtagaataaatgccaaaataatgtattttgtatactactttaaagtggcttgtctggctggatgatccactttaatactgcttgtctggctggatgatccactttaatactgcttgtctggctggaagaggtagcctgcacacatctggttgcatccttggagtattaaagtggatcatccagc

SEQ ID NO: 173502 - DNA, 157 bp, Homo sapiens
tcactgcaacctccgcttcctgggttcaagtgattctcctgcctcagcttcccaagtagctggactacaggtgtgtgccaccacgcccggcagcaatatgaatctttaaggaatgggcaaaggaaaagatggagtagtggagaggtagaaggaaaac

SEQ ID NO: 173503 - DNA, 363 bp, Homo sapiens
gcgcccaccaccacacttggttaatttttgtatttttagtagagacagggtttcaccctgttggccaggctggtctctaactccagacctcaagtgatcctcctgcctcggcctcccaaagtgctgcaattataggcatgaaccagcgcccaacctaaaactatcttttcaatttatctgttctgaataatgcctcatcaatgactactcatggttgagttagatcacaaatcatttgaggttgtgaccagctgccagtaacattattagagctgacttgtttggttaactttgctgaacaactcaatctgtgctcacacatatggaagtataggctgtagtaactgctcttgcagtaaaata

SEQ ID NO: 173504 - DNA, 218 bp, Homo sapiens
tcataaatctaagttccttgagagcagagatctctctgtttttgtcattattcttcccccatgcccaaaactatgtagagtctcaacagttttttccattaatgaaaaccagtgacataggtcctaacttcttttttttttcttttttttttctttttttttaagacggagtctcactctatcactcaggctggagtacagtggcacgatcttggctc

SEQ ID NO: 173505 - DNA, 658 bp, Homo sapiens
gggattacaggtgtgagccactgagcccggcccaaagatgctaaatttctacctggaaggcctggagcttcctctgtattcccatgggtccaggccataggcatacagtctggccaggaacatcagagctgggcaggatcacagaactcagacaaggggacatagggaaggattggtagttgaatggaggaggatgaatgaaaatctactcatcaaatacttatgaagccctcactgtatactttccaagcccctgcttttctactctttcttctgttcttgcttttgttcaccatttcttctcttcgactgtctgtccctgagtgtgctcagagaaacagaagagagaactgggcaccactggagaaaggcagacaagtggcacagagggaggtatgagagaggaagggaggaaggtgcctctggggaaggaggcaggccagagtacaaagggcttcggttctagtccagagcaggacttcatcctttggacaaaagggggtcactggaggttttactttcattttctaactatttgcatattaaccttgtatctagtcaccttgctaaacgcacttatgaaatctaataatttgtctgtagattcttctggatactttgtgacatgttcctcacacttgcaaataaagacaatttt

SEQ ID NO: 173506 - DNA, 488 bp, Homo sapiens
ctcctgccaaggtacatcagagaagccgaaaactgggactgcatgggcttggggtgggctcgctgcaatgtcttgatctaaaacctaaatgtttcaccttgtggtaaggagcacctgtttcccagagtggcctagaacctggcctctctgctggaaggaatgaagccccagatgctttgcacgggggtggagagagtagtcgccttggtctccgagaatagggttcctcctgggtcaccgcgttcacccaactacctgttaccttcgggcctgggttttccacagaaaaaattacgcaatgagccgccgcctcagggctttggaagttgcagtggggagagaaggggtgggagaatcccccagggatgatagagagcttcaggtctccctttgggtgtcggtgccgctgtttaccagcccaacagccttcagcccacttcccctttcctccccgggggaagagatggttaaagattacacagcggccg

SEQ ID NO: 173507 - DNA, 405 bp, Homo sapiens
aataaataatggtggttatttatgaatgaaataatttttctttcaacgtatgtgtagtattttttaaaagaaacataaatacttaggttattaggacccaactacttagtaaatggaattctgaaatatttctttaggtctggggtactacgaagaaattattgagatattacgtgtgctgtcaattaagacagtgtgagaacttcaaccttaatagaaaccagctcatctacctatagtatcaggaaaggattgatactatttgctactggctagtccatctgcctatcaaagtctctccgtccttctcaactcagatgaaatacctcctcctctgtgaaatctctatacattcaaatcaccttttattggcttgacagttttcccctccccaaccaagtcagt

SEQ ID NO: 173508 - DNA, 484 bp, Homo sapiens
atgtaaaatattcccattttcttaatgcttcacaatctttgctctgaatttaccacagtgtagttttgttttgttttgtttttgagacggagtttaactcttgttgcccaggctggagtgcagtggtgtgatctcggctctgttcaacctccgcctccccggttcaaatgattctcctgcctcggcctcctgaatagctgggattacaggtgcgcgccaccacacctggctagtttttgtacttttagtagagacggggtttcagcacattggccagtctggttctgaactcctgacctcaggtgatccatctgcctaggcctccaaaagtgctgggattacaggtgtgagccactgtgcccggccatacactgtagcttttaaccctaatgcttgcttctgacttccaaaaaatggcataaggctttttgctgtggtttttgtttgtctgccatacacatgactctcacgaactgggaaaacg

SEQ ID NO: 173509 - DNA, 584 bp, Homo sapiens
ttgcaaatgtacatttcaaaatcttgaaggaggagcatcctaataagctcattatggtgcaaggcatagcacgtgcagaaaatgctgtcactgaaatgaacttggacctagtattcctgtctctgaaatggactgaattgctaatttttgaaggatatggggcattattaactgtagtggtttaacctgtgaaattagtgactcttgagaaagcagaggctattgaggccagatttgtttacgtctgtcatccttggtgatgcacctcgagtgtgttggttacagtttctcttctccaggcatttcaaactctgaagctcatctgtcggtggagagttagctaacaggcaaagctcggatattgagactgcatctgcagagctcctgctggggatatgagaatactggctcttttccagacaaatgggagttagagccttttataaggactttccataagatctgatagtattttcatgcctttttggtttatctatttggtgttttttttaatttattttttgtgtgttaggcattcataacctcatgtaaattcttggccaataaaattgttgcttacttca

SEQ ID NO: 173510 - DNA, 1116 bp, Homo sapiens
caggtgtggaccttggatgctgcctgcctaaggctggtgaccaaaaagaaggtagagttggatacaagagcctggcattgttggcatttttgtgtttgagtgtcggaaagatcgtggcagaagcctaagtatctgtgttgcttgggcctagcatctgtgttttcacaaatcccccaggtgatttgatgcctctttaaaacacagaatgttgggccctacccaaagggtttctgattcaggaggtttagggcagggcccaagaatttgcattatttacaaatgtcaaggcgatgccagccagtgctgctggtcagggaccacgctttgagaaccactgctctggtgaatgggtattgctgtgttgttatctgcaaagttacctttgtgtacttctgctttacaaaataggatgtagcttgaactctgagtcaaactgccatttactgtggtatgaccttggatatggcatatacagtgattcctcacacatggtgttaataagttcttagtaaatgctggctatttgaatatggtatgtaggtataaaatgatgtggtggaggtaaaatatgaataatttgctgaatataagctctggactgtggacattataaacaagatcttgttttgttttcagcatgacatgaaaggttcattagctttgttttacacatagggaagtggcttattcatgatcacgcaactagaagtagcaacggtagatttcaaattcagttctttctggcttcaaagcctgagatttgccaccaccgcatgagctgcttggagtactggattggctctcccacagtttttgtcattgtgtgtgtgtatgtgtgtgtgtgtatatgtatgtgtgtgacagacagagagaaggagaggggtgtgtgtgtgtgtgtgtgtgtgtgtgtgtgtatgagagagagagagaaagtgtgccagaaattatttgcgtacgttttaaaatctctgttaggccattttttaaatctgtaaaatgggcatgaagcatgcagagttcatagggtttctttgctgagtagaatatgggatggcttagcattgtattttttttccttttctaattaaaaaaatttcaaagccaaatcgaatctag

SEQ ID NO: 173511 - DNA, 278 bp, Homo sapiens
agggaccctcggtcctatggttgctgcttgagacaaagacccctgtcagtggaacctggtgacattcacccttctgtgtcaggctgcagacagcaggagatggcagcagattacacccaacaggaaaagggccattgccaccccacaggttgccatagaaggagatgacatctctccctctcctcctccagcagtgtcagctggggaagtggtgggtggatgtgcacaaaagagtagaccacagagcatgctccttctcctccggtctgctggggccc

SEQ ID NO: 173512 - DNA, 314 bp, Homo sapiens
ttctcactctcctgggaaaaatgtatttcctctagcagggaatcaatatctctaagtccttttttaccaaagaaccaatcaatcatttacttctaacattaggttgagaactgcacgatggaaagatctagattttattcatctctaaagcctactgtcctaacacctggaacagagtaagcttcaaaaatgttagtttctatcctttctctaacatataataagtgctcaataaatgttagctgtctctatttcattaagtatcaacattaatgactgtcaaacctaagagcaatgtaaaatccaggagatgg

SEQ ID NO: 173513 - DNA, 602 bp, Homo sapiens
accatggctcacacctgcaatcccagcactttgggaggccgaggcaggtggatcacctgagtttagaagcttgatactagcatggccaatatggcaaaagcccgtctctactcaaaatataaaaattagccaggtgtggtggcgtgcgcctgtaatcccagctactggtgggggctgaggcaggagaattgcttgaatccaggaggtggaggttgcagtgaaccgagatcatgccactgcactccaacttgaacaacagagcaagcctccatgtcaaaaaaaaaaaaaaatggaggcacacagagcctggattcagatctcagctgtgtcgcttaatgggctctgtcacttagggtgtgtgacctcaccttcccaaatctgttttctcacctgcaagatgagcacaccaaaacaggattaaaacagggatgaaaagcaatcatttttagcatagtgtctggcacatagtaaatgctcaataaacagtatccttcattctgaatgaaagtgccatatgttattgctattgtcagtagtagcaacagcaatagtggtattggttctactattaattttaaccaatgctgtagacatagtatgag

SEQ ID NO: 173514 - DNA, 510 bp, Homo sapiens
cagcagtgcaaagaagcagtgggatgattagcttctagccccctgaactcctcaggattgcagaaaggcccagagaccatgccttgtaccatggtatgccaaacctatttttgattgagagtgttggagagaggggagggaagagacaatacatttatttttagagagtaatgtggaccaaatctttttaattaaaaattagggaccaacacaactcctaaaaataattaatagtggtctagaatggcctgcaagctgtagcagagaatcagagacatctgtcaacaaccttccattactggtacatgttggcatgatgtctgccagcatgccctggtgctcacctcttgtggtgtgtgttaaggggtggaggggtcctggtctcagcactccttattgctcaggtatcattaagcagcaggaatgttaaacgcatgatattggcccataagtcattatttctgtcaacagagatggatccctctttgtgatgaaaacataattatcata

SEQ ID NO: 173515 - DNA, 432 bp, Homo sapiens
gtgtccataaccagcatcaacagcccataaccttcacggcattcacacagaatcactttttgcttcaatggcagacgggaagagatggaggaaagtgttatctggagcctgaatggtgttagtcactacagtggacatttggattacaaatcgtactatgccacttagtgctggatcttaaatgacacttatgttttaaacatttgtgatatgtgcatcctttaagtataagatccaaagtagggggccctgtcacccaggtcttaaggtgatactctaaactttagggaatatttcatccaggatctactgaaatctaagaaaaaaaaatttgagcagattgataacagcttttcttttttaaatgtatataatgagagagctgttaacaaagtcaaaagagttattgacagaagtaaagatggctgtagt

SEQ ID NO: 173516 - DNA, 415 bp, Homo sapiens
aatgttttcagaactcgttttttactattacaacaacataatatccattgttggaataagcatatcactccctttaaagtcatactctcagtcgtgatattaattctggtatatttattaaagtcagcttgtgctttactctttctagaagtattcaacttctataggctaacactgccccaacaaagtaaaaatataggtcacgagaagggcatcttttattgaatccattttgctagatttcgtgtgagctgtttctgaagtctcccaagaaaattttctgaaatttcttgaatttttaaatatgctccttttcgatgaccttttgataattatttccttctttaaatctgacctacagtaacattacctttctaaagaacagaaatccttggtgttgggggaggagcagctt

SEQ ID NO: 173517 - DNA, 291 bp, Homo sapiens
aaatgcagacaggtgacaatgacctaggtaatatattttctgcagaggaaaagcattttcatagtatctactcagagttccatacagcaaaataaaggccagtactattggtgactgttgtactgtggctgtagtaagtagtttataaaactcagctaacgaatgggagaaagctacatttattaaaagatcatgatattgataagaatgcattttaattttcaaggtatcatttcagagagtgaatttatctgcataaagagctgactggaacgtagattttattattct

SEQ ID NO: 173518 - DNA, 1017 bp, Homo sapiens
cagccccttccctagcaccagagtctggtcaaaatgccacagaaaatgagctgctctgccagcaagctgtggagctgcctcctctccaggcctggcatcccttggtcagcccctcctgggagggcacagccgtattacagtgccagtgtgcctggccatcagcatcttcacccttcccagtctgtgtggggaggctgtaaaccccgtggattcagctccgtgtggagtttctgtgctatggtgggactgctcattttgccccatcatccctttggcctcccacacacctgccccttcccagggatcacgtgtgtctccagcctttcacctttctattgcaatggtggcctttgtccaggcaagagcaggcctgatggatgtactggtgagccccacagttggatgtcagctcagccgtccaactgggaggaacagtaggctcagttcctccctgacccctgacaccaggccgcagtgggcatgcacaggcccacagaaagtcagtctgggttttgcttttctcgtgagcatcacagttaaagaagcgctcattgagcaactacagtgcacttggtcttctgcaagtgctgggcacctagagataggaacagtcatggtccctgctcttaaggaactgatgacctggtggggccctgttgtcttcaaggaacccagaagccactgggccccaaaggtggaactgaaggactgggggcagctggctctcagcctgccacctctgcactgcctgcctttaaagaaccccaccccaccccatgatggccccctctgttccccttgtatttcagtgactgtgaattgaggttaggaaggcacacctgcccttctgtgtgctctctccacacgaaggatgacagatactgtgaattcagccctcacggccaactgtgaaggggatggagaaggctgggagggctcggggagagctcttaggggctgcggaagtccccacgggggtctgagagtggagcccaagctttggccctccaggcatcc

SEQ ID NO: 173519 - DNA, 482 bp, Homo sapiens
gtgcgatggtgcaatctcggctcactgcaacttctgcctcccaggttcaagctattctcctgcctcagcctcccaagtagctgggattacaggcacccaccaccatgcccggctaatttttgtgtttttagtagagacgggttttatcatgttgaccaagctggtctcaaactcctgacctcaggtaatctgcccgcttcagcctccccaaatgctgggattacaggcgtgagccaccgcttctggcctgagactcccagagatttttaaggaaggtcaagagttagctttaacaatcacactagagcttacttcttgagtattatgaagaaaataccagtatttttctcatggatatttcaagtatttaaatcatttaggcagatcatttgactcaacacattttctttgatcatacgacatttgcatagacttgtaccatataattgccccctcagttcccatttatacatgtactgtgc

SEQ ID NO: 173520 - DNA, 192 bp, Homo sapiens
agttggttacaggattctcttaacaccaagtttttttttaaataacaagttctataaatctttttattgcttcggtatcatgaaagacaaaaaaaaatcaaaacatttattttttcctcttgagacagggtctggttctgtcacccaggctggagtgcagtggctcaatcatcactcaccataacctcaaac

SEQ ID NO: 173521 - DNA, 381 bp, Homo sapiens
gagtaaataatctgaccccttaaatttcctcaagcttaaaaggaggacaggatgaaggctgcgtccaaggttgccgagagttcacggaagttatgctggcagagcccccagcaggcgagcatctgtagtgtgctggtggggggagggctgagtgacttacaccctcttccaaagacaggcgagtgaaaggtatggtttaaacgaatgctgcagtatggggtggggtccaggtggcagaatgcattggctaattgtatctgctggggacactggtctttgggcgcttcctgggagcaggagggaagctccccaccttatggtccccatgggcactttcattccacagggacatggggtctgagaagcatggatggacttaca

SEQ ID NO: 173522 - DNA, 449 bp, Homo sapiens
agagatgggaagtgaattagactgtctgttgtaatcagaatacgatgtgtatggacatcaaaacctcacactgcgtatcttaaatataacaatttcaacacaaaatgtgaaagcaaactgtaaggataggctggtgcactttgatctcttgttttatgctctgccttcattgttctgtacccttaatcgggtaactagtgacagtacgcaacagaatgttaataaccgtgtactccatgctgtgtgtgagatgttgccaaccttaataaacagacagtggctctctaaaagaaaatgttgatttgcgagtagagcatgtgcaatgggaaatacatgtgccatagtaaactatgtatatatacaggagataaagacagaggtgtttaaagaaaaaaaatgaggaggattacataattgtttagcaataattattcttggccacgagatca

SEQ ID NO: 173523 - DNA, 254 bp, Homo sapiens
gagaagtcttgttctaattggttctaccgcatctcctgtacctatgatttgtcaagcagctacataaattggtagctacattttggtctaaaaatgccacttttctccgccatcatcctttttaaaaatatggctatcctggttctggaaaaaatggaaaaatgaaatcccatatgccaggaaccatatcataaagaacacttactagaactactcctgaagcagttctgctattaatttaacttctgggttcc

SEQ ID NO: 173524 - DNA, 519 bp, Homo sapiens
cccacacccccactccagcaaggtaggcccaccccctacttctccctgactaggaaagggaggagataaaaataaggagctacagagaccactagaggtggaaggaatgagaactaggcagaagagacccccctccagttacctccatgcacctgaacacagaaggagaattccattccttgcggttgtgtttaacttgtccaatgtgtcccagtgcccatgggagtgaatgggaacaaatacagggggcttgcctgcctctagacattatgtgaaggccccaaaggacaggagctatttctggggagggctgggagacccaggatcctctaactgaaggaggggcagactcagggaccacatccaggcaagccagggcacgggccagcgctagaggacatagccctgctttgcatattttattatcaatagttccttctttcactcttggtgtgactctatgaccagtggttctgcacatccccaggtttcgtagatgaagaaaggatgacgtgctgc

SEQ ID NO: 173525 - DNA, 125 bp, Homo sapiens
caagacaagtttacttttggtagagtttgaaccagagctgtaccctagacttgaaatggggaggacgggtggaaactatctggacgtggtgggggagacgtatctatgaagtgaaagtttgtata

SEQ ID NO: 173526 - DNA, 226 bp, Homo sapiens
aaggagggaccatatcaagcccattaggatggttattattttaaaaattatcgaaatataaaaaggagagaagccagcagagatgagcccagcatttggagcacttttctttccttttttttttttttttttgggaaggggtctattttggcccccagggtggagggaaagggttttaacccgggttaagggaaccctgggcctctgggggtctaagccactttct

SEQ ID NO: 173527 - DNA, 485 bp, Homo sapiens
aaggatcccctgttggagtgcttgttgcagtgagctgagatcgtgccactgcactcagcctgggcaacaagagcaaaactccgtctcaaaaatgattgaataaataaataaataagagctcactgtctctggacattgctcttgagctgcggcagtccagcctgatctgaggagctcactgttggcataacgctaacgaatcagccaattggaagcttattctgactacagccatatcttcattttcacttctgagaagaaattctgctgtgatgagacattccattttaaattttcagcattttgtaaacactgctttcctgtgagtagggaatattgctggtgtctaaatactgctttcctgtgagtggggatattgctggtgttgagtcagtgactccatcgtcggctgtttgctctcagcatagctacagtatgacggatgagaaagtcggtgctttgccatcaacaatgacagttcaaca

SEQ ID NO: 173528 - DNA, 1170 bp, Homo sapiens
gcacagtatacgaagcataaccttctcttcccttgatgacctgggattgctctcaagaatacccattactggcctgagctgtcactgcctcctcccgagctcccagtaggatgtccagacactgcctctggtcagccctgtcttggccctcagggacctctggctggcttggagagtgcttttgtgtggcgttcccagcccagtgggttcatctgggctggaaccagaggctcctagtggaggagggaaggatgcaggcacagcagaagcattctatcatttgaatgcctggggtctgcctccgcctctctttaaacaaagacggcaatgtgtgcaggactgtgtggactagaggtctggcgtgctgtgctctgagacctcctgtctgtgtttccttcctccttcgctggcagctgctgccggtcagggtcacagaactcacttgtcacctgtggccctattttatccatgggggcctgggaggagctggaacatggacgggggcagctcctacccaacaaaggaagggcctcctggccatggtgcctctgttctggatgagcgaggctgcagcagtctcggtgggctcgtggtgtgtagcggcagggaccctatgaggagcctgcgtgaaccaggagccatccctaggacaacactaacttctatggcctcgtctgtattttccagtctgagtgtctaaaatctgctaaacattcctagtttgattggcaatgatcatggcaacatgtaagtggccaaagataacaaagagaattatagagccatggaaggtcaggctacaagtgaccttagtgaccttttagtccagcctctcgctcagatggggcaaccgagacacaggcaagggaatgatttgtcaaaggtcagagcaacaacagaggcagagcgaggcccaggccagcccggagcagccatcccctgccaggtctacttcacaggacagcagcctccactcagatctgcctgcccttgccgtagccctgtgcattttaattgcttactccttttcttatcatgccctggggtaattttacaaagggcacaactacgacattcaaacaaaacacatctattctcaggttatttttcctgatgtaaatccttatgattaaagaggaaaatacaactgtaggtaagacaggccaaaaa

SEQ ID NO: 173529 - DNA, 700 bp, Homo sapiens
atttttgtatccattaaccagccccacttctcacttctccagcttccattcccagcctctggtaaccatcattctactatctatctccaggaattcaattgttttaatttttagtctccacaaatcagtgagaacacgcagtttatctttctgtgtctctcttatttcacttaacataatatcctccagctccatccatgttgctgcaaatgatagaatctcatctttttttcaattgctgaatagtactccgaaacagtgtgtatttggtaagtgctgatatatgtaaacaccactgaagtcttcagcaaaatcagaataatgaacatgtgtcaatcccaaaaacttctatctgtcttctttgtatttcatttctcccatccctctacccccatcccccatccccaggcaaaactaatctgcttcctttatttactattggttagtttgcattttctagaattttgtataaatagactcatatagaatgtactctgttttggtctagtttctttaatttagcataattattgtgagatgcatctatgttgttgcatacatcttttttttttgctgagtagtaatctattgtataaatgtaacaccaatttactatttcattgatagatattttagttgtttccaagtttagtttaggttattacttaaacatgaaattatgaatgttcatgtttaagtc

SEQ ID NO: 173530 - DNA, 700 bp, Homo sapiens
gcgctgaaagctgagctatcccaggacctgggaggtgaccctgtggctgccgagtttctctctggatgcacaccatgtctatgaaccctaaggaagggtccccactttgctgggagcctcggaggctgggggcaccatccccaatccctcggggcaggctcagatcctggcacactgacattgccagccactcctgggcacttgctgtgtgccgacccaggactaggagctgcacctgggccccaggatgtcccctagtttgcaaatgtggaaacttgagtctcagagacttagggacattggcctctgtgaatctcagggctgcttctcctgaggcctgaaccaggcctggcactgtctgctgggtgcgggcccagccctgggaggacccagcaggggtgctcagacctcccatcccatggctaacccaccgctggggaggaaacctgtggacacttgcactgaaaaatgtcactctctacaagtatgcaagggagtcggaccatctcccatcagacctggacacccgccggacaccacagcccctaacactccggccaggtcgctccaggctggcacaggtggcacccagccagtcacacttaaagcagggtttccctggccttaccatattatcactccccaaggaggaaatgcgaatttttaattaagtgaattaaatgctaatttaattaagtga

SEQ ID NO: 173531 - DNA, 779 bp, Homo sapiens
gctaggatcaggcctggttcgaattcggacgaaggctgtgctcacacagctccgcgagacggccgcccaaacaaagctacctccgtgggccttggccggctgacaagaggaagagaaggagattactctaagctccaggtattctggtgagctggaagctggccgggagggccaggcgccagtgacacctccagccagcaggcccatgtggaggccccatcccgagagcgtgcccggggcgaggcgtgtccggccaccaccgaccaccagccgcccaggaggcagaggtgaccggagagggggctgctcggttcagggaggagcccagcccccaacgcagggcacggatggaatctctcaaggttccctgggcatcctgcccacccaagctgactgctaaggtcatcgatacggagcaggagcccaggcctagagtgtccaggccaagtgaccaccatgagtgcctgagaggccggacgtgcaggctggctcctggcttctcacctgagcctccccagccccttgcctccacgtctgagaatgcccggcgccccagcatggcttggggaggcggggtgctgagtgcatggggccgagaggatggctctgggccagtcgggtgctgggacagtggctggcaggggacccatttggagaagagcccactgctctgagcagctccagctgcagctcccaccgccctcttgtgagggcctgcctgggcccgtgtccaaatcccagcaccacaggccagatggccggcaggtctcacggggtga

SEQ ID NO: 173532 - DNA, 563 bp, Homo sapiens
tccaaaggcagttaggctggaaacccagatgaggtccaaaaccatatgctggcagaattcccttttgcttgggggaggtcagccttttgtttgattcaggccttcaactgattagatagagcccactcacattatggagggcaattcactttgctcaaagtccatcaatctaaagggaaatctcaccccaaaacaccctcacagaaacatccagaacaatgtttgaccaaatatctgggtatcatggcccaggtaatctgacataaaaaattaaccatcacagaaatccctggaacctgtgttatcttatctgaaaaaagagtctttgaagatgttagaaaggatcttgaaatgaggagattatcctggattctccaagaaagcccccaacttaatgacaagtgtccttataaaagacacacagggccgggtgtggtggttcacacctgtaatcccagcactttgggaggccgaggcgggtggatcacctgaggtcaggaggtgaaaccccgtctctactaaaaaaatacaaaaattagctgggcgtggtgatgggagcctgt

SEQ ID NO: 173533 - DNA, 779 bp, Homo sapiens
ggggaatcccagtaagattaacagctagccagcatctcatcagaagaaatggttggagggtggtcaagatggctgataagcatttcatgcccacttcttccacttagtagaaccagagcagtgtacagacagtcacactcaaagtacattatccaagagagaatgctggaactcaacagagaagtgacagggaacaccaaaagtggggaaggaggaggagaggcagcctctctggctgggttcggctgggcatcaggagtgaattcccaatatagggaagaggtgagtaggtgtaggggccagccctacagggtctgtgagtttttctccccatgtgtggagacaggagattgtagaaataaagacacaagacaaaaagataaaagacagctgggcccgggggacaactaccaccaagacgtagagaccagtagcatccctgaatgccagactgtgctgttatttattggatacaagacaagggggcagggtaaggagtgtgagccatctccaatgataggtaaggtcacatgggttacatgtccactggacaggggacccttccctgtttggcagccgaggtggagagagagaggagagacagcttacgccattatttctgcatttcagagacttttaatactttcagtaattctgctactggtatctagaaggcagagccaggtgtacagggtggacacatgaaagtggaccaggagcgtgaccactgaagcacagcatcacagggagacggttaggcctccggataactgtgggcg

SEQ ID NO: 173534 - DNA, 824 bp, Homo sapiens
aaagtatgaggaggcgtaccggttgttatttcagtcacggggcgggggcctagttgatataatgtacgctggctacatctagcatcagaagaaatggttggagggtggtcaagatggctgataagcatttcatgcccacttcttccacttagtagaaccagagcagtgtacagacagtcacactcaaagtacattatccaagagagaatgctggaactcaacagagaagtgacagggaacaccaaaagtggggaaggaggaggagaggcagcctctctggctgggttcggctgggcatcaggagtgaattcccaatatagggaagaggtgagtaggtgtaggggccagccctacagggtctgtgagtttttctccccatgtgtggagacaggagattgtagaaataaagacacaagacaaaaagataaaagacagctgggcccgggggacaactaccaccaagacgtagagaccagtagcatccctgaatgccagactgtgctgttatttattggatacaagacaagggggcagggtaaggagtgtgagccatctccaatgataggtaaggtcacatgggttacatgtccactggacaggggacccttccctgtttggcagccgaggtggagagagagaggagagacagcttacgccattatttctgcatttcagagacttttaatactttcagtaattctgctactggtatctagaaggcagagccaggtgtacagggtggacacatgaaagtggaccaggagcgtgaccactgaagcacagcatcacagggagacggttaggcctccggataactgtgggcg

SEQ ID NO: 173535 - DNA, 792 bp, Homo sapiens
ctagttcggcacgggggcggggcccagtatgattacatggttgaccctggcatcagaagaaatggttggagggtggtcaagatggctgataagcatttcatgcccacttcttccacttagtagaaccagagcagtgtacagacagtcacactcaaagtacattatccaagagagaatgctggaactcaacagagaagtgacagggaacaccaaaagtggggaaggaggaggagaggcagcctctctggctgggttcggctgggcatcaggagtgaattcccaatatagggaagaggtgagtaggtgtaggggccagccctacagggtctgtgagtttttctccccatgtgtggagacaggagattgtagaaataaagacacaagacaaaaagataaaagacagctgggcccgggggacaactaccaccaagacgtagagaccagtagcatccctgaatgccagactgtgctgttatttattggatacaagacaagggggcagggtaaggagtgtgagccatctccaatgataggtaaggtcacatgggttacatgtccactggacaggggacccttccctgtttggcagccgaggtggagagagagaggagagacagcttacgccattatttctgcatttcagagacttttaatactttcagtaattctgctactggtatctagaaggcagagccaggtgtacagggtggacacatgaaagtggaccaggagcgtgaccactgaagcacagcatcacagggagacggttaggcctccggataactgtgggcg

SEQ ID NO: 173536 - DNA, 803 bp, Homo sapiens
ggtggacctccgaaggtcatattatgctcgcgtattgccagagaatctcagtcagatgaaatgggtagtgggtggtagtctgtatggtgttgactaggcattctctgtgcccacgttgttaccatcttggctggactcacagcagtgtacagacagtcacactcaaagtacattatccaagagagaatgctggaactcaacagagaagtgacagggaacaccaaaagtggggaaggaggaggagaggcagcctctctggctgggttcggctgggcatcaggagtgaattcccaatatagggaagaggtgagtaggtgtaggggccagccctacagggtctgtgagtttttctccccatgtgtggagacaggagattgtagaaataaagacacaagacaaaaagataaaagacagctgggcccgggggacaactaccaccaagacgtagagaccagtagcatccctgaatgccagactgtgctgttatttattggatacaagacaagggggcagggtaaggagtgtgagccatctccaatgataggtaaggtcacatgggttacatgtccactggacaggggacccttccctgtttggcagccgaggtggagagagagaggagagacagcttacgccattatttctgcatttcagagacttttaatactttcagtaattctgctactggtatctagaaggcagagccaggtgtacagggtggacacatgaaagtggaccaggagcgtgaccactgaagcacagcatcacagggagacggttaggcctccggataactgtgggcg

SEQ ID NO: 173537 - DNA, 222 bp, Homo sapiens
tcatagaccttttttaacatgcaatttttgcgactgcatgtcatttgcatttaatgtcatttgtcattgcaaataatgtcaaaaaaaaaaaagtacctcataatctatgaaaaattctaaaccaacacagggttactgggataaacacctcttagatatgaggaattatcctttttatatctggctggatttccattaactaatgtttttttgtagaaatag

SEQ ID NO: 173538 - DNA, 285 bp, Homo sapiens
ctcccctattcttacccccatcactgctccccatctatgctctacactgccacccgaaaaagatttctaagatacaaatcctagggactttccgttaatcgttatggtgggctattagattcaccaggaggaaactactgaaaaccaaaggcagatacaccctcccactgaaacaactaaaaatatttggatttaaaaaaaatctcaaagcattaaagaactgacgggcattaccaggttaaaattggaattgataagacattgtaggtttgaccaccagttgct

SEQ ID NO: 173539 - DNA, 397 bp, Homo sapiens
acaaggtttgtgaatcaacacgaccctgtagtttagcatctttgtcctgttatttgcagcatataatttaaaaatgactagaccataaaatattaatgttaaatatgtttgcagatttttggtgattttttttcttttttcgtatttttctgttaagttccaaattatttcctaagaaagatgtatacattttaggctgggtgcggtggctcacacctgtaatcccagcactttgggaggccaaggcgggtggatcacctgaggtcaggagttcaagaccagcggcccaacatggtggaaccccacctctactaaaaatacaaaaaattggccaggtatggtggctcacgcctgtaattgcagctactcgggaggctgaggcaggagaatcgcttga

SEQ ID NO: 173540 - DNA, 650 bp, Homo sapiens
gaataggtgtacattttcttgtttcggcctatattttcttatttctagtaaataatacagtaactttggaacagtacttctgtgctttcttttttgagatggagtcttgctctggcacccgggctgtagtacagtggcacgatctcagctcactgcagcctccgcctctcgggttcaagcgattctcctgcctcagcctcccaagtagctgggactacaggcatggtggcacgtgcctgtagtcccagctactcgggaggctaagacgagagaatcgcttgaatccgggaggcagaagttgcagtgagccgagattgcaccattgcactcaaggctgggcaacaaaaaagaaactctgtctcaaaaaaaaaaacaaacggaaagaaaaaaaaaggggcgggcggcccgggccccacaaaagagcccaagagcaaacgagtatgggacgcggggggagccccaagtccgggcaccaggagagacacaagggggtccacaataaagcgtggtaacccactagggaacaaaacactgcaaggaacacgcgacaaaaagtagccgcttgtgcgattatcaccacacccaagcatacaatacacagccccacgagcggagctaaacacacgagcctaggaattcgactaaaccaa

SEQ ID NO: 173541 - DNA, 503 bp, Homo sapiens
tcagtcttactttgtgcttttttaattcttcactggggccatagcaaggaaagccaaaaatagtattaaaacattcccttcattaaaaaatcttgcccaaatccaactactacatactttcttccaacatctggggtaccctgggagccttttgggctgagtgggtctagaaatccagcagggcaaaaggctagaattttaagcaggtaagtgtaactaaatcctgccgactagcttctccaggaacatgggtaaaggtcacgcttgtatccatgttgcagcacctatcatggtagcctgaacccaaaggagagagagaaggaggagaaagaggatgccccttctctcttgctctccaccctgggtcacacaaaagggagaaaaggaactaaggaaagctttgtttctccctcttgttctagatgagcaacagaccatctgcagtctatactcccctcaagtgtattctaaattactaaagctcctttaaccgtaaaactcta

SEQ ID NO: 173542 - DNA, 236 bp, Homo sapiens
tcaccccttctcagccttcccaccctgctcaccagagctgagtcaggagccctggctttgactccaggaagccttggccctttaacctcaatggctggggttggggtagaatcaggaggtcttgttagcagtactccccattctgcctgtggtgcccaggctggcccctgtatagcagagaacacaccagctggcccttgctggcctacacggtatcttcatctgtcatctcaatg

SEQ ID NO: 173543 - DNA, 289 bp, Homo sapiens
gccaatacggtgaaaccccatctctactgaaaatgatcgtcacctgatccccaccccttgaagatgcctccaccctctccatacgcatttggtcagcactaactgccctgggtgacaggcacactgcactgggtgacaaggacccaaagctacaccagccagtgccccagccctcaagcacctccctgtgcagaaggaagacaacacagaaaagggaagcatggttgtcacagaggcccagaggactgctggctgatgtcactgaatggggaagtggttggccgcacag

SEQ ID NO: 173544 - DNA, 480 bp, Homo sapiens
tgttactagtccaacctctacccttgaaagcagagatagtggcatcattgctacattaacaagctattctgaaaatgtggaacgcacaaaatatgctggggaaagcagtaaagaattaggatctggaggaaacataaaaccttggcagtctcaaaaatccagcatggactcctgtttgtatcgagtagatgaaaacatgactgcttccacctatagtctgaataagatcccagagagaaatttggaaacagtgttatctcaatcagtacagtctattcctttgtatctcatgccacggccaaattcagtagcagccaccagctctgcccacttggaagaccttgcttacctggatgagcagagacatacacctttgagaacttctctacgaatgccaagacagagcatgggtggtgctcgcacacagcaggatttaagagttcgctttgcaccttataggctccagatatctccttgaag

SEQ ID NO: 173545 - DNA, 408 bp, Homo sapiens
catgatatttcctgattctccttttaaagtatgtagggtatgcagggatagtgcctctttcattcctagtattggtttttgtgttcttcttttcttgaactgtctagctagggacttatcaattttattagtcttttcaaagaatggcattatcaattttgtccattttatcaattgttcatttttctattttattgctttctactcatctctattgttttcatcttttttgggggatccttttttattctttcctgagctttaaaggtagctatgcagttttgaaccttatactgtaaaataaatatctaaagctgtaaattttcctctgagtcttattttagttgtacttcttgaattttaaatatgtagtatttttattatagttaatgtattttaatattatct

SEQ ID NO: 173546 - DNA, 627 bp, Homo sapiens
agttaatgcctggcttccatgaagtataataccagggtgctcattgtgcccctggaaagtggtttatcattgctggggccacccaagtgggaccttcatgagttagtgaaacaggctgagtggcctcctagctggatgataaaccttaggagtctgagttcagttcaaataattgagtccttattttaaggcgagactggcctatttgtctatgccaccagccagaggacatttgtccgtaccatggaatggctgagggatagctttggaattagggaagtacagagccgttgactggcattttgcttagggggtgcaggggctaccattatctcttctgttcccaataaatttttcagtaaggttaaagggagtggccatggtatagcagtgagagctgcctcgcagtgggtgacaggcccagcactcaattaaacagaaggcactggcaacagcttgggagatctctctgttttcctttgaggaaagctctagaggcagttcactggaaacaaagatcattgatgtccctacctcccctgtatctccagggtctgaggtattcttcagatgctgaggttgctgttatccttccactgctacaaaatctatgtgccccattccaat

SEQ ID NO: 173547 - DNA, 258 bp, Homo sapiens
ctgaagccaagctgcctgggtttgaatcctagctctgccacttactgttactgcaaccttgtgtgaaagctaaacctctctgtagctccatttccttgtcaaattcaaatgctatttcccgacatgaaatgggttgtttttctctggttgctttcaagatttttaatctttttttttttttcaagagatgaggtcttagctgggcatgatggctcaaacctgtaatcctagcactttgggaggccgcagtgagaggat

SEQ ID NO: 173548 - DNA, 548 bp, Homo sapiens
gacttgtacattgaaaactacaaaacattgatgaaagagattaaagacccaaataaatgaaaagatatcctgtgttcaggtactggaagattaatattgttaagatggaaacatttccccaaacaatctagagaatcaaaccaatctttatcaaaattccaactgattttgtttgtaaaatggaaacgttgatattaaaattaataaggaattgcaaaggactcagaatagctgaaacaatcttgaaaaataataacaaagttgaggaacatactttccaatttcagaacttactacagtgctacagtaatcataacaatgtggtacctgcaaaagaacagacatatagatcaacggaataaaactgagagtacaaaaataagccaacatatctttgatcaattgatttctgacaaggtcgtgacatgccacgaccatccaatggagaaagaagtctcttcaataaatgatgctgggacaactggctatccacatgcaaaagaatgaacttagattcttatctcacaccatttacaaaaactcaaaat

SEQ ID NO: 173549 - DNA, 132 bp, Homo sapiens
aatggtgatggtggcacaataatatgaatgtgcttaataccactgaactgtacacttgatattggtgacatggtaaatggtaaattaaatttcatgctacgtatatctcactataataaaaaattgaacagc

SEQ ID NO: 173550 - DNA, 385 bp, Homo sapiens
gcatccccggtcatcaaccctaaaccctcctgtaccctggccagtaacatctcactgatactcgaattcttttggcaaacttcgctgttgtttgtgttccctgattgaaggtagggtttcgatgcacccctaaaccctggaatccttccacttctcgccatttccactgccactacggtagtccgagctagcactgtttctgcctggagactgtgtagctttctctgtggactcccatgtcctctcctgcctccctcctctcagagtgatttctcaaaaatgcagaccccctcatgtctatctatctgctgtataaacccctccaaatggcttccgttgctcttagaatcaagtccagattcctgttctgttaggccttcgattt

SEQ ID NO: 173551 - DNA, 343 bp, Homo sapiens
cacatgggtggtggctgagtggctttctttagactgggtatgagctctggtgcttcgtagtcctgggactcctataacacacatgagggcttactcaggctggcctcactgccctgcaggctagggcattagagaaccctacattatgaatgagggactggaggaggggcagatttgggggagttgtggtttgggccatgcgcatcatcttgagttgaaggtaacataataaaaacttgtggcatgcgttcacatttaccatctcactttggagctctatttagacccacatcttagaaaactaactgttaaagaatggccttggtcacatggccagcaggga

SEQ ID NO: 173552 - DNA, 294 bp, Homo sapiens
ggaggctgtagagaggtattagagctgggacattaggaagcctaaagaaccatctgtcccactgtcctgcaccccgatgggtgcctctggaagggcctggagaaaccatggaatttatgttctttgggctccctttttgtcgggttaagacagggactcactctgtcagccaggctggaagtgagactccgtctcaaaaaaaaaaaaaaaaaagaaagaaaatattcctcccagtttgttctttgactttgtttatagtgatttttgccctgcagttttttttttttttttttt

SEQ ID NO: 173553 - DNA, 284 bp, Homo sapiens
tagcagtgatggaatgggactctatgctggtgagttttgataagagattgcaaggaagtgagagaggaagaatatcagctgcagcacatgacaagtctgcctcctgggtcaggttcccctgacagcgttggtgcctggggcataaagatgctgggtgccagggaagggaaggatggggcactggagggagaccaaattcaatcattttaagtccagtccccagttctgtgcaattcttagtgtaaagtttttaaaaagaacattaaagacagttacaaagccga

SEQ ID NO: 173554 - DNA, 589 bp, Homo sapiens
cctgttttatatatcttagtgttattttgtttggtgcttaatgttgttaacatactatgttctctggcttttctagtgttttagaatgtatccttctgcctccaaatagtttatttttttcttaattttattttttaatagagtctcaatatgttgcccaggctggtctcaaactcctgagctcaaatgatcctcctgcctcccaaagtgctgttatcacaggagtcaaccactatgcccggcttcctaataatttttactgctgctctcaaagtttttgacaacgcacttgtgttgctggcaaacaacattttcaccgcaatgctgagccactgctaacagaccattagctaaaaatttacaaaagtgaaaaaaatcatgtatccatttaaatattcaaatgaatcatgttggtgttttctcaatatggagttctgtacaagtttttgtttctttgttttcattgcttttggttgttatttataaggatttgagaacttggtctctagaagagagtttttatactgaaaaagactaagggagggtgagaaagtagcattttaaatgtgaataaaaaatatcaattgct

SEQ ID NO: 173555 - DNA, 323 bp, Homo sapiens
gggcaaggctcatttacagaaagtggtcaatagataatgccagggggaattaggagagtaaaatacttgttagtgagtcagttggaagtacaaagttcagcaatatcagtgaagcccacataggaaaacgatgcaaagaaaatgaggtcaggataacaaaaagtggtttgaacacctgatctgcagtatcccaactgattctcacagtactattgagcacttgatatacacatctcagttaattctcacagcaattctatgtgagatgaaagttaccatccttatctaaatgacgagacagaggctcataaatgttaaatgtg

SEQ ID NO: 173556 - DNA, 532 bp, Homo sapiens
gttctattgtaatatttattttgcagataagaaaattaaaccttagaactgttaagtaatccatccacagtcctatccagctaggaagcaacataaatgaaaactttctccaaagctattagatatcatagtctagcaagctaggataacaattcctgccctacttacctcgtaggatttttgtgatgctcaaatgaataatagatacattagatttaaacagtacttcccacccttcaaaacaagttatgaatattttaaaatgattgttattgagattttcaagtatagcaaaatgttgagttttggaaataaccagtgaaaagacaagatgctatcaaagagacttttgaattacatttcatatttaagtggcaatataattattacaaggaatagctgatggactgtataaggatctatgttaatgctagataaaaatggaatcaaatttatgcttgttagtgttgtgctacacggcttgataagtttttctcataagtaaataaaatatgtgcccttcaatctggct

SEQ ID NO: 173557 - DNA, 366 bp, Homo sapiens
aatggagctatgacttctgcagcttcttctgttctgcccaccgggcttcttgatcacacgggaaaaacccagcgtgcatcacctattttcggcagggctcagtctgctggtaccacaggaaagaacaccaactcgttaaagcataactcatggccacagaggaacaagcattccccaaaaccaggaaggtaccatgtataagctagagcctgggatccccagactagactcttgggtctgtgagacttgggtgaggccactgatctttgtgctttggcaggcatgaaggaaaggccactctgacctaccaagagccaaaagaatgttaggtatcaattaggtgactcagaatatccctgacctttg

SEQ ID NO: 173558 - DNA, 433 bp, Homo sapiens
aacagttcaaagtccatctcaactatttctgttcaatcaccacaccccaaaggctacaattgcatcaagtaaagtggtcctggtgtccccacgctatactgactgagtcttcacaccaatggtcattggaaggagctaaaaactaaggtatcttgtttgtgtatcatttttagcttattgtttaaagaaacttgaggaagaagaagcaataccaaacaatttttctgaaaatgacatgtgaacacacacactggggatctgctctaataatataccataaaaggacacagttcacatcaaagttaatttttactcagcaaatctccattgaacccaatagcccctatcaaagctacttagcctcttggacaaaattttattaatagcactcacatgcctaccatatgtagtgtgaaaggagatccaagcaatg

SEQ ID NO: 173559 - DNA, 438 bp, Homo sapiens
ggagaatcatttacgaatttctaggtattcatgtattctatgtctgactcaacagtaacgccttttgactcatccggttcttggaccaggacgctgtcttgctctgtaagccagggagagattttattacgctattttacaaatgcagggtctgaaacaaaaaggttacggtccgggcaggctatgttttctttctactggatcttaagctggaccggatcagtagattgaggagcaggctttagagagcccagtgtcaatctggaatctaagcccttctatcagagcgcaaaactcgtgtccaggaccccagccttagcggggagcaggggcccgtgtgtcgggaaataaggacgaatggttgcaggcacagtttctggaacctgcgttttgtgcctcctttgctcgtatttggaaaaaccgctggggaaaggcgcc

SEQ ID NO: 173560 - DNA, 494 bp, Homo sapiens
tctttgctcccctgtgttactgttcctaaaccaacttgcagcaccacaaagcactgaactcaagtggccctcagcgcgagctcctgctgtgatgagtcgcagagccaccagcactttgttgccttagatttgatcactgccatgagcagtccttcgattgtcagctaagagccccttcagggagttgtcccttaatagaaagtctcttttcttccctcctgttgtaactttaaattaaaagaaactgtagaggagctggtggcattgcagtagttcattcttctacccactgggagaacaacatctgagaaaagacgttattggactgagaattgagttgttgctatttttttgggccagagtcggcggggaggcggttgtggtggaggatgaagaccacgtcatttagactcagtcagactggtaatcaggattgtgattgagagcaatacttttgtgtatgcaaggaagctttctttttggatacaagaaga

SEQ ID NO: 173561 - DNA, 380 bp, Homo sapiens
tataaaaccttataaacggcaacctattttgcaaggttgtaggatatactatcagtatataaaaatcacttgtgttggccgggtgcggtggctcacgcgtgtaatctcagcactttgggaggctgaggtgggcggatcatgaggtcaggagttcaagaccaggctgaccaacatggtgaaaccccatttctactaaagatacattaaaaaattagccaggcatggtggtgagcacctgtaatcccagctacttgggagagtgaggcaggagaatcgcttgaacctgggaggcagaggttgcagtgagccaagatcatgccattgcactccagcctgggctacaggacgagactccatctcaaaaacaaacaaacaaacaa

SEQ ID NO: 173562 - DNA, 352 bp, Homo sapiens
tctttcatctgttgtaaatagtgctcttatgaatgtgggtgtacaaatatttggctggacaactgctttgagttatttaggatatacgtctagaggtggaatttcttggtcatatggtagctctatgtttaacttatagaggaatcctgcatgggctttcgagcaagctaactggctgtatgtgttaatggcagctcagcatggggaaaattgccaattctattcccaggccagccacactttggcagatgttccagatgtctagtggagagtcctaccccaatggccacacatgtgttttctctgaactgcctagtatttttcaaaaatttgggctgggcctgatggctca

SEQ ID NO: 173563 - DNA, 235 bp, Homo sapiens
cgcttttattggtcactaaaatcatatatgttttccaaagaatactgccattgtttatatttccctacagtttttgttttggggagtttggtttggttatagtggcagctgaagtgattttgagtgtttgcagcatgatgttaaattaaacccaaatgttttcaaaccctgggaaaccttttggaaacacccttgggggctttacaatttaaaatttgcctccaaggaaattcaa

SEQ ID NO: 173564 - DNA, 229 bp, Homo sapiens
tcaacacatccttataggctcctgccttctgtttcacttctccactcgtttccaaataaatggctgcatgcaagcttttgcctcaggttctgcttttaggaggaaggctaagacaagcagtaaagcaacatgggcaggcagaaggatgacttctaatagaattatctcatcactatatattttactttatggatgcttgtattgaaaagtcttggctggtggaagggag

SEQ ID NO: 173565 - DNA, 216 bp, Homo sapiens
aattcagacatgcttatcagaaagcaactgattaaagcagacagctattatttagaaccaatacaaaatttctagcctgactctgccctcttaccatataaaagacgtcagtgatcggtatccagggacattttgtatatccagggatctctgaaatttgtattctctgcaagttctgaaccattccttttttttttttttttcttttttgagatg

SEQ ID NO: 173566 - DNA, 150 bp, Homo sapiens
catttaatatgtgccagggattgtactaggtacatgtatgcacacacttactcaaagacacatgtatatatgctcacccagggatacacatgcacagatatttatctctgcaaccaatatttagagtaacaatctactttcatggaaaag

SEQ ID NO: 173567 - DNA, 246 bp, Homo sapiens
tacctgtaactattttgacatttttttcttacagagggttcgaagattttacaacctgaactattctagtgttttgttttgttctttaaaaaggcttgacaatgtagtcctagctacttgggaggctgagatgggaggatctcatgagcccaggagtttgagaccagcctggccaacaacatggtgaaaccccgtccctactaaaaacacaataaattagccaggtctggaccctcggcgtgtgca

SEQ ID NO: 173568 - DNA, 539 bp, Homo sapiens
ttcctgaagttacaaagctgttttctcctgattcaaggcatgaaaccttctcccactaagaaaaggataaaaggaataaaaaattagtggagatagcacagtacccaaatactgcacacctttgcatctccaatagggcctggcacagagccttaaagtagagaaactatggcactgtggaaaagaaaacatggtctaggaatgcagaggtatgggttcaaggagtattctgctgcccactgggcatataatttgggattttaccttttgaattttattttgttcactgataagcaagtctcagaagataaagaaataaaagtgttttgaaatctacaagtttctttgccaatgtaatacaatatatcagaaaattaatggctgaaatacagtctcagaaatgtttcaagtaatcaaataaagtggctctaaaacatgctgatgtatcacaatagcatagcacaatatttgagtgaggaaatcaatgaataaatagacagatgagtgcaaatataatgatttacccacacggctctctt

SEQ ID NO: 173569 - DNA, 517 bp, Homo sapiens
gtaactctatgttgtaacttcttgagaaacttccataactgttttccactactgatatatgagggttctaagggttctaatttctctgcatccttatcaactcttgttattgtctctccttttgattacagctgtcctagtaggtatgagccatgtcttattgtaattttatttgcatttccctaataactaatgctaaacagtgttttttcatgtgcttattggccattttcatttttattttttggagaagtatctattaacatttgtgcccatttgaaaattgggttatttgtctttttattgttatattttaagagttctttatgtattttatatactagacccttattagttatattaattgtgtcttagcctgttcaggcttctcacaaaataccacaaactgggcagcttataaacaatatctgtttatttctcatagctctggaggctcacaagtccaagatcaaggtactggctgatatggggtttggtgagggtactctttctgatt

SEQ ID NO: 173570 - DNA, 245 bp, Homo sapiens
cttgggaggctgaggcaagagaatgacttgaacccgggaaacggaggttggagtgagctgagatcgtgccactgcactgcagcctgggcgacagggcgagactccatctcaaaaaaaaatcagtaatcacattaaacataaatagtctacaaactccaattaaaaggcaaacactatcaaactggataaaagcaagatcccaaacacatgatgcctgggaaaaaaaaccactttaaacataaaga

SEQ ID NO: 173571 - DNA, 941 bp, Homo sapiens
gagatataacttgcacacagaaaaatgcatagttgagggtccaatttgatagattttgatatatacatacacccataaaatcgtcaccccagaccccatcatgagtatgtccatcaccctcactccttgctcacttccattccttcctggctcccatcctcacccccagcagccactgatctgcttcctgtcactccagcttagcttgcattgtctagaattttgtataatggactcatccactatgcactctgtttttggtctggcttgttttactcaacatagttattcccaggtcatcgatgttggcgtatatatccatggctcattccttttccttcctagatagtagtctattgtacgaatatgccacaatttgtttatgtgccgaccttttaacggacacttgtattccttcaaatgagggagtttctactttttgactacttcagatgaagctgctacaagtctttgtatggatatatgctttgttgtctgttgagtaaatatctaggagcggcatagctgggtaacatggtaggtgtatgtttcaacttttcaagaaatgccacccacagtgtaggagagttccagttcccccacatcctcagcaacaattgattatgctgagtgtttttcattttataaattctagtaggcatgcaacaaacatatgaaaaaaagctcaacatcactggtcattagaaaaatgtgaatcaaaaccacaatgagataccatctcacaccagtcagaatggcaattattaaaaagtcaagaagcaacagatgctggcgaagctgtggagaaataggaatgcttttacactgttggtgggagtgcgaattagttcaaccattgtggaagacagtgtggcaattcctcaaagacctagaaccagaaataccgtttgacccagcaattccattactgggtatatact

SEQ ID NO: 173572 - DNA, 449 bp, Homo sapiens
atgatcctctgactgaagttgtgtgcccagcattgagggtggctgctgcaatgtactaaacacactgtcagaagtgtgcaagtgcctgtgagctgacagactcagaggtgtcttttagttccattatctgtgttcacccttgctacagactttatgaagagggttgtgctccatccaccaggatctggatttgtccatctgtccatacaacgagggagcccttgtggagacagatctctccgggagcccagaaatcctgggtcattgccctgctccattctggtgagatctgtgacttcaatcagacaatctctctgagaatcagcttccttgtctgtaaaacaggaacgcttaatactgctctgtttactttatggggttgtttttaggattaaagaagataacgaccatgaaaagactttatacaccataaagtgtcatatgaatgc

SEQ ID NO: 173573 - DNA, 176 bp, Homo sapiens
ccatccccaccccactcgcctcgtcgacgttccgttgagaggtttctaatccctcccctgtgaacccagcggcgggcggatgtgcgtccagggagtgggcaagggtcccagcctggctgcccaggggcatccttgaactcagcagcctgctgtgagggtcagggcttggccgaaca

SEQ ID NO: 173574 - DNA, 1074 bp, Homo sapiens
agagaaattccccaaaactctttgggcccctttatcttcctaagtcacatctcagaaaacttctcactatttgtgaaatcgacagcccacatcacaagtacacccctgtgtcttttccttcttcaacttccccaaccagctgctctctgtagcatcaggatttggattatatcaattcttttgacattgcctcttttggatctttgttttcctaaggggagcccagtttaattgagtgtggatgttagtatcatacaatcagcagccagatggtccagagacagggattttgatacatgtggtctctgtccttcagaaggaagtgattgctgcttctcgctgtgtctgagatgctgtaggtattggcagtattaacaataggcctctcagtgcaaagcaaacgtgacatataatagagcacaatctcatcctgagatgtctttctcctagtatgcatcctccagccagcagagttctggagagaattctgagactgccacagggcatctggttccagttcaaattcgcaaagtgtgtaaatgagtgaactgaggcccagataagactccctcagaaagtaagttactggcagacaccaaaactagaggccagattactaaactctcattatagtgctcagttttacccacattctggatctagataattaaaatagaatgcataatcatttactgtatatctagtatattgtatagtagtgtatacataaatattaaaaattaatataaaaagtacatgaaaatacaaataagttaacataaagaaaagtctcaaagtggttataactgcattgacacatggaaggaaactgcttttacaagagaaaccaggagtcaaaaaagtgatgtgacctggggagagagctgctgtgacatcctcagaatttctatgactatgatagtaacccatgaaattatttgacatgtaagtcttgtgtattgagatatagtgcagttgcctagacttatggaaatactgaatgtggaggagaggatagccaatacccctcttccaagttcatttcaattgtttattcaactaatattaagcttt

SEQ ID NO: 173575 - DNA, 219 bp, Homo sapiens
tcacctagcagtggcacagggagcgtcagccacggccggtcacatgtcagccacggctggtcacaccccactccccgatccatcacctggcagtggcacggggagcatcagccacggccggtcacaccccactcccccagagcccgttcccaatggcggcactcccggagggaagacagccacctggtcagccaccatccccccacaaactgtcagccc

SEQ ID NO: 173576 - DNA, 494 bp, Homo sapiens
agaacaacctggccaacatggggaaaccccatctctactaaaaatacaaaaattagctaggtgtagtggcttatgcctataatcccggccatttgggagactgagacacaagaatcacttgaacctgggaggtggaggttgcagtgagtccaggttgtgcaactgcactccagcctgggtgataaagcgagactgtctccaaaaaaaaaatttagccaggcatcgtgttgtgtgtctgtagtaccagctacttgggaggctgaggtgggagaatcacttgagcccgggatgttgaggctgcagtgagtcacgatcacaccactgtactccagcctggacaacagagcgagaccctgtgtcaaaaaaaaaaaaaaaaaaaaaagcaatattaagaaaacaggtaacccaataaaaaagaggcaagtgacttgaacagacactttaccagaaactgtatagacagcaattgagtgcctcagaagctcagcagtcag

SEQ ID NO: 173577 - DNA, 716 bp, Homo sapiens
gtcatggttatgcaagtgtcttctggcctcttgcatagctgctgtatcatcaaatggttcaataagatattagacaacaaaagaaaagtaaatagtttctaattttcagctaagctaattaccaaaactttcagctgaaccaactatgaggaacagctgttgatttttatttctatagctcaaggaaactatggataaattacccaatgataatctttcctgcgtcctaataaaggaggcccaaatggaagatggttaagggaaaaacctatctaaccttggagcatgcgtacctggtttcgtgtgagccagagctccctaacatcaaaaatcccattctagatctgatggagaataatgttatcagtgtcattgttttgaggatgaataagagcctttaaattgacacacaggttattctttaaatggacacacaggttattttcttatttggcatacagcatataggaaaaggaggcgatgatatgagagttctggcaaacaggaagaggaagtggaaaggctactccttttgtctcagttgagtatgggaaggggaagaataacagagtggccacatgtgtacatcatggcatctgccttacaggccagaatctcagggatagggtggctaaataggttgaggggatgttggaagcaaagggacttctgcctgctttcttgttggaatctcagacacttgcatccacagaata

SEQ ID NO: 173578 - DNA, 260 bp, Homo sapiens
agagtcagtgctacctcaaaaggaagggaaggttactcagtgtccgggtaccagatgcagtgaaagaggtgtgcctcatggccaggaaactcaggtcagcgtcctggaagggatggttcacactcagagctggagtcaaagcagaatccactgggccgtcaaacaaatgcccagcacttgtttctgggcccatttaactctcactagcatgcttatgttttcatgtgcttctagaagtgtcattggacaggatgattttg

SEQ ID NO: 173579 - DNA, 282 bp, Homo sapiens
ctttactgtcctgccaactaacaggataccacagagttctgaagacttgtgttagaaaaaataaagtccacgtcattgtccccctaaagaaaaacccaacactttctttttgaagcaagaattcaaagaaagaccaattcaggcccaaggtgggtaacacctatttgggaacatggggagattcagcacctaaggaaggggtaatgggagccctgatgcaaaagtgtgctcagggtgtcacagatcacaccattcagattgtgatcaccctgggttcaagca

SEQ ID NO: 173580 - DNA, 551 bp, Homo sapiens
gaatgtctagataacagaaaaaaaaagttaccaaaattattccctcaaagggaaagtgtgctgatacttgcaatctaaagtacactgatatagtttagatatttgtcccctccaaatctcatggtgaaatgtgacctctaatgttggaggtgggcctagtgggaggtgtttgggtcatggagatagatcccttgtgaatggcttggtgcccttctcacagtaatgaatgagttcttactcttgagttcacatgagagctggctgtttaaagagcctggcatctctccttgctccctcactcaccatgtgacacaccggctcccactttgccttctgccatgattctaagtttcctgaggcttcacaagaagcagatgctggtaccatgctttctgtacagcatgcagaaccatgaggcaaaataaacctcttttctttttttgagacagggtctcactctgtcacccagggtggagtgtagggcactatctcagctcacagcaacctccacctcccaggctcaagcgatccccccacttcagcctgccaag

SEQ ID NO: 173581 - DNA, 196 bp, Homo sapiens
gtaatggctttccacagtaggtttccaggcttgaatatattcctgggtgaaatatttcagtcccacatcattgtcctggaagtcaatgcaaaatacagtctgcttgcctcatttgtcactctgaatcaaagtcattgccaagccaagcaatagctgcataataataattgcaaacatttatatagtactattccag

SEQ ID NO: 173582 - DNA, 530 bp, Homo sapiens
ggtttctatgatttaaggcagtggttgtgtagtaataaaagactattgtttaaggcaaaagtgttttttaaattaccactcaatgcattttttgagtagtttttgagaaagcattttaagtaacaagagattctacagtaaacatcaggtttttgctttagagttttgcccccagcatctattcattctctctttggttagtaatagcatcccgagtcattttgatggatttatccctccatcaggtgcagacctgggagatccttgtcccatggacctttctccaaaggactctgggtcttgactgggatggtgcaaggacagagacatgattctatttcattttttacaacatgccctgaaaagacagggcagtagttagatagtagatcctgctccctaaaactaccctctatctctctcaatctttattctgagcccagttttctggcctgccactagagtctgtgagcttcctcatgtccttataataaattccttttctgctttaagtgaactgcagtccaatt

SEQ ID NO: 173583 - DNA, 409 bp, Homo sapiens
ctgctctggagtcctattattcatcatcctcatatgactaacaaaagctgagttactgagaatttggcttcagtgcatacagatattctaccatttgataatcgagttgctaactaaatctgcatgaaacaaaacgtccaagtattcattctttaccagacttaaaagggaataaagtgaacgtctaatgaataacaacttctgcagggtctcaggaaaaggtaaaaactgctatctccctctcttctctctgttctaagatttttaataaggccacttctcttgctacatggggagagtgtgcagctgatcagaggccctgaatgttgcctagtcaagttcctccacttcattctgtataggccaaattaaatgttgacagacatcatcatccatcttttaactttac

SEQ ID NO: 173584 - DNA, 416 bp, Homo sapiens
tagcgttctagaggatcccagtgtgcatgtatacatatatacagatcagaatggaccctgaggtggtcagttatagtcagatatgccagcaggaactcatgtttacatgatacatatatacagatcagaatggaccctgaggtggtcggttatagtcagatatgccagcaggaactcgtgtttacatgatacatatatacagatcagaatggaccctgaggaggtcggttacagtcagatatgccagcaggaactcgtgtttacatgatacttatatacagatcggaatgaaccctgaggtggtcagttatagtcagatatgccagtaggaaatcatgtttacatgatacatatatacagatcggaatggaccctgaggtggtcggttacagtcagatatgccagtaggaagtcgt

SEQ ID NO: 173585 - DNA, 188 bp, Homo sapiens
acaactcgttgacatgcgccctgttgaccttcgtaacctctgaccctcacagtgaccttccgaaggtagccttcttcttcctatggaaaacaggcgcagagaggtgaggtgatccgtgcaggtcccccagcagagccaggattccagctcagactctcagaacaagcggtgaacaggaggctgggcaa

SEQ ID NO: 173586 - DNA, 266 bp, Homo sapiens
tcaggagttcaagaccaacctgggcaacagagacttcatctttactaaaaaacaaacaaacaaacaaccaaaacccagctgagtgtggtagtgtgtgcctgtagttctgagaagttgaggtgggaagattgcttgagcccaggagatcaaggctgcagtgagttgtgatcatgctactgcactccagcctgggtaacagagtaagattctgtctcaaaaaacaaaaacaaggccttgtgtggtgggtcacgcctgtaatcccagca

SEQ ID NO: 173587 - DNA, 350 bp, Homo sapiens
ttagcacttcatcctcctcatccttctttgactgggtgttcctggaaagctcaagaggaacataaagatccaacaggagactcctcccccaccgcattccacccaagactctgctcacatcacacttcacttttcaaaaaccttcaccagcggctgggcatggtggctcacgcctgtaatcccagcactttgggaggccaaggagggtggatcatgaggtcaagagatcgagaccatcctgaccaacatggagaaaccctgtctctactaaaaatacaaaacttgctgggtgtggtggtgcatgcctgtaatcccagctactcaggaggctgaggcaggagaattgcttg

SEQ ID NO: 173588 - DNA, 108 bp, Homo sapiens
tagagcaataatgtataaaattaggaaaagcaggcctgaagaagattcacactgtcttcagaggacagcaagggaaaaggctttaagatttttaattaagaaaaagat

SEQ ID NO: 173589 - DNA, 300 bp, Homo sapiens
tgtgaagggcaattcaccagctgtccaccttaacaggtgcaagaacaaagagaaagaagagaaatgatacaatagtgcatagaagttaatatgaaactgaggaaagctaagaaagataggtgggatgctaaaaactgaaaaacagtggggagattccttaaagaactaaaagaagattgaccgtttgatccagcaatcccactcctaggtatctacccagagaaaaagaaggcattatacgaaaaagatacttgcacacacgtttatagcagcacaatttgcaggtgcaaaaatatggaa

SEQ ID NO: 173590 - DNA, 260 bp, Homo sapiens
ctgcagtagtgcaacttttaagtacatattgttggctgtccgtagtccacacagagttacaactccatacttcaacaccatgctgacagttcctaaagaaaactactttaaaaaaaggcataacccggatgttcccttatttgaccaactccacctaagtttagatgtgcagaagggcttagatatatccggagtaagccacaggcaacatgttacttcatcagttttctaaaataaggtttcagggcaatgacagtaag

SEQ ID NO: 173591 - DNA, 385 bp, Homo sapiens
agcctgggtgacagagcaagactccgtctcaaaaaaacaaaacaaacaaacaaaacaaaaaacaaaaaacaaaaacggggacaatgattcctgcagtccaactattgacaatgtctcagtatgagtccaggtgagacgtgtcacctcccaaattgacaaggtcaaaagctaaggcgttagatgacagtcacggtattaaaccttcagggactgtgtagcgcaggtcacagcggcagctcagacttacagggaggctatttggggagtcagacgctgtcacttgttctggctgatgacacacaagcacccctgcaacgctgtcctttgaggcaactctcctttgggggccatcatcctgggggagaaaacgagggcaaagccaagg

SEQ ID NO: 173592 - DNA, 553 bp, Homo sapiens
tctcttggacttagtaaatattctaatatagcatttacatttctttgatgatttttttccacatatatttttacttgtatccttgttagttcctctaggaacttacaatgtactatttttattattatttttttttaagagagagtctcactctgtcacttgggctagaatgcagtggtgtgaccatggctcaccagaccatcaacatcccgggttcaagcaattctcctgtgtagttgggactacaggtgcgtgccacaatgcctggttgatttttgtgttttttagtagagacagggttgcaccatgttggccaggctggtctcgggctcctggcttcaagtgatctgtctgccttggcctctccaagtgctgggattataggtttgagccactgcacccagcaaaaaaccaactttttaaagcagaacttctgaagaaagataaatatgtattaatgttgactatgtgacagatgccatgctgtgtattacatgcttctgttcatttcatactccctagtaatactgataatttttttggatagtcatgg

SEQ ID NO: 173593 - DNA, 400 bp, Homo sapiens
tatttattgattcgttattttagtttctattagtgattttattggttatacacacacatatataaatacattatacatgttatgtattagttatacatacaccaattctttatcaattcattgtattgtgaatatccatttctttggtaggcagaataagggctcccccaaagatgtcctagaacctatgaatatgttacgttatatggaaaagggactttgtatctgtaattaaggtcatgaacactgagatggggaaatcatattgaattgtccaggtgggcccaattaaccacaagtctttaaaagtgaaggccctggccaggcacagtggctcatgcctataatcccagtgctttggaaggccaagggtgaggtgggaggctcacttaaggccagg

SEQ ID NO: 173594 - DNA, 498 bp, Homo sapiens
aacattttaactgtaacatttaaaaacttttttaaaaattcctgaaaatacaattaatttcacgtgtaagttaagaattttaggatccaaacatattttaatactatttttaactaattctttccttcatagtatattgaaaatcagtcttaagcacaagcatagccaatggtaacatgacttgacaacatgttggttgaatgcctacaaccactctgggctctgtctctaatcttccgtgtttgtctacccagtccttccaattacttgtcctcttttgactggtccaagactgacctgtgttaaactgaagccctcattacaataaggcatatttaagcaaaactttttaaaaagtgactttggctctttctacacaatattaaaactatcagctgaaatgtgaactccctggtcaattggtgtcatatagcacacccttcaaacacttttttttcctggtaatttcaaaataaaatggcattctgatgaaaaata

SEQ ID NO: 173595 - DNA, 165 bp, Homo sapiens
cagaaatacaaaaggtcattcaagacgactatgaacacctttacgcacataaactagaaaatgtagaggagacgaataaattcctggaaacatacaaccctcctatattaaaccaggaagatacagaatctctgaacagaccaataacaagcaacaagactgaaa

SEQ ID NO: 173596 - DNA, 328 bp, Homo sapiens
ggactgataataggcacatgtatcagaataacatgatggaggaatatgattcgtcaaaagtttgtcctgcggtaaagaagaaagagaaaatcctcaaatcaagctgcatggactagtttgtggcttcattgaggatttcacatggtcaccttggtctcagtcatttttcaagaggaaaatggggatctttccttatgcagaaaaaagtataaccagtgataaccagtttagattagataatactctgataatacaatgtatacaattgaaatgaggtaggcatttgttgctaagaacaggctagaaaggaggaagaggaggaagtctt

SEQ ID NO: 173597 - DNA, 379 bp, Homo sapiens
gtgtgtgtgtgtgtgtgtgtgtgtgtgtaggggatatgggatatggtctgtttggagacaggttttgattatgattttttatcatcttaaaagatccttcaactttgattcgtgaaagaaattttgtcacgattgcttgctctgcttttttgatctttactcccatgaagtttgggagagtactggttacaagttgggagtgatttcatacttacaaatagggactctgggtatcctctgaaaacgggattctcggcagtgggggaaacaagctctttaatggttaatgctgatagctgttgggtaagtttgtgaaactttgggtaagcggaaaggggccttctgtgattgggccaagatcccagaactctgagaggtt

SEQ ID NO: 173598 - DNA, 858 bp, Homo sapiens
cagctcagggcttttgtttttttgcctgtctggaatgtttgtctagctcattatggctgcccttttttcagctcagtgttcaacttgcatatttttttagagatggcttcctggatactgtagcaccccttctagtttgtttccttcatatcatcaagtttcatttcctttttaacatccttgtcactctctgaaatgatacttgttttcttgcttattttctgtcttctcacattaggatataatggtagaagccttgttggtctttttcattgccatatttccagaatctagaatagtacttggtaaagattggccattcagtaaatatttgttaagtaaatgaataaagataaccaaattacttttccaaaatgatataccagtgacttgggagactggattagttctggtgggaatggtttggttcccaagagagcaggtggttgtaaagcaaggatgccttttgtgtttggcctctttgtactgtctgcctcccctttgatcttctgccatgttaagacacagcaggaaagcccttaccagaagccgagcagatgacagtgccatgccccttgaaattcccagcctccatacctgtgagctaaataaactctttttctttatcagctacccaccctcaggtattttgttatagcaacaccgaatgaattaagatggcattattctcaattttgggcaaaatatttagctaggcttcaacaggtgacctggcagggtggaaagaagactttgattctagttctagccctgccagcaataagcttggtaatctaggtgaagacattgtctcagatttccagattttttatttgtaaaatgaaataattattgtcc

SEQ ID NO: 173599 - DNA, 336 bp, Homo sapiens
tatgcaaggcagtaggagaaataggatctccattcatctgaggtgaactatttagttatgtcccaagtgtacaagggatgtgaaaagtaaatggccatacattcacttacccagctattaagagtaagaaactattaactggggctacatactaatagcagcagttctctaaatttttgacaacattaaatcagcccttttcttctatacagacctctttctaaaagctagtttctttagagagtacaattgaatttctttttttcttttttttttttttgagacggagcctcgctcttgtcacccaggctggagtgcagtggcacaatctcggct

SEQ ID NO: 173600 - DNA, 491 bp, Homo sapiens
agtccccttgcaaaaatcacagttttcatatttttgcattgtatctccaagctaatttcaggcatcccaaccaaaacgtacatcaagagattatataattaaaattaggcaatcctttgtctcttttcagtgtaacagatttatcttaccacaaatatcaaaaagttattccaatcttggtaggatattgccatactaaagtttaaggtttttgaatctgacacctgacagatgagaaaagtgattagctgatcgtgctttctgagttttgaactgcagaaaacttccgataaaattgtaaggacatcaaatagtaacagtaatactctcttgtttagttgtaaaatgttctctggaaaatattggagaacgccatttaagactggagaatatgttgcaactattttattaataatatcctgagtattcttttagtgattagaatctagtcaatgtatacatttctattgaaaaggggttaattttcatac

SEQ ID NO: 173601 - DNA, 387 bp, Homo sapiens
tctattactgtagttacagaaatatctttacaaataatgcagtgcagaacaataagacaaatgatgccaagaataaagggcccctccttgaaaccagagggcctctgcaggcccaaagaggacagaaggcaattaggacttaggtgttggggggaatggagagaggttttcttattttccttttctgccattgctaattttttttaatgtgtatgcctgagggtgagaatcaggagatttatgcattaggtggatgccctcctttgcaaaatggacaaaagagtcagcttgcggagcagattagatggaagaggccaaagagcccaggggcttcaagctccaaccaaatgggaaagcaatgagtgggcgagggtcagggcaaattca

SEQ ID NO: 173602 - DNA, 274 bp, Homo sapiens
attgaagactcacttaacgaggaagtcatggtacaaatacttggtagcctcatgacagaatgtattggaaatacaagagaacacttcttcaaggcaatgccatctgcataaagactatggatgtggaaagtgtatgattcttactgagatttatagacaagcagctttctcccaagacagttcttcaggccctttcacactgaagcatgtgagcctgaagtgtttcagagttacgtttcattatgatcctcgtatgctataggagctttggccc

SEQ ID NO: 173603 - DNA, 189 bp, Homo sapiens
aaatctccatattgaatagggaggtcctgattgccaacattatttattttggatttggggattccatgattcagtagccatagtcacattgccttttgcctatggttgctggacttgctgtcctattctcaagaaaacaacatattctttttgcttttagaagagtgaggagaaatcaggatatcattt

SEQ ID NO: 173604 - DNA, 463 bp, Homo sapiens
tcacattggtggcccagaaatcagtctcagcccctcccagtatggaccgctccttgacagccgccctctttcttataaaggcagatgcaagctacgtttgtgtggggatgacacagcacaaaggcccttgccagatgtgagccccttgatattggatttcccagtcttcagaactgttggttaaattcctgagagatggatctttcagtctcctgctttcacagtatatgcctggctgtttgcatcctgagaaccaagcagagcaaggctggagaaacagcattcatgatgtgaactgctaatgaatttttctgcctgtattaggaaatcctcagcctcaaatgtacttagtcttctagtaaagagattgtcaaatttccttctccagagaagccactttagtattcttgcagaatagggaaggggatgggacccaacttcttaagtaaactttcaaccaatc

SEQ ID NO: 173605 - DNA, 348 bp, Homo sapiens
  misc_feature (215)..(215): n is a, c, g, or t
gtgtcactgtactggtacattacaaatttcagggaacagaaatccttaatgaaggcaacaacttcagttactgtattaagactaactcttaatagatttctcagactaaataatgataatatgaacacacctgagattactgtgtctgctttccattaatgcaaacaccattctcataaccattaagagaaacctgtattagcatttgaacaacntgtgatattgatatgaaaagatccctgctaaatttcttttctctcattaggacatctaattgaaccttttttttttttttttttttgggaaacaaggttcccctcgtggtggcccgggcgggacggtggaccc

SEQ ID NO: 173606 - DNA, 383 bp, Homo sapiens
atgatgcacatacagctccactacattatggcaatgctaaaaataacctgagaatgaaggagctttatttcttcatttccaatgacccatgagcctcctaaaatgcacagggaaagatgtctacccccaccacaagcacctgttcatgaggtcacctctgttcaaaataccgaagtcaatgaaatgtcagtggcaggaagttctggaatatacagattacacgagcccatttccctgcagtaccagagcagcaccacgaattcgccgagcagcagcacgaaatcgccgagcagcaccaggaattcgccgagcagcaccacagcagcaccacgaatacgccgagcagcaccacgaattcgccgagaagcatcacgaattcgccg

SEQ ID NO: 173607 - DNA, 517 bp, Homo sapiens
gtacttcttgatgctgccacgtgaagaaggacatgtttgcttccccttccaccatgatcctaaggcctccccagccatacagaacttccccaaactacaaacacaaaggaagctcccatggaatcggatgatggcactgtacgaatcaagatgcagctagcaataaaaacagaagacaccaacaccagcagtccagagacctccagtataacataaagtgttcatagtatcctgaggattccagtcacacaggctcaaacctgaggatcaccccggatccttcctctccgttgtccggaaaaatcctacctcctatcctttctaaccctccatcccactgtcactcctctaattcagaaatttctctcctttcttcccccatgcaccccaatctcatatagtggtgtgatatgatttggctctgtgtccccaaccaaagctcatcttgtagttcccataatccccatgtgttatgggagggacctggtgggagatgattgaatcatgagggtgggtc

SEQ ID NO: 173608 - DNA, 797 bp, Homo sapiens
ggacacgtacagcttagagcctagtcatgaaatgggaaataaacagccccatcctcaaggtctgaacaggggattggggagcacagagaagggccccaccccgaccagctgtcaagagaactatccatacattctaattcctccaaggttgagggctaaggtgtaggaagaggagagaggttccaagcagaaggaattgcagaagcaaaggcacagaggcatccgggacctgcgagcagctatggctggagccgcgtgtcgcaggatggagagcgtgtgaacagaggggactggaagcggatcctcccaggaagcagttgcaggcggtcatgctacatttgcagggagacgggaggttgtgaagaacaataaccagaagagagtttgcgtcttcatcagaaagcacctggggcaggtagagttggtgctagcttctccatccatccctgacaccccagccccattcatcattcagcagaagacaggctgggctggcccaacttggtcctgtacccccaccacccagaaccccactggtccatagtgaggatcccttctctttgactctcctccttctctgtgactcgcctaagcctgatcctacaccttctctcccagcactgcctcagttcctccacccccagttgggacgagccacctccctggctgggtagcatgggacaagccatctccctgcagaggcagagaaccagtgacactacacgcaaaccaaggccatgctgcaaacagaacaccaaggcaccctcgtcttaggatgcattatattcggggtagat

SEQ ID NO: 173609 - DNA, 723 bp, Homo sapiens
  misc_feature (610)..(610): n is a, c, g, or t
  misc_feature (618)..(618): n is a, c, g, or t
  misc_feature (631)..(631): n is a, c, g, or t
cacgtctcgcgagattttggcttcctcttagccaggtggcgggaccgtttgctgtgccgatttagctgccgccgcgcctggagtcctgaggaacttggctaggctggccccgagcggaaccagagaatgctgaggctctaaccatggaatattcggaatgtcccattctatgaaggaggtttgctggctgcaacaggaatattcatgaacatggaggggttggtcatgttccaggatctgtctatagacttctctcaggaggaatgggagtgcctggacgctgctcagaaggacttatacagagatgtaatgatggagaactacagcagcctggtctcactaggtctctctatcccaaagcctgatgtgatttccttactggagcaagggaaagagccctggatggtttcaagggacgtgctgggaggatggtgccgagtagagttggagtcttgctttgttacccaggctggtcttgaattcctgtcttcaagcaatcttcccaccttatgaatataaagaatggcccaccttgtcctctcaaagtgctgggattacaatcatgagccactgcactccagcctgggcaacagagctagactctgtgtcnaaaataantgactagataaanaaaaaattgtttgagtactttccccgatttaggagattggacggggtccttctattgcgttcaagaaactggaggttaggaaaatccttagc

SEQ ID NO: 173610 - DNA, 211 bp, Homo sapiens
ctacatgctgcatgtttccatttgtatgaaatgtccagaagaggcaaataaagacagaaagtagactagtagttgcctagggctgggagggagttaggaggaatggagagtaattgataatgggtaaagggtttcttctgatgtataaaaatattctagaattgactgtggtgatggttactcctatctactaaaattactgaattgtgta

SEQ ID NO: 173611 - DNA, 486 bp, Homo sapiens
ctgaggttcctgctcagctctttcccagaatcatgtgacaatgaacaacaccacttaaccctttgcttcgtagtgtagtagctggttattattacccttattattattattcattattttgaaaaagtacttcatcctctttctacatcttggctttggagatggtttggtggcctctccttgccttccaatcactacttcttggaccctttttgtggctgttactgctaacactcttacataaatgcatatgtagaaatatatttccaaatagtacacacaaagcaaatgcatatatcgtaatactgtacagatggtgaaagcaatggggttcttgacactttcataccatttcatagttcattccaaaagccagcaggctggccaatcatccccttcaccaatcccagagtctctgatgctcagccatcatcaacacaagaagcccccaaatggcatcactgtttttcccatttactaaatggt

SEQ ID NO: 173612 - DNA, 506 bp, Homo sapiens
tttgttggggatacttatctcgggtgagcaattgatggggctccgcattagaaaggcaatatatggctcaaggagaaatcctgggctttggagtctgatagagctgtactcaaattctaacttttccaatcattatgactttcagtaagttgtcactatgtaattgagtttttactaaatgtaaaacaaagaattacggcacagtcaacgtagattaacctgccctaggtcacatagtcactaagggtgaatatatatccaggtctgcctaattgctaagcctgtgcctacttcctggtggatgttccatacataatagttccttttaacattttccttttatttatttttaattttttactttttattatagtttaagttctggggtgcatgtgcagaatgtgcagttttgttacataggtgtacaagtgccatggtggtttgctgcacccatcaacccgtcgtctacattaggcatttctcctagtgctgttcctcccctagcc

SEQ ID NO: 173613 - DNA, 2687 bp, Homo sapiens
  misc_feature (1228)..(1228): n is a, c, g, or t
  misc_feature (1697)..(1697): n is a, c, g, or t
  misc_feature (1735)..(1735): n is a, c, g, or t
  misc_feature (2371)..(2371): n is a, c, g, or t
  misc_feature (2376)..(2376): n is a, c, g, or t
  misc_feature (2415)..(2415): n is a, c, g, or t
  misc_feature (2496)..(2496): n is a, c, g, or t
  misc_feature (2498)..(2498): n is a, c, g, or t
gggaacagagcttgtcatgaagcgggaggggagggtatgcgtcagaaaagaaatgacaggtttgaaatctgcagaagctcgtctttcctctccgcctctcctccccagccggccccgcccccacctggcttcctaaataaagaccttcctctgcatggagaccgcctcactcaaactcaccccctcgtgcatatgcagagtctcaaaagacacggccccgcccccgccacagcgagggtctgaatgggaggtttggaggagagcatctgtgtcccagacccggcggtggggggcccagggtgctgggcacatcttctggaacccgggctcgccgaggcaggcgagagctgtcccctcgcctctgttggggatgcctgccaaggttagccatgggcgaggccagggacagcgcctgggtggtgccaaggggactgtgagtcacctgtggataggagggctgagtgaggaggggacacgggccctgggcctcaagggcaccatctgaagatcccataaggatgaggacaggggaggccagagggcagaaattcaaggcaacggaacagctctagatgggggatgcccctggcatggggtgggtggaggccagggacgctgctcggctccccgcagtgcccaggacagccccaccccagagaatgatccggccccaatgcccacagtgccgagggggagaccctacattcatctggaaaaaaatagacttcgatcccttctcactccagacaccaggataaactcctgatggggaagacggtataaaccaggggggccccccagctcctgggattctcctcctccctccgccccactcaggatgtggatttcaatgtgtgcagcctcctgggacctcagcagggccgaggatcatgggactcagatcgatccctcatctgccctgctgcggaatttcccagctctgtgtttgtctgttgcaaatccccaggtttgggagctgagggtctggctgtttgtgtccttgggcgctgcttggagatactgggctataaaatctatcagccttttcagaattacaagcaaaaataacaaccagcaccttaataaccctagaagatgcatgccttcgacactgtgggtgaggcctggtttttgttttcagtttctattatttattttattttattttgatttatttatttgagtcagagtcttgctctgttgcccgggctggagtgcagtggtgtgntctcggttcactgcagcctctgccttctgggctcacgtgatccctggagccaccatgcccagcaaatttttaaattttttgtagagatagggtcttgctatgttgcccaggctggttgcaaacttctggcctagggtcttgctatgttgcccaggctggttgcaaacttctggccttcagcaatcctcccacctcaacctcccaaagcactaggattacaggcatgagcccttgtgcccagcccatagtacaatatctttagctggttcacaggctacagtgacatctctcagtgtttccaacacagctgaaactatgtatcctctgacccccatctcccccttcctttccctcctctaccactaaccgctcttctgctttctgtttctatgtatttgggaggttttgattgtgtgtttgttttgagatggagtctcgctctgttccccaggctggagtgcaggtggcncgatcccagctcactgcaacctctgcctctcgggttcnagcgattctcctgcctcagcctcctgagtagctgggattacaggcatgcaccaccacgcccggctaattttatatttttagtagagacgggctttcaccatgttagccaggctggtcttgaactcccaacctcaggtgatttacccgcctcggcctcccaaagcgctgggattacaggcatgagccaccgtgcctggctgtatttggggttctttgcttgttttgtttttggactccacaatacgtgggattacgcagtgtttttctctctcagcgtctggcctatttcacttggcatcgtattctccaggttctacaagggggaattttatggcatgcgaatattttaattttttttttttgagacggagtctcgcttagccgtccaggctagagtgcagtagtgcgatcttggctcactgcaaccactgtctcccgggttcaagcgattctcccatctcagcctcccgagtagctggcattacaggcgcctgccaccagacctggctaatttttgtatttttagtacagacggggtttcactgtgttgcccaggctggtcttgaactcctgactcatgcgtgtcatcccagcactttgggaggccgaagcaggtggattgcctgagcccagganttcangaccagcctggccaatatggcataacaccatctctacanaaactacaaaaattagctgggcgtggtgatgggcacctgtaatcccagctacttgggaggttgaggcaggagaatctcttnancctgagaggtggaggttgcaatgagctgagatggcaccactgcactccagcctgggtgacagagtgagactgtcttaaaaaaaaaagagagagagagagagagagaaagggagagagaaaagaaagagaaagaagaaagaaggaaagagagagacaaaggaagacagaaagagagtaagagagagaaag

SEQ ID NO: 173614 - DNA, 661 bp, Homo sapiens
  misc_feature (24)..(24): n is a, c, g, or t
tgcaacctctgcctctcgggttcnagcgattctcctgcctcagcctcctgagtagctgggattacaggcatgcaccaccacgcccggctaattttatatttttagtagagacgggctttcaccatgttagccaggctggtcttgaactcccaacctcaggtgatttacccgcctcggcctcccaaagcgctgggattacaggcatgagccaccgtgcctggctgtatttggggttctttgcttgttttgtttttggactccacaatacgtgggattacgcagtgtttttctctctcagcgtctggcctatttcacttggcatcgtattctccaggttctacaagggggaattttatggcatgcgaatattttaattttttttttttgagacggagtctcgcttagccgtccaggctagagtgcagtagtgcgatcttggctcactgcaaccactgtctcccgggttcaagcgattctcccatctcagcctcccgagtagctggcattacaggcgcctgccaccagacctggctaatttttgtatttttagtacagacggggtttcactgtgttgcccaggctggtcttgaactcctgacctcaggtgatctgcctgccttggcctcccaaagtgctgggataacaggcatgagccactgca

SEQ ID NO: 173615 - DNA, 596 bp, Homo sapiens
gattccgcttatatatacaattctagaaaatgtaaaataatctacagtgacagaaatgagatcaatggttggaagggagggagggaaagattacaaagggccacaagaaactttgggggaagataaatatgtctcctctcttgataaggataagcttcatgggtgatacataaaattaaaacttatcaaaagtatcactttaaatatgtacagttaactgtatgtcaattatacctcaataacaaaaaagaatccaagatgccaaaactaattctacagttcctgttagatctatctgctcataaatatatttaacctaccgacttgcagtatgcactctgagaatacaaaattatgcctaaattgaggatcaccattatcacaaaaaacatcaaagtttaaacaatgaggaaattagaattcatctttaatcactatgccaggctatttcagtgccaaaacgataccaactaaaacacaacacaacaaaacaagagcccgctgagtgtagggctctgagatttttaattaaatattttaattcaaatgtttaccttctttgatctagaatcccatttcgggaaaacagaaataac

SEQ ID NO: 173616 - DNA, 543 bp, Homo sapiens
ctcaggttacaaaatcaatgtacacaaatgagcagcactgctatataccaacaatggccaagctgagaaattaagcactcaatctcttttataatagctacaaaaattttaaatacctaggaagatacttaagcaaggaggtaaaagatctctacaaggagaaatacaaaacactactaaaagaaatcgtggaagacacaaacaaatggaaaaccatcccatgctcatgaattgaatgactcattatcatgaaaatgaccatagtgcccaaagcaatctacagagtcaatgtacttcctatcaaaatatcaatgtcgtttttcacagaattagaaaaaacatttctaaaattcatatggaaccaaaaagagtccaaatggccaaagtaattctaagcaaaaagatcaaatctgaaggcatcacattaccggacttcaaattatactacaaggctatagtaaccaaaacagcataatactgctataaaagtagacacattgaccaatggaaccgaagagagaaccgagaaataaaacctaatat

SEQ ID NO: 173617 - DNA, 622 bp, Homo sapiens
acagaggactcgctgggatgcggctattcgctaactgtatatctcctttagtaaagtggatgtctaaatctatagaccatttaatagagttatttgtccttttatttattcatttattttaggagatggtgtctcactccctcttcacccaggctggagtgcagtggtacgatctcggctcactgcagcctccgcctcctgagttcaagtgattctcctgcttcagcctcccgagtagctaggattacaggcatgtgccaccatgcctggctaagttttctatttttagtagaaatggggcttcaccacattggccagtctggtctcaaactcattacctcaagtgatccacccgcctcggcctcccaaagtgctgggattacaggcgtgaaccaccattcctggccaggaaatgactttttagtgggaatatttgaggttcctggcttcagagtgacaatagctctttaattagtaagagttttttttttataaaaggctcatatattcccttaaatttgctgtcttacgtgcaaacattaaagaaatggctttcagaccttctttgtcactttgaacccattgtttctttaacatcaaggagagtactcttcagtactga

SEQ ID NO: 173618 - DNA, 526 bp, Homo sapiens
tttttgtacagacatggtctcactatgttgcccagactggtcttgaactcctagcctcaagcaatcctaggtgtgagccatggcacatggccacaagttttaccaggatcccacagtgaaaactggagaaccccctgccccgtgattctggcaaaggggaggaggaaagtagccactttgaaatacatccattgcattctgttctcactctgttgcccaggctggagtgcaattcattgcaaccaggctggattacagctcactgcaacctcaacctcctgggctcaggctgaggcaccagaatcgcttgaacttgggagacacaggttgcagtgagctgatattgagccactgcattccagcctgagcaacaaagcaagacattgtctcaaaaaacaaaaaaaacccactgtaacagaaatgatgaatgtctgtgatgggctcatcaatagactggacatggccaaagaacatggtgcgcttgaagaaatgtcaacagaaatttccaaagctgaaatgcaatgag

SEQ ID NO: 173619 - DNA, 563 bp, Homo sapiens
gccagttacatcactctgcctcaattttcctcatttgtaacatgggcctaatgatgctttctcacgggcaggctgggaggctagtgacaatgtggaggggagcatgacctgtgagatcagcctgccccctctctgcaaagaaaccagaagattggcctcttgaggacaggagtggccaaagaaagaggctggaatttcgtcatctggtttcctcccagatccagctgtagggataggataccagtgggcccagtgcagctcctgaaggaggaagccagtacccaaggaagactggccccagggctgtctgaccccagatttggcacttattcccaggagcagccaggataggggccgcaaggaagaggtagctgtgctttagatcagagccaggctgccctggatcatcacaagctgggactagatcagagcaggcagccctgttgagaagagggctggaaaccgaacctggttctgtggcctagggacagagccaggtggggcaggaaggagggaaggggtcccaatgaggtgggttgaaataaaccagaattaacattcag

SEQ ID NO: 173620 - DNA, 155 bp, Homo sapiens
gggctctagactaagtgcccagctgcctcctggctgtcaggcacatttgcacctttgcctgtgctgtgatgtaggctcagccaagcatgccttccaccctcctcccctcctattaaaatcgtgttcacacagttaggacctttctaatgcctctt

SEQ ID NO: 173621 - DNA, 511 bp, Homo sapiens
catagaggaccccagggcagataacaacagtgtcttaaggaggtctattagaactttagctaaaatacttttatttttaaatgcaaccaaaaattataggccataaaccaatctcatgctgattgtagtatgtgtgtgtaatacattgaaatgtgagagaaacccaacaaattaatcaggaaataaggaatgaacatacattaggtgccatttatgtgctagtaactattagataccttttattcagtaactcattaaatcctcgtaacaactaccaagactagcctaccaaatctagatgaaaaaactaaggttcaatttccaacatcacaaagctgggtaagagaaaaattccatgcccttttcactgtataactagtacctccctaaataaaataatttaagaccttaaaagttcaaaatacacttttttttttctgtaaccaactaccatttcttttctttctttttttttttttttttcaacagaaattactgtaactgttgaatt

SEQ ID NO: 173622 - DNA, 154 bp, Homo sapiens
tatgctggatattaagcctgctatggtgtgaatgctgatgtccccccaaaattcatgttgaagtgctaacccccaaggtgacggtaataagaggtggggcctttgggagatgactagtggaaagggcagaaccctcatgaatggaatcagtacc

SEQ ID NO: 173623 - DNA, 310 bp, Homo sapiens
gcacttttctccctgtgggagcattaggagcaaggttgatattcagtggacaagttcagtggttgaaatgtcgaagttctccactgtgagattggacgtagcttcagcccatgctcccgagtcccctccttcccaccttctaatactgctattccaagccccgcttgatccagcaaagaaagtgttaacaattggcaccctcaccaccaccccacccaagcccaacatctgttctgacttatcagtatccaggcaatacctggggttaaatattttgaaacgacacccttctttctatcaggtttaatcc

SEQ ID NO: 173624 - DNA, 331 bp, Homo sapiens
ctagtgaaattccaacctagtctttagaagtttcactagcatcttacttgttaatgtaaacaaaagcatccatcaatgtgtatgtcagaatcacacttggagaagtcggctgctaagcatttaccaggagcacacaccactgggcttccatgtgggattcctcgtttagtccaactccttttgcttctcaaaaccaattttcgtctcaggacacttctcccatcagcctatgcattttcttcttgccatcgttcacaaaggattaggtcttatactttaggatgtttccctcaactctgagacagacgtttgctaaggcacttctgacatt

SEQ ID NO: 173625 - DNA, 205 bp, Homo sapiens
atgtgctgccgcacacatgcttgcccacctccacgtgtgacacggcccgtgtaccactccctgttcacacgcacctccacgtgcttcctgcttctgccagacattaaatcttggtgcatattattacaaaaaaaggatcactagatcaagaggaaggaacatgcatttgctagcataccatgtgttccaagatggcgtcaattgc

SEQ ID NO: 173626 - DNA, 266 bp, Homo sapiens
aaggaggccatgaagtgctgagtcttcagagtgcttaaaatcagtttcagtgtcagtgtgaatcccacactctataattacttggtcaagcttcttggctgtcttgggtctttactggttcctcagtaaactagggagccaaacttaatgattatttaaggtctctaaaattcatgtctctaagctgactgatgagggaaatgccagggattccttactacagttcaaacataagtgcattataatatttcatgaatttcaagtaa

SEQ ID NO: 173627 - DNA, 218 bp, Homo sapiens
aaaaaatctccaggtggtgtctctgcatccaccctcaccacccaggatctggtttattccgaaataccagttttaacaggatcaatgtgagtgctaagcagatcatgtctctcctctactcaagacactccagcagcttcccaactctgttctaataaaatccaaacttgtacagcactctacatgatctgtccaacccccagagctaggagctaatc

SEQ ID NO: 173628 - DNA, 535 bp, Homo sapiens
gtgttgggcattccgcttgcttctctgctccacgcgacaggtgcctaattttagcttagcttttcccagttaggtgtccttggcagtaagcttgttacctactgagcagctggctgttgtatgctctctgtaacctagtattgtgaatatgatgctcaaaatgatcctgcaaagctctaagttacacatggccactatgatggcaaagcggttttaaacatctgcacgtttctgaggtgaacacagcttttcagaagataagcattattagagagacagccttccccaaaaatgtatttaaatctcaacttgtagaagcaaaagaggcaggcaacaactgcccagatgtgggagttacaaaatgacatcacccacagatgggacttgacttggaaggcagtgttaaaatcctctaggatctgagcacctctgggtgaggtctgagtactgctcaggtcccatgggcgtggttaggcccgaggctcacacacttttacagaaaaagcgtctggacctttctgaggtcctgagagca

SEQ ID NO: 173629 - DNA, 116 bp, Homo sapiens
tagtttttggatcctcaacttcctcccagcctccaccctcgagtaagccttggtgtctcttggtcccctctgtgtccacatgtacttagtgtttagctcccacttggaagttagaa

SEQ ID NO: 173630 - DNA, 328 bp, Homo sapiens
ccttccaattttccagaaacatgggtttttttatggcttcattttcctgtctttctgcctaaagagcagaggggctcgtggccctgaaacaggctccttccctgcctgactccatctgcaggaaggagaagcacagcacactcagctcaaagggaggtgcctcctcccttgaagaagcccatccagaggttcacagggagcagatgagagaagagttcttcctgctccctgggccaaggggaatgtggacctgtcccctgcttgtgacattttccccaacctgtcaaatgcaagagtagcaaatttggaagagtagaagaaggcagtt

SEQ ID NO: 173631 - DNA, 314 bp, Homo sapiens
agttgcaactgcctaaacagaacagcttacaagaggacacagagtctagtgggccgaagggttaggtatgcaggcctctgcattgcacataataaaattccagacttccagaaggacaaaatgtacattggtgcaaaaagtttcttttctgtcttttttttttttttttttaaatttaaatatagagataaggtcttactgggttgcctaggctggtcacaaactccagggctaaagcaatctgcctacctaagcatccaaaagtcctggaattacaggcatgagccaccatgcccagtctgtgcaaacagttt

SEQ ID NO: 173632 - DNA, 604 bp, Homo sapiens
cgtcgtatacgacgtacgcgatgggagcatttgaatttccttattgacgtacttattttcctgttttggacatttcatataaatggaaccatgtctttggtgatctctgcatctgctctcaccgggcagaacattctcaaggcacatccatgtgtgccatgtgtcagtgctttacccctttttacggcccagtaatagtccactgtatggatgaaccgtattctgtttacccgtttgtcagctgatgggcctttgagtcatttccatcttttagctattaggaataatgctgttgtgagaatttgtgtgcaagtttttgggtaaatatgtttgctgggtccaaaggtaattaaccttttgaggaactgctaaacttttccaaagtggctgcaccattttatcttcccattggcaatgcatgaggactgattcctccacatcctcaccaaccctgcggttcctggtttgattcccgccgtactcgcgggtgtgcgcggcagcctgtggctatgctttgcccttccttgatgactagtgatgctggccatctttgcacgaaccaatggcccatttgcttgctgccagtccctggagagatgtccaa

SEQ ID NO: 173633 - DNA, 400 bp, Homo sapiens
  misc_feature (375)..(375): n is a, c, g, or t
ttgtaacagctttactgggatatcacccacataacttacattcaaaggttttattatattcgtaaagttgtatgaccatcgccacaatcaatttctgaagattttcattattctaaaaagaaactccacatccctcagctgccactcctggttcctcccagccctggcgatcactcacccaccttctgtctctagattttcctgttttggacatttcatataaatggaaccatgtctttggtagctgttgtaatgggtaacagattgtttctaatagatgagaacataaatttaatagttttcatccttttttaaagtgtgtgcaacaattaatatgcctgccttatttgaggacatgataaaatgtacccccanaaatgacttcgaactgtctaatgcc

SEQ ID NO: 173634 - DNA, 435 bp, Homo sapiens
agggagagcatggacgatagtgggtaacataaggggaaccggcaagatggaaaagggccaggaaacaaaagaattcaaggaaaaacagaaacagaagttaaactttgtgttccaaccccaaagacctctagaaagctgtgggatgtgatggagctacacgttctatgcggcatatgagaatcataccaattttctgtcttttagacaaaagaataaatgtgaaataggaaaaagggagggaaatgagatgggaggagggcatcaccccctttaatgctgtaccaaattactatacaaactgaattgttgtaattagaattatggacagtgtcttatcatttgtatgttaccagaaacctgtgctatgacttttaactagaaaaacaacaagggatgatggatctttctttggtcacattagcctctgtaagttac

SEQ ID NO: 173635 - DNA, 1084 bp, Homo sapiens
  misc_feature (900)..(900): n is a, c, g, or t
gagacacacgagtagaatagggggacaaaaacatcttcttttaacaagatgggtgataaaggaaaacacaattaaacatgaggatagggtgttttctgtgttaaagaaatatatatctccaaatataaaatagaggaacaagaggtgagagcagaggaatggttgtggccaaaagttttaaaaccacccgggaaaaaaaaaaaacccgtgttaccaaaaaaaaaaaaaaaaaaaaaaaagattagaaaattagccgggtgtagcggtgcatgccccgttgcccttgctactcagggaagctgaggcaggaggctctcgtgagccaaagagtttgaggctgcagtaagctatgatcacatccctgcactccggcctgggcaacaaagcgagatcccgcctaaaaataataaccagtaattctattataaacatacaaccaaaaacttcacggtttaatacttttgcacagaggaccaatgaagggttctatagaaaattaggttttttataaagtgtgctgatttaaatattattttcaaacaacttttttttttttttttttttccccaaactttttttcctttgatggctaacccaatcttcatttaaccttttagatgctgggaccagatcactgtaattaaaccacatttccttttttaaatcccccaaatgttttaacccccaggtatatacagaaccctctgcgtagggaccttcaaaatggcgggatacctcttatttacaaatcttttcccttttagggtcctttttacccccaaaaaaagaaccccaggggtcaacatggggggcactataacatctccttcttttccccatgtgggtcttgtatagggaaacactttcaaacactctggagaaatgggtcggtctctccgngtggtcaacaagggaaaatattcctctgcagaagttaatttcgggaccccaagggtctgagagcgcagggatttcgctttgaagcgccaagatgttctttaagaccacggtcggggacaaccgcaaggaaaatcctcgtggggttcccaaacaataaagcacagacacgacacaaaaaaaccct

SEQ ID NO: 173636 - DNA, 154 bp, Homo sapiens
tacaaaagtcctgcattataaaatagggtagaataaatcagtgtaatcaataaaactatacaacaatacaaattacatatcttctgagcgggcagtttattctctctctttgcagtcatgactacaacatgctcactaaaaacaactaaaactg

SEQ ID NO: 173637 - DNA, 656 bp, Homo sapiens
tacatctccgccttacaatcacagcttgttagatctggcagtgagttctcagttctgcatcataaggcggagcccccgggctgacatgctgctctatgtacccatttcattacagacaaactatccagtgcaccaccaactcctgggacctaggacatgcacacagctgtgagccacactccagaggagtcagccatcagcccagtgaagagcaaggccagtcgacaggaggggtggcgcgtgctgaagacaagggaggcggtcctgcatgcccatcacaggggcatggcccaggcagccaccatacatgccagaagggctgaaacatctgctctctgccctgtcttgagtgaggaaatatgaaaaagaaaaaccaccagaaaccttgcctgttttgagctcaaattttccttatctatcaggaaggcagcacttccggtaacagccacagctgaggtttccagccctgcttggctccagcctcaagtgggagaactatgtgaggtatgaggtccccgcagggcagaggcaatggaacagagggagcagtggcaccccagtgagggaagccagaagtcttccgtgctgaacatttttccacctacaatcacagcttgttagatctggcagtgagttctcagttctgcatcataagg

SEQ ID NO: 173638 - DNA, 626 bp, Homo sapiens
tgaagaagtggctgcagctattgttttacactttttaaaatgaaggtggtagctgccaatgtaaaatcaactgtgggccagataaatagacccacatattttggacagtttcctgcattgtcttggtgatctgacagccccaggctcaaagaaccctgttcatttaacaaatattgactggactcctgttatatgccagggcctgtcctaggccctgggaacatgacattgagcaacagcatggcccctgtccttagagaacgaacattccagtgtgtgtgttgttaggggaagctgtcctgaccttaccatatattagctatgtcatcgtgggtaagtcactagatctattttaaccaacattattattgctgtttataaagaggatatagcatacagcagcctcatctttctgcagtaggattcagatgagatcgtctaggtgagtccagacttagctatgattgggtatgggtgcccaggtagaatgaatacttgaagggaagccatgatgggtccctaaggattcatggagttatttgcatatcttctccaatgtcaagggcaggtaagtctcagctgggcacaccagggagagaagcagctgcctcaggaatctgtgtctg

SEQ ID NO: 173639 - DNA, 175 bp, Homo sapiens
aaacttaacaaaattagcgggctgcttttgttgagggaaatttctaactgaataaacctaattaatgaatgatcagaaataaaatttttatcattaacagtaacttgcagaataattagaaaaataggtgttcaatgtaaaataattattatccacaagtgcgtccctgctgttg

SEQ ID NO: 173640 - DNA, 125 bp, Homo sapiens
aatgtcaggagatctggaaaagccctgtgagaaaacagatagtatccttaatcctctgacctatttacttaaaagaataaactagatgtaggcatctaacaacttcagggaagttggtaataatg

SEQ ID NO: 173641 - DNA, 500 bp, Homo sapiens
cggatggcgacatttcaaaaaattaaacacagatgaccgggcacggtgcctcacgccttaaatcccagtgctttgggccgaggcaggaggatcacttgagcccaggatttcaaggttacagtgagctgtgattgtgccactgcactccagcctgggtgacagagcaagaccgcatctctaagaaaaaaaagttccttctcaaactgaacacagcctgccttcctgtaattcccacttaatgattttttaaaagttttctcaaaatcacaaagtctgttttttctatatctgacacaccttagttatacttgaaattctctttacgttttcttttctctaagctaaacaaaccagtgcaatcaaatagattcttggccagtgctgcgaaatattataggactttatgtaatgatgcagtgtttagtactgtaatgatggaaagttactatttccacaccatcctctatggtagccactggccacatgtgacttttgaatac

SEQ ID NO: 173642 - DNA, 285 bp, Homo sapiens
ggaagcatggccctgccaacaccttgattttggacttctaggctccggaactgtgagagaggaaatttctgttcttttaagccacaaagtttttgatattttgttttagcggccccaggaaactaacaaacacaaataaattatccctgagaatgtttgggagctaataaaagacgccaatccaagacaggaagctaaaaattcccaaaacataataaatatctagtcaatccaataaatacccagtaaatccatcaaaaaggcaatatttattgtattgcctgg

SEQ ID NO: 173643 - DNA, 300 bp, Homo sapiens
actgggtctgtctgacctgaggacactccatcccagcaggaccctaatggagcaacccacctggtctttcacctgtcagaggaaagcacctcttcaagcacatggccagggaggctgatggggctggaaagcaggaaccatacaccacctgggtctgtgcctgggaaggtctgctgctaccacctcttgggggtccccaccctgagctcagtgggcccccagcccacaccacaggctgagggaggcttggttgtcatggtgacgtccaggtacccagaataaagaaggggctgctgggga

SEQ ID NO: 173644 - DNA, 217 bp, Homo sapiens
accagagactattatgaacacctttatgtacccaaactagaaaactttgaagagatggataaattcctggacatataaactctcccaagactaaatcaggaagaaactgaacccctgaacagaccaataatgagcgccaaaattaaatcagtaataaatagcctatcacccccaaaaaagcccaggaactgaaagattcacagataaattctatcaa

SEQ ID NO: 173645 - DNA, 182 bp, Homo sapiens
gtcgataaggggccaacactcagggatcacattgtgacaacccccaggcccgtcgtttgggttttaactgagaatcccatctcaattttccctgcattaagaaagaaagaaaggaaacgaaagcacttggagcttattaccttcacttctcacagaaatgcattcatttggcccttatcgag

SEQ ID NO: 173646 - DNA, 581 bp, Homo sapiens
acgcgtgacttatccagagaggccagccttccagggacagtgattgtcaccatctccaattcctggcttcctcttcagaattgtatcgtggtgtggcttcattgctcagagaagagccgtgcaagggtacaaccatcttcttggaggtgggtctgctcctctcctgctggacaatgagctactgtggcattttgtcctgggctggagtgtggtccccttgatcctagaaaagaagccgctcaggatgcggatgagactttgattgctctgggaccgacgcgtctcctcaagtgatcaaggccttcacaaacccaaagtggaaccgccgtgaaaacgatggacaaccggccacaggacccaggcagagatgcagaaggaggctcaccaaacactggccaacattcaaaaaatcgcattttggcgaacagagcacagtcgtccaaagacacacacgcacatgggcatacacacagaaaaacacacacacacagagaccgacagagagagggaaagaaacacacagagggtgagagacagagagagaagagagaatgggagacacacacacacacacacacaca

SEQ ID NO: 173647 - DNA, 153 bp, Homo sapiens
gcaggtgaacacccacatgcacgtgggaacaggaagatatcacaggggtccggatgagtggcacacccctgcccttcaccctcactctgtccttggatgtccaaagaacaaacacagcataggggacaaatgggtacaaacatacacctccag

SEQ ID NO: 173648 - DNA, 878 bp, Homo sapiens
ttttttttattaactcaggtgatccaaatgtgcaaccaggtttgaaaaaccactagcccaacagaataacaaaataggatggagaccttaattatacagtaaactgtttttggtttgtttttgttatttttttaccaatttaatgcaaccacctcttctcgttagggagaaaagattcctttaaaaatcacgtttgtaacttaatttgaaaatatgttcagattaaaagttctaaaaactgatgcatgacacttttagccaaatcagagtatgttagcagaatgtcaaacccaaacccaaatacagtacaaaataaatgtctagttcataaaaaggaaccgccagttagttcatttaattgacctttctctaaaagtatcaaatgcttgtttggaataagccactcatgaaaataatcatattgagatcattttagaattatacttgctgtttcatgattttatttttatatcaaagaccactacactaaggcatgagaaatgacaaacaaaattcagagactagaaaagatgattaatccaatccttttttttttttttttttttttaagccttccttctaaatccaacttcctgggccatatcctcccccggtgtctccttctttatacttctaattcctttttttcccctttcccttttttttccccttcctttaatccttctacccttcagggggccaaggctacatgggcgcctccctgaagtgcggaggattgtggtagcgcccttctttacgcctgacagggttcccgtgctccctttctagactagaagctgctcacaagagatttagcatttggtcttttccctttggaaacggaccaagtttgagactcctgcgtccccttgggaaaa

SEQ ID NO: 173649 - DNA, 191 bp, Homo sapiens
cttagagctacctcaaacttaacatgtacaaaatcaaattctaagacttggaactgtgaaactaccagaaaaaaaacattggggaaatgctccagaacactggatggacaaagattttttgtgtagaacctcaaaaacataggcaacaaaagcaaaaatagacaaacaggattacattaagctaaaaagct

SEQ ID NO: 173650 - DNA, 219 bp, Homo sapiens
ttaagatggaggcatatagtggagaaggccaccccatgtggcaaacaacagaaaacttctgaagacttttgaataggggagtgatttgtattttagaaattaatctgtgagcagcaggagagactggagaggaagggacaaggaggaccactgaagcagcagaatgaacagacattgttaaagtgctgaaggaagcgtcatggttgcttgcctctggtg

SEQ ID NO: 173651 - DNA, 874 bp, Homo sapiens
ggccccccaatcctgctatcaatggcagtgcaccccgggacctgtttgacatgaagcccttcgaagatgctcttcgcgtgcctccacctccccagtcggtgtccatggctgagcagctccgaggggagccctggttccatgggaagctgagccggcgggaggctgaggcactgctgcagctcaatggggacttcctggtacgggagagcacgaccacacctggccagtatgtgctcactggcttgcagagtgggcagcctaagcatttgctactggtggaccctgagggtgtggttcggactaaggatcaccgctttgaaagtgtcagtcaccttatcagctaccacatggacaatcacttgcccatcatctctgcgggcagcgaactgtctacagcaacctgtggagcggaaactgtgatctgccctagcgctctcttccagaagatgccctccaatcctttccaccctattccctaactctcgggacctcgtttgggagtgttctgtgggcttggccttgtgtcagagctgggagtagcatggactctgggtttcatatccagctgagtgagaggggagagtcaaaagcctgggtgagaatcctgcctctccccaaacattaatcaccaaagtatgaatgtacagagttggccctcacctgggactttgctgtgccaactgatgcaacttccacaagaaggtgagtgcttggtcatggacaatgtccagtggatgacaggcccagggaaacaggcagcactctggagcagggggaacacaacacagctcagggactcaggaaacccagaacgcgagagagaaccgacaaacacaggcaaagcagagactaaacaaccacagggaaaagacaa

SEQ ID NO: 173652 - DNA, 649 bp, Homo sapiens
ggccccccaatcctgctatcaatggcagtgcaccccgggacctgtttgacatgaagcccttcgaagatgctcttcgcgtgcctccacctccccagtcggtgtccatggctgagcagctccgaggggagccctggttccatgggaagctgagccggcgggaggctgaggcactgctgcagctcaatggggacttcctggtacgggagagcacgaccacacctggccagtatgtgctcactggcttgcagagtgggcagcctaagcatttgctactggtggaccctgagggtgtggtgagtgtggcagaggtgtgggtgaggggtggcaaaaaggaaggtacagtaccctacagtgtatccctcttccttccctcattgctttgtagacattcccgctgggcagctgtctatgggcctctcttgctctttaaagtgtctggcatcttcctccagaggctcatcccttagcctgaactatgttctttatagtcctggcacagggccaggcgtggtggctcacacctgtaatcccagcgctttgggaggctgaggcaggagaattgcttgaacctaggatgcagaggttgcaatgagctgagatcacaccactgcactccagcctgggcgacagagtaacagagtaagactct

SEQ ID NO: 173653 - DNA, 481 bp, Homo sapiens
aaggccggtgaagagaagaggatggcacctctgtagaatgctaaggagttggtgtgggcaagggcagtccaagacaaagagcaagggacaaggccagatcacgcagggccttgcagcctggtcagggttagttgggctttaacctgagagtaatagaaatttgtcagggcaaggaatggtctaggaaaaacaggatgatctgggactgggggagggagaggcagagtggatgatccaggatcgggggaggaagaggctgactgagctgtgtcactataactcctacatttccaagctgagagtagactaagaaaaaggcataaagctgtgtgctctgtcacgttgcctcgcttggcagcttctagtctctaatgactgtctgctgtcctctccaaagccatcagccaggcagcctcttcctcccccgtcctggatcatccactctgcctctccctcccccagtcggtacgagctcgatatg

SEQ ID NO: 173654 - DNA, 461 bp, Homo sapiens
gctttaacctgagagtaatagaaatttgtcagggcaaggaatggtctaggaaaaacaggatgatctgggactgggggagggagaggcagagtggatgatccaggatcgggggaggaagaggctgactgagctgtgtcactataactcctacatttccaagctgagagtagactaagaaaaaggcataaagctgtgtgctctgtcacgttgcctcgcttggcagcttctagtctctaatgactgtctgctgtcctctccaaagccatcagccaggcagggcccattccaaactgacaaagaaagtgacatgaacaagcaagaagtggccataggtgatggcaagaaataaaaggcaaggaatgagatgggaaccttagatgactttacaggattatttcattcaaccacttctaggtacccagttcctccttcatcagtttctttccctttcttttattttc

SEQ ID NO: 173655 - DNA, 639 bp, Homo sapiens
atttcagttactggacccaaagtgacttctgcctgcattctcgggtgggaggtccatctatagcaggggaaagagactggggcatcatccattctttcgtatattcacagatatgtatggtatgtcctgccccaggtgatgttctaggcgctagaaacacagtggtaattacaggcaaagcctctgctcttatgctgcttgcccatcagtgtgggagacagacaaggaacaaacaaataaaaagaacaaatacaccaagagacaactgtcactgtcacaggctcagttggaagaaaaatgcatttcactgttttttcttttttttttgagacagggtcttactctgtcactcaggctggagtgcagtggcacattcatggcccaatgtagcctcgaatccctgggctcaagcaatcctctcacctaagcttcttgagtagctgggactataggcatgcaccaccttgcctggcaaatttttaattttttttgtagagacaaggtcttgctgtgttgcccaggctggttgctaactcctggccttcagtgatcctcctgcctcagcctccaaaactgttgagattacaggtgtgagccactgtgctcaatgcattttttttttttttgagacaagatttg

SEQ ID NO: 173656 - DNA, 512 bp, Homo sapiens
  misc_feature (35)..(35): n is a, c, g, or t
gtgactctagcaggatccttgtgcctgttgtcagntggtaattacaggcaaagcctctgctcttatgctgcttgcccatcagtgtgggagacagacaaggaacaaacaaataaaaagaacaaatacaccaagagacaactgtcactgtcacaggctcagttggaagaaaaatgcatttcactgttttttcttttttttttgagacagggtcttactctgtcactcaggctggagtgcagtggcacattcatggcccaatgtagcctcgaatccctgggctcaagcaatcctctcacctaagcttcttgagtagctgggactataggcatgcaccaccttgcctggcaaatttttaattttttttgtagagacaaggtcttgctgtgttgcccaggctggttgctaactcctggccttcagtgatcctcctgcctcagcctccaaaactgttgagattacaggtgtgagccactgtgctcaatgcattttttttttttttgagacaagatttg

SEQ ID NO: 173657 - DNA, 496 bp, Homo sapiens
gctacatgatcatctagttctgtcccttttcagctttacagagaggcttgctacttagatggttctctctagctatggggcttggagagtaaatgggcaggagtgggagtgtgggaaggggccatgctctgttgatctcagccagttgaagctgatgcctctgtcctggtgtttataaggggctccatcacacatgtacccgtcctctattgtgtgggaggtaccccaggcaatgaaacggagaggtgtctcctggtgttgcagtggggaggagacctctggaccaggacgtgctgtggggcgtcagctaccaaccttgtggtctcgggaaagtgacctatcaagggggcatacaacagggacaccaccttgaaatctgaagtcactgagtagcaggggaggttggagcctggggcaccccatggcctgcccttgggtttcatttaactgtgacctccccaggatgttacacgtactggccttcttcctgcagaaa

SEQ ID NO: 173658 - DNA, 368 bp, Homo sapiens
aagcatttgtaaagttacagcaaaagatgtacctgttaatacacagaatgtgtacagattatttgttatgacaataaaacactcaaaataaatggtctttagcatctcaaattccaactgaaatcattttagtattaactcttcttcccaaagcaatgtctcatttcttggctgtgcaggtgatgccatgttatatccaataactagaaaaatcactgtgctgaacttttatgtttagcttccaagtatttttctaatgttttgcatttcaagtggtatcactgttaaatgccatttgttttcagattgtggccttttattattggctgctagatcctggtgtttctatgttcttttttaagcaccaa

SEQ ID NO: 173659 - DNA, 462 bp, Homo sapiens
aaaataaaatagaggggataaataaaataaaacaaagtaaagtaaaataaaatagaaaagaggctgcagtgagccgtgattgtgccactgcattcccacctaggcaacagagcaagaccctgtcttaaaaaaaaattatatatatatgtgtatatattatacatatatatatggtgtcatattatacatgtaactctgaaatttacacaagaggcagtcaattctagacatctaacacctcaccaggagctgttcttagtgaaaactcagggaggaaaaacaggggcactaatatttatcacagttcctgtaggcactagacactgcactaaactacttatcacaaatctcagaggtctccgatttgagccaaagtcatatttacattcgggtaaaccggtaatatattcctcactgtagtctacttaaaataataatttaataagccgaataatcctatga

SEQ ID NO: 173660 - DNA, 458 bp, Homo sapiens
aattgaacgtattgcaccagcttctcccggcctccagactctccctctggtccatctttgacacgaccccagagggttctttctacacccagagctgcccctacttcttcactgctcacactcctgctgcagctccccagcgccctgaggaaagagactcaacactctctgacttttctgctgaactctgcacctaggtatctagctgcctcctaaacgtccctgggacccctcaaagtcactgccttctaacccagcttatcatctgcccccggctctttctctcaggctccttatttcggtgatgacccaccgcccaacaggcacagagcaggacctgtctcagatgctgttctctatgcttcccaaaacagcccagcagacctaactctctggccctggcccttctccaccttcacggccccagcccccactcgggcctccgctctggcctggac

SEQ ID NO: 173661 - DNA, 857 bp, Homo sapiens
tgccccaagtggcagagcagcttgcagagcagcctggagctgttgcagagcattttcttattctggaccccactcaaaactagcagcttctcaggtcgcttcataaataggccagagtaacaaagccatatgaggaatatgttgcctccaaaatccaaggaggtcctatgtattagtctgttctcacactgctaatgaagatatacctgagactgggtaatttataaagaaaagagatttaattgactcccagttccacatggctggggaggcctcacaatcacagtgaaaggagaatgaggagcaaagtcacatcttacatagtggcaggcaagagagcttctgcaggagaactcccattgataaaaccatcagatctcgtgagacttatttgctaccacagaacagtatgggggaaactgcccccatgattcagttagctccacctagccccatcctttacacgtggggatgattacaattcaaagtgagatttggatggggacacagccaaaccatgttaccctactaggtgttgtgcctcattttttggttttaggagggcccagatgcaacaacttacccttcattttagagggaatatctctggccaggcacagtggttcatgccggtaatcttagcactttgggaggccaagtcaggcagatcacttgaccttaagagtttgagaccagcctgcacaacatactgagactctgtctcaaaaaaattaaaaattcaggctgggcatggtggctcatgcctgtaatcccagcactttgggaggccgaggcaggcagatcacttgaggtcaggagttcgagatcagcctgaccaacatggtgaaaccctgtct

SEQ ID NO: 173662 - DNA, 179 bp, Homo sapiens
aggccagggggctgtggaatcagaggctaattctccagagaaggggccgtattttgttagcagtcactgcagcagatgggagtgggtgcagcagccaggtagaggcgcacagcagtgcctttgacagtgcccaatttcatattccctgagtaccatggaatttccagtactgtgtgtga

SEQ ID NO: 173663 - DNA, 441 bp, Homo sapiens
acacaggaaatactgaacgtcattttaacttttctgccagcaaataatgtaaacacacctcactaacttccaaatgttttagagcagcggtccctaccctttttggcaccagggactgctcttgtggggaactatttttccacggactagggtcttggggaagggggtgttcataatgattcaagcacattacatttattgtgtactttataattattaaactgtaatatataatcaaatagttatacaattcaccataatgtagaatcagtgggagccctaagcttgttttcctgcaactagacggtcctacctgggggtgatgagagacagtgatagactatcaggcattagattcttgtaaggagcaggcaacacagatcccttgcatgtgcaattcacaacagggttcacaagcctacgagaatctaatgctaccat

SEQ ID NO: 173664 - DNA, 344 bp, Homo sapiens
aaaaaaaaaaaaaagttgcctatctgcactgagaaagtaaaagacagttaatgtccactggtttagaaatagtttccttactcctttgataaatatttctataaatagaggataaaataatctttttatcttaattatggtgactgcatttaacagaagccaacatagggagtgcaaaggtagtaaattcattcccaaacccagtgtttatgccacacaaaaagttaacttaaggcttatttaggtacctgttattttgtgcaacctggaattacttaaaatacataaacaaataagctcactttgaatcttgactgaatatcagacattttcttcttcaagtg

SEQ ID NO: 173665 - DNA, 239 bp, Homo sapiens
cggcacgaggagctgtcatttggctccctgttaaactctgcacaggctggctctgtctgcagcaccctatgggataggacaggccgaggcagataatagggctgtggtcgctcagggcccaccagatggggttcagtttgaagcctctggtacttccccttcccaaacccagtcacaggaaacactgccctggggaccccaggggtcagaagaatgtcctgcaggccaagaggattcca

SEQ ID NO: 173666 - DNA, 354 bp, Homo sapiens
taggaaggcatcgctgtagactcagtatccaagattggcctcgaggcattgctgggattgacccaaaaggaaattagggaaatgggcagttagggaatggggcagttctgcacagcataaactaagtcagatgggtcttcctgtaaccttcatacaaggctggagggcagacattaaaggctccttttctttctaacttccttgttactgctcttatttttcaagtatttcaccctggtttattaattctacctcctggtgcctcagctggtttcttctaggaaaagtttctcattagcatttctatagggagcagctgctaccctatctacccctattatctgatggccaggg

SEQ ID NO: 173667 - DNA, 250 bp, Homo sapiens
aactagctggtgatcttgagcagatatctttatttaactgatttgtaaaatgacggtaatgtacatatctcatgggatgcttggagattaaatgccaccggatctctaaagtttttagcacagtgtatgaaacattagctattttttccctttggtgagtttctctttattttcctctatttcacgacttctgttcattcatatacctacttccttttcttctgcgtcaggacttcgcttagagccttct

SEQ ID NO: 173668 - DNA, 1083 bp, Homo sapiens
  misc_feature (752)..(752): n is a, c, g, or t
  misc_feature (981)..(981): n is a, c, g, or t
acaggcccgccgccgcgccggcgcctagcccgccgggtcagcgcggccaggcctcgccgccggccccgctcccagggtgcaccgcggctagcgctggggtgggagcgggcgagatgcgccgggcgggcggtgcccactgacctccctcggcggcccggcccgggcagcgcccgagcccaggcagccccgcccgccgcgccccgcccagcccatgggccacgggcccccaccgccgcccgccgggaggaccgagcctaagagggcagccgcctgaaggaacgcgacggcggcgcccgcagtatttttcagtgctgtacaagcgtcttgaattactctggtagcttttccagaaagacccatgacttcaccacatttctcgagttacgatgaaggtcctctggatgtcagcatggcagccacaaacctggagaaccagctgcacagcgcacagaagaacctcctgttccttcagcgggagcatgccagcacgctcaaggggctgcactccgagatcaggcggctgcagcagcactgcacagatttaacatatgagctgacagtcaaaagttcggaacagacaggagacgggacttctaaaagcagtgaattaaacgaaaacgatgtgaagagctggaagcccaactgaaagtgacaagagaacgaaaatgctgagttgttgaacagaactggagcagaaaaacgcgatgatcacagtgctggagaacaccatcaaggagcgagagacagaagtncctggaggagctgaaggccaagagtcacaagctgaccctgctgtctagcgagctggagcagcgggccagcaccatcgcctacctgacctcccagctgcacgccgccaagaagaagctcatgagctccagcgggacctcagatgccagcccgtcaggagacccgtgctggccagctacaagccagcgccccccaaagacaagctacccgaaacgcctcgccgccgcatgnaaaaagagcctctcagcccccttgcacccggaatttgaagaagtctacagattcggggcagagagcaggaaattcttttgcgggaacagtggatgctatgcc

SEQ ID NO: 173669 - DNA, 482 bp, Homo sapiens
gcaccaggagcgccccggggcctagcccggctttgtctgggatgctgtggggaggaggccgtctgaatccacatcgcctttttaaatgcttgttaccacccggggaaccttagagaccctccctgacaagttgtatcgcctcccgtcctggtagcctttcctatttttcagtgctgtacaagcgtcttgaattactctggtagcttttccagaaagacccatgacttcaccacatttctcgagttacgatgaaggtcctctggatgtcagcatggcagccacaaacctggagaaccagctgcacagcgcacagaagaacctccctcctggagacccttgtcacctcccgagctcctcctggagacccctgtcacctcctgaccaacctttcccagggcggcaccgatcaccgagcagccgtgcgtgtatctcaaggaactaaataagatgacgctactcctcatagcaccactacctaaatt

SEQ ID NO: 173670 - DNA, 523 bp, Homo sapiens
tggaggcggtctcaggcaaggtgtcacttcctacaggcagaccaccgagattcccccaggctgggtcaggtgtctctgctatgcgcctcccgcctggccttagtaccccagctaataagtgcctgattagaggtctttatcctcactggactgtgagctctaggagggcctgggttgtatcttgttcatcatggtgtcccagtgaccagcataagggaaggaagaaagagaaggaggaaagaaggaagttccaggtccgaagggattctttcttcccagaattcccagcttctgattttctcctctgcccagctgcacgtaagaaacagaaccgtagaacaagtactgggctgggggttgtagagcttggcacctatatctgtgccagtctgtgggcaagccccttctctctgggccttcctttgctcatctgtacaatggagatgagcatgccttccctccctacttcaccgagcctttgtgagagtaaagcagaaacgcatttggggctttgtaaactgta

SEQ ID NO: 173671 - DNA, 803 bp, Homo sapiens
caaaatacgtctagagaggctgggtgttaatcggacgagggcaccttgaagcaattagcacccactgtctcggtgtctgtggatcagggatctggacacgatgccactgggtgcctcttcttcaaggtctttcaaggctgcaggcaaggtattggccagggctgctgtctcctctgaaggctcatcttcaggaggatccccttccaagcttcttcacatgataggattcaggtcctcataggctgttggactgaagacttagtttcccactggctcttgggtgggggcctctctacagagcagcttacaacctggcagctggtttctttcagagcaagcgaacaagagagagaggccatacaagacagatgccatgtcttggaagtgatattcctttacttttgccatattctcttagcgagaagtgagtcctgaggtccggcccacactgaaggagaggagatcctagcagggctggggattatcaggagccctcccaaaggccactgaagagagcagtcaagatggtggatggggtcagctggctgcccagaggtcatctgataaggactaggagctgttagtggccctggcgatagcagatctgggctggccggtgtgtctggagtcagacactacattgaagtgtgttgacaggtaggatgcagggaagtgagaagggtgaatgtgagttactagttggaggctggagtgcttttatgtcacccaaagatgtatgggtcagagaggcattcccaggtgtggaatggactgtgagagctgggacaggcactggagtggga

SEQ ID NO: 173672 - DNA, 681 bp, Homo sapiens
tttgcaaattaacgacggcagagcaagtgaaggaattccatgcatgtataaataattttgccttaaggtttgaaactgttgtcatggtcagaggtatttgctgttgctttgctagatcatttttttgcactaattattgtggagtcctttatcaatttgggaacctatgaagccagttttgccagtttggctgtgtatatccatgagctaatttttagatattgctggtagcaacttgatatccccagtgcttagcaaaatgcctgaccatgcctagctctcagtgaatattgttgaactgaaattaaatggcctggtgggagtgttcatattccttataatttaaaagggaaataaaaaggtatttcttttcactttacatgtcctccttaagaaatgtaggaatagaaaatttgagattctgaaatatttcagtggggccaggcacagtgtctcacgtttgtaatctcagccctttaggaggcctaggtaagaagatagattgaggccaggagttttgagagcagcgtgggcaacatagtgagatcctgtttccataaaatgacataataaaactttacatccaactcaatattagagagagattttggcagagtcatcttcttccactgtatttttccaataggggaaatcccacttttataattgaaatcagtgaga

SEQ ID NO: 173673 - DNA, 605 bp, Homo sapiens
tcttagaaatatttaatcaagtagtatccactagaacttaacatttcatcctgtggatcatcacacacaaaatacccaaccctgctgtcattcagggtcctagcaggaacaggtagcatcaaataggataattgatgagagcttaagaaaggaactatttacaaatatgtggccagattaggggaaaccagtaaggttgggaatgccgcccaggattctaacaagagtgagaatctatttctactcttgacctaaaggggcaaggagggaaagctgcagctgtggctgtgggagagccggcctgcaaagctgtggccttcacagaggaagacagccactgccgaggtatggctagggaaggaggggaggagatgatgccctgaaccccatcgtcattctcactgggcaagcccaaccaggagccaaagcacagggcagcccattggatgcagttcattaggggactgcttctgggtagagggcagacctggaggggcagagagaatgcacagcgctagtgactatctcctcaagagcagactcacagactgtgtttcctggctttacttccatttcccagaagcgcatacccagtgagaggaatg

SEQ ID NO: 173674 - DNA, 236 bp, Homo sapiens
agacagattttacaaacttcaacaatcagcatggtgttaggcaaagctctctcttttggggaaaacatcctaggaatcatcaatcaattaggaagacaagaatgttgtgttgattattttaggggaaaacacatgacacttctttcctcttggctgacaaatgctaaacaacacattcagcggggttatcagacaatcggtgttggcctgtgctgaccagaaatgagagtgatggg

SEQ ID NO: 173675 - DNA, 650 bp, Homo sapiens
tgccacacaggctggagtgcagtggggcagtcttggctcactgcaacctccacctcctgggttcaagtgatcctcccatctcagtctcccaagtagctgggactagtacatgcgccaccacacctagctaatttttgtatttttgttagagacagggtttcaccacgttgccccagactggtctcaaactcctcaactcaagcgatcctcccaccttggcctcccaaagtgctgggattacaggcacgagccactgcacccagccttgtgtcagctttttacactcttcttttcatgaggttcttctaggtaacacttgtagtcagctaacaaagccataggtttccttttgaaaggtataacagttggtgaaggaggttaattaaccttctgaatgattccttggggctgaaataaagtgatcattgtttttaaagttagttcatagccacctgtcttgcttaatatgtcactctgtttggaattgtcaggctttaaaactgggaagtagaataatctgatccgcagcagcgatatccctccctcttacctcagcacagtgtgtaaccacgctgccattaacacagtgaatgaagtaaaagatgagtcttctgaaggtgcttctgtaatgtctcatggggttgttttat

SEQ ID NO: 173676 - DNA, 321 bp, Homo sapiens
tgctgggattacaggtgtgagccaccatgcctggcctgattgctttttctgtagtaaaatataagaatcatatgaataaatgaaaaattccctaacttaatattagccaagaacttcctctccagcagagcttagctcttaccaaatatatatgattgatttgcattctacctattttgtttttttcctttcccttttgtgggataaacttgaaacaggacctagaaattgtaagactctgaatgcttttcagtttctttctgcatttctttagagtggtgtgtgaaaaacttcagcctctgttccttaaacatctttccc

SEQ ID NO: 173677 - DNA, 517 bp, Homo sapiens
atagacgatccccagtacgctacatgatcatctacaaaaataagcatcccttctgaaatggctttaaccatgattccagatgccgaccagaaaaacaaggacagatcctcatgacacaatgcctgaagacttcccttcaggttgacaaatgatccatttattaacatgttttggatacagttattcagcccattgtaaattcataacctgtacctgtgatattaatattatggcaaatgttcaactaccctgcttacatcagatatacagtctatatcattcctctaatccagaggctggcaaactttttctgtgaagagccagatagtaaatttttttggcttcacaggttatatggtcttagtagcaggtcctgaacacagccagtcacacacaatgtggaaacaaatgggcgtggctttgttccaataaaactttatttacaaaaacaggtggcatgcagacccctgaaaatctatgggtctgataaagctaaccaaaaagagaactaggctgg

SEQ ID NO: 173678 - DNA, 383 bp, Homo sapiens
ttttcatgtgttgcatgttttggggagataatttcaagtcaggtgcatgcgcctccacaagcacactgttggtgagcctaggggtgaggaagccagagctgccctgccaggctgcttggtgaaggcctggtgacagacagcctggccagaaatccagtcactggctgctgggaataactatcgtttggtaacatagtttggtccaccttgcagtgaaaaacgtttataatttaaaggcatttgcttcagagacattcactgtagtaacatatcttttctttctcttgagacggggtcttacgacattgcccaggctggccttgaactcctgtgctccagcaattctctcgccttggcccacggagtagctgtgactacaggtg

SEQ ID NO: 173679 - DNA, 142 bp, Homo sapiens
tttactttttcaaaaggttagacgattgcattttgtactcatttagatacattaaatactctcaatgcacaagtgatgaggcggttctgatcacaggagatgctcattccggtgtaaccatctcctctggaattttaaagaa

SEQ ID NO: 173680 - DNA, 226 bp, Homo sapiens
ctatcttataccaccatcttcatcatgtggactccacattacctcctggttgacaatatcccttccacttccagcaaactcattctggccagcaggaaagattttttgttgttgttttaaaggattctcccattcttccctctaatgacacctctcagcggatgcaccaagcacagtcatttgtacactcttggccaaaacttagtcttgtgtccataggactagc

SEQ ID NO: 173681 - DNA, 134 bp, Homo sapiens
ataaaaaaataataaatgattaatacatgtatatggaaatctataatttacaaaatacttttaactatattccttatttgaccttcaaaacaatcccatagcattgaaataagcaacacaacactttggtatat

SEQ ID NO: 173682 - DNA, 351 bp, Homo sapiens
tgggcaaacaccacaccagcagggagccccaagcccagcccaagccccacaaagtctccagccaggaaggggaaggcaggataccactgcctgggaaggcggaagtgagagaggcaggccaacccattcctgtttctcttctacttctttctccaaagaaagccctcactctcctcgctacagcccagggaggtcacgaggggctgggaagactcctgtggcaaagtggcccactccagcccaggcctgagaaaaaaggaccccgaaatccttctggctaccagtatcttctgccctcatgagctggcctctctccagaccacccgccagcattaagaggcgagagaggga

SEQ ID NO: 173683 - DNA, 321 bp, Homo sapiens
  misc_feature (25)..(25): n is a, c, g, or t
gcttctgccccccccacgcccaggntcttggatgaggaagggaaggcaggataccactgcctgggaaggcggaagtgagagaggcaggccaacccattcctgtttctcttctacttctttctccaaagaaagccctcactctcctcgctacagcccagggaggtcacgaggggctgggaagactcctgtggcaaagtggcccactccagcccaggcctgagaaaaaaggaccccgaaatccttctggctaccagtatcttctgccctcatgagctggcctctctccagaccacccgccagcattaagaggcgagagaggga

SEQ ID NO: 173684 - DNA, 340 bp, Homo sapiens
tactaatcgcatcagttagcggttttaaaaaataattcagcacagcttatgaagacaaatgtactagtacaggggcccatgattgcgtaaccaaaacatcagaacagcatgagctggtaccagcttttgcggtaattaccttctgtgaaagcagacgcctacccttccccaaaactgtccctgcaaagagagtgttaagtgtgtggatgaaagtcatccggtaataactaatccacaagagaaaaagtgcacctgtgctgaggtcttcttccaaccgcagctttctgtttcctcccctgcctcccttttcctgggacttctctttccacctgcatcccac

SEQ ID NO: 173685 - DNA, 563 bp, Homo sapiens
gtctgggtgtggaattttgagaatctcttgatccttttcagtttaattctgaaacagggttcttccttccttccagattacagtgtggacactcacacacagtaagggacaaagaaagtgtatccccttccaaagatccgcccaccaggccccggacccgtaatcaaagcctgatactgggacaatggacccagcggccgggccagccctcccctagttatcaccccagagctgtggctgggctctctttgttccgaaacggagctgatggagcaggacgctgtcgccaggcactgcggggagggggttatcagcccctggcccgcgtcccaccccagaggtgaagtcttcgccccagacaggccctatcaggccctcccagctgctgttattttagatatggcaggaagtagggcctggaaaccgcacggctcccagcccttggcagcagctcagttcccgaggctgcactcagagctggtggcagggagggagaaggcacagcagcctggactgcgggttagagggctgtgccggggccggtggagccatgcgagcggccg

SEQ ID NO: 173686 - DNA, 523 bp, Homo sapiens
gaatggctgtaattacaaagactgacagaaccatgtgttggtgaagatgtggggctattagaactcttaccgctggtgggagtaaactaatttggaaaattgcctttaactactaaagttaaatatacatacattctatgacccatattttcactcaaaggtatacagaactgcacatatattccaccaaaagacctgtacagcaatattcagtatagtttattcaaaatagcccaaacagaaaatattccaaatgcatagcaataactaaattataacattcatacaatgaactacagaagaaaatgtcactttaagataaaaacagagtatcactaaacttcaaaattagagaaaaaaaaagttccaaggggtattatctgaaggacacttcaatacgctacaatacattttaaatattttagattaaaaaataaaggcattcctgccaattctacttcaatgtttttactttttttttttttttttggaaacggagtctctctttgtggcccaaatggga

SEQ ID NO: 173687 - DNA, 196 bp, Homo sapiens
acacagatgggaagcaagagaagatggtcaaaatcaggactgaggagcatgtcagaaagtatgcgaggtgctaataacctagatgccgagtgtctggaaaggacaggttaggagaagggctggaacaaacaccgtggccaaagtccagaggcccaggccacacccagagcccccaaaatgaaggatactaaaccaa

SEQ ID NO: 173688 - DNA, 496 bp, Homo sapiens
cattttaaaaatatgcacgttattttctctattatacttcataaaaccaagttcaacatcagattctccagtatctcctacagtccagctactcaacatgtggtctgggaccagcagtatctgtatcacctgggaccccaccccagctagacctagagagtcagaatctgtaacttaccaagatccccaggagattagtgtccacattaaagtttgagaagcactgtcctaaatacaagcagcactggcttgatcagaagcactgtcctaaatacaagcagcactgtctgaccagtggcacaatcatagctcgctgcagccttgaacttctgggctcaagcaattctcccacctcaacctcccaaagcactggtactacaggtgcacattaccatacctggctaatttattgtattttattttctagagacgaagttcttgctatgttgcttagactggtctcgaactccctggcttcaagtgatcctcccggttg

SEQ ID NO: 173689 - DNA, 425 bp, Homo sapiens
caagccatatggttccatccatggaactagtatctgtacaatataatacaaggaacactcaagtttaaaaaaaaatccccttagaaaatatgcaaaagacatgaacagacatttcacccaagaacatgcacagatgccaaagaaaccatgggaaaaagctcaactccatttgctattagggaaatgcatattaaaaccacaatgagttatcactgtacacctatcagaactgctaaaataaaaaacagtgacaactgcaaatttaggtgaggatacagaaaaaccagtttcttagaatactaaaatatgcaactatcataacacccagcgattgtacatatgggcatttatcctagagaaatgaaagcttatgtttagacagagacttctgaaaacctacacatttagcagctttattcataata

SEQ ID NO: 173690 - DNA, 292 bp, Homo sapiens
tataagagcacaaaagtcaaacgcacacacagaaaaaaaactatctccattataagcaattaaaagtttttctcggctgggcgcggtggctcacacctgtaatcccagcactttaggaggtggaagcgggaagatcgtttgaggtgagaagtttgagtccagcctggccgacacagtgaaaccctgtctctactaaaaatacaaaaattagccaggtgtggtggcgcatgcctgtaatccccgctaaggctaaggcaggagaattgcctgaacccaggagatggaggcggca

SEQ ID NO: 173691 - DNA, 397 bp, Homo sapiens
caaacacagcgaatgccatccccatcccctccccagacccccactcaggtgccgatacagacacagcgaagacagcgagtgccatccccagcccctccccagactgcccatcctcaattcctgggaaccacgagcctttcctcaacttcagaatcttctcgcctcataaatgtgacataaaaagaaccacacagtacgcagcctttgggggctgcctgcccactctgcgcagttctcggaggtgtgtgccggtggttttactgctgggtggcgttccgtggtatggacatagctcagtttgttgaacatttatttacccactgaagtacctttggactgtttatggctaatacgaataaagctgctataaacacctgtgtacaggctactgtgtgaa

SEQ ID NO: 173692 - DNA, 462 bp, Homo sapiens
caaaaggaggctgacccaaaatgccatgaagtcttttggatcttatgactgccaaagtcagaaacatacactgctcagaagtgaagagaattagagtagcagaagcacttgactagagaaaaaacatcaatcaattaatctgtggaacccttcctcggatagaatgagacagtgtgagtgtccatttccttgctttctttgtggtccaagcactgcttgcagagatgtgcatgaattaactcttcacaacagttaagtcttcacaacagttgtgtggcagctgaggaacattttgtaagcattaaaaaaaaatcacatgaccctactcatctgacaaagggctaatatcaagaatctacaacgaactcaaacaaatttacaagaaaaggacaaacaaccctaccaaaaagtgggcaaaggacgtgaacagacacttctcaaaagaagacatttatgcagcca

SEQ ID NO: 173693 - DNA, 298 bp, Homo sapiens
aagaactatacaaacacttaaatataatgaagtcaatagataccgtaaggatctaaatccagggaccgcatctagtctgtgtagttagggaatgtcataagcaagtgaagtttctttttatttattttttttaatttttttgtgagacagggtctctctctgtctcccaggctggagtgcatggctcattgcagcctcgatctcccaggctcagtcaatcctcctgctttagcctccctagtagctggggctacaggcacgtgccaccatgcccggctaatttttgaactttttgtag

SEQ ID NO: 173694 - DNA, 555 bp, Homo sapiens
gtgaggaccttaagagcttaaacagttcatggctcatagtaggtactacataagagttaaataaaaattaaatcttagctgagggtcaccttataacaagcactaattttctcattctgatttcttactcatagaatgacttcctgattgtaaccaggctttctggttcatccacctacagaggaagtacggatgtagctattctggcctgtgttgcacagttacatatttcttgtcataaattaatcaatcagtgagttttggttaatgtgctaacaaaatcacagttctgaaccagtaagactgaagcccaagcccagacagtgtcacaaagacacacctcatgtagttgcttgcttagtgacctcctagccaccttctccaaataataccacaactttttattcaaatacctacaacacaagctgtatcactagggataaggaagcactgcctgagaacccttttctctaatcagcagagcatagagagagatgacaggtaggagagtttccagggagaagtgaatgctttgccagcgtcacagccctccct

SEQ ID NO: 173695 - DNA, 1564 bp, Homo sapiens
agccgcagtttggcaccatcttttccatctcctgctccttccgccttcccgccatccgccctccacacgattcagcccggtggtgttagccccctggactcgattcctgaggcaaacagtgccccttaaggtcggcgacagcctcttctgggttcactgcagtccaaccggttccctaccctctgccattatgaacatccgcaacgctcagccagacgacctgatgaatatgcaacactgcaacctcctttgccttcctgagaactaccagatgaaatactatttatatcatggcctttcctggccccagctttcttacatcgctgaggatgaggacgggaagattgtgggctatgttctggccaaaatggaggaggaaccagatgatgtcccgcatggccatatcacctcactggccgtgaagcgttcacaccggcgcctcggcctggcccagaagctgatggaccaggcctccagggccatgatagagaactttaacgccaaatacgtgtctctgcacgtcaggaagagtaaccggccagccttgcacctttattctaacaccctcaactttcagattagtgaggtggaacctaaatactatgcagatggggaagatgcttatgctatgaagcgggatctctcgcagatggcagatgagctgagacgacaaatggacctgaagaagggcgggtatgtggtcctgggctccagggagaaccaggagacccagggcagcacactttctgattctgaagaggcctgtcagcaaaagaacccggctaccgaagaaagtggcagtgacagcaaagaacctaaggagtctgtggagagcaccaacgtccaggacagctcagaaagctcggattccacctcctagagcatgcttaagcatttcaggtcctcatgtctcaaccacatctactctgtgaaccctggcttagtctgtctgctctgcagcatctgctgtggggatcatctcacagtgaccagaatggcttctcactcttaactctataaacaaccacctttcacatatcctgctgggatcatgaaggaatacctggacacaagagccactgcacaacagccaaggaactttgagacctgccattacagaacctttcttggcctactcacactacgctgccattttattctgtttgtagtagtcctctgttgggtgtggttatcctgcaagtttttctccttttagaatgatgaacaggaagcagggcaaactcttgaagatttccagctttcagtttttgtttttgttttttaaccattatttacctgagttttcatccttgaggaggtgaagtagtcaggaccatgaagtcagacctcatgccctcttcctcctctttcctggaagaagtattcagtttccttttcctttctctggtaactcctcctttatactattcccccctcccttttttttgaggaggagggcatcaccttcccagtgggaaaaggtgttaagttaggagcttctactgtacaatcagaacttggagattttaagaaaaggacaaacggtaattaaattggaatctct

SEQ ID NO: 173696 - DNA, 957 bp, Homo sapiens
  misc_feature (790)..(790): n is a, c, g, or t
  misc_feature (813)..(813): n is a, c, g, or t
  misc_feature (820)..(821): n is a, c, g, or t
  misc_feature (834)..(834): n is a, c, g, or t
  misc_feature (842)..(842): n is a, c, g, or t
  misc_feature (851)..(851): n is a, c, g, or t
  misc_feature (855)..(855): n is a, c, g, or t
  misc_feature (857)..(857): n is a, c, g, or t
  misc_feature (863)..(863): n is a, c, g, or t
  misc_feature (866)..(866): n is a, c, g, or t
  misc_feature (868)..(868): n is a, c, g, or t
  misc_feature (875)..(875): n is a, c, g, or t
  misc_feature (884)..(884): n is a, c, g, or t
  misc_feature (892)..(892): n is a, c, g, or t
  misc_feature (894)..(894): n is a, c, g, or t
  misc_feature (900)..(900): n is a, c, g, or t
  misc_feature (902)..(902): n is a, c, g, or t
  misc_feature (906)..(906): n is a, c, g, or t
  misc_feature (911)..(911): n is a, c, g, or t
  misc_feature (914)..(914): n is a, c, g, or t
  misc_feature (917)..(917): n is a, c, g, or t
atgcgactctcctgggatggtgggtgggaggtgcaggagttgcttggaagaattttgctgcagcagccaacactgagaattgtaggtagagccaggaagtcctgggcctcaggatgttactgggtaggtttaccccagatgcacccagtccctctccaatgtgagactgacctctctttatcagatgtctggggcctagggtgagaggtcatatttgtatcaccatcagatcagtgctaagggtgagacagatctgacacttgtcagccaaaagcattcatcccttggctccacaaatatttactgagtagcaccagcctactgagtgccaggctctgttctaggctctggacatatagcagtaaacaagttcatattctagaagggggagacaagaaataaacacaggtataaaataaatagtgtctcagatgatggtaagttctctctaaaataataataataataataataaggcactaaaggagaattgggagcaggggagttggtattgcaatttaaaatagatttgtcagggaactcttactgagaagatgatgtttaagtgaagaccagggttggaggaggagtgagatatgttgatatctgggggaaggaacattccaggccaagagaactgaagaggtaaaggccctggggagggaatgtgcctggtgtgtttgaggatcagcaaaaaggagaggccagtgagattgaagcagagtaagaagaacagtaggagatagggtttagcgataactacctgatcctgcccctcacaatcatggangccaacgcccttatccgtgaccnctatcannaaaaaaatctacntctctatntattcctanaatntncttatntancntcaagcncagaacacnttatattntngaaccntntccnctggntanccngaagaacaccaaggtaagagggaatcattaaccaaggctc

SEQ ID NO: 173697 - DNA, 464 bp, Homo sapiens
cggaaacagggtctcacactgtcacccagggtaaagtgcagtggcacaatcacggctcactccagccttgacctcctgggctcaatctgtcctcccacctcagcctcccaagtagctgggactacagtcacgcaccaccacgcccagctaatttttgtatttttggtagagtttcatcatgttggccaggctggaacaagtacctttcttaatgcctgtgagatggtattgtatttttctctttgcttgttttccttacttagactgagcaccccatgagtgcagagaccatggaccatgtctttcctattccccattcagtccaccatgccgagcatatggaaagctgtcagtgttgactgattaaatgaaagtttcttttttctcttttatgagtttatttttttctttttgtaaatgagtgttttttaactcatgccttttctcatgctgctgtgtctgcc

SEQ ID NO: 173698 - DNA, 382 bp, Homo sapiens
ctcttcaagggaggtattattttcatttttgcagatgaggaactagactcagtgaggttaggcaatgtacccaagatcacacagctataaagtgccaggggaaggaaacctactaatttgcagtgcctttgagtatttgctatgcttggggcaagtattctccaacaaggtcggaatcttacactcaaggaaggaaactcagtgatgagattctgtgagtcacccaaaaggagaggagaagaagacctttgagcagaagctctcagcccttcttggtcgttactctctttgcccactcatcaggccctccctccttttagaattcactctgttgccctctgtctgcaccttgactcaaaatttcacagacacagttggtaga

SEQ ID NO: 173699 - DNA, 177 bp, Homo sapiens
ccctttgtttccctttaagtcttcccatcagagcacagaatgcttcgcggacccagagccagcccccattgaccatcctgtaggggccccagaagcccagcctggcgccatcagtaaaggattatggagaggagcactggatagaacagccccaggggacaggtgcagcataagctt

SEQ ID NO: 173700 - DNA, 257 bp, Homo sapiens
ctgctacctgggacatgaaggagctctggaccgtctgattagcccatgccctaatcagaaaggagtttaaaaagtgctctctgctcaggttggctcaagagggtccggggaccatagattagtccctgggttgagaaggctgggcatggtttgattatgtgtttcctatgccttccaacagtggcaagagtagccagcccataggacggaatgaaaatcaaggtggaccttgctttagggacatctaaaagcatcca

SEQ ID NO: 173701 - DNA, 386 bp, Homo sapiens
atgcagaatggaagctgcagagcagaatgaagcagctgggcagggaaggaggcaaaggagagtcagaaatgccaggagccacagcacatgccactgctcaatgcatccacacagatgctacgcactcggtgacctggttatttctgaaagacagatcaattctaagacaggattccacccagtagttctgggttttgtttgttattatttgttgatttgcgtatttgctaaagtggtgtccagagaagtgaacatgaacctgagtctggagaaccctggaagagagagttggcatctggggaacccatgtttgattctggttgtgggcttaggttcacgaatccagatacatgcctgtcttcatgtgaaaagcagatgccctgggg

SEQ ID NO: 173702 - DNA, 544 bp, Homo sapiens
ttgtagagatgaggtctcgctatattgcccaggctggtctctaactcctgagctcaaacaatctgcccacctcagtctcccgaagtgctgggattgtaggcatgagccacctcgcctgacctctgtaccttattttgaagctattattgttcatagattcttagctcctccactccactgtgctgtgaactcgacattgctacacagatgctcctgttaagctctttgagtgcccatcagattcaatctaattcaaatctcaatcaaattgtgatgagaatctgactgtggaggagtggagagaatgccaccctgccagtatggagactggctctccagttttatagcatatgaattatatctcaataaggctgttcaaagaatctgagacttcagtcactccacaaagttagcaaagagattaaaagtaaatatggcaaaatgttagcttttctgagtgatgggaatcacaaaatattttgtcttctttatacttctctgttttctaaattttctacaaagagcattggttacttttatatga

SEQ ID NO: 173703 - DNA, 526 bp, Homo sapiens
agacatttgtcctaatgctctccctccccatgacccctacccaccaacaggtccagtgtatgatgttcccctccctgtgtccatgtgttctcgttgttcaactcccacttatgagtgagaacatgtggtatttggttttctgttcctgtgttagcttgctgaggatgatggtttccagcttcatccatgtccctgcaaaggacatgaactcattcctttttatggctgcatagtattccatggtgtgtatgtgccacattttctttatccaatctctcattgatgggcattttgatcagttccaagtctttgctattgtaaatagtgctgcaggaattgttcaactctttcagttctgcaaggtagccagaaagtcatattaggagccttatctggaagttctccaccaatcatactcccgaacatcactgcatgtgtttttacagctattgccaaatggtttgttgaattaaaaaataagaatgtgtgaaccagctttcaagtcatggtttctgtatttattaaa

SEQ ID NO: 173704 - DNA, 169 bp, Homo sapiens
actgggctcaggtgaggggccaactggagtgaaccttgggcaactcttcacgggggctaaccttccaccaagagggtcccaagcagaggtaatgggtttacagagcagagctgacttgggtttcacataggccagagggtctcaaagctgccacatattggcctatcag

SEQ ID NO: 173705 - DNA, 714 bp, Homo sapiens
ctcccttaatttcacctcaccttttagagatttggggagaataccagaacgtgtgggaaaaaaaatattagccaaaaatttaagaaaacgagaataaaaaaacaaaaagaaaaatagagatttggggataataaaaactgagacacaggttagggagcctggctctctaactgcctttggttttctactttctacggaaacaacattcacaacagaaaactacatatatcatatatgtacaactctgcattttcataaactgaacacacagttatgtaaatagcatccacaacaatattttagcaaatagtgctcaaataaaaactttgccctccaggggatatttggcagtgtctggggacatttttggttgtcttaccttggagcgaatatgataaaggtatggatgctgtgaaacatcctacaataaactggaccaccccaacaacaaagaattaccctagccccaaataccaatagtgttgttgttgaaaaatcctggttatagcaacccagaaaccttcctgtactgcttctccagaaaggacttttaccacaaaaatgcaagactccttatgctctggtagaaaagctgctgtaacatactgccatgaggaggtggtacagagcataaatgatcacagatgaaactactcacctgcctggaaagacaagagaggctgcaaggagaaaggaaaatagaacaaacatttg

SEQ ID NO: 173706 - DNA, 344 bp, Homo sapiens
taaaatagagacagagtcttacttttttgtctaggctggtctcaaactcctggcctcaaatgatcctcccgccttggcctcccaaagcactaggactacaggcatgaaccaccatacccagccctcatctttgagataaagagataagactaaacctgaggttttcaggtttaaaaacaaaccaatcgataggttgattatagataacagaacaattccttgaaatactgaaaggtcaatgttaaaaaacaaataatcgggttactctgattggagaggatgggagctggagacctacccatcagcttctcaatcaccacccacccttactctaaggcaggcag

SEQ ID NO: 173707 - DNA, 331 bp, Homo sapiens
aggcattatgatatgtgatgaccattttcaatgaacgagacaccagtggagcttacattgtacttaggagaggcagacagttgtgtagcaagccaggcaggctgggggttctcttgtagaaagggggtttgaggaagccttctgtgaggagctgaaattgaaataattagacagaaccaatgtgagtagcaggagaaaggcaagtgtgaaggatggagtcaaaggtgggcttgaggcatttgaagaggacaggtggccagcagggtgaggaagggagaatgctgtgggaagagcatggagagggaggcggcatccagagtgtgcaaggcct

SEQ ID NO: 173708 - DNA, 753 bp, Homo sapiens
caaaacctgtttcccactcaggtggcctaaaccagtgaccttggaattggcattcatcattacaacacaattcttgggctggacgcatgaaataatgaacaacgttggggaactcagggtagttggtatattgcagttgtggaccacccacaggttacttttctgtagtcattatagtgtattgtactggttttagtgttgttctcaccttctggactgaactattctagatcagagacttgtgtttttcatgccccttttccaggaggtattatgaaactttcgtgttgattgaatgagggaagacgagaggttcttcagttttgcgctcaggtaaaggagtgggtcttacagctcagtcatcctgctgggaaacacatggcaacaggtagaggccacttgataggcagctgtgctaagggtagcataattgaagagcaaaggggcacatctctaggtggagaatctctgcccttattagccactgttacggataggaggtgtaagagggtgcctgatctgtcatgtgggtcagagtgaaaaagaggttgagaaccactgatgataacggaaatatttatatgttctaggcattgggctattgtatttcctatatataatccttacagcaatcctatgaaggagataaatacccttttttgaaaagtgagaaactgaggctttgttaccaggtaatacctggtttttgaaatggtcgcatccgggtacgagctcaatcgtacctggcatagt

SEQ ID NO: 173709 - DNA, 584 bp, Homo sapiens
gaaaaggttgttggggcggggcagatacatatagacctgaacattagaagagatggctagattcaagatatagatttatgaggcatctatattaatagttgtctcaactgttttctcagaagacattaattttctgacataaatcaaagaatataaattggaaatatgaatctctacacccttcttgaaatataaacataatataaatatccacataaatggctcagtacaatgcaatcatgagttagctaccagtgccatataaaatgtagagcagaaatggattagaaaggagaatgccttcttgtatgcttagataattttcttatttcagttgatttagatgtctgtttgtactctggttgcttagtctttaaagtgattttatagggaagcaaacagttacagcaatcaactcatgaaagacataaattcactgagctacagaaataaaatgaaatctgcattgctttttccactgaccgacattcttcctctttacttaaacttctgattgtcaaggcttaattctgtgttttattgctaaaatttctaagtacttaacaaatatgatgagaaccaca

SEQ ID NO: 173710 - DNA, 227 bp, Homo sapiens
gccttcagacccttcctgtggggctcagaggccctgttggttagaagggaggcaggtgcaacgccctgcacaaactcagaaacagaaagtcaggttggaaatctggtacaaccctgctttttacatagggtaacaggcaagtccctgatgcttaggggtttggcagaacttctaaagaaactccacaaagtataggtttcccataaacctgattgctgtaggattgc

SEQ ID NO: 173711 - DNA, 369 bp, Homo sapiens
gtgcctggcctggagacggctgacgtgtgccctggtgaggggccatcgaggatgttgaggagacgccagcagatgttctgctcccaggcggacccttctgtgccccagcctggcctggcttttctctctaggcctcagggagatgtgtcaaggaaccacagtcagtgcggctgggcgccctgctcagccaggagtttgtctgcagagcaggcctcttccccagagcagcggcccagcctgttggagaggtgggtcgtttagggctcaggtccctagagttgtctttggctctttgcttccaggctgtgaaactttagataaagtcttaagcagagaaagtgacatccttgctaattagtcctcttaaga

SEQ ID NO: 173712 - DNA, 211 bp, Homo sapiens
tccttctgagttctggaatgcatttgccagtgaggaaccctcttgggaaaggctggctttctactccctgtattccttgggaaatctttggttggaggcatctgaatgaaagtaagaggtctcaaatttttttttctggatacagaactggcctgcctttcctccttcccaaaccccatcttataattcattcatatctgaacatccatgc

SEQ ID NO: 173713 - DNA, 546 bp, Homo sapiens
cggcacgaggctcaaacttttcaccaattctgacatctaaacaactaacgccagagacaggctctgtgggaccagcagctgcgacctcacctccggtcactggaacactgagctgttaaatgaaagacctctgaataagtcgtgggagccctcgggtcctgcagaccacaagggaggagcgactgatgttcactttggagacgcgggcttctgattgcacccttgccccaggccccgtgaactccaggaaaggatcttccagggacacagacaacagaacaaaatacttgtttgtcttcaaggacttcagggtcttcagcatgttcaaacccacaggtgccttcggggaccaagaggcagagagatgggaggagcggctgggtggggcccgggcagagcggaggacacaggtgtgaatttgtgcgcagccgctgctccctccggccagccgtggccaagtggacattcggacccagagcggccagatcttgtaatttccaagaaagccagaaacccagatttttatataaaatttctgaaatgtta

SEQ ID NO: 173714 - DNA, 327 bp, Homo sapiens
cctccgaaagtacaggcatgagccactatgcacagccttgtttacttttaaaatcatgaatggctgatgaattttttccagtgatttttctgagtctattgagatgaccatgtatagtttttactttattttgttaatatggtcaatttaaatgtttgatttttaaatgttagcttgcattcctgtttgtaattgccacttggtcatgatcttatccttgtcgtacattgatggatcaacttgctaatagtttgttaagaatttttatgaacatgatcatgaggggtattgatctttatcttcttgtaataaatttcatacacgtcc

SEQ ID NO: 173715 - DNA, 677 bp, Homo sapiens
tcacttgaacccgggaggcagaggttgcagtgagccaagattgtgtcactgcacttcagcctgggtgacagagtgagactccatctcacacacacacaaaaaaaaaatttagccaggtgtggttgtgcactcgtatagtcttagttactcaggaggctgaggcaggaggatcacttgagcccaggaggtcaaggctgcagtgagtgatgattgcaccactccactccagtctgggtgtcagagcaagaccctgtctctaaaaacaaacaatcaagtgacagtccctaggagagttattccaggcaaaactatgttcccagagcttggtacttactgttgccaaagaccacagcaaatgcataatatgttcatcagagtgaaggagggtgattgaagaaaatcttcaagtttaacaaaataattatttactgtccaaaaattataatcaaaagtttgcttgttgagctgagtcaaaacaaagggaattcattttagataaacatgattccagacatcatcaggctgcagccatatctaccaaagctacatctgttaggtcagatacttgagtcagtctgacaagatcccttcttctaggaacatctgttttatttggcatgaattggtgggtggtggaaggatccttccaaccctgagagtctgtgagtgacctttct

SEQ ID NO: 173716 - DNA, 201 bp, Homo sapiens
tcaaactcaaatttccctggttgtctcaaggttattttttgtagctggtttcttttttttctgaacaaggattcagtaagttcacacactgcatattgctgtagctcagcagtatcctaaggtctagattctagaatagtcccccatttccttttgttttccatgacactgactttttttttttttttttttgacagaggc

SEQ ID NO: 173717 - DNA, 523 bp, Homo sapiens
gaaatgaaaaccagaggtggctagtcattctggcaatatgactggctatccaaaagcaaagactaaaatgctagggttgtacagtaccaaatacatggagtttggagggcaggggtgttgattaccctctaaacatcctattctaacccctctggaattgcatgagcaggagggtgccaacacttggaagacagccccacagagctgcgtaggactccagcaagacagccaggacactcactttctggagaagggcttacccaggtgtaaaatgtgaactgcctgtcagtttagaagagccaccccctttttcctgattatagtagcccaacatggctctactggaaatttctgagacttactgcaacacaaatagataataactaggcttaaagtgattttgtggaataagaaaagtaggtttctaaatctaaaagagaaaaatacacacatagctatagccctgccataaggcagcggggtggactgaataaatctcactccaacattattgagccaggca

SEQ ID NO: 173718 - DNA, 651 bp, Homo sapiens
ggaacaaaggagacagggttatttataacctgacgtgtccaccctaccactctgtccagtttccactggctagaacgggaccttacattctgtatttgtcctgattggctagcaacttagaactttttaaaagaagtaaaggtagatgagaacaaaggaaggaggaagtaacttgtggaatactgagaaaggtaaaaacaccttcaaataaggaagaggaataggctgtgacctaatgcttgcttggaccagtataagcatgctagggcaaatatttaggctaaattgtgggagctaagaacataaagtgtattgatttctttatcatggctagcagatatttaagaatgttagcacaggtctttgaatacattttgcgtctaaccgagaagttactatttattcctaattaaatggggaggaaagtctttgaagaggaacctctatttactttttacaattccccctttttattttataattcctcttcaaacttctttaatatgttttgacttaattgctttgtttgtccttctaagagaagtaatttttccaaatagggtggaggagagttaggagttaactctgtaagagtggtagagacaagtttttgtataaaactttgaaggcagtgaataatataacagccta

SEQ ID NO: 173719 - DNA, 335 bp, Homo sapiens
tcaaggtggaggactacagagagaggaaaatctgcaggctgtgtcggacttggacaccccttttcatcttctcgaggaaggcatggggctgggcacctggctgggggccataaaccatcagtctggctcaaagacttgtcacacaagacctgggggcctggagccagggtggggcagctggagcctgagatgtggcctagtcacagatgtgctatgtcgggtctctaggaaagagcccagcccttaacagggtgagaatgtagacagttccttctcatgaaggcaatcagtagatgttcattaaacccctgttaggtatcagatgctctgcttgc

SEQ ID NO: 173720 - DNA, 366 bp, Homo sapiens
ctcaaccttgtatgggctccattttcccccattctacacacaattaaactgaggcacggaaaggataagtaatgagtacaaggtcactgaggcagtaggtagcagagctgatatctctatttttaaaagtgatccaggtaccacagtttgaaaaacaaaggtcccaacaaatggcatcagacattgggcagcaaatactgctgcaggactttgtatatgtttctccttatttgtctttaggtgtttttcgtatgtaagacacaggcagtgcaggggaaccttactgttttctacagaatgagaggggtctgagtccccgtctctctgaagaaaccacttttgtgtcttttatttaactcatcatgt

SEQ ID NO: 173721 - DNA, 267 bp, Homo sapiens
ctgttgtgttatattcatgagcaattgctaggtgatgaagctttgtatttgaatagcatttgacaatctacaaatgccaagtattattatgtgttaatgagtctcgactttgcatttccaagtctgcgcctctgtcctgaactctaaacttacatatccaactgcctactcaacacttcacgtagaaatcttatggtttgaacttatcctgttcaaaactgagctctcaatattttttcttcttccttcatttccccaagctgctcc

SEQ ID NO: 173722 - DNA, 390 bp, Homo sapiens
gcatacaccagcttctcaactaattctaaatgaaggacagtttaccaccaaaacacatttacacatttctattacttttggtaaatattcgagttctttgtgtcagccacaaatttaacttttcagagcttttccatcccaatccattgtttaaatcactggcttaaaattgctaagtatatcgagaattaacataaggctatgtcaaactacaaaggacaccctgcgttggggaaaagattaagtcccacgggttcctctgtgggaagtcaatataccttttaggtttttagtttctctttcaacctatctcaatcccaagcctgcatagcaatggattaatttaggacccaaaccaaatcctcttgaacagcatgcattaagcccaag

SEQ ID NO: 173723 - DNA, 242 bp, Homo sapiens
ggtagaaatcagaatgccagtacaataacttgcaattagaattattactgtcaagttgattaaaattcctgtgtcttttagctagggcactcaggctgctgtgtcattgagatagatgagttaataatactaattaagactttgtgtattaggttataactttcctttttcaggatgttgaaattttactctaactttctaactccttgagactacatccttgttccctgccttgactgtga

SEQ ID NO: 173724 - DNA, 509 bp, Homo sapiens
aatcaaacccaagttctaccatacagtcacttttgcccggtgagcttaatttagacacatagaggtcaaattacaaatggctgagctcacagaagcttcagtttctggttctagccacagggggagaaagcagagctggagacattcccagtttctaggttctcatacaaaaaccaactggctgccacagcacagtcaccgaagagggaagaagacaaggagaggtcagagttcaaactcaattccgggaattttgtcttgagattgtttgcctttctttaattttcagaattgagattcttcctgcctgggtctattacaattgactttaaactggaggaggttaaaaaaagtttcatagagtgagcaaaaaaacaatgcatctatttacgggccaagctactctcccctcccccatgcaggcacaggcaggcagggaacgatttttctggggaaagatttttctttcttttttaacgcaatgacaaacactatttactaatgttaaa

SEQ ID NO: 173725 - DNA, 106 bp, Homo sapiens
cagaatcaacatgagaatccagatagcttgcctcccacaccaaccaccccctcacatagtctaagctgcagaaaaatctgactcaaaagttatctcagacagaatc

SEQ ID NO: 173726 - DNA, 369 bp, Homo sapiens
catgggtaatatttgttataagtagctattctccaaataataaaaatgggcacttcaggcaaacagccaacattgaggatctgacctgggaaagctggtatgtgaacattaagccttccaattaaggtaaagaacggggtgggggagagggaaaaggtgaggtgcgttgttgataggagatgagatgcaaatccttaataaccgtgtacactcagcactaaggagtttagatcttaacctgtaagtgacaggatccaattgaaggtggcaatagcatagattagactctatcaaggacagaataataaatgagattctgctaagtgagaaccatttaatgagtcttttgcagtaattcggatatactat

SEQ ID NO: 173727 - DNA, 579 bp, Homo sapiens
tgagccggtccaaccctgaagtgccaaatacttgctttggcattgaaagtgttctttattttatcttggtgcctgacacactaatctgtcctgtgctgcttcaaggaagcatttgccaattttaagaacatagggcatcttgaagacttaccatgccagctttgatcactgaagtaagtggacggataggcagttagcaacaattaagttattcttttactctgttgcctttgggaatcagaagtgaatggttttatcttaagtaccaatggcttacataagattctagcctcttgagggctggagtcttttgaatttggcaactttctgctttttttgttttccacctgcagtatctctggttatgggttttatgtgacttagaaaacaaaaataaaaccttttaatccacaggacaatcagaagtgagactcttggcacatttacatgtggattgaatgattagttcaggtccagggtacagtatcaggatacaagtgtctttcagaagtccctgaaactaaatagcttaaaggaatgactgttgctacttgtgcatttagtctgaaagcaaaaaat

SEQ ID NO: 173728 - DNA, 310 bp, Homo sapiens
ggacagtgggctggaacagaccaaatggtttcagaagagataggaggaaatcagaacatttgtgtaggattcaggtggtgcaatcagctgaccttaacacagtggaattggagcctgactgctctttctaattgtattgcttttgtcattattgtttaaattaggttctggcttcttgttaattagtatgcagttagtataacactatctccataaaattcctctgcagatcgcattactaaaacataacttgatacctccttagtcagcataagccccatgtgttaagttcttttccagacaaccacca

SEQ ID NO: 173729 - DNA, 376 bp, Homo sapiens
caagcccccaccaacactgatcctaaaggaaagaaagcatggctgcagcaggcacaacaggacacagccccacccttggaacatcgtgctcctggggacaagacactggatgcggaagctggcatcctagaactgactttttcgttgagtattattactgtgtttcctggattctaaaacactattgattgcaagatgcaccattattcttttctttcaaatctagatctgcaaacgccatcattttaataactgcttttaggcggaggaaaagaaacacaaccacatcaaacgcatgcatcaactgaaacacccatcctgatttcgggaccctgaaaataagaaaaatacagcgcatcttaaaactgaaatggga

SEQ ID NO: 173730 - DNA, 199 bp, Homo sapiens
attcaaattatgattctttttataatccaaacacatcctaaatccaatagggatgatattaatatgtcggatacttataactttttttaaaggttcttaagggaaaaatgggtttgttactgaagaatatatactaatatagtttttgtgatgcttttggctgagttgtttgttttgcctataagcactttagctttac

SEQ ID NO: 173731 - DNA, 451 bp, Homo sapiens
aatgttacatgatagcttgtagggaatatcttctgtcctaaaagactttataatccatgaaacccgaagaagctgaacactgaacaacagactgactacataaaaagtaatacttttctgttttatagaactcttcatattttagagcaagtataaatgcaaatataatacaccaacaaacttacacatttttatttgactggggaattcataagtgttccttttacttttttctggtatggaaataaagaaataatatgctgggaagaaaaaaaaaaacccttttcatagttgttgtattggagtatgtgtggtgaggagactgtctagactcctaatagataatgtaataatgtttgattagttttctgaatttcctcagccactgactgagtggtaaaatctttacaagaattgaagctgaattagtaataggctttggagcacctca

SEQ ID NO: 173732 - DNA, 217 bp, Homo sapiens
caagctcctaagactgcctaaccaaaacaaagacactggtatatattttccattcatttatgagttttcaaaaaatttaggtctttattaagagttaaatataaacattaactcattgtgttacagagaaatagggtctttggaggaactgtttgaacatgggtcacagttacttgtttatgtaacacgatttagaggggtacaaagatccttggca

SEQ ID NO: 173733 - DNA, 584 bp, Homo sapiens
catccaggcaagccatcaacccattcttcagaaagcaggggctaaaatgcaagatgtttaaagccctgcggccacactgtgtcattctgacatcctgggacaaatgagatgattttaaatgtgcctggcgaatttgatcatgagactgcattttctctcgtcggtttcggcatgaattgtcccagagtctcagaaaggggggatccagggcagaattgccagtgtctgtctcgttaagctcagaatcccagcatcaggaagacattgaccggcctttaagattgcagcaagcctcgaggaagccgtccaaagggccagagtgaccggctccagttggccaccggcggcccgcacagaacctcactgcctggcccagaccagagtgagaacgcagcagcctccagcagagctgcacggccatgagggtccctgagtccagaactgagctctagatggtcacacacaagtgcccaggacaggactccaggctggatgttttctgcgaacaccgtggggaccctccctaggcaggattaaggaaaccccatgctcagtggggggcaagaccccagcctggccctgcc

SEQ ID NO: 173734 - DNA, 887 bp, Homo sapiens
tcacacccatcgtgacgctttgaaaatcgtttagattcttcctgcggcgctttcgatcctgtcttctctctggtctgcatatttttgcattattattttaggaataatctataaatgtgccctttgccttattggagcgtattaattccaaaatgcctgaagccaaaaccgtctacagaaggcagatgttagggtctgagaccccaaactagcatctgtttcctatgtcatcacccagttcccgtttttctgttgctgtctcggtcctcttctcacttagctgaaggtctttagtataaatagaatcctgatgggcctgctccgggcttcctcacgtgcgcttgtttcccgtgaaattcgtttcagccctgcggccacactgtgtcattctgacatcctgggacaaatgagatgattttaaatgtgcctggcgaatttgatcatgagactgcattttctctcgtcggtttcggcatgaattgtcccagagtctcagaaaggggggatccagggcagaattgccagtgtctgtctcgttaagctcagaatcccagcatcaggaagacattgaccggcctttaagattgcagcaagcctcgaggaagccgtccaaagggccagagtgaccggctccagttggccaccggcggcccgcacagaacctcactgcctggcccagaccagagtgagaacgcagcagcctccagcagagctgcacggccatgagggtccctgagtccagaactgagctctagatggtcacacacaagtgcccaggacaggactccaggctggatgttttctgcgaacaccgtggggaccctccctaggcaggattaaggaaaccccatgctcagtggggggcaagaccccagcctggccctgcc

SEQ ID NO: 173735 - DNA, 517 bp, Homo sapiens
cttctcattagtgatagtgagtcaaaacaaagttgatttgaagggagttggtgtagattctcacaggggaagttcccttatgctttaccacgtgctggaatcttttgaagattcttaaactgataagcaagagtctgtggatgcgttgtatccttctgcttgatgtaattaatccctgtggtggaatcaggttgatttgtttgaaaaatgccattcagcaggtcttaaaaagcatagtctgattgtggatttagtaaatatgatgtccacttctgtgaaattccctgctcgcttcacttctgtatttcagaaggtctctttctgctgggtacccttttacttagtcgtcaaaaataggtaacttgaacttttctgatagtttctattggggcctagaagaaatggtctcagtaaagacttggggtataatgatgtggctggtgttagagcagggcctgagtgccccatgtggatctaatggtcacctgcatcagtggatggcagggcctggaaggag

SEQ ID NO: 173736 - DNA, 463 bp, Homo sapiens
aatgcgtttaaattttgtggttttcatatataaatattttcctaggtgctatagaatgaactggcacttttcagtaacttaaatctggtttactttttgatgagggggaagaacagacttatctaatgatactattgaactaatagggaggcagatttgagtcaaagaagaaagcactttctaaaatattttttacccttcccaaattgaacagggtgtggtcatccagtagtttgagactacttctcaaaacactagatcattctcctacagatattacagattttatcatggtaaggggaatggctgtacctattaagataattacttttcgaccctgaaaatagcaacaagaattttgagtttcagccggtttacaatatcgagacaatgtaacacacctagaaaaggtagtgctaggttctccattttaaaaaaaactgctctgggttttctttgaatt

SEQ ID NO: 173737 - DNA, 650 bp, Homo sapiens
atgatgtgggtggcatttcactatggactacagcattaaatcagatgccgttgtgtcaggcagggatgctgtgcctccgttttcctcttctaaagttaccatacgaaggagtggtgaggcagcttttccctgctaacacacccatccctcgtctgcaggctggcactttgagacctctcttctacttcattgctgttttcaatcacgtccccacatttgacctggttatgccgggccatctcccagagatcctatcacatgacctgtggatagctcagcttgcagcagctcccattttatcttgttctgactcaggagctttgcagagaacggagtgtagttttctaccaggggtcaagatagggcctgtagaggttgtttgcttcctgggatctacattgcccaccaagaacacatgggcctgtagattttgaggtttttcttgggaaaattggaagagctaactttatgactttgcatgtttggagggatgaatgcaaactgacctttatacttatcggtcctctcttcctcccctctgatgcaacagatgtccctagtctgaggccagtcctcccactatgtcctgtggtccatcccttctcaccttctcaggagcctaacaccactgacttttccttctctctact

SEQ ID NO: 173738 - DNA, 204 bp, Homo sapiens
tatcaaaccaaagcactttaaaaaaaagtaatatgcaagactgtcggagaaaactgtgattgttactgaacagatgagacactttgagaaaagataaacaattattcatttttgtttaagacatcaggagtactaataaagaaccaactggtaaactgctgataattccatataatatatctagcactacaactacactgaatc

SEQ ID NO: 173739 - DNA, 656 bp, Homo sapiens
gctatgctgtaccagccaaggacctcctttgtttagggaaggagccattcttttaagactgggcttggtaacacaggaaaacagaaaatccagaagggaatgcatgaaaaagaaagctttttccttccagacatcaatggtgaatttgaaagagttttatagtgtgtgtgcctaagtagaattgtgaaggcaatagagctaattttcgcagtgtctgattttatgctagtttagaatgtctctctttttaacatttttaaaagtcacccttttatagtctcacaaaaatgctgtaataaagttttggaaatgttcctagacagtttggagtcttttgaactcatggttcatccatagcatcaccattctggactttgcctcaagatggtgacacattgttcagccaaaactcattttctgtgtatctgttgccctctagggactccaatatgaaaagaaacatatgatatggctatttgccaggaatcatcaggcaattgacttttcttcccatcactcattcagagttaatcttggttttcattcttgtaaacttgtatttagcacttgtgtgtcctgaacaaaattaatttttcaaaaaccaacctgaattatcctctcaaatcctagatagatggcaaacattacagtgggtc

SEQ ID NO: 173740 - DNA, 352 bp, Homo sapiens
tatttgctgcaagcttaaatccgtcacggtcactctggacttacaaatggctttaattcatttaatagatcaataattatttctaaaaatagttctaatttttgactagtcatgaggtaagaattattaattcagttcattcaaagggagactgtgtagcagaatggttaagggacacagcttctcaaaggagactacatcctgcgtttgaatctcaagtctactagttactgtgttaacttggtgaagtaacctcccctctctaaacttccacctcattttaaaaatgagtgtaacaacaattcctaatcaatattctaattcatatggttaatgtgacaagtaaatgaat

SEQ ID NO: 173741 - DNA, 1192 bp, Homo sapiens
  misc_feature (641)..(641): n is a, c, g, or t
  misc_feature (648)..(648): n is a, c, g, or t
gcagggcggtgcgcgggaagggaccccggacccggaggtcgcggagagctgggcagtgttggccgctggcggagcgctggggcagcatgaagtgcctggtcacgggcggcaacgtgaaggtgctcggcaaggccgtccactccctgtcccgcatcggggacgagctctacctggaacccttggaggacgggctctccctccggacggtgaactcctcccgctctgcctatgcctgctttctctttgccccgctcttcttccagcaataccaggcagccacccctggtcaggacctgctgcgctgtaagatcctgatgaagtctttcctgtctgtcttccgctcactggcgatgctggagaagacggtggaaaaatgctgcatctccctgaatggcggagcagcgcctggtggtccagctgcattgcaagttcggggtgcggaagactcacaactgtccttccaggactgtgagtcctgcagggccgtcttcgacccagctcgtgcccccacatgctccgcgccccagcacgggttctgggggaggctgtttctgccttctctcctgcactggctgaagtgacgctgggcattggccgtggcgcagggtcatcctgcgcagtaccacgaggaggaggcaganagcatgncaaagcatggtgactgagatgtgctggagaggaggatttccagcagctgcaggcccaggaaggggtggccatcactttctgcctcaaggaattccgggggctcctgagcttgcagagtcagcaaacttgaatcttagcattcatttgatgctccaggcaggcccgccatcttcaccatcaaggactctttgctggacggcactttgtcttggcacactctcagacacgactcgcactcgcaggaactgggtccccagagcgtcaccagccagtggctcagctcagggctcacagaacaacccaaccggacgaatttggcaatgacgacttgactcttacatgatcggcatgggaacactataggcaaggaggtccggggtgctgcctcatcttccgggggcgcaagcgccaaaaggccgggcccccagaggagaaagggggccctcggcggggccccccaaaacgggtgtggacaaggggaggacacaggcgcgggcgagagggcgcctctcatccgcgacggtgaccgcgtgccgcaagagga

SEQ ID NO: 173742 - DNA, 915 bp, Homo sapiens
  misc_feature (364)..(364): n is a, c, g, or t
  misc_feature (371)..(371): n is a, c, g, or t
gcagggcggtgcgcgggaagggaccccggacccggaggtcgcggagagctgggcagtgttggccgctggcggagcgctggggcagcatgaagtgcctggtcacgggcggcaacgtgaaggctctccctccggacggtgaactcctcccgctctgcctatgcctgctttctctttgccccgctcttcttccagcaataccaggcagccacccctggtcaggacctgctgcgctgtaagatcctgatgaagtctttcctgtctgtcttccgctcactggcgatgctggagaagacggtggaaaaatgctgcatctccctgaatggcggagcagcgcctggtggtccagctgcattgcaagttcganagcatgncaaagcatggtgactgagatgtgctggagaggaggatttccagcagctgcaggcccaggaaggggtggccatcactttctgcctcaaggaattccgggggctcctgagcttgcagagtcagcaaacttgaatcttagcattcatttgatgctccaggcaggcccgccatcttcaccatcaaggactctttgctggacggcactttgtcttggcacactctcagacacgactcgcactcgcaggaactgggtccccagagcgtcaccagccagtggctcagctcagggctcacagaacaacccaaccggacgaatttggcaatgacgacttgactcttacatgatcggcatgggaacactataggcaaggaggtccggggtgctgcctcatcttccgggggcgcaagcgccaaaaggccgggcccccagaggagaaagggggccctcggcggggccccccaaaacgggtgtggacaaggggaggacacaggcgcgggcgagagggcgcctctcatccgcgacggtgaccgcgtgccgcaagagga

SEQ ID NO: 173743 - DNA, 762 bp, Homo sapiens
aatgttggttcatcagttgtaacaaatgcaccaccccatggaggatgtggataaaggaggaggctgtgcaggtgtggaagtagggaggttgggatctgtatctccctcaattttactgtgaacctaaaactgctctaaaaaaaataaagtcttagaaaaggaactaacgatacctacagaattgtgaggaggaaagatgatgttggcagaaggcctagcacagtgtttgacacatagtaagccctcagtaaatggtagctgctgctaaaaaatatcatctcactatctatcgtattggcttgatctgttttctttaaaacatctttaagatgtcttctacctgctgttttaagctcatggtagggataggtaagcttaaaacaccagccttttgaaaataaccacttgtgtttgatgaggacgtttatgaagcagatccaatatttaaaggaatcttagagtgaaatactttgggaatggttaccctttaattatggtgtctttctttgaactctcaagcttcctttgtatgattttctccccccagcgacccaccgcccttatctgcatgtgcctacatcactgtctgaaccttcttttggctctccctactaattaccacctccctctgctgctcgccctcttcactgctgttctagtctttacattgttgacagacctgattctctaaaacatccttccactcttattttcttaaaatttacattggcttaaaaaaaactgaaacaaacaaaaaagcca

SEQ ID NO: 173744 - DNA, 1296 bp, Homo sapiens
  misc_feature (783)..(783): n is a, c, g, or t
  misc_feature (808)..(808): n is a, c, g, or t
  misc_feature (833)..(833): n is a, c, g, or t
  misc_feature (926)..(926): n is a, c, g, or t
  misc_feature (948)..(948): n is a, c, g, or t
  misc_feature (954)..(954): n is a, c, g, or t
  misc_feature (959)..(959): n is a, c, g, or t
  misc_feature (972)..(972): n is a, c, g, or t
  misc_feature (975)..(975): n is a, c, g, or t
  misc_feature (1012)..(1012): n is a, c, g, or t
gaacagaagcaccccatggctaaggatggggttctgaccctggccaacaatgtgactccagccaaagatgttccaccactctcagaaacagaggcgacaccagttccaaattaaatgacatggaaattgcacaaagcacagaaaaggaataagtgaggattcccatttagaatctctgcaggatgtggggcagtcagctgacacctactttcatgatttcaccatgaaaccatcacatggaacggggaaaagagtgcatgcttgccgggccgaggaggattctgtgttagaaaaactaggggaacacggaaaccatgctacagtcaaccttctgacgctttcttcagatgacctcaggaatagccaggccagaagaaggaaggcctgtggtgagtgggacaggaaatgacatcaccaccccaccgaacaaggagctcccaccaagccagagaagaaaacaaagcctttggccaccactcaacctgcaaagacttcaacatcgaaagccaaaacacagcccacttctctccctaagcagccagctcccaccaccattggtgggttgaagtaaaaaacccatgagccttgcttcaggcttagtgccagctgccccacccaaacgccctgccgtcgcctctgccaggccttccatcttaccttcaaaagacgtgaagccaaagcccattgcagatgcaaaggctcctgagaagcgggcctcaccatccaagccagcttctgccccagcctccagatctgggtccaagagcactcagactgttgcanaaaccacaacagctgctgctgttgnctcaactggcccaagcagtaggagncccctccacgctcctgcccaagaagcccactgccattaagactgagggaaaacctgcagaagtcaagaagatgactgcaagtctgtaccagcngacttgagtcgcccaagagcanctccancagtnccatgaagaaaancancactctcagtgggacagcccccgctgcaggggtggtncccagccgagtcaaggccacaacccagtgccctccacggcacatccacaaaaccatatacatagacaagaagcacaaactacggcacaaaccacagaccaaccaaaacaccggctcaaacggccatggacaccaaaaaactgaacctgatccgaagaatgaccgacccaaggacaaatcagaacaagaacgagacacaaaaggaccacaaatgacggcaaccgaaaatcacaaaacatgggaggaatgcagaagaaacaaagacacagaagccaaacaggaaac

SEQ ID NO: 173745 - DNA, 742 bp, Homo sapiens
gttgtttcagtgtctttattttagcccttctgctagttaagtaatgtctgctttagctgcttacaacactacatttacatatcaggttaaaagattaaagtaaaattaaaaagtaatccatacttattttgtggaaaactgaaaaatacagaaatacataaaaaggaaataaagtcctgtttcttctcttaggaaaaaacccgccacactgctgtttatacctaaatcaacgtacccaactggcagacagcacgaggcaggtgccactgctttcttctcaccccagggctccacttggaactctcctcaccaggatgacaactctgccctgggcctctgctaacatccctgtggccctttgcgtcagagcctcacctgaggctttaccagacatcctcagttctcctcaaaacagacagctgcagccccagttaaagaaagcactgagggctctctcccaaatgtgagccacagacatgtcaacgggacagggcaagtgggtcccagggctccaggcagcggtgcatgcacatgtggggaggagcgccagctcgctccagaacaggtttcctcactgcttattgtcctgtaaaggctttggcagcctagtaaagcctatgggcctctctcagaataacttttttttttttttttatgagatggagtctcgctctgtcgcccaggctagaatgcagtggtgcaatcttggctcactgcaatctctgcctcccaggttcaagtg

SEQ ID NO: 173746 - DNA, 538 bp, Homo sapiens
ggattcaggcttccctggattcctgtccaggccagagccaggtggactgaggatgcctgcattatttctgagcctcagcgttccagtcctcagtgccaactcttagcaactgtgggaccttgcacaagaactcaacctccctgtgcctctgtgttattccattctattctagtctaactccatgaggtttttggaaaacttcgaaagacctaactcagaccatatgccgcttctgtacacaaccctccacggctcctagcatcctaagaattgagggaaaactcctcaccttggcactccaggtatgaaccttcttcactgtgtctccaagagtttagaaacgctggtccctttgcctgtaaccctcttccgtgccccatcacccaagttctggaaatagggaccccacccacgagcccccactgtactggacatgaggatctcgaccgtagtgacccaagaaggcactaatttggggatggagggtgaggcccagtagaggcagcgctcacctgagtcggggccctcagcgcggccg

SEQ ID NO: 173747 - DNA, 587 bp, Homo sapiens
ttatcttccccatgtccttgtggtaatacagtacagaaccaggctagaagtaggttaattcagagggagataccagtagaactgagctccctgattaagggatgtgaatttaattgggttgtgacagtctgtattaagtgtaaatgctactaataggtttaactgactttggtgtgagtgaagggacaacagaacaaaagaagtaatttgccttgaagatgatcctcttttagtgttgaagtcacaagtgatggaggcccttctttcacttaacgaggccaggaaagctgggttggtctttattctcatcatgcatcatcaatattttaggaaaggtcatattgctgtctttcacggtacactgcacaaccaagtatgattatgtgaccagaagtgaagggaaggagaacatttgcccatattctacccacactgaagtagctcaaaaatgaagagatgaagaaaggaaaatggagttgaccatttccatttaagtgctcattcagacatttagtattaaaatgatgaacttcttttgcaatctttttattgaacgcattgaactaggtattagggtgttatccttg

SEQ ID NO: 173748 - DNA, 360 bp, Homo sapiens
ctcgccggtccaatgtctgatatgagttggaggtttgatatgagttgaaggtgtggaagattaagaggaagcccaggagaaagaactgctgagggtgggaataggaggtgtgccaatttagacatgttgactggaggtagccgctggcctgcaggcacagcagggcctcatatgtggggagagcgttcagtgagcatgagagggcgctgacggaagaatcaaggagagacccatggtcacagggaggcaaagggattccaaatctgtctcattcaaaaacattttcctgtgtgaggccactattctaaatcctgagcagttctttctcctgggcttcctcttaatcttccacacctccaa

SEQ ID NO: 173749 - DNA, 231 bp, Homo sapiens
gacatgctgctctgccctgtcaggaggcactctgtgtcagcttgtcccattgctgatgatgctcactttggtcacctggctgaggtgctgtccctcaccaggtctctctattagttttctcatctttgaagtggggcttttatccccacttgcagggtggccttgaacactgactgggacaacagagtgacgtacccagcccagccaaggacaaaagtgtattcagcaggc

SEQ ID NO: 173750 - DNA, 151 bp, Homo sapiens
ttgccaggagaagctgaagctcttttctagatagagccaaggtcctattcttttcccacttggttctatgccatcttccaatatctctgtggcccacacttgtgtgcaccagcctgactgtgtccttgaattagaactgatacagaaattg

SEQ ID NO: 173751 - DNA, 136 bp, Homo sapiens
aaagaagaaaagaaaagaaagagagagaaaatttaggagaagatatagctcattatctctgaaattatgctttgaattcaaagcacagtaagggtagctaacaaagtctgttttaagcattcatactcctcttctt

SEQ ID NO: 173752 - DNA, 238 bp, Homo sapiens
aaaaaaaaaaaggcaagtctacagttttattgaggataaggttagatacaaatcagagtgctcccaaaaaatgacatcctgagtaggacaaaggtactgtggatttaagtggtcactgatgatcttaaaaaaaagttttggctgggtgcagcggctcatgcctgtaattccagcactttgggaggccaaggcgggtggatcacctgaggtcaggagtttgaggccagcctggccaaaa

SEQ ID NO: 173753 - DNA, 234 bp, Homo sapiens
aaacaactgaaatgcacatctaaaggatgaagaaattggagtgtatttcttcagtggactacaatgcagcaggaaaaggaatgtttggcatctgtgtgtatcaacatggatcaatctcacgatgtcaatcaaaaaaagcagccgcagaacgattctcatagttgactactatttgtgtaaagttacattttttggttgtggtaaaatacatataacatacaattgactatctta

SEQ ID NO: 173754 - DNA, 194 bp, Homo sapiens
tgcacccacacagactgctcttgcacacacacacactcacacacatacacagagactgcccttgcacacacacacacagagactacccttgcgcacacacagagactgcccctgtaccccacacagactgcccctgctgcctctgcttgcctatttttttttttttgggggagcggggacccactcatgtgggt

SEQ ID NO: 173755 - DNA, 5409 bp, Homo sapiens
cccgggccaccgcctccgcccggctgcccgcccggactgtcgcggcccgcggtggcgacggcggccgctgcaaagtttccccggcggcggcggcccgggggcgcatcctcccgcaactgtcaagcgctggcggcggaaatgatgaggcgctggccattttccgagcccgggtttcctgcctgagccccgctcgagcgagccgcgagcgaggagccggcgggcgggagaggacgcgcccagggcgggggcccgcccgccccctcgggatttcgagggcccgggggcgcgcgacgccatgggccggccgggcccagagctcctgtctctcagcccggccgcaccacctgggtctccgccatgaacgggcctgccctgcagccctcctcgccctcttccgcgccctcagcctccccggcggcggccccgcggggctggagcgagttctgtgagttgcacgccgtagcggcggcccgggagctggcccgccagtactggctgttcgcccgggagcatccgcagcacgcgccgctgcgcgccgagctggtgtcgctgcagttcaccgacctcttccagcgctacttctgccgcgaggtgcgcgacggacgggcgccgggccgcgactaccgggacacaggccgtgggcccccagccaaggccgaggcgtccccggagccaggccccggccccgccgcccctggcctgcccaaggcccgcagctctgaggagctggccccgccgcggccgcccgggccctgctccttccagcactttcgccgcagcctccgccacatcttccgccgccgctcggccggggagctgccagcggcccacaccgctgccgcccccgggacccccggagaggctgctgagacccccgcccggcctggcctggccaagaagttcctgccctggagcctggcccgggagccgccacccgaggcgctgaaggaggcggtgctgcgctacagcctggccgacgaggcctccatggacagcggggcacgctggcagcgcgggaggctggcgctgcgccgggccccgggccccgatggccccgaccgcgtgctggagctcttcgacccacccaagagttcaaggcccaagctacaagcagcttgctccagcatccaggaggtccggcggtgcacacggcttgagatgcctgacaacctttacacctttgtgctgaaggtgaaggaccggacagacatcatctttgaggtgggagacgagcagcagctgaattcatggatggctgagctctcggagtgcacaggccgaggcaggctggagagcacagaagcagagatgcatattccctcagccctagagcctagcacgtccagctccccaaggggcagcacagattcccttaaccaaggtgcttctcctggggggctgctggacccggcctgccagaagacggaccatttcctgtcctgctacccctggttccacggccccatctccagagtgaaagcagctcagctggttcagctgcagggccctgatgctcatggagtgttcctggtgcggcagagcgagacgcggcgtggggaatacgtgctcactttcaactttcaggggatagccaagcacctgcgcctgtcgctgacagagcggggccagtgccgtgtgcagcacctccactttccctcggtcgtggacatgctccaccacttccagcgctcgcccatcccactcgagtgcggcgccgcctgtgatgtccggctctccagctacgtggtagtcgtctcccaaccaccaggttcctgcaacacggtcctcttccctttctcccttcctcactgggattcagagtcccttcctcactggggttcagagttgggccttccccaccttagttcttctggctgtccccgggggctcagcccagagggtctcccagggcgatcctcaccccccgagcagatcttccacctggtgccttcgcccgaagaactggccaacagcctgcagcacctggagcatgagcctgtgaatcgagcccgggactcggactacgaaatggactcatcctcccggagccacctgcgggccatagacaatcagtacacacctctctgaccagtgaggaattccaggcctcaacagctgcccttgaggagcacaggcagaagtgtgaacttgtgaatgtaattgatctttccttccttccagagaaagatttaagggacactgttaactgctcgtgccagtttggaagtgacccttctattaggcctgttgaagggccctcctgtaggtttcatctatccacctggctttctccttattgtttacagatgtagttcttgttagaggatgccgctagctcctgcccggggtccctatgcccagtccccgttactcttagagaaaggagttggggtgagggccagagctggcagtggaaacttgttctctttttcactgacactgtcacagcggatgacagactttctacggggaggagggggggatcatcaggaagcccagaacactaacaagcggttctcccatctaccgtcagtccacatggcaggtctgctgtgtccacaccacagatgaccacatctaatcctgcttctactctcagctttaggacaaaagctctgtcagaggcacaagctgaaggtcaaaaatgatttaaaacattttacctcagactaatttctttaaaggattcaggttcaaaacttaaccactgcttatttcagtgcactgtttcaactaacacccatgctatttttgtagtcagaaacagctatgcaaaccctacctaatttacagtctgagccagcatgctggcttgtctactgcatcctcgggacagtcacctgccactgagtggccactgtccttcctaaatgtcaagaagtgaagtatgtcaccctttcagggaaattcaggcaattactgaaataggagggtggcaagaacagttctatcctggtgccttacgaataaaaaactggattctggtttacagcagctttacagtgatagttaaattaactggggctaggggaagagcaagcaaaaagggaagaaggactcctaggccctttctagtaaatccttcagcaacaaggctggcttggtgccctccaagcatctaatggcttattaaattatcccacaagtgggttttaggctccttttttgagccaaaatggaagctgggaatctggtgccataactaatgagaaactcctttaatagcccacaatcagtgttctgttctagctggctactgcttcactggattgagaatctatctatctccttgcacacatgggcacacacaatctccaccatccagggaggtcctgaagtcaaatctctatctatacaagtgatacaattcatagggggctggctcctcccagaacctgtctggaggctcagaaacgggggcagtgacagtggagtcagctgctcttgggtgccagcagagccattcagtacaacccccaggctcacagcagtggcttctaggaaactgggagtttagatcagctttacagatacatcgatcagaggctaaaatgaaacctcagcctaaaactcataggactgactgcctgggaggagggttaggtctgcttcttccacttatacttagtctctgtgctccaagaggtcaaatttttgcttctagaatttccttggggtctttcagagggtgggggaacaaacccctatgcacttttcttttttttttttttgagatggagtttctcttgtcaaccgggctggagtgcagtggtgcaatcttggctcactgcaacctccaccttcctggttcaagcgattctgcctcgacctctcaagtagctgggattacaagcaccagccaccatgcctggctaattttgtatttttagtagagacagggtttcaccatgttggccaggctggtctcgaatgtctgacctcaggtgatccacccgccttggcctcccaaagtgctgggattacaggcgcgagccaccgcgcccagcctacaccacttttagtaccaacactcttgggtgatttcatggaccctaaagcagacctgacactgatccagatttgcagtccatttttaaggacacctgtctttatttcctcaaagtcaagcagctttctctggaaaatgaatgctaattagtgtgaaccaaaagagtaagtaagagtctgaagtttttttaaaggagaaagcttattatggaaagtcactggtcctcccctccgcacaggaaaggtacccagtagataatgaaccaaattaagttccctccctccagccagaagttaaacatctgggatatgacgtcttcatgccaggggcactcatttcttagcagcctctctacatacatctctcaggtggtgccaagaggcacaccaggtagagcaaacttagcagctctgactaacaggctgcaaagtgcaagttcagattctgtggcagagatttggaaggcacccacctccagactgcttcccgtccaagttaccaggacagctcaaaaacatgctgacagaaaactcccatggctctaggaagaagtgacactaagccaacacctttctttatgtgggagcagaatcagctgatgaaggggtgggcagcagtgtggggcaggcaccccactggctgcagctagcccaccataggcacagcacatcccaccactctccttccagtcctgaccaggccccagccggcaacttctaccgagagccatggctcaacaccaaactggacagtagacatcatgatccctccagttagctctaattacagaccccaccagtacagcttgacagctcccggcaccatcccttccttcatctgacttattgaacttttacaaactaacagtcaccagcaccaaagaattaagtcaactaacctgccttgaattttagaccagcaatccatatggctttatctggtataaatcttctgcctttgatcatttctggaccgtaggaaaaaggaatagcaatcattaaaatcttgggccagagaacactatttttacataacagtttcttaacctaaagtcaaggccttggactcttccctgagggttgcctgagattccttcatgctttctattcaggactaagtcccttactgcaaatgtgttagctctaacatctcccacaagctagaggaacttgcgagtatattaacaaggacacatctgacatcctgtgtttggttagaatatacagcacattgtgataacataaagtggattcatcttgtatcattataggcagaaggtatttggcaaatttttatgtattgttttatgtactgtacaagtaacttattcttgaataatgcaaattttgctataatgtacaaattgctatatgtgaattaaaaagttttcagaatcttga

SEQ ID NO: 173756 - DNA, 246 bp, Homo sapiens
tgataacataaagtgctgtatattctaaccaaacacaggatgtcagatcctgtgtttggttagaatatacagcacattgtgataacataaagtggattcatcttgtatcattataggcagaaggtatttggcaaatttttatgtattgttttatgtactgtacaagtaacttattcttgaataatgcaaattttgctataatgtacaaattgctatatgtgaattaaaaagttttcagaatcttga

SEQ ID NO: 173757 - DNA, 397 bp, Homo sapiens
cggaggcgttgaatagcgggcatgtgagaggagggaacctaaagcccccacagctgctgacacagcccccaggtttgagcttgtctcccctatcacccatccccccatatagcttaatctgatgggcatctggtggtccttccctgcagtggccagagcctgagctgtccaggctgaggtttcgactgaagcaggggttgtcctgcgcccatgtgcccacacgctgcaacctggctggagcctctggcataggacacccataccaccaggtagctgtggcggaccccggctctgatacttggcaggcttgggttgagattgtggctctaggcctgggcggctctcaagggctgctgtggggagttggggaagaaccctgggttgtgctcagccagca

SEQ ID NO: 173758 - DNA, 568 bp, Homo sapiens
cccgggccaccgcctccgcccggctgcccgcccggactgtcgcggcccgcggtggcgacggcggccgctgcaaagtttccccggcggcggcggcccgggggcgcatcctcccgcaactgtcaagcgctggcggcggaaatgatgaggcgctggccattttccgagcccgggtttcctgcctgagccccgctcgagcgagccgcgagcgaggagccggcgggcgggagaggacgcgcccagggcgggggcccgcccgccccctcgggatttcgagggcccgggggcgcgcgacgccatgggccggccgggcccagagctcctgtctctcaggtgagcccgcgtttgcccgcgctcccctcctccggggccgggagggcttttgtggggaaagaggaggccccgtgtccagttctgcccgggctctgcgcgtcacccccagcccaaaatactgccctgcagccaactcggatggaggcgttccggggtgacggctcccagcgcctacgaccccccactcagccactacccccacccacacacgtgttagggagagcgttggggtaactga

SEQ ID NO: 173759 - DNA, 222 bp, Homo sapiens
gggctggccttctgccagcacatgcttcttgggatctcagtgtgaatggtgttcaggaggctaggggaaggcaccctggacctcactacaggctcagagcctgcccagcaacaccatggatactctctctaaaagggggactcctggggagactatagacaaactcaaggcttgttcctgatgctctttcttccaccagcctgagttgtctatatctcccag

SEQ ID NO: 173760 - DNA, 4548 bp, Homo sapiens
gggctggccttctgccagcacatgcttcttgggatctcagtgtgaatggtgttcaggaggctaggggaaggcaccctggacctcactacaggctcagagcctgcccagcaacaccatggatactctctctaaaagggggactcctggggagactatagacaaactcaggcctggctggaagaaagagcatcaggaacaagccttgagtaccccaacttggtctcgtagagttcaaggcccaagctacaagcagcttgctccagcatccaggaggtccggcggtgcacacggcttgagatgcctgacaacctttacacctttgtgctgaaggtgaaggaccggacagacatcatctttgaggtgggagacgagcagcagctgaattcatggatggctgagctctcggagtgcacaggccgaggcaggctggagagcacagaagcagagatgcatattccctcagccctagagcctagcacgtccagctccccaaggggcagcacagattcccttaaccaaggtgcttctcctggggggctgctggacccggcctgccagaagacggaccatttcctgtcctgctacccctggttccacggccccatctccagagtgaaagcagctcagctggttcagctgcagggccctgatgctcatggagtgttcctggtgcggcagagcgagacgcggcgtggggaatacgtgctcactttcaactttcaggggatagccaagcacctgcgcctgtcgctgacagagcggggccagtgccgtgtgcagcacctccactttccctcggtcgtggacatgctccaccacttccagcgctcgcccatcccactcgagtgcggcgccgcctgtgatgtccggctctccagctacgtggtagtcgtctcccaaccaccaggttcctgcaacacggtcctcttccctttctcccttcctcactgggattcagagtcccttcctcactggggttcagagttgggccttccccaccttagttcttctggctgtccccgggggctcagcccagagggtctcccagggcgatcctcaccccccgagcagatcttccacctggtgccttcgcccgaagaactggccaacagcctgcagcacctggagcatgagcctgtgaatcgagcccgggactcggactacgaaatggactcatcctcccggagccacctgcgggccatagacaatcagtacacacctctctgaccagtgaggaattccaggcctcaacagctgcccttgaggagcacaggcagaagtgtgaacttgtgaatgtaattgatctttccttccttccagagaaagatttaagggacactgttaactgctcgtgccagtttggaagtgacccttctattaggcctgttgaagggccctcctgtaggtttcatctatccacctggctttctccttattgtttacagatgtagttcttgttagaggatgccgctagctcctgcccggggtccctatgcccagtccccgttactcttagagaaaggagttggggtgagggccagagctggcagtggaaacttgttctctttttcactgacactgtcacagcggatgacagactttctacggggaggagggggggatcatcaggaagcccagaacactaacaagcggttctcccatctaccgtcagtccacatggcaggtctgctgtgtccacaccacagatgaccacatctaatcctgcttctactctcagctttaggacaaaagctctgtcagaggcacaagctgaaggtcaaaaatgatttaaaacattttacctcagactaatttctttaaaggattcaggttcaaaacttaaccactgcttatttcagtgcactgtttcaactaacacccatgctatttttgtagtcagaaacagctatgcaaaccctacctaatttacagtctgagccagcatgctggcttgtctactgcatcctcgggacagtcacctgccactgagtggccactgtccttcctaaatgtcaagaagtgaagtatgtcaccctttcagggaaattcaggcaattactgaaataggagggtggcaagaacagttctatcctggtgccttacgaataaaaaactggattctggtttacagcagctttacagtgatagttaaattaactggggctaggggaagagcaagcaaaaagggaagaaggactcctaggccctttctagtaaatccttcagcaacaaggctggcttggtgccctccaagcatctaatggcttattaaattatcccacaagtgggttttaggctccttttttgagccaaaatggaagctgggaatctggtgccataactaatgagaaactcctttaatagcccacaatcagtgttctgttctagctggctactgcttcactggattgagaatctatctatctccttgcacacatgggcacacacaatctccaccatccagggaggtcctgaagtcaaatctctatctatacaagtgatacaattcatagggggctggctcctcccagaacctgtctggaggctcagaaacgggggcagtgacagtggagtcagctgctcttgggtgccagcagagccattcagtacaacccccaggctcacagcagtggcttctaggaaactgggagtttagatcagctttacagatacatcgatcagaggctaaaatgaaacctcagcctaaaactcataggactgactgcctgggaggagggttaggtctgcttcttccacttatacttagtctctgtgctccaagaggtcaaatttttgcttctagaatttccttggggtctttcagagggtgggggaacaaacccctatgcacttttcttttttttttttttgagatggagtttctcttgtcaaccgggctggagtgcagtggtgcaatcttggctcactgcaacctccaccttcctggttcaagcgattctgcctcgacctctcaagtagctgggattacaagcaccagccaccatgcctggctaattttgtatttttagtagagacagggtttcaccatgttggccaggctggtctcgaatgtctgacctcaggtgatccacccgccttggcctcccaaagtgctgggattacaggcgcgagccaccgcgcccagcctacaccacttttagtaccaacactcttgggtgatttcatggaccctaaagcagacctgacactgatccagatttgcagtccatttttaaggacacctgtctttatttcctcaaagtcaagcagctttctctggaaaatgaatgctaattagtgtgaaccaaaagagtaagtaagagtctgaagtttttttaaaggagaaagcttattatggaaagtcactggtcctcccctccgcacaggaaaggtacccagtagataatgaaccaaattaagttccctccctccagccagaagttaaacatctgggatatgacgtcttcatgccaggggcactcatttcttagcagcctctctacatacatctctcaggtggtgccaagaggcacaccaggtagagcaaacttagcagctctgactaacaggctgcaaagtgcaagttcagattctgtggcagagatttggaaggcacccacctccagactgcttcccgtccaagttaccaggacagctcaaaaacatgctgacagaaaactcccatggctctaggaagaagtgacactaagccaacacctttctttatgtgggagcagaatcagctgatgaaggggtgggcagcagtgtggggcaggcaccccactggctgcagctagcccaccataggcacagcacatcccaccactctccttccagtcctgaccaggccccagccggcaacttctaccgagagccatggctcaacaccaaactggacagtagacatcatgatccctccagttagctctaattacagaccccaccagtacagcttgacagctcccggcaccatcccttccttcatctgacttattgaacttttacaaactaacagtcaccagcaccaaagaattaagtcaactaacctgccttgaattttagaccagcaatccatatggctttatctggtataaatcttctgcctttgatcatttctggaccgtaggaaaaaggaatagcaatcattaaaatcttgggccagagaacactatttttacataacagtttcttaacctaaagtcaaggccttggactcttccctgagggttgcctgagattccttcatgctttctattcaggactaagtcccttactgcaaatgtgttagctctaacatctcccacaagctagaggaacttgcgagtatattaacaaggacacatctgacatcctgtgtttggttagaatatacagcacattgtgataacataaagtggattcatcttgtatcattataggcagaaggtatttggcaaatttttatgtattgttttatgtactgtacaagtaacttattcttgaataatgcaaattttgctataatgtacaaattgctatatgtgaattaaaaagttttcagaatcttga

SEQ ID NO: 173761 - DNA, 5179 bp, Homo sapiens
cccgggccaccgcctccgcccggctgcccgcccggactgtcgcggcccgcggtggcgacggcggccgctgcaaagtttccccggcggcggcggcccgggggcgcatcctcccgcaactgtcaagcgctggcggcggaaatgatgaggcgctggccattttccgagcccgggtttcctgcctgagccccgctcgagcgagccgcgagcgaggagccggcgggcgggagaggacgcgcccagggcgggggcccgcccgccccctcgggatttcgagggcccgggggcgcgcgacgccatgggccggccgggcccagagctcctgtctctcagcccggccgcaccacctgggtctccgccatgaacgggcctgccctgcagccctcctcgccctcttccgcgccctcagcctccccggcggcggccccgcggggctggagcgagttctgtgagttgcacgccgtagcggcggcccgggagctggcccgccagtactggctgttcgcccgggagcatccgcagcacgcgccgctgcgcgccgagctggtgtcgctgcagttcaccgacctcttccagcgctacttctgccgcgaggtgcgcgacggacgggcgccgggccgcgactaccgggacacaggccgtgggcccccagccaaggccgaggcgtccccggagccaggccccggccccgccgcccctggcctgcccaaggcccgcagctctgaggagctggccccgccgcggccgcccgggccctgctccttccagcactttcgccgcagcctccgccacatcttccgccgccgctcggccggggagctgccagcggcccacaccgctgccgcccccgggacccccggagaggctgctgagacccccgcccggcctggcctggccaagaagttcctgccctggagcctggcccgggagccgccacccgaggcgctgaaggaggcggtgctgcgctacagcctggccgacgaggcctccatggacagcggggcacgctggcagcgcgggaggctggcgctgcgccgggccccgggccccgatggccccgaccgcgtgctggagctcttcgacccacccaagagttcaaggcccaagctacaagcagcttgctccagcatccaggaggtccggcggtgcacacggcttgagatgcctgacaacctttacacctttgtgctgaaggtgaaggaccggacagacatcatctttgaggtgggagacgagcagcagctgaattcatggatggctgagctctcggagtgcacaggccgaggcaggctggagagcacagaagcagagatgcatattccctcagccctagagcctagcacgtccagctccccaaggggcagcacagattcccttaaccaaggtgcttctcctggggggctgctggacccggcctgccagaagacggaccatttcctgtcctgctacccctggttccacggccccatctccagagtgaaagcagctcagctggttcagctgcagggccctgatgctcatggagtgttcctggtgcggcagagcgagacgcggcgtggggaatacgtgctcactttcaactttcaggggatagccaagcacctgcgcctgtcgctgacagagcggggccagtgccgtgtgcagcacctccactttccctcggtcgtggacatgctccaccacttccagcgctcgcccatcccactcgagtgcggcgccgcctgtgatgtccggctctccagctacgtggtagtcgtctcccaaccaccaggttcctgcaacacggtcctcttccctttctcccttcctcactgggattcagagtcccttcctcactggggttcagagttgggccttccccaccttagttcttctggctgtccccgggggctcagcccagagggtctcccagggcgatcctcaccccccgagcagatcttccacctggtgccttcgcccgaagaactggccaacagcctgcagcacctggagcatgagcctgtgaatcgagcccgggactcggactacgaaatggactcatcctcccggagccacctgcgggccatagacaatcagtacacacctctctgaccagtgaggaattccaggcctcaacagctgcccttgaggagcacaggcagaagtgtgaacttgtgaatgtaattgatctttccttccttccagagaaagatttaagggacactgttaactgctcgtgccagtttggaagtgacccttctattaggcctgttgaagggccctcctgtaggtttcatctatccacctggctttctccttattgtttacagatgtagttcttgttagaggatgccgctagctcctgcccggggtccctatgcccagtccccgttactcttagagaaaggagttggggtgagggccagagctggcagtggaaacttgttctctttttcactgacactgtcacagcggatgacagactttctacggggaggagggggggatcatcaggaagcccagaacactaacaagcggttctcccatctaccgtcagtccacatggcaggtctgctgtgtccacaccacagatgaccacatctaatcctgcttctactctcagctttaggacaaaagctctgtcagaggcacaagctgaaggtcaaaaatgatttaaaacattttacctcagactaatttctttaaaggattcaggttcaaaacttaaccactgcttatttcagtgcactgtttcaactaacacccatgctatttttgtagtcagaaacagctatgcaaaccctacctaatttacagtctgagccagcatgctggcttgtctactgcatcctcgggacagtcacctgccactgagtggccactgtccttcctaaatgtcaagaagtgaagtatgtcaccctttcagggaaattcaggcaattactgaaataggagggtggcaagaacagttctatcctggtgccttacgaataaaaaactggattctggtttacagcagctttacagtgatagttaaattaactggggctaggggaagagcaagcaaaaagggaagaaggactcctaggccctttctagtaaatccttcagcaacaaggctggcttggtgccctccaagcatctaatggcttattaaattatcccacaagtgggttttaggctccttttttgagccaaaatggaagctgggaatctggtgccataactaatgagaaactcctttaatagcccacaatcagtgttctgttctagctggctactgcttcactggattgagaatctatctatctccttgcacacatgggcacacacaatctccaccatccagggaggtcctgaagtcaaatctctatctatacaagtgatacaattcatagggggctggctcctcccagaacctgtctggaggctcagaaacgggggcagtgacagtggagtcagctgctcttgggtgccagcagagccattcagtacaacccccaggctcacagcagtggcttctaggaaactgggagtttagatcagctttacagatacatcgatcagaggctaaaatgaaacctcagcctaaaactcataggactgactgcctgggaggagggttaggtctgcttcttccacttatacttagtctctgtgctccaagaggtcaaatttttgcttctagaatttccttggggtctttcagagggtgggggaacaaacccctatgcacttttcttttttttttttttgagatggagtttctcttgtcaaccgggctggagtgcagtggtgcaatcttggctcactgcaacctccaccttcctggttcaagcgattctgcctcgacctctcaagtagctgggattacaagcaccagccaccatgcctggctaattttgtatttttagtagagacagggtttcaccatgttggccaggctggtctcgaatgtctgacctcaggtgatccacccgccttggcctcccaaagtgctgggattacaggcgcgagccaccgcgcccagcctacaccacttttagtaccaacactcttgggtgatttcatggaccctaaagcagacctgacactgatccagatttgcagtccatttttaaggacacctgtctttatttcctcaaagtcaagcagctttctctggaaaatgaatgctaattagtgtgaaccaaaagagtaagtaagagtctgaagtttttttaaaggagaaagcttattatggaaagtcactggtcctcccctccgcacaggaaaggtacccagtagataatgaaccaaattaagttccctccctccagccagaagttaaacatctgggatatgacgtcttcatgccaggggcactcatttcttagcagcctctctacatacatctctcaggtggtgccaagaggcacaccaggtagagcaaacttagcagctctgactaacaggctgcaaagtgcaagttcagattctgtggcagagatttggaaggcacccacctccagactgcttcccgtccaagttaccaggacagctcaaaaacatgctgacagaaaactcccatggctctaggaagaagtgacactaagccaacacctttctttatgtgggagcagaatcagctgatgaaggggtgggcagcagtgtggggcaggcaccccactggctgcagctagcccaccataggcacagcacatcccaccactctccttccagtcctgaccaggccccagccggcaacttctaccgagagccatggctcaacaccaaactggacagtagacatcatgatccctccagttagctctaattacagaccccaccagtacagcttgacagctcccggcaccatcccttccttcatctgacttattgaacttttacaaactaacagtcaccagcaccaaagaattaatcccttactgcaaatgtgttagctctaacatctcccacaagctagaggaacttgcgagtatattaacaaggacacatctgacatcctgtgtttggttagaatatacagcacattgtgataacataaagtggattcatcttgtatcattataggcagaaggtatttggcaaatttttatgtattgttttatgtactgtacaagtaacttattcttgaataatgcaaattttgctataatgtacaaattgctatatgtgaattaaaaagttttcagaatcttga

SEQ ID NO: 173762 - DNA, 1584 bp, Homo sapiens
ggaacgcgtgggtcgacccacgcgtcggcaccagccaccatgcctggctaattttgtatttttagtagagacagggtttcaccatgttggccaggctggtctcgaatgtctgacctcaggtgatccacccgccttggcctcccaaagtgctgggattacaggcgcgagccaccgcgcccagcctacaccacttttagtaccaacactcttgggtgatttcatggaccctaaagcagacctgacactgatccagatttgcagtccatttttaaggacacctgtctttatttcctcaaagtcaagcagctttctctggaaaatgaatgctaattagtgtgaaccaaaagagtaagtaagagtctgaagtttttttaaaggagaaagcttattatggaaagtcactggtcctcccctccgcacaggaaaggtacccagtagataatgaaccaaattaagttccctccctccagccagaagttaaacatctgggatatgacgtcttcatgccaggggcactcatttcttagcagcctctctacatacatctctcaggtggtgccaagaggcacaccaggtagagcaaacttagcagctctgactaacaggctgcaaagtgcaagttcagattctgtggcagagatttggaaggcacccacctccagactgcttcccgtccaagttaccaggacagctcaaaaacatgctgacagaaaactcccatggctctaggaagaagtgacactaagccaacacctttctttatgtgggagcagaatcagctgatgaaggggtgggcagcagtgtggggcaggcaccccactggctgcagctagcccaccataggcacagcacatcccaccactctccttccagtcctgaccaggccccagccggcaacttctaccgagagccatggctcaacaccaaactggacagtagacatcatgatccctccagttagctctaattacagaccccaccagtacagcttgacagctcccggcaccatcccttccttcatctgacttattgaacttttacaaactaacagtcaccagcaccaaagaattaagtcaactaacctgccttgaattttagaccagcaatccatatggctttatctggtataaatcttctgcctttgatcatttctggaccgtaggaaaaaggaatagcaatcattaaaatcttgggccagagaacactatttttacataacagtttcttaacctaaagtcaaggccttggactcttccctgagggttgcctgagattccttcatgctttctattcaggactaagtcccttactgcaaatgtgttagctctaacatctcccacaagctagaggaacttgcgagtatattaacaaggacacatctgacatcctgtgtttggttagaatatacagcacattgtgataacataaagtggattcatcttgtatcattataggcagaaggtatttggcaaatttttatgtattgttttatgtactgtacaagtaacttattcttgaataatgcaaattttgctataatgtacaaattgctatatgtgaattaaaaagttttcagaatcttga

SEQ ID NO: 173763 - DNA, 936 bp, Homo sapiens
cgctgactatgtgtgtgctatatatctcatcgtctgggatactaatggaggacgtgcttcctgtaaaacctgtgaatcaatggattcaataacatctggtctattaccaggcatctcatcatgcaaaggtctatgcaaatctgtagttttgattttgttctcctgcaaataactatgtcctctgacatcaatgatggtcacagggacccaatccacatagttcagcgtctgagtcagacgctgaactatgttctaccgagagccatggctcaacaccaaactggacagtagacatcatgatccctccagttagctctaattacagaccccaccagtacagcttgacagctcccggcaccatcccttccttcatctgacttattgaacttttacaaactaacagtcaccagcaccaaagaattaagtcaactaacctgccttgaattttagaccagcaatccatatggctttatctggtataaatcttctgcctttgatcatttctggaccgtaggaaaaaggaatagcaatcattaaaatcttgggccagagaacactatttttacataacagtttcttaacctaaagtcaaggccttggactcttccctgagggttgcctgagattccttcatgctttctattcaggactaagtcccttactgcaaatgtgttagctctaacatctcccacaagctagaggaacttgcgagtatattaacaaggacacatctgacatcctgtgtttggttagaatatacagcacattgtgataacataaagtggattcatcttgtatcattataggcagaaggtatttggcaaatttttatgtattgttttatgtactgtacaagtaacttattcttgaataatgcaaattttgctataatgtacaaattgctatatgtgaattaaaaagttttcagaatcttga

SEQ ID NO: 173764 - DNA, 1337 bp, Homo sapiens
cccgggccaccgcctccgcccggctgcccgcccggactgtcgcggcccgcggtggcgacggcggccgctgcaaagtttccccggcggcggcggcccgggggcgcatcctcccgcaactgtcaagcgctggcggcggaaatgatgaggcgctggccattttccgagcccgggtttcctgcctgagccccgctcgagcgagccgcgagcgaggagccggcgggcgggagaggacgcgcccagggcgggggcccgcccgccccctcgggatttcgagggcccgggggcgcgcgacgccatgggccggccgggcccagagctcctgtctctcagcccggccgcaccacctgggtctccgccatgaacgggcctgccctgcagccctcctcgccctcttccgcgccctcagcctccccggcggcggccccgcggggctggagcgagttctgtgagttgcacgccgtagcggcggcccgggagctggcccgccagtactggctgttcgcccgggagcatccgcagcacgcgccgctgcgcgccgagctggtgtcgctgcagttcaccgacctcttccagcgctacttctgccgcgaggtgcgcgacggacgggcgccgggccgcgactaccgggacacaggccgtgggcccccagccaaggccgaggcgtccccggagccaggccccggccccgccgcccctggcctgcccaaggcccgcagctctgaggagctggccccgccgcggccgcccgggccctgctccttccagcactttcgccgcagcctccgccacatcttccgccgccgctcggccggggagctgccagcggcccacaccgctgccgcccccgggacccccggagaggctgctgagacccccgcccggcctggcctggccaagaagttcctgccctggagcctggcccgggagccgccacccgaggcgctgaaggaggcggtgctgcgctacagcctggccgacgaggcctccatggacagcggggcacgctggcagcgcgggaggctggcgctgcgccgggccccgggccccgatggccccgaccgcgtgctggagctcttcgacccacccaagtggccagagcctgagctgtccaggctgaggtttcgactgaagcaggggttgtcctgcgcccatgtgcccacacgctgcaacctggctggagcctctggcataggacacccataccaccaggtagctgtggcggaccccggctctgatacttggcaggcttgggttgagattgtggctctaggcctgggcggctctcaagggctgctgtggggagttggggaagaaccctgggttgtgctcagccagca

SEQ ID NO: 173765 - DNA, 488 bp, Homo sapiens
gggctggccttctgccagcacatgcttcttgggatctcagtgtgaatggtgttcaggaggctaggggaaggcaccctggacctcactacaggctcagagcctgcccagcaacaccatggatactctctctaaaagggggactcctggggagactatagacaaactcaggcctggctggaagaaagagcatcaggaacaagccttgagtaccccaacttggtctcgtagagttcaaggcccaagctacaagcagcttgctccagcatccaggaggtccggcggtgcacacggcttgagatgcctgacaacctttacacctttgtgctgaaggtgaaggaccggacagacatcatctttgaggtgggagacgagcagcagctgaattcatggatggctgagctctcggagtgcacaggccgagggctggagagcacagaagcaaagaccccaaaagagcaaagaccccaaaagagcaaagaccccaaaag

SEQ ID NO: 173766 - DNA, 5152 bp, Homo sapiens
gtgtgtaatggggcctacacctgcttgcccacctgcttactccttgtcgcccccccacccacgtgtctttcagcccggccgcaccacctgggtctccgccatgaacgggcctgccctgcagccctcctcgccctcttccgcgccctcagcctccccggcggcggccccgcggggctggagcgagttctgtgagttgcacgccgtagcggcggcccgggagctggcccgccagtactggctgttcgcccgggagcatccgcagcacgcgccgctgcgcgccgagctggtgtcgctgcagttcaccgacctcttccagcgctacttctgccgcgaggtgcgcgacggacgggcgccgggccgcgactaccgggacacaggccgtgggcccccagccaaggccgaggcgtccccggagccaggccccggccccgccgcccctggcctgcccaaggcccgcagctctgaggagctggccccgccgcggccgcccgggccctgctccttccagcactttcgccgcagcctccgccacatcttccgccgccgctcggccggggagctgccagcggcccacaccgctgccgcccccgggacccccggagaggctgctgagacccccgcccggcctggcctggccaagaagttcctgccctggagcctggcccgggagccgccacccgaggcgctgaaggaggcggtgctgcgctacagcctggccgacgaggcctccatggacagcggggcacgctggcagcgcgggaggctggcgctgcgccgggccccgggccccgatggccccgaccgcgtgctggagctcttcgacccacccaagagttcaaggcccaagctacaagcagcttgctccagcatccaggaggtccggcggtgcacacggcttgagatgcctgacaacctttacacctttgtgctgaaggtgaaggaccggacagacatcatctttgaggtgggagacgagcagcagctgaattcatggatggctgagctctcggagtgcacaggccgaggcaggctggagagcacagaagcagagatgcatattccctcagccctagagcctagcacgtccagctccccaaggggcagcacagattcccttaaccaaggtgcttctcctggggggctgctggacccggcctgccagaagacggaccatttcctgtcctgctacccctggttccacggccccatctccagagtgaaagcagctcagctggttcagctgcagggccctgatgctcatggagtgttcctggtgcggcagagcgagacgcggcgtggggaatacgtgctcactttcaactttcaggggatagccaagcacctgcgcctgtcgctgacagagcggggccagtgccgtgtgcagcacctccactttccctcggtcgtggacatgctccaccacttccagcgctcgcccatcccactcgagtgcggcgccgcctgtgatgtccggctctccagctacgtggtagtcgtctcccaaccaccaggttcctgcaacacggtcctcttccctttctcccttcctcactgggattcagagtcccttcctcactggggttcagagttgggccttccccaccttagttcttctggctgtccccgggggctcagcccagagggtctcccagggcgatcctcaccccccgagcagatcttccacctggtgccttcgcccgaagaactggccaacagcctgcagcacctggagcatgagcctgtgaatcgagcccgggactcggactacgaaatggactcatcctcccggagccacctgcgggccatagacaatcagtacacacctctctgaccagtgaggaattccaggcctcaacagctgcccttgaggagcacaggcagaagtgtgaacttgtgaatgtaattgatctttccttccttccagagaaagatttaagggacactgttaactgctcgtgccagtttggaagtgacccttctattaggcctgttgaagggccctcctgtaggtttcatctatccacctggctttctccttattgtttacagatgtagttcttgttagaggatgccgctagctcctgcccggggtccctatgcccagtccccgttactcttagagaaaggagttggggtgagggccagagctggcagtggaaacttgttctctttttcactgacactgtcacagcggatgacagactttctacggggaggagggggggatcatcaggaagcccagaacactaacaagcggttctcccatctaccgtcagtccacatggcaggtctgctgtgtccacaccacagatgaccacatctaatcctgcttctactctcagctttaggacaaaagctctgtcagaggcacaagctgaaggtcaaaaatgatttaaaacattttacctcagactaatttctttaaaggattcaggttcaaaacttaaccactgcttatttcagtgcactgtttcaactaacacccatgctatttttgtagtcagaaacagctatgcaaaccctacctaatttacagtctgagccagcatgctggcttgtctactgcatcctcgggacagtcacctgccactgagtggccactgtccttcctaaatgtcaagaagtgaagtatgtcaccctttcagggaaattcaggcaattactgaaataggagggtggcaagaacagttctatcctggtgccttacgaataaaaaactggattctggtttacagcagctttacagtgatagttaaattaactggggctaggggaagagcaagcaaaaagggaagaaggactcctaggccctttctagtaaatccttcagcaacaaggctggcttggtgccctccaagcatctaatggcttattaaattatcccacaagtgggttttaggctccttttttgagccaaaatggaagctgggaatctggtgccataactaatgagaaactcctttaatagcccacaatcagtgttctgttctagctggctactgcttcactggattgagaatctatctatctccttgcacacatgggcacacacaatctccaccatccagggaggtcctgaagtcaaatctctatctatacaagtgatacaattcatagggggctggctcctcccagaacctgtctggaggctcagaaacgggggcagtgacagtggagtcagctgctcttgggtgccagcagagccattcagtacaacccccaggctcacagcagtggcttctaggaaactgggagtttagatcagctttacagatacatcgatcagaggctaaaatgaaacctcagcctaaaactcataggactgactgcctgggaggagggttaggtctgcttcttccacttatacttagtctctgtgctccaagaggtcaaatttttgcttctagaatttccttggggtctttcagagggtgggggaacaaacccctatgcacttttcttttttttttttttgagatggagtttctcttgtcaaccgggctggagtgcagtggtgcaatcttggctcactgcaacctccaccttcctggttcaagcgattctgcctcgacctctcaagtagctgggattacaagcaccagccaccatgcctggctaattttgtatttttagtagagacagggtttcaccatgttggccaggctggtctcgaatgtctgacctcaggtgatccacccgccttggcctcccaaagtgctgggattacaggcgcgagccaccgcgcccagcctacaccacttttagtaccaacactcttgggtgatttcatggaccctaaagcagacctgacactgatccagatttgcagtccatttttaaggacacctgtctttatttcctcaaagtcaagcagctttctctggaaaatgaatgctaattagtgtgaaccaaaagagtaagtaagagtctgaagtttttttaaaggagaaagcttattatggaaagtcactggtcctcccctccgcacaggaaaggtacccagtagataatgaaccaaattaagttccctccctccagccagaagttaaacatctgggatatgacgtcttcatgccaggggcactcatttcttagcagcctctctacatacatctctcaggtggtgccaagaggcacaccaggtagagcaaacttagcagctctgactaacaggctgcaaagtgcaagttcagattctgtggcagagatttggaaggcacccacctccagactgcttcccgtccaagttaccaggacagctcaaaaacatgctgacagaaaactcccatggctctaggaagaagtgacactaagccaacacctttctttatgtgggagcagaatcagctgatgaaggggtgggcagcagtgtggggcaggcaccccactggctgcagctagcccaccataggcacagcacatcccaccactctccttccagtcctgaccaggccccagccggcaacttctaccgagagccatggctcaacaccaaactggacagtagacatcatgatccctccagttagctctaattacagaccccaccagtacagcttgacagctcccggcaccatcccttccttcatctgacttattgaacttttacaaactaacagtcaccagcaccaaagaattaagtcaactaacctgccttgaattttagaccagcaatccatatggctttatctggtataaatcttctgcctttgatcatttctggaccgtaggaaaaaggaatagcaatcattaaaatcttgggccagagaacactatttttacataacagtttcttaacctaaagtcaaggccttggactcttccctgagggttgcctgagattccttcatgctttctattcaggactaagtcccttactgcaaatgtgttagctctaacatctcccacaagctagaggaacttgcgagtatattaacaaggacacatctgacatcctgtgtttggttagaatatacagcacattgtgataacataaagtggattcatcttgtatcattataggcagaaggtatttggcaaatttttatgtattgttttatgtactgtacaagtaacttattcttgaataatgcaaattttgctataatgtacaaattgctatatgtgaattaaaaagttttcagaatcttga

SEQ ID NO: 173767 - DNA, 3565 bp, Homo sapiens
aaatagctaggtacgagctgcgtgtacatcggccgagggggggctcagcccagagggtctcccagggcgatcctcaccccccgagcagatcttccacctggtgccttcgcccgaagaactggccaacagcctgcagcacctggagcatgagcctgtgaatcgagcccgggactcggactacgaaatggactcatcctcccggagccacctgcgggccatagacaatcagtacacacctctctgaccagtgaggaattccaggcctcaacagctgcccttgaggagcacaggcagaagtgtgaacttgtgaatgtaattgatctttccttccttccagagaaagatttaagggacactgttaactgctcgtgccagtttggaagtgacccttctattaggcctgttgaagggccctcctgtaggtttcatctatccacctggctttctccttattgtttacagatgtagttcttgttagaggatgccgctagctcctgcccggggtccctatgcccagtccccgttactcttagagaaaggagttggggtgagggccagagctggcagtggaaacttgttctctttttcactgacactgtcacagcggatgacagactttctacggggaggagggggggatcatcaggaagcccagaacactaacaagcggttctcccatctaccgtcagtccacatggcaggtctgctgtgtccacaccacagatgaccacatctaatcctgcttctactctcagctttaggacaaaagctctgtcagaggcacaagctgaaggtcaaaaatgatttaaaacattttacctcagactaatttctttaaaggattcaggttcaaaacttaaccactgcttatttcagtgcactgtttcaactaacacccatgctatttttgtagtcagaaacagctatgcaaaccctacctaatttacagtctgagccagcatgctggcttgtctactgcatcctcgggacagtcacctgccactgagtggccactgtccttcctaaatgtcaagaagtgaagtatgtcaccctttcagggaaattcaggcaattactgaaataggagggtggcaagaacagttctatcctggtgccttacgaataaaaaactggattctggtttacagcagctttacagtgatagttaaattaactggggctaggggaagagcaagcaaaaagggaagaaggactcctaggccctttctagtaaatccttcagcaacaaggctggcttggtgccctccaagcatctaatggcttattaaattatcccacaagtgggttttaggctccttttttgagccaaaatggaagctgggaatctggtgccataactaatgagaaactcctttaatagcccacaatcagtgttctgttctagctggctactgcttcactggattgagaatctatctatctccttgcacacatgggcacacacaatctccaccatccagggaggtcctgaagtcaaatctctatctatacaagtgatacaattcatagggggctggctcctcccagaacctgtctggaggctcagaaacgggggcagtgacagtggagtcagctgctcttgggtgccagcagagccattcagtacaacccccaggctcacagcagtggcttctaggaaactgggagtttagatcagctttacagatacatcgatcagaggctaaaatgaaacctcagcctaaaactcataggactgactgcctgggaggagggttaggtctgcttcttccacttatacttagtctctgtgctccaagaggtcaaatttttgcttctagaatttccttggggtctttcagagggtgggggaacaaacccctatgcacttttcttttttttttttttgagatggagtttctcttgtcaaccgggctggagtgcagtggtgcaatcttggctcactgcaacctccaccttcctggttcaagcgattctgcctcgacctctcaagtagctgggattacaagcaccagccaccatgcctggctaattttgtatttttagtagagacagggtttcaccatgttggccaggctggtctcgaatgtctgacctcaggtgatccacccgccttggcctcccaaagtgctgggattacaggcgcgagccaccgcgcccagcctacaccacttttagtaccaacactcttgggtgatttcatggaccctaaagcagacctgacactgatccagatttgcagtccatttttaaggacacctgtctttatttcctcaaagtcaagcagctttctctggaaaatgaatgctaattagtgtgaaccaaaagagtaagtaagagtctgaagtttttttaaaggagaaagcttattatggaaagtcactggtcctcccctccgcacaggaaaggtacccagtagataatgaaccaaattaagttccctccctccagccagaagttaaacatctgggatatgacgtcttcatgccaggggcactcatttcttagcagcctctctacatacatctctcaggtggtgccaagaggcacaccaggtagagcaaacttagcagctctgactaacaggctgcaaagtgcaagttcagattctgtggcagagatttggaaggcacccacctccagactgcttcccgtccaagttaccaggacagctcaaaaacatgctgacagaaaactcccatggctctaggaagaagtgacactaagccaacacctttctttatgtgggagcagaatcagctgatgaaggggtgggcagcagtgtggggcaggcaccccactggctgcagctagcccaccataggcacagcacatcccaccactctccttccagtcctgaccaggccccagccggcaacttctaccgagagccatggctcaacaccaaactggacagtagacatcatgatccctccagttagctctaattacagaccccaccagtacagcttgacagctcccggcaccatcccttccttcatctgacttattgaacttttacaaactaacagtcaccagcaccaaagaattaagtcaactaacctgccttgaattttagaccagcaatccatatggctttatctggtataaatcttctgcctttgatcatttctggaccgtaggaaaaaggaatagcaatcattaaaatcttgggccagagaacactatttttacataacagtttcttaacctaaagtcaaggccttggactcttccctgagggttgcctgagattccttcatgctttctattcaggactaagtcccttactgcaaatgtgttagctctaacatctcccacaagctagaggaacttgcgagtatattaacaaggacacatctgacatcctgtgtttggttagaatatacagcacattgtgataacataaagtggattcatcttgtatcattataggcagaaggtatttggcaaatttttatgtattgttttatgtactgtacaagtaacttattcttgaataatgcaaattttgctataatgtacaaattgctatatgtgaattaaaaagttttcagaatcttga

SEQ ID NO: 173768 - DNA, 1284 bp, Homo sapiens
cccgggccaccgcctccgcccggctgcccgcccggactgtcgcggcccgcggtggcgacggcggccgctgcaaagtttccccggcggcggcggcccgggggcgcatcctcccgcaactgtcaagcgctggcggcggaaatgatgaggcgctggccattttccgagcccgggtttcctgcctgagccccgctcgagcgagccgcgagcgaggagccggcgggcgggagaggacgcgcccagggcgggggcccgcccgccccctcgggatttcgagggcccgggggcgcgcgacgccatgggccggccgggcccagagctcctgtctctcagcccggccgcaccacctgggtctccgccatgaacgggcctgccctgcagccctcctcgccctcttccgcgccctcagcctccccggcggcggccccgcggggctggagcgagttctgtgagttgcacgccgtagcggcggcccgggagctggcccgccagtactggctgttcgcccgggagcatccgcagcacgcgccgctgcgcgccgagctggtgtcgctgcagttcaccgacctcttccagcgctacttctgccgcgaggtgcgcgacggacgggcgccgggccgcgactaccgggacacaggccgtgggcccccagccaaggccgaggcgtccccggagccaggccccggccccgccgcccctggcctgcccaaggcccgcagctctgaggagctggccccgccgcggccgcccgggccctgctccttccagcactttcgccgcagcctccgccacatcttccgccgccgctcggccggggagctgccagcggcccacaccgctgccgcccccgggacccccggagaggctgctgagacccccgcccggcctggcctggccaagaagttcctgccctggagcctggcccgggagccgccacccgaggcgctgaaggaggcggtgctgcgctacagcctggccgacgaggcctccatggacagcggggcacgctggcagcgcgggaggctggcgctgcgccgggccccgggccccgatggccccgaccgcgtgctggagctcttcgacccacccaaggtaagtaagccctgcccgcggggttgcgcactgcactgcgcccttcgccttcacccaggggagagcgcgggctggggaggtgtgatggctttccagctggtggccacagagtgtccagagggaactaggccctcttaaaaaagaacttttaggccgagtgcaatggcttatgcctgtaatcccagcactttggga

SEQ ID NO: 173769 - DNA, 613 bp, Homo sapiens
  misc_feature (55)..(55): n is a, c, g, or t
ggtattcaggcacagataggatgatgaataggaatagcatctcatatctcaatantaaaccttgaatgtaaatggcctaaatgctccactgaaaagatacagaattgcaaaatagataagaattcaccaagcaactatctgctgccttcaagagactcacctaacacataaggactcaaataaacttaaggtaaatggggttgaaaagatattccatgcaaatggacaccaatagcaagcagaggtagctattcttgtatcagacaaaacaaactttaaagcaacatcatttaaaaagacaagaggaacactaaataaagatagaaggccttgacagctgggtgcagtggcttacccctgtaatcccagcaatttgggaggctaaggcaggaggatcactggaggcctacagttcaagtcaggcttggggaaagtagtgagaccctgtctccagccaaaaaaaaaaaatttaatttaaaatatactgtactataatagtgttaattgtaagcacagtgtagtgcaaccgatctttagaatatttcaccttgaaagctgaaactctgtgcccctttcacaaaaatccttattacctggaggttttacctgacag

SEQ ID NO: 173770 - DNA, 495 bp, Homo sapiens
gggaattctagctccacaacgtgatgagaatgaatgtctggaagatgctagatacaatcctggcatattttctttgttgaataaatggtatgattgtcattacatataatattttccattgtcaaataacaggttgactttcctagttctctaacttggatgaaaattcacatgtatttaattgacattatttgagttcctgatctataaaaatagctaacacttattgaaaactgattacgcaccaacacagttctgaatgcttcacatagtcctactctacagctggtgtcattgaggcatagaggtaggtcagattaccccaggtaactcagctaggaagtgatggggccaggtatgaaaccaaacagtttgaactgttagccatctgctatgtggtctccccgagggccagcgaaataccttcaaggagcttatgaaggcaactgcctcgtggtgatgtaatagcaatgcattaagattatgtgagcagta

SEQ ID NO: 173771 - DNA, 401 bp, Homo sapiens
tgcttggttgttcaggctggagtacacttgtacaatcatggcttactgcggcctcgaactcctgggtttcaatgtgatcctcctgacctcagcctcccaagtagctgggaccacaggcacgtgccaccatgcctggctaatttttagatttttttgacatggagtctcactctgttgcccaggctggagtgcagtgacacgatctcggctcactgcaataaatcccttctaatttattagcaaatgttgttggttcaaatatatatcctaaatccatccacttctctatatttttgttaccacctccctggtccaagtcaccatcatctcccacctaaaatactgcaaccattccctgctatctttccgcttccactgttgctccctacaacctattctcc

SEQ ID NO: 173772 - DNA, 640 bp, Homo sapiens
ccatgtgagacccaggtattgcagggctggttgcttctgaggctgagatgtgtcccgtcttgctccaggcccttccccagctgttcttctccctacatttgcagacggatggcccatccgatgttgacatcatctcctttgtgtctgtctctgtgtccattggatttaatgttttagagacagatttcactgtgttgcttaggctggcctccaaccgctaggctcaagcagtcttccttcctcagcctcccaagtaactgatcacaggcatgagccactgtgcccagccacaagttccccctttttataaggacatcatttatattggcttagtgcccactgtaatgatttcatcttaacttgataatctataaagagcctgttcccagtaaggtcacattcacaggtactggggattaggactctaatttaatcttttttggggaccatgattcaaccactttaacatcatatttctaacgggtagatttttgtgctagtctttgaaattcacagccaagcagctacttgagaggctgaggcaggagaattgcttgaatccgggaggtggaggttgcagtgagccgagatcgcaccactgctctccagtctgggtgacagagagagaccgtctccaaaa

SEQ ID NO: 173773 - DNA, 139 bp, Homo sapiens
gaggaaggaaggaaggaaggaaataagggaagaatatgaagggggagaagtaagaagtgaataggcatggcttcctggagagagagaagctgggtgctcaggaatctggagtctgtgcctcagtttacccttaagactg

SEQ ID NO: 173774 - DNA, 2849 bp, Homo sapiens
  misc_feature (1)..(2): n is a, c, g, or t
  misc_feature (160)..(160): n is a, c, g, or t
  misc_feature (768)..(768): n is a, c, g, or t
  misc_feature (1772)..(1772): n is a, c, g, or t
  misc_feature (1834)..(1834): n is a, c, g, or t
nnaatgcatgtacattctctgatattattccttatatcctcgggggatgtgacttctaatgtcacacagcgtgttctccctgtgttctctttcataatatcctagtgcaattgtactcttaatgacgcagggggtgtaggcattgtgatattattcatgntattctagaaggatgctactcctaatgtcacaggggtgtacaccctgtgatagtattcataatttcccaggggtctatactcctaatgtcacagaagataacaccctgtgacattattcgtaatattctgatgagatgattctcctaatatcacagggggtgtacaccctgtgataatattcttactcctccagggggatgtcactcttaatgtcacaggtgtgttccttctgtgatattattgaaaatatgctagctgggtactactactaatgtcacaatgcgtgtacaccttgtgatattattagtaatattgtggggggatgttacccctaatgttacaggggtgtacaccgtgtgatattgctcccaatattgtagggggatgctactcctaatgtcacaggtggtgtacagccttcggtattatttgcaatctgatagagagatattactttaatgatcacagtgggtgtacatacatgggctacacccactgggataatatttgtaatatcttagggagatataactcctaatatcacagttggtgtaccccatgtgtgtacatcctgtgatattatttgtaatatccatggtaaacattncttctaatatcccacagagggtacaccctgtgatatttttcataatatcatagggagatattgcttctaataacacagtgggtgtacaccatgtgtgtacactctgtgatgtgatagcttatatcctagggagatattccttccaatatcagagtgagtgtacaccttgtgatatcattcgtaatctcctagaaagatgttgctgctaatatcacagagggtgtgcccccagtgacatcattcgaaatatcctagggagatgttaccgtaatgtcacaggggttgtacaccctgttatattattgtaatattctagggggggtgttacttttaaagtcacaggggtgtacaccctgtgatgttattcgtaatatcctaggaaggggttactcctaatatcacatgggttatcctaggaagagcttactcctaatatcacactcctaatatcacaccctgtgatagcattcggaatatccaaaagggatgttacttttaatgtcacatggggtgtacaccctttgataatattcgtaagatcctagggacatatgacttcaaatatcacgttgagtgtacacacatggtgtacacattgtgtgtgaacacctcctgtgatattatccataatatcctaggaaaatgggactcctaatatcacggtcagtggacaacctgtgatattattggtaatatcctaaagagatgttaccactaaggtcacaatgtatgtgcaccccctgatattattcgttatatccttgggggatgttactcctaatgtcacacggggtgtactccctgtgatattattcgtaatgtcctaggggtatgttactttcaatggcaccagggtgtatatcatgtgtattcaacacctgtgatactattcttaacatcctaggggcatgttcctcctaatgtcacatggggtgaacaccatatatgtacacctgctgtgatattattcgtaatatcctaggggaatattactcctgatggcncaggagatgtacaccatgtgtgtcaaccgcctgtgtcattattcttaatatcctagggagangtttccttgaatggcacaaagtgtgcgcaaaaggtcacagaagctgtgcaccttgtgatgttatctgcaataccctagaaggatgttactcctaatatgtcacaggggtgtacacactttgatattatttgtcatctcatagagagatatgacttcaaatgtcacagtggatgttcacacatagtgtataccctgtgatattattcataatatcctagggagatgcaactcctgatatcacagtgtgtgtacccggtgtgtgtacacccttgatatgagtcgtgatatccagggaaaatatgactcctcatatcacacagtatgcacaccctgtgatatttttcatcatactttagggagatattgcttctaatatcacagtgggtgtaccccatgtgtgtgtactctgtgacagtatattctgtatcctaggaaggtattactcgtaatgacacaatgggtgttcaccctgtgatatcattcttatttgaccttgctgccttttttaacccatcctacaaaaggaatggaacagataagaagatattgagattagactgcgctgctgtgcggccgccgcaggacacttttcatatccctgtttctcaggctgtagatgaaggggttcagcatgggggtgaccaccgtgtacatcactgaggccactgcacgctttctcggggaagatgacacatctgaaccgaggtaccctccaacgcctgttccataaaatcagcaaacaactgacaggtgagacccacaggtggtgaaggtttatacttcccacctgatgatgaaaccctcagaatggaggaaacaattttacagtaagagaaaagggtccccgagatgggaagaaaaccaaatacggcagcagggaaatacatgttgatgttcctggtgaaggtgtcacagaaggttcccagaagaaattaggaatttccacatccttgaagcaggtcatttgtaaggcaatcaagttgtgcagctgagagtctaaaagactgaggaaaaa

SEQ ID NO: 173775 - DNA, 342 bp, Homo sapiens
ttaaattagctaagcttgatttttctctgcaagagactgattccaaattagtgagttttctaagacgcatgaacagcaagcaatatgtgaaatgaactttatatattgtctggctccaggggcagccagtgtttctaaatgattcctgtggaccttggttaaaatttatactgcaatgtcatatgcacctaaaaatatactgactatgtcatgtctttcaggggaccttgaaggaaaagtgaagtggctggacaatttccaaaaatttagatatctacaggagattatagtgtggccaccgctttgggatagagataaaaggtttttcattccagaggtaca

SEQ ID NO: 173776 - DNA, 652 bp, Homo sapiens
taattggaatgctcgtgaatctcttacattctgtaatcaaatgaatgatatcaaagaaagaagtaatttaacataacaattgtggcttacactgaaaatatgttcctgttaataagttgcatcatgatctttaaggacttgtatgtagttagtacattttggttcatttgatatccatggtttttcttcatttttattagtgagttgttacagtggttaacaagaaatacacagatttaagctgcaatagttttcccagggttatatgatctaacttcacaagcttcttgaacatatgtagatgcttttctattttgctttacttatgacatacaattgatataggcaagcatgaaagcttgggcagattttcattgctttttctggatcttgctcaggttctgtggtatttatgtaaagcacaattttgttacttgggaatgcatgttgaaattatcatgtgcactattttgctgtaggcccgttggcactgccacaaaggtaatacactgctagtaggccatttccttgtcgactgcatttacaatttaatagaaatattacatgactttttaaacaagtgttttggcagggaggaaatggcagattccatacaaacaagcatagcttcctttcctaaaccacactccag

SEQ ID NO: 173777 - DNA, 431 bp, Homo sapiens
ccaccgctcctggcccccagttaaatatttctggaaaagagttctgttcacaaaaaattttggaatcaagggaaaaccttattaattaagatctttgataatgtggattctaaataatttcgggctaagttgaatgaaaacttaccttttcacccatgaaaaaaggagctctgtaactatattagtagcacaaacgggttcatgtgaatgtttaccctgcttaagagtaaacttttcagagttagcagcagcatttgcatacaataaatgttctaattactaatgatccttgccaattaattaaaagtatgtctgtcatggcgctgctgttcttggcagtgcttttattgacgatgagcttgtgtgcatattaaataatacagtgacatttctttttaatgtttcctaacccaggctttgtatggcagaac

SEQ ID NO: 173778 - DNA, 2708 bp, Homo sapiens
  misc_feature (20)..(20): n is a, c, g, or t
  misc_feature (205)..(205): n is a, c, g, or t
  misc_feature (213)..(213): n is a, c, g, or t
ctaaaatagatcagccacangtgcagcaaatatttttacactctctttgaatagaatcccaaccaccctcccccatgattttagaaataaaggcttcctaaaataatagaacaaattggcaaacaatcactaattggaccagtaggttcttacttaaatatctctcctagatttttagtgtatgttttgggattttatgggtttntttatttntttttttttaagcagacgttacagtttgttttaatctactatagatacgtttttgttttttggcttagttggggataaaataatttatttgtaagttagctttctaaaacttagagaaagtaatttaattcacgtatcttaaaaataaaattccaaagttaaaaaatttctgacttagtaggaagttaacaaaactactgctgatgcatttcagtttccaaaatctgtaccctccccccataaaaaagggagttaagatgtgctagtttaagtagttagctgaattatagattgatcctcttaaaatctggagtttgtaaaggggcctacataaacagtagatagacttggagggattttgtgggggaattgaaactaatagtattctatctagtttgtcagtgtttactttttgatttttatttttcagaaaattttcctttcccaggacaccctcttgtattagaatatcctcttctgtatcacattaaaaacagattttactgttagaccaaataagatgggcaaatagcaacactagagcatctcacccagtttgaactaggatgttcgtggaagttatgacaccaatatattcctgaaatgaaaattaacctaaattttaaagtgaatctatttgaaaatttacttagataatgaaacctcgttttaattgtgctttttgtgaatccaacacttgtttgcttagaaagtatcttatccagtattaatattttgttcttttgggttttaaagttgagcttattcagcctcaatcacattacagcaagcataaagtaacagttgactcaatgaaagacccaaattgcctgtacagataaaattcactgaatcaaaggcacaatagctatcttttcacttgagctcagaaaagtaaaatggcttaatttgaactattaattttcagtggcctctaattaaacaaaaacaaaaaaccacaaatactggctaggtaagatattcctgaggtcattttaaaagaagtgtggcacctaggattcaatatttaatgctaacagtattatattttagtgaaatttattttggtggtgacagtttattaaacctaattagacttctttcaatagcttgttgtagagacaatctcaagggctggaaagtgttgctaaaatgaatgtcatacatttctgatatactaaggagcttataaagtaattctttcatagtgcaagaattattaatttcttagaggatgtttttaaaggagctacttaattgggaaaatgttctttaaatatcagtaatagttcattaagtaacatagtagctaagaacatggactatattttcacagcatagttcagcttaggcacacctttagtttggattattggcattctcttacgtaggaattatatcattgtagatatgtaattatggtaataagcaattttcataaccatgctcactcagactatatcatttgaaactgccatgtttccatttttgacaattcatgttcacaaaacaacaggaacaatttcctatttggtataaagagcaaaatttccaactttgccccaaaatgccatgggtggcatattgccatatgattatatcatatatttaatcatgtatgggaaagattttggattttttttcttatttaaaaaagtgctaaatataagaatatagttttaaatcagcaagtctaataacactattgcagctgtacacagagagaaccttttgtgcctttttgcctgcagtaagcatttatttctattttacatgagttctaagaatgttgatgattattgcaccttgttcttctgtatataaacttgattaaggaatttttttttttaaagcaaggagccgttttttgttactaggtggataccttagtaaacatgaggggaattatcagatagatgtctttggagcccagccttccctgtgtagtgagctggaaactcctttagattgtattcattggtgtgtatgtatatgtacatatatgtataaatagttaaatacataaacataaaacttaacatcgcattgttgtgatgacaagaagtagtaaggtgctaggtggttacattaaaaagcacagcacagtgtataatcagtcactatgactggtggttttgtaagctgggttcagtttttgaaccacccagaatacctcatgtgtaaatacagtgttcatgacttaattgaaatacagttattgtttaaaaaaaaaaaaaaagaatgtgaagccactggttggcttatgccttctgatctatcattcttgcctctttttttgtaaaggggttttcttcttgttgttctgttttttaatagggtttacagctagaattttgaatgccaaagttctatttattaaattaagaaaaaagttttcaatgttaatggctagtatttttccactggactattgtttgttgatgttggaatttgtatttacagagaaataaattttttataaaaagaaaaaaaaa

SEQ ID NO: 173779 - DNA, 848 bp, Homo sapiens
tgctgattaaaaatgaatcttctttattcattaaatcaagggtgcattgtaagaatttaggattactattgccatatttctatattataatataactacatttcttttaaatatcccgtaattctgaatattcactaatttacacagacaaccctccaggtcatccaaaatggaagctgaatcataacaggtggactacgttttgtaaaactgatttgacactaagaaaacttactgattgaaatgactgaactctgctctttcaagatattccttttaatttttttggcaaagctagatatactttttgatgtggaataatatatctcaatgaattcattaataaggtcatatagttcatttgtattctgattctaggtataaattttcactttttagattttcttaagttataattatgcttataatttgttttggcatctcttatgactatcaaactgatgatttaaaatacttattcccaatgtaagtgacatgatttactcacactacattatgaaataattttttcattcaaaattaaacttcagttgtcctttcaaaaaaaaaaaaacaacaacaaaaaacaacaagccctcaacaagaaacacgcaaaaaaaaaacatgttcgggggcgcccgcgcccaaaaatctttaaaccacatcgtgggcgcggcgcccagtgtataaacagttgacaaggtccaaagaacggtccgacaggcgggttccacaaaaatgcgcggcggttgcacacgggctcggctggtaaaggcgcgaaccgccgccgcggaaatcgaacacatcagcaacaacaaaagcagaaaaaaagcagaaacacacaaacc

SEQ ID NO: 173780 - DNA, 632 bp, Homo sapiens
ccttgcgccccctggccccagcctccttcgttgagacactatttgttgagtctttcctcttttcctggccctgacctagcgtggggcgacagaagagcaatagccgggtgggggctgtgagaacggctggggttgggagcgaatttcggaaacccggaggacgagtatagccttgcaagatggaaaatgccctcccgggctggcgcggtggcctgtaatcccacctactcggggtccgaggagggaggattgcctaggcccaggactttgagaacacgcctctacagagatttacattttaagaaaattagctgagttcgggtcgggcgcagtggctcacgcctgtaatcccagcactttgggaggccgaggctggcggatcacctgaggtcaggaattcgagaccagcctgaccaaaacggcgaaacccgttctctactaaaaatacaaacactagccgggcgtggtggcagtcgcctgtaatcccagctactccagaagctgaggcaggagaatcgcttgaacccaggaggcggaggttgcagtgagccgcgatcgcgccactgccctgcagcctgggccacagagcaagactctgtctcaaaaaaaaaaaccaaaaaacaaagcaacaa

SEQ ID NO: 173781 - DNA, 669 bp, Homo sapiens
agcagcaggatgcagcaatagaattatgggacatgctaattactagaatcagaatcaaaaaatctggattaaagttccagctagcctagcgttgtgggaaagccattccctcactttctgtttcttcatgtatagagtggaacctgttctacataccaaacaagttgtaagtctcaaaaaagaaagagagagagcttgagaatgtgaaagtgttgtgaggtagtatagttatggaactgtttgacccatttatgtcctttttttgggaactcttgacaaccaaggaaagagaatacaagaaatattaaattttactaacatagattctttgtgagtgctcttaaagctgtttgataatcccactacttatctctgtttgattcccaacccactgctttctcataacaccaatttcaactcttgtcatccttctcaagccccaggcccagttccttctattttagtctcagtagataagttcttccccaattttgccaggaaggttgagcaaagcccttgagtttccctggccaccatctcaaaatgtatttcttcacttaatttccatctcactttctgtctcttcctcgcaaaggtaacctgtatccttatcacattctcatcccatttcttctctaacctttcttcatcaattatttcatgtctttc

SEQ ID NO: 173782 - DNA, 780 bp, Homo sapiens
tcgggggccccgggaagtcccctttcctctgcaggctcagaagtgcctgctccagatgcgtggcttctccagactcccagtgtctgctccgggactgagcaaagttttggtcaagtccgggcgctttgcaacccggccgggtgtgcgtacactcggggcagccctgccatgccagccccctgccgcctctgccccctccagactttgggtgccaacgagcacggggaggaaggctgaaaggggcctgcaggtcccccatggcacggatagccagggcattgcggtggacaaacctgtcaatggcagcaggaggcagataggttcccgggtggaaaggggcggtcccggtgaagccccactttgaagacagggacgacctgaggcctggggcctgtcggttcccagtggagtccaccgcgggagtgagaacttttggtgttttttccagccccgccgatggccacccatggaccaatcagcacacacttcctcccttcaaaacccgtagaagtcccagactcagctagactcgcagagagatgtcaggatgacctgcctgcggataagagcttctcactccgggtctcctctcccctgagagctggacactcctcaggaccacgtgcctgcagaaaggaactacccacttcaggtctcctgagagctgttctgtcactcaatgaagctcctctctgccttgctcaccctccagttttccatatacctcattcttcctggacttgcgacaagaactcggacccgctgaatggcgggactgaa

SEQ ID NO: 173783 - DNA, 538 bp, Homo sapiens
  misc_feature (198)..(198): n is a, c, g, or t
  misc_feature (386)..(386): n is a, c, g, or t
taaaggaatacctgaggctgggtaatttgtaaagaaaagaggtttatttgggcttgtggttctgcaggctgtacaagcctggcaccaacatctgcttggcttctgttaagggcctcagaaagtgtacaatcatggcagaatgcaaagggggaagcaggtgtatcacatggtgaaagagcaagcaagagatagagattnggggaagtgccacagtcttaaccagatctcatgtaaactcagagcaagaaataactcattccttcgaggacagcactgggccattcatgagggatctgcccccatgacccaaacacctcccaccaggcctcacctccaacattgaggattacatttcaacatgaaatttggagaggacaaaacatccnaaaccatatcagcattccaagttattgtagggtaatcatgcataagtaggtaaaaaaacccacatggtttcattcctgtcattttcctgtggtgttttttgtgtgcaacattcttaccttcccacttctccatctgacttctgcttgtcctt

SEQ ID NO: 173784 - DNA, 574 bp, Homo sapiens
acgacttcctactggcatatctgactgtaaccgaccacctcagggtccattccgatctgtatatatgtatcatgtaaacatgatttcctactggcatatctgactataactgaccacctcagggttcattccgatctgtatataagtatcatgtaaacacgagttcctgctggcatatctgactgtaaccgacctcctcagggtccattctgatctgtatatatgtatcatgtaaacacgagttcctgctggcatatctgactataaccgaccacctcagggtccattctgatctgtatatatgtatcatgtaaacatgagttcctactggcatatctgactataactgaccacctcagggtccattctgatctgtatgtatgtatcatgtaaacacgagttcctactggcatatctgactataactgaccacctcagggtccattccgatctgtatataagtatcatgtaaacacgagttcctgctggcatatctgactgtaaccgaccacctcagggtccattctgatctgtatatatgtatacatgacatctgggttcctgctggcatatc

SEQ ID NO: 173785 - DNA, 367 bp, Homo sapiens
tattgttgtatgtgtcagaattccttcctttttaaagcagaacaatattccacttatgtatatatcccattttgttcatccatccatcagtggacccttggtttgctttcacctcttagctgttataaataattctgctatgaacatgggtatacagatacctctttgagatcctgctttcagttcttttttgtgtatacctagaaatggaattgttggatcatatggtaatcctgtttttaagtttttgagaaattatcagactttgccacatcagctgcatcattttacagtgctaccagcaaggctaaagggttccaatttttccgcattgttgccctcatttgttttcttccgtgggtgtatt

SEQ ID NO: 173786 - DNA, 218 bp, Homo sapiens
cctctctcgaatcactcactctgggggaagagaagtgctatgctgtgaggatactcaggcagctgacggtgaggtccacgtggtgaggcactgaggcctcatgccaacagccaagaggaaatgaacctgccagcaaccacatgagcaagcttagaggcagggccctcccaggcaagcctcagatgaccacagccccagccaacagcttgactgcaacc

SEQ ID NO: 173787 - DNA, 302 bp, Homo sapiens
ctgtaatcccccttgcatggctgaggcacaagaatcgctcgaacctgggaggtggaggttgcagtgagcccagattgcgccactgcactccatcctgggtgacagagtgagagactctatctcaaaaaaaaaaaaaaaaaaaagacattttctacctaaccatagtgctgttatcacacccaagaagtttttaattgatgtagtattattgaatatatagtctatattcatgttttccccaattgttccaataatggttctttttagccttttttttttttttttaaaacaaaaaatctagg

SEQ ID NO: 173788 - DNA, 828 bp, Homo sapiens
  misc_feature (1)..(1): n is a, c, g, or t
  misc_feature (3)..(3): n is a, c, g, or t
  misc_feature (5)..(7): n is a, c, g, or t
ngncnnntgcctctgccatgttagaagtgcctttcgcctcccaccatgactctgaggcctacacagccacgtcgaactgcaagtccacttaaacctcttttcgttcccagtttcagtgtggtggaaaaggaagagagagctgaggcagacgatgtaagatctgctgttacttcttgctgtgtgaccttgggaaaatcaggccatgtttgtgtccacaaacaagagtgaagataatctctcctatctgagaaatccaggagtggaggaatccaatgggaactctggccaagactctactacccagacaccaaaagaagaaatgattaaccctggaggctgccttggtctaggtgaaaaaatatatgtacgatgacagtgcaatcatactagaactcaggattaagaaactcactcaaaactgctcaactacatggaaactgaacaacctgctcctgaatgactactgggtacataacaaaatgaaggcagaagtaaagatgttctttgaaaccaacgagaacaaagacacaacataccagaatctctgggacacattcaaagcagtgtgtagagggaaatttatagcactaaatgcccacaagagaaagcaggaaagatctaaaattgacaccctaacatcacaattaaaagaactagagaagcaagaggaaacacattcaaaagctagcagaaggcaagaaataactaaaatcagagcagaactgaaggaaatagagacacacaagaacccttcaaaaaaatcaatgaatccaggggctggttttttgaaaagatcaataaaattgatagaccgctagcaagattaat

SEQ ID NO: 173789 - DNA, 813 bp, Homo sapiens
  misc_feature (1)..(1): n is a, c, g, or t
  misc_feature (3)..(3): n is a, c, g, or t
  misc_feature (5)..(7): n is a, c, g, or t
ngncnnntgcctctgccatgttagaagtgcctttcgcctcccaccatgactctgaggcctacacagccacgtcgaactgcaagtccacttaaacctcttttcgttcccagtttcagtgtggtggaaaaggaagagagagctgaggcagacgatgtaagatctgctgttacttcttgctgtgtgaccttggggaagtgggtgtgcctgggatcacacacagctgctaaaagaaggtctcaagagccacagatgtcttggatatttctgtatttcagactctactacccagacaccaaaagaagaaatgattaaccctggaggctgccttggtctaggtgaaaaaatatatgtacgatgacagtgcaatcatactagaactcaggattaagaaactcactcaaaactgctcaactacatggaaactgaacaacctgctcctgaatgactactgggtacataacaaaatgaaggcagaagtaaagatgttctttgaaaccaacgagaacaaagacacaacataccagaatctctgggacacattcaaagcagtgtgtagagggaaatttatagcactaaatgcccacaagagaaagcaggaaagatctaaaattgacaccctaacatcacaattaaaagaactagagaagcaagaggaaacacattcaaaagctagcagaaggcaagaaataactaaaatcagagcagaactgaaggaaatagagacacacaagaacccttcaaaaaaatcaatgaatccaggggctggttttttgaaaagatcaataaaattgatagaccgctagcaagattaat

SEQ ID NO: 173790 - DNA, 227 bp, Homo sapiens
cctgtctccacaagctcctccactttctaatttcctgcttgtagtctaccttgggcttaaaaaaaaaaaaaatcagacaactaagccttttgggatcctatcaaaaatatgaagaaaaagactttcgggtcatcagacaggtcagctttggactaatgagtttggtgacatcctgtactgacagctcacaggccaccttggttctggacggggatccggatgctggg

SEQ ID NO: 173791 - DNA, 722 bp, Homo sapiens
tttctttttttattgtgtctcttcccagttttggtatcagaatgatgctgtttttatataatgagctgaaaaagaagtccctttttctcaatattttgaaataatattagaagtggtaccagctcttctttgtacatctggtagaattaatctgtaaatttgtctggttctttgctatttgtgattggtggccatttaagaccaattcagttttggcacttgttattggtctattcagggattcaatttcttatttgttcagtctttggaagatgtatttttgctccaaggttacagtcctcaagcttggcccagatgaactctctacttatattcatgttgcctcagttttttcttttagttagacatattatttagaatgtgccagagcagcctctatgaggggagctctcctttgattgtagtctgtttgctgtaacacccaaggatgcagagtcagattgatcccacctagaatctgcacataaggtctggcctctgcctaggatttacaagacagggccagaagactttggattgagaatgtactgaaaaccaacagaaggcattttctgtattgtgagatgtcagtgtagaaatcttgaagcccccatttgagagtgtggctcttcaagcttttcagatcttgtttagtgagtgacctgctacagttatgtgagagactccaggtataaatagaatttgatgacagaatctgtaag

SEQ ID NO: 173792 - DNA, 408 bp, Homo sapiens
aaatgggtgaattatatggtatgtgaattatatctcaatcaagctgcttaaaacgcgtgtgtgtatgtacgtacttgaaatcagcctatacgtaagatagtgtgttgtgttttctttccctgtcgtatcatgtatctttctcagtatctattacaaattttgggaactgtctaaatggcactgtttcaactgtacctaagcccacatattatagatgtctagagtaagcaacggatttggagttgcttctccagatgaattggaacgctccctggggctcttctaagagaggcaggtgggtagcagagtctgttcaggaagctgggcagacgccctggctgctgtccgtaccgcttgatggccacacagaggcttctctttctggcttaggatctgcctagggagggc

SEQ ID NO: 173793 - DNA, 235 bp, Homo sapiens
gccatatttatctggtattggttggctgtagccagactggagttctaagtaataaggggactatgctttcctttcacctcaggtaagaaattgtattcaacacatgcttaaacccaataataagtataattaatgctgtatagatctggcaggcaaattagcatcctaaatttgagtcaagtaaaaaaagtaccaaaagaaaatagttcccccaagaaacctagccaaatctgtg

SEQ ID NO: 173794 - DNA, 103 bp, Homo sapiens
gatttcaaagctccttttggctggccccagaaatacatttcttagaagaaatgctagaagtacctaatttggaacagaagatttacatatttggtggggaaag

SEQ ID NO: 173795 - DNA, 637 bp, Homo sapiens
ctcacatgaatggacagtcactgagggaacttcatatgtaggcttgagttcaggtatatgaaatgcaggctaagttttaattagaatttatttacagctcgaagctgctcctttgtttttctgcctgaagtcagtaatgaaccattcctctttgcctagtcattagtattcagagctccatcagcctgcagttcaaaccctttcccttgtttttgtcagagaagatgatggagcaaggttgcttagaaacacttagccacactctcaacgggaattatcaatctgtgctgtatgttcacccccacacgcaggggagaaaattgagttttactgctgatgacgttaattgattgcaagttgttttagtgggagtgtgatgttgaaaactagatttcctttcatttttatgcattagatgcagagaagctatacagtgacatgttcattccactgtaactaaaaatatcatagaggtatctaaatttggttttgtatgttttatattcagatcttgacactggtcagcttacaggattatctttgggttggagactgtttctgtagtgatttctttagttcccagtaaattcacacagtcatctccttcaatagagttctgattagtgcagtcaggggg

SEQ ID NO: 173796 - DNA, 346 bp, Homo sapiens
cttagaacttacattctagtttcatgaagctgcaggcttcttctcctcacctcagggtctcaccacatgctacattgtgcttagccaatttcaactcattcttcaggtctcagcttagacatccttcctcagggaattattctctgaccctaccctactaagttagttccttcttacatgatccatgactctgaactgtttagtgttactcaatgcaactaaaattatttattcaacatccaccttcttatatccccaggccctcacacagtacctggcacacagaaggcattcaaaatatttgtttattggccaggcacagtggttaatgcctgcaatcctagca

SEQ ID NO: 173797 - DNA, 239 bp, Homo sapiens
tgagctctggccatccctctgacgttgctgtagccacgctggcctcattgtcctggaacattccagggatactcccctgacttagggcttctgtgctagctctcgctgcctgatgtcttctgtggatatcctcgaggccctggatatccctcccccaggctcggctcagacaccacaactccaaagtggcccagtgccctccctgagcgtcggtccagaacggcactctcgtccctcct

SEQ ID NO: 173798 - DNA, 510 bp, Homo sapiens
cagagcctttaagaggtgattgggtcatgagggtactgtcctcatgaatgaatgaatgttgttatcttgggattgggctagtgatttggagactgagtttgttataaagatgagtttggcttgatttcctctctgtcttgcgtgctcttttctgccttcagccttccaccatgggatgaccctcaccagatgccagtgccatctgttacaataaatacaatacatacattctgttacagcaatagaaaatggactaagacagacttactgtgagtcactgtgagtgttcaatgtggcacagtaaacttaaaatgcccacctcagtgcctggccatggcagatgttccagaactgtccattccttgcccttctctacttccaacatgggattaggggatggcattgatattggcacaagtgttctggctagtgagtttccatgtggcttaatcctgaaatccatccttctcatttcctataaactaagttttacaatttccttaaagttta

SEQ ID NO: 173799 - DNA, 313 bp, Homo sapiens
gtaagctgttgtaggttgtgttcccaggcagctgatcctgagatggagattagcatgcaggaagttgattagggatatcaatcatattggattagagggagaaaaaagaaagaaagttgactagggagtgctctcatgatcaacacctgcaggaaagggagggaagcagggttggtgggggagaagctgggttggtatgtagcctctgcaaaagcctcctctgatccctgaagaactttgaatccagggtgacccttcaaagctattccaggtatcattgggggagggggcctttatatcccccacccttaca

SEQ ID NO: 173800 - DNA, 241 bp, Homo sapiens
ctaactgctgcttctcagagggcaccatccgctcacatgcctgtgtatctttgcttagtaaccctgaccacttagggagttcctgctcatcttttattcagttcaaatgataacatcatgaagtctttcccagccaccctctttgcttattccacacaattatttcgtgtaattatgtacttacagtgtcttttctgctaggcagtgaacttctctttcatttattttgtaagtatttgtt

SEQ ID NO: 173801 - DNA, 385 bp, Homo sapiens
ccacacctgtagccccttctgactccactcaaatcacagttctgctctcgacttgctgtgtggcctttgggaagttactctgctcatcctcggagacctcatccatgggacagggggtaatggtacctagcttttgggtttttcttaggatggactgggctcattgtgcatggaaagtgctagcccagggttgggctacggaagcactctgttacctgctgctgtttctcagaagtgagccctttggcatggagagctggaggaagaggacgaatgctcaaggtctcagggctggagaggaaatcatgatcatggggtggcaaaggacctcaaggcactgccagacactctgggctcttggagaactgttcagtgttggggataa

SEQ ID NO: 173802 - DNA, 658 bp, Homo sapiens
gcatcagagtgagaccctgcctctaaaaagaataaagttaaaaaacaaaaatagaacacacctccccaggtaaacaaatgcaggggtagtagctaaagcactgtcactgtaaatgaacagccacacctggtgactagtaggcccccaggtatccccctgggctgggtttcagggatggggccctgccattccttctggcacaatcctagagctggcctagggtccactgagctcacttgcctcttttggccccgatgcagtgggcacttctccacctgcacatgttcacctccaggaggcaggctgggaaagaagcttgttacaaagaacaaacgtttccaggtaaacactgtcagctgtgatggcataaaacaggtccccatgtctgatcatacggttttttttccccacacacgttttttctattgtacttttggcttcacgcttctctattttcaatgaagtgaagaagaaccttatttcaataagctttttgaaaaattagaatcaggggctgagttgaaagaatagaatgaaatagagctctacaatgtattaatatgggaaatctacaagatacagtaagtaatgaaaacaatgactcgatgtcatttgttaggaagataggtacttatacacgctggcacaaaaaacaaac

SEQ ID NO: 173803 - DNA, 316 bp, Homo sapiens
ttacagtctttaaggagatgggaatgttttactaagtgttttgagtgtatttggaatattaataagttcttatggaaacaaagtttgggtgtacatggaaccaggagtttttcagagctaaaagaaggtagtacattttatttaaataaattgtcagaaagagaaaagggctaaaaacaaagctgaaaatgtgatagaaacctagaatttttatttctaggagggttactcattcaagccagtcttcttattatctttgaggaaacagaggcttatgagtcaagtatgtcatttacccagagctttgaccacatct

SEQ ID NO: 173804 - DNA, 504 bp, Homo sapiens
aatcaagagatttattaaattgtaaacattaaaatggaaaaaaaaattcggtcttaaatttctgcttcactgctattccggactcttctgcggatttacaagctatgtactgtctaacctctagtacggtttataacatcacaagggtggcttatcgcattgcctggagggattgaccatgactatcaagaagaataaaaatattgccatacaattggtagagcaatattttggaacttaaaaacccctaccaccacccctaccatagaccaagcttgaaaggcagaaatttaacacagaatgattacagccttatagaaacaaagacaggaccaatcaccagaagctcagccctttcagaataaagtttggtatcacatccttgctcaaacaaatccaatcatccgttgaggtgtgctggatcacggatggtaaaagaagaaagtcatatatatttgactgtatattagctgcagctttatgactacttgcaaatcttgctta

SEQ ID NO: 173805 - DNA, 536 bp, Homo sapiens
gacaagtttgccttgggcccacaattccttgagccttcccacttccagctcaatgtattcgcttttattcctacttaaaaaccttccccatatgattcaacttttggcctttatccacattcctctcaaattcttcccccgttcttgcctctttcgcagatcaaaactatgcaatatcttcctccttatgatgcatatgttctaaaacttctttgattaaacttttttatattactgaacataaacattcgacttctgcctgtatatttttgaaaatatttccaaacatatgtggccatcttgtatgtgtatgtacatgttagcctaacacattttttttttgagacagagacttgctctgttgcccaggctggagtgcagtggcaccatctcggctcactgcagcctctacctcctgggttcaagcgattctcctacctcagcctcctgagtagctgggatgacaggtgtatgccaccacgcctggctaatttttgtatttttagtagagatgaggttttgccattttagctggg

SEQ ID NO: 173806 - DNA, 211 bp, Homo sapiens
gttttaattgatagtgtagcagctactttgaaattgtatcattttgcctaagggaggaaatattctgtgaaatatcttgtttggttggttcgagaaagttatttgtctgggcacagtggctcatgcctgtaatcccaacacttccggaggctgaggtgggaggatggcttgaggatagaagttgggcaacatagtgagacctcatctccac

SEQ ID NO: 173807 - DNA, 246 bp, Homo sapiens
cttacccacctgtaaggccaggaacccttttaaaccagaccagtttctcaagtctgagtgtgttgtttctgttcctaaaaaccacaaaagaaagaaaacagtgatattacattcaacgtggtaacaactctgaatctttgttctaacagtggaaatataatatctctagggattaagcccggtctccagaatgtacccgggccataggaaaataacatccagatgttttttaacagcacctacaag

SEQ ID NO: 173808 - DNA, 292 bp, Homo sapiens
tgcagcacaggcttcccttgcttcaggagatcaagagagaggagaatgagggaagtgaagatagtaattccctgaaccccctccctgtagcatcactgtggactggctgtgttacgtgaccaaatgccccaaacacagcttctttgtgttttgtaactacactctctcctttctgctttcagcttaggcgtgatttgggggccccaatgttactgcgtctcccttgtgatctttttaatccctgcccatacctctgtttatagtcttttattaaactcttcaatgtttccta

SEQ ID NO: 173809 - DNA, 107 bp, Homo sapiens
agctcaaaccaaacctgcctaaaatccatcctgtcactttccttcctaaactaagccttctgatgtttttaattctgtcattagaaaattcaatttcggcagggcac

SEQ ID NO: 173810 - DNA, 294 bp, Homo sapiens
ccatgtgtcgatttactagtagatcctactcctccctggcataactctcaagaaagtcatctccctcaccatacccccttgtcttcccccataatatcacccccttttccctatctatcctcagatggaaagagacagacacataaattaatctgttctcagctcctaactcccaagctctccagtgctcaggttgttccacagcacctaatccttccctatagtttccgcccaatcctggcatcctcagcccctcactccaaaccccaacctttttccccactccccaaatcc

SEQ ID NO: 173811 - DNA, 146 bp, Homo sapiens
ccttccagtttcttaagcatccgctcaatccttctctaagtaggtgtagttccatagagagaggaaactttggggaaggaattaatcaaaagtctctgggatatatacttttaagtttcctaaaaataacatgctctctcttgcct

SEQ ID NO: 173812 - DNA, 259 bp, Homo sapiens
ataatttgttgacacccttccataaatcctgtattctggggccacctttaaagctgtaatacttaaggaacaccctccaaccaaatacatcactaggtttgaattttgccatgtatgtggtagtggtctttgccataccctctgtttgtacaaataatcaagagttgtatttgtagacattaataagatctctctttatggcttagaaaataagtccaaactgatgggtctttggtaacgcatttattggaaggcaaga

SEQ ID NO: 173813 - DNA, 224 bp, Homo sapiens
ttgtaactatactagaatgattggtgatttgtttgtttgattgtttgtttgtttgtttttcctctgaggcaggtttatcttaacttagaggtggaaaccctttgttacttagtccagtgttacaatgggtttgcatgctctctgcatgcatcaggagatggcagcaggagggggccaggagcacgctgcgtggtaggagaacatgatcctagaattaaacattc

SEQ ID NO: 173814 - DNA, 460 bp, Homo sapiens
tgcgaagcgggtcgcagagagagatgggcgttgcagaatcagctggggtcacttatttccggtctcactccagatgaaggagccactagccggcgagagttcaccgagggaacgtgacactcatatctcatcgagggaccgtgttgagggagcccctacagagaggccaaaggaggagagggcctacggagaaatgaacctctgtaaaagctgctctttagggatcagtctttttgtgactctagcttcatagcttggtctctccattactccagccttcctttcaatcatacactgcctctctccagcaccaccaatggatacttcttttctaaaaatgtttttctgtgggttgctgccgtgtctgtgagaaggtgggcagagggttcaagaaaggaaggatttgggatcagcgtaccagggttggggagacagggcaggagcccagctttttctgcat

SEQ ID NO: 173815 - DNA, 339 bp, Homo sapiens
cgtgacatctccgcttacgtgaaacaatctccccctacagagaggccaaaggaggagagggcctacggagaaatgaacctctgtaaaagctgctctttagggatcagtctttttgtgactctagcttcatagcttggtctctccattactccagccttcctttcaatcatacactgcctctctccagcaccaccaatggatacttcttttctaaaaatgtttttctgtgggttgctgccgtgtctgtgagaaggtgggcagagggttcaagaaaggaaggatttgggatcagcgtaccagggttggggagacagggcaggagcccagctttttctgcat

SEQ ID NO: 173816 - DNA, 365 bp, Homo sapiens
caggtacttccatctcccattgcttcattcctactttgtcagctgtttaacctgcacccaacagacgtacttgcaacgagttcccaggaccatcattcactctttccctgattccgtcaatgaagccactgccctccaaatctcctccattggagaccacagatttgtaaacagatgcaaggaagcaaggtaaagagcatggtctctggaatctagcaggcccagattaagatcccagcttcaccactcactgcggggtaacactgagaaatgtacttcacctttttgcttctggttcctcatctgtaaagtggcatgtaacccactggactgttccaaaattacatcatacgatgtacataaag

SEQ ID NO: 173817 - DNA, 187 bp, Homo sapiens
gaagagcctacacaatcacctttatttccttatttctgctaatttcttggtctactgcaatctggctttcggctgctataactccacggacactgctatcaaggtcatcttcattttatcaacacattgtctaattgccacatctggattgatttaaaaaatctacaaaatcacttgtgacctttgg

SEQ ID NO: 173818 - DNA, 204 bp, Homo sapiens
ctcaagtagtcctgacaccaagcctcctcctaaaccgcccacctccatatatacacatatgtgaacacacaaacctgctttgatcacaccagttgcctcacttgcaatgcaccttcgcccaagttattggctgaagccaggactttcatggggattcaagcagaaagtctgggttatgggaaagaaggcatttagttggccggg

SEQ ID NO: 173819 - DNA, 440 bp, Homo sapiens
cccagcctaagatgcattttattcacttaagagagctaacctgttcagattatgaattgacaagtcatatcaattctagttttgagtgactttcagaagacaatcacacacctcatctataaatcagcatatgtctgtaacatcttccaaaactcaggagggcagatgaaagccattctcacacatgtcgttcacatcatcagcagaaactgtgcgttagtgggtggaattccttttgcttagttgtatgatggtgatagctaataaaaatggcatttaaaaatgaatgtctaaaacttgggctaacccaggaaattacaggcatcttaggaataaaaagacaaaaagagacaaagaactgttctttaaaagtgcaaggaacagagtgagggcaaaggaaaaggtttcttctggaggagggaggaaaaacaacaacaaca

SEQ ID NO: 173820 - DNA, 549 bp, Homo sapiens
  misc_feature (522)..(522): n is a, c, g, or t
atgtggtctacctcctctcctgaaaaataccatccaccgaagcagagcttaaatcaaaggacacagagtgtaatgcacttgtctaacacaattgctttctaggcctgatgtaagttgtttgaaacccagtggtacccggtcacctttggcctagttagtacttttcctctccgtgtgattgtttgagataaaacctgtttgttcttcatcccactgacccaaaactctgcaaagcccacagctgctgaccatgataaaacataatggtcagcccgagtcatgtaaataagctcttccccttgcatgtgcaatccacaacccccacaggaaggcccaagggatcacgtccatggcttagtcccacaggtccccactctctctctccttctctctctcacccaccacccatcacttggctctctgtttgtctgttattagtgtataagaatgcttgtgattttggcacattgcttttttatcctgagactttgctgaagttgcttatcagcataaggagatttngggctgagatgatagggttttctagat

SEQ ID NO: 173821 - DNA, 330 bp, Homo sapiens
ttcaccagcccagcctccaccttcctgtgtccactcgggccatgcctgtcctcaggcgcttggctacgcccagactagagagcatttcctgcacctggtagataccaaacccccgtccaggtgccactccccctggacaatccctggctttgccactcacacattccctttctgaagtcccaatgcctctcccttcttcttgcctatctacacgtttctgggacatctactttgttctaggctctgttctagggattccgcagtaaataaatgagataaaatcctctgccccccccggaaatgaaactctatttgagaagaataataaca

SEQ ID NO: 173822 - DNA, 280 bp, Homo sapiens
tcttcacagagttctcagtactggaggctgaggataaagaacagaggttcagtgccctacgcctgactcttcccagctgagtacctggtacctgcatggttctgacttcataaagcagaggacgctcaaggaggcagctggacagatgttctaggaccatcgtcttccaataggcagaccaaagcctgactggagtaacagagcatccccccaaccccatcccaatggatgccctgctctggggccgggtgggcattttataaacccagaccagaggatg

SEQ ID NO: 173823 - DNA, 589 bp, Homo sapiens
atgtttctgctattctgcacattatggaacagccagaaattcaaagtgaggaaatactgatggtgtcagtgatttagaagttgtgatatgattggtttgacttgctgatgagataaaaagaagagctggtactggtgatcagagacaagtcctgcttataccaaaatggagaaatattagttaaagtagaaaagatgaagaggaagacaaaggaaagcagaaaagaaaaaagtcctaagtgatgagaagcagcccaatgtcactggcatcatatggccagaaaacaggatcttgaagaacatatgatttgggaaaatctctcaatagagtaacagagctgacttggaaaattgtgtgaaaggataagtcaagctatttactactttttaaatagcctttaaaggaatcgcaacataaaagatgtttcattttaagtctgacaacagttgaaaaagttgagttcaatagctctgcaagtttaaatggttcattaggcatcaatattaataattcaatatggcatttctcttgcagtttgactaaagaaaaatgttggctctaattcactttattaattaaacacaatttg

SEQ ID NO: 173824 - DNA, 226 bp, Homo sapiens
ccagagttaaaaaatagctacaccaagaaaaataatatttataaatgcagttttttaatcatttttattccattctccttttctctgtgctttctatagtcacattgtgctgtataatattttatagaaatatagaacttgctttttcctaaaaataagtagcaattacattttaaagggagcatgaataaattaattcagagcacataaaatgttcacaactact

SEQ ID NO: 173825 - DNA, 183 bp, Homo sapiens
aacaccaaagccatcatcttgtcaccattcagaaaaaggaggccttgatttttgctgctgttccttctccatcccccaggacagcatgtgagtctatttagataatcacagtcccaggtgaatctgcactgagcattttttccattctcttactcgtgaaatgttcatttgggaaaaagaagt

SEQ ID NO: 173826 - DNA, 443 bp, Homo sapiens
ccccacgtcactccccacattggttcctcccggaacaatctctttcacacacacacacacctccccactcccagttcctgtgtccctaactgtggtggtgagccactctcgccacctccagttttcttttcctaactgacttggcgagccactcttgcatcctatgttggttggggtgtgagtttcatccgaattggcgagccactcttgctgcccccaacctctctgggtcagactactagttacaccatgggaggtgatcaggctccccttctgtccttatgggaagggtcctgccttgggccccaaaaccttaccgcggtccagtagcacactgttcctagtaatcatctggtagcccctctcaggttccattgcactgctgggtggggatgcctggtcacagaagagctgatttcccctccaggctgaagttctcctgg

SEQ ID NO: 173827 - DNA, 503 bp, Homo sapiens
gaggtatgaataagatactggtttctggagtgtggcaggtgcttttgtcctttttcaccttgaacctccagtaccattctccaccatcagtaatagaatcacatgcatcattttgtgatgtacctaggtcctcagtgattacagtcactttggctttactagaattctagtaggttaaaaaataaaatgtggttgcactgcaaatgaatttgctcccatagagatgtacacatttacaacacaggttaatttatgactagccttttttgtttttttagtcagtgagcctcgtttaaacattttatgctgccaaataaagatcatagactatcagtttaggttcttatgtataaggtttccagtaaggcacatagataatttttactttaaaattgtgtggcctcaggtattcatttattcagcaaatatttattgagcaatggctatgtcagccaatatgcaatattaattatctttcatttttaacatggaagacagctcta

SEQ ID NO: 173828 - DNA, 729 bp, Homo sapiens
cagcctcctggtgactctcgcctcctcttttccagcggacgctaccagaggacgaaggtctgactctggccaacggcccagaatttctggcccagttttgcctgaggaagccaactgtgcaggaggtcaggatcccggtagggtgagagtgggaaagttaacattcccaagagactccaagcaacaggatttcctgacctgggactattacctttctcacattacatggccagatttacttcctgctattattaaaagtacgaaaaagatgaagatatgtgtttaatggaaacaagggcaagagtttgcctgactggactttgaggaggctgtaggatcatggcgctaacggcatttggagggctgggaagggactctagccctggctttacctgcctttgtcatcagctggagcaagcaactccgcaacctcggagcctcagtttccttttctgtaaaaggcggggagggtgggtggtaagtgcaatgctgaatcagaactcatagagctgctgggtggacatgtgaagtaaaagaggagacagcttttgctcctgaaggatgccatttgcgttttcctcatcagtttgatctcctccaatcatccagcacctccatctgaccttctcagctgagaggtcctcagtgtttctgtggcctccaggagaaaggtccccctccccggtgaggccaggtgatggaggctgcacggccagccttccacagtca

SEQ ID NO: 173829 - DNA, 463 bp, Homo sapiens
aggacagtctatgactgcatgatgattttaactaccttccttcttctccagatcctccaaggcagaaaatcagaaaagcaactagagagatggaaatggattttttttttaagtaaagcatttaacattgaaccacaagacttactgagttatgtaatagcagaaatatcattgttgattttgtgacatgtcagtgctttcctaaaagtgcagtgtggcatattttttaaagattaaattgaattaaatatcaatttctattttaagaatttgagtagtgtgagataattggaaaggccccggagtgtttcagtaatggttgagaatcattgttcttaataatagaagtgaactctgaaatgccaagcattttatatactctggctaacctatctttaaagtaataatgtttctaatgcactggagctcatggcccccattggcaatcaccttgactcttccc

SEQ ID NO: 173830 - DNA, 679 bp, Homo sapiens
gagctctcattcactgctgtgggaatgcaaaatggtacccgctttggaagacagtttggcagtttcttacaaaacaaaacatatttttaccatccgacccagcattcacacttctttgtatttacccaaaggagttgacaacttatgtccacacaaaacctgcacatgggtgtttatagctttattcataattgccgaaacttggaagaaaccaagatgtccttcagtaggtggatagatataaactgtggtacatccagacaatacaagattattcaatgctaaaaagaaatgaggtatcaagccatgaaaagacatggaggaaacacagatgcatattactaagtgaaagaagccaatctgaaattgtgattttcctacaaggaaattccttgtggacaaaggacagacagaactcaaaatcctccttctgctcacgtgagacaaatgcatgtctgatctgcttcctctgacctactgtttcactaagccaaactaaggtagaagtggctattcctctacaccaccccacatgtagattgtgtttttggtgaaaggctggctgatcagagactcaaaagaatgcaaacatttgtctcttacctacctatgacccagaagtcccttcccccactttgagttgtcccacctttccggaccgaaccaatgtacaccttac

SEQ ID NO: 173831 - DNA, 404 bp, Homo sapiens
ggcacccccagagaggttcagctgcaaagatgacagcccattacattattatgatgggtaggtgggatcttccaggacccagattcctccactccaaactagcatgctggcttcacctttgaagaagaaacggacttgaaatgagactggggatgaggggccagcaggggcagattgtgcaggaccgtgaaggcacacagaagctgtgggccacccagaggccaatgctaagccgctgggagtcaccgccactgctcaccaagctcttgccacattggcgtcctttcagttcgtacaagaggccgaggtctttcctgccttcatctctttccacatacagtttcctctgccccctctgctcttgcccccacacctcactttgtgaacttctatttatcctttag

SEQ ID NO: 173832 - DNA, 519 bp, Homo sapiens
ggccttgggtaccatggctgaggtggagagtctggcagcctttctcagagaagagggtcctgtgggcagggactctgagatgctgctgccacccttcctgatgcccagtgctaagagtggaacagtcatcccttcatgccttgtttctcataggtaccctgggggtgagcttatcctcctgcagcgtccctggttccaaacccaccttcgagctctcagccgacgaggtggagctgggcctgggtaagcttgtggccatccatcccagccctgcctgctccttggccctggactttgcccaccttgcatacccttagagccatcaacctggtcctctccccaggtggtcttagtatttttacctggtcatttgaggcccagcctgggccaacctgcctgatttctacctgctttgctgtctatacccacagctttggccatgtggagctctgtgcactgcccacctcctagcctttgcctgccattcccaggtcctcagagtcctgccaagaatacacc

SEQ ID NO: 173833 - DNA, 2365 bp, Homo sapiens
cgcctctttccgccagcgcccgcaggacccggatgagagcgcacgcttcggggtctccgggaagtcgcggcgccttcggatgtggcggatgcggccgtgagccggcgggggaggtgctgctgctgcctccactgtactcagacccaggtagcacaggattgtccatcctccagcagctcagtgcaacggtgtgaactcagcctgtttcagagcctccacaccatgacctccaagaagctggtgaactcggtggctggctgtgctgatgacgctcttgctggcctggtggcctgcaaccccaacctgcagctcctgcagggccaccgcgtggccctccgttctgacctggacagcctcaagggccgggtggcactgctgtcgggtgggggctctggccatgagcctgcccatgctggtttcatagggaaggggatgctgactggggtcatcgcgggagctgtgttcacctccccggcagtgggcagcatcctggcagccatcagggccgtggcccaggccggcacagtggggacgctccttatcgtgaagaactacactggggatcggctcaacttcggcctggcccgggagcaggcccgggctgaaggcatcccggtggagatggtggtgattggggacgacagcgccttcactgtcctgaagaaggcaggccggcgggggctgtgcggcacggtgcttatacacaaggtggcaggtgctctggctgaggctggtgtggggctggaggagatcgcaaagcaggtgaacgtggtcgccaaggccatgggtaccctgggggtgagcttatcctcctgcagcgtccctggttccaaacccaccttcgagctctcagccgacgaggtggagctgggcctggggatccacggggaagctggtgtgcgccggataaagatggcaaccgccgatgagattgtgaaactcatgctcgaccacatgacaaacaccaccaacgcgtcccatgtgcctgtgcagcccggctcctcagttgtgatgatggtcaacaacctgggtggcctgtcattcctggaactgggcatcatagccgacgctaccgtccgctccctggagggccgcggggtgaagattgcccgtgccctggtgggcaccttcatgtcagcactggagatgcctggcatttctctcaccctcctgctggtggatgagcctctcctgaaactgatagatgctgaaaccactgcagcagcctggcctaacgtggctgcagtctccattactgggcggaagcggagccgggtagcccctgccgagccccaggaggcccctgattccactgctgcaggaggctcagcctcgaagcggatggcgctggtgctggaacgggtgtgcagcactctcctgggcctggaggaacacctgaatgccctggaccgggctgctggtgacggcgactgtggcaccacccacagccgtgcggccagagcaatccaggagtggctgaaggagggcccaccccctgccagccctgcccagctgctctccaagttgtctgttctgctcctggagaagatgggaggctcatctggggcgctctatggcctgttcctgactgcggctgcacagcccctgaaggccaagaccagcctcccagcctggtctgctgccatggatgccggcctggaagccatgcagaagtatggcaaggctgctccaggggacaggactatgctggattctctgtgggcagcggggcaggagctccaagcctggaagagcccaggagctgatctgttacaagtcctgaccaaagcagtcaagagtgccgaagctgcagccgaggccaccaagaatatggaagctggagccggaagagccagttatatcagctcagcacggctggagcagccagaccccggggcggtggcagctgctgccatcctccgggccatcttggaggtcttgcagagctagggtgtgtgactgcctcccttggcctcagctcctctcactgctgtgctgaggtggcctttgtcacttccttctgccttccaaccctcaccttcccccggcctggccccattggcccaccctctaagttgagcaggaaatcctccaccaagcttccagaactacagacagcacccagagtgagctggagtgggtccccatgcctctccagcatgccctttccctttgcaggagggtggagtccctgggtcatgccctcccctgccagctctgggcttcagagataaggcattttccttgtgcagcctttacctggcaatcctaatttggttttaagactccctgtgaaatgctttccgcaccttaaccccagtgagcgtgaaaaagaaagttaataaactataatacatggaagcaa

SEQ ID NO: 173834 - DNA, 2411 bp, Homo sapiens
  misc_feature (1111)..(1113): n is a, c, g, or t
  misc_feature (1182)..(1182): n is a, c, g, or t
cgcctctttccgccagcgcccgcaggacccggatgagagcgcacgcttcggggtctccgggaagtcgcggcgccttcggatgtggcggatgcggccgtgagccggcgggggaggtgctgctgctgcctccactgtactcagacccaggtagcacaggattgtccatcctccagcagctcagtgcaacggtgtgaactcagcctgtttcagagcctccacaccatgacctccaagaagctggtgaactcggtggctggctgtgctgatgacgctcttgctggcctggtggcctgcaaccccaacctgcagctcctgcagggccaccgcgtggccctccgttctgacctggacagcctcaagggccgggtggcactgctgtcgggtgggggctctggccatgagcctgcccatgctggtttcatagggaaggggatgctgactggggtcatcgcgggagctgtgttcacctccccggcagtgggcagcatcctggcagccatcagggccgtggcccaggccggcacagtggggacgctccttatcgtgaagaactacactggggatcggctcaacttcggcctggcccgggagcaggcccgggctgaaggcatcccggtggagatggtggtgattggggacgacagcgccttcactgtcctgaagaaggcaggccggcgggggctgtgcggcacggtgcttatacacaaggtggcaggtgctctggctgaggctggtgtggggctggaggagatcgcaaagcaggtgaacgtggtcgccaaggccatgggtaccctgggggtgagcttatcctcctgcagcgtccctggttccaaacccaccttcgagctctcagccgacgaggtggagctgggcctggggatccacggggaagctggtgtgcgccggataaagatggcaaccgccgatgagattgtgaaactcatgctcgaccacatgacaaacaccaccaacgcgtcccatgtgcctgtgcagcccggctcctcagttgtgatgatggtcaacaacctgggtggcctgtcattcctggaactgggcatcatagccgacgctaccgtccgctccctggagggccgcgggagtgaacgatttnnncccgttgcccttggattggagccaaccctttccattgttccaggccaaccttgggaagcaaattgcccnttgagccaatttctctccttcatctcacttccttgctaggtgcgatgagcctctcctgaaactgatagatgctgaaaccactgcagcagcctggcctaacgtggctgcagtctccattactgggcggaagcggagccgggtagcccctgccgagccccaggaggcccctgattccactgctgcaggaggctcagcctcgaagcggatggcgctggtgctggaacgggtgtgcagcactctcctgggcctggaggaacacctgaatgccctggaccgggctgctggtgacggcgactgtggcaccacccacagccgtgcggccagagcaatccaggagtggctgaaggagggcccaccccctgccagccctgcccagctgctctccaagttgtctgttctgctcctggagaagatgggaggctcatctggggcgctctatggcctgttcctgactgcggctgcacagcccctgaaggccaagaccagcctcccagcctggtctgctgccatggatgccggcctggaagccatgcagaagtatggcaaggctgctccaggggacaggactatgctggattctctgtgggcagcggggcaggagctccaagcctggaagagcccaggagctgatctgttacaagtcctgaccaaagcagtcaagagtgccgaagctgcagccgaggccaccaagaatatggaagctggagccggaagagccagttatatcagctcagcacggctggagcagccagaccccggggcggtggcagctgctgccatcctccgggccatcttggaggtcttgcagagctagggtgtgtgactgcctcccttggcctcagctcctctcactgctgtgctgaggtggcctttgtcacttccttctgccttccaaccctcaccttcccccggcctggccccattggcccaccctctaagttgagcaggaaatcctccaccaagcttccagaactacagacagcacccagagtgagctggagtgggtccccatgcctctccagcatgccctttccctttgcaggagggtggagtccctgggtcatgccctcccctgccagctctgggcttcagagataaggcattttccttgtgcagcctttacctggcaatcctaatttggttttaagactccctgtgaaatgctttccgcaccttaaccccagtgagcgtgaaaaagaaagttaataaactataatacatggaagcaa

SEQ ID NO: 173835 - DNA, 2991 bp, Homo sapiens
cgcctctttccgccagcgcccgcaggacccggatgagagcgcacgcttcggggtctccgggaagtcgcggcgccttcggatgtggcggatgcggccgtgagccggcgggggaggtgctgctgctgcctccactgtactcagacccaggtagcacaggattgtccatcctccagcagctcagtgcaacggtgtgaactcagcctgtttcagagcctccacaccatgacctccaagaagctggtgaactcggtggctggctgtgctgatgacgctcttgctggcctggtggcctgcaaccccaacctgcagctcctgcagggccaccgcgtggccctccgttctgacctggacagcctcaagggccgggtggcactgctgtcgggtgggggctctggccatgagcctgcccatgctggtttcatagggaaggggatgctgactggggtcatcgcgggagctgtgttcacctccccggcagtgggcagcatcctggcagccatcagggccgtggcccaggccggcacagtggggacgctccttatcgtgaagaactacactggggatcggctcaacttcggcctggcccgggagcaggcccgggctgaaggcatcccggtggagatggtggtgattggggacgacagcgccttcactgtcctgaagaaggcaggccggcgggggctgtgcggcacggtgcttatacacaaggtggcaggtgctctggctgaggctggtgtggggctggaggagatcgcaaagcaggtgaacgtggtcgccaaggccatgggtaccctgggggtgagcttatcctcctgcagcgtccctggttccaaacccaccttcgagctctcagccgacgaggtggagctgggcctggggatccacggggaagctggtgtgcgccggataaagatggcaaccgccgatgagattgtgaaactcatgctcgaccacatgacaaacaccaccaacgcgtcccatgtgcctgtgcagcccggctcctcagttgtgatgatggtcaacaacctgggtggcctgtcattcctggaactgggcatcatagccgacgctaccgtccgctccctggagggccgcggggtgaagattgcccgtgccctggtgggcaccttcatgtcagcactggagatgcctggcatttctctcaccctcctgctggtggatgagcctctcctgaaactgatagatgctgaaaccactgcagcagcctggcctaacgtggctgcagtctccattactgggcggaagcggagccgggtagcccctgccgagccccaggaggcccctgattccactgctgcaggaggctcagcctcgaagcggatggcgctggtgctggaacgggtgtgcagcactctcctgggcctggaggaacacctgaatgccctggaccgggctgctggtgacggcgactgtggcaccacccacagccgtgcggccagagcaatccaggagtggctgaaggagggcccaccccctgccagccctgcccagctgctctccaagttgtctgttctgctcctggagaagatgggaggctcatctggggcgctctatggcctgttcctgactgcggctgcacagcccctgaaggccaagaccagcctcccagcctggtctgctgccatggatgccggcctggaagccatgcagaagtatggcaaggctgctccaggggacaggactatgctggattctctgtgggcagcggggcaggagctccaagcctggaagagcccaggagctgatctgttacaagtcctgaccaaagcagtcaagagtgccgaagctgcagccgaggccaccaagaatatggaagctggagccggaagagccagttatatcagctcagcacggctggagcagccagaccccggggcggtggcagctgctgccatcctccgggccatcttggaggtcttgcagagctagggtgtgtgactgcctcccttggcctcagctcctctcactgctgtgctgaggtggcctttgtcacttccttctgccttccaaccctcaccttcccccggcctggccccattggcccaccctctaagttgagcaggaaatcctccaccaagcttccagaactacagacagcacccagagtgagctggagtgggtccccatgcctctccagcatgccctttccctttgcaggagggtggagtccctgggtcatgccctcccctgccagctctgggcttcagagataaggcattttccttgtgcagcctttacctggcaatcctaatttggttttaagactccctgtgaaatgctttccgcaccttaaccccagtgagcgtgaaaaagaaagttaataaactataatacatggaagcaagaaagacactgcctcctctgagggaccttttcccaagcatgtaaacaagggggcccacagccctggctgcaggcatcatgacccatcttctaccaggcagatctttattacctgagcccctaaggcagtgtctcctcagctgggctgcttccactgagacccccgacccatcccctttccagtacacacacctgatgcatgtaagaatggtagaggggcttttctcagcattgaattaataattcagtggctcctcgggagtcgaatgggcatttgggacaccagaaggaaaagaaatcatcatagtctaaggttcagttgtagatcaaaaaatgcagccaggccgggcacggtggctcacacctgcaatcccagcactttgggaggccaaggcaggcggatcccttacactcaggagttcaagaccagtctgggcaacatggtaaaaccctgtctctaccaaaaaatacaaaattagccaggcatagtagtgtgtgcctatagtcctaacttgggaggctgagttgggaggatggcttgggcccaggaggtcgaggctgcggtgagccataagcatgccactatactccagcctgggcaacaaagcgagaccctgtctcaaaaaa

SEQ ID NO: 173836 - DNA, 2541 bp, Homo sapiens
cgcctctttccgccagcgcccgcaggacccggatgagagcgcacgcttcggggtctccgggaagtcgcggcgccttcggatgtggcggatgcggccgtgagccggcgggggaggtgctgctgctgcctccactgtactcagacccaggtagcacaggattgtccatcctccagcagctcagtgcaacggtgtgaactcagcctgtttcagagcctccacaccatggctggagtgcaatggcgcaatctcggctcaccacaacctccgcctcccaggttcaagcaattctcctgcctcagcctcccgagtagctggaattacagacctccaagaagctggtgaactcggtggctggctgtgctgatgacgctcttgctggcctggtggcctgcaaccccaacctgcagctcctgcagggccaccgcgtggccctccgttctgacctggacagcctcaagggccgggtggcactgctgtcgggtgggggctctggccatgagcctgcccatgctggtttcatagggaaggggatgctgactggggtcatcgcgggagctgtgttcacctccccggcagtgggcagcatcctggcagccatcagggccgtggcccaggccggcacagtggggacgctccttatcgtgaagaactacactggggatcggctcaacttcggcctggcccgggagcaggcccgggctgaaggcatcccggtggagatggtggtgattggggacgacagcgccttcactgtcctgaagaaggcaggccggcgggggctgtgcggcacggtgcttatacacaaggtggcaggtgctctggctgaggctggtgtggggctggaggagatcgcaaagcaggtgaacgtggtcgccaaggccatgggtaccctgggggtgagcttatcctcctgcagcgtccctggttccaaacccaccttcgagctctcagccgacgaggtggagctgggcctggggatccacggggaagctggtgtgcgccggataaaggtaggtggtccctctggcacaggccgccctaaggccaaggccccccagatgcagctcattcctggctccctctgacagatggcaaccgccgatgagattgtgaaactcatgctcgaccacatgacaaacaccaccaacgcgtcccatgtgcctgtgcagcccggctcctcagttgtgatgatggtcaacaacctgggtggcctgtcattcctggaactgggcatcatagccgacgctaccgtccgctccctggagggccgcggggtgaagattgcccgtgccctggtgggcaccttcatgtcagcactggagatgcctggcatttctctcaccctcctgctggtggatgagcctctcctgaaactgatagatgctgaaaccactgcagcagcctggcctaacgtggctgcagtctccattactgggcggaagcggagccgggtagcccctgccgagccccaggaggcccctgattccactgctgcaggaggctcagcctcgaagcggatggcgctggtgctggaacgggtgtgcagcactctcctgggcctggaggaacacctgaatgccctggaccgggctgctggtgacggcgactgtggcaccacccacagccgtgcggccagagcaatccaggagtggctgaaggagggcccaccccctgccagccctgcccagctgctctccaagttgtctgttctgctcctggagaagatgggaggctcatctggggcgctctatggcctgttcctgactgcggctgcacagcccctgaaggccaagaccagcctcccagcctggtctgctgccatggatgccggcctggaagccatgcagaagtatggcaaggctgctccaggggacaggactatgctggattctctgtgggcagcggggcaggagctccaagcctggaagagcccaggagctgatctgttacaagtcctgaccaaagcagtcaagagtgccgaagctgcagccgaggccaccaagaatatggaagctggagccggaagagccagttatatcagctcagcacggctggagcagccagaccccggggcggtggcagctgctgccatcctccgggccatcttggaggtcttgcagagctagggtgtgtgactgcctcccttggcctcagctcctctcactgctgtgctgaggtggcctttgtcacttccttctgccttccaaccctcaccttcccccggcctggccccattggcccaccctctaagttgagcaggaaatcctccaccaagcttccagaactacagacagcacccagagtgagctggagtgggtccccatgcctctccagcatgccctttccctttgcaggagggtggagtccctgggtcatgccctcccctgccagctctgggcttcagagataaggcattttccttgtgcagcctttacctggcaatcctaatttggttttaagactccctgtgaaatgctttccgcaccttaaccccagtgagcgtgaaaaagaaagttaataaactataatacatggaagcaa

SEQ ID NO: 173837 - DNA, 1613 bp, Homo sapiens
aatccccaggccttgagtgggtcagcagtgaccacatctatccgcagggatccacggggaagctggtgtgcgccggataaaggtaggtggtccctctggcacaggccgccctaaggccaaggccccccagatgcagctcattcctggctccctctgacagatggcaaccgccgatgagattgtgaaactcatgctcgaccacatgacaaacaccaccaacgcgtcccatgtgcctgtgcagcccggctcctcagttgtgatgatggtcaacaacctgggtggcctgtcattcctggaactgggcatcatagccgacgctaccgtccgctccctggagggccgcggggtgaagattgcccgtgccctggtgggcaccttcatgtcagcactggagatgcctggcatttctctcaccctcctgctggtggatgagcctctcctgaaactgatagatgctgaaaccactgcagcagcctggcctaacgtggctgcagtctccattactgggcggaagcggagccgggtagcccctgccgagccccaggaggcccctgattccactgctgcaggaggctcagcctcgaagcggatggcgctggtgctggaacgggtgtgcagcactctcctgggcctggaggaacacctgaatgccctggaccgggctgctggtgacggcgactgtggcaccacccacagccgtgcggccagagcaatccaggagtggctgaaggagggcccaccccctgccagccctgcccagctgctctccaagttgtctgttctgctcctggagaagatgggaggctcatctggggcgctctatggcctgttcctgactgcggctgcacagcccctgaaggccaagaccagcctcccagcctggtctgctgccatggatgccggcctggaagccatgcagaagtatggcaaggctgctccaggggacaggactatgctggattctctgtgggcagcggggcaggagctccaagcctggaagagcccaggagctgatctgttacaagtcctgaccaaagcagtcaagagtgccgaagctgcagccgaggccaccaagaatatggaagctggagccggaagagccagttatatcagctcagcacggctggagcagccagaccccggggcggtggcagctgctgccatcctccgggccatcttggaggtcttgcagagctagggtgtgtgactgcctcccttggcctcagctcctctcactgctgtgctgaggtggcctttgtcacttccttctgccttccaaccctcaccttcccccggcctggccccattggcccaccctctaagttgagcaggaaatcctccaccaagcttccagaactacagacagcacccagagtgagctggagtgggtccccatgcctctccagcatgccctttccctttgcaggagggtggagtccctgggtcatgccctcccctgccagctctgggcttcagagataaggcattttccttgtgcagcctttacctggcaatcctaatttggttttaagactccctgtgaaatgctttccgcaccttaaccccagtgagcgtgaaaaagaaagttaataaactataatacatggaagcaa

SEQ ID NO: 173838 - DNA, 1412 bp, Homo sapiens
tgcctgccaggaggaaatcaggacatctccctcccgacctcagagccccagcttccaaggtccttgcttttctgttgttttctttccctgatgcccatttttcccttttggactgccacactctggtattgcagagggccgcggggtgaagattgcccgtgccctggtgggcaccttcatgtcagcactggagatgcctggcatttctctcaccctcctgctggtggatgagcctctcctgaaactgatagatgctgaaaccactgcagcagcctggcctaacgtggctgcagtctccattactgggcggaagcggagccgggtagcccctgccgagccccaggaggcccctgattccactgctgcaggaggctcagcctcgaagcggatggcgctggtgctggaacgggtgtgcagcactctcctgggcctggaggaacacctgaatgccctggaccgggctgctggtgacggcgactgtggcaccacccacagccgtgcggccagagcaatccaggagtggctgaaggagggcccaccccctgccagccctgcccagctgctctccaagttgtctgttctgctcctggagaagatgggaggctcatctggggcgctctatggcctgttcctgactgcggctgcacagcccctgaaggccaagaccagcctcccagcctggtctgctgccatggatgccggcctggaagccatgcagaagtatggcaaggctgctccaggggacaggactatgctggattctctgtgggcagcggggcaggagctccaagcctggaagagcccaggagctgatctgttacaagtcctgaccaaagcagtcaagagtgccgaagctgcagccgaggccaccaagaatatggaagctggagccggaagagccagttatatcagctcagcacggctggagcagccagaccccggggcggtggcagctgctgccatcctccgggccatcttggaggtcttgcagagctagggtgtgtgactgcctcccttggcctcagctcctctcactgctgtgctgaggtggcctttgtcacttccttctgccttccaaccctcaccttcccccggcctggccccattggcccaccctctaagttgagcaggaaatcctccaccaagcttccagaactacagacagcacccagagtgagctggagtgggtccccatgcctctccagcatgccctttccctttgcaggagggtggagtccctgggtcatgccctcccctgccagctctgggcttcagagataaggcattttccttgtgcagcctttacctggcaatcctaatttggttttaagactccctgtgaaatgctttccgcaccttaaccccagtgagcgtgaaaaagaaagttaataaactataatacatggaagcaa

SEQ ID NO: 173839 - DNA, 2041 bp, Homo sapiens
cgcctctttccgccagcgcccgcaggacccggatgagagcgcacgcttcggggtctccgggaagtcgcggcgccttcggatgtggcggatgcggccgtgagccggcgggggaggtgctgctgctgcctccactgtactcagacccaggtagcacaggattgtccatcctccagcagctcagtgcaacggtgtgaactcagcctgtttcagagcctccacaccatgacctccaagaagctggtgaactcggtggctggctgtgctgatgacgctcttgctggcctggtggcctgcaaccccaacctgcagctcctgcagggccaccgcgtggccctccgttctgacctggacagcctcaagggccgggtggcactgctgtcgggtgggggctctggccatgagcctgcccatgctggtttcatagggaaggggatgctgactggggtcatcgcgggagctgtgttcacctccccggcagtgggcagcatcctggcagccatcagggccgtggcccaggccggcacagtggggacgctccttatcgtgaagaactacactggggatcggctcaacttcggcctggcccgggagcaggcccgggctgaaggcatcccggtggagatggtggtgattggggacgacagcgccttcactgtcctgaagaaggcaggccggcgggggctgtgcggcacggtgcttatacacaaggtggcaggtgctctggctgaggctggtgtggggctggaggagatcgcaaagcaggtgaacgtggtcgccaaggccatgggtaccctgggggtgagcttatcctcctgcagcgtccctggttccaaacccaccttcgagctctcagccgacgaggtggagctgggcctggggatccacggggaagctggtgtgcgccggataaagatggcaaccgccgatgagattgtgaaactcatgctcgaccacatgacaaacaccaccaacgcgtcccatgtgcctgtgcagcccggctcctcagttgtgatgatggtcaacaacctgggtggcctgtcattcctggaactgggcatcatagccgacgctaccgtccgctccctggagggccgcggggtgaagattgcccgtgccctggtgggcaccttcatgtcagcactggagatgcctggcatttctctcaccctcctgctggtggatgagcctctcctgaaactgatagatgctgaaaccactgcagcagcctggcctaacgtggctgcagtctccattactgggcggaagcggagccgggtagcccctgccgagccccaggaggcccctgattccactgctgcaggaggctcagcctcgaagcggatggcgctggtgctggaacgggtgtgcagcactctcctgggcctggaggaacacctgaatgccctggaccgggctgctggtgacggcgactgtggcaccacccacagccgtgcggccagagcaatccaggagtggctgaaggagggcccaccccctgccagccctgcccagctgctctccaagttgtctgttctgctcctggagaagatgggaggctcatctggggcgctctatggcctgttcctgactgcggctgcacagcccctgaaggccaagaccagcctcccagcctggtctgctgccatggatgccggcctggaagccatgcagaagtatggcaaggctgctccaggggacaggactatgctggattctctgtgggcagcggggcaggagctccaagcctggaagagcccaggagctgatctgttacaagtcctgaccaaagcagtcaaggtgagtgaggctgggcccagccacctggggagacaggcttctagccagcagactcctgtctccatgtgaccctgagcaagttaataaccttcctggaccgcagtttccttctctgtacaatggagatgagcacctatctcagaaggtggttatgtggctaaggaaatatgtagagccccgcacactgcctgggatgtgacagggcctcagtgaatggtgacccttttccctgctggaagtagat

SEQ ID NO: 173840 - DNA, 1153 bp, Homo sapiens
cgcctctttccgccagcgcccgcaggacccggatgagagcgcacgcttcggggtctccgggaagtcgcggcgccttcggatgtggcggatgcggccgtgagccggcgggggaggtgctgctgctgcctccactgtactcagacccaggtagcacaggattgtccatcctccagcagctcagtgcaacggtgtgaactcagcctgtttcagagcctccacaccatgacctccaagaagctggtgaactcggtggctggctgtgctgatgacgctcttgctggcctggtggcctgcaaccccaacctgcagctcctgcagggccaccgcgtggccctccgttctgacctggacagcctcaagggccgggtggcactgctgtcgggtgggggctctggccatgagcctgcccatgctggtttcatagggaaggggatgctgactggggtcatcgcgggagctgtgttcacctccccggcagtgggcagcatcctggcagccatcagggccgtggcccaggccggcacagtggggacgctccttatcgtgaagaactacactggggatcggctcaacttcggcctggcccgggagcaggcccgggctgaaggcatcccggtggagatggtggtgattggggacgacagcgccttcactgtcctgaagaaggcaggccggcgggggctgtgcggcacggtgcttatacacaaggtggcaggtgctctggctgaggctggtgtggggctggaggagatcgcaaagcaggtgaacgtggtcgccaaggccatgggtaccctgggggtgagcttatcctcctgcagcgtccctggttccaaacccaccttcgagctctcagccgacgaggtggagctgggcctgggtaagcttgtggccatccatcccagccctgcctgctccttggccctggactttgcccaccttgcatacccttagagccatcaacctggtcctctccccaggtggtcttagtatttttacctggtcatttgaggcccagcctgggccaacctgcctgatttctacctgctttgctgtctatacccacagctttggccatgtggagctctgtgcactgcccacctcctagcctttgcctgccattcccaggtcctcagagtcctgccaagaatacacc

SEQ ID NO: 173841 - DNA, 1049 bp, Homo sapiens
cgcctctttccgccagcgcccgcaggacccggatgagagcgcacgcttcggggtctccgggaagtcgcggcgccttcggatgtggcggatgcggccgtgagccggcgggggaggtgctgctgctgcctccactgtactcagacccaggtagcacaggattgtccatctacagacagcacccagagtgagctggagtgggtccccatgcctctccagcatgccctttccctttgcaggagggtggagtccctgggtcatgccctcccctgccagctctgggcttcagagataaggcattttccttgtgcagcctttacctggcaatcctaatttggttttaagactccctgtgaaatgctttccgcaccttaaccccagtgagcgtgaaaaagaaagttaataaactataatacatggaagcaagaaagacactgcctcctctgagggaccttttcccaagcatgtaaacaagggggcccacagccctggctgcaggcatcatgacccatcttctaccaggcagatctttattacctgagcccctaaggcagtgtctcctcagctgggctgcttccactgagacccccgacccatcccctttccagtacacacacctgatgcatgtaagaatggtagaggggcttttctcagcattgaattaataattcagtggctcctcgggagtcgaatgggcatttgggacaccagaaggaaaagaaatcatcatagtctaaggttcagttgtagatcaaaaaatgcagccaggccgggcacggtggctcacacctgcaatcccagcactttgggaggccaaggcaggcggatcccttacactcaggagttcaagaccagtctgggcaacatggtaaaaccctgtctctaccaaaaaatacaaaattagccaggcatagtagtgtgtgcctatagtcctaacttgggaggctgagttgggaggatggcttgggcccaggaggtcgaggctgcggtgagccataagcatgccactatactccagcctgggcaacaaagcgagaccctgtctcaaaaaa

SEQ ID NO: 173842 - DNA, 423 bp, Homo sapiens
cgcctctttccgccagcgcccgcaggacccggatgagagcgcacgcttcggggtctccgggaagtcgcggcgccttcggatgtggcggatgcggccgtgagccggcgggggaggtgctgctgctgcctccactgtactcagacccaggtagcacaggattgtccatctacagacagcacccagagtgagctggagtgggtccccatgcctctccagcatgccctttccctttgcaggagggtggagtccctgggtcatgccctcccctgccagctctgggcttcagagataaggcattttccttgtgcagcctttacctggcaatcctaatttggttttaagactccctgtgaaatgctttccgcaccttaaccccagtgagcgtgaaaaagaaagttaataaactataatacatggaagcaa

SEQ ID NO: 173843 - DNA, 115 bp, Homo sapiens
cttgtatcgttacccactcctgcaggtgctgctgctgcctccactgtactcagacccaggtagcacaggattgtccatcctccagcagctcagtgcaacggtgtgaactcagcct

SEQ ID NO: 173844 - DNA, 804 bp, Homo sapiens
cgcctctttccgccagcgcccgcaggacccggatgagagcgcacgcttcggggtctccgggaagtcgcggcgccttcggatgtggcggatgcggccgtgagccggcgggggaggtgctgctgctgcctccactgtactcagacccaggtagcacaggattgtccatcctccagcagctcagtgcaacggtgtgaactcagcctgtttcagagcctccacaccatgacctaggctactctgaagcaggtggcttagccctggccctggctggatgcaggacaggttggcagggaggcagcagagccaaattttgtacaaaggagctggtgctagcaagctcaggaagaagccacagccggaagttcaccttgccaggacctggctcagctgcaggttcccaccgggccaccagacctccaagaagctggtgaactcggtggctggctgtgctgatgacgctcttgctggcctggtggcctgcaaccccaacctgcagctcctgcagggccaccgcgtggccctccgttctgacctggacagcctcaagggccgggtggcactgctgtcgggtgggggctctggccatgagcctgcccatgctggtttcatagggaaagggatgctgatggggctcatcgcgaggcagctggtgtacaacccttcccccaggcaagaggagcagaatcacatcggaagaccatccagcgctcgaggagccaacgccaggcacaagtggagaacgcacactaatacggcaacgacataaaatgagcgaatcggataagatccagaactggaaccaag

SEQ ID NO: 173845 - DNA, 2467 bp, Homo sapiens
cgcctctttccgccagcgcccgcaggacccggatgagagcgcacgcttcggggtctccgggaagtcgcggcgccttcggatgtggcggatgcggccgtgagccggcgggggagttcctccagatccagctggtgccctcgcctgacgtttgaacgaccacctgctcacctcctcccttttgcgcgttgattcttcagacttcaaagggcccaccggtgctgctgctgcctccactgtactcagacccaggtagcacaggattgtccatcctccagcagctcagtgcaacggtgtgaactcagcctgtttcagagcctccacaccatgacctccaagaagctggtgaactcggtggctggctgtgctgatgacgctcttgctggcctggtggcctgcaaccccaacctgcagctcctgcagggccaccgcgtggccctccgttctgacctggacagcctcaagggccgggtggcactgctgtcgggtgggggctctggccatgagcctgcccatgctggtttcatagggaaggggatgctgactggggtcatcgcgggagctgtgttcacctccccggcagtgggcagcatcctggcagccatcagggccgtggcccaggccggcacagtggggacgctccttatcgtgaagaactacactggggatcggctcaacttcggcctggcccgggagcaggcccgggctgaaggcatcccggtggagatggtggtgattggggacgacagcgccttcactgtcctgaagaaggcaggccggcgggggctgtgcggcacggtgcttatacacaaggtggcaggtgctctggctgaggctggtgtggggctggaggagatcgcaaagcaggtgaacgtggtcgccaaggccatgggtaccctgggggtgagcttatcctcctgcagcgtccctggttccaaacccaccttcgagctctcagccgacgaggtggagctgggcctggggatccacggggaagctggtgtgcgccggataaagatggcaaccgccgatgagattgtgaaactcatgctcgaccacatgacaaacaccaccaacgcgtcccatgtgcctgtgcagcccggctcctcagttgtgatgatggtcaacaacctgggtggcctgtcattcctggaactgggcatcatagccgacgctaccgtccgctccctggagggccgcggggtgaagattgcccgtgccctggtgggcaccttcatgtcagcactggagatgcctggcatttctctcaccctcctgctggtggatgagcctctcctgaaactgatagatgctgaaaccactgcagcagcctggcctaacgtggctgcagtctccattactgggcggaagcggagccgggtagcccctgccgagccccaggaggcccctgattccactgctgcaggaggctcagcctcgaagcggatggcgctggtgctggaacgggtgtgcagcactctcctgggcctggaggaacacctgaatgccctggaccgggctgctggtgacggcgactgtggcaccacccacagccgtgcggccagagcaatccaggagtggctgaaggagggcccaccccctgccagccctgcccagctgctctccaagttgtctgttctgctcctggagaagatgggaggctcatctggggcgctctatggcctgttcctgactgcggctgcacagcccctgaaggccaagaccagcctcccagcctggtctgctgccatggatgccggcctggaagccatgcagaagtatggcaaggctgctccaggggacaggactatgctggattctctgtgggcagcggggcaggagctccaagcctggaagagcccaggagctgatctgttacaagtcctgaccaaagcagtcaagagtgccgaagctgcagccgaggccaccaagaatatggaagctggagccggaagagccagttatatcagctcagcacggctggagcagccagaccccggggcggtggcagctgctgccatcctccgggccatcttggaggtcttgcagagctagggtgtgtgactgcctcccttggcctcagctcctctcactgctgtgctgaggtggcctttgtcacttccttctgccttccaaccctcaccttcccccggcctggccccattggcccaccctctaagttgagcaggaaatcctccaccaagcttccagaactacagacagcacccagagtgagctggagtgggtccccatgcctctccagcatgccctttccctttgcaggagggtggagtccctgggtcatgccctcccctgccagctctgggcttcagagataaggcattttccttgtgcagcctttacctggcaatcctaatttggttttaagactccctgtgaaatgctttccgcaccttaaccccagtgagcgtgaaaaagaaagttaataaactataatacatggaagcaa

SEQ ID NO: 173846 - DNA, 2728 bp, Homo sapiens
cgcctctttccgccagcgcccgcaggacccggatgagagcgcacgcttcggggtctccgggaagtcgcggcgccttcggatgtggcggatgcggccgtgagccggcgggggaggtgctgctgctgcctccactgtactcagacccaggtagcacaggattgtccatcctccagcagctcagtgcaacggtgtgaactcagcctgtttcagagcctccacaccatggctggagtgcaatggcgcaatctcggctcaccacaacctccgcctcccaggttcaagcaattctcctgcctcagcctcccgagtagctggaattacagacctaggctactctgaagcaggtggcttagccctggccctggctggatgcaggacaggttggcagggaggcagcagagccaaattttgtacaaaggagctggtgctagcaagctcaggaagaagccacagccggaagttcaccttgccaggacctggctcagctgcaggttcccaccgggccaccagacctccaagaagctggtgaactcggtggctggctgtgctgatgacgctcttgctggcctggtggcctgcaaccccaacctgcagctcctgcagggccaccgcgtggccctccgttctgacctggacagcctcaagggccgggtggcactgctgtcgggtgggggctctggccatgagcctgcccatgctggtttcatagggaaggggatgctgactggggtcatcgcgggagctgtgttcacctccccggcagtgggcagcatcctggcagccatcagggccgtggcccaggccggcacagtggggacgctccttatcgtgaagaactacactggggatcggctcaacttcggcctggcccgggagcaggcccgggctgaaggcatcccggtggagatggtggtgattggggacgacagcgccttcactgtcctgaagaaggcaggccggcgggggctgtgcggcacggtgcttatacacaaggtggcaggtgctctggctgaggctggtgtggggctggaggagatcgcaaagcaggtgaacgtggtcgccaaggccatgggtaccctgggggtgagcttatcctcctgcagcgtccctggttccaaacccaccttcgagctctcagccgacgaggtggagctgggcctggggatccacggggaagctggtgtgcgccggataaaggtaggtggtccctctggcacaggccgccctaaggccaaggccccccagatgcagctcattcctggctccctctgacagatggcaaccgccgatgagattgtgaaactcatgctcgaccacatgacaaacaccaccaacgcgtcccatgtgcctgtgcagcccggctcctcagttgtgatgatggtcaacaacctgggtggcctgtcattcctggaactgggcatcatagccgacgctaccgtccgctccctggagggccgcggggtgaagattgcccgtgccctggtgggcaccttcatgtcagcactggagatgcctggcatttctctcaccctcctgctggtggatgagcctctcctgaaactgatagatgctgaaaccactgcagcagcctggcctaacgtggctgcagtctccattactgggcggaagcggagccgggtagcccctgccgagccccaggaggcccctgattccactgctgcaggaggctcagcctcgaagcggatggcgctggtgctggaacgggtgtgcagcactctcctgggcctggaggaacacctgaatgccctggaccgggctgctggtgacggcgactgtggcaccacccacagccgtgcggccagagcaatccaggagtggctgaaggagggcccaccccctgccagccctgcccagctgctctccaagttgtctgttctgctcctggagaagatgggaggctcatctggggcgctctatggcctgttcctgactgcggctgcacagcccctgaaggccaagaccagcctcccagcctggtctgctgccatggatgccggcctggaagccatgcagaagtatggcaaggctgctccaggggacaggactatgctggattctctgtgggcagcggggcaggagctccaagcctggaagagcccaggagctgatctgttacaagtcctgaccaaagcagtcaagagtgccgaagctgcagccgaggccaccaagaatatggaagctggagccggaagagccagttatatcagctcagcacggctggagcagccagaccccggggcggtggcagctgctgccatcctccgggccatcttggaggtcttgcagagctagggtgtgtgactgcctcccttggcctcagctcctctcactgctgtgctgaggtggcctttgtcacttccttctgccttccaaccctcaccttcccccggcctggccccattggcccaccctctaagttgagcaggaaatcctccaccaagcttccagaactacagacagcacccagagtgagctggagtgggtccccatgcctctccagcatgccctttccctttgcaggagggtggagtccctgggtcatgccctcccctgccagctctgggcttcagagataaggcattttccttgtgcagcctttacctggcaatcctaatttggttttaagactccctgtgaaatgctttccgcaccttaaccccagtgagcgtgaaaaagaaagttaataaactataatacatggaagcaa

SEQ ID NO: 173847 - DNA, 1809 bp, Homo sapiens
ggccttgggtaccatggctgaggtggagagtctggcagcctttctcagagaagagggtcctgtgggcagggactctgagatgctgctgccacccttcctgatgcccagtgctaagagtggaacagtcatcccttcatgccttgtttctcataggtaccctgggggtgagcttatcctcctgcagcgtccctggttccaaacccaccttcgagctctcagccgacgaggtggagctgggcctggggatccacggggaagctggtgtgcgccggataaaggtaggtggtccctctggcacaggccgccctaaggccaaggccccccagatgcagctcattcctggctccctctgacagatggcaaccgccgatgagattgtgaaactcatgctcgaccacatgacaaacaccaccaacgcgtcccatgtgcctgtgcagcccggctcctcagttgtgatgatggtcaacaacctgggtggcctgtcattcctggaactgggcatcatagccgacgctaccgtccgctccctggagggccgcggggtgaagattgcccgtgccctggtgggcaccttcatgtcagcactggagatgcctggcatttctctcaccctcctgctggtggatgagcctctcctgaaactgatagatgctgaaaccactgcagcagcctggcctaacgtggctgcagtctccattactgggcggaagcggagccgggtagcccctgccgagccccaggaggcccctgattccactgctgcaggaggctcagcctcgaagcggatggcgctggtgctggaacgggtgtgcagcactctcctgggcctggaggaacacctgaatgccctggaccgggctgctggtgacggcgactgtggcaccacccacagccgtgcggccagagcaatccaggagtggctgaaggagggcccaccccctgccagccctgcccagctgctctccaagttgtctgttctgctcctggagaagatgggaggctcatctggggcgctctatggcctgttcctgactgcggctgcacagcccctgaaggccaagaccagcctcccagcctggtctgctgccatggatgccggcctggaagccatgcagaagtatggcaaggctgctccaggggacaggactatgctggattctctgtgggcagcggggcaggagctccaagcctggaagagcccaggagctgatctgttacaagtcctgaccaaagcagtcaagagtgccgaagctgcagccgaggccaccaagaatatggaagctggagccggaagagccagttatatcagctcagcacggctggagcagccagaccccggggcggtggcagctgctgccatcctccgggccatcttggaggtcttgcagagctagggtgtgtgactgcctcccttggcctcagctcctctcactgctgtgctgaggtggcctttgtcacttccttctgccttccaaccctcaccttcccccggcctggccccattggcccaccctctaagttgagcaggaaatcctccaccaagcttccagaactacagacagcacccagagtgagctggagtgggtccccatgcctctccagcatgccctttccctttgcaggagggtggagtccctgggtcatgccctcccctgccagctctgggcttcagagataaggcattttccttgtgcagcctttacctggcaatcctaatttggttttaagactccctgtgaaatgctttccgcaccttaaccccagtgagcgtgaaaaagaaagttaataaactataatacatggaagcaa

SEQ ID NO: 173848 - DNA, 2310 bp, Homo sapiens
cgcctctttccgccagcgcccgcaggacccggatgagagcgcacgcttcggggtctccgggaagtcgcggcgccttcggatgtggcggatgcggccgtgagccggcgggggaggtgctgctgctgcctccactgtactcagacccaggtagcacaggattgtccatcctccagcagctcagtgcaacggtgtgaactcagcctgtttcagagcctccacaccatgacctccaagaagctggtgaactcggtggctggctgtgctgatgacgctcttgctggcctggtggcctgcaaccccaacctgcagctcctgcagggccaccgcgtggccctccgttctgacctggacagcctcaagggccgggtggcactgctgtcgggtgggggctctggccatgagcctgcccatgctggtttcatagggaaggggatgctgactggggtcatcgcgggagctgtgttcacctccccggcagtgggcagcatcctggcagccatcagggccgtggcccaggccggcacagtggggacgctccttatcgtgaagaactacactggggatcggctcaacttcggcctggcccgggagcaggcccgggctgaaggcatcccggtggagatggtggtgattggggacgacagcgccttcactgtcctgaagaaggcaggccggcgggggctgtgcggcacggtgcttatacacaaggtggcaggtgctctggctgaggctggtgtggggctggaggagatcgcaaagcaggtgaacgtggtcgccaaggccatgggtaccctgggggtgagcttatcctcctgcagcgtccctggttccaaacccaccttcgagctctcagccgacgaggtggagctgggcctggggatccacggggaagctggtgtgcgccggataaagatggcaaccgccgatgagattgtgaaactcatgctcgaccacatgacaaacaccaccaacgcgtcccatgtgcctgtgcagcccggctcctcagttgtgatgatggtcaacaacctgggtggcctgtcattcctggaactgggcatcatagccgacgctaccgtccgctccctggagggccgcggggtgaagattgcccgtgccctggtgggcaccttcatgtcagcactggagatgcctggcatttctctcaccctcctgctggtggatgagcctctcctgaaactgatagatgctgaaaccactgcagcagcctggcctaacgtggctgcagtctccattactgggcggaagcggagccgggtagcccctgccgagccccaggaggcccctgattccactgctgcaggaggctcagcctcgaagcggatggcgctggtgctggaacgggtgtgcagcactctcctgggcctggaggaacacctgaatgccctggaccgggctgctggtgacggcgactgtggcaccaccccagccctgcccagctgctctccaagttgtctgttctgctcctggagaagatgggaggctcatctggggcgctctatggcctgttcctgactgcggctgcacagcccctgaaggccaagaccagcctcccagcctggtctgctgccatggatgccggcctggaagccatgcagaagtatggcaaggctgctccaggggacaggactatgctggattctctgtgggcagcggggcaggagctccaagcctggaagagcccaggagctgatctgttacaagtcctgaccaaagcagtcaagagtgccgaagctgcagccgaggccaccaagaatatggaagctggagccggaagagccagttatatcagctcagcacggctggagcagccagaccccggggcggtggcagctgctgccatcctccgggccatcttggaggtcttgcagagctagggtgtgtgactgcctcccttggcctcagctcctctcactgctgtgctgaggtggcctttgtcacttccttctgccttccaaccctcaccttcccccggcctggccccattggcccaccctctaagttgagcaggaaatcctccaccaagcttccagaactacagacagcacccagagtgagctggagtgggtccccatgcctctccagcatgccctttccctttgcaggagggtggagtccctgggtcatgccctcccctgccagctctgggcttcagagataaggcattttccttgtgcagcctttacctggcaatcctaatttggttttaagactccctgtgaaatgctttccgcaccttaaccccagtgagcgtgaaaaagaaagttaataaactataatacatggaagcaa

SEQ ID NO: 173849 - DNA, 1401 bp, Homo sapiens
cactggactagaaggagttggtattaggatcctcctcagagaggcctgaccctttcccagggaccctctctccatacccctgtatacagtaggcactcagtccatgcttgtcgaggtggactcccttcctccagggctgctgagaaagccaggccaccagggtcaggatgggagggtccaagccctgctgaatccctggctggacagccgtgtctaagagagttatcttgctgcccttagatgctgaaaccactgcagcagcctggcctaacgtggctgcagtctccattactgggcggaagcggagccgggtagcccctgccgagccccaggaggcccctgattccactgctgcaggaggctcagcctcgaagcggatggcgctggtgctggaacgggtgtgcagcactctcctgggcctggaggaacacctgaatgccctggaccgggctgctggtgacggcgactgtggcaccacccacagccgtgcggccagagcaatccaggagtggctgaaggagggcccaccccctgccagccctgcccagctgctctccaagttgtctgttctgctcctggagaagatgggaggctcatctggggcgctctatggcctgttcctgactgcggctgcacagcccctgaaggccaagaccagcctcccagcctggtctgctgccatggatgccggcctggaagccatgcagaagtatggcaaggctgctccaggggacaggactatgctggattctctgtgggcagcggggcaggagctccaagcctggaagagcccaggagctgatctgttacaagtcctgaccaaagcagtcaagagtgccgaagctgcagccgaggccaccaagaatatggaagctggagccggaagagccagttatatcagctcagcacggctggagcagccagaccccggggcggtggcagctgctgccatcctccgggccatcttggaggtcttgcagagctagggtgtgtgactgcctcccttggcctcagctcctctcactgctgtgctgaggtggcctttgtcacttccttctgccttccaaccctcaccttcccccggcctggccccattggcccaccctctaagttgagcaggaaatcctccaccaagcttccagaactacagacagcacccagagtgagctggagtgggtccccatgcctctccagcatgccctttccctttgcaggagggtggagtccctgggtcatgccctcccctgccagctctgggcttcagagataaggcattttccttgtgcagcctttacctggcaatcctaatttggttttaagactccctgtgaaatgctttccgcaccttaaccccagtgagcgtgaaaaagaaagttaataaactataatacatggaagcaa

SEQ ID NO: 173850 - DNA, 999 bp, Homo sapiens
cgcctctttccgccagcgcccgcaggacccggatgagagcgcacgcttcggggtctccgggaagtcgcggcgccttcggatgtggcggatgcggccgtgagccggcgggggaggtgctgctgctgcctccactgtactcagacccaggtagcacaggattgtccatcctccagcagctcagtgcaacggtgtgaactcagcctgtttcagagcctccacaccatgacctccaagaagctggtgaactcggtggctggctgtgctgatgacgctcttgctggcctggtggcctgcaaccccaacctgcagctcctgcagggccaccgcgtggccctccgttctgacctggacagcctcaagggccgggtggcactgctgtcgggtgggggctctggccatgagcctgcccatgctggtttcatagggaaggggatgctgactggggtcatcgcgggagctgtgttcacctccccggcagtgggcagcatcctggcagccatcagggccgtggcccaggccggcacagtggggacgctccttatcgtgaagaactacactggggatcggctcaacttcggcctggcccgggagcaggcccgggctgaaggcatcccggtggagatggtggtgattggggacgacagcgccttcactgtcctgaagaaggcaggccggcgggggctgtgcggcacggtgcttatacacaaggtggcaggtgctctggctgaggctggtgtggggctggaggagatcgcaaagcaggtgaacgtggtcgccaaggccatgggtaccctgggggtgagcttatcctcctgcagcgtccctggttccaaacccaccttcgagctctcagccgacgaggtggagctgggcctggggatccacggggaagctggtgtgcgccggataaagatggcaaccgccgatgagattgtgaaactcatgctcgaccacatgacaaacaccgtgcttatctcaatccggtaccggctcgatctt

SEQ ID NO: 173851 - DNA, 246 bp, Homo sapiens
cacctgcccataaatccttcagagactctgaaaattaagccattttctcgactggcaacgaatcccttaagattcatgcaggaacaaggaagagattgtcccccacgggcactcctggctgggtcggatctgtgtgacagtgaaaaactgtccccaggatcccattcatatatgaaacccatccacatctgccctacggggaggtgtggaatcagacttaaaacctccataaaagaaacactggaa

SEQ ID NO: 173852 - DNA, 176 bp, Homo sapiens
ccccgggccgcctccccccagcgcgcgtccgccccggggctcgcgccgccgccgccgccgccgccgcgcgcgcgcagctcaagtaaaggaggaaaaaaaaaagggggaaaaatagaaagcggcggcggctgcagcagcgatccgccgccggactgggccaagccgggcggcggccg

SEQ ID NO: 173853 - DNA, 473 bp, Homo sapiens
tgaatcaggtcttcacaaagcagctcttcttttgccagtcccatctctgctactctaaatcatgccactcactcttgcttctgcttggccacgttttctcagatccattcaggctccttaaacattagcgtccatctcctttggcccactaacgacgtgagccttcctaaccaatgcccctgctgcaccacttccggctcaacagcccatgggctctactgtgaaagctaaagaggggccaaggtgaaaaccctgccacagctgaaaccgtcgtctctttactctgccttctaaagttctgaagatttcacccttctctctaccctgcagccacaccagcacccttcctgaatgcatcccctgtgcacccagagttctgcacctaagttttatgtcagccacttccctttgaccttcttttctctttgactttacttacccttcattgattggtatatgtttaatgatagtga

SEQ ID NO: 173854 - DNA, 469 bp, Homo sapiens
gcaagtggcctctagaagctggaaaaagcaaggaaacatattttcctctagagcttccagaaggacacagccctgccttgattccattccttaagagtcatttcagacttccaacctctagacagtaagataatagatttgtgtgtgtaagccactgaatttccaataatgtgttacaggagcaatagaaaattaatacatggaacaccacaagttttcccaaacagccagtacccaggactatgtctgggccaaacctactccacaattccctcagatggttgtgactttctacatctggttggatttcacccataaaccattaacacagccacagacactaacagttcacatccaatcacatctcccaggccacctcttgcaccaaaacccttggttatactgcacatctgacttccggtttggagaagatgtttttatacccatatctcagatacacaccaacctc

SEQ ID NO: 173855 - DNA, 132 bp, Homo sapiens
ccctttaaagtaagaacattgcaaccctctcaaaagattgttagtatcaaagtaaggattaagtagaatatagaacagaatatttttattgatttaaaaatggtattacttcaggttttacaaaacctatat

SEQ ID NO: 173856 - DNA, 746 bp, Homo sapiens
ttattataagatacctcatataattagtcatgtttggatattgcattctcatcaagaagaaatcaaaattgttacctgggcatggtggtgtgcatctgtagtagcagctacttggaaggcccaaggccagaggattgactgcttgagcccaggagtcagagactagcctgggcagtatagcaagaccctgtttctaaaaaagaaaaataaaaaaataaaataaattggccaggtgtggtgtttcacacctgtaatcccagcactttgtgagactgaggtggaggatcacttgaacccaggagtttgagctgtgtttgtaccactgcactccagcctgagcgacagagagaggccttgtctcccctgtccccccccaaaaaaattaagatagttttctttttacctagatttctttgaagtaataattttgcatctagtaatagtacatttttttcttttttaaaagtagacttaatttttttagagtagttctaagttcatagcaaaattggacagaaagtacagagatttcccatattcccccttcccctacacataaatagcctcccctgttatcaacatccctcactagtgtggtacatatatatctgttgatgaaccttccttgacagatccttaatacgcaaggtccatagtttacattagggttcaatcttgctgttatacgttctatgggtttggactaatgtatactgacacgtatattgcatttttattggcagaat

SEQ ID NO: 173857 - DNA, 734 bp, Homo sapiens
gctggaaccaaggggcttcgtcatgtcctctctcctgttgctcctgttccccaggaacagcctcagtctgtttctcaactctgctccccaccctagcttcttacacctcctttattccccatccattcttccagtttctccaggcttcagctgaggcttgtgcaccctgcagataacgagaggaggaaggcctcgccagggctgttggctgaggtgggatggcattggctgaggttaagagagaggaacaggcagtcagtggcagagcaggtcagcaggacagtggagcagggcgcacgagattatggctccaggcaatggcaaagcctacttctcggcctgagggggagagcggtgccatgcatgctgggcacttgggtttctgcacacagctcagtgacagacaccctggcctctgtccctgatgcagaagggaaagggaagcatgcagtgaaggtggagagggagccgtgcctcattttcttgcccagtggagaatcaaaccgaggttctttctttcagccacagtcctcaagtgctaactataatgctcatcctgtgtgaagtgtgagggacaccagtgtcctggctttccagagctcacagccctgcaccaccccaagtgataagcctctggccagctggccctcccatttccaagctgtcctcatgttctgcctctgcccctttgcctccctgtgctggagatcacccaggactgctcccactcaggg

SEQ ID NO: 173858 - DNA, 231 bp, Homo sapiens
aatgcaaagaaacctccctgccttcatggagctcacactctaatggggggggataggggagagagctaaatagtaaaaagagctgacgtggtttaacatcacagaccaccaggcgcagtggctctcgcctgtaatcccagcactttgggaggctgaggcaagaggatcacttgagttcagaagttcaagaccagcctgggtaacatagtgagacaccccccaatctctaca

SEQ ID NO: 173859 - DNA, 689 bp, Homo sapiens
aactgaaaaggaaagactcctccctatgcaatctatgaggccagcctcatcctgatagcaaaacctggcagagataaaacaaaaaaagaaaacttcaggccaatatcatgatgaacattgatgcaaaaatcctcaacaaaatactgcaaatcaaatcgagcagcgcatcaaaaagcttatgcaccatgatcaagtaggcttaattcccaggactcaaggttggttcaacatatgcaaatcaataaatatgattcatcacataaacagaactaaagagaaaaaccacatgattatctcaataggtgcgaaaaaaggtttatcagaaaattcaacatccattcatgttaaaaactctcaataaactaggtattgaaggaagatacctcaaaataataagacccatgtacgacaaactcacagccaacatcacactaaatgggaaaaagctgaacacattcccccccgcaaaaaatggcacaagacaaggatgccctctctcaagactcatattcaacatggtaatggaagttctggccaaggaaatcaggcaagagaaagaaataaagggcattgaaatagtctgcaaagaatccccctgtggtttctagattctatatctagaaaaccacattgtctcaacctgaaagcttcttaagctgataaacaacttcagcaaagtttcaggatac

SEQ ID NO: 173860 - DNA, 451 bp, Homo sapiens
gcccccagacaccacccccactcttggatcaagaacccagaaagccccactgcacggggaggaggctcccagacctcatcccccaactctgagcagccccttccatgtcccaaaggtccaggctggtccaggaaggtaactggagagatggaccccagagagggcaaggattccccagccagagagggacagggacagggctaaggtcatgctgtccagggaaggccgagggatccagggttctagtctctgagaccacctgtaggattgaggcgagacagtgggaagaacttccccagaccactagggctggggctccccagagtgagcaggggtgctgccccacccccacccccaccctgaggcttcccggctggggcgggcagccttggaggcgggcggtggcggctgcctgggagaagatgaatctttcatgagtgatttgcggccg

SEQ ID NO: 173861 - DNA, 529 bp, Homo sapiens
tgatttgaagagcgtgctctcattagattgactgcataggatccaggccttaacatggataagtgggcttggatatgccaggctgatgaattccagatttaccttaactggggagttaatgtggcctaagttccacatgtggaataggagcctttgtcacctttttggactgctggcttatattaaatggcctcacatctccatagcaccttgaatggtgttaaatctatagtagcagcagaaataatattagctgacatttactgctttgccaggtcctttatgttccattatctcataaatttataagatgtagtagtgtgcaataattattcccatcttgcacctctgaagcttaaggggacagtatttcaacttcggccttttttataggagaatgagccaagctctggttactttacttactgtgtctctttccacacctcctaggcaggttaaaagcagtgataagagagaagctggcaaacctagttagtcctgagagcccaaagatacgggagagaggaaa

SEQ ID NO: 173862 - DNA, 422 bp, Homo sapiens
gcacactcattcgtttatccaacaagcatttataccaagtgcttattgcttaccaggcactgtaaagtcttcagtgatacatggctggaaaaggaagccacaatctctgctctcataaagcttaaactctattgagaaagccaggcatttaacaagtatttgcataaatggtgagtgctcccaagagttttgcagtctgctgcttaagaggcaccaaacaaaccagcagagcagtcattaaacgcagttatcaccagcacgctgaacaaaggcttctcaggtttcaaagtgcacacaaataacttgaaatcctggtaaagcagatactgattcagttgatgtgcagcggggcttcacattctgcattacttgagtctgaggtgacagggatgctgctggtacaccatccacacttggaatag

SEQ ID NO: 173863 - DNA, 651 bp, Homo sapiens
atccagatgctgtcgtgtttggtgtatgattagggaacacgtcctagttcatgaatgctttttctctgtgccctcacttggcagaaggggtgaaggagatctggggtctgttgtataagagcactaagtactaatcccattcattagggctttgctctcatgaccaactacctgtaaaaatcccccctcctaataccgtcacatctgtgattggctttcagcatataaattttggggaagacaaacattcagaccacagcagatgtttattatttcctttcctctgcttgctttgggtttaagtcactcttcttttatctagttgcttaaggtagaagtcaaagtcattgatttaagactcttctaatgtagacattcagcagtgctaaaaatttgtattcaagtacagctgtagctgcattccacaaattctggttgatgaatttttattcagttcagaatattttctattttctatttctattttcattacctgtttgacccagggttatttagatgtgtgttacttagtttccaaatatttgtgtatttgccagagttatttttgttatcggtctttaatctgattgatttgtggtcagggcacatactttgtatgacttaaatccttctgactcaatcctttgagag

SEQ ID NO: 173864 - DNA, 529 bp, Homo sapiens
ctcggcctcccaaagtgctgggattacagtcttttctgtgagtgtgtttgtgtatgtgcttattgacagttgacatgttctctgttggaagattttagggaaagtaaagtgacttttcagtaattctgtaatgccatttgaccacatgaatttcccctcgccccaaaaggagagaaaaaactgaaactgctggcacagactgtacaagacagtgacgtaagatgccaaagttatgcagataaaatgggatatgtcacaggtggtaaaagagtttttgcaattgcttgtttccaagctaatggcagaactgtgttctgtccagtggaccctggttaagaaagtccttttcataaagatatacaaacaaaaaacgtgaaaggtgaattaagtactttacattccctcctttagtttccaaaagtaggttatgtgtgaaacaaggctttggaatactttttaatatgatttcttgtccttagttatgatttttaactttaaaatgtgattattggtttggatcagtttttaa

SEQ ID NO: 173865 - DNA, 248 bp, Homo sapiens
tgaagaccaggaagagagtcctcacaagaacctgattatgtcggcaccttgacactgaacttccagcctctaaaaattgtgagataatgaatttatgttggttaagtcatctagtctatggtattttgctgtggcactaagctgccatggcagcacaggcatattaagactatatatgtggaaaaatgttctattacacaacatttttccaaaagggatcctcatgaaacttccatccgttgaacacc

SEQ ID NO: 173866 - DNA, 319 bp, Homo sapiens
tggggtacatgtgcactttgttacatgcataggttatgtagtggtcaagtcagggcttttaggatatcccatcacctggataacatacattatacccattaactaatttctcatcatcttcgcctcttcctatcccctcactcttccaaatcttcattatctatcatgccatcattaaaggcattttctgaaatgtagttctgataatgtacttcccttctcataaaagaaagagagggacctccagtcacctgtggaataatctgaagttttaatcttgacattcaaggccttctgtgatttagaccccaacagctcg

SEQ ID NO: 173867 - DNA, 199 bp, Homo sapiens
aactgcagactattttgatattttcagtccacatcacaaacatgtattaaattgactgagtggcacatgttgctaggtcctggtaatatgaaaatgtcatggagtctctgctaacagcctagagattgggaatcagagaccatgtctaggagagatttgtaggggaaatattctcaactaaggcttgaagtatgattag

SEQ ID NO: 173868 - DNA, 257 bp, Homo sapiens
gaaaaaaaaaaaagtgaccatgtgaacacattgatagggtcctccctgggtttttagaagcaggttttacaagcaaggggtcctgaaacaagcttcatcagtttcacagaaaatcctcctctgtgggttactgacagcatacaaaaggacccaacatcacgtgacatttggtcaagatgacccttagtgaatttcccagtattgtaattacataaacctctgtttatttattaattgaatggccctttgacccctta

SEQ ID NO: 173869 - DNA, 152 bp, Homo sapiens
tccacctgcttcggcctcccaaagtgctgggattacaggcgtgagccaccatgcccagcatcatcaatagtttttgagcattctctatgctccaggaaacacactaggtaatacctatcacacagcaacattgtcaggaatgtcttaatttc

SEQ ID NO: 173870 - DNA, 239 bp, Homo sapiens
ttgcaaatgctgttccctctgcctatagtacattgtcctgattcatttcttcttatccttcaggataaaattttgaaacatcacctcctcagaaaagtcttccttgctccccaaccccgaaactaggtcacgtttccctgttatctttaggactttgttacttgctactcaatcctggtactactacaaattttaattatgattgttaaggaaggcttatctgattcagtcagaaccag

SEQ ID NO: 173871 - DNA, 569 bp, Homo sapiens
ctggcccagtgtgtgtctagaactagggcctggaatgagggtttcaggactctgcctgctgccctattctgctgtggttgagctagtatccaagttggaagatgaagtcctctttattgttccctctcctctcctcaagtggaaggaaaaggtctttcctggagctgtgagctgcactgcctgaggttgggggagcagtgacacaagcacccactttactgtaccagcagctggtgtatatatgtaggccacatgcaccccgagtctgctggttctgagcccagacttgcccaggaattgccatccttgtggcctggactgcctttcaagtttatttaggaccccagagtactttagccattaacccaatacattgttgctgtgatcatctggaacaaactgttattttttctgtaaatgggatggcaaagcctggatgacagcgtatcagtttatagcatggtttatgaatattttaagcccactatcgagacctgctgctcaaagaacagattccttccaaaatagtaagaattgacaatttttaatttttaataaattaatttaat

SEQ ID NO: 173872 - DNA, 513 bp, Homo sapiens
tcagggctgcgggctcagggatgtgcgggttctcaaaagagcagcggagtccgagccgagtccgctgacgggctcacgagcgctgcgcctattggctccctggcacgtcggcgtccctcgctcgcgcgggcgcggccaataggggcgcggggccggacgcgcggcctcggtggcgggggcgcgggcccggcgcggcgcggcgcggggagcggcggtagtggccgtgacgtcacgggagggggtcggcgccgcccgccagcagccggattacaagcgaacgcgcccggcagcggccggagtcgcccggcatcgcgtctccgccgcttcctccttctgtgcctgctccttctcgtcgtcctcctcttcctcctcctcctcgggttgccgcaaccgctgcggccgtgtctgccccgcaactttccaagaaagttcagaaactcggctacggggctgccgagtggcgcgcggctgccacctcgggagccgcgggggagttccgagggcgcgcggccg

SEQ ID NO: 173873 - DNA, 673 bp, Homo sapiens
tggagtcacacgatcactgcccagtcattgacagaagcagaggggagaagagctgggggtttcgttgccacaacctcactgtgatccaacatgtaactgatgccaagaggttaccccgacctcctctggctgcttctggagaaatctgccgttcagagcagggaaggggtagacagcccccatgctctgccctgaccaaggcccatcggggtcatgggatgtccagggcactaattagccagtgtcagaagagggtggccaggatgagggggggctctggaggccaacacatgggaaagacccctgaggatgctgggctagaggagagaaagtccaggaacataagggcctccttcaaaaacctgaaggcaacctggggaattactgtgctctcgtttctagaggtgactaagcaaagatgggctatgtgactcttgattccaataggaacttctgctcagtttgggaagccggcccaggccacagccctctggtagagcattaaggctgtgtacaggccctggcacaggccgaccctctgaccaggtccgaagtcccctttcttagactaccagaagtgcttctcaaatccatctcctccctggattctttctggattgactagagaacagctgaagctttcttccaggccacacccaatctcacagccccc

SEQ ID NO: 173874 - DNA, 221 bp, Homo sapiens
ttcatacccatgttgcacaaatccacaccaagaatctatcctgcagacaaacttaagtgtacacacgcacacgctcttccactgaaacaagatgccaaatcatctgcatgaattcatttaagttaaaaaacaacaagaacacacacaatattgtgttttacaataagaaaacaaatttttaaaaatatcacaacagatggtgtgcacgtgtagccctagct

SEQ ID NO: 173875 - DNA, 516 bp, Homo sapiens
ccagcttgaacgacagcgcatggccgtgctggaaggggttgttggttaacaacaggttccctctgccgagaatgccctacctacttgctttctaatgaactactgtactactgtttttaaacgtccacttactgggtaattaggatgtttcaaaaactatattccaagtacttgctccaatttactgtcaagaagagtttagcaaaatctaataacttgcttaagatcacaaccctagaaagtgtcacaaagatttcaacttagttaagtttgagtcaaaagattaatttctcaacttcctcttctattcttcatccttcaagacaggaggcattctggaacagtagaaagagccctggttttgaagtcagacctgagttaaaagcctgactctatcacttattagctatgtaaccccacagtgtgtattctctatatcccaggattaaaagagtaaatgctttaatatgtgtaaaagccctaaccaagcaacatagtaagatgtcaacaaatggc

SEQ ID NO: 173876 - DNA, 793 bp, Homo sapiens
aggtgtatgtttaaagctgttggcaattaaattgttggcaatcatattttcctagtccatttacccttctactctcttaggacaccaatcacattttcctctaaccacaaacttcaaatgtcttctctgttatcctcattttcaactgatgacatcacttcctaacttttctgagaaaaattaaaagaacttccaagaacgaccagaattctagactcataaatccaaccacctacttgacatctcctcttagatgtctgacattcacattaatatgttcaaaatgaattctggctggctttcaggaagacaaacacactcttccctgtttctcccactaaaaacaactaaaagctctgaacattatgtataaaataacacaagaacactctgaaaggtggaaagaactgggtagaacagttagagacctcaggatatgtgaaacaacatggtggtgacttccttaggtttttctttttacctcatatatcccaggctaaagacaaaaaataaaaatggcagacttcagctctaacatatccatagtgcagtaaatgtaaatgacctaaatacatcaattaaaaaacagagactggcagactcaactacatgatgtccatagaaagctcattttatttttttctttttgagacagggtctcgctttgtcacttaggctggagtgctgcacaaacacattcatagcagctttattcataatagccaaaaactggaaacaatcaggcatccttcaacagataaataaagtgtagtctacctataccatagaatat

SEQ ID NO: 173877 - DNA, 528 bp, Homo sapiens
gctgtatccgtacagcgcatgcatataaaagtgcagttataagtttgccttttgcaaatgttaagcctagtttgcaaagttcttgctatcttttactattgacctggtactattaaaatcattcttaggattgagaaattgtatatctgtcttaaagtaagaccctgtagaaattatgagattgtgtacttgtcacaagtgattttttcttttttttggtggggtaggcggttagtataaatatggcatgttcttcagctatttttcaaagtttgattcacggtaattatactcagagtactttgaacattatgtaacacattttttagttcattataatcaattgcaattagtttttacttttgaagtatgctattagatgtgaatttatttgctttgtatgggatatttctttacagaaatgcacgtacccacagactggacaggactttattcttttataactacagacggattatacaggatagtatgtgagcctgctgttctgccatttggtacggataaacg

SEQ ID NO: 173878 - DNA, 178 bp, Homo sapiens
gggtcgtctctagagttccctagacagcggacccctttaatgaaagagatactgcaagactcattcttgggcagtgtaggcaggagagaacgaatacatagtgagaggatagaggattcatgcaataacatcccaaggaggtggatccaaagccagccggggggtcaagagccacagt

SEQ ID NO: 173879 - DNA, 278 bp, Homo sapiens
gggattccaattcaacatgagatttgggcggggacacagattcaaaccatattgttccacctctggtctctcccaaatctcatgtccttctcatatttcaaaatactaccggctgcgtgcagtggttcacgcctgtaatcccagcactttgggtggccgaggcaggcagatcagaaggtcaggagatcgagaccatcctggccaacaaggtgaaacctcatctctacaaaaatacaaaaaattagccaggcatggtgatggaggcctgtagtcccagc

SEQ ID NO: 173880 - DNA, 151 bp, Homo sapiens
ggattacaggcgtgagccaccacgcccggccacattcactttttaaaaaacatgtttttctttcacctgcaaccatattattttttactgttatactgcactttcttcagctcacacaggaaagtaatactggactttgctcctctgtcat

SEQ ID NO: 173881 - DNA, 681 bp, Homo sapiens
caggttccccgaggccgccttttttcttgctaagcccttggcctaccatcccggaagcctgaggcgtcctgtgggaaaggactggctcgccgtcatatttgtgacccaggcagggtggagagaaaactaagctgctttggtaatagtttccgggaattcgggagtcaagaataaagcacttcgacctaaaaatagagatccagagtctagacagggggtcaccgtgggctagcacccctcagggttagttttatcctggggcactgcaggctgtcaggactgcctgggcccttacttggtatttggcattagtcaggcattattgggaacaatatttgagtttttcttgcttgaatgtctgctactggatcgtctcggggccgtcttgttttcacaatctcaaaggtttggcttctgcactcccagcccctaaggtaatttgccctttgctcccctccctggaggggacccttccgaatctaatttattaagcaacaccaggcaattagaatattgagactctatggggcccttgcccttgagcaactaaattttttattgaagacgaaatatacatgcatgaacaatgtaaggacaagggtgtcctaagtgccaaattcctggaagcaataaatgcagaaggattcggatgggtagaaattgttaggtgaagagtggata

SEQ ID NO: 173882 - DNA, 341 bp, Homo sapiens
cactaagcctagtttacgatgctccttgaattctatttctctttagctcttcatcagtctctgtaatcatatccacacagcacattacaatttgattaccaactcacagccggagtaattacttcttcttcaactgacaatacatatatcaaactcacacaacaggagccctccaaaatccatcccagaccttgccctaagcagagcaagagggagcagagccagggaccctgctgagttttcctatcctgggacttaatatcagtatctggagaggttcccacatccagattagagaaacagaacaggatcaccaaggactggggcagaaacaatttagc

SEQ ID NO: 173883 - DNA, 292 bp, Homo sapiens
attgtttgaagagagaggagagtggctggcaaaagagatgccaaagacaaatgaagaaggaaacaaaaatctagagtgttatacaaaaatgatgtatcaaagtcacagtagatcagatcacatataaggccatattaatctgtgtgaaaaaattgaatctatttaggatatatattcaactccacatatatatacacacacacacacacacacacacacacacactcatattcaccaccactcaggtacatacttctcttatggttttgttttggcctcttcaccaagcctt

SEQ ID NO: 173884 - DNA, 536 bp, Homo sapiens
cttctgccacccctctgggccatgcctttgtgccaccttcccgcgcggctcgtacactctgtcccggtccggtaggtgttcgctgaaggttaaccttcgttgaaggaattgagggaaggagagctttgtgttgaagttgagccttgggctcaacaggcggtgtgggtgtaagagccgggtgtgggtcccagctcgacccttcccctgtgtgctccacatctccgagccttggttttggaggctcccgaagcccaattggcaggagagttgggaacaagtgggcgcgtgctgttaagggaggtcttggcatgacagaatttgcttggaatgattagcgttgcccaagggctgtcgctgtcagaaaaacaaaacaaaacaaaaaacaaacggggtccgaagcagctcctggagaaaataggtgttggagagtcgccatgaagtggactctaggtgcatggcacgcagagacctgtgacgggggagggtggccatggcagagtcagataacaggggtgtgggagacacctcttgggaat

SEQ ID NO: 173885 - DNA, 199 bp, Homo sapiens
attagggttcactgtaatccaatatgaccatattttaacttgattacatccttaaagatcctatttccaaataaagtcacattcacaggtaccaggagttaaaacttcagcatatctttttctgggaccaacccacaacagacattctattgtatttttctcatattgtgtttctcaaatttatggtccatatctcaag

SEQ ID NO: 173886 - DNA, 423 bp, Homo sapiens
gtttatcattcacagctgtgtttgtctacttgtttctacgtgtgttgccatcaaatagttcttctgtaagggttatgccctgaagaaaaataacagaaaattttatatataatgaattctaataagatgaaggacacatgactgcactttgcacagtcatgagttatgaatcaagatttttgcggtcgttggaatagagagacgaaagtagcagaaaaatggagttagtgcatggtgcacggtactgaaggcggggctgatatgtagccatagttcctgaggcagcctctggagttgctgatggctagtgtttgtcctgataactctcaatgtcttttctgatttgttgggactgtaccatcctggctgtcaaatttctgagtatcaccctgtgtattcctctgccaaacccaagagaacttg

SEQ ID NO: 173887 - DNA, 582 bp, Homo sapiens
atggtctcagggcagcattctttccgagagggcaagtcccaatgcacaggacttagggagcagatttgccaataccccattggccaaagccgtgaaaatcacatagccagacctagagtcaatcagtgaaagaccagaaaagggcagtgctaaggaacccaaagaggagggaattctaccaggacggtgcccatccaacacttgtgttaccttgggagccagtacctccttaaattcagggcccaaagtgcctcaacttgcttcaccccaattccagcctgaatcctcaggacttggcaactcagaggtcaatttccttaacaccccaacatgaatttcggaagttagtttcacagaaatcttaagcaccaaatacaactgagcgaaagcaattctgcacgtcaaaaacaaggtggtctaaagtttgcaaactttatggcagtctggcttgatgaaatataaagcccacaatgcttttaaacagttttggccaggcacagtggctcacgcctgtaatcccagcattttgggaggctgaggcgggcagatcacctgaggccaggagtttgagaccagccttgc

SEQ ID NO: 173888 - DNA, 516 bp, Homo sapiens
ggagtttgagacaagcctgggcagcataaagagacccccatctctaaaaaaaaaaaaatagaaaaattagccagacatgatgatgccaacctgtagtcctggctacttgggaagctgaggtaggaggatcgcttgagcccaggaatttgaggctgcagtgaactatgattacaccactgtactccagccagggtgacagagcaagaccctatctctaaaactatttttaaaaatcttaaaggattcttttccccaaggatattaactcaaggtaaattataataggattgcagataaattaagcatctttatctttgattacagagatatttagcatatgactatagataatttccccttcatattttcttgggcttctagtatttatgtatcaagaaaattatttccttatgtttgaaatggtgacatttctgaaatgtaccagcagaggatacagggatttttgtttgtttttcattttcttatttactgaagaaataaaggcattttagttta

SEQ ID NO: 173889 - DNA, 570 bp, Homo sapiens
ggagtttgagacaagcctgggcagcataaagagacccccatctctaaaaaaaaaaaaatagaaaaattagccagacatgatgatgccaacctgtagtcctggctacttgggaagctgaggtaggaggatcgcttgagcccaggaatttgaggctgcagtgaactatgattacaccactgtactccagccagggtgacagagcaagaccctatctctaaaactatttttaaaaataaaacaatatgttgttcatattatcctaatgtagtgttttactgaatagaattccttaaaggattcttttccccaaggatattaactcaaggtaaattataataggattgcagataaattaagcatctttatctttgattacagagatatttagcatatgactatagataatttccccttcatattttcttgggcttctagtatttatgtatcaagaaaattatttccttatgtttgaaatggtgacatttctgaaatgtaccagcagaggatacagggatttttgtttgtttttcattttcttatttactgaagaaataaaggcattttagttta

SEQ ID NO: 173890 - DNA, 619 bp, Homo sapiens
ctccgaacttctagaggtcagtccgaaggacaagtgtagcacacgccgaaggtccagactctgaagatgagtgggactcgtttcatgatgagctggaagatttttatgacttggatctatagcaaccttgcgtggcgtgtgaactggtctgctgacctcagacagcagctgtcccctgtggtggtgtggcagtgcctgtgttctctcctaggcaggcctctcaactccaggtgctgtcctaagaatttttacccagggcctgtcttctcaacccctcacctttccctgaggagtgtgttgttttccctgttgaaaaaagttacaaaaataaatcttaaagttagttttttgtaacacgaatttaactgtcagacagttagtgtgggttctcggcgtgtgtgcacacgccgagaatccaaactgctcctccaacaagagatggagtctatttcccctcctttccagctgtgctaccctcctgacttgccaggaacaatagaaagtcgcagaagtgctgctttgccagttctgggcctagctcttaagaggactggctgctttttccttcccgctaggtagccaggtgccatgctgaactaaaactggctctatgctgaat

SEQ ID NO: 173891 - DNA, 344 bp, Homo sapiens
actccttcagctgaaataacattctaatttctctgatattcacccccaattaaactaggtggtatcagaaaatgaaaagcacttaatatatttaagaaaataccatagtgaaaaaaaatcactataaattatctattttaagcaaaactatttgatgttgctcaaacaacatagcaaaactagatcatttcactttattatttgttaaaaatcatctcccttcgtcacacactgaatctatgaagtaattaataatgaatacaatgaatgcttatatgtattaggatcatggcaaatctataaaggctgaaaggcttgggttcagccaatgaagttaatattgt

SEQ ID NO: 173892 - DNA, 146 bp, Homo sapiens
ggaaggtctcaaacatatctcttacatttaataatggattgttgacttacacccccaacttcatggttcagtgaattggataattctcagttcatgctgggcagttccagttagtgtctcatggtcaggcattcagtttctacaag

SEQ ID NO: 173893 - DNA, 517 bp, Homo sapiens
atgatgctacctgtggatctgccatatatggcttttattatgttgagctatgtttcttctatgctcagtttttcgagggtttttatcaggaaaggttgaattttatcaaatgcttttcagcatcaatagaaatgatcatataacttttgtctttcattctgttgatctgatgtacacattgattaatttgagaatgttcaaccatcattgcatccctgggataaattccacttggtcatgatgaatgatctttttaatgcacagttaaattcagcttgctattattttaatgaatatttttacataaatgttcatcagagatattgttctataattttccttttttttttttgggatgtgtcttggtcgggtttggtaagcgggtaatagtagccttgtagaatgagtttggaagtattccctcctcctctatttttcagaatagattgagtaggattggtattagttcttctttaaatgtttggtaaaattcagtagcgaagccatcaggtcctgg

SEQ ID NO: 173894 - DNA, 454 bp, Homo sapiens
catttataactaggatagaggctgggtctggaagccaccggggcttctggtgggcagcaggtcaggtagctgggctgagcctcatcatacccaatcttcatttccttattcataaaacacaaaaccttattttacttccaaggccagaggactatttaatttattgttccagcagggtgcttgtgagagaaagaagagcagggctcttccactgactgcacagacagcaagtagacatgaggccttggcagctgggctgtctggtcccctcttgaagggtgctgccagtcctccgggcacagggccttgcagggcggacactccacactgcccagtgccctgctgccccccacatggtgactgagtgatgctttgctcagacagcgagctatggctgacaaactgaactggcagcctgtgcccatgggcacattgggaacccctctgcctctgg

SEQ ID NO: 173895 - DNA, 198 bp, Homo sapiens
aaagcctattattgagtgtttagccaggatgagttatatcattttcgtgaaatattacataaactcgttaagtgaagaaaataagaaaaacataaagaagaacaaaatgaaaggcaggatatagcactgcacatattagtatcacacacacatacacaaatggtaactatcaaaaaaaaagaaaagtctcaagggaaa

SEQ ID NO: 173896 - DNA, 223 bp, Homo sapiens
  misc_feature (195)..(195): n is a, c, g, or t
  misc_feature (201)..(201): n is a, c, g, or t
  misc_feature (204)..(204): n is a, c, g, or t
aaatgagccaccaactgtgtcaaatgctataagaggaaaactgagaagtgacctttggatttagcaacaaggaggtcattgatgaccttgacaagcagttttggtggcatggtagagaagagagccttgctggagtaagatcaaaagagaatgagaggaaatgtaaacaacactctccagtagccttgctgtttntggagntancactggtaccgactcgatt

SEQ ID NO: 173897 - DNA, 1068 bp, Homo sapiens
gttttggattttagccattctaatatgtgtgtggcagtatgccattgttattttcaatttcctaatgacatatgatgttgagcatattttcatatgcttatttgccatgcttatatgttctttagtaaggtatctggatcttttgcaattttataattgggttgttcatttcttattcttgcgttttaagagttctttatttcttgtcgcatattctggataccagtcttttatcagttatgtgttttgcaaatattttcttttattctgtggtttgcatttttattcttttaacagcatctttggcagtgcagaaatgttatttttaaaatagttcaacttagcagattttcctttcatggataatattttgggtgttgtagaaaggagcaaaacctgaggtaattcagattctgatctttgttattttctaaaagttttgtgggttttccttttatattgagctatgatccattttgagtaatttctgtgaaagttgttaggtctgggtttaggattttttttttcttttctcttgcatgtggatgtctagtttttccagtactgttttttgaaaaattattctctctcaattgaattgcctttgccatttcatcaaaaataagctgactatatttgtgtgggtcaatttccgacctttctcttttgtatcgtttatctgtttctctattatttttaacagtaccatgttattttgattactgtagctttatagtagttcttacagttgggtagtgtcattccaactgttctttttgaatattttctgggctattctgggtcttttgccttttcatataaactttagggtcagtttgtcaatatccacaaactaactttgtggaattttgattgggactgcattgaacatgtaaagttgggaggtactgacattttaacaaagttgaatgtttcttgaatgtgaattttctctctatttatttagatcttctttgatgtttttattcacagttttgaagtgaataaagtcctatatttatatttattttgttagatttgcacttaagtattttattgttattggta

SEQ ID NO: 173898 - DNA, 816 bp, Homo sapiens
tcgtttctcccaatgtcactaaatggctgaagctcagaatctttatcatgaaatacaccacgacagtaatggtattgacagcatgggaatagcctgcccacacatactacaagctagctcttgggcttttgggaatcaatctttcaaaactgaacatacaagtcactttaagcttattaaagtttctatctactgatggtctcttttgaaagataagcactctcatgcttgccacataatatcttcaaaaatcatattatttccaatacacacacacacaaaatcccccacttaactataatggccaataattgtgtactaaatttctaataaaataggggagaaaacagagcaaatgttaaaaaatatttctataatatttaacaaccaatacatacaggattttatttagtctacccatagttttcattaaaagtatccttagaggttgggcatagtgactcacatctatcatcctagcactttgagaggattagctggaaggttctcttgagtccaggagtttgagaccagccatgtcaacataacaacacctcatctctaccaaatttgtttctaaattagttgggtgtggtggctcacaccagtagtcccaccaactacttgagaggctgaggtgggaggatcacttaagcctgggaggtcaaggctgcagtgagccaagatcgtgccactgcactccagcctgggcaacagagaccatgtctccaaaaaaaaaagagtgggggggagagggcggagggggaagcattcttggccatgcatgcacagtggctcatgtctataatcccaaca

SEQ ID NO: 173899 - DNA, 296 bp, Homo sapiens
ggaccatactttgagaatcaccacttgttctgagagggtatgtgatggtgggaggaatgcagacaggtctcagttccctccctgctgctctctattactttttccatccttgctgatgtcatgttctaaacttcatgttactgtaatctattctagactgctgacctttgtcagtggctttctccctctttgacctgatgaaagttcctcctgcttctaatgagctgctctttctgaagggattcccctagctgggcctctggtatcccagttctttatatcatagccttctcagg

SEQ ID NO: 173900 - DNA, 420 bp, Homo sapiens
cctgatcgtctccaatgccataacctccctgccaattctttatcacattgctttaatgccttcataatgcttaccatgatctgaaatcatctctgtatttgtctacgaatttatcaccttctttttcttctagaatgtcagctccatgagggcagatactcatctgcctgttcatatgaaccttcctagggcctatgatggtgaggttctagggaaggtgctcactaaatagttttgaataactgaatacagggacacatgatgggatttacaagtgtccacattcactccacaagcctaatgtgcaaaaacacagctacaatagagatttggttaactatagcactggtgcaccaacttctctggaagtaatccctggcctaccttggcaaggactttttcataggaggttattggcat

SEQ ID NO: 173901 - DNA, 257 bp, Homo sapiens
actatagcatctagggacacatacttgagtaataaaaccaaaaacttaattcattttcagaaaacccaggacagtggttactttttaaaggacagggttacacaggtgctagccttataattcactaagttacacatttgttttgtgtggttttctgcatttgtttcactttacaattaaaaaaaaaagaatttaggaaaataaactgctgctattaatttaaatctacctctagcccaggcacagtggctcacacc

SEQ ID NO: 173902 - DNA, 991 bp, Homo sapiens
gaaacctgaccaggaagctgaggaccaaaccagcctctttttccgttcccggtttttttcctgaacccaacgcgtgccgtgccccgtttcccccaatatgtgttggggaggggtgtcctgaatggggtggtagattttttttcttaaaaaaatttttttgttttttttaatactcagaggagagggacataggaaaggtaaagtggatgtaatcgggtggttgttagggtttggggctaggtggggccaattgcataagcagtggagtgtgttcttcccctccctgcagtgttccttcccgtgggatgatcactctttagctgtatttggggctagaatgagatttgaaggaggccatggaacttctctttagaaagcctgccttggctgggcctggtggctcacctctaatcccagcactttgggaggccaaggtgggaggattgcttgagcccaggaatttgagactagctggggcagtgtagtgagactttgtctctaccagaaaaaccgggcgtggtggcgcatgcctgtagtcccagctacttgggaagctgaggcaggagggtttgcttgagcccgggacgtggaggtggcagtaagctgtaattgtgccactgtactccagcctgggtgatagagtgagaccctgtatcaaaacaaaacaaaaaacaaaacctgccttctgggattgggcttctggtttttttcccatgacacacacatcctttcctattttgtcctctgggtcttcatattaactatcttcccccaggatagtataaaaagtgttaggaaagttgggctttggagttgtggtaatttctgtctttgttactttcctccccttcagggggttttttaattttaaagatgaatgcagtgaggtataatggtgtgtgcctgtagtcccagctattcaggagactgaagcaggaggatcacttgagcccaggaatttgaggctatagtgtgctatgattgtgccagt

SEQ ID NO: 173903 - DNA, 291 bp, Homo sapiens
ctcgtgagctccaccgaggatctatttggaaggcagaatctgagatgaccccttagcttctgcctggataaatgccaggtgtaatctcctctccctggagtgtaggcaggacccgtggcttgcttctaatctatacctatggaaaagttgaagggattttgcagatgtaactaagcccctaatctgttcgctttgagttaatcaaaagggagattattcagggtgggcctgacatcttcaggtgagatcttcaatgagggtctggaggagagagactccttcctcctcgtt

SEQ ID NO: 173904 - DNA, 421 bp, Homo sapiens
tgccatcctactaaactcagaaggccgaggtgagcagcacatggagccaggtgacagagcccagcagagagcccgagcccattcctgtggcccagggaagcctgttaggagctccccatcacatatgggtttcttgagcctgtttcttcctctgtggaatggaggttgtgcaggtggtttcagatgctcctcctaaccaggtgctctgggcactgtggctgcaggtggaggtactcaggagcatgaggcacgctgtgcaaataggactgactgaggagccttaagaccatcctggggattatgaagcatcactcctttctcacacaagtcctgacgtggtttcccagcttctggaatgggttttgcccagggacccatgcacctcacctagagaggatgtgaggtctgggtacagcagttc

SEQ ID NO: 173905 - DNA, 150 bp, Homo sapiens
ggtgtgacctgaggatgatgaggaagggatggtgacaggaagaggggtggcctgacctgtggatgctgaggaagtgtccgtgacaggaagacgggtggtgtcacctgtggatgctgaggaagtgtcggtgacaggaagaggggtggcgtg

SEQ ID NO: 173906 - DNA, 384 bp, Homo sapiens
gattacaggcgtgaggcaccgcgcccggcccacatggggaaatctttggcttaagcgtccacatgctcctctccatgatcattccccctggtccctggaggtcttgtgtggccctgggatatacaggcgaatgacccttttgtcccagtctcttggtcctgggctgctgcagctacaattccgtgcctgtggaaagggggtgatcatttcctggggttgcacttcccattcagagtggggagagaagcagcactgaacaggacagaggggcagcaggtggcacatgtcctgcacggatcacatgcctcagtggtgtgattaattgccgggataatgagtcattcgcttccccaccttccctaggcgaccgcaaaagcagccagg

SEQ ID NO: 173907 - DNA, 272 bp, Homo sapiens
gtgtgtgtgtctcctattggttctgcttctctgaagaatccatgcacccatggaggacaaaataatgtacccatgcaggacaaaaatattgtacacataaattacctgaactcataaaaaataaacttttctttctatgtaccagcaacaaagctagcaaacaaaatttttaggccaggtgcggtggctcactcctgtaatcccagcactttgggaagctgaggcgggaggatcgctcgagcccaggagttcaagaccagtctgggcaacac

SEQ ID NO: 173908 - DNA, 243 bp, Homo sapiens
tggagtagtcaaatgtacacgggagttagcaaaacgggagataaagatggtgccaagatttcttgcttgtgtcataaagaatgtcattaatggacataggaactcatgcaggagcagcagacttaaggagaaaatcatgaataacatttgggacatgctggagttcaggtgcttgtaggagagctccacaaagcataagaaaataagcgacttgagattaggagggatgatggggttcacaga

SEQ ID NO: 173909 - DNA, 326 bp, Homo sapiens
gcttggttctgaagaatagcatgtgagtaaggtcatgacatcagggctctattcaaattatgccatagacctcttctatttgactagtattttcatgccaatagaagtagccccactttatgtctttccttccccattcttgagagtgccagtttattagtcctacaccttgttgcttctgctgttacatccagcccaggactaattttcatatatctggactccacgtctcacctatttttctcacggctctgtctgcagtggtcttcaatattggctcatgtattttgtattacgaagtatatacccattcttttttttttttt

SEQ ID NO: 173910 - DNA, 141 bp, Homo sapiens
aacgtcgattaactggtgattattaccataaaatgcatgttaaaataatgtaacacacatacaattatgtgctgtgattttaaaatctacttaattttcatgatattaagatgtgttagtattttttttttttacttggcg

SEQ ID NO: 173911 - DNA, 261 bp, Homo sapiens
aaaaactcaaatttaaattgtaaaagaactaacattaagaaaaaaagtctagcttgtcatacttagctaaaacaaagtctttcaatcatttattagtatatgaaacaaaccaccaaaagaatctaaaactagcataccatttaccactccagttgaatgtcactatattgttttcactaagactcactttaaccattttttttttccatcaagacatccagacccccagccctgatttgatgtcatcccaggatgtgtctc

SEQ ID NO: 173912 - DNA, 606 bp, Homo sapiens
agttgagaaagtacccattcattaggccagtgacgatcagagactgggtggccagcaagaaccacaaaaggtccttcagccagccctgctcttaggccccagatgcctggcagcaggacagtgacagggataggggtttattctcttgagccagaccccagaccctggctctgcctcttaccaggtgtttgagctgacacaaattatttaacctccttgtgcctcagttcctcatctgtaaaaccagaaaacaggaatacttaccttcatggggcggctatgagtactcactgagcaaattcatgacacccagcagccctgtgtaattgttagtgtctgttattcactctttttatcaccagtgattatttctagtttaggcattctaactcctctctccactaaaccagccatctctctatgatcacatctaatattattctgagttacttgtcccggaaaaagaataactttccaatttacaaactggcagagggaaagtgcattgctgtgctggaaaaacccgtggagtgataagcaggggctctggagtgggacagtccctgggctgcgcactggctctgccactcactcactgtgtgagcc

SEQ ID NO: 173913 - DNA, 528 bp, Homo sapiens
gccctctgttcctcctgcatgagcggggcttccacccaagaacagattcttttcattgaaggatttccactggactttcttagagtctagcggtcatagctgacagcctgtaattttaagttaacgaagtcgcaccgcacagcaaagttaagttttgtttagcaactagggcaaaagacaaaactgagtgggcataaagtatgtctggagacctcagttcttatctagaccgttttttatgctcatcattgtatctccaatgtctggaatagtgcctagtgtatggtaatcagtccgtaaatatttactgaatgaaggatggtaaccacggagggattgtgagtggagatacctctgatctttgacaaatctcctatccatgcttggtaccaacatgagctaactccatggctcaaaccaacaggacaatttgctaaggtctaggagcaccccctccagagaatccctgatctcccaaaatttggtcgagatctaaagttcattttgttgtacaactccctctattat

SEQ ID NO: 173914 - DNA, 539 bp, Homo sapiens
gttatagcgctagtataggcagtgctatgctaatagatgcatgtatgatcttgtatcctgaaatatagcagaaattgctatatcagctcaaggacatatacagattacatgatggggttttcttaatatacaatcatgtcatctgcaaacagggacaatttgacttcctcttttcctaattgaataccctttatttctttctcttgcctgattgccctggccagaacttccaacactatgttgaataggagtggtgagagagggcatccctgtcttgtgccagttttcaaagggaatgcttccagtttttgcccattcagtatgaaattggctgtgggtttgtcataaacaggtcttattattttgagatatgtcccatcaatacctagtttattaagagtttttagcatgaagggctgttgaattttgtcaaaggccttttctgcatctatagagataatcatgtggatttgtctttggttctgtttatatgatggaatatgtttattgatttgcatatcttgaaccagccttgcatc

SEQ ID NO: 173915 - DNA, 700 bp, Homo sapiens
tggcatttgagagtgtttgatatctggcaggatgctattcggaaaagagaatgtaaatattcctgcatgttgtcttagaagcatttaatgtaactgactgagataatttgccatttatttcatggcttcttaaagggattttgagcctccttatctatgtgcattgttagagtgaagctgacaacaggttattttgtttgctttgtaaaacttaacaggaggaggccatccttggctttccttgaggtgctggtatcttggaagggaagctagccaaacttttcctcccagaggctgtcttttgacacagaacattttagttcctaccagatttctctgagaggctttcatggagcccagttaccccttcccagttaccccttttagcaaatgatattcatgaatactgtgctcacaaagaaatttaggtcaataaatggaaagcatttgagatatctggactcttttcatgttctagaaccccagatgctagggaaattttgggagaaagcctagaagtggtagaatttaaatattagttaggtttcttatggccatctttcctaaggaaactctagaaatagctcatgggatataatttaattacatggtcttagataaatcctcatcagtcttttatagctggttatgatatttgatgagataaaacaaacgaactttttttcagatttattgaata

SEQ ID NO: 173916 - DNA, 338 bp, Homo sapiens
tttgtatgtatagtagccttttgccctcatcacaacttagtgtgaggtatgtgttcctgtcctaattctacagagaaggaaattggaattcagtgagttcatgttcttacagctagtgactggtcgatccagaattagagcacaggtccgtctgactccaaaacctatatgtgcttttcactataccacaataacaacgaatatttgttctgtacaattcacaactctttggtctaccttattattattattattattactaccactacttacatcttcactagtcagtaggtacagccaagattatcacgacccccatttcactggtagggaaactg

SEQ ID NO: 173917 - DNA, 402 bp, Homo sapiens
tatgtatacagaatgaattagaagaaatatactggctcaaatgctctgccgtgagttaggcttgagctacatgggtctgggcaaggatgttggcagttggaattagtagatggaacaaatttaagagttgcctcagaggaccaatcatgaagcttgatgatagactggctacggaggcgcaaggaaggaagtaatcaaggataaatgacgtgtgtctcaagagttgctacctttgtgtctgggataatacatggctgtcagtgggaatgggaatgctgggctagagattctggagagaagggagaatgtgtagtttggtttcgaatgtgtggagagttgacaagagattatccaaatatcaatcataggcagcgatgcaggagaacagttagcattggagga

SEQ ID NO: 173918 - DNA, 343 bp, Homo sapiens
atgttttttgtctcacaaggtggagaggtaagaaagaatcagtgaattaacagccatataacacaagataaattattgtaatacatgctaaattcttaaaatgatagatgtatgtacacatttttgtgggatcacagaggaagaagtgattaattcttcggggaagcataaagggatgaggttgggccttgaaagtggaataaaatttcccaaggcagggaaggacattcattcattccataaatatggcactgtgtcagtggtggaaaaaaaagcccatcaacattgttctaccttcatgaatcttagaactaggaagagagataagtaatggacaagtaca

SEQ ID NO: 173919 - DNA, 216 bp, Homo sapiens
gctgggactacagacgcatgccaccacacttggctaatttttgtattttttgtcgagatggggttttgccatgttgcccgagctggtctcaaatgactacttcatttttaagcctaaattttctcatctgtttagtgggaattatattgggacggggttgagaattcagtgcaagttcaggtgtccacagggcctggcagaatgtaagccttcgat

SEQ ID NO: 173920 - DNA, 306 bp, Homo sapiens
attaaatagaatagtcatggtgggcctccagaaggaggtgatttttggcagagatttgaatggagaggagccggattcataaattctgtgctggggtgtgaccacagcagtctggcttgccaaatctactcctaatctctacatttactgcctcccacatgttgtattttggctacacctcattagtccccaaaaagtagattacgaggtgggaggatcacttaaggccaggaatttgagactagcctgggcaatatagtgagactccatctctaatttatgaaagagagagagagagagaaagca

SEQ ID NO: 173921 - DNA, 629 bp, Homo sapiens
gtcactattgtcatggtttctcttaacagcattcttccagaatccgacacagtgctttcagtgtgatctgcctggaacactgcattttgattaatgcaaccaaaggtcgatttttgggtaaccatatcacctgctggctctgagttcagactcagtttaaatcctcataccttttctttacacattaagccacgttttgttcatatacttaaaaaaaaattcttgtttttaatttgagacttaaatgcaggacttttaatttattcctactggacttcaccttaaataaacaaaacaaaaggattcctaaactgttagagagattagataattagagctcattttgttattcaatgctctaacttgcataatttattaatctgtttgtttgcaatacaggtaaaaaataagccatcagttgtaactgcagtgttgttttattatttttttttaatcctcctactgcctaatatacactataccattccaccatataagggtacttctcttctacagtaagaacaggatcaacttcaatagcgtaatattttttctttagttgcaataactaggaagatttgataacttattcatgaagattacctgaaaataaatttggttgggtttat

SEQ ID NO: 173922 - DNA, 613 bp, Homo sapiens
gaaggctgctacgaggagtacagaggccgctcgcccgacgcccacagcgggggccgcaacagttccagcaacagttacggccagagccaccactatggaggagaaggccgctatgaggagtaccgaggccgctcacacgaggcccgcagcgggggccgctccactgatgcccacagcaggggccggtccgacgacgcctacagtgggggccatgacagttccagctggagcgactgctgcggaggaggaggccgttatgaggagtaccaaggccgctcgctggatgccaacagtggaggctgctcgcccgaggcctacagtgggggccacgacaattccagctggagcgaccgctacggagtaggaggccactatgaggagaaccgaggccactctctggatgccaacagcggaggccgttcacccgacacccacagtgggggccacagcagttccagcaacagttacggccagagccaccgctatggaggagaaggccgctatgagtaccgaggccgctcgcatgacgcccacagtgggggctgctctgccgacgcctacagtgggggccacgacagttccagccagagcaaccgctacggaggaggaggct

SEQ ID NO: 173923 - DNA, 562 bp, Homo sapiens
tgctatttctttggagtgtataatgtaaatttaaatactgaaggtatctgatgtcacgaatactcattcgataacctaaattatacccctttttcaatttggcttgtaaattaatgttagcaattattttggtatgttagacctcatcactaaaatcaaaatgtgtaatttaccctatttctgataataatgacttgctaatgtgtgaattttaactgaatttccaagtacaataagtcctcacttcatgtcgtcaataggttcttggagcctctgactttaagtgaggctacatacagcagttccttgaataatatcatttccttcaatatcgttttgttatgacattgatgaggaaagaatattggccatgttgtatgttgttttgcttaaagtcacaattttcaagaacttacctatgagtttaagtgaagatgtactgtacatacctctttcctatttgagatattttgttaaataatgtaaagtctatcaagtatgcgcattagcttccttccttctccttccactgcgctgtatcatcttattccatacatgatct

SEQ ID NO: 173924 - DNA, 436 bp, Homo sapiens
ccccaattgaattcttgatattctgcttctaaatctggccttttgataatcatccttgtctcataatacagtagtatcccttatccatagcctcactttcagtggtttcagataccttcagcaaactgtggtctgaaaatattaaatggaaaatgctaataataccacttcataagttttaaattgcacacagttctgaattgtgtgataaaatctcacaccatcccactctgtcctaactggaatgtgaatcattgctttgttcagcatattcttgctgtgcacaccacctgcctattagtcacttactgcccagcttgttgagtatcactgtatcactgtgttctgttcaattagcccttattttaattaataatggcctcaaagcacaagagtaatgatgctgacaacttggatacactaaagagaaactgta

SEQ ID NO: 173925 - DNA, 621 bp, Homo sapiens
gtcatccgcccgcctcggcctcccaaagtgctgggattacaggcgtgagccaccgcgcctggcaatttttgtatttttagtagagacgggaatttcatcatgttggccaggatggtctcaatctcctgacctagtgatccacctcctgggcctcccaaagtgcttggattaccagtgtgagccaccggtcccggcttaatcatttttagtatattcacaggattgtgcaaccatcactacaacccaagaacattttgatcatccaacaaagaaacacctcttgcccattggcagccatgccccattctcacgttcactctcagccccaagcaatgtatgtacttttcacctctgtagaattgactattctagatatttcacataaatagaatcttacagtatgtggtctttaatgactggcttctttcaattagcataatatttccaaggttcatccatgttgtagcatgtgttagtactcttttttttattgccaaataatatttcattgtgtatatataccacattttgtttattcattcaccagttgatggacatttgggttgtttctgtgttttagctatcatgcataatgctgctatgaatatttgtttatacgtt

SEQ ID NO: 173926 - DNA, 105 bp, Homo sapiens
gggggccctggccgccggccactgccgggcctagaagtccaaatgagaagttttttcctctgggcaccgttgattcgcgaagctgtcagtgactcacactggcgg

SEQ ID NO: 173927 - DNA, 481 bp, Homo sapiens
tatgctctgtcttgagtagggttcactttcaggttaaagcaaatattgttatttcagtaatagctcctaaattagtgatatatcttaaacttacagcaaattctactgctgctaagaatttgaattgtcctaagtcggctttttgtaaagagtattaaaagagtttatttcacagttggctagttttttaatgttttaagtgtttcctatagagcagtgccgtatctgcaggtggtaagggattgggattgaacagttttcagattggaagtggttactttcctgaagtgacaccccaggccttttgcttctaatatttttttccatcgatgtctgtgactgacttccctgcttccaagaagatagctccatgacctcaaaatcctcctccgaaatttttataaacttctaatctttgttcctttactgcacaagtggtgactgcgttcaccctccttgtgaaataaagcaaaagtgagct

SEQ ID NO: 173928 - DNA, 653 bp, Homo sapiens
ccctacctcctaaccccagacaactgtcctaatgaaaagatttttaagaaagatgtcaaagaaaatagagtttttaaagaaagatgtcaaaggaaattgttgaatgaggcacaggggcagcatgagaccagagtggaggaaagtgataaaggcactttttagaagttaagcccagaaaactggggcaagaatcaaagcgacgctacaggcagggatgaggtaaccagggtcctgaagataatcataaggagctggagtctgaggcaggaaaaaaggcaagtctggttaagaggtttaaggcagaggatgacctacttagaaaaagatcttttcaacagccagacttcggactagaggggaagtaggtcaagaggcctgagagtaggttacattcgtctgagaggaagttgttttgactaaacaagaagttgtaattataccaaattatgagatcgttaaattaagtagtcatgtgcaataacatttcctccttaaatatttttaaacatttttttagcagagttgttcatcatacatcaaattttaatttgcattatgttgtgtagtacaacttcatttagactacttcagtggaagaacaatcgaaatttacgaacattctgaaagagttggaattttgcttcttgtccgta

SEQ ID NO: 173929 - DNA, 711 bp, Homo sapiens
gctcaaaaaggaaagggaaacagatttttttggtgtgcattttactcatccctcctcatgtccctgtatgggccaccaaaatgatgcaggattttttgctccttagctccactaaatctgggttcttgtctcacaactaggaaaaattaggcacacagacacctgtgaaaggtgaggagagcagaatttattaaaagaaagctctcatctcagcaaaaaagagagggtcctgccaacaggctcccacctcacagattgaataccaggccaacacacatgagctgaagaggccaggctcctctcccagcataaggggtgaattcctggtggctccacccccattcttcagtgcgcatgcgggccgttagtctgagccactccacattgatttcccttactgcatttgtgttaagggacagaatttttcaccatgggcatgtttagggaagtaccctgtgcaccatgacctgtgcggcatatggctgtctcctatctctatcagtagtatcagtaaagagatagaaaacctacaaagaaaccgaaaaataattctggagctgaaaagtataataacaaataaaaaatgcactggagggattcaaagcaaatttgaacagagaaaagaatctgtgaacttggagatagaacaatggaaattaccaaatctgaggaacaaaaccatctggggatgcagtccagtaggtctcagcc

SEQ ID NO: 173930 - DNA, 481 bp, Homo sapiens
gactgtggtgaggattcaatgataaaaggcaggataagtgctcaagaggatgccttgaacatagtaagccctcaataaaggggagctgcggttactactaagacagtgttggagaaagtacaagagccacagtttttccagggtaagaggtagattattaaaggctgatactgtatatgttctcttagctcctctcttgaacataaacatctgtggtttgtcaaagacattttcaggatccggttttctttttagaaagaggaaggaaaaaaaacccaaggcctgaatctataggaagtccaaatgcacccaggattcttaagtcacaagataaaaagtggagatgcttgaagaggcatctgatagtggaattcatggaagaggaaaaggtcagttccatctctagtgactccaacagagggatgaaacatccaagaatgaagaaaattatttccaggaatggcaaatgaggatggaacca

SEQ ID NO: 173931 - DNA, 287 bp, Homo sapiens
cttggcctcatacaactttccttgtcattctcatttagagctggttgaggaggagctgagatttatcagggagcattaaggagatgttaagagaattattattgtaagtggaagtaataggtttactcccatgaaagcagacacctcactctgtttttcagaagtgtccttatcatgagtgtcttactttggacgtaattgactttcaagtgaatgctgcccctagggctcagaagttccattctctcctgtttgtctcatttggagatgaagaccataagtccaga

SEQ ID NO: 173932 - DNA, 486 bp, Homo sapiens
ttatttttcagaggtgtggaggtgcagtgcagttgtcttacagagatatattacatagtggtgaagttggccaccccatttaaatgagataattctaatgtgcagccagggttgagaaccatagccttagaatttcttgtatactgtaaatcatgttctaagcttccacttgtccctgagagctctgaaccaggaagtcttaatatttttttttcacttccctattttctcccataattcagcatctcttcttccttgtctcaatcatactagttcgatgcctgttttacattcacctcactttgacctctaagtattctcaaaacagcattaagacctgaaattccttccctttcaaaccaaacaaatagtatatcataccatgtcaattatccagaagtcccaaatgcccacaggtatcctcctgggttaagcacgtacataacctcccccaccccaaatcctattgcaactccaacagcctct

SEQ ID NO: 173933 - DNA, 420 bp, Homo sapiens
gggctgtggtttcagaggctgacgcagctggctggccttctgctccttgtctcccggaggctccctgccctcagcaatagaaggtaagacaaggatcacatcccaaggtgggagggggctcgtgccagccctgaaggtggttggaaggtctttttgtagcagccaggaagggctggctctgcttctagatccacaaagctgcttggatgggggccgtctcaggcggagggccacgagggctgaggagtgcaggtctactctgcctcgggctgcccaggcgacatgcccaggggtctgtgtttctcctggagcctgtcaggtttgggagcacccagtgtggtggcccaaggtccgaggtccaatctagggaggcagtggtgttggtgaacctggccatgctaactttgcttaactctacca

SEQ ID NO: 173934 - DNA, 354 bp, Homo sapiens
taccccctaccaaacataaaatctctaataaacatggtattcactgggaagtagagggaagaggtcagaggagccctggaaggttaaggagtcaatcaagagcaaaattactcaagctaccaatccaggactaaatgccctgaaggaaataaagcctacccttgacattcagacagagaaacctgagtaagagaacttaagttgaagatctcaatgcttctcctccagtgaggaagccctgccattaggccagctggtttctgagaggccaagatgccacatccatcatcacttttaaaaaggcattgggagtggaggagagggaaggcattagggctttctatctggactccc

SEQ ID NO: 173935 - DNA, 596 bp, Homo sapiens
ccttcctcctgcctctgaaaagacatctccccagcccatctccttttgcctgcctggcactatagtaggcacttaatacatatgggtagacagaggctgtgtttcattgcttcttcccataggcagaaggcctgaataatggaagaaccaataagaggaagttacaaaggtttagaaactcttaccaaacccttaagtcattgtccctgactgcctgtttcctgagaagttccctggcacccccagggctcatctttgcctctgtgatcctgaaggagatgcatttattcttccttcctcttccattctaccttcagcctttccttggtccttctctccaggatacctaggccctgccccacagcctacatgagagtctgccaaaagggaaatgggcaggtcgtgctggctgaaatcctggctccaagacacacgagccgcgtgacctagggcaagctgccctggcccctgcaagagatcatacagctctcttgggggttgctgtgaggtcttggaagaatgtgcataaaatggctggcaaacagtaggtgcacaatgagtggttgttattgttatcatttaataaagagtgcaga

SEQ ID NO: 173936 - DNA, 552 bp, Homo sapiens
cctctcaagtagctggatttacaggctcccgccaccatacccggctaatttttgtagttttagtggagacagggtttcaccatattggccaggttggtctcaaactcctgacgccaggtgatctgcctgccttggcctcccaaagtgctaggattacaggcgcgagccactgcgcccagctggaacatgattcttaaaaactacagattcaattcagctttaggaattaaaaaaaaaaagatttgatataaataaaatcaaatttttaaaataaaacatgaaattgttttaattaatactttattaatctaagtgctactctgacatatacttcagttctttggtttgatttggtatttatatttttgtatttgatttgatttgattttagtatttatatttttatatttggcctttttagacctttttggtagttcagaagcttatcaaccattattctcataaaaccttgacagtgttttataattttagctttcatttattattttatttttttggagacagagtcttgctctgtcgcccaggctggag

SEQ ID NO: 173937 - DNA, 268 bp, Homo sapiens
cgcgctcccggggcgccgccgcctgcgcccgcgggccgaggggcttggctcctgcgccgccgtcctcctcgggcccctggccgcccaggaggtgactcgcctccgggggcgcggggaaggacctcgaggtgttgatcttgccagtgaacctctggtacagcgaagccatcgggcaccgcgctcctgctggctgtctttggggctttttaatattttgctttctctccggttcccactccccaccccgctccagattaaaaaaaaaaaa

SEQ ID NO: 173938 - DNA, 234 bp, Homo sapiens
tgacccatctagttactgggtgggtttcagtcttttgttgacattgttgttaatgaaagcagcccagacgagctgtgagcagctgggctggataattgtgaaggattcatgcttgttgctgttacccccagtgtttgcagtgggttgtttgctttgacttttgttgaactgttgacaaaagcattagatacaaatgggaacaaataaagtggtgagatgccaggagggcttggc

SEQ ID NO: 173939 - DNA, 123 bp, Homo sapiens
ttttcatgtttattataaatatttctcctagttgtttatcgttttacttcatttatcatgcttttgccacgtatagaaaaattcttaagttttttatcactaaattcatctatcttttttttt

SEQ ID NO: 173940 - DNA, 560 bp, Homo sapiens
aagaatctgagactatgttgggatgcttgtacatcctggaagatgccagcacaaaatgctgggtaaatgctcattgtgaatgtcacctaggaagaaagcagtggaaaggaggggatggacctgaatttaactgagttggaatttcaaataattgagaaattactggacttgactgtgtttacccggattatctacttataagaaaatgaagttacatttttacataacagaatttataagtttttaaattatctactaaacattacttaatgtcatacggcctggttcatcatctgttaaataggaagaataataccaacttcacaaaattgtataaggcttcaaggagaagattgagaaagaaaaagaaaacttcatacacttaaaagaaaaatgtaacagacaatgttaggtaagcttgggtttttaaaccaatgagctctctgttgttttggcagaattactctggctccagtgtgtgagatgaatttgagaagggacagctgttagaaggagaccagttaggaggctttgcaatcattcaggcaacagggaatgag

SEQ ID NO: 173941 - DNA, 407 bp, Homo sapiens
tcttttgcatggtcatttagtctatttatctattgggattctatctaaaacttctttgtaaaaagattccttctgctacagcaccgaaaccccttttcccctaagtacgtgaagcctgaaagtctcataaaaggagtcaatacacatgtaagtaggataaaaacatcaacaggtcacgaactggatgtcatacatgtaaccgtgttaagttgtcgggcagcaacaatattttcataaacaaagcccatagtaccaccaaattcgaaaccatcctgattcttcatatcttttacaattaagagttctgctaaaactctatgggcaagaaaagtagcagaatttttagagtgttattttaataaccagtgaatatgacagcatgattttgtgttactaggtctagattg

SEQ ID NO: 173942 - DNA, 591 bp, Homo sapiens
atcttctggctcagtttaattgaagaatactctgagactgcaagttgagctgtttaaatccagggactgtttgcactgtttacctgtgtgaatttgaattttgttaatatagggcaacaaaaacaaagtacacgaacgaatttggatagtaaggttgaaataagactataactataatctaaatttcagatggttatatttataaaaacagctatatattttcattgattgtcaaagtaactatacattttttatttttattttttaaatttattattatttttgaaaccgagtcttatactctgttgcccaggctggagtgcagtggcgcaatctcggcttactgcaacctccgcctcctgggttcacgtggttctcctgcctcagcctcccgggtggctgggattacaggcgcgtgccaccatgcccggttaattttttctatttttagtgggaacaggtttcaccatgttggccaggatggtctcaatctcctgacctggtgatacacccgcctcggcctccaaaagtgctgggattacaggcgtgagccaccatgcccggccagtcactatacatttaaatataaac

SEQ ID NO: 173943 - DNA, 366 bp, Homo sapiens
ctggcccgagtgctcctcctccctgtaccccatcacagaccgtatcacacttgtccaatcaatagttctgtgaagccttccttctcaacctccatgtccccccaccccacacacggtaaatccctcctccttttgttccatcctccctgccaccccatgccacttaggacactactatccttgtgggcagggacttgtattttttatccaggtcccctggcacctacacagtgtgagatactgatttaggtgcttagcattcagcagtgaacctagcaaacaaaaatccctgtcctcatgaagcacacattgtgattgtgaggggtgggggaacagatcgaaaataagtaaaatgtagagcatatt

SEQ ID NO: 173944 - DNA, 389 bp, Homo sapiens
tggggcaaggaaaggtacaagccgagcatggggcatcttattgtgtaagaaagcaaagaagttctggaggactggtggggacctctgggacagaagagccagcttagaggggtgctcactgtccaaatctaggaatatttgaacgtcaaaatgttgtgtacatgccttagcgaccaacccacatttaaaacaaattcctgaatgagggctgtaactgtagtcccaagtcattcttttttgtagctcataatagcccataatattactataccatatgtttgcatttacctatttttattttattttatttttttgagacagagttttgcttttgtcacccaggctggagtgcaatggtacaatctcagctcatggcaacctctgcctcc

SEQ ID NO: 173945 - DNA, 237 bp, Homo sapiens
ctcctcctctgaaggcatcattagttctgtggttagcaagagtcaggctcccctttcaccctccccaatcttccctgcagtggtgagcccatctcattcattcattcattcattcatttcctacttgcaagaggctgcacgcaggcccacagacacaaggcagtccaggccctgcagctcaggagggacatggggagacagagagagctacctgctagggttgatcagcatcaccag

SEQ ID NO: 173946 - DNA, 256 bp, Homo sapiens
actagctcttatctggcaatttaaaaaatagtccccattttgttatgcacatcaacctaatgcataaaactactgagcttaaaggtataaagatacacagatttatttttcaaaaatgactgtgaaatgaaatgaatacttaattgaacagtttccagttacagaatatgctgatgtggccctccattattatcataagcagcaggatatttccactgctgtgtctctcacttatgtcttgatttgacactctggt

SEQ ID NO: 173947 - DNA, 319 bp, Homo sapiens
gggattacaggcgcacaccatcacacctggctaatttttgtatttttagtggagatggggtttcgccatgttggccaggctggtctcgaactcctgacctcatgtgatccacccgccttggcctcccaaggtgctgggtctataggcatgagccactgtgcctggccagttagtctgtatttttgaagatctgtttctgctacctctagtgtgtttcattgatccgtttgtctatgcctgctctaatacctcactgtcttttttttttttttttttttggtagagatgaggtctttctatgttgcccagtctagtcttg

SEQ ID NO: 173948 - DNA, 522 bp, Homo sapiens
cggccgctcctggttttccgcggggccgggagggggcggggcagtgggcggggctccggatttgagtccgatttggggagtggcgcgagttaggaactggctggaagatggggtgtgtgtgcgtatatgggagcgaggaaagcgctgtaggaagcatgcaggccgctttattttacagctgtgggagtggtggacaagggcggcggctctgcgagaagcacgtgggcgcggcgggccgcctcagggatggagtaggctgtggtcttgccaactcccgttatcaaaggcccaaggacgccattcactcagccccgggcgggcgtgggtctgggggccggaaacccgaagtcctgtgggtgccgtggaatgcacgagcagccggcggagcaaacctgccccatagatttttctaaaccgttcgccacagaaacgctactctgtcttctctgaccgactctgtgcactgcagccttgcacaaagaaaacaggaggtactccaagtctgagatactgttccgacta

SEQ ID NO: 173949 - DNA, 684 bp, Homo sapiens
cggccgctcctggttttccgcggggccgggagggggcggggcagtgggcggggctccggatttgagtccgatttggggagtggcgcgagttaggaactggctggaagatggggtgtgtgtgcgtatatgggagcgaggaaagcgctgtaggaagcatgcaggccgctttattttacagctgtgggagtggtggacaagggcggcggctctgcgagaagcacgtgggcgcggcgggccgcctcagggatggagtaggctgtggtcttgccaactcccgttatcaaaggcccaaggacgccattcactcagccccgggcgggcgtgggtctgggggccggaaacccgaagtcctgtgggtgccgtggaatgcacgagcagccggcggagcaaacctgccccatagatttttctaaaccgttcgccacagaaacgctactctgtcttctctgaccgactctgtgcactgcagccttgcacaaagaaaacaggagaaaaccaaatacagcaagaatgagagaaattgcactgttgcattaaaaagaattttcctgccgggcgcagtgactcacgcctgtaatctcagcacttggggaggccgaggcgggtggatcacgaggtcaagagatcaagaccatcctcgccaacatggtgaaaccccgtctctactaaaaatacaaaaaatta

SEQ ID NO: 173950 - DNA, 672 bp, Homo sapiens
tcaattgtttaatatttaaatagagtacagacagggagagtatacgatttgtcatgcaaaacaggacatttttcgagtacaatgggtacagttaatgattatgttgggataatgggcacaaaccagaatgtaatttctaaagtgaaatatcatcaaaaaaacttatgccatccttctcccactatgaaaaatgtctctttccagccaagtgcagtggttcacgcttgtaaccccagcactttgggaggccgaggtgggcagatcacaaggtcaagagattgagaacatcctggccaacatggtgaaaccccgtctctactaaaagtacaaaaaaattagctggtgtggtggtgtgcacctgtagtcccagctacttgggaggctgaggcaggagaatcgtgaacccgggaggtggaggttgcagtgagccaagatcacgccactgcactccagcttggcaacagagggagactctgtctaaaaaaaaaaaaaaaaaaagaaaagaaaaaagaaaaaggtctctttccaaaacactattgaaatctttcttggccgggcgtggtggctcacgcctgtaataccagcactttgggaggctgaggcaggcggatcacctgaggtcacgagttcgagatcagccaactcaacatggtgaaactctgtctctactaa

SEQ ID NO: 173951 - DNA, 631 bp, Homo sapiens
gtaaggaaaaaaaattttattaaaaatattataatgtcctaatttagattctgtgtaaggaaaaataatgctgcttttaaaatgtttagatatattaaactggggtagccaaagaaattgtcccatccccccaagcactagatgagaacttcaaggagctgtttagtcattattcttttattggtgccaatttagactttgggaagagtgagttagtcctagagcaaaataagagagaaaaagagatttagctctgtagaatgctaagttgcttgtgactatgtgtagatgttgtgcctttttaggcatacaatttttacttttactgaaatgaataataactgtattgtctcttaatgtatgaaattggctatgtttgtaaactagaataatataacttgtggtaccttgacttgtttaaatagtctgtgtataaacaattagaatgtattaaataatcaggcctgtgggtacaggagctttttattgttttatgaatgattcttattatggttcatttgtcttaaaggaactttatagatctgtagaaccaggtttccactttgtgttttcattaataccttgttaatttgaagtgcctgtaaaactttgacactcataattctgttct

SEQ ID NO: 173952 - DNA, 774 bp, Homo sapiens
  misc_feature (90)..(90): n is a, c, g, or t
  misc_feature (317)..(317): n is a, c, g, or t
ggagagacatgttcccggcggctcagtgcggagcggccgtggcgctgtttttctgagtccggggtggcctggcagccggccgaggacgangggtcggcgggggctgcccccgtggtggtggccgccatgctgggagcctgggcggttgagggaaccgctgtggcgctcctgcgactgctgctgctgctgctgccgccggcgatccggggacccgggctcggcgtggccggcgtggccggctgcggcgggggccgggctgcccgagagcgtcatttgggcggtcaacgcgggtggagaggcgcatgtggacgtgcacngggatccacttccgcaaggaccctttggaaggccgggtggtgccgagcctcagactatggcatgaaactgccaatcctgcgttccaaccctgaggaccagatcctgtatcaaactgagcggtacaatgaggagacctttggctacgaagtgcccatcaaagaggagggggactacgtgctggtcttgaaatttgcagaggtctactttgcacagtcccagcaaaaggtatttgatgtacgattgaatggccacgtcgtggtgaaggacttggatatctttgatcgtgttgggcatagcacagctcacgatgaaattatacctatgagcatcagaaaggggaagctgagtgtccagggggaggtgtccaccttcacagggaaacatctacaattgagtttgtcaaggggtactatgacaatcccaaggtctgtgcactctacatcatggctgggacag

SEQ ID NO: 173953 - DNA, 132 bp, Homo sapiens
tcttgcattaattcacatttatactttttgccctccatgatatttaggaaccatggatcatggcacacagatgcttggttctgagctgaggggccatttgtactcacacatgcaccctccatacctaagcca

SEQ ID NO: 173954 - DNA, 508 bp, Homo sapiens
ggcaactccggagaaatcccgggctgggcaaacagcccttaatataataatagcttgtctctttaaaaagcaaaagggggggaaagttttgttggcatctggtttctgatctcattatgttgtggtcgaccaatccagccctcgggcctggtcctcgggtttaaatctgattggccgagagcacattttgggttggtgcttagagctcgacggggcggtttcaaggatcccttttttggggggctgaggagagggcggggccgccagcgggggcccccttgaaaccgactaattgggatcggagaggccgaggtgagggctggaggaggcacaaagaagtcgctgggtgcagaagggaggggagagggggagctgagaggcgagaggaggaggaagaggagagagggcagcagcgcgcggtgtctccggctgctcagtccgaccgcggcaagcaagcgggcaggcgcaccgccccctcccccgcccggcctccccaactctgcggccg

SEQ ID NO: 173955 - DNA, 983 bp, Homo sapiens
ggaactaaggactcctgccaacagccagacacaaactgtgacctcctgccaacaggcatgcgaatgagccattttagaagctgaccctctaaccatgttcaagctttcaaatgactgcaaccactgctgacatgctaaatgcaaccacatgagaaaccctgaggcagaaaaacccaggctagagtacaaatgtgaataacatcacatgccaatcattcaggagttattcaatatgcactgatgaccccaagagcagtgaaaataaccgtgacagaagcttcctgatgactgggtacaaggacaatttttctcttagtatccagactccagtcctcaagtctgcaaaaccatgagaacaataacactttaccatcagaacaataacacttctttaccatcagagacattctccattgtacacagagtacagatcaattccagtattcttaaatgggtgaaatcggattaaaatggccagcatgaagaggcatcagaatggggaagatgcagtcttgctgtcacccaggctggagtgcagcggcacaatctccagtcactacaacttccgcctcccgggttcaagcgattctcctgcctcagcttcctgaatagttgggattacaggtgcctgtgaccacacccagctaatttcgtattttgagtagagacgggatttcaccatgttggtcaagctggtctcaatctcctggcctcatgatccgcccccctcggcctaccaaagtgctgggattataggcatgagcctctgcaccggtagctctttcttatgacagaagtttctcaacagagtactttcttctgaaagcagtatcatttttccatatttaatctccacaagaaccactttcaaaaaataacagtaacctggcactttaaagaactaaaaataaaaagagtaaacaaacaagatttattattttagaaaatctagctagttcttacatgagtagcttttgagatgg

SEQ ID NO: 173956 - DNA, 834 bp, Homo sapiens
ggaactaaggactcctgccaacagccagacacaaactgtgacctcctgccaacaggcatgcgaatgagccattttagaagctgaccctctaaccatgttcaagctttcaaatgactgcaaccactgctgacatgctaaatgcaaccacatgagaaaccctgaggcagaaaaacccaggctagagtacaaatgtgaataacatcacatgccaatcattcaggagttattcaatatgcactgatgaccccaagagcagtgaaaataaccgtgacagaagcttcctgatgactggtattcttaaatgggtgaaatcggattaaaatggccagcatgaagaggcatcagaatggggaagatgcagtcttgctgtcacccaggctggagtgcagcggcacaatctccagtcactacaacttccgcctcccgggttcaagcgattctcctgcctcagcttcctgaatagttgggattacaggtgcctgtgaccacacccagctaatttcgtattttgagtagagacgggatttcaccatgttggtcaagctggtctcaatctcctggcctcatgatccgcccccctcggcctaccaaagtgctgggattataggcatgagcctctgcaccggtagctctttcttatgacagaagtttctcaacagagtactttcttctgaaagcagtatcatttttccatatttaatctccacaagaaccactttcaaaaaataacagtaacctggcactttaaagaactaaaaataaaaagagtaaacaaacaagatttattattttagaaaatctagctagttcttacatgagtagcttttgagatgg

SEQ ID NO: 173957 - DNA, 1070 bp, Homo sapiens
tacactattttgaagaacgtgttttaatacatagagaaaagaacacctattcactgaatctgttttcactttttggtgtgaaataaccactgcaaagtacagaagctgtggtcagctgagagaccctagcacccagaataaggcatgcgaatgagccattttagaagctgaccctctaaccatgttcaagctttcaaatgactgcaaccactgctgacatgctaaatgcaaccacatgagaaaccctgaggcagaaaaacccaggctagagtacaaatgtgaataacatcacatgccaatcattcaggagttattcaatatgcactgatgaccccaagagcagtgaaaataaccgtgacagaagcttcctgatgactgggtacaaggacaatttttctcttagtatccagactccagtcctcaagtctgcaaaaccatgagaacaataacactttaccatcagaacaataacacttctttaccatcagagacattctccattgtacacagagtacagatcaattccagtattcttaaatgggtgaaatcggattaaaatggccagcatgaagaggcatcagaatggggaagatgcagtcttgctgtcacccaggctggagtgcagcggcacaatctccagtcactacaacttccgcctcccgggttcaagcgattctcctgcctcagcttcctgaatagttgggattacaggtgcctgtgaccacacccagctaatttcgtattttgagtagagacgggatttcaccatgttggtcaagctggtctcaatctcctggcctcatgatccgcccccctcggcctaccaaagtgctgggattataggcatgagcctctgcaccggtagctctttcttatgacagaagtttctcaacagagtactttcttctgaaagcagtatcatttttccatatttaatctccacaagaaccactttcaaaaaataacagtaacctggcactttaaagaactaaaaataaaaagagtaaacaaacaagatttattattttagaaaatctagctagttcttacatgagtagcttttgagatgg

SEQ ID NO: 173958 - DNA, 1059 bp, Homo sapiens
ggaactaaggactcctgccaacagccagacacaaactgtgacctcctgccaacaggcatgcgaatgagccattttagaagctgaccctctaaccatgttcaagctttcaaatgactgcaaccactgctgacatgctaaatgcaaccacatgagaaaccctgaggcagaaaaacccaggctagagtacaaatgtgaataacatcacatgccaatcattcaggagttattcaatatgcactgatgaccccaagagcagtgaaaataaccgtgacagaagcttcctgatgactgggtacaaggacaatttttctcttagtatccagactccagtcctcaagtctgcaaaaccatgagaacaataacactttaccatcagaacaataacacttctttaccatcagagacattctccattgtacacagagtacagatcaattccagtgatacccagctcagatactgtaatgaagtccatgaagaaatataaatagaaatccactttatgaagaacttggcttattcttaaatgggtgaaatcggattaaaatggccagcatgaagaggcatcagaatggggaagatgcagtcttgctgtcacccaggctggagtgcagcggcacaatctccagtcactacaacttccgcctcccgggttcaagcgattctcctgcctcagcttcctgaatagttgggattacaggtgcctgtgaccacacccagctaatttcgtattttgagtagagacgggatttcaccatgttggtcaagctggtctcaatctcctggcctcatgatccgcccccctcggcctaccaaagtgctgggattataggcatgagcctctgcaccggtagctctttcttatgacagaagtttctcaacagagtactttcttctgaaagcagtatcatttttccatatttaatctccacaagaaccactttcaaaaaataacagtaacctggcactttaaagaactaaaaataaaaagagtaaacaaacaagatttattattttagaaaatctagctagttcttacatgagtagcttttgagatgg

SEQ ID NO: 173959 - DNA, 284 bp, Homo sapiens
cttgtgccaccacacccagctaatttttgtattattaatagagatggggtttcaccatgttggccagtctggtcttggactgaccccaaatgatctccccgcctcggccttccaaagcgctgggattacaggcgtgaaccaccgcgcctggccatgtaagtattaatagttcggcctttttgtcagtaaattagaagatgaggaaccactggaggtttttaaagggaggagcaaagttgctcaattctttttttttttttagacagtctggttttgttatgcag

SEQ ID NO: 173960 - DNA, 282 bp, Homo sapiens
tagaagcaatcacacaacctacttttctttagaactttcagatttaaataacttattaaagaacctttactaaatattcctacaactctagatggtattaaaaacaaaacaaaactagacatcatttctgtccttggaattttatagctttatagataagttagtaaaaatatgggcatggtcttagaaagtaataaccaggtagttttaacctcttgttatttattctgagttttttcaaatagaagggatagcaaagaaaagagggtttgttaggtggat

SEQ ID NO: 173961 - DNA, 844 bp, Homo sapiens
gcaacgccgggtgaatcagaacccatccttgttagtcagacatactctgtgggaaaaggcagcagttggaaacagtcttgaattctaactactaaaagccatactaattcccgcggggccctgacttctggtccaaggtttctcactggctgtatcctgtccgacagtgccagagcttgtgctgcaagcagagcccgtgcagaaggcgagcgaggagaaaggcagagctgctcagttccagctccttccacacaccacaaaacgccatccctcgcctccagcccgaggcaaggcactcctttttaggtggtaaaataagccttccaacacaccagaagaaatagcttggagtttgaaaatacacaagcatattttaataatcacatttctatttttcaagttctcttaatacaaacaaaacaaaaattcttttgctcatgttcagacatgactaagttaatgacaatgggtatacaatgtgacacatgcacactcctcccttaacccttggtgagcatcctcaaaagcgattcactgctacccatttcttatctatccttccaaatagattttatgtctgtgtcagcaagcatctcttcctcctcccatttaagacacaattgtgggcatattgcacccattgttctacgtcttgcttttttcacttaatatcttggagacagctccatatttgcacaacgggattccacgtcattcttttaaacgctatggtatatgctacgggttggcaaactacagctcactggccaatctggccctctgccaatttttgtaaatataattatactgggacacagccacattcatttgtttacatattgtc

SEQ ID NO: 173962 - DNA, 391 bp, Homo sapiens
ccgcacatctcgttttacggtgcgacagcaagtttaccatctccaggacttggctctgctctcactccttaaacccttaaaagaaaaagctaagtttaagctatttgcatttaagtcataaagacaccaaaaatatttaaagtgcagatctagaagaagaagaagaacgcctagatcaaactgacccagaagatctcaggctggctctagtcctcctccctcaatcttaaagctacagcaatgtagcaagtagtattagctgttgtaagtttttctgctctctctggtcatactgattctgttctttcactatgccagtcccccaagaaataagtttctctgtccatgctaagtttaatatctatgctcaaatcttattaaattgccttca

SEQ ID NO: 173963 - DNA, 395 bp, Homo sapiens
gggccctcgaccctgcgaaagggaatatttaaagagtccaagaagttccagcaaaggagacagagaagggactagactccaacacacgacgtagagccacatccagagagggctcaatgagtgctgagcttctgctaccattattggatttttctacgtatttttttaaaaaagtaaaatctggctaagtgtagtggctcacatctgtaatcccagcactttgagaggttgaagtgggaagatcacttgagcccaggagttcaagacaagcctggacaacatagagagaccccatctctacaaaaaatttaaaaaattagctaggtgtggtgatgcatgcctgtagtctcagcttctcaggagactgaggtgggagggttacttgagcctgggag

SEQ ID NO: 173964 - DNA, 192 bp, Homo sapiens
tttccctaatgccagtgatattaatatcttttcatgtgtgttttaagttattggtatgtcttctctggagaaattgctattcaagttctttgctcattcttaaattgggtttgttgttgttgagttatagttctttatatatccaggataataactccttatcagataaatgatttgcgagtattttccacg

SEQ ID NO: 173965 - DNA, 255 bp, Homo sapiens
ccgggccgatattcatttagatgccctttgtaattaaaaaacaacgcccaaacaaaacaaagcaagggcagtaaacacaatgcctaccagggtcccatctccaggtgagcaaattggtgtacaaatacatttgtaaaacgtattcatgagacatcaatagcttattaatgaagagaataggggaggagttcctttattcagagtgggtctgcagtttaaattatagtacggaatttgaaatggaaactgctggta

SEQ ID NO: 173966 - DNA, 545 bp, Homo sapiens
tcacggatccccctcaaaggatgtcccacctatgacaaggtcagacacagacccccccaaatgctgtccttgtttcatgaaagtttagctgaactgcttgtccccacagattcatcaggatataatgctaattaactcagctttgatatgggctttaccatgtccttcaggacctgcttattagttagagaccccttggactgcataacttcttcaaagacattttattttatgcttaatcatatagaaatataatgatttgatagattaaccaatgtggttttcctcccttgttctccagtttcccactatttctctcccatttagtctaaaccttggcatctcctctttcaaaggggaagttttaacaaaaggacaaagagaaagaaaagagtagacactcacattttgaattttaataaacttggaagaatgatgacacaagagtgagtttgtcccatcccagagcagatgaggagcttctgaatgagagtgggggaagggattgtgctgttgacactcgatggcaattacactgatgcaga

SEQ ID NO: 173967 - DNA, 545 bp, Homo sapiens
tcgacttcagaggatgtgatagtctcccaggcaagcctccagtcatctgctagggatgccagtacttctcagaggggtagaaattagctctgtgccttgcttctaagtggacccacttactctctccctaataggatgtccccatttctagcatgacaatgttccccgtccctggtttcctgtactgggcaggtcatttcagtggggatcccatggaggcacatggatactcgtggtcatgctgctaacctatcaagccattttccttaatctgtactctggaccacacactgtcccagactcacttaagaaatatttactggtcattttctagatgcaaggaatgctgaaataaaagacactgctcttaccaaaaaagctaatctttccattcctctagtacattgtacttatccaaattctgcactgtccctttcattgatcttgaatagttctcaaattatataaatttctgaggtacaaacaacaacaagttatgtctttgtacttcaggagcttccagtacaaagaccagggtggatggg

SEQ ID NO: 173968 - DNA, 579 bp, Homo sapiens
attcacaaaattggcatgtgtaaactttaagctatttcctaagatgaagatgacaaacttggagggaaacttcattcatttggtttatttttatttttatttttatttatttttatctttttgagacagaatctcactctgtcccccaagttggagtgcggtggtgcgatctcggctcactgaaacctctgcctcctgggttcaagcgattctcctgcttcaccctccgagtagctgggattacaggtgtgcaccaccacacccagctaatttttgtatttttagtagagacggtttcgccacattggccaggttggtgtcaaactcctggcctcaaagtgatccgcccaccttggcctcccaaagtggagcccccgtgccccttgtttgtgacctgtcaatataaatatgctcagtagtggggggaggggtggggggtgaaaaaggaaatatgtttaatattaagactttggccttttagtgtaaactgatattcaaaaatttcttcatagaacatttgcttctttgcttgatcatttttctaattctgtacatctaaaatgcccagaatttgagttg

SEQ ID NO: 173969 - DNA, 400 bp, Homo sapiens
catttctagaatgacagtactcgactgtggtcccctggaaacttcccagcttcatcatagcacacaaagagagtgaaattgtaatttataatatttatgatactagggtaaaggggatgaggcttctcaggaccgcaagtaaccagttgcaggaggtctccacacccattccacctctctacctacatcccatccctacgccaaactgaaaagctctgcctaaggaacaagtgagttcaccgcaaccttcccttcatcccactcctaccattcagcccatttcaccactggagaaaccaagcagcctctgttgggcccctctcttgttatccctcctctaccactctttgaccgctgtcctcgtctgggagctgcactccctggaaacaggagactctct

SEQ ID NO: 173970 - DNA, 509 bp, Homo sapiens
ataaaacaaaacatgttcacttgaatgcatgaggccagcgttttttaaacgtgtggttcctaaaccacctacataagaatcaccagggttccttattaaaagtgcaaactgggctgggcgcattggttcatgccttttatcacagcactttgggaggccgaggtgggcagatcatgaggtcaagagattgagaccggagcagtgtgaagaagaggcgagaacgacccccgggtccgaccaaatgcccggcgcgccgcttgcgtcccggcgtcccagcaccttatgtccctgctgcctgtcgctgcctggcaccatgccccaagagaaaggctgaaggggatgctaagggagataaagcccaaggtgaaggacgaaccacagagaagatccgcgaggttgtctgctaaacctgctcctccaaagccagagcccacgcctaaaaggccctgcaaagaaggggttgagaaggtaccaaagggaaaaagggaaaagctgtggtcggattaacg

SEQ ID NO: 173971 - DNA, 283 bp, Homo sapiens
  misc_feature (29)..(29): n is a, c, g, or t
tctgaggatctcgacacacgccgaatgcnaacagaatcaaatgggtggacagaggaattaattcagggaggtaaagaagaaactgtaggagaattagctttgtctcctccccatctgccctatgacattattaaaagggagctggacactagctagggaacatggaagcaacagataaacaaatttaagagtgaaaagtggcagacgctttgtacacttaagggagtggctacttctccttgatctgggacataggatgggtatggtttggacagggaagaca

SEQ ID NO: 173972 - DNA, 592 bp, Homo sapiens
ggctaggtgtagaagccaccaggacgttctttgattggatctcttatttgcagctttgttttgggagacaagtgttcccctagcttttggcccctggggcagagaaagccttagcttgggccattgcactacagagttctgatgctgtgtagtgaaaatgggttgagataagccagccagatgattttagagcatttcagattaaaccaagccattatggttgattagttccaaactattacatgtcacacaatgtaagactctgtgacccttagtgtccagaaagattcagcccaatctggcggtaagcatgttgccaggaaggagacaaataaagatgaatgccagctgagggtggaagaggtgacatggctaacaacgtggagctgatgcaggtcaaacaactccagatatcccctcttatggctgagaggtggtacaaatacatgggacatttctgcctgcactgtggatatctgggacattgtgtgaatcctttcagtgacaggaaactcactaactttggaggaatgtcatcttcaccaagctttgtgagaacattgcctatggctactaatacaagcatgccaaa

SEQ ID NO: 173973 - DNA, 142 bp, Homo sapiens
tatttcaatccgtgtttgttgattaaatgaccaagccctgggattctgtggctgcagctgtgaagaaatcatagcagagattttttccccagatcccagagaaacgcagaattcaggcctctgcttcccaggctgactgaca

SEQ ID NO: 173974 - DNA, 639 bp, Homo sapiens
gatagaggtttgtgtgcgatgaatttgacccatctggagggtatcccagagccagtgctgaatgatgaatggggattcccatttggacaatttttgctttcaggtggcaaagtgagtcttctctttgcactaggggtttagaacctggaattgtggcaaggcatgaaactccttctgttcatgtggaaacagagctgggaattaacattcattttgtaatttcctcagagatgaagtaggctcagttatctgcatgaaaggtagctgtctctggaaaagctaaagatgtgatttctgcatttcctcacttaatatgcaccaagaagtggacattgaccttcagagagtagagctttcatttattgggtaatgaaccaatttgctgtcaaattgtttcatcagatgctattagtcacctgggatacagtggataaggattttaattttattattttcaagggacaagacttttgggactgagcttaatttaggaagacacagtagagtatgcattttctgtagatttctaagaacgagtattttaattattttgagatgatgagttataaaaggtctgtgagttgatttactttttgtaaccctttggcttgatacaggaggtcaaattccaaatgataa

SEQ ID NO: 173975 - DNA, 337 bp, Homo sapiens
catacatagatagataagatagatagattgattagatagattagatagccaggtggggtggctcacgcctgtaatcccagtgctttgggaggctgaggtgggtggatcacctgaggtcaggagtttgagaccagcctggctaatgtggcgaaaccctgtctactaaaaatacaaaaattagctggatgtggtggcgcacgctgtaatctcagctactcgggaggctggggtgggagaatcgcttgaccccaggaggtggaggttgcagtgagctgagatcatgccactgcactccagcctgggccacagagggagacctggtctcaaaaaaaaaaaa

SEQ ID NO: 173976 - DNA, 304 bp, Homo sapiens
taaatcacacaatcaacaacgtgtaacaaaccgaaccctatctatgtaatagctgaaaagccaggattggtgttttgattttctggcttaataaagatcaaagcaggggacttcccaatgaaaatcgaataaaagttgaatatcatactttaccaaaaaattctatctgttttcaaggtatttatttaaaaaaaaaaaaatcagctattggccaggcccagtggctaataccagcagtttgacaccagcctgggcaacatggtgaaaccccgtctctactaaaatacacaaaaaaagtcaggta

SEQ ID NO: 173977 - DNA, 189 bp, Homo sapiens
caggtgaggcttaaagagagcccaaggaggatgggaaggagatatgtcagatggaggaaatagaatatcagagcgcagtcaaaagaggagaggtggcaagaatggcagggcatgtgtctgccaggaaagggggtgggtggggcctgaggcaggtcatgaaactcgccagcagctcccacaaaggcaagg

SEQ ID NO: 173978 - DNA, 129 bp, Homo sapiens
ccaaatagctcttagacgtgccccctcctcacgatccctactgccactgtctgtcccaccacacagcctcaatccacccactatgaccatcaccataaccttctatactgcacttgtagacttggcaga

SEQ ID NO: 173979 - DNA, 386 bp, Homo sapiens
agcaaagactggaggtgtcagcaatttcataatcacatttaggatcaaaaatagaacccttctttggtcttctccatcaagtctcttggccactggcaaccatgtgactcgggaataccaattcacctccctggatccagtttctttcactgtaaaataaaggtgctggactccaagatcaccaaagtcccctgctcaacattccatggttgtggggctcagcaacatggtgcagcattaccttggccaggtcaggtgcaggcaggctattatcctgacatagtggggagagggaggtcctggttcccaggcacgcacaatctattcacaacactactgtgtaaaccccatgattctgcaaatgttggacagggattgagtttcct

SEQ ID NO: 173980 - DNA, 518 bp, Homo sapiens
tataaaagcgcggtgtcagcattaagaagaagctgaaaggagttacacgatgagaaacgagttacactgtgtagggttccagacagcagtgtccgatgacagctacaagagcagcactccttactccttacggtccagggggaatgcaggcaattcccctctggctgtcagtctccctatcccctgccgcgtctccttcgcggggcgatgggtctcagagccacccccagccaaagaaaggggcacgctttcgagatgtctccctggccgctcctgtacggagagtggcgcctgaggtttcagccccaacccgcctccctccgctagagtcagcggcggtctggagtccctgagccccgcgggcaggcgccacctggtctccggcccgctgcctagcacagcggcgaagctggctcgacgtgcgatttcggtttccgtccgtcggcctcgcccgcagtcccgggcgctgggagcggctgcgcctggcgcgcccggagcccagcggctccccgcggccg

SEQ ID NO: 173981 - DNA, 279 bp, Homo sapiens
gtgaccttgagtgatttacatgatctgtgctcaggttcctccactctaaataaattccctaagtgctttccttcctcttcatgtttgtaaacacttctggggacaaaaggatgtggaggaaggggtcgtattttagaggccagtttctcctttaggtccatgccctgtctttgctctggcggccactgcttggccccaagtccccttggcctggagggtgagttggcctccccaccctccgcttgctctgacccagtgtgtgcagtgccacatggccag

SEQ ID NO: 173982 - DNA, 171 bp, Homo sapiens
caaagatagttattttcctaagatgcaaaatgcataagccataaagaataaaatagaacagtggctatgaaacttctaaaactagggggcccaggccagcccgtgaaaccgttgttttctcttaggcctccaggtctgtgatgggaggggatgctgtgaggatctctgaca

SEQ ID NO: 173983 - DNA, 409 bp, Homo sapiens
aagcctctttttccatgcaaggcgaagatactgatcttagtaattccttggtgtttctcctagtataggagttattctatctgacatccaactagatttcaagcatgtctcctctacttgtgcagttaggggttgtgtggtacttggaaagctttctttgagggtgttgggaatgagaagaagccttttgttcttgctccggtgactggaaagttctttgttcttcccagaatatttccagtcatgcccttgatagtgtatttccagaatgacttctcacagtttgtgttctgatggctcatcagtaacagaagttgtatctgtcgggagggataggagaatagattggggaagtgcaggaaaaaatgcttggaataggtaagaataattctgagtgccctagccaggt

SEQ ID NO: 173984 - DNA, 471 bp, Homo sapiens
tgtgcatgctcagtgtttagaactgaaagccaaaggactctcacttggttttctggagaaaaagcatgatgaagcttcctccctgtcccatccagacttgacctccgtaatccacctcaccaggagtgttcagttgtggcctgcaatggagtacctggctatgctttggcggtacaaagtgacagctgattttatggcacaagcttgtctcagaagatgcagcaaaaatcaacaaccccagataaatgaggagataagtcacctcatctcattttgtctttatcacacacctgttacacctcaagagcttcgagatctgtggtccttgctgcatcatcagaaggtaaaaatcacaataagacataagcctcctttacattatgagttggttagattttctttgacagactggttgggaaacattttatttattctcaaaattccatattggaaacctcaggtttttttgaa

SEQ ID NO: 173985 - DNA, 348 bp, Homo sapiens
gcacaagaccctgtctcaaaaagaaaaaagaggattatttaactcctttttctgtaggcagggaagttcaaggagatggcccttctggtgagggcttccttgttgcatgataacatggcggaggtcataggggtagcagacaggtacaaagagagagcaacaaaaaggaggaggaaacttataacagcctgccctcataggagccaattcatcttgcacaagagagaatttactcactaccaagagaatggcaccaagtcattcataaaggatccacccccatgactcagaacacctgccactaggccccacttcccaaaacctccacgctgggtatcaaatttcagc

SEQ ID NO: 173986 - DNA, 420 bp, Homo sapiens
ttaaagacttaatcagactatgtcattcttgcttgatattttcagtgactcctgatcctacttagaatgaagttaaaattcatatcaagctctacaaggcccaacttacccttgcatagatggtctctcttctattctccctcatgctccacccatattgatgcccatcttgcccttgaagtgtgtttctgccttggggtcttacactgacaagttcctctgcatgaaatgattttttccttggatatttgcatggcttgcttcctcacctaatttatatttctgcatatcgccttatcagatagcttgtttttatctatcctatagatatttataacatatatacccaaaatacacaaagaattcctataaatcagaaagaaaaggcatgaacagatatttcacagaggaagaaatata

SEQ ID NO: 173987 - DNA, 282 bp, Homo sapiens
ttttggttgccactattggggaaatgctaaatgtcctacagtgtacaggacagccccacacaaagaactatttaaccccaaaagtcaacagtgctaagtctgggcaaccttaatttattagactgggattttcaaagaagtccatcacttgcaaaatgtgaagaaccacagccgtagtgtggagactttgaaatttggtgagatctgccccatggctcagcatgtaggccattttcgtaagtgctctgtatgttctgaaaataactattctcagcccagcgc

SEQ ID NO: 173988 - DNA, 243 bp, Homo sapiens
tgcctaggacaacaccgacaacacaatggcaaaaaagactgagctctccagttcagaacaagaatgagaaacttcagagaaaacacagcctccaaggagggcaagtgcacctctctccccacagaggcaaaagacaaatagaaagtacaagggataatcttctttctttaaaaaggggacaatgagtgagtctcaggcaggttcataaagactgccttgagaaggccagctgggagcacaggg

SEQ ID NO: 173989 - DNA, 245 bp, Homo sapiens
ctcgctccattcacagctcccttccaccagcaatgaaagaaactaatttgggtgcaaacaaatattgatttgcagagatgttcactaaagcattctttttttaatagtgaaggattaggaaaattcctttacctccaacaatatggaattaatttttaaataagatataggcaggaaaattatatttttgtaatgtctgtgtagataccactttagaaaaataattttagaagtatacataataa

SEQ ID NO: 173990 - DNA, 555 bp, Homo sapiens
tagacaaatccatagagaatgaaagcagattagaggttactgggggagtacagggtgttgttatagggtgatgaaaaagtttgcaaacaagagagaattgatagttgcacaacattgcaaatacactaaaggccatttgattctacactctaaagtagttaattgtatgctatgtgaatttcagctcaattagaaaataagaatggactgaaatggatgctttcattgaaagctaatggaaatgtaaagtgatgcaaccctctccttaggaaacaaggtttctatattcaagaataagttctaaacttactactctttgatccagtattctgtatctaggcaatgaaagaaactaatttgggtgcaaacaaatattgatttgcagagatgttcactaaagcattctttttttaatagtgaaggattaggaaaattcctttacctccaacaatatggaattaatttttaaataagatataggcaggaaaattatatttttgtaatgtctgtgtagataccactttagaaaaataattttagaagtatacataataa

SEQ ID NO: 173991 - DNA, 265 bp, Homo sapiens
tggccagctgccgaggcagagacagtgctgagggattgacagctgaatggagacctgaagagcttctgggagccaggtgaaagggatggcaagagctgcccagccccaggcaagagggagtttggaaagtttcatggaaactgcaccaggagcatcctcaccaaaatcactcccttacctcacaaacacatcccaggcatctgagtctgcacttcatttgtggaactttccaccagcctgggcgacagagcgagactccatctca

SEQ ID NO: 173992 - DNA, 226 bp, Homo sapiens
cttgctttactatccaaaacaaccatgacacatgacttctctggcggggtgttggccaagacaaactgaactatagaagatccttgacttgccaacgttcaaatgatgaactttcaaaaatagcgaaactggctgcagagcaaaagcttttcagctctgcacaacaccaacagatggcgctaagtgtcacccttgtggagagcagagggacctcggaagggccttt

SEQ ID NO: 173993 - DNA, 195 bp, Homo sapiens
atcacatggtcaggtttgccctattgtctgcaggttgttgttgttattattgtgatgatggtgaggaggaggaggaggaggaggaggaggagacagggtctcattatgttgtccaggctggagtacagtggtgcaatctcggctgactgcaacctctacctcctaggctcaagcaatcctcccacctcagcctcc

SEQ ID NO: 173994 - DNA, 969 bp, Homo sapiens
gagtcttaatatactaaacagtgaaagaatgatgatatctcatttctaaagtaagcatggttcacaccactttggcaatacactgcagtactttttaaaaaatattctctagtgataaaagtaaagacagggtactggccaagatcctaattctgacttctgactgtgtgatcttcgatgaaatttatatttccctttatcattactattctacttgttaagtaaggctaagttaatatttgtcttcgccttaaattctgatttgtaatttgtaactctgatgtggtagctgtgatatggtgaactgaaaaatccttattaggctactttatctgttctcttttagttattttaaagtgtacctgtttctgaagtaatgtagtgaatggtgaatacttttcaggaattcttccagttttaaaatagccccaaagatacagtttcagctggtggaaggtctgttctgctctcttagtcctaatcagaaagtcccttttatcttataatcccatactaaatccaaacccttagcaaatccttgctgccaaccagaccactcacaaatcaaacaaaatgtaagcaagcaatccagtactcggttacaccagaagactctgatctttgcccccgaaaaactgtcctactttatccttatacctgaaatcactgcatacctgaaatcactgcagccctactgttttaccataccattaatttaaaaaggcatctatttctttatagaaagaaacattcacagtgaggtctagtttgtgaacttcaaaatccagatattaatcccttagtatacctgcgtatgctctcacgcaacgctgcatgcaggtggatcatgctcattcccttaacattgttcaagggaatctctgttactccatgatatcgtgtaacctgaccgacactcatgtggctccacaacgagatcttcaattcacacaactgtacacacctctc

SEQ ID NO: 173995 - DNA, 1009 bp, Homo sapiens
gagtcttaatatactaaacagtgaaagaatgatgatatctcatttctaaagtaagcatggttcacaccactttggcaatacactgcagtactttttaaaaaatattctctagtgataaaagtaaagacagggtactggccaagatcctaattctgacttctgactgtgtgatcttcgatgaaatttatatttccctttatcattactattctacttgttaagtaaggctaagttaatatttgtcttcgccttaaattctgatttgtaatttgtaactctgatgtggtagctgtgatatggtgaactgaaaaatccttattaggctactttatctgttctcttttagttatttctcacacgtggtcctgtgtttttgtcgagctcataatgtgctctgctacgatgtgtggtcgaaaattacttttacaagagatattcgttccgagtttacaacaagtagcccccagaatgatacacgtctttcagctggtggaaggtctgttctgctctcttagtcctaatcagaaagtcccttttatcttataatcccatactaaatccaaacccttagcaaatccttgctgccaaccagaccactcacaaatcaaacaaaatgtaagcaagcaatccagtactcggttacaccagaagactctgatctttgcccccgaaaaactgtcctactttatccttatacctgaaatcactgcatacctgaaatcactgcagccctactgttttaccataccattaatttaaaaaggcatctatttctttatagaaagaaacattcacagtgaggtctagtttgtgaacttcaaaatccagatattaatcccttagtatacctgcgtatgctctcacgcaacgctgcatgcaggtggatcatgctcattcccttaacattgttcaagggaatctctgttactccatgatatcgtgtaacctgaccgacactcatgtggctccacaacgagatcttcaattcacacaactgtacacacctctc

SEQ ID NO: 173996 - DNA, 257 bp, Homo sapiens
cctctcaccaccccacgattcccatgtccagcaagcatttctgcagcccccaccctctgcctgagctggacccagtcggggaatggggatgggtgggacaggtagaggacagcaataaaggagacacatcctgcctgcagctctagctggaagagcataccacctagtatcaaagtaggtatgtgctctaacttcatactgttctgtccataaaaaaataaacaatttaaaatgtatattctcttaaaaaataaaaa

SEQ ID NO: 173997 - DNA, 227 bp, Homo sapiens
ccaggataaggcatatatgcaaggccacagaatcagtttcgataaatttcaaatgggttttaaagaactacacagaagagtaagaaacacacaacctgaagtggtgaagtactaagaatagaccatccatatttattaaaattctgccttgcccatggtttgagctattttagaggcagcctaatttatcaggcatctgtgttgacaaagctatgttaattttcagg

SEQ ID NO: 173998 - DNA, 1038 bp, Homo sapiens
tcacccaaacttctaccttcccttgggttgccaggagcaacagcttcatcttgggggagccgagtgcgtggcgaccctccctgaaactagatcgtatccctctctctgggggtgggggaggcagtattcaccctgggcgcgcgtccactccccggatgttttctgtgcaatcgaggctctttccttccactgataccccgagttctcttttttggtctctagcaaaatccacttcctgttgtgactcaacacccccaaggggcaaggggtggatgcctgagtcgcaggggagcgggagcaaaagacgaaaaggttggggctgtaggcctcaactcagagggtatcaggaatagggaattggtcctgagctctggcttgctctgcaaaacatcatatcaaccccacttccaacctatagagtatgagaacccgggtttctgagcatcaagtagacgagcatcagaaagagatcatcagagagatgatccgtctcctggatcagggtttaaacatcccagagaaaggggaagttgctgacttgtgggaggcccctgatttccgtcatgtggttcagggagtgggacagatggaccaaaggagactgctaacttggcacaatttccctcacccccatgaaattctgggccacaggaaatggagcgaatagcaggaagtgtgaaaggacatctgcttcagctacccctgctcccactgggcacctccctggtcatccccacactctgcctccttggccagcctagtatatgcacgctgctcctccccagcctggcaggaggtggctgggttaggatccaaagggcaagtgccttgcagctgctccagggcaattgccccagaaccacactccagttggcccactgattgtggctgtcacagccctgtgccagggctcctaatgggaggacaccctgggacaaagaggaaaaccagaagcaaaggggagggagagcctggatgatgccacggcactcagctcccaagttgggatgaaagatagggtgtttattctagcggcta

SEQ ID NO: 173999 - DNA, 441 bp, Homo sapiens
ctgaactgtatacagatatttcaatacattagaacactttgttgttcaatgtaaatgctccaattgtgcaacaactaatctgtttacttcagtataaagtagaatactgtcatttggaatttttacatccctcagtttaaaagtgcatttatttattcccacaaaacatatttgttccaatactatttcccaacagatgagagaataatgacagatgtgaactttagctcaagaatacttgtgcatttctgccaattttgttcatcttgtactcaatctgcagcagctttttagagtttttttttttttaataatcataagcacaatttcaagcaggtaggctaactattgggaggccttcttttggatctggaattcgactcatgtggtattattatatgatcacaaaaagcaagacaccaatttgacagattcacctct

SEQ ID NO: 174000 - DNA, 321 bp, Homo sapiens
tgttttctgtgatggagcattggcaggtgatgactaaatagatccagatcttagggccagaggccaaaggggagcagaggaaacagatggttcaagttgaagaggtcaagtagcctggaggccagtgttgggtgggttatctgtgtagacactgaagtcaccctggatgatgagagagctcttgggcaaagaggaaggtgggtagccaagtttttcaaagatgagtgggatgacagggtcagtgatgacagccctgagttgaggatgatggtgcccacacagggtttcttccaaaacaataggaagggaattctggactct

SEQ ID NO: 174001 - DNA, 366 bp, Homo sapiens
ataccatcatcaggggtgtgatgtggagccaaagtcactgcagtaagatattgaatcctcagtatcgtctggtggagagtagctacaggtgtaggtgctgtgtagggtttacatcctggcttcccttgtcagctgtgactttatgcaggttactttaaccctctgtgcttagttccttcatctgcaagtggagataataagggtagcccctgaaaggggttgtggggaaagttgcatgcagttcttcggaagcatctggctggctagtgagcattgggtaatggtccagctgctctgccatgatcattagtgttatctgacacttctggtgaacttcaggctaggatctgccaggacgatctaagc

SEQ ID NO: 174002 - DNA, 722 bp, Homo sapiens
atctgaaatcatgccgtttgtttgaattgttttttccaatatgtgcgctgctggtgttaagtctgaatgaaggaagggactgggagtcatttcctaacattgctatggtttgaatgtgtcccctaaatttcatgtcttggaaacttaatccccaaattcaaatgttgattggaagtggaacctttaggacataattaggattagataaggtcatcagtgtgggcccccacccccatgatggaactggtggctttataagaagaggaagataagaagggaaagaaagacctgagctgacatgcacatgcttgaccacttgtcatgtgatgccctttgccatgttgtgacacagcaaggaggccctcaccagacgccagtgccatgttcttggacttctcagcctccatattcatgaactaagtaagtttttttttctttataaattatccagcatatagtattctgttaggtaacagaagacagactaagacaaccatactcccagtgcctagattaatacatacactgtagatgattaatacatatggttcatatggttgtttgtttgtttggttggtttttgagacagactcttgctctgtcacccaggctatagttagttcagtggcacaatctcagctcactgcaacctctgcttctccagttcaagttattttcatgcctcaaccatctgagtagctgggattacaagtgtgccccac

SEQ ID NO: 174003 - DNA, 717 bp, Homo sapiens
atctgaaatcatgccgtttgtttgaattgttttttccaatatgtgcgctgctggtgttaagtctgaatgaaggaagggactgggagtcatttcctaacattgctatggtttgaatgtgtcccctaaatttcatgtcttggaaacttaatccccaaattcaaatgttgattggaagtggaacctttaggacataattaggattagataaggtcatcagtgtgggcccccacccccatgatggaactggtggctttataagaagaggaagataagaagggaaagaaagacctgagctgacatgcacatgcttgaccacttgtcatgtgatgccctttgccatgttgtgacacagcaaggaggccctcaccagacgccagtgccatgttcttggacttctcagcctccatattcatgaactaagtttttggaatccttaggcttccacgtgtggaaagcctgagctaacctactggaggatgagccatcacctggagcagattcaggccatcctagttgaagcctccctaggccaagcaaccgtccaactaccagacattgaccattcagccttgaacattcagcacaaagacaaaacagaccagaccagaagagtcccacagaataggggaaactattcagagaaaacttaagccactaagttttatggtgttttgttctgtagcagaagcataggcatactgacaatacaaaccgaaa

SEQ ID NO: 174004 - DNA, 501 bp, Homo sapiens
tgtttctactttaagcctcttagctgcgtttctgtttctatagagcaagagcagatcccagaaaagtaatttttcttcctttgttgaaacttctttatctggcagaaaatggtaactcatcaaacctgcagcagaaggcaacttttcaactctcagtcaatttgatcaacattcagcatccatcaaatgaaggattgggagtgataaccttaaaaaatcctgctaggctgctggttattgattctctgttcagcctgatggatgaagatgcaaaggcaacaagtgaaagtgcaaacctggctgccggcctccttcataccacgttaggttaggcaggacttgtgtctgaaaagcaccattgttagttttaccaaaaatgcactgctgtcatcacgaccaatcagaatgtcaccctagctggagatctgctcctcctggcctttccttgggattttcagaaaagctcagaaaacaatttacaataaaacttaattactttta

SEQ ID NO: 174005 - DNA, 359 bp, Homo sapiens
agtgtgaccgtacatcccagtttgcctcaaacaatcccagtttatacaggttgacctggtcggtgaacttttttttagcaatctggttggtgaacttttttttggaaaaaactagatatctggatttggacaataactagaatgatgctcttaagtaaggactcacgctgaactgcaccgcctcttccctctgctctgtgctcccttgcatccacacgtgccagtggtgaaaagttcattcagagaactcaggttacattttcttcatagtctttggcatcagaaaacggtctcaacccaggggcaatttgtcttaaatgacttccactgctgacatgtctgacccaaaacgtccctcc

SEQ ID NO: 174006 - DNA, 213 bp, Homo sapiens
ttttgatgctggtgaaaggagtgtttcctttttagaattcctggaagctcttattttacctgtaggcagttgttttgtaggttgttaaatctccaaggggtcttgacttgtaaaggaaacatgttctggggagcatctccccttctttgggtcttgtgttcatgcctgcctggcctgggacctgctgagcctcaggacaggccttttgatgtg

SEQ ID NO: 174007 - DNA, 294 bp, Homo sapiens
ctgagccggcccgattcactggttgatatgtttggatttaagtctaccatgttaatattattctgtttgttctctctggtttttgtttcattgtgctttttctgtgttcctgtagattagtattccatattgatttatctgcatttatgtttttgagtatatatctttgtattttttttgtatgattacactagggcagtttctcaacctcagcattttgacatattgtactgaatactctgttatgtggggttttcctatgcattgagaagcttagcatagatgcaatgtccc

SEQ ID NO: 174008 - DNA, 866 bp, Homo sapiens
ctgcccttttggctctctgaccagcaccatggcggttggcaagaacaagcgccttacgaaaggcggcaaaaagggagccaagaagaaagtggttgatccattttctaagaaagattggtatgatgtgaaagcacctgctatgttcaatataagaaatattggaaagacgctcgtcaccaggacccaaggaaccaaaattgcatctgatggtctcaagggtcgtgtgtttgaagtgagtcttgctgatttgcagaatgatgaagttgcatttagaaaattcaagctgattactgaagatgttcagggtaaaaactgcctgactaacttccatggcatggatcttacccgtgacaaaatgtgttccatggtcaaaaaatggcagacaatgattgaagctcacgttgatgtcaagactaccgatggttacttgcttcgtctgttctgtgttggttttactaaaaaacgcaacaatcagatacggaagacctcttatgctcagcaccaacaggtccgccaaatccggaagaagatgatggaaatcatgacccgagaggtgcagacaaatgacttgaaagaagtggtcaataaattgattccagacagcattggaaaagacatagaaaaggcttgccaatctatttatcctctccatgatgtcttcgttagaaaagtaaaaatgctgaagaaagcccagtttgaactgggaaagctcatggagcttcatggtgaaggcagtagttctggaaaagctgctggggacgagacaggtgctaaagttgaatgagctgatggatatgaaccaccagtccaagaatctgtttaaagttcagacttcaaatagtggcaaataaaaagtgctatttgta

SEQ ID NO: 174009 - DNA, 152 bp, Homo sapiens
tggggaggcctggttggagggaggccccgctctggggtaaagatgacagagggctgggctctgtggaatgctacattgtgtcactatatatacatcttggtattgtggcatgaagaacagctctgtctttccaaatagaaccatgcaacatt

SEQ ID NO: 174010 - DNA, 726 bp, Homo sapiens
agcctctctaagcctcattttcttaccgtgcatatggaaataatagtagcatcaacttcccagggttcttatgcagattaaatgtgttacagaacataaggtgtgccaaacggtgcctggtgcaaagtaaatgcctcaaagaatgttagctagtattattgcttgcagcttaaatctactcttttaccctgtattgataaaaatctataatctttttgttctaagtaccctgtacaatactttgcacatagcagatgttcattaaaagttcaaattgaacctggaaaaaagtcaaacaaattatactacagtcttttttccccctcatcaactttattaagaatttatgtacagtaaactgcagccatttaaagtgtctgagtcagagttttggcagtgtgtccaccctgaagccatcaccacagtcaagatgcagaacatttccatcacccccaaaagactccttgtaccctttgcagtccaaatcttctctgcccaaagccccaggagccagtgatctgctttctgtcaccacagattagattacattttatataaatgggatcacagagaatgcactcattagtgtctgactactttgactcagcacaatgattttaagattcatccatatgggatgtctcagtagttcatcactctttattgctgagtagtatttcattgtatggctataccatattttgtttatctgctcaccagttgatg

SEQ ID NO: 174011 - DNA, 481 bp, Homo sapiens
cagtttggaagcaatgatgaaaaggataacttacaaaatgtttgtataaatgcacttaatgccacagaaccctacacttgaaaagggctaaaaggaagctgaggtgggaggattgcttggggcccggagtttgagaccagcctgaggaacatagggagagcctatctcttttaaaaaaaaaagaaagaaaagaaagaaaaaaaaagccaggcatggtggcttgtgcttctagtcctagttactagggaggctggggagcagggtaggaggattgctggagccctcagatttgagagtgtagtgagctaggatcatgccactgcactgcagcctcggtggcagagtgaaaccatgtctcaggaaacaaacaatggtttgtgtcatctgagatgcaaaaaaataataacaataataagagaaagaaaaccaaccaacaaacaaaaagttaaaattctccaatggtacagctttaagaaattaa

SEQ ID NO: 174012 - DNA, 1436 bp, Homo sapiens
atatccgcctggtttggcccgcctgcctccactcctgccttcaccatgtccatcagggtgacccagaagtcctacaaggtgtccacctctggcccccgggccttcagcagccgctcctacacgagtgggcccggttcccgcatcagctcctcgagcttctcccgagtgggcagcagcaactttcgcggtggcctgggcggcggctatggtggggccagcggcatgggaggcatcaccgcagttacggtcaaccagagcctgctgagcccccttgtcctggaggtggaccccaacatccaggccgtgcgcacccaggagaaggagcagatcaagaccctcaacaacaagtttgcctccttcatagacaaggtacggttcctggagcagcagaacaagatgctggagaccaagtggagcctcctgcagcagcagaagacggctcgaagcaacatggacaacatgttcgagagctacatcaacaaccttaggcggcagctggagactctgggccaggagaagctgaagctggaggcggagcttggcaacatgcaggggctggtggaggacttcaagaacaagtatgaggatgagatcaataagcgtacagagatggagaacgaatttgtcctcatcaagaaggatgtggatgaagcttacatgaacaaggtagagctggagtctcgcctggaagggctgaccgacgagatcaacttcctcaggcagctatatgaagaggagatccgggagctgcagtcccagatctcggacacatctgtggtgctgtccatggacaacagccgctccctggacatggacagcatcattgctgaggtcaaggcacagtacgaggatattgccaaccgcagccgggctgaggctgagagcatgtaccagatcaagtatgaggagctgcagagcctggctgggaagcacggggatgacctgcggcgcacaaagactgagatctctgagatgaaccggaacatcagccggctccaggctgagattgagggcctcaaaggccagagggcttccctggaggccgccattgcagatgccgagcagcgtggagagctggccattaaggatgccaacgccaagttgtccgagctggaggccgccctgcagcgggccaagcaggacatgtcgcggcagctgcgtgagtaccaggagctgatgaacgtcaagctggcctggacatcgagatcgccacctacaggaagctgctggagggcgaggagagccggctggagtctgggatgcagaacatgagtattcatacgaagaccaccagcggctatgcaggtggtctgagctcggctatgggggcctcacaagccccagcctcagctatggcctgggctccagctttggctctggcgcgggctccagctccttcagccgcaccagctcctcgagggccgtggttgtgaaga

SEQ ID NO: 174013 - DNA, 1227 bp, Homo sapiens
atccaagatatcattgattatatatatataatgtatctccaataagatacatgagaggtgtaataaaataatcaagcattgagtcttggccttccacgcaagactcaggcctcttcagaacagaaggattaagatggaaatggaatagaattcaaatgttaaaagaatgaagggtcaagagagttggaatgaaggtaaatgggccacctgtagaagtctgaaagtgagctttggagggaagaaaagtaaatactgctttaacaagaagtcctggggaatctgaatgaattagatcctgatcatggatccataacatgtggatgtggagaattaatggtatctagggtccgtatctaactgatattcaagaagtatagttagatggccgggtgcagtggctcacgcctgtaatcccagcactttggaaggccgatgtgggcagatcacttgaggtcaggagttcaagaacagcctctactaaaaacacacacaaaaaatagccacgtgtagtggcacatgcttgcaatcccagctacttgggaggctgaggcaagagaatagcttgaacccaggaggcggaggttgcagtgaaccaagatcgcaccactgcacttgcactccagcctgggcaagagagccagactctgtctctcaaaaaagaagaagtatagctagaaattctaagaatgactttgtctaaaatatattctctgaagtctgcagaaactaggatgagcagttctttaatctgatccaacagggcatttgtaggacttttgtgaccttaaatgaactgaaataacacaaaaggtcatcagagaatgtccaagcttctcagtacacatcattttcccatttattaaatttgaaggtatcttatattcagcaaaaatgagagctcattcagctgcattttatttccactacaaagaagtcaaacctagaacccatgtcaatttgcagagggatcttcattcacctatgatcttcatcccctaggcttttgtttcatttcctttggttgtaattaatttattatggaaacttaggtaaactcagcttctctcagccaggaacaactgcaaacacatttatttatctttcttccccaaatctacaagacatcaaatattgactaaaaggtttcttcaaaggaaagtcagcctggtacacggagctcatttctagccatccttgaatgtttgctgttttcccaaagctgctgac

SEQ ID NO: 174014 - DNA, 725 bp, Homo sapiens
tcttttatattactttactcagcaaataagcttttaagctagctcaagagtatctttttctcccagataaacagtgatgtaccctgtatattaaagggcaaagctgaacactgaaggcaagtacccttaattatgtgcaaaacgttttcaatcaaatctattgtcgtacgcacaaatatcaaatttagaggttggcctttggaaaactcacagcacaacatttcagaaatcttcagcattcagcagagtctccctgaaatgttacacccaaaccagagagaaaactcttgtgatcttacaaaaggttcttgattctttgaattatatttgggataaaggagaagaagaggagttggagtgtgggaagatagatgtaagtgatggaagaatgcagtctggtggaagaatggggatgcctagattaaacaattggcatttgtaaaaatgaaaatgaagtggaataggagcgtacagaatctggcaaataataggtgatgcaaaattcagtatcaaaaataaagacagcttttcccctctgcttcctgcagtataaatggtgggtacatttttgttttcttgtcattcattccttgcacccaacttttcagagatggatttataataaatgatcaagggtgttgttttgactgttaagatccattttggtatccagctaaattttacagaattcctttcacatcacaatcttgttcctcatgtttcac

SEQ ID NO: 174015 - DNA, 429 bp, Homo sapiens
gtggaatcctggaagaaaggagctcttacttagacaataactgctttatttgatgggtcacttgtaattttgctcataacacagagctgcttgtcatgacaatgttaattcgtgggtatgatctacttcggtatctgttttgcacagtgaatttctttgaaccccggttgcaaacaaagaaagaagaaaataacacaaaagcatgctggcttgagtgcctaatgccatcctgctgcacaacttcctcacacaccacacgggctcccgaggctataaaaattgtttttgtctgattaaacacaagtccctttgaacttggtgggggttcttttccgcttgcactttcttctaactgtgtgcagccttttcttttttttctggtttgatttggaatccaaagtgtctacaagttggcccattccacctggc

SEQ ID NO: 174016 - DNA, 263 bp, Homo sapiens
ctgcaaagaggatgttgagtatcaatgctttaacagaaatcaccacctgcatgaggaaaaggtatgacatgaagcatggataactcacacctgggcagctcccaacacagcacacacacacaggcaaagaggcagcacagggctggctggtcatttaccacgttccgtaaatgtgaattctgtgcggcagcagcatctcctggggactgtaatgtggccattttaatgcaaaattaattgtcaaatataagactgcagcggcc

SEQ ID NO: 174017 - DNA, 224 bp, Homo sapiens
gacatgacgttccctgcacccagaacatagctagcatctgctatatcgtcgaatgcatgtcaggtcggcgtggcatagccctggccgtcagttatacaagcagtgggggagtcagggaggggttcagcccagggcatagaaaagagagttccagacctgagctttttgttcagtaagagaatgattaatggctggcagacacaaatcgtgtggtctcattttgt

SEQ ID NO: 174018 - DNA, 507 bp, Homo sapiens
gtggcacttcacagcgtgctcctgactctatcccctcacaacagcgctaggctatgtgtaaagcactgtggaagcagggggaactcagagttttacccagagacttcagaaatgatgtctggaggggagatttgggttcgatcctgaaagaggaccagaagtttgccagatggacaagaggaagagtgctccaggcagaggagtccccatgaggggtcacggacaaggaaatccataatgtgctcagtgaatggggccaaacggaaaccactggacattctttagcccagggagaacatatccagataagacacaagtggacttctgcaccaactaagagggggccttgcaaaattaagaatgggtcttcgtggaggcggaagagactgagttgactcaagaagataaattattgcatgcactttaaaagctttagagaaacttatttacatacagagtgcttattaaactcttttttgctctttcattaaaacaaaccacaccctc

SEQ ID NO: 174019 - DNA, 321 bp, Homo sapiens
tttggcaaccccaaaggtttagatatgaaggtgaaagtgggtgaagtactaagagggcagtcctcattcgcacaagatgtttttatttcaagcctcctgagaatttggaattttcagtagttccttttaacattccacttatttcctgtattgatttaaagctttaaaaatttttattttaaagtaaatagtgttaccgaagcttgagctgtgattcccaagtgtgttttttaggataagaaggggcctcgcggaagttgcggtgagccgagatcgcaccattgcactccagcctgggcaacgagagcgaaactcagtctc

SEQ ID NO: 174020 - DNA, 203 bp, Homo sapiens
cattcctttaagaaaactttggggctgggtgcagtggctcatacatgtgatcacaacactttggtagaccaaattgggaggatcatttttgaactctggggtttgagaccagcctggacaacattgcaagaccgcatctctattaaaaaaaaaaatttagctgggcgtggcggtggacacctgtagtcttagctgcttgggag

SEQ ID NO: 174021 - DNA, 564 bp, Homo sapiens
actgcatgtaccataactgcataaacataacaactgcatgtaccataactgcgtgtaacagcagtgcatgttttcctcctttccctctgtagttgcagagctagcaaggcgttctggcctccaggaaccttctcaccagggcatacattccccttccacttggggcagaataaatttcatgcaggacactcatctgcatttggcctccatgcacatcagtaagtatttaactgaaaatgtaaaaggtctctgaggctgaaacagcaaagccctgtgagtttcctttaacctatccccaaatctgtccccctcaagtatcccattccccaggtagtgccagtgcttcttgaagcagttgcttttaacagttttctctgaagtgaaataccatcgcagcaagctgttactcccctgcacagagctgctgaaaactaatcatcgagcttcaaacgccaggtttggcaaactctggctacagaaaaccactaatcttgtgatggcattttagaggtctccactgaatcacatttccaaatgaaataaacccagtctcccaaactgggc

SEQ ID NO: 174022 - DNA, 599 bp, Homo sapiens
gaccaacacggtgaaaccccgtctttactaaaaatacagaaaattagccgggcatggtggtgggtacctgtaatcccagctactcaggaggctgaggcaggagaatggcttgatcccaggaggtggaggttgcagtgagccgagattgcgccatcgagattgtgccattgcactccagcctgggcaacagagcaagactccgtctcaaaaacaaaacaaaacaaaaaaaaaccccttggcttgggggaaaaatctaaacagctataaaagaacattttggaggcaattgaggaaattcagatatggactgtaggttatattgaattaattttttcaggtgcgataaaagtatcttagttatgtaagaaaatgtccttattcttaggaaatgcacactgaagaatttaggggtaaaatgtcataactgatatctgcaactttcaagtgattccataagtgaagaaaattacggtatatgagagaaagagaataaatatggctaaaagataactggtcaatctaggtcagagttataaagctgttcattatttgttctttcagtgtttctgtaggtttgaaaagtgcaaaattgagggagg

SEQ ID NO: 174023 - DNA, 344 bp, Homo sapiens
ccatcagtggttttggagcaaggagtggtggtgttaatattgcaaaaaggtagattaggaatggagatagagaggataggtaggggactgcagtggtctaaatgtaaggaaattcttcttcacattaaatctgagttcctctggttgcaatttaagtgtattgattttgatatttcagccacacagattaagcacccagagccagggtggaataacccatccctaccccatatccatttagggctgttgatgcacaggagagattaagagttcacaaactttagaaggcaactaaatttaggttttattgtcaaagcacataaaaagttaagcataaattattc

SEQ ID NO: 174024 - DNA, 236 bp, Homo sapiens
agcccgcagccccaccccacttcaggcatccattaatctcagttctgtcgttgtagattaatttttgcctgttctagaatttcatatagatgaaagcaaactgcacgaactctttttttactagattcttttgctcatatttttgagattcatctatgttgctatgtgtagtttattcctttttattgctgaatattccattctgtgaataccacaatttgcttattcatttacct

SEQ ID NO: 174025 - DNA, 653 bp, Homo sapiens
ttgtggctttagacatggtcatgacatcccccataaatctacctaactgtattgtgacccagtccacaattccccaacacatgcacagtccaacagctttggtcaatatcttgctgaaattaaggttaatttttatcagatggtatttttctgatctagcagtctggtagtcttattaaaaagcgtattagctgacttaatttatctattaaaaagatggaatttaaataaatgagtaaagaaataaaatcagcagggcaatctttgcttttagtatgttgatatgtctagaattaccactatattttggccaagatctaaaaaacatccattttgttatgaaacttataaccagttcataccctaaactccaaagaatctatactttttctttttaataaaaaagtacagaattttctcgttacattttttttcaatgtactcttcattatttttcaaaataatggatagtggttgttttctgaattatatcactggaatataattcgttaaatctggtgattcaactgatctaagtgatttattagttttgcttcatactaatacagtgggggatggcatacataattaagagttgagataaatactattttctctacttctacatatatttgaaacttttcataataaaa

SEQ ID NO: 174026 - DNA, 517 bp, Homo sapiens
tccggtcacacgctgcaggtcctgactctggcctcgctggtggtagcccctcctgaccctcctgtcagctgctcaccctcccaaggcaagggtttcatccctgaggtcccttttatgcccctcttttcggaaaggatgaacttgagttggagtgacatggcagtcatttggattcagtttccagtttcacttctccaatctcctaattgctgcttggttgtgggccggggcttttagaattgattgggcaacatggcgtggaattgcctccgtgtatgtgccatccactctgtggttcagggagctcctgtgagttccttaagggaactaattaccagctagcacttcttatcgttagcgttttctcccatctgccagccaaactcacttcttttacaccttagataatgtagtgtgttttaaaatccagcccagatgtcccactttctaaccatttcaaactgatgaggaagccaagtgtcacagccaggaatgggaaagtcaggactttttgggc

SEQ ID NO: 174027 - DNA, 414 bp, Homo sapiens
tgtaggcgtatttggaagctcattagaacagaatactttaaactttctctaggtaactttacaaggaagtgtgatgcttgaataaacacagatactggttctacgcacacagatcaaatcatgtaacactattaccaagacaaagctaatttcttttcacagacaacatttaaagcaaccaaactctaggttagttatgtaatttaggctagtctttaatatcctcactctttaatgtagttcaaggactgctaaatagcaagaatgccagaatgagtgggacaatatatatatttttaatgtctctcttatttcacttatgtttgtggctagaggagtgacctggggaaggtacgtaagaataaagcttcaggatcagtagattctaaaactacttttctggttgaactttgt

SEQ ID NO: 174028 - DNA, 362 bp, Homo sapiens
tttccatgaatgcttaaaacaaacaccaaccaaaaaggtactgaagagtttggtaaagaattcccatcactactgtggaaagagtttccaactgtacccagagaccatgtgtaaaccctaacccctggaaggaagtgagaagcagaaaagagggatgcatggggaatcctcagagggtgaaatctgtccacttaagtattaaagaacacatgtggaggatgtatcctgtccatgttttctttattcttgattccactcaagtcttttttttttttttttttttttgagatggagtctcactctgtcacccaggctggagtgcagtggtgccatctcgactcactgcaagctctgcctccagg

SEQ ID NO: 174029 - DNA, 795 bp, Homo sapiens
gcggaggttgcagtaagctgagatcacgccactgcactccagcctgggcgacagagcaagattccgtctcaaaaaataaaaaaaaaaaaccatgtcacagaaatattcgaggagagaaaacaggagtgtttcagaacaattttataagcatgactatgtcctcataagatatttgtgagttaagcctgttgcatctaactctgcccactgacaaggtagagcaatggtggcagatcccccagcagtgaacagttctggggcccaggctggggttgcttcacagcaaaagaagcagtcctggcagggtgcttggctccaggtctggggaagaccctgcaagatgggtgtggagtgctctgtcatgctggagagcgaggaagctattgcagggtggctggggctgggagacagggttaggagcctgtctctagctggtcatgggcagaaacttgaagcattcatgaaaacagctaactctgagttcgcaagggtgctaacaaaacccttcgtcatcatatttgtaggatgcaaaggaaccatctcattattttgaatgctgttttgaaaaaaagaagtactcaagcatttaacccacctttcatttataaactgtacctcaggcaaaacagatagtgtgtgatcttttgcatagaagtattccagccaatactacatgaaaaggatttttgcaaactagaatcagcctgttgcaggctctggtgaaggagatgaccagggcggtgccactccaggtgcagcgcatgtctagggtctgctggtctgagatggtgtgtt

SEQ ID NO: 174030 - DNA, 651 bp, Homo sapiens
gtgagctattactgtagttcagcttaactaagcatcaagattttaaaacaaacacactaactgaaaaatagagtggcaagttaatcaagactaaatcccagtttaatttaattttgacattttaatatgctacaaccaataagaaatctatgccgaatgataacttaagttctcatttgtccaaaaaaatatttattaagctctctgtcaggcattagctttgtcccggatgttaacatgcaataattatacacagatgcttgcctcatgcagctttctctcttgagagcgatagtcacaaatgtaaaaaatgcaaattgtgccaagtccaatcaagggaaggtaaagggagtattgagggaactggtcagtagttagaggcagatgtgggtatctaaagaagactttttaaaaatctgagattaactagaggttttatttttcaatgttaataggaagccagctgaaagaaagggtagaatatgtgggagacagtatataagtagtagaacagagttgtgaggagagaggagatgagatgtagagtgtatgtaaagggtaagactatttactgagagtgagagttcagtgagaagagcaagggaatttgaagagtaaagaaagatatgaagcaatcgtaggtaattgggc

SEQ ID NO: 174031 - DNA, 302 bp, Homo sapiens
agcagcctggcacatcatgttctgactctgggtgcagggctccccccacctccccattttcaccttgatcagtcctgacattctctccacgggccagctctggtctgtgtgttgggaatgaccactccaggaacagagtccaggcagtcagcatagctgagggtttgccacagtgctctggacagttgagtaagacaggagctacagccgggcacgatggctcacgcctgtaatcccaacactttgggaggccgaggcaggcagatcacctgagatcaggagttcgaaaccagcctggccaa

SEQ ID NO: 174032 - DNA, 309 bp, Homo sapiens
gagtagaattataatttggaacctaatctgaataagaagaaactgatcagaaaagaagtagtggatgcctcaaaagaaaacaaccaagacagataggcaggcagaagggcaaggggcacagctagatgtagcaactagactctgagaacaggcttcaaccagacctaaggctgaggtgctaaagacaggaccgaagtctgaggtgctaaaagggaagacaacaggattgaggttctcaaaaatgaaattctggcaatctcacattatttaacatagagggggaaaaaagagggggcttatctaaagaga

SEQ ID NO: 174033 - DNA, 177 bp, Homo sapiens
ttgaggcatttcattattcctagcaactctagtcgagggtaaacaagaggcactgggaataaaattgaagtcacttttagcttcttattagcaggtatgggaaaaacctggggataagttgggtgggtggtagaaaggactgaaattgtccaaagtgaggtttgagaaatatctatg

SEQ ID NO: 174034 - DNA, 871 bp, Homo sapiens
gacatagggagggagaaaggaggctccaggaagaatcggaatgagaactgatgaggacctgaactgcagcaggaggagagagagtggcgaggacgtctcacgtgtgaggacgtctcacgtgctgtcatgtcatttattggcaccaccttcaacacaactactcaagcccagttgctgagcatcatctggaatcctttcaccttcccatgcacaatccttgagatccggagatgctacctccaaaaggcaaccaaaaaatctaacgacgactcactatcttcccatctactgtccagttgtgtatatatgcgtctatggaccaggtagtgtgtcaaaggtatttcttagctgtagggttgcagcaaaaaagtttggaagctattcattgcccattaggcaattaaagagtaaagatgtggcccctgcctacatctttaatctcatcttctgtcatctccccctctttgctcctttagtccctggaaagtggtaagctctttcctgccttggggccttagtatttgctgttaactctacctggaacattctccttatctttcccatggctgattcactgccatccttcaagtctcagtttaatgtcatatcctcagagaggccccccatccatattatgtaaaccatgtcttcttcccatcactacacgctatggtctgaaagtttgcatctccccaaaattcatatattgaaacctaatccccaatgcataggattaagaggcgggacctttaggaaataattaggtcttgagggtaaagccctcatgaatgggattagtgctttatataataaaagagggctgaagaagcttattagccccttctgccatgtgaagaccttagaaagtgcc

SEQ ID NO: 174035 - DNA, 412 bp, Homo sapiens
tctttagatctctgatttaagtgcgttatcttttttctcagcataggctgtgattttcctcaagccttccttctctgttagcaatttcattttcaacagattctgttatgtttcctggtaactttttctgtaatgacattgtttttatccccaatgtcttccttggctctgtaattaccttttttatttcattgagtagtttcatcatcttgtctttgggatccaattaattagttttcaataatcttgattttgcatgaatgaattccccatactgcctctcctacccgagagccaactctaacccaggaattatcttggaggatggggagaataggcaaaagatgtcccattcaccattaagtgagacaataattttgctcatatgttatgccctccaccttcccaactc

SEQ ID NO: 174036 - DNA, 314 bp, Homo sapiens
atatttcatgaataatttagcaccatcctctaggtgctgtctggtgatagagttctaaaaagatctgattgttcaaaagtgtgcagcacctctcctaccactagctccagctctggccatggaggatgagcctgattcccttgtgctttttgccatgactctaagttttctgacgcctccccagaagttgagctgatggccagcatcatcctttttgtacagcctgtggaaccatgagccaattaaacctgagtttttataattaattacccagtctcaggtaattctttatagcaatgcatgaaaagactaat

SEQ ID NO: 174037 - DNA, 217 bp, Homo sapiens
atgtcgcatgggcctcctggagacagcacgctttgccagttttgttttcaagagtctcatttgatttgcattttctgagttcgtaaggttttctcatctcaaccatttctctttttgatgattgaggatcgttaaaaaacaagcagaaaccttatgtgacagtttttttgactaagtttgttacctgcaaagggtaagaagagttttctggagtccg

SEQ ID NO: 174038 - DNA, 255 bp, Homo sapiens
accagcattgcctttctaatcggttgccgtgatggtttagctccctgatgcgtgaggctgctgcctggctggccacccccatgatctgactttacttgcctcggtggcgttgagggatctagttaggcctccctaatcccctctcaatgttttctcagtttgcttgttgatgcctgaaatttttcacaggcagataaaaacttttccttgcacaatcagaagcttaaaatatgtgcatcctggcagaagtaatat

SEQ ID NO: 174039 - DNA, 318 bp, Homo sapiens
aaaaaaattaaaattagctggctgtggtggtgtgcacctgtagtcttagctacccaggaggctgatgtgggcttgagcctgggaggctgaggctgcagtgagccatgatcatgccactgtactccagcctgggcaacagagtgagaccctgtctccaaaaaaaaaagttcttattccaaatgcttctagaactttatcaccattaattaattaattcattcaaccactgatcttgctgggtcaggcacagtggcaggctatgtgaatgctgaggtcagggaccgaggcttaaacacccctcaaagagaaagagaaagg

SEQ ID NO: 174040 - DNA, 460 bp, Homo sapiens
cttcatttttacataggtagtcatcatccttcatacctacatatgtactcaacctccttcatccctacatatacactgattctccttcatatctacatatatactcatcctccttcttccctacatatatactcaccctccttcatctctacatgtatactcatcttccttcatttgtatataggtactcatcttccttcatttctacacaggtactcatcctccttcatccctacatatatactgatcacccttcattcctatatacatactcatcctccttcatccctacatgtatactcatcctccttcatccctacatgtatactcatcttccttcatttctatatatattgtcatcttccttcatccctacatatatactgatcacccttcattcctatatatatactcatcctccttcatccttacatacacacttatcctccttcatccctac

SEQ ID NO: 174041 - DNA, 375 bp, Homo sapiens
acccaactaatttttgtatttttattagaaacagggtttcactatgttggccaggctgatctcgaactcctggcctcaggtgatccacccgccttggcctccaaagtgctgggattacaatttattttttattgctttcttatgctgtagatctcacatctaagaaaccgttgcctaatccaaagacatgaagtttatacctctctttccttctaagagttttacagttttagctcttacctttaggtctttaatccactttgagttaatttttgtatacaatgtgagatagcagtccagcttttttcttttgcatgtgattatccacttatctcagcacaattgttgaaaagactattccctccccattaaaat

SEQ ID NO: 174042 - DNA, 803 bp, Homo sapiens
atggaaaaagtttcaaagatgtttctttttgaaagttatggttgctgggattacaggcgtgacctaccacgcccagccaatgactacttttttaaaaatccagctatgttaactattaatagcctttcagtactatctatatacaatttttatcttaacacacaaaaaaatagaccatcaagtattattcatatcaagtagtagtagtgtagtgggttttttgaaattatatatatggctgggtgcggtggctcatgcctataatcccaggactttgggaggccaaggcaggcagatcacttgccttgctgacatgtcaaaaccccgtctctactaaaaatacaaaaattagccggttgtggtggcatgcgcctatagccccagctacttgggaggctgaggcaggagaatcgcttggacctgggagacggaggttgcagtgagctgagaccacaccattgcactccagcctgggcaacagggcgagactccatttaaaaatatatatatatatattcattttctgtgtaaaatttaaattttggtaaaatcagttcacaacacctttttttttttgagacggagtctcactctgttgcccagactggagtgcagtagcgcatcttggctcactgcaacctctgtctcctgggttcaagcaattctccggtctcagcctccccagtagctgggactacaggtgcatgccaccacgtccagctaatttttgtatatttagtagtatatttagtagagacagggtttcaacatgttagtctggctggtctcaaactcctgacctc

SEQ ID NO: 174043 - DNA, 547 bp, Homo sapiens
ggtgacagagtgagactccatctcaataaaaaataaacaaacaaacaaaaaactcccacaccgattgtggatttgtgtctttctctcctcttagctctgtcagtgtttacttaatgcattttaatgttatggtattaggtagataaaaattttaggttgttttatcttcctgtcgaagtaactcatttctctctctctcagtaatactcagccttaaagtttacttcgtttggtattagtatagttgctagagttataacagttctttcagtaggtgtttccatcatggatctttttctagccttttacggcctatatttctatgtccttatacatatcctttttcttttttttcttttttgagacagagtctcgctctgttgcccagactggagtgcagtggcacaaccttggctcactgcaacctcagcctcccaggttcaagtgattctcccgcttcggcttcctgagtagctgggactataggcgtgagttaccgcacctggccattaagtctttctcttttaaggagcttattgttggctta

SEQ ID NO: 174044 - DNA, 566 bp, Homo sapiens
aggtgctgacaatacaataagggagacaagagtaactcataagaagtagtctaccagtactgcaagacaaaataatactaagtactaaactatgtggtcctggaaataggttttggaagaatcataaggaagatcgttttcatgaaggccacatgtagtcaagaaagacacttgagttgtccgttagggggatattagacttgttttctacgtgtagtggttatcagggtcagttctgctctcccagctacaacaaacacacagaaccaaacagaacttaggaagtctggagagccgcaaagcaagcagacaccattagactctgcgtagatttgtttagagtttgtgggcattgttgaggtctctcagggtctgctgacagtcctgtgaccatctgcctggcagcaaggacttcagttgtttgcaatgctttggccaagccgagagcacgcggatctggatgcacagctgctgagcgtgtgctgacgggcctcagctcctcgagcgtgtttgttcagactggtctgcctaaatccactccaaaattcttccgagccagaaaagga

SEQ ID NO: 174045 - DNA, 181 bp, Homo sapiens
tgaaaagcgtaatgcctgggtgcagtttaaaaataaggaatcttaatctatctggtctaactttagaaaattgtttggaggggattcttaagatactctgaatttatactttcttaacaggggctgtcttttgtatatgtggtttgtgagaaaatgtgtgattgatctgtaatttgagcct

SEQ ID NO: 174046 - DNA, 396 bp, Homo sapiens
atgcagcaccaaggccaatgcgtagcacacagtaggtaatcaccccagccagaagccatctttcccgtggtgtctctagtctctgctagtcaggttacgcttgtcagcactgccctgtgatatttccatgtatagacatatttatctcctcaactagatagtaagtaagctttggggcaaagaagccatgactaatacattttgtttccccacagtatctgcctagtatcttgtacgtaattggcacctgataaaaatggttggttatgaacaatttccttgaggaaattaccttaagggtgctaaagaggaaagcctggaaattctagtacttgtgaggacttatgaataagcacgggccttacaaacctttctgaaactcagcccaaactgagg

SEQ ID NO: 174047 - DNA, 588 bp, Homo sapiens
ggtatccatggggtcctagaaccagtctcccaagggacaattgtaattggtaagaagaaaatgtagagaccacagatcggtgagcatttctgtctgtgaccttcctctggaaaagctcagtctgaagcacaaactgggtcttcatagagaggcacttccagctgcctcagagcactcgctgcaaagcttcgggctgctcagagaaaatggctcctgatgccattatgggcttctcgtcgtgccctgagatgtgctgggttctgtttcttgtgtctattcaatgaattctgacccttcaagagcttcccagatgctttccaggaagaaccctgggccctggggacgactgccttcctaaggaactttccttctagatgcctttgtagtttttcatgtttaagtgacaagtagtgagtggcgctgcttgtagaatctgaacacaaaatgtccccggattagtaggtgtcatccagttatcagtctcgtgctcacacccccgccaccgggtttcgatttgcccatctctgctttgctgctggatctgctggtccttggggcctcactctgaaccacattcttgtgtgctag

SEQ ID NO: 174048 - DNA, 436 bp, Homo sapiens
cgctcattaaggaggtgtgggtgcagcctgggaattcacatccagggactgcagggaggtaggactctgtattacagcactgtgcgcccttacacaaactggaatttccagtctcctcaagccccttctattattttccactcagacaccatgctgttgatgtttttttatcttttaaaaacattgtcctgaaacttcctcctcttttagggctctttgatttctcagttgttcacactgaaaatcaaatgcagtgactcagccgctgggaatattcctgctggagtgatggctcctcccctccccagtgctcatcttattcatcccctccaaatatggacagcaggcaaagcttcagggaggggaagcaggagcacaaaagtaaatctccaaggaaataagaaaacggaggtggccttgaaggcacctcctaaca

SEQ ID NO: 174049 - DNA, 425 bp, Homo sapiens
gatgtatgcatgcgagcgggtattacatcatgtgctgtaaagtaggctgcaatctgttatagctctcactgtgcgcccttacacaaactggaatttccagtctcctcaagccccttctattattttccactcagacaccatgctgttgatgtttttttatcttttaaaaacattgtcctgaaacttcctcctcttttagggctctttgatttctcagttgttcacactgaaaatcaaatgcagtgactcagccgctgggaatattcctgctggagtgatggctcctcccctccccagtgctcatcttattcatcccctccaaatatggacagcaggcaaagcttcagggaggggaagcaggagcacaaaagtaaatctccaaggaaataagaaaacggaggtggccttgaaggcacctcctaaca

SEQ ID NO: 174050 - DNA, 723 bp, Homo sapiens
  misc_feature (526)..(526): n is a, c, g, or t
gggcgaaggcgccggggagaattgggagccgcgcgtcttgccctaccaccctgcacagcccggccaggccgccaaaaaggccgtcaggacccgctacatcagcacggagctgggcatcaggcagaggctgctggtggcggtgctgacctctcagaccacgctgcccacgctgggctgtggccgtgaaccgcacgctggggcaccggctggagctgtgtggtgttcctgacgggcgcactggggcctgccgggccccacctggcatggcagtggtgacgctgggcgaggagctgacccattggacacctgcacctggctgctgcgccacctgctggagcagcacggcgacgactttgactggttcttcctggtgcctgacaccacctacaccgaggcgcacggctggcactgcctaactggccacctcagcctggcctccgccgcccacctgtacctgggccggccccaggacttcatcggcggagagcccacccccgtgcgtactgcacggaggctttggggtgcntgcttgtcgcgcatgctgctgcaacaactgtgcccccacctggaaggctggcgaacgacatcgtcagtgcgcgccctgacgagtggctgggtcgctgcattctcgatgccaccggggtgggctgcactggtgaccacgagggggtgcactatagccatctggagctgagccctggggagccagtgcagtagggggac

SEQ ID NO: 174051 - DNA, 284 bp, Homo sapiens
actacattgataacaattcttgctaaactgagccattcaaggaagggacaatttcaagaaatctcttgtggatgtccattctgtgattatttgactggagaagcattgtctttttaacaaaccagcagtcgtaggcttttcttggctctaggtgaagaggtgacttccctctttgattcagtgttcataattgggctgtctgttagccaaggtggtgagaaaacaatgttaatgaggtcaggggttcaatgcccacgtgggtcagttagtgtttctttgttctt

SEQ ID NO: 174052 - DNA, 499 bp, Homo sapiens
cacattagcagagagactgcaaaaagcagccagtcctgtgtttcatactgtgatgtcacatgagatgctgagctaaagcactgaaggacattctatcctatcctaagggagactggaacaaagcctaggctgtcccagctagcacccctttatctcaagattttgcattgccagcacattctacacttaattcttgagaggtacaattgagaaaggatggagaactgcgtcagtccaaggccacccagagaactgcagtatttgcaggtgggacctttggaagatgatcagatcataagggtggagcagggttagtgcccctacaaaagggaacacagagggctcacttcccttttctgccacggaaggacacatgctattttatgaacctgtcagtggatcctcactagacaatgaatcttccagtgtcttgatcttggagttctcaccctccagaactgaatacatttgagaaataaatcttttgtttataaagcta

SEQ ID NO: 174053 - DNA, 500 bp, Homo sapiens
tacaatctgttttccacaatgtaccgagaatgacctcaaaggataattggatctcatccttctcctgtgcaaagccccctgactgcttgcctccctttgtacttagaattaatcctgattccttaccttaatctctaaaatgtaggccctgcttgccttctcaacctcatctcctgccatgtttccttgggcagcttgctccagacattctgatatgtgtattccgtaaatatctagatatgttcccacctccagacctttgcactcataactgttctctgtggccagaactccctccctgtgatacttctgtatctgcatttttcttattcagatctcattttaatgttacatctttaatgacacctttcttagccaaccagtgtaaagtagcatgtacctccaaatccgtatcagtttcatcagtgcccttttgaccactttgttgttgtttttgtattggttgcatgtttatctcactaaaagacaagcttcatgta

SEQ ID NO: 174054 - DNA, 388 bp, Homo sapiens
atttttagtagagatgtggtttcaccatgtcggccagttggtctcgaactcctgacctcaggtgatctgcctgcctcggcctcccaaagggctgggaggccctacaccccgccacttgggccactacacccggcccaagtctcccttttttgaaatattctgtgtttcgtagataccttttcgttgatggtattaattatttctctgaggttttcttctgctgtcagtcctaaccttttttcttcttattctctgctttttaaactgtaattcatattggacattttcctcaaatatttgtttcttggctctgtagttattgttgatagtgagatactaaaaagctcaatagcagaggggtgtgtgtgttcacctctggcatgatggg

SEQ ID NO: 174055 - DNA, 847 bp, Homo sapiens
ggagctgttctgtggaggtggtagtcctttctaaactctgtggaggtgggagtatctgcacctcctagcagagtgttgggcgcggggcacattaaagacctgggggtcacgtgtttccgaaatgtgtctgactgcaggacatccctcgtcctccgtctttagtgggacagccgttgatgtcttgtgagacagtgtgaggggcatagtggcaaggctagaaaagtgggtgaggccagctgtgacacattcggtgtcccgtgtgtatgctgctcctgcgctgttgtgtgggaggcggcgtatgttgcagccggaagtatacagtaggctctctggatcagattgtgtgggttcaggctggtctctgcctcctgtggccttgagcacttactttctctgtgcctcaatactctcatttgtaatgtgcagatggtagtcctcatttgagggaactgcagtggcaagattaagtagcgtggttcatgtcaagagtttgatgctgcctggtccaaaaatggataaaggctgattgctgctgcgtgctgctgtgtcgtcatggttacagtggcaccacgcctgcctggctccctctgctgtaaagaccatgggtgttcaccctctgttatcacttctgattttcatgtctgaaagaggatgctgggctccctccccgggctgatgccaggcctgcccacatgctgtctccgctggtgtccccaggcactacaatggtcctagcctgtgctggtttcccctcagcccattaacacactcagggctcccatgtctaccttcttactgctgttaagttaggacagtcatcctttgaggtcacggtggaggtcacgaa

SEQ ID NO: 174056 - DNA, 479 bp, Homo sapiens
ccgcggcgctcaaggagcccgctgtcccggagcacgcgagatcccagcgctgcactccgagctcgcggcaccggttgcgggcagccggtgggacgctgccgctgagctgtcccatggttcgggagggctctgcggtgggagaggccttttctttaaaaactgggaagtttgtggtgggttcgctttttaaaaattaatctaaaaacacaaaatctatcttttaaaatagattttctttttgtcttttacgccgttgacatcctgctgggggccgattaaagaacttgattgctcaccaggaattcaggttccttaagatcttggcgcttcatctttaaaaccatacagagctgattgtttccagatcccgacccggtgacattcctccctcattgttgaccttgtcccaaacatcttttcaagaaaagcaattaaattgagattgaaaataaattacgtaaattaaatattagacgtga

SEQ ID NO: 174057 - DNA, 366 bp, Homo sapiens
atcctcccacctcagccacctaagtagccagaactataggtaaataccaccatgcccagcatccagtgggcaatttttgatattcacttctggagttcaggagagaggtcaggactgaagataggcatttgggaatggtgggcattaaaacaatagactggatgagatccgggaaccagtaaaggagaccaagaaggagggaccaccgaggtggaaggaaaagccaggagggagtgacctggaagccaaggcagagtgttccaaggagaagggactggtcatccctagcaagtgttgccactggggcaaaaatggttacatcaatcggtcgtaagctgaggcccaagatgagtgactcaccgaggg

SEQ ID NO: 174058 - DNA, 648 bp, Homo sapiens
gatccacccacctcggcctcccagagtgctgggattacaggtgtgagccaccacacccggcctcaagtatgcatttttcttttttttttcttggagacagaatctcactctgtcacccaggctggagtgcagtggtgcgatctctgctcactgcaacctccacctcttgggttgaagagatcctcctgtctcagcctccgagtagctgggattacagtcatgcgccaccatgtccagccaattttattttgtatttgtagtagagacagggtttcaccacgttggccaggctggtctcaaactcctgacctcaagtggtccgcttgcctcggcctcccaaagtgctaggtttacaggcgtgagccaccgctcctggctgagatcaagtatgtaaagcacttgataaagagccagtacctggtaggtgcacagtgaatgacagccgagtctcactctgtcatccaggctggagtgcagtggtgcagtctcagctcattgcaacttccgcctcccaggttcaagcgattctcctgcctcagcctcctgagtagctgggattacaggcgtgtgccaccatacccagctaatttttgtatttttagtagagacatggggtttcaccatgttgaccaggctggtcttgaactc

SEQ ID NO: 174059 - DNA, 240 bp, Homo sapiens
  misc_feature (13)..(13): n is a, c, g, or t
  misc_feature (28)..(28): n is a, c, g, or t
gagctcggtaccnctcgataagggccanatagctgatgggctaaaaaaaaaatctcataatgttttaagaaagtttatgaatttgtgttgggctgcattcaaagctgtcctgggccacatgcggcccacgggctgtgagttggacaagcttgttttagaacaaagctgagttgggggtgctgaaactagaatagaccattctctagtctagaaacaatcttctgggcttggcttatcgag

SEQ ID NO: 174060 - DNA, 187 bp, Homo sapiens
tgaacagtaacatcacccacccacagccatcctagccacaaacctctttgactcctacctctctccaatgtccaggaggtcacaactcatctattccacttcattctttctcaagtctgctttcttcatgacatccgaacatcttacttgatcaactgcataagcttcttccttggttctcttgcct

SEQ ID NO: 174061 - DNA, 1100 bp, Homo sapiens
ctcacatcatccatactcatattacctctgaataatgccgttaagcctgaaaacaaagatatatctcataatatctctcatggatagaaaattcctcttagccgagcaagatggctcacatctgtaatcccagcaccttgggaggcaggggtgggtgaattgcttgagctcaggagtttgaggccagcctgggcaacaaggcaagaccctgtctctaccaaaaaggcaaaaaaaatccgggagtagtggcatgcatctgtggtctcagccactcaggaggctgaggcgggagggtcatttgaccctgggttgtaggttgtggtgagccgagatcatgccactgcactctagcctgggtgacagaacaagagaccctgtctcaaaaaatatatatatttcaggaaagataagatgtcccattttaaagaaggagatctgttaagcggatttgtacatgtgtggcagtagtggcagagagtctgccataatctcttcactctcttcattctggccagctttgagtatactggcttgcagatgccagttggggccagagggactgaggtgaggacaggaacagagcaaattacctgacccaccagggacctgtacttgagacttgatcccagagctgtgttcagcctaatcacttttttaaagtgaatgtttagggcctgcctgcagagaataacatctctcagtttagacagaggtggtgagcatgtagaatgtaggagctactgagagattgatggagctttatttttcttatcaaaggagcactcactggctatatccacagccgaggggccttcctgtgcatcaaagaggaaggcattgctgctgcgaagctggtgggagtcatggcggctggaatgggtcaaatactgtttgaagtccctccaggactttatccatttcttcctccttgatgtccctcctgagcctggtggagtaggcaagacaagggatgaaaccaaggcagcctggaaccacatagctagttctgatctgaagctcatggaagaggcacctaaaccaaagggaccatcacatcaaagaggacatatacaatccactttgaccggaagtatgtagtc

SEQ ID NO: 174062 - DNA, 2241 bp, Homo sapiens
ggcaacaggaggcattgatcgcgctgcatatgtttagggcagcttttgttttttgtttctttaatggtatagcagcagtgactgagccttcgtgattcctggggacagcttttcagatactctgtttcatcagtatgctttgcacatccggaaggagtacaaaaatccaactgcccaaatttggggcttggaaaataggttttataggtggtcggtccctgggctgtgcaacaactcctcaaagaggggtttatataactagaacccccctgggctgtatttttggtcaaaggagtctccaaggcggcttacaaaagcttcctttttcacttgaccacccttgctcattggttacttgtgaagggaattggtcagtttccacctcagcactttgccttatcaacatgcggtcgccatctagtggccaaaggttgtctccaccagctacccagatggaaggcaaataaatcctttcggccaccctgctgtccatcgtgaactttgggaatgaaatataatggcctgaacgaactgcctttgtgttcagagatcagtgcaacactagggtcagaagactccagaagcagccacttagtagactctcacgcagaactgagaaatgcactagctgtcctgtgggcagaagagacaggagtggaccaggagaggtccaggtgcccgggaagggtttactgtaactgcaatactggcagcccagctgctgaccttgttaagtaaacctttgctgggtggtccgaattctgccctcaaggcaagataagaagttgggtgtaaggattttgtggggggcctggccatgatctttgatatgatccccgaatagccaaatagttttttttgttcaattttttgtttctgtattttgtatttttaaaatcttgtcaaatgtttttgtgttaggaataaaaagtcataaactattcccaactttgtttcttgagggatgttctgattccaatggaaacaggtgggaaatctcaaggggagcgtggacaaggtggtatgtgcagcaggggaatagactgcttggatttccaaatggtttctggggaagatgaccatccagaagtccagcttagtgcagtctgctctggaattcacacccaccccctcgcctccttgtgccatgttgttagcattggcttggagcatctgcttcttccagaggcagctgctaatgttgaaaccaacacgagccctctccccaaccccaggtttctaaagaaggtgtctgtagccagccttaatcaactgggcaaggtggtccctatggtcctttccagcatttccaaatcttggactcaaattattttctcttggtgtgaccacacagcctagagaattctgagcaataggagccagggctttccctgactctgcgacagggtcaaaccaaggaatggctaaacctgtgaggttttgtcatccccgggggtactactgtagggggcattatttattaggaagcttaacaaggtaactacggcctgagtgcgtgagtgtaaggctgtgtttgtggtgggggtgtgtgtgtgtgtatctgtgcacacatacacacgtctgtgcctgtgtgtgtgtgtttgtgtgtgtgtgtgtgtgtggaattacattgatgcatttattgagaaaggtgcaagaatttcacctacacagagggacacatctgctttgttatttataatagaaagctaaattttaattttttaaaggacactgctaatgattgagaatcaagtttttagttttgctattttttttaattggtagaggatttttatatattttttccattttgttgggttgtgtccttatttatataaatactttatccgtaagaggcaaggaggaaaccttctttgcttttacatattgtggttgtcatcgtccctattttatttctggtgtgatttctctgtcttaccttctaaatgagaaaatgttttcttgtatttgtacattgtcagattctatagtttcctagataatttaaccaaattgctctatgtattattattctgtgagtataaagttctattttaatgtctgtaaatacttcagaactggcttcttttctcaaactcccactgtggggttattgtttacatcacagaaactgtagaatctctatgctcatgtactgtaaatagtgaagtgatctgcttataaataaacttaacaaatacactatggagattaaaaacaaaataccacccacagctt

SEQ ID NO: 174063 - DNA, 2186 bp, Homo sapiens
ggcaacaggaggcattgatcgcgctgcatatgtttagggcagcttttgttttttgtttctttaatggtatagcagcagtgactgagccttcgtgattcctggggacagcttttcagatactctgtttcatcagtatgctttgcacatccggaaggagtacaaaaatccaactgcccaaatttggggcttggaaaataggttttataggtggtcggtccctgggctgtgcaacaactcctcaaagaggggtttatataactagaacccccctgggctgtatttttggtcaaaggagtctccaaggcggcttacaaaagcttcctttttcacttgaccacccttgctcattggttacttgtgaagggaattggtcagtttccacctcagcactttgccttatcaacatgcggtcgccatctagtggccaaaggttgtctccaccagctacccagatggaaggcaaataaatcctttcggccaccctgctgtccatcgtgaactttgggaatgaaatataatggcctgaacgaactgcctttgtgttcagagatcagtgcaacactagggtcagaagactccagaagcagccacttagtagactctcacgcagaactgagaaatgcactagctgtcctgtgggcagaagagacaggagtggaccaggagaggtccaggtgcccgggaagggtttactgtaactgcaatactggcagcccagctgctgaccttgttaagtaaacctttgctgggtggtccgaattctgccctcaaggcaagataagaagttgggtgtaaggattttgtggggggcctggccatgatctttgatatgatccccgaatagccaaatagttttttttgttcaattttttgtttctgtattttgtatttttaaaatcttgtcaaatgtttttgtgttaggaataaaaagtcataaactattcccaactttgtttcttgagggatgttctgattccaatggaaacaggtgggaaatctcaaggggagcgtggacaaggtggtatgtgcagcaggggaatagactgcttggatttccaaatggtttctggggaagatgaccatccagaagtccagcttagtgcagtctgctctggaattcacacccaccccctcgcctccttgtgccatgttgttagcattggcttggagcatctgcttcttccagaggcagctgctaatgttgaaaccaacacgagccctctccccaaccccaggtttctaaagaaggtgtctgtagccagccttaatcaactgggcaaggtggtccctatggtcctttccagcatttccaaatcttggactcaaattattttctcttggtgtgaccacacagcctagagaattctgagcaataggagccagggctttccctgactctgcgacagggtcaaaccaaggaatggctaaacctgtgaggttttgtcatccccgggggtactactgtagggggcattatttattaggaagcttaacaaggtaactacggcctgagtgcgtgagtgtaaggctgtgtttgtggtgggggtgtgtgtgtgtgtatctgtgcacacatacacacgtctgtgcctgtgtgtgtgtgtttgtgtgtgtgtgtgtgtgtggaattacattgatgcatttattgagaaaggtgcaagaatttcacctacacagagggacacatctgctttgttatttataatagaaattttgctattttttttaattggtagaggatttttatatattttttccattttgttgggttgtgtccttatttatataaatactttatccgtaagaggcaaggaggaaaccttctttgcttttacatattgtggttgtcatcgtccctattttatttctggtgtgatttctctgtcttaccttctaaatgagaaaatgttttcttgtatttgtacattgtcagattctatagtttcctagataatttaaccaaattgctctatgtattattattctgtgagtataaagttctattttaatgtctgtaaatacttcagaactggcttcttttctcaaactcccactgtggggttattgtttacatcacagaaactgtagaatctctatgctcatgtactgtaaatagtgaagtgatctgcttataaataaacttaacaaatacactatggagattaaaaacaaaataccacccacagctt

SEQ ID NO: 174064 - DNA, 259 bp, Homo sapiens
cgtatgcaaaccaagaaacactgaagactgccaggagaccacaggaaggtaggaagaggcaaggcaggactccccgacaagcgcaggagggagcgtggccctgctggcacttccatttcagactgctggccaccagagccacaagacaatcagtttctctggtttcaagtcacgcagcttttggtacttggttgtggcagccctagggaatgaacataagtactttcttttttttttctttttttgagacggagtctcg

SEQ ID NO: 174065 - DNA, 1083 bp, Homo sapiens
ctaacagttttggtccagaattctgactaggcttggaaatcactgacttgagttttaagttaatattaatacaaagcatttactgacagaccaccttaataaagataatgaaccccaaagaagctcacaagtagatgttattaaatgacaacacatcatggcatagttggtttttcttttcttttttttttttttggaggtggagtcctgagcttgtcgctcaggctggagtgcagtggcgcgatcttggctcactgtaacctccacctcccgggttcaagcaattctcctgcctcagcctccagagtagttgggattacaggcacccgccaccatgccgggctaatttttgtactttaagtaaagacggatttcgccatgttggccaggctggtctcgaactctgacttcaggtgatccgcccgcctcagtctcccaaagtgctgggattacaggcatgagccaccatgtcccgcctggtttgttttttaaaaaatctctggccttggagtctgaagccccaaggattttatcactaactccctgagtgaattttggcaaatcagatgacccataggtttaattttgccacctatgaaatgaaggcactgggctagattagtggctttcaagagtttttggactatgagccaaagtaacaaatacagtttacactggggtatctatatatgcaaaatacacaaaagcttcatgaaacaacactttttttaaagctagaatgaacctattaggtaaaataaacatatttttactattctatttcatcattaaaaaaatgttaatggcaacacttggcccactactagtagtttaaataacactagatctctaagcttcattaatttgactctaattgtattcaatgaacttaagttatttaatattttgcaaacatcagccactaggtgctcaattttctttgtcctgtgtattcataaatggcaactatttattgctgacttatacttacttttcagcttgaaaaccagtgctaagtacacttggatcacccaactagttggctttacgttactgtgaaaatcacatgaagtaacttatgtg

SEQ ID NO: 174066 - DNA, 296 bp, Homo sapiens
ctaacagttttggtccagaattctgactaggcttggaaatcactgacttgagttttaagttaatattaatacaaagcatttactgacagaccaccttaataaagataatgaaccccaaagaagctcacaagtagatgttattaaatgacaacacatcatggcatagttggtttttcttttcttttttttttttttggaggtggagtcctgagcttgtcgctcaggctggagtgcagtggcgcgatcttggctcactgtaacctccacctcctaatgataacggtaccgagctgatt

SEQ ID NO: 174067 - DNA, 519 bp, Homo sapiens
tgtaaaagtaaccaggcagctaaagagcctacttccttgctaaacaatgacccttgcatatgttcctcttattgcaaccttcaggaggccccctaaactttataagggccctctccttaatttgagccttttcaacgtgtttctccttcccttaaactttttattgaaatctacattacagaaaagggcataaatcctaagtgtatagtttgatgaattttcataaagtaaacatgcccatgcaacctattcctagataaggagttgagagcattatcagctcatctggtcaccacccggtgagctagcatcctaagtttagcttgtttttgacctttacgtgaatggaatcacttgtacaagttttaaagtaactgtttagaatgtttattgggaattagattacaaagtaatacacagcttggcgcagtggctcacgcctgtaatcctagcactttgggaggctgaggcggatggatcactgaggtcaggagttcgagaccagcctggccaacatgg

SEQ ID NO: 174068 - DNA, 677 bp, Homo sapiens
gccttccgcatcgaagtatctgtgaggatacaacaccacaagattgagaaagtacactgcaactgtaaagcatgacacaaatataagttattattttcttttaagtaagacctcttatcatgtcacttctcagccctgcttcataatcagttattgttttaaatttcaactcctctgcctacctttcgaggcctaagtgatctgacccatctgcccaatttatctgtcaccttttgctcaagaggtttcctcacagtgtcacaaacacatcaagttcacttttctttctctgcctttacttacttctcgaaggtgtccatctttcttgctttcctatctaaatactattccatcctttatgagatctagttcaagttgtcacattcctttttaaattgcccttgaccactccaggactcaatgattctcctttgaccttcctgttgcccatttaatgcctagagattgattggtaattgtttccatattcatttatctcatgctctggtggtagtgcattaattttcccacatttcatgattcacattcacatgtgcataattcttgttcttgctgcctcatgctttatttgacagctatatcacatttaaagaagtgaccaaaattaaatcagggtatctgccaaagacaataattttttttttttttttttttgg

SEQ ID NO: 174069 - DNA, 576 bp, Homo sapiens
cactcggacacacacacatttgtcggcccgcggttcgctgcgcactctccgcattgccccctcgaaactcccctggcagagtctgtctagaaactaaatctggctggttcggcagtgaatgtgcgaaggttggctggggggagggcaggggctgaggaggtgcgacctcaccgcaaggcccaagttacttccaaacagcgaattacccatttaaagagagaagagagaaaagagaggcgagagaggagaaggggcctcgataccagacagggattagaaagtcaaacagggccgtgggatctccagacttgaagttttttgttgttgttttttttaactttttggggggaagaggggttatttgcttccaggaaacatcttaatttcaattctaaccttattttctaagaaacttaaaatgggaaagaccagaaaaatggaaataggaatcgaagcttggaggacagataagaaaaattgtttagaaaataaaaacttatgttgcaggaagaaacgttaacttttcgtaaaagtgaactctcagtgaccctcggagtgtgtgattcggctttaaca

SEQ ID NO: 174070 - DNA, 298 bp, Homo sapiens
tttttgcagccctcaccagataccaaacctgccagtgccttgatcttggatgcctcagcctctagtactaagagaaaataaatttctgttctttataaattacccagtctcaggaatgttgttatagcagcacaaacaaaataagacagtttatttttgggcattgggctgaggatttagtgagacctattttttcctgagggctcttttttacttcctgatttttttttttccatttttattatgagacaaggtcttgctctgttgcctgggatgtagtatagtggtgtgatcttgg

SEQ ID NO: 174071 - DNA, 270 bp, Homo sapiens
tgagagaaatagatggtattaggagcaactggaaacctccagtttttcttgcatgcctgtccattcatattctggttaatctattctttgatatttaacataatggaaccaaaaagtaggagagaaaaaagcctgcagattttaggtatttcagaaatcatacatgatatctgaggtttattcaagaaccagtgtttcagaaaaagcgagaaagagaaaaagcactttgtaaaatgcatttaggaagtttctctttaacagtcatgctct

SEQ ID NO: 174072 - DNA, 439 bp, Homo sapiens
ctcaggtcaaggtgtcagtcatggggtggctgaagggtgtccccaggtcaaggtggcagtcatggggtggctgaagggtgtccccatgtctgtttgggctcacagtgcacctctagggtttttgtttgaatgtcagggccatgagagaagcagcgatgacacgatgtctggttaccttctccaggtgggaggaaaaaggccgctatgaaggtgtcctgggccatttcctgagggttgctcctcttctggactgtgttggaggcacactcgtgctgcacaagctgcctctagcctagggccttgaagtggcgtggggtgtccaggtcattgctctgccgtaagggctgtccgagtcacgacggtattccagaccggacagcgcacggtgtgcgataagtcaattgatgcggatgtgtgtaattacaagactaatactgat

SEQ ID NO: 174073 - DNA, 471 bp, Homo sapiens
ctcaggtcaaggtgtcagtcatggggtggctgaagggtgtccccaggtcaaggtggcagtcatggggtggctgaagggtgtccccatgtctgtttgggctcacagtgcacctctagggtttttgtttgaatgtcagggccatgagagaagcagcgatgacacgatgtctggttaccttctccaggtgggaggaaaaaggccgctatgaaggtgtcctgggccatttcctgagggttgctcctcttctggactgtgttggaggcacactcgtgctgcacaagctgcctctagcctagggccttgaagtggcgtggggtgtccaggtcattgctctgccctagctccagcccgcacctccagggtatcccaaaccctacttgccctgaaatgcctaagacgcttgatccagagggtgtgggaaacaatatgatgatgatgataataatagtgaatattcaccaagggcttact

SEQ ID NO: 174074 - DNA, 231 bp, Homo sapiens
ctgttaggcaagtggagatattgggagataagctgcttactcagacagtttgggcatgatgaagaaatcataataaactggaaaattaagattaaaatatgggcataattagtagtttttaatgtgccaaatactgtattgctgaacacataattaacggggtcagaaactcccagtgattgtcagcaactccagctcatagtagctcaacattctattcagaaacatcta

SEQ ID NO: 174075 - DNA, 206 bp, Homo sapiens
gccataattcagacacatacaacccagccagcgtaaccaccccctactcaccccctgaaaatagaagaagaaaggatttagagtctgggcagattgcttttaaaacatttccaaccttcaatctaatttgtcattattatttgtagagctttctttctcttccttcgtatctcctttcatatccggagcattcccagggaagatcc

SEQ ID NO: 174076 - DNA, 469 bp, Homo sapiens
cttcccatccttgatagagacacataaaaaccagctcaagcatgcagagaaaacaggtaacttcttcaatgagcagatttgtataattattacttaccgtttagtgtaaaaatattaaaatctcactgcaggtttctcagtacagaattaaaatacttacactagaattactcagggtgactgtttaaaacaatgtaaattgtgagctagttccatcacagacctactgaatcagatcttctggtgggagtaagataatgtgaatttttaatacgctccgcagtgattcacatacacagtaaactttgacaagactgtacagaatgggagtctctgagagcagggagtatgtatgtcctattgtctcagcactcatagaatctagcacggggattgggagagtgagagctcaataaaagttattgaactaaactgaatacacctaatatacctaagagtctttaaagca

SEQ ID NO: 174077 - DNA, 212 bp, Homo sapiens
gtcagcaggagtagaaggtacagtttgaggaataaccagaaagtttgaagactccctaacatagtcttgtgcctttgtagagtattccttttagcataaatgtagaggtgggcctctgttggcatttgccactgttgagaactatccttatgttcaggcatctcctggcagggattgtgtgaaaaattactttagacactcaaaggataggg

SEQ ID NO: 174078 - DNA, 549 bp, Homo sapiens
tctgtcttggatattatattcactcggtcactttgaaaatataacgtcacctcattgattctgtttttccacatatttaagataaagggttaagatgagattctgaaaattcccgttgaattttattatggaattcttagtatgacagagactgctcaagaatttgctagattccatgtaatggatgaatagattttgttctactgatagcattagtgatcttatcataaccctgacatgaacatattttttgcttccacatttttggatcagagatcacattgagtgatcacattaaccaatcactcaatttatccatgcctatatcattgactacttccacagaaaaccatctgactacatgacaagttacatagacaatatatggtgtaaaaagaagtctctatactaaaaaatactgaacaagactggtagcatttgttttaaagtttgctaaaagctcaattgacaaaacaaaatccatcatctctgatcatctatcagagacatcctttatgtccacaattttattaccccaaattctctatt

SEQ ID NO: 174079 - DNA, 514 bp, Homo sapiens
gcttgacaaggtcttgctcgacaaggtcttgctctgttgcccaggctagagtgtagtggcatgatcatggcttgttacagctcactcctgacctgaagcagtcctcctaccttagcctccccagtagccaagagtataagcgcataccaccatgcccgactatattttttaaaaatttcttgtagagacaggatcttgccttgttgcccaggtcttagactcctgggctcaagtgatcctcccaccttggccacccaaagtgctgggattacaggtgtgagccaccacacccaacctaaaagataatttgaaggttgcaagatagacacatgatttcttccccttcctcctttattctctttttttctttggattcttttagatcatcagagggctttgttttctttgctttcagaagaattgcagttactaagtttctctctattatccacttggttaaaattgggggttgtaattaagaattgccatttaaaacctgctaatgcatttactg

SEQ ID NO: 174080 - DNA, 237 bp, Homo sapiens
tcctagccaaggccattgggtttgggggactcagcgcacagctgactactgcaggactactactgtggttatgaccatagtaagtttcaagcgcaaagttactagagggataattctgggggtggggttagggagggaagagtagccagggtggtatcctagttacacacagctcattcctgctttattttggggttgtgtgaaattttctattgctatctttgttgacattatgcc

SEQ ID NO: 174081 - DNA, 359 bp, Homo sapiens
agctaggggtggtcctgtcatgccaccgattccaattaactgatcgcccataactcagagttgcggggggtagcggaggggagagcccagggagggagccgggtccccttgttgtacttgataacaattatagtttaaaatcatagcttgccagggctcagctatattttacttgataacaataaaagtgacacataaagttaactgtttatgttttatttattagactaaatctgccagcggtggtaggagcgcttgcctcgtcgctacagcttttatagggctgtaaaacgtcataaatcagtctcgcggaatcgcccgcactctttgtgtcggcggcggcgcagggctggcggccg

SEQ ID NO: 174082 - DNA, 372 bp, Homo sapiens
cttgaacagacacattccttttagccaaacaggtgggtgaaaaagaaatcagcttgggagagcaggtctatcaggtttctctggctctcctcttgtaggtggaaattcatctgggcctgtttacattctgaaaaaggtcaagttctgaaatacttttggaagcagcccaaaagaaggctgctataccccccacagggttgggacacacattaagaagacctgaggtgaaccagttatgccatttaagaattttatgcatcaagaaaggtgtaattgtttcagtgagattaaaataacaacttctcatatttagataatgcgttacagcttgcacactgttttcttacacactaaagttgtgctgataacgtc

SEQ ID NO: 174083 - DNA, 522 bp, Homo sapiens
tctttcttctaaaaaactattttcataatatcgaatagagcagaagatatttccaattgttaagctgtattaaaacttacaactgaggggcaataaaagtgatacatttatgccaaatcctgtatttaaatcaagtctacttttgaacctccaaatttagaatgagagtaaatacatctacttcttattgataagaaacctaattgtcaaagtaattagtgctaaacctactgctttattctcattttcagcatcatcattcagttaccgtaaagaaatctaattcatttaaggctcaataatctcttatctctcatttgtgctatggaatttggttttatgaatcagaggagagaaaggaagtcccctgcctccagtgcactgattaacatataggttaacatattaagttccggtatcaggaatcaaatatagagaaatgattatgctaaaatggagtttccaataactgccagtaaagcagactggcagagctctgccctatcgcttttggacatttgt

SEQ ID NO: 174084 - DNA, 429 bp, Homo sapiens
cactcaccgcatttcacacaaacgtattctggctcttcaaaaaccccaagagaagttttgtcaacagccataaaagtcatcaacttttatctagtctctgaatcacagcatttttgcaggttttgtcaagaaatgatggcagaaaatgaagtgcttctctaccacagagaagcttactgtctttcaaggggaaagattcactgttttctaaaagaaaaagaaaatcctctcctggaacatgtagcaagaaaaaatgttgtctgagggttggctgacccagcggatatttttaaccatctgaacgagatgaaccttccagttcgaggccctgataccaccattatgaatgatcctgaaaactttaccagcttttttggctcagctgccaatatgaaaggagagttcaggctgacatctttgccaactttt

SEQ ID NO: 174085 - DNA, 188 bp, Homo sapiens
agattagggcagttacagtggggctacacagaaagaaacgaatacattagctatgacaaagagaaggtgacaaaattagtgccttggtggatgtaggagataaagaaatgaagtttaaagtgaaaggaagtgtcactcaaagaaaaacagatggcatggtttatcacaaaagttatcaagctgaacac

SEQ ID NO: 174086 - DNA, 418 bp, Homo sapiens
ctccagagtgagcccagtgcatcctacagtcctataaggccaccattgccctcactacctcacccctgctcgcaggctagcagcccccgtgtgagctgggagggagtggccagagcactgggagtccagccatcccctctctcttgtgccaacaaaagatgcagggaagagaccggatctccaatggtggggacaggagccggcaccctcaggacagctcaggaaaatttcagtcccaggtagaataaatctcctgtcaggccagacacggtggctcccgcctataatcccagcactttgggaggctgaggcagatggatcacctgaggtcaggagttcgagaccaacctgggcaatgcggcgaaacccaatctccactaaaaatacaaaaattagctgggcgtggtggcacgcacct

SEQ ID NO: 174087 - DNA, 302 bp, Homo sapiens
aatgaaggtaaaataatgtcattttcagacaaaaagagattttgacacctatggaaccctactaaaagaaattctacaagatacacccaagcagaagaaaaacacactctaatagaaagtctaaaatgcaaaaagaaaggaaaggcttaggaagtgttaaatatttgggtaaatttaagcaaacattgtgctaaacaatagtattaatgtcttgagggattaaaacgataaaacacgtatcagtagcatataaattggaacataagtaaatgaaaggaatccattctaagtacttgtaatgt

SEQ ID NO: 174088 - DNA, 499 bp, Homo sapiens
gctacatgatcatctcaattgatgcagaaaaagtacttggcaaaattcaggaccgtttcatgataaaaacactaaacacacttggaatagaaggaaattacctcaacatactaaagaccacatatgataagccaacagctaatatcatattcagtggtataaaaaagctttttgtctaagactaggaatagggcaaggatgtctactctgaccacctctattcaacataagaccagaagtcctatccaggcgagaaagagaaataaaagacatccaaataggaaaagagtgattatctatgttaaccaatgacatgacctagtacgtaggaaacactaaagattctaccaaaaaaagctgctcaactaataaattcagcacagttgcaggatacacattcaacacacaaaaaaatcagttggcatttctccgcactaacaatgagcaatcaaaaaaggaagttaagaaaattctatttacaatagaatcaaaaagaata

SEQ ID NO: 174089 - DNA, 568 bp, Homo sapiens
cttttccctgagtggtggtggcctgcaggttaaacaggtgggcttgggaattgggctgcctagggtaaatcctcattcccccatttaactcagtctgccagactctgttttcttgtctgtaaaatgagggttaaaagagagtctctgtaaagcatttaatacgttgttgggcactagcggtggattaaggagaagagggctgtgatgggagctgtcagccccagcaggcaggagttagaattgtctggaattgccggtgtagggtgataataaaaagcaaactgactcttggtcggtttattactatttttaaattccctactgacaaggccctccctattgcctgcactctgagtggaccactccttccatccatgccttgcaatgccactgtcttgcacataagggctcaaaagtgtatgctgttgttgcccttctcacatttcggctgaggtgtatattttcattaaagaggattatgtagaaaaattggtttaataaaaatgatgagactttttaatatggtttgtacaccattaagagtgaaatatggcaaaatctggtctga

SEQ ID NO: 174090 - DNA, 902 bp, Homo sapiens
ggtagcttttctgactcttaaagagatctcaagtataccttcagagaaatgccagcaaaaactgtagtcatttgggaaggaataagcctggaagaaaaagatacaacgaactagcacaacgaggagtttgaaaagttcatgacagctcacagctgatgatggtggcaatcttaaggatacagaaagctcattcctcatgcagggaagaagaaaatattctaaagaagagataagcatattccatgaaatcaaaaaagcgtaaaacgctggaggagaagtcagtagcaagcagctaagacaacatggtacatgtgggtccaatgtgaaaaacactaagtgggatggttaattgtatgtgttcccttggctggaccatgatgacagatatttggtcaaacattattctggatgtttctgtaaaggagtttttgggctagaagcccaccaactgctaacaaccagctggagggtaagtcaaaagctatgagagcccagaaggagaacaattatttagacctggaggggccagttgggaaagtctttgaagggtcttcagaaaatggaccaaaagaaaagaggaaaagtcattctactgagaggtgtttgtgtaatcaaagcaaccgaggcctaagaactcacaaaagattagaaaagggtaaaggatgcctggaaagccggactaggaaaaggctgtgaagggccctgaaggtcacatgtcacatgttgcctgcagcatgcagaatcaaaacatgataaatcatgtcttgaatcatgacatatgaagcatgacacacgaatcatgacatgtgacatgttgaatgtcacatgtcacatgccgtaggcagccatcaagagtatttgaaaggaaagtgtataatcaggcctgtgctttagtaagacaa

SEQ ID NO: 174091 - DNA, 567 bp, Homo sapiens
ggtagcttttctgactcttaaagagatctcaagtataccttcagagaaatgccagcaaaaactgtagtcatttgggaaggaataagcctggaagaaaaagatacaacgaactagcacaacgaggagtttgaaaagttcatgacagctcacagctgatgatggtggcaatcttaaggatacagaaagctcattcctcatgcagggaagaagaaaatattctaaagaagagataagcatattccatgaaatcaaaaaagcgtaaaacgctggaggagaagtcagtagcaagcagctaagacaacatggtacatgtggctagaagcccaccaactgctaacaaccagctggagggcctccccggaagctgagcagatgccagcaccataattccagtacagcctatcaaactgcctaggtgctctctgatggtgggaatccactaataagaggtgtccagttcttctagcaaacttgtcagtgctcatgtcttccatgggttgtgccctgaatcaatgcatttattaattctttcaaaatgcaaaataaaaattatgtgttgagcctcta

SEQ ID NO: 174092 - DNA, 233 bp, Homo sapiens
atgacagagttaagcttcctagggtcctagagtcaaagaaactctgctgacccccactgctaagcaggtgcactccttccacagggggcaacatctgccgatccgtcatggtcccactcggtgaggaccccaagaaacttccttgggaagaaacaattttctcaggactggcagccagtttgggggatgtggagaagttatatccatatagtgcacaggggctgtgtaatcta

SEQ ID NO: 174093 - DNA, 534 bp, Homo sapiens
ctctgtcagggcactgttgatctcttcttttctaatggaatgctctttccatagctctctgcacagctggatacttctcttcttcaagtcttcaagtcttagagcaacaattcatcttgaaaaataggcctgccttgatcaccctatttaaagtgataatcccaccccccagctgctgtcactatacattaactattttcatcacaccactacctgaaagtactttatttatttgtttgttcactatctacatttccatatgaaaacataagttccatatgagtaagaaccttttatatctggattattgctgagttcccaacacacagcacataacaggtactcaataaaatgtggatgaatgaataatatttcactaaatgcttttagtttcatgtatcttgaaatatctaaaatagccaagttcaataattccacaaacataataagtaacttcacatccaagggactgtgattgacacaaataaataaacagcttctatcttcatgcaagttcatgatagtaggaaagcc

SEQ ID NO: 174094 - DNA, 339 bp, Homo sapiens
aggaagtgcttattggaacattttggatttcagaatttcatatttgggattctcaatggtataattcaggtgttccaaattaaaaaaaaatccaaaatctaaaaaactcctggtcccaagcatttctgttaagagatactcaatctgtatgtatgtacatgtatgtgtacacacacacacacacacacacacatacacctcctttgtgtgtactgtactttttttttttgctcctctctcccttctctggaagcatatagaatcttctctgtttcaccagtttggaaatttagtaataactgctttggtgtgggtctgtctccttttactgaagtggga

SEQ ID NO: 174095 - DNA, 434 bp, Homo sapiens
ctgtccaataggacttcctatgatagaaatgtccttcattgtattagacaatagccaccagccacaattgcttcttgagcactgggaatgtggctagtatgactgtggtactgaatttttaatcctatttaattttaactaaactcaaaaggccacatgtggccagtggctaccatattgggcagaatggttctgcacagagatacaaatgataaacaagtggatagacacttgctcctcttttaaccacaaaacatcgaagtatgatgtcagctgttgaagagtgctgtgcagaaagccacgcagggtgaggaaatagagagtgctaaggaggcattgttttgcagaggggcagctgtcagcaaaagcctctctgtgggaggctgacttttcaatggagacctaaaaaccaggcggttctcggggtgggatgt

SEQ ID NO: 174096 - DNA, 192 bp, Homo sapiens
catttagaagacacagagatgaaacacagagatcagtcaaagctcgtacatgtcgagttagataccgtgtttaggtcagaatctttcgttgctactcatttattagtatgaaatcatgtattttttactatttgggtaagagtaaaaaattgtcctgcaatcataaaagaaattttttaacagtcatattag

SEQ ID NO: 174097 - DNA, 320 bp, Homo sapiens
gacaccagctcagctacagcaggatggggtaccggtcagagtcatgagacacccccttttctaggccctagctcctggacatttctagacacactctgagccagaagggaactcactgccttgaagggaagaacccaatcatggaaggattcatcacctgctaactgaagagcccttgggccctgaataagcagcagcaatatccaggtagtacatcatgggccttgagtgagactctgatattgctagcttcaggtaccacctcagccagaggtgggtagagcactaagggtgagtcccaggccaggcagcatgcacca

SEQ ID NO: 174098 - DNA, 278 bp, Homo sapiens
attttgatgtattcatttctcttttgtgtatcctctagtcctagactagaaagcatgctttctgagctaatggttgaacgcatattttatgattgccttgtattgctgtgttgaactcctggttacctaaatgttatttccagatgttaatttttggacagtccagtttcacagatgctctttgctagtgagatggagactttcccagcatctctagttcttctctgcccacttaattttgccaaaacttttaatttacaaacctcaggccaataatt

SEQ ID NO: 174099 - DNA, 429 bp, Homo sapiens
aagccatgcttcctgtacagcctgtggaactatggtctgagagtacctgtgctgaaatggaattgtctttgagtggacacttcttagatgagacctattgtggccaatagctcctgaggaactgaagccttcagttcaaaacttgtgtgagaaaaatgaatcttgccaactactggagtgagcttagaaatgaatccatccccagttgacccttgaatgtagccttgtcagagacccagagacaaagcatcctgctaatctgcactgggttctaggcccacagaaaccatgggataataactttgtgttgctataagccactgaaaacaaacaaataaaatacttaagatgttcccctgtggaagggttccattgccagggatctgcacttcacaaccaaagggattaaagagaattgccttcttcaga

SEQ ID NO: 174100 - DNA, 550 bp, Homo sapiens
tctagttctctgtcttgagtgaaaaatgatgaggaggtctggagactcaaacaaataaactaattgcttccaattcatatagtcattagaaaaatagatgaagcagtcatggtccctaccatgcaagaacttttagtctagactagcaactggataagtggtttaattatgcatcaaaaggttgggtacaataaatagatgtgtgcaaaaatatgggctttatttgggccgttttctttatatttttgtgacttgtgatgtctacacctgaacatatattaataaacaaaaaagttattatttgtattttttatgccctgctaagaatacttatttatcatctaaaaaattattctagaaaaccttaagggatttgtttaaattgcttattagtatgtgatataaaattgaaagggcagtggggctaaaaaagattaaaattacacaaactctgagatttaagtttctgttttcgtttttgttttttagctaagtttaaaaaaagaaacggaactaaaaatactccccagtggctaagaacagaatttta

SEQ ID NO: 174101 - DNA, 337 bp, Homo sapiens
cctctccacctgccgtcacctccttgggtccctcaaggttctccttgtggctgatagtcatggtgattgcttgacctcgggccttgcagctggctggcttccaggaagctcctctgatgacaaggtgtgctgaagtctgtgttcacgggcacggcattcaggcgcagagcgtgggatgcgggagaaaaacctgctgccgttgctaatggccccagtgttcttccctcgcaggcagaaattatgcaggcttctgtctcgcggcttctccctttacccagcgccttgtatgtactgggagaccagactgtgaccacctccagggtgacaggaagcagca

SEQ ID NO: 174102 - DNA, 475 bp, Homo sapiens
tttgtttattttacagctcaagtgcagtggcgtgatctcggctcactgcaacctctccctcccaggttcaagcaatcctcctgtctcagcccccctagtagctgggattataggcacgtgctaccatgacagactaatctttgtatttttagcctcccaaagtgctgggattacaggtgccagccattgcacccagcctccgcactcttgaagaaccagaaagccaatggtcctcccttctcaagaaaacaagagttggccaggtgcaatggctgacatctgtaattccagtattttgggaggccaaggtgagaggatcacttaagctcaggagttcgagaccagccaggtcaacatagcaagactccatctttacaaagaaaaaaaaagaggctgggcgcggtggctcagacctgtaatcccagcactttgggaggccaaggtgggtggatcacaaggtcaggagatcgagacc

SEQ ID NO: 174103 - DNA, 305 bp, Homo sapiens
acggctaggtacgaggctgggtggtgcttagctcaggagttcgaaccagaaagccaatggtcctcccttctcaagaaaacaagagttggccaggtgcaatggctgacatctgtaattccagtattttgggaggccaaggtgagaggatcacttaagctcaggagttcgagaccagccaggtcaacatagcaagactccatctttacaaagaaaaaaaaagaggctgggcgcggtggctcagacctgtaatcccagcactttgggaggccaaggtgggtggatcacaaggtcaggagatcgagacc

SEQ ID NO: 174104 - DNA, 400 bp, Homo sapiens
cctgccctctgcaggatgctctaccattattcactccacttgaggatgagtttaaaattcagcccaccaggggccaactcaaaatctacaagccaagtatacctgttctattcccactcaacactttccctgaatctgaatccccatagtacattattagtaggtgcctctgatagcaagaacacacacagtttcttcatctttatataaaatatatagatgctctgctgtagaaggtatgcagtaactccatattaattaaagaaacaaagggccacttgaatatatctgacttggactattcgactgtcagctccttaagagtagggactaccttaaatccctctgagagacttaagtacctccgaatccttgcacttaactaaagagtaccttgcac

SEQ ID NO: 174105 - DNA, 364 bp, Homo sapiens
ttacgatacactcgagtgtcggtaccctcgataagggccaactcaaaatctacaagccaagtatacctgttctattcccactcaacactttccctgaatctgaatccccatagtacattattagtaggtgcctctgatagcaagaacacacacagtttcttcatctttatataaaatatatagatgctctgctgtagaaggtatgcagtaactccatattaattaaagaaacaaagggccacttgaatatatctgacttggactattcgactgtcagctccttaagagtagggactaccttaaatccctctgagagacttaagtacctccgaatccttgcacttaactaaagagtaccttgcac

SEQ ID NO: 174106 - DNA, 251 bp, Homo sapiens
tggagatactagttcataattttaaaattcccaagagaagtgtctttgaagtggtaaacacagtgcactttaagccacttctcttcccacagagtccagctgaaggaggtaagggcatgctgcatgagagtaatgccgtgatgagtgtcttactctggtaaaatgccatttacaatgcctggagactgaacactgaacaaaacatagtgcccttagaatttcactggaaaaacatgtgaatcacataagtt

SEQ ID NO: 174107 - DNA, 3237 bp, Homo sapiens
  misc_feature (31)..(31): n is a, c, g, or t
  misc_feature (127)..(127): n is a, c, g, or t
  misc_feature (133)..(133): n is a, c, g, or t
  misc_feature (196)..(196): n is a, c, g, or t
  misc_feature (239)..(239): n is a, c, g, or t
  misc_feature (269)..(269): n is a, c, g, or t
  misc_feature (342)..(342): n is a, c, g, or t
  misc_feature (401)..(401): n is a, c, g, or t
  misc_feature (505)..(505): n is a, c, g, or t
  misc_feature (1829)..(1829): n is a, c, g, or t
  misc_feature (1902)..(1902): n is a, c, g, or t
  misc_feature (2168)..(2168): n is a, c, g, or t
  misc_feature (2329)..(2329): n is a, c, g, or t
  misc_feature (2339)..(2339): n is a, c, g, or t
  misc_feature (2389)..(2389): n is a, c, g, or t
caagttcgagcagttttcctgcctcagtctnctctgagtaggtgggaccacagtggcacaccaacacaccttgctaatttttcttttaataagagacggtggtctcagccgggcgcaatggctcatncctgtnatcccagcactttgggaggccgaggcgggtggatcacgaggtcaggagttcgagaccagcctngccaatatggtgaaaccccgcctctactaaaaaaatacaaaanagtagccgggtgtggtggcggtcacctgtngtcctagctactcgggaggccgaggcagaagaatcgctcgaacccaggaggcggaggttgcagtgagccgagnttgtgccactgcactccagcctgggtggcagagcgagactctgtctcaaaaaaaaaaanggcggcggcggggaaggtggtctcactgtgttgcccaggctggtttcaaactcttgggctcaagtgatcctcctgcctcgacctcccaaagtgctgggattacnggtgtataccaccacgtctgactaattaaaaaaaaattattttcgtgcagatggggtggggtctccttatgttgcccaggatggtcttgaactcctgggctcaagcagtcctcctgccttggcctcccgaagcgttgggattacaggcgtgagccaccacacctggacatcagtattttttttgttttttgcgacagagtctcactcttgtggcccaggctggagtacagtggtgcaacctcagctcactgcaacctctgcctcccgggttcaagtgattctcttgtctcagcctccagagtagctgggattacaggctcgtgccctcacgcctaatttttgtatttttagtagagacggggtttcaccatgttggctgggctggtctcgaactcctggcctcaagtgatccgcctgccttggcttcccgaagtgctgggattacaggcgtgagccaccgcgcctggctgtcagtatttttaaatggttgaatgccatcccactgcctgcctgtctcctgccactgaccctgctggcggttggtggtttgggtggtgatggtgttttgctgtcatagttaccaaagcaggcagcgtctctgttttgcatacagaacttctatcacgtcggaagttattttcttatttactttattttttttttacaaaaaagtaggggaaggcacccagccgtgggttttcagatcaaagggaaagaaacagttactggctttatctgattataacagtaatttggaagataaagaaaagaaaaatccattcaggcctttttttttctgctgtcatttccttttgtttccctgtgggtacagctgcagggacatgtaccaggagctgcagctatctgcttaatgacggatcccagagataaggggacagcgccactaacattctttcagcgcctaagatgcctctgattccagaaggatgacttgcattaaagagttcagcagcaacaagaaaataaaacacacagacacacacacacacacacacacacacacacacacacacacgcacaaacacacacatatatatttttcccccccaaaatggggattaaactgtatattctttttccctagaacataccattttttgtttcttttaatgctctctgctttgactttcattttggatatggacgctgtgacttctgttgttgtcttggtagcatttgaccattgttatctttatttattacttttctacctctcctggccttggccatttgttttggtggttgttgttgtttgtttgttttttgacacagagtctcactctgtcgcccaggctggagtgcngtggcacgatgtcggctcactgtaacgtccgtctcctggttcaagcgattctcctgcctcagcctcccgagtngctgggactacaggcgtgtgccaccatgcccagctacttttttatatttttagtagagatggggtttcaccgtgttagccaggatggtctcgatctcctgacctcgtgatccgcccgcctcggcctcccaaagtgctgggattacaggcaggagccactgcacctggccttttttttttttccttaattttattttatttttgagacggagttttgctcttttttgcccaggctggagtgtggtggcgcgatctcggctcactgcnacctccgcctaccgggtgcaagtgatgattctgcctcagccacccgagtagctgagattacaggcacccgccaccatgcccagctaatggccatttgttttagacgtgtcccttttagaaagtgtagattttttagctgggcatggcggtacatgtctgtngtccaagctncttgggaggctgaggcaggaggattgcttgagcccaggaggttgaggctntcagtcagctgtcattgtgccatggcactccagcctgggcaacacagccagaccctgtctcaaaaacaacaacaaaacagagagtgaaaaaacggaggcagcctacaggcccttctcatcgcgggggtggttaaagtaagtgcattagggtttctccataccttggctcaataggctgctgttaaaatgaagctcctttcatatgtatcagtcatgttgaggggaaacgttgcaaagcaggactgttggtaaattcccactttttttttttaaaatactgtgtgtgcatggttgtgtctgcgtagccttcatatttacacggttgtgtgtgcttgtggaaagttctagaaggatacaccatgctgttactagtagctgactctgtggagttggtaggagggtcactggagaggaacttgcaacatatatacacttcagtggtgtcttttttgggcagacggggcaacaagtaatatatactagtaataagataatacacgttaaaaacagcctgtaatcccagcactttggaaggccaaggcgggaggattgcttgagaccaggagtttgagaccagcctgggcaacatagcaagaccctgtctctaaaaaaataaaaacttagctgggtgtggtggtgtgcacctgtagtccagctactcaggaggctgaggtaggaggataacgtgagcccaggaggtcgaggctgcatttagtggtgatggtgccacagtcctctggcctgggcaacagagcgagaccttgtctctaaaaaaaaaaaaaaaaaaaaaaaaaattgcagggcgcgtttgctcatgcctgtaatcccagcactttgggaggccgagg

SEQ ID NO: 174108 - DNA, 196 bp, Homo sapiens
ggatgccctgtagagacaaagctcagttcaaaggcgtcattccatcctggtgctaccaataagaagcatggaggattcagcaatactcagtatgcaatcatggatgatcctcttgtcctttcatatactgttcctgtctatttcaatgccttttcttttgcttttcatgctgcagcattcttttttttttttttct

SEQ ID NO: 174109 - DNA, 134 bp, Homo sapiens
gtggtttaaaagaacaattgtaatatttccttcattctgaggtgtatttttctcacattttcatattgtaattaggatacctgttaacattggtgtacatttaatgtagtagtactttttctccttttgccctg

SEQ ID NO: 174110 - DNA, 221 bp, Homo sapiens
agtagagacggggtttcaccgtcgtagccaggatagtctcgatctcctgacctcatgatccacccgccttggcctcccaaagtgctgggattacaggcgtgagcttccgcgcccggccaacaacagccatttattatcttacatttccataggtcagaaatccagcagagcatggctgtattctctgttcagggtttcacgaggccaaaacgaaggtgctg

SEQ ID NO: 174111 - DNA, 560 bp, Homo sapiens
atttatgaagatagaaatgggtttctgatttaaaaaatcaatcttggtgccattataatcctatgggctcttgaaattactctccacactgtgttattcttctgaatgcagtgcaggttcttcagctttgctggagtacgtatcgactttgctgggagcatgactttgtgcaaggcataaaggttatacctctgcagctcttctactttgtctctgccatctctgaccactcaactcaggtaaccaatgagagatgccctgttgatctcttatccttgggaataattttaatctcttcctcctgtttaatgctagtgtcctcctttccccataaatgtggttgtgtgcctgtttgtctcgtccatgagagtaagcttttaagaactggaactctgcaccaaatgtgcagtgaaatgactttgttggagacccattgtctgcctgctggccctcatcagtggtgacttcatattcctctttttagagagttttacatagagcctttttgaaatggtatcctgggaaaataaagagctggctgtttgtaatactttctacca

SEQ ID NO: 174112 - DNA, 323 bp, Homo sapiens
agactacacaatggaggaaaggacagtctgcaagaaatggtgttgggaaaattggatatacatatgcaaaagagaagacagactcttaccacatatctcatataaaaattaactcaaaatagattaaagactgaaatgtaaaacctataagtacagaacctcaagaagaaaacacagaggaaaagcttatgacattgaaatgaacaataacttcttgtatatgacaccaaaagcataagcaataaaagcaaaaatagacaaataagactacatcaaacttaaaaacttctgtgtagcaaagaaaacattcaacagagtggcaa

SEQ ID NO: 174113 - DNA, 487 bp, Homo sapiens
atgtaagcaagggaagaaatggctgtaaaatacatttttattgtacttttgagtaaaataaaacttacccaattgttgcttcactaggaaaaatagtctgattttaaacataaggcagctaattacaaattggcaagttaaaagaagatcagtaaatcacaatgttcccttttggcaccatgaaaaaattaggatatttttgtgtgagtggttgttaaaggattttattattgcctgttcctgtttactgagccctgaaactttggccacactgcattggacacaagtcccttgataatcaccatgccctatcaacatgtcttttcaaccaggaacaactaaattcattgtaagtaatttaattaactgttgacttaaaaccacacttgcctaggagacagcttttcccacttgtgtaatattagctttacaatgaaaacagatacaattttaagttgaatataatcttattatgtacaatgattag

SEQ ID NO: 174114 - DNA, 427 bp, Homo sapiens
gtaaatatgacaagatggacatgtatgttgagaaagtcattgtgtgggctgtaatgtaaatctttcatgccatcagttatgtcttctaacaatggaaagcagaggcaccccatacctgtgcaattaaagtgatggcacatgattcaagcatataaataatactttactctccaaatttaaatcatattggaataaagtaaaagtcaatggttggttagagattatgtacagcatgtagctgagagaagagaggcacggctgagggtgtgttggggataaagtgcagcgatgtagtagcaaacacgtggagagtacccatgacattttcctaattgtccaatacccatgaccattgttcccacctactcctgagtctacagtgttcttttcagccattaaataatatacttaacatcattctaataca

SEQ ID NO: 174115 - DNA, 483 bp, Homo sapiens
atgcctatctttctaaattcggaggatgcagtcctccctaaattgggctctggtggcgggggaaaggagccaggaacaacgttccccgcacttcagtgccccacaaggctcctgagtgtctcagtcaagggcagcagatggtcaggccttcctgcaagcccaggccacttcgagggctcacttctgggcagctgccacattatcttcccatatgaaatagcaagggatagggctgggtgcggtggctcactcaagcctataatcccagaactttaggaggccgaggcaggcggattacctgaggtcaggagtttaagaccagcctggccaacatggtgaaatcccgtctctactaaaaataaaaaaattagccagacatcgtggcgtacgcctataatcccagctacgtgggaggcggaggcaggagaatcgcttgaacccaggaggcggaggttgaagtgagccaagatcatgccactgcac

SEQ ID NO: 174116 - DNA, 272 bp, Homo sapiens
cagcagagtagtgcccaaccctgccccctcaacacaatgcacttgtacaaagtgggtgtgggatggaacttaaatagcaaagaaccaaatcaagatgcacattgagagcaatgtgcatctatgactggtgtacaaagtcatccttctgcactatcagtgtggcattgtgcccacgagtaaagggaatcacaaagagataaaaccataagcagctaaatagccacaccataagtgggaagaacagcatatttttgcttgaaaatccattaata

SEQ ID NO: 174117 - DNA, 341 bp, Homo sapiens
aagacgcgaccactccaaaagacaggttaatgatcccatatatcagatgaacagctaaatatctctcagccaccccaactcttattaaataaccattagtaacgaggggttttcccgctattagatgggttaacagaagaacaagctgcaatgggtggttaatatagaaatgctatcatgtgaatgagctgaagtttcagggcaagaaaaattagaagatgggcacaggaaatctgttaaaagtaacagctgaattgcagaaaaagagtggagaggagatgaatctttctaaatttaatgttagttataaggatacagatataaacacagcaaatctgacc

SEQ ID NO: 174118 - DNA, 296 bp, Homo sapiens
agcagagacaaggtttcaccatgttggccaggctggtttcaaactcctgacttcaagtgaaccaccacctcagccctccaaggtgctgggaatataggcatgaaccaccacgctcagccttacaaaagagtattattcgccttataaagaaaggaaattgtgatatatgctacaacatggataaaccttgaggacctgctaactgaaataagccagttacaaaaagaaaaacagtgtatgattctacttgtatgaggtacatacagcagccaaattcagagagacagaaagtagaa

SEQ ID NO: 174119 - DNA, 866 bp, Homo sapiens
ctggcgggcctcatctacaaggcccagttcaacaacgaccggtcccagctggctagtgtccccaagatcctgagggaactggtgcctgagaacctcacacgcctgatgtcctcggaggagtggaaaaagagcatccttctagcctatgacaagcataaggacaagacagtggaggaggccaaggtggccttcctgaagtggatctgccggtggcccaccttcggatccgccttcttcgaggtgaagcaaacctcggagccttcctacccggacgtcatcctcatcgccatcaaccgacatggggttctgctcatccaccccaagaccaaggacctgctcaccacctatcccttcaccaagatctccagctggagcagcggcagcacctacttccacatggcgctggggagcctgggccgtggcagccgcctgctgtgcgagacctccctgggctataagatggatgacctgctgacctcatatgtgcagcagctcctgagtgccatgaacaagcagcggggctccaaggccccagccctggccagcacctagcagcggatgctggcgtgtctgctcaggcgcccttcccgacctctagcctggcggcaccttcccaggccctctcaacccagggcctgtccttggcgggcagccttccatgctgccccccatacaaagcccactcagccccgcaggcggccccctctgtcctgggcgctgcccagggaggccaaaagacgggcccagaatggggtcgggagtctcggacccccaggctattggtggatgactgactgacaggacacctcccaaccccaccccaccccaccagaatgttcaataaaaactcctggagcaggaaaagt

SEQ ID NO: 174120 - DNA, 638 bp, Homo sapiens
tcacagggcccaggcggggccagcagatctggagagggcctgggtgcatccccaggaccagcagccaaggtggcaaggccaggcgggaccccctgcgcccttggcccattccaaggagggagggagacccagctccagcagggcaagcagaaatgacggccccaatggcaggagcccgccttccctttctccatgccctgcactgctggttgctgaggaagagaaggtggtccctgagtccaggacccccacctgccctctgcacccacagcctctgacccccccgtcccctgtccagggctataagatggatgacctgctgacctcatatgtgcagcagctcctgagtgccatgaacaagcagcggggctccaaggccccagccctggccagcacctagcagcggatgctggcgtgtctgctcaggcgcccttcccgacctctagcctggcggcaccttcccaggccctctcaacccagggcctgtccttggcgggcagccttccatgctgccccccatacaaagcccactcagccccgcaggcggccccctctgtcctgggcgctgcccagggaggccaaaagacgggcccagaatggggtcgggagtctcggacccccaggctattggtggatga

SEQ ID NO: 174121 - DNA, 555 bp, Homo sapiens
atgtctgggcgtggcaagcagggaggcaaagctcgcgccaaggccaagacccgctcttctcgggccgggcttcagtttcccgtaggccgagtgcatcgcctgctccgcaaaggcaactatgcggagcgggtcggtgctggagcgccggtgtacctggcggcggtgctggagtacctgaccgccgagatcctggagctggctggcaacgcggcccgcgacaacaagaagactcgcatcatcccgcgtcacctccagctggccatccgcaacgatgaggagctcaacaagcttctgggcaaagtcaccatcgcacagggtggcgtcctgcccaacatccaggccgtgctactgcccaagaagaccgagagccaccacaaggcgaagggcaagtagaagcctggattagtttgcagcaactcaatcccaaaggaaccaaaggctcttttcagagccacctacaattttgtggaagaactgagcactatgtttaatgtaatttctcgtctttgcctacttctaaaccactccaaaggttacgtagatcagtcttcggtg

SEQ ID NO: 174122 - DNA, 540 bp, Homo sapiens
tttgcagctaatgtagatgacattttaagcaacatctatcaatagacgatctcatttccaatagatcacttgctgggagggagagaggagggacaataaaactcaggacttactccactactcttgtttaatgacctcgacttccccgagaaacttagagaagagtctcttccacaaaagccacaccctggcagtcttcaggctgtatctcgctggaaaatgtgttttctttggcttgtttggtgtttatacacttttaaaaacattatcaacttttaaaaatcagaaaataactgtctctcaatgaaagacatccagatttttggcttctcttgaagacaaataaaggggggaatgtagcatcccacatagtaactcaaaacaggagttgagagcagttcctccctccagaggctatgagtcttcagtttatcacagtccccactgctccctgcagtctttccaattacaggtgcagtgtcaactgcctgccatcattgttcagagtggactgaaacataatcctctgaaaagtagaaa

SEQ ID NO: 174123 - DNA, 262 bp, Homo sapiens
cacaacataaacaatggtgttctatttagaacccctgcaaaattagatgtgattggcttctcctaagacattgagttgtagttagttgacaggtttgttggccagtaagcagtggtgctatggtgaatagtgccctttttgtatttgtattctttttggtacagatgtataatctcatagaataatttcaaattaattagtattgcagctgaactatgtgatgctatcacaatttgggttagtgggtgaatttagtagtttt

SEQ ID NO: 174124 - DNA, 425 bp, Homo sapiens
tgctgggattacaggcatgagccacagcacccagcccagagaaacctctttatgtcccatgagcattagagcagtacccagaaccatgtaaggtactagcagtggtaaatgcctggcaggctctttgctcatcttcctcctaagccaggaacaggcatcagccctcacccagagcacttggatctccccacgtgtgctaagatcccttcgcagcatggagcttcatgcagcaaggccgatgacataagctggcatgagttctgtctgctgccctggtatatcctatagcacctaatgtgctggaaggactcacgtatttaggaacatgatagttctcaggctgtcagttttttaaaaaggtgcagggtgcaggggaggagaatctggaagttactattgctttgtcagaggtgagattctgagta

SEQ ID NO: 174125 - DNA, 559 bp, Homo sapiens
cctagagttgtgcaatatggaaatcaggctggagccacagaacaaaccatacggacaaagttgtgtctttctgggtctttgaccggtccgatgtttggtccgtaatctgttctgcttttctagatctggttaatagctaaacagtgatccttgaaaaatatatatgagatcacgtaatgtctccgttcaatactttttaacagcctcccatccttaatggtggggcccttatgatctggcctatgcctaattctccaaattcaaaacccttacccctgctacctgggtacaaaatcctgtttttaaaccctacttgctaaatgtgtgaccttggtcaaattatttaatctttctgtgcctcagtgtctttatttgtacaatggaggtaacagcattacctatttcctgtggtttttgtaactattcaaagagttgtgatatataaaatatttggaatgattcctggcacacagcaggtgctcagtaagtactatcactactgtcattattatttcatgaggaatgtggtaactacaattgtactctaagcttacaacaa

SEQ ID NO: 174126 - DNA, 225 bp, Homo sapiens
aaaaacaatcagagaagggaaagtataaagtactaggggtaagagttagaagaatggaaattttacatagggcagcaagaggagacctagctgggaatgtgactttcgagtagagacagaaaggaagtgaaggaatgtagagcccagagagaaaaacatcctagggagaaggaaggaggaggcaggacattgaagactttctaggctgtagtccttaaaatatgt

SEQ ID NO: 174127 - DNA, 250 bp, Homo sapiens
tggaggtcgaggctgcagtgaactgggatccagacactgcattccagcctgggtgacagtgagagaccctgtctcaaacaacaacaaacgaataaacaaaaaacacccaaaccatcaggtttttatgctgacacccatgttgactgctcagccctctccccgcagtctgacttatatccagtgacttcctcttggatacctgagaggcagctccagtctccagtgctccacgccgggcttcccatacccc

SEQ ID NO: 174128 - DNA, 519 bp, Homo sapiens
tgatgcaggctgcagtggttcagctggcactggaggagctgagagggcctcactcttgtgtctgaggtctgggtgctggatgccagcagaaatgcttcagttctcttccagctgacctctccacttggtccctcatcaatcagtagtctaggcagggcatctgtttatggtgtataagcattccaagtgcagagacagaagcagtctgaggcagcttttgagtcccaaattactgaaaactggaactagcacaggctgctttcattgcataatattgatcaaagcaggtgacagggccagccagtctagatttgggacagcggcagcttgtgcacaggaatgggaggattgttgcttactgcaggcaagttaccatctaccactgtcatctgcactggtggtctccacccaccaccccatggatcatgatcctccttcatgtgacctctttctgtcttggcttctggtctcatgatactatgattttccaaacagctactccagccacatttttattat

SEQ ID NO: 174129 - DNA, 1129 bp, Homo sapiens
  misc_feature (6)..(7): n is a, c, g, or t
agcggnngggagcagtggccgttacggccgaaaagatggcggtcttggcacctctaattgctctcgtgtattcggtgccgcgactttcacgatggctcgcccaaccttactaccttctgtcggccctgctctctgctgccttcctactcgtgaggaaactgccgccgctctgccacggtctgcccacccaacgcgaagacggtaacccgtgtgactttgactggagagaagtggagatcctgatgtttctcagtgccattgtgatgatgaagaaccgcagatccatcactgtggagcaacatataggcaacattttcatgtttagtaaagtggccaacacaattcttttcttccgcttggatattcgcatgggcctactttacatcacactctgcatagtgttcctgatgacgtgcaaaccccccctatatatgggccctgagtatatcaagtacttcaatgataaaaccattgatgaggaactagaacgggacaagagggtcacttggattgtggagttctttgccaattggtctaatgactgccaatcatttgcccctatctatgctgacctctcccttaaatacaactgtacagggctaaattttgggaaggtggatgttggacgctatactgatgttagtacgcggtacaaagtgagcacatcacccctcaccaagcaatccctaccctgatcctgttccaaggtggcaaggaggcaatgcggcggcacagattgacaagaaaggacgggctgtctcatggaccttctctgaggagaatgtgatccgagaatttaacttaaatgagctataccagcggggccaagaaactatcaaaggcgggagacaatatcctgaggagcagcctgtggttcaacccccaccacagtgtcagatgggggaaacacagaacgataaataagatcctcactttgggcaagctgctctgccgttcaattcacagcctttcattacacaaggctaaagtggagctctatttatagtttcctttggctggtaatggtgggctatcgcctctgattaagagacgcttagaatgagcgcaaagaggctccggtggccactttctcgggcagcaagatcacagagggggaaaggctcacacg

SEQ ID NO: 174130 - DNA, 128 bp, Homo sapiens
ggatgactaccaggtcatggatgaattcctctacaacctcagctcagatgacttcaatgacaaatggattgccagcaactggccttctaagatccttgggcagatagagctggtgcagcagcagcatg

SEQ ID NO: 174131 - DNA, 369 bp, Homo sapiens
gcctcccatcatggtccccttttactgatcagatgccgaacaagtggcagagataagacccaaagctcggctcctaccaggaaaggcatacctaacccgtttcctactgctgccctataagctttctaggaaacaggagggcaattaacagctacatcaaggcttgtacccagtgtcttcgtggaaggaaagatgtcaacccggggcgtggttgtacaccgagacttctgttcactttccttactgctgaattagagaaataatttaatgcagtccttaccatttcgaatcctactaaattcggtttgatacttataaggtggtagacttgagtaagattcaaatagactcaattaaatggtcctatag

SEQ ID NO: 174132 - DNA, 615 bp, Homo sapiens
gctgcccacgaagtgcatgcagctgtgccaggcagggggctacagggactgaggctctccaggctgctggcacacctccctccccaaacattgcccccagaagccgccacgtgctctcacgtgcactgcacacccacgtacacagccaggcacacatccctactgtcacggtctccctggggaccctgtcagcatgtccatgggacttggtcctgatgttggaccgtaagactccagggaaccctcgtcccttccgcagtcccccaaggaaggtcacatcatccaccccacttcgtgggcagcgctgctcccgaagtgctgggattacaggcatgagccaccgtgcccggcctgctttgcgttttttaaagtcaggtagtgggatgcctctagcttcgtttattttgtttagtgtcacttcggggcagcgctgcccacgaagtgtcacacattccaacagcaggtccaggttgtactccatgccccgtgctgggtcgaagcgccgatagccgttgagcagtcgctgcttctgtaagcgcaggcggagctgatagcgccgattgatctgctccaggacagtctccaacgcatcacccacgtccgccctggtaaccc

SEQ ID NO: 174133 - DNA, 396 bp, Homo sapiens
gggaaatgggagcaggaattggggagataggggaggggagggacaagctgacccaactatatatcaaattggaggtgggcagaggggcagattacacatgaggacttactttaaaacgtaatacttagctgtaatcccactgagacgtggacaaaaagagaaaataaatatgacatactacacagcacaggttcaacccagattattattgcatttctgagggtcatgggaaaaccataccattttgaaccaatacctacaaatttactagcacatctgtgcaaatatatagaaatggcttcagtgtccttagctagactgtaagcaagtttgctgtaatcttggtctccttcatctctaacacacactaacatacatacatacacacacacacac

SEQ ID NO: 174134 - DNA, 743 bp, Homo sapiens
aaggaaaaacttggccaagcatggtggctcacgcctgtaatcccagcactctgggaagctgaggcgggtggatcacgaggtcaggagttcgagatcagcctgatctcacaagtgatccgcctgcctcggcctccccaaagtgctgggattataggcatgaggcactgcaccctgccgtaaagtgcaattagatttaaaattacttgtgtctaggtaaaagaagagtgaaggcaaaaaaggatgttatgaatccctcatattattttaacaagaacaatgttcagtaaggggaagaaaaatgtttgaggagatggatatcccacttatcctaacttgatcattttatatttatacaagtatcaaaatatcacatgtaccctaaaataagtacaactactatataccaaccttttaaattttaagagaaaaaaacactgttgagggtaggtagggaggtagtagaggtaactgtatataatcccactaagcactctggcattttcagagaaaataaatatgacatactacacagcacaggttcaacccagattattattgcatttctgagggtcatgggaaaaccataccattttgaaccaatacctacaaatttactagcacatctgtgcaaatatatagaaatggcttcagtgtccttagctagactgtaagcaagtttgctgtaatcttggtctccttcatctctaacacacactaacatacatacatacacacacacacac

SEQ ID NO: 174135 - DNA, 273 bp, Homo sapiens
gtgactaacacttgtagtctgaatgctttcagaggccaagacagaagggcttaaggctaggagtttgagaccagcctgggcaacagagtgcaaccctgtctctacaaaaattttctttaattggccaggtgtggtggcacacacctatagttctagctactcaggaggctgaggcaggaggattgcttaagcccaggagtttgaggttacagtgagctatgatcatcctacttcactccagcttgggtgacagagagcttgtctctaaaaaaa

SEQ ID NO: 174136 - DNA, 761 bp, Homo sapiens
aggttcttgctctgttgcatctagagtgcagtggtgcaatcatagctcactgcggtctcaaactgctggctcaagtgatccttctgcctcagactcccaaagagcttggattacagacatgagccactgtgcccagcccacagtcatgttttaaagtgtctgagctataaatactactataaaggtgtcaactggttgtatatgtgggcccttggcatttcagaaatgacagttattgccaaccattaccaaatggaatccattttatccaaatgggcatggttggggctgagcatgggatggagtaatgcagtcttattgcatttcagtgttagagggctttcactcggtttgcagtttctccacagctcacccaccaattctacctgtgtacttcttttctgttccctctcaacttcttttccattctctccttcctcttgtttctgtccatatctctggcttcttttaatttcccttttcccttctttcttattggtctggccctgggtctggtgagaccaagggcacagaaggatactggctccatgccaacctttcctccaaggcacaatctccttcttggcatttactgagatgttcaacttcctgtgtttctaatattccttcctgttttataaaagaaaaatagattggatttgcaaagtgccttaatttgttgattttctaaaaagcaattttaaaaatgtgtatcaacaatatcacatacatgtaactgatttattgactctggcttgccc

SEQ ID NO: 174137 - DNA, 308 bp, Homo sapiens
ttatgcatgtatgctgggaggtgaacagacttaagatttctataacatgtactttgtgcccagatagagctgagtttacatctaactctgcctcttactagctatataatcctgagcaagttattgaaacgctgtgagctcctcttctataaaatatgacaataataccgatcatgtgggccattagaaggattttatgtgataatattttattaaaagcctttataggttgggcatcccaaatctgaaaatctaaaacctaaaatgcaccaaaatctgaaatgctctaaaatccaaaactttttgga

SEQ ID NO: 174138 - DNA, 302 bp, Homo sapiens
ctggccaatctgtcctccttaagaggcaacttgaagactacaacgaggagttttaataaaatcgtactctcctatcttctcttcctcttgcctatcctttaaaatttccttttcttgttcattcttctcagaaatcctcagttggttctggcatctttagtgaaaacagccagatgaggtgtttatcaattcctagggctccttttgttttcatttagataagaaactccccaagggtaagacctttatttcttgtttggcgaagtgcaacatttgttcacagctctctatccccgataaat

SEQ ID NO: 174139 - DNA, 363 bp, Homo sapiens
caaacccactgcaatgcaaataatcagaaacgaacgtaaggcgctgggtaatttacagtggtatctgcgaggcggcggctcgttggtcctgagaaaatctgagagctctgagcacagtccaggcattctttcaaagaaatcgctgtgggttttgtttgaaagggttcaaagaccggcccatgaattataaataacatttatccaaccatggtgtctgttcttgttttcccattaaaaggagtaccaagaacttggtgtgcgcctgggtggggcgcgaggtgaaacgcctgcggataaagtgtctccaccgccattccagaccctgcccagaccttcgggcttgtgggcctgagggcgcggtcg

SEQ ID NO: 174140 - DNA, 529 bp, Homo sapiens
gccagagaaataaagcattttttaaaagatggaaataagccgatatctgattagggcaaacatgatgcagacaagaaatgcactggttcagaggagggaaggtcaggccgcctggggagagtccatgaaaaagatggaacgtgccagatgctgtgcctggtgctgggaaagagttgactaggccagcatccctttcctcaaagggctcctagactggggggagggctggatatctgaatacatcctgaggagacagtgtgggacagcatggtggcagtggagccagccgtggttctgctcttggtcggctggaaaggagacgtaagggatggcttagaagaagggaagtggaagaaaagttttctgagctgacaagaggaaggaaagggcttctagaaggacactacaaaggcatagaagccctaagcagagtgaccaccagactccacaggttaagggctcagtcacatcggaccacccccacgtcagaccccaggtgcaaggccaagcatcacctatgcatctgacc

SEQ ID NO: 174141 - DNA, 1195 bp, Homo sapiens
ccgggcatggcagtgcatgcctgtaatcccagctactccggaggctgaggcaggagaatcgcttgaacccagcaggcggaggttgcagtgagccgattgcgccactgccttccagcctgggcaaaaagagtgagacccgtctcagaaaaaaaggaatgagttaaaatttgctagtactttggattgcagggtgtgagagaagaggaatgaaggatgataccaaggtttttagcttaagcaactagagttgtcatctgagatggggatgaccttggaaggggaaaatcagcaagagtttgcctttgcacatagtcttaggtgcctattagacattgaaaaagaaatggcaagtaggcagtagacagcagagtctgaagttctggaagaggtccagactggaaatgtacatttggaggatgtcagccctgtgggaatggagttaggaaaatgctatgatttgttcccttccctgtagtttagtttttaccctggcagatttgaggcctgctttggatttagagaaagctgagttggccaggactttactattatgtaaccaggactacaaatgtcagcaactaaaaataaagaaagtcaggccctcttctgcccttcgaaatggctacagggaccaagtatgcataccccacaagaccagaagtaaggaaggaccagtaggaggctggaggtaaaagaaaaataagggcccagcacggtagctcatgcctataatcccagcactttgggaagcgatggatcacaaggttaagagatggagaccatcctggccaacatagtgaaaccctatctctgctaaaaacacaaaaattagctgggcgtggtggcacgcgcctgtagtcccagctactcgggaggccgaggcagaagaatcacttgaaccgaggaggcagaggttgcagtgagccgagatcgcaccactgcaccacaggcacatctcaaaagggtctgtccagtagttccagccaagggaagggtgatggcctaagccaccagctccagctttcttttctttctttttttttttgagctggagttttgctcttgttgccaggctcctgagcagctgggaccaaaggcatgcaccaccatgcctggctaactctgtatcttcagcagggtttctccatgttggtcaggctgatcccgagtacaactgccggtgggggtccgagct

SEQ ID NO: 174142 - DNA, 625 bp, Homo sapiens
  misc_feature (25)..(25): n is a, c, g, or t
  misc_feature (111)..(111): n is a, c, g, or t
tcgctctgttgcccaggttggagtncagtggcgcaatctaggctcactgcaacttctgcctcctgagttcaagcaatcttcctgcctcagcctcctaagtagttgggattncaggtgccaccacacctggctaatttttgtatttttagtagagactgggtttcaccatgttagtcaggctggtctcaaactcctgacctcaggtgatccaccagcctcggcctcccaaagggctgggattacaggcttgagccccgcacccggtcagtacttccatttttatatgctactatattgtcttgacttttacaatgaatatgtagtacatttcataaaactaaatttaaaagtactatgtgctaagtgctccaataagtgaagttgggaattttctggaaacttctagttggaacatctaaacacagaagtctggggtgtcagggaaggtttctcagaggtcttgtaaccttggcaagttatttagcctccctatgtcattttccttatctgtaaagtggggataataatactaccttcctcacagggttgttgtgaagatgaaatgagctgacatatggaaagtacttttagagcagtgtctggcatgtagtaagtatgatgtaac

SEQ ID NO: 174143 - DNA, 109 bp, Homo sapiens
actcagactctgatggctctgtagctaactggcccatcctcagagactaacgcaaaggaacgaatttccaggatgttcgactatgtggagaaaacaaaaaaaaagcaaa

SEQ ID NO: 174144 - DNA, 334 bp, Homo sapiens
ggatctctcaggcaccattatgtcactgcttctaccatcatgtattatatgagaggtttggcaggacacagtggctcacgcctgtaatcccagccctttgggaggctgaggcaggcagaacacttgagatcaggagttcgagaccagcctgcctggccaacatggtgaaaccctgtctccactaaaaacacaaaaatttgccaggcatggtggcgtatgcctgtaatcccggcttctcaggaggctgaggcacaagaatcgcttgaacccgtgaggcagaggtcacagtgagctgagatcatgtcaccgcacttgagctgggtgacagagcaag

SEQ ID NO: 174145 - DNA, 251 bp, Homo sapiens
tacatgtccagtgatgatgatgttgatatgagtctttttctttcccattttcggtttgatttaggggtagttttcatgacacctgtattctggtggcaaaccctttgccaaaaagctgcttaggtcttttgtccattttgaatagatttttgtgtatagtgtaagataagggtcaaatttcattcttttacatgtagacatccagttttcccaagtgtttgttgaagagactatccttgcctcattgtgtg

SEQ ID NO: 174146 - DNA, 442 bp, Homo sapiens
ataagcaagccagggagaggggacgggagattctgccattcagaggtttcccaagcatctgaagaacacacagaaatgcaaaagccagatgaacggaaaatgctggaacataacatacagaccacgtatgaaccacagaggggaaagggcacccccagcgcagtgggcctgcccagcctcaacccagagatcaaattcagcgtcaaccaacgagaatgcgatggcacaaacagacaccacgagccccgatatggtactgcctcagcaaggacacatgatgccttctgcagaattcttgccatgaaagctaagtctgagcctaacccggaggagataatcagaataatacaatacacactgtgggacatttcaaaagacagttctgggccaggtgtggtggctcacgcctgtaatcccagcactttgggaggccaaggtgagt

SEQ ID NO: 174147 - DNA, 363 bp, Homo sapiens
agttggagtgcttgtggaatataagttgaattgcatatattacattccaaggacggaaagaattagaagtgttctatctggaaagtgatacgctatcattgaaatttctccagtctgctgcacagaaatagggtatgttcaccctgagaagcagatgggtgggggcatgacatagacagcatgacttattatgactctttgacataactgagagagctcacattgtatgttatatacctcaacaactttctccatcagactcttgatgagaattaacaactagaagaaaaatggcttttcctgaggtttttcctttccctttccttaccctgtcagagtggattttttaaaaaagaagtgaaa

SEQ ID NO: 174148 - DNA, 633 bp, Homo sapiens
cacagatagttttttgctcaattaaattctgttgcataaaatttgtttaaactttttcttttaacagatggcatcaaaagtggaatctgaagtacaacttatagcagtcctcaggaacatcaagtgaccaagtgagaaatccaccaggccattatgtccattactctcttgcagcaactgggatcattggtaagttctctgttagattctgaagctccatggatttgtgttttaagctttccaagtttctttgagcaaatgttttatctgaactggatttggaagtcacagtagaaactagactgggtccagggtctgatttgctctcataattaactggcttggatctatttggaggcttcagattgttgtcaaccaaacttgggtcggcctgcccagcacaggaaagccaaatactgacattgggatttgcagcaagagaaagtgaggcatttattgcaaggcacctaccaaggagaatggggcaggtcatgcttcagatctgaaccctctcatggctgacatgtacgagtttttagaggtggggagacagaggttacaggcaaagtcatacatcaatacatggaggctatacattagtttggactaaatagccgcatcggaaacctcaga

SEQ ID NO: 174149 - DNA, 823 bp, Homo sapiens
gtgcctgtgtggcttcctctgagcctcgcagggactctgccttgatcacagcgccagggccttttctggcttctcagcagtctgtgtgaaccttcagatggggtgggcacacgtggcacccccagccaagcaggggacgggccggactcggtcctccagtgtcacctctccctcctgccactggaaccgaggcttagaatcactgaggcggtgggaacatagctgtgggcacaagagtggacatttctacggcgttccctgctgaccaggcgctgttctcacgtgcctcacagcacacattaactcatcttccccgcaaccagccctggagggcagggactgtgattttccccattttacagatgaagaaacagaagcagaaatgtttaaacttatgggaagatacaccactaacaagggctggagccaggactctagccatgcagtgtggctgcagagtacaggattttaatcacccgttgcatcctctggcgtcgggcagggctggacttcaggctgggttttccccgttcccagctgcacccacgtcgtgtctcctcctggagtctaagtttcctgtgctgtgactgcaggcggagaggagggcccaacgtctaggggatttcatgctgcatctagaagccaaaacgctgacaccccttgaaaaggagggctgggaactgagatgattgacgccccaaggggaagcgggcgcttcccagaacagcctcggcatgacctggacatggagccaggcggctgctccttgcccaacccatggggctcacatggggatatatatatgtgtctggtttctgtccct

SEQ ID NO: 174150 - DNA, 834 bp, Homo sapiens
gtgcctgtgtggcttcctctgagcctcgcagggactctgccttgatcacagcgccagggccttttctggcttctcagcagtctgtgtgaaccttcagatggggtgggcacacgtggcacccccagccaagcaggggacgggccggactcggtcctccagtgtcacctctccctcctgccactggaaccgaggcttagaatcactgaggcggtgggaacatagctgtgggcacaagagtggacatttctacggcgttccctgctgaccaggcgctgttctcacgtgcctcacagcacacattaactcatcttccccgcaaccagccctggagggcagggactgtgattttccccattttacagatgaagaaacagaagcagaaatgtttaaacttatgggaagatacaccactaacaagggctggagccaggactctagccatgcagtgtggctgcagagtacaggattttaatcacccgttgcatcctctggcgtcgggcagggctggacttcaggctgggttttccccgttcccagctgcacccacgtcgtgtctcctcctggagtctaagtttcctgtgctgtgactgcaggcggagaggagggcccaacgtctaggggatttcatgctgcatctagaagccaaaacgctgacaccccttgaaaaggagggctgggaactgagatgattgacgccccaaggggaagcgggcgcttcccagaacagcctcggcatgacctggacatggagccaggcggctgctccttgcccaacccatgggggccttgcaatgattaataataataatgatgatgataatggtgccagcagca

SEQ ID NO: 174151 - DNA, 691 bp, Homo sapiens
tgcttctgttatatgcaccagaaacaaaccactgtttgatctattaggttggtgcaaaagtaattacagttaacagcaaaaactgcaattactattgcaccaaattaatatagcaaaacccatacatgtagcaatacttcttataaattaggtgtagcagcagcaacacattcacaagaattaattaaatcatataatgacagtattttccttctagtatataagcaaatggctatactgaggagtatgggtatttttaatgaaagaaaattctggacccaagcacaaatcgtaacacatagcctggcagacacaaattgtttatatataaattcactcaaacatggccccaaatcataggtttgaatccagcagagattacagggaattaaaatacaatataataaagactgcaataggaaaatatcttatttgtaacctgcctcaaagattcagatgaattcaaaacctaggccatacacgtagttaactgctcatcgtactaaaatcctgactacttaaaaccatgctataaatagggaaaatgttaagattaacacactcttttaaaatcagtaagaaactcaatgagataaggacctcaataggcaattccaaagataaagacatgaaagtctctctaacagtaataaaataatgaaacacaaaatattatgcctatccaattggc

SEQ ID NO: 174152 - DNA, 683 bp, Homo sapiens
taaagccgggagtccggtgaacgggcagaagcaggccatgcccatgccacccccaagatccccctgaacctgcacctccatcacgacccattcaggagcctccaggagcccagacaccagccccccaccatgggcagcaaggagcgcttccactggcagagccacaacgtgaagcagagcggcgtggatgacatggtgcttcttccccagatcaccgaagacgccattgccgccaacctccggaagcgcttcatggacgactacatcttcacctacatcggctctgtgctcatctctgtaaaccccttcaagcagatgccctacttcaccgaccgtgagatcgacctctatcagggcgcggcccagtatgagaatcccccgcacatctacgccctcacggacaacatgtaccggaacatgcttatcgactgtgagaaccagtgtgtcatcattagtggagagagtggagctgggaagacagtggcagccaaatatatcatgggctacatctccaaggtgtctggcggaggcgagaaggtccagcacgtcaaagatatcatcctgcagtccaacccgctgctcgaggccttcggcaacgccaagactgtgcgcaacaacaattccagccgctttggcaagtactttgagatccagttcagccgaggtggggagccagatggggg

SEQ ID NO: 174153 - DNA, 765 bp, Homo sapiens
taaagccgggagtccggtgaacgggcagaagcaggccatgcccatgccacccccaagatccccctgaacctgcacctccatcacgacccattcaggagcctccaggagcccagacaccagccccccaccatgggcagcaaggagcgcttccactggcagagccacaacgtgaagcagagcggcgtggatgacatggtgcttcttccccagatcaccgaagacgccattgccgccaacctccggaagcgcttcatggacgactacatcttcacctacatcggctctgtgctcatctctgtaaaccccttcaagcagatgccctacttcaccgaccgtgagatcgacctctatcagggcgcggtgaggctggggctgggtgggaggcacagcccccagactcctggcccccagccctgggctgagacctgacctcccctgccaggcccagtatgagaatcccccgcacatctacgccctcacggacaacatgtaccggaacatgcttatcgactgtgagaaccagtgtgtcatcattagtggagagagtggagctgggaagacagtggcagccaaatatatcatgggctacatctccaaggtgtctggcggaggcgagaaggtccagcacgtcaaagatatcatcctgcagtccaacccgctgctcgaggccttcggcaacgccaagactgtgcgcaacaacaattccagccgctttggcaagtactttgagatccagttcagccgaggtggggagccagatggggg

SEQ ID NO: 174154 - DNA, 922 bp, Homo sapiens
taaagccgggagtccggtgaacgggcagaagcaggccatgcccatgccacccccaagatccccctgaacctgcacctccatcacgacccattcaggagcctccaggagcccagacaccagccccccaccatgggcagcaaggagcgcttccactggcagagccacaacgtgaagcagagcggcgtggatgacatggtgcttcttccccagatcaccgaagacgccattgccgccaacctccggaagcgcttcatggacgactacatcttcacctacatcggctctgtgctcatctctgtaaaccccttcaagcagatgccctacttcaccgaccgtgagatcgacctctatcagggcgcggcccagtatgagaatcccccgcacatctacgccctcacggacaacatgtaccggaacatgcttatcgactgtgagaaccagtgtgtcatcattaggtatggacagagttggggggccacagaccctgctgcccgggcccctgctgaaacatcaccacccccagggaggtttgcctgaaactcccaatctgaacattgccctgctgtccctctctgccctcactctgttttattttccttgtcaccatctgactcacgatgtattttattgattcattctgctattgtctgtctgtcccctctaaatgtcacctcaggccaggtgtagtggctcatgcttgtaatcctggcactttgggaggccaaggcgagaggatctcttgaggctaggagttcaagaccagcctgggcaatatggcaacatcctgtctctgtatagataataattagccggacacggtggtgcacgcctgtagtccccagctactcaagaggctgaggagggaggattgcttgagcccaggagttccaggcaggaacaggtgctatgatcacaccactgc

SEQ ID NO: 174155 - DNA, 547 bp, Homo sapiens
tatgatgaattgaaagaagataatattctacttcctgtgcaagtcatatatatgtttgacacattctaaagcagacctaacttagggatcatttagatttgagtggtaagagatagaaagtaatgaggataattctcatgtttctcacttacctaagttttattctatttaaacaaagtagaaattagtcatagcaggaacactctgagtgttcataattttttaaatgagtgaactcagcagctttgataatataattagacatatgtaacaatacccatctacctgggttggctttataaaatgtagatatcaatacttggaaaacaagttatcctttcatgtttattcattaacaatagtatgtccttcatcttaagtagtcatacatcttgctctttcttgattggaaccttaaagctaaaaatgacatatggacctctttgtatccatataattaacaacaaacagatataattgtttgaataattttaactacagaactgtgttaatttcaattcaactgaatgcagagtagtagactaac

SEQ ID NO: 174156 - DNA, 340 bp, Homo sapiens
gaatgttgtcagttttcttcttaaagaacttctggcttgattgaaccactttatgatatatatgttttctattttataactttctgattgttatcattttcttcctttttgggatgtttctttccagtttcttatgttgaatgcctgtcacatcccaaagaattgcagtatcatactttattgtattttaattataaatatcaaatatcatggcttctttggcatgcagatttagaatttttttcttttaattttcatttctgtgactttttttctggttatcttttggtcattgtttgccaactgcattgctctgtggtcaagcattttctgagacaaa

SEQ ID NO: 174157 - DNA, 366 bp, Homo sapiens
caaatagtgtcctgagccactgcctaatcctgtagcccagcatattctcaaggatccttagtaacccatcaacaggttaaggactggcaccctaaagggcccataggttccttctctagcacagtaaccagcctctattctgtttagtacccacgcagtcaatccctacccccagcccccaaagttgtaccttctggacaatgcctttggattcttctagatactcccaaggactaggctgtgcatttcttacctttcccacccagacgtggggcaactcaaatgggtctggaaagtaacagatatagcactagccagtccagattactgaatccagttcctgttctttcatgtctcctctgccag

SEQ ID NO: 174158 - DNA, 489 bp, Homo sapiens
gaggttgtgatgagccgagatcgcgcaccattgtactccagcctgggcaacaagagcaaaagtctctctcaaaaaaaaaaaaaaaatcatgagaatcatggaaggttatctaatgctatgatttttattctcctccacatgtgctttcacactgagaggagccactaggggaaaggctgagtatgtagagaaaaggcgtaataaggtggtatctcaaaggaggtggaggattaacactgaaaagaagatccttaacgcagtgtttgagctaacaatttaaaaaaattttaaagaaaatactgtatagaagacagaatatttcttccttgaagaacagagataaaaacataagaatagggagaagatgggcaaatcccggcatttgccaatcctggtattttgccatgttctttatgcaacgtggaaaaaatgttaaagagtgttaggcttgtttggctatttttctcatcaggtaagtaatttcctgga

SEQ ID NO: 174159 - DNA, 488 bp, Homo sapiens
tgtctcagttgcactcaaaatgctattgtgtgttagggttctttcttacagattttgaaacagtgtcttggagaggttaggtgaattgctcaaaagacgcagcaagcacagagctgtgacttggtcctgtcttatctgctttggggttatgggtagtttatctttatatgcctattttaacagtagaccctcaaccactgaaattgacaggaaaaagtatgtggttgttttaccaaacaaacaaacagacaaaaaaccaaacccaccaaacctgaaatttttggtttggtcaacattttaattcaactgtactcaatgtattaacaatggtgatttgatatgatggatgtaattgataatcaatgcagtgccatttatagactgcctaaaagtgcattgtacatcattttgacaacatatttacctgcattgtttgggcaaaatgaattttaaaattattttttgtttcctaaatttgtatcaattga

SEQ ID NO: 174160 - DNA, 311 bp, Homo sapiens
aaggaggttatctcatttctctatggaagcatcacaaaatacctagcttgacctctgctgctgggtaatgaatttccatgaaggaccatcagggagggccaaggaggtgtatggggaggatggggtaggggagagcggaaaccagtgatcaatgttgcctgcgtctcctacagcccagctaaaagggccaggcagagttgcattaaacctgattagaaaactctgcttaatacattaaagaaacaacttgcagaaacatctacctcccttccttcctcccccaaacagtaatgagtccaaattgctaataa

SEQ ID NO: 174161 - DNA, 634 bp, Homo sapiens
acacagacatgcgaatatcaagatatagtttgaaatcataattctgaactttcactctagtgtttaaaacacatcaatatttaatatctcactgctgctagttggatgaaagatgaccattttatcatgctctacaaggatcatgcctcctgtgatctgatttccctccaactctccagcctcatccagcacttttctcctctttctcagacctctaggcccacttcctgttcttctgttaattcctcaaacaagccttcccttgtttcttatattagctgtcactctgttacattctgtagtttcttgactgttcatttagggcatttagcacagtttgtaagttccatatttgtgtgattatttaaatagcatctttctgcctctactgaactgcaagttccaagaagacagaaatgaagctgtttttttttttcttttttttaaagctgttttatccctagagtctgtgcattacctggaatataataggatctccgtagatcatagttgaatgaatgaaaaacaaatggctggctggctggatgaatgaatgtatgatgtagaaacttcctttgggtagggaggaaatgctaccttttggaaaacagttgtgttttagtatccaaacaca

SEQ ID NO: 174162 - DNA, 482 bp, Homo sapiens
tgtcctccagcaactcttgagcaaataaacattctttgtctttggtggggcacgttttattgactccagtcatttggtcattgcacagcttctctaaagaactagaagttccctagaaactgtatatcacaattagttctgagaatactatttcaaacaagaaagttactatattgacattttttaaatcatccaaagcttttatttttaactcagtgttcctgtttaatacattgatgatgatggctggaggaaggtggtgtgtaggaaggaaaggatacattgctttctcagccacagccgctttaggaaacatgccatcccccacgtggctgtaattagctgtgggcccacctttgagtctctgtggagtatttagctgtgcattcccagacagcctgtaaatccccagcagcaaagggtcatggggccagaggaaatggttctccaaaggctagggggaagggaggcaaggaagacac

SEQ ID NO: 174163 - DNA, 175 bp, Homo sapiens
catccttggaagatctggtacctgagtgcagcgaggcctcctgcggccaccctcgggtccccatgctctctgggaggtgtgctgggtgtgttcgtgtaaatcagattctgtttgcagatggatctgtttggtcttttctagaaattctgttatgtcctgaacgtgaaattctgtc

SEQ ID NO: 174164 - DNA, 234 bp, Homo sapiens
aaatttgataattcagagaatttcagtgttataaaagtgtaaaagctgatatgcaaactgaattgcgagatgttagtatgtcctagtgtgtctgggttctcctgtataaaacgtcttaggagtcactggccaaattatttatctatggaaccccctgagatttgctaagaaagttatacttagacttctttctactcatggatatgttctgtaattcacacgcttgggaaacgg

SEQ ID NO: 174165 - DNA, 330 bp, Homo sapiens
gataatgcttcctgtcttgatggagctagatatagaattctaagttcataattgagtctattcccagttctttacgcttttatcttctgatatttgttacaaatgaaaagtctgatgcctatctcattcttaattctttctgtgtattttattttttctttctggtagttggtatgattttctctgtaactgtaaagtgtgggggttttacttttcagttttactttttttttttgaaacagggtcttgctctcttgcccaggctagagtgcagtggtgtgatcatgccagtgtactccagcctgggtgacagaatggaaccctatctca

SEQ ID NO: 174166 - DNA, 2320 bp, Homo sapiens
  misc_feature (4)..(4): n is a, c, g, or t
  misc_feature (6)..(6): n is a, c, g, or t
  misc_feature (653)..(653): n is a, c, g, or t
  misc_feature (713)..(713): n is a, c, g, or t
  misc_feature (732)..(732): n is a, c, g, or t
  misc_feature (933)..(933): n is a, c, g, or t
  misc_feature (1118)..(1118): n is a, c, g, or t
  misc_feature (2285)..(2285): n is a, c, g, or t
ggangngggttgaagtttacattccagactgtagcctccaagactagcacgttccatcccactgccctgagtgtccactctgaggctctgggactcagatctgggggactgggggcttcagacaggagtcactactgtccctggcctcaaaggaagggctcaacatctaaagaatctttttcttttttttttagagacagggtctcactctatctcccaggctgctgtgcagtggtgtgatcacagctcactgcatccttaatctcccaggctcaattcatcctcctgcctcagcctcccaggtagctgggactacaggcacgtgccactatgtccggctaattttttcactttttttgtagagtctgggtctcactatgttgcccaggctggtcttaaactcctggcctcaagtgatcctcctgcctcagcctcccagagcgctagaatgacaggcttaagccactgtgcctggcctaaagaagcttccgattcgataacccatcaagtttatgagctgcttccacaggcgcggtgtctcctttaggacctcatgaaaactggttgaggagggcaggctgtgtgtgttcatccctgccccacagatgatccaagaggggttggaaagagataaaggaccccgccaaaggctnccagcgtgttcctgaaggagctgggatgcaacttgtggtccctgacttctggccagggcngaggctctttctgctcctncagccctgactactgaggacaaggggaagacaccaacctgcccgggtgacatccctgtctcaggccccatgctatcccctgtccccaccctaggaggaacccggaagctggtagaatctttgtccactgtgtagcagatggcaacctggtcacttcttcaccagataccagaataatgtaatggaagaggcatctttgaanggtgatgaaatgaactctcattctttctggcctctgctgtcttcccttgacccccatatatatccaggatctaagcccagcagaacagaagctccagctgcccaggagaagagcttaattgtcccccatccaggcacatgcagacttgggttcaaatcctgactccaccccttttagctctgtgnctgatccatgctgagcctgtttttgtagaacataagatgataatagctcccacctctggtggggagggtggcctgaaaatgtgcgtaaattttatttgcatataaagctgtagtagaggctgggcgtggtggctcacacctataatcccagcactttgggaggccgaggcaggcggatcacttgaggccaggagttcgccaacatggtgaaaccctgtctttaccaaaaatacaagaattagccaggcatggtggtgtgcgcctgtaatcccagttacttgggaggccgaggtaggagaatcccttgaacctgggaagtggaggttgtgatgagccgagatcatgccactgcactccagcctgggcaacagagtaagactctgtctcaaaaaacagctgtagtagaaatgaagtaatttgggctatcttatctagttttgctgagtgactttgaggaaattctttcctctccccagggctcagtcttccactgaaatagggtgttgggacagctctccccttagaaatgactgtgggacctttcagtgtttgagaaaggtgcagtggctgtgtctgcatgtgcaaacctgctcctcggggttcagggcacgagagcaactggcagaggcagagacagagttctgggcccaggcctgccaggagttgtagctgctgagtgaggaagctctgtgggagccccaggaggggggaacatggaaaaattgagcttggccctgggtgagttggggcggggaggccgtggttcacagccctgcacagaagctgcacagaagccccacgcctgagaggaggcgagtcaaggccttatttattcacgatcaggccactggcatttgcccgtgcttgcactttttgcaaatgtcccctcgggaagacgccgctaagggcctggcccacaccacgtgctctgtgactatctatctatgaaatgaacaaaagaatttgatccttacgaaatgcaggtcgtcctgactcccaggcggggttccttgaggttacccagaactctcctgccagggagatgaggaggccatgtggactgcaaaagaacataggctttggatttgggacaacctggatttgaaccattcccttattcagccatccattcattctttgcacaattgttaactgaacgtcctgtanatgcctggtgctgtatgacctttggcaaatcactt

SEQ ID NO: 174167 - DNA, 154 bp, Homo sapiens
gcagttgccacaccaccttgaatcttgaagtattttcagcaacaggatgaccattagccacaaatttagtgtcagcccttaaggtcggtattggtttgacccatattttcatgtagttctttttcttcacttgtctaatcttcccgtgtactgc

SEQ ID NO: 174168 - DNA, 264 bp, Homo sapiens
gcttttatgcagaactcactgttcttcagttagagcttattactcttaatagtgaaatcaaatccatcttcagttgctacatggctttgttaaacagttaaacttgagttggagatgctctgtcgtagggaggaattttcgctccacagatgtgttcatataatgtattttcccctttcccctgtggaaactttgtggaaagattatttcagtgttaaccctgattgatattttagtaattaaacaagtgtctgttactccttt

SEQ ID NO: 174169 - DNA, 479 bp, Homo sapiens
aacttaaaaatacattatttggctgggcacggtggctcacgcctgtaatcccagtgttttgggaggccaaggcaggtggatcacgaggtgaggagatggagaccatcctggctaacacggtgaaaccatttctactaaaaatacaaaaaattagacaggtgtggcggcgtgcgcctgtagtcccagctactcgggaggctgaggcgggagaatggcgtgaacccgggaggcagagcttgcagtgagccaagatcgcgctactactacactccagcctgggcgacagagcaagactccgtctcaaaaaaaaaaaaacaaaaaacaaaaaactatttataaatatctagactaccaagactcacttcaactcccatcataccatgtttatagtattaactaactgtttgttttgtatttgagtacaattaagaaaaaaagaggctgggcgcaatggctcacacttgtaattccaacacttt

SEQ ID NO: 174170 - DNA, 566 bp, Homo sapiens
cagtccagagcccatgatcctgtggttaggatgagcagacagtatggccgctttgccccctctctggacaattcagccttatcagcctccaactcacttccccagaggatttggaaatatgcttcttactgctctgtgcccctgggcagagatgctaagtatcctgtccaccccttccttcggaacataacacagaggatttttggctttttaaacctacatcttatctgaaggtagggattgctctgcctgccatcccaaagcctacagtcctgacactgtgaaatgagtgcagaggaaggaggtggaatgcagttggctttgagtcctagccagccgtttgaaggctacagcctgcttctaacttgtttctgatggaattcccaggaatgaccctggctcaacctgattctcatcaggtcttctctgtactttggagaaatcaggtcccaaactctcctttctgggcctctctaatgtctgactgtggacattcagtatctcagctctgacttcgcctttacttcctgtagagtgtcttgaattctggtaactcatattcttgt

SEQ ID NO: 174171 - DNA, 459 bp, Homo sapiens
gttactgcagctgcggtgttgtgctgtggggaagggagaaggatttgtaaaccccggagtgaggttctgcttacccgaggccgctgctgtgcggagacccccgggtgaagccactgtcatcatgtctgaccaggaggcaaaaccttcaactgaggacttgggggataagaaggaaggtgaatatattaaactcaaagtcattggacaggatagcagtgagattcacttcaaagtgaaaatgacaacacatctcaagaaactcaaagaatcatactgtcaaagacagggcgttccaatgaattcattcaggtttctctttgagggtcagagaattgctgataatcatactccaaaagaactgggaatggaggaagaagatgtgattgaagtttatcaggaacaaatggggggtcattcaacagtttagatattctttttattttttttcttttccctcaa

SEQ ID NO: 174172 - DNA, 279 bp, Homo sapiens
ccaagccacaggtcagatctgcccaaggccttgggagctcagccctcacagccctgtgccatggatgtgggacaaggattcaaaaacgatgattttggagctgtaggattgagtgattggcctgctgggttttggacacttatgtatcctatgagtcccatctgtgttttgtgcttctttctagcaattttctttttttctgttgcctgggaatgcttacccattgcctgtacaatcatttaccttggaagtaataaacttgctttacaaatcagtggc

SEQ ID NO: 174173 - DNA, 306 bp, Homo sapiens
caacctccacctcccaggttcaagcaattctcctgcctcagcctcccaagtagctgggactgttggtgcgtgccaccacgcctggctaattttttgtgtgtttagtagagacagggtttcaccgtgttagccaggatggtctcaatctcctgaccttgtgattggcccgccttgacctaccaaagtgctgggattacaggcacgagccaccgcacccggcctctacattctttattattcaaactaccttacttatccaatagttttgagttcctgctgtgtgcctgtactttgctaggtcaaagg

SEQ ID NO: 174174 - DNA, 666 bp, Homo sapiens
gaatgaatgaatgaatgaacaaacgaacaaacgaacaaatgaatgcaccatcaaagtattgtgattcagtcattcaaggaagggaaaggtggcatttgccagccctggaataattcgggttagtggcagaggcttgtaaaggcactcaggagaccagcattaggggcctgagtaagtctcctggagggctggtgagatttttgcttccttagaatttggacttcctgttaagagactgagggatgggaatgcagataaatacccagatggacccaggagcccccaatgctggactgagttttggttttgtcctacagagaacttcaagccttctaatttgaaaagtgtgtcatctgttgaaaagctgaaattaatagagactgacattgtgaaaaacaaatgcagcctgggggattgagcgggacttgagtcagtgacactcaagggtgtctagctgagatgctagacagaggactctcctagctaatgggattctaaaaagaatgaaatattctttctcaggaagatcacttagaatctcttaatggaaagactcaaatatatacgatctataggacagaagtgtgactgaaatggtttggttatttctaagtatgtttctggtcaagatcgtgtccctggcacatatgtatatatatgtgtgtg

SEQ ID NO: 174175 - DNA, 490 bp, Homo sapiens
agaaaaatccaacattccccaaccaccccctctccaacaaatactttgaaagtggcgaatctcacccactttgcttccatggggaggcactctgtattcacatacataatccataggtatttataaaaatgtataattgtgaaatggaccaatgaaaactgtattgttagctaagtgaagagggcagttgtcccccccccataaaaggcagatgtttaaataaatgcagattttaataatacaatatcattatcagattgcatacttaggtcccccagatgaaacctaagcctgttttcgtgggctgctgtgccttttctgccaagcagctgtgagaaggaatgaacatcccagaatccttgcttatgaatgcactgtcttcgctgagtttgaatgtactagtgcttcatgtttgtgtgaatgggggttgcatgtgctggtcagaagccacatgagacacatggttggggggcggggaattatgtcttta

SEQ ID NO: 174176 - DNA, 296 bp, Homo sapiens
tatagctctcaaaaggaaaaaaagaagtttttttaacaggtggtgcatcttagtttgctactaacccaaattcagggcataaagatagatagcagataaaggcagaaacgagtccagccccatccatatggccttaactccatgattgctaatagagtattttcaaggttatgggaacctaacacttaagtaaaaaattaatacataccatatatcccacaaatcggtagactaagacaactgagtttggatactacagggaaaaacatttactcttaactaagttgtttactact

SEQ ID NO: 174177 - DNA, 334 bp, Homo sapiens
ttaacaccatgtagtaagaggaatagttaagaatcttagtaggcatcgagggactggcactaccggcctaacacctgggagctttttagtaatgtaaaaatgtgggtccccactcctctatcaatcactatctgcgccttaaccagacccctaggtgattcacatgtacatttaacatttagaactctgctttgtaaagctattattacagtaatgccaacaaagagcttgcattacttcaaccttaaagcctaatgtgccaccttctaaagatcctgatattgtcacaataggctagtcagcatagaactgttagaaaaaagtacatactttg

SEQ ID NO: 174178 - DNA, 447 bp, Homo sapiens
cagtggaacactgagctgcttattttcattctggccccttgttctgatatttcccctttttgatcattcttcctccatgtctcctacacatttccaggcccttctgtttttcctgccatcataactgtgcatctggaccactgcaaagagacttcaaggtacctcatctgctgtgtcagcccctctgactgtcctgctggccactgcctgttcctcttcccggagtggagccttgatcctgtcattcccttttctaaagagcccccacggcttccatggcttccagcacacagtccatgctctcagcctgctacccagcctcctttccctgtcttcccctccacttttctccttgtaagctccatgttgcagcaaaatcaaatgactgttctctgggtgcacccgcagaattccatgcctccgtgtcttcactcacaaagttcccct

SEQ ID NO: 174179 - DNA, 420 bp, Homo sapiens
ccaggcatgagtcatcgtgcccaaattatttttttttacttttattttaggttcagaagtacatgtgcaggtttgttatacaggtaaactcctgtcaccagggtttgatgtacagattactttgtaacccaggtacgaagcctagaacccaatggttattttttctgatcctctccctcttcccaccttccaccctcaagtaggccctactgtcggttgttcccttctttgtgtccatgtgttctcatcacttagctcccacttataagtgagaacattcggtacttggttttatgttcctgcattcgtttgctgaggataatggcctccagctcccaaccacgttcttgcaaaagacaggaggatctcattctttcttacagttacatcgtaccccatgatataaatgtaccaaatttt

SEQ ID NO: 174180 - DNA, 167 bp, Homo sapiens
ttctccccccagagtagttttatcagcaagcacaattgattctaccaattcttcttccagtaaattatctctaatttgtccactttgtctccaatccttcccacgattctgtaacagttgcctcctatgtagctgtagtctcctaactggtgtccctgtttcttatc

SEQ ID NO: 174181 - DNA, 616 bp, Homo sapiens
cctaccaccaagaacaggaactagcacttaaaaggtactcaaatatcggtcatttaattgacaaaatctatgaaaattaccatatagtccttgctgaggacaagatgagaaatgtacggggcagcacatgacctccattctccaacttaattcagtatttcttatcgaataagacatagaaatgtctgcttatcaacctgttactgtcgtataatctcaaacacaaattgactttcagattaattgtaagggtcaaatgggaaattgtagatttgtaaaaaagagataatgatggctctgccctcctccaaattcctttcctgaaagaaaagtctgtttacagatatcaagcaaatgaaaacctgccaaattttgatctctaattttagcaaaaagatatttacaaagtggtattttactacctatacatttaacatacatcgggcacttctaaacatctagatagactagatgtttcaagtaaggagttaatttgtctactatgtatacagcagtcttgaataaactgcaaacatgtaacaacagttataatttgaaagagtcttccaaatgtgaacattctggcctagaacccttcccatctggtacggattaa

SEQ ID NO: 174182 - DNA, 538 bp, Homo sapiens
tgcacaaagaccccaaatccattctcctgtcttccacagtagcaggtttcagctatgcacatgactgggtaatataaatataaaaactatacttcccagcctcctctgtggctcagtgtggttacataacaagactctggccaatacagtattagctgaagggataaatgtgatttctgggttacgcccttaaaggaaagggcgtgccctccttcctcttttttcccatccaggagccatcttggatgactcagatgagggtaccatcctgagaatggagagtgataagacagaaaaagcctgggttcctggtatgatggggccagcataccagccatggactgcttatccctgtgctgttacaagaggaagaaatcatctatcttgttaaagtcattgttactttgggtttggttacagcagcctctacatcctaatcaataccctctaataatcctcccaataacctcccctgccttgcaagcactaactgctttggaatcacgctcaaagactccataacaccgcaaggagtatc

SEQ ID NO: 174183 - DNA, 571 bp, Homo sapiens
tgtagctaatgccctataaatatgtgattattggcttggattttcccaaagctttaacacaataagggcttaattacagcttgtagttggcaatcccagtaaattacggtttacatgatgttctcactttttttcagcagccgaggggcctataatttcagcactttcattcaaatcgggcagaagtttggcagatgtggctctgagccaaatataaacgctgagagcgacagcgagacagggttccattcaaaggccagcctctaccgcctaagccaactctgaaaactctaaatctaacctaggccgggtgccgtggctcttgcctgtaatcccagcactttgggaagccgaggcaggagaatcacttgagcccaggggtttgagactagcctgggcaaaaaataatgagaccccacctctacaaaaaatttcttaaaattagctgggggtggtggcgcacacctgtggtcccagctaattgggaggctgaagtgggaagatcccttgagcccaggaagttgaggttgctgtgagctgtgatcacgccactgcatttcagcctaggcaa

SEQ ID NO: 174184 - DNA, 441 bp, Homo sapiens
tgtagctaatgccctataaatatgtgattattggcttggattttcccaaagctttaacacaataagggcttaattacagcttgtagttggcaatcccagtaaattacggtttacatgatgttctcactttttttcagcagccgaggggcctataatttcagcactttcattcaaatcgggcagaagtttggcagatgtggctctgagccaaatataaacgctgagagcgacagcgagacagggttccattcaaaggccagcctctaccgcctaagccaactctgaaaactctaaatctaacctaggccgggtgccgtggctcttgcctgtaatcccagcactttgggaagccgaggcaggagaatcacttgagcccaggaggaggaacttgcagtaggcggagatcacgccatttgactccagcctgggggaaagagtgat

SEQ ID NO: 174185 - DNA, 415 bp, Homo sapiens
aagggttccttcccagggcagtctcatgggagcaattcctcctgcaacgtgttgtagcagcacagtcgaagtgtcgtctaccagggaagctcattagagactcagtgcctggggtttttatggagatctggtcacatagcattctctatctagcatgaaacaaaattccagacctccagagggcaagcaggtgttctgcataaaccccattttgtgtgcaaacagttcaggcacagcaaagcagcacagcaaagttagagaatggtggcaactctctcaagatccaagttcccagatgccagtcagaggctactcttgcaagcaggccttttaaaggagagcggtctcaagcacgctatcttagttctcttctgcacacacatcaaaatccaggattttaaaagtccaaggctta

SEQ ID NO: 174186 - DNA, 576 bp, Homo sapiens
ggatcgagaaggttgatttagtctttgaaaagaggttattagagtaatccagatatgactaagagttagaatggggagtagaattatctgtcagagacctgcaaaggatgaataggcataatttgctaagtaactagatgtgagaggggctgttgtttatccagtatgtctgtgtgtgcacaacttcacacccgttgtgaaatagatattactaactctcattttacagatgaggatctaggctcagagagtaagtaactaatccaagaccacacaataagtaatggcaatcctgggattacattttagtctgtttgatccagagctgcactacatcccattattctattctgacacaaaggagatgagccacagggagtctaatctttctagctgagaagactgtgatactcattcatgccattgaatggaatagaagttggaaggcaggaaccatttggagagaataatgatgaatggtttttgaatcattaagtttgaggttatagtgagcatccacttagaaatagtcagtaaataggctgggcacggtggctcacgcctataatcccagca

SEQ ID NO: 174187 - DNA, 342 bp, Homo sapiens
atggccggtgaagagagattcatgcaagaaaggatggcagcatggcagaaatgggagattaagcacatataggggattgatcaaagtagtaaatatattaaggataacaaattatgtttcacagtgttgaatatgggagggaaaagtagggaaaaggagaaaactagaatgaatcctgtgatgtacaattgcaactggagatgtcagcaggaactcatcgtttttttaaaatatagagagaaatggatgtaaatttagatgtgtgtatacatgtgaatgtgtgtgtctgtgtgtgtgtacataaacatatatattttctagctttttcctcttcgagggcct

SEQ ID NO: 174188 - DNA, 317 bp, Homo sapiens
tacgtgactgtgttttaacagccttggccacagggtctttgtctcggggaaaaaggggtgtagaaatcgtaatattgagggggaaacaaattctccttgtcaaaggccttactagtcaggcttgcagggacattcaggactttagagcaggggccagcaaactttttctgtcgaggggcaaatactaaatattttaggctttgtgggccagaggatgtttatacagctattcagctttgctgctgtagcagaaaaacggccatagacaataaataaccaaacgggcatgtctgtttcaatacaactttcctaacaga

SEQ ID NO: 174189 - DNA, 318 bp, Homo sapiens
  misc_feature (273)..(273): n is a, c, g, or t
  misc_feature (277)..(277): n is a, c, g, or t
taatgaacatcgtcttagactgaaagagaagtggaaagccggagtgaagaggaaactttgtctttctttggaccccttacttcctctaccttccttaaccctatggataggaagatggaggagagaagcaaagaaggagaagaatacagaaagagaaaaaggaggagagaaaagtaggagataacagataaaaaggtcacggaagaggacagatacgtgctgagtgggtcgggcagggaggagggaaaagtcgccatttggaaaggggaatanacgnggctgagtctgccaagtggaactgtgcactcttgctgcgcg

SEQ ID NO: 174190 - DNA, 400 bp, Homo sapiens
taatgaacatcgtcttagactgaaagagaagtggaaagccggagtgaagaggaaactttgtctttctttggaccccttacttcctctaccttccttaaccctatggataggaagatggaggagagaagcaaagaaggagaagaatacagaaagagaaaaaggaggagagaaaagtaggagataacagataaaaaggtcacggaagaggacttacctgtaaaagctggggctttgctagggacacagaaaggagggaggtgctgggctgccctttgcagctggctgcctagggctagaagctcttcgggaggaggcggagaaaggggggttgagcatagaaggtgcccacctcctgctctcagcaatgtggggatagactcagcccacccacctggcccca

SEQ ID NO: 174191 - DNA, 370 bp, Homo sapiens
gtattttaatttggttacttaatattacaaaattgtgattcaaacgcatgagcagatgcactatggaaaggtcttaacagccttaaaaatctaaaatccaggaatctaagtgagaggtagttaagaaagtttggctttaaagctgaattattaataatatatagaagctacctgaatcctttactcatacttatatgtcaaacaagaactattcagggctttctggaagtattaaggtcatgtttcaccttcactttttgtggtacaattaagaaagcatgccagagtttgtagtaattcctgccactcaccaaggaagcagaaagtttgtttctgagctcagtctgatcacaacctcacaattttccct

SEQ ID NO: 174192 - DNA, 356 bp, Homo sapiens
cttgcccaggctggaatgtaatggcatggtcgcagctcactgcagcctccgtcttctgggctcaagcaatcctccttcctcagcctcctgagtagctgggactacaggtgtgtgccaccactcccagctaatttttaaattttgtgtagagatggggtctccctgcattgcccaggttggtctctcaaactcctgggttcaagcagtcctcccaccttggcctcccaaagtgttgggattataggcgtaagccactgtgcccggctgttttttgttttgttttgttttgtgttttaattgaacggactgaagtttactttctaactaggttagccctccattcatacaaaattatg

SEQ ID NO: 174193 - DNA, 467 bp, Homo sapiens
gctgtaaagactccctggaaagcttcgagagccatagaaaggtcatgctctgacccaggactgtggcttccacgaggcaccctaaggatgcagtcagattgtcctggcaagtgcacaggctctgctccagcagtgcagagccaaggctgtaaaaactccctggaaagcttagagagccgtagaaaggtcatgctctgacccaggactgtggcttccaggaggcgtccgaaggatgcagtcagactgtcctggcaagtgcacctctcacagcatcacctttcataacaagaagcaaaattcaccaaatgttcctccagaaaggaatgcttaagtaaaaatgtcaacacatccatgacagagaagccatcaaaatagtgtctttgcagaatatttaaagattatacagcttataaaactggtataaatagcaaacagccaattttggcatatccccatcttttcatgta

SEQ ID NO: 174194 - DNA, 429 bp, Homo sapiens
aaggactccccggatagacgccacgtccatactttgtccttgtggtgagagaggataaaatgtgatataatttgttattcaaagaacatggcaaccgtaacagacaaaaggaagcatggcatctaggggaggagagtggagagttttccatacacaaacacatttaaacttccctgtacaaaaatacctgctgttgctttagaaatcgttttcctttatgaatagtcaggtcttgcagtacaaatccaggtgcagtgccagcaagtatttcaaataaatttcaacgacttgatattcaagtccaaactaaaggttgaatgttttcgtaaatgtaattgcaaacagttgattcttggctttaatataaaagagacatttctatcttcagtagtcagcaaagccagtgcctaattatggctggtctgcccg

SEQ ID NO: 174195 - DNA, 152 bp, Homo sapiens
cccccttgcgatgcatcttttgtctgccataaggcaaatgtcacttcgtccatttagaccacccaaggttatctgattcttgttggttattctatgttttattaggattggaatttatatttgttgatcttcaaacaatagagtcctgttcc

SEQ ID NO: 174196 - DNA, 186 bp, Homo sapiens
cctccgaaagtgttgggattacaggcgtgagccaccacgcccagcctcctgcatccttcttaaagtgtggctcctggagagaaacaaaggatcgattccaggtagggtgtgagccacagagaacagaataggactattacctccttcactctagacactctcccacaattaatgcaaccccaaacc

SEQ ID NO: 174197 - DNA, 168 bp, Homo sapiens
caacttcacctcctcatatgccccctaggacaggaggaaaggaagacaggaaggctcactcagtgtctttgccctggattccacgggacagtgccactggcatctcaggtctctccatagatctgggaacaattcactaactttacatgatggtctgcattcacccca

SEQ ID NO: 174198 - DNA, 883 bp, Homo sapiens
actcctgacttatagtgtctgtcttccagttcccaggacgtgaagttagaagatgggatgaatgatatgtttgcatttgatctttcttctatcccttctttgcgaagattatttcaccttgttccttaagtttcacatggtaattagttctaatttagtgataatgctgtgaacatggagtaagaagctaattgacatggcatgctaccaactagaattttatgaactaaaataataagctttaattttttaaagtgtgacttaacattagatagttcaggaaaacacttatttctcctaaagtgagatcaggttgtagtgaaacaaatcttatttgaagtgtcctaaaatacagtgtgttttaagttgttttctgttctctttggtccaaaaacattttgcaaagaccttcctctgtctctgtgtcgtgtctagattctatagtggagcacaaacaactgcaggaaaaaatgtgagagtgcctgtagatactggaacatgttaacagaggtatttgagaaccctcaggaagaataacattttacagtgaggtgattgttatctttaacaataaaagccatatgaatgtgctataattaaggctaatgtggaatgcttaaaatcataaaacaggtatgatcattggattcctattcacccagggaatgcagatcccaaagataagtatgccggaacatgaactttgtgagaaaacaggaatccacccacctccaataaacaagagactgtccttcatttcagttatagctcttcagggtttaatttggatagatgtgaggtgttttattctagagcataaactagatgcttctttcaagttaatggggagcaactgatggctactggattaactagaaaagaa

SEQ ID NO: 174199 - DNA, 368 bp, Homo sapiens
actcctgacttatagtgtctgtcttccagttcccaggacgtgaagttagaagatgggatgaatgatatgtttgcatttgatctttcttctatcccttctttgcgaagattatttcaccttgttccttaagtttcacatggtattgcttttactccatcgattacacatcataagacaagttgtatctttaaagtgaagttctcaaagtgtggtagggactcaaaggtccctaaggtcctttcagaggatctgcaaggtcaaacccgttttcacaataacgctaagacattgtttgctcttttttgctcgtgttacctcacgagtgtacagagtacaaattcacccgtaaggtttgtctccagggggca

SEQ ID NO: 174200 - DNA, 892 bp, Homo sapiens
gggggggggggagaacccaaacctacggctaggtacgaggctgggtggcgcccaaggaccttgagtggagacaagtcacaggttcttttcctgacttaggcacaggctgggcagctggaagggctgcagaaggggcactggcagccactcagtccccccgcgtgccttgcccagcccctcagctgtgcatttttctgggctaagaagacaaaacagacagatgctaggctgccaagtgatctggacaggacagtcttgtgggggagtgtgtggaggggtgtttttctgttcttgaaccctcagccaaagtgggaagtgcctttaggggctaggtgcccacacagatgctgagaaatgcccagactgccctccatgaggctgcctgctcaacaacactccttactttgcttgacccaggtcactgtgacctgcccatttttcccctgcatccagggctgaggtggagaggggcagtgtactcctgcagcacaggtatgggaggaggcagctgtgggagggagggagagaaggacacaggcactgctcctgtgcaaggaagactccctctcactcttcagctggcagtggggtggctgcccagaaccaggctgtctggatcaaacccagcttttgcacttgtgaccttcaacaagtttctgaacctctccgatctgtttcttcaagggagatcatcatataacctgtgtgataggctgagattgaatgaatcattgatatgaaatgtgaatagtgcctgaggcaggcgtggtggtcacacctgtaatcccaacactttgggagggtgaggtgagcagatcatatgagttcaggagtttgacaccagcctggccaacatggggaaaccccatctctacaaaaaataccaaaaaaa

SEQ ID NO: 174201 - DNA, 484 bp, Homo sapiens
aagtgctggggttacaggcgtgagccaccatgcccggcctgaagtaaaatttttatctctttattgttctattcaagttttctacttcttgagccagttttgattagttgtattttattaatatatgatccattttgtctgaaatttcaatttgagtgttataaaattctgacttgtattttcttatatttttcctattgccttttatatctttaattataattcccaatgttgtttattgtctcttcttttttctttgatcagaattgccaaaaaaattttctcaaataacttgtatcaatcaattgtattgtgatttttttcttcttgctttctttttttcttatctttatttttccttccttctatttccttaagattcaatttactgttctttttctacattcttgagttaaatgtctagttcatttatcttaagtcttccttatttttgaatatgtaagtgagtgtataaatgaccctc

SEQ ID NO: 174202 - DNA, 1625 bp, Homo sapiens
atgatggggcacggacatggggggttaggtggggcacgtaattggagctcgcggggcaggatggggcatctaactggagcgacagagagcacgatggggcacttacaggggccggaggctgggtacgtaatgagagcgagcgggaaatgatggggcacctaacgagcacgcagagcatgatggggcacgggtgcgaggtggggcgcacagtgggagcgcgtggggcatgatgggacacatggcgaggccgtcagggcacaggggaagcacttttggaacacgtgagtgacagggctgccgcccttgaaggagccctcggagtggctgcgtggtggggcacgtggggcaggttcaggaaaaaggatgcagcatgtgattgcagggcaacctggtgaggacacgagagccacctgccaccagcagggttcagggctcccagctgtgggttacttccaccttctttcactttccctcttccattgtattctagagaatttaggcccagacaagacactgattgattgattgattgattgattgacagaggctcgctctgagcccaggctggagttcagtgatggatctcagctcactgcagccgccacctcctgggctcaagagatcctcctgcctcggcctcccaagtagctgggattacagacgtgcaccaccaggcccagctaatttattttttagtttttaatttgctggtaagatggtttgtagctttgttgcctaggctggtcttgaactcctggcttcaagcgatcctccagtcttgacctcccaaagtgctgggattataggcgtaggctacagccaactttcaatactgccccattgggggttacgtttccaacacatgaaattaggaggatacattcaaaccacagcagtatattatgaccataatattcattaactgtgtaacaggctgggcgcggtggctcacacctgtaatcccagcactttgggagaccagagtgggtagatcactcgaggtcaggagtttgagaccagcctggcccacatgatgaaaccgcctctctactaaaaatacaaaaaattagccggtgtggtggcaggcgcctgtaacctcagctacttgggaggctgaggcaggagaatcacttgaatccgggaggtggaggtggcagtgagcctgattgcaccactgcactccagcctgggcaacaagagcaaaactctgtctcaataaacaaacaaacaaacaaaacctgtataacagagtgtcattgaatttctaaacgttgaaagacttcacattaaaaaaaaaactcacaatttaatattattgagtgaaagaaaccagacacaaaagggtacattctatatgatgctgtttatgtgacattcaaaaacaggccacatgacaacatggtaataaggacagtggctgtccttgttaggagttatgactggaaggaggcaggagggagctttctggaaacactgtacatcttgctcttgagagtgcacgtatatacatcaagtgtttatcaagctgtgtggttaagatttgcacacttgtatatgttatacctcgatttaaaaaatctaaataagtaaataaagataccttcaaatcttttaaaaaaaaaaaa

SEQ ID NO: 174203 - DNA, 492 bp, Homo sapiens
ccgagttctcggtaactttatttattatacccagactcactcccttggtgatctcatgcaaggtcatggtttaaaagtccatatgcatgctgatgaatccagcccagacttctctccttaatgcctgctcatgtaactgcctacaaaatattgccacttggatatctaacaggcacttcaaatcccatacatccatgactgaactcctgaatccctgctaacagtacctgatttacctccacttccctatttctcttgttggaaaatccatccttgcaatggctcaagtcaaaagtcttatggttatccttgattaaaaatcctctcgtatcagaaaaaatcctacaggctctaccttcaaaaatatatctagaatctgggtacttatcactccacagttactgccctcaccaacagtgccctgtttcactctcagaaatgtcctgatttgaacaataatcgccctaacacaaagccctccatgatctcact

SEQ ID NO: 174204 - DNA, 274 bp, Homo sapiens
tgctggggttacaggcgtgagccactgcacctggccgcctttttactatttacatggccaggctgagtcttccaaatctttccactttacttcccttttgattataaattccatctttaagtcattttccccttctcacaacttaatataggtagttaaaagtagtcatgcagcaacctgaatgctttgctgcttagatattcctaatttctcccaccagatggcctaactcactgctcttcaattctgcattccatagagccctgaggcatgg

SEQ ID NO: 174205 - DNA, 463 bp, Homo sapiens
tctggtcccccagggctccactcccgcagcagcccggctccgtcggcgtcagtggagccccaggcctgggtccgagatgagcgagacgctgctctggctcgcggtcgcccgagcgctcccaaaaccagggaacaggccccaggagagaagcccctagaagtttcctggagcagggagtctcctgtatcctgttagctctgcaaaggaatctggactttattctgagggccttggagaacccctgcaaagttttttaaaaggtggactaagagattggcatttcacaacatgactctccgaattgaaacactaagaagattggcgaaatttaacatttacagattagtaatttaacccaggtgactcgcgatgagggacatggctacccttcacttttggagggagttttaagtgatacagatctttttgccaagcaattttttttttttttttgagacggagc

SEQ ID NO: 174206 - DNA, 512 bp, Homo sapiens
cctccagatgggcctgggtttccgcccggggcacagaatccagcccagcaggcagtgccaggctggtgggaccagtgactatggggaaaagtccagatatgagctctgggatcaggctcccagggcccccaggggcgcggaccacccccctaccctgggcataggtacacggagacctgcaggcacacaggcgcataaacacacctgcgcacacacacatcacaccgaggttttcatctccatgcagtgcgctcctgtgtggggacccacaacacacacacacacacacacacgccaccaccctggtccacagcctgcgcacacatattccctcctgtggggacacacgccctcacacacgcggccggggcgccaggccctgtctcccggacacgcggcaggaacctcgggcctccccggccggccgcctccctcgcagacgcgcttagtcacctgaatttgatccaggcgggagggagggatggggagcctgacgtcagccctcgcggccg

SEQ ID NO: 174207 - DNA, 269 bp, Homo sapiens
acatgcctgagatcacattatataataaattctatatcctgcattttaatttattaaatatcccgccagtttcatttcccccattaaaggctcttaagaagcatagttcttggtggcctcataacaccctgtgggtagagctcatatttaccaccagagccctaacccagttcctgagaggctggtgcagtgctgagcaggaagacctggatgccccaaggcagtgcccacttcctgcagactgagatggtaccactctctaagaagca

SEQ ID NO: 174208 - DNA, 1226 bp, Homo sapiens
ttttggccttcttagaagaaatttctcttaacatttctgtgattaaaatttttagtttaaaaacccagtctgattttagatgtctccaaactgttacattttcatttttcttattaactgatcaacattctaaatatttagtattctctatagctaaagtactgcatatactctagacacattcagaaagataaaaataaataaaagttcctcacatgtattctggtgacttcaatgtgtgtcatgggcaagggctatggaaaaagaaaaacaacaaaaacagactcctaacggtctgtcttaacttcagtcctgggctcttaagtcagtcagaaatttagagatatgcaatgcttaaaaggctgaacctcaagtgacatctaagacaactataccatttatggcataacaacttggtcctaggacttttggtttaaacagaattttcaaagcaaagcagatactctcccccagttcttatttgggattctattttggaatggagatagggctacgcccagacacaggccaaggcatatctgttatggtgattacttcagcatgacaaagtcaagcagaggccctaggtcaaagttttgcttcagtaacttacttgcctctgtaagtaatagagggctatagtctcaaaaacaaataaatacatgaaatctacagaatggatcaggacataagtaggtaagtaaaatcattttaaagagacaggagtcccaggcaaacaggacttaaaggtgccttgaatgaatgaatgaatgaatgaatgaacataactaaagaagaaacgtcaaggctgagaaaaagaaaagcctcagagggaaatgttggcagtgcccattcaagtacagcctttgagaattttggttgctctagaaaaaacattaccaaatgtagaaagaaatgtcaggggttgcagcaaacagcatttaagaattcccatctataggcatgaccattcctactgtgagatagatagatcaggttatctcagcctaatgcccctgagcatctgattcctctaaaaccttttaatctcatggtcactaaataactttctaattattatgtggcttttaaaattcatttgcccatggaaataatataaaatccaatgaacttgaaatatttaggtctctgtgataatgatttctcattgtaaattaataatctattcagctttaaacattagcctcatggtgaaaccctgtctc

SEQ ID NO: 174209 - DNA, 2526 bp, Homo sapiens
ggttgggccgggccggttgctaagacttggcgaagcgctgcgctcgcgcccggatccctcaggcggctgcaggcttcagcctgcgctggttggtgaaacagagatgtcagaaaaggagaacaacttcccgccactgcccaagttcatccctgtgaagccctgcttctaccagaacttctccgacgagatcccagtggagcaccaggtcctggtgaagaggatctaccggctgtggatgttttactgcgccaccctcggcgtcaacctcattgcctgcctggcctggtggatcggcggaggctcggggaccaacttcggcctggccttcgtgtggctgctcctgttcacgccttgcggctacgtgtgctggttccggcctgtctacaaggccttccgagccgacagctcctttaatttcatggcgtttttcttcatcttcggagcccagtttgtcctgaccgtcatccaggcgattggcttctccggctggggcgcgtgcggctggctgtcggcaattggattcttccagtacagcccgggcgctgccgtggtcatgctgcttccagccatcatgttctccgtgtcggctgccatgatggccatcgcgatcatgaaggtgcacaggatctaccgaggggctggcggaagcttccagaaggcacagacggagtggaacacgggcacttggcggaacccaccgtcgagggaggcccagtacaacaacttctcaggcaacagcctgcccgagtaccccactgtgcccagctacccgggcagtggccagtggccttagagggagcctgccctgcccccaccgcccaccacctcctccccttcattcctgctgctacccctggtcccgagggctgggagtacctggggccccatccccccagctgggatggtggaagccggtggtggccacggaccgcccccctcctgccagggccacagaacccgtgttcatctcatccgagagcggagttcctcacaagcactccccagcagcccttggcctctgccgtccacaggacgccctcttgctcccggaaacgtgtggtcacccgccgtccactgcacggctggtacggccttgtcttcaggtctcgaggcctgactccgggggacaggtggcagcaggtcggccgccctcccgtcctccaagagctgctggcgctgaggtcagagcgggtctgatggggagctccgtctcaccggccacccgccgtcaccatggcagatgcccttggccggaactaataagaggcgtcggggccagcttccggtcccctgcagtgatagagggcttggtgcctagctgagtcctcgctgtccccgccatcccctgatctgtgcggctccagcctcgccccctccccacgtgcaccatacctggggagttcctggtccagggtatcctggggccaccctccctgcctccaaaacagggatccctggcaggctgtctttccacgcccctgagttcagagtcggggacccaggccaggtcgggagcacagccgctccccaaacccagcaaaccggcagagagccggtttcccagcagccggagccctgcaggagaggcctttgtgttttgttttgttttgttttttctcttttgagacagagtttcactctgtcgcccaggctggagtgcagtggtgtgatctcggctcactgcaacctctgcctcccgtgttcaagcagttctcctgcctcagcctcccaaatagctgggattacagttgcctgccaccacgcccagctaatttttatatttttagtacagatggggtttcaccatgttggccaggctggtctcgaactcctgacctcaagtgatccacccgccttggcctcccaaagtgctgggataataggtgtcagccaccgcgcccagcctggagtggccttttatgagaggggacccgtcaaatctgtgccttatggaggggtccggcagcggccacaattgtcttgtcccctcaccccccaactccccctggaacacctctcccaggcaagacattttcacagcaccattcacaacggttgggccaaaaagaaacttttccttcatcatttcctgcactcgctgaccacaactttggacaccccaggctgccacccctccccacccgttcacccccaggatgctgttgctgtaggacgcctgctgccctggagccctccccaggatgtgagccagtcccctcgctggtacggaatgccgctgggtgcccggaggcggccatggtgtctcgatggacggcagccaggatggagcacccatgggtctcacggccatgcttcagggtcttcaggtcctgcccccggccagtctgccaagaggcacccccttccccagcctctcgcctgcactgatgcagacaaaatctcacctggcaggcccaaccccccccacccctcccccgccgtgtgtggctcctcgccgcatcgttggggttttgttatgtgaaaatatcctggaaataaatacatgtttctgcacttagaaaaagg

SEQ ID NO: 174210 - DNA, 420 bp, Homo sapiens
cctaagagggacctgatttaagaaacaagcccgccaagcaaaggcagcagttccgactccagcagctgggaaaggaaggaaagtgaccccactttcactcatgcacagcccactggtgaccaaaaccaccgtgcaagtcgggatgacagcagggagttctggccaggtgggaaaggtgcctggaagcgggatgcgcctgtgcgtatcttgaccatgatgttggtgtgggcatgttactcttggtgcagcgtcgggtgttgctgaaccgacaggctctccagctggagtccatggagaggccagagggtgggcgcccccccacccctcccccgccgtgtgtggctcctcgccgcatcgttggggttttgttatgtgaaaatatcctggaaataaatacatgtttctgcacttagaaaaagg

SEQ ID NO: 174211 - DNA, 2478 bp, Homo sapiens
ggttgggccgggccggttgctaagacttggcgaagcgctgcgctcgcgcccggatccctcagaaaaggagaacaacttcccgccactgcccaagttcatccctgtgaagccctgcttctaccagaacttctccgacgagatcccagtggagcaccaggtcctggtgaagaggatctaccggctgtggatgttttactgcgccaccctcggcgtcaacctcattgcctgcctggcctggtggatcggcggaggctcggggaccaacttcggcctggccttcgtgtggctgctcctgttcacgccttgcggctacgtgtgctggttccggcctgtctacaaggccttccgagccgacagctcctttaatttcatggcgtttttcttcatcttcggagcccagtttgtcctgaccgtcatccaggcgattggcttctccggctggggcgcgtgcggctggctgtcggcaattggattcttccagtacagcccgggcgctgccgtggtcatgctgcttccagccatcatgttctccgtgtcggctgccatgatggccatcgcgatcatgaaggtgcacaggatctaccgaggggctggcggaagcttccagaaggcacagacggagtggaacacgggcacttggcggaacccaccgtcgagggaggcccagtacaacaacttctcaggcaacagcctgcccgagtaccccactgtgcccagctacccgggcagtggccagtggccttagagggagcctgccctgcccccaccgcccaccacctcctccccttcattcctgctgctacccctggtcccgagggctgggagtacctggggccccatccccccagctgggatggtggaagccggtggtggccacggaccgcccccctcctgccagggccacagaacccgtgttcatctcatccgagagcggagttcctcacaagcactccccagcagcccttggcctctgccgtccacaggacgccctcttgctcccggaaacgtgtggtcacccgccgtccactgcacggctggtacggccttgtcttcaggtctcgaggcctgactccgggggacaggtggcagcaggtcggccgccctcccgtcctccaagagctgctggcgctgaggtcagagcgggtctgatggggagctccgtctcaccggccacccgccgtcaccatggcagatgcccttggccggaactaataagaggcgtcggggccagcttccggtcccctgcagtgatagagggcttggtgcctagctgagtcctcgctgtccccgccatcccctgatctgtgcggctccagcctcgccccctccccacgtgcaccatacctggggagttcctggtccagggtatcctggggccaccctccctgcctccaaaacagggatccctggcaggctgtctttccacgcccctgagttcagagtcggggacccaggccaggtcgggagcacagccgctccccaaacccagcaaaccggcagagagccggtttcccagcagccggagccctgcaggagaggcctttgtgttttgttttgttttgttttttctcttttgagacagagtttcactctgtcgcccaggctggagtgcagtggtgtgatctcggctcactgcaacctctgcctcccgtgttcaagcagttctcctgcctcagcctcccaaatagctgggattacagttgcctgccaccacgcccagctaatttttatatttttagtacagatggggtttcaccatgttggccaggctggtctcgaactcctgacctcaagtgatccacccgccttggcctcccaaagtgctgggataataggtgtcagccaccgcgcccagcctggagtggccttttatgagaggggacccgtcaaatctgtgccttatggaggggtccggcagcggccacaattgtcttgtcccctcaccccccaactccccctggaacacctctcccaggcaagacattttcacagcaccattcacaacggttgggccaaaaagaaacttttccttcatcatttcctgcactcgctgaccacaactttggacaccccaggctgccacccctccccacccgttcacccccaggatgctgttgctgtaggacgcctgctgccctggagccctccccaggatgtgagccagtcccctcgctggtacggaatgccgctgggtgcccggaggcggccatggtgtctcgatggacggcagccaggatggagcacccatgggtctcacggccatgcttcagggtcttcaggtcctgcccccggccagtctgccaagaggcacccccttccccagcctctcgcctgcactgatgcagacaaaatctcacctggcaggcccaaccccccccacccctcccccgccgtgtgtggctcctcgccgcatcgttggggttttgttatgtgaaaatatcctggaaataaatacatgtttctgcacttagaaaaagg

SEQ ID NO: 174212 - DNA, 757 bp, Homo sapiens
ggttgggccgggccggttgctaagacttggcgaagcgctgcgctcgcgcccggatccctcaggcggctgcaggcttcagcctgcgctggttggtgaaacagagatgtcagaaaaggagaacaacttcccgccactgcccaagttcatccctgtgaagccctgcttctaccagaacttctccgacgagatcccagtggagcaccaggtcctggtgaagaggatctaccggctgtggatgttttactgcgccaccctcggcgtcaacctcattgcctgcctggcctggtggatcggcggaggctcggggaccaacttcggcctggccttcgtgtggctgctcctgttcacgccttgcggctacgtgtgctggttccggcctgtctacaaggccttccgcggctggctgtcggcaattggattcttccagtacagcccgggcgctgccgtggtcatgctgcttccagccatcatgttctccgtgtcggctgccatgatggccatcgcgatcatgaaggtgcacaggatctaccgaggggctggcggaagcttccagaaggcacagacggagtggaacacgggcacttggcggaacccaccgtcgagggaggcccagtacaacaacttctcaggcaacagcctgcccgagtaccccactgtgcccagctacccgggcagtggccagtggccttagagggagctgtctttccaacgcacactcctccttcatctggtgtacctggtccgaggtggagtctgg

SEQ ID NO: 174213 - DNA, 2472 bp, Homo sapiens
ggttgggccgggccggttgctaagacttggcgaagcgctgcgctcgcgcccggatccctcaggcggctgcaggcttcagcctgcgctggttggtgaaacagagatgtcagaaaaggagaacaacttcccgccactgcccaagttcatccctgtgaagccctgcttctaccagaacttctccgacgagatcccagtggagcaccaggtcctggtgaagaggatctaccggctgtggatgttttactgcgccaccctcggcgtcaacctcattgcctgcctggcctggtggatcggcggaggctcggggaccaacttcggcctggccttcgtgtggctgctcctgttcacgccttgcggctacgtgtgctggttccggcctgtctacaaggccttccgagccgacagctcctttaatttcatggcgtttttcttcatcttcggagcccagtttgtcctgaccgtcatccaggcgattggcttctccggctggggcgcgtgcggctggctgtcggcaattggattcttccagtacagcccgggcgctgccgtggtcatgctgcttccagccatcatgttctccgtgtcggctgccatgatggccatcgcgatcatgaaggtgcacaggatctaccgaggggctggcggaagcttccagaaggcacagacggagtggaacacgggcacttggcggaacccaccgtcgagggaggcccagtacaacaacttctcaggcaacagcctgcccgagtaccccactgtgcccagctacccgggcagtggccagtggccttagagggagcctgccctgcccccaccgcccaccacctcctccccttcattcctgctgctacccctggtcccgagggctgggagtacctggggccccatccccccagctgggatggtggaagccggtggtggccacggaccgcccccctcctgccagggccacagaacccgtgttcatctcatccgagagcggagttcctcacaagcactccccagcagcccttggcctctgccgtccacaggacgccctcttgctcccggaaacgtgtggtcacccgccgtccactgcacggctggtacggccttgtcttcaggtctcgaggcctgactccgggggacaggtggcagcaggtcggccgccctcccgtcctccaagagctgctggcgctgaggtcagagcgggtctgatggggagctccgtctcaccggccacccgccgtcaccatggcagatgcccttggccggaactaataagaggcgtcggggccagcttccggtcccctgcagtgatagagggcttggtgcctagctgagtcctcgctgtccccgccatcccctgatctgtgcggctccagcctcgccccctccccacgtgcaccatacctggggagttcctggtccagggtatcctggggccaccctccctgcctccaaaacagggatccctggcaggctgtctttccacgcccctgagttcagagtcggggacccaggccaggtcgggagcacagccgctccccaaacccagcaaaccggcagagagccggtttcccagcagccggagccctgcaggagaggcctttgtgttttgttttgttttgttttttctcttttgagacagagtttcactctgtcgcccaggctggagtgcagtggtgtgatctcggctcactgcaacctctgcctcccgtgttcaagcagttctcctgcctcagcctcccaaatagctgggattacagttgcctgccaccacgcccagctaatttttatatttttagtacagatggggtttcaccatgttggccaggctggtctcgaactcctgacctcaagtgatccacccgccttggccttttatgagaggggacccgtcaaatctgtgccttatggaggggtccggcagcggccacaattgtcttgtcccctcaccccccaactccccctggaacacctctcccaggcaagacattttcacagcaccattcacaacggttgggccaaaaagaaacttttccttcatcatttcctgcactcgctgaccacaactttggacaccccaggctgccacccctccccacccgttcacccccaggatgctgttgctgtaggacgcctgctgccctggagccctccccaggatgtgagccagtcccctcgctggtacggaatgccgctgggtgcccggaggcggccatggtgtctcgatggacggcagccaggatggagcacccatgggtctcacggccatgcttcagggtcttcaggtcctgcccccggccagtctgccaagaggcacccccttccccagcctctcgcctgcactgatgcagacaaaatctcacctggcaggcccaaccccccccacccctcccccgccgtgtgtggctcctcgccgcatcgttggggttttgttatgtgaaaatatcctggaaataaatacatgtttctgcacttagaaaaagg

SEQ ID NO: 174214 - DNA, 544 bp, Homo sapiens
ccagagtctcctctcttactagctttggggcctctctgggctccaccatcttggtcttggtctgtacagtggggatcacatgagcaccacctccccaggttctccggctcatggaaggagtgagtgagcacagggaccgctccagcagcaactctggatagtgacgtttcctgccattgctattctctgccctggagacggatgggcggttaggtggggcggggtggctctgagctagcggatcccactaagggtaacagatgcctgccaagcactttccatccctgtgggctgtgtcctcattcccaatttacagacaggaaaaccaaggctcagggaggccctgtgacgttcccaacgccaggaggcccaggagggcagatctcaaagccgctggcctcacactgcccttgaccctctgctggaccaggggagaggctgaggatgccggccccgccccggctccgcccccgcagcagcagggaggagccggcagccttgggaatgctggcgggtggggtggaggcggtgggagccgcggccg

SEQ ID NO: 174215 - DNA, 135 bp, Homo sapiens
gggcaaaaaagtaaggaataaagattaaattcacaaaacaagttggtatctttaccttttcatgactgtgatccataaatccaactaaatcagttttttcaagtccattccaatttaactcatcttctctggatc

SEQ ID NO: 174216 - DNA, 495 bp, Homo sapiens
ccaggcatgaggagctgattgggaatggtcatagtcagcattttccatgactgatgaccacattgagatccaagtggagacaaacttttcctttctctgttccaggcttttaggctccttatcaacacaagaatggacatcaagttacttacatattgggccaaaatattgagtgcagatgaaaataaatgctgactttgaagatttcccatccagcccgcagaaattcccctggcctgccacacttgggtaacttgagttctggaattccagacgtggttaaccccaatccacaaatttgctggagttatgaagctgagtgagagtactgcttttctattatgcattcccaatatgttctgttctgagctgacaccacagaatttacttctcccacaagtttaacccactgcatggagtgatcatggctcactgttttttggtaaataccaaaatacagataacagtttttcacagtacaaattttatatctga

SEQ ID NO: 174217 - DNA, 378 bp, Homo sapiens
accaggtgccttgggaaggtttctgtgcaggtgctgctctgtgcaagaacatttattgtagttgttttggctgaggttgaggattttttgtttggcttttgtttttaaatgtgagaggtaaattttgcaagggattaagcctaatgacacctagggacatctggttataaatattacctattttcctgaaggaaaaacctattcagatgctccctggcatggatctgttaagggcatgtaggctcctccctcattcatctcctttgcccgtcaaggaggagagtggaagactcttttccacatctgagtccttaagggggccttaagatggtctaggacaagagttggtaaatttttttctataaaggacacgttagt

SEQ ID NO: 174218 - DNA, 347 bp, Homo sapiens
acattgtgaaccctaggactcagggagtgtagtcctttcaccctgtttgcacctctctaagtgaattaccttaccccaattcattctccttgttttttgctcagtattttaatcaatttaataagccatgtggtttggtcattttaatttggtctgaaagcctttctgttcctcgacctctgggatagctcaccagttagtgcttccactgcatcaaggcaatttcccacatattgcattctcagctaatgtagtgtctttctgtattgaaagaagacttgggaaggaggcaaatgcttctcagcatcataatactaaggctatcatttttcaagtcaggtcaaagt

SEQ ID NO: 174219 - DNA, 453 bp, Homo sapiens
acacactgtgtttaactgcgtgtaatgaatctccagtgtcactttctcagtccctctccctccttgatctttatgaccttaacattttttgaagactgtaggatagttgtcttataaaatgtccctcaatgtatgtttggtgttacctcattactacccttggtatgcgtgtttggaggaaacagaagtgctgttgtgcccttctagctgcaccccataaggtgacacagggtgtcaatttgtcccatcattggtggtggtcacttggaccctgaggcaggtggtgtcagccagtctcccctggaaagttactctttgtccctttgtattggataaatattttatagggagatattttgagccttcgtaaatatcctatttctcatcaaagtttggcccattctttttagtaaacttccatctgagccctgaggatgtcatggtttccaggtt

SEQ ID NO: 174220 - DNA, 345 bp, Homo sapiens
aaacccagaaggcatgtttttcaaatagatgaatgacacagaatgcagaagggagagctgatacgtgggactccagaatcaagatccgaaacacctttcagattggaatgatgggatgaaagtaaggagatggatcttaacagaaacaaatggaaagtcttgcactgaggttccaaaaaatcgattctgtaagtacaggctggggaacacttgacttgatgtaggttcagatagtaacggttagagttgataacaagaggatcttagggtgtcttggctggctgctgaaatgccacggcaagatgctgaagatctttcttgagctgaattaaagttagattccaa

SEQ ID NO: 174221 - DNA, 453 bp, Homo sapiens
gcaataaatgttattgctgcaagcagaaagtgtctgggttggcaccacctttaagagctgtaacactgactgtacggtatgtggcttcactcctgaagtcagcaagcccacgaacacacctggaaagacgagcaactctggatgcgccacctttaagagctgtaacacttgtgcgggtattgacatttggcccccccgagcgggagatcagtgtttgcctaccagaagtctggtggcagaattgcgtggaagctgctggcgcctctgtgaggcagtggggctcccagcactttcttggctgatgggcagttctagatttagggtgaggcaagtgaggcactcaaatgggggtatcagaaatccagtaattaggataagtaacatttaatgccatatttttaaaaaacaaaaatcaatacagaaaattcgtgatgaatacagtgtggaaactga

SEQ ID NO: 174222 - DNA, 384 bp, Homo sapiens
atatatttcatagaaaaaaaaaatggagtctataggacagaaactccttcatcttatcgccgccaaaagaaaagaaaacacatacacagattcagtcatcctctcattcttttattctgttgaagtagataatagatctttgctcctaacaaaaagatcagtccttgtcaacattgcgatgaatccaaactctccaccctccgtctatctctcattcattataaaatcaactttcttcccgacttcacattgccttttagcttctgctctttctactccgctccacagtcaagcaccgcaaaagagttgtctactttcagaccttctcttgctaaaacctttaataacttcccttttgccaaatccaatggatgctttgtttct

SEQ ID NO: 174223 - DNA, 502 bp, Homo sapiens
tctgcaggctgtgcaagaagcatggtgccagcatctgctgctagtgaggaccgcaggaagcctcctatcatagtggaagatgaaggcgggccgacaagatcacgtggtgagcaacagacatgccaggttcttctaaagatccagctctcatgtgaatagagcaagaattcactcattaccacagggagggcaccaagccattcatgaggcatctgcccccatgacccaaacacctcccacttggcctcatctccaatattggggatcacatttcaacacgagatttagaggggacaaatattcagactatatcagccccctcccctaactcaagctggggttgcacctgtttcaacccagagaataccatgcaggtgacatccctatgatttctttttttgtgtgttgttttgagatggagtcttgctccgttgcccaggctggagtgcagtggcacaatctcggctcactgcaacctctgcctcctgggttcaagcaattc

SEQ ID NO: 174224 - DNA, 585 bp, Homo sapiens
atagccttgttggccacatgttatgtcttcttttgaaaagtatctgttcatgtcctttgcccacttttgatggggttgtttgtttttttttcttgtaaatttaagttccttgcagatgctggatattagacgtttgtcagatggctaggttgcaaatattttctccctttctgtgagctgttcactctgttgatagtttcttttgccgtaaagaagctctttagtttaattaggtcccatttgccaatttttgtttttcttgcaattacttttggcatctttgtcatgaagatcatttccaggtcctatgtccgcaatggtatttcctaggttatcgtccaaggttttaatatgttttcattttagatttaagtttttaatcctgcctttgcctcccaaagtgctgggattacaagcgtgagctaccacacccagcgaggaagccaagtttaacgtgtgtgctccactcctccaacctggccaaagggcagtcatcatcactggccactgctgaccacagcctttagaaactccccttgaacgtgctgggctgaccttcctctgatcacaggcaaggtaaccata

SEQ ID NO: 174225 - DNA, 209 bp, Homo sapiens
tgtatcagttaggatgctctcagatacaataatttaacttgtaagcaaaccaacttgtccaagattcaataacagagtagtggctgatgtaaatcaagagtccagttgttggacaggatctgtggttggttgatctagcatcttgacaatgtcatcaatgacccagtttctttccatctttctactgtgtagtccacagtatcaatttc

SEQ ID NO: 174226 - DNA, 269 bp, Homo sapiens
gcgctcgcaagtggtcagcataacgccgggcgaattcggaaagcccgtgcgtccgtggacgacccacttggaaggagttgggagaagtccttgttcccacgcgcggacgcttccctccgtgtgtccttcgagccacaaaaagcccagaccctaacccgctcctttctcccgccgcgtccatgcagaactccgccgttcctgggaggggaagcccgcgaggcgtcgggagaggcacgtcctccgtgagcaaagagctcctccgagcgcgc

SEQ ID NO: 174227 - DNA, 508 bp, Homo sapiens
cctggcacacacacgtttacttttaaaagctgctggcttatagctctttctgtgcctttggtcttttgggtgacattctggccgtgtaacttttatccgtcccttgacttctgcatgttaactaagactaagagcatattcatagccaactcctgtcaagtgttaactatacaatagctactgcacatatattacttcatcttccctaaaccatagagagtggttactatcactgccatttttaaagatgaggacccagactcacagcttcaagaccattaccaaggtcatagaactagaaaatgtcagagctgataggaaaatctaagtgtgtctgtttgacttggttgttctattttaggttagctcgtaagtgttttataaaagtagtcactcctccagacaatgaaagatttattgtcaagaaaacatctatctgaagagtccgatggggcctgtacttagtatatctggctccaaatcagcatttacttatagacttcatgca

SEQ ID NO: 174228 - DNA, 203 bp, Homo sapiens
ctttactggcccaaccagaaacagaaactaagaacctgtgactgtattctctccttcggacactcctggacatcctggggagttcaggctcctgagccaagcaaaggctgaagttccaggaacatggaggaggatgttccttcacaagcccaggaacgtggaggacaatgtcaaagaatcgaggaattcccagcaatggcttc

SEQ ID NO: 174229 - DNA, 176 bp, Homo sapiens
ctgtacttagacattaagccctcatttcgtttcacaaacttcccaccaatgatctaacccagcaagattctgtccctgcatgggcagccccagctacctcagccccgtctgtgtccacctcccaccctccagtccattcccttggcctcctccatctttctcatgcccatcatgca

SEQ ID NO: 174230 - DNA, 514 bp, Homo sapiens
atctgggagcagttctgagagacaagccccggatggctgggcactgaacagccgccctgcgagatgagctgccctggctttttcccctatcaagggcagagactgaattctttttaactgtgtcaccaagcccagggcatacaagaggtactcaaaaacgtgttcgccgacaccctgattcctatttatactgaccattacacaacatgtttgcttagagcccagcaaagaattttcagaatgtttcacgtctatctccccacattcaggagagatagtcacacaagatgacaggctatagggacgctcaaaagagccataatcaccaggggcacgcgggttccccagcgccagcagcccaacgctccaggctccagcacgccacaaaaccttgcggcattctctaaagtaaaaggactgattttaaaatgataatcgtcattcttgcgacagccccaggaagcctggctcctgaggtcctgagcccgcgtctttctttgccccaccgcggccg

SEQ ID NO: 174231 - DNA, 1286 bp, Homo sapiens
  misc_feature (23)..(23): n is a, c, g, or t
  misc_feature (63)..(63): n is a, c, g, or t
  misc_feature (72)..(72): n is a, c, g, or t
  misc_feature (76)..(76): n is a, c, g, or t
  misc_feature (96)..(96): n is a, c, g, or t
  misc_feature (114)..(114): n is a, c, g, or t
  misc_feature (117)..(117): n is a, c, g, or t
  misc_feature (121)..(121): n is a, c, g, or t
  misc_feature (133)..(133): n is a, c, g, or t
  misc_feature (141)..(142): n is a, c, g, or t
  misc_feature (150)..(150): n is a, c, g, or t
  misc_feature (152)..(152): n is a, c, g, or t
  misc_feature (156)..(156): n is a, c, g, or t
  misc_feature (163)..(163): n is a, c, g, or t
  misc_feature (174)..(174): n is a, c, g, or t
  misc_feature (176)..(176): n is a, c, g, or t
  misc_feature (180)..(180): n is a, c, g, or t
  misc_feature (189)..(190): n is a, c, g, or t
  misc_feature (201)..(201): n is a, c, g, or t
  misc_feature (205)..(205): n is a, c, g, or t
  misc_feature (214)..(214): n is a, c, g, or t
  misc_feature (230)..(230): n is a, c, g, or t
  misc_feature (238)..(238): n is a, c, g, or t
  misc_feature (241)..(241): n is a, c, g, or t
  misc_feature (249)..(249): n is a, c, g, or t
  misc_feature (254)..(254): n is a, c, g, or t
  misc_feature (257)..(257): n is a, c, g, or t
  misc_feature (259)..(259): n is a, c, g, or t
  misc_feature (265)..(265): n is a, c, g, or t
  misc_feature (268)..(268): n is a, c, g, or t
  misc_feature (271)..(271): n is a, c, g, or t
  misc_feature (274)..(274): n is a, c, g, or t
  misc_feature (277)..(277): n is a, c, g, or t
  misc_feature (283)..(284): n is a, c, g, or t
  misc_feature (295)..(296): n is a, c, g, or t
  misc_feature (310)..(310): n is a, c, g, or t
  misc_feature (315)..(315): n is a, c, g, or t
  misc_feature (318)..(318): n is a, c, g, or t
  misc_feature (325)..(325): n is a, c, g, or t
  misc_feature (334)..(334): n is a, c, g, or t
  misc_feature (340)..(340): n is a, c, g, or t
  misc_feature (346)..(346): n is a, c, g, or t
  misc_feature (349)..(349): n is a, c, g, or t
  misc_feature (354)..(354): n is a, c, g, or t
  misc_feature (362)..(362): n is a, c, g, or t
  misc_feature (377)..(378): n is a, c, g, or t
  misc_feature (382)..(382): n is a, c, g, or t
  misc_feature (385)..(385): n is a, c, g, or t
  misc_feature (388)..(388): n is a, c, g, or t
  misc_feature (391)..(391): n is a, c, g, or t
  misc_feature (395)..(395): n is a, c, g, or t
  misc_feature (402)..(402): n is a, c, g, or t
  misc_feature (406)..(406): n is a, c, g, or t
  misc_feature (418)..(418): n is a, c, g, or t
  misc_feature (426)..(426): n is a, c, g, or t
  misc_feature (429)..(429): n is a, c, g, or t
  misc_feature (433)..(433): n is a, c, g, or t
  misc_feature (445)..(445): n is a, c, g, or t
  misc_feature (451)..(451): n is a, c, g, or t
  misc_feature (471)..(472): n is a, c, g, or t
  misc_feature (474)..(474): n is a, c, g, or t
  misc_feature (476)..(476): n is a, c, g, or t
  misc_feature (515)..(516): n is a, c, g, or t
aaaaaaaaaaagtaaaaaaaaangaaggaaacggaaaggaaaaaacagaaaaaaagagcaaanaaaacacanaaancacggaacggaaaaaacacncagaaaccggaaaacaanganaacngaagaaaaaganaaaaaatnnaccctgtnancaancggcgcngcaggaaagancntggnaatgccgtnngggtgtgtgantctnggcgaaaanaagaaaaaaaaaaagnaaaagganganaatgaaanaaaanaananggaaanganaanaanaangaagannatagtgaaaanntccgggccaagganaaganganaggaaanaagcaaaantgcaanaagtancanaaganggaaggangcaaggagcggaaannagcnaanaanganaaangcatccncaanaaggagaagcancccaaaanccnaaancaggaggaagtntttgtnaaccgcaaagagtactttanntncntggagcaggccaaggggagggaggagtatgactggatcnnggaccagggctactactcggagcgagacacaagcaacgtggtacggcaagtcctggaggccgtggcctatttgcactcactcaagatcgtgcacaggaatctcaagctggagaacctggtttactacaaccggctgaagaactcgaagattgtcatcagtgacttccatctggctaagctagaaaatggcctcatcaaggagccctgtgggacccccgagtatctggccccagaggtggtaggccggcagcggtatggacgccctgtggactgctgggccattggagtcatcatgtacatcctgctttcaggcaatccacctttctatgaggaggtggaagaagatgattatgagaaccatgataagaatctcttccgcaagatcctggctggtgactatgagtttgactctccatattgggatagtagtatatcgcgaggcgcgacacagagcatggggtcaagggggttggagtgggtggtggagcgagagcggcgtgatcgctgcagaagaggccatctccgcatgagatggatgtctggcaatgctgcttctgataagaacatcaaggatggtgtctgtgcccagattgaaacagaactttgccagtgccaagtggaagaaggctgtccgagtgacacaccctcatgaaacggctccgggcaccagagcagtccagcacggctgcagcccagtcggcctcagccacagacacttgcacccccggggctgcagaccgtagtgccacccagccacagatggaagtgcc

SEQ ID NO: 174232 - DNA, 140 bp, Homo sapiens
tggtccgaagacagaagagggacttcatgattttaggatttctgaggtagaggctgggttgatatctatgatgcaacctaggaaaacttaccatgcctccctgttaaaggcagaataatttaatataaagcaaaggctta

SEQ ID NO: 174233 - DNA, 367 bp, Homo sapiens
cagctttcagaaagctctgaactatgtacgggacaccgcgggggaagtgcggtggcctcacgtggctggtgcagatggccctttgtccccttgaggacatcaacttcaactttcttccacccccagggtatacctttctcccccagccacactgtgggctgcagagttctagagagccacagcctcccgctggcctggggcagcctccgtccgtccatctgtctggcctgaggaccaggggccggtggtgggcggcgggacacagcgcctgctcagcaccgcctgctgggcgggggtttgtaccccgtgtctttcacagctgagagaagtatcagtgcacgatccaacccctaagcagcttagatta

SEQ ID NO: 174234 - DNA, 551 bp, Homo sapiens
tcggtaccggtaatccgtacataattgatcatgattgatttccttacctgtagacttctgtggggatagagagaaacaaacatggagttctgaggccaaacagactgcagttcaaatcctagttctaccactaaatagttggatagccttggattaaaaacaaacaatttagagcattgtaaattgttcagtaatttatgaacaattttctctttttcccctccaattcttgcctaccatgactctcggagccactaacagaatggcctctttcacaagccatgcctttcctaaaacttcctgccaccgaaaaggtagggctggaattccttttcttccttaaagtccttcatgccatcaccttgtcacttccaatctctcagattttcccttcactcaccaggtaggtttattctatatcacatttatttttcaatgccttccttcaattcttttgatgagttagctaaaggaaaggaactgagggagagaaaaggagggaagaatgggcatttttcctctcaagtgagagattacggcatgcttaagtg

SEQ ID NO: 174235 - DNA, 278 bp, Homo sapiens
gcataataccttcaccatggtgatttatttacacatcttacctgtaacggtagagtataaattccatgaggggaaaggaaatgggaaagacttaagaaataattttctcctcatccactatctttcatacatttctttttcctgcaaacttttctatagccaatgaaagcttcattaaggagaacacatttgccctggcagagcaggtccttaaattaacaatgccatcagctccttcccactgacaaagggtccctcaccatgcataaggcaattct

SEQ ID NO: 174236 - DNA, 713 bp, Homo sapiens
ccgattcaaactgagcgctcacatctgggtgatcgcgcggggagggaaaggccgcgtcgcgtcccggacacgccagggctgtttccacagtggccacagatactgcgggcgcgccatgatccggggtcacccccgaccgttctttgttcgccccggaacagcgaatcccgactgcggagatagggaaactgaggtccgggccccgcacagtccgcggccggctgcctacagctgggaaaactgaggcctggaccttgtacagtccgcggccgcccgcctacagctggggaaactgaggcctggaccttatacagtaggcggccgcccgcctacagctggggaaactgaggcctggaccttgtacagtccgcggcctctcacctacagctggggaaactgaggcctggaccttgtacagtccgcggccgcccgcctacaggtggggaaactgaggcctggaccttgcagtccttggccgcccgcctacagctggggaaactgaggcctggaccttgtacagtccgcggcctctcacctacagctggggaaactgaggcctggaccttgtacagtgggcggccgcccgcttacagctggggaaactgaggcctggactttgcacagtccgcggccaaccgcctaaagctggggaagctgaggtccgggccacacacagtccacggccatccgcctacagctggggaaactgaggc

SEQ ID NO: 174237 - DNA, 147 bp, Homo sapiens
gtcattgctctccattgagtccactggatgaacttgcttcttgctccatctcagagtccataagaatatgtctttgcagaggacatttaggggagggaatgtgttaccaattcatttccaggcctcagatctcaactaaggtgtttt

SEQ ID NO: 174238 - DNA, 177 bp, Homo sapiens
tcctaagtaaaactacatatagaaaaaagttcaccaactaagaaatacaaattaaaagggcaagtgctgtgtcacagttgggaaccgggtgctgctatatattgctaggggtgggggaatattaactggcacaacctttctggcaaattaaaatgccttaaacaagcccattgaccc

SEQ ID NO: 174239 - DNA, 373 bp, Homo sapiens
tacgtggctcgggagcccctgaatgaatgggcttggcccaacttaggggcgcattccgacgggagagtcctggctgtattccgaggctccagtgcgcatgcggagtcgatcccgcgcaggcgggcggggacggcagccgggtcttgtgggcggagcctgactaagtgccgcccccttgccggctgcagattgctatttctgccccccaccctcgcccatccccccgcgagctggactgcgccaaggcttctgtgagccgcttggggccggccggggcggggcctgcccgacccgggtttggctggcgggcccctaggaatgctctcctccccgcccccggcccaaagtgccacggtggcggtggtggcggccg

SEQ ID NO: 174240 - DNA, 210 bp, Homo sapiens
atgatcttggtgaggacatatatcttggcgcaaccctgagtagcaaaagacgaagactaattacctgacagagctcccctccactcgcctgggtcattgaaattaatttctgctttcaagcttggcagaaagcagctgcagaatttcagttcaatacttaaattaacggggagccgaaattatttctgtgcacaggcagtattagaggag

SEQ ID NO: 174241 - DNA, 640 bp, Homo sapiens
tgggtcactctgtcacccagtccggagtgtggtgcgcaatctctggccactgcagcctcagccttcctagctcaagcaatcctcctgcctcagcctcacaagtagctgggattacaggtatgtgccactacaccctgctgatttttgtaattttttttgtagagatggggtttcaccgagttgcccaggctggtcttgaacttctggactcaagcaattctcctgcgttgggcctcccaaagtgctgggattataggcacgagccaccacatccagccccttgccagttttgagtatcttcaacaattcttctatgttgtcctaacttttcttaagatttaatcatccagttcaagccagcaattgggcaactactttaaaactcatttgcaaagtgacaaatgcagcatcctagctacagataataaatactttgaactaccaactcatattgcaaagattgctaagtgtacatttgaagatattttctggtgattctgacagactgagattttaatatccttggggtataatcatcagggactaatatagatgagaagatgcacaaagatcttcattaaagggaatttaagtaagtgaaacattccaatttaatatcggggactgatattactgtaaa

SEQ ID NO: 174242 - DNA, 483 bp, Homo sapiens
ggagtgggaagaagtgatccccgagggccctttggaaggccccctgggaccctataaactgtcctgggtttaagacaatggaacccaggatgagctgacaatggaggggaccagggccaatttgacaggctgggatccccaaaagggcctgatcgtacgtgtgtgtgtctccagtgcagttggctgtggaccctggagtcagccactggtggtctcttctcatgaccatgcaggccagaagggccctcctcacagccgcacatcctgggtacctgtggtccttggtgtgctaacggccctggtgacggctgctgccctggccctcatcttgcttcaaaagagaccgaaagagacgtggtttgggcaaggctttgacagtgtcatttcccggggagagccagccattcacttctgggcagcccggtccttcaatcaagaaaggcccaagtgcatcgaggccacattggaaagcttgggcatcaa

SEQ ID NO: 174243 - DNA, 259 bp, Homo sapiens
ttttttagagaggaaaattcataaattgattgatgttgtaattaagtgtaacagttatttattctaggatgaattcctgttttgaaactgcttaattctatccaatgaccacagactttgcatctctaactgcaactatatattcaacaattagtcatcttcacagaggaaataaaaccaaagagtgcaataagaacagcatactttcatctccgctcttgatttcagataaagagccatgttcaaattacacctctgt

SEQ ID NO: 174244 - DNA, 419 bp, Homo sapiens
taggtccctgcagctgccacctccgcagggctccctctggctgcacgaggccccgctagagaaagctcagaagggcagggaagtgagccgtccacttgactgcaacttgaaaaggggccaccattgtcctttggcgcccctccctcccagcaggaccccaggccccacctctggaccaggccccacacgttccaagacaaagacacccccatcggaagccccgaggaatgctagatgccgctgagagggttcaagggctgctgtgtgctttccagtaagttggaaacgcctcggagaggctgaaactggcaaactcacaggcctgggccagagcttccacccgggtaggggtgggcccccaagagggtgcctctcagcagagtggagcccgatccaccgaggagagcaggaggcggccg

SEQ ID NO: 174245 - DNA, 479 bp, Homo sapiens
ctgggccaaagaatttctctccttccagcacattcccatggggctcaggaattagatgagttaatacacataatatgttttgaacagtacctggtgcagagtacgtactcagtgaatgttgagtgttcttaccatggttggccgaggtgaggatgaacgtgaggagggcaaggctctgccaacaggtgttggagaggcaggtgcatggcctgctcagggtggagctgtgtcggttccttggtgctgataggcgtcagctgctgccaggctttgggagaagactcctggtatctaggggttagacaagaaacacaccccaaagacctggtgagagctagtgtggtggcgttgctgcagatccaagcttaaggaagttgctcatgtgtctgttacagtagttaaattaccagccagtctgctgccaagggtttgtaaatacttgttttttggcggggggcggggggtgggatttaagggtg

SEQ ID NO: 174246 - DNA, 243 bp, Homo sapiens
aacttcacttttttcatctcataagagggggccatatgatctgcctaccttcctggggggccgtgaggattggctgaggtcaagggtgggcctgcttcgtaaactgcactgttatcattgggatctgggacggagcctgaataaacgtattcacactcgggctttagtgtttaataagacttaaaacaacaataacaaatccctatcgaactatgtgcattttaagaggggacaaagctctaa

SEQ ID NO: 174247 - DNA, 786 bp, Homo sapiens
cacaactggaatttctatcatattgtgttaaattactacttctagaaattcatgtaaatgaaatcaaccagaatgtgatgttttcagaatacctgaaactaagcaatggataaagaagaaaaacgtatttcatgtaattctggaggcttgggaaatcaaggtcaagagggaacatctggtgagagccttcttgctgacagagtctgtcaccaggctggagtgcagtggtgtgatctcggttcactgtaacctctgcctcccaggtttcaagcaattctcctgcctcagcctcccaagtagctaggactacaggcatgcaccaccatgcccagctaatttttgtatttttaatagaaacaaggtttcaccatgttggccagggtggtctcaatctcctgacttcgtgatccacccaccttggcctcccaaagtgctgagattataggcgtgagccactgtactcagccatatctttttaattcgcgtattaaattccatttggaattcatattcatgtttgaaattaggaagaggtttaactatatacacacacaaaacacacattgacatatatttacaaataaacaattgtataaattcctttattgaaaaactcgtattttccaagttggttgagtcaccattatcatatattaaatgatcatacatgtatggttctgcttatatttatttctctacactaggtagaatatttaataatgttggaacagataccactgtcttgttctggccttattaaaaatgtctttatactcgagaagcaat

SEQ ID NO: 174248 - DNA, 496 bp, Homo sapiens
tggggagctggaaacggtgtcaaggttgactgagccctgcttctagtgtgagaaaacccagcttatattcaaaacggatgccagggcaacatcaaagcataggaattcactacattcacctgggcctgcacacctgtgctcacttgcacacactgtcttcagggtgttacgggcagaggtcaggacttcattagccaagtagcctctaactgggcctcaccctcggtaggctttggtctcctcatctgtctgggaagggctgaccttggaagcctccaagggctcatctctggaatacgatgttataagcacagattctggagtcagcttgcctgagtatgaacctctgctccaccccttactagctgtgtaatgctgggtaagttactcagcttctctgtgtctcatggtcctcatctgcaaaatggggataataaaagaacctacttcatgagagttcagtgatgattaaatgagttaatatatctaaaaatca

SEQ ID NO: 174249 - DNA, 435 bp, Homo sapiens
gcaggggaccagacctcctgggtggcctccatcaccactaagtcacttgggcacctggagaaatggcaaaggtcccaaacaggaaaccaagattgggaagtgagggccctagaattagaatcttttggggtctatgattgtctaggtcagcagttcccaaagtgtggtctgaggatccctgtggttccctgagcccttttcagactgtccttttctaactgcaaagctccattaggctggattttcttcaaccaaaacaatgtatcacaacgcattggatgcccaagcccctatgaggaagcagctgttttcaattaagccagatattaaagaggtttgcaaaaatgtaaaaacgatgccacttttctccctaaacttttttgtttgttttggaaaatacggttattttttaataaaattgtgctatcgatgtta

SEQ ID NO: 174250 - DNA, 895 bp, Homo sapiens
ggtgcctgcttctccttctgccatgattataagtttcctgaggcttccccagccatgcgtaactctccttcccatttatgagagagccacatgacatcagcccatagactgtggagagtattccagatctatcacattctgcgattctgcgattcccagaaggctggtcatgaaaaaattccctcttcagtttacatatatggcagtgctccagtgccatgacagttttaatcttctggttccatctgcatagatttcagtctctaattgaggaaaatcatctgtttttctcaggagccccttgattcaagtttacacaaaatgtgcctttggagactatcctgttaatttaaacagttcagatcccacttgtatgtgagacagatgcttctctggccatcagccaggtaccactaaaggaggtacaggcacttctagatatctgttgaggcctggaaggggcaaaacaattcaggaagcagttgaagataaaggggtttaccatggaagagaagatccaggtgccttcatggaaatgcttgtggttgaaaagagatgaagatgagggtccctggaaagaggaagaaccagccaggaaaattataccattagcaagactggcatcagcaagtagttcgcagtgttggttgttcttggtttcgcaggattttataggagatgagaaacaggcacaggttaagtggttctgaattttccatcgggtctggagccgcagatggagttgggcccaaatggctgttggatgggtcctccatttggtcccgtcaatgtccatatggggtggtccccgggtctgcatattgtttcctcacaggtgcggcacgtgtctgcgcaggcccgttggggagtcctgaaaataagagccgaaagggag

SEQ ID NO: 174251 - DNA, 531 bp, Homo sapiens
ggtgcctgcttctccttctgccatgattataagtttcctgaggcttccccagccatgcgtaactctccttcccatttatgagagagccacatgacatcagcccatagactgtggagagtattccagatctatcacattctgcgattctgcgattcccagaaggctggtcatgaaaaaattccctcttcagtttacatatatggcagtgtgtcaaggtgtcagctttgaaggccactcttgtgtggagacggtgctaccaactgactggagacaggatgtgccctttggataggggaccgcataactcaacatccaaactgggacactgttattatttaagcaggacaacaggaataagatgagactgcttattcaaactgggatttacagtcactttacttagggccaggtccacatcctgccttgcttgcttgttaaggaatcttgtcacaaattatttagtttctctgaaccacagtttcctcagttgtaaattgggcacaataatgccaacttgtaagaattagagag

SEQ ID NO: 174252 - DNA, 1705 bp, Homo sapiens
  misc_feature (1653)..(1653): n is a, c, g, or t
  misc_feature (1694)..(1694): n is a, c, g, or t
  misc_feature (1697)..(1697): n is a, c, g, or t
  misc_feature (1700)..(1700): n is a, c, g, or t
  misc_feature (1702)..(1702): n is a, c, g, or t
  misc_feature (1705)..(1705): n is a, c, g, or t
accagttgctaagaagttgttaccaagtttggtgaataattaaactcttggacatgacaggggaggagaattattgattcaaaggaccttagagctcaaaaggtcctgagagaccatcataaccaccctctttattttacagatacagcttctgaggatcacggggatgaaaggcatgaactgggctcacacagctaatgcattaggacaccagaaaaggaagaaaagacagtggcagctgaagacatttcaggaatgcttcactgagaacctaagtcttgttctgggccataaagaaaaggggagggtgtggtttctataccagagataagaaaggagaaaattggacgtggaggaaagatatgagtaccaatccgagcgaacaaggaagagtgagtaaatctgtccagctggagttggagtgaaaaaggtgcctgcttctccttctgccatgattataagtttcctgaggcttccccagccatgcgtaactctccttcccatttatgagagagccacatgacatcagcccatagactgtggagagtattccagatctatcacattctgcgattctgcgattcccagaaggctggtcatgaaaaaattccctcttcagtttacatatatggcagtggcacttctagatatctgttgaggcctggaaggggcaaaacaattcaggaagcagttgaagataaaggggtttaccatggaagagaagatccaggtgccttcatggaaatgcttgtggttgaaaagagatgaagatgagggtccctggaaagaggaagaaccagccaggaaaattataccattagcaagactggcatcagcaagtagttcgcagtgttggttgttcttggtttcgcaggattttataggagttctgaacactgggaagtccaagagcaaggcaacaacagattcaacatctggtgagagctactctctgcttacaagatggcactttcttactgcattctcacacagaagaagagaccagtactgtgtcctaccatggtggaaaggcaaaaaggagccaaacaggctccctcaagaccttttcttttctttcctttttttttttttttttgagacggagtcttgctctgtcgcccaggctggagtgcagtggcgcgatctcggctcactgaaacctccgcctcccaggttcaagcaattctgctgtctcagcttcctgagtagctgggaggacaggcatgcgccaccacgccctgataattttttgtattttagtagagatggggtttcaccatgttggccaggatggtctcaatctcttgaccttgtgacccgcccacctcgacttcccaaagtgctgggattacaggtgtgagccaccgcgcctggccctcaagaccttttataaaagtactaatcccattgctgaaggcagagacctcatgacccaatagcctcttaaaggcctcacctcttaataccttcacaatggggattaagtttcagcatgaattctggagggaaacaaacattcagaccatagcaattaccaatctttaaggggctactgccctcaaattgcactcaatttacatcgtatcaattgctataccacttaatggacattgttttcatcatataattttttttctacttttctctgctttnttcttgccattattttttagcattgctattgaatatatgcnttnaancntcn

SEQ ID NO: 174253 - DNA, 2088 bp, Homo sapiens
  misc_feature (2036)..(2036): n is a, c, g, or t
  misc_feature (2077)..(2077): n is a, c, g, or t
  misc_feature (2080)..(2080): n is a, c, g, or t
  misc_feature (2083)..(2083): n is a, c, g, or t
  misc_feature (2085)..(2085): n is a, c, g, or t
  misc_feature (2088)..(2088): n is a, c, g, or t
accagttgctaagaagttgttaccaagtttggtgaataattaaactcttggacatgacaggggaggagaattattgattcaaaggaccttagagctcaaaaggtcctgagagaccatcataaccaccctctttattttacagatacagcttctgaggatcacggggatgaaaggcatgaactgggctcacacagctaatgcattaggacaccagaaaaggaagaaaagacagtggcagctgaagacatttcaggaatgcttcactgagaacctaagtcttgttctgggccataaagaaaaggggagggtgtggtttctataccagagataagaaaggagaaaattggacgtggaggaaagatatgagtaccaatccgagcgaacaaggaagagtgagtaaatctgtccagctggagttggagtgaaaaaggtgcctgcttctccttctgccatgattataagtttcctgaggcttccccagccatgcgtaactgagtgaggacctagaattttaatgtctaatatgcggtgtgaattaaagaagcggccttgctatgctgaccttttcaatattctaatctttgctttgctgacctctcaggcctcttcctggcaacagttaggcttttgagaggagagagagctgagactgttggctccttcccatttatgagagagccacatgacatcagcccatagactgtggagagtattccagatctatcacattctgcgattctgcgattcccagaaggctggtcatgaaaaaattccctcttcagtttacatatatggcagtgctccagtgccatgacagttttaatcttctggttccatctgcatagatttcagtctctaattgaggaaaatcatctgtttttctcaggagccccttgattcaagtttacacaaaatgtgcctttggagactatcctgttaatttaaacagttcagatcccacttgtatgtgagacagatgcttctctggccatcagccaggtaccactaaaggaggtacaggcacttctagatatctgttgaggcctggaaggggcaaaacaattcaggaagcagttgaagataaaggggtttaccatggaagagaagatccaggtgccttcatggaaatgcttgtggttgaaaagagatgaagatgagggtccctggaaagaggaagaaccagccaggaaaattataccattagcaagactggcatcagcaagtagttcgcagtgttggttgttcttggtttcgcaggattttataggagttctgaacactgggaagtccaagagcaaggcaacaacagattcaacatctggtgagagctactctctgcttacaagatggcactttcttactgcattctcacacagaagaagagaccagtactgtgtcctaccatggtggaaaggcaaaaaggagccaaacaggctccctcaagaccttttcttttctttcctttttttttttttttttgagacggagtcttgctctgtcgcccaggctggagtgcagtggcgcgatctcggctcactgaaacctccgcctcccaggttcaagcaattctgctgtctcagcttcctgagtagctgggaggacaggcatgcgccaccacgccctgataattttttgtattttagtagagatggggtttcaccatgttggccaggatggtctcaatctcttgaccttgtgacccgcccacctcgacttcccaaagtgctgggattacaggtgtgagccaccgcgcctggccctcaagaccttttataaaagtactaatcccattgctgaaggcagagacctcatgacccaatagcctcttaaaggcctcacctcttaataccttcacaatggggattaagtttcagcatgaattctggagggaaacaaacattcagaccatagcaattaccaatctttaaggggctactgccctcaaattgcactcaatttacatcgtatcaattgctataccacttaatggacattgttttcatcatataattttttttctacttttctctgctttnttcttgccattattttttagcattgctattgaatatatgcnttnaancntcn

SEQ ID NO: 174254 - DNA, 2110 bp, Homo sapiens
  misc_feature (2058)..(2058): n is a, c, g, or t
  misc_feature (2099)..(2099): n is a, c, g, or t
  misc_feature (2102)..(2102): n is a, c, g, or t
  misc_feature (2105)..(2105): n is a, c, g, or t
  misc_feature (2107)..(2107): n is a, c, g, or t
  misc_feature (2110)..(2110): n is a, c, g, or t
accagttgctaagaagttgttaccaagtttggtgaataattaaactcttggacatgacaggggaggagaattattgattcaaaggaccttagagctcaaaaggtcctgagagaccatcataaccaccctctttattttacagatacagcttctgaggatcacggggatgaaaggcatgaactgggctcacacagctaatgcattaggacaccagaaaaggaagaaaagacagtggcagctgaagacatttcaggaatgcttcactgagaacctaagtcttgttctgggccataaagaaaaggggagggtgtggtttctataccagagataagaaaggagaaaattggacgtggaggaaagatatgagtaccaatccgagcgaacaaggaagagtgagtaaatctgtccagctggagttggagtgaaaaaggtgcctgcttctccttctgccatgattataagtttcctgaggcttccccagccatgcgtaactgagtgaggacctagaattttaatgtctaatatgcggtgtgaattaaagaagcggccttgctatgctgaccttttcaatattctaatctttgctttgctgacctctcaggcctcttcctggcaacagttaggcttttgagaggagagagagctgagactgttggctccttcccatttatgagagagccacatgacatcagcccatagactgtggagagtattccagatctatcacattctgcgattctgcgattcccagaaggctggtcatgaaaaaattccctcttcagtttacatatatggcagtgaaaagacaagaggaatcttggcctcaaaaactgatatccatcataagatcatggtgaaatacagtctgaagcaggtccagagtgagaagagaaaagaatcacagaaatggggctggagtttcaactgtattaagccagaagactacctgcctccaaactttcaagaagccaacaaagttcctgactgtttaaactaatttgagttggatttctattgcttgtatctaaaagaatcctaactggcacttctagatatctgttgaggcctggaaggggcaaaacaattcaggaagcagttgaagataaaggggtttaccatggaagagaagatccaggtgccttcatggaaatgcttgtggttgaaaagagatgaagatgagggtccctggaaagaggaagaaccagccaggaaaattataccattagcaagactggcatcagcaagtagttcgcagtgttggttgttcttggtttcgcaggattttataggagttctgaacactgggaagtccaagagcaaggcaacaacagattcaacatctggtgagagctactctctgcttacaagatggcactttcttactgcattctcacacagaagaagagaccagtactgtgtcctaccatggtggaaaggcaaaaaggagccaaacaggctccctcaagaccttttcttttctttcctttttttttttttttttgagacggagtcttgctctgtcgcccaggctggagtgcagtggcgcgatctcggctcactgaaacctccgcctcccaggttcaagcaattctgctgtctcagcttcctgagtagctgggaggacaggcatgcgccaccacgccctgataattttttgtattttagtagagatggggtttcaccatgttggccaggatggtctcaatctcttgaccttgtgacccgcccacctcgacttcccaaagtgctgggattacaggtgtgagccaccgcgcctggccctcaagaccttttataaaagtactaatcccattgctgaaggcagagacctcatgacccaatagcctcttaaaggcctcacctcttaataccttcacaatggggattaagtttcagcatgaattctggagggaaacaaacattcagaccatagcaattaccaatctttaaggggctactgccctcaaattgcactcaatttacatcgtatcaattgctataccacttaatggacattgttttcatcatataattttttttctacttttctctgctttnttcttgccattattttttagcattgctattgaatatatgcnttnaancntcn

SEQ ID NO: 174255 - DNA, 1219 bp, Homo sapiens
accagttgctaagaagttgttaccaagtttggtgaataattaaactcttggacatgacaggggaggagaattattgattcaaaggaccttagagctcaaaaggtcctgagagaccatcataaccaccctctttattttacagatacagcttctgaggatcacggggatgaaaggcatgaactgggctcacacagctaatgcattaggacaccagaaaaggaagaaaagacagtggcagctgaagacatttcaggaatgcttcactgagaacctaagtcttgttctgggccataaagaaaaggggagggtgtggtttctataccagagataagaaaggagaaaattggacgtggaggaaagatatgagtaccaatccgagcgaacaaggaagagtgagtaaatctgtccagctggagttggagtgaaaaaggtgcctgcttctccttctgccatgattataagtttcctgaggcttccccagccatgcgtaactctccttcccatttatgagagagccacatgacatcagcccatagactgtggagagtattccagatctatcacattctgcgattctgcgattcccagaaggctggtcatgaaaaaattccctcttcagtttacatatatggcagtgaaaagacaagaggaatcttggcctcaaaaactgatatccatcataagatcatggtgaaatacagtctgaagcaggtccagagtgagaagagaaaagaatcacagaaatggggctggagtttcaactgtattaagccagaagactacctgcctccaaactttcaagaagccaacaaagttcctgactgtttaaactaatttgagttggatttctattgcttgtatctaaaagaatcctaactggaaaaaagaagttattgccagaagaagaaagaagaggagaagaaagaggtgtcataaactttctaagacagtgccttgcctgaagactatgagtttctgtgcatcctaggacctttatggaaattagataatttttgatgaagttaaacaattatattataagaaactcctcaaatcaagaataaataaaaacaagagtagcattaaaatttactgcagagtacattaatacagttcaaatctaaatgtctgctcttgcatttctgtgacttttcatgccatgctgaaaatctggaatggaaactctcatccatcttggtgatttcctagtgccctgagg

SEQ ID NO: 174256 - DNA, 609 bp, Homo sapiens
gagacagagttttgctatgttggccaggctggtctttaactcctggactcaagcaatccgcccccgacagccacccaaagtgccgggattataggcatgagccaccatgcttggctgagatttgtatctaaatatataaaatcttcatcctaagccctataggggtaaggagacaaaaaagaaatgtgatgtgaccttccacgtggctagtctgattcctattatcccctccctaacttcttacccttggtggtccctggggcctgaggcataactgactaactatgtggtcagaactctgggtttatctaaccaatgagctgcagtttctggtcatacagccctgccagttttctggatgcaaaactgctcacatactaaacacctttctgaaaatgagcatggtttgggataaagctatagccattggtaatggtgagggggtagcctgagagggggttgcttagaagtacagagcaagacatagttggggaaaggaccatgggaaggacaagaggcctggaatttttccttggcagtgccctgtaatcattgtttcctaaaataccagctctgattttaaaggcattggggtcaaaagggaagatt

SEQ ID NO: 174257 - DNA, 240 bp, Homo sapiens
atctagattatcagaatcaaaggtgaaattttaaacttcaacacttttaagcttaaacacaaagcactagatttctctgctgccctctaatgtttaaattttaagtgtgatttatgtttacataactcagatagatttaagttccaaatcattctgaaatgaaatgaggccatagatgatgaaattttaaaaacacagatatcgggccgggcgtggtggctcacacctgtaatcccagca

SEQ ID NO: 174258 - DNA, 433 bp, Homo sapiens
tggggagtgttgtggatggatcctggcaccgagggctgggatatcctctcaaatgaatgtgaggtgcctcccagtgctggagagagcgggattcaggaagcagtggaagggaagagcctgggatatggggatcagctgtctgtgccctgctgcattctggaataaaaagttactagctcgattgatcatttttaaatttttagctacatatagtatgtgggcctccatttgtcctcttatcccaggccttgcagaatttaggaataagcctcaatacagtgttctaacccagtgacttccgcctcgatgtacagtagattgaacctgatcctttatactttagtgatcattagttgataccagttcaagtcaggctttctagaaatctcattgtatgttaggggttcgattagagtacagtcatgcatcactt

SEQ ID NO: 174259 - DNA, 497 bp, Homo sapiens
ggccagcatcatcctgataccaaaacctggcagagacaccacacacacacacacacacatacacacaaacccagaaaatcggcagaagacaaggatgccctctctcaccactcgtattcaacatagtgttggaagttctggccagggcaatcaggcaagagaaagaaataaagggtattcaagtaggaaaagaggaagtcaaattgtctgtgttgcagatgacatgattgtatatctagaaaaccctatcatctcagcccaaaatctccttatgctgataagcaacttcagcaaagtctcaggataaaaaagcaatgtgcaaaaatcacaagcattcttatacactaataacagacaaacagagagccaaatcatgagtggtgggtgagagagagaaggagagagagagtggggacctgtgggactaagccatggacgtgatcccttgggccttcctgtgggggttgtggattgcacatgcaaggggaagagcttat

SEQ ID NO: 174260 - DNA, 147 bp, Homo sapiens
taaggcctttgagttccttgggttgtattgttgaaagggttgttttttctttttatatttaatattctttccttgaggcttaagtcagcatgtgctgacttagtaatgacttcacttttaataaattcttcctcatgtgaggattaa

SEQ ID NO: 174261 - DNA, 263 bp, Homo sapiens
cacgatatgtcactggatcgcacggctccagttgacgcttcccaatggctcctgtgtcgctctcaggaaaagccggggaattattgcgtgccctggcctccttgcctgcatcctctgctctcctccctgcaccctcctctctctggctgcactgcagaggcctcccctggggtatcagttgaggcaggctggggtgtgctgtggtgaccatccctactcactgggccttaaaacagaaaggggcatttctcattccagcttca

SEQ ID NO: 174262 - DNA, 209 bp, Homo sapiens
aactctatgctttcctgggtagaagaatgtttcatctaaaagcttgatagcagatattttcagaaaagatctatctacaagcacctgagtgagtattctaactcagcctaggagcactatcccatcagggggaaaacactacagggtgactgtctcttggaataatatatttaaaaatacaacgcatttaattgtaaaagagtcctttc

SEQ ID NO: 174263 - DNA, 261 bp, Homo sapiens
acagcatgggagaagaagctgtggagagtttctatgggaaatttgggcactgaaattcggacctgcccatgtgtactatggaatttcagtagccatgcacatgctgagtgcagagcacattctcagaatagacctgagaaaggatgctgagctttcatctgtggctcctctccatcctccctgcaggcagggagtaaagcctagggcaaagctgtacacagactgggccgggtgcggtgcctcacgcctgtaatcccagca

SEQ ID NO: 174264 - DNA, 639 bp, Homo sapiens
aaatggaactttagctttcctgttcccaacagcttatgaaaacctcaacaagtatcttattgctacagctagactccaaaaagatgtactttgagttagaatctagaccccagattccaggaccacttaaacagcctgctccttttcacctgctggtggcagatgtggccttggtgtttagaaattagttgcgcatccactgaagagacaagcagaaagtactaccctctgggagagtgttatagcctctctggaaactgagatgaacatgtggggtggggggcagaaaatgcccaacctagttctttagatacttaaaagctaagaataacaaccccaagagagggtctgaattcagctgtagacagcaacttttggttgtcctgtttcttaatacacagggaagatcaacacatagttactgtgggccaggtcctgccgtgggcacagggatacaacagtgaacaaagcccctgcccatatagaatgcacttacaaggtgccaagcgtttggccaaatggtaggttcagaaataagtgggatccgtcctgttttcagtagaggagaacacaagagaaagacatatttgatccaacccaggagtttaaagaaagcttcctgaagacctctgaagctgc

SEQ ID NO: 174265 - DNA, 679 bp, Homo sapiens
acatttgatgagcccaagttcaatattcatcctgacccagatttcaaagataatgtacttaaaatattacagaatttgaaagtgatcagttatctcctccgcttagaaatgtcatcgctggcagtgcattggtgggtgttaggggctattttggtgcctgggtgttcagaagaggaggaagagagggtggagagattaccaattcagtaacctcctcacgacttttgaggctaagtcaatgcttgtcttgaatgcctaatccaaacagctgtgagttgtggaggtgtgttaaaatggtgacaaaaatagcaactgctttcttttactgggcacctacttaggaccttggacttaacgtgacttctctctgatttccaaaacaacttctcaagaaattttattttggccaggcacagtggctcacgcctgtaatcccagcactttgggaagccgaggcaggtggatcacttgagcccaggagttcaagaccagcctggccaacatggtaaaaccctgtctctactaaaaatacaaaaattagctgggcatggtggcgcacacctatggtcccagctgctcgggaggctgaagtgggaggattgtttgagcccagaaggttgaggctgcagtgagctgcgatcgcacactgtactccagctaagcgacagagacccatctc

SEQ ID NO: 174266 - DNA, 347 bp, Homo sapiens
tactgtactgtgaatattttctgtaattgatttttcctgtaacagttactctgtattatgaaaatggaatttacggtgaggggccacttctcatttgctaccatacttaatttctggcaatttcactagcagagtaaaagagcccgtgtttcatgctcagaatgcagtgacatggtagacatacttactgcagtttcatgttcggtgagatgagcctacttgagaatgcaagacagacatggtggctcatgcttataatcccagaactttgggaggtcgaggcagaaggatcgcttgaggccaggagttcaagaccagcctgggcaacatagcgagacctccatctc

SEQ ID NO: 174267 - DNA, 287 bp, Homo sapiens
tggctctggaaagtttaagactgtaattaagtgctacttaactgaaaatgtcacaatggaaattctcctaggaaacctgagagaagaagcaagaagaggaaactgcatatatggaggaagtaacaggtggctagaggtcaaagactgcttgtttgcagtgtccttttttggtaaactgtatttttgggtggaacaggaaagaaagtgtgaaggcttagggtctcttggacttaatgtaataggaggctctacagtcttaatctgatcctccttctcccaaccacctg

SEQ ID NO: 174268 - DNA, 2313 bp, Homo sapiens
cgaggtggggctcggcgacgagggcctctacacctgctccttccagacccgccaccagccgtacaccactcaggtctacctcattgtccacgtccctgcccgcattgtgaacatctcgtcgcctgtgacggtgaatgaggggggcaatgtgaacctgctttgcctggccgtggggcggccagagcccacggtcacctggagacagctccgagacggcttcacctcggagggagagatcctggagatctctgacatccagcggggccaggccggggagtatgagtgcgtgactcacaacggggttaactcggcgcccgacagccgccgcgtgctggtcacagtcaactatcctccgaccatcacggacgtgaccagcgcccgcaccgcgctgggccgggccgccctcctgcgctgcgaagccatggcggttccccccgcggatttccagtggtacaaggatgacagactgctgagcagcggcacggccgaaggcctgaaggtgcagacggagcgcacccgctcgatgcttctctttgccaacgtgagcgcccggcattacggcaactatacgtgtcgcgccgccaaccgactgggagcgtccagcgcctccatgcggctcctgcgcccaggatccctggagaactcagccccgaggcccccagggctcctggccctcctctccgccctgggctggctgtggtggagaatgtaggcgcaacccagtggagctcacctccccctgcagggggcctcaggccaagagtgagagaaacgggggagcaagagccgtgggtctcgtgggggcagaagagctctcggccaccaaggaagaagagagaggagaagaggaggaggcagaggaagaaagatcttcagagaacccatcactgtgagggataacgcaaaattatgcatctttctacagccattctcgccacccgttcacgtttccgattgtgacccactcccgccaccccatacccctctctcttagctcaggctgtcaactggcttgtgtgggtgtgggtgtgtgagtgtgagcctgcatgcatgtgtaggtgtctgtgtctctgtttgtgtgtgtgtgggggggtgggctgggggaagggactcagccgtcctcccgcccccaaaacccccatgtccactgtccccaaccctattgcctctcacctctggctggaggtaggtatgaggctctgcagtggaagctgtgaagagaggcttaccaggctccctgcttccccaatatatgcacgcacactacccctccccctgtcgaaagggcaactcctggcaggttgggagtggggaggggcatcgcactcacctgtcaagctgtcattcagcctttgtgagtaagtgggggacctccatctaggctctgggcttccctgctgtcaaccaccagcttcctgtagccagaggccccatcgctggctcagtggcctgagaccttcccacttttcctgtccctccacaccctggattttctggccccctcctgggccaatcggtgcttccatccaactgtcagactggtggcaggagtcacctgtctgtttcagtgctttgccctacccttgccaccactccccttggccttgatttcccccacctgcggcaccagccagctgcccttggggcctttgcagctggcccacaggtgtgagcttgctggtctatcacttcctggcctctccaccaactgtacctcccaaaggctacctgaccgccctcacagacactcagacgcaccacacacacatacacacacacagacacacacacacacacacacacacacaccagcgactgtgaccagcaatagccccctggctccagctgtccggtagctggtgactagctgtatttccccctgggtaggcatctggtgtcaggaagggacgctgagaggccgcagcctcagctctgactgtaggaacactccaccctggtacaccacaccacacaaagtgggggacagagaggcatcacacagacatcctgagcccagacaaagatgccatgtcaccaactccgactcccaggagaccctctatataaacacccaccccaaaccacaccacccagagtctggtggagaaaaggagagggcaaggcgcagtgactgtacctcagacgggggcatgggccccatcccacattgtcttccattcccagggtccaggggatggggtgggacaggggagggatgctagggagggggtggggggccctgggggccatgtgttccaattcatggggagtgttgagaccaccacaccaataaacgcctttttccaaaatctg

SEQ ID NO: 174269 - DNA, 832 bp, Homo sapiens
tcgggacagaaggcctcctgcaagaggccagggacacaccagaccaagaaggcagcacctatgagcagatcccagcttgctggggtggcccagccaggccccacatcctggggccagtcccacatatagcccatgggtccatggctacaagaggatctcagggaccccagagctctcagagcctgggaacacctatgaacagatcccagcaaccaagagcaaggagactggacggacacacaagcctgacaagcttcggaggctcttcttcacgtacaggaagcacaaattctgagggcctggcatccggcagcccaccagtgggtttcctggtacccaggccatgccaggggttatcgcaaaggcctcagctcacttgaaggcaccctttggatcttgagactcatccagcctgctacagaactaggctccgagacagccgaggtgcctgcctgagagcaggtggaagaggaccttgcaggtgcctgcagctcctggctatgtcctgctttccttgtgcctcccatccatgcacaggagggactggagaggaatgagattggccaaaggcaggggtcaccacccccatttcccagataagcatgctgaggcccaggcagactgactgaacctgctcccactactgagcacttaccgaatgtgtggcaggctgtgtgctagcacagacacctttctaactggccaagtgacatcatgcaattgctaccgagaacaaaaccagttcccctccttgcggccccatcagcgaaaaggaggggagggccagaagccacatcctctgcttcaggcctcttcgctccagctgtaccct

SEQ ID NO: 174270 - DNA, 321 bp, Homo sapiens
caaaaaggcactttcaaattaaccacattcaggtattctattttatcttttccataatacttttctaccatcactctacatccaaccctatttatataatgtctttcaatggttcctgctgagtctggactatgccaagtggtacttctgcatcactgttcaaagtaacccttttacctttaatacagtaatacactatggcttcatgaaattgaagccattctttaaaatcctgttttacttacacacgttccatgaagcattccctgatgagcctagctcacggtaatcctttccttcttcaaatttctgtttttttat

SEQ ID NO: 174271 - DNA, 214 bp, Homo sapiens
gggggcagtgataacaagaaaagaatcgggctctgtaacacctcttcctacagacagtagggggtggcagtacatatggcttacagtcagaacaaaacaggaagacccaacagaattctctttattctcctctggccctttcctctgttcttcagccccaacagcttctcaaggtaagggacatatctacagaaaagactaaaacccaaaatca

SEQ ID NO: 174272 - DNA, 456 bp, Homo sapiens
gtgtctctttgtcttggcaggtggaagcccctctgcttggaatagcaaacaatactaccagcttgccctctggcaagctcctttaagagttagctgtaatttcaccctctctctggccttgattctgcatgcagaatgattgcactgacttgagctcctgtggtctcttgctatacctcctatttgggcatctcccccatattgctttcccccaccattggggaggggaatggtaccttggttatctttgaattcccaggaggtggcccagtgcctggtgcataggaggagctgaagaaacggaagacttcttaaagggatactcgccattcactttgaagcacttctttgtacaacaaatttattttcatctgatcattgcacctctgctagccaaaacattttatcacaccagttactgctgcatggaacttgaaagcaataaaattttcttta

SEQ ID NO: 174273 - DNA, 333 bp, Homo sapiens
gtgatcaaagaatattttctataagacttcaatccttttatatacgccaagatttattgtacagctcaacagagagtttatcctagccaatattctatattaactttgagaaatatacattctacttttgttaggctaagttgattgacaattttgctctagacttttaagcatttatggattttctttatctgcctgctcaatgaataacataaagagatttgttgcaatttacaattacctatgtgtatttatttctccttttagttctgtttagttatttccatgtattttgaagctctatttttaggcaagatgcatagaaaatatctg

SEQ ID NO: 174274 - DNA, 474 bp, Homo sapiens
tcataagggccaacactagtgtacaccaatctctatttttaaaaataataaaataaggctgagtgagtggctcatgcctgtaatcccagcagcctgggaggttgaggcggacagatcgcttgaggccaggggtttgagatcgcgccattgcactccagcctgggcaacaagagcgaaactccgtctcaaaaataaaaaaagaaagaaagaaaaggaactcccgcagaaaccagtagtcctgacttggtggaaggaaatgtacaggcatctgactggtagagaacggagcctactcttccaggggcgcccatctccagaacattgtgtctcccagaggattaccgactgatctcatgattttgttggcacttgccaaagttctcttcttttcctctgggttctgttgcctgcctatatgtgtgccctctcttgtacccagagttggcctgtcccaaattctttccctctatccca

SEQ ID NO: 174275 - DNA, 321 bp, Homo sapiens
cccgggaggtggaggttacggtgagtgagatcgcgccattgcactccagcctgggcaacaagagcgaaactccgtctcaaaaataaaaaaagaaagaaagaaaaggaactcccgcagaaaccagtagtcctgacttggtggaaggaaatgtacaggcatctgactggtagagaacggagcctactcttccaggggcgcccatctccagaacattgtgtctcccagaggattaccgactgatctcatgattttgttggcacttgcttcacagaaccgcatcccagtgatctgctgtgcctacactagtggagggtaccgagc

SEQ ID NO: 174276 - DNA, 184 bp, Homo sapiens
ggggaggctgtgagaccctgcccctggagatgggaagtgtgggggtcgagtcacacagttaggccccccgcacggggagagccccagcttccaggtacaccaggccccattttttgttttgttttgttttgttgtcgtttggggttgttttgagacaggatctctcactgtcacccaggctgga

SEQ ID NO: 174277 - DNA, 336 bp, Homo sapiens
tatgtagaacatcctggagaaattactgagatactgagaaacttgctggagagaaagctgctttttcggcttcctactatgtaaggaatttaaaaaagaaactaagtaaaaaaagcaagcctagttcacacactgaaaagggcgggctaagatcgccatctgtaggagaatcgcttgaacccaggaggtggaagttgcagtgagctgagatcttgccactgcacttcagcctgggcaacaagagtgaaactccgtctcaaaaaacaaaacaaaaataagaaataataccctttgcccagtatcctctaatgatgcagaagtacacaataatatcac

SEQ ID NO: 174278 - DNA, 734 bp, Homo sapiens
gcctcagcctcccagagtgctgggattacaggtgtaagccactgtgcccggctgatggaagaattcttaaatgactcgttctactttctgctggtccaggcactccttggcttggggcagcatcccaccagtttctgcctccatcttctcaatgcttacacctacctggttgcctctgtcttcacacccattcttctgtgtgtgtcttttctcttcttcagattatgatatcactcagatcagattaggactcatcctaattcgttatgatcccttgatcataacttaaatgcatttgcaaagactctatttccaactatgttcacatttatagctaatggggctcaggatttcaacgtgtatattagggggaacaagtcaatttatgacagtgtctacaagaaaagtatgcatagaaatacatttaaccaaatacaaaaattaggtgggtgtggtggtacacgcctgtaatcccagctactcaggaggctgagacaggagaatcgcgtcaacccaggaaacagaggttgcagtgagctgagatcttgccattgcactccagcctgggcaacagagtgagactctgtctcaaaaaaagagaaatacatttaaccaaagagatgcaatacgtatacattgacaattttaaaatactgctcaaagaaataacaaaagacctaaatgaggaaaaagtcatcccagtatcataaatcaaaaggcttaaaattagttat

SEQ ID NO: 174279 - DNA, 491 bp, Homo sapiens
gtttggctctatgtccccacccaaatctcatgtccagttgtaattcccacatgccaagaaagggacctagtaggaagtaactggatcatgagagtggtttttcccatgctgttctcatgatagtgagttctaacaaggtctaatggtttaaaagtgtatggccagtctcccccttgctatctacctcctgccactagataagatgtgcctcgcttccccttcagcttctgccataatcataagtctcctaaggcctccccagccatgcataactgtgaatcaattaaacctctttttttataaattactatgtctcaggtagttctatatggcagtgtgtaaacagactaatatgctgcccaaagcaatttacagattcaatgctattcccattaaactactactgacattcttcacagaattagaaaaaactattttaaaattaatatgaaaccaaaaaagagcctgaataaccaaggcaatcccaagta

SEQ ID NO: 174280 - DNA, 166 bp, Homo sapiens
agtctttggctacaacgagtaaagtcactataaacacttgccagaggtttctggacgaacaggttttcatttctcgtgggtagatacctaggagtgggattgctgggtcacatgtgtggtaagtatatgtttaacttaaaccatccaactgtttcaggaatagctt

SEQ ID NO: 174281 - DNA, 422 bp, Homo sapiens
ccctctcctttctcttataaagataccagtcattgaatttaaggcccatcctatatccagcatgatttcatctcaagatccttaactacttacgtcttcaaagccccagtttccaaatgcgttcacattttgagatgctggatagacacgaactttagggaacatattcaacccactacaggtcctgagcactaagccttgtgggaggacactctggaagcaggtccagacttccccggtcttgcctcttcagaacctgcgcactctccacctccaaaaggcccttctatcagtcacttacacctgagtataaaactaagcatgatagctgtgcaattttgaccaaccctcccatgttcatgagtgtaggtgttggggaacaggctgtgtctccacttggggaactcacagcttcaggggca

SEQ ID NO: 174282 - DNA, 268 bp, Homo sapiens
gtgcatctaaaattaacttattatccatgaggttaattgtatcttgttagatacaaacaaatgtccatgttccttttttatatgagtcctgaaatattgtaaaattatacaacagaacctggaggagtaggtttgattgtatttgctgtgtttcacctcatagctaaccatggtagcatctttcttctagaatactcctgttctgattttatgttccctttttgtagtcatcagatccagaatgtaaattattttacaagtacatcta

SEQ ID NO: 174283 - DNA, 280 bp, Homo sapiens
agttcaatatgattttaagtaccacctgcatgattaggagatatgatgtatctggttaattttttttaataggagtaatttaatgcttatttaatacagcttgctggacaaaatttttcacaaggaattcatccaagaaaatgaaataataaaagggctcatgatgttgagaaggttgggaaccaggacttgaggaatttacagcacaagtcctcatggagcccagaaccagatacaaatcacatctggtggtccctctgaggatggcaaggcaggtggg

SEQ ID NO: 174284 - DNA, 615 bp, Homo sapiens
tatgcaacttcatagtacttcttaaaaatcaaaaaacatcttgggaggcagtactgataccggagagaacacatttgctgatgttgactttgtaaaccaaaacttacaaggaaaccacagtgctctctgtacatcagaaacccaaaggaaagcttcccatgcacatacaaagctataattcctttacccagtgaccacctaaaatgctgaatctacaagttttgtgttagcgctttggtgaaataactagccaacagggggaaatacataggatgtttaggatttaggctggccctttcatccctgcccaaacaaatcctaattcctaggttcctggggaactccaactacctctaaattaaaccagcttcctctgtggctcacattccttctgtccaccgtattggcaggatgctgatgggcctcagaatggacttgtggcatgaagtatgaatacactctggcctagattttcactgatttgcccagatattttcattataatattcaccagaatgaaactaatcgagtcattctgcactctctgaaaaccttaaggcaggaaatcacagagcttaaaatgggataggaacactgctttgcctactccccagg

SEQ ID NO: 174285 - DNA, 258 bp, Homo sapiens
ctgctaaggcagggccctggggtctagcaagagcctgatgagctcagaagtcaggagctgcctgagtctgaacttgagtctgaacttcttggctgtgccactgtggggattttttccccttctctgtgtttcagcttccttctgtaaagtgggggtgataacattttaaaaacagtctaacatgtaatacaaactcaagaagtattgtttatctctgtcagtacttccaagactccttttctcccaggagtgtggcct

SEQ ID NO: 174286 - DNA, 793 bp, Homo sapiens
gcgctaggtagcaggctgggtttacttattttcaactcccgagtggctagacaggaaaaagaaagaaatgatgtgaggaaagttgggaagctctgcacagtgatccctgagagccctggcaccactttaggagacgtggtaggtcactctgtacatgttcttcctcagcaaggggggttttcccaaaagggacacaagaagaaatcttactcagtggagtaaatggaaagaagagggagcatgtctgtctggttccttcctatttctcctttcctcagagtcaagtttcaccccacagggagttcacgcttccatgttgcctcatccagcccttcaggaagccagagtctgtgctccagtgtggcatttcagccaacctagaaatgaagggtgacttagcacagagaggttcaacaagtggggcatgcaggccactgatctctgcaagggcagcagtgccggggtgctctgggatacaggcagtgccttcggaaagaagggcaattgaagacagttgagaaggtgaacaaagtttacatctaacaaattttaaagttttattatttttatttttatattcttggggtctcactattttgcccaggctggagtgcagcagctatttgcaggctgaatcccactactgatcagtactggagttttattttatttaattaacttatttattttgagacagagtcttgctctattgctcaggctggagtgcagtgttgcgatctacggtcaataagaagactccaggtcaatgactgtcactcactctgaaaaggaa

SEQ ID NO: 174287 - DNA, 922 bp, Homo sapiens
gcgctaggtagcaggctgggtttacttattttcaactcccgagtggctagacaggaaaaagaaagaaatgatgtgaggaaagttgggaagctctgcacagtgatccctgagagccctggcaccactttaggagacgtggtaggtcactctgtacatgttcttcctcagcaaggggggttttcccaaaagggacacaagaagaaatcttactcagtggagtaaatggaaagaagagggagcatgtctgtctggttccttcctatttctcctttcctcagagtcaagtttcaccccacagggagttcacgcttccatgttgcctcatccagcccttcaggaagccagagtctgtgctccagtgtggcatttcagccaacctagaaatgaagggtgacttagcacagagaggttcaacaagtggggcatgcaggccactgatctctgcaagggcagcagtgccggggtgctctgggatacaggcagtgccttcggaaagaagggcaattgaagacagttgagaaggtgaacaaagtttacatctaacaaattttaaagttttattatttttatttttatattcttggggtctcactattttgcccaggctggagtgcagcagctatttgcaggctgaatcccactactgatcagtactggagttttattttatttaattaacttatttattttgagacagagtcttgctctattgctcaggctggagtgcagtgttgcgatctcggctcactgcagtctcgacctcccaggctcaatcgatcctgccacctcagcctctggagtagctgggactacctgtaggtgcgtgccaccacgcccaggtaatcttttattttttgtagataccagttatcctatgttgcccaggctggtctccaactcctgggctcaagcaatcctccca

SEQ ID NO: 174288 - DNA, 524 bp, Homo sapiens
agtccatgcagaagagagaataatccaagcttttcaggccctttctgacccatcctgaaaccaaaggtaacgacctttgaattacacgttgtccataatcagtgtcccccaaggatcactgggcagtcttaggagaggtgcttcctcccacagagaggccccctgcctcccaggacaggctcctggagcccaacacctgtgagagccgcagcacctctcttggagatctaagaaatccctgaaggaggctcggcacagtggctcacgtctgtaatcccagcactttgggaggccgagcagacagatcacaaggtcaggagttcgagaccagtctgaccaacatggtgaaaccccgtctctactaaaaatacaaaaaatagccgggtgtggtgctgtgcgctatagtcccagctactcaggaggctgaggcaggagaattgcttgaacctgggaggtggaggttgcagtaagctgagattgcaccactgcactccagcctggtgacagagcgagactgtgtctca

SEQ ID NO: 174289 - DNA, 152 bp, Homo sapiens
caaagttcaagctcatcttttgcatcatttgtgaaaaatagttttactgagtagaagagggtttttagcataatttcaaggggaatggctatataatttgaaatgtcaaactcctagccatcagaattatatgatgttttgaatatattttt

SEQ ID NO: 174290 - DNA, 760 bp, Homo sapiens
tcttctcccttcatccacataatcaattattcaccaagtgtacctaagtaagcctttcctaatcctcttcttataccagaaaaattaaaacactccagagtttttcttccaatctatgtctgcctcatatacagtcatccacactgatgccagggtaatcctggaaaaaaaaatatgatcaggttacccctttgcttaaaactcttcagtggtttcctgtggaatcttcacatactgtccaagccccttgtgtgtcatttaagaattcttatgcatgtaccataacattcttttcttttccagattcatctcttattatctgtaacctgtaatacagttgcactaaattatctgcagtttccaaagcatgtcatactgctttacttttctacaatgtggttctgaaattttgtgcatgagaaccatctgtagaaccaggtacacagcaggcttttatgccctgtgcccaggggtttttacgtagtgggtttgagttggcactcaaagatgcacattttaaacaacaactccagatgattaggatgtacatcctaatcatcatcgcactttaaggaatttacatcgcactttacatcgatgttacatcgcactttaaggaacactttttttaagccttaccataagtttctttctttgaaaaaaatatcattccctccttgcaactatttggcaagttgaatcttctccttgttgatgaggtattccttgcccaacctgaagcaggtttaatcatttatcc

SEQ ID NO: 174291 - DNA, 746 bp, Homo sapiens
aaatgtgaaggaactccttcagcagatatatttttaaaagcatttaaaactgaggtttagagaaatgaggcaatttgcccagcaacacaaactgaatgtggaacagacttcaaagacaggaatgctgactcccactgcagcacatagctctgcctctcagccaaactcccagggcagctcctcattaacatcctccagcccatccaccatacagctgctggagtgagatttgtaaaacacagatctgaacatggtccctcccagctagatgcaggcttcactctttagtcatgaagacacagtcacctcatttcaatcaatgttaagacccagcggctagcacagggcctgccacggagcaagtgtgggtaagcatttcttgcctgaatgtaataagtgctggctgtacatctccttcttaggcagccttgtgatggaggcatataaaagtgactatgggacagtcctgcctgccctcccgaatttcacaggcaagttgggaagatgtgattcaccacaatgtaatgtgtaatgacagaaatgtttggtggtagggcaagagtagaaagcagagaggttgatttcaaaatggaatattaaaacaagaagttaattaatgcagtgatgagaggaagacttttctattaaccttttagaaaacaaaattgtcccctagcagatagctctttcccttttcaagcttgctgcctgttatcagctgaataatattcccccaaattcatatg

SEQ ID NO: 174292 - DNA, 552 bp, Homo sapiens
tgttgtgaggcaggagacgggcctgtagacgcaccgggaggatgagcttgtcctggcgatgccgagttaagcacattctgggcctggacaggctgcaaaaggcaaaagctgtgcctggaaaagtcgccatggggcatgagcttggcctaaagaggccattgcaaggcaggagctgggcccgtagaggctgccgaaaggcaggagctccgcctgaggatgccacagtgagacaccatctgggtctggagggtccactgtgaggcagaggctggcctgtagagtccgacagtagacagaagttgagcaaaaggctaatttcaggaagttttgggcttcaagagtcagccaggaggcaggcactaggcctggaaatggcccgacagtcatgagttgggcctaaatgggccactgtgagggaggagctgtgcctgttgaggctgctggcaggcaggcagaaacttggcctggagcagcttccatgagacaagagctgggcctggagaagcccctgagaggtaagaggagggcctgcagaggctgttctcaagtcaa

SEQ ID NO: 174293 - DNA, 459 bp, Homo sapiens
gactgctgatgatgacaatttcatgtttcatgtgtatttcgtaaactaatctcactcctggctttctatttactttcttatccttatgttcctttaccttcctttttgcatttatcaaataaattttacccagctacactgtttgcatctttgtaagccatctcaaatcttttctgaaatagagtagtaaagaaataaacacatcaaaatgttttcaagtaggcttcaaaatagcccacagctgcggaccctttcattagactgtgtattttcctaagcaaactattctccaagaaacagaaaacattgcccttctttgtaccttagtaggagggaaaatgcttttatattctaaattacacaagcgttccaaaataatttggggaaagagaaagatagttagggcccagcaggataaaggaagaaagcaatgattctttgcacattcatgaatacatg

SEQ ID NO: 174294 - DNA, 398 bp, Homo sapiens
aacacatgatcaaagctgaacaaagttcattgtaattttgcaaacagatatttggattttagttaagctgtgtttaaagtgtgctggaacttcatttgattaaaagtagcccagttggttagacaggatcttatccacagtgagaccatgttcttgtaggaacacatggcaaggcaagggtccctgcccaccaatggcatggatggtgacctctctcctgtgctggcacctaatgtgccaggcaaaactggcatgggggcagctctcatttctcttgtgtacgtgaagcttagcttgacaggtggcacacaagacaagctttttgaaggccagaatgaatacatgaccgagttaatgagttaataaatgattctttgaaatgtttaaaattattacaa

SEQ ID NO: 174295 - DNA, 436 bp, Homo sapiens
ggcaaggaagtggcaggagcctatagactccaggtagaatcaggataggagattacaggcagagagtgatgccccggctcacttcgtgggtgatgcttgagattgcactcctgagcccagcagacattagtcctggagcttaagccaagtggtagggtgctcagggctacagacttgtatgggaagagtgagaagtgacattcagcaaaggttgaggtgctggaatcagagagtggaggcatagtctggagtcagtttgaggaggaaccagcagggcaagagggtcctctgttgatgtttgaaacaagaacatatattctcagaagattaaggcggtataactagaggcaaaccagaggagaggagttggagaccagttgagaaggtgtcacagatgagaatgtgccagtctcagtagcactgggaagtaagttag

SEQ ID NO: 174296 - DNA, 684 bp, Homo sapiens
tggagtagctgggattacaggtgtgcaccaccacactcaactaatttttttgttttgtttgtatttttagtagagatcgggattctctatgttggccaggctggtctcgagcttctggccttaaatgaaccgcctgcctgggcctctcaaagtgctagtattacaggcatgagccaccacacctagtcgagtcagcagttttctgagtccagtttttccactagagttttggaaattcttacccagtccaatgttataatcataagtttattaggcccttctattccagactacttgtcagagtcatttccatgaatcttgaagaagcaatttggggcaatagctgattgcaaatgcttttagagaagaaccaaaacactattgatgagcaagacagaatggccatggttaaaaaatctgatgagagttcattataaccagcaattgacaaggaaacctggttatttctgtggcatatatcatgttaacatagtaacaaaattatgacttataacattagatttctaggaatctcataatttttagaacattcatatcagtaacatatccagaaatataacttttttttttttgagatggtgtctagctgtgtcgcccaggctggaatgcagtggtgcgatcttggctcactgcaacctccgcctcctgggttcaagcaattct

SEQ ID NO: 174297 - DNA, 392 bp, Homo sapiens
aaatttctgaacctccttctcctcttcccccattctctaaagcattgttctcaaactttacaagaggtttgttaaaacacagactgctgggccatacccccagtttctgattcagggtaaaacccaagaatttgggtttctaacaagttctcaggtgctgctgctgctgctagcctagggaccatattttttaactactgctctgttttctttaatttctgtgtctctgtcactctgactgacaatatctgtctggagagttctgttgggaggaactgaggctgcttttaggctaaaacaaagacagtcagctctccatattcatggtttctgcatccatggattcaactaactttgtatcaaaaatatctggaaaaaaaaggttacctctg

SEQ ID NO: 174298 - DNA, 487 bp, Homo sapiens
gtagtagtagaattggccttagatagtaccataaacttaatccctagtaatagaagagaagaaagagatactgtatttgagaatagctgtaggtagctaggtagtgagagagaggtaagagcttgtggaaatctgattgcttctgctttttagtgaaatagcagctgataggatttgagaagagaagttatgaaatagtcatctaggggagtaaagattgaatgaaataaggaaattatgtacagcaaagactgacttgacattggtcatgattttttaactgacatcgttaatctttgatgaattcatcattcatttccctacagtcactcatctccagctatgttcagctgattgattagatacagaaacaaagtaggtggagagttggatttaatgatgattggggtttggctggaaaactaagatgcattcagagatgggcaaatgaattactctaatgatagacctaggattttacatttgg

SEQ ID NO: 174299 - DNA, 743 bp, Homo sapiens
cgatgaactcaggctgcagtctgaagccttcaaaaagcacagcttggatcttttaagcaaggagagagaactcaatggcaaactccgccatctctctccatagggaagtttctgcttcctctggcctgcaattcagaattcaaatatttgcgtcttagcattatggcaagagtaaagatgatatcccatttattatactttcaagcacaaaaggcaactcaaagaaaagctactttactatgatattgttgttattattgtaaagccattattaattttcatttctacacctagaatacacaagatttgccagatttccttctgtgccttagaaatcttaaatttactagtagtatcttctcctacccataagttattaattctcaacctcagatatcttcatttatgttaggattttaaattagcagcttctatgatttaagtcaatctaagtgcagtgagatgtgccattgtgaaaaataattagcacaattacccactgtagatagttaggcttatagtctcccatagttgagattgtaagcaaacatgtatcagcataatagcatgaatgctttgcagaaaaaaaaaagtgtctgactttattttattttgcgctagcttggaaaatgattgagatcaagttctttaacaaagaaggtcaattttattctgtatgagcaatatgattcaaataagttatacaaaacaacttttattttttctgcaagcttagataatat

SEQ ID NO: 174300 - DNA, 538 bp, Homo sapiens
tgcagataaggctgctccagtgcccccaaatttggaccttatgctctgtagtttcctgttataaccaatttgctatttgtgttaccaaagtatatttagtagattttatttgaaaaaagaaataaagttagaaaatattgacagtattacataacataagttctttgtttaaatttgtcatatttaatttttgaaagctaaataactaaaatctcatttctactaaattattctttttttcatgctaaggctaaatgtgagagctaacattttacaaaattttgtgtttttctttcaaaatacatgacaaagcacaaaagcatttttatcaggattaaagtaatttatggaaaatctaactctacgactatgtaagtgatgatctagttatattacaatattatgttgttttaatatccattattattgtgtgttaagtgctttccttgtctctatcgtaaagttacatacatagtaagcaattataggtataatgcttacaactgtaatgatgaataataaataatgacatttgtta

SEQ ID NO: 174301 - DNA, 1132 bp, Homo sapiens
  misc_feature (749)..(749): n is a, c, g, or t
  misc_feature (753)..(755): n is a, c, g, or t
gcaataatggttatgtgagtccagaaaagtgctttaggctgggggacccaggaatacttcgccaacgagaagggtttgagacggacgtgagagaagaaggtggtgtgagtgtcctggtttcctggctgcccaccatcagaacctcctgcctacatttggggaattcccatcgcaagggccctaatggaaagcaggccaccatttgccacaaagccccaatgcttgctctccctgactcggctctggggttgcaggcagaagacatgagctccgccaatcggatgctccaactgggaccttgaatctggagcaagtcacggaatagcaaggctggtttaggaattcatttctgcggcggcggtggaggcgatggggccaacagcggcctctagtgtctggaggaggaagtgtcagcgctactgccgcagcgtgaatgcatctcagtccacgtggggcaggcaggtgtccagatgggcaatgcctgctgggagctctattgcttggaacatgggattcagcctgatgggcagatgcccagtgacaagaccattggtggaggggacgactccttcaccaccttcttctgtgaaactggtgctggaaaacacgtaccccgggcagtttctgtggatctggagcctacggtcattgatgagatccgaaatgggccataacgaaaggtcttccacccagagcaggtcatcactgggaaagaggtgctggccaaaatatgccgtggtcctataccntggnnngggatcttggcccatgctgggtcggggaccggcagctgttgtacccgtggccggcgttagggggccgggggtccacgatgtggggggcccggccgtggtacccaaccccgagaagggggcccttgagactgaggaaaccacgggggagtacataacacgacccccgaggtattgtagggggggccgaaaaatttgtttgcacacccaggggaacagagtcctgtgtgggcaggaaaaatgctccgtagtaaggatgagtggcccccagccagcatagtatactagtgtagagaaaggagcgtcagacaaccaaactaggagagcgcgagcgcgtcggctttcgtactgcgtctgtcttgatccactaaccttagtat

SEQ ID NO: 174302 - DNA, 271 bp, Homo sapiens
actctcgacttccgtactctcgacttccgtactctcgacttccgtactctcgacttccattcagattgtgagaccgcgtctcagttcaagagggtaagatcccaaaccaggagtgccagtgagcactgatgttgtgtccacaggtttaaatagctacacatgcatgcacaacacattaagtaagctattttataacttcacactggaaaaacttgctctttaaaggagctctggccaggcatggtggctcgcccctgtaatgccagcactc

SEQ ID NO: 174303 - DNA, 289 bp, Homo sapiens
cttttcttttgatagccacttaataaacgtaggcgaggaaggatgttcggcatggaatgtgaattggttctcatgggcctcatgtgtaataggcgttttgggagagaagacatttatgtcttcagactatttttggactaattatgaaattaaggctcataaatttaaaaagttcacatcatgagttaagccacagagagatgatgggaagtatctaggagttaggtaaagggcttcacactatttctagtctgtctgtgaaagctttctggatatgttggtgtttgag

SEQ ID NO: 174304 - DNA, 424 bp, Homo sapiens
ccaaagtgacaccagtaaaattacttatcttattactagataggatgtctaattactcaaaataataggatgaagctgggtacggtggctcatacttgcaatcccagctatttgggaggctgaggtgggaggatcacttagccctggggtctgaggctacagtgagttatgatcacgccactgcactccagcctgggcaatagaggaagactctgagactactactactactactactaataaacaatgagatgatattagtaaactatctttatcagtactgagtgtggagagaattgttgtcagcaaggcttccaaagaacccttgaacccagcatttaagcatcactaagagttgaccacggggttagtgtggattgaaggatggggaaagggcattgtagtcacagggaatatgaaaagc

SEQ ID NO: 174305 - DNA, 340 bp, Homo sapiens
ctcgtacttttgtatatgtaataatttaatagctttcagaataaagaaattaatagcattttcttattatctgagtacaatgtttgcatcaatagcaacaaatggcacggccaggaagtcttctttaagcatgttaatccttcacattgcttaacttcaaatgattagtgtacttggccatgcgtccacattaggtgctcctaagctttccagtgaaataaagtcttatataaatgccttaaacacaactttgctaacattcaaatgcaagccctttctcactacgttctgttgattgccctttcagtccctatacactggtaacacaagcatgtagcca

SEQ ID NO: 174306 - DNA, 617 bp, Homo sapiens
cggtggccacggtttccaggaaagaagagagaggcggaaaagttaactttccgccacccacacaaatatttttggccggcgttgtcttcacgctgccaagccaggagggaggagttggcaggagcactccaattcaaggttccctcccaaggaggaaggaggactcccaacccagtcggggagcttgggcaggccctatgcaagcctgagccccacagcacccacctctgtgcaggagctgtgggggtcgggacccgaaacaataatagcagctgccactaactgagcacctgctaggtgctgaacccagccctttacctgacactcctgctgtgtcagtgcagtctatacaggaggaaactgaggcacggagagattcatgaccctcatctggacacaagctctaaaatacttgagccttggcagaaatggctgatagagtccacagaacacgctgtcctcatctcagagaggagaactctgaacccagaggggaaggatttacctgcagttgtatggcaagccagagcctaaccagcctaaagaaaccatgggaggagaggctcttaccctctcctttgcagatgtgggcccggctgcctcacactccagagcag

SEQ ID NO: 174307 - DNA, 557 bp, Homo sapiens
aatcccagcactttgggaggccaaggcaggcggatcacaggaggtcaggaatttgagaccagcctggccaacattgtgaaaccctgtctctactaaaaatacaaaaattaaccaggcatggtggcaggcaccagtagtcccagctactcgggaggctgaggctggagaatcgcttgaatccaggaggcagaggttgcagtgacccgagatcctgccactgcactccagcctcttgccactgcacttgacaagagcgagactctgcctcaaaaaaaaaaaaaaaaaaaaaagaagaagaagaagaagaacaagcctgaggtttcataatcctggttctaccacttatcaactttgacatcttgggaaatgccatctctcaatctcagtaaattagaaataatagcacttatctgcagtgttattcttgaagatgaaagacagacaacacatagcatcatgtagcagagtcagcactcaataaatcctttcgtttggaggaatttgtgcttcttccttcattttacagtgttatgggaccacaagaggtcactgatgac

SEQ ID NO: 174308 - DNA, 421 bp, Homo sapiens
acgattctatctgggtgcatataggattgtctgtgtctccagcttcctttctagtcatgagacaggatctctctctgtcaacccaggatagaatgcagtggcactatgatagcttactgcaaccttgaactcttgggctcacgtaatcctcagcctcctaagtagctgcgattacaggcatgtgccatcacacctggctaacttttttgtttgtattagtttttggagatggagtctcactgtattgctcaagctggtcttgaactcctggcttcaagtgttcccaaagtgctgggattacaggcgtgagccaccgtgcccggccacttgcacacatttctatacaaatttatttctacatctatatttacatctgcaaagacttgaaaaattcagatatttgaaatgactcatgggactg

SEQ ID NO: 174309 - DNA, 138 bp, Homo sapiens
aacctatagaggaacaatcacaagtgactagtattattcctttgggtccagtggaagcctctgatcttcatatggaatggacccggaaccgtaacccagcattttgttatatagcaaccttacctctgccacaaaggt

SEQ ID NO: 174310 - DNA, 373 bp, Homo sapiens
agcttttgggaggtgaaacctctaagtgcttgagggacgcgaagatggaagccacccatctgtggtggcaaactgaggcctgcaaacacagggtcctgccagctacttagcacttccatcccttggatccacccagcccttcactctccctctgtagcagtcaacacttttaaactgactccctagagaagtttaatgagcctcttggaattaaaaaaaaaaaaaaaaaaagcaaaacaagagtaatagaaatggacaagctgacaaaggaatagagaggttcattttcagcttggtgcttggggggttttcatcaggataccgcaatggatattgcacagagaagtggaaggagaaagaaagaaattagaaa

SEQ ID NO: 174311 - DNA, 334 bp, Homo sapiens
atgacattttctatacaaaggctaacatagatatatgactggctactattgattacattaatacagatagattacattaatacagatagatatatgactggctactattaatacattaatacagatagatatatgactggctactattgattaacagatagatacatgattggctactattgattacactctaagaggattaacattttattgtaaagaggtaacagtcacagtggtctctatctccctcatttagtctaggtttaagtaaagagtagactctggttcatgcaatctcaacacaaaggtcaggaaggcaacggtcatgcatcag

SEQ ID NO: 174312 - DNA, 114 bp, Homo sapiens
aaaaaaaaaaaaaaaacttggaaccaccattttatcatttgagaatctcagtcactgagttaacctgaatcactcctaaggcagagttaccaagattttaaaaactctgcaggt

SEQ ID NO: 174313 - DNA, 210 bp, Homo sapiens
attcaagtcctacttctaccatttttctgctatgtaaccataagtaaatttctaatgtttctgggtctcagtagaatgagaataatatctaatcagagggtagttgtgatgattaatggatgttaaagtagatgagctactcagtcgagctcctagaccctagggagtcaataaatagtcggttttcttcaccctttttttttttttttg

SEQ ID NO: 174314 - DNA, 346 bp, Homo sapiens
caggagggtttgatcatgtaaagacatggttgctccttcaagaattatatggctggagttaggagaagagcatggaagggttatgccgagcacggagttccggagacatccacatacccatcctgccatcctaggcagttggctcttgctgggaatacaaaagaacccctctaaactgcagccaagtagtgggagacagatgtgcaaccaaataagtgtgatagagtgatattggttctatagtaatggaggtacatgttagataggaataaagaacaggcagtcagttaggttaagtcagacacaactagcatccgcgagtaatgatggctaacaggccttctac

SEQ ID NO: 174315 - DNA, 506 bp, Homo sapiens
tggtatcagccatttctccaaaaagctgtttccttttagtgaagaatgatatttagaagtcaggttctgggctcatggttcttggagtgtgtctgctccctggtcctctcagtggacatggtgagaaaatagatatatttatgtacatctatatttatttatatctatatagatagaagttcacactagtacctgcagtgtatttgcagtactgcagggttcagcctagctctctttctctccatagttgactcttgtttcctattgtaactctcttctctttaatatactcatttatttcatcaatttcctgtgtgtaactaaggtcccgtcaccactatcacctccccacccagctgccctccttagcaccctcaggatcagactccctatgccaggccacccaccgcaccccacttgtttagacattcagctctaggccactgcagcccctccctgcccccagcatggacacagctaatggcttaggactgaattgttcctga

SEQ ID NO: 174316 - DNA, 483 bp, Homo sapiens
atttccatttgcttctttaccttcataggcaagtacagtaaaaaaattctccactcggatggcaacctggtagatttcacaccttgtacaacacaataattgacccttgaacaatgtatttttacctcctgtgcctccctaatcatgctagaaaatatttctgcagcttcaaggaattgttcaaaattaagaaagaagtgcagatggttaatgggtacaaaaaagatagaaagaaagaataagacctactatttgatagcacaacaagttgattatagttaataataacttaattgcacattgtaaaatatctaaaagggtataactgaattgtttatcactcaaaggataaattcttgaggggatggataccccattctccatgatgtgactatttcacattgcatccctgtatcaaaacatctcatgaaccccataaatatagacacctttatatacccacaaaaaataaaaataaaaaca

SEQ ID NO: 174317 - DNA, 753 bp, Homo sapiens
tgtgttgggttgacttttttgagacagagtctcactctgttgcccaggctggagggcagtggtgcaatcctggctcactgcaacctctgcctcgcaggagaatcacttgaacgcgggaagcggaggtggcagtgcactgagatcgcgccaccacactccagcctgggtgacagagcgagactccatctcaaataaaaaagataaagaaaaaaagaatttactctatggcggtttgttttatgtgagtaaccttaaatacagtaggggttatctgcacacagatgtttattacagggttatctacaacaatggaaagtgaaggaaaaaaaccccacctaagcaaggaaaatggctggttaagctggtatatctagtggattcctaccttttaaaatgttgactataaaaactcattaataggctggggacagtggatcatacctgtaatcccaacactttgggaggttgaggtgggtggatctcttcagctctggagtttgagaccagcctgggcaacatggtgaaaccccttctctactaaaaatacaaataaacaaacaaacaaaaaattagctgggtatggtggagtgcatctctagtcccagctactcgggaggctgaggtaggaggactgcttgagatcaggagttgagaccagcctgggcaacaaagtgagaccccaatcctacaaaaatccaaatcatctggctggggtgtcacggggccctgtgggagtgggagagtcgttacccg

SEQ ID NO: 174318 - DNA, 1047 bp, Homo sapiens
agacaaaggacctgaacacaagtatatggaaaaacattcagtctcagtaacaaatgcaaatttagacagtgggttttaagttgttttggcaagttttagaaaattattaccagtgtatttatagcttggagaaatgattttgtgcagtatgtatgtagacacaaaatgttcacaccatttgactcaagaatttactgtatgggccggacacagtggctcacgcctgtaacctcagcactttttgaggctgaggcgggcgtatcacttgaggtcaggagttcaagaccagcctggccaatgtggtgaaaccccatgtctactaaaaatacaaaaattagccaggcatggtggcaggcgcctgtagtcccagctactcgggaggctgaggcaggagaatcacttgaacgcgggaagcggaggtggcagtgcactgagatcgcgccaccacactccagcctgggtgacagagcgagactccatctcaaataaaaaagataaagaaaaaaagaatttactctatggcggtttgttttatgtgagtaaccttaaatacagtaggggttatctgcacacagatgtttattacagggttatctacaacaatggaaagtgaaggaaaaaaaccccacctaagcaaggaaaatggctggttaagctggtatatctagtggattcctaccttttaaaatgttgactataaaaactcattaataggctggggacagtggatcatacctgtaatcccaacactttgggaggttgaggtgggtggatctcttcagctctggagtttgagaccagcctgggcaacatggtgaaaccccttctctactaaaaatacaaataaacaaacaaacaaaaaattagctgggtatggtggagtgcatctctagtcccagctactcgggaggctgaggtaggaggactgcttgagatcaggagttgagaccagcctgggcaacaaagtgagaccccaatcctacaaaaatccaaatcatctggctggggtgtcacggggccctgtgggagtgggagagtcgttacccg

SEQ ID NO: 174319 - DNA, 4339 bp, Homo sapiens
  misc_feature (3343)..(3343): n is a, c, g, or t
  misc_feature (3361)..(3361): n is a, c, g, or t
atccagttcacgcagtcgtcattccagtatctcacctgtcaggcttccacttaattccagtctgggagctgaactcagtaggaaaaagaaggaaagagcagctgctgctgctgcagcaaagatggatggaaaggtcgtccagctacgaaagaagtggctcttacagcgggcgatcgcccagtccctatggtcgaaggcggtccagcagccctttcctgagcaagcggtctctgagtcggagtccactccccagtaggaaatccatgaagtccagaagtagaagtcctgcatattcaagacattcatcttctcatagtaaaaagaagagatccagttcacgcagtcgtcattccagtatctcacctgtcaggcttccacttaattccagtctgggagctgaactcagtaggaaaaagaaggaaagagcagctgctgctgctgcagcaaagatggatggaaaggagtccaagggttcacctgtatttttgcctagaaaagagaacagttcagtagaggctaaggattcaggtttggagtctaaaaagttacccagaagtgtaaaattggaaaaatctgccccagatactgaactggtgaatgtaacacatctaaacacagaggtaaaaaattcttcagatacagggaaagtaaagttggatgagaactccgagaagcatcttgttaaagatttgaaagcacagggaacaagagactctaaacccatagcactgaaagaggagattgttactccaaaggagacagaaacatcagaaaaggagacccctccacctcttcccacaattgcttctcccccaccccctctaccaactactacccctccacctcagacaccccctttgccacctttgcctccaataccagctcttccacagcaaccacctctgcctccttctcagccagcatttagtcaggttcctgcttccagtacttcaactttgcccccttctactcactcaaagacatctgctgtgtcctctcaggcaaattctcagccccctgtacaggtttctgtgaagactcaagtatctgtaacagctgctattccacacctgaaaacttcaacgttgcctcctttgcccctcccacccttattacctggaggtgatgacatggatagtccaaaagaaactcttccttcaaaacctgtgaagaaagagaaggaacagaggacacgtcacttactcacagaccttcctctccctccagagctccctggtggagatctgtctcccccagactctccagaaccaaaggcaatcacaccacctcagcaaccatataaaaagagaccaaaaatttgttgtcctcgttatggagaaagaagacaaacagaaagcgactgggggaaacgctgtgtggacaagtttgacattattgggattattggagaaggaacctatggccaagtatataaagccagggacaaagacacaggagaactagtggctctgaagaaggtgagactagacaatgagaaagagggcttcccaatcacagccattcgtgaaatcaaaatccttcgtcagttaatccaccgaagtgttgttaacatgaaggaaattgtcacagataaacaagatgcactggatttcaagaaggacaaaggtgccttttaccttgtatttgagtatatggaccatgacttaatgggactgctagaatctggtttggtgcacttttctgaggaccatatcaagtcgttcatgaaacagctaatggaaggattggaatactgtcacaaaaagaatttcctgcatcgggatattaagtgttctaacattttgctgaataacagtgggcaaatcaaactagcagattttggacttgctcggctctataactctgaagagagtcgcccttacacaaacaaagtcattactttgtggtaccgacctccagaactactgctaggagaggaacgttacacaccagccatagatgtttggagctgtggatgtattcttggggaactattcacaaagaagcctatttttcaagccaatctggaactggctcagctagaactgatcagccgactttgtggtagcccttgtccagctgtgtggcctgatgttatcaaactgccctacttcaacaccatgaaaccgaagaagcaatatcgaaggcgtctacgagaagaattctctttcattccttctgcagcacttgatttattggaccacatgctgacactagatcctagtaagcggtgcacagctgaacagaccctacagagcgacttccttaaagatgtcgaactcagcaaaatggctcctccagacctcccccactggcaggattgccatgagttgtggagtaagaaacggcgacgtcagcgacaaagtggtgttgtagtcgaagagccacctccatccaaaacttctcgaaaagaaactacctcagggacaagtactgagcctgtgaagaacagcagcccagcaccacctcagcctgctcctggcaaggtggagtctggggctggggatgcaataggccttgctgacatcacacaacagctgaatcaaagtgaattggcagtgttattaaacctgctgcagagccaaaccgacctgagcatccctcaaatggcacagctgcttaacatccactccaacccagagatgcagcagcagctggaagccctgaaccaatccatcagtgccctgacggaagctacttcccagcagcaggactcagagaccatggccccagaggagtctttgaaggaagcaccctctgccccagtgatcctgccttcagcagaacagacgacccttgaagcttcaagcacaccagctgacatgcagaatatattggcagttctcttgagtcagctgatgaaaacccaagagccagcaggcagtctggaggaaaacaacagtgacaagaacagtgggccacaggggccccgaagaactcccacaatgccacaggaggaggcagcaggggagcaacggtgggaatgccctctgaggaatgcagtgatgtccatcagtcacctctcacccagagcctggcaaattcagtctctttcacagaacctaaagccaagccaggttcagtgggaaatcccacctgtccaaacactgtgtgagacaccagaattagaggcctgcaagcctgcttccttcatccccaatgcccagatgggacaggtcaccagcctcctgtgtctacccccacctttcttgcttgctggcctcctctctctgcagtgcctctctcatccctgcaatccagacagcacatgcagcagctcaaccaattccattcctggctacctcatcccctccagtctgaaaggacgtgtgaatgccaccangatctgaacccaagattncagcctcggtcaccaccctgaccctgagaatgccactgggatggggagaacttgtcagtcttcatccttccccacaagtatactgaagccaggacagcacctgccttagagagctcttagagggattatccgcagcctgaagaaagaaggttacaactgaggaagaacttctgaacagggaagagtggaagaaaagactgcagctcagctccagaagcagacccagaatggcatccttctctgagacccagaccccagccccttttcatggaagaccagcacaaaggaggaagtaggttagggaatggtaaggctccatgtgatgggactaatgtggagaggcctggggcctttccctgaggactggatggctggagtttgggagcctgagttgacagaggaggctaagcccgggcagctactttgttccagaaatctaaggtccctggagggaggctctgctttgggagggggaagggagctaacattgcagagcaccaactgtgaaccaggtacaatggcagagcctttccatacctgtactcacaactagcgggtgaggagtcaaggcaaataggtgtctcatagctccccatatctcggcagtcgaccacctcctcctttgattctctgatgtcactgccagttctcctcctattgctctgacctgtctttctctgtgtcctttgcaaactcattctcaactccttagactcagtcaagtcccccagttacacacttccatggtactatatatcattccttcagagcacttaacacagttatttcctatgtatttgtccagtcatttgaataatgatcctagtttcattggatggaaagttccacaaggtcagtgaccatttctatctgtgttcaccaatgtgttcccagtgcccagaaacaatgcctagcataaagcagctgttttgtaaatacttgttcaatgaatgaataaatgacaaaagaacatctcaa

SEQ ID NO: 174320 - DNA, 827 bp, Homo sapiens
cggtaccgtctgagcagctgggaagctgtggaatatatatttttagtacaggctcagctccagaagcagacccagaatggcatccttctctgagacccagaccccagccccttttcatggaagaccagcacaaaggaggaagtaggttagggaatggtaaggctccatgtgatgggactaatgtggagaggcctggggcctttccctgaggactggatggctggagtttgggagcctgagttgacagaggaggctaagcccgggcagctactttgttccagaaatctaaggtccctggagggaggctctgctttgggagggggaagggagctaacattgcagagcaccaactgtgaaccaggtacaatggcagagcctttccatacctgtactcacaactagcgggtgaggagtcaaggcaaataggtgtctcatagctccccatatctcggcagtcgaccacctcctcctttgattctctgatgtcactgccagttctcctcctattgctctgacctgtctttctctgtgtcctttgcaaactcattctcaactccttagactcagtcaagtcccccagttacacacttccatggtactatatatcattccttcagagcacttaacacagttatttcctatgtatttgtccagtcatttgaataatgatcctagtttcattggatggaaagttccacaaggtcagtgaccatttctatctgtgttcaccaatgtgttcccagtgcccagaaacaatgcctagcataaagcagctgttttgtaaatacttgttcaatgaatgaataaatgacaaaagaacatctcaa

SEQ ID NO: 174321 - DNA, 456 bp, Homo sapiens
gcggccgcctactactactaaattcgcggccgcgtcgacctaggaactagagaataaatgagttgggaaaaaccatgaaatgtgatttttttaaagtagaaaagttatacaaataatggtaccaaaccatcaaaagagttgagcttcatgtaccctgactcctcctgacaggagaggtaagtgggtttgagctcaactgtcatcaagggaagttggtaagaggctgtttagacccaaaggatagtcttaaaccagacttcaccacccaccctacctcagttcccatgttattacatgcagagtcagcatggggattagtgtacctacctttgctgagatttcccgatgcgttgccaatccagaaagtgaatcaaaaagttgtttaaaagttaaaatctctattgtttccaaaatctttcccatctccacctgaagacagaattgcttccccttctc

SEQ ID NO: 174322 - DNA, 7729 bp, Homo sapiens
cttttttcccttcttcaggtcaggggaaagggaatgcccaattcagagagacatgggggcaagaaggacgggagtggaggagcttctggaactttgcagccgtcatcgggaggcggcagctctaacagcagagagcgtcaccgcttggtatcgaagcacaagcggcataagtccaaacactccaaagacatggggttggtgacccccgaagcagcatccctgggcacagttatcaaacctttggtggagtatgatgatatcagctctgattccgacaccttctccgatgacatggccttcaaactagaccgaagggagaacgacgaacgtcgtggatcagatcggagcgaccgcctgcacaaacatcgtcaccaccagcacaggcgttcccgggacttactaaaagctaaacagaccgaaaaagaaaaaagccaagaagtctccagcaagtcgggatcgatgaaggaccggatatcgggaagttcaaagcgttcgaatgaggagactgatgactatgggaaggcgcaggtagccaaaagcagcagcaaggaatccaggtcatccaagctccacaaggagaagaccaggaaagaacgggagctgaagtctgggcacaaagaccggagtaaaagtcatcgaaaaagggaaacacccaaaagttacaaaacagtggacagcccaaaacggagatccaggagcccccacaggaagtggtctgacagctccaaacaagatgatagcccctcgggagcttcttatggccaagattatgaccttagtccctcacgatctcatacctcgagcaattatgactcctacaagaaaagtcctggaagtacctcgagaaggcagtcggtcagtcccccttacaaggagccttcggcctaccagtccagcacccggtcaccgagcccctacagtaggcgacagagatctgtcagtccctatagcaggagacggtcgtccagctacgaaagaagtggctcttacagcgggcgatcgcccagtccctatggtcgaaggcggtccagcagccctttcctgagcaagcggtctctgagtcggagtccactccccagtaggaaatccatgaagtccagaagtagaagtcctgcatattcaagacattcatcttctcatagtaaaaagaagagatccagttcacgcagtcgtcattccagtatctcacctgtcaggcttccacttaattccagtctgggagctgaactcagtaggaaaaagaaggaaagagcagctgctgctgctgcagcaaagatggatggaaaggagtccaagggttcacctgtatttttgcctagaaaagagaacagttcagtagaggctaaggattcaggtttggagtctaaaaagttacccagaagtgtaaaattggaaaaatctgccccagatactgaactggtgaatgtaacacatctaaacacagaggtaaaaaattcttcagatacagggaaagtaaagttggatgagaactccgagaagcatcttgttaaagatttgaaagcacagggaacaagagactctaaacccatagcactgaaagaggagattgttactccaaaggagacagaaacatcagaaaaggagacccctccacctcttcccacaattgcttctcccccaccccctctaccaactactacccctccacctcagacaccccctttgccacctttgcctccaataccagctcttccacagcaaccacctctgcctccttctcagccagcatttagtcaggttcctgcttccagtacttcaactttgcccccttctactcactcaaagacatctgctgtgtcctctcaggcaaattctcagccccctgtacaggtttctgtgaagactcaagtatctgtaacagctgctattccacacctgaaaacttcaacgttgcctcctttgcccctcccacccttattacctggaggtgatgacatggatagtccaaaagaaactcttccttcaaaacctgtgaagaaagagaaggaacagaggacacgtcacttactcacagaccttcctctccctccagagctccctggtggagatctgtctcccccagactctccagaaccaaaggcaatcacaccacctcagcaaccatataaaaagagaccaaaaatttgttgtcctcgttatggagaaagaagacaaacagaaagcgactgggggaaacgctgtgtggacaagtttgacattattgggattattggagaaggaacctatggccaagtatataaagccagggacaaagacacaggagaactagtggctctgaagaaggtgagactagacaatgagaaagagggcttcccaatcacagccattcgtgaaatcaaaatccttcgtcagttaatccaccgaagtgttgttaacatgaaggaaattgtcacagataaacaagatgcactggatttcaagaaggacaaaggtgccttttaccttgtatttgagtatatggaccatgacttaatgggactgctagaatctggtttggtgcacttttctgaggaccatatcaagtcgttcatgaaacagctaatggaaggattggaatactgtcacaaaaagaatttcctgcatcgggatattaagtgttctaacattttgctgaataacagtgggcaaatcaaactagcagattttggacttgctcggctctataactctgaagagagtcgcccttacacaaacaaagtcattactttgtggtaccgacctccagaactactgctaggagaggaacgttacacaccagccatagatgtttggagctgtggatgtattcttggggaactattcacaaagaagcctatttttcaagccaatctggaactggctcagctagaactgatcagccgactttgtggtagcccttgtccagctgtgtggcctgatgttatcaaactgccctacttcaacaccatgaaaccgaagaagcaatatcgaaggcgtctacgagaagaattctctttcattccttctgcagcacttgatttattggaccacatgctgacactagatcctagtaagcggtgcacagctgaacagaccctacagagcgacttccttaaagatgtcgaactcagcaaaatggctcctccagacctcccccactggcaggattgccatgagttgtggagtaagaaacggcgacgtcagcgacaaagtggtgttgtagtcgaagagccacctccatccaaaacttctcgaaaagaaactacctcagggacaagtactgagcctgtgaagaacagcagcccagcaccacctcagcctgctcctggcaaggtggagtctggggctggggatgcaataggccttgctgacatcacacaacagctgaatcaaagtgaattggcagtgttattaaacctgctgcagagccaaaccgacctgagcatccctcaaatggcacagctgcttaacatccactccaacccagagatgcagcagcagctggaagccctgaaccaatccatcagtgccctgacggaagctacttcccagcagcaggactcagagaccatggccccagaggagtctttgaaggaagcaccctctgccccagtgatcctgccttcagcagaacagacgacccttgaagcttcaagcacaccagctgacatgcagaatatattggcagttctcttgagtcagctgatgaaaacccaagagccagcaggcagtctggaggaaaacaacagtgacaagaacagtgggccacaggggccccgaagaactcccacaatgccacaggaggaggcagcaggcatgtcctcctcacattcttccaccagagaagaggccccctgagccccccggacctccaccgccgccacctccaccccctctggttgaaggcgatctttccagcgccccccaggagttgaacccagccgtgacagccgccttgctgcaacttttatcccagcctgaagcagagcctcctggccacctgccacatgagcaccaggccttgagaccaatggagtactccacccgaccccgtccaaacaggacttatggaaacactgatgggcctgaaacagggttcagtgccattgacactgatgaacgaaactctggtccagccttgacagaatccttggtccagaccctggtgaagaacaggaccttctcaggctctctgagccaccttggggagtccagcagttaccagggcacagggtcagtgcagtttccaggggaccaggacctccgttttgccagggtccccttagcgttacacccggtggtcgggcaaccattcctgaaggctgagggaagcagcaattctgtggtacatgcagagaccaaattgcaaaactatggggagctggggccaggaaccactggggccagcagctcaggagcaggccttcactgggggggcccaactcagtcttctgcttatggaaaactctatcgggggcctacaagagtcccaccaagagggggaagagggagaggagttccttactaacccagagacttcagtgtcctgaaagattcctttcctatccatccttccatccagttctctgaatctttaatgaaatcatttgccagagcgaggtaatcatctgcatttggctactgcaaagctgtccgttgtattccttgctcacttgctactagcaggcgacttacgaaataatgatgttggcaccagttccccctggatgggctatagccagaacatttacttcaactctaccttagtagatacaagtagagaatatggagaggatcattacattgaaaagtaaatgttttattagttcattgcctgcacttactgatcggaagagagaaagaacagtttcagtattgagatggctcaggagaggctctttgatttttaaagttttggggtggggggttgtgtgtggtttctttcttttgaattttaatttaggtgttttgggtttttttcctttaaagagaatagtgttcacaaaatttgagctgctctttggcttttgctataagggaaacagagtggcctggctgatttgaataaatgtttctttcctctccaccatctcacattttgcttttaagtgaacactttttccccattgagcatcttgaacatactttttttccaaataaattactcatccttaaagtttactccactttgacaaaagatacgcccttctccctgcacataaagcaggttgtagaacgtggcattcttgggcaagtaggtagactttacccagtctctttccttttttgctgatgtgtgctctctctctctctttctctctctctctctctctctctctctctctgtctgtctcgcttgctcgctctcgctgtttctctctctttgaggcatttgtttggaaaaaatcgttgagatgcccaagaacctgggataattctttactttttttgaaataaaggaaaggaaattcagactcttacattgttctctgtaactcttcaattctaaaatgttttgttttttaaaccatgttctgatggggaagttgatttgtaagtgtggacagcttggacattgctgctgagctgtggttagagatgatgcctccattcctagagggctaataacagcatttagcatattgtttacacatatatttttatgtcaaaaaaaaaacaaaaacctttcaaacagagcattgtgatattgtcaaagagaaaaacaaatcctgaagatacatggaaatgtaacctagtttagggtgggtatttttctgaagatacatcaatacctgaccttttttaaaaaaataattttaaaacagcatactgtgaggaagaacagtattgacatacccacatcccagcatgtgtaccctgccagttcttttagggatttttcctccaaagagatttggatttggttttggtaaaaggggttaaattgtgcttccaggcaagaactttgccttatcataaacaggaaatgaaaaagggaagggctgtcaggatgggataatttgggaggcttctcattctggcttctatttctatgtgagtaccagcatatagagtgttttaaaaacagatacatgtcatataatttatctgcacagacttagaccttcaggaaacataggttaagcccccttttacaaagaaaaagtaaacatacttcagcatcttggagggtagttttcaaaactcaagtttcatgtttcaatgccaagttcttattttaaaaaataaaatctacttataagagaaaggtgcattacttaaaaaaaaaaaactttaaagaaatgaaagaagaaccctcttcagatacttacttgaagactgttttcccctgttaatgagatatagctagatatcggtgtgtgtatttctttattattctctggtttttgatctggccttgcctccagggccaaacactgatttagaaagagagccttctagctattttggcattgatggctttttataccagtgtgtccagttagatttactaggcttactgacatgctattggtaaatcgcattaaagttcatctgaaccttctgtctgttgacttcttagtcctcagacatgggcctttgtgttttagaatatttgaatttgagttattgggccccactccctgttttttattaaagaacgtgagcctgggatactttcagaagtatctgttcaatgaaaaaaagttggtttcccatcaaatatgaataaaattctctatatatttcattgtattttggttatcagcagtcatcaataatgtttttccctcccctctcccacctcttatttttaattatgccaaatatcctaaataatatacttaagcctccattccctcatccctactagggaagggggtgagtgtatgtgtgagtgtatgtgtatgtatgatcccatctcacccccacccccattttgggagtcttttaaaatgaaaacaaagtttggtagttttgactatttctaaaagcagaggagaaaaaaaaacttatttaaatatcctggaatctgtatggaggaagaaaaggtatttgttaatttttcagttacgttatctataaacatgatggaagtaaaggtttggcagaatttcaccttgactatttgaaaattacagacccaattaattccattcaaaagtggttttcgttttgttttaattattgtacaatgagagatattgtctattaaatacattattttgaacagatgagaaatctgattctgttcatgagtgggaggcaaaactggtttgaccgtgatcatttttgtggttttgaaaacaaatatacttgacccagtttccttagttttttcttcaactgtccataggaacgataagtatttgaaagcaacatcaaatctatacgtttaaagcagggcagttagcacaaatttgcaagtagaacttctattagcttatgccatagacatcacccaaccacttgtatgtgtgtgtgtatatataatatgcatatatagttaccgtgctaaaatggttaccagcaggttttgagagagaatgctgcatcagaaaagtgtcagttgccacctcattctccctgatttaggttcctgacactgattcctttctctctcgtttttgacccccattgggtgtatcttgtctatgtacagatattttgtaatatattaaatttttttctttcagtttataaaaatggaaagtggagattggaaaattaaatatttcctgttactata

SEQ ID NO: 174323 - DNA, 8331 bp, Homo sapiens
cttttttcccttcttcaggtcaggggaaagggaatgcccaattcagagagacatgggggcaagaaggacgggagtggaggagcttctggaactttgcagccgtcatcgggaggcggcagctctaacagcagagagcgtcaccgcttggtatcgaagcacaagcggcataagtccaaacactccaaagacatggggttggtgacccccgaagcagcatccctgggcacagttatcaaacctttggtggagtatgatgatatcagctctgattccgacaccttctccgatgacatggccttcaaactagaccgaagggagaacgacgaacgtcgtggatcagatcggagcgaccgcctgcacaaacatcgtcaccaccagcacaggcgttcccgggacttactaaaagctaaacagaccgaaaaagaaaaaagccaagaagtctccagcaagtcgggatcgatgaaggaccggatatcgggaagttcaaagcgttcgaatgaggagactgatgactatgggaaggcgcaggtagccaaaagcagcagcaaggaatccaggtcatccaagctccacaaggagaagaccaggaaagaacgggagctgaagtctgggcacaaagaccggagtaaaagtcatcgaaaaagggaaacacccaaaagttacaaaacagtggacagcccaaaacggagatccaggagcccccacaggaagtggtctgacagctccaaacaagatgatagcccctcgggagcttcttatggccaagattatgaccttagtccctcacgatctcatacctcgagcaattatgactcctacaagaaaagtcctggaagtacctcgagaaggcagtcggtcagtcccccttacaaggagccttcggcctaccagtccagcacccggtcaccgagcccctacagtaggcgacagagatctgtcagtccctatagcaggagacggtcgtccagctacgaaagaagtggctcttacagcgggcgatcgcccagtccctatggtcgaaggcggtccagcagccctttcctgagcaagcggtctctgagtcggagtccactccccagtaggaaatccatgaagtccagaagtagaagtcctgcatattcaagacattcatcttctcatagtaaaaagaagagatccagttcacgcagtcgtcattccagtatctcacctgtcaggcttccacttaattccagtctgggagctgaactcagtaggaaaaagaaggaaagagcagctgctgctgctgcagcaaagatggatggaaaggagtccaagggttcacctgtatttttgcctagaaaagagaacagttcagtagaggctaaggattcaggtttggagtctaaaaagttacccagaagtgtaaaattggaaaaatctgccccagatactgaactggtgaatgtaacacatctaaacacagaggtaaaaaattcttcagatacagggaaagtaaagttggatgagaactccgagaagcatcttgttaaagatttgaaagcacagggaacaagagactctaaacccatagcactgaaagaggagattgttactccaaaggagacagaaacatcagaaaaggagacccctccacctcttcccacaattgcttctcccccaccccctctaccaactactacccctccacctcagacaccccctttgccacctttgcctccaataccagctcttccacagcaaccacctctgcctccttctcagccagcatttagtcaggttcctgcttccagtacttcaactttgcccccttctactcactcaaagacatctgctgtgtcctctcaggcaaattctcagccccctgtacaggtttctgtgaagactcaagtatctgtaacagctgctattccacacctgaaaacttcaacgttgcctcctttgcccctcccacccttattacctggaggtgatgacatggatagtccaaaagaaactcttccttcaaaacctgtgaagaaagagaaggaacagaggacacgtcacttactcacagaccttcctctccctccagagctccctggtggagatctgtctcccccagactctccagaaccaaaggcaatcacaccacctcagcaaccatataaaaagagaccaaaaatttgttgtcctcgttatggagaaagaagacaaacagaaagcgactgggggaaacgctgtgtggacaagtttgacattattgggattattggagaaggaacctatggccaagtatataaagccagggacaaagacacaggagaactagtggctctgaagaaggtgagactagacaatgagaaagagggcttcccaatcacagccattcgtgaaatcaaaatccttcgtcagttaatccaccgaagtgttgttaacatgaaggaaattgtcacagataaacaagatgcactggatttcaagaaggacaaaggtgccttttaccttgtatttgagtatatggaccatgacttaatgggactgctagaatctggtttggtgcacttttctgaggaccatatcaagtcgttcatgaaacagctaatggaaggattggaatactgtcacaaaaagaatttcctgcatcgggatattaagtgttctaacattttgctgaataacagtgggcaaatcaaactagcagattttggacttgctcggctctataactctgaagagagtcgcccttacacaaacaaagtcattactttgtggtaccgacctccagaactactgctaggagaggaacgttacacaccagccatagatgtttggagctgtggatgtattcttggggaactattcacaaagaagcctatttttcaagccaatctggaactggctcagctagaactgatcagccgactttgtggtagcccttgtccagctgtgtggcctgatgttatcaaactgccctacttcaacaccatgaaaccgaagaagcaatatcgaaggcgtctacgagaagaattctctttcattccttctgcagcacttgatttattggaccacatgctgacactagatcctagtaagcggtgcacagctgaacagaccctacagagcgacttccttaaagatgtcgaactcagcaaaatggctcctccagacctcccccactggcaggattgccatgagttgtggagtaagaaacggcgacgtcagcgacaaagtggtgttgtagtcgaagagccacctccatccaaaacttctcgaaaagaaactacctcagggacaagtactgagcctgtgaagaacagcagcccagcaccacctcagcctgctcctggcaaggtggagtctggggctggggatgcaataggccttgctgacatcacacaacagctgaatcaaagtgaattggcagtgttattaaacctgctgcagagccaaaccgacctgagcatccctcaaatggcacagctgcttaacatccactccaacccagagatgcagcagcagctggaagccctgaaccaatccatcagtgccctgacggaagctacttcccagcagcaggactcagagaccatggccccagaggagtctttgaaggaagcaccctctgccccagtgatcctgccttcagcagaacagacgacccttgaagcttcaagcacaccagctgacatgcagaatatattggcagttctcttgagtcagctgatgaaaacccaagagccagcaggcagtctggaggaaaacaacagtgacaagaacagtgggccacaggggccccgaagaactcccacaatgccacaggaggaggcagcaggcatgtcctcctcacattcttccaccagagaagaggccccctgagccccccggacctccaccgccgccacctccaccccctctggttgaaggcgatctttccagcgccccccaggagttgaacccagccgtgacagccgccttgctgcaacttttatcccagcctgaagcagagcctcctggccacctgccacatgagcaccaggccttgagaccaatggagtactccacccgaccccgtccaaacaggacttatggaaacactgatgggcctgaaacagggttcagtgccattgacactgatgaacgaaactctggtccagccttgacagaatccttggtccagaccctggtgaagaacaggaccttctcaggctctctgagccaccttggggagtccagcagttaccagggcacagggtcagtgcagtttccaggggaccaggacctccgttttgccagggtccccttagcgttacacccggtggtcgggcaaccattcctgaaggctgagggaagcagcaattctgtggtacatgcagagaccaaattgcaaaactatggggagctggggccaggaaccactggggccagcagctcaggagcaggccttcactgggggggcccaactcagtcttctgcttatggaaaactctatcgggggcctacaagagtcccaccaagagggggaagagggagaggagttccttactaacccagagacttcagtgtcctgaaagattcctttcctatccatccttccatccagttctctgaatctttaatgaaatcatttgccagagcgaggtaatcatctgcatttggctactgcaaagctgtccgttgtattccttgctcacttgctactagcaggcgacttacgaaataatgatgttggcaccagttccccctggatgggctatagccagaacatttacttcaactctaccttagtagatacaagtagagaatatggagaggatcattacattgaaaagtaaatgttttattagttcattgcctgcacttactgatcggaagagagaaagaacagtttcagtattgagatggctcaggagaggctctttgatttttaaagttttggggtggggggttgtgtgtggtttctttcttttgaattttaatttaggtgttttgggtttttttcctttaaagagaatagtgttcacaaaatttgagctgctctttggcttttgctataagggaaacagagtggcctggctgatttgaataaatgtttctttcctctccaccatctcacattttgcttttaagtgaacactttttccccattgagcatcttgaacatactttttttccaaataaattactcatccttaaagtttactccactttgacaaaagatacgcccttctccctgcacataaagcaggttgtagaacgtggcattcttgggcaagtaggtagactttacccagtctctttccttttttgctgatgtgtgctctctctctctctttctctctctctctctctctctctctctctctgtctgtctcgcttgctcgctctcgctgtttctctctctttgaggcatttgtttggaaaaaatcgttgagatgcccaagaacctgggataattctttactttttttgaaataaaggaaaggaaattcagactcttacattgttctctgtaactcttcaattctaaaatgttttgttttttaaaccatgttctgatggggaagttgatttgtaagtgtggacagcttggacattgctgctgagctgtggttagagatgatgcctccattcctagagggctaataacagcatttagcatattgtttacacatatatttttatgtcaaaaaaaaaacaaaaacctttcaaacagagcattgtgatattgtcaaagagaaaaacaaatcctgaagatacatggaaatgtaacctagtttagggtgggtatttttctgaagatacatcaatacctgaccttttttaaaaaaataattttaaaacagcatactgtgaggaagaacagtattgacatacccacatcccagcatgtgtaccctgccagttcttttagggatttttcctccaaagagatttggatttggttttggtaaaaggggttaaattgtgcttccaggcaagaactttgccttatcataaacaggaaatgaaaaagggaagggctgtcaggatgggataatttgggaggcttctcattctggcttctatttctatgtgagtaccagcatatagagtgttttaaaaacagatacatgtcatataatttatctgcacagacttagaccttcaggaaacataggttaagcccccttttacaaagaaaaagtaaacatacttcagcatcttggagggtagttttcaaaactcaagtttcatgtttcaatgccaagttcttattttaaaaaataaaatctacttataagagaaaggtgcattacttaaaaaaaaaaaactttaaagaaatgaaagaagaaccctcttcagatacttacttgaagactgttttcccctgttaatgagatatagctagatatcggtgtgtgtatttctttattattctctggtttttgatctggccttgcctccagggccaaacactgatttagaaagagagccttctagctattttggcattgatggctttttataccagtgtgtccagttagatttactaggcttactgacatgctattggtaaatcgcattaaagttcatctgaaccttctgtctgttgacttcttagtcctcagacatgggcctttgtgttttagaatatttgaatttgagttattgggccccactccctgttttttattaaagaacgtgagcctgggatactttcagaagtatctgttcaatgaaaaaaagttggtttcccatcaaatatgaataaaattctctatatatttcattgtattttggttatcagcagtcatcaataatgtttttccctcccctctcccacctcttatttttaattatgccaaatatcctaaataatatacttaagcctccattccctcatccctactagggaagggggtgagtgtatgtgtgagtgtatgtgtatgtatgatcccatctcacccccacccccattttgggagtcttttaaaatgaaaacaaagtttggtagttttgactatttctaaaagcagaggagaaaaaaaaacttatttaaatatcctggaatctgtatggaggaagaaaaggtatttgttaatttttcagttacgttatctataaacatgatggaagtaaaggtttggcagaatttcaccttgactatttgaaaattacagacccaattaattccattcaaaagtggttttcgttttgttttaattattgtacaatgagagatattgtctattaaatacattattttgaacagatgagaaatctgattctgttcatgagtgggaggcaaaactggtttgaccgtgatcatttttgtggttttgaaaacaaatatacttgacccagtttccttagttttttcttcaactgtccataggaacgataagtatttgaaagcaacatcaaatctatacgtttaaagcagggcagttagcacaaatttgcaagtagaacttctattagcttatgccatagacatcacccaaccacttgtatgtgtgtgtgtatatataatatgcatatatagttaccgtgctaaaatggttaccagcaggttttgagagagaatgctgcatcagaaaagtgtcagttgccacctcattctccctgatttaggttcctgacactgattcctttctctctcgtttttgacccccattgggtgtatcttgtctatgtacagatattttgtaatatattaaatttttttctttcagtttataaaaatggaaagtggagattggaaaattaaatatttcctgttactataccacttttgctccattgcatttacttcttaatctgtaccccctgagcatatctaatcatgtataaaggacgtttttcctccactttatcttaggggttctctgtctcagaatcattatagactcattaactccccctcccagcaaaaggttatcaggatttgaagaggtgcttgaaaacgctagactaggaactagagaataaatgagttgggaaaaaccatgaaatgtgatttttttaaagtagaaaagttatacaaataatggtaccaaaccatcaaaagagttgagcttcatgtaccctgactcctcctgacaggagaggtaagtgggtttgagctcaactgtcatcaagggaagttggtaagaggctgtttagacccaaaggatagtcttaaaccagacttcaccacccaccctacctcagttcccatgttattacatgcagagtcagcatggggattagtgtacctacctttgctgagatttcccgatgcgttgccaatccagaaagtgaatcaaaaagttgtttaaaagttaaaatctctattgtttccaaaatctttcccatctccacctgaagacagaattgcttccccttctc

SEQ ID NO: 174324 - DNA, 4836 bp, Homo sapiens
cggacgcgtgggtcgacccacgcgtccgtatcaaactgccctacttcaacaccatgaaaccgaagaagcaatatcgaaggcgtctacgagaagaattctctttcattccttctgcagcacttgatttattggaccacatgctgacactagatcctagtaagcggtgcacagctgaacagaccctacagagcgacttccttaaagatgtcgaactcagcaaaatggctcctccagacctcccccactggcaggattgccatgagttgtggagtaagaaacggcgacgtcagcgacaaagtggtgttgtagtcgaagagccacctccatccaaaacttctcgaaaagaaactacctcagggacaagtactgagcctgtgaagaacagcagcccagcaccacctcagcctgctcctggcaaggtggagtctggggctggggatgcaataggccttgctgacatcacacaacagctgaatcaaagtgaattggcagtgttattaaacctgctgcagagccaaaccgacctgagcatccctcaaatggcacagctgcttaacatccactccaacccagagatgcagcagcagctggaagccctgaaccaatccatcagtgccctgacggaagctacttcccagcagcaggactcagagaccatggccccagaggagtctttgaaggaagcaccctctgccccagtgatcctgccttcagcagaacagacgacccttgaagcttcaagcacaccagctgacatgcagaatatattggcagttctcttgagtcagctgatgaaaacccaagagccagcaggcagtctggaggaaaacaacagtgacaagaacagtgggccacaggggccccgaagaactcccacaatgccacaggaggaggcagcaggcatgtcctcctcacattcttccaccagagaagaggccccctgagccccccggacctccaccgccgccacctccaccccctctggttgaaggcgatctttccagcgccccccaggagttgaacccagccgtgacagccgccttgctgcaacttttatcccagcctgaagcagagcctcctggccacctgccacatgagcaccaggccttgagaccaatggagtactccacccgaccccgtccaaacaggacttatggaaacactgatgggcctgaaacagggttcagtgccattgacactgatgaacgaaactctggtccagccttgacagaatccttggtccagaccctggtgaagaacaggaccttctcaggctctctgagccaccttggggagtccagcagttaccagggcacagggtcagtgcagtttccaggggaccaggacctccgttttgccagggtccccttagcgttacacccggtggtcgggcaaccattcctgaaggctgagggaagcagcaattctgtggtacatgcagagaccaaattgcaaaactatggggagctggggccaggaaccactggggccagcagctcaggagcaggccttcactgggggggcccaactcagtcttctgcttatggaaaactctatcgggggcctacaagagtcccaccaagagggggaagagggagaggagttccttactaacccagagacttcagtgtcctgaaagattcctttcctatccatccttccatccagttctctgaatctttaatgaaatcatttgccagagcgaggtaatcatctgcatttggctactgcaaagctgtccgttgtattccttgctcacttgctactagcaggcgacttacgaaataatgatgttggcaccagttccccctggatgggctatagccagaacatttacttcaactctaccttagtagatacaagtagagaatatggagaggatcattacattgaaaagtaaatgttttattagttcattgcctgcacttactgatcggaagagagaaagaacagtttcagtattgagatggctcaggagaggctctttgatttttaaagttttggggtggggggttgtgtgtggtttctttcttttgaattttaatttaggtgttttgggtttttttcctttaaagagaatagtgttcacaaaatttgagctgctctttggcttttgctataagggaaacagagtggcctggctgatttgaataaatgtttctttcctctccaccatctcacattttgcttttaagtgaacactttttccccattgagcatcttgaacatactttttttccaaataaattactcatccttaaagtttactccactttgacaaaagatacgcccttctccctgcacataaagcaggttgtagaacgtggcattcttgggcaagtaggtagactttacccagtctctttccttttttgctgatgtgtgctctctctctctctttctctctctctctctctctctctctctctctgtctgtctcgcttgctcgctctcgctgtttctctctctttgaggcatttgtttggaaaaaatcgttgagatgcccaagaacctgggataattctttactttttttgaaataaaggaaaggaaattcagactcttacattgttctctgtaactcttcaattctaaaatgttttgttttttaaaccatgttctgatggggaagttgatttgtaagtgtggacagcttggacattgctgctgagctgtggttagagatgatgcctccattcctagagggctaataacagcatttagcatattgtttacacatatatttttatgtcaaaaaaaaaacaaaaacctttcaaacagagcattgtgatattgtcaaagagaaaaacaaatcctgaagatacatggaaatgtaacctagtttagggtgggtatttttctgaagatacatcaatacctgaccttttttaaaaaaataattttaaaacagcatactgtgaggaagaacagtattgacatacccacatcccagcatgtgtaccctgccagttcttttagggatttttcctccaaagagatttggatttggttttggtaaaaggggttaaattgtgcttccaggcaagaactttgccttatcataaacaggaaatgaaaaagggaagggctgtcaggatgggataatttgggaggcttctcattctggcttctatttctatgtgagtaccagcatatagagtgttttaaaaacagatacatgtcatataatttatctgcacagacttagaccttcaggaaacataggttaagcccccttttacaaagaaaaagtaaacatacttcagcatcttggagggtagttttcaaaactcaagtttcatgtttcaatgccaagttcttattttaaaaaataaaatctacttataagagaaaggtgcattacttaaaaaaaaaaaactttaaagaaatgaaagaagaaccctcttcagatacttacttgaagactgttttcccctgttaatgagatatagctagatatcggtgtgtgtatttctttattattctctggtttttgatctggccttgcctccagggccaaacactgatttagaaagagagccttctagctattttggcattgatggctttttataccagtgtgtccagttagatttactaggcttactgacatgctattggtaaatcgcattaaagttcatctgaaccttctgtctgttgacttcttagtcctcagacatgggcctttgtgttttagaatatttgaatttgagttattgggccccactccctgttttttattaaagaacgtgagcctgggatactttcagaagtatctgttcaatgaaaaaaagttggtttcccatcaaatatgaataaaattctctatatatttcattgtattttggttatcagcagtcatcaataatgtttttccctcccctctcccacctcttatttttaattatgccaaatatcctaaataatatacttaagcctccattccctcatccctactagggaagggggtgagtgtatgtgtgagtgtatgtgtatgtatgatcccatctcacccccacccccattttgggagtcttttaaaatgaaaacaaagtttggtagttttgactatttctaaaagcagaggagaaaaaaaaacttatttaaatatcctggaatctgtatggaggaagaaaaggtatttgttaatttttcagttacgttatctataaacatgatggaagtaaaggtttggcagaatttcaccttgactatttgaaaattacagacccaattaattccattcaaaagtggttttcgttttgttttaattattgtacaatgagagatattgtctattaaatacattattttgaacagatgagaaatctgattctgttcatgagtgggaggcaaaactggtttgaccgtgatcatttttgtggttttgaaaacaaatatacttgacccagtttccttagttttttcttcaactgtccataggaacgataagtatttgaaagcaacatcaaatctatacgtttaaagcagggcagttagcacaaatttgcaagtagaacttctattagcttatgccatagacatcacccaaccacttgtatgtgtgtgtgtatatataatatgcatatatagttaccgtgctaaaatggttaccagcaggttttgagagagaatgctgcatcagaaaagtgtcagttgccacctcattctccctgatttaggttcctgacactgattcctttctctctcgtttttgacccccattgggtgtatcttgtctatgtacagatattttgtaatatattaaatttttttctttcagtttataaaaatggaaagtggagattggaaaattaaatatttcctgttactata

SEQ ID NO: 174325 - DNA, 6259 bp, Homo sapiens
cttttttcccttcttcaggtcaggggaaagggaatgcccaattcagagagacatgggggcaagaaggacgggagtggaggagcttctggaactttgcagccgtcatcgggaggcggcagctctaacagcagagagcgtcaccgcttggtatcgaagcacaagcggcataagtccaaacactccaaagacatggggttggtgacccccgaagcagcatccctgggcacagttatcaaacctttggtggagtatgatgatatcagctctgattccgacaccttctccgatgacatggccttcaaactagaccgaagggagaacgacgaacgtcgtggatcagatcggagcgaccgcctgcacaaacatcgtcaccaccagcacaggcgttcccgggacttactaaaagctaaacagaccgaaaaagaaaaaagccaagaagtctccagcaagtcgggatcgatgaaggaccggatatcgggaagttcaaagcgttcgaatgaggagactgatgactatgggaaggcgcaggtagccaaaagcagcagcaaggaatccaggtcatccaagctccacaaggagaagaccaggaaagaacgggagctgaagtctgggcacaaagaccggagtaaaagtcatcgaaaaagggaaacacccaaaagttacaaaacagtggacagcccaaaacggagatccaggagcccccacaggaagtggtctgacagctccaaacaagatgatagcccctcgggagcttcttatggccaagattatgaccttagtccctcacgatctcatacctcgagcaattatgactcctacaagaaaagtcctggaagtacctcgagaaggcagtcggtcagtcccccttacaaggagccttcggcctaccagtccagcacccggtcaccgagcccctacagtaggcgacagagatctgtcagtccctatagcaggagacggtcgtccagctacgaaagaagtggctcttacagcgggcgatcgcccagtccctatggtcgaaggcggtccagcagccctttcctgagcaagcggtctctgagtcggagtccactccccagtaggaaatccatgaagtccagaagtagaagtcctgcatattcaagacattcatcttctcatagtaaaaagaagagatccagttcacgcagtcgtcattccagtatctcacctgtcaggcttccacttaattccagtctgggagctgaactcagtaggaaaaagaaggaaagagcagctgctgctgctgcagcaaagatggatggaaaggagtccaagggttcacctgtatttttgcctagaaaagagaacagttcagtagaggctaaggattcaggtttggagtctaaaaagttacccagaagtgtaaaattggaaaaatctgccccagatactgaactggtgaatgtaacacatctaaacacagaggtaaaaaattcttcagatacagggaaagtaaagttggatgagaactccgagaagcatcttgttaaagatttgaaagcacagggaacaagagactctaaacccatagcactgaaagaggagattgttactccaaaggagacagaaacatcagaaaaggagacccctccacctcttcccacaattgcttctcccccaccccctctaccaactactacccctccacctcagacaccccctttgccacctttgcctccaataccagctcttccacagcaaccacctctgcctccttctcagccagcatttagtcaggttcctgcttccagtacttcaactttgcccccttctactcactcaaagacatctgctgtgtcctctcaggcaaattctcagccccctgtacaggtttctgtgaagactcaagtatctgtaacagctgctattccacacctgaaaacttcaacgttgcctcctttgcccctcccacccttattacctggaggtgatgacatggatagtccaaaagaaactcttccttcaaaacctgtgaagaaagagaaggaacagaggacacgtcacttactcacagaccttcctctccctccagagctccctggtggagatctgtctcccccagactctccagaaccaaaggcaatcacaccacctcagcaaccatataaaaagagaccaaaaatttgttgtcctcgttatggagaaagaagacaaacagaaagcgactgggggaaacgctgtgtggacaagtttgacattattgggattattggagaaggaacctatggccaagtatataaagccagggacaaagacacaggagaactagtggctctgaagaaggtgagactagacaatgagaaagagggcttcccaatcacagccattcgtgaaatcaaaatccttcgtcagttaatccaccgaagtgttgttaacatgaaggaaattgtcacagataaacaagatgcactggatttcaagaaggacaaaggtgccttttaccttgtatttgagtatatggaccatgacttaatgggactgctagaatctggtttggtgcacttttctgaggaccatatcaagtcgttcatgaaacagctaatggaaggattggaatactgtcacaaaaagaatttcctgcatcgggatattaagtgttctaacattttgctgaataacagtgggcaaatcaaactagcagattttggacttgctcggctctataactctgaagagagtcgcccttacacaaacaaagtcattactttgtggtaccgacctccagaactactgctaggagaggaacgttacacaccagccatagatgtttggagctgtggatgtattcttggggaactattcacaaagaagcctatttttcaagccaatctggaactggctcagctagaactgatcagccgactttgtggtagcccttgtccagctgtgtggcctgatgttatcaaactgccctacttcaacaccatgaaaccgaagaagcaatatcgaaggcgtctacgagaagaattctctttcattccttctgcagcacttgatttattggaccacatgctgacactagatcctagtaagcggtgcacagctgaacagaccctacagagcgacttccttaaagatgtcgaactcagcaaaatggctcctccagacctcccccactggcaggattgccatgagttgtggagtaagaaacggcgacgtcagcgacaaagtggtgttgtagtcgaagagccacctccatccaaaacttctcgaaaagaaactacctcagggacaagtactgagcctgtgaagaacagcagcccagcaccacctcagcctgctcctggcaaggtggagtctggggctggggatgcaataggccttgctgacatcacacaacagctgaatcaaagtgaattggcagtgttattaaacctgctgcagagccaaaccgacctgagcatccctcaaatggcacagctgcttaacatccactccaacccagagatgcagcagcagctggaagccctgaaccaatccatcagtgccctgacggaagctacttcccagcagcaggactcagagaccatggccccagaggagtctttgaaggaagcaccctctgccccagtgatcctgccttcagcagaacagacgacccttgaagcttcaagcacaccagctgacatgcagaatatattggcagttctcttgagtcagctgatgaaaacccaagagccagcaggcagtctggaggaaaacaacagtgacaagaacagtgggccacaggggccccgaagaactcccacaatgccacaggaggaggcagcaggcatgtcctcctcacattcttccaccagagaagaggccccctgagccccccggacctccaccgccgccacctccaccccctctggttgaaggcgatctttccagcgccccccaggagttgaacccagccgtgacagccgccttgctgcaacttttatcccagcctgaagcagagcctcctggccacctgccacatgagcaccaggccttgagaccaatggagtactccacccgaccccgtccaaacaggacttatggaaacactgatgggcctgaaacagggttcagtgccattgacactgatgaacgaaactctggtccagccttgacagaatccttggtccagaccctggtgaagaacaggaccttctcaggctctctgagccaccttggggagtccagcagttaccagggcacagggtcagtgcagtttccaggggaccaggacctccgttttgccagggtccccttagcgttacacccggtggtcgggcaaccattcctgaaggctgagggaagcagcaattctgtggtacatgcagagaccaaattgcaaaactatggggagctggggccaggaaccactggggccagcagctcaggagcaggccttcactgggggggcccaactcagtcttctgcttatggaaaactctatcgggggcctacaagagtcccaccaagagggggaagagggagaggagttccttactaacccagagacttcagtgtcctgaaagattcctttcctatccatccttccatccagttctctgaatctttaatgaaatcatttgccagagcgaggtaatcatctgcatttggctactgcaaagctgtccgttgtattccttgctcacttgctactagcaggcgacttacgaaataatgatgttggcaccagttccccctggatgggctatagccagaacatttacttcaactctaccttagtagatacaagtagagaatatggagaggatcattacattgaaaagtaaatgttttattagttcattgcctgcacttactgatcggaagagagaaagaacagtttcagtattgagatggctcaggagaggctctttgatttttaaagttttggggtggggggttgtgtgtggtttctttcttttgaattttaatttaggtgttttgggtttttttcctttaaagagaatagtgttcacaaaatttgagctgctctttggcttttgctataagggaaacagagtggcctggctgatttgaataaatgtttctttcctctccaccatctcacattttgcttttaagtgaacactttttccccattgagcatcttgaacatactttttttccaaataaattactcatccttaaagtttactccactttgacaaaagatacgcccttctccctgcacataaagcaggttgtagaacgtggcattcttgggcaagtaggtagactttacccagtctctttccttttttgctgatgtgtgctctctctctctctttctctctctctctctctctctctctctctctgtctgtctcgcttgctcgctctcgctgtttctctctctttgaggcatttgtttggaaaaaatcgttgagatgcccaagaacctgggataattctttactttttttgaaataaaggaaaggaaattcagactcttacattgttctctgtaactcttcaattctaaaatgttttgttttttaaaccatgttctgatggggaagttgatttgtaagtgtggacagcttggacattgctgctgagctgtggttagagatgatgcctccattcctagagggctaataacagcatttagcatattgtttacacatatatttttatgtcaaaaaaaaaacaaaaacctttcaaacagagcattgtgatattgtcaaagagaaaaacaaatcctgaagatacatggaaatgtaacctagtttagggtgggtatttttctgaagatacatcaatacctgaccttttttaaaaaaataattttaaaacagcatactgtgaggaagaacagtattgacatacccacatcccagcatgtgtaccctgccagttcttttagggatttttcctccaaagagatttggatttggttttggtaaaaggggttaaattgtgcttccaggcaagaactttgccttatcataaacaggaaatgaaaaagggaagggctgtcaggatgggataatttgggaggcttctcattctggcttctatttctatgtgagtaccagcatatagagtgttttaaaaacagatacatgtcatataatttatctgcacagacttagaccttcaggaaacataggttaagcccccttttacaaagaaaaagtaaacatacttcagcatcttggagggtagttttcaaaactcaagtttcatgtttcaatgccaagttcttattttaaaaaataaaatctacttataagagaaaggtgcattactt

SEQ ID NO: 174326 - DNA, 5566 bp, Homo sapiens
cttttttcccttcttcaggtcaggggaaagggaatgcccaattcagagagacatgggggcaagaaggacgggagtggaggagcttctggaactttgcagccgtcatcgggaggcggcagctctaacagcagagagcgtcaccgcttggtatcgaagcacaagcggcataagtccaaacactccaaagacatggggttggtgacccccgaagcagcatccctgggcacagttatcaaacctttggtggagtatgatgatatcagctctgattccgacaccttctccgatgacatggccttcaaactagaccgaagggagaacgacgaacgtcgtggatcagatcggagcgaccgcctgcacaaacatcgtcaccaccagcacaggcgttcccgggacttactaaaagctaaacagaccgaaaaagaaaaaagccaagaagtctccagcaagtcgggatcgatgaaggaccggatatcgggaagttcaaagcgttcgaatgaggagactgatgactatgggaaggcgcaggtagccaaaagcagcagcaaggaatccaggtcatccaagctccacaaggagaagaccaggaaagaacgggagctgaagtctgggcacaaagaccggagtaaaagtcatcgaaaaagggaaacacccaaaagttacaaaacagtggacagcccaaaacggagatccaggagcccccacaggaagtggtctgacagctccaaacaagatgatagcccctcgggagcttcttatggccaagattatgaccttagtccctcacgatctcatacctcgagcaattatgactcctacaagaaaagtcctggaagtacctcgagaaggcagtcggtcagtcccccttacaaggagccttcggcctaccagtccagcacccggtcaccgagcccctacagtaggcgacagagatctgtcagtccctatagcaggagacggtcgtccagctacgaaagaagtggctcttacagcgggcgatcgcccagtccctatggtcgaaggcggtccagcagccctttcctgagcaagcggtctctgagtcggagtccactccccagtaggaaatccatgaagtccagaagtagaagtcctgcatattcaagacattcatcttctcatagtaaaaagaagagatccagttcacgcagtcgtcattccagtatctcacctgtcaggcttccacttaattccagtctgggagctgaactcagtaggaaaaagaaggaaagagcagctgctgctgctgcagcaaagatggatggaaaggagtccaagggttcacctgtatttttgcctagaaaagagaacagttcagtagaggctaaggattcaggtttggagtctaaaaagttacccagaagtgtaaaattggaaaaatctgccccagatactgaactggtgaatgtaacacatctaaacacagaggtaaaaaattcttcagatacagggaaagtaaagttggatgagaactccgagaagcatcttgttaaagatttgaaagcacagggaacaagagactctaaacccatagcactgaaagaggagattgttactccaaaggagacagaaacatcagaaaaggagacccctccacctcttcccacaattgcttctcccccaccccctctaccaactactacccctccacctcagacaccccctttgccacctttgcctccaataccagctcttccacagcaaccacctctgcctccttctcagccagcatttagtcaggttcctgcttccagtacttcaactttgcccccttctactcactcaaagacatctgctgtgtcctctcaggcaaattctcagccccctgtacaggtttctgtgaagactcaagtatctgtaacagctgctattccacacctgaaaacttcaacgttgcctcctttgcccctcccacccttattacctggaggtgatgacatggatagtccaaaagaaactcttccttcaaaacctgtgaagaaagagaaggaacagaggacacgtcacttactcacagaccttcctctccctccagagctccctggtggagatctgtctcccccagactctccagaaccaaaggcaatcacaccacctcagcaaccatataaaaagagaccaaaaatttgttgtcctcgttatggagaaagaagacaaacagaaagcgactgggggaaacgctgtgtggacaagtttgacattattgggattattggagaaggaacctatggccaagtatataaagccagggacaaagacacaggagaactagtggctctgaagaaggtgagactagacaatgagaaagagggcttcccaatcacagccattcgtgaaatcaaaatccttcgtcagttaatccaccgaagtgttgttaacatgaaggaaattgtcacagataaacaagatgcactggatttcaagaaggacaaaggtgccttttaccttgtatttgagtatatggaccatgacttaatgggactgctagaatctggtttggtgcacttttctgaggaccatatcaagtcgttcatgaaacagctaatggaaggattggaatactgtcacaaaaagaatttcctgcatcgggatattaagtgttctaacattttgctgaataacagtgggcaaatcaaactagcagattttggacttgctcggctctataactctgaagagagtcgcccttacacaaacaaagtcattactttgtggtaccgacctccagaactactgctaggagaggaacgttacacaccagccatagatgtttggagctgtggatgtattcttggggaactattcacaaagaagcctatttttcaagccaatctggaactggctcagctagaactgatcagccgactttgtggtagcccttgtccagctgtgtggcctgatgttatcaaactgccctacttcaacaccatgaaaccgaagaagcaatatcgaaggcgtctacgagaagaattctctttcattccttctgcagcacttgatttattggaccacatgctgacactagatcctagtaagcggtgcacagctgaacagaccctacagagcgacttccttaaagatgtcgaactcagcaaaatggctcctccagacctcccccactggcaggattgccatgagttgtggagtaagaaacggcgacgtcagcgacaaagtggtgttgtagtcgaagagccacctccatccaaaacttctcgaaaagaaactacctcagggacaagtactgagcctgtgaagaacagcagcccagcaccacctcagcctgctcctggcaaggtggagtctggggctggggatgcaataggccttgctgacatcacacaacagctgaatcaaagtgaattggcagtgttattaaacctgctgcagagccaaaccgacctgagcatccctcaaatggcacagctgcttaacatccactccaacccagagatgcagcagcagctggaagccctgaaccaatccatcagtgccctgacggaagctacttcccagcagcaggactcagagaccatggccccagaggagtctttgaaggaagcaccctctgccccagtgatcctgccttcagcagaacagacgacccttgaagcttcaagcacaccagctgacatgcagaatatattggcagttctcttgagtcagctgatgaaaacccaagagccagcaggcagtctggaggaaaacaacagtgacaagaacagtgggccacaggggccccgaagaactcccacaatgccacaggaggaggcagcaggcatgtcctcctcacattcttccaccagagaagaggccccctgagccccccggacctccaccgccgccacctccaccccctctggttgaaggcgatctttccagcgccccccaggagttgaacccagccgtgacagccgccttgctgcaacttttatcccagcctgaagcagagcctcctggccacctgccacatgagcaccaggccttgagaccaatggagtactccacccgaccccgtccaaacaggacttatggaaacactgatgggcctgaaacagggttcagtgccattgacactgatgaacgaaactctggtccagccttgacagaatccttggtccagaccctggtgaagaacaggaccttctcaggctctctgagccaccttggggagtccagcagttaccagggcacagggtcagtgcagtttccaggggaccaggacctccgttttgccagggtccccttagcgttacacccggtggtcgggcaaccattcctgaaggctgagggaagcagcaattctgtggtacatgcagagaccaaattgcaaaactatggggagctggggccaggaaccactggggccagcagctcaggagcaggccttcactgggggggcccaactcagtcttctgcttatggaaaactctatcgggggcctacaagagtcccaccaagagggggaagagggagaggagttccttactaacccagagacttcagtgtcctgaaagattcctttcctatccatccttccatccagttctctgaatctttaatgaaatcatttgccagagcgaggtaatcatctgcatttggctactgcaaagctgtccgttgtattccttgctcacttgctactagcaggcgacttacgaaataatgatgttggcaccagttccccctggatgggctatagccagaacatttacttcaactctaccttagtagatacaagtagagaatatggagaggatcattacattgaaaagtaaatgttttattagttcattgcctgcacttactgatcggaagagagaaagaacagtttcagtattgagatggctcaggagaggctctttgatttttaaagttttggggtggggggttgtgtgtggtttctttcttttgaattttaatttaggtgttttgggtttttttcctttaaagagaatagtgttcacaaaatttgagctgctctttggcttttgctataagggaaacagagtggcctggctgatttgaataaatgtttctttcctctccaccatctcacattttgcttttaagtgaacactttttccccattgagcatcttgaacatactttttttccaaataaattactcatccttaaagtttactccactttgacaaaagatacgcccttctccctgcacataaagcaggttgtagaacgtggcattcttgggcaagtaggtagactttacccagtctctttccttttttgctgatgtgtgctctctctctctctttctctctctctctctctctctctctctctctgtctgtctcgcttgctcgctctcgctgtttctctctctttgaggcatttgtttggaaaaaattactcatccttaaagtttactccacttggacaaagataggcccttctccctggacataaagcaggttgacaccgtggctttcttggggccagtagtacgatttaaccaagttcttacttatggcggagggggcacgccaccacattgcgaaactaacactcaaaacaggagagagatgcc

SEQ ID NO: 174327 - DNA, 567 bp, Homo sapiens
ggggctatttatcttggttgcaatccgacatatcaataatgtaaaaattttttgagacactttaaataggctctaagaatttctcttctgacctctcaattttaccttttctagatgtattcttggggaactattcacaaagaagcctatttttcaagccaatctggaactggctcagctagaactgatcaggtacagctgtacatgtgctcttgagtgcccaggtgtgataggtattctcatcctccagtttctaacactttctagtcattctgaatgagtttatgtttcttatgtccaagtaagtttctctttactcagtcaggtttaccatatattttgtcataggctatacatataaagaagttttatttcacctaatttttagatcttactttgcatattttttattagctcttcatataaaagcataccattttggggatggctcttccattcatagctcagatgagattaaatttattcagcaaacatttattgagcctgttatacaacagattacttttaacattaaactttaggattcagagataaaaaataggtccc

SEQ ID NO: 174328 - DNA, 939 bp, Homo sapiens
  misc_feature (367)..(367): n is a, c, g, or t
gcagtagttaggaaaacaaaatagaaaattatgatagaaattagtctttaaaattactgtaacataggaagctgaatgataatatggtagttacaatcctttcagactatgattttggggagacgtgactaaagtttggagaagcaagtgtatttttatacatgacagtaatgaaaactttttactttattttatctctcctatatattctttaagttttatttcaggttaacctatgtcatcaaacattctgtaaaatgtgttagccaagtccatgcaaggtctctgttgtagagcaagattatgtcctagaaatgtgaccacagcatgtatattgttccctctcatcttccttccttctgctttngttttaatgtttccatctaacagcaaaaaggggcagggagtctgccaacagcctgcatgttagaacagttctttaaaggaaggaaatggaggaaatcttagaccaaaatcaggataatcatttgaaacatatgatatttttacactagctgttagatccaggatgcaactgttttacttttaatcacttgatttatttataattgcaattttctgatcccaagattttattctttatatatctggttacttatattgatatttgtttatgttgcacagtgtgtgtgtttgtgtttataatcacatgtgctttttaagatggtgtttaaaagaagtaacccttccacagcatgtcctcctcacattcttccaccagagaagaggccccctgagccccccggacctccaccgccgccacctccaccccctctggttgaaggcgatctttccagcgccccccaggagttgaacccagccgtgacagccgccttgctgcaacttttatcccagcctgaagcagagcctcctggccacctgccacatgagcaccaggccttgagaccaatggagtac

SEQ ID NO: 174329 - DNA, 5447 bp, Homo sapiens
cttttttcccttcttcaggtcaggggaaagggaatgcccaattcagagagacatgggggcaagaaggacgggagtggaggagcttctggaactttgcagccgtcatcgggaggcggcagctctaacagcagagagcgtcaccgcttggtatcgaagcacaagcggcataagtccaaacactccaaagacatggggttggtgacccccgaagcagcatccctgggcacagttatcaaacctttggtggagtatgatgatatcagctctgattccgacaccttctccgatgacatggccttcaaactagaccgaagggagaacgacgaacgtcgtggatcagatcggagcgaccgcctgcacaaacatcgtcaccaccagcacaggcgttcccgggacttactaaaagctaaacagaccgaaaaagaaaaaagccaagaagtctccagcaagtcgggatcgatgaaggaccggatatcgggaagttcaaagcgttcgaatgaggagactgatgactatgggaaggcgcaggtagccaaaagcagcagcaaggaatccaggtcatccaagctccacaaggagaagaccaggaaagaacgggagctgaagtctgggcacaaagaccggagtaaaagtcatcgaaaaagggaaacacccaaaagttacaaaacagtggacagcccaaaacggagatccaggagcccccacaggaagtggtctgacagctccaaacaagatgatagcccctcgggagcttcttatggccaagattatgaccttagtccctcacgatctcatacctcgagcaattatgactcctacaagaaaagtcctggaagtacctcgagaaggcagtcggtcagtcccccttacaaggagccttcggcctaccagtccagcacccggtcaccgagcccctacagtaggcgacagagatctgtcagtccctatagcaggagacggtcgtccagctacgaaagaagtggctcttacagcgggcgatcgcccagtccctatggtcgaaggcggtccagcagccctttcctgagcaagcggtctctgagtcggagtccactccccagtaggaaatccatgaagtccagaagtagaagtcctgcatattcaagacattcatcttctcatagtaaaaagaagagatccagttcacgcagtcgtcattccagtatctcacctgtcaggcttccacttaattccagtctgggagctgaactcagtaggaaaaagaaggaaagagcagctgctgctgctgcagcaaagatggatggaaaggagtccaagggttcacctgtatttttgcctagaaaagagaacagttcagtagaggctaaggattcaggtttggagtctaaaaagttacccagaagtgtaaaattggaaaaatctgccccagatactgaactggtgaatgtaacacatctaaacacagaggtaaaaaattcttcagatacagggaaagtaaagttggatgagaactccgagaagcatcttgttaaagatttgaaagcacagggaacaagagactctaaacccatagcactgaaagaggagattgttactccaaaggagacagaaacatcagaaaaggagacccctccacctcttcccacaattgcttctcccccaccccctctaccaactactacccctccacctcagacaccccctttgccacctttgcctccaataccagctcttccacagcaaccacctctgcctccttctcagccagcatttagtcaggttcctgcttccagtacttcaactttgcccccttctactcactcaaagacatctgctgtgtcctctcaggcaaattctcagccccctgtacaggtttctgtgaagactcaagtatctgtaacagctgctattccacacctgaaaacttcaacgttgcctcctttgcccctcccacccttattacctggaggtgatgacatggatagtccaaaagaaactcttccttcaaaacctgtgaagaaagagaaggaacagaggacacgtcacttactcacagaccttcctctccctccagagctccctggtggagatctgtctcccccagactctccagaaccaaaggcaatcacaccacctcagcaaccatataaaaagagaccaaaaatttgttgtcctcgttatggagaaagaagacaaacagaaagcgactgggggaaacgctgtgtggacaagtttgacattattgggattattggagaaggaacctatggccaagtatataaagccagggacaaagacacaggagaactagtggctctgaagaaggtgagactagacaatgagaaagagggcttcccaatcacagccattcgtgaaatcaaaatccttcgtcagttaatccaccgaagtgttgttaacatgaaggaaattgtcacagataaacaagatgcactggatttcaagaaggacaaaggtgccttttaccttgtatttgagtatatggaccatgacttaatgggactgctagaatctggtttggtgcacttttctgaggaccatatcaagtcgttcatgaaacagctaatggaaggattggaatactgtcacaaaaagaatttcctgcatcgggatattaagtgttctaacattttgctgaataacagtgggcaaatcaaactagcagattttggacttgctcggctctataactctgaagagagtcgcccttacacaaacaaagtcattactttgtggtaccgacctccagaactactgctaggagaggaacgttacacaccagccatagatgtttggagctgtggatgtattcttggggaactattcacaaagaagcctatttttcaagccaatctggaactggctcagctagaactgatcagccgactttgtggtagcccttgtccagctgtgtggcctgatgttatcaaactgccctacttcaacaccatgaaaccgaagaagcaatatcgaaggcgtctacgagaagaattctctttcattccttctgcagcacttgatttattggaccacatgctgacactagatcctagtaagcggtgcacagctgaacagaccctacagagcgacttccttaaagatgtcgaactcagcaaaatggctcctccagacctcccccactggcaggattgccatgagttgtggagtaagaaacggcgacgtcagcgacaaagtggtgttgtagtcgaagagccacctccatccaaaacttctcgaaaagaaactacctcagggacaagtactgagcctgtgaagaacagcagcccagcaccacctcagcctgctcctggcaaggtggagtctggggctggggatgcaataggccttgctgacatcacacaacagctgaatcaaagtgaattggcagtgttattaaacctgctgcagagccaaaccgacctgagcatccctcaaatggcacagctgcttaacatccactccaacccagagatgcagcagcagctggaagccctgaaccaatccatcagtgccctgacggaagctacttcccagcagcaggactcagagaccatggccccagaggagtctttgaaggaagcaccctctgccccagtgatcctgccttcagcagaacagacgacccttgaagcttcaagcacaccagctgacatgcagaatatattggcagttctcttgagtcagctgatgaaaacccaagagccagcaggcagtctggaggaaaacaacagtgacaagaacagtgggccacaggggccccgaagaactcccacaatgccacaggaggaggcagcaggcatgtcctcctcacattcttccaccagagaagaggccccctgagccccccggacctccaccgccgccacctccaccccctctggttgaaggcgatctttccagcgccccccaggagttgaacccagccgtgacagccgccttgctgcaacttttatcccagcctgaagcagagcctcctggccacctgccacatgagcaccaggccttgagaccaatggagtactccacccgaccccgtccaaacaggacttatggaaacactgatgggcctgaaacagggttcagtgccattgacactgatgaacgaaactctggtccagccttgacagaatccttggtccagaccctggtgaagaacaggaccttctcaggctctctgagccaccttggggagtccagcagttaccagggcacagggtcagtgcagtttccaggggaccaggacctccgttttgccagggtccccttagcgttacacccggtggtcgggcaaccattcctgaaggctgagggaagcagcaattctgtggtacatgcagagaccaaattgcaaaactatggggagctggggccaggaaccactggggccagcagctcaggagcaggccttcactgggggggcccaactcagtcttctgcttatggaaaactctatcgggggcctacaagagtcccaccaagagggggaagagggagaggagttccttactaacccagagacttcagtgtcctgaaagattcctttcctatccatccttccatccagttctctgaatctttaatgaaatcatttgccagagcgaggtaatcatctgcatttggctactgcaaagctgtccgttgtattccttgctcacttgctactagcaggcgacttacgaaataatgatgttggcaccagttccccctggatgggctatagccagaacatttacttcaactctaccttagtagatacaagtagagaatatggagaggatcattacattgaaaagtaaatgttttattagttcattgcctgcacttactgatcggaagagagaaagaacagtttcagtattgagatggctcaggagaggctctttgatttttaaagttttggggtggggggttgtgtgtggtttctttcttttgaattttaatttaggtgttttgggtttttttcctttaaagagaatagtgttcacaaaatttgagctgctctttggcttttgctataagggaaacagagtggcctggctgatttgaataaatgtttctttcctctccaccatctcacattttgcttttaagtgaacactttttccccattgagcatcttgaacatactttttttccaaataaattactcatccttaaagtttactccactttgacaaaagatacgcccttctccctgcacataaagcaggttgtagaacgtggcattcttgggcaagtaggtagactttacccagtctctttccttttttgctgatgtgtgctctctctctctctttctctctctctctctctctctctctctctctgtctgtctcgcttgctcgctctcgctgtttctctctctttgaggcatttgtttggaaaaaatcgttgagatgcccaagaacctgggataattctttactttttttgaaataaaggaaaggaaa

SEQ ID NO: 174330 - DNA, 7123 bp, Homo sapiens
cttttttcccttcttcaggtcaggggaaagggaatgcccaattcagagagacatgggggcaagaaggacgggagtggaggagcttctggaactttgcagccgtcatcgggaggcggcagctctaacagcagagagcgtcaccgcttggtatcgaagcacaagcggcataagtccaaacactccaaagacatggggttggtgacccccgaagcagcatccctgggcacagttatcaaacctttggtggagtatgatgatatcagctctgattccgacaccttctccgatgacatggccttcaaactagaccgaagggagaacgacgaacgtcgtggatcagatcggagcgaccgcctgcacaaacatcgtcaccaccagcacaggcgttcccgggacttactaaaagctaaacagaccgaaaaagaaaaaagccaagaagtctccagcaagtcgggatcgatgaaggaccggatatcgggaagttcaaagcgttcgaatgaggagactgatgactatgggaaggcgcaggtagccaaaagcagcagcaaggaatccaggtcatccaagctccacaaggagaagaccaggaaagaacgggagctgaagtctgggcacaaagaccggagtaaaagtcatcgaaaaagggaaacacccaaaagttacaaaacagtggacagcccaaaacggagatccaggagcccccacaggaagtggtctgacagctccaaacaagatgatagcccctcgggagcttcttatggccaagattatgaccttagtccctcacgatctcatacctcgagcaattatgactcctacaagaaaagtcctggaagtacctcgagaaggcagtcggtcagtcccccttacaaggagccttcggcctaccagtccagcacccggtcaccgagcccctacagtaggcgacagagatctgtcagtccctatagcaggagacggtcgtccagctacgaaagaagtggctcttacagcgggcgatcgcccagtccctatggtcgaaggcggtccagcagccctttcctgagcaagcggtctctgagtcggagtccactccccagtaggaaatccatgaagtccagaagtagaagtcctgcatattcaagacattcatcttctcatagtaaaaagaagagatccagttcacgcagtcgtcattccagtatctcacctgtcaggcttccacttaattccagtctgggagctgaactcagtaggaaaaagaaggaaagagcagctgctgctgctgcagcaaagatggatggaaaggagtccaagggttcacctgtatttttgcctagaaaagagaacagttcagtagaggctaaggattcaggtttggagtctaaaaagttacccagaagtgtaaaattggaaaaatctgccccagatactgaactggtgaatgtaacacatctaaacacagaggtaaaaaattcttcagatacagggaaagtaaagttggatgagaactccgagaagcatcttgttaaagatttgaaagcacagggaacaagagactctaaacccatagcactgaaagaggagattgttactccaaaggagacagaaacatcagaaaaggagacccctccacctcttcccacaattgcttctcccccaccccctctaccaactactacccctccacctcagacaccccctttgccacctttgcctccaataccagctcttccacagcaaccacctctgcctccttctcagccagcatttagtcaggttcctgcttccagtacttcaactttgcccccttctactcactcaaagacatctgctgtgtcctctcaggcaaattctcagccccctgtacaggtttctgtgaagactcaagtatctgtaacagctgctattccacacctgaaaacttcaacgttgcctcctttgcccctcccacccttattacctggaggtgatgacatggatagtccaaaagaaactcttccttcaaaacctgtgaagaaagagaaggaacagaggacacgtcacttactcacagaccttcctctccctccagagctccctggtggagatctgtctcccccagactctccagaaccaaaggcaatcacaccacctcagcaaccatataaaaagagaccaaaaatttgttgtcctcgttatggagaaagaagacaaacagaaagcgactgggggaaacgctgtgtggacaagtttgacattattgggattattggagaaggaacctatggccaagtatataaagccagggacaaagacacaggagaactagtggctctgaagaaggtgagactagacaatgagaaagagggcttcccaatcacagccattcgtgaaatcaaaatccttcgtcagttaatccaccgaagtgttgttaacatgaaggaaattgtcacagataaacaagatgcactggatttcaagaaggacaaaggtgccttttaccttgtatttgagtatatggaccatgacttaatgggactgctagaatctggtttggtgcacttttctgaggaccatatcaagtcgttcatgaaacagctaatggaaggattggaatactgtcacaaaaagaatttcctgcatcgggatattaagtgttctaacattttgctgaataacagtgggcaaatcaaactagcagattttggacttgctcggctctataactctgaagagagtcgcccttacacaaacaaagtcattactttgtggtaccgacctccagaactactgctaggagaggaacgttacacaccagccatagatgtttggagctgtggatgtattcttggggaactattcacaaagaagcctatttttcaagccaatctggaactggctcagctagaactgatcagccgactttgtggtagcccttgtccagctgtgtggcctgatgttatcaaactgccctacttcaacaccatgaaaccgaagaagcaatatcgaaggcgtctacgagaagaattctctttcattccttctgcagcacttgatttattggaccacatgctgacactagatcctagtaagcggtgcacagctgaacagaccctacagagcgacttccttaaagatgtcgaactcagcaaaatggctcctccagacctcccccactggcaggattgccatgagttgtggagtaagaaacggcgacgtcagcgacaaagtggtgttgtagtcgaagagccacctccatccaaaacttctcgaaaagaaactacctcagggacaagtactgagcctgtgaagaacagcagcccagcaccacctcagcctgctcctggcaaggtggagtctggggctggggatgcaataggccttgctgacatcacacaacagctgaatcaaagtgaattggcagtgttattaaacctgctgcagagccaaaccgacctgagcatccctcaaatggcacagctgcttaacatccactccaacccagagatgcagcagcagctggaagccctgaaccaatccatcagtgccctgacggaagctacttcccagcagcaggactcagagaccatggccccagaggagtctttgaaggaagcaccctctgccccagtgatcctgccttcagcagaacagacgacccttgaagcttcaagcacaccagctgacatgcagaatatattggcagttctcttgagtcagctgatgaaaacccaagagccagcaggcagtctggaggaaaacaacagtgacaagaacagtgggccacaggggccccgaagaactcccacaatgccacaggaggaggcagcaggcatgtcctcctcacattcttccaccagagaagaggccccctgagccccccggacctccaccgccgccacctccaccccctctggttgaaggcgatctttccagcgccccccaggagttgaacccagccgtgacagccgccttgctgcaacttttatcccagcctgaagcagagcctcctggccacctgccacatgagcaccaggccttgagaccaatggagtactccacccgaccccgtccaaacaggacttatggaaacactgatgggcctgaaacagggttcagtgccattgacactgatgaacgaaactctggtccagccttgacagaatccttggtccagaccctggtgaagaacaggaccttctcaggctctctgagccaccttggggagtccagcagttaccagggcacagggtcagtgcagtttccaggggaccaggacctccgttttgccagggtccccttagcgttacacccggtggtcgggcaaccattcctgaaggctgagggaagcagcaattctgtggtacatgcagagaccaaattgcaaaactatggggagctggggccaggaaccactggggccagcagctcaggagcaggccttcactgggggggcccaactcagtcttctgcttatggaaaactctatcgggggcctacaagagtcccaccaagagggggaagagggagaggagttccttactaacccagagacttcagtgtcctgaaagattcctttcctatccatccttccatccagttctctgaatctttaatgaaatcatttgccagagcgaggtaatcatctgcatttggctactgcaaagctgtccgttgtattccttgctcacttgctactagcaggcgacttacgaaataatgatgttggcaccagttccccctggatgggctatagccagaacatttacttcaactctaccttagtagatacaagtagagaatatggagaggatcattacattgaaaagtaaatgttttattagttcattgcctgcacttactgatcggaagagagaaagaacagtttcagtattgagatggctcaggagaggctctttgatttttaaagttttggggtggggggttgtgtgtggtttctttcttttgaattttaatttaggtgttttgggtttttttcctttaaagagaatagtgttcacaaaatttgagctgctctttggcttttgctataagggaaacagagtggcctggctgatttgaataaatgtttctttcctctccaccatctcacattttgcttttaagtgaacactttttccccattgagcatcttgaacatactttttttccaaataaattactcatccttaaagtttactccactttgacaaaagatacgcccttctccctgcacataaagcaggttgtagaacgtggcattcttgggcaagtaggtagactttacccagtctctttccttttttgctgatgtgtgctctctctctctctttctctctctctctctctctctctctctctctgtctgtctcgcttgctcgctctcgctgtttctctctctttgaggcatttgtttggaaaaaatcgttgagatgcccaagaacctgggataattctttactttttttgaaataaaggaaaggaaattcagactcttacattgttctctgtaactcttcaattctaaaatgttttgttttttaaaccatgttctgatggggaagttgatttgtaagtgtggacagcttggacattgctgctgagctgtggttagagatgatgcctccattcctagagggctaataacagcatttagcatattgtttacacatatatttttatgtcaaaaaaaaaacaaaaacctttcaaacagagcattgtgatattgtcaaagagaaaaacaaatcctgaagatacatggaaatgtaacctagtttagggtgggtatttttctgaagatacatcaatacctgaccttttttaaaaaaataattttaaaacagcatactgtgaggaagaacagtattgacatacccacatcccagcatgtgtaccctgccagttcttttagggatttttcctccaaagagatttggatttggttttggtaaaaggggttaaattgtgcttccaggcaagaactttgccttatcataaacaggaaatgaaaaagggaagggctgtcaggatgggataatttgggaggcttctcattctggcttctatttctatgtgagtaccagcatatagagtgttttaaaaacagatacatgtcatataatttatctgcacagacttagaccttcaggaaacataggttaagcccccttttacaaagaaaaagtaaacatacttcagcatcttggagggtagttttcaaaactcaagtttcatgtttcaatgccaagttcttattttaaaaaataaaatctacttataagagaaaggtgcattacttaaaaaaaaaaaactttaaagaaatgaaagaagaaccctcttcagatacttacttgaagactgttttcccctgttaatgagatatagctagatatcggtgtgtgtatttctttattattctctggtttttgatctggccttgcctccagggccaaacactgatttagaaagagagccttctagctattttggcattgatggctttttataccagtgtgtccagttagatttactaggcttactgacatgctattggtaaatcgcattaaagttcatctgaaccttctgtctgttgacttcttagtcctcagacatgggcctttgtgttttagaatatttgaatttgagttattgggccccactccctgttttttattaaagaacgtgagcctgggatactttcagaagtatctgttcaatgaaaaaaagttggtttcccatcaaatatgaataaaattctctatatatttcaaaaaaaaaaaaaaaaaaaaaaaaaaaaaattttgttggcgcgccgcgcctcggagcccccgagaaagaagctcttttaaacacccattctggttgtgggcgcgccgcgcggcgccccagtgtaaggttactgtgtgaacacagtgggttccatcagccgtgtgttcgccttcaaggagagaactcaggctgggtcctgagaacatgaggtgcttgtgggattttttcccaccacatattaaaaaacaccgcccgcgggggaacaacgagcgaaggtgttttcgtgaaacaaatcttcctcagaaggagagttcccggaagggcttaacatcacggggatgtccttttaaaaaggagggtttccacgacagagctcaaatttttctatttaccc

SEQ ID NO: 174331 - DNA, 5966 bp, Homo sapiens
cttttttcccttcttcaggtcaggggaaagggaatgcccaattcagagagacatgggggcaagaaggacgggagtggaggagcttctggaactttgcagccgtcatcgggaggcggcagctctaacagcagagagcgtcaccgcttggtatcgaagcacaagcggcataagtccaaacactccaaagacatggggttggtgacccccgaagcagcatccctgggcacagttatcaaacctttggtggagtatgatgatatcagctctgattccgacaccttctccgatgacatggccttcaaactagaccgaagggagaacgacgaacgtcgtggatcagatcggagcgaccgcctgcacaaacatcgtcaccaccagcacaggcgttcccgggacttactaaaagctaaacagaccgaaaaagaaaaaagccaagaagtctccagcaagtcgggatcgatgaaggaccggatatcgggaagttcaaagcgttcgaatgaggagactgatgactatgggaaggcgcaggtagccaaaagcagcagcaaggaatccaggtcatccaagctccacaaggagaagaccaggaaagaacgggagctgaagtctgggcacaaagaccggagtaaaagtcatcgaaaaagggaaacacccaaaagttacaaaacagtggacagcccaaaacggagatccaggagcccccacaggaagtggtctgacagctccaaacaagatgatagcccctcgggagcttcttatggccaagattatgaccttagtccctcacgatctcatacctcgagcaattatgactcctacaagaaaagtcctggaagtacctcgagaaggcagtcggtcagtcccccttacaaggagccttcggcctaccagtccagcacccggtcaccgagcccctacagtaggcgacagagatctgtcagtccctatagcaggagacggtcgtccagctacgaaagaagtggctcttacagcgggcgatcgcccagtccctatggtcgaaggcggtccagcagccctttcctgagcaagcggtctctgagtcggagtccactccccagtaggaaatccatgaagtccagaagtagaagtcctgcatattcaagacattcatcttctcatagtaaaaagaagagatccagttcacgcagtcgtcattccagtatctcacctgtcaggcttccacttaattccagtctgggagctgaactcagtaggaaaaagaaggaaagagcagctgctgctgctgcagcaaagatggatggaaaggagtccaagggttcacctgtatttttgcctagaaaagagaacagttcagtagaggctaaggattcaggtttggagtctaaaaagttacccagaagtgtaaaattggaaaaatctgccccagatactgaactggtgaatgtaacacatctaaacacagaggtaaaaaattcttcagatacagggaaagtaaagttggatgagaactccgagaagcatcttgttaaagatttgaaagcacagggaacaagagactctaaacccatagcactgaaagaggagattgttactccaaaggagacagaaacatcagaaaaggagacccctccacctcttcccacaattgcttctcccccaccccctctaccaactactacccctccacctcagacaccccctttgccacctttgcctccaataccagctcttccacagcaaccacctctgcctccttctcagccagcatttagtcaggttcctgcttccagtacttcaactttgcccccttctactcactcaaagacatctgctgtgtcctctcaggcaaattctcagccccctgtacaggtttctgtgaagactcaagtatctgtaacagctgctattccacacctgaaaacttcaacgttgcctcctttgcccctcccacccttattacctggaggtgatgacatggatagtccaaaagaaactcttccttcaaaacctgtgaagaaagagaaggaacagaggacacgtcacttactcacagaccttcctctccctccagagctccctggtggagatctgtctcccccagactctccagaaccaaaggcaatcacaccacctcagcaaccatataaaaagagaccaaaaatttgttgtcctcgttatggagaaagaagacaaacagaaagcgactgggggaaacgctgtgtggacaagtttgacattattgggattattggagaaggaacctatggccaagtatataaagccagggacaaagacacaggagaactagtggctctgaagaaggtgagactagacaatgagaaagagggcttcccaatcacagccattcgtgaaatcaaaatccttcgtcagttaatccaccgaagtgttgttaacatgaaggaaattgtcacagataaacaagatgcactggatttcaagaaggacaaaggtgccttttaccttgtatttgagtatatggaccatgacttaatgggactgctagaatctggtttggtgcacttttctgaggaccatatcaagtcgttcatgaaacagctaatggaaggattggaatactgtcacaaaaagaatttcctgcatcgggatattaagtgttctaacattttgctgaataacagtgggcaaatcaaactagcagattttggacttgctcggctctataactctgaagagagtcgcccttacacaaacaaagtcattactttgtggtaccgacctccagaactactgctaggagaggaacgttacacaccagccatagatgtttggagctgtggatgtattcttggggaactattcacaaagaagcctatttttcaagccaatctggaactggctcagctagaactgatcagccgactttgtggtagcccttgtccagctgtgtggcctgatgttatcaaactgccctacttcaacaccatgaaaccgaagaagcaatatcgaaggcgtctacgagaagaattctctttcattccttctgcagcacttgatttattggaccacatgctgacactagatcctagtaagcggtgcacagctgaacagaccctacagagcgacttccttaaagatgtcgaactcagcaaaatggctcctccagacctcccccactggcaggattgccatgagttgtggagtaagaaacggcgacgtcagcgacaaagtggtgttgtagtcgaagagccacctccatccaaaacttctcgaaaagaaactacctcagggacaagtactgagcctgtgaagaacagcagcccagcaccacctcagcctgctcctggcaaggtggagtctggggctggggatgcaataggccttgctgacatcacacaacagctgaatcaaagtgaattggcagtgttattaaacctgctgcagagccaaaccgacctgagcatccctcaaatggcacagctgcttaacatccactccaacccagagatgcagcagcagctggaagccctgaaccaatccatcagtgccctgacggaagctacttcccagcagcaggactcagagaccatggccccagaggagtctttgaaggaagcaccctctgccccagtgatcctgccttcagcagaacagacgacccttgaagcttcaagcacaccagctgacatgcagaatatattggcagttctcttgagtcagctgatgaaaacccaagagccagcaggcagtctggaggaaaacaacagtgacaagaacagtgggccacaggggccccgaagaactcccacaatgccacaggaggaggcagcaggcatgtcctcctcacattcttccaccagagaagaggccccctgagccccccggacctccaccgccgccacctccaccccctctggttgaaggcgatctttccagcgccccccaggagttgaacccagccgtgacagccgccttgctgcaacttttatcccagcctgaagcagagcctcctggccacctgccacatgagcaccaggccttgagaccaatggagtactccacccgaccccgtccaaacaggacttatggaaacactgatgggcctgaaacagggttcagtgccattgacactgatgaacgaaactctggtccagccttgacagaatccttggtccagaccctggtgaagaacaggaccttctcaggctctctgagccaccttggggagtccagcagttaccagggcacagggtcagtgcagtttccaggggaccaggacctccgttttgccagggtccccttagcgttacacccggtggtcgggcaaccattcctgaaggctgagggaagcagcaattctgtggtacatgcagagaccaaattgcaaaactatggggagctggggccaggaaccactggggccagcagctcaggagcaggccttcactgggggggcccaactcagtcttctgcttatggaaaactctatcgggggcctacaagagtcccaccaagagggggaagagggagaggagttccttactaacccagagacttcagtgtcctgaaagattcctttcctatccatccttccatccagttctctgaatctttaatgaaatcatttgccagagcgaggtaatcatctgcatttggctactgcaaagctgtccgttgtattccttgctcacttgctactagcaggcgacttacgaaataatgatgttggcaccagttccccctggatgggctatagccagaacatttacttcaactctaccttagtagatacaagtagagaatatggagaggatcattacattgaaaagtaaatgttttattagttcattgcctgcacttactgatcggaagagagaaagaacagtttcagtattgagatggctcaggagaggctctttgatttttaaagttttggggtggggggttgtgtgtggtttctttcttttgaattttaatttaggtgttttgggtttttttcctttaaagagaatagtgttcacaaaatttgagctgctctttggcttttgctataagggaaacagagtggcctggctgatttgaataaatgtttctttcctctccaccatctcacattttgcttttaagtgaacactttttccccattgagcatcttgaacatactttttttccaaataaattactcatccttaaagtttactccactttgacaaaagatacgcccttctccctgcacataaagcaggttgtagaacgtggcattcttgggcaagtaggtagactttacccagtctctttccttttttgctgatgtgtgctctctctctctctttctctctctctctctctctctctctctctctgtctgtctcgcttgctcgctctcgctgtttctctctctgtctgtctcgcgcgcgctctctcttgttctctctctggagggtgtgtgtggaaagatctcggagagatgcgcgaagagcgaggagatatttactatagttagtgagaatataagaggaaaagatataccagactcttagtattgttctgctgtatctcgtaaaactactagagtggttgtgttttagaacagctatgttgtgatggggatgtttgttgtgtgatgtgtggagcgctgtggatattgatgccagactgaggatagagaagatgctatcatatagagagggggaacgaacgattgcagatagtggacacatatatttttgttgtgtaaaaaaaaaaaaggttttaaaaacaaggcgagttgggattgttgcaagagaaaaaccatcgtcgaatcttcgggaatgtaccatcggcgggggtattggaaagaacaaactgcgggttgtaaaacttttacacggggtggggagacaatttttgttcctctgagttgccggagcttgagggttcccaaaatgggttgtgaagggatatgtcacacacctcttttaaaaaagggggggggtatgggctcttctttgaaatgagaattcacg

SEQ ID NO: 174332 - DNA, 3756 bp, Homo sapiens
cttttttcccttcttcaggtcaggggaaagggaatgcccaattcagagagacatgggggcaagaaggacgggagtggaggagcttctggaactttgcagccgtcatcgggaggcggcagctctaacagcagagagcgtcaccgcttggtatcgaagcacaagcggcataagtccaaacactccaaagacatggggttggtgacccccgaagcagcatccctgggcacagttatcaaacctttggtggagtatgatgatatcagctctgattccgacaccttctccgatgacatggccttcaaactagaccgaagggagaacgacgaacgtcgtggatcagatcggagcgaccgcctgcacaaacatcgtcaccaccagcacaggcgttcccgggacttactaaaagctaaacagaccgaaaaagaaaaaagccaagaagtctccagcaagtcgggatcgatgaaggaccggatatcgggaagttcaaagcgttcgaatgaggagactgatgactatgggaaggcgcaggtagccaaaagcagcagcaaggaatccaggtcatccaagctccacaaggagaagaccaggaaagaacgggagctgaagtctgggcacaaagaccggagtaaaagtcatcgaaaaagggaaacacccaaaagttacaaaacagtggacagcccaaaacggagatccaggagcccccacaggaagtggtctgacagctccaaacaagatgatagcccctcgggagcttcttatggccaagattatgaccttagtccctcacgatctcatacctcgagcaattatgactcctacaagaaaagtcctggaagtacctcgagaaggcagtcggtcagtcccccttacaaggagccttcggcctaccagtccagcacccggtcaccgagcccctacagtaggcgacagagatctgtcagtccctatagcaggagacggtcgtccagctacgaaagaagtggctcttacagcgggcgatcgcccagtccctatggtcgaaggcggtccagcagccctttcctgagcaagcggtctctgagtcggagtccactccccagtaggaaatccatgaagtccagaagtagaagtcctgcatattcaagacattcatcttctcatagtaaaaagaagagatccagttcacgcagtcgtcattccagtatctcacctgtcaggcttccacttaattccagtctgggagctgaactcagtaggaaaaagaaggaaagagcagctgctgctgctgcagcaaagatggatggaaaggagtccaagggttcacctgtatttttgcctagaaaagagaacagttcagtagaggctaaggattcaggtttggagtctaaaaagttacccagaagtgtaaaattggaaaaatctgccccagatactgaactggtgaatgtaacacatctaaacacagaggtaaaaaattcttcagatacagggaaagtaaagttggatgagaactccgagaagcatcttgttaaagatttgaaagcacagggaacaagagactctaaacccatagcactgaaagaggagattgttactccaaaggagacagaaacatcagaaaaggagacccctccacctcttcccacaattgcttctcccccaccccctctaccaactactacccctccacctcagacaccccctttgccacctttgcctccaataccagctcttccacagcaaccacctctgcctccttctcagccagcatttagtcaggttcctgcttccagtacttcaactttgcccccttctactcactcaaagacatctgctgtgtcctctcaggcaaattctcagccccctgtacaggtttctgtgaagactcaagtatctgtaacagctgctattccacacctgaaaacttcaacgttgcctcctttgcccctcccacccttattacctggaggtgatgacatggatagtccaaaagaaactcttccttcaaaacctgtgaagaaagagaaggaacagaggacacgtcacttactcacagaccttcctctccctccagagctccctggtggagatctgtctcccccagactctccagaaccaaaggcaatcacaccacctcagcaaccatataaaaagagaccaaaaatttgttgtcctcgttatggagaaagaagacaaacagaaagcgactgggggaaacgctgtgtggacaagtttgacattattgggattattggagaaggaacctatggccaagtatataaagccagggacaaagacacaggagaactagtggctctgaagaaggtgagactagacaatgagaaagagggcttcccaatcacagccattcgtgaaatcaaaatccttcgtcagttaatccaccgaagtgttgttaacatgaaggaaattgtcacagataaacaagatgcactggatttcaagaaggacaaaggtgccttttaccttgtatttgagtatatggaccatgacttaatgggactgctagaatctggtttggtgcacttttctgaggaccatatcaagtcgttcatgaaacagctaatggaaggattggaatactgtcacaaaaagaatttcctgcatcgggatattaagtgttctaacattttgctgaataacagtgggcaaatcaaactagcagattttggacttgctcggctctataactctgaagagagtcgcccttacacaaacaaagtcattactttgtggtaccgacctccagaactactgctaggagaggaacgttacacaccagccatagatgtttggagctgtggatgtattcttggggaactattcacaaagaagcctatttttcaagccaatctggaactggctcagctagaactgatcagccgactttgtggtagcccttgtccagctgtgtggcctgatgttatcaaactgccctacttcaacaccatgaaaccgaagaagcaatatcgaaggcgtctacgagaagaattctctttcattccttctgcagcacttgatttattggaccacatgctgacactagatcctagtaagcggtgcacagctgaacagaccctacagagcgacttccttaaagatgtcgaactcagcaaaatggctcctccagacctcccccactggcaggattgccatgagttgtggagtaagaaacggcgacgtcagcgacaaagtggtgttgtagtcgaagagccacctccatccaaaacttctcgaaaagaaactacctcagggacaagtactgagcctgtgaagaacagcagcccagcaccacctcagcctgctcctggcaaggtggagtctggggctggggatgcaataggccttgctgacatcacacaacagctgaatcaaagtgaattggcagtgttattaaacctgctgcagagccaaaccgacctgagcatccctcaaatggcacagctgcttaacatccactccaacccagagatgcagcagcagctggaagccctgaaccaatccatcagtgccctgacggaagctacttcccagcagcaggactcagagaccatggccccagaggagtctttgaaggaagcaccctctgccccagtgatcctgccttcagcagaacagacgacccttgaagcttcaagcacaccagctgacatgcagaatatattggcagttctcttgagtcagctgatgaaaacccaagagccagcaggcagtctggagttggaggcctctggagttgggcaggcctctggagttggg

SEQ ID NO: 174333 - DNA, 595 bp, Homo sapiens
cagaggaaaaaaaagaatttttaattttctttactgaaattttaatttttgattactgaatttttacttttgaaggttgtcaaattcatgcatctttccattttatgatgtagttgcttcctgtaaatcttggaaagatcattcatttggacattaaataaataggtggtttttttttacttttaacatttttatttttaatcactgtatatctttaataagtaatagcaataaatataacaagtaagtacaatagtttagttgccaagacttttgggaacttgactgtgtgacaattttctaagcattttacagtgctatagcagtggtcactatcatctctttttaatagttggcaaaactgaagcccagagagactaagtagctagcacaaagagagtacagaattgaaagcaaagcaatcaactcttaattactatgttatgatgcccctctaactgattttgaactgcattacatcttatatttatgttagtaaatggctttaagtgaaacattaactaatttttacttttcagtagaatgaaatgtttcccaaactgatttgtttcatcaaataaataaagtcttatac

SEQ ID NO: 174334 - DNA, 278 bp, Homo sapiens
aaattccagacattatttattttatccacaagtattttcaacatgtagatgatagaaatatgcttaaaataagttttcagttatttaaacctaaaacacattgttacacatataccagaactcagtcctttctctgacctttgtgcactcaatgttaggagttacatcagcctataggactagagaatgaatttctctggtccagcgttttctaatgtatactacatggaatgtaaatctcatgaaatgttatggggggaaaaggtaagataagataa

SEQ ID NO: 174335 - DNA, 471 bp, Homo sapiens
tttattatgttgtattgtaaaagttaatcagcttttctgaccacaaataatatatgtgaaatatgaacacaatcttgtactaggtcagtgttttgttttgtcttgttttgattttgagacagagtctcactctgtcacctaggctggagtggagtgagtggtgccatctcagcttactgcaaactccacctcctgggttcaattcttgtgcctcagccacccaagtagctgggattaaagtttaagcgaccacaccgggctgatttttgtatttttagtagagtcagggttttgccatgttggccaggctggtctcgaactcctggcctcaagtgatctgcccacctcagcctcccaaaatgctgggattacaggggtgagccaccttgccgggccctaggtcagtgtttcttaaatgtctcagtggaaacttgctgctttgaggagataattgagggatgtttcaaacaa

SEQ ID NO: 174336 - DNA, 451 bp, Homo sapiens
ttcgagatggagtctcactctgttgcccaggctggagtgcagtggcgtgatcttggctcactgcaacctctgcctcccgggttcaagtgattctcctgcttcagcctcccgagtagctaggactacaggcgcgtgccaccacgactagctaatttttttttttttgtatttttagtagaggcggggtttcaccatgttacccaggatggtctcgatctcctgacctcatggtctgcccgcctcggcctcccaaagtgctgggattacaggcgtgagccactgcacccggccctaggtgatatttctaaaggccaccttatattttaagtaaattgaatggttccagttataaaaataagtattaacaaccctattctaatttcttattagttacaaaaatttcttgttcagttttctgtcttcttcactagagtacagatttcttgaggac

SEQ ID NO: 174337 - DNA, 411 bp, Homo sapiens
acacgccaccacgcccggctaatttttatagttttagtagagatggggtttcaccatgtttgccaggctggtctccaactcctggcctcatgtgatccacctgccttggcctcgtaaagtgctgtgattataggtgtgagccaccatgcctggcccagaatcaataattgttaatgcttcatcgagactttcttaaatgaaactggcataaaagacaacaaaaagcccctgggatttcatggtgggaagaacataattcctgctagtaccgcctggcactgtcaccttgactcaggctaaggttcctgctgtcacaccaccattgctcttgcaccatcagtgcaaacgtcaacacaaggaaaaaggcaaatagtggctcagtattatcattaaagtggtttgatcatgagg

SEQ ID NO: 174338 - DNA, 369 bp, Homo sapiens
gcttgtgttctctgcaatggagaatacccacacctgaggccccttctgggcactaaggaaattgacagtgtggtggagaacacggcatgaacctctgaatgactccagtaattcaagtcacttcattatcaagcgtcaggttaactctgccgctactgacagctagaaaccagggcaggagaaagaagttcaggctgctgctgcctgcatctccatcctcccttgatctcacaagaatcactaaatggtaggcaagaggggtgcaaggaaataaacacttagtcaaccttatcgtctatgtctccacattcctcttcccaagctttcaaagaatttaatgctgctgccgacaagcagagaaagcactca

SEQ ID NO: 174339 - DNA, 513 bp, Homo sapiens
gatgaaggtgtgtgtacgcagggctgcgccaaatgctgacagcatctcttcatgagaaccccaaaccggaagcagccccagtggccatcagcagatgaatgggtaaacaaagcagtgtgtacatccagtgggaaaaatgtgtgcctattggtttgagttgcttttcttagctcacctgaaagtatgaggtctgtgggtaggtacagaccttttaggcagcaacacgcatgtttttgtgcaggtgctctgggtgaccttgtagatagatgctgcttggtactggtcccactttgttccttcatcctcaggtcaggtctgcactgcctgttccgtctccactcctggtagcctgtgggagtcacagctgaatagtcatctcgtactgggattttactctgagtgcatgagttgtttccctaggaaaaacatgctgtctttctggatcgtaagggacaactagctaaagctcctagccgacctgtcgtccagccctcactctcctctgccagactt

SEQ ID NO: 174340 - DNA, 981 bp, Homo sapiens
gataacttctctggataaacataaagcagttagagtggagttatccccctcttctgttaaatgaaagtttcttttcacagtctttccattgaaggaattagaaaagtcatgggatacctctggtcttagagcagaaatgaagttccccagaagggggtcctggacagaatggtctcttgggcagggactagatgctgttacttaccatcagatgtgtctactgtaagatgcttgggaggcatcaaagtggtgacagtggggggctgttggattttaccattctggaatataagagaaggggtgtggctggtgttttagtccagatagcagctgtgaccactgggagcctcattttccacacctgcaaaaggagaaatagtgatccccttcctagtgttggtgtaaagagtagatgaacctctgcctgagtctcagatgcctgctgcccacttggtgcttagtggatcgggctggctgtcacagtgtaagcttatcaagcctaaatacttagttggtcttgactttttcacctcgaccatgactcagtgtcatgtgctcctagtcattctgtctgtggtccaacgttagcctgggaagcacctgggactgagggaagaaccctcagctagttattcagcgatccaggttctcctcctgcctttgatatcacctcattatataaccttgggaaacactttggtgtgactggaatgtggatactcccaggggaagggtaggagcatggtagggcatttggactttatcatgaaggtggtaggaaatacttgaagggttttaagcagggatgacacatcatcaaatgtgtgttttgaaaacttttttctgcagaggacagggccacagcccaagcaggatcaaaccagttaggagattgatgtaacagtcccgtcagaaagtgatgaggtagctgggtgcggtggctcatgcctgtaatcccagcaccgtgggaggctgagactg

SEQ ID NO: 174341 - DNA, 302 bp, Homo sapiens
gaactaataaaggatgctgattgtttaaacatgaaaccagtgttcctaataaattttaaaatattggaggcaattataaagtttattaaaaacagtttggaattgtcatggatatgagggaattaagtcatttttgatatattttatgctggatgatgaggctgtgaaattgtataataagacaattaaaatcagtcctaatttgaccaaaagtatttcagactctgagctaaatgtttgagacagcacacaaatgaagatggactcaacatttcctcatataatctctttcaggtctcact

SEQ ID NO: 174342 - DNA, 267 bp, Homo sapiens
atattttatatcttcttaggaaatacagcaatatctatcagataatcatatgaatataagtgatttggacctaattacttatttagcagagtttcttttggcccaagggcactatgaaaaaattaccaattcactaagggtgctataaaccaggtgtcttggtgaaacttattttttggaaaacaaatgtcaccttatttgatgatttcagatgataataaaaaaagtatcagaacgtataatgcattcaaagaaaggttaacactt

SEQ ID NO: 174343 - DNA, 135 bp, Homo sapiens
cactggtggtagtcaacttgctcccatcagtaattgtgataattattgctggctccaagaaaaaagggtttcttccctgcccatagttgtctatgccagttgctaatctatttaaatttaataaatcaaaagctg

SEQ ID NO: 174344 - DNA, 334 bp, Homo sapiens
gttgcttgtgtgtgtgtgtgtgtgtgtgtgtgtgtgtgtgtacaggtctatgtcatacaagtgcatttcttgctataggttacagatagaaaagtgtgaaggccactgggctaggtgaccttttatgattctttctaaattaaaagaaataattctgggaacattcataatttctatcataattttgtataaaacagaggctatatctaattcatttcgaacaagaccctgaataaaatggccatttgttaggttatatctgacatatttatcagttcatattttattattcaaaccccaaaaacattcagtactttaggtcagattttggtca

SEQ ID NO: 174345 - DNA, 556 bp, Homo sapiens
tgtactccaatggggaaaaaatgtcacactgttcatgatacaagagatctgcatgactgatgggcacttctataaaccagactaccccacagatgtatttgctcatttgaaataaaccaaatgaaatagaaaaaaagcactcccatggaaagactatccctgatcttcccagcaaaaactgcatcttccccaactctatttgttcagatgtttactgtgtatctctctccattacaaaacgagctccacaaaagcagggactctgtcttagtcactacttcatcccccgcaccaacatgaaatgcttggcacagtaaatgctcaaatacttgttgcttattttccgaaacattcctcatcatcttaaacctcctggcatctaacagaaaacaccccttagttactaactgatcacaaatagttccattactttccggtgtgcattctgttttgttgaattattctgcttttgaaaccctctacaatgagcactagagctgtgaggagaagtcagtgaagaacaccagcatccgagtggctgactttggcagtgcac

SEQ ID NO: 174346 - DNA, 716 bp, Homo sapiens
tattccactaaggttgtttgcttgtgtagttgggcagcctaatcagaggtgtggaggtgtaattacttcaaccattcatttacttcttataatcattagaatttaagttaaatgagcagaagtaattgcatctttcagatgagctgtaattaattttaggaactagtagattaggaatgtggtgctttaaggttctgtttccagagacctgttgcaagtaaaagcagttatacttgtgttaatttaaatgtgagccttggcactcattagagtgaaatgaaattgggctggctatttacttccatctacctctcttctcatgatctccatgagcttaataggtgccctttaacagtatctttatttctcctagatttcttttttcagcccattgtaattaaaggcctctcctgggttcggtcagagaatgggttgctgtcagaacaaaaaacagttcctgtctagtggagactggcttagcaataactaccttttgcactgcctgttacagttatgatcaaggtactttcagagtccaggaaacacaggtaaccactacactttaagtcactgaagagctgatttagcaactgtccattcatttattaacatttcttggagtacagtgctgattgtgttaatgatggtgtttaagaattattcagattatataaggtgaaaatgataaagcttacattaggattgctttcttttct

SEQ ID NO: 174347 - DNA, 425 bp, Homo sapiens
aacaatctggctcacccatatctccacattctcattacaaatatttacacctgcttttgtggttaataaaatacaaaaatgtagacaaataacagatttcatattttttcatttaggcagttaaaaactataatttctatactctggacaatatgaaatttgatatcattcaaatttcacatgattcaataaaagagcttactaacaaatgtgagttagacaggattttgactccaggaagtaaacagctttctaaatggcacagctgctcagtgactccaaggtgtgatctctgacagaccctggggaaaccacatctagaaaaaagctgaatgcaaaagtcaaccaactatcattaaataggccaagcatttgcctgagtacttcctctgaagttcagtagctgtatggccttaggtaaactc

SEQ ID NO: 174348 - DNA, 319 bp, Homo sapiens
ctctggttctgtagtcattggctgtttagggtagtggtctcaaatgtgcttccttctagtatagctacttatttggtcctatcatattcttcggtcacaattctctctacctcctagagaatgtttcaccgtgaactatgtgctgacttggaataccaagagttgtgaactctaggaaaactgtcaccttgcctgttgaaatggaaaaaaatcagtattctaggcctctgtcctagctttctaacgtgagcatacctgatattagaacagggaagtcccaaccaagaagagcaaagaaaagaagacaagagcattcttc

SEQ ID NO: 174349 - DNA, 296 bp, Homo sapiens
  misc_feature (12)..(12): n is a, c, g, or t
gctggtaccacnttctggaagcaacacccccaacacaacacggtggctctaacaagacacagcagcaggggagaagccagtttgcccagtgggccctggaaagtgacgcagtctggtcatcagcaccccagaaatccctcccaggcggtgggccccttgatagtgcgaagggtccggatggccacagggaattgtacgttatctgaacacagcaactggggcctctgctctccgcatctgtgtggcaccttgctcatagcagctgctcagtgaaggcttgcagaattacaaggcat

SEQ ID NO: 174350 - DNA, 452 bp, Homo sapiens
aaaacggttcactacaaaagcaactaaacacaaaagaagttaggaatgctgaaaatgagagacaaaaaaaggtataaggtaagcctaggcaacaaaataagaccttatctctataaaaaatacgaaaaaatcagccgggcatggtagcatgtgcctgcagcccagctacttgggagacagaggtgagaggatcacctgagcctggggaggttgaggatgcagtgagccgtgatcgtgctactgccctccagtctgggtgagacagtgaccctgtctcaaaaaaaaaaaaatgggggtgaaagacttacagaaaacaaacggcaaattggcagaagtccttccttatcagtatttacattaaatgcaagtggattaaactctccatcaaaaagaaagggttgacaaaatggatttttaaaaacctcatgattgaactgtaagctgtctacaag

SEQ ID NO: 174351 - DNA, 430 bp, Homo sapiens
ttttataaattgctacatgaaaaaatgaatataagaaatgttgcatattaaaatgcctatgactggtacattccttttctaacctcctacccttaagtgtgttcacatgacaaatgtttcaataaatacttagtctgaaagacattctggaatgtagttgtgctaatatacttgctaactatagctgcagttgtctcttcttttcctggaatgtgaaataataaatcaccatctcagaagtcattttgaaagccttaatcagataaatcctcatttttccaggcagtatttctgttgttgagggttagtcataattttcttctcttaatgataaaagtgatgtctcgctattgagcagaggcaaaatgtgaatgctaatgtcttacaactgggagaacaaatctattaattaaaggagtattcccttgga

SEQ ID NO: 174352 - DNA, 281 bp, Homo sapiens
gtgggccacggcaggggtcacaagtgagcaaattgataggtgagacctgaggccaactggagatggcatgcctgtcttgagggagcagccactcggccatttgggactggttggaaatgtaggcccagtgtggcagaggtcttggtagagaggcaagaaccagccagtaactcattcattttacacacacacacacacacacacacacacacggtactatggtacttccttttttttttttgaacggagtctctgtcacccagactggagtgctgtggtgc

SEQ ID NO: 174353 - DNA, 419 bp, Homo sapiens
tctgtagagacagggttttgccatgttccccgggctggtctcaaaactgctgtgctcaaaggatccacctgcctcagtctctcaaagtgctgatattacaggcatgagccaccgtgcccagcccaatcctgcatcttttctagagcagctgattaccatagcatgtggagggagagggccaggcctcagttgagaatctggtgaaagctgtgatcccttaccccagaaacgtacattatacctgtagcatcagggattcacagaacccaaaagccatccatccatccatccatccatccgtctgtccgtccatccatccatccatccatgcattgcaggctaggaagttttaccttatgcttgcacttactcttggggttgagatggagagggaaagttctagagctctctccctgctt

SEQ ID NO: 174354 - DNA, 826 bp, Homo sapiens
gggagccgtgatcctaacagcagctgacatttactgaacgctgtgcacatggtgggcgctgagcgcttggcctgaagtcacactggtggctttcttggagtttctatgtgatcccaggcagtcatgattcctagtccaggggcagtgaagggcagactctggagccagagagcctggcttcaggtccaagatgtatagaccagggcagttcccttcactctgtgcctccatctccttgtctaagaaatggtgagcataaaagtagatatttctgatggattttatgaggattaaatgagttaatatgtgtaaagccaggcaagtgttaaccataattattaacattaaccacaacacgatgttattatcagtgacatggactcgtagtgtgttattagagccggaagggtcttcgcatgtggacactccctttgctttgtgttgggagcttggacttagtgtggacacctgatctcccgcctcctccatagctccctgcaggtccttgtcagttctgggcctcgcagaccatgcacctgcctctccatgaacaagttgtttgaaatggtgcttttgtttcaggtgataatacaagtcactcttctggaagacttaatttttttgtttctctgggtgtaagtggcccacccaggcatgccagttacatttggtacccagagcctttgaggcagccaaagtatggtgcctttagatgctcctcgtcacccgcacgaccccctcaacaggtactgtgtttattttctggtccattttctcctcttgtgaaggtggcaggtcttcctaggcactctcagcttctactaac

SEQ ID NO: 174355 - DNA, 388 bp, Homo sapiens
cagttctggggaaagaggatgggatgctgacatagccataactctctaagggaaaggataaaggccctgcagactgagttctgggacaagggaagataccctggaatctgagagtgatcctagtggtggatgggaagaaggtgggaataaagactcccccacctgtttacctgttaatgaacagggtggaattaatgtttagaaactgagcagtgagaagtgaggctgaaattagccacccaaatggtgggttggtagttgttcactatcctctgggctggtggaaggaggggagtatcataacaataagggcaacaagccccatggtcccacatgaaaggctgtggctgtgactgctgagccaaggaatcccctaaactaaaagaaa

SEQ ID NO: 174356 - DNA, 539 bp, Homo sapiens
atttgcagaggcagtgccttctgcccccagatgggtaaccctatgggcaacccccttcaacttccttgctcaacatttgaaactccaagctgcactgtcctcaacacattctccagatcctctttaccctgctatgttttgagccccttttactctcttacctactgtataatctcctaacatgtttaccttttactgtgtgttctgcccatgggaatttaagctctgtgggggcagggatttttaccaaggttgttcactgatgtgtctcaagcgctcagaacagtcctttgcctttggacagtgctcggatttgcatgagtgaatgactgtgctctctccagagtgatgaggatgtcaggattgctaggtttagaaatgaagcacatcctatagtatgacagagcctgcagaggagataacagcttctcgcttaaagatatggagtaggcgttaaaaatgatttctgcccaatgtaagaggaggattttccaattaccaaccagaaggagttgcttggggtacaggaaggtgtaggg

SEQ ID NO: 174357 - DNA, 422 bp, Homo sapiens
cttttcttctgcaatgtctaatctaccactaatcccattcagcatatttttcatttctagaagatttatttgggtcttttttctttttgagacagtctcatgctgtcacccaggctggagtgcaatggtatgatcatggctcactgcagcctcaaccttcctgggctcaagccatcctcctacctcagcctcctaagtagctgagaccacaggtgtgcaccaccacgcccagctaatttttgtacttttctgtacagatggggttgtccagggtggtcttgatctcctgagctcaaacaatcctcacatctcagcctccagaagtgctgggattacaggtatgagccatgacgcccggccctaggtcttttttttatatcttccatttttttctttatttttatcatatttgccctgattga

SEQ ID NO: 174358 - DNA, 353 bp, Homo sapiens
ggtctctcaaagtgctgggattacaggcgtgagccaccgcacccagccccaactctccctcttaagaggacacgggctcaggctgacaaagaggcttttaggatgccacctaaagctcagctgcagttcccactgtgcgtattcatcagacacttacagaaaaccttggtgatatggtttggctgtgtgtccccaaccaaatctcatgttcaattttaatttctaataccaggagagggacctgctgggaggtgattagatcatgggggcggctttccccttgctgttctcgtgatagttctcaggagatctgatggtttaaagatgtgcggcacttcccacttcgtgctctc

SEQ ID NO: 174359 - DNA, 394 bp, Homo sapiens
tcttcatgttaaatctattaactgtggcaatggcatgggggttataaaacaaaacaaaacaaaacccttacatcaagaatgcaccctggtgtgttatggatgtgggtgaaatgaaatgtctggaatttgctttaaaatattgtaaaatagcaagaaggaaaagaaaagcgggaactggaatgagattggcgagatgttgacaagttcttgcagtgggatgatgggtgaatgggggttcatggtgcaattctctccctgctttttgtgcgtatgggaaatttccataacgaaaagttagaggtcgggcacggtggctaatgcctgtaatctcagcattttgggaggctgaggtgggtagatcacttgaacctaggagttcaagaccatcctggac

SEQ ID NO: 174360 - DNA, 705 bp, Homo sapiens
gcctaagaccttgcgtttcatgtattcacagcccgcctctgaggaatgtactatcatctctttgatgacaggaaattggggcccaagaaacttgatctggggcctcaggatgcggggagctggaggccagcttttctgggggcagcccctggccagttacagctcacgaagctcgtcaaggatagagctgagaaaacaaactctgaaggctgagctcttaaccaccaagctagaggcctcccgccctcctcttgacctctgccctgggaggcctgcccagacccccgtgcccacgcaccctctgccctccagatgcacagatgcttctggtcagaaccgcaccctgctcttcagtgcaccagtgtcccttgtagagttctgtgccgtggcttctatcccaagtcactcgggagtaagctacgcgcactgtctccccatcttcacccagggatgtgaagagctggtgaccgcggagacgctggatgggacagcatcaatctcggcactcttgggaggagaacctcagaggaaagccgggaccccgtcagactgagctagcaatacgccaggtccggagctcccagtctgttactgcagcgagcctgcagaaagagtccgccatcaggaaggtggtggacttctttctccaggtgccgccactactgctctggagccgtgggaatgctgcagtctccttccacagag

SEQ ID NO: 174361 - DNA, 455 bp, Homo sapiens
cacacatatgtatagctggatatttctataacataatatagatacattggaatatatgttgcctaatacagtgttttttcatttattaatatgtattgagcaccaactcagtgtgtgtgcggcatcatttagaagctgaggatgcagtaataaacagcttagacctaaatcccttccctcactatttctcataaatatgtaatagtatgttgaacattgtctaagttggtttttgaacggtatgtaggtctttggaccacccaatgtcatgttacttgtttatgatgtcctccactgggttgtaaagagcagggaccatgtttcttccatctctgtgtcctcctttcctcaaatgtaacatgaccttggcatttgtagatttgaactgttatttcttgctagttgaagaaatgggacagattagataataaacacttttttacacaatttacaaa

SEQ ID NO: 174362 - DNA, 383 bp, Homo sapiens
tttgtctcccatttcaagtaatatggcaacatcacaacgattgaattttttccaaagaaaaacaattttagaacaatctacagtggatctttctcagctcatgggccacaaaccattggggagactatgttctcatatctatgtgctccttagtttcttaaccaaaggttaactaaaagttcaaatattacatgggaggtctatgaatttttgaacgttcctttgtacttctttctagtcaatcctcacctgcagagtcaactgctcctctgatttatacattaacattgcttgttcacaaacttcatatgaatggaatcttttgaagtacatttagagtatatcttttttttttttttgagatgggatctcactctgttgcc

SEQ ID NO: 174363 - DNA, 292 bp, Homo sapiens
ccatgaggatggttactatttttaaaaaacagaaaataacaattgttggtgaggttatggttacattggatccctcatgcactattggtaagaatgtgaaatggggcagccactgtggaaaacagtatgatgattcctcaaaaaattagaaatagaatcaccctaggacccagcaagtctgcgtctgggtatatgcacagaagaatcagaagcagggtctcaagcaatatttgctcactatgttcacagcagtattagtcacgatggccaaggggcagcagcaacacgggcg

SEQ ID NO: 174364 - DNA, 270 bp, Homo sapiens
tggctgttgggattggccaggactcagctactgttttaggtacatactcctaagttaggttttcagtctttctacctattaagttaggttgcagtttgtccacagggactcaaatctagaagtacagagtccttcccaggccatatttagttcactgtaacagttcctattatgacctcactgacagttctttttctctgaattctcctttcttctcaacagcttatccaaatgttccattggtccctgttcatcttgccctgcagttct

SEQ ID NO: 174365 - DNA, 292 bp, Homo sapiens
tcgataaggccaatgtctctcacaaatatagattcatgactggtgtggaggctcacacctagaatcctggcgccttggggcggtggtgatggcgggcggatcacgaggtcaggagttcaagaccagcctgaccaacatggtgaaaccccatctctactaaaaatacaaaaattagccaggtgtggtggcaggcgcctgtaatcccagctactcaggaggctgagacaggagaatcacttgaacctgggaggcggaggttgcagtgagccgagatcacgccattgcactccag

SEQ ID NO: 174366 - DNA, 182 bp, Homo sapiens
cgggcccggccattctctgctgttttctgactcaacatcatgaaacaggaccttaagctgagaagtggtgagattggggccatcctcatttccacataaggccgtgttcctgtttactggggactaggacttggcatgtctttttcggggatagcccaacccttctgtgtgaaaggggtcgt

SEQ ID NO: 174367 - DNA, 637 bp, Homo sapiens
tggtactctttgctgatttccacaaaagggctaggggactgagcacagggctgtgcagcccgagggcagggcgggggcccaggctgagctgaggcctgtctggcatgaacccccaggagcccaagaatgtcttgggtagggacctgtggtgtttgggctccagccactgccgcagccctgcttcatctgtagggaggaaggccctgcaggtgtgggtgggtttgcgccagcaggacatttgcaggcctgcccctgcctcccttgagtggggtgtctgtggacctctctgccagttgcacctacccgctggtccccacacccagaggagcgctctggacccctcttgggagagccctggggcctgccgagctgcctccgcggtggtgcattgcaggcagatgctgttgtcgtccatttgttccctggggctttcaggggtgtttgtggcttctctggaagggctgttagagttgcacaaattgtgtcagactgcctttcatttttcaaagaatgtggctcactttgacacctggaagagcaggcagaagccaaagttgtgctctgtggattaagtttcctgttcctttgcctccgggaggacagggccggggctgggccggggccaccgcgcggccgc

SEQ ID NO: 174368 - DNA, 606 bp, Homo sapiens
tagaaattctgcttcacataatccaatatcacctcaccagaactggtactggttctacaagaccaatttatttggcaaagagattttaattttatatactaaaccttaaaaggcaaaaatcaacattcgtgcggccttcacaatacactgcacttgtatagtgttcctccatcttctttactcctcaagaagtcacttagagctattctcccactttacaaaaaaggcaaataagggttacatcagggacaagaactgggtcaagagtgaaccattcacaacccagaggacattcaaatctggacacttttcttggcctatcttccccaagaatcagggtgaaacagggttaatgggcatcaaactaataaaaacacttgaagtgaagccttgctctttatgatttccctcaccatctttaatactttttttttttttttttggaatttaaagaagaggcggggtttaaccatgtgggccaggcgggtctaaaactccggatctaaggggacctccaacctgggcctccaaaagggctggaataacaggcatgacccaccgcccctggccaatattttttaattatggggaacagggctgcacatt

SEQ ID NO: 174369 - DNA, 355 bp, Homo sapiens
tgtacaatatcatttaattggaattgtatactcctagagaaaaaattttaagctaatgggagaagctaatgggagaaataaaatgaagctgtatttgccgcccttccagcgagactgcaaggctgggctcttctgctggagctgcatctggatagaaggaggctttctcctcccctccttcgccctcactccctttctttaaagtcagctagggaataatttgtccatataaaaaggtcctttcaggcactggagggctttgctaattgtatttgagagaataaaggtaaactacaagttggcttttaacaacagaaaaataatgagttcgcatggcaacatgtttaataagatt

SEQ ID NO: 174370 - DNA, 543 bp, Homo sapiens
gccttaaatagtgtgtggaagaggcttaaacaagctaatataagtcaaaacttgagcacaatccttggtgtagctatacatatgtttgtgtatataacagaagctcaaaattataccattattattaataacatactctggaccctcatcataatgctattctcaatatccaaacatttgatttctattgataactatctgttgaatgaatgggtgcactggtctgatcagggtgtgatccaaggcaggtgtccatgtcttccaactctgaacctccagaatggagcaggcagcacacagcaggctctgagtgaattagccaagaatttctaagccagaagactatgtggggaaggggcagatatcttctgcaatggtatccagaagatctggattcaagccctgactccaccatgtgttgtgttatttggaagcattaagaatcctctgtctggggccacatatgcagcatcagaaggaatgtccgtgaaacaaacaagaggaccaaagaagataagctgggagaatccctgagactgtcca

SEQ ID NO: 174371 - DNA, 502 bp, Homo sapiens
catctcgatcgctatatcgtctggatgtgatacgtcgtggtatgcgtttatagtcgaccgtgtcaggcttgtaccattgattattggtcgtctactcagaacgttcagaatggggctattctcaatatccaaacatttgatttctattgataactatctgttgaatgaatgggtgcactggtctgatcagggtgtgatccaaggcaggtgtccatgtcttccaactctgaacctccagaatggagcaggcagcacacagcaggctctgagtgaattagccaagaatttctaagccagaagactatgtggggaaggggcagatatcttctgcaatggtatccagaagatctggattcaagccctgactccaccatgtgttgtgttatttggaagcattaagaatcctctgtctggggccacatatgcagcatcagaaggaatgtccgtgaaacaaacaagaggaccaaagaagataagctgggagaatccctgagactgtcca

SEQ ID NO: 174372 - DNA, 835 bp, Homo sapiens
tgtgtgtctgtgtctgtctgtgtctcgcagcggcgcgcggccccggacaagcgctggggattcccgtttgaggcgtcactactgtcactgccatcaccccacggagccacttctagaggggagtagacccggcccttcgccgggcagagaagatgttgcccctgtccatcaaagacgatgaatacaaaccacccaagttcaatttgttcggcaagatctcgggctggtttaggtctatactgtccgacaagacttcccggaacctgtttttcttcctgtgcctgaacctctctttcgcttttgtggaactactctacggcatctggagcaactgcttaggcttgatttccgactcttttcacatgtttttcgatagcactgccattttggctggactggcagcttctgttatttcaaactggagagataatgatgctttctcctatgggtatgttagagcggaagttctggctggctttgtcaatggcctatttttgatcttcactgctttttttattttctcagaaggaagttgaggccacggacacagtcattccctctttaatggtgctctagatcaggcacatggccatgtcgatcattgccatagccatgaagtgaaacatggtgctgcacatagccatgatcatgctcatggacatggacactttcattctcatgatggcccgtccttaaaagaaacaacaggacccagcagacagattttacaaggtgtatttttacatatcctagcagatacacttaaaagaggaataacacttacaactataagaatggctataagaattgaacagatagatctgtatcatcagac

SEQ ID NO: 174373 - DNA, 1310 bp, Homo sapiens
tgtgtgtctgtgtctgtctgtgtctcgcagcggcgcgcggccccggacaagcgctggggattcccgtttgaggcgtcactactgtcactgccatcaccccacggagccacttctagaggggagtagacccggcccttcgccgggcagagaagatgttgcccctgtccatcaaagacgatgaatacaaaccacccaagttcaatttgttcggcaagatctcgggctggtttaggtctatactgtccgacaagacttcccggaacctgtttttcttcctgtgcctgaacctctctttcgcttttgtggaactactctacggcatctggagcaactgcttaggcttgatttccgactcttttcacatgtttttcgatagcactgccattttggctggactggcagcttctgttatttcaaactggagagataatgatgctttctcctatgggtatgttagagcggaagttctggctggctttgtcaatggcctatttttgatcttcactgctttttttattttctcagaaggaagttgagagagcattagcccctccagatgtccaccatgagagactgcttcttgtttccattcttgggtttgtggtaaacctaataggaatatttgttttcaaacatggaggtcatggacattctcatggctctggtatgatggttaggacactttgtttcttcattttctactaggtttctgtcataattatttacttgagagaattaagttaaactatactgatttctgatgtcaacagactatgtgaatatcttcctgaactatccctttcacttctttatgcccctccatctcagtgccttctcagagctgtgcttgtatcatggatcccaccagacctcagtagcttatctgtttagtgtgatatcatttatataaaatagacaaatatcagaaaaccacaaaacaaatctacttatcagaaagttttgtgtgggctgggcacagtggcttacacctataattccagcactctgggaggccaaggcagatggatcacttgaatccaggaggttgacaccagcctgggcgatatggcgaaaccccatctctacaaaaaaatacaaaattagccaggtatgctgggtgacagagtgagactccatctcaaaaaaaaaacaaaaaaaacaggcatgatggcgcattcctgtagtcttagccactcaggaggttgagatgggagagtcgcttgagcccgggaggtggaggttgcagcgagccgagatcatgccactgcactccaacctgggtgacagagcaagactctgtctaaaaaaaa

SEQ ID NO: 174374 - DNA, 497 bp, Homo sapiens
aaaaaaatacaaatgataagtgaaaatatgatctcattttaattatcagattaatcaaaatacaaaagtttgatacctggagctggcacagtcattcacctacactgttggcagtagtgtaaattgctgcagtctttcaggaaagcaatgtgtaatctctatcaaagtgcaaaatatatacactgataaactgctaggaatttacactatcagtctacccaaagaagttcaccaagatacatacaaatatgtttgtaattttaaaatggaaagaatttgttttcatgcccagttgaagtttaatgacaaatatctttgacgttccctcaccccctccccaaaggtgatgtcgctttcttccttattgaagaactgtatcccatattgtcctattttacaattatcagttgggtttacagtaagtttttttttccctagaaacaggggcttttcatttattctgttaatagttgtcactagagatgaggtgttcagaa

SEQ ID NO: 174375 - DNA, 122 bp, Homo sapiens
ctgaggttatgcagctgataagtgacagggccacagtttgaagtgaggtgctctggcttcagatgccatgctcccaaccactatactattctggttccccagataggcttggactatacccg

SEQ ID NO: 174376 - DNA, 687 bp, Homo sapiens
aaaaggtattttaaactccactaattgagagacgaaaatgggaacttatcttaaactagcttctttagaaaaagtatattagaacttaatccagctcttcctttgggacttataatcaaaattagaatcatgaaatgttgaagtaagttttggtattagagtaagccatcatgtataattcctttgatttttagattcaaaacattgaaggctttataatttgtgtttagttggggaaaatattaaagttaatcaactcttgggtgagttcagagctagtataaagatgtagttctggacctttaaatgaaagtgaaattaaaatcctttaaggataaaactttgcatagcttcagtctattacatagactgagaaaaggacccatacatggggcactctgctggggttggttgcagaagagggcagatatttatgcgggagaggtcaaagaattgccatagaatactttcatagcacatagcatgttgtattggagcagaccaacatccttattttaaatattaaaaaaactgaggccccacttaattactcaaactcttaagggcccttacttggccagtttctatttctgtatcacccagttacaacactgttccagaatacagatgaagcctctcaaagaaggtggggtcatccgatatctgtagttttgtttattattatta

SEQ ID NO: 174377 - DNA, 765 bp, Homo sapiens
aacttattcaaatttttgtataaccagctctgcagggaattgttcagaaatctttatccatatttctggtttttttgtaaggagaaattaatagacggggcattatgaggtcaaaggttaggtacatcttcaagacttcctgtcctccagagatgcgtcagttcctcttccactgctgtgtccgggagtgcccccacagaaaagctgtcctgttacctttaaagacttttagcaacttggaccttgcctaaaacatgaggcacactgtaagtagcttttctcttcagggacagcatgaattcaggctacccatggggttggacaggagactgggctctgcatgtagggtgagtagttgtccctataagagaagcttttcagggtgcaggactctgagggctaacaccaggatggtcccagcaagccggaacagttgtccttttaccccaagggcaagccccttacctcccattcagtagaccctccctctgcccctgtgagagagccagggtcaggggctggagctggggctggggaaacccagagaagctcagaaggagccctgccctcctcaggtccaggacgcaggtgagcagagaaacagccatcacccagggggaacttagtctaattccgtccctttccagctgtgtgacctgggcaaactgcaaaagcttccgcttcctctgctgcaaagtaacacaaaaccagcagcctcacagggttgctgcaaagattacacgcggtgttgaatgactgccctta

SEQ ID NO: 174378 - DNA, 160 bp, Homo sapiens
aggagaatcccttgaacccgggaggcggaggttgccgtgagccaccgcactttggcctgggtgacagagcaagactccctctcagaaaaaaaaattaaaaaaatagaaacagccggggagtggagggtgtggtcagaaagcctcagggacctgcttcagc

SEQ ID NO: 174379 - DNA, 605 bp, Homo sapiens
gtatttcaccagggtctttgttagccgggcgaccctgggcaagttacttgactctttgtgtctccgttctcccattagtgaaatggggatagaatgagctgggctgtgtgaagtgttgtaaagtagtaagcagaatggccccaggacactgctgtggtggtggtagtcatggtctgtcccactcccttatctgttggttcaataggaagtggcagagttcatcaaggtcccctgtggcagcacaggtgcccagcgtgctgtgcggtgaggtgaggctccccgctccatggacgtgtgcatacagacggcaacaagttcacgcatgcatacacgtgtatgcgctcagatgcagagacagccatgtgtgggcacatatgtatgtgtacacatgcgtatacacacagcacacacatacacatgtgcatacacctacatacctgtgcacaaacgagcacacatgtacatgcagcctggcagtcatgacaccttgggcgtgacatttggtcgaagtttgttgcaggccagaagctcatctgagtggcggatctgtttgcagccttcctccctcccccagctgtggggagctgaaggctagtcacagaggg

SEQ ID NO: 174380 - DNA, 249 bp, Homo sapiens
cccaatctactacttacttatctcattgtctaccccatgtcctgccacccatttcttgacatatcattctcttatctactcatcaattgccccttgtgttacctttcacccacccagttacctgcctgcccacctgttgatctccatctgtcctctggacaattcattcgtccaccaatttgtctaccatagatcccccatgcccatgggtccacacacacatctttctgcccaaactgccacccaagg

SEQ ID NO: 174381 - DNA, 231 bp, Homo sapiens
tgcagggattacaggcatgagccactgcgcccagcctctggatcttactttatagcttgtgtttcagcaggcctcctctaacattgcttctgtggggaaagtgcggatgctaccttatttttaccaggagggtgtggaagtccaggttttccacttggcctccattgacaccggtgttggcagggctccttcttactgctgggcaggggtgggagtccagtttctctatta

SEQ ID NO: 174382 - DNA, 633 bp, Homo sapiens
gatccttacactcaagagagcattatgacatgttcaaggggagatcttgtcaagatgctggcacggtattggtgtgtcattcacagtgccagtgttgcttccttcccatctcacctcttctgatctttaacagggatgtgtttcataatctggatagcatcactatattttagtgagtattgggaatgtaagggaaccacacacactcatctatattatgtaggaggttaggtgccatctctgtgctatgcaagtgtgatgaagttgggatgagggatgagtactcactcttttctatgtatgatggtatggtagtgagttacacttagtgaaccttaccttgctcatcaataaaattagcatattgctatttacctcacaggagtgttatgagaaatgagcaaaactaaagaaaccatctgatacataatacttcaataaatatatatttggtctcccctctgttttcccttcctcaaaagacttaaacatgaacatcccacagagattatttaaatttgaaacattgggaaaggaaacaaacatactcatatgttatagaacccttggtgacatttctttgtggatgagatacctgagaatggtgggaagtttgggatcaaataatcactt

SEQ ID NO: 174383 - DNA, 221 bp, Homo sapiens
tcacagaggaactaggaaatggaaattcactgaaaagaatatcagtcatgtgaagtcctgtaaccctgttcccagattctaaactcttactggaagggataagggcctctttggccacagccaacacatggggcctgtggttgaccacacccagcacgaaaaaatgtggtaggaaacctacagcctttgctgaaatgtccacagtcaccttccttttcaag

SEQ ID NO: 174384 - DNA, 2007 bp, Homo sapiens
ggttggaagaaagaacgtgtagtagcagagttttgggatgggaaaatcgtgttggttctgccacatgatccaagctttgctatcaaaaaggtagaagatgtccaagaacttgttgataatgaattgggcttccagcaagttgttcctaaatgtccaaacaaaataaaaacttttctttttatatctgatgaaaagagagtagttgggtgtttaattgcagaacccatcaaacaggcatttcgtgtcctgtctgaaccaattggtccagaatccccaagctctacggaatgtcctagggcttggcaatgttcagatgtaccagaacctgcagtctgtgggataagtagaatctgggttttcagactgaagagaagaaagcgcattgcaagacgactggttgataccctcaggaattgcttcatgtttggctgttttctcagcactgatgaaatagcattttctgacccaacaccagatggcaagttatttgcaaccaagtactgcaacacccctaatttcctcgtatataattttaatagttaaagctgatttcagttataaaggagttactatctggataagttcaaagagctccttattataaaatacaaactatttaatatcaaaataaaaaataccgagactcacactcatacacacacacacacacacacacacacacacatatcacagtttggttccttatgagttgaaaagtcaggaataaatttgttgaaaattatctggggattcaaaggaaaaatctttgggtgattccctgattagcactctgaatgtttaattatgaaactttgtagctataactggaaaattacctgactcttgtaagagtattaaatacaaagtgatttttctctagaaatgtgacctggtcttttataaagcccactcttagaccaggattatctaatgccacatcagaagcaaacaggcaaatttaaacttgggcaagtaatttctgtgcccaatttgtaaagggaattcctgaattttttttttttttaatagaggcatgggtctcactgtgttgcccaggctggtctgaaacttttgggctcaagcgatcctcccaaaacgctgggattacagtcatgagccaccgtgcccagcctaattcctgacttctctatacagagtcttcacttgataggcactcgtctgtagtaactcagtttgaatatctttagaaaatgtttagaatttatttgtaacaagatggtaaggaataagattatcccatatgcatttctgtagagcagaatttgatagcttagtgttcaatctttttgaaaataaatgtttacctgtcatcagatttaattaaaattatacttagtaattgcactattacttagttaatttttgtgtatggaaatattggtagtactactttgggaacctgttactgacaattgatgtcattaacaaaatgcctagttggattagatgttttcattttctaattttttgcttgtttaaaatgcaccttacttgttctgagatacctggcaaaagtctttacaaaatgtatggtaatagaaccaaggttagtaaatatacataggctggtggatgagagaccatggaactgtgtaaatacacttaaatgttcacacatttttctagtgtaattcttggatactttaaaaagcaaaacattgttcaaattgttttgattctgaaaaatcattcaactgctaactggcaataagactctaggcaagtcgttttccagattgtaattatatgtagaaactattcatctgcattcattttatttgcctgtaagttaacatgtttccaaaatttaaaagcctgggtccccaaaagaatgtggaagtattaaaatgtatgtaattatgcaaacattttaatgctattttctgcacttatttcttttaaatattttatttaaaatttttaattaacattttgtttgcttaatgcttttgttatgaatcaattaaaattctttattttatacaa

SEQ ID NO: 174385 - DNA, 2389 bp, Homo sapiens
ggttggaagaaagaacgtgtagtagcagagttttgggatgggaaaatcgtgttggttctgccacatgatccaagctttgctatcaaaaaggtagaagatgtccaagaacttgttgataatgaattgggcttccagcaagttgttcctaaatgtccaaacaaaataaaaacttttctttttatatctgatgaaaagagagtagttgggtgtttaattgcagaacccatcaaacaggcatttcgtgtcctgtctgaaccaattggtccagaatccccaagctctacggaatgtcctagggcttggcaatgttcagatgtaccagaacctgcagtctgtgggataagtagaatctgggttttcagactgaagagaagaaagcgcattgcaagacgactggttgataccctcaggaattgcttcatgtttggctgttttctcagcactgatgaaatagcattttctgacccaacaccagatggcaagttatttgcaaccaagtactgcaacacccctaatttcctcgtatataattttaatagttaaagctgatttcagttataaaggagttactatctggataagttcaaagagctccttattataaaatacaaactatttaatatcaaaataaaaaataccgagactcacactcatacacacacacacacacacacacacacacacatatcacagtttggttccttatgagttgaaaagtcaggaataaatttgttgaaaattatctggggattcaaaggaaaaatctttgggtgattccctgattagcactctgaatgtttaattatgaaactttgtagctataactggaaaattacctgactcttgtaagagtattaaatacaaagtgatttttctctagaaatgtgacctggtcttttataaagcccactcttagaccaggattatctaatgccacatcagaagcaaacaggcaaatttaaacttgggcaagtaatttctgtgcccaatttgtaaagggaattcctgaattttttttttttttaatagaggcatgggtctcactgtgttgcccaggctggtctgaaacttttgggctcaagcgatcctcccaaaacgctgggattacagtcatgagccaccgtgcccagcctaattcctgacttctctatacagagtcttcacttgataggcactcgtctgtagtaactcagtttgaatatctttagaaaatgtttagaatttatttgtaacaagatggtaaggaataagattatcccatatgcatttctgtagagcagaatttgatagcttagtgttcaatctttttgaaaataaatgtttacctgtcatcagatttaattaaaattatacttagtaattgcactattacttagttaatttttgtgtatggaaatattggtagtactactttgggaacctgttactgacaattgatgtcattaacaaaatgcctagttggattagatgttttcattttctaattttttgcttgtttaaaatgcaccttacttgttctgagatacctggcaaaagtctttacaaaatgtatggtaatagaaccaaggttagtaaatatacataggctggtggatgagagaccatggaactgtgtaaatacacttaaatgttcacacatttttctagtgtaattcttggatactttaaaaagcaaaacattgttcaaattgttttgattctgaaaaatcattcaactgctaactggcaataagactctaggcaagtcgttttccagattgtaattatatgtagaaactattcatctgcattcattttatttgcctgtaagttaacatgtttccaaaatttaaaagcctgggtccccaaaagaatgtggaagtattaaaatgtatgtaattatgcaaacattttaatgctattttctgcacttatttcttttaaatattttatttaaaatttttaattaacattttgtttgcttaatgcttttgttatgaatcaattaaaattctttattttatacaactaaatctgattttaattattttattatgaaaatagtatatgttaaataaaattcagataatacagaaatagagattgccaaaagaagaggcttcccggccgggcgcggtggctcacgcctgtaatcccagcactttgggaggccgaggcgggtggatcatgaggtcaggagatcgagaccatcctggctaacaaggtgaaaccccgtctctactaaaaatacaaaaaattagccgggcgcggtggcgggcgcctgtagtcccagctactcgggaggctgaggcaggagaatggcgtgaacccgggaggcggagcttgcagtgagccgagattgcgccactgcagtccgcagtccggcctgggcgacagagcgagactccgt

SEQ ID NO: 174386 - DNA, 394 bp, Homo sapiens
tagagttctgatcggactttagggtatgatggggccagaattacacattacagcttgcgagaacagagccctggttggtctggcttcacacctgaaggtgctgggcacacaggcatccaataaatggtgggtgcataaaatatatatatacacacacacacacacacacacacacacacacacaaacacataatccatataccataaaaatcattttatgtgtataattcggtgctttaaaaaaaatacattcacagggttgtgcaaccatcatcattatttaatttcagaacatttttatcacccccaaaagaaacccatactcattagcagtcactctccgttctctgctattctagcccctggcaatcataatctactttctatctccatg

SEQ ID NO: 174387 - DNA, 1683 bp, Homo sapiens
cacttttgttccttctgtctgctttctgatgctaatattatttgaacatagatttttctcagtaatgatttctagttggcttttcctttccttttgtcattactcagggaatgataaagatattattgatttgaaacagtacagtgtagtgttatagacacacctgggttcaggtcctactctcttatttactagctggttggccatggtcaagttacctaatttccctaagcatcagtttccctatctgtacaaattattgagtaataatagtatctcttataggattggtataaagacttaaaaagttaatgtcatgtaaaatgctttagcataatacctgactcagagtaaaggcttaataaaccctagctgatcttactgtcagaatcaataatattactatttgtaatataattaccagacttaacaaatgggagaagtattaaccatctgcaggaataagtaccagagcctgcatcaaaatagtttatattcaacatgaagtctttaaattggcaaaagcactcagtttaatatatacctgttaagaaaattttaagagacagtcatggtttttagctggatactctgggaaaccaaataaagcagataattgtacagtatgataatcaaaaaaaggatgtctttataaatagcttgaaatagttccccagatgcaacttgaataaaggaaataaatagccgacttgctctaacttgaggttagagcagaattccttagtctgattcactggatgctggaaacccctgccccacattttcccactccctcttggttagaaaaatttacattggtttagcattatactcttgaggctattttctttcaaaaaaaaaaaactttaaaaaaatttagatattaagtgtgtaatctttgggcagtttccaggctttaaaaatgggttcaaaatttctgatgggattatttagcagaagttcttagaagtttgtccttgtgactgaaaacagatatttttggttcctgtatttgggtggcaaacaaagtaacagtacagctttaatgtatttgtaacattggccacagtgagtctttgataactgaaggatagtgttttccattgttctctgttatcctcaaagtaaaataaggggaaagtgttcagattcatccttacatgtgttctaggtactgtattgctcatgattaaaattaatttaaattaattggctaattgttcagaattaatccctttctatgagaacaactaaaaagggaacaactacaaaagagtacaactattgagcctactatggttggaaaatacttgaaagtatcatttaaagatggttactttaattagatctccgtactaaacgtgggaggatagctttatattttactttttgaagagcattaagttctggtctgtccatttcctgaaattctgagctatgttattcatctctgttgttggctctataatgtatgtatctgtttgctgctattcataataacaaaggtcttagcgaagacctagcaatcttagggtaataggaagacagaggaatttcatattggaatttttaacttgcagatcacaacttgttagtgttttatgaaatcagtgtagtgggtcaaaaccactatagtttttctaaaaaaaaaaaagtcgagggccgcgaatttagtagtagtag

SEQ ID NO: 174388 - DNA, 633 bp, Homo sapiens
ttatgatccattttaacagctgctttttatgcatttgctcaaatttttagattttaagtttagttttaggttttctgttaatttgctcaactaggagtggtggtcaaatactggacctcattagcatggtagcctgccctccttggcaggctccactggagtgccttggggcctgcctggattccagtcctggctctaccagttttgtgtcctcgccgttactgggagggagtattgaggaaatgcatgcgaggtgcctccgtgattcctggcacggagcaagtgctcagtaattgtcagctgtgagtattagtagtagctaatacactactactattcttggctaacaagccagctcaaagctttgatggttttccattacctgatgatggtgatgatggtttccacttcctgaacactcacacccctgggctaggcacttaacccaaatccaaggtcagcgttattgtttgggggtgggggagacacctcctgctctgactcgtgtgtttgggttcccgtattttcaccagagggtgttagttctgcccaagttcagctggtcctcaaagtgtatatagctctttaaccatcagcaagtgtcagtcagaacataatcttgatttcagctgc

SEQ ID NO: 174389 - DNA, 612 bp, Homo sapiens
ttgggaggccaaagcaggagaatcgcttgagcccaagagttcaagaccagcttgggcaacacagcaaactccgtctctacaaaaaatacaaaaattagctgggtgtggttgcacacgcctgtattcccagctattcaggagcctgaggcggggaggatcgcttgagcccaggagtttgaggctgcagtgagctatgatcatgccattacactccagcctgggtgacagagtgagaccctgtctcaaaacataaaaaataaaaatataagtaccacgaaagtttcattttgtttggagaacattctggaaatgttttcctgacaacagaattacctgactatgcccatattttcttgccatatgaagagctgaaacctcacaaaactgaccgcaacacttgttctgtgccatggtcagcagagcagccacatctcacactgcgtgaccggcaagatcctgttcgatggggcatgaatccctaggcaagtcacctgccaactctggcccatgtgtgtccccatctataaaacggagcagctgacccaggggctgcctccaagttctaagacatctttcagtcctgcttatctcctggggatcctctaggccaaa

SEQ ID NO: 174390 - DNA, 366 bp, Homo sapiens
ggaaaatgtatagggactattttacttatagtagacacatttaatttggaaatatagaacaatattaaaaatgagtctctcttttgaccatacagttaaatatatcctaagaaaacagataagcaaaaaagactcaaagaaattatgtttttatttacaatagtaaaaaactggaagtagctattggaagtagtgtatatattacatataaaataaaaaattatatatatgctaaaatattaactccagttatctttcagttatgagattacaaagtacattgaacagttagggtggggcagaaacaaatcacaatggtggaatgtcatcagttaaggctatttttacttcttgtgtggatcttca

SEQ ID NO: 174391 - DNA, 656 bp, Homo sapiens
caggagactgagatgagtttagcagagtggtgatggtggggataatggggatgatgatgtgggaggcaatgatcatagtggaggttggtgtgatgatgattgtggttggggtatgagaagaagccagctttgtaaagggtgccttctgtaaagggtgacttctaggaagaatacaggggttgctgagaaagaatttttttttcactcttctgctcccaccttctactctctataaagtcttgtccttttgacatttcaacttcctgattacctagctgctcaaatttggaaactgaagttgttctagaagtaattgtctaagagttgctgggagatttgagggaaggttttcgctagtctgtctggatttggtgagattttgttaatctggtctctttcagaaagctccctacttttctgtagtaagtttctcttccaagagaagctcaggaagttaaacaggagggatgaaaggaggacagagacagtcagagcacaagaggaccagtccttcttcatgtagcctatagggcatcttttacccagtcataccacatgaagagttaccgttctttgtttcatgaggaaaaaaggagcatttgctcttgttttaaagaaaaaggtgatgtattagctgcacagaaattcttcctggt

SEQ ID NO: 174392 - DNA, 211 bp, Homo sapiens
tgacacaattgagtggccacgacagtctgtatggcctgcagagcctaagatatttgctctctggccctttacagaaaaagtgccttgacctgtgctctagagccatatgtaccaggtttgaaactcagcctcacagctgggtgtgatggcacgcatctgtagtcccagctactctggaggctgaggtgagaggatcacttgagtccagaag

SEQ ID NO: 174393 - DNA, 133 bp, Homo sapiens
gcttggcccttactcaaactgaacatttagcttgtatttgtcttactcgttgttgtgcttgtaccttgtccattaaattaccagactcacatttagataatgtgctttcttatagttgaaaatgatgaaaact

SEQ ID NO: 174394 - DNA, 374 bp, Homo sapiens
gtattgtcctgtttctaaatatctcctagctaaagcctttaccacttgttagcaccagagggaagggaaagaaaagacaagaaggggccaggtgtggtggctcacgcctgtaatcccagcactttgggaggctgaggtaggcggatcacgaggtcaagagatcgagaccattctggccaacatgttgaaaccccatctctactaaaagtacaaaaattagctgggtgtggtggtgcgcgcctgtactcccagctactcgggaggctgaggcaggagaatggcttgaacccgggaggcagaggttgcagtgagccgagatcacaccactgcactccagcctggcgacagagcgagactccatctcaaaaaaaaaa

SEQ ID NO: 174395 - DNA, 542 bp, Homo sapiens
ctccctctcctttctaaacccaagtcctgtcatcccacttttatggcatctgtcccttcatcttcactcccctggccagcacccaaccttggcctaggctagtttgatattctttatactgctatcactgtcctcggtttctccctcactctattccatgctacacatccctgcagattaatttttctcaaacacaactttgatgtctccttctgttcaaaacattcggggcctccccaataactgctaaataaaaaaaccagattccttggttggcatttgggctctccatgatgtagctataaccattttctgcttctgatccatctgtctcacccaaaatagactattcagggttgtaccagaatggttctctgctggcctgcctctatctttgggacaactactaaaagaactaccatcacctttgcagttccctcttcctaaaaggcccttccaggaccacgaattcttgagggtaggataaatcccagcaccttcctgaagacttcactgctgcctcttatgtaaatctcccagcc

SEQ ID NO: 174396 - DNA, 337 bp, Homo sapiens
ttcctgactcatttcctcattctcttactggcatttcctgcaatctcttcccaaataaactactagtactcaaattcttgttccagggttggaggcactccacccaagacatatgcctacacagcagaattagttcatcaaaccaagtctttgtctcaccctcagactgtttctgaagccagacagacggggctgaacacctcagaatttccctgagtgcctcaaacggcatcttttctaaaaaacctctttatttcactgcttgagaacgactttctcttacttccatctccctcccgccacctctctctgcagtcttttcactgatggaagccac

SEQ ID NO: 174397 - DNA, 381 bp, Homo sapiens
ttcctgactcatttcctcattctcttactggcatttcctgcaatctcttcccaaataaactactagtactcaaattcttgttccagggttggaggcactccacccaagacatatgcctacacagcagaattagttcatcaaaccaagtctttgtctcaccctcagactgtttctgaagccagacagacggggctgaacacctcagaatttccctgagtgcctcaaacggcatcttttctaaaaaacctctttatttcactgcttgcttcctgcttctgcccaccctccaatggccattgttatggacacacgcctgagaaatgtgagcaccattcttgatggacccagaacacacaactgtacatccacaagattctggca

SEQ ID NO: 174398 - DNA, 505 bp, Homo sapiens
aacggtgatcaatcactttttaaaaatcattttagaagtttcttcacatccacggacattttcttctacttctacctcctcctcataattatatctttctttcttctcttcttctccttcccggccctccggccttctcttcaagaaatatttggagtgttcactgtgccaggtacaatgtaacatctcctgcagcagataccagcgcttacatctgccgccccctaccaccccgcctcccatttactgatgagtcatttttaagactcctgagaaaatagacccaaaaagtattcactacgtgttcctttccctcagagctgttatcaattaaggtagaagaataaatttctgattctgtcctattggtgaaagtggtataagattatatggaagaaagtaaatgttatatttcacttattcaacaggtttcgttgagccctactgagtgtcaggtgctgcagaggtgcagagctagggccagtaagataacacagtcctggtc

SEQ ID NO: 174399 - DNA, 712 bp, Homo sapiens
aaggctaggtgcgaggctgggtggcggcagtggtttaccctgtgacctcacttctctgtgagagacctaagaggagttgttgctttttcagtgttcagcttttgacttgttaggatggagtgatgacttctagctccaggcatgccagaccagaaactgagaatgccccatttgttttaagtatatgtaccatctctaatattctaagagcttatatctacaaggaagaaaagctgatatgtatcagacatagcatttagtaaagctctgattgtttaatacttttcagagatccccagattattgtccatcctgttaatgtgaaattaagtgggatagaattatttgacaggagccgggcatggtggctcgatcttgtggtcccacttactaaggaggctaaggcagaaggatcacttgagcccaggagatggaggctgcagtgagctatgattgcacctctgcactccagcctgggcaacagagtgagaacacatctctgaaaaataaaaattatttgacaggccaggcacggtggctcacgcctgtaatcccagcactttgggaggccgaagtgagtggatcatctgaggtcaggagttcaagaccagcctgaccaacatggtgaaaccccatctctgctaaaaatacaaaaaattagccgagcgtggtggtgcatgcttgtaatcccagctacttgggaggctcaaaa

SEQ ID NO: 174400 - DNA, 334 bp, Homo sapiens
catcagtgaatggcttgtgtttttacatttgtttgcattaaaaatgtttttataacttaaatatttgtttcttgtgtcttattcgaagaaccattttttataccaaagtcatacaggttttttttctatttcttattgaattttaggtggatatcagcctttgcttgctatatcctagcagtttttaaagtgatggatggactctttcaaagtgtctgcaagactaaaattatttttataatgatattaagatgtcatttgccctttcccccatatatgtagaattgggtctttttcaacttttattttagattcacgggtacctgtgcaggtt

SEQ ID NO: 174401 - DNA, 379 bp, Homo sapiens
gaatgggggttcaagggctcgggtcggggtaaggggattggtgtgtcatggggacagattgtcaggtttggaacatgaagaagctctggagatgggtgatggtgatggctgcacaaccacatgaatgcgcttaatgccactgaactggacacttaaaatggtcaaaatggtaaatgttgtgttctctgtattttaacacaataagaagaatgggggaaagtgaagagctagccactgagacaaccaatcacaacacggcaagggctcggcatgccaggactcggtgcccactgatcacaaggctgggaccagttcctctgaagcacaggggtagctctggctgagctttagaaggaaaatcacgttgtctttgcaaagg

SEQ ID NO: 174402 - DNA, 334 bp, Homo sapiens
ctccagtcctgagagtcaaagatctgggatctaggaagcatggaaccttgtgctggttatgaacaaatttgtccttgcattgaaagaccctaagcatattttcttcatgctaaataatgtgttatctacaacttcctggcctcggctagacctggacaagcctaggtgctcaggccccttgtcccacttgcctaatctccagcccagggccattgtcacagtggatcccaaagaggagggaaagtccttctaccaaaaggaaagtctattgaaaatgctgtgaaggacaagagaagttctccagggaattgcagctttgatgcatcctgtgtgg

SEQ ID NO: 174403 - DNA, 154 bp, Homo sapiens
atctggggacggagcaggaagactgttacttacgtcgcctgagggaaacccaccgtccaatcccccactgctgagacaggtctggatttcggacccaaggtgatgttcccttcttgattctcaacccataggctctggaactcctagagctaaa

SEQ ID NO: 174404 - DNA, 533 bp, Homo sapiens
gcgctctcgaggatttcaactacagcagcatccaaggaagagtgcaccaggagatttctctcagctccaggcatccacctgctccctcgagaggctacactttgtacctcaggcagtcctgtgggagaaaatgacccaggagctgatattcattaggcactctagcagacatagtcatggtgggtatcatggtttattcccagacagtactgaaacccaggaccaggaaaaatctgaagggtagccgaggacacatcaccccataaagtttccaaggggaaactgtgaccccccaaaattctgataagatctctgtgcctatggaagataaaaggaaaagaggcgcagagattttttacaatagtgtccagggattactctttgctttcttcttactgaaaatttttacaaacggaaaacaaatcttttaaaaagtaccatccaatgatttctcaaaaaatgattaattaaaatatagtatcaaaaatgtacactagggccgggcgcggtggctgacgcctgtaatcccaaca

SEQ ID NO: 174405 - DNA, 212 bp, Homo sapiens
tggctgtgactgcaactcccctgccttaaaaatgtaaatttaatgatcactttcaaactgtccctgtagtacattatttatgaacataggaccttgcctccctgaatagcaccaagcgcccatggctcagacactcatcagtggggccgtgccccacccactgcctggatttcctccctcctcctccttctccatctctccactctctttct

SEQ ID NO: 174406 - DNA, 181 bp, Homo sapiens
aagtacgcgagactctgtctccaaaaataaaaataaaataaaataaaatctgaccatatttttaaagagatatcattgaccatttcgactgaatactagtttttatggaacttttatgatactataaaactttaagatattttattactcatcaactactagtaacaacatttgttgaaca

SEQ ID NO: 174407 - DNA, 105 bp, Homo sapiens
ctagcaataccaagttgctcaccaaccatggcacttctacaactaaatcaaaataaatagaaaaaagtgtatatttttaaacaaagggggggatttagaatgttc

SEQ ID NO: 174408 - DNA, 224 bp, Homo sapiens
cctccacgcgcacgggccctggccccctccgctttaagcacacgcctctgccccattgctctgcagccagcttgggggcaggagtcctggactctcagatcctcctctcccctcctcttagccacaaaagaggggggagactggaggcacccctgcagcaggggcacttccctagggctccagaggggtgaatgggcctttgctcagctccaggcccagcggga

SEQ ID NO: 174409 - DNA, 595 bp, Homo sapiens
taatgcaagagcaaaccctaaagccagaagctgggtttgggcctggccccatccccatccccatctcatcaggcatcacagatttaaggagtagggctgtgggtccctggtgctctctgagcccttaagtctctggtggggcttatctctgtgtctctctttctctcccacacagatacagacacacacagccacacacacaccagagctacctcagaatggtgccttcagcatagagcctttaatcccacatgggtccagggccccactggctcactgtctctgaccgtctgtgccacctttatgggaaagagagtcagatcggttcatgtatctctgtgcctcagcttcctcttctgcaaaataggaatgctaatggtatttctatcccggaatgtctgtgaaggtgccatgggttagacagtgtgctcaactcattcaaactcaggcaagtgtacccctgcgcctgatagagaatgagtgctcaaaatggggtgtgactactgtccttcctattgtacagcgtccctggtataaggagttacgtgaacaaacgttttcagagccacctcaaagagaacacaaccagcataga

SEQ ID NO: 174410 - DNA, 287 bp, Homo sapiens
aggcgagctgcgccctgggccaggaaggtttgctgctgagttccccaaattggattccttccacagccccgagatataactcagtttgcggagcgaaatgagggaaagttagagaaaggaagggaaaggctgagcccggcggtgtctccctagcccagcaaaaccctctccatgtggcagaactccctcctctctgcttccttctggggagatctcgaggtcatttttgcgccttaggaggagcagaacttagtttctccttggcaacaggagtcttctacttcccg

SEQ ID NO: 174411 - DNA, 293 bp, Homo sapiens
ggcatcctcatcgccctctggactgcttggagcccgcccacctgtgcttttaactcatacctgagaaacacggctggtgttttacttagatttttaaatttaaaatgtctaatggaagataaagacttaccttccccaggctaacgcttaaagaatctcaattaactcaaaactaatgtcagagggaatggatgtgataagagaatcttacattacatctaacaaaaaaagtaacaaacatgcaataaaatggacatttggatcagtaagcaatcttcatactgtgttcgctc

SEQ ID NO: 174412 - DNA, 567 bp, Homo sapiens
ggaaaacacaggatccagacaaaaggggaataaaacacagaagagaatccctaagaaagtcataaaggataaagaaagtgccaagatgatggctgtgcagcagcccagattagaacaagagagcagagggctccaaaaaaaagatagtattgatagaatgcctgacaagtttgaacaaaatgagaggagatttacacttctggtggagagcctggggaatgagactggtgatgggtataaagataaaaacaaaaaaccaaagtgagcccacttatcaactccaggagaagcaaaacgttttataagaaatgtaatcacccaataggacccagtagtgaacaatgtttacatagtcacaagaacaaacgcattaaatactgatctaacgaaaagttatgataacactggctaggaggatgggtggaatggaagtgggaggtggggggtagacagcgatgtgtaagaaagctcaatcctcaccttccacactaggaactcaggattctaaaactgaaaaagaaaaatcaagaaacagctatatataggatttcttgaaaacacttgaaa

SEQ ID NO: 174413 - DNA, 659 bp, Homo sapiens
tcctgtgggggctccaaactggcaccccaagcagaacgagctctggtgctggagctagccaagcagcaaatcctggatgggttgcacctgaccagtcgtcccagaataactcatcctccaccccaggcagcgctgaccagagccctccggagactacagccagggagtgtggctccagggaatggggaggaggtcatcagctttgctactgtcacagactccacttcagcctacagctccctgctcacttttcacctgtccactcctcggtcccaccacctgtaccatgcccgcctgtggctgcacgtgctccccacccttcctggcactctttgcttgaggatcttccgatggggaccaaggaggaggcgccaagggtcccgcactctcctggctgagcaccacatcaccaacctgggctggcataccttaactctgccctctagtggcttgaggggtgagaagtctggtgtcctgaaactgcaactagactgcagacccctagaaggcaacagcacagttactggacaaccgaggcggctcttggacacagcaggacaccagcagcccttcctagagcttaagatccgagccaatgagcctggagcaggccgggccaggaggaggacccccacctgtgagcctgcgacccccttatg

SEQ ID NO: 174414 - DNA, 485 bp, Homo sapiens
ctgtcgcctggaataagccccttccgctcttcgggctccggtttccccacctcgggtgcagcaacgcgcctggctcccgggagagctctcgtccgagtgggctggacggagcgcggtttacccactgaggatttggtttctcacactccttagcgaggctcgcctggaaagcgggctggccgggacacagccggcgagggcgccaggtcgcaggtcttcgcgggaccccgccgcccccccagctcccgcccaccgcatctgggctgctggcgcggcccctggcggctcggggggccgggtcttgcgcggtccttgcacttcctgcctctcccttccccaagtgtgaagacgccgggagtggagcggggagcaggagcttcttttcccggccatgggttaactctccccgccccgccgggccggcctccgacgagcctctggcctgcgtccagactcttgtttggcggcgacctgccgggcggccg

SEQ ID NO: 174415 - DNA, 880 bp, Homo sapiens
atcatcatcatcatcatcatcatctacaatgtcatttcccaccgtgcccagctgagatctgatggttttatacatgtttgacagttgctccttcacatgttcccactctctgtgcggccaccatggaagtcggacctgcccttctgccatgattgtaagtttcctgaaggacttccccctctgccatgattctaagtttcctgaggcctccccagccatgtgaaactgagtcagttaaacctctttcctttaaaaattacccaacctgaggtatttctttatatcagtgtgaaaacagactgctatactttctgataatcatgcttaagcaattggggaattcagactagctgggatcaaactatggccccacccttagcagtcatgtgaccttggggaggttgcttaccttctccgtctcaacaacttctgcaaaatctgtaacatgagattgtttctgagggttaaatgagcatagcacagtggggacactgtcaggcacacactacttgccagatgtcgagtattcatctttattgaaataggactgtggtaagccactttatggctctcgattttgtatgagaaaatcatgcttagtgccttgttagtaaaagaaagaaaacctgaaagtccctgccacggaaggaagaaatagcggggagaaaagggagttggtaagtttcagcatttcagagcttggaggggcaagttaggtttctattttatggagaaggaggtggaggcaggatgggtcctaaggtgtcattcaaaacacacagccataactctttattgagagtagagctagggccccagggattgctgtggtcaagttgcggacaaaaatgaccactcgttggaagacaggagaggagtg

SEQ ID NO: 174416 - DNA, 425 bp, Homo sapiens
aaatgggagtttttctcaatataaggttgactatgccttcttatattttgccttcttaaattttcatatctttggctcatggactgtggtgtaaagaaaccttcaattttcctataacattgtgctgctactcctgttccagcttaaaatcatttaaatacgttacttttgatatgtcgcattgtgaactcctaggttaggaatgtctaggggtaagttgatgcaaaatgaggataatcattaattattaaatttctaagatgttctttttatataccaaagctgtgttttagaaggatgactttgagtagtgtggattgaagtaggggagaggccagatacagaggacctaggctggagccagcttatctgggttcaaactttggctgtgccatttgccatgatcatgatgttgggcaagtttt

SEQ ID NO: 174417 - DNA, 595 bp, Homo sapiens
tatgagtgtatttccttatgctttcaaaaaacaatgaaaggataaaccacaaacttataactgtatttacttatagggagaaggaaggaacagagtagaggggacaggaatgaaagttaagatttacctgaatgttcctttttaatagtttagaaccatgtaagtgttttgtataattatgaaagaaaattagaacaaaaggaaaaaacaaagcaatccttagcaattaaaaaaaaatgagcctaactgtattaagttcatggcataatcacacaagtttttttattcttttttgagacacggtcttgctctgttgtccaggctagagtgcagtggcacaatcacagttcactgcagccttgacctccctggcccaaacaatcctccaaactcagccttccaagtagctgagaccacaggcatattgccaccaagcctggctaattttttaatttttgtagagatgaggtctccctatgttgttcaagctgttctcctgggctcaagcgatcctcctgcattggcctcccaaagtgctggtattacaggcatgagccactgttcccagcccacacaaatttttttcagtatctat

SEQ ID NO: 174418 - DNA, 581 bp, Homo sapiens
gtcagctatcctccagccctgacaccatgagatttaatccccgctctctgatccttgaggaaatgaagagacactgcccacagatattgtggagactgagtttgaggaatttcatcctaagagaccacgcaatgccaagcctccccaagctcttgtggaaggtggaggaggggagatttgcagacagaagcaaagcaaaagtggaagcatttggggacatccttaggtcaaggccagttggggtggatggggtaaggcaaccacagtgaacttatgaagggggctttggcccgagttcaccgactagaaaattgcagagctgagcgtgatgtggcctgaagccatggtcgtgtggctttgtttagtcaattgaattagtgaaccactaaaatgccttttctttgatttgttaaaaaacaaagggtagcaaatacatcactattgttatgagaggccgacttaggcatttggaagagcagtgcagtcacagcccatggtgtcacatcagttgtgatgggatttcttgatggatgagatgtgtcgtgtgacagagaaaatgcaagctccaaaatgattggccg

SEQ ID NO: 174419 - DNA, 323 bp, Homo sapiens
cccaattgctggccaatttagggagtagtggagagaagtagactgaaaaagagataataggagccagaaaggggacgaaaagatgaaaggaatgtctggaatgatagatacacagtactgaagagctaaagattgaagagaaagctaaggtgggaaaacactttcgaagggcagatcaggttttgcagtaactattagtggctgtgagttttaggcgctttttgtagtgttgattagttgatgttcttcctctgctctgttactgaaacctttagcattgctgatatatatgtacaaatatattgtgagttggtgaacatgtc

SEQ ID NO: 174420 - DNA, 288 bp, Homo sapiens
cgattgagcgctggaggttgaggctacagtgagccttgatagcgtcactacactccggcctgagtgacagaaggagacctggtctcaaataaaatacataacgtatataaaactccagctcctggctcttacagtcaatacagggtcattgattttattaaaaatctattctgttttgtctttggagagtctgagatcaaagaaagagtattggtttcttcagcatcacacaatatccccttgtaataaacctgcacatgtactccctgaacctaaaataaaaattga

SEQ ID NO: 174421 - DNA, 765 bp, Homo sapiens
  misc_feature (35)..(35): n is a, c, g, or t
  misc_feature (55)..(55): n is a, c, g, or t
  misc_feature (94)..(94): n is a, c, g, or t
  misc_feature (120)..(120): n is a, c, g, or t
  misc_feature (161)..(161): n is a, c, g, or t
  misc_feature (198)..(198): n is a, c, g, or t
  misc_feature (565)..(565): n is a, c, g, or t
  misc_feature (618)..(618): n is a, c, g, or t
  misc_feature (631)..(631): n is a, c, g, or t
tagccataaatgatctgtacagacataaaacaggnctgaatgggtcatatgacantttggatatattaggtccctacagagatggtagggaaantggtgccaaactgcccagatgcgtancactaatcattgaatgccagagagactacgtgggccagagnatgtggaacaatggttacatgccctctactaggtgtnacacactacacacatgccacacctgtgccatcaaaccctggtcacctactggacaatatccacaaagtagatttcattcaagacagacctaggggaccagctcaggttcagaaatgccccagaggtgtttttacttgttgagatgttgaattcatatgtccagaatgcagatgcagtagagtgctgcttaggatgactttcaagagtctggcactgtcagaggcaaatcccataaaatatcccattattggaagaaactaaaagtgtatcagtgtggctcatttttcacaagtctctcttagactaagcttgtacatattcattcagagacaattatgagcatcctttgaaatgtttaaagacccangatttctgaaatttggaagacactgcactggggataagaattaatatataggnactctagactagnaaactcaaaatcctagacttggaagcaacattagaggtcattagtccaaactgccactcaaagctggaatcctctttgctacattctttggcagatggtcacccagcctctgcttgaacatttccagaagtctt

SEQ ID NO: 174422 - DNA, 150 bp, Homo sapiens
aacttatattttgactcggggggtgcatgtgtgggtttgttacctgggtatatcatgtgatgccaaggtttggagtatgactgatcctgtcacccaggtggtgagcatagcacacaatagttacttttttaacccttattcccctctctc

SEQ ID NO: 174423 - DNA, 579 bp, Homo sapiens
ttgcatgtgggctacgggaaggaggacaactactgtcttcaaggagcaggtcttggctggtggaggaaatctgttttggacacgtgaggtctgaaatcccagacttcccagtggaggagtctggggttcaagggagaaggctggaggcaggcaccaggagtcatcaaatgggaccagctgaggacacggggagaagggcagacagagagaggttcaagggcacagcaccgctcagaggtcagggagttaaggtggagccagcagagatgagtaagagatcagagaagcaggggccgggcgcggcggctcccgcctgtaaccccagcactttgggaggccgaggcaggtggatcacctgaggtaggagttgcagaccagcccggccaacatggtgaaaccccgtctctactaaaaacacaaaaattagctgggcgtggtggagcacacctgtagtactcggaaggttgaggcaggagaatcgctagaacccaggagggtggaggttgcagtgagccaagatggcaccactgcactccagcctgggtgacagggcaagactgtctcaaaaaaataaaaaat

SEQ ID NO: 174424 - DNA, 695 bp, Homo sapiens
  misc_feature (14)..(14): n is a, c, g, or t
tgttctagaggacncgcttggatgcggctattgcttcaccttgttacttttctgttatggagacagcttcttttcttatattttatgaaccaacctctggtagcttcacttttcttctgcagcttcctcacttctctcggctttacagaattgaagagcgttggagccttatctgaaataggctttggcctaagtgtgcctggttggatcttttatacagaccactaaaactttcttcaaatcaacagtataaagccgttttacttcttatcagtcatttgctcactggagtaatcgtttacttttaatttcctttaagaactttgcatttgccttcacaacttggctaaatgtttggcacaagaagcccagcttttggcctgtatcagcttttgatatatcatcttcactaagcttaatcatttctagctttttatttaaagtgagagacatgcaacttttcctttctcttgaacccttagaggccactgtagggctgtaattggtctcatttcaatattgttgtgtttcaggaaatagatagacagggtaaaggcccctcccaaggagatggggagagacaggaatggccagtttgtagcacagtcagacatttattaagttcactgtcttaaatgggtgtggtttgtggtgccccaagacaattacaatagtaataccaaagatcactgatg

SEQ ID NO: 174425 - DNA, 197 bp, Homo sapiens
agccacatgaagaaacagtttttatgtactttaaaaatacaaagttctatatttgcaacattcaaaataaaatgttataggtgaagcctttccaccttcctatttaaaattgcatctactagatgaatatagtggggtgcacttgtagccctagctactggggagaccaaaagggtgagatcccattccccccccca

SEQ ID NO: 174426 - DNA, 443 bp, Homo sapiens
aagcccagcagctcctctcctcccaccactgactcagaagggacgaccacgttctcattcctgcccccagctaccccatggactagggggaggaggaagaaatggcttcaacaactagagcgcaggtggaatttaaaagccaccctttttctatggcaaatgtttctaccataagaaaaagtacgtcccagttattgtggccctgcatagacaaacgtttagcaagtccttgtcatgtgaacagagagggacccagcacagactggcctctgaggcatccgtccaagaggaaaggtctaggataggggaggccttggaggggtcaggccccgcaccgtatcaccccagcagcagggtggccacgggccagcgcccctggacagtccaggtttaggcctgccgtccctgcaagatctgtgatcactgtctgcccttcattctca

SEQ ID NO: 174427 - DNA, 768 bp, Homo sapiens
attctgattctattcaaaatacttagaatagctactattaatcaaatcctgacagacacagtcattagccattatttaagcattgatggaaaaaactatttttaatattcaactaaagtttgcttccttagattcaagaagcaaatgaagcccatgtaaaataaataaatctatacctgcatcttttttatgtaaaatttactttactttaggcaagggcacaaaaaaagccctgaatcaatgaggaaaagcaggtgtgtgtgtgtgtctacacatgtgcaggaaatgaataatacaaaacatactggacatcttattttgatctgctcaatatcttctccactgcttttactaaaagaatcccaatttttttcttgcagtattactcctccccataatagtgtctcagtagatttatgaataaacgtgtctctcaagtgatccaaattttcaattgtcttaaatagttggagttatgttactgacaacagtactgcagagacttcttgctacgtcaataattggaagggtactagtccttgcccataaaacctggtagttcatgcttttgattttatgaccacactttctgttgcttacaattaagggacacctcataatatgctcagtttgtgaaaagtgagtatatttataagcccaggagtccctcaaaaaaacaaaagaatattatatctcacaaaagaatcaaagtagtacatgcagtctggatagactacagacaacactaacttaaggaaacctgtaatt

SEQ ID NO: 174428 - DNA, 351 bp, Homo sapiens
atatttggggtacacttggctaagtaaaatgctattaaaatattttcacctgttcctttttattttttttataatgtgtacacttgaaaatttaaaatgactccatgtctcacattatgtttctattggctctaggctctagtctagactttatgatacaggtgaccagaagtcagagaagatctccaaacagggctgtaacagaattaaaggagtattttaaaaaagtaatcagtacacagaatatgtcccatggaaatacgtacataagtttgcaaatgcaaacatgaaaacgtatgtgtggcagcactgttggaaatgacaccaagatccatgtccagttcaataata

SEQ ID NO: 174429 - DNA, 683 bp, Homo sapiens
caaacagtagatgtgccttaaagtgaaataacaaaacacaagggaagaaaaggactattgtttgaaaagagacagacacaaatacacagaagagggttctttcactttaatagagagccaggtgctcatatcagcctacaaacagattctggagattttttatatatatatatagtgaaggggagtctgtgaaggctgtagaactaatggaagaataaatggtccagataccaccagatgtcacctttactagccccttcctttgtactcaggagctcagccttcctctgcccagtgctgccaaagctgggctgtcactcatctccattttgcattttggccgtcatgtctttcaagatcctgccgtgatgagtggaattgtacagggctagcagggggatcctggcatgatgagagagccttcctgggagcccagtacagattggatcatgccatcttctcaaaagggcagcctggcagcagagcatctcagccaagagaaaagtaagctcctccaaccctggcatcttctgtccctgtgccaagcccaaggtcaacttcatttccaatgtctaagaacttcgagacttttagtctgggaggttttttattattattatttatttatttatttttattgtatacctattactccccattctcgcccctccccccacaaccac

SEQ ID NO: 174430 - DNA, 868 bp, Homo sapiens
cagcttggctaactgcaatacggaaaataagacaatgttggctggctcaaaataaaatgacataggcaagaaaagattcaatcacttaaatgtttactgagcacccactacgagtcaaacactgttctaggtactaggaatagggacgtgaacaaaaaaaggtcccaccatcatagaactaaacttctattgggggaagcagaccatgaactctgaataaataatatcagtcagtgtaaatgccctggagaaaacaaaaagcagaataaacagagaaagcatgacattgggaaggagacagggatgcaactttaggaggaaagacatctctgagtatgtgacactgaacaaagacttgaatcaaacacaacagtaaactgcaaaaatgcggcaaagtgtgctacacggcacagccaagtgcaagaccagagaggcagcagaataggatgacagatccaagaatgaatactcagctgattatgggacaaaccccagtatatcatcatttccaactaaaggggcaaaagatgtttaaggctcaaggagaatggatttggagggaatgaaaggaagaaactttcatcattacaatctgtggcatgcccggagtcccccagaaacataaaacatgagacagaaaaccttgtgaaaagaattatctttaaaaaaaaactttcctacccacagctcaactgaaagattgcagacacaggctggttgacacatacttctctcagctgccacagaagggattcttgccttagataaagaagatggcctttggaagccctcataacctgagctctgtgagtcatatgtctatcaattctttttcttttttttgagacaagagtctcgctttgtcacc

SEQ ID NO: 174431 - DNA, 610 bp, Homo sapiens
ctatccccagctgatgaatagaggggatgagtgatacacgaatgagtgaatgaatgaatggtaatggtgatgggaatcaaatggcagcaacgcggaagagggagatgcggtgcctgtaaccatggtaacgatgatgtcgctgagtgataatgctaggaagatggtaaccatggtaacactgatggtgaggcctgctcggacagtcctggcgcctcagctgccgtggtccatgccaagcccgacctgctcagtggccgaacaagatgctaagcacaattagcaattgctgttctgttccctgtcccaagacccccgcccagggctgagtttcacggtagtcaaaccctcttcctgagtggctccaagactcaggaaagaacacatgtttggggggcgggaggggtggcgtgcagcttgcatgcatgtgtatgtgcgtgcgcggaagaggctgtgtgatgggcaagtgggtaaggtgtggtgtgcgctaagggcagtcctgctggtgctagcgccaggggactgggaagaggaacggttcccttcgtgcgcgccgggctgatgcgtggggggcgccgcgtgagtgcgccggtggctgggagtccggcggccg

SEQ ID NO: 174432 - DNA, 933 bp, Homo sapiens
  misc_feature (24)..(24): n is a, c, g, or t
  misc_feature (253)..(253): n is a, c, g, or t
  misc_feature (261)..(261): n is a, c, g, or t
gctccggccgcaaggtgagcaggnagccctgccagctgggccacccgaggggcgttgcggggctccgggcggggtcgacccggggggctccgtcgggccccaccagccttgcgcctttttcgctcggtctccttggcctcccgctcctgcgacgccgctttccttttctcttgctcccgagctcggacctcggccaggggccccgcccgccagttggtcgcctcctgcagcaccctggaggcccagggccggnggggcggnggctgtggggatcccgggcgcggccaacctgggacaatgagcaggaacccagggtcttgctgtgttgctgagctggtcttgaactcctggcctcccgcctcagtctcccaaagtgctgggattacagggaatgtgacttcactggacgcagtataaagatcttcagatgtcctcctgccggggattgcagggatcacagaaagaccatcgaggtccaggagctacctgcaagcggagatccctctggacgccccgtgcctcacccagcaaagccggctcacaaccctgcgctctcaaacctctaaaagggcttgaggtgccaataggaaaggaggcccgagattgccacggcatacgtgggccccaaggagggagccaggagtcactgcctgcttgggctaagggtaccgcgtacggaaaggcggcggggacgcggcccagttccaggagatgcgcccaacgaagaagcggaggaacagggtcacgggatagggcagacacccggctgctttttgtttgctagacaccagcgccagcccctgcccggccctcccggtctcctaagggttgggggggtgtcttaggctccacagcgcccccgaccgccctcctgcactcctcaccgtctccattgcaagaggcgcccggcttggtttcctcgctttaggaaac

SEQ ID NO: 174433 - DNA, 706 bp, Homo sapiens
gggaaaatcacacactgaggcctgttgggggcgggggacaaggggagggagagcatttggacaaatacctaataaatgcagggcttaaagcctaaatgatgggcggataggtgcaggaaaccaccatggcacatgtatacctatgtaacaaagatgcatattctacacgtgtatcccagaagttaatgtaaaattttaaaaaaatcaccactagattggacatacaaaaaatgcttaaatgaattgtaaacatgaaaacaaatggaagatactcactgtcagacaaagacacataagtacaaagttcacagatcacacaaagcaattacacaatggaaactccaaaataactaacactattgtaataggaagaaaacctcacatatcaatattaatcttgcatgtaaatggcataaatactccacttaaaggatacagagtcacaaaataagacccaaccatctgcagtctacaagagacccacctactggccaaaggcacaatgagactcaaagtaaaacggtggaaaaagatacaccatgcaaatgaaaaacaaaagcaagcaggaataaccactttcatatcagataaaacagactttagatcaacaatggtactaaaatataaataaggtcattatatattaagaaaagctccaataaaagaagatttatttatttaaattatatatgcaacagacactgga

SEQ ID NO: 174434 - DNA, 325 bp, Homo sapiens
accacagttacgtaaccaacagctcagcatctttctttacagctgttgaactgctaggtaaaaagtagtggtgcaaaagtaattgcggtttttgctattgaatataatggtgaaaaccgcgattacttttgctccaacctaactagaaaatagcattctatattatagatgaaaactcacatgtccatccatgaaaatgggccttatctagttgaaatccaaactccactcctatggagctggggggttatgagggctgaggggcctgagtgagacagcctcgggatggcctagggtttatgaaggagccatagaataatatgtt

SEQ ID NO: 174435 - DNA, 325 bp, Homo sapiens
taatattgcagttttctatagtgttaattccacaaaaggagaaaattctaaaatccccaagatccaacaataacatatgaaaatcatgttaaataatttttgaggatttaacactgatactatgacccatcacagtgcatctctaagtcaatcaagtttagtatataccatttagaagactaatgcacagtcttctaaagtagggaactatggccctacacctaattttatcatgaaaatgctctggttcatccccatttttagacacttagacagacacacattcacaaagaatgtgacccaaatctcaaatcctttgtactgt

SEQ ID NO: 174436 - DNA, 460 bp, Homo sapiens
ggatagcattaggagatatacctaatgttaaatgacgagttactgggtgcagcacaccaacaaggcacatgtatacatatgtaacaaacctgcatgttgtgcacatgtaccctaaaacttaaagtataatttaaaaaaaaatgccttaccatgacccacagagcctaccctcgactggcttctgcctgcttctttaacttcatttcatctcacctcttttttattgactatactctggctgttctgaactcctttctgctcctccagcacaagcttaggccatttcacttgctgttcttagtacctggggtactctacccttaactctataaagccggctccttcttttcttcagatcttagtttaaatatcagagaggtcttcccctcgcactcctacctctgctaaaatcttgagctttacaagagttgaggcctaatcttgttcaccactgtattcc

SEQ ID NO: 174437 - DNA, 460 bp, Homo sapiens
ccgtaccaccctgaaagtgctcgatctcctcaaaagaaaacatcaaccacccacacaaataaatgccactgtcaacaaaaccaccaaatcaaccgtgctgacgtacatacgtcatcagagtgtttctccagacactatccctttaccacgaaagagcaaacggtgacaaaagtttctgtagaaaccaaactcctggagcacttttataatgtccacttatctaagaaccaccacaatacagaactttaaagagagaaatcaacaatatgttctcacttaaaatgcgctggatgtcatgacccaccccactaacgtcctggctaaatgatgaaaggacgttcagccttttccttcctttttcattttctctttaaggaaacactgatagttcctaaaataagcaccattaggaagagaatacttaagttcactcatttgacattcccacaaaatcagtacc

SEQ ID NO: 174438 - DNA, 312 bp, Homo sapiens
cctcactgatggcaacatgtcaaaggagcacaagatctaacagaaggatctgccagtggctaaagctggggacagcttaagcaacaaagtaaagtagtattggatggttaacccaaactataaaataaatgcccatgagtccgtatgtatataaataaatgatttgataaataaagaggaaaaaatgggtaagtcaccttgcagaagaatcccaaataacttttgtcgatactcccacctcaaggaagtagaacataacccttcactttttcagtataggctgctcataatgaccttccaaagagtaaagta

SEQ ID NO: 174439 - DNA, 221 bp, Homo sapiens
ccagaagcaaggagctgatatgaacgaatcctcacaggactgtaaaacaaacacaatcaggacacctcagtccgtgggaaaatgcggtgcaactgaatctctggatgctctgtgagaaaaatatattttccccttatagaccaattatttaaacttagcgtgtctctgaagctctctgaaatcccctcaaaagaccccagttgtgatcattattcagtata

SEQ ID NO: 174440 - DNA, 318 bp, Homo sapiens
cctcacagtcactgaagccttttgtacctggcccagtgttcattctaagcctagcttctactataatcctgggttactataatagtcatgtaaatgatcatctgacatcctagcttcacaggtatcttaaccactccagttttgaaatctaacactccaaagtctactctgattacaggtcctatcactccagttttccaattactcagcactcaccttgttcacattaaagcctctttttggcccagactgaggctttaatgtgaacagagtgagacttcagtttaaaaaaaaaaaatccaaccgggactagagggg

SEQ ID NO: 174441 - DNA, 594 bp, Homo sapiens
ggtcggtaccgtgtaggatactatttgcagtgagctatgatcaccccactacactccagcctgggcaagagtgacacccagcctcaaaaaaaaaaaaaaaaaaaattcaagttgcaatagcatcataaagaataagatacttaggaataaatttaaccaagaaggtgaatgacctctatgcttaaaactgtaagacactgctgaaagaaattaaagaaggtataaataaacataaagacatcccatgttcatggatttaaagatttaatatagttaaggtatcactgttaccaaaagtgatctgcagattcaatgccagtcctatcaaaatcccaatgatgctttttgcaagaagagaaaactccatcctaaaatttatatagaatcttaagggacccccaatagccaaaacaatcttgaaaaagaaaaaaaattatctcacactttctgaattcagaacttactataaacatatggcaatcaaaacagtgtggttctggcataaaaacagacatgtagaccaacagaataaaaagcccaagtgggcatggtggtgtgtgcctgtatttctacccactgaggaagcttagacag

SEQ ID NO: 174442 - DNA, 685 bp, Homo sapiens
tactcttaaatctgtagggtgcttgttggcagtaagcagacaattgaaacaatacaaatatcataattacagtctggccaaaatgtaaaggaggcatagaaaaggcatattcctactttaaggagaaaatgccataagaaaggtactcctaaactaggacttgaagaccaattaattagctaggcaaatagagaaagggataagagaaggtgaaggaagggcatgcataaggaactagaaatataagccagcatgcgtagtcagagaactccaaatggtaccttataggtgaagagcaggtgagaattagggattcttcaacataattagtcattagggaaatataaattaaaaccacagcaagaaatcactagaaacctattataatggctaaaaattttaaaaaaaaatgacaatacctagtgctaagatcaacaggaactctcatacactgctggtagaaatgcaaaccagtgggccaggcacagtggctcacacctgcaatcccagaacttttggaggccgaggcggacagatcacctgagctcaggagttcaacaccagcctgggcaacatggtgaaaccccgactctactaaaaatacaaaagattagccgggggtggcagcagatatcatatccctccacagcatggctggtttctgtcactcaacaagcacatgaaa

SEQ ID NO: 174443 - DNA, 424 bp, Homo sapiens
caggaggattacttgaggtctggagtttgagaccagcctggtcaacagagcaaaaccctgtctctaataaaaatacaaaaattagctgggtgtggtggcgtacgcctgtagtcccagttaagtgggaggctgaggcaggagaatcgcttgaacctgggaagcagaggttgcagtgagccgagatcacaccactgcacttcctcctaggcaacagagcgagaaaagagaacactcccttttaattgccctttaattctcaacaactactttgtagtacattgttatggggaatggaggtaatatagtaagacacccagacaaatgcctagcacatagcaggagattaataaatggggaatcatttaaatgtatgtatacattttgtcatatacatattgaaatttattctcagaaccagcaactt

SEQ ID NO: 174444 - DNA, 373 bp, Homo sapiens
tggaaaaaggttagtgacaccaaagaatttaaaacaataaaagtattgtcatttcaaaataaaactgcttcaaaatacacagcatctgtggcattagaagcacaatttgaaatcttggcaaatttagaaaactctgagttcacaccataaatgggcatcaatgccagagcacgctggtaactgtgactatgccgacgtgaacggcagatggaggctgacaggagaacctggcccattttccactctctctccttagcgaagcctggtgatcccagtgaagcaactccggccccctaactctcacgatagtctctctgcctgtgaggtatccctcaggacgcctgaataaaatgtggctaacctgctacatgag

SEQ ID NO: 174445 - DNA, 384 bp, Homo sapiens
ggcagaggaaactcgtggtgatgtgtacctcaatgtaggatttagatgtgtctcttctgtttggtcattaatgactggaaactacttggcatacttattaaggaaactgggaatcagaaggatctttcttacgttaatacacagtttattcaaaatatatgtcaaatcctgccccaaagttttagaactagtaacacttactcagtgagttgagtaagttaaaaagccaacactatcttggtctgcatagttatacaattcttcataaaatagtattgcttatttgtttaaatcaaaacagccccatgaggtaaccaaggaaagcatatttataagaaacgggtgcgcatggagttcatgtgagccataaaacctcccagagtg

SEQ ID NO: 174446 - DNA, 549 bp, Homo sapiens
ggcttccttggagagtgtggcagtgctttccttgctaatgaaaaggctgtcataatgggttaggtccataggggctctgcccttctgtacttgtattcccagggagaaaaatctctaccttaattaccgacatctcatgctggcagagaggtgtggttgctaattgattagatgacagtccttttcattgatgtggcactgttggggtggttttgttgtgctttttcaagtaaacagatagatttgggccaggtaagttgattttggagagatgaagttctgtgtagggatttccctttattaagctcatgtctttagtgccacttttgtgtcctgattttctaacttgatagtaagaagtactaagttggcttgtcttgctattttggtgtgggtggtgaataatgtctcttctaccctgctctctggtgcgttcctgttctgtttggtagcaccacattcctctatttcgtttggttttcattccctctttctctcttgtaatggttggacccttggggctaaggttggggcttaagggacccttgg

SEQ ID NO: 174447 - DNA, 278 bp, Homo sapiens
attacaggtgtgagccaccgcacctggccttatagtaatacatttaatactgaaaatatacctaacactaattgatatcttatataaaagaaatggtgttatagttagtgatatgaattaagcaacaagagatagggtagctgtcaaatgtacctgttttgtataaatgtagagaaaaagagttgagtgagtggaaaagaggggaaaggtcaggtaatgttacagattctccagttctgagaaatggcgtctcttcaatgaaacctccggtgattcca

SEQ ID NO: 174448 - DNA, 367 bp, Homo sapiens
gatagcattaggagaaataactaatgtagatgatgggttgatgggtgcagcaaaccaccatggcacgtggatacctatgtaacaaacctgtacgttctgcacatgtatcccagaactttaagaaaaaaagaaagcatttgaagcagaggtattcctaacactgacaaggagtccaggggactcgagcttagaattcaggccgccctgggcccaattccatgaagagctgtgtgaccctgggcaagttacttcattttctaagcctcagatttctacagggatttttgtaaggattcaaaacaatgtggtatatccatagatgttcattataacattgttctaaaaatcaaaaaaggaaaccaactaa

SEQ ID NO: 174449 - DNA, 515 bp, Homo sapiens
tatcctctcagtactcaatataaagctattaactacatagggagtgaatctgccatcttgcccataatatcacaaagtgctaaataacctaagtaattcaagtaatggaaatgactcatttctgctgatctaattccatggtcccacaggagagctataggtattaaatgcagtacatgtatgttaagtggaatgatatacattacaaattaggaaaaagagtaattctgaggcaaataggaaaaagtgattttgttacacatgatattgtgagctcaggtctctttcccatcttctttctttcctacccaagtctcatcctgcaaggtctttctcagatttgaaagcagctgataaacaactaatttccttaagatggctgttgataatagctcaaagtattacttctctctaggggtatgtatactttaatagaaaactcaaaaccttcaattccaaaggaactgcagtcaagttagcagggaatattatactgaagacctcttggcagttac

SEQ ID NO: 174450 - DNA, 217 bp, Homo sapiens
tctaggggagaaggaaaaagctgtgattaggaaagggagctttgggttgggagtcagggatatatttctgaagtattggaaatactctgtttcatgaccttggtggtgattatatggttgttcatgttatacttttaaaaaattgaattgtatgtttatgatttattcacttttcttcatttatgttcgacttttgttgaggctaacttcttcattg

SEQ ID NO: 174451 - DNA, 155 bp, Homo sapiens
ataacataggatgtataaataaaaatgtaggtgaatttggcaattctctttggtctatacatattatatacacacataaataggctataagttaatttcacttaaggtgaaataacagttgcacaactcagatttctcaaacttgaatttatttt

SEQ ID NO: 174452 - DNA, 406 bp, Homo sapiens
ctactttggaggctgaggtgggaagatcacttgagcctgtgaatttgaggttacagtgagctgtgattgtgccactgtgatccagcctgagtgatagagcatgaccctgtctctcaaaacaaaaccctccaaaaaacaaaaaccacccaagtatacattttaaatgattaattttatgtgaaatatatcagctgggcgtggtggttcacacctgtaatcccagcattttgggaggcagaggtgggcggatcacgaggtcaggagatggagaccatcctggctaacatggtgaaaccccgtctctactaaaaatacaaaaaattagccaggcatggtggcacatgcctgtagtcccaactactcaggaggctgaggcaggagaattgcttgaacccgggaggcagag

SEQ ID NO: 174453 - DNA, 319 bp, Homo sapiens
cccagggcaggagcgcgggctgcgctgggcctttacttcgccgcccgcgggcggggagaccggccccgtacccgaggggacgaggggacgaggggcccatgcccagtcagggaagccgaaggcctggaggggcttccgggagcaggggctggagttcctctgccaggcaggaggctggcaccagacacccggcagagggaggcggcgagggcccagcaaggattctccccagcccctgtgcctgcgtctcctgcggcttctgtgcgcggaccgtgtcctgtgctgtgtagggaacgctgcctctctgctcgggacgtgg

SEQ ID NO: 174454 - DNA, 143 bp, Homo sapiens
tggtttgacaatgaggccactggggcctatgtaagtgctatgcctgggaactatacagaagacacagataaaagtataaaaagaagagtgctcaaaaaactggtaactagttgaatttggaagatgaatgggagatgtactaa

SEQ ID NO: 174455 - DNA, 484 bp, Homo sapiens
tatgtacttgtgtctagaatcttttgctcaacattatgcttattgtgtgattgtaattcattcattttcattgttatgtggtactcaatcatgtgaatagaccagtttgtttatttgttctattgttgatgggcattggggtaactttccagtgtggggccattatgaatgatgctattgtgaacatttctgtccctgtcttttagtgagtgtatatatctaggaatggaattgctgggccactggatattcatttttcaactttagcagttaaagctagacagtttgccacagtgatattctgatttctacctcattagcagtgtgtgagagttcagttgcttcacattcttgtcaacacttggaattttgactttctaaattgtaaatagtcaccttcctttcattttgtgaggaaatagaaactcaaataagtgaaatcacctgtccagtaccaggcttggttctaagaatgcaaaagacc

SEQ ID NO: 174456 - DNA, 227 bp, Homo sapiens
tcaaatccacaatgctgggaaacaccatcatttaaggcagtgttactgaatatatgagctgagttattatgcctgtgtcaaaattacgtgggctgcttgttaaaaaaaatacaggttcctgggactcatccaaggttaatgaattacgctctcttggggcgggatttgggactctacatttttgaactgcctcaagtgctttttaagtgtgccttaaaatttgagat

SEQ ID NO: 174457 - DNA, 326 bp, Homo sapiens
aatactggttgcccaagatccaggatggccaagccttaaggggatattactgtcatacaagatgagcaaatgattgtcatagtactgtcattacaaaatcacacacacatacacacacacccctactataaaaacattcaagggcttatcaatgtgagaaaacccgataaagaccccaacccctcaggaccagattgaactagtctctcccacagctcttttactatcttgacttttctacagctctgtgcatgcatgcctgtctctagggatggttacacaggcatcacaatagcagaaattcctcatgcagtctctaagaaggg

SEQ ID NO: 174458 - DNA, 478 bp, Homo sapiens
gccctccccacgtgctcaagttgtttccagatacagaggctgggttcggcgactgagaaggcccccaaatcccttcaagctcctcacaagtgagaagctggggtcacaggggccctaaccatcctgagatgctctaagactgcaaacccgaacctctggggcctggctgcccggtcttggccccatcccagcacgccacatgctgacatgtggtcccttcagggcaaggcctcactgctacctggaactaaacagccacgctacctacctgggggtgtcccccaaggcaccctgagttgctgaaaggaatacagatgacagctagaggcacaggggttggggagcctcggggccaggctcctgtgttccctctcaggctgggtccctttaatttttggcaggtgctccctggggcctggcctcaactgtgaaatgggctaatcctccagcttgcagagtggacaagggtcagcggccg

SEQ ID NO: 174459 - DNA, 314 bp, Homo sapiens
atgagaaaactaaggcttgcagagagtgaacaatttgcccaaggtcaccactgataagtagtaaagaaaggatataaactcagctcagtgtgtcgcagagttcatctctctccattgtacagttacattcccaaccaacatgctggggctgccatgccaggattactccactctgttgctttttattaaaaaattatgttacatattttattacacaattattttacataaaataaaatgtacagatcaatgagttttgacagatgtatatatatatcattgtaatcatcagccaaataaagttatagactcta

SEQ ID NO: 174460 - DNA, 616 bp, Homo sapiens
tatgaaccacaaaatacaaggagggactatgggagagaagaattctcatggctgtggagtctagattaaggcagcagaggatagttctccaaagtaggaggcacaccttgatttgagaggcaacaacctgtttggaatgatagaaatatggtgggcaagctggcagcagaagctttcctgcaatctcactgccttctgcccttttagctccaccatttctaggtcactctcttacgtaccctaactccaagaatccttcaaacaacctccttctggaacaaaccattcattctgatctggttgccctcacccacctcatatcaccttccttgtttacccagtttaaatttcttgatcaattattgtatcagttatttgcatacattcttaatttccttgcccttttttcacttcctcttactcacctgggaaaattccaaccctgctttatcttagattctgagctttgacttgtgcagctgaatgtgggtggcgaaaaccccacaaccgtgctgctgtgtctcaaacgtgccgctgaggcatctggtgggctctgactgctgcttgataatcagagtacatgttcttggtcctttcaccctcctgctcttctaaa

SEQ ID NO: 174461 - DNA, 189 bp, Homo sapiens
aggcctagggtgggttccccctgcttggtgtctctggcccctgctctccattctgaggcctgacaagcacccaacctccaaagctgtgttttcctgggggagtgggtgttgggaccactggcacagaactcgcagcttagctacatgtttgttccagacttggttaatcaatgcagcagtaaacccgct

SEQ ID NO: 174462 - DNA, 457 bp, Homo sapiens
cccctgatgtagagaattggagaccttgttaagaatcttattcttgaacctttggattgtgagaagtgataaaaggattttaagcaagtgagtgatatgaaaaggtttaaagggatgacaagagtgattgtgggagactgattaagcttttgcagtgggccagataatagatgatgctaggttggtctagggtggtagtagtaaggattgaaaagggtggatagatttgaggtatgtttaagaggtttggttattgaattgggggtgggaattaaggaagtgggaagagttaaagctgcttctgggttactggcttgggcaatagggtaaatatcatttgaaaaagggattactagaggaagaactggttaggagaaaagggaatagtgtatgagtggctctgttggagacacgttgcataggaggcaccaatgatatatccatgtcaagctggcag

SEQ ID NO: 174463 - DNA, 152 bp, Homo sapiens
gtatataatcaaaagaaatgacagtatacatccacaccaaactcatatacaaatgtcgcagcagcattattcataacagccaaacaactcaaatgcctatcaagtgattagtagatgagcaaaatgtggcctattcatacgatgaaatatta

SEQ ID NO: 174464 - DNA, 281 bp, Homo sapiens
tatgagaatatccgtgatttctagtagtgacaaagtcacagatattgctaatccaattgtggtttattgccctgtgcataaaaaaatgttaatttcagttacagggtagcgaaaatagagatgtaatgtttttcccagccaacctcgtgacccactaatcttccatccttcaaaggtccatggacccgagattaagaacccctcaacgagacccgaaagaaggtaaaggcggagcagcttccaagggaaaagaacaactggggagtgtgggggcagattca

SEQ ID NO: 174465 - DNA, 320 bp, Homo sapiens
ggcttatttacctgcttgtagtttatattaaaaagtaaattatcattgaatgagattttaggtctttctgaaaatgagaaatttccattgaaagatatggctagtcatgtttttgttgcttaagattttatagctggaaatactgcattttaaaaatatcttcagtttttcatccacattacagctaggtgctcctaaatgtgttgaaagatttctattaatatatggtattaaatgattcataatttgaagactcttaaagttctttgatcttatagctaaaaatactgcaggtattatagttactagaaaaaatttcc

SEQ ID NO: 174466 - DNA, 376 bp, Homo sapiens
ccacatcactcctccctccctctctactacatctaacctacttttcacagataattccacagaaagatgagtttaaagttagtgtcctttcttggacagtacatttttcaaaaattattagtgaacacattgttgtagtttctatcatgagtttcttgctgtgtttattaaacatttgaaacaaagttggagaaatttgtggaacaattagagaattttgccaaatatctcattttttcatatttcttatttattgggtcctgtcatgtttagtaagtgtcttaagagtagaagtttgagcagctattcagtcttacactccgtaattatttggcttctattctgtatacctaataaagcatttaattgacagttc

SEQ ID NO: 174467 - DNA, 777 bp, Homo sapiens
atatatatctgcatctatatctgattacattgaaagttttctccccaaaaaatgttttgtaaaaaagtattcacaatgcagatgaaaaggactatatttgttaatagaaaatgctattaataaacataacagacatgaatagaatgttcacaggaaaagaaaaaggtgtccaataaacagtaaaaagtttattctccctcagaatcaaaagcataaaaattcagcaaaaaatgagtgcactgttgtcatccatttgattagcaaatatcaaaaatttgataaatgggttcgcacctgtactcccaactactcgggaggctgaggctggaggaccccttgagccaggagttcgaggtagcagtgacctacgatcacaaaactgcactgcagcctgggtaacaaagtgagccccccatctcttaaaaagaaaaaaaaaaaaaggataaatacacagtattgataaggatgtgtgtatttaagcattctctagcccatagatcaaaaaactacaacacttaggccaaatccagtctactacctgtttttatacataaaattttattgaaacagccacaccatttatttatgtattgccagtggctgcttttcacactaggatggcaaagttgagtaactgcaacagtgactacagttccctgagaactgttactttctggctctctgcagaagaagttggctgaaccctgttcaagcctatgtatgggaataaaaacaagctataaaacagtcaacctaaaatgcatatgttttgaccca

SEQ ID NO: 174468 - DNA, 856 bp, Homo sapiens
  misc_feature (27)..(27): n is a, c, g, or t
  misc_feature (33)..(33): n is a, c, g, or t
gtgaatgtctgcactgactctcttatntacacngctacggtgtttctgggctacgtgaggcaaaaataaaaacagagaaactcaccacagtgtttttccttggatcccatgatgcccagatgctctactttttccttttacctttcagaaggtgtttttataacatgtaaaatccagggttttcgttgtaccaagtagaggaataaggaaaaatacaccaactccatatttccggaagaatacaaccaatctgcatgtattcattgttcttattcgtgcttagctttctctactgcagtttcatatggtatgatgaaaacataatatgttggataccagtattctgtatagggtattctttcattgcaggcctcaaatagactttcaggaaatagacttttacaataacattaggaggctaggtgatgaagcgttagtcctacagaagcagaaagtttcaactaagacttccacataaagctgtagccctgaaggtcttccccatcagtgaagaagtgaaacacccaacacagagaaggaacaagaaatctcaactggtcagagagagggaagagtggggacaagtctccattgtgaatggacaatactaatcttttgtcacatgcgggcttggagttcaaaacgatactacccatatttggaaattgtcacattgagaagttaacacaaaaatggtactggtgtgtaaaacccctagagttgctgatgaagccagtgtaaaattattcttaaaggacatgacatatcttcaactaattccacaataaaaactgactggaaaggagctctcaatccagtactacgcaatacaaaagaaaaatattcactgtgaaca

SEQ ID NO: 174469 - DNA, 2387 bp, Homo sapiens
gacgagggtatccaccaatcagtgttctggctacggatctggggaggggggaaatgccatcaaggatcacagttcttcatcacgggaaccctgggaatcggtgtcccggcttacacctgatacaggctccgagtctaaggtggggaaggaaggccagactaaccttgacccatcgtcttgtaagtccagccatgaaaagaggcatgcccgggtgctcagtgtggacagtgggacagatgtcttcttgagtaaaagttctgcagaaattgttaacgatacagagaaaacaatgccaacttccaaatctgacctagaggctaaggaaggacaaatgccaaatgagtccaacttcctggaatttgtctccctgttagaatccattaatacttccaagatgacggcatccagtcaactgaatggctcagctgagcagaatgaagaaagtgggcttctccgagataactgttcccaggaaaaaaaggaggaaatcctggaaaatgaaaagcccagtggacacagttctaagcaaggaaaaccagatttgcaaagtcaagaccatactagcaccggccccgcatgcactcagcctgccaagaccacagccttgtaaggataagttacttaatttagtttcacttggtcataaagcatgagacagcctcatttactggcttctgcttttaatgctttatcaaggataaggaggaacttctaatcattttttttgaaacttttatatgtgttaagttttcagggcaatagacaaagacagataatctacagggtaacttcccaacaagatagttctgtcttgcaagtcatcagtgggcctgaaacatctgtacaagaagagatatctgtggatgctatgcatgtcttcattgatgaacatggggaaattagatcctgttatttaaaatctggaaatcagaaagaaggccctttacagcctctaccatcaaataatgactgtctctctcaggctcgagagatgcaggtcagctcctccagtaccacaacttctgagagtcaagatccgtcttctggggaccctgccgtcagtgcccttcagcaacagctgttactgatggtggctcgcaggacccagtcggaaaccccacggcatgtgagtcaggatctggaagcctcgtcatgttcttcaacacaaggaaaatttaaccgagagcagttttacaaatttatcattttccctggcaagtggattaaagtctggtatgatcgactgaccttgctggcattacttgatcgaactgaagacatcaaggagaatgtactggcgattttactcattgtcctggtttccctccttggatttctgaccttgagccaaggcttttgcaaagatatgtgggtgctcctcttctgcctcgtcatggccagctgccagtactccctgctaaagagtgttcagcctgaccccgcctcaccaatacacggacacaaccaaatcataacatatagcagaccaatctatttttgtgtgctgtgtggccttattttgcttcttgatacaggggccaaagccaggcaccctcccagttacgttgtgtatggcctgaagctcttctctccagtgtttctacaatcagctagggactacttaatagggaaaattatgaacagccacaaagacttttttacttctgaaaaaaaaaaggacaaaataatttcagcaatttcaagtgtcattttcctgaagtcctggtaacataacaagcatttggctgctttttccttcacgttcactgcaacctgacagatgagacacatggactccctcttcctcccattccacctccacgacatttattttaaagactagagctttcctcctccaggatgttttggagaggatctagtgcatggacctccttgttgactgctgttcttcctgtattgtttcattaagttccaattctacacccacagccagagcatctccagggatgactttctggtatttcttaccattttatcttcctcatgccatttttcattgtgttccaattctttccatttctttgggttttgttgcactggctaatgtatttcttatacagaatatctctttatccttgatttaccaaatagctcccaatatctggctttgcctttcatatcattccatacctagacttttccctgtggttcttcattctcagagtagtttttgtcacatacacatacagcatttggaaaggcaattaataaatctcattggaccttccctctgccctgatccggaattggcagatatagcatagcacaaaattgttattgctgggttttgaccccaaagtaaagagaagctcttctcagtttgtttgaaattttatggaattttgtggattaaaatttctatgctc

SEQ ID NO: 174470 - DNA, 3962 bp, Homo sapiens
gacgagggtatccaccaatcagtgttctggctacggatctggggaggggggaaatgccatcaaggatcacagttcttcatcacgggaaccctgggaatcggtgtcccggcttacacctgatacaggctccgagtctaaggtggggaaggaaggccagactaaccttgacccatcgtcttgtaagtccagccatgaaaagaggcatgcccgggtgctcagtgtggacagtgggacagatgtcttcttgagtaaaagttctgcagaaattgttaacgatacagagaaaacaatgccaacttccaaatctgacctagaggctaaggaaggacaaatgccaaatgagtccaacttcctggaatttgtctccctgttagaatccattaatacttccaagatgacggcatccagtcaactgaatggctcagctgagcagaatgaagaaagtgggcttctccgagataactgttcccaggaaaaaaaggaggaaatcctggaaaatgaaaagcccagtggacacagttctaagcaaggaaaaccagatttgcaaagtcaagaccatactagcaccggccccgcatgcactcagcctgccaagaccacagccttgtaaggataagttacttaatttagtttcacttggtcataaagcatgagacagcctcatttactggcttctgcttttaatgctttatcaaggataaggaggaacttctaatcattttttttgaaacttttatatgtgttaagttttcagggcaatagacaaagacagataatctacagggtaacttcccaacaagatagttctgtcttgcaagtcatcagtgggcctgaaacatctgtacaagaagagatatctgtggatgctatgcatgtcttcattgatgaacatggggaaattagatcctgttatttaaaatctggaaatcagaaagaaggccctttacagcctctaccatcaaataatgactgtctctctcaggctcgagagatgcaggtcagctcctccagtaccacaacttctgagagtcaagatccgtcttctggggaccctgccgtcagtgcccttcagcaacagctgttactgatggtggctcgcaggacccagtcggaaaccccacggcatgtgagtcaggatctggaagcctcgtcatgttcttcaacacaaggaaaatttaaccgagagcagttttacaaatttatcattttccctggcaagtggattaaagtctggtatgatcgactgaccttgctggcattacttgatcgaactgaagacatcaaggagaatgtactggcgattttactcattgtcctggtttccctccttggatttctgaccttgagccaaggcttttgcaaagatatgtgggtgctcctcttctgcctcgtcatggccagctgccagtactccctgctaaagagtgttcagcctgaccccgcctcaccaatacacggacacaaccaaatcataacatatagcagaccaatctatttttgtgtgctgtgtggccttattttgcttcttgatacaggggccaaagccaggcaccctcccagttacgttgtgtatggcctgaagctcttctctccagtgtttctacaatcagctagggactacttaatagtatttttatattgcttccctgctatttccctccttgggctcttcccgcaaatcaacactttctgcacttatcttttggagcaaattgacatgctgttttttggtggttctgctgtgtctgggataacctcggctgtttacagtgtggcccggagcgtcttggctgccgccctgctccacgcagtctgcttcagtgcagtgaaggaaccgtggagcatgcaacacatcccggcactgttttcggccttctgtggcctcttggtcgccctttcttaccatctgagccgtcagagcagtgacccatctgtactcatgtccttcatccaatgcaggctgtttcctaaatttttacatcaaaatctggcagagtcagctgctgaccctctccccaagaagatgaaagattcagtgacggatgtcttaaaatgggatctcatcgtctgcgcagtggttgctgtcctctcatttgcagtcagcgccagcactgtattcctgtcattgcgaccatttctcagcatcgtgctgtttgccttggctggagccgtggggtttgtaacacattacgtgctccctcagctccgcaagcatcatccctggatgtggatttcacaccccattctcaaaaacaaagagtatcatcaacgggaagtgagagatgttgcccatttaatgtggttcgaaagactctatgtttggcttcagtgttttgaaaaatacatcttgtacccagcgctaattttgaatgccctcactattgatgcatttttaataagcaatcaccggagacttggtacccactgggacatttttctgatgatcattgctggcatgaagctgttgcggacatcattctgcaacccggtttaccagtttattaacttgagcttcactgtcatctttttccactttgactacaaagatatttcagagagcttcttactggatttcttcatggtgtccattttatttagcaagacggagtcttgccctgtcacccaggctggagtgcagtggcgtgatctcagctcactgcaacctctgccttccaacttccagcgattctcctgtctcagcctcatgggtagctgggattacaggtgcacgccaacacacctggctaatttttgtatttttattagagatggggtttcaccatgttggtcaggctggtcttgaactcctgacctcgggtgatctgcctgcctcggcctcccaaagtgctgggattacagacatgagccactgcgcccagctgacaaaagagaatttaacagtttacctcggggacctgcttcacaagttacagttcgtcctgacatatgtggctccttggcagatggcttggggttcttcgtttcacgtgtttgctcagctctttgccattcctcattctgccatgcttttctttcagacgattgccacatcaatcttttctaccccattgagcccatttcttgggagtgtcattttcatcacatcatatgtcaggccagtgaaattctgggagaaaaactacaagtgtttctgggctacgtgaggcaaaaataaaaacagagaaactcaccacagtgtttttccttggatcccatgatgcccagatgctctactttttccttttacctttcagaaggtgtttttataacatgtaaaatccagggttttcgttgtaccaagtagaggaataaggaaaaatacaccaactccatatttccggaagaatacaaccaatctgcatgtattcattgttcttattcgtgcttagctttctctactgcagtttcatatggtatgatgaaaacataatatgttggataccagtattctgtatagggtattctttcattgcaggcctcaaatagactttcaggaaatagacttttacaataacattaggaggctaggtgatgaagcgttagtcctacagaagcagaaagtttcaactaagacttccacataaagctgtagccctgaaggtcttccccatcagtgaagaagtgaaacacccaacacagagaaggaacaagaaatctcaactggtcagagagagggaagagtggggacaagtctccattgtgaatggacaatactaatcttttgtcacatgcgggcttggagttcaaaacgatactacccatatttggaaattgtcacattgagaagttaacacaaaaatggtactggtgtgtaaaacccctagagttgctgatgaagccagtgtaaaattattcttaaaggacatgacatatcttcaactaattccacaataaaaactgactggaaaggagctctcaatccagtactacgcaatacaaaagaaaaatattcactgtgaaca

SEQ ID NO: 174471 - DNA, 3658 bp, Homo sapiens
gacgagggtatccaccaatcagtgttctggctacggatctggggaggggggaaatgccatcaaggatcacagttcttcatcacgggaaccctgggaatcggtgtcccggcttacacctgatacaggctccgagtctaaggtggggaaggaaggccagactaaccttgacccatcgtcttgtaagtccagccatgaaaagaggcatgcccgggtgctcagtgtggacagtgggacagatgtcttcttgagtaaaagttctgcagaaattgttaacgatacagagaaaacaatgccaacttccaaatctgacctagaggctaaggaaggacaaatgccaaatgagtccaacttcctggaatttgtctccctgttagaatccattaatacttccaagatgacggcatccagtcaactgaatggctcagctgagcagaatgaagaaagtgggcttctccgagataactgttcccaggaaaaaaaggaggaaatcctggaaaatgaaaagcccagtggacacagttctaagcaaggaaaaccagatttgcaaagtcaagaccatactagcaccggccccgcatgcactcagcctgccaagaccacagccttgtaaggataagttacttaatttagtttcacttggtcataaagcatgagacagcctcatttactggcttctgcttttaatgctttatcaaggataaggaggaacttctaatcattttttttgaaacttttatatgtgttaagttttcagggcaatagacaaagacagataatctacagggtaacttcccaacaagatagttctgtcttgcaagtcatcagtgggcctgaaacatctgtacaagaagagatatctgtggatgctatgcatgtcttcattgatgaacatggggaaattagatcctgttatttaaaatctggaaatcagaaagaaggccctttacagcctctaccatcaaataatgactgtctctctcaggctcgagagatgcaggtcagctcctccagtaccacaacttctgagagtcaagatccgtcttctggggaccctgccgtcagtgcccttcagcaacagctgttactgatggtggctcgcaggacccagtcggaaaccccacggcatgtgagtcaggatctggaagcctcgtcatgttcttcaacacaaggaaaatttaaccgagagcagttttacaaatttatcattttccctggcaagtggattaaagtctggtatgatcgactgaccttgctggcattacttgatcgaactgaagacatcaaggagaatgtactggcgattttactcattgtcctggtttccctccttggatttctgaccttgagccaaggcttttgcaaagatatgtgggtgctcctcttctgcctcgtcatggccagctgccagtactccctgctaaagagtgttcagcctgaccccgcctcaccaatacacggacacaaccaaatcataacatatagcagaccaatctatttttgtgtgctgtgtggccttattttgcttcttgatacaggggccaaagccaggcaccctcccagttacgttgtgtatggcctgaagctcttctctccagtgtttctacaatcagctagggactacttaatagtatttttatattgcttccctgctatttccctccttgggctcttcccgcaaatcaacactttctgcacttatcttttggagcaaattgacatgctgttttttggtggttctgctgtgtctgggataacctcggctgtttacagtgtggcccggagcgtcttggctgccgccctgctccacgcagtctgcttcagtgcagtgaaggaaccgtggagcatgcaacacatcccggcactgttttcggccttctgtggcctcttggtcgccctttcttaccatctgagccgtcagagcagtgacccatctgtactcatgtccttcatccaatgcaggctgtttcctaaatttttacatcaaaatctggcagagtcagctgctgaccctctccccaagaagatgaaagattcagtgacggatgtcttaaaatgggatctcatcgtctgcgcagtggttgctgtcctctcatttgcagtcagcgccagcactgtattcctgtcattgcgaccatttctcagcatcgtgctgtttgccttggctggagccgtggggtttgtaacacattacgtgctccctcagctccgcaagcatcatccctggatgtggatttcacaccccattctcaaaaacaaagagtatcatcaacgggaagtgagagatgttgcccatttaatgtggttcgaaagactctatgtttggcttcagtgttttgaaaaatacatcttgtacccagcgctaattttgaatgccctcactattgatgcatttttaataagcaatcaccggagacttggtacccactgggacatttttctgatgatcattgctggcatgaagctgttgcggacatcattctgcaacccggtttaccagtttattaacttgagcttcactgtcatctttttccactttgactacaaagatatttcagagagcttcttactggatttcttcatggtgtccattttatttagcaagctcggggacctgcttcacaagttacagttcgtcctgacatatgtggctccttggcagatggcttggggttcttcgtttcacgtgtttgctcagctctttgccattcctcattctgccatgcttttctttcagacgattgccacatcaatcttttctaccccattgagcccatttcttgggagtgtcattttcatcacatcatatgtcaggccagtgaaattctgggagaaaaactacaagtgtttctgggctacgtgaggcaaaaataaaaacagagaaactcaccacagtgtttttccttggatcccatgatgcccagatgctctactttttccttttacctttcagaaggtgtttttataacatgtaaaatccagggttttcgttgtaccaagtagaggaataaggaaaaatacaccaactccatatttccggaagaatacaaccaatctgcatgtattcattgttcttattcgtgcttagctttctctactgcagtttcatatggtatgatgaaaacataatatgttggataccagtattctgtatagggtattctttcattgcaggcctcaaatagactttcaggaaatagacttttacaataacattaggaggctaggtgatgaagcgttagtcctacagaagcagaaagtttcaactaagacttccacataaagctgtagccctgaaggtcttccccatcagtgaagaagtgaaacacccaacacagagaaggaacaagaaatctcaactggtcagagagagggaagagtggggacaagtctccattgtgaatggacaatactaatcttttgtcacatgcgggcttggagttcaaaacgatactacccatatttggaaattgtcacattgagaagttaacacaaaaatggtactggtgtgtaaaacccctagagttgctgatgaagccagtgtaaaattattcttaaaggacatgacatatcttcaactaattccacaataaaaactgactggaaaggagctctcaatccagtactacgcaatacaaaagaaaaatattcactgtgaaca

SEQ ID NO: 174472 - DNA, 3051 bp, Homo sapiens
gacgagggtatccaccaatcagtgttctggctacggatctggggaggggggaaatgccatcaaggatcacagttcttcatcacgggaaccctgggaatcggtgtcccggcttacacctgatacaggctccgagtctaaggtggggaaggaaggccagactaaccttgacccatcgtcttgtaagtccagccatgaaaagaggcatgcccgggtgctcagtgtggacagtgggacagatgtcttcttgagtaaaagttctgcagaaattgttaacgatacagagaaaacaatgccaacttccaaatctgacctagaggctaaggaaggacaaatgccaaatgagtccaacttcctggaatttgtctccctgttagaatccattaatacttccaagatgacggcatccagtcaactgaatggctcagctgagcagaatgaagaaagtgggcttctccgagataactgttcccaggaaaaaaaggaggaaatcctggaaaatgaaaagcccagtggacacagttctaagcaaggaaaaccagatttgcaaagtcaagaccatactagcaccggccccgcatgcactcagcctgccaagaccacagccttgtaaggataagttacttaatttagtttcacttggtcataaagcatgagacagcctcatttactggcttctgcttttaatgctttatcaaggataaggaggaacttctaatcattttttttgaaacttttatatgtgttaagttttcagggcaatagacaaagacagataatctacagggtaacttcccaacaagatagttctgtcttgcaagtcatcagtgggcctgaaacatctgtacaagaagagatatctgtggatgctatgcatgtcttcattgatgaacatggggaaattagatcctgttatttaaaatctggaaatcagaaagaaggccctttacagcctctaccatcaaataatgactgtctctctcaggctcgagagatgcaggtcagctcctccagtaccacaacttctgagagtcaagatccgtcttctggggaccctgccgtcagtgcccttcagcaacagctgttactgatggtggctcgcaggacccagtcggaaaccccacggcatgtgagtcaggatctggaagcctcgtcatgttcttcaacacaaggaaaatttaaccgagagcagttttacaaatttatcattttccctggcaagtggattaaagtctggtatgatcgactgaccttgctggcattacttgatcgaactgaagacatcaaggagaatgtactggcgattttactcattgtcctggtttccctccttggatttctgaccttgagccaaggcttttgcaaagatatgtgggtgctcctcttctgcctcgtcatggccagctgccagtactccctgctaaagagtgttcagcctgaccccgcctcaccaatacacggacacaaccaaatcataacatatagcagaccaatctatttttgtgtgctgtgtggccttattttgcttcttgatacaggggccaaagccaggcaccctcccagttacgttgtgtatggcctgaagctcttctctccagtgtttctacaatcagctagggactacttaatagtatttttatattgcttccctgctatttccctccttgggctcttcccgcaaatcaacactttctgcacttatcttttggagcaaattgacatgctgttttttggtggttctgctgtgtctgggataacctcggctgtttacagtgtggcccggagcgtcttggctgccgccctgctccacgcagtctgcttcagtgcagtgaaggaaccgtggagcatgcaacacatcccggcactgttttcggccttctgtggcctcttggtcgccctttcttaccatctgagccgtcagagcagtgacccatctgtactcatgtccttcatccaatgcaggctgtttcctaaatttttacatcaaaatctggcagagtcagctgctgaccctctccccaagaagatgaaagattcagtgacggatgtcttaaaatgggatctcatcgtctgcgcagtggttgctgtcctctcatttgcagtcagcgccagcactgtattcctgtcattgcgaccatttctcagcatcgtgctgtttgccttggctggagccgtggggtttgtaacacattacgtgctccctcagctccgcaagcatcatccctggatgtggatttcacaccccattctcaaaaacaaagagtatcatcaacgggaagtgagagatgttgcccatttaatgtggttcgaaagactctatgtttggcttcagtgttttgaaaaatacatcttgtacccagcgctaattttgaatgccctcactattgatgcatttttaataagcaatcaccggagacttggtacccactgggacatttttctgatgatcattgctggcatgaagctgttgcggacatcattctgcaacccggtttaccagtttattaacttgagcttcactgtcatctttttccactttgactacaaagatatttcagagagcttcttactggatttcttcatggtgtccattttatttagcaagctcggggacctgcttcacaagttacagttcgtcctgacatatgtggctccttggcagatggcttggggttcttcgtttcacgtgtttgctcagctctttgccattcctcattctgccatgcttttctttcagacgattgccacatcaatcttttctaccccattgagcccatttcttgggagtgtcattttcatcacatcatatgtcaggccagtgaaattctgggagaaaaactacaagtaagatcctaaaatcagtgctcaattgcttttctccagtttgcacttcagaaggctcctctgccttcctctgttaggaggtccctggctccaggcttccccctgctgtggggccaggccaaacctgtctctcttgatgacctcctcagttcattgactcagctcttgggtctcagggatctggaaagaacatgactgatttcaaattag

SEQ ID NO: 174473 - DNA, 2395 bp, Homo sapiens
gcaggagccttggcaacacagttccccatgcttatcgtcaattttgtttgttcattttcagtatttttatattgcttccctgctatttccctccttgggctcttcccgcaaatcaacactttctgcacttatcttttggagcaaattgacatgctgttttttggtggttctgctgtgtctgggataacctcggctgtttacagtgtggcccggagcgtcttggctgccgccctgctccacgcagtctgcttcagtgcagtgaaggaaccgtggagcatgcaacacatcccggcactgttttcggccttctgtggcctcttggtcgccctttcttaccatctgagccgtcagagcagtgacccatctgtactcatgtccttcatccaatgcaggctgtttcctaaatttttacatcaaaatctggcagagtcagctgctgaccctctccccaagaagatgaaagattcagtgacggatgtcttaaaatgggatctcatcgtctgcgcagtggttgctgtcctctcatttgcagtcagcgccagcactgtattcctgtcattgcgaccatttctcagcatcgtgctgtttgccttggctggagccgtggggtttgtaacacattacgtgctccctcagctccgcaagcatcatccctggatgtggatttcacaccccattctcaaaaacaaagagtatcatcaacgggaagtgagagatgttgcccatttaatgtggttcgaaagactctatgtttggcttcagtgttttgaaaaatacatcttgtacccagcgctaattttgaatgccctcactattgatgcatttttaataagcaatcaccggagacttggtacccactgggacatttttctgatgatcattgctggcatgaagctgttgcggacatcattctgcaacccggtttaccagtttattaacttgagcttcactgtcatctttttccactttgactacaaagatatttcagagagcttcttactggatttcttcatggtgtccattttatttagcaagacggagtcttgccctgtcacccaggctggagtgcagtggcgtgatctcagctcactgcaacctctgccttccaacttccagcgattctcctgtctcagcctcatgggtagctgggattacaggtgcacgccaacacacctggctaatttttgtatttttattagagatggggtttcaccatgttggtcaggctggtcttgaactcctgacctcgggtgatctgcctgcctcggcctcccaaagtgctgggattacagacatgagccactgcgcccagctgacaaaagagaatttaacagtttacctcggggacctgcttcacaagttacagttcgtcctgacatatgtggctccttggcagatggcttggggttcttcgtttcacgtgtttgctcagctctttgccattcctcattctgccatgcttttctttcagacgattgccacatcaatcttttctaccccattgagcccatttcttgggagtgtcattttcatcacatcatatgtcaggccagtgaaattctgggagaaaaactacaagtgtttctgggctacgtgaggcaaaaataaaaacagagaaactcaccacagtgtttttccttggatcccatgatgcccagatgctctactttttccttttacctttcagaaggtgtttttataacatgtaaaatccagggttttcgttgtaccaagtagaggaataaggaaaaatacaccaactccatatttccggaagaatacaaccaatctgcatgtattcattgttcttattcgtgcttagctttctctactgcagtttcatatggtatgatgaaaacataatatgttggataccagtattctgtatagggtattctttcattgcaggcctcaaatagactttcaggaaatagacttttacaataacattaggaggctaggtgatgaagcgttagtcctacagaagcagaaagtttcaactaagacttccacataaagctgtagccctgaaggtcttccccatcagtgaagaagtgaaacacccaacacagagaaggaacaagaaatctcaactggtcagagagagggaagagtggggacaagtctccattgtgaatggacaatactaatcttttgtcacatgcgggcttggagttcaaaacgatactacccatatttggaaattgtcacattgagaagttaacacaaaaatggtactggtgtgtaaaacccctagagttgctgatgaagccagtgtaaaattattcttaaaggacatgacatatcttcaactaattccacaataaaaactgactggaaaggagctctcaatccagtactacgcaatacaaaagaaaaatattcactgtgaaca

SEQ ID NO: 174474 - DNA, 2514 bp, Homo sapiens
gacgagggtatccaccaatcagtgttctggctacggatctggggaggggggaaatgccatcaaggatcacagttcttcatcacgggaaccctgggaatcggtgtcccggcttacacctgatacaggctccgagtctaaggtggggaaggaaggccagactaaccttgacccatcgtcttgtaagtccagccatgaaaagaggcatgcccgggtgctcagtgtggacagtgggacagatgtcttcttgagtaaaagttctgcagaaattgttaacgatacagagaaaacaatgccaacttccaaatctgacctagaggctaaggaaggacaaatgccaaatgagtccaacttcctggaatttgtctccctgttagaatccattaatacttccaagatgacggcatccagtcaactgaatggctcagctgagcagaatgaagaaagtgggcttctccgagataactgttcccaggaaaaaaaggaggaaatcctggaaaatgaaaagcccagtggacacagttctaagcaaggaaaaccagatttgcaaagtcaagaccatactagcaccggccccgcatgcactcagcctgccaagaccacagccttttttcagggcaatagacaaagacagataatctacagggtaacttcccaacaagatagttctgtcttgcaagtcatcagtgggcctgaaacatctgtacaagaagagatatctgtggatgctatgcatgtcttcattgatgaacatggggaaattagatcctgttatttaaaatctggaaatcagaaagaaggccctttacagcctctaccatcaaataatgactgtctctctcaggctcgagagatgcaggtcagctcctccagtaccacaacttctgagagtcaagatccgtcttctggggaccctgccgtcagtgcccttcagcaacagctgttactgatggtggctcgcaggacccagtcggaaaccccacggaactgaagacatcaaggagaatgtactggcgattttactcattgtcctggtttccctccttggatttctgaccttgagccaaggcttttgcaaagatatgtgggtgctcctcttctgcctcgtcatggccagctgccagtactccctgctaaagagtgttcagcctgaccccgcctcaccaatacacggacacaaccaaatcataacatatagcagaccaatctatttttgtgtgctgtgtggccttattttgcttcttgatacaggggccaaagccaggcaccctcccagttacgttgtgtatggcctgaagctcttctctccagtgtttctacaatcagctagggactacttaatagtatttttatattgcttccctgctatttccctccttgggctcttcccgcaaatcaacactttctgcacttatcttttggagcaaattgacatgctgttttttggtggttctgctgtgtctgggataacctcggctgtttacagtgtggcccggagcgtcttggctgccgccctgctccacgcagtctgcttcagtgcagtgaaggaaccgtggagcatgcaacacatcccggcactgttttcggccttctgtggcctcttggtcgccctttcttaccatctgagccgtcagagcagtgacccatctgtactcatgtccttcatccaatgcaggctgtttcctaaatttttacatcaaaatctggcagagtcagctgctgaccctctccccaagaagatgaaagattcagtgacggatgtcttaaaatgggatctcatcgtctgcgcagtggttgctgtcctctcatttgcagtcagcgccagcactgtattcctgtcattgcgaccatttctcagcatcgtgctgtttgccttggctggagccgtggggtttgtaacacattacgtgctccctcagctccgcaagcatcatccctggatgtggatttcacaccccattctcaaaaacaaagagtatcatcaacgggaagtgagagatgttgcccatttaatgtggttcgaaagactctatgtttggcttcagtgttttgaaaaatacatcttgtacccagcgctaattttgaatgccctcactattgatgcatttttaataagcaatcaccggagacttggtacccactgggacatttttctgatgatcattgctggcatgaagctgttgcggacatcattctgcaacccggtttaccagtttattaacttgagcttcactgtcatctttttccactttgactacaaagatatttcagagagcttcttactggatttcttcatggtgtccattttatttagcaaggtgtttctgggctacgtgaggcaaaaataaaaacagagaaactcaccacagtgtttttccttggatcccatgatgcccagatgctctactttttccttttacctttcagaaggtgtttttataacatgtaaaatccagggttttcgttgtaccaagtagaggaataaggaaaaatacaccaactccatatttccggaag

SEQ ID NO: 174475 - DNA, 2305 bp, Homo sapiens
gacgagggtatccaccaatcagtgttctggctacggatctggggaggggggaaatgccatcaaggatcacagttcttcatcacgggaaccctgggaatcggtgtcccggcttacacctgatacaggctccgagtctaaggtggggaaggaaggccagactaaccttgacccatcgtcttgtaagtccagccatgaaaagaggcatgcccgggtgctcagtgtggacagtgggacagatgtcttcttgagtaaaagttctgcagaaattgttaacgatacagagaaaacaatgccaacttccaaatctgacctagaggctaaggaaggacaaatgccaaatgagtccaacttcctggaatttgtctccctgttagaatccattaatacttccaagatgacggcatccagtcaactgaatggctcagctgagcagaatgaagaaagtgggcttctccgagataactgttcccaggaaaaaaaggaggaaatcctggaaaatgaaaagcccagtggacacagttctaagcaaggaaaaccagatttgcaaagtcaagaccatactagcaccggccccgcatgcactcagcctgccaagaccacagccttgtaaggataagttacttaatttagtttcacttggtcataaagcatgagacagcctcatttactggcttctgcttttaatgctttatcaaggataaggaggaacttctaatcattttttttgaaacttttatatgtgttaagttttcagggcaatagacaaagacagataatctacagggtaacttcccaacaagatagttctgtcttgcaagtcatcagtgggcctgaaacatctgtacaagaagagatatctgtggatgctatgcatgtcttcattgatgaacatggggaaattagatcctgttatttaaaatctggaaatcagaaagaaggccctttacagcctctaccatcaaataatgactgtctctctcaggctcgagagatgcaggtcagctcctccagtaccacaacttctgagagtcaagatccgtcttctggggaccctgccgtcagtgcccttcagcaacagctgttactgatggtggctcgcaggacccagtcggaaaccccacggcatgtgagtcaggatctggaagcctcgtcatgttcttcaacacaaggaaaatttaaccgagagcagttttacaaatttatcattttccctggcaagtggattaaagtctggtatgatcgactgaccttgctggcattacttgatcgaactgaagacatcaaggagaatgtactggcgattttactcattgtcctggtttccctccttggatttctgaccttgagccaaggcttttgcaaagatatgtgggtgctcctcttctgcctcgtcatggccagctgccagtactccctgctaaagagtgttcagcctgaccccgcctcaccaatacacggacacaaccaaatcataacatatagcagaccaatctatttttgtgtgctgtgtggccttattttgcttcttgatacaggggccaaagccaggcaccctcccagttacgttgtgtatggcctgaagctcttctctccagtgtttctacaatcagctagggactacttaatagtatttttatattgcttccctgctatttccctccttgggctcttcccgcaaatcaacactttctgcacttatcttttggagcaaattgacatgctgttttttggtggttctgctgtgtctgggataacctcggctgtttacagtgtggcccggagcgtcttggctgccgccctgctccacgcagtctgcttcagtgcagtgaaggaaccgtggagcatgcaacacatcccggcactgttttcggccttctgtggcctcttggtcgccctttcttaccatctgagccgtcagagcagtgacccatctgtactcatgtccttcatccaatgcaggctgtttcctaaatttttacatcaaaatctggcagagtcagctgctgaccctctccccaagaagatgaaagattcagtgacggatgtcttaaaatgggatctcatcgtctgcgcagtggttgctgtcctctcatttgcagtcagcgccagcactgtattcctgtcattgcgaccatttctcagcatcgtgctgtttgccttggctggagccgtggggtttgtaacacattacgtgctccctcagctccgcaagcatcatccctggatgtggatttcacaccccattctcaaaaacaaagagtatcatcaacgggaagtgagaggttagtaatatatccctcattta

SEQ ID NO: 174476 - DNA, 2840 bp, Homo sapiens
gacgagggtatccaccaatcagtgttctggctacggatctggggaggggggaaatgccatcaaggatcacagttcttcatcacgggaaccctgggaatcggtgtcccggcttacacctgatacaggctccgagtctaaggtggggaaggaaggccagactaaccttgacccatcgtcttgtaagtccagccatgaaaagaggcatgcccgggtgctcagtgtggacagtgggacagatgtcttcttgagtaaaagttctgcagaaattgttaacgatacagagaaaacaatgccaacttccaaatctgacctagaggctaaggaaggacaaatgccaaatgagtccaacttcctggaatttgtctccctgttagaatccattaatacttccaagatgacggcatccagtcaactgaatggctcagctgagcagaatgaagaaagtgggcttctccgagataactgttcccaggaaaaaaaggaggaaatcctggaaaatgaaaagcccagtggacacagttctaagcaaggaaaaccagatttgcaaagtcaagaccatactagcaccggccccgcatgcactcagcctgccaagaccacagccttgtaaggataagttacttaatttagtttcacttggtcataaagcatgagacagcctcatttactggcttctgcttttaatgctttatcaaggataaggaggaacttctaatcattttttttgaaacttttatatgtgttaagttttcagggcaatagacaaagacagataatctacagggtaacttcccaacaagatagttctgtcttgcaagtcatcagtgggcctgaaacatctgtacaagaagagatatctgtggatgctatgcatgtcttcattgatgaacatggggaaattagatcctgttatttaaaatctggaaatcagaaagaaggccctttacagcctctaccatcaaataatgactgtctctctcaggctcgagagatgcaggtcagctcctccagtaccacaacttctgagagtcaagatccgtcttctggggaccctgccgtcagtgcccttcagcaacagctgttactgatggtggctcgcaggacccagtcggaaaccccacggcatgtgagtcaggatctggaagcctcgtcatgttcttcaacacaaggaaaatttaaccgagagcagttttacaaatttatcattttccctggcaagtggattaaagtctggtatgatcgactgaccttgctggcattacttgatcgaactgaagacatcaaggagaatgtactggcgattttactcattgtcctggtttccctccttggatttctgaccttgagccaaggcttttgcaaagatatgtgggtgctcctcttctgcctcgtcatggccagctgccagtactccctgctaaagagtgttcagcctgaccccgcctcaccaatacacggacacaaccaaatcataacatatagcagaccaatctatttttgtgtgctgtgtggccttattttgcttcttgatacaggggccaaagccaggcaccctcccagttacgttgtgtatggcctgaagctcttctctccagtgtttctacaatcagctagggactacttaatagtatttttatattgcttccctgctatttccctccttgggctcttcccgcaaatcaacactttctgcacttatcttttggagcaaattgacatgctgttttttggtggttctgctgtgtctgggataacctcggctgtttacagtgtggcccggagcgtcttggctgccgccctgctccacgcagtctgcttcagtgcagtgaaggaaccgtggagcatgcaacacatcccggcactgttttcggccttctgtggcctcttggtcgccctttcttaccatctgagccgtcagagcagtgacccatctgtactcatgtccttcatccaatgcaggctgtttcctaaatttttacatcaaaatctggcagagtcagctgctgaccctctccccaagaagatgaaagattcagtgacggatgtcttaaaatgggatctcatcgtctgcgcagtggttgctgtcctctcatttgcagtcagcgccagcactgtattcctgtcattgcgaccatttctcagcatcgtgctgtttgccttggctggagccgtggggtttgtaacacattacgtgctccctcagctccgcaagcatcatccctggatgtggatttcacaccccattctcaaaaacaaagagtatcatcaacgggaagtgagagatgttgcccatttaatgtggttcgaaagactctatgtttggcttcagtgttttgaaaaatacatcttgtacccagcgctaattttgaatgccctcactattgatgcatttttaataagcaatcaccggagacttggtacccactgggacatttttctgatgatcattgctggcatgaagctgttgcggacatcattctgcaacccggtttaccagtttattaacttgagcttcactgtcatctttttccactttgactacaaagatatttcagagagcttcttactggatttcttcatggtgtccattttatttagcaaggcaagtgaattagctattttcttcattttaacattttaaagggggctgttcttatcaaatgttttaagagtttaaaacttattctttataaaaaaaattatgggaggatatgaaattgaattatacatgtatgttaaactcttgctaccatttggggaaaactgcccatggaatgtaagtatgccatgttatttgctaaaaatcactaattaaaatgaattagccattagtgtgactt

SEQ ID NO: 174477 - DNA, 3060 bp, Homo sapiens
gacgagggtatccaccaatcagtgttctggctacggatctggggaggggggaaatgccatcaaggatcacagttcttcatcacgggaaccctgggaatcggtgtcccggcttacacctgatacaggctccgagtctaaggtggggaaggaaggccagactaaccttgacccatcgtcttgtaagtccagccatgaaaagaggcatgcccgggtgctcagtgtggacagtgggacagatgtcttcttgagtaaaagttctgcagaaattgttaacgatacagagaaaacaatgccaacttccaaatctgacctagaggctaaggaaggacaaatgccaaatgagtccaacttcctggaatttgtctccctgttagaatccattaatacttccaagatgacggcatccagtcaactgaatggctcagctgagcagaatgaagaaagtgggcttctccgagataactgttcccaggaaaaaaaggaggaaatcctggaaaatgaaaagcccagtggacacagttctaagcaaggaaaaccagatttgcaaagtcaagaccatactagcaccggccccgcatgcactcagcctgccaagaccacagccttgtaaggataagttacttaatttagtttcacttggtcataaagcatgagacagcctcatttactggcttctgcttttaatgctttatcaaggataaggaggaacttctaatcattttttttgaaacttttatatgtgttaagttttcagggcaatagacaaagacagataatctacagggtaacttcccaacaagatagttctgtcttgcaagtcatcagtgggcctgaaacatctgtacaagaagagatatctgtggatgctatgcatgtcttcattgatgaacatggggaaattagatcctgttatttaaaatctggaaatcagaaagaaggccctttacagcctctaccatcaaataatgactgtctctctcaggctcgagagatgcaggtcagctcctccagtaccacaacttctgagagtcaagatccgtcttctggggaccctgccgtcagtgcccttcagcaacagctgttactgatggtggctcgcaggacccagtcggaaaccccacggcatgtgagtcaggatctggaagcctcgtcatgttcttcaacacaaggaaaatttaaccgagagcagttttacaaatttatcattttccctggcaagtggattaaagtctggtatgatcgactgaccttgctggcattacttgatcgaactgaagacatcaaggagaatgtactggcgattttactcattgtcctggtttccctccttggatttctgaccttgagccaaggcttttgcaaagatatgtgggtgctcctcttctgcctcgtcatggccagctgccagtactccctgctaaagagtgttcagcctgaccccgcctcaccaatacacggacacaaccaaatcataacatatagcagaccaatctatttttgtgtgctgtgtggccttattttgcttcttgatacaggggccaaagccaggcaccctcccagttacgttgtgtatggcctgaagctcttctctccagtgtttctacaatcagctagggactacttaatagtatttttatattgcttccctgctatttccctccttgggctcttcccgcaaatcaacactttctgcacttatcttttggagcaaattgacatgctgttttttggtggttctgctgtgtctgggataacctcggctgtttacagtgtggcccggagcgtcttggctgccgccctgctccacgcagtctgcttcagtgcagtgaaggaaccgtggagcatgcaacacatcccggcactgttttcggccttctgtggcctcttggtcgccctttcttaccatctgagccgtcagagcagtgacccatctgtactcatgtccttcatccaatgcaggctgtttcctaaatttttacatcaaaatctggcagagtcagctgctgaccctctccccaagaagatgaaagattcagtgacggatgtcttaaaatgggatctcatcgtctgcgcagtggttgctgtcctctcatttgcagtcagcgccagcactgtattcctgtcattgcgaccatttctcagcatcgtgctgtttgccttggctggagccgtggggtttgtaacacattacgtgctccctcagctccgcaagcatcatccctggatgtggatttcacaccccattctcaaaaacaaagagtatcatcaacgggaagtgagagatgttgcccatttaatgtggttcgaaagactctatgtttggcttcagtgttttgaaaaatacatcttgtacccagcgctaattttgaatgccctcactattgatgcatttttaataagcaatcaccggagacttggtacccactgggacatttttctgatgatcattgctggcatgaagctgttgcggacatcattctgcaacccggtttaccagtttattaacttgagcttcactgtcatctttttccactttgactacaaagatatttcagagagcttcttactggatttcttcatggtgtccattttatttagcaagctcggggacctgcttcacaagttacagttcgtcctgacatatgtggctccttggcagatggcttggggttcttcgtttcacgtgtttgctcagctctttgccattcctcgtatcctttctgcttctattttcaccctccagctgagattcacattttacggaagcaagcttttcattgacccctggcaataaaaagattttaaagtctataagattacattttaatggggacatgaagaggcactttggatccctttaggccacttagccttaaaagatatttctttattttgaactcttcctgcttcttaatgcatattcaggagttacttttattttttctggtccttccatttcccatgcccagatctgcattaaggtaccctgtcttttaaactgcttaaatgattgggttgccttgtgcaaaatagtgcaaataaatttgctgttattaagca

SEQ ID NO: 174478 - DNA, 557 bp, Homo sapiens
ctctatgaccacaggcaagtggtgttagctttttctaagtctcagccaccttatctataaaaatgtggacaaaaatagcacctacatgacaggttgattgtgagaactggatgggatgattcgtgacaaacatttaacacagtaactgacccacaataagcactcagtatatgtttcattactgctgaggcatgagacaacagggaaactatcttgcaggcattttccatttgtctttatgtatgttacatcatatgcattacatacacgcactaagttacatccattctgttcatcacttgggtttatgatgttctaatggtagataagtgcaaattacaataaggctaggtgactaataaaaatcaagaaataggctgggcgtggtggctcatgtctgtaattctagcattttgggaggccaaggcaggcggattacttaaggtcaggagctcgagaccagcctggccaacatggtgaaacccaatctctactaaaaattacaaaaattagccaggtgtggtggcacatgcctgtagtcccagctacttgggagg

SEQ ID NO: 174479 - DNA, 788 bp, Homo sapiens
aggagggagcagtcggtcgctgcgccccggcgggccactttcccgggaccccgctcgtcttccttgggccgagattttccactgcgcccctccgagtacccgggttccaaacccctagccacgacatggaagaatttttgcaacgcgccaaatctaaactgaatcgaagcaaacgcttggagaaggtccatgtggttattgggcctaaatcgtgtgacttggattctctcatttctaccttcacatatgcttactttctagacaaggtcagtccaccaggggttctgtgtttaccagtgctgaacataccaagaactgaattcaactacttcaccgagacgaggtttattttagaagagctaaatatttccgaatcattccacatattccgggatgaaattaacctgcatcagctaaatgatgaagggaagttatcgataacacttgttggcagcagtgtgctggcgagtgaagacaaaactttagaatcagcagttgtcaaagtcattaatccggttgagcagagcgatgccaacgttgagttccgagagtcttcctcttctctcgtgctaaaggagattctccaagaggctcctgagctcatcaccgagcaactggctcatcgcctcagaggtagcattcttttcaagtggatgaccatggaatcagagaagatctcagagaagcaggaggaaattctttctatcctggaagaaaaatttcctaacttgcctccaagagaggacatcatcaacgtcctacaggagacccagttcagtgctcagggt

SEQ ID NO: 174480 - DNA, 820 bp, Homo sapiens
tttaatcatatgtagtatatatttatatatacaaatggtgcagggtctaaaatgagacataaaataaagcatgagatgtttcaagtagggtaacaagaggttaaaaaatgttaggggccactcagaggaaaatactctattaattgggttcaggaaaatttgattatgaatgccaagtggtttagtgaggccagaagactcctattccttttaccagttacccccaggctggagaaaatgtaattgtattctttcctcctgctattttcagtaattcagtcaacttttttcttggtaggtcagtccaccaggggttctgtgtttaccagtgctgaacataccaagaactgaattcaactacttcaccgagacgaggtttattttagaagagctaaatatttccgaatcattccacatattccgggatgaaattaacctgcatcagctaaatgatgaagggaagttatcgataacacttgttggcagcagtgtgctggcgagtgaagacaaaactttagaatcagcagttgtcaaagtcattaatccggttgagcagagcgatgccaacgttgagttccgagagtcttcctcttctctcgtgctaaaggagattctccaagaggctcctgagctcatcaccgagcaactggctcatcgcctcagaggtagcattcttttcaagtggatgaccatggaatcagagaagatctcagagaagcaggaggaaattctttctatcctggaagaaaaatttcctaacttgcctccaagagaggacatcatcaacgtcctacaggagacccagttcagtgctcagggt

SEQ ID NO: 174481 - DNA, 874 bp, Homo sapiens
tccattccaaatgcagacatttacactcgtgagtattaaagcaatagatcttccttatgacaacaaaaagctgactgcagaaaagcaaagcttctgggaaaagtcttcgagcgcgtcttggcttgttcatagggggagaagacctgactaattagctccagcccttctaatccgaaggagcagaaataattaaagtatctggggcaagctgtgccgcacagcagcaggctacagaaggggcgacgcgaatcgaagcaaacgcttggagaaggtccatgtggttattgggcctaaatcgtgtgacttggattctctcatttctaccttcacatatgcttactttctagacaaggtcagtccaccaggggttctgtgtttaccagtgctgaacataccaagaactgaattcaactacttcaccgagacgaggtttattttagaagagctaaatatttccgaatcattccacatattccgggatgaaattaacctgcatcagctaaatgatgaagggaagttatcgataacacttgttggcagcagtgtgctggcgagtgaagacaaaactttagaatcagcagttgtcaaagtcattaatccggttgagcagagcgatgccaacgttgagttccgagagtcttcctcttctctcgtgctaaaggagattctccaagaggctcctgagctcatcaccgagcaactggctcatcgcctcagaggtagcattcttttcaagtggatgaccatggaatcagagaagatctcagagaagcaggaggaaattctttctatcctggaagaaaaatttcctaacttgcctccaagagaggacatcatcaacgtcctacaggagacccagttcagtgctcagggt

SEQ ID NO: 174482 - DNA, 836 bp, Homo sapiens
acagcctgaagcagcaggaacctggacttatgggggatcccggggcccgagtctactcctctcactccatgggggcccgggtggacctggagcctgtctcaccaaggagctgcctcaccaaagtggagctggccaagagccggctggcaggggccctgtgcccccaggtaccccgtacccctgccaaagtgccaacctcagccccaagcctgggcaagcccaataagagccctcacagcagccccaccaagctcccttccaagtcaccaaccaaggtggtgcctcgacctggggctccgctagtcaccaaggagtcccccaagcctgacaaagggaagggccctccctgggcagactgtggtagtaccacggcccagtccacacccctagtacctggccccactgacccaagtcagggccctgaggggctggccccacactcagccatcgaggagaaggtgatgaagggcattgaggagaacgtgctgcggctccagggccaggagcgagcccctggcgccgaggtcaagcaccgcaacaccagcagcatcgccagctggttcggccttaagaagagcaagctgccagcgctgaaccgccgcacagaggccaccaagaacaaggagggggctggcgggggctccccgctccggagggaagtcaagatggaagcccggaagctggaggccgagagcctcaacatctccaagctgatggccaaggcggaagacctgcgtcgggcactggaagaggagaaggcctacctaagcagccgggcccgccaacgcctggtggcccagccccagggcccaacacggggctggggcaggtgcagg

SEQ ID NO: 174483 - DNA, 106 bp, Homo sapiens
cgctgaaattgcaggcgtgagccatcgcgcctggctgaggtttatttttcaaagaatgaccaagaggctaggtgtggtggctcacagttgcaaatcccagcacttt

SEQ ID NO: 174484 - DNA, 213 bp, Homo sapiens
tcagaaagtcatttgtagttaattttttaccaaacagaaatacttaaaatcttttagtactaacaagtgatctatagaaaaaaaataaaaatctttcaggaaaaattaattcaaaataaatttaaccactatttagtgaacaattaagttaagtacatggataagactaagaactatacaatttgtttcagtcctctcagatgctaaatctat

SEQ ID NO: 174485 - DNA, 218 bp, Homo sapiens
attaagcttccagtactgagtttttaaaccaattacgttcacagtctttgcaaaagcagaagttgaagcatctagtatgtataataataccatacaattcccatctcatggatggataaatcaatacatcaaaatatatattttgtacttatgatatgcttatctttgcattagatgctatggagaataccagaggtgtaacataagccaagccctga

SEQ ID NO: 174486 - DNA, 494 bp, Homo sapiens
attacaggtgcccaccaccacgcccagctaatttttgtatatttaggtgagacggggtttcaccatgttgaccagtctggtcttgaacttctgacctcagctgatccacccacctcggcctcccaaagtgctgggattacaggcatgagctgccacgcctggccagcaatttttttcttgatttactttttgaaaataaaaaccataagaaaataatattaaaattattttcaaatgctatttcaaaaaatataggccatcagttctttgtaatactcatcattttacatattattgaagtgctaggttttaaatatatatggcattgtaaatttatgagtttattgacttaagtcatattattgaaatttgttgggagtacattagcaaacatttgattattaagccttgcaggagtttaaaatttggagtagaaattgtgctcttacatacaggaattttcaactaatttttataagtgttgtgcatataca

SEQ ID NO: 174487 - DNA, 170 bp, Homo sapiens
taactaagcaattatgcttcttaattggcctgggcaaaaaactttgaataatttttaagactaacataaaaaaaaaacacatgtattttacacttatcagaagaattgatattcaattttcttcttagctttagaaatggattaatactttcaaactatcacttttttgc

SEQ ID NO: 174488 - DNA, 321 bp, Homo sapiens
acaaaaaattagccgggcatggtggcaggtgcctgtaatctcagctactctggaggctgaggcaggagaatcgcgtgaacccgggaggcggagcctgcagtgagccgagatcgcaccactgcactccagcctgggtgagagagcgagactcctttctgaagaaaaaaaaaaaaaaaaaaaaagatatcttgttttaattgatattccatggattattagtgaggtcaagtaacttttcatatatttaatggtcttttgtttcttgtaaattttcttaaaaatttgttaaaaaattaactccatacaaccttagtcactctc

SEQ ID NO: 174489 - DNA, 243 bp, Homo sapiens
gggaggcggaggttgcagtgagccgagatcccactgcggcactccagcctgggcgacagaggagactccgtctcaaaaataaataaataaataaataaataaataaataaataaataaataaaatggtgcttcaaggagtactatagatgagagagctaagattgtagaacactctagagatagttgtgggaagagagctcagttactcttcgtatatttatgtgtatgtcactttctttttt

SEQ ID NO: 174490 - DNA, 329 bp, Homo sapiens
catgagctgggcacagtggaagaacagaaagaagacctggagctggatcatggtgagcaagaaagagtgcgaaacgaatctgatcaggcagccaccagatcacgtgaggtcttctaaaccagaggtagcaactcggactttcttctaagtctaactttctcaggtgttgtcgattccatcctgggacaccaagggcacatctcatatctacccaaggaagaaatgtagatcttgcctcttggtctgggggctcccaagatggggtgagatgtgggcagatgctgaactatggcaatagtgatggcaatggaggaggggagagaaaaaag

SEQ ID NO: 174491 - DNA, 527 bp, Homo sapiens
ctttttgctagaaccgttaggtgatattagtttctgaatcagagggtttcacacctgtgtgccactcaaaaccaggtgtgtggaataacccggacaagactaaggtttatgaatgtcattagtgagatgccgaaatagtgtccccggttcacgatcaattatgataacattgtgaaaattgtctttcaggaggctggcagtcagaacaagcttcttcaagagaaattccatattgaaaattgccagcattcatatgactagttgaattgggtttttaggtgaggaggcagtgcaggatagtacaaaggacctaggctttcaagggaaacaaacctgaattgaaccttaactctaccgcatggtgattgtgtggcttgtctgtaaaatgggaataatgatactgctctgtcagcatggttttaagaattagaggcaggtatatacaaggtatatagtcgatgctcagtgagtggtagtctttattaattttcccccatccatttgaagaaggacaataatagtacatg

SEQ ID NO: 174492 - DNA, 266 bp, Homo sapiens
tattactggccattactatgaaagaattagaagcaatcatcttggaggacagcaaaaaacagagaggaaaataggaattcatcaagcctaggacccagactctttcaaagttatctgactgagccaccactttgtattacctattataatccctcttaatcaatcaagctgattttttcccctttcacctgggcctgtctcctcagagtcagagatgaaagggacaaggccaaattgctccaagtgactttagaaccaattactta

SEQ ID NO: 174493 - DNA, 128 bp, Homo sapiens
cccacgtgtgatttgtagccgaaaggggagggtgtctgtgccactgcggcaggcctgctggtggttgtagtctttgctgccgtgaggcagtggcgggtgaggtgctgggtgggtcattttctcctcat

SEQ ID NO: 174494 - DNA, 511 bp, Homo sapiens
gtgtagtcccagctacttagtaggctgaggtgggagaatcacttgagccaggaggttgaggctgcagtgagccatgatcagcgccactgcactccagcctggtgacagagtgaaaccctgactccaaaagaaacaaaacctagagtttgatcacataagtattgctaataataatttcaataacaataatagtagcagcagcaagtggcaagtgcttacacttaggtagcctactaagcttatcgcgttgttggggtcggtgtgccggtgggtgttggggttggggtcaccgtggtggtggtggtgatgggtgccatggttggggtctgtgtgccggtgggtgtcggggttggggtcactgtagtggtggtagacgatggggtcttgccaatgttgtccaggctggtctcaaactcctgaccttgtgatctgcctgccttggcctcccaaaatgctgggattacagatgggagcccacattgcccagccaaaatgtgtgtctcatagaaag

SEQ ID NO: 174495 - DNA, 548 bp, Homo sapiens
ggtggcagagtcagagtcagaaagaagtgatactagaagaagagatgagagagagagaaaaagatttgaagatgctgcactgctggccttgaagacggaggaaggggtcatgagccaaggatagcaggcagcttgtagaagctggaaaaggaaaagaaatgtattatcccctaaagattccaaggtgttgcgtctctatgaacactttgattttaggatttttgatccccagaactgtaagataataaatttttgttgttttaagccactaagagggtgttatgtgcttgtcatcgttttttttttaatttttaactttttgtgttgaaatactttcacacttacagaaaacttatgaaaagagaaaatcacccagatttccattttttcagctacattgaagtatgatcaactgagtcacaagggctagacatttaagatgtagaactcgtatatctgaaattgcatacatctaagatgtagaactcaatgttttgatattagtatatgttatgaaaccatcaccacaatcaagctaattaacatat

SEQ ID NO: 174496 - DNA, 1010 bp, Homo sapiens
gggtaactttcatgtatgtgcttattaggtttttttcgttagaattttcagtgtttctgaaggtggggaggaacatggaatacaggtgaaattaaaccttaaacctggcataacatggatagggttagtgtcttacatggtatccggcgtctgctcaaatgagacaaactggacagctgggtggatgatggtatccatggatttacttcattagcgcatgtctacttttttatttatttattttttttgagacagagtctcactctgtttgcccaggctggagtgcagtggcgcgatctcggctcactgcaaactccacctcccgggttcatactattcttctgcctcagcctcccgagtagctgggattgcaggcgcccgccaccacgcctggctaattttttgtatttttagtagagacggggtttcactgtgttagccaggagggtctcgatctcctgacctcatgatccaccctcctcggcctcccaaagtgctgggattacaggtgtaagccacggcgcccagcctagcatgtctactttttaatgtgattgggccattgtatgtaaggtaatgctctgcttagaaatatagaatgttttcctaggcctaggccccaagtccatggtgtgtgaagtgaaataactttgatgttaaggagttcttttttggtcttttgcggaacacgggagatgatcagacttcctgaatagagaaagcttatgtgcttggttacatgggggaacaactgaagagattcttgactcaaccttttagagcttagtccatgtggcaacgagaaatgggctttgggtttttccacttaaaaactttatttataaaaaggaaaagtagttttcatattaagtttttatttcctttccagcagttggggctagaaagtatatgttggcactagaaacattgttaagatttgttctgtggtgtaggtatgcacattccataggtatgcacacggccatgtaatacctgtatatcccaagtta

SEQ ID NO: 174497 - DNA, 550 bp, Homo sapiens
  misc_feature (40)..(40): n is a, c, g, or t
  misc_feature (97)..(97): n is a, c, g, or t
  misc_feature (136)..(136): n is a, c, g, or t
  misc_feature (193)..(193): n is a, c, g, or t
aaaagccatttctccagagccttcgtctctcctggtgcanagggcaactcttaaggaacaactcatcgcaccagtggcggaagaagaggcaacagtnccaaacaataagatcactgtagtgggtgtcggacaagtnggtatggcgtgtgctatcagcattctgggaaagtctctggctgatgaacttgctctngtggatgttttggaaggcagtttttaagacaaaacacgggagatgatcagacttcctgaatagagaaagcttatgtgcttggttacatgggggaacaactgaagagattcttgactcaaccttttagagcttagtccatgtggcaacgagaaatgggctttgggtttttccacttaaaaactttatttataaaaaggaaaagtagttttcatattaagtttttatttcctttccagcagttggggctagaaagtatatgttggcactagaaacattgttaagatttgttctgtggtgtaggtatgcacattccataggtatgcacacggccatgtaatacctgtatatcccaagtta

SEQ ID NO: 174498 - DNA, 546 bp, Homo sapiens
  misc_feature (93)..(93): n is a, c, g, or t
  misc_feature (132)..(132): n is a, c, g, or t
  misc_feature (189)..(189): n is a, c, g, or t
gagttttccagagtcttggtctctctggtgccgccgggtatcatctgaaggccacaactcatcgcaccagtggcggaagaagaggcaacagtnccaaacaataagatcactgtagtgggtgtcggacaagtnggtatggcgtgtgctatcagcattctgggaaagtctctggctgatgaacttgctctngtggatgttttggaaggcagtttttaagacaaaacacgggagatgatcagacttcctgaatagagaaagcttatgtgcttggttacatgggggaacaactgaagagattcttgactcaaccttttagagcttagtccatgtggcaacgagaaatgggctttgggtttttccacttaaaaactttatttataaaaaggaaaagtagttttcatattaagtttttatttcctttccagcagttggggctagaaagtatatgttggcactagaaacattgttaagatttgttctgtggtgtaggtatgcacattccataggtatgcacacggccatgtaatacctgtatatcccaagtta

SEQ ID NO: 174499 - DNA, 916 bp, Homo sapiens
  misc_feature (717)..(717): n is a, c, g, or t
  misc_feature (725)..(726): n is a, c, g, or t
  misc_feature (729)..(729): n is a, c, g, or t
atgctgagaggagcagaagtatgtcttgttgagaagattcaaaggaggggctacaaagaagaaggtcatcaatatattgaataaggtgagaagcagaggggtggaaagaaagtaaatcaggagaaacagcttggctgaagtaatgagggctgtccatgaaaccttgcagcagcacagcccagggagcttccgagacgattgggcagtgtcagtcttcagccgctaagctgagaagatctgggaaggagtcagagagagttgggccggagttccaggggctctgaaagtggctgccagatgcagaactcatagacatcgagggccatctgtatttgttatcagtgataaaagttgagctttcaaccaaacattagaattttggaaaacatgcacctaccaccaaaatcttgacagattcccagtacttaacctttgttgatgaaattgatgaggagttagaagttacttctttgtgctgatgtggtgatgcatgggatgttacagagccagccacagaaataattgacagctggacccagctcctgtttataaggtttaagtctactacccatctgatatggttaggctttgtgttgctgtccaaatcttatcttgaattgtaattctcataatcctcgtaatctccacgtatcaagggagtgaccacgtggagctgaacagagaagttctgattaactattggcactggatcctggnagggggannaancatgtgcgtcctggacaattttgggacccctcttcatcttaatgtggagttgccccccccctttaaggattttttatccccgaaacactttgtgtttggaggggacactcaggggccaaaaaaaggtgtggggacacacgaaataccgggcgcaaaaatactacggaagaggcctttgcccctcgga

SEQ ID NO: 174500 - DNA, 956 bp, Homo sapiens
atgctgagaggagcagaagtatgtcttgttgagaagattcaaaggaggggctacaaagaagaaggtcatcaatatattgaataaggtgagaagcagaggggtggaaagaaagtaaatcaggagaaacagcttggctgaagtaatgagggctgtccatgaaaccttgcagcagcacagcccagggagcttccgagacgattgggcagtgtcagtcttcagccgctaagctgagaagatctgggaaggagtcagagagagttgggccggagttccaggggctctgaaagtggctgccaggcacaagcttccaagtgaactgtgacttctgctgaggatcttcaccttcagttcactaaacaactatggcttttgacctagaactagaagcagactacatctgttgtggactgctttaactcaagactctggaccaggcctgtatacaaatgaacacttgtgtttattgtattatagccatcataatgattttcctggggatacaggcaattgctactatctgaagcaggacaggacacatgtcagatgcagaactcatagacatcgagggccatctgtatttgttatcagtgataaaagttgagctttcaaccaaacattagaattttggaaaacatgcacctaccaccaaaatcttgacagattcccagtacttaacctttgttgatgaaattgatggtttttggttgaccccagagctgcatgcaagattccaaaaacctgaggaagaaaaccacaactgcaaagcttgaagacctgagcagagattttaatggtttcccaatgaagtttggagtttgaatcttgataatataaaggaatttgttaaatgctttgaactttccatagatattctaggagagcaccccttatatactaagatattttccttaggactaagcacaaaacccaaatggactataattactaaatgtaaa

SEQ ID NO: 174501 - DNA, 1221 bp, Homo sapiens
ggcacgagggagggaggaggtgagagtgattagtgggagaagaaaagcaggcccaggaccaagccctggggactggggacatcctcggtgaccctgtggagcattgagccatgccagctctgtgcctggtgctgtgctggtttcaagggctgttgggagaggtatggaacgccgtggactccgggcactgcctgcagacctactccctgcacacagaggcagtgcgggccgcccggtgggctccctgtggccggcgcatcctcagtggtggctttgacttcgcgctgcacctaacagaccttgaaacaggaacccagctatttagtggtcgaagtgactttagaatcactaccttgaaattccatccaaaagaccacaacatctttttatgtggaggcttcagctctgaaatgaaagcttgggatataaggactggcaaggtgatgagaagctacaaggcgaccatccagcagaccttggacatcctgttcctccgggaaggctccgagttcctgagcagcacagacgcttccacccgggactcagctgaccgcaccattattgcctgggatttccggacctctgccaaaatctccaaccagattttccacgagaggttcacctgccccagcctcgccttgcacccgagagagcccgtgttcctggcacagaccaatggcaactacctggcccttttctccactgtgtggccctaccggatgagcagacggcggcgctatgaagggcacaaggtggagggctactcagtgggctgcgagtgctccccaggcggtgacttgctggtgacgggcagcgccgatggccgggtcctgatgtacagcttccgcacagccagccgagcatgcacactgcaggggcacacacaggcctgtgtcggcaccacctaccaccccgtgctgccctccgtcctcgccacctgctcctggggaggggacatgaagatctggcactgagctttttgtcactgaaccttcccgatgccagctgggctcttggactcccctcttcctcaagggtagatgagaggaacgagcacagaggttggctgtgggtcctgggtaccaccttctgagcctcagtttcctcatctgtaaagtggggagaaaagtctgtttgcctcaggagtgtgaggactacactagtgaaagcgcctggcgggcagccggcgatgcccaataaatgtgtgttttgctgtttgtt

SEQ ID NO: 174502 - DNA, 350 bp, Homo sapiens
aagttaatggtagtcaccctagggatgttataaatctcactttaagactagtattagagataccacatgtgaccatttaaaaatgtttcacaaagaaaatcacaggatatttgccagtcactgcttttcctaaaaccgttctgttcataggaaaggaagtataattgggaagtgaaggaaatgctaaaaatatcccatattgaacatttttgaatttaaacagtttgtaagccattctctctctcaaatttggaaccaagtcaagaaatttcagaaaacatgaccctagcatcaattacatataaccttcagaaggcccccccatcataatggtaccttgaacaatgatg

SEQ ID NO: 174503 - DNA, 470 bp, Homo sapiens
agtcagtaaaagtcattccaactctttcatgtagataatgtagtgtggtttccaaaattcatttttgtaattatctcagtgatgtccacagtaaccctgtcaggcaaacagggtagagactgtttttcatatttgtttgtttatatctccattctataggtgggaaaactgtgttgcttacccagtacaaaatcagagtgtcaaaagaaccaaagttgtatgactcctggtttgaaacccatttcaatatactgcttgcttcctgctagaccagaaaataaaaatactgggaaactattgtttaggatgctctaaggcaaatatatttgcatttaaataatcaagtaagcaacacaatacctagaatgtaatgggtactgattaaatagataattattgagtgactatttttatgaaatatattggatatttgttgaatgaatgaattagtttttaaagatttaatccat

SEQ ID NO: 174504 - DNA, 723 bp, Homo sapiens
gatgttgctgtcaaaatttcatcttcacagtcacaatccaccactgtgactttatggtactcccctgcatcatgggactggaagcaagatggatgtcacaatgctacctagatggctcaaacatccttcaagagggatatttttaggaaaacaaaagtggtctcattgtgtcattttgagatcccagtagctattttttagcagtcaagatattacctcaggtcttccttacttgaggtgccaggcagtgtttatccataacccagtggtgaacagttagcaccactagcagccacaattttttcagcccttttcacatgagagcctatcatgaagttcaataaagacattctaacaaaagagtcaaattcactgacagctcaggctactctgacagtgaatctcatcagaacgaggctccaagtgaattcactgagaaacagacttgtagcgttggacctcagcatctcgttataggatacgaattgtcccatgcatgcaaacagttctgaagtgggcaagcatggtgtgggttgtcatttgcaccaagctcagctagcatacagttgttttatcggccacattctgctatgtggaacccttaagccagcaaggcctacaacttcaacaggattcatatgcctggaattgtgacatcggtgaaaaaaagacccttcctggaattccccaactctttttgttttagaggttaaaatcttggaa

SEQ ID NO: 174505 - DNA, 360 bp, Homo sapiens
ccatggaatgctttttgcagagttatgactcctcatgaccctccaagttgttagagcagattagagctcccgatgactctgctgatgagcagatggtattctctctctgaaacagctggagaaccctggtggtgatggtggggttattgattcagggcctcaataactgctagagtcatcgttgatcccttgatttctctccctccctatgaggaatctgtttgtaaatcgtgtctatcttggaaatatatccagaatccaaacacttctcacttcctcctttactcccaccatagaccaagctgtcataatctctgctgaaacagcctgcaataaggccccccagcttccatccttatc

SEQ ID NO: 174506 - DNA, 376 bp, Homo sapiens
aggagggtgtgttatggtttgaatatggtttgtccccagcaaaactcatgctaaggcttggtccccaatgtggtagtattgggaggtggtacctttaagaggtgatttggctattaagatggatgaatgtcttctccagggaatggactagttcttgagagcaggttgttataaagcaaggtttcctcttgcattttcccttttccacgcctaattccctgtctccaccactatgttatgatgcagatgcagccctcaccagaagccgaccagatgcagctacccaatctggaacttcctagcctccagaacagtaagctaaataaacttctttgctatataaattacccaatctcaagcattctgtgacagcaac

SEQ ID NO: 174507 - DNA, 523 bp, Homo sapiens
cagcaggcgccgcggcaggtttccagagcagctttggactggggcgagaggaggtttcgatgctggggccgaggaggggcgcccacgcaggacaggggagggacaggctccggggagaacagctgagaggaccttggccttggtggaacctggtacgcccagcaggcttgattggagaaggcgccttttccttcagtgacgcctgccgcctgccctatttatgccagggtctcccctccccttcaggccccttgtgtgtttgctttctgtctcataagggctcttctgagccctcccgcctcctcccttctccgcagcctcctcctcgccctggtgtctttcagctccccgccgggctgcctgctctccaggctcaggctgtcctccctgggctttccactgggggcttgggatgctggccgggggggagtctctgaggctggctgcctcctacagttgatttccttgagaagggcccctggggcatcagggaggtccagactcaacctgggctctgcggccg

SEQ ID NO: 174508 - DNA, 326 bp, Homo sapiens
ttcttgggctcatgggggcagacgcaggcaggagctcagggaaattccgagaggactttggggtgtccaggagcactttgaggccacgggcccaggcaacttcctcaccagtacggaacaggggatgcacagggccgaactttccatctgctggcccctgctggtgtccaggagagagctgtgaccctcctttttccttaagtcctggagctgagagtgagaagccatggggtgcacgtactcgtctccacctgaggagcccgctctgagaaggtcagttcctgacactgtccctggcggcagactgccctcatgccccttggcca

SEQ ID NO: 174509 - DNA, 203 bp, Homo sapiens
ccatgcttgccttatctactataccggatacctctctctcacctttggtacattttgggcctgtccacataaacctttcccaatacccgcatcttcagtgtttacctaccctatcctctatcctacctgctgcaggtgggttttgagtctaggccctggcctctcttaggctgccccatccagatgcaagtaaccaagcctgg

SEQ ID NO: 174510 - DNA, 425 bp, Homo sapiens
gttaacatgtcatttatcttaaacctttccaatttctttgtggtgataacgttcaagacccacttttctagctatcttgaaatataatacattgttattatctgtagtcgccccactatgtaatagaacatcagcacttactcttcttagttcatctaactaactttgtagcccttcagaccatcctctccccatctttgccttccctccctttcccttcccagcctctggtaaccaccattctactgtctacttctatgagatcacctctcttagcttccacatgtaagtgagatcatgtggtatttgtcttcctgtgagaaaaaggttgtttcgaatagtaatactcagtcctttctcacaggcaaatcttgactcatttcttattttcctgtcatttcagttcttttacactcccaaaaata

SEQ ID NO: 174511 - DNA, 235 bp, Homo sapiens
ctgatgtgacatgtgcatgtgtggggtgtgtgtgtgactgtgtacgtggtgtgtgtgagtggggtgtgtgatcgacgctgatgtgacatgtgcatgtgtggggtgtgcgtgtgtgtgactgtgtacgtggtgtgtgtgagtggggtgtgtgatcgacgctgatgtgacgtgtgcatgtgtggggtgtgtgtgtgtgtgtgactgtgtacgtggtgtgtgtgatcgatgctgatgt

SEQ ID NO: 174512 - DNA, 774 bp, Homo sapiens
agggccgcgtctgtggaggagcttggctccgcacctgctgggctggcgaacccgaaattgggcttggaacccgggagccagatcttggaccctgaactgcacctctgtcaagagcccagaggagaaagaatggctgtttcagtagcaatgtccaagctctgcattctccagactctgtgctttcctaagataggaacccagaagaggactgatcatttcttgcagctctaaaaaccatggctcggaaattagtgatgttcagggatgttgccattgacttctctcaggaagagtgggaatgcctggactctgctcagagagatttgtatagagatgtgatgttggagaactatagcaacttggtatcactagacttgccttcaaggtgtgcaagtaaggacttatctccagaaaagaacacttatgaaacagaattatcccaatgggaaatgagtgacagacttgaaaactgtgatcttgaagagtccaattccagggattatttggaagccaaaggcaagatggagaagcaacaagaaaatcagaaggaatatttcaggcaagggatgatcatatatgacaaaatgtccattttcaaccagcatacttacttatctcaacattcaagatgtcattctactgagaaaccctattaatgtaaggaatgtgggaaagccttcagacgagcctcacacctaacacaacatcaaagttttctactggtgaaaaaccctatgaatgtaagcaatgcgggaaggcctttagtcgtgattc

SEQ ID NO: 174513 - DNA, 539 bp, Homo sapiens
agaagaaaactgaggccctaattaattttcagtaaaaagttaagtttttcatacaacttgacaagaggactctgaaattcacagagtagtaacaaggccaggcattcacaatgcaatttgaagaaaacaggtggggaagcttatcttgctagatattaacacttacttatatagttgtagcaattatgacagtatggtattgttatagaggttatacaaatacagcaatggaagagaataagcaacccaggatgtgtggaaacctgatttgagataagtgacattacaaaccacaaaaacaagtttaactcttcaataaatggtgctagaacatagttgtttgtatgtaaaataataacaaatgagagtagatccctttctcatgcacaaaaagtaagtactgggttgagtaaagccctaatatgaagaatataagtttaaaacttttagcaaaaacacaggtgaatacctttgtgatttaggggtagaaaaagatttcttaaacaagactcccagaacacaaattgtaaagaaaaaga

SEQ ID NO: 174514 - DNA, 329 bp, Homo sapiens
caaacaacagcagtttaaactacttatttctctactcacccatgtagttaaaatatgtcctatttcccatcttgagataaatatgacctaatacttgatatggatattcctttatatagacataaattcttttcttaaatataagcataatccctttaaataaataaataaataaataaataaaaaggagacacggatgcagaggagaaggccgtgtggagacggaggcagagagtggagtgatatggccacaagcccagggaccccagagtccccaggagctgggagaagcgggaaggatcctcattagtccatgaaaatggactaaa

SEQ ID NO: 174515 - DNA, 475 bp, Homo sapiens
cacaaacacacactcacacacccttcccataagattgttgtgaagattaaataagataatgtatgtgatgtccccaacagctctttaaagcaggagtcagtcaacagaccccatcaaggacaagatagtagctacttaaggctttgccagtcatgtgacctccatagcagttactcaactgcacagtttgaacacagtagccatagacagtgcataaatgagtgggtgtggttgtgctccaataaaagtttatttatggacatagaaatttaggtctcatataatgctcatgtatcactgagctcctggtgttctcctgcatgacagcttagctttgtctgaccctctcagccctgctccagcttccgcagctcctccaccgcctgaaccgcctccattgatgcatctgttcttgttctccttgtagtaaattttttgggaagggtggtccccctgtgggggggcgtttttgaag

SEQ ID NO: 174516 - DNA, 266 bp, Homo sapiens
ctttatcctcctttgcctttccttcttttctcttattcctcctcctttgttcctctcctctctccctgtctctgatttaaataatacaagacttaaaagactactataaaatttatattcaacagatttagaaactaatagtaaggaaatgatttcttcacagagcattcatctcctgtctggaattcaatagttctgaaggttctgtgtcaaatgtctgagcttgatttttggaccagactggtcatattaatagtattcatagt

SEQ ID NO: 174517 - DNA, 492 bp, Homo sapiens
agcggaggagaggatttgagccttatgtattattatacttactgtaattcccaagaaagaatggggggtctctaattggtcctacagagttctcaaccctgtttgctcattaaaatcacctggggagtttctataaaactacaggaacttaggcctcactccaattaattgctctcttcatttaaaaggcaaacaatccaaaaagctctccaaggttaaaaaaatctgtagcttaaactaatcaaacctcaagaattccaggttgaccaggtacagtttttctaattggaatgtgggcagaggcccactcacggcaaattcagggtgaagtagcacagataatatgcaaatgtgcctgtatgggtatgactgtattctaatgcaactttatgtacaaaaatatgcagggcagatttagtagcgctgggatctactcgaagcaaggttccaagcacaacactagtatgaccggaggctcaactcagaagcgct

SEQ ID NO: 174518 - DNA, 294 bp, Homo sapiens
ctggcatagtgccttgcacactggagtggcacagtaaatagttttggaatgaacaaaaagaaagaaacctccttgaataggagatagtggattcgacttgaacatatagactggttctctgacaaccacaggatttaaggaacatttgtacagcattgtatagttggcaagcacttccatacatttatcgtctgtcagccaagtgtcaataagtttagttcactattgagtaaattgtccttaggaaggttacgggattcatcccagattttttaattccctactgtatggaat

SEQ ID NO: 174519 - DNA, 293 bp, Homo sapiens
tgggattacaggcacccgccaccacgcccagctaatttttgtatttttagtagagacggggtttcactgtgttgactaagttggtctcgaactcctgacctcaagtaatccacccgtctcggcctcccaaagtgccggagttacaggcgtgagtcaccgcgcccagcctgatatgcaaatattttaaacttctatgacgttccactttatctatttgttcttctgttgcctgtgcttttggcgccatatccaagaaatcattgccaaatgcaacgtcaggaagcttttcccct

SEQ ID NO: 174520 - DNA, 587 bp, Homo sapiens
catgtacagattggtattaagtgaatgctcaaagggaccttatgcaggtatttgagtttctttatttgagtatcttcctcctctctgctaccctgtctcacctctgcctccccatagcccactcttctcaattcagctagatcaccatgttgtgcttggattccccctccctgcctgacagtatgaaaactgcctccagccagaaaacagagttgattgcacaacttacttcatttttttcctatctcttagggatgccagccctgcacagccttttgtcctgatgtccaaagccagttgttttgtctgctttgtccagctttctagttcttttggcaaaaaacaaaaacagaaacagacagcataagttccatcctagctactccttcatggctggctgcagaaattctgaaaactgttttctgtgtttttaaaatcactttacttccttgggactccttagaattgtaacttgagaaggtccaaacagataattaaaccacctgtgacagatacgtgctaagcgcctgccagtgccggatcctgggaggctgacagggatatacaagagcccctgggcttggctt

SEQ ID NO: 174521 - DNA, 173 bp, Homo sapiens
tttgtagacatctaaactgatcctactaaatcatgaagcatcataaccaaataggatataaaattgatctgctcagtcttcaaagtcaatataatggacagcaaccatatatggttaaaagagaagtaaaggagggagggagaaaaggagggaaggtgaaaggaaactgttcc

SEQ ID NO: 174522 - DNA, 754 bp, Homo sapiens
gactgcattgctatttcaactagacacgtttacttttcccgcaaatgattactgagcacctatggtgtgcccggtaccatgttagggcaagagatctacctcatccttgcattgtaaacctgtagcatccgtggcaatgttttacaccactgccctcccagggttcctgcaagctgactccttttattttccttgtgcatgctgatgtgttcaaggtatttcagtgggctactgtgagactatctccccatcaggatctctcaaccttggcactaggaacatgttgggaaaagtaggtctctgttaagggaggaagaggggctttcctgtgcgtgataggatgcttggcagcatccctgtccagtagcaccacatctacctcagttgtgacaaccaaaaatgtctgcagacattgtcaaatgtctcctccctattttacatttaccaaagtgctctttatgtcctttacagttaaggaaacttaggaccaggaagaaacttgctcaagtcaaacagtgagttggcggtagagctttagctacaatttaagtcttgtcttcccaacccagtgtccatcttatggatccattcagtggtttgctcctaaatgcttaataaccaattatctgggataaacgaaagccaaacaaacttgctgggagcgtgggacaatttccatggtgtaaatacttccaccatggctggtttcaagctacttccatggcgtcactgaatgtgaagttgggaagggatc

SEQ ID NO: 174523 - DNA, 768 bp, Homo sapiens
ggctgcagccccagctggagagcagggccctgaggctgggctcttcctgggcacaagcctctgcccagagcttcctggcggggccctcagctcctcttctccaaggcctggaaacgagctccatggggctgagaatcatctctgtgtgtgggagacacatggtcaatctgagtaagcggaaaaaatggtatcaatataaaagtaagatataaacacaactcctcaacaaaattaaaacccacagaaagggaacctcacatttcactcccacctgtctgttctcccctctccttgagaagtaaaaacaaccactgtcttgcagtgtgttgccgcagaacttttcttacaaagttacctaaatacggtggcttcgaaaaacgtgcttagatttatgttttttacttaaatggaaacgtactttgcacacggttgtacaacttttttttgcatatttaatattcagaaatatgtcttggcgttgagtttcgagatggcttgtggcgagccacgccgtttgccctagggctgcttggttaccatttgttgcagggctctgtggttaccaggagcctgtgtgaccactgacttcacatctgcccttcgctgaacgtgtatttctagaaaaaatccagtgtcaaacttgtcccacactccagtgccagaggtgctgagggttctcttgggcaggaccgttcagcaaagtccacagagcaaaatgggagcttggcttaaagggtggcagagcagggggggcgccccctcatgagc

SEQ ID NO: 174524 - DNA, 585 bp, Homo sapiens
ggccaggctagtgaggcacagagaaaacccacaaatgtagagtatgtgacacagcacaaagcagtcccatgccaaactgatgcaatggcattccaagtttagagttccaccgcttgagaccatccaggattcttttaccaattacttgtcctactgtctcctatctatttcatgattaccagaaatccttcccttttcctctttgtcacttacagggagtttgagcgatttagggcgctgatgaaggaaataaatgaccacaaggtggcgtagcacaataagggttatggggtgattctgtgacaggtttgcatgaagtccctcacagcccgagcctgtacagaggttatggccactggtcaactattcggaagggcagaacgacaagggaagtgctggggcatcaagacgggggcttatttgtctaggtgatgtcattcagcagcaaagagaaaattctctgggtcagagaactctgaagggcagcagcagcagctttgggtattttatggcctggggcctaacttatctattccccaaagatgaaagatgtagtaccaggttttctggggtatgtaaagcagg

SEQ ID NO: 174525 - DNA, 833 bp, Homo sapiens
aataagctatgattgggctgcccttgggaaaagaggatctaggatccagttggtgcagcttatggcttgtccctgtgtgtatagttgttaaattattcttttatttttatttttaagaagttattctttagataataataggcatgtagcttaaaaggaaacctcaaaagacacaaaggatttgtctcattttaaattaaaaaaatactgtatcagcatcaagtaattaaacatttgttggaatatcataacttcttttttctttatgtatgttccctttcctgtgcttacgtattttcagaaattttagttggtgtgcataccacaatttgtattttatacttaaatatacatttcatggttgtatatttatttgatcaagttcttttatatcaaataacagagcttggcattggttgcttgtcataactcggcagtaagcatttttaagcatgaagttattcttggttgaattttattcttgatatggggcttaggagtgagatttctggtctacagaaatgatcatgtcatgaattttgacatttatcgtcatgatgctttggaaagggtggaccaatttagatcatcttagggtgaatgagtggataattaactacaactactgatgtggtggtgattcagtgctattggaggtaaggctaattacttgttgggtaggtgattcgaggcgaatgcgataatgcgtgggacgcctggtgacaagggggatactttgtcatgttcctaaaaaaaaaattgggggcaagttaatggggcaaaaataggtagagaagtgaaaggcatttattcatcggtttatttgatgaatg

SEQ ID NO: 174526 - DNA, 301 bp, Homo sapiens
cagttttaatttctttgtaggacctcagtgtaaagtgtggtggcaaggaaggatggaaggtgaagagaataattagagtcaggactttatcatgtttgtaatgtggagggaaggagtcactagttacaggggtaaccagtgaagcaaggtctaggagagaaggggatttcctcttggatggaaagacctaatcttgagcaaaaggaacactttctgaaatagaagaaggcagcaaaggaaaattttagatatagatatgtttttaggtatgggcatgagaactgactttactatagtttgc

SEQ ID NO: 174527 - DNA, 333 bp, Homo sapiens
tggaggggtggtctttgaagggttgtgtgtaggggagacagggcattgatacttgagcctttcttgaaagcctaggttggaatcttggccctatcatttattcaattcattaaaatgatactgagcatctgtcaggcacagtcctggaaactgtgaatacaaaaattaatgacacagttcctgccctctaggagcttacagtttaatgggagactcacggaagtttgtgattctcttaatttgtcatcctgcttccttatttacacagtagccatggggaacttttttttttttttttttttgagacggagtctcgctctgttgcccaggctg

SEQ ID NO: 174528 - DNA, 314 bp, Homo sapiens
ccaacagcttcctattgcaaccagattaaagccaaggcccatgaacaagacttgactgtaccctcatctcatcccaagctccaactccccactaaccagccctcaagcctgcctcagagtcttagaatatgctgacagttacacttctgcccctctctgtttgcaagactaaactctatgtatgccttcataactcatcaaaacttaaatatgtgtccctggccctcacagtattctccactgtttgtttccttgacagtgctgagcaccaatgaatattatatatttatttgtttgatttcttatttattgcc

SEQ ID NO: 174529 - DNA, 635 bp, Homo sapiens
ggcaagagctatgacaggaggagctataccgggaaacagctataccggggcacagatatgaccaggaatcagcttatgactccgcgcattacatatatagcgagatacacagctccatcaggtagagcatataaggcctcctgccagtaagttcatgttcttgtcatgcagacctctgtgcaactgctgtgtctgtgttgcccttagggtcctgagggccttgcctagaataatcctcatataattcctccgacaggaaagctgtgctttcttccatggctgcattctaaataacaaaaagtagagaacacgaggctggaaattcagctgtacagcaaattcctggaagtaactcctccgtggacttaagaatgcggataggtgggcctcccacgcccaccaggcacccactgcattctcagcctattgttctatgactttaggaagcaatgatccctttctgaaatcttgagtatagaaggaaattactagttcttggtgttctagatctcacttttcagtgttttacctgcccacttatagaaattaaggaagaaaagactcagtactcactggtacattttagtgggtttctttgttgtgtttattgtaactgatttcatatttgtcatgat

SEQ ID NO: 174530 - DNA, 205 bp, Homo sapiens
tcatcttgccaactgactccaacataaatgaactcatcagcattctagttttttcagttttattatgattcaattcttgaagtatttggcacttctgttatgctgattaaatcatgtttctgaatctgcaaagatggggagcagattcaggaaaatcagactacctagacatctctaccctgctatagtaattattttgtttcag

SEQ ID NO: 174531 - DNA, 445 bp, Homo sapiens
ggggaagtgtgttctggcagtgagaaccaaaacacagagccagagctcgaaggggctgggtgtgctggagggagaacgaggagtacagttctgatggggcggttggcaagtgacaaacacgcctggctgcttgtttaaagcatgattcccaggcccctccctggagcttctgattccataagtctgaatacagactcgtgaatgtgtatttttaattaagcacccaacgtgagcattaatgaacaggtacatttggcaaacactgcataaggacccagtaactaaagaacaccctccaataaaactctgccagggggctccaccaacttagctgaagttggaaacagactcacagaggtagaaaagatcaaaacagtggtcttcaacccttcccacatattagaatcacctgggacacctttttaaactcccgtgctgggctgca

SEQ ID NO: 174532 - DNA, 698 bp, Homo sapiens
tgcacagttctgatgatctgccttactgtgagtataaatctgttctactcttgcgtcctagtgtccctggggagacaagaggccttccatgcgaaggccctggacataggtgaagtacccattacccagatgtctcaccaaatcccaggtatttgactgctctttaatgagccaccatatacattccaacaaagatcacaagatgcttcaacaagctccttaccagaagcagggaagccatcggctcttttaactgatcactcagctattgaggaagtggtaggaatttctaaattgttgtcaagacaaccaaagtccaaatataaatctctttgggattccatcaggaagcatttttaagtgcacgcacacaaataccccaaggagataacaaaacaaaggtcccctccttctctttctcctcctccccactctctcccttcctcctgcttcttgccacatggtgatgtgtgttaaaaatgcatactgggaaacttttccacctttggggttgaagcagctgctgcctcagtgttgtttttgttaagtattttttgttgttgttgttaacatactttgttgcctttaagcttcatgtttcataataccagttcagatcacaaagtgggacgaatgacactttcctggtaagaaggaaactcatggggtcctgcccaagggtgcttccccctatcaag

SEQ ID NO: 174533 - DNA, 665 bp, Homo sapiens
atttcatgcgaacctcaatcctctacttttgccccatctcaaaaagataagaaataaataagcacaatagaagagacaaatattcctgacagaaaaatttcaaatgccctctgtaggtactcctttctccaggggctacagcttaattcctgctcctgggctggagtgtgggctctgcttggtgagctgctttccaaagagtagggcgtggaaggaagagaggggtgtaactttccagtggagagtctgcctaatactgccttggccaagactcaaggttaacatccccaaagataagtcatgtgatgggggaaacatgtctcctctgtgctactctctcctaaaacccacaaccccagtctaaacagcgaaaaacattaggcaaatcccaactgaaggatattctacaaaatactcaaccagtaccccttgaaactgtcaaagtcatcaaaaacaaggaaagtctgagaaactatcatggagtggaaagttctacagagacgtgacaggctgggtgtggtggctcacgcctgtaatcccagcattttgggaggccaaggtggtgggattagttgagctcaggagttcgagaccagcatgggcatcatagtgagactccatctttacaaaaaatgaaaattaaaaaagagagacatgacaagtaa

SEQ ID NO: 174534 - DNA, 195 bp, Homo sapiens
ggggactggccagtttgggcaggggggtgcagggcactaaccactattcctatctgtctgtccctcttcctcgagaatcctgttgctctgggcaagagtgatttttaccgggggcatcagcatgactgttcaagatgatatgggcacccaggatgttgggcagggtggtatatgtattcttgtgcccaggagggc

SEQ ID NO: 174535 - DNA, 192 bp, Homo sapiens
tgcacacgccgagggcccatacccccttggtgaccaaatcacgatgtgacgaagttgttgctgcacactgccgaatgcccacactaggtacttaggaatccagtcattcaggactgcacaagaacggccaagcaagatccagaagttcaccactcgtgtccttacacgaaaaaaatttactccaggagggat

SEQ ID NO: 174536 - DNA, 518 bp, Homo sapiens
tcacagtaaagtttaagttataagtttctcccaccacaaggggtatttgcatttaagagtttattaacccataagaacagtgagcagattttgagcagagaaatcctttgtactttgggctacaagaactgggaactctaagaaatattaataacttagaggcagttgttaaggaataaaggaatccagttaaccagagtgatgaataagcagttcttatagaaagaagacagacaactatataatttctctattcaagtggcaagaatttccattttgactggaagaggcaaaacaaggcatgatggctttcccaacatgaaagtaattcatacatacttgtgggtggttgggagtgggcagatgggatgtaattaatggcagtaaactagtgaaaaaatggggtagatctatattactaagaaggatatttaaaaagaacaagtaacaatgttaaatatgggcccatttacatttaaaagacaaacacaaataaaatgatacagaaagatactcac

SEQ ID NO: 174537 - DNA, 335 bp, Homo sapiens
tgagggcccaggcctgattacctggacttctgaattccttaatcacatcatagactgtatcctcctcctctccctgaccgttgctgctagtaggtagccctcaagagggaatcatttgcttgaagcctcaaaacttattaagcctccacaaacactgaagactgcagtgctacacctggctgagggggttgtgtgtgtgtgtgtatataataagttttgcgtttttttgtcaaggatggagtgtcactctgtcgcccaggttaaagtgcaggggtgcaatctcggctcactgccagttccacctcctgggttaacaccattttcatgcctcagcc

SEQ ID NO: 174538 - DNA, 265 bp, Homo sapiens
cctgactttacggccacgcccggccgagagcgcgtgccagcaaggctcgctctctctctctctctctctctctctcttcccctctcctctctctctctctctctccctctcctctctctctctctctctctctctgtcacacacacacacacacacagccaccggaggcgtcctgagcagcagcccactccctgtcccctgcaggcgtccgacccgaagtccacgcgccggaactcggaccaggagccagaggaccccagcgcag

SEQ ID NO: 174539 - DNA, 597 bp, Homo sapiens
ctaatttgcaggatgttaaacaactggatgaaatgttatgatttaatttggtcagtataaataatcaaatattgggacaaataatttaattcatttagtttattaattatatttcctgtctgtatcttttattgaacattgtttaaacataaccttaaagtactgataatttgcttaattttcaacacaaatttatctgacaaattctgtctatagtaacagatggtcagaatgcagataaattgtgtgcatctcaatcagtaaaaataatattcagtaaaatgtctataaatctatgcagattaagttgtgaaaaacaatgcaattttagtactactggattagatgcagtaaaggaatccctaaggaagtttacaataatatatttaattaaaatctactggcaattagaattttaaggaattcttttctaagaagttggagaacctaaaatagcttgcttattcgcctgggtactctcatgaagtaaccatgtacacctaataaagaaatagtaaaagcacatataatgaaaaataattaagatttcttacacctgattttttcattatcagagataattatcagagataattt

SEQ ID NO: 174540 - DNA, 364 bp, Homo sapiens
ttcctgttggcccgatccatactcgtggctttttgccagccttggctgcattgtggcggtgtatttcccttcggccgtgccttctagctggccgtcgtttatcacaactcaagttttagctttaaaggcaaagaaccagcacttatgtcttaataccatctctaaaatcagtctctagtgatgacagatgcaggtctttttattgagaactgtcctcagaatttaaattgggttttttgtcaaataagttcgcttaaacacacatacatcttgagttatcgaatatagcattttataatgatatattgaagaataaggtaaaaagcttcaaagctggacattttcccactgtgctatatagttg

SEQ ID NO: 174541 - DNA, 188 bp, Homo sapiens
tttctaagtccttgcttgatccgtgaagatcaaatagttaaatactgggcatttgggctttaacccttagcggttgatgcatgatggtgttgattagtgctttgagatgtgtcaacctttcttttttatactaacagcatcattttgaaatttgtggtgttgtttttcttttgagctttgtttgctgt

SEQ ID NO: 174542 - DNA, 180 bp, Homo sapiens
tagccggtccggttcaaaaacgggtgatgttatttggcataatgagtgacagaaattctacgcttatcctttaaggctattaagtaagttgtatgctgacaaatgcatatacctctcatgacatgtgtctgcctgcctgtcactcatcagcaggaaccacatggtcaccagatgcttgtg

SEQ ID NO: 174543 - DNA, 233 bp, Homo sapiens
ctacataaattcacagggaaccgtatccaacacatcctaaacagctggtgaggaggacgtgctctgggtggctcagcttgactctgggcttcataaaggcattgctgttgatgcacacgaagggtttgaagagaaattattttgtaagctgggtgtgggaaatagtattttatagtcaacaggatttttaagtatgtgtatgtaaacaaattaataaaacctacaaatcgtga

SEQ ID NO: 174544 - DNA, 364 bp, Homo sapiens
gaactgttcagagtcagtcttttcggcaagaacttcagagaactgtgacactggttatgatgtgattttggggggtttcaggtacctaagcatgatttttaaaatcacttctctctttacatatttcgaacatatgtttgctttctacactttgcagattttatttaggatttaattctttaaagactatattcatttagtcactatagtggatctcttctactgcaagtattcatctgatttttaaattatgtaaaatgtaaatcagccaagtatgtcatccgttatagtttccccatgctttcagcgcatggccatgagatttttacatgtgcataagtatttagccaatacacattttgct

SEQ ID NO: 174545 - DNA, 150 bp, Homo sapiens
gtgcccatgacaggcatgtgtgttgtatgcacgtgtttgttgtatgttctctgtacatgtgtgcatgtatgtgtgcttttgtgtgcacctgtgcatttgtgtgtgggggagtgctgaggtacagagagcagctccaaggtaggaaagaac

SEQ ID NO: 174546 - DNA, 1060 bp, Homo sapiens
agataaatctttaattgggagtgatgtttcttatttggcctatgaactgacagtggatttccttatgttttgaaataaatattctgtaatttgggtataatctataggtgagtaattgaaccagccacagagatcccgttagaaagatggctgcttttttgttgcatggtcacatttgacttagagaatcctggtgagaccgagtggttagaggatctgagacatctttcctacttctggattgtcactgaaattaccttaaagaaagccttgataggctgggcgtggtggcgcacacctgtaatcccagcactttgggaggctaaggtgggcggattgcctgagctcaggagttcaagaccaccctgggcaacatggtgaaacctcatctctactaaaatacaaaaaattagccgggtgtggtggcaggtgcctgtagtcccagctatcgtgccaataatcccaactactcgggaggctgaggcaggagaatcgcttgaacctagaaggcggaggttgcagtgagccgagatcacgtcactgacctccaacctgggcaacagagggagaccctgtctccaaaaaaaaaaagaagaaagccttgataatcctgtatatgtacttggggaagcgataatgaagaaataatttaaaatggatgagggggttatgcagctaaatgtagcatcttattaagggctgaaagttacctgaatctatttgagagctaaaacattttgttcagaaattccaaaatagatgccaaattggaatacttcatttcagactcccaagagctttactttttacgcatggttttgtggcatgtccttggttgaggggatggcgagaagagtggcctctttttgaatgattctcatttttgttgttgttgttgttgttgttgttgttgttgttgttgtttttctgagccagggtctcactctgttgcccaggctggagtgtagtggcttgatctcagctcactgcaacctctgcctgcccctggctcaagtgatcctcccacctcagcctcccgaatagttgggattatcggcac

SEQ ID NO: 174547 - DNA, 976 bp, Homo sapiens
ggcacgaggtacaggaagtcaaggtcaggccatacccaccacagttcgggcagccatagaggagagctttcttaacggtctgctgggacccaagtgggcctcccctgggactgcgtgctcccctacagaacctgatggctggaaacactcacactactgcctgtcccggcatctctccctccgccgcaggggctgatgctgccacaggacacagagcagcaggccccagaggcttctctgcacctctgctgcctttctgagtaatcagaggaggccacacccactccaggacacccacacgggccttctgggcgatgacgctcctggcccaggagtggggggctgcctcacacctgctgctgtggggcagagtctctcctgggtcggggcctcgctggcggatctgctccatgtcgtgtgatgtgctgcagccccgcgtcaccgagagcctcttatgggccaccaagtccacacagccactggccatggggcaccctgcagggcctctggacacggagacctgtggttctcagccagtggtgattttgtgtccagggaacacctggccaagtctgggttcaattttgtttgtcacagtttaaggttggggtgtcactagacatcctacagtgcacaggacggccccacagcagaccagccccactgtcagcagcaccgagccgggaaagcctggtctggagccgtttctctctagggtccctgctagggaacccctcactgccatggagaacccctctcctcctgtctctcaggactctccgagggtcaaggatggatgcctccccatcgagggccaaacaaactgacaaatcgagtgggcaaacggcttactcaaaggccaggagcagctacccgatgactgctccctcgacctctctcttctcactttcttccctattccatcctttgatgggtggcctgttacacgtttggaaataaaaacaagtgggaaaga

SEQ ID NO: 174548 - DNA, 332 bp, Homo sapiens
aaggacatgaactaatcactttttatggctgcatagtattccatggtgtatatgtgccacattttcttcatccagtctatcgttgttggacatttgggttggttccaagtctttgctattgtgaatattgccgctataaacatacgtgtgcatgtgtctttatagcagcatgatttataatcctttgggtatatacacagcctttcttgcagcttctgcagcctctgcctgagagatccgctcaatgggccatctgctcggaggcctttctgcaaaagctttaagagttccatttctccagggagctggaagctggggaggtgtcagctcca

SEQ ID NO: 174549 - DNA, 425 bp, Homo sapiens
atctgtttaaagaaccaagtgcagggctgatgaggttagagaaattgataaggcgccaattgttggtcagatgccctggaaaacagatccctatagtttgatccagcattctagtaggtttagatgcggtcgctgacttcagtgttaatgatctgatctaagagcattggtctgttcagaagaacctcagaataccaactggaaagaagacaactcattaacagtgacttgctcaatattgcacatatggaggacatagttagtctcctgagttctgagtattctgactccctggtagtaccaagctatgtcttttgcgtttcaaagaaacgttaacaagtaataattttgcgttattttcatttttcatacagtaaaatttactgtttgtagagtacaggtttataattttgatagatgcatgg

SEQ ID NO: 174550 - DNA, 267 bp, Homo sapiens
tccaggtttgtagtttgagagaaggctaggctaggcggaaagcccatgtcctccaaactcaatgaccacttcaaaaaggctgggcctggtgatgcagtattgggactaagagaagaaagatggtgttaggtctgaggaataaaagaagaaaacaaaaacagagggaccagagttctaaagcacatttactgaatacccacatctaaggaatgcaaggatgataagcccaaacataaagaataaggcagatactgtgtcgggtgcagt

SEQ ID NO: 174551 - DNA, 368 bp, Homo sapiens
cctgcaggagcctctctcctcagcctccacggagcgcgcggcgctgcttgacggccacgacctgctgaggacaaacggtgtgtgcagagccgggcgcctgggcccccggggcgtgaggggcgggagtttctgagaccccggagatggagtctcgagtgcgtgggggccctatggtccctgaggctggaagggggtcccctgagtcctcccaagtgacccgaggggcatgcattttggggcgggggtcgttccagcctcgaagcagacggcggcgctgggtgccctgaaggaggaggtcggagactgccacagctgctgtgagggggcgcggtcgaggctgtgggcgcagggatggggtcttgcggccg

SEQ ID NO: 174552 - DNA, 407 bp, Homo sapiens
atgctttgttgtttggatatatcggacgatggggattctcgctaagatgatgatggatagtaataaggcaaagacgcctgctagtctgttacggacagatcagagaattgtgtatgcgaataagacatatactcctggcttgatcgttgggacgggtgttgaattcatctaggatttagcatctcccactttaacagggacacagtgacacctgctcctgtagtcacagtggggagaggggagcagagctgtgggccaggggcctgctgagttccatgaactgacatcagctagttcgtgtgttggatgagacttgatgaaaatgtgtggttttttttttttcttatgaaaaacttttcagagttcttgtttgcaaatgcagggtgttaggccatgtatgtctctaa

SEQ ID NO: 174553 - DNA, 1007 bp, Homo sapiens
gggaaaccattccagaaattctcataaaatctctggttccacttttacaagtcgagactgcaacaaagagagcgagtgcccaaggtcacagggtggcgcagccaggattagaacctgagtcctcatctgcctttcctctcggtggaacatgggatctgaccgcagctgcttcagttacatgccctgtgccaagcaccagagtcatatttttgccacccacggcatggcttcctcacatcaggaagccaattccagagagaaaataggttgtgcctgaacatctagggttgagaggttaaagggttgcaggaaagcagttagtaaccacactctccatcatttttgctgttgggggagaaatcagtattatagctcttacattttgcaatggcatttgtactaatatgaagctttctccctccctctctctgctaatgggctggtcataaagaatgaatcaagtgtggagaagactgctttcccagacctcatctaaatcctaaaatctgccgttgacccacaggtcaaagctacttgccacatgaagctgcttttttctctgtattctttctcttttacctagaatgcctctgttcatataacatagagaagtaacacacttaatcttaacacagtaaacatctggctttttgtcacaggcagaattcttggaaggccgcagtcttgagagtccaggggtagaaatcagaaaaggcacaggcctgcccttccatgaccctgaccccttgaatgagtctctaaattcatctaggatttagcatctcccactttaacagggacacagtgacacctgctcctgtagtcacagtggggagaggggagcagagctgtgggccaggggcctgctgagttccatgaactgacatcagctagttcgtgtgttggatgagacttgatgaaaatgtgtggttttttttttttcttatgaaaaacttttcagagttcttgtttgcaaatgcagggtgttaggccatgtatgtctctaa

SEQ ID NO: 174554 - DNA, 242 bp, Homo sapiens
aaccaaaattttaagagccatctgagattgaaattagaaacaaaaacagtaacacaataaagcatcattttacctgtgtgcatacactgaacaccaagttaaatgatgaaagttatgaagacactcattcttgacagcaaaaatccctggtgaacagtgacagatcatgagaaaaccaagacttaatgatattttaggtacagcttaaatatactttaaaacaaaatgatctagccaggtgc

SEQ ID NO: 174555 - DNA, 467 bp, Homo sapiens
tgatgaatacttgaatgaatgcctgtatcctgggacatatatagtgtcaccatgcccaggtctcctccacagatggagtcactgagacccaaatgacccacaggctgtgttcaggtcggtgctggaacctggctctttatacccagggctggttcccctcccacctccctgggctgcaccgcaccatgccgcctcctctcagcaagcccaccctccccctgactctgctggaagatgggctgggtgtggggggtgttaacacagccaaacaattaactggaatcgcacaaaggaaaggtggggagagggacactcttggcaacgcagcagcgttaggagagatggatgaactttcccacttcaccggcgccacggagctgacagtaaatatcagaagtaatgatattgactttaaggtattatggttccaaatgtcacttgtgctttcgttctctttctctctttta

SEQ ID NO: 174556 - DNA, 404 bp, Homo sapiens
tcggggatggccaccatttgtgtttgctgcctggtggtgtttgcagctgcgagaagggccttggaggaggagcaaagtgtagtggtatctccgtgctgtggccttgggcactggggtgggggttagatgagtaattagctgaatatgacctcacccatgaagaatgtgcccttgctaggtattagcagaggtttaggctccagggagccattgtcagaagcttgtcagtgatgtcatcagctggaagggccagctttcaggcctcaggaaaaagcttgaaagtcagggctccagttttggtaataaatgggaatggagtttcacaggtagggtgtggaggaatttattgtgacaggaagcctgatggagcctcttgcctgtgtgcagcccccagccaggtttct

SEQ ID NO: 174557 - DNA, 437 bp, Homo sapiens
agcaggaaaacaaggatttgaatgttgacttacttgagtctcagtctattttctatactataatggcatgttccaaattatgtcttttagaatattttttctgtggaaatatatgctacataaaaaaagttcattgtcaaactggtagatactgatttaaagtctttcttataggacttctcagtgcctttagtatctttatatgagctatcaattttgaagaaagcatattattatttgagtgttccaaacttattttccaaagaatgcacatgtgccatgaaatataattttgggaggtacattccacttcagaatttaagtaatagaaaaaaaatctgtaaaaattagctgtttccattagcaacatcaagaaatctaggtactcagggcctcaattcaaaagcagagaattaaatattcaaatagagaagaaa

SEQ ID NO: 174558 - DNA, 643 bp, Homo sapiens
tcttactggaagattatttgctacatgaaagcagctgtgacaggtgtgagtttaagataattccaaaacattttatggaacttagtgcattattggcctaagcctttttcaaaaagtccctaatttatgtatcttggttgcttcttcctccttgtgctgcatgaaagcacaaaacaactgtgactacttgctgttaagtttattcatttcacaagtaatttatttaatactttctgtgcaagatattgtgctagtcactgtgggggaaaaaaaccctacaactgtgactcaggatattgccctgaaatttttatagccccatctggcacacaaaaagcacacaaatcaaataacaatacaagatgatatctgatgaaactgccaaacgaatgttaccatctgtaaatcctggggaagtgctagcgagcaagaaatcactgctggtgctttgggggagctgggccttgtgccttgatgataaatgcaatttgtataggtggacaggatagggaaggtactctatgaaactgataagaccctcccttctcacacttctgctccctcaccactcccacttagcacaggtgaataatgattaagtgcttaagtttttcctccattcacatatttgttcaaggagtgg

SEQ ID NO: 174559 - DNA, 431 bp, Homo sapiens
gggatgccaaaaaaactcagtaatcaagacaaataattgttcagagtcgggttgaccagatgtccctcctggatactaagtccagcagatggcccattgggcagccagcccactggccccaggagcatagggaccttcatgtttggcagggcagcaggtccgcctagcccaggccggcctctccattcacaccaccgatagcctgaatgactgcagtaactccccactgctctgcaagcttttcgactcctcccaatccatttactgcaccatggccaaagtaatatttctgaaatataagccacctctgaactgttcaacagttctgcagtgtttctggaatgatgcacctaaaccctcaatggaccttgcccccgatcctgctttcctctttagcatccacatccacatttttttgcaactctgtcagc

SEQ ID NO: 174560 - DNA, 150 bp, Homo sapiens
aaacaaatgaccctgcacattctcaccttctttctcgtccaatactccctgttctctgagtgggacaccactctgcctggacaagttgtattcgcctgccaggttctctcccttcccagcaaggaacatccttgctagttcccttctggt

SEQ ID NO: 174561 - DNA, 548 bp, Homo sapiens
agttttgtgtgtggctggcattcagcttcctgttttttagccatgagacacctccctgaagtcttgctatgaccaagaccctgacagccacaccttctttctgcctgttagaatcactttctgtcgggtttcccttataaggtgatagagaacatagacttcataacaaaatatcactctcactgggaaggctgaggggttggtctttttgtgcctggtactgtgctcagtggggacttggggacatgcttcgcatttaaggtataggttgttttaggcatgggcagtaggcgctttcagcacaggctccctgctggtcactctttgctgtagtttcctgctccatccatggggtcggaggtcttacctcctgacgttagagtcatttgcagcaggtgggagtgaaagtgggccgggtgccaggtcttctttacctgaacctctcctgtcttcctggcacattaggaatgtccaagcttatttctattggtgaatgctcccacatgggatggataatggcctgtggaacattctctgaatgctttgtg

SEQ ID NO: 174562 - DNA, 394 bp, Homo sapiens
ttcagaggctcattctctccccctccttttttttccccctttcaaagcttactggtaaagtacaaggtaaaatttgcttaggggcaatagtttgtgggttagtatgaacttaaaaataagtgggatattgagttttcattatttaacatagcttgtccaaaatagtgagcaggtataaaattatcaacattattaccattttgtctttagatgtctgtgaaacacccccatatgttttaacatcatcaataacaatttcattaatttgcttgaagtatatatattagtgaggttgtaataagaagttattcgaggctttttaaaaaatcttcctaagttcttttcttacctccccacatagatgatcctgtaagaggatactggaaactctgat

SEQ ID NO: 174563 - DNA, 258 bp, Homo sapiens
tctatttgtgtaagattaataaaaccactccagctttcttaggattgttgtttgcatggtattacattttccatatttttacttttagctcatttgtatctctgaatctaaagtatcttttatgaacagcaaatagttgaatcttgttttcaaaatccaatttaacaatttctgtcttttggttgaagtgtttgatcattttacagttattgtaattactgttttgtttttttgtttgtttttttttttttttttttt

SEQ ID NO: 174564 - DNA, 192 bp, Homo sapiens
gttgtgctatttccaaagataaatgcacacaaatgtttttcttccctgccatttatatcacaaactcataaactgaaattaagggaagctactaatgcatttgcacatttgtaatgtatttgtaatatacattcataatgtacatttgcaatgtttataatgcatttgtaggcttctttttgcccactccaa

SEQ ID NO: 174565 - DNA, 259 bp, Homo sapiens
gtcctgcaatgagatagataattagaaaatgctgtttttttggcatgtatgatcaaatagcttagagtttttaagtatcttatataatttattgattgatacatattaaagtttccagaagttaaattatgtttaaatggactaaggaatatgtcatttaaaagaaacatgccaaccataaaaattgaattcctcctttgatttccttgttttatggtttggatgcttttatataggctttcataaaatgaggcatagg

SEQ ID NO: 174566 - DNA, 405 bp, Homo sapiens
ctacaactggagaatccatccatcaggtgactgagttcctccaaaggggacactactaatgtgtctcagacactaactaaggtgagaaggaatgcactgttgagggggcagcacatccttaagaagctcaatggtggctgtcccctgcaggctggaataatgctagggatgttttatagaactggatcccccagtagtgagtaaaatgatagagttccagaataacaggggccaagtggcagcatttaactgtgaggacaagataaagtaatttccgtaaggggcatcaacgttagagtgacaactgggaggcctgacctgtaggtgtccatgaagatggctcttaggacatgctgttcctctaggcaagacacatattgctttagacatataatcaaaagagat

SEQ ID NO: 174567 - DNA, 825 bp, Homo sapiens
ataaactttgtgagtgctagtatctgtgaatttctataaacattatacaggaaggccgttttcatattatagcaggcactattggggttacgtagatgtgaaagttaaggccctggcctttgagatatggcatagctcatgggagggatgagatctgaattctgataacaattcaggatgatgtagaaaagtgaattgtacaatgtgcaaaatgctaattaactaataaccaacatttgtgtagcatgttgttgtttacatagtgccttcctgcatgcctcactttggattggcgtgatgagagtaaacgtcttgcaagacagggcatttgagcaaggggttgaagaatggcaagggtttatcagatctggggctgtggggtgatcattggggaagggcttgcagaagagctcaaggtgctttcagtgcaatgggagcggttgtgttttgccagagcacctgaatcctgtcaaaagcaggaggtgatgagcttggaaaggtagcagaggccaaattgcaggctttgaatggtggttgactcactttgcaagacaaaggggcagctgcgttttctcgtgtggtattcaagacttcttttcttctcctggacttcaggctgtttttgtacaagagcgcatactcatttctttctctctttttcaaatgtgactaaatcacacttcccagggacaccaagctgtttctgattgcaactgtaacagctgtgtaccagctgggatttttgtattaagcagctctatggggctactataccagcagaaaattagaagtcttgctctaaaaagcattttcagcaaatacttg

SEQ ID NO: 174568 - DNA, 450 bp, Homo sapiens
ttaaataagatctaaataaacacagagacattttgtgttcttggattgaaagacttaatattgttaagatatcagttcttctcaaattgatttgtagattccacacaatcccaatgaaatcccagaatgttattttgtggatatttaggaacttaatctaagtttatatgaaaagacaaaagacccagaacatgtaacacactcctgaagaagaacaaatttgaaggactgacactacccaacttcaagagttactataatcaagtagcatggtgtggtgttgctgagggaaaagaagacatacagatcaatggagtagaatagagacccaaggattagacccacataaatacagtaaattgatacttgacaagggatcaaggacagtttagtagagaaagaatagtcttttcaacaaatggtgctagaacaactgaatagccacatgta

SEQ ID NO: 174569 - DNA, 531 bp, Homo sapiens
tgcacacaagctttgcagcatgcactatattcaaattcatgcatcagcaaaattgtaaattactgcatgttatgaatcctcaggttgtttgcaaagaatcataactgttctcaggtactgagttctcaaatgtggaaggtcttctgcggagggggaaagggaagagtactcaactggcgatcagagacctggtttccagtgcagctctgtcaaatcgattcacttctcttgagccccagtattcccaagaggaataccatatctttgcccatctcactgcgttgtggggatcaatgaacacaaccaactgtggatgtgcttggggaaagcctggcacatttgtatacctggaaggcatgatcgttcccacagggagcgtgtggctcccgcagagggccctggtcattcgggatgacaggtatagggaaaaggctaactcatggccatttgacaatggagtggagccttcatcttcctgctccctttaaagagcatgagctccccccaccatgttttttcataaggggaatg

SEQ ID NO: 174570 - DNA, 671 bp, Homo sapiens
caaaaaagtattgccctgacctttttgggggtctttatttaggtactgaaaagttgaatcacatccacaaataaattattacgtctttccatataagaagactaccaaaagcttagaatttactgacagatattggggactgagccacttttgttgaaaacagtgacaccatacaaggcaaattcaataaaattggaggcatccttgacactaccgagagaacagccgagagactggccaggaaggccagaaacctggtgtgtcatgtgggcacccatccctgcaaaggtctcacaccagctcctcacaccagcaaggacacctcaacatgaagatctatggctgctgccagcctgtggcttttggatgcataaagtcacaaactaatttagagacctagcccctgtattagcagctgagaatccctgcccagggaatagacttcgtgtgtctcttccacccatttcttctttgaaattgtgttctcgtggtgcctagcagaggctatgtgtgtgtctcactctgcacagctcacattctgctttgtggccacacgacccaggaagagggcccacaaatggacgagaatagagggaggtgggggtggaaatagagaaaccacattccaggccgaccaaagactttatgtatatatgctcaggaaattgaac

SEQ ID NO: 174571 - DNA, 460 bp, Homo sapiens
aataactgaagcagcaataactgaatcatgctatgagccaggtgctgtgttaagtgtttcataacaatggccttggctagcaatatacccattttccagatgaaaagctaaagagacaggggccaagattaaagccctctaatcaatctgacttcacgcataatctcttctcattcattacactacagaaagatgaaagaacttgcacaaagtcacctagttaacaagtggtagtgtaagatttgtgccaagtctacttttcaattaaccctgtggctttccattcttcatgtctgagcactgtgtcccttgctgcacaccctggtgtccagaactcagcaggcattcaataaacacttgaagaactgaattggcttgaatgagatggtttgctatctatttcctctatccccatgggaaaagagaagaaatcttacagactgaagtaaaggattaaact

SEQ ID NO: 174572 - DNA, 280 bp, Homo sapiens
ctgacttggatcagattcatttttacaaattataattttcattcaaaatagatatctactagcttccctccctggttcttctggaattcctgaacaacaatgcctaatagctgctgtttgtatctagataaaactgttggtggacctggtgcaacagatattcaaactttcccaacatggaatattagtctttcctgactttatcacattggggccaagatttctttgttctctttcttccttgtggaaacgacattttaaatgtaagccttacactatg

SEQ ID NO: 174573 - DNA, 161 bp, Homo sapiens
catctgtgaaccaaccactgcggcaaaaacaataggagtgcctggttgttgttcccgattcactggctcaggcatagcattagctttccctaaaacactcgaaaggagagtaatagggaatcagaacacctaacaaaatcaaggcctttttatcacaagaa

SEQ ID NO: 174574 - DNA, 310 bp, Homo sapiens
caaaaaatcatcaaggggtaacttcaaagctcatcgctgaaaccccatttacgtagaccatgcagtttatgtatacagtcagccctccgtatctgtgggttctgcatccatggattcaaccaaacgtggattgaaaatagttggtaaaaaactgcctgtactgaacatgtacacttttttttcctgttattattctctaaaccagggatccccaacccccgggccacagaccagtactggtcagtggcctgtttggaactgggttgcatagcaggaagtgagcggcaagcgagcattaccacctgagctc

SEQ ID NO: 174575 - DNA, 184 bp, Homo sapiens
atagatattcttccttctttccactaataataagggattagtaacctgtgtaatcattatacctctaactcttctgggcaccagacttgcctctccacttactagatttttttcccacaaacctacacctgtcgaggtgttctctgtattaatgagcagcatccacccaagctaaaaacctggc

SEQ ID NO: 174576 - DNA, 184 bp, Homo sapiens
gaaatcctcaaatcagggaaccagtgctgaagaggtctgaggttactatggccctttcacaagtgggtaaactgaggctccctgacccacccccacccccgggggcacaggagcttgctctttggaccctccttgcactgcccccacaggaaagaacacttgatgtccatggaaatcttgctga

SEQ ID NO: 174577 - DNA, 154 bp, Homo sapiens
tgggaacacagtcaaaccatatcaatgtgatacttttgatacataaaagacattttttcaacatgttattatggatatttaaattacagagataggtcaaaagttgttacttaatttttagagttatcaatgtatttttggtgactttttaagt

SEQ ID NO: 174578 - DNA, 235 bp, Homo sapiens
tgaacctaaacaattaggcccttttactttccccagcatctactttccctttgttttggtctaaaaacagtctgtatgtctataaataaattaacacctggtctttctttgatagtggagaactagaaagtactgtaggtctaatattgtcaaagtgagaccttgtctgtgggccgcttctgaaactgatggaaaactctaaaattcttcctattcagttttaatttcaaaattt

SEQ ID NO: 174579 - DNA, 420 bp, Homo sapiens
tttcttaaaacattacgagaatttctgtgattttttttttaagttcatcagctgtcattagtgttattttatgtatggcccaagacagttcttcttcttccagtgtgacccaaggaagccaaaagattggacacctctgctctaaatgttcttagcttctctgtgacaagatttacttagagggatacatgaaaagttaaaaagttacaaagaacaaggtcaaacagagtttgataatagtgtttctaagcaatgtgacaggatttaagcacttcctgggaagatccatgccattttgagacacatgatcagataaatattgttaatattgtctgagttattattaagatctactagaatagtatagacaatgggtaatgaaaattggacttgggtgaatgaagagacagtatgttaatg

SEQ ID NO: 174580 - DNA, 365 bp, Homo sapiens
ttccaaagtgctaggtaaattataggcatgaaccaccccacctaggctggaacttctttcttatagtaaatttccctcatatgcttccctagggtgcttagcaggaaaaaaaaatccttaaaataaaaattgctggtagaaatcacaggaaagggggaaggtaagtatctggtgggaatgaaactccagacagagtgggtggtggccctgggtggggaagaggcagaacccgggagctgatgcgaaggaagggagggcagctggggaagcagccgcaggcggatgtcgctggctgacacagtggggctgctcagtcaatgcttctcccggggagggaagtgcgcctggggccctggtgtgtcctg

SEQ ID NO: 174581 - DNA, 157 bp, Homo sapiens
ccccctccttcccatccctcaacaccctccagcccccacctgcaccctcctgcaaggaatgcgcgggacccccaccgtgggcacgcgtccacctgaaccccctcctagctccgagcgccgagggaggggtagcatttgaggagggggatggcggccg

SEQ ID NO: 174582 - DNA, 920 bp, Homo sapiens
tgcaacgatgtcctcttgctgctgtgccagcatttctctgaggctggactcctgaagttgcaccctgtaactcttggaggctctgtcatattccctcagaaaatgtcctgttggcacagatagacaatacaggaaggagcccagacagcccttgaaacagtccaccctactccacagaccaagaccctcattggcgcaacctcatctgttaccgagtcccccaagatggcaaagccagacctggacagctggcctcacgattgtcctgagagccagaggcggaggcaggatcaccaaaaatcgcttgcaggaagggcagagagcacaagtctctcggttccaagatgcccgacacctgactccacagccctgggggtgccctggctgctgctgtgcgctggctctgatgagtgcatgttgcctctgccctttcagaacttattctctttcccatttgcgctagagctgctggtgctgctctgcaaagacgccctgggtggcttctccctcgcttcatgatagattattgccaaattctgccttgcaactcagtcagcatttctgacctcaggctgctgtggcggttctgtccctctacgccatccagtgacgtggtggggagcgtgtgcttgtgtagggacagctttccaggcggctccccagcctctcccaagatgccattgctcctcaggagctgctgggaagtgggcagtgtggaaagtcagcccctacttcacaggagactctgggccaggcacgtcctggcacctgcttcagccgccctgccatggtgcctgccgccggcctgagcagggcgtttgtagccacaagtggaaagcagagccaggaatacccaaggcggaaaaagcaaacacgacagaacgttagctgccgctcccttgagctgagggtcttagggt

SEQ ID NO: 174583 - DNA, 379 bp, Homo sapiens
caaaaacagccctattattttttcattgaaaatttcttagaatcagataatactgtccaaaatattctgtgaccatgtaatgttatcctaaattgctgtcaacatcaaatggtggtcacaccgaagaaattattaggagactaacaatgtgatattctaattttgttgttgtattctgtaatgtatttaagaattaaacaactaaatctctgttgttctcacattttcctattttctattttttttaatcctagttaagattagagagccttctagtatgactttctttttttttttttttttttttttttatatattaatttttttttttttaaaaaaaattttttttggcacccaaggggaaatatgagagtacata

SEQ ID NO: 174584 - DNA, 336 bp, Homo sapiens
taaaaaatgagttcctactatgtgacagacccatccacttttaggcaccggaaaacagaattgcagtttacattggagaggcgggtatcaacaaacatgaaaaccatacaaaggaacaatctctgatagcagtaactatcatggaggacacaaaagaaagtgatactatggagaagggcctggagcaaggagggaggttactattgaaccagggccatccaagaaggtttggcctagggcctgacattcaagttcagagtgagctcttcattccgagccttaggttaaaatgctctcaactcagaccttgctccctatcttattttgtttgtttga

SEQ ID NO: 174585 - DNA, 203 bp, Homo sapiens
aggggtgggacttgggcaaggccatacaagaatgaaccagactcctgccttccagacctgttctgttctaccacactcctccaaaggaggcctgctcaaggctcctgggatttattggtgaccaggaacatttttcatcaaatataataaaaaatgtaaaagcccaggtctgtaaaacgtcctgctaaaaaaatataatttca

SEQ ID NO: 174586 - DNA, 1042 bp, Homo sapiens
atgtttttgagggacaagctataaagcagtcgactcagcccagactaaggaatgcttttctttaaaaatcagagggtaagtggtagacttagtagtagcctatatggttacaaattatcaggtgttagctctctcaggtgtcctgtggcaacagtgagtgaatatttctaaaagttttggaatttgaattagttgagaacctatgtttgtgcattttgaatatattgaggatattttcccccttaactctaaacattttgagttaacattttaaaagtacattttcaacatgcagaggttgagtgcccaataagtggcaggccataatgttcggtatggcaacacaaaaatgtgtaagagacagtttctgcttgtaggaccttctaagagtgggcaaaacaatacaggcttataagaggtagctacgaaaggcctaaaggagaggacacagtgagacaggagagaagccagggatatttcacacaagaggtaacttttgagcagtgttaggatttagaggagtctgcatagcagataaagggagaggtgttagcaaagagtatctgtgaggatgatactcttggaattgcaggtcataagactgggaaagtaggtaaatgctccctgaatggggcttatactttatcctataggcagtgggaagccttaggtaagaatacagtgatacgaaagttttgcattcactttagtaatggtgaaaaactggggaacagtctattaggtggcagtctttgggctggaatatcccaactgatttctggttttattttctaaaattgttgccttggacccttcctatttttataaccagacacagaaaatcaataaaagtttgagcccagtttatagactattgccagcagtagttcaggttttaaaaaaatgatgagggattaatctaggggcatgaaggagaaaggatagattttttatttatgtctatatataaatagacatttatatttacaaaggttgacttagcaggccttagtgattgcttagcaagattagggaaaagaaa

SEQ ID NO: 174587 - DNA, 693 bp, Homo sapiens
acagagagacagatgaagagagagtgaacggagagagagcgagagacaaagagcagggtgccttgcagctggtagagcccattcacaccctctcttcaccctcccctggttttcccacttttctagcctttgtcctcttgtaccaccaggttgaaacaccctcttctttcattttacacctttctgtactcttagacgaaagaaaaggttgttagaggctcatctccaacctcattgcttggcaaaaggagttagagtctgcagagaagccgcagtgcggcagggagtctaggatcccaaataacagatctgggagaatcctgcctcagtacttggatgcgcctcctgcccatgagcctggtgagcacagatctgttggcagtaaccggctgtgggtaatcacccccaactgcttcttgggcagagatggttggagggttgtgagttagggagacagaatgaaggccttttttcgaaaaccagcaacagagacataggccattagatgcaggatggctgctaagacaggtaagagaagactttagtcactcctgaactctcataaccagttcacactgctcctgctcatccatgcataccagacctgaatgaaataccacatgcaggtccaaggacactgcggagacaggcaccctgcttttgtctctcgctctctctccgttctctcatcca

SEQ ID NO: 174588 - DNA, 379 bp, Homo sapiens
acattttaaatggttgaactctctgaaatgtgaatgatatctcagtgaaactgttttgaaaatccaaaggcaggatcaagataattttctcaactctcaatttttgatgtacatgctatatcaaatctaaatatttctagagttttatagtatattttaaataaaagataaataaagaaaatgcctaaattttcaaatagtttgtaaattaacctaaaacatgcacatttcaaagaatggtataatggcctttctgtacaagttaacctacaatctgtgaaataaatagacacagattcagtgtccattcacaaaagtgaagaaacaagacaattttctggaactttccatgaaacattttcctctgattttatctggc

SEQ ID NO: 174589 - DNA, 754 bp, Homo sapiens
catatacttcacctcccaggtaagggccatttccttgattccaaatatttaaagatcctatcaactatcctgatattttattccttcaatttccttcctctcaataggatttacaacaatttgcagttcctccctgtcttgccagctgtcaaatattacctgttttcaactctgctctatttaaacacatcaaaccagcctcctctgttccaaccgttcccataccttctccatataccttgccctaaatctatgtagaaaccctctctacaccccactttcattaatgtccaaccgttggctttccccaccaatcccctggatagcacttcctagtttttctctctcagccctgcctcttccttctctcctgtgttaaccccatgcctcctcccaggttctagcctttcaacttgtcccaaccctaacgtgattctgaaaaattctcaagtcccagctttcctggttagattccttggctacacatactctattcctttctcctattacatatactctctttctcaccctcatcctctccaagatagtttcctagaacatgcatatatgagaaaatactactaagaaaaaaccctaaggaatacgtaaagcggagagagtaatcaaagatgtaaaagaactggatagaagggaaggatgcatttagaaaattccagaatgaagaagcatcatacaaatgtttggaaaaatatactagcgcatgcgcctaaggatgggtccctacccaagccca

SEQ ID NO: 174590 - DNA, 219 bp, Homo sapiens
tgccaacaagagtcacctctaagatgatccagctgttgcatggtgtagcatgcctagtccttgcagcacacacgctgccattcttcttcgccgttgttaccgtattaatttagggatgatgagaaagtggcctccctttccctgttaattccttggaggaacttctgttcgaaatgaatagtcttgaaatatgtcataaagttacctatcaggaccact

SEQ ID NO: 174591 - DNA, 183 bp, Homo sapiens
gagaatcgcttgaacccaggaggcagagttgcagtgagccgagatcgagccactgcactccagcctggggacaagagcgagactttgtctcaaaaaagaaaaaagaaaagaaaaaccatgcccagttttggggatactgttattctaccagacaggctcattttccgggactgtgtcattgca

SEQ ID NO: 174592 - DNA, 393 bp, Homo sapiens
aaaaagaaaaaagttccaaaatgcaaggtttgttttaatttggtgctgatttattccaacatttaggttaatccaagaagtctggatgcttcatcttacagacaaccctaagacgaaatggcctcatgttgcatctaggttttattttaagttaaagagatgaatggaaatatccaactagagtgtgaccaattcgctttctcactccagaaaatccccccttctgctccttcctattctaatcctactcatcctttcaacctattttcttaatggggagaaagctccacacatcaaatttcgcaaacacttacgtcacacaactgcctaggccaggagttggtaagcttttcccataaaagaccatagggtaaatatttcatggtttccatt

SEQ ID NO: 174593 - DNA, 316 bp, Homo sapiens
ttgtattgaacattatttgtatcatatcaattatctaatcctcaatacagctcttttatttcacagaataggaaattgaagcaaagagaggaaaagttgcatgaacgattttacacagctgttaggtcgttgaactggattctgaacctagcattctggctggagagcccaagcttttatcagttgtgtatagcagtgagagtagattccccatggaaaggtaagagctgaatacagagtccagagggaacaccaatatgaagaaggagttgtgaagcggcctgaaaagaaatgacaaagataggaagagagttac

SEQ ID NO: 174594 - DNA, 176 bp, Homo sapiens
tgagagaggaggaaagagatgggaggaaggcaccaggctcttttcaacaaccagctctcaggagaactcttgcaggaattaacagagtgaaaattcactcattatcatgaggacagcacccagtcattcatgagggatcttgatccctaacacttctaattaggccccacctccaa

SEQ ID NO: 174595 - DNA, 337 bp, Homo sapiens
aataaagcctgagtgctcccttctttggtatatgctggaagttcaagacatgcctgggtacctttacccttgccctactccttaaccatagtcacaacacattttcctgctctcacaagccacttttgaaccagcttgggaagtctcctgctctttccagagtctcattatgtaacaaatattctcatgatacttcactatgtgacgtcatcagtcccagcatccaaatcaaagtgtgggtggggttccactctgttctagtggagtggccacagtgctaattaacaaaatatgctttgggttgaatatataaagtttctactttactcaccctgca

SEQ ID NO: 174596 - DNA, 608 bp, Homo sapiens
cgcctgacctctgtgaactgcccgcatcgggctcccaaagtgctgggattacaggcatgagccactgcacccgccccaggatattctttttaatgcattgggacaaccggacatccatgtgcaggaaagtgaacttcaacctaaacctcacaccttaccccgaaactagaaaggatcatagatctaaatgtaaaacctgacactgtaaaacttctagaagaaaatgtaagaggtccgggcacggtggctcatgcctgtaatgccagcactctgggaggtcaaggcgggtggatcacctgaggtcaggagtttgaggctagcctggccaacatagtgaaaccccgtctctactaaaaatacaaaaattagccaggcatggtggtgaatgcctgtagtcccagctactcaggaggctaaggcaggagaatcgcttgaatccaggaagcggaggttatagcgaaccgagatcacaccactgcactccagcctgggcgacagagtgagaccgcgtctcaaaaaaaaaaagaaaacataagagaaaatctttgtgatcttggatgaaagcttttagctatcagctgagtatggtggctcacgcctgtaatcct

SEQ ID NO: 174597 - DNA, 574 bp, Homo sapiens
gggtattccaaggagaagtaagagaatgaaaagcacagaggtaggaaaaataggacatgtttgaaaaacagcatatagtagtttgtccacaatgtagagtacacgtagaagagtagtaaggcaaagctagaagggaaggttagggctgtaccacggagggctgtggatgtccacatggagtcctgcctaaatattcaacaaggggctttaaaaaagcacaatcagtaacttaaggaaaattaacttagcagcaatatatatgttagaattaggtgactgtaatgagagggctgagccagtagagtatgagggaaaagaatggtggcaaaagacaaatgaagaggtagaatcttaatagacttgaaaactgatggaaataagacaggagagaaatcaaatctggaaactgtaatgctagtatattgaaaaaacactgtaaagtagaaaagaaatgagagtaagtttaaatgtaggcatggttaactagaaatgctggactcttgaggaacaagatgaattccagcctatactctatgaataatggaactaggaaagatgggcagtcctggtgctg

SEQ ID NO: 174598 - DNA, 517 bp, Homo sapiens
ttgtcaggctggtctcaatcttctgccctcaaatgatctacccgcctcagcctcccaaagaggtgggattacaggcatgagccgccacgcccagccgataattcctttaaattatcttagatgcaagccttattcaaatgcccctagctattcctaaaatgtacttcgtagctggtacgtccaaaccagaatttaagaccatacactgtatctggtgattatgtcccttgagtctctgaaattagaatagttttattttttcatgattgggattcagtttttcatgatgctaacttttgtcttatagaatgttcctttccgatatatcagattgcttcctcatgataacatttagctttatcttctatcacttgtattacctttaagttatgattagatcttacagcttaactggattcaagatttttggcaagaatgcctcatgtgtatggtaggtttcatcttgcattacatcaggagacacatctggctaccatttggtgatacttgtattaag

SEQ ID NO: 174599 - DNA, 356 bp, Homo sapiens
gcacctcacattatccagagctctttctcagtattaattaaggagagtttagtggtaggaccaccaggtttaaattattctaccaagtacaagctatgtgaccttgaacaagtaacctctttttatttattttatttttttgagatggagtcttgctctgtcacccaggctggagtacagtggtatgatcttggctcactgcaacctccacctccggggttccaatgattctcctgcctcaggctcccaagaagctgggattacaggcatgcaccaccacgcccggctaatttttgtatttttagtagggacggggtttcaccatgttggccaagctggtcttgaactcctgacct

SEQ ID NO: 174600 - DNA, 365 bp, Homo sapiens
ccaggcccaagaggacactgggagctgcccggtacccactgacaggagggtggccaggccgccatggtacactctgcaggcattacacagcagtgagaccagattacaaccacctgtgtcaacaggcatgactcacaaacatgacatgcggagaaagaagcctgaaacaacatatactgcccgattccaatgtatgagctgtgagaacaggcagaaccaccgactccacacacatgagctgtgagaacaggcagaaccaccgactccacatgcacgagctgtaagaacaggtagaacccgccaactccacacacacgagctgtgagaacaggcagaacccaactccacacgcaggagctgtgaga

SEQ ID NO: 174601 - DNA, 345 bp, Homo sapiens
acccccatgcccaccagcacccacatctccagacagccctccaggtttccctgcctgggagaaactgtggggttcccttggcgctggggaaggaggtgagcagaggggacgcccttggtgtcctcccctggcatcagcctgaggcccgtagacctgacaaccgcagctgtttggaaaataagctctccgcatccccggcgctccactgaaggtaaacagctgagctctggaaacgggccaccctcctttgtgtattttccaagcattttcatgccagtaaaacccttctgtgagaacagcagcttgggacacacatcaggcctgggctgctctcgggtgcggccg

SEQ ID NO: 174602 - DNA, 424 bp, Homo sapiens
gtagcactgaattattttattgggtatgcagaagctgtaagcaaataatatagttaaagggtagcttatacatttatacagtaaaataatgttctgaaactagaataagttagaaagtaagggaagggccaggcgcagtggctcacttctgtaatcccagcactttggtaggccgaggtgggcagattgcttgaggccaggagttcaagaccagcatggccaacatggcaaaaccccatctctactaaaaatacaaaaattagccaggcatggtggcatgtgcctgtagtcccagctactccagaggctgaggcatgagaatcgcttgaacctgggaggcggaggtggcagtgagctgagatagcaccactgcactccagcctgggtggcagagtctcgctctctctcaaaaaaaaagaaaaga

SEQ ID NO: 174603 - DNA, 642 bp, Homo sapiens
tattgttgattgtttaacttgtattaacatctgtggcccacagatcatctgaacataagaaaactatacaggttttgtaagaaagtaatgctgatttaaaatcttacatttgcatatgtgaatattaaagtccaggaatctttaatacatacaagaaatgtttagcattattttttaataaatgaaggtacaaaacattttttcataatatgattatgaaattgatagaattaaacttctgtaaaaaattttctactcccacgatttcttagaagtattttctaaataatagtaagggttagtaaccacattgatatggaaagacagacttatggtatctgcaagttttagttttacccttgtggaaaattgaactctaacatctcttcccaagattaatatatgaattttaccaaatacatattagcaaatactgatttggctcctttgaaagcagcataccaggttgtactttatgtatgtctttctgttggtgaccccttaatgactgcccagtgatataccttcttttgtattcttctggtgaacctcagttctctaattgaggtaatctaaatgtgtctgctaggtttttgcgagggtttgtttggcatctgtgctcagatgaatgtcagtgtcctt

SEQ ID NO: 174604 - DNA, 465 bp, Homo sapiens
tgtgcaggcaaactcccatttttaaagccatcggatgttatcttattcactatgatgagaacagcacaggaaagaactgcccacttggttcagttatctcccaccaggtccctctcacaatacatgggaattatgggagctacaagatgagatttgggtggggacacagagccaaatcatatcagagagtgccttccccaaacagtatattgtgtacagtaggaggatgactttgtagttcctttcctcatttctattccctgaagcctggctattcatgtctatccactttgcggtttctgaaagtgtgcagaatcccttaattctctctgcaaacccttggggtgagactgggagactgcatgtgatggtaataatatatattatctactgaggacctgtttgctaagggctttatttcaccctggtaacatatatcaagtgcctcttctgtcctggacaggg

SEQ ID NO: 174605 - DNA, 403 bp, Homo sapiens
ataaaaaaaagtattgtagaaataaaaagccccaaatttcagttttaatttatttcctctacattaagagaaggctgtagaaaagtgaggagtttaacaacgtatttcagtttactgatatccttgataatatgcattttagggaaagcactataatttcacattttaccataaaatatatgtaatacatgtcattagtgatgcgctgaacacctcacattgttcccaatcttaagtcattcactacactcagatttaacgagtcatgtcacaaaaagcatgcctgtaatttgactgctgacaccacttgtttttcattttcaaatgtaagttatataagcaaacatatactcagtgtctgttttgggcatagatactaaggacactacagtgtctcatctca

SEQ ID NO: 174606 - DNA, 976 bp, Homo sapiens
aacccaaaagagagagagctctaaggaattagaagatctctcttaatacagccaccctgctaaaagttcagaaaaatcactttcacgtaaaaatgagcaatataaaaattttgaggtaaaattctatacaaagtgataaaaaaaaaggaacagaataacatcttacacaaaatgaaagcatttatcagacatgtcattacttgtctgtaacctattacttcaaaatgagctaaaagacattaagaataagatatacggcctgaaagaattacataaatcaagccacgtacagtgctcacacctgtaatcccagcactttgggaggccgaggtgggaggatcacttgcactcacgagtttgaagccagccagggcaagatggcgagacgctgtccccacaaaaaaatacaaagaaatagctgggtgtggtggtgcgtgcctgtgatcccagctatttaggaggctgagaaatgggggaagaaagaataaacttgaaaaaaagaaaaatcattctagaaataagaaaatacactagagggacagatagcaaatagatacaacaaataacgctttaaaaaaaactagaaggttaaaatgaaaaacaaaatcaaacagaaattaagagagagagaaggatttaagggaaagtatcgaatactgaagacaggtaaaggagatccaacatatagaaaataggaatccctgggtcaggtgtggtggctcacgcctgttatcccaccactttgtgaggccaaggtgggaggactgcttgagcccaggagttcaagaccagcctggtcaacatggcgaaattctgtctctactaaaaagacaaaaattagccaggcgtggtggcacatgcctgtagtcccagctactcaggaggctgaggcatgagaatcgtttgaacctgggaggcacaggttgcagcgagccaagatcatgctactgtactccagcctgggtgacaaagctca

SEQ ID NO: 174607 - DNA, 652 bp, Homo sapiens
gtcgtcaatccgtacaacagcgcgattaagggctagtggacattttcccccttcccccacagatgggaaccaatgctccagacagcacccacagacacacattcacctgggagtactcatcctaaaacatgcagaagcacacgccccctaagcaagggatccaaggcccatgtgagaaaagttgcttttctgtcctggaaatggaatctacacttggggcaaatcttaagagcaaaagggagagtaaattctgccattaaagcacaatagacccaagatacacttgaagaaaatgtgaatttgccaggcccaaagataacctttaagaaatgagcttctttaccttacaccgatctgaaaagatctctcaacaatttaccaacatgctaatgtgggtgtcaaatcacctttttcttctttcagctgtaatcacaacctgactatgacgttatgactatcctaagctgtacataactagtgcttttccgtgatcttgggacaaactgtgtcatctgcaacaatctcactaaagactgagttttctcatttttcctcagtgaataaaatctaaactctggcacctcaaaccagcaaattaccattacattaacataactgtctttacaacactgtcctgacacagaatattatg

SEQ ID NO: 174608 - DNA, 1052 bp, Homo sapiens
ataatttgacatgcaacgtaaggttagcttttccagctttatttctatagttaccttttcagttcagtatttgatcatgtatggtagaatacagaatagagggtaacaatttatcaacaatctgacaaatgcagaagaaccagtttaatagatttctcagccgagtcaagagataagcaaaatagttaagtgattttttaaaaaaggagagaccaacaattcaaaaacaggtaaaaaaaaaaataataatataggctcaagatcaccttattagtttctatcagatctttccaaataggctgtatttgtgtagaactcctccctgctcccaattctctagatgtgacttaaaaaaatgtccttttttccctgtcatctgaactagcagtaaaatctacagggatgcatactgactcagtataggctttagatcccattgtctgggttggaatcagttctacttgagtggctttggtctcgttattttaaactgtgtctcatttcctcatttgaaaatggaaataaaagtatctacttcttacagttcttaaagattcaaatgaaataacttaccctatgcaaaatgtgtagcacaatgagtaacacataggaagtagccagtaaatgttaatttgctattttttaaaattatatctatctaggtgtttatagtgcttaagacacctaaaggacttcaatagcatattattttaataggtagctgtatacctgggagttgtcatggattcttctctcttcactccattatcaagtctgattcattctaccttggtatttctggaatcaattccattctctctactccactaccttatactgggccttattatttcttacacgggaagaggaggatacaagaggcaacgagaaaacattaatttgctttacacctcaatttcaatgaccagattagagatgttaagtttttttgtttttttgagacagagtcttactgtattgcccaggctggaggcgtgtgctcgtagtcccagctactcaggaagttgaggcaggagatcacgtgatctgga

SEQ ID NO: 174609 - DNA, 324 bp, Homo sapiens
tggcttatgggttttcaagaagtacccatgggatgggattaatgacagctttcttggagatggtaagtatctccaagtgttatgcatttggattgttagcaagaaaatacagactgtattttaggcaatagagaagctatggaggtgataaggaacaaaaatgagtgaagtatgtagtgaggaagcaggattaaccaaagatgatagggtgacacagtggagtgattgaagaaaagatttcatttgtatggaattgggaatcaaagcaatagatgcccttgaaggcttattgaaaaacactttaaaacacaaattaatcattca

SEQ ID NO: 174610 - DNA, 212 bp, Homo sapiens
ctttctaaccagaaaactaagatttctaccttcatagttttacgacattcccggttgacattagaaaccttgagccttgctcctctcctccctcacctctgtctacatgagaacagcgaggggctcattgaggtaaataacattcatgcaccaaaaaatacacatccttattgtcttttaccgtccagataaagaatcttaaagtcaaccca

SEQ ID NO: 174611 - DNA, 1013 bp, Homo sapiens
caatattctctagacaataaatcaaattcaatcccaagtcctctacaattaactgtattaccttgagcaagtcacttaacttgtctgaatcttcatctccttatgtgcagaaagagcataataatgcttcctatactgtggggttactggaagagatgatccaggtaaagtattaaagcacactgacaggcacatagcagaagccaatgcttctccctcttgcagagttcctgagtctcaatggagactaaccccacataagatactctgaaatccataaatggctaaatgaaaggcttcagatactcagagacgcctttctggtaacttcttaaaatacgctggtgggtaaactacaattctaaaatataatacaataatcatagaaaagaatctggaggaacgaacaccaaaatgttaagtgtacatatctctggagattacaggaaattttcatccctaaataatctgtttcttaattgtaactattcaaataatgaacagatattactttttaatcaggaagaaaacattatacacagcatgtctgttttaaagtcccttgtcattcaatacatcacaactgtactggaaataagtaaaaagacactgtttcctaaatgtgtaaaactgaagacatccacaatctttaccaaaagtccctagaaccaataaaaaaaaattaaaatgagaatgtatccagatgtacattaacatcaatcaaattcactattctttagccacacctacacatgctacaagagaagcctttaacaagcgctccaccgttaatgacatgtccctaaaaaggggggtggggagtcacaggcccaacatcatataacaaactggaaacccttctgtacctgttaacttggtgatctcagcatattttctaaggaccagctgtccaggtctgacatacctaccacatcaattgacagggtttttgtcactctcaacagggaagcttccaaatccacaaaaaaataggagggggcagatcaccccta

SEQ ID NO: 174612 - DNA, 734 bp, Homo sapiens
atgaaatcatgcacccagtgcttcattaacgtcgtacgtgtagtgactccaaaatctggagctctcaatttagcattgaccaactgggcatctccatctgagttatgtatcttaagggcatcacttttcctaccagataccaacagtcctgagagtcatcactgacacttctttccctccacccaggcattaccagatagatatttttatgtacccaataccattgaaaaccatctgtttctcttgatatactactaatattctagttcttaaggtatttatttattgcctataaatagattttaccaaaataacctcctaatcccatcccttgcttatagtcttgtctcctaattaatcccccactttaaagcaagaataatctttcttacaaagtttttctactgaagtatactatacgttcagaggaatgcacaatacatgtgtccaacccattggatgttcacagactgaacacatttgtaaaaccactcaaatcagtaagtaggaaattactagtttcccatagtccccttgtgttttcttctagtcactcctccctaccctcacccctcaaaggtaactactgtcctgatttctagcaccattgattagttttgtgtgtttgagctccatataaatggaattgacagcatgtactctttttgtgcctagcttcttttgttaacagtattatctgagattgtactttatttcacatatcattcattaat

SEQ ID NO: 174613 - DNA, 177 bp, Homo sapiens
ccattcttagatagacagctctctgccttttgacaggcctacgcactcacataaccaccactgcaatcttgaggaagtttccatcacctcaaaaagttgcctcgatctgctttgtagatcccctctccatccccagcccctggcaatcatcgacctgatttctttccctgtagtttt

SEQ ID NO: 174614 - DNA, 1014 bp, Homo sapiens
tgctgggattataggcatgagatcccgtgctgcacaaaggatgcctcttaacagttgtttattctgtctaccaggaaaaggcatatggcccctccctgtgtaggccctctagttctgagagatttgggaaacttcacaggttcaggaatgttcacagcatccccaggatgtgggcttgtggtgggtggcaaatactgaaatagttctctagatcaaggacctgagtgagcagagatgacattaccagctgaacctcccaaagagaatcatgagcagaggcagaaacagcacaggggaccccagctcctgctcacgttcctacccagcagccttcagagccagtgctgcagtgaatacaggctgtctctgagcccgtctgtatacttcatctcacttcatattttattctgtgatcagataccaccttagaaactattatttacccccttctagataattctgttctgcaggaaaaataatgtggctcccacaagagatttctgagcagtccaagcctgcatagcatggtgtgtggcagcgatagaggcagatcaggtgtctccttctgaaatgctgacctgggtgagggacgaggttctcctggagcaatcctctgaacaaggacctgctccagggagaggccaggcttcctctgcacagaggttggagatgggcattgcactggacgctcgtcatttttttcataattgggatgggtaggatttggtgggtgattaatccacagtgatggtagggctggtgctgtagacaggctgtgaagttgaaccctcagtcctgcacgtccagctagccgacctagaggattttcctcacctgtttactaataatgccctgtgtttggtgaggggttggcttaacaattttgtaacctgacagggacttggcccctctgggcaggctctcacttcgctggccccacagctgtggctgaggggtggcccgtaagaagagagttccaggcatcctttgtgcagcacgggatcctctattttc

SEQ ID NO: 174615 - DNA, 501 bp, Homo sapiens
gatcaggtgtctccttctgaaatgctgacctgggtgagggacgaggttctcctggagcaatcctctgaacaaggacctgctccagggagaggccaggcttcctctgcacagaggttggagatgggcattgcactggacgctcgtcatttttttcataattgggatgggtaggatttggtgggtgattaatccacagtgatggtagggctggtgctgtagacaggctgtgaagttgaaccctcagtcctgcacgtccagctagccgacctagaggattttcctcacctgtttactaataatgccctgtgtttggtgaggggttggcttaacaattttgtaacctgacagggacttggcccctctgggcaggctctcacttcgctggccccacagctgtggctgaggggtggcccgtaagaagagagttccaggcatcctttgtgggggcacacaggccacccctgccctgtgcctctatctataattgttgctagatggggt

SEQ ID NO: 174616 - DNA, 705 bp, Homo sapiens
ggacggtctgttacccaagagggcgcttagcactgtttgctgctcacttgcccgaaattagtactggctcaggcagagactgtggaaataggagactagaaaaaatacgttatctcatattcattttcatgtgcaatattttcatgtaagtgatagcttaattttttagcagacttcagatttcaaagttttaatttatctcactgtgctagtttacctcttcagtggagtaaaaataacagcatgaccactggtccctgggggatagttggcagtgtctaaaggcattttttattgtcatcaaaaatgatgacaccatattgtcaccataagaatatggtggtatttagggtgataatggtagagatggagaaaagtcaataaatttggggttcattttggaggtagtattgagagagtctgttgttaggctggatgtaaatgctgctcttctgttcttacttatcacaaagtacagactgctaggaactcagtaagtatttgtggaaaacttcctatattaatggttttccagtgtaataaagttaccgggaaccctttatttgatttgcagtttcagtcttgggaatttttttcttaagttttttgtttgtttcataaacttctagagcaaacagacttagtgtcaaaaactcaaaagtgtaccaacacatatgttagctacttccttagctactgtaacca

SEQ ID NO: 174617 - DNA, 748 bp, Homo sapiens
tcaatgaaagaatttcatttagaaaaaactgcctgtcccatccatgagtattcttaattttaggaaagatgcacagctttatgacactcaggctgatttcccagtttgggaattcttggccctggcttttcccacctgtctttaccttgcagacaaaccaaacaagacaaaatttaatcatgtttgcacaatgtcaaacacttgcatagagactatccccaaagtcagctcatgggtgttttatcttcacagtgccaaataggaaatagctacatatgtttcccattaaaatgagaatttccatgttggtatctggtgttgcattgagcttcaggttagctgcttattcactgatctttggaaggaggctgaagattgaacctcaagagttctagggattatctgcaggttgaaggtgttaaaagtcccaggcacattgtttgttatcgctaactgcggatggcctgaattttaataagcatggtcaactgtgcatatcttgtcatgtgaactaccaattagcacaccataatttagcaagttagtacatgcagatatgaacacccttgggaaggaagcaattttcgaatcagattattactgacagtgtacaatttacatgcaggtaatcattatcagaaagtcatgattatccagaaggaaaagtgatttttgtggtaatatatctttgaatggctgttgatttttaatacctttaaggtaaaaacttcaatttgttccatcccta

SEQ ID NO: 174618 - DNA, 238 bp, Homo sapiens
gagtagctgggattacaggcatgcgtcaccacacctggctgattttttgtatttttagtaaagatggggtttctgcatgttggtcaggcttgtctcagactcccgacctcaggtgatgcacccgcctcagcctcccgaagtgctgggatgacaggcgtgagccaccgcgcccggcagcagttgctaacattttcacacagcttcttgtggagaaggcccctttccactgtgaagtgtg

SEQ ID NO: 174619 - DNA, 504 bp, Homo sapiens
agtccctgtactacagtgtggctagaccctccctgaagaacagataagagccattcacaattagaagcaaccctgcacacagagaccacagctccaagccctaagccacccacactggaatcttgtttatccttggctaagcaaacacaagtcttcttagataatgcaaaggtcaactgtagacttgtatgacctgataaaatcgccaccaaccctgaattacagggtgttcaataataaaatatttctacagagctatgagggagagagagaaatcagaagtgggctattttccatcatcctccattaacaccccactaagacacaggctgagtgatggagttctggattccaggatcacatccctgtccacccactccccagccccctttataaaaagcaagaaccggccgggcacggtggctcacgcctgtaatcccagcactttgggaggccgaggcgggcggatcacgaggtcaggagatcgagaccatcccagctaac

SEQ ID NO: 174620 - DNA, 783 bp, Homo sapiens
catgctgttctagaggatcccccacggtgtcataaagccagaacacagaaagatctattatcaacccagtttaggattcagtggcaatcaatacaacagccccctgagagcctggcgcagctgggactccccagaaattcactgccagctcttaaatatggggtgggggaaagacaaggtggggtaaagtgattctgatcacactccttcaaggtcaaataaataatctcttgaaactggctggatatgcaaaccctaagggaattatgagaataaccctgtccacggttacaatccagcccccagccctgggcgaaaagcccctcactcctctttaccaccagagagatgagaccagaaggccctgattaaacactcaccccttcaggagaacccagagttatagaagggatgtcagtggcgctgagcagtagctttaagtcccagaaaagccttttcttactatgcaaacccactcgtgcctggatgcccactttacatttgtggtggctgcctccaccctggcagaacccattctgagcacagatcccattctgagcaggcacctcatccttgctgtaaccaaaccaccgaggttgtgagtgtaaaatccctgggaccatggaagaccctccattcatctcagaatttctctctgaaggttctcctccaggacagcaagggtccccaaggtctccaaggtcagcacagccatagcctccagttctcctgtttgtcagctgctgtttatgacaccgtgggggatcctctagagcaccatgg

SEQ ID NO: 174621 - DNA, 794 bp, Homo sapiens
  misc_feature (31)..(31): n is a, c, g, or t
agatacgatcgatgctcgcgtaccccacggngtcatgaatgcataaagccagaacacagaaagatctattatcaacccagtttaggattcagtggcaatcaatacaacagccccctgagagcctggcgcagctgggactccccagaaattcactgccagctcttaaatatggggtgggggaaagacaaggtggggtaaagtgattctgatcacactccttcaaggtcaaataaataatctcttgaaactggctggatatgcaaaccctaagggaattatgagaataaccctgtccacggttacaatccagcccccagccctgggcgaaaagcccctcactcctctttaccaccagagagatgagaccagaaggccctgattaaacactcaccccttcaggagaacccagagttatagaagggatgtcagtggcgctgagcagtagctttaagtcccagaaaagccttttcttactatgcaaacccactcgtgcctggatgcccactttacatttgtggtggctgcctccaccctggcagaacccattctgagcacagatcccattctgagcaggcacctcatccttgctgtaaccaaaccaccgaggttgtgagtgtaaaatccctgggaccatggaagaccctccattcatctcagaatttctctctgaaggttctcctccaggacagcaagggtccccaaggtctccaaggtcagcacagccatagcctccagttctcctgtttgtcagctgctgtttatgacaccgtgggggatcctctagagcaccatgg

SEQ ID NO: 174622 - DNA, 173 bp, Homo sapiens
cgaagacattatttaaaaaaatcttcagttctccctggggggcaattggattgacaattgcaattcctttgtaaccaatgggcttctgtgtgagctgttagacgcacactggtattcgttcaagatggaaaaccaaacaacatggacacaacccatgacagccttcaaagttc

SEQ ID NO: 174623 - DNA, 154 bp, Homo sapiens
agcagagtttcctaacctgggtctacagataggctccagggcttctatgaatctcctgaaattgtttgcaaaatggtgcatatgtgcacgcacacacattgttttcctctggtataaaattcttaaatagtctcctgaccccaactaagataag

SEQ ID NO: 174624 - DNA, 436 bp, Homo sapiens
ccctagacttcctgtaccattagcagttcactacctactgcccttcctcccagtccctggcaaccactaatctacttctgtctctatgaattttcccattctggacatttctaaaaatggaattaagcaatatatggccttttgtgcctggctattctcatttataatgttttccagatttattcatgttttaatatgtatcaagcactgtatttcctttttattgccaagtaatattctgttgtatggatataccacattttgattatccatttatcaattaatgaacatttggattgttttcatattttgaccatatgaagaatgctgtgaacattcatgtatacatttttgtatggacatctgttttccgttgtcttgggtaagagcttgaattgctgggttatatgataactttgtgtttagctttttaagg

SEQ ID NO: 174625 - DNA, 144 bp, Homo sapiens
tctcttttgatagtaatacctaaaaacctaaataatatcagaataggaagagttttcagtagttacttgttgattctccaaacaaaggcttattgctttttaccatattccatgtctctcaaaatcaacgccagccaagcttca

SEQ ID NO: 174626 - DNA, 189 bp, Homo sapiens
agttgaaaaagaaaataaattgtttattttaaaaataaaattcagttcctgtttctagagtgttagcattaattaaaagcattccatcattcagatagctatgtgaagtattaagtaatacccctagtatttctgcttttcaacagaactttaaatcgagcaccagctgggcgactcctctacgagtcg

SEQ ID NO: 174627 - DNA, 635 bp, Homo sapiens
cagaaaagaaatagcaggacaatagacttaaatccaaccttatcagtagatttaaatccaaccaggtcaaccatatctatattatgttaaatataagtggattaaatttgtctaattctcccttaacaccatcagtttttgcttcatgtatttggaagctttgttattagttgcaaaaacatttgtgcttgttatgacttcctgatgaattaacacttatcattgtaaaatatctttctttctagtcatacttcctgatgtgtagtttttaaataaacccgctcctgctttcctgtgcttacatatgtatgttatctcatttttcatccttttactattatatttctttatatttaaagtctctattaacagcacataattaggacttaaaaaactaatctgatgatctctggctcttatcagcgtttactgcatttgtacttaatgtaattttaaaaatgttattttaaaaaattgttatatttcagtagctttaggggtacaagtggttttcagttacatgatgaattgtatagcggaagtctgggattttagtgcttctgtcacctgaatagtgtacattgtacctattttcatcctcacctccctctcactcttcctgcttctgagtctct

SEQ ID NO: 174628 - DNA, 731 bp, Homo sapiens
gaaaagagctttggggaggagctgctgacacttcctcctggcactgcttgcccgggagctgggtggaggcagggcagggcagggcagtcccaggttctgccaggaaagtcaccttgggctggggcaggaggcttggagcttctggccgttactgtttgtctgagcaggagggtgagcactgtgtactggtaccatggccccaggtctaggcgagggatggaaataaggacagtgccactagggcctcctgtctgtacaggaggggccctgagacagctcctcaaacccctttcccattatacggatggtgcagatggggacactgaggtacagagagacagtcagttgtcctcagaattggatccagaacctcgtcttctggcatggccccccagtgcagcaccacatgtggcctccgaattcccagtctgggattgggggagctctggtccttgggggaccaccatgctcttttggagttgtcaacttggtaggaaccctctggttccaacgctgtgcctttgcggccctctcctggcatctgctgtccctttaggaggtcctaccacccttttcttctgagcctggacaactccttcccttgcccccaggagcccacagccggctaaaccaactggtcagctagaaccaaccagcaggggaggtgcgctccaggggggcttctaagaggaggcagttttggagtcagaggtgaagtgtggggagtggga

SEQ ID NO: 174629 - DNA, 448 bp, Homo sapiens
acttgatttttttgcggcagtgtgtggtggctttgatgatctgatacaaaccttggttattcatctttctgttcttcccagaccccatttgttttccaaggaaatagcagttcactttaccacatgaagggaaatactgttaggaaagtcttgcagccttgcccgtcattaatcaaatttctccaaacttgaaaacccaagcctaacaagctttaaaattaagtctaaaggaagagtgaataaattggaatcaatttttgatattataaaatcacagtagcaatattggaatgtcattttcatggttgaacattaatgtatttacttgctaacatttcagtgaattataaatatttaaccacttaacatggacaaaacattatggagaatttaaattattataaaatgttttctctcccctaaagaagatttttgtttgagccaagac

SEQ ID NO: 174630 - DNA, 520 bp, Homo sapiens
gacattgtgcagtgtagagttgccttaaagtgcgtgatctgccagtgctttcttcaagtcacccttgccccgattcctcctgtttgcgctccccagggttgctcaagtggaaattttgtcagctgtttagccttttcgtacttggcgtgatgtcaacttcacttctaatctgcaaaagcagaagctgtttcctagtttacctcgcgtgtgtttacctatatggagtagctcgcagagatcacagaaaatgcttgcagcctaaggcagggttttcagaccgtgggtcccagcccatttagtaaaatgggaaatcaattagcaagtggtcaccagcattacacagcaatgaagcagaataaagtaggccagaatgcatcatgtagtaaaggcaaatactgttttgtgaaacttttcacccatacatctaaatgtgagaactggttgcaatgtaagacatttcttgctgggaagttgtgagcaaaataagttgaaaacactaataaagaaaagtctgtctgag

SEQ ID NO: 174631 - DNA, 365 bp, Homo sapiens
ctgggaagtttttttaaaaaaaataccagtgcctggatccaatcccagaccagttaaattagaatctctgggtgggcttagctgctttattttttgttgttaaaaacaaaacaaaacaaaaaaacatctatacaggtgattctaatgaatccctgttttgggatcccctgtatccaggcttgagaatcacattctaggcagataaaccttcttaacaaataaaaagtaagtattttgctcttctcatattgttgaaaaaaccaggagattggttcatcttgaggaagggaggttttggtgggggtgagaatagctgctgcagattgttctgtgttaaatgtactttaaagcacttggataaaatt

SEQ ID NO: 174632 - DNA, 950 bp, Homo sapiens
tattgtgtatgccatggctttgattctcatcaccttgtaacatatttgaagggatataagctgccagatattccagcattgctaaatgagtcctggaaatatcaaagccaggtatcaaaagccagctatattttgttcgccagtgaaatttctttagcagcggcaaacatatcccatctgctgtgcctgtctcaagccagtagcggaacctcaagtactctccacattgcatttaatctttatctttctatcattatgaccctccgtgttgggagatattttcactttacatcataataataaaataaaaggacactactaattgtgtatggtgagtctagctgattagggtgtgtgttaattagtttgaggtcacaggcttatccttggagaaaccagttagctcttacaggcaggaagccaaggttctgaagtctaaccgatctggttaaaactgtacagagtaggattcagaaaactttgtatttaatcaacctatgccaaagtctgagttctatgttttatttctatcaccttcccacttaaacctgctgtacgtctggtaatttgtcttgttaatagcaccattatccaaccacccagaccagaaacatgggacacatcctagactcttttcactctcttctgccccacgtgtaattatccttcatgcagttaaattctaactcttaaatacttcagctcattcctacattgcctccttagtcctctttcatcatatgtctcttgtgcagttctaataactatacatggctgttcatagaataatattgataaatatcctaatatttagcagttgaatggtttttctctacctgtccactgccaaaaataaataagtaaatcattcttctataccactacaactggagtgacctttataaaggcaagtctggactttgttgtaaattcactggtgtttcctactg

SEQ ID NO: 174633 - DNA, 286 bp, Homo sapiens
catggttcagttttgttttcttctgctaaaatgggatcataccacctgtattactgtgtgattcatttaatatttctaggcaatcttttaatgtcagtacacatagatttacctcattcattttcagccgttccacagaattccacaagacagacatgatttacttaaccactcaccatctaatgaatattgtttcctaatttgtcatcatcacaaataatgctgctgctctaaggaacactcttatatatgtaaataagcatttacagagtttataaaaattggc

SEQ ID NO: 174634 - DNA, 201 bp, Homo sapiens
gttccgagggataaagagagtaggagcatttaataataaaaagtgtgtaatataaggtgaacttataatcgtttggtcattaagaatcacttaactgagttttaatggacacctatataacatacttctaggaagaacaagtgaagttaagtgttctttgagaagaatttaaaagcatctatatagatcaatactttacta

SEQ ID NO: 174635 - DNA, 575 bp, Homo sapiens
gagatggtttggggatgattcaaatgcattacatttgaatcaactagatggccccatctggaagtgatgggagatagtgacggatcatcagtcagtagattctcataaggagtgcacaacctagatccttcgcatgtgcagttcacgatagggtttgcactcctatgagaatctatgccgcagctgatctcagaggaagcagagctcacatggtaaggagaggaatggggatgaccactattggtctgtggcccaggggttggggacctctgttctatataacagagtctaggggaaccactaaataagtctatgcatactatgtgaactaaagtaaaaatgacaacatccctgagccttattagtttcttacttgatgtgatcagggtgattttaagaattaaatgagaaaagacatgaaaagtcctgagcacagtgttaggcacaaaagagatataacacttctgaaatctaacttcaggactcaagactgctactaagtagtagcaaaagaagagaatcacatacttgcagtcatgtggattttggagccatagtcttacttttagtaaact

SEQ ID NO: 174636 - DNA, 388 bp, Homo sapiens
tttttgtattttttgtattgagaccaggtcttgaactcctggtctcaagcagtccccccacctcggcctcccaaagtgctgggataacaggcgtgagccactgcgcctgatccacacaccatagtttttaaaatgttattttactcacaagagggctttggaaaggaagatcctgcccagcagagcctacatgcgcagacaggacagaggacccttaaggatcaatggtcttgttgccggaaatggatgtctggcgcaacccccggagctagttttggggaggccgccttgttgactgtgcactggaaaatgcacattgctttatcgtgagctctcggtgcacagtgtggtttccaggctctgagtggccaataaagctggtgctgtc

SEQ ID NO: 174637 - DNA, 444 bp, Homo sapiens
gttgtcctgcagaatgttgatctccaaatatttcctttagcacatttttcctgcattaggtttatcattgaacagggagaacatagggcttctgttatgatagaggagtgcagtgttcccatgaaccactcactggtaactatacaaacttaagatttttttttaaagagctattttaaaacacttgggccatatccaaaaggagacaaagccagaggatatagtttaatccccaaaactgcaattagaagggaaaagtattgctagtttatggtttcctgggccaagggtgctatccaactcccattgctgtggctccagagagagacagggcagaggaaccgaagggctcctggctaaaggtgctagaaatcagaattcaaggctgggaaggcagctggaaaattaaaggggaaatcatagcagcacgatagcagcacaaga

SEQ ID NO: 174638 - DNA, 538 bp, Homo sapiens
atcacacagcgaagcagtagttaggctaggatttaaacccaggcattttggctctggagtctggcctcttagcctccatgccattaacagagtccctctgtgttgagtagatgtggctctgttgatactttggtctgcaggactgtaggaaatgcttagtaaatgctgagtcagccagaagcggtggtgaaaggagcagccaagtactcatcaggagggaattcaaaaaaacggatgcatttaacggctgccttggatatggtcagcattggttctctaacgcaggtgatacctcggtgcttgtcagcagggcattaagaaaaggctttatcactggtgatttccaagtattcagtaaaggcaaaggcccttgggatctgtgttaattctgctaggagatcggggtcggggcaacgcatgagattgagaaatccaagataaacctttgctttgagaacaatttggggatccatttaattgtatctggttgatataaggccagaagttgccacagggctattaaactgaataaaaaatc

SEQ ID NO: 174639 - DNA, 424 bp, Homo sapiens
tgggagctcagattgtagtaggttgaatatgctcaaaagcatgctgaagcctgccacctaacttgtggaaaaaagctggcacttgcttcaagttggttgtaataacacaacaaaaatctcataaagcctggaatttaaaaatgaatattctctattttatatgacatagtaaagacttacaaataggtaagtcgtcgatgattacactagtaaatagatatttgaacatatacttgcacattcagtgaaagttcatcttcagtctttctgttttgaattggagttgtaactatgctgttggtctctgatgctactggggaagccggagagattgtattgtatgggtgttagaagttcagtagacctaggccaggcgtggtggctcaaacctgtaatcccagcactttgggaggctgaggcgggc

SEQ ID NO: 174640 - DNA, 474 bp, Homo sapiens
ggcagagccagaatgggtattggttaaaaagatgagactaacttctcacctacaatgttctgttcttaagataattattcatataatttcaaaatatgtatacaggaaaaaaaaagactagctgtaaatatgactgaaaggttcatagtgcttcattctgggattcgggagatgagcaattcttattctctccttttatctttctcctaggaaggaagaaaagaagggagggagggacttatgcaattgttatcatcccttgacattgctgacctgaaatccaccagtgctcctgggacttatcagatcatgggtttcaaaagagtgaggaacagccaggagctttccagcatgctttcatatctctgggtacctaataaccaaatcatggtttctctgcaccatgcctggcagacttgaggctgcctgcccagctgacaaaaccctgtttctctgggaaccaagcacactcca

SEQ ID NO: 174641 - DNA, 377 bp, Homo sapiens
tattttgtactggctcctattgaagttcataatgattctgtaggagagatggaaagaagtccctgggctttctgctttgcctaaaattggttgatttccttgtatagagtagatagatttttcatctctggcaaaatgttgccactgtatatcccttttcctcttggatttgatcttagagtcacgtctaaaatagtttctactttaactttttgggaatttgactgtggcatcacttaagaacttatttgcaagaacgctagagacccacccagacatgagttgtgttgattactttatatgtgaccattttcattgttctagttctcttattcttgattgtaggtgaaatcgccatgcttggtggtgtgggagaa

SEQ ID NO: 174642 - DNA, 268 bp, Homo sapiens
attctttacttttctacattatctgcacaaacagcaagattctctgttttactatgaaaacctatggtttctgccaacttattatgtccttgattatttaaggaacaagtttctccttcaggaaagtttcttgacgatcatgttaccacttatgtttactttcaaaatatttattgtcacttgggttaaatataaagtcatctattatttcttggtaacccacgatcctatcttaattgaagttttcaaatctcctggcaacttttaa

SEQ ID NO: 174643 - DNA, 414 bp, Homo sapiens
gtcacttgtgataagagctgggcatctgcttccaaaggctctgcagcatcaaatactctgcattgcaaaaccagtggaccacctcgcctagacaagggctcctttagctacccctggactggtttgttcactttttcttctatctgttttgccctttgatgttaaatgttactttgtttgttgtagaatgtttagcctataacattcatatattgattaagtatactatgatgtatggtgtgcaatactgactggcttgtggggtgacttgagcctgtgtgctcaggactatgtgcccgtgactccctagtgcatgggaagtgtgatggagaattgccttcttgggaactccatgtagctcatggcttttgtgattgaaataccttcaataaaagcctgacattgtggaaagac

SEQ ID NO: 174644 - DNA, 173 bp, Homo sapiens
taactcatctcccagttgctaaaggttagtgttcttggtccagtcctcacaatgcttgtctaactattcaattcctttaggaatctcttccagtccagactctaaatgccatttctatataaagacttcaaaaatttgaaatgtaggttggaccactctccatggaactccac

SEQ ID NO: 174645 - DNA, 470 bp, Homo sapiens
gacgactgcccatctcacctctacctatctaaattcatgcctatctcaaaccatggcactgagaggagaggagaggcatgaaatgaatctctgagaactcttcatcgtaaagttagccttaacaaagacaggccagtcatcctggacaagaaacaaatcatttctggatgaaaccaacttcaatttaatgctccaatgatctctacagataaagttccaagaaatattgagtccatagtaaaaaaatcatgaggcacataagaatcaaagaatcacgagaaagctagcaaaaatgacagtgacaacaaatatatgtattagatattggaattcaaataattagattatcagaataatctaccatagaataaaaaacaggtgtgttaaaaatgtttaaaagttgggcatggtggccaggcgtggtggctcacgcctgtaatcccaccactttgggaggcagaagcaggaag

SEQ ID NO: 174646 - DNA, 241 bp, Homo sapiens
attagccaagtgtggtggcacatgcctgtaatcccagctactcaggaggctgaggcaggacaatcacttgaaccagggaggcagaggttgcagtgagcccagatcaggccgctgcactccagcctgggcaatagaggcagactctgtctcaaaagaaaacaaaaaaccacacacagacgcaattaattatttgggctggacaaagggctcatgctcttgatcccagcacttcgggaggctg

SEQ ID NO: 174647 - DNA, 220 bp, Homo sapiens
ttgactggtcgatctctagcaggatccccgtcatcaaccctctacctgcctggcacctcttctgtccgtctgacctgcaaagcagccagactcatgtccactctgtcttcgcttatgctattaccacatggtctctcagcccacccagatctttctagagccagttcacatttggcctccccagcaactagactcaggggcgctttgtattgttacttaa

SEQ ID NO: 174648 - DNA, 176 bp, Homo sapiens
ccgtaggtaaaataataaagcagctcttggatgattgtcagttttttatatttataaccctctctaggcactttttacccaaaatagtggaaacaaggttgtgtgtccataaaactatgttttacttactcagcaggtgcataaaaggttgtgaagtgagctcttcagccagatct

SEQ ID NO: 174649 - DNA, 561 bp, Homo sapiens
ggttcacgccattctcctgcctcaacctcccaagtagctgggattacaggcgcccgccaccacgcccagctatttttttttggtatttttttagtagagatggggtttcctcctgttagccaggatggtctcgatctcctgatcttgtgatccacccgcctcggcctcccaaagtgtgataattcctatttcttaagaataaatgagattacagattgagctaggtgattactcaacacattttatgaaagagaataagcacaatatagaaatttcacaggggtagtgtattagttattgttgcataacaaggttttccaaaatgtagtggcttaaaacaacaaactgattatcacaagtttctgtgggatgaggcttaactgggtgcttttggctaaaggtctgtgttgaggttgcagacaaaagctgtcagctggggctacattttaatctgaagactgggagtgtgggggttatatataaactcattcactggcttttttcttgcagcataatgttgtggaagttcatccatgatgtatcatctattagtatttgttc

SEQ ID NO: 174650 - DNA, 328 bp, Homo sapiens
tcaagggacaagacttataaatgcaatggaaactgtctcaagaaacaaaactttattccagtggtctctttggggaaacatgtacacagctattcagcaaattcactgtcaccttcattgcaactgaagagaataaatactcaagtatgtgtcttagaaagaactggtcagtccatgcttactaacttatgtaattctgcaataatctaacttcatttcttctttggacagcctcaaaaaaggtgaagaagagttcattactactctccataaaacactgcttcatataattttcaactgtttaaattggtccttggtctttattttc

SEQ ID NO: 174651 - DNA, 747 bp, Homo sapiens
cagttaatggattagggcccaccctaattcagtatgacttcgtcttaaacttgagtgcatctacaaagactctatttccaaatgagatcaccttctgaggttcccagtgggcatgaatttatgggcaacactatgttaccaaatacagtcgctaactgagatgaatttaggattcacactgaaggtggtacataagattttatggatccttgaggtatggtgggataagaatccggtttggaacatggtttcaatagcacagaatatatctatactcaccctcctttcccccagactcaaattatagtgagtttgaaattattatatcagagacagtaagttaagtcacactggtgacattttgtgtgaattcagagcagagatgaagaggagttgttatctgggggaaattgtggaggacgtgttcctcatgctcgccctaaaactggtgcagaggcagcatgccctgtagtggtgtgctcacttggtgctcacgtgtgcttggagtacacctattaaaatagaaagtcaaacagatttttaaattggttggtaacactcagcatctcttagaggatagagaggaagcagctggggggaactattacttgaaattagagtactttccaaaatgacagagttgatgggtggagtgaaagtgacagatcttgagagaaaatgagctgatgagcctagtacaggaaacctgaacttggtcaaatgtttatagactagaagagtgtcaaa

SEQ ID NO: 174652 - DNA, 277 bp, Homo sapiens
taggagggtcaggcaccatcgctcatgcctgtaatcctagcactttgggaggccaagcaggaggattgctttgaggccaagagttcaagaccaacctggctaacagagcaagaccctgtctcttaaaataaaaaaaaaagaatatctttatgatttagagggagaaacatctcttaagatacaagaattatttactatagagaaaactattgatatatatatattttttaaattttattttaagttctgggatacatgtgcagaatgtgcaggtttg

SEQ ID NO: 174653 - DNA, 322 bp, Homo sapiens
ccaatatggtgaaaccctgtatctactaaaatacaaaaaattagccgggcgtggtggtaggcgcctgtagtcccagctacttgggaggctgaggcaggagaatggcttgaacctgggaggcggaggttgcagtgagctgagatcacgccactgcactccagcctggcaacagagtgagacttcgtctcaaaacaacaacagcaacaacaaaatcacaatcacagaagccggaaagtgttttctgagccccaggaacatcaggcggtcttaccctgttaggatgctggtcaagtctttcgtggtatgccttcatctgacctcc

SEQ ID NO: 174654 - DNA, 426 bp, Homo sapiens
taggattgcagacatgagtcaccccacctggcctccatgtttactttttaaaataagctgtttatcttggaatatggcagataagaagccaccttacaagactgctcacaaaattcctgtgaaacaacccctcattactgctcttgagacattttatagctttatgcactcaggcactgtgagattaaatggcttgccgagaactggataatgaagagatgagagagtccagagaggattgtttctgtttcctgtttgtagacacccactcattaacccaacaggaatttatcagtgtttttattttttacaggagcgtacaggaagggtatttgtttctgttcccacagcattttgtagaaatctcttgatgtacttaacactttttacaggaatttcttgtctgaatcttcttgtctgtctccc

SEQ ID NO: 174655 - DNA, 537 bp, Homo sapiens
cctcttgatttcttatagccaaagctcaagcccagcatctttttttttctttctttttttttttttttctgacagtctcactctatcgcccagactggatgagagactgtttcaaaaaaaattaggcgggcatggtgatgtgtgtctgtggtaccagctactcaggcggctgagctggttacatagcattcagtcacttacacagcactgccacatccttgtgatctgcactgtggttgatgtttttattatcatctcttccaccctcccatttttcagaaaaggacctgagttccagagagtgctttacccaaggtcacacaagtcatcactggaaactctgtcaaaacccagctgttctgaatactcagtgatgcatttactttatttttttgagacagagtgagactctgtctccaaaaaaaaaagaaaaaaatcaagaggcaagaatgctttggtgattctgctctggtgggtttgagaaggaggcagaatgatcttttctgaaagcggtgtcagggagttgttacgacctgg

SEQ ID NO: 174656 - DNA, 267 bp, Homo sapiens
tcttagtactagagataaattactatttgattgtatttatcagtatacttagaattcctactcatttttttctgtggaaaaaaattaaagacttgctaccaagattagggctataaacttaaaattttaagattatgcaatatcacaagtgtttttctttccataacctcaactcccacaaatccaaactaaacttataacaaaaatgccataagaaggttcaaccactgggcatggaacctctactgccaccataccgctaaagga

SEQ ID NO: 174657 - DNA, 402 bp, Homo sapiens
gaggtttacaggaactgagtggcttcctcagagtgtgacttctacagtgagtgaccagggggcgagggtccagacaactcagggcacaccccactccaccccgccccatcctaccccttcctggcttccatatcgagccacacaacatccagcaccttctccatgtctttatggtgttgatatctcactaaagctggtgagagaaaagctctttccaaaggaaggtgctagatgaatcttttggaaggtatgggaacaaaccttggtttctgcgtatctgactctgaggaccagctaagcctcatgtttggaaagcagaacagaaacaatgtgcagactggcattacctcagagcacacttgcccacttggagtccttctgtaggccatggacctgtgcttt

SEQ ID NO: 174658 - DNA, 481 bp, Homo sapiens
acgcgagtctccatacccttggtaacacaggtcaggtggagaagttgttgcaagtcgtgatggacgaagttgttgcgcaacaacttcgtccataaagacctcaacgcgaagaaccaccagttcatctagtccactgacaccagaagcctgggtcatgctcgcacctatgctatcttcttttttttctttgagacagtcttgctctgtcacccagtctcgagtgcaatggcgcaatctttgctcactgcaacctctgccgcctgggttcaagtgattcttctgcctcagcctcccgagtagctgggattacagatgcctgccactgcgcccagctaatttttctatttttagtagagacggggtttcgccatcttggccaggctggtcttgaactcctgacctcgtgatccacccgcctcggccttccaaagtgctgggaatatgggtgtgagccaccgtgtccggcctaccggcctaggct

SEQ ID NO: 174659 - DNA, 234 bp, Homo sapiens
agtcagggccaacactccttggttcctctggctccctggaaagggaaagtcaccaagaggcagctgcaggcagcaaagagaataagcaggagaacctcaaagccacaaagggacagcacacagcatcttccctgtttagcctggacttgagaatgctgtccccagcagtaagctgctcaacctcaaagcaacttgcacgggggtttacaaaaaaatgcacttggccgggcacgg

SEQ ID NO: 174660 - DNA, 554 bp, Homo sapiens
tatattgtctatgactccatttgtgctacagcaacaggcttgaatagttggaacaaaaaccatgttattgacaaagtcaaatatttatggtcaggccctttacaaaaaagctttgccaactcttgttctctgttttattatgaacattaattatattaaatgtgaataaattaaacattctaagtacttaaagtgcacacgcatacacacacacaaaaccaactatgtgaacaacaatgtggttcaaaatgaaaaggatagaaaaagttacaccatgaaaatattaattaaaagaaagcaaacataggcctagtgatatgaaatgaaatagatttaactaagaaatattactatagataaataagtgaaggagttaaatccgtggtaaattttgatacttctatacccaacttcaagcttcaaaatgtacaaaagaaaaaagtgacaaaactaaaagtaaaaaagaagcaaatatacacttttaagggagaattctttcaccatggagaataagcaagaataagcaaagaaaaaaataaaaggttctaaacagc

SEQ ID NO: 174661 - DNA, 327 bp, Homo sapiens
actctgaacaatgttgcagtgattatcctcatacacatcaattctcttgtgtacaagtaaatctatagaataaattcctataagaattgttaaaggttaaaatttttaaatccaccaaatttggtgggtatttccgctattcataaagataatacatgtttatactcctaatgacaacatatgagtgccacttttatagcttgtcagcagtgtcttatatgctttgatccttgcaaatctgagaggtgaaaatattttattataattttaatttgcctttctcttatcaggagtgtgatttagcatgtttcaacattttcagcaacc

SEQ ID NO: 174662 - DNA, 847 bp, Homo sapiens
ctccacggagctatgaggagccagggaaagaacgccgtgtttcctgaaatgaggctcgcataccagtcccagccagaggcaacgcgacacgaacttcacacggagcttaaaataaccttgaataacgcagtgagaaagtcattcctttttcagttctcctgacgactgtcaaggagagaggctcagccgggtgctagaatatttttgaatgcctaaccctttgctactcttttgaacaagaaaagcaggcctcgggctcaaaaaatggagctggcaacagccatctagcgagtagggaaacacctttgtttgcttttcattgtctttggcttctgtgtggcttgtttcttcctctctgtgccaaatggaacaggtttccatttggaaagtttccacatataaaactttcccccacctaaagaaatgcacaagtctctcttgctttctaaaggtgattggcacctgagtaagtaacaggggtttggagaatgagaaattcatttgaaaatgtagggtcgggtatgatggcccatgcctgtaatcctagcactttgggaggctggggccagaggatcacctgaacccaggagttcgagaccagctgtgcaatatagtcagaccctgtctctaaaaataaataaataaataaaataaaataaaataaaattagccaggtgtggcagcatgtgcttaggaggctgaggcaggaggatcacttcagcctgggagatcaaggctgcagtgatgcagagagctgtgaccacgccactgcactacgacgtgcacttacagacgtgagacatatgttcggacacacaagatatcagtaagtgcaaagtttctgcta

SEQ ID NO: 174663 - DNA, 157 bp, Homo sapiens
ctgaatcatgtgtactgagctgggaggaggctgagatcacccagggatgattccagagtgtggggcaggatttggagacagagccctggccttccaaataggccctggatatgagaaagaggggagcccagagagagacttgggaaggggcagccag

SEQ ID NO: 174664 - DNA, 467 bp, Homo sapiens
aaaataaagaataccatctacagccatatgtctggaataattcaggcacagccctgtctgacaccagggggagaatatgctagataatctaaactctctcctagtccctaaactctgaaactggaatcaaagccactggcttgcagtcagatttccttttgtctattttcactctgagcctggaaaggaggtgatatggcaaggatgacccaacaccccatttggactcctaactgatatctcagtatcaggaaaagcttttctctgtatactgtttcacacctccaaaacacagtcaattcacagaccacttaaaacggaagataatgcaaatacctggctctaatggacgctaggaggttccttgccttactctctacaactgcctgctttcctaatcatgtcttggcctatgctcagaattgcacaccacctgaaaaaaattatgccaagagctaaaactataa

SEQ ID NO: 174665 - DNA, 447 bp, Homo sapiens
atattttttctgccccctcctctttctcttctgatacgtgaaaatcctctttgctcaccctggctccagtgtgctgcaccaggaaggcttgtggactgacagctgcctgccatgaggttgagggtggaagatggtagctgctacaatgtgaaagctgaacttgaccatgattttctgaaatttaccagagactttgcccctggatgctacaagtgttcttctatactcagagttccaaaatagttgtctcacacagttccttacacaattaattcaattgttttggtgaaggcacaatttcctggagctttctactctgccatctaccctgataccattccaataacaactaatatttactgagtacttagtctgtgccaagtattgttctaacacttttcatcttcatattggccctataaagaagtgtattacgaagatctccat

SEQ ID NO: 174666 - DNA, 316 bp, Homo sapiens
tgtgctctgattactgactgcttctgatgatagacatgcagatacccagacaagcagtcattattgcaaccaccatgagttgaaacagcttccaggagatttaaagggttacagcctattttcctctcttttatttttcccccttttcccttttgggagccagacattcaaaagcaactgtatatatgggacaatgtagaaaatcagcaggcatgcccagggaaaagcagaggctcagaaaaggcctaggaagatgttaagcttacatgtaaggctgattcttggtaaagagatagccaacaaccatcaaaaaata

SEQ ID NO: 174667 - DNA, 407 bp, Homo sapiens
tgtatggatcgtcactgtgaattggggcaggaggagcagggtatttatgtgtttttgcttatggaaatgcactccagagttctgctttttcctctgcttgaatcacttgtcaccatctctggatttgtttttattttaattacttggattagaattcccactgcatgtaagtagaatgacacaggttttgggttttaccttctctctttctttctctctccctatctttctttctttctttcctgggacccagacagaggtcaagcttcttcatgcccagggctggtgaacagtgtttctagtgcccaccttgtagtcaggatggtatttgttgagttaatccctgcctcacaagggtctggagcctgaagacatcaccctgcacaaacgttaaacccccggcccca

SEQ ID NO: 174668 - DNA, 447 bp, Homo sapiens
tcaggatatttcaaaagagacctcacaatgatatgcagatgcccatggcagaaattcatcctggattatacttacgaaatcttgataacttgttttttagtcacatccactgttttctgcaaaggtttttgttgaaatccagctaatatatttcagtcagtcttgatatcaatcagttgttcttacaaactcattgcaaaatttaatacttttatatgttgaatttaataaatgggttcaagacccctgaaatacttcattttgggagattttaaaacaagttttgatgttctgttttgagtgtgtgcagataaggagattttagagatgacatccttacattgaaattggcaacattatcacataatggtagaaatgatttccaagtgcctgttttaaaagaacaatggctttcttacccattaaaaaaaattctactttcaccat

SEQ ID NO: 174669 - DNA, 457 bp, Homo sapiens
agaggactccgtgatgttatgcccaacacatacccataggtctctaggtctcctttccggatgctgactttctgccgaatactgtgctacatgctttaagtacattatcttgttacatcttcacaacaagagcaagtctattattatctccatttttcagatgaggaaactgaaaagccctagaaaagtgaagtgacttgcccaaggtcacacagccagtaagaagcaatgctcagactggaactcagagaagtcggaagccaggccctgtattttcaactctctcatctctctgtggtaggagctggcaaagacgctttacccagaaacccttcttaattaaaagcaaaacaaacaaaaaccaggaagggcaagaacaccgcatctgcagtctacatgcagaactgtgtgtccgacctccattttggggctgcccctggagcaagctgccagcaag

SEQ ID NO: 174670 - DNA, 339 bp, Homo sapiens
agttcgagaccagcctggccaacatggtgaaacccccgtctctactaaaaatacaaaaattagccagccatggtagtgcatgtctgtaatcctggctgctagggaggttgaggcaggagaattgcttgaacccagggggcagaggttgaagtgagcagagatcatgccactgcactccagcctgggcgacagagtgagactctgtctcaaaaaaaaaaaaaaaagaaaaaaaaacccctaattatatatctaaaattcttgtggcttttttcacgctcccttccgtcccaggcctcaaaatcagaacagaggcaggttattgtttgttttttaagtttc

SEQ ID NO: 174671 - DNA, 253 bp, Homo sapiens
tctcaaaaaacaaaaaaaagaaaggcatattgaccatctttggttttggtgtgtataaataaaataaaggcagccacaccaatctgtgatgtgaggcggccagcagctacaggacaaggcacagctgaaatacagaggcaaggctgtttgtcttaatagttcactatacagtttgttttaggcagctttctgtaccttttattttataataaaaatatagaagatacagttaaccattatatatatatatggg

SEQ ID NO: 174672 - DNA, 173 bp, Homo sapiens
  misc_feature (34)..(34): n is a, c, g, or t
gaggatctctcagacagcggaccccctcagacantgccgacccccacttccgggcctgcaggttctcagggggcccgacccacccatcaggctgcaaacccacccccaaatgggcatgttgcttgggactgcactgaagtggtaacgaattccacttggagtgaacgaacccc

SEQ ID NO: 174673 - DNA, 671 bp, Homo sapiens
cacacacacacacacacacacacacactgtatgtctccttattttgttcttttaggattttctttctgttaaagccagcagttcaagatagttgcaacagagggcagaatggtgtaagaaatttaaatatctttttcttcttatctgaaaatcaccccaaaatacaaattagagcaatgcatggattgagctataaatactctttattgactagttttcaacatttacatacaaagattattagttatttttcatgtcatagtataaactgtttggcattatatgtaaatcttaatacaagcaaagtgctgaacccttgagagagaacctgaactatggctaatgcatttaacttctatatcaatattaagattaagcaatgggtactctttgttcttttccaaacatgctgtgggattatttacttttctttccattctagtgctgcagtgcaggcttattgaacttactgtccttgacaaatgtcgattaatgttctttattgggagttttttgaagtttatgggcaagaccaatgaagcagaagagttgttcttgagtgttgaggacatgttagtacaggtaaactgagagtatattttaaatccttcaaactttattccttttgtgttagatattttcagatattatttacctttgttcatgtaaaa

SEQ ID NO: 174674 - DNA, 569 bp, Homo sapiens
ctcaggctgcagtgcagtggcatgatcatggcttactgcagcctcaacctcctgggctcaagtgatcgatcctcccaccttagcctcctgaatagttgggaccacaggcacatgccaccatgcatgattaatttttgtattttttgtagagacagggtttcaccatgttgcccaggctggtctccaactcctgagctcaagcaatctgcctgcctctgcctcccaaaatgctgggattacaggtgtgagccacagcacctggccaaaattcagcatttttaagaaataagagaatatgagaggaaaaggcacatcaacttacctaagatgtttagggcgaggaaaagcttttaaacaaattacaacattgatctacctctcagggtagtcatgaaagaaaaaaccaaagcattgcgaaacatgggggaacataaaggacaaaccagcagtggcattgatccacatacacattccatttcagcgtatgcctggtaagattcagctcttttctgatccagagcagccccgtggtcactccaactagctctttacccagtgaaccaagctac

SEQ ID NO: 174675 - DNA, 561 bp, Homo sapiens
agtggttaaggtactgttttcccaggagattgcttcagttctggcccaaggtgctagagggaaggataggtatagaagctccacctctgtttggcctcacacggtaagatgtaacagctgcttccagcatggcttaagaattttgggccaccaggctggagtgattcagccgtgccttaacctctaagttgaagggatgtcatggctacttgccccaagaacaagacagactacagttgtaattccaataccaagatggcatagcacagtagctatgtggccacagggcatgagacagattgtcagctccttctctgaggcaacacagctatgtagaatccaggcagtaggagattataatagtgaagtctgaagatataatatgtagataagggttgctgggatccttttgcttacctcttcactgaaagaaaaagtgtttcttggttcccagaagatcttggtttgggaatggggtggtagatgcctaacactgtcttccattctttatgtggctatccaagtttctgcactaacctggatttctgttacattagacag

SEQ ID NO: 174676 - DNA, 640 bp, Homo sapiens
ttgcggatggagatggacacctagtgaatgatttaatccaccaacaattgtggcacacaggcatcgtcttccccacgccaggactcagaggctgagcccagggtgctgagaggctgagcccacagctccggggtgaggaatggagctccccgagcgcggcttatctttcaagggagctcacactcttttacaacaaccctcgaggtgagggctccttcagactctcccaactccacccatggccacagcctccggggcagggctcctgttcctacccacccctcaagctccttctcatccacatgcccaggctaacgttagccacactggcagcgggggaactgaccctgagcagcaggcgctggcccctgctccaagccctgctttccgagtgaactcttgtaccagctggaattgtctccgggtgcttcctccgtcagaccacggtcaagtgcaggtccagtgttttgggtcagatgtcagtgggcaggctcagcattcatccaaagaaatagcagcttcgtaattggttacttgtaggggtaattagctatctgcataaattaactgattcctcctcatagtatgtcccctatagacagtgagggttcaatttgctgttggtgaatttgctaatgtg

SEQ ID NO: 174677 - DNA, 169 bp, Homo sapiens
acctttttgtaagtccctcccacactgactctggaattggctatgtcacttactttgatcaataggaccttgacaaacacgatacaaacagagagttgatcagtgctggcatatggaagcttgtcctcttggaatctagtcatcatgctgtgaggatgtcccaattacc

SEQ ID NO: 174678 - DNA, 183 bp, Homo sapiens
ttatttacaagaaatggccaaactgttgtctagagtgtctgtaccattttgtacacccaccagcaatgtatgaatgttctagttattccatatcctcaccagcacttggtattgtcattttttgtttttaattttagccattctaactggtgtggttttgatttacatttccccaacagctaa

SEQ ID NO: 174679 - DNA, 370 bp, Homo sapiens
gctagacaatattggaagaatagttaaaatggaataatttgaattgaaaaagggaaagaagcagtctgtaaggcatgtgaatgactaacttcatttcaattgggctccttgaccagaagatgggtgcaaagttaaatgaccttccgtgatagtattatgtcttttatgacacgttacagtagagtatctgaaaaagattgttaatatgaagaaaatagaattgagaagccaacaggatgtgtacacaacatcttctttaacgctggcagtacacacacttcaatgaaatgaggaaggccgaaccaaatataaaatgtcttagttgtcttgttatcaccaagagataggagcaagatacattgttgtcatg

SEQ ID NO: 174680 - DNA, 407 bp, Homo sapiens
ctagataagacaaataagtgctcatctttgatagcactgcagggtgactataattaataatttaattgggaggatacaataaattagtaatttatattgtgtatttaagaacatacagtagaatattatattgtatatattcattattgattgtatatatttatttattgtatgtttataatttattgtatataaattatatacaatatattgtctatattaataatttattttatatattcagatagctagaagagcagattttgaatgttcccaacacaacaaaatgatatatgtttgctatgtgaataaccctgatttgatcattacacgttgtatgcatgtatcgaaatatcacactgtgccccataaatatgtacaatgatgtgtcagttaaaaataaaaga

SEQ ID NO: 174681 - DNA, 165 bp, Homo sapiens
caccagaaagaaaaaggccaaagagacgctgagacgggtcgctcatggggggcgtggcctaggaattccagtcacacacggttgcagggccgagcaggcggatcgcaagagagaaataggcaaagaactaaagctgtgatggaggaataatacggaggaggcgtg

SEQ ID NO: 174682 - DNA, 499 bp, Homo sapiens
actgcagcctaagctccaacaagagcgaaattccatctcaaaaaataaacaaaaatacaggaaacgtgttgactgttttagtaatctgttatattgacaggaccatagagtttgtggaggaatgtagcttgcacgacttctttttttaaaaagaagaaaaggcaggagttcaactatgtcttaagatatttcttaaagaaaattggtaagacaacatctcatttcttgcaaagtctctgagcagttttttaaaaattatttttgtctgctaaatattgctttaggtgtgccaagaagactagaatttgagctaagaatttaagaaaattaactttatctgcatttcatatttactttatcttggttttaaatgattgcttataccctagcttttaaaactaaacattcatagcctaaggatttttcatatcttttgactcttggaatgaaaacccattttgaaattaagtctatcgctcagctcttctgctttcacatg

SEQ ID NO: 174683 - DNA, 367 bp, Homo sapiens
tcattgaggatacagaaatgaaagagatcgtcttgtgctgaaaatgtggagtaactaaagtaccttagggactgatagcaggattgctagcagaggtcacagctgaattgacccttacaatttatttcagcagagcggtgagatagtatacgcaaggcacagggacgcccaagcagaaaaacatgaaatctcagaggtgtgtgcattctaccaccaccaattcccccttgaagtgccttcttcccactcctgcgaccaaccttccctttacccacactccatttcttggaataccctctatgctccatcccatgatccaggcttatgctcctcacactggttacctcccccaatatgagttacttag

SEQ ID NO: 174684 - DNA, 105 bp, Homo sapiens
aactctggaatgtgtgcactgaaaaataaaatgtactaaactatttacaatagttaggctgggaatacagaattacaaatagaattctcccacctaccccacctg

SEQ ID NO: 174685 - DNA, 359 bp, Homo sapiens
gcggctgtctagaggatcccagagataagcaggacactagtgataatgtagaaagaagtttcaaacacacagtgagggagaattcagaggaagcagaacccgagaagtactacaacagcaaaaatactacatgtaaaggtaagagcacttactttgaagacaagatgtctacagcgctaggaaaaacagggctggaaatggaaaaacttcttctttcaaaactagggtttgccctgagactgggaaatattaacagagaaaccaagtattaagtgtctcacattaacaacacaagaaggagtctttaatctctgaagggatgaaagctactttgggcaatttctacctcctcctcagaa

SEQ ID NO: 174686 - DNA, 254 bp, Homo sapiens
gtaacaagctactggtgaagactgatgattccagaaggatcaattctgaaacagtaactatgtataaagacccagttccctcagaggagactcacagaaagaccttcgcctgcttcctgcacctgggctccacacctgtccttattcagatattgtcattagccatgaactcctatgggcagctaaactccctccagtgatcagttgctcatccacagcatattaatgttattaaagatggatattacagaggt

SEQ ID NO: 174687 - DNA, 141 bp, Homo sapiens
gaagttcaaggatcagcctgggcaacaaagtgagaccccaacactacaaaaataaaaatacatagatataaaaataaataaataaataatccaatgttactttgttttattgcccaaaatgtttcagctttgccttctggt

SEQ ID NO: 174688 - DNA, 234 bp, Homo sapiens
tgcactccagcctgggcaacagagagagacacgtttcgaaaaaaaggaaaagaaaaatcagttttcttccactaaaacaattcccaagattaactggcgttctgtaggtcggcacaaagtcgtggctttgccatctgacggaggacgcgcagcggtcgtctctggctgggtagactgagacctgaacgctgagggacttaggaccagcagtgccgtccaggcctggctgcagac

SEQ ID NO: 174689 - DNA, 548 bp, Homo sapiens
tagctgagggacgccctgatatcaatcccacagccccggcactcgtgccctggagtgccagctccgtcttccctgcagaggcgtcagtggcctgctgtgtgaggcgatggttctcctggctgagttcctgcttcgcattcctaactcccagtcttggttaacctccatttccattactaatttgaacataattttggctttattcaaactatgatcagatccccataaaataccaaactggggatgtttagaacccaagttgtggagcactcactcttgtggtgagagaagcagggcccaccacaatggggggatctggggacctgcggtgagcgtgaccgggaggtggggccagatcccggcctcacccggcaatctgtggagcttgtggtgtctgtggacacttggtagtttaagaagagacacatgcatggaagtatatatgataggagaattcacataaaaaataaaattatgcttgctaggtacccaattttccaaattatttacatgcttgttattacatctgttggaaacttatatctgtt

SEQ ID NO: 174690 - DNA, 276 bp, Homo sapiens
attctacaaacccacatggagcacctcctggggaggtgttgtgctagaagtcacggaacctcagaggtgagtgagaaagccacggtcctgcctgatggatgcccaagagccttgggtcttcacacacatgtgaaatgtgggttttagcagcaggtacctttcatacaccatcaatagtcttccctatgtgggtaaaaccctaggggctgaggtctcccattggtgccttcagggctttttgctcattccacacaaatggtcagtcagagaccacag

SEQ ID NO: 174691 - DNA, 608 bp, Homo sapiens
ctcacagaagtaaaaagtagaacagaggatattagaggctgggaagggtaagaaggaggaggcaatagggagagatttttaaaagtatacaaaattagagctagataggaggaataaattctagtgttctacagcaatgtaggataactacagttaacaataatatattacatagtttcaaatagtgagaaggaggatattgaatgttcacaatacaaagaaatgataaatgtttgagatgatggatatgctaattgctctgctctgatcaccatacattatatgtatcaaaacatcacgatgggcagggtgttgtggctcacgcccataatcccagcaatttgagaggccaaggtgagaggatcgtttaagctcaggagtttgagaccagcctgggcaacacagcgagacctcatctctaataaaaataaaaaaaattagccaggtgtggtggcatgtgcctgtagtcccagctactcaggaggccgagttgggaaaatctcttgagcctgcaagatacgggttgcagtgagctgtgatcacgccactgcactctggccttctggcctcggtgacagagcaagaccctctcttaaaacaccaaaccc

SEQ ID NO: 174692 - DNA, 573 bp, Homo sapiens
tacatggggtgcagaggggaagaggcttagatattttctgtagtggaagaggtgtctcatcaaagtagtaggttcccaattagagcatcctcctaggcagtggtgcccattagcatgatttggtaggattctttttatttatttttttgctactgataacttagccatttgccttcttgtcttaactattagggtaattcacttttctttgggaggcactagaacatagcagttgagagattaaactctggattcagtcggcctgggtttggatcgtggctctgctctttactagatgtgtgcctttggacaaatcacataattaatgtctcagtgtccttatggatagaataggcctaataatagtctgtatcttcttttgaggaataaatgagttaatacctgaaaaatattttaaatggtacctgacattagaagcactcagtatgtattggctaccattttttttcttttctagctttagcatgcagttacgccatgtttttgatttcctttttgtttctgtatgtttaggtctcagtttctggtactagaccatactctttgcaggtc

SEQ ID NO: 174693 - DNA, 291 bp, Homo sapiens
tttgatgagtgtctcatatgatagggaacctcgtcttctgagggccaaacaagctaagagttaaatcttatcaattatgtgcctactgtatacctgtattagtttgctcgggcttccataacaaaatccacagattgggtggcttaacaacagaaatgcattttctcacagttctggaggctggaagtacatgatcaagatgctggcaaattaggtctctggtgagggctctattcctggcttgcagatggctgccttctctctgtgtcctcacatggccttttcttcatg

SEQ ID NO: 174694 - DNA, 355 bp, Homo sapiens
ttcccccccaaaaaaaataataaaagagaaagaactgagatttgtttgttagttataaacagcaacaacagatccgggaaaagaccaccacagctttatccagacttggaaagaaaaattgtgtgagaccttaaagggctacaagaaccctacaaagtttttcttagcccaagttttaatgactttgttaaaatttctgttgttaatttgttgtgtgcctacaggccctgacaggaatactagaaacccattgtaaattaaggtcttgaagacatatttatcaatcattcaataaaagtattgatatttaccaggttctgttttaaacagaagagacataataacagagtcaaat

SEQ ID NO: 174695 - DNA, 814 bp, Homo sapiens
gcctcctgagtagctggaactacaggcaagtgccaccatggggatctggccatgttgcccaggtgggtcgtaaactcctggcctcaagcagccctcctgcttcagcctcctgagtagctgggactaccgctgcacaccagcaggccctgccaattgactgcttttacagtgagtgcacccagggcggccgcagatggcagtgtctctggggacagcagctgcgaatgagtccacgggccaacgctgagctgctcaggctgaggcggtgtgctcagcacagagcccccggaactggcatctgcagggcgtgagccaaggccgccgcgatgccgcacttcctggactggttcgtgccggtctacttggtcatctcggtcctcattctggtgggcttcggcgcctgcatctactacttcgagccgggcctgcaggaggcgcacaagtggcgcatgcagcgccccctggtggaccgcgacctccgcaagacgctaatggtgcgcgacaacctggccttcggcggcccggaggtctgagccgacttgcaaaggggataggcgggcggcaccgggcggccgtcagggcgtcgcagcacggcccccacaacccctatcacgccaaataccaacgccccaacagtccctccaccctcacctccaaccactaagggccacgagggaacagcacatcggaacgatggggagctaacgccagcgtaagagaagaagggaggatgtcaacacatcaaagtagccaggaaagggcaccacagcacgcggacgacagggacaccacatgaggccatcacagaagcaga

SEQ ID NO: 174696 - DNA, 644 bp, Homo sapiens
gcctcctgagtagctggaactacaggcaagtgccaccatggggatctggccatgttgcccaggtgggtcgtaaactcctggcctcaagcagccctcctgcttcagcctcctgagtagctgggactaccgctgcacaccagcaggccctgccaattgactgcttttacagtgagtgcacccagggcggccgcagatggcagtgtctctggggacagcagctgcgaatgagtccacgggccaacgctgagctgctcaggctgaggcggtgtgctcagcacagagcccccggaactggcatctgcagggcgtgaggtgggtctttgggcacacggagggcaccgagtggtgccaatggcttgggaggtagggagaggggctctgcaaactcacactgtctcaggcagcacattggctgaaatgaggctggaaaattccatatagatcatctggtaaccccatccccaccctgtcaccgtgcacaggggaccctgaggcccagagagggtgaagaaggggccaagataacacaggaggccagtgagtgtgttgcttttccacctaggtcagttccctgagaaatcaggaagagaccacggggtcctcagtcagcctcagaatgcctgggattttgtgcacagggctgg

SEQ ID NO: 174697 - DNA, 741 bp, Homo sapiens
agccagtccaggactgccccctcctggcccactcagagcccctgggtgtgagaagctcgtctcccgtgggttgcattggctctgccctatctctgcctccagcacccagggcggccgcagatggcagtgtctctggggacagcagctgcgaatgagtccacgggccaacgctgagctgctcaggctgaggcggtgtgctcagcacagagcccccggaactggcatctgcagggcgtgagccaaggccgccgcgatgccgcacttcctggactggttcgtgccggtctacttggtcatctcggtcctcattctggtgggcttcggcgcctgcatctactacttcgagccgggcctgcaggaggcgcacaagtggcgcatgcagcgccccctggtggaccgcgacctccgcaagacgctaatggtgcgcgacaacctggccttcggcggcccggaggtctgagccgacttgcaaaggggataggcgggcggcaccgggcggccgtcagggcgtcgcagcacggcccccacaacccctatcacgccaaataccaacgccccaacagtccctccaccctcacctccaaccactaagggccacgagggaacagcacatcggaacgatggggagctaacgccagcgtaagagaagaagggaggatgtcaacacatcaaagtagccaggaaagggcaccacagcacgcggacgacagggacaccacatgaggccatcacagaagcaga

SEQ ID NO: 174698 - DNA, 850 bp, Homo sapiens
gaggttgcagtgagcagagatcacgccattgcactccttgtgactaatttgagtcacgacctaaagttggaatgaagacggtgcctgggtgtggactagctaattgcatgtgggcagcttgagttctttctttggtaaatggtcacctaacttttcttcctttgaggtccttgtgtgtttgagtctcaatgttattgttcgtctcactgtaatttgataccacgtactttaactcatatttttagtattgagtgccggattacacatattaggtattccttgatttctctccatcatttggcactttgaccactgtccttgagactctcacttcccttgccttatttctatattgtgacaataaactctggtagttttttcatacacctctagctgtttcttcataatctccttttccgtgccttaaatactgatgttctctagcagtccatgtttttctgttcttctcattctctttcacctgtgtagttgcttctgttgtaagtggtgaacttttatccaaactgctgacgtcaaatatgtaccctcagctcaaaccactctctgagatgcacactcctgaccatcttcatggcatattccaccagcaccctcaattcatgatgtccccagctgagttctgatattctgtctccaagtcaccattccagtccttctccttccatcctgaagcagcctagagggagagacagggaaggaaaattaagtttcagcacaaggttgagaagggtcttgagacagatgggcttgtggagcaataagtgggctctcatccagccctcaagggaaggaatgtaggaatcagtcccaaaaagtgatgcttgagcag

SEQ ID NO: 174699 - DNA, 322 bp, Homo sapiens
cccatcttaagcactcagaactgtctccatttcccttttgcccactcacttctgacgtggccccttgcaggctggctgtggattgcactctcctctgacaccttgacttcctgaggcccttgtttctttggcctcctgggcattgttggtcaccatttctcctagacctccttctccctgtccttctctgcactctgtcctgtccgagtctcccccttctccttgccctcaatgcctccacatcctccagctccctaatgctaggaatacccaacacctcggctgcccttctgcataatcctccagccttcacaggagccaa

SEQ ID NO: 174700 - DNA, 294 bp, Homo sapiens
catgtttgttgagaacagccacttccaattagagacccagtaaaatgttaatttattttaataaattttccctctagggcaagacaaagaatacttttgacaggttacagaaatatctgttcatggaacagagtactgttcaaaagttattgtatgccagtgattaatttttcaatttggcatttagagaatgatgagcagtattcatgacctccccctccatttttctccttacaacctcatgtatatataagagaccaggatttttcatatttgaaattatgttgctttacg

SEQ ID NO: 174701 - DNA, 716 bp, Homo sapiens
cagcttcttggacaacaaaactttaaaaagaaatagcttactaaatgctttcactccttgtcaggtagctacaggctacagcaatgccagtagtcaatgtggaaacctctttccagactgtatgagacatggtatgaggtagtagcctataacagattcactacccaattaaattcatcatgtcaataatttcaggacaagaaaaggcctaagttttcttaaggcatttaaacaaaaataaggtaaggtaggtccatgaaaataataaaccaataccacttctctaacttggttaagctactttccctattgaagatgtgtttccctaatataattgcaggttttgttaaggataataatactgagttaactattttagtcaaatccactttgaaactaatatgctagaataatatgaatatatactataatttattttcaaaggagatagatgtgccaagaatccagattaaactatggactgattaataagcttttcccatctcaacttcatgatactgccttcttcttttcctaatataaattctacctgtttaatttttctaatatgaaacattacacccaccttcatttacattctggcacagtcttccaatgacagcaatatccaaaaacaggaatatattgtccactgaaaaatttgtattagttatctctgtctataaattactccaaaacttgtcgggctcagatgg

SEQ ID NO: 174702 - DNA, 467 bp, Homo sapiens
actttgacacagcagcagactccctctctcttgatcccctctgtcaagttccaagacgtgacactgctggttttcctcctcctcccttctcaagctctcctatctgctcctccagctgacaaatactaaagggactcaaggctgtttctgagtcacctttctttctagatgtatttctctctacaggcagtcttatccctggtcacacatagaattaatcatttaaatacccatgactcttaagctatttctttggcccattgcttttctgacctccagaaagataccccaaagtgcttacttgtaattgtcactttgctgtttcagaggaaactcaaagtcaacaggtcccaaactgtgacctccattgtgcctaccactgctgcctcacacacacacaaaaaagctagtcctccttcagccatacctatctagatgaatgcagtaaccatccacctagccatgaa

SEQ ID NO: 174703 - DNA, 419 bp, Homo sapiens
tgcccctcgtcctgttgccttttcctgctggctggaatgagaacatggtggcagtgagccatcttgggtcatacagaaaaggataacactctcgggatggaataagaagcctgacagccctggatggctaacacctagactatgacatcagagagaaatcaacctctatcttgtgtatgccattattacttggggtctattacatcagccaaacttatatctttaccaaatcagacatgcctaagatgcctttcctatgccaatgtcaaattttcagttgccagcaaatgtttcaagcttgtcttagtgatgctgactgccaggtaccaattctgtttcagcaggatggttgtctctgcacagcaatgcttgtgctgtgcacacattttaacacttggttatcttttgcaacacaaaaa

SEQ ID NO: 174704 - DNA, 543 bp, Homo sapiens
gctcagtggggagagatggaaccgagtgagaggtcaaggtcagtggggagagacaggaaccgagggagaggtcagggtcagaggaggagagacaggaaccgagggagaggtcaaggtcagtggaggagagacaggaaccgagggagaggtcagggtcagaggaggagagacaggaaccgagggagaggtcaaggtcagtgaggagagacgggaaccgagggagaggtcaaggtcagtgacaagagatgggaaccgagcaagagcgtgaggggcagccgagggtcagaggaggagagacgggaacccagggagagggcagggtcagaggaggagagacgggaacttgggagcagagtaagaggtcagggtcggtgaggagagatgggaactgagcgaggggtcaaatcagggaggagccatgtgttcttgatcatgcccccctgaaggagccttggtacaaataataactcaacataaaagacgctgacatcaggccaggtgcagtgggcacctacagtcccagctcttcaccggccataggag

SEQ ID NO: 174705 - DNA, 414 bp, Homo sapiens
tctgagaggaaaaatacactaagtggcactgagcttctttcctgcaaagaaagcaggcaaaggacgtaacacaaataaaacatccaaacaaccacatttctttgcaatgtttgcattttccttcaccagggaaaaaaactctcttctaatctcaagactttatattaaacaaaatcatttcctgtaataagaattttgaaattaactggtaaattaactttcaaagaacaagcctagtttgtggaaaattaactggtgatgatataaggcactaatttaatgaataatgatgaggggaaataaattatacatcatataagaaaaactgcttatttgcaactttgttctggatagtaggaacagcatagtctaggacaaatccgcatcccatgatcttcatctcttctatcttct

SEQ ID NO: 174706 - DNA, 992 bp, Homo sapiens
  misc_feature (842)..(843): n is a, c, g, or t
  misc_feature (870)..(870): n is a, c, g, or t
  misc_feature (873)..(873): n is a, c, g, or t
  misc_feature (878)..(878): n is a, c, g, or t
  misc_feature (897)..(897): n is a, c, g, or t
  misc_feature (899)..(899): n is a, c, g, or t
  misc_feature (903)..(903): n is a, c, g, or t
  misc_feature (910)..(910): n is a, c, g, or t
  misc_feature (916)..(916): n is a, c, g, or t
  misc_feature (920)..(920): n is a, c, g, or t
  misc_feature (925)..(925): n is a, c, g, or t
  misc_feature (938)..(938): n is a, c, g, or t
  misc_feature (940)..(940): n is a, c, g, or t
ttttttcaagttcctgtatttttatgtggagttgctcactgcccaacgtagaggactaggaatcaggagtcggtggccgtatgctggaggctggagccgcgggagcgcggctcgcctcgctgcggttgtggcagtgacggagagagagcagcgcggctggagcagtgacacaaatcactatgtaatatagttagcctttgaacaacacggatttgaactgcaggggtctacttatgagcagattttctcccacctctaccacctgagacagcgaagaccaatcttcctcttcctccttctccttagcctgctcaacttgaagactatgatgaagagttatataatgatctacttgcatttaatgaacaatagtttcccttgcaaagttatcaaagtgctccccagaagacattaggtattgctttctagtctacatacaatgaaaaggaaaaaacgtcagttcctgaagctctctcaaaacatcaacagatggaaagacgtgcccatgtcctcccctccctccactctgggggcttggaaatgctgcagcagggagcaggccccaggctggacctgccctgtcctcacgacgagtgtgtgcaaaagtgaacaataaatcatttcaaagatgcaaggaagaaaaaccaaaacatcaacagaatcttctttcccataatcttcatgcacctcctggtccggatgagtttatgttcccatctccgagcacagggattgattgtgatggcatttataggactgagtggcccaaactctgtgatccagcatggagttatgatttacatcaccacaggaagagtacagaggcttcaacagaaaaaaannaaaaaaagaccttattcagttaggacntantaatnggaggagttgataacgaangngggngggagtntccgangganagggngtggcaagaaagncnggtgggaaagggggtgtgacggttggggttaagggagaagggggagcctgta

SEQ ID NO: 174707 - DNA, 989 bp, Homo sapiens
  misc_feature (976)..(976): n is a, c, g, or t
  misc_feature (983)..(983): n is a, c, g, or t
ttttttcaagttcctgtatttttatgtggagttgctcactgcccaacgtagaggactaggaatcaggagtcggtggccgtatgctggaggctggagccgcgggagcgcggctcgcctcgctgcggttgtggcagtgacggagagagagcagcgcggctggagcagtgacacaaatcactatgtaatatagttagcctttgaacaacacggatttgaactgcaggggtctacttatgagcagattttctcccacctctaccacctgagacagcgaagaccaatcttcctcttcctccttctccttagcctgctcaacttgaagactatgatgaagagttatataatgatctacttgcatttaatgaacagaagtctaatgcctacatttaaaggatagcccggcccccagtaaacgcggattcctgctcgtggccttctacgcccattactggagcagcagccatcagcgtagacgacgacgaagtctcccatgtaggaaaacgtgtctctgctaactggaggcgccggcttcaccctcggcttcatgtgcttgcatatggctctgcgctttcatctccatctccatccagtggctcacggagtcgcttgctggctttcgtctctgattcttgtccatgttgattttcctgcccttctgaaacttccgggcttgcagatttcctgacaaagtcccaggtctcatcctctgtggcaaacttcttaaatctggcagcaggaaaccggtccacctgtgctttgcactcattcccggtcagaaagaccccggtcttgcggcccctcctcacggcatagaacatcccgaacccgtgagagcagcggggcagggcaaggcggccaaggcgactctgcggccaggaacagaagccggctcatcgctcactcccggcaccaggaagcatttcgactcccggcccagcgtgggcgcgagccgccggcgatcaacccggtgggtcanaacagtncgtcaa

SEQ ID NO: 174708 - DNA, 460 bp, Homo sapiens
tgtcatccaggttgtgatcatgatcacagctcactacagccttgactcccaggctcaagcgagcctcccatctcagtctcccaagtagctggggttacaggtgtgcaccaaaacacccagctaattttgtatttgtttttgtagagatgtggtctcactatgtcacccaggctggtctggaacttctggacagaagcgatcctcccacctaggcctcccaacttgctgggactacaggtgtgggcagcacacctggccatttcacagttcttattgccatttgtttatggtgccagaaaggtattgctgagtttccagttttgaaactaatttctttttttcagtgacacaaatcactatgtaatatagttagcctttgaacaacacggatttgaactgcaggggtctacttatgagcagattttctcccacctctaccacctgagacagcgaagaccaa

SEQ ID NO: 174709 - DNA, 347 bp, Homo sapiens
tcttccaaccttgaacccagttacaccatttatcgtaaacatactgtctgtatacagaaccagtttattgatgttttgagtctttgcttgttcaatggccttgtaggctgcatgaatttccgctctttggtttgtctgccacccaggaagtctaatgcctacatttaaaggatagcccggcccccagtaaacgcggattcctgctcgtggccttctacgcccattactggagcagcagccatcagcgtagacgacgacgaagtctcccatgtaggaaaacgtgtctctgctaactggaggcgccggcttcaccctcggcttcatgtgcttgcatatggctctgcgct

SEQ ID NO: 174710 - DNA, 471 bp, Homo sapiens
gtttcccagaagtgagtatttgatccctaccccaccccatttttagaaaactcaggaaaacgctctcgtatttctatctgaaaaggacactttagagaaatacgttccattacagtctttgtgttcgcattgtattccttctcgatgaaacaggtataagtccattggtattttacgcacgacaagacaactttgcagcccgactcatgacctttagattaagaaacactctccgggagctctgctgatcgctgggtcttacgaggttgatgccttctgtcccaaagagaactatttccctgcgtgtttccgcctggctgcccacttctccagtagagaaacagctgttcctcgggattcatttttggaagttctttgggtcctgggtaatggggccgcatcctgcagcgtcgacaaggtggttgaatacgcaggaacacccacagtacccagggactaataaatagctca

SEQ ID NO: 174711 - DNA, 251 bp, Homo sapiens
tggccggaccgccaagagcttagtatactagtacttaggataacaaacagcgtactttactgttctgcagtaaataaccggatactaaaatttatcactaagattatcatcttaaaattaccaagaatgctaacatcaggcataaaaaacctgatgtaaggctgaggcgggcaggtcacttgaggtcaggagttcgagaccagccttgccaacatggtgaaaccctgtctctactagaaatacaaaaatta

SEQ ID NO: 174712 - DNA, 358 bp, Homo sapiens
aggtgttatagtgcaatggttaaagtgaaacaccttcggtccaaaatgcggctctactgcttactactactcatagtatctgccttgtagggttgtggagatggctggctgagatgatgcatataaaccacatcgtccagggcctggcatggagaagagttaacagtagttcttaccatcctcacagaccatggcagataggagctgactgatggaggattctaaccaggaaggtaggtggtcagatttatttcttaggaagatccctgaggcagtgagatctgagttttaattaggctctaccacttaactagttgtgtgaccttacacaagtaacatatcctctctgtaccctagt

SEQ ID NO: 174713 - DNA, 554 bp, Homo sapiens
ttatatcgccaacacacgctggtaattttttgtgtttttagcagaggcagggtttcatcatgttggccaggctggtctcgaactcctgaccttaggtgatctgccctcctcgtgctcccaaagtgttgggattataggtgtgagccaccatgcctggctgaaagtgtttttatatagtcatttatgtagacatacagaagagacttttccatattcctttactatgaccagattgaatttttcatgccaaggacagtgcttaatttgaacacacatgtttagccagttctctgtgctctaccttagagttagttcatactgcctttgttatgggaactattctgggaaataggaaggaaagccgagtgaaaaggagtagaaactgcttaagaaggtttgtcaggatgcagattggtaggttgggggtaaggacagaaaagtcttcatacagcttaactttaaaatttaattttattttttgtctggatttctaccaggagctttatttgggttaacaagtatgttctaaagcctaggagtgtaggggatatcat

SEQ ID NO: 174714 - DNA, 608 bp, Homo sapiens
tgtagcagtttggatcccagacaaggtgactaactgaggaagcaagcaggggctaaaattgaaactctttccccaagccagcctgtgtttactgaaaagaaaagggcctttaaaaatccaccaacactccctttagctgagcagccacttatagtcccagctactcgggagtttgaggtggaaggatcccttgagcccaggagttccagtccacctgagcaacagaacaagaccccatctctaaaacaaacaaacaaacaaaataaaaaatgccattccatccccctcacctgcagtgccttcccctatgttccagtggctgcctgtaggatgctgtaagagtttgaaacaggggccctgacctagagcgagggttagagaatccctcctaaagaaatgactttcaagttgagacctggaagctgagcatgagttaaccagttgaaaggaggaaaggaaggagagtgagccaagcagaacacagtccaaggctgcaagtcagagaagagctttgaaagaaagtgcttgtggctggggggcagtgagccaatggcagaaggaatgagtgctgtggctggagtgatgggctttttaagccacattaggaa

SEQ ID NO: 174715 - DNA, 354 bp, Homo sapiens
tcggtttttaacagtctcactccgtcatcatatgagtggctgtactgggaattcttttgaaacttgcagagaacaggattatttctggcggcctctgctgagttggcgtgtgtgtgtgtgtttgtgtgtgtgtgtattagggagaggaaatcgtaggtccagtgtggacccagagctaaggggaatcttggagagtagtggctctggcagatgaggattcagaaatcgagtgcaaggactgttctggactttcactgctaacctgctttttctcagtgcctggctctgagggcagggtccagctggtgtcatgctctccaagggcttcattttatgttccagccaggcaaagga

SEQ ID NO: 174716 - DNA, 172 bp, Homo sapiens
tcaggaccttggaatcaccgcggtatttggtaagtatccctatattgtatgcagtttgtaaatatgtagtgctgggttcttgcgtgtgtgtgtgtgtgtgatttgttaaacttacctaaatggtactgtattctcttggtactatttagggactgtgtcgctgtgtattccg

SEQ ID NO: 174717 - DNA, 365 bp, Homo sapiens
catttttaaaaatagaagtgtgtattcagggtgcactcaataggattacatctggctggcagtcccttcctacttcagtccattatcctgctaccagaatgatcttcatggtttcatttaaaaaaaaaaaaaatgagatcctgtttctgtcttaaagttctcttctaattccttgtattaatcaggattctccagagaaacaagaccaataggatgcatatgtgtatacacatatatgtatagctctctccctcatatatacacatatcatgtatatacatatatatcatatatgtacatatatatatatatatatgagggagagaaagatttataaggaattagttcatgcacttaggctgaga

SEQ ID NO: 174718 - DNA, 450 bp, Homo sapiens
actctcatgatagcataagcttccaaagcaccaattaggcaactaattatttggattggtgatatcttttttatttgccttcttattgcttaaaggtagtgaccatctctcttaattaatttacatggcctcattggaagaagagtcaagtaaaaacttttgacaatgaactaggttaacaatgaggggcattgtcagcactgctaagctagatactgtaagttctaaagggaaaatacaaaatgacagctgactctccgtcttctttcactttcctcaaagaaaagtttcagtgaagggaaaatcttatgaaatatattggacaataaatattttaaggaaccaaggcatctggagacccacttcccagaagaaagaaagtatcttgtattaagtgagatgtatcattatgtgagtcaattaataaaataaattaattatggactatta

SEQ ID NO: 174719 - DNA, 106 bp, Homo sapiens
aatccagagctagtctttgtctttaaaaaaaaatgtcttaggagcttaagtaataattaactaacaaattattatttcataaagcaacaaccataccccttcccat

SEQ ID NO: 174720 - DNA, 346 bp, Homo sapiens
tagaacaatgcctgcagtgaggaggtactcaataagtatttgttgaatcaattagggaatgaagctcttccatctccattatcaccaataccacctctacagttataattagtgagaattatggcagtgctaatgttattttttcatttccatgtgtgcctttttggaaagacttgctgcaacaagcttcacatatcttcctctgcagagtagaagtatgtcactaagccatggagttgatttcttggctccttgtatagcaaatagccttgcatttggttcgtgtcagtctttgcatctttttttagtcacgttgcctacacccttcacaatcctctagcttaaa

SEQ ID NO: 174721 - DNA, 636 bp, Homo sapiens
gcaaaatataaaaaaaattagccaggtgtggtggctgtatgcacctgtggtctcagctactcgggaccacaggcatgcgccatcacgcccggctaacttttgtatttttagtagagactggttgcactatgttggccaggctggtcttgaactcccgaccccaggtcatccacctgccttggcctcccaaagtgctggtattacaggcatgagccaccacacctggccttattaaatacttttataaaattaaaactattttacggttctggcatttggcatccatctagttgccgagggtctagtgtcattgtcattgtcttgtacatgttaagtttcaacctacacatctatttaccaatttttgagtactaagagagtctgagcccagcctctaccatgaaccgctgctagccagcacatgcactggaaccatggattggagatgagagggaggaaagggaaaatgagattagctaggcaagaatcaattgcatttatgccaagagggaggattcaacaagttaaataattagtcttacctcaaagtttccatagctcatatcctgcctgtatctgaaggggtgaccttctgtggtgtcacagatgtctgtatcagtgagacacagcagcttt

SEQ ID NO: 174722 - DNA, 772 bp, Homo sapiens
  misc_feature (33)..(33): n is a, c, g, or t
gctggtatggatctctaggcaagtcttagttanacttagggatccaattaccaagagtttcagttcaccctaaccagattttctgggtagtgggtagcaccatggcacaggcatcaaatgcttggaccaagtaccagtttctagttgtgtgcagctggacaagctactcctcttccctaaacctcagttttctcatctgtaaaacaggaatcaagcatgtagcacagagactgacacatggaaaggacccctcagtggtataactgctgctgggatgagagtgatttcccaagtcccccagccatactgtacgtagagaacaaggctcagcccagtactctcaacagggcaatgtggccctccaggagacatgtggcaatgtctggagacactctaggtgtcacaacgcaggcaatgtcctactagcatctgacgggtggaggccaggggtgctgctcaccctcctacatcacacaggacgcccccaaccaccaccaggaactcctccagccctaaaagtcaacagtgctgagactgagaagtcctagctctgaggaatgacggcgcagccacagatccttcccccattttcccccaatgattcgcgtcactgggaggtgggaggcagtaaagataagcaagaaaactgagcatggccatcaataccttgtgcctaaattttgctactccaggaagcccagaataaatgcccggaaagtcttcattgaatatggaaccgtggagacaaaagtgactgcatctcaagctgggt

SEQ ID NO: 174723 - DNA, 1123 bp, Homo sapiens
ccctacccgtgccccgagtgcggcgaggccttcagcctcagctcgcatctgttgagccaccggcgcgcgcacgcggcggccagcggcgcgggggcggcggcgctgcggcccttcgcctgcggggagtgcggcaagggcttcgtgcgccgttcgcacctggccaaccaccagcgcatccacacgggcgagaagccgcacggctgtggcgagtgcggcaagcgcttcagctggcgctcggacttggtgaagcaccagcgcgtgcacacgggcgagaagccctacatgtgctccgagtgcggcgagaccttcagcgtcagctcgcacctcttcacgcacaagcgcacgcactcgggtgagcggccctacgtgtgccgcgagtgcgggaagggcttcgggcgtaactcgcacctggtgaaccacctgcgcgtgcacaccggcgagaagcccttccgctgtggccagtgcgagaagcgcttcagcgacttctccacgctcacgcagcaccagcgcacgcacacgggcgagaagccctacacgtgcatcgagtgcggcaagagctttatccagagctcccacctgatccgccaccgccgcatccacacgggcaacaagccgcacaagtgtgcgggctgcggcaaaggcttccgctataaaacgcacctcgcgcagcaccagaagctgcacctgtgttaggggctgggtccgcgggaggctgccgtctggggagcctgtggggggtagatatcctgggactgacccaggggaaggaagtggggaaggggcgggagggacaatctgagagtgactggggagcctttggtgtttggggtttcctgaagtgggaggagtgttgagtaagttggtctttcccggtgctatacttgcctcctctccacggaagaattgttcaggagatgcgcttggggtgatgacttccttaaatacacgctgtagggggtgaagagcttggaggaccaggcactttgaggaagggcagttcgtgggctggggtgggaacaggatggcgggcaatagactagggtaggccgcgatggcctgtagaaggttgcggggagagggtttaaatgagggttatggggcgaaataaaaccaagtataagtg

SEQ ID NO: 174724 - DNA, 379 bp, Homo sapiens
aaacagaaatcatagcgctgaataatactatgactgaactgaaaaattaaatagagggattcaacagctgactagatcaagcagaagaaacgatcatttaacttaaagacggatcattagaaagcatccaatctgaggaacaaaaacaaaaaagaacttaaaagagtaatgatagcttaaaagacttatgggacaccatcaaatgtaacagcataagcattactggtatacctgaaggagaggggagagataaaaggacagaaaacattttcaaagtaataatggcagaaaacttcctaagcctgggtgaagaaaatagaaatcctgattcaggaagcccaaaagaaaccaaataggatgaatcaaaagagactcatgc

SEQ ID NO: 174725 - DNA, 1004 bp, Homo sapiens
aatttggccttcactgttgtgaatcagggattaccaatcccaattttaacagaagttactgacttggcatttgttgcccattaaacctaaacatcaactatcctgaagttctgttgacaatttagtcaggtatgctccagttcatatttctgatcttgaaaaatacctaccagattctttaatggtttttcaaaatatatttacactacatatgctgtctaggtgaggaaacatctttgaaaattgagtttaccttaacgctactttttgtgctttaagtctctcctatctcagggcactcttttaaatatacaaggcatccatccagaatttactggacatgctgaaagaaggctgtaatggtcagattaatctttatttttacagcattagctttagcactgtttggctgacatatcacttattaataaggtaaaacgtgtataatggcaagaactctgttactatttttgttttataaacttatctaccaaggattaaattattttaaaacacaaatactgtatttttttgtgaaataatttcaatatttaaaaaatgtgaatgaaattaacagaaaaatataactagatataaaatacataaagcttacagacatgcataaccaattatgtaactcatatataaaatacaagaactaagtaacaaccaatgtacagatttagatccaaaatgtaacttatagacatatagagatatttattttcaacaatgaaaaattaagctaaaaaatcatgttacatgctattttgtaacacataggctctcctttattttgaaaatatagtatactagtctacatacattaataaaatatgaattaaattcttaaactgagtaaaaataaaatgtcacccaattatgagtctttaaaattagtatttaaaaactcaacagagtaagcgaaaaatatataagggtaaacacatttcagaaagagaacaagtgttaaatttcagtttatctgactttatactcaaaaa

SEQ ID NO: 174726 - DNA, 175 bp, Homo sapiens
tggtagttgctgggggctggagggaaaggagagagtgaggatgtttaatgaataaagagttttagttttgcaaaatgaagagttctggacatgaatggtgataatggtgaatgtaattttttttttttttttttttttttttttttttttttttttttttttttttttttttttt

SEQ ID NO: 174727 - DNA, 380 bp, Homo sapiens
gtgagccaccgcgcccagctaaatttcttttatggtttctttttgacctgttgattgtttgggaattgtttagaaatacgggtttttaaaaagctattttttctttgattgtacattgtggtcagagaataagttccatgtgatatctatgcttagaaattttttagatttatattttgccagtacatgactacttttgtaatgttttatgtatatttgataaaaatatagattatctaattattggatgcagaaattcatatattccatatatcattatatgatccatacatattcaagcttgttaattattatttcctgaatataatctttgtttatttatatgcttgactggtcagtaatagaaaaatgttgtgtca

SEQ ID NO: 174728 - DNA, 323 bp, Homo sapiens
ggcaactagtccctaccttcttgccagtgttcaataaactcctgctgtctcccattctcaacctgaaactccctactcagttcccaagtaactctctggaagtcaacagccttctaacagatctttctatttcctctcgaaggttgtgacaggaacataggcagttgtaacaattatcctatcagtcaacaagcaattattaagctttctccagtgttagcttgtgctaggccactggtggggtttaaaagaagcagaattagatctcagctctgagaagttgacaatactgttgctgaaagagtgacttatctaagaggcct

SEQ ID NO: 174729 - DNA, 635 bp, Homo sapiens
gggaggggagagaggtgaggatttgctgctcactgcatgatagtagtgatagtcagcccttgcccaggtctgacagcaggcacttctacacagggataaggtggcgtgctcatgctgggagcaggtacctttgccctctccattccttggataggtggagctcagctcaaaagcacacagcccataggcaagaaaacctgggtgaggagccagcactgcccctggggtttttccccggggtgacatgagatgtcccctccagagaaaggctgccggtaggaggcacccatcttcccattactgagccagaaccctactgagggggctctcaactcctcgtgctggtcctagcttgttggacagtcatgccttcatccagttaaaattacagttgaaaacgtgcatttctcagagcatttatgggattcagtggtgacagaacatactctttcaacttgcttgggacctgattgcacaagccaagccctactcccctccgcagccttggcttatgactgggtcctgcactaaggtaccacctgccttgtggggcactgaccacctacagacgggaagcctgaccaggcttacagtcaggttttgccttttacaggcagtagtggccttggggagct

SEQ ID NO: 174730 - DNA, 1134 bp, Homo sapiens
tgcctcggcctcccaaagtgctgggattacaggcgtaagccactgcacccggcccacattcctttccttaccctcaccaccccctcctcacaaagtcagagatctcccacttgactcaagtccctgggttccctccagccagtaaaccccgtgtgcaaatgtcctgactcttgcaaaagtgttaaaaaacaaaccttaaaaagcttccagatgttctgtttgtattgtggtgcttctctgcgctggtctccagaggccaatacgcagtgcacagcatcctgactgcccagataaaatatgaggcagccaagaggcacagcctgggggtgagtggggatgacccttcccccaggaccacggctcccccagttcacccattaactcttccattgccaaagggcaactttccacgcaaaaaccttcaaaagactgcaaaggaacaagtctgataagcttttaggttttgtctcctctgagtgtccacctcacctcaccattaaacttctcacaccaactgcctttgggatgtcgagtcagggactcaacgacacaagagtgaccctcctacttaagatgctaagttaccattttcaaggacatcttaggagctggaccatccagaatgcgggaacagagttcatgagttgtcgaggcccctctggggctggtggcctctgatctacagaaaggtaattgccaacgggccagcttgtgcacacacagccacacacgcaacccaaggtgcacgcacctgagggcccacgattctttgcacagggtgacgcctgctccctttgatgcttgccggatgtgttcccaatgggcaaaaaccagacctcaataaaacccggcattatcaagaggccggtggtttgtgattgcaccagcctgttatctccgaggccctgggtggggctgctttgcggttctccattgaaaagcattaacttataggtagatcaaagaccctcccgaaccagccgacctggtcccttgtttgtcccggtggactgtgccaaaagatggactttaaagataataggtaccccagtcccagactcccttctgccctccctctccttctcatgcactacgtccctcaggggccatccaacagccaatcataaggccttt

SEQ ID NO: 174731 - DNA, 379 bp, Homo sapiens
ttttaattttatactggaaagccaaatgcccatgaagagacattaaatcaagaatggcaaattcacacgcacaaaaaataaaaataaaaataaaaaaagaaattaaagaatggcaaattgaaaacatggaacactatgcagcagtttttttaaaaaaatagaatgacgacactgattttttaataggaaaaatacatctaagataaccaaaaaatgcaagatgtagaacagtggaaagtatgtaaccctttgcataaaaagagactgaaaaactaggaaacatctttgcttgttctgcaccaagagaaactaagcgggaaggaactggacagatagaagactagatgtgagaaaaacttccgtgtgtgtgtgtgtgtgt

SEQ ID NO: 174732 - DNA, 306 bp, Homo sapiens
gggctcatcacacggacctccaaggcagttgtgagcggtgagtaagacacaaggaaacttgtagtatcctgtgatttcaggtgctcaacatgctttagccaatcaggaaacttcccctcttccttccaagtcttgcgtggtctgggaaggaagtgcaaccctaaaccaggctgcagctaaccaggagtgacactacggggcagtcgataggatactatggcaattctatatggggcacaggtcccaggcggtggaccagaagtggtgggagtgtgcatgtcaggaaagtggggccgggctggctga

SEQ ID NO: 174733 - DNA, 482 bp, Homo sapiens
caaagtgttacctggattcctacccaggattttcctattgtctcaggacctaaagggaaaagaccggccatggggcatgtgagcctctgggaaatctgcctcaagcccataatgccatccgtctacagcagttggaacagtgtaagagtcagacctcgccagatcccaagcgctgcaacatgaagaacaaaaccaaggttaagccacagaccaggccccgtggagatttcgctgcttctagcctgaccgtcaggatttgggtcctgaccgctcccctggctgttgggctggtcccagctctgggcctccgttttctcacccacagaatggggacgatacaggacctccctcatcagagctgtcacaagtggtaagtgaatgggttcgtgagaagctctgcagtgcctggcgcagaccaagggccccaccgatggtggctgtgagttttcccactaatgtattttttgatatgtaacatttta

SEQ ID NO: 174734 - DNA, 387 bp, Homo sapiens
cctaatcctaattttaatgcccatactacacacatccaaacaacgaagcataatatttcgaccactaagtcaatgcctattctgaatactagtagcagacctcattacatccaagtcatcatgttggatgaaaatggcttcttgctacattcacattaaaacttgaaaatggaaaagaaaaagagagggggaaaaagtagctaaatagcagtgttcgctcagcatgattttgctttaatccaagcctgtgagcttaccagggctcagaaatcaccatcctttagttaatgtcttgctcttgttactaaatatttattattctattcaaaatatcacagaattaagataatagcttcacaaaacagattcagagatattaattacttc

SEQ ID NO: 174735 - DNA, 462 bp, Homo sapiens
tttaaatgcaataaaattcaccaatgttaagtgcacaataaatgagttttaacaaatataccatcatatagtcactaccacaatcatgaaattgataggatattttcattacccccaaaaaattaccttgaaacatttttcagtcattctacacccctaccctctgcctcctggcaaccactaatctgctttttataactaagattttggacttttttttagcacttcacataaatggaattatatagtagatagtcttgagtctgactcctttcacatagcatgaagcttttgagattcattcgtgttttacatatcagtggttcattctttattattgctgagtagcatttcactgtaaggttttactacattttatatattcatttaccagttcttgggcatttggattgattccagtttttaatgagtatgaataaaaccactataaacaaaattgtg

SEQ ID NO: 174736 - DNA, 567 bp, Homo sapiens
tcacctcattccaatctgcgatctctctaccactcagctcaactgctctttcaggtcactgacaacctccagacaaggctaaatccaaatgaaactcttctgtcctcacgtacacctcactctcagcagcatgcaaggcagtcccccagaagacgctcctcattagaacattctcctcgcctggcttctctgatgtcacacactcgttgttttctcactggccatttctcagtctccctagttggagggctgctcctctccttccttccttccttcttctgtcccactgataacacagaggctcccacagaggtcaggctgtggacctagcacacttccctgagtgcagcacatttgctcgaagtaaattcacatttgttttatttgtgctgtttccccagcaactaaaacaaagcgctgggagattcaagacaagttctgttgaataaacgaagccgtttccgtgggtttttaaaatattcttctccaggccgggcacggtggctcacgcctgtaatcccagctactcaggaggccaaagaccggataatcgcttgaacccgggag

SEQ ID NO: 174737 - DNA, 722 bp, Homo sapiens
ttaataattaagagacgctaacccaaagaaagatatcacatagactacttccatccaccagtgctaacaattatcaccaatactttaaaaatcatttttatattaggaaataatatttgtaagtgactttggatcttcttctagaataagatttcctgggagaaactgcgtaattattatttctcagtagcctcatattactttaaaggcctactttccagagttttatttatccttatttgagggaaacagcaaagggtaaagagaaaagaggaaagcagataccaagaatttaaatcacaaacaagtagttctagattcgtctgaaatcctttgttttttagtggagagaacagggttttttatagttcatttattaaagatttgttattgttatattttatataacagaaaaattaaaattgtgtttaaactcgctattaaaaatccagctaaagaaaaccattgcccttaaaatccaatggattaggagagtgggggagatcattggacaaatttggggcttatcattatcaacagtgcccttttaagcttgtggatttctgagccaatgtggaaaatgtaacaacagggatttcccagcagcaagaggcactctccaagggagtaaattgtcaactattgcctctcgtgagaaacttaagagtaaccttgatccaatctcaatagtcaacccatgtattatcacccagttggggcat

SEQ ID NO: 174738 - DNA, 689 bp, Homo sapiens
cctgggcaatagagcaagactctgtcccaaaaaataaaaataataaaaataataaaataaaggaacattactggagataaaaaggaaatttcaccattatcctcagcaaactaatgcagaaacagaaaaccaaatgctgcatgttctcacttataagtgggagctgaatgatgggaacacatggacacatgtgggggaacaacacacctaggggaacaacacacattggggcctgggtggcagggggagagcatgtggaagaatagctaatggatgctgggcttaatacctaggtgatgggttaatcggtgcagcaaaccactatggcacacgtttacctatgtaacaaacctgcacatcctgcacatgtagccctggaacttaaaataaaagctgaagattaaaaaaaagaataataacaaatggggaaatctaccaggcagatacaataattctaagtgtgctcatgcctagtgacattcctccaaatacataaagcaaaaaattacaaaactaaaaggagaaacaggcaaatctacaatcacactcggagatttcaacatctcttttccagtaactgatcctaccagccaatttttgaagagcaataaggatagagaagattagaaccacaaaattaataaactaatttacctatgttggatccacaacaaaaaatgcagtcaagt

SEQ ID NO: 174739 - DNA, 128 bp, Homo sapiens
agaatcaagactacaatatcaactcttacttgaatttctagcctgccagccttccctacaaattccaacttgcccaccatcataattgcatgagccatttcctcacattctctttatacacacacaca

SEQ ID NO: 174740 - DNA, 614 bp, Homo sapiens
aaatagttatcagacaaaggctcctgcctttgggcattcaaggaaccaccagcataatggcctcctccctaaccaaggaatcctgccaaataacacacatttcctgcacactcaagctcctaatgaggtttttcctgatttgctatgaaatatgaatcactgcacctggcccaatttctgtatttattcacactaaaataactttgaatactttactaccctaatttattaatttgggttgctaagtgtgattatttctttttaaataatctataagggtttgtttgtttgtttgcttgtttgtttttgagacggagtttcgttcttgttgcccaggctggagtgcaatggcgccatcttggctcactgcaacctccccttgccgggtcaagtgattatcctgcctcagccttccaagtagctgggattacaggcatgcaccaccatgcccgggtaattttctatttttagtagagatggagtttcactatgtcaaccaggccaacatggtgaaaccccgtctctactaaaaatacaaaaattagccagatgtggttggcgggagcctgtaatcccagctactcaggaggctgagacagggcagaattgcttga

SEQ ID NO: 174741 - DNA, 405 bp, Homo sapiens
tcattttaatattgggatcagtgtggcagataactaacttgcttctttaactcacccatttcattgctaactccagtgctcctaacttcactgaccaggctgctctagattttgttagaatgagttgaaatgctttaaagggagatgctgtttaagtggaatttgtttttagaaaacaggtcagaaacaagagcttacatggctgctctcttgatgtcctgcctcagtcctgagcgtcctgcatttcccctgagagggcgtccagatctttggggctggctcttcctggttgccagcccgccatgtgcctgagaggctgcacagggccccctctgggttttactggtttgcccctggaaattcctaaccactgctgtttatccagtggttgccaaagaccatgtg

SEQ ID NO: 174742 - DNA, 356 bp, Homo sapiens
gtgaggctagtagatataaagaactgtgacagacctgagatgtcaacctatttgcaagccaacaaattagctcgttggcagatgctgacaaaagatagcagcttcctggatcagagccaaaagactttactccagcacggcaggcagccttaagtttcatgtttacatcatttctacttgtaccccaagacccacgggcttgcttcatagatgaggaaccacaatcttttattataatgggctgcaagtgaacctactcaacttctctcttggagggaggcattatctttatgatactggagagtaagcacacctgagccctgctctggaaggagacactatctctatgttccagg

SEQ ID NO: 174743 - DNA, 628 bp, Homo sapiens
gagatcatcggctttgtcatacctgggcttcagtggttcattggaaagtcgacaagttcaggacaagtgggctttgtccccaccaggaacatagatcctgattcttattccccaatgagcaggaactctgcctttctcagtgatgaggagagatgctccctgttggccctgggaagtgataagcagactgagtgttccagcttcctccacactcttgctcgcactgacatcacatctgtctaccggctcagtgggtttgaatccatccagaatcctccaaatgatctgagtgcatcccagcctgaaggtttcaaggaggtcaggcctggcagagcctgggaggagcatcaggccgtggggtccagacagtccagcagctctgaggactccagcctggaggaggagctcctctcggccacctcagacagctatcgcctgccggagcctgatgaccttgatgacccggaactgctcatggacctaagcactggtcaggaggaggaggctgagaacttcgcccccatattggcttttctggatcatgagggttatgctgaccactttaagagtctctatgacttctccttctctttcctcacttcttccttttatagcttctctgaggagg

SEQ ID NO: 174744 - DNA, 266 bp, Homo sapiens
ggagaccctgtctcggcaagggaaggggaaggggaaggggagggacatattcaagtttagatgatgtgatagtataaaagtgatgtcctgaaaagctctttttttaacatgtccaatcctattttctcactatcttcaggacaaaattaggggaagattcttctctagtccatgtatatgtatacgtacatataaaaacttaactctgcaagtctttttaacttttggctgggcgcggtggctcacacctgtaatcccaacacctt

SEQ ID NO: 174745 - DNA, 759 bp, Homo sapiens
catccttcccttatatacctctcaacataatgactgtacaatatggccaatgaaacggatagtaaaatgaaacataggcaagtaataaagtgagatatgaagacagtagtacaacctggatgagggtggaatgcaaaattgtcatcagagaagacgacaggaggacctgagagctggagggacggacgcttatctacccaaatgaggctataaaaagtagaaagatggcagggtaaaaatgggggagggctgccacttaagactctcaggaaacagtgatgcatcagactttatcattaagtcccaggggagaggagtggatctggggatccctttagatatggtagaattctcctgggtcctgctctggtcttaaatctcagaccagtagcaggaaaaccctaactgtactgtggtcctgaatgtcactgcaacttcagccctgctgtggtggtgtatctgctcctctggctggctctgccaccttgaaaggtgagaccatgtggagcagagccaaggggcctcagctgacagccagcaccaaccatcagtcatgtgagtgagaccaccttggacccccaaccccagttgggttgtcagatgactatagctgcaggtacaagagtgacccagtgacaccagcagatgaaccggctagcttagctcagcccaaactgctgacttagaactgttgttatgttaagccagtacattttcagtgactcattacaaagcagtagataactgtgacagtctaag

SEQ ID NO: 174746 - DNA, 967 bp, Homo sapiens
  misc_feature (356)..(356): n is a, c, g, or t
  misc_feature (422)..(422): n is a, c, g, or t
  misc_feature (449)..(449): n is a, c, g, or t
  misc_feature (479)..(480): n is a, c, g, or t
  misc_feature (508)..(508): n is a, c, g, or t
  misc_feature (512)..(512): n is a, c, g, or t
  misc_feature (965)..(965): n is a, c, g, or t
gagcggtgggctgagctaaaatggctgaggagagagtcgcgacgagaactcaatttcctgtatctactgagtctcaaaaaccccggcagaaaaaagctccagagtttcctattttggagaagcagaactggttgattcatcttcattatatccggaaagattatgaagcctgcaaggctgtttatcaaagaacagcttcaagagactcagggattgtgtgaatatgctatctatgtccaagcattgatatttcgcctagaaggaaatatccaagaatccctagaactcttccagacatgtgcagttcttagtcctcagagtgctgataacctcaagcaggtggccagatctttatntctttgggaaaacataaagctgccattgaagtatataatgaagcgctaaactcaaccagaaagatngggagatcagccataacctaggagttngtacatatacctgaagcagttcaacaaggnncaagaccagttgcacaatgccctgaatnttantaggcacgatctgacttatataatgctggggaagatccacttgctggagggagacttggacaaggccattgaagtctacaagaaagcagtggagttctcaccagaaaatacagagcttcttacaactttaggattactctacttacagctcggcatttaccagaaggcatttgaacatcttggcaatgcactgacttatgaccctaccaactacaaggccatcttggcagcaggcagcatgatgcagacccacggggactttgatgttgccctcaccaaatacagagttgtggcttgtgctgttccagaaagtcctccactctggaataacattggaatgtgtttctttggcagaagaaatatgtggcggcatcagctgcctgaaacgagcaactacttggcaccttcgattggaagatctgtataatttgggcttgtcatttgacatgcagngt

SEQ ID NO: 174747 - DNA, 426 bp, Homo sapiens
cgcacttcaggcaggattaacatcatgggcaactccaggaggtgtgagagcacacaattttgccgctgttggatgtcacacacgatgggagaattgaagctcatgaataaacaagttgtcctcgccaaaattccacccagtgatagatgggagaattgaagcacatgaataaacaagttgtcctcgccaaaattccacccaggtcagagaaagcaaagtcaggatttgaacccaaatcttccttcaaattcagatctcttcctctaccactggttttctggaactctcaaatcagcctgtcctcaatccctatggctggcacaccaggagatcttctgagtgcgatcttcacacccctctggaattggcattcttcttctagtgtcccttccactgctccttggaaacagcaagttctgtttttag

SEQ ID NO: 174748 - DNA, 643 bp, Homo sapiens
gaatgacagttgattaaataatgtcacagctctttatatatagcattaaatagagttcaaagtatttttggaatttattaatttataatattcttctgtgattattaaagaggtgggatagctaaactttttctcaccttttatcattgttccaagtgcagttttgaactcgtatgtgttagaactcccattatattggtcaaatcgatgatcaccatatgactttattcctgcatttttgcctcaaatttttaactatcctattctggactgcttcattaacttcattagggattaactatgaatgtttaagcctttattttacaatgtccttgcaggtgtccttaactgtttcatttataaacacagagaataaaatgaaaaaaaaatctgtagagttgtttgttctatttggagcttttcatgttggtgtaaaattcctgacacttaacacatatgaatctttttcattcatgtttaataattttatttgagagtcacttcaagtaaagcccaaactgtgttaacatttgagttaagcaaagacatctttgcttaacaataaagcaaatatcacaataaagcaagtcacatgaatattttggtttctgaattcatataaaagttatgtttacactatatg

SEQ ID NO: 174749 - DNA, 395 bp, Homo sapiens
aatcccccacaaaatggtattaagaggtgtggcctttgggaggtaattaagtcatgagagtcccaccctcacggatgggatcagcatccttccaaaagggcttggggttgaagggagtgcctgtgtacccttctgccctcggccacgtgaagacacaacagcaaggtgccatcttggaagcggatagcagccctcacccgacaccactgctggcaccttggtcttggacctcccagactccagaactgtgagaaataaatgtctgttctttaaaattacccagactgaggtatttttttatagcaggaactaagtgaattaagtgaacgaagtgaacccctcaagacaacccttgaagcctgtttccttatctgtgaagtcggaggtggcactta

SEQ ID NO: 174750 - DNA, 587 bp, Homo sapiens
cagggtttctgaggaaaagttccttttggaaaattcccacccagccccagctgactaaaagggaggaaggatttttccacagggtgctctgggttggtgtgggatttagagcccccggcagccacttgtctgaaggaacaaggagctgggctagacagaaagggagtcccaggcaggctggagctgaggtcacccgggagggcaggagctgaggtcacccaggagggcaggagctgaggtcagccgggtggtgcttccccttggaccccactgcccctccttggcatggatacgggtggagttttcactctctgacttgctcttctagaactcaacactttggtttcatctgaatcctaattatccaatatattaaatcaagtgataagataaacatttttccacctctttctatccctaagcctctggtgacttctttttttcccttttgataagtatttaaatgtttttaaaaattaaaatataattcgcccaattcactaaatatgaaattcatcattttaaagtgcacaattcagtgatatttagtgtagtcactatttcctgtgacttcctgtcctggtggc

SEQ ID NO: 174751 - DNA, 426 bp, Homo sapiens
taaaaatgtgcctgttcttcaacataactgagttctaggggatgccacagatttaagaaccaactagtgttggcataatatgcaataactatttctgggtctataatttattcatttgagaagagtgttaatgtggcccaagtcaaatgttcaatctcaggatccatgcagttatgtaattagtatttgttgaagactaaccacatgcatgtcacccctgtttacccagccattgctggaggcagaggagaccctcaacatttcaaataaaaataaataaataaatctatgtcacctaagttgtcctccctctctctagtttatagcttctagtggagttacctgatttacggataacttcactggcttccgccctcgcccaaatattgcaggcctttggcccctgaaaaccccacctagggactg

SEQ ID NO: 174752 - DNA, 370 bp, Homo sapiens
tccaacagttacctcccacccccaacacagaggcagttaaatatgcttgtgaagtagccatagtccacccaccttttggcattaccatgaatggacacgtctttctcaattaaaacatgagaatccatggctcctgaagcccttaaaataaaaacaggatttagaaaaccagtgaacttcatatatatagtttttgtatgatatgaaattattatgcttagaaagaaaaaaaatcaatttcactaacaagataggaactgacttggagtaaacagaaaggttaactgtattggttgttaaggagcccaggcatacgtgtgcagcatattaacagctgcataggccaaggatcaggaatgctggtgttggg

SEQ ID NO: 174753 - DNA, 988 bp, Homo sapiens
gctgcgccccaggtgagcggcgagggggcgggggaggggctgagccggaggcggctcacctggcgggacaggtgcctggctgctacaaaccatgcaatgagccatgccccgccctggacacccccgcccagcatctgggcctccacgcttgggaccgtgggagcggccaacagagctatgtctggagacatatgataaaccacctcagcccccaccaagccgccgcacccgtagaccagaccccaaggaccctggccaccatgggccagagagcattaccttcatctctggctctgctgagccggcccttgagtcccccacctgctgcctgctctggcgaccctgggtgtgggagtggtgccgggctgccttctgcttccgccgctgccgggattgcctccagcgctgtggagcctgtgtgcggggatgcagcccctgcctgtctactgaggactccactgaggggactgctgaagccaactgggccaaggagcacaatggagtgccccccagccctgatcgtgcaccccccagccggcgggatggccagcggctcaagtcaaccatgggcagcagcttcagctaccccgatgttaagctcaaaggcatccctgtgtatccctacccgagggccacctccccagcccctgatgcggactcctgctgcaaggagccactggccgatcccccacccatgcgacacagcctgcccagcacctttgccagtagtcctcgtggctccgaggagtactattctttccatgagtcggacctggacctgccggagatgggcagtggctccatgtcgagccgagaaattgatgtgctcatcttcaagaagctgacagagctgttcagcgtacaccagatcgatgagctggccaagtgcacatcagacactgtgttcctggagaagaccagtaagatctcggaccttatcagcagcatcacgcaggactaccacctggatgagcaggatgctgagggc

SEQ ID NO: 174754 - DNA, 970 bp, Homo sapiens
gcggagcagtgtctgtactgggcttgcctccccagagaactccctcagaaaacctagtgtaagacaagaagttttgttgctttaggatggccaagggccacaagctgcctggtgatcagcatgacctggagggattgagtaccatgtggcatcctgaggggctcctgtcaccatcctggctctggcctaggcaagaggtactggccgatgcatacaccttccctgtcctgttgactgtcactgatttctcctccccattgcccaagacacaatgagccctgtagctctggtgcaaggccatgacctcagagggctgtggggtgatttgtgaaagttgaatctctcatggattgggctgctgagaggcgctcgttaattacttggtagtggcaggtgaaaacagggcaggtgttggatatccaaagatagacaccaggatctctggactctttctttttgcttcatgtgggaatcaaaaggagcaaggctgttgttcagcccctgaagctcagaaagctggctgactgacctacactgccctcagcccaagggccatttcaagcctatgcttttgctcagggctttcagcaaaatctgggttccactgctctgctccaagaagtccagtatagtcaccccccatattctgggcaccccatgtattccattagagcctctgaaaattaatggaccaactgggcgcagtggctcacgcctgtagtcccagcactttgggaggctgaggtgggtggatcacttgaggtcaggagttcgagactagcctggcaacatggtaaaaccctatatctaataaaaatacaaaaaattagccgggtgtggtggtgggcacctgtgatcccagtactcgggaggctgaagcaggagaatctcttgaaggcggaggttgcagtgagccaagatcacaccactgcactccagcctgggcaacaagagcgaaactccatcacac

SEQ ID NO: 174755 - DNA, 923 bp, Homo sapiens
  misc_feature (6)..(6): n is a, c, g, or t
agcggnggcggggcggagcttccgcctgggctggggttggcgagttcacccgcggcggagggtaactttgctgtgctgttttttgagcagttgtctggtccctggaagtgtagcatcgagagagttttctaattacgtttacaaaatatcttccctttggccatacaagtggtgactgccatgtcgaactcgcggccaggtcccgccgagacgccgggggtggcgctggggcagccggccgggacgagctggtgtcgcggtccttgcagagcgcagagcactgtctgggcgtccaggacttcggcactgcctatgcccactacctcctcgtgctcagcctggcgccggagctgaaacacgacgtgaaggaaacttttcagtacacacttttcagatgggctgaagagcttgatgctctcagtcggatacaagacttacttggttgctatgagcaggccttggaactgtttcctgatgatgaagtgatttgcaatagtatgggggagcatctcttcagaatgggctttagggatgaagcagctgggtattttcataaagcagtgaagctaaaccctgatttcagtgatgcaaaggagaatttttatcgtgttgcaaactggttggtggaacgctggcactttatcatgcttaatgacaccaagaggaatacaatttataatgcagcaatccaaaaggcagtttgtttggggtccaaaagtgttttggacattggagcaggaactggaatactaagcatgttttgctaaaaaagctggagcacattccgtgtatgcctgtgagttatccaagaccatgtatgaacttgcctgtgatgtcgtggcagcaaacaagatggaagcagggatcaaactcttacatacgaagtcacttgacatagagattccaaaacatattcccgaaag

SEQ ID NO: 174756 - DNA, 198 bp, Homo sapiens
ctacctcagcctcatgagtagctgggattacaggtgcaagctgccacacctggcttattttcattgaactttcagtgttgttattgaagagtcctggaattttaatttctgttgtgtattagttatcaattgttgcataataagttataaagcttagtggcttaaaacaacaaatatttatctcatagtttttatggg

SEQ ID NO: 174757 - DNA, 240 bp, Homo sapiens
attgctttgttctagcgattttgctcataaaaacctcatcctaatggagaaaaagatgctgaagctcctcaggcctggcatttgaaattaccacattaagctcccctccttcggctccagcctcactcttgtatggctctcctacatccatgtgtgctctgctccgattaacctcgctttctctctgacaccagggcacatcatgtgctattctattaatattccaacaggcacatcatt

SEQ ID NO: 174758 - DNA, 143 bp, Homo sapiens
aagtatttgtgggtacttgtgaaaggttgcagttttgtaacacaagctgctttattttcccaaaagctttcacaatacatagaaaatatattggacgtgtattaaatgtgccaaattagtcagcaatattacattaaaatatg

SEQ ID NO: 174759 - DNA, 468 bp, Homo sapiens
ctgaatgttttggttgttttccatttttttttttattgtggttgtcctttttttcttttagttagaaatatactgtgcccatcttttctaggaaatagaaaacggtcaagttaagtgtatatttttttcaaactaaacctggctccgagctttgcactgggcattggagaggccttcaatggctcttccccggtctggcacttcctcttcttccctgaccctcgagtcatgggcagcagtggaggggcatgaaccctccttctgcagcatctgccccatctcctcctgggccgagtcatgccttgggagagacagcaaaaccctgaacagcagttcaaggtcttctcagccttggggtgatgcctccagtgccactccctgaacttgatcccactgccagggctgcctgcattcgcccactccctcagcaggggtttttagagcatgagtttgagctaggttttctgc

SEQ ID NO: 174760 - DNA, 583 bp, Homo sapiens
ctcctcttttgacccagtgggccggtgggagccaatgtctggcttctctcacagtaggagtggttggttactgtgagtggccctttctggagagcctctggctatggttgtgagatgcatggcaataatgagctatctgactcctctgacttgggagttggtttgcagaaagctccccaggcccaccttcacttgttgattcaggttgttttgtggtatgtcacgttgtcgttgccttggggatgaggccaggggcttggcagatggtagaaacagcagagatggcatgctccatgctcccatcacagacctcccttcccggcatggctctctggacccaggcaggaagctgctgattggtggaggactccagtgtgggccgggcaaggcagagcagccagggttgtctcttggcccagcttgtctggggcctagggtggggacacccagccgactgagtagtacagagttgctttcaatctctgtgcttgggctgcttggccctgaaaaggttttggcagaaggaaggcggtaaggacagggctatgtttgcagcattaggaaaaggattggcttctgtctg

SEQ ID NO: 174761 - DNA, 289 bp, Homo sapiens
gcagctcttgggagagcctggccaaggtatctagtgatatccaggtgacatcttgtctacagatgatggaagacaggggtgtaggaattttttgttccctggaatatttgatttcttgaggatttggaggtgacagttctaacgtcatgagagcatcacagcaaaccatctgggtggagaccatgggtaatgtacctggcactcattatcatggtcctctcattcacagcacacatacctttaagacaatcctcacacaccaatatatcctgctcgtagccttttgaaa

SEQ ID NO: 174762 - DNA, 515 bp, Homo sapiens
cattcttagggaaatccaaagacaagaaaaggacaaaaacaagaggaataggtgaatttgaaccctctggcacctacagctacagcaaatattaagagcctaataacagccatattaatataaaacctcacaggtaaggcctgtttcctttaattcttattatctgatacactatatttggttttcagcaaaaaattagaaggcatggtaaaaggcaaggaaaaaagtctgaggagacagagcaagcaacagaaccagactgagacacagcagagaatttggaaggactaaatggggtatttaaaaccactgtgatgaatatgctaagggctgcaatgggaaaaatggacaaatatgcaagaacagatgggtggtataagcagagatggaacgtctgagaaaaaatcaaagaaaatgctagaaatcaaaaacactgtaacagaaatgaaaattgcctttgatgggctcataagtagaccagacacagctgaggaaagaaacagtgagcttgaaga

SEQ ID NO: 174763 - DNA, 500 bp, Homo sapiens
atgtgattgttcatgaatgtgggcaatggggcctagaaaaagccatcagcattaatgagggttgagaaagaaggtcttctcttccttttagccagtccttcctttttgcccctcttcatgctctagcctctttccccttttcatttgttcattaagcctgtaattacctaaaaagaaataagaaaaaaaaggaaggacaagatgtgtacgtatatgctcatagttggatagaacaaccatttcattatttctattggctagagtattattttctcaccttattaagtgatcaatccttctgtagacatttatgagaacaccatggtttctgataaatacatgttttgagtgaattccctctaagtaaatatggaaaaggcagggattctttatgtgtttccagtcatggcttgaaaactcagccttttggctttaaacaccagaataatggctcagagccataagtgcccttcccaaagtccagcaacaatcacatcatg

SEQ ID NO: 174764 - DNA, 460 bp, Homo sapiens
atgagaaaggatagataacttgactaagtataatggagaggaatgggtgcctggtgcctgttttacattcagactcttaattttttgagtctctatatttacttaaagatgcccattcatatctgtgtgcacatgtacgctcccacatgtgtgtaaaaaacagaacattcatgtgacaatggcattcttgtgtaatgaaacgtgtatatgtatattaatttatatgttaaacatatttgtagatatacatatataaacacacaaatgaaatgaaggtgaacattttggccagtaaaataatgaaatgctatgaaatttcactatgttgtttacagcattttcatacattcgtgttctgtactgagacttggagccgagctgatttgcttgtacacctgaaatgtttggaggcccttcagcagattgcagatttttataaataatggcctttcgttggcca

SEQ ID NO: 174765 - DNA, 169 bp, Homo sapiens
tgttcaactgctctgtactcaataagtgatcaccaacagtgaacccaacaccgtaccagcataggaagcaacatgtaaccaacatggtacccaccctcagtgagattaccatttagggtggagacaaggagcatgttaacaggacaccatggagctattaagataaagg

SEQ ID NO: 174766 - DNA, 243 bp, Homo sapiens
tgaaataaacagtgtttctgatggttcagagaaccatcagaagcaaaggtgtcacgtgtggaattttccatttgaggtgtcatgttggcactcaaaaagtttcagattttggagggttttgaattttcagattagggatggtcaacctgtaatatatttgtgtttattttaacaaaagtatatctgattttactataatccttgattaaattgatactccaaaaaagttgctcctgcatatat

SEQ ID NO: 174767 - DNA, 258 bp, Homo sapiens
gcgctgtagtcaactcgtccccacatcccaattacctggcaaccactgatttattttatgtcttacagatttttctttcccagaatgtcatacaaatgcaatcatatagtatgtagccttttgaatatgtcttctttcacttaatacaatgcatttgagattcacccatgttgttatgtgtatcagtagttactttttactgctggttattagtctatcagatgaatatgtacattttgttaatctttttgcaatttg

SEQ ID NO: 174768 - DNA, 310 bp, Homo sapiens
ttgccacatctatatcaagaactgcttaaacaaaaaataaaatcaacgacaaaactctcagacgggtgaccaccccggtcccagagcttactaccgcaacaggaccaaacatgcatacactctctttctaaagcagagtgtccactttcctaaggaaaaagtaatttttataccatgtatcccaatgccgcattcttagcaagatgacaggcctttgggtacacgaagaagggacatatcacagatacccttaagacacatcacatgaggccgggcgcggtggctcacacctgtaatcccagtactttgg

SEQ ID NO: 174769 - DNA, 283 bp, Homo sapiens
agaaaagtaaaataaaaccaaagcaaatagaataaaggaaataataaagaacaaattaatgaaattggaaacagaaaaacattaaagaaaatcaataaaacccaaggctgctacttttgaaaagccagcctaaccaaaaaataagacacaaattaccagtgtcaggaatggagcactgtaaggaactcaattgacataaattttgcagtgtaaatgaaatggaccattttttttttgagagccacaaactactaaaaattatttaaaaagaaattaaagaatg

SEQ ID NO: 174770 - DNA, 171 bp, Homo sapiens
tcataatgccaaccccacaggctcattagggggattcgaaagcccctttcccagtgccctgaacatacagaaactcagcaaacaaatggttctccgcttatctcctccctttccccttctcacacccacactcaccctcacaatgcctaccttttcttggttcttgaacag

SEQ ID NO: 174771 - DNA, 153 bp, Homo sapiens
cctccttgttaacataaaccctcataacacactcagagtacaacacagaaacacctctttccccctccaagttgtcagagatgttcttagccaagtctgttagtgactcagaggggtcatttggaaatttaaaagccattaatgaacatgctt

SEQ ID NO: 174772 - DNA, 320 bp, Homo sapiens
ccatctctggaaggcttagtttgcagtctcaacagcggggtagactcccaggaagagagagacagatttgagcctagttgatgatatataaaatacaatgaattagtctctgtgtccatcacgttctggctccggagaaataagagaattgctaatgagttggtgccattctgtgtactttctatatcttgaactcttaagagatcttgtccctgggtcttctgctaaggatttaccacctgactctagtatagtatcacattacagataaaggaaatcaaaatatcttaccccccctaagttcagagccagggggtacc

SEQ ID NO: 174773 - DNA, 505 bp, Homo sapiens
ccatctctggaaggcttagtttgcagtctcaacagcggggtagactcccaggaagagagagacagatttgagcctagttgatgatatataaaatacaatgaattagtctctgtgtccatcacgttctggctccggagaaataagagaattgctaatgagttggtgccattctgtgtactttctatatcttgaactcttaagagatcttgtccctgggtcttctgctaaggatttaccacctgactctagtatagtatcacattacagataaaggaaatcaaaatatcttacccccaaataacattctttttgccataaatagccctgcaaagcgcactttgtgaagagaaaacttgcatctgtaaaacatttctatttacataagtagattttttccccttccaggttctcccaatcctgaagagattaactcagagtctagcaacttttaaaggtctaaataagaaacacttgccaccaggcagtggctcactcttgtaatccc

SEQ ID NO: 174774 - DNA, 362 bp, Homo sapiens
aggcaaggacggaggcatacaaggcactacttgagatcctgtctgatttagaattttgtaggacggattcctgttgttgaacacactgagtgatgagaaacttggcaaatcttgttggcaaatctctcaccttgattccctttggcatcctttgtgtctgtctgatccttccagcctggcctttggatagcaggtacccacttcttaggatgtgccagacaccacgataaggaagtaccgaggcttacagaggtgaagttgcttgtgtcagggcacccagctgttgagtgacaaagccagatcctctgaggtggggcactgagcagaggcccgaatggcaagatggtgccagtacatgaaga

SEQ ID NO: 174775 - DNA, 356 bp, Homo sapiens
tacaaaaacataaaaaattagctgggtatgatggtatgcacctgtagtcccagctacttgggaggctgaggtggtgggaggatcacctgagcctggggaagtcaaggctgtagtgagctgtaatcatgccactgtactccagccaggcaacagagtgagactctgtctcaaaaaaaaaaaaaatcataaaatcataaaaaagtcataattaggaaacccacaagattttaaaagaattataccaacttgtatggtaagagacagaaatagcacaaaatgatatatgtactttatactccaaattttgaggggcaggaaaaggctaagaaatctactcagctgcaatcacaggcttt

SEQ ID NO: 174776 - DNA, 801 bp, Homo sapiens
  misc_feature (1)..(1): n is a, c, g, or t
naagatacaggaactataggcaatgccacaccaactctgtgccacttatctccagaattcctgtacagaaaagaaaagtacacttttatcttgtttaagccactatgatttctgggctctgttactacctcccaaatcattgggatgagaagcatgaaccactgtgcctggttaattacatagatatttacatatctactatcttaaaacggtgtccttttaagaatttcaaatgatgctttatagtttctaatatggtgcactgggtatactgttgatatttaaagttttgtgaatgataaatttccctacttcagtagtgccatagaattaattgattcttgtatctgaaatttaatgagtgcttatgaagtatgctggactgtgctaggttctgacagcatttgaaaagaagtttgacatctgcctgtctgtccccttttggctgcctatgaggtgtgtaagatggctgcaatttgaggaggcatcctttgttcctgaggatagaaggtgcattgtggagtagaaagatacaggaactataggcgatgccacaccaactctgtgccacttatctccagaattcctgtacagaaaagaaaagtacacttttatcttgtttaagccactatgatttctgggctctgttactagctgccaaatgcaaatcttaacagatacagaagtccttgaggatttttgagcaaggaactgactgtaaaactggtggctctgcaagggacagatttggggaggggggtgttctggagaatcctaagagataaagttggcttggtaggt

SEQ ID NO: 174777 - DNA, 152 bp, Homo sapiens
gcaaatttgggcaatgaacatatttctcatgagctcctagtaataaatcttaaattaaactaatcacataagtaaagggagaacctagtagctgaagtacagaaacatacaaaatttctccccacagactacaaagttttcaatagaggtaa

SEQ ID NO: 174778 - DNA, 816 bp, Homo sapiens
ctatgggcacccaccactacacccagctaattttttgtatttttagtagagatggggtttcactgtgttagccaggatggtcttgatctcctgaccttgtgatctgcctgctccacctcccaaagtgttttatttattttaaaggcatgtatcactctctgaaaattagcttctttcttctttttccttgttatcatccatttccccgaaccagaatagaagttcctgaggccagaacttctgtctctctgcccctcactatgtgtctctggcacataccccagtgcctgcctgctctaaagtaaaatcttagtaaatattactgttgactaaataaatgaataaatcccttttaatgccctttggaagttgcaagtaaagaataggatccctttttaagattacacttttggctattgatctgtgtgtctggaacaagatacagtttgaagatactaccatgggacatgacatcagttgagctgattaaggttttagtaataattacaggcgtgagcacggacgcagcagcaagtggttttaaatgttcatatagaaaacagtgaaggattagggtgaaaatatatgagcaggtgactttgaggtttactgaaatagccaattgtgatggtgttagactatggtgcagtaaaactaaaaaggtagtggcagaatggttcctgctagcaggaaagcttcatcttcattgagtaccaagacaggttcaggggtcctttgagggtcgcaggttggaatttcagttctcagagaagagctcttgtggcgggtgttggcaataaatgattttatgccaag

SEQ ID NO: 174779 - DNA, 543 bp, Homo sapiens
tatcagttatattcaggggctatatgaatattatttttcatataatgtggagaaagtgtactgctatgacaagagggtaacatgggctcctttctgacatacagataatgaggccatatctgttgatttgcctggaatattccttagctcagtattttaaaagccttattatctctgttattaaagtagagggaacccacgcctaagagcaattctttctgctgttggccatactaaagtaaatagaaatataatgagaccattatggtcattaatttgctgccaatctaagtagtggttatttttggatagagagagggttaaaatcatatttggtggacacaaatgatttaattttaatattacccactttataaggttcataatttccatcccagatagagaaaattgtatttatttttttatccacagtttctagtacattcctgggtatagcagttgttcagtatatatttggtataagaaaaactaaagattaaaaacatgtaagtagtacagtgccaaacaacccctgatactcta

SEQ ID NO: 174780 - DNA, 332 bp, Homo sapiens
aaaaggctgcatgacccataggctctcctcctccctcctgtggggcatgtgggacgtgtgggctgggacgtgtggtttaaaggtctggaagttaaaggtctccctccctggcgagccagctctttgttccacatcctcaaggaccctgacttcagcctattgttccccctgctgacacagaggctccaagttcctctctggatttgctctaggggggtggggggtcctggtgttggccgtggaggctggggatttgtgcatacctgcttattaaaagtcactcactcattcagagaaaaatgctgttttgagacaccctcttgcatgtggga

SEQ ID NO: 174781 - DNA, 262 bp, Homo sapiens
aaagaaaaggcaaatatttaacgatgtgatggatatcccaatacactgatttctttacaaattatgaacatgttaaattatcacatgcacccccaaaatatatatgtctgttacgtatcaataaaaaattttaaaaatctaagaatttactttgaagatataactattaaaatatatttgaaaatacatatgcacaagataacctgctgcaacatttttataattgcaaaatactggaaatagtctgacttagaaacctaca

SEQ ID NO: 174782 - DNA, 407 bp, Homo sapiens
tacgagaatcagtgtcttgtaggacgtaagagcaaaaattcaataagacctcaaagaagactggaacaggctactaaaaagctatcagaaaccaagctgtgccttctctctacctcttgcctctgcttttctctgcatgtctgcatcattccctcccattagtctggcagaataatatatgtggcagaaacacataggtttggggttgacatattacaagttcagtcagtcagagagaatgaatctctccttctcttggggagacataatctctgatgtagccagacaacattttgtggatatttacctatggtcatgggagcagaatcacatagcagaaatgtgatgactgaaaatcccatcctgtgctaggttgagcagatgcccaatagcaaccgttaatagta

SEQ ID NO: 174783 - DNA, 350 bp, Homo sapiens
gtgtgataatagctcactgcagcctcagtaattgtagcttcaatctcttgggctcaaacgatcctcctgcctcagcctctggagtggctgggactacagatatgcacttccacacctggctaatttttttcctttttagtagagacaaggtcttgccatgttgcccaggctggtcttgaactcctgagctcaggagctccttggcctccccagttcctgggattaaggcatggggcactgtgcctggccaattttccgtatgttagtttaactgtaaagaatagtcttttaaatcaatgtgaatagaaaagtgtcaaataaactgatagtgtacagttgtaattagaaag

SEQ ID NO: 174784 - DNA, 198 bp, Homo sapiens
cagagtgagactccgtctcacaaaaaaaagaaaaatggtgttcacatttaccagtgtaacaaccctgcacatcctgaacatgtatccctgaactaaaaataaaagaaaaattgtgctcaaaaaaggggtggaggggggttgtgtgtggaagagtaacccaagaatcagaggtcatttacaacattatttcatcctagg

SEQ ID NO: 174785 - DNA, 388 bp, Homo sapiens
aattaagggacaagatgaatcattttggtagagaactggaaactataaaaacaatcaaatggaagttatagaactgaagcatgtgatcatcgaaattaaaagctcaatggacagatttaagaacatatagatcagaaaagagaatggctaaattttaatacagggttaaaaaagtccagacttaaatatatagagaaaaagatggaagatactgaaaagagcataaggcatacatggaaatacagagacaaggctcactgagacaagacacacacacacacacacacacacacacacaaagacacatgcaaaggcacacacatatatgtagtcccagaaggagagagaagatggaatggcatagaaacagtatttaaagggattatgg

SEQ ID NO: 174786 - DNA, 328 bp, Homo sapiens
agggcttggctgcctgcccatgggctagtatgtccatcactcagtcctagtaggtgcacagagatagagttttatcaaaatcactagcctcagaatcacaactccgttgaatcctgctcagggctgcacagagagtagtgtggcgtctggaggcccatgggcttcagttagctggtacagaagctcggcaggcctggtgggggttccgccatgcttgttccaggaccacagatggacctgcctcccagactcgctttctgacctccactggctctagacacgggccgtcttgacccagcattctgcttttgaccattcaaacttaaca

SEQ ID NO: 174787 - DNA, 380 bp, Homo sapiens
cggagatgcgggactgggacagaagaagtgaggctccggtggggcaatcttcaaggatcctcaggtcacacatgctcttgagcttccaaagtaaacctccctggtagtttaccagataggtcttttgtttgagttaaagatagccaaactcaaatagcagcaccatgtaaaataagccatgttcttggatttgttataaaagtatgttgaaaggaggaactcctggatgagaagaaaatatgctggatgtcaagagcctaaaagaggtgctggaaaggaagtatccagtgtggtccaatggagagagtgacctgagaatgagagcacagttcctgtttggtgggcagacaacagtgatcccataggcctcctaagcccga

SEQ ID NO: 174788 - DNA, 511 bp, Homo sapiens
tcattccccatgtgtactgctactgtttagccctgctcctaagccatattattcttaactaaaatacactttaaaataacgtggtcagcagggtttaacatttttacttccagcctcaactgttgtagcccatgtccagaatagtatttgttagatctcagatccatagggcaaaattgcagaaatattactaaaagtgagtatttgatataaaatattgtttctgaaaacgcatgttttaaaatattgatgagatgtcagtattgcaataggatagggaatgcattgttaaaaggatgcagtgtgacagtgtacaagaagctcagaatgtgaagtgaaatggtctagattagtcgttctctcccactaagttcctggaccagaagtatcagcaccacttggaaacttgtgaaaaattcagtcttgcgccttaccccaaactaactgaatcagagagtctaggggtgggatccagcaatctgtctgttaccaagtctctggccgactccta

SEQ ID NO: 174789 - DNA, 297 bp, Homo sapiens
tcagatagattttatgtaaaggataagttaacctaaggtaaagactatcagaattactaattattaaattcctaaggatataaaccaaatgacaacctgctattagataaaaacaaacataatgattttggtaaagagttactgaagatgcttctagtaggaaatatatacaatttctaactgaatgtcctattaccaacaattcctcctctgggcttggatagatttctgggcactggctttctcagtcataaaagtaaggagctaggtaaaatggcctcaagagtgcctagagct

SEQ ID NO: 174790 - DNA, 418 bp, Homo sapiens
ctgcttggtttattatactaactctaaaacctttagatatttacaccattattattaaattacctctgtacacataccacgtatcaataaaaacaattcttcacatttcttgaaagattgaaagtatcacactgcacatcttaatagatatgaacattcaagtgaaattgagattttcagaaagattgcgaaaaacagtacacacccacaatgttattctcaagatactgaaaatggtgctcactgacgttacaaaacctattactttttaaaaactcaccatgtctgatttttgtatcacagtatgtaaaacgtacagataaaaatatgacttgtgactctgccaataaacatgatctcttttaacattcatactgtgtctataatttttgttatttgacctagcaaacctaacctc

SEQ ID NO: 174791 - DNA, 575 bp, Homo sapiens
aatagagggaccttgtaggaggaagggaactgcattggtcaaagatgacagtggcctgagcagcttattgggtccctgagaccccagcctccccactctgataaaaggcttagttaatgtcatcaacaggacagagatagttgtatatgagggagctggtcagaaaggagaaagtgatgtaggggctaatggagaggggaagaaaatcatttccatccacttaaaagcttctttgctaatattccttcctgtttctccagtccataggttacccaacttccttttaaacccacactattgagccacctacctctccttccaggcttacagaacgttctagagttttcagcctcagatccacaccataggaagtgcttctgtagcatctgttccagtatcccaggtactgaaaggtcatccaggccaacctgatggtcctattaaagagaaaactaggactcagaaaaggaatgtgacttaaccaaggtcacacagtgagtcattaacacagctagggtagaaacctagatctgactcccagcttagtgctcttttcaggtcacccctcacaacca

SEQ ID NO: 174792 - DNA, 304 bp, Homo sapiens
ttcttgtgctgataatgatggtaatggtggaaatggtgatgatgatggtgttgatgatggtgatgataatgatggtattggtggaaatggtggttcttgtgctggatgcccctcccccggaagttcgataggcttaagcagattctagccgaagaatctgcgcattctggggttgggacgctaggccccggtggcatgggtttgcgagtgggatcttccgatcattgggttgcacagttccgtgggaaaagcacagttttcccagctgggtagcgcgctcactcactgcctcccttggctggcg

SEQ ID NO: 174793 - DNA, 408 bp, Homo sapiens
atacatagtagaacccacatacattttatgacttatgttaaacactactatttattactataaaacaattcaccacaacatagcaatgcaaaccaagcttactgaaaatactaaatgtggttattctaaattacagctcttttgcaaaatttaacttaattttgcaaaaatcaggcattcatgctgtttactcatatataaatcaccatatttcctctccagtaatgtggatactaactttgtcacttgtgttttctgcaaagagaaaagtattttaaaatattactaccacatcatttttttttaatcttccaaggccaggttcttcaaagtatcacacaggagctgttagaagaaatttcagtccaacaaaattaaaattattataagatactaaaagacttacct

SEQ ID NO: 174794 - DNA, 659 bp, Homo sapiens
ggccagctttctcatttctcccacaatgcagtttttataattggcaagccttgtttttacgttccaagcctggagtctttttccacaacattatagaagaccttgggcattctgagaactaagtagcttgctcttggcattgtctttgattgggccaggctttcaatgaaggaaaacacatcaggaagaaagttgctcccagggttgctgactgatcgcagagatttttttttttctttaccacttttctttgtgtttggccaggtatagagtgagggtggggggtggggaggcctctcctagcagactgagcttttctgcaccttaggctaaggctgagtggggccagtcctctcctggccatctctgagacttgactccccactacagaggagtacaggggcactgggcatttcttccttgtgagaaattttcagctcccgtcagaatgaccttccaccaaaccctttgcttcttcccgtcataaagttggaagaagaaaaaagaaaagcggttcgtggtatgtgggcaggtaaaatgttaacaactttgctataatccatgttcagttcagtagacttggaacagcatgaatttcgcaaagtgaaaaactctggcttcctctgtagacgcattgctctgcaatctgaaaactagca

SEQ ID NO: 174795 - DNA, 683 bp, Homo sapiens
tattttttagtggagacagggtttcaccatgttggccaggctagtgtcgagctcctggcctaagatgatctgcccacctcggcctcccaaaatgctgggattacaagtgtgagccaccaagcgcccagctatagtggtttttgtattcatttctgccaatataacttagtttcttacctcttaggtatattattgtcatagcctgatagccagttttcctgtctctagcctttagctcttatagtctgtcagcttagagtattcatcctacatttatcacttacattttgtcatgctaaattcagacttgaaaccctttggttttccccactatctacaaggaaaagctcagactctcttgtctcatttaaaggccctctgtgatctgactgctctccatctttccaattcattttctggtttcctgcatgagcccttatgttcaagctatgccccttgaacaattgcttcttatgttctaccctgttttatccattttgaatggcttcttcatctctgtccttgaggggcccaagttagtgcccaagttagtgactgttgtgacactcactgttgaccgctacatgcagaagcttttctctcctattttcctctcttacctatatatgggcattctacttagtattctccatgatgccagttgcctttccatcatgatttcc

SEQ ID NO: 174796 - DNA, 219 bp, Homo sapiens
ggcctcactgggtaagcctaatgtcattcctgcatttatttaatgactcaggaagtcagtcttttttttctttttttaaattgaggtaacacaggacacaaaagtcaccatttaaactattttaaagtgtccaatttggtggcttttcgtaggttcacagtgtagtacagccatcaccactgcactccagtctgggtgacaagagagagaccccatctc

SEQ ID NO: 174797 - DNA, 440 bp, Homo sapiens
gcaattgagaacaagtgttcaataattccaaagtttgtacttccaaatttgtaaatctatacatctgtattattctgtatgtttactctagcctgtgacatagagccagagtgaagattgctaaggtgccagtcctgctcaaatttcaattagcagcaagtcctaaggtactcagggtcttagaacccgttggtttgttttggagagagaccacgtacaaacttagaagagcggctttcacttctctgtttcctatcagcaatccctcagctattcactcaagagatctctaaggtcagtttctggcaggaacatcccttcacactcctccaacaatcagtcattcacaagtggccattattttaatatgagcacatatacctatgcgccaagatgattacagtctgcaagcatagccatgttttcctatttcctttgta

SEQ ID NO: 174798 - DNA, 190 bp, Homo sapiens
ctcatctttactcatctttagccttagccgagatgtctcaccccactctctatgatgcaacaagaagcccctggggaacgtttcagtcccagtctgtactattgtcatgtgctcatcacagtctggatgtctttttgtcacttccagctggatctaccatgaaagacgtcagagtccaggaagagagact

SEQ ID NO: 174799 - DNA, 1398 bp, Homo sapiens
cgggtaggactcttgggccctgccccacctgccccttccagtctccgcccaggtcaggacggcaggtggccccagcagggctggcctgagatggaggaacgcggccccgacccgggctatggggagactctggatgtggcggtggatccgctgacggggctttgggatgtgattatttcctgggggctgacggtagcccaggagcaccaagacccagctctgccttccgcctcccacggggcctctcctctgcaggaggccatacaaggactgcacggaaggggagcggccccgcagggagggggcgcctggcagcccgcccgccgcagcagcctgcaaccccgcccccaggcgcagtgcgcgccacagcagccctgccagagcccgtgtgacacagctgccggcatgcccgggcacgctgcccagctgggctgggggaggggcgccgggccaggagccgctgaatcagctgcacccggacggccccgcctgggcaaggatgctggtgcggcggggcgctctctcttttgggaaccgtcaggaggcgcgccaggcggtggggtggggggtgtttctggactgcggcctctgcagcctgctgcatgggaagtgcggctcaccggggctgggtgcagggcagcccccgcctccgagggcatgagcggaggcctgcagggagggcctgggcagagaggggccctttccaaaggagacccataaggaagaagagaaacgcactggcctctgcagatcgaagcacgtttgtctcccccagaaaacgctgaatcagcactcacagcactgccagggcccgcgccctcctccgatcgcacgctggaggggacaggcccttccaagatcacggagcatcaatatcaccatcgacgcagcggcaccgggggagtcatgctctggtctggagtgggggccgcgcctggccctgccgtccttcctgctgggggctgtgtttggagccgggcaccttccccctcagcccctgctgtcctgtcctgccccctgcggaggggcgggaggtggaggacattcctgtgtgtgtgcgtttggggtggttttgcctgtggaggctgcacatgggggctctgacggggcagccttccgaggccaccctgtgctggggatgggacagcacgtggcccatcttgaccgagcatcttagatcttgaaatccccagcaccacccccttccagccactgcctgcctctgctggctcctcagcttggattccacttttcagcaacagagacccccggtctggtgcccaagctggtgtccccgtgtggtggacgacggggaaaggggggctctgggagccactcggcacaatccccctgggccaggcacagactgaaaatcagaccccactaagtcaacagccc

SEQ ID NO: 174800 - DNA, 457 bp, Homo sapiens
gttacccaggtggacatctttggggccacgtgttctgcccgctgccaatcgacggaatagaatcgagagtcaatgaagtaaactcaggcatggatggctcacacctgtaatcccaacactttgggaggctgaggcgggtggatcacttgaggtcaggaattccagaccagcctggccaacagggcgaaaccccgtctctactaaaaaataaaaataaataaaaaataaaattagctgggcgtggtggcacatgtctgtagtcccagctactctggagactgattattatggtatttagtcatctcctctatcattcgcaacaaggacccatcagctctttcatacaaaagccatgctggagaccctgagatgactcagacacaagtgccagcctaagggtggtgagggaaacacacacacacacacacacacacacacacacacacacacacgagcg

SEQ ID NO: 174801 - DNA, 135 bp, Homo sapiens
atagtacatgtttatcctccagtgtgccataccccatatagtgagatgagtcaataataaattatttcagcaaatgtttgagtacttactgtgtgccagacactgtttagtggtgagcaaaggtggaaataaata

SEQ ID NO: 174802 - DNA, 509 bp, Homo sapiens
gtaagtgtttgctcactttgcacttctctttatgcctttggtgatgtggctcagttgctgctttgaggtttcagatcacactttgttatgagtacaagtttaattccagctagtgttatgacagtgcagtctttggacacagtgggaactcagtgtgagaaccatattagtaacaaaggattgggcagatataaaaagtagttttgacagttaaatttagtggctgtattggaatttagtagtctctgaaaatactaccctcttttctctgaaacagaaaaatctgcttatttgattcgaggagatacacacttaaaacttagttttgaaaacgtgacacaaaatacattaatagaatgttacatacttaatttacttatagtaacaagtagataatgccttttaaaaatcataaagatttgtgttttaaaaaaaatttttaatctgataatatggaatatgtctattttctgatttgtgtaattcaaaatggaaaactgttgtttttt

SEQ ID NO: 174803 - DNA, 507 bp, Homo sapiens
tcttccccattggtaactatttttatcagttttcagtttatccttcagttttttaaaaataagaaaatatgtacaaatattcaaaatttccacataacaatatattctacaggtaattccatagtagtacctagagcttttttgtggaggtttttaaattttttattttatttattttgagacagggtctcactgtcacccaggctagagtgcagtggcacaatcatggcttactgcagcctccacctcctggggcttaagccaccctcttgcctcagcttcctgagtagctgggactacaggtatgtgccaccacacccggctaatttttgtagtttttggtaaagacaggttttcgccatgttgcccaggctactctcgaattcctgagctcaagggatctgcccacctcagctggccaaagtgctgggattacaagcatgaagaactgcgcccggcttttgtttcttagagagacatttgtatatactagcagaggtggacact

SEQ ID NO: 174804 - DNA, 563 bp, Homo sapiens
atcaaggcaaggcctaccagtatatgtcagtgcctggggcagtggcactcctagtgccgtattactcttagtatatgaggtatagatgcttgtaacatagcaggggagtcaagaatgggagcactggtgtgcagagagtcagagaagctttagggttgtggcagggtttagatcgctaaggcagctgagccagtgcccagagcctgggaatatgcaacacaagcgtggctctgggtctgtagtgtgaactaaatggctatggcaaaatctgtagcatcttggacatgggtggaccagttgcagccacagaacccagtctgaagcgtgggttctcatagattgtccatgcctctggggtcagagcatgaacagggttgggagagggcagctcctttcctaatgtggctcaagagtggccaattcttttggagtagcagaacaacatgtgtttgacacttttccttctctgtaatgaggtacatgatttaacacactgagtatctttaacatatatacacatttgtatatcaaccacagatctttgactttagtgtaacatggca

SEQ ID NO: 174805 - DNA, 422 bp, Homo sapiens
tcagtcccacagcgacccctggtggtcgcttcaagaagggcatcaaaatgctcccccaaagcacggaacaaacaaagccaagaaggggaagaagcccacagccccgaaagggtgggcaggagggaggctccctccagccagggaaggtggcccttcctcaggtactagagaaaatactacctgggacacctacagagacccagctaagagggtgactagctctgctgggcctggattcaagcctgagccccccgctcaccagctctgcagcctcagccagggcccttcacctccctgacctcagtgtctacttcagcagaacctgtgggtatatgcctacctcataaggttgtttggaagatcaaggagataatgctgaaaaaactgctgcacagcagtgacacgctataaagggctctcta

SEQ ID NO: 174806 - DNA, 105 bp, Homo sapiens
taaaggctgcggactgtgctactgccccttctgatgccccctcctctacacagcaatcattcagcgtcccttagtcactccggacagcgacaggccccgcggccg

SEQ ID NO: 174807 - DNA, 452 bp, Homo sapiens
gcagcatgatttcctatccttttctcctctttgcagctagcatatgtctaactatgaagtccaaggcaaaaatgaagaggtcagtagtggatattggatgggactgattcctaaataagagtatctttgatttctctttaagattatatggaaactgagcatgtgtgaggctgtgaggtctgaagctcaaaactaacactaattgtttaggggtaattctaacctactattttgtgcaaggtctctggagtctggctgcctgggttccaatctcagctccaccacttggtacctgtgggatcttgggcatgtcatgtaagcattctcttcctcagtgtcttcctttttaaaatagggtattggtaatatcgtcacagggattaaattagttgatactaaagttcttagaacagtgcttgacacagcataggcaccaagtgtttgttatggtt

SEQ ID NO: 174808 - DNA, 683 bp, Homo sapiens
ccatcctggctgaactttggataagatctacgtttgggattcttcttggtgatggatgatgcctagaccagccccagacaccctcccaagcctaagctcccctctcctgttctgacatccccatcccaccaggaacccaagcttgtggccatcgtgccaggaggacttcttccaggttttagtatagcctgagtgacctctaggagtccttggacctgagctaactcctgtacaattttggccggttgtctggttaataaattaacaattggtaatgataacagctagccaacattgttggttatatgccagccactaagtcctgcagccacatccaaacatcttcaccccacaggactagaggagtcactgaccctgactgctgggctcctccgatggtcatgggcaacaaccaaatgcaaagcttggtccctgatggacaccagtctgaagaaccttttctataagaatctcctcctgctctagactgtgcgcatcctaacggcagcagcctgcctgtcctgtgcgccactgtgttcccagagtcctcagcaggccctggcccacctaggtgctcactgaatgaacacacaagagaatgaatgtaaggccagctggtgggacagtgagcgtctgcctgcacaatgaggctgcccaggggaggaaggtaccccctacatgtg

SEQ ID NO: 174809 - DNA, 208 bp, Homo sapiens
ttttaagcaaacacacatcctctctgtggcaccatcactatccaagaaatagcagagtcaggcggggctagttggacgccctctgatctatttatttttcagcgtctgcttcataaacccttggacatccacctgaattttccttattgctgttaacctcatcttccaattacgcaaaatgtttcaaccaattagccccttgttgcag

SEQ ID NO: 174810 - DNA, 720 bp, Homo sapiens
aactcctgacctcaggtactccgcccacctcagcctcccaaagtgctgggattacaggtgtgagccaccacgcctggcctgtttgacctttataagatcaatttttttgttcacaagcatttctttactcatagataccatttttataacttatatgagacgcatttaatgtaatcatattactttcttatattagaagataggatttcttctgatgtatcgaagttactttatacttcatatgaagtcattaggaggtgaattattgccaattcaatgaattatttatgagtattaggggaatgtttttgttatgctgcttttaatttggaaagcagcatatcactcaaactatagtaattcacatttttccatttaactaaaaatgtctcgtaactactatgccacaagaacaagcatggatacttatttaaccagccaagactatgcatttctaaatatttatttttttcggttatccgtagacttttccttttgaaatccaacgatctgtatcaaccacgtcttcattttccttttcctgtttgtcttactctccccccaaaaagagtcagtttcctgttttctcaatttctcagtttaaaattagagccctatggcaggtgccatgtacagctgcaaaggtggcaagaagccctgagaaagctcaagaagcaggtcaagggggtgggtaaggaagatgggacgttcaagcagaaa

SEQ ID NO: 174811 - DNA, 461 bp, Homo sapiens
ttttaaatcactatttaaaattgtcatcattctcagataacataagcgtattgagattctatcagaaatatcaaatggcctcatggttaaggacccgaaaggtttttctctgagacaactttgtgcggtattttctgtgaatcccacagctggggaaaggaagggagtaagccgaagggttttcagatgtatgctagagtgtctttcatgaaataaaatgctgctctagttgtcagctgtttttttgcataccattgcttctttaagttatctttagattcccagtcttgaatttgaagagttttggggagaaggtagcagaaaacctaacgttttgtttacatttcatttgttgtatttagtagtagagctggtctaaagtaaatattaccttctcatttttgtgaaccttcattatttttacttggtaagttaaatgcaactgcgaaatcagtactcct

SEQ ID NO: 174812 - DNA, 981 bp, Homo sapiens
tgcctggctaattttgtaatttttttgtagagacagggtctcgctatgttgcccaggctggtctcaaactcctggactcaagcggccctcccgccttggcttcccaaagtgctggcccgtgagcctgtgagccactgcgcctggctaccttcttttgaattcccattcagactgtgtgttgctggtacatagaaaaacaatggatttctatgtatcaagtaaccttgtaaactctcatattaagtctaataattatgtttgggttctctttgtggattctttttgattttctgcgtacacaatcctatcatctgcaagtaatgaccattttgtttcttctattccagtctttttagctttgatttctttttttgagaggagactcgcttgaacccgggaggccgaggttgcggtgagccaagatcgagccattgcactccagcctgggcaacaaaagcgaaactctgtctcaaaaaaaaaaaaaaaaaaaaaaaaaaagacgccttgggggggcttccccggggttcccattttaaggttttggttgtttggccgggggagccttccggaaaaattggttttcttcggattttgagaaggccccccccctttcccaaggggtgcccttttgtggtggactttttttttaaaagggtctttttccgtgaagtgtgcaaacaaacaaagagccgacagactacacatactaacgactttaaccagacacataactagacgcagtatgaaaagattactacacataaaaaaaagagggggcgcggcgccatacaattatcatggcggggcagcatacacacacccattgttataagaagccccctagagtgattaaaacaagccggacgggtaaaccagggagggaaacacctgtttctggaaaccccctgtggtggagtgcccccagaatggccggataaatgtgttttaccgcctctcgaggttagtactcctgcatctcta

SEQ ID NO: 174813 - DNA, 1061 bp, Homo sapiens
tgcctggctaattttgtaatttttttgtagagacagggtctcgctatgttgcccaggctggtctcaaactcctggactcaagcggccctcccgccttggcttcccaaagtgctggcccgtgagcctgtgagccactgcgcctggctaccttcttttgaattcccattcagactgtgtgttgctggtacatagaaaaacaatggatttctatgtatcaagtaaccttgtaaactctcatattaagtctaataattatgtttgggttctctttgtggattctttttgattttctgcgtacacaatcctatcatctgcaagtaatgaccattttgtttcttctattccagtctttttagctttgatttctttttttgaggcagagtctggctctgtcacccaggctggagtatagtggcacaatcttggctcactgcaacctccgcctccctggttcaaaggagactcgcttgaacccgggaggccgaggttgcggtgagccaagatcgagccattgcactccagcctgggcaacaaaagcgaaactctgtctcaaaaaaaaaaaaaaaaaaaaaaaaaaagacgccttgggggggcttccccggggttcccattttaaggttttggttgtttggccgggggagccttccggaaaaattggttttcttcggattttgagaaggccccccccctttcccaaggggtgcccttttgtggtggactttttttttaaaagggtctttttccgtgaagtgtgcaaacaaacaaagagccgacagactacacatactaacgactttaaccagacacataactagacgcagtatgaaaagattactacacataaaaaaaagagggggcgcggcgccatacaattatcatggcggggcagcatacacacacccattgttataagaagccccctagagtgattaaaacaagccggacgggtaaaccagggagggaaacacctgtttctggaaaccccctgtggtggagtgcccccagaatggccggataaatgtgttttaccgcctctcgaggttagtactcctgcatctcta

SEQ ID NO: 174814 - DNA, 448 bp, Homo sapiens
cagactctgtggtcctgagcggcttgtgggacccgctgagggcgtcagagccaggaaggggagcagccctgggtgactcaggcaggcagcaagaggcacaacctgaacaaagaaacgcaactgatgcgtggctgacactgccagcttatggccatggtcccccaggatagcaccaaagccactttcctccaacacatccgtgaggaggatgccctgggcgctgtgggcctggccggctccctcatgccctgagcaaaggctgttctggaagaaaagcttccgcttgctgccctgctaggaaagtctctgtctccacaaagctcctgcagactcggagcaaagcatcaccaacactgtctgggttgacagcgacataggccggaagccctgcagagcaaaaacaagagaatttagcattctcaccatttccattttgtttataaaggca

SEQ ID NO: 174815 - DNA, 414 bp, Homo sapiens
agtgtagatacctcttttgagaagggtagaggtgaacaaagaaggtggtggtggctgaagaaggatgtggggtgacaggaggaattgtttttggacaggagatgtacaaatgtgttctcatgctggtggaaacagtgcagtagaaagggggaatcgggggttcaggacagcgatgcagaggccacgaagacaggaggggcgtggttcaggcaggggccccgtagaaaacagaggacatcttcaaacaggggaaatggaagacggttcaataaagggactctttaccaagccacaggcaggatgcagggacatcccaaggcagagaggagtaccccaggcctgaagtcttgagatcacagggtcatgagagcagattcaggaacctggacagaggtggtcactgccagccgtgat
